(19) United States
(12) Patent Application Publication
(10) Pub. No.: US 2024/0182876 A1
(43) Pub. Date: Jun. 6, 2024

(54) Engineered Terminal Deoxynucleotidyl Transferase Variants

(71) Applicant: Codexis, Inc., Redwood City, CA (US)

(72) Inventors: David Entwistle, San Carlos, CA (US); Stephanie Forget, Redwood City, CA (US); Michelle Li, Millbrae, CA (US); Niusha Mahmoodi, San Francisco, CA (US); Ryan Reeves, Redwood City, CA (US); Ljubica Vojcic, San Jose, CA (US); Jonathan Vroom, South San Francisco, CA (US); David Watts, San Mateo, CA (US); Leland Ken Wong, San Bruno, CA (US)

(73) Assignee: Codexis, Inc., Redwood City, CA (US)

(21) Appl. No.: 18/485,855

(22) Filed: Oct. 12, 2023

Related U.S. Application Data
(60) Provisional application No. 63/379,439, filed on Oct. 13, 2022.
(60) Provisional application No. 63/499,770, filed on May 3, 2023.

(51) Int. Cl. C12N 9/12; C12N 15/63

(52) U.S. Cl. CPC C12N 9/1264; C12N 15/63; C12Y 207/07031

(57) ABSTRACT

The present invention provides engineered terminal deoxynucleotidyl transferase (TdT) polypeptides useful in template-independent polynucleotide synthesis, as well as compositions, methods of utilizing these engineered polypeptides, and polynucleotides encoding the engineered terminal deoxynucleotidyl transferases.

### CROSS REFERENCE TO RELATED APPLICATIONS

[0001] This application claims the priority benefit of U.S. Provisional Patent Application No. 63/499,770, filed May 3, 2023, and U.S. Provisional Patent Application 63/379,439, filed on Oct. 13, 2022, the entirety of each of which is incorporated herein by reference.

### TECHNICAL FIELD

[0002] The present invention provides engineered terminal deoxynucleotidyl transferase (TdT) polypeptides useful in template-independent polynucleotide synthesis, as well as compositions and methods of utilizing these engineered polypeptides.

### REFERENCE TO SEQUENCE LISTING, TABLE OR COMPUTER PROGRAM

[0003] The official copy of the Sequence Listing is submitted concurrently with the specification as an XML file, with a file name of “CX10-238WO3_ST26.xml”, a creation date of Oct. 11, 2023, and a size of 13,670,249 bytes. The Sequence Listing filed is part of the specification and is incorporated in its entirety by reference herein.

### BACKGROUND

[0004] Synthetic biology is becoming established in a diverse range of high value, high growth markets. From food and agriculture to therapeutics, diagnostics, and vaccines; tools such as gene editing, DNA sequencing and gene synthesis are being used to build value-added products with advanced functionality (e.g., cell bioreactors, etc.) and desired end products (e.g., drugs, chemicals, etc.). The barrier to widespread implementation of these technologies is the ability to efficiently synthesize RNA, DNA, and other polynucleotides.

[0005] In particular, silencing RNA (siRNA) therapeutics are a promising class of drugs that have the potential to treat numerous difficult to treat conditions in a highly targeted manner by binding to known mRNA targets (Hu et al. (2020). Sig Transduct Target Ther 5, 101; Zhang et al. (2021). Bioch. Pharmac., 189, 114432.) As these therapies become more common and are targeted at larger patient populations, the ability to produce large amounts of the oligonucleotide active pharmaceutical ingredient (API) becomes critical.

[0006] To date, short RNA oligonucleotides have been synthesized almost exclusively by iterative addition of nucleotides in the form of activated phosphoramidites, plus additional processing steps, to a growing immobilized nucleotide chain (Brown, T. Nucleic Acids Book. See at: www.atdbio.com/nucleic-acids-book (accessed 2022-10-10).)

[0007] Phosphoramidite chemistry has been developed extensively over the years to synthesize small amounts of DNA and for more complex therapeutic RNA syntheses but suffers from several cost and sustainability issues that are potentially limiting as API demand grows to triple-quadruple digit kilograms per year (Andrews et al. (2021). J. Org. Chem. 86, 49-61). Additionally, RNA synthesis using phosphoramidite synthesis chemistry is limited to producing short oligonucleotides of approximately 200 basepairs (Beaucage & Caruthers. (1981). Tetrahedron Lett. 22 (20): 1859.)

[0008] The phosphoramidite iterative methodology is multi-step and based on phosphorous (III) coupling chemistry that requires (i) coupling (ii) capping (iii) oxidation to P(V) forming phosphodiester or phoshorothioate diester (iv) deblocking of 5′O group. After chain synthesis is complete, the final oligo is cleaved from the support where deblocking of phosphate cyanoethyl group and nucleobases can also occur (Brown, T. Nucleic Acids Book. See at: www.atdbio.com/nucleic-acids-book (accessed 2022-10-10).) Washes with organic solvents at each step are also required. The phosphate cyanoethyl blocking group and nucleobase protecting groups can be removed in parallel to oligonucleotide cleavage from the solid support to generate the oligonucleotide product, or the cyanoethyl group can be removed under milder condition before chain cleavage, if required.

[0009] Many aspects of the environmental impact of the current phosphoramidite methodology and potential advances have been reviewed (Andrews et al. (2021). J. Org. Chem. 86, 49-61). Even at an aspirational high oligonucleotide loading of 20% mass final oligonucleotide to mass solid support, at least five-fold mass of support is required over the final product mass.

[0010] In addition to the high cost of mass support required to immobilize the oligonucleotide, the use of organic solvents and 5′-O-blocking groups entail additional waste and process inefficiencies. Organic solvents such as acetonitrile are required for solubilization of the phosphoramidite coupling partners, or dichloromethane or toluene for deprotection steps. These solvents need to be anhydrous to reduce undesired hydrolysis of the phosphoramidite partners and can come from non-sustainable sources, adding cost, sustainability questions, and potential supply issues to the process.

[0011] The phosphoramidite coupling partners themselves carry a required blocking group at the 5′O-position, the nucleobase nitrogen atom (in A, C and G), and the nascent phosphate. The most common 5′O-blocking group, dimethoxytrityl, has a molecular mass of ˜303 Da that approaches that of the heaviest native ribonucleotide fragment Gp with a mass of ˜345 Da. This protecting group requires energy, resources, and effort to produce and append, and then requires disposal when separated from the desired materials.

[0012] In conclusion, a paradigm shift in oligonucleotide synthesis is necessary to enable siRNA therapeutics by lowering environmental impact, improving economic efficiency, and increasing scalability. New methods of oligonucleotide synthesis are, therefore, of great interest to the pharmaceutical industry.

[0013] Template-Independent Enzymatic Synthesis

[0014] Enzymatic synthesis may facilitate production of high volumes of complex or long polynucleotides (>200 base pairs) while minimizing toxic waste. A variety of prokaryotic and eukaryotic DNA and RNA polymerases are known to naturally synthesize polynucleotides of thousands of base pairs or more. Most of these polymerases function during DNA replication associated with cell division or transcription of RNA from DNA associated with gene or protein expression. Both of these processes involve template-dependent polynucleotide synthesis, wherein the polymerase uses an existing template polynucleotide strand to synthesize a complementary polynucleotide strand.

[0015] The potential of template-independent enzymatic polynucleotide synthesis to produce defined sequences has long been recognized. One early report suggested using NTPs with blocked 3′ groups to allow stepwise addition of specific nucleotide residues (Bollum. (1962). JBC, 237, 1945-1949).

[0016] However, few polymerases are known to catalyze template-independent polynucleotide synthesis. These include polymerase lambda, polymerase mu, and terminal deoxynucleotidyl transferase (TdT), all members of the X family of DNA polymerases, many of which participate in DNA repair processes (Dominguez et al. (2000). EMBO, 19(7), 1731-1742.) Of these, TdT is known to generate diversity in antigen receptors by indiscriminately adding nucleosides to the 3′ end of a single-stranded polynucleotide in a template-independent process (Bentolila et al. (1995). EMBO, 14(17), 4221-4229.)

[0017] Others have published a method of polynucleotide synthesis using a nucleoside 5′-triphosphate with a 3′-OH position protected with a removable blocking moiety and, specifically, a template-independent polynucleotide polymerase, including a terminal deoxynucleotidyl transferase (U.S. Pat. No. 5,763,594). The blocking group, also known to those skilled in the art as an inhibitor or reversible terminating group, may include a variety of groups that prevent the TdT from adding additional NTPs to the nascent polynucleotide chain. This may include charged molecules, large molecules and moieties, or other blocking groups known to those skilled in the art. Appropriate removable blocking groups may include carbonitriles, phosphates, carbonates, carbamates, esters, ethers, borates, nitrates, sugars, phosphoramidates, phenylsulfenates, and sulfates. Other 3′ blocking groups are also known in the art, including 3′-O-amines and methylamines (U.S. Pat. No. 7,544,794) and 3′-O-azides (U.S. Pat. No. 10,407,721).

[0018] Although initially promising, use of 3′-blocked NTPs in template-independent synthesis catalyzed by TdT has proven difficult in practice, as TdT struggles to accept 3′-O-blocked NTPs as substrates. Further, wild-type TdTs have low tolerance for oligo acceptor substrates containing one or more modified nucleotides (e.g. 2′ modifications).

[0019] Additionally, synthesis of RNA strands present unique challenges due to the additional, reactive 2′-OH on the ribose. While protection of the 2′ position facilitates RNA synthesis, this approach reduces efficiency because of steric hindrance by the 2′ protecting groups and requires maintenance and removal of the protecting group (CB Reese. (2005). Org Biomol Chem 3, 3851-3868.)

[0020] Recently several reports have described template-independent synthesis methods that use modified NTPs with blocking groups attached to the purine or pyrimidine base, leaving the 3′-OH unmodified and available for additional rounds of synthesis. These base blocking groups may include a cleavable linker that allows removal of the blocking group after each NTP addition step. The cleavable linker may also be attached to a detectable label (U.S. Pat. No. 7,057,026, among others). A variety of cleavable linkers are known to those skilled in the art. These include linkers attached via reducible disulfide bonds, photocleavable, electrophilic or nucleophilic, pH sensitive, temperature sensitive, and linkers cleaved by enzymes. One drawback to using cleavable linkers is that, typically, some atoms of the linker moiety remain attached to the NTP following cleavage, leaving a “scar” that may interfere with synthesis of a complementary strand after initial template-independent synthesis of the primary polynucleotide strand.

[0021] Recently, modified NTPs with bases attached to blocking groups with cleavable linkers that are “scarless” and leave the nascent DNA ready for the next round of synthesis have been developed. In one example, the blocking group and cleavable linker are attached to the base via a disulfide bond. Upon addition of a reducing agent, the blocking group is removed and the remaining atoms of the linker self-cyclize to leave the nascent DNA free of any linker atoms (U.S. Pat. Nos. 8,808,989, 9,695,470, U.S. Pat. 10,041,110). Methods of using NTPs attached to cleavable blocking groups to synthesize polynucleotides are known, including using a microfluidic device or ink jet printing technology (U.S. Pat. No. 9,279,149). An exonuclease may also be used in a method to synthesize polynucleotides to shorten or completely degrade polynucleotide strands that have not successfully added an NTP after the polynucleotide extension step and prior to removing the blocking group (U.S. Pat. No. 9,771,613).

[0022] However, NTP bases with bulky blocking groups attached via cleavable linkers are not optimal for efficient synthesis of complex or long oligonucleotides. The large labels may negatively impact enzyme kinetics, and linker scars may lead to an unacceptable rate of misincorporation when synthesizing the oligonucleotide strand. Additionally, larger linkers and necessary deblocking steps may increase the cost, time, and inefficiency of the process as a whole, rendering these methods economically infeasible.

[0023] Recently, several groups have explored modifying the structure or amino acid sequence of TdT or other polymerases to allow template-independent synthesis using 3′-O-blocked groups. Efcavitch et al. describes incorporation of 3′ modified dNTPs by TdT in template-independent synthesis using a murine or bacterial TdT with substituted amino acid residues (U.S. Pat. No. 10,059,929). Other reports describe engineered bovine and gar (Lepisosteus oculatus) TdTs that displayed improved activity over wild-type TdT (U.S. Pat. No. 10,745,727, PCT/GB2020/050247). Similarly, a variety of mutations have been described to improve the activity of Pol X family enzymes (WO 2017216472 A2). Finally, an N-terminal truncation of the BRCT domain (or alternatively mutation of the BRCT domain) of TdT has also been described as enhancing activity in the addition of reversibly blocked NTPs to the 3′-OH of a nucleic acid (US20210164008A1).

[0024] However, no feasible methods of template-independent enzymatic synthesis of complex or long polynucleotides are currently known or commercially available, despite the recognized value of this technology and intensive research efforts devoted to resolving challenges in this field. Improved engineered TdT enzymes are necessary to enable template-independent enzymatic synthesis of complex or long polynucleotides or oligonucleotides of defined sequence using nucleoside triphosphates with 3′-O-removable blocking groups, with 2′ modifications, and/or with other modifications.

### SUMMARY

[0025] The present invention provides engineered terminal deoxynucleotidyl transferase (TdT) polypeptides useful in template-independent polynucleotide synthesis, as well as compositions and methods of utilizing these engineered polypeptides. The TdTs of the present invention are variants of a predicted splice variant of the wild-type gene from Monodelphis domestica (SEQ ID NO: 2). These engineered TdTs are capable of adding nucleoside triphosphates with a 3′-O-removable blocking group and other natural or modified NTPs to the 3′-OH end of a growing oligonucleotide or polynucleotide chain in a template-independent manner. After removal of the blocking group, additional rounds of NTP addition can be used to synthesize a polynucleotide with a defined sequence of bases without using a complementary template strand as a guide for NTP incorporation (template-independent synthesis).

[0026] In some embodiments, the present invention provides an engineered TdT polypeptide comprising an amino acid sequence having at least 80%, 85%, 90%, 91%, 92%, 93%, 94%, 95%, 96%, 97%, 98%, 99% sequence identity to a reference sequence of SEQ ID NOs: 2, 8, 16, 24, 36, 268, 648, 660, 882, 1100, 1336, 1348, 1596, 1654, 1830, 1950, 2008, 2254, 2514, 2524, 2638, 2804, 2812, 2956, 3174, 3222, 3670, 3674, 3796, 3870, 3918, 4266, 4442, 4654, 4850, 4856, 4904, 5002, 5028, 5192 and/or 5246 comprising at least one substitution or one substitution set at one or more positions, wherein the positions are numbered with reference to SEQ ID NOs: 2, 8, 16, 24, 36, 268, 648, 660, 882, 1100, 1336, 1348, 1596, 1654, 1830, 1950, 2008, 2254, 2514, 2524, 2638, 2804, 2812, 2956, 3174, 3222, 3670, 3674, 3796, 3870, 3918, 4266, 4442, 4654, 4850, 4856, 4904, 5002, 5028, 5192 and/or 5246 and wherein the engineered TdT polypeptide has improved thermostability, increased activity at elevated temperatures, increased soluble expression or isolated protein yield, decreased by-product formation, increased specific activity on NTP-3′-O-RBG and other natural or modified NTP substrates, and/or increased activity on various oligo acceptor substrates as compared to a wild-type TdT or other TdTs or template-independent polymerases known to those of skill in the art. These engineered TdT polypeptides with one or more amino acid substitutions or substitution sets are described, below, in the detailed description of the invention.

[0027] In some additional embodiments, the engineered polypeptide comprises an amino acid sequence with at least 60% sequence identity to any even-numbered sequence set forth in SEQ ID NO: 4-1960, 2004-3920, 4048-5466, and 5476.

[0028] In an additional embodiment, the engineered polypeptide of the present invention further comprises an N-terminal truncation of 1-156 amino acids of the polypeptide sequence relative to any even-numbered sequence set forth in SEQ ID NO: 4-1960, 2004-3920, 4048-5466, and 5476.

[0029] In an additional embodiment, the engineered polypeptide of the present invention is fused with a second polypeptide; optionally, wherein the second polypeptide has inorganic pyrophosphatase (IPP) activity (e.g., an IPP with an amino acid sequence selected from SEQ ID NO: 3942 and 3944). In one embodiment, the engineered polypeptide of the present invention fused with a second polypeptide with IPP activity comprises a sequence selected from SEQ ID NO: 5468, 5470, 5472, and 5474.

[0030] The present invention also provides an engineered polynucleotide encoding at least one engineered polypeptide described in the above paragraphs. In some embodiments, the engineered polynucleotide comprises the odd-numbered sequences set forth in SEQ ID NOs: 3-1959, 2003-3919, 4047-5465, and 5475.

[0031] The present invention further provides vectors comprising at least one engineered polynucleotide described above. In some embodiments, the vectors further comprise at least one control sequence.

[0032] The present invention also provides host cells comprising the vectors provided herein. In some embodiments, the host cell produces at least one engineered polypeptide provided herein.

[0033] The present invention further provides methods of producing an engineered TdT polypeptide, comprising the steps of culturing the host cell provided herein under conditions such that the engineered polynucleotide is expressed and the engineered polypeptide is produced. In some embodiments, the methods further comprise the step of recovering the engineered polypeptide.

[0034] The present invention further provides a method of template-independent synthesis, comprising a TdT or template-independent polymerase with activity on various oligo acceptor substrates and NTP-3′-O-RBG and other natural or modified NTP substrates, wherein the method may comprise an immobilized TdT or an immobilized oligo acceptor substrate or neither an immobilized TdT nor an immobilized oligo acceptor substrate.

### DESCRIPTION OF THE INVENTION

[0035] Unless defined otherwise, all technical and scientific terms used herein generally have the same meaning as commonly understood by one of ordinary skill in the art to which this invention pertains. Generally, the nomenclature used herein and the laboratory procedures of cell culture, molecular genetics, microbiology, organic chemistry, analytical chemistry and nucleic acid chemistry described below are those well-known and commonly employed in the art. Such techniques are well-known and described in numerous texts and reference works well known to those of skill in the art. Standard techniques, or modifications thereof, are used for chemical syntheses and chemical analyses. All patents, patent applications, articles and publications mentioned herein, both supra and infra, are hereby expressly incorporated herein by reference.

[0036] Although any suitable methods and materials similar or equivalent to those described herein find use in the practice of the present invention, some methods and materials are described herein. It is to be understood that this invention is not limited to the particular methodology, protocols, and reagents described, as these may vary, depending upon the context they are used by those of skill in the art. Accordingly, the terms defined immediately below are more fully described by reference to the invention as a whole.

[0037] It is to be understood that both the foregoing general description and the following detailed description are exemplary and explanatory only and are not restrictive of the present invention. The section headings used herein are for organizational purposes only and not to be construed as limiting the subject matter described. Numeric ranges are inclusive of the numbers defining the range. Thus, every numerical range disclosed herein is intended to encompass every narrower numerical range that falls within such broader numerical range, as if such narrower numerical ranges were all expressly written herein. It is also intended that every maximum (or minimum) numerical limitation disclosed herein includes every lower (or higher) numerical limitation, as if such lower (or higher) numerical limitations were expressly written herein.

[0038] As used in this specification and the appended claims, the singular forms “a”, “an” and “the” include plural referents unless the context clearly indicates otherwise. Thus, for example, reference to “a polypeptide” includes more than one polypeptide. Similarly, “comprise,” “comprises,” “comprising” “include,” “includes,” and “including” are interchangeable and not intended to be limiting.

[0039] It is to be understood that where descriptions of various embodiments use the term “comprising,” those skilled in the art would understand that in some specific instances, an embodiment can be alternatively described using language “consisting essentially of” or “consisting of.” It is to be further understood that where descriptions of various embodiments use the term “optional” or “optionally” the subsequently described event or circumstance may or may not occur, and that the description includes instances where the event or circumstance occurs and instances in which it does not. It is to be understood that both the foregoing general description, and the following detailed description are exemplary and explanatory only and are not restrictive of this disclosure. The section headings used herein are for organizational purposes only and not to be construed as limiting the subject matter described.

[0040] Abbreviations

[0041] The abbreviations used for the genetically encoded amino acids are conventional and are as follows:

| Amino Acid | Three-Letter | One-Letter Abbreviation |
|---|---|---|
| Alanine | Ala | A |
| Arginine | Arg | R |
| Asparagine | Asn | N |
| Aspartate | Asp | D |
| Cysteine | Cys | C |
| Glutamate | Glu | E |
| Glutamine | Gln | Q |
| Glycine | Gly | G |
| Histidine | HIS | H |
| Isoleucine | Ile | I |
| Leucine | Leu | L |
| Lysine | Lys | K |
| Methionine | Met | M |
| Phenylalanine | Phe | F |
| Proline | Pro | P |
| Serine | Ser | S |
| Threonine | Thr | T |
| Tryptophan | Trp | W |
| Tyrosine | Tyr | Y |
| Valine | Val | V |

[0042] When the three-letter abbreviations are used, unless specifically preceded by an “L” or a “D” or clear from the context in which the abbreviation is used, the amino acid may be in either the L- or D-configuration about α-carbon (Ca). For example, whereas “Ala” designates alanine without specifying the configuration about the α-carbon, “D-Ala” and “L-Ala” designate D-alanine and L-alanine, respectively.

[0043] When the one-letter abbreviations are used, upper case letters designate amino acids in the L-configuration about the α-carbon and lower-case letters designate amino acids in the D-configuration about the α-carbon. For example, “A” designates L-alanine and “a” designates D-alanine. When polypeptide sequences are presented as a string of one-letter or three-letter abbreviations (or mixtures thereof), the sequences are presented in the amino (N) to carboxy (C) direction in accordance with common convention.

[0044] The abbreviations used for the genetically encoding nucleosides are conventional and are as follows: adenosine (A); guanosine (G); cytidine (C); thymidine (T); and uridine (U). These abbreviations are also used interchangeably for nucleosides and nucleotides (nucleosides with one or more phosphate groups). Unless specifically delineated, the abbreviated nucleosides or nucleotides may be either ribonucleosides (or ribonucleotides) or 2′-deoxyribonucleosides (or 2′-deoxyribonucleotides). The nucleosides or nucleotides may also be modified at the 3′ position. The nucleosides or nucleotides may be specified as being either ribonucleosides (or ribonucleotides) or 2′-deoxyribonucleosides (or 2′-deoxyribonucleotides) on an individual basis or on an aggregate basis. When nucleic acid sequences are presented as a string of one-letter abbreviations, the sequences are presented in the 5′ to 3′ direction in accordance with common convention, and the phosphates are not indicated.

### Definitions

[0045] In reference to the present invention, the technical and scientific terms used in the descriptions herein will have the meanings commonly understood by one of ordinary skill in the art, unless specifically defined otherwise. Accordingly, the following terms are intended to have the following meanings.

[0046] “EC” number refers to the Enzyme Nomenclature of the Nomenclature Committee of the International Union of Biochemistry and Molecular Biology (NC-IUBMB). The IUBMB biochemical classification is a numerical classification system for enzymes based on the chemical reactions they catalyze.

[0047] “ATCC” refers to the American Type Culture Collection whose biorepository collection includes genes and strains.

[0048] “NCBI” refers to National Center for Biological Information and the sequence databases provided therein.

[0049] “Protein,” “polypeptide,” and “peptide” are used interchangeably herein to denote a polymer of at least two amino acids covalently linked by an amide bond, regardless of length or post-translational modification (e.g., glycosylation, phosphorylation, lipidation, myristilation, ubiquitination, etc.). Included within this definition are D- and L-amino acids, and mixtures of D- and L-amino acids, as well as polymers comprising D- and L-amino acids, and mixtures of D- and L-amino acids.

[0050] “Amino acids” are referred to herein by either their commonly known three-letter symbols or by the one-letter symbols recommended by IUPAC-IUB Biochemical Nomenclature Commission. Nucleotides, likewise, may be referred to by their commonly accepted single letter codes.

[0051] As used herein, “polynucleotide,” “oligonucleotide,” and “nucleic acid” are used interchangeably herein and refer to two or more nucleosides or nucleotides that are covalently linked together. The polynucleotide may be wholly comprised of ribonucleotides (i.e., RNA), wholly comprised of 2′ deoxyribonucleotides (i.e., DNA), wholly comprised of other synthetic nucleotides or comprised of mixtures of synthetic, ribo- and/or 2′ deoxyribonucleotides. The polynucleotides may also include modified nucleotides with substitutions, including 2′ substitutions (e.g., 2′-fluoro, 2′-O-methyl, 2′-O-methoxyethyl, locked or constrained ethyl modifications, and others known to those skilled in the art). Nucleosides will be linked together via standard phosphodiester linkages or via one or more non-standard linkages, including but not limited to phosphorothioate linkages. The polynucleotide may be single-stranded or double-stranded or may include both single-stranded regions and double-stranded regions. Moreover, while a polynucleotide will typically be composed of the naturally occurring encoding nucleobases (i.e., adenine, guanine, uracil, thymine and cytosine), it may include one or more modified and/or synthetic nucleobases, such as, for example, inosine, xanthine, hypoxanthine, etc. In some embodiments, such modified or synthetic nucleobases are nucleobases encoding amino-acid sequences. Nucleobases that are modified or synthetic may comprise any known or hypothetical or future discovered modification or structure that would be recognized by one of skill in the art as a modified or synthetic nucleobase. Similarly, the terms “polynucleotide,” “oligonucleotide,” and “nucleic acid” are intended to comprise any modified or synthetic structure that is now known or discovered in the future that would be recognized by one of skill in the art as being or having the function of a “polynucleotide,” “oligonucleotide,” or “nucleic acid.” An example of a modified or synthetic structure having the function of a “polynucleotide,” “oligonucleotide,” or “nucleic acid” is PNA or peptide nucleic acid.

[0052] As used herein, “oligo acceptor substrate” and “acceptor substrate” and “growing oligo acceptor substrate strand” and “growing oligonucleotide chain” and “growing polynucleotide strand” are used interchangeably herein and refer to any oligo or nucleotide chain or similar moiety with an exposed 3′-OH or equivalent thereof that may be recognized by a wild-type TdT or polymerase or an engineered TdT or template-independent polymerase of the current disclosure as a substrate for nucleoside addition or synthesis. In some embodiments, the acceptor substrate may be single stranded. In yet other embodiments, the acceptor substrate may be double stranded or partially doubled stranded. In some embodiments, the acceptor substrate may comprise a nucleotide chain consisting of 1-10 nucleotides, 5-20 nucleotides, 15-50 nucleotides, 30-100 nucleotides, or greater than 100 nucleotides. In some embodiments, the acceptor substrate may comprise a chemical moiety that is not a nucleotide chain but contains a free —OH capable of being recognized as a substrate by a wild-type or engineered TdT, referred to herein as a “3′-OH equivalent”. Exemplary oligo acceptor substrates are provided in the Examples.

[0053] As used herein, “nucleoside triphosphate-3′-O-removable blocking group” and “nucleotide triphosphate-3′-O-removable blocking group” and “reversible terminator” and “NTP-3′-O-RBG” are used interchangeably herein and refer to a ribonucleoside triphosphate or a deoxyribonucleoside triphosphate or a synthetic or nucleoside triphosphate composed of an alternate or modified sugar with a removable blocking group attached at the 3′ position of the sugar moiety. An NTP-3′-O-RBG may also include other modifications as described herein, including but not limited to modifications at the 2′ position, modifications to the nucleobase, and modifications to the phosphates. A nucleotide may also have a 3′-O-RBG, as is expected after reaction of an NTP-3′-O-RBG with an engineered TdT of the present disclosure and an oligo acceptor substrate.

[0054] As used herein, “oligo acceptor product” and “growing oligonucleotide chain” and “oligo acceptor extension product” are used interchangeably herein and refer to the product of a NTP-3′-O-RBG or other natural or modified NTP substrate and an oligo acceptor substrate, wherein a TdT or related polymerase has catalyzed the extension or addition of a nucleotide-3′-O-RBG or other natural or modified nucleotide substrate to an oligo acceptor substrate via reaction with one or more NTP-3′-O-RBGs or other natural or modified NTP substrates.

[0055] As used herein, “removable blocking group” and “blocking group” and “terminator group” and “reversible terminating group” and “inhibitor group” and related variations of these terms are used interchangeably herein and refer to a chemical group that would hinder addition of a second NTP-3′-O-RBG or other natural or modified NTP substrate to the 3′ end of the growing oligo acceptor substrate strand prior to removal of the removable blocking from the first round of addition. In some embodiments, the NTP-3′-O-RBG or other natural or modified NTP substrate may comprise a removable blocking group selected from the group consisting of NTP-3′-O—NH₂, or NTP-3′-O—PO₃. In some embodiments, the NTP-3′-O-RBG or other natural or modified NTP substrate may have a natural purine or pyrimidine base, such as adenine, guanine, cytosine, thymine, or uridine. In some embodiments, NTP-3′-O-RBG or other natural or modified NTP substrates may have an unnatural base analog such as inosine, xanthine, hypoxanthine or another base analog, as is known in the art. In some embodiments the blocking group may comprise or may additionally comprise a modification at the 2′ position.

[0056] As used herein, “template-independent synthesis” refers to synthesis of an oligonucleotide or a polynucleotide without the use of template strand as a guide for synthesis of a complementary oligo or polynucleotide strand. Thus, template-independent synthesis refers to an iterative process, whereby, successive nucleotides are added to a growing oligo or nucleotide chain or acceptor substrate. Template-independent synthesis may be in a sequence defined manner or may be random, as is the case with the wild-type TdT in creating antigen receptor diversity. Processes for template-independent synthesis are further described herein.

[0057] “Coding sequence” refers to that portion of a nucleic acid (e.g., a gene) that encodes an amino acid sequence of a protein.

[0058] “Naturally-occurring” or “wild-type” refers to the form found in nature. For example, a naturally occurring or wild-type polypeptide or polynucleotide sequence is a sequence present in an organism that can be isolated from a source in nature and which has not been intentionally modified by human manipulation.

[0059] As used herein, “recombinant,” “engineered,” and “non-naturally occurring” when used with reference to a cell, nucleic acid, or polypeptide, refer to a material, or a material corresponding to the natural or native form of the material, that has been modified in a manner that would not otherwise exist in nature. In some embodiments, the cell, nucleic acid or polypeptide is identical to a naturally occurring cell, nucleic acid or polypeptide, but is produced or derived from synthetic materials and/or by manipulation using recombinant techniques. Non-limiting examples include, among others, recombinant cells expressing genes that are not found within the native (non-recombinant) form of the cell or expressed native genes that are otherwise expressed at a different level.

[0060] “Percentage of sequence identity” and “percentage homology” are used interchangeably herein to refer to comparisons among polynucleotides or polypeptides, and are determined by comparing two optimally aligned sequences over a comparison window, wherein the portion of the polynucleotide or polypeptide sequence in the comparison window may comprise additions or deletions (i.e., gaps) as compared to the reference sequence for optimal alignment of the two sequences. The percentage may be calculated by determining the number of positions at which the identical nucleic acid base or amino acid residue occurs in both sequences to yield the number of matched positions, dividing the number of matched positions by the total number of positions in the window of comparison and multiplying the result by 100 to yield the percentage of sequence identity. Alternatively, the percentage may be calculated by determining the number of positions at which either the identical nucleic acid base or amino acid residue occurs in both sequences or a nucleic acid base or amino acid residue is aligned with a gap to yield the number of matched positions, dividing the number of matched positions by the total number of positions in the window of comparison and multiplying the result by 100 to yield the percentage of sequence identity. Those of skill in the art appreciate that there are many established algorithms available to align two sequences. Optimal alignment of sequences for comparison can be conducted, e.g., by the local homology algorithm of Smith and Waterman (Smith and Waterman, Adv. Appl. Math., 2:482 [1981]), by the homology alignment algorithm of Needleman and Wunsch (Needleman and Wunsch, J. Mol. Biol., 48:443 [1970]), by the search for similarity method of Pearson and Lipman (Pearson and Lipman, Proc. Natl. Acad. Sci. USA 85:2444 [1988]), by computerized implementations of these algorithms (e.g., GAP, BESTFIT, FASTA, and TFASTA in the GCG Wisconsin Software Package), or by visual inspection, as known in the art. Examples of algorithms that are suitable for determining percent sequence identity and sequence similarity include, but are not limited to the BLAST and BLAST 2.0 algorithms, which are described by Altschul et al. (See, Altschul et al., J. Mol. Biol., 215: 403-410 [1990]; and Altschul et al., Nucl. Acids Res., 3389-3402 [1977], respectively). Software for performing BLAST analyses is publicly available through the National Center for Biotechnology Information website. This algorithm involves first identifying high scoring sequence pairs (HSPs) by identifying short words of length W in the query sequence, which either match or satisfy some positive-valued threshold score T when aligned with a word of the same length in a database sequence. T is referred to as, the neighborhood word score threshold (Altschul et al., supra). These initial neighborhood word hits act as seeds for initiating searches to find longer HSPs containing them. The word hits are then extended in both directions along each sequence for as far as the cumulative alignment score can be increased. Cumulative scores are calculated using, for nucleotide sequences, the parameters M (reward score for a pair of matching residues; always >0) and N (penalty score for mismatching residues; always <0). For amino acid sequences, a scoring matrix is used to calculate the cumulative score. Extension of the word hits in each direction are halted when: the cumulative alignment score falls off by the quantity X from its maximum achieved value; the cumulative score goes to zero or below, due to the accumulation of one or more negative-scoring residue alignments; or the end of either sequence is reached. The BLAST algorithm parameters W, T, and X determine the sensitivity and speed of the alignment. The BLASTN program (for nucleotide sequences) uses as defaults a wordlength (W) of 11, an expectation (E) of 10, M=5, N=−4, and a comparison of both strands. For amino acid sequences, the BLASTP program uses as defaults a wordlength (W) of 3, an expectation (E) of 10, and the BLOSum62 scoring matrix (See, Henikoff and Henikoff, Proc. Natl. Acad. Sci. USA 89:10915 [1989]). Exemplary determination of sequence alignment and % sequence identity can employ the BESTFIT or GAP programs in the GCG Wisconsin Software package (Accelrys, Madison WI), using default parameters provided.

[0061] “Reference sequence” refers to a defined sequence used as a basis for a sequence comparison. A reference sequence may be a subset of a larger sequence, for example, a segment of a full-length gene or polypeptide sequence. Generally, a reference sequence is at least 20 nucleotide or amino acid residues in length, at least 25 residues in length, at least 50 residues in length, or the full length of the nucleic acid or polypeptide. Since two polynucleotides or polypeptides may each (1) comprise a sequence (i.e., a portion of the complete sequence) that is similar between the two sequences, and (2) may further comprise a sequence that is divergent between the two sequences, sequence comparisons between two (or more) polynucleotides or polypeptide are typically performed by comparing sequences of the two polynucleotides or polypeptides over a “comparison window” to identify and compare local regions of sequence similarity. In some embodiments, a “reference sequence” can be based on a primary amino acid sequence, where the reference sequence is a sequence that can have one or more changes in the primary sequence. For instance, a “reference sequence based on SEQ ID NO:4 having at the residue corresponding to X14 a valine” or X14V refers to a reference sequence in which the corresponding residue at X14 in SEQ ID NO:4, which is a tyrosine, has been changed to valine.

[0062] “Comparison window” refers to a conceptual segment of at least about 20 contiguous nucleotide positions or amino acids residues wherein a sequence may be compared to a reference sequence of at least 20 contiguous nucleotides or amino acids and wherein the portion of the sequence in the comparison window may comprise additions or deletions (i.e., gaps) of 20 percent or less as compared to the reference sequence (which does not comprise additions or deletions) for optimal alignment of the two sequences. The comparison window can be longer than 20 contiguous residues, and includes, optionally 30, 40, 50, 100, or longer windows.

[0063] As used herein, “substantial identity” refers to a polynucleotide or polypeptide sequence that has at least 80 percent sequence identity, at least 85 percent identity, at least between 89 to 95 percent sequence identity, or more usually, at least 99 percent sequence identity as compared to a reference sequence over a comparison window of at least 20 residue positions, frequently over a window of at least 30-50 residues, wherein the percentage of sequence identity is calculated by comparing the reference sequence to a sequence that includes deletions or additions which total 20 percent or less of the reference sequence over the window of comparison. In some specific embodiments applied to polypeptides, the term “substantial identity” means that two polypeptide sequences, when optimally aligned, such as by the programs GAP or BESTFIT using default gap weights, share at least 80 percent sequence identity, preferably at least 89 percent sequence identity, at least 95 percent sequence identity or more (e.g., 99 percent sequence identity). In some embodiments, residue positions that are not identical in sequences being compared differ by conservative amino acid substitutions.

[0064] “Corresponding to,” “reference to,” and “relative to” when used in the context of the numbering of a given amino acid or polynucleotide sequence refer to the numbering of the residues of a specified reference sequence when the given amino acid or polynucleotide sequence is compared to the reference sequence. In other words, the residue number or residue position of a given polymer is designated with respect to the reference sequence rather than by the actual numerical position of the residue within the given amino acid or polynucleotide sequence. For example, a given amino acid sequence, such as that of an engineered TdT, can be aligned to a reference sequence by introducing gaps to optimize residue matches between the two sequences. In these cases, although the gaps are present, the numbering of the residue in the given amino acid or polynucleotide sequence is made with respect to the reference sequence to which it has been aligned.

[0065] “Amino acid difference” or “residue difference” refers to a change in the amino acid residue at a position of a polypeptide sequence relative to the amino acid residue at a corresponding position in a reference sequence. The positions of amino acid differences generally are referred to herein as “Xn,” where n refers to the corresponding position in the reference sequence upon which the residue difference is based. For example, a “residue difference at position X25 as compared to SEQ ID NO: 2” refers to a change of the amino acid residue at the polypeptide position corresponding to position 25 of SEQ ID NO:2. Thus, if the reference polypeptide of SEQ ID NO: 2 has a valine at position 25, then a “residue difference at position X25 as compared to SEQ ID NO:2” an amino acid substitution of any residue other than valine at the position of the polypeptide corresponding to position 25 of SEQ ID NO: 2. In most instances herein, the specific amino acid residue difference at a position is indicated as “XnY” where “Xn” specified the corresponding position as described above, and “Y” is the single letter identifier of the amino acid found in the engineered polypeptide (i.e., the different residue than in the reference polypeptide). In some embodiments, more than one amino acid can appear in a specified residue position (i.e., the alternative amino acids can be listed in the form XnY/Z, where Y and Z represent alternate amino acid residues). In some instances (e.g., in Tables 5.1, 6.2, 7.2, 8.2, 9.2, 10.2, 11.2, 12.2, 13.2, 14.2, 15.2, 16.2, 17.2, 18.2, 19.2, 20.2, 21.2, 22.2, 23.2, 24.2, 25.2, 26.2, 26.3, 26.4, 27.2, 27.3, 27.4, 27.5, 28.1, 28.2, 28.3, 29.2, 30.2, 31.2, 32.2, 33.2, 34.2, 35.2, 36.2, 37.2, 38.2, 39.2, 40.2, 41.2, 42.2, 43.2, 44.2, 45.2 46.2, 47.2, 48.2, 49.2, 50.2, 51.2, 52.2, 53.2, 54.2, 55.2, 56.2, 56.3, 56.4, 61.2, 63.2, 64.2, 65.2, 66.2, 67.2, 68.2, 69.2, 70.2, 71.2, 72.2, 73.2, 74.2, 75.2, 76.2, 77.2, 78.2, 79.2, and 80.1) the present invention also provides specific amino acid differences denoted by the conventional notation “AnB”, where A is the single letter identifier of the residue in the reference sequence, “n” is the number of the residue position in the reference sequence, and B is the single letter identifier of the residue substitution in the sequence of the engineered polypeptide. Furthermore, in some instances, a polypeptide of the present invention can include one or more amino acid residue differences relative to a reference sequence, which is indicated by a list of the specified positions where changes are made relative to the reference sequence. In some additional embodiments, the present invention provides engineered polypeptide sequences comprising both conservative and non-conservative amino acid substitutions.

[0066] As used herein, “conservative amino acid substitution” refers to a substitution of a residue with a different residue having a similar side chain, and thus typically involves substitution of the amino acid in the polypeptide with amino acids within the same or similar defined class of amino acids. By way of example and not limitation, an amino acid with an aliphatic side chain is substituted with another aliphatic amino acid (e.g., alanine, valine, leucine, and isoleucine); an amino acid with an hydroxyl side chain is substituted with another amino acid with a hydroxyl side chain (e.g., serine and threonine); an amino acid having an aromatic side chain is substituted with another amino acid having an aromatic side chain (e.g., phenylalanine, tyrosine, tryptophan, and histidine); an amino acid with a basic side chain is substituted with another amino acid with a basic side chain (e.g., lysine and arginine); an amino acid with an acidic side chain is substituted with another amino acid with an acidic side chain (e.g., aspartic acid or glutamic acid); and/or a hydrophobic or hydrophilic amino acid is replaced with another hydrophobic or hydrophilic amino acid, respectively. Exemplary conservative substitutions are provided in Table 1 below.

TABLE 1
Conservative Amino Acid Substitution Examples

| Residue | Possible Conservative Substitutions |
|---|---|
| A, L, V, I | Other aliphatic (A, L, V, I) |
| | Other non-polar (A, L, V, I, G, M) |
| G, M | Other non-polar (A, L, V, I, G, M) |
| D, E | Other acidic (D, E) |
| K, R | Other basic (K, R) |
| N, Q, S, T | Other polar |
| H, Y, W, F | Other aromatic (H, Y, W, F) |
| C, P | None |

[0067] “Non-conservative substitution” refers to substitution of an amino acid in the polypeptide with an amino acid with significantly differing side chain properties. Non-conservative substitutions may use amino acids between, rather than within, the defined groups and affects (a) the structure of the peptide backbone in the area of the substitution (e.g., proline for glycine), (b) the charge or hydrophobicity, or (c) the bulk of the side chain. By way of example and not limitation, an exemplary non-conservative substitution can be an acidic amino acid substituted with a basic or aliphatic amino acid; an aromatic amino acid substituted with a small amino acid; and a hydrophilic amino acid substituted with a hydrophobic amino acid.

[0068] “Deletion” refers to modification to the polypeptide by removal of one or more amino acids from the reference polypeptide. Deletions can comprise removal of 1 or more amino acids, 2 or more amino acids, 5 or more amino acids, 10 or more amino acids, 15 or more amino acids, or 20 or more amino acids, up to 10% of the total number of amino acids, or up to 20% of the total number of amino acids making up the reference enzyme while retaining enzymatic activity and/or retaining the improved properties of an engineered TdT enzyme. Deletions can be directed to the internal portions and/or terminal portions of the polypeptide. In various embodiments, the deletion can comprise a continuous segment or can be discontinuous.

[0069] “Insertion” refers to modification to the polypeptide by addition of one or more amino acids from the reference polypeptide. In some embodiments, the improved engineered TdT enzymes comprise insertions of one or more amino acids to the naturally occurring polypeptide as well as insertions of one or more amino acids to other improved TdT polypeptides. Insertions can be in the internal portions of the polypeptide, or to the carboxy or amino terminus. Insertions as used herein include fusion proteins as is known in the art. The insertion can be a contiguous segment of amino acids or separated by one or more of the amino acids in the naturally occurring polypeptide.

[0070] “Fragment” as used herein refers to a polypeptide that has an amino-terminal and/or carboxy-terminal deletion, but where the remaining amino acid sequence is identical to the corresponding positions in the sequence. Fragments can be at least 14 amino acids long, at least 20 amino acids long, at least 50 amino acids long or longer, and up to 70%, 80%, 90%, 95%, 98%, and 99% of the full-length TdT polypeptide, for example the polypeptide of SEQ ID NO: 2 or an TdT provided in the even-numbered sequences of SEQ ID NO: 4-1960, 2004-3920, 4048-5466, and 5476.

[0071] “Isolated polypeptide” refers to a polypeptide which is substantially separated from other contaminants that naturally accompany it, e.g., protein, lipids, and polynucleotides. The term embraces polypeptides which have been removed or purified from their naturally-occurring environment or expression system (e.g., host cell or in vitro synthesis). The engineered TdT enzymes may be present within a cell, present in the cellular medium, or prepared in various forms, such as lysates or isolated preparations. As such, in some embodiments, the engineered TdT enzyme can be an isolated polypeptide.

[0072] “Substantially pure polypeptide” refers to a composition in which the polypeptide species is the predominant species present (i.e., on a molar or weight basis it is more abundant than any other individual macromolecular species in the composition), and is generally a substantially purified composition when the object species comprises at least about 50 percent of the macromolecular species present by mole or % weight. Generally, a substantially pure TdT composition will comprise about 60% or more, about 70% or more, about 80% or more, about 90% or more, about 95% or more, and about 98% or more of all macromolecular species by mole or % weight present in the composition. In some embodiments, the object species is purified to essential homogeneity (i.e., contaminant species cannot be detected in the composition by conventional detection methods) wherein the composition consists essentially of a single macromolecular species. Solvent species, small molecules (<500 Daltons), and elemental ion species are not considered macromolecular species. In some embodiments, the isolated engineered TdT polypeptide is a substantially pure polypeptide composition.

[0073] As used herein, “improved enzyme property” refers to at least one improved property of an enzyme. In some embodiments, the present invention provides engineered TdT polypeptides that exhibit an improvement in any enzyme property as compared to a reference TdT polypeptide and/or a wild-type TdT polypeptide, and/or another engineered TdT polypeptide. For the engineered TdT polypeptides described herein, the comparison is generally made to the wild-type enzyme from which the TdT is derived, although in some embodiments, the reference enzyme can be another improved engineered TdT. Thus, the level of “improvement” can be determined and compared between various TdT polypeptides, including wild-type, as well as engineered TdTs. Improved properties include, but are not limited, to such properties as enzymatic activity (which can be expressed in terms of percent conversion of the substrate), thermostability, solvent stability, pH activity profile, cofactor requirements, refractoriness to inhibitors (e.g., substrate or product inhibition), activity at elevated temperatures, increased soluble expression, decreased by-product formation, increased specific activity on NTP-3′-O-RBG substrates, increased incorporation efficiency in extension of oligo acceptor substrates, and/or increased activity on various oligo acceptor substrates (including enantioselectivity).

[0074] “Increased enzymatic activity” refers to an improved property of the TdT polypeptides, which can be represented by an increase in specific activity (e.g., product produced/time/weight protein) or an increase in percent conversion of the substrate to the product (e.g., percent conversion of starting amount of substrate to product in a specified time period using a specified amount of TdT) as compared to the reference TdT enzyme. Exemplary methods to determine enzyme activity are provided in the Examples. Any property relating to enzyme activity may be affected, including the classical enzyme properties of Kₘ, Vₘₐₓ or k_{car}, changes of which can lead to increased enzymatic activity. Improvements in enzyme activity can be from about 1.2 times the enzymatic activity of the corresponding wild-type enzyme, to as much as 2 times, 5 times, 10 times, 20 times, 25 times, 50 times or more enzymatic activity than the naturally occurring or another engineered TdT from which the TdT polypeptides were derived. TdT activity can be measured by any one of standard assays, such as by monitoring changes in properties of substrates, cofactors, or products. In some embodiments, the amount of products generated can be measured by Liquid Chromatography-Mass Spectrometry (LC-MS), HPLC, or other methods, as known in the art. Comparisons of enzyme activities are made using a defined preparation of enzyme, a defined assay under a set condition, and one or more defined substrates, as further described in detail herein. Generally, when lysates are compared, the numbers of cells and the amount of protein assayed are determined as well as use of identical expression systems and identical host cells to minimize variations in amount of enzyme produced by the host cells and present in the lysates.

[0075] “Conversion” refers to the enzymatic conversion of the substrate(s) to the corresponding product(s). “Percent conversion” refers to the percent of the substrate that is converted to the product within a period of time under specified conditions. Thus, the “enzymatic activity” or “activity” of a TdT polypeptide can be expressed as “percent conversion” of the substrate to the product.

[0076] “Thermostable” refers to a polypeptide that maintains similar activity (more than 60% to 80% for example) after exposure to elevated temperatures (e.g., 40-80° C.) for a period of time (e.g., 0.5-24 hrs) compared to the wild-type enzyme exposed to the same elevated temperature.

[0077] “Solvent stable” refers to a polypeptide that maintains similar activity (more than e.g., 60% to 80%) after exposure to varying concentrations (e.g., 5-99%) of solvent (ethanol, isopropyl alcohol, dimethylsulfoxide (DMSO), tetrahydrofuran, 2-methyltetrahydrofuran, acetone, toluene, butyl acetate, methyl tert-butyl ether, etc.) for a period of time (e.g., 0.5-24 hrs) compared to the wild-type enzyme exposed to the same concentration of the same solvent.

[0078] “Thermo- and solvent stable” refers to a polypeptide that is both thermostable and solvent stable.

[0079] The term “stringent hybridization conditions” is used herein to refer to conditions under which nucleic acid hybrids are stable. As known to those of skill in the art, the stability of hybrids is reflected in the melting temperature (Tₘ) of the hybrids. In general, the stability of a hybrid is a function of ion strength, temperature, G/C content, and the presence of chaotropic agents. The Tₘ values for polynucleotides can be calculated using known methods for predicting melting temperatures (See e.g., Baldino et al., Meth. Enzymol., 168:761-777 [1989]; Bolton et al., Proc. Natl. Acad. Sci. USA 48:1390 [1962]; Bresslauer et al., Proc. Natl. Acad. Sci. USA 83:8893-8897 [1986]; Freier et al., Proc. Natl. Acad. Sci. USA 83:9373-9377 [1986]; Kierzek et al., Biochem., 25:7840-7846 [1986]; Rychlik et al., 1990, Nucl. Acids Res., 18:6409-6412 [1990] (erratum, Nucl. Acids Res., 19:698 [1991]); Sambrook et al., supra); Suggs et al., 1981, in Developmental Biology Using Purified Genes, Brown et al. [eds.], pp. 683-693, Academic Press, Cambridge, MA [1981]; and Wetmur, Crit. Rev. Biochem. Mol. Biol., 26:227-259 [1991]). In some embodiments, the polynucleotide encodes the polypeptide disclosed herein and hybridizes under defined conditions, such as moderately stringent or highly stringent conditions, to the complement of a sequence encoding an engineered TdT enzyme of the present invention.

[0080] “Hybridization stringency” relates to hybridization conditions, such as washing conditions, in the hybridization of nucleic acids. Generally, hybridization reactions are performed under conditions of lower stringency, followed by washes of varying but higher stringency. The term “moderately stringent hybridization” refers to conditions that permit target-DNA to bind a complementary nucleic acid that has about 60% identity, preferably about 75% identity, about 85% identity to the target DNA, with greater than about 90% identity to target-polynucleotide. Exemplary moderately stringent conditions are conditions equivalent to hybridization in 50% formamide, 5×Denhart's solution, 5×SSPE, 0.2% SDS at 42° C., followed by washing in 0.2×SSPE, 0.2% SDS, at 42° C. “High stringency hybridization” refers generally to conditions that are about 10° C. or less from the thermal melting temperature T, as determined under the solution condition for a defined polynucleotide sequence. In some embodiments, a high stringency condition refers to conditions that permit hybridization of only those nucleic acid sequences that form stable hybrids in 0.018M NaCl at 65° C. (i.e., if a hybrid is not stable in 0.018M NaCl at 65° C., it will not be stable under high stringency conditions, as contemplated herein). High stringency conditions can be provided, for example, by hybridization in conditions equivalent to 50% formamide, 5×Denhart's solution, 5×SSPE, 0.2% SDS at 42° C., followed by washing in 0.1×SSPE, and 0.1% SDS at 65° C. Another high stringency condition is hybridizing in conditions equivalent to hybridizing in 5×SSC containing 0.1% (w:v) SDS at 65° C. and washing in 0.1×SSC containing 0.1% SDS at 65° C. Other high stringency hybridization conditions, as well as moderately stringent conditions, are described in the references cited above.

[0081] “Heterologous” polynucleotide refers to any polynucleotide that is introduced into a host cell by laboratory techniques and includes polynucleotides that are removed from a host cell, subjected to laboratory manipulation, and then reintroduced into a host cell.

[0082] “Codon optimized” refers to changes in the codons of the polynucleotide encoding a protein to those preferentially used in a particular organism such that the encoded protein is efficiently expressed in the organism of interest. Although the genetic code is degenerate in that most amino acids are represented by several codons, called “synonyms” or “synonymous” codons, it is well known that codon usage by particular organisms is nonrandom and biased towards particular codon triplets. This codon usage bias may be higher in reference to a given gene, genes of common function or ancestral origin, highly expressed proteins versus low copy number proteins, and the aggregate protein coding regions of an organism's genome. In some embodiments, the polynucleotides encoding the TdT enzymes may be codon optimized for optimal production from the host organism selected for expression.

[0083] As used herein, “preferred, optimal, high codon usage bias codons” refers interchangeably to codons that are used at higher frequency in the protein coding regions than other codons that code for the same amino acid. The preferred codons may be determined in relation to codon usage in a single gene, a set of genes of common function or origin, highly expressed genes, the codon frequency in the aggregate protein coding regions of the whole organism, codon frequency in the aggregate protein coding regions of related organisms, or combinations thereof. Codons whose frequency increases with the level of gene expression are typically optimal codons for expression. A variety of methods are known for determining the codon frequency (e.g., codon usage, relative synonymous codon usage) and codon preference in specific organisms, including multivariate analysis, for example, using cluster analysis or correspondence analysis, and the effective number of codons used in a gene (See e.g., GCG CodonPreference, Genetics Computer Group Wisconsin Package; CodonW, Peden, University of Nottingham; McInerney, Bioinform., 14:372-73 [1998]; Stenico et al., Nucl. Acids Res., 222437-46 [1994]; Wright, Gene 87:23-29 [1990]). Codon usage tables are available for many different organisms (See e.g., Wada et al., Nucl. Acids Res., 20:2111-2118 [1992]; Nakamura et al., Nucl. Acids Res., 28:292 [2000]; Duret, et al., supra; Henaut and Danchin, in Escherichia coli and Salmonella, Neidhardt, et al. (eds.), ASM Press, Washington D.C., p. 2047-2066 [1996]). The data source for obtaining codon usage may rely on any available nucleotide sequence capable of coding for a protein. These data sets include nucleic acid sequences actually known to encode expressed proteins (e.g., complete protein coding sequences-CDS), expressed sequence tags (ESTS), or predicted coding regions of genomic sequences (See e.g., Mount, Bioinformatics: Sequence and Genome Analysis, Chapter 8, Cold Spring Harbor Laboratory Press, Cold Spring Harbor, N.Y. [2001]; Uberbacher, Meth. Enzymol., 266:259-281 [1996]; and Tiwari et al., Comput. Appl. Biosci., 13:263-270 [1997]).

[0084] “Control sequence” is defined herein to include all components, which are necessary or advantageous for the expression of a polynucleotide and/or polypeptide of the present invention. Each control sequence may be native or foreign to the nucleic acid sequence encoding the polypeptide. Such control sequences include, but are not limited to, a leader, polyadenylation sequence, propeptide sequence, promoter, signal peptide sequence, and transcription terminator. At a minimum, the control sequences include a promoter, and transcriptional and translational stop signals. The control sequences may be provided with linkers for the purpose of introducing specific restriction sites facilitating ligation of the control sequences with the coding region of the nucleic acid sequence encoding a polypeptide.

[0085] “Operably linked” is defined herein as a configuration in which a control sequence is appropriately placed (i.e., in a functional relationship) at a position relative to a polynucleotide of interest such that the control sequence directs or regulates the expression of the polynucleotide and/or polypeptide of interest.

[0086] “Promoter sequence” refers to a nucleic acid sequence that is recognized by a host cell for expression of a polynucleotide of interest, such as a coding sequence. The promoter sequence contains transcriptional control sequences, which mediate the expression of a polynucleotide of interest. The promoter may be any nucleic acid sequence which shows transcriptional activity in the host cell of choice including mutant, truncated, and hybrid promoters, and may be obtained from genes encoding extracellular or intracellular polypeptides either homologous or heterologous to the host cell.

[0087] “Suitable reaction conditions” refer to those conditions in the biocatalytic reaction solution (e.g., ranges of enzyme loading, substrate loading, cofactor loading, temperature, pH, buffers, co-solvents, etc.) under which a TdT polypeptide of the present invention is capable of converting one or more substrate compounds to a product compound (e.g., addition of a nucleotide-3′-O-RBG or other natural or modified nucleotide substrate to an oligo acceptor substrate via reaction with NTP-3′-O-RBG or other natural or modified NTP substrate). Exemplary “suitable reaction conditions” are provided in the present invention and illustrated by the Examples.

[0088] “Composition” refers to a mixture or combination of one or more substances, wherein each substance or component of the composition retains its individual properties. As used herein, a biocatalytic composition refers to a combination of one or more substances useful for biocatalysis.

[0089] “Loading”, such as in “compound loading” or “enzyme loading” or “cofactor loading” refers to the concentration or amount of a component in a reaction mixture at the start of the reaction.

[0090] “Substrate” in the context of a biocatalyst mediated process refers to the compound or molecule acted on by the biocatalyst. For example, a TdT biocatalyst used in the synthesis processes disclosed herein acts on an NTP-3′-O-RBG substrate or other natural or modified NTP substrate and an oligo acceptor substrate.

[0091] “Product” in the context of a biocatalyst mediated process refers to the compound or molecule resulting from the action of the biocatalyst. For example, an exemplary product for a TdT biocatalyst used in a process disclosed herein is an oligo acceptor extension product, as depicted in Schemes 1 and 2.

[0092] “Alkyl” refers to saturated hydrocarbon groups of from 1 to 18 carbon atoms inclusively, either straight chained or branched, more preferably from 1 to 8 carbon atoms inclusively, and most preferably 1 to 6 carbon atoms inclusively. An alkyl with a specified number of carbon atoms is denoted in parenthesis (e.g., (C₁-C₆)alkyl refers to an alkyl of 1 to 6 carbon atoms).

[0093] “Alkenyl” refers to hydrocarbon groups of from 2 to 12 carbon atoms inclusively, either straight or branched containing at least one double bond but optionally containing more than one double bond.

[0094] “Alkynyl” refers to hydrocarbon groups of from 2 to 12 carbon atoms inclusively, either straight or branched containing at least one triple bond but optionally containing more than one triple bond, and additionally optionally containing one or more double bonded moieties.

[0095] “Heteroalkyl, “heteroalkenyl,” and heteroalkynyl,” refer respectively, to alkyl, alkenyl and alkynyl as defined herein in which one or more of the carbon atoms are each independently replaced with the same or different heteroatoms or heteroatomic groups. Heteroatoms and/or heteroatomic groups which can replace the carbon atoms include, but are not limited to —O—, —S—, —S—O—, —NR^{γ}—, —PH—, —S(O)—, —S(O)2-, —S(O) NR^{γ}—, —S(O)₂NR^{γ}, and the like, including combinations thereof, where each R^{γ} is independently selected from hydrogen, alkyl, cycloalkyl, heterocycloalkyl, aryl, and heteroaryl.

[0096] “Amino” refers to the group —NH₂. Substituted amino refers to the group —NHR^{η}, NR^{η}R^{η}, and NR^{η}R^{η}R^{η}, where each R^{η} is independently selected from substituted or unsubstituted alkyl, cycloalkyl, cycloheteroalkyl, alkoxy, aryl, heteroaryl, heteroarylalkyl, acyl, alkoxycarbonyl, sulfanyl, sulfinyl, sulfonyl, and the like. Typical amino groups include, but are limited to, dimethylamino, diethylamino, trimethylammonium, triethylammonium, methylysulfonylamino, furanyl-oxy-sulfamino, and the like.

[0097] “Aminoalkyl” refers to an alkyl group in which one or more of the hydrogen atoms are replaced with one or more amino groups, including substituted amino groups.

[0098] “Aminocarbonyl” refers to —C(O)NH₂. Substituted aminocarbonyl refers to —C(O)NR^{η}R^{η}, where the amino group NR^{η}R^{η} is as defined herein.

[0099] “Oxy” refers to a divalent group —O—, which may have various substituents to form different oxy groups, including ethers and esters.

[0100] “Alkoxy” or “alkyloxy” are used interchangeably herein to refer to the group —OR, wherein R is an alkyl group, including optionally substituted alkyl groups.

[0101] “Carboxy” refers to —COOH.

[0102] “Carbonyl” refers to —C(O)—, which may have a variety of substituents to form different carbonyl groups including acids, acid halides, aldehydes, amides, esters, and ketones.

[0103] “Carboxyalkyl” refers to an alkyl in which one or more of the hydrogen atoms are replaced with one or more carboxy groups.

[0104] “Aminocarbonylalkyl” refers to an alkyl substituted with an aminocarbonyl group, as defined herein.

[0105] “Halogen” or “halo” refers to fluoro, chloro, bromo and iodo.

[0106] “Haloalkyl” refers to an alkyl group in which one or more of the hydrogen atoms are replaced with a halogen. Thus, the term “haloalkyl” is meant to include monohaloalkyls, dihaloalkyls, trihaloalkyls, etc. up to perhaloalkyls. For example, the expression “(C₁-C₂) haloalkyl” includes 1-fluoromethyl, difluoromethyl, trifluoromethyl, 1-fluoroethyl, 1,1-difluoroethyl, 1,2-difluoroethyl, 1,1,1 trifluoroethyl, perfluoroethyl, etc.

[0107] “Hydroxy” refers to —OH.

[0108] “Hydroxyalkyl” refers to an alkyl group in which in which one or more of the hydrogen atoms are replaced with one or more hydroxy groups.

[0109] “Thiol” or “sulfanyl” refers to —SH. Substituted thiol or sulfanyl refers to —S—R^{η}, where R^{η} is an alkyl, aryl or other suitable substituent.

[0110] “Sulfonyl” refers to —SO₂-R^{η}. Substituted sulfonyl refers to —SO₂—R^{η}, where R^{η} is an alkyl, aryl or other suitable substituent.

[0111] “Alkylsulfonyl” refers to —SO₂—R^{ζ}, where R^{ζ} is an alkyl, which can be optionally substituted. Typical alkylsulfonyl groups include, but are not limited to, methylsulfonyl, ethylsulfonyl, n-propylsulfonyl, and the like.

[0112] “Phosphate” as used herein refers to a functional group comprised of an orthophosphate ion (phosphorous atom covalently linked to four oxygen atoms). The orthophosphate ion is commonly found with one or more hydrogen atoms or organic groups.

[0113] “Phosphorylated” as used herein refers to the addition or presence of one of more phosphoryl groups (phosphorous atom covalently linked to the three oxygen atoms).

[0114] “Optionally substituted” as used herein with respect to the foregoing chemical groups means that positions of the chemical group occupied by hydrogen can be substituted with another atom (unless otherwise specified) exemplified by, but not limited to carbon, oxygen, nitrogen, or sulfur, or a chemical group, exemplified by, but not limited to, hydroxy, oxo, nitro, methoxy, ethoxy, alkoxy, substituted alkoxy, trifluoromethoxy, haloalkoxy, fluoro, chloro, bromo, iodo, halo, methyl, ethyl, propyl, butyl, alkyl, alkenyl, alkynyl, substituted alkyl, trifluoromethyl, haloalkyl, hydroxyalkyl, alkoxyalkyl, thio, alkylthio, acyl, carboxy, alkoxycarbonyl, carboxamido, substituted carboxamido, alkylsulfonyl, alkylsulfinyl, alkylsulfonylamino, sulfonamido, substituted sulfonamido, cyano, amino, substituted amino, alkylamino, dialkylamino, aminoalkyl, acylamino, amidino, amidoximo, hydroxamoyl, phenyl, aryl, substituted aryl, aryloxy, arylalkyl, arylalkenyl, arylalkynyl, pyridyl, imidazolyl, heteroaryl, substituted heteroaryl, heteroaryloxy, heteroarylalkyl, heteroarylalkenyl, heteroarylalkynyl, cyclopropyl, cyclobutyl, cyclopentyl, cyclohexyl, cycloalkyl, cycloalkenyl, cycloalkylalkyl, substituted cycloalkyl, cycloalkyloxy, pyrrolidinyl, piperidinyl, morpholino, heterocycle, (heterocycle)oxy, and (heterocycle)alkyl; where preferred heteroatoms are oxygen, nitrogen, and sulfur. Additionally, where open valences exist on these substitute chemical groups they can be further substituted with alkyl, cycloalkyl, aryl, heteroaryl, and/or heterocycle groups, that where these open valences exist on carbon they can be further substituted by halogen and by oxygen-, nitrogen-, or sulfur-bonded substituents, and where multiple such open valences exist, these groups can be joined to form a ring, either by direct formation of a bond or by formation of bonds to a new heteroatom, preferably oxygen, nitrogen, or sulfur. It is further contemplated that the above substitutions can be made provided that replacing the hydrogen with the substituent does not introduce unacceptable instability to the molecules of the present invention and is otherwise chemically reasonable. One of ordinary skill in the art would understand that with respect to any chemical group described as optionally substituted, only sterically practical and/or synthetically feasible chemical groups are meant to be included. “Optionally substituted” as used herein refers to all subsequent modifiers in a term or series of chemical groups. For example, in the term “optionally substituted arylalkyl,” the “alkyl” portion and the “aryl” portion of the molecule may or may not be substituted, and for the series “optionally substituted alkyl, cycloalkyl, aryl and heteroaryl,” the alkyl, cycloalkyl, aryl, and heteroaryl groups, independently of the others, may or may not be substituted.

[0115] “Reaction” as used herein refers to a process in which one or more substances or compounds or substrates is converted into one or more different substances, compounds, or processes.

[0116] Template-Independent Synthesis by Engineered TdTs

[0117] New methods of efficiently synthesizing high purity strands of DNA, RNA, and other polynucleotides are necessary to overcome the limitations of existing phosphoramidite chemical synthesis methods in order to enable a range of emerging and existing synthetic biology applications.

[0118] The present invention provides novel terminal deoxynucleotidyl transferases that have improved activity in the template-independent synthesis of polynucleotides using 5′-nucleoside triphosphates (“NTPs”) modified with a 3′-O-removable blocking group (NTP-3′-O-RBG) or other natural or modified NTP substrates. The TdTs of the present disclosure have improved thermostability, activity at elevated temperatures, increased soluble expression or isolated protein yield, decreased by-product formation, increased affinity for NTP-3′-O-RBG and other natural or modified NTP substrates, increased affinity for oligo acceptor substrates, increased activity or specific activity on NTP-3′-O-RBG and other natural or modified NTP substrates, and/or increased activity or specific activity on various oligo acceptor substrates as compared to a wild-type TdT or other TdTs or template-independent polymerases known to those of skill in the art. The engineered polypeptides of the present disclosure are variants of SEQ ID NO: 2, a predicted splice variant encoded by the genome of species Monodelphis domestica. These engineered TdTs are capable of template-independent synthesis of oligonucleotides and polynucleotides.

[0119] Template-independent synthesis of a defined polynucleotide sequence using an engineered TdT is a multistep process. In one embodiment, an oligo acceptor substrate with a 3′-OH allows addition of a defined modified NTP substrate (in this example, an NTP-3′-O-RBG) by an engineered TdT, as depicted in Scheme 1, below.

[chemical structure]

[0120] After reaction of the NTP-3′-O-RBG with the 3′-OH of oligo acceptor substrate or the growing polynucleotide chain, the TdT is blocked from further reaction by the 3′-O-RBG. The RBG is then removed, exposing the 3′-OH and allowing another round of addition. After each round of addition, the blocking group of the nucleotide-3′-O-RBG or natural or modified nucleotide from the previous round is removed and a new NTP-3′-O-RBG or natural or modified NTP substrate is added to sequentially and efficiently create a defined polynucleotide sequence by addition at the 3′-OH end of the polynucleotide or oligo acceptor substrate without a complimentary strand or templating primer sequence. After synthesis of the defined polynucleotide is complete, the oligonucleotide chain may be cleaved or released from the oligo acceptor substrate.

[0121] A variety of oligo acceptor substrates and NTP-3′-O-RBG or natural or modified NTP substrates may be used in this process, as may be envisioned by one of skill in the art. An example of one reaction is detailed in Scheme 2, below. Scheme 2 depicts the TdT catalyzed reaction of 5′-6-FAM-[N]₁₅AT*mC and 3′-phos-mATP as described in Example 27, while other examples of suitable oligo acceptor substrate and NTP-3′-O-RBG or natural or modified NTP pairs are described in other Examples. These examples are non-limiting.

[chemical structure]

[0122] Occasionally, undesired synthesis products are created by the TdT during the addition step. This includes incorporation of NTPs that have lost their blocking group, addition of more than one NTP, or the excision or pyrophosphorolysis of the TdT on the growing polynucleotide chain.

[0123] In some embodiments, one or more additional quality control steps are used, such as adding an exonuclease prior to removing the blocking group and initiating a new round of synthesis. In some embodiments, a phosphatase, such as a pyrophosphatase, is used to breakdown inorganic phosphate and push the reversible TdT reaction toward synthesis.

[0124] As described further herein, the engineered TdT polypeptides of the current disclosure exhibit one of more improved properties in the template-independent polynucleotide synthesis process depicted in Schemes 1 and 2.

[0125] In some embodiments, the present invention provides an engineered TdT polypeptide comprising an amino acid sequence having at least 60% sequence identity to an amino acid reference sequence of SEQ ID NO: 2 and further comprising one or more amino acid residue differences as compared to the reference amino acid sequence, wherein the engineered TdT polypeptide has improved thermostability, increased activity at elevated temperatures, increased soluble expression or isolated protein yield, decreased by-product formation, increased specific activity on NTP-3′-O-RBG or natural or modified NTP substrates, and/or increased activity on various oligo acceptor substrates as compared to a wild-type TdT or other TdTs or template-independent polymerases known to those of skill in the art.

[0126] In particular, the engineered TdTs polypeptides of the present disclosure have been engineered for efficient synthesis of polynucleotides having a defined sequence using NTP-3′-O-RBG or natural or modified NTP substrates in the process described above.

[0127] A variety of suitable reaction conditions are known to those skilled in the art, as detailed below and in the Examples.

[0128] Engineered Terminal Deoxynucleotidyl Transferase (TdT) Polypeptides

[0129] The present invention provides engineered terminal deoxynucleotidyl transferase (TDT) polypeptides useful in template-independent polynucleotide synthesis using an NTP-3′-O-RBG or natural or modified NTP substrate, as well as compositions and methods of utilizing these engineered polypeptides in template-independent oligonucleotide synthesis.

[0130] The present invention provides TdT polypeptides, polynucleotides encoding the polypeptides, methods of preparing the polypeptides, and methods for using the polypeptides. Where the description relates to polypeptides, it is to be understood that it can describe the polynucleotides encoding the polypeptides.

[0131] Suitable reaction conditions under which the above-described improved properties of the engineered polypeptides carry out the desired reaction can be determined with respect to concentrations or amounts of polypeptide, substrate, co-substrate, buffer, solvent, pH, conditions including temperature and reaction time, and/or conditions with the polypeptide immobilized on a solid support, as further described below and in the Examples.

[0132] In some embodiments, exemplary engineered TdTs comprise an amino acid sequence that has one or more residue differences as compared to SEQ ID NO: 2 at the residue positions indicated in Tables 5.1, 6.2, 7.2, 8.2, 9.2, 10.2, 11.2, 12.2, 13.2, 14.2, 15.2, 16.2, 17.2, 18.2, 19.2, 20.2, 21.2, 22.2, 23.2, 24.2, 25.2, 26.2, 26.3, 26.4, 27.2, 27.3, 27.4, 27.5, 28.1, 28.2, 28.3, 29.2, 30.2, 31.2, 32.2, 33.2, 34.2, 35.2, 36.2, 37.2, 38.2, 39.2, 40.2, 41.2, 42.2, 43.2, 44.2, 45.2 46.2, 47.2, 48.2, 49.2, 50.2, 51.2, 52.2, 53.2, 54.2, 55.2, 56.2, 56.3, 56.4, 61.2, 63.2, 64.2, 65.2, 66.2, 67.2, 68.2, 69.2, 70.2, 71.2, 72.2, 73.2, 74.2, 75.2, 76.2, 77.2, 78.2, 79.2, and 80.1.

[0133] The structure and function information for the exemplary engineered polypeptides of the present invention are based on the conversion of an oligo acceptor substrate and a NTP-3′-O-RBG or a dideoxy NTP (e.g. a 2′,3′-dideoxy NTP), the results of which are shown below in Tables 5.1, 6.2, 7.2, 8.2, 9.2, 10.2, 11.2, 12.2, 13.2, 14.2, 15.2, 16.2, 17.2, 18.2, 19.2, 20.2, 21.2, 22.2, 23.2, 24.2, 25.2, 26.2, 26.3, 26.4, 27.2, 27.3, 27.4, 27.5, 28.1, 28.2, 28.3, 29.2, 30.2, 31.2, 32.2, 33.2, 34.2, 35.2, 36.2, 37.2, 38.2, 39.2, 40.2, 41.2, 42.2, 43.2, 44.2, 45.2 46.2, 47.2, 48.2, 49.2, 50.2, 51.2, 52.2, 53.2, 54.2, 55.2, 56.2, 56.3, 56.4, 61.2, 63.2, 64.2, 65.2, 66.2, 67.2, 68.2, 69.2, 70.2, 71.2, 72.2, 73.2, 74.2, 75.2, 76.2, 77.2, 78.2, 79.2, and 80.1, as further described in the Examples. The odd numbered sequence identifiers (i.e., SEQ ID NOs) in these Tables refer to the nucleotide sequence encoding the amino acid sequence provided by the even numbered SEQ ID NOs in these Tables. Exemplary sequences are provided in the electronic sequence listing file accompanying this invention, which is hereby incorporated by reference herein. The amino acid residue differences are based on comparison to the reference sequence of SEQ ID NOs: 2, 8, 16, 24, 36, 268, 648, 660, 882, 1100, 1336, 1348, 1596, 1654, 1830, 1950, 2008, 2254, 2514, 2524, 2638, 2804, 2812, 2956, 3174, 3222, 3670, 3674, 3796, 3870, 3918, 4266, 4442, 4654, 4850, 4856, 4904, 5002, 5028, 5192 and/or 5246, as indicated.

[0134] Terminal deoxynucleotidyl transferase, a member of the Pol X family, has been identified in many species. Members of the diverse Pol X family are known to share certain residues, which are conserved across family members. TdT also has a high level of conservation across species for residues thought to be involved in binding divalent metal ions, ternary complex formation, and binding dNTP and DNA ligands (Dominguez et al. (2000). EMBO, 19(7), 1731-1742.) Additionally, TdTs are known to have splice variants which are N-terminal truncations, lacking a BRCT domain. Other template-independent polymerases (including, but not limited to polyA polymerases, polyU polymerases and terminal urildylytransferases) are also known in the art and may be used to practice the invention. Similarly, other polymerases are known to be capable of template-independent synthesis (including but not limited to reverse transcriptases) and may be used to practice the invention.

[0135] The wild-type TdT from Monodelphis domestica (SEQ ID NO: 2) was selected for evolution. The TdT polypeptides of the present disclosure are engineered variants of SEQ ID NO: 2 with a N-terminal 6-histidine tag.

[0136] The polypeptides of the present disclosure have residue differences that result in improved properties necessary to develop an efficient TdT enzyme, capable of template-independent synthesis of polynucleotides having a defined sequence. Various residue differences, at both conserved and non-conserved positions, have been discovered to be related to improvements in various enzymes properties, including improved thermostability, increased activity at elevated temperatures, increased soluble expression or isolated protein yield, decreased by-product formation, increased specific activity on NTP-3′-O-RBG or natural or modified NTP substrates, increased incorporation efficiency in extension of oligo acceptor substrates, and/or increased activity on various oligo acceptor substrates as compared to a wild-type TdT or other TdTs or template-independent polymerases known to those of skill in the art. In some embodiments, the engineered TdT polypeptides exhibit increased incorporation efficiency in extension of an oligo acceptor substrate by addition of an NTP or NQP of greater than 60%, 65%, 70%, 75%, 80%, 85%, 90%, 91%, 92%, 93%, 94%, 95%, 96%, 97%, 98%, or 99%. Exemplary incorporation efficiency of engineered TdTs are provided in the Examples, e.g., Example 92.

[0137] The activity of each engineered TdT relative to the reference polypeptide of SEQ ID NOs: 2, 8, 16, 24, 36, 268, 648, 660, 882, 1100, 1336, 1348, 1596, 1654, 1830, 1950, 2008, 2254, 2514, 2524, 2638, 2804, 2812, 2956, 3174, 3222, 3670, 3674, 3796, 3870, 3918, 4266, 4442, 4654, 4850, 4856, 4904, 5002, 5028, 5192 and/or 5246 was determined as conversion of the substrates described in the Examples herein. In some embodiments, a shake flask purified enzyme (SFP) is used to assess the properties of the engineered TdTs, the results of which are provided in the Examples.

[0138] In some embodiments, the specific enzyme properties are associated with the residues differences as compared to SEQ ID NOs: 2, 8, 16, 24, 36, 268, 648, 660, 882, 1100, 1336, 1348, 1596, 1654, 1830, 1950, 2008, 2254, 2514, 2524, 2638, 2804, 2812, 2956, 3174, 3222, 3670, 3674, 3796, 3870, 3918, 4266, 4442, 4654, 4850, 4856, 4904, 5002, 5028, 5192 and/or 5246 at the residue positions indicated herein. In some embodiments, residue differences affecting polypeptide expression can be used to increase expression of the engineered TdTs.

[0139] In light of the guidance provided herein, it is further contemplated that any of the exemplary engineered polypeptides comprising the sequences of SEQ ID NOs: 2, 8, 16, 24, 36, 268, 648, 660, 882, 1100, 1336, 1348, 1596, 1654, 1830, 1950, 2008, 2254, 2514, 2524, 2638, 2804, 2812, 2956, 3174, 3222, 3670, 3674, 3796, 3870, 3918, 4266, 4442, 4654, 4850, 4856, 4904, 5002, 5028, 5192 and/or 5246 find use as the starting amino acid sequence for synthesizing other TdT polypeptides, for example by subsequent rounds of evolution that incorporate new combinations of various amino acid differences from other polypeptides in Tables 5.1, 6.2, 7.2, 8.2, 9.2, 10.2, 11.2, 12.2, 13.2, 14.2, 15.2, 16.2, 17.2, 18.2, 19.2, 20.2, 21.2, 22.2, 23.2, 24.2, 25.2, 26.2, 26.3, 26.4, 27.2, 27.3, 27.4, 27.5, 28.1, 28.2, 28.3, 29.2, 30.2, 31.2, 32.2, 33.2, 34.2, 35.2, 36.2, 37.2, 38.2, 39.2, 40.2, 41.2, 42.2, 43.2, 44.2, 45.2 46.2, 47.2, 48.2, 49.2, 50.2, 51.2, 52.2, 53.2, 54.2, 55.2, 56.2, 56.3, 56.4, 61.2, 63.2, 64.2, 65.2, 66.2, 67.2, 68.2, 69.2, 70.2, 71.2, 72.2, 73.2, 74.2, 75.2, 76.2, 77.2, 78.2, 79.2, and 80.1, and other residue positions described herein. Further improvements may be generated by including amino acid differences at residue positions that had been maintained as unchanged throughout earlier rounds of evolution.

[0140] In some embodiments, the engineered TdT polypeptide has increased soluble protein expression and comprises an amino acid sequence having at least 60%, 70%, 80%, 85%, 86%, 87%, 88%, 89%, 90%, 91%, 92%, 93%, 94%, 95%, 96%, 97%, 98%, 99% or more sequence identity to reference sequence SEQ ID NO: 2 and one or more residue differences as compared to SEQ ID NO: 2, selected from

80/106/121/185/190/205/289/290/293/313/315/336/342/359/391/470/474/499/522/523,
80/106/121/185/190/205/289/290/293/313/342/470/474/499/523,
80/106/121/185/190/244/289/290/293/307/342/359/470/474/499,
80/121/131/185/190/205/244/289/290/293/313/315/336/342/359/391/414/470/474/499/522/523,
80/121/131/185/190/205/244/289/290/293/313/336/342/359/391/414/470/474/499/522/523,
80/121/131/185/190/289/290/293/313/342/470/474/499/522/523,
80/121/174/179/185/190/236/244/288/289/290/293/313/315/317/336/342/359/363/391/394/408/426/462/470/474/499/522/523,
80/121/174/185/186/190/236/244/273/284/288/289/290/293/313/315/317/336/342/352/359/391/394/395/419/428/431/462/470/474/499/522/523,
80/121/174/185/190/193/196/244/273/284/288/289/290/293/297/313/315/317/324/336/342/352/359/376/3
80/391/394/401/415/419/428/431/435/441/462/470/474/499/522/523,
80/121/174/185/190/193/244/273/284/288/289/290/293/297/313/315/317/336/342/352/359/391/394/415/419/428/431/462/470/474/499/522/523,
80/121/174/185/190/196/244/266/273/284/288/289/290/293/313/315/317/324/336/342/352/359/391/394/397/401/419/428/431/462/470/474/499/522/523,
80/121/174/185/190/236/244/273/282/284/288/289/290/293/313/315/317/336/342/352/359/391/394/395/419/428/431/462/470/474/499/522/523,
80/121/174/185/190/244/273/284/288/289/290/293/313/315/317/336/342/352/359/391/394/419/428/431/462/470/474/499/522/523,
80/121/174/185/190/244/273/284/288/289/290/293/313/315/317/336/342/359/391/394/428/431/462/470/474/499/522/523,
80/121/174/185/190/244/284/288/289/290/293/313/315/317/336/342/352/359/391/394/419/428/431/462/470/474/499/522/523,
80/121/174/185/190/244/284/288/289/290/293/313/315/317/336/342/352/359/391/394/428/431/462/470/474/499/522/523,
80/121/174/185/190/244/284/288/289/290/293/313/315/317/336/342/359/391/394/428/431/462/470/474/4
99/522/523, 80/121/185/190/196/244/289/290/293/313/315/317/336/342/359/391/470/474/499/522/523,
80/121/185/190/201/289/290/293/313/342/470/474/499/522,
80/121/185/190/244/273/289/290/293/313/315/317/336/342/352/359/391/419/435/470/474/499/522/523,
80/121/185/190/244/289/290/293/300/313/315/317/336/342/359/391/470/474/499/522/523,
80/121/185/190/244/289/290/293/313/315/317/336/342/359/380/391/401/419/470/474/499/522/523,
80/121/185/190/244/289/290/293/313/315/317/336/342/359/391/392/470/474/499/522/523,
80/121/185/190/244/289/290/293/313/315/317/336/342/359/391/395/470/474/499/522/523,
80/121/185/190/244/289/290/293/313/315/317/336/342/359/391/470/474/499/522/523,
80/121/185/190/244/289/290/293/313/336/342/359/391/414/470/474/499/522/523,
80/121/185/190/289/290/293/313/315/336/342/359/391/414/470/474/499/522/523,
80/121/185/190/289/290/293/313/336/342/359/391/470/474/499/522/523,
80/121/185/190/289/290/293/313/342/499, 80/121/185/315, 80/121/190/289/290, 80/185/236/289/293,
121/185/190/213/289/290/293, and 185/289/290/293. In some embodiments, the engineered TdT polypeptide has increased soluble protein expression and comprises an amino acid sequence having at least 60%, 70%, 80%, 85%, 86%, 87%, 88%, 89%, 90%, 91%, 92%, 93%, 94%, 95%, 96%, 97%, 98%, 99% or more sequence identity to reference sequence SEQ ID NO: 2 and one or more residue differences as compared to SEQ ID NO: 2, selected from
80D/106D/121S/185L/190E/205R/289D/290V/293S/313A/315G/336D/342E/359L/391G/470T/474M/49 9L/522L/523E, 80D/106D/121S/185L/190E/205R/289D/290V/293S/313A/342E/470T/474M/499L/523E, 80D/106D/121S/185L/190E/244V/289D/290V/293S/307K/342E/359L/470T/474M/499L, 80D/121S/131E/185L/190E/205R/244V/289D/290V/293S/313A/315G/336D/342E/359L/391G/414H/470 T/474M/499L/522L/523E,

### 80D/121S/131E/185L/190E/205R/244V/289D/290V/293S/313A/336D/342E/359L/391G/414H/470T/474M/499L/522L/523E,

### 80D/121S/131E/185L/190E/289D/290V/293S/313A/342E/470T/474M/499L/522L/523E,

### 80D/121S/174L/179K/185L/190E/236P/244V/288E/289D/290V/293S/313A/315G/317T/336D/342E/359 L/363I/391G/394R/408P/426P/462F/470T/474M/499L/522L/523E,

[0141] 80D/121S/174L/185L/186G/190E/236P/244V/273V/284L/288E/289D/290V/293S/313A/315G/317T/336 D/342E/352P/359L/391G/394R/395R/419A/428V/431S/462F/470T/474M/499L/522L/523E, 80D/121S/174L/185L/190E/193G/196Y/244V/273V/284L/288E/289D/290V/293S/297R/313A/315G/317 T/324I/336D/342E/352P/359L/376H/380D/391G/394R/401G/415S/419A/428V/431S/435T/441M/462F/470T/474M/499L/522L/523E,

### 80D/121S/174L/185L/190E/193G/244V/273V/284L/288E/289D/290V/293S/297R/313A/315G/317T/336 D/342E/352P/359L/391G/394R/415S/419A/428V/431S/462F/470T/474M/499L/522L/523E,

### 80D/121S/174L/185L/190E/196R/244V/266K/273V/284L/288E/289D/290V/293S/313A/315G/317T/324 I/336D/342E/352P/359L/391G/394R/397R/401G/419A/428V/431S/462F/470T/474M/499L/522L/523E,

### 80D/121S/174L/185L/190E/236P/244V/273V/282R/284L/288E/289D/290V/293S/313A/315G/317T/336 D/342E/352P/359L/391G/394R/395R/419A/428V/431S/462F/470T/474M/499L/522L/523E,

### 80D/121S/174L/185L/190E/244V/273V/284L/288E/289D/290V/293S/313A/315G/317T/336D/342E/352P/359L/391G/394R/419A/428V/431S/462F/470T/474M/499L/522L/523E,

### 80D/121S/174L/185L/190E/244V/273V/284L/288E/289D/290V/293S/313A/315G/317T/336D/342E/359 L/391G/394R/428V/431S/462F/470T/474M/499L/522L/523E,

[0142] 80D/121S/174L/185L/190E/244V/284L/288E/289D/290V/293S/313A/315G/317T/336D/342E/352P/359 L/391G/394R/419A/428V/431S/462F/470T/474M/499L/522L/523E, 80D/121S/174L/185L/190E/244V/284L/288E/289D/290V/293S/313A/315G/317T/336D/342E/352P/359 L/391G/394R/428V/431S/462F/470T/474M/499L/522L/523E,

### 80D/121S/174L/185L/190E/244V/284L/288E/289D/290V/293S/313A/315G/317T/336D/342E/359L/391 G/394R/428V/431S/462F/470T/474M/499L/522L/523E,

### 80D/121S/185L/190E/196R/244V/289D/290V/293S/313A/315G/317T/336D/342E/359L/391G/470T/474M/499L/522L/523E, 80D/121S/185L/190E/201R/289D/290V/293S/313A/342E/470T/474M/499L/522L,

### 80D/121S/185L/190E/244V/273V/289D/290V/293S/313A/315G/317T/336D/342E/352P/359L/391G/419 A/435T/470T/474M/499L/522L/523E,

### 80D/121S/185L/190E/244V/289D/290V/293S/300R/313A/315G/317T/336D/342E/359L/391G/470T/474M/499L/522L/523E,

### 80D/121S/185L/190E/244V/289D/290V/293S/313A/315G/317T/336D/342E/359L/380D/391G/401G/419 A/470T/474M/499L/522L/523E,

### 80D/121S/185L/190E/244V/289D/290V/293S/313A/315G/317T/336D/342E/359L/391G/392R/470T/474M/499L/522L/523E,

### 80D/121S/185L/190E/244V/289D/290V/293S/313A/315G/317T/336D/342E/359L/391G/395W/470T/47 4M/499L/522L/523E,

### 80D/121S/185L/190E/244V/289D/290V/293S/313A/315G/317T/336D/342E/359L/391G/470T/474M/499 L/522L/523E,

### 80D/121S/185L/190E/244V/289D/290V/293S/313A/336D/342E/359L/391G/414H/470T/474M/499L/522 L/523E,

### 80D/121S/185L/190E/289D/290V/293S/313A/315G/336D/342E/359L/391G/414H/470T/474M/499L/522 L/523E,

### 80D/121S/185L/190E/289D/290V/293S/313A/336D/342E/359L/391G/470T/474M/499L/522L/523E,

### 80D/121S/185L/190E/289D/290V/293S/313A/342E/499L, 80D/121S/185L/315G,

[0143] 80D/121S/190E/289D/290V, 80D/185L/236P/289D/293S, 121S/185L/190E/213S/289D/290V/293S, and 185L/289D/290V/293S. In some embodiments, the engineered TdT polypeptide has increased soluble protein expression and comprises an amino acid sequence having at least 60%, 70%, 80%, 85%, 86%, 87%, 88%, 89%, 90%, 91%, 92%, 93%, 94%, 95%, 96%, 97%, 98%, 99% or more sequence identity to reference sequence SEQ ID NO: 2 and one or more residue differences as compared to SEQ ID NO: 2, selected from

### N80D/K106D/C121S/F185L/K190E/M205R/K289D/I290V/D293S/I313A/C315G/L336D/T342E/F359L/C391G/S470T/Q474M/K499L/I522L/Q523E,

### N80D/K106D/C121S/F185L/K190E/M205R/K289D/I290V/D293S/I313A/T342E/S470T/Q474M/K499L/Q523E,

### N80D/K106D/C121S/F185L/K190E/D244V/K289D/I290V/D293S/C307K/T342E/F359L/S470T/Q474M/K499L,

### N80D/C121S/K131E/F185L/K190E/M205R/D244V/K289D/I290V/D293S/I313A/C315G/L336D/T342E/F359L/C391G/F414H/S470T/Q474M/K499L/I522L/Q523E,

### N80D/C121S/K131E/F185L/K190E/M205R/D244V/K289D/I290V/D293S/I313A/L336D/T342E/F359L/C391G/F414H/S470T/Q474M/K499L/I522L/Q523E,

### N80D/C121S/K131E/F185L/K190E/K289D/I290V/D293S/I313A/T342E/S470T/Q474M/K499L/I522L/Q523E,

### N80D/C121S/I174L/Q179K/F185L/K190E/G236P/D244V/N288E/K289D/I290V/D293S/I313A/C315G/S317T/L336D/T342E/F359L/S363I/C391G/I394R/I408P/H426P/Y462F/S470T/Q474M/K499L/I522L/Q 523E,

### N80D/C121S/I174L/F185L/E186G/K190E/G236P/D244V/L273V/F284L/N288E/K289D/I290V/D293S/I 313A/C315G/S317T/L336D/T342E/E352P/F359L/C391G/I394R/E395R/L419A/E428V/R431S/Y462F/S 470T/Q474M/K499L/I522L/Q523E,

### N80D/C121S/I174L/F185L/K190E/E193G/E196Y/D244V/L273V/F284L/N288E/K289D/I290V/D293S/K297R/I313A/C315G/S317T/V324I/L336D/T342E/E352P/F359L/Q376H/N380D/C391G/I394R/L401G/Q415S/L419A/E428V/R431S/M435T/E441M/Y462F/S470T/Q474M/K499L/I522L/Q523E,

### N80D/C121S/I174L/F185L/K190E/E193G/D244V/L273V/F284L/N288E/K289D/I290V/D293S/K297R/I 313A/C315G/S317T/L336D/T342E/E352P/F359L/C391G/I394R/Q415S/L419A/E428V/R431S/Y462F/S 470T/Q474M/K499L/I522L/Q523E,

### N80D/C121S/I174L/F185L/K190E/E196R/D244V/T266K/L273V/F284L/N288E/K289D/I290V/D293S/I 313A/C315G/S317T/V324I/L336D/T342E/E352P/F359L/C391G/I394R/T397R/L401G/L419A/E428V/R 431S/Y462F/S470T/Q474M/K499L/I522L/Q523E,

### N80D/C121S/I174L/F185L/K190E/G236P/D244V/L273V/M282R/F284L/N288E/K289D/I290V/D293S/I313A/C315G/S317T/L336D/T342E/E352P/F359L/C391G/I394R/E395R/L419A/E428V/R431S/Y462F/S470T/Q474M/K499L/I522L/Q523E,

### N80D/C121S/I174L/F185L/K190E/D244V/L273V/F284L/N288E/K289D/I290V/D293S/I313A/C315G/S 317T/L336D/T342E/E352P/F359L/C391G/I394R/L419A/E428V/R431S/Y462F/S470T/Q474M/K499L/I 522L/Q523E,

### N80D/C121S/I174L/F185L/K190E/D244V/L273V/F284L/N288E/K289D/I290V/D293S/I313A/C315G/S 317T/L336D/T342E/F359L/C391G/I394R/E428V/R431S/Y462F/S470T/Q474M/K499L/I522L/Q523E,

### N80D/C121S/I174L/F185L/K190E/D244V/F284L/N288E/K289D/I290V/D293S/I313A/C315G/S317T/L 336D/T342E/E352P/F359L/C391G/I394R/L419A/E428V/R431S/Y462F/S470T/Q474M/K499L/I522L/Q 523E,

### N80D/C121S/I174L/F185L/K190E/D244V/F284L/N288E/K289D/I290V/D293S/I313A/C315G/S317T/L 336D/T342E/E352P/F359L/C391G/I394R/E428V/R431S/Y462F/S470T/Q474M/K499L/I522L/Q523E,

### N80D/C121S/I174L/F185L/K190E/D244V/F284L/N288E/K289D/I290V/D293S/I313A/C315G/S317T/L 336D/T342E/F359L/C391G/I394R/E428V/R431S/Y462F/S470T/Q474M/K499L/I522L/Q523E,

### N80D/C121S/F185L/K190E/E196R/D244V/K289D/I290V/D293S/I313A/C315G/S317T/L336D/T342E/F359L/C391G/S470T/Q474M/K499L/I522L/Q523E,

### N80D/C121S/F185L/K190E/C201R/K289D/I290V/D293S/I313A/T342E/S470T/Q474M/K499L/I522L,

### N80D/C121S/F185L/K190E/D244V/L273V/K289D/I290V/D293S/I313A/C315G/S317T/L336D/T342E/E352P/F359L/C391G/L419A/M435T/S470T/Q474M/K499L/I522L/Q523E,

### N80D/C121S/F185L/K190E/D244V/K289D/I290V/D293S/K300R/I313A/C315G/S317T/L336D/T342E/F359L/C391G/S470T/Q474M/K499L/I522L/Q523E,

### N80D/C121S/F185L/K190E/D244V/K289D/I290V/D293S/I313A/C315G/S317T/L336D/T342E/F359L/N380D/C391G/L401G/L419A/S470T/Q474M/K499L/I522L/Q523E,

### N80D/C121S/F185L/K190E/D244V/K289D/I290V/D293S/I313A/C315G/S317T/L336D/T342E/F359L/C391G/D392R/S470T/Q474M/K499L/I522L/Q523E,

### N80D/C121S/F185L/K190E/D244V/K289D/I290V/D293S/I313A/C315G/S317T/L336D/T342E/F359L/C391G/E395W/S470T/Q474M/K499L/I522L/Q523E,

### N80D/C121S/F185L/K190E/D244V/K289D/I290V/D293S/I313A/C315G/S317T/L336D/T342E/F359L/C391G/S470T/Q474M/K499L/I522L/Q523E,

### N80D/C121S/F185L/K190E/D244V/K289D/I290V/D293S/I313A/L336D/T342E/F359L/C391G/F414H/S470T/Q474M/K499L/I522L/Q523E,

### N80D/C121S/F185L/K190E/K289D/I290V/D293S/I313A/C315G/L336D/T342E/F359L/C391G/F414H/S470T/Q474M/K499L/I522L/Q523E,

### N80D/C121S/F185L/K190E/K289D/I290V/D293S/I313A/L336D/T342E/F359L/C391G/S470T/Q474M/K499L/I522L/Q523E, N80D/C121S/F185L/K190E/K289D/I290V/D293S/I313A/T342E/K499L,

### N80D/C121S/F185L/C315G, N80D/C121S/K190E/K289D/I290V, N80D/F185L/G236P/K289D/D293S, C121S/F185L/K190E/C213S/K289D/I290V/D293S, and F185L/K289D/I290V/D293S.

[0144] In some embodiments, the engineered TdT polypeptide has increased thermal stability and comprises an amino acid sequence having at least 60%, 70%, 80%, 85%, 86%, 87%, 88%, 89%, 90%, 91%, 92%, 93%, 94%, 95%, 96%, 97%, 98%, 99% or more sequence identity to reference sequence SEQ ID NO: 36 and one or more residue differences as compared to SEQ ID NO: 36, selected from 174/244/273/284/288/315/317/336/352/359/391/394/419/428/431/462/470/474/522/523, 174/244/284/288/315/317/336/359/391/394/428/431/462/470/474/522/523, 244/315/317/336/359/391/470/474/522/523, and 336/359/391/470/474/522/523. In some embodiments, the engineered TdT polypeptide has increased thermal stability and comprises an amino acid sequence having at least 60%, 70%, 80%, 85%, 86%, 87%, 88%, 89%, 90%, 91%, 92%, 93%, 94%, 95%, 96%, 97%, 98%, 99% or more sequence identity to reference sequence SEQ ID NO: 36 and one or more residue differences as compared to SEQ ID NO: 36, selected from

### 174L/244V/273V/284L/288E/315G/317T/336D/352P/359L/391G/394R/419A/428V/431S/462F/470T/474M/522L/523E,

[0145] 174L/244V/284L/288E/315G/317T/336D/359L/391G/394R/428V/431S/462F/470T/474M/522L/523E, 244V/315G/317T/336D/359L/391G/470T/474M/522L/523E, and 336D/359L/391G/470T/474M/522L/523E. In some embodiments, the engineered TdT polypeptide has
increased thermal stability and comprises an amino acid sequence having at least 60%, 70%, 80%, 85%, 86%, 87%, 88%, 89%, 90%, 91%, 92%, 93%, 94%, 95%, 96%, 97%, 98%, 99% or more sequence identity to reference sequence SEQ ID NO: 36 and one or more residue differences as compared to SEQ ID NO: 36, selected from

### I174L/D244V/L273V/F284L/N288E/C315G/S317T/L336D/E352P/F359L/C391G/I394R/L419A/E428V/R431S/Y462F/S470T/Q474M/I522L/Q523E,

### I174L/D244V/F284L/N288E/C315G/S317T/L336D/F359L/C391G/I394R/E428V/R431S/Y462F/S470T/Q474M/I522L/Q523E, D244V/C315G/S317T/L336D/F359L/C391G/S470T/Q474M/I522L/Q523E, and L336D/F359L/C391G/S470T/Q474M/I522L/Q523E.

[0146] In some embodiments, the engineered TdT polypeptide comprises an amino acid sequence having at least 60%, 70%, 80%, 85%, 86%, 87%, 88%, 89%, 90%, 91%, 92%, 93%, 94%, 95%, 96%, 97%, 98%, 99% or more sequence identity to reference sequence SEQ ID NO: 8 and one or more residue differences as compared to SEQ ID NO: 8, selected from 129/196, 173, 183, 186, 193, 195, 196, 263, 266, 268, 281, 282, 297, 300, 303, 316, 318, 320, 324, 343, 360, 392, 395, 397, 411, 415, 417, 421, 454, 456, 477, 481, and 492. In some embodiments, the engineered TdT polypeptide comprises an amino acid sequence having at least 60%, 70%, 80%, 85%, 86%, 87%, 88%, 89%, 90%, 91%, 92%, 93%, 94%, 95%, 96%, 97%, 98%, 99% or more sequence identity to reference sequence SEQ ID NO: 8 and one or more residue differences as compared to SEQ ID NO: 8, selected from 129G/196G, 173L, 183R, 186A, 186G, 186L, 186T, 193C, 193G, 193N, 193V, 195R, 195W, 196A, 196G, 196R, 196W, 196Y, 263R, 266K, 268C, 281A, 282Q, 282R, 297F, 297Q, 297R, 297T, 300P, 300R, 303A, 303E, 303M, 316C, 316I, 316T, 318E, 318S, 318T, 318V, 320N, 324I, 343V, 360C, 360V, 392A, 392C, 392R, 395A, 395L, 395R, 395S, 395T, 395W, 395Y, 397R, 411A, 411G, 411R, 415A, 415S, 417G, 417V, 421I, 421M, 454V, 456K, 456R, 477T, 481E, 481V, and 492T. In some embodiments, the engineered TdT polypeptide comprises an amino acid sequence having at least 60%, 70%, 80%, 85%, 86%, 87%, 88%, 89%, 90%, 91%, 92%, 93%, 94%, 95%, 96%, 97%, 98%, 99% or more sequence identity to reference sequence SEQ ID NO: 8 and one or more residue differences as compared to SEQ ID NO: 8, selected from D129G/E196G, T173L, D183R, E186A, E186G, E186L, E186T, E193C, E193G, E193N, E193V, K195R, K195W, E196A, E196G, E196R, E196W, E196Y, K263R, T266K, V268C, R281A, M282Q, M282R, K297F, K297Q, K297R, K297T, K300P, K300R, K303A, K303E, K303M, V316C, V316I, V316T, K318E, K318S, K318T, K318V, E320N, V324I, 1343V, L360C, L360V, D392A, D392C, D392R, E395A, E395L, E395R, E395S, E395T, E395W, E395Y, T397R, L411A, L411G, L411R, Q415A, Q415S, C417G, C417V, L421I, L421M, L454V, V456K, V456R, R477T, R481E, R481V, and D492T.

[0147] In some embodiments, the engineered TdT polypeptide comprises an amino acid sequence having at least 60%, 70%, 80%, 85%, 86%, 87%, 88%, 89%, 90%, 91%, 92%, 93%, 94%, 95%, 96%, 97%, 98%, 99% or more sequence identity to reference sequence SEQ ID NO: 16 and one or more residue differences as compared to SEQ ID NO: 16, selected from 186, 186/236/318, 186/236/395, 186/282/318, 193/196, 193/196/266/324/376/380, 193/196/297, 193/196/297/324/376/380/401/415/435/441, 193/196/324, 193/196/324/397/401/441, 193/196/376/380, 193/297/324/376/435, 193/297/324/380, 193/297/415, 193/435, 196, 196/266, 196/266/324/397/401, 196/297/324/435, 236/282, 236/282/395, 236/318/481, 266/297/380/397/401, 282, 282/318, 282/481, 297/380/401/441, 297/435, 318/395, 376/401/441, 415, and 435/441. In some embodiments, the engineered TdT polypeptide comprises an amino acid sequence having at least 60%, 70%, 80%, 85%, 86%, 87%, 88%, 89%, 90%, 91%, 92%, 93%, 94%, 95%, 96%, 97%, 98%, 99% or more sequence identity to reference sequence SEQ ID NO: 16 and one or more residue differences as compared to SEQ ID NO: 16, selected from 186G, 186G/236P/318S, 186G/236P/395R, 186G/282R/318S, 193G/196R/297R, 193G/196Y, 193G/196Y/266K/324I/376H/380D, 193G/196Y/297R/324I/376H/380D/401G/415S/435T/441M, 193G/196Y/324I/397R/401G/441M, 193G/196Y/376H/380D, 193G/297R/324I/376H/435T, 193G/297R/415S, 193G/435T, 193N/196Y/324I, 193N/297R/324I/380D, 196R, 196R/266K, 196R/266K/324I/397R/401G, 196Y/297R/324I/435T, 236P/282R, 236P/282R/395R, 236P/318S/481E, 266K/297R/380D/397R/401G, 282R, 282R/318S, 282R/481E, 297R/380D/401G/441M, 297R/435T, 318S/395R, 376H/401G/441M, 415S, and 435T/441M. In some embodiments, the engineered TdT polypeptide comprises an amino acid sequence having at least 60%, 70%, 80%, 85%, 86%, 87%, 88%, 89%, 90%, 91%, 92%, 93%, 94%, 95%, 96%, 97%, 98%, 99% or more sequence identity to reference sequence SEQ ID NO: 16 and one or more residue differences as compared to SEQ ID NO: 16, selected from E186G, E186G/G236P/K318S, E186G/G236P/E395R,

### E186G/M282R/K318S, E193G/E196R/K297R, E193G/E196Y,

### E193G/E196Y/T266K/V324I/Q376H/N380D,

### E193G/E196Y/K297R/V324I/Q376H/N380D/L401G/Q415S/M435T/E441M,

### E193G/E196Y/V324I/T397R/L401G/E441M, E193G/E196Y/Q376H/N380D,

### E193G/K297R/V324I/Q376H/M435T, E193G/K297R/Q415S, E193G/M435T, E193N/E196Y/V324I,

### E193N/K297R/V324I/N380D, E196R, E196R/T266K, E196R/T266K/V324I/T397R/L401G,

### E196Y/K297R/V324I/M435T, G236P/M282R, G236P/M282R/E395R, G236P/K318S/R481E,

### T266K/K297R/N380D/T397R/L401G, M282R, M282R/K318S, M282R/R481E,

### K297R/N380D/L401G/E441M, K297R/M435T, K318S/E395R, Q376H/L401G/E441M, Q415S, and

### M435T/E441M.

[0148] In some embodiments, the engineered TdT polypeptide comprises an amino acid sequence having at least 60%, 70%, 80%, 85%, 86%, 87%, 88%, 89%, 90%, 91%, 92%, 93%, 94%, 95%, 96%, 97%, 98%, 99% or more sequence identity to reference sequence SEQ ID NO: 24 and one or more residue differences as compared to SEQ ID NO: 24, selected from 12, 13, 14, 17, 18, 20, 21, 22, 23, 24, 26, 27, 29, 30, 31, 33, 34, 35, 37, 41, 53, 57, 58, 61, 92, 94, 97, 101, 102, 103, 104, 105, 106, 107, 108, 124, 126, 133, 135, 137, 138, 139, 140, 141, 142, 144, 145, 147, 149, 150, 152, 153, 154, 155, 156, 156/294, 159, 160, 161, 162, and 163. In some embodiments, the engineered TdT polypeptide comprises an amino acid sequence having at least 60%, 70%, 80%, 85%, 86%, 87%, 88%, 89%, 90%, 91%, 92%, 93%, 94%, 95%, 96%, 97%, 98%, 99% or more sequence identity to reference sequence SEQ ID NO: 24 and one or more residue differences as compared to SEQ ID NO: 24, selected from 12S, 13G, 13K, 13R, 13S, 14G, 14Q, 17A, 17G, 18D, 18R, 20H, 20T, 21E, 22G, 22L, 23E, 23P, 24G, 26G, 27D, 29P, 29R, 30E, 30G, 30V, 31S, 33G, 33K, 33P, 34D, 34K, 34R, 34S, 35E, 35G, 37A, 37F, 37G, 37S, 37T, 37V, 41V, 53E, 57H, 58A, 58S, 61H, 61L, 92M, 92R, 92S, 92V, 92Y, 94E, 94R, 97D, 101E, 102L, 103M, 104G, 104I, 104P, 105N, 106G, 106H, 106S, 107R, 107W, 108D, 108K, 124E, 124I, 126V, 133G, 135R, 137A, 138Q, 139A, 140E, 140G, 141E, 141M, 141R, 142M, 142S, 144C, 145E, 147L, 149R, 150E, 150G, 152G, 152R, 153E, 153G, 153K, 153M, 153P, 153Q, 153V, 154G, 155E, 155T, 156D, 156E/294T, 156M, 156Q, 159D, 160G, 161D, 161E, 161G, 161R, 161S, 162E, 163L, and 163V. In some embodiments, the engineered TdT polypeptide comprises an amino acid sequence having at least 60%, 70%, 80%, 85%, 86%, 87%, 88%, 89%, 90%, 91%, 92%, 93%, 94%, 95%, 96%, 97%, 98%, 99% or more sequence identity to reference sequence SEQ ID NO: 24 and one or more residue differences as compared to SEQ ID NO: 24, selected from M12S, H13G, H13K, H13R, H13S, R14G, R14Q, T17A, T17G, I18D, I18R, S20H, S20T, D21E, F22G, F22L, G23E, G23P, K24G, R26G, Q27D, K29P, K29R, M30E, M30G, M30V, D31S, H33G, H33K, H33P, I34D, I34K, I34R, I34S, S35E, S35G, M37A, M37F, M37G, M37S, M37T, M37V, I41V, K53E, A57H, T58A, T58S, T61H, T61L, G92M, G92R, G92S, G92V, G92Y, D94E, D94R, A97D, T101E, H102L, K103M, M104G, M104I, M104P, E105N, K106G, K106H, K106S, T107R, T107W, T108D, T108K, V124E, V124I, K126V, K133G, Q135R, M137A, E138Q, S139A, R140E, R140G, V141E, V141M, V141R, D142M, D142S, A144C, N145E, D147L, T149R, A150E, A150G, T152G, T152R, L153E, L153G, L153K, L153M, L153P, L153Q, L153V, N154G, I155E, I155T, L156D, L156E/K294T, L156M, L156Q, T159D, T160G, K161D, K161E, K161G, K161R, K161S, T162E, I163L, and I163V.

[0149] In some embodiments, the engineered TdT polypeptide comprises an amino acid sequence having at least 60%, 70%, 80%, 85%, 86%, 87%, 88%, 89%, 90%, 91%, 92%, 93%, 94%, 95%, 96%, 97%, 98%, 99% or more sequence identity to reference sequence SEQ ID NO: 24 and one or more residue differences as compared to SEQ ID NO: 24, selected from 7/135, 12, 13, 14, 15, 16, 17/131, 18, 20, 23, 24, 25, 26, 27, 28, 29, 31, 32, 33, 34, 35, 44, 45, 46, 57, 65, 77, 85, 89, 93, 94, 97, 101, 102, 103, 105, 106, 108, 109, 110, 119, 123, 124, 126, 130, 131, 132, 133, 134, 135, 137, 138, 139, 149, 150, 153, and 156. In some embodiments, the engineered TdT polypeptide comprises an amino acid sequence having at least 60%, 70%, 80%, 85%, 86%, 87%, 88%, 89%, 90%, 91%, 92%, 93%, 94%, 95%, 96%, 97%, 98%, 99% or more sequence identity to reference sequence SEQ ID NO: 24 and one or more residue differences as compared to SEQ ID NO: 24, selected from 7Y/135C, 12F, 13E, 14G, 14N, 14Y, 15L, 16V, 17A/131R, 18Y, 20P, 23C, 23E, 23T, 24A, 24M, 24P, 25N, 26G, 27D, 27F, 28R, 29G, 29I, 31V, 32E, 33A, 33C, 34S, 35H, 35W, 44S, 45R, 46M, 57T, 65S, 77C, 77S, 85V, 89A, 93V, 94N, 97T, 101E, 101G, 101V, 102L, 103M, 105N, 105W, 106V, 108G, 108M, 109M, 109N, 109T, 110M, 110V, 119F, 119Q, 123M, 123Q, 124E, 124G, 124I, 124M, 124S, 126C, 130A, 130M, 130Q, 130S, 131G, 131W, 132S, 133G, 133M, 133Q, 134M, 134W, 135E, 135H, 135K, 137A, 137E, 138A, 139G, 149R, 150E, 153E, 153G, 153P, 153Q, and 156D. In some embodiments, the engineered TdT polypeptide comprises an amino acid sequence having at least 60%, 70%, 80%, 85%, 86%, 87%, 88%, 89%, 90%, 91%, 92%, 93%, 94%, 95%, 96%, 97%, 98%, 99% or more sequence identity to reference sequence SEQ ID NO: 24 and one or more residue differences as compared to SEQ ID NO: 24, selected from H7Y/Q135C, M12F, H13E, R14G, R14N, R14Y, I15L, R16V, T17A/K131R, I18Y, S20P, G23C, G23E, G23T, K24A, K24M, K24P, K25N, R26G, Q27D, Q27F, K28R, K29G, K29I, D31V, N32E, H33A, H33C, I34S, S35H, S35W, H44S, E45R, F46M, A57T, D65S, E77C, E77S, I85V, N89A, S93V, D94N, A97T, T101E, T101G, T101V, H102L, K103M, E105N, E105W, K106V, T108G, T108M, Q109M, Q109N, Q109T, F110M, F110V, I119F, I119Q, K123M, K123Q, V124E, V124G, V124I, V124M, V124S, K126C, T130A, T130M, T130Q, T130S, K131G, K131W, G132S, K133G, K133M, K133Q, Y134M, Y134W, Q135E, Q135H, Q135K, M137A, M137E, E138A, S139G, T149R, A150E, L153E, L153G, L153P, L153Q, and L156D.

[0150] In some embodiments, the engineered TdT polypeptide comprises an amino acid sequence having at least 60%, 70%, 80%, 85%, 86%, 87%, 88%, 89%, 90%, 91%, 92%, 93%, 94%, 95%, 96%, 97%, 98%, 99% or more sequence identity to reference sequence SEQ ID NO: 268 and one or more residue differences as compared to SEQ ID NO: 268, selected from 14/53/300, 14/53/419, 106/300/415/419/456, 140, and 300/395/419. In some embodiments, the engineered TdT polypeptide comprises an amino acid sequence having at least 60%, 70%, 80%, 85%, 86%, 87%, 88%, 89%, 90%, 91%, 92%, 93%, 94%, 95%, 96%, 97%, 98%, 99% or more sequence identity to reference sequence SEQ ID NO: 268 and one or more residue differences as compared to SEQ ID NO: 268, selected from 14G/53K/300P, 14G/53K/419L, 106V/300P/415A/419L/456R, 140G, and 300P/395Y/419L. In some embodiments, the engineered TdT polypeptide comprises an amino acid sequence having at least 60%, 70%, 80%, 85%, 86%, 87%, 88%, 89%, 90%, 91%, 92%, 93%, 94%, 95%, 96%, 97%, 98%, 99% or more sequence identity to reference sequence SEQ ID NO: 268 and one or more residue differences as compared to SEQ ID NO: 268, selected from R14G/E53K/K300P, R14G/E53K/A419L, K106V/K300P/Q415A/A419L/V456R, R140G, and K300P/E395Y/A419L.

[0151] In some embodiments, the engineered TdT polypeptide comprises an amino acid sequence having at least 60%, 70%, 80%, 85%, 86%, 87%, 88%, 89%, 90%, 91%, 92%, 93%, 94%, 95%, 96%, 97%, 98%, 99% or more sequence identity to reference sequence SEQ ID NO: 648 and one or more residue differences as compared to SEQ ID NO: 648, selected from 12/14/34, 12/14/34/37/94/140/141/145, 12/14/34/37/106/140/142/150/152/153, 12/14/34/37/141/142, 12/14/34/37/142/145, 12/14/34/37/142/161, 12/14/34/37/150, 12/14/34/37/150/153, 12/14/34/140/142, 12/14/34/140/150, 12/14/34/142/150/153, 12/14/92/94, 12/14/94/150/152, 12/14/106/107/141/142, 12/14/106/108/140/141/145/150, 12/14/106/108/152, 12/14/141/142, 12/14/150/152/153, 12/14/153, 12/34/92/140, 12/34/150/152, 12/37/94/141/150/152/153, 12/37/140/141/150/162, 12/161, 14, 14/31/34/37/140/141/145/161/162, 14/34/37, 14/34/37/145, 14/34/37/152, 14/34/94/106/108/141, 14/34/150/153, 14/106, 14/140, 14/141/161, 14/142, 14/142/161/162, 14/153, 14/161, 20/21/24/33/58/104/106/124/155/156, 20/21/33/58/101/104/106/124/155, 20/21/58/104/106/155/156, 20/33/104/106/124/156, 20/58/101/104/106/156, 20/58/101/106, 20/101/106/156, 21/33/58/101/106, 21/33/58/106/155/156, 21/33/101/104/106, 21/33/106, 21/58/101/104/106/155, 21/58/106/155/156, 21/101/104/106/156, 21/104/106, 21/104/106/124, 21/104/106/156, 30/33/58/104/106/155/156, 30/33/101/106/156, 30/33/104/106/155/156, 30/101/104/106/155/156, 30/104/106/155, 30/104/106/155/156, 30/106/155, 33/58/104/106, 33/101/104/106/155, 34/37, 34/37/92, 34/37/140/141/142/145, 34/37/141/142, 34/37/150/153, 34/92/94/141/142, 34/141/142/145, 34/150/152/153, 37/92/142, 37/141/142, 37/153, 58/101/104/106/156, 58/101/106/155, 58/104/106/155/156, 92/94/106/142/145, 101/104/106, 101/104/106/155/156, 101/104/106/156, 101/106, 101/106/124/155, 101/106/155/156, 104/106, 104/106/124, 104/106/155, 104/106/155/156, 104/106/156, 106/107/108/142/220, 106/108/140/141/152/153, 106/108/140/142/150/153, 106/156, 140/141/142, 140/145, 140/145/150/152, 141, 141/152, and 161. In some embodiments, the engineered TdT polypeptide comprises an amino acid sequence having at least 60%, 70%, 80%, 85%, 86%, 87%, 88%, 89%, 90%, 91%, 92%, 93%, 94%, 95%, 96%, 97%, 98%, 99% or more sequence identity to reference sequence SEQ ID NO: 648 and one or more residue differences as compared to SEQ ID NO: 648, selected from 12S/14G/34D, 12S/14G/34D/37A/106K/140G/142M/150E/152R/153E, 12S/14G/34D/37A/141E/142S, 12S/14G/34D/37A/150E, 12S/14G/34D/37F/94E/140G/141E/145E, 12S/14G/34D/37F/142S/145E, 12S/14G/34D/37F/150E/153E, 12S/14G/34D/140G/142S, 12S/14G/34D/140G/150E, 12S/14G/34S/37A/142M/161E, 12S/14G/34S/142S/150E/153E, 12S/14G/92R/94E, 12S/14G/94E/150E/152R, 12S/14G/106K/107R/141E/142M, 12S/14G/106K/108K/140G/141E/145E/150E, 12S/14G/106K/108K/152R, 12S/14G/141E/142S, 12S/14G/150E/152R/153E, 12S/14G/153E, 12S/34D/92R/140G, 12S/34D/150E/152R, 12S/37A/94E/141E/150E/152R/153E, 12S/37F/140G/141E/150E/162E, 12S/161E, 14G, 14G/31G/34D/37A/140G/141E/145E/161E/162E, 14G/34D/94E/106K/108K/141E, 14G/34D/150E/153E, 14G/34S/37A, 14G/34S/37A/152R, 14G/34S/37F/145E, 14G/34S/150E/153E, 14G/106K, 14G/140G, 14G/141E/161E, 14G/142M, 14G/142S/161E/162E, 14G/153E, 14G/161E, 20T/21E/24G/33K/58A/104P/106S/124E/155E/156E, 20T/21E/33K/58A/101E/104P/106K/124E/155E, 20T/21E/58A/104I/106S/155E/156E, 20T/33K/104P/106K/124E/156E, 20T/58A/101E/106K, 20T/58S/101E/104P/106S/156E, 20T/101E/106K/156E, 21E/33K/58A/101E/106K, 21E/33K/58S/106S/155E/156E, 21E/33K/101E/104P/106S, 21E/33K/106S, 21E/58A/106K/155E/156E, 21E/58S/101E/104I/106S/155E, 21E/101E/104P/106S/156E, 21E/104I/106S/124E, 21E/104P/106S, 21E/104P/106S/156E, 30G/33K/58S/104P/106S/155E/156E, 30G/33K/101E/106S/156E, 30G/33K/104I/106S/155E/156E, 30G/101E/104P/106S/155E/156E, 30G/104P/106S/155E, 30G/104P/106S/155E/156E, 30G/106K/155E, 33K/58A/104I/106S, 33K/101E/104P/106K/155E, 34D/37A, 34D/37A/92R, 34D/37F/141E/142S, 34D/92R/94E/141E/142M, 34D/141E/142S/145E, 34D/150E/152R/153E, 34S/37A/150E/153E, 34S/37F/140G/141E/142M/145E, 37A/141E/142S, 37F/92R/142M, 37F/153E, 58A/101E/106K/155E, 58S/101E/104P/106S/156E, 58S/104I/106K/155E/156E, 92R/94E/106K/142S/145E, 101E/104I/106K, 101E/104I/106K/156E, 101E/104I/106S/156E, 101E/104P/106K/155E/156E, 101E/106K, 101E/106K/155E/156E, 101E/106S/124E/155E, 104I/106K, 104I/106K/124E, 104I/106S, 104I/106S/155E/156E, 104P/106K, 104P/106K/155E, 104P/106K/156E, 104P/106S, 104P/106S/155E, 106K/107R/108K/142S/220R, 106K/108K/140G/141E/152R/153E, 106K/108K/140G/142S/150E/153E, 106K/156E, 140G/141E/142M, 140G/145E, 140G/145E/150E/152R, 141E, 141E/152R, and 161E. In some embodiments, the engineered TdT polypeptide comprises an amino acid sequence having at least 60%, 70%, 80%, 85%, 86%, 87%, 88%, 89%, 90%, 91%, 92%, 93%, 94%, 95%, 96%, 97%, 98%, 99% or more sequence identity to reference sequence SEQ ID NO: 648 and one or more residue differences as compared to SEQ ID NO: 648, selected from M12S/R14G/I34D, M12S/R14G/I34D/M37A/V106K/R140G/D142M/A150E/T152R/L153E, M12S/R14G/I34D/M37A/V141E/D142S, M12S/R14G/I34D/M37A/A150E, M12S/R14G/I34D/M37F/D94E/R140G/V141E/N145E, M12S/R14G/I34D/M37F/D142S/N145E, M12S/R14G/I34D/M37F/A150E/L153E, M12S/R14G/I34D/R140G/D142S, M12S/R14G/I34D/R140G/A150E, M12S/R14G/I34S/M37A/D142M/K161E, M12S/R14G/I34S/D142S/A150E/L153E, M12S/R14G/G92R/D94E, M12S/R14G/D94E/A150E/T152R, M12S/R14G/V106K/T107R/V141E/D142M, M12S/R14G/V106K/T108K/R140G/V141E/N145E/A150E, M12S/R14G/V106K/T108K/T152R, M12S/R14G/V141E/D142S, M12S/R14G/A150E/T152R/L153E, M12S/R14G/L153E, M12S/I34D/G92R/R140G, M12S/I34D/A150E/T152R, M12S/M37A/D94E/V141E/A150E/T152R/L153E, M12S/M37F/R140G/V141E/A150E/T162E, M12S/K161E, R14G, R14G/D31G/I34D/M37A/R140G/V141E/N145E/K161E/T162E, R14G/I34D/D94E/V106K/T108K/V141E, R14G/I34D/A150E/L153E, R14G/I34S/M37A, R14G/I34S/M37A/T152R, R14G/I34S/M37F/N145E, R14G/I34S/A150E/L153E, R14G/V106K, R14G/R140G, R14G/V141E/K161E, R14G/D142M, R14G/D142S/K161E/T162E, R14G/L153E, R14G/K161E, S20T/D21E/K24G/H33K/T58A/M104P/V106S/V124E/I155E/L156E, S20T/D21E/H33K/T58A/T101E/M104P/V106K/V124E/I155E, S20T/D21E/T58A/M104I/V106S/I155E/L156E, S20T/H33K/M104P/V106K/V124E/L156E, S20T/T58A/T101E/V106K, S20T/T58S/T101E/M104P/V106S/L156E, S20T/T101E/V106K/L156E, D21E/H33K/T58A/T101E/V106K, D21E/H33K/T58S/V106S/I155E/L156E, D21E/H33K/T101E/M104P/V106S, D21E/H33K/V106S, D21E/T58A/V106K/I155E/L156E, D21E/T58S/T101E/M104I/V106S/I155E, D21E/T101E/M104P/V106S/L156E, D21E/M104I/V106S/V124E, D21E/M104P/V106S, D21E/M104P/V106S/L156E, M30G/H33K/T58S/M104P/V106S/I155E/L156E, M30G/H33K/T101E/V106S/L156E, M30G/H33K/M104I/V106S/I155E/L156E, M30G/T101E/M104P/V106S/I155E/L156E, M30G/M104P/V106S/I155E, M30G/M104P/V106S/I155E/L156E, M30G/V106K/I155E, H33K/T58A/M104I/V106S, H33K/T101E/M104P/V106K/I155E, I34D/M37A, I34D/M37A/G92R, I34D/M37F/V141E/D142S, I34D/G92R/D94E/V141E/D142M, I34D/V141E/D142S/N145E, I34D/A150E/T152R/L153E, I34S/M37A/A150E/L153E, I34S/M37F/R140G/V141E/D142M/N145E, M37A/V141E/D142S, M37F/G92R/D142M, M37F/L153E, T58A/T101E/V106K/I155E, T58S/T101E/M104P/V106S/L156E, T58S/M104I/V106K/I155E/L156E, G92R/D94E/V106K/D142S/N145E, T101E/M104I/V106K, T101E/M104I/V106K/L156E, T101E/M104I/V106S/L156E, T101E/M104P/V106K/I155E/L156E, T101E/V106K, T101E/V106K/I155E/L156E, T101E/V106S/V124E/I155E, M104I/V106K, M104I/V106K/V124E, M104I/V106S, M104I/V106S/I155E/L156E, M104P/V106K, M104P/V106K/I155E, M104P/V106K/L156E, M104P/V106S, M104P/V106S/I155E, V106K/T107R/T108K/D142S/S220R, V106K/T108K/R140G/V141E/T152R/L153E, V106K/T108K/R140G/D142S/A150E/L153E, V106K/L156E, R140G/V141E/D142M, R140G/N145E, R140G/N145E/A150E/T152R, V141E, V141E/T152R, and K161E.

[0152] In some embodiments, the engineered TdT polypeptide comprises an amino acid sequence having at least 60%, 70%, 80%, 85%, 86%, 87%, 88%, 89%, 90%, 91%, 92%, 93%, 94%, 95%, 96%, 97%, 98%, 99% or more sequence identity to reference sequence SEQ ID NO: 660 and one or more residue differences as compared to SEQ ID NO: 660, selected from 16/29/30, 16/29/30/33/153, 16/29/30/101/104, 16/30/104, 16/33, 29/30, 58, 92/94/108/141/155/392, 92/101/137/155/476,94/101/156/476, 101, 101/104, 101/137/155, 101/141/155/156, and 108. In some embodiments, the engineered TdT polypeptide comprises an amino acid sequence having at least 60%, 70%, 80%, 85%, 86%, 87%, 88%, 89%, 90%, 91%, 92%, 93%, 94%, 95%, 96%, 97%, 98%, 99% or more sequence identity to reference sequence SEQ ID NO: 660 and one or more residue differences as compared to SEQ ID NO: 660, selected from 16V/29I/30E, 16V/29I/30E/33K/153P, 16V/29I/30E/101E/104V, 16V/30L/104V, 16V/33K, 29I/30E, 58A, 92R/94E/108K/141E/155E/392R, 92R/101E/137A/155E/476R, 94E/101E/156E/476R, 101E, 101E/104V, 101E/137E/155E, 101E/141E/155E/156E, and 108K. In some embodiments, the engineered TdT polypeptide comprises an amino acid sequence having at least 60%, 70%, 80%, 85%, 86%, 87%, 88%, 89%, 90%, 91%, 92%, 93%, 94%, 95%, 96%, 97%, 98%, 99% or more sequence identity to reference sequence SEQ ID NO: 660 and one or more residue differences as compared to SEQ ID NO: 660, selected from R16V/K29I/M30E, R16V/K29I/M30E/H33K/E153P, R16V/K29I/M30E/T101E/M104V, R16V/M30L/M104V, R16V/H33K, K29I/M30E, T58A, G92R/D94E/T108K/V141E/I155E/D392R, G92R/T101E/M137A/I155E/E476R, D94E/T101E/L156E/E476R, T101E, T101E/M104V, T101E/M137E/I155E, T101E/V141E/I155E/L156E, and T108K.

[0153] In some embodiments, the engineered TdT polypeptide comprises an amino acid sequence having at least 60%, 70%, 80%, 85%, 86%, 87%, 88%, 89%, 90%, 91%, 92%, 93%, 94%, 95%, 96%, 97%, 98%, 99% or more sequence identity to reference sequence SEQ ID NO: 660 and one or more residue differences as compared to SEQ ID NO: 660, selected from 195, 197, 204/342, 205, 236/297, 258, 261, 262, 264, 268, 269, 276, 278, 280, 281, 282, 290, 291, 297, 300, 303, 306, 308, 309, 310, 312, 315, 316, 342, 344, 353, 360, 385, 391, 410, 413, 419, 421, 448, 454, 456, 473, 476, 515, and 525. In some embodiments, the engineered TdT polypeptide comprises an amino acid sequence having at least 60%, 70%, 80%, 85%, 86%, 87%, 88%, 89%, 90%, 91%, 92%, 93%, 94%, 95%, 96%, 97%, 98%, 99% or more sequence identity to reference sequence SEQ ID NO: 660 and one or more residue differences as compared to SEQ ID NO: 660, selected from 195E, 197M, 204L/342W, 205E, 205L, 236E/297L, 258A, 258C, 258G, 258L, 258M, 258S, 258W, 261G, 261R, 261V, 262I, 264A, 264E, 264R, 264S, 268L, 269W, 276S, 278C, 278E, 278I, 278R, 278T, 278V, 280F, 281A, 281C, 281G, 281L, 281S, 281T, 281V, 282C, 282G, 282H, 282W, 290A, 290L, 291S, 297C, 297D, 297S, 297V, 300R, 303A, 303N, 303Q, 303S, 303V, 306F, 308F, 308W, 309F, 310A, 310G, 310H, 310R, 310S, 312V, 315A, 315S, 316A, 316L, 342R, 342V, 344V, 353A, 353K, 353M, 353R, 353S, 360I, 385R, 391L, 391R, 410E, 413C, 413F, 413V, 419G, 419H, 421F, 448R, 454M, 456S, 473V, 476V, 515V, 525F, and 525H. In some embodiments, the engineered TdT polypeptide comprises an amino acid sequence having at least 60%, 70%, 80%, 85%, 86%, 87%, 88%, 89%, 90%, 91%, 92%, 93%, 94%, 95%, 96%, 97%, 98%, 99% or more sequence identity to reference sequence SEQ ID NO: 660 and one or more residue differences as compared to SEQ ID NO: 660, selected from K195E, N197M, F204L/E342W, M205E, M205L, G236E/K297L, R258A, R258C, R258G, R258L, R258M, R258S, R258W, S261G, S261R, S261V, F262I, L264A, L264E, L264R, L264S, V268L, F269W, A276S, K278C, K278E, K278I, K278R, K278T, K278V, Y280F, R281A, R281C, R281G, R281L, R281S, R281T, R281V, M282C, M282G, M282H, M282W, V290A, V290L, R291S, K297C, K297D, K297S, K297V, P300R, K303A, K303N, K303Q, K303S, K303V, L306F, Y308F, Y308W, Y309F, E310A, E310G, E310H, E310R, E310S, L312V, G315A, G315S, V316A, V316L, E342R, E342V, T344V, F353A, F353K, F353M, F353R, F353S, L360I, Q385R, G391L, G391R, A410E, H413C, H413F, H413V, L419G, L419H, L421F, K448R, L454M, R456S, R473V, E476V, A515V, S525F, and S525H.

[0154] In some embodiments, the engineered TdT polypeptide comprises an amino acid sequence having at least 60%, 70%, 80%, 85%, 86%, 87%, 88%, 89%, 90%, 91%, 92%, 93%, 94%, 95%, 96%, 97%, 98%, 99% or more sequence identity to reference sequence SEQ ID NO: 882 and one or more residue differences as compared to SEQ ID NO: 882, selected from 175, 196, 199, 203, 208, 275, 313, 314, 317, 321, 322, 325, 329/462, 379, 394, 397, 403/462, 406, 408, 457, 461, 462, 469, 477, 481, 484, and 495. In some embodiments, the engineered TdT polypeptide comprises an amino acid sequence having at least 60%, 70%, 80%, 85%, 86%, 87%, 88%, 89%, 90%, 91%, 92%, 93%, 94%, 95%, 96%, 97%, 98%, 99% or more sequence identity to reference sequence SEQ ID NO: 882 and one or more residue differences as compared to SEQ ID NO: 882, selected from 175L, 196G, 196Y, 199G, 199M, 199Q, 199R, 199S, 199V, 203A, 203G, 203L, 203R, 203S, 208V, 275V, 313I, 314G, 314K, 314L, 314R, 314V, 314Y, 317G, 321C, 321K, 321S, 322A, 325F, 325T, 325V, 325W, 329R/462E, 379C, 394E, 394T, 397D, 397T, 403F/462H, 406G, 406V, 408A, 408T, 457S, 457V, 461G, 461V, 462I, 462R, 462W, 469Q, 477T, 481D, 481M, 481T, 484M, 484R, and 495S. In some embodiments, the engineered TdT polypeptide comprises an amino acid sequence having at least 60%, 70%, 80%, 85%, 86%, 87%, 88%, 89%, 90%, 91%, 92%, 93%, 94%, 95%, 96%, 97%, 98%, 99% or more sequence identity to reference sequence SEQ ID NO: 882 and one or more residue differences as compared to SEQ ID NO: 882, selected from N175L, R196G, R196Y, D199G, D199M, D199Q, D199R, D199S, D199V, T203A, T203G, T203L, T203R, T203S, I208V, T275V, A313I, D314G, D314K, D314L, D314R, D314V, D314Y, T317G, A321C, A321K, A321S, D322A, S325F, S325T, S325V, S325W, Q329R/F462E, T379C, R394E, R394T, R397D, R397T, L403F/F462H, R406G, R406V, I408A, I408T, C457S, C457V, R461G, R461V, F462I, F462R, F462W, W469Q, R477T, R481D, R481M, R481T, T484M, T484R, and A495S.

[0155] In some embodiments, the engineered TdT polypeptide comprises an amino acid sequence having at least 60%, 70%, 80%, 85%, 86%, 87%, 88%, 89%, 90%, 91%, 92%, 93%, 94%, 95%, 96%, 97%, 98%, 99% or more sequence identity to reference sequence SEQ ID NO: 882 and one or more residue differences as compared to SEQ ID NO: 882, selected from 175, 179, 196, 199, 201, 203, 272, 273, 275, 307, 313, 314, 319, 321, 322, 324, 325, 350, 376, 394, 404, 406, 408, 461, 462, 477, 481, 484, 491, 492, 495, and 523. In some embodiments, the engineered TdT polypeptide comprises an amino acid sequence having at least 60%, 70%, 80%, 85%, 86%, 87%, 88%, 89%, 90%, 91%, 92%, 93%, 94%, 95%, 96%, 97%, 98%, 99% or more sequence identity to reference sequence SEQ ID NO: 882 and one or more residue differences as compared to SEQ ID NO: 882, selected from 175D, 175I, 175V, 179R, 196G, 199A, 199E, 199G, 199H, 199I, 199Q, 199R, 199V, 201A, 201W, 203M, 203R, 272T, 273M, 273W, 275D, 307M, 307V, 313M, 313Q, 313R, 313S, 314G, 314I, 319G, 319R, 321K, 322K, 322Q, 324V, 325A, 325V, 350S, 376V, 394L, 394M, 394S, 394T, 404F, 404W, 406V, 408G, 408L, 408R, 461A, 461G, 461Q, 461S, 462L, 462Q, 477Q, 481W, 484M, 484R, 491I, 492S, 492T, 495G, 495S, and 523H. In some embodiments, the engineered TdT polypeptide comprises an amino acid sequence having at least 60%, 70%, 80%, 85%, 86%, 87%, 88%, 89%, 90%, 91%, 92%, 93%, 94%, 95%, 96%, 97%, 98%, 99% or more sequence identity to reference sequence SEQ ID NO: 882 and one or more residue differences as compared to SEQ ID NO: 882, selected from N175D, N175I, N175V, Q179R, R196G, D199A, D199E, D199G, D199H, D199I, D199Q, D199R, D199V, C201A, C201W, T203M, T203R, G272T, V273M, V273W, T275D, C307M, C307V, A313M, A313Q, A313R, A313S, D314G, D314I, A319G, A319R, A321K, D322K, D322Q, I324V, S325A, S325V, G350S, Q376V, R394L, R394M, R394S, R394T, P404F, P404W, R406V, I408G, I408L, I408R, R461A, R461G, R461Q, R461S, F462L, F462Q, R477Q, R481W, T484M, T484R, L491I, D492S, D492T, A495G, A495S, and E523H.

[0156] In some embodiments, the engineered TdT polypeptide comprises an amino acid sequence having at least 60%, 70%, 80%, 85%, 86%, 87%, 88%, 89%, 90%, 91%, 92%, 93%, 94%, 95%, 96%, 97%, 98%, 99% or more sequence identity to reference sequence SEQ ID NO: 1336 and one or more residue differences as compared to SEQ ID NO: 1336, selected from 15/199/203/394, 15/199/394, 28/344/353/395, 195/199/203/278/297/394, 195/199/203/278/314/353/394, 195/203/278/394/395, 195/203/297/314/394, 195/203/297/394/419, 195/203/394, 195/278/297/394, 195/278/297/394/395, 195/314/344, 195/394/395, 199/203/297/394/395, 203/278/297/394, 203/297/314/394/395, 203/310/314/394/395/419, 203/344/394, 203/353, 203/394, 203/394/395, 297/394, 314/394/395, 344/394/395, 353, and 394. In some embodiments, the engineered TdT polypeptide comprises an amino acid sequence having at least 60%, 70%, 80%, 85%, 86%, 87%, 88%, 89%, 90%, 91%, 92%, 93%, 94%, 95%, 96%, 97%, 98%, 99% or more sequence identity to reference sequence SEQ ID NO: 1336 and one or more residue differences as compared to SEQ ID NO: 1336, selected from 15F/199R/203A/394E, 15F/199R/394E, 28N/344V/353K/395W, 195E/199R/203A/278E/297D/394E, 195E/199R/203A/278E/314R/353K/394E, 195E/203A/278E/394E/395W, 195E/203A/297D/314R/394E, 195E/203A/297D/394E/419M, 195E/203A/394E, 195E/278E/297D/394E, 195E/278E/297D/394E/395W, 195E/314R/344V, 195E/394E/395W, 199R/203A/297D/394E/395W, 203A/278E/297D/394E, 203A/297D/314R/394E/395W, 203A/310R/314R/394E/395W/419M, 203A/344V/394E, 203A/353K, 203A/394E, 203A/394E/395W, 297D/394E, 314R/394E/395W, 344V/394E/395W, 353K, and 394E. In some embodiments, the engineered TdT polypeptide comprises an amino acid sequence having at least 60%, 70%, 80%, 85%, 86%, 87%, 88%, 89%, 90%, 91%, 92%, 93%, 94%, 95%, 96%, 97%, 98%, 99% or more sequence identity to reference sequence SEQ ID NO: 1336 and one or more residue differences as compared to SEQ ID NO: 1336, selected from I15F/D199R/T203A/R394E, I15F/D199R/R394E, K28N/T344V/F353K/E395W, K195E/D199R/T203A/K278E/K297D/R394E, K195E/D199R/T203A/K278E/D314R/F353K/R394E, K195E/T203A/K278E/R394E/E395W, K195E/T203A/K297D/D314R/R394E, K195E/T203A/K297D/R394E/L419M, K195E/T203A/R394E, K195E/K278E/K297D/R394E, K195E/K278E/K297D/R394E/E395W, K195E/D314R/T344V, K195E/R394E/E395W, D199R/T203A/K297D/R394E/E395W, T203A/K278E/K297D/R394E, T203A/K297D/D314R/R394E/E395W, T203A/E310R/D314R/R394E/E395W/L419M, T203A/T344V/R394E, T203A/F353K, T203A/R394E, T203A/R394E/E395W, K297D/R394E, D314R/R394E/E395W, T344V/R394E/E395W, F353K, and R394E.

[0157] In some embodiments, the engineered TdT polypeptide comprises an amino acid sequence having at least 60%, 70%, 80%, 85%, 86%, 87%, 88%, 89%, 90%, 91%, 92%, 93%, 94%, 95%, 96%, 97%, 98%, 99% or more sequence identity to reference sequence SEQ ID NO: 1336 and one or more residue differences as compared to SEQ ID NO: 1336, selected from 61, 152/503, 160, 162, 165, 177, 200, 200/425, 213, 217, 219, 223, 236, 246, 248, 292, 292/411, 295, 326, 329, 330, 333, 334, 338, 340, 340/438, 363, 369, 370, 372, 373, 383, 400/401/402, 425, 427, 435, 435/503, 437, 440, 441, 442, 443, 444, 446, 459, 460, 488, 490, 501, 502, 503, 504, and 506. In some embodiments, the engineered TdT polypeptide comprises an amino acid sequence having at least 60%, 70%, 80%, 85%, 86%, 87%, 88%, 89%, 90%, 91%, 92%, 93%, 94%, 95%, 96%, 97%, 98%, 99% or more sequence identity to reference sequence SEQ ID NO: 1336 and one or more residue differences as compared to SEQ ID NO: 1336, selected from 61A, 152H/503S, 160M, 160N, 160S, 160V, 162A, 165K, 177L, 200C, 200C/425K, 200K, 200V, 213S, 217Q, 219L, 219R, 223Q, 236I, 236P, 236V, 246K, 248C, 248S, 292L/411P, 292T, 295S, 326C, 326M, 326N, 326S, 326T, 329K, 329R, 330E, 333A, 333D, 333G, 333H, 333R, 334E, 334R, 334S, 338T, 340A, 340G, 340M, 340M/438V, 340R, 340S, 363C, 369G, 369M, 369N, 370G, 372G, 373H, 373N, 383R, 400A/401E/402F, 425D, 425R, 425T, 427E, 427Q, 435A, 435C, 435E, 435G, 435K, 435Q, 435S, 435S/503M, 435T, 437Q, 437S, 440E, 440V, 441N, 442G, 443T, 444R, 446E, 446P, 459Q, 460G, 488S, 490E, 490H, 490R, 490V, 490W, 501A, 502G, 502R, 503E, 503Q, 503R, 503V, 504N, 504R, 504W, and 506E. In some embodiments, the engineered TdT polypeptide comprises an amino acid sequence having at least 60%, 70%, 80%, 85%, 86%, 87%, 88%, 89%, 90%, 91%, 92%, 93%, 94%, 95%, 96%, 97%, 98%, 99% or more sequence identity to reference sequence SEQ ID NO: 1336 and one or more residue differences as compared to SEQ ID NO: 1336, selected from T61A, R152H/1I503S, T160M, T160N, T160S, T160V, T162A, Q165K, H177L, T200C, T200C/H425K, T200K, T200V, C213S, E217Q, V219L, V219R, D223Q, G236I, G236P, G236V, E246K, L248C, L248S, S292L/L411P, S292T, T295S, L326C, L326M, L326N, L326S, L326T, Q329K, Q329R, D330E, W333A, W333D, W333G, W333H, W333R, T334E, T334R, T334S, D338T, L340A, L340G, L340M, L340M/G438V, L340R, L340S, S363C, E369G, E369M, E369N, Q370G, D372G, Q373H, Q373N, K383R, D400A/G401E/K402F, H425D, H425R, H425T, K427E, K427Q, M435A, M435C, M435E, M435G, M435K, M435Q, M435S, M435S/I503M, M435T, T437Q, T437S, N440E, N440V, E441N, S442G, E443T, A444R, S446E, S446P, Y459Q, D460G, K488S, M490E, M490H, M490R, M490V, M490W, K501A, K502G, K502R, 1503E, I503Q, I503R, I503V, F504N, F504R, F504W, and K506E.

[0158] In some embodiments, the engineered TdT polypeptide comprises an amino acid sequence having at least 60%, 70%, 80%, 85%, 86%, 87%, 88%, 89%, 90%, 91%, 92%, 93%, 94%, 95%, 96%, 97%, 98%, 99% or more sequence identity to reference sequence SEQ ID NO: 1348 and one or more residue differences as compared to SEQ ID NO: 1348, selected from 3/175/213/313/325/340/457/481/485, 3/307/321/340/353/406/408/445, 148/175/201/457/485, 175/201/333/412/425/457/485, 175/325/397, 175/333, 175/333/369/481, 175/333/485, 175/485, 199/307/321/340/406/408/445/484, 201/213/333/344/397/425/481/485, 201/333/344/457/481, 201/333/481, 201/406/408/462/484/502, 213, 213/333/397, 307/333/340/408/445/462/502, 307/373/406/408/484, 321/333/340, 325/333/369/425, 325/425/457/481, 333, 333/344/369/397, 333/344/369/485, 340/484, 344/485, 353/406, 373, and 406/408.

[0159] In some embodiments, the engineered TdT polypeptide comprises an amino acid sequence having at least 60%, 70%, 80%, 85%, 86%, 87%, 88%, 89%, 90%, 91%, 92%, 93%, 94%, 95%, 96%, 97%, 98%, 99% or more sequence identity to reference sequence SEQ ID NO: 1348 and one or more residue differences as compared to SEQ ID NO: 1348, selected from 3Q/175D/213S/313R/325T/340R/457V/481W/485D, 3Q/307M/321K/340R/353K/406G/408A/445N, 148T/175D/201A/457V/485D, 175D/201A/333A/412N/425D/457V/485D, 175D/325T/397Q, 175D/333A, 175D/333A/369N/481W, 175D/333A/485D, 175D/485D, 199H/307M/321K/340R/406G/408A/445N/484M, 201A/213S/333A/344V/397Q/425D/481W/485D, 201A/333A/344V/457V/481W, 201A/333A/481W, 201R/406G/408A/462L/484M/502G, 213S, 213S/333A/397Q, 307M/333G/340R/408A/445N/462L/502G, 307M/373H/406G/408A/484M, 321K/333G/340R, 325T/333A/369N/425D, 325T/425D/457V/481W, 333A/344V/369N/397Q, 333A/344V/369N/485D, 333G, 340R/484M, 344V/485D, 353K/406G, 373H, and 406G/408A. In some embodiments, the engineered TdT polypeptide comprises an amino acid sequence having at least 60%, 70%, 80%, 85%, 86%, 87%, 88%, 89%, 90%, 91%, 92%, 93%, 94%, 95%, 96%, 97%, 98%, 99% or more sequence identity to reference sequence SEQ ID NO: 1348 and one or more residue differences as compared to SEQ ID NO: 1348, selected from H3Q/N175D/C213S/A313R/S325T/L340R/C457V/R481W/H485D, H3Q/C307M/A321K/L340R/F353K/R406G/I408A/K445N, P148T/N175D/C201A/C457V/H485D, N175D/C201A/W333A/D412N/H425D/C457V/H485D, N175D/S325T/R397Q, N175D/W333A, N175D/W333A/E369N/R481W, N175D/W333A/H485D, N175D/H485D, D199H/C307M/A321K/L340R/R406G/I408A/K445N/T484M, C201A/C213S/W333A/T344V/R397Q/H425D/R481W/H485D, C201A/W333A/T344V/C457V/R481W, C201A/W333A/R481W, C201R/R406G/1408A/F462L/T484M/K502G, C213S, C213S/W333A/R397Q, C307M/W333G/L340R/1408A/K445N/F462L/K502G, C307M/Q373H/R406G/1408A/T484M, A321K/W333G/L340R, S325T/W333A/E369N/H425D, S325T/H425D/C457V/R481W, W333A/T344V/E369N/R397Q, W333A/T344V/E369N/H485D, W333G, L340R/T484M, T344V/H485D, F353K/R406G, Q373H, and R406G/I408A.

[0160] In some embodiments, the engineered TdT polypeptide comprises an amino acid sequence having at least 60%, 70%, 80%, 85%, 86%, 87%, 88%, 89%, 90%, 91%, 92%, 93%, 94%, 95%, 96%, 97%, 98%, 99% or more sequence identity to reference sequence SEQ ID NO: 1596 and one or more residue differences as compared to SEQ ID NO: 1596, selected from 160/219/460/503/506, 219/307/326, 252, 252/333, 406/408, 406/408/442/446, 406/408/490, 408, and 446. In some embodiments, the engineered TdT polypeptide comprises an amino acid sequence having at least 60%, 70%, 80%, 85%, 86%, 87%, 88%, 89%, 90%, 91%, 92%, 93%, 94%, 95%, 96%, 97%, 98%, 99% or more sequence identity to reference sequence SEQ ID NO: 1596 and one or more residue differences as compared to SEQ ID NO: 1596, selected from 160M/219R/460G/503E/506E, 219R/307M/326T, 252K, 252K/333H, 406G/408A, 406G/408A/442G/446P, 406G/408A/490R, 408A, and 446P. In some embodiments, the engineered TdT polypeptide comprises an amino acid sequence having at least 60%, 70%, 80%, 85%, 86%, 87%, 88%, 89%, 90%, 91%, 92%, 93%, 94%, 95%, 96%, 97%, 98%, 99% or more sequence identity to reference sequence SEQ ID NO: 1596 and one or more residue differences as compared to SEQ ID NO: 1596, selected from T160M/V219R/D460G/I503E/K506E, V219R/C307M/L326T, A252K, A252K/A333H, R406G/I408A, R406G/I408A/S442G/S446P, R406G/I408A/M490R, 1408A, and S446P.

[0161] In some embodiments, the engineered TdT polypeptide comprises an amino acid sequence having at least 60%, 70%, 80%, 85%, 86%, 87%, 88%, 89%, 90%, 91%, 92%, 93%, 94%, 95%, 96%, 97%, 98%, 99% or more sequence identity to reference sequence SEQ ID NO: 1596 and one or more residue differences as compared to SEQ ID NO: 1596, selected from 162, 163, 165, 171, 177, 179, 188, 200, 205, 208, 233, 252, 253, 260, 261, 277, 307, 325, 329, 330, 353, 371, 376, 382, 393, 400, 402, 405, 406, 407, 410, 413, 419, 441, 442, 460, 464, 484, 488, 490, 495, 506, 508, and 520. In some embodiments, the engineered TdT polypeptide comprises an amino acid sequence having at least 60%, 70%, 80%, 85%, 86%, 87%, 88%, 89%, 90%, 91%, 92%, 93%, 94%, 95%, 96%, 97%, 98%, 99% or more sequence identity to reference sequence SEQ ID NO: 1596 and one or more residue differences as compared to SEQ ID NO: 1596, selected from 162H, 163V, 165P, 171K, 177Y, 179K, 188M, 200A, 205R, 208A, 233D, 252E, 253I, 260K, 261A, 277E, 307L, 325L, 329K, 330E, 353Q, 371D, 376H, 382L, 393I, 400E, 402Q, 405N, 406P, 407A, 410Q, 413G, 419A, 441M, 442A, 460E, 464Y, 484E, 488N, 490L, 495G, 506S, 508D, and 520D. In some embodiments, the engineered TdT polypeptide comprises an amino acid sequence having at least 60%, 70%, 80%, 85%, 86%, 87%, 88%, 89%, 90%, 91%, 92%, 93%, 94%, 95%, 96%, 97%, 98%, 99% or more sequence identity to reference sequence SEQ ID NO: 1596 and one or more residue differences as compared to SEQ ID NO: 1596, selected from T162H, I163V, Q165P, R171K, H177Y, Q179K, L188M, T200A, M205R, I208A, E233D, A252E, V253I, Q260K, S261A, D277E, C307L, S325L, Q329K, D330E, F353Q, E371D, Q376H, W382L, L393I, D400E, K402Q, S405N, R406P, K407A, A410Q, H413G, L419A, E441M, S442A, D460E, F464Y, T484E, K488N, M490L, A495G, K506S, K508D, and E520D.

[0162] In some embodiments, the engineered TdT polypeptide comprises an amino acid sequence having at least 60%, 70%, 80%, 85%, 86%, 87%, 88%, 89%, 90%, 91%, 92%, 93%, 94%, 95%, 96%, 97%, 98%, 99% or more sequence identity to reference sequence SEQ ID NO: 1596 and one or more residue differences as compared to SEQ ID NO: 1596, selected from 161, 162, 163, 165, 179, 188, 205, 208, 231, 233, 251, 252, 253, 261, 277, 306, 307, 321, 325, 327, 329, 353, 368, 370, 371, 376, 380, 393, 400, 402, 406, 410, 413, 414, 419, 426, 441, 442, 460, 464, 484, 488, 490, 495, 506, 508, and 518. In some embodiments, the engineered TdT polypeptide comprises an amino acid sequence having at least 60%, 70%, 80%, 85%, 86%, 87%, 88%, 89%, 90%, 91%, 92%, 93%, 94%, 95%, 96%, 97%, 98%, 99% or more sequence identity to reference sequence SEQ ID NO: 1596 and one or more residue differences as compared to SEQ ID NO: 1596, selected from 161R, 162H, 163V, 165P, 179K, 188M, 205R, 208A, 231T, 233D, 251K, 252E, 253I, 261A, 277E, 306F, 307L, 321K, 325L, 327I, 329K, 353Q, 368R, 370T, 371D, 376H, 380D, 393I, 400E, 402Q, 406P, 410Q, 413G, 414H, 419A, 426P, 441M, 442A, 460E, 464Y, 484E, 488N, 490L, 495G, 506S, 508D, and 518D. In some embodiments, the engineered TdT polypeptide comprises an amino acid sequence having at least 60%, 70%, 80%, 85%, 86%, 87%, 88%, 89%, 90%, 91%, 92%, 93%, 94%, 95%, 96%, 97%, 98%, 99% or more sequence identity to reference sequence SEQ ID NO: 1596 and one or more residue differences as compared to SEQ ID NO: 1596, selected from K161R, T162H, I163V, Q165P, Q179K, L188M, M205R, I208A, G231T, E233D, Q251K, A252E, V253I, S261A, D277E, L306F, C307L, A321K, S325L, L327I, Q329K, F353Q, K368R, Q370T, E371D, Q376H, N380D, L393I, D400E, K402Q, R406P, A410Q, H413G, F414H, L419A, H426P, E441M, S442A, D460E, F464Y, T484E, K488N, M490L, A495G, K506S, K508D, and G518D.

[0163] In some embodiments, the engineered TdT polypeptide comprises an amino acid sequence having at least 60%, 70%, 80%, 85%, 86%, 87%, 88%, 89%, 90%, 91%, 92%, 93%, 94%, 95%, 96%, 97%, 98%, 99% or more sequence identity to reference sequence SEQ ID NO: 1654 and one or more residue differences as compared to SEQ ID NO: 1654, selected from 160/165/203/205/219/353/460/488, 160/165/205/219/441, 160/203/205/441, 160/219/330/484, 179/353, 205/307/441/460/488, and 441. In some embodiments, the engineered TdT polypeptide comprises an amino acid sequence having at least 60%, 70%, 80%, 85%, 86%, 87%, 88%, 89%, 90%, 91%, 92%, 93%, 94%, 95%, 96%, 97%, 98%, 99% or more sequence identity to reference sequence SEQ ID NO: 1654 and one or more residue differences as compared to SEQ ID NO: 1654, selected from 160M/165P/203E/205R/219R/353Q/460G/488N, 160M/165P/205R/219R/441M, 160M/203E/205R/441M, 160M/219R/330K/484E, 179K/353Q, 205R/307L/441M/460G/488N, and 441M. In some embodiments, the engineered TdT polypeptide comprises an amino acid sequence having at least 60%, 70%, 80%, 85%, 86%, 87%, 88%, 89%, 90%, 91%, 92%, 93%, 94%, 95%, 96%, 97%, 98%, 99% or more sequence identity to reference sequence SEQ ID NO: 1654 and one or more residue differences as compared to SEQ ID NO: 1654, selected from T160M/Q165P/T203E/M205R/V219R/F353Q/D460G/K488N, T160M/Q165P/M205R/V219R/E441M, T160M/T203E/M205R/E441M, T160M/V219R/D330K/T484E, Q179K/F353Q, M205R/C307L/E441M/D460G/K488N, and E441M.

[0164] In some embodiments, the engineered TdT polypeptide comprises an amino acid sequence having at least 60%, 70%, 80%, 85%, 86%, 87%, 88%, 89%, 90%, 91%, 92%, 93%, 94%, 95%, 96%, 97%, 98%, 99% or more sequence identity to reference sequence SEQ ID NO: 1654 and one or more residue differences as compared to SEQ ID NO: 1654, selected from 3/160/205/208/219/307/353/371/376/413/414/441/488, 160, 160/165/179/203/205/208/219/353/376/413/414/441/488, 160/165/179/203/307/376/413/495, 160/165/203/205/219/353/460/488, 160/165/203/205/307/371/376/413/414, 160/165/203/208/371/376/413/414, 160/165/205, 160/165/205/208, 160/165/205/219/441, 160/165/205/414/441/495, 160/165/307/353/413/414/441/488/495, 160/179/203/205/208/219/371/414/484/506, 160/179/208/219/307/413/414/503/506, 160/179/208/307/371/376/414, 160/179/307/376/441/488/503, 160/203/205/208/219/414/460/506, 160/203/205/208/413/460/484/488, 160/203/205/441, 160/203/208/307/353/495, 160/203/208/371/413/414, 160/203/208/413/414/441/484, 160/203/326/353/413/414/484/495, 160/205/208/219/326/441/484/488/503, 160/208/326/376/414/441/484/488, 160/208/371/441/484/506, 160/208/414/441/452/480/488/495, 160/219/307/371/506, 160/219/330/484, 165/179/203/205/219/414/418/441/488/503, 165/179/203/205/484/503, 165/179/205/413/441, 165/179/208/353/413/414/503, 165/203/205, 165/203/205/307/414/441/484/495/503/506, 165/203/205/484/488, 165/203/208/326/376/503, 165/205, 165/208/326/413/414/484/495/506, 179, 179/203/205, 179/203/208/326/353/376/484, 179/205/208/353/414/441/460/484/488, 179/205/353, 179/208/353/460, 179/353, 203/205/208/307/330/353/441/460/503/506, 203/205/208/307/441, 203/205/208/353, 203/208/219/376/441, 203/208/219/441, 203/208/326/353, 203/413/503/506, 205/208/307/353/376/413, 205/208/414, 205/219/307/353, 205/307, 205/307/376/414/441/495, 205/307/441/460/488, 205/326/488/503/506, 208/488/506, 326/353/371/376/414, and 441. In some embodiments, the engineered TdT polypeptide comprises an amino acid sequence having at least 60%, 70%, 80%, 85%, 86%, 87%, 88%, 89%, 90%, 91%, 92%, 93%, 94%, 95%, 96%, 97%, 98%, 99% or more sequence identity to reference sequence SEQ ID NO: 1654 and one or more residue differences as compared to SEQ ID NO: 1654, selected from

### 3Q/160M/205R/208A/219R/307L/353Q/371D/376H/413G/414H/441M/488N, 160M,

### 160M/165P/179K/203E/205R/208A/219R/353Q/376H/413G/414H/441M/488N,

### 160M/165P/179K/203E/307L/376H/413G/495G, 160M/165P/203E/205R/219R/353Q/460G/488N,

### 160M/165P/203E/205R/307L/371D/376H/413G/414H, 160M/165P/203E/208A/371D/376H/413G/414H,

### 160M/165P/205R, 160M/165P/205R/208A, 160M/165P/205R/219R/441M,

### 160M/165P/205R/414H/441M/495G, 160M/165P/307L/353Q/413G/414H/441M/488N/495G,

### 160M/179K/203E/205R/208A/219R/371D/414H/484E/506E,

### 160M/179K/208A/219R/307L/413G/414H/503E/506E, 160M/179K/208A/307L/371D/376H/414H,

### 160M/179K/307L/376H/441M/488N/503E, 160M/203E/205R/208A/219R/414H/460G/506E,

### 160M/203E/205R/208A/413G/460G/484E/488N, 160M/203E/205R/441M,

### 160M/203E/208A/307L/353Q/495G, 160M/203E/208A/371D/413G/414H,

### 160M/203E/208A/413G/414H/441M/484E, 160M/203E/326T/353Q/413G/414H/484E/495G,

### 160M/205R/208A/219R/326T/441M/484E/488N/503E,

### 160M/208A/326T/376H/414H/441M/484E/488N, 160M/208A/371D/441M/484E/506E,

### 160M/208A/414H/441M/452I/480H/488N/495G, 160M/219R/307L/371D/506E,

### 160M/219R/330K/484E, 165P/179K/203E/205R/219R/414H/418I/441M/488N/503E,

### 165P/179K/203E/205R/484E/503E, 165P/179K/205R/413G/441M,

### 165P/179K/208A/353Q/413G/414H/503E, 165P/203E/205R,

### 165P/203E/205R/307L/414Y/441M/484E/495G/503E/506E, 165P/203E/205R/484E/488N,

### 165P/203E/208A/326T/376H/503E, 165P/205R, 165P/208A/326T/413G/414H/484E/495G/506E, 179K,

### 179K/203E/205R, 179K/203E/208A/326T/353Q/376H/484E,

### 179K/205R/208A/353Q/414H/441M/460G/484E/488N, 179K/205R/353Q, 179K/208A/353Q/460G,

### 179K/353Q, 203E/205R/208A/307L/330N/353Q/441M/460G/503E/506E, 203E/205R/208A/307L/441M,

### 203E/205R/208A/353Q, 203E/208A/219R/376H/441M, 203E/208A/219R/441M,

### 203E/208A/326T/353Q, 203E/413G/503E/506E, 205R/208A/307L/353Q/376H/413G, 205R/208A/414H,

### 205R/219R/307L/353Q, 205R/307L, 205R/307L/376H/414H/441M/495G,

### 205R/307L/441M/460G/488N, 205R/326T/488N/503E/506E, 208A/488N/506E,

[0165] 326T/353Q/371D/376H/414H, and 441M. In some embodiments, the engineered TdT polypeptide comprises an amino acid sequence having at least 60%, 70%, 80%, 85%, 86%, 87%, 88%, 89%, 90%, 91%, 92%, 93%, 94%, 95%, 96%, 97%, 98%, 99% or more sequence identity to reference sequence SEQ ID NO: 1654 and one or more residue differences as compared to SEQ ID NO: 1654, selected from H3Q/T160M/M205R/I208A/V219R/C307L/F353Q/E371D/Q376H/H413G/F414H/E441M/K488N, T160M,

### T160M/Q165P/Q179K/T203E/M205R/I208A/V219R/F353Q/Q376H/H413G/F414H/E441M/K488N,

### T160M/Q165P/Q179K/T203E/C307L/Q376H/H413G/A495G,

### T160M/Q165P/T203E/M205R/V219R/F353Q/D460G/K488N,

### T160M/Q165P/T203E/M205R/C307L/E371D/Q376H/H413G/F414H,

### T160M/Q165P/T203E/1208A/E371D/Q376H/H413G/F414H, T160M/Q165P/M205R,

### T160M/Q165P/M205R/I208A, T160M/Q165P/M205R/V219R/E441M,

### T160M/Q165P/M205R/F414H/E441M/A495G,

### T160M/Q165P/C307L/F353Q/H413G/F414H/E441M/K488N/A495G,

### T160M/Q179K/T203E/M205R/I208A/V219R/E371D/F414H/T484E/K506E,

### T160M/Q179K/I208A/V219R/C307L/H413G/F414H/I503E/K506E,

### T160M/Q179K/I208A/C307L/E371D/Q376H/F414H,

### T160M/Q179K/C307L/Q376H/E441M/K488N/I503E,

### T160M/T203E/M205R/I208A/V219R/F414H/D460G/K506E,

### T160M/T203E/M205R/I208A/H413G/D460G/T484E/K488N, T160M/T203E/M205R/E441M,

### T160M/T203E/I208A/C307L/F353Q/A495G, T160M/T203E/I208A/E371D/H413G/F414H,

### T160M/T203E/I208A/H413G/F414H/E441M/T484E,

### T160M/T203E/L326T/F353Q/H413G/F414H/T484E/A495G,

### T160M/M205R/I208A/V219R/L326T/E441M/T484E/K488N/I503E,

### T160M/I208A/L326T/Q376H/F414H/E441M/T484E/K488N,

### T160M/I208A/E371D/E441M/T484E/K506E,

### T160M/I208A/F414H/E441M/V452I/R480H/K488N/A495G, T160M/V219R/C307L/E371D/K506E,

### T160M/V219R/D330K/T484E,

### Q165P/Q179K/T203E/M205R/V219R/F414H/F418I/E441M/K488N/I503E,

### Q165P/Q179K/T203E/M205R/T484E/I503E, Q165P/Q179K/M205R/H413G/E441M,

### Q165P/Q179K/I208A/F353Q/H413G/F414H/I503E, Q165P/T203E/M205R,

### Q165P/T203E/M205R/C307L/F414Y/E441M/T484E/A495G/I503E/K506E,

### Q165P/T203E/M205R/T484E/K488N, Q165P/T203E/I208A/L326T/Q376H/I503E, Q165P/M205R,

### Q165P/I208A/L326T/H413G/F414H/T484E/A495G/K506E, Q179K, Q179K/T203E/M205R,

### Q179K/T203E/I208A/L326T/F353Q/Q376H/T484E,

### Q179K/M205R/I208A/F353Q/F414H/E441M/D460G/T484E/K488N, Q179K/M205R/F353Q,

### Q179K/I208A/F353Q/D460G, Q179K/F353Q,

### T203E/M205R/I208A/C307L/D330N/F353Q/E441M/D460G/I503E/K506E,

### T203E/M205R/I208A/C307L/E441M, T203E/M205R/I208A/F353Q,

### T203E/I208A/V219R/Q376H/E441M, T203E/I208A/V219R/E441M, T203E/I208A/L326T/F353Q,

### T203E/H413G/I503E/K506E, M205R/I208A/C307L/F353Q/Q376H/H413G, M205R/I208A/F414H,

### M205R/V219R/C307L/F353Q, M205R/C307L, M205R/C307L/Q376H/F414H/E441M/A495G,

### M205R/C307L/E441M/D460G/K488N, M205R/L326T/K488N/I503E/K506E, I208A/K488N/K506E,

### L326T/F353Q/E371D/Q376H/F414H, and E441M.

[0166] In some embodiments, the engineered TdT polypeptide comprises an amino acid sequence having at least 60%, 70%, 80%, 85%, 86%, 87%, 88%, 89%, 90%, 91%, 92%, 93%, 94%, 95%, 96%, 97%, 98%, 99% or more sequence identity to reference sequence SEQ ID NO: 1830 and one or more residue differences as compared to SEQ ID NO: 1830, selected from 163/179/277/338/340, 163/414/441, 171/200/334/406/490, 177, and 292/406. In some embodiments, the engineered TdT polypeptide comprises an amino acid sequence having at least 60%, 70%, 80%, 85%, 86%, 87%, 88%, 89%, 90%, 91%, 92%, 93%, 94%, 95%, 96%, 97%, 98%, 99% or more sequence identity to reference sequence SEQ ID NO: 1830 and one or more residue differences as compared to SEQ ID NO: 1830, selected from 163V/179K/277E/338T/340A, 163V/414H/441M, 171K/200V/334R/406P/490L, 177L, and 292T/406P.

[0167] In some embodiments, the engineered TdT polypeptide comprises an amino acid sequence having at least 60%, 70%, 80%, 85%, 86%, 87%, 88%, 89%, 90%, 91%, 92%, 93%, 94%, 95%, 96%, 97%, 98%, 99% or more sequence identity to reference sequence SEQ ID NO: 1830 and one or more residue differences as compared to SEQ ID NO: 1830, selected from I163V/Q179K/D277E/D338T/L340A, I163V/F414H/E441M, R171K/T200V/T334R/G406P/M490L, H177L, and S292T/G406P.

[0168] In some embodiments, the engineered TdT polypeptide comprises an amino acid sequence having at least 60%, 70%, 80%, 85%, 86%, 87%, 88%, 89%, 90%, 91%, 92%, 93%, 94%, 95%, 96%, 97%, 98%, 99% or more sequence identity to reference sequence SEQ ID NO: 1100 and one or more residue differences as compared to SEQ ID NO: 1100, selected from 101/137/264/476/525 and 264. In some embodiments, the engineered TdT polypeptide comprises an amino acid sequence having at least 60%, 70%, 80%, 85%, 86%, 87%, 88%, 89%, 90%, 91%, 92%, 93%, 94%, 95%, 96%, 97%, 98%, 99% or more sequence identity to reference sequence SEQ ID NO: 1100 and one or more residue differences as compared to SEQ ID NO: 1100, selected from 101E/137A/264R/476R/525F and 264R. In some embodiments, the engineered TdT polypeptide comprises an amino acid sequence having at least 60%, 70%, 80%, 85%, 86%, 87%, 88%, 89%, 90%, 91%, 92%, 93%, 94%, 95%, 96%, 97%, 98%, 99% or more sequence identity to reference sequence SEQ ID NO: 1100 and one or more residue differences as compared to SEQ ID NO: 1100, selected from T101E/M137A/L264R/E476R/S525F and L264R.

[0169] In some embodiments, the engineered TdT polypeptide comprises an amino acid sequence having at least 60%, 70%, 80%, 85%, 86%, 87%, 88%, 89%, 90%, 91%, 92%, 93%, 94%, 95%, 96%, 97%, 98%, 99% or more sequence identity to reference sequence SEQ ID NO: 1654 and one or more residue differences as compared to SEQ ID NO: 1654, selected from 160/163/165/203/205/219/353/414/441/460/488 and 160/165/203/205/219/353/460/488. In some embodiments, the engineered TdT polypeptide comprises an amino acid sequence having at least 60%, 70%, 80%, 85%, 86%, 87%, 88%, 89%, 90%, 91%, 92%, 93%, 94%, 95%, 96%, 97%, 98%, 99% or more sequence identity to reference sequence SEQ ID NO: 1654 and one or more residue differences as compared to SEQ ID NO: 1654, selected from

### 160M/163V/165P/203E/205R/219R/353Q/414H/441M/460G/488N and

[0170] 160M/165P/203E/205R/219R/353Q/460G/488N. In some embodiments, the engineered TdT polypeptide comprises an amino acid sequence having at least 60%, 70%, 80%, 85%, 86%, 87%, 88%, 89%, 90%, 91%, 92%, 93%, 94%, 95%, 96%, 97%, 98%, 99% or more sequence identity to reference sequence SEQ ID NO: 1654 and one or more residue differences as compared to SEQ ID NO: 1654, selected from

### T160M/I163V/Q165P/T203E/M205R/V219R/F353Q/F414H/E441M/D460G/K488N and

### T160M/Q165P/T203E/M205R/V219R/F353Q/D460G/K488N.

[0171] In some embodiments, the engineered TdT polypeptide comprises an amino acid sequence having at least 60%, 70%, 80%, 85%, 86%, 87%, 88%, 89%, 90%, 91%, 92%, 93%, 94%, 95%, 96%, 97%, 98%, 99% or more sequence identity to reference sequence SEQ ID NO: 1596 and one or more residue differences as compared to SEQ ID NO: 1596, selected from 160/165/203/205/219/353/406/408/442/446/460/488, 160/165/205/219/406/408/441/442/446, 160/203/205/406/408/441/442/446, 160/219/330/406/408/442/446/484, 205/307/406/408/441/442/446/460/488, 406/408/441/442/446, and 406/408/442/446. In some embodiments, the engineered TdT polypeptide comprises an amino acid sequence having at least 60%, 70%, 80%, 85%, 86%, 87%, 88%, 89%, 90%, 91%, 92%, 93%, 94%, 95%, 96%, 97%, 98%, 99% or more sequence identity to reference sequence SEQ ID NO: 1596 and one or more residue differences as compared to SEQ ID NO: 1596, selected from

### 160M/165P/203E/205R/219R/353Q/406G/408A/442G/446P/460G/488N,

### 160M/165P/205R/219R/406G/408A/441M/442G/446P, 160M/203E/205R/406G/408A/441M/442G/446P,

[0172] 160M/219R/330K/406G/408A/442G/446P/484E, 205R/307L/406G/408A/441M/442G/446P/460G/488N, 406G/408A/441M/442G/446P, and 406G/408A/442G/446P. In some embodiments, the engineered TdT polypeptide comprises an amino acid sequence having at least 60%, 70%, 80%, 85%, 86%, 87%, 88%, 89%, 90%, 91%, 92%, 93%, 94%, 95%, 96%, 97%, 98%, 99% or more sequence identity to reference sequence SEQ ID NO: 1596 and one or more residue differences as compared to SEQ ID NO: 1596, selected from

### T160M/Q165P/T203E/M205R/V219R/F353Q/R406G/I408A/S442G/S446P/D460G/K488N,

### T160M/Q165P/M205R/V219R/R406G/I408A/E441M/S442G/S446P,

### T160M/T203E/M205R/R406G/I408A/E441M/S442G/S446P,

### T160M/V219R/D330K/R406G/I408A/S442G/S446P/T484E,

### M205R/C307L/R406G/I408A/E441M/S442G/S446P/D460G/K488N,

### R406G/I408A/E441M/S442G/S446P, and R406G/I408A/S442G/S446P.

[0173] In some embodiments, the engineered TdT polypeptide comprises an amino acid sequence having at least 60%, 70%, 80%, 85%, 86%, 87%, 88%, 89%, 90%, 91%, 92%, 93%, 94%, 95%, 96%, 97%, 98%, 99% or more sequence identity to reference sequence SEQ ID NO: 1950 and one or more residue differences as compared to SEQ ID NO: 1950, selected from 163/169, 185, 186, 192, 193, 194, 197, 198, 245, 251, 258, 259, 261, 263, 271, 274, 278, 280, 284, 286, 290, 291, 297, 304, 306, 308, 316, 347, 352, 359, 362, 378, 393, 396, 398, 399, 405, 407, 409/414, 410/414, 411/414, 413/414, 414, 414/415, 414/417, 415, 455, 465, 466, 468, 494, and 509. In some embodiments, the engineered TdT polypeptide comprises an amino acid sequence having at least 60%, 70%, 80%, 85%, 86%, 87%, 88%, 89%, 90%, 91%, 92%, 93%, 94%, 95%, 96%, 97%, 98%, 99% or more sequence identity to reference sequence SEQ ID NO: 1950 and one or more residue differences as compared to SEQ ID NO: 1950, selected from 163I/169E, 163/169R, 185C, 185F, 186C, 192C, 192G, 192I, 192L, 192R, 193R, 193S, 194A, 194C, 194D, 194G, 194M, 194W, 197G, 197L, 197R, 198A, 198L, 245A, 251R, 258E, 258G, 258K, 258L, 258Q, 258W, 259N, 259V, 261A, 261G, 263I, 263S, 271C, 274M, 274N, 274P, 274Q, 274T, 274V, 278C, 278L, 278N, 280L, 280S, 284I, 284M, 286N, 286S, 290A, 291M, 291W, 297L, 297P, 304L, 306I, 306M, 308N, 316A, 316C, 347Q, 352G, 352R, 359V, 362S, 362Y, 378L, 393R, 396T, 398W, 399C, 399D, 399F, 399G, 399T, 405G, 405L, 405Y, 407F, 407N, 407S, 409K/414F, 409Q/414F, 410F/414F, 410I/414F, 410S/414F, 410V/414F, 410Y/414F, 411A/414F, 411F/414F, 411G/414F, 411I/414F, 411Q/414F, 411R/414F, 411T/414F, 413A/414F, 413F/414F, 413G/414F, 413I/414F, 414F/415W, 414F/417W, 414G, 415F, 455I, 455L, 465E, 466M, 468M, 468Q, 468S, 468W, 494A, 494C, 494G, 494L, 494W, 509G, and 509K. In some embodiments, the engineered TdT polypeptide comprises an amino acid sequence having at least 60%, 70%, 80%, 85%, 86%, 87%, 88%, 89%, 90%, 91%, 92%, 93%, 94%, 95%, 96%, 97%, 98%, 99% or more sequence identity to reference sequence SEQ ID NO: 1950 and one or more residue differences as compared to SEQ ID NO: 1950, selected from V163I/Q169E, V163I/Q169R, L185C, L185F, E186C, Y192C, Y192G, Y192I, Y192L, Y192R, E193R, E193S, F194A, F194C, F194D, F194G, F194M, F194W, N197G, N197L, N197R, D198A, D198L, G245A, Q251R, R258E, R258G, R258K, R258L, R258Q, R258W, Y259N, Y259V, S261A, S261G, K263I, K263S, V271C, K274M, K274N, K274P, K274Q, K274T, K274V, K278C, K278L, K278N, Y280L, Y280S, L284I, L284M, T286N, T286S, V290A, R291M, R291W, K297L, K297P, A304L, L306I, L306M, Y308N, V316A, V316C, F347Q, P352G, P352R, L359V, T362S, T362Y, V378L, L393R, S396T, F398W, E399C, E399D, E399F, E399G, E399T, S405G, S405L, S405Y, K407F, K407N, K407S, D409K/H414F, D409Q/H414F, A410F/H414F, A410/1H414F, A410S/H414F, A410V/H414F, A410Y/H414F, L411A/H414F, L411F/H414F, L411G/H414F, L411I/H414F, L411Q/H414F, L411R/H414F, L411T/H414F, H413A/1H414F, H413F/H414F, H413G/H414F, H413I/H414F, H414F/A415W, H414F/C417W, H414G, A415F, V455I, V455L, A465E, L466M, G468M, G468Q, G468S, G468W, H494A, H494C, H494G, H494L, H494W, S509G, and S509K.

[0174] In some embodiments, the engineered TdT polypeptide comprises an amino acid sequence having at least 60%, 70%, 80%, 85%, 86%, 87%, 88%, 89%, 90%, 91%, 92%, 93%, 94%, 95%, 96%, 97%, 98%, 99% or more sequence identity to reference sequence SEQ ID NO: 2008 and one or more residue differences as compared to SEQ ID NO: 2008, selected from 158/274/411/413/414, 185/274/413/414, 185/411/413/414, 263/411/413/414/468, 263/413/414, 274/286/411/413/417/468, 274/411/417/468, 274/411/468, 274/413/414/417/468, 274/468, 278/411/413/468, 411/413/417, 411/413/417/468, 411/413/468, 411/414, 413, 413/414, 413/414/468, 413/417/468, 413/468, 414, and 468. In some embodiments, the engineered TdT polypeptide comprises an amino acid sequence having at least 60%, 70%, 80%, 85%, 86%, 87%, 88%, 89%, 90%, 91%, 92%, 93%, 94%, 95%, 96%, 97%, 98%, 99% or more sequence identity to reference sequence SEQ ID NO: 2008 and one or more residue differences as compared to SEQ ID NO: 2008, selected from 158H/274V/411G/413A/414G, 185F/274V/413A/414G, 185F/411G/413A/414G, 263H/411G/413A/414G/468Q, 263H/413A/414G, 274V/286N/411G/413A/417W/468Q, 274V/411G/417W/468Q, 274V/411G/468Q, 274V/413A/414G/417W/468Q, 274V/468Q, 278N/411G/413A/468Q, 411G/413A/417W, 411G/413A/417W/468Q, 411G/413A/468Q, 411G/414G, 413A, 413A/414G, 413A/414G/468Q, 413A/417W/468Q, 413A/468Q, 414G, and 468Q. In some embodiments, the engineered TdT polypeptide comprises an amino acid sequence having at least 60%, 70%, 80%, 85%, 86%, 87%, 88%, 89%, 90%, 91%, 92%, 93%, 94%, 95%, 96%, 97%, 98%, 99% or more sequence identity to reference sequence SEQ ID NO: 2008 and one or more residue differences as compared to SEQ ID NO: 2008, selected from P158H/K274V/L411G/H413A/H414G, L185F/K274V/H413A/H414G, L185F/L411G/H413A/H414G, K263H/L411G/H413A/H414G/G468Q, K263H/H413A/H414G, K274V/T286N/L411G/H413A/C417W/G468Q, K274V/L411G/C417W/G468Q, K274V/L411G/G468Q, K274V/H413A/H414G/C417W/G468Q, K274V/G468Q, K278N/L411G/H413A/G468Q, L411G/H413A/C417W, L411G/H413A/C417W/G468Q, L411G/H413A/G468Q, L411G/H414G, H413A, H413A/H414G, H413A/H414G/G468Q, H413A/C417W/G468Q, H413A/G468Q, H414G, and G468Q.

[0175] In some embodiments, the engineered TdT polypeptide comprises an amino acid sequence having at least 60%, 70%, 80%, 85%, 86%, 87%, 88%, 89%, 90%, 91%, 92%, 93%, 94%, 95%, 96%, 97%, 98%, 99% or more sequence identity to reference sequence SEQ ID NO: 2008 and one or more residue differences as compared to SEQ ID NO: 2008, selected from 3, 8, 11, 12, 15, 26, 26/27, 36, 39, 50, 58, 62, 76, 90, 116, 147, 151, 157, 246, 248, 249, 253, and 255. In some embodiments, the engineered TdT polypeptide comprises an amino acid sequence having at least 60%, 70%, 80%, 85%, 86%, 87%, 88%, 89%, 90%, 91%, 92%, 93%, 94%, 95%, 96%, 97%, 98%, 99% or more sequence identity to reference sequence SEQ ID NO: 2008 and one or more residue differences as compared to SEQ ID NO: 2008, selected from 3A, 3G, 8P, 11C, 12V, 15A, 26A/27R, 26G, 26I, 26Q, 26T, 36G, 36K, 39A, 50L, 58M, 58N, 58S, 62W, 76P, 90L, 90S, 116A, 147G, 151S, 157V, 246N, 248R, 248V, 249A, 249G, 249R, 253L, and 255G. In some embodiments, the engineered TdT polypeptide comprises an amino acid sequence having at least 60%, 70%, 80%, 85%, 86%, 87%, 88%, 89%, 90%, 91%, 92%, 93%, 94%, 95%, 96%, 97%, 98%, 99% or more sequence identity to reference sequence SEQ ID NO: 2008 and one or more residue differences as compared to SEQ ID NO: 2008, selected from H3A, H3G, G8P, G11C, S12V, I15A, R26A/Q27R, R26G, R26I, R26Q, R26T, S36G, S36K, Y39A, I50L, T58M, T58N, T58S, F62W, N76P, N90L, N90S, S116A, D147G, G151S, P157V, E246N, L248R, L248V, E249A, E249G, E249R, V253L, and N255G.

[0176] In some embodiments, the engineered TdT polypeptide comprises an amino acid sequence having at least 60%, 70%, 80%, 85%, 86%, 87%, 88%, 89%, 90%, 91%, 92%, 93%, 94%, 95%, 96%, 97%, 98%, 99% or more sequence identity to reference sequence SEQ ID NO: 2008 and one or more residue differences as compared to SEQ ID NO: 2008, selected from 9, 11, 12, 15, 16, 26, 38, 39, 58, 70, 79, 81, 90, 151, 157, 158, and 249. In some embodiments, the engineered TdT polypeptide comprises an amino acid sequence having at least 60%, 70%, 80%, 85%, 86%, 87%, 88%, 89%, 90%, 91%, 92%, 93%, 94%, 95%, 96%, 97%, 98%, 99% or more sequence identity to reference sequence SEQ ID NO: 2008 and one or more residue differences as compared to SEQ ID NO: 2008, selected from 9A, 9T, 11S, 12A, 12N, 12Q, 15L, 15Q, 16S, 26S, 26W, 38L, 38T, 39G, 58A, 70A, 79T, 81E, 90M, 151I, 157L, 158A, and 249T.

[0177] In some embodiments, the engineered TdT polypeptide comprises an amino acid sequence having at least 60%, 70%, 80%, 85%, 86%, 87%, 88%, 89%, 90%, 91%, 92%, 93%, 94%, 95%, 96%, 97%, 98%, 99% or more sequence identity to reference sequence SEQ ID NO: 2008 and one or more residue differences as compared to SEQ ID NO: 2008, selected from G9A, G9T, G11S, S12A, S12N, S12Q, I15L, I15Q, R16S, R26S, R26W, I38L, I38T, Y39G, T58A, K70A, S79T, S81E, N90M, G151I, P157L, P158A, and E249T.

[0178] In some embodiments, the engineered TdT polypeptide comprises an amino acid sequence having at least 60%, 70%, 80%, 85%, 86%, 87%, 88%, 89%, 90%, 91%, 92%, 93%, 94%, 95%, 96%, 97%, 98%, 99% or more sequence identity to reference sequence SEQ ID NO: 2008 and one or more residue differences as compared to SEQ ID NO: 2008, selected from 189, 196, 205, 206, 262, 307, 314, 318, 324, 353, 397, 408, 410, 413, 469, 473, 480, 481, 491, and 493. In some embodiments, the engineered TdT polypeptide comprises an amino acid sequence having at least 60%, 70%, 80%, 85%, 86%, 87%, 88%, 89%, 90%, 91%, 92%, 93%, 94%, 95%, 96%, 97%, 98%, 99% or more sequence identity to reference sequence SEQ ID NO: 2008 and one or more residue differences as compared to SEQ ID NO: 2008, selected from 189E, 189Q, 189R, 196A, 196S, 196T, 196Y, 205E, 206N, 262V, 307E, 307H, 307L, 307S, 314A, 314M, 314Q, 318R, 324V, 353R, 397A, 408E, 408L, 408W, 410E, 413E, 413G, 413L, 413M, 413S, 469F, 469Y, 473A, 473D, 473G, 473P, 473Q, 473S, 480A, 480E, 480G, 480L, 480S, 480W, 481A, 481L, 481S, 481V, 491M, 493E, and 493Q. In some embodiments, the engineered TdT polypeptide comprises an amino acid sequence having at least 60%, 70%, 80%, 85%, 86%, 87%, 88%, 89%, 90%, 91%, 92%, 93%, 94%, 95%, 96%, 97%, 98%, 99% or more sequence identity to reference sequence SEQ ID NO: 2008 and one or more residue differences as compared to SEQ ID NO: 2008, selected from A189E, A189Q, A189R, R196A, R196S, R196T, R196Y, R205E, R206N, F262V, C307E, C307H, C307L, C307S, R314A, R314M, R314Q, K318R, 1324V, Q353R, Q397A, A408E, A408L, A408W, A410E, H413E, H413G, H413L, H413M, H413S, W469F, W469Y, R473A, R473D, R473G, R473P, R473Q, R473S, R480A, R480E, R480G, R480L, R480S, R480W, W481A, W481L, W481S, W481V, L491M, N493E, and N493Q.

[0179] In some embodiments, the engineered TdT polypeptide comprises an amino acid sequence having at least 60%, 70%, 80%, 85%, 86%, 87%, 88%, 89%, 90%, 91%, 92%, 93%, 94%, 95%, 96%, 97%, 98%, 99% or more sequence identity to reference sequence SEQ ID NO: 2254 and one or more residue differences as compared to SEQ ID NO: 2254, selected from 197/407/455, 197/455, 284/398/466, 362/407/455, 396/398/410/466, 398/466, 399/411/416, and 466. In some embodiments, the engineered TdT polypeptide comprises an amino acid sequence having at least 60%, 70%, 80%, 85%, 86%, 87%, 88%, 89%, 90%, 91%, 92%, 93%, 94%, 95%, 96%, 97%, 98%, 99% or more sequence identity to reference sequence SEQ ID NO: 2254 and one or more residue differences as compared to SEQ ID NO: 2254, selected from 197R/407S/455L, 197R/455L, 284M/398W/466M, 362S/407S/455L, 396T/398W/410V/466M, 398W/466M, 399D/411Q/416Q, and 466M. In some embodiments, the engineered TdT polypeptide comprises an amino acid sequence having at least 60%, 70%, 80%, 85%, 86%, 87%, 88%, 89%, 90%, 91%, 92%, 93%, 94%, 95%, 96%, 97%, 98%, 99% or more sequence identity to reference sequence SEQ ID NO: 2254 and one or more residue differences as compared to SEQ ID NO: 2254, selected from N197R/K407S/V455L, N197R/V455L, L284M/F398W/L466M, T362S/K407S/V455L, S396T/F398W/A410V/L466M, F398W/L466M, E399D/G411Q/K416Q, and L466M.

[0180] In some embodiments, the engineered TdT polypeptide comprises an amino acid sequence having at least 60%, 70%, 80%, 85%, 86%, 87%, 88%, 89%, 90%, 91%, 92%, 93%, 94%, 95%, 96%, 97%, 98%, 99% or more sequence identity to reference sequence SEQ ID NO: 2514 and one or more residue differences as compared to SEQ ID NO: 2514, selected from 26/90/94/248/261/266/362/455, 26/90/246, 26/90/246/248, 26/90/246/248/261, 26/90/246/248/362/455, 26/90/246/248/455, 26/90/246/266/362, 26/90/246/362, 26/90/246/455, 26/90/248, 26/90/248/266/455, 26/90/248/455, 26/90/248/455/459, 26/90/266, 26/90/362/455, 26/173/248, 26/246, 26/246/248/362, 26/246/248/362/455, 26/246/248/455, 26/248, 26/248/261/266, 26/248/261/266/362/455, 26/248/266/362, 26/248/362/455, 26/248/455, 26/362, 26/362/455, 58/197/249/407/410, 62/249, 90/246/248, 90/246/248/261/266/362/455, 90/246/248/266/362/455, 246/248, 246/248/362, 246/266/455, 248, 248/266/362, 248/362/455, 248/455, and 362. In some embodiments, the engineered TdT polypeptide comprises an amino acid sequence having at least 60%, 70%, 80%, 85%, 86%, 87%, 88%, 89%, 90%, 91%, 92%, 93%, 94%, 95%, 96%, 97%, 98%, 99% or more sequence identity to reference sequence SEQ ID NO: 2514 and one or more residue differences as compared to SEQ ID NO: 2514, selected from 26G/90L/94K/248R/261A/266V/362S/455L, 26G/90L/246N, 26G/90L/246N/248R, 26G/90L/246N/266V/362S, 26G/90L/248V/455L, 26G/90L/248V/455L/459H, 26G/90L/266V, 26G/90L/362S/455L, 26G/246N, 26G/246N/248R/362S, 26G/246N/248V/455L, 26G/248R, 26G/248V/261A/266V, 26I/90L/246N/248R, 26I/90L/248R, 26I/246N/248R/362S/455L, 26I/248R/266V/362S, 26I/248R/455L, 26Q/90L/246N/248R/261A, 26Q/90L/246N/248R/362S/455L, 26Q/90L/246N/248R/455L, 26Q/90L/246N/248V/362S/455L, 26Q/90L/246N/362S, 26Q/90L/246N/455L, 26Q/90L/248R/266V/455L, 26Q/173I/248R, 26Q/246N/248V/362S, 26Q/248R, 26Q/248R/261A/266V/362S/455L, 26Q/248R/362S/455L, 26Q/248R/455L, 26Q/248V, 26Q/248V/266V/362S, 26Q/248V/362S/455L, 26Q/362S, 26Q/362S/455L, 58N/197L/249R/407N/410S, 62W/249R, 90L/246N/248R, 90L/246N/248R/261A/266V/362S/455L, 90L/246N/248R/266V/362S/455L, 246N/248R, 246N/248R/362S, 246N/266V/455L, 248R, 248R/455L, 248V/266V/362S, 248V/362S/455L, and 362S. In some embodiments, the engineered TdT polypeptide comprises an amino acid sequence having at least 60%, 70%, 80%, 85%, 86%, 87%, 88%, 89%, 90%, 91%, 92%, 93%, 94%, 95%, 96%, 97%, 98%, 99% or more sequence identity to reference sequence SEQ ID NO: 2514 and one or more residue differences as compared to SEQ ID NO: 2514, selected from R26G/N90L/E94K/L248R/S261A/K266V/T362S/V455L, R26G/N90L/E246N, R26G/N90L/E246N/L248R, R26G/N90L/E246N/K266V/T362S, R26G/N90L/L248V/V455L, R26G/N90L/L248V/V455L/Y459H, R26G/N90L/K266V, R26G/N90L/T362S/V455L, R26G/E246N, R26G/E246N/L248R/T362S, R26G/E246N/L248V/V455L, R26G/L248R, R26G/L248V/S261A/K266V, R26I/N90L/E246N/L248R, R26I/N90L/L248R, R26I/E246N/L248R/T362S/V455L, R26I/L248R/K266V/T362S, R26I/L248R/V455L, R26Q/N90L/E246N/L248R/S261A, R26Q/N90L/E246N/L248R/T362S/V455L, R26Q/N90L/E246N/L248R/V455L, R26Q/N90L/E246N/L248V/T362S/V455L, R26Q/N90L/E246N/T362S, R26Q/N90L/E246N/V455L, R26Q/N90L/L248R/K266V/V455L, R26Q/T173I/L248R, R26Q/E246N/L248V/T362S, R26Q/L248R, R26Q/L248R/S261A/K266V/T362S/V455L, R26Q/L248R/T362S/V455L, R26Q/L248R/V455L, R26Q/L248V, R26Q/L248V/K266V/T362S, R26Q/L248V/T362S/V455L, R26Q/T362S, R26Q/T362S/V455L, T58N/N197L/E249R/K407N/V410S, F62W/E249R, N90L/E246N/L248R, N90L/E246N/L248R/S261A/K266V/T362S/V455L, N90L/E246N/L248R/K266V/T362S/V455L, E246N/L248R, E246N/L248R/T362S, E246N/K266V/V455L, L248R, L248R/V455L, L248V/K266V/T362S, L248V/T362S/V455L, and T362S.

[0181] In some embodiments, the engineered TdT polypeptide comprises an amino acid sequence having at least 60%, 70%, 80%, 85%, 86%, 87%, 88%, 89%, 90%, 91%, 92%, 93%, 94%, 95%, 96%, 97%, 98%, 99% or more sequence identity to reference sequence SEQ ID NO: 2524 and one or more residue differences as compared to SEQ ID NO: 2524, selected from 9/16/62/157/246/249/362, 11/58/227/246, 12/16/158/246/248/249, 30/189/261/266/353/465/468, 30/189/266, 30/261/266/353/468, 30/266, 30/266/303, 30/266/353, 38, 38/81/318, 38/197, 39, 39/79, 58/157/158/362, 70/353, 79/81, 81, 189, 189/261, 189/353, 246/249, 261/353, 266/307/353/468, 266/353/468, and 266/468. In some embodiments, the engineered TdT polypeptide comprises an amino acid sequence having at least 60%, 70%, 80%, 85%, 86%, 87%, 88%, 89%, 90%, 91%, 92%, 93%, 94%, 95%, 96%, 97%, 98%, 99% or more sequence identity to reference sequence SEQ ID NO: 2524 and one or more residue differences as compared to SEQ ID NO: 2524, selected from 9T/16S/62W/157L/246E/249R/362T, 11S/58N/227M/246E, 12A/16S/158A/246E/248L/249R, 30E/189R/266V, 30G/261A/266V/353R/468S, 30G/266V, 30G/266V/353R, 30T/189R/261A/266V/353R/465E/468S, 30T/266V/303E, 38T, 38T/81E/318R, 38T/197L, 39G, 39G/79T, 58N/157L/158A/362T, 70A/353R, 79T/81E, 81E, 189R, 189R/261A, 189R/353R, 246E/249R, 261A/353R, 266V/307S/353R/468S, 266V/353R/468S, and 266V/468S. In some embodiments, the engineered TdT polypeptide comprises an amino acid sequence having at least 60%, 70%, 80%, 85%, 86%, 87%, 88%, 89%, 90%, 91%, 92%, 93%, 94%, 95%, 96%, 97%, 98%, 99% or more sequence identity to reference sequence SEQ ID NO: 2524 and one or more residue differences as compared to SEQ ID NO: 2524, selected from G9T/R16S/F62W/P157L/N246E/E249R/S362T, G11S/T58N/L227M/N246E, S12A/R16S/P158A/N246E/R248L/E249R, M30E/A189R/K266V, M30G/S261A/K266V/Q353R/Q468S, M30G/K266V, M30G/K266V/Q353R, M30T/A189R/S261A/K266V/Q353R/A465E/Q468S, M30T/K266V/K303E, I38T, I38T/S81E/K318R, I38T/N197L, Y39G, Y39G/S79T, T58N/P157L/P158A/S362T, K70A/Q353R, S79T/S81E, S81E, A189R, A189R/S261A, A189R/Q353R, N246E/E249R, S261A/Q353R, K266V/C307S/Q353R/Q468S, K266V/Q353R/Q468S, and K266V/Q468S.

[0182] In some embodiments, the engineered TdT polypeptide comprises an amino acid sequence having at least 60%, 70%, 80%, 85%, 86%, 87%, 88%, 89%, 90%, 91%, 92%, 93%, 94%, 95%, 96%, 97%, 98%, 99% or more sequence identity to reference sequence SEQ ID NO: 2524 and one or more residue differences as compared to SEQ ID NO: 2524, selected from 47/326, 169, 191/413, 200, 292, 304/329, 327/406, 329, 340, 353/459, 373, 379, 382, 402, 403, 404, 427, 429, 459, 461, 484, 490, 495, 504, and 506. In some embodiments, the engineered TdT polypeptide comprises an amino acid sequence having at least 60%, 70%, 80%, 85%, 86%, 87%, 88%, 89%, 90%, 91%, 92%, 93%, 94%, 95%, 96%, 97%, 98%, 99% or more sequence identity to reference sequence SEQ ID NO: 2524 and one or more residue differences as compared to SEQ ID NO: 2524, selected from 47A/326R, 169M, 191V/413V, 200V, 292N, 304V/329R, 327M/406T, 329R, 340I, 340V, 353H/459V, 373G, 379I, 379L, 379M, 379V, 382F, 382L, 402G, 402S, 402V, 403A, 403E, 403P, 403R, 403S, 404D, 404S, 427L, 427M, 427R, 427W, 429R, 459I, 461S, 484A, 490R, 495C, 495G, 495S, 504K, and 506P. In some embodiments, the engineered TdT polypeptide comprises an amino acid sequence having at least 60%, 70%, 80%, 85%, 86%, 87%, 88%, 89%, 90%, 91%, 92%, 93%, 94%, 95%, 96%, 97%, 98%, 99% or more sequence identity to reference sequence SEQ ID NO: 2524 and one or more residue differences as compared to SEQ ID NO: 2524, selected from V47A/L326R, Q169M, N191V/A413V, T200V, S292N, A304V/Q329R, L327M/G406T, Q329R, L340I, L340V, Q353H/Y459V, Q373G, T379I, T379L, T379M, T379V, W382F, W382L, K402G, K402S, K402V, L403A, L403E, L403P, L403R, L403S, P404D, P404S, K427L, K427M, K427R, K427W, D429R, Y459I, G461S, T484A, M490R, A495C, A495G, A495S, F504K, and K506P.

[0183] In some embodiments, the engineered TdT polypeptide comprises an amino acid sequence having at least 60%, 70%, 80%, 85%, 86%, 87%, 88%, 89%, 90%, 91%, 92%, 93%, 94%, 95%, 96%, 97%, 98%, 99% or more sequence identity to reference sequence SEQ ID NO: 2524 and one or more residue differences as compared to SEQ ID NO: 2524, selected from 175, 179, 189, 200, 203, 292, 293, 325, 340, 373, 379, 402, 403, 404, 406, 427, 459, 461, 484, 495, 506, and 508. In some embodiments, the engineered TdT polypeptide comprises an amino acid sequence having at least 60%, 70%, 80%, 85%, 86%, 87%, 88%, 89%, 90%, 91%, 92%, 93%, 94%, 95%, 96%, 97%, 98%, 99% or more sequence identity to reference sequence SEQ ID NO: 2524 and one or more residue differences as compared to SEQ ID NO: 2524, selected from 175L, 179L, 189V, 200N, 203D, 203M, 292N, 293Q, 325W, 340V, 373C, 373G, 379L, 379M, 402E, 402G, 402S, 403A, 403E, 403G, 403P, 404D, 404E, 404S, 406N, 427C, 427F, 427L, 427M, 427N, 427W, 427Y, 459I, 461S, 484A, 484H, 484M, 495G, 495S, 506P, 506S, 506T, 508S, and 508T. In some embodiments, the engineered TdT polypeptide comprises an amino acid sequence having at least 60%, 70%, 80%, 85%, 86%, 87%, 88%, 89%, 90%, 91%, 92%, 93%, 94%, 95%, 96%, 97%, 98%, 99% or more sequence identity to reference sequence SEQ ID NO: 2524 and one or more residue differences as compared to SEQ ID NO: 2524, selected from N175L, Q179L, A189V, T200N, E203D, E203M, S292N, S293Q, S325W, L340V, Q373C, Q373G, T379L, T379M, K402E, K402G, K402S, L403A, L403E, L403G, L403P, P404D, P404E, P404S, G406N, K427C, K427F, K427L, K427M, K427N, K427W, K427Y, Y459I, G461S, T484A, T484H, T484M, A495G, A495S, K506P, K506S, K506T, K508S, and K508T.

[0184] In some embodiments, the engineered TdT polypeptide comprises an amino acid sequence having at least 60%, 70%, 80%, 85%, 86%, 87%, 88%, 89%, 90%, 91%, 92%, 93%, 94%, 95%, 96%, 97%, 98%, 99% or more sequence identity to reference sequence SEQ ID NO: 2638 and one or more residue differences as compared to SEQ ID NO: 2638, selected from 11/30/79/189/480, 30/58/79/189/307/480, 79/189/307/410, and 79/307. In some embodiments, the engineered TdT polypeptide comprises an amino acid sequence having at least 60%, 70%, 80%, 85%, 86%, 87%, 88%, 89%, 90%, 91%, 92%, 93%, 94%, 95%, 96%, 97%, 98%, 99% or more sequence identity to reference sequence SEQ ID NO: 2638 and one or more residue differences as compared to SEQ ID NO: 2638, selected from 11S/30G/79T/189R/480E, 30G/58N/79T/189R/307L/480E, 79T/189R/307L/410E, and 79T/307L. In some embodiments, the engineered TdT polypeptide comprises an amino acid sequence having at least 60%, 70%, 80%, 85%, 86%, 87%, 88%, 89%, 90%, 91%, 92%, 93%, 94%, 95%, 96%, 97%, 98%, 99% or more sequence identity to reference sequence SEQ ID NO: 2638 and one or more residue differences as compared to SEQ ID NO: 2638, selected from G11S/M30G/S79T/A189R/R480E, M30G/T58N/S79T/A189R/C307L/R480E, S79T/A189R/C307L/V410E, and S79T/C307L.

[0185] In some embodiments, the engineered TdT polypeptide comprises an amino acid sequence having at least 60%, 70%, 80%, 85%, 86%, 87%, 88%, 89%, 90%, 91%, 92%, 93%, 94%, 95%, 96%, 97%, 98%, 99% or more sequence identity to reference sequence SEQ ID NO: 2804 and one or more residue differences as compared to SEQ ID NO: 2804, selected from 169/304/340/402/427, 169/304/340/427/429/504, 169/304/340/429/506, 169/304/340/504, 169/304/402/403/427/506, 169/304/403/427/504, 169/304/427/504/506, 169/304/504, 169/340/402/403/427/429/504, 169/340/402/403/427/504/506, 169/340/402/504, 169/340/427, 169/340/506, 169/402/403/504/506, 169/402/427/429/504, 169/402/504, 169/402/504/506, 169/403/427/506, 266/327/329/404/410, 292/327/329/468, 304, 304/340/402, 304/340/402/403/427/429/504/506, 304/340/402/403/504/506, 304/340/402/403/506, 304/340/402/427/504/506, 304/340/402/506, 304/340/403/427/429/504/506, 304/340/427, 304/402/403, 304/402/403/427/504, 304/402/403/429, 304/402/403/504/506, 304/402/403/506, 304/403/504, 304/504, 304/504/506, 327, 327/329, 327/329/379/404/406/410, 327/329/404/410, 327/329/465/484, 327/382/406/410/484, 327/410/484, 340, 340/402/403, 340/402/427/429/506, 340/402/429/504/506, 340/402/504, 340/403/504, 340/504, 340/506, 379/382/468, 379/404/410, 379/410, 379/465/468/484, 379/468, 402/403/427/504/506, 402/403/429/504, 402/427/504, 402/504, 403/427, 427, 484, 504, 504/506, and 506. In some embodiments, the engineered TdT polypeptide comprises an amino acid sequence having at least 60%, 70%, 80%, 85%, 86%, 87%, 88%, 89%, 90%, 91%, 92%, 93%, 94%, 95%, 96%, 97%, 98%, 99% or more sequence identity to reference sequence SEQ ID NO: 2804 and one or more residue differences as compared to SEQ ID NO: 2804, selected from 169M/304V/340I/429R/506P, 169M/304V/340I/504K, 169M/304V/340V/402G/427L, 169M/304V/340V/427L/429R/504K, 169M/304V/402G/403S/427L/506P, 169M/304V/403S/427L/504K, 169M/304V/427M/504K/506P, 169M/304V/504K, 169M/340I/402G/403A/427M/429R/504K, 169M/340I/427L, 169M/340I/506P, 169M/340V/402G/403P/427M/504K/506P, 169M/340V/402G/504K, 169M/402G/403A/504K/506P, 169M/402G/427L/429R/504K, 169M/402G/504K, 169M/402G/504K/506P, 169M/403A/427L/506P, 266V/327M/329R/404S/410V, 292N/327M/329R/468S, 304V, 304V/340I/402G, 304V/340I/402G/403A/427L/429R/504K/506P, 304V/340I/402G/403S/506P, 304V/340I/402G/506P, 304V/340I/403A/427L/429R/504K/506P, 304V/340I/427M, 304V/340V/402G/403S/504K/506P, 304V/340V/402G/427L/504K/506P, 304V/402G/403A/429R, 304V/402G/403A/504K/506P, 304V/402G/403P/427M/504K, 304V/402G/403P/506P, 304V/402G/403S, 304V/403S/504K, 304V/504K, 304V/504K/506P, 327M, 327M/329R, 327M/329R/379M/404D/406T/410V, 327M/329R/404D/410V, 327M/329R/465E/484A, 327M/382L/406T/410V/484A, 327M/410V/484A, 340I/402G/429R/504K/506P, 340I/402G/504K, 340I/403S/504K, 340I/506P, 340V, 340V/402G/403A, 340V/402G/427L/429R/506P, 340V/504K, 379L/465E/468S/484A, 379L/468S, 379M/382L/468S, 379M/404D/410V, 379M/410V, 379M/468S, 402G/403A/427M/504K/506P, 402G/403S/427M/504K/506P, 402G/403S/429R/504K, 402G/427L/504K, 402G/504K, 403S/427L, 427L, 427M, 484A, 504K, 504K/506P, and 506P. In some embodiments, the engineered TdT polypeptide comprises an amino acid sequence having at least 60%, 70%, 80%, 85%, 86%, 87%, 88%, 89%, 90%, 91%, 92%, 93%, 94%, 95%, 96%, 97%, 98%, 99% or more sequence identity to reference sequence SEQ ID NO: 2804 and one or more residue differences as compared to SEQ ID NO: 2804, selected from Q169M/A304V/L340I/D429R/K506P, Q169M/A304V/L340I/F504K, Q169M/A304V/L340V/K402G/K427L, Q169M/A304V/L340V/K427L/D429R/F504K, Q169M/A304V/K402G/L403S/K427L/K506P, Q169M/A304V/L403S/K427L/F504K, Q169M/A304V/K427M/F504K/K506P, Q169M/A304V/F504K, Q169M/L340I/K402G/L403A/K427M/D429R/F504K, Q169M/L340I/K427L, Q169M/L340I/K506P, Q169M/L340V/K402G/L403P/K427M/F504K/K506P, Q169M/L340V/K402G/F504K, Q169M/K402G/L403A/F504K/K506P, Q169M/K402G/K427L/D429R/F504K, Q169M/K402G/F504K, Q169M/K402G/F504K/K506P, Q169M/L403A/K427L/K506P, K266V/L327M/Q329R/P404S/E410V, S292N/L327M/Q329R/Q468S, A304V, A304V/L340I/K402G, A304V/L340I/K402G/L403A/K427L/D429R/F504K/K506P, A304V/L340I/K402G/L403S/K506P, A304V/L340I/K402G/K506P, A304V/L340I/L403A/K427L/D429R/F504K/K506P, A304V/L340I/K427M, A304V/L340V/K402G/L403S/F504K/K506P, A304V/L340V/K402G/K427L/F504K/K506P, A304V/K402G/L403A/D429R, A304V/K402G/L403A/F504K/K506P, A304V/K402G/L403P/K427M/F504K, A304V/K402G/L403P/K506P, A304V/K402G/L403S, A304V/L403S/F504K, A304V/F504K, A304V/F504K/K506P, L327M, L327M/Q329R, L327M/Q329R/T379M/P404D/G406T/E410V, L327M/Q329R/P404D/E410V, L327M/Q329R/A465E/T484A, L327M/W382L/G406T/E410V/T484A, L327M/E410V/T484A, L340I/K402G/D429R/F504K/K506P, L340I/K402G/F504K, L340I/L403S/F504K, L340I/K506P, L340V, L340V/K402G/L403A, L340V/K402G/K427L/D429R/K506P, L340V/F504K, T379L/A465E/Q468S/T484A, T379L/Q468S, T379M/W382L/Q468S, T379M/P404D/E410V, T379M/E410V, T379M/Q468S, K402G/L403A/K427M/F504K/K506P, K402G/L403S/K427M/F504K/K506P, K402G/L403S/D429R/F504K, K402G/K427L/F504K, K402G/F504K, L403S/K427L, K427L, K427M, T484A, F504K, F504K/K506P, and K506P.

[0186] In some embodiments, the engineered TdT polypeptide comprises an amino acid sequence having at least 60%, 70%, 80%, 85%, 86%, 87%, 88%, 89%, 90%, 91%, 92%, 93%, 94%, 95%, 96%, 97%, 98%, 99% or more sequence identity to reference sequence SEQ ID NO: 2812 and one or more residue differences as compared to SEQ ID NO: 2812, selected from 30, 30/179/200/373/403, 30/179/373/379, 30/184/246/325/379/429/495, 30/184/246/327/329/459, 30/184/246/379/404, 30/184/246/459/461/495/500/504, 30/200/373, 30/200/373/379, 30/246/325/327/329/404/461, 30/246/325/379/404/427/429/461, 30/246/427/459/461, 30/325/327, 30/325/327/379/404/429/495, 30/327/404/504, 30/329/379, 30/373, 30/373/403, 30/379/429/459/461, 30/379/459/461/504, 30/403/441/460, 200/373/379, 246/325/329/379/461, 246/327/404/461/495, 327/329/379/504, 327/459/461/495, 353/403, 373/379, 373/379/403, 379/403/406/468, and 403/441. In some embodiments, the engineered TdT polypeptide comprises an amino acid sequence having at least 60%, 70%, 80%, 85%, 86%, 87%, 88%, 89%, 90%, 91%, 92%, 93%, 94%, 95%, 96%, 97%, 98%, 99% or more sequence identity to reference sequence SEQ ID NO: 2812 and one or more residue differences as compared to SEQ ID NO: 2812, selected from 30G, 30G/179A/200N/373G/403E, 30G/179A/373G/379M, 30G/184S/246E/325W/379M/429R/495S, 30G/184S/246E/327M/329R/459I, 30G/184S/246E/379M/404D, 30G/184S/246E/459I/461S/495S/500N/504Q, 30G/200N/373G, 30G/200N/373G/379M, 30G/246E/325W/327M/329R/404D/461S, 30G/246E/325W/379M/404D/427L/429R/461S, 30G/246E/427L/459I/461S, 30G/325W/327M, 30G/325W/327M/379M/404D/429R/495S, 30G/327M/404D/504S, 30G/329R/379M, 30G/373G, 30G/373G/403L, 30G/379M/429R/459I/461S, 30G/379M/459I/461S/504Q, 30G/403E/441K/460P, 200N/373G/379M, 246E/325W/329R/379M/461S, 246E/327M/404D/461S/495S, 327M/329R/379M/504S, 327M/459I/461S/495S, 353R/403E, 373G/379M, 373G/379M/403L, 379M/403L/406N/468S, and 403L/441K. In some embodiments, the engineered TdT polypeptide comprises an amino acid sequence having at least 60%, 70%, 80%, 85%, 86%, 87%, 88%, 89%, 90%, 91%, 92%, 93%, 94%, 95%, 96%, 97%, 98%, 99% or more sequence identity to reference sequence SEQ ID NO: 2812 and one or more residue differences as compared to SEQ ID NO: 2812, selected from M30G, M30G/Q179A/T200N/Q373G/S403E, M30G/Q179A/Q373G/T379M, M30G/A184S/N246E/S325W/T379M/D429R/A495S, M30G/A184S/N246E/L327M/Q329R/Y459I, M30G/A184S/N246E/T379M/P404D, M30G/A184S/N246E/Y459I/G461S/A495S/T500N/F504Q, M30G/T200N/Q373G, M30G/T200N/Q373G/T379M, M30G/N246E/S325W/L327M/Q329R/P404D/G461S, M30G/N246E/S325W/T379M/P404D/K427L/D429R/G461S, M30G/N246E/K427L/Y459I/G461S, M30G/S325W/L327M, M30G/S325W/L327M/T379M/P404D/D429R/A495S, M30G/L327M/P404D/F504S, M30G/Q329R/T379M, M30G/Q373G, M30G/Q373G/S403L, M30G/T379M/D429R/Y459I/G461S, M30G/T379M/Y459I/G461S/F504Q, M30G/S403E/M441K/G460P, T200N/Q373G/T379M, N246E/S325W/Q329R/T379M/G461S, N246E/L327M/P404D/G461S/A495S, L327M/Q329R/T379M/F504S, L327M/Y459I/G461S/A495S, Q353R/S403E, Q373G/T379M, Q373G/T379M/S403L, T379M/S403L/G406N/Q468S, and S403L/M441K.

[0187] In some embodiments, the engineered TdT polypeptide comprises an amino acid sequence having at least 60%, 70%, 80%, 85%, 86%, 87%, 88%, 89%, 90%, 91%, 92%, 93%, 94%, 95%, 96%, 97%, 98%, 99% or more sequence identity to reference sequence SEQ ID NO: 2812 and one or more residue differences as compared to SEQ ID NO: 2812, selected from 198, 231, 233, 248, 253, 264, 266, 278, 326, 367, 370, 396, 414, 433, 435, 437, 444, 446, 485, 499, 503, 520, and 525. In some embodiments, the engineered TdT polypeptide comprises an amino acid sequence having at least 60%, 70%, 80%, 85%, 86%, 87%, 88%, 89%, 90%, 91%, 92%, 93%, 94%, 95%, 96%, 97%, 98%, 99% or more sequence identity to reference sequence SEQ ID NO: 2812 and one or more residue differences as compared to SEQ ID NO: 2812, selected from 198E, 231S, 233R, 248K, 248T, 253I, 264E, 264L, 264T, 264V, 266R, 278M, 326R, 367D, 370D, 370G, 370M, 370S, 396R, 414E, 433A, 433E, 433G, 433M, 433P, 433R, 433S, 435A, 435E, 435G, 435S, 437G, 437R, 444G, 444R, 446G, 485E, 499M, 499R, 503A, 503E, 503T, 503V, 520P, 525Q, 525R, and 525S. In some embodiments, the engineered TdT polypeptide comprises an amino acid sequence having at least 60%, 70%, 80%, 85%, 86%, 87%, 88%, 89%, 90%, 91%, 92%, 93%, 94%, 95%, 96%, 97%, 98%, 99% or more sequence identity to reference sequence SEQ ID NO: 2812 and one or more residue differences as compared to SEQ ID NO: 2812, selected from D198E, G231S, E233R, R248K, R248T, V253I, R264E, R264L, R264T, R264V, K266R, K278M, L326R, E367D, Q370D, Q370G, Q370M, Q370S, T396R, G414E, W433A, W433E, W433G, W433M, W433P, W433R, W433S, M435A, M435E, M435G, M435S, T437G, T437R, A444G, A444R, P446G, D485E, L499M, L499R, I503A, 1503E, I503T, I503V, E520P, F525Q, F525R, and F525S.

[0188] In some embodiments, the engineered TdT polypeptide comprises an amino acid sequence having at least 60%, 70%, 80%, 85%, 86%, 87%, 88%, 89%, 90%, 91%, 92%, 93%, 94%, 95%, 96%, 97%, 98%, 99% or more sequence identity to reference sequence SEQ ID NO: 2812 and one or more residue differences as compared to SEQ ID NO: 2812, selected from 186, 188, 198, 231, 233, 235, 243, 248, 253, 264, 266, 287, 297/440, 366, 367, 368, 370, 414, 433, 435, 437, 439, 442, 444, 485, 501, and 515. In some embodiments, the engineered TdT polypeptide comprises an amino acid sequence having at least 60%, 70%, 80%, 85%, 86%, 87%, 88%, 89%, 90%, 91%, 92%, 93%, 94%, 95%, 96%, 97%, 98%, 99% or more sequence identity to reference sequence SEQ ID NO: 2812 and one or more residue differences as compared to SEQ ID NO: 2812, selected from 186D, 188I, 198E, 231S, 233A, 235R, 243L, 243R, 243S, 243T, 248S, 253I, 264A, 264T, 266R, 266T, 287I, 297S/440K, 366V, 367A, 368R, 370M, 370N, 370S, 414E, 433M, 433P, 433V, 435E, 435I, 435P, 437A, 437G, 437K, 437P, 439G, 439P, 442A, 444G, 444H, 485E, 485S, 501R, and 515E. In some embodiments, the engineered TdT polypeptide comprises an amino acid sequence having at least 60%, 70%, 80%, 85%, 86%, 87%, 88%, 89%, 90%, 91%, 92%, 93%, 94%, 95%, 96%, 97%, 98%, 99% or more sequence identity to reference sequence SEQ ID NO: 2812 and one or more residue differences as compared to SEQ ID NO: 2812, selected from E186D, L188I, D198E, G231S, E233A, K235R, E243L, E243R, E243S, E243T, R248S, V253I, R264A, R264T, K266R, K266T, L287I, K297S/N440K, A366V, E367A, K368R, Q370M, Q370N, Q370S, G414E, W433M, W433P, W433V, M435E, M435I, M435P, T437A, T437G, T437K, T437P, S439G, S439P, G442A, A444G, A444H, D485E, D485S, K501R, and A515E.

[0189] In some embodiments, the engineered TdT polypeptide comprises an amino acid sequence having at least 60%, 70%, 80%, 85%, 86%, 87%, 88%, 89%, 90%, 91%, 92%, 93%, 94%, 95%, 96%, 97%, 98%, 99% or more sequence identity to reference sequence SEQ ID NO: 2956 and one or more residue differences as compared to SEQ ID NO: 2956, selected from 140/142/153/177/427/434/441/444/461/502, 140/142/153/427/484, 140/142/177, 140/142/177/441, 140/142/365/373/404/427/484, 140/142/373/427/484, 140/148/161/177/404, 140/150/153/365/373/427/484, 140/150/177/404/436/441/484/502, 140/161/177/404/427/484, 140/177/404, 140/177/404/484, 142/150/158/177/427/445, 142/150/177/404, 142/153/177/441/444, 142/177/373, 142/177/373/441, 142/461/484/502, 150/177, 153, 153/161/325/404/427/441/484, 153/484, 177, 177/365/427/434, 325/427, 427, and 484. In some embodiments, the engineered TdT polypeptide comprises an amino acid sequence having at least 60%, 70%, 80%, 85%, 86%, 87%, 88%, 89%, 90%, 91%, 92%, 93%, 94%, 95%, 96%, 97%, 98%, 99% or more sequence identity to reference sequence SEQ ID NO: 2956 and one or more residue differences as compared to SEQ ID NO: 2956, selected from 140V/142V/153V/177R/427L/434N/441V/444S/461S/502G, 140V/142V/153V/427L/484L, 140V/142V/177R, 140V/142V/177R/441V, 140V/142V/365A/373R/404D/427L/484L, 140V/142V/373R/427L/484L, 140V/148T/161H/177R/404D, 140V/150P/153V/365A/373R/427L/484L, 140V/150P/177R/404D/436S/441V/484L/502G, 140V/161H/177R/404D/427L/484L, 140V/177R/404D, 140V/177R/404D/484L, 142V/150P/158S/177R/427L/445N, 142V/150P/177R/404D, 142V/153V/177R/441V/444S, 142V/177R/373R, 142V/177R/373R/441V, 142V/461S/484L/502G, 150P/177R, 153V, 153V/161H/325L/404D/427L/441V/484L, 153V/484L, 177R, 177R/365A/427L/434N, 325L/427L, 427L, and 484L. In some embodiments, the engineered TdT polypeptide comprises an amino acid sequence having at least 60%, 70%, 80%, 85%, 86%, 87%, 88%, 89%, 90%, 91%, 92%, 93%, 94%, 95%, 96%, 97%, 98%, 99% or more sequence identity to reference sequence SEQ ID NO: 2956 and one or more residue differences as compared to SEQ ID NO: 2956, selected from G140V/M142V/E153V/H177R/K427L/E434N/M441V/A444S/G461S/K502G, G140V/M142V/E153V/K427L/T484L, G140V/M142V/H177R, G140V/M142V/H177R/M441V, G140V/M142V/G365A/Q373R/P404D/K427L/T484L, G140V/M142V/Q373R/K427L/T484L, G140V/P148T/K161H/H177R/P404D, G140V/E150P/E153V/G365A/Q373R/K427L/T484L, G140V/E150P/H177R/P404D/P436S/M441V/T484L/K502G, G140V/K161H/H177R/P404D/K427L/T484L, G140V/H177R/P404D, G140V/H177R/P404D/T484L, M142V/E150P/P158S/H177R/K427L/K445N, M142V/E150P/H177R/P404D, M142V/E153V/H177R/M441V/A444S, M142V/H177R/Q373R, M142V/H177R/Q373R/M441V, M142V/G461S/T484L/K502G, E150P/H177R, E153V, E153V/K161H/W325L/P404D/K427L/M441V/T484L, E153V/T484L, H177R, H177R/G365A/K427L/E434N, W325L/K427L, K427L, and T484L.

[0190] In some embodiments, the engineered TdT polypeptide comprises an amino acid sequence having at least 60%, 70%, 80%, 85%, 86%, 87%, 88%, 89%, 90%, 91%, 92%, 93%, 94%, 95%, 96%, 97%, 98%, 99% or more sequence identity to reference sequence SEQ ID NO: 3174 and one or more residue differences as compared to SEQ ID NO: 3174, selected from 186/188/248/253/365/366/444/445, 186/231/248/253/484, 186/231/248/365/366/368/484, 186/231/248/366/368/444, 186/231/248/484, 186/231/368/416/441/442/444/484/485, 186/231/441/444/445, 186/484/485, 188/231/248/253/365/441/442/444/445/484, 198/243/264/431/441, 198/243/396/414/431/433/441/499, 198/243/396/414/433/437/441/515, 198/264/266/414, 198/264/396/414/433/441/515, 198/266/396/414/433/441/499/501, 198/266/414/433/441/515, 198/266/437/441/499, 198/414/431/441/499/520, 198/414/433/441/515/520, 231/248/441/484, 243/264/515/520, 243/396/414/433/441/515/520, 243/414/433/437/441, 243/414/437/441/515, 248/442/444/445/484, 264/266/396/414/433/441/515, 264/266/414/441/499/501/515/520, 264/414, 264/414/441, 264/433/441, 266/437/441/499/515/520, 365/366/441/484/485, 396/414/441, 396/414/441/515, and 414/441/520. In some embodiments, the engineered TdT polypeptide comprises an amino acid sequence having at least 60%, 70%, 80%, 85%, 86%, 87%, 88%, 89%, 90%, 91%, 92%, 93%, 94%, 95%, 96%, 97%, 98%, 99% or more sequence identity to reference sequence SEQ ID NO: 3174 and one or more residue differences as compared to SEQ ID NO: 3174, selected from 186D/188I/248K/253I/365A/366V/444H/445N, 186D/231S/248K/253I/484L, 186D/231S/248K/365A/366V/368R/484L, 186D/231S/248K/366V/368R/444H, 186D/231S/248K/484L, 186D/231S/368R/416N/441M/442K/444A/484L/485E, 186D/231S/441M/444H/445N, 186D/484L/485E, 188I/231S/248K/253I/365A/441M/442K/444A/445N/484L, 198E/243S/264A/431R/441M, 198E/243S/396S/414E/431R/433V/441M/499M, 198E/243S/396S/414E/433R/437R/441M/515E, 198E/264A/266T/414E, 198E/264A/396S/414E/433V/441M/515E, 198E/266T/396S/414E/433V/441M/499M/501R, 198E/266T/414E/433S/441M/515E, 198E/266T/437R/441M/499M, 198E/414E/431R/441M/499M/520D, 198E/414E/433V/441M/515E/520D, 231S/248K/441M/484L, 243S/264A/515E/520D, 243S/396S/414E/433V/441M/515E/520D, 243S/414E/433S/437R/441M, 243S/414E/437R/441M/515E, 248K/442K/444A/445N/484L, 264A/266T/396S/414E/433R/441M/515E, 264A/266T/414E/441M/499M/501R/515E/520D, 264A/414E, 264A/414E/441M, 264A/433S/441M, 266T/437R/441M/499M/515E/520D, 365A/366V/441M/484L/485E, 396S/414E/441M, 396S/414E/441M/515E, and 414E/441M/520D. In some embodiments, the engineered TdT polypeptide comprises an amino acid sequence having at least 60%, 70%, 80%, 85%, 86%, 87%, 88%, 89%, 90%, 91%, 92%, 93%, 94%, 95%, 96%, 97%, 98%, 99% or more sequence identity to reference sequence SEQ ID NO: 3174 and one or more residue differences as compared to SEQ ID NO: 3174, selected from E186D/L188I/R248K/V253I/G365A/A366V/S444H/K445N, E186D/G231S/R248K/V253I/T484L, E186D/G231S/R248K/G365A/A366V/K368R/T484L, E186D/G231S/R248K/A366V/K368R/S444H, E186D/G231S/R248K/T484L, E186D/G231S/K368R/K416N/V441M/G442K/S444A/T484L/D485E, E186D/G231S/V441M/S444H/K445N, E186D/T484L/D485E, L188I/G231S/R248K/V253I/G365A/V441M/G442K/S444A/K445N/T484L, D198E/E243S/R264A/S431R/V441M, D198E/E243S/T396S/G414E/S431R/W433V/V441M/L499M, D198E/E243S/T396S/G414E/W433R/T437R/V441M/A515E, D198E/R264A/K266T/G414E, D198E/R264A/T396S/G414E/W433V/V441M/A515E, D198E/K266T/T396S/G414E/W433V/V441M/L499M/K501R, D198E/K266T/G414E/W433S/V441M/A515E, D198E/K266T/T437R/V441M/L499M, D198E/G414E/S431R/V441M/L499M/E520D, D198E/G414E/W433V/V441M/A515E/E520D, G231S/R248K/V441M/T484L, E243S/R264A/A515E/E520D, E243S/T396S/G414E/W433V/V441M/A515E/E520D, E243S/G414E/W433S/T437R/V441M, E243S/G414E/T437R/V441M/A515E, R248K/G442K/S444A/K445N/T484L, R264A/K266T/T396S/G414E/W433R/V441M/A515E, R264A/K266T/G414E/V441M/L499M/K501R/A515E/E520D, R264A/G414E, R264A/G414E/V441M, R264A/W433S/V441M, K266T/T437R/V441M/L499M/A515E/E520D, G365A/A366V/V441M/T484L/D485E, T396S/G414E/V441M, T396S/G414E/V441M/A515E, and G414E/V441M/E520D.

[0191] In some embodiments, the engineered TdT polypeptide comprises an amino acid sequence having at least 60%, 70%, 80%, 85%, 86%, 87%, 88%, 89%, 90%, 91%, 92%, 93%, 94%, 95%, 96%, 97%, 98%, 99% or more sequence identity to reference sequence SEQ ID NO: 3174 and one or more residue differences as compared to SEQ ID NO: 3174, selected from 122/473, 189, 190, 193, 194, 196, 263, 264, 266, 267, 268, 269, 273, 273/501, 274, 278, 279, 281, 297, 298, 299, 300, 301, 302, 304, 309, 312, 315, 347, 350, 352, 353, 359, 390, 392, 394, 407, 408, 410, 411, 413, 414, 416, 436, 454, 468, 472, 473, 477, 479, 480, and 493. In some embodiments, the engineered TdT polypeptide comprises an amino acid sequence having at least 60%, 70%, 80%, 85%, 86%, 87%, 88%, 89%, 90%, 91%, 92%, 93%, 94%, 95%, 96%, 97%, 98%, 99% or more sequence identity to reference sequence SEQ ID NO: 3174 and one or more residue differences as compared to SEQ ID NO: 3174, selected from 122I/473K, 189L, 190L, 190M, 190R, 193S, 193T, 194C, 194L, 194S, 194W, 196G, 196L, 196M, 196N, 196T, 263M, 263R, 264C, 266F, 266I, 266R, 266T, 266V, 266Y, 267A, 267C, 267H, 267V, 267Y, 268C, 268I, 268L, 268T, 269W, 273C, 273D, 273E, 273E/501N, 273F, 273G, 273I, 273L, 273Y, 274A, 274G, 274I, 274V, 278F, 278H, 278M, 278R, 278V, 279Y, 281K, 281L, 297C, 297L, 297M, 297R, 297T, 297V, 298I, 298M, 299A, 299L, 299M, 299N, 299Y, 300H, 301S, 301T, 301V, 302N, 302S, 304D, 304M, 304T, 309F, 309G, 309I, 309L, 309M, 309V, 309W, 312M, 312T, 312V, 315Q, 347I, 350L, 350R, 350W, 352V, 353A, 359G, 390C, 390I, 390L, 390V, 392V, 394A, 394F, 394G, 394M, 394V, 394Y, 407L, 407M, 407N, 407R, 407W, 408G, 408I, 408L, 408M, 408T, 408V, 410F, 410G, 410I, 411E, 411N, 413F, 413L, 413P, 413S, 413V, 414A, 416G, 436S, 454F, 454M, 454V, 468F, 468H, 468M, 468T, 472G, 473G, 477G, 479F, 479V, 480H, 480K, 493V, and 493Y. In some embodiments, the engineered TdT polypeptide comprises an amino acid sequence having at least 60%, 70%, 80%, 85%, 86%, 87%, 88%, 89%, 90%, 91%, 92%, 93%, 94%, 95%, 96%, 97%, 98%, 99% or more sequence identity to reference sequence SEQ ID NO: 3174 and one or more residue differences as compared to SEQ ID NO: 3174, selected from M122I/R473K, R189L, E190L, E190M, E190R, E193S, E193T, F194C, F194L, F194S, F194W, R196G, R196L, R196M, R196N, R196T, H263M, H263R, R264C, K266F, K266I, K266R, K266T, K266V, K266Y, S267A, S267C, S267H, S267V, S267Y, V268C, V268I, V268L, V268T, F269W, V273C, V273D, V273E, V273E/K501N, V273F, V273G, V273I, V273L, V273Y, K274A, K274G, K274I, K274V, K278F, K278H, K278M, K278R, K278V, W279Y, R281K, R281L, K297C, K297L, K297M, K297R, K297T, K297V, L298I, L298M, T299A, T299L, T299M, T299N, T299Y, P300H, M301S, M301T, M301V, Q302N, Q302S, V304D, V304M, V304T, Y309F, Y309G, Y309I, Y309L, Y309M, Y309V, Y309W, L312M, L312T, L312V, G315Q, F347I, G350L, G350R, G350W, P352V, Q353A, L359G, Y390C, Y390I, Y390L, Y390V, R392V, E394A, E394F, E394G, E394M, E394V, E394Y, K407L, K407M, K407N, K407R, K407W, A408G, A408I, A408L, A408M, A408T, A408V, E410F, E410G, E410I, G411E, G411N, A413F, A413L, A413P, A413S, A413V, G414A, K416G, P436S, L454F, L454M, L454V, Q468F, Q468H, Q468M, Q468T, S472G, R473G, R477G, L479F, L479V, R480H, R480K, N493V, and N493Y.

[0192] In some embodiments, the engineered TdT polypeptide comprises an amino acid sequence having at least 60%, 70%, 80%, 85%, 86%, 87%, 88%, 89%, 90%, 91%, 92%, 93%, 94%, 95%, 96%, 97%, 98%, 99% or more sequence identity to reference sequence SEQ ID NO: 3174 and one or more residue differences as compared to SEQ ID NO: 3174, selected from 196, 263, 266, 268, 273, 281, 394, 416, 454, 468, 473, 477, and 493. In some embodiments, the engineered TdT polypeptide comprises an amino acid sequence having at least 60%, 70%, 80%, 85%, 86%, 87%, 88%, 89%, 90%, 91%, 92%, 93%, 94%, 95%, 96%, 97%, 98%, 99% or more sequence identity to reference sequence SEQ ID NO: 3174 and one or more residue differences as compared to SEQ ID NO: 3174, selected from 196G, 263R, 266I, 266T, 266V, 268I, 273I, 273L, 281K, 394A, 394F, 394G, 394M, 394V, 394Y, 416S, 454M, 468A, 468F, 468H, 468M, 468T, 473G, 477S, and 493V. In some embodiments, the engineered TdT polypeptide comprises an amino acid sequence having at least 60%, 70%, 80%, 85%, 86%, 87%, 88%, 89%, 90%, 91%, 92%, 93%, 94%, 95%, 96%, 97%, 98%, 99% or more sequence identity to reference sequence SEQ ID NO: 3174 and one or more residue differences as compared to SEQ ID NO: 3174, selected from R196G, H263R, K266I, K266T, K266V, V268I, V273I, V273L, R281K, E394A, E394F, E394G, E394M, E394V, E394Y, K416S, L454M, Q468A, Q468F, Q468H, Q468M, Q468T, R473G, R477S, and N493V.

[0193] In some embodiments, the engineered TdT polypeptide comprises an amino acid sequence having at least 60%, 70%, 80%, 85%, 86%, 87%, 88%, 89%, 90%, 91%, 92%, 93%, 94%, 95%, 96%, 97%, 98%, 99% or more sequence identity to reference sequence SEQ ID NO: 1830 and one or more residue differences as compared to SEQ ID NO: 1830, selected from 194, 196, 266, 267, 268, 269, 273, 273/501, 274, 277, 278, 297, 298, 299, 301, 302, 309, 312, 347, 359, 390, 392, 394, 407, 408, 413, 416, 454, 468, 473, 477, 479, and 493. In some embodiments, the engineered TdT polypeptide comprises an amino acid sequence having at least 60%, 70%, 80%, 85%, 86%, 87%, 88%, 89%, 90%, 91%, 92%, 93%, 94%, 95%, 96%, 97%, 98%, 99% or more sequence identity to reference sequence SEQ ID NO: 1830 and one or more residue differences as compared to SEQ ID NO: 1830, selected from 194L, 194W, 196G, 196M, 196N, 266R, 266T, 266V, 267A, 268L, 268T, 269W, 273D, 273E, 273E/501N, 273F, 273G, 273I, 273L, 273Y, 274A, 274G, 274I, 274V, 277E, 278Y, 297R, 298M, 299A, 299N, 299S, 301S, 301T, 301V, 302S, 309F, 309L, 309M, 309W, 312V, 347I, 359G, 390C, 390V, 392V, 394Y, 407D, 407L, 407M, 407N, 407R, 408I, 413S, 416G, 416S, 454M, 454V, 468T, 473G, 477G, 479V, and 493V. In some embodiments, the engineered TdT polypeptide comprises an amino acid sequence having at least 60%, 70%, 80%, 85%, 86%, 87%, 88%, 89%, 90%, 91%, 92%, 93%, 94%, 95%, 96%, 97%, 98%, 99% or more sequence identity to reference sequence SEQ ID NO: 1830 and one or more residue differences as compared to SEQ ID NO: 1830, selected from F194L, F194W, R196G, R196M, R196N, K266R, K266T, K266V, S267A, V268L, V268T, F269W, V273D, V273E, V273E/K501N, V273F, V273G, V273I, V273L, V273Y, K274A, K274G, K274I, K274V, D277E, K278Y, K297R, L298M, T299A, T299N, T299S, M301S, M301T, M301V, Q302S, Y309F, Y309L, Y309M, Y309W, L312V, F347I, L359G, Y390C, Y390V, R392V, E394Y, K407D, K407L, K407M, K407N, K407R, A408I, A413S, K416G, K416S, L454M, L454V, Q468T, R473G, R477G, L479V, and N493V.

[0194] In some embodiments, the engineered TdT polypeptide comprises an amino acid sequence having at least 60%, 70%, 80%, 85%, 86%, 87%, 88%, 89%, 90%, 91%, 92%, 93%, 94%, 95%, 96%, 97%, 98%, 99% or more sequence identity to reference sequence SEQ ID NO: 3222 and one or more residue differences as compared to SEQ ID NO: 3222, selected from 186/194/248/396, 186/198/243/248/366/368/394/501, 186/231/243/368/394/485/499, 186/231/248/485, 186/231/366/368/394/485, 186/243, 186/243/248/366/368/394, 186/243/248/394/484/485, 186/243/484/520, 186/248, 186/365, 186/365/366/368/394/499, 186/365/366/394/485, 186/366/368/394/396/484, 186/366/368/394/396/484/485, 186/394/396/485, 194/198/243/366/368/499, 194/515/520, 198/231/243/248/485, 198/243/248/365/394/501, 198/248/394/396/484/485/499, 198/394/396/484/485/499, 198/394/396/499/515/520, 198/394/499/501, 231/365/368/394/499/520, 231/368/394, 231/484/485/499/501, 243/248/394/396/484/485, 243/484, 243/484/485/499, 248/365/366/368/394/484/520, 248/394/484, 365/366/368/394, 365/368/394/396/520, 394/396, and 394/499. In some embodiments, the engineered TdT polypeptide comprises an amino acid sequence having at least 60%, 70%, 80%, 85%, 86%, 87%, 88%, 89%, 90%, 91%, 92%, 93%, 94%, 95%, 96%, 97%, 98%, 99% or more sequence identity to reference sequence SEQ ID NO: 3222 and one or more residue differences as compared to SEQ ID NO: 3222, selected from 186D/194L/248K/396T, 186D/198E/243S/248K/366V/368R/394Y/501R, 186D/231S/243S/368R/394Y/485E/499M, 186D/231S/248K/485E, 186D/231S/366V/368R/394Y/485E, 186D/243S, 186D/243S/248K/366V/368R/394Y, 186D/243S/248K/394Y/484L/485E, 186D/243S/484L/520D, 186D/248K, 186D/365A, 186D/365A/366V/368R/394Y/499M, 186D/365A/366V/394Y/485E, 186D/366V/368R/394Y/396T/484L, 186D/366V/368R/394Y/396T/484L/485E, 186D/394Y/396T/485E, 194L/198E/243S/366V/368R/499M, 194L/515A/520D, 198E/231S/243S/248K/485E, 198E/243S/248K/365A/394Y/501R, 198E/248K/394Y/396T/484L/485E/499M, 198E/394Y/396T/484L/485E/499M, 198E/394Y/396T/499M/515A/520D, 198E/394Y/499M/501R, 231S/365A/368R/394Y/499M/520D, 231S/368R/394Y, 231S/484L/485E/499M/501R, 243S/248K/394Y/396T/484L/485E, 243S/484L, 243S/484L/485E/499M, 248K/365A/366V/368R/394Y/484L/520D, 248K/394Y/484L, 365A/366V/368R/394Y, 365A/368R/394Y/396T/520D, 394Y/396T, and 394Y/499M. In some embodiments, the engineered TdT polypeptide comprises an amino acid sequence having at least 60%, 70%, 80%, 85%, 86%, 87%, 88%, 89%, 90%, 91%, 92%, 93%, 94%, 95%, 96%, 97%, 98%, 99% or more sequence identity to reference sequence SEQ ID NO: 3222 and one or more residue differences as compared to SEQ ID NO: 3222, selected from E186D/F194L/R248K/S396T, E186D/D198E/E243S/R248K/A366V/K368R/E394Y/K501R, E186D/G231S/E243S/K368R/E394Y/D485E/L499M, E186D/G231S/R248K/D485E, E186D/G231S/A366V/K368R/E394Y/D485E, E186D/E243S, E186D/E243S/R248K/A366V/K368R/E394Y, E186D/E243S/R248K/E394Y/T484L/D485E, E186D/E243S/T484L/E520D, E186D/R248K, E186D/G365A, E186D/G365A/A366V/K368R/E394Y/L499M, E186D/G365A/A366V/E394Y/D485E, E186D/A366V/K368R/E394Y/S396T/T484L, E186D/A366V/K368R/E394Y/S396T/T484L/D485E, E186D/E394Y/S396T/D485E, F194L/D198E/E243S/A366V/K368R/L499M, F194L/E515A/E520D, D198E/G231S/E243S/R248K/D485E, D198E/E243S/R248K/G365A/E394Y/K501R, D198E/R248K/E394Y/S396T/T484L/D485E/L499M, D198E/E394Y/S396T/T484L/D485E/L499M, D198E/E394Y/S396T/L499M/E515A/E520D, D198E/E394Y/L499M/K501R, G231S/G365A/K368R/E394Y/L499M/E520D, G231S/K368R/E394Y, G231S/T484L/D485E/L499M/K501R, E243S/R248K/E394Y/S396T/T484L/D485E, E243S/T484L, E243S/T484L/D485E/L499M, R248K/G365A/A366V/K368R/E394Y/T484L/E520D, R248K/E394Y/T484L, G365A/A366V/K368R/E394Y, G365A/K368R/E394Y/S396T/E520D, E394Y/S396T, and E394Y/L499M.

[0195] In some embodiments, the engineered TdT polypeptide comprises an amino acid sequence having at least 60%, 70%, 80%, 85%, 86%, 87%, 88%, 89%, 90%, 91%, 92%, 93%, 94%, 95%, 96%, 97%, 98%, 99% or more sequence identity to reference sequence SEQ ID NO: 3670 and one or more residue differences as compared to SEQ ID NO: 3670, selected from 273, 273/309/493/499, 273/493/499, 273/499, 274/299/408/416, 274/408/416, 274/416, 288/299/416, 298/299/416, 309, 309/499, 416, and 493/499. In some embodiments, the engineered TdT polypeptide comprises an amino acid sequence having at least 60%, 70%, 80%, 85%, 86%, 87%, 88%, 89%, 90%, 91%, 92%, 93%, 94%, 95%, 96%, 97%, 98%, 99% or more sequence identity to reference sequence SEQ ID NO: 3670 and one or more residue differences as compared to SEQ ID NO: 3670, selected from 273I, 273I/309M/493V/499L, 273I/493V/499L, 273I/499L, 274A/299N/408I/416S, 274A/408I/416S, 274I/416S, 288V/299N/416S, 298M/299N/416S, 309M, 309M/499L, 416S, and 493V/499L. In some embodiments, the engineered TdT polypeptide comprises an amino acid sequence having at least 60%, 70%, 80%, 85%, 86%, 87%, 88%, 89%, 90%, 91%, 92%, 93%, 94%, 95%, 96%, 97%, 98%, 99% or more sequence identity to reference sequence SEQ ID NO: 3670 and one or more residue differences as compared to SEQ ID NO: 3670, selected from V273I, V273I/Y309M/N493V/M499L, V273I/N493V/M499L, V273I/M499L, K274A/T299N/A408I/K416S, K274A/A408I/K416S, K274I/K416S, E288V/T299N/K416S, L298M/T299N/K416S, Y309M, Y309M/M499L, K416S, and N493V/M499L.

[0196] In some embodiments, the engineered TdT polypeptide comprises an amino acid sequence having at least 60%, 70%, 80%, 85%, 86%, 87%, 88%, 89%, 90%, 91%, 92%, 93%, 94%, 95%, 96%, 97%, 98%, 99% or more sequence identity to reference sequence SEQ ID NO: 3670 and one or more residue differences as compared to SEQ ID NO: 3670, selected from 168, 198, 267, 301, 307, 308, 308/361, 313, 372, 392, 397, 415, 419, 451, 452, 456, 472, 473, 475, 493/499, and 528. In some embodiments, the engineered TdT polypeptide comprises an amino acid sequence having at least 60%, 70%, 80%, 85%, 86%, 87%, 88%, 89%, 90%, 91%, 92%, 93%, 94%, 95%, 96%, 97%, 98%, 99% or more sequence identity to reference sequence SEQ ID NO: 3670 and one or more residue differences as compared to SEQ ID NO: 3670, selected from 168S, 198S, 267M, 267R, 301G, 301Q, 301S, 307A, 307G, 307S, 308A, 308A/361T, 308G, 308H, 308K, 308S, 308V, 313M, 372E, 392V, 397F, 397W, 415L, 415W, 419G, 419M, 451K, 452L, 456P, 456T, 472A, 473A, 473S, 475V, 493R/499L, and 528L. In some embodiments, the engineered TdT polypeptide comprises an amino acid sequence having at least 60%, 70%, 80%, 85%, 86%, 87%, 88%, 89%, 90%, 91%, 92%, 93%, 94%, 95%, 96%, 97%, 98%, 99% or more sequence identity to reference sequence SEQ ID NO: 3670 and one or more residue differences as compared to SEQ ID NO: 3670, selected from C168S, D198S, S267M, S267R, M301G, M301Q, M301S, L307A, L307G, L307S, Y308A, Y308A/1361T, Y308G, Y308H, Y308K, Y308S, Y308V, A313M, D372E, R392V, Q397F, Q397W, A415L, A415W, L419G, L419M, R451K, V452L, R456P, R456T, S472A, R473A, R473S, F475V, N493R/M499L, and N528L.

[0197] In some embodiments, the engineered TdT polypeptide comprises an amino acid sequence having at least 60%, 70%, 80%, 85%, 86%, 87%, 88%, 89%, 90%, 91%, 92%, 93%, 94%, 95%, 96%, 97%, 98%, 99% or more sequence identity to reference sequence SEQ ID NO: 3670 and one or more residue differences as compared to SEQ ID NO: 3670, selected from 303/396, 308, 473, and 493/499. In some embodiments, the engineered TdT polypeptide comprises an amino acid sequence having at least 60%, 70%, 80%, 85%, 86%, 87%, 88%, 89%, 90%, 91%, 92%, 93%, 94%, 95%, 96%, 97%, 98%, 99% or more sequence identity to reference sequence SEQ ID NO: 3670 and one or more residue differences as compared to SEQ ID NO: 3670, selected from 303H/396A, 308L, 473A, 473M, 473S, and 493V/499L. In some embodiments, the engineered TdT polypeptide comprises an amino acid sequence having at least 60%, 70%, 80%, 85%, 86%, 87%, 88%, 89%, 90%, 91%, 92%, 93%, 94%, 95%, 96%, 97%, 98%, 99% or more sequence identity to reference sequence SEQ ID NO: 3670 and one or more residue differences as compared to SEQ ID NO: 3670, selected from K303H/S396A, Y308L, R473A, R473M, R473S, and N493V/M499L.

[0198] In some embodiments, the engineered TdT polypeptide comprises an amino acid sequence having at least 60%, 70%, 80%, 85%, 86%, 87%, 88%, 89%, 90%, 91%, 92%, 93%, 94%, 95%, 96%, 97%, 98%, 99% or more sequence identity to reference sequence SEQ ID NO: 3670 and one or more residue differences as compared to SEQ ID NO: 3670, selected from 273, 273/309/413/499, 273/309/493/499, 273/493, 273/493/499, 273/499, 274/299/408/416, 274/408/416, 274/416, 281/413/499, 288/299/416, 298/299/416, 309, 309/413, 413, 413/493/499, 413/499, 416, and 493/499. In some embodiments, the engineered TdT polypeptide comprises an amino acid sequence having at least 60%, 70%, 80%, 85%, 86%, 87%, 88%, 89%, 90%, 91%, 92%, 93%, 94%, 95%, 96%, 97%, 98%, 99% or more sequence identity to reference sequence SEQ ID NO: 3670 and one or more residue differences as compared to SEQ ID NO: 3670, selected from 273E/493V, 273I, 273I/309M/413S/499L, 273I/309M/493V/499L, 273I/493V/499L, 273I/499L, 273S/309M/413S/499L, 274A/299N/408I/416S, 274A/408I/416S, 274I/416S, 281K/413S/499L, 288V/299N/416S, 298M/299N/416S, 309M, 309M/413S, 413S, 413S/493V/499L, 413S/499L, 416S, and 493V/499L. In some embodiments, the engineered TdT polypeptide comprises an amino acid sequence having at least 60%, 70%, 80%, 85%, 86%, 87%, 88%, 89%, 90%, 91%, 92%, 93%, 94%, 95%, 96%, 97%, 98%, 99% or more sequence identity to reference sequence SEQ ID NO: 3670 and one or more residue differences as compared to SEQ ID NO: 3670, selected from V273E/N493V, V273I, V273I/Y309M/A413S/M499L, V273I/Y309M/N493V/M499L, V273I/N493V/M499L, V273I/M499L, V273S/Y309M/A413S/M499L, K274A/T299N/A408I/K416S, K274A/A408I/K416S, K274I/K416S, R281K/A413S/M499L, E288V/T299N/K416S, L298M/T299N/K416S, Y309M, Y309M/A413S, A413S, A413S/N493V/M499L, A413S/M499L, K416S, and N493V/M499L.

[0199] In some embodiments, the engineered TdT polypeptide comprises an amino acid sequence having at least 60%, 70%, 80%, 85%, 86%, 87%, 88%, 89%, 90%, 91%, 92%, 93%, 94%, 95%, 96%, 97%, 98%, 99% or more sequence identity to reference sequence SEQ ID NO: 3674 and one or more residue differences as compared to SEQ ID NO: 3674, selected from 194/196/390, 194/196/390/394/460/480, 194/196/390/394/480, 194/196/390/454/480, 194/196/390/480, 194/196/394/454/480, 194/196/454, 194/390, 194/394, 194/394/454, 194/394/454/480, 196, 196/390, 196/390/394, 196/390/394/454, 196/390/394/454/480, 196/390/394/480, 196/390/454, 196/394, 196/394/454, 196/394/454/480, 196/394/480, 196/454, 297/470/473, 297/473/493, 390, 390/394, 390/394/454, 390/394/454/480, 390/394/480, 390/454, 390/480, 394, 394/480, and 454. In some embodiments, the engineered TdT polypeptide comprises an amino acid sequence having at least 60%, 70%, 80%, 85%, 86%, 87%, 88%, 89%, 90%, 91%, 92%, 93%, 94%, 95%, 96%, 97%, 98%, 99% or more sequence identity to reference sequence SEQ ID NO: 3674 and one or more residue differences as compared to SEQ ID NO: 3674, selected from 194L/196G/390C, 194L/196G/390C/394F/460V/480K, 194L/196G/390C/394F/480K, 194L/196G/390C/454M/480K, 194L/196G/390C/480K, 194L/196G/394F/454M/480K, 194L/196G/454M, 194L/390C, 194L/394F, 194L/394F/454M, 194L/394F/454M/480K, 196G, 196G/390C, 196G/390C/394F, 196G/390C/394F/454M, 196G/390C/394F/454M/480K, 196G/390C/394F/480K, 196G/390C/454M, 196G/394F, 196G/394F/454M, 196G/394F/454M/480K, 196G/394F/480K, 196G/454M, 297R/470S/473G, 297R/473G/493V, 390C, 390C/394F, 390C/394F/454M, 390C/394F/454M/480K, 390C/394F/480K, 390C/454M, 390C/480K, 394F, 394F/480K, and 454M. In some embodiments, the engineered TdT polypeptide comprises an amino acid sequence having at least 60%, 70%, 80%, 85%, 86%, 87%, 88%, 89%, 90%, 91%, 92%, 93%, 94%, 95%, 96%, 97%, 98%, 99% or more sequence identity to reference sequence SEQ ID NO: 3674 and one or more residue differences as compared to SEQ ID NO: 3674, selected from F194L/R196G/Y390C, F194L/R196G/Y390C/E394F/G460V/R480K, F194L/R196G/Y390C/E394F/R480K, F194L/R196G/Y390C/L454M/R480K, F194L/R196G/Y390C/R480K, F194L/R196G/E394F/L454M/R480K, F194L/R196G/L454M, F194L/Y390C, F194L/E394F, F194L/E394F/L454M, F194L/E394F/L454M/R480K, R196G, R196G/Y390C, R196G/Y390C/E394F, R196G/Y390C/E394F/L454M, R196G/Y390C/E394F/L454M/R480K, R196G/Y390C/E394F/R480K, R196G/Y390C/L454M, R196G/E394F, R196G/E394F/L454M, R196G/E394F/L454M/R480K, R196G/E394F/R480K, R196G/L454M, K297R/T470S/R473G, K297R/R473G/N493V, Y390C, Y390C/E394F, Y390C/E394F/L454M, Y390C/E394F/L454M/R480K, Y390C/E394F/R480K, Y390C/L454M, Y390C/R480K, E394F, E394F/R480K, and L454M.

[0200] In some embodiments, the engineered TdT polypeptide comprises an amino acid sequence having at least 60%, 70%, 80%, 85%, 86%, 87%, 88%, 89%, 90%, 91%, 92%, 93%, 94%, 95%, 96%, 97%, 98%, 99% or more sequence identity to reference sequence SEQ ID NO: 3796 and one or more residue differences as compared to SEQ ID NO: 3796, selected from 198, 198/267/313/451/475/494/499, 198/267/314/451, 198/267/314/475, 198/267/409/451, 198/267/475, 198/451/493, 208/308, 208/308/461, 267, 267/314/328/451/494/499, 267/451, 267/451/494/499, 308, 314/328/451/499, 314/451, 328/409/451, 328/451, 409, 409/475/494, 451, 451/493/494, 451/493/499, 451/494, and 475. In some embodiments, the engineered TdT polypeptide comprises an amino acid sequence having at least 60%, 70%, 80%, 85%, 86%, 87%, 88%, 89%, 90%, 91%, 92%, 93%, 94%, 95%, 96%, 97%, 98%, 99% or more sequence identity to reference sequence SEQ ID NO: 3796 and one or more residue differences as compared to SEQ ID NO: 3796, selected from 198P, 198P/267Q/314A/451K, 198P/267Q/314A/475V, 198P/267Q/409L/451K, 198P/267Q/475V, 198P/267R/313L/451K/475V/494V/499L, 198P/451K/493V, 208V/308A/461N, 208V/308V, 267Q/451K/494V/499L, 267R, 267R/314A/328T/451K/494R/499L, 267R/451K, 308A, 308V, 314A/328T/451K/499L, 314A/451K, 328T/409L/451K, 328T/451K, 409L, 409L/475V/494V, 451K, 451K/493V/494V, 451K/493V/499L, 451K/494V, and 475V. In some embodiments, the engineered TdT polypeptide comprises an amino acid sequence having at least 60%, 70%, 80%, 85%, 86%, 87%, 88%, 89%, 90%, 91%, 92%, 93%, 94%, 95%, 96%, 97%, 98%, 99% or more sequence identity to reference sequence SEQ ID NO: 3796 and one or more residue differences as compared to SEQ ID NO: 3796, selected from D198P, D198P/S267Q/R314A/R451K, D198P/S267Q/R314A/F475V, D198P/S267Q/D409L/R451K, D198P/S267Q/F475V, D198P/S267R/A313L/R451K/F475V/H494V/M499L, D198P/R451K/N493V, 1208V/Y308A/S461N, 1208V/Y308V, S267Q/R451K/H494V/M499L, S267R, S267R/R314A/V328T/R451K/H494R/M499L, S267R/R451K, Y308A, Y308V, R314A/V328T/R451K/M499L, R314A/R451K, V328T/D409L/R451K, V328T/R451K, D409L, D409L/F475V/H494V, R451K, R451K/N493V/H494V, R451K/N493V/M499L, R451K/H494V, and F475V.

[0201] In some embodiments, the engineered TdT polypeptide comprises an amino acid sequence having at least 60%, 70%, 80%, 85%, 86%, 87%, 88%, 89%, 90%, 91%, 92%, 93%, 94%, 95%, 96%, 97%, 98%, 99% or more sequence identity to reference sequence SEQ ID NO: 3870 and one or more residue differences as compared to SEQ ID NO: 3870 at a position or set of positions selected from 165, 169, 171, 173, 175, 176, 179, 183, 187, 191, 192, 195, 197, 199, 200, 203, 204, 210, 257, 259, 267, 291, 293, 295, 301, 319, 325, 340, 341, 342, 374, 387, 398, 399, 403, 404, 406, 429, 480, 481, 483, 484, 490, 491,493, 494, 495, 521, 507, 508, 509, and 522. In some embodiments, the engineered TdT polypeptide comprises an amino acid sequence having at least 60%, 70%, 80%, 85%, 86%, 87%, 88%, 89%, 90%, 91%, 92%, 93%, 94%, 95%, 96%, 97%, 98%, 99% or more sequence identity to reference sequence SEQ ID NO: 3870 and one or more residue differences as compared to SEQ ID NO: 3870 selected from P165A, P165C, P165R, P165T, Q169M, Q169T, R171G, T173S, N175L, N175M, N175V, N176V, Q179K, N175I, Q179M, Q179P, Q179S, Q179T, Q179V, D183C, D183W, I187R, N191F, N191M, N191Q, N191V, Y192A, Y192M, Y192T, K195R, N197C, N197E, N197F, N197R, N197T, D199G, D199R, D199S, D199V, D199W, T200K, T200M, E203F, E203G, E203M, E203V, F204I, F204V, V210M, E257P, E257S, Y259F, R267S, R291M, S293C, S293T, T295A, T295G, T295N, T295S, T295V, M301G, M301W A319E, W325G, W325L, I340S, V341C, E342Q, L374V, L387I, W398V, E399S, S403K, S403L, S403R, S403T, S403V, S403W, P404G, P404M, G406L, G406R, G406S, G406T, R429F, R429H, R429V, R480A, R480Q, W481Q, A483C, L484S, M490A, M490E, M490L, M490R, M490S, M490V, L491V, N493K, H494A, H494T, S495C, S495M, S495N, S495R, A507G, K508N, S509R, Y521V, and L522I.

[0202] In some embodiments, the engineered TdT polypeptide comprises an amino acid sequence having at least 60%, 70%, 80%, 85%, 86%, 87%, 88%, 89%, 90%, 91%, 92%, 93%, 94%, 95%, 96%, 97%, 98%, 99% or more sequence identity to reference sequence SEQ ID NO: 3918 and one or more residue differences as compared to SEQ ID NO: 3918 at a position or set of positions selected from 3, 7/400/459/504, 164, 173/367/459/500, 184, 203, 203/367/459, 203/367/459/500/501, 203/400/459/501, 203/459, 203/459/499/504, 203/459/500, 215, 218, 294, 335, 335/402/481/484, 335/402/512, 335/481/484, 335/481/493, 335/481/512, 336, 338, 339, 367, 367/459/500, 370, 373, 376, 380, 384, 390, 395, 395/402, 395/402/481/484, 395/481, 395/481/512, 395/484, 400, 400/459, 400/459/499/500/504, 400/459/500/501, 400/459/501/504, 400/501, 400/504, 402, 402/481, 402/481/484, 402/481/484/512, 402/481/493, 402/484/493, 402/512, 458, 459, 459/501, 460, 481, 481/512, 484, 485, 493, 499, 500, 501, 504, 512, 515, and 516. In some embodiments, the engineered TdT polypeptide comprises an amino acid sequence having at least 60%, 70%, 80%, 85%, 86%, 87%, 88%, 89%, 90%, 91%, 92%, 93%, 94%, 95%, 96%, 97%, 98%, 99% or more sequence identity to reference sequence SEQ ID NO: 3918 and one or more residue differences as compared to SEQ ID NO: 3918 selected from 3Q, H7-/D400W/Y459R/F504Q, S164G, T173I/E367S/Y459V/T500S, S184A, E203R, E203R/E367S/Y459R, E203R/E367S/Y459V/T500S/R501P, E203R/D400W/Y459R/R501P, E203R/Y459R/M499R/F504G, E203R/Y459R/T500S, E203R/Y459V, P215Q, V218L, K294D, F335V, F335V/G402K/W481R/L484E, F335V/G402K/W481R/L484R, F335V/G402K/E512R, F335V/G402R/W481R/L484R, F335V/W481D/L484R, F335V/W481R/L484R, F335V/W481R/N493T, F335V/W481R/E512R, D336Q, D338E, D338Q, A339R, E367R, E367S, E367S/Y459V/T500S, E367T, Q370E, Q373G, Q376S, N380G, K384S, C390A, W395A, W395E, W395N, W395N/G402K, W395N/W481R/E512R, W395N/L484R, W395T, W395T/G402K/W481R/L484R, W395T/W481R, D400W, D400W/Y459R/T500S/R501P, D400W/Y459V, D400W/Y459V/M499R/T500S/F504Q, D400W/Y459V/R501P/F504G, D400W/R501P, D400W/F504Q, G402K, G402K/W481D, G402K/W481D/L484R/E512R, G402K/W481D/N493T, G402K/W481R/L484R, G402K/E512R, G402R, G402R/L484R/N493T, G402S, P458R, Y459R, Y459V, Y459V/R501P, G460M, G460R, W481D, W481R, W481R/E512R, L484E, L484R, E485Q, N493T, M499P, M499R, T500S, R501N, R501P, F504G, F504Q, E512G, E512R, E515P, and H516T.

[0203] In some embodiments, the engineered TdT polypeptide comprises an amino acid sequence having at least 60%, 70%, 80%, 85%, 86%, 87%, 88%, 89%, 90%, 91%, 92%, 93%, 94%, 95%, 96%, 97%, 98%, 99% or more sequence identity to reference sequence SEQ ID NO: 4266 and one or more residue differences as compared to SEQ ID NO: 4266 at a position or set of positions selected from 95/428/480, 163/190, 163/203/366, 163/328/363/480, 163/363/480/485, 172/174/178/340, 178, 188, 190/202/203/363/366/480/483/485, 190/202/203/480, 190/480/485, 192, 192/498/499/503, 202, 202/203/328/362/363/366/428/480/485/498/499/503, 202/203/485, 203/328/363/428/483, 203/328/428, 203/328/480/485, 203/362/366, 203/498/499/503, 272, 280, 280/498/499/503, 296, 297, 299, 299/498/499/503, 301, 301/503, 308, 308/503, 311, 328/428, 328/480/483, 328/485, 343, 346, 349, 358, 359/498/499/503, 362/363, 362/363/366/428/480/483/498/499/503, 392/498/499/503, 406, 407, 410, 411, 418/498/499/503, 418/503, 419/503, 465, 471, 472/498/499/503, 473, 480/483, 491, and 498/499/503. In some embodiments, the engineered TdT polypeptide comprises an amino acid sequence having at least 60%, 70%, 80%, 85%, 86%, 87%, 88%, 89%, 90%, 91%, 92%, 93%, 94%, 95%, 96%, 97%, 98%, 99% or more sequence identity to reference sequence SEQ ID NO: 4266 and one or more residue differences as compared to SEQ ID NO: 4266 selected from L95M/R428V/W480D, S163Q/N190M, S163Q/F203I/E366S, S163Q/Q328L/P363G/W480D, S163Q/P363G/W480D/E485Q, T172S/N174M/Q178K/V340C, Q178K, R188K, N190M/E202R/F203I/P363G/E366S/W480D/L483R/E485Q, N190M/E202R/F203I/W480D, N190M/W480D/E485Q, E192G, E192S/M498P/T499S/Q503G, E192T, E192V, E192Y, E192Y/M498P/T499S/Q503G, E202R, E202R/F203I/Q328A/S362T/P363G/E366S/R428V/W480D/E485Q/M498P/T499S/Q503G, E202R/F203I/E485Q, F203I/Q328A/P363G/R428V/L483R, F203I/Q328A/R428V, F203I/Q328A/W480D/E485Q, F203I/S362T/E366S, F203I/M498P/T499S/Q503G, V272P, R280G/M498P/T499S/Q503G, R280H, K296G, K296P, L297F, P299E, P299K/M498P/T499S/Q503G, P299S, P299T, Q301G, Q301S/Q503G, Y308H/Q503G, Y308K, Y308Q, Y308R, Y308T, L311R, Q328A/E485Q, Q328L/R428V, Q328L/W480D/L483R, V343C, V343L, F346Q, F346W, G349Q, L358G, L359I/M498P/T499S/Q503G, L392R/M498P/T499S/Q503G, S362T/P363G, S362T/P363R/E366S/R428V/W480D/L483R/M498P/T499S/Q503G, K406S, A407S, G410A, G410Q, D411E, L418G/M498P/T499S/Q503G, L418V/Q503G, I419V/Q503G, M465E, S471N, R472G/M498P/T499S/Q503G, R472S/M498P/T499S/Q503G, M473Q, W480D/L483R, D491G, D491R, and M498P/T499S/Q503G.

[0204] In some embodiments, the engineered TdT polypeptide comprises an amino acid sequence having at least 60%, 70%, 80%, 85%, 86%, 87%, 88%, 89%, 90%, 91%, 92%, 93%, 94%, 95%, 96%, 97%, 98%, 99% or more sequence identity to reference sequence SEQ ID NO: 4558 and one or more residue differences as compared to SEQ ID NO: 4558 at a position or set of positions selected from 94/365/367, 172/174/178/401/403, 172/174/178/401/403/507, 172/174/178/402/508, 172/174/401/403/507, 172/178, 172/178/401, 174/178, 178/401/403, 178/402/403, 318/375/380, 324/379/405/483, 340, 340/394, 365, 365/367/428, 365/389/394, 367, 375/376, 375/379/483, 375/380, 375/380/400/483, 375/380/483, 376/483, 379/483, 389/394, 394, 401, 401/402/403/507, 402/403, 405/483, and 483. In some embodiments, the engineered TdT polypeptide comprises an amino acid sequence having at least 60%, 70%, 80%, 85%, 86%, 87%, 88%, 89%, 90%, 91%, 92%, 93%, 94%, 95%, 96%, 97%, 98%, 99% or more sequence identity to reference sequence SEQ ID NO: 4558 and one or more residue differences as compared to SEQ ID NO: 4558 selected from V94I/A365F/K367R, T172S/N174M/Q178K/S402L/S508R, T172S/N174M/Q178R/G401K/P403G, T172S/N174M/Q178R/G401K/P403G/K507R, T172S/N174M/G401K/P403G/K507R, T172S/Q178K, T172S/Q178K/G401K, N174M/Q178R, Q178K/G401K/P403G, Q178K/S402L/P403G, A318E/Q375G/L380V, W324L/N379T/G405L/L483R, V340C, V340C/W394T, A365F, A365F/K367R/R428C, A365H/C389A/W394E, K367R, Q375G/K376H, Q375G/N379T/L483R, Q375G/L380V, Q375G/L380V/G400P/L483R, Q375G/L380V/L483R, K376H/L483R, N379T/L483R, C389A/W394E, W394T, G401K, G401K/S402L/P403G/K507N, S402L/P403G, G405L/L483R, and L483R.

[0205] In some embodiments, the engineered TdT polypeptide comprises an amino acid sequence having at least 60%, 70%, 80%, 85%, 86%, 87%, 88%, 89%, 90%, 91%, 92%, 93%, 94%, 95%, 96%, 97%, 98%, 99% or more sequence identity to reference sequence SEQ ID NO: 4442 and one or more residue differences as compared to SEQ ID NO: 4442 at a position or set of positions selected from 174/296/299, 182, 185/190, 189/190, 190, 190/193, 192/280, 192/402/507, 257, 259, 260, 281, 289, 296/299, 305, 306, 307, 308, 312, 313, 316, 318, 327, 374, 381, 394, 395, 402, 402/507, 404, 405, 414, 432, 451, 455, 460, 461, 476/480, 480, 480/481, 493, 494, and 522. In some embodiments, the engineered TdT polypeptide comprises an amino acid sequence having at least 60%, 70%, 80%, 85%, 86%, 87%, 88%, 89%, 90%, 91%, 92%, 93%, 94%, 95%, 96%, 97%, 98%, 99% or more sequence identity to reference sequence SEQ ID NO: 4442 and one or more residue differences as compared to SEQ ID NO: 4442 selected from N174M/K296P/P299E, D182A, D182C, D182N, D182R, E185G/N190M, E189A/N190M, E189H/N190M, E189R/N190M, E189V/N190M, N190M, N190M/L193F, E192T/R280H, E192T/S402L/K507R, W257K, W257R, Q259C, Q259K, Q259R, S260A, M281C, M281L, V289I, K296P/P299T, L306A, L306C, L305F, L306M, L306R, L306T, Y307N, Y308Q, A312H, A312K, A312Q, A312R, A312V, R313A, R313I, R313L, T316F, A318L, A318M, A318N, A318P, A318R, A318T, A318V, A318Y, V327A, L374M, W381F, W381M, W394L, W394M, W394Y, S395G, S402L, S402L/K507R, S404A, G405L, A414C, A414E, A414P, R432H, V451L, R455A, S460A, F461M, R476L/W480D, R476W/W480D, W480D, W480E, W480L, W480M, W480D/Y481W, H493K, S494Q, S494R, S494T, and E522T.

[0206] In some embodiments, the engineered TdT polypeptide comprises an amino acid sequence having at least 60%, 70%, 80%, 85%, 86%, 87%, 88%, 89%, 90%, 91%, 92%, 93%, 94%, 95%, 96%, 97%, 98%, 99% or more sequence identity to reference sequence SEQ ID NO: 4654 and one or more residue differences as compared to SEQ ID NO: 4654 at a position or set of positions selected from 190, 190/197/308, 190/308/380/405, 190/375, 190/375/380, 190/380/405, 190/405/406, 272/301/393/394/480, 272/318/480/483, 301/394/480, 318, 375, 375/380, 375/405, 375/405/406, 380, 394, 394/480, and 480/483. In some embodiments, the engineered TdT polypeptide comprises an amino acid sequence having at least 60%, 70%, 80%, 85%, 86%, 87%, 88%, 89%, 90%, 91%, 92%, 93%, 94%, 95%, 96%, 97%, 98%, 99% or more sequence identity to reference sequence SEQ ID NO: 4654 and one or more residue differences as compared to SEQ ID NO: 4654 selected from N190M, N190M/D197N/Y308Q, N190M/Y308Q/L380V/G405L, N190M/Q375G, N190M/Q375G/L380V, N190M/L380V/G405L, N190M/G405L/K406S, V272A/Q301S/E393K/W394T/W480D, V272A/A318E/W480D/L483R, Q301S/W394T/W480D, A318E, Q375G, Q375G/L380V, Q375G/G405L, Q375G/G405L/K406S, L380V, W394T, W394T/W480D, and W480D/L483R.

[0207] In some embodiments, the engineered TdT polypeptide comprises an amino acid sequence having at least 60%, 70%, 80%, 85%, 86%, 87%, 88%, 89%, 90%, 91%, 92%, 93%, 94%, 95%, 96%, 97%, 98%, 99% or more sequence identity to reference sequence SEQ ID NO: 4850 and one or more residue differences as compared to SEQ ID NO: 4850 at a position or set of positions selected from 189, 189/193/207/307/353, 190/322, 193, 193/307, 261/322/421, 297/298/300/392, 297/300, 297/300/328, 298/300/328, 298/300/328/395, 298/300/360, 298/300/392/395, 298/300/392/395/492, 298/300/395, 298/300/481, 300, 300/392/395, 319, 322, 392, 421, and 492. In some embodiments, the engineered TdT polypeptide comprises an amino acid sequence having at least 60%, 70%, 80%, 85%, 86%, 87%, 88%, 89%, 90%, 91%, 92%, 93%, 94%, 95%, 96%, 97%, 98%, 99% or more sequence identity to reference sequence SEQ ID NO: 4850 and one or more residue differences as compared to SEQ ID NO: 4850 selected from R189K, R189K/E193V/A207V/L307T/Q353R, E190R/D322N, E193V, E193V/L307T, S261A/D322N/L421V, K297P/L298F/P300T/R392S, K297P/P300E/V328A, K297P/P300S, L298F/P300E/V328A/W395L, L298F/P300E/R392S/W395L, L298F/P300E/W395L, L298F/P300E/D481W, L298F/P300S/V328A, L298F/P300S/R392S/W395L, L298F/P300S/R392S/W395L/D492E, L298F/P300T/L360V, P300E, P300E/R392S/W395L, P300T, A319P, D322N, R392S, L421V, and D492E.

[0208] In some embodiments, the engineered TdT polypeptide comprises an amino acid sequence having at least 60%, 70%, 80%, 85%, 86%, 87%, 88%, 89%, 90%, 91%, 92%, 93%, 94%, 95%, 96%, 97%, 98%, 99% or more sequence identity to reference sequence SEQ ID NO: 4856 and one or more residue differences as compared to SEQ ID NO: 4856 at a position or set of positions selected from 10/413, 260, 268, 302/307, 317, 353, 354, 362, 364, 392, 393, 394, 395, 397, 402, 404, 412, 413, 419, 436/512, 460, 477, 486, 490, 495, and 518. In some embodiments, the engineered TdT polypeptide comprises an amino acid sequence having at least 60%, 70%, 80%, 85%, 86%, 87%, 88%, 89%, 90%, 91%, 92%, 93%, 94%, 95%, 96%, 97%, 98%, 99% or more sequence identity to reference sequence SEQ ID NO: 4856 and one or more residue differences as compared to SEQ ID NO: 4856 selected from S10N/A413S, Q260R, V268T, Q302A/T307L, Q302S/T307L, T317C, Q353R, Q353S, G354S, S362V, P364Q, R392G, R392H, R392K, L393R, L393V, E394A, E394V, W395Y, Q397G, Q397S, G402K, G402L, G402P, G402T, G402V, P404L, P404Q, D412G, D412M, A413G, L419G, L419V, P436S/E512D, G460A, G460P, G460S, R477Q, R477S, E486V, M490E, M490N, M490Q, M490S, M490T, M490V, S495Q, S495R, and G518S.

[0209] In some embodiments, the engineered TdT polypeptide comprises an amino acid sequence having at least 60%, 70%, 80%, 85%, 86%, 87%, 88%, 89%, 90%, 91%, 92%, 93%, 94%, 95%, 96%, 97%, 98%, 99% or more sequence identity to reference sequence SEQ ID NO: 4904 and one or more residue differences as compared to SEQ ID NO: 4904 at a position or set of positions selected from 190, 190/287/300/302, 190/300/477/490, 194/300/302/413, 194/300/302/481, 297/298/308/392/395, 298/392/525, 300, 300/317, 300/490, and 395. In some embodiments, the engineered TdT polypeptide comprises an amino acid sequence having at least 60%, 70%, 80%, 85%, 86%, 87%, 88%, 89%, 90%, 91%, 92%, 93%, 94%, 95%, 96%, 97%, 98%, 99% or more sequence identity to reference sequence SEQ ID NO: 4904 and one or more residue differences as compared to SEQ ID NO: 4904 selected from E190R, E190R/L287V/P300T/Q302A, E190R/P300T/R477Q/M490E, L194F/P300E/Q302S/D481M, L194F/P300T/Q302A/A413G, K297P/L298F/Y308N/R392K/W395Y, L298F/R392K/F525A, P300E, P300E/T317C, P300T/M490E, and W395Y.

[0210] In some embodiments, the engineered TdT polypeptide comprises an amino acid sequence having at least 60%, 70%, 80%, 85%, 86%, 87%, 88%, 89%, 90%, 91%, 92%, 93%, 94%, 95%, 96%, 97%, 98%, 99% or more sequence identity to reference sequence SEQ ID NO: 5002 and one or more residue differences as compared to SEQ ID NO: 5002 at a position or set of positions selected from 11/523, 190/194, 194, 194/198, 202, 208, 264, 273, 273/347/354, 274, 281, 290, 298/300/302, 298/302/392/393/394/433, 298/302/392/394, 298/392/393/394, 298/392/393/394/477, 298/392/394/490, 298/393/394/395/433/477, 298/393/394/477/495, 298/394/433, 300/302/303, 308/402/460, 309, 313, 314, 324, 352, 359, 360, 361, 392/393/394/433, 392/393/394/477, 392/393/394/477/495, 392/393/394/490, 392/394, 392/394/395, 392/394/433/477, 392/394/433/495, 392/394/477/495, 392/394/495, 393/394, 393/394/433/477/490, 394/477, 394/490, 405, 408/413, 411/413, 413, 460/525, 463, 466, 467, 472, 473, 477, 492, 523, and 526. In some embodiments, the engineered TdT polypeptide comprises an amino acid sequence having at least 60%, 70%, 80%, 85%, 86%, 87%, 88%, 89%, 90%, 91%, 92%, 93%, 94%, 95%, 96%, 97%, 98%, 99% or more sequence identity to reference sequence SEQ ID NO: 5002 and one or more residue differences as compared to SEQ ID NO: 5002 selected from G11D/E523R, E190L/F194L, E190R/F194L, E190T/F194L, F194L, F194L/D198G, F194L/D198P, F194L/D198Q, F194L/D198V, F194W, F194Y, L202T, I208G, I208S, I208V, A264S, V273M/Q347F/S354G, V273Q, V273S, K274G, K274V, K274W, R281G, R281Q, V290A, L298F/A302S/R392K/L393V/E394A/R433H, L298F/A302S/R392K/E394A, L298F/R392K/L393V/E394A/R477L, L298F/R392K/L393V/E394V, L298F/R392K/E394V/M490E, L298F/L393V/E394V/W395Y/R433H/R477V, L298F/L393V/E394V/R477L/S495Q, L298F/E394V/R433H, L298I/T300P/A302Q, T300P/A302Q/K303V, Y308N/G402V/G460A, Y309R, A313S, R314L, I324M, I324T, P352T, L359C, L359V, L360V, I361L, R392H/L393V/E394A/R477L, R392H/L393V/E394V/M490E, R392H/E394A/R433H/R477L, R392H/E394V/R433H/S495Q, R392K/L393V/E394V/R433H, R392K/L393V/E394V/R477V/S495Q, R392K/E394A/W395Y, R392K/E394V, R392K/E394V/R477V/S495Q, R392K/E394V/S495Q, L393V/E394A, L393V/E394V/R433H/R477V/M490E, E394V/R477V, E394V/M490E, S405T, A408G/G413A, A408L/G413A, G411L/G413A, G413A, G460S/F525A, A463P, A463V, M466V, L467A, S472T, R473S, R477L, D492R, E523T, E526L, and E526Y.

[0211] In some embodiments, the engineered TdT polypeptide comprises an amino acid sequence having at least 60%, 70%, 80%, 85%, 86%, 87%, 88%, 89%, 90%, 91%, 92%, 93%, 94%, 95%, 96%, 97%, 98%, 99% or more sequence identity to reference sequence SEQ ID NO: 5028 and one or more residue differences as compared to SEQ ID NO: 5028 at a position or set of positions selected from 82/194/198/313, 194, 194/198, 194/198/208/313, 194/198/309, 194/198/313, 194/198/411, 194/208/411, 194/309, 194/313, 194/411, 198, 198/208, 198/208/309/411, 198/208/313/411, 273/274, 274, 274/281/526, 274/359/526, 274/523, 309, 309/313/411, 324/526, 411, 466, 466/526, 523, and 526. In some embodiments, the engineered TdT polypeptide comprises an amino acid sequence having at least 60%, 70%, 80%, 85%, 86%, 87%, 88%, 89%, 90%, 91%, 92%, 93%, 94%, 95%, 96%, 97%, 98%, 99% or more sequence identity to reference sequence SEQ ID NO: 5028 and one or more residue differences as compared to SEQ ID NO: 5028 selected from V82I/F194L/D198G/A313S, F194L, F194L/D198Q, F194L/D198Q/I208V/A313S, F194L/D198V, F194L/D198V/Y309R, F194L/D198V/G411L, F194L/I208V/G411L, F194L/Y309R, F194W, F194W/D198Q, F194W/D198V, F194W/D198V/A313S, F194W/A313S, F194W/G411L, D198G, D198Q, D198Q/I208S/A313S/G411L, D198Q/I208V/Y309R/G411L, D198V/I208S, V273Q/K274G, V273S/K274W, K274G/R281Q/E526Y, K274M/E523T, K274V, K274V/L359V/E526Y, K274W, Y309R, Y309R/A313S/G411L, I324M/E526Y, G411L, M466V, M466V/E526Y, E523T, and E526Y.

[0212] In some embodiments, the engineered TdT polypeptide comprises an amino acid sequence having at least 60%, 70%, 80%, 85%, 86%, 87%, 88%, 89%, 90%, 91%, 92%, 93%, 94%, 95%, 96%, 97%, 98%, 99% or more sequence identity to reference sequence SEQ ID NO: 5192 and one or more residue differences as compared to SEQ ID NO: 5192 at a position or set of positions selected from 96/295, 169, 176, 177, 179, 184, 187, 193, 195, 197, 197/307, 198, 199, 200, 203, 292, 295, 300/394, 304, 325, 326, 326/380, 329, 373, 376, 377, 383, 394, 403, 409, 430, 485, 508, and 520/526. In some embodiments, the engineered TdT polypeptide comprises an amino acid sequence having at least 60%, 70%, 80%, 85%, 86%, 87%, 88%, 89%, 90%, 91%, 92%, 93%, 94%, 95%, 96%, 97%, 98%, 99% or more sequence identity to reference sequence SEQ ID NO: 5192 and one or more residue differences as compared to SEQ ID NO: 5192 selected from L96S/T295N, Q169E, N176H, R177L, R177T, R177W, Q179G, Q179L, S184G, S184H, S184P, 1187V, V193C, V193F, V193R, V193S, K195L, N197F, N197M/T307A, D198L, D198S, D199G, D199R, D199S, T200A, T200E, T200K, T200Q, T200R, T200S, T200V, T200Y, E203A, E203C, E203G, E203L, S292L, S292M, S292Q, S292R, T295G, T295H, T295K, T295L, T300A/V394F, V3041, W325M, L326Q, L326R, L326T, L326M/N380R, Q329K, Q329L, Q373G, Q376R, K377N, K377R, K383H, K383R, K383S, V394F, V394H, V3941, V394L, V394Q, V394S, V394W, V394Y, L403R, L403V, D409S, K430R, E485L, K508A, K508S, and E520I/Y526E.

[0213] In some embodiments, the engineered TdT polypeptide comprises an amino acid sequence having at least 60%, 70%, 80%, 85%, 86%, 87%, 88%, 89%, 90%, 91%, 92%, 93%, 94%, 95%, 96%, 97%, 98%, 99% or more sequence identity to reference sequence SEQ ID NO: 5246 and one or more residue differences as compared to SEQ ID NO: 5246 at a position or set of positions selected from 177/198/200, 177/200/203, 177/200/203/295, 177/200/295/326, 180, 184/198/200/203/295, 184/200/295/326, 190/198/200/203, 190/200/203/295/380, 190/200/295, 197, 198, 198/200, 198/200/203, 198/200/203/295, 200/326, 200/380, 203, 203/380, 233, 252, 295, 336, 364, 365, 367, 381, 384, 441, 459, and 485. In some embodiments, the engineered TdT polypeptide comprises an amino acid sequence having at least 60%, 70%, 80%, 85%, 86%, 87%, 88%, 89%, 90%, 91%, 92%, 93%, 94%, 95%, 96%, 97%, 98%, 99% or more sequence identity to reference sequence SEQ ID NO: 5246 and one or more residue differences as compared to SEQ ID NO: 5246 selected from R177W/D198L/T200K, R177W/T200K/E203G, R177W/T200K/E203G/T295N, R177W/T200K/T295N/L326M, R180K, S184H/D198L/T200K/E203G/T295N, S184H/T200K/T295N/L326M, E190M/D198L/T200K/E203G, E190M/T200K/E203G/T295N/N380R, E190M/T200K/T295N, N197Q, D198L, D198L/T200K, D198L/T200K/E203G, D198L/T200K/E203G/T295N, T200K/L326M, T200K/N380R, E203G, E203G/N380R, E233L, E233R, A252R, T295N, D336C, P364A, G365H, G365R, E367S, L381H, L381Y, K384A, M441E, R459M, R459W, and E485L.

[0214] In some embodiments, the engineered TdT polypeptide comprises an amino acid sequence having at least 60%, 70%, 80%, 85%, 86%, 87%, 88%, 89%, 90%, 91%, 92%, 93%, 94%, 95%, 96%, 97%, 98%, 99% or more sequence identity to reference sequence SEQ ID NO: 2 or 660 and one or more residue differences as compared to SEQ ID NO: 2 or 660, selected from

26/30/38/79/81/90/92/94/101/108/137/140/141/142/153/155/160/163/165/177/184/189/194/196/201/203/205/213/219/231/248/258/263/264/266/267/301/304/307/314/318/325/333/340/344/353/362/379/390/392/394/395/397/398/402/403/406/408/410/4 11/413/414/416/425/427/429/433/434/441/442/444/446/451/455/460/461/466/468/476/481/484/485/488/495/499/501/502/506/515/525,
26/30/38/79/81/90/92/94/101/108/137/140/141/142/153/155/160/163/165/177/184/189/201/203/205/213/219/231/248/258/263/264/266/304/307/314/318/325/333/340/344/353/362/379/392/394/395/397/398/402/403/406/408/410/411/413/414/416/425/4 27/429/433/434/441/442/444/446/455/460/461/466/468/476/481/484/485/488/495/499/501/502/506/515/525,
26/38/79/81/90/92/94/101/108/137/141/155/160/163/165/189/201/203/205/213/219/246/248/258/263/264/304/307/314/318/333/340/344/353/362/392/394/395/396/397/398/402/403/406/408/410/411/413/414/425/441/442/446/455/460/461/466/468/476/ 481/485/488/506/525,
92/94/101/108/137/141/155/160/163/165/201/203/205/213/219/258/263/264/314/333/344/353/392/394/395/397/406/408/411/413/414/425/441/442/446/460/461/468/476/481/485/488/525, and
92/94/101/108/137/141/155/201/213/264/314/333/344/392/394/395/397/406/408/425/442/446/461/476/481/485/525. In some embodiments, the engineered TdT polypeptide comprises an amino acid sequence having at least 60%, 70%, 80%, 85%, 86%, 87%, 88%, 89%, 90%, 91%, 92%, 93%, 94%, 95%, 96%, 97%, 98%, 99% or more sequence identity to reference sequence SEQ ID NO: 2 or 660 and one or more residue differences as compared to SEQ ID NO: 2 or 660, selected from 26Q/30G/38T/79T/81E/90L/92R/94E/101E/108K/137A/140V/141E/142V/153V/155E/160M/163V/165P/177R/184S/189R/194L/196G/201A/203E/205R/213S/219R/231S/248R/258W/263H/264A/266T/267R/30 1W/304V/307L/314R/318R/325W/333A/340I/344V/353Q/362S/379M/390C/392R/394E/395W/397Q/39 8W/402G/403S/406G/408A/410E/411G/413A/414E/416S/425D/427L/429R/433R/434N/441M/442G/444 S/446P/451K/455L/460G/461S/466M/468Q/476R/481W/484L/485E/488N/495S/499M/501R/502G/506P/515E/525F,
26Q/30G/38T/79T/81E/90L/92R/94E/101E/108K/137A/140V/141E/142V/153V/155E/160M/163V/165P/177R/184S/189R/201A/203E/205R/213S/219R/231S/248R/258W/263H/264A/266T/304V/307L/314R/31 8R/325W/333A/340I/344V/353Q/362S/379M/392R/394E/395W/397Q/398W/402G/403S/406G/408A/41 0E/411G/413A/414E/416S/425D/427L/429R/433R/434N/441M/442G/444S/446P/455L/460G/461S/466M/468Q/476R/481W/484L/485E/488N/495S/499M/501R/502G/506P/515E/525F, 26Q/38T/79T/81E/90L/92R/94E/101E/108K/137A/141E/155E/160M/163V/165P/189R/201A/203E/205R/213S/219R/246N/248R/258W/263H/264R/304V/307L/314R/318R/333A/340I/344V/353Q/362S/392R/3 94E/395W/396T/397Q/398W/402G/403S/406G/408A/410E/411G/413A/414G/425D/441M/442G/446P/4 55L/460G/461G/466M/468Q/476R/481W/485D/488N/506P/525F,

### 92R/94E/101E/108K/137A/141E/155E/160M/163V/165P/201A/203E/205R/213S/219R/258W/263H/264R/314R/333A/344V/353Q/392R/394E/395W/397Q/406G/408A/411G/413A/414G/425D/441M/442G/446P/460G/461G/468Q/476R/481W/485D/488N/525F, and

[0215] 92R/94E/101E/108K/137A/141E/155E/201A/213S/264R/314R/333A/344V/392R/394E/395W/397Q/406 G/408A/425D/442G/446P/461G/476R/481W/485D/525F. In some embodiments, the engineered TdT polypeptide comprises an amino acid sequence having at least 60%, 70%, 80%, 85%, 86%, 87%, 88%, 89%, 90%, 91%, 92%, 93%, 94%, 95%, 96%, 97%, 98%, 99% or more sequence identity to reference sequence SEQ ID NO: 2 or 660 and one or more residue differences as compared to SEQ ID NO: 2 or 660, selected from
R26Q/M30G/I38T/S79T/S81E/N90L/G92R/D94E/T101E/T108K/M137A/G140V/V141E/M142V/E153V/I155E/T160M/I163V/Q165P/H177R/A184S/A189R/F194L/R196G/C201A/T203E/M205R/C213S/V219R/G231S/L248R/R258W/K263H/L264A/K266T/S267R/M301W/A304V/C307L/D314R/K318R/S325W/W333A/L340I/T344V/F353Q/T362S/T379M/Y390C/D392R/R394E/E395W/R397Q/F398W/K402G/L40 3S/R406G/I408A/A410E/L411G/H413A/F414E/K416S/H425D/K427L/D429R/W433R/E434N/E441M/S 442G/A444S/S446P/R451K/V455L/D460G/R461S/L466M/G468Q/E476R/R481W/T484L/H485E/K488N/A495S/L499M/K501R/K502G/K506P/A515E/S525F,
R26Q/M30G/I38T/S79T/S81E/N90L/G92R/D94E/T101E/T108K/M137A/G140V/V141E/M142V/E153V/I155E/T160M/I163V/Q165P/H177R/A184S/A189R/C201A/T203E/M205R/C213S/V219R/G231S/L248R/R258W/K263H/L264A/K266T/A304V/C307L/D314R/K318R/S325W/W333A/L340I/T344V/F353Q/T 362S/T379M/D392R/R394E/E395W/R397Q/F398W/K402G/L403S/R406G/I408A/A410E/L411G/H413 A/F414E/K416S/H425D/K427L/D429R/W433R/E434N/E441M/S442G/A444S/S446P/V455L/D460G/R 461S/L466M/G468Q/E476R/R481W/T484L/H485E/K488N/A495S/L499M/K501R/K502G/K506P/A515E/S525F,
R26Q/I38T/S79T/S81E/N90L/G92R/D94E/T101E/T108K/M137A/V141E/I155E/T160M/I163V/Q165P/A189R/C201A/T203E/M205R/C213S/V219R/E246N/L248R/R258W/K263H/L264R/A304V/C307L/D31 4R/K318R/W333A/L340I/T344V/F353Q/T362S/D392R/R394E/E395W/S396T/R397Q/F398W/K402G/L 403S/R406G/I408A/A410E/L411 G/H413A/F414G/H425D/E441M/S442G/S446P/V455L/D460G/R461G/L466M/G468Q/E476R/R481W/H485D/K488N/K506P/S525F,
G92R/D94E/T101E/T108K/M137A/V141E/I155E/T160M/I163V/Q165P/C201A/T203E/M205R/C213S/V219R/R258W/K263H/L264R/D314R/W333A/T344V/F353Q/D392R/R394E/E395W/R397Q/R406G/I4 08A/L411G/H413A/F414G/H425D/E441M/S442G/S446P/D460G/R461G/G468Q/E476R/R481W/H485 D/K488N/S525F, and

### G92R/D94E/T101E/T108K/M137A/V141E/I155E/C201A/C213S/L264R/D314R/W333A/T344V/D392R/R394E/E395W/R397Q/R406G/I408A/H425D/S442G/S446P/R461G/E476R/R481W/H485D/S525F.

[0216] As will be appreciated by the skilled artisan, in some embodiments, one or a combination of residue differences above that is selected can be kept constant (i.e., maintained) in the engineered TdT as a core feature, and additional residue differences at other residue positions incorporated into the sequence to generate additional engineered TdT polypeptides with improved properties. Accordingly, it is to be understood for any engineered TdT containing one or a subset of the residue differences above, the present invention contemplates other engineered TdTs that comprise the one or subset of the residue differences, and additionally one or more residue differences at the other residue positions disclosed herein.

[0217] As noted above, the engineered TdT polypeptides are also capable of converting substrates (e.g., NTP-3′-O-RBG or a natural or modified NTP and an oligo acceptor substrate) to products (e.g., an oligo acceptor substrate with an added nucleotide-3′-O-RBG). In some embodiments, the engineered TdT polypeptide is capable of converting the substrate compounds to the product compound with at least 1.2 fold, 1.5 fold, 2 fold, 3 fold, 4 fold, 5 fold, 10 fold, 20 fold, 30 fold, 40 fold, 50 fold, 60 fold, 70 fold, 80 fold, 90 fold, 100 fold, or more activity relative to the activity of the reference polypeptide of SEQ ID NOs: 2, 8, 16, 24, 36, 268, 648, 660, 882, 1100, 1336, 1348, 1596, 1654, 1830, 1950, 2008, 2254, 2514, 2524, 2638, 2804, 2812, 2956, 3174, 3222, 3670, 3674, 3796, 3870, 3918, 4266, 4442, 4654, 4850, 4856, 4904, 5002, 5028, 5192, and/or 5246.

[0218] In some embodiments, the engineered TdT capable of converting the substrate compounds to the product compounds with at least 2 fold the activity relative to SEQ ID NOs: 2, 8, 16, 24, 36, 268, 648, 660, 882, 1100, 1336, 1348, 1596, 1654, 1830, 1950, 2008, 2254, 2514, 2524, 2638, 2804, 2812, 2956, 3174, 3222, 3670, 3674, 3796, 3870, 3918, 4266, 4442, 4654, 4850, 4856, 4904, 5002, 5028, 5192, and/or 5246, comprises an amino acid sequence selected from the even-numbered sequences in SEQ ID NO: 4-1960, 2004-3920, 4048-5466, and 5476.

[0219] In some embodiments, the engineered TdT has an amino acid sequence comprising one or more residue differences as compared to SEQ ID NOs: 2, 8, 16, 24, 36, 268, 648, 660, 882, 1100, 1336, 1348, 1596, 1654, 1830, 1950, 2008, 2254, 2514, 2524, 2638, 2804, 2812, 2956, 3174, 3222, 3670, 3674, 3796, 3870, 3918, 4266, 4442, 4654, 4850, 4856, 4904, 5002, 5028, 5192, and/or 5246, that increases soluble expression or isolated protein yield of the engineered TdT in a bacterial host cell, particularly in E. coli, as compared to a wild-type or engineered reference TdT, comprises an amino acid sequence selected from the even-numbered sequences in SEQ ID NO: 4-1960, 2004-3920, 4048-5466, and 5476.

[0220] In some embodiments, the engineered TdT has an amino acid sequence comprising one or more residue differences as compared to SEQ ID NOs: 2, 8, 16, 24, 36, 268, 648, 660, 882, 1100, 1336, 1348, 1596, 1654, 1830, 1950, 2008, 2254, 2514, 2524, 2638, 2804, 2812, 2956, 3174, 3222, 3670, 3674, 3796, 3870, 3918, 4266, 4442, 4654, 4850, 4856, 4904, 5002, 5028, 5192, and/or 5246, that increases thermostability of the engineered TdT, as compared to a wild-type or engineered reference TdT, comprises an amino acid sequence selected from the even-numbered sequences of SEQ ID NO: 4-1960, 2004-3920, 4048-5466, and 5476.

[0221] In some embodiments, the engineered TdT has an amino acid sequence comprising one or more residue differences as compared to SEQ ID NOs: 2, 8, 16, 24, 36, 268, 648, 660, 882, 1100, 1336, 1348, 1596, 1654, 1830, 1950, 2008, 2254, 2514, 2524, 2638, 2804, 2812, 2956, 3174, 3222, 3670, 3674, 3796, 3870, 3918, 4266, 4442, 4654, 4850, 4856, 4904, 5002, 5028, 5192 and/or 5246, that increases the activity of the engineered TdT at high temperatures (by way of example and not limitation, 40° C., 45° C., 50° C., 55° C., 60° C., or 65° C.), as compared to a wild-type or engineered reference TdT, comprises an amino acid sequence selected from the even-numbered sequences of SEQ ID NO: 4-1960, 2004-3920, 4048-5466, and 5476.

[0222] In some embodiments, the engineered TdT has an amino acid sequence comprising one or more residue differences as compared to SEQ ID NOs: 2, 8, 16, 24, 36, 268, 648, 660, 882, 1100, 1336, 1348, 1596, 1654, 1830, 1950, 2008, 2254, 2514, 2524, 2638, 2804, 2812, 2956, 3174, 3222, 3670, 3674, 3796, 3870, 3918, 4266, 4442, 4654, 4850, 4856, 4904, 5002, 5028, 5192 and/or 5246, that reduces the by-product formation of the engineered TdT, as compared to a wild-type or engineered reference TdT, comprises an amino acid sequence selected from the even-numbered sequences of SEQ ID NO: 4-1960, 2004-3920, 4048-5466, and 5476.

[0223] In some embodiments, the engineered TdT has an amino acid sequence comprising one or more residue differences as compared to SEQ ID NOs: 2, 8, 16, 24, 36, 268, 648, 660, 882, 1100, 1336, 1348, 1596, 1654, 1830, 1950, 2008, 2254, 2514, 2524, 2638, 2804, 2812, 2956, 3174, 3222, 3670, 3674, 3796, 3870, 3918, 4266, 4442, 4654, 4850, 4856, 4904, 5002, 5028, 5192 and/or 5246, that increases specific activity of the engineered TdT on one or more NTP-3′-O-RBG or a natural or modified NTP substrates, as compared to a wild-type or engineered reference TdT, comprises an amino acid sequence selected from the even-numbered sequences of SEQ ID NO: 4-1960, 2004-3920, 4048-5466, and 5476.

[0224] In some embodiments, the engineered TdT has an amino acid sequence comprising one or more residue differences as compared to SEQ ID NOs: 2, 8, 16, 24, 36, 268, 648, 660, 882, 1100, 1336, 1348, 1596, 1654, 1830, 1950, 2008, 2254, 2514, 2524, 2638, 2804, 2812, 2956, 3174, 3222, 3670, 3674, 3796, 3870, 3918, 4266, 4442, 4654, 4850, 4856, 4904, 5002, 5028, 5192 and/or 5246, that increases specific activity of the engineered TdT on one or more oligo acceptor substrates, as compared to a wild-type or engineered reference TdT, comprises an amino acid sequence selected from the even-numbered sequences of SEQ ID NO: 4-1960, 2004-3920, 4048-5466, and 5476.

[0225] In some embodiments, the engineered TdT has an amino acid sequence comprising one or more residue differences as compared to SEQ ID NOs: 2, 8, 16, 24, 36, 268, 648, 660, 882, 1100, 1336, 1348, 1596, 1654, 1830, 1950, 2008, 2254, 2514, 2524, 2638, 2804, 2812, 2956, 3174, 3222, 3670, 3674, 3796, 3870, 3918, 4266, 4442, 4654, 4850, 4856, 4904, 5002, 5028, 5192 and/or 5246, that increases incorporation efficiency in extension of an oligo acceptor substrate by addition of an NTP or NQP of greater than 60%, 65%, 70%, 75%, 80%, 85%, 90%, 91%, 92%, 93%, 94%, 95%, 96%, 97%, 98%, or 99%. when compared to the incorporation efficiency of a wild-type or engineered reference TdT, and comprises an amino acid sequence selected from the even-numbered sequences of SEQ ID NO: 4-1960, 2004-3920, 4048-5466, and 5476

[0226] In some embodiments, the engineered TdT with improved properties has an amino acid sequence having at least 60%, 70%, 80%, 85%, 86%, 87%, 88%, 89%, 90%, 91%, 92%, 93%, 94%, 95%, 96%, 97%, 98%, 99% or more sequence identity to a reference sequence of SEQ ID NOs: 2, 8, 16, 24, 36, 268, 648, 660, 882, 1100, 1336, 1348, 1596, 1654, 1830, 1950, 2008, 2254, 2514, 2524, 2638, 2804, 2812, 2956, 3174, 3222, 3670, 3674, 3796, 3870, 3918, 4266, 4442, 4654, 4850, 4856, 4904, 5002, 5028, 5192 and/or 5246 and at least one substitution or substitution set at amino acid positions selected from 26, 30, 38, 79, 81, 90, 92, 94, 101, 108, 137, 140 141, 142, 153, 155, 160, 163, 165, 177, 184, 189, 194, 196, 201, 203, 205, 213, 219, 231, 246, 248, 258, 263, 264, 266, 267, 301, 304, 307, 314, 318, 325, 333, 340, 344, 353, 362, 379, 390, 392, 394, 395, 396, 397, 398, 402, 403, 406, 408, 410, 411, 413, 414, 416, 425, 427, 429, 433, 434, 441, 442, 444, 446, 451, 455, 460, 461, 466, 468, 476, 481, 484, 485, 488, 495, 499, 501, 502, 506, 515, and 525, and/or any combinations thereof, wherein the amino acid positions are numbered with reference to SEQ ID NOs: 2, 8, 16, 24, 36, 268, 648, 660, 882, 1100, 1336, 1348, 1596, 1654, 1830, 1950, 2008, 2254, 2514, 2524, 2638, 2804, 2812, 2956, 3174, 3222, 3670, 3674, 3796, 3870, 3918, 4266, 4442, 4654, 4850, 4856, 4904, 5002, 5028, 5192 and/or 5246.

[0227] In some embodiments, the engineered TdT with improved properties has an amino acid sequence having at least 60%, 70%, 80%, 85%, 86%, 87%, 88%, 89%, 90%, 91%, 92%, 93%, 94%, 95%, 96%, 97%, 98%, 99% or more sequence identity to a reference sequence of SEQ ID NOs: 2, 8, 16, 24, 36, 268, 648, 660, 882, 1100, 1336, 1348, 1596, 1654, 1830, 1950, 2008, 2254, 2514, 2524, 2638, 2804, 2812, 2956, 3174, 3222, 3670, 3674, 3796, 3870, 3918, 4266, 4442, 4654, 4850, 4856, 4904, 5002, 5028, 5192 and/or 5246 and at least one substitution at amino acid position 12, 13, 14, 15, 16, 17, 18, 20, 21, 22, 23, 24, 25, 26, 27, 28, 29, 30, 31, 32, 33, 34, 35, 36, 37, 38, 39, 41, 44, 45, 46, 47, 50, 53, 57, 58, 61, 62, 65, 70, 76, 77, 79, 80, 81, 85, 89, 90, 92, 93, 94, 97, 101, 102, 103, 104, 105, 106, 107, 108, 109, 110, 116, 119, 121, 122, 123, 124, 126, 129, 130, 131, 132, 133, 134, 135, 137, 138, 139, 140, 141, 142, 144, 145, 147, 148, 149, 150, 151, 152, 153, 154, 155, 156, 157, 158, 159, 160, 161, 162, 163, 165, 168, 169, 171, 173, 174, 175, 177, 179, 183, 184, 185, 186, 188, 189, 190, 191, 192, 193, 194, 195, 196, 197, 198, 199, 200, 201, 203, 204, 205, 206, 208, 213, 217, 219, 220, 223, 227, 231, 233, 235, 236, 243, 244, 245, 246, 248, 249, 251, 252, 253, 255, 258, 259, 260, 261, 262, 263, 264, 266, 267, 268, 269, 271, 272, 273, 274, 275, 276, 277, 278, 279, 280, 281, 282, 284, 286, 287, 288, 289, 290, 291, 292, 293, 294, 295, 297, 298, 299, 300, 301, 302, 303, 304, 306, 307, 308, 309, 310, 312, 313, 314, 315, 316, 317, 318, 319, 320, 321, 322, 324, 325, 326, 327, 328, 329, 330, 333, 334, 336, 338, 340, 342, 343, 344, 347, 350, 352, 353, 359, 360, 361, 362, 363, 365, 366, 367, 368, 369, 370, 371, 372, 373, 376, 378, 379, 380, 382, 383, 385, 390, 391, 392, 393, 394, 395, 396, 397, 398, 399, 400, 401, 402, 403, 404, 405, 406, 407, 408, 409, 410, 411, 412, 413, 414, 415, 416, 417, 418, 419, 421, 425, 426, 427, 428, 429, 431, 433, 434, 435, 436, 437, 438, 439, 440, 441, 442, 443, 444, 445, 446, 448, 451, 452, 454, 455, 456, 457, 459, 460, 461, 462, 464, 465, 466, 468, 469, 470, 472, 473, 474, 475, 476, 477, 479, 480, 481, 484, 485, 488, 490, 491, 492, 493, 494, 495, 499, 500, 501, 502, 503, 504, 506, 508, 509, 515, 518, 520, 522, 523, 525, 526, or 528, or any combinations thereof, wherein the amino acid positions are numbered with reference to SEQ ID NOs: 2, 8, 16, 24, 36, 268, 648, 660, 882, 1100, 1336, 1348, 1596, 1654, 1830, 1950, 2008, 2254, 2514, 2524, 2638, 2804, 2812, 2956, 3174, 3222, 3670, 3674, 3796, 3870, 3918, 4266, 4442, 4654, 4850, 4856, 4904, 5002, 5028, 5192 and/or 5246.

[0228] In some embodiments, the engineered TdT with improved properties has an amino acid sequence having at least 60%, 70%, 80%, 85%, 86%, 87%, 88%, 89%, 90%, 91%, 92%, 93%, 94%, 95%, 96%, 97%, 98%, 99% or more sequence identity to a reference sequence of SEQ ID NOs: 2, 8, 16, 24, 36, 268, 648, 660, 882, 1100, 1336, 1348, 1596, 1654, 1830, 1950, 2008, 2254, 2514, 2524, 2638, 2804, 2812, 2956, 3174, 3222, 3670, 3674, 3796, 3870, 3918, 4266, 4442, 4654, 4850, 4856, 4904, 5002, 5028, 5192 and/or 5246 and at least a substitution or amino acid residue 12A/F/N/Q/S/V, 13E/G/K/R/S, 14G/N/Q/Y, 15A/F/L/Q, 16S/V, 17A/G, 18D/R/Y, 20H/P/T, 21E, 22G/L, 23C/E/P/T, 24A/G/M/P, 25N, 26A/G/I/Q/S/T/W, 27D/F/R, 28N/R, 29G/I/P/R, 30E/G/L/T/V, 31G/S/V, 32E, 33A/C/G/K/P, 34D/K/R/S, 35E/G/H/W, 36G/K, 37A/F/G/S/T/V, 38L/T, 39A/G, 41V, 44S, 45R, 46M, 47A, 50L, 53K, 53E, 57H/T, 58A/M/N/S, 61A/H/L, 62W, 65S, 70A, 76P, 77C/S, 79T, 80D, 81E, 85V, 89A, 90L/M/S, 92M/R/S/V/Y, 93V, 94E/K/N/R, 97D/T, 101E/G/V, 102L, 103M, 104G/I/P/V, 105N/W, 106D/G/H/K/S/V, 107R/W, 108D/G/K/M, 109M/N/T, 110M/V, 116A, 119F/Q, 121S, 122I, 123M/Q, 124E/G/I/M/S, 126C/V, 129G, 130A/M/Q/S, 131E/G/R/W, 132S, 133G/M/Q, 134M/W, 135C/E/H/K/R, 137A/E, 138A/Q, 139A/G, 140E/G/V, 141E/M/R, 142M/S/V, 144C, 145E, 147G/L, 148T, 149R, 150E/G/P, 151I/S, 152G/H/R, 153E/G/K/M/P/Q/V, 154G, 155E/T, 156D/E/M/Q, 157L/V, 158A/H/S, 159D, 160G/M/N/S/V, 161D/E/G/H/R/S, 162A/E/H, 163I/L/V, 165K/P, 168S, 169E/M/R, 171K, 173I/L, 174L, 175D/I/L/V, 177L/R/Y, 179A/K/L/R, 183R, 184S, 185C/F/L, 186A/C/D/G/L/T, 188I/M, 189E/L/Q/R/V, 190L/M/R, 190E, 191V, 192C/G/I/L/R, 193C/G/N/R/S/T/V, 194A/C/D/E/F/G/L/M/R/S/W, 196A/G/L/M/N/R/S/T/W/Y, 197G/L/M/R, 198A/E/L/P/S, 199A/E/G/H/I/M/Q/R/S/V, 200A/C/K/N/V, 201A/R/W, 203A/D/E/G/L/M/R/S, 204L, 205E/L/R, 206N, 208A/V, 213S, 217Q, 219L/R, 220R, 223Q, 227M, 231S/T, 233A/D/R, 235R, 236E/I/P/V, 243L/R/S/T, 244V, 245A, 246E/K/N, 248C/K/L/R/S/T/V, 249A/G/R/T, 251K/R, 252E/K, 253I/L, 255G, 258A/C/E/G/K/L/M/Q/S/W, 259N/V, 260K, 261A/G/R/V, 262I/V, 263H/I/M/R/S, 264A/C/E/L/R/S/T/V, 266F/I/K/R/T/V/Y, 267A/C/H/M/Q/R/V/Y, 268C/I/L/T, 269W, 271C, 272T, 273C/D/E/F/G/I/L/M/S/V/W/Y, 274A/G/I/M/N/P/Q/T/V, 275D/V, 276S, 277E, 278C/E/F/H/I/L/M/N/R/T/V/Y, 279Y, 280F/L/S, 281A/C/G/K/L/Q/S/T/V, 282C/G/H/Q/R/W, 284I/L/M, 286N/S, 287I, 288E/V, 289D, 290A/L/V, 291M/S/W, 292L/N/T, 293S/Q, 294T, 295S, 297C/D/F/L/M/P/Q/R/S/T/V, 298I/M, 299A/L/M/N/S/Y, 300H/P/R/T, 301G/Q/S/T/V/W, 302A/N/S, 303A/E/H/M/N/Q/S/V, 304D/L/M/T/V, 306F/I/M, 307A/E/G/H/K/L/M/S/V, 308A/F/G/H/K/L/N/S/V/W, 309F/G/I/L/M/V/W, 310A/G/H/R/S, 312M/T/V, 313A/I/L/M/Q/R/S, 314A/G/I/K/L/M/Q/R/V/Y, 315A/G/Q/S, 316A/C/I/L/T, 317G/T, 318E/R/S/T/V, 319G/R, 320N, 321C/K/S, 322A/K/Q, 324I/V, 325A/F/L/T/V/W, 326C/M/N/R/S/T, 327I/M, 328T, 329K/R, 330E/K/N, 333A/D/G/H/R, 334E/R/S, 336D, 338T, 340A/G/I/M/R/S/V, 342E/R/V/W, 343V, 344V, 347I/Q, 350L/R/S/W, 352G/P/R/V, 353A/H/K/M/Q/R/S, 354S, 359G/L/V, 360C/I/V, 361T, 362S/T/Y, 363C/I, 365A, 366V, 367A/D, 368R, 369G/M/N, 370D/G/M/N/S/T, 371D, 372E/G, 373C/G/H/N/R, 376H/V, 378L, 379C/I/L/M/V, 380D, 382F/L, 383R, 385R, 390C/I/L/V, 391G/L/R, 392A/C/K/R/V, 393I/R/V, 394A/E/F/G/L/M/R/S/T/V/Y, 395A/L/R/S/T/W/Y, 396A/R/S/T, 397A/D/F/Q/R/T/W, 398W, 399C/D/F/G/T, 400A/E/W, 401E/G, 402E/F/G/Q/S/V, 403A/E/F/G/L/P/R/S, 404D/E/F/S/W, 405G/L/N/Y, 406G/N/P/T/V, 407A/D/F/L/M/N/R/S/W, 408A/E/G/I/L/M/P/R/T/V/W, 409K/L/Q, 410E/F/G/I/Q/S/V/Y, 411A/E/F/G/I/N/P/Q/R/T, 412N, 413A/C/E/F/G/I/L/M/P/S/V, 414A/E/F/G/H/Y, 415A/F/L/S/W, 416G/N/Q/S, 417G/V/W, 418I, 419A/G/H/L/M, 421F/I/M, 425D/K/R/T, 426P, 427C/E/F/L/M/N/Q/R/W/Y, 428V, 429R, 431R/S, 433A/E/G/H/M/P/R/S/V, 434N, 435A/C/E/G/I/K/P/Q/S/T, 436S, 437A/G/K/P/Q/R/S, 438V, 439G/P, 440E/K/V, 441K/M/N/V, 442A/G/K, 443T, 444A/G/H/R/S, 445N, 446E/G/P, 448R, 451K, 452I/L, 454F/M/V, 455I/L, 456K/P/R/S/T, 457S/V, 459H/I/Q/R/V, 460E/G/P/V, 461A/G/N/Q/S/V, 462E/F/H/I/L/Q/R/W, 464Y, 465E, 466M, 468A/F/H/M/Q/S/T/W, 469F/Q/Y, 470S/T, 472A/G, 473A/D/G/K/M/P/Q/S/V, 474M, 475V, 476R/V, 477G/Q/S/T, 479F/V, 480A/E/G/H/K/L/S/W, 481A/D/E/L/M/S/T/V/W, 484A/E/H/L/M/R, 485D/E/S, 488N/S, 490E/H/L/R/V/W, 491I/M, 492S/T, 493E/Q/R/V/Y, 494A/C/G/L/R/V/W, 495C/G/S, 499L/M/R, 500N, 501A/N/R, 502G/R, 503A/E/M/Q/R/S/T/V, 504K/N/Q/R/S/W, 506E/P/S/T, 508D/S/T, 509G/K, 515E/V, 515A, 518D, 520D/P, 522L, 523E/H, 525F/H/Q/R/S, 526L/Y, or 528L, or any combinations thereof, wherein the amino acid positions are numbered with reference to SEQ ID NOs: 2, 8, 16, 24, 36, 268, 648, 660, 882, 1100, 1336, 1348, 1596, 1654, 1830, 1950, 2008, 2254, 2514, 2524, 2638, 2804, 2812, 2956, 3174, 3222, 3670, 3674, 3796, 3870, 3918, 4266, 4442, 4654, 4850, 4856, 4904, 5002, 5028, 5192 and/or 5246.

[0229] In some embodiments, the engineered TdT with improved properties has an amino acid sequence comprising a sequence selected from the even-numbered sequences of SEQ ID NO: 4-1960, 2004-3920, 4048-5466, and 5476. In some embodiments, the engineered TdT with improved properties has an amino acid sequence comprising a sequence selected from SEQ ID NOs: 2, 8, 16, 24, 36, 268, 648, 660, 882, 1100, 1336, 1348, 1596, 1654, 1830, 1950, 2008, 2254, 2514, 2524, 2638, 2804, 2812, 2956, 3174, 3222, 3670, 3674, 3796, 3870, 3918, 4266, 4442, 4654, 4850, 4856, 4904, 5002, 5028, 5192 and/or 5246.

[0230] In some embodiments, the engineered TdT, comprises an amino acid sequence having at least 80%, 85%, 86%, 87%, 88%, 89%, 90%, 91%, 92%, 93%, 94%, 95%, 96%, 97%, 98%, or 99% identity to one of the sequences of SEQ ID NOs: 2, 8, 16, 24, 36, 268, 648, 660, 882, 1100, 1336, 1348, 1596, 1654, 1830, 1950, 2008, 2254, 2514, 2524, 2638, 2804, 2812, 2956, 3174, 3222, 3670, 3674, 3796, 3870, 3918, 4266, 4442, 4654, 4850, 4856, 4904, 5002, 5028, 5192 and/or 5246, as provided in the Examples.

[0231] In addition to the residue positions specified above, any of the engineered TdT polypeptides disclosed herein can further comprise other residue differences relative to SEQ ID NOs: 2, 8, 16, 24, 36, 268, 648, 660, 882, 1100, 1336, 1348, 1596, 1654, 1830, 1950, 2008, 2254, 2514, 2524, 2638, 2804, 2812, 2956, 3174, 3222, 3670, 3674, 3796, 3870, 3918, 4266, 4442, 4654, 4850, 4856, 4904, 5002, 5028, 5192 and/or 5246, at other residue positions (i.e., residue positions other than those included herein). Residue differences at these other residue positions can provide for additional variations in the amino acid sequence without adversely affecting the ability of the polypeptide to carry out the conversion of substrate to product. Accordingly, in some embodiments, in addition to the amino acid residue differences present in any one of the engineered TdTs polypeptides selected from the even-numbered sequences in the range of SEQ ID NO: 4-1960, 2004-3920, 4048-5466, and 5476, the sequence can further comprise 1-2, 1-3, 1-4, 1-5, 1-6, 1-7, 1-8, 1-9, 1-10, 1-11, 1-12, 1-14, 1-15, 1-16, 1-18, 1-20, 1-22, 1-24, 1-26, 1-30, 1-35, 1-40, 1-45, 1-50, 1-100, or 1-150 residue differences at other amino acid residue positions as compared to the SEQ ID NOs: 2, 8, 16, 24, 36, 268, 648, 660, 882, 1100, 1336, 1348, 1596, 1654, 1830, 1950, 2008, 2254, 2514, 2524, 2638, 2804, 2812, 2956, 3174, 3222, 3670, 3674, 3796, 3870, 3918, 4266, 4442, 4654, 4850, 4856, 4904, 5002, 5028, 5192 and/or 5246. In some embodiments, the number of amino acid residue differences as compared to the reference sequence can be 1, 2, 3, 4, 5, 6, 7, 8, 9, 10, 11, 12, 13, 14, 15, 16, 17, 18, 19, 20, 21, 22, 23, 24, 25, 30, 30, 35, 40, 45, 50, 100, or 150 residue positions. In some embodiments, the number of amino acid residue differences as compared to the reference sequence can be 1, 2, 3, 4, 5, 6, 7, 8, 9, 10, 11, 12, 13, 14, 15, 16, 18, 20, 21, 22, 23, 24, or 25 residue positions. The residue differences at these other positions can be conservative changes or non-conservative changes. In some embodiments, the residue differences can comprise conservative substitutions and non-conservative substitutions as compared to the TdT polypeptide of SEQ ID NOs: 2, 8, 16, 24, 36, 268, 648, 660, 882, 1100, 1336, 1348, 1596, 1654, 1830, 1950, 2008, 2254, 2514, 2524, 2638, 2804, 2812, 2956, 3174, 3222, 3670, 3674, 3796, 3870, 3918, 4266, 4442, 4654, 4850, 4856, 4904, 5002, 5028, 5192 and/or 5246.

[0232] In some embodiments, the present invention also provides engineered polypeptides that comprise a fragment of any of the engineered TdT polypeptides described herein that retains the functional activity and/or improved property of that engineered TdT. Accordingly, in some embodiments, the present invention provides a polypeptide fragment capable of converting substrate to product under suitable reaction conditions, wherein the fragment comprises at least about 90%, 95%, 96%, 97%, 98%, or 99% of a full-length or truncated amino acid sequence of an engineered TdT of the present invention, such as an exemplary TdT polypeptide selected from the even-numbered sequences in the range of SEQ ID NO: 4-1960, 2004-3920, 4048-5466, and 5476. In some embodiments, the engineered TdT can have an amino acid sequence comprising a deletion in any one of the TdT polypeptide sequences described herein, such as the exemplary engineered polypeptides of the even-numbered sequences in the range of SEQ ID NO: 4-1960, 2004-3920, 4048-5466, and 5476.

[0233] Thus, for each and every embodiment of the engineered TdT polypeptides of the invention, the amino acid sequence can comprise deletions of one or more amino acids, 2 or more amino acids, 3 or more amino acids, 4 or more amino acids, 5 or more amino acids, 6 or more amino acids, 8 or more amino acids, 10 or more amino acids, 15 or more amino acids, or 20 or more amino acids, up to 10% of the total number of amino acids, up to 20% of the total number of amino acids, or up to 30% of the total number of amino acids of the TdT polypeptides, where the associated functional activity and/or improved properties of the engineered TdT described herein are maintained. In some embodiments, the deletions can comprise 1-2, 1-3, 1-4, 1-5, 1-6, 1-7, 1-8, 1-9, 1-10, 1-15, 1-20, 1-21, 1-22, 1-23, 1-24, 1-25, 1-30, 1-35, 1-40, 1- 45, or 1-50 amino acid residues. In some embodiments, the number of deletions can be 1, 2, 3, 4, 5, 6, 7, 8, 9, 10, 11, 12, 13, 14, 15, 16, 17, 18, 19, 20, 21, 22, 23, 24, 25, 30, 30, 35, 40, 45, or 50 amino acid residues. In some embodiments, the deletions can comprise deletions of 1, 2, 3, 4, 5, 6, 7, 8, 9, 10, 11, 12, 13, 14, 15, 16, 18, 20, 21, 22, 23, 24, or 25 amino acid residues.

[0234] In some embodiments, the engineered TdT polypeptide herein can have an amino acid sequence comprising an insertion as compared to any one of the engineered TdT polypeptides described herein, such as the exemplary engineered polypeptides of the even-numbered sequences in the range of SEQ ID NO: 4-1960, 2004-3920, 4048-5466, and 5476. Thus, for each and every embodiment of the TdT polypeptides of the invention, the insertions can comprise one or more amino acids, 2 or more amino acids, 3 or more amino acids, 4 or more amino acids, 5 or more amino acids, 6 or more amino acids, 8 or more amino acids, 10 or more amino acids, 15 or more amino acids, 20 or more amino acids, 30 or more amino acids, 40 or more amino acids, or 50 or more amino acids, where the associated functional activity and/or improved properties of the engineered TdT described herein is maintained. The insertions can be to amino or carboxy terminus, or internal portions of the TdT polypeptide.

[0235] In some embodiments, the engineered TdT described herein can have an amino acid sequence comprising a sequence selected from the even-numbered sequences in the range of SEQ ID NO: 4-1960, 2004-3920, 4048-5466, and 5476, and optionally one or several (e.g., up to 3, 4, 5, or up to 10) amino acid residue deletions, insertions and/or substitutions. In some embodiments, the amino acid sequence has optionally 1-2, 1-3, 1-4, 1-5, 1-6, 1-7, 1-8, 1-9, 1-10, 1-15, 1-20, 1-21, 1-22, 1-23, 1-24, 1-25, 1-30, 1-35, 1-40, 1-45, 1-50, 1-75, 1-100, or 1-150 amino acid residue deletions, insertions and/or substitutions. In some embodiments, the amino acid sequence has optionally around 1, 2, 3, 4, 5, 6, 7, 8, 9, 10, 11, 12, 13, 14, 15, 16, 17, 18, 19, 20, 21, 22, 23, 24, 25, 30, 30, 35, 40, 45, 50, 55, 60, 65, 70, 80, 90, 100, 110, 120, 130, 140, or 150 amino acid residue deletions, insertions and/or substitutions. In some embodiments, the substitutions can be conservative or non-conservative substitutions.

[0236] In the above embodiments, the suitable reaction conditions for the engineered polypeptides are provided in Tables 6.1, 7.1, 8.1, 9.1, 10.1, 11.1, 12.1, 13.1, 14.1, 15.1, 16.1, 17.1, 18.1, 19.1, 20.1, 21.1, 22.1, 23.1, 24.1, 25.1, 26.1, 27.1, 28.1, 29.1, 30.1, 31.1, 32.1, 33.1, 34.1, 35.1, 36.1, 37.1, 38.1, 39.1, 40.1, 41.1, 42.1, 43.1, 44.1, 45.1, 46.1, 47.1, 48.1, 49.1, 50.1, 51.1, 52.1, 53.1, 54.1, 55.1, 56.1, 59.1, 60.1, 61.1, 63.1, 64.1, 65.1, 66.1, 67.1, 68.1, 69.1, 70.1, 71.1, 72.1, 73.1, 74.1, 75.1, 76.1, 77.1, 78.1, 79.1, and 80.1, as described in the Examples herein.

[0237] In some embodiments, the polypeptides of the present invention are fusion polypeptides in which the engineered polypeptides are fused to other polypeptides, such as, by way of example and not limitation, antibody tags (e.g., myc epitope), purification sequences (e.g., His tags for binding to metals), cell localization signals (e.g., secretion signals), and polypeptides with enzymatic activity. Thus, the engineered polypeptides described herein can be used with or without fusions to other polypeptides.

[0238] In one embodiment of the engineered TdT polypeptides of the present invention, the polypeptide further comprises an N-terminal truncation of 1-156 amino acids of the polypeptide sequence relative to any even-numbered sequence set forth in SEQ ID NO: 4-1960, 2004-3920, 4048-5466, and 5476. For example, a 156 amino acid truncated version of a TdT variant polypeptide SEQ ID NO: 5028 is prepared and demonstrated to have TdT activity in Examples 81 and 82.

[0239] In some embodiments, the engineered TdT polypeptides of the invention can be fused to another second polypeptide, such as a polypeptide with a different enzymatic activity. In some embodiments, the present provides a fusion polypeptide comprising an engineered TdT polypeptide fused to a second polypeptide with inorganic pyrophosphatase (IPP) activity. For example, synthetic genes encoding an N-terminal and C-terminal hexahistidine tagged version of a wild-type (WT) inorganic pyrophosphatase (IPP) polypeptide (e.g., polypeptide of SEQ ID NO: 3942 or 3944) can be fused to gene encoding a TdT variant polypeptide. Typically, the polypeptides (e.g., IPP and TdT) are fused via a polypeptide linker (e.g., a GSGGTG linker) introduced in the construct between the genes encoding the polypeptides. Such fusion proteins can be constructed using well-established techniques (e.g., Gibson assembly cloning) and expressed in E. coli (e.g., a strain derived from W3110). Exemplary IPP-TdT polypeptide fusion constructs (e.g., the fusion constructs of SEQ ID NO: 5468, 5470, 5472, and 5474) are provided and demonstrated in Examples 81 and 82. Although the Examples demonstrate a fusion of a particular engineered TdT polypeptide of the present invention with a second polypeptide with IPP activity, it is contemplated that any of the embodiments an engineered TdT polypeptides of even-numbered sequence set forth in SEQ ID NO: 4-1960, 2004-3920, 4048-5466, and 5476 could be used in such a fusion with a second polypeptide.

[0240] It is to be understood that the polypeptides described herein are not restricted to the genetically encoded amino acids. In addition to the genetically encoded amino acids, the polypeptides described herein may be comprised, either in whole or in part, of naturally occurring and/or synthetic non-encoded amino acids. Certain commonly encountered non-encoded amino acids of which the polypeptides described herein may be comprised include, but are not limited to: the D-stereoisomers of the genetically-encoded amino acids; 2,3-diaminopropionic acid (Dpr); α-aminoisobutyric acid (Aib); ε-aminohexanoic acid (Aha); δ-aminovaleric acid (Ava); N-methylglycine or sarcosine (MeGly or Sar); ornithine (Orn); citrulline (Cit); t-butylalanine (Bua); t-butylglycine (Bug); N-methylisoleucine (MeIle); phenylglycine (Phg); cyclohexylalanine (Cha); norleucine (Nle); naphthylalanine (NaI); 2-chlorophenylalanine (Ocf); 3-chlorophenylalanine (Mcf); 4-chlorophenylalanine (Pcf); 2-fluorophenylalanine (Off); 3-fluorophenylalanine (Mff); 4-fluorophenylalanine (Pff); 2-bromophenylalanine (Obf); 3-bromophenylalanine (Mbf); 4-bromophenylalanine (Pbf); 2-methylphenylalanine (Omf); 3-methylphenylalanine (Mmf); 4-methylphenylalanine (Pmf); 2-nitrophenylalanine (Onf); 3-nitrophenylalanine (Mnf); 4-nitrophenylalanine (Pnf); 2-cyanophenylalanine (Ocf); 3-cyanophenylalanine (Mcf); 4-cyanophenylalanine (Pcf); 2-trifluoromethylphenylalanine (Otf); 3-trifluoromethylphenylalanine (Mtf); 4-trifluoromethylphenylalanine (Ptf); 4-aminophenylalanine (Paf); 4-iodophenylalanine (Pif); 4-aminomethylphenylalanine (Pamf); 2,4-dichlorophenylalanine (Opef); 3,4-dichlorophenylalanine (Mpcf); 2,4-difluorophenylalanine (Opff); 3,4-difluorophenylalanine (Mpff); pyrid-2-ylalanine (2pAla); pyrid-3-ylalanine (3pAla); pyrid-4-ylalanine (4pAla); naphth-1-ylalanine (1nAla); naphth-2-ylalanine (2nAla); thiazolylalanine (taAla); benzothienylalanine (bAla); thienylalanine (tAla); furylalanine (fAla); homophenylalanine (hPhe); homotyrosine (hTyr); homotryptophan (hTrp); pentafluorophenylalanine (5ff); styrylkalanine (sAla); authrylalanine (aAla); 3,3-diphenylalanine (Dfa); 3-amino-5-phenypentanoic acid (Afp); penicillamine (Pen); 1,2,3,4-tetrahydroisoquinoline-3-carboxylic acid (Tic); P-2-thienylalanine (Thi); methionine sulfoxide (Mso); N(w)-nitroarginine (nArg); homolysine (hLys); phosphonomethylphenylalanine (pmPhe); phosphoserine (pSer); phosphothreonine (pThr); homoaspartic acid (hAsp); homoglutanic acid (hGlu); 1-aminocyclopent-(2 or 3)-ene-4 carboxylic acid; pipecolic acid (PA), azetidine-3-carboxylic acid (ACA); 1-aminocyclopentane-3-carboxylic acid; allylglycine (aGly); propargylglycine (pgGly); homoalanine (hAla); norvaline (nVal); homoleucine (hLeu), homovaline (hVal); homoisoleucine (hIle); homoarginine (hArg); N-acetyl lysine (AcLys); 2,4-diaminobutyric acid (Dbu); 2,3-diaminobutyric acid (Dab); N-methylvaline (MeVal); homocysteine (hCys); homoserine (hSer); hydroxyproline (Hyp) and homoproline (hPro). Additional non-encoded amino acids of which the polypeptides described herein may be comprised will be apparent to those of skill in the art (See e.g., the various amino acids provided in Fasman, CRC Practical Handbook of Biochemistry and Molecular Biology, CRC Press, Boca Raton, FL, pp. 3-70 [1989], and the references cited therein, all of which are incorporated by reference). These amino acids may be in either the L- or D-configuration.

[0241] Those of skill in the art will recognize that amino acids or residues bearing side chain protecting groups may also comprise the polypeptides described herein. Non-limiting examples of such protected amino acids, which in this case belong to the aromatic category, include (protecting groups listed in parentheses), but are not limited to: Arg(tos), Cys(methylbenzyl), Cys (nitropyridinesulfenyl), Glu(S-benzylester), Gln(xanthyl), Asn(N—S-xanthyl), His(bom), His(benzyl), His(tos), Lys(fmoc), Lys(tos), Ser(O-benzyl), Thr (O-benzyl) and Tyr(O-benzyl).

[0242] Non-encoding amino acids that are conformationally constrained of which the polypeptides described herein may be composed include, but are not limited to, N-methyl amino acids (L-configuration); 1-aminocyclopent-(2 or 3)-ene-4-carboxylic acid; pipecolic acid; azetidine-3-carboxylic acid; homoproline (hPro); and 1-aminocyclopentane-3-carboxylic acid.

[0243] In some embodiments, the engineered polypeptides can be in various forms, for example, such as an isolated preparation, as a substantially purified enzyme, whole cells transformed with gene(s) encoding the enzyme, and/or as cell extracts and/or lysates of such cells. The enzymes can be lyophilized, spray-dried, precipitated or be in the form of a crude paste, as further discussed below.

[0244] In some embodiments, the engineered polypeptides can be in the form of a biocatalytic composition. In some embodiments, the biocatalytic composition comprises (a) a means for conversion of an NTP-3-O-RBG or natural or modified NTP substrate and an oligo acceptor compound to an oligo acceptor product extended by one nucleotide by contact with a TdT and (b) a suitable cofactor. The suitable cofactor may be cobalt, manganese, or any other suitable cofactor.

[0245] In some embodiments, the polypeptides described herein are provided in the form of kits. The enzymes in the kits may be present individually or as a plurality of enzymes. The kits can further include reagents for carrying out the enzymatic reactions, substrates for assessing the activity of enzymes, as well as reagents for detecting the products. The kits can also include reagent dispensers and instructions for use of the kits.

[0246] In some embodiments, the kits of the present invention include arrays comprising a plurality of different TdT polypeptides at different addressable position, wherein the different polypeptides are different variants of a reference sequence each having at least one different improved enzyme property. In some embodiments, a plurality of polypeptides immobilized on solid supports are configured on an array at various locations, addressable for robotic delivery of reagents, or by detection methods and/or instruments. The array can be used to test a variety of substrate compounds for conversion by the polypeptides. Such arrays comprising a plurality of engineered polypeptides and methods of their use are known in the art (See e.g., WO2009/008908A2).

[0247] Polynucleotides Encoding Engineered Terminal Deoxynucleotidyl Transferases, Expression Vectors and Host Cells

[0248] In another aspect, the present invention provides polynucleotides encoding the engineered TdT polypeptides described herein. The polynucleotides may be operatively linked to one or more heterologous regulatory sequences that control gene expression to create a recombinant polynucleotide capable of expressing the polypeptide. Expression constructs containing a heterologous polynucleotide encoding the engineered TdT are introduced into appropriate host cells to express the corresponding TdT polypeptide.

[0249] As will be apparent to the skilled artisan, availability of a protein sequence and the knowledge of the codons corresponding to the various amino acids provide a description of all the polynucleotides capable of encoding the subject polypeptides. The degeneracy of the genetic code, where the same amino acids are encoded by alternative or synonymous codons, allows an extremely large number of nucleic acids to be made, all of which encode the improved TdT enzymes. Thus, having knowledge of a particular amino acid sequence, those skilled in the art could make any number of different nucleic acids by simply modifying the sequence of one or more codons in a way which does not change the amino acid sequence of the protein. In this regard, the present invention specifically contemplates each and every possible variation of polynucleotides that could be made encoding the polypeptides described herein by selecting combinations based on the possible codon choices, and all such variations are to be considered specifically disclosed for any polypeptide described herein, including the amino acid sequences presented in Tables 5.1, 6.2, 7.2, 8.2, 9.2, 10.2, 11.2, 12.2, 13.2, 14.2, 15.2, 16.2, 17.2, 18.2, 19.2, 20.2, 21.2, 22.2, 23.2, 24.2, 25.2, 26.2, 26.3, 26.4, 27.2, 27.3, 27.4, 27.5, 28.1, 28.2, 28.3, 29.2, 30.2, 31.2, 32.2, 33.2, 34.2, 35.2, 36.2, 37.2, 38.2, 39.2, 40.2, 41.2, 42.2, 43.2, 44.2, 45.2 46.2, 47.2, 48.2, 49.2, 50.2, 51.2, 52.2, 53.2, 54.2, 55.2, 56.2, 56.3, 56.4, 61.2, 63.2, 64.2, 65.2, 66.2, 67.2, 68.2, 69.2, 70.2, 71.2, 72.2, 73.2, 74.2, 75.2, 76.2, 77.2, 78.2, 79.2, and 80.1, and disclosed in the sequence listing incorporated by reference herein as the even-numbered sequences in the range of SEQ ID NO: 4-1960, 2004-3920, 4048-5466, and 5476.

[0250] In various embodiments, the codons are preferably selected to fit the host cell in which the protein is being produced. For example, preferred codons used in bacteria are used to express the gene in bacteria; preferred codons used in yeast are used for expression in yeast; and preferred codons used in mammals are used for expression in mammalian cells. In some embodiments, all codons need not be replaced to optimize the codon usage of the TdT since the natural sequence will comprise preferred codons and because use of preferred codons may not be required for all amino acid residues. Consequently, codon optimized polynucleotides encoding the TdT enzymes may contain preferred codons at about 40%, 50%, 60%, 70%, 80%, or greater than 90% of codon positions of the full-length coding region.

[0251] In some embodiments, the polynucleotide comprises a codon optimized nucleotide sequence encoding the TdT polypeptide amino acid sequence, as represented by SEQ ID NOs: 2, 8, 16, 24, 36, 268, 648, 660, 882, 1100, 1336, 1348, 1596, 1654, 1830, 1950, 2008, 2254, 2514, 2524, 2638, 2804, 2812, 2956, 3174, 3222, 3670, 3674, 3796, 3870, 3918, 4266, 4442, 4654, 4850, 4856, 4904, 5002, 5028, 5192 and/or 5246. In some embodiments, the polynucleotide has a nucleic acid sequence comprising at least 80%, 85%, 90%, 91%, 92%, 93%, 94%, 95%, 96%, 97%, 98%, 99% or more identity to the codon optimized nucleic acid sequences encoding the even-numbered sequences in the range of SEQ ID NOs: 4-1960, 2004-3920, 4048-5466, and 5476. In some embodiments, the polynucleotide has a nucleic acid sequence comprising at least 80%, 85%, 90%, 91%, 92%, 93%, 94%, 95%, 96%, 97%, 98%, 99% or more identity to the codon optimized nucleic acid sequences in the odd-numbered sequences in the range of SEQ ID NOs: 3-1959, 2003-3919, 4047-5465, and 5475. In some embodiments, the codon optimized sequences of the odd-numbered sequences in the range of SEQ ID NOs: 3-1959, 2003-3919, 4047-5465, and 5475, enhance expression of the encoded TdT, providing preparations of enzyme capable of converting substrate to product.

[0252] In some embodiments, the polynucleotide sequence comprises at least 85%, 90%, 91%, 92%, 93%, 94%, 95%, 96%, 97%, 98%, 99%, or more sequence identity to the reference sequence of SEQ ID NOs: 1, 7, 15, 23, 35, 267, 647, 659, 881, 1099, 1335, 1347, 1595, 1653, 1829, 1949, 2007, 2253, 2513, 2523, 2637, 2803, 2811, 2955, 3173, 3221, 3669, 3673, 3795, 3869, 3917, 4265, 4441, 4653, 4849, 4855, 4903, 5001, 5027, 5191, and/or 5245 and/or or a functional fragment thereof, wherein said polynucleotide sequence encodes an engineered polypeptide comprising at least one substitution at one or more amino acid positions.

[0253] In some embodiments, the polynucleotide sequence encodes at least one engineered terminal deoxynucleotidyl transferase comprising a sequence having at least 85%, 90%, 91%, 92%, 93%, 94%, 95%, 96%, 97%, 98%, 99%, or more sequence identity to the reference sequence of SEQ ID NOs: 2, 8, 16, 24, 36, 268, 648, 660, 882, 1100, 1336, 1348, 1596, 1654, 1830, 1950, 2008, 2254, 2514, 2524, 2638, 2804, 2812, 2956, 3174, 3222, 3670, 3674, 3796, 3870, 3918, 4266, 4442, 4654, 4850, 4856, 4904, 5002, 5028, 5192 and/or 5246.

[0254] In some embodiments, the polynucleotide sequence comprises SEQ ID NOs: 7, 15, 23, 35, 267, 647, 659, 881, 1099, 1335, 1347, 1595, 1653, 1829, 1949, 2007, 2253, 2513, 2523, 2637, 2803, 2811, 2955, 3173, 3221, 3669, 3673, 3795, 3869, 3917, 4265, 4441, 4653, 4849, 4855, 4903, 5001, 5027, 5191, and/or 5245.

[0255] In some embodiments, the polynucleotides are capable of hybridizing under highly stringent conditions to a reference sequence selected from the odd-numbered sequences in SEQ ID NOs: 3-1959, 2003-3919, 4047-5465, and 5475, or a complement thereof, and encode a TdT.

[0256] In some embodiments, as described above, the polynucleotide encodes an engineered TdT polypeptide with improved properties as compared to SEQ ID NOs: 2, 8, 16, 24, 36, 268, 648, 660, 882, 1100, 1336, 1348, 1596, 1654, 1830, 1950, 2008, 2254, 2514, 2524, 2638, 2804, 2812, 2956, 3174, 3222, 3670, 3674, 3796, 3870, 3918, 4266, 4442, 4654, 4850, 4856, 4904, 5002, 5028, 5192 and/or 5246, wherein the polypeptide comprises an amino acid sequence having at least 80%, 85%, 86%, 87%, 88%, 89%, 90%, 91%, 92%, 93%, 94%, 95%, 96%, 97%, 98%, 99% or more identity to a reference sequence selected from SEQ ID NOs: 2, 8, 16, 24, 36, 268, 648, 660, 882, 1100, 1336, 1348, 1596, 1654, 1830, 1950, 2008, 2254, 2514, 2524, 2638, 2804, 2812, 2956, 3174, 3222, 3670, 3674, 3796, 3870, 3918, 4266, 4442, 4654, 4850, 4856, 4904, 5002, 5028, 5192 and/or 5246, and one or more residue differences as compared to SEQ ID NOs: 2, 8, 16, 24, 36, 268, 648, 660, 882, 1100, 1336, 1348, 1596, 1654, 1830, 1950, 2008, 2254, 2514, 2524, 2638, 2804, 2812, 2956, 3174, 3222, 3670, 3674, 3796, 3870, 3918, 4266, 4442, 4654, 4850, 4856, 4904, 5002, 5028, 5192 and/or 5246, wherein the sequence is selected from the even-numbered sequences in the range of SEQ ID NOs: 4-1960, 2004-3920, 4048-5466, and 5476. In some embodiments, the reference amino acid sequence is selected from the even-numbered sequences in the range of SEQ ID NOs: 4-1960, 2004-3920, 4048-5466, and 5476. In some embodiments, the reference amino acid sequence is SEQ ID NO: 2, while in some other embodiments, the reference sequence is SEQ ID NO: 8, while in some other embodiments, the reference sequence is SEQ ID NO: 16. In some embodiments, the reference amino acid sequence is SEQ ID NO: 24, while in some other embodiments, the reference sequence is SEQ ID NO: 36, while in some other embodiments, the reference sequence is SEQ ID NO: 268. In some embodiments, the reference amino acid sequence is SEQ ID NO: 648, while in some other embodiments, the reference sequence is SEQ ID NO: 660, while in some other embodiments, the reference sequence is SEQ ID NO: 882. In some embodiments, the reference amino acid sequence is SEQ ID NO: 1100, while in some other embodiments, the reference sequence is SEQ ID NO: 1336, while in some other embodiments, the reference sequence is SEQ ID NO: 1348. In some embodiments, the reference amino acid sequence is SEQ ID NO: 1596, while in some other embodiments, the reference sequence is SEQ ID NO: 1654, while in some other embodiments, the reference sequence is SEQ ID NO: 1830. In some embodiments, the reference amino acid sequence is SEQ ID NO: 1950, while in some other embodiments, the reference sequence is SEQ ID NO: 2008, while in some other embodiments, the reference sequence is SEQ ID NO: 2254. In some embodiments, the reference amino acid sequence is SEQ ID NO: 2514, while in some other embodiments, the reference sequence is SEQ ID NO: 2524, while in some other embodiments, the reference sequence is SEQ ID NO: 2638. In some embodiments, the reference amino acid sequence is SEQ ID NO: 2804, while in some other embodiments, the reference sequence is SEQ ID NO: 2812, while in some other embodiments, the reference sequence is SEQ ID NO: 2956. In some embodiments, the reference amino acid sequence is SEQ ID NO: 3174, while in some other embodiments, the reference sequence is SEQ ID NO: 3222, while in some other embodiments, the reference sequence is SEQ ID NO: 3670. In some embodiments, the reference amino acid sequence is SEQ ID NO: 3674, while in some other embodiments, the reference sequence is SEQ ID NO: 3796, while in some other embodiments, the reference sequence is SEQ ID NO: 3870.

[0257] In some embodiments, the polynucleotide encodes a TdT polypeptide capable of converting one or more substrates to product with improved properties as compared to SEQ ID NOs: 2, 8, 16, 24, 36, 268, 648, 660, 882, 1100, 1336, 1348, 1596, 1654, 1830, 1950, 2008, 2254, 2514, 2524, 2638, 2804, 2812, 2956, 3174, 3222, 3670, 3674, 3796, 3870, 3918, 4266, 4442, 4654, 4850, 4856, 4904, 5002, 5028, 5192 and/or 5246, wherein the polypeptide comprises an amino acid sequence having at least 80%, 85%, 86%, 87%, 88%, 89%, 90%, 91%, 92%, 93%, 94%, 95%, 96%, 97%, 98%, 99% or more sequence identity to reference sequence SEQ ID NOs: 2, 8, 16, 24, 36, 268, 648, 660, 882, 1100, 1336, 1348, 1596, 1654, 1830, 1950, 2008, 2254, 2514, 2524, 2638, 2804, 2812, 2956, 3174, 3222, 3670, 3674, 3796, 3870, 3918, 4266, 4442, 4654, 4850, 4856, 4904, 5002, 5028, 5192 and/or 5246.

[0258] In some embodiments, the polynucleotide encoding the engineered TdT comprises a polynucleotide sequence selected from the odd-numbered sequences in the range of SEQ ID NOs: 3-1959, 2003-3919, 4047-5465, and 5475.

[0259] In some embodiments, the polynucleotides are capable of hybridizing under highly stringent conditions to a reference polynucleotide sequence selected from the odd-numbered sequences in the range of SEQ ID NOs: 3-1959, 2003-3919, 4047-5465, and 5475 or a complement thereof, and encode a TdT polypeptide with one or more of the improved properties described herein. In some embodiments, the polynucleotide capable of hybridizing under highly stringent conditions encodes a TdT comprising an amino acid sequence having at least 80%, 85%, 86%, 87%, 88%, 89%, 90%, 91%, 92%, 93%, 94%, 95%, 96%, 97%, 98%, 99% or more identity to SEQ ID NOs: 2, 8, 16, 24, 36, 268, 648, 660, 882, 1100, 1336, 1348, 1596, 1654, 1830, 1950, 2008, 2254, 2514, 2524, 2638, 2804, 2812, 2956, 3174, 3222, 3670, 3674, 3796, 3870, 3918, 4266, 4442, 4654, 4850, 4856, 4904, 5002, 5028, 5192 and/or 5246, that has an amino acid sequence comprising one or more residue differences as compared to SEQ ID NOs: 2, 8, 16, 24, 36, 268, 648, 660, 882, 1100, 1336, 1348, 1596, 1654, 1830, 1950, 2008, 2254, 2514, 2524, 2638, 2804, 2812, 2956, 3174, 3222, 3670, 3674, 3796, 3870, 3918, 4266, 4442, 4654, 4850, 4856, 4904, 5002, 5028, 5192 and/or 5246, as described above and in the Examples, below.

[0260] In some embodiments, the polynucleotide capable of hybridizing under highly stringent conditions encodes an engineered TdT polypeptide with improved properties comprising an amino acid sequence having at least 80%, 85%, 86%, 87%, 88%, 89%, 90%, 91%, 92%, 93%, 94%, 95%, 96%, 97%, 98%, 99% or more identity to SEQ ID NOs: 2, 8, 16, 24, 36, 268, 648, 660, 882, 1100, 1336, 1348, 1596, 1654, 1830, 1950, 2008, 2254, 2514, 2524, 2638, 2804, 2812, 2956, 3174, 3222, 3670, 3674, 3796, 3870, 3918, 4266, 4442, 4654, 4850, 4856, 4904, 5002, 5028, 5192 and/or 5246. In some embodiments, the polynucleotides encode the polypeptides described herein but have at least about 80%, 85%, 86%, 87%, 88%, 89%, 90%, 91%, 92%, 93%, 94%, 95%, 96%, 97%, 98%, or 99% or more sequence identity at the nucleotide level to a reference polynucleotide encoding the engineered TdT. In some embodiments, the reference polynucleotide sequence is selected from SEQ ID NOs: 3-1959, 2003-3919, 4047-5465, and 5475.

[0261] In some embodiments, the polynucleotide capable of hybridizing under highly stringent conditions encodes an engineered TdT polypeptide with improved properties comprising an amino acid sequence having at least 80%, 85%, 86%, 87%, 88%, 89%, 90%, 91%, 92%, 93%, 94%, 95%, 96%, 97%, 98%, 99% or more identity to SEQ ID NOs: 2, 8, 16, 24, 36, 268, 648, 660, 882, 1100, 1336, 1348, 1596, 1654, 1830, 1950, 2008, 2254, 2514, 2524, 2638, 2804, 2812, 2956, 3174, 3222, 3670, 3674, 3796, 3870, 3918, 4266, 4442, 4654, 4850, 4856, 4904, 5002, 5028, 5192 and/or 5246. In some embodiments, the polynucleotides encode the polypeptides described herein but have at least about 80%, 85%, 86%, 87%, 88%, 89%, 90%, 91%, 92%, 93%, 94%, 95%, 96%, 97%, 98%, or 99% or more sequence identity at the nucleotide level to a reference polynucleotide encoding the engineered TdT. In some embodiments, the reference polynucleotide sequence is selected from SEQ ID NOs: 3-1959, 2003-3919, 4047-5465, and 5475.

[0262] In some embodiments, an isolated polynucleotide encoding any of the engineered TdT polypeptides provided herein is manipulated in a variety of ways to provide for expression of the polypeptide. In some embodiments, the polynucleotides encoding the polypeptides are provided as expression vectors where one or more control sequences is present to regulate the expression of the polynucleotides and/or polypeptides. Manipulation of the isolated polynucleotide prior to its insertion into a vector may be desirable or necessary depending on the expression vector. The techniques for modifying polynucleotides and nucleic acid sequences utilizing recombinant DNA methods are well known in the art.

[0263] In some embodiments, the control sequences include among other sequences, promoters, leader sequences, polyadenylation sequences, propeptide sequences, signal peptide sequences, and transcription terminators. As known in the art, suitable promoters can be selected based on the host cells used. For bacterial host cells, suitable promoters for directing transcription of the nucleic acid constructs of the present application, include, but are not limited to the promoters obtained from the E. coli lac operon, Streptomyces coelicolor agarase gene (dagA), Bacillus subtilis levansucrase gene (sacB), Bacillus licheniformis alpha-amylase gene (amyL), Bacillus stearothermophilus maltogenic amylase gene (amyM), Bacillus amyloliquefaciens alpha-amylase gene (amyQ), Bacillus licheniformis penicillinase gene (penP), Bacillus subtilis xylA and xylB genes, and prokaryotic beta-lactamase gene (See e.g., Villa-Kamaroff et al., Proc. Natl Acad. Sci. USA 75: 3727-3731 [1978]), as well as the tac promoter (See e.g., DeBoer et al., Proc. Natl Acad. Sci. USA 80: 21-25 [1983]). Exemplary promoters for filamentous fungal host cells, include promoters obtained from the genes for Aspergillus oryzae TAKA amylase, Rhizomucor miehei aspartic proteinase, Aspergillus niger neutral alpha-amylase, Aspergillus niger acid stable alpha-amylase, Aspergillus niger or Aspergillus awamori glucoamylase (glaA), Rhizomucor miehei lipase, Aspergillus oryzae alkaline protease, Aspergillus oryzae triose phosphate isomerase, Aspergillus nidulans acetamidase, and Fusarium oxysporum trypsin-like protease (See e.g., WO 96/00787), as well as the NA2-tpi promoter (a hybrid of the promoters from the genes for Aspergillus niger neutral alpha-amylase and Aspergillus oryzae triose phosphate isomerase), and mutant, truncated, and hybrid promoters thereof. Exemplary yeast cell promoters can be from the genes can be from the genes for Saccharomyces cerevisiae enolase (ENO-1), Saccharomyces cerevisiae galactokinase (GAL1), Saccharomyces cerevisiae alcohol dehydrogenase/glyceraldehyde-3-phosphate dehydrogenase (ADH2/GAP), and Saccharomyces cerevisiae 3-phosphoglycerate kinase. Other useful promoters for yeast host cells are known in the art (See e.g., Romanos et al., Yeast 8:423-488 [1992]).

[0264] In some embodiments, the control sequence is a suitable transcription terminator sequence, a sequence recognized by a host cell to terminate transcription. The terminator sequence is operably linked to the 3′ terminus of the nucleic acid sequence encoding the polypeptide. Any terminator which is functional in the host cell of choice finds use in the present invention. For example, exemplary transcription terminators for filamentous fungal host cells can be obtained from the genes for Aspergillus oryzae TAKA amylase, Aspergillus niger glucoamylase, Aspergillus nidulans anthranilate synthase, Aspergillus niger alpha-glucosidase, and Fusarium oxysporum trypsin-like protease. Exemplary terminators for yeast host cells can be obtained from the genes for Saccharomyces cerevisiae enolase, Saccharomyces cerevisiae cytochrome C (CYC1), and Saccharomyces cerevisiae glyceraldehyde-3-phosphate dehydrogenase. Other useful terminators for yeast host cells are known in the art (See e.g., Romanos et al., supra).

[0265] In some embodiments, the control sequence is a suitable leader sequence, a non-translated region of an mRNA that is important for translation by the host cell. The leader sequence is operably linked to the 5′ terminus of the nucleic acid sequence encoding the polypeptide. Any leader sequence that is functional in the host cell of choice may be used. Exemplary leaders for filamentous fungal host cells are obtained from the genes for Aspergillus oryzae TAKA amylase and Aspergillus nidulans triose phosphate isomerase. Suitable leaders for yeast host cells include but are not limited to those obtained from the genes for Saccharomyces cerevisiae enolase (ENO-1), Saccharomyces cerevisiae 3-phosphoglycerate kinase, Saccharomyces cerevisiae alpha-factor, and Saccharomyces cerevisiae alcohol dehydrogenase/glyceraldehyde-3-phosphate dehydrogenase (ADH2/GAP). The control sequence may also be a polyadenylation sequence, a sequence operably linked to the 3′ terminus of the nucleic acid sequence and which, when transcribed, is recognized by the host cell as a signal to add polyadenosine residues to transcribed mRNA. Any polyadenylation sequence which is functional in the host cell of choice may be used in the present invention. Exemplary polyadenylation sequences for filamentous fungal host cells include but are not limited to those from the genes for Aspergillus oryzae TAKA amylase, Aspergillus niger glucoamylase, Aspergillus nidulans anthranilate synthase, Fusarium oxysporum trypsin-like protease, and Aspergillus niger alpha-glucosidase. Useful polyadenylation sequences for yeast host cells are also known in the art (See e.g., Guo and Sherman, Mol. Cell. Bio., 15:5983-5990 [1995]).

[0266] In some embodiments, the control sequence is a signal peptide coding region that codes for an amino acid sequence linked to the amino terminus of a polypeptide and directs the encoded polypeptide into the cell's secretory pathway. The 5′ end of the coding sequence of the nucleic acid sequence may inherently contain a signal peptide coding region naturally linked in translation reading frame with the segment of the coding region that encodes the secreted polypeptide. Alternatively, the 5′ end of the coding sequence may contain a signal peptide coding region that is foreign to the coding sequence. Any signal peptide coding region that directs the expressed polypeptide into the secretory pathway of a host cell of choice finds use for expression of the engineered TdT polypeptides provided herein. Effective signal peptide coding regions for bacterial host cells include but are not limited to the signal peptide coding regions obtained from the genes for Bacillus NCIB 11837 maltogenic amylase, Bacillus stearothermophilus alpha-amylase, Bacillus licheniformis subtilisin, Bacillus licheniformis beta-lactamase, Bacillus stearothermophilus neutral proteases (nprT, nprS, nprM), and Bacillus subtilis prsA. Further signal peptides are known in the art (See e.g., Simonen and Palva, Microbiol. Rev., 57:109-137 [1993]). Effective signal peptide coding regions for filamentous fungal host cells include but are not limited to the signal peptide coding regions obtained from the genes for Aspergillus oryzae TAKA amylase, Aspergillus niger neutral amylase, Aspergillus niger glucoamylase, Rhizomucor miehei aspartic proteinase, Humicola insolens cellulase, and Humicola lanuginosa lipase. Useful signal peptides for yeast host cells include but are not limited to those from the genes for Saccharomyces cerevisiae alpha-factor and Saccharomyces cerevisiae invertase.

[0267] In some embodiments, the control sequence is a propeptide coding region that codes for an amino acid sequence positioned at the amino terminus of a polypeptide. The resultant polypeptide is referred to as a “proenzyme,” “propolypeptide,” or “zymogen,” in some cases). A propolypeptide can be converted to a mature active polypeptide by catalytic or autocatalytic cleavage of the propeptide from the propolypeptide. The propeptide coding region includes but is not limited to the genes for Bacillus subtilis alkaline protease (aprE), Bacillus subtilis neutral protease (nprT), Saccharomyces cerevisiae alpha-factor, Rhizomucor miehei aspartic proteinase, and Myceliophthora thermophila lactase (See e.g., WO 95/33836). Where both signal peptide and propeptide regions are present at the amino terminus of a polypeptide, the propeptide region is positioned next to the amino terminus of a polypeptide and the signal peptide region is positioned next to the amino terminus of the propeptide region.

[0268] In some embodiments, regulatory sequences are also utilized. These sequences facilitate the regulation of the expression of the polypeptide relative to the growth of the host cell. Examples of regulatory systems are those which cause the expression of the gene to be turned on or off in response to a chemical or physical stimulus, including the presence of a regulatory compound. In prokaryotic host cells, suitable regulatory sequences include, but are not limited to the lac, tac, and trp operator systems. In yeast host cells, suitable regulatory systems include, but are not limited to the ADH2 system or GAL1 system. In filamentous fungi, suitable regulatory sequences include, but are not limited to the TAKA alpha-amylase promoter, Aspergillus niger glucoamylase promoter, and Aspergillus oryzae glucoamylase promoter.

[0269] The present invention also provides recombinant expression vectors comprising a polynucleotide encoding an engineered TdT polypeptide, and one or more expression regulating regions such as a promoter and a terminator, a replication origin, etc., depending on the type of hosts into which they are to be introduced. In some embodiments, the various nucleic acid and control sequences described above are combined together to produce a recombinant expression vector which includes one or more convenient restriction sites to allow for insertion or substitution of the nucleic acid sequence encoding the variant TdT polypeptide at such sites. Alternatively, the polynucleotide sequence(s) of the present invention are expressed by inserting the polynucleotide sequence or a nucleic acid construct comprising the polynucleotide sequence into an appropriate vector for expression. In creating the expression vector, the coding sequence is located in the vector so that the coding sequence is operably linked with the appropriate control sequences for expression.

[0270] The recombinant expression vector may be any vector (e.g., a plasmid or virus), that can be conveniently subjected to recombinant DNA procedures and can result in the expression of the variant TdT polynucleotide sequence. The choice of the vector will typically depend on the compatibility of the vector with the host cell into which the vector is to be introduced. The vectors may be linear or closed circular plasmids.

[0271] In some embodiments, the expression vector is an autonomously replicating vector (i.e., a vector that exists as an extra-chromosomal entity, the replication of which is independent of chromosomal replication, such as a plasmid, an extra-chromosomal element, a minichromosome, or an artificial chromosome). The vector may contain any means for assuring self-replication. In some alternative embodiments, the vector may be one which, when introduced into the host cell, is integrated into the genome and replicated together with the chromosome(s) into which it has been integrated. Furthermore, a single vector or plasmid or two or more vectors or plasmids which together contain the total DNA to be introduced into the genome of the host cell, or a transposon may be used.

[0272] In some embodiments, the expression vector preferably contains one or more selectable markers, which permit easy selection of transformed cells. A “selectable marker” is a gene the product of which provides for biocide or viral resistance, resistance to heavy metals, prototrophy to auxotrophy, and the like. Examples of bacterial selectable markers include but are not limited to the dal genes from Bacillus subtilis or Bacillus licheniformis, or markers, which confer antibiotic resistance such as ampicillin, kanamycin, chloramphenicol or tetracycline resistance. Suitable markers for yeast host cells include, but are not limited to ADE2, HIS3, LEU2, LYS2, MET3, TRP1, and URA3. Selectable markers for use in a filamentous fungal host cell include, but are not limited to, amdS (acetamidase), argB (ornithine carbamoyltransferases), bar (phosphinothricin acetyltransferase), hph (hygromycin phosphotransferase), niaD (nitrate reductase), pyrG (orotidine-5′-phosphate decarboxylase), sC (sulfate adenyltransferase), and trpC (anthranilate synthase), as well as equivalents thereof. In another aspect, the present invention provides a host cell comprising a polynucleotide encoding at least one engineered TdT polypeptide of the present invention, the polynucleotide being operatively linked to one or more control sequences for expression of the engineered TdT enzyme(s) in the host cell. Host cells for use in expressing the polypeptides encoded by the expression vectors of the present invention are well known in the art and include but are not limited to, bacterial cells, such as E. coli, Vibriofluvialis, Streptomyces and Salmonella typhimurium cells; fungal cells, such as yeast cells (e.g., Saccharomyces cerevisiae and Pichia pastoris [ATCC Accession No. 201178]); insect cells such as Drosophila S2 and Spodoptera Sf9 cells; animal cells such as CHO, COS, BHK, 293, and Bowes melanoma cells; and plant cells. Exemplary host cells are Escherichia coli strains (e.g., W3110 (ΔfhuA) and BL21).

[0273] In some embodiments, the host cell strain comprises a knockout of one or more genes, in particular phosphatase genes. In some embodiments, the host cell comprises a knockout or single gene deletion of E. coli genes aphA, surE, phoA, and/or cpdB, as described below in the Examples. In some embodiments, the host cell comprising a knockout of one or more phosphatase genes has increased production of the product and/or decreased de-phosphorylation of the product or substrate.

[0274] Accordingly, in another aspect, the present invention provides methods for producing the engineered TdT polypeptides, where the methods comprise culturing a host cell capable of expressing a polynucleotide encoding the engineered TdT polypeptide under conditions suitable for expression of the polypeptide. In some embodiments, the methods further comprise the steps of isolating and/or purifying the TdT polypeptides, as described herein.

[0275] Appropriate culture media and growth conditions for the above-described host cells are well known in the art. Polynucleotides for expression of the TdT polypeptides may be introduced into cells by various methods known in the art. Techniques include, among others, electroporation, biolistic particle bombardment, liposome mediated transfection, calcium chloride transfection, and protoplast fusion.

[0276] The engineered TdTs with the properties disclosed herein can be obtained by subjecting the polynucleotide encoding the naturally occurring or engineered TdT polypeptide to mutagenesis and/or directed evolution methods known in the art, and as described herein. An exemplary directed evolution technique is mutagenesis and/or DNA shuffling (See e.g., Stemmer, Proc. Natl. Acad. Sci. USA 91:10747-10751 [1994]; WO 95/22625; WO 97/0078; WO 97/35966; WO 98/27230; WO 00/42651; WO 01/75767 and U.S. Pat. No. 6,537,746). Other directed evolution procedures that can be used include, among others, staggered extension process (StEP), in vitro recombination (See e.g., Zhao et al., Nat. Biotechnol., 16:258-261 [1998]), mutagenic PCR (See e.g., Caldwell et al., PCR Methods Appl., 3:S136-S140 [1994]), and cassette mutagenesis (See e.g., Black et al., Proc. Natl. Acad. Sci. USA 93:3525-3529 [1996]).

[0277] For example, mutagenesis and directed evolution methods can be readily applied to polynucleotides to generate variant libraries that can be expressed, screened, and assayed. Mutagenesis and directed evolution methods are well known in the art (See e.g., U.S. Pat. Nos. 5,605,793, 5,811,238, 5,830,721, 5,834,252, 5,837,458, 5,928,905, 6,096,548, 6,117,679, 6,132,970, 6,165,793, 6,180,406, 6,251,674, 6,265,201, 6,277,638, 6,287,861, 6,287,862, 6,291,242, 6,297,053, 6,303,344, 6,309,883, 6,319,713, 6,319,714, 6,323,030, 6,326,204, 6,335,160, 6,335,198, 6,344,356, 6,352,859, 6,355,484, 6,358,740, 6,358,742, 6,365,377, 6,365,408, 6,368,861, 6,372,497, 6,337,186, 6,376,246, 6,379,964, 6,387,702, 6,391,552, 6,391,640, 6,395,547, 6,406,855, 6,406,910, 6,413,745, 6,413,774, 6,420,175, 6,423,542, 6,426,224, 6,436,675, 6,444,468, 6,455,253, 6,479,652, 6,482,647, 6,483,011, 6,484,105, 6,489,146, 6,500,617, 6,500,639, 6,506,602, 6,506,603, 6,518,065, 6,519,065, 6,521,453, 6,528,311, 6,537,746, 6,573,098, 6,576,467, 6,579,678, 6,586,182, 6,602,986, 6,605,430, 6,613,514, 6,653,072, 6,686,515, 6,703,240, 6,716,631, 6,825,001, 6,902,922, 6,917,882, 6,946,296, 6,961,664, 6,995,017, 7,024,312, 7,058,515, 7,105,297, 7,148,054, 7,220,566, 7,288,375, 7,384,387, 7,421,347, 7,430,477, 7,462,469, 7,534,564, 7,620,500, 7,620,502, 7,629,170, 7,702,464, 7,747,391, 7,747,393, 7,751,986, 7,776,598, 7,783,428, 7,795,030, 7,853,410, 7,868,138, 7,783,428, 7,873,477, 7,873,499, 7,904,249, 7,957,912, 7,981,614, 8,014,961, 8,029,988, 8,048,674, 8,058,001, 8,076,138, 8,108,150, 8,170,806, 8,224,580, 8,377,681, 8,383,346, 8,457,903, 8,504,498, 8,589,085, 8,762,066, 8,768,871, 9,593,326, and all related US, as well as PCT and non-US counterparts; Ling et al., Anal. Biochem., 254(2):157-78 [1997]; Dale et al., Meth. Mol. Biol., 57:369-74 [1996]; Smith, Ann. Rev. Genet., 19:423-462 [1985]; Botstein et al., Science, 229:1193-1201 [1985]; Carter, Biochem. J., 237:1-7 [1986]; Kramer et al., Cell, 38:879-887 [1984]; Wells et al., Gene, 34:315-323 [1985]; Minshull et al., Curr. Op. Chem. Biol., 3:284-290 [1999]; Christians et al., Nat. Biotechnol., 17:259-264 [1999]; Crameri et al., Nature, 391:288-291 [1998]; Crameri, et al., Nat. Biotechnol., 15:436-438 [1997]; Zhang et al., Proc. Nat. Acad. Sci. U.S.A., 94:4504-4509 [1997]; Crameri et al., Nat. Biotechnol., 14:315-319 [1996]; Stemmer, Nature, 370:389-391 [1994]; Stemmer, Proc. Nat. Acad. Sci. USA, 91:10747-10751 [1994]; WO 95/22625; WO 97/0078; WO 97/35966; WO 98/27230; WO 00/42651; WO 01/75767; and WO 2009/152336, all of which are incorporated herein by reference).

[0278] In some embodiments, the enzyme clones obtained following mutagenesis treatment are screened by subjecting the enzymes to a defined temperature (or other assay conditions, such as testing the enzyme's activity over a broad range of substrates) and measuring the amount of enzyme activity remaining after heat treatments or other assay conditions. Clones containing a polynucleotide encoding a TdT polypeptide are then sequenced to identify the nucleotide sequence changes (if any) and used to express the enzyme in a host cell. Measuring enzyme activity from the expression libraries can be performed using any suitable method known in the art (e.g., standard biochemistry techniques, such as HPLC analysis).

[0279] In some embodiments, the clones obtained following mutagenesis treatment can be screened for engineered TdTs having one or more desired improved enzyme properties (e.g., improved regioselectivity). Measuring enzyme activity from the expression libraries can be performed using the standard biochemistry techniques, such as HPLC analysis, LC-MS analysis, RapidFire-MS analysis, and/or capillary electrophoresis analysis.

[0280] When the sequence of the engineered polypeptide is known, the polynucleotides encoding the enzyme can be prepared by standard solid-phase methods, according to known synthetic methods. In some embodiments, fragments of up to about 100 bases can be individually synthesized, then joined (e.g., by enzymatic or chemical ligation methods, or polymerase mediated methods) to form any desired continuous sequence. For example, polynucleotides and oligonucleotides encoding portions of the TdT can be prepared by chemical synthesis as known in the art (e.g., the classical phosphoramidite method of Beaucage et al., Tet. Lett. 22:1859-69 [1981], or the method described by Matthes et al., EMBO J. 3:801-05 [1984]) as typically practiced in automated synthetic methods. According to the phosphoramidite method, oligonucleotides are synthesized (e.g., in an automatic DNA synthesizer), purified, annealed, ligated and cloned in appropriate vectors. In addition, essentially any nucleic acid can be obtained from any of a variety of commercial sources. In some embodiments, additional variations can be created by synthesizing oligonucleotides containing deletions, insertions, and/or substitutions, and combining the oligonucleotides in various permutations to create engineered TdTs with improved properties.

[0281] Accordingly, in some embodiments, a method for preparing the engineered TdT polypeptide comprises: (a) synthesizing a polynucleotide encoding a polypeptide comprising an amino acid sequence having at least about 80%, 85%, 86%, 87%, 88%, 89%, 90%, 91%, 92%, 93%, 94%, 95%, 96%, 97%, 98%, or 99% or more sequence identity to an amino acid sequence selected from the even-numbered sequences of SEQ ID NOs: 4-1960, 2004-3920, 4048-5466, and 5476, and having one or more residue differences as compared to SEQ ID NOs: 2, 8, 16, 24, 36, 268, 648, 660, 882, 1100, 1336, 1348, 1596, 1654, 1830, 1950, 2008, 2254, 2514, 2524, 2638, 2804, 2812, 2956, 3174, 3222, 3670, 3674, 3796, 3870, 3918, 4266, 4442, 4654, 4850, 4856, 4904, 5002, 5028, 5192 and/or 5246; and (b) expressing the TdT polypeptide encoded by the polynucleotide.

[0282] In some embodiments of the method, the polynucleotide encodes an engineered TdT that has optionally one or several (e.g., up to 3, 4, 5, or up to 10) amino acid residue deletions, insertions and/or substitutions. In some embodiments, the amino acid sequence has optionally 1-2, 1-3, 1-4, 1-5, 1-6, 1-7, 1-8, 1-9, 1-10, 1-15, 1-20, 1-21, 1-22, 1-23, 1-24, 1-25, 1-30, 1-35, 1-40, 1-45, 1-50, 1-75, 1-100, or 1-150 amino acid residue deletions, insertions and/or substitutions. In some embodiments, the amino acid sequence has optionally around 1, 2, 3, 4, 5, 6, 7, 8, 9, 10, 11, 12, 13, 14, 15, 16, 17, 18, 19, 20, 21, 22, 23, 24, 25, 30, 30, 35, 40, 45, 50, 55, 60, 65, 70, 80, 90, 100, 110, 120, 130, 140, or 150 amino acid residue deletions, insertions and/or substitutions. In some embodiments, the substitutions can be conservative or non-conservative substitutions.

[0283] In some embodiments, any of the engineered TdT enzymes expressed in a host cell can be recovered from the cells and/or the culture medium using any one or more of the well-known techniques for protein purification, including, among others, lysozyme treatment, sonication, filtration, salting-out, ultra-centrifugation, and chromatography. Suitable solutions for lysing and the high efficiency extraction of proteins from bacteria, such as E. coli, are commercially available (e.g., CelLytic B™, Sigma-Aldrich, St. Louis MO).

[0284] Chromatographic techniques for isolation of the TdT polypeptide include, among others, reverse phase chromatography high performance liquid chromatography, ion exchange chromatography, gel electrophoresis, and affinity chromatography. Conditions for purifying a particular enzyme will depend, in part, on factors such as net charge, hydrophobicity, hydrophilicity, molecular weight, molecular shape, etc., and will be apparent to those having skill in the art.

[0285] In some embodiments, affinity techniques may be used to isolate the improved TdT enzymes. For affinity chromatography purification, any antibody which specifically binds the TdT polypeptide may be used. For the production of antibodies, various host animals, including but not limited to rabbits, mice, rats, etc., may be immunized by injection with a TdT polypeptide, or a fragment thereof. The TdT polypeptide or fragment may be attached to a suitable carrier, such as BSA, by means of a side chain functional group or linkers attached to a side chain functional group. In some embodiments, the affinity purification can use a specific ligand bound by the TdT or dye affinity column (See e.g., EP0641862; Stellwagen, “Dye Affinity Chromatography,” In Current Protocols in Protein Science, Unit 9.2-9.2.16 [2001]).

[0286] Methods of Using the Engineered TdT Enzymes

[0287] In some embodiments, the TdT enzymes described herein find use in processes for conversion of one or more suitable substrates to a product.

[0288] In some embodiments, the engineered TdT polypeptides disclosed herein can be used in a process for the conversion of the oligo acceptor substrate and an NTP-3′-O-RBG or natural or modified NTP substrate to a product comprising an oligo acceptor substrate extended by one nucleotide.

[0289] In the embodiments provided herein and illustrated in the Examples, various ranges of suitable reaction conditions that can be used in the processes, include but are not limited to, substrate loading, co-substrate loading, pH, temperature, buffer, solvent system, cofactor, polypeptide loading, and reaction time. Further suitable reaction conditions for carrying out the process for biocatalytic conversion of substrate compounds to product compounds using an engineered TdT described herein can be readily optimized in view of the guidance provided herein by routine experimentation that includes, but is not limited to, contacting the engineered TdT polypeptide and one or more substrate compounds under experimental reaction conditions of concentration, pH, temperature, and solvent conditions, and detecting the product compound.

[0290] The oligo acceptor substrate may be any nucleotide chain or similar moiety with an exposed 3′-OH. In some embodiments, the acceptor substrate may be single stranded. In yet other embodiments, the acceptor substrate may be double stranded or partially doubled stranded. In some embodiments, the acceptor substrate may comprise a nucleotide chain consisting of 1-10 nucleotides, 5-20 nucleotides, 15-50 nucleotides, 30-100 nucleotides, or greater than 100 nucleotides. In some embodiments, the oligo acceptor substrate may comprise a chemical moiety that is not a nucleotide chain but contains a free —OH capable of being recognized as a substrate by a wild-type or engineered TdT.

[0291] In some embodiments, the oligo acceptor substrate may comprise one or more nucleotides with a 2′ modification, as described herein. In some embodiments, the oligo acceptor substrate may comprise one or more nucleotides with a 2′ modification selected from 2′-OH, 2′-H, 2′-O-methyl, 2′-fluoro, or 2′-methoxyethyl, 2′-OCH₂CH₂OCH₃, 2′—CO₂R′ (where R′ is any alkyl or aryl), or another 2′ atom or chemical group. In some embodiments, the oligo acceptor substrate may comprise one or more additional modifications, such as a phosphothiorate linkage.

[0292] In some embodiments, the sugar may have other modifications at other positions, such as locked nucleotides or constrained ethyl nucleotides, as is known in the art. In some embodiments, “locked nucleoside” or “locked nucleotide” refers to nucleoside or nucleotide, respectively, in which the ribose moiety is modified with a bridge connecting the 2′ oxygen and 4′ carbon (see, e.g., Obika et al., Tetrahedron Letters, 1997, 38(50):8735-8738; Orum et al., Current Pharmaceutical Design, 2008, 14(11):1138-1142). Typically, the bridge is a methylene bridge. In some embodiments, the 3′-phosphate group of the NQP may act as a removable blocking group or protecting group that may be selectively unblocked or removed to allow further modifications, reactions, or incorporation of the NQP into a growing oligonucleotide chain during template-dependent or template-independent oligonucleotide synthesis

[0293] In some embodiments, the oligo acceptor substrate comprises a nucleotide chain of repeating nucleotides. In other embodiments, the oligo acceptor substrate comprises a nucleotide chain of varied nucleotides that do not repeat. In some embodiments, the oligo acceptor substrate comprises a nucleotide chain with an odd number of nucleotides. In some embodiments, the oligo acceptor substrate comprises a nucleotide with an even number of nucleotides.

[0294] In some embodiments, the oligo acceptor substate is secured to solid support. Suitable solid supports are known to those in the art and described, below, in this disclosure.

[0295] In some embodiments, the oligo acceptor substrate comprises one or more nucleotide sequences selected from the following 5′-6-FAM-T17ATCmC, 5′-6-FAM-T12AT*mC, 5′-6-FAM-T17ATC(2′dF)C, 5′-6-FAM-T12ATCAC*(2′dF)A, 5′-6-FAM-T12ATCAC*mC, 5′-6-FAM-T12ATCAC*mA, 5′-6-FAM-T15AmG*mC, 5′-6-FAM-T15AmG*mC, 5′-6-FAM-T12TATCAC*mC, 5′-6-FAM-T15AmU*mG, 5′-6-FAM-T15AmU*mG, 5′-6-FAM-T14ATCmC, 5′-6-FAM-T15AT*mG, 5′-6-FAM-T17mAmUmC, 5′-6-FAM-T17mUmUmC, 5′-6-FAM-T17mCmUmG, 5′-6-FAM-T15AT*mA, 5′-6-FAM-T15AT*mC, 5′-6-FAM-T15AT*mU, T14ATCmC, 5′-6-FAM-T15mUmGmA, 5′-6-FAM-T15mAmU*mG, 5′-6-FAM-T15 mC*mG*mA, 5′-6-FAM-T17mGmUmC, 5′-6-FAM-T12mAmUmA, 5′-6-FAM-T22mAmUmU, 5′-6-FAM-T27mAmUmG, 5′-6-FAM-T57mUmUmC, 5′-6-FAM-T32mAmCmC, 5′-6-FAM-T37mAmGmC, 5′-6-FAM-T42mAmAmC, 5′-6-FAM-T47mGmUmC, 5′-6-FAM-T52mCmUmC, 5′-6-FAM-T15mAmU(2′dF)G, 5′-6-FAM-T15mAmG(MOE)C, 5′-6-FAM-T15mGmAmC, 5′-6-FAM-T22*(2′dF)A(2′dF)GmA, 5′-6-FAM-T22(2′dF)C(2′dF)G(2′dF)A, 5′-6-FAM-T27(2′dF)GmA(2′dF)U, 5′-6-FAM-T15mGmAmC, 5′-6-FAM-T 11mCmGmA, 5′-6-FAM-T11 mC*mA*mG, 5′-6-FAM-T15 mA(2′dF)UmC, 5′-6-FAM-T15mCmUmG, 5′-6-FAM-T27(2′dF)C*(2′dF)G*(2′dF)A, 5′-6-FAM-T11 mU*(2′dF)A*(2′dF)A, 5′-6-FAM-T48 mG*mA*mC, 5′-6-FAM-T15mAmCmU, 5′-6-FAM-T17*(2′dF)A*(2′dF)A(2′dF)G, 5′-6-FAM-T15mAmU(2′dF)U, 5′-6-FAM-T15mAmU(2′dF)C, 5′-BiosG-T3(iFluorT)T9mAmUmA, 5′-BiosG-T3(iFluorT)T9mAmUmAmA, 5′-BiosG-T3(iFluorT)T9mAmUmAmAmG, 5′-BiosG-T3(iFluorT)T9mAmUmAmAmGmA, 5′-BiosG-T3(iFluorT)T9mAmUmAmAmGmA(2′dF)A, 5′-BiosG-T13mAmUmA, 5′-BiosG-T13mAmUmAmA, 5′-BiosG-T13mAmUmAmAmG, 5′-BiosG-T13mAmUmAmAmGmA, 5′-BiosG-T13mAmUmAmAmGmA(2′dF)A, as further described in the Examples (Table 4.1) and the accompanying sequence listing. These embodiments are intended to be non-limiting. Any suitable oligo acceptor substrate finds use in the present invention.

[0296] In some embodiments, the NTP-3′-O-RBG substrate comprises a deoxyribonucleoside triphosphate with a 3′-O-RBG. In other embodiments, the NTP-3′-O-RBG substrate may comprise a ribonucleoside triphosphate with a 3′-O-RBG. In yet other embodiments, the NTP-3′-O-RBG substrate may comprise a synthetic nucleoside triphosphate with a 3′-O-RBG. In some embodiments, the NTP-3′-O-RBG substrate may comprise a sugar ring with a number of carbons that is not five. A non-limiting example of this is a threose nucleoside triphosphate.

[0297] A range of 3′ removable blocking groups for the NTP-3′-O-RBG substrate useful in the present disclosure are known in the art and include but are not limited to, —O—NH₂, —O—NO₂, —O—PO₃. In some embodiments, the NTP-3′-O-RBG substrate with 3′ removable blocking group can be selected from the group consisting of NTP-3′-O—NH₂, NTP-3′-O—NO₂, or NTP-3′-O—PO₃. In some embodiments, the NTP-3′-O-RBG substrate comprises another blocking group that would sterically hinder addition of a second NTP-3′-O-RBG substrate to the 3′ end of the growing oligo acceptor substrate strand prior to removal of the removable blocking from the first round of addition.

[0298] In some embodiments, the deoxyribonucleoside triphosphate with a 3′-O-RBG or ribonucleoside triphosphate with a 3′-O-RBG further comprises a natural purine or pyrimidine base, such as adenine, guanine, cytosine, thymine, or uridine. In some embodiments, deoxyribonucleoside triphosphate with a 3′-O-RBG or ribonucleoside triphosphate with a 3′-O-RBG further comprises an unnatural base analog such as inosine, xanthine, hypoxanthine or another base analog, as is known in the art. In some embodiments, the deoxyribonucleoside triphosphate with a 3′-O-RBG or ribonucleoside triphosphate with a 3′-O-RBG further comprises a base with modifications, as is known in the art. In some embodiments, the deoxyribonucleoside triphosphate with a 3′-O-RBG or ribonucleoside triphosphate with a 3′-O-RBG further comprises a 2′ modification or substitution. In some embodiments, the deoxyribonucleoside triphosphate with a 3′-O-RBG or ribonucleoside triphosphate with a 3′-O-RBG further comprises substitution of an oxygen for a sulfur atom for the creation of phosphorothioate linkages. In some embodiments, the deoxyribonucleoside triphosphate with a 3′-O-RBG or ribonucleoside triphosphate with a 3′-O-RBG further comprises substitution of two oxygens for sulfurs for the creation of phosphorodithioate linkages.

[0299] The substrate compound(s) in the reaction mixtures can be varied, taking into consideration, for example, the desired amount of product compound, the effect of each substrate concentration on enzyme activity, stability of enzyme under reaction conditions, and the percent conversion of each substrate to product. In some embodiments, the suitable reaction conditions comprise a substrate compound loading for each oligo acceptor substrate of at least about 0.1 μM to 1 μM, 1 μM to 2 μM, 2 μM to 3 μM, 3 μM to 5 μM, 5 μM to 10 μM, or 10 μM or greater. In some embodiments, the suitable reaction conditions comprise a substrate compound loading for each oligo acceptor substrate of at least about 0.5 to about 25 g/L, 1 to about 25 g/L, 5 to about 25 g/L, about 10 to about 25 g/L, or 20 to about 25 g/L. In some embodiments, the suitable reaction conditions comprise a substrate compound loading for each oligo acceptor substrate of at least about 0.5 g/L, at least about 1 g/L, at least about 5 g/L, at least about 10 g/L, at least about 15 g/L, at least about 20 g/L, or at least about 30 g/L, or even greater.

[0300] In some embodiments, the suitable reaction conditions comprise a substrate compound loading for each NTP-3′-O-RBG or natural or modified NTP substrate of at least about 1 μM to 5 μM, 5 μM to 10 μM, 10 μM to 25 μM, 25 μM to 50 μM, 50 μM to 100 μM, 100 μM to 200 μM, 200 μM to 300 μM, or 300 μM to 500 μM. In some embodiments, the suitable reaction conditions comprise a substrate compound loading for each oligo acceptor substrate of at least about 0.5 g/L, at least about 1 g/L, at least about 5 g/L, at least about 10 g/L, at least about 15 g/L, at least about 20 g/L, or at least about 30 g/L, or even greater.

[0301] In carrying out the TdT-mediated synthesis processes described herein, the engineered polypeptide may be added to the reaction mixture in the form of a purified enzyme, partially purified enzyme, whole cells transformed with gene(s) encoding the enzyme, as cell extracts and/or lysates of such cells, and/or as an enzyme immobilized on a solid support. Whole cells transformed with gene(s) encoding the engineered TdT enzyme or cell extracts, lysates thereof, and isolated enzymes may be employed in a variety of different forms, including solid (e.g., lyophilized, spray-dried, and the like) or semisolid (e.g., a crude paste). The cell extracts or cell lysates may be partially purified by precipitation (ammonium sulfate, polyethyleneimine, heat treatment or the like, followed by a desalting procedure prior to lyophilization (e.g., ultrafiltration, dialysis, etc.). Any of the enzyme preparations (including whole cell preparations) may be stabilized by crosslinking using known crosslinking agents, such as, for example, glutaraldehyde or immobilization to a solid phase (e.g., Eupergit C, and the like).

[0302] The gene(s) encoding the engineered TdT polypeptides can be transformed into host cell separately or together into the same host cell. For example, in some embodiments one set of host cells can be transformed with gene(s) encoding one engineered TdT polypeptide, and another set can be transformed with gene(s) encoding another TdT. Both sets of transformed cells can be utilized together in the reaction mixture in the form of whole cells, or in the form of lysates or extracts derived therefrom. In other embodiments, a host cell can be transformed with gene(s) encoding multiple engineered TdT polypeptides. In some embodiments the engineered polypeptides can be expressed in the form of secreted polypeptides, and the culture medium containing the secreted polypeptides can be used for the TdT reaction.

[0303] In some embodiments, the improved activity of the engineered TdT polypeptides disclosed herein provides for processes wherein higher percentage conversion can be achieved with lower concentrations of the engineered polypeptide. In some embodiments of the process, the suitable reaction conditions comprise an engineered polypeptide amount of about 1% (w/w), 2% (w/w), 5% (w/w), 10% (w/w), 20% (w/w), 30% (w/w), 40% (w/w), 50% (w/w), 75% (w/w), 100% (w/w) or more of substrate compound loading.

[0304] In some embodiments, the engineered polypeptide is present at a molar ratio of engineered polypeptide to substrate of about 50 to 1, 25 to 1, 10 to 1, 5 to 1, 1 to 1, 1 to 5, 1 to 10, 1 to 25 or 1 to 50.

[0305] In some embodiments, the engineered polypeptide is present at a molar ratio of engineered polypeptide to substrate from a range of about 50 to 1 to a range of about 1 to 50.

[0306] In some embodiments, the engineered polypeptide is present at about 0.01 g/L to about 50 g/L; about 0.01 to about 0.1 g/L; about 0.05 g/L to about 50 g/L; about 0.1 g/L to about 40 g/L; about 1 g/L to about 40 g/L; about 2 g/L to about 40 g/L; about 5 g/L to about 40 g/L; about 5 g/L to about 30 g/L; about 0.1 g/L to about 10 g/L; about 0.5 g/L to about 10 g/L; about 1 g/L to about 10 g/L; about 0.1 g/L to about 5 g/L; about 0.5 g/L to about 5 g/L; or about 0.1 g/L to about 2 g/L. In some embodiments, the TdT polypeptide is present at about 0.01 g/L, 0.05 g/L, 0.1 g/L, 0.2 g/L, 0.5 g/L, 1, 2 g/L, 5 g/L, 10 g/L, 15 g/L, 20 g/L, 25 g/L, 30 g/L, 35 g/L, 40 g/L, or 50 g/L.

[0307] In some embodiments, the suitable reaction conditions comprise a divalent metal cofactor. In some embodiments, the divalent metal cofactor is cobalt. In some embodiments, the cobalt (II) chloride is present at concentrations of about 1 to 1000 μM; about 50 to 400 μM; about 100 to 300 μM; or about 200 to 600 μM; about 500 to 1000 μM. In some embodiments, the cobalt (II) chloride is present at concentrations of about 150 μM; about 200 μM; about 250 μM, about 500 μM; or about 1000 μM.

[0308] In some embodiments of the reaction, a phosphatase is used to degrade inorganic phosphate and shift the reaction equilibrium toward the oligo acceptor extension product. In some embodiments, the phosphatase is an E. coli pyrophosphatase. In some embodiments, the phosphatase is present at a concentration of about 0.0001 to 0.01 units/uL; about 0.001 to 0.005 units/uL; or about 0.002 to 0.003 units/uL. In some embodiments, the phosphatase is present at a concentration of about 0.001 units/uL; about 0.002 units/uL; or about 0.003 units/uL. In some embodiments, the phosphatase is from Geobacillus zalihae. In some embodiments, the phosphatase is present at a concentration of about 0.01 to 10 μM; about 0.01 to 0.1 μM; or about 0.1 to 1 μM; or about 0.1 to 10 μM. In some embodiments, the phosphatase is present at a concentration of about 0.05 μM; about 0.5 μM; or about 5 μM; or about 10 μM.

[0309] During the course of the reaction, the pH of the reaction mixture may change. The pH of the reaction mixture may be maintained at a desired pH or within a desired pH range. This may be done by the addition of an acid or a base, before and/or during the course of the reaction. Alternatively, the pH may be controlled by using a buffer. Accordingly, in some embodiments, the reaction condition comprises a buffer. Suitable buffers to maintain desired pH ranges are known in the art and include, by way of example and not limitation, borate, phosphate, 2-(N-morpholino)ethanesulfonic acid (MES), 3-(N-morpholino)propanesulfonic acid (MOPS), acetate, triethanolamine (TEoA), and 2-amino-2-hydroxymethyl-propane-1,3-diol (Tris), and the like. In some embodiments, the reaction conditions comprise water as a suitable solvent with no buffer present.

[0310] In the embodiments of the process, the reaction conditions comprise a suitable pH. The desired pH or desired pH range can be maintained by use of an acid or base, an appropriate buffer, or a combination of buffering and acid or base addition. The pH of the reaction mixture can be controlled before and/or during the course of the reaction. In some embodiments, the suitable reaction conditions comprise a solution pH from about 4 to about 10, pH from about 5 to about 10, pH from about 5 to about 9, pH from about 6 to about 9, pH from about 6 to about 8. In some embodiments, the reaction conditions comprise a solution pH of about 4, 4.5, 5, 5.5, 6, 6.5, 7, 7.5, 8, 8.5, 9, 9.5, or 10.

[0311] In the embodiments of the processes herein, a suitable temperature is used for the reaction conditions, for example, taking into consideration the increase in reaction rate at higher temperatures, and the activity of the enzyme during the reaction time period. Accordingly, in some embodiments, the suitable reaction conditions comprise a temperature of about 10° C. to about 95° C., about 10° C. to about 75° C., about 15° C. to about 95° C., about 20° C. to about 95° C., about 20° C. to about 65° C., about 25° C. to about 70° C., or about 50° C. to about 70° C. In some embodiments, the suitable reaction conditions comprise a temperature of about 10° C., 15° C., 20° C., 25° C., 30° C., 35° C., 40° C., 45° C., 50° C., 55° C., 60° C., 65° C., 70° C., 75° C., 80° C., 85° C., 90° C. or 95° C. In some embodiments, the temperature during the enzymatic reaction can be maintained at a specific temperature throughout the course of the reaction. In some embodiments, the temperature during the enzymatic reaction can be adjusted over a temperature profile during the course of the reaction.

[0312] In some embodiments, the processes of the invention are carried out in a solvent. Suitable solvents include water, aqueous buffer solutions, organic solvents, polymeric solvents, and/or co-solvent systems, which generally comprise aqueous solvents, organic solvents and/or polymeric solvents. The aqueous solvent (water or aqueous co-solvent system) may be pH-buffered or unbuffered. In some embodiments, the processes using the engineered TdT polypeptides can be carried out in an aqueous co-solvent system comprising an organic solvent (e.g., ethanol, isopropanol (IPA), dimethyl sulfoxide (DMSO), dimethylformamide (DMF) ethyl acetate, butyl acetate, 1-octanol, heptane, octane, methyl t butyl ether (MTBE), toluene, and the like), ionic or polar solvents (e.g., 1-ethyl 4 methylimidazolium tetrafluoroborate, 1-butyl-3-methylimidazolium tetrafluoroborate, 1-butyl 3 methylimidazolium hexafluorophosphate, glycerol, polyethylene glycols, and the like). In some embodiments, the co-solvent can be a polar solvent, such as a polyol, dimethylsulfoxide (DMSO), or lower alcohol. The non-aqueous co-solvent component of an aqueous co-solvent system may be miscible with the aqueous component, providing a single liquid phase, or may be partly miscible or immiscible with the aqueous component, providing two liquid phases. Exemplary aqueous co-solvent systems can comprise water and one or more co-solvents selected from an organic solvent, polar solvent, and polyol solvent. In general, the co-solvent component of an aqueous co-solvent system is chosen such that it does not adversely inactivate the TdT enzyme under the reaction conditions. Appropriate co-solvent systems can be readily identified by measuring the enzymatic activity of the specified engineered TdT enzyme with a defined substrate of interest in the candidate solvent system, utilizing an enzyme activity assay, such as those described herein.

[0313] In some embodiments of the process, the suitable reaction conditions comprise an aqueous co-solvent, where the co-solvent comprises DMSO at about 1% to about 50% (v/v), about 1 to about 40% (v/v), about 2% to about 40% (v/v), about 5% to about 30% (v/v), about 10% to about 30% (v/v), or about 10% to about 20% (v/v). In some embodiments of the process, the suitable reaction conditions can comprise an aqueous co-solvent comprising ethanol at about 1% (v/v), about 5% (v/v), about 10% (v/v), about 15% (v/v), about 20% (v/v), about 25% (v/v), about 30% (v/v), about 35% (v/v), about 40% (v/v), about 45% (v/v), or about 50% (v/v).

[0314] In some embodiments, the reaction conditions comprise a surfactant for stabilizing or enhancing the reaction. Surfactants can comprise non-ionic, cationic, anionic and/or amphiphilic surfactants. Exemplary surfactants, include by way of example and not limitation, nonyl phenoxypolyethoxylethanol (NP40), TRITON™ X-100 polyethylene glycol tert-octylphenyl ether, polyoxyethylene-stearylamine, cetyltrimethylammonium bromide, sodium oleylamidosulfate, polyoxyethylene-sorbitanmonostearate, hexadecyldimethylamine, etc. Any surfactant that may stabilize or enhance the reaction may be employed. The concentration of the surfactant to be employed in the reaction may be generally from 0.1 to 50 mg/mL, particularly from 1 to 20 mg/mL.

[0315] In some embodiments, the reaction conditions include an antifoam agent, which aids in reducing or preventing formation of foam in the reaction solution, such as when the reaction solutions are mixed or sparged. Anti-foam agents include non-polar oils (e.g., minerals, silicones, etc.), polar oils (e.g., fatty acids, alkyl amines, alkyl amides, alkyl sulfates, etc.), and hydrophobic (e.g., treated silica, polypropylene, etc.), some of which also function as surfactants. Exemplary anti-foam agents include Y-30® (Dow Corning), poly-glycol copolymers, oxy/ethoxylated alcohols, and polydimethylsiloxanes. In some embodiments, the anti-foam can be present at about 0.001% (v/v) to about 5% (v/v), about 0.01% (v/v) to about 5% (v/v), about 0.1% (v/v) to about 5% (v/v), or about 0.1% (v/v) to about 2% (v/v). In some embodiments, the anti-foam agent can be present at about 0.001% (v/v), about 0.01% (v/v), about 0.1% (v/v), about 0.5% (v/v), about 1% (v/v), about 2% (v/v), about 3% (v/v), about 4% (v/v), or about 5% (v/v) or more as desirable to promote the reaction.

[0316] The quantities of reactants used in the TdT reaction will generally vary depending on the quantities of product desired, and concomitantly the amount of substrates employed. Those having ordinary skill in the art will readily understand how to vary these quantities to tailor them to the desired level of productivity and scale of production.

[0317] In some embodiments, the order of addition of reactants is not critical. The reactants may be added together at the same time to a solvent (e.g., monophasic solvent, biphasic aqueous co-solvent system, and the like), or alternatively, some of the reactants may be added separately, and some together at different time points. For example, the cofactor, co-substrate and substrate may be added first to the solvent.

[0318] The solid reactants (e.g., enzyme, salts, etc.) may be provided to the reaction in a variety of different forms, including powder (e.g., lyophilized, spray dried, and the like), solution, emulsion, suspension, and the like. The reactants can be readily lyophilized or spray dried using methods and equipment that are known to those having ordinary skill in the art. For example, the protein solution can be frozen at −80° C. in small aliquots, then added to a pre-chilled lyophilization chamber, followed by the application of a vacuum.

[0319] For improved mixing efficiency when an aqueous co-solvent system is used, the TdT, and co-substrate may be added and mixed into the aqueous phase first. The substrate may be added and mixed in, followed by the organic phase or the substrate may be dissolved in the organic phase and mixed in. Alternatively, the substrate may be premixed in the organic phase, prior to addition to the aqueous phase.

[0320] The processes of the present invention are generally allowed to proceed until further conversion of substrate to product does not change significantly with reaction time (e.g., less than 10% of substrate being converted, or less than 5% of substrate being converted). In some embodiments, the reaction is allowed to proceed until there is complete or near complete conversion of substrate to product. Transformation of substrate to product can be monitored using known methods by detecting substrate and/or product, with or without derivatization. Suitable analytical methods include gas chromatography, HPLC, MS, and the like. In some embodiments, after suitable conversion to product, the reactants are separated from the oligo acceptor substrate extension product and additional reactants are added to the oligo acceptor substrate extension product to further extend the growing polynucleotide chain. The processes of the present invention may be used to iteratively extend the oligo acceptor extension product until a polynucleotide of a defined sequence and length is synthesized.

[0321] Any of the processes disclosed herein using the engineered polypeptides for the preparation of products can be carried out under a range of suitable reaction conditions, including but not limited to ranges of substrates, temperature, pH, solvent system, substrate loading, polypeptide loading, cofactor loading, and reaction time. In one example, the suitable reaction conditions comprise: (a) oligo acceptor substrate loading of about 0.1-5000 μM of substrate compound; (b) NTP-3′-O-RBG substrate or NTP loading of about 1-10000 μM of substrate compound; (c) of about 0.01 g/L to 5 g/L engineered polypeptide; (d) 100 to 5000 μM cobalt (II) chloride; (e) 5 to 100 mM triethanolamine buffer; (f) 0.05 to 10 μM pyrophosphatase; (g) pH at 5-9; and (h) temperature of about 15° C. to 70° C. In some embodiments, the suitable reaction conditions comprise: (a) oligo acceptor substrate loading of about 400 μM of substrate compound; (b) NTP-3′-O-RBG or NTP substrate loading of about 800 μM of substrate compound; (c) of about 0.06 g/L engineered polypeptide; (d) 600 μM cobalt (II) chloride; (e) 100 mM triethanolamine buffer; (f) 5 μM pyrophosphatase; (g) pH at 7.8; and (h) temperature of about 50° C. In some embodiments, the enzyme loading is between 1-30% w/w. In some embodiments, additional reaction components or additional techniques carried out to supplement the reaction conditions. These can include taking measures to stabilize or prevent inactivation of the enzyme, reduce product inhibition, shift reaction equilibrium to formation of the desired product.

[0322] In some embodiments, the present disclosure provides an engineered TdT, wherein said engineered TdT has improved activity on NTP-3′-RBGs or modified NTPs, such that NTP-3′-RBGs are incorporated with equivalent efficiency to native NTPs, as compared to another wild-type or engineered TdT. In some embodiments, the engineered TdT with improved activity on dNTP-3′-O—PO₃, such that dNTP-3′-O—PO₃ is incorporated with equivalent efficiency to native dNTPs, is an engineered TdT polypeptide comprising an amino acid sequence having at least 80%, 85%, 86%, 87%, 88%, 89%, 90%, 91%, 92%, 93%, 94%, 95%, 96%, 97%, 98%, 99% or more identity to SEQ ID NOs: 2, 8, 16, 24, 36, 268, 648, 660, 882, 1100, 1336, 1348, 1596, 1654, 1830, 1950, 2008, 2254, 2514, 2524, 2638, 2804, 2812, 2956, 3174, 3222, 3670, 3674, 3796, 3870, 3918, 4266, 4442, 4654, 4850, 4856, 4904, 5002, 5028, 5192 and/or 5246.

[0323] Methods of Using Engineered TdTs for Template-Independent Oligonucleotide Synthesis

[0324] As described in the above embodiments, modifications of an engineered TdT allow for improved oligonucleotide (with either a phosphodiester or phosphorothioate linkage) and 3′O-blocked NTP (either with a triphosphate or an alpha-thio triphosphate) acceptance, which enable template-independent oligonucleotide synthesis. While these embodiments have several advantages over phosphoramidite chemistry, a preferred embodiment, described herein, dramatically reduces the amount of solid support and organic solvent used in the method, furthering enabling the production of high volumes of single stranded oligonucleotides necessary for siRNA therapeutics applications.

[0325] Traditionally, methods of oligonucleotide synthesis, including both phosphoramidite chemistry and newer methods of template-independent enzymatic synthesis, have relied upon immobilization of the growing oligonucleotide chain on a support, such as a solid support or a solution-based support. While this method allows addition and purification steps to proceed, a large volume of solid support is required and requires concomitant high volumes of NTPs and other reagents to drive the synthesis reaction. These methods generate substantial waste and are not feasible for the industrial scale production of kilograms of oligonucleotide necessary for siRNA therapeutics.

[0326] In some embodiments, the present disclosure provides a novel method of oligonucleotide synthesis wherein the engineered TdT or a template-independent polymerase is immobilized. Although enzyme immobilization is known in the art, template-independent oligonucleotide synthesis using an immobilized TdT or template-independent polymerase for iterative rounds of nucleotide addition required for oligonucleotide synthesis has not been reported. The described novel method includes various embodiments that overcome process challenges inherent in such a method.

[0327] In some embodiments, the immobilized TdT or template-independent polymerase is an engineered TdT, described above, comprising greater than 60% sequence identity to the even-numbered sequences of SEQ ID NOs: 4-1960, 2004-3920, 4048-5466, and 5476 and one or more substitutions or substitution sets in the amino acid sequence of the engineered TdT, as compared to a reference sequence. In some embodiments, the immobilized TdT or template-independent polymerase is another wild-type or engineered polymerase. Any suitable enzyme having template-independent polymerase activity may be used in these methods.

[0328] In one embodiment, the present disclosure provides a method for template-independent synthesis of an oligonucleotide, the method comprising: (a) providing at least one TdT or template-independent polymerase; (b) providing at least one oligo acceptor substrate, wherein the oligo acceptor substrate comprises a 3′-OH or equivalent; and (c) contacting the oligo acceptor substrate, the TdT or template-independent polymerase, and a nucleotide triphosphate, a modified nucleotide triphosphate, or a NTP-3′-O-RBG under conditions sufficient for the addition of the nucleotide, modified nucleotide, or nucleotide-3′-O-RBG to the 3′ end. In some embodiments, step (c) optionally includes contacting the oligo acceptor substrate, the TdT or template-independent polymerase, and a nucleotide triphosphate, a modified nucleotide triphosphate, or NTP-3′-O-RBG with a phosphatase, such as an inorganic pyrophosphatase to convert pyrophosphate to inorganic phosphate. In another embodiment, the method further comprises (d) deblocking the oligonucleotide formed in step (c) at the protected 3-O-position of the oligonucleotide product. In some embodiments, the method comprises (e) deactivating unreacted nucleotide triphosphates, modified nucleotide triphosphates, or NTP-3′-O-RBGs. In some embodiments, step (d) deblocking the oligonucleotide formed in step (c) at the protected 3-O-position of the nucleotide-3′-O-RBG and step (e) deactivating unreacted nucleotide triphosphates, modified nucleotide triphosphates, or NTP-3′-O-RBGs occur simultaneously. In some embodiments, step (d) deblocking the oligonucleotide formed in step (c) at the protected 3-O-position of the nucleotide-3′-O-RBG and step (e) deactivating unreacted nucleotide triphosphates, modified nucleotide triphosphates, or NTP-3′-O-RBGs occur simultaneously, wherein the NTP-3′-O-RBG comprises a 3′ phosphate and a phosphatase is used to deblock the nucelotide-3′-O-RBG while simultaneously deactivating unreacted NTP-3′-O-RBGs by removing the 5′ phosphates to leave nucleosides. In some embodiments, the method comprises an optional step (f) of removing excess nucleoside and/or excess inorganic phosphate and/or pyrophosphate from the reaction. In some embodiments, steps (a)-(c) or (a)-(d) or (a)-(e) or (a)-(f) are repeated until a desired oligonucleotide sequence is obtained. In another embodiment, the method further comprises (g) cleaving or releasing the growing or completed oligonucleotide chain from the oligo acceptor substrate.

[0329] In some embodiments of the described method for template-independent synthesis of an oligonucleotide, the oligo acceptor substrate and growing oligonucleotide chain are immobilized on a solid support. In some embodiments of the described method for template-independent synthesis of an oligonucleotide, the TdT or template-independent polymerase, oligo acceptor substrate and growing oligonucleotide chain are all in solution phase. The oligo substrate and growing oligo chain can be optionally substituted with a soluble tag that aids extended oligo product isolation and purification. In some embodiments of the described method for template-independent synthesis of an oligonucleotide, the TdT or template-independent polymerase is immobilized. In some embodiments of the described method for template-independent synthesis of an oligonucleotide, the TdT or template-independent polymerase is simultaneously purifed and immobilized on a solid support. In some embodiments, the immobilized TdT or template-independent polymerase is an engineered TdT with greater than 60% sequence identity to SEQ ID NOs: 4-1960, 2004-3920, 4048-5466, and 5476 and one or more substitutions or substitution sets in the amino acid sequence of the engineered TdT. In some embodiments, the immobilized TdT or template-independent polymerase is immobilized on a solid support.

[0330] In some embodiments, the engineered TdT polypeptides can be provided on a solid support, such as a membrane, resin, solid carrier, or other solid phase material. A solid support can be composed of organic polymers such as polystyrene, polyethylene, polypropylene, polyfluoroethylene, polyethyleneoxy, and polyacrylamide, as well as co-polymers and grafts thereof. A solid support can also be inorganic, such as glass, silica, controlled pore glass (CPG), reverse phase silica or metal, such as gold or platinum. The configuration of a solid support can be in the form of beads, spheres, particles, granules, a gel, a membrane or a surface. Surfaces can be planar, substantially planar, or non-planar. Solid supports can be porous or non-porous, and can have swelling or non-swelling characteristics. A solid support can be configured in the form of a well, depression, or other container, vessel, feature, or location.

[0331] In some embodiments, the engineered TdT polypeptides of the present invention can be immobilized on a solid support such that they retain their improved activity, and/or other improved properties relative to the reference polypeptide of SEQ ID NOs: 2, 8, 16, 24, 36, 268, 648, 660, 882, 1100, 1336, 1348, 1596, 1654, 1830, 1950, 2008, 2254, 2514, 2524, 2638, 2804, 2812, 2956, 3174, 3222, 3670, 3674, 3796, 3870, 3918, 4266, 4442, 4654, 4850, 4856, 4904, 5002, 5028, 5192 and/or 5246. In such embodiments, the immobilized polypeptides can facilitate the biocatalytic conversion of the substrate compounds or other suitable substrates to the product and after the reaction is complete are easily retained (e.g., by retaining beads on which polypeptide is immobilized) and then reused or recycled in subsequent reactions. Such immobilized enzyme processes allow for further efficiency and cost reduction. Accordingly, it is further contemplated that any of the methods of using the TdT polypeptides of the present invention can be carried out using the TdT polypeptides bound or immobilized on a solid support.

[0332] Methods of enzyme immobilization are well-known in the art. The engineered polypeptides can be bound non-covalently or covalently. Various methods for conjugation and immobilization of enzymes to solid supports (e.g., resins, membranes, beads, glass, etc.) are well known in the art (See e.g., Yi et al., Proc. Biochem., 42(5): 895-898 [2007]; Martin et al., Appl. Microbiol. Biotechnol., 76(4): 843-851 [2007]; Koszelewski et al., J. Mol. Cat. B: Enzymatic, 63: 39-44 [2010]; Truppo et al., Org. Proc. Res. Dev., published online: dx.doi.org/10.1021/op200157c; Hermanson, Bioconjugate Techniques, 2^{nd} ed., Academic Press, Cambridge, MA [2008]; Mateo et al., Biotechnol. Prog., 18(3):629-34 [2002]; and “Bioconjugation Protocols: Strategies and Methods,” In Methods in Molecular Biology, Niemeyer (ed.), Humana Press, New York, NY [2004]; the disclosures of each which are incorporated by reference herein). Solid supports useful for immobilizing the engineered TdT of the present invention include but are not limited to beads or resins comprising polymethacrylate with epoxide functional groups, polymethacrylate with amino epoxide functional groups, styrene/DVB copolymer or polymethacrylate with octadecyl functional groups. Exemplary solid supports useful for immobilizing the engineered TdT polypeptides of the present invention include, but are not limited to, EnginZyme (including, EziG-1, EziG-1, and EziG-3), chitosan beads, Eupergit C, and SEPABEADs (Mitsubishi) (including EC-EP, EC-HFA/S, EXA252, EXE119 and EXE120).

[0333] In some embodiments of the described method for template-independent synthesis of an oligonucleotide, the TdT or template-independent polymerase is immobilized, and the method comprises an aqueous liquid phase. In some embodiments, the method for template-independent synthesis of an oligonucleotide comprising an aqueous phase and an immobilized TdT or template-independent polymerase further comprises a column solid support. In some embodiments, the method for template-independent synthesis of an oligonucleotide comprising an aqueous phase and an immobilized TdT or template-independent polymerase further comprises a batch method with a solid support. In some embodiments, the oligo acceptor substrate and/or growing oligonucleotide chain are provided in an aqueous phase. In some embodiments, the nucleotide triphosphate, the modified nucleotide triphosphate, or the NTP-3′-O-RBG are provided in an aqueous phase. In some embodiments, the method further comprises removing unreacted nucleotide triphosphates, modified nucleotide triphosphates, or NTP-3′-O-RBGs from the oligo acceptor substrate and/or growing oligonucleotide chain. In some embodiments of the described method for template-independent synthesis of an oligonucleotide, the oligo acceptor substrate and oligonucleotide are immobilized. In some embodiments, neither the oligo acceptor substrate nor the TdT of template-independent polymerase are immobilized.

[0334] In some further embodiments, the method for template-independent synthesis of an oligonucleotide comprising an immobilized TdT or template-independent polymerase and an aqueous liquid phase further comprises the steps of (a) providing at least one TdT or template-independent polymerase on a solid support; (b) providing at least one oligo acceptor substrate in an aqueous phase, wherein the oligo acceptor substrate comprises a 3′-OH or equivalent; and (c) contacting the oligo acceptor substrate, the TdT or template-independent polymerase, and a nucleotide triphosphate, a modified nucleotide triphosphate, or NTP-3′-O-RBG under aqueous conditions sufficient for the addition of the nucleotide, modified nucleotide, or nucleotide-3′-O-RBG to the 3′ end. In some embodiments, step (c) optionally includes contacting the oligo acceptor substrate, the TdT or template-independent polymerase, and a nucleotide triphosphate, a modified nucleotide triphosphate, or NTP-3′-O-RBG with a phosphatase, such as an inorganic pyrophosphatase to convert pyrophosphate to inorganic phosphate. In another embodiment, the method further comprises (d) deblocking the oligonucleotide formed in step (c) at the protected 3-O-position of the oligonucleotide product. In another embodiment, the method further comprises (e) deactivating the unreacted nucleotide triphosphates, modified nucleotide triphosphates, or NTP-3′-O-RBGs. In some embodiments, step (d) deblocking the oligonucleotide formed in step (c) at the protected 3-O-position of the nucleotide-3′-O-RBG and step (e) deactivating unreacted nucleotide triphosphates, modified nucleotide triphosphates, or NTP-3′-O-RBGs occur simultaneously. In some embodiments, step (d) deblocking the oligonucleotide formed in step (c) at the protected 3-O-position of the nucleotide-3′-O-RBG and step (e) deactivating unreacted nucleotide triphosphates, modified nucleotide triphosphates, or NTP-3′-O-RBGs occur simultaneously, wherein the NTP-3′-O-RBG comprises a 3′ phosphate and a phosphatase is used to deblock the nucleotide-3′-O-RBG while simultaneously deactivating unreacted NTP-3′-O-RBGs by removing the 5′ phosphates to leave nucleosides. In some embodiments, the method comprises an optional step (f) of removing excess nucleoside and/or excess inorganic phosphate and/or pyrophosphate from the reaction. In some embodiments, steps (a)-(c) or (a)-(d) or (a)-(e) or (a)-(f) are repeated until a desired oligonucleotide sequence is obtained. In another embodiment, the method further comprises (g) cleaving or releasing the growing or completed oligonucleotide chain from the oligo acceptor substrate once a desired oligonucleotide sequence is obtained. In some embodiments, any of steps (a)-(g) are completed on a solid support. In some embodiments the solid support is a column. In some embodiments, any of steps (a)-(g) are completed in an aqueous phase passing over one or a series of in line columns. In some embodiments, the solid support is used in a batch method. In some embodiments, any of the above-described methods comprise synthesis of an RNA oligonucleotide or a modified RNA oligonucleotide. In some embodiments, any of the above-described methods comprise synthesis of a DNA oligonucleotide. In any of the embodiments described herein, the aqueous phase may comprise an aqueous co-solvent or aqueous co-solvent system, as further described herein.

[0335] In some further embodiments, the method for template-independent synthesis of an oligonucleotide comprising an immobilized TdT or template-independent polymerase and an aqueous liquid phase further comprises the steps of (a) providing at least one TdT on a solid support, wherein said TdT comprises a polypeptide sequence comprising at least 60% identity to any of the even-numbered sequences of SEQ ID NOs: 4-1960, 2004-3920, 4048-5466, and 5476 and at least one substitution or substitution set in said polypeptide sequence as compared to a reference sequence of any of the even-numbered sequences of SEQ ID NOs: 4-1960, 2004-3920, 4048-5466, and 5476; (b) providing at least one oligo acceptor substrate in an aqueous phase, wherein the oligo acceptor substrate comprises a 3′-OH or equivalent; and (c) contacting the oligo acceptor substrate, the TdT or template-independent polymerase, and a nucleotide triphosphate, a modified nucleotide triphosphate, or NTP-3′-O-RBG under aqueous conditions sufficient for the addition of the nucleotide, modified nucleotide, or nucleotide-3′-O-RBG to the 3′ end. In some embodiments, step (c) optionally includes contacting the oligo acceptor substrate, the TdT or template-independent polymerase, and a nucleotide triphosphate, a modified nucleotide triphosphate, or NTP-3′-O-RBG with a phosphatase, such as a pyrophosphatase to convert pyrophosphate to inorganic phosphate. In another embodiment, the method further comprises (d) deblocking the oligonucleotide formed in step (c) at the protected 3-O-position of the oligonucleotide product. In another embodiment, the method further comprises (e) deactivating the unreacted nucleotide triphosphates, modified nucleotide triphosphates, or NTP-3′-O-RBGs. In some embodiments, step (d) deblocking the oligonucleotide formed in step (c) at the protected 3-O-position of the oligonucleotide product and step (e) deactivating unreacted nucleotide triphosphates, modified nucleotide triphosphates, or NTP-3′-O-RBGs occur simultaneously. In some embodiments, step (d) deblocking the oligonucleotide formed in step (c) at the protected 3-O-position of the oligonucleotide product and step (e) deactivating unreacted nucleotide triphosphates, modified nucleotide triphosphates, or NTP-3′-O-RBGs occur simultaneously, wherein the NTP-3′-O-RBG comprises a 3′ phosphate and a phosphatase is used to deblock the nucleotide-3′-O-RBG while simultaneously deactivating unreacted NTP-3′-O-RBGs by removing the 5′ phosphates to leave nucleosides. In some embodiments, the method comprises an optional step (f) of removing excess nucleoside and/or excess inorganic phosphate and/or pyrophosphate from the reaction. In some embodiments, steps (a)-(c) or (a)-(d) or (a)-(e) or (a)-(f) are repeated until a desired oligonucleotide sequence is obtained. In another embodiment, the method further comprises (g) cleaving or releasing the growing or completed oligonucleotide chain from the oligo acceptor substrate once a desired nucleotide sequence is obtained. In some embodiments, any of steps (a)-(g) are completed on a solid support. In some embodiments the solid support is a column. In some embodiments, any of steps (a)-(g) are completed in an aqueous phase passing over one or a series of in line columns. In some embodiments, the solid support is used in a batch method. In some embodiments, any of the above-described methods comprise synthesis of an RNA oligonucleotide or modified RNA oligonucleotide. In some embodiments, any of the above-described methods comprise synthesis of a DNA oligonucleotide.

[0336] In some further embodiments, the method for template-independent synthesis of an oligonucleotide comprises a nucleotide triphosphate, a modified nucleotide triphosphate, or an NTP-3′-O-RBG. The nucleotide triphosphate may comprise a deoxyribonucleotide triphosphate, a dideoxy ribonucleotide triphosphate, a ribonucleotide triphosphate, or any other modified nucleotide triphosphate, as is known in the art. Modifications may be at the 3′ position, as is in the case of NTP-3′-O-RBG, or at the 2′ position. Modifications may be at other positions of the sugar or to the base. Modifications may also be present as substitutions of one or more of the phosphate groups of the nucleotide triphosphate and may be incorporated into the phospho backbone of the growing oligonucleotide change. Although specific examples of suitable modifications are provided herein, any modification to the nucleotide triphosphate may be used in the described methods. Various modifications may confer various desired properties to the oligonucleotide chain. For example, the use of phosphorothiate linkages and 2′ modifications in RNA synthesis for RNA therapeutics protects the RNA strand from degradation in the body and extends the half-life of the therapeutic. Various photolabile or cleavable tags may also be present as modifications and may aid in visualization or purification of the oligonucleotide during the synthesis method.

[0337] In some embodiments, the method for template-independent synthesis of an oligonucleotide comprises a nucleotide triphosphate, a modified nucleotide triphosphate, or an NTP-3′-O-RBG comprising a 3′ modification. In some embodiments, the 3′ modification comprises —NH₂, —NO₂, —(CH₂)₂-CN, or —PO₃. In some embodiments, the 3′ modification comprises carbonitriles, phosphates, carbonates, carbamates, esters, ethers, borates, nitrates, sugars, phosphoramidates, phenylsulfenates, and sulfates,

[0338] In some embodiments, the method for template-independent synthesis of an oligonucleotide comprises a nucleotide triphosphate, a modified nucleotide triphosphate, or an NTP-3′-O-RBG comprising a 2′ modification. In some embodiments, the 2′ modification comprises a 2′-F or 2′-O-alkyl. In some further embodiments, the 2′-F modified nucleotide comprises 2′-fluoro-2′-deoxyadenosine-5′-triphosphate, 2′-fluoro-2′-deoxycytidine-5′-triphosphate, 2′-fluoro-2′-deoxyguanosine-5′-triphosphate, and 2′-fluoro-2′-deoxyuridine-5′-triphosphate. In some further embodiments, the 2′-O-alkyl modified nucleotide comprises 2′-O-methyladenosine-5′-triphosphate, 2′-O-methylcytidine-5′-triphosphate, 2′-O-methylguanosine-5′-triphosphate, 2′-O-methyluridine-5′-triphosphate, and 2′-O-methylinosine-5′-triphosphate. In yet some further embodiments, any of the 2′-F modified nucleotides or 2′-O-alkyl modified nucleotides further comprise a 3′-O-removable blocking group. In yet some further embodiments, any of the 2′-F modified nucleotide triphosphates or 2′-O-alkyl modified nucleotide triphosphates further comprise a 3′-O-phosphate removable blocking group. In some embodiments, the modified nucleotide triphosphate comprises or further comprises a phosphorothioate group at the 5′ alpha position.

[0339] In some embodiments, the method for template-independent synthesis of an oligonucleotide comprises optionally contacting the oligo acceptor substrate, the TdT or template-independent polymerase, and a nucleotide triphosphate, a modified nucleotide triphosphate, or NTP-3′-O-RBG with a phosphatase to convert pyrophosphate to inorganic phosphate. In some embodiments, the production of inorganic phosphate from pyrophosphate drives the extension reaction toward the N+1 product. In some embodiments, the phosphatase is an inorganic pyrophosphatase. In some embodiments, the inorganic pyrophosphatase is derived from Thermocrinis ruber, Aquifex pyrophilus, Thermus oshimai, Sulfolobus sp. A20, Geobacillus zalihae, Bacillus thermozeamaize, or Bacillus smithii. In some embodiments, the inorganic pyrophosphatase comprises a sequence selected from SEQ ID NOs: 3936, 3938, 3940, 3942, 3944, 3946, or 3948. In some embodiments, the inorganic pyrophosphatase may be immobilized on a solid support.

[0340] In some embodiments, the method for template-independent synthesis of an oligonucleotide comprises a of step deblocking the oligonucleotide at the protected 3′-O-position of the oligonucleotide product and/or a step of deactivating unreacted nucleotide triphosphates, modified nucleotide triphosphates, or NTP-3′-O-RBGs to nucleosides using a phosphatase. In some embodiments, the phosphatase is an alkaline phosphatase. In some embodiments, the alkaline phosphatase is derived from Pyrococcus furiosus, Thermotoga maritima, Thermotoga sp. 50_64, Pseudothermotoga lettingae, Thermotoga neapolitana, Thermoflexibacter ruber, or Bacillus licheniformis. In some embodiments, the alkaline phosphatase comprises a sequence selected from SEQ ID NOs: 3922, 3924, 3926, 3928, 3930, 3932, or 3934. In some embodiments, the alkaline phosphatase may be immobilized on a solid support.

[0341] In some embodiments, the method for template-independent synthesis of an oligonucleotide comprises an optional step of removing excess inorganic phosphate or nucleoside from the reaction.

[0342] In some embodiments, the method for template-independent synthesis of an oligonucleotide comprises an optional step of cleaving or releasing the growing or completed oligonucleotide chain from the oligo acceptor substrate. In some embodiments, an exonuclease is used to cleave or release the growing or completed oligonucleotide chain from the oligo acceptor substrate.

[0343] In further embodiments, any of the above-described processes for the conversion of one or more substrate compounds to product compound can further comprise one or more steps selected from: extraction; isolation; purification; and crystallization of product compound. As is known to those skilled in the art, acidic compounds such as oligonucleotides, NTPs, modified NTPs, and NTP-3′-O-RBGs may exist in various salt forms that can be used interchangeably in the methods described herein. All such forms are specifically envisaged for use in the methods described herein. Methods, techniques, and protocols for extracting, isolating, purifying, and/or crystallizing the product from biocatalytic reaction mixtures produced by the above disclosed processes are known to the ordinary artisan and/or accessed through routine experimentation. Additionally, illustrative methods are provided in the Examples below.

[0344] Various features and embodiments of the invention are illustrated in the following representative examples, which are intended to be illustrative, and not limiting.

### EXAMPLES

[0345] The following Examples, including experiments and results achieved, are provided for illustrative purposes only and are not to be construed as limiting the present invention. Indeed, there are various suitable sources for many of the reagents and equipment described below. It is not intended that the present invention be limited to any particular source for any reagent or equipment item.

[0346] In the experimental disclosure below, the following abbreviations apply: M (molar); mM (millimolar), μM and uM (micromolar); nM (nanomolar); mol (moles); gm and g (gram); mg (milligrams); ug and μg (micrograms); L and 1 (liter); ml and mL (milliliter); cm (centimeters); mm (millimeters); μM and μη(micrometers); sec. (seconds); min(s) (minute(s)); h(s) and hr(s) (hour(s)); U (units); MW (molecular weight); rpm (rotations per minute); psi and PSI (pounds per square inch); ° C. (degrees Celsius); RT and rt (room temperature); CV (coefficient of variability); CAM and cam (chloramphenicol); PMBS (polymyxin B sulfate); IPTG (isopropyl β-D-1-thiogalactopyranoside); LB (lysogeny broth); TB (terrific broth); SFP (shake flask powder); CDS (coding sequence); DNA (deoxyribonucleic acid); RNA (ribonucleic acid); nt (nucleotide; polynucleotide); aa (amino acid; polypeptide); E. coli W3110 (commonly used laboratory E. coli strain, available from the Coli Genetic Stock Center [CGSC], New Haven, CT); HTP (high throughput); HPLC (high pressure liquid chromatography); HPLC-UV (HPLC-Ultraviolet Visible Detector); 1H NMR (proton nuclear magnetic resonance spectroscopy); FIOPC (fold improvements over positive control); Sigma and Sigma-Aldrich (Sigma-Aldrich, St. Louis, MO; Difco (Difco Laboratories, BD Diagnostic Systems, Detroit, MI); Microfluidics (Microfluidics, Westwood, MA); Life Technologies (Life Technologies, a part of Fisher Scientific, Waltham, MA); Amresco (Amresco, LLC, Solon, OH); Carbosynth (Carbosynth, Ltd., Berkshire, UK); Varian (Varian Medical Systems, Palo Alto, CA); Agilent (Agilent Technologies, Inc., Santa Clara, CA); Infors (Infors USA Inc., Annapolis Junction, MD); and Thermotron (Thermotron, Inc., Holland, MI).

[0347] Abbreviations for Modified Nucleotides

“*”: “There is a phosphorothioate bond between these base pairs.”,
‘5′-6-FAM-T’: “n is a 5′-6-carboxyfluorescein-thymidine”,
‘ddG’: “n is a 2′,3′-dideoxyguanosine”,
“(2′dF)A”: “n is a 2′-deoxyfluoroadenosine”,
“(2′dF)C”: “n is a 2′-deoxyfluorocytidine”,
“(2′dF)G”: “n is a 2′-deoxyfluoroguanosine”,
“(2′dF)U”: “n is a 2′-deoxyfluorouridine”,
“(2′dF)A-3′P”: “n is a 2′-deoxyfluoroadenosine with a 3′-PO₄ blocking
group”,
“(2′dF)C-3′P”: “n is a 2′-deoxyfluorocytidine with a 3′-PO₄ blocking
groupp”,
“(2′dF)G-3′P”: “n is a 2′-deoxyfluoroguanosine with a 3′-PO₄ blocking
group”,
“(2′dF)U-3′P”: “n is a 2′-O-methyluridine with a 3′-PO₄ blocking group”,
‘mA’: “n is a 2′-O-methyladenosine”,
‘mC’: “n is a 2′-O-methylcytidine”,
‘mG’: “n is a 2′-O-methylguanosine”,
‘mU’: “n is a 2′-O-methyluridine”,
“mA-3′P”: “n is a 2′-O-methyladenosine with a 3′-PO₄ blocking group”,
“mC-3′P”: “n is a 2′-O-methylcytidine with a 3′-PO₄ blocking group”,
“mG-3′P”: “n is a 2′-O-methylguanosine with a 3′-PO₄ blocking group”,
“mU-3′P”: “n is a 2′-O-methyluridine with a 3′-PO₄ blocking group”,
‘rA’: “n is an adenosine ribonucleotide”,
‘rG’: “n is a guanosine ribonucleotide”,
‘rG’: “n is a guanosine ribonucleotide”,
‘rU’: “n is a uridine ribonucleotide”
‘(MOE)A’: “n is a 2′-O-(2-methoxyethyl)adenosine”,
‘(MOE)C’: “n is a 2′-O-(2-methoxyethyl)cytidine”,
‘(MOE)G’: “n is a 2′-O-(2-methoxyethyl)guanosine”,
‘(MOE)U’: “n is a 2′-O-(2-methoxyethyl)uridine”,
‘5′-BiosG-T’: “n is a thymidine with a 5′-biotin modifition”,
‘(iFluorT)’: “n is a thymidine with a 5′-fluroscein modification”,

### Example 1

### Terminal Deoxynucleotidyl Transferase (TdT) Gene Acquisition and Construction of Expression Vectors

[0348] The wild-type (WT) terminal deoxynucleotidyl transferase (TdT) enzyme (SEQ ID NO:2) is a predicted splice variant encoded by the genome of species Monodelphis domestica. A synthetic gene (SEQ ID NO:1 encoding an N-terminal 6-histidine tagged version of the WT TdT was designed with codon optimization for E. coli expression, synthesized, and subcloned into the E. coli expression vector pCK100900i (See e.g., U.S. Pat. No. 7,629,157 and US Pat. Appln. Publn. 2016/0244787, both of which are hereby incorporated by reference). This plasmid construct was transformed into an E. coli strain derived from W31 10. Directed evolution techniques generally known by those skilled in the art were used to generate libraries of gene variants from these plasmids (See e.g., U.S. Pat. No. 8,383,346 and WO 2010/144103, both of which are hereby incorporated by reference). The substitutions in the enzyme variants described herein are indicated with reference to the N-terminal 6-histidine tagged version of the WT TdT enzyme (i.e., SEQ ID NO: 2) or variants thereof, as indicated.

### Example 2

### TdT Expression and Lysate Processing for High Throughput (HTP) Screening High Throughput (HTP) Growth of TdT Enzyme and Variants

[0349] Transformed E. coli cells were selected by plating onto LB agar plates containing 1% glucose and 30 μg/mL chloramphenicol. After overnight incubation at 37° C., colonies were placed into the wells of 96-well shallow flat bottom NUNC™ (Thermo-Scientific) plates filled with 180 μl/well LB medium supplemented with 1% glucose and 30 μg/mL chloramphenicol. The cultures were allowed to grow overnight for 18-20 hours in a shaker (200 rpm, 30° C., and 85% relative humidity; Kuhner). Overnight growth samples (20 μL) were transferred into Costar 96-well deep plates filled with 380 μL of Terrific Broth supplemented with 30 μg/mL chloramphenicol. The plates were incubated for 120 minutes in a shaker (250 rpm, 30 C, and 85% relative humidity; Kuhner) until the ODoo reached between 0.4-0.8. The cells were then induced with 40 μL of 10 mM IPTG in sterile water and incubated overnight for 18-20 hours in a shaker (250 rpm, 30 C, and 85% relative humidity; Kuhner). The cells were pelleted (4,000 rpm for 20 min), the supernatants were discarded, and the cells were frozen at −80° C. prior to analysis.

[0350] Method 1: Lysis of HTP Cell Pellets with Lysozyme (Examples 7-12)

[0351] For lysis, 400 μL lysis buffer containing 50 mM MOPS buffer, pH 7.4, and 0.2 g/L lysozyme were added to the cell pellet in each well. The cells were lysed at room temperature for 2 hours with shaking on a bench top shaker. The plate was then centrifuged for 15 min at 4,000 rpm and 4° C. The clear supernatants were then used in biocatalytic reactions to determine their activity levels.

[0352] Method 2: Thermal lysis of HTP Cell Pellets with Lysozyme (Examples 13-25)

[0353] For lysis, 400 μL lysis buffer containing 50 mM triethanolamine buffer, pH 7.5, and 0.1 g/L lysozyme were added to the cell pellet in each well. The cells were shaken vigorously at room temperature for 5 minutes on a bench top shaker. A 100-uL aliquot of the re-suspended cells was transferred to a 96-well format 200 μL BioRad PCR plate, then briefly spun-down prior to 1 h heat treatment at the temperature indicated, typically 48-60° C. Following heat-treatment, the cell debris was pelleted by centrifugation (4,000 rpm at 4° C. for 10 min), and clear supernatants were then used in biocatalytic reactions to determine their activity levels.

### Example 3

### Shake Flask Expression and Purification of TdT Shake Flask Expression

[0354] Selected HTP cultures grown as described above were plated onto LB agar plates with 1% glucose and 30 μg/mL chloramphenicol and grown overnight at 37° C. A single colony from each culture was transferred to 5 mL of LB broth with 1% glucose and 30 μg/mL chloramphenicol. The cultures were grown for 20 h at 30° C., 250 rpm, and subcultured at a dilution of approximately 1:50 into 250 mL of Terrific Broth with 30 μg/mL of chloramphenicol, to a final OD₆₀₀ of about 0.05. The cultures were incubated for approximately 195 min at 30° C., 250 rpm, to an OD₆₀₀ of about 0.6, and then induced with the addition of IPTG at a final concentration of 1 mM. The induced cultures were incubated for 20 h at 30° C., 250 rpm. Following this incubation period, the cultures were centrifuged at 4,000 rpm for 10 min. The culture supernatant was discarded, and the pellets were resuspended in 35 mL of 20 mM triethanolamine, pH 7.5. This cell suspension was chilled in an ice bath and lysed using a Microfluidizer cell disruptor (Microfluidics M-110L). The crude lysate was pelleted by centrifugation (11,000 rpm for 60 min at 4° C.), and the supernatant was then filtered through a 0.2 pm PES membrane to further clarify the lysate.

[0355] Purification of TdT from Shake Flask Lysates

[0356] TdT lysates were supplemented with 1/10^{th} volume of SF elution buffer (50 mM Tris-HCl, 500 mM NaCl, 250 mM imidazole, 0.02% v/v Triton X-100 reagent) per well. Lysates were then purified using an AKTA Start purification system and a 5 mL HisTrap FF column (GE Healthcare) using the AC Step HiF setting (the run parameters are provided below). The SF wash buffer comprised 50 mM Tris-HCl, 300 mM NaCl, 20 mM imidazole, 0.02% v/v Triton X-100 reagent.

TABLE 3.1
Purification Parameters

| Parameter | Volume | |
|---|---|---|
| Column volume | 5 | mL |
| Flow rate | 8 | mL/min |
| Pressure limit | 0.3 | MPa |
| Sample volume | 35 | mL |
| Equilibration volume | 5 column volume (CV) = 25 mL | |
| Wash Unbound volume | 20 CV = 100 mLs | |
| Elution | Isocratic (step) | |
| Elution volume | 5 CV = 25 mLs | |
| Fraction volume | 1.5 | mLs |

| | |
|---|---|
| RE-equilibration volume | 5 CV = 25 mLs |

Elution fractions containing protein were identified by UV absorption (A280) and pooled, then dialyzed overnight in dialysis buffer (20 mM Tris-HCl, pH 7.4, 100 mM KCl, 0.1 mM EDTA, and 50% glycerol) in a 3.5K Slide-A-Lyzer™ dialysis cassette (Thermo Fisher) for buffer exchange. TdT concentrations in the preparations were measured by absorption at 280 nm.

### Example 4

### Capillary Electrophoresis (CE) Analysis of Oligonucleotides

### Sample Preparation for Reaction Analysis Using CE:

[0357] For analysis of the reaction samples, capillary electrophoresis was performed using an ABI 3500 xl Genetic Analyzer (ThermoFisher). Reactions (20 μL) were quenched by the addition of 60 μL of 35 mM aqueous EDTA. Reactions (1 μL) were quenched by the addition of 99 μL of 1 mM aqueous EDTA. Quenched reactions were diluted in water to 1.25 nM oligonuclelotide, and a 2-μL aliquot of this solution was transferred to a new 96-well MicroAmp Optical PCR plate or 384-well MicroAmp Optical PCR plate containing 18 μL Hi-Di™ Formamide (ThermoFisher) containing an appropriate size standard (LIZ or Alexa633). The ABI3500 xl was configured with POP6 polymer, 50 cm capillaries, and a 55° C. oven temperature. Pre-run settings were 18 KV for 50 sec. Injection was 10 KV for 2 sec, and the run settings were 19 KV for 620 sec. FAM-labeled oligo substrates and products were identified by their sizes relative to the sizing ladder.

### List of Oligonucleotide Substrates and Products

[0358] Oligonucleotide used as substrates and detected as products are listed in Table 4.1 below.

TABLE 4.1
List of substrate and product oligonucleotides

| Structural Description | SEQ ID NO: |
|---|---|
| 5′-6-FAM-T17ATCmC | 1961 |
| 5′-6-FAM-T17AT*mC | 1962 |
| 5′-6-FAM-T17ATC(2′dF)C | 1963 |
| 5′-6-FAM-T12ATCAC*(2′dF)A | 1964 |
| 5′-6-FAM-T12ATCAC*mC | 1965 |
| 5′-6-FAM-T12ATCAC*mA | 1966 |
| 5′-6-FAM-T15AmG*mC | 1967 |
| 5′-6-FAM-T12TATCAC*mC | 1968 |
| 5′-6-FAM-T15AmU*mG | 1969 |
| 5′-6-FAM-T15AmU*mG | 1970 |
| 5′-6-FAM-T14ATCmC | 1971 |
| 5′-6-FAM-T15AT*mG | 1972 |
| 5′-6-FAM-T17mAmUmC | 1973 |
| 5′-6-FAM-T17mUmUmC | 1974 |
| 5′-6-FAM-T17mCmUmG | 1975 |
| 5′-6-FAM-T15AT*mA | 1976 |
| 5′-6-FAM-T15AT*mC | 1977 |
| 5′-6-FAM-T15AT*mU | 1978 |
| T14ATCmC | 1979 |
| 5′-6-FAM-T17ATCmCddG | 1980 |
| 5′-6-FAM-T17AT*mCddG | 1981 |
| 5′-6-FAM-T17ATC(2′dF)CmA | 1982 |
| 5′-6-FAM-T17ATC(2′dF)CddG | 1983 |
| 5′-6-FAM-T12ATCAC*(2′dF)A*rA | 1984 |
| 5′-6-FAM-T12ATCAC*mC*rG | 1985 |
| 5′-6-FAM-T12ATCAC*mA*rG | 1986 |
| 5′-6-FAM-T12ATCAC*mC*rU | 1987 |
| 5′-6-FAM-T15AmG*mC *rG | 1988 |
| 5′-6-FAM-T15AmG*mCmG | 1989 |
| 5′-6-FAM-T12TATCAC*mCmG | 1990 |
| 5′-6-FAM-T15AmU*mGmA | 1991 |
| 5′-6-FAM-T14ATCmC*ddG | 1992 |
| 5′-6-FAM-T15AT*mGmA-3′P | 1993 |
| 5′-6-FAM-T17mAmUmCmA | 1994 |
| 5′-6-FAM-T17mUmUmCmA | 1995 |
| 5′-6-FAM-T17mCmUmGmA | 1996 |
| 5′-6-FAM-T15AT*mAmA-3′P | 1997 |
| 5′-6-FAM-T15AT*mGmC-3′P | 1998 |
| 5′-6-FAM-T15AT*mGmU-3′P | 1999 |
| 5′-6-FAM-T14ATCmCddG | 2000 |
| T14ATCmCddG | 2001 |
| 5′-6-FAM-T15mUmGmA | 2002 |
| 5′-6-FAM-T15mAmU*mG | 3949 |
| 5′-6-FAM-T15mC*mG*mA | 3950 |
| 5′-6-FAM-T17mGmUmC | 3951 |
| 5′-6-FAM-T12mAmUmA | 3952 |
| 5′-6-FAM-T22mAmUmU | 3953 |
| 5′-6-FAM-T27mAmUmG | 3954 |
| 5′-6-FAM-T57mUmUmC | 3955 |
| 5′-6-FAM-T32mAmCmC | 3956 |
| 5′-6-FAM-T37mAmGmC | 3957 |
| 5′-6-FAM-T42mAmAmC | 3958 |
| 5′-6-FAM-T47mGmUmC | 3959 |
| 5′-6-FAM-T52mCmUmC | 3960 |
| 5′-6-FAM-T15mAmU(2′dF)G | 3961 |
| 5′-6-FAM-T15mAmG(MOE)C | 3962 |
| 5′-6-FAM-T15mGmAmC | 3963 |
| 5′-6-FAM-T22*(2′dF)A(2′dF)GmA | 3964 |
| 5′-6-FAM-T22(2′dF)C(2′dF)G(2′dF)A | 3965 |
| 5′-6-FAM-T27(2′dF)GmA(2′dF)U | 3966 |
| 5′-6-FAM-T15mGmAmC | 3967 |
| 5′-6-FAM-T11mCmGmA | 3968 |
| 5′-6-FAM-T11mC*mA*mG | 3969 |
| 5′-6-FAM-T15mA(2′dF)UmC | 3970 |
| 5′-6-FAM-T15mCmUmG | 3971 |
| 5′-6-FAM-T27(2′dF)C*(2′dF)G*(2′dF)A | 3972 |
| 5′-6-FAM-T11mU*(2′dF)A*(2′dF)A | 3973 |
| 5′-6-FAM-T48mG*mA*mC | 3974 |
| 5′-6-FAM-T15mAmCmU | 3975 |
| 5′-6-FAM-T17*(2′dF)A*(2′dF)A(2′dF)G | 3976 |
| 5′-6-FAM-T15mAmU(2′dF)U | 3977 |
| 5′-6-FAM-T15mAmU(2′dF)C | 3978 |
| 5′-BiosG-T3(iFluorT)T9mAmUmA | 3979 |
| 5′-BiosG-T3(iFluorT)T9mAmUmAmA | 3980 |
| 5′-BiosG-T3(iFluorT)T9mAmUmAmAmG | 3981 |
| 5′-BiosG-T3(iFluorT)T9mAmUmAmAmGmA | 3982 |
| 5′-BiosG-T3(iFluorT)T9mAmUmAmAmGmA(2′dF)A | 3983 |
| 5′-BiosG-T13mAmUmA | 3984 |
| 5′-BiosG-T13mAmUmAmA | 3985 |
| 5′-BiosG-T13mAmUmAmAmG | 3986 |
| 5′-BiosG-T13mAmUmAmAmGmA | 3987 |
| 5′-BiosG-T13mAmUmAmAmGmA(2′dF)A | 3988 |
| 5′-6-FAM-T15AT*mUmA-3′P | 3989 |
| 5′-6-FAM-T15AmU*mGmA-3′P | 3990 |
| 5′-6-FAM-T15mUmGmAmA | 3991 |
| 5′-6-FAM-T15AmG*mCmA-3′P | 3992 |
| 5′-6-FAM-T15mAmU*mGmA-3′P | 3993 |
| 5′-6-FAM-T15mC*mG*mAmA-3′P | 3994 |
| 5′-6-FAM-T17mGmUmCmA-3′P | 3995 |
| 5′-6-FAM-T12mAmUmAmA-3′P | 3996 |
| 5′-6-FAM-T17mAmUmCmA-3′P | 3997 |
| 5′-6-FAM-T22mAmUmUmA-3′P | 3998 |
| 5′-6-FAM-T27mAmUmGmA-3′P | 3999 |
| 5′-6-FAM-T57mUmUmCmA-3′P | 4000 |
| 5′-6-FAM-T32mAmCmCmA-3′P | 4001 |
| 5′-6-FAM-T37mAmGmCmA-3′P | 4002 |
| 5′-6-FAM-T42mAmAmCmA-3′P | 4003 |
| 5′-6-FAM-T47mGmUmCmA-3′P | 4004 |
| 5′-6-FAM-T52mCmUmCmA-3′P | 4005 |
| 5′-6-FAM-T15mAmU(2′dF)GmA-3′P | 4006 |
| 5′-6-FAM-T15mAmG(MOE)CmA-3′P | 4007 |
| 5′-6-FAM-T15mGmAmC-3′P | 4008 |
| 5′-6-FAM-T22*(2′dF)A(2′dF)GmA(2′dF)A-3′P | 4009 |
| 5′-6-FAM-T22(2′dF)C(2′dF)G(2′dF)A(2′dF)A-3′P | 4010 |
| 5′-6-FAM-T27(2′dF)GmA(2′dF)U(2′dF)A-3′P | 4011 |
| 5′-6-FAM-T15mGmAmC(2′dF)A-3′P | 4012 |
| 5′-6-FAM-T11mCmGmA(2′dF)A-3′P | 4013 |
| 5′-6-FAM-T15mUmGmAmA-3′P | 4014 |
| 5′-6-FAM-T11mC*mA*mG(2′dF)A-3′P | 4015 |
| 5′-6-FAM-T11mC*mA*mGmA-3′P | 4016 |
| 5′-6-FAM-T15mA(2′dF)UmCmA-3′P | 4017 |
| 5′-6-FAM-T15mCmUmGmA-3′P | 4018 |
| 5′-6-FAM-T27(2′dF)C*(2′dF)G*(2′dF)A(2′dF)A-3′P | 4019 |
| 5′-6-FAM-T11mU*(2′dF)A*(2′dF)A(2′dF)A-3′P | 4020 |
| 5′-6-FAM-T15mGmAmC(2′dF)U-3′P | 4021 |
| 5′-6-FAM-T48mG*mA*mCmA-3′P | 4022 |
| 5′-6-FAM-T15mAmCmU(2′dF)A-3′P | 4023 |
| 5′-6-FAM-T15mGmAmCmA-3′P | 4024 |
| 5′-6-FAM-T15mAmCmU(2′dF)U-3′P | 4025 |
| 5′-6-FAM-T15mAmCmUmC-3′P | 4026 |
| 5′-6-FAM-T15mAmCmUmG-3′P | 4027 |
| 5′-6-FAM-T15mAmCmUmA-3′P | 4028 |
| 5′-6-FAM-T17*(2′dF)A*(2′dF)A(2′dF)G(2′dF)A-3′P | 4029 |
| 5′-6-FAM-T15mGmAmCmC-3′P | 4030 |
| 5′-6-FAM-T15mAmU(2′dF)UmA-3′P | 4031 |
| 5′-6-FAM-T15mGmAmCmG-3′P | 4032 |
| 5′-6-FAM-T15mAmCmU*mU-3′P | 4033 |
| 5′-6-FAM-T15mGmAmC*mU-3′P | 4034 |
| 5′-6-FAM-T15mGmAmC*mG-3′P | 4035 |
| 5′-6-FAM-T15mAmCmU*mG-3′P | 4036 |
| 5′-6-FAM-T15mAmU(2′dF)CmA-3′P | 4037 |
| 5′-BiosG-T3(iFluorT)T9mAmUmAmA-3′P | 4038 |
| 5′-BiosG-T3(iFluorT)T9mAmUmAmAmG-3′P | 4039 |
| 5′-BiosG-T3(iFluorT)T9mAmUmAmAmGmA-3′P | 4040 |
| 5′-BiosG-T3(iFluorT)T9mAmUmAmAmGmA(2′dF)A-3′P | 4041 |
| 5′-BiosG-T13mAmUmAmA-3′P | 4042 |
| 5′-BiosG-T13mAmUmAmAmG-3′P | 4043 |
| 5′-BiosG-T13mAmUmAmAmGmA-3′P | 4044 |
| 5′-BiosG-T13mAmUmAmAmGmA(2′dF)A-3′P | 4045 |
| 5′-6-FAM-T15mAmU*mG | 4046 |
| S08437572 | 5475 |
| 5′-6-FAM-T15mAmUmCmU | 5477 |
| T15mAmUmCmU | 5478 |
| 5′-6-FAM-T11mAmAmA(2′dF)U | 5479 |
| 5′-6-FAM-T18mA(2′dF)GmA(2′dF)G | 5480 |
| 5′-6-FAM-T11mCmCmU(2′dF)A | 5481 |
| 5′-6-FAM-T16*(2′dF)C*mA(2′dF)A(2′dF)A | 5482 |
| 5′-6-FAM-T32mAmAmA(2′dF)G | 5483 |
| 5′-6-FAM-T17*mA*mGmA | 5484 |
| 5′-6-FAM-T26mU(2′dF)GmU(2′dF)C | 5485 |
| 5′-6-FAM-T31mU(2′dF)CmA(2′dF)U | 5486 |
| 5′-6-FAM-T21mU(2′dF)CmU(2′dF)C | 5487 |
| 5′-6-FAM-T47*mA(2′dF)A(2′dF)A | 5488 |
| 5′-6-FAM-T37mG*mA*mC | 5489 |
| 5′-6-FAM-T46mA(2′dF)GmU(2′dF)G | 5490 |
| 5′-6-FAM-T41mA(2′dF)U(2′dF)C(2′dF)C | 5491 |
| 5′-6-FAM-T31mAmAmA(2′dF)G | 5492 |
| 5′-6-FAM-T57mUmU(2′dF)C | 5493 |
| 5′-6-FAM-T42*mA*mCmU | 5494 |
| 5′-6-FAM-T51mU*(2′dF)A*(2′dF)A(2′dF)G | 5495 |
| 5′-6-FAM-T12mC*mA*mG | 5496 |
| 5′-6-FAM-T22*mGmAmA | 5497 |
| 5′-6-FAM-T27mAmAmA | 5498 |
| 5′-6-FAM-T47*mCmUmU | 5499 |
| 5′-6-FAM-T52mUmUmU | 5500 |
| 5′-6-FAM-T16mC*mA*mGmA | 5501 |
| 5′-6-FAM-T11AmC*mA*mG | 5502 |
| 5′-6-FAM-T21*mA*mGmAmA | 5503 |
| 5′-6-FAM-T26*mGmAmAmA | 5504 |
| 5′-6-FAM-T36mAmA(2′dF)GmA | 5505 |
| 5′-6-FAM-T41(2′dF)GmA(2′dF)GmU | 5506 |
| 5′-6-FAM-T51(2′dF)GmU(2′dF)GmU | 5507 |
| 5′-6-FAM-T56(2′dF)GmU(2′dF)CmU | 5508 |
| 5′-6-FAM-T10(2′dF)CmU(2′dF)CmA | n/a |
| 5′-6-FAM-T16mA(2′dF)GmA(2′dF)G | 5509 |
| 5′-6-FAM-T31mU(2′dF)CmAmU | 5510 |
| 5′-6-FAM-T36(2′dF)CmAmUmC | 5511 |
| 5′-6-FAM-T41mAmUmCmU | 5512 |
| 5′-6-FAM-T46mUmCmUmU | 5513 |
| 5′-6-FAM-T51mCmUmUmA | 5514 |
| 5′-6-FAM-T10mAmAmA(MOE)A | n/a |
| 5′-6-FAM-T12mAmG(MOE)C | 5515 |
| 5′-6-FAM-T26mCmCmU*mU | 5516 |
| 5′-6-FAM-T21*(2′dF)A*(2′dF)A(2′dF)GmA | 5517 |
| 5′-6-FAM-T15mAmU*mG(2′dF)A-3′P | 5518 |
| 5′-6-FAM-T15mAmUmCmU(2′dF)A-3′P | 5519 |
| T15mAmUmCmU(2′dF)A-3′P | 5520 |
| 5′-6-FAM-T17*(2′dF)A*(2′dF)A(2′dF)GmA-3′P | 5521 |
| 5′-6-FAM-T11mC*mA*mG*mU-3′P | 5522 |
| 5′-6-FAM-T11mU*(2′dF)A*(2′dF)AmA-3′P | 5523 |
| 5′-6-FAM-T11mAmAmA(2′dF)U(2′dF)U-3′P | 5524 |
| 5′-6-FAM-T18mA(2′dF)GmA(2′dF)GmA-3′P | 5525 |
| 5′-6-FAM-T11mCmCmU(2′dF)A(2′dF)U-3′P | 5526 |
| 5′-6-FAM-T16*(2′dF)C*mA(2′dF)A(2′dF)AmU-3′P | 5527 |
| 5′-6-FAM-T32mAmAmA(2′dF)GmA-3′P | 5528 |
| 5′-6-FAM-T17*mA*mGmA*mU-3′P | 5529 |
| 5′-6-FAM-T18mA(2′dF)GmA(2′dF)G(2′dF)U-3′P | 5530 |
| 5′-6-FAM-T26mU(2′dF)GmU(2′dF)CmA-3′P | 5531 |
| 5′-6-FAM-T31mU(2′dF)CmA(2′dF)U(2′dF)U-3′P | 5532 |
| 5′-6-FAM-T21mU(2′dF)CmU(2′dF)CmU-3′P | 5533 |
| 5′-6-FAM-T47*mA(2′dF)A(2′dF)AmA-3′P | 5534 |
| 5′-6-FAM-T37mG*mA*mC*mU-3′P | 5535 |
| 5′-6-FAM-T27(2′dF)GmA(2′dF)UmA-3′P | 5536 |
| 5′-6-FAM-T26mU(2′dF)GmU(2′dF)C(2′dF)U-3′P | 5537 |
| 5′-6-FAM-T46mA(2′dF)GmU(2′dF)GmA-3′P | 5538 |
| 5′-6-FAM-T41mA(2′dF)U(2′dF)C(2′dF)C(2′dF)U-3′P | 5539 |
| 5′-6-FAM-T31mAmAmA(2′dF)GmU-3′P | 5540 |
| 5′-6-FAM-T57mUmU(2′dF)CmA-3′P | 5541 |
| 5′-6-FAM-T42*mA*mCmU*mU-3′P | 5542 |
| 5′-6-FAM-T47*mA(2′dF)A(2′dF)A(2′dF)U-3′P | 5543 |
| 5′-6-FAM-T51mU*(2′dF)A*(2′dF)A(2′dF)GmA-3′P | 5544 |
| 5′-6-FAM-T51mU*(2′dF)A*(2′dF)A(2′dF)G(2′dF)U-3′P | 5545 |
| 5′-6-FAM-T46mA(2′dF)GmU(2′dF)GmU-3′P | 5546 |
| 5′-6-FAM-T11mC*mA*mGmC-3′P | 5547 |
| 5′-6-FAM-T11mC*mA*mG*mG-3′P | 5548 |
| 5′-6-FAM-T12mC*mA*mG*mG-3′P | 5549 |
| 5′-6-FAM-T57mUmU(2′dF)CmC-3′P | 5550 |
| 5′-6-FAM-T57mUmU(2′dF)C*mG-3′P | 5551 |
| 5′-6-FAM-T17*mA*mGmAmC-3′P | 5552 |
| 5′-6-FAM-T17*mA*mGmA*mG-3′P | 5553 |
| 5′-6-FAM-T22*mGmAmAmC-3′P | 5554 |
| 5′-6-FAM-T22*mGmAmA*mG-3′P | 5555 |
| 5′-6-FAM-T27mAmAmAmC-3′P | 5556 |
| 5′-6-FAM-T27mAmAmA*mG-3′P | 5557 |
| 5′-6-FAM-T32mAmAmA(2′dF)GmC-3′P | 5558 |
| 5′-6-FAM-T32mAmAmA(2′dF)G*mG-3′P | 5559 |
| 5′-6-FAM-T37mG*mA*mCmC-3′P | 5560 |
| 5′-6-FAM-T37mG*mA*mC*mG-3′P | 5561 |
| 5′-6-FAM-T42*mA*mCmUmC-3′P | 5562 |
| 5′-6-FAM-T42*mA*mCmU*mG-3′P | 5563 |
| 5′-6-FAM-T47*mCmUmUmC-3′P | 5564 |
| 5′-6-FAM-T47*mCmUmU*mG-3′P | 5565 |
| 5′-6-FAM-T52mUmUmUmC-3′P | 5566 |
| 5′-6-FAM-T52mUmUmU*mG-3′P | 5567 |
| 5′-6-FAM-T31mAmAmA(2′dF)GmA-3′P | 5568 |
| 5′-6-FAM-T16mC*mA*mGmAmA-3′P | 5569 |
| 5′-6-FAM-T11AmC*mA*mGmA-3′P | 5570 |
| 5′-6-FAM-T21*mA*mGmAmAmA-3′P | 5571 |
| 5′-6-FAM-T26*mGmAmAmAmA-3′P | 5572 |
| 5′-6-FAM-T36mAmA(2′dF)GmAmA-3′P | 5573 |
| 5′-6-FAM-T41(2′dF)GmA(2′dF)GmUmA-3′P | 5574 |
| 5′-6-FAM-T51(2′dF)GmU(2′dF)GmUmU-3′P | 5575 |
| 5′-6-FAM-T56(2′dF)GmU(2′dF)CmUmU-3′P | 5576 |
| 5′-6-FAM-T10(2′dF)CmU(2′dF)CmAmU-3′P | n/a |
| 5′-6-FAM-T16mA(2′dF)GmA(2′dF)GmU-3′P | 5577 |
| 5′-6-FAM-T26mU(2′dF)GmU(2′dF)CmU-3′P | 5578 |
| 5′-6-FAM-T31mU(2′dF)CmAmUmU-3′P | 5579 |
| 5′-6-FAM-T36(2′dF)CmAmUmCmU-3′P | 5580 |
| 5′-6-FAM-T41mAmUmCmU(2′dF)A-3′P | 5581 |
| 5′-6-FAM-T46mUmCmUmU(2′dF)A-3′P | 5582 |
| 5′-6-FAM-T51mCmUmUmA(2′dF)A-3′P | 5583 |
| 5′-6-FAM-T10mAmAmA(MOE)A(2′dF)A-3′P | n/a |
| 5′-6-FAM-T12mAmG(MOE)C(2′dF)A-3′P | 5584 |
| 5′-6-FAM-T26mCmCmU*mUmC-3′P | 5585 |
| 5′-6-FAM-T26mCmCmU*mU*mG-3′P | 5586 |
| 5′-6-FAM-T26mCmCmU*mU*mU-3′P | 5587 |
| 5′-6-FAM-T26mCmCmU*mU(2′dF)G-3′P | 5588 |
| 5′-6-FAM-T26mCmCmU*mU(2′dF)U-3′P | 5589 |
| 5′-6-FAM-T21*(2′dF)A*(2′dF)A(2′dF)GmAmC-3′P | 5590 |
| 5′-6-FAM-T21*(2′dF)A*(2′dF)A(2′dF)GmA*mG-3′P | 5591 |
| 5′-6-FAM-T21*(2′dF)A*(2′dF)A(2′dF)GmA*mU-3′P | 5592 |
| 5′-6-FAM-T21*(2′dF)A*(2′dF)A(2′dF)GmA(2′dF)G-3′P | 5593 |
| 5′-6-FAM-T21*(2′dF)A*(2′dF)A(2′dF)GmA(2′dF)U-3′P | 5594 |
| 5′-6-FAM-T10(2′dF)CmU(2′dF)CmAmA-3′P | n/a |
| 5′-6-FAM-T10(2′dF)CmU(2′dF)CmAmA | n/a |
| 5′-6-FAM-T10(2′dF)CmU(2′dF)CmAmA(2′dF)G-3′P | n/a |
| 5′-6-FAM-T10(2′dF)CmU(2′dF)CmAmA(2′dF)G | n/a |
| 5′-6-FAM-T10(2′dF)CmU(2′dF)CmAmA(2′dF)GmU-3′P | n/a |
| 5′-6-FAM-T10(2′dF)CmU(2′dF)CmAmA(2′dF)GmU | n/a |
| 5′-6-FAM-T10(2′dF)CmU(2′dF)CmAmA(2′dF)GmU(2′dF)G-3′P | n/a |
| 5′-6-FAM-T10(2′dF)CmU(2′dF)CmAmA(2′dF)GmU(2′dF)G | n/a |
| 5′-6-FAM-T10(2′dF)CmU(2′dF)CmAmA(2′dF)GmU(2′dF)GmU-3′P | n/a |
| 5′-6-FAM-T10(2′dF)CmU(2′dF)CmAmA(2′dF)GmU(2′dF)GmU | n/a |
| 5′-6-FAM-T10(2′dF)CmU(2′dF)CmAmA(2′dF)GmU(2′dF)GmU(2′dF)C-3′P | n/a |
| 5′-6-FAM-T10(2′dF)CmU(2′dF)CmAmA(2′dF)GmU(2′dF)GmU(2′dF)C | n/a |
| 5′-6-FAM-T10(2′dF)CmU(2′dF)CmAmA(2′dF)GmU(2′dF)GmU(2′dF)CmU-3′P | n/a |
| 5′-6-FAM-T10(2′dF)CmU(2′dF)CmAmA(2′dF)GmU(2′dF)GmU(2′dF)CmU | n/a |
| 5′-6-FAM-T10(2′dF)CmU(2′dF)CmAmA(2′dF)GmU(2′dF)GmU(2′dF)CmU(2′dF)C-3′P | n/a |
| 5′-6-FAM-T10(2′dF)CmU(2′dF)CmAmA(2′dF)GmU(2′dF)GmU(2′dF)CmU(2′dF)C | n/a |
| 5′-6-FAM-T10(2′dF)CmU(2′dF)CmAmA(2′dF)GmU(2′dF)GmU*mG-3′P | n/a |
| 5′-6-FAM-T10(2′dF)CmU(2′dF)CmAmA(2′dF)GmU(2′dF)GmU*mG | n/a |
| 5′-6-FAM-T10(2′dF)CmU(2′dF)CmAmA(2′dF)GmU(2′dF)GmU(2′dF)C*mG-3′P | n/a |
| 5′-6-FAM-T10(2′dF)CmU(2′dF)CmAmA(2′dF)GmU(2′dF)GmU(2′dF)C*mG | n/a |
| 5′-6-FAM-T15mGmAmC(2′dF)C-3′P | 5595 |
| 5′-6-FAM-T15mGmAmC(2′dF)C | 5596 |
| 5′-6-FAM-T15mGmAmC(2′dF)CmU-3′P | 5597 |
| 5′-6-FAM-T15mGmAmC(2′dF)CmU | 5598 |
| 5′-6-FAM-T15mGmAmC(2′dF)CmU(2′dF)C-3′P | 5599 |
| 5′-6-FAM-T15mGmAmC(2′dF)CmU(2′dF)C | 5600 |
| 5′-6-FAM-T15mGmAmC(2′dF)CmU(2′dF)CmA-3′P | 5601 |
| 5′-6-FAM-T15mGmAmC(2′dF)CmU(2′dF)CmA | 5602 |
| 5′-6-FAM-T15mGmAmC(2′dF)CmU(2′dF)CmAmU-3′P | 5603 |
| 5′-6-FAM-T15mGmAmC(2′dF)CmU(2′dF)CmAmU | 5604 |
| 5′-6-FAM-T15mGmAmCmG | 5605 |
| 5′-6-FAM-T15mAmU(2′dF)GmA | 5606 |
| 5′-6-FAM-T21mU(2′dF)CmU(2′dF)CmA-3′P | 5607 |
| 5′-6-FAM-T21mU(2′dF)CmU(2′dF)CmA | 5608 |
| A4mC*mA*mG | n/a |
| A4mC*mA*mGmA-3′P | n/a |
| A4mC*mA*mGmA | n/a |
| 5′-6-FAM-T15mAmG*mGmA-3′P | 5609 |
| 5′-6-FAM-T15mAmG*mGmA | 5610 |
| T15mAmG*mGmA-3′P | 5611 |
| T15mAmG*mGmA | 5612 |
| 5′-6-FAM-T17mAmCmCmA-3′P | 5613 |
| 5′-6-FAM-T17mAmCmCmA | 5614 |
| T15mAmU(2′dF)G | 5615 |

### Example 5

### Isolated Protein Yield Improvements Over SEQ ID NO: 2

### Relative Isolated Protein Yield of Shake-Flask Purified TdT Variants

[0359] TdT variants of SEQ ID NO: 2-38 were produced in shake flask and purified as described in Example 3. TdT concentrations were measured by absorption at 280 nm.

[0360] Protein recovery relative to SEQ ID NO: 2 was calculated as the ratio of mg/mL protein recovered after purification of the variant compared with SEQ ID NO: 2. The results are shown in Table 5.1.

TABLE 5.1

| | | Protein |
|---|---|---|
| | | recovery after |
| SEQ ID | | purification |
| NO: | Amino Acid Differences | Relative to |
| (nt/aa) | (Relative to SEQ ID NO: 2) | SEQ ID NO: 2 |
| 3/4 | N80D/C121S/I174L/F185L/K190E/D244V/F284L/N288E/K289D/I290V/ | +++ |
| | D293S/I313A/C315G/S317T/L336D/T342E/F359L/C391G/I394R/E428V/ | |
| | R431S/Y462F/S470T/Q474M/K499L/I522L/Q523E | |
| 5/6 | N80D/C121S/I174L/F185L/K190E/D244V/L273V/F284L/N288E/K289D/ | +++ |
| | I290V/D293S/I313A/C315G/S317T/L336D/T342E/F359L/C391G/I394R/ | |
| | E428V/R431S/Y462F/S470T/Q474M/K499L/I522L/Q523E | |
| 7/8 | N80D/C121S/F185L/K190E/D244V/K289D/I290V/D293S/I313A/C315G/ | +++ |
| | S317T/L336D/T342E/F359L/C391G/S470T/Q474M/K499L/I522L/Q523E | |
| 9/10 | N80D/C121S/I174L/F185L/K190E/E193G/E196Y/D244V/L273V/F284L/ | +++ |
| | N288E/K289D/I290V/D293S/K297R/I313A/C315G/S317T/V324I/L336D/ | |
| | T342E/E352P/F359L/Q376H/N380D/C391G/I394R/L401G/Q415S/L419A/ | |
| | E428V/R431S/M435T/E441M/Y462F/S470T/Q474M/K499L/I522L/Q523E | |
| 11/12 | N80D/C121S/F185L/K190E/K289D/I290V/D293S/I313A/C315G/L336D/ | +++ |
| | T342E/F359L/C391G/F414H/S470T/Q474M/K499L/I522L/Q523E | |
| 13/14 | N80D/C121S/I174L/F185L/K190E/D244V/F284L/N288E/K289D/I290V/ | +++ |
| | D293S/I313A/C315G/S317T/L336D/T342E/E352P/F359L/C391G/I394R/ | |
| | L419A/E428V/R431S/Y462F/S470T/Q474M/K499L/I522L/Q523E | |
| 15/16 | N80D/C121S/I174L/F185L/K190E/D244V/L273V/F284L/N288E/K289D/ | +++ |
| | I290V/D293S/I313A/C315G/S317T/L336D/T342E/E352P/F359L/C391G/ | |
| | I394R/L419A/E428V/R431S/Y462F/S470T/Q474M/K499L/I522L/Q523E | |
| 17/18 | N80D/C121S/I174L/F185L/K190E/E193G/D244V/L273V/F284L/N288E/ | +++ |
| | K289D/I290V/D293S/K297R/I313A/C315G/S317T/L336D/T342E/E352P/ | |
| | F359L/C391G/I394R/Q415S/L419A/E428V/R431S/Y462F/S470T/Q474M/ | |
| | K499L/I522L/Q523E | |
| 19/20 | N80D/C121S/I174L/Q179K/F185L/K190E/G236P/D244V/N288E/K289D/ | ++ |
| | I290V/D293S/I313A/C315G/S317T/L336D/T342E/F359L/S363I/C391G/ | |
| | I394R/I408P/H426P/Y462F/S470T/Q474M/K499L/I522L/Q523E | |
| 21/22 | N80D/C121S/I174L/F185L/K190E/D244V/F284L/N288E/K289D/I290V/ | ++ |
| | D293S/I313A/C315G/S317T/L336D/T342E/E352P/F359L/C391G/I394R/ | |
| | E428V/R431S/Y462F/S470T/Q474M/K499L/I522L/Q523E | |
| 23/24 | N80D/C121S/I174L/F185L/K190E/E196R/D244V/T266K/L273V/F284L/ | ++ |
| | N288E/K289D/I290V/D293S/I313A/C315G/S317T/V324I/L336D/T342E/ | |
| | E352P/F359L/C391G/I394R/T397R/L401G/L419A/E428V/R431S/ | |
| | Y462F/S470T/Q474M/K499L/I522L/Q523E | |
| 25/26 | N80D/C121S/F185L/K190E/D244V/K289D/I290V/D293S/K300R/I313A/ | ++ |
| | C315G/S317T/L336D/T342E/F359L/C391G/S470T/Q474M/K499L/I522L/ | |
| | Q523E | |
| 27/28 | N80D/C121S/F185L/K190E/D244V/L273V/K289D/I290V/D293S/I313A/ | ++ |
| | C315G/S317T/L336D/T342E/E352P/F359L/C391G/L419A/M435T/S470T/ | |
| | Q474M/K499L/I522L/Q523E | |
| 29/30 | N80D/C121S/F185L/K190E/D244V/K289D/I290V/D293S/I313A/C315G/ | ++ |
| | S317T/L336D/T342E/F359L/N380D/C391G/L401G/L419A/S470T/Q474M/ | |
| | K499L/I522L/Q523E | |
| 31/32 | N80D/C121S/I174L/F185L/K190E/G236P/D244V/L273V/M282R/F284L/ | ++ |
| | N288E/K289D/I290V/D293S/I313A/C315G/S317T/L336D/T342E/E352P/ | |
| | F359L/C391G/I394R/E395R/L419A/E428V/R431S/Y462F/S470T/Q474M/ | |
| | K499L/I522L/Q523E | |
| 33/34 | N80D/C121S/F185L/K190E/D244V/K289D/I290V/D293S/I313A/C315G/ | ++ |
| | S317T/L336D/T342E/F359L/C391G/E395W/S470T/Q474M/K499L/I522L/ | |
| | Q523E | |
| 35/36 | N80D/C121S/F185L/K190E/K289D/I290V/D293S/I313A/T342E/K499L | ++ |
| 37/38 | N80D/C121S/F185L/K190E/E196R/D244V/K289D/I290V/D293S/I313A/ | ++ |
| | C315G/S317T/L336D/T342E/F359L/C391G/S470T/Q474M/K499L/I522L/ | |
| | Q523E | |
| 39/40 | N80D/C121S/F185L/K190E/D244V/K289D/I290V/D293S/I313A/C315G/ | ++ |
| | S317T/L336D/T342E/F359L/C391G/D392R/S470T/Q474M/K499L/I522L/ | |
| | Q523E | |
| 41/42 | N80D/C121S/I174L/F185L/E186G/K190E/G236P/D244V/L273V/F284L/ | ++ |
| | N288E/K289D/I290V/D293S/I313A/C315G/S317T/L336D/T342E/E352P/ | |
| | F359L/C391G/I394R/E395R/L419A/E428V/R431S/Y462F/S470T/Q474M/ | |
| | K499L/I522L/Q523E | |
| 43/44 | N80D/C121S/K190E/K289D/I290V | + |
| 45/46 | N80D/K106D/C121S/F185L/K190E/M205R/K289D/I290V/D293S/I313A/ | + |
| | T342E/S470T/Q474M/K499L/Q523E | |
| 47/48 | N80D/C121S/F185L/K190E/K289D/I290V/D293S/I313A/L336D/T342E/ | + |
| | F359L/C391G/S470T/Q474M/K499L/I522L/Q523E | |
| 49/50 | C121S/F185L/K190E/C213S/K289D/I290V/D293S | + |
| 51/52 | N80D/C121S/F185L/K190E/D244V/K289D/I290V/D293S/I313A/L336D/ | + |
| | T342E/F359L/C391G/F414H/S470T/Q474M/K499L/I522L/Q523E | |
| 53/54 | N80D/C121S/F185L/C315G | + |
| 55/56 | N80D/C121S/K131E/F185L/K190E/K289D/I290V/D293S/I313A/T342E/ | + |
| | S470T/Q474M/K499L/I522L/Q523E | |
| 57/58 | N80D/F185L/G236P/K289D/D293S | + |
| 59/60 | N80D/K106D/C121S/F185L/K190E/M205R/K289D/I290V/D293S/I313A/ | + |
| | C315G/L336D/T342E/F359L/C391G/S470T/Q474M/K499L/I522L/Q523E | |
| 61/62 | N80D/C121S/K131E/F185L/K190E/M205R/D244V/K289D/I290V/D293S/ | + |
| | I313A/C315G/L336D/T342E/F359L/C391G/F414H/S470T/Q474M/K499L/ | |
| | I522L/Q523E | |
| 63/64 | N80D/C121S/K131E/F185L/K190E/M205R/D244V/K289D/I290V/D293S/ | + |
| | I313A/L336D/T342E/F359L/C391G/F414H/S470T/Q474M/K499L/I522L/ | |
| | Q523E | |
| 65/66 | F185L/K289D/I290V/D293S | + |
| 67/68 | N80D/K106D/C121S/F185L/K190E/D244V/K289D/I290V/D293S/C307K/ | + |
| | T342E/F359L/S470T/Q474M/K499L | |
| 69/70 | N80D/C121S/F185L/K190E/C201R/K289D/I290V/D293S/I313A/T342E/ | + |
| | S470T/Q474M/K499L/I522L | |

Levels of increased protein recovery relative to the reference polypeptide of SEQ ID NO: 2 and defined as follows: “+” 1.00 to 3.20-fold increased activity; “++” >3.20-fold increased activity; “+++” >6.50-fold increased activity.

### Example 6

### Thermal Stability Improvements Over SEQ ID NO: 36

### Relative Stability Measurements of Shake-Flask Purified TdT Variants

[0361] TdT variants SEQ ID NO: 4, 8, 16, 36, and 48 were produced in shake flask and purified as described in Example 3. TdT concentrations were measured by absorption at 280 nm.

[0362] Reactions were performed in 96-well format 200 μL BioRad PCR plates. Reactions included 1 μM oligonucleotide, 25 M nucleotide triphosphate, 1 μM TdT, 20 mM triethanolamine (pH 7.8), and 250 μM cobalt (II) chloride. The reactions were set up as follows: (i) all reaction components, except for NTP, were pre-mixed in a single solution, and 20 μL of this solution was aliquoted into each well of the 96-well plate; (ii) the plate was heated at 39.8° C. or 63.1° C. as indicated; (iii) 15 μL of the heat-treated solution was transferred into a 96-well plate containing 5 μL of NTP solution (4×concentration in water); (iii) the solution was mixed well, spun down, and reacted at 45 RC for 15 minutes. Reaction plates were heat-sealed with a peelable aluminum seal and incubated in a thermocycler at the indicated temperature, then held at 4° C. until the reaction was quenched. Reactions were quenched and diluted for analytical analysis by CE as described in Example 4.

TABLE 6.1
Reaction conditions

Reaction buffer-20 mM TEA, 0.25 mM CoCl₂, pH 7.8; Preincubation Temp (C.) - 39.8° C. or 63.1° C.;
Preincubation Time (min)- 15; Reaction temperature (C.)- 45° C.; Reaction Time (min)- 15; Reaction
volume (μL) - 20; TdT concentration (μM)- 1; NTP- ddGTP; NTP conc (μM)-1; Oligonucleotide-5′-6-
FAM-T14ATCmC; Oligonucleotide conc (μM)- 1; Product- 5′-6-FAM-T14ATCmCddG.

[0363] Relative activity for each variant was calculated as the percent product of the variant as measured after a 39.8° C. pre-incubation relative to the percent product measured after pre-incubation at 63.1° C. multiplied by 100. The results are shown in Table 6.2.

TABLE 6.2
(relative % activity)

| | | Stability FIOP percent |
|---|---|---|
| SEQ ID | | activity at 63.1 vs. |
| NO: | Amino Acid Differences | activity at 39.8 Relative |
| (nt/aa) | (Relative to SEQ ID NO: 36) | to SEQ ID NO: 36 |
| 15/16 | I174L/D244V/L273V/F284L/N288E/C315G/S317T/L336D/ | ++ |
| | E352P/F359L/C391G/I394R/L419A/E428V/R431S/Y462F/ | |
| | S470T/Q474M/I522L/Q523E | |
| 3/4 | I174L/D244V/F284L/N288E/C315G/S317T/L336D/F359L/ | ++ |
| | C391G/I394R/E428V/R431S/Y462F/S470T/Q474M/I522L/ | |
| | Q523E | |
| 47/48 | L336D/F359L/C391G/S470T/Q474M/I522L/Q523E | + |
| 7/8 | D244V/C315G/S317T/L336D/F359L/C391G/S470T/Q474M/ | + |
| | I522L/Q523E | |

Levels of increased activity were determined relative to the reference polypeptide of SEQ ID NO: 36 and defined as follows: “+” 0.50 to 6.05-fold increased activity; “++” >6.05-fold increased activity; “+++” >15-fold increased activity.

### Example 7

### Improvements Over SEQ ID NO: 8 in the Extension of Oligonucleotide Acceptor Molecules with Nucleotide Triphosphate Donors

### HTP Screening for Improved TdT Variants

[0364] SEQ ID NO: 8 was selected as the parent TdT enzyme. Libraries of engineered genes were produced from the parent gene using various techniques (e.g., saturation mutagenesis and recombination of previously identified beneficial mutations). The polypeptides encoded by each gene were produced in HTP and prepared as described in Table 7.1.

[0365] Reactions were performed in 96-well format 200 μL BioRad PCR plates. Reactions included 1-10 μM oligonucleotide, 25-50 AM nucleotide triphosphate, 20 mM buffer, and 250 M cobalt (II) chloride. The reactions were set up as follows: (i) all reaction components, except for TdT, were pre-mixed in a single solution and were aliquoted into each well of the 96-well plates (ii) TdT lysate solution was then added into the wells to initiate the reaction. The reaction plate was heat-sealed with a peelable aluminum seal and incubated in a thermocycler at the indicated temperature and reaction time, then held at 4° C. until the reaction was quenched. Reactions were quenched and processed for CE analysis as described in Example 4.

TABLE 7.1
Reaction conditions

Lysis buffer-MOPS (50 mM, pH 7.4), 0.2 g/L lysozyme; Reaction buffer-20 mM MOPS, 50 mM
KOAc, 0.25 mM CoCl₂, pH 7.2; Lysate concentration (vol %)-25; Preincubation Temp (C.)-50° C.;
Preincubation Time (min)-15; Reaction temperature (C.)-50° C.; Reaction Time (min)-90; Reaction
volume (μL) -20; NTP (μM)-ddGTP; NTP conc (μM)-25; Oligonucleotide-5′-6-FAM-T17ATCmC;
Substrate conc (μM)-1; Product -5′-6-FAM-T17ATCmCddG.

[0366] Activity relative to SEQ ID NO: 8 (Activity FIOP) was calculated as the percent product of the variant compared with the percent product observed by the reaction with SEQ ID NO: 8 (where the percent product may be set as the average of replicates or else the highest single sample as appropriate). The results are shown in Table 7.2.

TABLE 7.2

| SEQ ID NO: | Amino Acid Differences | FIOP Product Peak Area |
|---|---|---|
| (nt/aa) | (Relative to SEQ ID NO: 8) | Relative to SEQ ID NO: 8 |
| 33/34 | E395W | +++ |
| 39/40 | D392R | +++ |
| 71/72 | E395T | +++ |
| 25/26 | K300R | +++ |
| 73/74 | E395R | +++ |
| 37/38 | E196R | +++ |
| 75/76 | E395Y | +++ |
| 77/78 | E395S | +++ |
| 79/80 | V456R | +++ |
| 81/82 | L421I | +++ |
| 83/84 | D392C | +++ |
| 85/86 | Q415S | +++ |
| 87/88 | I343V | +++ |
| 89/90 | E196G | +++ |
| 91/92 | K297T | +++ |
| 93/94 | K318E | ++ |
| 95/96 | R481V | ++ |
| 97/98 | R477T | ++ |
| 99/100 | K300P | ++ |
| 101/102 | K195W | ++ |
| 103/104 | V456K | ++ |
| 105/106 | L421M | ++ |
| 107/108 | V316C | ++ |
| 109/110 | R281A | ++ |
| 111/112 | E186A | ++ |
| 113/114 | L411R | ++ |
| 115/116 | C417G | ++ |
| 117/118 | L360V | ++ |
| 119/120 | K303M | ++ |
| 121/122 | V316I | ++ |
| 123/124 | K297Q | ++ |
| 125/126 | K195R | ++ |
| 127/128 | L360C | ++ |
| 129/130 | K318S | ++ |
| 131/132 | D183R | ++ |
| 133/134 | M282R | ++ |
| 135/136 | E186T | + |
| 137/138 | K303E | + |
| 139/140 | E193V | + |
| 141/142 | L454V | + |
| 143/144 | Q415A | + |
| 145/146 | D392A | + |
| 147/148 | E186L | + |
| 149/150 | T397R | + |
| 151/152 | D129G/E196G | + |
| 153/154 | K318T | + |
| 155/156 | E395L | + |
| 157/158 | K318V | + |
| 159/160 | D492T | + |
| 161/162 | E193N | + |
| 163/164 | E186G | + |
| 165/166 | T173L | + |
| 167/168 | E193G | + |
| 169/170 | C417V | + |
| 171/172 | E395A | + |
| 173/174 | L411A | + |
| 175/176 | E196A | + |
| 177/178 | E196W | + |
| 179/180 | L411G | + |
| 181/182 | E320N | + |
| 183/184 | E196Y | + |
| 185/186 | E193C | + |
| 187/188 | V268C | + |
| 189/190 | K297R | + |
| 191/192 | R481E | + |
| 193/194 | V324I | + |
| 195/196 | K303A | + |
| 197/198 | K297F | + |
| 199/200 | V316T | + |
| 201/202 | T266K | + |
| 203/204 | K263R | + |
| 205/206 | M282Q | + |

Levels of increased activity were determined relative to the reference polypeptide of SEQ ID NO: 8 and defined as follows: “+” 1.01 to 1.50-fold increased activity; “++” >1.50-fold increased activity; “+++” >2.25-fold increased activity.

### Example 8

### Improvements Over SEQ ID NO: 16 in the Extension of Oligonucleotide Acceptor Molecules with Nucleotide Triphosphate Donors

### HTP Screening for Improved TdT Variants

[0367] SEQ ID NO: 16 was selected as the parent TdT enzyme. Libraries of engineered genes were produced from the parent gene using various techniques (e.g., saturation mutagenesis and recombination of previously identified beneficial mutations). The polypeptides encoded by each gene were produced in HTP and reactions prepared as described in Table 8.1.

[0368] Reactions were performed in 96-well format 200 μL BioRad PCR plates. Reactions included 1-10 μM oligonucleotide, 25-50 μM nucleotide triphosphate, 20 mM buffer, and 250 μM cobalt (II) chloride. The reactions were set up as follows: (i) all reaction components, except for TdT, were pre-mixed in a single solution and were aliquoted into each well of the 96-well plates (ii) TdT lysate solution was then added into the wells to initiate the reaction. The reaction plate was heat-sealed with a peelable aluminum seal and incubated in a thermocycler at the indicated temperature and reaction time, then held at 4° C. until the reaction was quenched. Reactions were quenched and processed for CE analysis as described in Example 4.

TABLE 8.1
Reaction conditions

Lysis buffer-MOPS (50 mM, pH 7.4), 0.2 g/L lysozyme; Reaction buffer-20 mM MOPS, 50 mM
KOAc, 0.25 mM CoCl₂, pH 7.2; Lysate concentration (vol %)-12.5; Preincubation Temp (C.)-50° C.;
Preincubation Time (min)-15; Reaction temperature (C.)-50° C.; Reaction Time (min)-15; Reaction
volume (μL) -20; NTP (μM)-ddGTP; NTP conc (μM)-25; Oligonucleotide-5′-6-FAM-T17AT*mC;
Substrate conc (μM)-1; Product -5′-6-FAM-T17AT*mCddG.

[0369] Activity relative to SEQ ID NO: 16 (Activity FIOP) was calculated as the percent product of the variant compared with the percent product observed by the reaction with SEQ ID NO: 16 (where the percent product may be set as the average of replicates or else the highest single sample as appropriate). The results are shown in Table 8.2.

TABLE 8.2

| | | FIOP Product |
|---|---|---|
| SEQ ID | | Peak Area |
| NO: | Amino Acid Differences | Relative to SEQ |
| (nt/aa) | (Relative to SEQ ID NO: 16) | ID NO: 16 |
| 9/10 | E193G/E196Y/K297R/V324I/Q376H/N380D/ | +++ |
| | L401G/Q415S/M435T/E441M | |
| 17/18 | E193G/K297R/Q415S | +++ |
| 41/42 | E186G/G236P/E395R | +++ |
| 23/24 | E196R/T266K/V324I/T397R/L401G | +++ |
| 31/32 | G236P/M282R/E395R | +++ |
| 207/208 | Q415S | +++ |
| 209/210 | K297R/N380D/L401G/E441M | ++ |
| 211/212 | E193N/E196Y/V324I | ++ |
| 213/214 | G236P/M282R | ++ |
| 215/216 | Q376H/L401G/E441M | ++ |
| 217/218 | M435T/E441M | ++ |
| 219/220 | E186G | ++ |
| 221/222 | E196Y/K297R/V324I/M435T | ++ |
| 223/224 | K297R/M435T | ++ |
| 225/226 | E193G/K297R/V324I/Q376H/M435T | ++ |
| 227/228 | T266K/K297R/N380D/T397R/L401G | ++ |
| 229/230 | K318S/E395R | + |
| 231/232 | E193G/E196Y | + |
| 233/234 | E193G/M435T | + |
| 235/236 | E186G/G236P/K318S | + |
| 237/238 | E186G/M282R/K318S | + |
| 239/240 | E193G/E196Y/T266K/V324I/Q376H/N380D | + |
| 241/242 | M282R/K318S | + |
| 243/244 | E193G/E196R/K297R | + |
| 245/246 | E193G/E196Y/Q376H/N380D | + |
| 247/248 | M282R/R481E | + |
| 249/250 | G236P/K318S/R481E | + |
| 251/252 | M282R | + |
| 253/254 | E193G/E196Y/V324I/T397R/L401G/E441M | + |
| 255/256 | E196R/T266K | + |
| 257/258 | E196R | + |
| 259/260 | E193N/K297R/V324I/N380D | + |

Levels of increased activity were determined relative to the reference polypeptide of SEQ ID NO: 16 and defined as follows: “+” 1.24 to 1.57-fold increased activity; “++” >1.57-fold increased activity; “+++” >2.34-fold increased activity.

### Example 9

### Improvements Over SEQ ID NO: 24 in the Extension of Oligonucleotide Acceptor Molecules with Nucleotide Triphosphate Donors

### HTP Screening for Improved TdT Variants

[0370] SEQ ID NO: 24 was selected as the parent TdT enzyme. Libraries of engineered genes were produced from the parent gene using various techniques (e.g., saturation mutagenesis and recombination of previously identified beneficial mutations). The polypeptides encoded by each gene were produced in HTP and prepared as described in Table 9.1.

[0371] Reactions were performed in 96-well format 200 μL BioRad PCR plates. Reactions included 1-10 μM oligonucleotide, 25-50 μM nucleotide triphosphate, 20 mM buffer, and 250 μM cobalt (II) chloride. The reactions were set up as follows: (i) all reaction components, except for TdT, were pre-mixed in a single solution and were aliquoted into each well of the 96-well plates (ii) TdT lysate solution was then added into the wells to initiate the reaction. The reaction plate was heat-sealed with a peelable aluminum seal and incubated in a thermocycler at the indicated temperature and reaction time, then held at 4° C. until the reaction was quenched. Reactions were quenched and processed for CE analysis as described in Example 4.

TABLE 9.1
Reaction conditions

Lysis buffer-MOPS (50 mM, pH 7.4), 0.2 g/L lysozyme; Reaction buffer-20 mM MOPS, 50 mM
KOAc, 0.25 mM CoCl₂, pH 7.2; Lysate concentration (vol %)-12.5; Preincubation Temp (C.)-47° C.;
Preincubation Time (min)-15; Reaction temperature (C.)-47° C.; Reaction Time (min)-30; Reaction
volume (μL) -20; NTP (μM)-mATP; NTP conc (μM)-25; Oligonucleotide-5′-6-FAM-
T17ATC(2′dF)C; Substrate conc (μM)-1; Product -5′-6-FAM-T17ATC(2′dF)CmA.

[0372] Activity relative to SEQ ID NO: 24 (Activity FIOP) was calculated as the percent product of the variant compared with the percent product observed by the reaction with SEQ ID NO: 24 (where the percent product may be set as the average of replicates or else the highest single sample as appropriate).

[0373] The results are shown in Table 8.2.

TABLE 9.2

| SEQ ID NO: | Amino Acid Differences | FIOP Product Peak Area |
|---|---|---|
| (nt/aa) | (Relative to SEQ ID NO: 24) | Relative to SEQ ID NO: 24 |
| 261/262 | D21E | +++ |
| 263/264 | G92R | +++ |
| 265/266 | V124E | +++ |
| 267/268 | K53E | +++ |
| 269/270 | K24G | +++ |
| 271/272 | T101E | +++ |
| 273/274 | I155E | +++ |
| 275/276 | I34S | +++ |
| 277/278 | I34D | +++ |
| 279/280 | L153E | +++ |
| 281/282 | T58S | +++ |
| 283/284 | T108K | +++ |
| 285/286 | D142M | +++ |
| 287/288 | G92Y | +++ |
| 289/290 | K161E | +++ |
| 291/292 | M37F | +++ |
| 293/294 | M37A | +++ |
| 295/296 | A150E | +++ |
| 297/298 | T107R | +++ |
| 299/300 | T162E | +++ |
| 301/302 | V141E | +++ |
| 303/304 | L156D | +++ |
| 305/306 | K161S | +++ |
| 307/308 | L156E/K294T | +++ |
| 309/310 | H33K | ++ |
| 311/312 | M30G | ++ |
| 313/314 | T58A | ++ |
| 315/316 | M104I | ++ |
| 317/318 | I155T | ++ |
| 319/320 | K161D | ++ |
| 321/322 | L156Q | ++ |
| 323/324 | K106S | ++ |
| 325/326 | M12S | ++ |
| 327/328 | L156M | ++ |
| 329/330 | M104P | ++ |
| 331/332 | R14G | ++ |
| 333/334 | T152R | ++ |
| 335/336 | L153Q | ++ |
| 337/338 | M37T | ++ |
| 339/340 | N145E | ++ |
| 341/342 | D142S | ++ |
| 343/344 | S20T | ++ |
| 345/346 | R14Q | ++ |
| 347/348 | D94E | ++ |
| 349/350 | T160G | ++ |
| 351/352 | H13S | ++ |
| 353/354 | G92M | ++ |
| 355/356 | L153K | ++ |
| 357/358 | S35E | ++ |
| 359/360 | L153G | ++ |
| 361/362 | L153P | ++ |
| 363/364 | T159D | ++ |
| 365/366 | M37G | ++ |
| 367/368 | G92V | ++ |
| 369/370 | I18D | ++ |
| 371/372 | K106H | ++ |
| 373/374 | V141R | ++ |
| 375/376 | M37V | ++ |
| 377/378 | K133G | ++ |
| 379/380 | D31S | + |
| 381/382 | M30V | + |
| 383/384 | I34K | + |
| 385/386 | M30E | + |
| 387/388 | T17A | + |
| 389/390 | D147L | + |
| 391/392 | T152G | + |
| 393/394 | I41V | + |
| 395/396 | H13R | + |
| 397/398 | T149R | + |
| 399/400 | M137A | + |
| 401/402 | I34R | + |
| 403/404 | L153V | + |
| 405/406 | T61H | + |
| 407/408 | K29P | + |
| 409/410 | K103M | + |
| 411/412 | A97D | + |
| 413/414 | M104G | + |
| 415/416 | H13K | + |
| 417/418 | L153M | + |
| 419/420 | H33P | + |
| 421/422 | T108D | + |
| 423/424 | S139A | + |
| 425/426 | T17G | + |
| 427/428 | M37S | + |
| 429/430 | I18R | + |
| 431/432 | G23P | + |
| 433/434 | T107W | + |
| 435/436 | K126V | + |
| 437/438 | F22G | + |
| 439/440 | H33G | + |
| 441/442 | G92S | + |
| 443/444 | Q135R | + |
| 445/446 | I163V | + |
| 447/448 | K29R | + |
| 449/450 | S20H | + |
| 451/452 | K161R | + |
| 453/454 | D94R | + |
| 455/456 | S35G | + |
| 457/458 | R140E | + |
| 459/460 | A57H | + |
| 461/462 | T61L | + |
| 463/464 | K106G | + |
| 465/466 | F22L | + |
| 467/468 | Q27D | + |
| 469/470 | V124I | + |
| 471/472 | K161G | + |
| 473/474 | E138Q | + |
| 475/476 | G23E | + |
| 477/478 | V141M | + |
| 479/480 | H102L | + |
| 481/482 | E105N | + |
| 483/484 | A144C | + |
| 485/486 | A150G | + |
| 487/488 | R140G | + |
| 489/490 | R26G | + |
| 491/492 | I163L | + |
| 493/494 | N154G | + |
| 495/496 | H13G | + |

Levels of increased activity were determined relative to the reference polypeptide of SEQ ID NO: 24 and defined as follows: “+” >1.00-fold increased activity; “++” >1.30-fold increased activity; “+++” >1.75-fold increased activity.

### Example 10

### Improvements Over SEQ ID NO: 24 in the Extension of Oligonucleotide Acceptor Molecules with Nucleotide Triphosphate Donors

### HTP Screening for Improved TdT Variants

[0374] SEQ ID NO: 24 was selected as the parent TdT enzyme. Libraries of engineered genes were produced from the parent gene using various techniques (e.g., saturation mutagenesis and recombination of previously identified beneficial mutations). The polypeptides encoded by each gene were produced in HTP and prepared as described in Table 10.1.

[0375] Reactions were performed in 96-well format 200 μL BioRad PCR plates. Reactions included 1-10 μM oligonucleotide, 25-50 μM nucleotide triphosphate, 20 mM buffer, and 250 μM cobalt (II) chloride. The reactions were set up as follows: (i) all reaction components, except for TdT, were pre-mixed in a single solution and were aliquoted into each well of the 96-well plates (ii) TdT lysate solution was then added into the wells to initiate the reaction. The reaction plate was heat-sealed with a peelable aluminum seal and incubated in a thermocycler at the indicated temperature and reaction time, then held at 4° C. until the reaction was quenched. Reactions were quenched and processed for CE analysis as described in Example 4.

TABLE 10.1-Reaction conditions

Lysis buffer-MOPS (50 mM, pH 7.4), 0.2 g/L lysozyme;
Reaction buffer-20 mM MOPS, 50 mM
KOAc, 0.25 mM CoCl₂, pH 7.2; Lysate
concentration (vol %)-25; Preincubation Temp (C.)-58° C.;
Preincubation Time (min)-15; Reaction temperature (C.)-58° C.;
Reaction Time (min)-30; Reaction
volume (μL) -20; NTP (μM)-ddGTP; NTP conc (μM)-25;
Oligonucleotide-5′-6-FAM-
T17ATC(2′dF)C; Substrate conc (μM)-1;
Product -5′-6-FAM-T17ATC(2′dF)CddG.

[0376] Activity relative to SEQ ID NO: 24 (Activity FIOP) was calculated as the percent product of the variant compared with the percent product observed by the reaction with SEQ ID NO: 24 (where the percent product may be set as the average of replicates or else the highest single sample as appropriate). The results are shown in Table 10.2.

TABLE 10.2

| | Amino Acid | FIOP Product |
|---|---|---|
| SEQ | Differences | Peak Area |
| ID NO: | (Relative to | Relative to |
| (nt/aa) | SEQ ID NO: 24) | SEQ ID NO: 24 |
| 271/272 | T101E | +++ |
| 265/266 | V124E | +++ |
| 497/498 | V124G | +++ |
| 499/500 | T101V | +++ |
| 501/502 | H7Y/Q135C | +++ |
| 361/362 | L153P | +++ |
| 503/504 | K29I | +++ |
| 505/506 | R16V | +++ |
| 507/508 | Q109M | +++ |
| 509/510 | I85V | +++ |
| 511/512 | K24A | +++ |
| 513/514 | K131W | +++ |
| 515/516 | Q135E | +++ |
| 517/518 | F110V | +++ |
| 519/520 | R14Y | +++ |
| 521/522 | S35W | +++ |
| 523/524 | T101G | +++ |
| 525/526 | K123M | +++ |
| 527/528 | F110M | ++ |
| 529/530 | V124M | ++ |
| 531/532 | G23C | ++ |
| 533/534 | K24M | ++ |
| 535/536 | R14N | ++ |
| 537/538 | H44S | ++ |
| 539/540 | H13E | ++ |
| 541/542 | D65S | ++ |
| 543/544 | T108M | ++ |
| 545/546 | K123Q | ++ |
| 547/548 | H33C | ++ |
| 549/550 | A57T | ++ |
| 551/552 | T130M | ++ |
| 553/554 | K133M | ++ |
| 555/556 | D94N | ++ |
| 475/476 | G23E | ++ |
| 557/558 | G23T | ++ |
| 559/560 | E105W | ++ |
| 561/562 | G132S | ++ |
| 563/564 | E77C | ++ |
| 565/566 | V124S | ++ |
| 567/568 | E77S | ++ |
| 569/570 | Q135K | ++ |
| 571/572 | S35H | ++ |
| 409/410 | K103M | ++ |
| 303/304 | L156D | ++ |
| 573/574 | Y134M | ++ |
| 575/576 | Q135H | ++ |
| 577/578 | M137E | ++ |
| 579/580 | N32E | + |
| 581/582 | K131G | + |
| 583/584 | N89A | + |
| 585/586 | K133Q | + |
| 587/588 | T108G | + |
| 589/590 | Q27F | + |
| 591/592 | I119Q | + |
| 593/594 | Y134W | + |
| 595/596 | K29G | + |
| 597/598 | K25N | + |
| 397/398 | T149R | + |
| 469/470 | V124I | + |
| 599/600 | K24P | + |
| 335/336 | L153Q | + |
| 279/280 | L153E | + |
| 377/378 | K133G | + |
| 601/602 | S139G | + |
| 603/604 | T130A | + |
| 605/606 | K126C | + |
| 607/608 | S20P | + |
| 609/610 | E45R | + |
| 467/468 | Q27D | + |
| 479/480 | H102L | + |
| 611/612 | I15L | + |
| 613/614 | T130Q | + |
| 615/616 | T130S | + |
| 481/482 | E105N | + |
| 617/618 | A97T | + |
| 619/620 | K28R | + |
| 489/490 | R26G | + |
| 621/622 | Q109N | + |
| 623/624 | F46M | + |
| 625/626 | K106V | + |
| 627/628 | I119F | + |
| 629/630 | I18Y | + |
| 631/632 | H33A | + |
| 331/332 | R14G | + |
| 633/634 | D31V | + |
| 359/360 | L153G | + |
| 635/636 | Q109T | + |
| 275/276 | I34S | + |
| 399/400 | M137A | + |
| 295/296 | A150E | + |
| 637/638 | E138A | + |
| 639/640 | S93V | + |
| 641/642 | T17A/K131R | + |
| 643/644 | M12F | + |

Levels of increased activity were determined relative to the reference polypeptide of SEQ ID NO: 24 and defined as follows: “+” 1.21 to 1.42-fold increased activity; “++” >1.42-fold increased activity; “+++” >1.69-fold increased activity.

### Example 11

### Improvements Over SEQ ID NO: 268 in the Extension of Oligonucleotide Acceptor Molecules with Nucleotide Triphosphate Donors

### HTP Screening for Improved TdT Variants

[0377] SEQ ID NO: 268 was selected as the parent TdT enzyme. Libraries of engineered genes were produced from the parent gene using various techniques (e.g., saturation mutagenesis and recombination of previously identified beneficial mutations). The polypeptides encoded by each gene were produced in HTP and prepared as described in Table 11.1.

[0378] Reactions were performed in 96-well format 200 μL BioRad PCR plates. Reactions included 1-10 μM oligonucleotide, 25-50 μM nucleotide triphosphate, 20 mM buffer, and 250 μM cobalt (II) chloride. The reactions were set up as follows: (i) all reaction components, except for TdT, were pre-mixed in a single solution and were aliquoted into each well of the 96-well plates (ii) TdT lysate solution was then added into the wells to initiate the reaction. The reaction plate was heat-sealed with a peelable aluminum seal and incubated in a thermocycler at the indicated temperature and reaction time, then held at 4° C. until the reaction was quenched. Reactions were quenched and processed for CE analysis as described in Example 4.

TABLE 11.1-Reaction conditions

Lysis buffer-MOPS (50 mM, pH 7.4), 0.2 g/L lysozyme;
Reaction buffer-20 mM MOPS, 50 mM
KOAc, 0.25 mM CoCl₂, pH 7.2;
Lysate concentration (vol %)-12.5; Preincubation Temp (C.)-47° C.;
Preincubation Time (min)-15; Reaction temperature (C.)-47° C.;
Reaction Time (min)-30; Reaction
volume (μL) -20; NTP (μM)-mATP; NTP conc (μM)-25;
Oligonucleotide-5′-6-FAM-
T17ATC(2′dF)C; Substrate conc (μM)-1;
Product -5′-6-FAM-T17ATC(2′dF)CmA.

[0379] Activity relative to SEQ ID NO: 268 (Activity FIOP) was calculated as the percent product of the variant compared with the percent product observed by the reaction with SEQ ID NO: 268 (where the percent product may be set as the average of replicates or else the highest single sample as appropriate). The results are shown in Table 11.2.

TABLE 11.2

| | Amino Acid | FIOP Product |
|---|---|---|
| SEQ | Differences | Peak Area |
| ID NO: | (Relative to | Relative to |
| (nt/aa) | SEQ ID NO: 268) | SEQ ID NO: 268 |
| 645/646 | K300P/E395Y/A419L | ++ |
| 647/648 | K106V/K300P/Q415A/A419L/V456R | ++ |
| 649/650 | R140G | + |
| 651/652 | R14G/E53K/A419L | + |
| 653/654 | R14G/E53K/K300P | + |

Levels of increased activity were determined relative to the reference polypeptide of SEQ ID NO: 268 and defined as follows: “+” 1.02 to 1.70-fold increased activity; “++” >1.70-fold increased activity.

### Example 12

### Improvements Over SEQ ID NO: 648 in the Extension of Oligonucleotide Acceptor Molecules with Nucleotide Triphosphate Donors

### HTP Screening for Improved TdT Variants

[0380] SEQ ID NO: 648 was selected as the parent TdT enzyme. Libraries of engineered genes were produced from the parent gene using various techniques (e.g., saturation mutagenesis and recombination of previously identified beneficial mutations). The polypeptides encoded by each gene were produced in HTP and prepared as described in Table 12.1.

[0381] Reactions were performed in 96-well format 200 μL BioRad PCR plates. Reactions included 1-M oligonucleotide, 25-50 μM nucleotide triphosphate, 20 mM buffer, and 250 μM cobalt (II) chloride. The reactions were set up as follows: (i) all reaction components, except for TdT, were pre-mixed in a single solution and were aliquoted into each well of the 96-well plates (ii) TdT lysate solution was then added into the wells to initiate the reaction. The reaction plate was heat-sealed with a peelable aluminum seal and incubated in a thermocycler at the indicated temperature and reaction time, then held at 4° C. until the reaction was quenched. Reactions were quenched and processed for CE analysis as described in Example 4.

TABLE 12.1-Reaction conditions

Lysis buffer-MOPS (50 mM, pH 7.4), 0.2 g/L lysozyme;
Reaction buffer-20 mM MOPS, 50 mM
KOAc, 0.25 mM CoCl₂, pH 7.2;
Lysate concentration (vol %)-3.125; Preincubation Temp (C.)-50° C.;
Preincubation Time (min)-15; Reaction temperature (C.)-50° C.;
Reaction Time (min)-30; Reaction
volume (μL) -20; NTP (μM)-ddGTP; NTP conc (μM)-25;
Oligonucleotide-5′-6-FAM-T17AT*mC;
Substrate conc (μM)-1;
Product -5′-6-FAM-T17AT*mCddG.

[0382] Activity relative to SEQ ID NO: 648 (Activity FIOP) was calculated as the percent product of the variant compared with the percent product observed by the reaction with SEQ ID NO: 648 (where the percent product may be set as the average of replicates or else the highest single sample as appropriate). The results are shown in Table 12.2.

TABLE 12.2

| | Amino Acid | FIOP Product |
|---|---|---|
| SEQ | Differences | Peak Area |
| ID NO: | (Relative to | Relative to |
| (nt/aa) | SEQ ID NO: 648) | SEQ ID NO: 648 |
| 655/656 | R14G/I34D/D94E/V106K/T108K/V141E | +++ |
| 657/658 | I34D/M37A/G92R | +++ |
| 659/660 | M12S/R14G/I34D/M37A/V106K/R140G/D142M/ | +++ |
| | A150E/T152R/L153E | |
| 661/662 | I34D/G92R/D94E/V141E/D142M | +++ |
| 663/664 | M12S/M37A/D94E/V141E/A150E/T152R/L153E | +++ |
| 665/666 | M12S/I34D/G92R/R140G | +++ |
| 667/668 | I34D/A150E/T152R/L153E | +++ |
| 669/670 | M12S/R14G/I34D/M37F/D94E/R140G/V141E/N145E | +++ |
| 671/672 | T101E/V106S/V124E/I155E | +++ |
| 673/674 | G92R/D94E/V106K/D142S/N145E | +++ |
| 675/676 | S20T/D21E/K24G/H33K/T58A/M104P/ | +++ |
| | V106S/V124E/I155E/L156E | |
| 677/678 | M12S/R14G/I34D/M37A/A150E | +++ |
| 679/680 | S20T/D21E/H33K/T58A/T101E/M104P/V106K/V124E/I155E | +++ |
| 681/682 | I34S/M37A/A150E/L153E | +++ |
| 683/684 | M12S/R14G/V106K/T108K/R140G/V141E/N145E/A150E | +++ |
| 685/686 | M12S/R14G/I34D/R140G/A150E | +++ |
| 687/688 | R14G/I34S/A150E/L153E | +++ |
| 689/690 | I34D/M37A | +++ |
| 691/692 | M30G/M104P/V106S/I155E/L156E | +++ |
| 693/694 | M12S/R14G/I34D/M37A/V141E/D142S | +++ |
| 695/696 | R14G/D31G/I34D/M37A/R140G/V141E/N145E/K161E/T162E | +++ |
| 697/698 | V106K/T108K/R140G/V141E/T152R/L153E | +++ |
| 699/700 | M30G/T101E/M104P/V106S/I155E/L156E | +++ |
| 701/702 | D21E/T101E/M104P/V106S/L156E | ++ |
| 703/704 | D21E/H33K/T58A/T101E/V106K | ++ |
| 705/706 | R14G/I34S/M37A | ++ |
| 707/708 | M104P/V106S | ++ |
| 709/710 | M12S/M37F/R140G/V141E/A150E/T162E | ++ |
| 711/712 | M12S/R14G/G92R/D94E | ++ |
| 713/714 | M12S/I34D/A150E/T152R | ++ |
| 715/716 | T58S/T101E/M104P/V106S/L156E | ++ |
| 717/718 | R14G/V141E/K161E | ++ |
| 719/720 | R14G/I34D/A150E/L153E | ++ |
| 721/722 | R14G/I34S/M37A/T152R | ++ |
| 723/724 | V106K/T108K/R140G/D142S/A150E/L153E | ++ |
| 725/726 | M12S/R14G/I34D/R140G/D142S | ++ |
| 727/728 | D21E/H33K/T101E/M104P/V106S | ++ |
| 729/730 | R14G/K161E | ++ |
| 731/732 | T58A/T101E/V106K/1155E | ++ |
| 733/734 | M12S/R14G/D94E/A150E/T152R | ++ |
| 735/736 | M12S/R14G/I34D/M37F/A150E/L153E | ++ |
| 737/738 | T101E/V106K/I155E/L156E | ++ |
| 739/740 | M104P/V106S/I155E | ++ |
| 741/742 | M30G/M104P/V106S/I155E | ++ |
| 743/744 | M12S/R14G/I34S/M37A/D142M/K161E | ++ |
| 745/746 | M30G/V106K/I155E | ++ |
| 747/748 | M12S/R14G/A150E/T152R/L153E | ++ |
| 749/750 | S20T/T58S/T101E/M104P/V106S/L156E | ++ |
| 751/752 | M30G/H33K/T58S/M104P/V106S/I155E/L156E | ++ |
| 753/754 | T101E/V106K | ++ |
| 755/756 | M104P/V106K/I155E | ++ |
| 757/758 | M30G/H33K/M104I/V106S/I155E/L156E | ++ |
| 759/760 | M12S/R14G/I34S/D142S/A150E/L153E | ++ |
| 761/762 | D21E/M104P/V106S | ++ |
| 763/764 | D21E/T58S/T101E/M104I/V106S/I155E | + |
| 765/766 | K161E | + |
| 767/768 | D21E/M104P/V106S/L156E | + |
| 769/770 | M12S/R14G/I34D | + |
| 771/772 | R14G/L153E | + |
| 773/774 | M12S/R14G/L153E | + |
| 775/776 | S20T/T58A/T101E/V106K | + |
| 777/778 | R140G/N145E | + |
| 779/780 | S20T/H33K/M104P/V106K/V124E/L156E | + |
| 781/782 | D21E/H33K/T58S/V106S/I155E/L156E | + |
| 783/784 | D21E/T58A/V106K/I155E/L156E | + |
| 785/786 | H33K/T58A/M104I/V106S | + |
| 787/788 | I34S/M37F/R140G/V141E/D142M/N145E | + |
| 789/790 | M12S/R14G/V141E/D142S | + |
| 791/792 | R140G/N145E/A150E/T152R | + |
| 793/794 | H33K/T101E/M104P/V106K/I155E | + |
| 795/796 | T101E/M104I/V106K/L156E | + |
| 797/798 | T101E/M104I/V106K | + |
| 799/800 | M104I/V106K | + |
| 801/802 | M12S/R14G/V106K/T108K/T152R | + |
| 803/804 | M12S/R14G/I34D/M37F/D142S/N145E | + |
| 805/806 | M37A/V141E/D142S | + |
| 807/808 | I34D/V141E/D142S/N145E | + |
| 809/810 | M104I/V106K/V124E | + |
| 811/812 | T101E/M104I/V106S/L156E | + |
| 813/814 | M104I/V106S/I155E/L156E | + |
| 815/816 | V141E/T152R | + |
| 817/818 | M30G/H33K/T101E/V106S/L156E | + |
| 819/820 | R14G/I34S/M37F/N145E | + |
| 821/822 | S20T/T101E/V106K/L156E | + |
| 823/824 | V141E | + |
| 825/826 | S20T/D21E/T58A/M104I/V106S/I155E/L156E | + |
| 827/828 | M12S/K161E | + |
| 829/830 | R14G | + |
| 831/832 | M37F/L153E | + |
| 833/834 | T101E/M104P/V106K/I155E/L156E | + |
| 835/836 | M104I/V106S | + |
| 837/838 | D21E/H33K/V106S | + |
| 839/840 | I34D/M37F/V141E/D142S | + |
| 841/842 | M104P/V106K/L156E | + |
| 843/844 | T58S/M104I/V106K/I155E/L156E | + |
| 845/846 | V106K/T107R/T108K/D142S/S220R | + |
| 847/848 | M37F/G92R/D142M | + |
| 849/850 | V106K/L156E | + |
| 851/852 | R14G/V106K | + |
| 853/854 | D21E/M104I/V106S/V124E | + |
| 855/856 | R14G/R140G | + |
| 857/858 | R14G/D142M | + |
| 859/860 | R140G/V141E/D142M | + |
| 861/862 | M104P/V106K | + |
| 863/864 | R14G/D142S/K161E/T162E | + |
| 865/866 | M12S/R14G/V106K/T107R/V141E/D142M | + |

Levels of increased activity were determined relative to the reference polypeptide of SEQ ID NO: 648 and defined as follows: “+” 1.19 to 3.50-fold increased activity; “++” >3.50-fold increased activity; “+++” >8.50-fold increased activity.

### Example 13

### Improvements Over SEQ ID NO: 660 in the Extension of Oligonucleotide Acceptor Molecules with Nucleotide Triphosphate Donors

### HTP Screening for Improved TdT Variants

[0383] SEQ ID NO: 660 was selected as the parent TdT enzyme. Libraries of engineered genes were produced from the parent gene using various techniques (e.g., saturation mutagenesis and recombination of previously identified beneficial mutations). The polypeptides encoded by each gene were produced in HTP and prepared as described in Table 13.1.

[0384] Reactions were performed in 96-well format 200 μL BioRad PCR plates. Reactions included 1-10 μM oligonucleotide, 25-50 μM nucleotide triphosphate, 20 mM buffer, and 250 μM cobalt (II) chloride. The reactions were set up as follows: (i) all reaction components, except for TdT, were pre-mixed in a single solution and were aliquoted into each well of the 96-well plates (ii) TdT lysate solution was then added into the wells to initiate the reaction. The reaction plate was heat-sealed with a peelable aluminum seal and incubated in a thermocycler at the indicated temperature and reaction time, then held at 4° C. until the reaction was quenched. Reactions were quenched and processed for CE analysis as described in Example 4.

TABLE 13.1-Reaction conditions

Lysis buffer-TEA (50 mM, pH 7.5), 0.1 g/L lysozyme;
Reaction buffer-20 mM TEA, 0.25 mM CoCl₂,
pH 7.8; Lysate concentration (vol %)-25;
Preincubation Temp (C.)-50° C.; Preincubation Time (min)-
60; Reaction temperature (C.)-50° C.; Reaction Time (min)-30;
Reaction volume (μL) -20; NTP
(μM)-*rATP; NTP conc (μM)-25;
Oligonucleotide-5′-6-FAM-T12ATCAC*(2′dF)A; Substrate conc
(μM)-1; Product -5′-6-FAM-T12ATCAC*(2′dF)A*rA.

[0385] Activity relative to SEQ ID NO: 660 (Activity FIOP) was calculated as the percent product of the variant compared with the percent product observed by the reaction with SEQ ID NO: 660 (where the percent product may be set as the average of replicates or else the highest single sample as appropriate). The results are shown in Table 13.2.

TABLE 13.2

| | Amino Acid | FIOP Product |
|---|---|---|
| SEQ | Differences | Peak Area |
| ID NO: | (Relative to | Relative to |
| (nt/aa) | SEQ ID NO: 660) | SEQ ID NO: 660 |
| 867/868 | R16V/K29I/M30E/T101E/M104V | +++ |
| 869/870 | T101E/V141E/I155E/L156E | +++ |
| 871/872 | T101E/M137E/L155E | +++ |
| 873/874 | G92R/T101E/M137A/I155E/E476R | +++ |
| 875/876 | T101E/M104V | ++ |
| 877/878 | T101E | ++ |
| 879/880 | R16V/K29I/M30E | ++ |
| 881/882 | G92R/D94E/T108K/V141E/I155E/D392R | ++ |
| 883/884 | T58A | ++ |
| 885/886 | T108K | + |
| 887/888 | D94E/T101E/L156E/E476R | + |
| 889/890 | R16V/M30L/M104V | + |
| 891/892 | K29I/M30E | + |
| 893/894 | R16V/K29I/M30E/H33K/E153P | + |
| 895/896 | R16V/H33K | + |

Levels of increased activity were determined relative to the reference polypeptide of SEQ ID NO: 660 and defined as follows: “+” 1.20 to 1.56-fold increased activity; “++” >1.56-fold increased activity; “+++” >2.42-fold increased activity.

### Example 14

### Improvements Over SEQ ID NO: 660 in the Extension of Oligonucleotide Acceptor Molecules with Nucleotide Triphosphate Donors

### HTP Screening for Improved TdT Variants

[0386] SEQ ID NO: 660 was selected as the parent TdT enzyme. Libraries of engineered genes were produced from the parent gene using various techniques (e.g., saturation mutagenesis and recombination of previously identified beneficial mutations). The polypeptides encoded by each gene were produced in HTP and prepared as described in Table 14.1.

[0387] Reactions were performed in 96-well format 200 mL BioRad PCR plates. Reactions included 1-10 μM oligonucleotide, 25-50 5M nucleotide triphosphate, 20 mM buffer, and 250 nM cobalt (II) chloride. The reactions were set up as follows: (i) all reaction components, except for TdT, were pre-mixed in a single solution and were aliquoted into each well of the 96-well plates (ii) TdT lysate solution was then added into the wells to initiate the reaction. The reaction plate was heat-sealed with a peelable aluminum seal and incubated in a thermocycler at the indicated temperature and reaction time, then held at 4° C. until the reaction was quenched. Reactions were quenched and processed for CE analysis as described in Example 4.

TABLE 14.1-Reaction conditions

Lysis buffer-TEA (50 mM, pH 7.5), 0.1 g/L lysozyme;
Reaction buffer-20 mM TEA, 0.25 mM CoCl2,
pH 7.8; Lysate concentration (vol %)-25;
Preincubation Temp (C.)-48° C.; Preincubation Time (min)-
60; Reaction temperature (C.)-48° C.;
Reaction Time (min)-30; Reaction volume (μL) -20; NTP
(μM)-*rGTP; NTP conc (μM)-25;
Oligonucleotide-5′-6-FAM-T12ATCAC*mA; Substrate conc
(μM)-1; Product -5′-6-FAM-T12ATCAC*mA*rG.

[0388] Activity relative to SEQ ID NO: 660 (Activity FIOP) was calculated as the percent product of the variant compared with the percent product observed by the reaction with SEQ ID NO: 660 (where the percent product may be set as the average of replicates or else the highest single sample as appropriate). The results are shown in Table 14.2.

TABLE 14.2

| | Amino Acid | FIOP Product |
|---|---|---|
| SEQ | Differences | Peak Area |
| ID NO: | (Relative to | Relative to |
| (nt/aa) | SEQ ID NO: 660) | SEQ ID NO: 660 |
| 897/898 | E342V | +++ |
| 899/900 | F204L/E342W | +++ |
| 901/902 | L264R | +++ |
| 903/904 | E310A | +++ |
| 905/906 | K303V | +++ |
| 907/908 | V290L | +++ |
| 909/910 | G391R | +++ |
| 911/912 | L421F | +++ |
| 913/914 | Y308F | +++ |
| 915/916 | L306F | +++ |
| 917/918 | L454M | +++ |
| 919/920 | K278V | +++ |
| 921/922 | K303A | +++ |
| 923/924 | K278E | +++ |
| 925/926 | V316L | +++ |
| 927/928 | R281T | +++ |
| 929/930 | E310R | +++ |
| 931/932 | K278C | +++ |
| 933/934 | R281C | +++ |
| 935/936 | K278I | ++ |
| 937/938 | K297V | ++ |
| 939/940 | R456S | ++ |
| 941/942 | S525F | ++ |
| 943/944 | L360I | ++ |
| 945/946 | G236E/K297L | ++ |
| 947/948 | Q385R | ++ |
| 949/950 | E310G | ++ |
| 951/952 | R281G | ++ |
| 953/954 | R281L | ++ |
| 955/956 | G391L | ++ |
| 957/958 | K303N | ++ |
| 959/960 | V268L | ++ |
| 961/962 | L419G | ++ |
| 963/964 | K448R | ++ |
| 965/966 | M282G | ++ |
| 967/968 | K278T | ++ |
| 969/970 | K297D | ++ |
| 971/972 | E342R | ++ |
| 973/974 | P300R | ++ |
| 975/976 | R281S | ++ |
| 977/978 | R281V | ++ |
| 979/980 | K303S | ++ |
| 981/982 | K297S | ++ |
| 983/984 | H413F | ++ |
| 985/986 | M282W | ++ |
| 987/988 | E476V | ++ |
| 989/990 | R281A | ++ |
| 991/992 | H413C | + |
| 993/994 | H413V | + |
| 995/996 | R258S | + |
| 997/998 | Y308W | + |
| 999/1000 | M205E | + |
| 1001/1002 | R258W | + |
| 1003/1004 | G315S | + |
| 1005/1006 | M282C | + |
| 1007/1008 | R291S | + |
| 1009/1010 | K297C | + |
| 1011/1012 | L264A | + |
| 1013/1014 | Y309F | + |
| 1015/1016 | L264E | + |
| 1017/1018 | R473V | + |
| 1019/1020 | A276S | + |
| 1021/1022 | F353K | + |
| 1023/1024 | T344V | + |
| 1025/1026 | R258G | + |
| 1027/1028 | L264S | + |
| 1029/1030 | R258A | + |
| 1031/1032 | V290A | + |
| 1033/1034 | R258L | + |
| 1035/1036 | E310S | + |
| 1037/1038 | M282H | + |
| 1039/1040 | G315A | + |
| 1041/1042 | V316A | + |
| 1043/1044 | R258M | + |
| 1045/1046 | S261V | + |
| 1047/1048 | A515V | + |
| 1049/1050 | N197M | + |
| 1051/1052 | L419H | + |
| 1053/1054 | K303Q | + |
| 1055/1056 | L312V | + |
| 1057/1058 | F353M | + |
| 1059/1060 | F353A | + |
| 1061/1062 | Y280F | + |
| 1063/1064 | S261R | + |
| 1065/1066 | M205L | + |
| 1067/1068 | E310H | + |
| 1069/1070 | F262I | + |
| 1071/1072 | S525H | + |
| 1073/1074 | K278R | + |
| 1075/1076 | R258C | + |
| 1077/1078 | S261G | + |
| 1079/1080 | F353R | + |
| 1081/1082 | A410E | + |
| 1083/1084 | K195E | + |
| 1085/1086 | F353S | + |
| 1087/1088 | F269W | + |

Levels of increased activity were determined relative to the reference polypeptide of SEQ ID NO: 660 and defined as follows: “+” 1.08 to 1.94-fold increased activity; “++” >1.94-fold increased activity; “+++” >3.10-fold increased activity.

### Example 15

### Improvements Over SEQ ID NO: 882 in the Extension of Oligonucleotide Acceptor Molecules with Nucleotide Triphosphate Donors

### HTP Screening for Improved TdT Variants

[0389] SEQ ID NO: 882 was selected as the parent TdT enzyme. Libraries of engineered genes were produced from the parent gene using various techniques (e.g., saturation mutagenesis and recombination of previously identified beneficial mutations). The polypeptides encoded by each gene were produced in HTP and prepared as described in Table 15.1.

[0390] Reactions were performed in 96-well format 200 μL BioRad PCR plates. Reactions included 1-10 μM oligonucleotide, 25-50 μM nucleotide triphosphate, 20 mM buffer, and 250 μM cobalt (II) chloride. The reactions were set up as follows: (i) all reaction components, except for TdT, were pre-mixed in a single solution and were aliquoted into each well of the 96-well plates (ii) TdT lysate solution was then added into the wells to initiate the reaction. The reaction plate was heat-sealed with a peelable aluminum seal and incubated in a thermocycler at the indicated temperature and reaction time, then held at 4° C. until the reaction was quenched. Reactions were quenched and processed for CE analysis as described in Example 4.

TABLE 15.1-Reaction conditions

Lysis buffer-TEA (50 mM, pH 7.5), 0.1 g/L lysozyme;
Reaction buffer-20 mM TEA, 0.25 mM CoCl₂,
pH 7.8; Lysate concentration (vol %)-25;
Preincubation Temp (C.)-50° C.; Preincubation Time (min)-
60; Reaction temperature (C.)-50° C.;
Reaction Time (min)-30; Reaction volume (μL)-20; NTP (μM)-
*rGTP; NTP conc (μM)-25; Oligonucleotide-5′-6-FAM-T12ATCAC*mC;
Substrate conc (μM)-1;
Product -5′-6-FAM-T12ATCAC*mC*rG.

[0391] Activity relative to SEQ ID NO: 882 (Activity FIOP) was calculated as the percent product of the variant compared with the percent product observed by the reaction with SEQ ID NO: 882 (where the percent product may be set as the average of replicates or else the highest single sample as appropriate). The results are shown in Table 15.2.

TABLE 15.2

| | Amino Acid | FIOP Product |
|---|---|---|
| SEQ | Differences | Peak Area |
| ID NO: | (Relative to | Relative to |
| (nt/aa) | SEQ ID NO: 882) | SEQ ID NO: 882 |
| 1089/1090 | T203A | +++ |
| 1091/1092 | R394E | +++ |
| 1093/1094 | R394T | +++ |
| 1095/1096 | D314R | +++ |
| 1097/1098 | D199R | +++ |
| 1099/1100 | R461G | +++ |
| 1101/1102 | L403F/F462H | +++ |
| 1103/1104 | T484R | +++ |
| 1105/1106 | D199V | +++ |
| 1107/1108 | T379C | +++ |
| 1109/1110 | S325F | +++ |
| 1111/1112 | R481D | +++ |
| 1113/1114 | D314V | +++ |
| 1115/1116 | F462I | ++ |
| 1117/1118 | T484M | ++ |
| 1119/1120 | D314K | ++ |
| 1121/1122 | A321K | ++ |
| 1123/1124 | D314L | ++ |
| 1125/1126 | T203S | ++ |
| 1127/1128 | I208V | ++ |
| 1129/1130 | D199M | ++ |
| 1131/1132 | F462R | ++ |
| 1133/1134 | I408A | ++ |
| 1135/1136 | C457V | ++ |
| 1137/1138 | T203R | ++ |
| 1139/1140 | T203L | ++ |
| 1141/1142 | R477T | ++ |
| 1143/1144 | A321C | ++ |
| 1145/1146 | D314Y | ++ |
| 1147/1148 | F462W | ++ |
| 1149/1150 | A495S | + |
| 1151/1152 | Q329R/F462E | + |
| 1153/1154 | T317G | + |
| 1155/1156 | A321S | + |
| 1157/1158 | A313I | + |
| 1159/1160 | T275V | + |
| 1161/1162 | D314G | + |
| 1163/1164 | S325V | + |
| 1165/1166 | D199G | + |
| 1167/1168 | R406V | + |
| 1169/1170 | D199S | + |
| 1171/1172 | C457S | + |
| 1173/1174 | R406G | + |
| 1175/1176 | R196G | + |
| 1177/1178 | R481M | + |
| 1179/1180 | D199Q | + |
| 1181/1182 | R397T | + |
| 1183/1184 | S325T | + |
| 1185/1186 | R196Y | + |
| 1187/1188 | R397D | + |
| 1189/1190 | S325W | + |
| 1191/1192 | N175L | + |
| 1193/1194 | R481T | + |
| 1195/1196 | W469Q | + |
| 1197/1198 | T203G | + |
| 1199/1200 | R461V | + |
| 1201/1202 | I408T | + |
| 1203/1204 | D322A | + |

Levels of increased activity were determined relative to the reference polypeptide of SEQ ID NO: 882 and defined as follows: “+” 1.01 to 1.60-fold increased activity; “++” >1.60-fold increased activity; “+++” >2.85-fold increased activity.

### Example 16

### Improvements Over SEQ ID NO: 882 in the Extension of Oligonucleotide Acceptor Molecules with Nucleotide Triphosphate Donors

### HTP Screening for Improved TdT Variants

[0392] SEQ ID NO: 882 was selected as the parent TdT enzyme. Libraries of engineered genes were produced from the parent gene using various techniques (e.g., saturation mutagenesis and recombination of previously identified beneficial mutations). The polypeptides encoded by each gene were produced in HTP and prepared as described in Table 16.1.

[0393] Reactions were performed in 96-well format 200 μL BioRad PCR plates. Reactions included 1-10 μM oligonucleotide, 25-50 μM nucleotide triphosphate, 20 mM buffer, and 250 nM cobalt (II) chloride. The reactions were set up as follows: (i) all reaction components, except for TdT, were pre-mixed in a single solution and were aliquoted into each well of the 96-well plates (ii) TdT lysate solution was then added into the wells to initiate the reaction. The reaction plate was heat-sealed with a peelable aluminum seal and incubated in a thermocycler at the indicated temperature and reaction time, then held at 4° C. until the reaction was quenched. Reactions were quenched and processed for CE analysis as described in Example 4.

TABLE 16.1-Reaction conditions

Lysis buffer-TEA (50 mM, pH 7.5), 0.1 g/L lysozyme;
Reaction buffer-20 mM TEA, 0.25 mM CoCl₂,
pH 7.8; Lysate concentration (vol %)-25;
Preincubation Temp (C.)-50° C.; Preincubation Time (min)-
60; Reaction temperature (C.)-50° C.;
Reaction Time (min)-30; Reaction volume (μL) -20; NTP
(μM)-*rUTP; NTP conc (μM)-25;
Oligonucleotide-5′-6-FAM-T12ATCAC*mC; Substrate conc
(μM)-1; Product -5′-6-FAM-T12ATCAC*mC*rU.

[0394] Activity relative to SEQ ID NO: 882 (Activity FIOP) was calculated as the percent product of the variant compared with the percent product observed by the reaction with SEQ ID NO: 882 (where the percent product may be set as the average of replicates or else the highest single sample as appropriate).

[0395] The results are shown in Table 16.2.

TABLE 16.2

| | Amino Acid | FIOP Product |
|---|---|---|
| SEQ | Differences | Peak Area |
| ID NO: | (Relative to | Relative to |
| (nt/aa) | SEQ ID NO: 882) | SEQ ID NO: 882 |
| 1205/1206 | R394L | +++ |
| 1207/1208 | R394T | +++ |
| 1209/1210 | R461S | +++ |
| 1211/1212 | R394M | +++ |
| 1213/1214 | R461G | +++ |
| 1215/1216 | R461A | +++ |
| 1217/1218 | F462L | +++ |
| 1219/1220 | R477Q | +++ |
| 1221/1222 | T203M | +++ |
| 1223/1224 | R394S | +++ |
| 1225/1226 | D199R | +++ |
| 1227/1228 | A495G | +++ |
| 1229/1230 | D199A | +++ |
| 1231/1232 | T484R | +++ |
| 1233/1234 | I408L | +++ |
| 1235/1236 | T484M | ++ |
| 1237/1238 | D492S | ++ |
| 1239/1240 | V273W | ++ |
| 1241/1242 | D314I | ++ |
| 1243/1244 | C201A | ++ |
| 1245/1246 | D199G | ++ |
| 1247/1248 | N175V | ++ |
| 1249/1250 | D492T | ++ |
| 1251/1252 | A313R | ++ |
| 1253/1254 | D199H | ++ |
| 1255/1256 | T275D | ++ |
| 1257/1258 | A495S | ++ |
| 1259/1260 | A313Q | ++ |
| 1261/1262 | D199Q | ++ |
| 1263/1264 | C307M | ++ |
| 1265/1266 | G350S | ++ |
| 1267/1268 | Q179R | ++ |
| 1269/1270 | S325V | ++ |
| 1271/1272 | D199I | + |
| 1273/1274 | R481W | + |
| 1275/1276 | D199V | + |
| 1277/1278 | D199E | + |
| 1279/1280 | C307V | + |
| 1281/1282 | T203R | + |
| 1283/1284 | A319R | + |
| 1285/1286 | G272T | + |
| 1287/1288 | A321K | + |
| 1289/1290 | N175D | + |
| 1291/1292 | S325A | + |
| 1293/1294 | V273M | + |
| 1295/1296 | D322K | + |
| 1297/1298 | F462Q | + |
| 1299/1300 | I408G | + |
| 1301/1302 | C201W | + |
| 1303/1304 | N175I | + |
| 1305/1306 | R196G | + |
| 1307/1308 | P404F | + |
| 1309/1310 | I408R | + |
| 1311/1312 | E523H | + |
| 1313/1314 | D322Q | + |
| 1315/1316 | D314G | + |
| 1317/1318 | A319G | + |
| 1319/1320 | A313S | + |
| 1321/1322 | R406V | + |
| 1323/1324 | L491I | + |
| 1325/1326 | R461Q | + |
| 1327/1328 | Q376V | + |
| 1329/1330 | A313M | + |
| 1331/1332 | P404W | + |
| 1333/1334 | I324V | + |

Levels of increased activity were determined relative to the reference polypeptide of SEQ ID NO: 882 and defined as follows: “+” 1.10 to 1.82-fold increased activity; “++” >1.82-fold increased activity; “+++” >3.14-fold increased activity.

### Example 17

### Improvements Over SEQ ID NO: 1336 in the Extension of Oligonucleotide Acceptor Molecules with Nucleotide Triphosphate Donors

### HTP Screening for Improved TdT Variants

[0396] SEQ ID NO: 1336 was selected as the parent TdT enzyme. Libraries of engineered genes were produced from the parent gene using various techniques (e.g., saturation mutagenesis and recombination of previously identified beneficial mutations). The polypeptides encoded by each gene were produced in HTP and prepared as described in Table 17.1.

[0397] Reactions were performed in 96-well format 200 μL BioRad PCR plates. Reactions included 1-10 μM oligonucleotide, 25-50 μM nucleotide triphosphate, 20 mM buffer, and 250 μM cobalt (II) chloride. The reactions were set up as follows: (i) all reaction components, except for TdT, were pre-mixed in a single solution and were aliquoted into each well of the 96-well plates (ii) TdT lysate solution was then added into the wells to initiate the reaction. The reaction plate was heat-sealed with a peelable aluminum seal and incubated in a thermocycler at the indicated temperature and reaction time, then held at 4° C. until the reaction was quenched. Reactions were quenched and processed for CE analysis as described in Example 4.

TABLE 17.1-Reaction conditions

Lysis buffer-TEA (50 mM, pH 7.5), 0.1 g/L lysozyme;
Reaction buffer-20 mM TEA, 0.25 mM CoCl2,
pH 7.8; Lysate concentration (vol %)-25;
Preincubation Temp (C.)-48° C.; Preincubation Time (min)-
60; Reaction temperature (C.)-48° C.;
Reaction Time (min)-30; Reaction volume (μL) -1; NTP (μM)-
*rGTP; NTP conc (μM)-25; Oligonucleotide-5′-6-FAM-T15AmG*mC;
Substrate conc (μM)-1;
Product -5′-6-FAM-T15AmG*mC*rG.

[0398] Activity relative to SEQ ID NO: 1336 (Activity FIOP) was calculated as the percent product of the variant compared with the percent product observed by the reaction with SEQ ID NO: 1336 (where the percent product may be set as the average of replicates or else the highest single sample as appropriate). The results are shown in Table 17.2.

TABLE 17.2

| SEQ ID | Amino Acid Differences | FIOP Product Peak |
|---|---|---|
| NO: | (Relative to | Area Relative to |
| (nt/aa) | SEQ ID NO: 1336) | SEQ ID NO: 1336 |
| 1337/1338 | T203A/T344V/R394E | +++ |
| 1339/1340 | T203A/K297D/D314R/R394E/ | +++ |
| | E395W | |
| 1341/1342 | K195E/T203A/K278E/R394E/ | +++ |
| | E395W | |
| 1343/1344 | T344V/R394E/E395W | +++ |
| 1345/1346 | K195E/T203A/R394E | +++ |
| 1347/1348 | D314R/R394E/E395W | ++ |
| 1349/1350 | R394E | ++ |
| 1351/1352 | D199R/T203A/K297D/R394E/ | ++ |
| | E395W | |
| 1353/1354 | T203A/R394E | ++ |
| 1355/1356 | K195E/R394E/E395W | ++ |
| 1357/1358 | T203A/K278E/K297D/R394E | ++ |
| 1359/1360 | I15F/D199R/T203A/R394E | ++ |
| 1361/1362 | K195E/D199R/T203A/K278E/ | ++ |
| | D314R/F353K/R394E | |
| 1363/1364 | K195E/K278E/K297D/R394E/ | + |
| | E395W | |
| 1365/1366 | K297D/R394E | + |
| 1367/1368 | K195E/D199R/T203A/K278E/ | + |
| | K297D/R394E | |
| 1369/1370 | K195E/T203A/K297D/D314R/ | + |
| | R394E | |
| 1371/1372 | T203A/R394E/E395W | + |
| 1373/1374 | K195E/K278E/K297D/R394E | + |
| 1375/1376 | K195E/T203A/K297D/R394E/ | + |
| | L419M | |
| 1377/1378 | K195E/D314R/T344V | + |
| 1379/1380 | K28N/T344V/F353K/E395W | + |
| 1381/1382 | T203A/E310R/D314R/R394E/ | + |
| | E395W/L419M | |
| 1383/1384 | T203A/F353K | + |
| 1385/1386 | I15F/D199R/R394E | + |
| 1387/1388 | F353K | + |

Levels of increased activity were determined relative to the reference polypeptide of SEQ ID NO: 1336 and defined as follows:
“+” 1.15 to 3.70-fold increased activity;
“++” >3.70-fold increased activity;
“+++” >5.18-fold increased activity.

### Example 18

### Improvements Over SEQ ID NO: 1336 in the Extension of Oligonucleotide Acceptor Molecules with Nucleotide Triphosphate Donors

### HTP Screening for Improved TdT Variants

[0399] SEQ ID NO: 1336 was selected as the parent TdT enzyme. Libraries of engineered genes were produced from the parent gene using various techniques (e.g., saturation mutagenesis and recombination of previously identified beneficial mutations). The polypeptides encoded by each gene were produced in HTP and prepared as described in Table 18.1.

[0400] Reactions were performed in 96-well format 200 μL BioRad PCR plates. Reactions included 1-10 μM oligonucleotide, 25-50 μM nucleotide triphosphate, 20 mM buffer, and 250 μM cobalt (II) chloride. The reactions were set up as follows: (i) all reaction components, except for TdT, were pre-mixed in a single solution and were aliquoted into each well of the 96-well plates (ii) TdT lysate solution was then added into the wells to initiate the reaction. The reaction plate was heat-sealed with a peelable aluminum seal and incubated in a thermocycler at the indicated temperature and reaction time, then held at 4° C. until the reaction was quenched. Reactions were quenched and processed for CE analysis as described in Example 4.

TABLE 18.1
Reaction conditions

Lysis buffer-TEA (50 mM, pH 7.5), 0.1 g/L lysozyme; Reaction buffer-20
mM TEA, 0.25 mM CoCl2, pH 7.8; Lysate concentration (vol %)-25;
Preincubation Temp (C.)-50° C.; Preincubation Time (min)-60; Reaction
temperature (C.)-48° C.; Reaction Time (min)-30; Reaction volume
(μL) -1; NTP (μM)-mGTP; NTP conc (μM)-50; Oligonucleotide-5′-6-
FAM-T12TATCAC*mC; Substrate conc (μM)-1; Product -5′-6-FAM-
T12TATCAC*mCmG.

[0401] Activity relative to SEQ ID NO: 1336 (Activity FIOP) was calculated as the percent product of the variant compared with the percent product observed by the reaction with SEQ ID NO: 1336 (where the percent product may be set as the average of replicates or else the highest single sample as appropriate). The results are shown in Table 18.2.

TABLE 18.2

| SEQ ID | Amino Acid Differences | FIOP Product Peak |
|---|---|---|
| NO: | (Relative to | Area Relative to |
| (nt/aa) | SEQ ID NO: 1336) | SEQ ID NO: 1336 |
| 1389/1390 | D330E | +++ |
| 1391/1392 | W333H | +++ |
| 1393/1394 | W333R | +++ |
| 1395/1396 | L340S | +++ |
| 1397/1398 | S292L/L411P | +++ |
| 1399/1400 | M490R | +++ |
| 1401/1402 | I503E | +++ |
| 1403/1404 | H177L | +++ |
| 1405/1406 | M435C | +++ |
| 1407/1408 | D460G | +++ |
| 1409/1410 | W333G | +++ |
| 1411/1412 | W333A | +++ |
| 1413/1414 | T200C/H425K | +++ |
| 1415/1416 | L326T | +++ |
| 1417/1418 | L340R | +++ |
| 1419/1420 | V219R | +++ |
| 1421/1422 | D338T | +++ |
| 1423/1424 | T160M | +++ |
| 1425/1426 | S446P | +++ |
| 1427/1428 | L340M/G438V | +++ |
| 1429/1430 | Q373H | +++ |
| 1431/1432 | T334R | ++ |
| 1433/1434 | L326N | ++ |
| 1435/1436 | T334S | ++ |
| 1437/1438 | L340A | ++ |
| 1439/1440 | S363C | ++ |
| 1441/1442 | I503Q | ++ |
| 1443/1444 | H425R | ++ |
| 1445/1446 | I503V | ++ |
| 1447/1448 | E369N | ++ |
| 1449/1450 | M435T | ++ |
| 1451/1452 | S292T | ++ |
| 1453/1454 | M435A | ++ |
| 1455/1456 | L340M | ++ |
| 1457/1458 | W333D | ++ |
| 1459/1460 | D400A/G401E/K402F | ++ |
| 1461/1462 | Y459Q | ++ |
| 1463/1464 | M435K | ++ |
| 1465/1466 | Q373N | ++ |
| 1467/1468 | T160S | ++ |
| 1469/1470 | E217Q | ++ |
| 1471/1472 | M490V | ++ |
| 1473/1474 | K427Q | ++ |
| 1475/1476 | E369M | ++ |
| 1477/1478 | M435E | ++ |
| 1479/1480 | M435S | ++ |
| 1481/1482 | T61A | ++ |
| 1483/1484 | T160N | ++ |
| 1485/1486 | F504W | ++ |
| 1487/1488 | A444R | ++ |
| 1489/1490 | T162A | ++ |
| 1491/1492 | C213S | + |
| 1493/1494 | L326C | + |
| 1495/1496 | M435G | + |
| 1497/1498 | S446E | + |
| 1499/1500 | Q329K | + |
| 1501/1502 | Q370G | + |
| 1503/1504 | I503R | + |
| 1505/1506 | D372G | + |
| 1507/1508 | D223Q | + |
| 1509/1510 | T200V | + |
| 1511/1512 | K502G | + |
| 1513/1514 | T160V | + |
| 1515/1516 | L326M | + |
| 1517/1518 | H425T | + |
| 1519/1520 | T295S | + |
| 1521/1522 | K383R | + |
| 1523/1524 | L248S | + |
| 1525/1526 | E441N | + |
| 1527/1528 | T437S | + |
| 1529/1530 | S442G | + |
| 1531/1532 | K506E | + |
| 1533/1534 | M490H | + |
| 1535/1536 | M490E | + |
| 1537/1538 | L340G | + |
| 1539/1540 | G236I | + |
| 1541/1542 | T334E | + |
| 1543/1544 | T437Q | + |
| 1545/1546 | M435Q | + |
| 1547/1548 | M435S/I503M | + |
| 1549/1550 | G236V | + |
| 1551/1552 | K427E | + |
| 1553/1554 | H425D | + |
| 1555/1556 | K501A | + |
| 1557/1558 | F504R | + |
| 1559/1560 | V219L | + |
| 1561/1562 | K502R | + |
| 1563/1564 | E246K | + |
| 1565/1566 | E443T | + |
| 1567/1568 | L248C | + |
| 1569/1570 | R152H/I503S | + |
| 1571/1572 | T200C | + |
| 1573/1574 | G236P | + |
| 1575/1576 | E369G | + |
| 1577/1578 | L326S | + |
| 1579/1580 | N440V | + |
| 1581/1582 | K488S | + |
| 1583/1584 | T200K | + |
| 1585/1586 | Q329R | + |
| 1587/1588 | N440E | + |
| 1589/1590 | Q165K | + |
| 1591/1592 | M490W | + |
| 1593/1594 | F504N | + |

Levels of increased activity were determined relative to the reference polypeptide of SEQ ID NO: 1336 and defined as follows:
“+” 1.00 to 1.31-fold increased activity;
“++” >1.31-fold increased activity;
“+++” >1.67-fold increased activity.

### Example 19

### Improvements Over SEQ ID NO: 1348 in the Extension of Oligonucleotide Acceptor Molecules with Nucleotide Triphosphate Donors

### HTP Screening for Improved TdT Variants

[0402] SEQ ID NO: 1348 was selected as the parent TdT enzyme. Libraries of engineered genes were produced from the parent gene using various techniques (e.g., saturation mutagenesis and recombination of previously identified beneficial mutations). The polypeptides encoded by each gene were produced in HTP and prepared as described in Table 19.1.

[0403] Reactions were performed in 96-well format 200 μL BioRad PCR plates. Reactions included 1-10 M oligonucleotide, 25-50 HM nucleotide triphosphate, 20 mM buffer, and 250 μM cobalt (II) chloride. The reactions were set up as follows: (i) all reaction components, except for TdT, were pre-mixed in a single solution and were aliquoted into each well of the 96-well plates (ii) TdT lysate solution was then added into the wells to initiate the reaction. The reaction plate was heat-sealed with a peelable aluminum seal and incubated in a thermocycler at the indicated temperature and reaction time, then held at 4° C. until the reaction was quenched. Reactions were quenched and processed for CE analysis as described in Example 4.

TABLE 19.1
Reaction conditions

Lysis buffer-TEA (50 mM, pH 7.5), 0.1 g/L lysozyme; Reaction buffer-20
mM TEA, 0.25 mM CoCl2, pH 7.8; Lysate concentration (vol %)-25;
Preincubation Temp (C.)-50° C.; Preincubation Time (min)-60; Reaction
temperature (C.)-50° C.; Reaction Time (min)-30; Reaction volume
(μL) -1; NTP (μM)-mGTP; NTP conc (μM)-50; Oligonucleotide-5′-
6-FAM-T15AmG*mC; Substrate conc (μM)-1; Product -5′-6-FAM-
T15AmG*mCmG.

[0404] Activity relative to SEQ ID NO: 1348 (Activity FIOP) was calculated as the percent product of the variant compared with the percent product observed by the reaction with SEQ ID NO: 1348 (where the percent product may be set as the average of replicates or else the highest single sample as appropriate). The results are shown in Table 19.2.

TABLE 19.2

| SEQ ID | Amino Acid Differences | FIOP Product Peak |
|---|---|---|
| NO: | (Relative to | Area Relative to |
| (nt/aa) | SEQ ID NO: 1348) | SEQ ID NO: 1348 |
| 1595/1596 | C201A/C213S/W333A/T344V/R397Q/ | +++ |
| | H425D/R481W/H485D | |
| 1597/1598 | N175D/C201A/W333A/D412N/H425D/ | +++ |
| | C457V/H485D | |
| 1599/1600 | W333A/T344V/E369N/H485D | +++ |
| 1601/1602 | N175D/W333A/H485D | +++ |
| 1603/1604 | N175D/H485D | +++ |
| 1605/1606 | C201A/W333A/T344V/C457V/R481W | +++ |
| 1607/1608 | C201A/W333A/R481W | ++ |
| 1609/1610 | H3Q/N175D/C213S/A313R/S325T/ | ++ |
| | L340R/C457V/R481W/H485D | |
| 1611/1612 | H3Q/C307M/A321K/L340R/F353K/ | ++ |
| | R406G/I408A/K445N | |
| 1613/1614 | P148T/N175D/C201A/C457V/H485D | ++ |
| 1615/1616 | T344V/H485D | ++ |
| 1617/1618 | C307M/Q373H/R406G/I408A/T484M | ++ |
| 1619/1620 | W333G | ++ |
| 1621/1622 | D199H/C307M/A321K/L340R/R406G/ | ++ |
| | I408A/K445N/T484M | |
| 1623/1624 | L340R/T484M | ++ |
| 1625/1626 | N175D/W333A | + |
| 1627/1628 | A321K/W333G/L340R | + |
| 1629/1630 | C213S/W333A/R397Q | + |
| 1631/1632 | C307M/W333G/L340R/I408A/K445N/ | + |
| | F462L/K502G | |
| 1633/1634 | S325T/H425D/C457V/R481W | + |
| 1635/1636 | S325T/W333A/E369N/H425D | + |
| 1637/1638 | C201R/R406G/I408A/F462L/T484M/ | + |
| | K502G | |
| 1639/1640 | R406G/I408A | + |
| 1641/1642 | F353K/R406G | + |
| 1643/1644 | N175D/W333A/E369N/R481W | + |
| 1645/1646 | Q373H | + |
| 1647/1648 | W333A/T344V/E369N/R397Q | + |
| 1649/1650 | C213S | + |
| 1651/1652 | N175D/S325T/R397Q | + |

Levels of increased activity were determined relative to the reference polypeptide of SEQ ID NO: 1348 and defined as follows:
“+” 1.33 to 2.18-fold increased activity;
“++” >2.18-fold increased activity;
“+++” >3.12-fold increased activity.

### Example 20

### Improvements Over SEQ ID NO: 1596 in the Extension of Oligonucleotide Acceptor Molecules with Nucleotide Triphosphate Donors

### HTP Screening for Improved TdT Variants

[0405] SEQ ID NO: 1596 was selected as the parent TdT enzyme. Libraries of engineered genes were produced from the parent gene using various techniques (e.g., saturation mutagenesis and recombination of previously identified beneficial mutations). The polypeptides encoded by each gene were produced in HTP and prepared as described in Table 20.1.

[0406] Reactions were performed in 96-well format 200 μL BioRad PCR plates. Reactions included 1-10 μM oligonucleotide, 25-50 μM nucleotide triphosphate, 20 mM buffer, and 250 μM cobalt (II) chloride. The reactions were set up as follows: (i) all reaction components, except for TdT, were pre-mixed in a single solution and were aliquoted into each well of the 96-well plates (ii) TdT lysate solution was then added into the wells to initiate the reaction. The reaction plate was heat-sealed with a peelable aluminum seal and incubated in a thermocycler at the indicated temperature and reaction time, then held at 4° C. until the reaction was quenched. Reactions were quenched and processed for CE analysis as described in Example 4.

TABLE 20.1
Reaction conditions

Lysis buffer-TEA (50 mM, pH 7.5), 0.1 g/L lysozyme; Reaction buffer-20
mM TEA, 0.25 mM CoCl2, pH 7.8; Lysate concentration (vol %)-25;
Preincubation Temp (C.)-50° C.; Preincubation Time (min)-60; Reaction
temperature (C.)-50° C.; Reaction Time (min)-30; Reaction volume
(μL) -1; NTP (μM)-mATP; NTP conc (μM)-50; Oligonucleotide-5′-
6-FAM-T15AmU*mG; Substrate conc (μM)-10; Product -5′-6-FAM-
T15AmU*mG mA.

[0407] Activity relative to SEQ ID NO: 1596 (Activity FIOP) was calculated as the percent product of the variant compared with the percent product observed by the reaction with SEQ ID NO: 1596 (where the percent product may be set as the average of replicates or else the highest single sample as appropriate). The results are shown in Table 20.2.

TABLE 20.2

| SEQ ID | Amino Acid Differences | FIOP Product Peak |
|---|---|---|
| NO: | (Relative to | Area Relative to |
| (nt/aa) | SEQ ID NO: 1596) | SEQ ID NO: 1596 |
| 1653/1654 | R406G/I408A/S442G/S446P | ++ |
| 1655/1656 | R406G/I408A | ++ |
| 1657/1658 | T160M/V219R/D460G/I503E/K506E | ++ |
| 1659/1660 | S446P | ++ |
| 1661/1662 | I408A | + |
| 1663/1664 | V219R/C307M/L326T | + |
| 1665/1666 | R406G/I408A/M490R | + |
| 1667/1668 | A252K/A333H | + |
| 1669/1670 | A252K | + |

Levels of increased activity were determined relative to the reference polypeptide of SEQ ID NO: 1596 and defined as follows:
“+” 1.12 to 1.50-fold increased activity;
“++” >1.50-fold increased activity.

### Example 21

### Improvements Over SEQ ID NO: 1596 in the Extension of Oligonucleotide Acceptor Molecules with Nucleotide Triphosphate Donors

### HTP Screening for Improved TdT Variants

[0408] SEQ ID NO: 1596 was selected as the parent TdT enzyme. Libraries of engineered genes were produced from the parent gene using various techniques (e.g., saturation mutagenesis and recombination of previously identified beneficial mutations). The polypeptides encoded by each gene were produced in HTP and prepared as described in Table 21.1.

[0409] Reactions were performed in 96-well format 200 μL BioRad PCR plates. Reactions included 1-10 μM oligonucleotide, 25-50 μM nucleotide triphosphate, 20 mM buffer, and 250 μM cobalt (II) chloride. The reactions were set up as follows: (i) all reaction components, except for TdT, were pre-mixed in a single solution and were aliquoted into each well of the 96-well plates (ii) TdT lysate solution was then added into the wells to initiate the reaction. The reaction plate was heat-sealed with a peelable aluminum seal and incubated in a thermocycler at the indicated temperature and reaction time, then held at 4° C. until the reaction was quenched. Reactions were quenched and processed for CE analysis as described in Example 4.

TABLE 21.1
Reaction conditions

Lysis buffer-TEA (50 mM, pH 7.5), 0.1 g/L lysozyme; Reaction buffer-20
mM TEA, 0.25 mM CoCl2, pH 7.8; Lysate concentration (vol %)-25;
Preincubation Temp (C.)-50° C.; Preincubation Time (min)-60; Reaction
temperature (C.)-50° C.; Reaction Time (min)-30; Reaction volume
(μL) -1; NTP (μM)-mATP; NTP conc (μM)-50; Oligonucleotide-5′-
6-FAM-T15AmU*mG; Substrate conc (μM)-10; Product -5′-6-FAM-
T15AmU*mGmA.

[0410] Activity relative to SEQ ID NO: 1596 (Activity FIOP) was calculated as the percent product of the variant compared with the percent product observed by the reaction with SEQ ID NO: 1596 (where the percent product may be set as the average of replicates or else the highest single sample as appropriate). The results are shown in Table 21.2.

TABLE 21.2

| SEQ ID | Amino Acid Differences | FIOP Product Peak |
|---|---|---|
| NO: | (Relative to | Area Relative to |
| (nt/aa) | SEQ ID NO: 1596) | SEQ ID NO: 1596 |
| 1671/1672 | T484E | +++ |
| 1673/1674 | Q179K | +++ |
| 1675/1676 | F353Q | +++ |
| 1677/1678 | W382L | +++ |
| 1679/1680 | C307L | +++ |
| 1681/1682 | M205R | +++ |
| 1683/1684 | K402Q | +++ |
| 1685/1686 | K488N | +++ |
| 1687/1688 | H413G | ++ |
| 1689/1690 | Q165P | ++ |
| 1691/1692 | Q376H | ++ |
| 1693/1694 | M490L | ++ |
| 1695/1696 | Q329K | ++ |
| 1697/1698 | L393I | ++ |
| 1699/1700 | R406P | ++ |
| 1701/1702 | D400E | ++ |
| 1703/1704 | R171K | ++ |
| 1705/1706 | I163V | ++ |
| 1707/1708 | S325L | ++ |
| 1709/1710 | S261A | ++ |
| 1711/1712 | S442A | ++ |
| 1713/1714 | D330E | + |
| 1715/1716 | S405N | + |
| 1717/1718 | E371D | + |
| 1719/1720 | K508D | + |
| 1721/1722 | A410Q | + |
| 1723/1724 | A495G | + |
| 1725/1726 | A252E | + |
| 1727/1728 | L188M | + |
| 1729/1730 | I208A | + |
| 1731/1732 | E520D | + |
| 1733/1734 | K506S | + |
| 1735/1736 | V253I | + |
| 1737/1738 | T162H | + |
| 1739/1740 | L419A | + |
| 1741/1742 | D460E | + |
| 1743/1744 | K407A | + |
| 1745/1746 | E441M | + |
| 1747/1748 | E233D | + |
| 1749/1750 | H177Y | + |
| 1751/1752 | T200A | + |
| 1753/1754 | F464Y | + |
| 1755/1756 | D277E | + |
| 1757/1758 | Q260K | + |

Levels of increased activity were determined relative to the reference polypeptide of SEQ ID NO: 1596 and defined as follows:
“+” 1.00 to 1.31-fold increased activity;
“++” >1.31-fold increased activity;
“+++” >1.58-fold increased activity.

### Example 22

### Improvements Over SEQ ID NO: 1596 in the Extension of Oligonucleotide Acceptor Molecules with Nucleotide Triphosphate Donors

### HTP Screening for Improved TdT Variants

[0411] SEQ ID NO: 1596 was selected as the parent TdT enzyme. Libraries of engineered genes were produced from the parent gene using various techniques (e.g., saturation mutagenesis and recombination of previously identified beneficial mutations). The polypeptides encoded by each gene were produced in HTP and prepared as described in Table 22.1.

[0412] Reactions were performed in 96-well format 200 μL BioRad PCR plates. Reactions included 1-10 μM oligonucleotide, 25-50 μM nucleotide triphosphate, 20 mM buffer, and 250 μM cobalt (II) chloride. The reactions were set up as follows: (i) all reaction components, except for TdT, were pre-mixed in a single solution and were aliquoted into each well of the 96-well plates (ii) TdT lysate solution was then added into the wells to initiate the reaction. The reaction plate was heat-sealed with a peelable aluminum seal and incubated in a thermocycler at the indicated temperature and reaction time, then held at 4° C. until the reaction was quenched. Reactions were quenched and processed for CE analysis as described in Example 4.

TABLE 22.1
Reaction conditions

Lysis buffer-TEA (50 mM, pH 7.5), 0.1 g/L lysozyme; Reaction buffer-20
mM TEA, 0.25 mM CoCl2, pH 7.8; Lysate concentration (vol %)-25;
Preincubation Temp (C.)-57° C.; Preincubation Time (min)-60; Reaction
temperature (C.)-57° C.; Reaction Time (min)-60; Reaction volume
(μL)-1; NTP (μM)-*ddGTP; NTP conc (μM)-50; Oligonucleotide-5′-6-
FAM-T14ATCmC; Substrate conc (μM)-1; Product -5′-6-FAM-
T14ATCmC*ddG.

[0413] Activity relative to SEQ ID NO: 1596 (Activity FIOP) was calculated as the percent product of the variant compared with the percent product observed by the reaction with SEQ ID NO: 1596 (where the percent product may be set as the average of replicates or else the highest single sample as appropriate). The results are shown in Table 22.2.

TABLE 22.2

| SEQ ID | Amino Acid Differences | FIOP Product Peak |
|---|---|---|
| NO: | (Relative to | Area Relative to |
| (nt/aa) | SEQ ID NO: 1596) | SEQ ID NO: 1596 |
| 1671/1672 | T484E | +++ |
| 1759/1760 | S325L | +++ |
| 1761/1762 | M205R | +++ |
| 1763/1764 | Q165P | +++ |
| 1765/1766 | M490L | +++ |
| 1675/1676 | F353Q | +++ |
| 1745/1746 | E441M | +++ |
| 1709/1710 | S261A | +++ |
| 1767/1768 | K488N | +++ |
| 1769/1770 | D460E | ++ |
| 1771/1772 | A252E | ++ |
| 1773/1774 | C307L | ++ |
| 1775/1776 | F414H | ++ |
| 1673/1674 | Q179K | ++ |
| 1719/1720 | K508D | ++ |
| 1729/1730 | I208A | ++ |
| 1777/1778 | R406P | ++ |
| 1779/1780 | G518D | ++ |
| 1705/1706 | I163V | ++ |
| 1755/1756 | D277E | ++ |
| 1781/1782 | Q370T | ++ |
| 1783/1784 | E371D | ++ |
| 1785/1786 | N380D | ++ |
| 1721/1722 | A410Q | ++ |
| 1787/1788 | K402Q | + |
| 1789/1790 | L306F | + |
| 1791/1792 | Q376H | + |
| 1793/1794 | K506S | + |
| 1695/1696 | Q329K | + |
| 1795/1796 | K368R | + |
| 1727/1728 | L188M | + |
| 1797/1798 | H413G | + |
| 1799/1800 | S442A | + |
| 1801/1802 | K161R | + |
| 1803/1804 | V253I | + |
| 1805/1806 | L419A | + |
| 1807/1808 | A321K | + |
| 1753/1754 | F464Y | + |
| 1809/1810 | Q251K | + |
| 1747/1748 | E233D | + |
| 1811/1812 | H426P | + |
| 1813/1814 | L393I | + |
| 1723/1724 | A495G | + |
| 1815/1816 | G231T | + |
| 1817/1818 | L327I | + |
| 1701/1702 | D400E | + |
| 1819/1820 | T162H | + |

Levels of increased activity were determined relative to the reference polypeptide of SEQ ID NO: 1596 and defined as follows:
“+” 1.00 to 1.84-fold increased activity;
“++” >1.84-fold increased activity;
“+++” >3.00-fold increased activity.

### Example 23

### Improvements Over SEQ ID NO: 1654 in the Extension of Oligonucleotide Acceptor Molecules with Nucleotide Triphosphate Donors

### HTP Screening for Improved TdT Variants

[0414] SEQ ID NO: 1654 was selected as the parent TdT enzyme. Libraries of engineered genes were produced from the parent gene using various techniques (e.g., saturation mutagenesis and recombination of previously identified beneficial mutations). The polypeptides encoded by each gene were produced in HTP and prepared as described in Table 23.1.

[0415] Reactions were performed in 96-well format 200 μL BioRad PCR plates. Reactions included 1-10 μM oligonucleotide, 25-50 μM nucleotide triphosphate, 20 mM buffer, and 250 μM cobalt (II) chloride. The reactions were set up as follows: (i) all reaction components, except for TdT, were pre-mixed in a single solution and were aliquoted into each well of the 96-well plates (ii) TdT lysate solution was then added into the wells to initiate the reaction. The reaction plate was heat-sealed with a peelable aluminum seal and incubated in a thermocycler at the indicated temperature and reaction time, then held at 4° C. until the reaction was quenched. Reactions were quenched and processed for CE analysis as described in Example 4.

TABLE 23.1
Reaction conditions

Lysis buffer-TEA (50 mM, pH 7.5), 0.1 g/L lysozyme; Reaction buffer-20
mM TEA, 0.25 mM CoCl2, pH 7.8; Lysate concentration (vol %)-25;
Preincubation Temp (C.)-50° C.; Preincubation Time (min)-60; Reaction
temperature (C.)-50° C.; Reaction Time (min)-45; Reaction volume
(μL) -1; NTP (μM)-3′P-mATP; NTP conc (μM)-50; Oligonucleotide-5′-
6-FAM-T15AT*mG; Substrate conc (μM)-10; Product -5′-6-FAM-
T15AT*mGmA-3′P.

[0416] Activity relative to SEQ ID NO: 1654 (Activity FIOP) was calculated as the percent product of the variant compared with the percent product observed by the reaction with SEQ ID NO: 1654 (where the percent product may be set as the average of replicates or else the highest single sample as appropriate). The results are shown in Table 23.2.

TABLE 23.2

| SEQ ID | Amino Acid Differences | FIOP Product Peak |
|---|---|---|
| NO: | (Relative to | Area Relative to |
| (nt/aa) | SEQ ID NO: 1654) | SEQ ID NO: 1654 |
| 1821/1822 | T160M/Q165P/M205R/V219R/E441M | ++ |
| 1823/1824 | M205R/C307L/E441M/D460G/K488N | ++ |
| 1825/1826 | E441M | ++ |
| 1827/1828 | T160M/T203E/M205R/E441M | + |
| 1829/1830 | T160M/Q165P/T203E/M205R/V219R/ | + |
| | F353Q/D460G/K488N | |
| 1831/1832 | Q179K/F353Q | + |
| 1833/1834 | T160M/V219R/D330K/T484E | + |

Levels of increased activity were determined relative to the reference polypeptide of SEQ ID NO: 1654 and defined as follows:
“+” 1.47 to 1.83-fold increased activity;
“++” >1.83-fold increased activity.

### Example 24

### Improvements Over SEQ ID NO: 1654 in the Extension of Oligonucleotide Acceptor Molecules with Nucleotide Triphosphate Donors

### HTP Screening for Improved TdT Variants

[0417] SEQ ID NO: 1654 was selected as the parent TdT enzyme. Libraries of engineered genes were produced from the parent gene using various techniques (e.g., saturation mutagenesis and recombination of previously identified beneficial mutations). The polypeptides encoded by each gene were produced in HTP and prepared as described in Table 24.1.

[0418] Reactions were performed in 96-well format 200 μL BioRad PCR plates. Reactions included 1-10 μM oligonucleotide, 25-50 μM nucleotide triphosphate, 20 mM buffer, and 250 μM cobalt (II) chloride. The reactions were set up as follows: (i) all reaction components, except for TdT, were pre-mixed in a single solution and were aliquoted into each well of the 96-well plates (ii) TdT lysate solution was then added into the wells to initiate the reaction. The reaction plate was heat-sealed with a peelable aluminum seal and incubated in a thermocycler at the indicated temperature and reaction time, then held at 4° C. until the reaction was quenched. Reactions were quenched and processed for CE analysis as described in Example 4.

TABLE 24.1
Reaction conditions

Lysis buffer-TEA (50 mM, pH 7.5), 0.1 g/L lysozyme; Reaction buffer-20
mM TEA, 0.25 mM CoCl₂, pH 7.8; Lysate concentration (vol %)-25;
Preincubation Temp (C.)-57° C.; Preincubation Time (min)-60; Reaction
temperature (C.)-57° C.; Reaction Time (min)-60; Reaction volume
(μL) -1; NTP (μM)-*ddGTP; NTP conc (μM)-50; Oligonucleotide-5′-
6-FAM-T14ATCmC; Substrate conc (μM)-1; Product -5′-6-FAM-
T14ATCmC*ddG.

[0419] Activity relative to SEQ ID NO: 1654 (Activity FIOP) was calculated as the percent product of the variant compared with the percent product observed by the reaction with SEQ ID NO: 1654 (where the percent product may be set as the average of replicates or else the highest single sample as appropriate). The results are shown in Table 24.2.

TABLE 24.2

| SEQ ID | Amino Acid Differences | FIOP Product Peak |
|---|---|---|
| NO: | (Relative to | Area Relative to |
| (nt/aa) | SEQ ID NO: 1654) | SEQ ID NO: 1654 |
| 1835/1836 | Q165P/T203E/M205R/C307L/F414Y/ | +++ |
| | E441M/T484E/A495G/I503E/K506E | |
| 1837/1838 | Q165P/Q179K/T203E/M205R/T484E/ | +++ |
| | I503E | |
| 1839/1840 | T160M/Q179K/T203E/M205R/I208A/ | +++ |
| | V219R/E371D/F414H/T484E/K506E | |
| 1841/1842 | T160M/M205R/I208A/V219R/L326T/ | +++ |
| | E441M/T484E/K488N/I503E | |
| 1843/1844 | T160M/I208A/E371D/E441M/T484E/ | +++ |
| | K506E | |
| 1845/1846 | T160M/Q179K/I208A/V219R/C307L/ | +++ |
| | H413G/F414H/I503E/K506E | |
| 1847/1848 | T160M/Q179K/C307L/Q376H/E441M/ | +++ |
| | K488N/I503E | |
| 1829/1830 | T160M/Q165P/T203E/M205R/V219R/ | +++ |
| | F353Q/D460G/K488N | |
| 1833/1834 | T160M/V219R/D330K/T484E | +++ |
| 1849/1850 | Q179K/M205R/I208A/F353Q/F414H/ | +++ |
| | E441M/D460G/T484E/K488N | |
| 1851/1852 | T160M/Q165P/C307L/F353Q/H413G/ | +++ |
| | F414H/E441M/K488N/A495G | |
| 1853/1854 | Q165P/Q179K/I208A/F353Q/H413G/ | +++ |
| | F414H/I503E | |
| 1821/1822 | T160M/Q165P/M205R/V219R/E441M | ++ |
| 1855/1856 | Q165P/T203E/M205R/T484E/K488N | ++ |
| 1857/1858 | T160M/T203E/M205R/I208A/H413G/ | ++ |
| | D460G/T484E/K488N | |
| 1859/1860 | M205R/L326T/K488N/I503E/K506E | ++ |
| 1861/1862 | T160M/I208A/L326T/Q376H/F414H/ | ++ |
| | E441M/T484E/K488N | |
| 1863/1864 | T160M/V219R/C307L/E371D/K506E | ++ |
| 1865/1866 | H3Q/T160M/M205R/I208A/V219R/ | ++ |
| | C307L/F353Q/E371D/Q376H/H413G/ | |
| | F414H/E441M/K488N | |
| 1867/1868 | M205R/V219R/C307L/F353Q | ++ |
| 1869/1870 | Q165P/I208A/L326T/H413G/F414H/ | ++ |
| | T484E/A495G/K506E | |
| 1823/1824 | M205R/C307L/E441M/D460G/K488N | ++ |
| 1871/1872 | T160M/Q165P/Q179K/T203E/M205R/ | ++ |
| | I208A/V219R/F353Q/Q376H/H413G/ | |
| | F414H/E441M/K488N | |
| 1873/1874 | M205R/C307L | ++ |
| 1875/1876 | T203E/I208A/V219R/E441M | ++ |
| 1877/1878 | T160M/T203E/L326T/F353Q/H413G/ | ++ |
| | F414H/T484E/A495G | |
| 1879/1880 | T160M/I208A/F414H/E441M/V452I/ | ++ |
| | R480H/K488N/A495G | |
| 1881/1882 | Q165P/M205R | ++ |
| 1831/1832 | Q179K/F353Q | ++ |
| 1883/1884 | T160M/T203E/M205R/I208A/V219R/ | ++ |
| | F414H/D460G/K506E | |
| 1885/1886 | T160M/T203E/I208A/H413G/F414H/ | ++ |
| | E441M/T484E | |
| 1887/1888 | Q165P/Q179K/T203E/M205R/V219R/ | + |
| | F414H/F418I/E441M/K488N/I503E | |
| 1889/1890 | T203E/M205R/I208A/F353Q | + |
| 1891/1892 | T160M/Q165P/M205R | + |
| 1893/1894 | T203E/I208A/V219R/Q376H/E441M | + |
| 1895/1896 | T160M/Q165P/Q179K/T203E/C307L/ | + |
| | Q376H/H413G/A495G | |
| 1897/1898 | Q179K/T203E/I208A/L326T/F353Q/ | + |
| | Q376H/T484E | |
| 1899/1900 | T160M/Q165P/M205R/F414H/E441M/ | + |
| | A495G | |
| 1901/1902 | Q165P/Q179K/M205R/H413G/E441M | + |
| 1903/1904 | I208A/K488N/K506E | + |
| 1905/1906 | Q179K/I208A/F353Q/D460G | + |
| 1907/1908 | T160M/Q165P/T203E/M205R/C307L/ | + |
| | E371D/Q376H/H413G/F414H | |
| 1909/1910 | T160M/T203E/I208A/E371D/H413G/ | + |
| | F414H | |
| 1911/1912 | T160M/T203E/I208A/C307L/F353Q/ | + |
| | A495G | |
| 1913/1914 | T160M | + |
| 1827/1828 | T160M/T203E/M205R/E441M | + |
| 1915/1916 | T203E/I208A/L326T/F353Q | + |
| 1917/1918 | M205R/I208A/C307L/F353Q/Q376H/ | + |
| | H413G | |
| 1919/1920 | T203E/M205R/I208A/C307L/E441M | + |
| 1921/1922 | Q179K/M205R/F353Q | + |
| 1923/1924 | T203E/H413G/I503E/K506E | + |
| 1925/1926 | T160M/Q165P/T203E/I208A/E371D/ | + |
| | Q376H/H413G/F414H | |
| 1927/1928 | M205R/I208A/F414H | + |
| 1929/1930 | Q165P/T203E/M205R | + |
| 1931/1932 | M205R/C307L/Q376H/F414H/E441M/ | + |
| | A495G | |
| 1933/1934 | T160M/Q179K/I208A/C307L/E371D/ | + |
| | Q376H/F414H | |
| 1935/1936 | T203E/M205R/I208A/C307L/D330N/ | + |
| | F353Q/E441M/D460G/I503E/K506E | |
| 1937/1938 | Q165P/T203E/I208A/L326T/Q376H/ | + |
| | I503E | |
| 1939/1940 | T160M/Q165P/M205R/I208A | + |
| 1941/1942 | Q179K/T203E/M205R | + |
| 1943/1944 | Q179K | + |
| 1945/1946 | L326T/F353Q/E371D/Q376H/F414H | + |
| 1825/1826 | E441M | + |

Levels of increased activity were determined relative to the reference polypeptide of SEQ ID NO: 1654 and defined as follows:
“+” 1.09 to 2.31-fold increased activity;
“++” >2.31-fold increased activity;
“+++” >3.89-fold increased activity.

### Example 25

### Improvements Over SEQ ID NO: 1830 in the Extension of Oligonucleotide Acceptor Molecules with Nucleotide Triphosphate Donors

### HTP Screening for Improved TdT Variants

[0420] SEQ ID NO: 1830 was selected as the parent TdT enzyme. Libraries of engineered genes were produced from the parent gene using various techniques (e.g., saturation mutagenesis and recombination of previously identified beneficial mutations). The polypeptides encoded by each gene were produced in HTP and prepared as described in Table 25.1.

[0421] Reactions were performed in 96-well format 200 μL BioRad PCR plates. Reactions included 1-10 μM oligonucleotide, 25-50 μM nucleotide triphosphate, 20 mM buffer, and 250 μM cobalt (II) chloride. The reactions were set up as follows: (i) all reaction components, except for TdT, were pre-mixed in a single solution and were aliquoted into each well of the 96-well plates (ii) TdT lysate solution was then added into the wells to initiate the reaction. The reaction plate was heat-sealed with a peelable aluminum seal and incubated in a thermocycler at the indicated temperature and reaction time, then held at 4° C. until the reaction was quenched. Reactions were quenched and processed for CE analysis as described in Example 4.

TABLE 25.1
Reaction conditions

Lysis buffer-TEA (50 mM, pH 7.5), 0.1 g/L lysozyme; Reaction buffer-
20 mM TEA, 0.25 mM CoCl₂, pH 7.8; Lysate concentration (vol %)-25;
Preincubation Temp (C.)-50° C.; Preincubation Time (min)-60; Reaction
temperature (C.)-50° C.; Reaction Time (min)-60; Reaction volume
(μL) -1; NTP (μM)-3′P-mATP; NTP conc (μM)-50;
Oligonucleotide-5′-6-FAM-T15AT*mG; Substrate conc (μM)-10;
Product -5′-6-FAM-T15AT*mGmA-3′P.

[0422] Activity relative to SEQ ID NO: 1830 (Activity FIOP) was calculated as the percent product of the variant compared with the percent product observed by the reaction with SEQ ID NO: 1830 (where the percent product may be set as the average of replicates or else the highest single sample as appropriate). The results are shown in Table 25.2.

TABLE 25.2

| SEQ ID | Amino Acid Differences | FIOP Product Peak |
|---|---|---|
| NO: | (Relative to | Area Relative to |
| (nt/aa) | SEQ ID NO: 1830) | SEQ ID NO: 1830 |
| 1947/1948 | I163V/Q179K/D277E/D338T/ | ++ |
| | L340A | |
| 1949/1950 | I163V/F414H/E441M | ++ |
| 1951/1952 | H177L | + |
| 1953/1954 | R171K/T200V/T334R/G406P/ | + |
| | M490L | |
| 1955/1956 | S292T/G406P | + |

Levels of increased activity were determined relative to the reference polypeptide of SEQ ID NO: 1830 and defined as follows:
“+” 1.52 to 2.05-fold increased activity;
“++” >2.05-fold increased activity.

### Example 26

### Activity Improvement Over SEQ ID NO: 1100

[0423] Activity with 2′OMe Modified Oligonucleotides and Nucleotide Triphosphates of Shake-Flask Purified TdT Variants

[0424] TdT variants of SEQ ID NO: 1100, 1336, and 1958 were produced in shake flask and purified as described in Example 3.

[0425] Reactions were performed in 96-well format 200 μL BioRad PCR plates. Reactions included 1 μM oligonucleotide, 25 μM nucleotide triphosphate, 1 μM TdT, 20 mM triethanolamine (pH 7.8), and 250 M cobalt (II) chloride. The reactions were set up as follows: (i) all reaction components, except for TdT, were pre-mixed in a single solution and were aliquoted into each well of the 96-well plates (ii) TdT solution was then added into the wells to initiate the reaction. The reaction plate was heat-sealed with a peelable aluminum seal and incubated in a thermocycler at the indicated temperature and reaction time, then held at 4 mC until the reaction was quenched. Reactions were quenched and processed for CE analysis as described in Example 4.

TABLE 26.1
Reaction buffer-20 mM TEA, 0.25 mM CoCl₂, pH 7.8; Preincubation
Temp (C.) - none; Preincubation Time (min)- none; Reaction temperature
(C.)-50° C.; Reaction Time (min)- 60; Reaction volume (μL)-1; TdT
concentration (μM)- 4; NTP- mATP; NTP conc (μM)-25; Oligonucleotide-
5′-6-FAM-T17mAmUmC, 5′-6-FAM-T17mUmUmC, 5′-6-FAM-
T17mCmUmG; Oligonucleotide conc (μM)- 10; Product- 5′-6-FAM-
T17mAmUmCmA, 5′-6-FAM-T17mUmUmCmA, 5′-6-FAM-
T17mCmUmGmA .

[0426] Activity relative to SEQ ID NO: 1100 (Activity FIOP) was calculated as the percent product of the variant compared with the percent product observed by the reaction with SEQ ID NO: 1100 (where the percent product may be set as the average of replicates or else the highest single sample as appropriate). The results are shown in Tables 26.2, 26.3, and 26.4.

TABLE 26.2
Product 5′-6-FAM-T17mAmUmCmA

| SEQ ID | Amino Acid Differences | FIOP Product Peak |
|---|---|---|
| NO: | (Relative to | Area Relative to |
| (nt/aa) | SEQ ID NO: 1100) | SEQ ID NO: 1100 |
| 1957/1958 | L264R | + |
| 1335/1336 | T101E/M137A/L264R/E476R/ | ++ |
| | S525F | |

Levels of increased activity were determined relative to the reference polypeptide of SEQ ID NO: 1100 and defined as follows:
“+” 1.15 to 1.30-fold increased activity;
“++” >1.30-fold increased activity.

TABLE 26.3
Product 5′-6-FAM-T17mUmUmCmA

| SEQ ID | Amino Acid Differences | FIOP Product Peak |
|---|---|---|
| NO: | (Relative to | Area Relative to |
| (nt/aa) | SEQ ID NO: 1100) | SEQ ID NO: 1100 |
| 1957/1958 | L264R | + |
| 1335/1336 | T101E/M137A/L264R/E476R/ | ++ |
| | S525F | |

Levels of increased activity were determined relative to the reference polypeptide of SEQ ID NO: 1100 and defined as follows:
“+” 1.15 to 1.30-fold increased activity;
“++” >1.30-fold increased activity.

TABLE 26.4
Product 5′-6-FAM-T17mCmUmGmA

| SEQ ID | Amino Acid Differences | FIOP Product Peak |
|---|---|---|
| NO: | (Relative to | Area Relative to |
| (nt/aa) | SEQ ID NO: 1100) | SEQ ID NO: 1100 |
| 1957/1958 | L264R | + |
| 1335/1336 | T101E/M137A/L264R/E476R/ | ++ |
| | S525F | |

Levels of increased activity were determined relative to the reference polypeptide of SEQ ID NO: 1100 and defined as follows:
“+” 1.15 to 1.30-fold increased activity;
“++” >1.30-fold increased activity.

### Example 27

### Activity Improvement Over SEQ ID NO: 1654

[0427] Activity of Shake-Flask Purified TdT Variants with 3′0-Phosphorylated Nucleotide Triphosphates

[0428] TdT variants of SEQ ID NO: 1654, 1830, and 1950 were produced in shake flask and purified as described in Example 3.

[0429] Reactions were performed in 96-well format 200 μL BioRad PCR plates. Reactions included 1 μM oligonucleotide, 25 μM nucleotide triphosphate, 1 μM TdT, 20 mM triethanolamine (pH 7.8), and 250 M cobalt (II) chloride. The reactions were set up as follows: (i) all reaction components, except for TdT, were pre-mixed in a single solution and were aliquoted into each well of the 96-well plates (ii) TdT solution was then added into the wells to initiate the reaction. The reaction plate was heat-sealed with a peelable aluminum seal and incubated in a thermocycler at the indicated temperature and reaction time, then held at 4° C. until the reaction was quenched. Reactions were quenched and processed for CE analysis as described in Example 4.

TABLE 27.1
Reaction buffer-20 mM TEA, 0.25 mM CoCl₂, pH 7.8; Preincubation
Temp (C.) - none; Preincubation Time (min)- none; Reaction temperature
(C.)- 50° C.; Reaction Time (min)- 60; Reaction volume (μL)-1; TdT
concentration (μM)- 4; NTP- 3′phos-mATP; NTP conc (μM)-50;
Oligonucleotide-5′-6-FAM-T15AT*mG, 5′-6-FAM-T15AT*mA, 5′-6-
FAM-T15AT*mC, 5′-6-FAM-T15AT*mU; Oligonucleotide conc (μM)-
25; Product- −5′-6-FAM-T15AT*mGmA-3′phos, 5′-6-FAM-
T15AT*mAmA-3′phos, 5′-6-FAM-T15AT*mCmA-3′phos, 5′-6-FAM-
T15AT*mUmA-3′phos.

[0430] Activity relative to SEQ ID NO: 1654 (Activity FIOP) was calculated as the percent product of the variant compared with the percent product observed by the reaction with SEQ ID NO: 1654 (where the percent product may be set as the average of replicates or else the highest single sample as appropriate). The results are shown in Tables 27.2, 27.3, 27.4, and 27.5.

TABLE 27.2
Product 5′-6-FAM-T15AT*mGmA-3′phos

| SEQ ID | Amino Acid Differences | FIOP Product Peak |
|---|---|---|
| NO: | (Relative to | Area Relative to |
| (nt/aa) | SEQ ID NO: 1654) | SEQ ID NO: 1654 |
| 1829/1830 | T160M/Q165P/T203E/M205R/ | + |
| | V219R/F353Q/D460G/K488N | |
| 1949/1950 | T160M/I163V/Q165P/T203E/ | ++ |
| | M205R/V219R/F353Q/F414H/ | |
| | E441M/D460G/K488N | |

Levels of increased activity were determined relative to the reference polypeptide of SEQ ID NO: 1654 and defined as follows:
“+” 1.46 to 2.20-fold increased activity;
“++” >2.20-fold increased activity;
“+++” >4.05-fold increased activity.

TABLE 27.3
Product 5′-6-FAM-T15AT*mAmA-3′phos

| SEQ ID | Amino Acid Differences | FIOP Product Peak |
|---|---|---|
| NO: | (Relative to | Area Relative to |
| (nt/aa) | SEQ ID NO: 1654) | SEQ ID NO: 1654 |
| 1829/1830 | T160M/Q165P/T203E/M205R/ | ++ |
| | V219R/F353Q/D460G/K488N | |
| 1949/1950 | T160M/I163V/Q165P/T203E/ | +++ |
| | M205R/V219R/F353Q/F414H/ | |
| | E441M/D460G/K488N | |

Levels of increased activity were determined relative to the reference polypeptide of SEQ ID NO: 1654 and defined as follows:
“+” 1.46 to 2.20-fold increased activity;
“++” >2.20-fold increased activity;
“+++” >4.05-fold increased activity.

TABLE 27.4
Product 5′-6-FAM-T15AT*mCmA-3′phos

| SEQ ID | Amino Acid Differences | FIOP Product Peak |
|---|---|---|
| NO: | (Relative to | Area Relative to |
| (nt/aa) | SEQ ID NO: 1654) | SEQ ID NO: 1654 |
| 1829/1830 | T160M/Q165P/T203E/M205R/ | ++ |
| | V219R/F353Q/D460G/K488N | |
| 1949/1950 | T160M/I163V/Q165P/T203E/ | ++ |
| | M205R/V219R/F353Q/F414H/ | |
| | E441M/D460G/K488N | |

Levels of increased activity were determined relative to the reference polypeptide of SEQ ID NO: 1654 and defined as follows:
“+” 1.46 to 2.20-fold increased activity;
“++” >2.20-fold increased activity;
“+++” >4.05-fold increased activity.

TABLE 27.5
5′-6-FAM-T15AT*mUmA-3′phos

| SEQ ID | Amino Acid Differences | FIOP Product Peak |
|---|---|---|
| NO: | (Relative to | Area Relative to |
| (nt/aa) | SEQ ID NO: 1654) | SEQ ID NO: 1654 |
| 1829/1830 | T160M/Q165P/T203E/M205R/ | + |
| | V219R/F353Q/D460G/K488N | |
| 1949/1950 | T160M/I163V/Q165P/T203E/ | ++ |
| | M205R/V219R/F353Q/F414H/ | |
| | E441M/D460G/K488N | |

Levels of increased activity were determined relative to the reference polypeptide of SEQ ID NO: 1654 and defined as follows:
“+” 1.46 to 2.20-fold increased activity;
“++” >2.20-fold increased activity;
“+++” >4.05-fold increased activity.

### Example 28

### Activity of Immobilized TdT Enzymes

### Activity of Shake-Flask Purified and Immobilized TdT Variants

[0431] TdT variants of SEQ ID NO: 1596, 1654, 1822, 1824, 1826, 1828, 1830, and 1834 were produced in shake flask and purified as described in Example 3.

[0432] Enzyme immobilization was performed in 1 mL round bottom costar 96-well plate. A slurry of 25 mg of controlled porosity glass (CPG) with either hydrophilic surface (EziG-1 and EziG-3, EnginZyme) or hydrophobic surface (EziG-2) was prepared in 1 mL of water. 1 mg of EziG (1, 2, or 3) (40 μL of slurry) was transferred to the plate, centrifuged and the supernatant was removed. 0.1 mg of TdT protein solutions (41 μM) were transferred to wells containing solid support. Enough storage buffer (20 mM Tris pH 7.4, 100 mM KC, 0.1 mM EDTA) was added to reach a 50 μL volume. The plate was sealed and gently shaken at room temperature. After 24 hours, the contents were centrifuged, and the supernatant was removed. The immobilized variants were washed twice with reaction buffer (20 mM triethanolamine pH 7.8), centrifuged, and the supernatant was removed. To each well was added 40 μL of reaction mixture including: 50 M 18-mer oligonucleotide (99% unlabeled T14-ATC-mC and 1% FAM-T14-ATC-mC), 100 μM 2′,3′-dideoxyguanosine-5′-triphosphate ddGTP, 0.5 mU/μL E. coli pyrophosphatase (New England Biolabs), 20 mM triethanolamine (pH 7.8), and 250 μM cobalt (II) chloride. The plate was sealed and shaken at 500 rpm at 50° C. for 90 minutes. Reactions were quenched by the addition of 120 μL of 35 mM EDTA. Quenched reactions were analyzed by capillary electrophoresis as described in Example 4.

[0433] Activity relative to SEQ ID NO: 1596 (Activity FIOP) was calculated as the percent product of the variant compared with the percent product observed by the reaction with SEQ ID NO: 1596 (where the percent product may be set as the average of replicates or else the highest single sample as appropriate). The results are shown in Tables 28.1, 28.2, and 28.3.

TABLE 28.1
Activity with EziG-1

| SEQ ID | Amino Acid Differences | FIOP Product Peak |
|---|---|---|
| NO: | (Relative to | Area Relative to |
| (nt/aa) | SEQ ID NO: 1596) | SEQ ID NO: 1596 |
| 1653/1654 | R406G/I408A/S442G/S446P | ++ |
| 1821/1822 | T160M/Q165P/M205R/V219R/ | +++ |
| | R406G/I408A/E441M/S442G/ | |
| | S446P | |
| 1833/1834 | T160M/V219R/D330K/R406G/ | +++ |
| | I408A/S442G/S446P/T484E | |
| 1827/1828 | T160M/T203E/M205R/R406G/ | ++ |
| | I408A/E441M/S442G/S446P | |
| 1829/1830 | T160M/Q165P/T203E/M205R/ | +++ |
| | V219R/F353Q/R406G/I408A/ | |
| | S442G/S446P/D460G/K488N | |
| 1825/1826 | R406G/I408A/E441M/S442G/ | ++ |
| | S446P | |
| 1823/1824 | M205R/C307L/R406G/I408A/ | ++ |
| | E441M/S442G/S446P/D460G/ | |
| | K488N | |

Levels of increased activity were determined relative to the reference polypeptide of SEQ ID NO: 1596 and defined as follows:
“+” 1.0 to 1.5-fold increased activity;
“++” >1.5-fold increased activity;
“+++” >2.5-fold increased activity.

TABLE 28.2
Activity with EziG-2

| SEQ ID | Amino Acid Differences | FIOP Product Peak |
|---|---|---|
| NO: | (Relative to | Area Relative to |
| (nt/aa) | SEQ ID NO: 1596) | SEQ ID NO: 1596 |
| 1821/1822 | T160M/Q165P/M205R/V219R/ | + |
| | R406G/I408A/E441M/S442G/ | |
| | S446P | |
| 1833/1834 | T160M/V219R/D330K/R406G/ | + |
| | I408A/S442G/S446P/T484E | |
| 1827/1828 | T160M/T203E/M205R/R406G/ | + |
| | I408A/E441M/S442G/S446P | |
| 1829/1830 | T160M/Q165P/T203E/M205R/ | + |
| | V219R/F353Q/R406G/I408A/ | |
| | S442G/S446P/D460G/K488N | |
| 1823/1824 | M205R/C307L/R406G/I408A/ | + |
| | E441M/S442G/S446P/D460G/ | |
| | K488N | |

Levels of increased activity were determined relative to the reference polypeptide of SEQ ID NO: 1596 and defined as follows:
“+” 1.0 to 1.5-fold increased activity;
“++” >1.5-fold increased activity;
“+++” >2.5-fold increased activity.

TABLE 28.3
Activity with EziG-3

| SEQ ID | Amino Acid Differences | FIOP Product Peak |
|---|---|---|
| NO: | (Relative to | Area Relative to |
| (nt/aa) | SEQ ID NO: 1596) | SEQ ID NO: 1596 |
| 1653/1654 | R406G/I408A/S442G/S446P | + |
| 1821/1822 | T160M/Q165P/M205R/V219R/ | ++ |
| | R406G/I408A/E441M/S442G/ | |
| | S446P | |
| 1833/1834 | T160M/V219R/D330K/R406G/ | ++ |
| | I408A/S442G/S446P/T484E | |
| 1827/1828 | T160M/T203E/M205R/R406G/ | ++ |
| | I408A/E441M/S442G/S446P | |
| 1829/1830 | T160M/Q165P/T203E/M205R/ | ++ |
| | V219R/F353Q/R406G/I408A/ | |
| | S442G/S446P/D460G/K488N | |
| 1825/1826 | R406G/I408A/E441M/S442G/ | ++ |
| | S446P | |
| 1823/1824 | M205R/C307L/R406G/I408A/ | + |
| | E441M/S442G/S446P/D460G/ | |
| | K488N | |

Levels of increased activity were determined relative to the reference polypeptide of SEQ ID NO: 1596 and defined as follows:
“+” 1.0 to 1.5-fold increased activity;
“++” >1.5-fold increased activity;
“+++” >2.5-fold increased activity.

### Improvements Over SEQ ID NO: 1950 in the Extension of Oligonucleotide Acceptor Molecules with Nucleotide Triphosphate Donors

### HTP Screening for Improved TdT Variants

[0434] SEQ ID NO: 1950 was selected as the parent TdT enzyme. Libraries of engineered genes were produced from the parent gene using various techniques (e.g., saturation mutagenesis and recombination of previously identified beneficial mutations). The polypeptides encoded by each gene were produced in HTP and prepared as described in Table 29.1.

[0435] Reactions were performed in 96-well format 200 μL BioRad PCR plates. Reactions included 10-100 μM oligonucleotide, 100-200 μM nucleotide triphosphate, 20 mM buffer, and 250 μM cobalt (II) chloride. The reactions were set up as follows: (i) all reaction components, except for TdT, were pre-mixed in a single solution and were aliquoted into each well of the 96-well plates (ii) TdT lysate solution was then added into the wells to initiate the reaction. The reaction plate was heat-sealed with a peelable aluminum seal and incubated in a thermocycler at the indicated temperature and reaction time, then held at 4° C. until the reaction was quenched. Reactions were quenched and processed for CE analysis as described in Example 4.

TABLE 29.1
Reaction conditions

Lysis buffer-TEA (50 mM, pH 7.5), 0.1 g/L lysozyme; Reaction buffer-20
mM TEA, 0.25 mM CoCl2, pH 7.8; Lysate concentration (vol %)-0.25;
Preincubation Temp (C.)-50° C.; Preincubation Time (min)-60; Reaction
temperature (C.)-50° C.; Reaction Time (min)-60; Reaction volume (μL)-
1; NTP (μM)-mATP-3′P; NTP conc (μM)-100; Oligonucleotide-5′-6-FAM-
T15AT*mG; Substrate conc (μM)-10; Product -5′-6-FAM-
T15AT*mGmA-3′P.

[0436] Activity relative to SEQ ID NO: 1950 (Activity FIOP) was calculated as the percent product of the variant compared with the percent product observed by the reaction with SEQ ID NO: 1950 (where the percent product may be set as the average of replicates or else the highest single sample as appropriate). The results are shown in Table 29.2.

TABLE 29.2

| | Amino Acid Differences | FIOP % product |
|---|---|---|
| SEQ ID NO: | (Relative to SEQ | Relative to |
| (nt/aa) | ID NO: 1950) | SEQ ID NO: 1950 |
| 2003/2004 | V455L | +++ |
| 2005/2006 | T362S | +++ |
| 2007/2008 | R258W | +++ |
| 2009/2010 | G468Q | +++ |
| 2011/2012 | G468W | +++ |
| 2013/2014 | K274V | +++ |
| 2015/2016 | H414G | +++ |
| 2017/2018 | R258Q | +++ |
| 2019/2020 | K407S | +++ |
| 2021/2022 | S405Y | +++ |
| 2023/2024 | L411Q/H414F | +++ |
| 2025/2026 | E399G | +++ |
| 2027/2028 | Y192C | +++ |
| 2029/2030 | Y192R | +++ |
| 2031/2032 | H494A | +++ |
| 2033/2034 | K274M | +++ |
| 2035/2036 | T286N | +++ |
| 2037/2038 | E399D | +++ |
| 2039/2040 | H413A/H414F | +++ |
| 2041/2042 | E193S | +++ |
| 2043/2044 | D409Q/H414F | +++ |
| 2045/2046 | L411R/H414F | +++ |
| 2047/2048 | G245A | +++ |
| 2049/2050 | A410V/H414F | +++ |
| 2051/2052 | L466M | ++ |
| 2053/2054 | E399F | ++ |
| 2055/2056 | S405L | ++ |
| 2057/2058 | K407N | ++ |
| 2059/2060 | S509K | ++ |
| 2061/2062 | K278N | ++ |
| 2063/2064 | A410Y/H414F | ++ |
| 2065/2066 | F398W | ++ |
| 2067/2068 | F194M | ++ |
| 2069/2070 | L359V | ++ |
| 2071/2072 | K278C | ++ |
| 2073/2074 | H414F/C417W | ++ |
| 2075/2076 | H413I/H414F | ++ |
| 2077/2078 | D409K/H414F | ++ |
| 2079/2080 | K274Q | ++ |
| 2081/2082 | A410S/H414F | ++ |
| 2083/2084 | A410I/H414F | ++ |
| 2085/2086 | V316C | ++ |
| 2087/2088 | K278L | ++ |
| 2089/2090 | L185F | ++ |
| 2091/2092 | F194C | ++ |
| 2093/2094 | P352R | ++ |
| 2095/2096 | Y259N | ++ |
| 2097/2098 | A304L | ++ |
| 2099/2100 | F194W | ++ |
| 2101/2102 | R291M | ++ |
| 2103/2104 | R258K | ++ |
| 2105/2106 | K274N | ++ |
| 2107/2108 | S261G | ++ |
| 2109/2110 | G468S | ++ |
| 2111/2112 | P352G | ++ |
| 2113/2114 | S509G | ++ |
| 2115/2116 | L411G/H414F | ++ |
| 2117/2118 | L185C | ++ |
| 2119/2120 | K274P | ++ |
| 2121/2122 | V378L | ++ |
| 2123/2124 | K274T | ++ |
| 2125/2126 | R258G | + |
| 2127/2128 | R258L | + |
| 2129/2130 | K263S | + |
| 2131/2132 | F194A | + |
| 2133/2134 | R258E | + |
| 2135/2136 | Y280S | + |
| 2137/2138 | S405G | + |
| 2139/2140 | T362Y | + |
| 2141/2142 | Y308N | + |
| 2143/2144 | Y192L | + |
| 2145/2146 | H414F/A415W | + |
| 2147/2148 | L284I | + |
| 2149/2150 | G468M | + |
| 2151/2152 | V163I/Q169E | + |
| 2153/2154 | A465E | + |
| 2155/2156 | H494G | + |
| 2157/2158 | H494L | + |
| 2159/2160 | D198L | + |
| 2161/2162 | L411A/H414F | + |
| 2163/2164 | K263I | + |
| 2165/2166 | E399C | + |
| 2167/2168 | L306I | + |
| 2169/2170 | V271C | + |
| 2171/2172 | V455I | + |
| 2173/2174 | L411I/H414F | + |
| 2175/2176 | H413G/H414F | + |
| 2177/2178 | N197G | + |
| 2179/2180 | F194G | + |
| 2181/2182 | Y192I | + |
| 2183/2184 | Q251R | + |
| 2185/2186 | V316A | + |
| 2187/2188 | F194D | + |
| 2189/2190 | K297P | + |
| 2191/2192 | S396T | + |
| 2193/2194 | Y259V | + |
| 2195/2196 | N197R | + |
| 2197/2198 | H494C | + |
| 2199/2200 | F347Q | + |
| 2201/2202 | H494W | + |
| 2203/2204 | A410F/H414F | + |
| 2205/2206 | H413F/H414F | + |
| 2207/2208 | E186C | + |
| 2209/2210 | K297L | + |
| 2211/2212 | E399T | + |
| 2213/2214 | R291W | + |
| 2215/2216 | E193R | + |
| 2217/2218 | T286S | + |
| 2219/2220 | Y280L | + |
| 2221/2222 | L306M | + |
| 2223/2224 | Y192G | + |
| 2225/2226 | L411T/H414F | + |
| 2227/2228 | L284M | + |
| 2229/2230 | V163I/Q169R | + |
| 2231/2232 | N197L | + |
| 2233/2234 | K407F | + |
| 2235/2236 | V290A | + |
| 2237/2238 | D198A | + |
| 2239/2240 | A415F | + |
| 2241/2242 | S261A | + |
| 2243/2244 | L393R | + |
| 2245/2246 | L411F/H414F | + |

Levels of increased activity were determined relative to the reference polypeptide of SEQ ID NO: 1950 and defined as follows: “+” 1.21 to 1.91, “++” >1.91, “+++” >3.34.

### Example 30

### Improvements Over SEQ ID NO: 2008 in the Extension of Oligonucleotide Acceptor Molecules with Nucleotide Triphosphate Donors

### HTP Screening for Improved TdT Variants

[0437] SEQ ID NO: 2008 was selected as the parent TdT enzyme. Libraries of engineered genes were produced from the parent gene using various techniques (e.g., saturation mutagenesis and recombination of previously identified beneficial mutations). The polypeptides encoded by each gene were produced in HTP and prepared as described in Table 30.1.

[0438] Reactions were performed in 96-well format 200 μL BioRad PCR plates. Reactions included 10-100 μM oligonucleotide, 100-200 μM nucleotide triphosphate, 20 mM buffer, and 250 μM cobalt (II) chloride. The reactions were set up as follows: (i) all reaction components, except for TdT, were pre-mixed in a single solution and were aliquoted into each well of the 96-well plates (ii) TdT lysate solution was then added into the wells to initiate the reaction. The reaction plate was heat-sealed with a peelable aluminum seal and incubated in a thermocycler at the indicated temperature and reaction time, then held at 4° C. until the reaction was quenched. Reactions were quenched and processed for CE analysis as described in Example 4.

TABLE 30.1
Reaction conditions

Lysis buffer-TEA (50 mM, pH 7.5), 0.1 g/L lysozyme; Reaction
buffer-20 mM TEA, 0.25 mM CoCl2, pH 7.8; Lysate concentration
(vol %)-0.25; Preincubation Temp (C.)-50° C.; Preincubation Time
(min)-60; Reaction temperature (C.)-50° C.; Reaction Time (min)-60;
Reaction volume (μL)-1; NTP (μM)-mATP-3′P; NTP conc (μM)-100;
Oligonucleotide-5′-6-FAM-T15AT*mG; Substrate conc (μM)-10;
Product -5′-6-FAM-T15AT*mGmA-3′P.

[0439] Activity relative to SEQ ID NO: 2008 (Activity FIOP) was calculated as the percent product of the variant compared with the percent product observed by the reaction with SEQ ID NO: 2008 (where the percent product may be set as the average of replicates or else the highest single sample as appropriate). The results are shown in Table 30.2.

TABLE 30.2

| SEQ | | FIOP % Product |
|---|---|---|
| ID NO: | Amino Acid Differences | Relative to |
| (nt/aa) | (Relative to SEQ ID NO: 2008) | SEQ ID NO: 2008 |
| 2247/2248 | H413A/H414G/G468Q | +++ |
| 2249/2250 | H413A/H414G | +++ |
| 2251/2252 | L411G/H413A/G468Q | +++ |
| 2253/2254 | K263H/L411G/H413A/H414G/G468Q | +++ |
| 2255/2256 | H413A/G468Q | ++ |
| 2257/2258 | G468Q | ++ |
| 2259/2260 | P158H/K274V/L411G/H413A/H414G | ++ |
| 2261/2262 | K274V/L411G/G468Q | ++ |
| 2263/2264 | L411G/H414G | ++ |
| 2265/2266 | H413A | ++ |
| 2267/2268 | L185F/L411G/H413A/H414G | ++ |
| 2269/2270 | K274V/T286N/L411G/H413A/ | + |
| | C417W/G468Q | |
| 2271/2272 | H414G | + |
| 2273/2274 | K263H/H413A/H414G | + |
| 2275/2276 | K278N/L411G/H413A/G468Q | + |
| 2277/2278 | L185F/K274V/H413A/H414G | + |
| 2279/2280 | K274V/L411G/C417W/G468Q | + |
| 2281/2282 | L411G/H413A/C417W/G468Q | + |
| 2283/2284 | K274V/G468Q | + |
| 2285/2286 | L411G/H413A/C417W | + |
| 2287/2288 | H413A/C417W/G468Q | + |
| 2289/2290 | K274V/H413A/H414G/C417W/ | + |
| | G468Q | |

Levels of increased activity were determined relative to the reference polypeptide of SEQ ID NO: 2008 and defined as follows: “+” 1.05 to 1.28, “++” >1.28, “+++” >1.67.

### Example 31

### Improvements Over SEQ ID NO: 2008 in the Extension of Oligonucleotide Acceptor Molecules with Nucleotide Triphosphate Donors

### HTP Screening for Improved TdT Variants

[0440] SEQ ID NO: 2008 was selected as the parent TdT enzyme. Libraries of engineered genes were produced from the parent gene using various techniques (e.g., saturation mutagenesis and recombination of previously identified beneficial mutations). The polypeptides encoded by each gene were produced in HTP and prepared as described in Table 31.1.

[0441] Reactions were performed in 96-well format 200 μL BioRad PCR plates. Reactions included 10-100 μM oligonucleotide, 100-200 μM nucleotide triphosphate, 20 mM buffer, and 250 μM cobalt (II) chloride. The reactions were set up as follows: (i) all reaction components, except for TdT, were pre-mixed in a single solution and were aliquoted into each well of the 96-well plates (ii) TdT lysate solution was then added into the wells to initiate the reaction. The reaction plate was heat-sealed with a peelable aluminum seal and incubated in a thermocycler at the indicated temperature and reaction time, then held at 4° C. until the reaction was quenched. Reactions were quenched and processed for CE analysis as described in Example 4.

TABLE 31.1
Reaction conditions

Lysis buffer-TEA (50 mM, pH 7.5), 0.1 g/L lysozyme; Reaction
buffer-20 mM TEA, 0.25 mM CoCl₂, pH 7.8; Lysate concentration
(vol %)-0.25; Preincubation Temp (C.)-50; Preincubation Time
(min)-60; Reaction temperature (C.)-50; Reaction Time (min)-60;
Reaction volume (μL)-1; NTP (μM)-mATP-3′P; NTP conc (μM)-100;
Oligonucleotide-5′-6-FAM-T15AT*mU; Substrate conc (μM)-10;
Product -5′-6-FAM-T15AT*mUmA-3′P.

[0442] Activity relative to SEQ ID NO: 2008 (Activity FIOP) was calculated as the percent product of the variant compared with the percent product observed by the reaction with SEQ ID NO: 2008 (where the percent product may be set as the average of replicates or else the highest single sample as appropriate). The results are shown in Table 31.2.

TABLE 31.2

| | Amino Acid Differences | FIOP % Product |
|---|---|---|
| SEQ ID NO: | (Relative to SEQ | Relative to |
| (nt/aa) | ID NO: 2008) | SEQ ID NO: 2008 |
| 2291/2292 | R26A/Q27R | +++ |
| 2293/2294 | R26G | +++ |
| 2295/2296 | E246N | +++ |
| 2297/2298 | L248R | +++ |
| 2299/2300 | R26I | +++ |
| 2301/2302 | G8P | +++ |
| 2303/2304 | H3G | +++ |
| 2305/2306 | S36G | ++ |
| 2307/2308 | R26Q | ++ |
| 2309/2310 | T58N | ++ |
| 2311/2312 | N76P | ++ |
| 2313/2314 | R26T | ++ |
| 2315/2316 | T58M | ++ |
| 2317/2318 | S36K | ++ |
| 2319/2320 | V253L | ++ |
| 2321/2322 | F62W | ++ |
| 2323/2324 | G151S | ++ |
| 2325/2326 | T58S | + |
| 2327/2328 | S116A | + |
| 2329/2330 | P157V | + |
| 2331/2332 | S12V | + |
| 2333/2334 | E249R | + |
| 2335/2336 | D147G | + |
| 2337/2338 | I50L | + |
| 2339/2340 | H3A | + |
| 2341/2342 | N90L | + |
| 2343/2344 | I15A | + |
| 2345/2346 | L248V | + |
| 2347/2348 | E249A | + |
| 2349/2350 | N255G | + |
| 2351/2352 | G11C | + |
| 2353/2354 | E249G | + |
| 2355/2356 | N90S | + |
| 2357/2358 | Y39A | + |

Levels of increased activity were determined relative to the reference polypeptide of SEQ ID NO: 2008 and defined as follows: “+” 1.16 to 1.26, “++” >1.26, “+++” >1.41.

### Example 32

### Improvements Over SEQ ID NO: 2008 in the Extension of Oligonucleotide Acceptor Molecules with Nucleotide Triphosphate Donors

### HTP Screening for Improved TdT Variants

[0443] SEQ ID NO: 2008 was selected as the parent TdT enzyme. Libraries of engineered genes were produced from the parent gene using various techniques (e.g., saturation mutagenesis and recombination of previously identified beneficial mutations). The polypeptides encoded by each gene were produced in HTP and prepared as described in Table 32.1.

[0444] Reactions were performed in 96-well format 200 μL BioRad PCR plates. Reactions included 10-100 μM oligonucleotide, 100-200 μM nucleotide triphosphate, 20 mM buffer, and 250 μM cobalt (II) chloride. The reactions were set up as follows: (i) all reaction components, except for TdT, were pre-mixed in a single solution and were aliquoted into each well of the 96-well plates (ii) TdT lysate solution was then added into the wells to initiate the reaction. The reaction plate was heat-sealed with a peelable aluminum seal and incubated in a thermocycler at the indicated temperature and reaction time, then held at 4° C. until the reaction was quenched. Reactions were quenched and processed for CE analysis as described in Example 4.

TABLE 32.1
Reaction conditions

Lysis buffer-TEA (50 mM, pH 7.5), 0.1 g/L lysozyme; Reaction
buffer-20 mM TEA, 0.25 mM CoCl2, pH 7.8; Lysate concentration
(vol %)-0.25; Preincubation Temp (C.)-50° C.; Preincubation Time
(min)-60; Reaction temperature (C.)-50° C.; Reaction Time (min)-60;
Reaction volume (μL)-1; NTP (μM)-mATP; NTP conc (μM)-100;
Oligonucleotide-5′-6-FAM-T15mUmGmA; Substrate conc (μM)-10;
Product -5′-6-FAM-T15mUmGmAmA.

[0445] Activity relative to SEQ ID NO: 2008 (Activity FIOP) was calculated as the percent product of the variant compared with the percent product observed by the reaction with SEQ ID NO: 2008 (where the percent product may be set as the average of replicates or else the highest single sample as appropriate). The results are shown in Table 32.2.

TABLE 32.2

| | Amino Acid Differences | FIOP % Product |
|---|---|---|
| SEQ ID NO: | (Relative to SEQ | Relative to |
| (nt/aa) | ID NO: 2008) | SEQ ID NO: 2008 |
| 2359/2360 | N90M | +++ |
| 2361/2362 | I15L | +++ |
| 2363/2364 | K70A | +++ |
| 2365/2366 | S12A | +++ |
| 2367/2368 | R26S | ++ |
| 2369/2370 | S81E | ++ |
| 2371/2372 | I38T | ++ |
| 2373/2374 | S79T | ++ |
| 2375/2376 | R16S | ++ |
| 2377/2378 | I38L | ++ |
| 2379/2380 | G9T | + |
| 2381/2382 | S12Q | ++ |
| 2383/2384 | G11S | + |
| 2385/2386 | P157L | + |
| 2387/2388 | I15Q | + |
| 2389/2390 | G9A | + |
| 2391/2392 | R26W | + |
| 2393/2394 | S12N | + |
| 2395/2396 | T58A | + |
| 2397/2398 | E249T | + |
| 2399/2400 | Y39G | + |
| 2401/2402 | P158A | + |
| 2403/2404 | G151I | + |

Levels of increased activity were determined relative to the reference polypeptide of SEQ ID NO: 2008 and defined as follows: “+” 1.03 to 1.07, “++” >1.07, “+++” >1.12.

### Example 33

### Improvements Over SEQ ID NO: 2008 in the Extension of Oligonucleotide Acceptor Molecules with Nucleotide Triphosphate Donors

### HTP Screening for Improved TdT Variants

[0446] SEQ ID NO: 2008 was selected as the parent TdT enzyme. Libraries of engineered genes were produced from the parent gene using various techniques (e.g., saturation mutagenesis and recombination of previously identified beneficial mutations). The polypeptides encoded by each gene were produced in HTP and prepared as described in Table 33.1.

[0447] Reactions were performed in 96-well format 200 μL BioRad PCR plates. Reactions included 10-100 μM oligonucleotide, 100-200 μM nucleotide triphosphate, 20 mM buffer, and 250 μM cobalt (II) chloride. The reactions were set up as follows: (i) all reaction components, except for TdT, were pre-mixed in a single solution and were aliquoted into each well of the 96-well plates (ii) TdT lysate solution was then added into the wells to initiate the reaction. The reaction plate was heat-sealed with a peelable aluminum seal and incubated in a thermocycler at the indicated temperature and reaction time, then held at 4° C. until the reaction was quenched. Reactions were quenched and processed for CE analysis as described in Example 4.

TABLE 33.1
Reaction conditions

Lysis buffer-TEA (50 mM, pH 7.5), 0.1 g/L lysozyme; Reaction
buffer-20 mM TEA, 0.25 mM CoCl2, pH 7.8; Lysate concentration
(vol %)-0.25; Preincubation Temp (C.)-50° C.; Preincubation Time
(min)-60; Reaction temperature (C.)-50° C.; Reaction Time (min)-60;
Reaction volume (μL)-1; NTP (μM)-mATP-3′P; NTP conc (μM)-100;
Oligonucleotide-5′-6-FAM-T15AT*mU; Substrate conc (μM)-10;
Product -5′-6-FAM-T15AT*mUmA-3′P.

[0448] Activity relative to SEQ ID NO: 2008 (Activity FIOP) was calculated as the percent product of the variant compared with the percent product observed by the reaction with SEQ ID NO: 2008 (where the percent product may be set as the average of replicates or else the highest single sample as appropriate). The results are shown in Table 33.2.

TABLE 33.2

| | Amino Acid Differences | FIOP % Product |
|---|---|---|
| SEQ ID NO: | (Relative to SEQ | Relative to |
| (nt/aa) | ID NO: 2008) | SEQ ID NO: 2008 |
| 2405/2406 | R473S | +++ |
| 2407/2408 | R473G | +++ |
| 2409/2410 | R473A | +++ |
| 2411/2412 | A189R | +++ |
| 2413/2414 | N493E | +++ |
| 2415/2416 | R480E | +++ |
| 2417/2418 | H413E | +++ |
| 2419/2420 | H413G | +++ |
| 2421/2422 | R473Q | +++ |
| 2423/2424 | A189Q | +++ |
| 2425/2426 | H413S | ++ |
| 2427/2428 | Q353R | ++ |
| 2429/2430 | R196T | ++ |
| 2431/2432 | R480S | ++ |
| 2433/2434 | R480G | ++ |
| 2435/2436 | R473P | ++ |
| 2437/2438 | R480A | ++ |
| 2439/2440 | A410E | ++ |
| 2441/2442 | R206N | ++ |
| 2443/2444 | C307S | ++ |
| 2445/2446 | R196S | ++ |
| 2447/2448 | C307H | ++ |
| 2449/2450 | R473D | ++ |
| 2451/2452 | A408E | ++ |
| 2453/2454 | C307E | ++ |
| 2455/2456 | Q397A | + |
| 2457/2458 | H413L | + |
| 2459/2460 | K318R | + |
| 2461/2462 | I324V | + |
| 2463/2464 | W481V | + |
| 2465/2466 | W469Y | + |
| 2467/2468 | R196A | + |
| 2469/2470 | H413M | + |
| 2471/2472 | C307L | + |
| 2473/2474 | A408W | + |
| 2475/2476 | N493Q | + |
| 2477/2478 | W481S | + |
| 2479/2480 | W469F | + |
| 2481/2482 | R196Y | + |
| 2483/2484 | R314M | + |
| 2485/2486 | R314A | + |
| 2487/2488 | A408L | + |
| 2489/2490 | F262V | + |
| 2491/2492 | A189E | + |
| 2493/2494 | W481L | + |
| 2495/2496 | R205E | + |
| 2497/2498 | R314Q | + |
| 2499/2500 | W481A | + |
| 2501/2502 | L491M | + |
| 2503/2504 | R480W | + |
| 2505/2506 | R480L | + |

Levels of increased activity were determined relative to the reference polypeptide of SEQ ID NO: 2008 and defined as follows: “+” 1.08 to 1.42, “++” >1.42, “+++” >1.71.

### Example 34

### Improvements Over SEQ ID NO: 2254 in the Extension of Oligonucleotide Acceptor Molecules with Nucleotide Triphosphate Donors

### HTP Screening for Improved TdT Variants

[0449] SEQ ID NO: 2254 was selected as the parent TdT enzyme. Libraries of engineered genes were produced from the parent gene using various techniques (e.g., saturation mutagenesis and recombination of previously identified beneficial mutations). The polypeptides encoded by each gene were produced in HTP and prepared as described in Table 34.1.

[0450] Reactions were performed in 96-well format 200 μL BioRad PCR plates. Reactions included 10-100 μM oligonucleotide, 100-200 μM nucleotide triphosphate, 20 mM buffer, and 250 μM cobalt (II) chloride. The reactions were set up as follows: (i) all reaction components, except for TdT, were pre-mixed in a single solution and were aliquoted into each well of the 96-well plates (ii) TdT lysate solution was then added into the wells to initiate the reaction. The reaction plate was heat-sealed with a peelable aluminum seal and incubated in a thermocycler at the indicated temperature and reaction time, then held at 4° C. until the reaction was quenched. Reactions were quenched and processed for CE analysis as described in Example 4.

TABLE 34.1
Reaction conditions

Lysis buffer-TEA (50 mM, pH 7.5), 0.1 g/L lysozyme; Reaction
buffer-20 mM TEA, 0.25 mM CoCl2, pH 7.8; Lysate concentration
(vol %)-0.25; Preincubation Temp (C.)-50° C.; Preincubation Time
(min)-60; Reaction temperature (C.)-50° C.; Reaction Time (min)-30;
Reaction volume (μL)-1; NTP (μM)-mATP-3′P; NTP conc (μM)-100;
Oligonucleotide-5′-6-FAM-T15AT*mU; Substrate conc (μM)-10;
Product -5′-6-FAM-T15AT*mUmA-3′P.

[0451] Activity relative to SEQ ID NO: 2254 (Activity FIOP) was calculated as the percent product of the variant compared with the percent product observed by the reaction with SEQ ID NO: 2254 (where the percent product may be set as the average of replicates or else the highest single sample as appropriate). The results are shown in Table 34.2.

TABLE 34.2

| SEQ ID NO: | Amino Acid Differences | FIOP % product Relative |
|---|---|---|
| (nt/aa) | (Relative to SEQ ID NO: 2254) | to SEQ ID NO: 2254 |
| 2507/2508 | F398W/L466M | +++ |
| 2509/2510 | E399D/G411Q/K416Q | +++ |
| 2511/2512 | T362S/K407S/V455L | ++ |
| 2513/2514 | S396T/F398W/A410V/L466M | ++ |
| 2515/2516 | L284M/F398W/L466M | + |
| 2517/2518 | N197R/V455L | + |
| 2519/2520 | N197R/K407S/V455L | + |
| 2521/2522 | L466M | + |

Levels of increased activity were determined relative to the reference polypeptide of SEQ ID NO: 2254 and defined as follows: “+” 1.13 to 1.20 (first 50%), “++” >1.20, “+++” >1.39.

### Example 35

### Improvements Over SEQ ID NO: 2514 in the Extension of Oligonucleotide Acceptor Molecules with Nucleotide Triphosphate Donors

### HTP Screening for Improved TdT Variants

[0452] SEQ ID NO: 2514 was selected as the parent TdT enzyme. Libraries of engineered genes were produced from the parent gene using various techniques (e.g., saturation mutagenesis and recombination of previously identified beneficial mutations). The polypeptides encoded by each gene were produced in HTP and prepared as described in Table 35.1.

[0453] Reactions were performed in 96-well format 200 μL BioRad PCR plates. Reactions included 10-100 μM oligonucleotide, 100-200 μM nucleotide triphosphate, 20 mM buffer, and 250 μM cobalt (II) chloride. The reactions were set up as follows: (i) all reaction components, except for TdT, were pre-mixed in a single solution and were aliquoted into each well of the 96-well plates (ii) TdT lysate solution was then added into the wells to initiate the reaction. The reaction plate was heat-sealed with a peelable aluminum seal and incubated in a thermocycler at the indicated temperature and reaction time, then held at 4° C. until the reaction was quenched. Reactions were quenched and processed for CE analysis as described in Example 4.

TABLE 35.1
Reaction conditions

Lysis buffer-TEA (50 mM, pH 7.5), 0.1 g/L lysozyme; Reaction
buffer-20 mM TEA, 0.25 mM CoCl2, pH 7.8; Lysate concentration
(vol %)-0.25; Preincubation Temp (C.)-50° C.; Preincubation Time
R(min)-60; eaction temperature (C.)-50° C.; Reaction Time (min)-60;
Reaction volume (μL)-1; NTP (μM)-mATP-3′P; NTP conc (μM)-100;
Oligonucleotide-5′-6-FAM-T15AmU*mG; Substrate conc (μM)-10;
Product -5′-6-FAM-T15AmU*mGmA-3′P.

[0454] Activity relative to SEQ ID NO: 2514 (Activity FIOP) was calculated as the percent product of the variant compared with the percent product observed by the reaction with SEQ ID NO: 2514 (where the percent product may be set as the average of replicates or else the highest single sample as appropriate). The results are shown in Table 35.2.

TABLE 35.2

| SEQ | Amino Acid Differences | FIOP % product |
|---|---|---|
| ID NO: | (Relative to SEQ | Relative to |
| (nt/aa) | ID NO: 2514) | SEQ ID NO: 2514 |
| 2523/2524 | R26Q/N90L/E246N/L248R/T362S/ | +++ |
| | V455L | |
| 2525/2526 | R26Q/N90L/E246N/L248R/V455L | +++ |
| 2527/2528 | R26I/L248R/V455L | +++ |
| 2529/2530 | R26G/N90L/L248V/V455L/Y459H | +++ |
| 2531/2532 | R26Q/N90L/E246N/V455L | +++ |
| 2533/2534 | R26Q/N90L/L248R/K266V/V455L | +++ |
| 2535/2536 | N90L/E246N/L248R/S261A/K266V/ | +++ |
| | T362S/V455L | |
| 2537/2538 | R26G/N90L/K266V | +++ |
| 2539/2540 | R26Q/T173I/L248R | +++ |
| 2541/2542 | R26Q/E246N/L248V/T362S | ++ |
| 2543/2544 | R26Q/L248V | ++ |
| 2545/2546 | R26Q/L248R | ++ |
| 2547/2548 | F62W/E249R | ++ |
| 2549/2550 | L248V/K266V/T362S | ++ |
| 2551/2552 | R26G/N90L/L248V/V455L | ++ |
| 2553/2554 | N90L/E246N/L248R/K266V/T362S/ | ++ |
| | V455L | |
| 2555/2556 | R26I/N90L/E246N/L248R | ++ |
| 2557/2558 | R26G/E246N/L248R/T362S | ++ |
| 2559/2560 | R26I/L248R/K266V/T362S | ++ |
| 2561/2562 | R26Q/N90L/E246N/L248R/S261A | ++ |
| 2563/2564 | R26G/E246N/L248V/V455L | ++ |
| 2565/2566 | R26Q/T362S | ++ |
| 2567/2568 | R26G/N90L/E246N/K266V/T362S | ++ |
| 2569/2570 | L248R | ++ |
| 2571/2572 | R26I/E246N/L248R/T362S/V455L | + |
| 2573/2574 | R26Q/L248R/S261A/K266V/T362S/ | + |
| | V455L | |
| 2575/2576 | L248R/V455L | |
| 2577/2578 | E246N/L248R/T362S | + |
| 2579/2580 | R26G/L248V/S261A/K266V | + |
| 2581/2582 | R26Q/L248R/T362S/V455L | + |
| 2583/2584 | R26Q/N90L/E246N/L248V/T362S/ | + |
| | V455L | |
| 2585/2586 | R26Q/L248V/T362S/V455L | + |
| 2587/2588 | R26G/N90L/T362S/V455L | + |
| 2589/2590 | R26Q/L248R/V455L | + |
| 2591/2592 | E246N/L248R | + |
| 2593/2594 | E246N/K266V/V455L | + |
| 2595/2596 | R26Q/N90L/E246N/T362S | |
| 2597/2598 | R26G/E246N | + |
| 2599/2600 | R26Q/L248V/K266V/T362S | + |
| 2601/2602 | T58N/N197L/E249R/K407N/V410S | + |
| 2603/2604 | R26G/N90L/E246N | + |
| 2605/2606 | R26Q/T362S/V455L | + |
| 2607/2608 | L248V/T362S/V455L | + |
| 2609/2610 | N90L/E246N/L248R | + |
| 2611/2612 | R26G/N90L/E94K/L248R/ | + |
| | S261A/K266V/T362S/V455L | |
| 2613/2614 | R26G/L248R | + |
| 2615/2616 | T362S | + |
| 2617/2618 | R26G/N90L/E246N/L248R | + |
| 2619/2620 | R26I/N90L/L248R | + |

Levels of increased activity were determined relative to the reference polypeptide of SEQ ID NO: 2514 and defined as follows: “+” 2.23 to 3.99, “++” >3.99, “+++” >6.49.

### Example 36

### Improvements Over SEQ ID NO: 2524 in the Extension of Oligonucleotide Acceptor Molecules with Nucleotide Triphosphate Donors

### HTP Screening for Improved TdT Variants

[0455] SEQ ID NO: 2524 was selected as the parent TdT enzyme. Libraries of engineered genes were produced from the parent gene using various techniques (e.g., saturation mutagenesis and recombination of previously identified beneficial mutations). The polypeptides encoded by each gene were produced in HTP and prepared as described in Table 36.1.

[0456] Reactions were performed in 96-well format 200 μL BioRad PCR plates. Reactions included 10-100 μM oligonucleotide, 100-200 μM nucleotide triphosphate, 20 mM buffer, and 250 μM cobalt (II) chloride. The reactions were set up as follows: (i) all reaction components, except for TdT, were pre-mixed in a single solution and were aliquoted into each well of the 96-well plates (ii) TdT lysate solution was then added into the wells to initiate the reaction. The reaction plate was heat-sealed with a peelable aluminum seal and incubated in a thermocycler at the indicated temperature and reaction time, then held at 4° C. until the reaction was quenched. Reactions were quenched and processed for CE analysis as described in Example 4.

TABLE 36.1
Reaction conditions

Lysis buffer-TEA (50 mM, pH 7.5), 0.1 g/L lysozyme; Reaction
buffer-20 mM TEA, 0.25 mM CoCl2, pH 7.8; Lysate concentration
(vol %)-0.25; Preincubation Temp (C.)-50° C.; Preincubation Time
(min)-60; Reaction temperature (C.)-50° C.; Reaction Time (min)-60;
Reaction volume (μL)-1; NTP (μM)-ATP-3′P; NTP conc (μM)-100;
Oligonucleotide-5′-6-FAM-T15AmU*mG; Substrate conc (μM)-10;
Product -5′-6-FAM-T15AmU*mGmA-3′P.

[0457] Activity relative to SEQ ID NO: 2524 (Activity FIOP) was calculated as the percent product of the variant compared with the percent product observed by the reaction with SEQ ID NO: 2524 (where the percent product may be set as the average of replicates or else the highest single sample as appropriate). The results are shown in Table 36.2.

TABLE 36.2

| SEQ | | FIOP % product |
|---|---|---|
| ID NO: | Amino Acid Differences | Relative to |
| (nt/aa) | (Relative to SEQ ID NO: 2524) | SEQ ID NO: 2524 |
| 2621/2622 | M30G/K266V/Q353R | +++ |
| 2623/2624 | M30G/S261A/K266V/Q353R/Q468S | +++ |
| 2625/2626 | K266V/Q353R/Q468S | +++ |
| 2627/2628 | M30E/A189R/K266V | +++ |
| 2629/2630 | K266V/Q468S | +++ |
| 2631/2632 | M30G/K266V | ++ |
| 2633/2634 | A189R/S261A | ++ |
| 2635/2636 | A189R/Q353R | ++ |
| 2637/2638 | I38T/S81E/K318R | ++ |
| 2639/2640 | K266V/C307S/Q353R/Q468S | ++ |
| 2641/2642 | G11S/T58N/L227M/N246E | ++ |
| 2643/2644 | M30T/K266V/K303E | ++ |
| 2645/2646 | S12A/R16S/P158A/N246E/R248L/ | ++ |
| | E249R | |
| 2647/2648 | M30T/A189R/S261A/K266V/Q353R/ | + |
| | A465E/Q468S | |
| 2649/2650 | N246E/E249R | + |
| 2651/2652 | G9T/R16S/F62W/P157L/N246E/ | + |
| | E249R/S362T | |
| 2653/2654 | S79T/S81E | + |
| 2655/2656 | Y39G/S79T | + |
| 2657/2658 | Y39G | + |
| 2659/2660 | S261A/Q353R | + |
| 2661/2662 | T58N/P157L/P158A/S362T | + |
| 2663/2664 | K70A/Q353R | + |
| 2665/2666 | I38T/N197L | + |
| 2667/2668 | S81E | + |
| 2669/2670 | A189R | + |
| 2671/2672 | I38T | + |

Levels of increased activity were determined relative to the reference polypeptide of SEQ ID NO: 2524 and defined as follows: “+” 1.09 to 1.33, “++” >1.33, “+++” >1.77.

### Example 37

### Improvements Over SEQ ID NO: 2524 in the Extension of Oligonucleotide Acceptor Molecules with Nucleotide Triphosphate Donors

### HTP Screening for Improved TdT Variants

[0458] SEQ ID NO: 2524 was selected as the parent TdT enzyme. Libraries of engineered genes were produced from the parent gene using various techniques (e.g., saturation mutagenesis and recombination of previously identified beneficial mutations). The polypeptides encoded by each gene were produced in HTP and prepared as described in Table 37.1.

[0459] Reactions were performed in 96-well format 200 μL BioRad PCR plates. Reactions included 10-100 μM oligonucleotide, 100-200 μM nucleotide triphosphate, 20 mM buffer, and 250 μM cobalt (II) chloride. The reactions were set up as follows: (i) all reaction components, except for TdT, were pre-mixed in a single solution and were aliquoted into each well of the 96-well plates (ii) TdT lysate solution was then added into the wells to initiate the reaction. The reaction plate was heat-sealed with a peelable aluminum seal and incubated in a thermocycler at the indicated temperature and reaction time, then held at 4° C. until the reaction was quenched. Reactions were quenched and processed for CE analysis as described in Example 4.

TABLE 37.1
Reaction conditions

Lysis buffer-TEA (50 mM, pH 7.5), 0.1 g/L lysozyme; Reaction
buffer-20 mM TEA, 0.25 mM CoCl2, pH 7.8; Lysate concentration
(vol %)-0.25; Preincubation Temp (C.)-50° C.; Preincubation Time
(min)-60; Reaction temperature (C.)-50° C.; Reaction Time (min)-60;
Reaction volume (μL)-1; NTP (μM)-mATP-3′P; NTP conc (μM)-100;
Oligonucleotide-5′-6-FAM-T15AmU*mG; Substrate conc (μM)-25;
Product -5′-6-FAM-T15AmU*mGmA-3′P.

[0460] Activity relative to SEQ ID NO: 2524 (Activity FIOP) was calculated as the percent product of the variant compared with the percent product observed by the reaction with SEQ ID NO: 2524 (where the percent product may be set as the average of replicates or else the highest single sample as appropriate). The results are shown in Table 37.2.

TABLE 37.2

| | Amino Acid Differences | |
|---|---|---|
| SEQ ID NO: | (Relative to SEQ | FIOP % product Relative |
| (nt/aa) | ID NO: 2524) | to SEQ ID NO: 2524 |
| 2673/2674 | T379L | +++ |
| 2675/2676 | T379M | +++ |
| 2677/2678 | K427L | +++ |
| 2679/2680 | K402G | +++ |
| 2681/2682 | K427M | +++ |
| 2683/2684 | L327M/G406T | +++ |
| 2685/2686 | W382L | +++ |
| 2687/2688 | A304V/Q329R | +++ |
| 2689/2690 | T379I | ++ |
| 2691/2692 | T484A | ++ |
| 2693/2694 | K506P | ++ |
| 2695/2696 | L340V | ++ |
| 2697/2698 | T379V | ++ |
| 2699/2700 | F504K | ++ |
| 2701/2702 | W382F | ++ |
| 2703/2704 | L403S | ++ |
| 2705/2706 | Q169M | ++ |
| 2707/2708 | L403A | ++ |
| 2709/2710 | S292N | ++ |
| 2711/2712 | K402V | ++ |
| 2713/2714 | K427W | ++ |
| 2715/2716 | L340I | + |
| 2717/2718 | L403P | + |
| 2719/2720 | P404S | + |
| 2721/2722 | K427R | + |
| 2723/2724 | Q373G | + |
| 2725/2726 | D429R | + |
| 2727/2728 | N191V/A413V | + |
| 2729/2730 | M490R | + |
| 2731/2732 | A495S | + |
| 2733/2734 | A495G | + |
| 2735/2736 | L403E | + |
| 2737/2738 | Q353H/Y459V | + |
| 2739/2740 | Y459I | + |
| 2741/2742 | A495C | + |
| 2743/2744 | K402S | + |
| 2745/2746 | G461S | + |
| 2747/2748 | P404D | + |
| 2749/2750 | Q329R | + |
| 2751/2752 | V47A/L326R | + |
| 2753/2754 | T200V | + |
| 2755/2756 | L403R | + |

Levels of increased activity were determined relative to the reference polypeptide of SEQ ID NO: 2524 and defined as follows: “+” 1.21 to 1.43, “++” >1.43, “+++” >1.80.

### Example 38

### Improvements Over SEQ ID NO: 2524 in the Extension of Oligonucleotide Acceptor Molecules with Nucleotide Triphosphate Donors

### HTP Screening for Improved TdT Variants

[0461] SEQ ID NO: 2524 was selected as the parent TdT enzyme. Libraries of engineered genes were produced from the parent gene using various techniques (e.g., saturation mutagenesis and recombination of previously identified beneficial mutations). The polypeptides encoded by each gene were produced in HTP and prepared as described in Table 38.1.

[0462] Reactions were performed in 96-well format 200 μL BioRad PCR plates. Reactions included 10-100 μM oligonucleotide, 100-200 μM nucleotide triphosphate, 20 mM buffer, and 250 μM cobalt (II) chloride. The reactions were set up as follows: (i) all reaction components, except for TdT, were pre-mixed in a single solution and were aliquoted into each well of the 96-well plates (ii) TdT lysate solution was then added into the wells to initiate the reaction. The reaction plate was heat-sealed with a peelable aluminum seal and incubated in a thermocycler at the indicated temperature and reaction time, then held at 4° C. until the reaction was quenched. Reactions were quenched and processed for CE analysis as described in Example 4.

TABLE 38.1
Reaction conditions

Lysis buffer-TEA (50 mM, pH 7.5), 0.1 g/L lysozyme; Reaction
buffer-20 mM TEA, 0.25 mM CoCl2, pH 7.8; Lysate concentration
(vol %)-0.25; Preincubation Temp (C.)-60° C.; Preincubation Time
(min)-60; Reaction temperature (C.)-60° C.; Reaction Time (min)-60;
Reaction volume (μL)-1; NTP (μM)-mATP-3′P; NTP conc (μM)-100;
Oligonucleotide-5′-6-FAM-T15AT*mG; Substrate conc (μM)-25;
Product -5′-6-FAM-T15AT*mGmA-3′P.

[0463] Activity relative to SEQ ID NO: 2524 (Activity FIOP) was calculated as the percent product of the variant compared with the percent product observed by the reaction with SEQ ID NO: 2524 (where the percent product may be set as the average of replicates or else the highest single sample as appropriate). The results are shown in Table 38.2.

TABLE 38.2

| | Amino Acid Differences | |
|---|---|---|
| SEQ ID NO: | (Relative to SEQ | FIOP % product Relative |
| (nt/aa) | ID NO: 2524) | to SEQ ID NO: 2524 |
| 2675/2676 | T379M | +++ |
| 2693/2694 | K506P | +++ |
| 2681/2682 | K427M | +++ |
| 2757/2758 | S325W | +++ |
| 2673/2674 | T379L | +++ |
| 2691/2692 | T484A | +++ |
| 2677/2678 | K427L | +++ |
| 2713/2714 | K427W | +++ |
| 2759/2760 | K427F | +++ |
| 2679/2680 | K402G | ++ |
| 2761/2762 | K506T | ++ |
| 2763/2764 | T200N | ++ |
| 2765/2766 | K427C | ++ |
| 2723/2724 | Q373G | ++ |
| 2735/2736 | L403E | ++ |
| 2731/2732 | A495S | ++ |
| 2767/2768 | K508S | ++ |
| 2717/2718 | L403P | ++ |
| 2747/2748 | P404D | ++ |
| 2739/2740 | Y459I | ++ |
| 2769/2770 | K427Y | ++ |
| 2745/2746 | G461S | ++ |
| 2771/2772 | K506S | + |
| 2773/2774 | A189V | + |
| 2743/2744 | K402S | + |
| 2775/2776 | P404E | + |
| 2777/2778 | T484M | + |
| 2709/2710 | S292N | + |
| 2779/2780 | G406N | + |
| 2781/2782 | K508T | + |
| 2783/2784 | E203D | + |
| 2785/2786 | K427N | + |
| 2719/2720 | P404S | + |
| 2733/2734 | A495G | + |
| 2787/2788 | N175L | + |
| 2789/2790 | T484H | + |
| 2695/2696 | L340V | + |
| 2791/2792 | K402E | + |
| 2793/2794 | Q373C | + |
| 2795/2796 | L403G | + |
| 2707/2708 | L403A | + |
| 2797/2798 | E203M | + |
| 2799/2800 | Q179L | + |
| 2801/2802 | S293Q | + |

Levels of increased activity were determined relative to the reference polypeptide of SEQ ID NO: 2524 and defined as follows: “+” 1.19 to 1.44, “++” >1.44, “+++” >1.97.

### Example 39

### Improvements Over SEQ ID NO: 2638 in the Extension of Oligonucleotide Acceptor Molecules with Nucleotide Triphosphate Donors

### HTP Screening for Improved TdT Variants

[0464] SEQ ID NO: 2638 was selected as the parent TdT enzyme. Libraries of engineered genes were produced from the parent gene using various techniques (e.g., saturation mutagenesis and recombination of previously identified beneficial mutations). The polypeptides encoded by each gene were produced in HTP and prepared as described in Table 39.1.

[0465] Reactions were performed in 96-well format 200 μL BioRad PCR plates. Reactions included 10-100 μM oligonucleotide, 100-200 μM nucleotide triphosphate, 20 mM buffer, and 250 μM cobalt (II) chloride. The reactions were set up as follows: (i) all reaction components, except for TdT, were pre-mixed in a single solution and were aliquoted into each well of the 96-well plates (ii) TdT lysate solution was then added into the wells to initiate the reaction. The reaction plate was heat-sealed with a peelable aluminum seal and incubated in a thermocycler at the indicated temperature and reaction time, then held at 4° C. until the reaction was quenched. Reactions were quenched and processed for CE analysis as described in Example 4.

TABLE 39.1
Reaction conditions

Lysis buffer-TEA (50 mM, pH 7.5), 0.1 g/L lysozyme; Reaction
buffer-20 mM TEA, 0.25 mM CoCl2, pH 7.8; Lysate concentration
(vol %)-0.25; Preincubation Temp (C.)-50° C.; Preincubation Time
(min)-60; Reaction temperature (C.)-50° C.; Reaction Time (min)-60;
Reaction volume (μL)-1; NTP (μM)-mATP-3′P; NTP conc (μM)-100;
Oligonucleotide-5′-6-FAM-T15AmU*mG; Substrate conc (μM)-25;
Product -5′-6-FAM-T15AmU*mGmA-3′P.

[0466] Activity relative to SEQ ID NO: 2638 (Activity FIOP) was calculated as the percent product of the variant compared with the percent product observed by the reaction with SEQ ID NO: 2638 (where the percent product may be set as the average of replicates or else the highest single sample as appropriate). The results are shown in Table 39.2.

TABLE 39.2

| | | FIOP % product |
|---|---|---|
| SEQ ID | | Relative |
| NO: | Amino Acid Differences | to SEQ ID |
| (nt/aa) | (Relative to SEQ ID NO: 2638) | NO: 2638 |
| 2803/2804 | S79T/A189R/C307L/V410E | + |
| 2805/2806 | M30G/T58N/S79T/A189R/C307L/R480E | + |
| 2807/2808 | S79T/C307L | + |
| 2809/2810 | G11S/M30G/S79T/A189R/R480E | + |

Levels of increased activity were determined relative to the reference polypeptide of SEQ ID NO: 2638 and defined as follows: “+” from 1.29 to 1.94.

### Example 40

### Improvements Over SEQ ID NO: 2804 in the Extension of Oligonucleotide Acceptor Molecules with Nucleotide Triphosphate Donors

### HTP Screening for Improved TdT Variants

[0467] SEQ ID NO: 2804 was selected as the parent TdT enzyme. Libraries of engineered genes were produced from the parent gene using various techniques (e.g., saturation mutagenesis and recombination of previously identified beneficial mutations). The polypeptides encoded by each gene were produced in HTP and prepared as described in Table 40.1.

[0468] Reactions were performed in 96-well format 200 μL BioRad PCR plates. Reactions included 10-100 μM oligonucleotide, 100-200 μM nucleotide triphosphate, 20 mM buffer, and 250 μM cobalt (II) chloride. The reactions were set up as follows: (i) all reaction components, except for TdT, were pre-mixed in a single solution and were aliquoted into each well of the 96-well plates (ii) TdT lysate solution was then added into the wells to initiate the reaction. The reaction plate was heat-sealed with a peelable aluminum seal and incubated in a thermocycler at the indicated temperature and reaction time, then held at 4° C. until the reaction was quenched. Reactions were quenched and processed for CE analysis as described in Example 4.

TABLE 40.1
Reaction conditions

Lysis buffer-TEA (50 mM, pH 7.5), 0.1 g/L lysozyme; Reaction
buffer-20 mM TEA, 0.25 mM CoCl2, pH 7.8; Lysate concentration
(vol %)-0.25; Preincubation Temp (C.)-50° C.; Preincubation Time
(min)-60; Reaction temperature (C.)-50° C.; Reaction Time (min)-60;
Reaction volume (μL)-1; NTP (μM)-mATP-3′P; NTP conc (μM)-100;
Oligonucleotide-5′-6-FAM-T15AmG*mC; Substrate conc (μM)-25;
Product -5′-6-FAM-T15AmG*mCmA-3′P.

[0469] Activity relative to SEQ ID NO: 2804 (Activity FIOP) was calculated as the percent product of the variant compared with the percent product observed by the reaction with SEQ ID NO: 2804 (where the percent product may be set as the average of replicates or else the highest single sample as appropriate). The results are shown in Table 40.2.

TABLE 40.2

| | | FIOP % product |
|---|---|---|
| SEQ ID | | Relative to |
| NO: | Amino Acid Differences | SEQ ID |
| (nt/aa) | (Relative to SEQ ID NO: 2804) | NO: 2804 |
| 2811/2812 | A304V/L340I/K402G/L403S/K506P | +++ |
| 2813/2814 | A304V/L340I/K402G/K506P | +++ |
| 2815/2816 | A304V/L340V/K402G/L403S/F504K/ | +++ |
| | K506P | |
| 2817/2818 | Q169M/A304V/K402G/L403S/K427L/ | +++ |
| | K506P | |
| 2819/2820 | A304V/L340V/K402G/K427L/F504K/ | +++ |
| | K506P | |
| 2821/2822 | A304V/L340I/K402G/L403A/K427L/ | +++ |
| | D429R/F504K/K506P | |
| 2823/2824 | A304V/K402G/L403A/F504K/K506P | +++ |
| 2825/2826 | L340V/K402G/K427L/D429R/K506P | +++ |
| 2827/2828 | A304V/K402G/L403P/K506P | +++ |
| 2829/2830 | Q169M/A304V/L340I/D429R/K506P | +++ |
| 2831/2832 | Q169M/A304V/L340V/K402G/K427L | +++ |
| 2833/2834 | K402G/L403A/K427M/F504K/K506P | +++ |
| 2835/2836 | A304V/F504K/K506P | +++ |
| 2837/2838 | A304V/L340I/K427M | +++ |
| 2839/2840 | L340I/K402G/D429R/F504K/K506P | ++ |
| 2841/2842 | Q169M/L403A/K427L/K506P | ++ |
| 2843/2844 | Q169M/A304V/K427M/F504K/K506P | ++ |
| 2845/2846 | A304V/K402G/L403S | ++ |
| 2847/2848 | A304V/L403S/F504K | ++ |
| 2849/2850 | A304V/L340I/K402G | ++ |
| 2851/2852 | A304V/K402G/L403A/D429R | ++ |
| 2853/2854 | A304V/K402G/L403P/K427M/F504K | ++ |
| 2855/2856 | K402G/L403S/K427M/F504K/K506P | ++ |
| 2857/2858 | A304V/L340I/L403A/K427L/D429R/ | ++ |
| | F504K/K506P | |
| 2859/2860 | L403S/K427L | ++ |
| 2861/2862 | A304V/F504K | ++ |
| 2863/2864 | Q169M/A304V/L340I/F504K | ++ |
| 2865/2866 | Q169M/A304V/F504K | ++ |
| 2867/2868 | Q169M/K402G/F504K/K506P | ++ |
| 2869/2870 | Q169M/K402G/L403A/F504K/K506P | ++ |
| 2871/2872 | T379M/Q468S | ++ |
| 2873/2874 | K402G/K427L/F504K | ++ |
| 2875/2876 | K266V/L327M/Q329R/P404S/E410V | ++ |
| 2877/2878 | Q169M/K402G/K427L/D429R/F504K | ++ |
| 2879/2880 | K427L | ++ |
| 2881/2882 | L340V/K402G/L403A | + |
| 2883/2884 | Q169M/L340I/K427L | + |
| 2885/2886 | K402G/F504K | + |
| 2887/2888 | K402G/L403S/D429R/F504K | + |
| 2889/2890 | Q169M/L340V/K402G/F504K | + |
| 2891/2892 | L327M/Q329R | + |
| 2893/2894 | Q169M/L340I/K506P | + |
| 2895/2896 | K427M | + |
| 2897/2898 | L327M/Q329R/P404D/E410V | + |
| 2899/2900 | L340I/K402G/F504K | + |
| 2901/2902 | L340I/K506P | + |
| 2903/2904 | L327M/E410V/T484A | + |
| 2905/2906 | T379M/P404D/E410V | + |
| 2907/2908 | L327M/Q329R/T379M/P404D/G406T/ | + |
| | E410V | |
| 2909/2910 | Q169M/L340V/K402G/L403P/K427M/ | + |
| | F504K/K506P | |
| 2911/2912 | F504K/K506P | + |
| 2913/2914 | Q169M/A304V/L403S/K427L/F504K | + |
| 2915/2916 | T379L/Q468S | + |
| 2917/2918 | K506P | + |
| 2919/2920 | Q169M/L340I/K402G/L403A/K427M/ | + |
| | D429R/F504K | |
| 2921/2922 | Q169M/K402G/F504K | + |
| 2923/2924 | T379M/E410V | + |
| 2925/2926 | L327M | + |
| 2927/2928 | L340I/L403S/F504K | + |
| 2929/2930 | L340V | + |
| 2931/2932 | L327M/Q329R/A465E/T484A | + |
| 2933/2934 | T484A | + |
| 2935/2936 | Q169M/A304V/L340V/K427L/D429R/ | + |
| | F504K | |
| 2937/2938 | A304V | + |
| 2939/2940 | S292N/L327M/Q329R/Q468S | + |
| 2941/2942 | L340V/F504K | + |
| 2943/2944 | F504K | + |
| 2945/2946 | L327M/W382L/G406T/E410V/T484A | + |
| 2947/2948 | T379M/W382L/Q468S | + |
| 2949/2950 | T379L/A465E/Q468S/T484A | + |

Levels of increased activity were determined relative to the reference polypeptide of SEQ ID NO: 2804 and defined as follows: “+” 1.20 to 2.39, “++” >2.39, “+++” >4.43.

### Example 41

### Improvements Over SEQ ID NO: 2812 in the Extension of Oligonucleotide Acceptor Molecules with Nucleotide Triphosphate Donors

### HTP Screening for Improved TdT Variants

[0470] SEQ ID NO: 2812 was selected as the parent TdT enzyme. Libraries of engineered genes were produced from the parent gene using various techniques (e.g., saturation mutagenesis and recombination of previously identified beneficial mutations). The polypeptides encoded by each gene were produced in HTP and prepared as described in Table 41.1.

[0471] Reactions were performed in 96-well format 200 μL BioRad PCR plates. Reactions included 10-100 μM oligonucleotide, 100-200 μM nucleotide triphosphate, 20 mM buffer, and 250 μM cobalt (II) chloride. The reactions were set up as follows: (i) all reaction components, except for TdT, were pre-mixed in a single solution and were aliquoted into each well of the 96-well plates (ii) TdT lysate solution was then added into the wells to initiate the reaction. The reaction plate was heat-sealed with a peelable aluminum seal and incubated in a thermocycler at the indicated temperature and reaction time, then held at 4° C. until the reaction was quenched. Reactions were quenched and processed for CE analysis as described in Example 4.

TABLE 41.1
Reaction conditions

Lysis buffer-TEA (50 mM, pH 7.5), 0.1 g/L lysozyme; Reaction
buffer-20 mM TEA, 0.25 mM CoCl2, pH 7.8; Lysate concentration
(vol %)-0.25; Preincubation Temp (C.)-50° C.; Preincubation Time
(min)-60; Reaction temperature (C.)-50° C.; Reaction Time (min)-60;
Reaction volume (μL) -1; NTP (μM)-mATP-3′P; NTP conc (μM)-100;
Oligonucleotide-5′-6-FAM-T15mAmU*mG; Substrate conc (μM)-25;
Product -5′-6-FAM-T15mAmU*mGmA-3′P.

[0472] Activity relative to SEQ ID NO: 2812 (Activity FIOP) was calculated as the percent product of the variant compared with the percent product observed by the reaction with SEQ ID NO: 2812 (where the percent product may be set as the average of replicates or else the highest single sample as appropriate). The results are shown in Table 41.2.

TABLE 41.2

| SEQ ID | | FIOP % product |
|---|---|---|
| NO: | Amino Acid Differences | Relative to |
| (nt/aa) | (Relative to SEQ ID NO: 2812) | SEQ ID NO: 2812 |
| 2951/2952 | M30G/Q179A/Q373G/T379M | +++ |
| 2953/2954 | N246E/S325W/Q329R/T379M/G461S | +++ |
| 2955/2956 | M30G/A184S/N246E/S325W/T379M/ | +++ |
| | D429R/A495S | |
| 2957/2958 | M30G/N246E/S325W/L327M/Q329R/ | +++ |
| | P404D/G461S | |
| 2959/2960 | M30G/Q329R/T379M | +++ |
| 2961/2962 | M30G/N246E/S325W/T379M/P404D/ | +++ |
| | K427L/D429R/G461S | |
| 2963/2964 | M30G/A184S/N246E/T379M/P404D | ++ |
| 2965/2966 | Q373G/T379M | ++ |
| 2967/2968 | M30G/Q373G | ++ |
| 2969/2970 | N246E/L327M/P404D/G461S/A495S | ++ |
| 2971/2972 | M30G/T379M/D429R/Y459I/G461S | ++ |
| 2973/2974 | M30G/N246E/K427L/Y459I/G461S | ++ |
| 2975/2976 | M30G/T379M/Y459I/G461S/F504Q | ++ |
| 2977/2978 | M30G/T200N/Q373G/T379M | ++ |
| 2979/2980 | T379M/S403L/G406N/Q468S | ++ |
| 2981/2982 | S403L/M441K | + |
| 2983/2984 | M30G/Q179A/T200N/Q373G/S403E | + |
| 2985/2986 | M30G/A184S/N246E/L327M/Q329R/ | + |
| | Y459I | |
| 2987/2988 | M30G/A184S/N246E/Y459I/G461S/ | + |
| | A495S/T500N/F504Q | |
| 2989/2990 | M30G/T200N/Q373G | + |
| 2991/2992 | M30G/L327M/P404D/F504S | + |
| 2993/2994 | Q353R/S403E | + |
| 2995/2996 | L327M/Q329R/T379M/F504S | + |
| 2997/2998 | M30G/Q373G/S403L | + |
| 2999/3000 | M30G | + |
| 3001/3002 | M30G/S325W/L327M | + |
| 3003/3004 | L327M/Y459I/G461S/A495S | + |
| 3005/3006 | Q373G/T379M/S403L | + |
| 3007/3008 | M30G/S325W/L327M/T379M/P404D/ | + |
| | D429R/A495S | |
| 3009/3010 | M30G/S403E/M441K/G460P | + |
| 3011/3012 | T200N/Q373G/T379M | + |

Levels of increased activity were determined relative to the reference polypeptide of SEQ ID NO: 2812 and defined as follows: “+” 1.06 to 1.18 (first 50%), “++” >1.18 (next 30%), “+++” >1.43 (top 20%)

### Example 42

### Improvements Over SEQ ID NO: 2812 in the Extension of Oligonucleotide Acceptor Molecules with Nucleotide Triphosphate Donors

### HTP Screening for Improved TdT Variants

[0473] SEQ ID NO: 2812 was selected as the parent TdT enzyme. Libraries of engineered genes were produced from the parent gene using various techniques (e.g., saturation mutagenesis and recombination of previously identified beneficial mutations). The polypeptides encoded by each gene were produced in HTP and prepared as described in Table 42.1.

[0474] Reactions were performed in 96-well format 200 μL BioRad PCR plates. Reactions included 10-100 μM oligonucleotide, 100-200 μM nucleotide triphosphate, 20 mM buffer, and 250 μM cobalt (II) chloride. The reactions were set up as follows: (i) all reaction components, except for TdT, were pre-mixed in a single solution and were aliquoted into each well of the 96-well plates (ii) TdT lysate solution was then added into the wells to initiate the reaction. The reaction plate was heat-sealed with a peelable aluminum seal and incubated in a thermocycler at the indicated temperature and reaction time, then held at 4° C. until the reaction was quenched. Reactions were quenched and processed for CE analysis as described in Example 4.

TABLE 42.1
Reaction conditions

Lysis buffer-TEA (50 mM, pH 7.5), 0.1 g/L lysozyme; Reaction
buffer-20 mM TEA, 0.25 mM CoCl2, pH 7.8; Lysate concentration
(vol %)-0.25; Preincubation Temp (C.)-50° C.; Preincubation Time
(min)-60; Reaction temperature (C.)-50° C.; Reaction Time (min)-60;
Reaction volume (μL)-1; NTP (μM)-mATP-3′P; NTP conc (μM)-100;
Oligonucleotide-5′-6-FAM-T15mAmU*mG; Substrate conc (μM)-25;
Product -5′-6-FAM-T15mAmU*mGmA-3′P.

[0475] Activity relative to SEQ ID NO: 2812 (Activity FIOP) was calculated as the percent product of the variant compared with the percent product observed by the reaction with SEQ ID NO: 2812 (where the percent product may be set as the average of replicates or else the highest single sample as appropriate). The results are shown in Table 42.2.

TABLE 42.2

| | Amino Acid Differences | |
|---|---|---|
| SEQ ID NO: | (Relative to SEQ ID | FIOP % product Relative |
| (nt/aa) | NO: 2812) | to SEQ ID NO: 2812 |
| 3013/3014 | Q370D | +++ |
| 3015/3016 | E367D | +++ |
| 3017/3018 | W433G | +++ |
| 3019/3020 | I503T | +++ |
| 3021/3022 | W433E | +++ |
| 3023/3024 | W433S | +++ |
| 3025/3026 | Q370S | +++ |
| 3027/3028 | R264L | +++ |
| 3029/3030 | W433A | +++ |
| 3031/3032 | K278M | ++ |
| 3033/3034 | K266R | ++ |
| 3035/3036 | E520P | ++ |
| 3037/3038 | R264V | ++ |
| 3039/3040 | L326R | ++ |
| 3041/3042 | M435G | ++ |
| 3043/3044 | I503E | ++ |
| 3045/3046 | L499M | ++ |
| 3047/3048 | F525S | ++ |
| 3049/3050 | I503V | ++ |
| 3051/3052 | G414E | ++ |
| 3053/3054 | R264E | ++ |
| 3055/3056 | M435A | ++ |
| 3057/3058 | Q370G | ++ |
| 3059/3060 | T437R | + |
| 3061/3062 | I503A | + |
| 3063/3064 | T396R | + |
| 3065/3066 | W433R | + |
| 3067/3068 | R248K | + |
| 3069/3070 | R264T | + |
| 3071/3072 | M435E | + |
| 3073/3074 | M435S | + |
| 3075/3076 | W433M | + |
| 3077/3078 | L499R | + |
| 3079/3080 | P446G | + |
| 3081/3082 | V253I | + |
| 3083/3084 | D485E | + |
| 3085/3086 | Q370M | + |
| 3087/3088 | W433P | + |
| 3089/3090 | A444R | + |
| 3091/3092 | F525R | + |
| 3093/3094 | G231S | + |
| 3095/3096 | D198E | + |
| 3097/3098 | A444G | + |
| 3099/3100 | T437G | + |
| 3101/3102 | E233R | + |
| 3103/3104 | F525Q | + |
| 3105/3106 | R248T | + |

Levels of increased activity were determined relative to the reference polypeptide of SEQ ID NO: 2812 and defined as follows: “+” 1.10 to 1.27, “++” >1.27, “+++” >1.48.

### Example 43

### Improvements Over SEQ ID NO: 2812 in the Extension of Oligonucleotide Acceptor Molecules with Nucleotide Triphosphate Donors

### HTP Screening for Improved TdT Variants

[0476] SEQ ID NO: 2812 was selected as the parent TdT enzyme. Libraries of engineered genes were produced from the parent gene using various techniques (e.g., saturation mutagenesis and recombination of previously identified beneficial mutations). The polypeptides encoded by each gene were produced in HTP and prepared as described in Table 43.1.

[0477] Reactions were performed in 96-well format 200 μL BioRad PCR plates. Reactions included 10-100 μM oligonucleotide, 100-200 μM nucleotide triphosphate, 20 mM buffer, and 250 μM cobalt (II) chloride. The reactions were set up as follows: (i) all reaction components, except for TdT, were pre-mixed in a single solution and were aliquoted into each well of the 96-well plates (ii) TdT lysate solution was then added into the wells to initiate the reaction. The reaction plate was heat-sealed with a peelable aluminum seal and incubated in a thermocycler at the indicated temperature and reaction time, then held at 4° C. until the reaction was quenched. Reactions were quenched and processed for CE analysis as described in Example 4.

TABLE 43.1
Reaction conditions

Lysis buffer-TEA (50 mM, pH 7.5), 0.1 g/L lysozyme; Reaction
buffer-20 mM TEA, 0.25 mM CoCl2, pH 7.8; Lysate concentration
(vol %)-0.25; Preincubation Temp (C.)-62° C.; Preincubation Time
(min)-60; Reaction temperature (C.)-50° C.; Reaction Time (min)-60;
Reaction volume (μL)-1; NTP (M)-mATP-3′P; NTP conc (μM)-100;
Oligonucleotide-5′-6-FAM-T15AmU*mG; Substrate conc (μM)-25;
Product -5′-6-FAM-T15AmU*mGmA-3′P.

[0478] Activity relative to SEQ ID NO: 2812 (Activity FIOP) was calculated as the percent product of the variant compared with the percent product observed by the reaction with SEQ ID NO: 2812 (where the percent product may be set as the average of replicates or else the highest single sample as appropriate). The results are shown in Table 43.2.

TABLE 43.2

| | Amino Acid Differences | |
|---|---|---|
| SEQ ID NO: | (Relative to SEQ | FIOP % product Relative |
| (nt/aa) | ID NO: 2812) | to SEQ ID NO: 2812 |
| 3107/3108 | K266T | +++ |
| 3051/3052 | G414E | +++ |
| 3083/3084 | D485E | +++ |
| 3025/3026 | Q370S | +++ |
| 3109/3110 | A366V | +++ |
| 3093/3094 | G231S | +++ |
| 3111/3112 | E186D | +++ |
| 3113/3114 | K368R | +++ |
| 3115/3116 | Q370N | +++ |
| 3117/3118 | W433V | ++ |
| 3119/3120 | R264A | ++ |
| 3121/3122 | K501R | ++ |
| 3123/3124 | K235R | ++ |
| 3125/3126 | E367A | ++ |
| 3127/3128 | A444H | ++ |
| 3033/3034 | K266R | ++ |
| 3085/3086 | Q370M | ++ |
| 3129/3130 | L188I | ++ |
| 3131/3132 | M435P | ++ |
| 3133/3134 | M435I | ++ |
| 3095/3096 | D198E | ++ |
| 3135/3136 | T437P | ++ |
| 3099/3100 | T437G | + |
| 3137/3138 | A515E | + |
| 3139/3140 | E243S | + |
| 3141/3142 | T437A | + |
| 3143/3144 | G442A | + |
| 3145/3146 | L287I | + |
| 3147/3148 | E243L | + |
| 3149/3150 | K297S/N440K | + |
| 3151/3152 | E243T | + |
| 3087/3088 | W433P | + |
| 3081/3082 | V253I | + |
| 3153/3154 | S439G | + |
| 3155/3156 | E243R | + |
| 3157/3158 | D485S | + |
| 3159/3160 | S439P | + |
| 3161/3162 | E233A | + |
| 3163/3164 | T437K | + |
| 3069/3070 | R264T | + |
| 3075/3076 | W433M | + |
| 3097/3098 | A444G | + |
| 3071/3072 | M435E | + |
| 3165/3166 | R248S | + |

Levels of increased activity were determined relative to the reference polypeptide of SEQ ID NO: 2812 and defined as follows: “+” 1.11 to 1.29, “++” >1.29, “+++” >1.48.

### Example 44

### Improvements Over SEQ ID NO: 2956 in the Extension of Oligonucleotide Acceptor Molecules with Nucleotide Triphosphate Donors

### HTP Screening for Improved TdT Variants

[0479] SEQ ID NO: 2956 was selected as the parent TdT enzyme. Libraries of engineered genes were produced from the parent gene using various techniques (e.g., saturation mutagenesis and recombination of previously identified beneficial mutations). The polypeptides encoded by each gene were produced in HTP and prepared as described in Table 44.1.

[0480] Reactions were performed in 96-well format 200 μL BioRad PCR plates. Reactions included 10-100 μM oligonucleotide, 100-200 μM nucleotide triphosphate, 20 mM buffer, and 250 μM cobalt (II) chloride. The reactions were set up as follows: (i) all reaction components, except for TdT, were pre-mixed in a single solution and were aliquoted into each well of the 96-well plates (ii) TdT lysate solution was then added into the wells to initiate the reaction. The reaction plate was heat-sealed with a peelable aluminum seal and incubated in a thermocycler at the indicated temperature and reaction time, then held at 4° C. until the reaction was quenched. Reactions were quenched and processed for CE analysis as described in Example 4.

TABLE 44.1
Reaction conditions

Lysis buffer-TEA (50 mM, pH 7.5), 0.1 g/L lysozyme; Reaction
buffer-20 mM TEA, 0.25 mM CoCl2, pH 7.8; Lysate concentration
(vol %)-0.25; Preincubation Temp (C.)-64° C.; Preincubation Time
(min)-60; Reaction temperature (C.)-50° C.; Reaction Time (min)-60;
Reaction volume (μL)-1; NTP (μM)-mATP-3′P; NTP conc (μM)-100;
Oligonucleotide-5′-6-FAM-T15AmU*mG; Substrate conc (μM)-25;
Product -5′-6-FAM-T15AmU*mGmA-3′P.

[0481] Activity relative to SEQ ID NO: 2956 (Activity FIOP) was calculated as the percent product of the variant compared with the percent product observed by the reaction with SEQ ID NO: 2956 (where the percent product may be set as the average of replicates or else the highest single sample as appropriate). The results are shown in Table 44.2.

TABLE 44.2

| SEQ | | FIOP % product |
|---|---|---|
| ID NO: | Amino Acid Differences | Relative to SEQ |
| (nt/aa) | (Relative to SEQ ID NO: 2956) | ID NO: 2956 |
| 3167/3168 | G140V/M142V/E153V/K427L/T484L | +++ |
| 3169/3170 | M142V/E150P/P158S/H177R/K427L/K445N | +++ |
| 3171/3172 | G140V/K161H/H177R/P404D/K427L/T484L | +++ |
| 3173/3174 | G140V/M142V/E153V/H177R/K427L/E434N/M441V/A444S/ | +++ |
| | G461S/K502G | |
| 3175/3176 | H177R/G365A/K427L/E434N | +++ |
| 3177/3178 | K427L | ++ |
| 3179/3180 | G140V/M142V/Q373R/K427L/T484L | ++ |
| 3181/3182 | G140V/E150P/E153V/G365A/Q373R/K427L/T484L | ++ |
| 3183/3184 | M142V/E153V/H177R/M441V/A444S | ++ |
| 3185/3186 | G140V/M142V/G365A/Q373R/P404D/K427L/T484L | ++ |
| 3187/3188 | H177R | ++ |
| 3189/3190 | G140V/H177R/P404D/T484L | ++ |
| 3191/3192 | E150P/H177R | ++ |
| 3193/3194 | M142V/E150P/H177R/P404D | + |
| 3195/3196 | M142V/G461S/T484L/K502G | + |
| 3197/3198 | E153V/T484L | + |
| 3199/3200 | W325L/K427L | + |
| 3201/3202 | G140V/M142V/H177R/M441V | + |
| 3203/3204 | G140V/H177R/P404D | + |
| 3205/3206 | T484L | + |
| 3207/3208 | E153V/K161H/W325L/P404D/K427L/M441V/T484L | + |
| 3209/3210 | M142V/H177R/Q373R/M441V | + |
| 3211/3212 | G140V/P148T/K161H/H177R/P404D | + |
| 3213/3214 | G140V/M142V/H177R | + |
| 3215/3216 | M142V/H177R/Q373R | + |
| 3217/3218 | E153V | + |
| 3219/3220 | G140V/E150P/H177R/P404D/P436S/M441V/T484L/K502G | + |

Levels of increased activity were determined relative to the reference polypeptide of SEQ ID NO: 2956 and defined as follows: “+” 1.24 to 1.76, “++” >1.76, “+++” >3.58.

### Example 45

### Improvements Over SEQ ID NO: 3174 in the Extension of Oligonucleotide Acceptor Molecules with Nucleotide Triphosphate Donors

### HTP Screening for Improved TdT Variants

[0482] SEQ ID NO: 3174 was selected as the parent TdT enzyme. Libraries of engineered genes were produced from the parent gene using various techniques (e.g., saturation mutagenesis and recombination of previously identified beneficial mutations). The polypeptides encoded by each gene were produced in HTP and prepared as described in Table 45.1.

[0483] Reactions were performed in 96-well format 200 μL BioRad PCR plates. Reactions included 10-100 μM oligonucleotide, 100-200 μM nucleotide triphosphate, 20 mM buffer, and 250 μM cobalt (II) chloride. The reactions were set up as follows: (i) all reaction components, except for TdT, were pre-mixed in a single solution and were aliquoted into each well of the 96-well plates (ii) TdT lysate solution was then added into the wells to initiate the reaction. The reaction plate was heat-sealed with a peelable aluminum seal and incubated in a thermocycler at the indicated temperature and reaction time, then held at 4° C. until the reaction was quenched. Reactions were quenched and processed for CE analysis as described in Example 4.

TABLE 45.1
Reaction conditions

Lysis buffer-TEA (50 mM, pH 7.5), 0.1 g/L lysozyme; Reaction buffer-20 mM TEA, 0.25 mM CoCl2,
pH 7.8; Lysate concentration (vol %)-0.25; Preincubation Temp (C.)-50° C.; Preincubation Time (min)-
60; Reaction temperature (C.)-50° C.; Reaction Time (min)-60; Reaction volume (μL)-1; NTP (μM)-
mATP-3′P; NTP conc (μM)-100; Oligonucleotide-5′-6-FAM-T15mAmU*mG; Substrate conc (μM)-
25; Product -5′-6-FAM-T15mAmU*mGmA-3′P.

[0484] Activity relative to SEQ ID NO: 3174 (Activity FIOP) was calculated as the percent product of the variant compared with the percent product observed by the reaction with SEQ ID NO: 3174 (where the percent product may be set as the average of replicates or else the highest single sample as appropriate). The results are shown in Table 45.2.

TABLE 45.2

| SEQ | | FIOP % product |
|---|---|---|
| ID NO: | Amino Acid Differences | Relative to SEQ |
| (nt/aa) | (Relative to SEQ ID NO: 3174) | ID NO: 3174 |
| 3221/3222 | R264A/K266T/T396S/G414E/W433R/V441M/A515E | +++ |
| 3223/3224 | D198E/R264A/K266T/G414E | +++ |
| 3225/3226 | R264A/K266T/G414E/V441M/L499M/K501R/A515E/E520D | +++ |
| 3227/3228 | E243S/T396S/G414E/W433V/V441M/A515E/E520D | +++ |
| 3229/3230 | D198E/R264A/T396S/G414E/W433V/V441M/A515E | +++ |
| 3231/3232 | D198E/E243S/T396S/G414E/S431R/W433V/V441M/L499M | +++ |
| 3233/3234 | T396S/G414E/V441M/A515E | ++ |
| 3235/3236 | D198E/E243S/T396S/G414E/W433R/T437R/V441M/A515E | ++ |
| 3237/3238 | D198E/K266T/G414E/W433S/V441M/A515E | ++ |
| 3239/3240 | D198E/G414E/W433V/V441M/A515E/E520D | ++ |
| 3241/3242 | E186D/G231S/R248K/T484L | ++ |
| 3243/3244 | T396S/G414E/V441M | ++ |
| 3245/3246 | E243S/G414E/T437R/V441M/A515E | ++ |
| 3247/3248 | D198E/G414E/S431R/V441M/L499M/E520D | ++ |
| 3249/3250 | R264A/G414E | ++ |
| 3251/3252 | E186D/G231S/R248K/G365A/A366V/K368R/T484L | ++ |
| 3253/3254 | E243S/G414E/W433S/T437R/V441M | ++ |
| 3255/3256 | E186D/G231S/V441M/S444H/K445N | + |
| 3257/3258 | K266T/T437R/V441M/L499M/A515E/E520D | + |
| 3259/3260 | E186D/T484L/D485E | + |
| 3261/3262 | G414E/V441M/E520D | + |
| 3263/3264 | R264A/G414E/V441M | + |
| 3265/3266 | E186D/G231S/R248K/V253I/T484L | + |
| 3267/3268 | D198E/E243S/R264A/S431R/V441M | + |
| 3269/3270 | E243S/R264A/A515E/E520D | + |
| 3271/3272 | R248K/G442K/S444A/K445N/T484L | + |
| 3273/3274 | E186D/G231S/K368R/K416N/V441M/G442K/S444A/T484L/D485E | + |
| 3275/3276 | G365A/A366V/V441M/T484L/D485E | + |
| 3277/3278 | E186D/G231S/R248K/A366V/K368R/S444H | + |
| 3279/3280 | D198E/K266T/T396S/G414E/W433V/V441M/L499M/K501R | + |
| 3281/3282 | L188I/G231S/R248K/V253I/G365A/V441M/G442K/S444A/K445N/ | + |
| | T484L | |
| 3283/3284 | G231S/R248K/V441M/T484L | + |
| 3285/3286 | D198E/K266T/T437R/V441M/L499M | + |
| 3287/3288 | R264A/W433S/V441M | + |
| 3289/3290 | E186D/L188I/R248K/V253I/G365A/A366V/S444H/K445N | + |

Levels of increased activity were determined relative to the reference polypeptide of SEQ ID NO: 3174 and defined as follows: “+” 1.11 to 1.54, “++” >1.54, “+++” >1.79.

### Example 46

### Improvements Over SEQ ID NO: 3174 in the Extension of Oligonucleotide Acceptor Molecules with Nucleotide Triphosphate Donors

### HTP Screening for Improved TdT Variants

[0485] SEQ ID NO: 3174 was selected as the parent TdT enzyme. Libraries of engineered genes were produced from the parent gene using various techniques (e.g., saturation mutagenesis and recombination of previously identified beneficial mutations). The polypeptides encoded by each gene were produced in HTP and prepared as described in Table 46.1.

[0486] Reactions were performed in 96-well format 200 μL BioRad PCR plates. Reactions included 10-100 μM oligonucleotide, 100-200 μM nucleotide triphosphate, 20 mM buffer, and 250 μM cobalt (II) chloride. The reactions were set up as follows: (i) all reaction components, except for TdT, were pre-mixed in a single solution and were aliquoted into each well of the 96-well plates (ii) TdT lysate solution was then added into the wells to initiate the reaction. The reaction plate was heat-sealed with a peelable aluminum seal and incubated in a thermocycler at the indicated temperature and reaction time, then held at 4° C. until the reaction was quenched. Reactions were quenched and processed for CE analysis as described in Example 4.

TABLE 46.1
Reaction conditions

Lysis buffer-TEA (50 mM, pH 7.5), 0.1 g/L lysozyme; Reaction buffer-20 mM TEA, 0.25 mM CoCl2,
pH 7.8; Lysate concentration (vol %)-0.25; Preincubation Temp (C.)-48° C.; Preincubation Time (min)-
60; Reaction temperature (C.)-48° C.; Reaction Time (min)-60; Reaction volume (μL)-1; NTP (μM)-
mATP-3′P; NTP conc (μM)-100; Oligonucleotide-5′-6-FAM-T15mAmU*mG; Substrate conc (μM)-
25; Product -5′-6-FAM-T15mAmU*mGmA-3′P.

[0487] Activity relative to SEQ ID NO: 3174 (Activity FIOP) was calculated as the percent product of the variant compared with the percent product observed by the reaction with SEQ ID NO: 3174 (where the percent product may be set as the average of replicates or else the highest single sample as appropriate). The results are shown in Table 46.2.

TABLE 46.2

| SEQ ID NO: | Amino Acid Differences | FIOP % product Relative |
|---|---|---|
| (nt/aa) | (Relative to SEQ ID NO: 3174) | to SEQ ID NO: 3174 |
| 3291/3292 | E394Y | +++ |
| 3293/3294 | M301 | +++ |
| 3295/3296 | M301T | +++ |
| 3297/3298 | M301V | +++ |
| 3299/3300 | E394F | +++ |
| 3301/3302 | Y390C | +++ |
| 3303/3304 | F194L | +++ |
| 3305/3306 | A408I | +++ |
| 3307/3308 | V273F | +++ |
| 3309/3310 | V273L | +++ |
| 3311/3312 | K274I | +++ |
| 3313/3314 | V273D | +++ |
| 3315/3316 | R473G | +++ |
| 3317/3318 | K274G | +++ |
| 3319/3320 | V273I | +++ |
| 3321/3322 | R196G | +++ |
| 3323/3324 | V273E/K501N | +++ |
| 3325/3326 | V273Y | +++ |
| 3327/3328 | V273E | +++ |
| 3329/3330 | K278F | +++ |
| 3331/3332 | G350W | +++ |
| 3333/3334 | K266Y | +++ |
| 3335/3336 | K274A | +++ |
| 3337/3338 | F347I | +++ |
| 3339/3340 | L312M | +++ |
| 3341/3342 | V304M | +++ |
| 3343/3344 | K274V | +++ |
| 3345/3346 | V273G | +++ |
| 3347/3348 | F269W | +++ |
| 3349/3350 | F194W | ++ |
| 3351/3352 | K266I | ++ |
| 3353/3354 | K297C | ++ |
| 3355/3356 | Y309F | ++ |
| 3357/3358 | G414A | ++ |
| 3359/3360 | E394V | ++ |
| 3361/3362 | R196N | ++ |
| 3363/3364 | E394A | ++ |
| 3365/3366 | N493V | ++ |
| 3367/3368 | A413S | ++ |
| 3369/3370 | Q302S | ++ |
| 3371/3372 | E394M | ++ |
| 3373/3374 | K416G | ++ |
| 3375/3376 | K266V | ++ |
| 3377/3378 | E394G | ++ |
| 3379/3380 | V268C | ++ |
| 3381/3382 | T299L | ++ |
| 3383/3384 | T299M | ++ |
| 3385/3386 | K266T | ++ |
| 3387/3388 | L454F | ++ |
| 3389/3390 | R196L | ++ |
| 3391/3392 | Y309W | ++ |
| 3393/3394 | R477G | ++ |
| 3395/3396 | L298I | ++ |
| 3397/3398 | Y309V | ++ |
| 3399/3400 | K407L | ++ |
| 3401/3402 | K278R | ++ |
| 3403/3404 | L454M | ++ |
| 3405/3406 | A408G | ++ |
| 3407/3408 | K407N | ++ |
| 3409/3410 | K407R | ++ |
| 3411/3412 | V268I | ++ |
| 3413/3414 | Y390V | ++ |
| 3415/3416 | Y309L | ++ |
| 3417/3418 | K407M | ++ |
| 3419/3420 | Q353A | ++ |
| 3421/3422 | Y309G | ++ |
| 3423/3424 | Q302N | ++ |
| 3425/3426 | L312V | ++ |
| 3427/3428 | R196T | ++ |
| 3429/3430 | R480H | ++ |
| 3431/3432 | Y309M | ++ |
| 3433/3434 | S267A | ++ |
| 3435/3436 | Q468M | ++ |
| 3437/3438 | G411N | + |
| 3439/3440 | K278V | + |
| 3441/3442 | V268L | + |
| 3443/3444 | V304D | + |
| 3445/3446 | V273C | + |
| 3447/3448 | K266F | + |
| 3449/3450 | S267H | + |
| 3451/3452 | E190L | + |
| 3453/3454 | L359G | + |
| 3455/3456 | H263M | + |
| 3457/3458 | R196M | + |
| 3459/3460 | Q468H | + |
| 3461/3462 | A413L | + |
| 3463/3464 | A413P | + |
| 3465/3466 | G411E | + |
| 3467/3468 | Y390I | + |
| 3469/3470 | N493Y | + |
| 3471/3472 | F194C | + |
| 3473/3474 | T299N | + |
| 3475/3476 | V268T | + |
| 3477/3478 | T299A | + |
| 3479/3480 | S267Y | + |
| 3481/3482 | L298M | + |
| 3483/3484 | A408L | + |
| 3485/3486 | G350L | + |
| 3487/3488 | A413F | + |
| 3489/3490 | Y309I | + |
| 3491/3492 | A408V | + |
| 3493/3494 | P352V | + |
| 3495/3496 | R281L | + |
| 3497/3498 | R281K | + |
| 3499/3500 | L479V | + |
| 3501/3502 | L312T | + |
| 3503/3504 | V304T | + |
| 3505/3506 | E193S | + |
| 3507/3508 | W279Y | + |
| 3509/3510 | M122I/R473K | + |
| 3511/3512 | K297L | + |
| 3513/3514 | S267C | + |
| 3515/3516 | T299Y | + |
| 3517/3518 | A413V | + |
| 3519/3520 | L479F | + |
| 3521/3522 | H263R | + |
| 3523/3524 | K278M | + |
| 3525/3526 | Q468F | + |
| 3527/3528 | S267V | + |
| 3529/3530 | E410F | + |
| 3531/3532 | E193T | + |
| 3533/3534 | G315Q | + |
| 3535/3536 | G350R | + |
| 3537/3538 | R480K | + |
| 3539/3540 | A408T | + |
| 3541/3542 | F194S | + |
| 3543/3544 | Q468T | + |
| 3545/3546 | K297T | + |
| 3547/3548 | P436S | + |
| 3549/3550 | K297M | + |
| 3551/3552 | R264C | + |
| 3553/3554 | P300H | + |
| 3555/3556 | R189L | + |
| 3557/3558 | K266R | + |
| 3559/3560 | S472G | + |
| 3561/3562 | K297R | + |
| 3563/3564 | K297V | + |
| 3565/3566 | E410G | + |
| 3567/3568 | E410I | + |
| 3569/3570 | L454V | + |
| 3571/3572 | E190M | + |
| 3573/3574 | K407W | + |
| 3575/3576 | E190R | + |
| 3577/3578 | Y390L | + |
| 3579/3580 | A408M | + |
| 3581/3582 | K278H | + |
| 3583/3584 | R392V | + |

Levels of increased activity were determined relative to the reference polypeptide of SEQ ID NO: 3174 and defined as follows: “+” 1.05 to 1.35, “++” >1.35, “+++” >1.84.

### Example 47

### Improvements Over SEQ ID NO: 3174 in the Extension of Oligonucleotide Acceptor Molecules with Nucleotide Triphosphate Donors

### HTP Screening for Improved TdT Variants

[0488] SEQ ID NO: 3174 was selected as the parent TdT enzyme. Libraries of engineered genes were produced from the parent gene using various techniques (e.g., saturation mutagenesis and recombination of previously identified beneficial mutations). The polypeptides encoded by each gene were produced in HTP and prepared as described in Table 47.1.

[0489] Reactions were performed in 96-well format 200 μL BioRad PCR plates. Reactions included 10-100 μM oligonucleotide, 100-200 μM nucleotide triphosphate, 20 mM buffer, and 250 μM cobalt (II) chloride. The reactions were set up as follows: (i) all reaction components, except for TdT, were pre-mixed in a single solution and were aliquoted into each well of the 96-well plates (ii) TdT lysate solution was then added into the wells to initiate the reaction. The reaction plate was heat-sealed with a peelable aluminum seal and incubated in a thermocycler at the indicated temperature and reaction time, then held at 4° C. until the reaction was quenched. Reactions were quenched and processed for CE analysis as described in Example 4.

TABLE 47.1
Reaction conditions

Lysis buffer-TEA (50 mM, pH 7.5), 0.1 g/L lysozyme; Reaction buffer-20 mM TEA, 0.25 mM CoCl2,
pH 7.8; Lysate concentration (vol %)-0.25; Preincubation Temp (C.)-65° C.; Preincubation Time (min)-
60; Reaction temperature (C.)-50° C.; Reaction Time (min)-60; Reaction volume (μL)-1; NTP (μM)-
mATP-3′P; NTP conc (μM)-100; Oligonucleotide-5′-6-FAM-T15AmU*mG; Substrate conc (μM)-25;
Product -5′-6-FAM-T15AmU*mGmA-3′P.

[0490] Activity relative to SEQ ID NO: 3174 (Activity FIOP) was calculated as the percent product of the variant compared with the percent product observed by the reaction with SEQ ID NO: 3174 (where the percent product may be set as the average of replicates or else the highest single sample as appropriate). The results are shown in Table 47.2.

TABLE 47.2

| SEQ ID NO: | Amino Acid Differences | FIOP % product Relative |
|---|---|---|
| (nt/aa) | (Relative to SEQ ID NO: 3174) | to SEQ ID NO: 3174 |
| 3315/3316 | R473G | +++ |
| 3299/3300 | E394F | +++ |
| 3291/3292 | E394Y | +++ |
| 3385/3386 | K266T | +++ |
| 3371/3372 | E394M | ++ |
| 3321/3322 | R196G | ++ |
| 3363/3364 | E394A | ++ |
| 3359/3360 | E394V | ++ |
| 3585/3586 | Q468A | ++ |
| 3587/3588 | R477S | ++ |
| 3525/3526 | Q468F | ++ |
| 3365/3366 | N493V | ++ |
| 3375/3376 | K266V | + |
| 3377/3378 | E394G | + |
| 3351/3352 | K266I | + |
| 3459/3460 | Q468H | + |
| 3543/3544 | Q468T | + |
| 3435/3436 | Q468M | + |
| 3403/3404 | L454M | + |
| 3319/3320 | V273I | + |
| 3411/3412 | V268I | + |
| 3309/3310 | V273L | + |
| 3521/3522 | H263R | + |
| 3497/3498 | R281K | + |
| 3589/3590 | K416S | + |

Levels of increased activity were determined relative to the reference polypeptide of SEQ ID NO: 3174 and defined as follows: “+” 1.20 to 1.58, “++” >1.58, “+++” >2.20.

### Example 48

### Improvements Over SEQ ID NO: 3174 in the Extension of Oligonucleotide Acceptor Molecules with Nucleotide Triphosphate Donors

### HTP Screening for Improved TdT Variants

[0491] SEQ ID NO: 3174 was selected as the parent TdT enzyme. Libraries of engineered genes were produced from the parent gene using various techniques (e.g., saturation mutagenesis and recombination of previously identified beneficial mutations). The polypeptides encoded by each gene were produced in HTP and prepared as described in Table 48.1.

[0492] Reactions were performed in 96-well format 200 μL BioRad PCR plates. Reactions included 10-100 μM oligonucleotide, 100-200 μM nucleotide triphosphate, 20 mM buffer, and 250 μM cobalt (II) chloride. The reactions were set up as follows: (i) all reaction components, except for TdT, were pre-mixed in a single solution and were aliquoted into each well of the 96-well plates (ii) TdT lysate solution was then added into the wells to initiate the reaction. The reaction plate was heat-sealed with a peelable aluminum seal and incubated in a thermocycler at the indicated temperature and reaction time, then held at 4° C. until the reaction was quenched. Reactions were quenched and processed for CE analysis as described in Example 4.

TABLE 48.1
Reaction conditions

Lysis buffer-TEA (50 mM, pH 7.5), 0.1 g/L lysozyme; Reaction buffer-20 mM TEA, 0.25 mM CoCl2,
pH 7.8; Lysate concentration (vol %)-0.25; Preincubation Temp (C.)-48° C.; Preincubation Time (min)-
60; Reaction temperature (C.)-48° C.; Reaction Time (min)-60; Reaction volume (μL)-1; NTP (μM)-
mATP-3′P; NTP conc (μM)-100; Oligonucleotide-5′-6-FAM-T15mC*mG*mA; Substrate conc (μM)-
25; Product -5′-6-FAM-T15mC*mG*mAmA-3′P.

[0493] Activity relative to SEQ ID NO: 3174 (Activity FIOP) was calculated as the percent product of the variant compared with the percent product observed by the reaction with SEQ ID NO: 3174 (where the percent product may be set as the average of replicates or else the highest single sample as appropriate). The results are shown in Table 48.2.

TABLE 48.2

| SEQ ID NO: | Amino Acid Differences | FIOP % product Relative |
|---|---|---|
| (nt/aa) | (Relative to SEQ ID NO: 1830) | to SEQ ID NO: 1830 |
| 3589/3590 | K416S | +++ |
| 3373/3374 | K416G | +++ |
| 3297/3298 | M301V | +++ |
| 3301/3302 | Y390C | +++ |
| 3293/3294 | M301S | +++ |
| 3315/3316 | R473G | +++ |
| 3295/3296 | M301T | +++ |
| 3349/3350 | F194W | +++ |
| 3343/3344 | K274V | +++ |
| 3311/3312 | K274I | +++ |
| 3325/3326 | V273Y | +++ |
| 3321/3322 | R196G | +++ |
| 3307/3308 | V273F | ++ |
| 3327/3328 | V273E | ++ |
| 3323/3324 | V273E/K501N | ++ |
| 3303/3304 | F194L | ++ |
| 3347/3348 | F269W | ++ |
| 3367/3368 | A413S | ++ |
| 3319/3320 | V273I | ++ |
| 3407/3408 | K407N | ++ |
| 3345/3346 | V273G | ++ |
| 3583/3584 | R392V | ++ |
| 3365/3366 | N493V | ++ |
| 3305/3306 | A408I | ++ |
| 3317/3318 | K274G | ++ |
| 3413/3414 | Y390V | ++ |
| 3361/3362 | R196N | ++ |
| 3385/3386 | K266T | ++ |
| 3391/3392 | Y309W | ++ |
| 3417/3418 | K407M | ++ |
| 3403/3404 | L454M | + |
| 3431/3432 | Y309M | ++ |
| 3591/3592 | K407D | + |
| 3335/3336 | K274A | + |
| 3477/3478 | T299A | + |
| 3593/3594 | T299S | + |
| 3313/3314 | V273D | + |
| 3415/3416 | Y309L | + |
| 3475/3476 | V268T | + |
| 3399/3400 | K407L | + |
| 3309/3310 | V273L | + |
| 3375/3376 | K266V | + |
| 3595/3596 | D277E | + |
| 3355/3356 | Y309F | + |
| 3337/3338 | F347I | + |
| 3453/3454 | L359G | + |
| 3561/3562 | K297R | + |
| 3481/3482 | L298M | + |
| 3569/3570 | L454V | + |
| 3291/3292 | E394Y | + |
| 3393/3394 | R477G | + |
| 3369/3370 | Q302S | + |
| 3557/3558 | K266R | + |
| 3543/3544 | Q468T | + |
| 3409/3410 | K407R | + |
| 3433/3434 | S267A | + |
| 3473/3474 | T299N | + |
| 3425/3426 | L312V | + |
| 3597/3598 | K278Y | + |
| 3457/3458 | R196M | + |
| 3441/3442 | V268L | + |
| 3499/3500 | L479V | + |

Levels of increased activity were determined relative to the reference polypeptide of SEQ ID NO: 3174 and defined as follows: “+” 1.19 to 1.43, “++” >1.43, “+++” >2.15.

### Example 49

### Improvements Over SEQ ID NO: 3222 in the Extension of Oligonucleotide Acceptor Molecules with Nucleotide Triphosphate Donors

### HTP Screening for Improved TdT Variants

[0494] SEQ ID NO: 3222 was selected as the parent TdT enzyme. Libraries of engineered genes were produced from the parent gene using various techniques (e.g., saturation mutagenesis and recombination of previously identified beneficial mutations). The polypeptides encoded by each gene were produced in HTP and prepared as described in Table 49.1.

[0495] Reactions were performed in 96-well format 200 μL BioRad PCR plates. Reactions included 10-100 μM oligonucleotide, 100-200 μM nucleotide triphosphate, 20 mM buffer, and 250 μM cobalt (II) chloride. The reactions were set up as follows: (i) all reaction components, except for TdT, were pre-mixed in a single solution and were aliquoted into each well of the 96-well plates (ii) TdT lysate solution was then added into the wells to initiate the reaction. The reaction plate was heat-sealed with a peelable aluminum seal and incubated in a thermocycler at the indicated temperature and reaction time, then held at 4° C. until the reaction was quenched. Reactions were quenched and processed for CE analysis as described in Example 4.

TABLE 49.1
Reaction conditions

Lysis buffer-TEA (50 mM, pH 7.5), 0.1 g/L lysozyme; Reaction buffer-20 mM TEA, 0.25 mM CoCl2,
pH 7.8; Lysate concentration (vol %)-0.25; Preincubation Temp (C.)-50° C.; Preincubation Time (min)-
60; Reaction temperature (C.)-50° C.; Reaction Time (min)-60; Reaction volume (μL)-1; NTP (μM)-
mATP-3′P; NTP conc (μM)-100; Oligonucleotide-5′-6-FAM-T15mC*mG*mA; Substrate conc (μM)-
25; Product -5′-6-FAM-T15mC*mG*mAmA-3′P.

[0496] Activity relative to SEQ ID NO: 3222 (Activity FIOP) was calculated as the percent product of the variant compared with the percent product observed by the reaction with SEQ ID NO: 3222 (where the percent product may be set as the average of replicates or else the highest single sample as appropriate). The results are shown in Table 49.2.

TABLE 49.2

| SEQ | | FIOP % product |
|---|---|---|
| ID NO: | Amino Acid Differences | Relative to SEQ |
| (nt/aa) | (Relative to SEQ ID NO: 3222) | ID NO: 3222 |
| 3599/3600 | E186D/E243S/R248K/E394Y/T484L/D485E | +++ |
| 3601/3602 | F194L/E515A/E520D | +++ |
| 3603/3604 | D198E/R248K/E394Y/S396T/T484L/D485E/L499M | +++ |
| 3605/3606 | E186D/G231S/A366V/K368R/E394Y/D485E | +++ |
| 3607/3608 | D198E/E394Y/S396T/T484L/D485E/L499M | +++ |
| 3609/3610 | R248K/E394Y/T484L | +++ |
| 3611/3612 | R248K/G365A/A366V/K368R/E394Y/T484L/E520D | +++ |
| 3613/3614 | G231S/K368R/E394Y | ++ |
| 3615/3616 | E186D/G231S/E243S/K368R/E394Y/D485E/L499M | ++ |
| 3617/3618 | E186D/F194L/R248K/S396T | ++ |
| 3619/3620 | E186D/E243S/R248K/A366V/K368R/E394Y | ++ |
| 3621/3622 | E186D/A366V/K368R/E394Y/S396T/T484L | ++ |
| 3623/3624 | E186D/E394Y/S396T/D485E | ++ |
| 3625/3626 | E394Y/S396T | ++ |
| 3627/3628 | E394Y/L499M | ++ |
| 3629/3630 | E186D/G365A/A366V/E394Y/D485E | ++ |
| 3631/3632 | E186D/A366V/K368R/E394Y/S396T/T484L/D485E | ++ |
| 3633/3634 | E243S/T484L | ++ |
| 3635/3636 | G365A/A366V/K368R/E394Y | + |
| 3637/3638 | E186D/R248K | + |
| 3639/3640 | G365A/K368R/E394Y/S396T/E520D | + |
| 3641/3642 | E186D/D198E/E243S/R248K/A366V/K368R/E394Y/K501R | + |
| 3643/3644 | D198E/E394Y/S396T/L499M/E515A/E520D | + |
| 3645/3646 | E243S/R248K/E394Y/S396T/T484L/D485E | + |
| 3647/3648 | F194L/D198E/E243S/A366V/K368R/L499M | + |
| 3649/3650 | G231S/G365A/K368R/E394Y/L499M/E520D | + |
| 3651/3652 | D198E/E394Y/L499M/K501R | + |
| 3653/3654 | E186D/G365A/A366V/K368R/E394Y/L499M | + |
| 3655/3656 | E186D/G365A | + |
| 3657/3658 | E243S/T484L/D485E/L499M | + |
| 3659/3660 | D198E/E243S/R248K/G365A/E394Y/K501R | + |
| 3661/3662 | E186D/E243S/T484L/E520D | + |
| 3663/3664 | E186D/E243S | + |
| 3665/3666 | D198E/G231S/E243S/R248K/D485E | + |
| 3667/3668 | E186D/G231S/R248K/D485E | + |
| 3669/3670 | G231S/T484L/D485E/L499M/K501R | + |

Levels of increased activity were determined relative to the reference polypeptide of SEQ ID NO: 3222 and defined as follows: “+” 1.00 to 1.20, “++” >1.20, “+++” >1.49.

### Example 50

### Improvements Over SEQ ID NO: 3670 in the Extension of Oligonucleotide Acceptor Molecules with Nucleotide Triphosphate Donors

### HTP Screening for Improved TdT Variants

[0497] SEQ ID NO: 3670 was selected as the parent TdT enzyme. Libraries of engineered genes were produced from the parent gene using various techniques (e.g., saturation mutagenesis and recombination of previously identified beneficial mutations). The polypeptides encoded by each gene were produced in HTP and prepared as described in Table 50.1.

[0498] Reactions were performed in 96-well format 200 μL BioRad PCR plates. Reactions included 10-100 μM oligonucleotide, 100-200 μM nucleotide triphosphate, 20 mM buffer, and 250 μM cobalt (II) chloride. The reactions were set up as follows: (i) all reaction components, except for TdT, were pre-mixed in a single solution and were aliquoted into each well of the 96-well plates (ii) TdT lysate solution was then added into the wells to initiate the reaction. The reaction plate was heat-sealed with a peelable aluminum seal and incubated in a thermocycler at the indicated temperature and reaction time, then held at 4° C. until the reaction was quenched. Reactions were quenched and processed for CE analysis as described in Example 4.

TABLE 50.1
Reaction conditions

Lysis buffer-TEA (50 mM, pH 7.5), 0.1 g/L lysozyme; Reaction buffer-20 mM TEA, 0.25 mM CoCl2,
pH 7.8; Lysate concentration (vol %)-0.25; Preincubation Temp (C.)-48° C.; Preincubation Time (min)-
60; Reaction temperature (C.)-48° C.; Reaction Time (min)-180; Reaction volume (μL)-1; NTP (μM)-
mATP-3′P; NTP conc (μM)-100; Oligonucleotide-5′-6-FAM-T17mGmUmC; Substrate conc (μM)-50;
Product -5′-6-FAM-T17mGmUmCmA-3′P.

[0499] Activity relative to SEQ ID NO: 3670 (Activity FIOP) was calculated as the percent product of the variant compared with the percent product observed by the reaction with SEQ ID NO: 3670 (where the percent product may be set as the average of replicates or else the highest single sample as appropriate). The results are shown in Table 50.2.

TABLE 50.2

| SEQ ID NO: | Amino Acid Differences | FIOP % product Relative |
|---|---|---|
| (nt/aa) | (Relative to SEQ ID NO: 3670) | to SEQ ID NO: 3670 |
| 3671/3672 | K274I/K416S | +++ |
| 3673/3674 | K416S | +++ |
| 3675/3676 | K274A/A408I/K416S | ++ |
| 3677/3678 | K274A/T299N/A408I/K416S | ++ |
| 3679/3680 | E288V/T299N/K416S | ++ |
| 3681/3682 | V273I | ++ |
| 3683/3684 | L298M/T299N/K416S | + |
| 3685/3686 | V273I/M499L | + |
| 3687/3688 | V273I/N493V/M499L | + |
| 3689/3690 | V273I/Y309M/N493V/M499L | + |
| 3691/3692 | Y309M | + |
| 3693/3694 | N493V/M499L | + |
| 3695/3696 | Y309M/M499L | + |

Levels of increased activity were determined relative to the reference polypeptide of SEQ ID NO: 3670 and defined as follows: “+” 1.07 to 1.39, “++” >1.39, “+++” >1.92.

### Example 51

### Improvements Over SEQ ID NO: 3670 in the Extension of Oligonucleotide Acceptor Molecules with Nucleotide Triphosphate Donors

### HTP Screening for Improved TdT Variants

[0500] SEQ ID NO: 3670 was selected as the parent TdT enzyme. Libraries of engineered genes were produced from the parent gene using various techniques (e.g., saturation mutagenesis and recombination of previously identified beneficial mutations). The polypeptides encoded by each gene were produced in HTP and prepared as described in Table 51.1.

[0501] Reactions were performed in 96-well format 200 μL BioRad PCR plates. Reactions included 10-100 μM oligonucleotide, 100-200 μM nucleotide triphosphate, 20 mM buffer, and 250 μM cobalt (II) chloride. The reactions were set up as follows: (i) all reaction components, except for TdT, were pre-mixed in a single solution and were aliquoted into each well of the 96-well plates (ii) TdT lysate solution was then added into the wells to initiate the reaction. The reaction plate was heat-sealed with a peelable aluminum seal and incubated in a thermocycler at the indicated temperature and reaction time, then held at 4° C. until the reaction was quenched. Reactions were quenched and processed for CE analysis as described in Example 4.

TABLE 51.1
Reaction conditions

Lysis buffer-TEA (50 mM, pH 7.5), 0.1 g/L lysozyme; Reaction buffer-20 mM TEA, 0.25 mM CoCl2,
pH 7.8; Lysate concentration (vol %)-0.25; Preincubation Temp (C.)-48° C.; Preincubation Time (min)-
60; Reaction temperature (C.)-48° C.; Reaction Time (min)-180; Reaction volume (μL)-1; NTP (μM)-
mATP-3′P; NTP conc (μM)-100; Oligonucleotide-5′-6-FAM-T12mAmUmA, 5′-6-FAM-
T17mAmUmC, 5′-6-FAM-T22mAmUmU, 5′-6-FAM-T27mAmUmG; Substrate conc (μM)-multiplex:
12.5 μM each of 4 oligo; Product -5′-6-FAM-T12mAmUmAmA-3′P, 5′-6-FAM-T17mAmUmCmA-
3′P, 5′-6-FAM-T22mAmUmUmA-3′P, 5′-6-FAM-T27mAmUmGmA-3′P.

[0502] Activity relative to SEQ ID NO: 3670 (Activity FIOP) was calculated as the percent product of the variant, defined as the sum of the area of products in the multiplexed assay divided by the sum of the total peak area, compared with the percent product observed by the reaction with SEQ ID NO: 3670 (where the percent product may be set as the average of replicates or else the highest single sample as appropriate). The results are shown in Table 51.2.

TABLE 51.2

| SEQ ID NO: | Amino Acid Differences | FIOP % product Relative |
|---|---|---|
| (nt/aa) | (Relative to SEQ ID NO: 3670) | to SEQ ID NO: 3670 |
| 3697/3698 | R473S | +++ |
| 3699/3700 | Y308V | +++ |
| 3701/3702 | Y308S | +++ |
| 3703/3704 | M301S | +++ |
| 3705/3706 | Y308A/I361T | +++ |
| 3707/3708 | Y308G | +++ |
| 3709/3710 | Y308A | +++ |
| 3711/3712 | M301G | ++ |
| 3713/3714 | L419G | ++ |
| 3715/3716 | R456T | ++ |
| 3717/3718 | A415L | ++ |
| 3719/3720 | R451K | ++ |
| 3721/3722 | Q397F | ++ |
| 3723/3724 | M301Q | ++ |
| 3725/3726 | A415W | ++ |
| 3727/3728 | R456P | ++ |
| 3729/3730 | R473A | ++ |
| 3731/3732 | S267R | ++ |
| 3733/3734 | S472A | + |
| 3735/3736 | A313M | + |
| 3737/3738 | N493R/M499L | + |
| 3739/3740 | L307G | + |
| 3741/3742 | L419M | + |
| 3743/3744 | L307A | + |
| 3745/3746 | F475V | + |
| 3747/3748 | V452L | + |
| 3749/3750 | Y308K | + |
| 3751/3752 | R392V | + |
| 3753/3754 | D372E | + |
| 3755/3756 | D198S | + |
| 3757/3758 | S267M | + |
| 3759/3760 | N528L | + |
| 3761/3762 | L307S | + |
| 3763/3764 | Q397W | + |
| 3765/3766 | Y308H | + |
| 3767/3768 | C168S | + |

Levels of increased activity were determined relative to the reference polypeptide of SEQ ID NO: 3670 and defined as follows: “+” 1.18 to 1.43, “++” >1.43, “+++” >2.07.

### Example 52

### Improvements Over SEQ ID NO: 3670 in the Extension of Oligonucleotide Acceptor Molecules with Nucleotide Triphosphate Donors

### HTP Screening for Improved TdT Variants

[0503] SEQ ID NO: 3670 was selected as the parent TdT enzyme. Libraries of engineered genes were produced from the parent gene using various techniques (e.g., saturation mutagenesis and recombination of previously identified beneficial mutations). The polypeptides encoded by each gene were produced in HTP and prepared as described in Table 52.1.

[0504] Reactions were performed in 96-well format 200 μL BioRad PCR plates. Reactions included 10-100 μM oligonucleotide, 100-200 μM nucleotide triphosphate, 20 mM buffer, and 250 μM cobalt (II) chloride. The reactions were set up as follows: (i) all reaction components, except for TdT, were pre-mixed in a single solution and were aliquoted into each well of the 96-well plates (ii) TdT lysate solution was then added into the wells to initiate the reaction. The reaction plate was heat-sealed with a peelable aluminum seal and incubated in a thermocycler at the indicated temperature and reaction time, then held at 4° C. until the reaction was quenched. Reactions were quenched and processed for CE analysis as described in Example 4.

TABLE 52.1
Reaction conditions

Lysis buffer-TEA (50 mM, pH 7.5), 0.1 g/L lysozyme; Reaction buffer-20 mM TEA, 0.25 mM CoCl2,
pH 7.8; Lysate concentration (vol %)-0.25; Preincubation Temp (C.)-68° C.; Preincubation Time (min)-
60; Reaction temperature (C.)-50° C.; Reaction Time (min)-60; Reaction volume (μL)-1; NTP (μM)-
mATP-3′P; NTP conc (μM)-100; Oligonucleotide-5′-6-FAM-T15AmU*mG; Substrate conc (μM)-50;
Product -5′-6-FAM-T15AmU*mGmA-3′P.

[0505] Activity relative to SEQ ID NO: 3670 (Activity FIOP) was calculated as the percent product of the variant compared with the percent product observed by the reaction with SEQ ID NO: 3670 (where the percent product may be set as the average of replicates or else the highest single sample as appropriate). The results are shown in Table 52.2.

TABLE 52.2

| SEQ ID NO: | Amino Acid Differences | FIOP % product Relative |
|---|---|---|
| (nt/aa) | (Relative to SEQ ID NO: 3670) | to SEQ ID NO: 3670 |
| 3697/3698 | R473S | +++ |
| 3769/3770 | R473A | ++ |
| 3771/3772 | N493V/M499L | ++ |
| 3773/3774 | Y308L | + |
| 3775/3776 | R473M | + |
| 3777/3778 | K303H/S396A | + |

Levels of increased activity were determined relative to the reference polypeptide of SEQ ID NO: 3670 and defined as follows: “+” 1.08 to 1.34, “++” >1.34, “+++” >1.78.

### Example 53

### Improvements Over SEQ ID NO: 3670 in the Extension of Oligonucleotide Acceptor Molecules with Nucleotide Triphosphate Donors

### HTP Screening for Improved TdT Variants

[0506] SEQ ID NO: 3670 was selected as the parent TdT enzyme. Libraries of engineered genes were produced from the parent gene using various techniques (e.g., saturation mutagenesis and recombination of previously identified beneficial mutations). The polypeptides encoded by each gene were produced in HTP and prepared as described in Table 53.1.

[0507] Reactions were performed in 96-well format 200 μL BioRad PCR plates. Reactions included 10-100 μM oligonucleotide, 100-200 μM nucleotide triphosphate, 20 mM buffer, and 250 μM cobalt (II) chloride. The reactions were set up as follows: (i) all reaction components, except for TdT, were pre-mixed in a single solution and were aliquoted into each well of the 96-well plates (ii) TdT lysate solution was then added into the wells to initiate the reaction. The reaction plate was heat-sealed with a peelable aluminum seal and incubated in a thermocycler at the indicated temperature and reaction time, then held at 4° C. until the reaction was quenched. Reactions were quenched and processed for CE analysis as described in Example 4.

TABLE 53.1
Reaction conditions

Lysis buffer-TEA (50 mM, pH 7.5), 0.1 g/L lysozyme; Reaction buffer-20 mM TEA, 0.25 mM CoCl2,
pH 7.8; Lysate concentration (vol %)-0.25; Preincubation Temp (C.)-48° C.; Preincubation Time (min)-
60; Reaction temperature (C.)-48° C.; Reaction Time (min)-180; Reaction volume (μL)-1; NTP (μM)-
mATP-3′P; NTP conc (μM)-100; Oligonucleotide-5′-6-FAM-T12mAmUmA, 5′-6-FAM-
T17mAmUmC, 5′-6-FAM-T22mAmUmU, 5′-6-FAM-T27mAmUmG; Substrate conc (μM)-multiplex:
12.5 μM each of 4 oligo; Product -5′-6-FAM-T12mAmUmAmA-3′P, 5′-6-FAM-T17mAmUmCmA-
3′P, 5′-6-FAM-T22mAmUmUmA-3′P, 5′-6-FAM-T27mAmUmGmA-3′P.

[0508] Activity relative to SEQ ID NO: 3670 (Activity FIOP) was calculated as the percent product of the variant, defined as the sum of the area of products in the multiplexed assay divided by the sum of the total peak area, compared with the percent product observed by the reaction with SEQ ID NO: 3670 (where the percent product may be set as the average of replicates or else the highest single sample as appropriate). The results are shown in Table 53.2.

TABLE 53.2

| SEQ ID NO: | Amino Acid Differences | FIOP % product Relative |
|---|---|---|
| (nt/aa) | (Relative to SEQ ID NO: 3670) | to SEQ ID NO: 3670 |
| 3671/3672 | K274I/K416S | +++ |
| 3675/3676 | K274A/A408I/K416S | +++ |
| 3673/3674 | K416S | +++ |
| 3677/3678 | K274A/T299N/A408I/K416S | +++ |
| 3679/3680 | E288V/T299N/K416S | ++ |
| 3687/3688 | V273I/N493V/M499L | ++ |
| 3681/3682 | V273I | ++ |
| 3689/3690 | V273I/Y309M/N493V/M499L | ++ |
| 3685/3686 | V273I/M499L | ++ |
| 3693/3694 | N493V/M499L | ++ |
| 3779/3780 | V273E/N493V | + |
| 3781/3782 | V273I/Y309M/A413S/M499L | + |
| 3783/3784 | A413S | + |
| 3785/3786 | Y309M/A413S | + |
| 3787/3788 | R281K/A413S/M499L | + |
| 3691/3692 | Y309M | + |
| 3683/3684 | L298M/T299N/K416S | + |
| 3789/3790 | A413S/N493V/M499L | + |
| 3791/3792 | A413S/M499L | + |
| 3793/3794 | V273S/Y309M/A413S/M499L | + |

Levels of increased activity were determined relative to the reference polypeptide of SEQ ID NO: 3670 and defined as follows: “+” 1.05 to 1.18, “++” >1.18, “+++” >1.35.

### Example 54

### Improvements Over SEQ ID NO: 3674 in the Extension of Oligonucleotide Acceptor Molecules with Nucleotide Triphosphate Donors

### HTP Screening for Improved TdT Variants

[0509] SEQ ID NO: 3674 was selected as the parent TdT enzyme. Libraries of engineered genes were produced from the parent gene using various techniques (e.g., saturation mutagenesis and recombination of previously identified beneficial mutations). The polypeptides encoded by each gene were produced in HTP and prepared as described in Table 54.1.

[0510] Reactions were performed in 96-well format 200 μL BioRad PCR plates. Reactions included 10-100 μM oligonucleotide, 100-200 μM nucleotide triphosphate, 20 mM buffer, and 250 μM cobalt (II) chloride. The reactions were set up as follows: (i) all reaction components, except for TdT, were pre-mixed in a single solution and were aliquoted into each well of the 96-well plates (ii) TdT lysate solution was then added into the wells to initiate the reaction. The reaction plate was heat-sealed with a peelable aluminum seal and incubated in a thermocycler at the indicated temperature and reaction time, then held at 4° C. until the reaction was quenched. Reactions were quenched and processed for CE analysis as described in Example 4.

TABLE 54.1
Reaction conditions

Lysis buffer-TEA (50 mM, pH 7.5), 0.1 g/L lysozyme; Reaction buffer-20 mM TEA, 0.25 mM CoCl2,
pH 7.8; Lysate concentration (vol %)-0.25; Preincubation Temp (C.)-48° C.; Preincubation Time (min)-
60; Reaction temperature (C.)-48° C.; Reaction Time (min)-180; Reaction volume (μL)-1; NTP (μM)-
mATP-3′P; NTP conc (μM)-100; Oligonucleotide-5′-6-FAM-T12mAmUmA, 5′-6-FAM-
T17mAmUmC, 5′-6-FAM-T22mAmUmU, 5′-6-FAM-T27mAmUmG ; Substrate conc (μM)-multiplex:
12.5 μM each of 4 oligo; Product -5′-6-FAM-T12mAmUmAmA-3′P, 5′-6-FAM-T17mAmUmCmA-
3′P, 5′-6-FAM-T22mAmUmUmA-3′P, 5′-6-FAM-T27mAmUmGmA-3′P.

[0511] Activity relative to SEQ ID NO: 3674 (Activity FIOP) was calculated as the percent product of the variant, defined as the sum of the area of products in the multiplexed assay divided by the sum of the total peak area, compared with the percent product observed by the reaction with SEQ ID NO: 3674 (where the percent product may be set as the average of replicates or else the highest single sample as appropriate). The results are shown in Table 54.2.

TABLE 54.2

| SEQ | | FIOP % product |
|---|---|---|
| ID NO: | Amino Acid Differences | Relative to SEQ |
| (nt/aa) | (Relative to SEQ ID NO: 3674) | ID NO: 3674 |
| 3795/3796 | F194L/R196G/Y390C | +++ |
| 3797/3798 | Y390C/E394F/R480K | +++ |
| 3799/3800 | R196G/Y390C/E394F | +++ |
| 3801/3802 | F194L/R196G/Y390C/R480K | +++ |
| 3803/3804 | F194L/R196G/Y390C/E394F/R480K | +++ |
| 3805/3806 | F194L/R196G/Y390C/L454M/R480K | +++ |
| 3807/3808 | Y390C/E394F | ++ |
| 3809/3810 | R196G/Y390C/E394F/R480K | ++ |
| 3811/3812 | F194L/Y390C | ++ |
| 3813/3814 | F194L/R196G/Y390C/E394F/G460V/ | ++ |
| | R480K | |
| 3815/3816 | R196G/Y390C/E394F/L454M/R480K | ++ |
| 3817/3818 | R196G/Y390C | ++ |
| 3819/3820 | Y390C | ++ |
| 3821/3822 | Y390C/E394F/L454M/R480K | ++ |
| 3823/3824 | R196G/Y390C/E394F/L454M | ++ |
| 3825/3826 | Y390C/E394F/L454M | ++ |
| 3827/3828 | Y390C/R480K | ++ |
| 3829/3830 | Y390C/L454M | + |
| 3831/3832 | R196G/Y390C/L454M | + |
| 3833/3834 | R196G/E394F | + |
| 3835/3836 | K297R/R473G/N493V | + |
| 3837/3838 | F194L/E394F | + |
| 3839/3840 | R196G/E394F/R480K | + |
| 3841/3842 | E394F/R480K | + |
| 3843/3844 | E394F | + |
| 3845/3846 | F194L/R196G/L454M | + |
| 3847/3848 | F194L/E394F/L454M/R480K | + |
| 3849/3850 | K297R/T470S/R473G | + |
| 3851/3852 | F194L/R196G/E394F/L454M/R480K | + |
| 3853/3854 | R196G/E394F/L454M/R480K | + |
| 3855/3856 | R196G/E394F/L454M | + |
| 3857/3858 | F194L/E394F/L454M | + |
| 3859/3860 | R196G/L454M | + |
| 3861/3862 | R196G | + |
| 3863/3864 | L454M | + |

Levels of increased activity were determined relative to the reference polypeptide of SEQ ID NO: 3674 and defined as follows: “+” 1.22 to 2.98, “++” >2.98, “+++” >3.79.

### Example 55

### Improvements Over SEQ ID NO: 3796 in the Extension of Oligonucleotide Acceptor Molecules with Nucleotide Triphosphate Donors

### HTP Screening for Improved TdT Variants

[0512] SEQ ID NO: 3796 was selected as the parent TdT enzyme. Libraries of engineered genes were produced from the parent gene using various techniques (e.g., saturation mutagenesis and recombination of previously identified beneficial mutations). The polypeptides encoded by each gene were produced in HTP and prepared as described in Table 55.1.

[0513] Reactions were performed in 96-well format 200 μL BioRad PCR plates. Reactions included 10-100 μM oligonucleotide, 100-200 μM nucleotide triphosphate, 20 mM buffer, and 250 μM cobalt (II) chloride. The reactions were set up as follows: (i) all reaction components, except for TdT, were pre-mixed in a single solution and were aliquoted into each well of the 96-well plates (ii) TdT lysate solution was then added into the wells to initiate the reaction. The reaction plate was heat-sealed with a peelable aluminum seal and incubated in a thermocycler at the indicated temperature and reaction time, then held at 4° C. until the reaction was quenched. Reactions were quenched and processed for CE analysis as described in Example 4.

TABLE 55.1
Reaction conditions

Lysis buffer-TEA (50 mM, pH 7.5), 0.1 g/L lysozyme; Reaction buffer-20 mM TEA, 0.25 mM CoCl2,
pH 7.8; Lysate concentration (vol %)-0.25; Preincubation Temp (C.)-48° C.; Preincubation Time (min)-
60; Reaction temperature (C.)-48° C.; Reaction Time (min)-180; Reaction volume (μL)-1; NTP (μM)-
mATP-3′P; NTP conc (μM)-200; Oligonucleotide-5′-6-FAM-T12mAmUmA, 5′-6-FAM-
T17mAmUmC, 5′-6-FAM-T22mAmUmU, 5′-6-FAM-T27mAmUmG, 5′-6-FAM-T57mUmUmC, 5′-6-
FAM-T32mAmCmC, 5′-6-FAM-T37mAmGmC, 5′-6-FAM-T42mAmAmC, 5′-6-FAM-T47mGmUmC,
5′-6-FAM-T52mCmUmC; Substrate conc (μM)-multiplex: 10 μM each of 10 oligo; Product -5′-6-
FAM-T12mAmUmAmA-3′P, 5′-6-FAM-T17mAmUmCmA-3′P, 5′-6-FAM-T22mAmUmUmA-3′P, 5′-
6-FAM-T27mAmUmGmA-3′P, 5′-6-FAM-T57mUmUmCmA-3′P, 5′-6-FAM-T32mAmCmCmA-3′P,
5′-6-FAM-T37mAmGmCmA-3′P, 5′-6-FAM-T42mAmAmCmA-3′P, 5′-6-FAM-T47mGmUmCmA-
3′P, 5′-6-FAM-T52mCmUmCmA-3′P.

[0514] Activity relative to SEQ ID NO: 3796 (Activity FIOP) was calculated as the percent product of the variant, defined as the sum of the area of products in the multiplexed assay divided by the sum of the total peak area, compared with the percent product observed by the reaction with SEQ ID NO: 3796 (where the percent product may be set as the average of replicates or else the highest single sample as appropriate). The results are shown in Table 55.2.

TABLE 55.2

| SEQ | | FIOP % product |
|---|---|---|
| ID NO: | Amino Acid Differences | Relative to SEQ |
| (nt/aa) | (Relative to SEQ ID NO: 3796) | ID NO: 3796 |
| 3865/3866 | D198P/R451K/N493V | +++ |
| 3867/3868 | D198P/S267Q/R314A/R451K | +++ |
| 3869/3870 | S267R/R451K | +++ |
| 3871/3872 | R451K | +++ |
| 3873/3874 | D198P/S267Q/D409L/R451K | +++ |
| 3875/3876 | R451K/H494V | ++ |
| 3877/3878 | V328T/R451K | ++ |
| 3879/3880 | R314A/R451K | ++ |
| 3881/3882 | S267R/R314A/V328T/R451K/H494R/ | ++ |
| | M499L | |
| 3883/3884 | D198P | ++ |
| 3885/3886 | R451K/N493V/M499L | ++ |
| 3887/3888 | S267Q/R451K/H494V/M499L | ++ |
| 3889/3890 | R314A/V328T/R451K/M499L | ++ |
| 3891/3892 | I208V/Y308V | + |
| 3893/3894 | V328T/D409L/R451K | + |
| 3895/3896 | D198P/S267Q/R314A/F475V | + |
| 3897/3898 | D198P/S267R/A313L/R451K/F475V/ | + |
| | H494V/M499L | |
| 3899/3900 | S267R | + |
| 3901/3902 | D198P/S267Q/F475V | + |
| 3903/3904 | D409L | + |
| 3905/3906 | I208V/Y308A/S461N | + |
| 3907/3908 | Y308A | + |
| 3909/3910 | F475V | + |
| 3911/3912 | R451K/N493V/H494V | + |
| 3913/3914 | D409L/F475V/H494V | + |
| 3915/3916 | Y308V | + |

Levels of increased activity were determined relative to the reference polypeptide of SEQ ID NO: 3796 and defined as follows: “+” 1.12 to 1.33, “++” >1.33, “+++” >1.62.

### Example 56 Activity Improvement Over SEQ ID NO: 3870

[0515] Activity Improvement of Shake-Flask Purified TdT Variants with 3′Phosphate-Blocked Nucleotides and Modified RNA Oligonucleotide Substrates.

[0516] TdT variants of SEQ ID NO: 3870, 3918, and 3920 were produced in shake flask and purified as described in Example 3.

[0517] Reactions were performed in 96-well format 200 μL BioRad PCR plates. Reactions included 250 μM oligonucleotide, 300 μM nucleotide triphosphate, 4 μM TdT, 5 μM IPP, 20 mM triethanolamine (pH 7.8), and 250 μM cobalt (II) chloride. The reactions were set up as follows: (i) all reaction components, except for TdT, were pre-mixed in a single solution and were aliquoted into each well of the 96-well plates (ii) TdT solution was then added into the wells to initiate the reaction. The reaction plate was heat-sealed with a peelable aluminum seal and incubated in a thermocycler at the indicated temperature and reaction time, then held at 4° C. until the reaction was quenched. Reactions were quenched and processed for CE analysis as described in Example 4.

TABLE 56.1
Reaction conditions

Reaction buffer-20 mM TEA, 0.25 mM CoCl₂, pH 7.8; IPP SEQ ID NO: 3942 (μM)- 0.5;
Preincubation Temp (C.) - none; Preincubation Time (min)- none; Reaction temperature (C.)- 50° C.;
Reaction Time (min)- 120; Reaction volume (μL)- 1; TdT concentration (μM)- 4; NTP- mATP; NTP
conc (μM)-300; Oligonucleotide-10x multiplex [5′-6-FAM-T12mAmUmA, 5′-6-FAM-T17mAmUmC,
5′-6-FAM-T22mAmUmU, 5′-6-FAM-T27mAmUmG, 5′-6-FAM-T57mUmUmC, 5′-6-FAM-
T32mAmCmC, 5′-6-FAM-T37mAmGmC, 5′-6-FAM-T42mAmAmC, 5′-6-FAM-T47mGmUmC, 5′-6-
FAM-T52mCmUmC], 5′-6-FAM-T15mAmU(2′dF)G, 5′-6-FAM-T15mAmG(MOE)C; Oligonucleotide
conc (μM)-250 or 25 each oligo for 10x multiplex; Product- 10x multiplex [5′-6-FAM-
T12mAmUmAmA-3′P, 5′-6-FAM-T17mAmUmCmA-3′P, 5′-6-FAM-T22mAmUmUmA-3′P, 5′-6-
FAM-T27mAmUmGmA-3′P, 5′-6-FAM-T57mUmUmCmA-3′P, 5′-6-FAM-T32mAmCmCmA-3′P, 5′-
6-FAM-T37mAmGmCmA-3′P, 5′-6-FAM-T42mAmAmCmA-3′P], 5′-6-FAM-T15mAmU(2′dF)GmA-
3′P, 5′-6-FAM-T15mAmG(MOE)CmA-3′P.

[0518] Activity relative to SEQ ID NO: 3870 (Activity FIOP) was calculated as the percent product of the variant, defined as the sum of the area of products in the multiplexed assay divided by the sum of the total peak area, compared with the percent product observed by the reaction with SEQ ID NO: 3870. The results are shown in Tables 56.2, 56.3, and 56.4.

TABLE 56.2
Products- 10x multiplex [5′-6-FAM-T12mAmUmAmA-
3′P, 5′-6-FAM-T17mAmUmCmA-3′P, 5′-6-
FAM-T22mAmUmUmA-3′P, 5′-6-FAM-T27mAmUmGmA-
3′P, 5′-6-FAM-T57mUmUmCmA-3′P, 5′-6-
FAM-T32mAmCmCmA-3′P, 5′-6-FAM-T37mAmGmCmA-
3′P, 5′-6-FAM-T42mAmAmCmA-3′P]

| SEQ ID NO: | Amino Acid Differences | FIOP % product Relative |
|---|---|---|
| (nt/aa) | (Relative to SEQ ID NO: 3870) | to SEQ ID NO: 3870 |
| 3917/3918 | M301W | + |

Levels of increased activity were determined relative to the reference polypeptide of SEQ ID NO: 3870 and defined as follows: “+” from 3.25 to 4.37.

TABLE 56.3
Product 5′-6-FAM-T15mAmU(2′dF)GmA-3′P

| SEQ ID NO: | Amino Acid Differences | FIOP % product Relative |
|---|---|---|
| (nt/aa) | (Relative to SEQ ID NO: 3870) | to SEQ ID NO: 3870 |
| 3917/3918 | M301W | + |

Levels of increased activity were determined relative to the reference polypeptide of SEQ ID NO: 3870 and defined as follows: “+” from 3.25 to 4.37.

TABLE 56.4
Product 5′-6-FAM-T15mAmG(MOE)CmA-3′P

| SEQ ID NO: | Amino Acid Differences | FIOP % product Relative |
|---|---|---|
| (nt/aa) | (Relative to SEQ ID NO: 3870) | to SEQ ID NO: 3870 |
| 3917/3918 | M301W | + |
| 3919/3920 | M301G | + |

Levels of increased activity were determined relative to the reference polypeptide of SEQ ID NO: 3870 and defined as follows: “+” from 3.25 to 4.37.

### Example 57

### Gene Acquisition and Expression of Wild-Type Alkaline Phosphatases

[0519] Synthetic genes encoding an N-terminal 6-histidine tagged version of multiple wild-type (WT) alkaline phosphatases were cloned into the pCK1 10900 vector system (See e.g., U.S. Pat. No. 9,714,437, which is hereby incorporated by reference in its entirety) and subsequently expressed in an E. coli strain derived from W3110.

[0520] Cells transformed with the alkaline phosphatase expression constructs were grown at shake-flask scale using IPTG induction as described in Example 3. Cells were then lysed, purified, and dialyzed into storage buffer (20 mM Tris-HCl, pH 7.4, 100 mM KCl, 0.1 mM EDTA, and 50% glycerol). After overnight dialysis, protein samples were removed, and enzyme concentrations were measured by absorption at 280 nm using a NanoDrop™ 1000 spectrophotometer. Soluble protein concentrations are summarized in Table 57.1 below, showing a fold improvement in soluble protein production following shake-flask purification relative to the alkaline phosphatase from Thermotoga neapolitana (SEQ ID NO: 3930).

TABLE 57.1
Soluble Enzyme Production of Variants
Relative to SEQ ID NO: 3922

| SEQ | | FIOP Soluble Enzyme |
|---|---|---|
| ID NO: | Source organism of | Production (Relative |
| (nt/aa) | AP gene sequence | to SEQ ID NO: 3930) |
| 3923/3924 | Pyrococcus furiosus | + |
| 3921/3922 | Thermotoga maritima | + |
| 3925/3926 | Thermotoga sp. 50_64 | ++ |
| 3927/3928 | Pseudothermotoga lettingae | + |
| 3929/3930 | Thermotoga neapolitana | + |
| 3931/3932 | Thermoflexibacter ruber | +++ |
| 3933/3934 | Bacillus licheniformis | ++ |

Levels of increased soluble enzyme production were relative to the reference polypeptide of SEQ ID NO: 3930 and defined as follows: “+” 1.00 to 1.30, “++” >1.30, “+++” >1.80.

### Example 58

### Gene Acquisition and Expression of Wild-Type Inorganic Pyrophosphatases

[0521] Synthetic genes encoding a C-terminal 6-histidine tagged version of multiple wild-type (WT) inorganic pyrophosphatase enzymes were cloned into the pCK110900 vector system (See e.g., U.S. Pat. No. 9,714,437, which is hereby incorporated by reference in its entirety) and subsequently expressed in an E. coli strain derived from W3110.

[0522] Cells transformed with the inorganic pyrophosphatase expression constructs were grown at shake-flask scale using IPTG induction as described in Example 3. Cells were then lysed, purified, and dialyzed into storage buffer (20 mM Tris-HCl, pH 7.4, 100 mM KCl, 0.1 mM EDTA, and 50% glycerol). After overnight dialysis, protein samples were removed, and enzyme concentrations were measured by absorption at 280 nm using a NanoDrop™ 1000 spectrophotometer. Soluble protein concentrations are summarized in Table 58.1 below, showing a fold improvement in soluble protein production following shake-flask purification relative to the inorganic pyrophosphatase from Thermocrinis ruber (SEQ ID NO: 3936).

TABLE 58.1
Soluble Enzyme Production of Variants
Relative to SEQ ID NO: 3936

| SEQ | | FIOP Soluble Enzyme |
|---|---|---|
| ID NO: | Source organism of | Production (Relative |
| (nt/aa) | IPP gene sequence | to SEQ ID NO: 3936) |
| 3935/3936 | Thermocrinis ruber | + |
| 3937/3938 | Aquifex pyrophilus | + |
| 3939/3940 | Thermus oshimai | + |
| 3941/3942 | Sulfolobus sp. A20 | +++ |
| 3943/3944 | Geobacillus zalihae | ++ |
| 3945/3946 | Bacillus thermozeamaize | ++ |
| 3947/3948 | Bacillus smithii | + |

Levels of increased soluble enzyme production were determined relative to the reference polypeptide of SEQ ID NO: 3936 and defined as follows: “+” 1.00 to 4.80, “++” >4.80, “+++” >6.10.

### Example 59

### 3′Phosphate Deblocking Activity of Shake-Flask Purified Wild-Type Alkaline Phosphatases

[0523] Wild-type (WT) alkaline phosphatases (APs) SEQ ID NO: 3924, 3922, 3926, 3928, 3930, 3932, and 3934 (as described in Example 56) were assayed for 3′dephosphorylation activity of oligonucleotide 5′-6-FAM-T15mGmAmC-3′P.

[0524] Reactions were performed in 96-well format 200 μL BioRad PCR plates. Reactions included 25 μM 3′blocked oligonucleotide, 1.2 μM AP, 20 mM triethanolamine (pH 7.8), and 250 μM cobalt (II) chloride. The reactions were set up as follows: (i) all reaction components, except for AP, were pre-mixed in a single solution and were aliquoted into each well of the 96-well plates (ii) AP solution was then added into the wells to initiate the reaction. The reaction plate was heat-sealed with a peelable aluminum seal and incubated in a thermocycler at the indicated temperature and reaction time, then held at 4° C. until the reaction was quenched. Reactions were quenched and processed for CE analysis as described in Example 4.

TABLE 59.1
Reaction conditions

Reaction buffer-20 mM TEA, 0.25 mM CoCl₂, pH 7.8; Preincubation Temp (C.) - none; Preincubation
Time (min)- none; Reaction temperature (C.)- 37° C.; Reaction Time (min)- 60; Reaction volume (μL)-
1; AP concentration (μM)- 1.2; Oligonucleotide-5′-6-FAM-T15mGmAmC-3′P; Oligonucleotide conc
(μM)- 25; Product- 5′-6-FAM-T15mGmAmC.

[0525] Percent dephosphorylation was calculated as the product peak area divided by the sum of the total peak area of the electropherogram. The results are shown in Table 59.2.

TABLE 59.2
Dephosphorylation activity of alkaline phosphatases
with a 3′phosphorylated oligonucleotide

| SEQ ID NO: | Conversion to de-phosphorylated |
|---|---|
| (nt/aa) | oligonucleotide |
| 3923/3924 | + |
| 3921/3922 | + |
| 3925/3926 | + |
| 3927/3928 | ++ |
| 3929/3930 | +++ |
| 3931/3932 | ++ |
| 3933/3934 | + |

Percent dephosphorylation is defined as follows: “+” 97.11 to 98.29, “++” >98.29, +++” >98.39.

### Example 60

[0526] Suppression of by-Products Arising from TdT Reactions by Shake-Flask Purified Wild-Type Inorganic Pyrophosphatases.

[0527] Wild-type (WT) inorganic pyrophosphatases SEQ ID NO: 3936, 3938, 3940, 3942, 3944, 3946, and 3948 (as described in Example 59) were assayed for suppression of by-products generated in a reaction containing TdT SEQ ID NO: 3674.

[0528] Reactions were performed in 96-well format 200 μL BioRad PCR plates. Reactions included 80 μM oligonucleotide, 100 μM 3′phosphate blocked NTP, 10 μM TdT, 0.5 μM IPP, 20 mM triethanolamine (pH 7.8), and 250 μM cobalt (II) chloride. The reactions were set up as follows: (i) all reaction components, except for IPP, were pre-mixed in a single solution and were aliquoted into each well of the 96-well plates (ii) IPP solution was then added into the wells to initiate the reaction. The reaction plate was heat-sealed with a peelable aluminum seal and incubated in a thermocycler at the indicated temperature and reaction time, then held at 4° C. until the reaction was quenched. Reactions were quenched and processed for CE analysis as described in Example 4.

TABLE 60.1
Reaction conditions

Reaction buffer-20 mM TEA, 0.25 mM CoCl₂, pH 7.8; Preincubation Temp (C.) - none; Preincubation
Time (min)- none; Reaction temperature (C.)- 50° C.; Reaction Time (min)- 120; Reaction volume (μL) −1;
IPP concentration (μM)- 0.5; TdT concentration (μM)- 10; NTP (μM)-3′P-mATP; NTP conc (μM)-
100; Oligonucleotide-5′-6-FAM-T15mGmAmC 5′-6-FAM-T15mGmAmC-3′P; Oligonucleotide conc
(μM)- 80; Product- 5′-6-FAM-T15mGmAmC-3′P; By-Product-unknown.

[0529] The relative suppression of by-products relative to a control without IPP was calculated as the percent by-product of the variant compared with the percent by-product observed by the control reaction with no IPP present. The results are shown in Table 60.2.

TABLE 60.2
Suppression of TdT reaction by-products by IPP

| SEQ ID NO: | |
|---|---|
| (nt/aa) | Relative suppression of by-products |
| 3935/3936 | + |
| 3937/3938 | ++ |
| 3939/3940 | +++ |
| 3941/3942 | + |
| 3943/3944 | ++ |
| 3945/3946 | + |
| 3947/3948 | + |

Levels of suppression of by-products are defined as follows: “+” 4.01 to 4.32, “++” >4.32, “+++” >4.41.

### Example 61 Activity Improvement Over SEQ ID NO: 660

[0530] Activity Improvement of Shake-Flask Purified TdT Variants with 3′Phosphate-Blocked Nucleotides and Modified RNA Oligonucleotide Substrates.

[0531] TdT variants of SEQ ID NO: 660, 1654, 2254, 2812, 3674 and 3674 were produced in shake flask and purified as described in Example 3.

[0532] Reactions were performed in 96-well format 200 μL BioRad PCR plates. Reactions included 25 μM oligonucleotide, 200 μM nucleotide triphosphate, 10 μM TdT, 0.5 μM IPP, 20 mM triethanolamine (pH 7.8), and 250 μM cobalt (II) chloride. The reactions were set up as follows: (i) all reaction components, except for TdT, were pre-mixed in a single solution and were aliquoted into each well of the 96-well plates (ii) TdT solution was then added into the wells to initiate the reaction. The reaction plate was heat-sealed with a peelable aluminum seal and incubated in a thermocycler at the indicated temperature and reaction time, then held at 4° C. until the reaction was quenched. Reactions were quenched and processed for CE analysis as described in Example 4.

TABLE 61.1
Reaction conditions

Reaction buffer-20 mM TEA, 0.25 mM CoCl₂, pH 7.8; IPP SEQ ID NO: 3944 (μM)- 0.5;
Preincubation Temp (C.) - none; Preincubation Time (min)- none; Reaction temperature (C.)- 40° C.;
Reaction Time (min)- 999 min; Reaction volume (μL) −1; TdT concentration (μM)- 10; NTP- 3′P-mA,
3′P-(2′dF)A, 3′P-(2′dF)U, 3′P-mC, 3′P-mG, 3′P-mU; NTP conc (μM)-200; Oligonucleotide- 5′-6-FAM-
T15AT*mG, 5′-6-FAM-T22*(2′dF)A(2′dF)GmA, 5′-6-FAM-T15AmU*mG, 5′-6-FAM-
T22(2′dF)C(2′dF)G(2′dF)A, 5′-6-FAM-T27(2′dF)GmA(2′dF)U, 5′-6-FAM-T15mGmAmC, 5′-6-FAM-
T11mCmGmA, 5′-6-FAM-T15mUmGmA, 5′-6-FAM-T11mC*mA*mG, 5′-6-FAM-T15mAmU*mG,
5′-6-FAM-T15mA(2′dF)UmC, 5′-6-FAM-T15mCmUmG, 5′-6-FAM-T27(2′dF)C*(2′dF)G*(2′dF)A, 5′-
6-FAM-T11mU*(2′dF)A*(2′dF)A, 5′-6-FAM-T17mAmUmC, 5′-6-FAM-T48mG*mA*mC, 5′-6-
FAM-T15mAmCmU, 5′-6-FAM-T15mAmG(MOE)C, 5′-6-FAM-T17*(2′dF)A*(2′dF)A(2′dF)G, 5′-6-
FAM-T15mAmU(2′dF)G, 5′-6-FAM-T15mAmU(2′dF)U, 5′-6-FAM-T15mAmU(2′dF)C;
Oligonucleotide conc (μM)-25; Product- 5′-6-FAM-T15AT*mGmA-3′P, 5′-6-FAM-
T22*(2′dF)A(2′dF)GmA(2′dF)A-3′P, 5′-6-FAM-T15AmU*mGmA-3′P, 5′-6-FAM-
T22(2′dF)C(2′dF)G(2′dF)A(2′dF)A-3′P, 5′-6-FAM-T27(2′dF)GmA(2′dF)U(2′dF)A-3′P, 5′-6-FAM-
T15mGmAmC(2′dF)A-3′P, 5′-6-FAM-T11mCmGmA(2′dF)A-3′P, 5′-6-FAM-T15mUmGmAmA-3′P,
5′-6-FAM-T11mC*mA*mG(2′dF)A-3′P, 5′-6-FAM-T15mAmU*mGmA-3′P, 5′-6-FAM-
T11mC*mA*mGmA-3′P, 5′-6-FAM-T15mA(2′dF)UmCmA-3′P, 5′-6-FAM-T15mCmUmGmA-3′P, 5′-
6-FAM-T27(2′dF)C*(2′dF)G*(2′dF)A(2′dF)A-3′P, 5′-6-FAM-T11mU*(2′dF)A*(2′dF)A(2′dF)A-3′P,
5′-6-FAM-T17mAmUmCmA-3′P, 5′-6-FAM-T15mGmAmC(2′dF)U-3′P, 5′-6-FAM-
T48mG*mA*mCmA-3′P, 5′-6-FAM-T15mAmCmU(2′dF)A-3′P, 5′-6-FAM-T15mGmAmCmA-3′P, 5′-
6-FAM-T15mAmCmU(2′dF)U-3′P, 5′-6-FAM-T15mAmCmUmC-3′P, 5′-6-FAM-T15mAmCmUmG-
3′P, 5′-6-FAM-T15mAmCmUmA-3′P, 5′-6-FAM-T15mAmG(MOE)CmA-3′P, 5′-6-FAM-
T17*(2′dF)A*(2′dF)A(2′dF)G(2′dF)A-3′P, 5′-6-FAM-T15mGmAmCmC-3′P, 5′-6-FAM-
T15mAmU(2′dF)GmA-3′P, 5′-6-FAM-T15mAmU(2′dF)UmA-3′P, 5′-6-FAM-T15mGmAmCmG-3′P,
5′-6-FAM-T15mAmCmU*mU-3′P, 5′-6-FAM-T15mGmAmC*mU-3′P, 5′-6-FAM-
T15mGmAmC*mG-3′P, 5′-6-FAM-T15mAmCmU*mG-3′P, 5′-6-FAM-T15mAmU(2′dF)CmA-3′P.

[0533] SEQ ID NO: 660, 1654, 2254, 2812, 3674 and 3674, shown in Table 61.2, were evaluated in the experiments described in Tables 61.3-61.5.

TABLE 61.2
Sequences of variants used in tables 61.3-61.6

| SEQ ID | |
|---|---|
| NO: | Amino Acid Differences |
| (nt/aa) | (Relative to SEQ ID NO: 660) |
| 1653/1654 | G92R/D94E/T101E/T108K/M137A/V141E/I155E/C201A/C213S/L264R/D314R/W333A/ |
| | T344V/D392R/R394E/E395W/R397Q/R406G/1408A/H425D/S442G/S446P/R461G/E476R/ |
| | R481W/H485D/S525F |
| 2253/2254 | G92R/D94E/T101E/T108K/M137A/V141E/1155E/T160M/I163V/Q165P/C201A/T203E/ |
| | M205R/C213S/V219R/R258W/K263H/L264R/D314R/W333A/T344V/F353Q/D392R/R394E/ |
| | E395W/R397Q/R406G/1408A/L411G/H413A/F414G/H425D/E441M/S442G/S446P/D460G/ |
| | R461G/G468Q/E476R/R481W/H485D/K488N/S525F |
| 2811/2812 | R26Q/I38T/S79T/S81E/N90L/G92R/D94E/T101E/T108K/M137A/V141E/I155E/T160M/ |
| | I163V/Q165P/A189R/C201A/T203E/M205R/C213S/V219R/E246N/L248R/R258W/K263H/ |
| | L264R/A304V/C307L/D314R/K318R/W333A/L340I/T344V/F353Q/T362S/D392R/R394E/ |
| | E395W/S396T/R397Q/F398W/K402G/L403S/R406G/1408A/A410E/L411G/H413A/F414G/ |
| | H425D/E441M/S442G/S446P/V455L/D460G/R461G/L466M/G468Q/E476R/R481W/H485D/ |
| | K488N/K506P/S525F |
| 3673/3674 | R26Q/M30G/I38T/S79T/S81E/N90L/G92R/D94E/T101E/T108K/M137A/G140V/V141E/ |
| | M142V/E153V/I155E/T160M/I163V/Q165P/H177R/A184S/A189R/C201A/T203E/M205R/ |
| | C213S/V219R/G231S/L248R/R258W/K263H/L264A/K266T/A304V/C307L/D314R/K318R/ |
| | S325W/W333A/L340I/T344V/F353Q/T362S/T379M/D392R/R394E/E395W/R397Q/F398W/ |
| | K402G/L403S/R406G/I408A/A410E/L411G/H413A/F414E/K416S/H425D/K427L/D429R/ |
| | W433R/E434N/E441M/S442G/A444S/S446P/V455L/D460G/R461S/L466M/G468Q/E476R/ |
| | R481W/T484L/H485E/K488N/A495S/L499M/K501R/K502G/K506P/A515E/S525F |
| 3917/3918 | R26Q/M30G/I38T/S79T/S81E/N90L/G92R/D94E/T101E/T108K/M137A/G140V/V141E/ |
| | M142V/E153V/I155E/T160M/I163V/Q165P/H177R/A184S/A189R/F194L/R196G/C201A/ |
| | T203E/M205R/C213S/V219R/G231S/L248R/R258W/K263H/L264A/K266T/S267R/M301W/ |
| | A304V/C307L/D314R/K318R/S325W/W333A/L340I/T344V/F353Q/T362S/T379M/Y390C/ |
| | D392R/R394E/E395W/R397Q/F398W/K402G/L403S/R406G/1408A/A410E/L411G/H413A/ |
| | F414E/K416S/H425D/K427L/D429R/W433R/E434N/E441M/S442G/A444S/S446P/R451K/ |
| | V455L/D460G/R461S/L466M/G468Q/E476R/R481W/T484L/H485E/K488N/A495S/L499M/ |
| | K501R/K502G/K506P/A515E/S525F |

[0534] Activity relative to SEQ ID NO: 660 (Activity FIOP) was calculated as the percent product of the variant compared with the percent product observed by the reaction with SEQ ID NO: 660. The results are shown in Table 61.3.

TABLE 61.3
Product 5′-6-FAM-T15AT*mGmA-3′P

| SEQ ID NO: | FIOP Product % conversion Relative |
|---|---|
| (nt/aa) | to SEQ ID NO: 660 |
| 1653/1654 | + |
| 2253/2254 | ++ |
| 2811/2812 | +++ |
| 3673/3674 | + |
| 3917/3918 | ++ |

Levels of increased activity were determined relative to the reference polypeptide of SEQ ID NO: 660 and defined as follows: “+” 1.00 to 12.00, “++” >12.00, “+++” >19.00.

[0535] Activity relative to SEQ ID NO: 1654 (Activity FIOP) was calculated as the percent product of the variant compared with the percent product observed by the reaction with SEQ ID NO: 1654. The results are shown in Table 61.4.

TABLE 61.4
Products ^{a}5′-6-FAM-T22*(2′dF)A(2′dF)GmA(2′dF)A-3′P, ^{b}5′-6-FAM-
T15AmU*mGmA-3′P, ^{c}5′-6-FAM-T22(2′dF)C(2′dF)G(2′dF)A(2′dF)A-
3′P, ^{d}5′-6-FAM-T27(2′dF)GmA(2′dF)U(2′dF)A-3′P, ^{e}5′-
6-FAM-T15mGmAmC(2′dF)A-3′P, ^{f}5′-6-FAM-T11mCmGmA(2′dF)A-3′P,
^{g}5′-6-FAM-T15mUmGmAmA-3′P, ^{h}5′-6-FAM-T11mC*mA*mG(2′dF)A-
3′P, ⁱ5′-6-FAM-T15mAmU*mGmA-3′P, ^{j}5′-6-FAM-T11mC*mA*mGmA-
3′P, ^{k}5′-6-FAM-T15mA(2′dF)UmCmA-3′P.

| SEQ | | | | | | | | | | | |
|---|---|---|---|---|---|---|---|---|---|---|---|
| ID NO: | FIOP Product % conversion Relative to SEQ ID NO: 1654 | | | | | | | | | | |
| (nt/aa) | a | b | c | d | e | f | g | h | i | j | k |
| 2253/2254 | + | + | + | + | + | + | + | + | + | + | + |
| 2811/2812 | + | + | + | + | + | + | + | + | ++ | ++ | ++ |
| 3673/3674 | + | + | + | + | + | + | ++ | ++ | ++ | +++ | +++ |
| 3917/3918 | + | + | + | + | + | + | ++ | ++ | ++ | +++ | +++ |

Levels of increased activity were determined relative to the reference polypeptide of SEQ ID NO: 1654 and defined as follows: “+” from 1.00 to 100.00; “++” 100.01-200.00; “+++” 200.01-287.00”.

[0536] Activity relative to SEQ ID NO: 2254 (Activity FIOP) was calculated as the percent product of the variant compared with the percent product observed by the reaction with SEQ ID NO: 2254. The results are shown in Table 61.5.

TABLE 61.5
Products ^{a}5′-6-FAM-T15mCmUmGmA-3′P, ^{b}′5′-6-FAM-
T27(2′dF)C*(2′dF)G*(2′dF)A(2′dF)A-3′P, ^{c}5′-6-
FAM-T11mU*fA*fA(2′dF)A-3′P, ^{d}5′-6-FAM-T17mAmUmCmA-3′P,
^{e}5′-6-FAM-T15mGmAmC(2′dF)U-3′P, ^{f}5′-6-FAM-T48mG*mA*mCmA-
3′P, ^{g}5′-6-FAM-T15mAmCmU(2′dF)A-3′P, ^{h}5′-6-FAM-
T15mGmAmCmA-3′P, ⁱ5′-6-FAM-T15mAmCmU(2′dF)U-3′P,
^{j}5′-6-FAM-T15mAmCmUmC-3′P, ^{k}5′-6-FAM-T15mAmCmUmG-3′P,
^{l}5′-6-FAM-T15mAmCmUmA-3′P, ^{m}5′-6-FAM-T15mAmG(MOE)CmA-3′P.

| SEQ | | | | | | | | | | | | | |
|---|---|---|---|---|---|---|---|---|---|---|---|---|---|
| ID NO: | FIOP Product % conversion Relative to SEQ ID NO: 2254 | | | | | | | | | | | | |
| (nt/aa) | a | b | c | d | e | f | g | h | i | j | k | l | m |
| 2811/2812 | + | + | + | + | + | + | + | + | + | + | + | + | + |
| 3673/3674 | + | + | + | + | + | + | ++ | + | ++ | ++ | +++ | +++ | ++ |
| 3917/3918 | + | + | + | + | ++ | + | ++ | ++ | ++ | ++ | ++ | ++ | +++ |

Levels of increased activity were determined relative to the reference polypeptide of SEQ ID NO: 2254 and defined as follows: “+” from 1.00 to 50.00; “++” 50.01-100.00; “+++” 100.01-307.01”.

[0537] Activity relative to SEQ ID NO: 2812 (Activity FIOP) was calculated as the percent product of the variant compared with the percent product observed by the reaction with SEQ ID NO: 2812. The results are shown in Table 61.6.

TABLE 61.6
Products ^{a}5′-6-FAM-T17*fA*fAfG(2′dF)A-3′P,
^{b}5′-6-FAM-T15mGmAmCmC-3′P, ^{c}5′-6-FAM-T15mAmU(2′dF)GmA-
3′P, ^{d}5′-6-FAM-T15mAmU(2′dF)UmA-3′P, ^{e}5′-6-
FAM-T15mGmAmCmG-3′P.

| SEQ ID | | | | | |
|---|---|---|---|---|---|
| NO: | FIOP Product % conversion Relative to SEQ ID NO: 2812 | | | | |
| (nt/aa) | ^{a} | ^{b} | ^{c} | ^{d} | ^{e} |
| 3673/3674 | + | + | + | + | ++ |
| 3917/3918 | + | + | ++ | ++ | +++ |

Levels of increased activity were determined relative to the reference polypeptide of SEQ ID NO: 2812 and defined as follows: “+” from 1.00 to 20.00; “++” 20.01-50.00; “+++” 50.01-824.00”.

[0538] Activity relative to SEQ ID NO: 3674 (Activity FIOP) was calculated as the percent product of the variant compared with the percent product observed by the reaction with SEQ ID NO: 3674. The results are shown in Table 61.7.

TABLE 61.7
Products ^{a}5′-6-FAM-T15mAmCmU*mU-3′P, ^{b}5′-6-
FAM-T15mGmAmC*mU-3′P, ^{c}5′-6-FAM-T15mGmAmC*mG-3′P,
^{d}5′-6-FAM-T15mAmCmU*mG-3′P, ^{e}5′-6-FAM-
T15mAmU(2′dF)CmA-3′P.

| SEQ ID | | | | | |
|---|---|---|---|---|---|
| NO: | FIOP Product % conversion Relative to SEQ ID NO: 3674 | | | | |
| (nt/aa) | ^{a} | ^{b} | ^{c} | ^{d} | ^{e} |
| 3917/3918 | + | +++ | +++ | ++ | ++ |

Levels of increased activity were determined relative to the reference polypeptide of SEQ ID NO: 3674 and defined as follows: “+” from 1.00 to 25.00; “++” 25.01-60.00; “+++” 60.01-79.00”.

### Example 62

### Iterative Enzymatic Extension of RNA Oligomer Using Engineered TdT Variant SEQ ID NO: 3918

[0539] TdT enzyme variant SEQ ID NO: 3918 was produced in shake flask and purified as described in Example 3. Inorganic pyrophosphatase SEQ ID NO: 3944 was produced and purified, as described in Example 58. Alkaline phosphatase SEQ ID NO: 3934 was produced and purified, as described in Example 57.

### Solution Phase Extension

[0540] Fluorescently labeled RNA oligomer 5′-BiosG-T3(iFluorT)T9mAmUmA was reacted with TdT and mATP-3′P in a 1.1 mL Axygen 96 Deep Well plate. The reaction included 4 μM oligonucleotide, 1 μM inorganic pyrophosphatase, 8 μM TdT, 72 μM nucleotide triphosphate, and 250 μM CoCl₂ in 20 mM TEA-HCl at pH 7.8. The reaction was set up as follows: (i) all reaction components except for oligonucleotide were mixed in a 1.6 mL Eppendorf tube at a volume of 196 μL, (ii) a 4 μL aliquot of a 200 μM oligonucleotide stock was added to the Eppendorf tube, mixed well, then transferred to one well of an Axygen 96 DeepWell plate. The plate was then incubated at 40° C. for 18 h with 400 rpm agitation. A 4 μL aliquot was removed from the reaction plate, diluted to 1.25 nM final oligonucleotide concentration, then analyzed by capillary electrophoresis according to Example 4.

[0541] Next, 80 μL of Dynabeads MyOne Streptavidin C1 magnetic beads were washed with binding and wash buffer according to the Dynabeads protocol. After isolation, the beads were redispersed in 196 μL 2× binding and wash buffer and then combined with the 196 μL of crude extension reaction product containing 5′-BiosG-T3(iFluorT)T9mAmUmAmA-3′P in a 2 mL Eppendorf tube. The tube was placed on a slowly rotating tube rack in a 30° C. incubator for 45 min. Afterwards, the beads were isolated and washed three times with 200 μL binding and wash buffer followed by washing three times with 200 μL 20 mM TEA-HCl (pH 7.8).

### Immobilized Oligo Deprotection

[0542] Isolated beads bound to the biotinylated oligonucleotide were redispersed in 200 μL deprotection buffer containing 1 μM alkaline phosphatase, 250 μM CoCl₂, 20 mM TEA-HCl, and 6 v/v % formamide at pH 7.8. The reaction mixture was mixed well then transferred to one well of an Axygen 1.1 mL 96 DeepWell plate and incubated at 50° C. for 0.5 h with 650 rpm agitation.

[0543] Using the above procedure for the deprotection step, four sequential addition and deprotection steps were performed starting from biotiylated oligo 5′-BiosG-T3(iFluorT)T9mAmUmA: 5′-BiosG-T3(iFluorT)T9mAmUmAmA-3′P was reacted with alkaline phosphatase to give 5′-BiosG-T3(iFluorT)T9mAmUmAmA; 5′-BiosG-T3(iFluorT)T9mAmUmAmAmG-3′P was reacted with alkaline phosphatase to give 5′-BiosG-T3(iFluorT)T9mAmUmAmAmG; 5′-BiosG-T3(iFluorT)T9mAmUmAmAmGmA-3′P was reacted with alkaline phosphatase to give 5′-BiosG-T3(iFluorT)T9mAmUmAmAmGmA; and 5′-BiosG-T3(iFluorT)T9mAmUmAmAmGmAfA-3′P was reacted with alkaline phosphatase to give 5′-BiosG-T3(iFluorT)T9mAmUmAmAmGmAfA.

[0544] Afterward, a 5 μL aliquot was transferred to one well of a BioRad 96 well PCR plate which was placed on a magnetic plate holder to isolate the beads. The supernatant was removed, and the beads redispersed in 20 μL 95:5 formamide:water containing 10 mM EDTA. The mixture was then incubated at 90° C. for 2.5 min in a thermal cycler. The beads were then immediately isolated on a magnetic plate holder, and a 4 μL aliquot of the supernatant solution was diluted 50-fold in deionized water, which was subsequently analyzed by capillary electrophoresis according to Example 4.

[0545] The beads in the remaining 195 μL crude reaction product were isolated, then washed with three times with 200 μL of a solution containing 1 g/L bovine serum albumin, 1 mM EDTA, and 20 mM TEA-HCl at pH 7.8. The beads were then isolated and redispersed in 60 μL of a 0.1% sodium dodecyl sulfate (SDS) solution in nuclease free water. The mixture was mixed well, transferred to one well of a BioRad 96 well PCR plate, and incubated at 99° C. for 5 min in a thermal cycler. Immediately afterward the beads were isolated, and the supernatant was collected and diluted to 120 μL with deionized water.

[0546] A fresh 80 μL aliquot of Dynabeads MyOne Streptatvidin C1 were washed with binding and wash buffer according to the Dynabeads protocol and then redispersed in 120 μL 2× binding and wash buffer in a 1.6 mL Eppendorf tube. The dispersed beads were then combined with the 120 μL of free biotinylated oligonucleotide and placed on a slowly rotating tube holder in a 30° C. incubator for 30 min. The beads were then isolated and washed three times with 200 μL 20 mM TEA-HCl (pH 7.8).

TABLE 62.1
Dephosphorylation of Immobilized Oligonucleotide-3′P

| | | Conversion |
|---|---|---|
| Starting Oligonucleotide | Product Oligonucleotide | (%) |
| 5′-BiosG- | 5′-BiosG- | 100 |
| T3(iFluorT)T9mAmUmAmA-3′P | T3(iFluorT)T9mAmUmAmA | |
| 5′-BiosG- | 5′-BiosG- | 99 |
| T3(iFluorT)T9mAmUmAmAmG-3′P | T3(iFluorT)T9mAmUmAmAmG | |
| 5′-BiosG- | 5′-BiosG- | 95 |
| T3(iFluorT)T9mAmUmAmAmGmA-3′P | T3(iFluorT)T9mAmUmAmAmGmA | |
| 5′-BiosG- | 5′-BiosG- | 99 |
| T3(iFluorT)T9mAmUmAmAmGmAfA-3′P | T3(iFluorT)T9mAmUmAmAmGmAfA | |

Conversion of nucleotide was determined as percent of the product peak divided by the sum of the total fluorescence in the electropherogram.

### Immobilized Oligo Extension

[0547] The beads were isolated and then redispersed in 200 μL of reaction buffer containing 16 μM TdT, 1 μM inorganic pyrophosphatase, 72 μM nucleotide, 1 mM CoCl₂, 20 mM TEA-HCl, 6% v/v formamide, and 0.1% v/v PEG3350 at pH 7.8. After mixing well, the suspension was transferred to one well of an Axygen 1.1 mL 96 DeepWell plate and incubated at 50° C. for 3.5 h with 650 rpm agitation.

[0548] Using the above procedure for the addition step, four sequential addition and deprotection steps were performed starting from biotiylated oligo 5′-BiosG-T3(iFluorT)T9mAmUmA: 5′-BiosG-T3(iFluorT)T9mAmUmAmA was reacted with TdT and mGTP-3′P to give 5′-BiosG-T3(iFluorT)T9mAmUmAmAmG-3′P. 5′-BiosG-T3(iFluorT)T9mAmUmAmAmG was reacted with TdT and mATP-3′P to give 5′-BiosG-T3(iFluorT)T9mAmUmAmAmGmA. 5′-BiosG-T3(iFluorT)T9mAmUmAmAmGmA was reacted with TdT and fATP-3′P to give 5′-BiosG-T3(iFluorT)T9mAmUmAmAmGfA-3′P.

[0549] Afterward, a 5 μL aliquot was transferred to one well of a BioRad 96 well PCR plate which was placed on a magnetic plate holder to isolate the beads. The supernatant was removed, and the beads redispersed in 20 μL 95:5 formamide:water containing 10 mM EDTA. The mixture was then incubated at 90° C. for 2.5 min in a thermal cycler. The beads were then immediately isolated on a magnetic plate holder, and 4 μL aliquot of the supernant soluion was diluted 50-fold in deionized water, which was analyzed by capillary electrophoresis according to Example 4.

[0550] The beads in the remaining 195 μL crude reaction product were isolated and washed three times 200 μL solution containing 1 g/L bovine serum albumin, 1 mM EDTA, and 20 mM TEA-HCl at pH 7.8. Then, the beads were isolated and washed three times with 200 μL solution containing 1 g/L bovine serum albumin and 20 mM TEA-HCl at pH 7.8.

TABLE 62.2
TdT Catalyzed Extension of Oligonucleotide using Nucleotide-3′P

| Starting Oligonucleotide | Product Oligonucleotide | Conversion (%) |
|---|---|---|
| 5′-BiosG- | 5′-BiosG- | 86 |
| T3(iFluorT)T9mAmUmA | T3(iFluorT)T9mAmUmAmA-3′P | |
| 5′-BiosG- | 5′-BiosG- | 97 |
| T3(iFluorT)T9mAmUmAmA | T3(iFluorT)T9mAmUmAmAmG-3′P | |
| 5′-BiosG- | 5′-BiosG- | 91 |
| T3(iFluorT)T9mAmUmAmAmG | T3(iFluorT)T9mAmUmAmAmGmA-3′P | |
| 5′-BiosG- | 5′-BiosG- | 100 |
| T3(iFluorT)T9mAmUmAmAmGmA | T3(iFluorT)T9mAmUmAmAmGmAfA-3′P | |

Conversion of nucleotide was determined as percent of the product peak divided by the sum of the total fluorescence in the electropherogram.

### Example 63

### Improvements Over SEQ ID NO: 3870 in the Extension of Oligonucleotide Acceptor Molecules with Nucleotide Triphosphate Donors

### HTP Screening for Improved TdT Variants

[0551] SEQ ID NO: 3870 was selected as the parent TdT enzyme. Libraries of engineered genes were produced from the parent gene using various techniques (e.g., saturation mutagenesis and recombination of previously identified beneficial mutations). The polypeptides encoded by each gene were produced in HTP and prepared as described in Table 63.1.

[0552] Reactions were performed in 96-well or 384-well format BioRad PCR plates. Reactions included 10-500 NM oligonucleotide, 100-600 μM nucleotide triphosphate, 20-100 mM buffer, and 250-600 M cobalt (II) chloride. The reactions were set up as follows: (i) all reaction components, except for TdT, were pre-mixed in a single solution, and was aliquoted into each well of the reaction plates (ii) TdT lysate solution was then added into the wells to initiate the reaction. The reaction plate was heat-sealed with a peelable aluminum seal and incubated in a thermocycler at the indicated temperature and reaction time, then held at 4° C. until the reaction was quenched. Reactions were quenched and processed for CE analysis as described in Example 4.

TABLE 63.1
Reaction conditions

Lysis buffer-TEA (50 mM, pH 7.5), 0.1 g/L lysozyme; Reaction buffer-20 mM TEA, 0.25 mM CoCl₂,
pH 7.8; Lysate concentration (vol %)-0.25; Preincubation Temp (C.)-45; Preincubation Time (min)-60;
Reaction temperature (C.)-45; Reaction Time (min)-120; Reaction volume (μL) −1; NTP (μM) -mCTP-
3′P; NTP conc (μM)-200; Oligonucleotide-5′-6-FAM-T11mC*mA*mG, 5′-6-FAM-
T57mUmU(2′dF)C, 5′-6-FAM-T17*mA*mGmA, 5′-6-FAM-T22*mGmAmA, 5′-6-FAM-
T27mAmAmA, 5′-6-FAM-T32mAmAmA(2′dF)G, 5′-6-FAM-T37mG*mA*mC, 5′-6-FAM-
T42*mA*mCmU, 5′-6-FAM-T47*mCmUmU, 5′-6-FAM-T52mUmUmU; Substrate conc (μM)-10 μM
each of ten oligo; Product -5′-6-FAM-T11mC*mA*mGmC-3′P, 5′-6-FAM-T57mUmU(2′dF)CmC-3′P,
5′-6-FAM-T17*mA*mGmAmC-3′P, 5′-6-FAM-T22*mGmAmAmC-3′P, 5′-6-FAM-
T27mAmAmAmC-3′P, 5′-6-FAM-T32mAmAmA(2′dF)GmC-3′P, 5′-6-FAM-T37mG*mA*mCmC-
3′P, 5′-6-FAM-T42*mA*mCmUmC-3′P, 5′-6-FAM-T47*mCmUmUmC-3′P, 5′-6-FAM-
T52mUmUmUmC-3′P

[0553] Activity relative to SEQ ID NO: 3870 (Activity FOP) was calculated as the percent product of the variant, defined as the sum of the area of products in the multiplexed assay divided by the sum of the total peak area, compared with the percent product observed by the reaction with SEQ ID NO: 3870 (where the percent product may be set as the average of replicates or else the highest single sample as appropriate). The results are shown in Table 63.2.

TABLE 63.2

| | | FIOP Product Peak Area |
|---|---|---|
| SEQ ID NO: | Amino Acid Differences | Relative to SEQ ID NO: |
| (nt/aa) | (Relative to SEQ ID NO: 3870) | 3870 |
| 5475/5476 | T200K | +++ |
| 4047/4048 | F204I | +++ |
| 4049/4050 | G406L | +++ |
| 4051/4052 | G406S | +++ |
| 4053/4054 | E342Q | +++ |
| 4055/4056 | P404G | ++ |
| 4057/4058 | T295V | ++ |
| 4059/4060 | Q179M | ++ |
| 4061/4062 | Y192M | ++ |
| 4063/4064 | R171G | ++ |
| 4065/4066 | Q179P | ++ |
| 4067/4068 | M490R | ++ |
| 4069/4070 | Q169T | + |
| 4071/4072 | S403T | + |
| 4073/4074 | M490E | + |
| 4075/4076 | Y192T | + |
| 4077/4078 | F204V | + |
| 4079/4080 | S495C | + |
| 4081/4082 | T295S | + |
| 4083/4084 | S403L | + |
| 4085/4086 | M490L | + |
| 4087/4088 | L522I | + |
| 4089/4090 | D199G | + |
| 4091/4092 | T295G | + |
| 4093/4094 | P165A | + |
| 4095/4096 | N197E | + |
| 4097/4098 | I187R | + |
| 4099/4100 | V210M | + |
| 4101/4102 | Y521V | + |
| 4103/4104 | N197R | + |
| 4105/4106 | N493K | + |
| 4107/4108 | M490S | + |
| 4109/4110 | N175I | + |

Levels of increased activity were determined relative to the reference polypeptide of SEQ ID NO: 3870 and defined as follows: “+” 1.01 to 1.04, “++” 1.04 to 1.07, “+++” 1.07 to 1.12

### Example 64

### Improvements Over SEQ ID NO: 3870 in the Extension of Oligonucleotide Acceptor Molecules with Nucleotide Triphosphate Donors

### HTP Screening for Improved TdT Variants

[0554] SEQ ID NO: 3870 was selected as the parent TdT enzyme. Libraries of engineered genes were produced from the parent gene using various techniques (e.g., saturation mutagenesis and recombination of previously identified beneficial mutations). The polypeptides encoded by each gene were produced in HTP and prepared as described in Table 64.1.

[0555] Reactions were performed in 96-well or 384-well format BioRad PCR plates. Reactions included 10-500 μM oligonucleotide, 100-600 μM nucleotide triphosphate, 20-100 mM buffer, and 250-600 μM cobalt (II) chloride. The reactions were set up as follows: (i) all reaction components, except for TdT, were pre-mixed in a single solution, and was aliquoted into each well of the reaction plates (ii) TdT lysate solution was then added into the wells to initiate the reaction. The reaction plate was heat-sealed with a peelable aluminum seal and incubated in a thermocycler at the indicated temperature and reaction time, then held at 4° C. until the reaction was quenched. Reactions were quenched and processed for CE analysis as described in Example 4.

TABLE 64.1
Reaction conditions

Lysis buffer-TEA (50 mM, pH 7.5), 0.1 g/L lysozyme; Reaction buffer-20 mM TEA, 0.25 mM CoCl₂,
pH 7.8; Lysate concentration (vol %)-25; Preincubation Temp (C.)-68; Preincubation Time (min)-60;
Reaction temperature (C.)-50; Reaction Time (min)-60; Reaction volume (μL) −1; NTP (μM)-fATP-3′P;
NTP conc (μM)-100; Oligonucleotide-5′-6-FAM-T15mAmU*mG; Substrate conc (μM)-50; Product -
5′-6-FAM-T15mAmU*mG(2′dF)A-3′P.

[0556] Activity relative to SEQ ID NO: 3870 (Activity FIOP) was calculated as the percent product of the variant, defined as the sum of the area of products assay divided by the sum of the total peak area, compared with the percent product observed by the reaction with SEQ ID NO: 3870 (where the percent product may be set as the average of replicates or else the highest single sample as appropriate). The results are shown in Table 64.2.

TABLE 64.2

| | | FIOP Product Peak Area |
|---|---|---|
| SEQ ID NO: | Amino Acid Differences | Relative to SEQ ID NO: |
| (nt/aa) | (Relative to SEQ ID NO: 3870) | 3870 |
| 4047/4048 | F204I | ++ |
| 4049/4050 | G406L | ++ |
| 4051/4052 | G406S | + |
| 4053/4054 | E342Q | + |
| 4055/4056 | P404G | +++ |
| 4059/4060 | Q179M | + |
| 4071/4072 | S403T | + |
| 4081/4082 | T295S | ++ |
| 4083/4084 | S403L | ++ |
| 4087/4088 | L522I | + |
| 4089/4090 | D199G | + |
| 4103/4104 | N197R | ++ |
| 4105/4106 | N493K | ++ |
| 4111/4112 | N175M | +++ |
| 4113/4114 | Q179K | +++ |
| 4115/4116 | N191M | +++ |
| 4117/4118 | V341C | +++ |
| 4119/4120 | E203F | +++ |
| 4121/4122 | T295N | +++ |
| 4123/4124 | L484S | +++ |
| 4125/4126 | D183C | ++ |
| 4127/4128 | K508N | ++ |
| 4129/4130 | T173S | ++ |
| 4131/4132 | N175L | ++ |
| 4133/4134 | P165C | ++ |
| 4135/4136 | N197C | ++ |
| 4137/4138 | G406R | ++ |
| 4139/4140 | N191Q | ++ |
| 4141/4142 | R429V | ++ |
| 4143/4144 | S509R | ++ |
| 4145/4146 | R267S | ++ |
| 4147/4148 | S403W | ++ |
| 4149/4150 | L491V | ++ |
| 4151/4152 | N197T | ++ |
| 4153/4154 | T295A | ++ |
| 4155/4156 | W325L | ++ |
| 4157/4158 | A507G | ++ |
| 4159/4160 | H494T | + |
| 4161/4162 | I340S | + |
| 4163/4164 | E203G | + |
| 4165/4166 | W481Q | + |
| 4167/4168 | K195R | + |
| 4169/4170 | D183W | + |
| 4171/4172 | P165R | + |
| 4173/4174 | T200M | + |
| 4175/4176 | A319E | + |
| 4177/4178 | E203M | + |
| 4179/4180 | N175V | + |
| 4181/4182 | Y192A | + |
| 4183/4184 | Q179S | + |
| 4185/4186 | W325G | + |
| 4187/4188 | Y259F | + |
| 4189/4190 | N176V | + |
| 4191/4192 | Q179T | + |
| 4193/4194 | R480A | + |
| 4195/4196 | R291M | + |
| 4197/4198 | S495R | + |
| 4199/4200 | G406T | + |
| 4201/4202 | L387I | + |
| 4203/4204 | S403K | + |
| 4205/4206 | P404M | + |
| 4207/4208 | E257S | + |
| 4209/4210 | S403R | + |
| 4211/4212 | D199R | + |
| 4213/4214 | A483C | + |
| 4215/4216 | S495M | + |
| 4217/4218 | M490V | + |
| 4219/4220 | N191V | + |
| 4221/4222 | E257P | + |
| 4223/4224 | W398V | + |
| 4225/4226 | H494A | + |
| 4227/4228 | L374V | + |
| 4229/4230 | R429F | + |
| 4231/4232 | Q169M | + |
| 4233/4234 | R429H | + |
| 4235/4236 | D199W | + |
| 4237/4238 | S403V | + |
| 4239/4240 | D199S | + |
| 4241/4242 | S293C | + |
| 4243/4244 | E399S | + |
| 4245/4246 | Q179V | + |
| 4247/4248 | N197F | + |
| 4249/4250 | R480Q | + |
| 4251/4252 | N191F | + |
| 4253/4254 | S495N | + |
| 4255/4256 | M490A | + |
| 4257/4258 | E203V | + |
| 4259/4260 | P165T | + |
| 4261/4262 | D199V | + |
| 4263/4264 | S293T | + |

“Levels of increased activity were determined relative to the reference polypeptide of SEQ ID NO: 3870 and defined as follows: “+” 1.10 to 1.50, “++” 1.50 to 1.97, “+++”, 1.97 to 4.12.

### Example 65

### Improvements Over SEQ ID NO: 3918 in the Extension of Oligonucleotide Acceptor Molecules with Nucleotide Triphosphate Donors

### HTP Screening for Improved TdT Variants

[0557] SEQ ID NO: 3918 was selected as the parent TdT enzyme. Libraries of engineered genes were produced from the parent gene using various techniques (e.g., saturation mutagenesis and recombination of previously identified beneficial mutations). The polypeptides encoded by each gene were produced in HTP and prepared as described in Table 65.1.

[0558] Reactions were performed in 96-well or 384-well format BioRad PCR plates. Reactions included 10-500 μM oligonucleotide, 100-600 μM nucleotide triphosphate, 20-100 mM buffer, and 250-600 μM cobalt (II) chloride. The reactions were set up as follows: (i) all reaction components, except for TdT, were pre-mixed in a single solution, and was aliquoted into each well of the reaction plates (ii) TdT lysate solution was then added into the wells to initiate the reaction. The reaction plate was heat-sealed with a peelable aluminum seal and incubated in a thermocycler at the indicated temperature and reaction time, then held at 4° C. until the reaction was quenched. Reactions were quenched and processed for CE analysis as described in Example 4.

TABLE 65.1
Reaction conditions

Lysis buffer-TEA (50 mM, pH 7.5), 0.1 g/L lysozyme; Reaction buffer-20 mM TEA, 0.25 mM CoCl₂,
pH 7.8; Lysate concentration (vol %)-0.25; Preincubation Temp (C.)-48; Preincubation Time (min)-60;
Reaction temperature (C.)-48; Reaction Time (min)-120; Reaction volume (μL) −1; NTP (μM)-*mGTP-
3′P; NTP conc (μM)-200; Oligonucleotide-5′-6-FAM-T11mC*mA*mG, 5′-6-FAM-
T57mUmU(2′dF)C, 5′-6-FAM-T17*mA*mGmA, 5′-6-FAM-T22*mGmAmA, 5′-6-FAM-
T27mAmAmA, 5′-6-FAM-T32mAmAmA(2′dF)G, 5′-6-FAM-T37mG*mA*mC, 5′-6-FAM-
T42*mA*mCmU, 5′-6-FAM-T47*mCmUmU, 5′-6-FAM-T52mUmUmU; Substrate conc (μM)-10 μM
each of ten oligo; Product -5′-6-FAM-T11mC*mA*mG*mG-3′P, 5′-6-FAM-T57mUmU(2′dF)C*mG-
3′P, 5′-6-FAM-T17*mA*mGmA*mG-3′P, 5′-6-FAM-T22*mGmAmA*mG-3′P, 5′-6-FAM-
T27mAmAmA*mG-3′P, 5′-6-FAM-T32mAmAmA(2′dF)G*mG-3′P, 5′-6-FAM-
T37mG*mA*mC*mG-3′P, 5′-6-FAM-T42*mA*mCmU*mG-3′P, 5′-6-FAM-T47*mCmUmU*mG-
3′P, 5′-6-FAM-T52mUmUmU*mG-3′P.

[0559] Activity relative to SEQ ID NO: 3918 (Activity FIOP) was calculated as the percent product of the variant, defined as the sum of the area of products in the multiplexed assay divided by the sum of the total peak area, compared with the percent product observed by the reaction with SEQ ID NO: 3918 (where the percent product may be set as the average of replicates or else the highest single sample as appropriate). The results are shown in Table 65.2.

TABLE 65.2

| | | FIOP Product Peak Area |
|---|---|---|
| SEQ ID NO: | Amino Acid Differences | Relative to SEQ ID NO: |
| (nt/aa) | (Relative to SEQ ID NO: 3918) | 3918 |
| 4265/4266 | H7-/D400W/Y459R/F504Q | +++ |
| 4267/4268 | W481R | +++ |
| 4269/4270 | D400W/Y459V/M499R/T500S/F504Q | +++ |
| 4271/4272 | F335V/W481R/L484R | +++ |
| 4273/4274 | W481R/E512R | +++ |
| 4275/4276 | W395N/L484R | +++ |
| 4277/4278 | D400W/Y459V | +++ |
| 4279/4280 | E203R/Y459V | +++ |
| 4281/4282 | F335V/G402R/W481R/L484R | +++ |
| 4283/4284 | L484R | +++ |
| 4285/4286 | Y459R | +++ |
| 4287/4288 | D400W/Y459R/T500S/R501P | +++ |
| 4289/4290 | G402K/W481D/N493T | ++ |
| 4291/4292 | W395T/W481R | ++ |
| 4293/4294 | E203R/Y459R/T500S | ++ |
| 4295/4296 | V218L | ++ |
| 4297/4298 | G402R/L484R/N493T | ++ |
| 4299/4300 | D400W/Y459V/R501P/F504G | ++ |
| 4301/4302 | F335V/G402K/W481R/L484E | ++ |
| 4303/4304 | L484E | ++ |
| 4305/4306 | F335V/G402K/E512R | ++ |
| 4307/4308 | E203R/Y459R/M499R/F504G | ++ |
| 4309/4310 | F335V/W481R/N493T | ++ |
| 4311/4312 | W395N/G402K | ++ |
| 4313/4314 | Y459V | ++ |
| 4315/4316 | N493T | ++ |
| 4317/4318 | M499P | ++ |
| 4319/4320 | D400W | ++ |
| 4321/4322 | F335V/G402K/W481R/L484R | ++ |
| 4323/4324 | W481D | ++ |
| 4325/4326 | G402K/W481R/L484R | ++ |
| 4327/4328 | W395T | ++ |
| 4329/4330 | Y459V/R501P | ++ |
| 4331/4332 | W395N/W481R/E512R | ++ |
| 4333/4334 | E367S | ++ |
| 4335/4336 | F504G | + |
| 4337/4338 | R501P | + |
| 4339/4340 | D400W/F504Q | + |
| 4341/4342 | E367R | + |
| 4343/4344 | T173I/E367S/Y459V/T500S | + |
| 4345/4346 | H3Q | + |
| 4347/4348 | G402K | + |
| 4349/4350 | F504Q | + |
| 4351/4352 | F335V | + |
| 4353/4354 | F335V/W481R/E512R | + |
| 4355/4356 | M499R | + |
| 4357/4358 | E367S/Y459V/T500S | + |
| 4359/4360 | E203R | + |
| 4361/4362 | W395T/G402K/W481R/L484R | + |
| 4363/4364 | E203R/D400W/Y459R/R501P | + |
| 4365/4366 | G402R | + |
| 4367/4368 | Q373G | + |
| 4369/4370 | E485Q | + |
| 4371/4372 | W395N | + |
| 4373/4374 | G402K/W481D | + |
| 4375/4376 | D400W/R501P | + |
| 4377/4378 | Q376S | + |
| 4379/4380 | T500S | + |
| 4381/4382 | E203R/E367S/Y459V/T500S/R501P | + |
| 4383/4384 | P458R | + |
| 4385/4386 | F335V/W481D/L484R | + |
| 4387/4388 | G460M | + |
| 4389/4390 | D336Q | + |
| 4391/4392 | E367T | + |
| 4393/4394 | G460R | + |
| 4395/4396 | P215Q | + |
| 4397/4398 | C390A | + |
| 4399/4400 | Q370E | + |
| 4401/4402 | K384S | + |
| 4403/4404 | D338Q | + |
| 4405/4406 | E512R | + |
| 4407/4408 | G402S | + |
| 4409/4410 | K294D | + |
| 4411/4412 | G402K/W481D/L484R/E512R | + |
| 4413/4414 | E515P | + |
| 4415/4416 | G402K/E512R | + |
| 4417/4418 | A339R | + |
| 4419/4420 | S164G | + |
| 4421/4422 | W395E | + |
| 4423/4424 | E512G | + |
| 4425/4426 | D338E | + |
| 4427/4428 | R501N | + |
| 4429/4430 | W395A | + |
| 4431/4432 | N380G | + |
| 4433/4434 | H516T | + |
| 4435/4436 | E203R/E367S/Y459R | + |
| 4437/4438 | S184A | + |

“Levels of increased activity were determined relative to the reference polypeptide of SEQ ID NO: 3918 and defined as follows: ““+”” 1.08 to 1.20, ““++”” 1.20 to 1.32, ““+++”” 1.32 to 1.65.

### Example 66

### Improvements Over SEQ ID NO: 4266 in the Extension of Oligonucleotide Acceptor Molecules with Nucleotide Triphosphate Donors

### HTP Screening for Improved TdT Variants

[0560] SEQ ID NO: 4266 was selected as the parent TdT enzyme. Libraries of engineered genes were produced from the parent gene using various techniques (e.g., saturation mutagenesis and recombination of previously identified beneficial mutations). The polypeptides encoded by each gene were produced in HTP and prepared as described in Table 66.1.

[0561] Reactions were performed in 96-well or 384-well format BioRad PCR plates. Reactions included 10-500 μM oligonucleotide), 100-600 0M nucleotide triphosphate, 20-100 mM buffer, and 250-600 μM cobalt (II) chloride. The reactions were set up as follows: (i) all reaction components, except for TdT, were pre-mixed in a single solution, and was aliquoted into each well of the reaction plates (ii) TdT lysate solution was then added into the wells to initiate the reaction. The reaction plate was heat-sealed with a peelable aluminum seal and incubated in a thermocycler at the indicated temperature and reaction time, then held at 4° C. until the reaction was quenched. Reactions were quenched and processed for CE analysis as described in Example 4.

TABLE 66.1
Reaction conditions

Lysis buffer-TEA (50 mM, pH 7.5), 0.1 g/L lysozyme; Reaction buffer-20 mM TEA, 0.25 mM CoCl2,
pH 7.8; Lysate concentration (vol %)-0.25; Preincubation Temp (C.)-48; Preincubation Time (min)-60;
Reaction temperature (C.)-50; Reaction Time (min)-120; Reaction volume (μL) −1; NTP (μM)-*mGTP-
3P; NTP conc (μM)-200; Oligonucleotide-5′-6-FAM-T12mC*mA*mG, 5′-6-FAM-T57mUmU(2′dF)C,
5′-6-FAM-T17*mA*mGmA, 5′-6-FAM-T22*mGmAmA, 5′-6-FAM-T27mAmAmA, 5′-6-FAM-
T32mAmAmA(2′dF)G, 5′-6-FAM-T37mG*mA*mC, 5′-6-FAM-T42*mA*mCmU, 5′-6-FAM-
T47*mCmUmU, 5′-6-FAM-T52mUmUmU; Substrate conc (μM)-15 μM each of ten oligo; Product -5′-
6-FAM-T12mC*mA*mG*mG-3P, 5′-6-FAM-T57mUmU(2′dF)C*mG-3P, 5′-6-FAM-
T17*mA*mGmA*mG-3P, 5′-6-FAM-T22*mGmAmA*mG-3P, 5′-6-FAM-T27mAmAmA*mG-3P, 5′-
6-FAM-T32mAmAmA(2′dF)G*mG-3P, 5′-6-FAM-T37mG*mA*mC*mG-3P, 5′-6-FAM-
T42*mA*mCmU*mG-3P, 5′-6-FAM-T47mGmUmCmA-3P, 5′-6-FAM-T52mUmUmU*mG-3P.

[0562] Activity relative to SEQ ID NO: 4266 (Activity FIOP) was calculated as the percent product of the variant, defined as the sum of the area of products in the multiplexed assay divided by the sum of the total peak area, compared with the percent product observed by the reaction with SEQ ID NO: 4266 (where the percent product may be set as the average of replicates or else the highest single sample as appropriate). The results are shown in Table 66.2.

TABLE 66.2

| | | FIOP Product Peak Area |
|---|---|---|
| SEQ ID NO: | Amino Acid Differences | Relative to SEQ ID NO: |
| (nt/aa) | (Relative to SEQ ID NO: 4266) | 4266 |
| 4439/4440 | L311R | +++ |
| 4441/4442 | F346Q | +++ |
| 4443/4444 | R472S/M498P/T499S/Q503G | +++ |
| 4445/4446 | R472G/M498P/T499S/Q503G | +++ |
| 4447/4448 | S471N | ++ |
| 4449/4450 | Q301G | ++ |
| 4451/4452 | Y308Q | ++ |
| 4453/4454 | P299S | ++ |
| 4455/4456 | P299E | ++ |
| 4457/4458 | V343L | ++ |
| 4459/4460 | Q301S/Q503G | + |
| 4461/4462 | L418V/Q503G | + |
| 4463/4464 | E192T | + |
| 4465/4466 | P299T | + |
| 4467/4468 | P299K/M498P/T499S/Q503G | + |
| 4469/4470 | E192G | + |
| 4471/4472 | K296G | + |
| 4473/4474 | E192V | + |
| 4475/4476 | R280H | + |
| 4477/4478 | M473Q | + |
| 4479/4480 | L297F | + |
| 4481/4482 | K406S | + |
| 4483/4484 | Y308R | + |
| 4485/4486 | G349Q | + |
| 4487/4488 | L392R/M498P/T499S/Q503G | + |
| 4489/4490 | E192Y | + |
| 4491/4492 | Y308T | + |
| 4493/4494 | V343C | + |
| 4495/4496 | K296P | + |
| 4497/4498 | L359I/M498P/T499S/Q503G | + |
| 4499/4500 | M465E | + |
| 4501/4502 | D411E | + |
| 4503/4504 | R280G/M498P/T499S/Q503G | + |
| 4505/4506 | F346W | + |
| 4507/4508 | A407S | + |
| 4509/4510 | R188K | + |
| 4511/4512 | E192S/M498P/T499S/Q503G | + |
| 4513/4514 | D491R | + |
| 4515/4516 | G410Q | + |
| 4517/4518 | L358G | + |
| 4519/4520 | Y308K | + |
| 4521/4522 | G410A | + |
| 4523/4524 | Y308H/Q503G | + |
| 4525/4526 | L418G/M498P/T499S/Q503G | + |
| 4527/4528 | E192Y/M498P/T499S/Q503G | + |
| 4529/4530 | D491G | + |
| 4531/4532 | V272P | + |
| 4533/4534 | I419V/Q503G | + |

“Levels of increased activity were determined relative to the reference polypeptide of SEQ ID NO: 4266 and defined as follows: ““+”” 1.06 to 1.21, ““++”” 1.21 to 1.52, ““+++”” 1.52 to 3.08”

### Example 67

### Improvements Over SEQ ID NO: 4266 in the Extension of Oligonucleotide Acceptor Molecules with Nucleotide Triphosphate Donors

### HTP Screening for Improved TdT Variants

[0563] SEQ ID NO: 4266 was selected as the parent TdT enzyme. Libraries of engineered genes were produced from the parent gene using various techniques (e.g., saturation mutagenesis and recombination of previously identified beneficial mutations). The polypeptides encoded by each gene were produced in HTP and prepared as described in Table 67.1.

[0564] Reactions were performed in 96-well or 384-well format BioRad PCR plates. Reactions included 10-500 μM oligonucleotide, 100-600 μM nucleotide triphosphate, 20-100 mM buffer, and 250-600 μM cobalt (II) chloride. The reactions were set up as follows: (i) all reaction components, except for TdT, were pre-mixed in a single solution, and was aliquoted into each well of the reaction plates (ii) TdT lysate solution was then added into the wells to initiate the reaction. The reaction plate was heat-sealed with a peelable aluminum seal and incubated in a thermocycler at the indicated temperature and reaction time, then held at 4° C. until the reaction was quenched. Reactions were quenched and processed for CE analysis as described in Example 4.

TABLE 67.1
Reaction conditions

Lysis buffer-TEA (50 mM, pH 7.5), 0.1 g/L lysozyme; Reaction buffer-20 mM TEA, 0.25 mM CoCl2,
pH 7.8; Lysate concentration (vol %)-0.25; Preincubation Temp (C.)-48; Preincubation Time (min)-60;
Reaction temperature (C.)-48; Reaction Time (min)-120; Reaction volume (μL) −1; NTP (μM)-*mGTP-
3P; NTP conc (μM)-200; Oligonucleotide-5′-6-FAM-T12mC*mA*mG, 5′-6-FAM-T57mUmU(2′dF)C,
5′-6-FAM-T17*mA*mGmA, 5′-6-FAM-T22*mGmAmA, 5′-6-FAM-T27mAmAmA, 5′-6-FAM-
T32mAmAmA(2′dF)G, 5′-6-FAM-T37mG*mA*mC, 5′-6-FAM-T42*mA*mCmU, 5′-6-FAM-
T47*mCmUmU, 5′-6-FAM-T52mUmUmU; Substrate conc (μM)-10 μM each of ten oligo; Product -5′-
6-FAM-T12mC*mA*mG*mG-3P, 5′-6-FAM-T57mUmU(2′dF)C*mG-3P, 5′-6-FAM-
T17*mA*mGmA*mG-3P, 5′-6-FAM-T22*mGmAmA*mG-3P, 5′-6-FAM-T27mAmAmA*mG-3P, 5′-
6-FAM-T32mAmAmA(2′dF)G*mG-3P, 5′-6-FAM-T37mG*mA*mC*mG-3P, 5′-6-FAM-
T42*mA*mCmU*mG-3P, 5′-6-FAM-T47*mCmUmU*mG-3P, 5′-6-FAM-T52mUmUmU*mG-3P.

[0565] Activity relative to SEQ ID NO: 4266 (Activity FIOP) was calculated as the percent product of the variant, defined as the sum of the area of products in the multiplexed assay divided by the sum of the total peak area, compared with the percent product observed by the reaction with SEQ ID NO: 4266 (where the percent product may be set as the average of replicates or else the highest single sample as appropriate). The results are shown in Table 67.2.

TABLE 67.2

| | | FIOP Product Peak Area |
|---|---|---|
| SEQ ID NO: | Amino Acid Differences | Relative to SEQ ID |
| (nt/aa) | (Relative to SEQ ID NO: 4266) | NO: 4266 |
| 4535/4536 | E202R | +++ |
| 4537/4538 | M498P/T499S/Q503G | +++ |
| 4539/4540 | S163Q/F203I/E366S | +++ |
| 4541/4542 | S163Q/Q328L/P363G/W480D | ++ |
| 4543/4544 | S163Q/P363G/W480D/E485Q | ++ |
| 4545/4546 | N190M/W480D/E485Q | ++ |
| 4547/4548 | S362T/P363G | ++ |
| 4549/4550 | F203I/S362T/E366S | ++ |
| 4551/4552 | F203I/M498P/T499S/Q503G | ++ |
| 4553/4554 | N190M/E202R/F203I/P363G/E366S/W480D/L483R/E485Q | ++ |
| 4555/4556 | S163Q/N190M | + |
| 4557/4558 | N190M/E202R/F203I/W480D | + |
| 4559/4560 | Q328L/R428V | + |
| 4561/4562 | Q328A/E485Q | + |
| 4563/4564 | E202R/F203I/E485Q | + |
| 4565/4566 | F203I/Q328A/R428V | + |
| 4567/4568 | T172S/N174M/Q178K/V340C | + |
| 4569/4570 | L95M/R428V/W480D | + |
| 4571/4572 | F203I/Q328A/W480D/E485Q | + |
| 4573/4574 | W480D/L483R | + |
| 4575/4576 | Q328L/W480D/L483R | + |
| 4577/4578 | S362T/P363R/E366S/R428V/W480D/L483R/M498P/T499S/ | + |
| | Q503G | |
| 4579/4580 | F203I/Q328A/P363G/R428V/L483R | + |
| 4581/4582 | E202R/F203I/Q328A/S362T/P363G/E366S/R428V/W480D/ | + |
| | E485Q/M498P/T499S/Q503G | |
| 4583/4584 | Q178K | + |

“Levels of increased activity were determined relative to the reference polypeptide of SEQ ID NO: 4266 and defined as follows: ““+”” 1.09 to 1.15, ““++”” 1.15 to 1.19, ““+++”” 1.19 to 1.29”

### Example 68

### Improvements Over SEQ ID NO: 4558 in the Extension of Oligonucleotide Acceptor Molecules with Nucleotide Triphosphate Donors

### HTP Screening for Improved TdT Variants

[0566] SEQ ID NO: 4558 was selected as the parent TdT enzyme. Libraries of engineered genes were produced from the parent gene using various techniques (e.g., saturation mutagenesis and recombination of previously identified beneficial mutations). The polypeptides encoded by each gene were produced in HTP and prepared as described in Table 68.1.

[0567] Reactions were performed in 96-well or 384-well format BioRad PCR plates. Reactions included 10-500 μM oligonucleotide, 100-600 μM nucleotide triphosphate, 20-100 mM buffer, and 250-600 μM cobalt (II) chloride. The reactions were set up as follows: (i) all reaction components, except for TdT, were pre-mixed in a single solution, and was aliquoted into each well of the reaction plates (ii) TdT lysate solution was then added into the wells to initiate the reaction. The reaction plate was heat-sealed with a peelable aluminum seal and incubated in a thermocycler at the indicated temperature and reaction time, then held at 4° C. until the reaction was quenched. Reactions were quenched and processed for CE analysis as described in Example 4.

TABLE 68.1
Reaction conditions

Lysis buffer-TEA (50 mM, pH 7.5), 0.1 g/L lysozyme; Reaction buffer-20 mM TEA, 0.25 mM CoCl2,
pH 7.8; Lysate concentration (vol %)-0.25; Preincubation Temp (C.)-48; Preincubation Time (min)-60;
Reaction temperature (C.)-48; Reaction Time (min)-120; Reaction volume (μL) −1; NTP (μM)-mATP-
3P; NTP conc (μM)-25; Oligonucleotide-5′-6-FAM-T17*(2′dF)A*(2′dF)A(2′dF)G, 5′-6-FAM-
T32mAmAmA(2′dF)G, 5′-6-FAM-T47*mA(2′dF)A(2′dF)A, 5′-6-FAM-T57mUmU(2′dF)C; Substrate
conc (μM)-12.5 μM each of four oligo; Product -5′-6-FAM-T17*(2′dF)A*(2′dF)A(2′dF)GmA-3P, 5′-6-
FAM-T32mAmAmA(2′dF)GmA-3P, 5′-6-FAM-T47*mA(2′dF)A(2′dF)AmA-3P, 5′-6-FAM-
T57mUmU(2′dF)CmA-3P.

[0568] Activity relative to SEQ ID NO: 4558 (Activity FIOP) was calculated as the percent product of the variant, defined as the sum of the area of products in the multiplexed assay divided by the sum of the total peak area, compared with the percent product observed by the reaction with SEQ ID NO: 4558 (where the percent product may be set as the average of replicates or else the highest single sample as appropriate). The results are shown in Table 68.2.

TABLE 68.2

| | | FIOP Product Peak Area |
|---|---|---|
| SEQ ID NO: | Amino Acid Differences | Relative to SEQ ID NO: |
| (nt/aa) | (Relative to SEQ ID NO: 4558) | 4558 |
| 4585/4586 | T172S/Q178K/G401K | +++ |
| 4587/4588 | T172S/N174M/Q178R/G401K/P403G | +++ |
| 4589/4590 | W394T | +++ |
| 4591/4592 | V340C/W394T | +++ |
| 4593/4594 | G405L/L483R | +++ |
| 4595/4596 | S402L/P403G | ++ |
| 4597/4598 | T172S/N174M/Q178R/G401K/P403G/K507R | ++ |
| 4599/4600 | Q178K/G401K/P403G | ++ |
| 4601/4602 | G401K | ++ |
| 4603/4604 | N174M/Q178R | ++ |
| 4605/4606 | V94I/A365F/K367R | ++ |
| 4607/4608 | L483R | ++ |
| 4609/4610 | G401K/S402L/P403G/K507N | ++ |
| 4611/4612 | T172S/Q178K | ++ |
| 4613/4614 | C389A/W394E | + |
| 4615/4616 | W324L/N379T/G405L/L483R | + |
| 4617/4618 | T172S/N174M/Q178K/S402L/S508R | + |
| 4619/4620 | Q178K/S402L/P403G | + |
| 4621/4622 | T172S/N174M/G401K/P403G/K507R | + |
| 4623/4624 | V340C | + |
| 4625/4626 | A365F/K367R/R428C | + |
| 4627/4628 | A365H/C389A/W394E | + |
| 4629/4630 | Q375G/K376H | + |
| 4631/4632 | A365F | + |
| 4633/4634 | Q375G/L380V/L483R | + |
| 4635/4636 | K376H/L483R | + |
| 4637/4638 | Q375G/N379T/L483R | + |
| 4639/4640 | K367R | + |
| 4641/4642 | Q375G/L380V | + |
| 4643/4644 | N379T/L483R | + |
| 4645/4646 | Q375G/L380V/G400P/L483R | + |
| 4647/4648 | A318E/Q375G/L380V | + |

“Levels of increased activity were determined relative to the reference polypeptide of SEQ ID NO: 4558 and defined as follows: ““+”” 1.03 to 1.19, ““++”” 1.19 to 1.33, ““+++”” 1.33 to 1.56”

### Example 69

### Improvements Over SEQ ID NO: 4442 in the Extension of Oligonucleotide Acceptor Molecules with Nucleotide Triphosphate Donors

### HTP Screening for Improved TdT Variants

[0569] SEQ ID NO: 4442 was selected as the parent TdT enzyme. Libraries of engineered genes were produced from the parent gene using various techniques (e.g., saturation mutagenesis and recombination of previously identified beneficial mutations). The polypeptides encoded by each gene were produced in HTP and prepared as described in Table 69.1.

[0570] Reactions were performed in 96-well or 384-well format BioRad PCR plates. Reactions included 10-500 μM oligonucleotide, 100-600 μM nucleotide triphosphate, 20-100 mM buffer, and 250-600 M cobalt (II) chloride. The reactions were set up as follows: (i) all reaction components, except for TdT, were pre-mixed in a single solution, and was aliquoted into each well of the reaction plates (ii) TdT lysate solution was then added into the wells to initiate the reaction. The reaction plate was heat-sealed with a peelable aluminum seal and incubated in a thermocycler at the indicated temperature and reaction time, then held at 4° C. until the reaction was quenched. Reactions were quenched and processed for CE analysis as described in Example 4.

TABLE 69.1
Reaction conditions

Lysis buffer-TEA (50 mM, pH 7.5), 0.1 g/L lysozyme; Reaction buffer-20 mM TEA, 0.25 mM CoCl2,
pH 7.8; Lysate concentration (vol %)-0.25; Preincubation Temp (C.)-48; Preincubation Time (min)-60;
Reaction temperature (C.)-48; Reaction Time (min)-120; Reaction volume (μL) −1; NTP (μM)-mATP-
3P; NTP conc (μM)-200; Oligonucleotide-5′-6-FAM-T17*(2′dF)A*(2′dF)A(2′dF)G, 5′-6-FAM-
T32mAmAmA(2′dF)G, 5′-6-FAM-T47*mA(2′dF)A(2′dF)A, 5′-6-FAM-T57mUmU(2′dF)C; Substrate
conc (μM)-12.5 μM each of four oligo; Product -5′-6-FAM-T17*(2′dF)A*(2′dF)A(2′dF)GmA-3P, 5′-6-
FAM-T32mAmAmA(2′dF)GmA-3P, 5′-6-FAM-T47*mA(2′dF)A(2′dF)AmA-3P, 5′-6-FAM-
T57mUmU(2′dF)CmA-3P.

[0571] Activity relative to SEQ ID NO: 4442 (Activity FIOP) was calculated as the percent product of the variant, defined as the sum of the area of products in the multiplexed assay divided by the sum of the total peak area, compared with the percent product observed by the reaction with SEQ ID NO: 4442 (where the percent product may be set as the average of replicates or else the highest single sample as Table 69.2

TABLE 69.2

| | | FIOP Product Peak Area |
|---|---|---|
| SEQ ID NO: | Amino Acid Differences | Relative to SEQ ID NO: |
| (nt/aa) | (Relative to SEQ ID NO: 4442) | 4442 |
| 4649/4650 | K296P/P299T | +++ |
| 4651/4652 | E192T/S402L/K507R | +++ |
| 4653/4654 | S402L | +++ |
| 4655/4656 | E192T/R280H | +++ |
| 4657/4658 | E185G/N190M | +++ |
| 4659/4660 | M281L | ++ |
| 4661/4662 | E189R/N190M | ++ |
| 4663/4664 | W394M | ++ |
| 4665/4666 | R313A | ++ |
| 4667/4668 | A312Q | ++ |
| 4669/4670 | D182N | ++ |
| 4671/4672 | W480L | ++ |
| 4673/4674 | N174M/K296P/P299E | ++ |
| 4675/4676 | R313I | ++ |
| 4677/4678 | E189H/N190M | ++ |
| 4679/4680 | D182R | ++ |
| 4681/4682 | A318V | ++ |
| 4683/4684 | S402L/K507R | ++ |
| 4685/4686 | S460A | ++ |
| 4687/4688 | L306A | ++ |
| 4689/4690 | Y308Q | ++ |
| 4691/4692 | A318P | + |
| 4693/4694 | V327A | + |
| 4695/4696 | A318R | + |
| 4697/4698 | W257K | + |
| 4699/4700 | Y307N | + |
| 4701/4702 | L305F | + |
| 4703/4704 | Q259R | + |
| 4705/4706 | D182A | + |
| 4707/4708 | L306R | + |
| 4709/4710 | V451L | + |
| 4711/4712 | W394L | + |
| 4713/4714 | H493K | + |
| 4715/4716 | R313L | + |
| 4717/4718 | A318T | + |
| 4719/4720 | Q259C | + |
| 4721/4722 | S260A | + |
| 4723/4724 | W394Y | + |
| 4725/4726 | A318N | + |
| 4727/4728 | A312R | + |
| 4729/4730 | S494T | + |
| 4731/4732 | R476L/W480D | + |
| 4733/4734 | S494R | + |
| 4735/4736 | A318Y | + |
| 4737/4738 | E522T | + |
| 4739/4740 | N190M | + |
| 4741/4742 | A318L | + |
| 4743/4744 | E189A/N190M | + |
| 4745/4746 | A312H | + |
| 4747/4748 | A414C | + |
| 4749/4750 | L306M | + |
| 4751/4752 | A312K | + |
| 4753/4754 | D182C | + |
| 4755/4756 | T316F | + |
| 4757/4758 | W381F | + |
| 4759/4760 | S404A | + |
| 4761/4762 | A414P | + |
| 4763/4764 | G405L | + |
| 4765/4766 | L374M | + |
| 4767/4768 | E189V/N190M | + |
| 4769/4770 | S395G | + |
| 4771/4772 | N190M/L193F | + |
| 4773/4774 | V289I | + |
| 4775/4776 | A318M | + |
| 4777/4778 | W257R | + |
| 4779/4780 | W480D | + |
| 4781/4782 | A312V | + |

“Levels of increased activity were determined relative to the reference polypeptide of SEQ ID NO: 4442 and defined as follows: ““+”” 1.01 to 1.09, ““++”” 1.09 to 1.21, ““+++”” 1.21 to 1.62”

### Example 70

### Improvements Over SEQ ID NO: 4442 in the Extension of Oligonucleotide Acceptor Molecules with Nucleotide Triphosphate Donors

### HTP Screening for Improved TdT Variants

[0572] SEQ ID NO: 4442 was selected as the parent TdT enzyme. Libraries of engineered genes were produced from the parent gene using various techniques (e.g., saturation mutagenesis and recombination of previously identified beneficial mutations). The polypeptides encoded by each gene were produced in HTP and prepared as described in Table 70.1.

[0573] Reactions were performed in 96-well or 384-well format BioRad PCR plates. Reactions included 10-500 μM oligonucleotide, 100-600 μM nucleotide triphosphate, 20-100 mM buffer, and 250-600 μM cobalt (II) chloride. The reactions were set up as follows: (i) all reaction components, except for TdT, were pre-mixed in a single solution, and was aliquoted into each well of the reaction plates (ii) TdT lysate solution was then added into the wells to initiate the reaction. The reaction plate was heat-sealed with a peelable aluminum seal and incubated in a thermocycler at the indicated temperature and reaction time, then held at 4° C. until the reaction was quenched. Reactions were quenched and processed for CE analysis as described in Example 4.

TABLE 70.1
Reaction conditions

Lysis buffer-TEA (50 mM, pH 7.5), 0.1 g/L lysozyme; Reaction buffer-20 mM TEA, 0.25 mM CoCl2,
pH 7.8; Lysate concentration (vol %)-25; Preincubation Temp (C.)-65; Preincubation Time (min)-60;
Reaction temperature (C.)-50; Reaction Time (min)-60; Reaction volume (μL) −1; NTP (μM)-fATP-3P;
NTP conc (μM)-100; Oligonucleotide-5′-6-FAM-T15mAmU*mG; Substrate conc (μM)-50; Product -
5′-6-FAM-T15mAmU*mG(2′dF)A-3P.

[0574] Activity relative to SEQ ID NO: 4442 (Activity FIOP) was calculated as the percent product of the variant, defined as the sum of the area of products divided by the sum of the total peak area, compared with the percent product observed by the reaction with SEQ ID NO: 4442 (where the percent product may be set as the average of replicates or else the highest single sample as appropriate). The results are shown in Table 70.2.

TABLE 70.2

| | | FIOP Product Peak Area |
|---|---|---|
| SEQ ID NO: | Amino Acid Differences | Relative to SEQ ID NO: |
| (nt/aa) | (Relative to SEQ ID NO: 4442) | 4442 |
| 4671/4672 | W480L | + |
| 4687/4688 | L306A | +++ |
| 4707/4708 | L306R | + |
| 4721/4722 | S260A | + |
| 4731/4732 | R476L/W480D | + |
| 4739/4740 | N190M | + |
| 4771/4772 | N190M/L193F | + |
| 4779/4780 | W480D | +++ |
| 4783/4784 | W480E | +++ |
| 4785/4786 | R476W/W480D | +++ |
| 4787/4788 | W480D/Y481W | ++ |
| 4789/4790 | L306T | ++ |
| 4791/4792 | A414E | ++ |
| 4793/4794 | Q259K | ++ |
| 4795/4796 | S494Q | + |
| 4797/4798 | W480M | + |
| 4799/4800 | F461M | + |
| 4801/4802 | L306C | + |
| 4803/4804 | R432H | + |
| 4805/4806 | W381M | + |
| 4807/4808 | M281C | + |
| 4809/4810 | R455A | + |

“Levels of increased activity were determined relative to the reference polypeptide of SEQ ID NO: 4442 and defined as follows: ““+”” 1.10 to 1.19, ““++”” 1.19 to 1.26 , ““+++”” 1.26 to 1.33”

### Example 71

### Improvements Over SEQ ID NO: 4654 in the Extension of Oligonucleotide Acceptor Molecules with Nucleotide Triphosphate Donors

### HTP Screening for Improved TdT Variants

[0575] SEQ ID NO: 4654 was selected as the parent TdT enzyme. Libraries of engineered genes were produced from the parent gene using various techniques (e.g., saturation mutagenesis and recombination of previously identified beneficial mutations). The polypeptides encoded by each gene were produced in HTP and prepared as described in Table 71.1.

[0576] Reactions were performed in 96-well or 384-well format BioRad PCR plates. Reactions included 10-500 μM oligonucleotide, 100-600 μM nucleotide triphosphate, 20-100 mM buffer, and 250-600 μM cobalt (II) chloride. The reactions were set up as follows: (i) all reaction components, except for TdT, were pre-mixed in a single solution, and was aliquoted into each well of the reaction plates (ii) TdT lysate solution was then added into the wells to initiate the reaction. The reaction plate was heat-sealed with a peelable aluminum seal and incubated in a thermocycler at the indicated temperature and reaction time, then held at 4° C. until the reaction was quenched. Reactions were quenched and processed for CE analysis as described in Example 4.

TABLE 71.1
Reaction conditions

Lysis buffer-TEA (50 mM, pH 7.5), 0.1 g/L lysozyme; Reaction buffer-20 mM TEA, 0.25 mM CoCl₂,
pH 7.8; Lysate concentration (vol %)-25; Preincubation Temp (C.)-65; Preincubation Time (min)-60;
Reaction temperature (C.)-50; Reaction Time (min)-60; Reaction volume (μL) −1; NTP (μM)-mATP-
3P; NTP conc (μM)-100; Oligonucleotide-5′-6-FAM-T15mAmU*mG; Substrate conc (μM)-50;
Product -5′-6-FAM-T15mAmU*mGmA-3P.

[0577] Activity relative to SEQ ID NO: 4654 (Activity FIOP) was calculated as the percent product of the variant, defined as the sum of the area of products divided by the sum of the total peak area, compared with the percent product observed by the reaction with SEQ ID NO: 4654 (where the percent product may be set as the average of replicates or else the highest single sample as appropriate). The results are shown in Table 71.2.

TABLE 71.2

| | | FIOP Product Peak Area |
|---|---|---|
| SEQ ID NO: | Amino Acid Differences | Relative to SEQ ID NO: |
| (nt/aa) | (Relative to SEQ ID NO: 4654) | 4654 |
| 4811/4812 | Q375G/G405L/K406S | +++ |
| 4813/4814 | W480D/L483R | +++ |
| 4815/4816 | N190M/L380V/G405L | ++ |
| 4817/4818 | W394T/W480D | ++ |
| 4819/4820 | Q301S/W394T/W480D | ++ |
| 4821/4822 | N190M/G405L/K406S | ++ |
| 4823/4824 | Q375G | ++ |
| 4825/4826 | V272A/A318E/W480D/L483R | ++ |
| 4827/4828 | N190M | ++ |
| 4829/4830 | V272A/Q301S/E393K/W394T/W480D | + |
| 4831/4832 | Q375G/G405L | + |
| 4833/4834 | W394T | + |
| 4835/4836 | N190M/Q375G | + |
| 4837/4838 | N190M/Q375G/L380V | + |
| 4839/4840 | Q375G/L380V | + |
| 4841/4842 | N190M/D197N/Y308Q | + |
| 4843/4844 | N190M/Y308Q/L380V/G405L | + |
| 4845/4846 | L380V | + |
| 4847/4848 | A318E | + |

“Levels of increased activity were determined relative to the reference polypeptide of SEQ ID NO: 4654 and defined as follows: ““+”” 1.06 to 1.28, ““++”” 1.28 to 1.46, ““+++”” 1.46 to 1.67”

### Example 72

### Improvements Over SEQ ID NO: 4850 in the Extension of Oligonucleotide Acceptor Molecules with Nucleotide Triphosphate Donors

### HTP Screening for Improved TdT Variants

[0578] SEQ ID NO: 4814 was selected as the parent TdT enzyme and the gene was re-cloned into pCK900 to re-introduce a missing histidine in the N-terminal poly-histidine sequence, generating SEQ ID NO: 4850. Libraries of engineered genes were produced from the parent gene using various techniques (e.g., saturation mutagenesis and recombination of previously identified beneficial mutations). The polypeptides encoded by each gene were produced in HTP and prepared as described in Table 72.1.

[0579] Reactions were performed in 96-well or 384-well format BioRad PCR plates. Reactions included 10-500 μM oligonucleotide, 100-600 μM nucleotide triphosphate, 20-100 mM buffer, and 250-600 μM cobalt (II) chloride. The reactions were set up as follows: (i) all reaction components, except for TdT, were pre-mixed in a single solution, and was aliquoted into each well of the reaction plates (ii) TdT lysate solution was then added into the wells to initiate the reaction. The reaction plate was heat-sealed with a peelable aluminum seal and incubated in a thermocycler at the indicated temperature and reaction time, then held at 4° C. until the reaction was quenched. Reactions were quenched and processed for CE analysis as described in Example 4.

TABLE 72.1
Reaction conditions

Lysis buffer-TEA (50 mM, pH 7.5), 0.1 g/L lysozyme; Reaction buffer-20 mM TEA, 0.25 mM CoCl2,
pH 7.8; Lysate concentration (vol %)-0.25; Preincubation Temp (C.)-48; Preincubation Time (min)-60;
Reaction temperature (C.)-48; Reaction Time (min)-60; Reaction volume (μL) −0.1; NTP (μM)-
*mUTP-3P; NTP conc (μM)-200; Oligonucleotide-5′-6-FAM-T11mC*mA*mG, 5′-6-FAM-
T17*mA*mGmA, 5′-6-FAM-T37mG*mA*mC, 5′-6-FAM-T42*mA*mCmU; Substrate conc (μM)-25
μM each of four oligo; Product -5′-6-FAM-T11mC*mA*mG*mU-3P, 5′-6-FAM-
T17*mA*mGmA*mU-3P, 5′-6-FAM-T37mG*mA*mC*mU-3P, 5′-6-FAM-T42*mA*mCmU*mU-3P.

[0580] Activity relative to SEQ ID NO: 4850 (Activity FIOP) was calculated as the percent product of the variant, defined as the sum of the area of products in the multiplexed assay divided by the sum of the total peak area, compared with the percent product observed by the reaction with SEQ ID NO: 4850 (where the percent product may be set as the average of replicates or else the highest single sample as appropriate). The results are shown in Table 72.2.

TABLE 72.2

| | | FIOP Product Peak Area |
|---|---|---|
| SEQ ID NO: | Amino Acid Differences | Relative to SEQ ID NO: |
| (nt/aa) | (Relative to SEQ ID NO: 4850) | 4850 |
| 4851/4852 | L298F/P300E/W395L | +++ |
| 4853/4854 | L298F/P300E/V328A/W395L | +++ |
| 4855/4856 | E193V/L307T | +++ |
| 4857/4858 | K297P/P300S | +++ |
| 4859/4860 | K297P/L298F/P300T/R392S | +++ |
| 4861/4862 | L298F/P300S/V328A | +++ |
| 4863/4864 | K297P/P300E/V328A | +++ |
| 4865/4866 | L298F/P300E/R392S/W395L | ++ |
| 4867/4868 | P300E/R392S/W395L | ++ |
| 4869/4870 | A319P | ++ |
| 4871/4872 | L298F/P300S/R392S/W395L/D492E | + |
| 4873/4874 | E190R/D322N | + |
| 4875/4876 | L298F/P300E/D481W | + |
| 4877/4878 | D492E | + |
| 4879/4880 | D322N | + |
| 4881/4882 | P300T | + |
| 4883/4884 | L298F/P300T/L360V | + |
| 4885/4886 | P300E | + |
| 4887/4888 | E193V | + |
| 4889/4890 | S261A/D322N/L421V | + |
| 4891/4892 | L298F/P300S/R392S/W395L | + |
| 4893/4894 | L421V | + |
| 4895/4896 | R392S | + |
| 4897/4898 | R189K/E193V/A207V/L307T/Q353R | + |
| 4899/4900 | R189K | + |

“Levels of increased activity were determined relative to the reference polypeptide of SEQ ID NO: 4850 and defined as follows: ““+”” 1.17 to 1.45, ““++”” 1.45 to 1.70, ““+++”” 1.70 to 1.89”

### Example 73

### Improvements Over SEQ ID NO: 4856 in the Extension of Oligonucleotide Acceptor Molecules with Nucleotide Triphosphate Donors

### HTP Screening for Improved TdT Variants

[0581] SEQ ID NO: 4856 was selected as the parent TdT enzyme. Libraries of engineered genes were produced from the parent gene using various techniques (e.g., saturation mutagenesis and recombination of previously identified beneficial mutations). The polypeptides encoded by each gene were produced in HTP and prepared as described in Table 73.1.

[0582] Reactions were performed in 96-well or 384-well format BioRad PCR plates. Reactions included 10-500 μM oligonucleotide, 100-600 μM nucleotide triphosphate, 20-100 mM buffer, and 250-600 μM cobalt (II) chloride. The reactions were set up as follows: (i) all reaction components, except for TdT, were pre-mixed in a single solution, and was aliquoted into each well of the reaction plates (ii) TdT lysate solution was then added into the wells to initiate the reaction. The reaction plate was heat-sealed with a peelable aluminum seal and incubated in a thermocycler at the indicated temperature and reaction time, then held at 4° C. until the reaction was quenched. Reactions were quenched and processed for CE analysis as described in Example 4.

TABLE 73.1
Reaction conditions

Lysis buffer-TEA (50 mM, pH 7.5), 0.1 g/L lysozyme; Reaction buffer-20 mM TEA, 0.25 mM CoCl2,
pH 7.8; Lysate concentration (vol %)-0.25; Preincubation Temp (C.)-48; Preincubation Time (min)-60;
Reaction temperature (C.)-48; Reaction Time (min)-120; Reaction volume (μL) −0.1; NTP (μM)-
mATP-3P; NTP conc (μM)-200; Oligonucleotide-5′-6-FAM-T11mU*(2′dF)A*(2′dF)A, 5′-6-FAM-
T17*(2′dF)A*(2′dF)A(2′dF)G, 5′-6-FAM-T27(2′dF)GmA(2′dF)U, 5′-6-FAM-T47*mA(2′dF)A(2′dF)A;
Substrate conc (μM)-12.5 μM each of four oligo; Product -5′-6-FAM-T11mU*(2′dF)A*(2′dF)AmA-3P,
5′-6-FAM-T17*(2′dF)A*(2′dF)A(2′dF)GmA-3P, 5′-6-FAM-T27(2′dF)GmA(2′dF)UmA-3P, 5′-6-FAM-
T47*mA(2′dF)A(2′dF)AmA-3P.

[0583] Activity relative to SEQ ID NO: 4856 (Activity FIOP) was calculated as the percent product of the variant, defined as the sum of the area of products in the multiplexed assay divided by the sum of the total peak area, compared with the percent product observed by the reaction with SEQ ID NO: 4856 (where the percent product may be set as the average of replicates or else the highest single sample as appropriate). The results are shown in Table 73.2.

TABLE 73.2

| | | FIOP Product Peak Area |
|---|---|---|
| SEQ ID NO: | Amino Acid Differences | Relative to SEQ ID NO: |
| (nt/aa) | (Relative to SEQ ID NO: 4856) | 4856 |
| 4901/4902 | E394V | +++ |
| 4903/4904 | G354S | +++ |
| 4905/4906 | R392K | +++ |
| 4907/4908 | Q353S | +++ |
| 4909/4910 | E394A | +++ |
| 4911/4912 | Q302A/T307L | +++ |
| 4913/4914 | Q353R | +++ |
| 4915/4916 | A413G | ++ |
| 4917/4918 | L419G | ++ |
| 4919/4920 | M490E | ++ |
| 4921/4922 | L393V | ++ |
| 4923/4924 | Q302S/T307L | ++ |
| 4925/4926 | T317C | ++ |
| 4927/4928 | W395Y | ++ |
| 4929/4930 | R477Q | ++ |
| 4931/4932 | R392H | ++ |
| 4933/4934 | S495R | ++ |
| 4935/4936 | M490Q | ++ |
| 4937/4938 | L419V | + |
| 4939/4940 | S10N/A413S | + |
| 4941/4942 | Q397S | + |
| 4943/4944 | P436S/E512D | + |
| 4945/4946 | R477S | + |
| 4947/4948 | G402V | + |
| 4949/4950 | G460S | + |
| 4951/4952 | P364Q | + |
| 4953/4954 | S495Q | + |
| 4955/4956 | G460A | + |
| 4957/4958 | D412M | + |
| 4959/4960 | R392G | + |
| 4961/4962 | E486V | + |
| 4963/4964 | G460P | + |
| 4965/4966 | V268T | + |
| 4967/4968 | S362V | + |
| 4969/4970 | Q260R | + |
| 4971/4972 | D412G | + |
| 4973/4974 | G402T | + |
| 4975/4976 | P404Q | + |
| 4977/4978 | M490N | + |
| 4979/4980 | G518S | + |
| 4981/4982 | G402L | + |
| 4983/4984 | M490T | + |
| 4985/4986 | M490S | + |
| 4987/4988 | G402P | + |
| 4989/4990 | Q397G | + |
| 4991/4992 | G402K | + |
| 4993/4994 | M490V | + |
| 4995/4996 | P404L | + |
| 4997/4998 | L393R | + |

Levels of increased activity were determined relative to the reference polypeptide of SEQ ID NO: 4856 and defined as follows: “+” 1.02 to 1.22, “++” 1.22 to 1.44, “+++” 1.44 to 1.94

### Example 74

### Improvements Over SEQ ID NO: 4904 in the Extension of Oligonucleotide Acceptor Molecules with Nucleotide Triphosphate Donors

### HTP Screening for Improved TdT Variants

[0584] SEQ ID NO: 4904 was selected as the parent TdT enzyme. Libraries of engineered genes were produced from the parent gene using various techniques (e.g., saturation mutagenesis and recombination of previously identified beneficial mutations). The polypeptides encoded by each gene were produced in HTP and prepared as described in Table 74.1.

[0585] Reactions were performed in 96-well or 384-well format BioRad PCR plates. Reactions included 10-500 μM oligonucleotide, 100-600 M nucleotide triphosphate, 20-100 mM buffer, and 250-600 μM cobalt (II) chloride. The reactions were set up as follows: (i) all reaction components, except for TdT, were pre-mixed in a single solution, and was aliquoted into each well of the reaction plates (ii) TdT lysate solution was then added into the wells to initiate the reaction. The reaction plate was heat-sealed with a peelable aluminum seal and incubated in a thermocycler at the indicated temperature and reaction time, then held at 4° C. until the reaction was quenched. Reactions were quenched and processed for CE analysis as described in Example 4.

TABLE 74.1
Reaction conditions

Lysis buffer-TEA (50 mM, pH 7.5), 0.1 g/L lysozyme; Reaction buffer-20 mM TEA, 0.25 mM CoCl2,
pH 7.8; Lysate concentration (vol %)-0.25; Preincubation Temp (C.)-48; Preincubation Time (min)-60;
Reaction temperature (C.)-48; Reaction Time (min)-120; Reaction volume (μL) −1; NTP (μM)-fUTP-
3P; NTP conc (μM)-200; Oligonucleotide-5′-6-FAM-T11mAmAmA(2′dF)U, 5′-6-FAM-
T18mA(2′dF)GmA(2′dF)G, 5′-6-FAM-T26mU(2′dF)GmU(2′dF)C, 5′-6-FAM-T47*mA(2′dF)A(2′dF)A;
Substrate conc (μM)-37.5 μM each of four oligo; Product -5′-6-FAM-T11mAmAmA(2′dF)U(2′dF)U-
3P, 5′-6-FAM-T18mA(2′dF)GmA(2′dF)G(2′dF)U-3P, 5′-6-FAM-T26mU(2′dF)GmU(2′dF)C(2′dF)U-
3P, 5′-6-FAM-T47*mA(2′dF)A(2′dF)A(2′dF)U-3P.

[0586] Activity relative to SEQ ID NO: 4904 (Activity FIOP) was calculated as the percent product of the variant, defined as the sum of the area of products in the multiplexed assay divided by the sum of the total peak area, compared with the percent product observed by the reaction with SEQ ID NO: 4904 (where the percent product may be set as the average of replicates or else the highest single sample as appropriate). The results are shown in Table 74.2.

TABLE 74.2

| | | FIOP Product Peak Area |
|---|---|---|
| SEQ ID NO: | Amino Acid Differences | Relative to SEQ ID NO: |
| (nt/aa) | (Relative to SEQ ID NO: 4904) | 4904 |
| 4999/5000 | K297P/L298F/Y308N/R392K/W395Y | +++ |
| 5001/5002 | L194F/P300T/Q302A/A413G | +++ |
| 5003/5004 | P300E/T317C | +++ |
| 5005/5006 | W395Y | ++ |
| 5007/5008 | P300E | + |
| 5009/5010 | L298F/R392K/F525A | + |
| 5011/5012 | L194F/P300E/Q302S/D481M | + |
| 5013/5014 | E190R | + |
| 5015/5016 | P300T/M490E | + |
| 5017/5018 | E190R/P300T/R477Q/M490E | + |
| 5019/5020 | E190R/L287V/P300T/Q302A | + |

Levels of increased activity were determined relative to the reference polypeptide of SEQ ID NO: 4904 and defined as follows: “+” 1.01 to 1.15, “++” 1.15 to 1.32, “+++” 1.32 to 1.52

### Example 75

### Improvements Over SEQ ID NO: 5002 in the Extension of Oligonucleotide Acceptor Molecules with Nucleotide Triphosphate Donors

### HTP Screening for Improved TdT Variants

[0587] SEQ ID NO: 5002 was selected as the parent TdT enzyme. Libraries of engineered genes were produced from the parent gene using various techniques (e.g., saturation mutagenesis and recombination of previously identified beneficial mutations). The polypeptides encoded by each gene were produced in HTP and prepared as described in Table 75.1.

[0588] Reactions were performed in 96-well or 384-well format BioRad PCR plates. Reactions included 10-500 μM oligonucleotide, 100-600 μM nucleotide triphosphate, 20-100 mM buffer, and 250-600 μM cobalt (II) chloride. The reactions were set up as follows: (i) all reaction components, except for TdT, were pre-mixed in a single solution, and was aliquoted into each well of the reaction plates (ii) TdT lysate solution was then added into the wells to initiate the reaction. The reaction plate was heat-sealed with a peelable aluminum seal and incubated in a thermocycler at the indicated temperature and reaction time, then held at 4° C. until the reaction was quenched. Reactions were quenched and processed for CE analysis as described in Example 4.

TABLE 75.1
Reaction conditions

Lysis buffer-TEA (50 mM, pH 7.5), 0.1 g/L lysozyme; Reaction buffer-20 mM TEA, 0.25 mM CoCl2,
pH 7.8; Lysate concentration (vol %)-0.25; Preincubation Temp (C.)-48; Preincubation Time (min)-60;
Reaction temperature (C.)-48; Reaction Time (min)-120; Reaction volume (μL) −1; NTP (μM)-mATP-
3P; NTP conc (μM)-300; Oligonucleotide-5′-6-FAM-T18mA(2′dF)GmA(2′dF)G, 5′-6-FAM-
T26mU(2′dF)GmU(2′dF)C, 5′-6-FAM-T46mA(2′dF)GmU(2′dF)G, 5′-6-FAM-
T51mU*(2′dF)A*(2′dF)A(2′dF)G; Substrate conc (μM)-62.5 μM each of four oligo; Product -5′-6-
FAM-T18mA(2′dF)GmA(2′dF)GmA-3P, 5′-6-FAM-T26mU(2′dF)GmU(2′dF)CmA-3P, 5′-6-FAM-
T46mA(2′dF)GmU(2′dF)GmA-3P, 5′-6-FAM-T51mU*(2′dF)A*(2′dF)A(2′dF)GmA-3P.

[0589] Activity relative to SEQ ID NO: 5002 (Activity FIOP) was calculated as the percent product of the variant, defined as the sum of the area of products in the multiplexed assay divided by the sum of the total peak area, compared with the percent product observed by the reaction with SEQ ID NO: 5002 (where the percent product may be set as the average of replicates or else the highest single sample as appropriate). The results are shown in Table 75.2.

TABLE 75.2

| | | FIOP Product Peak Area |
|---|---|---|
| SEQ ID NO: | Amino Acid Differences | Relative to SEQ ID NO: |
| (nt/aa) | (Relative to SEQ ID NO: 5002) | 5002 |
| 5021/5022 | L298F/R392K/E394V/M490E | +++ |
| 5023/5024 | R392K/E394V | +++ |
| 5025/5026 | L393V/E394V/R433H/R477V/M490E | +++ |
| 5027/5028 | R392K/L393V/E394V/R433H | +++ |
| 5029/5030 | R392K/E394V/R477V/S495Q | +++ |
| 5031/5032 | L298F/A302S/R392K/L393V/E394A/R433H | +++ |
| 5033/5034 | R392K/E394V/S495Q | +++ |
| 5035/5036 | E394V/M490E | +++ |
| 5037/5038 | L298F/L393V/E394V/W395Y/R433H/R477V | +++ |
| 5039/5040 | E394V/R477V | +++ |
| 5041/5042 | L298F/E394V/R433H | +++ |
| 5043/5044 | R392H/E394A/R433H/R477L | +++ |
| 5045/5046 | L298F/R392K/L393V/E394V | +++ |
| 5047/5048 | R392H/L393V/E394V/M490E | ++ |
| 5049/5050 | R392K/L393V/E394V/R477V/S495Q | ++ |
| 5051/5052 | F194W | ++ |
| 5053/5054 | I324M | ++ |
| 5055/5056 | Y309R | ++ |
| 5057/5058 | E190R/F194L | ++ |
| 5059/5060 | I208V | ++ |
| 5061/5062 | S472T | ++ |
| 5063/5064 | K274V | ++ |
| 5065/5066 | E526L | ++ |
| 5067/5068 | F194L | ++ |
| 5069/5070 | R392H/L393V/E394A/R477L | + |
| 5071/5072 | E526Y | + |
| 5073/5074 | L298F/R392K/L393V/E394A/R477L | + |
| 5075/5076 | K274G | + |
| 5077/5078 | K274W | + |
| 5079/5080 | R392H/E394V/R433H/S495Q | + |
| 5081/5082 | I208S | + |
| 5083/5084 | F194L/D198Q | + |
| 5085/5086 | M466V | + |
| 5087/5088 | F194L/D198V | + |
| 5089/5090 | G411L/G413A | + |
| 5091/5092 | L359C | + |
| 5093/5094 | F194L/D198G | + |
| 5095/5096 | E523T | + |
| 5097/5098 | A313S | + |
| 5099/5100 | V273S | + |
| 5101/5102 | L298F/A302S/R392K/E394A | + |
| 5103/5104 | V273Q | + |
| 5105/5106 | V273M/Q347F/S354G | + |
| 5107/5108 | R281Q | + |
| 5109/5110 | I361L | + |
| 5111/5112 | I324T | + |
| 5113/5114 | L360V | + |
| 5115/5116 | R473S | + |
| 5117/5118 | L359V | + |
| 5119/5120 | A463V | + |
| 5121/5122 | L202T | + |
| 5123/5124 | A408G/G413A | + |
| 5125/5126 | R477L | + |
| 5127/5128 | R392K/E394A/W395Y | + |
| 5129/5130 | R281G | + |
| 5131/5132 | L298I/T300P/A302Q | + |
| 5133/5134 | G460S/F525A | + |
| 5135/5136 | L298F/L393V/E394V/R477L/S495Q | + |
| 5137/5138 | F194L/D198P | + |
| 5139/5140 | V290A | + |
| 5141/5142 | L393V/E394A | + |
| 5143/5144 | R314L | + |
| 5145/5146 | A408L/G413A | + |
| 5147/5148 | P352T | + |
| 5149/5150 | Y308N/G402V/G460A | + |
| 5151/5152 | E190T/F194L | + |
| 5153/5154 | S405T | + |
| 5155/5156 | E190L/F194L | + |
| 5157/5158 | A463P | + |
| 5159/5160 | F194Y | + |
| 5161/5162 | G413A | + |
| 5163/5164 | T300P/A302Q/K303V | + |
| 5165/5166 | D492R | + |
| 5167/5168 | G11D/E523R | + |
| 5169/5170 | L467A | + |
| 5171/5172 | I208G | + |
| 5173/5174 | A264S | + |

“Levels of increased activity were determined relative to the reference polypeptide of SEQ ID NO: 5002 and defined as follows: ““+”” 1.02 to 1.37, ““++”” 1.37 to 1.75, ““+++”” 1.75 to 2.53”

### Example 76

### Improvements Over SEQ ID NO: 5028 in the Extension of Oligonucleotide Acceptor Molecules with Nucleotide Triphosphate Donors

### HTP Screening for Improved TdT Variants

[0590] SEQ ID NO: 5028 was selected as the parent TdT enzyme. Libraries of engineered genes were produced from the parent gene using various techniques (e.g., saturation mutagenesis and recombination of previously identified beneficial mutations). The polypeptides encoded by each gene were produced in HTP and prepared as described in Table 76.1.

[0591] Reactions were performed in 96-well or 384-well format BioRad PCR plates. Reactions included 10-500 μM oligonucleotide, 100-600 μM nucleotide triphosphate, 20-100 mM buffer, and 250-600 μM cobalt (II) chloride. The reactions were set up as follows: (i) all reaction components, except for TdT, were pre-mixed in a single solution, and was aliquoted into each well of the reaction plates (ii) TdT lysate solution was then added into the wells to initiate the reaction. The reaction plate was heat-sealed with a peelable aluminum seal and incubated in a thermocycler at the indicated temperature and reaction time, then held at 4 FC until the reaction was quenched. Reactions were quenched and processed for CE analysis as described in Example 4.

TABLE 76.1
Reaction conditions

Lysis buffer-TEA (50 mM, pH 7.5), 0.1 g/L lysozyme; Reaction buffer-20 mM TEA, 0.25 mM CoCl2,
pH 7.8; Lysate concentration (vol %)-0.25; Preincubation Temp (C.)-48; Preincubation Time (min)-60;
Reaction temperature (C.)-48; Reaction Time (min)-120; Reaction volume (μL) −0.1; NTP (μM)-fUTP-
3P; NTP conc (μM)-300; Oligonucleotide-5′-6-FAM-T11mCmCmU(2′dF)A, 5′-6-FAM-
T31mU(2′dF)CmA(2′dF)U, 5′-6-FAM-T41mA(2′dF)U(2′dF)C(2′dF)C, 5′-6-FAM-
T51mU*(2′dF)A*(2′dF)A(2′dF)G; Substrate conc (μM)-62.5 uM each of four oligo; Product -5′-6-
FAM-T11mCmCmU(2′dF)A(2′dF)U-3P, 5′-6-FAM-T31mU(2′dF)CmA(2′dF)U(2′dF)U-3P, 5′-6-FAM-
T41mA(2′dF)U(2′dF)C(2′dF)C(2′dF)U-3P, 5′-6-FAM-T51mU*(2′dF)A*(2′dF)A(2′dF)G(2′dF)U-3P.

[0592] Activity relative to SEQ ID NO: 5028 (Activity FIOP) was calculated as the percent product of the variant, defined as the sum of the area of products in the multiplexed assay divided by the sum of the total peak area, compared with the percent product observed by the reaction with SEQ ID NO: 5028 (where the percent product may be set as the average of replicates or else the highest single sample as appropriate). The results are shown in Table 76.2.

TABLE 76.2

| | | FIOP Product Peak Area |
|---|---|---|
| SEQ ID NO: | Amino Acid Differences | Relative to SEQ ID NO: |
| (nt/aa) | (Relative to SEQ ID NO: 5028) | 5028 |
| 5175/5176 | K274W | +++ |
| 5177/5178 | F194L/I208V/G411L | +++ |
| 5179/5180 | F194L/Y309R | +++ |
| 5181/5182 | V273S/K274W | +++ |
| 5183/5184 | F194L/D198V | ++ |
| 5185/5186 | F194W | ++ |
| 5187/5188 | K274V/L359V/E526Y | ++ |
| 5189/5190 | K274V | ++ |
| 5191/5192 | K274G/R281Q/E526Y | ++ |
| 5193/5194 | D198V/I208S | ++ |
| 5195/5196 | Y309R/A313S/G411L | ++ |
| 5197/5198 | V82I/F194L/D198G/A313S | ++ |
| 5199/5200 | M466V/E526Y | ++ |
| 5201/5202 | Y309R | ++ |
| 5203/5204 | F194L/D198V/G411L | ++ |
| 5205/5206 | G411L | ++ |
| 5207/5208 | F194L/D198Q | + |
| 5209/5210 | K274M/E523T | + |
| 5211/5212 | F194W/A313S | + |
| 5213/5214 | D198Q/I208S/A313S/G411L | + |
| 5215/5216 | F194L | + |
| 5217/5218 | F194W/G411L | + |
| 5219/5220 | I324M/E526Y | + |
| 5221/5222 | F194W/D198V/A313S | + |
| 5223/5224 | M466V | + |
| 5225/5226 | F194L/D198V/Y309R | + |
| 5227/5228 | E523T | + |
| 5229/5230 | E526Y | + |
| 5231/5232 | D198Q/I208V/Y309R/G411L | + |
| 5233/5234 | D198Q | + |
| 5235/5236 | F194L/D198Q/I208V/A313S | + |
| 5237/5238 | V273Q/K274G | + |
| 5239/5240 | F194W/D198Q | + |
| 5241/5242 | F194W/D198V | + |
| 5243/5244 | D198G | + |

“Levels of increased activity were determined relative to the reference polypeptide of SEQ ID NO: 5028 and defined as follows: ““+”” 1.02 to 1.17, ““++”” 1.17 to 1.28, ““+++”” 1.28 to 1.56”

### Example 77

### Improvements Over SEQ ID NO: 5192 in the Extension of Oligonucleotide Acceptor Molecules with Nucleotide Triphosphate Donors

### HTP Screening for Improved TdT Variants

[0593] SEQ ID NO: 5192 was selected as the parent TdT enzyme. Libraries of engineered genes were produced from the parent gene using various techniques (e.g., saturation mutagenesis and recombination of previously identified beneficial mutations). The polypeptides encoded by each gene were produced in HTP and prepared as described in Table 77.1.

[0594] Reactions were performed in 96-well or 384-well format BioRad PCR plates. Reactions included 10-500 μM oligonucleotide, 100-600 μM nucleotide triphosphate, 20-100 mM buffer, and 250-600 μM cobalt (II) chloride. The reactions were set up as follows: (i) all reaction components, except for TdT, were pre-mixed in a single solution, and was aliquoted into each well of the reaction plates (ii) TdT lysate solution was then added into the wells to initiate the reaction. The reaction plate was heat-sealed with a peelable aluminum seal and incubated in a thermocycler at the indicated temperature and reaction time, then held at 4° C. until the reaction was quenched. Reactions were quenched and processed for CE analysis as described in Example 4.

TABLE 77.1
Reaction conditions

Lysis buffer-TEA (50 mM, pH 7.5), 0.1 g/L lysozyme; Reaction buffer-100 mM TEA, 0.6 mM CoCl2,
pH 7.8; Lysate concentration (vol %)-0.25; Preincubation Temp (C.)-48; Preincubation Time (min)-60;
Reaction temperature (C.)-48; Reaction Time (min)-60; Reaction volume (μL) −0.1; NTP (μM)-mUTP-
3P; NTP conc (μM)-480; Oligonucleotide-5′-6-FAM-T16*(2′dF)C*mA(2′dF)A(2′dF)A, 5′-6-FAM-
T21mU(2′dF)CmU(2′dF)C, 5′-6-FAM-T31mAmAmA(2′dF)G, 5′-6-FAM-T46mA(2′dF)GmU(2′dF)G;
Substrate conc (μM)-100 μM each of four oligo; Product -5′-6-FAM-
T16*(2′dF)C*mA(2′dF)A(2′dF)AmU-3P, 5′-6-FAM-T21mU(2′dF)CmU(2′dF)CmU-3P, 5′-6-FAM-
T31mAmAmA(2′dF)GmU-3P, 5′-6-FAM-T46mA(2′dF)GmU(2′dF)GmU-3P.

[0595] Activity relative to SEQ ID NO: 5192 (Activity FIOP) was calculated as the percent product of the variant, defined as the sum of the area of products in the multiplexed assay divided by the sum of the total peak area, compared with the percent product observed by the reaction with SEQ ID NO: 5192 (where the percent product may be set as the average of replicates or else the highest single sample as appropriate). The results are shown in Table 77.2.

TABLE 77.2

| | | FIOP Product Peak Area |
|---|---|---|
| SEQ ID NO: | Amino Acid Differences | Relative to SEQ ID NO: |
| (nt/aa) | (Relative to SEQ ID NO: 5192) | 5192 |
| 5245/5246 | V394Y | +++ |
| 5247/5248 | V394I | +++ |
| 5249/5250 | T200S | +++ |
| 5251/5252 | R177L | +++ |
| 5253/5254 | Q179L | +++ |
| 5255/5256 | L326Q | +++ |
| 5257/5258 | K430R | ++ |
| 5259/5260 | K508S | ++ |
| 5261/5262 | L403V | ++ |
| 5263/5264 | V394F | ++ |
| 5265/5266 | E520I/Y526E | ++ |
| 5267/5268 | T200A | ++ |
| 5269/5270 | T200R | ++ |
| 5271/5272 | T295H | ++ |
| 5273/5274 | D198L | ++ |
| 5275/5276 | T200K | ++ |
| 5277/5278 | V193R | ++ |
| 5279/5280 | K383H | ++ |
| 5281/5282 | T200V | ++ |
| 5283/5284 | L326T | ++ |
| 5285/5286 | K508A | ++ |
| 5287/5288 | V394Q | ++ |
| 5289/5290 | Q329K | ++ |
| 5291/5292 | L96S/T295N | + |
| 5293/5294 | V394L | + |
| 5295/5296 | T295K | + |
| 5297/5298 | D199R | + |
| 5299/5300 | K383R | + |
| 5301/5302 | V394H | + |
| 5303/5304 | T200Y | + |
| 5305/5306 | E485L | + |
| 5307/5308 | V193F | + |
| 5309/5310 | D409S | + |
| 5311/5312 | V193S | + |
| 5313/5314 | L403R | + |
| 5315/5316 | T295G | + |
| 5317/5318 | N176H | + |
| 5319/5320 | T300A/V394F | + |
| 5321/5322 | I187V | + |
| 5323/5324 | K195L | + |
| 5325/5326 | D199S | + |
| 5327/5328 | L326M/N380R | + |
| 5329/5330 | E203A | + |
| 5331/5332 | E203C | + |
| 5333/5334 | V304I | + |
| 5335/5336 | E203L | + |
| 5337/5338 | T200E | + |
| 5339/5340 | Q376R | + |
| 5341/5342 | R177T | + |
| 5343/5344 | V193C | + |
| 5345/5346 | T200Q | + |
| 5347/5348 | Q329L | + |
| 5349/5350 | V394S | + |
| 5351/5352 | K377R | + |

“Levels of increased activity were determined relative to the reference polypeptide of SEQ ID NO: 5192 and defined as follows: ““+”” 1.02 to 1.14, ““++”” 1.14 to 1.23, ““+++”” 1.23 to 1.47”

### Example 78

### Improvements Over SEQ ID NO: 5192 in the Extension of Oligonucleotide Acceptor Molecules with Nucleotide Triphosphate Donors

### HTP Screening for Improved TdT Variants

[0596] SEQ ID NO: 5192 was selected as the parent TdT enzyme. Libraries of engineered genes were produced from the parent gene using various techniques (e.g., saturation mutagenesis and recombination of previously identified beneficial mutations). The polypeptides encoded by each gene were produced in HTP and prepared as described in Table 78.1.

[0597] Reactions were performed in 96-well or 384-well format BioRad PCR plates. Reactions included 10-500 μM oligonucleotide, 100-600 0M nucleotide triphosphate, 20-100 mM buffer, and 250-600 μM cobalt (II) chloride. The reactions were set up as follows: (i) all reaction components, except for TdT, were pre-mixed in a single solution, and was aliquoted into each well of the reaction plates (ii) TdT lysate solution was then added into the wells to initiate the reaction. The reaction plate was heat-sealed with a peelable aluminum seal and incubated in a thermocycler at the indicated temperature and reaction time, then held at 4° C. until the reaction was quenched. Reactions were quenched and processed for CE analysis as described in Example 4.

TABLE 78.1
Reaction conditions

Lysis buffer-TEA (50 mM, pH 7.5), 0.1 g/L lysozyme; Reaction buffer-100 mM TEA, 0.6 mM CoCl2,
pH 7.8; Lysate concentration (vol %)-25; Preincubation Temp (C.)-65; Preincubation Time (min)-60;
Reaction temperature (C.)-50; Reaction Time (min)-60; Reaction volume (μL) −1; NTP (μM)-fATP-3P;
NTP conc (μM)-200; Oligonucleotide-5′-6-FAM-T15mAmU*mG; Substrate conc (M)-100; Product -
5′-6-FAM-T15mAmU*mG(2′dF)A-3P.

[0598] Activity relative to SEQ ID NO: 5192 (Activity FIOP) was calculated as the percent product of the variant, defined as the sum of the area of products divided by the sum of the total peak area, compared with the percent product observed by the reaction with SEQ ID NO: 5192 (where the percent product may be set as the average of replicates or else the highest single sample as appropriate). The results are shown in Table 78.2.

TABLE 78.2

| | | FIOP Product Peak Area |
|---|---|---|
| SEQ ID NO: | Amino Acid Differences | Relative to SEQ ID NO: |
| (nt/aa) | (Relative to SEQ ID NO: 5192) | 5192 |
| 5353/5354 | L326R | +++ |
| 5291/5292 | L96S/T295N | +++ |
| 5327/5328 | L326M/N380R | +++ |
| 5355/5356 | E203G | +++ |
| 5357/5358 | S184H | +++ |
| 5359/5360 | Q169E | ++ |
| 5361/5362 | N197F | ++ |
| 5299/5300 | K383R | ++ |
| 5363/5364 | Q179G | ++ |
| 5347/5348 | Q329L | + |
| 5365/5366 | K383S | + |
| 5367/5368 | S292L | + |
| 5265/5266 | E520I/Y526E | + |
| 5369/5370 | D199G | + |
| 5371/5372 | T295L | + |
| 5261/5262 | L403V | + |
| 5373/5374 | W325M | + |
| 5293/5294 | V394L | + |
| 5345/5346 | T200Q | + |
| 5375/5376 | Q373G | + |
| 5377/5378 | V394W | + |
| 5287/5288 | V394Q | + |
| 5279/5280 | K383H | + |
| 5285/5286 | K508A | + |
| 5379/5380 | D198S | + |
| 5381/5382 | S184G | + |
| 5383/5384 | R177W | + |
| 5349/5350 | V394S | + |
| 5385/5386 | S292M | + |
| 5351/5352 | K377R | + |
| 5255/5256 | L326Q | + |
| 5387/5388 | S292Q | + |
| 5389/5390 | S184P | + |
| 5391/5392 | S292R | + |
| 5393/5394 | N197M/T307A | + |
| 5395/5396 | K377N | + |

“Levels of increased activity were determined relative to the reference polypeptide of SEQ ID NO: 5192 and defined as follows: ““+”” 1.08 to 2.16, ““++”” 2.16 to 3.64, ““+++”” 3.64 to 7.07”

### Example 79

### Improvements Over SEQ ID NO: 5246 in the Extension of Oligonucleotide Acceptor Molecules with Nucleotide Triphosphate Donors

### HTP Screening for Improved TdT Variants

[0599] SEQ ID NO: 5246 was selected as the parent TdT enzyme. Libraries of engineered genes were produced from the parent gene using various techniques (e.g., saturation mutagenesis and recombination of previously identified beneficial mutations). The polypeptides encoded by each gene were produced in HTP and prepared as described in Table 79.1.

[0600] Reactions were performed in 96-well or 384-well format BioRad PCR plates. Reactions included 10-500 μM oligonucleotide, 100-600 μM nucleotide triphosphate, 20-100 mM buffer, and 250-600 μM cobalt (II) chloride. The reactions were set up as follows: (i) all reaction components, except for TdT, were pre-mixed in a single solution, and was aliquoted into each well of the reaction plates (ii) TdT lysate solution was then added into the wells to initiate the reaction. The reaction plate was heat-sealed with a peelable aluminum seal and incubated in a thermocycler at the indicated temperature and reaction time, then held at 4° C. until the reaction was quenched. Reactions were quenched and processed for CE analysis as described in Example 4.

TABLE 79.1
Reaction conditions

Lysis buffer-TEA (50 mM, pH 7.5), 0.1 g/L lysozyme; Reaction buffer-100 mM TEA, 0.6 mM CoCl₂,
pH 7.8; Lysate concentration (vol %)-25; Preincubation Temp (C.)-58.5; Preincubation Time (min)-60;
Reaction temperature (C.)-50; Reaction Time (min)-60; Reaction volume (μL) −1; NTP (μM)-fATP-3′P;
NTP conc (μM)-480; Oligonucleotide-5′-6-FAM-T15mAmUmCmU, T15mAmUmCmU; Substrate
conc (μM)-100 μM FAM-labelled, 400 μM unlabelled; Product (detected)-5′-6-FAM-
T15mAmUmCmU(2′dF)A-3′P.

[0601] Activity relative to SEQ ID NO: 5246 (Activity FIOP) was calculated as the percent product of the variant, defined as the sum of the area of products divided by the sum of the total peak area, compared with the percent product observed by the reaction with SEQ ID NO: 5246 (where the percent product may be set as the average of replicates or else the highest single sample as appropriate). The results are shown in Table 79.2.

TABLE 79.2

| | | FIOP Product Peak Area |
|---|---|---|
| SEQ ID NO: | Amino Acid Differences | Relative to SEQ ID NO: |
| (nt/aa) | (Relative to SEQ ID NO: 5246) | 5246 |
| 5397/5398 | E233R | +++ |
| 5399/5400 | E485L | +++ |
| 5401/5402 | R459M | ++ |
| 5403/5404 | L381Y | ++ |
| 5405/5406 | G365H | ++ |
| 5407/5408 | L381H | ++ |
| 5409/5410 | E367S | + |
| 5411/5412 | N197Q | + |
| 5413/5414 | G365R | + |
| 5415/5416 | E233L | + |
| 5417/5418 | R180K | + |
| 5419/5420 | M441E | + |
| 5421/5422 | D336C | + |
| 5423/5424 | R459W | + |
| 5425/5426 | A252R | + |
| 5427/5428 | P364A | + |
| 5429/5430 | K384A | + |

“Levels of increased activity were determined relative to the reference polypeptide of SEQ ID NO: 5246 and defined as follows: ““+”” 1.02 to 1.28, ““++”” 1.28 to 1.52, ““+++”” 1.52 to 1.99”

### Example 80

### Improvements Over SEQ ID NO: 5246 in the Extension of Oligonucleotide Acceptor Molecules with Nucleotide Triphosphate Donors

### HTP Screening for Improved TdT Variants

[0602] SEQ ID NO: 5246 was selected as the parent TdT enzyme. Libraries of engineered genes were produced from the parent gene using various techniques (e.g., saturation mutagenesis and recombination of previously identified beneficial mutations). The polypeptides encoded by each gene were produced in HTP and prepared as described in Table 80.1.

[0603] Reactions were performed in 96-well or 384-well format BioRad PCR plates. Reactions included 10-500 μM oligonucleotide, 100-600 0M nucleotide triphosphate, 20-100 mM buffer, and 250-600 μM cobalt (II) chloride. The reactions were set up as follows: (i) all reaction components, except for TdT, were pre-mixed in a single solution, and was aliquoted into each well of the reaction plates (ii) TdT lysate solution was then added into the wells to initiate the reaction. The reaction plate was heat-sealed with a peelable aluminum seal and incubated in a thermocycler at the indicated temperature and reaction time, then held at 4° C. until the reaction was quenched. Reactions were quenched and processed for CE analysis as described in Example 4.

TABLE 80.1
Reaction conditions

Lysis buffer-TEA (50 mM, pH 7.5), 0.1 g/L lysozyme; Reaction buffer-100 mM TEA, 0.6 mM CoCl2,
pH 7.8; Lysate concentration (vol %)-25; Preincubation Temp (C.)-58.5; Preincubation Time (min)-60;
Reaction temperature (C.)-50; Reaction Time (min)-60; Reaction volume (μL) −1; NTP (μM)-fATP-3′P;
NTP conc (μM)-200; Oligonucleotide-5′-6-FAM-T15mAmU*mG, FAM-T15mAmU*mG; Substrate
conc (μM)-50 μM FAM-labelled, 50 μM unlabelled; Product (detected)-5′-6-FAM-
T15mAmU*mG(2′dF)A-3′P.

[0604] Activity relative to SEQ ID NO: 5246 (Activity FIOP) was calculated as the percent product of the variant, defined as the sum of the area of products divided by the sum of the total peak area, compared with the percent product observed by the reaction with SEQ ID NO: 5246 (where the percent product may be set as the average of replicates or else the highest single sample as appropriate). The results are shown in Table 80.2.

TABLE 80.2

| | Amino Acid | FIOP Product |
|---|---|---|
| | Differences | Peak Area |
| SEQ ID NO: | (Relative to SEQ | Relative to SEQ |
| (nt/aa) | ID NO: 5246) | ID NO: 5246 |
| 5431/5432 | D198L/T200K/E203G/T295N | +++ |
| 5433/5434 | R177W/T200K/T295N/L326M | +++ |
| 5435/5436 | T200K/N380R | +++ |
| 5437/5438 | S184H/T200K/T295N/L326M | ++ |
| 5439/5440 | T200K/L326M | ++ |
| 5441/5442 | D198L/T200K/E203G | ++ |
| 5443/5444 | R177W/T200K/E203G/T295N | ++ |
| 5445/5446 | D198L/T200K | ++ |
| 5447/5448 | E190M/T200K/E203G/T295N/N380R | ++ |
| 5449/5450 | S184H/D198L/T200K/E203G/T295N | ++ |
| 5451/5452 | T295N | + |
| 5453/5454 | E203G | + |
| 5455/5456 | E190M/T200K/T295N | + |
| 5457/5458 | R177W/D198L/T200K | + |
| 5459/5460 | D198L | + |
| 5461/5462 | R177W/T200K/E203G | + |
| 5463/5464 | E190M/D198L/T200K/E203G | + |
| 5465/5466 | E203G/N380R | + |

“Levels of increased activity were determined relative to the reference polypeptide of SEQ ID NO: 5246 and defined as follows: ““+”” 1.22 to 1.55, ““++”” 1.55 to 1.75, ““+++”” 1.75 to 1.90”

### Example 81

### Expression of Inorganic Pyrophosphatase-TdT Fusion Proteins

[0605] Synthetic genes encoding an N-terminal and C-terminal hexahistidine tagged version of two wild-type (WT) inorganic pyrophosphatases (SEQ ID NO: 3942 and 3944) were fused to a truncated TdT variant generating four IPP-TdT fusion constructs (SEQ ID NO: 5468, 5470, 5472, and 5474). The TdT was derived from SEQ ID NO: 5028 by deleting the first 156 amino acids. A GSGGTG linker was introduced between IPP and TdT. The fused proteins were constructed using well-established techniques (e.g Gibson assembly cloning). Fused proteins were subsequently expressed in an E. coli strain derived from W3110.

[0606] Cells transformed with the fusion protein expression constructs were grown at shake-flask scale using IPTG induction as described in Example 3. Cells were then lysed, purified, and dialyzed into storage buffer (20 mM Tris-HCl, pH 7.4, 100 mM KCl, 0.1 mM EDTA, and 50% glycerol). After overnight dialysis, protein samples were removed, and enzyme concentrations were measured by absorption at 280 nm using a NanoDrop™ 1000 spectrophotometer. Soluble protein concentrations are summarized in Table 81.1 below, showing relative purified protein product levels following shake-flask purification relative to SEQ ID NO: 5468.

TABLE 81.1

| | | Levels of Soluble |
|---|---|---|
| | Description of | Enzyme Production |
| SEQ ID NO: | IPP-TdT | (Relative to SEQ |
| (nt/aa) | fusion variant | ID NO: 5468) |
| 5467/5468 | N-terminal 6xhis tagged SEQ ID NO: | + |
| | 3942 fused with truncated | |
| | SEQ ID NO: 5028 | |
| 5469/5470 | N-terminal 6xhis tagged SEQ ID NO: | ++ |
| | 3944 fused with truncated | |
| | SEQ ID NO: 5028 | |
| 5471/5472 | C-terminal 6xhis tagged SEQ ID NO: | + |
| | 3942 fused with truncated | |
| | SEQ ID NO: 5028 | |
| 5473/5474 | C-terminal 6xhis tagged SEQ ID NO: | ++ |
| | 3944 fused with truncated | |
| | SEQ ID NO: 5028 | |

Levels of increased soluble enzyme production were relative to the reference polypeptide of SEQ ID NO: 5468 and defined as follows: 1.31 to 1.41, ““++”” 1.41 to 1.49, ““+++”” 1.49 to 1.48”

### Example 82

### Suppression of by-Products by IPP-TdT Fusion Proteins

[0607] TdT-IPP fusion proteins (SEQ ID NO: 5468, 5470, 5472, and 5474) described in Example 81 were assayed for activity and suppression of by-products and compared to reactions containing TdT SEQ ID NO: 5028 with no inorganic pyrophosphatase (control) and to reactions with TdT SEQ ID NO: 5028 with inorganic pyrophosphatases SEQ ID NO: 3942 or 3944.

[0608] Reactions were performed in 96-well format 200 μL BioRad PCR plates. Reactions included 400 μM oligonucleotide, 480 μM 3′phosphate blocked NTP, 10 μM TdT or IPP-TdT fusion, 0 or 0.5 μM IPP, 100 mM triethanolamine (pH 7.8), and 600 μM cobalt (II) chloride. The reactions were set up as follows: (i) all reaction components, except for TdT or IPP-TdT fusion and IPP, were pre-mixed in a single solution, and were aliquoted into each well of the 96-well plates (ii) IPP was then added if present, (iii) TdT or IPP-TdT fusion was then added into the wells to initiate the reaction. The reaction plate was heat-sealed with a peelable aluminum seal and incubated in a thermocycler at the indicated temperature and reaction time, then held at 4 5C until the reaction was quenched. Reactions were quenched and processed for CE analysis as described in Example 4.

TABLE 82.1
Reaction buffer-100 mM TEA, 0.6 mM CoCl₂, pH 7.8; Reaction temperature (C.)- 50; Reaction Time
(min)- 60; Reaction volume (μL)- 1; IPP concentration (μM)- 0 or 0.05; TdT or IPP-TdT fusion
concentration (μM)- 10; NTP (μM)-3′P-mATP; NTP conc (μM)- 480; Oligonucleotide- 5′-6-FAM-
T31mAmAmA(2′dF)G, or 5′-6-FAM-T16mC*mA*mGmA; Oligonucleotide conc (μM)- 400; Product-
5′-6-FAM-T31mAmAmA(2′dF)GmA-3′P, or 5′-6-FAM-T16mC*mA*mGmAmA-3′P; By-Product-
unknown.

[0609] The ratio of product to by-product relative to a control with TdT SEQ ID NO: 5028 without IPP was calculated as the area of percent area product/percent area by-product ratio of the reaction compared with the percent area product/percent area by-product ratio observed by the control reaction with no IPP present. The results are shown in Table 82.2.

TABLE 82.2
Suppression of TdT reaction by-products by IPP

| | | Percent area product/percent area by-product | |
|---|---|---|---|
| SEQ ID NO: (nt/aa) | | compared relative to no IPP control | |
| TdT or | | Reaction with | Reaction with |
| IPP-TdT | | 5′-6-FAM- | 5′-6-FAM- |
| fusion | IPP | T31mAmAmA(2′dF)G | T16mC*mA*mGmA |
| 5027/5028 | none | + | + |
| 5027/5028 | 3941/3942 | + | + |
| 5027/5028 | 3943/3944 | ++ | + |
| 5467/5468 | none | ++ | ++ |
| 5469/5470 | none | ++ | ++ |
| 5471/5472 | none | ++ | + |
| 5473/5474 | none | ++ | +++ |

Levels of the percent area product/percent area by-product were determined relative to the reference polypeptide of SEQ ID NO: 5028 (control reaction without IPP) and defined as follows: ““+”” 2.44 to 6.12, ““++”” 6.12 to 7.99 , ““+++”” 7.99 to 7.51”

### Example 83

### Activity Improvements Over Multiple Rounds of Evolution

[0610] Activity Improvement of Shake-Flask Purified TdT Variants with 3′Phosphate-Blocked Nucleotides and Modified RNA Oligonucleotide Substrates.

[0611] TdT variants of SEQ ID NO: 36, 660, 1596, 2956, 3674, 3918, 4850 and 5246 were produced in shake flask and purified as described in Example 3.

[0612] Reactions were performed in 96-well format 200 μL BioRad PCR plates. Reactions included 400 M oligonucleotide, 800 μM nucleotide triphosphate, 10 μM TdT, 5 μM IPP, 100 mM triethanolamine (pH 7.8), and 600 μM cobalt (II) chloride. The reactions were set up as follows: (i) all reaction components, except for TdT, were pre-mixed in a single solution, and was aliquoted into each well of the 96-well plates (ii) TdT solution was then added into the wells to initiate the reaction. The reaction plate was heat-sealed with a peelable aluminum seal and incubated in a thermocycler at the indicated temperature and reaction time, then held at 4° C. until the reaction was quenched. Reactions were quenched and processed for CE analysis as described in Example 4.

TABLE 83.1
Reaction buffer-100 mM TEA, 0.6 mM CoCl₂, pH 7.8; IPP SEQ ID NO: 3944 (μM)- 5; Reaction
temperature (C.)- 50; Reaction Time (min)- 60 min; Reaction volume (μL)- 1; TdT concentration (μM)-
10; NTP- as listed in Table 83.2; NTP conc (μM)-800; Oligonucleotide- as listed in table 83.2;
Oligonucleotide conc (μM)-400; Products- 5′-6-FAM-T11AmC*mA*mGmA-3′P; 5′-6-FAM-
T16mC*mA*mGmAmA-3′P; 5′-6-FAM-T21*mA*mGmAmAmA-3′P; 5′-6-FAM-
T26*mGmAmAmAmA-3′P; 5′-6-FAM-T31mAmAmA(2′dF)GmA-3′P; 5′-6-FAM-
T36mAmA(2′dF)GmAmA-3′P; 5′-6-FAM-T41(2′dF)GmA(2′dF)GmUmA-3′P; 5′-6-FAM-
T46mA(2′dF)GmU(2′dF)GmA-3′P; 5′-6-FAM-T51(2′dF)GmU(2′dF)GmU mU-3′P; 5′-6-FAM-
T56(2′dF)GmU(2′dF)CmUmU-3′P; 5′-6-FAM-T10(2′dF)CmU(2′dF)CmAmU-3′P; 5′-6-FAM-
T16mA(2′dF)GmA(2′dF)GmU-3′P; 5′-6-FAM-T21mU(2′dF)CmU(2′dF)CmU-3′P; 5′-6-FAM-
T26mU(2′dF)GmU(2′dF)CmU-3′P; 5′-6-FAM-T31mU(2′dF)CmAmUmU-3′P; 5′-6-FAM-
T41mAmUmCmU(2′dF)A-3′P; 5′-6-FAM-T46mUmCmUmU(2′dF)A-3′P; 5′-6-FAM-
T51mCmUmUmA(2′dF)A-3′P; 5′-6-FAM-T10mAmAmA(MOE)A(2′dF)A-3′P; 5′-6-FAM-
T12mAmG(MOE)C(2′dF)A-3′P; 5′-6-FAM-T26mCmCmU*mUmC-3′P; 5′-6-FAM-
T26mCmCmU*mU*mG-3′P; 5′-6-FAM-T26mCmCmU*mU*mU-3′P; 5′-6-FAM-
T26mCmCmU*mU(2′dF)G-3′P; 5′-6-FAM-T26mCmCmU*mU(2′dF)U-3′P; 5′-6-FAM-
T21*(2′dF)A*(2′dF)A(2′dF)GmAmC-3′P; 5′-6-FAM-T21*(2′dF)A*(2′dF)A(2′dF)GmA*mG-3′P; 5′-6-
FAM-T21*(2′dF)A*(2′dF)A(2′dF)GmA*mU-3′P; 5′-6-FAM-T21*(2′dF)A*(2′dF)A(2′dF)GmA(2′dF)G-
3′P; 5′-6-FAM-T21*(2′dF)A*(2′dF)A(2′dF)GmA(2′dF)U-3′P.

Percent conversion was calculated as the percent product of the variant, defined as the sum of the area of products divided by the sum of the total peak area. The results are shown in Table 83.2.

TABLE 83

| Reaction substrates | | Percent conversion to product by SEQ ID NO: (aa) | | | | | | | |
|---|---|---|---|---|---|---|---|---|---|
| Oligonucleotide | | (see Table 83.1 for list of products detected) | | | | | | | |
| Description | Nucleotide | 36 | 660 | 1596 | 2956 | 3674 | 3918 | 4850 | 5246 |
| 5′-6-FAM- | mATP- | ~ | ~ | ~ | ++ | +++ | +++ | +++ | +++ |
| T11AmC*mA*mG | 3′P | | | | | | | | |
| 5′-6-FAM- | mATP- | ~ | ~ | ~ | ~ | + | ++ | ++ | +++ |
| T16mC*mA*mGmA | 3′P | | | | | | | | |
| 5′-6-FAM- | mATP- | ~ | ~ | ~ | ~ | ~ | ++ | ++ | +++ |
| T21*mA*mGmAmA | 3′P | | | | | | | | |
| 5′-6-FAM- | mATP- | ~ | ~ | ~ | ~ | ~ | ++ | +++ | +++ |
| T26*mGmAmAmA | 3′P | | | | | | | | |
| 5′-6-FAM- | mATP- | ~ | ~ | ~ | + | + | + | + | +++ |
| T31mAmAmA(2′dF)G | 3′P | | | | | | | | |
| 5′-6-FAM- | mATP- | ~ | ~ | ~ | ~ | + | +++ | +++ | +++ |
| T36mAmA(2′dF)GmA | 3′P | | | | | | | | |
| 5′-6-FAM- | mATP- | ~ | ~ | ~ | ~ | ++ | +++ | +++ | +++ |
| T41(2′dF)GmA(2′dF)GmU | 3′P | | | | | | | | |
| 5′-6-FAM- | mATP- | ~ | ~ | ~ | ~ | ~ | ~ | ~ | +++ |
| T46mA(2′dF)GmU(2′dF)G | 3′P | | | | | | | | |
| 5′-6-FAM- | mUTP- | ~ | ~ | ~ | ~ | ++ | +++ | +++ | +++ |
| T51(2′dF)GmU(2′dF)GmU | 3′P | | | | | | | | |
| 5′-6-FAM- | mUTP- | ~ | ~ | ~ | ~ | + | ++ | +++ | +++ |
| T56(2′dF)GmU(2′dF)CmU | 3′P | | | | | | | | |
| 5′-6-FAM- | mUTP- | ~ | ~ | ~ | + | ++ | ++ | +++ | +++ |
| T10(2′dF)CmU(2′dF)CmA | 3′P | | | | | | | | |
| 5′-6-FAM- | mUTP- | ~ | ~ | ~ | ~ | ~ | + | + | +++ |
| T21mU(2′dF)CmU(2′dF)C | 3′P | | | | | | | | |
| 5′-6-FAM- | mUTP- | ~ | ~ | ~ | ~ | ~ | ~ | + | +++ |
| T26mU(2′dF)GmU(2′dF)C | 3′P | | | | | | | | |
| 5′-6-FAM- | mUTP- | ~ | ~ | ~ | ~ | +++ | +++ | +++ | +++ |
| T31mU(2′dF)CmAmU | 3′P | | | | | | | | |
| 5′-6-FAM- | mUTP- | ~ | ~ | ~ | ~ | + | +++ | +++ | +++ |
| T36(2′dF)CmAmUmC | 3′P | | | | | | | | |
| 5′-6-FAM- | fATP- | ~ | ~ | ~ | ~ | + | +++ | +++ | +++ |
| T41mAmUmCmU | 3′P | | | | | | | | |
| 5′-6-FAM- | fATP- | ~ | ~ | ~ | ~ | + | +++ | +++ | +++ |
| T46mUmCmUmU | 3′P | | | | | | | | |
| 5′-6-FAM- | fATP- | ~ | ~ | ~ | + | + | +++ | +++ | +++ |
| T51mCmUmUmA | 3′P | | | | | | | | |
| 5′-6-FAM- | fATP- | ~ | ~ | ~ | + | + | ++ | +++ | +++ |
| T10mAmAmA(MOE)A | 3′P | | | | | | | | |
| 5′-6-FAM- | fATP- | ~ | ~ | ~ | ~ | ~ | ++ | +++ | +++ |
| T12mAmG(MOE)C | 3′P | | | | | | | | |
| 5′-6-FAM- | mCTP- | ~ | ~ | ~ | + | + | +++ | +++ | +++ |
| T26mCmCmU*mU | 3′P | | | | | | | | |
| 5′-6-FAM- | *mGTP- | ~ | ~ | ~ | ~ | ~ | ++ | +++ | +++ |
| T26mCmCmU*mU | 3′P | | | | | | | | |
| 5′-6-FAM- | *mUTP- | ~ | ~ | ~ | ~ | ~ | +++ | +++ | +++ |
| T26mCmCmU*mU | 3′P | | | | | | | | |
| 5′-6-FAM- | mGTP- | ~ | ~ | ~ | ~ | ++ | +++ | +++ | +++ |
| T26mCmCmU*mU | 3′P | | | | | | | | |
| 5′-6-FAM- | mUTP- | ~ | ~ | ~ | ~ | ++ | +++ | +++ | +++ |
| T26mCmCmU*mU | 3′P | | | | | | | | |
| 5′-6-FAM- | mCTP- | ~ | ~ | ~ | +++ | +++ | ++ | +++ | +++ |
| T21*(2′dF)A*(2′dF)A | 3′P | | | | | | | | |
| (2′dF)GmA | | | | | | | | | |
| 5′-6-FAM- | *mGTP- | ~ | ~ | ~ | ~ | + | + | ++ | ++ |
| T21*(2′dF)A*(2′dF)A | 3′P | | | | | | | | |
| (2′dF)GmA | | | | | | | | | |
| 5′-6-FAM- | *mUTP- | ~ | ~ | ~ | + | + | + | ++ | +++ |
| T21*(2′dF)A*(2′dF)A | 3′P | | | | | | | | |
| (2′dF)GmA | | | | | | | | | |
| 5′-6-FAM- | mGTP- | ~ | ~ | ~ | +++ | +++ | ++ | +++ | +++ |
| T21*(2′dF)A*(2′dF)A | 3′P | | | | | | | | |
| (2′dF)GmA | | | | | | | | | |
| 5′-6-FAM- | mUTP- | ~ | ~ | ~ | +++ | +++ | ++ | +++ | +++ |
| T21*(2′dF)A*(2′dF)A | 3′P | | | | | | | | |
| (2′dF)GmA | | | | | | | | | |

Levels of activity were determined by the % conversion to product and defined as follows: “~” from 0-1, “+” from 1-10, “++” from 10-25, “+++” from 25-64.

### Example 84

### High Performance Liquid Chromatography (HPLC) Analysis of Nucleotides

[0613] A 5 to 20 μL volume of crude reaction product is diluted to a final total nucleotide concentration of 250 μM using 75% MeOH in milli-Q water as diluent. The reaction container is then vortexed and centrifuged at 4000 rpm for 5 min at 4° C. 100 μL is transferred from the supernatant to a 96 well round bottom plate and then 10 μL is injected onto an Ultimate 3000 HPLC system using a PAL autosampler according to the method outlined in table 84.1.

TABLE 84.1
Achiral HPLC Parameters (Ion Pairing Gradient)

| Instrument | Ultimate 3000 HPLC | |
|---|---|---|
| | System with a PAL | |
| | autosampler | |
| Column | Agilent Zorbax RR StableBond Aq, | |
| | 150 × 3.0 mm × 3.5 μm | |
| Guard Column | Agilent Zorbax StabeBond Aq, | |
| | 5.0 × 3.0 mm, 1.8 μm | |
| Mobile Phases | A: 50 mM sodium phosphate, 2 mM | |
| | tetrabutylammonium bisulfate, pH 7.0 | |
| | B: Acetonitrile | |
| | C: Water | |
| LC Gradient | 0-4.0 min: 9.0% B, 48.5-16.2% C | |
| | 4.0-4.5 min: 9.0% B, 16.2-48.5% C | |
| | 4.5-5.5 min: 9.0% B, 48.5% C | |
| Flow rate | 1.2 | mL/min |
| Run time | 5.5 | min |
| Column temperature | 30° | C. |
| Injection volume | 10 | μL |
| UV Detector | 254 | nm |

### Example 85

### General Enzyme Immobilization Procedure on Affinity Resin

[0614] The desired His-tagged protein variant was first produced in shake flask and purified as described in Example 3. The storage buffer from an aliquot of the desired protein stock was then exchanged for TEA-HCl (20 mM, pH 7.8) by diluting 10-fold with TEA·HCl followed by concentration through a Sartorius VivaSpin 6 (10,000 MWCO) spin filter at 4000 rpm and 4° C. The reduced volume sample is then diluted another 2.5 fold with TEA·HCl (20 mM, pH 7.8) to restore the original volume.

[0615] Between 2 and 20 mg affinity resin was weighed out, either wet or dry, into a 2.0 mL Eppendorf tube. For larger preparations, 0.5 to 1.0 g affinity resin was weighed out into a 15 mL conical tube. The volume of protein stock containing the desired wt. % of protein vs resin mass was transferred to the tube containing resin. Using TEA·HCl (20 mM, pH 7.8) as diluent, the volume was diluted to 150 μL in each 2.0 mL Eppendorf tube, or 6.0 mL in each 15 mL conical tube.

[0616] The samples were then incubated at 4° C. for 24 to 48 h using either 500 rpm agitation or on a tube rotator operating at 10 rpm. Before subjecting to activity assays, the supernatant was removed, and the resin was washed three times. For smaller preparations in 2.0 mL Eppendorf tubes, 150 μL wash volumes of TEA·HCl (20 mM, pH 7.8) were used, allowing the mixture to agitate at room temperature and 500 rpm for 10 minutes during each wash. Between each wash the tubes were briefly centrifuged to collect resin at the bottom. In the case of a larger preparation in a 15 mL conical tube, the resin was collected by vacuum filtration and then washed three times with 100 mL of TEA·HCl (25 mM, pH 7.5), allowing the resin to mix well on a rotator for 10 minutes at room temperature during each wash.

### Example 86

### Immobilization of Purified TdT on Affinity Resin

[0617] The TdT enzyme variant of SEQ ID NO: 3918 was produced in shake flask and purified as described in Example 3. The storage buffer was then exchanged for TEA·HCl (20 mM, pH 7.8) as described in Example 85, resulting in a final protein concentration of 7.2 g/L as measured by UV-Vis absorbance at 280 nm (A280) on a nanodrop spectrophotometer.

[0618] Affinity resins were purchased from ChiralVision, Purolite, or EnginZyme pre-functionalized with a chelating agent and pre-loaded with a metal for binding his-tagged proteins by the supplier. The metals used can include but are not limited to Ni(II), Co(II), Cu(II), Fe(II), Fe(III), Zn(II) with chelators that include but are not limited to iminodiacetate (IDA), nitrilotriacetate (NTA), and ethylenediaminetetracetate (EDTA).

[0619] Resins were weighed out in 4.0 to 6.5 mg quantities in 2.0 mL Eppendorf tubes and charged with enzyme from the 7.2 g/L TdT stock solution, and immobilization was carried out as described in Example 85 with a 24 h incubation. The tubes containing ChiralVision resins were charged with the appropriate volume of TdT stock such that the mass of protein in the sample was 3.0% of the wet mass of resin. The same procedure was repeated for the Purolite Chromalite resins, but with a target of 2.5 wt. % vs the wet mass of resin. The same procedure was repeated for the EnginZyme resins but with a target of 2.5 wt. % vs dry mass of resin.

[0620] The samples were briefly centrifuged to collect the resin in the bottom of the Eppendorf tube and 60 μL was transferred from the supernatant to a Greiner 96 well clear bottom half-well plate. The A280 was measured on a plate-reader and compared to a negative control which contained TdT stock that had been incubated under the same conditions with no resin present. The difference in A280 was then used to calculate the percent of immobilization of the protein in solution:

$$Percent Immobilization = ( 1 - \frac{A 280}{A 28 {0}_{neg . ctrl .}} ) \times 100$$

TABLE 86.1
Immobilization of Purified TdT on Affinity Resin

| | | Percent Immobilization |
|---|---|---|
| Resin | Metal | of Added Protein |
| ChiralVision IB-HIS-1 | Ni(II) | ++ |
| ChiralVision IB-HIS-2 | Ni(II) | ++ |
| ChiralVision IB-HIS-2 | Co(II) | ++ |
| ChiralVision IB-HIS-3 | Ni(II) | + |
| ChiralVision IB-HIS-4 | Ni(II) | + |
| ChiralVision IB-HIS-5 | Ni(II) | +++ |
| ChiralVision IB-HIS-6 | Ni(II) | + |
| ChiralVision IB-HIS-7 | Ni(II) | + |
| ChiralVision IB-HIS-8 | Ni(II) | ++ |
| ChiralVision IB-HIS-9 | Ni(II) | ++ |
| ChiralVision IB-HIS-10 | Ni(II) | ++ |
| ChiralVision IB-HIS-11 | Ni(II) | ++ |
| ChiralVision IB-HIS-12 | Ni(II) | ++ |
| ChiralVision IB-HIS-13 | Ni(II) | +++ |
| ChiralVision IB-HIS-14 | Ni(II) | + |
| ChiralVision IB-HIS-15 | Ni(II) | + |
| ChiralVision IB-HIS-16 | Ni(II) | + |
| Purolite Chromalite | Co(II) | ++ |
| Purolite Chromalite | Cu(II) | ++ |
| Purolite Chromalite | Fe(II) | ++ |
| Purolite Chromalite | Ni(II) | ++ |
| Purolite Chromalite | Zn(II) | ++ |
| EnginZyme EziG¹ Opal | Fe(III) | +++ |
| EnginZyme EziG² Choral | Fe(III) | +++ |
| EnginZyme EziG³ Amber | Fe(III) | +++ |

Levels of immobilization are determined by ratio of A280 vs negative control and defined as follows: “+” 0 to 50%, “++” 50 to 80%, “+++” 80 to 100%

### Example 87

### Co-Immobilization of IPP and TdT on Affinity Resin and Enzymatic Single Extension of RNA Oligomer

[0621] The TdT enzyme variant of SEQ ID NO: 5028 was produced in shake flask and purified as described in Example 3.

[0622] The inorganic pyrophosphatase (IPP) of SEQ ID NO: 3944 was produced and purified, as described in Example 58.

[0623] For both the TdT and IPP, the storage buffer in 0.5 mL of stock was exchanged for TEA HCl (20 mM, pH 7.8) as described in Example 85, yielding solutions of IPP and TdT in 2.0 and 9.6 g/L concentrations, respectively.

[0624] ChiralVision IB-HIS-2 resin, loaded with CoCl₂, was weighed out in 4.5 to 9.0 mg quantities into 2.0 mL Eppendorf tubes and enzyme immobilization was carried out according to Example 85 using mixtures of the IPP and TdT stock solutions with a 24 h incubation. Each resin sample contained 1.0, 3.0, or 6.0 wt. % TdT vs wet weight of resin in combination with 0, 0.2, 0.8, or 1.6 wt. % IPP vs wet weight of resin.

[0625] The samples were removed from the rotator and briefly centrifuged to collect the resin the bottom of each tube. After removing the supernatant, each resin sample was washed three times with TEA HCl (20 mM, pH 7.8) according to Example 85.

[0626] To test the activity of the immobilized enzymes, a 1.6 mL reaction stock solution was prepared containing: mATP-3′P (30 μM), 5′-6-FAM-T15mAmUfG (0.2 μM), T15mAmUfG (18.8 μM), CoCl₂ (0.25 mM), TEA·HCl (20 mM, pH 7.8). The reaction stock was then added to each resin sample (20 μL stock per mg wet weight of resin). The reaction was then incubated at 50° C., 500 rpm. After 1 h, a 2 μL aliquot was removed from the supernatant of each reaction mixture and transferred into 98 μL 1 mM EDTA quench solution. Another 2 μL aliquot was removed from the quench solution and processed for CE analysis as described in Example 4. The conversion of 5′-6-FAM-T15mAmUfG to 5′-6-FAM-T15mAmUfGmA-3′P was measured as the % fluorescence of product vs total fluorescence in the CE electropherogram.

TABLE 87.1
Single RNA Extension Using Co-immobilized
IPP SEQ ID NO: 3944 and TdT SEQ ID NO: 5002

| Wt. % TdT | Wt. % IPP | % 5′-6-FAM-T15mAmUfGmA-3′P |
|---|---|---|
| 1 | 0 | + |
| 1 | 0.2 | + |
| 1 | 0.8 | ++ |
| 1 | 1.6 | ++ |
| 3 | 0 | ++ |
| 3 | 0.2 | +++ |
| 3 | 0.8 | +++ |
| 3 | 1.6 | +++ |
| 6 | 0 | +++ |
| 6 | 0.2 | +++ |
| 6 | 0.8 | +++ |
| 6 | 1.6 | +++ |

Conversion of oligonucleotide 5′-6-FAM-T15mAmUf to 5′-6-FAM-T15mAmUfGmA-3′P was determined as percent of total fluorescence in the CE trace and defined as follows:: “+” 0 to 50%, “++” 50 to 80%, “+++” 80 to 100%

### Example 88

### Immobilization of Alkaline Phosphatase on Affinity Resin and Enzymatic 3′-Dephosphorylation of RNA Oligomer

[0627] The alkaline phosphatase (AP) of SEQ ID NO: 3932 was produced in shake flask and purified as described in Example 3. The storage buffer in a 0.5 mL aliquot was exchanged for TEA HCl (20 mM, pH 7.8) as described in Example 85, giving a solution containing 7.1 g/L protein as measured by A280 on a nanodrop spectrophotometer.

[0628] Affinity resins from ChiralVision were weighed out in 2.5 to 3.0 mg quantities in Eppendorf tubes and charged with the appropriate amount of AP stock solution such that the amount of protein was 2.5 wt. % of the wet mass of resin in each tube. The immobilization was then carried out with a 24 h incubation according to Example 85.

[0629] The samples were then diluted to 150 μL using TEA HCl (20 mM, pH 7.8) as diluent and incubated at 5° C. for 24 h with 500 rpm agitation. The A280 of the resulting supernatant solution was compared to that of a solution of AP that had been incubated under the same conditions but without resin present. The percent immobilization was then calculated as:

$$( 1 - \frac{A 280}{A 28 {0}_{neg . ctrl .}} ) \times 100$$

TABLE 88.1
Immobilization of Alkaline Phosphatase
SEQ ID NO: 3932 on Affinity Resin

| | | Percent Immobilization |
|---|---|---|
| Resin | Metal | of Added Protein |
| ChiralVision IB-HIS-2 | Ni(II) | ++ |
| ChiralVision IB-HIS-7 | Ni(II) | + |
| ChiralVision IB-HIS-8 | Ni(II) | + |
| ChiralVision IB-HIS-12 | Ni(II) | ++ |

Levels of immobilization are determined by ratio of A280 vs negative control and defined as follows: “+” 0 to 50%, “++” >50%

[0630] To measure the 3′-dephosphorylation activity of the immobilized AP, a 1.8 mL reaction stock was prepared containing: 5′-6-FAM-T15mAmG*mGmA-3′P (0.125 μM) T15mAmG*mGmA-3′P (99.9 μM) COCl₂ (0.25 mM), and TEA HCl (20 mM, pH 7.8). 150 μL of reaction buffer was then transferred to each sample of resin and then briefly centrifuged to collect the resin in the bottom of the container. The reactions were then incubated at 50° C. with 500 rpm agitation.

[0631] After 0.5 h, a 2 μL aliquot was removed from the supernatant of each reaction mixture and transferred into 98 μL 1 mM EDTA quench solution. A subsequent 2 μL aliquot was removed from the quench solution and processed for CE analysis as described in Example 4. The conversion of 5′-6-FAM-T15mAmG*mGmA-3′P to 5′-6-FAM-T15mAmG*mGmA was measured as the % fluorescence of product vs total fluorescence in the CE electropherogram.

TABLE 88.2
Dephosphorylation of 5′-6-FAM-T15mAmG*mGmA-
3′P with Immobilized AP

| | Oligo/AP | % Conversion |
|---|---|---|
| Resin | Molar Ratio | of Substrate |
| ChiralVision IB-HIS-2 | 14 | + |
| ChiralVision IB-HIS-7 | 28 | + |
| ChiralVision IB-HIS-8 | 18 | + |
| ChiralVision IB-HIS-12 | 21 | + |

Levels of conversion of 5′-6-FAM-T15mAmG*mGmA-3′P to 5′-6-FAM-T15mAmG*mGmA determined as percent of total fluorescence in the CE trace and defined as follows: “+” >90%

### Example 89

### Immobilization of Alkaline Phosphatase on Affinity Resin and Enzymatic Dephosphorylation of ATP

[0632] The alkaline phosphatase (AP) of SEQ ID NO: 3932 was produced in shake flask and purified as described in Example 3. The storage buffer in a 0.5 mL aliquot was exchanged for TEA HCl (20 mM, pH 7.8) as described in Example 85, giving a solution containing 12.2 g/L protein as measured by A280 on a nanodrop spectrophotometer.

[0633] Affinity resins from ChiralVision were weighed out in 4.0 to 5.5 mg quantities in Eppendorf tubes and charged with the appropriate amount of AP stock solution such that the amount of protein was 5.0 wt. % of the wet mass of resin in each tube. The immobilization was then carried out with a 24 h incubation according to Example 85.

[0634] Each resin sample was washed according to the general procedure outline in Example 85. To measure the dephosphorylation activity of the immobilized AP, a reaction stock was prepared containing: ATP (1 mM), CoCl₂ (0.25 mM), and TEA HCl (20 mM, pH 7.8). The reaction stock was transferred to each resin sample (200 μL stock per mg resin). The reaction mixtures briefly centrifuged to collect the resin in the bottom of the container and then incubated at 50° C. with 500 rpm agitation.

[0635] After 1 h, a 5 μL aliquot was roved from each reaction supernatant and transferred to 115 μL 75% MeOH/milli-Q water quench solution in a 96 well round bottom plate. The plate was sealed, vortexed, and centrifuged at 4000 rpm, 4° C., for 5 min. 100 μL was then transferred out of each well into fresh wells on a separate 96 well round bottom plate and analyzed by HPLC according to Example 84. The percent conversion of ATP was measured as the area under curve (AUC) attributed to ATP vs the total AUC for the entire chromatogram.

TABLE 89.1
Reaction of Immobilized Alkaline Phosphatase
SEQ ID NO: 3932 with ATP

| | | Percent |
|---|---|---|
| | ATP/AP | Conversion |
| Resin | Molar Ratio | of ATP |
| ChiralVision IB-HIS-1 | 54 | + |
| ChiralVision IB-HIS-2 | 60 | ++ |
| ChiralVision IB-HIS-7 | 73 | ++ |
| ChiralVision IB-HIS-8 | 60 | ++ |
| ChiralVision IB-HIS-12 | 55 | ++ |
| ChiralVision IB-HIS-16 | 959 | ++ |

Levels of conversion ATP determined as percent of total AUC in chromatogram and defined as “+” 0 to 80%, “++” >80%.

### Example 90

### Immobilization of Alkaline Phosphatase on Epoxide Functionalized Resin

[0636] The alkaline phosphatase (AP) of SEQ ID NO: 3932 was produced in shake flask and purified as described in Example 3. An aliquot of the purified AP in storage buffer was diluted into MOPS buffer (20 mM, pH 7.0) to give two stocks, with concentrations of 1.0 and 0.1 g/L.

[0637] Epoxide functionalized resins purchased from ChiralVision, IB-COV-2 and IB-COV-7, were weighed out in 19 to 26 mg quantities in 2.0 mL Eppendorf tubes and briefly centrifuged to collect the resin in the bottom. The 1.0 and 0.1 g/L stocks of AP in MOPS (20 mM, pH 7.0) were then added to the resin samples such that two samples received 2.5 wt. % protein vs wet weight of resin, and the other two received 0.25 wt. % protein vs wet weight of resin. These samples were incubated 48 h at 4° C., with no agitation for the 0 to 24 h and then 10 rpm rotation for 24 to 48 h.

[0638] To measure the percent of AP that was immobilized, the supernatant was tested for residual enzymatic activity and compared to a sample of AP that had been subjected to the same immobilization conditions but with no resin present. First, 20 μL aliquots were transferred from the supernatant of each sample and diluted to 200 μL with MOPS (20 mM, pH 7.0) buffer. Three controls were prepared by serially diluting a 0.1 g/L AP stock into 200 μL MOPS (20 mM, pH 7.0) at 5, 20, and 40-fold dilutions.

[0639] In a separate 15 mL conical tube, 5.0 mL reaction buffer was prepared containing: p-nitrophenylphosphate (4 mM), CoCl₂ (0.5 mM), and TEA HCl (40 mM, pH 7.8). Then, in a 96 well clear flat-bottom plate, 100 μL from the 10× dilution of each sample supernatant and each control was combined with 100 μL from the p-nitrophenylphosphate reaction buffer. The reaction was monitored at 405 nm in a plate reader at 25° C. for 10 min, acquiring data every 10 seconds. The ratio of the reaction rates to the negative control rate gave the percent of AP immobilized:

$$( 1 - \frac{Rate}{{Rate}_{neg . ctrl .}} ) \times 100$$

TABLE 90.1
Covalent Immobilization of SEQ ID NO: 3932

| | Wt. % Added | Percent |
|---|---|---|
| | Protein vs | Immobilization |
| | Resin Wet | of |
| Resin | Weight | Protein |
| ChiralVision IB-COV-2 | 0.25% | ++ |
| ChiralVision IB-COV-2 | 2.50% | +++ |
| ChiralVision IB-COV-7 | 0.25% | ++ |
| ChiralVision IB-COV-7 | 2.50% | + |

Levels of immobilization on resin determined by relative activity in supernatant vs free enzyme when reacted with p-nitrophenyl phosphate, defined as: “+” 0 to 60%, “++” 60 to 90%, “+++” 90 to 100%.

### Example 91

### Immobilization of TdT-IPP Fusion Construct on Affinity Resin

[0640] The TdT-IPP fusion constructs of SEQ ID NO: 5470, SEQ ID NO: 5468, SEQ ID NO: 5472, and SEQ ID NO: 5474 were produced in shake flask and purified as described in Example 3. The enzyme stocks in storage buffer were used directly without exchanging the buffer.

[0641] Immobilization in 2.0 mL Eppendorf tubes was carried out according to Example 85 with 7.5 to 10 mg ChiralVision IB-HIS-2 resin (pre-loaded with CoCl₂) and 2.5 wt. % protein vs wet weight resin. A 48-hour incubation period at 4° C. was used.

[0642] After immobilization, the A280 of the resulting supernatant solution was compared to that of a solution of each enzyme that had been incubated under the same conditions but without resin present. The percent immobilization was then calculated as:

$$( 1 - \frac{A 280}{A 28 {0}_{neg . ctrl .}} ) \times 100$$

TABLE 91.1
Immobilization of Purified TdT-IPP
Fusion Construct on Affinity Resin

| | | | Percent |
|---|---|---|---|
| | | | Immobilization |
| | | | of Added |
| Resin | Metal | Enzyme | Protein |
| ChiralVision IB-HIS-2 | Co(II) | SEQ ID NO: 5470 | ++ |
| ChiralVision IB-HIS-2 | Co(II) | SEQ ID NO: 5468 | + |
| ChiralVision IB-HIS-2 | Co(II) | SEQ ID NO: 5472 | ++ |
| ChiralVision IB-HIS-2 | Co(II) | SEQ ID NO: 5474 | + |

Levels of immobilization are determined by ratio of A280 vs negative control and defined as follows: “+” 0 to 50%, “++” >50%

### Example 92

### Iterative Enzymatic Extension of RNA Oligomer

[0643] The TdT enzyme variant of SEQ ID NO: 5246 was produced in shake flask and purified as described in Example 3.

[0644] The inorganic pyrophosphatase (IPP) of SEQ ID NO: 3944 was produced and purified, as described in Example 58.

[0645] The alkaline phosphatase (AP) of SEQ ID NO: 3932 was produced and purified, as described in Example 57.

[0646] TdT and IPP were co-immobilized on ChiralVision IB-HIS-2 resin (0.5 g), pre-loaded with CoCl₂, at 2.5 and 0.2 wt. % vs wet weight of resin, respectively, according to Example 85.

[0647] AP was immobilized on a separate batch of Co(II)-loaded ChiralVision IB-HIS-2 resin (0.5 g) at 2.5 wt. % protein vs wet weight of resin, according to Example 85.

[0648] First Extension: 5′-6-FAM-T10(2′dF)CmU(2′dF)CmA+mATP-3′P to 5′-6-FAM-T10(2′dF)CmU(2′dF)CmAmA-3′P

[0649] To a 2.0 mL Eppendorf tube was added 23 mg IB-HIS-2 resin, charged with 2.5 wt. % TdT (SEQ ID NO: 5246) and 0.2 wt. % IPP (SEQ ID NO: 3944). The tube was briefly centrifuged to collect the resin in the bottom. In a separate Eppendorf tube, 450 μL reaction master mix was prepared containing: mATP-3′P (150 μM), 5′-6-FAM-T10(2′dF)CmU(2′dF)CmA (100 μM), CoCl₂ (0.25 mM), MOPS (20 mM, pH 8.0). The reaction was then incubated at 50° C. for 1.5 h at 500 rpm.

[0650] After 1.5 h, the supernatant was transferred into a separate Eppendorf tube containing a fresh 23 mg of IB-HIS-2 resin, charged with 2.5 wt. % TdT and 0.2 wt. % IPP. The reaction was incubated for a further 1.5 h at 50° C. with 500 rpm agitation.

[0651] Afterward, a 2 μL aliquot was removed for CE analysis according to Example 4, while the reaction sample was allowed to cool in a 4° C. fridge for 10 minutes. Then, the supernatant was separated from the resin and placed in a 1.5 mL conical Eppendorf tube and centrifuged for 3 min at 14,000 rpm to pellet residual resin particulate. The supernatant was then transferred into a new 2.0 mL Eppendorf tube and the general AP catalyzed dephosphorylation procedure outlined below was carried out.

[0652] Second Extension: 5′-6-FAM-T10(2′dF)CmU(2′dF)CmAmA+fGTP-3′P to 5′-6-FAM-T10(2′dF)CmU(2′dF)CmAmA(2′dF)G-3′P

[0653] To a 2.0 mL Eppendorf tube was added 15 mg IB-HIS-2 resin charged with 2.5 wt. % TdT (SEQ ID NO: 5246) and 0.2 wt. % IPP (SEQ ID NO: 3944). In a separate 2.0 mL Eppendorf tube, 100 μL from the de-phosphorylate product of the first extension was diluted with 1.5 μL fGTP-3′P (20 mM), 5 μL CoCl₂ (10 mM), 20 μL TEA-HCl (200 mM, pH 7.8), and 174 μL milli-Q water. The reaction solution was then transferred onto the resin and incubated at 50° C. for 1.5 h with 500 rpm agitation.

[0654] Afterward, a 2 μL aliquot was removed for CE analysis according to Example 4, while the reaction sample was allowed to cool in a 4° C. fridge for 10 minutes. Then, the supernatant was separated from the resin and placed in a 1.5 mL conical Eppendorf tube and centrifuged for 3 min at 14,000 rpm to pellet residual resin particulate. The supernatant was then transferred into a new 2.0 mL Eppendorf tube and the general AP catalyzed dephosphorylation procedure outlined below was carried out.

[0655] Third Extension: 5′-6-FAM-T10(2′dF)CmU(2′dF)CmAmA(2′dF)G+mUTP-3′P to 5′-6-FAM-T10(2′dF)CmU(2′dF)CmAmA(2′dF)GmU-3′ P

[0656] To a 2.0 mL Eppendorf tube was added 15 mg IB-HIS-2 resin charged with 2.5 wt. % TdT (SEQ ID NO: 5246) and 0.2 wt. % IPP (SEQ ID NO: 3944). In a separate tube, 100 μL from the de-phosphorylated product of the second extension was diluted with 7.5 μL mUTP-3′P (2 mM), 5 μL TEA-HCl (20 mM, pH 7.8), and 38 μL milli-Q water. The reaction solution was then transferred to the tube containing resin and incubated at 50° C. with 500 rpm agitation.

[0657] After 1.5 h, the supernatant was separated from the resin and transferred to an Eppendorf tube containing a fresh 15 mg of IB-HIS-2 resin charged with 2.5 wt. % TdT and 0.2 wt. % IPP. To this mixture was also added an additional 1.9 μL CoCl₂ (10 mM). The reaction was incubated at 50° C. with 500 rpm agitation for an additional 1.5 h.

[0658] Afterward, a 2 μL aliquot was removed for CE analysis according to Example 4, while the reaction sample was allowed to cool in a 4° C. fridge for 10 minutes. Then, the supernatant was separated from the resin and placed in a 1.5 mL conical Eppendorf tube and centrifuged for 3 min at 14,000 rpm to pellet residual resin particulate. The supernatant was then transferred into a new 2.0 mL Eppendorf tube and the general AP catalyzed dephosphorylation procedure outlined below was carried out.

[0659] Fourth Extension: 5′-6-FAM-T10(2′dF)CmU(2′dF)CmAmA(2′dF)GmU+fGTP-3′P to 5′-6-FAM-T10(2′dF)CmU(2′dF)CmAmA(2′dF)GmU(2′dF)G-3′P

[0660] To a 2.0 mL Eppendorf tube was added 8 mg IB-HIS-2 resin charged with 2.5 wt. % TdT (SEQ ID NO: 5246) and 0.2 wt. % IPP (SEQ ID NO: 3944). In a separate tube, 75 μL from the de-phosphorylated product of the third extension was diluted with 4.0 μL fGTP-3′P (2 mM). The reaction solution was then transferred to the tube containing resin and incubated at 50° C. with 500 rpm for 1.5 h.

[0661] Afterward, a 2 μL aliquot was removed for CE analysis according to Example 4, while the reaction sample was allowed to cool in a 4° C. fridge for 10 minutes. Then, the supernatant was separated from the resin and placed in a 1.5 mL conical Eppendorf tube and centrifuged for 3 min at 14,000 rpm to pellet residual resin particulate. The supernatant was then transferred into a new 2.0 mL Eppendorf tube and the general AP catalyzed dephosphorylation procedure outlined below was carried out.

[0662] Fifth Extension: 5′-6-FAM-T10(2′dF)CmU(2′dF)CmAmA(2′dF)GmU(2′dF)G+mUTP-3′P to 5′-6-FAM-T10(2′dF)CmU(2′dF)CmAmAfGmUfGmU-3′P

[0663] To a 2.0 mL Eppendorf tube was added 8 mg IB-HIS-2 resin charged with 2.5 wt. % TdT (SEQ ID NO: 5246) and 0.2 wt. % SEQ ID NO: 3944. In a separate tube, 75 μL from the de-phosphorylated product of the fourth extension was diluted with 4.0 μL mUTP-3′P (2 mM). The reaction solution was then transferred to the tube containing resin and incubated at 50° C. with 500 rpm for 1.5 h.

[0664] Afterward, another 8 mg IB-HIS-2 resin charged with 2.5 wt. % TdT (SEQ ID NO: 5246) and 0.2 wt. % SEQ ID NO: 3944 weighed out into a separate 2.0 mL Eppendorf tube. The reaction mixture was separated from the used resin and added to the tube containing fresh resin along with 1.0 μL CoCl₂ (10 mM). The reaction was then incubated for 1.5 h at 50° C. with 500 rpm agitation.

[0665] Afterward, another 8 mg IB-HIS-2 resin charged with 2.5 wt. % TdT (SEQ ID NO: 5246) and 0.2 wt. % SEQ ID NO: 3944 was weighed out into a separate 2.0 mL Eppendorf tube. The reaction mixture was separated from the used resin and added to the tube containing fresh resin along with 4.0 μL mUTP-3′P (2 mM). The reaction was then incubated for another 1.5 h at 50° C. with 500 rpm agitation.

[0666] Afterward, another 8 mg IB-HIS-2 resin charged with 2.5 wt. % SEQ ID NO: 5246 and 0.2 wt. % SEQ ID NO: 3944 was weighed out into a separate 2.0 mL Eppendorf tube. The reaction mixture was separated from the used resin and added to the tube containing fresh resin and incubated for another 1.5 h at 50° C. with 500 rpm agitation.

[0667] Afterward, a 2 μL aliquot was removed for CE analysis according to Example 4, while the reaction sample was allowed to cool in a 4° C. fridge for 10 minutes. Then, the supernatant was separated from the resin and placed in a 1.5 mL conical Eppendorf tube and centrifuged for 3 min at 14,000 rpm to pellet residual resin particulate.

[0668] Sixth Extension: 5′-6-FAM-T0(2′dF)CmU(2′dF)CmAmA(2′dF)GmU(2′dF)GmU+fCOP=>5′-6-FAM-T10(2′dF)CmU(2′dF)CmAmA(2′ dF)GmU(2′dF)GmU(2′dF)C-3′P

[0669] To a 2.0 mL Eppendorf tube was added 8 mg IB-HIS-2 resin charged with 2.5 wt. % TdT and 0.2 wt. % IPP. In a separate tube, 75 μL from the de-phosphorylated product of the fifth extension was diluted with 4.0 μL fCQP (2 mM). The reaction solution was then transferred to the tube containing resin and incubated at 50° C. with 500 rpm for 1.5 h.

[0670] Afterward, a 2 μL aliquot was removed for CE analysis according to Example 4, while the reaction sample was allowed to cool in a 4° C. fridge for 10 minutes. Then, the supernatant was separated from the resin and placed in a 1.5 mL conical Eppendorf tube and centrifuged for 3 min at 14,000 rpm to pellet residual resin particulate. The supernatant was then transferred into a new 2.0 mL Eppendorf tube and the general AP catalyzed dephosphorylation procedure outlined below was carried out.

TABLE 92.1
Extension of Oligonucleotides Catalyzed by Immobilized TdT

| | | Conversion |
|---|---|---|
| Starting Oligonucleotide | Product Oligonucleotide | (%) |
| 5′-6-FAM-T10(2′dF)CmU(2′dF)CmA | 5′-6-FAM- | + |
| | T10(2′dF)CmU(2′dF)CmAmA-3′P | |
| 5′-6-FAM-T10(2′dF)CmU(2′dF)CmAmA | 5′-6-FAM- | ++ |
| | T10(2′dF)CmU(2′dF)CmAmA(2′dF)G- | |
| | 3′P | |
| 5′-6-FAM- | 5′-6-FAM- | ++ |
| T10(2′dF)CmU(2′dF)CmAmA(2′dF)G | T10(2′dF)CmU(2′dF)CmAmA(2′dF)GmU-3′P | |
| 5′-6-FAM- | 5′-6-FAM- | ++ |
| T10(2′dF)CmU(2′dF)CmAmA(2′dF)GmU | T10(2′dF)CmU(2′dF)CmAmA(2′dF)GmU(2′dF)G- | |
| | 3′P | |
| 5′-6-FAM- | 5′-6-FAM- | + |
| T10(2′dF)CmU(2′dF)CmAmA(2′dF)GmU(2′dF)G | T10(2′dF)CmU(2′dF)CmAmA(2′dF)GmU(2′dF)GmU- | |
| | 3′P | |
| 5′-6-FAM- | 5′-6-FAM- | ++ |
| T10(2′dF)CmU(2′dF)CmAmA(2′dF)GmU(2′dF)GmU | T10(2′dF)CmU(2′dF)CmAmA(2′dF)GmU(2′dF)GmU(2′dF)C- | |
| | 3′P | |

Conversion of nucleotide was determined as percent of total fluorescence in the CE trace and defined as follows: “+” 80 to 90%, “++” >90%.

[0671] General AP Catalyzed 3′-Dephosphorylation of RNA Oligomer

[0672] The supernatant was removed and added to a 2.0 mL Eppendorf tube containing IB-HIS-2 resin charged with 2.5 wt. % AP (SEQ ID NO: 3932), 0.05 mg resin per μL reaction volume was used. The sample was then incubated at 50° C. for 20 minutes.

[0673] Afterward, a 2 μL aliquot was removed for CE analysis according to Example 4. Meanwhile, the supernatant was separated from the resin, and transferred into a fresh Eppendorf tube. An equal volume of 25:24:1 chloroform:phenol:isoamyl alcohol was then added and the sample sealed and vortexed. After briefly centrifuging, the top aqueous layer was collected and transferred to a fresh sample tube. Then, an equal volume of 49:1 chloroform:isoamyl alcohol was added and the sample vortexed. After briefly centrifuging, the bottom organic layer was removed and discarded. The 49:1 chloroform:isoamyl alcohol extraction procedure was then repeated two more times. After the third time, the aqueous top layer was removed and transferred to a fresh 2.0 mL Eppendorf tube.

[0674] The aqueous layer containing de-phosphorylated oligo product was then placed in a vaccufuge for 15 minutes to remove residual organic solvents. The total volume lost was typically around 50 μL and was accounted for when adding reagents during subsequent extensions.

TABLE 92.2
Dephosphorylation of 3′-phosphorylated Oligonucleotides by Immobilized Alkaline Phosphatase

| | | Conversion |
|---|---|---|
| Starting Oligonucleotide | Product Oligonucleotide | (%) |
| 5′-6-FAM-T10(2′dF)CmU(2′dF)CmAmA- | 5′-6-FAM-T10(2′dF)CmU(2′dF)CmAmA | + |
| 3′P | | |
| 5′-6-FAM- | 5′-6-FAM- | + |
| T10(2′dF)CmU(2′dF)CmAmA(2′dF)G- | T10(2′dF)CmU(2′dF)CmAmA(2′dF)G | |
| 3′P | | |
| 5′-6-FAM- | 5′-6-FAM- | + |
| T10(2′dF)CmU(2′dF)CmAmA(2′dF)GmU- | T10(2′dF)CmU(2′dF)CmAmA(2′dF)GmU | |
| 3′P | | |
| 5′-6-FAM- | 5′-6-FAM- | + |
| T10(2′dF)CmU(2′dF)CmAmA(2′dF)GmU(2′dF)G- | T10(2′dF)CmU(2′dF)CmAmA(2′dF)GmU(2′dF)G | |
| 3′P | | |
| 5′-6-FAM- | 5′-6-FAM- | + |
| T10(2′dF)CmU(2′dF)CmAmA(2′dF)GmU(2′dF)GmU- | T10(2′dF)CmU(2′dF)CmAmA(2′dF)GmU(2′dF)GmU | |
| 3′P | | |
| 5′-6-FAM- | 5′-6-FAM- | + |
| T10(2′dF)CmU(2′dF)CmAmA(2′dF)GmU(2′dF)GmU(2′dF)C- | T10(2′dF)CmU(2′dF)CmAmA(2′dF)GmU(2′dF)GmU(2′dF)C | |
| 3′P | | |

Conversion of nucleotide was determined as percent of total fluorescence in the CE trace and defined as follows: “+”, >95%.

[0675] While the invention has been described with reference to the specific embodiments, various changes can be made and equivalents can be substituted to adapt to a particular situation, material, composition of matter, process, process step or steps, thereby achieving benefits of the invention without departing from the scope of what is claimed.

[0676] For all purposes in the United States of America, each and every publication and patent document cited in this disclosure is incorporated herein by reference as if each such publication or document was specifically and individually indicated to be incorporated herein by reference. Citation of publications and patent documents is not intended as an indication that any such document is pertinent prior art, nor does it constitute an admission as to its contents or date.

The application's sequence listing, which the Patent Office published only in electronic form, follows.

SEQUENCE LISTING (5615 sequences)

SEQ ID NO: 1 - DNA, 1587 bp, synthetic construct
  misc_feature 1..1587: note = Variant of terminal deoxynucleotidyltransferase
  source 1..1587: mol_type = other DNA
atgcaccatcatcatcatcatggcggtagcggcatgcaccgcattcgtaccatcgattcggacttcgggaagaaacgccagaagaagatggataaccacattagttccatgatctatgaaatcaaatttcacgagtttgtgctgttcattctcgaaaagaaaatgggtgcgacgcgtcgtacttttctgacagatttagcccgcaagaaagggttccgcgtcgagaatgaactgtcaaacagcgttacccacatcgtggcagaaaataattcaggatctgacgtattggcttggctgaagacccacaagatggagaaaacgacgcaatttgaactgctggatattagctggcttatcgaatgcatgaaagttggtaaaccggtggacaccaaagggaaataccagttgatggaatcgcgtgtcgatagtgcgaacccagatccgacagccggtaccctcaacattctgcctcctactacgaagaccatttctcagtatgcgtgtcaacgccgcaccaccatcaacaaccataatcagcgttttacggacgcattcgaaattcttgcgaagaattacgagttcaaagaaaacgatgatacttgcctgacctttatgcgtgctatttccgtgctgaaatgtcttccgtttgaggtagttagcctgaaagacacggaaggattgccctggatcggtgatgaagtcaaagggattatggaagaaatcatcgaggacggtgaatcgctggaagtgcaggccgtgctcaatgatgagcgctatcaaagcttcaaactgtttaccagtgtctttggagtggggctgaagacagcagacaaatggtaccgtatgggtttccgcacgctcaacaagattcgttccgataagaccctgaaattgaccaagatgcagaaagcgggtctgtgctattatgaagatcttattgattgtgtttcaaaagccgaagctgacgcggtatctctgctggttcaggatgcagtctggactttcttgccggatgcgctggtgactattacgggtggatttcgtcgtgggaaagagtttggtcacgacgttgatttccttatcacatctccgggagctgagaaagaacaagaagaccagctcctgcagaaagtgaccaatctgtggaagaaacaagggttgttgctgtactgcgatctgatcgaaagcacctttgaagatctgaaactcccatcccgcaagattgatgccctggaccatttccagaaatgctttctgatcctcaaactttatcaccataaagaggacaaacgcaaatgggaaatgccgacgggttcgaacgaaagcgaggccaaaagttggaaagcaattcgcgtagatctggttgtttgtccctacgatcgttatgcgtttgcgttgttgggttggagtggaagccgccaattcgaacgtgatctgcgccgctacgccacccacgagaagaagatgatgctggacaatcatgcgctgtatgacaagaccaagaaaatctttctcaaagctaaatcggaagaggaaattttcgcacatctggggcttgaatacattcagccgtccgaacgtaacgca

SEQ ID NO: 2 - protein, 529 aa, synthetic construct
  REGION 1..529: note = Variant of terminal deoxynucleotidyltransferase
MHHHHHHGGSGMHRIRTIDSDFGKKRQKKMDNHISSMIYEIKFHEFVLFILEKKMGATRRTFLTDLARKKGFRVENELSNSVTHIVAENNSGSDVLAWLKTHKMEKTTQFELLDISWLIECMKVGKPVDTKGKYQLMESRVDSANPDPTAGTLNILPPTTKTISQYACQRRTTINNHNQRFTDAFEILAKNYEFKENDDTCLTFMRAISVLKCLPFEVVSLKDTEGLPWIGDEVKGIMEEIIEDGESLEVQAVLNDERYQSFKLFTSVFGVGLKTADKWYRMGFRTLNKIRSDKTLKLTKMQKAGLCYYEDLIDCVSKAEADAVSLLVQDAVWTFLPDALVTITGGFRRGKEFGHDVDFLITSPGAEKEQEDQLLQKVTNLWKKQGLLLYCDLIESTFEDLKLPSRKIDALDHFQKCFLILKLYHHKEDKRKWEMPTGSNESEAKSWKAIRVDLVVCPYDRYAFALLGWSGSRQFERDLRRYATHEKKMMLDNHALYDKTKKIFLKAKSEEEIFAHLGLEYIQPSERNA

SEQ ID NO: 3 - DNA, 1587 bp, synthetic construct
  misc_feature 1..1587: note = Variant of terminal deoxynucleotidyltransferase
  source 1..1587: mol_type = other DNA
atgcaccatcatcatcatcatggcggtagcggcatgcaccgcattcgtaccatcgattcggacttcgggaagaaacgccagaagaagatggataaccacattagttccatgatctatgaaatcaaatttcacgagtttgtgctgttcattctcgaaaagaaaatgggtgcgacgcgtcgtacttttctgacagatttagcccgcaagaaagggttccgcgtcgagaatgaactgtcagacagcgttacccacatcgtggcagaaaataattcaggatctgacgtattggcttggctgaagacccacaagatggagaagacgacgcaatttgaactgctggatattagctggcttatcgaaagcatgaaagttggtaaaccggtggacaccaaggggaaataccagttgatggaatcgcgtgtcgatagtgcgaacccagatccgacagccggtaccctcaacattctgcctcctactacgaagaccatttctcagtatgcgtgtcaacgccgcaccaccctgaacaaccataatcaacgttttacggacgcactggaaattcttgcggaaaattacgagttcaaagaaaacgatgatacttgtctgacctttatgcgtgctatttccgtgctgaaatgccttccgtttgaggtagttagcctgaaagacacggaaggattgccctggatcggtgatgaagtcaaagggattatggaagaaatcatcgaggtcggtgaatcgctggaagtgcaggccgtgctcaatgatgagcgctatcaaagcttcaaactgtttaccagtgtctttggagtggggctgaagacagcagacaaatggtaccgtatgggtctgcgcacgctcgaggatgttcgttccagcaagaccctgaaattgaccaagatgcagaaagcgggtctgtgctattatgaagatcttgctgatggcgttacgaaagccgaagctgacgcggtatctctgctggttcaggatgcagtctggactttcgacccggatgcgctggtggagattacgggtggatttcgtcgtgggaaagagtttggtcacgacgttgatctgcttatcacatctccgggagctgagaaagaacaagaagaccagctcctgcagaaagtgaccaatctgtggaagaaacaagggttgttgctgtacggtgatctgcgtgaaagtacctttgaagatctgaaactcccatcccgcaagatcgatgccctggaccattttcagaaatgctttctgatcctcaaactttatcaccataaagtggacaaaagcaaatgggaaatgccgacgggttcgaacgaaagcgaggccaaaagttggaaagcaattcgcgtagatctggttgtttgtccctacgatcgttttgcgtttgcgttgttgggttggaccggaagccgcatgttcgaacgtgatctgcgccgctacgccacccacgagaagaagatgatgctggacaatcatgcgctgtatgacctgaccaagaaaatctttctcaaagctaaatcggaagaggaaattttcgcacatctggggcttgaatacctggaaccgtccgaacgtaacgca

SEQ ID NO: 4 - protein, 529 aa, synthetic construct
  REGION 1..529: note = Variant of terminal deoxynucleotidyltransferase
MHHHHHHGGSGMHRIRTIDSDFGKKRQKKMDNHISSMIYEIKFHEFVLFILEKKMGATRRTFLTDLARKKGFRVENELSDSVTHIVAENNSGSDVLAWLKTHKMEKTTQFELLDISWLIESMKVGKPVDTKGKYQLMESRVDSANPDPTAGTLNILPPTTKTISQYACQRRTTLNNHNQRFTDALEILAENYEFKENDDTCLTFMRAISVLKCLPFEVVSLKDTEGLPWIGDEVKGIMEEIIEVGESLEVQAVLNDERYQSFKLFTSVFGVGLKTADKWYRMGLRTLEDVRSSKTLKLTKMQKAGLCYYEDLADGVTKAEADAVSLLVQDAVWTFDPDALVEITGGFRRGKEFGHDVDLLITSPGAEKEQEDQLLQKVTNLWKKQGLLLYGDLRESTFEDLKLPSRKIDALDHFQKCFLILKLYHHKVDKSKWEMPTGSNESEAKSWKAIRVDLVVCPYDRFAFALLGWTGSRMFERDLRRYATHEKKMMLDNHALYDLTKKIFLKAKSEEEIFAHLGLEYLEPSERNA

SEQ ID NO: 5 - DNA, 1587 bp, synthetic construct
  misc_feature 1..1587: note = Variant of terminal deoxynucleotidyltransferase
  source 1..1587: mol_type = other DNA
atgcaccatcatcatcatcatggcggtagcggcatgcaccgcattcgtaccatcgattcggacttcgggaagaaacgccagaagaagatggataaccacattagttccatgatctatgaaatcaaatttcacgagtttgtgctgttcattctcgaaaagaaaatgggtgcgacgcgtcgtacttttctgacagatttagcccgcaagaaagggttccgcgtcgagaatgaactgtcagacagcgttacccacatcgtggcagaaaataattcaggatctgacgtattggcttggctgaagacccacaagatggagaagacgacgcaatttgaactgctggatattagctggcttatcgaaagcatgaaagttggtaaaccggtggacaccaaggggaaataccagttgatggaatcgcgtgtcgatagtgcgaacccagatccgacagccggtaccctcaacattctgcctcctactacgaagaccatttctcagtatgcgtgtcaacgccgcaccaccctgaacaaccataatcaacgttttacggacgcactggaaattcttgcggaaaattacgagttcaaagaaaacgatgatacttgtctgacctttatgcgtgctatttccgtgctgaaatgccttccgtttgaggtagttagcctgaaagacacggaaggattgccctggatcggtgatgaagtcaaagggattatggaagaaatcatcgaggtcggtgaatcgctggaagtgcaggccgtgctcaatgatgagcgctatcaaagcttcaaactgtttaccagtgtctttggagtgggggtgaagacagcagacaaatggtaccgtatgggtctgcgcacgctcgaggatgttcgttccagcaagaccctgaaattgaccaagatgcagaaagcgggtctgtgctattatgaagatcttgctgatggcgttacgaaagccgaagctgacgcggtatctctgctggttcaggatgcagtctggactttcgacccggatgcgctggtggagattacgggtggatttcgtcgtgggaaagagtttggtcacgacgttgatctgcttatcacatctccgggagctgagaaagaacaagaagaccagctcctgcagaaagtgaccaatctgtggaagaaacaagggttgttgctgtacggtgatctgcgtgaaagtacctttgaagatctgaaactcccatcccgcaagatcgatgccctggaccattttcagaaatgctttctgatcctcaaactttatcaccataaagtggacaaaagcaaatgggaaatgccgacgggttcgaacgaaagcgaggccaaaagttggaaagcaattcgcgtagatctggttgtttgtccctacgatcgttttgcgtttgcgttgttgggttggaccggaagccgcatgttcgaacgtgatctgcgccgctacgccacccacgagaagaagatgatgctggacaatcatgcgctgtatgacctgaccaagaaaatctttctcaaagctaaatcggaagaggaaattttcgcacatctggggcttgaatacctggaaccgtccgaacgtaacgca

SEQ ID NO: 6 - protein, 529 aa, synthetic construct
  REGION 1..529: note = Variant of terminal deoxynucleotidyltransferase
MHHHHHHGGSGMHRIRTIDSDFGKKRQKKMDNHISSMIYEIKFHEFVLFILEKKMGATRRTFLTDLARKKGFRVENELSDSVTHIVAENNSGSDVLAWLKTHKMEKTTQFELLDISWLIESMKVGKPVDTKGKYQLMESRVDSANPDPTAGTLNILPPTTKTISQYACQRRTTLNNHNQRFTDALEILAENYEFKENDDTCLTFMRAISVLKCLPFEVVSLKDTEGLPWIGDEVKGIMEEIIEVGESLEVQAVLNDERYQSFKLFTSVFGVGVKTADKWYRMGLRTLEDVRSSKTLKLTKMQKAGLCYYEDLADGVTKAEADAVSLLVQDAVWTFDPDALVEITGGFRRGKEFGHDVDLLITSPGAEKEQEDQLLQKVTNLWKKQGLLLYGDLRESTFEDLKLPSRKIDALDHFQKCFLILKLYHHKVDKSKWEMPTGSNESEAKSWKAIRVDLVVCPYDRFAFALLGWTGSRMFERDLRRYATHEKKMMLDNHALYDLTKKIFLKAKSEEEIFAHLGLEYLEPSERNA

SEQ ID NO: 7 - DNA, 1587 bp, synthetic construct
  misc_feature 1..1587: note = Variant of terminal deoxynucleotidyltransferase
  source 1..1587: mol_type = other DNA
atgcaccatcatcatcatcatggcggtagcggcatgcaccgcattcgtaccatcgattcggacttcgggaagaaacgccagaagaagatggataaccacattagttccatgatctatgaaatcaaatttcacgagtttgtgctgttcattctcgaaaagaaaatgggtgcgacgcgtcgtacttttctgacagatttagcccgcaagaaagggttccgcgtcgagaatgaactgtcagacagcgttacccacatcgtggcagaaaataattcaggatctgacgtattggcttggctgaagacccacaagatggagaagacgacgcaatttgaactgctggatattagctggcttatcgaaagcatgaaagttggtaaaccggtggacaccaaggggaaataccagttgatggaatcgcgtgtcgatagtgcgaacccagatccgacagccggtaccctcaacattctgcctcctactacgaagaccatttctcagtatgcgtgtcaacgccgcaccaccatcaacaaccataatcagcgttttacggacgcactggaaattcttgcggaaaattacgagttcaaagaaaacgatgatacttgtctgacctttatgcgtgctatttccgtgctgaaatgccttccgtttgaggtagttagcctgaaagacacggaaggattgccctggatcggtgatgaagtcaaaggtattatggaagaaatcatcgaggtcggtgaatcgctggaagtgcaggccgtgctcaatgatgagcgctatcaaagcttcaaactgtttaccagtgtctttggagtggggctgaagacagcagacaaatggtaccgtatgggtttccgcacgctcaacgatgttcgttccagcaagaccctgaaattgaccaagatgcagaaagcgggtctgtgctattatgaagatcttgctgatggcgttacgaaagccgaagctgacgcggtatctctgctggttcaggatgcagtctggactttcgacccggatgcgctggtggagattacgggtggatttcgtcgtgggaaagagtttggtcacgacgttgatctgcttatcacatctccgggagctgagaaagaacaagaagaccagctcctgcagaaagtgaccaatctgtggaagaaacaagggttgttgctgtacggtgatctgatcgaaagtacctttgaagatctgaaactcccatcccgcaagattgatgccctggaccattttcagaaatgctttctgatcctcaaactttatcaccataaagaggacaaacgcaaatgggaaatgccgacgggttcgaacgaaagcgaggccaaaagttggaaagcaattcgcgtagatctggttgtttgtccctacgatcgttatgcgtttgcgttgttgggttggaccggaagccgcatgttcgaacgtgatctgcgccgctacgccacccacgagaagaagatgatgctggacaatcatgcgctgtatgacctgaccaagaaaatctttctcaaagctaaatcggaagaggaaattttcgcacatctggggcttgaatacctggaaccgtccgaacgtaacgca

SEQ ID NO: 8 - protein, 529 aa, synthetic construct
  REGION 1..529: note = Variant of terminal deoxynucleotidyltransferase
MHHHHHHGGSGMHRIRTIDSDFGKKRQKKMDNHISSMIYEIKFHEFVLFILEKKMGATRRTFLTDLARKKGFRVENELSDSVTHIVAENNSGSDVLAWLKTHKMEKTTQFELLDISWLIESMKVGKPVDTKGKYQLMESRVDSANPDPTAGTLNILPPTTKTISQYACQRRTTINNHNQRFTDALEILAENYEFKENDDTCLTFMRAISVLKCLPFEVVSLKDTEGLPWIGDEVKGIMEEIIEVGESLEVQAVLNDERYQSFKLFTSVFGVGLKTADKWYRMGFRTLNDVRSSKTLKLTKMQKAGLCYYEDLADGVTKAEADAVSLLVQDAVWTFDPDALVEITGGFRRGKEFGHDVDLLITSPGAEKEQEDQLLQKVTNLWKKQGLLLYGDLIESTFEDLKLPSRKIDALDHFQKCFLILKLYHHKEDKRKWEMPTGSNESEAKSWKAIRVDLVVCPYDRYAFALLGWTGSRMFERDLRRYATHEKKMMLDNHALYDLTKKIFLKAKSEEEIFAHLGLEYLEPSERNA

SEQ ID NO: 9 - DNA, 1587 bp, synthetic construct
  misc_feature 1..1587: note = Variant of terminal deoxynucleotidyltransferase
  source 1..1587: mol_type = other DNA
atgcaccatcatcatcatcatggcggtagcggcatgcaccgcattcgtaccatcgattcggacttcgggaagaaacgccagaagaagatggataaccacattagttccatgatctatgaaatcaaatttcacgagtttgtgctgttcattctcgaaaagaaaatgggtgcgacgcgtcgtacttttctgacagatttagcccgcaagaaagggttccgcgtcgagaatgaactgtcagacagcgttacccacatcgtggcagaaaataattcaggatctgacgtattggcttggctgaagacccacaagatggagaagacgacgcaatttgaactgctggatattagctggcttatcgaaagcatgaaagttggtaaaccggtggacaccaaggggaaataccagttgatggaatcgcgtgtcgatagtgcgaacccagatccgacagccggtaccctcaacattctgcctcctactacgaagaccatttctcagtatgcgtgtcaacgccgcaccaccctgaacaaccataatcaacgttttacggacgcactggaaattcttgcggaaaattacgggttcaaatacaacgatgatacttgtctgacctttatgcgtgctatttccgtgctgaaatgccttccgtttgaggtagttagcctgaaagacacggaaggattgccctggatcggtgatgaagtcaaagggattatggaagaaatcatcgaggtcggtgaatcgctggaagtgcaggccgtgctcaatgatgagcgctatcaaagcttcaaactgtttaccagtgtctttggagtgggggtgaagacagcagacaaatggtaccgtatgggtctgcgcacgctcgaggatgttcgttccagcaagaccctgcgcttgaccaagatgcagaaagcgggtctgtgctattatgaagatcttgctgatggcgttacgaaagccgaagctgacgcgatttctctgctggttcaggatgcagtctggactttcgacccggatgcgctggtggagattacgggtggatttcgtcgtgggaaaccttttggtcacgacgttgatctgcttatcacatctccgggagctgagaaagaacaagaagaccagctcctgcacaaagtgaccgatctgtggaagaaacaagggttgttgctgtacggtgatctgcgtgaaagtacctttgaagatgggaaactcccatcccgcaagatcgatgccctggaccattttagcaaatgctttgcgatcctcaaactttatcaccataaagtggacaaaagcaaatgggaaacgccgacgggttcgaacatgagcgaggccaaaagttggaaagcaattcgcgtagatctggttgtttgtccctacgatcgttttgcgtttgcgttgttgggttggaccggaagccgcatgttcgaacgtgatctgcgccgctacgccacccacgagaagaagatgatgctggacaatcatgcgctgtatgacctgaccaagaaaatctttctcaaagctaaatcggaagaggaaattttcgcacatctggggcttgaatacctggaaccgtccgaacgtaacgca

SEQ ID NO: 10 - protein, 529 aa, synthetic construct
  REGION 1..529: note = Variant of terminal deoxynucleotidyltransferase
MHHHHHHGGSGMHRIRTIDSDFGKKRQKKMDNHISSMIYEIKFHEFVLFILEKKMGATRRTFLTDLARKKGFRVENELSDSVTHIVAENNSGSDVLAWLKTHKMEKTTQFELLDISWLIESMKVGKPVDTKGKYQLMESRVDSANPDPTAGTLNILPPTTKTISQYACQRRTTLNNHNQRFTDALEILAENYGFKYNDDTCLTFMRAISVLKCLPFEVVSLKDTEGLPWIGDEVKGIMEEIIEVGESLEVQAVLNDERYQSFKLFTSVFGVGVKTADKWYRMGLRTLEDVRSSKTLRLTKMQKAGLCYYEDLADGVTKAEADAISLLVQDAVWTFDPDALVEITGGFRRGKPFGHDVDLLITSPGAEKEQEDQLLHKVTDLWKKQGLLLYGDLRESTFEDGKLPSRKIDALDHFSKCFAILKLYHHKVDKSKWETPTGSNMSEAKSWKAIRVDLVVCPYDRFAFALLGWTGSRMFERDLRRYATHEKKMMLDNHALYDLTKKIFLKAKSEEEIFAHLGLEYLEPSERNA

SEQ ID NO: 11 - DNA, 1587 bp, synthetic construct
  misc_feature 1..1587: note = Variant of terminal deoxynucleotidyltransferase
  source 1..1587: mol_type = other DNA
atgcaccatcatcatcatcatggcggtagcggcatgcaccgcattcgtaccatcgattcggacttcgggaagaaacgccagaagaagatggataaccacattagttccatgatctatgaaatcaaatttcacgagtttgtgctgttcattctcgaaaagaaaatgggtgcgacgcgtcgtacttttctgacagatttagcccgcaagaaagggttccgcgtcgagaatgaactgtcagacagcgttacccacatcgtggcagaaaataattcaggatctgacgtattggcttggctgaagacccacaagatggagaagacgacgcaatttgaactgctggatattagctggcttatcgaaagcatgaaagttggtaaaccggtggacaccaaggggaaataccagttgatggaatcgcgtgtcgatagtgcgaacccagatccgacagccggtaccctcaacattctgcctcctactacgaagaccatttctcagtatgcgtgtcaacgccgcaccaccatcaacaaccataatcagcgttttacggacgcactggaaattcttgcggaaaattacgagttcaaagaaaacgatgatacttgtctgacctttatgcgtgctatttccgtgctgaaatgtcttccgtttgaggtagttagcctgaaagacacggaaggattgccctggatcggtgatgaagtcaaaggtattatggaagaaatcatcgaggacggtgaatcgctggaagtgcaggccgtgctcaatgatgagcgctatcaaagcttcaaactgtttaccagtgtctttggagtggggctgaagacagcagacaaatggtaccgtatgggtttccgcacgctcaacgatgttcgttccagcaagaccctgaaattgaccaagatgcagaaagcgggtctgtgctattatgaagatcttgctgatggcgtttcgaaagccgaagctgacgcggtatctctgctggttcaggatgcagtctggactttcgacccggatgcgctggtggagattacgggtggatttcgtcgtgggaaagagtttggtcacgacgttgatctgcttatcacatctccgggagctgagaaagaacaagaagaccagctcctgcagaaagtgaccaatctgtggaagaaacaagggttgttgctgtacggtgatctgatcgaaagtacctttgaagatctgaaactcccatcccgcaagattgatgccctggaccatcatcagaaatgctttctgatcctcaaactttatcaccataaagaggacaaacgcaaatgggaaatgccgacgggttcgaacgaaagcgaggccaaaagttggaaagcaattcgcgtagatctggttgtttgtccctacgatcgttatgcgtttgcgttgttgggttggaccggaagccgcatgttcgaacgtgatctgcgccgctacgccacccacgagaagaagatgatgctggacaatcatgcgctgtatgacctgaccaagaaaatctttctcaaagctaaatcggaagaggaaattttcgcacatctggggcttgaatacctggaaccgtccgaacgtaacgca

SEQ ID NO: 12 - protein, 529 aa, synthetic construct
  REGION 1..529: note = Variant of terminal deoxynucleotidyltransferase
MHHHHHHGGSGMHRIRTIDSDFGKKRQKKMDNHISSMIYEIKFHEFVLFILEKKMGATRRTFLTDLARKKGFRVENELSDSVTHIVAENNSGSDVLAWLKTHKMEKTTQFELLDISWLIESMKVGKPVDTKGKYQLMESRVDSANPDPTAGTLNILPPTTKTISQYACQRRTTINNHNQRFTDALEILAENYEFKENDDTCLTFMRAISVLKCLPFEVVSLKDTEGLPWIGDEVKGIMEEIIEDGESLEVQAVLNDERYQSFKLFTSVFGVGLKTADKWYRMGFRTLNDVRSSKTLKLTKMQKAGLCYYEDLADGVSKAEADAVSLLVQDAVWTFDPDALVEITGGFRRGKEFGHDVDLLITSPGAEKEQEDQLLQKVTNLWKKQGLLLYGDLIESTFEDLKLPSRKIDALDHHQKCFLILKLYHHKEDKRKWEMPTGSNESEAKSWKAIRVDLVVCPYDRYAFALLGWTGSRMFERDLRRYATHEKKMMLDNHALYDLTKKIFLKAKSEEEIFAHLGLEYLEPSERNA

SEQ ID NO: 13 - DNA, 1587 bp, synthetic construct
  misc_feature 1..1587: note = Variant of terminal deoxynucleotidyltransferase
  source 1..1587: mol_type = other DNA
atgcaccatcatcatcatcatggcggtagcggcatgcaccgcattcgtaccatcgattcggacttcgggaagaaacgccagaagaagatggataaccacattagttccatgatctatgaaatcaaatttcacgagtttgtgctgttcattctcgaaaagaaaatgggtgcgacgcgtcgtacttttctgacagatttagcccgcaagaaagggttccgcgtcgagaatgaactgtcagacagcgttacccacatcgtggcagaaaataattcaggatctgacgtattggcttggctgaagacccacaagatggagaagacgacgcaatttgaactgctggatattagctggcttatcgaaagcatgaaagttggtaaaccggtggacaccaaggggaaataccagttgatggaatcgcgtgtcgatagtgcgaacccagatccgacagccggtaccctcaacattctgcctcctactacgaagaccatttctcagtatgcgtgtcaacgccgcaccaccctgaacaaccataatcaacgttttacggacgcactggaaattcttgcggaaaattacgagttcaaagaaaacgatgatacttgtctgacctttatgcgtgctatttccgtgctgaaatgccttccgtttgaggtagttagcctgaaagacacggaaggattgccctggatcggtgatgaagtcaaagggattatggaagaaatcatcgaggtcggtgaatcgctggaagtgcaggccgtgctcaatgatgagcgctatcaaagcttcaaactgtttaccagtgtctttggagtggggctgaagacagcagacaaatggtaccgtatgggtctgcgcacgctcgaggatgttcgttccagcaagaccctgaaattgaccaagatgcagaaagcgggtctgtgctattatgaagatcttgctgatggcgttacgaaagccgaagctgacgcggtatctctgctggttcaggatgcagtctggactttcgacccggatgcgctggtggagattacgggtggatttcgtcgtgggaaaccttttggtcacgacgttgatctgcttatcacatctccgggagctgagaaagaacaagaagaccagctcctgcagaaagtgaccaatctgtggaagaaacaagggttgttgctgtacggtgatctgcgtgaaagtacctttgaagatctgaaactcccatcccgcaagatcgatgccctggaccattttcagaaatgctttgctatcctcaaactttatcaccataaagtggacaaaagcaaatgggaaatgccgacgggttcgaacgaaagcgaggccaaaagttggaaagcaattcgcgtagatctggttgtttgtccctacgatcgttttgcgtttgcgttgttgggttggaccggaagccgcatgttcgaacgtgatctgcgccgctacgccacccacgagaagaagatgatgctggacaatcatgcgctgtatgacctgaccaagaaaatctttctcaaagctaaatcggaagaggaaattttcgcacatctggggcttgaatacctggaaccgtccgaacgtaacgca

SEQ ID NO: 14 - protein, 529 aa, synthetic construct
  REGION 1..529: note = Variant of terminal deoxynucleotidyltransferase
MHHHHHHGGSGMHRIRTIDSDFGKKRQKKMDNHISSMIYEIKFHEFVLFILEKKMGATRRTFLTDLARKKGFRVENELSDSVTHIVAENNSGSDVLAWLKTHKMEKTTQFELLDISWLIESMKVGKPVDTKGKYQLMESRVDSANPDPTAGTLNILPPTTKTISQYACQRRTTLNNHNQRFTDALEILAENYEFKENDDTCLTFMRAISVLKCLPFEVVSLKDTEGLPWIGDEVKGIMEEIIEVGESLEVQAVLNDERYQSFKLFTSVFGVGLKTADKWYRMGLRTLEDVRSSKTLKLTKMQKAGLCYYEDLADGVTKAEADAVSLLVQDAVWTFDPDALVEITGGFRRGKPFGHDVDLLITSPGAEKEQEDQLLQKVTNLWKKQGLLLYGDLRESTFEDLKLPSRKIDALDHFQKCFAILKLYHHKVDKSKWEMPTGSNESEAKSWKAIRVDLVVCPYDRFAFALLGWTGSRMFERDLRRYATHEKKMMLDNHALYDLTKKIFLKAKSEEEIFAHLGLEYLEPSERNA

SEQ ID NO: 15 - DNA, 1587 bp, synthetic construct
  misc_feature 1..1587: note = Variant of terminal deoxynucleotidyltransferase
  source 1..1587: mol_type = other DNA
atgcaccatcatcatcatcatggcggtagcggcatgcaccgcattcgtaccatcgattcggacttcgggaagaaacgccagaagaagatggataaccacattagttccatgatctatgaaatcaaatttcacgagtttgtgctgttcattctcgaaaagaaaatgggtgcgacgcgtcgtacttttctgacagatttagcccgcaagaaagggttccgcgtcgagaatgaactgtcagacagcgttacccacatcgtggcagaaaataattcaggatctgacgtattggcttggctgaagacccacaagatggagaagacgacgcaatttgaactgctggatattagctggcttatcgaaagcatgaaagttggtaaaccggtggacaccaaggggaaataccagttgatggaatcgcgtgtcgatagtgcgaacccagatccgacagccggtaccctcaacattctgcctcctactacgaagaccatttctcagtatgcgtgtcaacgccgcaccaccctgaacaaccataatcaacgttttacggacgcactggaaattcttgcggaaaattacgagttcaaagaaaacgatgatacttgtctgacctttatgcgtgctatttccgtgctgaaatgccttccgtttgaggtagttagcctgaaagacacggaaggattgccctggatcggtgatgaagtcaaagggattatggaagaaatcatcgaggtcggtgaatcgctggaagtgcaggccgtgctcaatgatgagcgctatcaaagcttcaaactgtttaccagtgtctttggagtgggggtgaagacagcagacaaatggtaccgtatgggtctgcgcacgctcgaggatgttcgttccagcaagaccctgaaattgaccaagatgcagaaagcgggtctgtgctattatgaagatcttgctgatggcgttacgaaagccgaagctgacgcggtatctctgctggttcaggatgcagtctggactttcgacccggatgcgctggtggagattacgggtggatttcgtcgtgggaaaccttttggtcacgacgttgatctgcttatcacatctccgggagctgagaaagaacaagaagaccagctcctgcagaaagtgaccaatctgtggaagaaacaagggttgttgctgtacggtgatctgcgtgaaagtacctttgaagatctgaaactcccatcccgcaagatcgatgccctggaccattttcagaaatgctttgctatcctcaaactttatcaccataaagtggacaaaagcaaatgggaaatgccgacgggttcgaacgaaagcgaggccaaaagttggaaagcaattcgcgtagatctggttgtttgtccctacgatcgttttgcgtttgcgttgttgggttggaccggaagccgcatgttcgaacgtgatctgcgccgctacgccacccacgagaagaagatgatgctggacaatcatgcgctgtatgacctgaccaagaaaatctttctcaaagctaaatcggaagaggaaattttcgcacatctggggcttgaatacctggaaccgtccgaacgtaacgca

SEQ ID NO: 16 - protein, 529 aa, synthetic construct
  REGION 1..529: note = Variant of terminal deoxynucleotidyltransferase
MHHHHHHGGSGMHRIRTIDSDFGKKRQKKMDNHISSMIYEIKFHEFVLFILEKKMGATRRTFLTDLARKKGFRVENELSDSVTHIVAENNSGSDVLAWLKTHKMEKTTQFELLDISWLIESMKVGKPVDTKGKYQLMESRVDSANPDPTAGTLNILPPTTKTISQYACQRRTTLNNHNQRFTDALEILAENYEFKENDDTCLTFMRAISVLKCLPFEVVSLKDTEGLPWIGDEVKGIMEEIIEVGESLEVQAVLNDERYQSFKLFTSVFGVGVKTADKWYRMGLRTLEDVRSSKTLKLTKMQKAGLCYYEDLADGVTKAEADAVSLLVQDAVWTFDPDALVEITGGFRRGKPFGHDVDLLITSPGAEKEQEDQLLQKVTNLWKKQGLLLYGDLRESTFEDLKLPSRKIDALDHFQKCFAILKLYHHKVDKSKWEMPTGSNESEAKSWKAIRVDLVVCPYDRFAFALLGWTGSRMFERDLRRYATHEKKMMLDNHALYDLTKKIFLKAKSEEEIFAHLGLEYLEPSERNA

SEQ ID NO: 17 - DNA, 1587 bp, synthetic construct
  misc_feature 1..1587: note = Variant of terminal deoxynucleotidyltransferase
  source 1..1587: mol_type = other DNA
atgcaccatcatcatcatcatggcggtagcggcatgcaccgcattcgtaccatcgattcggacttcgggaagaaacgccagaagaagatggataaccacattagttccatgatctatgaaatcaaatttcacgagtttgtgctgttcattctcgaaaagaaaatgggtgcgacgcgtcgtacttttctgacagatttagcccgcaagaaagggttccgcgtcgagaatgaactgtcagacagcgttacccacatcgtggcagaaaataattcaggatctgacgtattggcttggctgaagacccacaagatggagaagacgacgcaatttgaactgctggatattagctggcttatcgaaagcatgaaagttggtaaaccggtggacaccaaggggaaataccagttgatggaatcgcgtgtcgatagtgcgaacccagatccgacagccggtaccctcaacattctgcctcctactacgaagaccatttctcagtatgcgtgtcaacgccgcaccaccctgaacaaccataatcaacgttttacggacgcactggaaattcttgcggaaaattacgggttcaaagagaacgatgatacttgtctgacctttatgcgtgctatttccgtgctgaaatgccttccgtttgaggtagttagcctgaaagacacggaaggattgccctggatcggtgatgaagtcaaagggattatggaagaaatcatcgaggtcggtgaatcgctggaagtgcaggccgtgctcaatgatgagcgctatcaaagcttcaaactgtttaccagtgtctttggagtgggggtgaagacagcagacaaatggtaccgtatgggtctgcgcacgctcgaggatgttcgttccagcaagaccctgcgcttgaccaagatgcagaaagcgggtctgtgctattatgaagatcttgctgatggcgttacgaaagccgaagctgacgcggtatctctgctggttcaggatgcagtctggactttcgacccggatgcgctggtggagattacgggtggatttcgtcgtgggaaaccttttggtcacgacgttgatctgcttatcacatctccgggagctgagaaagaacaagaagaccagctcctgcagaaagtgaccaatctgtggaagaaacaagggttgttgctgtacggtgatctgcgtgaaagtacctttgaagatctgaaactcccatcccgcaagatcgatgccctggaccattttagcaaatgctttgcgatcctcaaactttatcaccataaagtggacaaaagcaaatgggaaatgccgacgggttcgaacgaaagcgaggccaaaagttggaaagcaattcgcgtagatctggttgtttgtccctacgatcgttttgcgtttgcgttgttgggttggaccggaagccgcatgttcgaacgtgatctgcgccgctacgccacccacgagaagaagatgatgctggacaatcatgcgctgtatgacctgaccaagaaaatctttctcaaagctaaatcggaagaggaaattttcgcacatctggggcttgaatacctggaaccgtccgaacgtaacgca

SEQ ID NO: 18 - protein, 529 aa, synthetic construct
  REGION 1..529: note = Variant of terminal deoxynucleotidyltransferase
MHHHHHHGGSGMHRIRTIDSDFGKKRQKKMDNHISSMIYEIKFHEFVLFILEKKMGATRRTFLTDLARKKGFRVENELSDSVTHIVAENNSGSDVLAWLKTHKMEKTTQFELLDISWLIESMKVGKPVDTKGKYQLMESRVDSANPDPTAGTLNILPPTTKTISQYACQRRTTLNNHNQRFTDALEILAENYGFKENDDTCLTFMRAISVLKCLPFEVVSLKDTEGLPWIGDEVKGIMEEIIEVGESLEVQAVLNDERYQSFKLFTSVFGVGVKTADKWYRMGLRTLEDVRSSKTLRLTKMQKAGLCYYEDLADGVTKAEADAVSLLVQDAVWTFDPDALVEITGGFRRGKPFGHDVDLLITSPGAEKEQEDQLLQKVTNLWKKQGLLLYGDLRESTFEDLKLPSRKIDALDHFSKCFAILKLYHHKVDKSKWEMPTGSNESEAKSWKAIRVDLVVCPYDRFAFALLGWTGSRMFERDLRRYATHEKKMMLDNHALYDLTKKIFLKAKSEEEIFAHLGLEYLEPSERNA

SEQ ID NO: 19 - DNA, 1587 bp, synthetic construct
  misc_feature 1..1587: note = Variant of terminal deoxynucleotidyltransferase
  source 1..1587: mol_type = other DNA
atgcaccatcatcatcatcatggcggtagcggcatgcaccgcattcgtaccatcgattcggacttcgggaagaaacgccagaagaagatggataaccacattagttccatgatctatgaaatcaaatttcacgagtttgtgctgttcattctcgaaaagaaaatgggtgcgacgcgtcgtacttttctgacagatttagcccgcaagaaagggttccgcgtcgagaatgaactgtcagacagcgttacccacatcgtggcagaaaataattcaggatctgacgtattggcttggctgaagacccacaagatggagaagacgacgcaatttgaactgctggatattagctggcttatcgaaagcatgaaagttggtaaaccggtggacaccaaggggaaataccagttgatggaatcgcgtgtcgatagtgcgaacccagatccgacagccggtaccctcaacattctgcctcctactacgaagaccatttctcagtatgcgtgtcaacgccgcaccaccctgaacaaccataataaacgttttacggacgcactggaaattcttgcggaaaattacgagttcaaagaaaacgatgatacttgtctgacctttatgcgtgctatttccgtgctgaaatgccttccgtttgaggtagttagcctgaaagacacggaaggattgccctggatcggtgatgaagtcaaacctattatggaagaaatcatcgaggtcggtgaatcgctggaagtgcaggccgtgctcaatgatgagcgctatcaaagcttcaaactgtttaccagtgtctttggagtggggctgaagacagcagacaaatggtaccgtatgggttttcgcacgctcgaggatgttcgttccagcaagaccctgaaattgaccaagatgcagaaagcgggtctgtgctattatgaagatcttgctgacggcgttacgaaagccgaagctgacgcggtatctctgctggttcaggatgcagtctggactttcgacccggatgcgctggtggagattacgggtggatttcgtcgtgggaaagagtttggtcacgacgttgatctgcttatcacaattccgggagctgagaaagaacaagaagaccagctcctgcagaaagtgaccaatctgtggaagaaacaagggttgttgctgtacggtgatctgcgtgaaagtacctttgaagatctgaaactcccatcccgcaagccggatgccctggaccattttcagaaatgctttctgatcctcaaactttatcaccctaaagaggacaaacgcaaatgggaaatgccgacgggttcgaacgaaagcgaggccaaaagttggaaagcaattcgcgtagatctggttgtttgtccctacgatcgttttgcgtttgcgttgttgggttggaccggaagccgcatgttcgaacgtgatctgcgccgctacgccacccacgagaagaagatgatgctggacaatcatgcgctgtatgacctgaccaagaaaatctttctcaaagctaaatcggaagaggaaattttcgcacatctggggcttgaatacctggaaccgtccgaacgtaacgca

SEQ ID NO: 20 - protein, 529 aa, synthetic construct
  REGION 1..529: note = Variant of terminal deoxynucleotidyltransferase
MHHHHHHGGSGMHRIRTIDSDFGKKRQKKMDNHISSMIYEIKFHEFVLFILEKKMGATRRTFLTDLARKKGFRVENELSDSVTHIVAENNSGSDVLAWLKTHKMEKTTQFELLDISWLIESMKVGKPVDTKGKYQLMESRVDSANPDPTAGTLNILPPTTKTISQYACQRRTTLNNHNKRFTDALEILAENYEFKENDDTCLTFMRAISVLKCLPFEVVSLKDTEGLPWIGDEVKPIMEEIIEVGESLEVQAVLNDERYQSFKLFTSVFGVGLKTADKWYRMGFRTLEDVRSSKTLKLTKMQKAGLCYYEDLADGVTKAEADAVSLLVQDAVWTFDPDALVEITGGFRRGKEFGHDVDLLITIPGAEKEQEDQLLQKVTNLWKKQGLLLYGDLRESTFEDLKLPSRKPDALDHFQKCFLILKLYHPKEDKRKWEMPTGSNESEAKSWKAIRVDLVVCPYDRFAFALLGWTGSRMFERDLRRYATHEKKMMLDNHALYDLTKKIFLKAKSEEEIFAHLGLEYLEPSERNA

SEQ ID NO: 21 - DNA, 1587 bp, synthetic construct
  misc_feature 1..1587: note = Variant of terminal deoxynucleotidyltransferase
  source 1..1587: mol_type = other DNA
atgcaccatcatcatcatcatggcggtagcggcatgcaccgcattcgtaccatcgattcggacttcgggaagaaacgccagaagaagatggataaccacattagttccatgatctatgaaatcaaatttcacgagtttgtgctgttcattctcgaaaagaaaatgggtgcgacgcgtcgtacttttctgacagatttagcccgcaagaaagggttccgcgtcgagaatgaactgtcagacagcgttacccacatcgtggcagaaaataattcaggatctgacgtattggcttggctgaagacccacaagatggagaagacgacgcaatttgaactgctggatattagctggcttatcgaaagcatgaaagttggtaaaccggtggacaccaaggggaaataccagttgatggaatcgcgtgtcgatagtgcgaacccagatccgacagccggtaccctcaacattctgcctcctactacgaagaccatttctcagtatgcgtgtcaacgccgcaccaccctgaacaaccataatcaacgttttacggacgcactggaaattcttgcggaaaattacgagttcaaagaaaacgatgatacttgtctgacctttatgcgtgctatttccgtgctgaaatgccttccgtttgaggtagttagcctgaaagacacggaaggattgccctggatcggtgatgaagtcaaagggattatggaagaaatcatcgaggtcggtgaatcgctggaagtgcaggccgtgctcaatgatgagcgctatcaaagcttcaaactgtttaccagtgtctttggagtggggctgaagacagcagacaaatggtaccgtatgggtctgcgcacgctcgaggatgttcgttccagcaagaccctgaaattgaccaagatgcagaaagcgggtctgtgctattatgaagatcttgctgatggcgttacgaaagccgaagctgacgcggtatctctgctggttcaggatgcagtctggactttcgacccggatgcgctggtggagattacgggtggatttcgtcgtgggaaaccttttggtcacgacgttgatctgcttatcacatctccgggagctgagaaagaacaagaagaccagctcctgcagaaagtgaccaatctgtggaagaaacaagggttgttgctgtacggtgatctgcgtgaaagtacctttgaagatctgaaactcccatcccgcaagatcgatgccctggaccattttcagaaatgctttctgatcctcaaactttatcaccataaagtggacaaaagcaaatgggaaatgccgacgggttcgaacgaaagcgaggccaaaagttggaaagcaattcgcgtagatctggttgtttgtccctacgatcgttttgcgtttgcgttgttgggttggaccggaagccgcatgttcgaacgtgatctgcgccgctacgccacccacgagaagaagatgatgctggacaatcatgcgctgtatgacctgaccaagaaaatctttctcaaagctaaatcggaagaggaaattttcgcacatctggggcttgaatacctggaaccgtccgaacgtaacgca

SEQ ID NO: 22 - protein, 529 aa, synthetic construct
  REGION 1..529: note = Variant of terminal deoxynucleotidyltransferase
MHHHHHHGGSGMHRIRTIDSDFGKKRQKKMDNHISSMIYEIKFHEFVLFILEKKMGATRRTFLTDLARKKGFRVENELSDSVTHIVAENNSGSDVLAWLKTHKMEKTTQFELLDISWLIESMKVGKPVDTKGKYQLMESRVDSANPDPTAGTLNILPPTTKTISQYACQRRTTLNNHNQRFTDALEILAENYEFKENDDTCLTFMRAISVLKCLPFEVVSLKDTEGLPWIGDEVKGIMEEIIEVGESLEVQAVLNDERYQSFKLFTSVFGVGLKTADKWYRMGLRTLEDVRSSKTLKLTKMQKAGLCYYEDLADGVTKAEADAVSLLVQDAVWTFDPDALVEITGGFRRGKPFGHDVDLLITSPGAEKEQEDQLLQKVTNLWKKQGLLLYGDLRESTFEDLKLPSRKIDALDHFQKCFLILKLYHHKVDKSKWEMPTGSNESEAKSWKAIRVDLVVCPYDRFAFALLGWTGSRMFERDLRRYATHEKKMMLDNHALYDLTKKIFLKAKSEEEIFAHLGLEYLEPSERNA

SEQ ID NO: 23 - DNA, 1587 bp, synthetic construct
  misc_feature 1..1587: note = Variant of terminal deoxynucleotidyltransferase
  source 1..1587: mol_type = other DNA
atgcaccatcatcatcatcatggcggtagcggcatgcaccgcattcgtaccatcgattcggacttcgggaagaaacgccagaagaagatggataaccacattagttccatgatctatgaaatcaaatttcacgagtttgtgctgttcattctcgaaaagaaaatgggtgcgacgcgtcgtacttttctgacagatttagcccgcaagaaagggttccgcgtcgagaatgaactgtcagacagcgttacccacatcgtggcagaaaataattcaggatctgacgtattggcttggctgaagacccacaagatggagaagacgacgcaatttgaactgctggatattagctggcttatcgaaagcatgaaagttggtaaaccggtggacaccaaggggaaataccagttgatggaatcgcgtgtcgatagtgcgaacccagatccgacagccggtaccctcaacattctgcctcctactacgaagaccatttctcagtatgcgtgtcaacgccgcaccaccctgaacaaccataatcaacgttttacggacgcactggaaattcttgcggaaaattacgagttcaaacgcaacgatgatacttgtctgacctttatgcgtgctatttccgtgctgaaatgccttccgtttgaggtagttagcctgaaagacacggaaggattgccctggatcggtgatgaagtcaaagggattatggaagaaatcatcgaggtcggtgaatcgctggaagtgcaggccgtgctcaatgatgagcgctatcaaagcttcaaactgtttaagagtgtctttggagtgggggtgaagacagcagacaaatggtaccgtatgggtctgcgcacgctcgaggatgttcgttccagcaagaccctgaagttgaccaagatgcagaaagcgggtctgtgctattatgaagatcttgctgatggcgttacgaaagccgaagctgacgcgatttctctgctggttcaggatgcagtctggactttcgacccggatgcgctggtggagattacgggtggatttcgtcgtgggaaaccttttggtcacgacgttgatctgcttatcacatctccgggagctgagaaagaacaagaagaccagctcctgcagaaagtgaccaatctgtggaagaaacaagggttgttgctgtacggtgatctgcgtgaaagtcgctttgaagatgggaaactcccatcccgcaagatcgatgccctggaccattttcagaaatgctttgctatcctcaaactttatcaccataaagtggacaaaagcaaatgggaaatgccgacgggttcgaacgaaagcgaggccaaaagttggaaagcaattcgcgtagatctggttgtttgtccctacgatcgttttgcgtttgcgttgttgggttggaccggaagccgcatgttcgaacgtgatctgcgccgctacgccacccacgagaagaagatgatgctggacaatcatgcgctgtatgacctgaccaagaaaatctttctcaaagctaaatcggaagaggaaattttcgcacatctggggcttgaatacctggaaccgtccgaacgtaacgca

SEQ ID NO: 24 - protein, 529 aa, synthetic construct
  REGION 1..529: note = Variant of terminal deoxynucleotidyltransferase
MHHHHHHGGSGMHRIRTIDSDFGKKRQKKMDNHISSMIYEIKFHEFVLFILEKKMGATRRTFLTDLARKKGFRVENELSDSVTHIVAENNSGSDVLAWLKTHKMEKTTQFELLDISWLIESMKVGKPVDTKGKYQLMESRVDSANPDPTAGTLNILPPTTKTISQYACQRRTTLNNHNQRFTDALEILAENYEFKRNDDTCLTFMRAISVLKCLPFEVVSLKDTEGLPWIGDEVKGIMEEIIEVGESLEVQAVLNDERYQSFKLFKSVFGVGVKTADKWYRMGLRTLEDVRSSKTLKLTKMQKAGLCYYEDLADGVTKAEADAISLLVQDAVWTFDPDALVEITGGFRRGKPFGHDVDLLITSPGAEKEQEDQLLQKVTNLWKKQGLLLYGDLRESRFEDGKLPSRKIDALDHFQKCFAILKLYHHKVDKSKWEMPTGSNESEAKSWKAIRVDLVVCPYDRFAFALLGWTGSRMFERDLRRYATHEKKMMLDNHALYDLTKKIFLKAKSEEEIFAHLGLEYLEPSERNA

SEQ ID NO: 25 - DNA, 1587 bp, synthetic construct
  misc_feature 1..1587: note = Variant of terminal deoxynucleotidyltransferase
  source 1..1587: mol_type = other DNA
atgcaccatcatcatcatcatggcggtagcggcatgcaccgcattcgtaccatcgattcggacttcgggaagaaacgccagaagaagatggataaccacattagttccatgatctatgaaatcaaatttcacgagtttgtgctgttcattctcgaaaagaaaatgggtgcgacgcgtcgtacttttctgacagatttagcccgcaagaaagggttccgcgtcgagaatgaactgtcagacagcgttacccacatcgtggcagaaaataattcaggatctgacgtattggcttggctgaagacccacaagatggagaagacgacgcaatttgaactgctggatattagctggcttatcgaaagcatgaaagttggtaaaccggtggacaccaaggggaaataccagttgatggaatcgcgtgtcgatagtgcgaacccagatccgacagccggtaccctcaacattctgcctcctactacgaagaccatttctcagtatgcgtgtcaacgccgcaccaccatcaacaaccataatcagcgttttacggacgcactggaaattcttgcggaaaattacgagttcaaagaaaacgatgatacttgtctgacctttatgcgtgctatttccgtgctgaaatgccttccgtttgaggtagttagcctgaaagacacggaaggattgccctggatcggtgatgaagtcaaaggtattatggaagaaatcatcgaggtcggtgaatcgctggaagtgcaggccgtgctcaatgatgagcgctatcaaagcttcaaactgtttaccagtgtctttggagtggggctgaagacagcagacaaatggtaccgtatgggtttccgcacgctcaacgatgttcgttccagcaagaccctgaaattgaccaggatgcagaaagcgggtctgtgctattatgaagatcttgctgatggcgttacgaaagccgaagctgacgcggtatctctgctggttcaggatgcagtctggactttcgacccggatgcgctggtggagattacgggtggatttcgtcgtgggaaagagtttggtcacgacgttgatctgcttatcacatctccgggagctgagaaagaacaagaagaccagctcctgcagaaagtgaccaatctgtggaagaaacaagggttgttgctgtacggtgatctgatcgaaagtacctttgaagatctgaaactcccatcccgcaagattgatgccctggaccattttcagaaatgctttctgatcctcaaactttatcaccataaagaggacaaacgcaaatgggaaatgccgacgggttcgaacgaaagcgaggccaaaagttggaaagcaattcgcgtagatctggttgtttgtccctacgatcgttatgcgtttgcgttgttgggttggaccggaagccgcatgttcgaacgtgatctgcgccgctacgccacccacgagaagaagatgatgctggacaatcatgcgctgtatgacctgaccaagaaaatctttctcaaagctaaatcggaagaggaaattttcgcacatctggggcttgaatacctggaaccgtccgaacgtaacgca

SEQ ID NO: 26 - protein, 529 aa, synthetic construct
  REGION 1..529: note = Variant of terminal deoxynucleotidyltransferase
MHHHHHHGGSGMHRIRTIDSDFGKKRQKKMDNHISSMIYEIKFHEFVLFILEKKMGATRRTFLTDLARKKGFRVENELSDSVTHIVAENNSGSDVLAWLKTHKMEKTTQFELLDISWLIESMKVGKPVDTKGKYQLMESRVDSANPDPTAGTLNILPPTTKTISQYACQRRTTINNHNQRFTDALEILAENYEFKENDDTCLTFMRAISVLKCLPFEVVSLKDTEGLPWIGDEVKGIMEEIIEVGESLEVQAVLNDERYQSFKLFTSVFGVGLKTADKWYRMGFRTLNDVRSSKTLKLTRMQKAGLCYYEDLADGVTKAEADAVSLLVQDAVWTFDPDALVEITGGFRRGKEFGHDVDLLITSPGAEKEQEDQLLQKVTNLWKKQGLLLYGDLIESTFEDLKLPSRKIDALDHFQKCFLILKLYHHKEDKRKWEMPTGSNESEAKSWKAIRVDLVVCPYDRYAFALLGWTGSRMFERDLRRYATHEKKMMLDNHALYDLTKKIFLKAKSEEEIFAHLGLEYLEPSERNA

SEQ ID NO: 27 - DNA, 1587 bp, synthetic construct
  misc_feature 1..1587: note = Variant of terminal deoxynucleotidyltransferase
  source 1..1587: mol_type = other DNA
atgcaccatcatcatcatcatggcggtagcggcatgcaccgcattcgtaccatcgattcggacttcgggaagaaacgccagaagaagatggataaccacattagttccatgatctatgaaatcaaatttcacgagtttgtgctgttcattctcgaaaagaaaatgggtgcgacgcgtcgtacttttctgacagatttagcccgcaagaaagggttccgcgtcgagaatgaactgtcagacagcgttacccacatcgtggcagaaaataattcaggatctgacgtattggcttggctgaagacccacaagatggagaagacgacgcaatttgaactgctggatattagctggcttatcgaaagcatgaaagttggtaaaccggtggacaccaaggggaaataccagttgatggaatcgcgtgtcgatagtgcgaacccagatccgacagccggtaccctcaacattctgcctcctactacgaagaccatttctcagtatgcgtgtcaacgccgcaccaccatcaacaaccataatcagcgttttacggacgcactggaaattcttgcggaaaattacgagttcaaagaaaacgatgacacttgtctgacctttatgcgtgctatttccgtgctgaaatgccttccgtttgaggtagttagcctgaaagacacggaaggattgccctggatcggtgatgaagtcaaaggtattatggaagaaatcatcgaggtcggtgaatcgctggaagtgcaggccgtgctcaatgatgagcgctatcaaagcttcaaactgtttaccagtgtctttggagtgggggtgaagacagcagacaaatggtaccgtatgggtttccgcacgctcaacgatgttcgttccagcaagaccctgaaattgaccaagatgcagaaagcgggtctgtgttattatgaagatcttgcggatggcgttacgaaagccgaagctgacgcggtatctctgctggttcaggatgcagtctggactttcgacccggatgcgctggtggagattacgggtggatttcgtcgtgggaaaccttttggtcacgacgttgatctgcttatcacatctccgggagctgagaaagaacaagaagatcagctcctgcagaaagtgaccaacctgtggaagaaacaagggttgttgctgtacggtgatctgatcgaaagtacctttgaagatctgaaactcccatcccgcaagattgatgccctggaccattttcagaaatgctttgctatcctcaaactttatcaccataaagaggacaaacgcaaatgggaaacgccgacgggtagcaacgagagcgaggccaaaagttggaaagcaattcgcgtagatctggttgtttgtccctacgatcgttatgcgtttgcgttgttgggttggaccggaagccgcatgttcgaacgtgatctgcgccgctacgccacccacgagaagaagatgatgctggacaatcatgcgctgtatgacctgaccaagaaaatctttctcaaagctaaatcggaagaggaaattttcgcacatctggggcttgaatacctggaaccgtccgaacgtaacgca

SEQ ID NO: 28 - protein, 529 aa, synthetic construct
  REGION 1..529: note = Variant of terminal deoxynucleotidyltransferase
MHHHHHHGGSGMHRIRTIDSDFGKKRQKKMDNHISSMIYEIKFHEFVLFILEKKMGATRRTFLTDLARKKGFRVENELSDSVTHIVAENNSGSDVLAWLKTHKMEKTTQFELLDISWLIESMKVGKPVDTKGKYQLMESRVDSANPDPTAGTLNILPPTTKTISQYACQRRTTINNHNQRFTDALEILAENYEFKENDDTCLTFMRAISVLKCLPFEVVSLKDTEGLPWIGDEVKGIMEEIIEVGESLEVQAVLNDERYQSFKLFTSVFGVGVKTADKWYRMGFRTLNDVRSSKTLKLTKMQKAGLCYYEDLADGVTKAEADAVSLLVQDAVWTFDPDALVEITGGFRRGKPFGHDVDLLITSPGAEKEQEDQLLQKVTNLWKKQGLLLYGDLIESTFEDLKLPSRKIDALDHFQKCFAILKLYHHKEDKRKWETPTGSNESEAKSWKAIRVDLVVCPYDRYAFALLGWTGSRMFERDLRRYATHEKKMMLDNHALYDLTKKIFLKAKSEEEIFAHLGLEYLEPSERNA

SEQ ID NO: 29 - DNA, 1587 bp, synthetic construct
  misc_feature 1..1587: note = Variant of terminal deoxynucleotidyltransferase
  source 1..1587: mol_type = other DNA
atgcaccatcatcatcatcatggcggtagcggcatgcaccgcattcgtaccatcgattcggacttcgggaagaaacgccagaagaagatggataaccacattagttccatgatctatgaaatcaaatttcacgagtttgtgctgttcattctcgaaaagaaaatgggtgcgacgcgtcgtacttttctgacagatttagcccgcaagaaagggttccgcgtcgagaatgaactgtcagacagcgttacccacatcgtggcagaaaataattcaggatctgacgtattggcttggctgaagacccacaagatggagaagacgacgcaatttgaactgctggatattagctggcttatcgaaagcatgaaagttggtaaaccggtggacaccaaggggaaataccagttgatggaatcgcgtgtcgatagtgcgaacccagatccgacagccggtaccctcaacattctgcctcctactacgaagaccatttctcagtatgcgtgtcaacgccgcaccaccatcaacaaccataatcagcgttttacggacgcactggaaattcttgcggaaaattacgagttcaaagaaaacgatgacacttgtctgacctttatgcgtgctatttccgtgctgaaatgccttccgtttgaggtagttagcctgaaagacacggaaggattgccctggatcggtgatgaagtcaaaggtattatggaagaaatcatcgaggtcggtgaatcgctggaagtgcaggccgtgctcaatgatgagcgctatcaaagcttcaaactgtttaccagtgtctttggagtggggctgaagacagcagacaaatggtaccgtatgggtttccgcacgctcaacgatgttcgttccagcaagaccctgaaattgaccaagatgcagaaagcgggtctgtgctattatgaagatcttgctgatggcgttacgaaagccgaagctgacgcggtatctctgctggttcaggatgcagtctggactttcgacccggatgcgctggtggagattacgggtggatttcgtcgtgggaaagagtttggtcacgacgttgatctgcttatcacatctccgggagctgagaaagaacaagaagatcagctcctgcagaaagtgaccgacctgtggaagaaacaagggttgttgctgtacggtgatctgatcgaaagtacctttgaagatgggaaactcccatcccgcaagattgatgccctggaccattttcagaaatgctttgctatcctcaaactttatcaccataaagaggacaaacgcaaatgggaaatgccgacgggtagcaacgagagcgaggccaaaagttggaaagcaattcgcgtagatctggttgtttgtccctacgatcgttatgcgtttgcgttgttgggttggaccggaagccgcatgttcgaacgtgatctgcgccgctacgccacccacgagaagaagatgatgctggacaatcatgcgctgtatgacctgaccaagaaaatctttctcaaagctaaatcggaagaggaaattttcgcacatctggggcttgaatacctggaaccgtccgaacgtaacgca

SEQ ID NO: 30 - protein, 529 aa, synthetic construct
  REGION 1..529: note = Variant of terminal deoxynucleotidyltransferase
MHHHHHHGGSGMHRIRTIDSDFGKKRQKKMDNHISSMIYEIKFHEFVLFILEKKMGATRRTFLTDLARKKGFRVENELSDSVTHIVAENNSGSDVLAWLKTHKMEKTTQFELLDISWLIESMKVGKPVDTKGKYQLMESRVDSANPDPTAGTLNILPPTTKTISQYACQRRTTINNHNQRFTDALEILAENYEFKENDDTCLTFMRAISVLKCLPFEVVSLKDTEGLPWIGDEVKGIMEEIIEVGESLEVQAVLNDERYQSFKLFTSVFGVGLKTADKWYRMGFRTLNDVRSSKTLKLTKMQKAGLCYYEDLADGVTKAEADAVSLLVQDAVWTFDPDALVEITGGFRRGKEFGHDVDLLITSPGAEKEQEDQLLQKVTDLWKKQGLLLYGDLIESTFEDGKLPSRKIDALDHFQKCFAILKLYHHKEDKRKWEMPTGSNESEAKSWKAIRVDLVVCPYDRYAFALLGWTGSRMFERDLRRYATHEKKMMLDNHALYDLTKKIFLKAKSEEEIFAHLGLEYLEPSERNA

SEQ ID NO: 31 - DNA, 1587 bp, synthetic construct
  misc_feature 1..1587: note = Variant of terminal deoxynucleotidyltransferase
  source 1..1587: mol_type = other DNA
atgcaccatcatcatcatcatggcggtagcggcatgcaccgcattcgtaccatcgattcggacttcgggaagaaacgccagaagaagatggataaccacattagttccatgatctatgaaatcaaatttcacgagtttgtgctgttcattctcgaaaagaaaatgggtgcgacgcgtcgtacttttctgacagatttagcccgcaagaaagggttccgcgtcgagaatgaactgtcagacagcgttacccacatcgtggcagaaaataattcaggatctgacgtattggcttggctgaagacccacaagatggagaagacgacgcaatttgaactgctggatattagctggcttatcgaaagcatgaaagttggtaaaccggtggacaccaaggggaaataccagttgatggaatcgcgtgtcgatagtgcgaacccagatccgacagccggtaccctcaacattctgcctcctactacgaagaccatttctcagtatgcgtgtcaacgccgcaccaccctgaacaaccataatcaacgttttacggacgcactggagattcttgcggaaaattacgagttcaaagaaaacgatgatacttgtctgacctttatgcgtgctatttccgtgctgaaatgccttccgtttgaggtagttagcctgaaagacacggaaggattgccctggatcggtgatgaagtcaaaccaattatggaagaaatcatcgaggtcggtgaatcgctggaagtgcaggccgtgctcaatgatgagcgctatcaaagcttcaaactgtttaccagtgtctttggagtgggggtgaagacagcagacaaatggtaccgtcgtggtctgcgcacgctcgaggatgttcgttccagcaagaccctgaaattgaccaagatgcagaaagcgggtctgtgctattatgaagatcttgctgatggcgttacgaaggccgaagctgacgcggtatctctgctggttcaggatgcagtctggactttcgacccggatgcgctggtggagattacgggtggatttcgtcgtgggaaaccttttggtcacgacgttgatctgcttatcacatctccgggagctgagaaagaacaagaagaccagctcctgcagaaagtgaccaatctgtggaagaaacaagggttgttgctgtacggtgacctgcgtcgcagtacctttgaagatctgaaactcccatcccgcaagatcgatgccctggaccattttcagaaatgctttgctatcctcaaactttatcaccataaagtggacaaaagcaaatgggaaatgccgacgggttcgaacgaaagcgaggccaaaagttggaaagcaattcgcgtagatctggttgtttgtccctacgatcgttttgcgtttgcgttgttgggttggaccggaagccgcatgttcgaacgtgatctgcgccgctacgccacccacgagaagaagatgatgctggacaatcatgcgctgtatgacctgaccaagaaaatctttctcaaagctaaatcggaagaggaaattttcgcacatctggggcttgaatacctggaaccgtccgaacgtaacgca

SEQ ID NO: 32 - protein, 529 aa, synthetic construct
  REGION 1..529: note = Variant of terminal deoxynucleotidyltransferase
MHHHHHHGGSGMHRIRTIDSDFGKKRQKKMDNHISSMIYEIKFHEFVLFILEKKMGATRRTFLTDLARKKGFRVENELSDSVTHIVAENNSGSDVLAWLKTHKMEKTTQFELLDISWLIESMKVGKPVDTKGKYQLMESRVDSANPDPTAGTLNILPPTTKTISQYACQRRTTLNNHNQRFTDALEILAENYEFKENDDTCLTFMRAISVLKCLPFEVVSLKDTEGLPWIGDEVKPIMEEIIEVGESLEVQAVLNDERYQSFKLFTSVFGVGVKTADKWYRRGLRTLEDVRSSKTLKLTKMQKAGLCYYEDLADGVTKAEADAVSLLVQDAVWTFDPDALVEITGGFRRGKPFGHDVDLLITSPGAEKEQEDQLLQKVTNLWKKQGLLLYGDLRRSTFEDLKLPSRKIDALDHFQKCFAILKLYHHKVDKSKWEMPTGSNESEAKSWKAIRVDLVVCPYDRFAFALLGWTGSRMFERDLRRYATHEKKMMLDNHALYDLTKKIFLKAKSEEEIFAHLGLEYLEPSERNA

SEQ ID NO: 33 - DNA, 1587 bp, synthetic construct
  misc_feature 1..1587: note = Variant of terminal deoxynucleotidyltransferase
  source 1..1587: mol_type = other DNA
atgcaccatcatcatcatcatggcggtagcggcatgcaccgcattcgtaccatcgattcggacttcgggaagaaacgccagaagaagatggataaccacattagttccatgatctatgaaatcaaatttcacgagtttgtgctgttcattctcgaaaagaaaatgggtgcgacgcgtcgtacttttctgacagatttagcccgcaagaaagggttccgcgtcgagaatgaactgtcagacagcgttacccacatcgtggcagaaaataattcaggatctgacgtattggcttggctgaagacccacaagatggagaagacgacgcaatttgaactgctggatattagctggcttatcgaaagcatgaaagttggtaaaccggtggacaccaaggggaaataccagttgatggaatcgcgtgtcgatagtgcgaacccagatccgacagccggtaccctcaacattctgcctcctactacgaagaccatttctcagtatgcgtgtcaacgccgcaccaccatcaacaaccataatcagcgttttacggacgcactggaaattcttgcggaaaattacgagttcaaagaaaacgatgatacttgtctgacctttatgcgtgctatttccgtgctgaaatgccttccgtttgaggtagttagcctgaaagacacggaaggattgccctggatcggtgatgaagtcaaaggtattatggaagaaatcatcgaggtcggtgaatcgctggaagtgcaggccgtgctcaatgatgagcgctatcaaagcttcaaactgtttaccagtgtctttggagtggggctgaagacagcagacaaatggtaccgtatgggtttccgcacgctcaacgatgttcgttccagcaagaccctgaaattgaccaagatgcagaaagcgggtctgtgctattatgaagatcttgctgatggcgttacgaaagccgaagctgacgcggtatctctgctggttcaggatgcagtctggactttcgacccggatgcgctggtggagattacgggtggatttcgtcgtgggaaagagtttggtcacgacgttgatctgcttatcacatctccgggagctgagaaagaacaagaagaccagctcctgcagaaagtgaccaatctgtggaagaaacaagggttgttgctgtacggtgatctgatctggagtacctttgaagatctgaaactcccatcccgcaagattgatgccctggaccattttcagaaatgctttctgatcctcaaactttatcaccataaagaggacaaacgcaaatgggaaatgccgacgggttcgaacgaaagcgaggccaaaagttggaaagcaattcgcgtagatctggttgtttgtccctacgatcgttatgcgtttgcgttgttgggttggaccggaagccgcatgttcgaacgtgatctgcgccgctacgccacccacgagaagaagatgatgctggacaatcatgcgctgtatgacctgaccaagaaaatctttctcaaagctaaatcggaagaggaaattttcgcacatctggggcttgaatacctggaaccgtccgaacgtaacgca

SEQ ID NO: 34 - protein, 529 aa, synthetic construct
  REGION 1..529: note = Variant of terminal deoxynucleotidyltransferase
MHHHHHHGGSGMHRIRTIDSDFGKKRQKKMDNHISSMIYEIKFHEFVLFILEKKMGATRRTFLTDLARKKGFRVENELSDSVTHIVAENNSGSDVLAWLKTHKMEKTTQFELLDISWLIESMKVGKPVDTKGKYQLMESRVDSANPDPTAGTLNILPPTTKTISQYACQRRTTINNHNQRFTDALEILAENYEFKENDDTCLTFMRAISVLKCLPFEVVSLKDTEGLPWIGDEVKGIMEEIIEVGESLEVQAVLNDERYQSFKLFTSVFGVGLKTADKWYRMGFRTLNDVRSSKTLKLTKMQKAGLCYYEDLADGVTKAEADAVSLLVQDAVWTFDPDALVEITGGFRRGKEFGHDVDLLITSPGAEKEQEDQLLQKVTNLWKKQGLLLYGDLIWSTFEDLKLPSRKIDALDHFQKCFLILKLYHHKEDKRKWEMPTGSNESEAKSWKAIRVDLVVCPYDRYAFALLGWTGSRMFERDLRRYATHEKKMMLDNHALYDLTKKIFLKAKSEEEIFAHLGLEYLEPSERNA

SEQ ID NO: 35 - DNA, 1587 bp, synthetic construct
  misc_feature 1..1587: note = Variant of terminal deoxynucleotidyltransferase
  source 1..1587: mol_type = other DNA
atgcaccatcatcatcatcatggcggtagcggcatgcaccgcattcgtaccatcgattcggacttcgggaagaaacgccagaagaagatggataaccacattagttccatgatctatgaaatcaaatttcacgagtttgtgctgttcattctcgaaaagaaaatgggtgcgacgcgtcgtacttttctgacagatttagcccgcaagaaagggttccgcgtcgagaatgaactgtcagacagcgttacccacatcgtggcagaaaataattcaggatctgacgtattggcttggctgaagacccacaagatggagaaaacgacgcaatttgaactgctggatattagctggcttatcgaaagcatgaaagttggtaaaccggtggacaccaaagggaaataccagttgatggaatcgcgtgtcgatagtgcgaacccagatccgacagccggtaccctcaacattctgcctcctactacgaagaccatttctcagtatgcgtgtcaacgccgcaccaccatcaacaaccataatcagcgttttacggacgcactggaaattcttgcggaaaattacgagttcaaagaaaacgatgatacttgcctgacctttatgcgtgctatttccgtgctgaaatgtcttccgtttgaggtagttagcctgaaagacacggaaggattgccctggatcggtgatgaagtcaaaggtattatggaagaaatcatcgaggacggtgaatcgctggaagtgcaggccgtgctcaatgatgagcgctatcaaagcttcaaactgtttaccagtgtctttggagtggggctgaagacagcagacaaatggtaccgtatgggtttccgcacgctcaacgatgttcgttccagcaagaccctgaaattgaccaagatgcagaaagcgggtctgtgctattatgaagatcttgctgattgcgtttcgaaagccgaagctgacgcggtatctctgctggttcaggatgcagtctggactttcttgccggatgcgctggtggagattacgggtggatttcgtcgtgggaaagagtttggtcacgacgttgatttccttatcacatctccgggagctgagaaagaacaagaagaccagctcctgcagaaagtgaccaatctgtggaagaaacaagggttgttgctgtactgcgatctgatcgaaagcacctttgaagatctgaaactcccatcccgcaagattgatgccctggaccattttcagaaatgctttctgatcctcaaactttatcaccataaagaggacaaacgcaaatgggaaatgccgacgggttcgaacgaaagcgaggccaaaagttggaaagcaattcgcgtagatctggttgtttgtccctacgatcgttatgcgtttgcgttgttgggttggagtggaagccgccaattcgaacgtgatctgcgccgctacgccacccacgagaagaagatgatgctggacaatcatgcgctgtatgacctgaccaagaaaatctttctcaaagctaaatcggaagaggaaattttcgcacatctggggcttgaatacattcagccgtccgaacgtaacgca

SEQ ID NO: 36 - protein, 529 aa, synthetic construct
  REGION 1..529: note = Variant of terminal deoxynucleotidyltransferase
MHHHHHHGGSGMHRIRTIDSDFGKKRQKKMDNHISSMIYEIKFHEFVLFILEKKMGATRRTFLTDLARKKGFRVENELSDSVTHIVAENNSGSDVLAWLKTHKMEKTTQFELLDISWLIESMKVGKPVDTKGKYQLMESRVDSANPDPTAGTLNILPPTTKTISQYACQRRTTINNHNQRFTDALEILAENYEFKENDDTCLTFMRAISVLKCLPFEVVSLKDTEGLPWIGDEVKGIMEEIIEDGESLEVQAVLNDERYQSFKLFTSVFGVGLKTADKWYRMGFRTLNDVRSSKTLKLTKMQKAGLCYYEDLADCVSKAEADAVSLLVQDAVWTFLPDALVEITGGFRRGKEFGHDVDFLITSPGAEKEQEDQLLQKVTNLWKKQGLLLYCDLIESTFEDLKLPSRKIDALDHFQKCFLILKLYHHKEDKRKWEMPTGSNESEAKSWKAIRVDLVVCPYDRYAFALLGWSGSRQFERDLRRYATHEKKMMLDNHALYDLTKKIFLKAKSEEEIFAHLGLEYIQPSERNA

SEQ ID NO: 37 - DNA, 1587 bp, synthetic construct
  misc_feature 1..1587: note = Variant of terminal deoxynucleotidyltransferase
  source 1..1587: mol_type = other DNA
atgcaccatcatcatcatcatggcggtagcggcatgcaccgcattcgtaccatcgattcggacttcgggaagaaacgccagaagaagatggataaccacattagttccatgatctatgaaatcaaatttcacgagtttgtgctgttcattctcgaaaagaaaatgggtgcgacgcgtcgtacttttctgacagatttagcccgcaagaaagggttccgcgtcgagaatgaactgtcagacagcgttacccacatcgtggcagaaaataattcaggatctgacgtattggcttggctgaagacccacaagatggagaagacgacgcaatttgaactgctggatattagctggcttatcgaaagcatgaaagttggtaaaccggtggacaccaaggggaaataccagttgatggaatcgcgtgtcgatagtgcgaacccagatccgacagccggtaccctcaacattctgcctcctactacgaagaccatttctcagtatgcgtgtcaacgccgcaccaccatcaacaaccataatcagcgttttacggacgcactggaaattcttgcggaaaattacgagttcaaacggaacgatgatacttgtctgacctttatgcgtgctatttccgtgctgaaatgccttccgtttgaggtagttagcctgaaagacacggaaggattgccctggatcggtgatgaagtcaaaggtattatggaagaaatcatcgaggtcggtgaatcgctggaagtgcaggccgtgctcaatgatgagcgctatcaaagcttcaaactgtttaccagtgtctttggagtggggctgaagacagcagacaaatggtaccgtatgggtttccgcacgctcaacgatgttcgttccagcaagaccctgaaattgaccaagatgcagaaagcgggtctgtgctattatgaagatcttgctgatggcgttacgaaagccgaagctgacgcggtatctctgctggttcaggatgcagtctggactttcgacccggatgcgctggtggagattacgggtggatttcgtcgtgggaaagagtttggtcacgacgttgatctgcttatcacatctccgggagctgagaaagaacaagaagaccagctcctgcagaaagtgaccaatctgtggaagaaacaagggttgttgctgtacggtgatctgatcgaaagtacctttgaagatctgaaactcccatcccgcaagattgatgccctggaccattttcagaaatgctttctgatcctcaaactttatcaccataaagaggacaaacgcaaatgggaaatgccgacgggttcgaacgaaagcgaggccaaaagttggaaagcaattcgcgtagatctggttgtttgtccctacgatcgttatgcgtttgcgttgttgggttggaccggaagccgcatgttcgaacgtgatctgcgccgctacgccacccacgagaagaagatgatgctggacaatcatgcgctgtatgacctgaccaagaaaatctttctcaaagctaaatcggaagaggaaattttcgcacatctggggcttgaatacctggaaccgtccgaacgtaacgca

SEQ ID NO: 38 - protein, 529 aa, synthetic construct
  REGION 1..529: note = Variant of terminal deoxynucleotidyltransferase
MHHHHHHGGSGMHRIRTIDSDFGKKRQKKMDNHISSMIYEIKFHEFVLFILEKKMGATRRTFLTDLARKKGFRVENELSDSVTHIVAENNSGSDVLAWLKTHKMEKTTQFELLDISWLIESMKVGKPVDTKGKYQLMESRVDSANPDPTAGTLNILPPTTKTISQYACQRRTTINNHNQRFTDALEILAENYEFKRNDDTCLTFMRAISVLKCLPFEVVSLKDTEGLPWIGDEVKGIMEEIIEVGESLEVQAVLNDERYQSFKLFTSVFGVGLKTADKWYRMGFRTLNDVRSSKTLKLTKMQKAGLCYYEDLADGVTKAEADAVSLLVQDAVWTFDPDALVEITGGFRRGKEFGHDVDLLITSPGAEKEQEDQLLQKVTNLWKKQGLLLYGDLIESTFEDLKLPSRKIDALDHFQKCFLILKLYHHKEDKRKWEMPTGSNESEAKSWKAIRVDLVVCPYDRYAFALLGWTGSRMFERDLRRYATHEKKMMLDNHALYDLTKKIFLKAKSEEEIFAHLGLEYLEPSERNA

SEQ ID NO: 39 - DNA, 1587 bp, synthetic construct
  misc_feature 1..1587: note = Variant of terminal deoxynucleotidyltransferase
  source 1..1587: mol_type = other DNA
atgcaccatcatcatcatcatggcggtagcggcatgcaccgcattcgtaccatcgattcggacttcgggaagaaacgccagaagaagatggataaccacattagttccatgatctatgaaatcaaatttcacgagtttgtgctgttcattctcgaaaagaaaatgggtgcgacgcgtcgtacttttctgacagatttagcccgcaagaaagggttccgcgtcgagaatgaactgtcagacagcgttacccacatcgtggcagaaaataattcaggatctgacgtattggcttggctgaagacccacaagatggagaagacgacgcaatttgaactgctggatattagctggcttatcgaaagcatgaaagttggtaaaccggtggacaccaaggggaaataccagttgatggaatcgcgtgtcgatagtgcgaacccagatccgacagccggtaccctcaacattctgcctcctactacgaagaccatttctcagtatgcgtgtcaacgccgcaccaccatcaacaaccataatcagcgttttacggacgcactggaaattcttgcggaaaattacgagttcaaagaaaacgatgatacttgtctgacctttatgcgtgctatttccgtgctgaaatgccttccgtttgaggtagttagcctgaaagacacggaaggattgccctggatcggtgatgaagtcaaaggtattatggaagaaatcatcgaggtcggtgaatcgctggaagtgcaggccgtgctcaatgatgagcgctatcaaagcttcaaactgtttaccagtgtctttggagtggggctgaagacagcagacaaatggtaccgtatgggtttccgcacgctcaacgatgttcgttccagcaagaccctgaaattgaccaagatgcagaaagcgggtctgtgctattatgaagatcttgctgatggcgttacgaaagccgaagctgacgcggtatctctgctggttcaggatgcagtctggactttcgacccggatgcgctggtggagattacgggtggatttcgtcgtgggaaagagtttggtcacgacgttgatctgcttatcacatctccgggagctgagaaagaacaagaagaccagctcctgcagaaagtgaccaatctgtggaagaaacaagggttgttgctgtacggtaggctgatcgaaagtacctttgaagatctgaaactcccatcccgcaagattgatgccctggaccattttcagaaatgctttctgatcctcaaactttatcaccataaagaggacaaacgcaaatgggaaatgccgacgggttcgaacgaaagcgaggccaaaagttggaaagcaattcgcgtagatctggttgtttgtccctacgatcgttatgcgtttgcgttgttgggttggaccggaagccgcatgttcgaacgtgatctgcgccgctacgccacccacgagaagaagatgatgctggacaatcatgcgctgtatgacctgaccaagaaaatctttctcaaagctaaatcggaagaggaaattttcgcacatctggggcttgaatacctggaaccgtccgaacgtaacgca

SEQ ID NO: 40 - protein, 529 aa, synthetic construct
  REGION 1..529: note = Variant of terminal deoxynucleotidyltransferase
MHHHHHHGGSGMHRIRTIDSDFGKKRQKKMDNHISSMIYEIKFHEFVLFILEKKMGATRRTFLTDLARKKGFRVENELSDSVTHIVAENNSGSDVLAWLKTHKMEKTTQFELLDISWLIESMKVGKPVDTKGKYQLMESRVDSANPDPTAGTLNILPPTTKTISQYACQRRTTINNHNQRFTDALEILAENYEFKENDDTCLTFMRAISVLKCLPFEVVSLKDTEGLPWIGDEVKGIMEEIIEVGESLEVQAVLNDERYQSFKLFTSVFGVGLKTADKWYRMGFRTLNDVRSSKTLKLTKMQKAGLCYYEDLADGVTKAEADAVSLLVQDAVWTFDPDALVEITGGFRRGKEFGHDVDLLITSPGAEKEQEDQLLQKVTNLWKKQGLLLYGRLIESTFEDLKLPSRKIDALDHFQKCFLILKLYHHKEDKRKWEMPTGSNESEAKSWKAIRVDLVVCPYDRYAFALLGWTGSRMFERDLRRYATHEKKMMLDNHALYDLTKKIFLKAKSEEEIFAHLGLEYLEPSERNA

SEQ ID NO: 41 - DNA, 1587 bp, synthetic construct
  misc_feature 1..1587: note = Variant of terminal deoxynucleotidyltransferase
  source 1..1587: mol_type = other DNA
atgcaccatcatcatcatcatggcggtagcggcatgcaccgcattcgtaccatcgattcggacttcgggaagaaacgccagaagaagatggataaccacattagttccatgatctatgaaatcaaatttcacgagtttgtgctgttcattctcgaaaagaaaatgggtgcgacgcgtcgtacttttctgacagatttagcccgcaagaaagggttccgcgtcgagaatgaactgtcagacagcgttacccacatcgtggcagaaaataattcaggatctgacgtattggcttggctgaagacccacaagatggagaagacgacgcaatttgaactgctggatattagctggcttatcgaaagcatgaaagttggtaaaccggtggacaccaaggggaaataccagttgatggaatcgcgtgtcgatagtgcgaacccagatccgacagccggtaccctcaacattctgcctcctactacgaagaccatttctcagtatgcgtgtcaacgccgcaccaccctgaacaaccataatcaacgttttacggacgcactggggattcttgcggaaaattacgagttcaaagaaaacgatgatacttgtctgacctttatgcgtgctatttccgtgctgaaatgccttccgtttgaggtagttagcctgaaagacacggaaggattgccctggatcggtgatgaagtcaaaccaattatggaagaaatcatcgaggtcggtgaatcgctggaagtgcaggccgtgctcaatgatgagcgctatcaaagcttcaaactgtttaccagtgtctttggagtgggggtgaagacagcagacaaatggtaccgtatgggtctgcgcacgctcgaggatgttcgttccagcaagaccctgaaattgaccaagatgcagaaagcgggtctgtgctattatgaagatcttgctgatggcgttacgaaagccgaagctgacgcggtatctctgctggttcaggatgcagtctggactttcgacccggatgcgctggtggagattacgggtggatttcgtcgtgggaaaccttttggtcacgacgttgatctgcttatcacatctccgggagctgagaaagaacaagaagaccagctcctgcagaaagtgaccaatctgtggaagaaacaagggttgttgctgtacggtgacctgcgtcgcagtacctttgaagatctgaaactcccatcccgcaagatcgatgccctggaccattttcagaaatgctttgctatcctcaaactttatcaccataaagtggacaaaagcaaatgggaaatgccgacgggttcgaacgaaagcgaggccaaaagttggaaagcaattcgcgtagatctggttgtttgtccctacgatcgttttgcgtttgcgttgttgggttggaccggaagccgcatgttcgaacgtgatctgcgccgctacgccacccacgagaagaagatgatgctggacaatcatgcgctgtatgacctgaccaagaaaatctttctcaaagctaaatcggaagaggaaattttcgcacatctggggcttgaatacctggaaccgtccgaacgtaacgca

SEQ ID NO: 42 - protein, 529 aa, synthetic construct
  REGION 1..529: note = Variant of terminal deoxynucleotidyltransferase
MHHHHHHGGSGMHRIRTIDSDFGKKRQKKMDNHISSMIYEIKFHEFVLFILEKKMGATRRTFLTDLARKKGFRVENELSDSVTHIVAENNSGSDVLAWLKTHKMEKTTQFELLDISWLIESMKVGKPVDTKGKYQLMESRVDSANPDPTAGTLNILPPTTKTISQYACQRRTTLNNHNQRFTDALGILAENYEFKENDDTCLTFMRAISVLKCLPFEVVSLKDTEGLPWIGDEVKPIMEEIIEVGESLEVQAVLNDERYQSFKLFTSVFGVGVKTADKWYRMGLRTLEDVRSSKTLKLTKMQKAGLCYYEDLADGVTKAEADAVSLLVQDAVWTFDPDALVEITGGFRRGKPFGHDVDLLITSPGAEKEQEDQLLQKVTNLWKKQGLLLYGDLRRSTFEDLKLPSRKIDALDHFQKCFAILKLYHHKVDKSKWEMPTGSNESEAKSWKAIRVDLVVCPYDRFAFALLGWTGSRMFERDLRRYATHEKKMMLDNHALYDLTKKIFLKAKSEEEIFAHLGLEYLEPSERNA

SEQ ID NO: 43 - DNA, 1587 bp, synthetic construct
  misc_feature 1..1587: note = Variant of terminal deoxynucleotidyltransferase
  source 1..1587: mol_type = other DNA
atgcaccatcatcatcatcatggcggtagcggcatgcaccgcattcgtaccatcgattcggacttcgggaagaaacgccagaagaagatggataaccacattagttccatgatctatgaaatcaaatttcacgagtttgtgctgttcattctcgaaaagaaaatgggtgcgacgcgtcgtacttttctgacagatttagcccgcaagaaagggttccgcgtcgagaatgaactgtcagacagcgttacccacatcgtggcagaaaataattcaggatctgacgtattggcttggctgaagacccacaagatggagaaaacgacgcaatttgaactgctggatattagctggcttatcgaaagcatgaaagttggtaaaccggtggacaccaaagggaaataccagttgatggaatcgcgtgtcgatagtgcgaacccagatccgacagccggtaccctcaacattctgcctcctactacgaagaccatttctcagtatgcgtgtcaacgccgcaccaccatcaacaaccataatcagcgttttacggacgcattcgaaattcttgcggaaaattacgagttcaaagaaaacgatgatacttgcctgacctttatgcgtgctatttccgtgctgaaatgccttccgtttgaggtagttagcctgaaagacacggaaggattgccctggatcggtgatgaagtcaaagggattatggaagaaatcatcgaggacggtgaatcgctggaagtgcaggccgtgctcaatgatgagcgctatcaaagcttcaaactgtttaccagtgtctttggagtggggctgaagacagcagacaaatggtaccgtatgggtttccgcacgctcaacgatgttcgttccgacaagaccctgaaattgaccaagatgcagaaagcgggtctgtgctattatgaagatcttattgattgtgtttcaaaagccgaagctgacgcggtatctctgctggttcaggatgcagtctggactttcttgccggatgcgctggtgacgattacgggtggatttcgtcgtgggaaagagtttggtcacgacgttgatttccttatcacatctccgggagctgagaaagaacaagaagaccagctcctgcagaaagtgaccaatctgtggaagaaacaagggttgttgctgtactgcgatctgatcgaaagcacctttgaagatctgaaactcccatcccgcaagattgatgccctggaccattttcagaaatgctttctgatcctcaaactttatcaccataaagaggacaaacgcaaatgggaaatgccgacgggttcgaacgaaagcgaggccaaaagttggaaagcaattcgcgtagatctggttgtttgtccctacgatcgttatgcgtttgcgttgttgggttggagtggaagccgccaattcgaacgtgatctgcgccgctacgccacccacgagaagaagatgatgctggacaatcatgcgctgtatgacaagaccaagaaaatctttctcaaagctaaatcggaagaggaaattttcgcacatctggggcttgaatacattcagccgtccgaacgtaacgca

SEQ ID NO: 44 - protein, 529 aa, synthetic construct
  REGION 1..529: note = Variant of terminal deoxynucleotidyltransferase
MHHHHHHGGSGMHRIRTIDSDFGKKRQKKMDNHISSMIYEIKFHEFVLFILEKKMGATRRTFLTDLARKKGFRVENELSDSVTHIVAENNSGSDVLAWLKTHKMEKTTQFELLDISWLIESMKVGKPVDTKGKYQLMESRVDSANPDPTAGTLNILPPTTKTISQYACQRRTTINNHNQRFTDAFEILAENYEFKENDDTCLTFMRAISVLKCLPFEVVSLKDTEGLPWIGDEVKGIMEEIIEDGESLEVQAVLNDERYQSFKLFTSVFGVGLKTADKWYRMGFRTLNDVRSDKTLKLTKMQKAGLCYYEDLIDCVSKAEADAVSLLVQDAVWTFLPDALVTITGGFRRGKEFGHDVDFLITSPGAEKEQEDQLLQKVTNLWKKQGLLLYCDLIESTFEDLKLPSRKIDALDHFQKCFLILKLYHHKEDKRKWEMPTGSNESEAKSWKAIRVDLVVCPYDRYAFALLGWSGSRQFERDLRRYATHEKKMMLDNHALYDKTKKIFLKAKSEEEIFAHLGLEYIQPSERNA

SEQ ID NO: 45 - DNA, 1587 bp, synthetic construct
  misc_feature 1..1587: note = Variant of terminal deoxynucleotidyltransferase
  source 1..1587: mol_type = other DNA
atgcaccatcatcatcatcatggcggtagcggcatgcaccgcattcgtaccatcgattcggacttcgggaagaaacgccagaagaagatggataaccacattagttccatgatctatgaaatcaaatttcacgagtttgtgctgttcattctcgaaaagaaaatgggtgcgacgcgtcgtacttttctgacagatttagcccgcaagaaagggttccgcgtcgagaatgaactgtcagacagcgttacccacatcgtggcagaaaataattcaggatctgacgtattggcttggctgaagacccacaagatggaggatacgacgcaatttgaactgctggatattagctggcttatcgaaagcatgaaagttggtaaaccggtggacaccaaagggaaataccagttgatggaatcgcgtgtcgatagtgcgaacccagatccgacagccggtaccctcaacattctgcctcctactacgaagaccatttctcagtatgcgtgtcaacgccgcaccaccatcaacaaccataatcagcgttttacggacgcactggaaattcttgcggaaaattacgagttcaaagaaaacgatgatacttgtctgacctttcgccgtgctatttccgtgctgaaatgtcttccgtttgaggtagttagcctgaaagacacggaaggattgccctggatcggtgatgaagtcaaaggtattatggaagaaatcatcgaggacggtgaatcgctggaagtgcaggccgtgctcaatgatgagcgctatcaaagcttcaaactgtttaccagtgtctttggagtggggctgaagacagcagacaaatggtaccgtatgggtttccgcacgctcaacgatgttcgttccagcaagaccctgaaattgaccaagatgcagaaagcgggtctgtgctattatgaagatcttgctgattgcgtttcgaaagccgaagctgacgcggtatctctgctggttcaggatgcagtctggactttcctgccggatgcgctggtggagattacgggtggatttcgtcgtgggaaagagtttggtcacgacgttgatttccttatcacatctccgggagctgagaaagaacaagaagaccagctcctgcagaaagtgaccaatctgtggaagaaacaagggttgttgctgtactgcgatctgatcgaaagtacctttgaagatctgaaactcccatcccgcaagattgatgccctggaccattttcagaaatgctttctgatcctcaaactttatcaccataaagaggacaaacgcaaatgggaaatgccgacgggttcgaacgaaagcgaggccaaaagttggaaagcaattcgcgtagatctggttgtttgtccctacgatcgttatgcgtttgcgttgttgggttggaccggaagccgcatgttcgaacgtgatctgcgccgctacgccacccacgagaagaagatgatgctggacaatcatgcgctgtatgacctgaccaagaaaatctttctcaaagctaaatcggaagaggaaattttcgcacatctggggcttgaatacatcgaaccgtccgaacgtaacgca

SEQ ID NO: 46 - protein, 529 aa, synthetic construct
  REGION 1..529: note = Variant of terminal deoxynucleotidyltransferase
MHHHHHHGGSGMHRIRTIDSDFGKKRQKKMDNHISSMIYEIKFHEFVLFILEKKMGATRRTFLTDLARKKGFRVENELSDSVTHIVAENNSGSDVLAWLKTHKMEDTTQFELLDISWLIESMKVGKPVDTKGKYQLMESRVDSANPDPTAGTLNILPPTTKTISQYACQRRTTINNHNQRFTDALEILAENYEFKENDDTCLTFRRAISVLKCLPFEVVSLKDTEGLPWIGDEVKGIMEEIIEDGESLEVQAVLNDERYQSFKLFTSVFGVGLKTADKWYRMGFRTLNDVRSSKTLKLTKMQKAGLCYYEDLADCVSKAEADAVSLLVQDAVWTFLPDALVEITGGFRRGKEFGHDVDFLITSPGAEKEQEDQLLQKVTNLWKKQGLLLYCDLIESTFEDLKLPSRKIDALDHFQKCFLILKLYHHKEDKRKWEMPTGSNESEAKSWKAIRVDLVVCPYDRYAFALLGWTGSRMFERDLRRYATHEKKMMLDNHALYDLTKKIFLKAKSEEEIFAHLGLEYIEPSERNA

SEQ ID NO: 47 - DNA, 1587 bp, synthetic construct
  misc_feature 1..1587: note = Variant of terminal deoxynucleotidyltransferase
  source 1..1587: mol_type = other DNA
atgcaccatcatcatcatcatggcggtagcggcatgcaccgcattcgtaccatcgattcggacttcgggaagaaacgccagaagaagatggataaccacattagttccatgatctatgaaatcaaatttcacgagtttgtgctgttcattctcgaaaagaaaatgggtgcgacgcgtcgtacttttctgacagatttagcccgcaagaaagggttccgcgtcgagaatgaactgtcagacagcgttacccacatcgtggcagaaaataattcaggatctgacgtattggcttggctgaagacccacaagatggagaagacgacgcaatttgaactgctggatattagctggcttatcgaaagcatgaaagttggtaaaccggtggacaccaaggggaaataccagttgatggaatcgcgtgtcgatagtgcgaacccagatccgacagccggtaccctcaacattctgcctcctactacgaagaccatttctcagtatgcgtgtcaacgccgcaccaccatcaacaaccataatcagcgttttacggacgcactggaaattcttgcggaaaattacgagttcaaagaaaacgatgatacttgcctgacctttatgcgtgctatttccgtgctgaaatgtcttccgtttgaggtagttagcctgaaagacacggaaggattgccctggatcggtgatgaagtcaaaggtattatggaagaaatcatcgaggacggtgaatcgctggaagtgcaggccgtgctcaatgatgagcgctatcaaagcttcaaactgtttaccagtgtctttggagtggggctgaagacagcagacaaatggtaccgtatgggtttccgcacgctcaacgatgttcgttccagcaagaccctgaaattgaccaagatgcagaaagcgggtctgtgctattatgaagatcttgctgattgcgtttcgaaagccgaagctgacgcggtatctctgctggttcaggatgcagtctggactttcgacccggatgcgctggtggagattacgggtggatttcgtcgtgggaaagagtttggtcacgacgttgatctgcttatcacatctccgggagctgagaaagaacaagaagaccagctcctgcagaaagtgaccaatctgtggaagaaacaagggttgttgctgtacggtgatctgatcgaaagtacctttgaagatctgaaactcccatcccgcaagattgatgccctggaccattttcagaaatgctttctgatcctcaaactttatcaccataaagaggacaaacgcaaatgggaaatgccgacgggttcgaacgaaagcgaggccaaaagttggaaagcaattcgcgtagatctggttgtttgtccctacgatcgttatgcgtttgcgttgttgggttggaccggaagccgcatgttcgaacgtgatctgcgccgctacgccacccacgagaagaagatgatgctggacaatcatgcgctgtatgacctgaccaagaaaatctttctcaaagctaaatcggaagaggaaattttcgcacatctggggcttgaatacctggaaccgtccgaacgtaacgca

SEQ ID NO: 48 - protein, 529 aa, synthetic construct
  REGION 1..529: note = Variant of terminal deoxynucleotidyltransferase
MHHHHHHGGSGMHRIRTIDSDFGKKRQKKMDNHISSMIYEIKFHEFVLFILEKKMGATRRTFLTDLARKKGFRVENELSDSVTHIVAENNSGSDVLAWLKTHKMEKTTQFELLDISWLIESMKVGKPVDTKGKYQLMESRVDSANPDPTAGTLNILPPTTKTISQYACQRRTTINNHNQRFTDALEILAENYEFKENDDTCLTFMRAISVLKCLPFEVVSLKDTEGLPWIGDEVKGIMEEIIEDGESLEVQAVLNDERYQSFKLFTSVFGVGLKTADKWYRMGFRTLNDVRSSKTLKLTKMQKAGLCYYEDLADCVSKAEADAVSLLVQDAVWTFDPDALVEITGGFRRGKEFGHDVDLLITSPGAEKEQEDQLLQKVTNLWKKQGLLLYGDLIESTFEDLKLPSRKIDALDHFQKCFLILKLYHHKEDKRKWEMPTGSNESEAKSWKAIRVDLVVCPYDRYAFALLGWTGSRMFERDLRRYATHEKKMMLDNHALYDLTKKIFLKAKSEEEIFAHLGLEYLEPSERNA

SEQ ID NO: 49 - DNA, 1587 bp, synthetic construct
  misc_feature 1..1587: note = Variant of terminal deoxynucleotidyltransferase
  source 1..1587: mol_type = other DNA
atgcaccatcatcatcatcatggcggtagcggcatgcaccgcattcgtaccatcgattcggacttcgggaagaaacgccagaagaagatggataaccacattagttccatgatctatgaaatcaaatttcacgagtttgtgctgttcattctcgaaaagaaaatgggtgcgacgcgtcgtacttttctgacagatttagcccgcaagaaagggttccgcgtcgagaatgaactgtcaaacagcgttacccacatcgtggcagaaaataattcaggatctgacgtattggcttggctgaagacccacaagatggagaaaacgacgcaatttgaactgctggatattagctggcttatcgaaagcatgaaagttggtaaaccggtggacaccaaagggaaataccagttgatggaatcgcgtgtcgatagtgcgaacccagatccgacagccggtaccctcaacattctgcctcctactacgaagaccatttctcagtatgcgtgtcaacgccgcaccaccatcaacaaccataatcagcgttttacggacgcactggaaattcttgcggaaaattacgagttcaaagaaaacgatgatacttgcctgacctttatgcgtgctatttccgtgctgaaaagccttccgtttgaggtagttagcctgaaagacacggaaggattgccctggatcggtgatgaagtcaaaggtattatggaagaaatcatcgaggacggtgaatcgctggaagtgcaggccgtgctcaatgatgagcgctatcaaagcttcaaactgtttaccagtgtctttggagtggggctgaagacagcagacaaatggtaccgtatgggtttccgcacgctcaacgatgttcgttccagcaagaccctgaaattgaccaagatgcagaaagcgggtctgtgctattatgaagatcttattgattgtgtttcaaaagccgaagctgacgcggtatctctgctggttcaggatgcagtctggactttcttgccggatgcgctggtgacgattacgggtggatttcgtcgtgggaaagagtttggtcacgacgttgatttccttatcacatctccgggagctgagaaagaacaagaagaccagctcctgcagaaagtgaccaatctgtggaagaaacaagggttgttgctgtactgcgatctgatcgaaagcacctttgaagatctgaaactcccatcccgcaagattgatgccctggaccatttccagaaatgctttctgatcctcaaactttatcaccataaagaggacaaacgcaaatgggaaatgccgacgggttcgaacgaaagcgaggccaaaagttggaaagcaattcgcgtagatctggttgtttgtccctacgatcgttatgcgtttgcgttgttgggttggagtggaagccgccaattcgaacgtgatctgcgccgctacgccacccacgagaagaagatgatgctggacaatcatgcgctgtatgacaagaccaagaaaatctttctcaaagctaaatcggaagaggaaattttcgcacatctggggcttgaatacattcagccgtccgaacgtaacgca

SEQ ID NO: 50 - protein, 529 aa, synthetic construct
  REGION 1..529: note = Variant of terminal deoxynucleotidyltransferase
MHHHHHHGGSGMHRIRTIDSDFGKKRQKKMDNHISSMIYEIKFHEFVLFILEKKMGATRRTFLTDLARKKGFRVENELSNSVTHIVAENNSGSDVLAWLKTHKMEKTTQFELLDISWLIESMKVGKPVDTKGKYQLMESRVDSANPDPTAGTLNILPPTTKTISQYACQRRTTINNHNQRFTDALEILAENYEFKENDDTCLTFMRAISVLKSLPFEVVSLKDTEGLPWIGDEVKGIMEEIIEDGESLEVQAVLNDERYQSFKLFTSVFGVGLKTADKWYRMGFRTLNDVRSSKTLKLTKMQKAGLCYYEDLIDCVSKAEADAVSLLVQDAVWTFLPDALVTITGGFRRGKEFGHDVDFLITSPGAEKEQEDQLLQKVTNLWKKQGLLLYCDLIESTFEDLKLPSRKIDALDHFQKCFLILKLYHHKEDKRKWEMPTGSNESEAKSWKAIRVDLVVCPYDRYAFALLGWSGSRQFERDLRRYATHEKKMMLDNHALYDKTKKIFLKAKSEEEIFAHLGLEYIQPSERNA

SEQ ID NO: 51 - DNA, 1587 bp, synthetic construct
  misc_feature 1..1587: note = Variant of terminal deoxynucleotidyltransferase
  source 1..1587: mol_type = other DNA
atgcaccatcatcatcatcatggcggtagcggcatgcaccgcattcgtaccatcgattcggacttcgggaagaaacgccagaagaagatggataaccacattagttccatgatctatgaaatcaaatttcacgagtttgtgctgttcattctcgaaaagaaaatgggtgcgacgcgtcgtacttttctgacagatttagcccgcaagaaagggttccgcgtcgagaatgaactgtcagacagcgttacccacatcgtggcagaaaataattcaggatctgacgtattggcttggctgaagacccacaagatggagaagacgacgcaatttgaactgctggatattagctggcttatcgaaagcatgaaagttggtaaaccggtggacaccaaggggaaataccagttgatggaatcgcgtgtcgatagtgcgaacccagatccgacagccggtaccctcaacattctgcctcctactacgaagaccatttctcagtatgcgtgtcaacgccgcaccaccatcaacaaccataatcagcgttttacggacgcactggaaattcttgcggaaaattacgagttcaaagaaaacgatgatacttgtctgacctttatgcgtgctatttccgtgctgaaatgccttccgtttgaggtagttagcctgaaagacacggaaggattgccctggatcggtgatgaagtcaaaggtattatggaagaaatcatcgaggtcggtgaatcgctggaagtgcaggccgtgctcaatgatgagcgctatcaaagcttcaaactgtttaccagtgtctttggagtggggctgaagacagcagacaaatggtaccgtatgggtttccgcacgctcaacgatgttcgttccagcaagaccctgaaattgaccaagatgcagaaagcgggtctgtgctattatgaagatcttgctgattgcgtttcgaaagccgaagctgacgcggtatctctgctggttcaggatgcagtctggactttcgacccggatgcgctggtggagattacgggtggatttcgtcgtgggaaagagtttggtcacgacgttgatctgcttatcacatctccgggagctgagaaagaacaagaagaccagctcctgcagaaagtgaccaatctgtggaagaaacaagggttgttgctgtacggtgatctgatcgaaagtacctttgaagatctgaaactcccatcccgcaagattgatgccctggaccatcatcagaaatgctttctgatcctcaaactttatcaccataaagaggacaaacgcaaatgggaaatgccgacgggttcgaacgaaagcgaggccaaaagttggaaagcaattcgcgtagatctggttgtttgtccctacgatcgttatgcgtttgcgttgttgggttggaccggaagccgcatgttcgaacgtgatctgcgccgctacgccacccacgagaagaagatgatgctggacaatcatgcgctgtatgacctgaccaagaaaatctttctcaaagctaaatcggaagaggaaattttcgcacatctggggcttgaatacctggaaccgtccgaacgtaacgca

SEQ ID NO: 52 - protein, 529 aa, synthetic construct
  REGION 1..529: note = Variant of terminal deoxynucleotidyltransferase
MHHHHHHGGSGMHRIRTIDSDFGKKRQKKMDNHISSMIYEIKFHEFVLFILEKKMGATRRTFLTDLARKKGFRVENELSDSVTHIVAENNSGSDVLAWLKTHKMEKTTQFELLDISWLIESMKVGKPVDTKGKYQLMESRVDSANPDPTAGTLNILPPTTKTISQYACQRRTTINNHNQRFTDALEILAENYEFKENDDTCLTFMRAISVLKCLPFEVVSLKDTEGLPWIGDEVKGIMEEIIEVGESLEVQAVLNDERYQSFKLFTSVFGVGLKTADKWYRMGFRTLNDVRSSKTLKLTKMQKAGLCYYEDLADCVSKAEADAVSLLVQDAVWTFDPDALVEITGGFRRGKEFGHDVDLLITSPGAEKEQEDQLLQKVTNLWKKQGLLLYGDLIESTFEDLKLPSRKIDALDHHQKCFLILKLYHHKEDKRKWEMPTGSNESEAKSWKAIRVDLVVCPYDRYAFALLGWTGSRMFERDLRRYATHEKKMMLDNHALYDLTKKIFLKAKSEEEIFAHLGLEYLEPSERNA

SEQ ID NO: 53 - DNA, 1587 bp, synthetic construct
  misc_feature 1..1587: note = Variant of terminal deoxynucleotidyltransferase
  source 1..1587: mol_type = other DNA
atgcaccatcatcatcatcatggcggtagcggcatgcaccgcattcgtaccatcgattcggacttcgggaagaaacgccagaagaagatggataaccacattagttccatgatctatgaaatcaaatttcacgagtttgtgctgttcattctcgaaaagaaaatgggtgcgacgcgtcgtacttttctgacagatttagcccgcaagaaagggttccgcgtcgagaatgaactgtcagacagcgttacccacatcgtggcagaaaataattcaggatctgacgtattggcttggctgaagacccacaagatggagaaaacgacgcaatttgaactgctggatattagctggcttatcgaaagcatgaaagttggtaaaccggtggacaccaaagggaaataccagttgatggaatcgcgtgtcgatagtgcgaacccagatccgacagccggtaccctcaacattctgcctcctactacgaagaccatttctcagtatgcgtgtcaacgccgcaccaccatcaacaaccataatcagcgttttacggacgcactggaaattcttgcgaaaaattacgagttcaaagaaaacgatgatacttgcctgacctttatgcgtgctatttccgtgctgaaatgtcttccgtttgaggtagttagcctgaaagacacggaaggattgccctggatcggtgatgaagtcaaagggattatggaagaaatcatcgaggacggtgaatcgctggaagtgcaggccgtgctcaatgatgagcgctatcaaagcttcaaactgtttaccagtgtctttggagtggggctgaagacagcagacaaatggtaccgtatgggtttccgcacgctcaacaagattcgttccgataagaccctgaaattgaccaagatgcagaaagcgggtctgtgctattatgaagatcttattgatggcgtttcgaaagccgaagctgacgcggtatctctgctggttcaggatgcagtctggactttcttgccggatgcgctggtgactattacgggtggatttcgtcgtgggaaagagtttggtcacgacgttgatttccttatcacatctccgggagctgagaaagaacaagaagaccagctcctgcagaaagtgaccaatctgtggaagaaacaagggttgttgctgtactgcgatctgatcgaaagcacctttgaagatctgaaactcccatcccgcaagattgatgccctggaccattttcagaaatgctttctgatcctcaaactttatcaccataaagaggacaaacgcaaatgggaaatgccgacgggttcgaacgaaagcgaggccaaaagttggaaagcaattcgcgtagatctggttgtttgtccctacgatcgttatgcgtttgcgttgttgggttggagtggaagccgccaattcgaacgtgatctgcgccgctacgccacccacgagaagaagatgatgctggacaatcatgcgctgtatgacaagaccaagaaaatctttctcaaagctaaatcggaagaggaaattttcgcacatctggggcttgaatacattcagccgtccgaacgtaacgca

SEQ ID NO: 54 - protein, 529 aa, synthetic construct
  REGION 1..529: note = Variant of terminal deoxynucleotidyltransferase
MHHHHHHGGSGMHRIRTIDSDFGKKRQKKMDNHISSMIYEIKFHEFVLFILEKKMGATRRTFLTDLARKKGFRVENELSDSVTHIVAENNSGSDVLAWLKTHKMEKTTQFELLDISWLIESMKVGKPVDTKGKYQLMESRVDSANPDPTAGTLNILPPTTKTISQYACQRRTTINNHNQRFTDALEILAKNYEFKENDDTCLTFMRAISVLKCLPFEVVSLKDTEGLPWIGDEVKGIMEEIIEDGESLEVQAVLNDERYQSFKLFTSVFGVGLKTADKWYRMGFRTLNKIRSDKTLKLTKMQKAGLCYYEDLIDGVSKAEADAVSLLVQDAVWTFLPDALVTITGGFRRGKEFGHDVDFLITSPGAEKEQEDQLLQKVTNLWKKQGLLLYCDLIESTFEDLKLPSRKIDALDHFQKCFLILKLYHHKEDKRKWEMPTGSNESEAKSWKAIRVDLVVCPYDRYAFALLGWSGSRQFERDLRRYATHEKKMMLDNHALYDKTKKIFLKAKSEEEIFAHLGLEYIQPSERNA

SEQ ID NO: 55 - DNA, 1587 bp, synthetic construct
  misc_feature 1..1587: note = Variant of terminal deoxynucleotidyltransferase
  source 1..1587: mol_type = other DNA
atgcaccatcatcatcatcatggcggtagcggcatgcaccgcattcgtaccatcgattcggacttcgggaagaaacgccagaagaagatggataaccacattagttccatgatctatgaaatcaaatttcacgagtttgtgctgttcattctcgaaaagaaaatgggtgcgacgcgtcgtacttttctgacagatttagcccgcaagaaagggttccgcgtcgagaatgaactgtcagacagcgttacccacatcgtggcagaaaataattcaggatctgacgtattggcttggctgaagacccacaagatggagaaaacgacgcaatttgaactgctggatattagctggcttatcgaaagcatgaaagttggtaaaccggtggacaccgaggggaaataccagttgatggaatcgcgtgtcgatagtgcgaacccagatccgacagccggtaccctcaacattctgcctcctactacgaagaccatttctcagtatgcgtgtcaacgccgcaccaccatcaacaaccataatcagcgttttacggacgcactggaaattcttgcggaaaattacgagttcaaagaaaacgatgatacttgcctgacctttatgcgtgctatttccgtgctgaaatgtcttccgtttgaggtagttagcctgaaagacacggaaggattgccctggatcggtgatgaagtcaaaggtattatggaagaaatcatcgaggacggtgaatcgctggaagtgcaggccgtgctcaatgatgagcgctatcaaagcttcaaactgtttaccagtgtctttggagtggggctgaagacagcagacaaatggtaccgtatgggtttccgcacgctcaacgatgttcgttccagcaagaccctgaaattgaccaagatgcagaaagcgggtctgtgctattatgaagatcttgctgattgcgtttcgaaagccgaagctgacgcggtatctctgctggttcaggatgcagtctggactttcctgccggatgcgctggtggagattacgggtggatttcgtcgtgggaaagagtttggtcacgacgttgatttccttatcacatctccgggagctgagaaagaacaagaagaccagctcctgcagaaagtgaccaatctgtggaagaaacaagggttgttgctgtactgcgatctgatcgaaagcacctttgaagatctgaaactcccatcccgcaagattgatgccctggaccattttcagaaatgctttctgatcctcaaactttatcaccataaagaggacaaacgcaaatgggaaatgccgacgggttcgaacgaaagcgaggccaaaagttggaaagcaattcgcgtagatctggttgtttgtccctacgatcgttatgcgtttgcgttgttgggttggaccggaagccgcatgttcgaacgtgatctgcgccgctacgccacccacgagaagaagatgatgctggacaatcatgcgctgtatgacctgaccaagaaaatctttctcaaagctaaatcggaagaggaaattttcgcacatctggggcttgaatacctggaaccgtccgaacgtaacgca

SEQ ID NO: 56 - protein, 529 aa, synthetic construct
  REGION 1..529: note = Variant of terminal deoxynucleotidyltransferase
MHHHHHHGGSGMHRIRTIDSDFGKKRQKKMDNHISSMIYEIKFHEFVLFILEKKMGATRRTFLTDLARKKGFRVENELSDSVTHIVAENNSGSDVLAWLKTHKMEKTTQFELLDISWLIESMKVGKPVDTEGKYQLMESRVDSANPDPTAGTLNILPPTTKTISQYACQRRTTINNHNQRFTDALEILAENYEFKENDDTCLTFMRAISVLKCLPFEVVSLKDTEGLPWIGDEVKGIMEEIIEDGESLEVQAVLNDERYQSFKLFTSVFGVGLKTADKWYRMGFRTLNDVRSSKTLKLTKMQKAGLCYYEDLADCVSKAEADAVSLLVQDAVWTFLPDALVEITGGFRRGKEFGHDVDFLITSPGAEKEQEDQLLQKVTNLWKKQGLLLYCDLIESTFEDLKLPSRKIDALDHFQKCFLILKLYHHKEDKRKWEMPTGSNESEAKSWKAIRVDLVVCPYDRYAFALLGWTGSRMFERDLRRYATHEKKMMLDNHALYDLTKKIFLKAKSEEEIFAHLGLEYLEPSERNA

SEQ ID NO: 57 - DNA, 1587 bp, synthetic construct
  misc_feature 1..1587: note = Variant of terminal deoxynucleotidyltransferase
  source 1..1587: mol_type = other DNA
atgcaccatcatcatcatcatggcggtagcggcatgcaccgcattcgtaccatcgattcggacttcgggaagaaacgccagaagaagatggataaccacattagttccatgatctatgaaatcaaatttcacgagtttgtgctgttcattctcgaaaagaaaatgggtgcgacgcgtcgtacttttctgacagatttagcccgcaagaaagggttccgcgtcgagaatgaactgtcagacagcgttacccacatcgtggcagaaaataattcaggatctgacgtattggcttggctgaagacccacaagatggagaaaacgacgcaatttgaactgctggatattagctggcttatcgaatgcatgaaagttggtaaaccggtggacaccaaagggaaataccagttgatggaatcgcgtgtcgatagtgcgaacccagatccgacagccggtaccctcaacattctgcctcctactacgaagaccatttctcagtatgcgtgtcaacgccgcaccaccatcaacaaccataatcagcgttttacggacgcactggaaattcttgcgaaaaattacgagttcaaagaaaacgatgatacttgcctgacctttatgcgtgctatttccgtgctgaaatgtcttccgtttgaggtagttagcctgaaagacacggaaggattgccctggatcggtgatgaagtcaaaccaattatggaagaaatcatcgaggacggtgaatcgctggaagtgcaggccgtgctcaatgatgagcgctatcaaagcttcaaactgtttaccagtgtctttggagtggggctgaagacagcagacaaatggtaccgtatgggtttccgcacgctcaacgatattcgttccagcaagaccctgaaattgaccaagatgcagaaagcgggtctgtgctattatgaagatcttattgattgcgtttcgaaagccgaagctgacgcggtatctctgctggttcaggatgcagtctggactttcttgccggatgcgctggtgacgattacgggtggatttcgtcgtgggaaagagtttggtcacgacgttgatttccttatcacatctccgggagctgagaaagaacaagaagaccagctcctgcagaaagtgaccaatctgtggaagaaacaagggttgttgctgtactgcgatctgatcgaaagcacctttgaagatctgaaactcccatcccgcaagattgatgccctggaccatttccagaaatgctttctgatcctcaaactttatcaccataaagaggacaaacgcaaatgggaaatgccgacgggttcgaacgaaagcgaggccaaaagttggaaagcaattcgcgtagatctggttgtttgtccctacgatcgttatgcgtttgcgttgttgggttggagtggaagccgccaattcgaacgtgatctgcgccgctacgccacccacgagaagaagatgatgctggacaatcatgcgctgtatgacaagaccaagaaaatctttctcaaagctaaatcggaagaggaaattttcgcacatctggggcttgaatacattcagccgtccgaacgtaacgca

SEQ ID NO: 58 - protein, 529 aa, synthetic construct
  REGION 1..529: note = Variant of terminal deoxynucleotidyltransferase
MHHHHHHGGSGMHRIRTIDSDFGKKRQKKMDNHISSMIYEIKFHEFVLFILEKKMGATRRTFLTDLARKKGFRVENELSDSVTHIVAENNSGSDVLAWLKTHKMEKTTQFELLDISWLIECMKVGKPVDTKGKYQLMESRVDSANPDPTAGTLNILPPTTKTISQYACQRRTTINNHNQRFTDALEILAKNYEFKENDDTCLTFMRAISVLKCLPFEVVSLKDTEGLPWIGDEVKPIMEEIIEDGESLEVQAVLNDERYQSFKLFTSVFGVGLKTADKWYRMGFRTLNDIRSSKTLKLTKMQKAGLCYYEDLIDCVSKAEADAVSLLVQDAVWTFLPDALVTITGGFRRGKEFGHDVDFLITSPGAEKEQEDQLLQKVTNLWKKQGLLLYCDLIESTFEDLKLPSRKIDALDHFQKCFLILKLYHHKEDKRKWEMPTGSNESEAKSWKAIRVDLVVCPYDRYAFALLGWSGSRQFERDLRRYATHEKKMMLDNHALYDKTKKIFLKAKSEEEIFAHLGLEYIQPSERNA

SEQ ID NO: 59 - DNA, 1587 bp, synthetic construct
  misc_feature 1..1587: note = Variant of terminal deoxynucleotidyltransferase
  source 1..1587: mol_type = other DNA
atgcaccatcatcatcatcatggcggtagcggcatgcaccgcattcgtaccatcgattcggacttcgggaagaaacgccagaagaagatggataaccacattagttccatgatctatgaaatcaaatttcacgagtttgtgctgttcattctcgaaaagaaaatgggtgcgacgcgtcgtacttttctgacagatttagcccgcaagaaagggttccgcgtcgagaatgaactgtcagacagcgttacccacatcgtggcagaaaataattcaggatctgacgtattggcttggctgaagacccacaagatggaggatacgacgcaatttgaactgctggatattagctggcttatcgaaagcatgaaagttggtaaaccggtggacaccaaggggaaataccagttgatggaatcgcgtgtcgatagtgcgaacccagatccgacagccggtaccctcaacattctgcctcctactacgaagaccatttctcagtatgcgtgtcaacgccgcaccaccatcaacaaccataatcagcgttttacggacgcactggaaattcttgcggaaaattacgagttcaaagaaaacgatgatacttgtctgacctttcgccgtgctatttccgtgctgaaatgccttccgtttgaggtagttagcctgaaagacacggaaggattgccctggatcggtgatgaagtcaaaggtattatggaagaaatcatcgaggacggtgaatcgctggaagtgcaggccgtgctcaatgatgagcgctatcaaagcttcaaactgtttaccagtgtctttggagtggggctgaagacagcagacaaatggtaccgtatgggtttccgcacgctcaacgatgttcgttccagcaagaccctgaaattgaccaagatgcagaaagcgggtctgtgctattatgaagatcttgctgatggcgtttcgaaagccgaagctgacgcggtatctctgctggttcaggatgcagtctggactttcgacccggatgcgctggtggagattacgggtggatttcgtcgtgggaaagagtttggtcacgacgttgatctgcttatcacatctccgggagctgagaaagaacaagaagaccagctcctgcagaaagtgaccaatctgtggaagaaacaagggttgttgctgtacggtgatctgatcgaaagtacctttgaagatctgaaactcccatcccgcaagattgatgccctggaccattttcagaaatgctttctgatcctcaaactttatcaccataaagaggacaaacgcaaatgggaaatgccgacgggttcgaacgaaagcgaggccaaaagttggaaagcaattcgcgtagatctggttgtttgtccctacgatcgttatgcgtttgcgttgttgggttggaccggaagccgcatgttcgaacgtgatctgcgccgctacgccacccacgagaagaagatgatgctggacaatcatgcgctgtatgacctgaccaagaaaatctttctcaaagctaaatcggaagaggaaattttcgcacatctggggcttgaatacctggaaccgtccgaacgtaacgca

SEQ ID NO: 60 - protein, 529 aa, synthetic construct
  REGION 1..529: note = Variant of terminal deoxynucleotidyltransferase
MHHHHHHGGSGMHRIRTIDSDFGKKRQKKMDNHISSMIYEIKFHEFVLFILEKKMGATRRTFLTDLARKKGFRVENELSDSVTHIVAENNSGSDVLAWLKTHKMEDTTQFELLDISWLIESMKVGKPVDTKGKYQLMESRVDSANPDPTAGTLNILPPTTKTISQYACQRRTTINNHNQRFTDALEILAENYEFKENDDTCLTFRRAISVLKCLPFEVVSLKDTEGLPWIGDEVKGIMEEIIEDGESLEVQAVLNDERYQSFKLFTSVFGVGLKTADKWYRMGFRTLNDVRSSKTLKLTKMQKAGLCYYEDLADGVSKAEADAVSLLVQDAVWTFDPDALVEITGGFRRGKEFGHDVDLLITSPGAEKEQEDQLLQKVTNLWKKQGLLLYGDLIESTFEDLKLPSRKIDALDHFQKCFLILKLYHHKEDKRKWEMPTGSNESEAKSWKAIRVDLVVCPYDRYAFALLGWTGSRMFERDLRRYATHEKKMMLDNHALYDLTKKIFLKAKSEEEIFAHLGLEYLEPSERNA

SEQ ID NO: 61 - DNA, 1587 bp, synthetic construct
  misc_feature 1..1587: note = Variant of terminal deoxynucleotidyltransferase
  source 1..1587: mol_type = other DNA
atgcaccatcatcatcatcatggcggtagcggcatgcaccgcattcgtaccatcgattcggacttcgggaagaaacgccagaagaagatggataaccacattagttccatgatctatgaaatcaaatttcacgagtttgtgctgttcattctcgaaaagaaaatgggtgcgacgcgtcgtacttttctgacagatttagcccgcaagaaagggttccgcgtcgagaatgaactgtcagacagcgttacccacatcgtggcagaaaataattcaggatctgacgtattggcttggctgaagacccacaagatggagaagacgacgcaatttgaactgctggatattagctggcttatcgaaagcatgaaagttggtaaaccggtggacaccgaggggaaataccagttgatggaatcgcgtgtcgatagtgcgaacccagatccgacagccggtaccctcaacattctgcctcctactacgaagaccatttctcagtatgcgtgtcaacgccgcaccaccatcaacaaccataatcagcgttttacggacgcactggaaattcttgcggaaaattacgagttcaaagaaaacgatgatacttgtctgacctttcgccgtgctatttccgtgctgaaatgtcttccgtttgaggtagttagcctgaaagacacggaaggattgccctggatcggtgatgaagtcaaaggtattatggaagaaatcatcgaggtcggtgaatcgctggaagtgcaggccgtgctcaatgatgagcgctatcaaagcttcaaactgtttaccagtgtctttggagtggggctgaagacagcagacaaatggtaccgtatgggtttccgcacgctcaacgatgttcgttccagcaagaccctgaaattgaccaagatgcagaaagcgggtctgtgctattatgaagatcttgctgatggcgtttcgaaagccgaagctgacgcggtatctctgctggttcaggatgcagtctggactttcgacccggatgcgctggtggagattacgggtggatttcgtcgtgggaaagagtttggtcacgacgttgatctgcttatcacatctccgggagctgagaaagaacaagaagaccagctcctgcagaaagtgaccaatctgtggaagaaacaagggttgttgctgtacggtgatctgatcgaaagtacctttgaagatctgaaactcccatcccgcaagattgatgccctggaccatcatcagaaatgctttctgatcctcaaactttatcaccataaagaggacaaacgcaaatgggaaatgccgacgggttcgaacgaaagcgaggccaaaagttggaaagcaattcgcgtagatctggttgtttgtccctacgatcgttatgcgtttgcgttgttgggttggaccggaagccgcatgttcgaacgtgatctgcgccgctacgccacccacgagaagaagatgatgctggacaatcatgcgctgtatgacctgaccaagaaaatctttctcaaagctaaatcggaagaggaaattttcgcacatctggggcttgaatacctggaaccgtccgaacgtaacgca

SEQ ID NO: 62 - protein, 529 aa, synthetic construct
  REGION 1..529: note = Variant of terminal deoxynucleotidyltransferase
MHHHHHHGGSGMHRIRTIDSDFGKKRQKKMDNHISSMIYEIKFHEFVLFILEKKMGATRRTFLTDLARKKGFRVENELSDSVTHIVAENNSGSDVLAWLKTHKMEKTTQFELLDISWLIESMKVGKPVDTEGKYQLMESRVDSANPDPTAGTLNILPPTTKTISQYACQRRTTINNHNQRFTDALEILAENYEFKENDDTCLTFRRAISVLKCLPFEVVSLKDTEGLPWIGDEVKGIMEEIIEVGESLEVQAVLNDERYQSFKLFTSVFGVGLKTADKWYRMGFRTLNDVRSSKTLKLTKMQKAGLCYYEDLADGVSKAEADAVSLLVQDAVWTFDPDALVEITGGFRRGKEFGHDVDLLITSPGAEKEQEDQLLQKVTNLWKKQGLLLYGDLIESTFEDLKLPSRKIDALDHHQKCFLILKLYHHKEDKRKWEMPTGSNESEAKSWKAIRVDLVVCPYDRYAFALLGWTGSRMFERDLRRYATHEKKMMLDNHALYDLTKKIFLKAKSEEEIFAHLGLEYLEPSERNA

SEQ ID NO: 63 - DNA, 1587 bp, synthetic construct
  misc_feature 1..1587: note = Variant of terminal deoxynucleotidyltransferase
  source 1..1587: mol_type = other DNA
atgcaccatcatcatcatcatggcggtagcggcatgcaccgcattcgtaccatcgattcggacttcgggaagaaacgccagaagaagatggataaccacattagttccatgatctatgaaatcaaatttcacgagtttgtgctgttcattctcgaaaagaaaatgggtgcgacgcgtcgtacttttctgacagatttagcccgcaagaaagggttccgcgtcgagaatgaactgtcagacagcgttacccacatcgtggcagaaaataattcaggatctgacgtattggcttggctgaagacccacaagatggagaagacgacgcaatttgaactgctggatattagctggcttatcgaaagcatgaaagttggtaaaccggtggacaccgaggggaaataccagttgatggaatcgcgtgtcgatagtgcgaacccagatccgacagccggtaccctcaacattctgcctcctactacgaagaccatttctcagtatgcgtgtcaacgccgcaccaccatcaacaaccataatcagcgttttacggacgcactggaaattcttgcggaaaattacgagttcaaagaaaacgatgatacttgtctgacctttcgccgtgctatttccgtgctgaaatgtcttccgtttgaggtagttagcctgaaagacacggaaggattgccctggatcggtgatgaagtcaaaggtattatggaagaaatcatcgaggtcggtgaatcgctggaagtgcaggccgtgctcaatgatgagcgctatcaaagcttcaaactgtttaccagtgtctttggagtggggctgaagacagcagacaaatggtaccgtatgggtttccgcacgctcaacgatgttcgttccagcaagaccctgaaattgaccaagatgcagaaagcgggtctgtgctattatgaagatcttgctgattgcgtttcgaaagccgaagctgacgcggtatctctgctggttcaggatgcagtctggactttcgacccggatgcgctggtggagattacgggtggatttcgtcgtgggaaagagtttggtcacgacgttgatctgcttatcacatctccgggagctgagaaagaacaagaagaccagctcctgcagaaagtgaccaatctgtggaagaaacaagggttgttgctgtacggtgatctgatcgaaagtacctttgaagatctgaaactcccatcccgcaagattgatgccctggaccatcatcagaaatgctttctgatcctcaaactttatcaccataaagaggacaaacgcaaatgggaaatgccgacgggttcgaacgaaagcgaggccaaaagttggaaagcaattcgcgtagatctggttgtttgtccctacgatcgttatgcgtttgcgttgttgggttggaccggaagccgcatgttcgaacgtgatctgcgccgctacgccacccacgagaagaagatgatgctggacaatcatgcgctgtatgacctgaccaagaaaatctttctcaaagctaaatcggaagaggaaattttcgcacatctggggcttgaatacctggaaccgtccgaacgtaacgca

SEQ ID NO: 64 - protein, 529 aa, synthetic construct
  REGION 1..529: note = Variant of terminal deoxynucleotidyltransferase
MHHHHHHGGSGMHRIRTIDSDFGKKRQKKMDNHISSMIYEIKFHEFVLFILEKKMGATRRTFLTDLARKKGFRVENELSDSVTHIVAENNSGSDVLAWLKTHKMEKTTQFELLDISWLIESMKVGKPVDTEGKYQLMESRVDSANPDPTAGTLNILPPTTKTISQYACQRRTTINNHNQRFTDALEILAENYEFKENDDTCLTFRRAISVLKCLPFEVVSLKDTEGLPWIGDEVKGIMEEIIEVGESLEVQAVLNDERYQSFKLFTSVFGVGLKTADKWYRMGFRTLNDVRSSKTLKLTKMQKAGLCYYEDLADCVSKAEADAVSLLVQDAVWTFDPDALVEITGGFRRGKEFGHDVDLLITSPGAEKEQEDQLLQKVTNLWKKQGLLLYGDLIESTFEDLKLPSRKIDALDHHQKCFLILKLYHHKEDKRKWEMPTGSNESEAKSWKAIRVDLVVCPYDRYAFALLGWTGSRMFERDLRRYATHEKKMMLDNHALYDLTKKIFLKAKSEEEIFAHLGLEYLEPSERNA

SEQ ID NO: 65 - DNA, 1587 bp, synthetic construct
  misc_feature 1..1587: note = Variant of terminal deoxynucleotidyltransferase
  source 1..1587: mol_type = other DNA
atgcaccatcatcatcatcatggcggtagcggcatgcaccgcattcgtaccatcgattcggacttcgggaagaaacgccagaagaagatggataaccacattagttccatgatctatgaaatcaaatttcacgagtttgtgctgttcattctcgaaaagaaaatgggtgcgacgcgtcgtacttttctgacagatttagcccgcaagaaagggttccgcgtcgagaatgaactgtcaaacagcgttacccacatcgtggcagaaaataattcaggatctgacgtattggcttggctgaagacccacaagatggagaaaacgacgcaatttgaactgctggatattagctggcttatcgaatgcatgaaagttggtaaaccggtggacaccaaagggaaataccagttgatggaatcgcgtgtcgatagtgcgaacccagatccgacagccggtaccctcaacattctgcctcctactacgaagaccatttctcagtatgcgtgtcaacgccgcaccaccatcaacaaccataatcagcgttttacggacgcactggaaattcttgcgaaaaattacgagttcaaagaaaacgatgatacttgcctgacctttatgcgtgctatttccgtgctgaaatgtcttccgtttgaggtagttagcctgaaagacacggaaggattgccctggatcggtgatgaagtcaaagggattatggaagaaatcatcgaggacggtgaatcgctggaagtgcaggccgtgctcaatgatgagcgctatcaaagcttcaaactgtttaccagtgtctttggagtggggctgaagacagcagacaaatggtaccgtatgggtttccgcacgctcaacgatgttcgttccagcaagaccctgaaattgaccaagatgcagaaagcgggtctgtgctattatgaagatcttattgattgtgtttcaaaagccgaagctgacgcggtatctctgctggttcaggatgcagtctggactttcttgccggatgcgctggtgacgattacgggtggatttcgtcgtgggaaagagtttggtcacgacgttgatttccttatcacatctccgggagctgagaaagaacaagaagaccagctcctgcagaaagtgaccaatctgtggaagaaacaagggttgttgctgtactgcgatctgatcgaaagcacctttgaagatctgaaactcccatcccgcaagattgatgccctggaccatttccagaaatgctttctgatcctcaaactttatcaccataaagaggacaaacgcaaatgggaaatgccgacgggttcgaacgaaagcgaggccaaaagttggaaagcaattcgcgtagatctggttgtttgtccctacgatcgttatgcgtttgcgttgttgggttggagtggaagccgccaattcgaacgtgatctgcgccgctacgccacccacgagaagaagatgatgctggacaatcatgcgctgtatgacaagaccaagaaaatctttctcaaagctaaatcggaagaggaaattttcgcacatctggggcttgaatacattcagccgtccgaacgtaacgca

SEQ ID NO: 66 - protein, 529 aa, synthetic construct
  REGION 1..529: note = Variant of terminal deoxynucleotidyltransferase
MHHHHHHGGSGMHRIRTIDSDFGKKRQKKMDNHISSMIYEIKFHEFVLFILEKKMGATRRTFLTDLARKKGFRVENELSNSVTHIVAENNSGSDVLAWLKTHKMEKTTQFELLDISWLIECMKVGKPVDTKGKYQLMESRVDSANPDPTAGTLNILPPTTKTISQYACQRRTTINNHNQRFTDALEILAKNYEFKENDDTCLTFMRAISVLKCLPFEVVSLKDTEGLPWIGDEVKGIMEEIIEDGESLEVQAVLNDERYQSFKLFTSVFGVGLKTADKWYRMGFRTLNDVRSSKTLKLTKMQKAGLCYYEDLIDCVSKAEADAVSLLVQDAVWTFLPDALVTITGGFRRGKEFGHDVDFLITSPGAEKEQEDQLLQKVTNLWKKQGLLLYCDLIESTFEDLKLPSRKIDALDHFQKCFLILKLYHHKEDKRKWEMPTGSNESEAKSWKAIRVDLVVCPYDRYAFALLGWSGSRQFERDLRRYATHEKKMMLDNHALYDKTKKIFLKAKSEEEIFAHLGLEYIQPSERNA

SEQ ID NO: 67 - DNA, 1587 bp, synthetic construct
  misc_feature 1..1587: note = Variant of terminal deoxynucleotidyltransferase
  source 1..1587: mol_type = other DNA
atgcaccatcatcatcatcatggcggtagcggcatgcaccgcattcgtaccatcgattcggacttcgggaagaaacgccagaagaagatggataaccacattagttccatgatctatgaaatcaaatttcacgagtttgtgctgttcattctcgaaaagaaaatgggtgcgacgcgtcgtacttttctgacagatttagcccgcaagaaagggttccgcgtcgagaatgaactgtcagacagcgttacccacatcgtggcagaaaataattcaggatctgacgtattggcttggctgaagacccacaagatggaggatacgacgcaatttgaactgctggatattagctggcttatcgaaagcatgaaagttggtaaaccggtggacaccaaagggaaataccagttgatggaatcgcgtgtcgatagtgcgaacccagatccgacagccggtaccctcaacattctgcctcctactacgaagaccatttctcagtatgcgtgtcaacgccgcaccaccatcaacaaccataatcagcgttttacggacgcactggaaattcttgcggaaaattacgagttcaaagaaaacgatgatacttgtctgacctttatgcgtgctatttccgtgctgaaatgtcttccgtttgaggtagttagcctgaaagacacggaaggattgccctggatcggtgatgaagtcaaaggtattatggaagaaatcatcgaggtcggtgaatcgctggaagtgcaggccgtgctcaatgatgagcgctatcaaagcttcaaactgtttaccagtgtctttggagtggggctgaagacagcagacaaatggtaccgtatgggtttccgcacgctcaacgatgttcgttccagcaagaccctgaaattgaccaagatgcagaaagcgggtctgaagtattatgaagatcttattgattgtgtttcgaaagccgaagctgacgcggtatctctgctggttcaggatgcagtctggactttcctgccggatgcgctggtggagattacgggtggatttcgtcgtgggaaagagtttggtcacgacgttgatctgcttatcacatctccgggagctgagaaagaacaagaagaccagctcctgcagaaagtgaccaatctgtggaagaaacaagggttgttgctgtactgtgatctgatcgaaagtacctttgaagatctgaaactcccatcccgcaagattgatgccctggaccattttcagaaatgctttctgatcctcaaactttatcaccataaagaggacaaacgcaaatgggaaatgccgacgggttcgaacgaaagcgaggccaaaagttggaaagcaattcgcgtagatctggttgtttgtccctacgatcgttatgcgtttgcgttgttgggttggaccggaagccgcatgttcgaacgtgatctgcgccgctacgccacccacgagaagaagatgatgctggacaatcatgcgctgtatgacctgaccaagaaaatctttctcaaagctaaatcggaagaggaaattttcgcacatctggggcttgaatacattcagccgtccgaacgtaacgca

SEQ ID NO: 68 - protein, 529 aa, synthetic construct
  REGION 1..529: note = Variant of terminal deoxynucleotidyltransferase
MHHHHHHGGSGMHRIRTIDSDFGKKRQKKMDNHISSMIYEIKFHEFVLFILEKKMGATRRTFLTDLARKKGFRVENELSDSVTHIVAENNSGSDVLAWLKTHKMEDTTQFELLDISWLIESMKVGKPVDTKGKYQLMESRVDSANPDPTAGTLNILPPTTKTISQYACQRRTTINNHNQRFTDALEILAENYEFKENDDTCLTFMRAISVLKCLPFEVVSLKDTEGLPWIGDEVKGIMEEIIEVGESLEVQAVLNDERYQSFKLFTSVFGVGLKTADKWYRMGFRTLNDVRSSKTLKLTKMQKAGLKYYEDLIDCVSKAEADAVSLLVQDAVWTFLPDALVEITGGFRRGKEFGHDVDLLITSPGAEKEQEDQLLQKVTNLWKKQGLLLYCDLIESTFEDLKLPSRKIDALDHFQKCFLILKLYHHKEDKRKWEMPTGSNESEAKSWKAIRVDLVVCPYDRYAFALLGWTGSRMFERDLRRYATHEKKMMLDNHALYDLTKKIFLKAKSEEEIFAHLGLEYIQPSERNA

SEQ ID NO: 69 - DNA, 1587 bp, synthetic construct
  misc_feature 1..1587: note = Variant of terminal deoxynucleotidyltransferase
  source 1..1587: mol_type = other DNA
atgcaccatcatcatcatcatggcggtagcggcatgcaccgcattcgtaccatcgattcggacttcgggaagaaacgccagaagaagatggataaccacattagttccatgatctatgaaatcaaatttcacgagtttgtgctgttcattctcgaaaagaaaatgggtgcgacgcgtcgtacttttctgacagatttagcccgcaagaaagggttccgcgtcgagaatgaactgtcagacagcgttacccacatcgtggcagaaaataattcaggatctgacgtattggcttggctgaagacccacaagatggagaagacgacgcaatttgaactgctggatattagctggcttatcgaaagcatgaaagttggtaaaccggtggacaccaaagggaaataccagttgatggaatcgcgtgtcgatagtgcgaacccagatccgacagccggtaccctcaacattctgcctcctactacgaagaccatttctcagtatgcgtgtcaacgccgcaccaccatcaacaaccataatcagcgttttacggacgcactggaaattcttgcggaaaattacgagttcaaagaaaacgatgatactcgtctgacctttatgcgtgctatttccgtgctgaaatgtcttccgtttgaggtagttagcctgaaagacacggaaggattgccctggatcggtgatgaagtcaaaggtattatggaagaaatcatcgaggacggtgaatcgctggaagtgcaggccgtgctcaatgatgagcgctatcaaagcttcaaactgtttaccagtgtctttggagtggggctgaagacagcagacaaatggtaccgtatgggtttccgcacgctcaacgatgttcgttccagcaagaccctgaaattgaccaagatgcagaaagcgggtctgtgctattatgaagatcttgctgattgcgtttcgaaagccgaagctgacgcggtatctctgctggttcaggatgcagtctggactttcctgccggatgcgctggtggagattacgggtggatttcgtcgtgggaaagagtttggtcacgacgttgatttccttatcacatctccgggagctgagaaagaacaagaagaccagctcctgcagaaagtgaccaatctgtggaagaaacaagggttgttgctgtactgcgatctgatcgaaagcacctttgaagatctgaaactcccatcccgcaagattgatgccctggaccattttcagaaatgctttctgatcctcaaactttatcaccataaagaggacaaacgcaaatgggaaatgccgacgggttcgaacgaaagcgaggccaaaagttggaaagcaattcgcgtagatctggttgtttgtccctacgatcgttatgcgtttgcgttgttgggttggaccggaagccgcatgttcgaacgtgatctgcgccgctacgccacccacgagaagaagatgatgctggacaatcatgcgctgtatgacctgaccaagaaaatctttctcaaagctaaatcggaagaggaaattttcgcacatctggggcttgaatacctgcaaccgtccgaacgtaacgca

SEQ ID NO: 70 - protein, 529 aa, synthetic construct
  REGION 1..529: note = Variant of terminal deoxynucleotidyltransferase
MHHHHHHGGSGMHRIRTIDSDFGKKRQKKMDNHISSMIYEIKFHEFVLFILEKKMGATRRTFLTDLARKKGFRVENELSDSVTHIVAENNSGSDVLAWLKTHKMEKTTQFELLDISWLIESMKVGKPVDTKGKYQLMESRVDSANPDPTAGTLNILPPTTKTISQYACQRRTTINNHNQRFTDALEILAENYEFKENDDTRLTFMRAISVLKCLPFEVVSLKDTEGLPWIGDEVKGIMEEIIEDGESLEVQAVLNDERYQSFKLFTSVFGVGLKTADKWYRMGFRTLNDVRSSKTLKLTKMQKAGLCYYEDLADCVSKAEADAVSLLVQDAVWTFLPDALVEITGGFRRGKEFGHDVDFLITSPGAEKEQEDQLLQKVTNLWKKQGLLLYCDLIESTFEDLKLPSRKIDALDHFQKCFLILKLYHHKEDKRKWEMPTGSNESEAKSWKAIRVDLVVCPYDRYAFALLGWTGSRMFERDLRRYATHEKKMMLDNHALYDLTKKIFLKAKSEEEIFAHLGLEYLQPSERNA

SEQ ID NO: 71 - DNA, 1587 bp, synthetic construct
  misc_feature 1..1587: note = Variant of terminal deoxynucleotidyltransferase
  source 1..1587: mol_type = other DNA
atgcaccatcatcatcatcatggcggtagcggcatgcaccgcattcgtaccatcgattcggacttcgggaagaaacgccagaagaagatggataaccacattagttccatgatctatgaaatcaaatttcacgagtttgtgctgttcattctcgaaaagaaaatgggtgcgacgcgtcgtacttttctgacagatttagcccgcaagaaagggttccgcgtcgagaatgaactgtcagacagcgttacccacatcgtggcagaaaataattcaggatctgacgtattggcttggctgaagacccacaagatggagaagacgacgcaatttgaactgctggatattagctggcttatcgaaagcatgaaagttggtaaaccggtggacaccaaggggaaataccagttgatggaatcgcgtgtcgatagtgcgaacccagatccgacagccggtaccctcaacattctgcctcctactacgaagaccatttctcagtatgcgtgtcaacgccgcaccaccatcaacaaccataatcagcgttttacggacgcactggaaattcttgcggaaaattacgagttcaaagaaaacgatgatacttgtctgacctttatgcgtgctatttccgtgctgaaatgccttccgtttgaggtagttagcctgaaagacacggaaggattgccctggatcggtgatgaagtcaaaggtattatggaagaaatcatcgaggtcggtgaatcgctggaagtgcaggccgtgctcaatgatgagcgctatcaaagcttcaaactgtttaccagtgtctttggagtggggctgaagacagcagacaaatggtaccgtatgggtttccgcacgctcaacgatgttcgttccagcaagaccctgaaattgaccaagatgcagaaagcgggtctgtgctattatgaagatcttgctgatggcgttacgaaagccgaagctgacgcggtatctctgctggttcaggatgcagtctggactttcgacccggatgcgctggtggagattacgggtggatttcgtcgtgggaaagagtttggtcacgacgttgatctgcttatcacatctccgggagctgagaaagaacaagaagaccagctcctgcagaaagtgaccaatctgtggaagaaacaagggttgttgctgtacggtgatctgatcacgagtacctttgaagatctgaaactcccatcccgcaagattgatgccctggaccattttcagaaatgctttctgatcctcaaactttatcaccataaagaggacaaacgcaaatgggaaatgccgacgggttcgaacgaaagcgaggccaaaagttggaaagcaattcgcgtagatctggttgtttgtccctacgatcgttatgcgtttgcgttgttgggttggaccggaagccgcatgttcgaacgtgatctgcgccgctacgccacccacgagaagaagatgatgctggacaatcatgcgctgtatgacctgaccaagaaaatctttctcaaagctaaatcggaagaggaaattttcgcacatctggggcttgaatacctggaaccgtccgaacgtaacgca

SEQ ID NO: 72 - protein, 529 aa, synthetic construct
  REGION 1..529: note = Variant of terminal deoxynucleotidyltransferase
MHHHHHHGGSGMHRIRTIDSDFGKKRQKKMDNHISSMIYEIKFHEFVLFILEKKMGATRRTFLTDLARKKGFRVENELSDSVTHIVAENNSGSDVLAWLKTHKMEKTTQFELLDISWLIESMKVGKPVDTKGKYQLMESRVDSANPDPTAGTLNILPPTTKTISQYACQRRTTINNHNQRFTDALEILAENYEFKENDDTCLTFMRAISVLKCLPFEVVSLKDTEGLPWIGDEVKGIMEEIIEVGESLEVQAVLNDERYQSFKLFTSVFGVGLKTADKWYRMGFRTLNDVRSSKTLKLTKMQKAGLCYYEDLADGVTKAEADAVSLLVQDAVWTFDPDALVEITGGFRRGKEFGHDVDLLITSPGAEKEQEDQLLQKVTNLWKKQGLLLYGDLITSTFEDLKLPSRKIDALDHFQKCFLILKLYHHKEDKRKWEMPTGSNESEAKSWKAIRVDLVVCPYDRYAFALLGWTGSRMFERDLRRYATHEKKMMLDNHALYDLTKKIFLKAKSEEEIFAHLGLEYLEPSERNA

SEQ ID NO: 73 - DNA, 1587 bp, synthetic construct
  misc_feature 1..1587: note = Variant of terminal deoxynucleotidyltransferase
  source 1..1587: mol_type = other DNA
atgcaccatcatcatcatcatggcggtagcggcatgcaccgcattcgtaccatcgattcggacttcgggaagaaacgccagaagaagatggataaccacattagttccatgatctatgaaatcaaatttcacgagtttgtgctgttcattctcgaaaagaaaatgggtgcgacgcgtcgtacttttctgacagatttagcccgcaagaaagggttccgcgtcgagaatgaactgtcagacagcgttacccacatcgtggcagaaaataattcaggatctgacgtattggcttggctgaagacccacaagatggagaagacgacgcaatttgaactgctggatattagctggcttatcgaaagcatgaaagttggtaaaccggtggacaccaaggggaaataccagttgatggaatcgcgtgtcgatagtgcgaacccagatccgacagccggtaccctcaacattctgcctcctactacgaagaccatttctcagtatgcgtgtcaacgccgcaccaccatcaacaaccataatcagcgttttacggacgcactggaaattcttgcggaaaattacgagttcaaagaaaacgatgatacttgtctgacctttatgcgtgctatttccgtgctgaaatgccttccgtttgaggtagttagcctgaaagacacggaaggattgccctggatcggtgatgaagtcaaaggtattatggaagaaatcatcgaggtcggtgaatcgctggaagtgcaggccgtgctcaatgatgagcgctatcaaagcttcaaactgtttaccagtgtctttggagtggggctgaagacagcagacaaatggtaccgtatgggtttccgcacgctcaacgatgttcgttccagcaagaccctgaaattgaccaagatgcagaaagcgggtctgtgctattatgaagatcttgctgatggcgttacgaaagccgaagctgacgcggtatctctgctggttcaggatgcagtctggactttcgacccggatgcgctggtggagattacgggtggatttcgtcgtgggaaagagtttggtcacgacgttgatctgcttatcacatctccgggagctgagaaagaacaagaagaccagctcctgcagaaagtgaccaatctgtggaagaaacaagggttgttgctgtacggtgatctgatcaggagtacctttgaagatctgaaactcccatcccgcaagattgatgccctggaccattttcagaaatgctttctgatcctcaaactttatcaccataaagaggacaaacgcaaatgggaaatgccgacgggttcgaacgaaagcgaggccaaaagttggaaagcaattcgcgtagatctggttgtttgtccctacgatcgttatgcgtttgcgttgttgggttggaccggaagccgcatgttcgaacgtgatctgcgccgctacgccacccacgagaagaagatgatgctggacaatcatgcgctgtatgacctgaccaagaaaatctttctcaaagctaaatcggaagaggaaattttcgcacatctggggcttgaatacctggaaccgtccgaacgtaacgca

SEQ ID NO: 74 - protein, 529 aa, synthetic construct
  REGION 1..529: note = Variant of terminal deoxynucleotidyltransferase
MHHHHHHGGSGMHRIRTIDSDFGKKRQKKMDNHISSMIYEIKFHEFVLFILEKKMGATRRTFLTDLARKKGFRVENELSDSVTHIVAENNSGSDVLAWLKTHKMEKTTQFELLDISWLIESMKVGKPVDTKGKYQLMESRVDSANPDPTAGTLNILPPTTKTISQYACQRRTTINNHNQRFTDALEILAENYEFKENDDTCLTFMRAISVLKCLPFEVVSLKDTEGLPWIGDEVKGIMEEIIEVGESLEVQAVLNDERYQSFKLFTSVFGVGLKTADKWYRMGFRTLNDVRSSKTLKLTKMQKAGLCYYEDLADGVTKAEADAVSLLVQDAVWTFDPDALVEITGGFRRGKEFGHDVDLLITSPGAEKEQEDQLLQKVTNLWKKQGLLLYGDLIRSTFEDLKLPSRKIDALDHFQKCFLILKLYHHKEDKRKWEMPTGSNESEAKSWKAIRVDLVVCPYDRYAFALLGWTGSRMFERDLRRYATHEKKMMLDNHALYDLTKKIFLKAKSEEEIFAHLGLEYLEPSERNA

SEQ ID NO: 75 - DNA, 1587 bp, synthetic construct
  misc_feature 1..1587: note = Variant of terminal deoxynucleotidyltransferase
  source 1..1587: mol_type = other DNA
atgcaccatcatcatcatcatggcggtagcggcatgcaccgcattcgtaccatcgattcggacttcgggaagaaacgccagaagaagatggataaccacattagttccatgatctatgaaatcaaatttcacgagtttgtgctgttcattctcgaaaagaaaatgggtgcgacgcgtcgtacttttctgacagatttagcccgcaagaaagggttccgcgtcgagaatgaactgtcagacagcgttacccacatcgtggcagaaaataattcaggatctgacgtattggcttggctgaagacccacaagatggagaagacgacgcaatttgaactgctggatattagctggcttatcgaaagcatgaaagttggtaaaccggtggacaccaaggggaaataccagttgatggaatcgcgtgtcgatagtgcgaacccagatccgacagccggtaccctcaacattctgcctcctactacgaagaccatttctcagtatgcgtgtcaacgccgcaccaccatcaacaaccataatcagcgttttacggacgcactggaaattcttgcggaaaattacgagttcaaagaaaacgatgatacttgtctgacctttatgcgtgctatttccgtgctgaaatgccttccgtttgaggtagttagcctgaaagacacggaaggattgccctggatcggtgatgaagtcaaaggtattatggaagaaatcatcgaggtcggtgaatcgctggaagtgcaggccgtgctcaatgatgagcgctatcaaagcttcaaactgtttaccagtgtctttggagtggggctgaagacagcagacaaatggtaccgtatgggtttccgcacgctcaacgatgttcgttccagcaagaccctgaaattgaccaagatgcagaaagcgggtctgtgctattatgaagatcttgctgatggcgttacgaaagccgaagctgacgcggtatctctgctggttcaggatgcagtctggactttcgacccggatgcgctggtggagattacgggtggatttcgtcgtgggaaagagtttggtcacgacgttgatctgcttatcacatctccgggagctgagaaagaacaagaagaccagctcctgcagaaagtgaccaatctgtggaagaaacaagggttgttgctgtacggtgatctgatctatagtacctttgaagatctgaaactcccatcccgcaagattgatgccctggaccattttcagaaatgctttctgatcctcaaactttatcaccataaagaggacaaacgcaaatgggaaatgccgacgggttcgaacgaaagcgaggccaaaagttggaaagcaattcgcgtagatctggttgtttgtccctacgatcgttatgcgtttgcgttgttgggttggaccggaagccgcatgttcgaacgtgatctgcgccgctacgccacccacgagaagaagatgatgctggacaatcatgcgctgtatgacctgaccaagaaaatctttctcaaagctaaatcggaagaggaaattttcgcacatctggggcttgaatacctggaaccgtccgaacgtaacgca

SEQ ID NO: 76 - protein, 529 aa, synthetic construct
  REGION 1..529: note = Variant of terminal deoxynucleotidyltransferase
MHHHHHHGGSGMHRIRTIDSDFGKKRQKKMDNHISSMIYEIKFHEFVLFILEKKMGATRRTFLTDLARKKGFRVENELSDSVTHIVAENNSGSDVLAWLKTHKMEKTTQFELLDISWLIESMKVGKPVDTKGKYQLMESRVDSANPDPTAGTLNILPPTTKTISQYACQRRTTINNHNQRFTDALEILAENYEFKENDDTCLTFMRAISVLKCLPFEVVSLKDTEGLPWIGDEVKGIMEEIIEVGESLEVQAVLNDERYQSFKLFTSVFGVGLKTADKWYRMGFRTLNDVRSSKTLKLTKMQKAGLCYYEDLADGVTKAEADAVSLLVQDAVWTFDPDALVEITGGFRRGKEFGHDVDLLITSPGAEKEQEDQLLQKVTNLWKKQGLLLYGDLIYSTFEDLKLPSRKIDALDHFQKCFLILKLYHHKEDKRKWEMPTGSNESEAKSWKAIRVDLVVCPYDRYAFALLGWTGSRMFERDLRRYATHEKKMMLDNHALYDLTKKIFLKAKSEEEIFAHLGLEYLEPSERNA

SEQ ID NO: 77 - DNA, 1587 bp, synthetic construct
  misc_feature 1..1587: note = Variant of terminal deoxynucleotidyltransferase
  source 1..1587: mol_type = other DNA
atgcaccatcatcatcatcatggcggtagcggcatgcaccgcattcgtaccatcgattcggacttcgggaagaaacgccagaagaagatggataaccacattagttccatgatctatgaaatcaaatttcacgagtttgtgctgttcattctcgaaaagaaaatgggtgcgacgcgtcgtacttttctgacagatttagcccgcaagaaagggttccgcgtcgagaatgaactgtcagacagcgttacccacatcgtggcagaaaataattcaggatctgacgtattggcttggctgaagacccacaagatggagaagacgacgcaatttgaactgctggatattagctggcttatcgaaagcatgaaagttggtaaaccggtggacaccaaggggaaataccagttgatggaatcgcgtgtcgatagtgcgaacccagatccgacagccggtaccctcaacattctgcctcctactacgaagaccatttctcagtatgcgtgtcaacgccgcaccaccatcaacaaccataatcagcgttttacggacgcactggaaattcttgcggaaaattacgagttcaaagaaaacgatgatacttgtctgacctttatgcgtgctatttccgtgctgaaatgccttccgtttgaggtagttagcctgaaagacacggaaggattgccctggatcggtgatgaagtcaaaggtattatggaagaaatcatcgaggtcggtgaatcgctggaagtgcaggccgtgctcaatgatgagcgctatcaaagcttcaaactgtttaccagtgtctttggagtggggctgaagacagcagacaaatggtaccgtatgggtttccgcacgctcaacgatgttcgttccagcaagaccctgaaattgaccaagatgcagaaagcgggtctgtgctattatgaagatcttgctgatggcgttacgaaagccgaagctgacgcggtatctctgctggttcaggatgcagtctggactttcgacccggatgcgctggtggagattacgggtggatttcgtcgtgggaaagagtttggtcacgacgttgatctgcttatcacatctccgggagctgagaaagaacaagaagaccagctcctgcagaaagtgaccaatctgtggaagaaacaagggttgttgctgtacggtgatctgatcagtagtacctttgaagatctgaaactcccatcccgcaagattgatgccctggaccattttcagaaatgctttctgatcctcaaactttatcaccataaagaggacaaacgcaaatgggaaatgccgacgggttcgaacgaaagcgaggccaaaagttggaaagcaattcgcgtagatctggttgtttgtccctacgatcgttatgcgtttgcgttgttgggttggaccggaagccgcatgttcgaacgtgatctgcgccgctacgccacccacgagaagaagatgatgctggacaatcatgcgctgtatgacctgaccaagaaaatctttctcaaagctaaatcggaagaggaaattttcgcacatctggggcttgaatacctggaaccgtccgaacgtaacgca

SEQ ID NO: 78 - protein, 529 aa, synthetic construct
  REGION 1..529: note = Variant of terminal deoxynucleotidyltransferase
MHHHHHHGGSGMHRIRTIDSDFGKKRQKKMDNHISSMIYEIKFHEFVLFILEKKMGATRRTFLTDLARKKGFRVENELSDSVTHIVAENNSGSDVLAWLKTHKMEKTTQFELLDISWLIESMKVGKPVDTKGKYQLMESRVDSANPDPTAGTLNILPPTTKTISQYACQRRTTINNHNQRFTDALEILAENYEFKENDDTCLTFMRAISVLKCLPFEVVSLKDTEGLPWIGDEVKGIMEEIIEVGESLEVQAVLNDERYQSFKLFTSVFGVGLKTADKWYRMGFRTLNDVRSSKTLKLTKMQKAGLCYYEDLADGVTKAEADAVSLLVQDAVWTFDPDALVEITGGFRRGKEFGHDVDLLITSPGAEKEQEDQLLQKVTNLWKKQGLLLYGDLISSTFEDLKLPSRKIDALDHFQKCFLILKLYHHKEDKRKWEMPTGSNESEAKSWKAIRVDLVVCPYDRYAFALLGWTGSRMFERDLRRYATHEKKMMLDNHALYDLTKKIFLKAKSEEEIFAHLGLEYLEPSERNA

SEQ ID NO: 79 - DNA, 1587 bp, synthetic construct
  misc_feature 1..1587: note = Variant of terminal deoxynucleotidyltransferase
  source 1..1587: mol_type = other DNA
atgcaccatcatcatcatcatggcggtagcggcatgcaccgcattcgtaccatcgattcggacttcgggaagaaacgccagaagaagatggataaccacattagttccatgatctatgaaatcaaatttcacgagtttgtgctgttcattctcgaaaagaaaatgggtgcgacgcgtcgtacttttctgacagatttagcccgcaagaaagggttccgcgtcgagaatgaactgtcagacagcgttacccacatcgtggcagaaaataattcaggatctgacgtattggcttggctgaagacccacaagatggagaagacgacgcaatttgaactgctggatattagctggcttatcgaaagcatgaaagttggtaaaccggtggacaccaaggggaaataccagttgatggaatcgcgtgtcgatagtgcgaacccagatccgacagccggtaccctcaacattctgcctcctactacgaagaccatttctcagtatgcgtgtcaacgccgcaccaccatcaacaaccataatcagcgttttacggacgcactggaaattcttgcggaaaattacgagttcaaagaaaacgatgatacttgtctgacctttatgcgtgctatttccgtgctgaaatgccttccgtttgaggtagttagcctgaaagacacggaaggattgccctggatcggtgatgaagtcaaaggtattatggaagaaatcatcgaggtcggtgaatcgctggaagtgcaggccgtgctcaatgatgagcgctatcaaagcttcaaactgtttaccagtgtctttggagtggggctgaagacagcagacaaatggtaccgtatgggtttccgcacgctcaacgatgttcgttccagcaagaccctgaaattgaccaagatgcagaaagcgggtctgtgctattatgaagatcttgctgatggcgttacgaaagccgaagctgacgcggtatctctgctggttcaggatgcagtctggactttcgacccggatgcgctggtggagattacgggtggatttcgtcgtgggaaagagtttggtcacgacgttgatctgcttatcacatctccgggagctgagaaagaacaagaagaccagctcctgcagaaagtgaccaatctgtggaagaaacaagggttgttgctgtacggtgatctgatcgaaagtacctttgaagatctgaaactcccatcccgcaagattgatgccctggaccattttcagaaatgctttctgatcctcaaactttatcaccataaagaggacaaacgcaaatgggaaatgccgacgggttcgaacgaaagcgaggccaaaagttggaaagcaattcgcgtagatctggttcgttgtccctacgatcgttatgcgtttgcgttgttgggttggaccggaagccgcatgttcgaacgtgatctgcgccgctacgccacccacgagaagaagatgatgctggacaatcatgcgctgtatgacctgaccaagaaaatctttctcaaagctaaatcggaagaggaaattttcgcacatctggggcttgaatacctggaaccgtccgaacgtaacgca

SEQ ID NO: 80 - protein, 529 aa, synthetic construct
  REGION 1..529: note = Variant of terminal deoxynucleotidyltransferase
MHHHHHHGGSGMHRIRTIDSDFGKKRQKKMDNHISSMIYEIKFHEFVLFILEKKMGATRRTFLTDLARKKGFRVENELSDSVTHIVAENNSGSDVLAWLKTHKMEKTTQFELLDISWLIESMKVGKPVDTKGKYQLMESRVDSANPDPTAGTLNILPPTTKTISQYACQRRTTINNHNQRFTDALEILAENYEFKENDDTCLTFMRAISVLKCLPFEVVSLKDTEGLPWIGDEVKGIMEEIIEVGESLEVQAVLNDERYQSFKLFTSVFGVGLKTADKWYRMGFRTLNDVRSSKTLKLTKMQKAGLCYYEDLADGVTKAEADAVSLLVQDAVWTFDPDALVEITGGFRRGKEFGHDVDLLITSPGAEKEQEDQLLQKVTNLWKKQGLLLYGDLIESTFEDLKLPSRKIDALDHFQKCFLILKLYHHKEDKRKWEMPTGSNESEAKSWKAIRVDLVRCPYDRYAFALLGWTGSRMFERDLRRYATHEKKMMLDNHALYDLTKKIFLKAKSEEEIFAHLGLEYLEPSERNA

SEQ ID NO: 81 - DNA, 1587 bp, synthetic construct
  misc_feature 1..1587: note = Variant of terminal deoxynucleotidyltransferase
  source 1..1587: mol_type = other DNA
atgcaccatcatcatcatcatggcggtagcggcatgcaccgcattcgtaccatcgattcggacttcgggaagaaacgccagaagaagatggataaccacattagttccatgatctatgaaatcaaatttcacgagtttgtgctgttcattctcgaaaagaaaatgggtgcgacgcgtcgtacttttctgacagatttagcccgcaagaaagggttccgcgtcgagaatgaactgtcagacagcgttacccacatcgtggcagaaaataattcaggatctgacgtattggcttggctgaagacccacaagatggagaagacgacgcaatttgaactgctggatattagctggcttatcgaaagcatgaaagttggtaaaccggtggacaccaaggggaaataccagttgatggaatcgcgtgtcgatagtgcgaacccagatccgacagccggtaccctcaacattctgcctcctactacgaagaccatttctcagtatgcgtgtcaacgccgcaccaccatcaacaaccataatcagcgttttacggacgcactggaaattcttgcggaaaattacgagttcaaagaaaacgatgatacttgtctgacctttatgcgtgctatttccgtgctgaaatgccttccgtttgaggtagttagcctgaaagacacggaaggattgccctggatcggtgatgaagtcaaaggtattatggaagaaatcatcgaggtcggtgaatcgctggaagtgcaggccgtgctcaatgatgagcgctatcaaagcttcaaactgtttaccagtgtctttggagtggggctgaagacagcagacaaatggtaccgtatgggtttccgcacgctcaacgatgttcgttccagcaagaccctgaaattgaccaagatgcagaaagcgggtctgtgctattatgaagatcttgctgatggcgttacgaaagccgaagctgacgcggtatctctgctggttcaggatgcagtctggactttcgacccggatgcgctggtggagattacgggtggatttcgtcgtgggaaagagtttggtcacgacgttgatctgcttatcacatctccgggagctgagaaagaacaagaagaccagctcctgcagaaagtgaccaatctgtggaagaaacaagggttgttgctgtacggtgatctgatcgaaagtacctttgaagatctgaaactcccatcccgcaagattgatgccctggaccattttcagaaatgctttctgatcattaaactttatcaccataaagaggacaaacgcaaatgggaaatgccgacgggttcgaacgaaagcgaggccaaaagttggaaagcaattcgcgtagatctggttgtttgtccctacgatcgttatgcgtttgcgttgttgggttggaccggaagccgcatgttcgaacgtgatctgcgccgctacgccacccacgagaagaagatgatgctggacaatcatgcgctgtatgacctgaccaagaaaatctttctcaaagctaaatcggaagaggaaattttcgcacatctggggcttgaatacctggaaccgtccgaacgtaacgca

SEQ ID NO: 82 - protein, 529 aa, synthetic construct
  REGION 1..529: note = Variant of terminal deoxynucleotidyltransferase
MHHHHHHGGSGMHRIRTIDSDFGKKRQKKMDNHISSMIYEIKFHEFVLFILEKKMGATRRTFLTDLARKKGFRVENELSDSVTHIVAENNSGSDVLAWLKTHKMEKTTQFELLDISWLIESMKVGKPVDTKGKYQLMESRVDSANPDPTAGTLNILPPTTKTISQYACQRRTTINNHNQRFTDALEILAENYEFKENDDTCLTFMRAISVLKCLPFEVVSLKDTEGLPWIGDEVKGIMEEIIEVGESLEVQAVLNDERYQSFKLFTSVFGVGLKTADKWYRMGFRTLNDVRSSKTLKLTKMQKAGLCYYEDLADGVTKAEADAVSLLVQDAVWTFDPDALVEITGGFRRGKEFGHDVDLLITSPGAEKEQEDQLLQKVTNLWKKQGLLLYGDLIESTFEDLKLPSRKIDALDHFQKCFLIIKLYHHKEDKRKWEMPTGSNESEAKSWKAIRVDLVVCPYDRYAFALLGWTGSRMFERDLRRYATHEKKMMLDNHALYDLTKKIFLKAKSEEEIFAHLGLEYLEPSERNA

SEQ ID NO: 83 - DNA, 1587 bp, synthetic construct
  misc_feature 1..1587: note = Variant of terminal deoxynucleotidyltransferase
  source 1..1587: mol_type = other DNA
atgcaccatcatcatcatcatggcggtagcggcatgcaccgcattcgtaccatcgattcggacttcgggaagaaacgccagaagaagatggataaccacattagttccatgatctatgaaatcaaatttcacgagtttgtgctgttcattctcgaaaagaaaatgggtgcgacgcgtcgtacttttctgacagatttagcccgcaagaaagggttccgcgtcgagaatgaactgtcagacagcgttacccacatcgtggcagaaaataattcaggatctgacgtattggcttggctgaagacccacaagatggagaagacgacgcaatttgaactgctggatattagctggcttatcgaaagcatgaaagttggtaaaccggtggacaccaaggggaaataccagttgatggaatcgcgtgtcgatagtgcgaacccagatccgacagccggtaccctcaacattctgcctcctactacgaagaccatttctcagtatgcgtgtcaacgccgcaccaccatcaacaaccataatcagcgttttacggacgcactggaaattcttgcggaaaattacgagttcaaagaaaacgatgatacttgtctgacctttatgcgtgctatttccgtgctgaaatgccttccgtttgaggtagttagcctgaaagacacggaaggattgccctggatcggtgatgaagtcaaaggtattatggaagaaatcatcgaggtcggtgaatcgctggaagtgcaggccgtgctcaatgatgagcgctatcaaagcttcaaactgtttaccagtgtctttggagtggggctgaagacagcagacaaatggtaccgtatgggtttccgcacgctcaacgatgttcgttccagcaagaccctgaaattgaccaagatgcagaaagcgggtctgtgctattatgaagatcttgctgatggcgttacgaaagccgaagctgacgcggtatctctgctggttcaggatgcagtctggactttcgacccggatgcgctggtggagattacgggtggatttcgtcgtgggaaagagtttggtcacgacgttgatctgcttatcacatctccgggagctgagaaagaacaagaagaccagctcctgcagaaagtgaccaatctgtggaagaaacaagggttgttgctgtacggttgtctgatcgaaagtacctttgaagatctgaaactcccatcccgcaagattgatgccctggaccattttcagaaatgctttctgatcctcaaactttatcaccataaagaggacaaacgcaaatgggaaatgccgacgggttcgaacgaaagcgaggccaaaagttggaaagcaattcgcgtagatctggttgtttgtccctacgatcgttatgcgtttgcgttgttgggttggaccggaagccgcatgttcgaacgtgatctgcgccgctacgccacccacgagaagaagatgatgctggacaatcatgcgctgtatgacctgaccaagaaaatctttctcaaagctaaatcggaagaggaaattttcgcacatctggggcttgaatacctggaaccgtccgaacgtaacgca

SEQ ID NO: 84 - protein, 529 aa, synthetic construct
  REGION 1..529: note = Variant of terminal deoxynucleotidyltransferase
MHHHHHHGGSGMHRIRTIDSDFGKKRQKKMDNHISSMIYEIKFHEFVLFILEKKMGATRRTFLTDLARKKGFRVENELSDSVTHIVAENNSGSDVLAWLKTHKMEKTTQFELLDISWLIESMKVGKPVDTKGKYQLMESRVDSANPDPTAGTLNILPPTTKTISQYACQRRTTINNHNQRFTDALEILAENYEFKENDDTCLTFMRAISVLKCLPFEVVSLKDTEGLPWIGDEVKGIMEEIIEVGESLEVQAVLNDERYQSFKLFTSVFGVGLKTADKWYRMGFRTLNDVRSSKTLKLTKMQKAGLCYYEDLADGVTKAEADAVSLLVQDAVWTFDPDALVEITGGFRRGKEFGHDVDLLITSPGAEKEQEDQLLQKVTNLWKKQGLLLYGCLIESTFEDLKLPSRKIDALDHFQKCFLILKLYHHKEDKRKWEMPTGSNESEAKSWKAIRVDLVVCPYDRYAFALLGWTGSRMFERDLRRYATHEKKMMLDNHALYDLTKKIFLKAKSEEEIFAHLGLEYLEPSERNA

SEQ ID NO: 85 - DNA, 1587 bp, synthetic construct
  misc_feature 1..1587: note = Variant of terminal deoxynucleotidyltransferase
  source 1..1587: mol_type = other DNA
atgcaccatcatcatcatcatggcggtagcggcatgcaccgcattcgtaccatcgattcggacttcgggaagaaacgccagaagaagatggataaccacattagttccatgatctatgaaatcaaatttcacgagtttgtgctgttcattctcgaaaagaaaatgggtgcgacgcgtcgtacttttctgacagatttagcccgcaagaaagggttccgcgtcgagaatgaactgtcagacagcgttacccacatcgtggcagaaaataattcaggatctgacgtattggcttggctgaagacccacaagatggagaagacgacgcaatttgaactgctggatattagctggcttatcgaaagcatgaaagttggtaaaccggtggacaccaaggggaaataccagttgatggaatcgcgtgtcgatagtgcgaacccagatccgacagccggtaccctcaacattctgcctcctactacgaagaccatttctcagtatgcgtgtcaacgccgcaccaccatcaacaaccataatcagcgttttacggacgcactggaaattcttgcggaaaattacgagttcaaagaaaacgatgatacttgtctgacctttatgcgtgctatttccgtgctgaaatgccttccgtttgaggtagttagcctgaaagacacggaaggattgccctggatcggtgatgaagtcaaaggtattatggaagaaatcatcgaggtcggtgaatcgctggaagtgcaggccgtgctcaatgatgagcgctatcaaagcttcaaactgtttaccagtgtctttggagtggggctgaagacagcagacaaatggtaccgtatgggtttccgcacgctcaacgatgttcgttccagcaagaccctgaaattgaccaagatgcagaaagcgggtctgtgctattatgaagatcttgctgatggcgttacgaaagccgaagctgacgcggtatctctgctggttcaggatgcagtctggactttcgacccggatgcgctggtggagattacgggtggatttcgtcgtgggaaagagtttggtcacgacgttgatctgcttatcacatctccgggagctgagaaagaacaagaagaccagctcctgcagaaagtgaccaatctgtggaagaaacaagggttgttgctgtacggtgatctgatcgaaagtacctttgaagatctgaaactcccatcccgcaagattgatgccctggaccatttttcgaaatgctttctgatcctcaaactttatcaccataaagaggacaaacgcaaatgggaaatgccgacgggttcgaacgaaagcgaggccaaaagttggaaagcaattcgcgtagatctggttgtttgtccctacgatcgttatgcgtttgcgttgttgggttggaccggaagccgcatgttcgaacgtgatctgcgccgctacgccacccacgagaagaagatgatgctggacaatcatgcgctgtatgacctgaccaagaaaatctttctcaaagctaaatcggaagaggaaattttcgcacatctggggcttgaatacctggaaccgtccgaacgtaacgca

SEQ ID NO: 86 - protein, 529 aa, synthetic construct
  REGION 1..529: note = Variant of terminal deoxynucleotidyltransferase
MHHHHHHGGSGMHRIRTIDSDFGKKRQKKMDNHISSMIYEIKFHEFVLFILEKKMGATRRTFLTDLARKKGFRVENELSDSVTHIVAENNSGSDVLAWLKTHKMEKTTQFELLDISWLIESMKVGKPVDTKGKYQLMESRVDSANPDPTAGTLNILPPTTKTISQYACQRRTTINNHNQRFTDALEILAENYEFKENDDTCLTFMRAISVLKCLPFEVVSLKDTEGLPWIGDEVKGIMEEIIEVGESLEVQAVLNDERYQSFKLFTSVFGVGLKTADKWYRMGFRTLNDVRSSKTLKLTKMQKAGLCYYEDLADGVTKAEADAVSLLVQDAVWTFDPDALVEITGGFRRGKEFGHDVDLLITSPGAEKEQEDQLLQKVTNLWKKQGLLLYGDLIESTFEDLKLPSRKIDALDHFSKCFLILKLYHHKEDKRKWEMPTGSNESEAKSWKAIRVDLVVCPYDRYAFALLGWTGSRMFERDLRRYATHEKKMMLDNHALYDLTKKIFLKAKSEEEIFAHLGLEYLEPSERNA

SEQ ID NO: 87 - DNA, 1587 bp, synthetic construct
  misc_feature 1..1587: note = Variant of terminal deoxynucleotidyltransferase
  source 1..1587: mol_type = other DNA
atgcaccatcatcatcatcatggcggtagcggcatgcaccgcattcgtaccatcgattcggacttcgggaagaaacgccagaagaagatggataaccacattagttccatgatctatgaaatcaaatttcacgagtttgtgctgttcattctcgaaaagaaaatgggtgcgacgcgtcgtacttttctgacagatttagcccgcaagaaagggttccgcgtcgagaatgaactgtcagacagcgttacccacatcgtggcagaaaataattcaggatctgacgtattggcttggctgaagacccacaagatggagaagacgacgcaatttgaactgctggatattagctggcttatcgaaagcatgaaagttggtaaaccggtggacaccaaggggaaataccagttgatggaatcgcgtgtcgatagtgcgaacccagatccgacagccggtaccctcaacattctgcctcctactacgaagaccatttctcagtatgcgtgtcaacgccgcaccaccatcaacaaccataatcagcgttttacggacgcactggaaattcttgcggaaaattacgagttcaaagaaaacgatgatacttgtctgacctttatgcgtgctatttccgtgctgaaatgccttccgtttgaggtagttagcctgaaagacacggaaggattgccctggatcggtgatgaagtcaaaggtattatggaagaaatcatcgaggtcggtgaatcgctggaagtgcaggccgtgctcaatgatgagcgctatcaaagcttcaaactgtttaccagtgtctttggagtggggctgaagacagcagacaaatggtaccgtatgggtttccgcacgctcaacgatgttcgttccagcaagaccctgaaattgaccaagatgcagaaagcgggtctgtgctattatgaagatcttgctgatggcgttacgaaagccgaagctgacgcggtatctctgctggttcaggatgcagtctggactttcgacccggatgcgctggtggaggttacgggtggatttcgtcgtgggaaagagtttggtcacgacgttgatctgcttatcacatctccgggagctgagaaagaacaagaagaccagctcctgcagaaagtgaccaatctgtggaagaaacaagggttgttgctgtacggtgatctgatcgaaagtacctttgaagatctgaaactcccatcccgcaagattgatgccctggaccattttcagaaatgctttctgatcctcaaactttatcaccataaagaggacaaacgcaaatgggaaatgccgacgggttcgaacgaaagcgaggccaaaagttggaaagcaattcgcgtagatctggttgtttgtccctacgatcgttatgcgtttgcgttgttgggttggaccggaagccgcatgttcgaacgtgatctgcgccgctacgccacccacgagaagaagatgatgctggacaatcatgcgctgtatgacctgaccaagaaaatctttctcaaagctaaatcggaagaggaaattttcgcacatctggggcttgaatacctggaaccgtccgaacgtaacgca

SEQ ID NO: 88 - protein, 529 aa, synthetic construct
  REGION 1..529: note = Variant of terminal deoxynucleotidyltransferase
MHHHHHHGGSGMHRIRTIDSDFGKKRQKKMDNHISSMIYEIKFHEFVLFILEKKMGATRRTFLTDLARKKGFRVENELSDSVTHIVAENNSGSDVLAWLKTHKMEKTTQFELLDISWLIESMKVGKPVDTKGKYQLMESRVDSANPDPTAGTLNILPPTTKTISQYACQRRTTINNHNQRFTDALEILAENYEFKENDDTCLTFMRAISVLKCLPFEVVSLKDTEGLPWIGDEVKGIMEEIIEVGESLEVQAVLNDERYQSFKLFTSVFGVGLKTADKWYRMGFRTLNDVRSSKTLKLTKMQKAGLCYYEDLADGVTKAEADAVSLLVQDAVWTFDPDALVEVTGGFRRGKEFGHDVDLLITSPGAEKEQEDQLLQKVTNLWKKQGLLLYGDLIESTFEDLKLPSRKIDALDHFQKCFLILKLYHHKEDKRKWEMPTGSNESEAKSWKAIRVDLVVCPYDRYAFALLGWTGSRMFERDLRRYATHEKKMMLDNHALYDLTKKIFLKAKSEEEIFAHLGLEYLEPSERNA

SEQ ID NO: 89 - DNA, 1587 bp, synthetic construct
  misc_feature 1..1587: note = Variant of terminal deoxynucleotidyltransferase
  source 1..1587: mol_type = other DNA
atgcaccatcatcatcatcatggcggtagcggcatgcaccgcattcgtaccatcgattcggacttcgggaagaaacgccagaagaagatggataaccacattagttccatgatctatgaaatcaaatttcacgagtttgtgctgttcattctcgaaaagaaaatgggtgcgacgcgtcgtacttttctgacagatttagcccgcaagaaagggttccgcgtcgagaatgaactgtcagacagcgttacccacatcgtggcagaaaataattcaggatctgacgtattggcttggctgaagacccacaagatggagaagacgacgcaatttgaactgctggatattagctggcttatcgaaagcatgaaagttggtaaaccggtggacaccaaggggaaataccagttgatggaatcgcgtgtcgatagtgcgaacccagatccgacagccggtaccctcaacattctgcctcctactacgaagaccatttctcagtatgcgtgtcaacgccgcaccaccatcaacaaccataatcagcgttttacggacgcactggaaattcttgcggaaaattacgagttcaaaggtaacgatgatacttgtctgacctttatgcgtgctatttccgtgctgaaatgccttccgtttgaggtagttagcctgaaagacacggaaggattgccctggatcggtgatgaagtcaaaggtattatggaagaaatcatcgaggtcggtgaatcgctggaagtgcaggccgtgctcaatgatgagcgctatcaaagcttcaaactgtttaccagtgtctttggagtggggctgaagacagcagacaaatggtaccgtatgggtttccgcacgctcaacgatgttcgttccagcaagaccctgaaattgaccaagatgcagaaagcgggtctgtgctattatgaagatcttgctgatggcgttacgaaagccgaagctgacgcggtatctctgctggttcaggatgcagtctggactttcgacccggatgcgctggtggagattacgggtggatttcgtcgtgggaaagagtttggtcacgacgttgatctgcttatcacatctccgggagctgagaaagaacaagaagaccagctcctgcagaaagtgaccaatctgtggaagaaacaagggttgttgctgtacggtgatctgatcgaaagtacctttgaagatctgaaactcccatcccgcaagattgatgccctggaccattttcagaaatgctttctgatcctcaaactttatcaccataaagaggacaaacgcaaatgggaaatgccgacgggttcgaacgaaagcgaggccaaaagttggaaagcaattcgcgtagatctggttgtttgtccctacgatcgttatgcgtttgcgttgttgggttggaccggaagccgcatgttcgaacgtgatctgcgccgctacgccacccacgagaagaagatgatgctggacaatcatgcgctgtatgacctgaccaagaaaatctttctcaaagctaaatcggaagaggaaattttcgcacatctggggcttgaatacctggaaccgtccgaacgtaacgca

SEQ ID NO: 90 - protein, 529 aa, synthetic construct
  REGION 1..529: note = Variant of terminal deoxynucleotidyltransferase
MHHHHHHGGSGMHRIRTIDSDFGKKRQKKMDNHISSMIYEIKFHEFVLFILEKKMGATRRTFLTDLARKKGFRVENELSDSVTHIVAENNSGSDVLAWLKTHKMEKTTQFELLDISWLIESMKVGKPVDTKGKYQLMESRVDSANPDPTAGTLNILPPTTKTISQYACQRRTTINNHNQRFTDALEILAENYEFKGNDDTCLTFMRAISVLKCLPFEVVSLKDTEGLPWIGDEVKGIMEEIIEVGESLEVQAVLNDERYQSFKLFTSVFGVGLKTADKWYRMGFRTLNDVRSSKTLKLTKMQKAGLCYYEDLADGVTKAEADAVSLLVQDAVWTFDPDALVEITGGFRRGKEFGHDVDLLITSPGAEKEQEDQLLQKVTNLWKKQGLLLYGDLIESTFEDLKLPSRKIDALDHFQKCFLILKLYHHKEDKRKWEMPTGSNESEAKSWKAIRVDLVVCPYDRYAFALLGWTGSRMFERDLRRYATHEKKMMLDNHALYDLTKKIFLKAKSEEEIFAHLGLEYLEPSERNA

SEQ ID NO: 91 - DNA, 1587 bp, synthetic construct
  misc_feature 1..1587: note = Variant of terminal deoxynucleotidyltransferase
  source 1..1587: mol_type = other DNA
atgcaccatcatcatcatcatggcggtagcggcatgcaccgcattcgtaccatcgattcggacttcgggaagaaacgccagaagaagatggataaccacattagttccatgatctatgaaatcaaatttcacgagtttgtgctgttcattctcgaaaagaaaatgggtgcgacgcgtcgtacttttctgacagatttagcccgcaagaaagggttccgcgtcgagaatgaactgtcagacagcgttacccacatcgtggcagaaaataattcaggatctgacgtattggcttggctgaagacccacaagatggagaagacgacgcaatttgaactgctggatattagctggcttatcgaaagcatgaaagttggtaaaccggtggacaccaaggggaaataccagttgatggaatcgcgtgtcgatagtgcgaacccagatccgacagccggtaccctcaacattctgcctcctactacgaagaccatttctcagtatgcgtgtcaacgccgcaccaccatcaacaaccataatcagcgttttacggacgcactggaaattcttgcggaaaattacgagttcaaagaaaacgatgatacttgtctgacctttatgcgtgctatttccgtgctgaaatgccttccgtttgaggtagttagcctgaaagacacggaaggattgccctggatcggtgatgaagtcaaaggtattatggaagaaatcatcgaggtcggtgaatcgctggaagtgcaggccgtgctcaatgatgagcgctatcaaagcttcaaactgtttaccagtgtctttggagtggggctgaagacagcagacaaatggtaccgtatgggtttccgcacgctcaacgatgttcgttccagcaagaccctgactttgaccaagatgcagaaagcgggtctgtgctattatgaagatcttgctgatggcgttacgaaagccgaagctgacgcggtatctctgctggttcaggatgcagtctggactttcgacccggatgcgctggtggagattacgggtggatttcgtcgtgggaaagagtttggtcacgacgttgatctgcttatcacatctccgggagctgagaaagaacaagaagaccagctcctgcagaaagtgaccaatctgtggaagaaacaagggttgttgctgtacggtgatctgatcgaaagtacctttgaagatctgaaactcccatcccgcaagattgatgccctggaccattttcagaaatgctttctgatcctcaaactttatcaccataaagaggacaaacgcaaatgggaaatgccgacgggttcgaacgaaagcgaggccaaaagttggaaagcaattcgcgtagatctggttgtttgtccctacgatcgttatgcgtttgcgttgttgggttggaccggaagccgcatgttcgaacgtgatctgcgccgctacgccacccacgagaagaagatgatgctggacaatcatgcgctgtatgacctgaccaagaaaatctttctcaaagctaaatcggaagaggaaattttcgcacatctggggcttgaatacctggaaccgtccgaacgtaacgca

SEQ ID NO: 92 - protein, 529 aa, synthetic construct
  REGION 1..529: note = Variant of terminal deoxynucleotidyltransferase
MHHHHHHGGSGMHRIRTIDSDFGKKRQKKMDNHISSMIYEIKFHEFVLFILEKKMGATRRTFLTDLARKKGFRVENELSDSVTHIVAENNSGSDVLAWLKTHKMEKTTQFELLDISWLIESMKVGKPVDTKGKYQLMESRVDSANPDPTAGTLNILPPTTKTISQYACQRRTTINNHNQRFTDALEILAENYEFKENDDTCLTFMRAISVLKCLPFEVVSLKDTEGLPWIGDEVKGIMEEIIEVGESLEVQAVLNDERYQSFKLFTSVFGVGLKTADKWYRMGFRTLNDVRSSKTLTLTKMQKAGLCYYEDLADGVTKAEADAVSLLVQDAVWTFDPDALVEITGGFRRGKEFGHDVDLLITSPGAEKEQEDQLLQKVTNLWKKQGLLLYGDLIESTFEDLKLPSRKIDALDHFQKCFLILKLYHHKEDKRKWEMPTGSNESEAKSWKAIRVDLVVCPYDRYAFALLGWTGSRMFERDLRRYATHEKKMMLDNHALYDLTKKIFLKAKSEEEIFAHLGLEYLEPSERNA

SEQ ID NO: 93 - DNA, 1587 bp, synthetic construct
  misc_feature 1..1587: note = Variant of terminal deoxynucleotidyltransferase
  source 1..1587: mol_type = other DNA
atgcaccatcatcatcatcatggcggtagcggcatgcaccgcattcgtaccatcgattcggacttcgggaagaaacgccagaagaagatggataaccacattagttccatgatctatgaaatcaaatttcacgagtttgtgctgttcattctcgaaaagaaaatgggtgcgacgcgtcgtacttttctgacagatttagcccgcaagaaagggttccgcgtcgagaatgaactgtcagacagcgttacccacatcgtggcagaaaataattcaggatctgacgtattggcttggctgaagacccacaagatggagaagacgacgcaatttgaactgctggatattagctggcttatcgaaagcatgaaagttggtaaaccggtggacaccaaggggaaataccagttgatggaatcgcgtgtcgatagtgcgaacccagatccgacagccggtaccctcaacattctgcctcctactacgaagaccatttctcagtatgcgtgtcaacgccgcaccaccatcaacaaccataatcagcgttttacggacgcactggaaattcttgcggaaaattacgagttcaaagaaaacgatgatacttgtctgacctttatgcgtgctatttccgtgctgaaatgccttccgtttgaggtagttagcctgaaagacacggaaggattgccctggatcggtgatgaggtcaaaggtattatggaagaaatcatcgaggtcggtgaatcgctggaagtgcaggccgtgctcaatgatgagcgctatcaaagcttcaaactgtttaccagtgtctttggagtggggctgaagacagcagacaaatggtaccgtatgggtttccgcacgctcaacgatgttcgttccagcaagaccctgaaattgaccaagatgcagaaagcgggtctgtgctattatgaagatcttgctgatggcgttacggaggccgaagctgacgcggtatctctgctggttcaggatgcagtctggactttcgacccggatgcgctggtggagattacgggtggatttcgtcgtgggaaagagtttggtcacgacgttgatctgcttatcacatctccgggagctgagaaagaacaagaagaccagctcctgcagaaagtgaccaatctgtggaagaaacaagggttgttgctgtacggtgatctgatcgaaagtacctttgaagatctgaaactcccatcccgcaagattgatgccctggaccattttcagaaatgctttctgatcctcaaactttatcaccataaagaggacaaacgcaaatgggaaatgccgacgggttcgaacgaaagcgaggccaaaagttggaaagcaattcgcgtagatctggttgtttgtccctacgatcgttatgcgtttgcgttgttgggttggaccggaagccgcatgttcgaacgtgatctgcgccgctacgccacccacgagaagaagatgatgctggacaatcatgcgctgtatgacctgaccaagaaaatctttctcaaagctaaatcggaagaggaaattttcgcacatctggggcttgaatacctggaaccgtccgaacgtaacgca

SEQ ID NO: 94 - protein, 529 aa, synthetic construct
  REGION 1..529: note = Variant of terminal deoxynucleotidyltransferase
MHHHHHHGGSGMHRIRTIDSDFGKKRQKKMDNHISSMIYEIKFHEFVLFILEKKMGATRRTFLTDLARKKGFRVENELSDSVTHIVAENNSGSDVLAWLKTHKMEKTTQFELLDISWLIESMKVGKPVDTKGKYQLMESRVDSANPDPTAGTLNILPPTTKTISQYACQRRTTINNHNQRFTDALEILAENYEFKENDDTCLTFMRAISVLKCLPFEVVSLKDTEGLPWIGDEVKGIMEEIIEVGESLEVQAVLNDERYQSFKLFTSVFGVGLKTADKWYRMGFRTLNDVRSSKTLKLTKMQKAGLCYYEDLADGVTEAEADAVSLLVQDAVWTFDPDALVEITGGFRRGKEFGHDVDLLITSPGAEKEQEDQLLQKVTNLWKKQGLLLYGDLIESTFEDLKLPSRKIDALDHFQKCFLILKLYHHKEDKRKWEMPTGSNESEAKSWKAIRVDLVVCPYDRYAFALLGWTGSRMFERDLRRYATHEKKMMLDNHALYDLTKKIFLKAKSEEEIFAHLGLEYLEPSERNA

SEQ ID NO: 95 - DNA, 1587 bp, synthetic construct
  misc_feature 1..1587: note = Variant of terminal deoxynucleotidyltransferase
  source 1..1587: mol_type = other DNA
atgcaccatcatcatcatcatggcggtagcggcatgcaccgcattcgtaccatcgattcggacttcgggaagaaacgccagaagaagatggataaccacattagttccatgatctatgaaatcaaatttcacgagtttgtgctgttcattctcgaaaagaaaatgggtgcgacgcgtcgtacttttctgacagatttagcccgcaagaaagggttccgcgtcgagaatgaactgtcagacagcgttacccacatcgtggcagaaaataattcaggatctgacgtattggcttggctgaagacccacaagatggagaagacgacgcaatttgaactgctggatattagctggcttatcgaaagcatgaaagttggtaaaccggtggacaccaaggggaaataccagttgatggaatcgcgtgtcgatagtgcgaacccagatccgacagccggtaccctcaacattctgcctcctactacgaagaccatttctcagtatgcgtgtcaacgccgcaccaccatcaacaaccataatcagcgttttacggacgcactggaaattcttgcggaaaattacgagttcaaagaaaacgatgatacttgtctgacctttatgcgtgctatttccgtgctgaaatgccttccgtttgaggtagttagcctgaaagacacggaaggattgccctggatcggtgatgaagtcaaaggtattatggaagaaatcatcgaggtcggtgaatcgctggaagtgcaggccgtgctcaatgatgagcgctatcaaagcttcaaactgtttaccagtgtctttggagtggggctgaagacagcagacaaatggtaccgtatgggtttccgcacgctcaacgatgttcgttccagcaagaccctgaaattgaccaagatgcagaaagcgggtctgtgctattatgaagatcttgctgatggcgttacgaaagccgaagctgacgcggtatctctgctggttcaggatgcagtctggactttcgacccggatgcgctggtggagattacgggtggatttcgtcgtgggaaagagtttggtcacgacgttgatctgcttatcacatctccgggagctgagaaagaacaagaagaccagctcctgcagaaagtgaccaatctgtggaagaaacaagggttgttgctgtacggtgatctgatcgaaagtacctttgaagatctgaaactcccatcccgcaagattgatgccctggaccattttcagaaatgctttctgatcctcaaactttatcaccataaagaggacaaacgcaaatgggaaatgccgacgggttcgaacgaaagcgaggccaaaagttggaaagcaattcgcgtagatctggttgtttgtccctacgatcgttatgcgtttgcgttgttgggttggaccggaagccgcatgttcgaacgtgatctgcgcgtgtacgccacccacgagaagaagatgatgctggacaatcatgcgctgtatgacctgaccaagaaaatctttctcaaagctaaatcggaagaggaaattttcgcacatctggggcttgaatacctggaaccgtccgaacgtaacgca

SEQ ID NO: 96 - protein, 529 aa, synthetic construct
  REGION 1..529: note = Variant of terminal deoxynucleotidyltransferase
MHHHHHHGGSGMHRIRTIDSDFGKKRQKKMDNHISSMIYEIKFHEFVLFILEKKMGATRRTFLTDLARKKGFRVENELSDSVTHIVAENNSGSDVLAWLKTHKMEKTTQFELLDISWLIESMKVGKPVDTKGKYQLMESRVDSANPDPTAGTLNILPPTTKTISQYACQRRTTINNHNQRFTDALEILAENYEFKENDDTCLTFMRAISVLKCLPFEVVSLKDTEGLPWIGDEVKGIMEEIIEVGESLEVQAVLNDERYQSFKLFTSVFGVGLKTADKWYRMGFRTLNDVRSSKTLKLTKMQKAGLCYYEDLADGVTKAEADAVSLLVQDAVWTFDPDALVEITGGFRRGKEFGHDVDLLITSPGAEKEQEDQLLQKVTNLWKKQGLLLYGDLIESTFEDLKLPSRKIDALDHFQKCFLILKLYHHKEDKRKWEMPTGSNESEAKSWKAIRVDLVVCPYDRYAFALLGWTGSRMFERDLRVYATHEKKMMLDNHALYDLTKKIFLKAKSEEEIFAHLGLEYLEPSERNA

SEQ ID NO: 97 - DNA, 1587 bp, synthetic construct
  misc_feature 1..1587: note = Variant of terminal deoxynucleotidyltransferase
  source 1..1587: mol_type = other DNA
atgcaccatcatcatcatcatggcggtagcggcatgcaccgcattcgtaccatcgattcggacttcgggaagaaacgccagaagaagatggataaccacattagttccatgatctatgaaatcaaatttcacgagtttgtgctgttcattctcgaaaagaaaatgggtgcgacgcgtcgtacttttctgacagatttagcccgcaagaaagggttccgcgtcgagaatgaactgtcagacagcgttacccacatcgtggcagaaaataattcaggatctgacgtattggcttggctgaagacccacaagatggagaagacgacgcaatttgaactgctggatattagctggcttatcgaaagcatgaaagttggtaaaccggtggacaccaaggggaaataccagttgatggaatcgcgtgtcgatagtgcgaacccagatccgacagccggtaccctcaacattctgcctcctactacgaagaccatttctcagtatgcgtgtcaacgccgcaccaccatcaacaaccataatcagcgttttacggacgcactggaaattcttgcggaaaattacgagttcaaagaaaacgatgatacttgtctgacctttatgcgtgctatttccgtgctgaaatgccttccgtttgaggtagttagcctgaaagacacggaaggattgccctggatcggtgatgaagtcaaaggtattatggaagaaatcatcgaggtcggtgaatcgctggaagtgcaggccgtgctcaatgatgagcgctatcaaagcttcaaactgtttaccagtgtctttggagtggggctgaagacagcagacaaatggtaccgtatgggtttccgcacgctcaacgatgttcgttccagcaagaccctgaaattgaccaagatgcagaaagcgggtctgtgctattatgaagatcttgctgatggcgttacgaaagccgaagctgacgcggtatctctgctggttcaggatgcagtctggactttcgacccggatgcgctggtggagattacgggtggatttcgtcgtgggaaagagtttggtcacgacgttgatctgcttatcacatctccgggagctgagaaagaacaagaagaccagctcctgcagaaagtgaccaatctgtggaagaaacaagggttgttgctgtacggtgatctgatcgaaagtacctttgaagatctgaaactcccatcccgcaagattgatgccctggaccattttcagaaatgctttctgatcctcaaactttatcaccataaagaggacaaacgcaaatgggaaatgccgacgggttcgaacgaaagcgaggccaaaagttggaaagcaattcgcgtagatctggttgtttgtccctacgatcgttatgcgtttgcgttgttgggttggaccggaagccgcatgttcgaaacggatctgcgccgctacgccacccacgagaagaagatgatgctggacaatcatgcgctgtatgacctgaccaagaaaatctttctcaaagctaaatcggaagaggaaattttcgcacatctggggcttgaatacctggaaccgtccgaacgtaacgca

SEQ ID NO: 98 - protein, 529 aa, synthetic construct
  REGION 1..529: note = Variant of terminal deoxynucleotidyltransferase
MHHHHHHGGSGMHRIRTIDSDFGKKRQKKMDNHISSMIYEIKFHEFVLFILEKKMGATRRTFLTDLARKKGFRVENELSDSVTHIVAENNSGSDVLAWLKTHKMEKTTQFELLDISWLIESMKVGKPVDTKGKYQLMESRVDSANPDPTAGTLNILPPTTKTISQYACQRRTTINNHNQRFTDALEILAENYEFKENDDTCLTFMRAISVLKCLPFEVVSLKDTEGLPWIGDEVKGIMEEIIEVGESLEVQAVLNDERYQSFKLFTSVFGVGLKTADKWYRMGFRTLNDVRSSKTLKLTKMQKAGLCYYEDLADGVTKAEADAVSLLVQDAVWTFDPDALVEITGGFRRGKEFGHDVDLLITSPGAEKEQEDQLLQKVTNLWKKQGLLLYGDLIESTFEDLKLPSRKIDALDHFQKCFLILKLYHHKEDKRKWEMPTGSNESEAKSWKAIRVDLVVCPYDRYAFALLGWTGSRMFETDLRRYATHEKKMMLDNHALYDLTKKIFLKAKSEEEIFAHLGLEYLEPSERNA

SEQ ID NO: 99 - DNA, 1587 bp, synthetic construct
  misc_feature 1..1587: note = Variant of terminal deoxynucleotidyltransferase
  source 1..1587: mol_type = other DNA
atgcaccatcatcatcatcatggcggtagcggcatgcaccgcattcgtaccatcgattcggacttcgggaagaaacgccagaagaagatggataaccacattagttccatgatctatgaaatcaaatttcacgagtttgtgctgttcattctcgaaaagaaaatgggtgcgacgcgtcgtacttttctgacagatttagcccgcaagaaagggttccgcgtcgagaatgaactgtcagacagcgttacccacatcgtggcagaaaataattcaggatctgacgtattggcttggctgaagacccacaagatggagaagacgacgcaatttgaactgctggatattagctggcttatcgaaagcatgaaagttggtaaaccggtggacaccaaggggaaataccagttgatggaatcgcgtgtcgatagtgcgaacccagatccgacagccggtaccctcaacattctgcctcctactacgaagaccatttctcagtatgcgtgtcaacgccgcaccaccatcaacaaccataatcagcgttttacggacgcactggaaattcttgcggaaaattacgagttcaaagaaaacgatgatacttgtctgacctttatgcgtgctatttccgtgctgaaatgccttccgtttgaggtagttagcctgaaagacacggaaggattgccctggatcggtgatgaagtcaaaggtattatggaagaaatcatcgaggtcggtgaatcgctggaagtgcaggccgtgctcaatgatgagcgctatcaaagcttcaaactgtttaccagtgtctttggagtggggctgaagacagcagacaaatggtaccgtatgggtttccgcacgctcaacgatgttcgttccagcaagaccctgaaattgaccccgatgcagaaagcgggtctgtgctattatgaagatcttgctgatggcgttacgaaagccgaagctgacgcggtatctctgctggttcaggatgcagtctggactttcgacccggatgcgctggtggagattacgggtggatttcgtcgtgggaaagagtttggtcacgacgttgatctgcttatcacatctccgggagctgagaaagaacaagaagaccagctcctgcagaaagtgaccaatctgtggaagaaacaagggttgttgctgtacggtgatctgatcgaaagtacctttgaagatctgaaactcccatcccgcaagattgatgccctggaccattttcagaaatgctttctgatcctcaaactttatcaccataaagaggacaaacgcaaatgggaaatgccgacgggttcgaacgaaagcgaggccaaaagttggaaagcaattcgcgtagatctggttgtttgtccctacgatcgttatgcgtttgcgttgttgggttggaccggaagccgcatgttcgaacgtgatctgcgccgctacgccacccacgagaagaagatgatgctggacaatcatgcgctgtatgacctgaccaagaaaatctttctcaaagctaaatcggaagaggaaattttcgcacatctggggcttgaatacctggaaccgtccgaacgtaacgca

SEQ ID NO: 100 - protein, 529 aa, synthetic construct
  REGION 1..529: note = Variant of terminal deoxynucleotidyltransferase
MHHHHHHGGSGMHRIRTIDSDFGKKRQKKMDNHISSMIYEIKFHEFVLFILEKKMGATRRTFLTDLARKKGFRVENELSDSVTHIVAENNSGSDVLAWLKTHKMEKTTQFELLDISWLIESMKVGKPVDTKGKYQLMESRVDSANPDPTAGTLNILPPTTKTISQYACQRRTTINNHNQRFTDALEILAENYEFKENDDTCLTFMRAISVLKCLPFEVVSLKDTEGLPWIGDEVKGIMEEIIEVGESLEVQAVLNDERYQSFKLFTSVFGVGLKTADKWYRMGFRTLNDVRSSKTLKLTPMQKAGLCYYEDLADGVTKAEADAVSLLVQDAVWTFDPDALVEITGGFRRGKEFGHDVDLLITSPGAEKEQEDQLLQKVTNLWKKQGLLLYGDLIESTFEDLKLPSRKIDALDHFQKCFLILKLYHHKEDKRKWEMPTGSNESEAKSWKAIRVDLVVCPYDRYAFALLGWTGSRMFERDLRRYATHEKKMMLDNHALYDLTKKIFLKAKSEEEIFAHLGLEYLEPSERNA

SEQ ID NO: 101 - DNA, 1587 bp, synthetic construct
  misc_feature 1..1587: note = Variant of terminal deoxynucleotidyltransferase
  source 1..1587: mol_type = other DNA
atgcaccatcatcatcatcatggcggtagcggcatgcaccgcattcgtaccatcgattcggacttcgggaagaaacgccagaagaagatggataaccacattagttccatgatctatgaaatcaaatttcacgagtttgtgctgttcattctcgaaaagaaaatgggtgcgacgcgtcgtacttttctgacagatttagcccgcaagaaagggttccgcgtcgagaatgaactgtcagacagcgttacccacatcgtggcagaaaataattcaggatctgacgtattggcttggctgaagacccacaagatggagaagacgacgcaatttgaactgctggatattagctggcttatcgaaagcatgaaagttggtaaaccggtggacaccaaggggaaataccagttgatggaatcgcgtgtcgatagtgcgaacccagatccgacagccggtaccctcaacattctgcctcctactacgaagaccatttctcagtatgcgtgtcaacgccgcaccaccatcaacaaccataatcagcgttttacggacgcactggaaattcttgcggaaaattacgagttctgggaaaacgatgatacttgtctgacctttatgcgtgctatttccgtgctgaaatgccttccgtttgaggtagttagcctgaaagacacggaaggattgccctggatcggtgatgaagtcaaaggtattatggaagaaatcatcgaggtcggtgaatcgctggaagtgcaggccgtgctcaatgatgagcgctatcaaagcttcaaactgtttaccagtgtctttggagtggggctgaagacagcagacaaatggtaccgtatgggtttccgcacgctcaacgatgttcgttccagcaagaccctgaaattgaccaagatgcagaaagcgggtctgtgctattatgaagatcttgctgatggcgttacgaaagccgaagctgacgcggtatctctgctggttcaggatgcagtctggactttcgacccggatgcgctggtggagattacgggtggatttcgtcgtgggaaagagtttggtcacgacgttgatctgcttatcacatctccgggagctgagaaagaacaagaagaccagctcctgcagaaagtgaccaatctgtggaagaaacaagggttgttgctgtacggtgatctgatcgaaagtacctttgaagatctgaaactcccatcccgcaagattgatgccctggaccattttcagaaatgctttctgatcctcaaactttatcaccataaagaggacaaacgcaaatgggaaatgccgacgggttcgaacgaaagcgaggccaaaagttggaaagcaattcgcgtagatctggttgtttgtccctacgatcgttatgcgtttgcgttgttgggttggaccggaagccgcatgttcgaacgtgatctgcgccgctacgccacccacgagaagaagatgatgctggacaatcatgcgctgtatgacctgaccaagaaaatctttctcaaagctaaatcggaagaggaaattttcgcacatctggggcttgaatacctggaaccgtccgaacgtaacgca

SEQ ID NO: 102 - protein, 529 aa, synthetic construct
  REGION 1..529: note = Variant of terminal deoxynucleotidyltransferase
MHHHHHHGGSGMHRIRTIDSDFGKKRQKKMDNHISSMIYEIKFHEFVLFILEKKMGATRRTFLTDLARKKGFRVENELSDSVTHIVAENNSGSDVLAWLKTHKMEKTTQFELLDISWLIESMKVGKPVDTKGKYQLMESRVDSANPDPTAGTLNILPPTTKTISQYACQRRTTINNHNQRFTDALEILAENYEFWENDDTCLTFMRAISVLKCLPFEVVSLKDTEGLPWIGDEVKGIMEEIIEVGESLEVQAVLNDERYQSFKLFTSVFGVGLKTADKWYRMGFRTLNDVRSSKTLKLTKMQKAGLCYYEDLADGVTKAEADAVSLLVQDAVWTFDPDALVEITGGFRRGKEFGHDVDLLITSPGAEKEQEDQLLQKVTNLWKKQGLLLYGDLIESTFEDLKLPSRKIDALDHFQKCFLILKLYHHKEDKRKWEMPTGSNESEAKSWKAIRVDLVVCPYDRYAFALLGWTGSRMFERDLRRYATHEKKMMLDNHALYDLTKKIFLKAKSEEEIFAHLGLEYLEPSERNA

SEQ ID NO: 103 - DNA, 1587 bp, synthetic construct
  misc_feature 1..1587: note = Variant of terminal deoxynucleotidyltransferase
  source 1..1587: mol_type = other DNA
atgcaccatcatcatcatcatggcggtagcggcatgcaccgcattcgtaccatcgattcggacttcgggaagaaacgccagaagaagatggataaccacattagttccatgatctatgaaatcaaatttcacgagtttgtgctgttcattctcgaaaagaaaatgggtgcgacgcgtcgtacttttctgacagatttagcccgcaagaaagggttccgcgtcgagaatgaactgtcagacagcgttacccacatcgtggcagaaaataattcaggatctgacgtattggcttggctgaagacccacaagatggagaagacgacgcaatttgaactgctggatattagctggcttatcgaaagcatgaaagttggtaaaccggtggacaccaaggggaaataccagttgatggaatcgcgtgtcgatagtgcgaacccagatccgacagccggtaccctcaacattctgcctcctactacgaagaccatttctcagtatgcgtgtcaacgccgcaccaccatcaacaaccataatcagcgttttacggacgcactggaaattcttgcggaaaattacgagttcaaagaaaacgatgatacttgtctgacctttatgcgtgctatttccgtgctgaaatgccttccgtttgaggtagttagcctgaaagacacggaaggattgccctggatcggtgatgaagtcaaaggtattatggaagaaatcatcgaggtcggtgaatcgctggaagtgcaggccgtgctcaatgatgagcgctatcaaagcttcaaactgtttaccagtgtctttggagtggggctgaagacagcagacaaatggtaccgtatgggtttccgcacgctcaacgatgttcgttccagcaagaccctgaaattgaccaagatgcagaaagcgggtctgtgctattatgaagatcttgctgatggcgttacgaaagccgaagctgacgcggtatctctgctggttcaggatgcagtctggactttcgacccggatgcgctggtggagattacgggtggatttcgtcgtgggaaagagtttggtcacgacgttgatctgcttatcacatctccgggagctgagaaagaacaagaagaccagctcctgcagaaagtgaccaatctgtggaagaaacaagggttgttgctgtacggtgatctgatcgaaagtacctttgaagatctgaaactcccatcccgcaagattgatgccctggaccattttcagaaatgctttctgatcctcaaactttatcaccataaagaggacaaacgcaaatgggaaatgccgacgggttcgaacgaaagcgaggccaaaagttggaaagcaattcgcgtagatctggttaagtgtccctacgatcgttatgcgtttgcgttgttgggttggaccggaagccgcatgttcgaacgtgatctgcgccgctacgccacccacgagaagaagatgatgctggacaatcatgcgctgtatgacctgaccaagaaaatctttctcaaagctaaatcggaagaggaaattttcgcacatctggggcttgaatacctggaaccgtccgaacgtaacgca

SEQ ID NO: 104 - protein, 529 aa, synthetic construct
  REGION 1..529: note = Variant of terminal deoxynucleotidyltransferase
MHHHHHHGGSGMHRIRTIDSDFGKKRQKKMDNHISSMIYEIKFHEFVLFILEKKMGATRRTFLTDLARKKGFRVENELSDSVTHIVAENNSGSDVLAWLKTHKMEKTTQFELLDISWLIESMKVGKPVDTKGKYQLMESRVDSANPDPTAGTLNILPPTTKTISQYACQRRTTINNHNQRFTDALEILAENYEFKENDDTCLTFMRAISVLKCLPFEVVSLKDTEGLPWIGDEVKGIMEEIIEVGESLEVQAVLNDERYQSFKLFTSVFGVGLKTADKWYRMGFRTLNDVRSSKTLKLTKMQKAGLCYYEDLADGVTKAEADAVSLLVQDAVWTFDPDALVEITGGFRRGKEFGHDVDLLITSPGAEKEQEDQLLQKVTNLWKKQGLLLYGDLIESTFEDLKLPSRKIDALDHFQKCFLILKLYHHKEDKRKWEMPTGSNESEAKSWKAIRVDLVKCPYDRYAFALLGWTGSRMFERDLRRYATHEKKMMLDNHALYDLTKKIFLKAKSEEEIFAHLGLEYLEPSERNA

SEQ ID NO: 105 - DNA, 1587 bp, synthetic construct
  misc_feature 1..1587: note = Variant of terminal deoxynucleotidyltransferase
  source 1..1587: mol_type = other DNA
atgcaccatcatcatcatcatggcggtagcggcatgcaccgcattcgtaccatcgattcggacttcgggaagaaacgccagaagaagatggataaccacattagttccatgatctatgaaatcaaatttcacgagtttgtgctgttcattctcgaaaagaaaatgggtgcgacgcgtcgtacttttctgacagatttagcccgcaagaaagggttccgcgtcgagaatgaactgtcagacagcgttacccacatcgtggcagaaaataattcaggatctgacgtattggcttggctgaagacccacaagatggagaagacgacgcaatttgaactgctggatattagctggcttatcgaaagcatgaaagttggtaaaccggtggacaccaaggggaaataccagttgatggaatcgcgtgtcgatagtgcgaacccagatccgacagccggtaccctcaacattctgcctcctactacgaagaccatttctcagtatgcgtgtcaacgccgcaccaccatcaacaaccataatcagcgttttacggacgcactggaaattcttgcggaaaattacgagttcaaagaaaacgatgatacttgtctgacctttatgcgtgctatttccgtgctgaaatgccttccgtttgaggtagttagcctgaaagacacggaaggattgccctggatcggtgatgaagtcaaaggtattatggaagaaatcatcgaggtcggtgaatcgctggaagtgcaggccgtgctcaatgatgagcgctatcaaagcttcaaactgtttaccagtgtctttggagtggggctgaagacagcagacaaatggtaccgtatgggtttccgcacgctcaacgatgttcgttccagcaagaccctgaaattgaccaagatgcagaaagcgggtctgtgctattatgaagatcttgctgatggcgttacgaaagccgaagctgacgcggtatctctgctggttcaggatgcagtctggactttcgacccggatgcgctggtggagattacgggtggatttcgtcgtgggaaagagtttggtcacgacgttgatctgcttatcacatctccgggagctgagaaagaacaagaagaccagctcctgcagaaagtgaccaatctgtggaagaaacaagggttgttgctgtacggtgatctgatcgaaagtacctttgaagatctgaaactcccatcccgcaagattgatgccctggaccattttcagaaatgctttctgatcatgaaactttatcaccataaagaggacaaacgcaaatgggaaatgccgacgggttcgaacgaaagcgaggccaaaagttggaaagcaattcgcgtagatctggttgtttgtccctacgatcgttatgcgtttgcgttgttgggttggaccggaagccgcatgttcgaacgtgatctgcgccgctacgccacccacgagaagaagatgatgctggacaatcatgcgctgtatgacctgaccaagaaaatctttctcaaagctaaatcggaagaggaaattttcgcacatctggggcttgaatacctggaaccgtccgaacgtaacgca

SEQ ID NO: 106 - protein, 529 aa, synthetic construct
  REGION 1..529: note = Variant of terminal deoxynucleotidyltransferase
MHHHHHHGGSGMHRIRTIDSDFGKKRQKKMDNHISSMIYEIKFHEFVLFILEKKMGATRRTFLTDLARKKGFRVENELSDSVTHIVAENNSGSDVLAWLKTHKMEKTTQFELLDISWLIESMKVGKPVDTKGKYQLMESRVDSANPDPTAGTLNILPPTTKTISQYACQRRTTINNHNQRFTDALEILAENYEFKENDDTCLTFMRAISVLKCLPFEVVSLKDTEGLPWIGDEVKGIMEEIIEVGESLEVQAVLNDERYQSFKLFTSVFGVGLKTADKWYRMGFRTLNDVRSSKTLKLTKMQKAGLCYYEDLADGVTKAEADAVSLLVQDAVWTFDPDALVEITGGFRRGKEFGHDVDLLITSPGAEKEQEDQLLQKVTNLWKKQGLLLYGDLIESTFEDLKLPSRKIDALDHFQKCFLIMKLYHHKEDKRKWEMPTGSNESEAKSWKAIRVDLVVCPYDRYAFALLGWTGSRMFERDLRRYATHEKKMMLDNHALYDLTKKIFLKAKSEEEIFAHLGLEYLEPSERNA

SEQ ID NO: 107 - DNA, 1587 bp, synthetic construct
  misc_feature 1..1587: note = Variant of terminal deoxynucleotidyltransferase
  source 1..1587: mol_type = other DNA
atgcaccatcatcatcatcatggcggtagcggcatgcaccgcattcgtaccatcgattcggacttcgggaagaaacgccagaagaagatggataaccacattagttccatgatctatgaaatcaaatttcacgagtttgtgctgttcattctcgaaaagaaaatgggtgcgacgcgtcgtacttttctgacagatttagcccgcaagaaagggttccgcgtcgagaatgaactgtcagacagcgttacccacatcgtggcagaaaataattcaggatctgacgtattggcttggctgaagacccacaagatggagaagacgacgcaatttgaactgctggatattagctggcttatcgaaagcatgaaagttggtaaaccggtggacaccaaggggaaataccagttgatggaatcgcgtgtcgatagtgcgaacccagatccgacagccggtaccctcaacattctgcctcctactacgaagaccatttctcagtatgcgtgtcaacgccgcaccaccatcaacaaccataatcagcgttttacggacgcactggaaattcttgcggaaaattacgagttcaaagaaaacgatgatacttgtctgacctttatgcgtgctatttccgtgctgaaatgccttccgtttgaggtagttagcctgaaagacacggaaggattgccctggatcggtgatgaagtcaaaggtattatggaagaaatcatcgaggtcggtgaatcgctggaagtgcaggccgtgctcaatgatgagcgctatcaaagcttcaaactgtttaccagtgtctttggagtggggctgaagacagcagacaaatggtaccgtatgggtttccgcacgctcaacgatgttcgttccagcaagaccctgaaattgaccaagatgcagaaagcgggtctgtgctattatgaagatcttgctgatggctgtacgaaagccgaagctgacgcggtatctctgctggttcaggatgcagtctggactttcgacccggatgcgctggtggagattacgggtggatttcgtcgtgggaaagagtttggtcacgacgttgatctgcttatcacatctccgggagctgagaaagaacaagaagaccagctcctgcagaaagtgaccaatctgtggaagaaacaagggttgttgctgtacggtgatctgatcgaaagtacctttgaagatctgaaactcccatcccgcaagattgatgccctggaccattttcagaaatgctttctgatcctcaaactttatcaccataaagaggacaaacgcaaatgggaaatgccgacgggttcgaacgaaagcgaggccaaaagttggaaagcaattcgcgtagatctggttgtttgtccctacgatcgttatgcgtttgcgttgttgggttggaccggaagccgcatgttcgaacgtgatctgcgccgctacgccacccacgagaagaagatgatgctggacaatcatgcgctgtatgacctgaccaagaaaatctttctcaaagctaaatcggaagaggaaattttcgcacatctggggcttgaatacctggaaccgtccgaacgtaacgca

SEQ ID NO: 108 - protein, 529 aa, synthetic construct
  REGION 1..529: note = Variant of terminal deoxynucleotidyltransferase
MHHHHHHGGSGMHRIRTIDSDFGKKRQKKMDNHISSMIYEIKFHEFVLFILEKKMGATRRTFLTDLARKKGFRVENELSDSVTHIVAENNSGSDVLAWLKTHKMEKTTQFELLDISWLIESMKVGKPVDTKGKYQLMESRVDSANPDPTAGTLNILPPTTKTISQYACQRRTTINNHNQRFTDALEILAENYEFKENDDTCLTFMRAISVLKCLPFEVVSLKDTEGLPWIGDEVKGIMEEIIEVGESLEVQAVLNDERYQSFKLFTSVFGVGLKTADKWYRMGFRTLNDVRSSKTLKLTKMQKAGLCYYEDLADGCTKAEADAVSLLVQDAVWTFDPDALVEITGGFRRGKEFGHDVDLLITSPGAEKEQEDQLLQKVTNLWKKQGLLLYGDLIESTFEDLKLPSRKIDALDHFQKCFLILKLYHHKEDKRKWEMPTGSNESEAKSWKAIRVDLVVCPYDRYAFALLGWTGSRMFERDLRRYATHEKKMMLDNHALYDLTKKIFLKAKSEEEIFAHLGLEYLEPSERNA

SEQ ID NO: 109 - DNA, 1587 bp, synthetic construct
  misc_feature 1..1587: note = Variant of terminal deoxynucleotidyltransferase
  source 1..1587: mol_type = other DNA
atgcaccatcatcatcatcatggcggtagcggcatgcaccgcattcgtaccatcgattcggacttcgggaagaaacgccagaagaagatggataaccacattagttccatgatctatgaaatcaaatttcacgagtttgtgctgttcattctcgaaaagaaaatgggtgcgacgcgtcgtacttttctgacagatttagcccgcaagaaagggttccgcgtcgagaatgaactgtcagacagcgttacccacatcgtggcagaaaataattcaggatctgacgtattggcttggctgaagacccacaagatggagaagacgacgcaatttgaactgctggatattagctggcttatcgaaagcatgaaagttggtaaaccggtggacaccaaggggaaataccagttgatggaatcgcgtgtcgatagtgcgaacccagatccgacagccggtaccctcaacattctgcctcctactacgaagaccatttctcagtatgcgtgtcaacgccgcaccaccatcaacaaccataatcagcgttttacggacgcactggaaattcttgcggaaaattacgagttcaaagaaaacgatgatacttgtctgacctttatgcgtgctatttccgtgctgaaatgccttccgtttgaggtagttagcctgaaagacacggaaggattgccctggatcggtgatgaagtcaaaggtattatggaagaaatcatcgaggtcggtgaatcgctggaagtgcaggccgtgctcaatgatgagcgctatcaaagcttcaaactgtttaccagtgtctttggagtggggctgaagacagcagacaaatggtacgctatgggtttccgcacgctcaacgatgttcgttccagcaagaccctgaaattgaccaagatgcagaaagcgggtctgtgctattatgaagatcttgctgatggcgttacgaaagccgaagctgacgcggtatctctgctggttcaggatgcagtctggactttcgacccggatgcgctggtggagattacgggtggatttcgtcgtgggaaagagtttggtcacgacgttgatctgcttatcacatctccgggagctgagaaagaacaagaagaccagctcctgcagaaagtgaccaatctgtggaagaaacaagggttgttgctgtacggtgatctgatcgaaagtacctttgaagatctgaaactcccatcccgcaagattgatgccctggaccattttcagaaatgctttctgatcctcaaactttatcaccataaagaggacaaacgcaaatgggaaatgccgacgggttcgaacgaaagcgaggccaaaagttggaaagcaattcgcgtagatctggttgtttgtccctacgatcgttatgcgtttgcgttgttgggttggaccggaagccgcatgttcgaacgtgatctgcgccgctacgccacccacgagaagaagatgatgctggacaatcatgcgctgtatgacctgaccaagaaaatctttctcaaagctaaatcggaagaggaaattttcgcacatctggggcttgaatacctggaaccgtccgaacgtaacgca

SEQ ID NO: 110 - protein, 529 aa, synthetic construct
  REGION 1..529: note = Variant of terminal deoxynucleotidyltransferase
MHHHHHHGGSGMHRIRTIDSDFGKKRQKKMDNHISSMIYEIKFHEFVLFILEKKMGATRRTFLTDLARKKGFRVENELSDSVTHIVAENNSGSDVLAWLKTHKMEKTTQFELLDISWLIESMKVGKPVDTKGKYQLMESRVDSANPDPTAGTLNILPPTTKTISQYACQRRTTINNHNQRFTDALEILAENYEFKENDDTCLTFMRAISVLKCLPFEVVSLKDTEGLPWIGDEVKGIMEEIIEVGESLEVQAVLNDERYQSFKLFTSVFGVGLKTADKWYAMGFRTLNDVRSSKTLKLTKMQKAGLCYYEDLADGVTKAEADAVSLLVQDAVWTFDPDALVEITGGFRRGKEFGHDVDLLITSPGAEKEQEDQLLQKVTNLWKKQGLLLYGDLIESTFEDLKLPSRKIDALDHFQKCFLILKLYHHKEDKRKWEMPTGSNESEAKSWKAIRVDLVVCPYDRYAFALLGWTGSRMFERDLRRYATHEKKMMLDNHALYDLTKKIFLKAKSEEEIFAHLGLEYLEPSERNA

SEQ ID NO: 111 - DNA, 1587 bp, synthetic construct
  misc_feature 1..1587: note = Variant of terminal deoxynucleotidyltransferase
  source 1..1587: mol_type = other DNA
atgcaccatcatcatcatcatggcggtagcggcatgcaccgcattcgtaccatcgattcggacttcgggaagaaacgccagaagaagatggataaccacattagttccatgatctatgaaatcaaatttcacgagtttgtgctgttcattctcgaaaagaaaatgggtgcgacgcgtcgtacttttctgacagatttagcccgcaagaaagggttccgcgtcgagaatgaactgtcagacagcgttacccacatcgtggcagaaaataattcaggatctgacgtattggcttggctgaagacccacaagatggagaagacgacgcaatttgaactgctggatattagctggcttatcgaaagcatgaaagttggtaaaccggtggacaccaaggggaaataccagttgatggaatcgcgtgtcgatagtgcgaacccagatccgacagccggtaccctcaacattctgcctcctactacgaagaccatttctcagtatgcgtgtcaacgccgcaccaccatcaacaaccataatcagcgttttacggacgcactggcgattcttgcggaaaattacgagttcaaagaaaacgatgatacttgtctgacctttatgcgtgctatttccgtgctgaaatgccttccgtttgaggtagttagcctgaaagacacggaaggattgccctggatcggtgatgaagtcaaaggtattatggaagaaatcatcgaggtcggtgaatcgctggaagtgcaggccgtgctcaatgatgagcgctatcaaagcttcaaactgtttaccagtgtctttggagtggggctgaagacagcagacaaatggtaccgtatgggtttccgcacgctcaacgatgttcgttccagcaagaccctgaaattgaccaagatgcagaaagcgggtctgtgctattatgaagatcttgctgatggcgttacgaaagccgaagctgacgcggtatctctgctggttcaggatgcagtctggactttcgacccggatgcgctggtggagattacgggtggatttcgtcgtgggaaagagtttggtcacgacgttgatctgcttatcacatctccgggagctgagaaagaacaagaagaccagctcctgcagaaagtgaccaatctgtggaagaaacaagggttgttgctgtacggtgatctgatcgaaagtacctttgaagatctgaaactcccatcccgcaagattgatgccctggaccattttcagaaatgctttctgatcctcaaactttatcaccataaagaggacaaacgcaaatgggaaatgccgacgggttcgaacgaaagcgaggccaaaagttggaaagcaattcgcgtagatctggttgtttgtccctacgatcgttatgcgtttgcgttgttgggttggaccggaagccgcatgttcgaacgtgatctgcgccgctacgccacccacgagaagaagatgatgctggacaatcatgcgctgtatgacctgaccaagaaaatctttctcaaagctaaatcggaagaggaaattttcgcacatctggggcttgaatacctggaaccgtccgaacgtaacgca

SEQ ID NO: 112 - protein, 529 aa, synthetic construct
  REGION 1..529: note = Variant of terminal deoxynucleotidyltransferase
MHHHHHHGGSGMHRIRTIDSDFGKKRQKKMDNHISSMIYEIKFHEFVLFILEKKMGATRRTFLTDLARKKGFRVENELSDSVTHIVAENNSGSDVLAWLKTHKMEKTTQFELLDISWLIESMKVGKPVDTKGKYQLMESRVDSANPDPTAGTLNILPPTTKTISQYACQRRTTINNHNQRFTDALAILAENYEFKENDDTCLTFMRAISVLKCLPFEVVSLKDTEGLPWIGDEVKGIMEEIIEVGESLEVQAVLNDERYQSFKLFTSVFGVGLKTADKWYRMGFRTLNDVRSSKTLKLTKMQKAGLCYYEDLADGVTKAEADAVSLLVQDAVWTFDPDALVEITGGFRRGKEFGHDVDLLITSPGAEKEQEDQLLQKVTNLWKKQGLLLYGDLIESTFEDLKLPSRKIDALDHFQKCFLILKLYHHKEDKRKWEMPTGSNESEAKSWKAIRVDLVVCPYDRYAFALLGWTGSRMFERDLRRYATHEKKMMLDNHALYDLTKKIFLKAKSEEEIFAHLGLEYLEPSERNA

SEQ ID NO: 113 - DNA, 1587 bp, synthetic construct
  misc_feature 1..1587: note = Variant of terminal deoxynucleotidyltransferase
  source 1..1587: mol_type = other DNA
atgcaccatcatcatcatcatggcggtagcggcatgcaccgcattcgtaccatcgattcggacttcgggaagaaacgccagaagaagatggataaccacattagttccatgatctatgaaatcaaatttcacgagtttgtgctgttcattctcgaaaagaaaatgggtgcgacgcgtcgtacttttctgacagatttagcccgcaagaaagggttccgcgtcgagaatgaactgtcagacagcgttacccacatcgtggcagaaaataattcaggatctgacgtattggcttggctgaagacccacaagatggagaagacgacgcaatttgaactgctggatattagctggcttatcgaaagcatgaaagttggtaaaccggtggacaccaaggggaaataccagttgatggaatcgcgtgtcgatagtgcgaacccagatccgacagccggtaccctcaacattctgcctcctactacgaagaccatttctcagtatgcgtgtcaacgccgcaccaccatcaacaaccataatcagcgttttacggacgcactggaaattcttgcggaaaattacgagttcaaagaaaacgatgatacttgtctgacctttatgcgtgctatttccgtgctgaaatgccttccgtttgaggtagttagcctgaaagacacggaaggattgccctggatcggtgatgaagtcaaaggtattatggaagaaatcatcgaggtcggtgaatcgctggaagtgcaggccgtgctcaatgatgagcgctatcaaagcttcaaactgtttaccagtgtctttggagtggggctgaagacagcagacaaatggtaccgtatgggtttccgcacgctcaacgatgttcgttccagcaagaccctgaaattgaccaagatgcagaaagcgggtctgtgctattatgaagatcttgctgatggcgttacgaaagccgaagctgacgcggtatctctgctggttcaggatgcagtctggactttcgacccggatgcgctggtggagattacgggtggatttcgtcgtgggaaagagtttggtcacgacgttgatctgcttatcacatctccgggagctgagaaagaacaagaagaccagctcctgcagaaagtgaccaatctgtggaagaaacaagggttgttgctgtacggtgatctgatcgaaagtacctttgaagatctgaaactcccatcccgcaagattgatgcccgggaccattttcagaaatgctttctgatcctcaaactttatcaccataaagaggacaaacgcaaatgggaaatgccgacgggttcgaacgaaagcgaggccaaaagttggaaagcaattcgcgtagatctggttgtttgtccctacgatcgttatgcgtttgcgttgttgggttggaccggaagccgcatgttcgaacgtgatctgcgccgctacgccacccacgagaagaagatgatgctggacaatcatgcgctgtatgacctgaccaagaaaatctttctcaaagctaaatcggaagaggaaattttcgcacatctggggcttgaatacctggaaccgtccgaacgtaacgca

SEQ ID NO: 114 - protein, 529 aa, synthetic construct
  REGION 1..529: note = Variant of terminal deoxynucleotidyltransferase
MHHHHHHGGSGMHRIRTIDSDFGKKRQKKMDNHISSMIYEIKFHEFVLFILEKKMGATRRTFLTDLARKKGFRVENELSDSVTHIVAENNSGSDVLAWLKTHKMEKTTQFELLDISWLIESMKVGKPVDTKGKYQLMESRVDSANPDPTAGTLNILPPTTKTISQYACQRRTTINNHNQRFTDALEILAENYEFKENDDTCLTFMRAISVLKCLPFEVVSLKDTEGLPWIGDEVKGIMEEIIEVGESLEVQAVLNDERYQSFKLFTSVFGVGLKTADKWYRMGFRTLNDVRSSKTLKLTKMQKAGLCYYEDLADGVTKAEADAVSLLVQDAVWTFDPDALVEITGGFRRGKEFGHDVDLLITSPGAEKEQEDQLLQKVTNLWKKQGLLLYGDLIESTFEDLKLPSRKIDARDHFQKCFLILKLYHHKEDKRKWEMPTGSNESEAKSWKAIRVDLVVCPYDRYAFALLGWTGSRMFERDLRRYATHEKKMMLDNHALYDLTKKIFLKAKSEEEIFAHLGLEYLEPSERNA

SEQ ID NO: 115 - DNA, 1587 bp, synthetic construct
  misc_feature 1..1587: note = Variant of terminal deoxynucleotidyltransferase
  source 1..1587: mol_type = other DNA
atgcaccatcatcatcatcatggcggtagcggcatgcaccgcattcgtaccatcgattcggacttcgggaagaaacgccagaagaagatggataaccacattagttccatgatctatgaaatcaaatttcacgagtttgtgctgttcattctcgaaaagaaaatgggtgcgacgcgtcgtacttttctgacagatttagcccgcaagaaagggttccgcgtcgagaatgaactgtcagacagcgttacccacatcgtggcagaaaataattcaggatctgacgtattggcttggctgaagacccacaagatggagaagacgacgcaatttgaactgctggatattagctggcttatcgaaagcatgaaagttggtaaaccggtggacaccaaggggaaataccagttgatggaatcgcgtgtcgatagtgcgaacccagatccgacagccggtaccctcaacattctgcctcctactacgaagaccatttctcagtatgcgtgtcaacgccgcaccaccatcaacaaccataatcagcgttttacggacgcactggaaattcttgcggaaaattacgagttcaaagaaaacgatgatacttgtctgacctttatgcgtgctatttccgtgctgaaatgccttccgtttgaggtagttagcctgaaagacacggaaggattgccctggatcggtgatgaagtcaaaggtattatggaagaaatcatcgaggtcggtgaatcgctggaagtgcaggccgtgctcaatgatgagcgctatcaaagcttcaaactgtttaccagtgtctttggagtggggctgaagacagcagacaaatggtaccgtatgggtttccgcacgctcaacgatgttcgttccagcaagaccctgaaattgaccaagatgcagaaagcgggtctgtgctattatgaagatcttgctgatggcgttacgaaagccgaagctgacgcggtatctctgctggttcaggatgcagtctggactttcgacccggatgcgctggtggagattacgggtggatttcgtcgtgggaaagagtttggtcacgacgttgatctgcttatcacatctccgggagctgagaaagaacaagaagaccagctcctgcagaaagtgaccaatctgtggaagaaacaagggttgttgctgtacggtgatctgatcgaaagtacctttgaagatctgaaactcccatcccgcaagattgatgccctggaccattttcagaaaggttttctgatcctcaaactttatcaccataaagaggacaaacgcaaatgggaaatgccgacgggttcgaacgaaagcgaggccaaaagttggaaagcaattcgcgtagatctggttgtttgtccctacgatcgttatgcgtttgcgttgttgggttggaccggaagccgcatgttcgaacgtgatctgcgccgctacgccacccacgagaagaagatgatgctggacaatcatgcgctgtatgacctgaccaagaaaatctttctcaaagctaaatcggaagaggaaattttcgcacatctggggcttgaatacctggaaccgtccgaacgtaacgca

SEQ ID NO: 116 - protein, 529 aa, synthetic construct
  REGION 1..529: note = Variant of terminal deoxynucleotidyltransferase
MHHHHHHGGSGMHRIRTIDSDFGKKRQKKMDNHISSMIYEIKFHEFVLFILEKKMGATRRTFLTDLARKKGFRVENELSDSVTHIVAENNSGSDVLAWLKTHKMEKTTQFELLDISWLIESMKVGKPVDTKGKYQLMESRVDSANPDPTAGTLNILPPTTKTISQYACQRRTTINNHNQRFTDALEILAENYEFKENDDTCLTFMRAISVLKCLPFEVVSLKDTEGLPWIGDEVKGIMEEIIEVGESLEVQAVLNDERYQSFKLFTSVFGVGLKTADKWYRMGFRTLNDVRSSKTLKLTKMQKAGLCYYEDLADGVTKAEADAVSLLVQDAVWTFDPDALVEITGGFRRGKEFGHDVDLLITSPGAEKEQEDQLLQKVTNLWKKQGLLLYGDLIESTFEDLKLPSRKIDALDHFQKGFLILKLYHHKEDKRKWEMPTGSNESEAKSWKAIRVDLVVCPYDRYAFALLGWTGSRMFERDLRRYATHEKKMMLDNHALYDLTKKIFLKAKSEEEIFAHLGLEYLEPSERNA

SEQ ID NO: 117 - DNA, 1587 bp, synthetic construct
  misc_feature 1..1587: note = Variant of terminal deoxynucleotidyltransferase
  source 1..1587: mol_type = other DNA
atgcaccatcatcatcatcatggcggtagcggcatgcaccgcattcgtaccatcgattcggacttcgggaagaaacgccagaagaagatggataaccacattagttccatgatctatgaaatcaaatttcacgagtttgtgctgttcattctcgaaaagaaaatgggtgcgacgcgtcgtacttttctgacagatttagcccgcaagaaagggttccgcgtcgagaatgaactgtcagacagcgttacccacatcgtggcagaaaataattcaggatctgacgtattggcttggctgaagacccacaagatggagaagacgacgcaatttgaactgctggatattagctggcttatcgaaagcatgaaagttggtaaaccggtggacaccaaggggaaataccagttgatggaatcgcgtgtcgatagtgcgaacccagatccgacagccggtaccctcaacattctgcctcctactacgaagaccatttctcagtatgcgtgtcaacgccgcaccaccatcaacaaccataatcagcgttttacggacgcactggaaattcttgcggaaaattacgagttcaaagaaaacgatgatacttgtctgacctttatgcgtgctatttccgtgctgaaatgccttccgtttgaggtagttagcctgaaagacacggaaggattgccctggatcggtgatgaagtcaaaggtattatggaagaaatcatcgaggtcggtgaatcgctggaagtgcaggccgtgctcaatgatgagcgctatcaaagcttcaaactgtttaccagtgtctttggagtggggctgaagacagcagacaaatggtaccgtatgggtttccgcacgctcaacgatgttcgttccagcaagaccctgaaattgaccaagatgcagaaagcgggtctgtgctattatgaagatcttgctgatggcgttacgaaagccgaagctgacgcggtatctctgctggttcaggatgcagtctggactttcgacccggatgcgctggtggagattacgggtggatttcgtcgtgggaaagagtttggtcacgacgttgatctggtgatcacatctccgggagctgagaaagaacaagaagaccagctcctgcagaaagtgaccaatctgtggaagaaacaagggttgttgctgtacggtgatctgatcgaaagtacctttgaagatctgaaactcccatcccgcaagattgatgccctggaccattttcagaaatgctttctgatcctcaaactttatcaccataaagaggacaaacgcaaatgggaaatgccgacgggttcgaacgaaagcgaggccaaaagttggaaagcaattcgcgtagatctggttgtttgtccctacgatcgttatgcgtttgcgttgttgggttggaccggaagccgcatgttcgaacgtgatctgcgccgctacgccacccacgagaagaagatgatgctggacaatcatgcgctgtatgacctgaccaagaaaatctttctcaaagctaaatcggaagaggaaattttcgcacatctggggcttgaatacctggaaccgtccgaacgtaacgca

SEQ ID NO: 118 - protein, 529 aa, synthetic construct
  REGION 1..529: note = Variant of terminal deoxynucleotidyltransferase
MHHHHHHGGSGMHRIRTIDSDFGKKRQKKMDNHISSMIYEIKFHEFVLFILEKKMGATRRTFLTDLARKKGFRVENELSDSVTHIVAENNSGSDVLAWLKTHKMEKTTQFELLDISWLIESMKVGKPVDTKGKYQLMESRVDSANPDPTAGTLNILPPTTKTISQYACQRRTTINNHNQRFTDALEILAENYEFKENDDTCLTFMRAISVLKCLPFEVVSLKDTEGLPWIGDEVKGIMEEIIEVGESLEVQAVLNDERYQSFKLFTSVFGVGLKTADKWYRMGFRTLNDVRSSKTLKLTKMQKAGLCYYEDLADGVTKAEADAVSLLVQDAVWTFDPDALVEITGGFRRGKEFGHDVDLVITSPGAEKEQEDQLLQKVTNLWKKQGLLLYGDLIESTFEDLKLPSRKIDALDHFQKCFLILKLYHHKEDKRKWEMPTGSNESEAKSWKAIRVDLVVCPYDRYAFALLGWTGSRMFERDLRRYATHEKKMMLDNHALYDLTKKIFLKAKSEEEIFAHLGLEYLEPSERNA

SEQ ID NO: 119 - DNA, 1587 bp, synthetic construct
  misc_feature 1..1587: note = Variant of terminal deoxynucleotidyltransferase
  source 1..1587: mol_type = other DNA
atgcaccatcatcatcatcatggcggtagcggcatgcaccgcattcgtaccatcgattcggacttcgggaagaaacgccagaagaagatggataaccacattagttccatgatctatgaaatcaaatttcacgagtttgtgctgttcattctcgaaaagaaaatgggtgcgacgcgtcgtacttttctgacagatttagcccgcaagaaagggttccgcgtcgagaatgaactgtcagacagcgttacccacatcgtggcagaaaataattcaggatctgacgtattggcttggctgaagacccacaagatggagaagacgacgcaatttgaactgctggatattagctggcttatcgaaagcatgaaagttggtaaaccggtggacaccaaggggaaataccagttgatggaatcgcgtgtcgatagtgcgaacccagatccgacagccggtaccctcaacattctgcctcctactacgaagaccatttctcagtatgcgtgtcaacgccgcaccaccatcaacaaccataatcagcgttttacggacgcactggaaattcttgcggaaaattacgagttcaaagaaaacgatgatacttgtctgacctttatgcgtgctatttccgtgctgaaatgccttccgtttgaggtagttagcctgaaagacacggaaggattgccctggatcggtgatgaagtcaaaggtattatggaagaaatcatcgaggtcggtgaatcgctggaagtgcaggccgtgctcaatgatgagcgctatcaaagcttcaaactgtttaccagtgtctttggagtggggctgaagacagcagacaaatggtaccgtatgggtttccgcacgctcaacgatgttcgttccagcaagaccctgaaattgaccaagatgcagatggcgggtctgtgctattatgaagatcttgctgatggcgttacgaaagccgaagctgacgcggtatctctgctggttcaggatgcagtctggactttcgacccggatgcgctggtggagattacgggtggatttcgtcgtgggaaagagtttggtcacgacgttgatctgcttatcacatctccgggagctgagaaagaacaagaagaccagctcctgcagaaagtgaccaatctgtggaagaaacaagggttgttgctgtacggtgatctgatcgaaagtacctttgaagatctgaaactcccatcccgcaagattgatgccctggaccattttcagaaatgctttctgatcctcaaactttatcaccataaagaggacaaacgcaaatgggaaatgccgacgggttcgaacgaaagcgaggccaaaagttggaaagcaattcgcgtagatctggttgtttgtccctacgatcgttatgcgtttgcgttgttgggttggaccggaagccgcatgttcgaacgtgatctgcgccgctacgccacccacgagaagaagatgatgctggacaatcatgcgctgtatgacctgaccaagaaaatctttctcaaagctaaatcggaagaggaaattttcgcacatctggggcttgaatacctggaaccgtccgaacgtaacgca

SEQ ID NO: 120 - protein, 529 aa, synthetic construct
  REGION 1..529: note = Variant of terminal deoxynucleotidyltransferase
MHHHHHHGGSGMHRIRTIDSDFGKKRQKKMDNHISSMIYEIKFHEFVLFILEKKMGATRRTFLTDLARKKGFRVENELSDSVTHIVAENNSGSDVLAWLKTHKMEKTTQFELLDISWLIESMKVGKPVDTKGKYQLMESRVDSANPDPTAGTLNILPPTTKTISQYACQRRTTINNHNQRFTDALEILAENYEFKENDDTCLTFMRAISVLKCLPFEVVSLKDTEGLPWIGDEVKGIMEEIIEVGESLEVQAVLNDERYQSFKLFTSVFGVGLKTADKWYRMGFRTLNDVRSSKTLKLTKMQMAGLCYYEDLADGVTKAEADAVSLLVQDAVWTFDPDALVEITGGFRRGKEFGHDVDLLITSPGAEKEQEDQLLQKVTNLWKKQGLLLYGDLIESTFEDLKLPSRKIDALDHFQKCFLILKLYHHKEDKRKWEMPTGSNESEAKSWKAIRVDLVVCPYDRYAFALLGWTGSRMFERDLRRYATHEKKMMLDNHALYDLTKKIFLKAKSEEEIFAHLGLEYLEPSERNA

SEQ ID NO: 121 - DNA, 1587 bp, synthetic construct
  misc_feature 1..1587: note = Variant of terminal deoxynucleotidyltransferase
  source 1..1587: mol_type = other DNA
atgcaccatcatcatcatcatggcggtagcggcatgcaccgcattcgtaccatcgattcggacttcgggaagaaacgccagaagaagatggataaccacattagttccatgatctatgaaatcaaatttcacgagtttgtgctgttcattctcgaaaagaaaatgggtgcgacgcgtcgtacttttctgacagatttagcccgcaagaaagggttccgcgtcgagaatgaactgtcagacagcgttacccacatcgtggcagaaaataattcaggatctgacgtattggcttggctgaagacccacaagatggagaagacgacgcaatttgaactgctggatattagctggcttatcgaaagcatgaaagttggtaaaccggtggacaccaaggggaaataccagttgatggaatcgcgtgtcgatagtgcgaacccagatccgacagccggtaccctcaacattctgcctcctactacgaagaccatttctcagtatgcgtgtcaacgccgcaccaccatcaacaaccataatcagcgttttacggacgcactggaaattcttgcggaaaattacgagttcaaagaaaacgatgatacttgtctgacctttatgcgtgctatttccgtgctgaaatgccttccgtttgaggtagttagcctgaaagacacggaaggattgccctggatcggtgatgaagtcaaaggtattatggaagaaatcatcgaggtcggtgaatcgctggaagtgcaggccgtgctcaatgatgagcgctatcaaagcttcaaactgtttaccagtgtctttggagtggggctgaagacagcagacaaatggtaccgtatgggtttccgcacgctcaacgatgttcgttccagcaagaccctgaaattgaccaagatgcagaaagcgggtctgtgctattatgaagatcttgctgatggcattacgaaagccgaagctgacgcggtatctctgctggttcaggatgcagtctggactttcgacccggatgcgctggtggagattacgggtggatttcgtcgtgggaaagagtttggtcacgacgttgatctgcttatcacatctccgggagctgagaaagaacaagaagaccagctcctgcagaaagtgaccaatctgtggaagaaacaagggttgttgctgtacggtgatctgatcgaaagtacctttgaagatctgaaactcccatcccgcaagattgatgccctggaccattttcagaaatgctttctgatcctcaaactttatcaccataaagaggacaaacgcaaatgggaaatgccgacgggttcgaacgaaagcgaggccaaaagttggaaagcaattcgcgtagatctggttgtttgtccctacgatcgttatgcgtttgcgttgttgggttggaccggaagccgcatgttcgaacgtgatctgcgccgctacgccacccacgagaagaagatgatgctggacaatcatgcgctgtatgacctgaccaagaaaatctttctcaaagctaaatcggaagaggaaattttcgcacatctggggcttgaatacctggaaccgtccgaacgtaacgca

SEQ ID NO: 122 - protein, 529 aa, synthetic construct
  REGION 1..529: note = Variant of terminal deoxynucleotidyltransferase
MHHHHHHGGSGMHRIRTIDSDFGKKRQKKMDNHISSMIYEIKFHEFVLFILEKKMGATRRTFLTDLARKKGFRVENELSDSVTHIVAENNSGSDVLAWLKTHKMEKTTQFELLDISWLIESMKVGKPVDTKGKYQLMESRVDSANPDPTAGTLNILPPTTKTISQYACQRRTTINNHNQRFTDALEILAENYEFKENDDTCLTFMRAISVLKCLPFEVVSLKDTEGLPWIGDEVKGIMEEIIEVGESLEVQAVLNDERYQSFKLFTSVFGVGLKTADKWYRMGFRTLNDVRSSKTLKLTKMQKAGLCYYEDLADGITKAEADAVSLLVQDAVWTFDPDALVEITGGFRRGKEFGHDVDLLITSPGAEKEQEDQLLQKVTNLWKKQGLLLYGDLIESTFEDLKLPSRKIDALDHFQKCFLILKLYHHKEDKRKWEMPTGSNESEAKSWKAIRVDLVVCPYDRYAFALLGWTGSRMFERDLRRYATHEKKMMLDNHALYDLTKKIFLKAKSEEEIFAHLGLEYLEPSERNA

SEQ ID NO: 123 - DNA, 1587 bp, synthetic construct
  misc_feature 1..1587: note = Variant of terminal deoxynucleotidyltransferase
  source 1..1587: mol_type = other DNA
atgcaccatcatcatcatcatggcggtagcggcatgcaccgcattcgtaccatcgattcggacttcgggaagaaacgccagaagaagatggataaccacattagttccatgatctatgaaatcaaatttcacgagtttgtgctgttcattctcgaaaagaaaatgggtgcgacgcgtcgtacttttctgacagatttagcccgcaagaaagggttccgcgtcgagaatgaactgtcagacagcgttacccacatcgtggcagaaaataattcaggatctgacgtattggcttggctgaagacccacaagatggagaagacgacgcaatttgaactgctggatattagctggcttatcgaaagcatgaaagttggtaaaccggtggacaccaaggggaaataccagttgatggaatcgcgtgtcgatagtgcgaacccagatccgacagccggtaccctcaacattctgcctcctactacgaagaccatttctcagtatgcgtgtcaacgccgcaccaccatcaacaaccataatcagcgttttacggacgcactggaaattcttgcggaaaattacgagttcaaagaaaacgatgatacttgtctgacctttatgcgtgctatttccgtgctgaaatgccttccgtttgaggtagttagcctgaaagacacggaaggattgccctggatcggtgatgaagtcaaaggtattatggaagaaatcatcgaggtcggtgaatcgctggaagtgcaggccgtgctcaatgatgagcgctatcaaagcttcaaactgtttaccagtgtctttggagtggggctgaagacagcagacaaatggtaccgtatgggtttccgcacgctcaacgatgttcgttccagcaagaccctgcagttgaccaagatgcagaaagcgggtctgtgctattatgaagatcttgctgatggcgttacgaaagccgaagctgacgcggtatctctgctggttcaggatgcagtctggactttcgacccggatgcgctggtggagattacgggtggatttcgtcgtgggaaagagtttggtcacgacgttgatctgcttatcacatctccgggagctgagaaagaacaagaagaccagctcctgcagaaagtgaccaatctgtggaagaaacaagggttgttgctgtacggtgatctgatcgaaagtacctttgaagatctgaaactcccatcccgcaagattgatgccctggaccattttcagaaatgctttctgatcctcaaactttatcaccataaagaggacaaacgcaaatgggaaatgccgacgggttcgaacgaaagcgaggccaaaagttggaaagcaattcgcgtagatctggttgtttgtccctacgatcgttatgcgtttgcgttgttgggttggaccggaagccgcatgttcgaacgtgatctgcgccgctacgccacccacgagaagaagatgatgctggacaatcatgcgctgtatgacctgaccaagaaaatctttctcaaagctaaatcggaagaggaaattttcgcacatctggggcttgaatacctggaaccgtccgaacgtaacgca

SEQ ID NO: 124 - protein, 529 aa, synthetic construct
  REGION 1..529: note = Variant of terminal deoxynucleotidyltransferase
MHHHHHHGGSGMHRIRTIDSDFGKKRQKKMDNHISSMIYEIKFHEFVLFILEKKMGATRRTFLTDLARKKGFRVENELSDSVTHIVAENNSGSDVLAWLKTHKMEKTTQFELLDISWLIESMKVGKPVDTKGKYQLMESRVDSANPDPTAGTLNILPPTTKTISQYACQRRTTINNHNQRFTDALEILAENYEFKENDDTCLTFMRAISVLKCLPFEVVSLKDTEGLPWIGDEVKGIMEEIIEVGESLEVQAVLNDERYQSFKLFTSVFGVGLKTADKWYRMGFRTLNDVRSSKTLQLTKMQKAGLCYYEDLADGVTKAEADAVSLLVQDAVWTFDPDALVEITGGFRRGKEFGHDVDLLITSPGAEKEQEDQLLQKVTNLWKKQGLLLYGDLIESTFEDLKLPSRKIDALDHFQKCFLILKLYHHKEDKRKWEMPTGSNESEAKSWKAIRVDLVVCPYDRYAFALLGWTGSRMFERDLRRYATHEKKMMLDNHALYDLTKKIFLKAKSEEEIFAHLGLEYLEPSERNA

SEQ ID NO: 125 - DNA, 1587 bp, synthetic construct
  misc_feature 1..1587: note = Variant of terminal deoxynucleotidyltransferase
  source 1..1587: mol_type = other DNA
atgcaccatcatcatcatcatggcggtagcggcatgcaccgcattcgtaccatcgattcggacttcgggaagaaacgccagaagaagatggataaccacattagttccatgatctatgaaatcaaatttcacgagtttgtgctgttcattctcgaaaagaaaatgggtgcgacgcgtcgtacttttctgacagatttagcccgcaagaaagggttccgcgtcgagaatgaactgtcagacagcgttacccacatcgtggcagaaaataattcaggatctgacgtattggcttggctgaagacccacaagatggagaagacgacgcaatttgaactgctggatattagctggcttatcgaaagcatgaaagttggtaaaccggtggacaccaaggggaaataccagttgatggaatcgcgtgtcgatagtgcgaacccagatccgacagccggtaccctcaacattctgcctcctactacgaagaccatttctcagtatgcgtgtcaacgccgcaccaccatcaacaaccataatcagcgttttacggacgcactggaaattcttgcggaaaattacgagttccgggaaaacgatgatacttgtctgacctttatgcgtgctatttccgtgctgaaatgccttccgtttgaggtagttagcctgaaagacacggaaggattgccctggatcggtgatgaagtcaaaggtattatggaagaaatcatcgaggtcggtgaatcgctggaagtgcaggccgtgctcaatgatgagcgctatcaaagcttcaaactgtttaccagtgtctttggagtggggctgaagacagcagacaaatggtaccgtatgggtttccgcacgctcaacgatgttcgttccagcaagaccctgaaattgaccaagatgcagaaagcgggtctgtgctattatgaagatcttgctgatggcgttacgaaagccgaagctgacgcggtatctctgctggttcaggatgcagtctggactttcgacccggatgcgctggtggagattacgggtggatttcgtcgtgggaaagagtttggtcacgacgttgatctgcttatcacatctccgggagctgagaaagaacaagaagaccagctcctgcagaaagtgaccaatctgtggaagaaacaagggttgttgctgtacggtgatctgatcgaaagtacctttgaagatctgaaactcccatcccgcaagattgatgccctggaccattttcagaaatgctttctgatcctcaaactttatcaccataaagaggacaaacgcaaatgggaaatgccgacgggttcgaacgaaagcgaggccaaaagttggaaagcaattcgcgtagatctggttgtttgtccctacgatcgttatgcgtttgcgttgttgggttggaccggaagccgcatgttcgaacgtgatctgcgccgctacgccacccacgagaagaagatgatgctggacaatcatgcgctgtatgacctgaccaagaaaatctttctcaaagctaaatcggaagaggaaattttcgcacatctggggcttgaatacctggaaccgtccgaacgtaacgca

SEQ ID NO: 126 - protein, 529 aa, synthetic construct
  REGION 1..529: note = Variant of terminal deoxynucleotidyltransferase
MHHHHHHGGSGMHRIRTIDSDFGKKRQKKMDNHISSMIYEIKFHEFVLFILEKKMGATRRTFLTDLARKKGFRVENELSDSVTHIVAENNSGSDVLAWLKTHKMEKTTQFELLDISWLIESMKVGKPVDTKGKYQLMESRVDSANPDPTAGTLNILPPTTKTISQYACQRRTTINNHNQRFTDALEILAENYEFRENDDTCLTFMRAISVLKCLPFEVVSLKDTEGLPWIGDEVKGIMEEIIEVGESLEVQAVLNDERYQSFKLFTSVFGVGLKTADKWYRMGFRTLNDVRSSKTLKLTKMQKAGLCYYEDLADGVTKAEADAVSLLVQDAVWTFDPDALVEITGGFRRGKEFGHDVDLLITSPGAEKEQEDQLLQKVTNLWKKQGLLLYGDLIESTFEDLKLPSRKIDALDHFQKCFLILKLYHHKEDKRKWEMPTGSNESEAKSWKAIRVDLVVCPYDRYAFALLGWTGSRMFERDLRRYATHEKKMMLDNHALYDLTKKIFLKAKSEEEIFAHLGLEYLEPSERNA

SEQ ID NO: 127 - DNA, 1587 bp, synthetic construct
  misc_feature 1..1587: note = Variant of terminal deoxynucleotidyltransferase
  source 1..1587: mol_type = other DNA
atgcaccatcatcatcatcatggcggtagcggcatgcaccgcattcgtaccatcgattcggacttcgggaagaaacgccagaagaagatggataaccacattagttccatgatctatgaaatcaaatttcacgagtttgtgctgttcattctcgaaaagaaaatgggtgcgacgcgtcgtacttttctgacagatttagcccgcaagaaagggttccgcgtcgagaatgaactgtcagacagcgttacccacatcgtggcagaaaataattcaggatctgacgtattggcttggctgaagacccacaagatggagaagacgacgcaatttgaactgctggatattagctggcttatcgaaagcatgaaagttggtaaaccggtggacaccaaggggaaataccagttgatggaatcgcgtgtcgatagtgcgaacccagatccgacagccggtaccctcaacattctgcctcctactacgaagaccatttctcagtatgcgtgtcaacgccgcaccaccatcaacaaccataatcagcgttttacggacgcactggaaattcttgcggaaaattacgagttcaaagaaaacgatgatacttgtctgacctttatgcgtgctatttccgtgctgaaatgccttccgtttgaggtagttagcctgaaagacacggaaggattgccctggatcggtgatgaagtcaaaggtattatggaagaaatcatcgaggtcggtgaatcgctggaagtgcaggccgtgctcaatgatgagcgctatcaaagcttcaaactgtttaccagtgtctttggagtggggctgaagacagcagacaaatggtaccgtatgggtttccgcacgctcaacgatgttcgttccagcaagaccctgaaattgaccaagatgcagaaagcgggtctgtgctattatgaagatcttgctgatggcgttacgaaagccgaagctgacgcggtatctctgctggttcaggatgcagtctggactttcgacccggatgcgctggtggagattacgggtggatttcgtcgtgggaaagagtttggtcacgacgttgatctgtgtatcacatctccgggagctgagaaagaacaagaagaccagctcctgcagaaagtgaccaatctgtggaagaaacaagggttgttgctgtacggtgatctgatcgaaagtacctttgaagatctgaaactcccatcccgcaagattgatgccctggaccattttcagaaatgctttctgatcctcaaactttatcaccataaagaggacaaacgcaaatgggaaatgccgacgggttcgaacgaaagcgaggccaaaagttggaaagcaattcgcgtagatctggttgtttgtccctacgatcgttatgcgtttgcgttgttgggttggaccggaagccgcatgttcgaacgtgatctgcgccgctacgccacccacgagaagaagatgatgctggacaatcatgcgctgtatgacctgaccaagaaaatctttctcaaagctaaatcggaagaggaaattttcgcacatctggggcttgaatacctggaaccgtccgaacgtaacgca

SEQ ID NO: 128 - protein, 529 aa, synthetic construct
  REGION 1..529: note = Variant of terminal deoxynucleotidyltransferase
MHHHHHHGGSGMHRIRTIDSDFGKKRQKKMDNHISSMIYEIKFHEFVLFILEKKMGATRRTFLTDLARKKGFRVENELSDSVTHIVAENNSGSDVLAWLKTHKMEKTTQFELLDISWLIESMKVGKPVDTKGKYQLMESRVDSANPDPTAGTLNILPPTTKTISQYACQRRTTINNHNQRFTDALEILAENYEFKENDDTCLTFMRAISVLKCLPFEVVSLKDTEGLPWIGDEVKGIMEEIIEVGESLEVQAVLNDERYQSFKLFTSVFGVGLKTADKWYRMGFRTLNDVRSSKTLKLTKMQKAGLCYYEDLADGVTKAEADAVSLLVQDAVWTFDPDALVEITGGFRRGKEFGHDVDLCITSPGAEKEQEDQLLQKVTNLWKKQGLLLYGDLIESTFEDLKLPSRKIDALDHFQKCFLILKLYHHKEDKRKWEMPTGSNESEAKSWKAIRVDLVVCPYDRYAFALLGWTGSRMFERDLRRYATHEKKMMLDNHALYDLTKKIFLKAKSEEEIFAHLGLEYLEPSERNA

SEQ ID NO: 129 - DNA, 1587 bp, synthetic construct
  misc_feature 1..1587: note = Variant of terminal deoxynucleotidyltransferase
  source 1..1587: mol_type = other DNA
atgcaccatcatcatcatcatggcggtagcggcatgcaccgcattcgtaccatcgattcggacttcgggaagaaacgccagaagaagatggataaccacattagttccatgatctatgaaatcaaatttcacgagtttgtgctgttcattctcgaaaagaaaatgggtgcgacgcgtcgtacttttctgacagatttagcccgcaagaaagggttccgcgtcgagaatgaactgtcagacagcgttacccacatcgtggcagaaaataattcaggatctgacgtattggcttggctgaagacccacaagatggagaagacgacgcaatttgaactgctggatattagctggcttatcgaaagcatgaaagttggtaaaccggtggacaccaaggggaaataccagttgatggaatcgcgtgtcgatagtgcgaacccagatccgacagccggtaccctcaacattctgcctcctactacgaagaccatttctcagtatgcgtgtcaacgccgcaccaccatcaacaaccataatcagcgttttacggacgcactggaaattcttgcggaaaattacgagttcaaagaaaacgatgatacttgtctgacctttatgcgtgctatttccgtgctgaaatgccttccgtttgaggtagttagcctgaaagacacggaaggattgccctggatcggtgatgaagtcaaaggtattatggaagaaatcatcgaggtcggtgaatcgctggaagtgcaggccgtgctcaatgatgagcgctatcaaagcttcaaactgtttaccagtgtctttggagtggggctgaagacagcagacaaatggtaccgtatgggtttccgcacgctcaacgatgttcgttccagcaagaccctgaaattgaccaagatgcagaaagcgggtctgtgctattatgaagatcttgctgatggcgttacgtcggccgaagctgacgcggtatctctgctggttcaggatgcagtctggactttcgacccggatgcgctggtggagattacgggtggatttcgtcgtgggaaagagtttggtcacgacgttgatctgcttatcacatctccgggagctgagaaagaacaagaagaccagctcctgcagaaagtgaccaatctgtggaagaaacaagggttgttgctgtacggtgatctgatcgaaagtacctttgaagatctgaaactcccatcccgcaagattgatgccctggaccattttcagaaatgctttctgatcctcaaactttatcaccataaagaggacaaacgcaaatgggaaatgccgacgggttcgaacgaaagcgaggccaaaagttggaaagcaattcgcgtagatctggttgtttgtccctacgatcgttatgcgtttgcgttgttgggttggaccggaagccgcatgttcgaacgtgatctgcgccgctacgccacccacgagaagaagatgatgctggacaatcatgcgctgtatgacctgaccaagaaaatctttctcaaagctaaatcggaagaggaaattttcgcacatctggggcttgaatacctggaaccgtccgaacgtaacgca

SEQ ID NO: 130 - protein, 529 aa, synthetic construct
  REGION 1..529: note = Variant of terminal deoxynucleotidyltransferase
MHHHHHHGGSGMHRIRTIDSDFGKKRQKKMDNHISSMIYEIKFHEFVLFILEKKMGATRRTFLTDLARKKGFRVENELSDSVTHIVAENNSGSDVLAWLKTHKMEKTTQFELLDISWLIESMKVGKPVDTKGKYQLMESRVDSANPDPTAGTLNILPPTTKTISQYACQRRTTINNHNQRFTDALEILAENYEFKENDDTCLTFMRAISVLKCLPFEVVSLKDTEGLPWIGDEVKGIMEEIIEVGESLEVQAVLNDERYQSFKLFTSVFGVGLKTADKWYRMGFRTLNDVRSSKTLKLTKMQKAGLCYYEDLADGVTSAEADAVSLLVQDAVWTFDPDALVEITGGFRRGKEFGHDVDLLITSPGAEKEQEDQLLQKVTNLWKKQGLLLYGDLIESTFEDLKLPSRKIDALDHFQKCFLILKLYHHKEDKRKWEMPTGSNESEAKSWKAIRVDLVVCPYDRYAFALLGWTGSRMFERDLRRYATHEKKMMLDNHALYDLTKKIFLKAKSEEEIFAHLGLEYLEPSERNA

SEQ ID NO: 131 - DNA, 1587 bp, synthetic construct
  misc_feature 1..1587: note = Variant of terminal deoxynucleotidyltransferase
  source 1..1587: mol_type = other DNA
atgcaccatcatcatcatcatggcggtagcggcatgcaccgcattcgtaccatcgattcggacttcgggaagaaacgccagaagaagatggataaccacattagttccatgatctatgaaatcaaatttcacgagtttgtgctgttcattctcgaaaagaaaatgggtgcgacgcgtcgtacttttctgacagatttagcccgcaagaaagggttccgcgtcgagaatgaactgtcagacagcgttacccacatcgtggcagaaaataattcaggatctgacgtattggcttggctgaagacccacaagatggagaagacgacgcaatttgaactgctggatattagctggcttatcgaaagcatgaaagttggtaaaccggtggacaccaaggggaaataccagttgatggaatcgcgtgtcgatagtgcgaacccagatccgacagccggtaccctcaacattctgcctcctactacgaagaccatttctcagtatgcgtgtcaacgccgcaccaccatcaacaaccataatcagcgttttacgagggcactggaaattcttgcggaaaattacgagttcaaagaaaacgatgatacttgtctgacctttatgcgtgctatttccgtgctgaaatgccttccgtttgaggtagttagcctgaaagacacggaaggattgccctggatcggtgatgaagtcaaaggtattatggaagaaatcatcgaggtcggtgaatcgctggaagtgcaggccgtgctcaatgatgagcgctatcaaagcttcaaactgtttaccagtgtctttggagtggggctgaagacagcagacaaatggtaccgtatgggtttccgcacgctcaacgatgttcgttccagcaagaccctgaaattgaccaagatgcagaaagcgggtctgtgctattatgaagatcttgctgatggcgttacgaaagccgaagctgacgcggtatctctgctggttcaggatgcagtctggactttcgacccggatgcgctggtggagattacgggtggatttcgtcgtgggaaagagtttggtcacgacgttgatctgcttatcacatctccgggagctgagaaagaacaagaagaccagctcctgcagaaagtgaccaatctgtggaagaaacaagggttgttgctgtacggtgatctgatcgaaagtacctttgaagatctgaaactcccatcccgcaagattgatgccctggaccattttcagaaatgctttctgatcctcaaactttatcaccataaagaggacaaacgcaaatgggaaatgccgacgggttcgaacgaaagcgaggccaaaagttggaaagcaattcgcgtagatctggttgtttgtccctacgatcgttatgcgtttgcgttgttgggttggaccggaagccgcatgttcgaacgtgatctgcgccgctacgccacccacgagaagaagatgatgctggacaatcatgcgctgtatgacctgaccaagaaaatctttctcaaagctaaatcggaagaggaaattttcgcacatctggggcttgaatacctggaaccgtccgaacgtaacgca

SEQ ID NO: 132 - protein, 529 aa, synthetic construct
  REGION 1..529: note = Variant of terminal deoxynucleotidyltransferase
MHHHHHHGGSGMHRIRTIDSDFGKKRQKKMDNHISSMIYEIKFHEFVLFILEKKMGATRRTFLTDLARKKGFRVENELSDSVTHIVAENNSGSDVLAWLKTHKMEKTTQFELLDISWLIESMKVGKPVDTKGKYQLMESRVDSANPDPTAGTLNILPPTTKTISQYACQRRTTINNHNQRFTRALEILAENYEFKENDDTCLTFMRAISVLKCLPFEVVSLKDTEGLPWIGDEVKGIMEEIIEVGESLEVQAVLNDERYQSFKLFTSVFGVGLKTADKWYRMGFRTLNDVRSSKTLKLTKMQKAGLCYYEDLADGVTKAEADAVSLLVQDAVWTFDPDALVEITGGFRRGKEFGHDVDLLITSPGAEKEQEDQLLQKVTNLWKKQGLLLYGDLIESTFEDLKLPSRKIDALDHFQKCFLILKLYHHKEDKRKWEMPTGSNESEAKSWKAIRVDLVVCPYDRYAFALLGWTGSRMFERDLRRYATHEKKMMLDNHALYDLTKKIFLKAKSEEEIFAHLGLEYLEPSERNA

SEQ ID NO: 133 - DNA, 1587 bp, synthetic construct
  misc_feature 1..1587: note = Variant of terminal deoxynucleotidyltransferase
  source 1..1587: mol_type = other DNA
atgcaccatcatcatcatcatggcggtagcggcatgcaccgcattcgtaccatcgattcggacttcgggaagaaacgccagaagaagatggataaccacattagttccatgatctatgaaatcaaatttcacgagtttgtgctgttcattctcgaaaagaaaatgggtgcgacgcgtcgtacttttctgacagatttagcccgcaagaaagggttccgcgtcgagaatgaactgtcagacagcgttacccacatcgtggcagaaaataattcaggatctgacgtattggcttggctgaagacccacaagatggagaagacgacgcaatttgaactgctggatattagctggcttatcgaaagcatgaaagttggtaaaccggtggacaccaaggggaaataccagttgatggaatcgcgtgtcgatagtgcgaacccagatccgacagccggtaccctcaacattctgcctcctactacgaagaccatttctcagtatgcgtgtcaacgccgcaccaccatcaacaaccataatcagcgttttacggacgcactggaaattcttgcggaaaattacgagttcaaagaaaacgatgatacttgtctgacctttatgcgtgctatttccgtgctgaaatgccttccgtttgaggtagttagcctgaaagacacggaaggattgccctggatcggtgatgaagtcaaaggtattatggaagaaatcatcgaggtcggtgaatcgctggaagtgcaggccgtgctcaatgatgagcgctatcaaagcttcaaactgtttaccagtgtctttggagtggggctgaagacagcagacaaatggtaccgtcggggtttccgcacgctcaacgatgttcgttccagcaagaccctgaaattgaccaagatgcagaaagcgggtctgtgctattatgaagatcttgctgatggcgttacgaaagccgaagctgacgcggtatctctgctggttcaggatgcagtctggactttcgacccggatgcgctggtggagattacgggtggatttcgtcgtgggaaagagtttggtcacgacgttgatctgcttatcacatctccgggagctgagaaagaacaagaagaccagctcctgcagaaagtgaccaatctgtggaagaaacaagggttgttgctgtacggtgatctgatcgaaagtacctttgaagatctgaaactcccatcccgcaagattgatgccctggaccattttcagaaatgctttctgatcctcaaactttatcaccataaagaggacaaacgcaaatgggaaatgccgacgggttcgaacgaaagcgaggccaaaagttggaaagcaattcgcgtagatctggttgtttgtccctacgatcgttatgcgtttgcgttgttgggttggaccggaagccgcatgttcgaacgtgatctgcgccgctacgccacccacgagaagaagatgatgctggacaatcatgcgctgtatgacctgaccaagaaaatctttctcaaagctaaatcggaagaggaaattttcgcacatctggggcttgaatacctggaaccgtccgaacgtaacgca

SEQ ID NO: 134 - protein, 529 aa, synthetic construct
  REGION 1..529: note = Variant of terminal deoxynucleotidyltransferase
MHHHHHHGGSGMHRIRTIDSDFGKKRQKKMDNHISSMIYEIKFHEFVLFILEKKMGATRRTFLTDLARKKGFRVENELSDSVTHIVAENNSGSDVLAWLKTHKMEKTTQFELLDISWLIESMKVGKPVDTKGKYQLMESRVDSANPDPTAGTLNILPPTTKTISQYACQRRTTINNHNQRFTDALEILAENYEFKENDDTCLTFMRAISVLKCLPFEVVSLKDTEGLPWIGDEVKGIMEEIIEVGESLEVQAVLNDERYQSFKLFTSVFGVGLKTADKWYRRGFRTLNDVRSSKTLKLTKMQKAGLCYYEDLADGVTKAEADAVSLLVQDAVWTFDPDALVEITGGFRRGKEFGHDVDLLITSPGAEKEQEDQLLQKVTNLWKKQGLLLYGDLIESTFEDLKLPSRKIDALDHFQKCFLILKLYHHKEDKRKWEMPTGSNESEAKSWKAIRVDLVVCPYDRYAFALLGWTGSRMFERDLRRYATHEKKMMLDNHALYDLTKKIFLKAKSEEEIFAHLGLEYLEPSERNA

SEQ ID NO: 135 - DNA, 1587 bp, synthetic construct
  misc_feature 1..1587: note = Variant of terminal deoxynucleotidyltransferase
  source 1..1587: mol_type = other DNA
atgcaccatcatcatcatcatggcggtagcggcatgcaccgcattcgtaccatcgattcggacttcgggaagaaacgccagaagaagatggataaccacattagttccatgatctatgaaatcaaatttcacgagtttgtgctgttcattctcgaaaagaaaatgggtgcgacgcgtcgtacttttctgacagatttagcccgcaagaaagggttccgcgtcgagaatgaactgtcagacagcgttacccacatcgtggcagaaaataattcaggatctgacgtattggcttggctgaagacccacaagatggagaagacgacgcaatttgaactgctggatattagctggcttatcgaaagcatgaaagttggtaaaccggtggacaccaaggggaaataccagttgatggaatcgcgtgtcgatagtgcgaacccagatccgacagccggtaccctcaacattctgcctcctactacgaagaccatttctcagtatgcgtgtcaacgccgcaccaccatcaacaaccataatcagcgttttacggacgcactgacgattcttgcggaaaattacgagttcaaagaaaacgatgatacttgtctgacctttatgcgtgctatttccgtgctgaaatgccttccgtttgaggtagttagcctgaaagacacggaaggattgccctggatcggtgatgaagtcaaaggtattatggaagaaatcatcgaggtcggtgaatcgctggaagtgcaggccgtgctcaatgatgagcgctatcaaagcttcaaactgtttaccagtgtctttggagtggggctgaagacagcagacaaatggtaccgtatgggtttccgcacgctcaacgatgttcgttccagcaagaccctgaaattgaccaagatgcagaaagcgggtctgtgctattatgaagatcttgctgatggcgttacgaaagccgaagctgacgcggtatctctgctggttcaggatgcagtctggactttcgacccggatgcgctggtggagattacgggtggatttcgtcgtgggaaagagtttggtcacgacgttgatctgcttatcacatctccgggagctgagaaagaacaagaagaccagctcctgcagaaagtgaccaatctgtggaagaaacaagggttgttgctgtacggtgatctgatcgaaagtacctttgaagatctgaaactcccatcccgcaagattgatgccctggaccattttcagaaatgctttctgatcctcaaactttatcaccataaagaggacaaacgcaaatgggaaatgccgacgggttcgaacgaaagcgaggccaaaagttggaaagcaattcgcgtagatctggttgtttgtccctacgatcgttatgcgtttgcgttgttgggttggaccggaagccgcatgttcgaacgtgatctgcgccgctacgccacccacgagaagaagatgatgctggacaatcatgcgctgtatgacctgaccaagaaaatctttctcaaagctaaatcggaagaggaaattttcgcacatctggggcttgaatacctggaaccgtccgaacgtaacgca

SEQ ID NO: 136 - protein, 529 aa, synthetic construct
  REGION 1..529: note = Variant of terminal deoxynucleotidyltransferase
MHHHHHHGGSGMHRIRTIDSDFGKKRQKKMDNHISSMIYEIKFHEFVLFILEKKMGATRRTFLTDLARKKGFRVENELSDSVTHIVAENNSGSDVLAWLKTHKMEKTTQFELLDISWLIESMKVGKPVDTKGKYQLMESRVDSANPDPTAGTLNILPPTTKTISQYACQRRTTINNHNQRFTDALTILAENYEFKENDDTCLTFMRAISVLKCLPFEVVSLKDTEGLPWIGDEVKGIMEEIIEVGESLEVQAVLNDERYQSFKLFTSVFGVGLKTADKWYRMGFRTLNDVRSSKTLKLTKMQKAGLCYYEDLADGVTKAEADAVSLLVQDAVWTFDPDALVEITGGFRRGKEFGHDVDLLITSPGAEKEQEDQLLQKVTNLWKKQGLLLYGDLIESTFEDLKLPSRKIDALDHFQKCFLILKLYHHKEDKRKWEMPTGSNESEAKSWKAIRVDLVVCPYDRYAFALLGWTGSRMFERDLRRYATHEKKMMLDNHALYDLTKKIFLKAKSEEEIFAHLGLEYLEPSERNA

SEQ ID NO: 137 - DNA, 1587 bp, synthetic construct
  misc_feature 1..1587: note = Variant of terminal deoxynucleotidyltransferase
  source 1..1587: mol_type = other DNA
atgcaccatcatcatcatcatggcggtagcggcatgcaccgcattcgtaccatcgattcggacttcgggaagaaacgccagaagaagatggataaccacattagttccatgatctatgaaatcaaatttcacgagtttgtgctgttcattctcgaaaagaaaatgggtgcgacgcgtcgtacttttctgacagatttagcccgcaagaaagggttccgcgtcgagaatgaactgtcagacagcgttacccacatcgtggcagaaaataattcaggatctgacgtattggcttggctgaagacccacaagatggagaagacgacgcaatttgaactgctggatattagctggcttatcgaaagcatgaaagttggtaaaccggtggacaccaaggggaaataccagttgatggaatcgcgtgtcgatagtgcgaacccagatccgacagccggtaccctcaacattctgcctcctactacgaagaccatttctcagtatgcgtgtcaacgccgcaccaccatcaacaaccataatcagcgttttacggacgcactggaaattcttgcggaaaattacgagttcaaagaaaacgatgatacttgtctgacctttatgcgtgctatttccgtgctgaaatgccttccgtttgaggtagttagcctgaaagacacggaaggattgccctggatcggtgatgaagtcaaaggtattatggaagaaatcatcgaggtcggtgaatcgctggaagtgcaggccgtgctcaatgatgagcgctatcaaagcttcaaactgtttaccagtgtctttggagtggggctgaagacagcagacaaatggtaccgtatgggtttccgcacgctcaacgatgttcgttccagcaagaccctgaaattgaccaagatgcaggaggcgggtctgtgctattatgaagatcttgctgatggcgttacgaaagccgaagctgacgcggtatctctgctggttcaggatgcagtctggactttcgacccggatgcgctggtggagattacgggtggatttcgtcgtgggaaagagtttggtcacgacgttgatctgcttatcacatctccgggagctgagaaagaacaagaagaccagctcctgcagaaagtgaccaatctgtggaagaaacaagggttgttgctgtacggtgatctgatcgaaagtacctttgaagatctgaaactcccatcccgcaagattgatgccctggaccattttcagaaatgctttctgatcctcaaactttatcaccataaagaggacaaacgcaaatgggaaatgccgacgggttcgaacgaaagcgaggccaaaagttggaaagcaattcgcgtagatctggttgtttgtccctacgatcgttatgcgtttgcgttgttgggttggaccggaagccgcatgttcgaacgtgatctgcgccgctacgccacccacgagaagaagatgatgctggacaatcatgcgctgtatgacctgaccaagaaaatctttctcaaagctaaatcggaagaggaaattttcgcacatctggggcttgaatacctggaaccgtccgaacgtaacgca

SEQ ID NO: 138 - protein, 529 aa, synthetic construct
  REGION 1..529: note = Variant of terminal deoxynucleotidyltransferase
MHHHHHHGGSGMHRIRTIDSDFGKKRQKKMDNHISSMIYEIKFHEFVLFILEKKMGATRRTFLTDLARKKGFRVENELSDSVTHIVAENNSGSDVLAWLKTHKMEKTTQFELLDISWLIESMKVGKPVDTKGKYQLMESRVDSANPDPTAGTLNILPPTTKTISQYACQRRTTINNHNQRFTDALEILAENYEFKENDDTCLTFMRAISVLKCLPFEVVSLKDTEGLPWIGDEVKGIMEEIIEVGESLEVQAVLNDERYQSFKLFTSVFGVGLKTADKWYRMGFRTLNDVRSSKTLKLTKMQEAGLCYYEDLADGVTKAEADAVSLLVQDAVWTFDPDALVEITGGFRRGKEFGHDVDLLITSPGAEKEQEDQLLQKVTNLWKKQGLLLYGDLIESTFEDLKLPSRKIDALDHFQKCFLILKLYHHKEDKRKWEMPTGSNESEAKSWKAIRVDLVVCPYDRYAFALLGWTGSRMFERDLRRYATHEKKMMLDNHALYDLTKKIFLKAKSEEEIFAHLGLEYLEPSERNA

SEQ ID NO: 139 - DNA, 1587 bp, synthetic construct
  misc_feature 1..1587: note = Variant of terminal deoxynucleotidyltransferase
  source 1..1587: mol_type = other DNA
atgcaccatcatcatcatcatggcggtagcggcatgcaccgcattcgtaccatcgattcggacttcgggaagaaacgccagaagaagatggataaccacattagttccatgatctatgaaatcaaatttcacgagtttgtgctgttcattctcgaaaagaaaatgggtgcgacgcgtcgtacttttctgacagatttagcccgcaagaaagggttccgcgtcgagaatgaactgtcagacagcgttacccacatcgtggcagaaaataattcaggatctgacgtattggcttggctgaagacccacaagatggagaagacgacgcaatttgaactgctggatattagctggcttatcgaaagcatgaaagttggtaaaccggtggacaccaaggggaaataccagttgatggaatcgcgtgtcgatagtgcgaacccagatccgacagccggtaccctcaacattctgcctcctactacgaagaccatttctcagtatgcgtgtcaacgccgcaccaccatcaacaaccataatcagcgttttacggacgcactggaaattcttgcggaaaattacgttttcaaagaaaacgatgatacttgtctgacctttatgcgtgctatttccgtgctgaaatgccttccgtttgaggtagttagcctgaaagacacggaaggattgccctggatcggtgatgaagtcaaaggtattatggaagaaatcatcgaggtcggtgaatcgctggaagtgcaggccgtgctcaatgatgagcgctatcaaagcttcaaactgtttaccagtgtctttggagtggggctgaagacagcagacaaatggtaccgtatgggtttccgcacgctcaacgatgttcgttccagcaagaccctgaaattgaccaagatgcagaaagcgggtctgtgctattatgaagatcttgctgatggcgttacgaaagccgaagctgacgcggtatctctgctggttcaggatgcagtctggactttcgacccggatgcgctggtggagattacgggtggatttcgtcgtgggaaagagtttggtcacgacgttgatctgcttatcacatctccgggagctgagaaagaacaagaagaccagctcctgcagaaagtgaccaatctgtggaagaaacaagggttgttgctgtacggtgatctgatcgaaagtacctttgaagatctgaaactcccatcccgcaagattgatgccctggaccattttcagaaatgctttctgatcctcaaactttatcaccataaagaggacaaacgcaaatgggaaatgccgacgggttcgaacgaaagcgaggccaaaagttggaaagcaattcgcgtagatctggttgtttgtccctacgatcgttatgcgtttgcgttgttgggttggaccggaagccgcatgttcgaacgtgatctgcgccgctacgccacccacgagaagaagatgatgctggacaatcatgcgctgtatgacctgaccaagaaaatctttctcaaagctaaatcggaagaggaaattttcgcacatctggggcttgaatacctggaaccgtccgaacgtaacgca

SEQ ID NO: 140 - protein, 529 aa, synthetic construct
  REGION 1..529: note = Variant of terminal deoxynucleotidyltransferase
MHHHHHHGGSGMHRIRTIDSDFGKKRQKKMDNHISSMIYEIKFHEFVLFILEKKMGATRRTFLTDLARKKGFRVENELSDSVTHIVAENNSGSDVLAWLKTHKMEKTTQFELLDISWLIESMKVGKPVDTKGKYQLMESRVDSANPDPTAGTLNILPPTTKTISQYACQRRTTINNHNQRFTDALEILAENYVFKENDDTCLTFMRAISVLKCLPFEVVSLKDTEGLPWIGDEVKGIMEEIIEVGESLEVQAVLNDERYQSFKLFTSVFGVGLKTADKWYRMGFRTLNDVRSSKTLKLTKMQKAGLCYYEDLADGVTKAEADAVSLLVQDAVWTFDPDALVEITGGFRRGKEFGHDVDLLITSPGAEKEQEDQLLQKVTNLWKKQGLLLYGDLIESTFEDLKLPSRKIDALDHFQKCFLILKLYHHKEDKRKWEMPTGSNESEAKSWKAIRVDLVVCPYDRYAFALLGWTGSRMFERDLRRYATHEKKMMLDNHALYDLTKKIFLKAKSEEEIFAHLGLEYLEPSERNA

SEQ ID NO: 141 - DNA, 1587 bp, synthetic construct
  misc_feature 1..1587: note = Variant of terminal deoxynucleotidyltransferase
  source 1..1587: mol_type = other DNA
atgcaccatcatcatcatcatggcggtagcggcatgcaccgcattcgtaccatcgattcggacttcgggaagaaacgccagaagaagatggataaccacattagttccatgatctatgaaatcaaatttcacgagtttgtgctgttcattctcgaaaagaaaatgggtgcgacgcgtcgtacttttctgacagatttagcccgcaagaaagggttccgcgtcgagaatgaactgtcagacagcgttacccacatcgtggcagaaaataattcaggatctgacgtattggcttggctgaagacccacaagatggagaagacgacgcaatttgaactgctggatattagctggcttatcgaaagcatgaaagttggtaaaccggtggacaccaaggggaaataccagttgatggaatcgcgtgtcgatagtgcgaacccagatccgacagccggtaccctcaacattctgcctcctactacgaagaccatttctcagtatgcgtgtcaacgccgcaccaccatcaacaaccataatcagcgttttacggacgcactggaaattcttgcggaaaattacgagttcaaagaaaacgatgatacttgtctgacctttatgcgtgctatttccgtgctgaaatgccttccgtttgaggtagttagcctgaaagacacggaaggattgccctggatcggtgatgaagtcaaaggtattatggaagaaatcatcgaggtcggtgaatcgctggaagtgcaggccgtgctcaatgatgagcgctatcaaagcttcaaactgtttaccagtgtctttggagtggggctgaagacagcagacaaatggtaccgtatgggtttccgcacgctcaacgatgttcgttccagcaagaccctgaaattgaccaagatgcagaaagcgggtctgtgctattatgaagatcttgctgatggcgttacgaaagccgaagctgacgcggtatctctgctggttcaggatgcagtctggactttcgacccggatgcgctggtggagattacgggtggatttcgtcgtgggaaagagtttggtcacgacgttgatctgcttatcacatctccgggagctgagaaagaacaagaagaccagctcctgcagaaagtgaccaatctgtggaagaaacaagggttgttgctgtacggtgatctgatcgaaagtacctttgaagatctgaaactcccatcccgcaagattgatgccctggaccattttcagaaatgctttctgatcctcaaactttatcaccataaagaggacaaacgcaaatgggaaatgccgacgggttcgaacgaaagcgaggccaaaagttggaaagcaattcgcgtagatgtggttgtttgtccctacgatcgttatgcgtttgcgttgttgggttggaccggaagccgcatgttcgaacgtgatctgcgccgctacgccacccacgagaagaagatgatgctggacaatcatgcgctgtatgacctgaccaagaaaatctttctcaaagctaaatcggaagaggaaattttcgcacatctggggcttgaatacctggaaccgtccgaacgtaacgca

SEQ ID NO: 142 - protein, 529 aa, synthetic construct
  REGION 1..529: note = Variant of terminal deoxynucleotidyltransferase
MHHHHHHGGSGMHRIRTIDSDFGKKRQKKMDNHISSMIYEIKFHEFVLFILEKKMGATRRTFLTDLARKKGFRVENELSDSVTHIVAENNSGSDVLAWLKTHKMEKTTQFELLDISWLIESMKVGKPVDTKGKYQLMESRVDSANPDPTAGTLNILPPTTKTISQYACQRRTTINNHNQRFTDALEILAENYEFKENDDTCLTFMRAISVLKCLPFEVVSLKDTEGLPWIGDEVKGIMEEIIEVGESLEVQAVLNDERYQSFKLFTSVFGVGLKTADKWYRMGFRTLNDVRSSKTLKLTKMQKAGLCYYEDLADGVTKAEADAVSLLVQDAVWTFDPDALVEITGGFRRGKEFGHDVDLLITSPGAEKEQEDQLLQKVTNLWKKQGLLLYGDLIESTFEDLKLPSRKIDALDHFQKCFLILKLYHHKEDKRKWEMPTGSNESEAKSWKAIRVDVVVCPYDRYAFALLGWTGSRMFERDLRRYATHEKKMMLDNHALYDLTKKIFLKAKSEEEIFAHLGLEYLEPSERNA

SEQ ID NO: 143 - DNA, 1587 bp, synthetic construct
  misc_feature 1..1587: note = Variant of terminal deoxynucleotidyltransferase
  source 1..1587: mol_type = other DNA
atgcaccatcatcatcatcatggcggtagcggcatgcaccgcattcgtaccatcgattcggacttcgggaagaaacgccagaagaagatggataaccacattagttccatgatctatgaaatcaaatttcacgagtttgtgctgttcattctcgaaaagaaaatgggtgcgacgcgtcgtacttttctgacagatttagcccgcaagaaagggttccgcgtcgagaatgaactgtcagacagcgttacccacatcgtggcagaaaataattcaggatctgacgtattggcttggctgaagacccacaagatggagaagacgacgcaatttgaactgctggatattagctggcttatcgaaagcatgaaagttggtaaaccggtggacaccaaggggaaataccagttgatggaatcgcgtgtcgatagtgcgaacccagatccgacagccggtaccctcaacattctgcctcctactacgaagaccatttctcagtatgcgtgtcaacgccgcaccaccatcaacaaccataatcagcgttttacggacgcactggaaattcttgcggaaaattacgagttcaaagaaaacgatgatacttgtctgacctttatgcgtgctatttccgtgctgaaatgccttccgtttgaggtagttagcctgaaagacacggaaggattgccctggatcggtgatgaagtcaaaggtattatggaagaaatcatcgaggtcggtgaatcgctggaagtgcaggccgtgctcaatgatgagcgctatcaaagcttcaaactgtttaccagtgtctttggagtggggctgaagacagcagacaaatggtaccgtatgggtttccgcacgctcaacgatgttcgttccagcaagaccctgaaattgaccaagatgcagaaagcgggtctgtgctattatgaagatcttgctgatggcgttacgaaagccgaagctgacgcggtatctctgctggttcaggatgcagtctggactttcgacccggatgcgctggtggagattacgggtggatttcgtcgtgggaaagagtttggtcacgacgttgatctgcttatcacatctccgggagctgagaaagaacaagaagaccagctcctgcagaaagtgaccaatctgtggaagaaacaagggttgttgctgtacggtgatctgatcgaaagtacctttgaagatctgaaactcccatcccgcaagattgatgccctggaccattttgcgaaatgctttctgatcctcaaactttatcaccataaagaggacaaacgcaaatgggaaatgccgacgggttcgaacgaaagcgaggccaaaagttggaaagcaattcgcgtagatctggttgtttgtccctacgatcgttatgcgtttgcgttgttgggttggaccggaagccgcatgttcgaacgtgatctgcgccgctacgccacccacgagaagaagatgatgctggacaatcatgcgctgtatgacctgaccaagaaaatctttctcaaagctaaatcggaagaggaaattttcgcacatctggggcttgaatacctggaaccgtccgaacgtaacgca

SEQ ID NO: 144 - protein, 529 aa, synthetic construct
  REGION 1..529: note = Variant of terminal deoxynucleotidyltransferase
MHHHHHHGGSGMHRIRTIDSDFGKKRQKKMDNHISSMIYEIKFHEFVLFILEKKMGATRRTFLTDLARKKGFRVENELSDSVTHIVAENNSGSDVLAWLKTHKMEKTTQFELLDISWLIESMKVGKPVDTKGKYQLMESRVDSANPDPTAGTLNILPPTTKTISQYACQRRTTINNHNQRFTDALEILAENYEFKENDDTCLTFMRAISVLKCLPFEVVSLKDTEGLPWIGDEVKGIMEEIIEVGESLEVQAVLNDERYQSFKLFTSVFGVGLKTADKWYRMGFRTLNDVRSSKTLKLTKMQKAGLCYYEDLADGVTKAEADAVSLLVQDAVWTFDPDALVEITGGFRRGKEFGHDVDLLITSPGAEKEQEDQLLQKVTNLWKKQGLLLYGDLIESTFEDLKLPSRKIDALDHFAKCFLILKLYHHKEDKRKWEMPTGSNESEAKSWKAIRVDLVVCPYDRYAFALLGWTGSRMFERDLRRYATHEKKMMLDNHALYDLTKKIFLKAKSEEEIFAHLGLEYLEPSERNA

SEQ ID NO: 145 - DNA, 1587 bp, synthetic construct
  misc_feature 1..1587: note = Variant of terminal deoxynucleotidyltransferase
  source 1..1587: mol_type = other DNA
atgcaccatcatcatcatcatggcggtagcggcatgcaccgcattcgtaccatcgattcggacttcgggaagaaacgccagaagaagatggataaccacattagttccatgatctatgaaatcaaatttcacgagtttgtgctgttcattctcgaaaagaaaatgggtgcgacgcgtcgtacttttctgacagatttagcccgcaagaaagggttccgcgtcgagaatgaactgtcagacagcgttacccacatcgtggcagaaaataattcaggatctgacgtattggcttggctgaagacccacaagatggagaagacgacgcaatttgaactgctggatattagctggcttatcgaaagcatgaaagttggtaaaccggtggacaccaaggggaaataccagttgatggaatcgcgtgtcgatagtgcgaacccagatccgacagccggtaccctcaacattctgcctcctactacgaagaccatttctcagtatgcgtgtcaacgccgcaccaccatcaacaaccataatcagcgttttacggacgcactggaaattcttgcggaaaattacgagttcaaagaaaacgatgatacttgtctgacctttatgcgtgctatttccgtgctgaaatgccttccgtttgaggtagttagcctgaaagacacggaaggattgccctggatcggtgatgaagtcaaaggtattatggaagaaatcatcgaggtcggtgaatcgctggaagtgcaggccgtgctcaatgatgagcgctatcaaagcttcaaactgtttaccagtgtctttggagtggggctgaagacagcagacaaatggtaccgtatgggtttccgcacgctcaacgatgttcgttccagcaagaccctgaaattgaccaagatgcagaaagcgggtctgtgctattatgaagatcttgctgatggcgttacgaaagccgaagctgacgcggtatctctgctggttcaggatgcagtctggactttcgacccggatgcgctggtggagattacgggtggatttcgtcgtgggaaagagtttggtcacgacgttgatctgcttatcacatctccgggagctgagaaagaacaagaagaccagctcctgcagaaagtgaccaatctgtggaagaaacaagggttgttgctgtacggtgctctgatcgaaagtacctttgaagatctgaaactcccatcccgcaagattgatgccctggaccattttcagaaatgctttctgatcctcaaactttatcaccataaagaggacaaacgcaaatgggaaatgccgacgggttcgaacgaaagcgaggccaaaagttggaaagcaattcgcgtagatctggttgtttgtccctacgatcgttatgcgtttgcgttgttgggttggaccggaagccgcatgttcgaacgtgatctgcgccgctacgccacccacgagaagaagatgatgctggacaatcatgcgctgtatgacctgaccaagaaaatctttctcaaagctaaatcggaagaggaaattttcgcacatctggggcttgaatacctggaaccgtccgaacgtaacgca

SEQ ID NO: 146 - protein, 529 aa, synthetic construct
  REGION 1..529: note = Variant of terminal deoxynucleotidyltransferase
MHHHHHHGGSGMHRIRTIDSDFGKKRQKKMDNHISSMIYEIKFHEFVLFILEKKMGATRRTFLTDLARKKGFRVENELSDSVTHIVAENNSGSDVLAWLKTHKMEKTTQFELLDISWLIESMKVGKPVDTKGKYQLMESRVDSANPDPTAGTLNILPPTTKTISQYACQRRTTINNHNQRFTDALEILAENYEFKENDDTCLTFMRAISVLKCLPFEVVSLKDTEGLPWIGDEVKGIMEEIIEVGESLEVQAVLNDERYQSFKLFTSVFGVGLKTADKWYRMGFRTLNDVRSSKTLKLTKMQKAGLCYYEDLADGVTKAEADAVSLLVQDAVWTFDPDALVEITGGFRRGKEFGHDVDLLITSPGAEKEQEDQLLQKVTNLWKKQGLLLYGALIESTFEDLKLPSRKIDALDHFQKCFLILKLYHHKEDKRKWEMPTGSNESEAKSWKAIRVDLVVCPYDRYAFALLGWTGSRMFERDLRRYATHEKKMMLDNHALYDLTKKIFLKAKSEEEIFAHLGLEYLEPSERNA

SEQ ID NO: 147 - DNA, 1587 bp, synthetic construct
  misc_feature 1..1587: note = Variant of terminal deoxynucleotidyltransferase
  source 1..1587: mol_type = other DNA
atgcaccatcatcatcatcatggcggtagcggcatgcaccgcattcgtaccatcgattcggacttcgggaagaaacgccagaagaagatggataaccacattagttccatgatctatgaaatcaaatttcacgagtttgtgctgttcattctcgaaaagaaaatgggtgcgacgcgtcgtacttttctgacagatttagcccgcaagaaagggttccgcgtcgagaatgaactgtcagacagcgttacccacatcgtggcagaaaataattcaggatctgacgtattggcttggctgaagacccacaagatggagaagacgacgcaatttgaactgctggatattagctggcttatcgaaagcatgaaagttggtaaaccggtggacaccaaggggaaataccagttgatggaatcgcgtgtcgatagtgcgaacccagatccgacagccggtaccctcaacattctgcctcctactacgaagaccatttctcagtatgcgtgtcaacgccgcaccaccatcaacaaccataatcagcgttttacggacgcactgctgattcttgcggaaaattacgagttcaaagaaaacgatgatacttgtctgacctttatgcgtgctatttccgtgctgaaatgccttccgtttgaggtagttagcctgaaagacacggaaggattgccctggatcggtgatgaagtcaaaggtattatggaagaaatcatcgaggtcggtgaatcgctggaagtgcaggccgtgctcaatgatgagcgctatcaaagcttcaaactgtttaccagtgtctttggagtggggctgaagacagcagacaaatggtaccgtatgggtttccgcacgctcaacgatgttcgttccagcaagaccctgaaattgaccaagatgcagaaagcgggtctgtgctattatgaagatcttgctgatggcgttacgaaagccgaagctgacgcggtatctctgctggttcaggatgcagtctggactttcgacccggatgcgctggtggagattacgggtggatttcgtcgtgggaaagagtttggtcacgacgttgatctgcttatcacatctccgggagctgagaaagaacaagaagaccagctcctgcagaaagtgaccaatctgtggaagaaacaagggttgttgctgtacggtgatctgatcgaaagtacctttgaagatctgaaactcccatcccgcaagattgatgccctggaccattttcagaaatgctttctgatcctcaaactttatcaccataaagaggacaaacgcaaatgggaaatgccgacgggttcgaacgaaagcgaggccaaaagttggaaagcaattcgcgtagatctggttgtttgtccctacgatcgttatgcgtttgcgttgttgggttggaccggaagccgcatgttcgaacgtgatctgcgccgctacgccacccacgagaagaagatgatgctggacaatcatgcgctgtatgacctgaccaagaaaatctttctcaaagctaaatcggaagaggaaattttcgcacatctggggcttgaatacctggaaccgtccgaacgtaacgca

SEQ ID NO: 148 - protein, 529 aa, synthetic construct
  REGION 1..529: note = Variant of terminal deoxynucleotidyltransferase
MHHHHHHGGSGMHRIRTIDSDFGKKRQKKMDNHISSMIYEIKFHEFVLFILEKKMGATRRTFLTDLARKKGFRVENELSDSVTHIVAENNSGSDVLAWLKTHKMEKTTQFELLDISWLIESMKVGKPVDTKGKYQLMESRVDSANPDPTAGTLNILPPTTKTISQYACQRRTTINNHNQRFTDALLILAENYEFKENDDTCLTFMRAISVLKCLPFEVVSLKDTEGLPWIGDEVKGIMEEIIEVGESLEVQAVLNDERYQSFKLFTSVFGVGLKTADKWYRMGFRTLNDVRSSKTLKLTKMQKAGLCYYEDLADGVTKAEADAVSLLVQDAVWTFDPDALVEITGGFRRGKEFGHDVDLLITSPGAEKEQEDQLLQKVTNLWKKQGLLLYGDLIESTFEDLKLPSRKIDALDHFQKCFLILKLYHHKEDKRKWEMPTGSNESEAKSWKAIRVDLVVCPYDRYAFALLGWTGSRMFERDLRRYATHEKKMMLDNHALYDLTKKIFLKAKSEEEIFAHLGLEYLEPSERNA

SEQ ID NO: 149 - DNA, 1587 bp, synthetic construct
  misc_feature 1..1587: note = Variant of terminal deoxynucleotidyltransferase
  source 1..1587: mol_type = other DNA
atgcaccaccatcatcatcatggcggtagcggcatgcaccgcattcgtaccatcgattcggacttcgggaagaaacgccagaagaagatggataaccacattagttccatgatctatgaaatcaaatttcacgagtttgtgctgttcattctcgaaaagaaaatgggtgcgacgcgtcgtacttttctgacagatttagcccgcaagaaagggttccgcgtcgagaatgaactgtcagacagcgttacccacatcgtggcagaaaataattcaggatctgacgtattggcttggctgaagacccacaagatggagaagacgacgcaatttgaactgctggatattagctggcttatcgaaagcatgaaagttggtaaaccggtggacaccaaggggaaataccagttgatggaatcgcgtgtcgatagtgcgaacccagatccgacagccggtaccctcaacattctgcctcctactacgaagaccatttctcagtatgcgtgtcaacgccgcaccaccatcaacaaccataatcagcgttttacggacgcactggaaattcttgcggaaaattacgagttcaaagaaaacgatgatacttgtctgacctttatgcgtgctatttccgtgctgaaatgccttccgtttgaggtagttagcctgaaagacacggaaggattgccctggatcggtgatgaagtcaaaggtattatggaagaaatcatcgaggtcggtgaatcgctggaagtgcaggccgtgctcaatgatgagcgctatcaaagcttcaaactgtttaccagtgtctttggagtggggctgaagacagcagacaaatggtaccgtatgggtttccgcacgctcaacgatgttcgttccagcaagaccctgaaattgaccaagatgcagaaagcgggtctgtgctattatgaagatcttgctgatggcgttacgaaagccgaagctgacgcggtatctctgctggttcaggatgcagtctggactttcgacccggatgcgctggtggagattacgggtggatttcgtcgtgggaaagagtttggtcacgacgttgatctgcttatcacatctccgggagctgagaaagaacaagaagaccagctcctgcagaaagtgaccaatctgtggaagaaacaagggttgttgctgtacggtgatctgatcgaaagtcggtttgaagatctgaaactcccatcccgcaagattgatgccctggaccattttcagaaatgctttctgatcctcaaactttatcaccataaagaggacaaacgcaaatgggaaatgccgacgggttcgaacgaaagcgaggccaaaagttggaaagcaattcgcgtagatctggttgtttgtccctacgatcgttatgcgtttgcgttgttgggttggaccggaagccgcatgttcgaacgtgatctgcgccgctacgccacccacgagaagaagatgatgctggacaatcatgcgctgtatgacctgaccaagaaaatctttctcaaagctaaatcggaagaggaaattttcgcacatctggggcttgaatacctggaaccgtccgaacgtaacgca

SEQ ID NO: 150 - protein, 529 aa, synthetic construct
  REGION 1..529: note = Variant of terminal deoxynucleotidyltransferase
MHHHHHHGGSGMHRIRTIDSDFGKKRQKKMDNHISSMIYEIKFHEFVLFILEKKMGATRRTFLTDLARKKGFRVENELSDSVTHIVAENNSGSDVLAWLKTHKMEKTTQFELLDISWLIESMKVGKPVDTKGKYQLMESRVDSANPDPTAGTLNILPPTTKTISQYACQRRTTINNHNQRFTDALEILAENYEFKENDDTCLTFMRAISVLKCLPFEVVSLKDTEGLPWIGDEVKGIMEEIIEVGESLEVQAVLNDERYQSFKLFTSVFGVGLKTADKWYRMGFRTLNDVRSSKTLKLTKMQKAGLCYYEDLADGVTKAEADAVSLLVQDAVWTFDPDALVEITGGFRRGKEFGHDVDLLITSPGAEKEQEDQLLQKVTNLWKKQGLLLYGDLIESRFEDLKLPSRKIDALDHFQKCFLILKLYHHKEDKRKWEMPTGSNESEAKSWKAIRVDLVVCPYDRYAFALLGWTGSRMFERDLRRYATHEKKMMLDNHALYDLTKKIFLKAKSEEEIFAHLGLEYLEPSERNA

SEQ ID NO: 151 - DNA, 1587 bp, synthetic construct
  misc_feature 1..1587: note = Variant of terminal deoxynucleotidyltransferase
  source 1..1587: mol_type = other DNA
atgcaccatcatcatcatcatggcggtagcggcatgcaccgcattcgtaccatcgattcggacttcgggaagaaacgccagaagaagatggataaccacattagttccatgatctatgaaatcaaatttcacgagtttgtgctgttcattctcgaaaagaaaatgggtgcgacgcgtcgtacttttctgacagatttagcccgcaagaaagggttccgcgtcgagaatgaactgtcagacagcgttacccacatcgtggcagaaaataattcaggatctgacgtattggcttggctgaagacccacaagatggagaagacgacgcaatttgaactgctggatattagctggcttatcgaaagcatgaaagttggtaaaccggtgggcaccaaggggaaataccagttgatggaatcgcgtgtcgatagtgcgaacccagatccgacagccggtaccctcaacattctgcctcctactacgaagaccatttctcagtatgcgtgtcaacgccgcaccaccatcaacaaccataatcagcgttttacggacgcactggaaattcttgcggaaaattacgagttcaaagggaacgatgatacttgtctgacctttatgcgtgctatttccgtgctgaaatgccttccgtttgaggtagttagcctgaaagacacggaaggattgccctggatcggtgatgaagtcaaaggtattatggaagaaatcatcgaggtcggtgaatcgctggaagtgcaggccgtgctcaatgatgagcgctatcaaagcttcaaactgtttaccagtgtctttggagtggggctgaagacagcagacaaatggtaccgtatgggtttccgcacgctcaacgatgttcgttccagcaagaccctgaaattgaccaagatgcagaaagcgggtctgtgctattatgaagatcttgctgatggcgttacgaaagccgaagctgacgcggtatctctgctggttcaggatgcagtctggactttcgacccggatgcgctggtggagattacgggtggatttcgtcgtgggaaagagtttggtcacgacgttgatctgcttatcacatctccgggagctgagaaagaacaagaagaccagctcctgcagaaagtgaccaatctgtggaagaaacaagggttgttgctgtacggtgatctgatcgaaagtacctttgaagatctgaaactcccatcccgcaagattgatgccctggaccattttcagaaatgctttctgatcctcaaactttatcaccataaagaggacaaacgcaaatgggaaatgccgacgggttcgaacgaaagcgaggccaaaagttggaaagcaattcgcgtagatctggttgtttgtccctacgatcgttatgcgtttgcgttgttgggttggaccggaagccgcatgttcgaacgtgatctgcgccgctacgccacccacgagaagaagatgatgctggacaatcatgcgctgtatgacctgaccaagaaaatctttctcaaagctaaatcggaagaggaaattttcgcacatctggggcttgaatacctggaaccgtccgaacgtaacgca

SEQ ID NO: 152 - protein, 529 aa, synthetic construct
  REGION 1..529: note = Variant of terminal deoxynucleotidyltransferase
MHHHHHHGGSGMHRIRTIDSDFGKKRQKKMDNHISSMIYEIKFHEFVLFILEKKMGATRRTFLTDLARKKGFRVENELSDSVTHIVAENNSGSDVLAWLKTHKMEKTTQFELLDISWLIESMKVGKPVGTKGKYQLMESRVDSANPDPTAGTLNILPPTTKTISQYACQRRTTINNHNQRFTDALEILAENYEFKGNDDTCLTFMRAISVLKCLPFEVVSLKDTEGLPWIGDEVKGIMEEIIEVGESLEVQAVLNDERYQSFKLFTSVFGVGLKTADKWYRMGFRTLNDVRSSKTLKLTKMQKAGLCYYEDLADGVTKAEADAVSLLVQDAVWTFDPDALVEITGGFRRGKEFGHDVDLLITSPGAEKEQEDQLLQKVTNLWKKQGLLLYGDLIESTFEDLKLPSRKIDALDHFQKCFLILKLYHHKEDKRKWEMPTGSNESEAKSWKAIRVDLVVCPYDRYAFALLGWTGSRMFERDLRRYATHEKKMMLDNHALYDLTKKIFLKAKSEEEIFAHLGLEYLEPSERNA

SEQ ID NO: 153 - DNA, 1587 bp, synthetic construct
  misc_feature 1..1587: note = Variant of terminal deoxynucleotidyltransferase
  source 1..1587: mol_type = other DNA
atgcaccatcatcatcatcatggcggtagcggcatgcaccgcattcgtaccatcgattcggacttcgggaagaaacgccagaagaagatggataaccacattagttccatgatctatgaaatcaaatttcacgagtttgtgctgttcattctcgaaaagaaaatgggtgcgacgcgtcgtacttttctgacagatttagcccgcaagaaagggttccgcgtcgagaatgaactgtcagacagcgttacccacatcgtggcagaaaataattcaggatctgacgtattggcttggctgaagacccacaagatggagaagacgacgcaatttgaactgctggatattagctggcttatcgaaagcatgaaagttggtaaaccggtggacaccaaggggaaataccagttgatggaatcgcgtgtcgatagtgcgaacccagatccgacagccggtaccctcaacattctgcctcctactacgaagaccatttctcagtatgcgtgtcaacgccgcaccaccatcaacaaccataatcagcgttttacggacgcactggaaattcttgcggaaaattacgagttcaaagaaaacgatgatacttgtctgacctttatgcgtgctatttccgtgctgaaatgccttccgtttgaggtagttagcctgaaagacacggaaggattgccctggatcggtgatgaagtcaaaggtattatggaagaaatcatcgaggtcggtgaatcgctggaagtgcaggccgtgctcaatgatgagcgctatcaaagcttcaaactgtttaccagtgtctttggagtggggctgaagacagcagacaaatggtaccgtatgggtttccgcacgctcaacgatgttcgttccagcaagaccctgaaattgaccaagatgcagaaagcgggtctgtgctattatgaagatcttgctgatggcgttacgacggccgaagctgacgcggtatctctgctggttcaggatgcagtctggactttcgacccggatgcgctggtggagattacgggtggatttcgtcgtgggaaagagtttggtcacgacgttgatctgcttatcacatctccgggagctgagaaagaacaagaagaccagctcctgcagaaagtgaccaatctgtggaagaaacaagggttgttgctgtacggtgatctgatcgaaagtacctttgaagatctgaaactcccatcccgcaagattgatgccctggaccattttcagaaatgctttctgatcctcaaactttatcaccataaagaggacaaacgcaaatgggaaatgccgacgggttcgaacgaaagcgaggccaaaagttggaaagcaattcgcgtagatctggttgtttgtccctacgatcgttatgcgtttgcgttgttgggttggaccggaagccgcatgttcgaacgtgatctgcgccgctacgccacccacgagaagaagatgatgctggacaatcatgcgctgtatgacctgaccaagaaaatctttctcaaagctaaatcggaagaggaaattttcgcacatctggggcttgaatacctggaaccgtccgaacgtaacgca

SEQ ID NO: 154 - protein, 529 aa, synthetic construct
  REGION 1..529: note = Variant of terminal deoxynucleotidyltransferase
MHHHHHHGGSGMHRIRTIDSDFGKKRQKKMDNHISSMIYEIKFHEFVLFILEKKMGATRRTFLTDLARKKGFRVENELSDSVTHIVAENNSGSDVLAWLKTHKMEKTTQFELLDISWLIESMKVGKPVDTKGKYQLMESRVDSANPDPTAGTLNILPPTTKTISQYACQRRTTINNHNQRFTDALEILAENYEFKENDDTCLTFMRAISVLKCLPFEVVSLKDTEGLPWIGDEVKGIMEEIIEVGESLEVQAVLNDERYQSFKLFTSVFGVGLKTADKWYRMGFRTLNDVRSSKTLKLTKMQKAGLCYYEDLADGVTTAEADAVSLLVQDAVWTFDPDALVEITGGFRRGKEFGHDVDLLITSPGAEKEQEDQLLQKVTNLWKKQGLLLYGDLIESTFEDLKLPSRKIDALDHFQKCFLILKLYHHKEDKRKWEMPTGSNESEAKSWKAIRVDLVVCPYDRYAFALLGWTGSRMFERDLRRYATHEKKMMLDNHALYDLTKKIFLKAKSEEEIFAHLGLEYLEPSERNA

SEQ ID NO: 155 - DNA, 1587 bp, synthetic construct
  misc_feature 1..1587: note = Variant of terminal deoxynucleotidyltransferase
  source 1..1587: mol_type = other DNA
atgcaccatcatcatcatcatggcggtagcggcatgcaccgcattcgtaccatcgattcggacttcgggaagaaacgccagaagaagatggataaccacattagttccatgatctatgaaatcaaatttcacgagtttgtgctgttcattctcgaaaagaaaatgggtgcgacgcgtcgtacttttctgacagatttagcccgcaagaaagggttccgcgtcgagaatgaactgtcagacagcgttacccacatcgtggcagaaaataattcaggatctgacgtattggcttggctgaagacccacaagatggagaagacgacgcaatttgaactgctggatattagctggcttatcgaaagcatgaaagttggtaaaccggtggacaccaaggggaaataccagttgatggaatcgcgtgtcgatagtgcgaacccagatccgacagccggtaccctcaacattctgcctcctactacgaagaccatttctcagtatgcgtgtcaacgccgcaccaccatcaacaaccataatcagcgttttacggacgcactggaaattcttgcggaaaattacgagttcaaagaaaacgatgatacttgtctgacctttatgcgtgctatttccgtgctgaaatgccttccgtttgaggtagttagcctgaaagacacggaaggattgccctggatcggtgatgaagtcaaaggtattatggaagaaatcatcgaggtcggtgaatcgctggaagtgcaggccgtgctcaatgatgagcgctatcaaagcttcaaactgtttaccagtgtctttggagtggggctgaagacagcagacaaatggtaccgtatgggtttccgcacgctcaacgatgttcgttccagcaagaccctgaaattgaccaagatgcagaaagcgggtctgtgctattatgaagatcttgctgatggcgttacgaaagccgaagctgacgcggtatctctgctggttcaggatgcagtctggactttcgacccggatgcgctggtggagattacgggtggatttcgtcgtgggaaagagtttggtcacgacgttgatctgcttatcacatctccgggagctgagaaagaacaagaagaccagctcctgcagaaagtgaccaatctgtggaagaaacaagggttgttgctgtacggtgatctgatcctgagtacctttgaagatctgaaactcccatcccgcaagattgatgccctggaccattttcagaaatgctttctgatcctcaaactttatcaccataaagaggacaaacgcaaatgggaaatgccgacgggttcgaacgaaagcgaggccaaaagttggaaagcaattcgcgtagatctggttgtttgtccctacgatcgttatgcgtttgcgttgttgggttggaccggaagccgcatgttcgaacgtgatctgcgccgctacgccacccacgagaagaagatgatgctggacaatcatgcgctgtatgacctgaccaagaaaatctttctcaaagctaaatcggaagaggaaattttcgcacatctggggcttgaatacctggaaccgtccgaacgtaacgca

SEQ ID NO: 156 - protein, 529 aa, synthetic construct
  REGION 1..529: note = Variant of terminal deoxynucleotidyltransferase
MHHHHHHGGSGMHRIRTIDSDFGKKRQKKMDNHISSMIYEIKFHEFVLFILEKKMGATRRTFLTDLARKKGFRVENELSDSVTHIVAENNSGSDVLAWLKTHKMEKTTQFELLDISWLIESMKVGKPVDTKGKYQLMESRVDSANPDPTAGTLNILPPTTKTISQYACQRRTTINNHNQRFTDALEILAENYEFKENDDTCLTFMRAISVLKCLPFEVVSLKDTEGLPWIGDEVKGIMEEIIEVGESLEVQAVLNDERYQSFKLFTSVFGVGLKTADKWYRMGFRTLNDVRSSKTLKLTKMQKAGLCYYEDLADGVTKAEADAVSLLVQDAVWTFDPDALVEITGGFRRGKEFGHDVDLLITSPGAEKEQEDQLLQKVTNLWKKQGLLLYGDLILSTFEDLKLPSRKIDALDHFQKCFLILKLYHHKEDKRKWEMPTGSNESEAKSWKAIRVDLVVCPYDRYAFALLGWTGSRMFERDLRRYATHEKKMMLDNHALYDLTKKIFLKAKSEEEIFAHLGLEYLEPSERNA

SEQ ID NO: 157 - DNA, 1587 bp, synthetic construct
  misc_feature 1..1587: note = Variant of terminal deoxynucleotidyltransferase
  source 1..1587: mol_type = other DNA
atgcaccatcatcatcatcatggcggtagcggcatgcaccgcattcgtaccatcgattcggacttcgggaagaaacgccagaagaagatggataaccacattagttccatgatctatgaaatcaaatttcacgagtttgtgctgttcattctcgaaaagaaaatgggtgcgacgcgtcgtacttttctgacagatttagcccgcaagaaagggttccgcgtcgagaatgaactgtcagacagcgttacccacatcgtggcagaaaataattcaggatctgacgtattggcttggctgaagacccacaagatggagaagacgacgcaatttgaactgctggatattagctggcttatcgaaagcatgaaagttggtaaaccggtggacaccaaggggaaataccagttgatggaatcgcgtgtcgatagtgcgaacccagatccgacagccggtaccctcaacattctgcctcctactacgaagaccatttctcagtatgcgtgtcaacgccgcaccaccatcaacaaccataatcagcgttttacggacgcactggaaattcttgcggaaaattacgagttcaaagaaaacgatgatacttgtctgacctttatgcgtgctatttccgtgctgaaatgccttccgtttgaggtagttagcctgaaagacacggaaggattgccctggatcggtgatgaagtcaaaggtattatggaagaaatcatcgaggtcggtgaatcgctggaagtgcaggccgtgctcaatgatgagcgctatcaaagcttcaaactgtttaccagtgtctttggagtggggctgaagacagcagacaaatggtaccgtatgggtttccgcacgctcaacgatgttcgttccagcaagaccctgaaattgaccaagatgcagaaagcgggtctgtgctattatgaagatcttgctgatggcgttacggtggccgaagctgacgcggtatctctgctggttcaggatgcagtctggactttcgacccggatgcgctggtggagattacgggtggatttcgtcgtgggaaagagtttggtcacgacgttgatctgcttatcacatctccgggagctgagaaagaacaagaagaccagctcctgcagaaagtgaccaatctgtggaagaaacaagggttgttgctgtacggtgatctgatcgaaagtacctttgaagatctgaaactcccatcccgcaagattgatgccctggaccattttcagaaatgctttctgatcctcaaactttatcaccataaagaggacaaacgcaaatgggaaatgccgacgggttcgaacgaaagcgaggccaaaagttggaaagcaattcgcgtagatctggttgtttgtccctacgatcgttatgcgtttgcgttgttgggttggaccggaagccgcatgttcgaacgtgatctgcgccgctacgccacccacgagaagaagatgatgctggacaatcatgcgctgtatgacctgaccaagaaaatctttctcaaagctaaatcggaagaggaaattttcgcacatctggggcttgaatacctggaaccgtccgaacgtaacgca

SEQ ID NO: 158 - protein, 529 aa, synthetic construct
  REGION 1..529: note = Variant of terminal deoxynucleotidyltransferase
MHHHHHHGGSGMHRIRTIDSDFGKKRQKKMDNHISSMIYEIKFHEFVLFILEKKMGATRRTFLTDLARKKGFRVENELSDSVTHIVAENNSGSDVLAWLKTHKMEKTTQFELLDISWLIESMKVGKPVDTKGKYQLMESRVDSANPDPTAGTLNILPPTTKTISQYACQRRTTINNHNQRFTDALEILAENYEFKENDDTCLTFMRAISVLKCLPFEVVSLKDTEGLPWIGDEVKGIMEEIIEVGESLEVQAVLNDERYQSFKLFTSVFGVGLKTADKWYRMGFRTLNDVRSSKTLKLTKMQKAGLCYYEDLADGVTVAEADAVSLLVQDAVWTFDPDALVEITGGFRRGKEFGHDVDLLITSPGAEKEQEDQLLQKVTNLWKKQGLLLYGDLIESTFEDLKLPSRKIDALDHFQKCFLILKLYHHKEDKRKWEMPTGSNESEAKSWKAIRVDLVVCPYDRYAFALLGWTGSRMFERDLRRYATHEKKMMLDNHALYDLTKKIFLKAKSEEEIFAHLGLEYLEPSERNA

SEQ ID NO: 159 - DNA, 1587 bp, synthetic construct
  misc_feature 1..1587: note = Variant of terminal deoxynucleotidyltransferase
  source 1..1587: mol_type = other DNA
atgcaccatcatcatcatcatggcggtagcggcatgcaccgcattcgtaccatcgattcggacttcgggaagaaacgccagaagaagatggataaccacattagttccatgatctatgaaatcaaatttcacgagtttgtgctgttcattctcgaaaagaaaatgggtgcgacgcgtcgtacttttctgacagatttagcccgcaagaaagggttccgcgtcgagaatgaactgtcagacagcgttacccacatcgtggcagaaaataattcaggatctgacgtattggcttggctgaagacccacaagatggagaagacgacgcaatttgaactgctggatattagctggcttatcgaaagcatgaaagttggtaaaccggtggacaccaaggggaaataccagttgatggaatcgcgtgtcgatagtgcgaacccagatccgacagccggtaccctcaacattctgcctcctactacgaagaccatttctcagtatgcgtgtcaacgccgcaccaccatcaacaaccataatcagcgttttacggacgcactggaaattcttgcggaaaattacgagttcaaagaaaacgatgatacttgtctgacctttatgcgtgctatttccgtgctgaaatgccttccgtttgaggtagttagcctgaaagacacggaaggattgccctggatcggtgatgaagtcaaaggtattatggaagaaatcatcgaggtcggtgaatcgctggaagtgcaggccgtgctcaatgatgagcgctatcaaagcttcaaactgtttaccagtgtctttggagtggggctgaagacagcagacaaatggtaccgtatgggtttccgcacgctcaacgatgttcgttccagcaagaccctgaaattgaccaagatgcagaaagcgggtctgtgctattatgaagatcttgctgatggcgttacgaaagccgaagctgacgcggtatctctgctggttcaggatgcagtctggactttcgacccggatgcgctggtggagattacgggtggatttcgtcgtgggaaagagtttggtcacgacgttgatctgcttatcacatctccgggagctgagaaagaacaagaagaccagctcctgcagaaagtgaccaatctgtggaagaaacaagggttgttgctgtacggtgatctgatcgaaagtacctttgaagatctgaaactcccatcccgcaagattgatgccctggaccattttcagaaatgctttctgatcctcaaactttatcaccataaagaggacaaacgcaaatgggaaatgccgacgggttcgaacgaaagcgaggccaaaagttggaaagcaattcgcgtagatctggttgtttgtccctacgatcgttatgcgtttgcgttgttgggttggaccggaagccgcatgttcgaacgtgatctgcgccgctacgccacccacgagaagaagatgatgctgacgaatcatgcgctgtatgacctgaccaagaaaatctttctcaaagctaaatcggaagaggaaattttcgcacatctggggcttgaatacctggaaccgtccgaacgtaacgca

SEQ ID NO: 160 - protein, 529 aa, synthetic construct
  REGION 1..529: note = Variant of terminal deoxynucleotidyltransferase
MHHHHHHGGSGMHRIRTIDSDFGKKRQKKMDNHISSMIYEIKFHEFVLFILEKKMGATRRTFLTDLARKKGFRVENELSDSVTHIVAENNSGSDVLAWLKTHKMEKTTQFELLDISWLIESMKVGKPVDTKGKYQLMESRVDSANPDPTAGTLNILPPTTKTISQYACQRRTTINNHNQRFTDALEILAENYEFKENDDTCLTFMRAISVLKCLPFEVVSLKDTEGLPWIGDEVKGIMEEIIEVGESLEVQAVLNDERYQSFKLFTSVFGVGLKTADKWYRMGFRTLNDVRSSKTLKLTKMQKAGLCYYEDLADGVTKAEADAVSLLVQDAVWTFDPDALVEITGGFRRGKEFGHDVDLLITSPGAEKEQEDQLLQKVTNLWKKQGLLLYGDLIESTFEDLKLPSRKIDALDHFQKCFLILKLYHHKEDKRKWEMPTGSNESEAKSWKAIRVDLVVCPYDRYAFALLGWTGSRMFERDLRRYATHEKKMMLTNHALYDLTKKIFLKAKSEEEIFAHLGLEYLEPSERNA

SEQ ID NO: 161 - DNA, 1587 bp, synthetic construct
  misc_feature 1..1587: note = Variant of terminal deoxynucleotidyltransferase
  source 1..1587: mol_type = other DNA
atgcaccatcatcatcatcatggcggtagcggcatgcaccgcattcgtaccatcgattcggacttcgggaagaaacgccagaagaagatggataaccacattagttccatgatctatgaaatcaaatttcacgagtttgtgctgttcattctcgaaaagaaaatgggtgcgacgcgtcgtacttttctgacagatttagcccgcaagaaagggttccgcgtcgagaatgaactgtcagacagcgttacccacatcgtggcagaaaataattcaggatctgacgtattggcttggctgaagacccacaagatggagaagacgacgcaatttgaactgctggatattagctggcttatcgaaagcatgaaagttggtaaaccggtggacaccaaggggaaataccagttgatggaatcgcgtgtcgatagtgcgaacccagatccgacagccggtaccctcaacattctgcctcctactacgaagaccatttctcagtatgcgtgtcaacgccgcaccaccatcaacaaccataatcagcgttttacggacgcactggaaattcttgcggaaaattacaatttcaaagaaaacgatgatacttgtctgacctttatgcgtgctatttccgtgctgaaatgccttccgtttgaggtagttagcctgaaagacacggaaggattgccctggatcggtgatgaagtcaaaggtattatggaagaaatcatcgaggtcggtgaatcgctggaagtgcaggccgtgctcaatgatgagcgctatcaaagcttcaaactgtttaccagtgtctttggagtggggctgaagacagcagacaaatggtaccgtatgggtttccgcacgctcaacgatgttcgttccagcaagaccctgaaattgaccaagatgcagaaagcgggtctgtgctattatgaagatcttgctgatggcgttacgaaagccgaagctgacgcggtatctctgctggttcaggatgcagtctggactttcgacccggatgcgctggtggagattacgggtggatttcgtcgtgggaaagagtttggtcacgacgttgatctgcttatcacatctccgggagctgagaaagaacaagaagaccagctcctgcagaaagtgaccaatctgtggaagaaacaagggttgttgctgtacggtgatctgatcgaaagtacctttgaagatctgaaactcccatcccgcaagattgatgccctggaccattttcagaaatgctttctgatcctcaaactttatcaccataaagaggacaaacgcaaatgggaaatgccgacgggttcgaacgaaagcgaggccaaaagttggaaagcaattcgcgtagatctggttgtttgtccctacgatcgttatgcgtttgcgttgttgggttggaccggaagccgcatgttcgaacgtgatctgcgccgctacgccacccacgagaagaagatgatgctggacaatcatgcgctgtatgacctgaccaagaaaatctttctcaaagctaaatcggaagaggaaattttcgcacatctggggcttgaatacctggaaccgtccgaacgtaacgca

SEQ ID NO: 162 - protein, 529 aa, synthetic construct
  REGION 1..529: note = Variant of terminal deoxynucleotidyltransferase
MHHHHHHGGSGMHRIRTIDSDFGKKRQKKMDNHISSMIYEIKFHEFVLFILEKKMGATRRTFLTDLARKKGFRVENELSDSVTHIVAENNSGSDVLAWLKTHKMEKTTQFELLDISWLIESMKVGKPVDTKGKYQLMESRVDSANPDPTAGTLNILPPTTKTISQYACQRRTTINNHNQRFTDALEILAENYNFKENDDTCLTFMRAISVLKCLPFEVVSLKDTEGLPWIGDEVKGIMEEIIEVGESLEVQAVLNDERYQSFKLFTSVFGVGLKTADKWYRMGFRTLNDVRSSKTLKLTKMQKAGLCYYEDLADGVTKAEADAVSLLVQDAVWTFDPDALVEITGGFRRGKEFGHDVDLLITSPGAEKEQEDQLLQKVTNLWKKQGLLLYGDLIESTFEDLKLPSRKIDALDHFQKCFLILKLYHHKEDKRKWEMPTGSNESEAKSWKAIRVDLVVCPYDRYAFALLGWTGSRMFERDLRRYATHEKKMMLDNHALYDLTKKIFLKAKSEEEIFAHLGLEYLEPSERNA

SEQ ID NO: 163 - DNA, 1587 bp, synthetic construct
  misc_feature 1..1587: note = Variant of terminal deoxynucleotidyltransferase
  source 1..1587: mol_type = other DNA
atgcaccatcatcatcatcatggcggtagcggcatgcaccgcattcgtaccatcgattcggacttcgggaagaaacgccagaagaagatggataaccacattagttccatgatctatgaaatcaaatttcacgagtttgtgctgttcattctcgaaaagaaaatgggtgcgacgcgtcgtacttttctgacagatttagcccgcaagaaagggttccgcgtcgagaatgaactgtcagacagcgttacccacatcgtggcagaaaataattcaggatctgacgtattggcttggctgaagacccacaagatggagaagacgacgcaatttgaactgctggatattagctggcttatcgaaagcatgaaagttggtaaaccggtggacaccaaggggaaataccagttgatggaatcgcgtgtcgatagtgcgaacccagatccgacagccggtaccctcaacattctgcctcctactacgaagaccatttctcagtatgcgtgtcaacgccgcaccaccatcaacaaccataatcagcgttttacggacgcactggggattcttgcggaaaattacgagttcaaagaaaacgatgatacttgtctgacctttatgcgtgctatttccgtgctgaaatgccttccgtttgaggtagttagcctgaaagacacggaaggattgccctggatcggtgatgaagtcaaaggtattatggaagaaatcatcgaggtcggtgaatcgctggaagtgcaggccgtgctcaatgatgagcgctatcaaagcttcaaactgtttaccagtgtctttggagtggggctgaagacagcagacaaatggtaccgtatgggtttccgcacgctcaacgatgttcgttccagcaagaccctgaaattgaccaagatgcagaaagcgggtctgtgctattatgaagatcttgctgatggcgttacgaaagccgaagctgacgcggtatctctgctggttcaggatgcagtctggactttcgacccggatgcgctggtggagattacgggtggatttcgtcgtgggaaagagtttggtcacgacgttgatctgcttatcacatctccgggagctgagaaagaacaagaagaccagctcctgcagaaagtgaccaatctgtggaagaaacaagggttgttgctgtacggtgatctgatcgaaagtacctttgaagatctgaaactcccatcccgcaagattgatgccctggaccattttcagaaatgctttctgatcctcaaactttatcaccataaagaggacaaacgcaaatgggaaatgccgacgggttcgaacgaaagcgaggccaaaagttggaaagcaattcgcgtagatctggttgtttgtccctacgatcgttatgcgtttgcgttgttgggttggaccggaagccgcatgttcgaacgtgatctgcgccgctacgccacccacgagaagaagatgatgctggacaatcatgcgctgtatgacctgaccaagaaaatctttctcaaagctaaatcggaagaggaaattttcgcacatctggggcttgaatacctggaaccgtccgaacgtaacgca

SEQ ID NO: 164 - protein, 529 aa, synthetic construct
  REGION 1..529: note = Variant of terminal deoxynucleotidyltransferase
MHHHHHHGGSGMHRIRTIDSDFGKKRQKKMDNHISSMIYEIKFHEFVLFILEKKMGATRRTFLTDLARKKGFRVENELSDSVTHIVAENNSGSDVLAWLKTHKMEKTTQFELLDISWLIESMKVGKPVDTKGKYQLMESRVDSANPDPTAGTLNILPPTTKTISQYACQRRTTINNHNQRFTDALGILAENYEFKENDDTCLTFMRAISVLKCLPFEVVSLKDTEGLPWIGDEVKGIMEEIIEVGESLEVQAVLNDERYQSFKLFTSVFGVGLKTADKWYRMGFRTLNDVRSSKTLKLTKMQKAGLCYYEDLADGVTKAEADAVSLLVQDAVWTFDPDALVEITGGFRRGKEFGHDVDLLITSPGAEKEQEDQLLQKVTNLWKKQGLLLYGDLIESTFEDLKLPSRKIDALDHFQKCFLILKLYHHKEDKRKWEMPTGSNESEAKSWKAIRVDLVVCPYDRYAFALLGWTGSRMFERDLRRYATHEKKMMLDNHALYDLTKKIFLKAKSEEEIFAHLGLEYLEPSERNA

SEQ ID NO: 165 - DNA, 1587 bp, synthetic construct
  misc_feature 1..1587: note = Variant of terminal deoxynucleotidyltransferase
  source 1..1587: mol_type = other DNA
atgcaccatcatcatcatcatggcggtagcggcatgcaccgcattcgtaccatcgattcggacttcgggaagaaacgccagaagaagatggataaccacattagttccatgatctatgaaatcaaatttcacgagtttgtgctgttcattctcgaaaagaaaatgggtgcgacgcgtcgtacttttctgacagatttagcccgcaagaaagggttccgcgtcgagaatgaactgtcagacagcgttacccacatcgtggcagaaaataattcaggatctgacgtattggcttggctgaagacccacaagatggagaagacgacgcaatttgaactgctggatattagctggcttatcgaaagcatgaaagttggtaaaccggtggacaccaaggggaaataccagttgatggaatcgcgtgtcgatagtgcgaacccagatccgacagccggtaccctcaacattctgcctcctactacgaagaccatttctcagtatgcgtgtcaacgccgcaccttgatcaacaaccataatcagcgttttacggacgcactggaaattcttgcggaaaattacgagttcaaagaaaacgatgatacttgtctgacctttatgcgtgctatttccgtgctgaaatgccttccgtttgaggtagttagcctgaaagacacggaaggattgccctggatcggtgatgaagtcaaaggtattatggaagaaatcatcgaggtcggtgaatcgctggaagtgcaggccgtgctcaatgatgagcgctatcaaagcttcaaactgtttaccagtgtctttggagtggggctgaagacagcagacaaatggtaccgtatgggtttccgcacgctcaacgatgttcgttccagcaagaccctgaaattgaccaagatgcagaaagcgggtctgtgctattatgaagatcttgctgatggcgttacgaaagccgaagctgacgcggtatctctgctggttcaggatgcagtctggactttcgacccggatgcgctggtggagattacgggtggatttcgtcgtgggaaagagtttggtcacgacgttgatctgcttatcacatctccgggagctgagaaagaacaagaagaccagctcctgcagaaagtgaccaatctgtggaagaaacaagggttgttgctgtacggtgatctgatcgaaagtacctttgaagatctgaaactcccatcccgcaagattgatgccctggaccattttcagaaatgctttctgatcctcaaactttatcaccataaagaggacaaacgcaaatgggaaatgccgacgggttcgaacgaaagcgaggccaaaagttggaaagcaattcgcgtagatctggttgtttgtccctacgatcgttatgcgtttgcgttgttgggttggaccggaagccgcatgttcgaacgtgatctgcgccgctacgccacccacgagaagaagatgatgctggacaatcatgcgctgtatgacctgaccaagaaaatctttctcaaagctaaatcggaagaggaaattttcgcacatctggggcttgaatacctggaaccgtccgaacgtaacgca

SEQ ID NO: 166 - protein, 529 aa, synthetic construct
  REGION 1..529: note = Variant of terminal deoxynucleotidyltransferase
MHHHHHHGGSGMHRIRTIDSDFGKKRQKKMDNHISSMIYEIKFHEFVLFILEKKMGATRRTFLTDLARKKGFRVENELSDSVTHIVAENNSGSDVLAWLKTHKMEKTTQFELLDISWLIESMKVGKPVDTKGKYQLMESRVDSANPDPTAGTLNILPPTTKTISQYACQRRTLINNHNQRFTDALEILAENYEFKENDDTCLTFMRAISVLKCLPFEVVSLKDTEGLPWIGDEVKGIMEEIIEVGESLEVQAVLNDERYQSFKLFTSVFGVGLKTADKWYRMGFRTLNDVRSSKTLKLTKMQKAGLCYYEDLADGVTKAEADAVSLLVQDAVWTFDPDALVEITGGFRRGKEFGHDVDLLITSPGAEKEQEDQLLQKVTNLWKKQGLLLYGDLIESTFEDLKLPSRKIDALDHFQKCFLILKLYHHKEDKRKWEMPTGSNESEAKSWKAIRVDLVVCPYDRYAFALLGWTGSRMFERDLRRYATHEKKMMLDNHALYDLTKKIFLKAKSEEEIFAHLGLEYLEPSERNA

SEQ ID NO: 167 - DNA, 1587 bp, synthetic construct
  misc_feature 1..1587: note = Variant of terminal deoxynucleotidyltransferase
  source 1..1587: mol_type = other DNA
atgcaccatcatcatcatcatggcggtagcggcatgcaccgcattcgtaccatcgattcggacttcgggaagaaacgccagaagaagatggataaccacattagttccatgatctatgaaatcaaatttcacgagtttgtgctgttcattctcgaaaagaaaatgggtgcgacgcgtcgtacttttctgacagatttagcccgcaagaaagggttccgcgtcgagaatgaactgtcagacagcgttacccacatcgtggcagaaaataattcaggatctgacgtattggcttggctgaagacccacaagatggagaagacgacgcaatttgaactgctggatattagctggcttatcgaaagcatgaaagttggtaaaccggtggacaccaaggggaaataccagttgatggaatcgcgtgtcgatagtgcgaacccagatccgacagccggtaccctcaacattctgcctcctactacgaagaccatttctcagtatgcgtgtcaacgccgcaccaccatcaacaaccataatcagcgttttacggacgcactggaaattcttgcggaaaattacgggttcaaagaaaacgatgatacttgtctgacctttatgcgtgctatttccgtgctgaaatgccttccgtttgaggtagttagcctgaaagacacggaaggattgccctggatcggtgatgaagtcaaaggtattatggaagaaatcatcgaggtcggtgaatcgctggaagtgcaggccgtgctcaatgatgagcgctatcaaagcttcaaactgtttaccagtgtctttggagtggggctgaagacagcagacaaatggtaccgtatgggtttccgcacgctcaacgatgttcgttccagcaagaccctgaaattgaccaagatgcagaaagcgggtctgtgctattatgaagatcttgctgatggcgttacgaaagccgaagctgacgcggtatctctgctggttcaggatgcagtctggactttcgacccggatgcgctggtggagattacgggtggatttcgtcgtgggaaagagtttggtcacgacgttgatctgcttatcacatctccgggagctgagaaagaacaagaagaccagctcctgcagaaagtgaccaatctgtggaagaaacaagggttgttgctgtacggtgatctgatcgaaagtacctttgaagatctgaaactcccatcccgcaagattgatgccctggaccattttcagaaatgctttctgatcctcaaactttatcaccataaagaggacaaacgcaaatgggaaatgccgacgggttcgaacgaaagcgaggccaaaagttggaaagcaattcgcgtagatctggttgtttgtccctacgatcgttatgcgtttgcgttgttgggttggaccggaagccgcatgttcgaacgtgatctgcgccgctacgccacccacgagaagaagatgatgctggacaatcatgcgctgtatgacctgaccaagaaaatctttctcaaagctaaatcggaagaggaaattttcgcacatctggggcttgaatacctggaaccgtccgaacgtaacgca

SEQ ID NO: 168 - protein, 529 aa, synthetic construct
  REGION 1..529: note = Variant of terminal deoxynucleotidyltransferase
MHHHHHHGGSGMHRIRTIDSDFGKKRQKKMDNHISSMIYEIKFHEFVLFILEKKMGATRRTFLTDLARKKGFRVENELSDSVTHIVAENNSGSDVLAWLKTHKMEKTTQFELLDISWLIESMKVGKPVDTKGKYQLMESRVDSANPDPTAGTLNILPPTTKTISQYACQRRTTINNHNQRFTDALEILAENYGFKENDDTCLTFMRAISVLKCLPFEVVSLKDTEGLPWIGDEVKGIMEEIIEVGESLEVQAVLNDERYQSFKLFTSVFGVGLKTADKWYRMGFRTLNDVRSSKTLKLTKMQKAGLCYYEDLADGVTKAEADAVSLLVQDAVWTFDPDALVEITGGFRRGKEFGHDVDLLITSPGAEKEQEDQLLQKVTNLWKKQGLLLYGDLIESTFEDLKLPSRKIDALDHFQKCFLILKLYHHKEDKRKWEMPTGSNESEAKSWKAIRVDLVVCPYDRYAFALLGWTGSRMFERDLRRYATHEKKMMLDNHALYDLTKKIFLKAKSEEEIFAHLGLEYLEPSERNA

SEQ ID NO: 169 - DNA, 1587 bp, synthetic construct
  misc_feature 1..1587: note = Variant of terminal deoxynucleotidyltransferase
  source 1..1587: mol_type = other DNA
atgcaccatcatcatcatcatggcggtagcggcatgcaccgcattcgtaccatcgattcggacttcgggaagaaacgccagaagaagatggataaccacattagttccatgatctatgaaatcaaatttcacgagtttgtgctgttcattctcgaaaagaaaatgggtgcgacgcgtcgtacttttctgacagatttagcccgcaagaaagggttccgcgtcgagaatgaactgtcagacagcgttacccacatcgtggcagaaaataattcaggatctgacgtattggcttggctgaagacccacaagatggagaagacgacgcaatttgaactgctggatattagctggcttatcgaaagcatgaaagttggtaaaccggtggacaccaaggggaaataccagttgatggaatcgcgtgtcgatagtgcgaacccagatccgacagccggtaccctcaacattctgcctcctactacgaagaccatttctcagtatgcgtgtcaacgccgcaccaccatcaacaaccataatcagcgttttacggacgcactggaaattcttgcggaaaattacgagttcaaagaaaacgatgatacttgtctgacctttatgcgtgctatttccgtgctgaaatgccttccgtttgaggtagttagcctgaaagacacggaaggattgccctggatcggtgatgaagtcaaaggtattatggaagaaatcatcgaggtcggtgaatcgctggaagtgcaggccgtgctcaatgatgagcgctatcaaagcttcaaactgtttaccagtgtctttggagtggggctgaagacagcagacaaatggtaccgtatgggtttccgcacgctcaacgatgttcgttccagcaagaccctgaaattgaccaagatgcagaaagcgggtctgtgctattatgaagatcttgctgatggcgttacgaaagccgaagctgacgcggtatctctgctggttcaggatgcagtctggactttcgacccggatgcgctggtggagattacgggtggatttcgtcgtgggaaagagtttggtcacgacgttgatctgcttatcacatctccgggagctgagaaagaacaagaagaccagctcctgcagaaagtgaccaatctgtggaagaaacaagggttgttgctgtacggtgatctgatcgaaagtacctttgaagatctgaaactcccatcccgcaagattgatgccctggaccattttcagaaagtgtttctgatcctcaaactttatcaccataaagaggacaaacgcaaatgggaaatgccgacgggttcgaacgaaagcgaggccaaaagttggaaagcaattcgcgtagatctggttgtttgtccctacgatcgttatgcgtttgcgttgttgggttggaccggaagccgcatgttcgaacgtgatctgcgccgctacgccacccacgagaagaagatgatgctggacaatcatgcgctgtatgacctgaccaagaaaatctttctcaaagctaaatcggaagaggaaattttcgcacatctggggcttgaatacctggaaccgtccgaacgtaacgca

SEQ ID NO: 170 - protein, 529 aa, synthetic construct
  REGION 1..529: note = Variant of terminal deoxynucleotidyltransferase
MHHHHHHGGSGMHRIRTIDSDFGKKRQKKMDNHISSMIYEIKFHEFVLFILEKKMGATRRTFLTDLARKKGFRVENELSDSVTHIVAENNSGSDVLAWLKTHKMEKTTQFELLDISWLIESMKVGKPVDTKGKYQLMESRVDSANPDPTAGTLNILPPTTKTISQYACQRRTTINNHNQRFTDALEILAENYEFKENDDTCLTFMRAISVLKCLPFEVVSLKDTEGLPWIGDEVKGIMEEIIEVGESLEVQAVLNDERYQSFKLFTSVFGVGLKTADKWYRMGFRTLNDVRSSKTLKLTKMQKAGLCYYEDLADGVTKAEADAVSLLVQDAVWTFDPDALVEITGGFRRGKEFGHDVDLLITSPGAEKEQEDQLLQKVTNLWKKQGLLLYGDLIESTFEDLKLPSRKIDALDHFQKVFLILKLYHHKEDKRKWEMPTGSNESEAKSWKAIRVDLVVCPYDRYAFALLGWTGSRMFERDLRRYATHEKKMMLDNHALYDLTKKIFLKAKSEEEIFAHLGLEYLEPSERNA

SEQ ID NO: 171 - DNA, 1587 bp, synthetic construct
  misc_feature 1..1587: note = Variant of terminal deoxynucleotidyltransferase
  source 1..1587: mol_type = other DNA
atgcaccatcatcatcatcatggcggtagcggcatgcaccgcattcgtaccatcgattcggacttcgggaagaaacgccagaagaagatggataaccacattagttccatgatctatgaaatcaaatttcacgagtttgtgctgttcattctcgaaaagaaaatgggtgcgacgcgtcgtacttttctgacagatttagcccgcaagaaagggttccgcgtcgagaatgaactgtcagacagcgttacccacatcgtggcagaaaataattcaggatctgacgtattggcttggctgaagacccacaagatggagaagacgacgcaatttgaactgctggatattagctggcttatcgaaagcatgaaagttggtaaaccggtggacaccaaggggaaataccagttgatggaatcgcgtgtcgatagtgcgaacccagatccgacagccggtaccctcaacattctgcctcctactacgaagaccatttctcagtatgcgtgtcaacgccgcaccaccatcaacaaccataatcagcgttttacggacgcactggaaattcttgcggaaaattacgagttcaaagaaaacgatgatacttgtctgacctttatgcgtgctatttccgtgctgaaatgccttccgtttgaggtagttagcctgaaagacacggaaggattgccctggatcggtgatgaagtcaaaggtattatggaagaaatcatcgaggtcggtgaatcgctggaagtgcaggccgtgctcaatgatgagcgctatcaaagcttcaaactgtttaccagtgtctttggagtggggctgaagacagcagacaaatggtaccgtatgggtttccgcacgctcaacgatgttcgttccagcaagaccctgaaattgaccaagatgcagaaagcgggtctgtgctattatgaagatcttgctgatggcgttacgaaagccgaagctgacgcggtatctctgctggttcaggatgcagtctggactttcgacccggatgcgctggtggagattacgggtggatttcgtcgtgggaaagagtttggtcacgacgttgatctgcttatcacatctccgggagctgagaaagaacaagaagaccagctcctgcagaaagtgaccaatctgtggaagaaacaagggttgttgctgtacggtgatctgatcgctagtacctttgaagatctgaaactcccatcccgcaagattgatgccctggaccattttcagaaatgctttctgatcctcaaactttatcaccataaagaggacaaacgcaaatgggaaatgccgacgggttcgaacgaaagcgaggccaaaagttggaaagcaattcgcgtagatctggttgtttgtccctacgatcgttatgcgtttgcgttgttgggttggaccggaagccgcatgttcgaacgtgatctgcgccgctacgccacccacgagaagaagatgatgctggacaatcatgcgctgtatgacctgaccaagaaaatctttctcaaagctaaatcggaagaggaaattttcgcacatctggggcttgaatacctggaaccgtccgaacgtaacgca

SEQ ID NO: 172 - protein, 529 aa, synthetic construct
  REGION 1..529: note = Variant of terminal deoxynucleotidyltransferase
MHHHHHHGGSGMHRIRTIDSDFGKKRQKKMDNHISSMIYEIKFHEFVLFILEKKMGATRRTFLTDLARKKGFRVENELSDSVTHIVAENNSGSDVLAWLKTHKMEKTTQFELLDISWLIESMKVGKPVDTKGKYQLMESRVDSANPDPTAGTLNILPPTTKTISQYACQRRTTINNHNQRFTDALEILAENYEFKENDDTCLTFMRAISVLKCLPFEVVSLKDTEGLPWIGDEVKGIMEEIIEVGESLEVQAVLNDERYQSFKLFTSVFGVGLKTADKWYRMGFRTLNDVRSSKTLKLTKMQKAGLCYYEDLADGVTKAEADAVSLLVQDAVWTFDPDALVEITGGFRRGKEFGHDVDLLITSPGAEKEQEDQLLQKVTNLWKKQGLLLYGDLIASTFEDLKLPSRKIDALDHFQKCFLILKLYHHKEDKRKWEMPTGSNESEAKSWKAIRVDLVVCPYDRYAFALLGWTGSRMFERDLRRYATHEKKMMLDNHALYDLTKKIFLKAKSEEEIFAHLGLEYLEPSERNA

SEQ ID NO: 173 - DNA, 1587 bp, synthetic construct
  misc_feature 1..1587: note = Variant of terminal deoxynucleotidyltransferase
  source 1..1587: mol_type = other DNA
atgcaccatcatcatcatcatggcggtagcggcatgcaccgcattcgtaccatcgattcggacttcgggaagaaacgccagaagaagatggataaccacattagttccatgatctatgaaatcaaatttcacgagtttgtgctgttcattctcgaaaagaaaatgggtgcgacgcgtcgtacttttctgacagatttagcccgcaagaaagggttccgcgtcgagaatgaactgtcagacagcgttacccacatcgtggcagaaaataattcaggatctgacgtattggcttggctgaagacccacaagatggagaagacgacgcaatttgaactgctggatattagctggcttatcgaaagcatgaaagttggtaaaccggtggacaccaaggggaaataccagttgatggaatcgcgtgtcgatagtgcgaacccagatccgacagccggtaccctcaacattctgcctcctactacgaagaccatttctcagtatgcgtgtcaacgccgcaccaccatcaacaaccataatcagcgttttacggacgcactggaaattcttgcggaaaattacgagttcaaagaaaacgatgatacttgtctgacctttatgcgtgctatttccgtgctgaaatgccttccgtttgaggtagttagcctgaaagacacggaaggattgccctggatcggtgatgaagtcaaaggtattatggaagaaatcatcgaggtcggtgaatcgctggaagtgcaggccgtgctcaatgatgagcgctatcaaagcttcaaactgtttaccagtgtctttggagtggggctgaagacagcagacaaatggtaccgtatgggtttccgcacgctcaacgatgttcgttccagcaagaccctgaaattgaccaagatgcagaaagcgggtctgtgctattatgaagatcttgctgatggcgttacgaaagccgaagctgacgcggtatctctgctggttcaggatgcagtctggactttcgacccggatgcgctggtggagattacgggtggatttcgtcgtgggaaagagtttggtcacgacgttgatctgcttatcacatctccgggagctgagaaagaacaagaagaccagctcctgcagaaagtgaccaatctgtggaagaaacaagggttgttgctgtacggtgatctgatcgaaagtacctttgaagatctgaaactcccatcccgcaagattgatgccgcggaccattttcagaaatgctttctgatcctcaaactttatcaccataaagaggacaaacgcaaatgggaaatgccgacgggttcgaacgaaagcgaggccaaaagttggaaagcaattcgcgtagatctggttgtttgtccctacgatcgttatgcgtttgcgttgttgggttggaccggaagccgcatgttcgaacgtgatctgcgccgctacgccacccacgagaagaagatgatgctggacaatcatgcgctgtatgacctgaccaagaaaatctttctcaaagctaaatcggaagaggaaattttcgcacatctggggcttgaatacctggaaccgtccgaacgtaacgca

SEQ ID NO: 174 - protein, 529 aa, synthetic construct
  REGION 1..529: note = Variant of terminal deoxynucleotidyltransferase
MHHHHHHGGSGMHRIRTIDSDFGKKRQKKMDNHISSMIYEIKFHEFVLFILEKKMGATRRTFLTDLARKKGFRVENELSDSVTHIVAENNSGSDVLAWLKTHKMEKTTQFELLDISWLIESMKVGKPVDTKGKYQLMESRVDSANPDPTAGTLNILPPTTKTISQYACQRRTTINNHNQRFTDALEILAENYEFKENDDTCLTFMRAISVLKCLPFEVVSLKDTEGLPWIGDEVKGIMEEIIEVGESLEVQAVLNDERYQSFKLFTSVFGVGLKTADKWYRMGFRTLNDVRSSKTLKLTKMQKAGLCYYEDLADGVTKAEADAVSLLVQDAVWTFDPDALVEITGGFRRGKEFGHDVDLLITSPGAEKEQEDQLLQKVTNLWKKQGLLLYGDLIESTFEDLKLPSRKIDAADHFQKCFLILKLYHHKEDKRKWEMPTGSNESEAKSWKAIRVDLVVCPYDRYAFALLGWTGSRMFERDLRRYATHEKKMMLDNHALYDLTKKIFLKAKSEEEIFAHLGLEYLEPSERNA

SEQ ID NO: 175 - DNA, 1587 bp, synthetic construct
  misc_feature 1..1587: note = Variant of terminal deoxynucleotidyltransferase
  source 1..1587: mol_type = other DNA
atgcaccatcatcatcatcatggcggtagcggcatgcaccgcattcgtaccatcgattcggacttcgggaagaaacgccagaagaagatggataaccacattagttccatgatctatgaaatcaaatttcacgagtttgtgctgttcattctcgaaaagaaaatgggtgcgacgcgtcgtacttttctgacagatttagcccgcaagaaagggttccgcgtcgagaatgaactgtcagacagcgttacccacatcgtggcagaaaataattcaggatctgacgtattggcttggctgaagacccacaagatggagaagacgacgcaatttgaactgctggatattagctggcttatcgaaagcatgaaagttggtaaaccggtggacaccaaggggaaataccagttgatggaatcgcgtgtcgatagtgcgaacccagatccgacagccggtaccctcaacattctgcctcctactacgaagaccatttctcagtatgcgtgtcaacgccgcaccaccatcaacaaccataatcagcgttttacggacgcactggaaattcttgcggaaaattacgagttcaaagctaacgatgatacttgtctgacctttatgcgtgctatttccgtgctgaaatgccttccgtttgaggtagttagcctgaaagacacggaaggattgccctggatcggtgatgaagtcaaaggtattatggaagaaatcatcgaggtcggtgaatcgctggaagtgcaggccgtgctcaatgatgagcgctatcaaagcttcaaactgtttaccagtgtctttggagtggggctgaagacagcagacaaatggtaccgtatgggtttccgcacgctcaacgatgttcgttccagcaagaccctgaaattgaccaagatgcagaaagcgggtctgtgctattatgaagatcttgctgatggcgttacgaaagccgaagctgacgcggtatctctgctggttcaggatgcagtctggactttcgacccggatgcgctggtggagattacgggtggatttcgtcgtgggaaagagtttggtcacgacgttgatctgcttatcacatctccgggagctgagaaagaacaagaagaccagctcctgcagaaagtgaccaatctgtggaagaaacaagggttgttgctgtacggtgatctgatcgaaagtacctttgaagatctgaaactcccatcccgcaagattgatgccctggaccattttcagaaatgctttctgatcctcaaactttatcaccataaagaggacaaacgcaaatgggaaatgccgacgggttcgaacgaaagcgaggccaaaagttggaaagcaattcgcgtagatctggttgtttgtccctacgatcgttatgcgtttgcgttgttgggttggaccggaagccgcatgttcgaacgtgatctgcgccgctacgccacccacgagaagaagatgatgctggacaatcatgcgctgtatgacctgaccaagaaaatctttctcaaagctaaatcggaagaggaaattttcgcacatctggggcttgaatacctggaaccgtccgaacgtaacgca

SEQ ID NO: 176 - protein, 529 aa, synthetic construct
  REGION 1..529: note = Variant of terminal deoxynucleotidyltransferase
MHHHHHHGGSGMHRIRTIDSDFGKKRQKKMDNHISSMIYEIKFHEFVLFILEKKMGATRRTFLTDLARKKGFRVENELSDSVTHIVAENNSGSDVLAWLKTHKMEKTTQFELLDISWLIESMKVGKPVDTKGKYQLMESRVDSANPDPTAGTLNILPPTTKTISQYACQRRTTINNHNQRFTDALEILAENYEFKANDDTCLTFMRAISVLKCLPFEVVSLKDTEGLPWIGDEVKGIMEEIIEVGESLEVQAVLNDERYQSFKLFTSVFGVGLKTADKWYRMGFRTLNDVRSSKTLKLTKMQKAGLCYYEDLADGVTKAEADAVSLLVQDAVWTFDPDALVEITGGFRRGKEFGHDVDLLITSPGAEKEQEDQLLQKVTNLWKKQGLLLYGDLIESTFEDLKLPSRKIDALDHFQKCFLILKLYHHKEDKRKWEMPTGSNESEAKSWKAIRVDLVVCPYDRYAFALLGWTGSRMFERDLRRYATHEKKMMLDNHALYDLTKKIFLKAKSEEEIFAHLGLEYLEPSERNA

SEQ ID NO: 177 - DNA, 1587 bp, synthetic construct
  misc_feature 1..1587: note = Variant of terminal deoxynucleotidyltransferase
  source 1..1587: mol_type = other DNA
atgcaccatcatcatcatcatggcggtagcggcatgcaccgcattcgtaccatcgattcggacttcgggaagaaacgccagaagaagatggataaccacattagttccatgatctatgaaatcaaatttcacgagtttgtgctgttcattctcgaaaagaaaatgggtgcgacgcgtcgtacttttctgacagatttagcccgcaagaaagggttccgcgtcgagaatgaactgtcagacagcgttacccacatcgtggcagaaaataattcaggatctgacgtattggcttggctgaagacccacaagatggagaagacgacgcaatttgaactgctggatattagctggcttatcgaaagcatgaaagttggtaaaccggtggacaccaaggggaaataccagttgatggaatcgcgtgtcgatagtgcgaacccagatccgacagccggtaccctcaacattctgcctcctactacgaagaccatttctcagtatgcgtgtcaacgccgcaccaccatcaacaaccataatcagcgttttacggacgcactggaaattcttgcggaaaattacgagttcaaatggaacgatgatacttgtctgacctttatgcgtgctatttccgtgctgaaatgccttccgtttgaggtagttagcctgaaagacacggaaggattgccctggatcggtgatgaagtcaaaggtattatggaagaaatcatcgaggtcggtgaatcgctggaagtgcaggccgtgctcaatgatgagcgctatcaaagcttcaaactgtttaccagtgtctttggagtggggctgaagacagcagacaaatggtaccgtatgggtttccgcacgctcaacgatgttcgttccagcaagaccctgaaattgaccaagatgcagaaagcgggtctgtgctattatgaagatcttgctgatggcgttacgaaagccgaagctgacgcggtatctctgctggttcaggatgcagtctggactttcgacccggatgcgctggtggagattacgggtggatttcgtcgtgggaaagagtttggtcacgacgttgatctgcttatcacatctccgggagctgagaaagaacaagaagaccagctcctgcagaaagtgaccaatctgtggaagaaacaagggttgttgctgtacggtgatctgatcgaaagtacctttgaagatctgaaactcccatcccgcaagattgatgccctggaccattttcagaaatgctttctgatcctcaaactttatcaccataaagaggacaaacgcaaatgggaaatgccgacgggttcgaacgaaagcgaggccaaaagttggaaagcaattcgcgtagatctggttgtttgtccctacgatcgttatgcgtttgcgttgttgggttggaccggaagccgcatgttcgaacgtgatctgcgccgctacgccacccacgagaagaagatgatgctggacaatcatgcgctgtatgacctgaccaagaaaatctttctcaaagctaaatcggaagaggaaattttcgcacatctggggcttgaatacctggaaccgtccgaacgtaacgca

SEQ ID NO: 178 - protein, 529 aa, synthetic construct
  REGION 1..529: note = Variant of terminal deoxynucleotidyltransferase
MHHHHHHGGSGMHRIRTIDSDFGKKRQKKMDNHISSMIYEIKFHEFVLFILEKKMGATRRTFLTDLARKKGFRVENELSDSVTHIVAENNSGSDVLAWLKTHKMEKTTQFELLDISWLIESMKVGKPVDTKGKYQLMESRVDSANPDPTAGTLNILPPTTKTISQYACQRRTTINNHNQRFTDALEILAENYEFKWNDDTCLTFMRAISVLKCLPFEVVSLKDTEGLPWIGDEVKGIMEEIIEVGESLEVQAVLNDERYQSFKLFTSVFGVGLKTADKWYRMGFRTLNDVRSSKTLKLTKMQKAGLCYYEDLADGVTKAEADAVSLLVQDAVWTFDPDALVEITGGFRRGKEFGHDVDLLITSPGAEKEQEDQLLQKVTNLWKKQGLLLYGDLIESTFEDLKLPSRKIDALDHFQKCFLILKLYHHKEDKRKWEMPTGSNESEAKSWKAIRVDLVVCPYDRYAFALLGWTGSRMFERDLRRYATHEKKMMLDNHALYDLTKKIFLKAKSEEEIFAHLGLEYLEPSERNA

SEQ ID NO: 179 - DNA, 1587 bp, synthetic construct
  misc_feature 1..1587: note = Variant of terminal deoxynucleotidyltransferase
  source 1..1587: mol_type = other DNA
atgcaccatcatcatcatcatggcggtagcggcatgcaccgcattcgtaccatcgattcggacttcgggaagaaacgccagaagaagatggataaccacattagttccatgatctatgaaatcaaatttcacgagtttgtgctgttcattctcgaaaagaaaatgggtgcgacgcgtcgtacttttctgacagatttagcccgcaagaaagggttccgcgtcgagaatgaactgtcagacagcgttacccacatcgtggcagaaaataattcaggatctgacgtattggcttggctgaagacccacaagatggagaagacgacgcaatttgaactgctggatattagctggcttatcgaaagcatgaaagttggtaaaccggtggacaccaaggggaaataccagttgatggaatcgcgtgtcgatagtgcgaacccagatccgacagccggtaccctcaacattctgcctcctactacgaagaccatttctcagtatgcgtgtcaacgccgcaccaccatcaacaaccataatcagcgttttacggacgcactggaaattcttgcggaaaattacgagttcaaagaaaacgatgatacttgtctgacctttatgcgtgctatttccgtgctgaaatgccttccgtttgaggtagttagcctgaaagacacggaaggattgccctggatcggtgatgaagtcaaaggtattatggaagaaatcatcgaggtcggtgaatcgctggaagtgcaggccgtgctcaatgatgagcgctatcaaagcttcaaactgtttaccagtgtctttggagtggggctgaagacagcagacaaatggtaccgtatgggtttccgcacgctcaacgatgttcgttccagcaagaccctgaaattgaccaagatgcagaaagcgggtctgtgctattatgaagatcttgctgatggcgttacgaaagccgaagctgacgcggtatctctgctggttcaggatgcagtctggactttcgacccggatgcgctggtggagattacgggtggatttcgtcgtgggaaagagtttggtcacgacgttgatctgcttatcacatctccgggagctgagaaagaacaagaagaccagctcctgcagaaagtgaccaatctgtggaagaaacaagggttgttgctgtacggtgatctgatcgaaagtacctttgaagatctgaaactcccatcccgcaagattgatgccggtgaccattttcagaaatgctttctgatcctcaaactttatcaccataaagaggacaaacgcaaatgggaaatgccgacgggttcgaacgaaagcgaggccaaaagttggaaagcaattcgcgtagatctggttgtttgtccctacgatcgttatgcgtttgcgttgttgggttggaccggaagccgcatgttcgaacgtgatctgcgccgctacgccacccacgagaagaagatgatgctggacaatcatgcgctgtatgacctgaccaagaaaatctttctcaaagctaaatcggaagaggaaattttcgcacatctggggcttgaatacctggaaccgtccgaacgtaacgca

SEQ ID NO: 180 - protein, 529 aa, synthetic construct
  REGION 1..529: note = Variant of terminal deoxynucleotidyltransferase
MHHHHHHGGSGMHRIRTIDSDFGKKRQKKMDNHISSMIYEIKFHEFVLFILEKKMGATRRTFLTDLARKKGFRVENELSDSVTHIVAENNSGSDVLAWLKTHKMEKTTQFELLDISWLIESMKVGKPVDTKGKYQLMESRVDSANPDPTAGTLNILPPTTKTISQYACQRRTTINNHNQRFTDALEILAENYEFKENDDTCLTFMRAISVLKCLPFEVVSLKDTEGLPWIGDEVKGIMEEIIEVGESLEVQAVLNDERYQSFKLFTSVFGVGLKTADKWYRMGFRTLNDVRSSKTLKLTKMQKAGLCYYEDLADGVTKAEADAVSLLVQDAVWTFDPDALVEITGGFRRGKEFGHDVDLLITSPGAEKEQEDQLLQKVTNLWKKQGLLLYGDLIESTFEDLKLPSRKIDAGDHFQKCFLILKLYHHKEDKRKWEMPTGSNESEAKSWKAIRVDLVVCPYDRYAFALLGWTGSRMFERDLRRYATHEKKMMLDNHALYDLTKKIFLKAKSEEEIFAHLGLEYLEPSERNA

SEQ ID NO: 181 - DNA, 1587 bp, synthetic construct
  misc_feature 1..1587: note = Variant of terminal deoxynucleotidyltransferase
  source 1..1587: mol_type = other DNA
atgcaccatcatcatcatcatggcggtagcggcatgcaccgcattcgtaccatcgattcggacttcgggaagaaacgccagaagaagatggataaccacattagttccatgatctatgaaatcaaatttcacgagtttgtgctgttcattctcgaaaagaaaatgggtgcgacgcgtcgtacttttctgacagatttagcccgcaagaaagggttccgcgtcgagaatgaactgtcagacagcgttacccacatcgtggcagaaaataattcaggatctgacgtattggcttggctgaagacccacaagatggagaagacgacgcaatttgaactgctggatattagctggcttatcgaaagcatgaaagttggtaaaccggtggacaccaaggggaaataccagttgatggaatcgcgtgtcgatagtgcgaacccagatccgacagccggtaccctcaacattctgcctcctactacgaagaccatttctcagtatgcgtgtcaacgccgcaccaccatcaacaaccataatcagcgttttacggacgcactggaaattcttgcggaaaattacgagttcaaagaaaacgatgatacttgtctgacctttatgcgtgctatttccgtgctgaaatgccttccgtttgaggtagttagcctgaaagacacggaaggattgccctggatcggtgatgaagtcaaaggtattatggaagaaatcatcgaggtcggtgaatcgctggaagtgcaggccgtgctcaatgatgagcgctatcaaagcttcaaactgtttaccagtgtctttggagtggggctgaagacagcagacaaatggtaccgtatgggtttccgcacgctcaacgatgttcgttccagcaagaccctgaaattgaccaagatgcagaaagcgggtctgtgctattatgaagatcttgctgatggcgttacgaaagccaatgctgacgcggtatctctgctggttcaggatgcagtctggactttcgacccggatgcgctggtggagattacgggtggatttcgtcgtgggaaagagtttggtcacgacgttgatctgcttatcacatctccgggagctgagaaagaacaagaagaccagctcctgcagaaagtgaccaatctgtggaagaaacaagggttgttgctgtacggtgatctgatcgaaagtacctttgaagatctgaaactcccatcccgcaagattgatgccctggaccattttcagaaatgctttctgatcctcaaactttatcaccataaagaggacaaacgcaaatgggaaatgccgacgggttcgaacgaaagcgaggccaaaagttggaaagcaattcgcgtagatctggttgtttgtccctacgatcgttatgcgtttgcgttgttgggttggaccggaagccgcatgttcgaacgtgatctgcgccgctacgccacccacgagaagaagatgatgctggacaatcatgcgctgtatgacctgaccaagaaaatctttctcaaagctaaatcggaagaggaaattttcgcacatctggggcttgaatacctggaaccgtccgaacgtaacgca

SEQ ID NO: 182 - protein, 529 aa, synthetic construct
  REGION 1..529: note = Variant of terminal deoxynucleotidyltransferase
MHHHHHHGGSGMHRIRTIDSDFGKKRQKKMDNHISSMIYEIKFHEFVLFILEKKMGATRRTFLTDLARKKGFRVENELSDSVTHIVAENNSGSDVLAWLKTHKMEKTTQFELLDISWLIESMKVGKPVDTKGKYQLMESRVDSANPDPTAGTLNILPPTTKTISQYACQRRTTINNHNQRFTDALEILAENYEFKENDDTCLTFMRAISVLKCLPFEVVSLKDTEGLPWIGDEVKGIMEEIIEVGESLEVQAVLNDERYQSFKLFTSVFGVGLKTADKWYRMGFRTLNDVRSSKTLKLTKMQKAGLCYYEDLADGVTKANADAVSLLVQDAVWTFDPDALVEITGGFRRGKEFGHDVDLLITSPGAEKEQEDQLLQKVTNLWKKQGLLLYGDLIESTFEDLKLPSRKIDALDHFQKCFLILKLYHHKEDKRKWEMPTGSNESEAKSWKAIRVDLVVCPYDRYAFALLGWTGSRMFERDLRRYATHEKKMMLDNHALYDLTKKIFLKAKSEEEIFAHLGLEYLEPSERNA

SEQ ID NO: 183 - DNA, 1587 bp, synthetic construct
  misc_feature 1..1587: note = Variant of terminal deoxynucleotidyltransferase
  source 1..1587: mol_type = other DNA
atgcaccatcatcatcatcatggcggtagcggcatgcaccgcattcgtaccatcgattcggacttcgggaagaaacgccagaagaagatggataaccacattagttccatgatctatgaaatcaaatttcacgagtttgtgctgttcattctcgaaaagaaaatgggtgcgacgcgtcgtacttttctgacagatttagcccgcaagaaagggttccgcgtcgagaatgaactgtcagacagcgttacccacatcgtggcagaaaataattcaggatctgacgtattggcttggctgaagacccacaagatggagaagacgacgcaatttgaactgctggatattagctggcttatcgaaagcatgaaagttggtaaaccggtggacaccaaggggaaataccagttgatggaatcgcgtgtcgatagtgcgaacccagatccgacagccggtaccctcaacattctgcctcctactacgaagaccatttctcagtatgcgtgtcaacgccgcaccaccatcaacaaccataatcagcgttttacggacgcactggaaattcttgcggaaaattacgagttcaaatataacgatgatacttgtctgacctttatgcgtgctatttccgtgctgaaatgccttccgtttgaggtagttagcctgaaagacacggaaggattgccctggatcggtgatgaagtcaaaggtattatggaagaaatcatcgaggtcggtgaatcgctggaagtgcaggccgtgctcaatgatgagcgctatcaaagcttcaaactgtttaccagtgtctttggagtggggctgaagacagcagacaaatggtaccgtatgggtttccgcacgctcaacgatgttcgttccagcaagaccctgaaattgaccaagatgcagaaagcgggtctgtgctattatgaagatcttgctgatggcgttacgaaagccgaagctgacgcggtatctctgctggttcaggatgcagtctggactttcgacccggatgcgctggtggagattacgggtggatttcgtcgtgggaaagagtttggtcacgacgttgatctgcttatcacatctccgggagctgagaaagaacaagaagaccagctcctgcagaaagtgaccaatctgtggaagaaacaagggttgttgctgtacggtgatctgatcgaaagtacctttgaagatctgaaactcccatcccgcaagattgatgccctggaccattttcagaaatgctttctgatcctcaaactttatcaccataaagaggacaaacgcaaatgggaaatgccgacgggttcgaacgaaagcgaggccaaaagttggaaagcaattcgcgtagatctggttgtttgtccctacgatcgttatgcgtttgcgttgttgggttggaccggaagccgcatgttcgaacgtgatctgcgccgctacgccacccacgagaagaagatgatgctggacaatcatgcgctgtatgacctgaccaagaaaatctttctcaaagctaaatcggaagaggaaattttcgcacatctggggcttgaatacctggaaccgtccgaacgtaacgca

SEQ ID NO: 184 - protein, 529 aa, synthetic construct
  REGION 1..529: note = Variant of terminal deoxynucleotidyltransferase
MHHHHHHGGSGMHRIRTIDSDFGKKRQKKMDNHISSMIYEIKFHEFVLFILEKKMGATRRTFLTDLARKKGFRVENELSDSVTHIVAENNSGSDVLAWLKTHKMEKTTQFELLDISWLIESMKVGKPVDTKGKYQLMESRVDSANPDPTAGTLNILPPTTKTISQYACQRRTTINNHNQRFTDALEILAENYEFKYNDDTCLTFMRAISVLKCLPFEVVSLKDTEGLPWIGDEVKGIMEEIIEVGESLEVQAVLNDERYQSFKLFTSVFGVGLKTADKWYRMGFRTLNDVRSSKTLKLTKMQKAGLCYYEDLADGVTKAEADAVSLLVQDAVWTFDPDALVEITGGFRRGKEFGHDVDLLITSPGAEKEQEDQLLQKVTNLWKKQGLLLYGDLIESTFEDLKLPSRKIDALDHFQKCFLILKLYHHKEDKRKWEMPTGSNESEAKSWKAIRVDLVVCPYDRYAFALLGWTGSRMFERDLRRYATHEKKMMLDNHALYDLTKKIFLKAKSEEEIFAHLGLEYLEPSERNA

SEQ ID NO: 185 - DNA, 1587 bp, synthetic construct
  misc_feature 1..1587: note = Variant of terminal deoxynucleotidyltransferase
  source 1..1587: mol_type = other DNA
atgcaccatcatcatcatcatggcggtagcggcatgcaccgcattcgtaccatcgattcggacttcgggaagaaacgccagaagaagatggataaccacattagttccatgatctatgaaatcaaatttcacgagtttgtgctgttcattctcgaaaagaaaatgggtgcgacgcgtcgtacttttctgacagatttagcccgcaagaaagggttccgcgtcgagaatgaactgtcagacagcgttacccacatcgtggcagaaaataattcaggatctgacgtattggcttggctgaagacccacaagatggagaagacgacgcaatttgaactgctggatattagctggcttatcgaaagcatgaaagttggtaaaccggtggacaccaaggggaaataccagttgatggaatcgcgtgtcgatagtgcgaacccagatccgacagccggtaccctcaacattctgcctcctactacgaagaccatttctcagtatgcgtgtcaacgccgcaccaccatcaacaaccataatcagcgttttacggacgcactggaaattcttgcggaaaattactgtttcaaagaaaacgatgatacttgtctgacctttatgcgtgctatttccgtgctgaaatgccttccgtttgaggtagttagcctgaaagacacggaaggattgccctggatcggtgatgaagtcaaaggtattatggaagaaatcatcgaggtcggtgaatcgctggaagtgcaggccgtgctcaatgatgagcgctatcaaagcttcaaactgtttaccagtgtctttggagtggggctgaagacagcagacaaatggtaccgtatgggtttccgcacgctcaacgatgttcgttccagcaagaccctgaaattgaccaagatgcagaaagcgggtctgtgctattatgaagatcttgctgatggcgttacgaaagccgaagctgacgcggtatctctgctggttcaggatgcagtctggactttcgacccggatgcgctggtggagattacgggtggatttcgtcgtgggaaagagtttggtcacgacgttgatctgcttatcacatctccgggagctgagaaagaacaagaagaccagctcctgcagaaagtgaccaatctgtggaagaaacaagggttgttgctgtacggtgatctgatcgaaagtacctttgaagatctgaaactcccatcccgcaagattgatgccctggaccattttcagaaatgctttctgatcctcaaactttatcaccataaagaggacaaacgcaaatgggaaatgccgacgggttcgaacgaaagcgaggccaaaagttggaaagcaattcgcgtagatctggttgtttgtccctacgatcgttatgcgtttgcgttgttgggttggaccggaagccgcatgttcgaacgtgatctgcgccgctacgccacccacgagaagaagatgatgctggacaatcatgcgctgtatgacctgaccaagaaaatctttctcaaagctaaatcggaagaggaaattttcgcacatctggggcttgaatacctggaaccgtccgaacgtaacgca

SEQ ID NO: 186 - protein, 529 aa, synthetic construct
  REGION 1..529: note = Variant of terminal deoxynucleotidyltransferase
MHHHHHHGGSGMHRIRTIDSDFGKKRQKKMDNHISSMIYEIKFHEFVLFILEKKMGATRRTFLTDLARKKGFRVENELSDSVTHIVAENNSGSDVLAWLKTHKMEKTTQFELLDISWLIESMKVGKPVDTKGKYQLMESRVDSANPDPTAGTLNILPPTTKTISQYACQRRTTINNHNQRFTDALEILAENYCFKENDDTCLTFMRAISVLKCLPFEVVSLKDTEGLPWIGDEVKGIMEEIIEVGESLEVQAVLNDERYQSFKLFTSVFGVGLKTADKWYRMGFRTLNDVRSSKTLKLTKMQKAGLCYYEDLADGVTKAEADAVSLLVQDAVWTFDPDALVEITGGFRRGKEFGHDVDLLITSPGAEKEQEDQLLQKVTNLWKKQGLLLYGDLIESTFEDLKLPSRKIDALDHFQKCFLILKLYHHKEDKRKWEMPTGSNESEAKSWKAIRVDLVVCPYDRYAFALLGWTGSRMFERDLRRYATHEKKMMLDNHALYDLTKKIFLKAKSEEEIFAHLGLEYLEPSERNA

SEQ ID NO: 187 - DNA, 1587 bp, synthetic construct
  misc_feature 1..1587: note = Variant of terminal deoxynucleotidyltransferase
  source 1..1587: mol_type = other DNA
atgcaccatcatcatcatcatggcggtagcggcatgcaccgcattcgtaccatcgattcggacttcgggaagaaacgccagaagaagatggataaccacattagttccatgatctatgaaatcaaatttcacgagtttgtgctgttcattctcgaaaagaaaatgggtgcgacgcgtcgtacttttctgacagatttagcccgcaagaaagggttccgcgtcgagaatgaactgtcagacagcgttacccacatcgtggcagaaaataattcaggatctgacgtattggcttggctgaagacccacaagatggagaagacgacgcaatttgaactgctggatattagctggcttatcgaaagcatgaaagttggtaaaccggtggacaccaaggggaaataccagttgatggaatcgcgtgtcgatagtgcgaacccagatccgacagccggtaccctcaacattctgcctcctactacgaagaccatttctcagtatgcgtgtcaacgccgcaccaccatcaacaaccataatcagcgttttacggacgcactggaaattcttgcggaaaattacgagttcaaagaaaacgatgatacttgtctgacctttatgcgtgctatttccgtgctgaaatgccttccgtttgaggtagttagcctgaaagacacggaaggattgccctggatcggtgatgaagtcaaaggtattatggaagaaatcatcgaggtcggtgaatcgctggaagtgcaggccgtgctcaatgatgagcgctatcaaagcttcaaactgtttaccagttgttttggagtggggctgaagacagcagacaaatggtaccgtatgggtttccgcacgctcaacgatgttcgttccagcaagaccctgaaattgaccaagatgcagaaagcgggtctgtgctattatgaagatcttgctgatggcgttacgaaagccgaagctgacgcggtatctctgctggttcaggatgcagtctggactttcgacccggatgcgctggtggagattacgggtggatttcgtcgtgggaaagagtttggtcacgacgttgatctgcttatcacatctccgggagctgagaaagaacaagaagaccagctcctgcagaaagtgaccaatctgtggaagaaacaagggttgttgctgtacggtgatctgatcgaaagtacctttgaagatctgaaactcccatcccgcaagattgatgccctggaccattttcagaaatgctttctgatcctcaaactttatcaccataaagaggacaaacgcaaatgggaaatgccgacgggttcgaacgaaagcgaggccaaaagttggaaagcaattcgcgtagatctggttgtttgtccctacgatcgttatgcgtttgcgttgttgggttggaccggaagccgcatgttcgaacgtgatctgcgccgctacgccacccacgagaagaagatgatgctggacaatcatgcgctgtatgacctgaccaagaaaatctttctcaaagctaaatcggaagaggaaattttcgcacatctggggcttgaatacctggaaccgtccgaacgtaacgca

SEQ ID NO: 188 - protein, 529 aa, synthetic construct
  REGION 1..529: note = Variant of terminal deoxynucleotidyltransferase
MHHHHHHGGSGMHRIRTIDSDFGKKRQKKMDNHISSMIYEIKFHEFVLFILEKKMGATRRTFLTDLARKKGFRVENELSDSVTHIVAENNSGSDVLAWLKTHKMEKTTQFELLDISWLIESMKVGKPVDTKGKYQLMESRVDSANPDPTAGTLNILPPTTKTISQYACQRRTTINNHNQRFTDALEILAENYEFKENDDTCLTFMRAISVLKCLPFEVVSLKDTEGLPWIGDEVKGIMEEIIEVGESLEVQAVLNDERYQSFKLFTSCFGVGLKTADKWYRMGFRTLNDVRSSKTLKLTKMQKAGLCYYEDLADGVTKAEADAVSLLVQDAVWTFDPDALVEITGGFRRGKEFGHDVDLLITSPGAEKEQEDQLLQKVTNLWKKQGLLLYGDLIESTFEDLKLPSRKIDALDHFQKCFLILKLYHHKEDKRKWEMPTGSNESEAKSWKAIRVDLVVCPYDRYAFALLGWTGSRMFERDLRRYATHEKKMMLDNHALYDLTKKIFLKAKSEEEIFAHLGLEYLEPSERNA

SEQ ID NO: 189 - DNA, 1587 bp, synthetic construct
  misc_feature 1..1587: note = Variant of terminal deoxynucleotidyltransferase
  source 1..1587: mol_type = other DNA
atgcaccatcatcatcatcatggcggtagcggcatgcaccgcattcgtaccatcgattcggacttcgggaagaaacgccagaagaagatggataaccacattagttccatgatctatgaaatcaaatttcacgagtttgtgctgttcattctcgaaaagaaaatgggtgcgacgcgtcgtacttttctgacagatttagcccgcaagaaagggttccgcgtcgagaatgaactgtcagacagcgttacccacatcgtggcagaaaataattcaggatctgacgtattggcttggctgaagacccacaagatggagaagacgacgcaatttgaactgctggatattagctggcttatcgaaagcatgaaagttggtaaaccggtggacaccaaggggaaataccagttgatggaatcgcgtgtcgatagtgcgaacccagatccgacagccggtaccctcaacattctgcctcctactacgaagaccatttctcagtatgcgtgtcaacgccgcaccaccatcaacaaccataatcagcgttttacggacgcactggaaattcttgcggaaaattacgagttcaaagaaaacgatgatacttgtctgacctttatgcgtgctatttccgtgctgaaatgccttccgtttgaggtagttagcctgaaagacacggaaggattgccctggatcggtgatgaagtcaaaggtattatggaagaaatcatcgaggtcggtgaatcgctggaagtgcaggccgtgctcaatgatgagcgctatcaaagcttcaaactgtttaccagtgtctttggagtggggctgaagacagcagacaaatggtaccgtatgggtttccgcacgctcaacgatgttcgttccagcaagaccctgcggttgaccaagatgcagaaagcgggtctgtgctattatgaagatcttgctgatggcgttacgaaagccgaagctgacgcggtatctctgctggttcaggatgcagtctggactttcgacccggatgcgctggtggagattacgggtggatttcgtcgtgggaaagagtttggtcacgacgttgatctgcttatcacatctccgggagctgagaaagaacaagaagaccagctcctgcagaaagtgaccaatctgtggaagaaacaagggttgttgctgtacggtgatctgatcgaaagtacctttgaagatctgaaactcccatcccgcaagattgatgccctggaccattttcagaaatgctttctgatcctcaaactttatcaccataaagaggacaaacgcaaatgggaaatgccgacgggttcgaacgaaagcgaggccaaaagttggaaagcaattcgcgtagatctggttgtttgtccctacgatcgttatgcgtttgcgttgttgggttggaccggaagccgcatgttcgaacgtgatctgcgccgctacgccacccacgagaagaagatgatgctggacaatcatgcgctgtatgacctgaccaagaaaatctttctcaaagctaaatcggaagaggaaattttcgcacatctggggcttgaatacctggaaccgtccgaacgtaacgca

SEQ ID NO: 190 - protein, 529 aa, synthetic construct
  REGION 1..529: note = Variant of terminal deoxynucleotidyltransferase
MHHHHHHGGSGMHRIRTIDSDFGKKRQKKMDNHISSMIYEIKFHEFVLFILEKKMGATRRTFLTDLARKKGFRVENELSDSVTHIVAENNSGSDVLAWLKTHKMEKTTQFELLDISWLIESMKVGKPVDTKGKYQLMESRVDSANPDPTAGTLNILPPTTKTISQYACQRRTTINNHNQRFTDALEILAENYEFKENDDTCLTFMRAISVLKCLPFEVVSLKDTEGLPWIGDEVKGIMEEIIEVGESLEVQAVLNDERYQSFKLFTSVFGVGLKTADKWYRMGFRTLNDVRSSKTLRLTKMQKAGLCYYEDLADGVTKAEADAVSLLVQDAVWTFDPDALVEITGGFRRGKEFGHDVDLLITSPGAEKEQEDQLLQKVTNLWKKQGLLLYGDLIESTFEDLKLPSRKIDALDHFQKCFLILKLYHHKEDKRKWEMPTGSNESEAKSWKAIRVDLVVCPYDRYAFALLGWTGSRMFERDLRRYATHEKKMMLDNHALYDLTKKIFLKAKSEEEIFAHLGLEYLEPSERNA

SEQ ID NO: 191 - DNA, 1587 bp, synthetic construct
  misc_feature 1..1587: note = Variant of terminal deoxynucleotidyltransferase
  source 1..1587: mol_type = other DNA
atgcaccatcatcatcatcatggcggtagcggcatgcaccgcattcgtaccatcgattcggacttcgggaagaaacgccagaagaagatggataaccacattagttccatgatctatgaaatcaaatttcacgagtttgtgctgttcattctcgaaaagaaaatgggtgcgacgcgtcgtacttttctgacagatttagcccgcaagaaagggttccgcgtcgagaatgaactgtcagacagcgttacccacatcgtggcagaaaataattcaggatctgacgtattggcttggctgaagacccacaagatggagaagacgacgcaatttgaactgctggatattagctggcttatcgaaagcatgaaagttggtaaaccggtggacaccaaggggaaataccagttgatggaatcgcgtgtcgatagtgcgaacccagatccgacagccggtaccctcaacattctgcctcctactacgaagaccatttctcagtatgcgtgtcaacgccgcaccaccatcaacaaccataatcagcgttttacggacgcactggaaattcttgcggaaaattacgagttcaaagaaaacgatgatacttgtctgacctttatgcgtgctatttccgtgctgaaatgccttccgtttgaggtagttagcctgaaagacacggaaggattgccctggatcggtgatgaagtcaaaggtattatggaagaaatcatcgaggtcggtgaatcgctggaagtgcaggccgtgctcaatgatgagcgctatcaaagcttcaaactgtttaccagtgtctttggagtggggctgaagacagcagacaaatggtaccgtatgggtttccgcacgctcaacgatgttcgttccagcaagaccctgaaattgaccaagatgcagaaagcgggtctgtgctattatgaagatcttgctgatggcgttacgaaagccgaagctgacgcggtatctctgctggttcaggatgcagtctggactttcgacccggatgcgctggtggagattacgggtggatttcgtcgtgggaaagagtttggtcacgacgttgatctgcttatcacatctccgggagctgagaaagaacaagaagaccagctcctgcagaaagtgaccaatctgtggaagaaacaagggttgttgctgtacggtgatctgatcgaaagtacctttgaagatctgaaactcccatcccgcaagattgatgccctggaccattttcagaaatgctttctgatcctcaaactttatcaccataaagaggacaaacgcaaatgggaaatgccgacgggttcgaacgaaagcgaggccaaaagttggaaagcaattcgcgtagatctggttgtttgtccctacgatcgttatgcgtttgcgttgttgggttggaccggaagccgcatgttcgaacgtgatctgcgcgagtacgccacccacgagaagaagatgatgctggacaatcatgcgctgtatgacctgaccaagaaaatctttctcaaagctaaatcggaagaggaaattttcgcacatctggggcttgaatacctggaaccgtccgaacgtaacgca

SEQ ID NO: 192 - protein, 529 aa, synthetic construct
  REGION 1..529: note = Variant of terminal deoxynucleotidyltransferase
MHHHHHHGGSGMHRIRTIDSDFGKKRQKKMDNHISSMIYEIKFHEFVLFILEKKMGATRRTFLTDLARKKGFRVENELSDSVTHIVAENNSGSDVLAWLKTHKMEKTTQFELLDISWLIESMKVGKPVDTKGKYQLMESRVDSANPDPTAGTLNILPPTTKTISQYACQRRTTINNHNQRFTDALEILAENYEFKENDDTCLTFMRAISVLKCLPFEVVSLKDTEGLPWIGDEVKGIMEEIIEVGESLEVQAVLNDERYQSFKLFTSVFGVGLKTADKWYRMGFRTLNDVRSSKTLKLTKMQKAGLCYYEDLADGVTKAEADAVSLLVQDAVWTFDPDALVEITGGFRRGKEFGHDVDLLITSPGAEKEQEDQLLQKVTNLWKKQGLLLYGDLIESTFEDLKLPSRKIDALDHFQKCFLILKLYHHKEDKRKWEMPTGSNESEAKSWKAIRVDLVVCPYDRYAFALLGWTGSRMFERDLREYATHEKKMMLDNHALYDLTKKIFLKAKSEEEIFAHLGLEYLEPSERNA

SEQ ID NO: 193 - DNA, 1587 bp, synthetic construct
  misc_feature 1..1587: note = Variant of terminal deoxynucleotidyltransferase
  source 1..1587: mol_type = other DNA
atgcaccatcatcatcatcatggcggtagcggcatgcaccgcattcgtaccatcgattcggacttcgggaagaaacgccagaagaagatggataaccacattagttccatgatctatgaaatcaaatttcacgagtttgtgctgttcattctcgaaaagaaaatgggtgcgacgcgtcgtacttttctgacagatttagcccgcaagaaagggttccgcgtcgagaatgaactgtcagacagcgttacccacatcgtggcagaaaataattcaggatctgacgtattggcttggctgaagacccacaagatggagaagacgacgcaatttgaactgctggatattagctggcttatcgaaagcatgaaagttggtaaaccggtggacaccaaggggaaataccagttgatggaatcgcgtgtcgatagtgcgaacccagatccgacagccggtaccctcaacattctgcctcctactacgaagaccatttctcagtatgcgtgtcaacgccgcaccaccatcaacaaccataatcagcgttttacggacgcactggaaattcttgcggaaaattacgagttcaaagaaaacgatgatacttgtctgacctttatgcgtgctatttccgtgctgaaatgccttccgtttgaggtagttagcctgaaagacacggaaggattgccctggatcggtgatgaagtcaaaggtattatggaagaaatcatcgaggtcggtgaatcgctggaagtgcaggccgtgctcaatgatgagcgctatcaaagcttcaaactgtttaccagtgtctttggagtggggctgaagacagcagacaaatggtaccgtatgggtttccgcacgctcaacgatgttcgttccagcaagaccctgaaattgaccaagatgcagaaagcgggtctgtgctattatgaagatcttgctgatggcgttacgaaagccgaagctgacgcgatttctctgctggttcaggatgcagtctggactttcgacccggatgcgctggtggagattacgggtggatttcgtcgtgggaaagagtttggtcacgacgttgatctgcttatcacatctccgggagctgagaaagaacaagaagaccagctcctgcagaaagtgaccaatctgtggaagaaacaagggttgttgctgtacggtgatctgatcgaaagtacctttgaagatctgaaactcccatcccgcaagattgatgccctggaccattttcagaaatgctttctgatcctcaaactttatcaccataaagaggacaaacgcaaatgggaaatgccgacgggttcgaacgaaagcgaggccaaaagttggaaagcaattcgcgtagatctggttgtttgtccctacgatcgttatgcgtttgcgttgttgggttggaccggaagccgcatgttcgaacgtgatctgcgccgctacgccacccacgagaagaagatgatgctggacaatcatgcgctgtatgacctgaccaagaaaatctttctcaaagctaaatcggaagaggaaattttcgcacatctggggcttgaatacctggaaccgtccgaacgtaacgca

SEQ ID NO: 194 - protein, 529 aa, synthetic construct
  REGION 1..529: note = Variant of terminal deoxynucleotidyltransferase
MHHHHHHGGSGMHRIRTIDSDFGKKRQKKMDNHISSMIYEIKFHEFVLFILEKKMGATRRTFLTDLARKKGFRVENELSDSVTHIVAENNSGSDVLAWLKTHKMEKTTQFELLDISWLIESMKVGKPVDTKGKYQLMESRVDSANPDPTAGTLNILPPTTKTISQYACQRRTTINNHNQRFTDALEILAENYEFKENDDTCLTFMRAISVLKCLPFEVVSLKDTEGLPWIGDEVKGIMEEIIEVGESLEVQAVLNDERYQSFKLFTSVFGVGLKTADKWYRMGFRTLNDVRSSKTLKLTKMQKAGLCYYEDLADGVTKAEADAISLLVQDAVWTFDPDALVEITGGFRRGKEFGHDVDLLITSPGAEKEQEDQLLQKVTNLWKKQGLLLYGDLIESTFEDLKLPSRKIDALDHFQKCFLILKLYHHKEDKRKWEMPTGSNESEAKSWKAIRVDLVVCPYDRYAFALLGWTGSRMFERDLRRYATHEKKMMLDNHALYDLTKKIFLKAKSEEEIFAHLGLEYLEPSERNA

SEQ ID NO: 195 - DNA, 1587 bp, synthetic construct
  misc_feature 1..1587: note = Variant of terminal deoxynucleotidyltransferase
  source 1..1587: mol_type = other DNA
atgcaccatcatcatcatcatggcggtagcggcatgcaccgcattcgtaccatcgattcggacttcgggaagaaacgccagaagaagatggataaccacattagttccatgatctatgaaatcaaatttcacgagtttgtgctgttcattctcgaaaagaaaatgggtgcgacgcgtcgtacttttctgacagatttagcccgcaagaaagggttccgcgtcgagaatgaactgtcagacagcgttacccacatcgtggcagaaaataattcaggatctgacgtattggcttggctgaagacccacaagatggagaagacgacgcaatttgaactgctggatattagctggcttatcgaaagcatgaaagttggtaaaccggtggacaccaaggggaaataccagttgatggaatcgcgtgtcgatagtgcgaacccagatccgacagccggtaccctcaacattctgcctcctactacgaagaccatttctcagtatgcgtgtcaacgccgcaccaccatcaacaaccataatcagcgttttacggacgcactggaaattcttgcggaaaattacgagttcaaagaaaacgatgatacttgtctgacctttatgcgtgctatttccgtgctgaaatgccttccgtttgaggtagttagcctgaaagacacggaaggattgccctggatcggtgatgaagtcaaaggtattatggaagaaatcatcgaggtcggtgaatcgctggaagtgcaggccgtgctcaatgatgagcgctatcaaagcttcaaactgtttaccagtgtctttggagtggggctgaagacagcagacaaatggtaccgtatgggtttccgcacgctcaacgatgttcgttccagcaagaccctgaaattgaccaagatgcaggcggcgggtctgtgctattatgaagatcttgctgatggcgttacgaaagccgaagctgacgcggtatctctgctggttcaggatgcagtctggactttcgacccggatgcgctggtggagattacgggtggatttcgtcgtgggaaagagtttggtcacgacgttgatctgcttatcacatctccgggagctgagaaagaacaagaagaccagctcctgcagaaagtgaccaatctgtggaagaaacaagggttgttgctgtacggtgatctgatcgaaagtacctttgaagatctgaaactcccatcccgcaagattgatgccctggaccattttcagaaatgctttctgatcctcaaactttatcaccataaagaggacaaacgcaaatgggaaatgccgacgggttcgaacgaaagcgaggccaaaagttggaaagcaattcgcgtagatctggttgtttgtccctacgatcgttatgcgtttgcgttgttgggttggaccggaagccgcatgttcgaacgtgatctgcgccgctacgccacccacgagaagaagatgatgctggacaatcatgcgctgtatgacctgaccaagaaaatctttctcaaagctaaatcggaagaggaaattttcgcacatctggggcttgaatacctggaaccgtccgaacgtaacgca

SEQ ID NO: 196 - protein, 529 aa, synthetic construct
  REGION 1..529: note = Variant of terminal deoxynucleotidyltransferase
MHHHHHHGGSGMHRIRTIDSDFGKKRQKKMDNHISSMIYEIKFHEFVLFILEKKMGATRRTFLTDLARKKGFRVENELSDSVTHIVAENNSGSDVLAWLKTHKMEKTTQFELLDISWLIESMKVGKPVDTKGKYQLMESRVDSANPDPTAGTLNILPPTTKTISQYACQRRTTINNHNQRFTDALEILAENYEFKENDDTCLTFMRAISVLKCLPFEVVSLKDTEGLPWIGDEVKGIMEEIIEVGESLEVQAVLNDERYQSFKLFTSVFGVGLKTADKWYRMGFRTLNDVRSSKTLKLTKMQAAGLCYYEDLADGVTKAEADAVSLLVQDAVWTFDPDALVEITGGFRRGKEFGHDVDLLITSPGAEKEQEDQLLQKVTNLWKKQGLLLYGDLIESTFEDLKLPSRKIDALDHFQKCFLILKLYHHKEDKRKWEMPTGSNESEAKSWKAIRVDLVVCPYDRYAFALLGWTGSRMFERDLRRYATHEKKMMLDNHALYDLTKKIFLKAKSEEEIFAHLGLEYLEPSERNA

SEQ ID NO: 197 - DNA, 1587 bp, synthetic construct
  misc_feature 1..1587: note = Variant of terminal deoxynucleotidyltransferase
  source 1..1587: mol_type = other DNA
atgcaccatcatcatcatcatggcggtagcggcatgcaccgcattcgtaccatcgattcggacttcgggaagaaacgccagaagaagatggataaccacattagttccatgatctatgaaatcaaatttcacgagtttgtgctgttcattctcgaaaagaaaatgggtgcgacgcgtcgtacttttctgacagatttagcccgcaagaaagggttccgcgtcgagaatgaactgtcagacagcgttacccacatcgtggcagaaaataattcaggatctgacgtattggcttggctgaagacccacaagatggagaagacgacgcaatttgaactgctggatattagctggcttatcgaaagcatgaaagttggtaaaccggtggacaccaaggggaaataccagttgatggaatcgcgtgtcgatagtgcgaacccagatccgacagccggtaccctcaacattctgcctcctactacgaagaccatttctcagtatgcgtgtcaacgccgcaccaccatcaacaaccataatcagcgttttacggacgcactggaaattcttgcggaaaattacgagttcaaagaaaacgatgatacttgtctgacctttatgcgtgctatttccgtgctgaaatgccttccgtttgaggtagttagcctgaaagacacggaaggattgccctggatcggtgatgaagtcaaaggtattatggaagaaatcatcgaggtcggtgaatcgctggaagtgcaggccgtgctcaatgatgagcgctatcaaagcttcaaactgtttaccagtgtctttggagtggggctgaagacagcagacaaatggtaccgtatgggtttccgcacgctcaacgatgttcgttccagcaagaccctgtttttgaccaagatgcagaaagcgggtctgtgctattatgaagatcttgctgatggcgttacgaaagccgaagctgacgcggtatctctgctggttcaggatgcagtctggactttcgacccggatgcgctggtggagattacgggtggatttcgtcgtgggaaagagtttggtcacgacgttgatctgcttatcacatctccgggagctgagaaagaacaagaagaccagctcctgcagaaagtgaccaatctgtggaagaaacaagggttgttgctgtacggtgatctgatcgaaagtacctttgaagatctgaaactcccatcccgcaagattgatgccctggaccattttcagaaatgctttctgatcctcaaactttatcaccataaagaggacaaacgcaaatgggaaatgccgacgggttcgaacgaaagcgaggccaaaagttggaaagcaattcgcgtagatctggttgtttgtccctacgatcgttatgcgtttgcgttgttgggttggaccggaagccgcatgttcgaacgtgatctgcgccgctacgccacccacgagaagaagatgatgctggacaatcatgcgctgtatgacctgaccaagaaaatctttctcaaagctaaatcggaagaggaaattttcgcacatctggggcttgaatacctggaaccgtccgaacgtaacgca

SEQ ID NO: 198 - protein, 529 aa, synthetic construct
  REGION 1..529: note = Variant of terminal deoxynucleotidyltransferase
MHHHHHHGGSGMHRIRTIDSDFGKKRQKKMDNHISSMIYEIKFHEFVLFILEKKMGATRRTFLTDLARKKGFRVENELSDSVTHIVAENNSGSDVLAWLKTHKMEKTTQFELLDISWLIESMKVGKPVDTKGKYQLMESRVDSANPDPTAGTLNILPPTTKTISQYACQRRTTINNHNQRFTDALEILAENYEFKENDDTCLTFMRAISVLKCLPFEVVSLKDTEGLPWIGDEVKGIMEEIIEVGESLEVQAVLNDERYQSFKLFTSVFGVGLKTADKWYRMGFRTLNDVRSSKTLFLTKMQKAGLCYYEDLADGVTKAEADAVSLLVQDAVWTFDPDALVEITGGFRRGKEFGHDVDLLITSPGAEKEQEDQLLQKVTNLWKKQGLLLYGDLIESTFEDLKLPSRKIDALDHFQKCFLILKLYHHKEDKRKWEMPTGSNESEAKSWKAIRVDLVVCPYDRYAFALLGWTGSRMFERDLRRYATHEKKMMLDNHALYDLTKKIFLKAKSEEEIFAHLGLEYLEPSERNA

SEQ ID NO: 199 - DNA, 1587 bp, synthetic construct
  misc_feature 1..1587: note = Variant of terminal deoxynucleotidyltransferase
  source 1..1587: mol_type = other DNA
atgcaccatcatcatcatcatggcggtagcggcatgcaccgcattcgtaccatcgattcggacttcgggaagaaacgccagaagaagatggataaccacattagttccatgatctatgaaatcaaatttcacgagtttgtgctgttcattctcgaaaagaaaatgggtgcgacgcgtcgtacttttctgacagatttagcccgcaagaaagggttccgcgtcgagaatgaactgtcagacagcgttacccacatcgtggcagaaaataattcaggatctgacgtattggcttggctgaagacccacaagatggagaagacgacgcaatttgaactgctggatattagctggcttatcgaaagcatgaaagttggtaaaccggtggacaccaaggggaaataccagttgatggaatcgcgtgtcgatagtgcgaacccagatccgacagccggtaccctcaacattctgcctcctactacgaagaccatttctcagtatgcgtgtcaacgccgcaccaccatcaacaaccataatcagcgttttacggacgcactggaaattcttgcggaaaattacgagttcaaagaaaacgatgatacttgtctgacctttatgcgtgctatttccgtgctgaaatgccttccgtttgaggtagttagcctgaaagacacggaaggattgccctggatcggtgatgaagtcaaaggtattatggaagaaatcatcgaggtcggtgaatcgctggaagtgcaggccgtgctcaatgatgagcgctatcaaagcttcaaactgtttaccagtgtctttggagtggggctgaagacagcagacaaatggtaccgtatgggtttccgcacgctcaacgatgttcgttccagcaagaccctgaaattgaccaagatgcagaaagcgggtctgtgctattatgaagatcttgctgatggcacgacgaaagccgaagctgacgcggtatctctgctggttcaggatgcagtctggactttcgacccggatgcgctggtggagattacgggtggatttcgtcgtgggaaagagtttggtcacgacgttgatctgcttatcacatctccgggagctgagaaagaacaagaagaccagctcctgcagaaagtgaccaatctgtggaagaaacaagggttgttgctgtacggtgatctgatcgaaagtacctttgaagatctgaaactcccatcccgcaagattgatgccctggaccattttcagaaatgctttctgatcctcaaactttatcaccataaagaggacaaacgcaaatgggaaatgccgacgggttcgaacgaaagcgaggccaaaagttggaaagcaattcgcgtagatctggttgtttgtccctacgatcgttatgcgtttgcgttgttgggttggaccggaagccgcatgttcgaacgtgatctgcgccgctacgccacccacgagaagaagatgatgctggacaatcatgcgctgtatgacctgaccaagaaaatctttctcaaagctaaatcggaagaggaaattttcgcacatctggggcttgaatacctggaaccgtccgaacgtaacgca

SEQ ID NO: 200 - protein, 529 aa, synthetic construct
  REGION 1..529: note = Variant of terminal deoxynucleotidyltransferase
MHHHHHHGGSGMHRIRTIDSDFGKKRQKKMDNHISSMIYEIKFHEFVLFILEKKMGATRRTFLTDLARKKGFRVENELSDSVTHIVAENNSGSDVLAWLKTHKMEKTTQFELLDISWLIESMKVGKPVDTKGKYQLMESRVDSANPDPTAGTLNILPPTTKTISQYACQRRTTINNHNQRFTDALEILAENYEFKENDDTCLTFMRAISVLKCLPFEVVSLKDTEGLPWIGDEVKGIMEEIIEVGESLEVQAVLNDERYQSFKLFTSVFGVGLKTADKWYRMGFRTLNDVRSSKTLKLTKMQKAGLCYYEDLADGTTKAEADAVSLLVQDAVWTFDPDALVEITGGFRRGKEFGHDVDLLITSPGAEKEQEDQLLQKVTNLWKKQGLLLYGDLIESTFEDLKLPSRKIDALDHFQKCFLILKLYHHKEDKRKWEMPTGSNESEAKSWKAIRVDLVVCPYDRYAFALLGWTGSRMFERDLRRYATHEKKMMLDNHALYDLTKKIFLKAKSEEEIFAHLGLEYLEPSERNA

SEQ ID NO: 201 - DNA, 1587 bp, synthetic construct
  misc_feature 1..1587: note = Variant of terminal deoxynucleotidyltransferase
  source 1..1587: mol_type = other DNA
atgcaccatcatcatcatcatggcggtagcggcatgcaccgcattcgtaccatcgattcggacttcgggaagaaacgccagaagaagatggataaccacattagttccatgatctatgaaatcaaatttcacgagtttgtgctgttcattctcgaaaagaaaatgggtgcgacgcgtcgtacttttctgacagatttagcccgcaagaaagggttccgcgtcgagaatgaactgtcagacagcgttacccacatcgtggcagaaaataattcaggatctgacgtattggcttggctgaagacccacaagatggagaagacgacgcaatttgaactgctggatattagctggcttatcgaaagcatgaaagttggtaaaccggtggacaccaaggggaaataccagttgatggaatcgcgtgtcgatagtgcgaacccagatccgacagccggtaccctcaacattctgcctcctactacgaagaccatttctcagtatgcgtgtcaacgccgcaccaccatcaacaaccataatcagcgttttacggacgcactggaaattcttgcggaaaattacgagttcaaagaaaacgatgatacttgtctgacctttatgcgtgctatttccgtgctgaaatgccttccgtttgaggtagttagcctgaaagacacggaaggattgccctggatcggtgatgaagtcaaaggtattatggaagaaatcatcgaggtcggtgaatcgctggaagtgcaggccgtgctcaatgatgagcgctatcaaagcttcaaactgtttaagagtgtctttggagtggggctgaagacagcagacaaatggtaccgtatgggtttccgcacgctcaacgatgttcgttccagcaagaccctgaaattgaccaagatgcagaaagcgggtctgtgctattatgaagatcttgctgatggcgttacgaaagccgaagctgacgcggtatctctgctggttcaggatgcagtctggactttcgacccggatgcgctggtggagattacgggtggatttcgtcgtgggaaagagtttggtcacgacgttgatctgcttatcacatctccgggagctgagaaagaacaagaagaccagctcctgcagaaagtgaccaatctgtggaagaaacaagggttgttgctgtacggtgatctgatcgaaagtacctttgaagatctgaaactcccatcccgcaagattgatgccctggaccattttcagaaatgctttctgatcctcaaactttatcaccataaagaggacaaacgcaaatgggaaatgccgacgggttcgaacgaaagcgaggccaaaagttggaaagcaattcgcgtagatctggttgtttgtccctacgatcgttatgcgtttgcgttgttgggttggaccggaagccgcatgttcgaacgtgatctgcgccgctacgccacccacgagaagaagatgatgctggacaatcatgcgctgtatgacctgaccaagaaaatctttctcaaagctaaatcggaagaggaaattttcgcacatctggggcttgaatacctggaaccgtccgaacgtaacgca

SEQ ID NO: 202 - protein, 529 aa, synthetic construct
  REGION 1..529: note = Variant of terminal deoxynucleotidyltransferase
MHHHHHHGGSGMHRIRTIDSDFGKKRQKKMDNHISSMIYEIKFHEFVLFILEKKMGATRRTFLTDLARKKGFRVENELSDSVTHIVAENNSGSDVLAWLKTHKMEKTTQFELLDISWLIESMKVGKPVDTKGKYQLMESRVDSANPDPTAGTLNILPPTTKTISQYACQRRTTINNHNQRFTDALEILAENYEFKENDDTCLTFMRAISVLKCLPFEVVSLKDTEGLPWIGDEVKGIMEEIIEVGESLEVQAVLNDERYQSFKLFKSVFGVGLKTADKWYRMGFRTLNDVRSSKTLKLTKMQKAGLCYYEDLADGVTKAEADAVSLLVQDAVWTFDPDALVEITGGFRRGKEFGHDVDLLITSPGAEKEQEDQLLQKVTNLWKKQGLLLYGDLIESTFEDLKLPSRKIDALDHFQKCFLILKLYHHKEDKRKWEMPTGSNESEAKSWKAIRVDLVVCPYDRYAFALLGWTGSRMFERDLRRYATHEKKMMLDNHALYDLTKKIFLKAKSEEEIFAHLGLEYLEPSERNA

SEQ ID NO: 203 - DNA, 1587 bp, synthetic construct
  misc_feature 1..1587: note = Variant of terminal deoxynucleotidyltransferase
  source 1..1587: mol_type = other DNA
atgcaccatcatcatcatcatggcggtagcggcatgcaccgcattcgtaccatcgattcggacttcgggaagaaacgccagaagaagatggataaccacattagttccatgatctatgaaatcaaatttcacgagtttgtgctgttcattctcgaaaagaaaatgggtgcgacgcgtcgtacttttctgacagatttagcccgcaagaaagggttccgcgtcgagaatgaactgtcagacagcgttacccacatcgtggcagaaaataattcaggatctgacgtattggcttggctgaagacccacaagatggagaagacgacgcaatttgaactgctggatattagctggcttatcgaaagcatgaaagttggtaaaccggtggacaccaaggggaaataccagttgatggaatcgcgtgtcgatagtgcgaacccagatccgacagccggtaccctcaacattctgcctcctactacgaagaccatttctcagtatgcgtgtcaacgccgcaccaccatcaacaaccataatcagcgttttacggacgcactggaaattcttgcggaaaattacgagttcaaagaaaacgatgatacttgtctgacctttatgcgtgctatttccgtgctgaaatgccttccgtttgaggtagttagcctgaaagacacggaaggattgccctggatcggtgatgaagtcaaaggtattatggaagaaatcatcgaggtcggtgaatcgctggaagtgcaggccgtgctcaatgatgagcgctatcaaagcttccggctgtttaccagtgtctttggagtggggctgaagacagcagacaaatggtaccgtatgggtttccgcacgctcaacgatgttcgttccagcaagaccctgaaattgaccaagatgcagaaagcgggtctgtgctattatgaagatcttgctgatggcgttacgaaagccgaagctgacgcggtatctctgctggttcaggatgcagtctggactttcgacccggatgcgctggtggagattacgggtggatttcgtcgtgggaaagagtttggtcacgacgttgatctgcttatcacatctccgggagctgagaaagaacaagaagaccagctcctgcagaaagtgaccaatctgtggaagaaacaagggttgttgctgtacggtgatctgatcgaaagtacctttgaagatctgaaactcccatcccgcaagattgatgccctggaccattttcagaaatgctttctgatcctcaaactttatcaccataaagaggacaaacgcaaatgggaaatgccgacgggttcgaacgaaagcgaggccaaaagttggaaagcaattcgcgtagatctggttgtttgtccctacgatcgttatgcgtttgcgttgttgggttggaccggaagccgcatgttcgaacgtgatctgcgccgctacgccacccacgagaagaagatgatgctggacaatcatgcgctgtatgacctgaccaagaaaatctttctcaaagctaaatcggaagaggaaattttcgcacatctggggcttgaatacctggaaccgtccgaacgtaacgca

SEQ ID NO: 204 - protein, 529 aa, synthetic construct
  REGION 1..529: note = Variant of terminal deoxynucleotidyltransferase
MHHHHHHGGSGMHRIRTIDSDFGKKRQKKMDNHISSMIYEIKFHEFVLFILEKKMGATRRTFLTDLARKKGFRVENELSDSVTHIVAENNSGSDVLAWLKTHKMEKTTQFELLDISWLIESMKVGKPVDTKGKYQLMESRVDSANPDPTAGTLNILPPTTKTISQYACQRRTTINNHNQRFTDALEILAENYEFKENDDTCLTFMRAISVLKCLPFEVVSLKDTEGLPWIGDEVKGIMEEIIEVGESLEVQAVLNDERYQSFRLFTSVFGVGLKTADKWYRMGFRTLNDVRSSKTLKLTKMQKAGLCYYEDLADGVTKAEADAVSLLVQDAVWTFDPDALVEITGGFRRGKEFGHDVDLLITSPGAEKEQEDQLLQKVTNLWKKQGLLLYGDLIESTFEDLKLPSRKIDALDHFQKCFLILKLYHHKEDKRKWEMPTGSNESEAKSWKAIRVDLVVCPYDRYAFALLGWTGSRMFERDLRRYATHEKKMMLDNHALYDLTKKIFLKAKSEEEIFAHLGLEYLEPSERNA

SEQ ID NO: 205 - DNA, 1587 bp, synthetic construct
  misc_feature 1..1587: note = Variant of terminal deoxynucleotidyltransferase
  source 1..1587: mol_type = other DNA
atgcaccatcatcatcatcatggcggtagcggcatgcaccgcattcgtaccatcgattcggacttcgggaagaaacgccagaagaagatggataaccacattagttccatgatctatgaaatcaaatttcacgagtttgtgctgttcattctcgaaaagaaaatgggtgcgacgcgtcgtacttttctgacagatttagcccgcaagaaagggttccgcgtcgagaatgaactgtcagacagcgttacccacatcgtggcagaaaataattcaggatctgacgtattggcttggctgaagacccacaagatggagaagacgacgcaatttgaactgctggatattagctggcttatcgaaagcatgaaagttggtaaaccggtggacaccaaggggaaataccagttgatggaatcgcgtgtcgatagtgcgaacccagatccgacagccggtaccctcaacattctgcctcctactacgaagaccatttctcagtatgcgtgtcaacgccgcaccaccatcaacaaccataatcagcgttttacggacgcactggaaattcttgcggaaaattacgagttcaaagaaaacgatgatacttgtctgacctttatgcgtgctatttccgtgctgaaatgccttccgtttgaggtagttagcctgaaagacacggaaggattgccctggatcggtgatgaagtcaaaggtattatggaagaaatcatcgaggtcggtgaatcgctggaagtgcaggccgtgctcaatgatgagcgctatcaaagcttcaaactgtttaccagtgtctttggagtggggctgaagacagcagacaaatggtaccgtcagggtttccgcacgctcaacgatgttcgttccagcaagaccctgaaattgaccaagatgcagaaagcgggtctgtgctattatgaagatcttgctgatggcgttacgaaagccgaagctgacgcggtatctctgctggttcaggatgcagtctggactttcgacccggatgcgctggtggagattacgggtggatttcgtcgtgggaaagagtttggtcacgacgttgatctgcttatcacatctccgggagctgagaaagaacaagaagaccagctcctgcagaaagtgaccaatctgtggaagaaacaagggttgttgctgtacggtgatctgatcgaaagtacctttgaagatctgaaactcccatcccgcaagattgatgccctggaccattttcagaaatgctttctgatcctcaaactttatcaccataaagaggacaaacgcaaatgggaaatgccgacgggttcgaacgaaagcgaggccaaaagttggaaagcaattcgcgtagatctggttgtttgtccctacgatcgttatgcgtttgcgttgttgggttggaccggaagccgcatgttcgaacgtgatctgcgccgctacgccacccacgagaagaagatgatgctggacaatcatgcgctgtatgacctgaccaagaaaatctttctcaaagctaaatcggaagaggaaattttcgcacatctggggcttgaatacctggaaccgtccgaacgtaacgca

SEQ ID NO: 206 - protein, 529 aa, synthetic construct
  REGION 1..529: note = Variant of terminal deoxynucleotidyltransferase
MHHHHHHGGSGMHRIRTIDSDFGKKRQKKMDNHISSMIYEIKFHEFVLFILEKKMGATRRTFLTDLARKKGFRVENELSDSVTHIVAENNSGSDVLAWLKTHKMEKTTQFELLDISWLIESMKVGKPVDTKGKYQLMESRVDSANPDPTAGTLNILPPTTKTISQYACQRRTTINNHNQRFTDALEILAENYEFKENDDTCLTFMRAISVLKCLPFEVVSLKDTEGLPWIGDEVKGIMEEIIEVGESLEVQAVLNDERYQSFKLFTSVFGVGLKTADKWYRQGFRTLNDVRSSKTLKLTKMQKAGLCYYEDLADGVTKAEADAVSLLVQDAVWTFDPDALVEITGGFRRGKEFGHDVDLLITSPGAEKEQEDQLLQKVTNLWKKQGLLLYGDLIESTFEDLKLPSRKIDALDHFQKCFLILKLYHHKEDKRKWEMPTGSNESEAKSWKAIRVDLVVCPYDRYAFALLGWTGSRMFERDLRRYATHEKKMMLDNHALYDLTKKIFLKAKSEEEIFAHLGLEYLEPSERNA

SEQ ID NO: 207 - DNA, 1587 bp, synthetic construct
  misc_feature 1..1587: note = Variant of terminal deoxynucleotidyltransferase
  source 1..1587: mol_type = other DNA
atgcaccatcatcatcatcatggcggtagcggcatgcaccgcattcgtaccatcgattcggacttcgggaagaaacgccagaagaagatggataaccacattagttccatgatctatgaaatcaaatttcacgagtttgtgctgttcattctcgaaaagaaaatgggtgcgacgcgtcgtacttttctgacagatttagcccgcaagaaagggttccgcgtcgagaatgaactgtcagacagcgttacccacatcgtggcagaaaataattcaggatctgacgtattggcttggctgaagacccacaagatggagaagacgacgcaatttgaactgctggatattagctggcttatcgaaagcatgaaagttggtaaaccggtggacaccaaggggaaataccagttgatggaatcgcgtgtcgatagtgcgaacccagatccgacagccggtaccctcaacattctgcctcctactacgaagaccatttctcagtatgcgtgtcaacgccgcaccaccctgaacaaccataatcaacgttttacggacgcactggaaattcttgcggaaaattacgagttcaaagaaaacgatgatacttgtctgacctttatgcgtgctatttccgtgctgaaatgccttccgtttgaggtagttagcctgaaagacacggaaggattgccctggatcggtgatgaagtcaaagggattatggaagaaatcatcgaggtcggtgaatcgctggaagtgcaggccgtgctcaatgatgagcgctatcaaagcttcaaactgtttaccagtgtctttggagtgggggtgaagacagcagacaaatggtaccgtatgggtctgcgcacgctcgaggatgttcgttccagcaagaccctgaagttgaccaagatgcagaaagcgggtctgtgctattatgaagatcttgctgatggcgttacgaaagccgaagctgacgcggtatctctgctggttcaggatgcagtctggactttcgacccggatgcgctggtggagattacgggtggatttcgtcgtgggaaaccttttggtcacgacgttgatctgcttatcacatctccgggagctgagaaagaacaagaagaccagctcctgcagaaagtgaccaatctgtggaagaaacaagggttgttgctgtacggtgatctgcgtgaaagtacctttgaagatctgaaactcccatcccgcaagatcgatgccctggaccattttagcaaatgctttgcgatcctcaaactttatcaccataaagtggacaaaagcaaatgggaaatgccgacgggttcgaacgaaagcgaggccaaaagttggaaagcaattcgcgtagatctggttgtttgtccctacgatcgttttgcgtttgcgttgttgggttggaccggaagccgcatgttcgaacgtgatctgcgccgctacgccacccacgagaagaagatgatgctggacaatcatgcgctgtatgacctgaccaagaaaatctttctcaaagctaaatcggaagaggaaattttcgcacatctggggcttgaatacctggaaccgtccgaacgtaacgca

SEQ ID NO: 208 - protein, 529 aa, synthetic construct
  REGION 1..529: note = Variant of terminal deoxynucleotidyltransferase
MHHHHHHGGSGMHRIRTIDSDFGKKRQKKMDNHISSMIYEIKFHEFVLFILEKKMGATRRTFLTDLARKKGFRVENELSDSVTHIVAENNSGSDVLAWLKTHKMEKTTQFELLDISWLIESMKVGKPVDTKGKYQLMESRVDSANPDPTAGTLNILPPTTKTISQYACQRRTTLNNHNQRFTDALEILAENYEFKENDDTCLTFMRAISVLKCLPFEVVSLKDTEGLPWIGDEVKGIMEEIIEVGESLEVQAVLNDERYQSFKLFTSVFGVGVKTADKWYRMGLRTLEDVRSSKTLKLTKMQKAGLCYYEDLADGVTKAEADAVSLLVQDAVWTFDPDALVEITGGFRRGKPFGHDVDLLITSPGAEKEQEDQLLQKVTNLWKKQGLLLYGDLRESTFEDLKLPSRKIDALDHFSKCFAILKLYHHKVDKSKWEMPTGSNESEAKSWKAIRVDLVVCPYDRFAFALLGWTGSRMFERDLRRYATHEKKMMLDNHALYDLTKKIFLKAKSEEEIFAHLGLEYLEPSERNA

SEQ ID NO: 209 - DNA, 1587 bp, synthetic construct
  misc_feature 1..1587: note = Variant of terminal deoxynucleotidyltransferase
  source 1..1587: mol_type = other DNA
atgcaccatcatcatcatcatggcggtagcggcatgcaccgcattcgtaccatcgattcggacttcgggaagaaacgccagaagaagatggataaccacattagttccatgatctatgaaatcaaatttcacgagtttgtgctgttcattctcgaaaagaaaatgggtgcgacgcgtcgtacttttctgacagatttagcccgcaagaaagggttccgcgtcgagaatgaactgtcagacagcgttacccacatcgtggcagaaaataattcaggatctgacgtattggcttggctgaagacccacaagatggagaagacgacgcaatttgaactgctggatattagctggcttatcgaaagcatgaaagttggtaaaccggtggacaccaaggggaaataccagttgatggaatcgcgtgtcgatagtgcgaacccagatccgacagccggtaccctcaacattctgcctcctactacgaagaccatttctcagtatgcgtgtcaacgccgcaccaccctgaacaaccataatcaacgttttacggacgcactggaaattcttgcggaaaattacgagttcaaagagaacgatgatacttgtctgacctttatgcgtgctatttccgtgctgaaatgccttccgtttgaggtagttagcctgaaagacacggaaggattgccctggatcggtgatgaagtcaaagggattatggaagaaatcatcgaggtcggtgaatcgctggaagtgcaggccgtgctcaatgatgagcgctatcaaagcttcaaactgtttaccagtgtctttggagtgggggtgaagacagcagacaaatggtaccgtatgggtctgcgcacgctcgaggatgttcgttccagcaagaccctgcgcttgaccaagatgcagaaagcgggtctgtgctattatgaagatcttgctgatggcgttacgaaagccgaagctgacgcggtatctctgctggttcaggatgcagtctggactttcgacccggatgcgctggtggagattacgggtggatttcgtcgtgggaaaccttttggtcacgacgttgatctgcttatcacatctccgggagctgagaaagaacaagaagaccagctcctgcagaaagtgaccgatctgtggaagaaacaagggttgttgctgtacggtgatctgcgtgaaagtacctttgaagatgggaaactcccatcccgcaagatcgatgccctggaccattttcagaaatgctttgcgatcctcaaactttatcaccataaagtggacaaaagcaaatgggaaatgccgacgggttcgaacatgagcgaggccaaaagttggaaagcaattcgcgtagatctggttgtttgtccctacgatcgttttgcgtttgcgttgttgggttggaccggaagccgcatgttcgaacgtgatctgcgccgctacgccacccacgagaagaagatgatgctggacaatcatgcgctgtatgacctgaccaagaaaatctttctcaaagctaaatcggaagaggaaattttcgcacatctggggcttgaatacctggaaccgtccgaacgtaacgca

SEQ ID NO: 210 - protein, 529 aa, synthetic construct
  REGION 1..529: note = Variant of terminal deoxynucleotidyltransferase
MHHHHHHGGSGMHRIRTIDSDFGKKRQKKMDNHISSMIYEIKFHEFVLFILEKKMGATRRTFLTDLARKKGFRVENELSDSVTHIVAENNSGSDVLAWLKTHKMEKTTQFELLDISWLIESMKVGKPVDTKGKYQLMESRVDSANPDPTAGTLNILPPTTKTISQYACQRRTTLNNHNQRFTDALEILAENYEFKENDDTCLTFMRAISVLKCLPFEVVSLKDTEGLPWIGDEVKGIMEEIIEVGESLEVQAVLNDERYQSFKLFTSVFGVGVKTADKWYRMGLRTLEDVRSSKTLRLTKMQKAGLCYYEDLADGVTKAEADAVSLLVQDAVWTFDPDALVEITGGFRRGKPFGHDVDLLITSPGAEKEQEDQLLQKVTDLWKKQGLLLYGDLRESTFEDGKLPSRKIDALDHFQKCFAILKLYHHKVDKSKWEMPTGSNMSEAKSWKAIRVDLVVCPYDRFAFALLGWTGSRMFERDLRRYATHEKKMMLDNHALYDLTKKIFLKAKSEEEIFAHLGLEYLEPSERNA

SEQ ID NO: 211 - DNA, 1587 bp, synthetic construct
  misc_feature 1..1587: note = Variant of terminal deoxynucleotidyltransferase
  source 1..1587: mol_type = other DNA
atgcaccatcatcatcatcatggcggtagcggcatgcaccgcattcgtaccatcgattcggacttcgggaagaaacgccagaagaagatggataaccacattagttccatgatctatgaaatcaaatttcacgagtttgtgctgttcattctcgaaaagaaaatgggtgcgacgcgtcgtacttttctgacagatttagcccgcaagaaagggttccgcgtcgagaatgaactgtcagacagcgttacccacatcgtggcagaaaataattcaggatctgacgtattggcttggctgaagacccacaagatggagaagacgacgcaatttgaactgctggatattagctggcttatcgaaagcatgaaagttggtaaaccggtggacaccaaggggaaataccagttgatggaatcgcgtgtcgatagtgcgaacccagatccgacagccggtaccctcaacattctgcctcctactacgaagaccatttctcagtatgcgtgtcaacgccgcaccaccctgaacaaccataatcaacgttttacggacgcactggaaattcttgcggaaaattacaacttcaaatacaacgatgatacttgtctgacctttatgcgtgctatttccgtgctgaaatgccttccgtttgaggtagttagcctgaaagacacggaaggattgccctggatcggtgatgaagtcaaagggattatggaagaaatcatcgaggtcggtgaatcgctggaagtgcaggccgtgctcaatgatgagcgctatcaaagcttcaaactgtttaccagtgtctttggagtgggggtgaagacagcagacaaatggtaccgtatgggtctgcgcacgctcgaggatgttcgttccagcaagaccctgaaattgaccaagatgcagaaagcgggtctgtgctattatgaagatcttgctgatggcgttacgaaagccgaagctgacgcgatttctctgctggttcaggatgcagtctggactttcgacccggatgcgctggtggagattacgggtggatttcgtcgtgggaaaccttttggtcacgacgttgatctgcttatcacatctccgggagctgagaaagaacaagaagaccagctcctgcagaaagtgaccaatctgtggaagaaacaagggttgttgctgtacggtgatctgcgtgaaagtacctttgaagatctgaaactcccatcccgcaagatcgatgccctggaccattttcagaaatgctttgcgatcctcaaactttatcaccataaagtggacaaaagcaaatgggaaatgccgacgggttcgaacgaaagcgaggccaaaagttggaaagcaattcgcgtagatctggttgtttgtccctacgatcgttttgcgtttgcgttgttgggttggaccggaagccgcatgttcgaacgtgatctgcgccgctacgccacccacgagaagaagatgatgctggacaatcatgcgctgtatgacctgaccaagaaaatctttctcaaagctaaatcggaagaggaaattttcgcacatctggggcttgaatacctggaaccgtccgaacgtaacgca

SEQ ID NO: 212 - protein, 529 aa, synthetic construct
  REGION 1..529: note = Variant of terminal deoxynucleotidyltransferase
MHHHHHHGGSGMHRIRTIDSDFGKKRQKKMDNHISSMIYEIKFHEFVLFILEKKMGATRRTFLTDLARKKGFRVENELSDSVTHIVAENNSGSDVLAWLKTHKMEKTTQFELLDISWLIESMKVGKPVDTKGKYQLMESRVDSANPDPTAGTLNILPPTTKTISQYACQRRTTLNNHNQRFTDALEILAENYNFKYNDDTCLTFMRAISVLKCLPFEVVSLKDTEGLPWIGDEVKGIMEEIIEVGESLEVQAVLNDERYQSFKLFTSVFGVGVKTADKWYRMGLRTLEDVRSSKTLKLTKMQKAGLCYYEDLADGVTKAEADAISLLVQDAVWTFDPDALVEITGGFRRGKPFGHDVDLLITSPGAEKEQEDQLLQKVTNLWKKQGLLLYGDLRESTFEDLKLPSRKIDALDHFQKCFAILKLYHHKVDKSKWEMPTGSNESEAKSWKAIRVDLVVCPYDRFAFALLGWTGSRMFERDLRRYATHEKKMMLDNHALYDLTKKIFLKAKSEEEIFAHLGLEYLEPSERNA

SEQ ID NO: 213 - DNA, 1587 bp, synthetic construct
  misc_feature 1..1587: note = Variant of terminal deoxynucleotidyltransferase
  source 1..1587: mol_type = other DNA
atgcaccatcatcatcatcatggcggtagcggcatgcaccgcattcgtaccatcgattcggacttcgggaagaaacgccagaagaagatggataaccacattagttccatgatctatgaaatcaaatttcacgagtttgtgctgttcattctcgaaaagaaaatgggtgcgacgcgtcgtacttttctgacagatttagcccgcaagaaagggttccgcgtcgagaatgaactgtcagacagcgttacccacatcgtggcagaaaataattcaggatctgacgtattggcttggctgaagacccacaagatggagaagacgacgcaatttgaactgctggatattagctggcttatcgaaagcatgaaagttggtaaaccggtggacaccaaggggaaataccagttgatggaatcgcgtgtcgatagtgcgaacccagatccgacagccggtaccctcaacattctgcctcctactacgaagaccatttctcagtatgcgtgtcaacgccgcaccaccctgaacaaccataatcaacgttttacggacgcactggaaattcttgcggaaaattacgagttcaaagaaaacgatgatacttgtctgacctttatgcgtgctatttccgtgctgaaatgccttccgtttgaggtagttagcctgaaagacacggaaggattgccctggatcggtgatgaagtcaaaccaattatggaagaaatcatcgaggtcggtgaatcgctggaagtgcaggccgtgctcaatgatgagcgctatcaaagcttcaaactgtttaccagtgtctttggagtgggggtgaagacagcagacaaatggtaccgtcgtggtctgcgcacgctcgaggatgttcgttccagcaagaccctgaaattgaccaagatgcagaaagcgggtctgtgctattatgaagatcttgctgatggcgttacgaaagccgaagctgacgcggtatctctgctggttcaggatgcagtctggactttcgacccggatgcgctggtggagattacgggtggatttcgtcgtgggaaaccttttggtcacgacgttgatctgcttatcacatctccgggagctgagaaagaacaagaagaccagctcctgcagaaagtgaccaatctgtggaagaaacaagggttgttgctgtacggtgacctgcgtgaaagtacctttgaagatctgaaactcccatcccgcaagatcgatgccctggaccattttcagaaatgctttgctatcctcaaactttatcaccataaagtggacaaaagcaaatgggaaatgccgacgggttcgaacgaaagcgaggccaaaagttggaaagcaattcgcgtagatctggttgtttgtccctacgatcgttttgcgtttgcgttgttgggttggaccggaagccgcatgttcgaacgtgatctgcgccgctacgccacccacgagaagaagatgatgctggacaatcatgcgctgtatgacctgaccaagaaaatctttctcaaagctaaatcggaagaggaaattttcgcacatctggggcttgaatacctggaaccgtccgaacgtaacgca

SEQ ID NO: 214 - protein, 529 aa, synthetic construct
  REGION 1..529: note = Variant of terminal deoxynucleotidyltransferase
MHHHHHHGGSGMHRIRTIDSDFGKKRQKKMDNHISSMIYEIKFHEFVLFILEKKMGATRRTFLTDLARKKGFRVENELSDSVTHIVAENNSGSDVLAWLKTHKMEKTTQFELLDISWLIESMKVGKPVDTKGKYQLMESRVDSANPDPTAGTLNILPPTTKTISQYACQRRTTLNNHNQRFTDALEILAENYEFKENDDTCLTFMRAISVLKCLPFEVVSLKDTEGLPWIGDEVKPIMEEIIEVGESLEVQAVLNDERYQSFKLFTSVFGVGVKTADKWYRRGLRTLEDVRSSKTLKLTKMQKAGLCYYEDLADGVTKAEADAVSLLVQDAVWTFDPDALVEITGGFRRGKPFGHDVDLLITSPGAEKEQEDQLLQKVTNLWKKQGLLLYGDLRESTFEDLKLPSRKIDALDHFQKCFAILKLYHHKVDKSKWEMPTGSNESEAKSWKAIRVDLVVCPYDRFAFALLGWTGSRMFERDLRRYATHEKKMMLDNHALYDLTKKIFLKAKSEEEIFAHLGLEYLEPSERNA

SEQ ID NO: 215 - DNA, 1587 bp, synthetic construct
  misc_feature 1..1587: note = Variant of terminal deoxynucleotidyltransferase
  source 1..1587: mol_type = other DNA
atgcaccatcatcatcatcatggcggtagcggcatgcaccgcattcgtaccatcgattcggacttcgggaagaaacgccagaagaagatggataaccacattagttccatgatctatgaaatcaaatttcacgagtttgtgctgttcattctcgaaaagaaaatgggtgcgacgcgtcgtacttttctgacagatttagcccgcaagaaagggttccgcgtcgagaatgaactgtcagacagcgttacccacatcgtggcagaaaataattcaggatctgacgtattggcttggctgaagacccacaagatggagaagacgacgcaatttgaactgctggatattagctggcttatcgaaagcatgaaagttggtaaaccggtggacaccaaggggaaataccagttgatggaatcgcgtgtcgatagtgcgaacccagatccgacagccggtaccctcaacattctgcctcctactacgaagaccatttctcagtatgcgtgtcaacgccgcaccaccctgaacaaccataatcaacgttttacggacgcactggaaattcttgcggaaaattacgagttcaaagaaaacgatgatacttgtctgacctttatgcgtgctatttccgtgctgaaatgccttccgtttgaggtagttagcctgaaagacacggaaggattgccctggatcggtgatgaagtcaaagggattatggaagaaatcatcgaggtcggtgaatcgctggaagtgcaggccgtgctcaatgatgagcgctatcaaagcttcaaactgtttaccagtgtctttggagtgggggtgaagacagcagacaaatggtaccgtatgggtctgcgcacgctcgaggatgttcgttccagcaagaccctgaaattgaccaagatgcagaaagcgggtctgtgctattatgaagatcttgctgatggcgttacgaaagccgaagctgacgcggtatctctgctggttcaggatgcagtctggactttcgacccggatgcgctggtggagattacgggtggatttcgtcgtgggaaaccttttggtcacgacgttgatctgcttatcacatctccgggagctgagaaagaacaagaagaccagctcctgcacaaagtgaccaatctgtggaagaaacaagggttgttgctgtacggtgatctgcgtgaaagtacctttgaagatgggaaactcccatcccgcaagatcgatgccctggaccattttcagaaatgctttgcgatcctcaaactttatcaccataaagtggacaaaagcaaatgggaaatgccgacgggttcgaacatgagcgaggccaaaagttggaaagcaattcgcgtagatctggttgtttgtccctacgatcgttttgcgtttgcgttgttgggttggaccggaagccgcatgttcgaacgtgatctgcgccgctacgccacccacgagaagaagatgatgctggacaatcatgcgctgtatgacctgaccaagaaaatctttctcaaagctaaatcggaagaggaaattttcgcacatctggggcttgaatacctggaaccgtccgaacgtaacgca

SEQ ID NO: 216 - protein, 529 aa, synthetic construct
  REGION 1..529: note = Variant of terminal deoxynucleotidyltransferase
MHHHHHHGGSGMHRIRTIDSDFGKKRQKKMDNHISSMIYEIKFHEFVLFILEKKMGATRRTFLTDLARKKGFRVENELSDSVTHIVAENNSGSDVLAWLKTHKMEKTTQFELLDISWLIESMKVGKPVDTKGKYQLMESRVDSANPDPTAGTLNILPPTTKTISQYACQRRTTLNNHNQRFTDALEILAENYEFKENDDTCLTFMRAISVLKCLPFEVVSLKDTEGLPWIGDEVKGIMEEIIEVGESLEVQAVLNDERYQSFKLFTSVFGVGVKTADKWYRMGLRTLEDVRSSKTLKLTKMQKAGLCYYEDLADGVTKAEADAVSLLVQDAVWTFDPDALVEITGGFRRGKPFGHDVDLLITSPGAEKEQEDQLLHKVTNLWKKQGLLLYGDLRESTFEDGKLPSRKIDALDHFQKCFAILKLYHHKVDKSKWEMPTGSNMSEAKSWKAIRVDLVVCPYDRFAFALLGWTGSRMFERDLRRYATHEKKMMLDNHALYDLTKKIFLKAKSEEEIFAHLGLEYLEPSERNA

SEQ ID NO: 217 - DNA, 1587 bp, synthetic construct
  misc_feature 1..1587: note = Variant of terminal deoxynucleotidyltransferase
  source 1..1587: mol_type = other DNA
atgcaccatcatcatcatcatggcggtagcggcatgcaccgcattcgtaccatcgattcggacttcgggaagaaacgccagaagaagatggataaccacattagttccatgatctatgaaatcaaatttcacgagtttgtgctgttcattctcgaaaagaaaatgggtgcgacgcgtcgtacttttctgacagatttagcccgcaagaaagggttccgcgtcgagaatgaactgtcagacagcgttacccacatcgtggcagaaaataattcaggatctgacgtattggcttggctgaagacccacaagatggagaagacgacgcaatttgaactgctggatattagctggcttatcgaaagcatgaaagttggtaaaccggtggacaccaaggggaaataccagttgatggaatcgcgtgtcgatagtgcgaacccagatccgacagccggtaccctcaacattctgcctcctactacgaagaccatttctcagtatgcgtgtcaacgccgcaccaccctgaacaaccataatcaacgttttacggacgcactggaaattcttgcggaaaattacgagttcaaagaaaacgatgatacttgtctgacctttatgcgtgctatttccgtgctgaaatgccttccgtttgaggtagttagcctgaaagacacggaaggattgccctggatcggtgatgaagtcaaagggattatggaagaaatcatcgaggtcggtgaatcgctggaagtgcaggccgtgctcaatgatgagcgctatcaaagcttcaaactgtttacgagtgtctttggagtgggggtgaagacagcagacaaatggtaccgtatgggtctgcgcacgctcgaggatgttcgttccagcaagaccctgaagttgaccaagatgcagaaagcgggtctgtgctattatgaagatcttgctgatggcgttacgaaagccgaagctgacgcggtatctctgctggttcaggatgcagtctggactttcgacccggatgcgctggtggagattacgggtggatttcgtcgtgggaaaccttttggtcacgacgttgatctgcttatcacatctccgggagctgagaaagaacaagaagaccagctcctgcagaaagtgaccaatctgtggaagaaacaagggttgttgctgtacggtgatctgcgtgaaagtacctttgaagatctgaaactcccatcccgcaagatcgatgccctggaccattttcagaaatgctttgctatcctcaaactttatcaccataaagtggacaaaagcaaatgggaaacgccgacgggttcgaacatgagcgaggccaaaagttggaaagcaattcgcgtagatctggttgtttgtccctacgatcgttttgcgtttgcgttgttgggttggaccggaagccgcatgttcgaacgtgatctgcgccgctacgccacccacgagaagaagatgatgctggacaatcatgcgctgtatgacctgaccaagaaaatctttctcaaagctaaatcggaagaggaaattttcgcacatctggggcttgaatacctggaaccgtccgaacgtaacgca

SEQ ID NO: 218 - protein, 529 aa, synthetic construct
  REGION 1..529: note = Variant of terminal deoxynucleotidyltransferase
MHHHHHHGGSGMHRIRTIDSDFGKKRQKKMDNHISSMIYEIKFHEFVLFILEKKMGATRRTFLTDLARKKGFRVENELSDSVTHIVAENNSGSDVLAWLKTHKMEKTTQFELLDISWLIESMKVGKPVDTKGKYQLMESRVDSANPDPTAGTLNILPPTTKTISQYACQRRTTLNNHNQRFTDALEILAENYEFKENDDTCLTFMRAISVLKCLPFEVVSLKDTEGLPWIGDEVKGIMEEIIEVGESLEVQAVLNDERYQSFKLFTSVFGVGVKTADKWYRMGLRTLEDVRSSKTLKLTKMQKAGLCYYEDLADGVTKAEADAVSLLVQDAVWTFDPDALVEITGGFRRGKPFGHDVDLLITSPGAEKEQEDQLLQKVTNLWKKQGLLLYGDLRESTFEDLKLPSRKIDALDHFQKCFAILKLYHHKVDKSKWETPTGSNMSEAKSWKAIRVDLVVCPYDRFAFALLGWTGSRMFERDLRRYATHEKKMMLDNHALYDLTKKIFLKAKSEEEIFAHLGLEYLEPSERNA

SEQ ID NO: 219 - DNA, 1587 bp, synthetic construct
  misc_feature 1..1587: note = Variant of terminal deoxynucleotidyltransferase
  source 1..1587: mol_type = other DNA
atgcaccatcatcatcatcatggcggtagcggcatgcaccgcattcgtaccatcgattcggacttcgggaagaaacgccagaagaagatggataaccacattagttccatgatctatgaaatcaaatttcacgagtttgtgctgttcattctcgaaaagaaaatgggtgcgacgcgtcgtacttttctgacagatttagcccgcaagaaagggttccgcgtcgagaatgaactgtcagacagcgttacccacatcgtggcagaaaataattcaggatctgacgtattggcttggctgaagacccacaagatggagaagacgacgcaatttgaactgctggatattagctggcttatcgaaagcatgaaagttggtaaaccggtggacaccaaggggaaataccagttgatggaatcgcgtgtcgatagtgcgaacccagatccgacagccggtaccctcaacattctgcctcctactacgaagaccatttctcagtatgcgtgtcaacgccgcaccaccctgaacaaccataatcaacgttttacggacgcactggggattcttgcggaaaattacgagttcaaagaaaacgatgatacttgtctgacctttatgcgtgctatttccgtgctgaaatgccttccgtttgaggtagttagcctgaaagacacggaaggattgccctggatcggtgatgaagtcaaagggattatggaagaaatcatcgaggtcggtgaatcgctggaagtgcaggccgtgctcaatgatgagcgctatcaaagcttcaaactgtttaccagtgtctttggagtgggggtgaagacagcagacaaatggtaccgtatgggtctgcgcacgctcgaggatgttcgttccagcaagaccctgaaattgaccaagatgcagaaagcgggtctgtgctattatgaagatcttgctgatggcgttacgaaagccgaagctgacgcggtatctctgctggttcaggatgcagtctggactttcgacccggatgcgctggtggagattacgggtggatttcgtcgtgggaaaccttttggtcacgacgttgatctgcttatcacatctccgggagctgagaaagaacaagaagaccagctcctgcagaaagtgaccaatctgtggaagaaacaagggttgttgctgtacggtgatctgcgtgaaagtacctttgaagatctgaaactcccatcccgcaagatcgatgccctggaccattttcagaaatgctttgcgatcctgaaactttatcaccataaagtggacaaaagcaaatgggaaatgccgacgggttcgaacgaaagcgaggccaaaagttggaaagcaattcgcgtagatctggttgtttgtccctacgatcgttttgcgtttgcgttgttgggttggaccggaagccgcatgttcgaacgtgatctgcgccgctacgccacccacgagaagaagatgatgctggacaatcatgcgctgtatgacctgaccaagaaaatctttctcaaagctaaatcggaagaggaaattttcgcacatctggggcttgaatacctggaaccgtccgaacgtaacgca

SEQ ID NO: 220 - protein, 529 aa, synthetic construct
  REGION 1..529: note = Variant of terminal deoxynucleotidyltransferase
MHHHHHHGGSGMHRIRTIDSDFGKKRQKKMDNHISSMIYEIKFHEFVLFILEKKMGATRRTFLTDLARKKGFRVENELSDSVTHIVAENNSGSDVLAWLKTHKMEKTTQFELLDISWLIESMKVGKPVDTKGKYQLMESRVDSANPDPTAGTLNILPPTTKTISQYACQRRTTLNNHNQRFTDALGILAENYEFKENDDTCLTFMRAISVLKCLPFEVVSLKDTEGLPWIGDEVKGIMEEIIEVGESLEVQAVLNDERYQSFKLFTSVFGVGVKTADKWYRMGLRTLEDVRSSKTLKLTKMQKAGLCYYEDLADGVTKAEADAVSLLVQDAVWTFDPDALVEITGGFRRGKPFGHDVDLLITSPGAEKEQEDQLLQKVTNLWKKQGLLLYGDLRESTFEDLKLPSRKIDALDHFQKCFAILKLYHHKVDKSKWEMPTGSNESEAKSWKAIRVDLVVCPYDRFAFALLGWTGSRMFERDLRRYATHEKKMMLDNHALYDLTKKIFLKAKSEEEIFAHLGLEYLEPSERNA

SEQ ID NO: 221 - DNA, 1587 bp, synthetic construct
  misc_feature 1..1587: note = Variant of terminal deoxynucleotidyltransferase
  source 1..1587: mol_type = other DNA
atgcaccatcatcatcatcatggcggtagcggcatgcaccgcattcgtaccatcgattcggacttcgggaagaaacgccagaagaagatggataaccacattagttccatgatctatgaaatcaaatttcacgagtttgtgctgttcattctcgaaaagaaaatgggtgcgacgcgtcgtacttttctgacagatttagcccgcaagaaagggttccgcgtcgagaatgaactgtcagacagcgttacccacatcgtggcagaaaataattcaggatctgacgtattggcttggctgaagacccacaagatggagaagacgacgcaatttgaactgctggatattagctggcttatcgaaagcatgaaagttggtaaaccggtggacaccaaggggaaataccagttgatggaatcgcgtgtcgatagtgcgaacccagatccgacagccggtaccctcaacattctgcctcctactacgaagaccatttctcagtatgcgtgtcaacgccgcaccaccctgaacaaccataatcaacgttttacggacgcactggaaattcttgcggaaaattacgagttcaaatacaacgatgatacttgtctgacctttatgcgtgctatttccgtgctgaaatgccttccgtttgaggtagttagcctgaaagacacggaaggattgccctggatcggtgatgaagtcaaagggattatggaagaaatcatcgaggtcggtgaatcgctggaagtgcaggccgtgctcaatgatgagcgctatcaaagcttcaaactgtttacgagtgtctttggagtgggggtgaagacagcagacaaatggtaccgtatgggtctgcgcacgctcgaggatgttcgttccagcaagaccctgcgcttgaccaagatgcagaaagcgggtctgtgctattatgaagatcttgctgatggcgttacgaaagccgaagctgacgcgatttctctgctggttcaggatgcagtctggactttcgacccggatgcgctggtggagattacgggtggatttcgtcgtgggaaaccttttggtcacgacgttgatctgcttatcacatctccgggagctgagaaagaacaagaagaccagctcctgcagaaagtgaccaatctgtggaagaaacaagggttgttgctgtacggtgatctgcgtgaaagtacctttgaagatctgaaactcccatcccgcaagatcgatgccctggaccattttcagaaatgctttgctatcctcaaactttatcaccataaagtggacaaaagcaaatgggaaacgccgacgggttcgaacgaaagcgaggccaaaagttggaaagcaattcgcgtagatctggttgtttgtccctacgatcgttttgcgtttgcgttgttgggttggaccggaagccgcatgttcgaacgtgatctgcgccgctacgccacccacgagaagaagatgatgctggacaatcatgcgctgtatgacctgaccaagaaaatctttctcaaagctaaatcggaagaggaaattttcgcacatctggggcttgaatacctggaaccgtccgaacgtaacgca

SEQ ID NO: 222 - protein, 529 aa, synthetic construct
  REGION 1..529: note = Variant of terminal deoxynucleotidyltransferase
MHHHHHHGGSGMHRIRTIDSDFGKKRQKKMDNHISSMIYEIKFHEFVLFILEKKMGATRRTFLTDLARKKGFRVENELSDSVTHIVAENNSGSDVLAWLKTHKMEKTTQFELLDISWLIESMKVGKPVDTKGKYQLMESRVDSANPDPTAGTLNILPPTTKTISQYACQRRTTLNNHNQRFTDALEILAENYEFKYNDDTCLTFMRAISVLKCLPFEVVSLKDTEGLPWIGDEVKGIMEEIIEVGESLEVQAVLNDERYQSFKLFTSVFGVGVKTADKWYRMGLRTLEDVRSSKTLRLTKMQKAGLCYYEDLADGVTKAEADAISLLVQDAVWTFDPDALVEITGGFRRGKPFGHDVDLLITSPGAEKEQEDQLLQKVTNLWKKQGLLLYGDLRESTFEDLKLPSRKIDALDHFQKCFAILKLYHHKVDKSKWETPTGSNESEAKSWKAIRVDLVVCPYDRFAFALLGWTGSRMFERDLRRYATHEKKMMLDNHALYDLTKKIFLKAKSEEEIFAHLGLEYLEPSERNA

SEQ ID NO: 223 - DNA, 1587 bp, synthetic construct
  misc_feature 1..1587: note = Variant of terminal deoxynucleotidyltransferase
  source 1..1587: mol_type = other DNA
atgcaccatcatcatcatcatggcggtagcggcatgcaccgcattcgtaccatcgattcggacttcgggaagaaacgccagaagaagatggataaccacattagttccatgatctatgaaatcaaatttcacgagtttgtgctgttcattctcgaaaagaaaatgggtgcgacgcgtcgtacttttctgacagatttagcccgcaagaaagggttccgcgtcgagaatgaactgtcagacagcgttacccacatcgtggcagaaaataattcaggatctgacgtattggcttggctgaagacccacaagatggagaagacgacgcaatttgaactgctggatattagctggcttatcgaaagcatgaaagttggtaaaccggtggacaccaaggggaaataccagttgatggaatcgcgtgtcgatagtgcgaacccagatccgacagccggtaccctcaacattctgcctcctactacgaagaccatttctcagtatgcgtgtcaacgccgcaccaccctgaacaaccataatcaacgttttacggacgcactggaaattcttgcggaaaattacgagttcaaagagaacgatgatacttgtctgacctttatgcgtgctatttccgtgctgaaatgccttccgtttgaggtagttagcctgaaagacacggaaggattgccctggatcggtgatgaagtcaaagggattatggaagaaatcatcgaggtcggtgaatcgctggaagtgcaggccgtgctcaatgatgagcgctatcaaagcttcaaactgtttaccagtgtctttggagtgggggtgaagacagcagacaaatggtaccgtatgggtctgcgcacgctcgaggatgttcgttccagcaagaccctgcgcttgaccaagatgcagaaagcgggtctgtgctattatgaagatcttgctgatggcgttacgaaagccgaagctgacgcggtatctctgctggttcaggatgcagtctggactttcgacccggatgcgctggtggagattacgggtggatttcgtcgtgggaaaccttttggtcacgacgttgatctgcttatcacatctccgggagctgagaaagaacaagaagaccagctcctgcagaaagtgaccaatctgtggaagaaacaagggttgttgctgtacggtgatctgcgtgaaagtacctttgaagatctgaaactcccatcccgcaagatcgatgccctggaccattttcagaaatgctttgcgatcctcaaactttatcaccataaagtggacaaaagcaaatgggaaacgccgacgggttcgaacgaaagcgaggccaaaagttggaaagcaattcgcgtagatctggttgtttgtccctacgatcgttttgcgtttgcgttgttgggttggaccggaagccgcatgttcgaacgtgatctgcgccgctacgccacccacgagaagaagatgatgctggacaatcatgcgctgtatgacctgaccaagaaaatctttctcaaagctaaatcggaagaggaaattttcgcacatctggggcttgaatacctggaaccgtccgaacgtaacgca

SEQ ID NO: 224 - protein, 529 aa, synthetic construct
  REGION 1..529: note = Variant of terminal deoxynucleotidyltransferase
MHHHHHHGGSGMHRIRTIDSDFGKKRQKKMDNHISSMIYEIKFHEFVLFILEKKMGATRRTFLTDLARKKGFRVENELSDSVTHIVAENNSGSDVLAWLKTHKMEKTTQFELLDISWLIESMKVGKPVDTKGKYQLMESRVDSANPDPTAGTLNILPPTTKTISQYACQRRTTLNNHNQRFTDALEILAENYEFKENDDTCLTFMRAISVLKCLPFEVVSLKDTEGLPWIGDEVKGIMEEIIEVGESLEVQAVLNDERYQSFKLFTSVFGVGVKTADKWYRMGLRTLEDVRSSKTLRLTKMQKAGLCYYEDLADGVTKAEADAVSLLVQDAVWTFDPDALVEITGGFRRGKPFGHDVDLLITSPGAEKEQEDQLLQKVTNLWKKQGLLLYGDLRESTFEDLKLPSRKIDALDHFQKCFAILKLYHHKVDKSKWETPTGSNESEAKSWKAIRVDLVVCPYDRFAFALLGWTGSRMFERDLRRYATHEKKMMLDNHALYDLTKKIFLKAKSEEEIFAHLGLEYLEPSERNA

SEQ ID NO: 225 - DNA, 1587 bp, synthetic construct
  misc_feature 1..1587: note = Variant of terminal deoxynucleotidyltransferase
  source 1..1587: mol_type = other DNA
atgcaccatcatcatcatcatggcggtagcggcatgcaccgcattcgtaccatcgattcggacttcgggaagaaacgccagaagaagatggataaccacattagttccatgatctatgaaatcaaatttcacgagtttgtgctgttcattctcgaaaagaaaatgggtgcgacgcgtcgtacttttctgacagatttagcccgcaagaaagggttccgcgtcgagaatgaactgtcagacagcgttacccacatcgtggcagaaaataattcaggatctgacgtattggcttggctgaagacccacaagatggagaagacgacgcaatttgaactgctggatattagctggcttatcgaaagcatgaaagttggtaaaccggtggacaccaaggggaaataccagttgatggaatcgcgtgtcgatagtgcgaacccagatccgacagccggtaccctcaacattctgcctcctactacgaagaccatttctcagtatgcgtgtcaacgccgcaccaccctgaacaaccataatcaacgttttacggacgcactggaaattcttgcggaaaattacgggttcaaagagaacgatgatacttgtctgacctttatgcgtgctatttccgtgctgaaatgccttccgtttgaggtagttagcctgaaagacacggaaggattgccctggatcggtgatgaagtcaaagggattatggaagaaatcatcgaggtcggtgaatcgctggaagtgcaggccgtgctcaatgatgagcgctatcaaagcttcaaactgtttaccagtgtctttggagtgggggtgaagacagcagacaaatggtaccgtatgggtctgcgcacgctcgaggatgttcgttccagcaagaccctgcgcttgaccaagatgcagaaagcgggtctgtgctattatgaagatcttgctgatggcgttacgaaagccgaagctgacgcgatttctctgctggttcaggatgcagtctggactttcgacccggatgcgctggtggagattacgggtggatttcgtcgtgggaaaccttttggtcacgacgttgatctgcttatcacatctccgggagctgagaaagaacaagaagaccagctcctgcacaaagtgaccaatctgtggaagaaacaagggttgttgctgtacggtgatctgcgtgaaagtacctttgaagatctgaaactcccatcccgcaagatcgatgccctggaccattttcagaaatgctttgcgatcctcaaactttatcaccataaagtggacaaaagcaaatgggaaacgccgacgggttcgaacgaaagcgaggccaaaagttggaaagcaattcgcgtagatctggttgtttgtccctacgatcgttttgcgtttgcgttgttgggttggaccggaagccgcatgttcgaacgtgatctgcgccgctacgccacccacgagaagaagatgatgctggacaatcatgcgctgtatgacctgaccaagaaaatctttctcaaagctaaatcggaagaggaaattttcgcacatctggggcttgaatacctggaaccgtccgaacgtaacgca

SEQ ID NO: 226 - protein, 529 aa, synthetic construct
  REGION 1..529: note = Variant of terminal deoxynucleotidyltransferase
MHHHHHHGGSGMHRIRTIDSDFGKKRQKKMDNHISSMIYEIKFHEFVLFILEKKMGATRRTFLTDLARKKGFRVENELSDSVTHIVAENNSGSDVLAWLKTHKMEKTTQFELLDISWLIESMKVGKPVDTKGKYQLMESRVDSANPDPTAGTLNILPPTTKTISQYACQRRTTLNNHNQRFTDALEILAENYGFKENDDTCLTFMRAISVLKCLPFEVVSLKDTEGLPWIGDEVKGIMEEIIEVGESLEVQAVLNDERYQSFKLFTSVFGVGVKTADKWYRMGLRTLEDVRSSKTLRLTKMQKAGLCYYEDLADGVTKAEADAISLLVQDAVWTFDPDALVEITGGFRRGKPFGHDVDLLITSPGAEKEQEDQLLHKVTNLWKKQGLLLYGDLRESTFEDLKLPSRKIDALDHFQKCFAILKLYHHKVDKSKWETPTGSNESEAKSWKAIRVDLVVCPYDRFAFALLGWTGSRMFERDLRRYATHEKKMMLDNHALYDLTKKIFLKAKSEEEIFAHLGLEYLEPSERNA

SEQ ID NO: 227 - DNA, 1587 bp, synthetic construct
  misc_feature 1..1587: note = Variant of terminal deoxynucleotidyltransferase
  source 1..1587: mol_type = other DNA
atgcaccatcatcatcatcatggcggtagcggcatgcaccgcattcgtaccatcgattcggacttcgggaagaaacgccagaagaagatggataaccacattagttccatgatctatgaaatcaaatttcacgagtttgtgctgttcattctcgaaaagaaaatgggtgcgacgcgtcgtacttttctgacagatttagcccgcaagaaagggttccgcgtcgagaatgaactgtcagacagcgttacccacatcgtggcagaaaataattcaggatctgacgtattggcttggctgaagacccacaagatggagaagacgacgcaatttgaactgctggatattagctggcttatcgaaagcatgaaagttggtaaaccggtggacaccaaggggaaataccagttgatggaatcgcgtgtcgatagtgcgaacccagatccgacagccggtaccctcaacattctgcctcctactacgaagaccatttctcagtatgcgtgtcaacgccgcaccaccctgaacaaccataatcaacgttttacggacgcactggaaattcttgcggaaaattacgagttcaaagaaaacgatgatacttgtctgacctttatgcgtgctatttccgtgctgaaatgccttccgtttgaggtagttagcctgaaagacacggaaggattgccctggatcggtgatgaagtcaaagggattatggaagaaatcatcgaggtcggtgaatcgctggaagtgcaggccgtgctcaatgatgagcgctatcaaagcttcaaactgtttaagagtgtctttggagtgggggtgaagacagcagacaaatggtaccgtatgggtctgcgcacgctcgaggatgttcgttccagcaagaccctgcgcttgaccaagatgcagaaagcgggtctgtgctattatgaagatcttgctgatggcgttacgaaagccgaagctgacgcggtatctctgctggttcaggatgcagtctggactttcgacccggatgcgctggtggagattacgggtggatttcgtcgtgggaaaccttttggtcacgacgttgatctgcttatcacatctccgggagctgagaaagaacaagaagaccagctcctgcagaaagtgaccgatctgtggaagaaacaagggttgttgctgtacggtgatctgcgtgaaagtcgctttgaagatgggaaactcccatcccgcaagatcgatgccctggaccattttcagaaatgctttgctatcctcaaactttatcaccataaagtggacaaaagcaaatgggaaatgccgacgggttcgaacgaaagcgaggccaaaagttggaaagcaattcgcgtagatctggttgtttgtccctacgatcgttttgcgtttgcgttgttgggttggaccggaagccgcatgttcgaacgtgatctgcgccgctacgccacccacgagaagaagatgatgctggacaatcatgcgctgtatgacctgaccaagaaaatctttctcaaagctaaatcggaagaggaaattttcgcacatctggggcttgaatacctggaaccgtccgaacgtaacgca

SEQ ID NO: 228 - protein, 529 aa, synthetic construct
  REGION 1..529: note = Variant of terminal deoxynucleotidyltransferase
MHHHHHHGGSGMHRIRTIDSDFGKKRQKKMDNHISSMIYEIKFHEFVLFILEKKMGATRRTFLTDLARKKGFRVENELSDSVTHIVAENNSGSDVLAWLKTHKMEKTTQFELLDISWLIESMKVGKPVDTKGKYQLMESRVDSANPDPTAGTLNILPPTTKTISQYACQRRTTLNNHNQRFTDALEILAENYEFKENDDTCLTFMRAISVLKCLPFEVVSLKDTEGLPWIGDEVKGIMEEIIEVGESLEVQAVLNDERYQSFKLFKSVFGVGVKTADKWYRMGLRTLEDVRSSKTLRLTKMQKAGLCYYEDLADGVTKAEADAVSLLVQDAVWTFDPDALVEITGGFRRGKPFGHDVDLLITSPGAEKEQEDQLLQKVTDLWKKQGLLLYGDLRESRFEDGKLPSRKIDALDHFQKCFAILKLYHHKVDKSKWEMPTGSNESEAKSWKAIRVDLVVCPYDRFAFALLGWTGSRMFERDLRRYATHEKKMMLDNHALYDLTKKIFLKAKSEEEIFAHLGLEYLEPSERNA

SEQ ID NO: 229 - DNA, 1587 bp, synthetic construct
  misc_feature 1..1587: note = Variant of terminal deoxynucleotidyltransferase
  source 1..1587: mol_type = other DNA
atgcaccatcatcatcatcatggcggtagcggcatgcaccgcattcgtaccatcgattcggacttcgggaagaaacgccagaagaagatggataaccacattagttccatgatctatgaaatcaaatttcacgagtttgtgctgttcattctcgaaaagaaaatgggtgcgacgcgtcgtacttttctgacagatttagcccgcaagaaagggttccgcgtcgagaatgaactgtcagacagcgttacccacatcgtggcagaaaataattcaggatctgacgtattggcttggctgaagacccacaagatggagaagacgacgcaatttgaactgctggatattagctggcttatcgaaagcatgaaagttggtaaaccggtggacaccaaggggaaataccagttgatggaatcgcgtgtcgatagtgcgaacccagatccgacagccggtaccctcaacattctgcctcctactacgaagaccatttctcagtatgcgtgtcaacgccgcaccaccctgaacaaccataatcaacgttttacggacgcactggagattcttgcggaaaattacgagttcaaagaaaacgatgatacttgtctgacctttatgcgtgctatttccgtgctgaaatgccttccgtttgaggtagttagcctgaaagacacggaaggattgccctggatcggtgatgaagtcaaaggtattatggaagaaatcatcgaggtcggtgaatcgctggaagtgcaggccgtgctcaatgatgagcgctatcaaagcttcaaactgtttaccagtgtctttggagtgggggtgaagacagcagacaaatggtaccgtatgggtctgcgcacgctcgaggatgttcgttccagcaagaccctgaaattgaccaagatgcagaaagcgggtctgtgctattatgaagatcttgctgatggcgttacgtcggccgaagctgacgcggtatctctgctggttcaggatgcagtctggactttcgacccggatgcgctggtggagattacgggtggatttcgtcgtgggaaaccttttggtcacgacgttgatctgcttatcacatctccgggagctgagaaagaacaagaagaccagctcctgcagaaagtgaccaatctgtggaagaaacaagggttgttgctgtacggtgacctgcgtcgcagtacctttgaagatctgaaactcccatcccgcaagatcgacgccctggaccattttcagaaatgctttgctatcctcaaactttatcaccataaagtggacaaaagcaaatgggaaatgccgacgggttcgaacgaaagcgaggccaaaagttggaaagcaattcgcgtagatctggttgtttgtccctacgatcgttttgcgtttgcgttgttgggttggaccggaagccgcatgttcgaacgtgatctgcgccgctacgccacccacgagaagaagatgatgctggacaatcatgcgctgtatgacctgaccaagaaaatctttctcaaagctaaatcggaagaggaaattttcgcacatctggggcttgaatacctggaaccgtccgaacgtaacgca

SEQ ID NO: 230 - protein, 529 aa, synthetic construct
  REGION 1..529: note = Variant of terminal deoxynucleotidyltransferase
MHHHHHHGGSGMHRIRTIDSDFGKKRQKKMDNHISSMIYEIKFHEFVLFILEKKMGATRRTFLTDLARKKGFRVENELSDSVTHIVAENNSGSDVLAWLKTHKMEKTTQFELLDISWLIESMKVGKPVDTKGKYQLMESRVDSANPDPTAGTLNILPPTTKTISQYACQRRTTLNNHNQRFTDALEILAENYEFKENDDTCLTFMRAISVLKCLPFEVVSLKDTEGLPWIGDEVKGIMEEIIEVGESLEVQAVLNDERYQSFKLFTSVFGVGVKTADKWYRMGLRTLEDVRSSKTLKLTKMQKAGLCYYEDLADGVTSAEADAVSLLVQDAVWTFDPDALVEITGGFRRGKPFGHDVDLLITSPGAEKEQEDQLLQKVTNLWKKQGLLLYGDLRRSTFEDLKLPSRKIDALDHFQKCFAILKLYHHKVDKSKWEMPTGSNESEAKSWKAIRVDLVVCPYDRFAFALLGWTGSRMFERDLRRYATHEKKMMLDNHALYDLTKKIFLKAKSEEEIFAHLGLEYLEPSERNA

SEQ ID NO: 231 - DNA, 1587 bp, synthetic construct
  misc_feature 1..1587: note = Variant of terminal deoxynucleotidyltransferase
  source 1..1587: mol_type = other DNA
atgcaccatcatcatcatcatggcggtagcggcatgcaccgcattcgtaccatcgattcggacttcgggaagaaacgccagaagaagatggataaccacattagttccatgatctatgaaatcaaatttcacgagtttgtgctgttcattctcgaaaagaaaatgggtgcgacgcgtcgtacttttctgacagatttagcccgcaagaaagggttccgcgtcgagaatgaactgtcagacagcgttacccacatcgtggcagaaaataattcaggatctgacgtattggcttggctgaagacccacaagatggagaagacgacgcaatttgaactgctggatattagctggcttatcgaaagcatgaaagttggtaaaccggtggacaccaaggggaaataccagttgatggaatcgcgtgtcgatagtgcgaacccagatccgacagccggtaccctcaacattctgcctcctactacgaagaccatttctcagtatgcgtgtcaacgccgcaccaccctgaacaaccataatcaacgttttacggacgcactggaaattcttgcggaaaattacgggttcaaatacaacgatgatacttgtctgacctttatgcgtgctatttccgtgctgaaatgccttccgtttgaggtagttagcctgaaagacacggaaggattgccctggatcggtgatgaagtcaaagggattatggaagaaatcatcgaggtcggtgaatcgctggaagtgcaggccgtgctcaatgatgagcgctatcaaagcttcaaactgtttaccagtgtctttggagtgggggtgaagacagcagacaaatggtaccgtatgggtctgcgcacgctcgaggatgttcgttccagcaagaccctgaaattgaccaagatgcagaaagcgggtctgtgctattatgaagatcttgctgatggcgttacgaaagccgaagctgacgcggtatctctgctggttcaggatgcagtctggactttcgacccggatgcgctggtggagattacgggtggatttcgtcgtgggaaaccttttggtcacgacgttgatctgcttatcacatctccgggagctgagaaagaacaagaagaccagctcctgcagaaagtgaccaatctgtggaagaaacaagggttgttgctgtacggtgatctgcgtgaaagtacctttgaagatctgaaactcccatcccgcaagatcgatgccctggaccattttcagaaatgctttgctatcctcaaactttatcaccataaagtggacaaaagcaaatgggaaatgccgacgggttcgaacgaaagcgaggccaaaagttggaaagcaattcgcgtagatctggttgtttgtccctacgatcgttttgcgtttgcgttgttgggttggaccggaagccgcatgttcgaacgtgatctgcgccgctacgccacccacgagaagaagatgatgctggacaatcatgcgctgtatgacctgaccaagaaaatctttctcaaagctaaatcggaagaggaaattttcgcacatctggggcttgaatacctggaaccgtccgaacgtaacgca

SEQ ID NO: 232 - protein, 529 aa, synthetic construct
  REGION 1..529: note = Variant of terminal deoxynucleotidyltransferase
MHHHHHHGGSGMHRIRTIDSDFGKKRQKKMDNHISSMIYEIKFHEFVLFILEKKMGATRRTFLTDLARKKGFRVENELSDSVTHIVAENNSGSDVLAWLKTHKMEKTTQFELLDISWLIESMKVGKPVDTKGKYQLMESRVDSANPDPTAGTLNILPPTTKTISQYACQRRTTLNNHNQRFTDALEILAENYGFKYNDDTCLTFMRAISVLKCLPFEVVSLKDTEGLPWIGDEVKGIMEEIIEVGESLEVQAVLNDERYQSFKLFTSVFGVGVKTADKWYRMGLRTLEDVRSSKTLKLTKMQKAGLCYYEDLADGVTKAEADAVSLLVQDAVWTFDPDALVEITGGFRRGKPFGHDVDLLITSPGAEKEQEDQLLQKVTNLWKKQGLLLYGDLRESTFEDLKLPSRKIDALDHFQKCFAILKLYHHKVDKSKWEMPTGSNESEAKSWKAIRVDLVVCPYDRFAFALLGWTGSRMFERDLRRYATHEKKMMLDNHALYDLTKKIFLKAKSEEEIFAHLGLEYLEPSERNA

SEQ ID NO: 233 - DNA, 1587 bp, synthetic construct
  misc_feature 1..1587: note = Variant of terminal deoxynucleotidyltransferase
  source 1..1587: mol_type = other DNA
atgcaccatcatcatcatcatggcggtagcggcatgcaccgcattcgtaccatcgattcggacttcgggaagaaacgccagaagaagatggataaccacattagttccatgatctatgaaatcaaatttcacgagtttgtgctgttcattctcgaaaagaaaatgggtgcgacgcgtcgtacttttctgacagatttagcccgcaagaaagggttccgcgtcgagaatgaactgtcagacagcgttacccacatcgtggcagaaaataattcaggatctgacgtattggcttggctgaagacccacaagatggagaagacgacgcaatttgaactgctggatattagctggcttatcgaaagcatgaaagttggtaaaccggtggacaccaaggggaaataccagttgatggaatcgcgtgtcgatagtgcgaacccagatccgacagccggtaccctcaacattctgcctcctactacgaagaccatttctcagtatgcgtgtcaacgccgcaccaccctgaacaaccataatcaacgttttacggacgcactggaaattcttgcggaaaattacgggttcaaagagaacgatgatacttgtctgacctttatgcgtgctatttccgtgctgaaatgccttccgtttgaggtagttagcctgaaagacacggaaggattgccctggatcggtgatgaagtcaaagggattatggaagaaatcatcgaggtcggtgaatcgctggaagtgcaggccgtgctcaatgatgagcgctatcaaagcttcaaactgtttaccagtgtctttggagtgggggtgaagacagcagacaaatggtaccgtatgggtctgcgcacgctcgaggatgttcgttccagcaagaccctgaaattgaccaagatgcagaaagcgggtctgtgctattatgaagatcttgctgatggcgttacgaaagccgaagctgacgcggtatctctgctggttcaggatgcagtctggactttcgacccggatgcgctggtggagattacgggtggatttcgtcgtgggaaaccttttggtcacgacgttgatctgcttatcacatctccgggagctgagaaagaacaagaagaccagctcctgcagaaagtgaccaatctgtggaagaaacaagggttgttgctgtacggtgatctgcgtgaaagtacctttgaagatctgaaactcccatcccgcaagatcgatgccctggaccattttcagaaatgctttgctatcctcaaactttatcaccataaagtggacaaaagcaaatgggaaacgccgacgggttcgaacgaaagcgaggccaaaagttggaaagcaattcgcgtagatctggttgtttgtccctacgatcgttttgcgtttgcgttgttgggttggaccggaagccgcatgttcgaacgtgatctgcgccgctacgccacccacgagaagaagatgatgctggacaatcatgcgctgtatgacctgaccaagaaaatctttctcaaagctaaatcggaagaggaaattttcgcacatctggggcttgaatacctggaaccgtccgaacgtaacgca

SEQ ID NO: 234 - protein, 529 aa, synthetic construct
  REGION 1..529: note = Variant of terminal deoxynucleotidyltransferase
MHHHHHHGGSGMHRIRTIDSDFGKKRQKKMDNHISSMIYEIKFHEFVLFILEKKMGATRRTFLTDLARKKGFRVENELSDSVTHIVAENNSGSDVLAWLKTHKMEKTTQFELLDISWLIESMKVGKPVDTKGKYQLMESRVDSANPDPTAGTLNILPPTTKTISQYACQRRTTLNNHNQRFTDALEILAENYGFKENDDTCLTFMRAISVLKCLPFEVVSLKDTEGLPWIGDEVKGIMEEIIEVGESLEVQAVLNDERYQSFKLFTSVFGVGVKTADKWYRMGLRTLEDVRSSKTLKLTKMQKAGLCYYEDLADGVTKAEADAVSLLVQDAVWTFDPDALVEITGGFRRGKPFGHDVDLLITSPGAEKEQEDQLLQKVTNLWKKQGLLLYGDLRESTFEDLKLPSRKIDALDHFQKCFAILKLYHHKVDKSKWETPTGSNESEAKSWKAIRVDLVVCPYDRFAFALLGWTGSRMFERDLRRYATHEKKMMLDNHALYDLTKKIFLKAKSEEEIFAHLGLEYLEPSERNA

SEQ ID NO: 235 - DNA, 1587 bp, synthetic construct
  misc_feature 1..1587: note = Variant of terminal deoxynucleotidyltransferase
  source 1..1587: mol_type = other DNA
atgcaccatcatcatcatcatggcggtagcggcatgcaccgcattcgtaccatcgattcggacttcgggaagaaacgccagaagaagatggataaccacattagttccatgatctatgaaatcaaatttcacgagtttgtgctgttcattctcgaaaagaaaatgggtgcgacgcgtcgtacttttctgacagatttagcccgcaagaaagggttccgcgtcgagaatgaactgtcagacagcgttacccacatcgtggcagaaaataattcaggatctgacgtattggcttggctgaagacccacaagatggagaagacgacgcaatttgaactgctggatattagctggcttatcgaaagcatgaaagttggtaaaccggtggacaccaaggggaaataccagttgatggaatcgcgtgtcgatagtgcgaacccagatccgacagccggtaccctcaacattctgcctcctactacgaagaccatttctcagtatgcgtgtcaacgccgcaccaccctgaacaaccataatcaacgttttacggacgcactggggattcttgcggaaaattacgagttcaaagaaaacgatgatacttgtctgacctttatgcgtgctatttccgtgctgaaatgccttccgtttgaggtagttagcctgaaagacacggaaggattgccctggatcggtgatgaagtcaaaccaattatggaagaaatcatcgaggtcggtgaatcgctggaagtgcaggccgtgctcaatgatgagcgctatcaaagcttcaaactgtttaccagtgtctttggagtgggggtgaagacagcagacaaatggtaccgtatgggtctgcgcacgctcgaggatgttcgttccagcaagaccctgaaattgaccaagatgcagaaagcgggtctgtgctattatgaagatcttgctgatggcgttacgtcggccgaagctgacgcggtatctctgctggttcaggatgcagtctggactttcgacccggatgcgctggtggagattacgggtggatttcgtcgtgggaaaccttttggtcacgacgttgatctgcttatcacatctccgggagctgagaaagaacaagaagaccagctcctgcagaaagtgaccaatctgtggaagaaacaagggttgttgctgtacggtgatctgcgtgaaagtacctttgaagatctgaaactcccatcccgcaagatcgatgccctggaccattttcagaaatgctttgctatcctcaaactttatcaccataaagtggacaaaagcaaatgggaaatgccgacgggttcgaacgaaagcgaggccaaaagttggaaagcaattcgcgtagatctggttgtttgtccctacgatcgttttgcgtttgcgttgttgggttggaccggaagccgcatgttcgaacgtgatctgcgccgctacgccacccacgagaagaagatgatgctggacaatcatgcgctgtatgacctgaccaagaaaatctttctcaaagctaaatcggaagaggaaattttcgcacatctggggcttgaatacctggaaccgtccgaacgtaacgca

SEQ ID NO: 236 - protein, 529 aa, synthetic construct
  REGION 1..529: note = Variant of terminal deoxynucleotidyltransferase
MHHHHHHGGSGMHRIRTIDSDFGKKRQKKMDNHISSMIYEIKFHEFVLFILEKKMGATRRTFLTDLARKKGFRVENELSDSVTHIVAENNSGSDVLAWLKTHKMEKTTQFELLDISWLIESMKVGKPVDTKGKYQLMESRVDSANPDPTAGTLNILPPTTKTISQYACQRRTTLNNHNQRFTDALGILAENYEFKENDDTCLTFMRAISVLKCLPFEVVSLKDTEGLPWIGDEVKPIMEEIIEVGESLEVQAVLNDERYQSFKLFTSVFGVGVKTADKWYRMGLRTLEDVRSSKTLKLTKMQKAGLCYYEDLADGVTSAEADAVSLLVQDAVWTFDPDALVEITGGFRRGKPFGHDVDLLITSPGAEKEQEDQLLQKVTNLWKKQGLLLYGDLRESTFEDLKLPSRKIDALDHFQKCFAILKLYHHKVDKSKWEMPTGSNESEAKSWKAIRVDLVVCPYDRFAFALLGWTGSRMFERDLRRYATHEKKMMLDNHALYDLTKKIFLKAKSEEEIFAHLGLEYLEPSERNA

SEQ ID NO: 237 - DNA, 1587 bp, synthetic construct
  misc_feature 1..1587: note = Variant of terminal deoxynucleotidyltransferase
  source 1..1587: mol_type = other DNA
atgcaccatcatcatcatcatggcggtagcggcatgcaccgcattcgtaccatcgattcggacttcgggaagaaacgccagaagaagatggataaccacattagttccatgatctatgaaatcaaatttcacgagtttgtgctgttcattctcgaaaagaaaatgggtgcgacgcgtcgtacttttctgacagatttagcccgcaagaaagggttccgcgtcgagaatgaactgtcagacagcgttacccacatcgtggcagaaaataattcaggatctgacgtattggcttggctgaagacccacaagatggagaagacgacgcaatttgaactgctggatattagctggcttatcgaaagcatgaaagttggtaaaccggtggacaccaaggggaaataccagttgatggaatcgcgtgtcgatagtgcgaacccagatccgacagccggtaccctcaacattctgcctcctactacgaagaccatttctcagtatgcgtgtcaacgccgcaccaccctgaacaaccataatcaacgttttacggacgcactggggattcttgcggaaaattacgagttcaaagaaaacgatgatacttgtctgacctttatgcgtgctatttccgtgctgaaatgccttccgtttgaggtagttagcctgaaagacacggaaggattgccctggatcggtgatgaagtcaaagggattatggaagaaatcatcgaggtcggtgaatcgctggaagtgcaggccgtgctcaatgatgagcgctatcaaagcttcaaactgtttaccagtgtctttggagtgggggtgaagacagcagacaaatggtaccgtcgtggtctgcgcacgctcgaggatgttcgttccagcaagaccctgaaattgaccaagatgcagaaagcgggtctgtgctattatgaagatcttgctgatggcgttacgtcggccgaagctgacgcggtatctctgctggttcaggatgcagtctggactttcgacccggatgcgctggtggagattacgggtggatttcgtcgtgggaaaccttttggtcacgacgttgatctgcttatcacatctccgggagctgagaaagaacaagaagaccagctcctgcagaaagtgaccaatctgtggaagaaacaagggttgttgctgtacggtgacctgcgtgaaagtacctttgaagatctgaaactcccatcccgcaagatcgacgccctggaccattttcagaaatgctttgctatcctcaaactttatcaccataaagtggacaaaagcaaatgggaaatgccgacgggttcgaacgaaagcgaggccaaaagttggaaagcaattcgcgtagatctggttgtttgtccctacgatcgttttgcgtttgcgttgttgggttggaccggaagccgcatgttcgaacgtgatctgcgccgctacgccacccacgagaagaagatgatgctggacaatcatgcgctgtatgacctgaccaagaaaatctttctcaaagctaaatcggaagaggaaattttcgcacatctggggcttgaatacctggaaccgtccgaacgtaacgca

SEQ ID NO: 238 - protein, 529 aa, synthetic construct
  REGION 1..529: note = Variant of terminal deoxynucleotidyltransferase
MHHHHHHGGSGMHRIRTIDSDFGKKRQKKMDNHISSMIYEIKFHEFVLFILEKKMGATRRTFLTDLARKKGFRVENELSDSVTHIVAENNSGSDVLAWLKTHKMEKTTQFELLDISWLIESMKVGKPVDTKGKYQLMESRVDSANPDPTAGTLNILPPTTKTISQYACQRRTTLNNHNQRFTDALGILAENYEFKENDDTCLTFMRAISVLKCLPFEVVSLKDTEGLPWIGDEVKGIMEEIIEVGESLEVQAVLNDERYQSFKLFTSVFGVGVKTADKWYRRGLRTLEDVRSSKTLKLTKMQKAGLCYYEDLADGVTSAEADAVSLLVQDAVWTFDPDALVEITGGFRRGKPFGHDVDLLITSPGAEKEQEDQLLQKVTNLWKKQGLLLYGDLRESTFEDLKLPSRKIDALDHFQKCFAILKLYHHKVDKSKWEMPTGSNESEAKSWKAIRVDLVVCPYDRFAFALLGWTGSRMFERDLRRYATHEKKMMLDNHALYDLTKKIFLKAKSEEEIFAHLGLEYLEPSERNA

SEQ ID NO: 239 - DNA, 1587 bp, synthetic construct
  misc_feature 1..1587: note = Variant of terminal deoxynucleotidyltransferase
  source 1..1587: mol_type = other DNA
atgcaccatcatcatcatcatggcggtagcggcatgcaccgcattcgtaccatcgattcggacttcgggaagaaacgccagaagaagatggataaccacattagttccatgatctatgaaatcaaatttcacgagtttgtgctgttcattctcgaaaagaaaatgggtgcgacgcgtcgtacttttctgacagatttagcccgcaagaaagggttccgcgtcgagaatgaactgtcagacagcgttacccacatcgtggcagaaaataattcaggatctgacgtattggcttggctgaagacccacaagatggagaagacgacgcaatttgaactgctggatattagctggcttatcgaaagcatgaaagttggtaaaccggtggacaccaaggggaaataccagttgatggaatcgcgtgtcgatagtgcgaacccagatccgacagccggtaccctcaacattctgcctcctactacgaagaccatttctcagtatgcgtgtcaacgccgcaccaccctgaacaaccataatcaacgttttacggacgcactggaaattcttgcggaaaattacgggttcaaatacaacgatgatacttgtctgacctttatgcgtgctatttccgtgctgaaatgccttccgtttgaggtagttagcctgaaagacacggaaggattgccctggatcggtgatgaagtcaaagggattatggaagaaatcatcgaggtcggtgaatcgctggaagtgcaggccgtgctcaatgatgagcgctatcaaagcttcaaactgtttaagagtgtctttggagtgggggtgaagacagcagacaaatggtaccgtatgggtctgcgcacgctcgaggatgttcgttccagcaagaccctgaagttgaccaagatgcagaaagcgggtctgtgctattatgaagatcttgctgatggcgttacgaaagccgaagctgacgcgatttctctgctggttcaggatgcagtctggactttcgacccggatgcgctggtggagattacgggtggatttcgtcgtgggaaaccttttggtcacgacgttgatctgcttatcacatctccgggagctgagaaagaacaagaagaccagctcctgcacaaagtgaccgatctttggaagaaacaagggttgttgctgtacggtgatctgcgtgaaagtacctttgaagatctgaaactcccatcccgcaagatcgatgccctggaccattttcagaaatgctttgctatcctcaaactttatcaccataaagtggacaaaagcaaatgggaaatgccgacgggttcgaacgaaagcgaggccaaaagttggaaagcaattcgcgtagatctggttgtttgtccctacgatcgttttgcgtttgcgttgttgggttggaccggaagccgcatgttcgaacgtgatctgcgccgctacgccacccacgagaagaagatgatgctggacaatcatgcgctgtatgacctgaccaagaaaatctttctcaaagctaaatcggaagaggaaattttcgcacatctggggcttgaatacctggaaccgtccgaacgtaacgca

SEQ ID NO: 240 - protein, 529 aa, synthetic construct
  REGION 1..529: note = Variant of terminal deoxynucleotidyltransferase
MHHHHHHGGSGMHRIRTIDSDFGKKRQKKMDNHISSMIYEIKFHEFVLFILEKKMGATRRTFLTDLARKKGFRVENELSDSVTHIVAENNSGSDVLAWLKTHKMEKTTQFELLDISWLIESMKVGKPVDTKGKYQLMESRVDSANPDPTAGTLNILPPTTKTISQYACQRRTTLNNHNQRFTDALEILAENYGFKYNDDTCLTFMRAISVLKCLPFEVVSLKDTEGLPWIGDEVKGIMEEIIEVGESLEVQAVLNDERYQSFKLFKSVFGVGVKTADKWYRMGLRTLEDVRSSKTLKLTKMQKAGLCYYEDLADGVTKAEADAISLLVQDAVWTFDPDALVEITGGFRRGKPFGHDVDLLITSPGAEKEQEDQLLHKVTDLWKKQGLLLYGDLRESTFEDLKLPSRKIDALDHFQKCFAILKLYHHKVDKSKWEMPTGSNESEAKSWKAIRVDLVVCPYDRFAFALLGWTGSRMFERDLRRYATHEKKMMLDNHALYDLTKKIFLKAKSEEEIFAHLGLEYLEPSERNA

SEQ ID NO: 241 - DNA, 1587 bp, synthetic construct
  misc_feature 1..1587: note = Variant of terminal deoxynucleotidyltransferase
  source 1..1587: mol_type = other DNA
atgcaccatcatcatcatcatggcggtagcggcatgcaccgcattcgtaccatcgattcggacttcgggaagaaacgccagaagaagatggataaccacattagttccatgatctatgaaatcaaatttcacgagtttgtgctgttcattctcgaaaagaaaatgggtgcgacgcgtcgtacttttctgacagatttagcccgcaagaaagggttccgcgtcgagaatgaactgtcagacagcgttacccacatcgtggcagaaaataattcaggatctgacgtattggcttggctgaagacccacaagatggagaagacgacgcaatttgaactgctggatattagctggcttatcgaaagcatgaaagttggtaaaccggtggacaccaaggggaaataccagttgatggaatcgcgtgtcgatagtgcgaacccagatccgacagccggtaccctcaacattctgcctcctactacgaagaccatttctcagtatgcgtgtcaacgccgcaccaccctgaacaaccataatcaacgttttacggacgcactggagattcttgcggaaaattacgagttcaaagaaaacgatgatacttgtctgacctttatgcgtgctatttccgtgctgaaatgccttccgtttgaggtagttagcctgaaagacacggaaggattgccctggatcggtgatgaagtcaaagggattatggaagaaatcatcgaggtcggtgaatcgctggaagtgcaggccgtgctcaatgatgagcgctatcaaagcttcaaactgtttaccagtgtctttggagtgggggtgaagacagcagacaaatggtaccgtcgtggtctgcgcacgctcgaggatgttcgttccagcaagaccctgaaattgaccaagatgcagaaagcgggtctgtgctattatgaagatcttgctgatggcgttacgtcggccgaagctgacgcggtatctctgctggttcaggatgcagtctggactttcgacccggatgcgctggtggagattacgggtggatttcgtcgtgggaaaccttttggtcacgacgttgatctgcttatcacatctccgggagctgagaaagaacaagaagaccagctcctgcagaaagtgaccaatctgtggaagaaacaagggttgttgctgtacggtgacctgcgtgaaagtacctttgaagatctgaaactcccatcccgcaagatcgacgccctggaccattttcagaaatgctttgctatcctcaaactttatcaccataaagtggacaaaagcaaatgggaaatgccgacgggttcgaacgaaagcgaggccaaaagttggaaagcaattcgcgtagatctggttgtttgtccctacgatcgttttgcgtttgcgttgttgggttggaccggaagccgcatgttcgaacgtgatctgcgccgctacgccacccacgagaagaagatgatgctggacaatcatgcgctgtatgacctgaccaagaaaatctttctcaaagctaaatcggaagaggaaattttcgcacatctggggcttgaatacctggaaccgtccgaacgtaacgca

SEQ ID NO: 242 - protein, 529 aa, synthetic construct
  REGION 1..529: note = Variant of terminal deoxynucleotidyltransferase
MHHHHHHGGSGMHRIRTIDSDFGKKRQKKMDNHISSMIYEIKFHEFVLFILEKKMGATRRTFLTDLARKKGFRVENELSDSVTHIVAENNSGSDVLAWLKTHKMEKTTQFELLDISWLIESMKVGKPVDTKGKYQLMESRVDSANPDPTAGTLNILPPTTKTISQYACQRRTTLNNHNQRFTDALEILAENYEFKENDDTCLTFMRAISVLKCLPFEVVSLKDTEGLPWIGDEVKGIMEEIIEVGESLEVQAVLNDERYQSFKLFTSVFGVGVKTADKWYRRGLRTLEDVRSSKTLKLTKMQKAGLCYYEDLADGVTSAEADAVSLLVQDAVWTFDPDALVEITGGFRRGKPFGHDVDLLITSPGAEKEQEDQLLQKVTNLWKKQGLLLYGDLRESTFEDLKLPSRKIDALDHFQKCFAILKLYHHKVDKSKWEMPTGSNESEAKSWKAIRVDLVVCPYDRFAFALLGWTGSRMFERDLRRYATHEKKMMLDNHALYDLTKKIFLKAKSEEEIFAHLGLEYLEPSERNA

SEQ ID NO: 243 - DNA, 1587 bp, synthetic construct
  misc_feature 1..1587: note = Variant of terminal deoxynucleotidyltransferase
  source 1..1587: mol_type = other DNA
atgcaccatcatcatcatcatggcggtagcggcatgcaccgcattcgtaccatcgattcggacttcgggaagaaacgccagaagaagatggataaccacattagttccatgatctatgaaatcaaatttcacgagtttgtgctgttcattctcgaaaagaaaatgggtgcgacgcgtcgtacttttctgacagatttagcccgcaagaaagggttccgcgtcgagaatgaactgtcagacagcgttacccacatcgtggcagaaaataattcaggatctgacgtattggcttggctgaagacccacaagatggagaagacgacgcaatttgaactgctggatattagctggcttatcgaaagcatgaaagttggtaaaccggtggacaccaaggggaaataccagttgatggaatcgcgtgtcgatagtgcgaacccagatccgacagccggtaccctcaacattctgcctcctactacgaagaccatttctcagtatgcgtgtcaacgccgcaccaccctgaacaaccataatcaacgttttacggacgcactggaaattcttgcggaaaattacgggttcaaacgcaacgatgatacttgtctgacctttatgcgtgctatttccgtgctgaaatgccttccgtttgaggtagttagcctgaaagacacggaaggattgccctggatcggtgatgaagtcaaagggattatggaagaaatcatcgaggtcggtgaatcgctggaagtgcaggccgtgctcaatgatgagcgctatcaaagcttcaaactgtttaccagtgtctttggagtgggggtgaagacagcagacaaatggtaccgtatgggtctgcgcacgctcgaggatgttcgttccagcaagaccctgcgcttgaccaagatgcagaaagcgggtctgtgctattatgaagatcttgctgatggcgttacgaaagccgaagctgacgcggtatctctgctggttcaggatgcagtctggactttcgacccggatgcgctggtggagattacgggtggatttcgtcgtgggaaaccttttggtcacgacgttgatctgcttatcacatctccgggagctgagaaagaacaagaagaccagctcctgcagaaagtgaccaatctgtggaagaaacaagggttgttgctgtacggtgatctgcgtgaaagtacctttgaagatctgaaactcccatcccgcaagatcgatgccctggaccattttcagaaatgctttgcgatcctcaaactttatcaccataaagtggacaaaagcaaatgggaaatgccgacgggttcgaacgaaagcgaggccaaaagttggaaagcaattcgcgtagatctggttgtttgtccctacgatcgttttgcgtttgcgttgttgggttggaccggaagccgcatgttcgaacgtgatctgcgccgctacgccacccacgagaagaagatgatgctggacaatcatgcgctgtatgacctgaccaagaaaatctttctcaaagctaaatcggaagaggaaattttcgcacatctggggcttgaatacctggaaccgtccgaacgtaacgca

SEQ ID NO: 244 - protein, 529 aa, synthetic construct
  REGION 1..529: note = Variant of terminal deoxynucleotidyltransferase
MHHHHHHGGSGMHRIRTIDSDFGKKRQKKMDNHISSMIYEIKFHEFVLFILEKKMGATRRTFLTDLARKKGFRVENELSDSVTHIVAENNSGSDVLAWLKTHKMEKTTQFELLDISWLIESMKVGKPVDTKGKYQLMESRVDSANPDPTAGTLNILPPTTKTISQYACQRRTTLNNHNQRFTDALEILAENYGFKRNDDTCLTFMRAISVLKCLPFEVVSLKDTEGLPWIGDEVKGIMEEIIEVGESLEVQAVLNDERYQSFKLFTSVFGVGVKTADKWYRMGLRTLEDVRSSKTLRLTKMQKAGLCYYEDLADGVTKAEADAVSLLVQDAVWTFDPDALVEITGGFRRGKPFGHDVDLLITSPGAEKEQEDQLLQKVTNLWKKQGLLLYGDLRESTFEDLKLPSRKIDALDHFQKCFAILKLYHHKVDKSKWEMPTGSNESEAKSWKAIRVDLVVCPYDRFAFALLGWTGSRMFERDLRRYATHEKKMMLDNHALYDLTKKIFLKAKSEEEIFAHLGLEYLEPSERNA

SEQ ID NO: 245 - DNA, 1587 bp, synthetic construct
  misc_feature 1..1587: note = Variant of terminal deoxynucleotidyltransferase
  source 1..1587: mol_type = other DNA
atgcaccatcatcatcatcatggcggtagcggcatgcaccgcattcgtaccatcgattcggacttcgggaagaaacgccagaagaagatggataaccacattagttccatgatctatgaaatcaaatttcacgagtttgtgctgttcattctcgaaaagaaaatgggtgcgacgcgtcgtacttttctgacagatttagcccgcaagaaagggttccgcgtcgagaatgaactgtcagacagcgttacccacatcgtggcagaaaataattcaggatctgacgtattggcttggctgaagacccacaagatggagaagacgacgcaatttgaactgctggatattagctggcttatcgaaagcatgaaagttggtaaaccggtggacaccaaggggaaataccagttgatggaatcgcgtgtcgatagtgcgaacccagatccgacagccggtaccctcaacattctgcctcctactacgaagaccatttctcagtatgcgtgtcaacgccgcaccaccctgaacaaccataatcaacgttttacggacgcactggaaattcttgcggaaaattacgggttcaaatacaacgatgatacttgtctgacctttatgcgtgctatttccgtgctgaaatgccttccgtttgaggtagttagcctgaaagacacggaaggattgccctggatcggtgatgaagtcaaagggattatggaagaaatcatcgaggtcggtgaatcgctggaagtgcaggccgtgctcaatgatgagcgctatcaaagcttcaaactgtttacgagtgtctttggagtgggggtgaagacagcagacaaatggtaccgtatgggtctgcgcacgctcgaggatgttcgttccagcaagaccctgaagttgaccaagatgcagaaagcgggtctgtgctattatgaagatcttgctgatggcgttacgaaagccgaagctgacgcggtttctctgctggttcaggatgcagtctggactttcgacccggatgcgctggtggagattacgggtggatttcgtcgtgggaaaccttttggtcacgacgttgatctgcttatcacatctccgggagctgagaaagaacaagaagaccagctcctgcacaaagtgaccgatctgtggaagaaacaagggttgttgctgtacggtgatctgcgtgaaagtacctttgaagatctgaaacttccatcccgcaagatcgatgccctggaccattttcagaaatgctttgctatcctcaaactttatcaccataaagtggacaaaagcaaatgggaaatgccgacgggttcgaacgaaagcgaggccaaaagttggaaagcaattcgcgtagatctggttgtttgtccctacgatcgttttgcgtttgcgttgttgggttggaccggaagccgcatgttcgaacgtgatctgcgccgctacgccacccacgagaagaagatgatgctggacaatcatgcgctgtatgacctgaccaagaaaatctttctcaaagctaaatcggaagaggaaattttcgcacatctggggcttgaatacctggaaccgtccgaacgtaacgca

SEQ ID NO: 246 - protein, 529 aa, synthetic construct
  REGION 1..529: note = Variant of terminal deoxynucleotidyltransferase
MHHHHHHGGSGMHRIRTIDSDFGKKRQKKMDNHISSMIYEIKFHEFVLFILEKKMGATRRTFLTDLARKKGFRVENELSDSVTHIVAENNSGSDVLAWLKTHKMEKTTQFELLDISWLIESMKVGKPVDTKGKYQLMESRVDSANPDPTAGTLNILPPTTKTISQYACQRRTTLNNHNQRFTDALEILAENYGFKYNDDTCLTFMRAISVLKCLPFEVVSLKDTEGLPWIGDEVKGIMEEIIEVGESLEVQAVLNDERYQSFKLFTSVFGVGVKTADKWYRMGLRTLEDVRSSKTLKLTKMQKAGLCYYEDLADGVTKAEADAVSLLVQDAVWTFDPDALVEITGGFRRGKPFGHDVDLLITSPGAEKEQEDQLLHKVTDLWKKQGLLLYGDLRESTFEDLKLPSRKIDALDHFQKCFAILKLYHHKVDKSKWEMPTGSNESEAKSWKAIRVDLVVCPYDRFAFALLGWTGSRMFERDLRRYATHEKKMMLDNHALYDLTKKIFLKAKSEEEIFAHLGLEYLEPSERNA

SEQ ID NO: 247 - DNA, 1587 bp, synthetic construct
  misc_feature 1..1587: note = Variant of terminal deoxynucleotidyltransferase
  source 1..1587: mol_type = other DNA
atgcaccatcatcatcatcatggcggtagcggcatgcaccgcattcgtaccatcgattcggacttcgggaagaaacgccagaagaagatggataaccacattagttccatgatctatgaaatcaaatttcacgagtttgtgctgttcattctcgaaaagaaaatgggtgcgacgcgtcgtacttttctgacagatttagcccgcaagaaagggttccgcgtcgagaatgaactgtcagacagcgttacccacatcgtggcagaaaataattcaggatctgacgtattggcttggctgaagacccacaagatggagaagacgacgcaatttgaactgctggatattagctggcttatcgaaagcatgaaagttggtaaaccggtggacaccaaggggaaataccagttgatggaatcgcgtgtcgatagtgcgaacccagatccgacagccggtaccctcaacattctgcctcctactacgaagaccatttctcagtatgcgtgtcaacgccgcaccaccctgaacaaccataatcaacgttttacggacgcactggaaattcttgcggaaaattacgagttcaaagaaaacgatgatacttgtctgacctttatgcgtgctatttccgtgctgaaatgccttccgtttgaggtagttagcctgaaagacacggaaggattgccctggatcggtgatgaagtcaaagggattatggaagaaatcatcgaggtcggtgaatcgctggaagtgcaggccgtgctcaatgatgagcgctatcaaagcttcaaactgtttaccagtgtctttggagtgggggtgaagacagcagacaaatggtaccgtcgtggtctgcgcacgctcgaggatgttcgttccagcaagaccctgaaattgaccaagatgcagaaagcgggtctgtgctattatgaagatcttgctgatggcgttacgaaagccgaagctgacgcggtatctctgctggttcaggatgcagtctggactttcgacccggatgcgctggtggagattacgggtggatttcgtcgtgggaaaccttttggtcacgacgttgatctgcttatcacatctccgggagctgagaaagaacaagaagaccagctcctgcagaaagtgaccaatctgtggaagaaacaagggttgttgctgtacggtgacctgcgtgaaagtacctttgaagatctgaaactcccatcccgcaagatcgatgccctggaccattttcagaaatgctttgctatcctcaaactttatcaccataaagtggacaaaagcaaatgggaaatgccgacgggttcgaacgaaagcgaggccaaaagttggaaagcaattcgcgtagatctggttgtttgtccctacgatcgttttgcgtttgcgttgttgggttggaccggaagccgcatgttcgaacgtgatctgcgcgagtacgccacccacgagaagaagatgatgctggacaatcatgcgctgtatgacctgaccaagaaaatctttctcaaagctaaatcggaagaggaaattttcgcacatctggggcttgaatacctggaaccgtccgaacgtaacgca

SEQ ID NO: 248 - protein, 529 aa, synthetic construct
  REGION 1..529: note = Variant of terminal deoxynucleotidyltransferase
MHHHHHHGGSGMHRIRTIDSDFGKKRQKKMDNHISSMIYEIKFHEFVLFILEKKMGATRRTFLTDLARKKGFRVENELSDSVTHIVAENNSGSDVLAWLKTHKMEKTTQFELLDISWLIESMKVGKPVDTKGKYQLMESRVDSANPDPTAGTLNILPPTTKTISQYACQRRTTLNNHNQRFTDALEILAENYEFKENDDTCLTFMRAISVLKCLPFEVVSLKDTEGLPWIGDEVKGIMEEIIEVGESLEVQAVLNDERYQSFKLFTSVFGVGVKTADKWYRRGLRTLEDVRSSKTLKLTKMQKAGLCYYEDLADGVTKAEADAVSLLVQDAVWTFDPDALVEITGGFRRGKPFGHDVDLLITSPGAEKEQEDQLLQKVTNLWKKQGLLLYGDLRESTFEDLKLPSRKIDALDHFQKCFAILKLYHHKVDKSKWEMPTGSNESEAKSWKAIRVDLVVCPYDRFAFALLGWTGSRMFERDLREYATHEKKMMLDNHALYDLTKKIFLKAKSEEEIFAHLGLEYLEPSERNA

SEQ ID NO: 249 - DNA, 1587 bp, synthetic construct
  misc_feature 1..1587: note = Variant of terminal deoxynucleotidyltransferase
  source 1..1587: mol_type = other DNA
atgcaccatcatcatcatcatggcggtagcggcatgcaccgcattcgtaccatcgattcggacttcgggaagaaacgccagaagaagatggataaccacattagttccatgatctatgaaatcaaatttcacgagtttgtgctgttcattctcgaaaagaaaatgggtgcgacgcgtcgtacttttctgacagatttagcccgcaagaaagggttccgcgtcgagaatgaactgtcagacagcgttacccacatcgtggcagaaaataattcaggatctgacgtattggcttggctgaagacccacaagatggagaagacgacgcaatttgaactgctggatattagctggcttatcgaaagcatgaaagttggtaaaccggtggacaccaaggggaaataccagttgatggaatcgcgtgtcgatagtgcgaacccagatccgacagccggtaccctcaacattctgcctcctactacgaagaccatttctcagtatgcgtgtcaacgccgcaccaccctgaacaaccataatcaacgttttacggacgcactggagattcttgcggaaaattacgagttcaaagaaaacgatgatacttgtctgacctttatgcgtgctatttccgtgctgaaatgccttccgtttgaggtagttagcctgaaagacacggaaggattgccctggatcggtgatgaagtcaaaccaattatggaagaaatcatcgaggtcggtgaatcgctggaagtgcaggccgtgctcaatgatgagcgctatcaaagcttcaaactgtttaccagtgtctttggagtgggggtgaagacagcagacaaatggtaccgtatgggtctgcgcacgctcgaggatgttcgttccagcaagaccctgaaattgaccaagatgcagaaagcgggtctgtgctattatgaagatcttgctgatggcgttacgtcggccgaagctgacgcggtatctctgctggttcaggatgcagtctggactttcgacccggatgcgctggtggagattacgggtggatttcgtcgtgggaaaccttttggtcacgacgttgatctgcttatcacatctccgggagctgagaaagaacaagaagaccagctcctgcagaaagtgaccaatctgtggaagaaacaagggttgttgctgtacggtgatctgcgtgaaagtacctttgaagatctgaaactcccatcccgcaagatcgatgccctggaccattttcagaaatgctttgctatcctcaaactttatcaccataaagtggacaaaagcaaatgggaaatgccgacgggttcgaacgaaagcgaggccaaaagttggaaagcaattcgcgtagatctggttgtttgtccctacgatcgttttgcgtttgcgttgttgggttggaccggaagccgcatgttcgaacgtgatctgcgcgagtacgccacccacgagaagaagatgatgctggacaatcatgcgctgtatgacctgaccaagaaaatctttctcaaagctaaatcggaagaggaaattttcgcacatctggggcttgaatacctggaaccgtccgaacgtaacgca

SEQ ID NO: 250 - protein, 529 aa, synthetic construct
  REGION 1..529: note = Variant of terminal deoxynucleotidyltransferase
MHHHHHHGGSGMHRIRTIDSDFGKKRQKKMDNHISSMIYEIKFHEFVLFILEKKMGATRRTFLTDLARKKGFRVENELSDSVTHIVAENNSGSDVLAWLKTHKMEKTTQFELLDISWLIESMKVGKPVDTKGKYQLMESRVDSANPDPTAGTLNILPPTTKTISQYACQRRTTLNNHNQRFTDALEILAENYEFKENDDTCLTFMRAISVLKCLPFEVVSLKDTEGLPWIGDEVKPIMEEIIEVGESLEVQAVLNDERYQSFKLFTSVFGVGVKTADKWYRMGLRTLEDVRSSKTLKLTKMQKAGLCYYEDLADGVTSAEADAVSLLVQDAVWTFDPDALVEITGGFRRGKPFGHDVDLLITSPGAEKEQEDQLLQKVTNLWKKQGLLLYGDLRESTFEDLKLPSRKIDALDHFQKCFAILKLYHHKVDKSKWEMPTGSNESEAKSWKAIRVDLVVCPYDRFAFALLGWTGSRMFERDLREYATHEKKMMLDNHALYDLTKKIFLKAKSEEEIFAHLGLEYLEPSERNA

SEQ ID NO: 251 - DNA, 1587 bp, synthetic construct
  misc_feature 1..1587: note = Variant of terminal deoxynucleotidyltransferase
  source 1..1587: mol_type = other DNA
atgcaccatcatcatcatcatggcggtagcggcatgcaccgcattcgtaccatcgattcggacttcgggaagaaacgccagaagaagatggataaccacattagttccatgatctatgaaatcaaatttcacgagtttgtgctgttcattctcgaaaagaaaatgggtgcgacgcgtcgtacttttctgacagatttagcccgcaagaaagggttccgcgtcgagaatgaactgtcagacagcgttacccacatcgtggcagaaaataattcaggatctgacgtattggcttggctgaagacccacaagatggagaagacgacgcaatttgaactgctggatattagctggcttatcgaaagcatgaaagttggtaaaccggtggacaccaaggggaaataccagttgatggaatcgcgtgtcgatagtgcgaacccagatccgacagccggtaccctcaacattctgcctcctactacgaagaccatttctcagtatgcgtgtcaacgccgcaccaccctgaacaaccataatcaacgttttacggacgcactggaaattcttgcggaaaattacgagttcaaagaaaacgatgatacttgtctgacctttatgcgtgctatttccgtgctgaaatgccttccgtttgaggtagttagcctgaaagacacggaaggattgccctggatcggtgatgaagtcaaaggtattatggaagaaatcatcgaggtcggtgaatcgctggaagtgcaggccgtgctcaatgatgagcgctatcaaagcttcaaactgtttaccagtgtctttggagtgggggtgaagacagcagacaaatggtaccgtcgtggtctgcgcacgctcgaggatgttcgttccagcaagaccctgaaattgaccaagatgcagaaagcgggtctgtgctattatgaagatcttgctgatggcgttacgaaggccgaagctgacgcggtatctctgctggttcaggatgcagtctggactttcgacccggatgcgctggtggagattacgggtggatttcgtcgtgggaaaccttttggtcacgacgttgatctgcttatcacatctccgggagctgagaaagaacaagaagaccagctcctgcagaaagtgaccaatctgtggaagaaacaagggttgttgctgtacggtgatctgcgtgaaagtacctttgaagatctgaaactcccatcccgcaagatcgatgccctggaccattttcagaaatgctttgctatcctcaaactttatcaccataaagtggacaaaagcaaatgggaaatgccgacgggttcgaacgaaagcgaggccaaaagttggaaagcaattcgcgtagatctggttgtttgtccctacgatcgttttgcgtttgcgttgttgggttggaccggaagccgcatgttcgaacgtgatctgcgccgctacgccacccacgagaagaagatgatgctggacaatcatgcgctgtatgacctgaccaagaaaatctttctcaaagctaaatcggaagaggaaattttcgcacatctggggcttgaatacctggaaccgtccgaacgtaacgca

SEQ ID NO: 252 - protein, 529 aa, synthetic construct
  REGION 1..529: note = Variant of terminal deoxynucleotidyltransferase
MHHHHHHGGSGMHRIRTIDSDFGKKRQKKMDNHISSMIYEIKFHEFVLFILEKKMGATRRTFLTDLARKKGFRVENELSDSVTHIVAENNSGSDVLAWLKTHKMEKTTQFELLDISWLIESMKVGKPVDTKGKYQLMESRVDSANPDPTAGTLNILPPTTKTISQYACQRRTTLNNHNQRFTDALEILAENYEFKENDDTCLTFMRAISVLKCLPFEVVSLKDTEGLPWIGDEVKGIMEEIIEVGESLEVQAVLNDERYQSFKLFTSVFGVGVKTADKWYRRGLRTLEDVRSSKTLKLTKMQKAGLCYYEDLADGVTKAEADAVSLLVQDAVWTFDPDALVEITGGFRRGKPFGHDVDLLITSPGAEKEQEDQLLQKVTNLWKKQGLLLYGDLRESTFEDLKLPSRKIDALDHFQKCFAILKLYHHKVDKSKWEMPTGSNESEAKSWKAIRVDLVVCPYDRFAFALLGWTGSRMFERDLRRYATHEKKMMLDNHALYDLTKKIFLKAKSEEEIFAHLGLEYLEPSERNA

SEQ ID NO: 253 - DNA, 1587 bp, synthetic construct
  misc_feature 1..1587: note = Variant of terminal deoxynucleotidyltransferase
  source 1..1587: mol_type = other DNA
atgcaccatcatcatcatcatggcggtagcggcatgcaccgcattcgtaccatcgattcggacttcgggaagaaacgccagaagaagatggataaccacattagttccatgatctatgaaatcaaatttcacgagtttgtgctgttcattctcgaaaagaaaatgggtgcgacgcgtcgtacttttctgacagatttagcccgcaagaaagggttccgcgtcgagaatgaactgtcagacagcgttacccacatcgtggcagaaaataattcaggatctgacgtattggcttggctgaagacccacaagatggagaagacgacgcaatttgaactgctggatattagctggcttatcgaaagcatgaaagttggtaaaccggtggacaccaaggggaaataccagttgatggaatcgcgtgtcgatagtgcgaacccagatccgacagccggtaccctcaacattctgcctcctactacgaagaccatttctcagtatgcgtgtcaacgccgcaccaccctgaacaaccataatcaacgttttacggacgcactggaaattcttgcggaaaattacgggttcaaatacaacgatgatacttgtctgacctttatgcgtgctatttccgtgctgaaatgccttccgtttgaggtagttagcctgaaagacacggaaggattgccctggatcggtgatgaagtcaaagggattatggaagaaatcatcgaggtcggtgaatcgctggaagtgcaggccgtgctcaatgatgagcgctatcaaagcttcaaactgtttaccagtgtctttggagtgggggtgaagacagcagacaaatggtaccgtatgggtctgcgcacgctcgaggatgttcgttccagcaagaccctgaaattgaccaagatgcagaaagcgggtctgtgctattatgaagatcttgctgatggcgttacgaaagccgaagctgacgcgatttctctgctggttcaggatgcagtctggactttcgacccggatgcgctggtggagattacgggtggatttcgtcgtgggaaaccttttggtcacgacgttgatctgcttatcacatctccgggagctgagaaagaacaagaagaccagctcctgcagaaagtgaccaatctgtggaagaaacaagggttgttgctgtacggtgatctgcgtgaaagtcgctttgaagatgggaaactcccatcccgcaagatcgatgccctggaccattttcagaaatgctttgctatcctcaaactttatcaccataaagtggacaaaagcaaatgggaaatgccgacgggttcgaacatgagcgaggccaaaagttggaaagcaattcgcgtagatctggttgtttgtccctacgatcgttttgcgtttgcgttgttgggttggaccggaagccgcatgttcgaacgtgatctgcgccgctacgccacccacgagaagaagatgatgctggacaatcatgcgctgtatgacctgaccaagaaaatctttctcaaagctaaatcggaagaggaaattttcgcacatctggggcttgaatacctggaaccgtccgaacgtaacgca

SEQ ID NO: 254 - protein, 529 aa, synthetic construct
  REGION 1..529: note = Variant of terminal deoxynucleotidyltransferase
MHHHHHHGGSGMHRIRTIDSDFGKKRQKKMDNHISSMIYEIKFHEFVLFILEKKMGATRRTFLTDLARKKGFRVENELSDSVTHIVAENNSGSDVLAWLKTHKMEKTTQFELLDISWLIESMKVGKPVDTKGKYQLMESRVDSANPDPTAGTLNILPPTTKTISQYACQRRTTLNNHNQRFTDALEILAENYGFKYNDDTCLTFMRAISVLKCLPFEVVSLKDTEGLPWIGDEVKGIMEEIIEVGESLEVQAVLNDERYQSFKLFTSVFGVGVKTADKWYRMGLRTLEDVRSSKTLKLTKMQKAGLCYYEDLADGVTKAEADAISLLVQDAVWTFDPDALVEITGGFRRGKPFGHDVDLLITSPGAEKEQEDQLLQKVTNLWKKQGLLLYGDLRESRFEDGKLPSRKIDALDHFQKCFAILKLYHHKVDKSKWEMPTGSNMSEAKSWKAIRVDLVVCPYDRFAFALLGWTGSRMFERDLRRYATHEKKMMLDNHALYDLTKKIFLKAKSEEEIFAHLGLEYLEPSERNA

SEQ ID NO: 255 - DNA, 1587 bp, synthetic construct
  misc_feature 1..1587: note = Variant of terminal deoxynucleotidyltransferase
  source 1..1587: mol_type = other DNA
atgcaccatcatcatcatcatggcggtagcggcatgcaccgcattcgtaccatcgattcggacttcgggaagaaacgccagaagaagatggataaccacattagttccatgatctatgaaatcaaatttcacgagtttgtgctgttcattctcgaaaagaaaatgggtgcgacgcgtcgtacttttctgacagatttagcccgcaagaaagggttccgcgtcgagaatgaactgtcagacagcgttacccacatcgtggcagaaaataattcaggatctgacgtattggcttggctgaagacccacaagatggagaagacgacgcaatttgaactgctggatattagctggcttatcgaaagcatgaaagttggtaaaccggtggacaccaaggggaaataccagttgatggaatcgcgtgtcgatagtgcgaacccagatccgacagccggtaccctcaacattctgcctcctactacgaagaccatttctcagtatgcgtgtcaacgccgcaccaccctgaacaaccataatcaacgttttacggacgcactggaaattcttgcggaaaattacgagttcaaacgcaacgatgatacttgtctgacctttatgcgtgctatttccgtgctgaaatgccttccgtttgaggtagttagcctgaaagacacggaaggattgccctggatcggtgatgaagtcaaagggattatggaagaaatcatcgaggtcggtgaatcgctggaagtgcaggccgtgctcaatgatgagcgctatcaaagcttcaaactgtttaagagtgtctttggagtgggggtgaagacagcagacaaatggtaccgtatgggtctgcgcacgctcgaggatgttcgttccagcaagaccctgaaattgaccaagatgcagaaagcgggtctgtgctattatgaagatcttgctgatggcgttacgaaagccgaagctgacgcggtatctctgctggttcaggatgcagtctggactttcgacccggatgcgctggtggagattacgggtggatttcgtcgtgggaaaccttttggtcacgacgttgatctgcttatcacatctccgggagctgagaaagaacaagaagaccagctcctgcagaaagtgaccaatctgtggaagaaacaagggttgttgctgtacggtgatctgcgtgaaagtacctttgaagatctgaaactcccatcccgcaagatcgatgccctggaccattttcagaaatgctttgctatcctcaaactttatcaccataaagtggacaaaagcaaatgggaaatgccgacgggttcgaacgaaagcgaggccaaaagttggaaagcaattcgcgtagatctggttgtttgtccctacgatcgttttgcgtttgcgttgttgggttggaccggaagccgcatgttcgaacgtgatctgcgccgctacgccacccacgagaagaagatgatgctggacaatcatgcgctgtatgacctgaccaagaaaatctttctcaaagctaaatcggaagaggaaattttcgcacatctggggcttgaatacctggaaccgtccgaacgtaacgca

SEQ ID NO: 256 - protein, 529 aa, synthetic construct
  REGION 1..529: note = Variant of terminal deoxynucleotidyltransferase
MHHHHHHGGSGMHRIRTIDSDFGKKRQKKMDNHISSMIYEIKFHEFVLFILEKKMGATRRTFLTDLARKKGFRVENELSDSVTHIVAENNSGSDVLAWLKTHKMEKTTQFELLDISWLIESMKVGKPVDTKGKYQLMESRVDSANPDPTAGTLNILPPTTKTISQYACQRRTTLNNHNQRFTDALEILAENYEFKRNDDTCLTFMRAISVLKCLPFEVVSLKDTEGLPWIGDEVKGIMEEIIEVGESLEVQAVLNDERYQSFKLFKSVFGVGVKTADKWYRMGLRTLEDVRSSKTLKLTKMQKAGLCYYEDLADGVTKAEADAVSLLVQDAVWTFDPDALVEITGGFRRGKPFGHDVDLLITSPGAEKEQEDQLLQKVTNLWKKQGLLLYGDLRESTFEDLKLPSRKIDALDHFQKCFAILKLYHHKVDKSKWEMPTGSNESEAKSWKAIRVDLVVCPYDRFAFALLGWTGSRMFERDLRRYATHEKKMMLDNHALYDLTKKIFLKAKSEEEIFAHLGLEYLEPSERNA

SEQ ID NO: 257 - DNA, 1587 bp, synthetic construct
  misc_feature 1..1587: note = Variant of terminal deoxynucleotidyltransferase
  source 1..1587: mol_type = other DNA
atgcaccatcatcatcatcatggcggtagcggcatgcaccgcattcgtaccatcgattcggacttcgggaagaaacgccagaagaagatggataaccacattagttccatgatctatgaaatcaaatttcacgagtttgtgctgttcattctcgaaaagaaaatgggtgcgacgcgtcgtacttttctgacagatttagcccgcaagaaagggttccgcgtcgagaatgaactgtcagacagcgttacccacatcgtggcagaaaataattcaggatctgacgtattggcttggctgaagacccacaagatggagaagacgacgcaatttgaactgctggatattagctggcttatcgaaagcatgaaagttggtaaaccggtggacaccaaggggaaataccagttgatggaatcgcgtgtcgatagtgcgaacccagatccgacagccggtaccctcaacattctgcctcctactacgaagaccatttctcagtatgcgtgtcaacgccgcaccaccctgaacaaccataatcaacgttttacggacgcactggaaattcttgcggaaaattacgagttcaaacgcaacgatgatacttgtctgacctttatgcgtgctatttccgtgctgaaatgccttccgtttgaggtagttagcctgaaagacacggaaggattgccctggatcggtgatgaagtcaaagggattatggaagaaatcatcgaggtcggtgaatcgctggaagtgcaggccgtgctcaatgatgagcgctatcaaagcttcaaactgtttaccagtgtctttggagtgggggtgaagacagcagacaaatggtaccgtatgggtctgcgcacgctcgaggatgttcgttccagcaagaccctgaaattgaccaagatgcagaaagcgggtctgtgctattatgaagatcttgctgatggcgttacgaaagccgaagctgacgcggtatctctgctggttcaggatgcagtctggactttcgacccggatgcgctggtggagattacgggtggatttcgtcgtgggaaaccttttggtcacgacgttgatctgcttatcacatctccgggagctgagaaagaacaagaagaccagctcctgcagaaagtgaccaatctgtggaagaaacaagggttgttgctgtacggtgatctgcgtgaaagtacctttgaagatctgaaactcccatcccgcaagatcgatgccctggaccattttcagaaatgctttgctatcctcaaactttatcaccataaagtggacaaaagcaaatgggaaatgccgacgggttcgaacgaaagcgaggccaaaagttggaaagcaattcgcgtagatctggttgtttgtccctacgatcgttttgcgtttgcgttgttgggttggaccggaagccgcatgttcgaacgtgatctgcgccgctacgccacccacgagaagaagatgatgctggacaatcatgcgctgtatgacctgaccaagaaaatctttctcaaagctaaatcggaagaggaaattttcgcacatctggggcttgaatacctggaaccgtccgaacgtaacgca

SEQ ID NO: 258 - protein, 529 aa, synthetic construct
  REGION 1..529: note = Variant of terminal deoxynucleotidyltransferase
MHHHHHHGGSGMHRIRTIDSDFGKKRQKKMDNHISSMIYEIKFHEFVLFILEKKMGATRRTFLTDLARKKGFRVENELSDSVTHIVAENNSGSDVLAWLKTHKMEKTTQFELLDISWLIESMKVGKPVDTKGKYQLMESRVDSANPDPTAGTLNILPPTTKTISQYACQRRTTLNNHNQRFTDALEILAENYEFKRNDDTCLTFMRAISVLKCLPFEVVSLKDTEGLPWIGDEVKGIMEEIIEVGESLEVQAVLNDERYQSFKLFTSVFGVGVKTADKWYRMGLRTLEDVRSSKTLKLTKMQKAGLCYYEDLADGVTKAEADAVSLLVQDAVWTFDPDALVEITGGFRRGKPFGHDVDLLITSPGAEKEQEDQLLQKVTNLWKKQGLLLYGDLRESTFEDLKLPSRKIDALDHFQKCFAILKLYHHKVDKSKWEMPTGSNESEAKSWKAIRVDLVVCPYDRFAFALLGWTGSRMFERDLRRYATHEKKMMLDNHALYDLTKKIFLKAKSEEEIFAHLGLEYLEPSERNA

SEQ ID NO: 259 - DNA, 1587 bp, synthetic construct
  misc_feature 1..1587: note = Variant of terminal deoxynucleotidyltransferase
  source 1..1587: mol_type = other DNA
atgcaccatcatcatcatcatggcggtagcggcatgcaccgcattcgtaccatcgattcggacttcgggaagaaacgccagaagaagatggataaccacattagttccatgatctatgaaatcaaatttcacgagtttgtgctgttcattctcgaaaagaaaatgggtgcgacgcgtcgtacttttctgacagatttagcccgcaagaaagggttccgcgtcgagaatgaactgtcagacagcgttacccacatcgtggcagaaaataattcaggatctgacgtattggcttggctgaagacccacaagatggagaagacgacgcaatttgaactgctggatattagctggcttatcgaaagcatgaaagttggtaaaccggtggacaccaaggggaaataccagttgatggaatcgcgtgtcgatagtgcgaacccagatccgacagccggtaccctcaacattctgcctcctactacgaagaccatttctcagtatgcgtgtcaacgccgcaccaccctgaacaaccataatcaacgttttacggacgcactggaaattcttgcggaaaattacaacttcaaagagaacgatgatacttgtctgacctttatgcgtgctatttccgtgctgaaatgccttccgtttgaggtagttagcctgaaagacacggaaggattgccctggatcggtgatgaagtcaaagggattatggaagaaatcatcgaggtcggtgaatcgctggaagtgcaggccgtgctcaatgatgagcgctatcaaagcttcaaactgtttaccagtgtctttggagtgggggtgaagacagcagacaaatggtaccgtatgggtctgcgcacgctcgaggatgttcgttccagcaagaccctgcgcttgaccaagatgcagaaagcgggtctgtgctattatgaagatcttgctgatggcgttacgaaagccgaagctgacgcgatttctctgctggttcaggatgcagtctggactttcgacccggatgcgctggtggagattacgggtggatttcgtcgtgggaaaccttttggtcacgacgttgatctgcttatcacatctccgggagctgagaaagaacaagaagaccagctcctgcagaaagtgaccgatctgtggaagaaacaagggttgttgctgtacggtgatctgcgtgaaagtacctttgaagatctgaaactcccatcccgcaagatcgatgccctggaccattttcagaaatgctttgctatcctcaaactttatcaccataaagtggacaaaagcaaatgggaaatgccgacgggttcgaacgaaagcgaggccaaaagttggaaagcaattcgcgtagatctggttgtttgtccctacgatcgttttgcgtttgcgttgttgggttggaccggaagccgcatgttcgaacgtgatctgcgccgctacgccacccacgagaagaagatgatgctggacaatcatgcgctgtatgacctgaccaagaaaatctttctcaaagctaaatcggaagaggaaattttcgcacatctggggcttgaatacctggaaccgtccgaacgtaacgca

SEQ ID NO: 260 - protein, 529 aa, synthetic construct
  REGION 1..529: note = Variant of terminal deoxynucleotidyltransferase
MHHHHHHGGSGMHRIRTIDSDFGKKRQKKMDNHISSMIYEIKFHEFVLFILEKKMGATRRTFLTDLARKKGFRVENELSDSVTHIVAENNSGSDVLAWLKTHKMEKTTQFELLDISWLIESMKVGKPVDTKGKYQLMESRVDSANPDPTAGTLNILPPTTKTISQYACQRRTTLNNHNQRFTDALEILAENYNFKENDDTCLTFMRAISVLKCLPFEVVSLKDTEGLPWIGDEVKGIMEEIIEVGESLEVQAVLNDERYQSFKLFTSVFGVGVKTADKWYRMGLRTLEDVRSSKTLRLTKMQKAGLCYYEDLADGVTKAEADAISLLVQDAVWTFDPDALVEITGGFRRGKPFGHDVDLLITSPGAEKEQEDQLLQKVTDLWKKQGLLLYGDLRESTFEDLKLPSRKIDALDHFQKCFAILKLYHHKVDKSKWEMPTGSNESEAKSWKAIRVDLVVCPYDRFAFALLGWTGSRMFERDLRRYATHEKKMMLDNHALYDLTKKIFLKAKSEEEIFAHLGLEYLEPSERNA

SEQ ID NO: 261 - DNA, 1587 bp, synthetic construct
  misc_feature 1..1587: note = Variant of terminal deoxynucleotidyltransferase
  source 1..1587: mol_type = other DNA
atgcaccatcatcatcatcatggcggtagcggcatgcaccgcattcgtaccatcgattcggagttcgggaagaaacgccagaagaagatggataaccacattagttccatgatctatgaaatcaaatttcacgagtttgtgctgttcattctcgaaaagaaaatgggtgcgacgcgtcgtacttttctgacagatttagcccgcaagaaagggttccgcgtcgagaatgaactgtcagacagcgttacccacatcgtggcagaaaataattcaggatctgacgtattggcttggctgaagacccacaagatggagaagacgacgcaatttgaactgctggatattagctggcttatcgaaagcatgaaagttggtaaaccggtggacaccaaggggaaataccagttgatggaatcgcgtgtcgatagtgcgaacccagatccgacagccggtaccctcaacattctgcctcctactacgaagaccatttctcagtatgcgtgtcaacgccgcaccaccctgaacaaccataatcaacgttttacggacgcactggaaattcttgcggaaaattacgagttcaaacgcaacgatgatacttgtctgacctttatgcgtgctatttccgtgctgaaatgccttccgtttgaggtagttagcctgaaagacacggaaggattgccctggatcggtgatgaagtcaaagggattatggaagaaatcatcgaggtcggtgaatcgctggaagtgcaggccgtgctcaatgatgagcgctatcaaagcttcaaactgtttaagagtgtctttggagtgggggtgaagacagcagacaaatggtaccgtatgggtctgcgcacgctcgaggatgttcgttccagcaagaccctgaagttgaccaagatgcagaaagcgggtctgtgctattatgaagatcttgctgatggcgttacgaaagccgaagctgacgcgatttctctgctggttcaggatgcagtctggactttcgacccggatgcgctggtggagattacgggtggatttcgtcgtgggaaaccttttggtcacgacgttgatctgcttatcacatctccgggagctgagaaagaacaagaagaccagctcctgcagaaagtgaccaatctgtggaagaaacaagggttgttgctgtacggtgatctgcgtgaaagtcgctttgaagatgggaaactcccatcccgcaagatcgatgccctggaccattttcagaaatgctttgctatcctcaaactttatcaccataaagtggacaaaagcaaatgggaaatgccgacgggttcgaacgaaagcgaggccaaaagttggaaagcaattcgcgtagatctggttgtttgtccctacgatcgttttgcgtttgcgttgttgggttggaccggaagccgcatgttcgaacgtgatctgcgccgctacgccacccacgagaagaagatgatgctggacaatcatgcgctgtatgacctgaccaagaaaatctttctcaaagctaaatcggaagaggaaattttcgcacatctggggcttgaatacctggaaccgtccgaacgtaacgca

SEQ ID NO: 262 - protein, 529 aa, synthetic construct
  REGION 1..529: note = Variant of terminal deoxynucleotidyltransferase
MHHHHHHGGSGMHRIRTIDSEFGKKRQKKMDNHISSMIYEIKFHEFVLFILEKKMGATRRTFLTDLARKKGFRVENELSDSVTHIVAENNSGSDVLAWLKTHKMEKTTQFELLDISWLIESMKVGKPVDTKGKYQLMESRVDSANPDPTAGTLNILPPTTKTISQYACQRRTTLNNHNQRFTDALEILAENYEFKRNDDTCLTFMRAISVLKCLPFEVVSLKDTEGLPWIGDEVKGIMEEIIEVGESLEVQAVLNDERYQSFKLFKSVFGVGVKTADKWYRMGLRTLEDVRSSKTLKLTKMQKAGLCYYEDLADGVTKAEADAISLLVQDAVWTFDPDALVEITGGFRRGKPFGHDVDLLITSPGAEKEQEDQLLQKVTNLWKKQGLLLYGDLRESRFEDGKLPSRKIDALDHFQKCFAILKLYHHKVDKSKWEMPTGSNESEAKSWKAIRVDLVVCPYDRFAFALLGWTGSRMFERDLRRYATHEKKMMLDNHALYDLTKKIFLKAKSEEEIFAHLGLEYLEPSERNA

SEQ ID NO: 263 - DNA, 1587 bp, synthetic construct
  misc_feature 1..1587: note = Variant of terminal deoxynucleotidyltransferase
  source 1..1587: mol_type = other DNA
atgcaccatcatcatcatcatggcggtagcggcatgcaccgcattcgtaccatcgattcggacttcgggaagaaacgccagaagaagatggataaccacattagttccatgatctatgaaatcaaatttcacgagtttgtgctgttcattctcgaaaagaaaatgggtgcgacgcgtcgtacttttctgacagatttagcccgcaagaaagggttccgcgtcgagaatgaactgtcagacagcgttacccacatcgtggcagaaaataattcaaggtctgacgtattggcttggctgaagacccacaagatggagaagacgacgcaatttgaactgctggatattagctggcttatcgaaagcatgaaagttggtaaaccggtggacaccaaggggaaataccagttgatggaatcgcgtgtcgatagtgcgaacccagatccgacagccggtaccctcaacattctgcctcctactacgaagaccatttctcagtatgcgtgtcaacgccgcaccaccctgaacaaccataatcaacgttttacggacgcactggaaattcttgcggaaaattacgagttcaaacgcaacgatgatacttgtctgacctttatgcgtgctatttccgtgctgaaatgccttccgtttgaggtagttagcctgaaagacacggaaggattgccctggatcggtgatgaagtcaaagggattatggaagaaatcatcgaggtcggtgaatcgctggaagtgcaggccgtgctcaatgatgagcgctatcaaagcttcaaactgtttaagagtgtctttggagtgggggtgaagacagcagacaaatggtaccgtatgggtctgcgcacgctcgaggatgttcgttccagcaagaccctgaagttgaccaagatgcagaaagcgggtctgtgctattatgaagatcttgctgatggcgttacgaaagccgaagctgacgcgatttctctgctggttcaggatgcagtctggactttcgacccggatgcgctggtggagattacgggtggatttcgtcgtgggaaaccttttggtcacgacgttgatctgcttatcacatctccgggagctgagaaagaacaagaagaccagctcctgcagaaagtgaccaatctgtggaagaaacaagggttgttgctgtacggtgatctgcgtgaaagtcgctttgaagatgggaaactcccatcccgcaagatcgatgccctggaccattttcagaaatgctttgctatcctcaaactttatcaccataaagtggacaaaagcaaatgggaaatgccgacgggttcgaacgaaagcgaggccaaaagttggaaagcaattcgcgtagatctggttgtttgtccctacgatcgttttgcgtttgcgttgttgggttggaccggaagccgcatgttcgaacgtgatctgcgccgctacgccacccacgagaagaagatgatgctggacaatcatgcgctgtatgacctgaccaagaaaatctttctcaaagctaaatcggaagaggaaattttcgcacatctggggcttgaatacctggaaccgtccgaacgtaacgca

SEQ ID NO: 264 - protein, 529 aa, synthetic construct
  REGION 1..529: note = Variant of terminal deoxynucleotidyltransferase
MHHHHHHGGSGMHRIRTIDSDFGKKRQKKMDNHISSMIYEIKFHEFVLFILEKKMGATRRTFLTDLARKKGFRVENELSDSVTHIVAENNSRSDVLAWLKTHKMEKTTQFELLDISWLIESMKVGKPVDTKGKYQLMESRVDSANPDPTAGTLNILPPTTKTISQYACQRRTTLNNHNQRFTDALEILAENYEFKRNDDTCLTFMRAISVLKCLPFEVVSLKDTEGLPWIGDEVKGIMEEIIEVGESLEVQAVLNDERYQSFKLFKSVFGVGVKTADKWYRMGLRTLEDVRSSKTLKLTKMQKAGLCYYEDLADGVTKAEADAISLLVQDAVWTFDPDALVEITGGFRRGKPFGHDVDLLITSPGAEKEQEDQLLQKVTNLWKKQGLLLYGDLRESRFEDGKLPSRKIDALDHFQKCFAILKLYHHKVDKSKWEMPTGSNESEAKSWKAIRVDLVVCPYDRFAFALLGWTGSRMFERDLRRYATHEKKMMLDNHALYDLTKKIFLKAKSEEEIFAHLGLEYLEPSERNA

SEQ ID NO: 265 - DNA, 1587 bp, synthetic construct
  misc_feature 1..1587: note = Variant of terminal deoxynucleotidyltransferase
  source 1..1587: mol_type = other DNA
atgcaccatcatcatcatcatggcggtagcggcatgcaccgcattcgtaccatcgattcggacttcgggaagaaacgccagaagaagatggataaccacattagttccatgatctatgaaatcaaatttcacgagtttgtgctgttcattctcgaaaagaaaatgggtgcgacgcgtcgtacttttctgacagatttagcccgcaagaaagggttccgcgtcgagaatgaactgtcagacagcgttacccacatcgtggcagaaaataattcaggatctgacgtattggcttggctgaagacccacaagatggagaagacgacgcaatttgaactgctggatattagctggcttatcgaaagcatgaaagagggtaaaccggtggacaccaaggggaaataccagttgatggaatcgcgtgtcgatagtgcgaacccagatccgacagccggtaccctcaacattctgcctcctactacgaagaccatttctcagtatgcgtgtcaacgccgcaccaccctgaacaaccataatcaacgttttacggacgcactggaaattcttgcggaaaattacgagttcaaacgcaacgatgatacttgtctgacctttatgcgtgctatttccgtgctgaaatgccttccgtttgaggtagttagcctgaaagacacggaaggattgccctggatcggtgatgaagtcaaagggattatggaagaaatcatcgaggtcggtgaatcgctggaagtgcaggccgtgctcaatgatgagcgctatcaaagcttcaaactgtttaagagtgtctttggagtgggggtgaagacagcagacaaatggtaccgtatgggtctgcgcacgctcgaggatgttcgttccagcaagaccctgaagttgaccaagatgcagaaagcgggtctgtgctattatgaagatcttgctgatggcgttacgaaagccgaagctgacgcgatttctctgctggttcaggatgcagtctggactttcgacccggatgcgctggtggagattacgggtggatttcgtcgtgggaaaccttttggtcacgacgttgatctgcttatcacatctccgggagctgagaaagaacaagaagaccagctcctgcagaaagtgaccaatctgtggaagaaacaagggttgttgctgtacggtgatctgcgtgaaagtcgctttgaagatgggaaactcccatcccgcaagatcgatgccctggaccattttcagaaatgctttgctatcctcaaactttatcaccataaagtggacaaaagcaaatgggaaatgccgacgggttcgaacgaaagcgaggccaaaagttggaaagcaattcgcgtagatctggttgtttgtccctacgatcgttttgcgtttgcgttgttgggttggaccggaagccgcatgttcgaacgtgatctgcgccgctacgccacccacgagaagaagatgatgctggacaatcatgcgctgtatgacctgaccaagaaaatctttctcaaagctaaatcggaagaggaaattttcgcacatctggggcttgaatacctggaaccgtccgaacgtaacgca

SEQ ID NO: 266 - protein, 529 aa, synthetic construct
  REGION 1..529: note = Variant of terminal deoxynucleotidyltransferase
MHHHHHHGGSGMHRIRTIDSDFGKKRQKKMDNHISSMIYEIKFHEFVLFILEKKMGATRRTFLTDLARKKGFRVENELSDSVTHIVAENNSGSDVLAWLKTHKMEKTTQFELLDISWLIESMKEGKPVDTKGKYQLMESRVDSANPDPTAGTLNILPPTTKTISQYACQRRTTLNNHNQRFTDALEILAENYEFKRNDDTCLTFMRAISVLKCLPFEVVSLKDTEGLPWIGDEVKGIMEEIIEVGESLEVQAVLNDERYQSFKLFKSVFGVGVKTADKWYRMGLRTLEDVRSSKTLKLTKMQKAGLCYYEDLADGVTKAEADAISLLVQDAVWTFDPDALVEITGGFRRGKPFGHDVDLLITSPGAEKEQEDQLLQKVTNLWKKQGLLLYGDLRESRFEDGKLPSRKIDALDHFQKCFAILKLYHHKVDKSKWEMPTGSNESEAKSWKAIRVDLVVCPYDRFAFALLGWTGSRMFERDLRRYATHEKKMMLDNHALYDLTKKIFLKAKSEEEIFAHLGLEYLEPSERNA

SEQ ID NO: 267 - DNA, 1587 bp, synthetic construct
  misc_feature 1..1587: note = Variant of terminal deoxynucleotidyltransferase
  source 1..1587: mol_type = other DNA
atgcaccatcatcatcatcatggcggtagcggcatgcaccgcattcgtaccatcgattcggacttcgggaagaaacgccagaagaagatggataaccacattagttccatgatctatgaaatcaaatttcacgagtttgtgctgttcattctcgaagagaaaatgggtgcgacgcgtcgtacttttctgacagatttagcccgcaagaaagggttccgcgtcgagaatgaactgtcagacagcgttacccacatcgtggcagaaaataattcaggatctgacgtattggcttggctgaagacccacaagatggagaagacgacgcaatttgaactgctggatattagctggcttatcgaaagcatgaaagttggtaaaccggtggacaccaaggggaaataccagttgatggaatcgcgtgtcgatagtgcgaacccagatccgacagccggtaccctcaacattctgcctcctactacgaagaccatttctcagtatgcgtgtcaacgccgcaccaccctgaacaaccataatcaacgttttacggacgcactggaaattcttgcggaaaattacgagttcaaacgcaacgatgatacttgtctgacctttatgcgtgctatttccgtgctgaaatgccttccgtttgaggtagttagcctgaaagacacggaaggattgccctggatcggtgatgaagtcaaagggattatggaagaaatcatcgaggtcggtgaatcgctggaagtgcaggccgtgctcaatgatgagcgctatcaaagcttcaaactgtttaagagtgtctttggagtgggggtgaagacagcagacaaatggtaccgtatgggtctgcgcacgctcgaggatgttcgttccagcaagaccctgaagttgaccaagatgcagaaagcgggtctgtgctattatgaagatcttgctgatggcgttacgaaagccgaagctgacgcgatttctctgctggttcaggatgcagtctggactttcgacccggatgcgctggtggagattacgggtggatttcgtcgtgggaaaccttttggtcacgacgttgatctgcttatcacatctccgggagctgagaaagaacaagaagaccagctcctgcagaaagtgaccaatctgtggaagaaacaagggttgttgctgtacggtgatctgcgtgaaagtcgctttgaagatgggaaactcccatcccgcaagatcgatgccctggaccattttcagaaatgctttgctatcctcaaactttatcaccataaagtggacaaaagcaaatgggaaatgccgacgggttcgaacgaaagcgaggccaaaagttggaaagcaattcgcgtagatctggttgtttgtccctacgatcgttttgcgtttgcgttgttgggttggaccggaagccgcatgttcgaacgtgatctgcgccgctacgccacccacgagaagaagatgatgctggacaatcatgcgctgtatgacctgaccaagaaaatctttctcaaagctaaatcggaagaggaaattttcgcacatctggggcttgaatacctggaaccgtccgaacgtaacgca

SEQ ID NO: 268 - protein, 529 aa, synthetic construct
  REGION 1..529: note = Variant of terminal deoxynucleotidyltransferase
MHHHHHHGGSGMHRIRTIDSDFGKKRQKKMDNHISSMIYEIKFHEFVLFILEEKMGATRRTFLTDLARKKGFRVENELSDSVTHIVAENNSGSDVLAWLKTHKMEKTTQFELLDISWLIESMKVGKPVDTKGKYQLMESRVDSANPDPTAGTLNILPPTTKTISQYACQRRTTLNNHNQRFTDALEILAENYEFKRNDDTCLTFMRAISVLKCLPFEVVSLKDTEGLPWIGDEVKGIMEEIIEVGESLEVQAVLNDERYQSFKLFKSVFGVGVKTADKWYRMGLRTLEDVRSSKTLKLTKMQKAGLCYYEDLADGVTKAEADAISLLVQDAVWTFDPDALVEITGGFRRGKPFGHDVDLLITSPGAEKEQEDQLLQKVTNLWKKQGLLLYGDLRESRFEDGKLPSRKIDALDHFQKCFAILKLYHHKVDKSKWEMPTGSNESEAKSWKAIRVDLVVCPYDRFAFALLGWTGSRMFERDLRRYATHEKKMMLDNHALYDLTKKIFLKAKSEEEIFAHLGLEYLEPSERNA

SEQ ID NO: 269 - DNA, 1587 bp, synthetic construct
  misc_feature 1..1587: note = Variant of terminal deoxynucleotidyltransferase
  source 1..1587: mol_type = other DNA
atgcaccatcatcatcatcatggcggtagcggcatgcaccgcattcgtaccatcgattcggacttcggggggaaacgccagaagaagatggataaccacattagttccatgatctatgaaatcaaatttcacgagtttgtgctgttcattctcgaaaagaaaatgggtgcgacgcgtcgtacttttctgacagatttagcccgcaagaaagggttccgcgtcgagaatgaactgtcagacagcgttacccacatcgtggcagaaaataattcaggatctgacgtattggcttggctgaagacccacaagatggagaagacgacgcaatttgaactgctggatattagctggcttatcgaaagcatgaaagttggtaaaccggtggacaccaaggggaaataccagttgatggaatcgcgtgtcgatagtgcgaacccagatccgacagccggtaccctcaacattctgcctcctactacgaagaccatttctcagtatgcgtgtcaacgccgcaccaccctgaacaaccataatcaacgttttacggacgcactggaaattcttgcggaaaattacgagttcaaacgcaacgatgatacttgtctgacctttatgcgtgctatttccgtgctgaaatgccttccgtttgaggtagttagcctgaaagacacggaaggattgccctggatcggtgatgaagtcaaagggattatggaagaaatcatcgaggtcggtgaatcgctggaagtgcaggccgtgctcaatgatgagcgctatcaaagcttcaaactgtttaagagtgtctttggagtgggggtgaagacagcagacaaatggtaccgtatgggtctgcgcacgctcgaggatgttcgttccagcaagaccctgaagttgaccaagatgcagaaagcgggtctgtgctattatgaagatcttgctgatggcgttacgaaagccgaagctgacgcgatttctctgctggttcaggatgcagtctggactttcgacccggatgcgctggtggagattacgggtggatttcgtcgtgggaaaccttttggtcacgacgttgatctgcttatcacatctccgggagctgagaaagaacaagaagaccagctcctgcagaaagtgaccaatctgtggaagaaacaagggttgttgctgtacggtgatctgcgtgaaagtcgctttgaagatgggaaactcccatcccgcaagatcgatgccctggaccattttcagaaatgctttgctatcctcaaactttatcaccataaagtggacaaaagcaaatgggaaatgccgacgggttcgaacgaaagcgaggccaaaagttggaaagcaattcgcgtagatctggttgtttgtccctacgatcgttttgcgtttgcgttgttgggttggaccggaagccgcatgttcgaacgtgatctgcgccgctacgccacccacgagaagaagatgatgctggacaatcatgcgctgtatgacctgaccaagaaaatctttctcaaagctaaatcggaagaggaaattttcgcacatctggggcttgaatacctggaaccgtccgaacgtaacgca

SEQ ID NO: 270 - protein, 529 aa, synthetic construct
  REGION 1..529: note = Variant of terminal deoxynucleotidyltransferase
MHHHHHHGGSGMHRIRTIDSDFGGKRQKKMDNHISSMIYEIKFHEFVLFILEKKMGATRRTFLTDLARKKGFRVENELSDSVTHIVAENNSGSDVLAWLKTHKMEKTTQFELLDISWLIESMKVGKPVDTKGKYQLMESRVDSANPDPTAGTLNILPPTTKTISQYACQRRTTLNNHNQRFTDALEILAENYEFKRNDDTCLTFMRAISVLKCLPFEVVSLKDTEGLPWIGDEVKGIMEEIIEVGESLEVQAVLNDERYQSFKLFKSVFGVGVKTADKWYRMGLRTLEDVRSSKTLKLTKMQKAGLCYYEDLADGVTKAEADAISLLVQDAVWTFDPDALVEITGGFRRGKPFGHDVDLLITSPGAEKEQEDQLLQKVTNLWKKQGLLLYGDLRESRFEDGKLPSRKIDALDHFQKCFAILKLYHHKVDKSKWEMPTGSNESEAKSWKAIRVDLVVCPYDRFAFALLGWTGSRMFERDLRRYATHEKKMMLDNHALYDLTKKIFLKAKSEEEIFAHLGLEYLEPSERNA

SEQ ID NO: 271 - DNA, 1587 bp, synthetic construct
  misc_feature 1..1587: note = Variant of terminal deoxynucleotidyltransferase
  source 1..1587: mol_type = other DNA
atgcaccatcatcatcatcatggcggtagcggcatgcaccgcattcgtaccatcgattcggacttcgggaagaaacgccagaagaagatggataaccacattagttccatgatctatgaaatcaaatttcacgagtttgtgctgttcattctcgaaaagaaaatgggtgcgacgcgtcgtacttttctgacagatttagcccgcaagaaagggttccgcgtcgagaatgaactgtcagacagcgttacccacatcgtggcagaaaataattcaggatctgacgtattggcttggctgaaggagcacaagatggagaagacgacgcaatttgaactgctggatattagctggcttatcgaaagcatgaaagttggtaaaccggtggacaccaaggggaaataccagttgatggaatcgcgtgtcgatagtgcgaacccagatccgacagccggtaccctcaacattctgcctcctactacgaagaccatttctcagtatgcgtgtcaacgccgcaccaccctgaacaaccataatcaacgttttacggacgcactggaaattcttgcggaaaattacgagttcaaacgcaacgatgatacttgtctgacctttatgcgtgctatttccgtgctgaaatgccttccgtttgaggtagttagcctgaaagacacggaaggattgccctggatcggtgatgaagtcaaagggattatggaagaaatcatcgaggtcggtgaatcgctggaagtgcaggccgtgctcaatgatgagcgctatcaaagcttcaaactgtttaagagtgtctttggagtgggggtgaagacagcagacaaatggtaccgtatgggtctgcgcacgctcgaggatgttcgttccagcaagaccctgaagttgaccaagatgcagaaagcgggtctgtgctattatgaagatcttgctgatggcgttacgaaagccgaagctgacgcgatttctctgctggttcaggatgcagtctggactttcgacccggatgcgctggtggagattacgggtggatttcgtcgtgggaaaccttttggtcacgacgttgatctgcttatcacatctccgggagctgagaaagaacaagaagaccagctcctgcagaaagtgaccaatctgtggaagaaacaagggttgttgctgtacggtgatctgcgtgaaagtcgctttgaagatgggaaactcccatcccgcaagatcgatgccctggaccattttcagaaatgctttgctatcctcaaactttatcaccataaagtggacaaaagcaaatgggaaatgccgacgggttcgaacgaaagcgaggccaaaagttggaaagcaattcgcgtagatctggttgtttgtccctacgatcgttttgcgtttgcgttgttgggttggaccggaagccgcatgttcgaacgtgatctgcgccgctacgccacccacgagaagaagatgatgctggacaatcatgcgctgtatgacctgaccaagaaaatctttctcaaagctaaatcggaagaggaaattttcgcacatctggggcttgaatacctggaaccgtccgaacgtaacgca

SEQ ID NO: 272 - protein, 529 aa, synthetic construct
  REGION 1..529: note = Variant of terminal deoxynucleotidyltransferase
MHHHHHHGGSGMHRIRTIDSDFGKKRQKKMDNHISSMIYEIKFHEFVLFILEKKMGATRRTFLTDLARKKGFRVENELSDSVTHIVAENNSGSDVLAWLKEHKMEKTTQFELLDISWLIESMKVGKPVDTKGKYQLMESRVDSANPDPTAGTLNILPPTTKTISQYACQRRTTLNNHNQRFTDALEILAENYEFKRNDDTCLTFMRAISVLKCLPFEVVSLKDTEGLPWIGDEVKGIMEEIIEVGESLEVQAVLNDERYQSFKLFKSVFGVGVKTADKWYRMGLRTLEDVRSSKTLKLTKMQKAGLCYYEDLADGVTKAEADAISLLVQDAVWTFDPDALVEITGGFRRGKPFGHDVDLLITSPGAEKEQEDQLLQKVTNLWKKQGLLLYGDLRESRFEDGKLPSRKIDALDHFQKCFAILKLYHHKVDKSKWEMPTGSNESEAKSWKAIRVDLVVCPYDRFAFALLGWTGSRMFERDLRRYATHEKKMMLDNHALYDLTKKIFLKAKSEEEIFAHLGLEYLEPSERNA

SEQ ID NO: 273 - DNA, 1587 bp, synthetic construct
  misc_feature 1..1587: note = Variant of terminal deoxynucleotidyltransferase
  source 1..1587: mol_type = other DNA
atgcaccatcatcatcatcatggcggtagcggcatgcaccgcattcgtaccatcgattcggacttcgggaagaaacgccagaagaagatggataaccacattagttccatgatctatgaaatcaaatttcacgagtttgtgctgttcattctcgaaaagaaaatgggtgcgacgcgtcgtacttttctgacagatttagcccgcaagaaagggttccgcgtcgagaatgaactgtcagacagcgttacccacatcgtggcagaaaataattcaggatctgacgtattggcttggctgaagacccacaagatggagaagacgacgcaatttgaactgctggatattagctggcttatcgaaagcatgaaagttggtaaaccggtggacaccaaggggaaataccagttgatggaatcgcgtgtcgatagtgcgaacccagatccgacagccggtaccctcaacgagctgcctcctactacgaagaccatttctcagtatgcgtgtcaacgccgcaccaccctgaacaaccataatcaacgttttacggacgcactggaaattcttgcggaaaattacgagttcaaacgcaacgatgatacttgtctgacctttatgcgtgctatttccgtgctgaaatgccttccgtttgaggtagttagcctgaaagacacggaaggattgccctggatcggtgatgaagtcaaagggattatggaagaaatcatcgaggtcggtgaatcgctggaagtgcaggccgtgctcaatgatgagcgctatcaaagcttcaaactgtttaagagtgtctttggagtgggggtgaagacagcagacaaatggtaccgtatgggtctgcgcacgctcgaggatgttcgttccagcaagaccctgaagttgaccaagatgcagaaagcgggtctgtgctattatgaagatcttgctgatggcgttacgaaagccgaagctgacgcgatttctctgctggttcaggatgcagtctggactttcgacccggatgcgctggtggagattacgggtggatttcgtcgtgggaaaccttttggtcacgacgttgatctgcttatcacatctccgggagctgagaaagaacaagaagaccagctcctgcagaaagtgaccaatctgtggaagaaacaagggttgttgctgtacggtgatctgcgtgaaagtcgctttgaagatgggaaactcccatcccgcaagatcgatgccctggaccattttcagaaatgctttgctatcctcaaactttatcaccataaagtggacaaaagcaaatgggaaatgccgacgggttcgaacgaaagcgaggccaaaagttggaaagcaattcgcgtagatctggttgtttgtccctacgatcgttttgcgtttgcgttgttgggttggaccggaagccgcatgttcgaacgtgatctgcgccgctacgccacccacgagaagaagatgatgctggacaatcatgcgctgtatgacctgaccaagaaaatctttctcaaagctaaatcggaagaggaaattttcgcacatctggggcttgaatacctggaaccgtccgaacgtaacgca

SEQ ID NO: 274 - protein, 529 aa, synthetic construct
  REGION 1..529: note = Variant of terminal deoxynucleotidyltransferase
MHHHHHHGGSGMHRIRTIDSDFGKKRQKKMDNHISSMIYEIKFHEFVLFILEKKMGATRRTFLTDLARKKGFRVENELSDSVTHIVAENNSGSDVLAWLKTHKMEKTTQFELLDISWLIESMKVGKPVDTKGKYQLMESRVDSANPDPTAGTLNELPPTTKTISQYACQRRTTLNNHNQRFTDALEILAENYEFKRNDDTCLTFMRAISVLKCLPFEVVSLKDTEGLPWIGDEVKGIMEEIIEVGESLEVQAVLNDERYQSFKLFKSVFGVGVKTADKWYRMGLRTLEDVRSSKTLKLTKMQKAGLCYYEDLADGVTKAEADAISLLVQDAVWTFDPDALVEITGGFRRGKPFGHDVDLLITSPGAEKEQEDQLLQKVTNLWKKQGLLLYGDLRESRFEDGKLPSRKIDALDHFQKCFAILKLYHHKVDKSKWEMPTGSNESEAKSWKAIRVDLVVCPYDRFAFALLGWTGSRMFERDLRRYATHEKKMMLDNHALYDLTKKIFLKAKSEEEIFAHLGLEYLEPSERNA

SEQ ID NO: 275 - DNA, 1587 bp, synthetic construct
  misc_feature 1..1587: note = Variant of terminal deoxynucleotidyltransferase
  source 1..1587: mol_type = other DNA
atgcaccatcatcatcatcatggcggtagcggcatgcaccgcattcgtaccatcgattcggacttcgggaagaaacgccagaagaagatggataaccactctagttccatgatctatgaaatcaaatttcacgagtttgtgctgttcattctcgaaaagaaaatgggtgcgacgcgtcgtacttttctgacagatttagcccgcaagaaagggttccgcgtcgagaatgaactgtcagacagcgttacccacatcgtggcagaaaataattcaggatctgacgtattggcttggctgaagacccacaagatggagaagacgacgcaatttgaactgctggatattagctggcttatcgaaagcatgaaagttggtaaaccggtggacaccaaggggaaataccagttgatggaatcgcgtgtcgatagtgcgaacccagatccgacagccggtaccctcaacattctgcctcctactacgaagaccatttctcagtatgcgtgtcaacgccgcaccaccctgaacaaccataatcaacgttttacggacgcactggaaattcttgcggaaaattacgagttcaaacgcaacgatgatacttgtctgacctttatgcgtgctatttccgtgctgaaatgccttccgtttgaggtagttagcctgaaagacacggaaggattgccctggatcggtgatgaagtcaaagggattatggaagaaatcatcgaggtcggtgaatcgctggaagtgcaggccgtgctcaatgatgagcgctatcaaagcttcaaactgtttaagagtgtctttggagtgggggtgaagacagcagacaaatggtaccgtatgggtctgcgcacgctcgaggatgttcgttccagcaagaccctgaagttgaccaagatgcagaaagcgggtctgtgctattatgaagatcttgctgatggcgttacgaaagccgaagctgacgcgatttctctgctggttcaggatgcagtctggactttcgacccggatgcgctggtggagattacgggtggatttcgtcgtgggaaaccttttggtcacgacgttgatctgcttatcacatctccgggagctgagaaagaacaagaagaccagctcctgcagaaagtgaccaatctgtggaagaaacaagggttgttgctgtacggtgatctgcgtgaaagtcgctttgaagatgggaaactcccatcccgcaagatcgatgccctggaccattttcagaaatgctttgctatcctcaaactttatcaccataaagtggacaaaagcaaatgggaaatgccgacgggttcgaacgaaagcgaggccaaaagttggaaagcaattcgcgtagatctggttgtttgtccctacgatcgttttgcgtttgcgttgttgggttggaccggaagccgcatgttcgaacgtgatctgcgccgctacgccacccacgagaagaagatgatgctggacaatcatgcgctgtatgacctgaccaagaaaatctttctcaaagctaaatcggaagaggaaattttcgcacatctggggcttgaatacctggaaccgtccgaacgtaacgca

SEQ ID NO: 276 - protein, 529 aa, synthetic construct
  REGION 1..529: note = Variant of terminal deoxynucleotidyltransferase
MHHHHHHGGSGMHRIRTIDSDFGKKRQKKMDNHSSSMIYEIKFHEFVLFILEKKMGATRRTFLTDLARKKGFRVENELSDSVTHIVAENNSGSDVLAWLKTHKMEKTTQFELLDISWLIESMKVGKPVDTKGKYQLMESRVDSANPDPTAGTLNILPPTTKTISQYACQRRTTLNNHNQRFTDALEILAENYEFKRNDDTCLTFMRAISVLKCLPFEVVSLKDTEGLPWIGDEVKGIMEEIIEVGESLEVQAVLNDERYQSFKLFKSVFGVGVKTADKWYRMGLRTLEDVRSSKTLKLTKMQKAGLCYYEDLADGVTKAEADAISLLVQDAVWTFDPDALVEITGGFRRGKPFGHDVDLLITSPGAEKEQEDQLLQKVTNLWKKQGLLLYGDLRESRFEDGKLPSRKIDALDHFQKCFAILKLYHHKVDKSKWEMPTGSNESEAKSWKAIRVDLVVCPYDRFAFALLGWTGSRMFERDLRRYATHEKKMMLDNHALYDLTKKIFLKAKSEEEIFAHLGLEYLEPSERNA

SEQ ID NO: 277 - DNA, 1587 bp, synthetic construct
  misc_feature 1..1587: note = Variant of terminal deoxynucleotidyltransferase
  source 1..1587: mol_type = other DNA
atgcaccatcatcatcatcatggcggtagcggcatgcaccgcattcgtaccatcgattcggacttcgggaagaaacgccagaagaagatggataaccacgatagttccatgatctatgaaatcaaatttcacgagtttgtgctgttcattctcgaaaagaaaatgggtgcgacgcgtcgtacttttctgacagatttagcccgcaagaaagggttccgcgtcgagaatgaactgtcagacagcgttacccacatcgtggcagaaaataattcaggatctgacgtattggcttggctgaagacccacaagatggagaagacgacgcaatttgaactgctggatattagctggcttatcgaaagcatgaaagttggtaaaccggtggacaccaaggggaaataccagttgatggaatcgcgtgtcgatagtgcgaacccagatccgacagccggtaccctcaacattctgcctcctactacgaagaccatttctcagtatgcgtgtcaacgccgcaccaccctgaacaaccataatcaacgttttacggacgcactggaaattcttgcggaaaattacgagttcaaacgcaacgatgatacttgtctgacctttatgcgtgctatttccgtgctgaaatgccttccgtttgaggtagttagcctgaaagacacggaaggattgccctggatcggtgatgaagtcaaagggattatggaagaaatcatcgaggtcggtgaatcgctggaagtgcaggccgtgctcaatgatgagcgctatcaaagcttcaaactgtttaagagtgtctttggagtgggggtgaagacagcagacaaatggtaccgtatgggtctgcgcacgctcgaggatgttcgttccagcaagaccctgaagttgaccaagatgcagaaagcgggtctgtgctattatgaagatcttgctgatggcgttacgaaagccgaagctgacgcgatttctctgctggttcaggatgcagtctggactttcgacccggatgcgctggtggagattacgggtggatttcgtcgtgggaaaccttttggtcacgacgttgatctgcttatcacatctccgggagctgagaaagaacaagaagaccagctcctgcagaaagtgaccaatctgtggaagaaacaagggttgttgctgtacggtgatctgcgtgaaagtcgctttgaagatgggaaactcccatcccgcaagatcgatgccctggaccattttcagaaatgctttgctatcctcaaactttatcaccataaagtggacaaaagcaaatgggaaatgccgacgggttcgaacgaaagcgaggccaaaagttggaaagcaattcgcgtagatctggttgtttgtccctacgatcgttttgcgtttgcgttgttgggttggaccggaagccgcatgttcgaacgtgatctgcgccgctacgccacccacgagaagaagatgatgctggacaatcatgcgctgtatgacctgaccaagaaaatctttctcaaagctaaatcggaagaggaaattttcgcacatctggggcttgaatacctggaaccgtccgaacgtaacgca

SEQ ID NO: 278 - protein, 529 aa, synthetic construct
  REGION 1..529: note = Variant of terminal deoxynucleotidyltransferase
MHHHHHHGGSGMHRIRTIDSDFGKKRQKKMDNHDSSMIYEIKFHEFVLFILEKKMGATRRTFLTDLARKKGFRVENELSDSVTHIVAENNSGSDVLAWLKTHKMEKTTQFELLDISWLIESMKVGKPVDTKGKYQLMESRVDSANPDPTAGTLNILPPTTKTISQYACQRRTTLNNHNQRFTDALEILAENYEFKRNDDTCLTFMRAISVLKCLPFEVVSLKDTEGLPWIGDEVKGIMEEIIEVGESLEVQAVLNDERYQSFKLFKSVFGVGVKTADKWYRMGLRTLEDVRSSKTLKLTKMQKAGLCYYEDLADGVTKAEADAISLLVQDAVWTFDPDALVEITGGFRRGKPFGHDVDLLITSPGAEKEQEDQLLQKVTNLWKKQGLLLYGDLRESRFEDGKLPSRKIDALDHFQKCFAILKLYHHKVDKSKWEMPTGSNESEAKSWKAIRVDLVVCPYDRFAFALLGWTGSRMFERDLRRYATHEKKMMLDNHALYDLTKKIFLKAKSEEEIFAHLGLEYLEPSERNA

SEQ ID NO: 279 - DNA, 1587 bp, synthetic construct
  misc_feature 1..1587: note = Variant of terminal deoxynucleotidyltransferase
  source 1..1587: mol_type = other DNA
atgcaccatcatcatcatcatggcggtagcggcatgcaccgcattcgtaccatcgattcggacttcgggaagaaacgccagaagaagatggataaccacattagttccatgatctatgaaatcaaatttcacgagtttgtgctgttcattctcgaaaagaaaatgggtgcgacgcgtcgtacttttctgacagatttagcccgcaagaaagggttccgcgtcgagaatgaactgtcagacagcgttacccacatcgtggcagaaaataattcaggatctgacgtattggcttggctgaagacccacaagatggagaagacgacgcaatttgaactgctggatattagctggcttatcgaaagcatgaaagttggtaaaccggtggacaccaaggggaaataccagttgatggaatcgcgtgtcgatagtgcgaacccagatccgacagccggtaccgagaacattctgcctcctactacgaagaccatttctcagtatgcgtgtcaacgccgcaccaccctgaacaaccataatcaacgttttacggacgcactggaaattcttgcggaaaattacgagttcaaacgcaacgatgatacttgtctgacctttatgcgtgctatttccgtgctgaaatgccttccgtttgaggtagttagcctgaaagacacggaaggattgccctggatcggtgatgaagtcaaagggattatggaagaaatcatcgaggtcggtgaatcgctggaagtgcaggccgtgctcaatgatgagcgctatcaaagcttcaaactgtttaagagtgtctttggagtgggggtgaagacagcagacaaatggtaccgtatgggtctgcgcacgctcgaggatgttcgttccagcaagaccctgaagttgaccaagatgcagaaagcgggtctgtgctattatgaagatcttgctgatggcgttacgaaagccgaagctgacgcgatttctctgctggttcaggatgcagtctggactttcgacccggatgcgctggtggagattacgggtggatttcgtcgtgggaaaccttttggtcacgacgttgatctgcttatcacatctccgggagctgagaaagaacaagaagaccagctcctgcagaaagtgaccaatctgtggaagaaacaagggttgttgctgtacggtgatctgcgtgaaagtcgctttgaagatgggaaactcccatcccgcaagatcgatgccctggaccattttcagaaatgctttgctatcctcaaactttatcaccataaagtggacaaaagcaaatgggaaatgccgacgggttcgaacgaaagcgaggccaaaagttggaaagcaattcgcgtagatctggttgtttgtccctacgatcgttttgcgtttgcgttgttgggttggaccggaagccgcatgttcgaacgtgatctgcgccgctacgccacccacgagaagaagatgatgctggacaatcatgcgctgtatgacctgaccaagaaaatctttctcaaagctaaatcggaagaggaaattttcgcacatctggggcttgaatacctggaaccgtccgaacgtaacgca

SEQ ID NO: 280 - protein, 529 aa, synthetic construct
  REGION 1..529: note = Variant of terminal deoxynucleotidyltransferase
MHHHHHHGGSGMHRIRTIDSDFGKKRQKKMDNHISSMIYEIKFHEFVLFILEKKMGATRRTFLTDLARKKGFRVENELSDSVTHIVAENNSGSDVLAWLKTHKMEKTTQFELLDISWLIESMKVGKPVDTKGKYQLMESRVDSANPDPTAGTENILPPTTKTISQYACQRRTTLNNHNQRFTDALEILAENYEFKRNDDTCLTFMRAISVLKCLPFEVVSLKDTEGLPWIGDEVKGIMEEIIEVGESLEVQAVLNDERYQSFKLFKSVFGVGVKTADKWYRMGLRTLEDVRSSKTLKLTKMQKAGLCYYEDLADGVTKAEADAISLLVQDAVWTFDPDALVEITGGFRRGKPFGHDVDLLITSPGAEKEQEDQLLQKVTNLWKKQGLLLYGDLRESRFEDGKLPSRKIDALDHFQKCFAILKLYHHKVDKSKWEMPTGSNESEAKSWKAIRVDLVVCPYDRFAFALLGWTGSRMFERDLRRYATHEKKMMLDNHALYDLTKKIFLKAKSEEEIFAHLGLEYLEPSERNA

SEQ ID NO: 281 - DNA, 1587 bp, synthetic construct
  misc_feature 1..1587: note = Variant of terminal deoxynucleotidyltransferase
  source 1..1587: mol_type = other DNA
atgcaccatcatcatcatcatggcggtagcggcatgcaccgcattcgtaccatcgattcggacttcgggaagaaacgccagaagaagatggataaccacattagttccatgatctatgaaatcaaatttcacgagtttgtgctgttcattctcgaaaagaaaatgggtgcgagtcgtcgtacttttctgacagatttagcccgcaagaaagggttccgcgtcgagaatgaactgtcagacagcgttacccacatcgtggcagaaaataattcaggatctgacgtattggcttggctgaagacccacaagatggagaagacgacgcaatttgaactgctggatattagctggcttatcgaaagcatgaaagttggtaaaccggtggacaccaaggggaaataccagttgatggaatcgcgtgtcgatagtgcgaacccagatccgacagccggtaccctcaacattctgcctcctactacgaagaccatttctcagtatgcgtgtcaacgccgcaccaccctgaacaaccataatcaacgttttacggacgcactggaaattcttgcggaaaattacgagttcaaacgcaacgatgatacttgtctgacctttatgcgtgctatttccgtgctgaaatgccttccgtttgaggtagttagcctgaaagacacggaaggattgccctggatcggtgatgaagtcaaagggattatggaagaaatcatcgaggtcggtgaatcgctggaagtgcaggccgtgctcaatgatgagcgctatcaaagcttcaaactgtttaagagtgtctttggagtgggggtgaagacagcagacaaatggtaccgtatgggtctgcgcacgctcgaggatgttcgttccagcaagaccctgaagttgaccaagatgcagaaagcgggtctgtgctattatgaagatcttgctgatggcgttacgaaagccgaagctgacgcgatttctctgctggttcaggatgcagtctggactttcgacccggatgcgctggtggagattacgggtggatttcgtcgtgggaaaccttttggtcacgacgttgatctgcttatcacatctccgggagctgagaaagaacaagaagaccagctcctgcagaaagtgaccaatctgtggaagaaacaagggttgttgctgtacggtgatctgcgtgaaagtcgctttgaagatgggaaactcccatcccgcaagatcgatgccctggaccattttcagaaatgctttgctatcctcaaactttatcaccataaagtggacaaaagcaaatgggaaatgccgacgggttcgaacgaaagcgaggccaaaagttggaaagcaattcgcgtagatctggttgtttgtccctacgatcgttttgcgtttgcgttgttgggttggaccggaagccgcatgttcgaacgtgatctgcgccgctacgccacccacgagaagaagatgatgctggacaatcatgcgctgtatgacctgaccaagaaaatctttctcaaagctaaatcggaagaggaaattttcgcacatctggggcttgaatacctggaaccgtccgaacgtaacgca

SEQ ID NO: 282 - protein, 529 aa, synthetic construct
  REGION 1..529: note = Variant of terminal deoxynucleotidyltransferase
MHHHHHHGGSGMHRIRTIDSDFGKKRQKKMDNHISSMIYEIKFHEFVLFILEKKMGASRRTFLTDLARKKGFRVENELSDSVTHIVAENNSGSDVLAWLKTHKMEKTTQFELLDISWLIESMKVGKPVDTKGKYQLMESRVDSANPDPTAGTLNILPPTTKTISQYACQRRTTLNNHNQRFTDALEILAENYEFKRNDDTCLTFMRAISVLKCLPFEVVSLKDTEGLPWIGDEVKGIMEEIIEVGESLEVQAVLNDERYQSFKLFKSVFGVGVKTADKWYRMGLRTLEDVRSSKTLKLTKMQKAGLCYYEDLADGVTKAEADAISLLVQDAVWTFDPDALVEITGGFRRGKPFGHDVDLLITSPGAEKEQEDQLLQKVTNLWKKQGLLLYGDLRESRFEDGKLPSRKIDALDHFQKCFAILKLYHHKVDKSKWEMPTGSNESEAKSWKAIRVDLVVCPYDRFAFALLGWTGSRMFERDLRRYATHEKKMMLDNHALYDLTKKIFLKAKSEEEIFAHLGLEYLEPSERNA

SEQ ID NO: 283 - DNA, 1587 bp, synthetic construct
  misc_feature 1..1587: note = Variant of terminal deoxynucleotidyltransferase
  source 1..1587: mol_type = other DNA
atgcaccatcatcatcatcatggcggtagcggcatgcaccgcattcgtaccatcgattcggacttcgggaagaaacgccagaagaagatggataaccacattagttccatgatctatgaaatcaaatttcacgagtttgtgctgttcattctcgaaaagaaaatgggtgcgacgcgtcgtacttttctgacagatttagcccgcaagaaagggttccgcgtcgagaatgaactgtcagacagcgttacccacatcgtggcagaaaataattcaggatctgacgtattggcttggctgaagacccacaagatggagaagacgaagcaatttgaactgctggatattagctggcttatcgaaagcatgaaagttggtaaaccggtggacaccaaggggaaataccagttgatggaatcgcgtgtcgatagtgcgaacccagatccgacagccggtaccctcaacattctgcctcctactacgaagaccatttctcagtatgcgtgtcaacgccgcaccaccctgaacaaccataatcaacgttttacggacgcactggaaattcttgcggaaaattacgagttcaaacgcaacgatgatacttgtctgacctttatgcgtgctatttccgtgctgaaatgccttccgtttgaggtagttagcctgaaagacacggaaggattgccctggatcggtgatgaagtcaaagggattatggaagaaatcatcgaggtcggtgaatcgctggaagtgcaggccgtgctcaatgatgagcgctatcaaagcttcaaactgtttaagagtgtctttggagtgggggtgaagacagcagacaaatggtaccgtatgggtctgcgcacgctcgaggatgttcgttccagcaagaccctgaagttgaccaagatgcagaaagcgggtctgtgctattatgaagatcttgctgatggcgttacgaaagccgaagctgacgcgatttctctgctggttcaggatgcagtctggactttcgacccggatgcgctggtggagattacgggtggatttcgtcgtgggaaaccttttggtcacgacgttgatctgcttatcacatctccgggagctgagaaagaacaagaagaccagctcctgcagaaagtgaccaatctgtggaagaaacaagggttgttgctgtacggtgatctgcgtgaaagtcgctttgaagatgggaaactcccatcccgcaagatcgatgccctggaccattttcagaaatgctttgctatcctcaaactttatcaccataaagtggacaaaagcaaatgggaaatgccgacgggttcgaacgaaagcgaggccaaaagttggaaagcaattcgcgtagatctggttgtttgtccctacgatcgttttgcgtttgcgttgttgggttggaccggaagccgcatgttcgaacgtgatctgcgccgctacgccacccacgagaagaagatgatgctggacaatcatgcgctgtatgacctgaccaagaaaatctttctcaaagctaaatcggaagaggaaattttcgcacatctggggcttgaatacctggaaccgtccgaacgtaacgca

SEQ ID NO: 284 - protein, 529 aa, synthetic construct
  REGION 1..529: note = Variant of terminal deoxynucleotidyltransferase
MHHHHHHGGSGMHRIRTIDSDFGKKRQKKMDNHISSMIYEIKFHEFVLFILEKKMGATRRTFLTDLARKKGFRVENELSDSVTHIVAENNSGSDVLAWLKTHKMEKTKQFELLDISWLIESMKVGKPVDTKGKYQLMESRVDSANPDPTAGTLNILPPTTKTISQYACQRRTTLNNHNQRFTDALEILAENYEFKRNDDTCLTFMRAISVLKCLPFEVVSLKDTEGLPWIGDEVKGIMEEIIEVGESLEVQAVLNDERYQSFKLFKSVFGVGVKTADKWYRMGLRTLEDVRSSKTLKLTKMQKAGLCYYEDLADGVTKAEADAISLLVQDAVWTFDPDALVEITGGFRRGKPFGHDVDLLITSPGAEKEQEDQLLQKVTNLWKKQGLLLYGDLRESRFEDGKLPSRKIDALDHFQKCFAILKLYHHKVDKSKWEMPTGSNESEAKSWKAIRVDLVVCPYDRFAFALLGWTGSRMFERDLRRYATHEKKMMLDNHALYDLTKKIFLKAKSEEEIFAHLGLEYLEPSERNA

SEQ ID NO: 285 - DNA, 1587 bp, synthetic construct
  misc_feature 1..1587: note = Variant of terminal deoxynucleotidyltransferase
  source 1..1587: mol_type = other DNA
atgcaccatcatcatcatcatggcggtagcggcatgcaccgcattcgtaccatcgattcggacttcgggaagaaacgccagaagaagatggataaccacattagttccatgatctatgaaatcaaatttcacgagtttgtgctgttcattctcgaaaagaaaatgggtgcgacgcgtcgtacttttctgacagatttagcccgcaagaaagggttccgcgtcgagaatgaactgtcagacagcgttacccacatcgtggcagaaaataattcaggatctgacgtattggcttggctgaagacccacaagatggagaagacgacgcaatttgaactgctggatattagctggcttatcgaaagcatgaaagttggtaaaccggtggacaccaaggggaaataccagttgatggaatcgcgtgtcatgagtgcgaacccagatccgacagccggtaccctcaacattctgcctcctactacgaagaccatttctcagtatgcgtgtcaacgccgcaccaccctgaacaaccataatcaacgttttacggacgcactggaaattcttgcggaaaattacgagttcaaacgcaacgatgatacttgtctgacctttatgcgtgctatttccgtgctgaaatgccttccgtttgaggtagttagcctgaaagacacggaaggattgccctggatcggtgatgaagtcaaagggattatggaagaaatcatcgaggtcggtgaatcgctggaagtgcaggccgtgctcaatgatgagcgctatcaaagcttcaaactgtttaagagtgtctttggagtgggggtgaagacagcagacaaatggtaccgtatgggtctgcgcacgctcgaggatgttcgttccagcaagaccctgaagttgaccaagatgcagaaagcgggtctgtgctattatgaagatcttgctgatggcgttacgaaagccgaagctgacgcgatttctctgctggttcaggatgcagtctggactttcgacccggatgcgctggtggagattacgggtggatttcgtcgtgggaaaccttttggtcacgacgttgatctgcttatcacatctccgggagctgagaaagaacaagaagaccagctcctgcagaaagtgaccaatctgtggaagaaacaagggttgttgctgtacggtgatctgcgtgaaagtcgctttgaagatgggaaactcccatcccgcaagatcgatgccctggaccattttcagaaatgctttgctatcctcaaactttatcaccataaagtggacaaaagcaaatgggaaatgccgacgggttcgaacgaaagcgaggccaaaagttggaaagcaattcgcgtagatctggttgtttgtccctacgatcgttttgcgtttgcgttgttgggttggaccggaagccgcatgttcgaacgtgatctgcgccgctacgccacccacgagaagaagatgatgctggacaatcatgcgctgtatgacctgaccaagaaaatctttctcaaagctaaatcggaagaggaaattttcgcacatctggggcttgaatacctggaaccgtccgaacgtaacgca

SEQ ID NO: 286 - protein, 529 aa, synthetic construct
  REGION 1..529: note = Variant of terminal deoxynucleotidyltransferase
MHHHHHHGGSGMHRIRTIDSDFGKKRQKKMDNHISSMIYEIKFHEFVLFILEKKMGATRRTFLTDLARKKGFRVENELSDSVTHIVAENNSGSDVLAWLKTHKMEKTTQFELLDISWLIESMKVGKPVDTKGKYQLMESRVMSANPDPTAGTLNILPPTTKTISQYACQRRTTLNNHNQRFTDALEILAENYEFKRNDDTCLTFMRAISVLKCLPFEVVSLKDTEGLPWIGDEVKGIMEEIIEVGESLEVQAVLNDERYQSFKLFKSVFGVGVKTADKWYRMGLRTLEDVRSSKTLKLTKMQKAGLCYYEDLADGVTKAEADAISLLVQDAVWTFDPDALVEITGGFRRGKPFGHDVDLLITSPGAEKEQEDQLLQKVTNLWKKQGLLLYGDLRESRFEDGKLPSRKIDALDHFQKCFAILKLYHHKVDKSKWEMPTGSNESEAKSWKAIRVDLVVCPYDRFAFALLGWTGSRMFERDLRRYATHEKKMMLDNHALYDLTKKIFLKAKSEEEIFAHLGLEYLEPSERNA

SEQ ID NO: 287 - DNA, 1587 bp, synthetic construct
  misc_feature 1..1587: note = Variant of terminal deoxynucleotidyltransferase
  source 1..1587: mol_type = other DNA
atgcaccatcatcatcatcatggcggtagcggcatgcaccgcattcgtaccatcgattcggacttcgggaagaaacgccagaagaagatggataaccacattagttccatgatctatgaaatcaaatttcacgagtttgtgctgttcattctcgaaaagaaaatgggtgcgacgcgtcgtacttttctgacagatttagcccgcaagaaagggttccgcgtcgagaatgaactgtcagacagcgttacccacatcgtggcagaaaataattcatattctgacgtattggcttggctgaagacccacaagatggagaagacgacgcaatttgaactgctggatattagctggcttatcgaaagcatgaaagttggtaaaccggtggacaccaaggggaaataccagttgatggaatcgcgtgtcgatagtgcgaacccagatccgacagccggtaccctcaacattctgcctcctactacgaagaccatttctcagtatgcgtgtcaacgccgcaccaccctgaacaaccataatcaacgttttacggacgcactggaaattcttgcggaaaattacgagttcaaacgcaacgatgatacttgtctgacctttatgcgtgctatttccgtgctgaaatgccttccgtttgaggtagttagcctgaaagacacggaaggattgccctggatcggtgatgaagtcaaagggattatggaagaaatcatcgaggtcggtgaatcgctggaagtgcaggccgtgctcaatgatgagcgctatcaaagcttcaaactgtttaagagtgtctttggagtgggggtgaagacagcagacaaatggtaccgtatgggtctgcgcacgctcgaggatgttcgttccagcaagaccctgaagttgaccaagatgcagaaagcgggtctgtgctattatgaagatcttgctgatggcgttacgaaagccgaagctgacgcgatttctctgctggttcaggatgcagtctggactttcgacccggatgcgctggtggagattacgggtggatttcgtcgtgggaaaccttttggtcacgacgttgatctgcttatcacatctccgggagctgagaaagaacaagaagaccagctcctgcagaaagtgaccaatctgtggaagaaacaagggttgttgctgtacggtgatctgcgtgaaagtcgctttgaagatgggaaactcccatcccgcaagatcgatgccctggaccattttcagaaatgctttgctatcctcaaactttatcaccataaagtggacaaaagcaaatgggaaatgccgacgggttcgaacgaaagcgaggccaaaagttggaaagcaattcgcgtagatctggttgtttgtccctacgatcgttttgcgtttgcgttgttgggttggaccggaagccgcatgttcgaacgtgatctgcgccgctacgccacccacgagaagaagatgatgctggacaatcatgcgctgtatgacctgaccaagaaaatctttctcaaagctaaatcggaagaggaaattttcgcacatctggggcttgaatacctggaaccgtccgaacgtaacgca

SEQ ID NO: 288 - protein, 529 aa, synthetic construct
  REGION 1..529: note = Variant of terminal deoxynucleotidyltransferase
MHHHHHHGGSGMHRIRTIDSDFGKKRQKKMDNHISSMIYEIKFHEFVLFILEKKMGATRRTFLTDLARKKGFRVENELSDSVTHIVAENNSYSDVLAWLKTHKMEKTTQFELLDISWLIESMKVGKPVDTKGKYQLMESRVDSANPDPTAGTLNILPPTTKTISQYACQRRTTLNNHNQRFTDALEILAENYEFKRNDDTCLTFMRAISVLKCLPFEVVSLKDTEGLPWIGDEVKGIMEEIIEVGESLEVQAVLNDERYQSFKLFKSVFGVGVKTADKWYRMGLRTLEDVRSSKTLKLTKMQKAGLCYYEDLADGVTKAEADAISLLVQDAVWTFDPDALVEITGGFRRGKPFGHDVDLLITSPGAEKEQEDQLLQKVTNLWKKQGLLLYGDLRESRFEDGKLPSRKIDALDHFQKCFAILKLYHHKVDKSKWEMPTGSNESEAKSWKAIRVDLVVCPYDRFAFALLGWTGSRMFERDLRRYATHEKKMMLDNHALYDLTKKIFLKAKSEEEIFAHLGLEYLEPSERNA

SEQ ID NO: 289 - DNA, 1587 bp, synthetic construct
  misc_feature 1..1587: note = Variant of terminal deoxynucleotidyltransferase
  source 1..1587: mol_type = other DNA
atgcaccatcatcatcatcatggcggtagcggcatgcaccgcattcgtaccatcgattcggacttcgggaagaaacgccagaagaagatggataaccacattagttccatgatctatgaaatcaaatttcacgagtttgtgctgttcattctcgaaaagaaaatgggtgcgacgcgtcgtacttttctgacagatttagcccgcaagaaagggttccgcgtcgagaatgaactgtcagacagcgttacccacatcgtggcagaaaataattcaggatctgacgtattggcttggctgaagacccacaagatggagaagacgacgcaatttgaactgctggatattagctggcttatcgaaagcatgaaagttggtaaaccggtggacaccaaggggaaataccagttgatggaatcgcgtgtcgatagtgcgaacccagatccgacagccggtaccctcaacattctgcctcctactacggagaccatttctcagtatgcgtgtcaacgccgcaccaccctgaacaaccataatcaacgttttacggacgcactggaaattcttgcggaaaattacgagttcaaacgcaacgatgatacttgtctgacctttatgcgtgctatttccgtgctgaaatgccttccgtttgaggtagttagcctgaaagacacggaaggattgccctggatcggtgatgaagtcaaagggattatggaagaaatcatcgaggtcggtgaatcgctggaagtgcaggccgtgctcaatgatgagcgctatcaaagcttcaaactgtttaagagtgtctttggagtgggggtgaagacagcagacaaatggtaccgtatgggtctgcgcacgctcgaggatgttcgttccagcaagaccctgaagttgaccaagatgcagaaagcgggtctgtgctattatgaagatcttgctgatggcgttacgaaagccgaagctgacgcgatttctctgctggttcaggatgcagtctggactttcgacccggatgcgctggtggagattacgggtggatttcgtcgtgggaaaccttttggtcacgacgttgatctgcttatcacatctccgggagctgagaaagaacaagaagaccagctcctgcagaaagtgaccaatctgtggaagaaacaagggttgttgctgtacggtgatctgcgtgaaagtcgctttgaagatgggaaactcccatcccgcaagatcgatgccctggaccattttcagaaatgctttgctatcctcaaactttatcaccataaagtggacaaaagcaaatgggaaatgccgacgggttcgaacgaaagcgaggccaaaagttggaaagcaattcgcgtagatctggttgtttgtccctacgatcgttttgcgtttgcgttgttgggttggaccggaagccgcatgttcgaacgtgatctgcgccgctacgccacccacgagaagaagatgatgctggacaatcatgcgctgtatgacctgaccaagaaaatctttctcaaagctaaatcggaagaggaaattttcgcacatctggggcttgaatacctggaaccgtccgaacgtaacgca

SEQ ID NO: 290 - protein, 529 aa, synthetic construct
  REGION 1..529: note = Variant of terminal deoxynucleotidyltransferase
MHHHHHHGGSGMHRIRTIDSDFGKKRQKKMDNHISSMIYEIKFHEFVLFILEKKMGATRRTFLTDLARKKGFRVENELSDSVTHIVAENNSGSDVLAWLKTHKMEKTTQFELLDISWLIESMKVGKPVDTKGKYQLMESRVDSANPDPTAGTLNILPPTTETISQYACQRRTTLNNHNQRFTDALEILAENYEFKRNDDTCLTFMRAISVLKCLPFEVVSLKDTEGLPWIGDEVKGIMEEIIEVGESLEVQAVLNDERYQSFKLFKSVFGVGVKTADKWYRMGLRTLEDVRSSKTLKLTKMQKAGLCYYEDLADGVTKAEADAISLLVQDAVWTFDPDALVEITGGFRRGKPFGHDVDLLITSPGAEKEQEDQLLQKVTNLWKKQGLLLYGDLRESRFEDGKLPSRKIDALDHFQKCFAILKLYHHKVDKSKWEMPTGSNESEAKSWKAIRVDLVVCPYDRFAFALLGWTGSRMFERDLRRYATHEKKMMLDNHALYDLTKKIFLKAKSEEEIFAHLGLEYLEPSERNA

SEQ ID NO: 291 - DNA, 1587 bp, synthetic construct
  misc_feature 1..1587: note = Variant of terminal deoxynucleotidyltransferase
  source 1..1587: mol_type = other DNA
atgcaccatcatcatcatcatggcggtagcggcatgcaccgcattcgtaccatcgattcggacttcgggaagaaacgccagaagaagatggataaccacattagttcctttatctatgaaatcaaatttcacgagtttgtgctgttcattctcgaaaagaaaatgggtgcgacgcgtcgtacttttctgacagatttagcccgcaagaaagggttccgcgtcgagaatgaactgtcagacagcgttacccacatcgtggcagaaaataattcaggatctgacgtattggcttggctgaagacccacaagatggagaagacgacgcaatttgaactgctggatattagctggcttatcgaaagcatgaaagttggtaaaccggtggacaccaaggggaaataccagttgatggaatcgcgtgtcgatagtgcgaacccagatccgacagccggtaccctcaacattctgcctcctactacgaagaccatttctcagtatgcgtgtcaacgccgcaccaccctgaacaaccataatcaacgttttacggacgcactggaaattcttgcggaaaattacgagttcaaacgcaacgatgatacttgtctgacctttatgcgtgctatttccgtgctgaaatgccttccgtttgaggtagttagcctgaaagacacggaaggattgccctggatcggtgatgaagtcaaagggattatggaagaaatcatcgaggtcggtgaatcgctggaagtgcaggccgtgctcaatgatgagcgctatcaaagcttcaaactgtttaagagtgtctttggagtgggggtgaagacagcagacaaatggtaccgtatgggtctgcgcacgctcgaggatgttcgttccagcaagaccctgaagttgaccaagatgcagaaagcgggtctgtgctattatgaagatcttgctgatggcgttacgaaagccgaagctgacgcgatttctctgctggttcaggatgcagtctggactttcgacccggatgcgctggtggagattacgggtggatttcgtcgtgggaaaccttttggtcacgacgttgatctgcttatcacatctccgggagctgagaaagaacaagaagaccagctcctgcagaaagtgaccaatctgtggaagaaacaagggttgttgctgtacggtgatctgcgtgaaagtcgctttgaagatgggaaactcccatcccgcaagatcgatgccctggaccattttcagaaatgctttgctatcctcaaactttatcaccataaagtggacaaaagcaaatgggaaatgccgacgggttcgaacgaaagcgaggccaaaagttggaaagcaattcgcgtagatctggttgtttgtccctacgatcgttttgcgtttgcgttgttgggttggaccggaagccgcatgttcgaacgtgatctgcgccgctacgccacccacgagaagaagatgatgctggacaatcatgcgctgtatgacctgaccaagaaaatctttctcaaagctaaatcggaagaggaaattttcgcacatctggggcttgaatacctggaaccgtccgaacgtaacgca

SEQ ID NO: 292 - protein, 529 aa, synthetic construct
  REGION 1..529: note = Variant of terminal deoxynucleotidyltransferase
MHHHHHHGGSGMHRIRTIDSDFGKKRQKKMDNHISSFIYEIKFHEFVLFILEKKMGATRRTFLTDLARKKGFRVENELSDSVTHIVAENNSGSDVLAWLKTHKMEKTTQFELLDISWLIESMKVGKPVDTKGKYQLMESRVDSANPDPTAGTLNILPPTTKTISQYACQRRTTLNNHNQRFTDALEILAENYEFKRNDDTCLTFMRAISVLKCLPFEVVSLKDTEGLPWIGDEVKGIMEEIIEVGESLEVQAVLNDERYQSFKLFKSVFGVGVKTADKWYRMGLRTLEDVRSSKTLKLTKMQKAGLCYYEDLADGVTKAEADAISLLVQDAVWTFDPDALVEITGGFRRGKPFGHDVDLLITSPGAEKEQEDQLLQKVTNLWKKQGLLLYGDLRESRFEDGKLPSRKIDALDHFQKCFAILKLYHHKVDKSKWEMPTGSNESEAKSWKAIRVDLVVCPYDRFAFALLGWTGSRMFERDLRRYATHEKKMMLDNHALYDLTKKIFLKAKSEEEIFAHLGLEYLEPSERNA

SEQ ID NO: 293 - DNA, 1587 bp, synthetic construct
  misc_feature 1..1587: note = Variant of terminal deoxynucleotidyltransferase
  source 1..1587: mol_type = other DNA
atgcaccatcatcatcatcatggcggtagcggcatgcaccgcattcgtaccatcgattcggacttcgggaagaaacgccagaagaagatggataaccacattagttccgctatctatgaaatcaaatttcacgagtttgtgctgttcattctcgaaaagaaaatgggtgcgacgcgtcgtacttttctgacagatttagcccgcaagaaagggttccgcgtcgagaatgaactgtcagacagcgttacccacatcgtggcagaaaataattcaggatctgacgtattggcttggctgaagacccacaagatggagaagacgacgcaatttgaactgctggatattagctggcttatcgaaagcatgaaagttggtaaaccggtggacaccaaggggaaataccagttgatggaatcgcgtgtcgatagtgcgaacccagatccgacagccggtaccctcaacattctgcctcctactacgaagaccatttctcagtatgcgtgtcaacgccgcaccaccctgaacaaccataatcaacgttttacggacgcactggaaattcttgcggaaaattacgagttcaaacgcaacgatgatacttgtctgacctttatgcgtgctatttccgtgctgaaatgccttccgtttgaggtagttagcctgaaagacacggaaggattgccctggatcggtgatgaagtcaaagggattatggaagaaatcatcgaggtcggtgaatcgctggaagtgcaggccgtgctcaatgatgagcgctatcaaagcttcaaactgtttaagagtgtctttggagtgggggtgaagacagcagacaaatggtaccgtatgggtctgcgcacgctcgaggatgttcgttccagcaagaccctgaagttgaccaagatgcagaaagcgggtctgtgctattatgaagatcttgctgatggcgttacgaaagccgaagctgacgcgatttctctgctggttcaggatgcagtctggactttcgacccggatgcgctggtggagattacgggtggatttcgtcgtgggaaaccttttggtcacgacgttgatctgcttatcacatctccgggagctgagaaagaacaagaagaccagctcctgcagaaagtgaccaatctgtggaagaaacaagggttgttgctgtacggtgatctgcgtgaaagtcgctttgaagatgggaaactcccatcccgcaagatcgatgccctggaccattttcagaaatgctttgctatcctcaaactttatcaccataaagtggacaaaagcaaatgggaaatgccgacgggttcgaacgaaagcgaggccaaaagttggaaagcaattcgcgtagatctggttgtttgtccctacgatcgttttgcgtttgcgttgttgggttggaccggaagccgcatgttcgaacgtgatctgcgccgctacgccacccacgagaagaagatgatgctggacaatcatgcgctgtatgacctgaccaagaaaatctttctcaaagctaaatcggaagaggaaattttcgcacatctggggcttgaatacctggaaccgtccgaacgtaacgca

SEQ ID NO: 294 - protein, 529 aa, synthetic construct
  REGION 1..529: note = Variant of terminal deoxynucleotidyltransferase
MHHHHHHGGSGMHRIRTIDSDFGKKRQKKMDNHISSAIYEIKFHEFVLFILEKKMGATRRTFLTDLARKKGFRVENELSDSVTHIVAENNSGSDVLAWLKTHKMEKTTQFELLDISWLIESMKVGKPVDTKGKYQLMESRVDSANPDPTAGTLNILPPTTKTISQYACQRRTTLNNHNQRFTDALEILAENYEFKRNDDTCLTFMRAISVLKCLPFEVVSLKDTEGLPWIGDEVKGIMEEIIEVGESLEVQAVLNDERYQSFKLFKSVFGVGVKTADKWYRMGLRTLEDVRSSKTLKLTKMQKAGLCYYEDLADGVTKAEADAISLLVQDAVWTFDPDALVEITGGFRRGKPFGHDVDLLITSPGAEKEQEDQLLQKVTNLWKKQGLLLYGDLRESRFEDGKLPSRKIDALDHFQKCFAILKLYHHKVDKSKWEMPTGSNESEAKSWKAIRVDLVVCPYDRFAFALLGWTGSRMFERDLRRYATHEKKMMLDNHALYDLTKKIFLKAKSEEEIFAHLGLEYLEPSERNA

SEQ ID NO: 295 - DNA, 1587 bp, synthetic construct
  misc_feature 1..1587: note = Variant of terminal deoxynucleotidyltransferase
  source 1..1587: mol_type = other DNA
atgcaccatcatcatcatcatggcggtagcggcatgcaccgcattcgtaccatcgattcggacttcgggaagaaacgccagaagaagatggataaccacattagttccatgatctatgaaatcaaatttcacgagtttgtgctgttcattctcgaaaagaaaatgggtgcgacgcgtcgtacttttctgacagatttagcccgcaagaaagggttccgcgtcgagaatgaactgtcagacagcgttacccacatcgtggcagaaaataattcaggatctgacgtattggcttggctgaagacccacaagatggagaagacgacgcaatttgaactgctggatattagctggcttatcgaaagcatgaaagttggtaaaccggtggacaccaaggggaaataccagttgatggaatcgcgtgtcgatagtgcgaacccagatccgacagagggtaccctcaacattctgcctcctactacgaagaccatttctcagtatgcgtgtcaacgccgcaccaccctgaacaaccataatcaacgttttacggacgcactggaaattcttgcggaaaattacgagttcaaacgcaacgatgatacttgtctgacctttatgcgtgctatttccgtgctgaaatgccttccgtttgaggtagttagcctgaaagacacggaaggattgccctggatcggtgatgaagtcaaagggattatggaagaaatcatcgaggtcggtgaatcgctggaagtgcaggccgtgctcaatgatgagcgctatcaaagcttcaaactgtttaagagtgtctttggagtgggggtgaagacagcagacaaatggtaccgtatgggtctgcgcacgctcgaggatgttcgttccagcaagaccctgaagttgaccaagatgcagaaagcgggtctgtgctattatgaagatcttgctgatggcgttacgaaagccgaagctgacgcgatttctctgctggttcaggatgcagtctggactttcgacccggatgcgctggtggagattacgggtggatttcgtcgtgggaaaccttttggtcacgacgttgatctgcttatcacatctccgggagctgagaaagaacaagaagaccagctcctgcagaaagtgaccaatctgtggaagaaacaagggttgttgctgtacggtgatctgcgtgaaagtcgctttgaagatgggaaactcccatcccgcaagatcgatgccctggaccattttcagaaatgctttgctatcctcaaactttatcaccataaagtggacaaaagcaaatgggaaatgccgacgggttcgaacgaaagcgaggccaaaagttggaaagcaattcgcgtagatctggttgtttgtccctacgatcgttttgcgtttgcgttgttgggttggaccggaagccgcatgttcgaacgtgatctgcgccgctacgccacccacgagaagaagatgatgctggacaatcatgcgctgtatgacctgaccaagaaaatctttctcaaagctaaatcggaagaggaaattttcgcacatctggggcttgaatacctggaaccgtccgaacgtaacgca

SEQ ID NO: 296 - protein, 529 aa, synthetic construct
  REGION 1..529: note = Variant of terminal deoxynucleotidyltransferase
MHHHHHHGGSGMHRIRTIDSDFGKKRQKKMDNHISSMIYEIKFHEFVLFILEKKMGATRRTFLTDLARKKGFRVENELSDSVTHIVAENNSGSDVLAWLKTHKMEKTTQFELLDISWLIESMKVGKPVDTKGKYQLMESRVDSANPDPTEGTLNILPPTTKTISQYACQRRTTLNNHNQRFTDALEILAENYEFKRNDDTCLTFMRAISVLKCLPFEVVSLKDTEGLPWIGDEVKGIMEEIIEVGESLEVQAVLNDERYQSFKLFKSVFGVGVKTADKWYRMGLRTLEDVRSSKTLKLTKMQKAGLCYYEDLADGVTKAEADAISLLVQDAVWTFDPDALVEITGGFRRGKPFGHDVDLLITSPGAEKEQEDQLLQKVTNLWKKQGLLLYGDLRESRFEDGKLPSRKIDALDHFQKCFAILKLYHHKVDKSKWEMPTGSNESEAKSWKAIRVDLVVCPYDRFAFALLGWTGSRMFERDLRRYATHEKKMMLDNHALYDLTKKIFLKAKSEEEIFAHLGLEYLEPSERNA

SEQ ID NO: 297 - DNA, 1587 bp, synthetic construct
  misc_feature 1..1587: note = Variant of terminal deoxynucleotidyltransferase
  source 1..1587: mol_type = other DNA
atgcaccatcatcatcatcatggcggtagcggcatgcaccgcattcgtaccatcgattcggacttcgggaagaaacgccagaagaagatggataaccacattagttccatgatctatgaaatcaaatttcacgagtttgtgctgttcattctcgaaaagaaaatgggtgcgacgcgtcgtacttttctgacagatttagcccgcaagaaagggttccgcgtcgagaatgaactgtcagacagcgttacccacatcgtggcagaaaataattcaggatctgacgtattggcttggctgaagacccacaagatggagaagaggacgcaatttgaactgctggatattagctggcttatcgaaagcatgaaagttggtaaaccggtggacaccaaggggaaataccagttgatggaatcgcgtgtcgatagtgcgaacccagatccgacagccggtaccctcaacattctgcctcctactacgaagaccatttctcagtatgcgtgtcaacgccgcaccaccctgaacaaccataatcaacgttttacggacgcactggaaattcttgcggaaaattacgagttcaaacgcaacgatgatacttgtctgacctttatgcgtgctatttccgtgctgaaatgccttccgtttgaggtagttagcctgaaagacacggaaggattgccctggatcggtgatgaagtcaaagggattatggaagaaatcatcgaggtcggtgaatcgctggaagtgcaggccgtgctcaatgatgagcgctatcaaagcttcaaactgtttaagagtgtctttggagtgggggtgaagacagcagacaaatggtaccgtatgggtctgcgcacgctcgaggatgttcgttccagcaagaccctgaagttgaccaagatgcagaaagcgggtctgtgctattatgaagatcttgctgatggcgttacgaaagccgaagctgacgcgatttctctgctggttcaggatgcagtctggactttcgacccggatgcgctggtggagattacgggtggatttcgtcgtgggaaaccttttggtcacgacgttgatctgcttatcacatctccgggagctgagaaagaacaagaagaccagctcctgcagaaagtgaccaatctgtggaagaaacaagggttgttgctgtacggtgatctgcgtgaaagtcgctttgaagatgggaaactcccatcccgcaagatcgatgccctggaccattttcagaaatgctttgctatcctcaaactttatcaccataaagtggacaaaagcaaatgggaaatgccgacgggttcgaacgaaagcgaggccaaaagttggaaagcaattcgcgtagatctggttgtttgtccctacgatcgttttgcgtttgcgttgttgggttggaccggaagccgcatgttcgaacgtgatctgcgccgctacgccacccacgagaagaagatgatgctggacaatcatgcgctgtatgacctgaccaagaaaatctttctcaaagctaaatcggaagaggaaattttcgcacatctggggcttgaatacctggaaccgtccgaacgtaacgca

SEQ ID NO: 298 - protein, 529 aa, synthetic construct
  REGION 1..529: note = Variant of terminal deoxynucleotidyltransferase
MHHHHHHGGSGMHRIRTIDSDFGKKRQKKMDNHISSMIYEIKFHEFVLFILEKKMGATRRTFLTDLARKKGFRVENELSDSVTHIVAENNSGSDVLAWLKTHKMEKRTQFELLDISWLIESMKVGKPVDTKGKYQLMESRVDSANPDPTAGTLNILPPTTKTISQYACQRRTTLNNHNQRFTDALEILAENYEFKRNDDTCLTFMRAISVLKCLPFEVVSLKDTEGLPWIGDEVKGIMEEIIEVGESLEVQAVLNDERYQSFKLFKSVFGVGVKTADKWYRMGLRTLEDVRSSKTLKLTKMQKAGLCYYEDLADGVTKAEADAISLLVQDAVWTFDPDALVEITGGFRRGKPFGHDVDLLITSPGAEKEQEDQLLQKVTNLWKKQGLLLYGDLRESRFEDGKLPSRKIDALDHFQKCFAILKLYHHKVDKSKWEMPTGSNESEAKSWKAIRVDLVVCPYDRFAFALLGWTGSRMFERDLRRYATHEKKMMLDNHALYDLTKKIFLKAKSEEEIFAHLGLEYLEPSERNA

SEQ ID NO: 299 - DNA, 1587 bp, synthetic construct
  misc_feature 1..1587: note = Variant of terminal deoxynucleotidyltransferase
  source 1..1587: mol_type = other DNA
atgcaccatcatcatcatcatggcggtagcggcatgcaccgcattcgtaccatcgattcggacttcgggaagaaacgccagaagaagatggataaccacattagttccatgatctatgaaatcaaatttcacgagtttgtgctgttcattctcgaaaagaaaatgggtgcgacgcgtcgtacttttctgacagatttagcccgcaagaaagggttccgcgtcgagaatgaactgtcagacagcgttacccacatcgtggcagaaaataattcaggatctgacgtattggcttggctgaagacccacaagatggagaagacgacgcaatttgaactgctggatattagctggcttatcgaaagcatgaaagttggtaaaccggtggacaccaaggggaaataccagttgatggaatcgcgtgtcgatagtgcgaacccagatccgacagccggtaccctcaacattctgcctcctactacgaaggagatttctcagtatgcgtgtcaacgccgcaccaccctgaacaaccataatcaacgttttacggacgcactggaaattcttgcggaaaattacgagttcaaacgcaacgatgatacttgtctgacctttatgcgtgctatttccgtgctgaaatgccttccgtttgaggtagttagcctgaaagacacggaaggattgccctggatcggtgatgaagtcaaagggattatggaagaaatcatcgaggtcggtgaatcgctggaagtgcaggccgtgctcaatgatgagcgctatcaaagcttcaaactgtttaagagtgtctttggagtgggggtgaagacagcagacaaatggtaccgtatgggtctgcgcacgctcgaggatgttcgttccagcaagaccctgaagttgaccaagatgcagaaagcgggtctgtgctattatgaagatcttgctgatggcgttacgaaagccgaagctgacgcgatttctctgctggttcaggatgcagtctggactttcgacccggatgcgctggtggagattacgggtggatttcgtcgtgggaaaccttttggtcacgacgttgatctgcttatcacatctccgggagctgagaaagaacaagaagaccagctcctgcagaaagtgaccaatctgtggaagaaacaagggttgttgctgtacggtgatctgcgtgaaagtcgctttgaagatgggaaactcccatcccgcaagatcgatgccctggaccattttcagaaatgctttgctatcctcaaactttatcaccataaagtggacaaaagcaaatgggaaatgccgacgggttcgaacgaaagcgaggccaaaagttggaaagcaattcgcgtagatctggttgtttgtccctacgatcgttttgcgtttgcgttgttgggttggaccggaagccgcatgttcgaacgtgatctgcgccgctacgccacccacgagaagaagatgatgctggacaatcatgcgctgtatgacctgaccaagaaaatctttctcaaagctaaatcggaagaggaaattttcgcacatctggggcttgaatacctggaaccgtccgaacgtaacgca

SEQ ID NO: 300 - protein, 529 aa, synthetic construct
  REGION 1..529: note = Variant of terminal deoxynucleotidyltransferase
MHHHHHHGGSGMHRIRTIDSDFGKKRQKKMDNHISSMIYEIKFHEFVLFILEKKMGATRRTFLTDLARKKGFRVENELSDSVTHIVAENNSGSDVLAWLKTHKMEKTTQFELLDISWLIESMKVGKPVDTKGKYQLMESRVDSANPDPTAGTLNILPPTTKEISQYACQRRTTLNNHNQRFTDALEILAENYEFKRNDDTCLTFMRAISVLKCLPFEVVSLKDTEGLPWIGDEVKGIMEEIIEVGESLEVQAVLNDERYQSFKLFKSVFGVGVKTADKWYRMGLRTLEDVRSSKTLKLTKMQKAGLCYYEDLADGVTKAEADAISLLVQDAVWTFDPDALVEITGGFRRGKPFGHDVDLLITSPGAEKEQEDQLLQKVTNLWKKQGLLLYGDLRESRFEDGKLPSRKIDALDHFQKCFAILKLYHHKVDKSKWEMPTGSNESEAKSWKAIRVDLVVCPYDRFAFALLGWTGSRMFERDLRRYATHEKKMMLDNHALYDLTKKIFLKAKSEEEIFAHLGLEYLEPSERNA

SEQ ID NO: 301 - DNA, 1587 bp, synthetic construct
  misc_feature 1..1587: note = Variant of terminal deoxynucleotidyltransferase
  source 1..1587: mol_type = other DNA
atgcaccatcatcatcatcatggcggtagcggcatgcaccgcattcgtaccatcgattcggacttcgggaagaaacgccagaagaagatggataaccacattagttccatgatctatgaaatcaaatttcacgagtttgtgctgttcattctcgaaaagaaaatgggtgcgacgcgtcgtacttttctgacagatttagcccgcaagaaagggttccgcgtcgagaatgaactgtcagacagcgttacccacatcgtggcagaaaataattcaggatctgacgtattggcttggctgaagacccacaagatggagaagacgacgcaatttgaactgctggatattagctggcttatcgaaagcatgaaagttggtaaaccggtggacaccaaggggaaataccagttgatggaatcgcgtgaggatagtgcgaacccagatccgacagccggtaccctcaacattctgcctcctactacgaagaccatttctcagtatgcgtgtcaacgccgcaccaccctgaacaaccataatcaacgttttacggacgcactggaaattcttgcggaaaattacgagttcaaacgcaacgatgatacttgtctgacctttatgcgtgctatttccgtgctgaaatgccttccgtttgaggtagttagcctgaaagacacggaaggattgccctggatcggtgatgaagtcaaagggattatggaagaaatcatcgaggtcggtgaatcgctggaagtgcaggccgtgctcaatgatgagcgctatcaaagcttcaaactgtttaagagtgtctttggagtgggggtgaagacagcagacaaatggtaccgtatgggtctgcgcacgctcgaggatgttcgttccagcaagaccctgaagttgaccaagatgcagaaagcgggtctgtgctattatgaagatcttgctgatggcgttacgaaagccgaagctgacgcgatttctctgctggttcaggatgcagtctggactttcgacccggatgcgctggtggagattacgggtggatttcgtcgtgggaaaccttttggtcacgacgttgatctgcttatcacatctccgggagctgagaaagaacaagaagaccagctcctgcagaaagtgaccaatctgtggaagaaacaagggttgttgctgtacggtgatctgcgtgaaagtcgctttgaagatgggaaactcccatcccgcaagatcgatgccctggaccattttcagaaatgctttgctatcctcaaactttatcaccataaagtggacaaaagcaaatgggaaatgccgacgggttcgaacgaaagcgaggccaaaagttggaaagcaattcgcgtagatctggttgtttgtccctacgatcgttttgcgtttgcgttgttgggttggaccggaagccgcatgttcgaacgtgatctgcgccgctacgccacccacgagaagaagatgatgctggacaatcatgcgctgtatgacctgaccaagaaaatctttctcaaagctaaatcggaagaggaaattttcgcacatctggggcttgaatacctggaaccgtccgaacgtaacgca

SEQ ID NO: 302 - protein, 529 aa, synthetic construct
  REGION 1..529: note = Variant of terminal deoxynucleotidyltransferase
MHHHHHHGGSGMHRIRTIDSDFGKKRQKKMDNHISSMIYEIKFHEFVLFILEKKMGATRRTFLTDLARKKGFRVENELSDSVTHIVAENNSGSDVLAWLKTHKMEKTTQFELLDISWLIESMKVGKPVDTKGKYQLMESREDSANPDPTAGTLNILPPTTKTISQYACQRRTTLNNHNQRFTDALEILAENYEFKRNDDTCLTFMRAISVLKCLPFEVVSLKDTEGLPWIGDEVKGIMEEIIEVGESLEVQAVLNDERYQSFKLFKSVFGVGVKTADKWYRMGLRTLEDVRSSKTLKLTKMQKAGLCYYEDLADGVTKAEADAISLLVQDAVWTFDPDALVEITGGFRRGKPFGHDVDLLITSPGAEKEQEDQLLQKVTNLWKKQGLLLYGDLRESRFEDGKLPSRKIDALDHFQKCFAILKLYHHKVDKSKWEMPTGSNESEAKSWKAIRVDLVVCPYDRFAFALLGWTGSRMFERDLRRYATHEKKMMLDNHALYDLTKKIFLKAKSEEEIFAHLGLEYLEPSERNA

SEQ ID NO: 303 - DNA, 1587 bp, synthetic construct
  misc_feature 1..1587: note = Variant of terminal deoxynucleotidyltransferase
  source 1..1587: mol_type = other DNA
atgcaccatcatcatcatcatggcggtagcggcatgcaccgcattcgtaccatcgattcggacttcgggaagaaacgccagaagaagatggataaccacattagttccatgatctatgaaatcaaatttcacgagtttgtgctgttcattctcgaaaagaaaatgggtgcgacgcgtcgtacttttctgacagatttagcccgcaagaaagggttccgcgtcgagaatgaactgtcagacagcgttacccacatcgtggcagaaaataattcaggatctgacgtattggcttggctgaagacccacaagatggagaagacgacgcaatttgaactgctggatattagctggcttatcgaaagcatgaaagttggtaaaccggtggacaccaaggggaaataccagttgatggaatcgcgtgtcgatagtgcgaacccagatccgacagccggtaccctcaacattgatcctcctactacgaagaccatttctcagtatgcgtgtcaacgccgcaccaccctgaacaaccataatcaacgttttacggacgcactggaaattcttgcggaaaattacgagttcaaacgcaacgatgatacttgtctgacctttatgcgtgctatttccgtgctgaaatgccttccgtttgaggtagttagcctgaaagacacggaaggattgccctggatcggtgatgaagtcaaagggattatggaagaaatcatcgaggtcggtgaatcgctggaagtgcaggccgtgctcaatgatgagcgctatcaaagcttcaaactgtttaagagtgtctttggagtgggggtgaagacagcagacaaatggtaccgtatgggtctgcgcacgctcgaggatgttcgttccagcaagaccctgaagttgaccaagatgcagaaagcgggtctgtgctattatgaagatcttgctgatggcgttacgaaagccgaagctgacgcgatttctctgctggttcaggatgcagtctggactttcgacccggatgcgctggtggagattacgggtggatttcgtcgtgggaaaccttttggtcacgacgttgatctgcttatcacatctccgggagctgagaaagaacaagaagaccagctcctgcagaaagtgaccaatctgtggaagaaacaagggttgttgctgtacggtgatctgcgtgaaagtcgctttgaagatgggaaactcccatcccgcaagatcgatgccctggaccattttcagaaatgctttgctatcctcaaactttatcaccataaagtggacaaaagcaaatgggaaatgccgacgggttcgaacgaaagcgaggccaaaagttggaaagcaattcgcgtagatctggttgtttgtccctacgatcgttttgcgtttgcgttgttgggttggaccggaagccgcatgttcgaacgtgatctgcgccgctacgccacccacgagaagaagatgatgctggacaatcatgcgctgtatgacctgaccaagaaaatctttctcaaagctaaatcggaagaggaaattttcgcacatctggggcttgaatacctggaaccgtccgaacgtaacgca

SEQ ID NO: 304 - protein, 529 aa, synthetic construct
  REGION 1..529: note = Variant of terminal deoxynucleotidyltransferase
MHHHHHHGGSGMHRIRTIDSDFGKKRQKKMDNHISSMIYEIKFHEFVLFILEKKMGATRRTFLTDLARKKGFRVENELSDSVTHIVAENNSGSDVLAWLKTHKMEKTTQFELLDISWLIESMKVGKPVDTKGKYQLMESRVDSANPDPTAGTLNIDPPTTKTISQYACQRRTTLNNHNQRFTDALEILAENYEFKRNDDTCLTFMRAISVLKCLPFEVVSLKDTEGLPWIGDEVKGIMEEIIEVGESLEVQAVLNDERYQSFKLFKSVFGVGVKTADKWYRMGLRTLEDVRSSKTLKLTKMQKAGLCYYEDLADGVTKAEADAISLLVQDAVWTFDPDALVEITGGFRRGKPFGHDVDLLITSPGAEKEQEDQLLQKVTNLWKKQGLLLYGDLRESRFEDGKLPSRKIDALDHFQKCFAILKLYHHKVDKSKWEMPTGSNESEAKSWKAIRVDLVVCPYDRFAFALLGWTGSRMFERDLRRYATHEKKMMLDNHALYDLTKKIFLKAKSEEEIFAHLGLEYLEPSERNA

SEQ ID NO: 305 - DNA, 1587 bp, synthetic construct
  misc_feature 1..1587: note = Variant of terminal deoxynucleotidyltransferase
  source 1..1587: mol_type = other DNA
atgcaccatcatcatcatcatggcggtagcggcatgcaccgcattcgtaccatcgattcggacttcgggaagaaacgccagaagaagatggataaccacattagttccatgatctatgaaatcaaatttcacgagtttgtgctgttcattctcgaaaagaaaatgggtgcgacgcgtcgtacttttctgacagatttagcccgcaagaaagggttccgcgtcgagaatgaactgtcagacagcgttacccacatcgtggcagaaaataattcaggatctgacgtattggcttggctgaagacccacaagatggagaagacgacgcaatttgaactgctggatattagctggcttatcgaaagcatgaaagttggtaaaccggtggacaccaaggggaaataccagttgatggaatcgcgtgtcgatagtgcgaacccagatccgacagccggtaccctcaacattctgcctcctactacgagtaccatttctcagtatgcgtgtcaacgccgcaccaccctgaacaaccataatcaacgttttacggacgcactggaaattcttgcggaaaattacgagttcaaacgcaacgatgatacttgtctgacctttatgcgtgctatttccgtgctgaaatgccttccgtttgaggtagttagcctgaaagacacggaaggattgccctggatcggtgatgaagtcaaagggattatggaagaaatcatcgaggtcggtgaatcgctggaagtgcaggccgtgctcaatgatgagcgctatcaaagcttcaaactgtttaagagtgtctttggagtgggggtgaagacagcagacaaatggtaccgtatgggtctgcgcacgctcgaggatgttcgttccagcaagaccctgaagttgaccaagatgcagaaagcgggtctgtgctattatgaagatcttgctgatggcgttacgaaagccgaagctgacgcgatttctctgctggttcaggatgcagtctggactttcgacccggatgcgctggtggagattacgggtggatttcgtcgtgggaaaccttttggtcacgacgttgatctgcttatcacatctccgggagctgagaaagaacaagaagaccagctcctgcagaaagtgaccaatctgtggaagaaacaagggttgttgctgtacggtgatctgcgtgaaagtcgctttgaagatgggaaactcccatcccgcaagatcgatgccctggaccattttcagaaatgctttgctatcctcaaactttatcaccataaagtggacaaaagcaaatgggaaatgccgacgggttcgaacgaaagcgaggccaaaagttggaaagcaattcgcgtagatctggttgtttgtccctacgatcgttttgcgtttgcgttgttgggttggaccggaagccgcatgttcgaacgtgatctgcgccgctacgccacccacgagaagaagatgatgctggacaatcatgcgctgtatgacctgaccaagaaaatctttctcaaagctaaatcggaagaggaaattttcgcacatctggggcttgaatacctggaaccgtccgaacgtaacgca

SEQ ID NO: 306 - protein, 529 aa, synthetic construct
  REGION 1..529: note = Variant of terminal deoxynucleotidyltransferase
MHHHHHHGGSGMHRIRTIDSDFGKKRQKKMDNHISSMIYEIKFHEFVLFILEKKMGATRRTFLTDLARKKGFRVENELSDSVTHIVAENNSGSDVLAWLKTHKMEKTTQFELLDISWLIESMKVGKPVDTKGKYQLMESRVDSANPDPTAGTLNILPPTTSTISQYACQRRTTLNNHNQRFTDALEILAENYEFKRNDDTCLTFMRAISVLKCLPFEVVSLKDTEGLPWIGDEVKGIMEEIIEVGESLEVQAVLNDERYQSFKLFKSVFGVGVKTADKWYRMGLRTLEDVRSSKTLKLTKMQKAGLCYYEDLADGVTKAEADAISLLVQDAVWTFDPDALVEITGGFRRGKPFGHDVDLLITSPGAEKEQEDQLLQKVTNLWKKQGLLLYGDLRESRFEDGKLPSRKIDALDHFQKCFAILKLYHHKVDKSKWEMPTGSNESEAKSWKAIRVDLVVCPYDRFAFALLGWTGSRMFERDLRRYATHEKKMMLDNHALYDLTKKIFLKAKSEEEIFAHLGLEYLEPSERNA

SEQ ID NO: 307 - DNA, 1587 bp, synthetic construct
  misc_feature 1..1587: note = Variant of terminal deoxynucleotidyltransferase
  source 1..1587: mol_type = other DNA
atgcaccatcatcatcatcatggcggtagcggcatgcaccgcattcgtaccatcgattcggacttcgggaagaaacgccagaagaagatggataaccacattagttccatgatctatgaaatcaaatttcacgagtttgtgctgttcattctcgaaaagaaaatgggtgcgacgcgtcgtacttttctgacagatttagcccgcaagaaagggttccgcgtcgagaatgaactgtcagacagcgttacccacatcgtggcagaaaataattcaggatctgacgtattggcttggctgaagacccacaagatggagaagacgacgcaatttgaactgctggatattagctggcttatcgaaagcatgaaagttggtaaaccggtggacaccaaggggaaataccagttgatggaatcgcgtgtcgatagtgcgaacccagatccgacagccggtaccctcaacattgagcctcctactacgaagaccatttctcagtatgcgtgtcaacgccgcaccaccctgaacaaccataatcaacgttttacggacgcactggaaattcttgcggaaaattacgagttcaaacgcaacgatgatacttgtctgacctttatgcgtgctatttccgtgctgaaatgccttccgtttgaggtagttagcctgaaagacacggaaggattgccctggatcggtgatgaagtcaaagggattatggaagaaatcatcgaggtcggtgaatcgctggaagtgcaggccgtgctcaatgatgagcgctatcaaagcttcaaactgtttaagagtgtctttggagtgggggtgaagacagcagacaaatggtaccgtatgggtctgcgcacgctcgaggatgttcgttccagcacgaccctgaagttgaccaagatgcagaaagcgggtctgtgctattatgaagatcttgctgatggcgttacgaaagccgaagctgacgcgatttctctgctggttcaggatgcagtctggactttcgacccggatgcgctggtggagattacgggtggatttcgtcgtgggaaaccttttggtcacgacgttgatctgcttatcacatctccgggagctgagaaagaacaagaagaccagctcctgcagaaagtgaccaatctgtggaagaaacaagggttgttgctgtacggtgatctgcgtgaaagtcgctttgaagatgggaaactcccatcccgcaagatcgatgccctggaccattttcagaaatgctttgctatcctcaaactttatcaccataaagtggacaaaagcaaatgggaaatgccgacgggttcgaacgaaagcgaggccaaaagttggaaagcaattcgcgtagatctggttgtttgtccctacgatcgttttgcgtttgcgttgttgggttggaccggaagccgcatgttcgaacgtgatctgcgccgctacgccacccacgagaagaagatgatgctggacaatcatgcgctgtatgacctgaccaagaaaatctttctcaaagctaaatcggaagaggaaattttcgcacatctggggcttgaatacctggaaccgtccgaacgtaacgca

SEQ ID NO: 308 - protein, 529 aa, synthetic construct
  REGION 1..529: note = Variant of terminal deoxynucleotidyltransferase
MHHHHHHGGSGMHRIRTIDSDFGKKRQKKMDNHISSMIYEIKFHEFVLFILEKKMGATRRTFLTDLARKKGFRVENELSDSVTHIVAENNSGSDVLAWLKTHKMEKTTQFELLDISWLIESMKVGKPVDTKGKYQLMESRVDSANPDPTAGTLNIEPPTTKTISQYACQRRTTLNNHNQRFTDALEILAENYEFKRNDDTCLTFMRAISVLKCLPFEVVSLKDTEGLPWIGDEVKGIMEEIIEVGESLEVQAVLNDERYQSFKLFKSVFGVGVKTADKWYRMGLRTLEDVRSSTTLKLTKMQKAGLCYYEDLADGVTKAEADAISLLVQDAVWTFDPDALVEITGGFRRGKPFGHDVDLLITSPGAEKEQEDQLLQKVTNLWKKQGLLLYGDLRESRFEDGKLPSRKIDALDHFQKCFAILKLYHHKVDKSKWEMPTGSNESEAKSWKAIRVDLVVCPYDRFAFALLGWTGSRMFERDLRRYATHEKKMMLDNHALYDLTKKIFLKAKSEEEIFAHLGLEYLEPSERNA

SEQ ID NO: 309 - DNA, 1587 bp, synthetic construct
  misc_feature 1..1587: note = Variant of terminal deoxynucleotidyltransferase
  source 1..1587: mol_type = other DNA
atgcaccatcatcatcatcatggcggtagcggcatgcaccgcattcgtaccatcgattcggacttcgggaagaaacgccagaagaagatggataacaagattagttccatgatctatgaaatcaaatttcacgagtttgtgctgttcattctcgaaaagaaaatgggtgcgacgcgtcgtacttttctgacagatttagcccgcaagaaagggttccgcgtcgagaatgaactgtcagacagcgttacccacatcgtggcagaaaataattcaggatctgacgtattggcttggctgaagacccacaagatggagaagacgacgcaatttgaactgctggatattagctggcttatcgaaagcatgaaagttggtaaaccggtggacaccaaggggaaataccagttgatggaatcgcgtgtcgatagtgcgaacccagatccgacagccggtaccctcaacattctgcctcctactacgaagaccatttctcagtatgcgtgtcaacgccgcaccaccctgaacaaccataatcaacgttttacggacgcactggaaattcttgcggaaaattacgagttcaaacgcaacgatgatacttgtctgacctttatgcgtgctatttccgtgctgaaatgccttccgtttgaggtagttagcctgaaagacacggaaggattgccctggatcggtgatgaagtcaaagggattatggaagaaatcatcgaggtcggtgaatcgctggaagtgcaggccgtgctcaatgatgagcgctatcaaagcttcaaactgtttaagagtgtctttggagtgggggtgaagacagcagacaaatggtaccgtatgggtctgcgcacgctcgaggatgttcgttccagcaagaccctgaagttgaccaagatgcagaaagcgggtctgtgctattatgaagatcttgctgatggcgttacgaaagccgaagctgacgcgatttctctgctggttcaggatgcagtctggactttcgacccggatgcgctggtggagattacgggtggatttcgtcgtgggaaaccttttggtcacgacgttgatctgcttatcacatctccgggagctgagaaagaacaagaagaccagctcctgcagaaagtgaccaatctgtggaagaaacaagggttgttgctgtacggtgatctgcgtgaaagtcgctttgaagatgggaaactcccatcccgcaagatcgatgccctggaccattttcagaaatgctttgctatcctcaaactttatcaccataaagtggacaaaagcaaatgggaaatgccgacgggttcgaacgaaagcgaggccaaaagttggaaagcaattcgcgtagatctggttgtttgtccctacgatcgttttgcgtttgcgttgttgggttggaccggaagccgcatgttcgaacgtgatctgcgccgctacgccacccacgagaagaagatgatgctggacaatcatgcgctgtatgacctgaccaagaaaatctttctcaaagctaaatcggaagaggaaattttcgcacatctggggcttgaatacctggaaccgtccgaacgtaacgca

SEQ ID NO: 310 - protein, 529 aa, synthetic construct
  REGION 1..529: note = Variant of terminal deoxynucleotidyltransferase
MHHHHHHGGSGMHRIRTIDSDFGKKRQKKMDNKISSMIYEIKFHEFVLFILEKKMGATRRTFLTDLARKKGFRVENELSDSVTHIVAENNSGSDVLAWLKTHKMEKTTQFELLDISWLIESMKVGKPVDTKGKYQLMESRVDSANPDPTAGTLNILPPTTKTISQYACQRRTTLNNHNQRFTDALEILAENYEFKRNDDTCLTFMRAISVLKCLPFEVVSLKDTEGLPWIGDEVKGIMEEIIEVGESLEVQAVLNDERYQSFKLFKSVFGVGVKTADKWYRMGLRTLEDVRSSKTLKLTKMQKAGLCYYEDLADGVTKAEADAISLLVQDAVWTFDPDALVEITGGFRRGKPFGHDVDLLITSPGAEKEQEDQLLQKVTNLWKKQGLLLYGDLRESRFEDGKLPSRKIDALDHFQKCFAILKLYHHKVDKSKWEMPTGSNESEAKSWKAIRVDLVVCPYDRFAFALLGWTGSRMFERDLRRYATHEKKMMLDNHALYDLTKKIFLKAKSEEEIFAHLGLEYLEPSERNA

SEQ ID NO: 311 - DNA, 1587 bp, synthetic construct
  misc_feature 1..1587: note = Variant of terminal deoxynucleotidyltransferase
  source 1..1587: mol_type = other DNA
atgcaccatcatcatcatcatggcggtagcggcatgcaccgcattcgtaccatcgattcggacttcgggaagaaacgccagaagaagggggataaccacattagttccatgatctatgaaatcaaatttcacgagtttgtgctgttcattctcgaaaagaaaatgggtgcgacgcgtcgtacttttctgacagatttagcccgcaagaaagggttccgcgtcgagaatgaactgtcagacagcgttacccacatcgtggcagaaaataattcaggatctgacgtattggcttggctgaagacccacaagatggagaagacgacgcaatttgaactgctggatattagctggcttatcgaaagcatgaaagttggtaaaccggtggacaccaaggggaaataccagttgatggaatcgcgtgtcgatagtgcgaacccagatccgacagccggtaccctcaacattctgcctcctactacgaagaccatttctcagtatgcgtgtcaacgccgcaccaccctgaacaaccataatcaacgttttacggacgcactggaaattcttgcggaaaattacgagttcaaacgcaacgatgatacttgtctgacctttatgcgtgctatttccgtgctgaaatgccttccgtttgaggtagttagcctgaaagacacggaaggattgccctggatcggtgatgaagtcaaagggattatggaagaaatcatcgaggtcggtgaatcgctggaagtgcaggccgtgctcaatgatgagcgctatcaaagcttcaaactgtttaagagtgtctttggagtgggggtgaagacagcagacaaatggtaccgtatgggtctgcgcacgctcgaggatgttcgttccagcaagaccctgaagttgaccaagatgcagaaagcgggtctgtgctattatgaagatcttgctgatggcgttacgaaagccgaagctgacgcgatttctctgctggttcaggatgcagtctggactttcgacccggatgcgctggtggagattacgggtggatttcgtcgtgggaaaccttttggtcacgacgttgatctgcttatcacatctccgggagctgagaaagaacaagaagaccagctcctgcagaaagtgaccaatctgtggaagaaacaagggttgttgctgtacggtgatctgcgtgaaagtcgctttgaagatgggaaactcccatcccgcaagatcgatgccctggaccattttcagaaatgctttgctatcctcaaactttatcaccataaagtggacaaaagcaaatgggaaatgccgacgggttcgaacgaaagcgaggccaaaagttggaaagcaattcgcgtagatctggttgtttgtccctacgatcgttttgcgtttgcgttgttgggttggaccggaagccgcatgttcgaacgtgatctgcgccgctacgccacccacgagaagaagatgatgctggacaatcatgcgctgtatgacctgaccaagaaaatctttctcaaagctaaatcggaagaggaaattttcgcacatctggggcttgaatacctggaaccgtccgaacgtaacgca

SEQ ID NO: 312 - protein, 529 aa, synthetic construct
  REGION 1..529: note = Variant of terminal deoxynucleotidyltransferase
MHHHHHHGGSGMHRIRTIDSDFGKKRQKKGDNHISSMIYEIKFHEFVLFILEKKMGATRRTFLTDLARKKGFRVENELSDSVTHIVAENNSGSDVLAWLKTHKMEKTTQFELLDISWLIESMKVGKPVDTKGKYQLMESRVDSANPDPTAGTLNILPPTTKTISQYACQRRTTLNNHNQRFTDALEILAENYEFKRNDDTCLTFMRAISVLKCLPFEVVSLKDTEGLPWIGDEVKGIMEEIIEVGESLEVQAVLNDERYQSFKLFKSVFGVGVKTADKWYRMGLRTLEDVRSSKTLKLTKMQKAGLCYYEDLADGVTKAEADAISLLVQDAVWTFDPDALVEITGGFRRGKPFGHDVDLLITSPGAEKEQEDQLLQKVTNLWKKQGLLLYGDLRESRFEDGKLPSRKIDALDHFQKCFAILKLYHHKVDKSKWEMPTGSNESEAKSWKAIRVDLVVCPYDRFAFALLGWTGSRMFERDLRRYATHEKKMMLDNHALYDLTKKIFLKAKSEEEIFAHLGLEYLEPSERNA

SEQ ID NO: 313 - DNA, 1587 bp, synthetic construct
  misc_feature 1..1587: note = Variant of terminal deoxynucleotidyltransferase
  source 1..1587: mol_type = other DNA
atgcaccatcatcatcatcatggcggtagcggcatgcaccgcattcgtaccatcgattcggacttcgggaagaaacgccagaagaagatggataaccacattagttccatgatctatgaaatcaaatttcacgagtttgtgctgttcattctcgaaaagaaaatgggtgcggctcgtcgtacttttctgacagatttagcccgcaagaaagggttccgcgtcgagaatgaactgtcagacagcgttacccacatcgtggcagaaaataattcaggatctgacgtattggcttggctgaagacccacaagatggagaagacgacgcaatttgaactgctggatattagctggcttatcgaaagcatgaaagttggtaaaccggtggacaccaaggggaaataccagttgatggaatcgcgtgtcgatagtgcgaacccagatccgacagccggtaccctcaacattctgcctcctactacgaagaccatttctcagtatgcgtgtcaacgccgcaccaccctgaacaaccataatcaacgttttacggacgcactggaaattcttgcggaaaattacgagttcaaacgcaacgatgatacttgtctgacctttatgcgtgctatttccgtgctgaaatgccttccgtttgaggtagttagcctgaaagacacggaaggattgccctggatcggtgatgaagtcaaagggattatggaagaaatcatcgaggtcggtgaatcgctggaagtgcaggccgtgctcaatgatgagcgctatcaaagcttcaaactgtttaagagtgtctttggagtgggggtgaagacagcagacaaatggtaccgtatgggtctgcgcacgctcgaggatgttcgttccagcaagaccctgaagttgaccaagatgcagaaagcgggtctgtgctattatgaagatcttgctgatggcgttacgaaagccgaagctgacgcgatttctctgctggttcaggatgcagtctggactttcgacccggatgcgctggtggagattacgggtggatttcgtcgtgggaaaccttttggtcacgacgttgatctgcttatcacatctccgggagctgagaaagaacaagaagaccagctcctgcagaaagtgaccaatctgtggaagaaacaagggttgttgctgtacggtgatctgcgtgaaagtcgctttgaagatgggaaactcccatcccgcaagatcgatgccctggaccattttcagaaatgctttgctatcctcaaactttatcaccataaagtggacaaaagcaaatgggaaatgccgacgggttcgaacgaaagcgaggccaaaagttggaaagcaattcgcgtagatctggttgtttgtccctacgatcgttttgcgtttgcgttgttgggttggaccggaagccgcatgttcgaacgtgatctgcgccgctacgccacccacgagaagaagatgatgctggacaatcatgcgctgtatgacctgaccaagaaaatctttctcaaagctaaatcggaagaggaaattttcgcacatctggggcttgaatacctggaaccgtccgaacgtaacgca

SEQ ID NO: 314 - protein, 529 aa, synthetic construct
  REGION 1..529: note = Variant of terminal deoxynucleotidyltransferase
MHHHHHHGGSGMHRIRTIDSDFGKKRQKKMDNHISSMIYEIKFHEFVLFILEKKMGAARRTFLTDLARKKGFRVENELSDSVTHIVAENNSGSDVLAWLKTHKMEKTTQFELLDISWLIESMKVGKPVDTKGKYQLMESRVDSANPDPTAGTLNILPPTTKTISQYACQRRTTLNNHNQRFTDALEILAENYEFKRNDDTCLTFMRAISVLKCLPFEVVSLKDTEGLPWIGDEVKGIMEEIIEVGESLEVQAVLNDERYQSFKLFKSVFGVGVKTADKWYRMGLRTLEDVRSSKTLKLTKMQKAGLCYYEDLADGVTKAEADAISLLVQDAVWTFDPDALVEITGGFRRGKPFGHDVDLLITSPGAEKEQEDQLLQKVTNLWKKQGLLLYGDLRESRFEDGKLPSRKIDALDHFQKCFAILKLYHHKVDKSKWEMPTGSNESEAKSWKAIRVDLVVCPYDRFAFALLGWTGSRMFERDLRRYATHEKKMMLDNHALYDLTKKIFLKAKSEEEIFAHLGLEYLEPSERNA

SEQ ID NO: 315 - DNA, 1587 bp, synthetic construct
  misc_feature 1..1587: note = Variant of terminal deoxynucleotidyltransferase
  source 1..1587: mol_type = other DNA
atgcaccatcatcatcatcatggcggtagcggcatgcaccgcattcgtaccatcgattcggacttcgggaagaaacgccagaagaagatggataaccacattagttccatgatctatgaaatcaaatttcacgagtttgtgctgttcattctcgaaaagaaaatgggtgcgacgcgtcgtacttttctgacagatttagcccgcaagaaagggttccgcgtcgagaatgaactgtcagacagcgttacccacatcgtggcagaaaataattcaggatctgacgtattggcttggctgaagacccacaagattgagaagacgacgcaatttgaactgctggatattagctggcttatcgaaagcatgaaagttggtaaaccggtggacaccaaggggaaataccagttgatggaatcgcgtgtcgatagtgcgaacccagatccgacagccggtaccctcaacattctgcctcctactacgaagaccatttctcagtatgcgtgtcaacgccgcaccaccctgaacaaccataatcaacgttttacggacgcactggaaattcttgcggaaaattacgagttcaaacgcaacgatgatacttgtctgacctttatgcgtgctatttccgtgctgaaatgccttccgtttgaggtagttagcctgaaagacacggaaggattgccctggatcggtgatgaagtcaaagggattatggaagaaatcatcgaggtcggtgaatcgctggaagtgcaggccgtgctcaatgatgagcgctatcaaagcttcaaactgtttaagagtgtctttggagtgggggtgaagacagcagacaaatggtaccgtatgggtctgcgcacgctcgaggatgttcgttccagcaagaccctgaagttgaccaagatgcagaaagcgggtctgtgctattatgaagatcttgctgatggcgttacgaaagccgaagctgacgcgatttctctgctggttcaggatgcagtctggactttcgacccggatgcgctggtggagattacgggtggatttcgtcgtgggaaaccttttggtcacgacgttgatctgcttatcacatctccgggagctgagaaagaacaagaagaccagctcctgcagaaagtgaccaatctgtggaagaaacaagggttgttgctgtacggtgatctgcgtgaaagtcgctttgaagatgggaaactcccatcccgcaagatcgatgccctggaccattttcagaaatgctttgctatcctcaaactttatcaccataaagtggacaaaagcaaatgggaaatgccgacgggttcgaacgaaagcgaggccaaaagttggaaagcaattcgcgtagatctggttgtttgtccctacgatcgttttgcgtttgcgttgttgggttggaccggaagccgcatgttcgaacgtgatctgcgccgctacgccacccacgagaagaagatgatgctggacaatcatgcgctgtatgacctgaccaagaaaatctttctcaaagctaaatcggaagaggaaattttcgcacatctggggcttgaatacctggaaccgtccgaacgtaacgca

SEQ ID NO: 316 - protein, 529 aa, synthetic construct
  REGION 1..529: note = Variant of terminal deoxynucleotidyltransferase
MHHHHHHGGSGMHRIRTIDSDFGKKRQKKMDNHISSMIYEIKFHEFVLFILEKKMGATRRTFLTDLARKKGFRVENELSDSVTHIVAENNSGSDVLAWLKTHKIEKTTQFELLDISWLIESMKVGKPVDTKGKYQLMESRVDSANPDPTAGTLNILPPTTKTISQYACQRRTTLNNHNQRFTDALEILAENYEFKRNDDTCLTFMRAISVLKCLPFEVVSLKDTEGLPWIGDEVKGIMEEIIEVGESLEVQAVLNDERYQSFKLFKSVFGVGVKTADKWYRMGLRTLEDVRSSKTLKLTKMQKAGLCYYEDLADGVTKAEADAISLLVQDAVWTFDPDALVEITGGFRRGKPFGHDVDLLITSPGAEKEQEDQLLQKVTNLWKKQGLLLYGDLRESRFEDGKLPSRKIDALDHFQKCFAILKLYHHKVDKSKWEMPTGSNESEAKSWKAIRVDLVVCPYDRFAFALLGWTGSRMFERDLRRYATHEKKMMLDNHALYDLTKKIFLKAKSEEEIFAHLGLEYLEPSERNA

SEQ ID NO: 317 - DNA, 1587 bp, synthetic construct
  misc_feature 1..1587: note = Variant of terminal deoxynucleotidyltransferase
  source 1..1587: mol_type = other DNA
atgcaccatcatcatcatcatggcggtagcggcatgcaccgcattcgtaccatcgattcggacttcgggaagaaacgccagaagaagatggataaccacattagttccatgatctatgaaatcaaatttcacgagtttgtgctgttcattctcgaaaagaaaatgggtgcgacgcgtcgtacttttctgacagatttagcccgcaagaaagggttccgcgtcgagaatgaactgtcagacagcgttacccacatcgtggcagaaaataattcaggatctgacgtattggcttggctgaagacccacaagatggagaagacgacgcaatttgaactgctggatattagctggcttatcgaaagcatgaaagttggtaaaccggtggacaccaaggggaaataccagttgatggaatcgcgtgtcgatagtgcgaacccagatccgacagccggtaccctcaacacgctgcctcctactacgaagaccatttctcagtatgcgtgtcaacgccgcaccaccctgaacaaccataatcaacgttttacggacgcactggaaattcttgcggaaaattacgagttcaaacgcaacgatgatacttgtctgacctttatgcgtgctatttccgtgctgaaatgccttccgtttgaggtagttagcctgaaagacacggaaggattgccctggatcggtgatgaagtcaaagggattatggaagaaatcatcgaggtcggtgaatcgctggaagtgcaggccgtgctcaatgatgagcgctatcaaagcttcaaactgtttaagagtgtctttggagtgggggtgaagacagcagacaaatggtaccgtatgggtctgcgcacgctcgaggatgttcgttccagcaagaccctgaagttgaccaagatgcagaaagcgggtctgtgctattatgaagatcttgctgatggcgttacgaaagccgaagctgacgcgatttctctgctggttcaggatgcagtctggactttcgacccggatgcgctggtggagattacgggtggatttcgtcgtgggaaaccttttggtcacgacgttgatctgcttatcacatctccgggagctgagaaagaacaagaagaccagctcctgcagaaagtgaccaatctgtggaagaaacaagggttgttgctgtacggtgatctgcgtgaaagtcgctttgaagatgggaaactcccatcccgcaagatcgatgccctggaccattttcagaaatgctttgctatcctcaaactttatcaccataaagtggacaaaagcaaatgggaaatgccgacgggttcgaacgaaagcgaggccaaaagttggaaagcaattcgcgtagatctggttgtttgtccctacgatcgttttgcgtttgcgttgttgggttggaccggaagccgcatgttcgaacgtgatctgcgccgctacgccacccacgagaagaagatgatgctggacaatcatgcgctgtatgacctgaccaagaaaatctttctcaaagctaaatcggaagaggaaattttcgcacatctggggcttgaatacctggaaccgtccgaacgtaacgca

SEQ ID NO: 318 - protein, 529 aa, synthetic construct
  REGION 1..529: note = Variant of terminal deoxynucleotidyltransferase
MHHHHHHGGSGMHRIRTIDSDFGKKRQKKMDNHISSMIYEIKFHEFVLFILEKKMGATRRTFLTDLARKKGFRVENELSDSVTHIVAENNSGSDVLAWLKTHKMEKTTQFELLDISWLIESMKVGKPVDTKGKYQLMESRVDSANPDPTAGTLNTLPPTTKTISQYACQRRTTLNNHNQRFTDALEILAENYEFKRNDDTCLTFMRAISVLKCLPFEVVSLKDTEGLPWIGDEVKGIMEEIIEVGESLEVQAVLNDERYQSFKLFKSVFGVGVKTADKWYRMGLRTLEDVRSSKTLKLTKMQKAGLCYYEDLADGVTKAEADAISLLVQDAVWTFDPDALVEITGGFRRGKPFGHDVDLLITSPGAEKEQEDQLLQKVTNLWKKQGLLLYGDLRESRFEDGKLPSRKIDALDHFQKCFAILKLYHHKVDKSKWEMPTGSNESEAKSWKAIRVDLVVCPYDRFAFALLGWTGSRMFERDLRRYATHEKKMMLDNHALYDLTKKIFLKAKSEEEIFAHLGLEYLEPSERNA

SEQ ID NO: 319 - DNA, 1587 bp, synthetic construct
  misc_feature 1..1587: note = Variant of terminal deoxynucleotidyltransferase
  source 1..1587: mol_type = other DNA
atgcaccatcatcatcatcatggcggtagcggcatgcaccgcattcgtaccatcgattcggacttcgggaagaaacgccagaagaagatggataaccacattagttccatgatctatgaaatcaaatttcacgagtttgtgctgttcattctcgaaaagaaaatgggtgcgacgcgtcgtacttttctgacagatttagcccgcaagaaagggttccgcgtcgagaatgaactgtcagacagcgttacccacatcgtggcagaaaataattcaggatctgacgtattggcttggctgaagacccacaagatggagaagacgacgcaatttgaactgctggatattagctggcttatcgaaagcatgaaagttggtaaaccggtggacaccaaggggaaataccagttgatggaatcgcgtgtcgatagtgcgaacccagatccgacagccggtaccctcaacattctgcctcctactacggataccatttctcagtatgcgtgtcaacgccgcaccaccctgaacaaccataatcaacgttttacggacgcactggaaattcttgcggaaaattacgagttcaaacgcaacgatgatacttgtctgacctttatgcgtgctatttccgtgctgaaatgccttccgtttgaggtagttagcctgaaagacacggaaggattgccctggatcggtgatgaagtcaaagggattatggaagaaatcatcgaggtcggtgaatcgctggaagtgcaggccgtgctcaatgatgagcgctatcaaagcttcaaactgtttaagagtgtctttggagtgggggtgaagacagcagacaaatggtaccgtatgggtctgcgcacgctcgaggatgttcgttccagcaagaccctgaagttgaccaagatgcagaaagcgggtctgtgctattatgaagatcttgctgatggcgttacgaaagccgaagctgacgcgatttctctgctggttcaggatgcagtctggactttcgacccggatgcgctggtggagattacgggtggatttcgtcgtgggaaaccttttggtcacgacgttgatctgcttatcacatctccgggagctgagaaagaacaagaagaccagctcctgcagaaagtgaccaatctgtggaagaaacaagggttgttgctgtacggtgatctgcgtgaaagtcgctttgaagatgggaaactcccatcccgcaagatcgatgccctggaccattttcagaaatgctttgctatcctcaaactttatcaccataaagtggacaaaagcaaatgggaaatgccgacgggttcgaacgaaagcgaggccaaaagttggaaagcaattcgcgtagatctggttgtttgtccctacgatcgttttgcgtttgcgttgttgggttggaccggaagccgcatgttcgaacgtgatctgcgccgctacgccacccacgagaagaagatgatgctggacaatcatgcgctgtatgacctgaccaagaaaatctttctcaaagctaaatcggaagaggaaattttcgcacatctggggcttgaatacctggaaccgtccgaacgtaacgca

SEQ ID NO: 320 - protein, 529 aa, synthetic construct
  REGION 1..529: note = Variant of terminal deoxynucleotidyltransferase
MHHHHHHGGSGMHRIRTIDSDFGKKRQKKMDNHISSMIYEIKFHEFVLFILEKKMGATRRTFLTDLARKKGFRVENELSDSVTHIVAENNSGSDVLAWLKTHKMEKTTQFELLDISWLIESMKVGKPVDTKGKYQLMESRVDSANPDPTAGTLNILPPTTDTISQYACQRRTTLNNHNQRFTDALEILAENYEFKRNDDTCLTFMRAISVLKCLPFEVVSLKDTEGLPWIGDEVKGIMEEIIEVGESLEVQAVLNDERYQSFKLFKSVFGVGVKTADKWYRMGLRTLEDVRSSKTLKLTKMQKAGLCYYEDLADGVTKAEADAISLLVQDAVWTFDPDALVEITGGFRRGKPFGHDVDLLITSPGAEKEQEDQLLQKVTNLWKKQGLLLYGDLRESRFEDGKLPSRKIDALDHFQKCFAILKLYHHKVDKSKWEMPTGSNESEAKSWKAIRVDLVVCPYDRFAFALLGWTGSRMFERDLRRYATHEKKMMLDNHALYDLTKKIFLKAKSEEEIFAHLGLEYLEPSERNA

SEQ ID NO: 321 - DNA, 1587 bp, synthetic construct
  misc_feature 1..1587: note = Variant of terminal deoxynucleotidyltransferase
  source 1..1587: mol_type = other DNA
atgcaccatcatcatcatcatggcggtagcggcatgcaccgcattcgtaccatcgattcggacttcgggaagaaacgccagaagaagatggataaccacattagttccatgatctatgaaatcaaatttcacgagtttgtgctgttcattctcgaaaagaaaatgggtgcgacgcgtcgtacttttctgacagatttagcccgcaagaaagggttccgcgtcgagaatgaactgtcagacagcgttacccacatcgtggcagaaaataattcaggatctgacgtattggcttggctgaagacccacaagatggagaagacgacgcaatttgaactgctggatattagctggcttatcgaaagcatgaaagttggtaaaccggtggacaccaaggggaaataccagttgatggaatcgcgtgtcgatagtgcgaacccagatccgacagccggtaccctcaacattcagcctcctactacgaagaccatttctcagtatgcgtgtcaacgccgcaccaccctgaacaaccataatcaacgttttacggacgcactggaaattcttgcggaaaattacgagttcaaacgcaacgatgatacttgtctgacctttatgcgtgctatttccgtgctgaaatgccttccgtttgaggtagttagcctgaaagacacggaaggattgccctggatcggtgatgaagtcaaagggattatggaagaaatcatcgaggtcggtgaatcgctggaagtgcaggccgtgctcaatgatgagcgctatcaaagcttcaaactgtttaagagtgtctttggagtgggggtgaagacagcagacaaatggtaccgtatgggtctgcgcacgctcgaggatgttcgttccagcaagaccctgaagttgaccaagatgcagaaagcgggtctgtgctattatgaagatcttgctgatggcgttacgaaagccgaagctgacgcgatttctctgctggttcaggatgcagtctggactttcgacccggatgcgctggtggagattacgggtggatttcgtcgtgggaaaccttttggtcacgacgttgatctgcttatcacatctccgggagctgagaaagaacaagaagaccagctcctgcagaaagtgaccaatctgtggaagaaacaagggttgttgctgtacggtgatctgcgtgaaagtcgctttgaagatgggaaactcccatcccgcaagatcgatgccctggaccattttcagaaatgctttgctatcctcaaactttatcaccataaagtggacaaaagcaaatgggaaatgccgacgggttcgaacgaaagcgaggccaaaagttggaaagcaattcgcgtagatctggttgtttgtccctacgatcgttttgcgtttgcgttgttgggttggaccggaagccgcatgttcgaacgtgatctgcgccgctacgccacccacgagaagaagatgatgctggacaatcatgcgctgtatgacctgaccaagaaaatctttctcaaagctaaatcggaagaggaaattttcgcacatctggggcttgaatacctggaaccgtccgaacgtaacgca

SEQ ID NO: 322 - protein, 529 aa, synthetic construct
  REGION 1..529: note = Variant of terminal deoxynucleotidyltransferase
MHHHHHHGGSGMHRIRTIDSDFGKKRQKKMDNHISSMIYEIKFHEFVLFILEKKMGATRRTFLTDLARKKGFRVENELSDSVTHIVAENNSGSDVLAWLKTHKMEKTTQFELLDISWLIESMKVGKPVDTKGKYQLMESRVDSANPDPTAGTLNIQPPTTKTISQYACQRRTTLNNHNQRFTDALEILAENYEFKRNDDTCLTFMRAISVLKCLPFEVVSLKDTEGLPWIGDEVKGIMEEIIEVGESLEVQAVLNDERYQSFKLFKSVFGVGVKTADKWYRMGLRTLEDVRSSKTLKLTKMQKAGLCYYEDLADGVTKAEADAISLLVQDAVWTFDPDALVEITGGFRRGKPFGHDVDLLITSPGAEKEQEDQLLQKVTNLWKKQGLLLYGDLRESRFEDGKLPSRKIDALDHFQKCFAILKLYHHKVDKSKWEMPTGSNESEAKSWKAIRVDLVVCPYDRFAFALLGWTGSRMFERDLRRYATHEKKMMLDNHALYDLTKKIFLKAKSEEEIFAHLGLEYLEPSERNA

SEQ ID NO: 323 - DNA, 1587 bp, synthetic construct
  misc_feature 1..1587: note = Variant of terminal deoxynucleotidyltransferase
  source 1..1587: mol_type = other DNA
atgcaccatcatcatcatcatggcggtagcggcatgcaccgcattcgtaccatcgattcggacttcgggaagaaacgccagaagaagatggataaccacattagttccatgatctatgaaatcaaatttcacgagtttgtgctgttcattctcgaaaagaaaatgggtgcgacgcgtcgtacttttctgacagatttagcccgcaagaaagggttccgcgtcgagaatgaactgtcagacagcgttacccacatcgtggcagaaaataattcaggatctgacgtattggcttggctgaagacccacaagatggagagtacgacgcaatttgaactgctggatattagctggcttatcgaaagcatgaaagttggtaaaccggtggacaccaaggggaaataccagttgatggaatcgcgtgtcgatagtgcgaacccagatccgacagccggtaccctcaacattctgcctcctactacgaagaccatttctcagtatgcgtgtcaacgccgcaccaccctgaacaaccataatcaacgttttacggacgcactggaaattcttgcggaaaattacgagttcaaacgcaacgatgatacttgtctgacctttatgcgtgctatttccgtgctgaaatgccttccgtttgaggtagttagcctgaaagacacggaaggattgccctggatcggtgatgaagtcaaagggattatggaagaaatcatcgaggtcggtgaatcgctggaagtgcaggccgtgctcaatgatgagcgctatcaaagcttcaaactgtttaagagtgtctttggagtgggggtgaagacagcagacaaatggtaccgtatgggtctgcgcacgctcgaggatgttcgttccagcaagaccctgaagttgaccaagatgcagaaagcgggtctgtgctattatgaagatcttgctgatggcgttacgaaagccgaagctgacgcgatttctctgctggttcaggatgcagtctggactttcgacccggatgcgctggtggagattacgggtggatttcgtcgtgggaaaccttttggtcacgacgttgatctgcttatcacatctccgggagctgagaaagaacaagaagaccagctcctgcagaaagtgaccaatctgtggaagaaacaagggttgttgctgtacggtgatctgcgtgaaagtcgctttgaagatgggaaactcccatcccgcaagatcgatgccctggaccattttcagaaatgctttgctatcctcaaactttatcaccataaagtggacaaaagcaaatgggaaatgccgacgggttcgaacgaaagcgaggccaaaagttggaaagcaattcgcgtagatctggttgtttgtccctacgatcgttttgcgtttgcgttgttgggttggaccggaagccgcatgttcgaacgtgatctgcgccgctacgccacccacgagaagaagatgatgctggacaatcatgcgctgtatgacctgaccaagaaaatctttctcaaagctaaatcggaagaggaaattttcgcacatctggggcttgaatacctggaaccgtccgaacgtaacgca

SEQ ID NO: 324 - protein, 529 aa, synthetic construct
  REGION 1..529: note = Variant of terminal deoxynucleotidyltransferase
MHHHHHHGGSGMHRIRTIDSDFGKKRQKKMDNHISSMIYEIKFHEFVLFILEKKMGATRRTFLTDLARKKGFRVENELSDSVTHIVAENNSGSDVLAWLKTHKMESTTQFELLDISWLIESMKVGKPVDTKGKYQLMESRVDSANPDPTAGTLNILPPTTKTISQYACQRRTTLNNHNQRFTDALEILAENYEFKRNDDTCLTFMRAISVLKCLPFEVVSLKDTEGLPWIGDEVKGIMEEIIEVGESLEVQAVLNDERYQSFKLFKSVFGVGVKTADKWYRMGLRTLEDVRSSKTLKLTKMQKAGLCYYEDLADGVTKAEADAISLLVQDAVWTFDPDALVEITGGFRRGKPFGHDVDLLITSPGAEKEQEDQLLQKVTNLWKKQGLLLYGDLRESRFEDGKLPSRKIDALDHFQKCFAILKLYHHKVDKSKWEMPTGSNESEAKSWKAIRVDLVVCPYDRFAFALLGWTGSRMFERDLRRYATHEKKMMLDNHALYDLTKKIFLKAKSEEEIFAHLGLEYLEPSERNA

SEQ ID NO: 325 - DNA, 1587 bp, synthetic construct
  misc_feature 1..1587: note = Variant of terminal deoxynucleotidyltransferase
  source 1..1587: mol_type = other DNA
atgcaccatcatcatcatcatggcggtagcggctctcaccgcattcgtaccatcgattcggacttcgggaagaaacgccagaagaagatggataaccacattagttccatgatctatgaaatcaaatttcacgagtttgtgctgttcattctcgaaaagaaaatgggtgcgacgcgtcgtacttttctgacagatttagcccgcaagaaagggttccgcgtcgagaatgaactgtcagacagcgttacccacatcgtggcagaaaataattcaggatctgacgtattggcttggctgaagacccacaagatggagaagacgacgcaatttgaactgctggatattagctggcttatcgaaagcatgaaagttggtaaaccggtggacaccaaggggaaataccagttgatggaatcgcgtgtcgatagtgcgaacccagatccgacagccggtaccctcaacattctgcctcctactacgaagaccatttctcagtatgcgtgtcaacgccgcaccaccctgaacaaccataatcaacgttttacggacgcactggaaattcttgcggaaaattacgagttcaaacgcaacgatgatacttgtctgacctttatgcgtgctatttccgtgctgaaatgccttccgtttgaggtagttagcctgaaagacacggaaggattgccctggatcggtgatgaagtcaaagggattatggaagaaatcatcgaggtcggtgaatcgctggaagtgcaggccgtgctcaatgatgagcgctatcaaagcttcaaactgtttaagagtgtctttggagtgggggtgaagacagcagacaaatggtaccgtatgggtctgcgcacgctcgaggatgttcgttccagcaagaccctgaagttgaccaagatgcagaaagcgggtctgtgctattatgaagatcttgctgatggcgttacgaaagccgaagctgacgcgatttctctgctggttcaggatgcagtctggactttcgacccggatgcgctggtggagattacgggtggatttcgtcgtgggaaaccttttggtcacgacgttgatctgcttatcacatctccgggagctgagaaagaacaagaagaccagctcctgcagaaagtgaccaatctgtggaagaaacaagggttgttgctgtacggtgatctgcgtgaaagtcgctttgaagatgggaaactcccatcccgcaagatcgatgccctggaccattttcagaaatgctttgctatcctcaaactttatcaccataaagtggacaaaagcaaatgggaaatgccgacgggttcgaacgaaagcgaggccaaaagttggaaagcaattcgcgtagatctggttgtttgtccctacgatcgttttgcgtttgcgttgttgggttggaccggaagccgcatgttcgaacgtgatctgcgccgctacgccacccacgagaagaagatgatgctggacaatcatgcgctgtatgacctgaccaagaaaatctttctcaaagctaaatcggaagaggaaattttcgcacatctggggcttgaatacctggaaccgtccgaacgtaacgca

SEQ ID NO: 326 - protein, 529 aa, synthetic construct
  REGION 1..529: note = Variant of terminal deoxynucleotidyltransferase
MHHHHHHGGSGSHRIRTIDSDFGKKRQKKMDNHISSMIYEIKFHEFVLFILEKKMGATRRTFLTDLARKKGFRVENELSDSVTHIVAENNSGSDVLAWLKTHKMEKTTQFELLDISWLIESMKVGKPVDTKGKYQLMESRVDSANPDPTAGTLNILPPTTKTISQYACQRRTTLNNHNQRFTDALEILAENYEFKRNDDTCLTFMRAISVLKCLPFEVVSLKDTEGLPWIGDEVKGIMEEIIEVGESLEVQAVLNDERYQSFKLFKSVFGVGVKTADKWYRMGLRTLEDVRSSKTLKLTKMQKAGLCYYEDLADGVTKAEADAISLLVQDAVWTFDPDALVEITGGFRRGKPFGHDVDLLITSPGAEKEQEDQLLQKVTNLWKKQGLLLYGDLRESRFEDGKLPSRKIDALDHFQKCFAILKLYHHKVDKSKWEMPTGSNESEAKSWKAIRVDLVVCPYDRFAFALLGWTGSRMFERDLRRYATHEKKMMLDNHALYDLTKKIFLKAKSEEEIFAHLGLEYLEPSERNA

SEQ ID NO: 327 - DNA, 1587 bp, synthetic construct
  misc_feature 1..1587: note = Variant of terminal deoxynucleotidyltransferase
  source 1..1587: mol_type = other DNA
atgcaccatcatcatcatcatggcggtagcggcatgcaccgcattcgtaccatcgattcggacttcgggaagaaacgccagaagaagatggataaccacattagttccatgatctatgaaatcaaatttcacgagtttgtgctgttcattctcgaaaagaaaatgggtgcgacgcgtcgtacttttctgacagatttagcccgcaagaaagggttccgcgtcgagaatgaactgtcagacagcgttacccacatcgtggcagaaaataattcaggatctgacgtattggcttggctgaagacccacaagatggagaagacgacgcaatttgaactgctggatattagctggcttatcgaaagcatgaaagttggtaaaccggtggacaccaaggggaaataccagttgatggaatcgcgtgtcgatagtgcgaacccagatccgacagccggtaccctcaacattatgcctcctactacgaagaccatttctcagtatgcgtgtcaacgccgcaccaccctgaacaaccataatcaacgttttacggacgcactggaaattcttgcggaaaattacgagttcaaacgcaacgatgatacttgtctgacctttatgcgtgctatttccgtgctgaaatgccttccgtttgaggtagttagcctgaaagacacggaaggattgccctggatcggtgatgaagtcaaagggattatggaagaaatcatcgaggtcggtgaatcgctggaagtgcaggccgtgctcaatgatgagcgctatcaaagcttcaaactgtttaagagtgtctttggagtgggggtgaagacagcagacaaatggtaccgtatgggtctgcgcacgctcgaggatgttcgttccagcaagaccctgaagttgaccaagatgcagaaagcgggtctgtgctattatgaagatcttgctgatggcgttacgaaagccgaagctgacgcgatttctctgctggttcaggatgcagtctggactttcgacccggatgcgctggtggagattacgggtggatttcgtcgtgggaaaccttttggtcacgacgttgatctgcttatcacatctccgggagctgagaaagaacaagaagaccagctcctgcagaaagtgaccaatctgtggaagaaacaagggttgttgctgtacggtgatctgcgtgaaagtcgctttgaagatgggaaactcccatcccgcaagatcgatgccctggaccattttcagaaatgctttgctatcctcaaactttatcaccataaagtggacaaaagcaaatgggaaatgccgacgggttcgaacgaaagcgaggccaaaagttggaaagcaattcgcgtagatctggttgtttgtccctacgatcgttttgcgtttgcgttgttgggttggaccggaagccgcatgttcgaacgtgatctgcgccgctacgccacccacgagaagaagatgatgctggacaatcatgcgctgtatgacctgaccaagaaaatctttctcaaagctaaatcggaagaggaaattttcgcacatctggggcttgaatacctggaaccgtccgaacgtaacgca

SEQ ID NO: 328 - protein, 529 aa, synthetic construct
  REGION 1..529: note = Variant of terminal deoxynucleotidyltransferase
MHHHHHHGGSGMHRIRTIDSDFGKKRQKKMDNHISSMIYEIKFHEFVLFILEKKMGATRRTFLTDLARKKGFRVENELSDSVTHIVAENNSGSDVLAWLKTHKMEKTTQFELLDISWLIESMKVGKPVDTKGKYQLMESRVDSANPDPTAGTLNIMPPTTKTISQYACQRRTTLNNHNQRFTDALEILAENYEFKRNDDTCLTFMRAISVLKCLPFEVVSLKDTEGLPWIGDEVKGIMEEIIEVGESLEVQAVLNDERYQSFKLFKSVFGVGVKTADKWYRMGLRTLEDVRSSKTLKLTKMQKAGLCYYEDLADGVTKAEADAISLLVQDAVWTFDPDALVEITGGFRRGKPFGHDVDLLITSPGAEKEQEDQLLQKVTNLWKKQGLLLYGDLRESRFEDGKLPSRKIDALDHFQKCFAILKLYHHKVDKSKWEMPTGSNESEAKSWKAIRVDLVVCPYDRFAFALLGWTGSRMFERDLRRYATHEKKMMLDNHALYDLTKKIFLKAKSEEEIFAHLGLEYLEPSERNA

SEQ ID NO: 329 - DNA, 1587 bp, synthetic construct
  misc_feature 1..1587: note = Variant of terminal deoxynucleotidyltransferase
  source 1..1587: mol_type = other DNA
atgcaccatcatcatcatcatggcggtagcggcatgcaccgcattcgtaccatcgattcggacttcgggaagaaacgccagaagaagatggataaccacattagttccatgatctatgaaatcaaatttcacgagtttgtgctgttcattctcgaaaagaaaatgggtgcgacgcgtcgtacttttctgacagatttagcccgcaagaaagggttccgcgtcgagaatgaactgtcagacagcgttacccacatcgtggcagaaaataattcaggatctgacgtattggcttggctgaagacccacaagcctgagaagacgacgcaatttgaactgctggatattagctggcttatcgaaagcatgaaagttggtaaaccggtggacaccaaggggaaataccagttgatggaatcgcgtgtcgatagtgcgaacccagatccgacagccggtaccctcaacattctgcctcctactacgaagaccatttctcagtatgcgtgtcaacgccgcaccaccctgaacaaccataatcaacgttttacggacgcactggaaattcttgcggaaaattacgagttcaaacgcaacgatgatacttgtctgacctttatgcgtgctatttccgtgctgaaatgccttccgtttgaggtagttagcctgaaagacacggaaggattgccctggatcggtgatgaagtcaaagggattatggaagaaatcatcgaggtcggtgaatcgctggaagtgcaggccgtgctcaatgatgagcgctatcaaagcttcaaactgtttaagagtgtctttggagtgggggtgaagacagcagacaaatggtaccgtatgggtctgcgcacgctcgaggatgttcgttccagcaagaccctgaagttgaccaagatgcagaaagcgggtctgtgctattatgaagatcttgctgatggcgttacgaaagccgaagctgacgcgatttctctgctggttcaggatgcagtctggactttcgacccggatgcgctggtggagattacgggtggatttcgtcgtgggaaaccttttggtcacgacgttgatctgcttatcacatctccgggagctgagaaagaacaagaagaccagctcctgcagaaagtgaccaatctgtggaagaaacaagggttgttgctgtacggtgatctgcgtgaaagtcgctttgaagatgggaaactcccatcccgcaagatcgatgccctggaccattttcagaaatgctttgctatcctcaaactttatcaccataaagtggacaaaagcaaatgggaaatgccgacgggttcgaacgaaagcgaggccaaaagttggaaagcaattcgcgtagatctggttgtttgtccctacgatcgttttgcgtttgcgttgttgggttggaccggaagccgcatgttcgaacgtgatctgcgccgctacgccacccacgagaagaagatgatgctggacaatcatgcgctgtatgacctgaccaagaaaatctttctcaaagctaaatcggaagaggaaattttcgcacatctggggcttgaatacctggaaccgtccgaacgtaacgca

SEQ ID NO: 330 - protein, 529 aa, synthetic construct
  REGION 1..529: note = Variant of terminal deoxynucleotidyltransferase
MHHHHHHGGSGMHRIRTIDSDFGKKRQKKMDNHISSMIYEIKFHEFVLFILEKKMGATRRTFLTDLARKKGFRVENELSDSVTHIVAENNSGSDVLAWLKTHKPEKTTQFELLDISWLIESMKVGKPVDTKGKYQLMESRVDSANPDPTAGTLNILPPTTKTISQYACQRRTTLNNHNQRFTDALEILAENYEFKRNDDTCLTFMRAISVLKCLPFEVVSLKDTEGLPWIGDEVKGIMEEIIEVGESLEVQAVLNDERYQSFKLFKSVFGVGVKTADKWYRMGLRTLEDVRSSKTLKLTKMQKAGLCYYEDLADGVTKAEADAISLLVQDAVWTFDPDALVEITGGFRRGKPFGHDVDLLITSPGAEKEQEDQLLQKVTNLWKKQGLLLYGDLRESRFEDGKLPSRKIDALDHFQKCFAILKLYHHKVDKSKWEMPTGSNESEAKSWKAIRVDLVVCPYDRFAFALLGWTGSRMFERDLRRYATHEKKMMLDNHALYDLTKKIFLKAKSEEEIFAHLGLEYLEPSERNA

SEQ ID NO: 331 - DNA, 1587 bp, synthetic construct
  misc_feature 1..1587: note = Variant of terminal deoxynucleotidyltransferase
  source 1..1587: mol_type = other DNA
atgcaccatcatcatcatcatggcggtagcggcatgcacggtattcgtaccatcgattcggacttcgggaagaaacgccagaagaagatggataaccacattagttccatgatctatgaaatcaaatttcacgagtttgtgctgttcattctcgaaaagaaaatgggtgcgacgcgtcgtacttttctgacagatttagcccgcaagaaagggttccgcgtcgagaatgaactgtcagacagcgttacccacatcgtggcagaaaataattcaggatctgacgtattggcttggctgaagacccacaagatggagaagacgacgcaatttgaactgctggatattagctggcttatcgaaagcatgaaagttggtaaaccggtggacaccaaggggaaataccagttgatggaatcgcgtgtcgatagtgcgaacccagatccgacagccggtaccctcaacattctgcctcctactacgaagaccatttctcagtatgcgtgtcaacgccgcaccaccctgaacaaccataatcaacgttttacggacgcactggaaattcttgcggaaaattacgagttcaaacgcaacgatgatacttgtctgacctttatgcgtgctatttccgtgctgaaatgccttccgtttgaggtagttagcctgaaagacacggaaggattgccctggatcggtgatgaagtcaaagggattatggaagaaatcatcgaggtcggtgaatcgctggaagtgcaggccgtgctcaatgatgagcgctatcaaagcttcaaactgtttaagagtgtctttggagtgggggtgaagacagcagacaaatggtaccgtatgggtctgcgcacgctcgaggatgttcgttccagcaagaccctgaagttgaccaagatgcagaaagcgggtctgtgctattatgaagatcttgctgatggcgttacgaaagccgaagctgacgcgatttctctgctggttcaggatgcagtctggactttcgacccggatgcgctggtggagattacgggtggatttcgtcgtgggaaaccttttggtcacgacgttgatctgcttatcacatctccgggagctgagaaagaacaagaagaccagctcctgcagaaagtgaccaatctgtggaagaaacaagggttgttgctgtacggtgatctgcgtgaaagtcgctttgaagatgggaaactcccatcccgcaagatcgatgccctggaccattttcagaaatgctttgctatcctcaaactttatcaccataaagtggacaaaagcaaatgggaaatgccgacgggttcgaacgaaagcgaggccaaaagttggaaagcaattcgcgtagatctggttgtttgtccctacgatcgttttgcgtttgcgttgttgggttggaccggaagccgcatgttcgaacgtgatctgcgccgctacgccacccacgagaagaagatgatgctggacaatcatgcgctgtatgacctgaccaagaaaatctttctcaaagctaaatcggaagaggaaattttcgcacatctggggcttgaatacctggaaccgtccgaacgtaacgca

SEQ ID NO: 332 - protein, 529 aa, synthetic construct
  REGION 1..529: note = Variant of terminal deoxynucleotidyltransferase
MHHHHHHGGSGMHGIRTIDSDFGKKRQKKMDNHISSMIYEIKFHEFVLFILEKKMGATRRTFLTDLARKKGFRVENELSDSVTHIVAENNSGSDVLAWLKTHKMEKTTQFELLDISWLIESMKVGKPVDTKGKYQLMESRVDSANPDPTAGTLNILPPTTKTISQYACQRRTTLNNHNQRFTDALEILAENYEFKRNDDTCLTFMRAISVLKCLPFEVVSLKDTEGLPWIGDEVKGIMEEIIEVGESLEVQAVLNDERYQSFKLFKSVFGVGVKTADKWYRMGLRTLEDVRSSKTLKLTKMQKAGLCYYEDLADGVTKAEADAISLLVQDAVWTFDPDALVEITGGFRRGKPFGHDVDLLITSPGAEKEQEDQLLQKVTNLWKKQGLLLYGDLRESRFEDGKLPSRKIDALDHFQKCFAILKLYHHKVDKSKWEMPTGSNESEAKSWKAIRVDLVVCPYDRFAFALLGWTGSRMFERDLRRYATHEKKMMLDNHALYDLTKKIFLKAKSEEEIFAHLGLEYLEPSERNA

SEQ ID NO: 333 - DNA, 1587 bp, synthetic construct
  misc_feature 1..1587: note = Variant of terminal deoxynucleotidyltransferase
  source 1..1587: mol_type = other DNA
atgcaccatcatcatcatcatggcggtagcggcatgcaccgcattcgtaccatcgattcggacttcgggaagaaacgccagaagaagatggataaccacattagttccatgatctatgaaatcaaatttcacgagtttgtgctgttcattctcgaaaagaaaatgggtgcgacgcgtcgtacttttctgacagatttagcccgcaagaaagggttccgcgtcgagaatgaactgtcagacagcgttacccacatcgtggcagaaaataattcaggatctgacgtattggcttggctgaagacccacaagatggagaagacgacgcaatttgaactgctggatattagctggcttatcgaaagcatgaaagttggtaaaccggtggacaccaaggggaaataccagttgatggaatcgcgtgtcgatagtgcgaacccagatccgacagccggtcggctcaacattctgcctcctactacgaagaccatttctcagtatgcgtgtcaacgccgcaccaccctgaacaaccataatcaacgttttacggacgcactggaaattcttgcggaaaattacgagttcaaacgcaacgatgatacttgtctgacctttatgcgtgctatttccgtgctgaaatgccttccgtttgaggtagttagcctgaaagacacggaaggattgccctggatcggtgatgaagtcaaagggattatggaagaaatcatcgaggtcggtgaatcgctggaagtgcaggccgtgctcaatgatgagcgctatcaaagcttcaaactgtttaagagtgtctttggagtgggggtgaagacagcagacaaatggtaccgtatgggtctgcgcacgctcgaggatgttcgttccagcaagaccctgaagttgaccaagatgcagaaagcgggtctgtgctattatgaagatcttgctgatggcgttacgaaagccgaagctgacgcgatttctctgctggttcaggatgcagtctggactttcgacccggatgcgctggtggagattacgggtggatttcgtcgtgggaaaccttttggtcacgacgttgatctgcttatcacatctccgggagctgagaaagaacaagaagaccagctcctgcagaaagtgaccaatctgtggaagaaacaagggttgttgctgtacggtgatctgcgtgaaagtcgctttgaagatgggaaactcccatcccgcaagatcgatgccctggaccattttcagaaatgctttgctatcctcaaactttatcaccataaagtggacaaaagcaaatgggaaatgccgacgggttcgaacgaaagcgaggccaaaagttggaaagcaattcgcgtagatctggttgtttgtccctacgatcgttttgcgtttgcgttgttgggttggaccggaagccgcatgttcgaacgtgatctgcgccgctacgccacccacgagaagaagatgatgctggacaatcatgcgctgtatgacctgaccaagaaaatctttctcaaagctaaatcggaagaggaaattttcgcacatctggggcttgaatacctggaaccgtccgaacgtaacgca

SEQ ID NO: 334 - protein, 529 aa, synthetic construct
  REGION 1..529: note = Variant of terminal deoxynucleotidyltransferase
MHHHHHHGGSGMHRIRTIDSDFGKKRQKKMDNHISSMIYEIKFHEFVLFILEKKMGATRRTFLTDLARKKGFRVENELSDSVTHIVAENNSGSDVLAWLKTHKMEKTTQFELLDISWLIESMKVGKPVDTKGKYQLMESRVDSANPDPTAGRLNILPPTTKTISQYACQRRTTLNNHNQRFTDALEILAENYEFKRNDDTCLTFMRAISVLKCLPFEVVSLKDTEGLPWIGDEVKGIMEEIIEVGESLEVQAVLNDERYQSFKLFKSVFGVGVKTADKWYRMGLRTLEDVRSSKTLKLTKMQKAGLCYYEDLADGVTKAEADAISLLVQDAVWTFDPDALVEITGGFRRGKPFGHDVDLLITSPGAEKEQEDQLLQKVTNLWKKQGLLLYGDLRESRFEDGKLPSRKIDALDHFQKCFAILKLYHHKVDKSKWEMPTGSNESEAKSWKAIRVDLVVCPYDRFAFALLGWTGSRMFERDLRRYATHEKKMMLDNHALYDLTKKIFLKAKSEEEIFAHLGLEYLEPSERNA

SEQ ID NO: 335 - DNA, 1587 bp, synthetic construct
  misc_feature 1..1587: note = Variant of terminal deoxynucleotidyltransferase
  source 1..1587: mol_type = other DNA
atgcaccatcatcatcatcatggcggtagcggcatgcaccgcattcgtaccatcgattcggacttcgggaagaaacgccagaagaagatggataaccacattagttccatgatctatgaaatcaaatttcacgagtttgtgctgttcattctcgaaaagaaaatgggtgcgacgcgtcgtacttttctgacagatttagcccgcaagaaagggttccgcgtcgagaatgaactgtcagacagcgttacccacatcgtggcagaaaataattcaggatctgacgtattggcttggctgaagacccacaagatggagaagacgacgcaatttgaactgctggatattagctggcttatcgaaagcatgaaagttggtaaaccggtggacaccaaggggaaataccagttgatggaatcgcgtgtcgatagtgcgaacccagatccgacagccggtacccagaacattctgcctcctactacgaagaccatttctcagtatgcgtgtcaacgccgcaccaccctgaacaaccataatcaacgttttacggacgcactggaaattcttgcggaaaattacgagttcaaacgcaacgatgatacttgtctgacctttatgcgtgctatttccgtgctgaaatgccttccgtttgaggtagttagcctgaaagacacggaaggattgccctggatcggtgatgaagtcaaagggattatggaagaaatcatcgaggtcggtgaatcgctggaagtgcaggccgtgctcaatgatgagcgctatcaaagcttcaaactgtttaagagtgtctttggagtgggggtgaagacagcagacaaatggtaccgtatgggtctgcgcacgctcgaggatgttcgttccagcaagaccctgaagttgaccaagatgcagaaagcgggtctgtgctattatgaagatcttgctgatggcgttacgaaagccgaagctgacgcgatttctctgctggttcaggatgcagtctggactttcgacccggatgcgctggtggagattacgggtggatttcgtcgtgggaaaccttttggtcacgacgttgatctgcttatcacatctccgggagctgagaaagaacaagaagaccagctcctgcagaaagtgaccaatctgtggaagaaacaagggttgttgctgtacggtgatctgcgtgaaagtcgctttgaagatgggaaactcccatcccgcaagatcgatgccctggaccattttcagaaatgctttgctatcctcaaactttatcaccataaagtggacaaaagcaaatgggaaatgccgacgggttcgaacgaaagcgaggccaaaagttggaaagcaattcgcgtagatctggttgtttgtccctacgatcgttttgcgtttgcgttgttgggttggaccggaagccgcatgttcgaacgtgatctgcgccgctacgccacccacgagaagaagatgatgctggacaatcatgcgctgtatgacctgaccaagaaaatctttctcaaagctaaatcggaagaggaaattttcgcacatctggggcttgaatacctggaaccgtccgaacgtaacgca

SEQ ID NO: 336 - protein, 529 aa, synthetic construct
  REGION 1..529: note = Variant of terminal deoxynucleotidyltransferase
MHHHHHHGGSGMHRIRTIDSDFGKKRQKKMDNHISSMIYEIKFHEFVLFILEKKMGATRRTFLTDLARKKGFRVENELSDSVTHIVAENNSGSDVLAWLKTHKMEKTTQFELLDISWLIESMKVGKPVDTKGKYQLMESRVDSANPDPTAGTQNILPPTTKTISQYACQRRTTLNNHNQRFTDALEILAENYEFKRNDDTCLTFMRAISVLKCLPFEVVSLKDTEGLPWIGDEVKGIMEEIIEVGESLEVQAVLNDERYQSFKLFKSVFGVGVKTADKWYRMGLRTLEDVRSSKTLKLTKMQKAGLCYYEDLADGVTKAEADAISLLVQDAVWTFDPDALVEITGGFRRGKPFGHDVDLLITSPGAEKEQEDQLLQKVTNLWKKQGLLLYGDLRESRFEDGKLPSRKIDALDHFQKCFAILKLYHHKVDKSKWEMPTGSNESEAKSWKAIRVDLVVCPYDRFAFALLGWTGSRMFERDLRRYATHEKKMMLDNHALYDLTKKIFLKAKSEEEIFAHLGLEYLEPSERNA

SEQ ID NO: 337 - DNA, 1587 bp, synthetic construct
  misc_feature 1..1587: note = Variant of terminal deoxynucleotidyltransferase
  source 1..1587: mol_type = other DNA
atgcaccatcatcatcatcatggcggtagcggcatgcaccgcattcgtaccatcgattcggacttcgggaagaaacgccagaagaagatggataaccacattagttccactatctatgaaatcaaatttcacgagtttgtgctgttcattctcgaaaagaaaatgggtgcgacgcgtcgtacttttctgacagatttagcccgcaagaaagggttccgcgtcgagaatgaactgtcagacagcgttacccacatcgtggcagaaaataattcaggatctgacgtattggcttggctgaagacccacaagatggagaagacgacgcaatttgaactgctggatattagctggcttatcgaaagcatgaaagttggtaaaccggtggacaccaaggggaaataccagttgatggaatcgcgtgtcgatagtgcgaacccagatccgacagccggtaccctcaacattctgcctcctactacgaagaccatttctcagtatgcgtgtcaacgccgcaccaccctgaacaaccataatcaacgttttacggacgcactggaaattcttgcggaaaattacgagttcaaacgcaacgatgatacttgtctgacctttatgcgtgctatttccgtgctgaaatgccttccgtttgaggtagttagcctgaaagacacggaaggattgccctggatcggtgatgaagtcaaagggattatggaagaaatcatcgaggtcggtgaatcgctggaagtgcaggccgtgctcaatgatgagcgctatcaaagcttcaaactgtttaagagtgtctttggagtgggggtgaagacagcagacaaatggtaccgtatgggtctgcgcacgctcgaggatgttcgttccagcaagaccctgaagttgaccaagatgcagaaagcgggtctgtgctattatgaagatcttgctgatggcgttacgaaagccgaagctgacgcgatttctctgctggttcaggatgcagtctggactttcgacccggatgcgctggtggagattacgggtggatttcgtcgtgggaaaccttttggtcacgacgttgatctgcttatcacatctccgggagctgagaaagaacaagaagaccagctcctgcagaaagtgaccaatctgtggaagaaacaagggttgttgctgtacggtgatctgcgtgaaagtcgctttgaagatgggaaactcccatcccgcaagatcgatgccctggaccattttcagaaatgctttgctatcctcaaactttatcaccataaagtggacaaaagcaaatgggaaatgccgacgggttcgaacgaaagcgaggccaaaagttggaaagcaattcgcgtagatctggttgtttgtccctacgatcgttttgcgtttgcgttgttgggttggaccggaagccgcatgttcgaacgtgatctgcgccgctacgccacccacgagaagaagatgatgctggacaatcatgcgctgtatgacctgaccaagaaaatctttctcaaagctaaatcggaagaggaaattttcgcacatctggggcttgaatacctggaaccgtccgaacgtaacgca

SEQ ID NO: 338 - protein, 529 aa, synthetic construct
  REGION 1..529: note = Variant of terminal deoxynucleotidyltransferase
MHHHHHHGGSGMHRIRTIDSDFGKKRQKKMDNHISSTIYEIKFHEFVLFILEKKMGATRRTFLTDLARKKGFRVENELSDSVTHIVAENNSGSDVLAWLKTHKMEKTTQFELLDISWLIESMKVGKPVDTKGKYQLMESRVDSANPDPTAGTLNILPPTTKTISQYACQRRTTLNNHNQRFTDALEILAENYEFKRNDDTCLTFMRAISVLKCLPFEVVSLKDTEGLPWIGDEVKGIMEEIIEVGESLEVQAVLNDERYQSFKLFKSVFGVGVKTADKWYRMGLRTLEDVRSSKTLKLTKMQKAGLCYYEDLADGVTKAEADAISLLVQDAVWTFDPDALVEITGGFRRGKPFGHDVDLLITSPGAEKEQEDQLLQKVTNLWKKQGLLLYGDLRESRFEDGKLPSRKIDALDHFQKCFAILKLYHHKVDKSKWEMPTGSNESEAKSWKAIRVDLVVCPYDRFAFALLGWTGSRMFERDLRRYATHEKKMMLDNHALYDLTKKIFLKAKSEEEIFAHLGLEYLEPSERNA

SEQ ID NO: 339 - DNA, 1587 bp, synthetic construct
  misc_feature 1..1587: note = Variant of terminal deoxynucleotidyltransferase
  source 1..1587: mol_type = other DNA
atgcaccatcatcatcatcatggcggtagcggcatgcaccgcattcgtaccatcgattcggacttcgggaagaaacgccagaagaagatggataaccacattagttccatgatctatgaaatcaaatttcacgagtttgtgctgttcattctcgaaaagaaaatgggtgcgacgcgtcgtacttttctgacagatttagcccgcaagaaagggttccgcgtcgagaatgaactgtcagacagcgttacccacatcgtggcagaaaataattcaggatctgacgtattggcttggctgaagacccacaagatggagaagacgacgcaatttgaactgctggatattagctggcttatcgaaagcatgaaagttggtaaaccggtggacaccaaggggaaataccagttgatggaatcgcgtgtcgatagtgcggagccagatccgacagccggtaccctcaacattctgcctcctactacgaagaccatttctcagtatgcgtgtcaacgccgcaccaccctgaacaaccataatcaacgttttacggacgcactggaaattcttgcggaaaattacgagttcaaacgcaacgatgatacttgtctgacctttatgcgtgctatttccgtgctgaaatgccttccgtttgaggtagttagcctgaaagacacggaaggattgccctggatcggtgatgaagtcaaagggattatggaagaaatcatcgaggtcggtgaatcgctggaagtgcaggccgtgctcaatgatgagcgctatcaaagcttcaaactgtttaagagtgtctttggagtgggggtgaagacagcagacaaatggtaccgtatgggtctgcgcacgctcgaggatgttcgttccagcaagaccctgaagttgaccaagatgcagaaagcgggtctgtgctattatgaagatcttgctgatggcgttacgaaagccgaagctgacgcgatttctctgctggttcaggatgcagtctggactttcgacccggatgcgctggtggagattacgggtggatttcgtcgtgggaaaccttttggtcacgacgttgatctgcttatcacatctccgggagctgagaaagaacaagaagaccagctcctgcagaaagtgaccaatctgtggaagaaacaagggttgttgctgtacggtgatctgcgtgaaagtcgctttgaagatgggaaactcccatcccgcaagatcgatgccctggaccattttcagaaatgctttgctatcctcaaactttatcaccataaagtggacaaaagcaaatgggaaatgccgacgggttcgaacgaaagcgaggccaaaagttggaaagcaattcgcgtagatctggttgtttgtccctacgatcgttttgcgtttgcgttgttgggttggaccggaagccgcatgttcgaacgtgatctgcgccgctacgccacccacgagaagaagatgatgctggacaatcatgcgctgtatgacctgaccaagaaaatctttctcaaagctaaatcggaagaggaaattttcgcacatctggggcttgaatacctggaaccgtccgaacgtaacgca

SEQ ID NO: 340 - protein, 529 aa, synthetic construct
  REGION 1..529: note = Variant of terminal deoxynucleotidyltransferase
MHHHHHHGGSGMHRIRTIDSDFGKKRQKKMDNHISSMIYEIKFHEFVLFILEKKMGATRRTFLTDLARKKGFRVENELSDSVTHIVAENNSGSDVLAWLKTHKMEKTTQFELLDISWLIESMKVGKPVDTKGKYQLMESRVDSAEPDPTAGTLNILPPTTKTISQYACQRRTTLNNHNQRFTDALEILAENYEFKRNDDTCLTFMRAISVLKCLPFEVVSLKDTEGLPWIGDEVKGIMEEIIEVGESLEVQAVLNDERYQSFKLFKSVFGVGVKTADKWYRMGLRTLEDVRSSKTLKLTKMQKAGLCYYEDLADGVTKAEADAISLLVQDAVWTFDPDALVEITGGFRRGKPFGHDVDLLITSPGAEKEQEDQLLQKVTNLWKKQGLLLYGDLRESRFEDGKLPSRKIDALDHFQKCFAILKLYHHKVDKSKWEMPTGSNESEAKSWKAIRVDLVVCPYDRFAFALLGWTGSRMFERDLRRYATHEKKMMLDNHALYDLTKKIFLKAKSEEEIFAHLGLEYLEPSERNA

SEQ ID NO: 341 - DNA, 1587 bp, synthetic construct
  misc_feature 1..1587: note = Variant of terminal deoxynucleotidyltransferase
  source 1..1587: mol_type = other DNA
atgcaccatcatcatcatcatggcggtagcggcatgcaccgcattcgtaccatcgattcggacttcgggaagaaacgccagaagaagatggataaccacattagttccatgatctatgaaatcaaatttcacgagtttgtgctgttcattctcgaaaagaaaatgggtgcgacgcgtcgtacttttctgacagatttagcccgcaagaaagggttccgcgtcgagaatgaactgtcagacagcgttacccacatcgtggcagaaaataattcaggatctgacgtattggcttggctgaagacccacaagatggagaagacgacgcaatttgaactgctggatattagctggcttatcgaaagcatgaaagttggtaaaccggtggacaccaaggggaaataccagttgatggaatcgcgtgtcagtagtgcgaacccagatccgacagccggtaccctcaacattctgcctcctactacgaagaccatttctcagtatgcgtgtcaacgccgcaccaccctgaacaaccataatcaacgttttacggacgcactggaaattcttgcggaaaattacgagttcaaacgcaacgatgatacttgtctgacctttatgcgtgctatttccgtgctgaaatgccttccgtttgaggtagttagcctgaaagacacggaaggattgccctggatcggtgatgaagtcaaagggattatggaagaaatcatcgaggtcggtgaatcgctggaagtgcaggccgtgctcaatgatgagcgctatcaaagcttcaaactgtttaagagtgtctttggagtgggggtgaagacagcagacaaatggtaccgtatgggtctgcgcacgctcgaggatgttcgttccagcaagaccctgaagttgaccaagatgcagaaagcgggtctgtgctattatgaagatcttgctgatggcgttacgaaagccgaagctgacgcgatttctctgctggttcaggatgcagtctggactttcgacccggatgcgctggtggagattacgggtggatttcgtcgtgggaaaccttttggtcacgacgttgatctgcttatcacatctccgggagctgagaaagaacaagaagaccagctcctgcagaaagtgaccaatctgtggaagaaacaagggttgttgctgtacggtgatctgcgtgaaagtcgctttgaagatgggaaactcccatcccgcaagatcgatgccctggaccattttcagaaatgctttgctatcctcaaactttatcaccataaagtggacaaaagcaaatgggaaatgccgacgggttcgaacgaaagcgaggccaaaagttggaaagcaattcgcgtagatctggttgtttgtccctacgatcgttttgcgtttgcgttgttgggttggaccggaagccgcatgttcgaacgtgatctgcgccgctacgccacccacgagaagaagatgatgctggacaatcatgcgctgtatgacctgaccaagaaaatctttctcaaagctaaatcggaagaggaaattttcgcacatctggggcttgaatacctggaaccgtccgaacgtaacgca

SEQ ID NO: 342 - protein, 529 aa, synthetic construct
  REGION 1..529: note = Variant of terminal deoxynucleotidyltransferase
MHHHHHHGGSGMHRIRTIDSDFGKKRQKKMDNHISSMIYEIKFHEFVLFILEKKMGATRRTFLTDLARKKGFRVENELSDSVTHIVAENNSGSDVLAWLKTHKMEKTTQFELLDISWLIESMKVGKPVDTKGKYQLMESRVSSANPDPTAGTLNILPPTTKTISQYACQRRTTLNNHNQRFTDALEILAENYEFKRNDDTCLTFMRAISVLKCLPFEVVSLKDTEGLPWIGDEVKGIMEEIIEVGESLEVQAVLNDERYQSFKLFKSVFGVGVKTADKWYRMGLRTLEDVRSSKTLKLTKMQKAGLCYYEDLADGVTKAEADAISLLVQDAVWTFDPDALVEITGGFRRGKPFGHDVDLLITSPGAEKEQEDQLLQKVTNLWKKQGLLLYGDLRESRFEDGKLPSRKIDALDHFQKCFAILKLYHHKVDKSKWEMPTGSNESEAKSWKAIRVDLVVCPYDRFAFALLGWTGSRMFERDLRRYATHEKKMMLDNHALYDLTKKIFLKAKSEEEIFAHLGLEYLEPSERNA

SEQ ID NO: 343 - DNA, 1587 bp, synthetic construct
  misc_feature 1..1587: note = Variant of terminal deoxynucleotidyltransferase
  source 1..1587: mol_type = other DNA
atgcaccatcatcatcatcatggcggtagcggcatgcaccgcattcgtaccatcgatacggacttcgggaagaaacgccagaagaagatggataaccacattagttccatgatctatgaaatcaaatttcacgagtttgtgctgttcattctcgaaaagaaaatgggtgcgacgcgtcgtacttttctgacagatttagcccgcaagaaagggttccgcgtcgagaatgaactgtcagacagcgttacccacatcgtggcagaaaataattcaggatctgacgtattggcttggctgaagacccacaagatggagaagacgacgcaatttgaactgctggatattagctggcttatcgaaagcatgaaagttggtaaaccggtggacaccaaggggaaataccagttgatggaatcgcgtgtcgatagtgcgaacccagatccgacagccggtaccctcaacattctgcctcctactacgaagaccatttctcagtatgcgtgtcaacgccgcaccaccctgaacaaccataatcaacgttttacggacgcactggaaattcttgcggaaaattacgagttcaaacgcaacgatgatacttgtctgacctttatgcgtgctatttccgtgctgaaatgccttccgtttgaggtagttagcctgaaagacacggaaggattgccctggatcggtgatgaagtcaaagggattatggaagaaatcatcgaggtcggtgaatcgctggaagtgcaggccgtgctcaatgatgagcgctatcaaagcttcaaactgtttaagagtgtctttggagtgggggtgaagacagcagacaaatggtaccgtatgggtctgcgcacgctcgaggatgttcgttccagcaagaccctgaagttgaccaagatgcagaaagcgggtctgtgctattatgaagatcttgctgatggcgttacgaaagccgaagctgacgcgatttctctgctggttcaggatgcagtctggactttcgacccggatgcgctggtggagattacgggtggatttcgtcgtgggaaaccttttggtcacgacgttgatctgcttatcacatctccgggagctgagaaagaacaagaagaccagctcctgcagaaagtgaccaatctgtggaagaaacaagggttgttgctgtacggtgatctgcgtgaaagtcgctttgaagatgggaaactcccatcccgcaagatcgatgccctggaccattttcagaaatgctttgctatcctcaaactttatcaccataaagtggacaaaagcaaatgggaaatgccgacgggttcgaacgaaagcgaggccaaaagttggaaagcaattcgcgtagatctggttgtttgtccctacgatcgttttgcgtttgcgttgttgggttggaccggaagccgcatgttcgaacgtgatctgcgccgctacgccacccacgagaagaagatgatgctggacaatcatgcgctgtatgacctgaccaagaaaatctttctcaaagctaaatcggaagaggaaattttcgcacatctggggcttgaatacctggaaccgtccgaacgtaacgca

SEQ ID NO: 344 - protein, 529 aa, synthetic construct
  REGION 1..529: note = Variant of terminal deoxynucleotidyltransferase
MHHHHHHGGSGMHRIRTIDTDFGKKRQKKMDNHISSMIYEIKFHEFVLFILEKKMGATRRTFLTDLARKKGFRVENELSDSVTHIVAENNSGSDVLAWLKTHKMEKTTQFELLDISWLIESMKVGKPVDTKGKYQLMESRVDSANPDPTAGTLNILPPTTKTISQYACQRRTTLNNHNQRFTDALEILAENYEFKRNDDTCLTFMRAISVLKCLPFEVVSLKDTEGLPWIGDEVKGIMEEIIEVGESLEVQAVLNDERYQSFKLFKSVFGVGVKTADKWYRMGLRTLEDVRSSKTLKLTKMQKAGLCYYEDLADGVTKAEADAISLLVQDAVWTFDPDALVEITGGFRRGKPFGHDVDLLITSPGAEKEQEDQLLQKVTNLWKKQGLLLYGDLRESRFEDGKLPSRKIDALDHFQKCFAILKLYHHKVDKSKWEMPTGSNESEAKSWKAIRVDLVVCPYDRFAFALLGWTGSRMFERDLRRYATHEKKMMLDNHALYDLTKKIFLKAKSEEEIFAHLGLEYLEPSERNA

SEQ ID NO: 345 - DNA, 1587 bp, synthetic construct
  misc_feature 1..1587: note = Variant of terminal deoxynucleotidyltransferase
  source 1..1587: mol_type = other DNA
atgcaccatcatcatcatcatggcggtagcggcatgcaccagattcgtaccatcgattcggacttcgggaagaaacgccagaagaagatggataaccacattagttccatgatctatgaaatcaaatttcacgagtttgtgctgttcattctcgaaaagaaaatgggtgcgacgcgtcgtacttttctgacagatttagcccgcaagaaagggttccgcgtcgagaatgaactgtcagacagcgttacccacatcgtggcagaaaataattcaggatctgacgtattggcttggctgaagacccacaagatggagaagacgacgcaatttgaactgctggatattagctggcttatcgaaagcatgaaagttggtaaaccggtggacaccaaggggaaataccagttgatggaatcgcgtgtcgatagtgcgaacccagatccgacagccggtaccctcaacattctgcctcctactacgaagaccatttctcagtatgcgtgtcaacgccgcaccaccctgaacaaccataatcaacgttttacggacgcactggaaattcttgcggaaaattacgagttcaaacgcaacgatgatacttgtctgacctttatgcgtgctatttccgtgctgaaatgccttccgtttgaggtagttagcctgaaagacacggaaggattgccctggatcggtgatgaagtcaaagggattatggaagaaatcatcgaggtcggtgaatcgctggaagtgcaggccgtgctcaatgatgagcgctatcaaagcttcaaactgtttaagagtgtctttggagtgggggtgaagacagcagacaaatggtaccgtatgggtctgcgcacgctcgaggatgttcgttccagcaagaccctgaagttgaccaagatgcagaaagcgggtctgtgctattatgaagatcttgctgatggcgttacgaaagccgaagctgacgcgatttctctgctggttcaggatgcagtctggactttcgacccggatgcgctggtggagattacgggtggatttcgtcgtgggaaaccttttggtcacgacgttgatctgcttatcacatctccgggagctgagaaagaacaagaagaccagctcctgcagaaagtgaccaatctgtggaagaaacaagggttgttgctgtacggtgatctgcgtgaaagtcgctttgaagatgggaaactcccatcccgcaagatcgatgccctggaccattttcagaaatgctttgctatcctcaaactttatcaccataaagtggacaaaagcaaatgggaaatgccgacgggttcgaacgaaagcgaggccaaaagttggaaagcaattcgcgtagatctggttgtttgtccctacgatcgttttgcgtttgcgttgttgggttggaccggaagccgcatgttcgaacgtgatctgcgccgctacgccacccacgagaagaagatgatgctggacaatcatgcgctgtatgacctgaccaagaaaatctttctcaaagctaaatcggaagaggaaattttcgcacatctggggcttgaatacctggaaccgtccgaacgtaacgca

SEQ ID NO: 346 - protein, 529 aa, synthetic construct
  REGION 1..529: note = Variant of terminal deoxynucleotidyltransferase
MHHHHHHGGSGMHQIRTIDSDFGKKRQKKMDNHISSMIYEIKFHEFVLFILEKKMGATRRTFLTDLARKKGFRVENELSDSVTHIVAENNSGSDVLAWLKTHKMEKTTQFELLDISWLIESMKVGKPVDTKGKYQLMESRVDSANPDPTAGTLNILPPTTKTISQYACQRRTTLNNHNQRFTDALEILAENYEFKRNDDTCLTFMRAISVLKCLPFEVVSLKDTEGLPWIGDEVKGIMEEIIEVGESLEVQAVLNDERYQSFKLFKSVFGVGVKTADKWYRMGLRTLEDVRSSKTLKLTKMQKAGLCYYEDLADGVTKAEADAISLLVQDAVWTFDPDALVEITGGFRRGKPFGHDVDLLITSPGAEKEQEDQLLQKVTNLWKKQGLLLYGDLRESRFEDGKLPSRKIDALDHFQKCFAILKLYHHKVDKSKWEMPTGSNESEAKSWKAIRVDLVVCPYDRFAFALLGWTGSRMFERDLRRYATHEKKMMLDNHALYDLTKKIFLKAKSEEEIFAHLGLEYLEPSERNA

SEQ ID NO: 347 - DNA, 1587 bp, synthetic construct
  misc_feature 1..1587: note = Variant of terminal deoxynucleotidyltransferase
  source 1..1587: mol_type = other DNA
atgcaccatcatcatcatcatggcggtagcggcatgcaccgcattcgtaccatcgattcggacttcgggaagaaacgccagaagaagatggataaccacattagttccatgatctatgaaatcaaatttcacgagtttgtgctgttcattctcgaaaagaaaatgggtgcgacgcgtcgtacttttctgacagatttagcccgcaagaaagggttccgcgtcgagaatgaactgtcagacagcgttacccacatcgtggcagaaaataattcaggatctgaggtattggcttggctgaagacccacaagatggagaagacgacgcaatttgaactgctggatattagctggcttatcgaaagcatgaaagttggtaaaccggtggacaccaaggggaaataccagttgatggaatcgcgtgtcgatagtgcgaacccagatccgacagccggtaccctcaacattctgcctcctactacgaagaccatttctcagtatgcgtgtcaacgccgcaccaccctgaacaaccataatcaacgttttacggacgcactggaaattcttgcggaaaattacgagttcaaacgcaacgatgatacttgtctgacctttatgcgtgctatttccgtgctgaaatgccttccgtttgaggtagttagcctgaaagacacggaaggattgccctggatcggtgatgaagtcaaagggattatggaagaaatcatcgaggtcggtgaatcgctggaagtgcaggccgtgctcaatgatgagcgctatcaaagcttcaaactgtttaagagtgtctttggagtgggggtgaagacagcagacaaatggtaccgtatgggtctgcgcacgctcgaggatgttcgttccagcaagaccctgaagttgaccaagatgcagaaagcgggtctgtgctattatgaagatcttgctgatggcgttacgaaagccgaagctgacgcgatttctctgctggttcaggatgcagtctggactttcgacccggatgcgctggtggagattacgggtggatttcgtcgtgggaaaccttttggtcacgacgttgatctgcttatcacatctccgggagctgagaaagaacaagaagaccagctcctgcagaaagtgaccaatctgtggaagaaacaagggttgttgctgtacggtgatctgcgtgaaagtcgctttgaagatgggaaactcccatcccgcaagatcgatgccctggaccattttcagaaatgctttgctatcctcaaactttatcaccataaagtggacaaaagcaaatgggaaatgccgacgggttcgaacgaaagcgaggccaaaagttggaaagcaattcgcgtagatctggttgtttgtccctacgatcgttttgcgtttgcgttgttgggttggaccggaagccgcatgttcgaacgtgatctgcgccgctacgccacccacgagaagaagatgatgctggacaatcatgcgctgtatgacctgaccaagaaaatctttctcaaagctaaatcggaagaggaaattttcgcacatctggggcttgaatacctggaaccgtccgaacgtaacgca

SEQ ID NO: 348 - protein, 529 aa, synthetic construct
  REGION 1..529: note = Variant of terminal deoxynucleotidyltransferase
MHHHHHHGGSGMHRIRTIDSDFGKKRQKKMDNHISSMIYEIKFHEFVLFILEKKMGATRRTFLTDLARKKGFRVENELSDSVTHIVAENNSGSEVLAWLKTHKMEKTTQFELLDISWLIESMKVGKPVDTKGKYQLMESRVDSANPDPTAGTLNILPPTTKTISQYACQRRTTLNNHNQRFTDALEILAENYEFKRNDDTCLTFMRAISVLKCLPFEVVSLKDTEGLPWIGDEVKGIMEEIIEVGESLEVQAVLNDERYQSFKLFKSVFGVGVKTADKWYRMGLRTLEDVRSSKTLKLTKMQKAGLCYYEDLADGVTKAEADAISLLVQDAVWTFDPDALVEITGGFRRGKPFGHDVDLLITSPGAEKEQEDQLLQKVTNLWKKQGLLLYGDLRESRFEDGKLPSRKIDALDHFQKCFAILKLYHHKVDKSKWEMPTGSNESEAKSWKAIRVDLVVCPYDRFAFALLGWTGSRMFERDLRRYATHEKKMMLDNHALYDLTKKIFLKAKSEEEIFAHLGLEYLEPSERNA

SEQ ID NO: 349 - DNA, 1587 bp, synthetic construct
  misc_feature 1..1587: note = Variant of terminal deoxynucleotidyltransferase
  source 1..1587: mol_type = other DNA
atgcaccatcatcatcatcatggcggtagcggcatgcaccgcattcgtaccatcgattcggacttcgggaagaaacgccagaagaagatggataaccacattagttccatgatctatgaaatcaaatttcacgagtttgtgctgttcattctcgaaaagaaaatgggtgcgacgcgtcgtacttttctgacagatttagcccgcaagaaagggttccgcgtcgagaatgaactgtcagacagcgttacccacatcgtggcagaaaataattcaggatctgacgtattggcttggctgaagacccacaagatggagaagacgacgcaatttgaactgctggatattagctggcttatcgaaagcatgaaagttggtaaaccggtggacaccaaggggaaataccagttgatggaatcgcgtgtcgatagtgcgaacccagatccgacagccggtaccctcaacattctgcctcctactgggaagaccatttctcagtatgcgtgtcaacgccgcaccaccctgaacaaccataatcaacgttttacggacgcactggaaattcttgcggaaaattacgagttcaaacgcaacgatgatacttgtctgacctttatgcgtgctatttccgtgctgaaatgccttccgtttgaggtagttagcctgaaagacacggaaggattgccctggatcggtgatgaagtcaaagggattatggaagaaatcatcgaggtcggtgaatcgctggaagtgcaggccgtgctcaatgatgagcgctatcaaagcttcaaactgtttaagagtgtctttggagtgggggtgaagacagcagacaaatggtaccgtatgggtctgcgcacgctcgaggatgttcgttccagcaagaccctgaagttgaccaagatgcagaaagcgggtctgtgctattatgaagatcttgctgatggcgttacgaaagccgaagctgacgcgatttctctgctggttcaggatgcagtctggactttcgacccggatgcgctggtggagattacgggtggatttcgtcgtgggaaaccttttggtcacgacgttgatctgcttatcacatctccgggagctgagaaagaacaagaagaccagctcctgcagaaagtgaccaatctgtggaagaaacaagggttgttgctgtacggtgatctgcgtgaaagtcgctttgaagatgggaaactcccatcccgcaagatcgatgccctggaccattttcagaaatgctttgctatcctcaaactttatcaccataaagtggacaaaagcaaatgggaaatgccgacgggttcgaacgaaagcgaggccaaaagttggaaagcaattcgcgtagatctggttgtttgtccctacgatcgttttgcgtttgcgttgttgggttggaccggaagccgcatgttcgaacgtgatctgcgccgctacgccacccacgagaagaagatgatgctggacaatcatgcgctgtatgacctgaccaagaaaatctttctcaaagctaaatcggaagaggaaattttcgcacatctggggcttgaatacctggaaccgtccgaacgtaacgca

SEQ ID NO: 350 - protein, 529 aa, synthetic construct
  REGION 1..529: note = Variant of terminal deoxynucleotidyltransferase
MHHHHHHGGSGMHRIRTIDSDFGKKRQKKMDNHISSMIYEIKFHEFVLFILEKKMGATRRTFLTDLARKKGFRVENELSDSVTHIVAENNSGSDVLAWLKTHKMEKTTQFELLDISWLIESMKVGKPVDTKGKYQLMESRVDSANPDPTAGTLNILPPTGKTISQYACQRRTTLNNHNQRFTDALEILAENYEFKRNDDTCLTFMRAISVLKCLPFEVVSLKDTEGLPWIGDEVKGIMEEIIEVGESLEVQAVLNDERYQSFKLFKSVFGVGVKTADKWYRMGLRTLEDVRSSKTLKLTKMQKAGLCYYEDLADGVTKAEADAISLLVQDAVWTFDPDALVEITGGFRRGKPFGHDVDLLITSPGAEKEQEDQLLQKVTNLWKKQGLLLYGDLRESRFEDGKLPSRKIDALDHFQKCFAILKLYHHKVDKSKWEMPTGSNESEAKSWKAIRVDLVVCPYDRFAFALLGWTGSRMFERDLRRYATHEKKMMLDNHALYDLTKKIFLKAKSEEEIFAHLGLEYLEPSERNA

SEQ ID NO: 351 - DNA, 1587 bp, synthetic construct
  misc_feature 1..1587: note = Variant of terminal deoxynucleotidyltransferase
  source 1..1587: mol_type = other DNA
atgcaccatcatcatcatcatggcggtagcggcatgtcgcgcattcgtaccatcgattcggacttcgggaagaaacgccagaagaagatggataaccacattagttccatgatctatgaaatcaaatttcacgagtttgtgctgttcattctcgaaaagaaaatgggtgcgacgcgtcgtacttttctgacagatttagcccgcaagaaagggttccgcgtcgagaatgaactgtcagacagcgttacccacatcgtggcagaaaataattcaggatctgacgtattggcttggctgaagacccacaagatggagaagacgacgcaatttgaactgctggatattagctggcttatcgaaagcatgaaagttggtaaaccggtggacaccaaggggaaataccagttgatggaatcgcgtgtcgatagtgcgaacccagatccgacagccggtaccctcaacattctgcctcctactacgaagaccatttctcagtatgcgtgtcaacgccgcaccaccctgaacaaccataatcaacgttttacggacgcactggaaattcttgcggaaaattacgagttcaaacgcaacgatgatacttgtctgacctttatgcgtgctatttccgtgctgaaatgccttccgtttgaggtagttagcctgaaagacacggaaggattgccctggatcggtgatgaagtcaaagggattatggaagaaatcatcgaggtcggtgaatcgctggaagtgcaggccgtgctcaatgatgagcgctatcaaagcttcaaactgtttaagagtgtctttggagtgggggtgaagacagcagacaaatggtaccgtatgggtctgcgcacgctcgaggatgttcgttccagcaagaccctgaagttgaccaagatgcagaaagcgggtctgtgctattatgaagatcttgctgatggcgttacgaaagccgaagctgacgcgatttctctgctggttcaggatgcagtctggactttcgacccggatgcgctggtggagattacgggtggatttcgtcgtgggaaaccttttggtcacgacgttgatctgcttatcacatctccgggagctgagaaagaacaagaagaccagctcctgcagaaagtgaccaatctgtggaagaaacaagggttgttgctgtacggtgatctgcgtgaaagtcgctttgaagatgggaaactcccatcccgcaagatcgatgccctggaccattttcagaaatgctttgctatcctcaaactttatcaccataaagtggacaaaagcaaatgggaaatgccgacgggttcgaacgaaagcgaggccaaaagttggaaagcaattcgcgtagatctggttgtttgtccctacgatcgttttgcgtttgcgttgttgggttggaccggaagccgcatgttcgaacgtgatctgcgccgctacgccacccacgagaagaagatgatgctggacaatcatgcgctgtatgacctgaccaagaaaatctttctcaaagctaaatcggaagaggaaattttcgcacatctggggcttgaatacctggaaccgtccgaacgtaacgca

SEQ ID NO: 352 - protein, 529 aa, synthetic construct
  REGION 1..529: note = Variant of terminal deoxynucleotidyltransferase
MHHHHHHGGSGMSRIRTIDSDFGKKRQKKMDNHISSMIYEIKFHEFVLFILEKKMGATRRTFLTDLARKKGFRVENELSDSVTHIVAENNSGSDVLAWLKTHKMEKTTQFELLDISWLIESMKVGKPVDTKGKYQLMESRVDSANPDPTAGTLNILPPTTKTISQYACQRRTTLNNHNQRFTDALEILAENYEFKRNDDTCLTFMRAISVLKCLPFEVVSLKDTEGLPWIGDEVKGIMEEIIEVGESLEVQAVLNDERYQSFKLFKSVFGVGVKTADKWYRMGLRTLEDVRSSKTLKLTKMQKAGLCYYEDLADGVTKAEADAISLLVQDAVWTFDPDALVEITGGFRRGKPFGHDVDLLITSPGAEKEQEDQLLQKVTNLWKKQGLLLYGDLRESRFEDGKLPSRKIDALDHFQKCFAILKLYHHKVDKSKWEMPTGSNESEAKSWKAIRVDLVVCPYDRFAFALLGWTGSRMFERDLRRYATHEKKMMLDNHALYDLTKKIFLKAKSEEEIFAHLGLEYLEPSERNA

SEQ ID NO: 353 - DNA, 1587 bp, synthetic construct
  misc_feature 1..1587: note = Variant of terminal deoxynucleotidyltransferase
  source 1..1587: mol_type = other DNA
atgcaccatcatcatcatcatggcggtagcggcatgcaccgcattcgtaccatcgattcggacttcgggaagaaacgccagaagaagatggataaccacattagttccatgatctatgaaatcaaatttcacgagtttgtgctgttcattctcgaaaagaaaatgggtgcgacgcgtcgtacttttctgacagatttagcccgcaagaaagggttccgcgtcgagaatgaactgtcagacagcgttacccacatcgtggcagaaaataattcaatgtctgacgtattggcttggctgaagacccacaagatggagaagacgacgcaatttgaactgctggatattagctggcttatcgaaagcatgaaagttggtaaaccggtggacaccaaggggaaataccagttgatggaatcgcgtgtcgatagtgcgaacccagatccgacagccggtaccctcaacattctgcctcctactacgaagaccatttctcagtatgcgtgtcaacgccgcaccaccctgaacaaccataatcaacgttttacggacgcactggaaattcttgcggaaaattacgagttcaaacgcaacgatgatacttgtctgacctttatgcgtgctatttccgtgctgaaatgccttccgtttgaggtagttagcctgaaagacacggaaggattgccctggatcggtgatgaagtcaaagggattatggaagaaatcatcgaggtcggtgaatcgctggaagtgcaggccgtgctcaatgatgagcgctatcaaagcttcaaactgtttaagagtgtctttggagtgggggtgaagacagcagacaaatggtaccgtatgggtctgcgcacgctcgaggatgttcgttccagcaagaccctgaagttgaccaagatgcagaaagcgggtctgtgctattatgaagatcttgctgatggcgttacgaaagccgaagctgacgcgatttctctgctggttcaggatgcagtctggactttcgacccggatgcgctggtggagattacgggtggatttcgtcgtgggaaaccttttggtcacgacgttgatctgcttatcacatctccgggagctgagaaagaacaagaagaccagctcctgcagaaagtgaccaatctgtggaagaaacaagggttgttgctgtacggtgatctgcgtgaaagtcgctttgaagatgggaaactcccatcccgcaagatcgatgccctggaccattttcagaaatgctttgctatcctcaaactttatcaccataaagtggacaaaagcaaatgggaaatgccgacgggttcgaacgaaagcgaggccaaaagttggaaagcaattcgcgtagatctggttgtttgtccctacgatcgttttgcgtttgcgttgttgggttggaccggaagccgcatgttcgaacgtgatctgcgccgctacgccacccacgagaagaagatgatgctggacaatcatgcgctgtatgacctgaccaagaaaatctttctcaaagctaaatcggaagaggaaattttcgcacatctggggcttgaatacctggaaccgtccgaacgtaacgca

SEQ ID NO: 354 - protein, 529 aa, synthetic construct
  REGION 1..529: note = Variant of terminal deoxynucleotidyltransferase
MHHHHHHGGSGMHRIRTIDSDFGKKRQKKMDNHISSMIYEIKFHEFVLFILEKKMGATRRTFLTDLARKKGFRVENELSDSVTHIVAENNSMSDVLAWLKTHKMEKTTQFELLDISWLIESMKVGKPVDTKGKYQLMESRVDSANPDPTAGTLNILPPTTKTISQYACQRRTTLNNHNQRFTDALEILAENYEFKRNDDTCLTFMRAISVLKCLPFEVVSLKDTEGLPWIGDEVKGIMEEIIEVGESLEVQAVLNDERYQSFKLFKSVFGVGVKTADKWYRMGLRTLEDVRSSKTLKLTKMQKAGLCYYEDLADGVTKAEADAISLLVQDAVWTFDPDALVEITGGFRRGKPFGHDVDLLITSPGAEKEQEDQLLQKVTNLWKKQGLLLYGDLRESRFEDGKLPSRKIDALDHFQKCFAILKLYHHKVDKSKWEMPTGSNESEAKSWKAIRVDLVVCPYDRFAFALLGWTGSRMFERDLRRYATHEKKMMLDNHALYDLTKKIFLKAKSEEEIFAHLGLEYLEPSERNA

SEQ ID NO: 355 - DNA, 1587 bp, synthetic construct
  misc_feature 1..1587: note = Variant of terminal deoxynucleotidyltransferase
  source 1..1587: mol_type = other DNA
atgcaccatcatcatcatcatggcggtagcggcatgcaccgcattcgtaccatcgattcggacttcgggaagaaacgccagaagaagatggataaccacattagttccatgatctatgaaatcaaatttcacgagtttgtgctgttcattctcgaaaagaaaatgggtgcgacgcgtcgtacttttctgacagatttagcccgcaagaaagggttccgcgtcgagaatgaactgtcagacagcgttacccacatcgtggcagaaaataattcaggatctgacgtattggcttggctgaagacccacaagatggagaagacgacgcaatttgaactgctggatattagctggcttatcgaaagcatgaaagttggtaaaccggtggacaccaaggggaaataccagttgatggaatcgcgtgtcgatagtgcgaacccagatccgacagccggtaccaagaacattctgcctcctactacgaagaccatttctcagtatgcgtgtcaacgccgcaccaccctgaacaaccataatcaacgttttacggacgcactggaaattcttgcggaaaattacgagttcaaacgcaacgatgatacttgtctgacctttatgcgtgctatttccgtgctgaaatgccttccgtttgaggtagttagcctgaaagacacggaaggattgccctggatcggtgatgaagtcaaagggattatggaagaaatcatcgaggtcggtgaatcgctggaagtgcaggccgtgctcaatgatgagcgctatcaaagcttcaaactgtttaagagtgtctttggagtgggggtgaagacagcagacaaatggtaccgtatgggtctgcgcacgctcgaggatgttcgttccagcaagaccctgaagttgaccaagatgcagaaagcgggtctgtgctattatgaagatcttgctgatggcgttacgaaagccgaagctgacgcgatttctctgctggttcaggatgcagtctggactttcgacccggatgcgctggtggagattacgggtggatttcgtcgtgggaaaccttttggtcacgacgttgatctgcttatcacatctccgggagctgagaaagaacaagaagaccagctcctgcagaaagtgaccaatctgtggaagaaacaagggttgttgctgtacggtgatctgcgtgaaagtcgctttgaagatgggaaactcccatcccgcaagatcgatgccctggaccattttcagaaatgctttgctatcctcaaactttatcaccataaagtggacaaaagcaaatgggaaatgccgacgggttcgaacgaaagcgaggccaaaagttggaaagcaattcgcgtagatctggttgtttgtccctacgatcgttttgcgtttgcgttgttgggttggaccggaagccgcatgttcgaacgtgatctgcgccgctacgccacccacgagaagaagatgatgctggacaatcatgcgctgtatgacctgaccaagaaaatctttctcaaagctaaatcggaagaggaaattttcgcacatctggggcttgaatacctggaaccgtccgaacgtaacgca

SEQ ID NO: 356 - protein, 529 aa, synthetic construct
  REGION 1..529: note = Variant of terminal deoxynucleotidyltransferase
MHHHHHHGGSGMHRIRTIDSDFGKKRQKKMDNHISSMIYEIKFHEFVLFILEKKMGATRRTFLTDLARKKGFRVENELSDSVTHIVAENNSGSDVLAWLKTHKMEKTTQFELLDISWLIESMKVGKPVDTKGKYQLMESRVDSANPDPTAGTKNILPPTTKTISQYACQRRTTLNNHNQRFTDALEILAENYEFKRNDDTCLTFMRAISVLKCLPFEVVSLKDTEGLPWIGDEVKGIMEEIIEVGESLEVQAVLNDERYQSFKLFKSVFGVGVKTADKWYRMGLRTLEDVRSSKTLKLTKMQKAGLCYYEDLADGVTKAEADAISLLVQDAVWTFDPDALVEITGGFRRGKPFGHDVDLLITSPGAEKEQEDQLLQKVTNLWKKQGLLLYGDLRESRFEDGKLPSRKIDALDHFQKCFAILKLYHHKVDKSKWEMPTGSNESEAKSWKAIRVDLVVCPYDRFAFALLGWTGSRMFERDLRRYATHEKKMMLDNHALYDLTKKIFLKAKSEEEIFAHLGLEYLEPSERNA

SEQ ID NO: 357 - DNA, 1587 bp, synthetic construct
  misc_feature 1..1587: note = Variant of terminal deoxynucleotidyltransferase
  source 1..1587: mol_type = other DNA
atgcaccatcatcatcatcatggcggtagcggcatgcaccgcattcgtaccatcgattcggacttcgggaagaaacgccagaagaagatggataaccacattgagtccatgatctatgaaatcaaatttcacgagtttgtgctgttcattctcgaaaagaaaatgggtgcgacgcgtcgtacttttctgacagatttagcccgcaagaaagggttccgcgtcgagaatgaactgtcagacagcgttacccacatcgtggcagaaaataattcaggatctgacgtattggcttggctgaagacccacaagatggagaagacgacgcaatttgaactgctggatattagctggcttatcgaaagcatgaaagttggtaaaccggtggacaccaaggggaaataccagttgatggaatcgcgtgtcgatagtgcgaacccagatccgacagccggtaccctcaacattctgcctcctactacgaagaccatttctcagtatgcgtgtcaacgccgcaccaccctgaacaaccataatcaacgttttacggacgcactggaaattcttgcggaaaattacgagttcaaacgcaacgatgatacttgtctgacctttatgcgtgctatttccgtgctgaaatgccttccgtttgaggtagttagcctgaaagacacggaaggattgccctggatcggtgatgaagtcaaagggattatggaagaaatcatcgaggtcggtgaatcgctggaagtgcaggccgtgctcaatgatgagcgctatcaaagcttcaaactgtttaagagtgtctttggagtgggggtgaagacagcagacaaatggtaccgtatgggtctgcgcacgctcgaggatgttcgttccagcaagaccctgaagttgaccaagatgcagaaagcgggtctgtgctattatgaagatcttgctgatggcgttacgaaagccgaagctgacgcgatttctctgctggttcaggatgcagtctggactttcgacccggatgcgctggtggagattacgggtggatttcgtcgtgggaaaccttttggtcacgacgttgatctgcttatcacatctccgggagctgagaaagaacaagaagaccagctcctgcagaaagtgaccaatctgtggaagaaacaagggttgttgctgtacggtgatctgcgtgaaagtcgctttgaagatgggaaactcccatcccgcaagatcgatgccctggaccattttcagaaatgctttgctatcctcaaactttatcaccataaagtggacaaaagcaaatgggaaatgccgacgggttcgaacgaaagcgaggccaaaagttggaaagcaattcgcgtagatctggttgtttgtccctacgatcgttttgcgtttgcgttgttgggttggaccggaagccgcatgttcgaacgtgatctgcgccgctacgccacccacgagaagaagatgatgctggacaatcatgcgctgtatgacctgaccaagaaaatctttctcaaagctaaatcggaagaggaaattttcgcacatctggggcttgaatacctggaaccgtccgaacgtaacgca

SEQ ID NO: 358 - protein, 529 aa, synthetic construct
  REGION 1..529: note = Variant of terminal deoxynucleotidyltransferase
MHHHHHHGGSGMHRIRTIDSDFGKKRQKKMDNHIESMIYEIKFHEFVLFILEKKMGATRRTFLTDLARKKGFRVENELSDSVTHIVAENNSGSDVLAWLKTHKMEKTTQFELLDISWLIESMKVGKPVDTKGKYQLMESRVDSANPDPTAGTLNILPPTTKTISQYACQRRTTLNNHNQRFTDALEILAENYEFKRNDDTCLTFMRAISVLKCLPFEVVSLKDTEGLPWIGDEVKGIMEEIIEVGESLEVQAVLNDERYQSFKLFKSVFGVGVKTADKWYRMGLRTLEDVRSSKTLKLTKMQKAGLCYYEDLADGVTKAEADAISLLVQDAVWTFDPDALVEITGGFRRGKPFGHDVDLLITSPGAEKEQEDQLLQKVTNLWKKQGLLLYGDLRESRFEDGKLPSRKIDALDHFQKCFAILKLYHHKVDKSKWEMPTGSNESEAKSWKAIRVDLVVCPYDRFAFALLGWTGSRMFERDLRRYATHEKKMMLDNHALYDLTKKIFLKAKSEEEIFAHLGLEYLEPSERNA

SEQ ID NO: 359 - DNA, 1587 bp, synthetic construct
  misc_feature 1..1587: note = Variant of terminal deoxynucleotidyltransferase
  source 1..1587: mol_type = other DNA
atgcaccatcatcatcatcatggcggtagcggcatgcaccgcattcgtaccatcgattcggacttcgggaagaaacgccagaagaagatggataaccacattagttccatgatctatgaaatcaaatttcacgagtttgtgctgttcattctcgaaaagaaaatgggtgcgacgcgtcgtacttttctgacagatttagcccgcaagaaagggttccgcgtcgagaatgaactgtcagacagcgttacccacatcgtggcagaaaataattcaggatctgacgtattggcttggctgaagacccacaagatggagaagacgacgcaatttgaactgctggatattagctggcttatcgaaagcatgaaagttggtaaaccggtggacaccaaggggaaataccagttgatggaatcgcgtgtcgatagtgcgaacccagatccgacagccggtaccggtaacattctgcctcctactacgaagaccatttctcagtatgcgtgtcaacgccgcaccaccctgaacaaccataatcaacgttttacggacgcactggaaattcttgcggaaaattacgagttcaaacgcaacgatgatacttgtctgacctttatgcgtgctatttccgtgctgaaatgccttccgtttgaggtagttagcctgaaagacacggaaggattgccctggatcggtgatgaagtcaaagggattatggaagaaatcatcgaggtcggtgaatcgctggaagtgcaggccgtgctcaatgatgagcgctatcaaagcttcaaactgtttaagagtgtctttggagtgggggtgaagacagcagacaaatggtaccgtatgggtctgcgcacgctcgaggatgttcgttccagcaagaccctgaagttgaccaagatgcagaaagcgggtctgtgctattatgaagatcttgctgatggcgttacgaaagccgaagctgacgcgatttctctgctggttcaggatgcagtctggactttcgacccggatgcgctggtggagattacgggtggatttcgtcgtgggaaaccttttggtcacgacgttgatctgcttatcacatctccgggagctgagaaagaacaagaagaccagctcctgcagaaagtgaccaatctgtggaagaaacaagggttgttgctgtacggtgatctgcgtgaaagtcgctttgaagatgggaaactcccatcccgcaagatcgatgccctggaccattttcagaaatgctttgctatcctcaaactttatcaccataaagtggacaaaagcaaatgggaaatgccgacgggttcgaacgaaagcgaggccaaaagttggaaagcaattcgcgtagatctggttgtttgtccctacgatcgttttgcgtttgcgttgttgggttggaccggaagccgcatgttcgaacgtgatctgcgccgctacgccacccacgagaagaagatgatgctggacaatcatgcgctgtatgacctgaccaagaaaatctttctcaaagctaaatcggaagaggaaattttcgcacatctggggcttgaatacctggaaccgtccgaacgtaacgca

SEQ ID NO: 360 - protein, 529 aa, synthetic construct
  REGION 1..529: note = Variant of terminal deoxynucleotidyltransferase
MHHHHHHGGSGMHRIRTIDSDFGKKRQKKMDNHISSMIYEIKFHEFVLFILEKKMGATRRTFLTDLARKKGFRVENELSDSVTHIVAENNSGSDVLAWLKTHKMEKTTQFELLDISWLIESMKVGKPVDTKGKYQLMESRVDSANPDPTAGTGNILPPTTKTISQYACQRRTTLNNHNQRFTDALEILAENYEFKRNDDTCLTFMRAISVLKCLPFEVVSLKDTEGLPWIGDEVKGIMEEIIEVGESLEVQAVLNDERYQSFKLFKSVFGVGVKTADKWYRMGLRTLEDVRSSKTLKLTKMQKAGLCYYEDLADGVTKAEADAISLLVQDAVWTFDPDALVEITGGFRRGKPFGHDVDLLITSPGAEKEQEDQLLQKVTNLWKKQGLLLYGDLRESRFEDGKLPSRKIDALDHFQKCFAILKLYHHKVDKSKWEMPTGSNESEAKSWKAIRVDLVVCPYDRFAFALLGWTGSRMFERDLRRYATHEKKMMLDNHALYDLTKKIFLKAKSEEEIFAHLGLEYLEPSERNA

SEQ ID NO: 361 - DNA, 1587 bp, synthetic construct
  misc_feature 1..1587: note = Variant of terminal deoxynucleotidyltransferase
  source 1..1587: mol_type = other DNA
atgcaccatcatcatcatcatggcggtagcggcatgcaccgcattcgtaccatcgattcggacttcgggaagaaacgccagaagaagatggataaccacattagttccatgatctatgaaatcaaatttcacgagtttgtgctgttcattctcgaaaagaaaatgggtgcgacgcgtcgtacttttctgacagatttagcccgcaagaaagggttccgcgtcgagaatgaactgtcagacagcgttacccacatcgtggcagaaaataattcaggatctgacgtattggcttggctgaagacccacaagatggagaagacgacgcaatttgaactgctggatattagctggcttatcgaaagcatgaaagttggtaaaccggtggacaccaaggggaaataccagttgatggaatcgcgtgtcgatagtgcgaacccagatccgacagccggtaccccgaacattctgcctcctactacgaagaccatttctcagtatgcgtgtcaacgccgcaccaccctgaacaaccataatcaacgttttacggacgcactggaaattcttgcggaaaattacgagttcaaacgcaacgatgatacttgtctgacctttatgcgtgctatttccgtgctgaaatgccttccgtttgaggtagttagcctgaaagacacggaaggattgccctggatcggtgatgaagtcaaagggattatggaagaaatcatcgaggtcggtgaatcgctggaagtgcaggccgtgctcaatgatgagcgctatcaaagcttcaaactgtttaagagtgtctttggagtgggggtgaagacagcagacaaatggtaccgtatgggtctgcgcacgctcgaggatgttcgttccagcaagaccctgaagttgaccaagatgcagaaagcgggtctgtgctattatgaagatcttgctgatggcgttacgaaagccgaagctgacgcgatttctctgctggttcaggatgcagtctggactttcgacccggatgcgctggtggagattacgggtggatttcgtcgtgggaaaccttttggtcacgacgttgatctgcttatcacatctccgggagctgagaaagaacaagaagaccagctcctgcagaaagtgaccaatctgtggaagaaacaagggttgttgctgtacggtgatctgcgtgaaagtcgctttgaagatgggaaactcccatcccgcaagatcgatgccctggaccattttcagaaatgctttgctatcctcaaactttatcaccataaagtggacaaaagcaaatgggaaatgccgacgggttcgaacgaaagcgaggccaaaagttggaaagcaattcgcgtagatctggttgtttgtccctacgatcgttttgcgtttgcgttgttgggttggaccggaagccgcatgttcgaacgtgatctgcgccgctacgccacccacgagaagaagatgatgctggacaatcatgcgctgtatgacctgaccaagaaaatctttctcaaagctaaatcggaagaggaaattttcgcacatctggggcttgaatacctggaaccgtccgaacgtaacgca

SEQ ID NO: 362 - protein, 529 aa, synthetic construct
  REGION 1..529: note = Variant of terminal deoxynucleotidyltransferase
MHHHHHHGGSGMHRIRTIDSDFGKKRQKKMDNHISSMIYEIKFHEFVLFILEKKMGATRRTFLTDLARKKGFRVENELSDSVTHIVAENNSGSDVLAWLKTHKMEKTTQFELLDISWLIESMKVGKPVDTKGKYQLMESRVDSANPDPTAGTPNILPPTTKTISQYACQRRTTLNNHNQRFTDALEILAENYEFKRNDDTCLTFMRAISVLKCLPFEVVSLKDTEGLPWIGDEVKGIMEEIIEVGESLEVQAVLNDERYQSFKLFKSVFGVGVKTADKWYRMGLRTLEDVRSSKTLKLTKMQKAGLCYYEDLADGVTKAEADAISLLVQDAVWTFDPDALVEITGGFRRGKPFGHDVDLLITSPGAEKEQEDQLLQKVTNLWKKQGLLLYGDLRESRFEDGKLPSRKIDALDHFQKCFAILKLYHHKVDKSKWEMPTGSNESEAKSWKAIRVDLVVCPYDRFAFALLGWTGSRMFERDLRRYATHEKKMMLDNHALYDLTKKIFLKAKSEEEIFAHLGLEYLEPSERNA

SEQ ID NO: 363 - DNA, 1587 bp, synthetic construct
  misc_feature 1..1587: note = Variant of terminal deoxynucleotidyltransferase
  source 1..1587: mol_type = other DNA
atgcaccatcatcatcatcatggcggtagcggcatgcaccgcattcgtaccatcgattcggacttcgggaagaaacgccagaagaagatggataaccacattagttccatgatctatgaaatcaaatttcacgagtttgtgctgttcattctcgaaaagaaaatgggtgcgacgcgtcgtacttttctgacagatttagcccgcaagaaagggttccgcgtcgagaatgaactgtcagacagcgttacccacatcgtggcagaaaataattcaggatctgacgtattggcttggctgaagacccacaagatggagaagacgacgcaatttgaactgctggatattagctggcttatcgaaagcatgaaagttggtaaaccggtggacaccaaggggaaataccagttgatggaatcgcgtgtcgatagtgcgaacccagatccgacagccggtaccctcaacattctgcctcctgatacgaagaccatttctcagtatgcgtgtcaacgccgcaccaccctgaacaaccataatcaacgttttacggacgcactggaaattcttgcggaaaattacgagttcaaacgcaacgatgatacttgtctgacctttatgcgtgctatttccgtgctgaaatgccttccgtttgaggtagttagcctgaaagacacggaaggattgccctggatcggtgatgaagtcaaagggattatggaagaaatcatcgaggtcggtgaatcgctggaagtgcaggccgtgctcaatgatgagcgctatcaaagcttcaaactgtttaagagtgtctttggagtgggggtgaagacagcagacaaatggtaccgtatgggtctgcgcacgctcgaggatgttcgttccagcaagaccctgaagttgaccaagatgcagaaagcgggtctgtgctattatgaagatcttgctgatggcgttacgaaagccgaagctgacgcgatttctctgctggttcaggatgcagtctggactttcgacccggatgcgctggtggagattacgggtggatttcgtcgtgggaaaccttttggtcacgacgttgatctgcttatcacatctccgggagctgagaaagaacaagaagaccagctcctgcagaaagtgaccaatctgtggaagaaacaagggttgttgctgtacggtgatctgcgtgaaagtcgctttgaagatgggaaactcccatcccgcaagatcgatgccctggaccattttcagaaatgctttgctatcctcaaactttatcaccataaagtggacaaaagcaaatgggaaatgccgacgggttcgaacgaaagcgaggccaaaagttggaaagcaattcgcgtagatctggttgtttgtccctacgatcgttttgcgtttgcgttgttgggttggaccggaagccgcatgttcgaacgtgatctgcgccgctacgccacccacgagaagaagatgatgctggacaatcatgcgctgtatgacctgaccaagaaaatctttctcaaagctaaatcggaagaggaaattttcgcacatctggggcttgaatacctggaaccgtccgaacgtaacgca

SEQ ID NO: 364 - protein, 529 aa, synthetic construct
  REGION 1..529: note = Variant of terminal deoxynucleotidyltransferase
MHHHHHHGGSGMHRIRTIDSDFGKKRQKKMDNHISSMIYEIKFHEFVLFILEKKMGATRRTFLTDLARKKGFRVENELSDSVTHIVAENNSGSDVLAWLKTHKMEKTTQFELLDISWLIESMKVGKPVDTKGKYQLMESRVDSANPDPTAGTLNILPPDTKTISQYACQRRTTLNNHNQRFTDALEILAENYEFKRNDDTCLTFMRAISVLKCLPFEVVSLKDTEGLPWIGDEVKGIMEEIIEVGESLEVQAVLNDERYQSFKLFKSVFGVGVKTADKWYRMGLRTLEDVRSSKTLKLTKMQKAGLCYYEDLADGVTKAEADAISLLVQDAVWTFDPDALVEITGGFRRGKPFGHDVDLLITSPGAEKEQEDQLLQKVTNLWKKQGLLLYGDLRESRFEDGKLPSRKIDALDHFQKCFAILKLYHHKVDKSKWEMPTGSNESEAKSWKAIRVDLVVCPYDRFAFALLGWTGSRMFERDLRRYATHEKKMMLDNHALYDLTKKIFLKAKSEEEIFAHLGLEYLEPSERNA

SEQ ID NO: 365 - DNA, 1587 bp, synthetic construct
  misc_feature 1..1587: note = Variant of terminal deoxynucleotidyltransferase
  source 1..1587: mol_type = other DNA
atgcaccatcatcatcatcatggcggtagcggcatgcaccgcattcgtaccatcgattcggacttcgggaagaaacgccagaagaagatggataaccacattagttccggtatctatgaaatcaaatttcacgagtttgtgctgttcattctcgaaaagaaaatgggtgcgacgcgtcgtacttttctgacagatttagcccgcaagaaagggttccgcgtcgagaatgaactgtcagacagcgttacccacatcgtggcagaaaataattcaggatctgacgtattggcttggctgaagacccacaagatggagaagacgacgcaatttgaactgctggatattagctggcttatcgaaagcatgaaagttggtaaaccggtggacaccaaggggaaataccagttgatggaatcgcgtgtcgatagtgcgaacccagatccgacagccggtaccctcaacattctgcctcctactacgaagaccatttctcagtatgcgtgtcaacgccgcaccaccctgaacaaccataatcaacgttttacggacgcactggaaattcttgcggaaaattacgagttcaaacgcaacgatgatacttgtctgacctttatgcgtgctatttccgtgctgaaatgccttccgtttgaggtagttagcctgaaagacacggaaggattgccctggatcggtgatgaagtcaaagggattatggaagaaatcatcgaggtcggtgaatcgctggaagtgcaggccgtgctcaatgatgagcgctatcaaagcttcaaactgtttaagagtgtctttggagtgggggtgaagacagcagacaaatggtaccgtatgggtctgcgcacgctcgaggatgttcgttccagcaagaccctgaagttgaccaagatgcagaaagcgggtctgtgctattatgaagatcttgctgatggcgttacgaaagccgaagctgacgcgatttctctgctggttcaggatgcagtctggactttcgacccggatgcgctggtggagattacgggtggatttcgtcgtgggaaaccttttggtcacgacgttgatctgcttatcacatctccgggagctgagaaagaacaagaagaccagctcctgcagaaagtgaccaatctgtggaagaaacaagggttgttgctgtacggtgatctgcgtgaaagtcgctttgaagatgggaaactcccatcccgcaagatcgatgccctggaccattttcagaaatgctttgctatcctcaaactttatcaccataaagtggacaaaagcaaatgggaaatgccgacgggttcgaacgaaagcgaggccaaaagttggaaagcaattcgcgtagatctggttgtttgtccctacgatcgttttgcgtttgcgttgttgggttggaccggaagccgcatgttcgaacgtgatctgcgccgctacgccacccacgagaagaagatgatgctggacaatcatgcgctgtatgacctgaccaagaaaatctttctcaaagctaaatcggaagaggaaattttcgcacatctggggcttgaatacctggaaccgtccgaacgtaacgca

SEQ ID NO: 366 - protein, 529 aa, synthetic construct
  REGION 1..529: note = Variant of terminal deoxynucleotidyltransferase
MHHHHHHGGSGMHRIRTIDSDFGKKRQKKMDNHISSGIYEIKFHEFVLFILEKKMGATRRTFLTDLARKKGFRVENELSDSVTHIVAENNSGSDVLAWLKTHKMEKTTQFELLDISWLIESMKVGKPVDTKGKYQLMESRVDSANPDPTAGTLNILPPTTKTISQYACQRRTTLNNHNQRFTDALEILAENYEFKRNDDTCLTFMRAISVLKCLPFEVVSLKDTEGLPWIGDEVKGIMEEIIEVGESLEVQAVLNDERYQSFKLFKSVFGVGVKTADKWYRMGLRTLEDVRSSKTLKLTKMQKAGLCYYEDLADGVTKAEADAISLLVQDAVWTFDPDALVEITGGFRRGKPFGHDVDLLITSPGAEKEQEDQLLQKVTNLWKKQGLLLYGDLRESRFEDGKLPSRKIDALDHFQKCFAILKLYHHKVDKSKWEMPTGSNESEAKSWKAIRVDLVVCPYDRFAFALLGWTGSRMFERDLRRYATHEKKMMLDNHALYDLTKKIFLKAKSEEEIFAHLGLEYLEPSERNA

SEQ ID NO: 367 - DNA, 1587 bp, synthetic construct
  misc_feature 1..1587: note = Variant of terminal deoxynucleotidyltransferase
  source 1..1587: mol_type = other DNA
atgcaccatcatcatcatcatggcggtagcggcatgcaccgcattcgtaccatcgattcggacttcgggaagaaacgccagaagaagatggataaccacattagttccatgatctatgaaatcaaatttcacgagtttgtgctgttcattctcgaaaagaaaatgggtgcgacgcgtcgtacttttctgacagatttagcccgcaagaaagggttccgcgtcgagaatgaactgtcagacagcgttacccacatcgtggcagaaaataattcagtttctgacgtattggcttggctgaagacccacaagatggagaagacgacgcaatttgaactgctggatattagctggcttatcgaaagcatgaaagttggtaaaccggtggacaccaaggggaaataccagttgatggaatcgcgtgtcgatagtgcgaacccagatccgacagccggtaccctcaacattctgcctcctactacgaagaccatttctcagtatgcgtgtcaacgccgcaccaccctgaacaaccataatcaacgttttacggacgcactggaaattcttgcggaaaattacgagttcaaacgcaacgatgatacttgtctgacctttatgcgtgctatttccgtgctgaaatgccttccgtttgaggtagttagcctgaaagacacggaaggattgccctggatcggtgatgaagtcaaagggattatggaagaaatcatcgaggtcggtgaatcgctggaagtgcaggccgtgctcaatgatgagcgctatcaaagcttcaaactgtttaagagtgtctttggagtgggggtgaagacagcagacaaatggtaccgtatgggtctgcgcacgctcgaggatgttcgttccagcaagaccctgaagttgaccaagatgcagaaagcgggtctgtgctattatgaagatcttgctgatggcgttacgaaagccgaagctgacgcgatttctctgctggttcaggatgcagtctggactttcgacccggatgcgctggtggagattacgggtggatttcgtcgtgggaaaccttttggtcacgacgttgatctgcttatcacatctccgggagctgagaaagaacaagaagaccagctcctgcagaaagtgaccaatctgtggaagaaacaagggttgttgctgtacggtgatctgcgtgaaagtcgctttgaagatgggaaactcccatcccgcaagatcgatgccctggaccattttcagaaatgctttgctatcctcaaactttatcaccataaagtggacaaaagcaaatgggaaatgccgacgggttcgaacgaaagcgaggccaaaagttggaaagcaattcgcgtagatctggttgtttgtccctacgatcgttttgcgtttgcgttgttgggttggaccggaagccgcatgttcgaacgtgatctgcgccgctacgccacccacgagaagaagatgatgctggacaatcatgcgctgtatgacctgaccaagaaaatctttctcaaagctaaatcggaagaggaaattttcgcacatctggggcttgaatacctggaaccgtccgaacgtaacgca

SEQ ID NO: 368 - protein, 529 aa, synthetic construct
  REGION 1..529: note = Variant of terminal deoxynucleotidyltransferase
MHHHHHHGGSGMHRIRTIDSDFGKKRQKKMDNHISSMIYEIKFHEFVLFILEKKMGATRRTFLTDLARKKGFRVENELSDSVTHIVAENNSVSDVLAWLKTHKMEKTTQFELLDISWLIESMKVGKPVDTKGKYQLMESRVDSANPDPTAGTLNILPPTTKTISQYACQRRTTLNNHNQRFTDALEILAENYEFKRNDDTCLTFMRAISVLKCLPFEVVSLKDTEGLPWIGDEVKGIMEEIIEVGESLEVQAVLNDERYQSFKLFKSVFGVGVKTADKWYRMGLRTLEDVRSSKTLKLTKMQKAGLCYYEDLADGVTKAEADAISLLVQDAVWTFDPDALVEITGGFRRGKPFGHDVDLLITSPGAEKEQEDQLLQKVTNLWKKQGLLLYGDLRESRFEDGKLPSRKIDALDHFQKCFAILKLYHHKVDKSKWEMPTGSNESEAKSWKAIRVDLVVCPYDRFAFALLGWTGSRMFERDLRRYATHEKKMMLDNHALYDLTKKIFLKAKSEEEIFAHLGLEYLEPSERNA

SEQ ID NO: 369 - DNA, 1587 bp, synthetic construct
  misc_feature 1..1587: note = Variant of terminal deoxynucleotidyltransferase
  source 1..1587: mol_type = other DNA
atgcaccatcatcatcatcatggcggtagcggcatgcaccgcattcgtaccgatgattcggacttcgggaagaaacgccagaagaagatggataaccacattagttccatgatctatgaaatcaaatttcacgagtttgtgctgttcattctcgaaaagaaaatgggtgcgacgcgtcgtacttttctgacagatttagcccgcaagaaagggttccgcgtcgagaatgaactgtcagacagcgttacccacatcgtggcagaaaataattcaggatctgacgtattggcttggctgaagacccacaagatggagaagacgacgcaatttgaactgctggatattagctggcttatcgaaagcatgaaagttggtaaaccggtggacaccaaggggaaataccagttgatggaatcgcgtgtcgatagtgcgaacccagatccgacagccggtaccctcaacattctgcctcctactacgaagaccatttctcagtatgcgtgtcaacgccgcaccaccctgaacaaccataatcaacgttttacggacgcactggaaattcttgcggaaaattacgagttcaaacgcaacgatgatacttgtctgacctttatgcgtgctatttccgtgctgaaatgccttccgtttgaggtagttagcctgaaagacacggaaggattgccctggatcggtgatgaagtcaaagggattatggaagaaatcatcgaggtcggtgaatcgctggaagtgcaggccgtgctcaatgatgagcgctatcaaagcttcaaactgtttaagagtgtctttggagtgggggtgaagacagcagacaaatggtaccgtatgggtctgcgcacgctcgaggatgttcgttccagcaagaccctgaagttgaccaagatgcagaaagcgggtctgtgctattatgaagatcttgctgatggcgttacgaaagccgaagctgacgcgatttctctgctggttcaggatgcagtctggactttcgacccggatgcgctggtggagattacgggtggatttcgtcgtgggaaaccttttggtcacgacgttgatctgcttatcacatctccgggagctgagaaagaacaagaagaccagctcctgcagaaagtgaccaatctgtggaagaaacaagggttgttgctgtacggtgatctgcgtgaaagtcgctttgaagatgggaaactcccatcccgcaagatcgatgccctggaccattttcagaaatgctttgctatcctcaaactttatcaccataaagtggacaaaagcaaatgggaaatgccgacgggttcgaacgaaagcgaggccaaaagttggaaagcaattcgcgtagatctggttgtttgtccctacgatcgttttgcgtttgcgttgttgggttggaccggaagccgcatgttcgaacgtgatctgcgccgctacgccacccacgagaagaagatgatgctggacaatcatgcgctgtatgacctgaccaagaaaatctttctcaaagctaaatcggaagaggaaattttcgcacatctggggcttgaatacctggaaccgtccgaacgtaacgca

SEQ ID NO: 370 - protein, 529 aa, synthetic construct
  REGION 1..529: note = Variant of terminal deoxynucleotidyltransferase
MHHHHHHGGSGMHRIRTDDSDFGKKRQKKMDNHISSMIYEIKFHEFVLFILEKKMGATRRTFLTDLARKKGFRVENELSDSVTHIVAENNSGSDVLAWLKTHKMEKTTQFELLDISWLIESMKVGKPVDTKGKYQLMESRVDSANPDPTAGTLNILPPTTKTISQYACQRRTTLNNHNQRFTDALEILAENYEFKRNDDTCLTFMRAISVLKCLPFEVVSLKDTEGLPWIGDEVKGIMEEIIEVGESLEVQAVLNDERYQSFKLFKSVFGVGVKTADKWYRMGLRTLEDVRSSKTLKLTKMQKAGLCYYEDLADGVTKAEADAISLLVQDAVWTFDPDALVEITGGFRRGKPFGHDVDLLITSPGAEKEQEDQLLQKVTNLWKKQGLLLYGDLRESRFEDGKLPSRKIDALDHFQKCFAILKLYHHKVDKSKWEMPTGSNESEAKSWKAIRVDLVVCPYDRFAFALLGWTGSRMFERDLRRYATHEKKMMLDNHALYDLTKKIFLKAKSEEEIFAHLGLEYLEPSERNA

SEQ ID NO: 371 - DNA, 1587 bp, synthetic construct
  misc_feature 1..1587: note = Variant of terminal deoxynucleotidyltransferase
  source 1..1587: mol_type = other DNA
atgcaccatcatcatcatcatggcggtagcggcatgcaccgcattcgtaccatcgattcggacttcgggaagaaacgccagaagaagatggataaccacattagttccatgatctatgaaatcaaatttcacgagtttgtgctgttcattctcgaaaagaaaatgggtgcgacgcgtcgtacttttctgacagatttagcccgcaagaaagggttccgcgtcgagaatgaactgtcagacagcgttacccacatcgtggcagaaaataattcaggatctgacgtattggcttggctgaagacccacaagatggagcatacgacgcaatttgaactgctggatattagctggcttatcgaaagcatgaaagttggtaaaccggtggacaccaaggggaaataccagttgatggaatcgcgtgtcgatagtgcgaacccagatccgacagccggtaccctcaacattctgcctcctactacgaagaccatttctcagtatgcgtgtcaacgccgcaccaccctgaacaaccataatcaacgttttacggacgcactggaaattcttgcggaaaattacgagttcaaacgcaacgatgatacttgtctgacctttatgcgtgctatttccgtgctgaaatgccttccgtttgaggtagttagcctgaaagacacggaaggattgccctggatcggtgatgaagtcaaagggattatggaagaaatcatcgaggtcggtgaatcgctggaagtgcaggccgtgctcaatgatgagcgctatcaaagcttcaaactgtttaagagtgtctttggagtgggggtgaagacagcagacaaatggtaccgtatgggtctgcgcacgctcgaggatgttcgttccagcaagaccctgaagttgaccaagatgcagaaagcgggtctgtgctattatgaagatcttgctgatggcgttacgaaagccgaagctgacgcgatttctctgctggttcaggatgcagtctggactttcgacccggatgcgctggtggagattacgggtggatttcgtcgtgggaaaccttttggtcacgacgttgatctgcttatcacatctccgggagctgagaaagaacaagaagaccagctcctgcagaaagtgaccaatctgtggaagaaacaagggttgttgctgtacggtgatctgcgtgaaagtcgctttgaagatgggaaactcccatcccgcaagatcgatgccctggaccattttcagaaatgctttgctatcctcaaactttatcaccataaagtggacaaaagcaaatgggaaatgccgacgggttcgaacgaaagcgaggccaaaagttggaaagcaattcgcgtagatctggttgtttgtccctacgatcgttttgcgtttgcgttgttgggttggaccggaagccgcatgttcgaacgtgatctgcgccgctacgccacccacgagaagaagatgatgctggacaatcatgcgctgtatgacctgaccaagaaaatctttctcaaagctaaatcggaagaggaaattttcgcacatctggggcttgaatacctggaaccgtccgaacgtaacgca

SEQ ID NO: 372 - protein, 529 aa, synthetic construct
  REGION 1..529: note = Variant of terminal deoxynucleotidyltransferase
MHHHHHHGGSGMHRIRTIDSDFGKKRQKKMDNHISSMIYEIKFHEFVLFILEKKMGATRRTFLTDLARKKGFRVENELSDSVTHIVAENNSGSDVLAWLKTHKMEHTTQFELLDISWLIESMKVGKPVDTKGKYQLMESRVDSANPDPTAGTLNILPPTTKTISQYACQRRTTLNNHNQRFTDALEILAENYEFKRNDDTCLTFMRAISVLKCLPFEVVSLKDTEGLPWIGDEVKGIMEEIIEVGESLEVQAVLNDERYQSFKLFKSVFGVGVKTADKWYRMGLRTLEDVRSSKTLKLTKMQKAGLCYYEDLADGVTKAEADAISLLVQDAVWTFDPDALVEITGGFRRGKPFGHDVDLLITSPGAEKEQEDQLLQKVTNLWKKQGLLLYGDLRESRFEDGKLPSRKIDALDHFQKCFAILKLYHHKVDKSKWEMPTGSNESEAKSWKAIRVDLVVCPYDRFAFALLGWTGSRMFERDLRRYATHEKKMMLDNHALYDLTKKIFLKAKSEEEIFAHLGLEYLEPSERNA

SEQ ID NO: 373 - DNA, 1587 bp, synthetic construct
  misc_feature 1..1587: note = Variant of terminal deoxynucleotidyltransferase
  source 1..1587: mol_type = other DNA
atgcaccatcatcatcatcatggcggtagcggcatgcaccgcattcgtaccatcgattcggacttcgggaagaaacgccagaagaagatggataaccacattagttccatgatctatgaaatcaaatttcacgagtttgtgctgttcattctcgaaaagaaaatgggtgcgacgcgtcgtacttttctgacagatttagcccgcaagaaagggttccgcgtcgagaatgaactgtcagacagcgttacccacatcgtggcagaaaataattcaggatctgacgtattggcttggctgaagacccacaagatggagaagacgacgcaatttgaactgctggatattagctggcttatcgaaagcatgaaagttggtaaaccggtggacaccaaggggaaataccagttgatggaatcgcgtagggatagtgcgaacccagatccgacagccggtaccctcaacattctgcctcctactacgaagaccatttctcagtatgcgtgtcaacgccgcaccaccctgaacaaccataatcaacgttttacggacgcactggaaattcttgcggaaaattacgagttcaaacgcaacgatgatacttgtctgacctttatgcgtgctatttccgtgctgaaatgccttccgtttgaggtagttagcctgaaagacacggaaggattgccctggatcggtgatgaagtcaaagggattatggaagaaatcatcgaggtcggtgaatcgctggaagtgcaggccgtgctcaatgatgagcgctatcaaagcttcaaactgtttaagagtgtctttggagtgggggtgaagacagcagacaaatggtaccgtatgggtctgcgcacgctcgaggatgttcgttccagcaagaccctgaagttgaccaagatgcagaaagcgggtctgtgctattatgaagatcttgctgatggcgttacgaaagccgaagctgacgcgatttctctgctggttcaggatgcagtctggactttcgacccggatgcgctggtggagattacgggtggatttcgtcgtgggaaaccttttggtcacgacgttgatctgcttatcacatctccgggagctgagaaagaacaagaagaccagctcctgcagaaagtgaccaatctgtggaagaaacaagggttgttgctgtacggtgatctgcgtgaaagtcgctttgaagatgggaaactcccatcccgcaagatcgatgccctggaccattttcagaaatgctttgctatcctcaaactttatcaccataaagtggacaaaagcaaatgggaaatgccgacgggttcgaacgaaagcgaggccaaaagttggaaagcaattcgcgtagatctggttgtttgtccctacgatcgttttgcgtttgcgttgttgggttggaccggaagccgcatgttcgaacgtgatctgcgccgctacgccacccacgagaagaagatgatgctggacaatcatgcgctgtatgacctgaccaagaaaatctttctcaaagctaaatcggaagaggaaattttcgcacatctggggcttgaatacctggaaccgtccgaacgtaacgca

SEQ ID NO: 374 - protein, 529 aa, synthetic construct
  REGION 1..529: note = Variant of terminal deoxynucleotidyltransferase
MHHHHHHGGSGMHRIRTIDSDFGKKRQKKMDNHISSMIYEIKFHEFVLFILEKKMGATRRTFLTDLARKKGFRVENELSDSVTHIVAENNSGSDVLAWLKTHKMEKTTQFELLDISWLIESMKVGKPVDTKGKYQLMESRRDSANPDPTAGTLNILPPTTKTISQYACQRRTTLNNHNQRFTDALEILAENYEFKRNDDTCLTFMRAISVLKCLPFEVVSLKDTEGLPWIGDEVKGIMEEIIEVGESLEVQAVLNDERYQSFKLFKSVFGVGVKTADKWYRMGLRTLEDVRSSKTLKLTKMQKAGLCYYEDLADGVTKAEADAISLLVQDAVWTFDPDALVEITGGFRRGKPFGHDVDLLITSPGAEKEQEDQLLQKVTNLWKKQGLLLYGDLRESRFEDGKLPSRKIDALDHFQKCFAILKLYHHKVDKSKWEMPTGSNESEAKSWKAIRVDLVVCPYDRFAFALLGWTGSRMFERDLRRYATHEKKMMLDNHALYDLTKKIFLKAKSEEEIFAHLGLEYLEPSERNA

SEQ ID NO: 375 - DNA, 1587 bp, synthetic construct
  misc_feature 1..1587: note = Variant of terminal deoxynucleotidyltransferase
  source 1..1587: mol_type = other DNA
atgcaccatcatcatcatcatggcggtagcggcatgcaccgcattcgtaccatcgattcggacttcgggaagaaacgccagaagaagatggataaccacattagttccgttatctatgaaatcaaatttcacgagtttgtgctgttcattctcgaaaagaaaatgggtgcgacgcgtcgtacttttctgacagatttagcccgcaagaaagggttccgcgtcgagaatgaactgtcagacagcgttacccacatcgtggcagaaaataattcaggatctgacgtattggcttggctgaagacccacaagatggagaagacgacgcaatttgaactgctggatattagctggcttatcgaaagcatgaaagttggtaaaccggtggacaccaaggggaaataccagttgatggaatcgcgtgtcgatagtgcgaacccagatccgacagccggtaccctcaacattctgcctcctactacgaagaccatttctcagtatgcgtgtcaacgccgcaccaccctgaacaaccataatcaacgttttacggacgcactggaaattcttgcggaaaattacgagttcaaacgcaacgatgatacttgtctgacctttatgcgtgctatttccgtgctgaaatgccttccgtttgaggtagttagcctgaaagacacggaaggattgccctggatcggtgatgaagtcaaagggattatggaagaaatcatcgaggtcggtgaatcgctggaagtgcaggccgtgctcaatgatgagcgctatcaaagcttcaaactgtttaagagtgtctttggagtgggggtgaagacagcagacaaatggtaccgtatgggtctgcgcacgctcgaggatgttcgttccagcaagaccctgaagttgaccaagatgcagaaagcgggtctgtgctattatgaagatcttgctgatggcgttacgaaagccgaagctgacgcgatttctctgctggttcaggatgcagtctggactttcgacccggatgcgctggtggagattacgggtggatttcgtcgtgggaaaccttttggtcacgacgttgatctgcttatcacatctccgggagctgagaaagaacaagaagaccagctcctgcagaaagtgaccaatctgtggaagaaacaagggttgttgctgtacggtgatctgcgtgaaagtcgctttgaagatgggaaactcccatcccgcaagatcgatgccctggaccattttcagaaatgctttgctatcctcaaactttatcaccataaagtggacaaaagcaaatgggaaatgccgacgggttcgaacgaaagcgaggccaaaagttggaaagcaattcgcgtagatctggttgtttgtccctacgatcgttttgcgtttgcgttgttgggttggaccggaagccgcatgttcgaacgtgatctgcgccgctacgccacccacgagaagaagatgatgctggacaatcatgcgctgtatgacctgaccaagaaaatctttctcaaagctaaatcggaagaggaaattttcgcacatctggggcttgaatacctggaaccgtccgaacgtaacgca

SEQ ID NO: 376 - protein, 529 aa, synthetic construct
  REGION 1..529: note = Variant of terminal deoxynucleotidyltransferase
MHHHHHHGGSGMHRIRTIDSDFGKKRQKKMDNHISSVIYEIKFHEFVLFILEKKMGATRRTFLTDLARKKGFRVENELSDSVTHIVAENNSGSDVLAWLKTHKMEKTTQFELLDISWLIESMKVGKPVDTKGKYQLMESRVDSANPDPTAGTLNILPPTTKTISQYACQRRTTLNNHNQRFTDALEILAENYEFKRNDDTCLTFMRAISVLKCLPFEVVSLKDTEGLPWIGDEVKGIMEEIIEVGESLEVQAVLNDERYQSFKLFKSVFGVGVKTADKWYRMGLRTLEDVRSSKTLKLTKMQKAGLCYYEDLADGVTKAEADAISLLVQDAVWTFDPDALVEITGGFRRGKPFGHDVDLLITSPGAEKEQEDQLLQKVTNLWKKQGLLLYGDLRESRFEDGKLPSRKIDALDHFQKCFAILKLYHHKVDKSKWEMPTGSNESEAKSWKAIRVDLVVCPYDRFAFALLGWTGSRMFERDLRRYATHEKKMMLDNHALYDLTKKIFLKAKSEEEIFAHLGLEYLEPSERNA

SEQ ID NO: 377 - DNA, 1587 bp, synthetic construct
  misc_feature 1..1587: note = Variant of terminal deoxynucleotidyltransferase
  source 1..1587: mol_type = other DNA
atgcaccatcatcatcatcatggcggtagcggcatgcaccgcattcgtaccatcgattcggacttcgggaagaaacgccagaagaagatggataaccacattagttccatgatctatgaaatcaaatttcacgagtttgtgctgttcattctcgaaaagaaaatgggtgcgacgcgtcgtacttttctgacagatttagcccgcaagaaagggttccgcgtcgagaatgaactgtcagacagcgttacccacatcgtggcagaaaataattcaggatctgacgtattggcttggctgaagacccacaagatggagaagacgacgcaatttgaactgctggatattagctggcttatcgaaagcatgaaagttggtaaaccggtggacaccaagggggggtaccagttgatggaatcgcgtgtcgatagtgcgaacccagatccgacagccggtaccctcaacattctgcctcctactacgaagaccatttctcagtatgcgtgtcaacgccgcaccaccctgaacaaccataatcaacgttttacggacgcactggaaattcttgcggaaaattacgagttcaaacgcaacgatgatacttgtctgacctttatgcgtgctatttccgtgctgaaatgccttccgtttgaggtagttagcctgaaagacacggaaggattgccctggatcggtgatgaagtcaaagggattatggaagaaatcatcgaggtcggtgaatcgctggaagtgcaggccgtgctcaatgatgagcgctatcaaagcttcaaactgtttaagagtgtctttggagtgggggtgaagacagcagacaaatggtaccgtatgggtctgcgcacgctcgaggatgttcgttccagcaagaccctgaagttgaccaagatgcagaaagcgggtctgtgctattatgaagatcttgctgatggcgttacgaaagccgaagctgacgcgatttctctgctggttcaggatgcagtctggactttcgacccggatgcgctggtggagattacgggtggatttcgtcgtgggaaaccttttggtcacgacgttgatctgcttatcacatctccgggagctgagaaagaacaagaagaccagctcctgcagaaagtgaccaatctgtggaagaaacaagggttgttgctgtacggtgatctgcgtgaaagtcgctttgaagatgggaaactcccatcccgcaagatcgatgccctggaccattttcagaaatgctttgctatcctcaaactttatcaccataaagtggacaaaagcaaatgggaaatgccgacgggttcgaacgaaagcgaggccaaaagttggaaagcaattcgcgtagatctggttgtttgtccctacgatcgttttgcgtttgcgttgttgggttggaccggaagccgcatgttcgaacgtgatctgcgccgctacgccacccacgagaagaagatgatgctggacaatcatgcgctgtatgacctgaccaagaaaatctttctcaaagctaaatcggaagaggaaattttcgcacatctggggcttgaatacctggaaccgtccgaacgtaacgca

SEQ ID NO: 378 - protein, 529 aa, synthetic construct
  REGION 1..529: note = Variant of terminal deoxynucleotidyltransferase
MHHHHHHGGSGMHRIRTIDSDFGKKRQKKMDNHISSMIYEIKFHEFVLFILEKKMGATRRTFLTDLARKKGFRVENELSDSVTHIVAENNSGSDVLAWLKTHKMEKTTQFELLDISWLIESMKVGKPVDTKGGYQLMESRVDSANPDPTAGTLNILPPTTKTISQYACQRRTTLNNHNQRFTDALEILAENYEFKRNDDTCLTFMRAISVLKCLPFEVVSLKDTEGLPWIGDEVKGIMEEIIEVGESLEVQAVLNDERYQSFKLFKSVFGVGVKTADKWYRMGLRTLEDVRSSKTLKLTKMQKAGLCYYEDLADGVTKAEADAISLLVQDAVWTFDPDALVEITGGFRRGKPFGHDVDLLITSPGAEKEQEDQLLQKVTNLWKKQGLLLYGDLRESRFEDGKLPSRKIDALDHFQKCFAILKLYHHKVDKSKWEMPTGSNESEAKSWKAIRVDLVVCPYDRFAFALLGWTGSRMFERDLRRYATHEKKMMLDNHALYDLTKKIFLKAKSEEEIFAHLGLEYLEPSERNA

SEQ ID NO: 379 - DNA, 1587 bp, synthetic construct
  misc_feature 1..1587: note = Variant of terminal deoxynucleotidyltransferase
  source 1..1587: mol_type = other DNA
atgcaccatcatcatcatcatggcggtagcggcatgcaccgcattcgtaccatcgattcggacttcgggaagaaacgccagaagaagatgagtaaccacattagttccatgatctatgaaatcaaatttcacgagtttgtgctgttcattctcgaaaagaaaatgggtgcgacgcgtcgtacttttctgacagatttagcccgcaagaaagggttccgcgtcgagaatgaactgtcagacagcgttacccacatcgtggcagaaaataattcaggatctgacgtattggcttggctgaagacccacaagatggagaagacgacgcaatttgaactgctggatattagctggcttatcgaaagcatgaaagttggtaaaccggtggacaccaaggggaaataccagttgatggaatcgcgtgtcgatagtgcgaacccagatccgacagccggtaccctcaacattctgcctcctactacgaagaccatttctcagtatgcgtgtcaacgccgcaccaccctgaacaaccataatcaacgttttacggacgcactggaaattcttgcggaaaattacgagttcaaacgcaacgatgatacttgtctgacctttatgcgtgctatttccgtgctgaaatgccttccgtttgaggtagttagcctgaaagacacggaaggattgccctggatcggtgatgaagtcaaagggattatggaagaaatcatcgaggtcggtgaatcgctggaagtgcaggccgtgctcaatgatgagcgctatcaaagcttcaaactgtttaagagtgtctttggagtgggggtgaagacagcagacaaatggtaccgtatgggtctgcgcacgctcgaggatgttcgttccagcaagaccctgaagttgaccaagatgcagaaagcgggtctgtgctattatgaagatcttgctgatggcgttacgaaagccgaagctgacgcgatttctctgctggttcaggatgcagtctggactttcgacccggatgcgctggtggagattacgggtggatttcgtcgtgggaaaccttttggtcacgacgttgatctgcttatcacatctccgggagctgagaaagaacaagaagaccagctcctgcagaaagtgaccaatctgtggaagaaacaagggttgttgctgtacggtgatctgcgtgaaagtcgctttgaagatgggaaactcccatcccgcaagatcgatgccctggaccattttcagaaatgctttgctatcctcaaactttatcaccataaagtggacaaaagcaaatgggaaatgccgacgggttcgaacgaaagcgaggccaaaagttggaaagcaattcgcgtagatctggttgtttgtccctacgatcgttttgcgtttgcgttgttgggttggaccggaagccgcatgttcgaacgtgatctgcgccgctacgccacccacgagaagaagatgatgctggacaatcatgcgctgtatgacctgaccaagaaaatctttctcaaagctaaatcggaagaggaaattttcgcacatctggggcttgaatacctggaaccgtccgaacgtaacgca

SEQ ID NO: 380 - protein, 529 aa, synthetic construct
  REGION 1..529: note = Variant of terminal deoxynucleotidyltransferase
MHHHHHHGGSGMHRIRTIDSDFGKKRQKKMSNHISSMIYEIKFHEFVLFILEKKMGATRRTFLTDLARKKGFRVENELSDSVTHIVAENNSGSDVLAWLKTHKMEKTTQFELLDISWLIESMKVGKPVDTKGKYQLMESRVDSANPDPTAGTLNILPPTTKTISQYACQRRTTLNNHNQRFTDALEILAENYEFKRNDDTCLTFMRAISVLKCLPFEVVSLKDTEGLPWIGDEVKGIMEEIIEVGESLEVQAVLNDERYQSFKLFKSVFGVGVKTADKWYRMGLRTLEDVRSSKTLKLTKMQKAGLCYYEDLADGVTKAEADAISLLVQDAVWTFDPDALVEITGGFRRGKPFGHDVDLLITSPGAEKEQEDQLLQKVTNLWKKQGLLLYGDLRESRFEDGKLPSRKIDALDHFQKCFAILKLYHHKVDKSKWEMPTGSNESEAKSWKAIRVDLVVCPYDRFAFALLGWTGSRMFERDLRRYATHEKKMMLDNHALYDLTKKIFLKAKSEEEIFAHLGLEYLEPSERNA

SEQ ID NO: 381 - DNA, 1587 bp, synthetic construct
  misc_feature 1..1587: note = Variant of terminal deoxynucleotidyltransferase
  source 1..1587: mol_type = other DNA
atgcaccatcatcatcatcatggcggtagcggcatgcaccgcattcgtaccatcgattcggacttcgggaagaaacgccagaagaaggtggataaccacattagttccatgatctatgaaatcaaatttcacgagtttgtgctgttcattctcgaaaagaaaatgggtgcgacgcgtcgtacttttctgacagatttagcccgcaagaaagggttccgcgtcgagaatgaactgtcagacagcgttacccacatcgtggcagaaaataattcaggatctgacgtattggcttggctgaagacccacaagatggagaagacgacgcaatttgaactgctggatattagctggcttatcgaaagcatgaaagttggtaaaccggtggacaccaaggggaaataccagttgatggaatcgcgtgtcgatagtgcgaacccagatccgacagccggtaccctcaacattctgcctcctactacgaagaccatttctcagtatgcgtgtcaacgccgcaccaccctgaacaaccataatcaacgttttacggacgcactggaaattcttgcggaaaattacgagttcaaacgcaacgatgatacttgtctgacctttatgcgtgctatttccgtgctgaaatgccttccgtttgaggtagttagcctgaaagacacggaaggattgccctggatcggtgatgaagtcaaagggattatggaagaaatcatcgaggtcggtgaatcgctggaagtgcaggccgtgctcaatgatgagcgctatcaaagcttcaaactgtttaagagtgtctttggagtgggggtgaagacagcagacaaatggtaccgtatgggtctgcgcacgctcgaggatgttcgttccagcaagaccctgaagttgaccaagatgcagaaagcgggtctgtgctattatgaagatcttgctgatggcgttacgaaagccgaagctgacgcgatttctctgctggttcaggatgcagtctggactttcgacccggatgcgctggtggagattacgggtggatttcgtcgtgggaaaccttttggtcacgacgttgatctgcttatcacatctccgggagctgagaaagaacaagaagaccagctcctgcagaaagtgaccaatctgtggaagaaacaagggttgttgctgtacggtgatctgcgtgaaagtcgctttgaagatgggaaactcccatcccgcaagatcgatgccctggaccattttcagaaatgctttgctatcctcaaactttatcaccataaagtggacaaaagcaaatgggaaatgccgacgggttcgaacgaaagcgaggccaaaagttggaaagcaattcgcgtagatctggttgtttgtccctacgatcgttttgcgtttgcgttgttgggttggaccggaagccgcatgttcgaacgtgatctgcgccgctacgccacccacgagaagaagatgatgctggacaatcatgcgctgtatgacctgaccaagaaaatctttctcaaagctaaatcggaagaggaaattttcgcacatctggggcttgaatacctggaaccgtccgaacgtaacgca

SEQ ID NO: 382 - protein, 529 aa, synthetic construct
  REGION 1..529: note = Variant of terminal deoxynucleotidyltransferase
MHHHHHHGGSGMHRIRTIDSDFGKKRQKKVDNHISSMIYEIKFHEFVLFILEKKMGATRRTFLTDLARKKGFRVENELSDSVTHIVAENNSGSDVLAWLKTHKMEKTTQFELLDISWLIESMKVGKPVDTKGKYQLMESRVDSANPDPTAGTLNILPPTTKTISQYACQRRTTLNNHNQRFTDALEILAENYEFKRNDDTCLTFMRAISVLKCLPFEVVSLKDTEGLPWIGDEVKGIMEEIIEVGESLEVQAVLNDERYQSFKLFKSVFGVGVKTADKWYRMGLRTLEDVRSSKTLKLTKMQKAGLCYYEDLADGVTKAEADAISLLVQDAVWTFDPDALVEITGGFRRGKPFGHDVDLLITSPGAEKEQEDQLLQKVTNLWKKQGLLLYGDLRESRFEDGKLPSRKIDALDHFQKCFAILKLYHHKVDKSKWEMPTGSNESEAKSWKAIRVDLVVCPYDRFAFALLGWTGSRMFERDLRRYATHEKKMMLDNHALYDLTKKIFLKAKSEEEIFAHLGLEYLEPSERNA

SEQ ID NO: 383 - DNA, 1587 bp, synthetic construct
  misc_feature 1..1587: note = Variant of terminal deoxynucleotidyltransferase
  source 1..1587: mol_type = other DNA
atgcaccatcatcatcatcatggcggtagcggcatgcaccgcattcgtaccatcgattcggacttcgggaagaaacgccagaagaagatggataaccacaagagttccatgatctatgaaatcaaatttcacgagtttgtgctgttcattctcgaaaagaaaatgggtgcgacgcgtcgtacttttctgacagatttagcccgcaagaaagggttccgcgtcgagaatgaactgtcagacagcgttacccacatcgtggcagaaaataattcaggatctgacgtattggcttggctgaagacccacaagatggagaagacgacgcaatttgaactgctggatattagctggcttatcgaaagcatgaaagttggtaaaccggtggacaccaaggggaaataccagttgatggaatcgcgtgtcgatagtgcgaacccagatccgacagccggtaccctcaacattctgcctcctactacgaagaccatttctcagtatgcgtgtcaacgccgcaccaccctgaacaaccataatcaacgttttacggacgcactggaaattcttgcggaaaattacgagttcaaacgcaacgatgatacttgtctgacctttatgcgtgctatttccgtgctgaaatgccttccgtttgaggtagttagcctgaaagacacggaaggattgccctggatcggtgatgaagtcaaagggattatggaagaaatcatcgaggtcggtgaatcgctggaagtgcaggccgtgctcaatgatgagcgctatcaaagcttcaaactgtttaagagtgtctttggagtgggggtgaagacagcagacaaatggtaccgtatgggtctgcgcacgctcgaggatgttcgttccagcaagaccctgaagttgaccaagatgcagaaagcgggtctgtgctattatgaagatcttgctgatggcgttacgaaagccgaagctgacgcgatttctctgctggttcaggatgcagtctggactttcgacccggatgcgctggtggagattacgggtggatttcgtcgtgggaaaccttttggtcacgacgttgatctgcttatcacatctccgggagctgagaaagaacaagaagaccagctcctgcagaaagtgaccaatctgtggaagaaacaagggttgttgctgtacggtgatctgcgtgaaagtcgctttgaagatgggaaactcccatcccgcaagatcgatgccctggaccattttcagaaatgctttgctatcctcaaactttatcaccataaagtggacaaaagcaaatgggaaatgccgacgggttcgaacgaaagcgaggccaaaagttggaaagcaattcgcgtagatctggttgtttgtccctacgatcgttttgcgtttgcgttgttgggttggaccggaagccgcatgttcgaacgtgatctgcgccgctacgccacccacgagaagaagatgatgctggacaatcatgcgctgtatgacctgaccaagaaaatctttctcaaagctaaatcggaagaggaaattttcgcacatctggggcttgaatacctggaaccgtccgaacgtaacgca

SEQ ID NO: 384 - protein, 529 aa, synthetic construct
  REGION 1..529: note = Variant of terminal deoxynucleotidyltransferase
MHHHHHHGGSGMHRIRTIDSDFGKKRQKKMDNHKSSMIYEIKFHEFVLFILEKKMGATRRTFLTDLARKKGFRVENELSDSVTHIVAENNSGSDVLAWLKTHKMEKTTQFELLDISWLIESMKVGKPVDTKGKYQLMESRVDSANPDPTAGTLNILPPTTKTISQYACQRRTTLNNHNQRFTDALEILAENYEFKRNDDTCLTFMRAISVLKCLPFEVVSLKDTEGLPWIGDEVKGIMEEIIEVGESLEVQAVLNDERYQSFKLFKSVFGVGVKTADKWYRMGLRTLEDVRSSKTLKLTKMQKAGLCYYEDLADGVTKAEADAISLLVQDAVWTFDPDALVEITGGFRRGKPFGHDVDLLITSPGAEKEQEDQLLQKVTNLWKKQGLLLYGDLRESRFEDGKLPSRKIDALDHFQKCFAILKLYHHKVDKSKWEMPTGSNESEAKSWKAIRVDLVVCPYDRFAFALLGWTGSRMFERDLRRYATHEKKMMLDNHALYDLTKKIFLKAKSEEEIFAHLGLEYLEPSERNA

SEQ ID NO: 385 - DNA, 1587 bp, synthetic construct
  misc_feature 1..1587: note = Variant of terminal deoxynucleotidyltransferase
  source 1..1587: mol_type = other DNA
atgcaccatcatcatcatcatggcggtagcggcatgcaccgcattcgtaccatcgattcggacttcgggaagaaacgccagaagaaggaggataaccacattagttccatgatctatgaaatcaaatttcacgagtttgtgctgttcattctcgaaaagaaaatgggtgcgacgcgtcgtacttttctgacagatttagcccgcaagaaagggttccgcgtcgagaatgaactgtcagacagcgttacccacatcgtggcagaaaataattcaggatctgacgtattggcttggctgaagacccacaagatggagaagacgacgcaatttgaactgctggatattagctggcttatcgaaagcatgaaagttggtaaaccggtggacaccaaggggaaataccagttgatggaatcgcgtgtcgatagtgcgaacccagatccgacagccggtaccctcaacattctgcctcctactacgaagaccatttctcagtatgcgtgtcaacgccgcaccaccctgaacaaccataatcaacgttttacggacgcactggaaattcttgcggaaaattacgagttcaaacgcaacgatgatacttgtctgacctttatgcgtgctatttccgtgctgaaatgccttccgtttgaggtagttagcctgaaagacacggaaggattgccctggatcggtgatgaagtcaaagggattatggaagaaatcatcgaggtcggtgaatcgctggaagtgcaggccgtgctcaatgatgagcgctatcaaagcttcaaactgtttaagagtgtctttggagtgggggtgaagacagcagacaaatggtaccgtatgggtctgcgcacgctcgaggatgttcgttccagcaagaccctgaagttgaccaagatgcagaaagcgggtctgtgctattatgaagatcttgctgatggcgttacgaaagccgaagctgacgcgatttctctgctggttcaggatgcagtctggactttcgacccggatgcgctggtggagattacgggtggatttcgtcgtgggaaaccttttggtcacgacgttgatctgcttatcacatctccgggagctgagaaagaacaagaagaccagctcctgcagaaagtgaccaatctgtggaagaaacaagggttgttgctgtacggtgatctgcgtgaaagtcgctttgaagatgggaaactcccatcccgcaagatcgatgccctggaccattttcagaaatgctttgctatcctcaaactttatcaccataaagtggacaaaagcaaatgggaaatgccgacgggttcgaacgaaagcgaggccaaaagttggaaagcaattcgcgtagatctggttgtttgtccctacgatcgttttgcgtttgcgttgttgggttggaccggaagccgcatgttcgaacgtgatctgcgccgctacgccacccacgagaagaagatgatgctggacaatcatgcgctgtatgacctgaccaagaaaatctttctcaaagctaaatcggaagaggaaattttcgcacatctggggcttgaatacctggaaccgtccgaacgtaacgca

SEQ ID NO: 386 - protein, 529 aa, synthetic construct
  REGION 1..529: note = Variant of terminal deoxynucleotidyltransferase
MHHHHHHGGSGMHRIRTIDSDFGKKRQKKEDNHISSMIYEIKFHEFVLFILEKKMGATRRTFLTDLARKKGFRVENELSDSVTHIVAENNSGSDVLAWLKTHKMEKTTQFELLDISWLIESMKVGKPVDTKGKYQLMESRVDSANPDPTAGTLNILPPTTKTISQYACQRRTTLNNHNQRFTDALEILAENYEFKRNDDTCLTFMRAISVLKCLPFEVVSLKDTEGLPWIGDEVKGIMEEIIEVGESLEVQAVLNDERYQSFKLFKSVFGVGVKTADKWYRMGLRTLEDVRSSKTLKLTKMQKAGLCYYEDLADGVTKAEADAISLLVQDAVWTFDPDALVEITGGFRRGKPFGHDVDLLITSPGAEKEQEDQLLQKVTNLWKKQGLLLYGDLRESRFEDGKLPSRKIDALDHFQKCFAILKLYHHKVDKSKWEMPTGSNESEAKSWKAIRVDLVVCPYDRFAFALLGWTGSRMFERDLRRYATHEKKMMLDNHALYDLTKKIFLKAKSEEEIFAHLGLEYLEPSERNA

SEQ ID NO: 387 - DNA, 1587 bp, synthetic construct
  misc_feature 1..1587: note = Variant of terminal deoxynucleotidyltransferase
  source 1..1587: mol_type = other DNA
atgcaccatcatcatcatcatggcggtagcggcatgcaccgcattcgtgctatcgattcggacttcgggaagaaacgccagaagaagatggataaccacattagttccatgatctatgaaatcaaatttcacgagtttgtgctgttcattctcgaaaagaaaatgggtgcgacgcgtcgtacttttctgacagatttagcccgcaagaaagggttccgcgtcgagaatgaactgtcagacagcgttacccacatcgtggcagaaaataattcaggatctgacgtattggcttggctgaagacccacaagatggagaagacgacgcaatttgaactgctggatattagctggcttatcgaaagcatgaaagttggtaaaccggtggacaccaaggggaaataccagttgatggaatcgcgtgtcgatagtgcgaacccagatccgacagccggtaccctcaacattctgcctcctactacgaagaccatttctcagtatgcgtgtcaacgccgcaccaccctgaacaaccataatcaacgttttacggacgcactggaaattcttgcggaaaattacgagttcaaacgcaacgatgatacttgtctgacctttatgcgtgctatttccgtgctgaaatgccttccgtttgaggtagttagcctgaaagacacggaaggattgccctggatcggtgatgaagtcaaagggattatggaagaaatcatcgaggtcggtgaatcgctggaagtgcaggccgtgctcaatgatgagcgctatcaaagcttcaaactgtttaagagtgtctttggagtgggggtgaagacagcagacaaatggtaccgtatgggtctgcgcacgctcgaggatgttcgttccagcaagaccctgaagttgaccaagatgcagaaagcgggtctgtgctattatgaagatcttgctgatggcgttacgaaagccgaagctgacgcgatttctctgctggttcaggatgcagtctggactttcgacccggatgcgctggtggagattacgggtggatttcgtcgtgggaaaccttttggtcacgacgttgatctgcttatcacatctccgggagctgagaaagaacaagaagaccagctcctgcagaaagtgaccaatctgtggaagaaacaagggttgttgctgtacggtgatctgcgtgaaagtcgctttgaagatgggaaactcccatcccgcaagatcgatgccctggaccattttcagaaatgctttgctatcctcaaactttatcaccataaagtggacaaaagcaaatgggaaatgccgacgggttcgaacgaaagcgaggccaaaagttggaaagcaattcgcgtagatctggttgtttgtccctacgatcgttttgcgtttgcgttgttgggttggaccggaagccgcatgttcgaacgtgatctgcgccgctacgccacccacgagaagaagatgatgctggacaatcatgcgctgtatgacctgaccaagaaaatctttctcaaagctaaatcggaagaggaaattttcgcacatctggggcttgaatacctggaaccgtccgaacgtaacgca

SEQ ID NO: 388 - protein, 529 aa, synthetic construct
  REGION 1..529: note = Variant of terminal deoxynucleotidyltransferase
MHHHHHHGGSGMHRIRAIDSDFGKKRQKKMDNHISSMIYEIKFHEFVLFILEKKMGATRRTFLTDLARKKGFRVENELSDSVTHIVAENNSGSDVLAWLKTHKMEKTTQFELLDISWLIESMKVGKPVDTKGKYQLMESRVDSANPDPTAGTLNILPPTTKTISQYACQRRTTLNNHNQRFTDALEILAENYEFKRNDDTCLTFMRAISVLKCLPFEVVSLKDTEGLPWIGDEVKGIMEEIIEVGESLEVQAVLNDERYQSFKLFKSVFGVGVKTADKWYRMGLRTLEDVRSSKTLKLTKMQKAGLCYYEDLADGVTKAEADAISLLVQDAVWTFDPDALVEITGGFRRGKPFGHDVDLLITSPGAEKEQEDQLLQKVTNLWKKQGLLLYGDLRESRFEDGKLPSRKIDALDHFQKCFAILKLYHHKVDKSKWEMPTGSNESEAKSWKAIRVDLVVCPYDRFAFALLGWTGSRMFERDLRRYATHEKKMMLDNHALYDLTKKIFLKAKSEEEIFAHLGLEYLEPSERNA

SEQ ID NO: 389 - DNA, 1587 bp, synthetic construct
  misc_feature 1..1587: note = Variant of terminal deoxynucleotidyltransferase
  source 1..1587: mol_type = other DNA
atgcaccatcatcatcatcatggcggtagcggcatgcaccgcattcgtaccatcgattcggacttcgggaagaaacgccagaagaagatggataaccacattagttccatgatctatgaaatcaaatttcacgagtttgtgctgttcattctcgaaaagaaaatgggtgcgacgcgtcgtacttttctgacagatttagcccgcaagaaagggttccgcgtcgagaatgaactgtcagacagcgttacccacatcgtggcagaaaataattcaggatctgacgtattggcttggctgaagacccacaagatggagaagacgacgcaatttgaactgctggatattagctggcttatcgaaagcatgaaagttggtaaaccggtggacaccaaggggaaataccagttgatggaatcgcgtgtcgatagtgcgaacccacttccgacagccggtaccctcaacattctgcctcctactacgaagaccatttctcagtatgcgtgtcaacgccgcaccaccctgaacaaccataatcaacgttttacggacgcactggaaattcttgcggaaaattacgagttcaaacgcaacgatgatacttgtctgacctttatgcgtgctatttccgtgctgaaatgccttccgtttgaggtagttagcctgaaagacacggaaggattgccctggatcggtgatgaagtcaaagggattatggaagaaatcatcgaggtcggtgaatcgctggaagtgcaggccgtgctcaatgatgagcgctatcaaagcttcaaactgtttaagagtgtctttggagtgggggtgaagacagcagacaaatggtaccgtatgggtctgcgcacgctcgaggatgttcgttccagcaagaccctgaagttgaccaagatgcagaaagcgggtctgtgctattatgaagatcttgctgatggcgttacgaaagccgaagctgacgcgatttctctgctggttcaggatgcagtctggactttcgacccggatgcgctggtggagattacgggtggatttcgtcgtgggaaaccttttggtcacgacgttgatctgcttatcacatctccgggagctgagaaagaacaagaagaccagctcctgcagaaagtgaccaatctgtggaagaaacaagggttgttgctgtacggtgatctgcgtgaaagtcgctttgaagatgggaaactcccatcccgcaagatcgatgccctggaccattttcagaaatgctttgctatcctcaaactttatcaccataaagtggacaaaagcaaatgggaaatgccgacgggttcgaacgaaagcgaggccaaaagttggaaagcaattcgcgtagatctggttgtttgtccctacgatcgttttgcgtttgcgttgttgggttggaccggaagccgcatgttcgaacgtgatctgcgccgctacgccacccacgagaagaagatgatgctggacaatcatgcgctgtatgacctgaccaagaaaatctttctcaaagctaaatcggaagaggaaattttcgcacatctggggcttgaatacctggaaccgtccgaacgtaacgca

SEQ ID NO: 390 - protein, 529 aa, synthetic construct
  REGION 1..529: note = Variant of terminal deoxynucleotidyltransferase
MHHHHHHGGSGMHRIRTIDSDFGKKRQKKMDNHISSMIYEIKFHEFVLFILEKKMGATRRTFLTDLARKKGFRVENELSDSVTHIVAENNSGSDVLAWLKTHKMEKTTQFELLDISWLIESMKVGKPVDTKGKYQLMESRVDSANPLPTAGTLNILPPTTKTISQYACQRRTTLNNHNQRFTDALEILAENYEFKRNDDTCLTFMRAISVLKCLPFEVVSLKDTEGLPWIGDEVKGIMEEIIEVGESLEVQAVLNDERYQSFKLFKSVFGVGVKTADKWYRMGLRTLEDVRSSKTLKLTKMQKAGLCYYEDLADGVTKAEADAISLLVQDAVWTFDPDALVEITGGFRRGKPFGHDVDLLITSPGAEKEQEDQLLQKVTNLWKKQGLLLYGDLRESRFEDGKLPSRKIDALDHFQKCFAILKLYHHKVDKSKWEMPTGSNESEAKSWKAIRVDLVVCPYDRFAFALLGWTGSRMFERDLRRYATHEKKMMLDNHALYDLTKKIFLKAKSEEEIFAHLGLEYLEPSERNA

SEQ ID NO: 391 - DNA, 1587 bp, synthetic construct
  misc_feature 1..1587: note = Variant of terminal deoxynucleotidyltransferase
  source 1..1587: mol_type = other DNA
atgcaccatcatcatcatcatggcggtagcggcatgcaccgcattcgtaccatcgattcggacttcgggaagaaacgccagaagaagatggataaccacattagttccatgatctatgaaatcaaatttcacgagtttgtgctgttcattctcgaaaagaaaatgggtgcgacgcgtcgtacttttctgacagatttagcccgcaagaaagggttccgcgtcgagaatgaactgtcagacagcgttacccacatcgtggcagaaaataattcaggatctgacgtattggcttggctgaagacccacaagatggagaagacgacgcaatttgaactgctggatattagctggcttatcgaaagcatgaaagttggtaaaccggtggacaccaaggggaaataccagttgatggaatcgcgtgtcgatagtgcgaacccagatccgacagccggtggtctcaacattctgcctcctactacgaagaccatttctcagtatgcgtgtcaacgccgcaccaccctgaacaaccataatcaacgttttacggacgcactggaaattcttgcggaaaattacgagttcaaacgcaacgatgatacttgtctgacctttatgcgtgctatttccgtgctgaaatgccttccgtttgaggtagttagcctgaaagacacggaaggattgccctggatcggtgatgaagtcaaagggattatggaagaaatcatcgaggtcggtgaatcgctggaagtgcaggccgtgctcaatgatgagcgctatcaaagcttcaaactgtttaagagtgtctttggagtgggggtgaagacagcagacaaatggtaccgtatgggtctgcgcacgctcgaggatgttcgttccagcaagaccctgaagttgaccaagatgcagaaagcgggtctgtgctattatgaagatcttgctgatggcgttacgaaagccgaagctgacgcgatttctctgctggttcaggatgcagtctggactttcgacccggatgcgctggtggagattacgggtggatttcgtcgtgggaaaccttttggtcacgacgttgatctgcttatcacatctccgggagctgagaaagaacaagaagaccagctcctgcagaaagtgaccaatctgtggaagaaacaagggttgttgctgtacggtgatctgcgtgaaagtcgctttgaagatgggaaactcccatcccgcaagatcgatgccctggaccattttcagaaatgctttgctatcctcaaactttatcaccataaagtggacaaaagcaaatgggaaatgccgacgggttcgaacgaaagcgaggccaaaagttggaaagcaattcgcgtagatctggttgtttgtccctacgatcgttttgcgtttgcgttgttgggttggaccggaagccgcatgttcgaacgtgatctgcgccgctacgccacccacgagaagaagatgatgctggacaatcatgcgctgtatgacctgaccaagaaaatctttctcaaagctaaatcggaagaggaaattttcgcacatctggggcttgaatacctggaaccgtccgaacgtaacgca

SEQ ID NO: 392 - protein, 529 aa, synthetic construct
  REGION 1..529: note = Variant of terminal deoxynucleotidyltransferase
MHHHHHHGGSGMHRIRTIDSDFGKKRQKKMDNHISSMIYEIKFHEFVLFILEKKMGATRRTFLTDLARKKGFRVENELSDSVTHIVAENNSGSDVLAWLKTHKMEKTTQFELLDISWLIESMKVGKPVDTKGKYQLMESRVDSANPDPTAGGLNILPPTTKTISQYACQRRTTLNNHNQRFTDALEILAENYEFKRNDDTCLTFMRAISVLKCLPFEVVSLKDTEGLPWIGDEVKGIMEEIIEVGESLEVQAVLNDERYQSFKLFKSVFGVGVKTADKWYRMGLRTLEDVRSSKTLKLTKMQKAGLCYYEDLADGVTKAEADAISLLVQDAVWTFDPDALVEITGGFRRGKPFGHDVDLLITSPGAEKEQEDQLLQKVTNLWKKQGLLLYGDLRESRFEDGKLPSRKIDALDHFQKCFAILKLYHHKVDKSKWEMPTGSNESEAKSWKAIRVDLVVCPYDRFAFALLGWTGSRMFERDLRRYATHEKKMMLDNHALYDLTKKIFLKAKSEEEIFAHLGLEYLEPSERNA

SEQ ID NO: 393 - DNA, 1587 bp, synthetic construct
  misc_feature 1..1587: note = Variant of terminal deoxynucleotidyltransferase
  source 1..1587: mol_type = other DNA
atgcaccatcatcatcatcatggcggtagcggcatgcaccgcattcgtaccatcgattcggacttcgggaagaaacgccagaagaagatggataaccacattagttccatgatctatgaagtgaaatttcacgagtttgtgctgttcattctcgaaaagaaaatgggtgcgacgcgtcgtacttttctgacagatttagcccgcaagaaagggttccgcgtcgagaatgaactgtcagacagcgttacccacatcgtggcagaaaataattcaggatctgacgtattggcttggctgaagacccacaagatggagaagacgacgcaatttgaactgctggatattagctggcttatcgaaagcatgaaagttggtaaaccggtggacaccaaggggaaataccagttgatggaatcgcgtgtcgatagtgcgaacccagatccgacagccggtaccctcaacattctgcctcctactacgaagaccatttctcagtatgcgtgtcaacgccgcaccaccctgaacaaccataatcaacgttttacggacgcactggaaattcttgcggaaaattacgagttcaaacgcaacgatgatacttgtctgacctttatgcgtgctatttccgtgctgaaatgccttccgtttgaggtagttagcctgaaagacacggaaggattgccctggatcggtgatgaagtcaaagggattatggaagaaatcatcgaggtcggtgaatcgctggaagtgcaggccgtgctcaatgatgagcgctatcaaagcttcaaactgtttaagagtgtctttggagtgggggtgaagacagcagacaaatggtaccgtatgggtctgcgcacgctcgaggatgttcgttccagcaagaccctgaagttgaccaagatgcagaaagcgggtctgtgctattatgaagatcttgctgatggcgttacgaaagccgaagctgacgcgatttctctgctggttcaggatgcagtctggactttcgacccggatgcgctggtggagattacgggtggatttcgtcgtgggaaaccttttggtcacgacgttgatctgcttatcacatctccgggagctgagaaagaacaagaagaccagctcctgcagaaagtgaccaatctgtggaagaaacaagggttgttgctgtacggtgatctgcgtgaaagtcgctttgaagatgggaaactcccatcccgcaagatcgatgccctggaccattttcagaaatgctttgctatcctcaaactttatcaccataaagtggacaaaagcaaatgggaaatgccgacgggttcgaacgaaagcgaggccaaaagttggaaagcaattcgcgtagatctggttgtttgtccctacgatcgttttgcgtttgcgttgttgggttggaccggaagccgcatgttcgaacgtgatctgcgccgctacgccacccacgagaagaagatgatgctggacaatcatgcgctgtatgacctgaccaagaaaatctttctcaaagctaaatcggaagaggaaattttcgcacatctggggcttgaatacctggaaccgtccgaacgtaacgca

SEQ ID NO: 394 - protein, 529 aa, synthetic construct
  REGION 1..529: note = Variant of terminal deoxynucleotidyltransferase
MHHHHHHGGSGMHRIRTIDSDFGKKRQKKMDNHISSMIYEVKFHEFVLFILEKKMGATRRTFLTDLARKKGFRVENELSDSVTHIVAENNSGSDVLAWLKTHKMEKTTQFELLDISWLIESMKVGKPVDTKGKYQLMESRVDSANPDPTAGTLNILPPTTKTISQYACQRRTTLNNHNQRFTDALEILAENYEFKRNDDTCLTFMRAISVLKCLPFEVVSLKDTEGLPWIGDEVKGIMEEIIEVGESLEVQAVLNDERYQSFKLFKSVFGVGVKTADKWYRMGLRTLEDVRSSKTLKLTKMQKAGLCYYEDLADGVTKAEADAISLLVQDAVWTFDPDALVEITGGFRRGKPFGHDVDLLITSPGAEKEQEDQLLQKVTNLWKKQGLLLYGDLRESRFEDGKLPSRKIDALDHFQKCFAILKLYHHKVDKSKWEMPTGSNESEAKSWKAIRVDLVVCPYDRFAFALLGWTGSRMFERDLRRYATHEKKMMLDNHALYDLTKKIFLKAKSEEEIFAHLGLEYLEPSERNA

SEQ ID NO: 395 - DNA, 1587 bp, synthetic construct
  misc_feature 1..1587: note = Variant of terminal deoxynucleotidyltransferase
  source 1..1587: mol_type = other DNA
atgcaccatcatcatcatcatggcggtagcggcatgaggcgcattcgtaccatcgattcggacttcgggaagaaacgccagaagaagatggataaccacattagttccatgatctatgaaatcaaatttcacgagtttgtgctgttcattctcgaaaagaaaatgggtgcgacgcgtcgtacttttctgacagatttagcccgcaagaaagggttccgcgtcgagaatgaactgtcagacagcgttacccacatcgtggcagaaaataattcaggatctgacgtattggcttggctgaagacccacaagatggagaagacgacgcaatttgaactgctggatattagctggcttatcgaaagcatgaaagttggtaaaccggtggacaccaaggggaaataccagttgatggaatcgcgtgtcgatagtgcgaacccagatccgacagccggtaccctcaacattctgcctcctactacgaagaccatttctcagtatgcgtgtcaacgccgcaccaccctgaacaaccataatcaacgttttacggacgcactggaaattcttgcggaaaattacgagttcaaacgcaacgatgatacttgtctgacctttatgcgtgctatttccgtgctgaaatgccttccgtttgaggtagttagcctgaaagacacggaaggattgccctggatcggtgatgaagtcaaagggattatggaagaaatcatcgaggtcggtgaatcgctggaagtgcaggccgtgctcaatgatgagcgctatcaaagcttcaaactgtttaagagtgtctttggagtgggggtgaagacagcagacaaatggtaccgtatgggtctgcgcacgctcgaggatgttcgttccagcaagaccctgaagttgaccaagatgcagaaagcgggtctgtgctattatgaagatcttgctgatggcgttacgaaagccgaagctgacgcgatttctctgctggttcaggatgcagtctggactttcgacccggatgcgctggtggagattacgggtggatttcgtcgtgggaaaccttttggtcacgacgttgatctgcttatcacatctccgggagctgagaaagaacaagaagaccagctcctgcagaaagtgaccaatctgtggaagaaacaagggttgttgctgtacggtgatctgcgtgaaagtcgctttgaagatgggaaactcccatcccgcaagatcgatgccctggaccattttcagaaatgctttgctatcctcaaactttatcaccataaagtggacaaaagcaaatgggaaatgccgacgggttcgaacgaaagcgaggccaaaagttggaaagcaattcgcgtagatctggttgtttgtccctacgatcgttttgcgtttgcgttgttgggttggaccggaagccgcatgttcgaacgtgatctgcgccgctacgccacccacgagaagaagatgatgctggacaatcatgcgctgtatgacctgaccaagaaaatctttctcaaagctaaatcggaagaggaaattttcgcacatctggggcttgaatacctggaaccgtccgaacgtaacgca

SEQ ID NO: 396 - protein, 529 aa, synthetic construct
  REGION 1..529: note = Variant of terminal deoxynucleotidyltransferase
MHHHHHHGGSGMRRIRTIDSDFGKKRQKKMDNHISSMIYEIKFHEFVLFILEKKMGATRRTFLTDLARKKGFRVENELSDSVTHIVAENNSGSDVLAWLKTHKMEKTTQFELLDISWLIESMKVGKPVDTKGKYQLMESRVDSANPDPTAGTLNILPPTTKTISQYACQRRTTLNNHNQRFTDALEILAENYEFKRNDDTCLTFMRAISVLKCLPFEVVSLKDTEGLPWIGDEVKGIMEEIIEVGESLEVQAVLNDERYQSFKLFKSVFGVGVKTADKWYRMGLRTLEDVRSSKTLKLTKMQKAGLCYYEDLADGVTKAEADAISLLVQDAVWTFDPDALVEITGGFRRGKPFGHDVDLLITSPGAEKEQEDQLLQKVTNLWKKQGLLLYGDLRESRFEDGKLPSRKIDALDHFQKCFAILKLYHHKVDKSKWEMPTGSNESEAKSWKAIRVDLVVCPYDRFAFALLGWTGSRMFERDLRRYATHEKKMMLDNHALYDLTKKIFLKAKSEEEIFAHLGLEYLEPSERNA

SEQ ID NO: 397 - DNA, 1587 bp, synthetic construct
  misc_feature 1..1587: note = Variant of terminal deoxynucleotidyltransferase
  source 1..1587: mol_type = other DNA
atgcaccatcatcatcatcatggcggtagcggcatgcaccgcattcgtaccatcgattcggacttcgggaagaaacgccagaagaagatggataaccacattagttccatgatctatgaaatcaaatttcacgagtttgtgctgttcattctcgaaaagaaaatgggtgcgacgcgtcgtacttttctgacagatttagcccgcaagaaagggttccgcgtcgagaatgaactgtcagacagcgttacccacatcgtggcagaaaataattcaggatctgacgtattggcttggctgaagacccacaagatggagaagacgacgcaatttgaactgctggatattagctggcttatcgaaagcatgaaagttggtaaaccggtggacaccaaggggaaataccagttgatggaatcgcgtgtcgatagtgcgaacccagatccgagggccggtaccctcaacattctgcctcctactacgaagaccatttctcagtatgcgtgtcaacgccgcaccaccctgaacaaccataatcaacgttttacggacgcactggaaattcttgcggaaaattacgagttcaaacgcaacgatgatacttgtctgacctttatgcgtgctatttccgtgctgaaatgccttccgtttgaggtagttagcctgaaagacacggaaggattgccctggatcggtgatgaagtcaaagggattatggaagaaatcatcgaggtcggtgaatcgctggaagtgcaggccgtgctcaatgatgagcgctatcaaagcttcaaactgtttaagagtgtctttggagtgggggtgaagacagcagacaaatggtaccgtatgggtctgcgcacgctcgaggatgttcgttccagcaagaccctgaagttgaccaagatgcagaaagcgggtctgtgctattatgaagatcttgctgatggcgttacgaaagccgaagctgacgcgatttctctgctggttcaggatgcagtctggactttcgacccggatgcgctggtggagattacgggtggatttcgtcgtgggaaaccttttggtcacgacgttgatctgcttatcacatctccgggagctgagaaagaacaagaagaccagctcctgcagaaagtgaccaatctgtggaagaaacaagggttgttgctgtacggtgatctgcgtgaaagtcgctttgaagatgggaaactcccatcccgcaagatcgatgccctggaccattttcagaaatgctttgctatcctcaaactttatcaccataaagtggacaaaagcaaatgggaaatgccgacgggttcgaacgaaagcgaggccaaaagttggaaagcaattcgcgtagatctggttgtttgtccctacgatcgttttgcgtttgcgttgttgggttggaccggaagccgcatgttcgaacgtgatctgcgccgctacgccacccacgagaagaagatgatgctggacaatcatgcgctgtatgacctgaccaagaaaatctttctcaaagctaaatcggaagaggaaattttcgcacatctggggcttgaatacctggaaccgtccgaacgtaacgca

SEQ ID NO: 398 - protein, 529 aa, synthetic construct
  REGION 1..529: note = Variant of terminal deoxynucleotidyltransferase
MHHHHHHGGSGMHRIRTIDSDFGKKRQKKMDNHISSMIYEIKFHEFVLFILEKKMGATRRTFLTDLARKKGFRVENELSDSVTHIVAENNSGSDVLAWLKTHKMEKTTQFELLDISWLIESMKVGKPVDTKGKYQLMESRVDSANPDPRAGTLNILPPTTKTISQYACQRRTTLNNHNQRFTDALEILAENYEFKRNDDTCLTFMRAISVLKCLPFEVVSLKDTEGLPWIGDEVKGIMEEIIEVGESLEVQAVLNDERYQSFKLFKSVFGVGVKTADKWYRMGLRTLEDVRSSKTLKLTKMQKAGLCYYEDLADGVTKAEADAISLLVQDAVWTFDPDALVEITGGFRRGKPFGHDVDLLITSPGAEKEQEDQLLQKVTNLWKKQGLLLYGDLRESRFEDGKLPSRKIDALDHFQKCFAILKLYHHKVDKSKWEMPTGSNESEAKSWKAIRVDLVVCPYDRFAFALLGWTGSRMFERDLRRYATHEKKMMLDNHALYDLTKKIFLKAKSEEEIFAHLGLEYLEPSERNA

SEQ ID NO: 399 - DNA, 1587 bp, synthetic construct
  misc_feature 1..1587: note = Variant of terminal deoxynucleotidyltransferase
  source 1..1587: mol_type = other DNA
atgcaccatcatcatcatcatggcggtagcggcatgcaccgcattcgtaccatcgattcggacttcgggaagaaacgccagaagaagatggataaccacattagttccatgatctatgaaatcaaatttcacgagtttgtgctgttcattctcgaaaagaaaatgggtgcgacgcgtcgtacttttctgacagatttagcccgcaagaaagggttccgcgtcgagaatgaactgtcagacagcgttacccacatcgtggcagaaaataattcaggatctgacgtattggcttggctgaagacccacaagatggagaagacgacgcaatttgaactgctggatattagctggcttatcgaaagcatgaaagttggtaaaccggtggacaccaaggggaaataccagttggctgaatcgcgtgtcgatagtgcgaacccagatccgacagccggtaccctcaacattctgcctcctactacgaagaccatttctcagtatgcgtgtcaacgccgcaccaccctgaacaaccataatcaacgttttacggacgcactggaaattcttgcggaaaattacgagttcaaacgcaacgatgatacttgtctgacctttatgcgtgctatttccgtgctgaaatgccttccgtttgaggtagttagcctgaaagacacggaaggattgccctggatcggtgatgaagtcaaagggattatggaagaaatcatcgaggtcggtgaatcgctggaagtgcaggccgtgctcaatgatgagcgctatcaaagcttcaaactgtttaagagtgtctttggagtgggggtgaagacagcagacaaatggtaccgtatgggtctgcgcacgctcgaggatgttcgttccagcaagaccctgaagttgaccaagatgcagaaagcgggtctgtgctattatgaagatcttgctgatggcgttacgaaagccgaagctgacgcgatttctctgctggttcaggatgcagtctggactttcgacccggatgcgctggtggagattacgggtggatttcgtcgtgggaaaccttttggtcacgacgttgatctgcttatcacatctccgggagctgagaaagaacaagaagaccagctcctgcagaaagtgaccaatctgtggaagaaacaagggttgttgctgtacggtgatctgcgtgaaagtcgctttgaagatgggaaactcccatcccgcaagatcgatgccctggaccattttcagaaatgctttgctatcctcaaactttatcaccataaagtggacaaaagcaaatgggaaatgccgacgggttcgaacgaaagcgaggccaaaagttggaaagcaattcgcgtagatctggttgtttgtccctacgatcgttttgcgtttgcgttgttgggttggaccggaagccgcatgttcgaacgtgatctgcgccgctacgccacccacgagaagaagatgatgctggacaatcatgcgctgtatgacctgaccaagaaaatctttctcaaagctaaatcggaagaggaaattttcgcacatctggggcttgaatacctggaaccgtccgaacgtaacgca

SEQ ID NO: 400 - protein, 529 aa, synthetic construct
  REGION 1..529: note = Variant of terminal deoxynucleotidyltransferase
MHHHHHHGGSGMHRIRTIDSDFGKKRQKKMDNHISSMIYEIKFHEFVLFILEKKMGATRRTFLTDLARKKGFRVENELSDSVTHIVAENNSGSDVLAWLKTHKMEKTTQFELLDISWLIESMKVGKPVDTKGKYQLAESRVDSANPDPTAGTLNILPPTTKTISQYACQRRTTLNNHNQRFTDALEILAENYEFKRNDDTCLTFMRAISVLKCLPFEVVSLKDTEGLPWIGDEVKGIMEEIIEVGESLEVQAVLNDERYQSFKLFKSVFGVGVKTADKWYRMGLRTLEDVRSSKTLKLTKMQKAGLCYYEDLADGVTKAEADAISLLVQDAVWTFDPDALVEITGGFRRGKPFGHDVDLLITSPGAEKEQEDQLLQKVTNLWKKQGLLLYGDLRESRFEDGKLPSRKIDALDHFQKCFAILKLYHHKVDKSKWEMPTGSNESEAKSWKAIRVDLVVCPYDRFAFALLGWTGSRMFERDLRRYATHEKKMMLDNHALYDLTKKIFLKAKSEEEIFAHLGLEYLEPSERNA

SEQ ID NO: 401 - DNA, 1587 bp, synthetic construct
  misc_feature 1..1587: note = Variant of terminal deoxynucleotidyltransferase
  source 1..1587: mol_type = other DNA
atgcaccatcatcatcatcatggcggtagcggcatgcaccgcattcgtaccatcgattcggacttcgggaagaaacgccagaagaagatggataaccaccgtagttccatgatctatgaaatcaaatttcacgagtttgtgctgttcattctcgaaaagaaaatgggtgcgacgcgtcgtacttttctgacagatttagcccgcaagaaagggttccgcgtcgagaatgaactgtcagacagcgttacccacatcgtggcagaaaataattcaggatctgacgtattggcttggctgaagacccacaagatggagaagacgacgcaatttgaactgctggatattagctggcttatcgaaagcatgaaagttggtaaaccggtggacaccaaggggaaataccagttgatggaatcgcgtgtcgatagtgcgaacccagatccgacagccggtaccctcaacattctgcctcctactacgaagaccatttctcagtatgcgtgtcaacgccgcaccaccctgaacaaccataatcaacgttttacggacgcactggaaattcttgcggaaaattacgagttcaaacgcaacgatgatacttgtctgacctttatgcgtgctatttccgtgctgaaatgccttccgtttgaggtagttagcctgaaagacacggaaggattgccctggatcggtgatgaagtcaaagggattatggaagaaatcatcgaggtcggtgaatcgctggaagtgcaggccgtgctcaatgatgagcgctatcaaagcttcaaactgtttaagagtgtctttggagtgggggtgaagacagcagacaaatggtaccgtatgggtctgcgcacgctcgaggatgttcgttccagcaagaccctgaagttgaccaagatgcagaaagcgggtctgtgctattatgaagatcttgctgatggcgttacgaaagccgaagctgacgcgatttctctgctggttcaggatgcagtctggactttcgacccggatgcgctggtggagattacgggtggatttcgtcgtgggaaaccttttggtcacgacgttgatctgcttatcacatctccgggagctgagaaagaacaagaagaccagctcctgcagaaagtgaccaatctgtggaagaaacaagggttgttgctgtacggtgatctgcgtgaaagtcgctttgaagatgggaaactcccatcccgcaagatcgatgccctggaccattttcagaaatgctttgctatcctcaaactttatcaccataaagtggacaaaagcaaatgggaaatgccgacgggttcgaacgaaagcgaggccaaaagttggaaagcaattcgcgtagatctggttgtttgtccctacgatcgttttgcgtttgcgttgttgggttggaccggaagccgcatgttcgaacgtgatctgcgccgctacgccacccacgagaagaagatgatgctggacaatcatgcgctgtatgacctgaccaagaaaatctttctcaaagctaaatcggaagaggaaattttcgcacatctggggcttgaatacctggaaccgtccgaacgtaacgca

SEQ ID NO: 402 - protein, 529 aa, synthetic construct
  REGION 1..529: note = Variant of terminal deoxynucleotidyltransferase
MHHHHHHGGSGMHRIRTIDSDFGKKRQKKMDNHRSSMIYEIKFHEFVLFILEKKMGATRRTFLTDLARKKGFRVENELSDSVTHIVAENNSGSDVLAWLKTHKMEKTTQFELLDISWLIESMKVGKPVDTKGKYQLMESRVDSANPDPTAGTLNILPPTTKTISQYACQRRTTLNNHNQRFTDALEILAENYEFKRNDDTCLTFMRAISVLKCLPFEVVSLKDTEGLPWIGDEVKGIMEEIIEVGESLEVQAVLNDERYQSFKLFKSVFGVGVKTADKWYRMGLRTLEDVRSSKTLKLTKMQKAGLCYYEDLADGVTKAEADAISLLVQDAVWTFDPDALVEITGGFRRGKPFGHDVDLLITSPGAEKEQEDQLLQKVTNLWKKQGLLLYGDLRESRFEDGKLPSRKIDALDHFQKCFAILKLYHHKVDKSKWEMPTGSNESEAKSWKAIRVDLVVCPYDRFAFALLGWTGSRMFERDLRRYATHEKKMMLDNHALYDLTKKIFLKAKSEEEIFAHLGLEYLEPSERNA

SEQ ID NO: 403 - DNA, 1587 bp, synthetic construct
  misc_feature 1..1587: note = Variant of terminal deoxynucleotidyltransferase
  source 1..1587: mol_type = other DNA
atgcaccatcatcatcatcatggcggtagcggcatgcaccgcattcgtaccatcgattcggacttcgggaagaaacgccagaagaagatggataaccacattagttccatgatctatgaaatcaaatttcacgagtttgtgctgttcattctcgaaaagaaaatgggtgcgacgcgtcgtacttttctgacagatttagcccgcaagaaagggttccgcgtcgagaatgaactgtcagacagcgttacccacatcgtggcagaaaataattcaggatctgacgtattggcttggctgaagacccacaagatggagaagacgacgcaatttgaactgctggatattagctggcttatcgaaagcatgaaagttggtaaaccggtggacaccaaggggaaataccagttgatggaatcgcgtgtcgatagtgcgaacccagatccgacagccggtaccgtgaacattctgcctcctactacgaagaccatttctcagtatgcgtgtcaacgccgcaccaccctgaacaaccataatcaacgttttacggacgcactggaaattcttgcggaaaattacgagttcaaacgcaacgatgatacttgtctgacctttatgcgtgctatttccgtgctgaaatgccttccgtttgaggtagttagcctgaaagacacggaaggattgccctggatcggtgatgaagtcaaagggattatggaagaaatcatcgaggtcggtgaatcgctggaagtgcaggccgtgctcaatgatgagcgctatcaaagcttcaaactgtttaagagtgtctttggagtgggggtgaagacagcagacaaatggtaccgtatgggtctgcgcacgctcgaggatgttcgttccagcaagaccctgaagttgaccaagatgcagaaagcgggtctgtgctattatgaagatcttgctgatggcgttacgaaagccgaagctgacgcgatttctctgctggttcaggatgcagtctggactttcgacccggatgcgctggtggagattacgggtggatttcgtcgtgggaaaccttttggtcacgacgttgatctgcttatcacatctccgggagctgagaaagaacaagaagaccagctcctgcagaaagtgaccaatctgtggaagaaacaagggttgttgctgtacggtgatctgcgtgaaagtcgctttgaagatgggaaactcccatcccgcaagatcgatgccctggaccattttcagaaatgctttgctatcctcaaactttatcaccataaagtggacaaaagcaaatgggaaatgccgacgggttcgaacgaaagcgaggccaaaagttggaaagcaattcgcgtagatctggttgtttgtccctacgatcgttttgcgtttgcgttgttgggttggaccggaagccgcatgttcgaacgtgatctgcgccgctacgccacccacgagaagaagatgatgctggacaatcatgcgctgtatgacctgaccaagaaaatctttctcaaagctaaatcggaagaggaaattttcgcacatctggggcttgaatacctggaaccgtccgaacgtaacgca

SEQ ID NO: 404 - protein, 529 aa, synthetic construct
  REGION 1..529: note = Variant of terminal deoxynucleotidyltransferase
MHHHHHHGGSGMHRIRTIDSDFGKKRQKKMDNHISSMIYEIKFHEFVLFILEKKMGATRRTFLTDLARKKGFRVENELSDSVTHIVAENNSGSDVLAWLKTHKMEKTTQFELLDISWLIESMKVGKPVDTKGKYQLMESRVDSANPDPTAGTVNILPPTTKTISQYACQRRTTLNNHNQRFTDALEILAENYEFKRNDDTCLTFMRAISVLKCLPFEVVSLKDTEGLPWIGDEVKGIMEEIIEVGESLEVQAVLNDERYQSFKLFKSVFGVGVKTADKWYRMGLRTLEDVRSSKTLKLTKMQKAGLCYYEDLADGVTKAEADAISLLVQDAVWTFDPDALVEITGGFRRGKPFGHDVDLLITSPGAEKEQEDQLLQKVTNLWKKQGLLLYGDLRESRFEDGKLPSRKIDALDHFQKCFAILKLYHHKVDKSKWEMPTGSNESEAKSWKAIRVDLVVCPYDRFAFALLGWTGSRMFERDLRRYATHEKKMMLDNHALYDLTKKIFLKAKSEEEIFAHLGLEYLEPSERNA

SEQ ID NO: 405 - DNA, 1587 bp, synthetic construct
  misc_feature 1..1587: note = Variant of terminal deoxynucleotidyltransferase
  source 1..1587: mol_type = other DNA
atgcaccatcatcatcatcatggcggtagcggcatgcaccgcattcgtaccatcgattcggacttcgggaagaaacgccagaagaagatggataaccacattagttccatgatctatgaaatcaaatttcacgagtttgtgctgttcattctcgaaaagaaaatgggtgcgacgcgtcgtcattttctgacagatttagcccgcaagaaagggttccgcgtcgagaatgaactgtcagacagcgttacccacatcgtggcagaaaataattcaggatctgacgtattggcttggctgaagacccacaagatggagaagacgacgcaatttgaactgctggatattagctggcttatcgaaagcatgaaagttggtaaaccggtggacaccaaggggaaataccagttgatggaatcgcgtgtcgatagtgcgaacccagatccgacagccggtaccctcaacattctgcctcctactacgaagaccatttctcagtatgcgtgtcaacgccgcaccaccctgaacaaccataatcaacgttttacggacgcactggaaattcttgcggaaaattacgagttcaaacgcaacgatgatacttgtctgacctttatgcgtgctatttccgtgctgaaatgccttccgtttgaggtagttagcctgaaagacacggaaggattgccctggatcggtgatgaagtcaaagggattatggaagaaatcatcgaggtcggtgaatcgctggaagtgcaggccgtgctcaatgatgagcgctatcaaagcttcaaactgtttaagagtgtctttggagtgggggtgaagacagcagacaaatggtaccgtatgggtctgcgcacgctcgaggatgttcgttccagcaagaccctgaagttgaccaagatgcagaaagcgggtctgtgctattatgaagatcttgctgatggcgttacgaaagccgaagctgacgcgatttctctgctggttcaggatgcagtctggactttcgacccggatgcgctggtggagattacgggtggatttcgtcgtgggaaaccttttggtcacgacgttgatctgcttatcacatctccgggagctgagaaagaacaagaagaccagctcctgcagaaagtgaccaatctgtggaagaaacaagggttgttgctgtacggtgatctgcgtgaaagtcgctttgaagatgggaaactcccatcccgcaagatcgatgccctggaccattttcagaaatgctttgctatcctcaaactttatcaccataaagtggacaaaagcaaatgggaaatgccgacgggttcgaacgaaagcgaggccaaaagttggaaagcaattcgcgtagatctggttgtttgtccctacgatcgttttgcgtttgcgttgttgggttggaccggaagccgcatgttcgaacgtgatctgcgccgctacgccacccacgagaagaagatgatgctggacaatcatgcgctgtatgacctgaccaagaaaatctttctcaaagctaaatcggaagaggaaattttcgcacatctggggcttgaatacctggaaccgtccgaacgtaacgca

SEQ ID NO: 406 - protein, 529 aa, synthetic construct
  REGION 1..529: note = Variant of terminal deoxynucleotidyltransferase
MHHHHHHGGSGMHRIRTIDSDFGKKRQKKMDNHISSMIYEIKFHEFVLFILEKKMGATRRHFLTDLARKKGFRVENELSDSVTHIVAENNSGSDVLAWLKTHKMEKTTQFELLDISWLIESMKVGKPVDTKGKYQLMESRVDSANPDPTAGTLNILPPTTKTISQYACQRRTTLNNHNQRFTDALEILAENYEFKRNDDTCLTFMRAISVLKCLPFEVVSLKDTEGLPWIGDEVKGIMEEIIEVGESLEVQAVLNDERYQSFKLFKSVFGVGVKTADKWYRMGLRTLEDVRSSKTLKLTKMQKAGLCYYEDLADGVTKAEADAISLLVQDAVWTFDPDALVEITGGFRRGKPFGHDVDLLITSPGAEKEQEDQLLQKVTNLWKKQGLLLYGDLRESRFEDGKLPSRKIDALDHFQKCFAILKLYHHKVDKSKWEMPTGSNESEAKSWKAIRVDLVVCPYDRFAFALLGWTGSRMFERDLRRYATHEKKMMLDNHALYDLTKKIFLKAKSEEEIFAHLGLEYLEPSERNA

SEQ ID NO: 407 - DNA, 1587 bp, synthetic construct
  misc_feature 1..1587: note = Variant of terminal deoxynucleotidyltransferase
  source 1..1587: mol_type = other DNA
atgcaccatcatcatcatcatggcggtagcggcatgcaccgcattcgtaccatcgattcggacttcgggaagaaacgccagaagcctatggataaccacattagttccatgatctatgaaatcaaatttcacgagtttgtgctgttcattctcgaaaagaaaatgggtgcgacgcgtcgtacttttctgacagatttagcccgcaagaaagggttccgcgtcgagaatgaactgtcagacagcgttacccacatcgtggcagaaaataattcaggatctgacgtattggcttggctgaagacccacaagatggagaagacgacgcaatttgaactgctggatattagctggcttatcgaaagcatgaaagttggtaaaccggtggacaccaaggggaaataccagttgatggaatcgcgtgtcgatagtgcgaacccagatccgacagccggtaccctcaacattctgcctcctactacgaagaccatttctcagtatgcgtgtcaacgccgcaccaccctgaacaaccataatcaacgttttacggacgcactggaaattcttgcggaaaattacgagttcaaacgcaacgatgatacttgtctgacctttatgcgtgctatttccgtgctgaaatgccttccgtttgaggtagttagcctgaaagacacggaaggattgccctggatcggtgatgaagtcaaagggattatggaagaaatcatcgaggtcggtgaatcgctggaagtgcaggccgtgctcaatgatgagcgctatcaaagcttcaaactgtttaagagtgtctttggagtgggggtgaagacagcagacaaatggtaccgtatgggtctgcgcacgctcgaggatgttcgttccagcaagaccctgaagttgaccaagatgcagaaagcgggtctgtgctattatgaagatcttgctgatggcgttacgaaagccgaagctgacgcgatttctctgctggttcaggatgcagtctggactttcgacccggatgcgctggtggagattacgggtggatttcgtcgtgggaaaccttttggtcacgacgttgatctgcttatcacatctccgggagctgagaaagaacaagaagaccagctcctgcagaaagtgaccaatctgtggaagaaacaagggttgttgctgtacggtgatctgcgtgaaagtcgctttgaagatgggaaactcccatcccgcaagatcgatgccctggaccattttcagaaatgctttgctatcctcaaactttatcaccataaagtggacaaaagcaaatgggaaatgccgacgggttcgaacgaaagcgaggccaaaagttggaaagcaattcgcgtagatctggttgtttgtccctacgatcgttttgcgtttgcgttgttgggttggaccggaagccgcatgttcgaacgtgatctgcgccgctacgccacccacgagaagaagatgatgctggacaatcatgcgctgtatgacctgaccaagaaaatctttctcaaagctaaatcggaagaggaaattttcgcacatctggggcttgaatacctggaaccgtccgaacgtaacgca

SEQ ID NO: 408 - protein, 529 aa, synthetic construct
  REGION 1..529: note = Variant of terminal deoxynucleotidyltransferase
MHHHHHHGGSGMHRIRTIDSDFGKKRQKPMDNHISSMIYEIKFHEFVLFILEKKMGATRRTFLTDLARKKGFRVENELSDSVTHIVAENNSGSDVLAWLKTHKMEKTTQFELLDISWLIESMKVGKPVDTKGKYQLMESRVDSANPDPTAGTLNILPPTTKTISQYACQRRTTLNNHNQRFTDALEILAENYEFKRNDDTCLTFMRAISVLKCLPFEVVSLKDTEGLPWIGDEVKGIMEEIIEVGESLEVQAVLNDERYQSFKLFKSVFGVGVKTADKWYRMGLRTLEDVRSSKTLKLTKMQKAGLCYYEDLADGVTKAEADAISLLVQDAVWTFDPDALVEITGGFRRGKPFGHDVDLLITSPGAEKEQEDQLLQKVTNLWKKQGLLLYGDLRESRFEDGKLPSRKIDALDHFQKCFAILKLYHHKVDKSKWEMPTGSNESEAKSWKAIRVDLVVCPYDRFAFALLGWTGSRMFERDLRRYATHEKKMMLDNHALYDLTKKIFLKAKSEEEIFAHLGLEYLEPSERNA

SEQ ID NO: 409 - DNA, 1587 bp, synthetic construct
  misc_feature 1..1587: note = Variant of terminal deoxynucleotidyltransferase
  source 1..1587: mol_type = other DNA
atgcaccatcatcatcatcatggcggtagcggcatgcaccgcattcgtaccatcgattcggacttcgggaagaaacgccagaagaagatggataaccacattagttccatgatctatgaaatcaaatttcacgagtttgtgctgttcattctcgaaaagaaaatgggtgcgacgcgtcgtacttttctgacagatttagcccgcaagaaagggttccgcgtcgagaatgaactgtcagacagcgttacccacatcgtggcagaaaataattcaggatctgacgtattggcttggctgaagacccacatgatggagaagacgacgcaatttgaactgctggatattagctggcttatcgaaagcatgaaagttggtaaaccggtggacaccaaggggaaataccagttgatggaatcgcgtgtcgatagtgcgaacccagatccgacagccggtaccctcaacattctgcctcctactacgaagaccatttctcagtatgcgtgtcaacgccgcaccaccctgaacaaccataatcaacgttttacggacgcactggaaattcttgcggaaaattacgagttcaaacgcaacgatgatacttgtctgacctttatgcgtgctatttccgtgctgaaatgccttccgtttgaggtagttagcctgaaagacacggaaggattgccctggatcggtgatgaagtcaaagggattatggaagaaatcatcgaggtcggtgaatcgctggaagtgcaggccgtgctcaatgatgagcgctatcaaagcttcaaactgtttaagagtgtctttggagtgggggtgaagacagcagacaaatggtaccgtatgggtctgcgcacgctcgaggatgttcgttccagcaagaccctgaagttgaccaagatgcagaaagcgggtctgtgctattatgaagatcttgctgatggcgttacgaaagccgaagctgacgcgatttctctgctggttcaggatgcagtctggactttcgacccggatgcgctggtggagattacgggtggatttcgtcgtgggaaaccttttggtcacgacgttgatctgcttatcacatctccgggagctgagaaagaacaagaagaccagctcctgcagaaagtgaccaatctgtggaagaaacaagggttgttgctgtacggtgatctgcgtgaaagtcgctttgaagatgggaaactcccatcccgcaagatcgatgccctggaccattttcagaaatgctttgctatcctcaaactttatcaccataaagtggacaaaagcaaatgggaaatgccgacgggttcgaacgaaagcgaggccaaaagttggaaagcaattcgcgtagatctggttgtttgtccctacgatcgttttgcgtttgcgttgttgggttggaccggaagccgcatgttcgaacgtgatctgcgccgctacgccacccacgagaagaagatgatgctggacaatcatgcgctgtatgacctgaccaagaaaatctttctcaaagctaaatcggaagaggaaattttcgcacatctggggcttgaatacctggaaccgtccgaacgtaacgca

SEQ ID NO: 410 - protein, 529 aa, synthetic construct
  REGION 1..529: note = Variant of terminal deoxynucleotidyltransferase
MHHHHHHGGSGMHRIRTIDSDFGKKRQKKMDNHISSMIYEIKFHEFVLFILEKKMGATRRTFLTDLARKKGFRVENELSDSVTHIVAENNSGSDVLAWLKTHMMEKTTQFELLDISWLIESMKVGKPVDTKGKYQLMESRVDSANPDPTAGTLNILPPTTKTISQYACQRRTTLNNHNQRFTDALEILAENYEFKRNDDTCLTFMRAISVLKCLPFEVVSLKDTEGLPWIGDEVKGIMEEIIEVGESLEVQAVLNDERYQSFKLFKSVFGVGVKTADKWYRMGLRTLEDVRSSKTLKLTKMQKAGLCYYEDLADGVTKAEADAISLLVQDAVWTFDPDALVEITGGFRRGKPFGHDVDLLITSPGAEKEQEDQLLQKVTNLWKKQGLLLYGDLRESRFEDGKLPSRKIDALDHFQKCFAILKLYHHKVDKSKWEMPTGSNESEAKSWKAIRVDLVVCPYDRFAFALLGWTGSRMFERDLRRYATHEKKMMLDNHALYDLTKKIFLKAKSEEEIFAHLGLEYLEPSERNA

SEQ ID NO: 411 - DNA, 1587 bp, synthetic construct
  misc_feature 1..1587: note = Variant of terminal deoxynucleotidyltransferase
  source 1..1587: mol_type = other DNA
atgcaccatcatcatcatcatggcggtagcggcatgcaccgcattcgtaccatcgattcggacttcgggaagaaacgccagaagaagatggataaccacattagttccatgatctatgaaatcaaatttcacgagtttgtgctgttcattctcgaaaagaaaatgggtgcgacgcgtcgtacttttctgacagatttagcccgcaagaaagggttccgcgtcgagaatgaactgtcagacagcgttacccacatcgtggcagaaaataattcaggatctgacgtattggattggctgaagacccacaagatggagaagacgacgcaatttgaactgctggatattagctggcttatcgaaagcatgaaagttggtaaaccggtggacaccaaggggaaataccagttgatggaatcgcgtgtcgatagtgcgaacccagatccgacagccggtaccctcaacattctgcctcctactacgaagaccatttctcagtatgcgtgtcaacgccgcaccaccctgaacaaccataatcaacgttttacggacgcactggaaattcttgcggaaaattacgagttcaaacgcaacgatgatacttgtctgacctttatgcgtgctatttccgtgctgaaatgccttccgtttgaggtagttagcctgaaagacacggaaggattgccctggatcggtgatgaagtcaaagggattatggaagaaatcatcgaggtcggtgaatcgctggaagtgcaggccgtgctcaatgatgagcgctatcaaagcttcaaactgtttaagagtgtctttggagtgggggtgaagacagcagacaaatggtaccgtatgggtctgcgcacgctcgaggatgttcgttccagcaagaccctgaagttgaccaagatgcagaaagcgggtctgtgctattatgaagatcttgctgatggcgttacgaaagccgaagctgacgcgatttctctgctggttcaggatgcagtctggactttcgacccggatgcgctggtggagattacgggtggatttcgtcgtgggaaaccttttggtcacgacgttgatctgcttatcacatctccgggagctgagaaagaacaagaagaccagctcctgcagaaagtgaccaatctgtggaagaaacaagggttgttgctgtacggtgatctgcgtgaaagtcgctttgaagatgggaaactcccatcccgcaagatcgatgccctggaccattttcagaaatgctttgctatcctcaaactttatcaccataaagtggacaaaagcaaatgggaaatgccgacgggttcgaacgaaagcgaggccaaaagttggaaagcaattcgcgtagatctggttgtttgtccctacgatcgttttgcgtttgcgttgttgggttggaccggaagccgcatgttcgaacgtgatctgcgccgctacgccacccacgagaagaagatgatgctggacaatcatgcgctgtatgacctgaccaagaaaatctttctcaaagctaaatcggaagaggaaattttcgcacatctggggcttgaatacctggaaccgtccgaacgtaacgca

SEQ ID NO: 412 - protein, 529 aa, synthetic construct
  REGION 1..529: note = Variant of terminal deoxynucleotidyltransferase
MHHHHHHGGSGMHRIRTIDSDFGKKRQKKMDNHISSMIYEIKFHEFVLFILEKKMGATRRTFLTDLARKKGFRVENELSDSVTHIVAENNSGSDVLDWLKTHKMEKTTQFELLDISWLIESMKVGKPVDTKGKYQLMESRVDSANPDPTAGTLNILPPTTKTISQYACQRRTTLNNHNQRFTDALEILAENYEFKRNDDTCLTFMRAISVLKCLPFEVVSLKDTEGLPWIGDEVKGIMEEIIEVGESLEVQAVLNDERYQSFKLFKSVFGVGVKTADKWYRMGLRTLEDVRSSKTLKLTKMQKAGLCYYEDLADGVTKAEADAISLLVQDAVWTFDPDALVEITGGFRRGKPFGHDVDLLITSPGAEKEQEDQLLQKVTNLWKKQGLLLYGDLRESRFEDGKLPSRKIDALDHFQKCFAILKLYHHKVDKSKWEMPTGSNESEAKSWKAIRVDLVVCPYDRFAFALLGWTGSRMFERDLRRYATHEKKMMLDNHALYDLTKKIFLKAKSEEEIFAHLGLEYLEPSERNA

SEQ ID NO: 413 - DNA, 1587 bp, synthetic construct
  misc_feature 1..1587: note = Variant of terminal deoxynucleotidyltransferase
  source 1..1587: mol_type = other DNA
atgcaccatcatcatcatcatggcggtagcggcatgcaccgcattcgtaccatcgattcggacttcgggaagaaacgccagaagaagatggataaccacattagttccatgatctatgaaatcaaatttcacgagtttgtgctgttcattctcgaaaagaaaatgggtgcgacgcgtcgtacttttctgacagatttagcccgcaagaaagggttccgcgtcgagaatgaactgtcagacagcgttacccacatcgtggcagaaaataattcaggatctgacgtattggcttggctgaagacccacaagggggagaagacgacgcaatttgaactgctggatattagctggcttatcgaaagcatgaaagttggtaaaccggtggacaccaaggggaaataccagttgatggaatcgcgtgtcgatagtgcgaacccagatccgacagccggtaccctcaacattctgcctcctactacgaagaccatttctcagtatgcgtgtcaacgccgcaccaccctgaacaaccataatcaacgttttacggacgcactggaaattcttgcggaaaattacgagttcaaacgcaacgatgatacttgtctgacctttatgcgtgctatttccgtgctgaaatgccttccgtttgaggtagttagcctgaaagacacggaaggattgccctggatcggtgatgaagtcaaagggattatggaagaaatcatcgaggtcggtgaatcgctggaagtgcaggccgtgctcaatgatgagcgctatcaaagcttcaaactgtttaagagtgtctttggagtgggggtgaagacagcagacaaatggtaccgtatgggtctgcgcacgctcgaggatgttcgttccagcaagaccctgaagttgaccaagatgcagaaagcgggtctgtgctattatgaagatcttgctgatggcgttacgaaagccgaagctgacgcgatttctctgctggttcaggatgcagtctggactttcgacccggatgcgctggtggagattacgggtggatttcgtcgtgggaaaccttttggtcacgacgttgatctgcttatcacatctccgggagctgagaaagaacaagaagaccagctcctgcagaaagtgaccaatctgtggaagaaacaagggttgttgctgtacggtgatctgcgtgaaagtcgctttgaagatgggaaactcccatcccgcaagatcgatgccctggaccattttcagaaatgctttgctatcctcaaactttatcaccataaagtggacaaaagcaaatgggaaatgccgacgggttcgaacgaaagcgaggccaaaagttggaaagcaattcgcgtagatctggttgtttgtccctacgatcgttttgcgtttgcgttgttgggttggaccggaagccgcatgttcgaacgtgatctgcgccgctacgccacccacgagaagaagatgatgctggacaatcatgcgctgtatgacctgaccaagaaaatctttctcaaagctaaatcggaagaggaaattttcgcacatctggggcttgaatacctggaaccgtccgaacgtaacgca

SEQ ID NO: 414 - protein, 529 aa, synthetic construct
  REGION 1..529: note = Variant of terminal deoxynucleotidyltransferase
MHHHHHHGGSGMHRIRTIDSDFGKKRQKKMDNHISSMIYEIKFHEFVLFILEKKMGATRRTFLTDLARKKGFRVENELSDSVTHIVAENNSGSDVLAWLKTHKGEKTTQFELLDISWLIESMKVGKPVDTKGKYQLMESRVDSANPDPTAGTLNILPPTTKTISQYACQRRTTLNNHNQRFTDALEILAENYEFKRNDDTCLTFMRAISVLKCLPFEVVSLKDTEGLPWIGDEVKGIMEEIIEVGESLEVQAVLNDERYQSFKLFKSVFGVGVKTADKWYRMGLRTLEDVRSSKTLKLTKMQKAGLCYYEDLADGVTKAEADAISLLVQDAVWTFDPDALVEITGGFRRGKPFGHDVDLLITSPGAEKEQEDQLLQKVTNLWKKQGLLLYGDLRESRFEDGKLPSRKIDALDHFQKCFAILKLYHHKVDKSKWEMPTGSNESEAKSWKAIRVDLVVCPYDRFAFALLGWTGSRMFERDLRRYATHEKKMMLDNHALYDLTKKIFLKAKSEEEIFAHLGLEYLEPSERNA

SEQ ID NO: 415 - DNA, 1587 bp, synthetic construct
  misc_feature 1..1587: note = Variant of terminal deoxynucleotidyltransferase
  source 1..1587: mol_type = other DNA
atgcaccatcatcatcatcatggcggtagcggcatgaagcgcattcgtaccatcgattcggacttcgggaagaaacgccagaagaagatggataaccacattagttccatgatctatgaaatcaaatttcacgagtttgtgctgttcattctcgaaaagaaaatgggtgcgacgcgtcgtacttttctgacagatttagcccgcaagaaagggttccgcgtcgagaatgaactgtcagacagcgttacccacatcgtggcagaaaataattcaggatctgacgtattggcttggctgaagacccacaagatggagaagacgacgcaatttgaactgctggatattagctggcttatcgaaagcatgaaagttggtaaaccggtggacaccaaggggaaataccagttgatggaatcgcgtgtcgatagtgcgaacccagatccgacagccggtaccctcaacattctgcctcctactacgaagaccatttctcagtatgcgtgtcaacgccgcaccaccctgaacaaccataatcaacgttttacggacgcactggaaattcttgcggaaaattacgagttcaaacgcaacgatgatacttgtctgacctttatgcgtgctatttccgtgctgaaatgccttccgtttgaggtagttagcctgaaagacacggaaggattgccctggatcggtgatgaagtcaaagggattatggaagaaatcatcgaggtcggtgaatcgctggaagtgcaggccgtgctcaatgatgagcgctatcaaagcttcaaactgtttaagagtgtctttggagtgggggtgaagacagcagacaaatggtaccgtatgggtctgcgcacgctcgaggatgttcgttccagcaagaccctgaagttgaccaagatgcagaaagcgggtctgtgctattatgaagatcttgctgatggcgttacgaaagccgaagctgacgcgatttctctgctggttcaggatgcagtctggactttcgacccggatgcgctggtggagattacgggtggatttcgtcgtgggaaaccttttggtcacgacgttgatctgcttatcacatctccgggagctgagaaagaacaagaagaccagctcctgcagaaagtgaccaatctgtggaagaaacaagggttgttgctgtacggtgatctgcgtgaaagtcgctttgaagatgggaaactcccatcccgcaagatcgatgccctggaccattttcagaaatgctttgctatcctcaaactttatcaccataaagtggacaaaagcaaatgggaaatgccgacgggttcgaacgaaagcgaggccaaaagttggaaagcaattcgcgtagatctggttgtttgtccctacgatcgttttgcgtttgcgttgttgggttggaccggaagccgcatgttcgaacgtgatctgcgccgctacgccacccacgagaagaagatgatgctggacaatcatgcgctgtatgacctgaccaagaaaatctttctcaaagctaaatcggaagaggaaattttcgcacatctggggcttgaatacctggaaccgtccgaacgtaacgca

SEQ ID NO: 416 - protein, 529 aa, synthetic construct
  REGION 1..529: note = Variant of terminal deoxynucleotidyltransferase
MHHHHHHGGSGMKRIRTIDSDFGKKRQKKMDNHISSMIYEIKFHEFVLFILEKKMGATRRTFLTDLARKKGFRVENELSDSVTHIVAENNSGSDVLAWLKTHKMEKTTQFELLDISWLIESMKVGKPVDTKGKYQLMESRVDSANPDPTAGTLNILPPTTKTISQYACQRRTTLNNHNQRFTDALEILAENYEFKRNDDTCLTFMRAISVLKCLPFEVVSLKDTEGLPWIGDEVKGIMEEIIEVGESLEVQAVLNDERYQSFKLFKSVFGVGVKTADKWYRMGLRTLEDVRSSKTLKLTKMQKAGLCYYEDLADGVTKAEADAISLLVQDAVWTFDPDALVEITGGFRRGKPFGHDVDLLITSPGAEKEQEDQLLQKVTNLWKKQGLLLYGDLRESRFEDGKLPSRKIDALDHFQKCFAILKLYHHKVDKSKWEMPTGSNESEAKSWKAIRVDLVVCPYDRFAFALLGWTGSRMFERDLRRYATHEKKMMLDNHALYDLTKKIFLKAKSEEEIFAHLGLEYLEPSERNA

SEQ ID NO: 417 - DNA, 1587 bp, synthetic construct
  misc_feature 1..1587: note = Variant of terminal deoxynucleotidyltransferase
  source 1..1587: mol_type = other DNA
atgcaccatcatcatcatcatggcggtagcggcatgcaccgcattcgtaccatcgattcggacttcgggaagaaacgccagaagaagatggataaccacattagttccatgatctatgaaatcaaatttcacgagtttgtgctgttcattctcgaaaagaaaatgggtgcgacgcgtcgtacttttctgacagatttagcccgcaagaaagggttccgcgtcgagaatgaactgtcagacagcgttacccacatcgtggcagaaaataattcaggatctgacgtattggcttggctgaagacccacaagatggagaagacgacgcaatttgaactgctggatattagctggcttatcgaaagcatgaaagttggtaaaccggtggacaccaaggggaaataccagttgatggaatcgcgtgtcgatagtgcgaacccagatccgacagccggtaccatgaacattctgcctcctactacgaagaccatttctcagtatgcgtgtcaacgccgcaccaccctgaacaaccataatcaacgttttacggacgcactggaaattcttgcggaaaattacgagttcaaacgcaacgatgatacttgtctgacctttatgcgtgctatttccgtgctgaaatgccttccgtttgaggtagttagcctgaaagacacggaaggattgccctggatcggtgatgaagtcaaagggattatggaagaaatcatcgaggtcggtgaatcgctggaagtgcaggccgtgctcaatgatgagcgctatcaaagcttcaaactgtttaagagtgtctttggagtgggggtgaagacagcagacaaatggtaccgtatgggtctgcgcacgctcgaggatgttcgttccagcaagaccctgaagttgaccaagatgcagaaagcgggtctgtgctattatgaagatcttgctgatggcgttacgaaagccgaagctgacgcgatttctctgctggttcaggatgcagtctggactttcgacccggatgcgctggtggagattacgggtggatttcgtcgtgggaaaccttttggtcacgacgttgatctgcttatcacatctccgggagctgagaaagaacaagaagaccagctcctgcagaaagtgaccaatctgtggaagaaacaagggttgttgctgtacggtgatctgcgtgaaagtcgctttgaagatgggaaactcccatcccgcaagatcgatgccctggaccattttcagaaatgctttgctatcctcaaactttatcaccataaagtggacaaaagcaaatgggaaatgccgacgggttcgaacgaaagcgaggccaaaagttggaaagcaattcgcgtagatctggttgtttgtccctacgatcgttttgcgtttgcgttgttgggttggaccggaagccgcatgttcgaacgtgatctgcgccgctacgccacccacgagaagaagatgatgctggacaatcatgcgctgtatgacctgaccaagaaaatctttctcaaagctaaatcggaagaggaaattttcgcacatctggggcttgaatacctggaaccgtccgaacgtaacgca

SEQ ID NO: 418 - protein, 529 aa, synthetic construct
  REGION 1..529: note = Variant of terminal deoxynucleotidyltransferase
MHHHHHHGGSGMHRIRTIDSDFGKKRQKKMDNHISSMIYEIKFHEFVLFILEKKMGATRRTFLTDLARKKGFRVENELSDSVTHIVAENNSGSDVLAWLKTHKMEKTTQFELLDISWLIESMKVGKPVDTKGKYQLMESRVDSANPDPTAGTMNILPPTTKTISQYACQRRTTLNNHNQRFTDALEILAENYEFKRNDDTCLTFMRAISVLKCLPFEVVSLKDTEGLPWIGDEVKGIMEEIIEVGESLEVQAVLNDERYQSFKLFKSVFGVGVKTADKWYRMGLRTLEDVRSSKTLKLTKMQKAGLCYYEDLADGVTKAEADAISLLVQDAVWTFDPDALVEITGGFRRGKPFGHDVDLLITSPGAEKEQEDQLLQKVTNLWKKQGLLLYGDLRESRFEDGKLPSRKIDALDHFQKCFAILKLYHHKVDKSKWEMPTGSNESEAKSWKAIRVDLVVCPYDRFAFALLGWTGSRMFERDLRRYATHEKKMMLDNHALYDLTKKIFLKAKSEEEIFAHLGLEYLEPSERNA

SEQ ID NO: 419 - DNA, 1587 bp, synthetic construct
  misc_feature 1..1587: note = Variant of terminal deoxynucleotidyltransferase
  source 1..1587: mol_type = other DNA
atgcaccatcatcatcatcatggcggtagcggcatgcaccgcattcgtaccatcgattcggacttcgggaagaaacgccagaagaagatggataacccgattagttccatgatctatgaaatcaaatttcacgagtttgtgctgttcattctcgaaaagaaaatgggtgcgacgcgtcgtacttttctgacagatttagcccgcaagaaagggttccgcgtcgagaatgaactgtcagacagcgttacccacatcgtggcagaaaataattcaggatctgacgtattggcttggctgaagacccacaagatggagaagacgacgcaatttgaactgctggatattagctggcttatcgaaagcatgaaagttggtaaaccggtggacaccaaggggaaataccagttgatggaatcgcgtgtcgatagtgcgaacccagatccgacagccggtaccctcaacattctgcctcctactacgaagaccatttctcagtatgcgtgtcaacgccgcaccaccctgaacaaccataatcaacgttttacggacgcactggaaattcttgcggaaaattacgagttcaaacgcaacgatgatacttgtctgacctttatgcgtgctatttccgtgctgaaatgccttccgtttgaggtagttagcctgaaagacacggaaggattgccctggatcggtgatgaagtcaaagggattatggaagaaatcatcgaggtcggtgaatcgctggaagtgcaggccgtgctcaatgatgagcgctatcaaagcttcaaactgtttaagagtgtctttggagtgggggtgaagacagcagacaaatggtaccgtatgggtctgcgcacgctcgaggatgttcgttccagcaagaccctgaagttgaccaagatgcagaaagcgggtctgtgctattatgaagatcttgctgatggcgttacgaaagccgaagctgacgcgatttctctgctggttcaggatgcagtctggactttcgacccggatgcgctggtggagattacgggtggatttcgtcgtgggaaaccttttggtcacgacgttgatctgcttatcacatctccgggagctgagaaagaacaagaagaccagctcctgcagaaagtgaccaatctgtggaagaaacaagggttgttgctgtacggtgatctgcgtgaaagtcgctttgaagatgggaaactcccatcccgcaagatcgatgccctggaccattttcagaaatgctttgctatcctcaaactttatcaccataaagtggacaaaagcaaatgggaaatgccgacgggttcgaacgaaagcgaggccaaaagttggaaagcaattcgcgtagatctggttgtttgtccctacgatcgttttgcgtttgcgttgttgggttggaccggaagccgcatgttcgaacgtgatctgcgccgctacgccacccacgagaagaagatgatgctggacaatcatgcgctgtatgacctgaccaagaaaatctttctcaaagctaaatcggaagaggaaattttcgcacatctggggcttgaatacctggaaccgtccgaacgtaacgca

SEQ ID NO: 420 - protein, 529 aa, synthetic construct
  REGION 1..529: note = Variant of terminal deoxynucleotidyltransferase
MHHHHHHGGSGMHRIRTIDSDFGKKRQKKMDNPISSMIYEIKFHEFVLFILEKKMGATRRTFLTDLARKKGFRVENELSDSVTHIVAENNSGSDVLAWLKTHKMEKTTQFELLDISWLIESMKVGKPVDTKGKYQLMESRVDSANPDPTAGTLNILPPTTKTISQYACQRRTTLNNHNQRFTDALEILAENYEFKRNDDTCLTFMRAISVLKCLPFEVVSLKDTEGLPWIGDEVKGIMEEIIEVGESLEVQAVLNDERYQSFKLFKSVFGVGVKTADKWYRMGLRTLEDVRSSKTLKLTKMQKAGLCYYEDLADGVTKAEADAISLLVQDAVWTFDPDALVEITGGFRRGKPFGHDVDLLITSPGAEKEQEDQLLQKVTNLWKKQGLLLYGDLRESRFEDGKLPSRKIDALDHFQKCFAILKLYHHKVDKSKWEMPTGSNESEAKSWKAIRVDLVVCPYDRFAFALLGWTGSRMFERDLRRYATHEKKMMLDNHALYDLTKKIFLKAKSEEEIFAHLGLEYLEPSERNA

SEQ ID NO: 421 - DNA, 1587 bp, synthetic construct
  misc_feature 1..1587: note = Variant of terminal deoxynucleotidyltransferase
  source 1..1587: mol_type = other DNA
atgcaccatcatcatcatcatggcggtagcggcatgcaccgcattcgtaccatcgattcggacttcgggaagaaacgccagaagaagatggataaccacattagttccatgatctatgaaatcaaatttcacgagtttgtgctgttcattctcgaaaagaaaatgggtgcgacgcgtcgtacttttctgacagatttagcccgcaagaaagggttccgcgtcgagaatgaactgtcagacagcgttacccacatcgtggcagaaaataattcaggatctgacgtattggcttggctgaagacccacaagatggagaagacggatcaatttgaactgctggatattagctggcttatcgaaagcatgaaagttggtaaaccggtggacaccaaggggaaataccagttgatggaatcgcgtgtcgatagtgcgaacccagatccgacagccggtaccctcaacattctgcctcctactacgaagaccatttctcagtatgcgtgtcaacgccgcaccaccctgaacaaccataatcaacgttttacggacgcactggaaattcttgcggaaaattacgagttcaaacgcaacgatgatacttgtctgacctttatgcgtgctatttccgtgctgaaatgccttccgtttgaggtagttagcctgaaagacacggaaggattgccctggatcggtgatgaagtcaaagggattatggaagaaatcatcgaggtcggtgaatcgctggaagtgcaggccgtgctcaatgatgagcgctatcaaagcttcaaactgtttaagagtgtctttggagtgggggtgaagacagcagacaaatggtaccgtatgggtctgcgcacgctcgaggatgttcgttccagcaagaccctgaagttgaccaagatgcagaaagcgggtctgtgctattatgaagatcttgctgatggcgttacgaaagccgaagctgacgcgatttctctgctggttcaggatgcagtctggactttcgacccggatgcgctggtggagattacgggtggatttcgtcgtgggaaaccttttggtcacgacgttgatctgcttatcacatctccgggagctgagaaagaacaagaagaccagctcctgcagaaagtgaccaatctgtggaagaaacaagggttgttgctgtacggtgatctgcgtgaaagtcgctttgaagatgggaaactcccatcccgcaagatcgatgccctggaccattttcagaaatgctttgctatcctcaaactttatcaccataaagtggacaaaagcaaatgggaaatgccgacgggttcgaacgaaagcgaggccaaaagttggaaagcaattcgcgtagatctggttgtttgtccctacgatcgttttgcgtttgcgttgttgggttggaccggaagccgcatgttcgaacgtgatctgcgccgctacgccacccacgagaagaagatgatgctggacaatcatgcgctgtatgacctgaccaagaaaatctttctcaaagctaaatcggaagaggaaattttcgcacatctggggcttgaatacctggaaccgtccgaacgtaacgca

SEQ ID NO: 422 - protein, 529 aa, synthetic construct
  REGION 1..529: note = Variant of terminal deoxynucleotidyltransferase
MHHHHHHGGSGMHRIRTIDSDFGKKRQKKMDNHISSMIYEIKFHEFVLFILEKKMGATRRTFLTDLARKKGFRVENELSDSVTHIVAENNSGSDVLAWLKTHKMEKTDQFELLDISWLIESMKVGKPVDTKGKYQLMESRVDSANPDPTAGTLNILPPTTKTISQYACQRRTTLNNHNQRFTDALEILAENYEFKRNDDTCLTFMRAISVLKCLPFEVVSLKDTEGLPWIGDEVKGIMEEIIEVGESLEVQAVLNDERYQSFKLFKSVFGVGVKTADKWYRMGLRTLEDVRSSKTLKLTKMQKAGLCYYEDLADGVTKAEADAISLLVQDAVWTFDPDALVEITGGFRRGKPFGHDVDLLITSPGAEKEQEDQLLQKVTNLWKKQGLLLYGDLRESRFEDGKLPSRKIDALDHFQKCFAILKLYHHKVDKSKWEMPTGSNESEAKSWKAIRVDLVVCPYDRFAFALLGWTGSRMFERDLRRYATHEKKMMLDNHALYDLTKKIFLKAKSEEEIFAHLGLEYLEPSERNA

SEQ ID NO: 423 - DNA, 1587 bp, synthetic construct
  misc_feature 1..1587: note = Variant of terminal deoxynucleotidyltransferase
  source 1..1587: mol_type = other DNA
atgcaccatcatcatcatcatggcggtagcggcatgcaccgcattcgtaccatcgattcggacttcgggaagaaacgccagaagaagatggataaccacattagttccatgatctatgaaatcaaatttcacgagtttgtgctgttcattctcgaaaagaaaatgggtgcgacgcgtcgtacttttctgacagatttagcccgcaagaaagggttccgcgtcgagaatgaactgtcagacagcgttacccacatcgtggcagaaaataattcaggatctgacgtattggcttggctgaagacccacaagatggagaagacgacgcaatttgaactgctggatattagctggcttatcgaaagcatgaaagttggtaaaccggtggacaccaaggggaaataccagttgatggaagctcgtgtcgatagtgcgaacccagatccgacagccggtaccctcaacattctgcctcctactacgaagaccatttctcagtatgcgtgtcaacgccgcaccaccctgaacaaccataatcaacgttttacggacgcactggaaattcttgcggaaaattacgagttcaaacgcaacgatgatacttgtctgacctttatgcgtgctatttccgtgctgaaatgccttccgtttgaggtagttagcctgaaagacacggaaggattgccctggatcggtgatgaagtcaaagggattatggaagaaatcatcgaggtcggtgaatcgctggaagtgcaggccgtgctcaatgatgagcgctatcaaagcttcaaactgtttaagagtgtctttggagtgggggtgaagacagcagacaaatggtaccgtatgggtctgcgcacgctcgaggatgttcgttccagcaagaccctgaagttgaccaagatgcagaaagcgggtctgtgctattatgaagatcttgctgatggcgttacgaaagccgaagctgacgcgatttctctgctggttcaggatgcagtctggactttcgacccggatgcgctggtggagattacgggtggatttcgtcgtgggaaaccttttggtcacgacgttgatctgcttatcacatctccgggagctgagaaagaacaagaagaccagctcctgcagaaagtgaccaatctgtggaagaaacaagggttgttgctgtacggtgatctgcgtgaaagtcgctttgaagatgggaaactcccatcccgcaagatcgatgccctggaccattttcagaaatgctttgctatcctcaaactttatcaccataaagtggacaaaagcaaatgggaaatgccgacgggttcgaacgaaagcgaggccaaaagttggaaagcaattcgcgtagatctggttgtttgtccctacgatcgttttgcgtttgcgttgttgggttggaccggaagccgcatgttcgaacgtgatctgcgccgctacgccacccacgagaagaagatgatgctggacaatcatgcgctgtatgacctgaccaagaaaatctttctcaaagctaaatcggaagaggaaattttcgcacatctggggcttgaatacctggaaccgtccgaacgtaacgca

SEQ ID NO: 424 - protein, 529 aa, synthetic construct
  REGION 1..529: note = Variant of terminal deoxynucleotidyltransferase
MHHHHHHGGSGMHRIRTIDSDFGKKRQKKMDNHISSMIYEIKFHEFVLFILEKKMGATRRTFLTDLARKKGFRVENELSDSVTHIVAENNSGSDVLAWLKTHKMEKTTQFELLDISWLIESMKVGKPVDTKGKYQLMEARVDSANPDPTAGTLNILPPTTKTISQYACQRRTTLNNHNQRFTDALEILAENYEFKRNDDTCLTFMRAISVLKCLPFEVVSLKDTEGLPWIGDEVKGIMEEIIEVGESLEVQAVLNDERYQSFKLFKSVFGVGVKTADKWYRMGLRTLEDVRSSKTLKLTKMQKAGLCYYEDLADGVTKAEADAISLLVQDAVWTFDPDALVEITGGFRRGKPFGHDVDLLITSPGAEKEQEDQLLQKVTNLWKKQGLLLYGDLRESRFEDGKLPSRKIDALDHFQKCFAILKLYHHKVDKSKWEMPTGSNESEAKSWKAIRVDLVVCPYDRFAFALLGWTGSRMFERDLRRYATHEKKMMLDNHALYDLTKKIFLKAKSEEEIFAHLGLEYLEPSERNA

SEQ ID NO: 425 - DNA, 1587 bp, synthetic construct
  misc_feature 1..1587: note = Variant of terminal deoxynucleotidyltransferase
  source 1..1587: mol_type = other DNA
atgcaccatcatcatcatcatggcggtagcggcatgcaccgcattcgtgggatcgattcggacttcgggaagaaacgccagaagaagatggataaccacattagttccatgatctatgaaatcaaatttcacgagtttgtgctgttcattctcgaaaagaaaatgggtgcgacgcgtcgtacttttctgacagatttagcccgcaagaaagggttccgcgtcgagaatgaactgtcagacagcgttacccacatcgtggcagaaaataattcaggatctgacgtattggcttggctgaagacccacaagatggagaagacgacgcaatttgaactgctggatattagctggcttatcgaaagcatgaaagttggtaaaccggtggacaccaaggggaaataccagttgatggaatcgcgtgtcgatagtgcgaacccagatccgacagccggtaccctcaacattctgcctcctactacgaagaccatttctcagtatgcgtgtcaacgccgcaccaccctgaacaaccataatcaacgttttacggacgcactggaaattcttgcggaaaattacgagttcaaacgcaacgatgatacttgtctgacctttatgcgtgctatttccgtgctgaaatgccttccgtttgaggtagttagcctgaaagacacggaaggattgccctggatcggtgatgaagtcaaagggattatggaagaaatcatcgaggtcggtgaatcgctggaagtgcaggccgtgctcaatgatgagcgctatcaaagcttcaaactgtttaagagtgtctttggagtgggggtgaagacagcagacaaatggtaccgtatgggtctgcgcacgctcgaggatgttcgttccagcaagaccctgaagttgaccaagatgcagaaagcgggtctgtgctattatgaagatcttgctgatggcgttacgaaagccgaagctgacgcgatttctctgctggttcaggatgcagtctggactttcgacccggatgcgctggtggagattacgggtggatttcgtcgtgggaaaccttttggtcacgacgttgatctgcttatcacatctccgggagctgagaaagaacaagaagaccagctcctgcagaaagtgaccaatctgtggaagaaacaagggttgttgctgtacggtgatctgcgtgaaagtcgctttgaagatgggaaactcccatcccgcaagatcgatgccctggaccattttcagaaatgctttgctatcctcaaactttatcaccataaagtggacaaaagcaaatgggaaatgccgacgggttcgaacgaaagcgaggccaaaagttggaaagcaattcgcgtagatctggttgtttgtccctacgatcgttttgcgtttgcgttgttgggttggaccggaagccgcatgttcgaacgtgatctgcgccgctacgccacccacgagaagaagatgatgctggacaatcatgcgctgtatgacctgaccaagaaaatctttctcaaagctaaatcggaagaggaaattttcgcacatctggggcttgaatacctggaaccgtccgaacgtaacgca

SEQ ID NO: 426 - protein, 529 aa, synthetic construct
  REGION 1..529: note = Variant of terminal deoxynucleotidyltransferase
MHHHHHHGGSGMHRIRGIDSDFGKKRQKKMDNHISSMIYEIKFHEFVLFILEKKMGATRRTFLTDLARKKGFRVENELSDSVTHIVAENNSGSDVLAWLKTHKMEKTTQFELLDISWLIESMKVGKPVDTKGKYQLMESRVDSANPDPTAGTLNILPPTTKTISQYACQRRTTLNNHNQRFTDALEILAENYEFKRNDDTCLTFMRAISVLKCLPFEVVSLKDTEGLPWIGDEVKGIMEEIIEVGESLEVQAVLNDERYQSFKLFKSVFGVGVKTADKWYRMGLRTLEDVRSSKTLKLTKMQKAGLCYYEDLADGVTKAEADAISLLVQDAVWTFDPDALVEITGGFRRGKPFGHDVDLLITSPGAEKEQEDQLLQKVTNLWKKQGLLLYGDLRESRFEDGKLPSRKIDALDHFQKCFAILKLYHHKVDKSKWEMPTGSNESEAKSWKAIRVDLVVCPYDRFAFALLGWTGSRMFERDLRRYATHEKKMMLDNHALYDLTKKIFLKAKSEEEIFAHLGLEYLEPSERNA

SEQ ID NO: 427 - DNA, 1587 bp, synthetic construct
  misc_feature 1..1587: note = Variant of terminal deoxynucleotidyltransferase
  source 1..1587: mol_type = other DNA
atgcaccatcatcatcatcatggcggtagcggcatgcaccgcattcgtaccatcgattcggacttcgggaagaaacgccagaagaagatggataaccacattagttccagtatctatgaaatcaaatttcacgagtttgtgctgttcattctcgaaaagaaaatgggtgcgacgcgtcgtacttttctgacagatttagcccgcaagaaagggttccgcgtcgagaatgaactgtcagacagcgttacccacatcgtggcagaaaataattcaggatctgacgtattggcttggctgaagacccacaagatggagaagacgacgcaatttgaactgctggatattagctggcttatcgaaagcatgaaagttggtaaaccggtggacaccaaggggaaataccagttgatggaatcgcgtgtcgatagtgcgaacccagatccgacagccggtaccctcaacattctgcctcctactacgaagaccatttctcagtatgcgtgtcaacgccgcaccaccctgaacaaccataatcaacgttttacggacgcactggaaattcttgcggaaaattacgagttcaaacgcaacgatgatacttgtctgacctttatgcgtgctatttccgtgctgaaatgccttccgtttgaggtagttagcctgaaagacacggaaggattgccctggatcggtgatgaagtcaaagggattatggaagaaatcatcgaggtcggtgaatcgctggaagtgcaggccgtgctcaatgatgagcgctatcaaagcttcaaactgtttaagagtgtctttggagtgggggtgaagacagcagacaaatggtaccgtatgggtctgcgcacgctcgaggatgttcgttccagcaagaccctgaagttgaccaagatgcagaaagcgggtctgtgctattatgaagatcttgctgatggcgttacgaaagccgaagctgacgcgatttctctgctggttcaggatgcagtctggactttcgacccggatgcgctggtggagattacgggtggatttcgtcgtgggaaaccttttggtcacgacgttgatctgcttatcacatctccgggagctgagaaagaacaagaagaccagctcctgcagaaagtgaccaatctgtggaagaaacaagggttgttgctgtacggtgatctgcgtgaaagtcgctttgaagatgggaaactcccatcccgcaagatcgatgccctggaccattttcagaaatgctttgctatcctcaaactttatcaccataaagtggacaaaagcaaatgggaaatgccgacgggttcgaacgaaagcgaggccaaaagttggaaagcaattcgcgtagatctggttgtttgtccctacgatcgttttgcgtttgcgttgttgggttggaccggaagccgcatgttcgaacgtgatctgcgccgctacgccacccacgagaagaagatgatgctggacaatcatgcgctgtatgacctgaccaagaaaatctttctcaaagctaaatcggaagaggaaattttcgcacatctggggcttgaatacctggaaccgtccgaacgtaacgca

SEQ ID NO: 428 - protein, 529 aa, synthetic construct
  REGION 1..529: note = Variant of terminal deoxynucleotidyltransferase
MHHHHHHGGSGMHRIRTIDSDFGKKRQKKMDNHISSSIYEIKFHEFVLFILEKKMGATRRTFLTDLARKKGFRVENELSDSVTHIVAENNSGSDVLAWLKTHKMEKTTQFELLDISWLIESMKVGKPVDTKGKYQLMESRVDSANPDPTAGTLNILPPTTKTISQYACQRRTTLNNHNQRFTDALEILAENYEFKRNDDTCLTFMRAISVLKCLPFEVVSLKDTEGLPWIGDEVKGIMEEIIEVGESLEVQAVLNDERYQSFKLFKSVFGVGVKTADKWYRMGLRTLEDVRSSKTLKLTKMQKAGLCYYEDLADGVTKAEADAISLLVQDAVWTFDPDALVEITGGFRRGKPFGHDVDLLITSPGAEKEQEDQLLQKVTNLWKKQGLLLYGDLRESRFEDGKLPSRKIDALDHFQKCFAILKLYHHKVDKSKWEMPTGSNESEAKSWKAIRVDLVVCPYDRFAFALLGWTGSRMFERDLRRYATHEKKMMLDNHALYDLTKKIFLKAKSEEEIFAHLGLEYLEPSERNA

SEQ ID NO: 429 - DNA, 1587 bp, synthetic construct
  misc_feature 1..1587: note = Variant of terminal deoxynucleotidyltransferase
  source 1..1587: mol_type = other DNA
atgcaccatcatcatcatcatggcggtagcggcatgcaccgcattcgtacccgggattcggacttcgggaagaaacgccagaagaagatggataaccacattagttccatgatctatgaaatcaaatttcacgagtttgtgctgttcattctcgaaaagaaaatgggtgcgacgcgtcgtacttttctgacagatttagcccgcaagaaagggttccgcgtcgagaatgaactgtcagacagcgttacccacatcgtggcagaaaataattcaggatctgacgtattggcttggctgaagacccacaagatggagaagacgacgcaatttgaactgctggatattagctggcttatcgaaagcatgaaagttggtaaaccggtggacaccaaggggaaataccagttgatggaatcgcgtgtcgatagtgcgaacccagatccgacagccggtaccctcaacattctgcctcctactacgaagaccatttctcagtatgcgtgtcaacgccgcaccaccctgaacaaccataatcaacgttttacggacgcactggaaattcttgcggaaaattacgagttcaaacgcaacgatgatacttgtctgacctttatgcgtgctatttccgtgctgaaatgccttccgtttgaggtagttagcctgaaagacacggaaggattgccctggatcggtgatgaagtcaaagggattatggaagaaatcatcgaggtcggtgaatcgctggaagtgcaggccgtgctcaatgatgagcgctatcaaagcttcaaactgtttaagagtgtctttggagtgggggtgaagacagcagacaaatggtaccgtatgggtctgcgcacgctcgaggatgttcgttccagcaagaccctgaagttgaccaagatgcagaaagcgggtctgtgctattatgaagatcttgctgatggcgttacgaaagccgaagctgacgcgatttctctgctggttcaggatgcagtctggactttcgacccggatgcgctggtggagattacgggtggatttcgtcgtgggaaaccttttggtcacgacgttgatctgcttatcacatctccgggagctgagaaagaacaagaagaccagctcctgcagaaagtgaccaatctgtggaagaaacaagggttgttgctgtacggtgatctgcgtgaaagtcgctttgaagatgggaaactcccatcccgcaagatcgatgccctggaccattttcagaaatgctttgctatcctcaaactttatcaccataaagtggacaaaagcaaatgggaaatgccgacgggttcgaacgaaagcgaggccaaaagttggaaagcaattcgcgtagatctggttgtttgtccctacgatcgttttgcgtttgcgttgttgggttggaccggaagccgcatgttcgaacgtgatctgcgccgctacgccacccacgagaagaagatgatgctggacaatcatgcgctgtatgacctgaccaagaaaatctttctcaaagctaaatcggaagaggaaattttcgcacatctggggcttgaatacctggaaccgtccgaacgtaacgca

SEQ ID NO: 430 - protein, 529 aa, synthetic construct
  REGION 1..529: note = Variant of terminal deoxynucleotidyltransferase
MHHHHHHGGSGMHRIRTRDSDFGKKRQKKMDNHISSMIYEIKFHEFVLFILEKKMGATRRTFLTDLARKKGFRVENELSDSVTHIVAENNSGSDVLAWLKTHKMEKTTQFELLDISWLIESMKVGKPVDTKGKYQLMESRVDSANPDPTAGTLNILPPTTKTISQYACQRRTTLNNHNQRFTDALEILAENYEFKRNDDTCLTFMRAISVLKCLPFEVVSLKDTEGLPWIGDEVKGIMEEIIEVGESLEVQAVLNDERYQSFKLFKSVFGVGVKTADKWYRMGLRTLEDVRSSKTLKLTKMQKAGLCYYEDLADGVTKAEADAISLLVQDAVWTFDPDALVEITGGFRRGKPFGHDVDLLITSPGAEKEQEDQLLQKVTNLWKKQGLLLYGDLRESRFEDGKLPSRKIDALDHFQKCFAILKLYHHKVDKSKWEMPTGSNESEAKSWKAIRVDLVVCPYDRFAFALLGWTGSRMFERDLRRYATHEKKMMLDNHALYDLTKKIFLKAKSEEEIFAHLGLEYLEPSERNA

SEQ ID NO: 431 - DNA, 1587 bp, synthetic construct
  misc_feature 1..1587: note = Variant of terminal deoxynucleotidyltransferase
  source 1..1587: mol_type = other DNA
atgcaccatcatcatcatcatggcggtagcggcatgcaccgcattcgtaccatcgattcggacttcccgaagaaacgccagaagaagatggataaccacattagttccatgatctatgaaatcaaatttcacgagtttgtgctgttcattctcgaaaagaaaatgggtgcgacgcgtcgtacttttctgacagatttagcccgcaagaaagggttccgcgtcgagaatgaactgtcagacagcgttacccacatcgtggcagaaaataattcaggatctgacgtattggcttggctgaagacccacaagatggagaagacgacgcaatttgaactgctggatattagctggcttatcgaaagcatgaaagttggtaaaccggtggacaccaaggggaaataccagttgatggaatcgcgtgtcgatagtgcgaacccagatccgacagccggtaccctcaacattctgcctcctactacgaagaccatttctcagtatgcgtgtcaacgccgcaccaccctgaacaaccataatcaacgttttacggacgcactggaaattcttgcggaaaattacgagttcaaacgcaacgatgatacttgtctgacctttatgcgtgctatttccgtgctgaaatgccttccgtttgaggtagttagcctgaaagacacggaaggattgccctggatcggtgatgaagtcaaagggattatggaagaaatcatcgaggtcggtgaatcgctggaagtgcaggccgtgctcaatgatgagcgctatcaaagcttcaaactgtttaagagtgtctttggagtgggggtgaagacagcagacaaatggtaccgtatgggtctgcgcacgctcgaggatgttcgttccagcaagaccctgaagttgaccaagatgcagaaagcgggtctgtgctattatgaagatcttgctgatggcgttacgaaagccgaagctgacgcgatttctctgctggttcaggatgcagtctggactttcgacccggatgcgctggtggagattacgggtggatttcgtcgtgggaaaccttttggtcacgacgttgatctgcttatcacatctccgggagctgagaaagaacaagaagaccagctcctgcagaaagtgaccaatctgtggaagaaacaagggttgttgctgtacggtgatctgcgtgaaagtcgctttgaagatgggaaactcccatcccgcaagatcgatgccctggaccattttcagaaatgctttgctatcctcaaactttatcaccataaagtggacaaaagcaaatgggaaatgccgacgggttcgaacgaaagcgaggccaaaagttggaaagcaattcgcgtagatctggttgtttgtccctacgatcgttttgcgtttgcgttgttgggttggaccggaagccgcatgttcgaacgtgatctgcgccgctacgccacccacgagaagaagatgatgctggacaatcatgcgctgtatgacctgaccaagaaaatctttctcaaagctaaatcggaagaggaaattttcgcacatctggggcttgaatacctggaaccgtccgaacgtaacgca

SEQ ID NO: 432 - protein, 529 aa, synthetic construct
  REGION 1..529: note = Variant of terminal deoxynucleotidyltransferase
MHHHHHHGGSGMHRIRTIDSDFPKKRQKKMDNHISSMIYEIKFHEFVLFILEKKMGATRRTFLTDLARKKGFRVENELSDSVTHIVAENNSGSDVLAWLKTHKMEKTTQFELLDISWLIESMKVGKPVDTKGKYQLMESRVDSANPDPTAGTLNILPPTTKTISQYACQRRTTLNNHNQRFTDALEILAENYEFKRNDDTCLTFMRAISVLKCLPFEVVSLKDTEGLPWIGDEVKGIMEEIIEVGESLEVQAVLNDERYQSFKLFKSVFGVGVKTADKWYRMGLRTLEDVRSSKTLKLTKMQKAGLCYYEDLADGVTKAEADAISLLVQDAVWTFDPDALVEITGGFRRGKPFGHDVDLLITSPGAEKEQEDQLLQKVTNLWKKQGLLLYGDLRESRFEDGKLPSRKIDALDHFQKCFAILKLYHHKVDKSKWEMPTGSNESEAKSWKAIRVDLVVCPYDRFAFALLGWTGSRMFERDLRRYATHEKKMMLDNHALYDLTKKIFLKAKSEEEIFAHLGLEYLEPSERNA

SEQ ID NO: 433 - DNA, 1587 bp, synthetic construct
  misc_feature 1..1587: note = Variant of terminal deoxynucleotidyltransferase
  source 1..1587: mol_type = other DNA
atgcaccatcatcatcatcatggcggtagcggcatgcaccgcattcgtaccatcgattcggacttcgggaagaaacgccagaagaagatggataaccacattagttccatgatctatgaaatcaaatttcacgagtttgtgctgttcattctcgaaaagaaaatgggtgcgacgcgtcgtacttttctgacagatttagcccgcaagaaagggttccgcgtcgagaatgaactgtcagacagcgttacccacatcgtggcagaaaataattcaggatctgacgtattggcttggctgaagacccacaagatggagaagtggacgcaatttgaactgctggatattagctggcttatcgaaagcatgaaagttggtaaaccggtggacaccaaggggaaataccagttgatggaatcgcgtgtcgatagtgcgaacccagatccgacagccggtaccctcaacattctgcctcctactacgaagaccatttctcagtatgcgtgtcaacgccgcaccaccctgaacaaccataatcaacgttttacggacgcactggaaattcttgcggaaaattacgagttcaaacgcaacgatgatacttgtctgacctttatgcgtgctatttccgtgctgaaatgccttccgtttgaggtagttagcctgaaagacacggaaggattgccctggatcggtgatgaagtcaaagggattatggaagaaatcatcgaggtcggtgaatcgctggaagtgcaggccgtgctcaatgatgagcgctatcaaagcttcaaactgtttaagagtgtctttggagtgggggtgaagacagcagacaaatggtaccgtatgggtctgcgcacgctcgaggatgttcgttccagcaagaccctgaagttgaccaagatgcagaaagcgggtctgtgctattatgaagatcttgctgatggcgttacgaaagccgaagctgacgcgatttctctgctggttcaggatgcagtctggactttcgacccggatgcgctggtggagattacgggtggatttcgtcgtgggaaaccttttggtcacgacgttgatctgcttatcacatctccgggagctgagaaagaacaagaagaccagctcctgcagaaagtgaccaatctgtggaagaaacaagggttgttgctgtacggtgatctgcgtgaaagtcgctttgaagatgggaaactcccatcccgcaagatcgatgccctggaccattttcagaaatgctttgctatcctcaaactttatcaccataaagtggacaaaagcaaatgggaaatgccgacgggttcgaacgaaagcgaggccaaaagttggaaagcaattcgcgtagatctggttgtttgtccctacgatcgttttgcgtttgcgttgttgggttggaccggaagccgcatgttcgaacgtgatctgcgccgctacgccacccacgagaagaagatgatgctggacaatcatgcgctgtatgacctgaccaagaaaatctttctcaaagctaaatcggaagaggaaattttcgcacatctggggcttgaatacctggaaccgtccgaacgtaacgca

SEQ ID NO: 434 - protein, 529 aa, synthetic construct
  REGION 1..529: note = Variant of terminal deoxynucleotidyltransferase
MHHHHHHGGSGMHRIRTIDSDFGKKRQKKMDNHISSMIYEIKFHEFVLFILEKKMGATRRTFLTDLARKKGFRVENELSDSVTHIVAENNSGSDVLAWLKTHKMEKWTQFELLDISWLIESMKVGKPVDTKGKYQLMESRVDSANPDPTAGTLNILPPTTKTISQYACQRRTTLNNHNQRFTDALEILAENYEFKRNDDTCLTFMRAISVLKCLPFEVVSLKDTEGLPWIGDEVKGIMEEIIEVGESLEVQAVLNDERYQSFKLFKSVFGVGVKTADKWYRMGLRTLEDVRSSKTLKLTKMQKAGLCYYEDLADGVTKAEADAISLLVQDAVWTFDPDALVEITGGFRRGKPFGHDVDLLITSPGAEKEQEDQLLQKVTNLWKKQGLLLYGDLRESRFEDGKLPSRKIDALDHFQKCFAILKLYHHKVDKSKWEMPTGSNESEAKSWKAIRVDLVVCPYDRFAFALLGWTGSRMFERDLRRYATHEKKMMLDNHALYDLTKKIFLKAKSEEEIFAHLGLEYLEPSERNA

SEQ ID NO: 435 - DNA, 1587 bp, synthetic construct
  misc_feature 1..1587: note = Variant of terminal deoxynucleotidyltransferase
  source 1..1587: mol_type = other DNA
atgcaccatcatcatcatcatggcggtagcggcatgcaccgcattcgtaccatcgattcggacttcgggaagaaacgccagaagaagatggataaccacattagttccatgatctatgaaatcaaatttcacgagtttgtgctgttcattctcgaaaagaaaatgggtgcgacgcgtcgtacttttctgacagatttagcccgcaagaaagggttccgcgtcgagaatgaactgtcagacagcgttacccacatcgtggcagaaaataattcaggatctgacgtattggcttggctgaagacccacaagatggagaagacgacgcaatttgaactgctggatattagctggcttatcgaaagcatgaaagttggtgtgccggtggacaccaaggggaaataccagttgatggaatcgcgtgtcgatagtgcgaacccagatccgacagccggtaccctcaacattctgcctcctactacgaagaccatttctcagtatgcgtgtcaacgccgcaccaccctgaacaaccataatcaacgttttacggacgcactggaaattcttgcggaaaattacgagttcaaacgcaacgatgatacttgtctgacctttatgcgtgctatttccgtgctgaaatgccttccgtttgaggtagttagcctgaaagacacggaaggattgccctggatcggtgatgaagtcaaagggattatggaagaaatcatcgaggtcggtgaatcgctggaagtgcaggccgtgctcaatgatgagcgctatcaaagcttcaaactgtttaagagtgtctttggagtgggggtgaagacagcagacaaatggtaccgtatgggtctgcgcacgctcgaggatgttcgttccagcaagaccctgaagttgaccaagatgcagaaagcgggtctgtgctattatgaagatcttgctgatggcgttacgaaagccgaagctgacgcgatttctctgctggttcaggatgcagtctggactttcgacccggatgcgctggtggagattacgggtggatttcgtcgtgggaaaccttttggtcacgacgttgatctgcttatcacatctccgggagctgagaaagaacaagaagaccagctcctgcagaaagtgaccaatctgtggaagaaacaagggttgttgctgtacggtgatctgcgtgaaagtcgctttgaagatgggaaactcccatcccgcaagatcgatgccctggaccattttcagaaatgctttgctatcctcaaactttatcaccataaagtggacaaaagcaaatgggaaatgccgacgggttcgaacgaaagcgaggccaaaagttggaaagcaattcgcgtagatctggttgtttgtccctacgatcgttttgcgtttgcgttgttgggttggaccggaagccgcatgttcgaacgtgatctgcgccgctacgccacccacgagaagaagatgatgctggacaatcatgcgctgtatgacctgaccaagaaaatctttctcaaagctaaatcggaagaggaaattttcgcacatctggggcttgaatacctggaaccgtccgaacgtaacgca

SEQ ID NO: 436 - protein, 529 aa, synthetic construct
  REGION 1..529: note = Variant of terminal deoxynucleotidyltransferase
MHHHHHHGGSGMHRIRTIDSDFGKKRQKKMDNHISSMIYEIKFHEFVLFILEKKMGATRRTFLTDLARKKGFRVENELSDSVTHIVAENNSGSDVLAWLKTHKMEKTTQFELLDISWLIESMKVGVPVDTKGKYQLMESRVDSANPDPTAGTLNILPPTTKTISQYACQRRTTLNNHNQRFTDALEILAENYEFKRNDDTCLTFMRAISVLKCLPFEVVSLKDTEGLPWIGDEVKGIMEEIIEVGESLEVQAVLNDERYQSFKLFKSVFGVGVKTADKWYRMGLRTLEDVRSSKTLKLTKMQKAGLCYYEDLADGVTKAEADAISLLVQDAVWTFDPDALVEITGGFRRGKPFGHDVDLLITSPGAEKEQEDQLLQKVTNLWKKQGLLLYGDLRESRFEDGKLPSRKIDALDHFQKCFAILKLYHHKVDKSKWEMPTGSNESEAKSWKAIRVDLVVCPYDRFAFALLGWTGSRMFERDLRRYATHEKKMMLDNHALYDLTKKIFLKAKSEEEIFAHLGLEYLEPSERNA

SEQ ID NO: 437 - DNA, 1587 bp, synthetic construct
  misc_feature 1..1587: note = Variant of terminal deoxynucleotidyltransferase
  source 1..1587: mol_type = other DNA
atgcaccatcatcatcatcatggcggtagcggcatgcaccgcattcgtaccatcgattcggacggggggaagaaacgccagaagaagatggataaccacattagttccatgatctatgaaatcaaatttcacgagtttgtgctgttcattctcgaaaagaaaatgggtgcgacgcgtcgtacttttctgacagatttagcccgcaagaaagggttccgcgtcgagaatgaactgtcagacagcgttacccacatcgtggcagaaaataattcaggatctgacgtattggcttggctgaagacccacaagatggagaagacgacgcaatttgaactgctggatattagctggcttatcgaaagcatgaaagttggtaaaccggtggacaccaaggggaaataccagttgatggaatcgcgtgtcgatagtgcgaacccagatccgacagccggtaccctcaacattctgcctcctactacgaagaccatttctcagtatgcgtgtcaacgccgcaccaccctgaacaaccataatcaacgttttacggacgcactggaaattcttgcggaaaattacgagttcaaacgcaacgatgatacttgtctgacctttatgcgtgctatttccgtgctgaaatgccttccgtttgaggtagttagcctgaaagacacggaaggattgccctggatcggtgatgaagtcaaagggattatggaagaaatcatcgaggtcggtgaatcgctggaagtgcaggccgtgctcaatgatgagcgctatcaaagcttcaaactgtttaagagtgtctttggagtgggggtgaagacagcagacaaatggtaccgtatgggtctgcgcacgctcgaggatgttcgttccagcaagaccctgaagttgaccaagatgcagaaagcgggtctgtgctattatgaagatcttgctgatggcgttacgaaagccgaagctgacgcgatttctctgctggttcaggatgcagtctggactttcgacccggatgcgctggtggagattacgggtggatttcgtcgtgggaaaccttttggtcacgacgttgatctgcttatcacatctccgggagctgagaaagaacaagaagaccagctcctgcagaaagtgaccaatctgtggaagaaacaagggttgttgctgtacggtgatctgcgtgaaagtcgctttgaagatgggaaactcccatcccgcaagatcgatgccctggaccattttcagaaatgctttgctatcctcaaactttatcaccataaagtggacaaaagcaaatgggaaatgccgacgggttcgaacgaaagcgaggccaaaagttggaaagcaattcgcgtagatctggttgtttgtccctacgatcgttttgcgtttgcgttgttgggttggaccggaagccgcatgttcgaacgtgatctgcgccgctacgccacccacgagaagaagatgatgctggacaatcatgcgctgtatgacctgaccaagaaaatctttctcaaagctaaatcggaagaggaaattttcgcacatctggggcttgaatacctggaaccgtccgaacgtaacgca

SEQ ID NO: 438 - protein, 529 aa, synthetic construct
  REGION 1..529: note = Variant of terminal deoxynucleotidyltransferase
MHHHHHHGGSGMHRIRTIDSDGGKKRQKKMDNHISSMIYEIKFHEFVLFILEKKMGATRRTFLTDLARKKGFRVENELSDSVTHIVAENNSGSDVLAWLKTHKMEKTTQFELLDISWLIESMKVGKPVDTKGKYQLMESRVDSANPDPTAGTLNILPPTTKTISQYACQRRTTLNNHNQRFTDALEILAENYEFKRNDDTCLTFMRAISVLKCLPFEVVSLKDTEGLPWIGDEVKGIMEEIIEVGESLEVQAVLNDERYQSFKLFKSVFGVGVKTADKWYRMGLRTLEDVRSSKTLKLTKMQKAGLCYYEDLADGVTKAEADAISLLVQDAVWTFDPDALVEITGGFRRGKPFGHDVDLLITSPGAEKEQEDQLLQKVTNLWKKQGLLLYGDLRESRFEDGKLPSRKIDALDHFQKCFAILKLYHHKVDKSKWEMPTGSNESEAKSWKAIRVDLVVCPYDRFAFALLGWTGSRMFERDLRRYATHEKKMMLDNHALYDLTKKIFLKAKSEEEIFAHLGLEYLEPSERNA

SEQ ID NO: 439 - DNA, 1587 bp, synthetic construct
  misc_feature 1..1587: note = Variant of terminal deoxynucleotidyltransferase
  source 1..1587: mol_type = other DNA
atgcaccatcatcatcatcatggcggtagcggcatgcaccgcattcgtaccatcgattcggacttcgggaagaaacgccagaagaagatggataacggtattagttccatgatctatgaaatcaaatttcacgagtttgtgctgttcattctcgaaaagaaaatgggtgcgacgcgtcgtacttttctgacagatttagcccgcaagaaagggttccgcgtcgagaatgaactgtcagacagcgttacccacatcgtggcagaaaataattcaggatctgacgtattggcttggctgaagacccacaagatggagaagacgacgcaatttgaactgctggatattagctggcttatcgaaagcatgaaagttggtaaaccggtggacaccaaggggaaataccagttgatggaatcgcgtgtcgatagtgcgaacccagatccgacagccggtaccctcaacattctgcctcctactacgaagaccatttctcagtatgcgtgtcaacgccgcaccaccctgaacaaccataatcaacgttttacggacgcactggaaattcttgcggaaaattacgagttcaaacgcaacgatgatacttgtctgacctttatgcgtgctatttccgtgctgaaatgccttccgtttgaggtagttagcctgaaagacacggaaggattgccctggatcggtgatgaagtcaaagggattatggaagaaatcatcgaggtcggtgaatcgctggaagtgcaggccgtgctcaatgatgagcgctatcaaagcttcaaactgtttaagagtgtctttggagtgggggtgaagacagcagacaaatggtaccgtatgggtctgcgcacgctcgaggatgttcgttccagcaagaccctgaagttgaccaagatgcagaaagcgggtctgtgctattatgaagatcttgctgatggcgttacgaaagccgaagctgacgcgatttctctgctggttcaggatgcagtctggactttcgacccggatgcgctggtggagattacgggtggatttcgtcgtgggaaaccttttggtcacgacgttgatctgcttatcacatctccgggagctgagaaagaacaagaagaccagctcctgcagaaagtgaccaatctgtggaagaaacaagggttgttgctgtacggtgatctgcgtgaaagtcgctttgaagatgggaaactcccatcccgcaagatcgatgccctggaccattttcagaaatgctttgctatcctcaaactttatcaccataaagtggacaaaagcaaatgggaaatgccgacgggttcgaacgaaagcgaggccaaaagttggaaagcaattcgcgtagatctggttgtttgtccctacgatcgttttgcgtttgcgttgttgggttggaccggaagccgcatgttcgaacgtgatctgcgccgctacgccacccacgagaagaagatgatgctggacaatcatgcgctgtatgacctgaccaagaaaatctttctcaaagctaaatcggaagaggaaattttcgcacatctggggcttgaatacctggaaccgtccgaacgtaacgca

SEQ ID NO: 440 - protein, 529 aa, synthetic construct
  REGION 1..529: note = Variant of terminal deoxynucleotidyltransferase
MHHHHHHGGSGMHRIRTIDSDFGKKRQKKMDNGISSMIYEIKFHEFVLFILEKKMGATRRTFLTDLARKKGFRVENELSDSVTHIVAENNSGSDVLAWLKTHKMEKTTQFELLDISWLIESMKVGKPVDTKGKYQLMESRVDSANPDPTAGTLNILPPTTKTISQYACQRRTTLNNHNQRFTDALEILAENYEFKRNDDTCLTFMRAISVLKCLPFEVVSLKDTEGLPWIGDEVKGIMEEIIEVGESLEVQAVLNDERYQSFKLFKSVFGVGVKTADKWYRMGLRTLEDVRSSKTLKLTKMQKAGLCYYEDLADGVTKAEADAISLLVQDAVWTFDPDALVEITGGFRRGKPFGHDVDLLITSPGAEKEQEDQLLQKVTNLWKKQGLLLYGDLRESRFEDGKLPSRKIDALDHFQKCFAILKLYHHKVDKSKWEMPTGSNESEAKSWKAIRVDLVVCPYDRFAFALLGWTGSRMFERDLRRYATHEKKMMLDNHALYDLTKKIFLKAKSEEEIFAHLGLEYLEPSERNA

SEQ ID NO: 441 - DNA, 1587 bp, synthetic construct
  misc_feature 1..1587: note = Variant of terminal deoxynucleotidyltransferase
  source 1..1587: mol_type = other DNA
atgcaccatcatcatcatcatggcggtagcggcatgcaccgcattcgtaccatcgattcggacttcgggaagaaacgccagaagaagatggataaccacattagttccatgatctatgaaatcaaatttcacgagtttgtgctgttcattctcgaaaagaaaatgggtgcgacgcgtcgtacttttctgacagatttagcccgcaagaaagggttccgcgtcgagaatgaactgtcagacagcgttacccacatcgtggcagaaaataattcaagttctgacgtattggcttggctgaagacccacaagatggagaagacgacgcaatttgaactgctggatattagctggcttatcgaaagcatgaaagttggtaaaccggtggacaccaaggggaaataccagttgatggaatcgcgtgtcgatagtgcgaacccagatccgacagccggtaccctcaacattctgcctcctactacgaagaccatttctcagtatgcgtgtcaacgccgcaccaccctgaacaaccataatcaacgttttacggacgcactggaaattcttgcggaaaattacgagttcaaacgcaacgatgatacttgtctgacctttatgcgtgctatttccgtgctgaaatgccttccgtttgaggtagttagcctgaaagacacggaaggattgccctggatcggtgatgaagtcaaagggattatggaagaaatcatcgaggtcggtgaatcgctggaagtgcaggccgtgctcaatgatgagcgctatcaaagcttcaaactgtttaagagtgtctttggagtgggggtgaagacagcagacaaatggtaccgtatgggtctgcgcacgctcgaggatgttcgttccagcaagaccctgaagttgaccaagatgcagaaagcgggtctgtgctattatgaagatcttgctgatggcgttacgaaagccgaagctgacgcgatttctctgctggttcaggatgcagtctggactttcgacccggatgcgctggtggagattacgggtggatttcgtcgtgggaaaccttttggtcacgacgttgatctgcttatcacatctccgggagctgagaaagaacaagaagaccagctcctgcagaaagtgaccaatctgtggaagaaacaagggttgttgctgtacggtgatctgcgtgaaagtcgctttgaagatgggaaactcccatcccgcaagatcgatgccctggaccattttcagaaatgctttgctatcctcaaactttatcaccataaagtggacaaaagcaaatgggaaatgccgacgggttcgaacgaaagcgaggccaaaagttggaaagcaattcgcgtagatctggttgtttgtccctacgatcgttttgcgtttgcgttgttgggttggaccggaagccgcatgttcgaacgtgatctgcgccgctacgccacccacgagaagaagatgatgctggacaatcatgcgctgtatgacctgaccaagaaaatctttctcaaagctaaatcggaagaggaaattttcgcacatctggggcttgaatacctggaaccgtccgaacgtaacgca

SEQ ID NO: 442 - protein, 529 aa, synthetic construct
  REGION 1..529: note = Variant of terminal deoxynucleotidyltransferase
MHHHHHHGGSGMHRIRTIDSDFGKKRQKKMDNHISSMIYEIKFHEFVLFILEKKMGATRRTFLTDLARKKGFRVENELSDSVTHIVAENNSSSDVLAWLKTHKMEKTTQFELLDISWLIESMKVGKPVDTKGKYQLMESRVDSANPDPTAGTLNILPPTTKTISQYACQRRTTLNNHNQRFTDALEILAENYEFKRNDDTCLTFMRAISVLKCLPFEVVSLKDTEGLPWIGDEVKGIMEEIIEVGESLEVQAVLNDERYQSFKLFKSVFGVGVKTADKWYRMGLRTLEDVRSSKTLKLTKMQKAGLCYYEDLADGVTKAEADAISLLVQDAVWTFDPDALVEITGGFRRGKPFGHDVDLLITSPGAEKEQEDQLLQKVTNLWKKQGLLLYGDLRESRFEDGKLPSRKIDALDHFQKCFAILKLYHHKVDKSKWEMPTGSNESEAKSWKAIRVDLVVCPYDRFAFALLGWTGSRMFERDLRRYATHEKKMMLDNHALYDLTKKIFLKAKSEEEIFAHLGLEYLEPSERNA

SEQ ID NO: 443 - DNA, 1587 bp, synthetic construct
  misc_feature 1..1587: note = Variant of terminal deoxynucleotidyltransferase
  source 1..1587: mol_type = other DNA
atgcaccatcatcatcatcatggcggtagcggcatgcaccgcattcgtaccatcgattcggacttcgggaagaaacgccagaagaagatggataaccacattagttccatgatctatgaaatcaaatttcacgagtttgtgctgttcattctcgaaaagaaaatgggtgcgacgcgtcgtacttttctgacagatttagcccgcaagaaagggttccgcgtcgagaatgaactgtcagacagcgttacccacatcgtggcagaaaataattcaggatctgacgtattggcttggctgaagacccacaagatggagaagacgacgcaatttgaactgctggatattagctggcttatcgaaagcatgaaagttggtaaaccggtggacaccaaggggaaataccggttgatggaatcgcgtgtcgatagtgcgaacccagatccgacagccggtaccctcaacattctgcctcctactacgaagaccatttctcagtatgcgtgtcaacgccgcaccaccctgaacaaccataatcaacgttttacggacgcactggaaattcttgcggaaaattacgagttcaaacgcaacgatgatacttgtctgacctttatgcgtgctatttccgtgctgaaatgccttccgtttgaggtagttagcctgaaagacacggaaggattgccctggatcggtgatgaagtcaaagggattatggaagaaatcatcgaggtcggtgaatcgctggaagtgcaggccgtgctcaatgatgagcgctatcaaagcttcaaactgtttaagagtgtctttggagtgggggtgaagacagcagacaaatggtaccgtatgggtctgcgcacgctcgaggatgttcgttccagcaagaccctgaagttgaccaagatgcagaaagcgggtctgtgctattatgaagatcttgctgatggcgttacgaaagccgaagctgacgcgatttctctgctggttcaggatgcagtctggactttcgacccggatgcgctggtggagattacgggtggatttcgtcgtgggaaaccttttggtcacgacgttgatctgcttatcacatctccgggagctgagaaagaacaagaagaccagctcctgcagaaagtgaccaatctgtggaagaaacaagggttgttgctgtacggtgatctgcgtgaaagtcgctttgaagatgggaaactcccatcccgcaagatcgatgccctggaccattttcagaaatgctttgctatcctcaaactttatcaccataaagtggacaaaagcaaatgggaaatgccgacgggttcgaacgaaagcgaggccaaaagttggaaagcaattcgcgtagatctggttgtttgtccctacgatcgttttgcgtttgcgttgttgggttggaccggaagccgcatgttcgaacgtgatctgcgccgctacgccacccacgagaagaagatgatgctggacaatcatgcgctgtatgacctgaccaagaaaatctttctcaaagctaaatcggaagaggaaattttcgcacatctggggcttgaatacctggaaccgtccgaacgtaacgca

SEQ ID NO: 444 - protein, 529 aa, synthetic construct
  REGION 1..529: note = Variant of terminal deoxynucleotidyltransferase
MHHHHHHGGSGMHRIRTIDSDFGKKRQKKMDNHISSMIYEIKFHEFVLFILEKKMGATRRTFLTDLARKKGFRVENELSDSVTHIVAENNSGSDVLAWLKTHKMEKTTQFELLDISWLIESMKVGKPVDTKGKYRLMESRVDSANPDPTAGTLNILPPTTKTISQYACQRRTTLNNHNQRFTDALEILAENYEFKRNDDTCLTFMRAISVLKCLPFEVVSLKDTEGLPWIGDEVKGIMEEIIEVGESLEVQAVLNDERYQSFKLFKSVFGVGVKTADKWYRMGLRTLEDVRSSKTLKLTKMQKAGLCYYEDLADGVTKAEADAISLLVQDAVWTFDPDALVEITGGFRRGKPFGHDVDLLITSPGAEKEQEDQLLQKVTNLWKKQGLLLYGDLRESRFEDGKLPSRKIDALDHFQKCFAILKLYHHKVDKSKWEMPTGSNESEAKSWKAIRVDLVVCPYDRFAFALLGWTGSRMFERDLRRYATHEKKMMLDNHALYDLTKKIFLKAKSEEEIFAHLGLEYLEPSERNA

SEQ ID NO: 445 - DNA, 1587 bp, synthetic construct
  misc_feature 1..1587: note = Variant of terminal deoxynucleotidyltransferase
  source 1..1587: mol_type = other DNA
atgcaccatcatcatcatcatggcggtagcggcatgcaccgcattcgtaccatcgattcggacttcgggaagaaacgccagaagaagatggataaccacattagttccatgatctatgaaatcaaatttcacgagtttgtgctgttcattctcgaaaagaaaatgggtgcgacgcgtcgtacttttctgacagatttagcccgcaagaaagggttccgcgtcgagaatgaactgtcagacagcgttacccacatcgtggcagaaaataattcaggatctgacgtattggcttggctgaagacccacaagatggagaagacgacgcaatttgaactgctggatattagctggcttatcgaaagcatgaaagttggtaaaccggtggacaccaaggggaaataccagttgatggaatcgcgtgtcgatagtgcgaacccagatccgacagccggtaccctcaacattctgcctcctactacgaagaccgtgtctcagtatgcgtgtcaacgccgcaccaccctgaacaaccataatcaacgttttacggacgcactggaaattcttgcggaaaattacgagttcaaacgcaacgatgatacttgtctgacctttatgcgtgctatttccgtgctgaaatgccttccgtttgaggtagttagcctgaaagacacggaaggattgccctggatcggtgatgaagtcaaagggattatggaagaaatcatcgaggtcggtgaatcgctggaagtgcaggccgtgctcaatgatgagcgctatcaaagcttcaaactgtttaagagtgtctttggagtgggggtgaagacagcagacaaatggtaccgtatgggtctgcgcacgctcgaggatgttcgttccagcaagaccctgaagttgaccaagatgcagaaagcgggtctgtgctattatgaagatcttgctgatggcgttacgaaagccgaagctgacgcgatttctctgctggttcaggatgcagtctggactttcgacccggatgcgctggtggagattacgggtggatttcgtcgtgggaaaccttttggtcacgacgttgatctgcttatcacatctccgggagctgagaaagaacaagaagaccagctcctgcagaaagtgaccaatctgtggaagaaacaagggttgttgctgtacggtgatctgcgtgaaagtcgctttgaagatgggaaactcccatcccgcaagatcgatgccctggaccattttcagaaatgctttgctatcctcaaactttatcaccataaagtggacaaaagcaaatgggaaatgccgacgggttcgaacgaaagcgaggccaaaagttggaaagcaattcgcgtagatctggttgtttgtccctacgatcgttttgcgtttgcgttgttgggttggaccggaagccgcatgttcgaacgtgatctgcgccgctacgccacccacgagaagaagatgatgctggacaatcatgcgctgtatgacctgaccaagaaaatctttctcaaagctaaatcggaagaggaaattttcgcacatctggggcttgaatacctggaaccgtccgaacgtaacgca

SEQ ID NO: 446 - protein, 529 aa, synthetic construct
  REGION 1..529: note = Variant of terminal deoxynucleotidyltransferase
MHHHHHHGGSGMHRIRTIDSDFGKKRQKKMDNHISSMIYEIKFHEFVLFILEKKMGATRRTFLTDLARKKGFRVENELSDSVTHIVAENNSGSDVLAWLKTHKMEKTTQFELLDISWLIESMKVGKPVDTKGKYQLMESRVDSANPDPTAGTLNILPPTTKTVSQYACQRRTTLNNHNQRFTDALEILAENYEFKRNDDTCLTFMRAISVLKCLPFEVVSLKDTEGLPWIGDEVKGIMEEIIEVGESLEVQAVLNDERYQSFKLFKSVFGVGVKTADKWYRMGLRTLEDVRSSKTLKLTKMQKAGLCYYEDLADGVTKAEADAISLLVQDAVWTFDPDALVEITGGFRRGKPFGHDVDLLITSPGAEKEQEDQLLQKVTNLWKKQGLLLYGDLRESRFEDGKLPSRKIDALDHFQKCFAILKLYHHKVDKSKWEMPTGSNESEAKSWKAIRVDLVVCPYDRFAFALLGWTGSRMFERDLRRYATHEKKMMLDNHALYDLTKKIFLKAKSEEEIFAHLGLEYLEPSERNA

SEQ ID NO: 447 - DNA, 1587 bp, synthetic construct
  misc_feature 1..1587: note = Variant of terminal deoxynucleotidyltransferase
  source 1..1587: mol_type = other DNA
atgcaccatcatcatcatcatggcggtagcggcatgcaccgcattcgtaccatcgattcggacttcgggaagaaacgccagaagaggatggataaccacattagttccatgatctatgaaatcaaatttcacgagtttgtgctgttcattctcgaaaagaaaatgggtgcgacgcgtcgtacttttctgacagatttagcccgcaagaaagggttccgcgtcgagaatgaactgtcagacagcgttacccacatcgtggcagaaaataattcaggatctgacgtattggcttggctgaagacccacaagatggagaagacgacgcaatttgaactgctggatattagctggcttatcgaaagcatgaaagttggtaaaccggtggacaccaaggggaaataccagttgatggaatcgcgtgtcgatagtgcgaacccagatccgacagccggtaccctcaacattctgcctcctactacgaagaccatttctcagtatgcgtgtcaacgccgcaccaccctgaacaaccataatcaacgttttacggacgcactggaaattcttgcggaaaattacgagttcaaacgcaacgatgatacttgtctgacctttatgcgtgctatttccgtgctgaaatgccttccgtttgaggtagttagcctgaaagacacggaaggattgccctggatcggtgatgaagtcaaagggattatggaagaaatcatcgaggtcggtgaatcgctggaagtgcaggccgtgctcaatgatgagcgctatcaaagcttcaaactgtttaagagtgtctttggagtgggggtgaagacagcagacaaatggtaccgtatgggtctgcgcacgctcgaggatgttcgttccagcaagaccctgaagttgaccaagatgcagaaagcgggtctgtgctattatgaagatcttgctgatggcgttacgaaagccgaagctgacgcgatttctctgctggttcaggatgcagtctggactttcgacccggatgcgctggtggagattacgggtggatttcgtcgtgggaaaccttttggtcacgacgttgatctgcttatcacatctccgggagctgagaaagaacaagaagaccagctcctgcagaaagtgaccaatctgtggaagaaacaagggttgttgctgtacggtgatctgcgtgaaagtcgctttgaagatgggaaactcccatcccgcaagatcgatgccctggaccattttcagaaatgctttgctatcctcaaactttatcaccataaagtggacaaaagcaaatgggaaatgccgacgggttcgaacgaaagcgaggccaaaagttggaaagcaattcgcgtagatctggttgtttgtccctacgatcgttttgcgtttgcgttgttgggttggaccggaagccgcatgttcgaacgtgatctgcgccgctacgccacccacgagaagaagatgatgctggacaatcatgcgctgtatgacctgaccaagaaaatctttctcaaagctaaatcggaagaggaaattttcgcacatctggggcttgaatacctggaaccgtccgaacgtaacgca

SEQ ID NO: 448 - protein, 529 aa, synthetic construct
  REGION 1..529: note = Variant of terminal deoxynucleotidyltransferase
MHHHHHHGGSGMHRIRTIDSDFGKKRQKRMDNHISSMIYEIKFHEFVLFILEKKMGATRRTFLTDLARKKGFRVENELSDSVTHIVAENNSGSDVLAWLKTHKMEKTTQFELLDISWLIESMKVGKPVDTKGKYQLMESRVDSANPDPTAGTLNILPPTTKTISQYACQRRTTLNNHNQRFTDALEILAENYEFKRNDDTCLTFMRAISVLKCLPFEVVSLKDTEGLPWIGDEVKGIMEEIIEVGESLEVQAVLNDERYQSFKLFKSVFGVGVKTADKWYRMGLRTLEDVRSSKTLKLTKMQKAGLCYYEDLADGVTKAEADAISLLVQDAVWTFDPDALVEITGGFRRGKPFGHDVDLLITSPGAEKEQEDQLLQKVTNLWKKQGLLLYGDLRESRFEDGKLPSRKIDALDHFQKCFAILKLYHHKVDKSKWEMPTGSNESEAKSWKAIRVDLVVCPYDRFAFALLGWTGSRMFERDLRRYATHEKKMMLDNHALYDLTKKIFLKAKSEEEIFAHLGLEYLEPSERNA

SEQ ID NO: 449 - DNA, 1587 bp, synthetic construct
  misc_feature 1..1587: note = Variant of terminal deoxynucleotidyltransferase
  source 1..1587: mol_type = other DNA
atgcaccatcatcatcatcatggcggtagcggcatgcaccgcattcgtaccatcgatcatgacttcgggaagaaacgccagaagaagatggataaccacattagttccatgatctatgaaatcaaatttcacgagtttgtgctgttcattctcgaaaagaaaatgggtgcgacgcgtcgtacttttctgacagatttagcccgcaagaaagggttccgcgtcgagaatgaactgtcagacagcgttacccacatcgtggcagaaaataattcaggatctgacgtattggcttggctgaagacccacaagatggagaagacgacgcaatttgaactgctggatattagctggcttatcgaaagcatgaaagttggtaaaccggtggacaccaaggggaaataccagttgatggaatcgcgtgtcgatagtgcgaacccagatccgacagccggtaccctcaacattctgcctcctactacgaagaccatttctcagtatgcgtgtcaacgccgcaccaccctgaacaaccataatcaacgttttacggacgcactggaaattcttgcggaaaattacgagttcaaacgcaacgatgatacttgtctgacctttatgcgtgctatttccgtgctgaaatgccttccgtttgaggtagttagcctgaaagacacggaaggattgccctggatcggtgatgaagtcaaagggattatggaagaaatcatcgaggtcggtgaatcgctggaagtgcaggccgtgctcaatgatgagcgctatcaaagcttcaaactgtttaagagtgtctttggagtgggggtgaagacagcagacaaatggtaccgtatgggtctgcgcacgctcgaggatgttcgttccagcaagaccctgaagttgaccaagatgcagaaagcgggtctgtgctattatgaagatcttgctgatggcgttacgaaagccgaagctgacgcgatttctctgctggttcaggatgcagtctggactttcgacccggatgcgctggtggagattacgggtggatttcgtcgtgggaaaccttttggtcacgacgttgatctgcttatcacatctccgggagctgagaaagaacaagaagaccagctcctgcagaaagtgaccaatctgtggaagaaacaagggttgttgctgtacggtgatctgcgtgaaagtcgctttgaagatgggaaactcccatcccgcaagatcgatgccctggaccattttcagaaatgctttgctatcctcaaactttatcaccataaagtggacaaaagcaaatgggaaatgccgacgggttcgaacgaaagcgaggccaaaagttggaaagcaattcgcgtagatctggttgtttgtccctacgatcgttttgcgtttgcgttgttgggttggaccggaagccgcatgttcgaacgtgatctgcgccgctacgccacccacgagaagaagatgatgctggacaatcatgcgctgtatgacctgaccaagaaaatctttctcaaagctaaatcggaagaggaaattttcgcacatctggggcttgaatacctggaaccgtccgaacgtaacgca

SEQ ID NO: 450 - protein, 529 aa, synthetic construct
  REGION 1..529: note = Variant of terminal deoxynucleotidyltransferase
MHHHHHHGGSGMHRIRTIDHDFGKKRQKKMDNHISSMIYEIKFHEFVLFILEKKMGATRRTFLTDLARKKGFRVENELSDSVTHIVAENNSGSDVLAWLKTHKMEKTTQFELLDISWLIESMKVGKPVDTKGKYQLMESRVDSANPDPTAGTLNILPPTTKTISQYACQRRTTLNNHNQRFTDALEILAENYEFKRNDDTCLTFMRAISVLKCLPFEVVSLKDTEGLPWIGDEVKGIMEEIIEVGESLEVQAVLNDERYQSFKLFKSVFGVGVKTADKWYRMGLRTLEDVRSSKTLKLTKMQKAGLCYYEDLADGVTKAEADAISLLVQDAVWTFDPDALVEITGGFRRGKPFGHDVDLLITSPGAEKEQEDQLLQKVTNLWKKQGLLLYGDLRESRFEDGKLPSRKIDALDHFQKCFAILKLYHHKVDKSKWEMPTGSNESEAKSWKAIRVDLVVCPYDRFAFALLGWTGSRMFERDLRRYATHEKKMMLDNHALYDLTKKIFLKAKSEEEIFAHLGLEYLEPSERNA

SEQ ID NO: 451 - DNA, 1587 bp, synthetic construct
  misc_feature 1..1587: note = Variant of terminal deoxynucleotidyltransferase
  source 1..1587: mol_type = other DNA
atgcaccatcatcatcatcatggcggtagcggcatgcaccgcattcgtaccatcgattcggacttcgggaagaaacgccagaagaagatggataaccacattagttccatgatctatgaaatcaaatttcacgagtttgtgctgttcattctcgaaaagaaaatgggtgcgacgcgtcgtacttttctgacagatttagcccgcaagaaagggttccgcgtcgagaatgaactgtcagacagcgttacccacatcgtggcagaaaataattcaggatctgacgtattggcttggctgaagacccacaagatggagaagacgacgcaatttgaactgctggatattagctggcttatcgaaagcatgaaagttggtaaaccggtggacaccaaggggaaataccagttgatggaatcgcgtgtcgatagtgcgaacccagatccgacagccggtaccctcaacattctgcctcctactacgaggaccatttctcagtatgcgtgtcaacgccgcaccaccctgaacaaccataatcaacgttttacggacgcactggaaattcttgcggaaaattacgagttcaaacgcaacgatgatacttgtctgacctttatgcgtgctatttccgtgctgaaatgccttccgtttgaggtagttagcctgaaagacacggaaggattgccctggatcggtgatgaagtcaaagggattatggaagaaatcatcgaggtcggtgaatcgctggaagtgcaggccgtgctcaatgatgagcgctatcaaagcttcaaactgtttaagagtgtctttggagtgggggtgaagacagcagacaaatggtaccgtatgggtctgcgcacgctcgaggatgttcgttccagcaagaccctgaagttgaccaagatgcagaaagcgggtctgtgctattatgaagatcttgctgatggcgttacgaaagccgaagctgacgcgatttctctgctggttcaggatgcagtctggactttcgacccggatgcgctggtggagattacgggtggatttcgtcgtgggaaaccttttggtcacgacgttgatctgcttatcacatctccgggagctgagaaagaacaagaagaccagctcctgcagaaagtgaccaatctgtggaagaaacaagggttgttgctgtacggtgatctgcgtgaaagtcgctttgaagatgggaaactcccatcccgcaagatcgatgccctggaccattttcagaaatgctttgctatcctcaaactttatcaccataaagtggacaaaagcaaatgggaaatgccgacgggttcgaacgaaagcgaggccaaaagttggaaagcaattcgcgtagatctggttgtttgtccctacgatcgttttgcgtttgcgttgttgggttggaccggaagccgcatgttcgaacgtgatctgcgccgctacgccacccacgagaagaagatgatgctggacaatcatgcgctgtatgacctgaccaagaaaatctttctcaaagctaaatcggaagaggaaattttcgcacatctggggcttgaatacctggaaccgtccgaacgtaacgca

SEQ ID NO: 452 - protein, 529 aa, synthetic construct
  REGION 1..529: note = Variant of terminal deoxynucleotidyltransferase
MHHHHHHGGSGMHRIRTIDSDFGKKRQKKMDNHISSMIYEIKFHEFVLFILEKKMGATRRTFLTDLARKKGFRVENELSDSVTHIVAENNSGSDVLAWLKTHKMEKTTQFELLDISWLIESMKVGKPVDTKGKYQLMESRVDSANPDPTAGTLNILPPTTRTISQYACQRRTTLNNHNQRFTDALEILAENYEFKRNDDTCLTFMRAISVLKCLPFEVVSLKDTEGLPWIGDEVKGIMEEIIEVGESLEVQAVLNDERYQSFKLFKSVFGVGVKTADKWYRMGLRTLEDVRSSKTLKLTKMQKAGLCYYEDLADGVTKAEADAISLLVQDAVWTFDPDALVEITGGFRRGKPFGHDVDLLITSPGAEKEQEDQLLQKVTNLWKKQGLLLYGDLRESRFEDGKLPSRKIDALDHFQKCFAILKLYHHKVDKSKWEMPTGSNESEAKSWKAIRVDLVVCPYDRFAFALLGWTGSRMFERDLRRYATHEKKMMLDNHALYDLTKKIFLKAKSEEEIFAHLGLEYLEPSERNA

SEQ ID NO: 453 - DNA, 1587 bp, synthetic construct
  misc_feature 1..1587: note = Variant of terminal deoxynucleotidyltransferase
  source 1..1587: mol_type = other DNA
atgcaccatcatcatcatcatggcggtagcggcatgcaccgcattcgtaccatcgattcggacttcgggaagaaacgccagaagaagatggataaccacattagttccatgatctatgaaatcaaatttcacgagtttgtgctgttcattctcgaaaagaaaatgggtgcgacgcgtcgtacttttctgacagatttagcccgcaagaaagggttccgcgtcgagaatgaactgtcagacagcgttacccacatcgtggcagaaaataattcaggatctcgggtattggcttggctgaagacccacaagatggagaagacgacgcaatttgaactgctggatattagctggcttatcgaaagcatgaaagttggtaaaccggtggacaccaaggggaaataccagttgatggaatcgcgtgtcgatagtgcgaacccagatccgacagccggtaccctcaacattctgcctcctactacgaagaccatttctcagtatgcgtgtcaacgccgcaccaccctgaacaaccataatcaacgttttacggacgcactggaaattcttgcggaaaattacgagttcaaacgcaacgatgatacttgtctgacctttatgcgtgctatttccgtgctgaaatgccttccgtttgaggtagttagcctgaaagacacggaaggattgccctggatcggtgatgaagtcaaagggattatggaagaaatcatcgaggtcggtgaatcgctggaagtgcaggccgtgctcaatgatgagcgctatcaaagcttcaaactgtttaagagtgtctttggagtgggggtgaagacagcagacaaatggtaccgtatgggtctgcgcacgctcgaggatgttcgttccagcaagaccctgaagttgaccaagatgcagaaagcgggtctgtgctattatgaagatcttgctgatggcgttacgaaagccgaagctgacgcgatttctctgctggttcaggatgcagtctggactttcgacccggatgcgctggtggagattacgggtggatttcgtcgtgggaaaccttttggtcacgacgttgatctgcttatcacatctccgggagctgagaaagaacaagaagaccagctcctgcagaaagtgaccaatctgtggaagaaacaagggttgttgctgtacggtgatctgcgtgaaagtcgctttgaagatgggaaactcccatcccgcaagatcgatgccctggaccattttcagaaatgctttgctatcctcaaactttatcaccataaagtggacaaaagcaaatgggaaatgccgacgggttcgaacgaaagcgaggccaaaagttggaaagcaattcgcgtagatctggttgtttgtccctacgatcgttttgcgtttgcgttgttgggttggaccggaagccgcatgttcgaacgtgatctgcgccgctacgccacccacgagaagaagatgatgctggacaatcatgcgctgtatgacctgaccaagaaaatctttctcaaagctaaatcggaagaggaaattttcgcacatctggggcttgaatacctggaaccgtccgaacgtaacgca

SEQ ID NO: 454 - protein, 529 aa, synthetic construct
  REGION 1..529: note = Variant of terminal deoxynucleotidyltransferase
MHHHHHHGGSGMHRIRTIDSDFGKKRQKKMDNHISSMIYEIKFHEFVLFILEKKMGATRRTFLTDLARKKGFRVENELSDSVTHIVAENNSGSRVLAWLKTHKMEKTTQFELLDISWLIESMKVGKPVDTKGKYQLMESRVDSANPDPTAGTLNILPPTTKTISQYACQRRTTLNNHNQRFTDALEILAENYEFKRNDDTCLTFMRAISVLKCLPFEVVSLKDTEGLPWIGDEVKGIMEEIIEVGESLEVQAVLNDERYQSFKLFKSVFGVGVKTADKWYRMGLRTLEDVRSSKTLKLTKMQKAGLCYYEDLADGVTKAEADAISLLVQDAVWTFDPDALVEITGGFRRGKPFGHDVDLLITSPGAEKEQEDQLLQKVTNLWKKQGLLLYGDLRESRFEDGKLPSRKIDALDHFQKCFAILKLYHHKVDKSKWEMPTGSNESEAKSWKAIRVDLVVCPYDRFAFALLGWTGSRMFERDLRRYATHEKKMMLDNHALYDLTKKIFLKAKSEEEIFAHLGLEYLEPSERNA

SEQ ID NO: 455 - DNA, 1587 bp, synthetic construct
  misc_feature 1..1587: note = Variant of terminal deoxynucleotidyltransferase
  source 1..1587: mol_type = other DNA
atgcaccatcatcatcatcatggcggtagcggcatgcaccgcattcgtaccatcgattcggacttcgggaagaaacgccagaagaagatggataaccacattgggtccatgatctatgaaatcaaatttcacgagtttgtgctgttcattctcgaaaagaaaatgggtgcgacgcgtcgtacttttctgacagatttagcccgcaagaaagggttccgcgtcgagaatgaactgtcagacagcgttacccacatcgtggcagaaaataattcaggatctgacgtattggcttggctgaagacccacaagatggagaagacgacgcaatttgaactgctggatattagctggcttatcgaaagcatgaaagttggtaaaccggtggacaccaaggggaaataccagttgatggaatcgcgtgtcgatagtgcgaacccagatccgacagccggtaccctcaacattctgcctcctactacgaagaccatttctcagtatgcgtgtcaacgccgcaccaccctgaacaaccataatcaacgttttacggacgcactggaaattcttgcggaaaattacgagttcaaacgcaacgatgatacttgtctgacctttatgcgtgctatttccgtgctgaaatgccttccgtttgaggtagttagcctgaaagacacggaaggattgccctggatcggtgatgaagtcaaagggattatggaagaaatcatcgaggtcggtgaatcgctggaagtgcaggccgtgctcaatgatgagcgctatcaaagcttcaaactgtttaagagtgtctttggagtgggggtgaagacagcagacaaatggtaccgtatgggtctgcgcacgctcgaggatgttcgttccagcaagaccctgaagttgaccaagatgcagaaagcgggtctgtgctattatgaagatcttgctgatggcgttacgaaagccgaagctgacgcgatttctctgctggttcaggatgcagtctggactttcgacccggatgcgctggtggagattacgggtggatttcgtcgtgggaaaccttttggtcacgacgttgatctgcttatcacatctccgggagctgagaaagaacaagaagaccagctcctgcagaaagtgaccaatctgtggaagaaacaagggttgttgctgtacggtgatctgcgtgaaagtcgctttgaagatgggaaactcccatcccgcaagatcgatgccctggaccattttcagaaatgctttgctatcctcaaactttatcaccataaagtggacaaaagcaaatgggaaatgccgacgggttcgaacgaaagcgaggccaaaagttggaaagcaattcgcgtagatctggttgtttgtccctacgatcgttttgcgtttgcgttgttgggttggaccggaagccgcatgttcgaacgtgatctgcgccgctacgccacccacgagaagaagatgatgctggacaatcatgcgctgtatgacctgaccaagaaaatctttctcaaagctaaatcggaagaggaaattttcgcacatctggggcttgaatacctggaaccgtccgaacgtaacgca

SEQ ID NO: 456 - protein, 529 aa, synthetic construct
  REGION 1..529: note = Variant of terminal deoxynucleotidyltransferase
MHHHHHHGGSGMHRIRTIDSDFGKKRQKKMDNHIGSMIYEIKFHEFVLFILEKKMGATRRTFLTDLARKKGFRVENELSDSVTHIVAENNSGSDVLAWLKTHKMEKTTQFELLDISWLIESMKVGKPVDTKGKYQLMESRVDSANPDPTAGTLNILPPTTKTISQYACQRRTTLNNHNQRFTDALEILAENYEFKRNDDTCLTFMRAISVLKCLPFEVVSLKDTEGLPWIGDEVKGIMEEIIEVGESLEVQAVLNDERYQSFKLFKSVFGVGVKTADKWYRMGLRTLEDVRSSKTLKLTKMQKAGLCYYEDLADGVTKAEADAISLLVQDAVWTFDPDALVEITGGFRRGKPFGHDVDLLITSPGAEKEQEDQLLQKVTNLWKKQGLLLYGDLRESRFEDGKLPSRKIDALDHFQKCFAILKLYHHKVDKSKWEMPTGSNESEAKSWKAIRVDLVVCPYDRFAFALLGWTGSRMFERDLRRYATHEKKMMLDNHALYDLTKKIFLKAKSEEEIFAHLGLEYLEPSERNA

SEQ ID NO: 457 - DNA, 1587 bp, synthetic construct
  misc_feature 1..1587: note = Variant of terminal deoxynucleotidyltransferase
  source 1..1587: mol_type = other DNA
atgcaccatcatcatcatcatggcggtagcggcatgcaccgcattcgtaccatcgattcggacttcgggaagaaacgccagaagaagatggataaccacattagttccatgatctatgaaatcaaatttcacgagtttgtgctgttcattctcgaaaagaaaatgggtgcgacgcgtcgtacttttctgacagatttagcccgcaagaaagggttccgcgtcgagaatgaactgtcagacagcgttacccacatcgtggcagaaaataattcaggatctgacgtattggcttggctgaagacccacaagatggagaagacgacgcaatttgaactgctggatattagctggcttatcgaaagcatgaaagttggtaaaccggtggacaccaaggggaaataccagttgatggaatcggaggtcgatagtgcgaacccagatccgacagccggtaccctcaacattctgcctcctactacgaagaccatttctcagtatgcgtgtcaacgccgcaccaccctgaacaaccataatcaacgttttacggacgcactggaaattcttgcggaaaattacgagttcaaacgcaacgatgatacttgtctgacctttatgcgtgctatttccgtgctgaaatgccttccgtttgaggtagttagcctgaaagacacggaaggattgccctggatcggtgatgaagtcaaagggattatggaagaaatcatcgaggtcggtgaatcgctggaagtgcaggccgtgctcaatgatgagcgctatcaaagcttcaaactgtttaagagtgtctttggagtgggggtgaagacagcagacaaatggtaccgtatgggtctgcgcacgctcgaggatgttcgttccagcaagaccctgaagttgaccaagatgcagaaagcgggtctgtgctattatgaagatcttgctgatggcgttacgaaagccgaagctgacgcgatttctctgctggttcaggatgcagtctggactttcgacccggatgcgctggtggagattacgggtggatttcgtcgtgggaaaccttttggtcacgacgttgatctgcttatcacatctccgggagctgagaaagaacaagaagaccagctcctgcagaaagtgaccaatctgtggaagaaacaagggttgttgctgtacggtgatctgcgtgaaagtcgctttgaagatgggaaactcccatcccgcaagatcgatgccctggaccattttcagaaatgctttgctatcctcaaactttatcaccataaagtggacaaaagcaaatgggaaatgccgacgggttcgaacgaaagcgaggccaaaagttggaaagcaattcgcgtagatctggttgtttgtccctacgatcgttttgcgtttgcgttgttgggttggaccggaagccgcatgttcgaacgtgatctgcgccgctacgccacccacgagaagaagatgatgctggacaatcatgcgctgtatgacctgaccaagaaaatctttctcaaagctaaatcggaagaggaaattttcgcacatctggggcttgaatacctggaaccgtccgaacgtaacgca

SEQ ID NO: 458 - protein, 529 aa, synthetic construct
  REGION 1..529: note = Variant of terminal deoxynucleotidyltransferase
MHHHHHHGGSGMHRIRTIDSDFGKKRQKKMDNHISSMIYEIKFHEFVLFILEKKMGATRRTFLTDLARKKGFRVENELSDSVTHIVAENNSGSDVLAWLKTHKMEKTTQFELLDISWLIESMKVGKPVDTKGKYQLMESEVDSANPDPTAGTLNILPPTTKTISQYACQRRTTLNNHNQRFTDALEILAENYEFKRNDDTCLTFMRAISVLKCLPFEVVSLKDTEGLPWIGDEVKGIMEEIIEVGESLEVQAVLNDERYQSFKLFKSVFGVGVKTADKWYRMGLRTLEDVRSSKTLKLTKMQKAGLCYYEDLADGVTKAEADAISLLVQDAVWTFDPDALVEITGGFRRGKPFGHDVDLLITSPGAEKEQEDQLLQKVTNLWKKQGLLLYGDLRESRFEDGKLPSRKIDALDHFQKCFAILKLYHHKVDKSKWEMPTGSNESEAKSWKAIRVDLVVCPYDRFAFALLGWTGSRMFERDLRRYATHEKKMMLDNHALYDLTKKIFLKAKSEEEIFAHLGLEYLEPSERNA

SEQ ID NO: 459 - DNA, 1587 bp, synthetic construct
  misc_feature 1..1587: note = Variant of terminal deoxynucleotidyltransferase
  source 1..1587: mol_type = other DNA
atgcaccatcatcatcatcatggcggtagcggcatgcaccgcattcgtaccatcgattcggacttcgggaagaaacgccagaagaagatggataaccacattagttccatgatctatgaaatcaaatttcacgagtttgtgctgttcattctcgaaaagaaaatgggtcatacgcgtcgtacttttctgacagatttagcccgcaagaaagggttccgcgtcgagaatgaactgtcagacagcgttacccacatcgtggcagaaaataattcaggatctgacgtattggcttggctgaagacccacaagatggagaagacgacgcaatttgaactgctggatattagctggcttatcgaaagcatgaaagttggtaaaccggtggacaccaaggggaaataccagttgatggaatcgcgtgtcgatagtgcgaacccagatccgacagccggtaccctcaacattctgcctcctactacgaagaccatttctcagtatgcgtgtcaacgccgcaccaccctgaacaaccataatcaacgttttacggacgcactggaaattcttgcggaaaattacgagttcaaacgcaacgatgatacttgtctgacctttatgcgtgctatttccgtgctgaaatgccttccgtttgaggtagttagcctgaaagacacggaaggattgccctggatcggtgatgaagtcaaagggattatggaagaaatcatcgaggtcggtgaatcgctggaagtgcaggccgtgctcaatgatgagcgctatcaaagcttcaaactgtttaagagtgtctttggagtgggggtgaagacagcagacaaatggtaccgtatgggtctgcgcacgctcgaggatgttcgttccagcaagaccctgaagttgaccaagatgcagaaagcgggtctgtgctattatgaagatcttgctgatggcgttacgaaagccgaagctgacgcgatttctctgctggttcaggatgcagtctggactttcgacccggatgcgctggtggagattacgggtggatttcgtcgtgggaaaccttttggtcacgacgttgatctgcttatcacatctccgggagctgagaaagaacaagaagaccagctcctgcagaaagtgaccaatctgtggaagaaacaagggttgttgctgtacggtgatctgcgtgaaagtcgctttgaagatgggaaactcccatcccgcaagatcgatgccctggaccattttcagaaatgctttgctatcctcaaactttatcaccataaagtggacaaaagcaaatgggaaatgccgacgggttcgaacgaaagcgaggccaaaagttggaaagcaattcgcgtagatctggttgtttgtccctacgatcgttttgcgtttgcgttgttgggttggaccggaagccgcatgttcgaacgtgatctgcgccgctacgccacccacgagaagaagatgatgctggacaatcatgcgctgtatgacctgaccaagaaaatctttctcaaagctaaatcggaagaggaaattttcgcacatctggggcttgaatacctggaaccgtccgaacgtaacgca

SEQ ID NO: 460 - protein, 529 aa, synthetic construct
  REGION 1..529: note = Variant of terminal deoxynucleotidyltransferase
MHHHHHHGGSGMHRIRTIDSDFGKKRQKKMDNHISSMIYEIKFHEFVLFILEKKMGHTRRTFLTDLARKKGFRVENELSDSVTHIVAENNSGSDVLAWLKTHKMEKTTQFELLDISWLIESMKVGKPVDTKGKYQLMESRVDSANPDPTAGTLNILPPTTKTISQYACQRRTTLNNHNQRFTDALEILAENYEFKRNDDTCLTFMRAISVLKCLPFEVVSLKDTEGLPWIGDEVKGIMEEIIEVGESLEVQAVLNDERYQSFKLFKSVFGVGVKTADKWYRMGLRTLEDVRSSKTLKLTKMQKAGLCYYEDLADGVTKAEADAISLLVQDAVWTFDPDALVEITGGFRRGKPFGHDVDLLITSPGAEKEQEDQLLQKVTNLWKKQGLLLYGDLRESRFEDGKLPSRKIDALDHFQKCFAILKLYHHKVDKSKWEMPTGSNESEAKSWKAIRVDLVVCPYDRFAFALLGWTGSRMFERDLRRYATHEKKMMLDNHALYDLTKKIFLKAKSEEEIFAHLGLEYLEPSERNA

SEQ ID NO: 461 - DNA, 1587 bp, synthetic construct
  misc_feature 1..1587: note = Variant of terminal deoxynucleotidyltransferase
  source 1..1587: mol_type = other DNA
atgcaccatcatcatcatcatggcggtagcggcatgcaccgcattcgtaccatcgattcggacttcgggaagaaacgccagaagaagatggataaccacattagttccatgatctatgaaatcaaatttcacgagtttgtgctgttcattctcgaaaagaaaatgggtgcgacgcgtcgtttgtttctgacagatttagcccgcaagaaagggttccgcgtcgagaatgaactgtcagacagcgttacccacatcgtggcagaaaataattcaggatctgacgtattggcttggctgaagacccacaagatggagaagacgacgcaatttgaactgctggatattagctggcttatcgaaagcatgaaagttggtaaaccggtggacaccaaggggaaataccagttgatggaatcgcgtgtcgatagtgcgaacccagatccgacagccggtaccctcaacattctgcctcctactacgaagaccatttctcagtatgcgtgtcaacgccgcaccaccctgaacaaccataatcaacgttttacggacgcactggaaattcttgcggaaaattacgagttcaaacgcaacgatgatacttgtctgacctttatgcgtgctatttccgtgctgaaatgccttccgtttgaggtagttagcctgaaagacacggaaggattgccctggatcggtgatgaagtcaaagggattatggaagaaatcatcgaggtcggtgaatcgctggaagtgcaggccgtgctcaatgatgagcgctatcaaagcttcaaactgtttaagagtgtctttggagtgggggtgaagacagcagacaaatggtaccgtatgggtctgcgcacgctcgaggatgttcgttccagcaagaccctgaagttgaccaagatgcagaaagcgggtctgtgctattatgaagatcttgctgatggcgttacgaaagccgaagctgacgcgatttctctgctggttcaggatgcagtctggactttcgacccggatgcgctggtggagattacgggtggatttcgtcgtgggaaaccttttggtcacgacgttgatctgcttatcacatctccgggagctgagaaagaacaagaagaccagctcctgcagaaagtgaccaatctgtggaagaaacaagggttgttgctgtacggtgatctgcgtgaaagtcgctttgaagatgggaaactcccatcccgcaagatcgatgccctggaccattttcagaaatgctttgctatcctcaaactttatcaccataaagtggacaaaagcaaatgggaaatgccgacgggttcgaacgaaagcgaggccaaaagttggaaagcaattcgcgtagatctggttgtttgtccctacgatcgttttgcgtttgcgttgttgggttggaccggaagccgcatgttcgaacgtgatctgcgccgctacgccacccacgagaagaagatgatgctggacaatcatgcgctgtatgacctgaccaagaaaatctttctcaaagctaaatcggaagaggaaattttcgcacatctggggcttgaatacctggaaccgtccgaacgtaacgca

SEQ ID NO: 462 - protein, 529 aa, synthetic construct
  REGION 1..529: note = Variant of terminal deoxynucleotidyltransferase
MHHHHHHGGSGMHRIRTIDSDFGKKRQKKMDNHISSMIYEIKFHEFVLFILEKKMGATRRLFLTDLARKKGFRVENELSDSVTHIVAENNSGSDVLAWLKTHKMEKTTQFELLDISWLIESMKVGKPVDTKGKYQLMESRVDSANPDPTAGTLNILPPTTKTISQYACQRRTTLNNHNQRFTDALEILAENYEFKRNDDTCLTFMRAISVLKCLPFEVVSLKDTEGLPWIGDEVKGIMEEIIEVGESLEVQAVLNDERYQSFKLFKSVFGVGVKTADKWYRMGLRTLEDVRSSKTLKLTKMQKAGLCYYEDLADGVTKAEADAISLLVQDAVWTFDPDALVEITGGFRRGKPFGHDVDLLITSPGAEKEQEDQLLQKVTNLWKKQGLLLYGDLRESRFEDGKLPSRKIDALDHFQKCFAILKLYHHKVDKSKWEMPTGSNESEAKSWKAIRVDLVVCPYDRFAFALLGWTGSRMFERDLRRYATHEKKMMLDNHALYDLTKKIFLKAKSEEEIFAHLGLEYLEPSERNA

SEQ ID NO: 463 - DNA, 1587 bp, synthetic construct
  misc_feature 1..1587: note = Variant of terminal deoxynucleotidyltransferase
  source 1..1587: mol_type = other DNA
atgcaccatcatcatcatcatggcggtagcggcatgcaccgcattcgtaccatcgattcggacttcgggaagaaacgccagaagaagatggataaccacattagttccatgatctatgaaatcaaatttcacgagtttgtgctgttcattctcgaaaagaaaatgggtgcgacgcgtcgtacttttctgacagatttagcccgcaagaaagggttccgcgtcgagaatgaactgtcagacagcgttacccacatcgtggcagaaaataattcaggatctgacgtattggcttggctgaagacccacaagatggaggggacgacgcaatttgaactgctggatattagctggcttatcgaaagcatgaaagttggtaaaccggtggacaccaaggggaaataccagttgatggaatcgcgtgtcgatagtgcgaacccagatccgacagccggtaccctcaacattctgcctcctactacgaagaccatttctcagtatgcgtgtcaacgccgcaccaccctgaacaaccataatcaacgttttacggacgcactggaaattcttgcggaaaattacgagttcaaacgcaacgatgatacttgtctgacctttatgcgtgctatttccgtgctgaaatgccttccgtttgaggtagttagcctgaaagacacggaaggattgccctggatcggtgatgaagtcaaagggattatggaagaaatcatcgaggtcggtgaatcgctggaagtgcaggccgtgctcaatgatgagcgctatcaaagcttcaaactgtttaagagtgtctttggagtgggggtgaagacagcagacaaatggtaccgtatgggtctgcgcacgctcgaggatgttcgttccagcaagaccctgaagttgaccaagatgcagaaagcgggtctgtgctattatgaagatcttgctgatggcgttacgaaagccgaagctgacgcgatttctctgctggttcaggatgcagtctggactttcgacccggatgcgctggtggagattacgggtggatttcgtcgtgggaaaccttttggtcacgacgttgatctgcttatcacatctccgggagctgagaaagaacaagaagaccagctcctgcagaaagtgaccaatctgtggaagaaacaagggttgttgctgtacggtgatctgcgtgaaagtcgctttgaagatgggaaactcccatcccgcaagatcgatgccctggaccattttcagaaatgctttgctatcctcaaactttatcaccataaagtggacaaaagcaaatgggaaatgccgacgggttcgaacgaaagcgaggccaaaagttggaaagcaattcgcgtagatctggttgtttgtccctacgatcgttttgcgtttgcgttgttgggttggaccggaagccgcatgttcgaacgtgatctgcgccgctacgccacccacgagaagaagatgatgctggacaatcatgcgctgtatgacctgaccaagaaaatctttctcaaagctaaatcggaagaggaaattttcgcacatctggggcttgaatacctggaaccgtccgaacgtaacgca

SEQ ID NO: 464 - protein, 529 aa, synthetic construct
  REGION 1..529: note = Variant of terminal deoxynucleotidyltransferase
MHHHHHHGGSGMHRIRTIDSDFGKKRQKKMDNHISSMIYEIKFHEFVLFILEKKMGATRRTFLTDLARKKGFRVENELSDSVTHIVAENNSGSDVLAWLKTHKMEGTTQFELLDISWLIESMKVGKPVDTKGKYQLMESRVDSANPDPTAGTLNILPPTTKTISQYACQRRTTLNNHNQRFTDALEILAENYEFKRNDDTCLTFMRAISVLKCLPFEVVSLKDTEGLPWIGDEVKGIMEEIIEVGESLEVQAVLNDERYQSFKLFKSVFGVGVKTADKWYRMGLRTLEDVRSSKTLKLTKMQKAGLCYYEDLADGVTKAEADAISLLVQDAVWTFDPDALVEITGGFRRGKPFGHDVDLLITSPGAEKEQEDQLLQKVTNLWKKQGLLLYGDLRESRFEDGKLPSRKIDALDHFQKCFAILKLYHHKVDKSKWEMPTGSNESEAKSWKAIRVDLVVCPYDRFAFALLGWTGSRMFERDLRRYATHEKKMMLDNHALYDLTKKIFLKAKSEEEIFAHLGLEYLEPSERNA

SEQ ID NO: 465 - DNA, 1587 bp, synthetic construct
  misc_feature 1..1587: note = Variant of terminal deoxynucleotidyltransferase
  source 1..1587: mol_type = other DNA
atgcaccatcatcatcatcatggcggtagcggcatgcaccgcattcgtaccatcgattcggacctggggaagaaacgccagaagaagatggataaccacattagttccatgatctatgaaatcaaatttcacgagtttgtgctgttcattctcgaaaagaaaatgggtgcgacgcgtcgtacttttctgacagatttagcccgcaagaaagggttccgcgtcgagaatgaactgtcagacagcgttacccacatcgtggcagaaaataattcaggatctgacgtattggcttggctgaagacccacaagatggagaagacgacgcaatttgaactgctggatattagctggcttatcgaaagcatgaaagttggtaaaccggtggacaccaaggggaaataccagttgatggaatcgcgtgtcgatagtgcgaacccagatccgacagccggtaccctcaacattctgcctcctactacgaagaccatttctcagtatgcgtgtcaacgccgcaccaccctgaacaaccataatcaacgttttacggacgcactggaaattcttgcggaaaattacgagttcaaacgcaacgatgatacttgtctgacctttatgcgtgctatttccgtgctgaaatgccttccgtttgaggtagttagcctgaaagacacggaaggattgccctggatcggtgatgaagtcaaagggattatggaagaaatcatcgaggtcggtgaatcgctggaagtgcaggccgtgctcaatgatgagcgctatcaaagcttcaaactgtttaagagtgtctttggagtgggggtgaagacagcagacaaatggtaccgtatgggtctgcgcacgctcgaggatgttcgttccagcaagaccctgaagttgaccaagatgcagaaagcgggtctgtgctattatgaagatcttgctgatggcgttacgaaagccgaagctgacgcgatttctctgctggttcaggatgcagtctggactttcgacccggatgcgctggtggagattacgggtggatttcgtcgtgggaaaccttttggtcacgacgttgatctgcttatcacatctccgggagctgagaaagaacaagaagaccagctcctgcagaaagtgaccaatctgtggaagaaacaagggttgttgctgtacggtgatctgcgtgaaagtcgctttgaagatgggaaactcccatcccgcaagatcgatgccctggaccattttcagaaatgctttgctatcctcaaactttatcaccataaagtggacaaaagcaaatgggaaatgccgacgggttcgaacgaaagcgaggccaaaagttggaaagcaattcgcgtagatctggttgtttgtccctacgatcgttttgcgtttgcgttgttgggttggaccggaagccgcatgttcgaacgtgatctgcgccgctacgccacccacgagaagaagatgatgctggacaatcatgcgctgtatgacctgaccaagaaaatctttctcaaagctaaatcggaagaggaaattttcgcacatctggggcttgaatacctggaaccgtccgaacgtaacgca

SEQ ID NO: 466 - protein, 529 aa, synthetic construct
  REGION 1..529: note = Variant of terminal deoxynucleotidyltransferase
MHHHHHHGGSGMHRIRTIDSDLGKKRQKKMDNHISSMIYEIKFHEFVLFILEKKMGATRRTFLTDLARKKGFRVENELSDSVTHIVAENNSGSDVLAWLKTHKMEKTTQFELLDISWLIESMKVGKPVDTKGKYQLMESRVDSANPDPTAGTLNILPPTTKTISQYACQRRTTLNNHNQRFTDALEILAENYEFKRNDDTCLTFMRAISVLKCLPFEVVSLKDTEGLPWIGDEVKGIMEEIIEVGESLEVQAVLNDERYQSFKLFKSVFGVGVKTADKWYRMGLRTLEDVRSSKTLKLTKMQKAGLCYYEDLADGVTKAEADAISLLVQDAVWTFDPDALVEITGGFRRGKPFGHDVDLLITSPGAEKEQEDQLLQKVTNLWKKQGLLLYGDLRESRFEDGKLPSRKIDALDHFQKCFAILKLYHHKVDKSKWEMPTGSNESEAKSWKAIRVDLVVCPYDRFAFALLGWTGSRMFERDLRRYATHEKKMMLDNHALYDLTKKIFLKAKSEEEIFAHLGLEYLEPSERNA

SEQ ID NO: 467 - DNA, 1587 bp, synthetic construct
  misc_feature 1..1587: note = Variant of terminal deoxynucleotidyltransferase
  source 1..1587: mol_type = other DNA
atgcaccatcatcatcatcatggcggtagcggcatgcaccgcattcgtaccatcgattcggacttcgggaagaaacgcgataagaagatggataaccacattagttccatgatctatgaaatcaaatttcacgagtttgtgctgttcattctcgaaaagaaaatgggtgcgacgcgtcgtacttttctgacagatttagcccgcaagaaagggttccgcgtcgagaatgaactgtcagacagcgttacccacatcgtggcagaaaataattcaggatctgacgtattggcttggctgaagacccacaagatggagaagacgacgcaatttgaactgctggatattagctggcttatcgaaagcatgaaagttggtaaaccggtggacaccaaggggaaataccagttgatggaatcgcgtgtcgatagtgcgaacccagatccgacagccggtaccctcaacattctgcctcctactacgaagaccatttctcagtatgcgtgtcaacgccgcaccaccctgaacaaccataatcaacgttttacggacgcactggaaattcttgcggaaaattacgagttcaaacgcaacgatgatacttgtctgacctttatgcgtgctatttccgtgctgaaatgccttccgtttgaggtagttagcctgaaagacacggaaggattgccctggatcggtgatgaagtcaaagggattatggaagaaatcatcgaggtcggtgaatcgctggaagtgcaggccgtgctcaatgatgagcgctatcaaagcttcaaactgtttaagagtgtctttggagtgggggtgaagacagcagacaaatggtaccgtatgggtctgcgcacgctcgaggatgttcgttccagcaagaccctgaagttgaccaagatgcagaaagcgggtctgtgctattatgaagatcttgctgatggcgttacgaaagccgaagctgacgcgatttctctgctggttcaggatgcagtctggactttcgacccggatgcgctggtggagattacgggtggatttcgtcgtgggaaaccttttggtcacgacgttgatctgcttatcacatctccgggagctgagaaagaacaagaagaccagctcctgcagaaagtgaccaatctgtggaagaaacaagggttgttgctgtacggtgatctgcgtgaaagtcgctttgaagatgggaaactcccatcccgcaagatcgatgccctggaccattttcagaaatgctttgctatcctcaaactttatcaccataaagtggacaaaagcaaatgggaaatgccgacgggttcgaacgaaagcgaggccaaaagttggaaagcaattcgcgtagatctggttgtttgtccctacgatcgttttgcgtttgcgttgttgggttggaccggaagccgcatgttcgaacgtgatctgcgccgctacgccacccacgagaagaagatgatgctggacaatcatgcgctgtatgacctgaccaagaaaatctttctcaaagctaaatcggaagaggaaattttcgcacatctggggcttgaatacctggaaccgtccgaacgtaacgca

SEQ ID NO: 468 - protein, 529 aa, synthetic construct
  REGION 1..529: note = Variant of terminal deoxynucleotidyltransferase
MHHHHHHGGSGMHRIRTIDSDFGKKRDKKMDNHISSMIYEIKFHEFVLFILEKKMGATRRTFLTDLARKKGFRVENELSDSVTHIVAENNSGSDVLAWLKTHKMEKTTQFELLDISWLIESMKVGKPVDTKGKYQLMESRVDSANPDPTAGTLNILPPTTKTISQYACQRRTTLNNHNQRFTDALEILAENYEFKRNDDTCLTFMRAISVLKCLPFEVVSLKDTEGLPWIGDEVKGIMEEIIEVGESLEVQAVLNDERYQSFKLFKSVFGVGVKTADKWYRMGLRTLEDVRSSKTLKLTKMQKAGLCYYEDLADGVTKAEADAISLLVQDAVWTFDPDALVEITGGFRRGKPFGHDVDLLITSPGAEKEQEDQLLQKVTNLWKKQGLLLYGDLRESRFEDGKLPSRKIDALDHFQKCFAILKLYHHKVDKSKWEMPTGSNESEAKSWKAIRVDLVVCPYDRFAFALLGWTGSRMFERDLRRYATHEKKMMLDNHALYDLTKKIFLKAKSEEEIFAHLGLEYLEPSERNA

SEQ ID NO: 469 - DNA, 1587 bp, synthetic construct
  misc_feature 1..1587: note = Variant of terminal deoxynucleotidyltransferase
  source 1..1587: mol_type = other DNA
atgcaccatcatcatcatcatggcggtagcggcatgcaccgcattcgtaccatcgattcggacttcgggaagaaacgccagaagaagatggataaccacattagttccatgatctatgaaatcaaatttcacgagtttgtgctgttcattctcgaaaagaaaatgggtgcgacgcgtcgtacttttctgacagatttagcccgcaagaaagggttccgcgtcgagaatgaactgtcagacagcgttacccacatcgtggcagaaaataattcaggatctgacgtattggcttggctgaagacccacaagatggagaagacgacgcaatttgaactgctggatattagctggcttatcgaaagcatgaaaattggtaaaccggtggacaccaaggggaaataccagttgatggaatcgcgtgtcgatagtgcgaacccagatccgacagccggtaccctcaacattctgcctcctactacgaagaccatttctcagtatgcgtgtcaacgccgcaccaccctgaacaaccataatcaacgttttacggacgcactggaaattcttgcggaaaattacgagttcaaacgcaacgatgatacttgtctgacctttatgcgtgctatttccgtgctgaaatgccttccgtttgaggtagttagcctgaaagacacggaaggattgccctggatcggtgatgaagtcaaagggattatggaagaaatcatcgaggtcggtgaatcgctggaagtgcaggccgtgctcaatgatgagcgctatcaaagcttcaaactgtttaagagtgtctttggagtgggggtgaagacagcagacaaatggtaccgtatgggtctgcgcacgctcgaggatgttcgttccagcaagaccctgaagttgaccaagatgcagaaagcgggtctgtgctattatgaagatcttgctgatggcgttacgaaagccgaagctgacgcgatttctctgctggttcaggatgcagtctggactttcgacccggatgcgctggtggagattacgggtggatttcgtcgtgggaaaccttttggtcacgacgttgatctgcttatcacatctccgggagctgagaaagaacaagaagaccagctcctgcagaaagtgaccaatctgtggaagaaacaagggttgttgctgtacggtgatctgcgtgaaagtcgctttgaagatgggaaactcccatcccgcaagatcgatgccctggaccattttcagaaatgctttgctatcctcaaactttatcaccataaagtggacaaaagcaaatgggaaatgccgacgggttcgaacgaaagcgaggccaaaagttggaaagcaattcgcgtagatctggttgtttgtccctacgatcgttttgcgtttgcgttgttgggttggaccggaagccgcatgttcgaacgtgatctgcgccgctacgccacccacgagaagaagatgatgctggacaatcatgcgctgtatgacctgaccaagaaaatctttctcaaagctaaatcggaagaggaaattttcgcacatctggggcttgaatacctggaaccgtccgaacgtaacgca

SEQ ID NO: 470 - protein, 529 aa, synthetic construct
  REGION 1..529: note = Variant of terminal deoxynucleotidyltransferase
MHHHHHHGGSGMHRIRTIDSDFGKKRQKKMDNHISSMIYEIKFHEFVLFILEKKMGATRRTFLTDLARKKGFRVENELSDSVTHIVAENNSGSDVLAWLKTHKMEKTTQFELLDISWLIESMKIGKPVDTKGKYQLMESRVDSANPDPTAGTLNILPPTTKTISQYACQRRTTLNNHNQRFTDALEILAENYEFKRNDDTCLTFMRAISVLKCLPFEVVSLKDTEGLPWIGDEVKGIMEEIIEVGESLEVQAVLNDERYQSFKLFKSVFGVGVKTADKWYRMGLRTLEDVRSSKTLKLTKMQKAGLCYYEDLADGVTKAEADAISLLVQDAVWTFDPDALVEITGGFRRGKPFGHDVDLLITSPGAEKEQEDQLLQKVTNLWKKQGLLLYGDLRESRFEDGKLPSRKIDALDHFQKCFAILKLYHHKVDKSKWEMPTGSNESEAKSWKAIRVDLVVCPYDRFAFALLGWTGSRMFERDLRRYATHEKKMMLDNHALYDLTKKIFLKAKSEEEIFAHLGLEYLEPSERNA

SEQ ID NO: 471 - DNA, 1587 bp, synthetic construct
  misc_feature 1..1587: note = Variant of terminal deoxynucleotidyltransferase
  source 1..1587: mol_type = other DNA
atgcaccatcatcatcatcatggcggtagcggcatgcaccgcattcgtaccatcgattcggacttcgggaagaaacgccagaagaagatggataaccacattagttccatgatctatgaaatcaaatttcacgagtttgtgctgttcattctcgaaaagaaaatgggtgcgacgcgtcgtacttttctgacagatttagcccgcaagaaagggttccgcgtcgagaatgaactgtcagacagcgttacccacatcgtggcagaaaataattcaggatctgacgtattggcttggctgaagacccacaagatggagaagacgacgcaatttgaactgctggatattagctggcttatcgaaagcatgaaagttggtaaaccggtggacaccaaggggaaataccagttgatggaatcgcgtgtcgatagtgcgaacccagatccgacagccggtaccctcaacattctgcctcctactacggggaccatttctcagtatgcgtgtcaacgccgcaccaccctgaacaaccataatcaacgttttacggacgcactggaaattcttgcggaaaattacgagttcaaacgcaacgatgatacttgtctgacctttatgcgtgctatttccgtgctgaaatgccttccgtttgaggtagttagcctgaaagacacggaaggattgccctggatcggtgatgaagtcaaagggattatggaagaaatcatcgaggtcggtgaatcgctggaagtgcaggccgtgctcaatgatgagcgctatcaaagcttcaaactgtttaagagtgtctttggagtgggggtgaagacagcagacaaatggtaccgtatgggtctgcgcacgctcgaggatgttcgttccagcaagaccctgaagttgaccaagatgcagaaagcgggtctgtgctattatgaagatcttgctgatggcgttacgaaagccgaagctgacgcgatttctctgctggttcaggatgcagtctggactttcgacccggatgcgctggtggagattacgggtggatttcgtcgtgggaaaccttttggtcacgacgttgatctgcttatcacatctccgggagctgagaaagaacaagaagaccagctcctgcagaaagtgaccaatctgtggaagaaacaagggttgttgctgtacggtgatctgcgtgaaagtcgctttgaagatgggaaactcccatcccgcaagatcgatgccctggaccattttcagaaatgctttgctatcctcaaactttatcaccataaagtggacaaaagcaaatgggaaatgccgacgggttcgaacgaaagcgaggccaaaagttggaaagcaattcgcgtagatctggttgtttgtccctacgatcgttttgcgtttgcgttgttgggttggaccggaagccgcatgttcgaacgtgatctgcgccgctacgccacccacgagaagaagatgatgctggacaatcatgcgctgtatgacctgaccaagaaaatctttctcaaagctaaatcggaagaggaaattttcgcacatctggggcttgaatacctggaaccgtccgaacgtaacgca

SEQ ID NO: 472 - protein, 529 aa, synthetic construct
  REGION 1..529: note = Variant of terminal deoxynucleotidyltransferase
MHHHHHHGGSGMHRIRTIDSDFGKKRQKKMDNHISSMIYEIKFHEFVLFILEKKMGATRRTFLTDLARKKGFRVENELSDSVTHIVAENNSGSDVLAWLKTHKMEKTTQFELLDISWLIESMKVGKPVDTKGKYQLMESRVDSANPDPTAGTLNILPPTTGTISQYACQRRTTLNNHNQRFTDALEILAENYEFKRNDDTCLTFMRAISVLKCLPFEVVSLKDTEGLPWIGDEVKGIMEEIIEVGESLEVQAVLNDERYQSFKLFKSVFGVGVKTADKWYRMGLRTLEDVRSSKTLKLTKMQKAGLCYYEDLADGVTKAEADAISLLVQDAVWTFDPDALVEITGGFRRGKPFGHDVDLLITSPGAEKEQEDQLLQKVTNLWKKQGLLLYGDLRESRFEDGKLPSRKIDALDHFQKCFAILKLYHHKVDKSKWEMPTGSNESEAKSWKAIRVDLVVCPYDRFAFALLGWTGSRMFERDLRRYATHEKKMMLDNHALYDLTKKIFLKAKSEEEIFAHLGLEYLEPSERNA

SEQ ID NO: 473 - DNA, 1587 bp, synthetic construct
  misc_feature 1..1587: note = Variant of terminal deoxynucleotidyltransferase
  source 1..1587: mol_type = other DNA
atgcaccatcatcatcatcatggcggtagcggcatgcaccgcattcgtaccatcgattcggacttcgggaagaaacgccagaagaagatggataaccacattagttccatgatctatgaaatcaaatttcacgagtttgtgctgttcattctcgaaaagaaaatgggtgcgacgcgtcgtacttttctgacagatttagcccgcaagaaagggttccgcgtcgagaatgaactgtcagacagcgttacccacatcgtggcagaaaataattcaggatctgacgtattggcttggctgaagacccacaagatggagaagacgacgcaatttgaactgctggatattagctggcttatcgaaagcatgaaagttggtaaaccggtggacaccaaggggaaataccagttgatgcagtcgcgtgtcgatagtgcgaacccagatccgacagccggtaccctcaacattctgcctcctactacgaagaccatttctcagtatgcgtgtcaacgccgcaccaccctgaacaaccataatcaacgttttacggacgcactggaaattcttgcggaaaattacgagttcaaacgcaacgatgatacttgtctgacctttatgcgtgctatttccgtgctgaaatgccttccgtttgaggtagttagcctgaaagacacggaaggattgccctggatcggtgatgaagtcaaagggattatggaagaaatcatcgaggtcggtgaatcgctggaagtgcaggccgtgctcaatgatgagcgctatcaaagcttcaaactgtttaagagtgtctttggagtgggggtgaagacagcagacaaatggtaccgtatgggtctgcgcacgctcgaggatgttcgttccagcaagaccctgaagttgaccaagatgcagaaagcgggtctgtgctattatgaagatcttgctgatggcgttacgaaagccgaagctgacgcgatttctctgctggttcaggatgcagtctggactttcgacccggatgcgctggtggagattacgggtggatttcgtcgtgggaaaccttttggtcacgacgttgatctgcttatcacatctccgggagctgagaaagaacaagaagaccagctcctgcagaaagtgaccaatctgtggaagaaacaagggttgttgctgtacggtgatctgcgtgaaagtcgctttgaagatgggaaactcccatcccgcaagatcgatgccctggaccattttcagaaatgctttgctatcctcaaactttatcaccataaagtggacaaaagcaaatgggaaatgccgacgggttcgaacgaaagcgaggccaaaagttggaaagcaattcgcgtagatctggttgtttgtccctacgatcgttttgcgtttgcgttgttgggttggaccggaagccgcatgttcgaacgtgatctgcgccgctacgccacccacgagaagaagatgatgctggacaatcatgcgctgtatgacctgaccaagaaaatctttctcaaagctaaatcggaagaggaaattttcgcacatctggggcttgaatacctggaaccgtccgaacgtaacgca

SEQ ID NO: 474 - protein, 529 aa, synthetic construct
  REGION 1..529: note = Variant of terminal deoxynucleotidyltransferase
MHHHHHHGGSGMHRIRTIDSDFGKKRQKKMDNHISSMIYEIKFHEFVLFILEKKMGATRRTFLTDLARKKGFRVENELSDSVTHIVAENNSGSDVLAWLKTHKMEKTTQFELLDISWLIESMKVGKPVDTKGKYQLMQSRVDSANPDPTAGTLNILPPTTKTISQYACQRRTTLNNHNQRFTDALEILAENYEFKRNDDTCLTFMRAISVLKCLPFEVVSLKDTEGLPWIGDEVKGIMEEIIEVGESLEVQAVLNDERYQSFKLFKSVFGVGVKTADKWYRMGLRTLEDVRSSKTLKLTKMQKAGLCYYEDLADGVTKAEADAISLLVQDAVWTFDPDALVEITGGFRRGKPFGHDVDLLITSPGAEKEQEDQLLQKVTNLWKKQGLLLYGDLRESRFEDGKLPSRKIDALDHFQKCFAILKLYHHKVDKSKWEMPTGSNESEAKSWKAIRVDLVVCPYDRFAFALLGWTGSRMFERDLRRYATHEKKMMLDNHALYDLTKKIFLKAKSEEEIFAHLGLEYLEPSERNA

SEQ ID NO: 475 - DNA, 1587 bp, synthetic construct
  misc_feature 1..1587: note = Variant of terminal deoxynucleotidyltransferase
  source 1..1587: mol_type = other DNA
atgcaccatcatcatcatcatggcggtagcggcatgcaccgcattcgtaccatcgattcggacttcgagaagaaacgccagaagaagatggataaccacattagttccatgatctatgaaatcaaatttcacgagtttgtgctgttcattctcgaaaagaaaatgggtgcgacgcgtcgtacttttctgacagatttagcccgcaagaaagggttccgcgtcgagaatgaactgtcagacagcgttacccacatcgtggcagaaaataattcaggatctgacgtattggcttggctgaagacccacaagatggagaagacgacgcaatttgaactgctggatattagctggcttatcgaaagcatgaaagttggtaaaccggtggacaccaaggggaaataccagttgatggaatcgcgtgtcgatagtgcgaacccagatccgacagccggtaccctcaacattctgcctcctactacgaagaccatttctcagtatgcgtgtcaacgccgcaccaccctgaacaaccataatcaacgttttacggacgcactggaaattcttgcggaaaattacgagttcaaacgcaacgatgatacttgtctgacctttatgcgtgctatttccgtgctgaaatgccttccgtttgaggtagttagcctgaaagacacggaaggattgccctggatcggtgatgaagtcaaagggattatggaagaaatcatcgaggtcggtgaatcgctggaagtgcaggccgtgctcaatgatgagcgctatcaaagcttcaaactgtttaagagtgtctttggagtgggggtgaagacagcagacaaatggtaccgtatgggtctgcgcacgctcgaggatgttcgttccagcaagaccctgaagttgaccaagatgcagaaagcgggtctgtgctattatgaagatcttgctgatggcgttacgaaagccgaagctgacgcgatttctctgctggttcaggatgcagtctggactttcgacccggatgcgctggtggagattacgggtggatttcgtcgtgggaaaccttttggtcacgacgttgatctgcttatcacatctccgggagctgagaaagaacaagaagaccagctcctgcagaaagtgaccaatctgtggaagaaacaagggttgttgctgtacggtgatctgcgtgaaagtcgctttgaagatgggaaactcccatcccgcaagatcgatgccctggaccattttcagaaatgctttgctatcctcaaactttatcaccataaagtggacaaaagcaaatgggaaatgccgacgggttcgaacgaaagcgaggccaaaagttggaaagcaattcgcgtagatctggttgtttgtccctacgatcgttttgcgtttgcgttgttgggttggaccggaagccgcatgttcgaacgtgatctgcgccgctacgccacccacgagaagaagatgatgctggacaatcatgcgctgtatgacctgaccaagaaaatctttctcaaagctaaatcggaagaggaaattttcgcacatctggggcttgaatacctggaaccgtccgaacgtaacgca

SEQ ID NO: 476 - protein, 529 aa, synthetic construct
  REGION 1..529: note = Variant of terminal deoxynucleotidyltransferase
MHHHHHHGGSGMHRIRTIDSDFEKKRQKKMDNHISSMIYEIKFHEFVLFILEKKMGATRRTFLTDLARKKGFRVENELSDSVTHIVAENNSGSDVLAWLKTHKMEKTTQFELLDISWLIESMKVGKPVDTKGKYQLMESRVDSANPDPTAGTLNILPPTTKTISQYACQRRTTLNNHNQRFTDALEILAENYEFKRNDDTCLTFMRAISVLKCLPFEVVSLKDTEGLPWIGDEVKGIMEEIIEVGESLEVQAVLNDERYQSFKLFKSVFGVGVKTADKWYRMGLRTLEDVRSSKTLKLTKMQKAGLCYYEDLADGVTKAEADAISLLVQDAVWTFDPDALVEITGGFRRGKPFGHDVDLLITSPGAEKEQEDQLLQKVTNLWKKQGLLLYGDLRESRFEDGKLPSRKIDALDHFQKCFAILKLYHHKVDKSKWEMPTGSNESEAKSWKAIRVDLVVCPYDRFAFALLGWTGSRMFERDLRRYATHEKKMMLDNHALYDLTKKIFLKAKSEEEIFAHLGLEYLEPSERNA

SEQ ID NO: 477 - DNA, 1587 bp, synthetic construct
  misc_feature 1..1587: note = Variant of terminal deoxynucleotidyltransferase
  source 1..1587: mol_type = other DNA
atgcaccatcatcatcatcatggcggtagcggcatgcaccgcattcgtaccatcgattcggacttcgggaagaaacgccagaagaagatggataaccacattagttccatgatctatgaaatcaaatttcacgagtttgtgctgttcattctcgaaaagaaaatgggtgcgacgcgtcgtacttttctgacagatttagcccgcaagaaagggttccgcgtcgagaatgaactgtcagacagcgttacccacatcgtggcagaaaataattcaggatctgacgtattggcttggctgaagacccacaagatggagaagacgacgcaatttgaactgctggatattagctggcttatcgaaagcatgaaagttggtaaaccggtggacaccaaggggaaataccagttgatggaatcgcgtatggatagtgcgaacccagatccgacagccggtaccctcaacattctgcctcctactacgaagaccatttctcagtatgcgtgtcaacgccgcaccaccctgaacaaccataatcaacgttttacggacgcactggaaattcttgcggaaaattacgagttcaaacgcaacgatgatacttgtctgacctttatgcgtgctatttccgtgctgaaatgccttccgtttgaggtagttagcctgaaagacacggaaggattgccctggatcggtgatgaagtcaaagggattatggaagaaatcatcgaggtcggtgaatcgctggaagtgcaggccgtgctcaatgatgagcgctatcaaagcttcaaactgtttaagagtgtctttggagtgggggtgaagacagcagacaaatggtaccgtatgggtctgcgcacgctcgaggatgttcgttccagcaagaccctgaagttgaccaagatgcagaaagcgggtctgtgctattatgaagatcttgctgatggcgttacgaaagccgaagctgacgcgatttctctgctggttcaggatgcagtctggactttcgacccggatgcgctggtggagattacgggtggatttcgtcgtgggaaaccttttggtcacgacgttgatctgcttatcacatctccgggagctgagaaagaacaagaagaccagctcctgcagaaagtgaccaatctgtggaagaaacaagggttgttgctgtacggtgatctgcgtgaaagtcgctttgaagatgggaaactcccatcccgcaagatcgatgccctggaccattttcagaaatgctttgctatcctcaaactttatcaccataaagtggacaaaagcaaatgggaaatgccgacgggttcgaacgaaagcgaggccaaaagttggaaagcaattcgcgtagatctggttgtttgtccctacgatcgttttgcgtttgcgttgttgggttggaccggaagccgcatgttcgaacgtgatctgcgccgctacgccacccacgagaagaagatgatgctggacaatcatgcgctgtatgacctgaccaagaaaatctttctcaaagctaaatcggaagaggaaattttcgcacatctggggcttgaatacctggaaccgtccgaacgtaacgca

SEQ ID NO: 478 - protein, 529 aa, synthetic construct
  REGION 1..529: note = Variant of terminal deoxynucleotidyltransferase
MHHHHHHGGSGMHRIRTIDSDFGKKRQKKMDNHISSMIYEIKFHEFVLFILEKKMGATRRTFLTDLARKKGFRVENELSDSVTHIVAENNSGSDVLAWLKTHKMEKTTQFELLDISWLIESMKVGKPVDTKGKYQLMESRMDSANPDPTAGTLNILPPTTKTISQYACQRRTTLNNHNQRFTDALEILAENYEFKRNDDTCLTFMRAISVLKCLPFEVVSLKDTEGLPWIGDEVKGIMEEIIEVGESLEVQAVLNDERYQSFKLFKSVFGVGVKTADKWYRMGLRTLEDVRSSKTLKLTKMQKAGLCYYEDLADGVTKAEADAISLLVQDAVWTFDPDALVEITGGFRRGKPFGHDVDLLITSPGAEKEQEDQLLQKVTNLWKKQGLLLYGDLRESRFEDGKLPSRKIDALDHFQKCFAILKLYHHKVDKSKWEMPTGSNESEAKSWKAIRVDLVVCPYDRFAFALLGWTGSRMFERDLRRYATHEKKMMLDNHALYDLTKKIFLKAKSEEEIFAHLGLEYLEPSERNA

SEQ ID NO: 479 - DNA, 1587 bp, synthetic construct
  misc_feature 1..1587: note = Variant of terminal deoxynucleotidyltransferase
  source 1..1587: mol_type = other DNA
atgcaccatcatcatcatcatggcggtagcggcatgcaccgcattcgtaccatcgattcggacttcgggaagaaacgccagaagaagatggataaccacattagttccatgatctatgaaatcaaatttcacgagtttgtgctgttcattctcgaaaagaaaatgggtgcgacgcgtcgtacttttctgacagatttagcccgcaagaaagggttccgcgtcgagaatgaactgtcagacagcgttacccacatcgtggcagaaaataattcaggatctgacgtattggcttggctgaagaccttgaagatggagaagacgacgcaatttgaactgctggatattagctggcttatcgaaagcatgaaagttggtaaaccggtggacaccaaggggaaataccagttgatggaatcgcgtgtcgatagtgcgaacccagatccgacagccggtaccctcaacattctgcctcctactacgaagaccatttctcagtatgcgtgtcaacgccgcaccaccctgaacaaccataatcaacgttttacggacgcactggaaattcttgcggaaaattacgagttcaaacgcaacgatgatacttgtctgacctttatgcgtgctatttccgtgctgaaatgccttccgtttgaggtagttagcctgaaagacacggaaggattgccctggatcggtgatgaagtcaaagggattatggaagaaatcatcgaggtcggtgaatcgctggaagtgcaggccgtgctcaatgatgagcgctatcaaagcttcaaactgtttaagagtgtctttggagtgggggtgaagacagcagacaaatggtaccgtatgggtctgcgcacgctcgaggatgttcgttccagcaagaccctgaagttgaccaagatgcagaaagcgggtctgtgctattatgaagatcttgctgatggcgttacgaaagccgaagctgacgcgatttctctgctggttcaggatgcagtctggactttcgacccggatgcgctggtggagattacgggtggatttcgtcgtgggaaaccttttggtcacgacgttgatctgcttatcacatctccgggagctgagaaagaacaagaagaccagctcctgcagaaagtgaccaatctgtggaagaaacaagggttgttgctgtacggtgatctgcgtgaaagtcgctttgaagatgggaaactcccatcccgcaagatcgatgccctggaccattttcagaaatgctttgctatcctcaaactttatcaccataaagtggacaaaagcaaatgggaaatgccgacgggttcgaacgaaagcgaggccaaaagttggaaagcaattcgcgtagatctggttgtttgtccctacgatcgttttgcgtttgcgttgttgggttggaccggaagccgcatgttcgaacgtgatctgcgccgctacgccacccacgagaagaagatgatgctggacaatcatgcgctgtatgacctgaccaagaaaatctttctcaaagctaaatcggaagaggaaattttcgcacatctggggcttgaatacctggaaccgtccgaacgtaacgca

SEQ ID NO: 480 - protein, 529 aa, synthetic construct
  REGION 1..529: note = Variant of terminal deoxynucleotidyltransferase
MHHHHHHGGSGMHRIRTIDSDFGKKRQKKMDNHISSMIYEIKFHEFVLFILEKKMGATRRTFLTDLARKKGFRVENELSDSVTHIVAENNSGSDVLAWLKTLKMEKTTQFELLDISWLIESMKVGKPVDTKGKYQLMESRVDSANPDPTAGTLNILPPTTKTISQYACQRRTTLNNHNQRFTDALEILAENYEFKRNDDTCLTFMRAISVLKCLPFEVVSLKDTEGLPWIGDEVKGIMEEIIEVGESLEVQAVLNDERYQSFKLFKSVFGVGVKTADKWYRMGLRTLEDVRSSKTLKLTKMQKAGLCYYEDLADGVTKAEADAISLLVQDAVWTFDPDALVEITGGFRRGKPFGHDVDLLITSPGAEKEQEDQLLQKVTNLWKKQGLLLYGDLRESRFEDGKLPSRKIDALDHFQKCFAILKLYHHKVDKSKWEMPTGSNESEAKSWKAIRVDLVVCPYDRFAFALLGWTGSRMFERDLRRYATHEKKMMLDNHALYDLTKKIFLKAKSEEEIFAHLGLEYLEPSERNA

SEQ ID NO: 481 - DNA, 1587 bp, synthetic construct
  misc_feature 1..1587: note = Variant of terminal deoxynucleotidyltransferase
  source 1..1587: mol_type = other DNA
atgcaccatcatcatcatcatggcggtagcggcatgcaccgcattcgtaccatcgattcggacttcgggaagaaacgccagaagaagatggataaccacattagttccatgatctatgaaatcaaatttcacgagtttgtgctgttcattctcgaaaagaaaatgggtgcgacgcgtcgtacttttctgacagatttagcccgcaagaaagggttccgcgtcgagaatgaactgtcagacagcgttacccacatcgtggcagaaaataattcaggatctgacgtattggcttggctgaagacccacaagatgaataagacgacgcaatttgaactgctggatattagctggcttatcgaaagcatgaaagttggtaaaccggtggacaccaaggggaaataccagttgatggaatcgcgtgtcgatagtgcgaacccagatccgacagccggtaccctcaacattctgcctcctactacgaagaccatttctcagtatgcgtgtcaacgccgcaccaccctgaacaaccataatcaacgttttacggacgcactggaaattcttgcggaaaattacgagttcaaacgcaacgatgatacttgtctgacctttatgcgtgctatttccgtgctgaaatgccttccgtttgaggtagttagcctgaaagacacggaaggattgccctggatcggtgatgaagtcaaagggattatggaagaaatcatcgaggtcggtgaatcgctggaagtgcaggccgtgctcaatgatgagcgctatcaaagcttcaaactgtttaagagtgtctttggagtgggggtgaagacagcagacaaatggtaccgtatgggtctgcgcacgctcgaggatgttcgttccagcaagaccctgaagttgaccaagatgcagaaagcgggtctgtgctattatgaagatcttgctgatggcgttacgaaagccgaagctgacgcgatttctctgctggttcaggatgcagtctggactttcgacccggatgcgctggtggagattacgggtggatttcgtcgtgggaaaccttttggtcacgacgttgatctgcttatcacatctccgggagctgagaaagaacaagaagaccagctcctgcagaaagtgaccaatctgtggaagaaacaagggttgttgctgtacggtgatctgcgtgaaagtcgctttgaagatgggaaactcccatcccgcaagatcgatgccctggaccattttcagaaatgctttgctatcctcaaactttatcaccataaagtggacaaaagcaaatgggaaatgccgacgggttcgaacgaaagcgaggccaaaagttggaaagcaattcgcgtagatctggttgtttgtccctacgatcgttttgcgtttgcgttgttgggttggaccggaagccgcatgttcgaacgtgatctgcgccgctacgccacccacgagaagaagatgatgctggacaatcatgcgctgtatgacctgaccaagaaaatctttctcaaagctaaatcggaagaggaaattttcgcacatctggggcttgaatacctggaaccgtccgaacgtaacgca

SEQ ID NO: 482 - protein, 529 aa, synthetic construct
  REGION 1..529: note = Variant of terminal deoxynucleotidyltransferase
MHHHHHHGGSGMHRIRTIDSDFGKKRQKKMDNHISSMIYEIKFHEFVLFILEKKMGATRRTFLTDLARKKGFRVENELSDSVTHIVAENNSGSDVLAWLKTHKMNKTTQFELLDISWLIESMKVGKPVDTKGKYQLMESRVDSANPDPTAGTLNILPPTTKTISQYACQRRTTLNNHNQRFTDALEILAENYEFKRNDDTCLTFMRAISVLKCLPFEVVSLKDTEGLPWIGDEVKGIMEEIIEVGESLEVQAVLNDERYQSFKLFKSVFGVGVKTADKWYRMGLRTLEDVRSSKTLKLTKMQKAGLCYYEDLADGVTKAEADAISLLVQDAVWTFDPDALVEITGGFRRGKPFGHDVDLLITSPGAEKEQEDQLLQKVTNLWKKQGLLLYGDLRESRFEDGKLPSRKIDALDHFQKCFAILKLYHHKVDKSKWEMPTGSNESEAKSWKAIRVDLVVCPYDRFAFALLGWTGSRMFERDLRRYATHEKKMMLDNHALYDLTKKIFLKAKSEEEIFAHLGLEYLEPSERNA

SEQ ID NO: 483 - DNA, 1587 bp, synthetic construct
  misc_feature 1..1587: note = Variant of terminal deoxynucleotidyltransferase
  source 1..1587: mol_type = other DNA
atgcaccatcatcatcatcatggcggtagcggcatgcaccgcattcgtaccatcgattcggacttcgggaagaaacgccagaagaagatggataaccacattagttccatgatctatgaaatcaaatttcacgagtttgtgctgttcattctcgaaaagaaaatgggtgcgacgcgtcgtacttttctgacagatttagcccgcaagaaagggttccgcgtcgagaatgaactgtcagacagcgttacccacatcgtggcagaaaataattcaggatctgacgtattggcttggctgaagacccacaagatggagaagacgacgcaatttgaactgctggatattagctggcttatcgaaagcatgaaagttggtaaaccggtggacaccaaggggaaataccagttgatggaatcgcgtgtcgatagttgtaacccagatccgacagccggtaccctcaacattctgcctcctactacgaagaccatttctcagtatgcgtgtcaacgccgcaccaccctgaacaaccataatcaacgttttacggacgcactggaaattcttgcggaaaattacgagttcaaacgcaacgatgatacttgtctgacctttatgcgtgctatttccgtgctgaaatgccttccgtttgaggtagttagcctgaaagacacggaaggattgccctggatcggtgatgaagtcaaagggattatggaagaaatcatcgaggtcggtgaatcgctggaagtgcaggccgtgctcaatgatgagcgctatcaaagcttcaaactgtttaagagtgtctttggagtgggggtgaagacagcagacaaatggtaccgtatgggtctgcgcacgctcgaggatgttcgttccagcaagaccctgaagttgaccaagatgcagaaagcgggtctgtgctattatgaagatcttgctgatggcgttacgaaagccgaagctgacgcgatttctctgctggttcaggatgcagtctggactttcgacccggatgcgctggtggagattacgggtggatttcgtcgtgggaaaccttttggtcacgacgttgatctgcttatcacatctccgggagctgagaaagaacaagaagaccagctcctgcagaaagtgaccaatctgtggaagaaacaagggttgttgctgtacggtgatctgcgtgaaagtcgctttgaagatgggaaactcccatcccgcaagatcgatgccctggaccattttcagaaatgctttgctatcctcaaactttatcaccataaagtggacaaaagcaaatgggaaatgccgacgggttcgaacgaaagcgaggccaaaagttggaaagcaattcgcgtagatctggttgtttgtccctacgatcgttttgcgtttgcgttgttgggttggaccggaagccgcatgttcgaacgtgatctgcgccgctacgccacccacgagaagaagatgatgctggacaatcatgcgctgtatgacctgaccaagaaaatctttctcaaagctaaatcggaagaggaaattttcgcacatctggggcttgaatacctggaaccgtccgaacgtaacgca

SEQ ID NO: 484 - protein, 529 aa, synthetic construct
  REGION 1..529: note = Variant of terminal deoxynucleotidyltransferase
MHHHHHHGGSGMHRIRTIDSDFGKKRQKKMDNHISSMIYEIKFHEFVLFILEKKMGATRRTFLTDLARKKGFRVENELSDSVTHIVAENNSGSDVLAWLKTHKMEKTTQFELLDISWLIESMKVGKPVDTKGKYQLMESRVDSCNPDPTAGTLNILPPTTKTISQYACQRRTTLNNHNQRFTDALEILAENYEFKRNDDTCLTFMRAISVLKCLPFEVVSLKDTEGLPWIGDEVKGIMEEIIEVGESLEVQAVLNDERYQSFKLFKSVFGVGVKTADKWYRMGLRTLEDVRSSKTLKLTKMQKAGLCYYEDLADGVTKAEADAISLLVQDAVWTFDPDALVEITGGFRRGKPFGHDVDLLITSPGAEKEQEDQLLQKVTNLWKKQGLLLYGDLRESRFEDGKLPSRKIDALDHFQKCFAILKLYHHKVDKSKWEMPTGSNESEAKSWKAIRVDLVVCPYDRFAFALLGWTGSRMFERDLRRYATHEKKMMLDNHALYDLTKKIFLKAKSEEEIFAHLGLEYLEPSERNA

SEQ ID NO: 485 - DNA, 1587 bp, synthetic construct
  misc_feature 1..1587: note = Variant of terminal deoxynucleotidyltransferase
  source 1..1587: mol_type = other DNA
atgcaccatcatcatcatcatggcggtagcggcatgcaccgcattcgtaccatcgattcggacttcgggaagaaacgccagaagaagatggataaccacattagttccatgatctatgaaatcaaatttcacgagtttgtgctgttcattctcgaaaagaaaatgggtgcgacgcgtcgtacttttctgacagatttagcccgcaagaaagggttccgcgtcgagaatgaactgtcagacagcgttacccacatcgtggcagaaaataattcaggatctgacgtattggcttggctgaagacccacaagatggagaagacgacgcaatttgaactgctggatattagctggcttatcgaaagcatgaaagttggtaaaccggtggacaccaaggggaaataccagttgatggaatcgcgtgtcgatagtgcgaacccagatccgacagggggtaccctcaacattctgcctcctactacgaagaccatttctcagtatgcgtgtcaacgccgcaccaccctgaacaaccataatcaacgttttacggacgcactggaaattcttgcggaaaattacgagttcaaacgcaacgatgatacttgtctgacctttatgcgtgctatttccgtgctgaaatgccttccgtttgaggtagttagcctgaaagacacggaaggattgccctggatcggtgatgaagtcaaagggattatggaagaaatcatcgaggtcggtgaatcgctggaagtgcaggccgtgctcaatgatgagcgctatcaaagcttcaaactgtttaagagtgtctttggagtgggggtgaagacagcagacaaatggtaccgtatgggtctgcgcacgctcgaggatgttcgttccagcaagaccctgaagttgaccaagatgcagaaagcgggtctgtgctattatgaagatcttgctgatggcgttacgaaagccgaagctgacgcgatttctctgctggttcaggatgcagtctggactttcgacccggatgcgctggtggagattacgggtggatttcgtcgtgggaaaccttttggtcacgacgttgatctgcttatcacatctccgggagctgagaaagaacaagaagaccagctcctgcagaaagtgaccaatctgtggaagaaacaagggttgttgctgtacggtgatctgcgtgaaagtcgctttgaagatgggaaactcccatcccgcaagatcgatgccctggaccattttcagaaatgctttgctatcctcaaactttatcaccataaagtggacaaaagcaaatgggaaatgccgacgggttcgaacgaaagcgaggccaaaagttggaaagcaattcgcgtagatctggttgtttgtccctacgatcgttttgcgtttgcgttgttgggttggaccggaagccgcatgttcgaacgtgatctgcgccgctacgccacccacgagaagaagatgatgctggacaatcatgcgctgtatgacctgaccaagaaaatctttctcaaagctaaatcggaagaggaaattttcgcacatctggggcttgaatacctggaaccgtccgaacgtaacgca

SEQ ID NO: 486 - protein, 529 aa, synthetic construct
  REGION 1..529: note = Variant of terminal deoxynucleotidyltransferase
MHHHHHHGGSGMHRIRTIDSDFGKKRQKKMDNHISSMIYEIKFHEFVLFILEKKMGATRRTFLTDLARKKGFRVENELSDSVTHIVAENNSGSDVLAWLKTHKMEKTTQFELLDISWLIESMKVGKPVDTKGKYQLMESRVDSANPDPTGGTLNILPPTTKTISQYACQRRTTLNNHNQRFTDALEILAENYEFKRNDDTCLTFMRAISVLKCLPFEVVSLKDTEGLPWIGDEVKGIMEEIIEVGESLEVQAVLNDERYQSFKLFKSVFGVGVKTADKWYRMGLRTLEDVRSSKTLKLTKMQKAGLCYYEDLADGVTKAEADAISLLVQDAVWTFDPDALVEITGGFRRGKPFGHDVDLLITSPGAEKEQEDQLLQKVTNLWKKQGLLLYGDLRESRFEDGKLPSRKIDALDHFQKCFAILKLYHHKVDKSKWEMPTGSNESEAKSWKAIRVDLVVCPYDRFAFALLGWTGSRMFERDLRRYATHEKKMMLDNHALYDLTKKIFLKAKSEEEIFAHLGLEYLEPSERNA

SEQ ID NO: 487 - DNA, 1587 bp, synthetic construct
  misc_feature 1..1587: note = Variant of terminal deoxynucleotidyltransferase
  source 1..1587: mol_type = other DNA
atgcaccatcatcatcatcatggcggtagcggcatgcaccgcattcgtaccatcgattcggacttcgggaagaaacgccagaagaagatggataaccacattagttccatgatctatgaaatcaaatttcacgagtttgtgctgttcattctcgaaaagaaaatgggtgcgacgcgtcgtacttttctgacagatttagcccgcaagaaagggttccgcgtcgagaatgaactgtcagacagcgttacccacatcgtggcagaaaataattcaggatctgacgtattggcttggctgaagacccacaagatggagaagacgacgcaatttgaactgctggatattagctggcttatcgaaagcatgaaagttggtaaaccggtggacaccaaggggaaataccagttgatggaatcgggtgtcgatagtgcgaacccagatccgacagccggtaccctcaacattctgcctcctactacgaagaccatttctcagtatgcgtgtcaacgccgcaccaccctgaacaaccataatcaacgttttacggacgcactggaaattcttgcggaaaattacgagttcaaacgcaacgatgatacttgtctgacctttatgcgtgctatttccgtgctgaaatgccttccgtttgaggtagttagcctgaaagacacggaaggattgccctggatcggtgatgaagtcaaagggattatggaagaaatcatcgaggtcggtgaatcgctggaagtgcaggccgtgctcaatgatgagcgctatcaaagcttcaaactgtttaagagtgtctttggagtgggggtgaagacagcagacaaatggtaccgtatgggtctgcgcacgctcgaggatgttcgttccagcaagaccctgaagttgaccaagatgcagaaagcgggtctgtgctattatgaagatcttgctgatggcgttacgaaagccgaagctgacgcgatttctctgctggttcaggatgcagtctggactttcgacccggatgcgctggtggagattacgggtggatttcgtcgtgggaaaccttttggtcacgacgttgatctgcttatcacatctccgggagctgagaaagaacaagaagaccagctcctgcagaaagtgaccaatctgtggaagaaacaagggttgttgctgtacggtgatctgcgtgaaagtcgctttgaagatgggaaactcccatcccgcaagatcgatgccctggaccattttcagaaatgctttgctatcctcaaactttatcaccataaagtggacaaaagcaaatgggaaatgccgacgggttcgaacgaaagcgaggccaaaagttggaaagcaattcgcgtagatctggttgtttgtccctacgatcgttttgcgtttgcgttgttgggttggaccggaagccgcatgttcgaacgtgatctgcgccgctacgccacccacgagaagaagatgatgctggacaatcatgcgctgtatgacctgaccaagaaaatctttctcaaagctaaatcggaagaggaaattttcgcacatctggggcttgaatacctggaaccgtccgaacgtaacgca

SEQ ID NO: 488 - protein, 529 aa, synthetic construct
  REGION 1..529: note = Variant of terminal deoxynucleotidyltransferase
MHHHHHHGGSGMHRIRTIDSDFGKKRQKKMDNHISSMIYEIKFHEFVLFILEKKMGATRRTFLTDLARKKGFRVENELSDSVTHIVAENNSGSDVLAWLKTHKMEKTTQFELLDISWLIESMKVGKPVDTKGKYQLMESGVDSANPDPTAGTLNILPPTTKTISQYACQRRTTLNNHNQRFTDALEILAENYEFKRNDDTCLTFMRAISVLKCLPFEVVSLKDTEGLPWIGDEVKGIMEEIIEVGESLEVQAVLNDERYQSFKLFKSVFGVGVKTADKWYRMGLRTLEDVRSSKTLKLTKMQKAGLCYYEDLADGVTKAEADAISLLVQDAVWTFDPDALVEITGGFRRGKPFGHDVDLLITSPGAEKEQEDQLLQKVTNLWKKQGLLLYGDLRESRFEDGKLPSRKIDALDHFQKCFAILKLYHHKVDKSKWEMPTGSNESEAKSWKAIRVDLVVCPYDRFAFALLGWTGSRMFERDLRRYATHEKKMMLDNHALYDLTKKIFLKAKSEEEIFAHLGLEYLEPSERNA

SEQ ID NO: 489 - DNA, 1587 bp, synthetic construct
  misc_feature 1..1587: note = Variant of terminal deoxynucleotidyltransferase
  source 1..1587: mol_type = other DNA
atgcaccatcatcatcatcatggcggtagcggcatgcaccgcattcgtaccatcgattcggacttcgggaagaaagggcagaagaagatggataaccacattagttccatgatctatgaaatcaaatttcacgagtttgtgctgttcattctcgaaaagaaaatgggtgcgacgcgtcgtacttttctgacagatttagcccgcaagaaagggttccgcgtcgagaatgaactgtcagacagcgttacccacatcgtggcagaaaataattcaggatctgacgtattggcttggctgaagacccacaagatggagaagacgacgcaatttgaactgctggatattagctggcttatcgaaagcatgaaagttggtaaaccggtggacaccaaggggaaataccagttgatggaatcgcgtgtcgatagtgcgaacccagatccgacagccggtaccctcaacattctgcctcctactacgaagaccatttctcagtatgcgtgtcaacgccgcaccaccctgaacaaccataatcaacgttttacggacgcactggaaattcttgcggaaaattacgagttcaaacgcaacgatgatacttgtctgacctttatgcgtgctatttccgtgctgaaatgccttccgtttgaggtagttagcctgaaagacacggaaggattgccctggatcggtgatgaagtcaaagggattatggaagaaatcatcgaggtcggtgaatcgctggaagtgcaggccgtgctcaatgatgagcgctatcaaagcttcaaactgtttaagagtgtctttggagtgggggtgaagacagcagacaaatggtaccgtatgggtctgcgcacgctcgaggatgttcgttccagcaagaccctgaagttgaccaagatgcagaaagcgggtctgtgctattatgaagatcttgctgatggcgttacgaaagccgaagctgacgcgatttctctgctggttcaggatgcagtctggactttcgacccggatgcgctggtggagattacgggtggatttcgtcgtgggaaaccttttggtcacgacgttgatctgcttatcacatctccgggagctgagaaagaacaagaagaccagctcctgcagaaagtgaccaatctgtggaagaaacaagggttgttgctgtacggtgatctgcgtgaaagtcgctttgaagatgggaaactcccatcccgcaagatcgatgccctggaccattttcagaaatgctttgctatcctcaaactttatcaccataaagtggacaaaagcaaatgggaaatgccgacgggttcgaacgaaagcgaggccaaaagttggaaagcaattcgcgtagatctggttgtttgtccctacgatcgttttgcgtttgcgttgttgggttggaccggaagccgcatgttcgaacgtgatctgcgccgctacgccacccacgagaagaagatgatgctggacaatcatgcgctgtatgacctgaccaagaaaatctttctcaaagctaaatcggaagaggaaattttcgcacatctggggcttgaatacctggaaccgtccgaacgtaacgca

SEQ ID NO: 490 - protein, 529 aa, synthetic construct
  REGION 1..529: note = Variant of terminal deoxynucleotidyltransferase
MHHHHHHGGSGMHRIRTIDSDFGKKGQKKMDNHISSMIYEIKFHEFVLFILEKKMGATRRTFLTDLARKKGFRVENELSDSVTHIVAENNSGSDVLAWLKTHKMEKTTQFELLDISWLIESMKVGKPVDTKGKYQLMESRVDSANPDPTAGTLNILPPTTKTISQYACQRRTTLNNHNQRFTDALEILAENYEFKRNDDTCLTFMRAISVLKCLPFEVVSLKDTEGLPWIGDEVKGIMEEIIEVGESLEVQAVLNDERYQSFKLFKSVFGVGVKTADKWYRMGLRTLEDVRSSKTLKLTKMQKAGLCYYEDLADGVTKAEADAISLLVQDAVWTFDPDALVEITGGFRRGKPFGHDVDLLITSPGAEKEQEDQLLQKVTNLWKKQGLLLYGDLRESRFEDGKLPSRKIDALDHFQKCFAILKLYHHKVDKSKWEMPTGSNESEAKSWKAIRVDLVVCPYDRFAFALLGWTGSRMFERDLRRYATHEKKMMLDNHALYDLTKKIFLKAKSEEEIFAHLGLEYLEPSERNA

SEQ ID NO: 491 - DNA, 1587 bp, synthetic construct
  misc_feature 1..1587: note = Variant of terminal deoxynucleotidyltransferase
  source 1..1587: mol_type = other DNA
atgcaccatcatcatcatcatggcggtagcggcatgcaccgcattcgtaccatcgattcggacttcgggaagaaacgccagaagaagatggataaccacattagttccatgatctatgaaatcaaatttcacgagtttgtgctgttcattctcgaaaagaaaatgggtgcgacgcgtcgtacttttctgacagatttagcccgcaagaaagggttccgcgtcgagaatgaactgtcagacagcgttacccacatcgtggcagaaaataattcaggatctgacgtattggcttggctgaagacccacaagatggagaagacgacgcaatttgaactgctggatattagctggcttatcgaaagcatgaaagttggtaaaccggtggacaccaaggggaaataccagttgatggaatcgcgtgtcgatagtgcgaacccagatccgacagccggtaccctcaacattctgcctcctactacgaagaccctgtctcagtatgcgtgtcaacgccgcaccaccctgaacaaccataatcaacgttttacggacgcactggaaattcttgcggaaaattacgagttcaaacgcaacgatgatacttgtctgacctttatgcgtgctatttccgtgctgaaatgccttccgtttgaggtagttagcctgaaagacacggaaggattgccctggatcggtgatgaagtcaaagggattatggaagaaatcatcgaggtcggtgaatcgctggaagtgcaggccgtgctcaatgatgagcgctatcaaagcttcaaactgtttaagagtgtctttggagtgggggtgaagacagcagacaaatggtaccgtatgggtctgcgcacgctcgaggatgttcgttccagcaagaccctgaagttgaccaagatgcagaaagcgggtctgtgctattatgaagatcttgctgatggcgttacgaaagccgaagctgacgcgatttctctgctggttcaggatgcagtctggactttcgacccggatgcgctggtggagattacgggtggatttcgtcgtgggaaaccttttggtcacgacgttgatctgcttatcacatctccgggagctgagaaagaacaagaagaccagctcctgcagaaagtgaccaatctgtggaagaaacaagggttgttgctgtacggtgatctgcgtgaaagtcgctttgaagatgggaaactcccatcccgcaagatcgatgccctggaccattttcagaaatgctttgctatcctcaaactttatcaccataaagtggacaaaagcaaatgggaaatgccgacgggttcgaacgaaagcgaggccaaaagttggaaagcaattcgcgtagatctggttgtttgtccctacgatcgttttgcgtttgcgttgttgggttggaccggaagccgcatgttcgaacgtgatctgcgccgctacgccacccacgagaagaagatgatgctggacaatcatgcgctgtatgacctgaccaagaaaatctttctcaaagctaaatcggaagaggaaattttcgcacatctggggcttgaatacctggaaccgtccgaacgtaacgca

SEQ ID NO: 492 - protein, 529 aa, synthetic construct
  REGION 1..529: note = Variant of terminal deoxynucleotidyltransferase
MHHHHHHGGSGMHRIRTIDSDFGKKRQKKMDNHISSMIYEIKFHEFVLFILEKKMGATRRTFLTDLARKKGFRVENELSDSVTHIVAENNSGSDVLAWLKTHKMEKTTQFELLDISWLIESMKVGKPVDTKGKYQLMESRVDSANPDPTAGTLNILPPTTKTLSQYACQRRTTLNNHNQRFTDALEILAENYEFKRNDDTCLTFMRAISVLKCLPFEVVSLKDTEGLPWIGDEVKGIMEEIIEVGESLEVQAVLNDERYQSFKLFKSVFGVGVKTADKWYRMGLRTLEDVRSSKTLKLTKMQKAGLCYYEDLADGVTKAEADAISLLVQDAVWTFDPDALVEITGGFRRGKPFGHDVDLLITSPGAEKEQEDQLLQKVTNLWKKQGLLLYGDLRESRFEDGKLPSRKIDALDHFQKCFAILKLYHHKVDKSKWEMPTGSNESEAKSWKAIRVDLVVCPYDRFAFALLGWTGSRMFERDLRRYATHEKKMMLDNHALYDLTKKIFLKAKSEEEIFAHLGLEYLEPSERNA

SEQ ID NO: 493 - DNA, 1587 bp, synthetic construct
  misc_feature 1..1587: note = Variant of terminal deoxynucleotidyltransferase
  source 1..1587: mol_type = other DNA
atgcaccatcatcatcatcatggcggtagcggcatgcaccgcattcgtaccatcgattcggacttcgggaagaaacgccagaagaagatggataaccacattagttccatgatctatgaaatcaaatttcacgagtttgtgctgttcattctcgaaaagaaaatgggtgcgacgcgtcgtacttttctgacagatttagcccgcaagaaagggttccgcgtcgagaatgaactgtcagacagcgttacccacatcgtggcagaaaataattcaggatctgacgtattggcttggctgaagacccacaagatggagaagacgacgcaatttgaactgctggatattagctggcttatcgaaagcatgaaagttggtaaaccggtggacaccaaggggaaataccagttgatggaatcgcgtgtcgatagtgcgaacccagatccgacagccggtaccctcgggattctgcctcctactacgaagaccatttctcagtatgcgtgtcaacgccgcaccaccctgaacaaccataatcaacgttttacggacgcactggaaattcttgcggaaaattacgagttcaaacgcaacgatgatacttgtctgacctttatgcgtgctatttccgtgctgaaatgccttccgtttgaggtagttagcctgaaagacacggaaggattgccctggatcggtgatgaagtcaaagggattatggaagaaatcatcgaggtcggtgaatcgctggaagtgcaggccgtgctcaatgatgagcgctatcaaagcttcaaactgtttaagagtgtctttggagtgggggtgaagacagcagacaaatggtaccgtatgggtctgcgcacgctcgaggatgttcgttccagcaagaccctgaagttgaccaagatgcagaaagcgggtctgtgctattatgaagatcttgctgatggcgttacgaaagccgaagctgacgcgatttctctgctggttcaggatgcagtctggactttcgacccggatgcgctggtggagattacgggtggatttcgtcgtgggaaaccttttggtcacgacgttgatctgcttatcacatctccgggagctgagaaagaacaagaagaccagctcctgcagaaagtgaccaatctgtggaagaaacaagggttgttgctgtacggtgatctgcgtgaaagtcgctttgaagatgggaaactcccatcccgcaagatcgatgccctggaccattttcagaaatgctttgctatcctcaaactttatcaccataaagtggacaaaagcaaatgggaaatgccgacgggttcgaacgaaagcgaggccaaaagttggaaagcaattcgcgtagatctggttgtttgtccctacgatcgttttgcgtttgcgttgttgggttggaccggaagccgcatgttcgaacgtgatctgcgccgctacgccacccacgagaagaagatgatgctggacaatcatgcgctgtatgacctgaccaagaaaatctttctcaaagctaaatcggaagaggaaattttcgcacatctggggcttgaatacctggaaccgtccgaacgtaacgca

SEQ ID NO: 494 - protein, 529 aa, synthetic construct
  REGION 1..529: note = Variant of terminal deoxynucleotidyltransferase
MHHHHHHGGSGMHRIRTIDSDFGKKRQKKMDNHISSMIYEIKFHEFVLFILEKKMGATRRTFLTDLARKKGFRVENELSDSVTHIVAENNSGSDVLAWLKTHKMEKTTQFELLDISWLIESMKVGKPVDTKGKYQLMESRVDSANPDPTAGTLGILPPTTKTISQYACQRRTTLNNHNQRFTDALEILAENYEFKRNDDTCLTFMRAISVLKCLPFEVVSLKDTEGLPWIGDEVKGIMEEIIEVGESLEVQAVLNDERYQSFKLFKSVFGVGVKTADKWYRMGLRTLEDVRSSKTLKLTKMQKAGLCYYEDLADGVTKAEADAISLLVQDAVWTFDPDALVEITGGFRRGKPFGHDVDLLITSPGAEKEQEDQLLQKVTNLWKKQGLLLYGDLRESRFEDGKLPSRKIDALDHFQKCFAILKLYHHKVDKSKWEMPTGSNESEAKSWKAIRVDLVVCPYDRFAFALLGWTGSRMFERDLRRYATHEKKMMLDNHALYDLTKKIFLKAKSEEEIFAHLGLEYLEPSERNA

SEQ ID NO: 495 - DNA, 1587 bp, synthetic construct
  misc_feature 1..1587: note = Variant of terminal deoxynucleotidyltransferase
  source 1..1587: mol_type = other DNA
atgcaccatcatcatcatcatggcggtagcggcatggggcgcattcgtaccatcgattcggacttcgggaagaaacgccagaagaagatggataaccacattagttccatgatctatgaaatcaaatttcacgagtttgtgctgttcattctcgaaaagaaaatgggtgcgacgcgtcgtacttttctgacagatttagcccgcaagaaagggttccgcgtcgagaatgaactgtcagacagcgttacccacatcgtggcagaaaataattcaggatctgacgtattggcttggctgaagacccacaagatggagaagacgacgcaatttgaactgctggatattagctggcttatcgaaagcatgaaagttggtaaaccggtggacaccaaggggaaataccagttgatggaatcgcgtgtcgatagtgcgaacccagatccgacagccggtaccctcaacattctgcctcctactacgaagaccatttctcagtatgcgtgtcaacgccgcaccaccctgaacaaccataatcaacgttttacggacgcactggaaattcttgcggaaaattacgagttcaaacgcaacgatgatacttgtctgacctttatgcgtgctatttccgtgctgaaatgccttccgtttgaggtagttagcctgaaagacacggaaggattgccctggatcggtgatgaagtcaaagggattatggaagaaatcatcgaggtcggtgaatcgctggaagtgcaggccgtgctcaatgatgagcgctatcaaagcttcaaactgtttaagagtgtctttggagtgggggtgaagacagcagacaaatggtaccgtatgggtctgcgcacgctcgaggatgttcgttccagcaagaccctgaagttgaccaagatgcagaaagcgggtctgtgctattatgaagatcttgctgatggcgttacgaaagccgaagctgacgcgatttctctgctggttcaggatgcagtctggactttcgacccggatgcgctggtggagattacgggtggatttcgtcgtgggaaaccttttggtcacgacgttgatctgcttatcacatctccgggagctgagaaagaacaagaagaccagctcctgcagaaagtgaccaatctgtggaagaaacaagggttgttgctgtacggtgatctgcgtgaaagtcgctttgaagatgggaaactcccatcccgcaagatcgatgccctggaccattttcagaaatgctttgctatcctcaaactttatcaccataaagtggacaaaagcaaatgggaaatgccgacgggttcgaacgaaagcgaggccaaaagttggaaagcaattcgcgtagatctggttgtttgtccctacgatcgttttgcgtttgcgttgttgggttggaccggaagccgcatgttcgaacgtgatctgcgccgctacgccacccacgagaagaagatgatgctggacaatcatgcgctgtatgacctgaccaagaaaatctttctcaaagctaaatcggaagaggaaattttcgcacatctggggcttgaatacctggaaccgtccgaacgtaacgca

SEQ ID NO: 496 - protein, 529 aa, synthetic construct
  REGION 1..529: note = Variant of terminal deoxynucleotidyltransferase
MHHHHHHGGSGMGRIRTIDSDFGKKRQKKMDNHISSMIYEIKFHEFVLFILEKKMGATRRTFLTDLARKKGFRVENELSDSVTHIVAENNSGSDVLAWLKTHKMEKTTQFELLDISWLIESMKVGKPVDTKGKYQLMESRVDSANPDPTAGTLNILPPTTKTISQYACQRRTTLNNHNQRFTDALEILAENYEFKRNDDTCLTFMRAISVLKCLPFEVVSLKDTEGLPWIGDEVKGIMEEIIEVGESLEVQAVLNDERYQSFKLFKSVFGVGVKTADKWYRMGLRTLEDVRSSKTLKLTKMQKAGLCYYEDLADGVTKAEADAISLLVQDAVWTFDPDALVEITGGFRRGKPFGHDVDLLITSPGAEKEQEDQLLQKVTNLWKKQGLLLYGDLRESRFEDGKLPSRKIDALDHFQKCFAILKLYHHKVDKSKWEMPTGSNESEAKSWKAIRVDLVVCPYDRFAFALLGWTGSRMFERDLRRYATHEKKMMLDNHALYDLTKKIFLKAKSEEEIFAHLGLEYLEPSERNA

SEQ ID NO: 497 - DNA, 1587 bp, synthetic construct
  misc_feature 1..1587: note = Variant of terminal deoxynucleotidyltransferase
  source 1..1587: mol_type = other DNA
atgcaccatcatcatcatcatggcggtagcggcatgcaccgcattcgtaccatcgattcggacttcgggaagaaacgccagaagaagatggataaccacattagttccatgatctatgaaatcaaatttcacgagtttgtgctgttcattctcgaaaagaaaatgggtgcgacgcgtcgtacttttctgacagatttagcccgcaagaaagggttccgcgtcgagaatgaactgtcagacagcgttacccacatcgtggcagaaaataattcaggatctgacgtattggcttggctgaagacccacaagatggagaagacgacgcaatttgaactgctggatattagctggcttatcgaaagcatgaaagggggtaaaccggtggacaccaaggggaaataccagttgatggaatcgcgtgtcgatagtgcgaacccagatccgacagccggtaccctcaacattctgcctcctactacgaagaccatttctcagtatgcgtgtcaacgccgcaccaccctgaacaaccataatcaacgttttacggacgcactggaaattcttgcggaaaattacgagttcaaacgcaacgatgatacttgtctgacctttatgcgtgctatttccgtgctgaaatgccttccgtttgaggtagttagcctgaaagacacggaaggattgccctggatcggtgatgaagtcaaagggattatggaagaaatcatcgaggtcggtgaatcgctggaagtgcaggccgtgctcaatgatgagcgctatcaaagcttcaaactgtttaagagtgtctttggagtgggggtgaagacagcagacaaatggtaccgtatgggtctgcgcacgctcgaggatgttcgttccagcaagaccctgaagttgaccaagatgcagaaagcgggtctgtgctattatgaagatcttgctgatggcgttacgaaagccgaagctgacgcgatttctctgctggttcaggatgcagtctggactttcgacccggatgcgctggtggagattacgggtggatttcgtcgtgggaaaccttttggtcacgacgttgatctgcttatcacatctccgggagctgagaaagaacaagaagaccagctcctgcagaaagtgaccaatctgtggaagaaacaagggttgttgctgtacggtgatctgcgtgaaagtcgctttgaagatgggaaactcccatcccgcaagatcgatgccctggaccattttcagaaatgctttgctatcctcaaactttatcaccataaagtggacaaaagcaaatgggaaatgccgacgggttcgaacgaaagcgaggccaaaagttggaaagcaattcgcgtagatctggttgtttgtccctacgatcgttttgcgtttgcgttgttgggttggaccggaagccgcatgttcgaacgtgatctgcgccgctacgccacccacgagaagaagatgatgctggacaatcatgcgctgtatgacctgaccaagaaaatctttctcaaagctaaatcggaagaggaaattttcgcacatctggggcttgaatacctggaaccgtccgaacgtaacgca

SEQ ID NO: 498 - protein, 529 aa, synthetic construct
  REGION 1..529: note = Variant of terminal deoxynucleotidyltransferase
MHHHHHHGGSGMHRIRTIDSDFGKKRQKKMDNHISSMIYEIKFHEFVLFILEKKMGATRRTFLTDLARKKGFRVENELSDSVTHIVAENNSGSDVLAWLKTHKMEKTTQFELLDISWLIESMKGGKPVDTKGKYQLMESRVDSANPDPTAGTLNILPPTTKTISQYACQRRTTLNNHNQRFTDALEILAENYEFKRNDDTCLTFMRAISVLKCLPFEVVSLKDTEGLPWIGDEVKGIMEEIIEVGESLEVQAVLNDERYQSFKLFKSVFGVGVKTADKWYRMGLRTLEDVRSSKTLKLTKMQKAGLCYYEDLADGVTKAEADAISLLVQDAVWTFDPDALVEITGGFRRGKPFGHDVDLLITSPGAEKEQEDQLLQKVTNLWKKQGLLLYGDLRESRFEDGKLPSRKIDALDHFQKCFAILKLYHHKVDKSKWEMPTGSNESEAKSWKAIRVDLVVCPYDRFAFALLGWTGSRMFERDLRRYATHEKKMMLDNHALYDLTKKIFLKAKSEEEIFAHLGLEYLEPSERNA

SEQ ID NO: 499 - DNA, 1587 bp, synthetic construct
  misc_feature 1..1587: note = Variant of terminal deoxynucleotidyltransferase
  source 1..1587: mol_type = other DNA
atgcaccatcatcatcatcatggcggtagcggcatgcaccgcattcgtaccatcgattcggacttcgggaagaaacgccagaagaagatggataaccacattagttccatgatctatgaaatcaaatttcacgagtttgtgctgttcattctcgaaaagaaaatgggtgcgacgcgtcgtacttttctgacagatttagcccgcaagaaagggttccgcgtcgagaatgaactgtcagacagcgttacccacatcgtggcagaaaataattcaggatctgacgtattggcttggctgaaggtgcacaagatggagaagacgacgcaatttgaactgctggatattagctggcttatcgaaagcatgaaagttggtaaaccggtggacaccaaggggaaataccagttgatggaatcgcgtgtcgatagtgcgaacccagatccgacagccggtaccctcaacattctgcctcctactacgaagaccatttctcagtatgcgtgtcaacgccgcaccaccctgaacaaccataatcaacgttttacggacgcactggaaattcttgcggaaaattacgagttcaaacgcaacgatgatacttgtctgacctttatgcgtgctatttccgtgctgaaatgccttccgtttgaggtagttagcctgaaagacacggaaggattgccctggatcggtgatgaagtcaaagggattatggaagaaatcatcgaggtcggtgaatcgctggaagtgcaggccgtgctcaatgatgagcgctatcaaagcttcaaactgtttaagagtgtctttggagtgggggtgaagacagcagacaaatggtaccgtatgggtctgcgcacgctcgaggatgttcgttccagcaagaccctgaagttgaccaagatgcagaaagcgggtctgtgctattatgaagatcttgctgatggcgttacgaaagccgaagctgacgcgatttctctgctggttcaggatgcagtctggactttcgacccggatgcgctggtggagattacgggtggatttcgtcgtgggaaaccttttggtcacgacgttgatctgcttatcacatctccgggagctgagaaagaacaagaagaccagctcctgcagaaagtgaccaatctgtggaagaaacaagggttgttgctgtacggtgatctgcgtgaaagtcgctttgaagatgggaaactcccatcccgcaagatcgatgccctggaccattttcagaaatgctttgctatcctcaaactttatcaccataaagtggacaaaagcaaatgggaaatgccgacgggttcgaacgaaagcgaggccaaaagttggaaagcaattcgcgtagatctggttgtttgtccctacgatcgttttgcgtttgcgttgttgggttggaccggaagccgcatgttcgaacgtgatctgcgccgctacgccacccacgagaagaagatgatgctggacaatcatgcgctgtatgacctgaccaagaaaatctttctcaaagctaaatcggaagaggaaattttcgcacatctggggcttgaatacctggaaccgtccgaacgtaacgca

SEQ ID NO: 500 - protein, 529 aa, synthetic construct
  REGION 1..529: note = Variant of terminal deoxynucleotidyltransferase
MHHHHHHGGSGMHRIRTIDSDFGKKRQKKMDNHISSMIYEIKFHEFVLFILEKKMGATRRTFLTDLARKKGFRVENELSDSVTHIVAENNSGSDVLAWLKVHKMEKTTQFELLDISWLIESMKVGKPVDTKGKYQLMESRVDSANPDPTAGTLNILPPTTKTISQYACQRRTTLNNHNQRFTDALEILAENYEFKRNDDTCLTFMRAISVLKCLPFEVVSLKDTEGLPWIGDEVKGIMEEIIEVGESLEVQAVLNDERYQSFKLFKSVFGVGVKTADKWYRMGLRTLEDVRSSKTLKLTKMQKAGLCYYEDLADGVTKAEADAISLLVQDAVWTFDPDALVEITGGFRRGKPFGHDVDLLITSPGAEKEQEDQLLQKVTNLWKKQGLLLYGDLRESRFEDGKLPSRKIDALDHFQKCFAILKLYHHKVDKSKWEMPTGSNESEAKSWKAIRVDLVVCPYDRFAFALLGWTGSRMFERDLRRYATHEKKMMLDNHALYDLTKKIFLKAKSEEEIFAHLGLEYLEPSERNA

SEQ ID NO: 501 - DNA, 1587 bp, synthetic construct
  misc_feature 1..1587: note = Variant of terminal deoxynucleotidyltransferase
  source 1..1587: mol_type = other DNA
atgcaccatcatcatcattatggcggtagcggcatgcaccgcattcgtaccatcgattcggacttcgggaagaaacgccagaagaagatggataaccacattagttccatgatctatgaaatcaaatttcacgagtttgtgctgttcattctcgaaaagaaaatgggtgcgacgcgtcgtacttttctgacagatttagcccgcaagaaagggttccgcgtcgagaatgaactgtcagacagcgttacccacatcgtggcagaaaataattcaggatctgacgtattggcttggctgaagacccacaagatggagaagacgacgcaatttgaactgctggatattagctggcttatcgaaagcatgaaagttggtaaaccggtggacaccaaggggaaatactgtttgatggaatcgcgtgtcgatagtgcgaacccagatccgacagccggtaccctcaacattctgcctcctactacgaagaccatttctcagtatgcgtgtcaacgccgcaccaccctgaacaaccataatcaacgttttacggacgcactggaaattcttgcggaaaattacgagttcaaacgcaacgatgatacttgtctgacctttatgcgtgctatttccgtgctgaaatgccttccgtttgaggtagttagcctgaaagacacggaaggattgccctggatcggtgatgaagtcaaagggattatggaagaaatcatcgaggtcggtgaatcgctggaagtgcaggccgtgctcaatgatgagcgctatcaaagcttcaaactgtttaagagtgtctttggagtgggggtgaagacagcagacaaatggtaccgtatgggtctgcgcacgctcgaggatgttcgttccagcaagaccctgaagttgaccaagatgcagaaagcgggtctgtgctattatgaagatcttgctgatggcgttacgaaagccgaagctgacgcgatttctctgctggttcaggatgcagtctggactttcgacccggatgcgctggtggagattacgggtggatttcgtcgtgggaaaccttttggtcacgacgttgatctgcttatcacatctccgggagctgagaaagaacaagaagaccagctcctgcagaaagtgaccaatctgtggaagaaacaagggttgttgctgtacggtgatctgcgtgaaagtcgctttgaagatgggaaactcccatcccgcaagatcgatgccctggaccattttcagaaatgctttgctatcctcaaactttatcaccataaagtggacaaaagcaaatgggaaatgccgacgggttcgaacgaaagcgaggccaaaagttggaaagcaattcgcgtagatctggttgtttgtccctacgatcgttttgcgtttgcgttgttgggttggaccggaagccgcatgttcgaacgtgatctgcgccgctacgccacccacgagaagaagatgatgctggacaatcatgcgctgtatgacctgaccaagaaaatctttctcaaagctaaatcggaagaggaaattttcgcacatctggggcttgaatacctggaaccgtccgaacgtaacgca

SEQ ID NO: 502 - protein, 529 aa, synthetic construct
  REGION 1..529: note = Variant of terminal deoxynucleotidyltransferase
MHHHHHYGGSGMHRIRTIDSDFGKKRQKKMDNHISSMIYEIKFHEFVLFILEKKMGATRRTFLTDLARKKGFRVENELSDSVTHIVAENNSGSDVLAWLKTHKMEKTTQFELLDISWLIESMKVGKPVDTKGKYCLMESRVDSANPDPTAGTLNILPPTTKTISQYACQRRTTLNNHNQRFTDALEILAENYEFKRNDDTCLTFMRAISVLKCLPFEVVSLKDTEGLPWIGDEVKGIMEEIIEVGESLEVQAVLNDERYQSFKLFKSVFGVGVKTADKWYRMGLRTLEDVRSSKTLKLTKMQKAGLCYYEDLADGVTKAEADAISLLVQDAVWTFDPDALVEITGGFRRGKPFGHDVDLLITSPGAEKEQEDQLLQKVTNLWKKQGLLLYGDLRESRFEDGKLPSRKIDALDHFQKCFAILKLYHHKVDKSKWEMPTGSNESEAKSWKAIRVDLVVCPYDRFAFALLGWTGSRMFERDLRRYATHEKKMMLDNHALYDLTKKIFLKAKSEEEIFAHLGLEYLEPSERNA

SEQ ID NO: 503 - DNA, 1587 bp, synthetic construct
  misc_feature 1..1587: note = Variant of terminal deoxynucleotidyltransferase
  source 1..1587: mol_type = other DNA
atgcaccatcatcatcatcatggcggtagcggcatgcaccgcattcgtaccatcgattcggacttcgggaagaaacgccagaagattatggataaccacattagttccatgatctatgaaatcaaatttcacgagtttgtgctgttcattctcgaaaagaaaatgggtgcgacgcgtcgtacttttctgacagatttagcccgcaagaaagggttccgcgtcgagaatgaactgtcagacagcgttacccacatcgtggcagaaaataattcaggatctgacgtattggcttggctgaagacccacaagatggagaagacgacgcaatttgaactgctggatattagctggcttatcgaaagcatgaaagttggtaaaccggtggacaccaaggggaaataccagttgatggaatcgcgtgtcgatagtgcgaacccagatccgacagccggtaccctcaacattctgcctcctactacgaagaccatttctcagtatgcgtgtcaacgccgcaccaccctgaacaaccataatcaacgttttacggacgcactggaaattcttgcggaaaattacgagttcaaacgcaacgatgatacttgtctgacctttatgcgtgctatttccgtgctgaaatgccttccgtttgaggtagttagcctgaaagacacggaaggattgccctggatcggtgatgaagtcaaagggattatggaagaaatcatcgaggtcggtgaatcgctggaagtgcaggccgtgctcaatgatgagcgctatcaaagcttcaaactgtttaagagtgtctttggagtgggggtgaagacagcagacaaatggtaccgtatgggtctgcgcacgctcgaggatgttcgttccagcaagaccctgaagttgaccaagatgcagaaagcgggtctgtgctattatgaagatcttgctgatggcgttacgaaagccgaagctgacgcgatttctctgctggttcaggatgcagtctggactttcgacccggatgcgctggtggagattacgggtggatttcgtcgtgggaaaccttttggtcacgacgttgatctgcttatcacatctccgggagctgagaaagaacaagaagaccagctcctgcagaaagtgaccaatctgtggaagaaacaagggttgttgctgtacggtgatctgcgtgaaagtcgctttgaagatgggaaactcccatcccgcaagatcgatgccctggaccattttcagaaatgctttgctatcctcaaactttatcaccataaagtggacaaaagcaaatgggaaatgccgacgggttcgaacgaaagcgaggccaaaagttggaaagcaattcgcgtagatctggttgtttgtccctacgatcgttttgcgtttgcgttgttgggttggaccggaagccgcatgttcgaacgtgatctgcgccgctacgccacccacgagaagaagatgatgctggacaatcatgcgctgtatgacctgaccaagaaaatctttctcaaagctaaatcggaagaggaaattttcgcacatctggggcttgaatacctggaaccgtccgaacgtaacgca

SEQ ID NO: 504 - protein, 529 aa, synthetic construct
  REGION 1..529: note = Variant of terminal deoxynucleotidyltransferase
MHHHHHHGGSGMHRIRTIDSDFGKKRQKIMDNHISSMIYEIKFHEFVLFILEKKMGATRRTFLTDLARKKGFRVENELSDSVTHIVAENNSGSDVLAWLKTHKMEKTTQFELLDISWLIESMKVGKPVDTKGKYQLMESRVDSANPDPTAGTLNILPPTTKTISQYACQRRTTLNNHNQRFTDALEILAENYEFKRNDDTCLTFMRAISVLKCLPFEVVSLKDTEGLPWIGDEVKGIMEEIIEVGESLEVQAVLNDERYQSFKLFKSVFGVGVKTADKWYRMGLRTLEDVRSSKTLKLTKMQKAGLCYYEDLADGVTKAEADAISLLVQDAVWTFDPDALVEITGGFRRGKPFGHDVDLLITSPGAEKEQEDQLLQKVTNLWKKQGLLLYGDLRESRFEDGKLPSRKIDALDHFQKCFAILKLYHHKVDKSKWEMPTGSNESEAKSWKAIRVDLVVCPYDRFAFALLGWTGSRMFERDLRRYATHEKKMMLDNHALYDLTKKIFLKAKSEEEIFAHLGLEYLEPSERNA

SEQ ID NO: 505 - DNA, 1587 bp, synthetic construct
  misc_feature 1..1587: note = Variant of terminal deoxynucleotidyltransferase
  source 1..1587: mol_type = other DNA
atgcaccatcatcatcatcatggcggtagcggcatgcaccgcattgtgaccatcgattcggacttcgggaagaaacgccagaagaagatggataaccacattagttccatgatctatgaaatcaaatttcacgagtttgtgctgttcattctcgaaaagaaaatgggtgcgacgcgtcgtacttttctgacagatttagcccgcaagaaagggttccgcgtcgagaatgaactgtcagacagcgttacccacatcgtggcagaaaataattcaggatctgacgtattggcttggctgaagacccacaagatggagaagacgacgcaatttgaactgctggatattagctggcttatcgaaagcatgaaagttggtaaaccggtggacaccaaggggaaataccagttgatggaatcgcgtgtcgatagtgcgaacccagatccgacagccggtaccctcaacattctgcctcctactacgaagaccatttctcagtatgcgtgtcaacgccgcaccaccctgaacaaccataatcaacgttttacggacgcactggaaattcttgcggaaaattacgagttcaaacgcaacgatgatacttgtctgacctttatgcgtgctatttccgtgctgaaatgccttccgtttgaggtagttagcctgaaagacacggaaggattgccctggatcggtgatgaagtcaaagggattatggaagaaatcatcgaggtcggtgaatcgctggaagtgcaggccgtgctcaatgatgagcgctatcaaagcttcaaactgtttaagagtgtctttggagtgggggtgaagacagcagacaaatggtaccgtatgggtctgcgcacgctcgaggatgttcgttccagcaagaccctgaagttgaccaagatgcagaaagcgggtctgtgctattatgaagatcttgctgatggcgttacgaaagccgaagctgacgcgatttctctgctggttcaggatgcagtctggactttcgacccggatgcgctggtggagattacgggtggatttcgtcgtgggaaaccttttggtcacgacgttgatctgcttatcacatctccgggagctgagaaagaacaagaagaccagctcctgcagaaagtgaccaatctgtggaagaaacaagggttgttgctgtacggtgatctgcgtgaaagtcgctttgaagatgggaaactcccatcccgcaagatcgatgccctggaccattttcagaaatgctttgctatcctcaaactttatcaccataaagtggacaaaagcaaatgggaaatgccgacgggttcgaacgaaagcgaggccaaaagttggaaagcaattcgcgtagatctggttgtttgtccctacgatcgttttgcgtttgcgttgttgggttggaccggaagccgcatgttcgaacgtgatctgcgccgctacgccacccacgagaagaagatgatgctggacaatcatgcgctgtatgacctgaccaagaaaatctttctcaaagctaaatcggaagaggaaattttcgcacatctggggcttgaatacctggaaccgtccgaacgtaacgca

SEQ ID NO: 506 - protein, 529 aa, synthetic construct
  REGION 1..529: note = Variant of terminal deoxynucleotidyltransferase
MHHHHHHGGSGMHRIVTIDSDFGKKRQKKMDNHISSMIYEIKFHEFVLFILEKKMGATRRTFLTDLARKKGFRVENELSDSVTHIVAENNSGSDVLAWLKTHKMEKTTQFELLDISWLIESMKVGKPVDTKGKYQLMESRVDSANPDPTAGTLNILPPTTKTISQYACQRRTTLNNHNQRFTDALEILAENYEFKRNDDTCLTFMRAISVLKCLPFEVVSLKDTEGLPWIGDEVKGIMEEIIEVGESLEVQAVLNDERYQSFKLFKSVFGVGVKTADKWYRMGLRTLEDVRSSKTLKLTKMQKAGLCYYEDLADGVTKAEADAISLLVQDAVWTFDPDALVEITGGFRRGKPFGHDVDLLITSPGAEKEQEDQLLQKVTNLWKKQGLLLYGDLRESRFEDGKLPSRKIDALDHFQKCFAILKLYHHKVDKSKWEMPTGSNESEAKSWKAIRVDLVVCPYDRFAFALLGWTGSRMFERDLRRYATHEKKMMLDNHALYDLTKKIFLKAKSEEEIFAHLGLEYLEPSERNA

SEQ ID NO: 507 - DNA, 1587 bp, synthetic construct
  misc_feature 1..1587: note = Variant of terminal deoxynucleotidyltransferase
  source 1..1587: mol_type = other DNA
atgcaccatcatcatcatcatggcggtagcggcatgcaccgcattcgtaccatcgattcggacttcgggaagaaacgccagaagaagatggataaccacattagttccatgatctatgaaatcaaatttcacgagtttgtgctgttcattctcgaaaagaaaatgggtgcgacgcgtcgtacttttctgacagatttagcccgcaagaaagggttccgcgtcgagaatgaactgtcagacagcgttacccacatcgtggcagaaaataattcaggatctgacgtattggcttggctgaagacccacaagatggagaagacgacgatgtttgaactgctggatattagctggcttatcgaaagcatgaaagttggtaaaccggtggacaccaaggggaaataccagttgatggaatcgcgtgtcgatagtgcgaacccagatccgacagccggtaccctcaacattctgcctcctactacgaagaccatttctcagtatgcgtgtcaacgccgcaccaccctgaacaaccataatcaacgttttacggacgcactggaaattcttgcggaaaattacgagttcaaacgcaacgatgatacttgtctgacctttatgcgtgctatttccgtgctgaaatgccttccgtttgaggtagttagcctgaaagacacggaaggattgccctggatcggtgatgaagtcaaagggattatggaagaaatcatcgaggtcggtgaatcgctggaagtgcaggccgtgctcaatgatgagcgctatcaaagcttcaaactgtttaagagtgtctttggagtgggggtgaagacagcagacaaatggtaccgtatgggtctgcgcacgctcgaggatgttcgttccagcaagaccctgaagttgaccaagatgcagaaagcgggtctgtgctattatgaagatcttgctgatggcgttacgaaagccgaagctgacgcgatttctctgctggttcaggatgcagtctggactttcgacccggatgcgctggtggagattacgggtggatttcgtcgtgggaaaccttttggtcacgacgttgatctgcttatcacatctccgggagctgagaaagaacaagaagaccagctcctgcagaaagtgaccaatctgtggaagaaacaagggttgttgctgtacggtgatctgcgtgaaagtcgctttgaagatgggaaactcccatcccgcaagatcgatgccctggaccattttcagaaatgctttgctatcctcaaactttatcaccataaagtggacaaaagcaaatgggaaatgccgacgggttcgaacgaaagcgaggccaaaagttggaaagcaattcgcgtagatctggttgtttgtccctacgatcgttttgcgtttgcgttgttgggttggaccggaagccgcatgttcgaacgtgatctgcgccgctacgccacccacgagaagaagatgatgctggacaatcatgcgctgtatgacctgaccaagaaaatctttctcaaagctaaatcggaagaggaaattttcgcacatctggggcttgaatacctggaaccgtccgaacgtaacgca

SEQ ID NO: 508 - protein, 529 aa, synthetic construct
  REGION 1..529: note = Variant of terminal deoxynucleotidyltransferase
MHHHHHHGGSGMHRIRTIDSDFGKKRQKKMDNHISSMIYEIKFHEFVLFILEKKMGATRRTFLTDLARKKGFRVENELSDSVTHIVAENNSGSDVLAWLKTHKMEKTTMFELLDISWLIESMKVGKPVDTKGKYQLMESRVDSANPDPTAGTLNILPPTTKTISQYACQRRTTLNNHNQRFTDALEILAENYEFKRNDDTCLTFMRAISVLKCLPFEVVSLKDTEGLPWIGDEVKGIMEEIIEVGESLEVQAVLNDERYQSFKLFKSVFGVGVKTADKWYRMGLRTLEDVRSSKTLKLTKMQKAGLCYYEDLADGVTKAEADAISLLVQDAVWTFDPDALVEITGGFRRGKPFGHDVDLLITSPGAEKEQEDQLLQKVTNLWKKQGLLLYGDLRESRFEDGKLPSRKIDALDHFQKCFAILKLYHHKVDKSKWEMPTGSNESEAKSWKAIRVDLVVCPYDRFAFALLGWTGSRMFERDLRRYATHEKKMMLDNHALYDLTKKIFLKAKSEEEIFAHLGLEYLEPSERNA

SEQ ID NO: 509 - DNA, 1587 bp, synthetic construct
  misc_feature 1..1587: note = Variant of terminal deoxynucleotidyltransferase
  source 1..1587: mol_type = other DNA
atgcaccatcatcatcatcatggcggtagcggcatgcaccgcattcgtaccatcgattcggacttcgggaagaaacgccagaagaagatggataaccacattagttccatgatctatgaaatcaaatttcacgagtttgtgctgttcattctcgaaaagaaaatgggtgcgacgcgtcgtacttttctgacagatttagcccgcaagaaagggttccgcgtcgagaatgaactgtcagacagcgttacccacgtggtggcagaaaataattcaggatctgacgtattggcttggctgaagacccacaagatggagaagacgacgcaatttgaactgctggatattagctggcttatcgaaagcatgaaagttggtaaaccggtggacaccaaggggaaataccagttgatggaatcgcgtgtcgatagtgcgaacccagatccgacagccggtaccctcaacattctgcctcctactacgaagaccatttctcagtatgcgtgtcaacgccgcaccaccctgaacaaccataatcaacgttttacggacgcactggaaattcttgcggaaaattacgagttcaaacgcaacgatgatacttgtctgacctttatgcgtgctatttccgtgctgaaatgccttccgtttgaggtagttagcctgaaagacacggaaggattgccctggatcggtgatgaagtcaaagggattatggaagaaatcatcgaggtcggtgaatcgctggaagtgcaggccgtgctcaatgatgagcgctatcaaagcttcaaactgtttaagagtgtctttggagtgggggtgaagacagcagacaaatggtaccgtatgggtctgcgcacgctcgaggatgttcgttccagcaagaccctgaagttgaccaagatgcagaaagcgggtctgtgctattatgaagatcttgctgatggcgttacgaaagccgaagctgacgcgatttctctgctggttcaggatgcagtctggactttcgacccggatgcgctggtggagattacgggtggatttcgtcgtgggaaaccttttggtcacgacgttgatctgcttatcacatctccgggagctgagaaagaacaagaagaccagctcctgcagaaagtgaccaatctgtggaagaaacaagggttgttgctgtacggtgatctgcgtgaaagtcgctttgaagatgggaaactcccatcccgcaagatcgatgccctggaccattttcagaaatgctttgctatcctcaaactttatcaccataaagtggacaaaagcaaatgggaaatgccgacgggttcgaacgaaagcgaggccaaaagttggaaagcaattcgcgtagatctggttgtttgtccctacgatcgttttgcgtttgcgttgttgggttggaccggaagccgcatgttcgaacgtgatctgcgccgctacgccacccacgagaagaagatgatgctggacaatcatgcgctgtatgacctgaccaagaaaatctttctcaaagctaaatcggaagaggaaattttcgcacatctggggcttgaatacctggaaccgtccgaacgtaacgca

SEQ ID NO: 510 - protein, 529 aa, synthetic construct
  REGION 1..529: note = Variant of terminal deoxynucleotidyltransferase
MHHHHHHGGSGMHRIRTIDSDFGKKRQKKMDNHISSMIYEIKFHEFVLFILEKKMGATRRTFLTDLARKKGFRVENELSDSVTHVVAENNSGSDVLAWLKTHKMEKTTQFELLDISWLIESMKVGKPVDTKGKYQLMESRVDSANPDPTAGTLNILPPTTKTISQYACQRRTTLNNHNQRFTDALEILAENYEFKRNDDTCLTFMRAISVLKCLPFEVVSLKDTEGLPWIGDEVKGIMEEIIEVGESLEVQAVLNDERYQSFKLFKSVFGVGVKTADKWYRMGLRTLEDVRSSKTLKLTKMQKAGLCYYEDLADGVTKAEADAISLLVQDAVWTFDPDALVEITGGFRRGKPFGHDVDLLITSPGAEKEQEDQLLQKVTNLWKKQGLLLYGDLRESRFEDGKLPSRKIDALDHFQKCFAILKLYHHKVDKSKWEMPTGSNESEAKSWKAIRVDLVVCPYDRFAFALLGWTGSRMFERDLRRYATHEKKMMLDNHALYDLTKKIFLKAKSEEEIFAHLGLEYLEPSERNA

SEQ ID NO: 511 - DNA, 1587 bp, synthetic construct
  misc_feature 1..1587: note = Variant of terminal deoxynucleotidyltransferase
  source 1..1587: mol_type = other DNA
atgcaccatcatcatcatcatggcggtagcggcatgcaccgcattcgtaccatcgattcggacttcggggcgaaacgccagaagaagatggataaccacattagttccatgatctatgaaatcaaatttcacgagtttgtgctgttcattctcgaaaagaaaatgggtgcgacgcgtcgtacttttctgacagatttagcccgcaagaaagggttccgcgtcgagaatgaactgtcagacagcgttacccacatcgtggcagaaaataattcaggatctgacgtattggcttggctgaagacccacaagatggagaagacgacgcaatttgaactgctggatattagctggcttatcgaaagcatgaaagttggtaaaccggtggacaccaaggggaaataccagttgatggaatcgcgtgtcgatagtgcgaacccagatccgacagccggtaccctcaacattctgcctcctactacgaagaccatttctcagtatgcgtgtcaacgccgcaccaccctgaacaaccataatcaacgttttacggacgcactggaaattcttgcggaaaattacgagttcaaacgcaacgatgatacttgtctgacctttatgcgtgctatttccgtgctgaaatgccttccgtttgaggtagttagcctgaaagacacggaaggattgccctggatcggtgatgaagtcaaagggattatggaagaaatcatcgaggtcggtgaatcgctggaagtgcaggccgtgctcaatgatgagcgctatcaaagcttcaaactgtttaagagtgtctttggagtgggggtgaagacagcagacaaatggtaccgtatgggtctgcgcacgctcgaggatgttcgttccagcaagaccctgaagttgaccaagatgcagaaagcgggtctgtgctattatgaagatcttgctgatggcgttacgaaagccgaagctgacgcgatttctctgctggttcaggatgcagtctggactttcgacccggatgcgctggtggagattacgggtggatttcgtcgtgggaaaccttttggtcacgacgttgatctgcttatcacatctccgggagctgagaaagaacaagaagaccagctcctgcagaaagtgaccaatctgtggaagaaacaagggttgttgctgtacggtgatctgcgtgaaagtcgctttgaagatgggaaactcccatcccgcaagatcgatgccctggaccattttcagaaatgctttgctatcctcaaactttatcaccataaagtggacaaaagcaaatgggaaatgccgacgggttcgaacgaaagcgaggccaaaagttggaaagcaattcgcgtagatctggttgtttgtccctacgatcgttttgcgtttgcgttgttgggttggaccggaagccgcatgttcgaacgtgatctgcgccgctacgccacccacgagaagaagatgatgctggacaatcatgcgctgtatgacctgaccaagaaaatctttctcaaagctaaatcggaagaggaaattttcgcacatctggggcttgaatacctggaaccgtccgaacgtaacgca

SEQ ID NO: 512 - protein, 529 aa, synthetic construct
  REGION 1..529: note = Variant of terminal deoxynucleotidyltransferase
MHHHHHHGGSGMHRIRTIDSDFGAKRQKKMDNHISSMIYEIKFHEFVLFILEKKMGATRRTFLTDLARKKGFRVENELSDSVTHIVAENNSGSDVLAWLKTHKMEKTTQFELLDISWLIESMKVGKPVDTKGKYQLMESRVDSANPDPTAGTLNILPPTTKTISQYACQRRTTLNNHNQRFTDALEILAENYEFKRNDDTCLTFMRAISVLKCLPFEVVSLKDTEGLPWIGDEVKGIMEEIIEVGESLEVQAVLNDERYQSFKLFKSVFGVGVKTADKWYRMGLRTLEDVRSSKTLKLTKMQKAGLCYYEDLADGVTKAEADAISLLVQDAVWTFDPDALVEITGGFRRGKPFGHDVDLLITSPGAEKEQEDQLLQKVTNLWKKQGLLLYGDLRESRFEDGKLPSRKIDALDHFQKCFAILKLYHHKVDKSKWEMPTGSNESEAKSWKAIRVDLVVCPYDRFAFALLGWTGSRMFERDLRRYATHEKKMMLDNHALYDLTKKIFLKAKSEEEIFAHLGLEYLEPSERNA

SEQ ID NO: 513 - DNA, 1587 bp, synthetic construct
  misc_feature 1..1587: note = Variant of terminal deoxynucleotidyltransferase
  source 1..1587: mol_type = other DNA
atgcaccatcatcatcatcatggcggtagcggcatgcaccgcattcgtaccatcgattcggacttcgggaagaaacgccagaagaagatggataaccacattagttccatgatctatgaaatcaaatttcacgagtttgtgctgttcattctcgaaaagaaaatgggtgcgacgcgtcgtacttttctgacagatttagcccgcaagaaagggttccgcgtcgagaatgaactgtcagacagcgttacccacatcgtggcagaaaataattcaggatctgacgtattggcttggctgaagacccacaagatggagaagacgacgcaatttgaactgctggatattagctggcttatcgaaagcatgaaagttggtaaaccggtggacacctgggggaaataccagttgatggaatcgcgtgtcgatagtgcgaacccagatccgacagccggtaccctcaacattctgcctcctactacgaagaccatttctcagtatgcgtgtcaacgccgcaccaccctgaacaaccataatcaacgttttacggacgcactggaaattcttgcggaaaattacgagttcaaacgcaacgatgatacttgtctgacctttatgcgtgctatttccgtgctgaaatgccttccgtttgaggtagttagcctgaaagacacggaaggattgccctggatcggtgatgaagtcaaagggattatggaagaaatcatcgaggtcggtgaatcgctggaagtgcaggccgtgctcaatgatgagcgctatcaaagcttcaaactgtttaagagtgtctttggagtgggggtgaagacagcagacaaatggtaccgtatgggtctgcgcacgctcgaggatgttcgttccagcaagaccctgaagttgaccaagatgcagaaagcgggtctgtgctattatgaagatcttgctgatggcgttacgaaagccgaagctgacgcgatttctctgctggttcaggatgcagtctggactttcgacccggatgcgctggtggagattacgggtggatttcgtcgtgggaaaccttttggtcacgacgttgatctgcttatcacatctccgggagctgagaaagaacaagaagaccagctcctgcagaaagtgaccaatctgtggaagaaacaagggttgttgctgtacggtgatctgcgtgaaagtcgctttgaagatgggaaactcccatcccgcaagatcgatgccctggaccattttcagaaatgctttgctatcctcaaactttatcaccataaagtggacaaaagcaaatgggaaatgccgacgggttcgaacgaaagcgaggccaaaagttggaaagcaattcgcgtagatctggttgtttgtccctacgatcgttttgcgtttgcgttgttgggttggaccggaagccgcatgttcgaacgtgatctgcgccgctacgccacccacgagaagaagatgatgctggacaatcatgcgctgtatgacctgaccaagaaaatctttctcaaagctaaatcggaagaggaaattttcgcacatctggggcttgaatacctggaaccgtccgaacgtaacgca

SEQ ID NO: 514 - protein, 529 aa, synthetic construct
  REGION 1..529: note = Variant of terminal deoxynucleotidyltransferase
MHHHHHHGGSGMHRIRTIDSDFGKKRQKKMDNHISSMIYEIKFHEFVLFILEKKMGATRRTFLTDLARKKGFRVENELSDSVTHIVAENNSGSDVLAWLKTHKMEKTTQFELLDISWLIESMKVGKPVDTWGKYQLMESRVDSANPDPTAGTLNILPPTTKTISQYACQRRTTLNNHNQRFTDALEILAENYEFKRNDDTCLTFMRAISVLKCLPFEVVSLKDTEGLPWIGDEVKGIMEEIIEVGESLEVQAVLNDERYQSFKLFKSVFGVGVKTADKWYRMGLRTLEDVRSSKTLKLTKMQKAGLCYYEDLADGVTKAEADAISLLVQDAVWTFDPDALVEITGGFRRGKPFGHDVDLLITSPGAEKEQEDQLLQKVTNLWKKQGLLLYGDLRESRFEDGKLPSRKIDALDHFQKCFAILKLYHHKVDKSKWEMPTGSNESEAKSWKAIRVDLVVCPYDRFAFALLGWTGSRMFERDLRRYATHEKKMMLDNHALYDLTKKIFLKAKSEEEIFAHLGLEYLEPSERNA

SEQ ID NO: 515 - DNA, 1587 bp, synthetic construct
  misc_feature 1..1587: note = Variant of terminal deoxynucleotidyltransferase
  source 1..1587: mol_type = other DNA
atgcaccatcatcatcatcatggcggtagcggcatgcaccgcattcgtaccatcgattcggacttcgggaagaaacgccagaagaagatggataaccacattagttccatgatctatgaaatcaaatttcacgagtttgtgctgttcattctcgaaaagaaaatgggtgcgacgcgtcgtacttttctgacagatttagcccgcaagaaagggttccgcgtcgagaatgaactgtcagacagcgttacccacatcgtggcagaaaataattcaggatctgacgtattggcttggctgaagacccacaagatggagaagacgacgcaatttgaactgctggatattagctggcttatcgaaagcatgaaagttggtaaaccggtggacaccaaggggaaatacgagttgatggaatcgcgtgtcgatagtgcgaacccagatccgacagccggtaccctcaacattctgcctcctactacgaagaccatttctcagtatgcgtgtcaacgccgcaccaccctgaacaaccataatcaacgttttacggacgcactggaaattcttgcggaaaattacgagttcaaacgcaacgatgatacttgtctgacctttatgcgtgctatttccgtgctgaaatgccttccgtttgaggtagttagcctgaaagacacggaaggattgccctggatcggtgatgaagtcaaagggattatggaagaaatcatcgaggtcggtgaatcgctggaagtgcaggccgtgctcaatgatgagcgctatcaaagcttcaaactgtttaagagtgtctttggagtgggggtgaagacagcagacaaatggtaccgtatgggtctgcgcacgctcgaggatgttcgttccagcaagaccctgaagttgaccaagatgcagaaagcgggtctgtgctattatgaagatcttgctgatggcgttacgaaagccgaagctgacgcgatttctctgctggttcaggatgcagtctggactttcgacccggatgcgctggtggagattacgggtggatttcgtcgtgggaaaccttttggtcacgacgttgatctgcttatcacatctccgggagctgagaaagaacaagaagaccagctcctgcagaaagtgaccaatctgtggaagaaacaagggttgttgctgtacggtgatctgcgtgaaagtcgctttgaagatgggaaactcccatcccgcaagatcgatgccctggaccattttcagaaatgctttgctatcctcaaactttatcaccataaagtggacaaaagcaaatgggaaatgccgacgggttcgaacgaaagcgaggccaaaagttggaaagcaattcgcgtagatctggttgtttgtccctacgatcgttttgcgtttgcgttgttgggttggaccggaagccgcatgttcgaacgtgatctgcgccgctacgccacccacgagaagaagatgatgctggacaatcatgcgctgtatgacctgaccaagaaaatctttctcaaagctaaatcggaagaggaaattttcgcacatctggggcttgaatacctggaaccgtccgaacgtaacgca

SEQ ID NO: 516 - protein, 529 aa, synthetic construct
  REGION 1..529: note = Variant of terminal deoxynucleotidyltransferase
MHHHHHHGGSGMHRIRTIDSDFGKKRQKKMDNHISSMIYEIKFHEFVLFILEKKMGATRRTFLTDLARKKGFRVENELSDSVTHIVAENNSGSDVLAWLKTHKMEKTTQFELLDISWLIESMKVGKPVDTKGKYELMESRVDSANPDPTAGTLNILPPTTKTISQYACQRRTTLNNHNQRFTDALEILAENYEFKRNDDTCLTFMRAISVLKCLPFEVVSLKDTEGLPWIGDEVKGIMEEIIEVGESLEVQAVLNDERYQSFKLFKSVFGVGVKTADKWYRMGLRTLEDVRSSKTLKLTKMQKAGLCYYEDLADGVTKAEADAISLLVQDAVWTFDPDALVEITGGFRRGKPFGHDVDLLITSPGAEKEQEDQLLQKVTNLWKKQGLLLYGDLRESRFEDGKLPSRKIDALDHFQKCFAILKLYHHKVDKSKWEMPTGSNESEAKSWKAIRVDLVVCPYDRFAFALLGWTGSRMFERDLRRYATHEKKMMLDNHALYDLTKKIFLKAKSEEEIFAHLGLEYLEPSERNA

SEQ ID NO: 517 - DNA, 1587 bp, synthetic construct
  misc_feature 1..1587: note = Variant of terminal deoxynucleotidyltransferase
  source 1..1587: mol_type = other DNA
atgcaccatcatcatcatcatggcggtagcggcatgcaccgcattcgtaccatcgattcggacttcgggaagaaacgccagaagaagatggataaccacattagttccatgatctatgaaatcaaatttcacgagtttgtgctgttcattctcgaaaagaaaatgggtgcgacgcgtcgtacttttctgacagatttagcccgcaagaaagggttccgcgtcgagaatgaactgtcagacagcgttacccacatcgtggcagaaaataattcaggatctgacgtattggcttggctgaagacccacaagatggagaagacgacgcaagtggaactgctggatattagctggcttatcgaaagcatgaaagttggtaaaccggtggacaccaaggggaaataccagttgatggaatcgcgtgtcgatagtgcgaacccagatccgacagccggtaccctcaacattctgcctcctactacgaagaccatttctcagtatgcgtgtcaacgccgcaccaccctgaacaaccataatcaacgttttacggacgcactggaaattcttgcggaaaattacgagttcaaacgcaacgatgatacttgtctgacctttatgcgtgctatttccgtgctgaaatgccttccgtttgaggtagttagcctgaaagacacggaaggattgccctggatcggtgatgaagtcaaagggattatggaagaaatcatcgaggtcggtgaatcgctggaagtgcaggccgtgctcaatgatgagcgctatcaaagcttcaaactgtttaagagtgtctttggagtgggggtgaagacagcagacaaatggtaccgtatgggtctgcgcacgctcgaggatgttcgttccagcaagaccctgaagttgaccaagatgcagaaagcgggtctgtgctattatgaagatcttgctgatggcgttacgaaagccgaagctgacgcgatttctctgctggttcaggatgcagtctggactttcgacccggatgcgctggtggagattacgggtggatttcgtcgtgggaaaccttttggtcacgacgttgatctgcttatcacatctccgggagctgagaaagaacaagaagaccagctcctgcagaaagtgaccaatctgtggaagaaacaagggttgttgctgtacggtgatctgcgtgaaagtcgctttgaagatgggaaactcccatcccgcaagatcgatgccctggaccattttcagaaatgctttgctatcctcaaactttatcaccataaagtggacaaaagcaaatgggaaatgccgacgggttcgaacgaaagcgaggccaaaagttggaaagcaattcgcgtagatctggttgtttgtccctacgatcgttttgcgtttgcgttgttgggttggaccggaagccgcatgttcgaacgtgatctgcgccgctacgccacccacgagaagaagatgatgctggacaatcatgcgctgtatgacctgaccaagaaaatctttctcaaagctaaatcggaagaggaaattttcgcacatctggggcttgaatacctggaaccgtccgaacgtaacgca

SEQ ID NO: 518 - protein, 529 aa, synthetic construct
  REGION 1..529: note = Variant of terminal deoxynucleotidyltransferase
MHHHHHHGGSGMHRIRTIDSDFGKKRQKKMDNHISSMIYEIKFHEFVLFILEKKMGATRRTFLTDLARKKGFRVENELSDSVTHIVAENNSGSDVLAWLKTHKMEKTTQVELLDISWLIESMKVGKPVDTKGKYQLMESRVDSANPDPTAGTLNILPPTTKTISQYACQRRTTLNNHNQRFTDALEILAENYEFKRNDDTCLTFMRAISVLKCLPFEVVSLKDTEGLPWIGDEVKGIMEEIIEVGESLEVQAVLNDERYQSFKLFKSVFGVGVKTADKWYRMGLRTLEDVRSSKTLKLTKMQKAGLCYYEDLADGVTKAEADAISLLVQDAVWTFDPDALVEITGGFRRGKPFGHDVDLLITSPGAEKEQEDQLLQKVTNLWKKQGLLLYGDLRESRFEDGKLPSRKIDALDHFQKCFAILKLYHHKVDKSKWEMPTGSNESEAKSWKAIRVDLVVCPYDRFAFALLGWTGSRMFERDLRRYATHEKKMMLDNHALYDLTKKIFLKAKSEEEIFAHLGLEYLEPSERNA

SEQ ID NO: 519 - DNA, 1587 bp, synthetic construct
  misc_feature 1..1587: note = Variant of terminal deoxynucleotidyltransferase
  source 1..1587: mol_type = other DNA
atgcaccatcatcatcatcatggcggtagcggcatgcactatattcgtaccatcgattcggacttcgggaagaaacgccagaagaagatggataaccacattagttccatgatctatgaaatcaaatttcacgagtttgtgctgttcattctcgaaaagaaaatgggtgcgacgcgtcgtacttttctgacagatttagcccgcaagaaagggttccgcgtcgagaatgaactgtcagacagcgttacccacatcgtggcagaaaataattcaggatctgacgtattggcttggctgaagacccacaagatggagaagacgacgcaatttgaactgctggatattagctggcttatcgaaagcatgaaagttggtaaaccggtggacaccaaggggaaataccagttgatggaatcgcgtgtcgatagtgcgaacccagatccgacagccggtaccctcaacattctgcctcctactacgaagaccatttctcagtatgcgtgtcaacgccgcaccaccctgaacaaccataatcaacgttttacggacgcactggaaattcttgcggaaaattacgagttcaaacgcaacgatgatacttgtctgacctttatgcgtgctatttccgtgctgaaatgccttccgtttgaggtagttagcctgaaagacacggaaggattgccctggatcggtgatgaagtcaaagggattatggaagaaatcatcgaggtcggtgaatcgctggaagtgcaggccgtgctcaatgatgagcgctatcaaagcttcaaactgtttaagagtgtctttggagtgggggtgaagacagcagacaaatggtaccgtatgggtctgcgcacgctcgaggatgttcgttccagcaagaccctgaagttgaccaagatgcagaaagcgggtctgtgctattatgaagatcttgctgatggcgttacgaaagccgaagctgacgcgatttctctgctggttcaggatgcagtctggactttcgacccggatgcgctggtggagattacgggtggatttcgtcgtgggaaaccttttggtcacgacgttgatctgcttatcacatctccgggagctgagaaagaacaagaagaccagctcctgcagaaagtgaccaatctgtggaagaaacaagggttgttgctgtacggtgatctgcgtgaaagtcgctttgaagatgggaaactcccatcccgcaagatcgatgccctggaccattttcagaaatgctttgctatcctcaaactttatcaccataaagtggacaaaagcaaatgggaaatgccgacgggttcgaacgaaagcgaggccaaaagttggaaagcaattcgcgtagatctggttgtttgtccctacgatcgttttgcgtttgcgttgttgggttggaccggaagccgcatgttcgaacgtgatctgcgccgctacgccacccacgagaagaagatgatgctggacaatcatgcgctgtatgacctgaccaagaaaatctttctcaaagctaaatcggaagaggaaattttcgcacatctggggcttgaatacctggaaccgtccgaacgtaacgca

SEQ ID NO: 520 - protein, 529 aa, synthetic construct
  REGION 1..529: note = Variant of terminal deoxynucleotidyltransferase
MHHHHHHGGSGMHYIRTIDSDFGKKRQKKMDNHISSMIYEIKFHEFVLFILEKKMGATRRTFLTDLARKKGFRVENELSDSVTHIVAENNSGSDVLAWLKTHKMEKTTQFELLDISWLIESMKVGKPVDTKGKYQLMESRVDSANPDPTAGTLNILPPTTKTISQYACQRRTTLNNHNQRFTDALEILAENYEFKRNDDTCLTFMRAISVLKCLPFEVVSLKDTEGLPWIGDEVKGIMEEIIEVGESLEVQAVLNDERYQSFKLFKSVFGVGVKTADKWYRMGLRTLEDVRSSKTLKLTKMQKAGLCYYEDLADGVTKAEADAISLLVQDAVWTFDPDALVEITGGFRRGKPFGHDVDLLITSPGAEKEQEDQLLQKVTNLWKKQGLLLYGDLRESRFEDGKLPSRKIDALDHFQKCFAILKLYHHKVDKSKWEMPTGSNESEAKSWKAIRVDLVVCPYDRFAFALLGWTGSRMFERDLRRYATHEKKMMLDNHALYDLTKKIFLKAKSEEEIFAHLGLEYLEPSERNA

SEQ ID NO: 521 - DNA, 1587 bp, synthetic construct
  misc_feature 1..1587: note = Variant of terminal deoxynucleotidyltransferase
  source 1..1587: mol_type = other DNA
atgcaccatcatcatcatcatggcggtagcggcatgcaccgcattcgtaccatcgattcggacttcgggaagaaacgccagaagaagatggataaccacatttggtccatgatctatgaaatcaaatttcacgagtttgtgctgttcattctcgaaaagaaaatgggtgcgacgcgtcgtacttttctgacagatttagcccgcaagaaagggttccgcgtcgagaatgaactgtcagacagcgttacccacatcgtggcagaaaataattcaggatctgacgtattggcttggctgaagacccacaagatggagaagacgacgcaatttgaactgctggatattagctggcttatcgaaagcatgaaagttggtaaaccggtggacaccaaggggaaataccagttgatggaatcgcgtgtcgatagtgcgaacccagatccgacagccggtaccctcaacattctgcctcctactacgaagaccatttctcagtatgcgtgtcaacgccgcaccaccctgaacaaccataatcaacgttttacggacgcactggaaattcttgcggaaaattacgagttcaaacgcaacgatgatacttgtctgacctttatgcgtgctatttccgtgctgaaatgccttccgtttgaggtagttagcctgaaagacacggaaggattgccctggatcggtgatgaagtcaaagggattatggaagaaatcatcgaggtcggtgaatcgctggaagtgcaggccgtgctcaatgatgagcgctatcaaagcttcaaactgtttaagagtgtctttggagtgggggtgaagacagcagacaaatggtaccgtatgggtctgcgcacgctcgaggatgttcgttccagcaagaccctgaagttgaccaagatgcagaaagcgggtctgtgctattatgaagatcttgctgatggcgttacgaaagccgaagctgacgcgatttctctgctggttcaggatgcagtctggactttcgacccggatgcgctggtggagattacgggtggatttcgtcgtgggaaaccttttggtcacgacgttgatctgcttatcacatctccgggagctgagaaagaacaagaagaccagctcctgcagaaagtgaccaatctgtggaagaaacaagggttgttgctgtacggtgatctgcgtgaaagtcgctttgaagatgggaaactcccatcccgcaagatcgatgccctggaccattttcagaaatgctttgctatcctcaaactttatcaccataaagtggacaaaagcaaatgggaaatgccgacgggttcgaacgaaagcgaggccaaaagttggaaagcaattcgcgtagatctggttgtttgtccctacgatcgttttgcgtttgcgttgttgggttggaccggaagccgcatgttcgaacgtgatctgcgccgctacgccacccacgagaagaagatgatgctggacaatcatgcgctgtatgacctgaccaagaaaatctttctcaaagctaaatcggaagaggaaattttcgcacatctggggcttgaatacctggaaccgtccgaacgtaacgca

SEQ ID NO: 522 - protein, 529 aa, synthetic construct
  REGION 1..529: note = Variant of terminal deoxynucleotidyltransferase
MHHHHHHGGSGMHRIRTIDSDFGKKRQKKMDNHIWSMIYEIKFHEFVLFILEKKMGATRRTFLTDLARKKGFRVENELSDSVTHIVAENNSGSDVLAWLKTHKMEKTTQFELLDISWLIESMKVGKPVDTKGKYQLMESRVDSANPDPTAGTLNILPPTTKTISQYACQRRTTLNNHNQRFTDALEILAENYEFKRNDDTCLTFMRAISVLKCLPFEVVSLKDTEGLPWIGDEVKGIMEEIIEVGESLEVQAVLNDERYQSFKLFKSVFGVGVKTADKWYRMGLRTLEDVRSSKTLKLTKMQKAGLCYYEDLADGVTKAEADAISLLVQDAVWTFDPDALVEITGGFRRGKPFGHDVDLLITSPGAEKEQEDQLLQKVTNLWKKQGLLLYGDLRESRFEDGKLPSRKIDALDHFQKCFAILKLYHHKVDKSKWEMPTGSNESEAKSWKAIRVDLVVCPYDRFAFALLGWTGSRMFERDLRRYATHEKKMMLDNHALYDLTKKIFLKAKSEEEIFAHLGLEYLEPSERNA

SEQ ID NO: 523 - DNA, 1587 bp, synthetic construct
  misc_feature 1..1587: note = Variant of terminal deoxynucleotidyltransferase
  source 1..1587: mol_type = other DNA
atgcaccatcatcatcatcatggcggtagcggcatgcaccgcattcgtaccatcgattcggacttcgggaagaaacgccagaagaagatggataaccacattagttccatgatctatgaaatcaaatttcacgagtttgtgctgttcattctcgaaaagaaaatgggtgcgacgcgtcgtacttttctgacagatttagcccgcaagaaagggttccgcgtcgagaatgaactgtcagacagcgttacccacatcgtggcagaaaataattcaggatctgacgtattggcttggctgaaggggcacaagatggagaagacgacgcaatttgaactgctggatattagctggcttatcgaaagcatgaaagttggtaaaccggtggacaccaaggggaaataccagttgatggaatcgcgtgtcgatagtgcgaacccagatccgacagccggtaccctcaacattctgcctcctactacgaagaccatttctcagtatgcgtgtcaacgccgcaccaccctgaacaaccataatcaacgttttacggacgcactggaaattcttgcggaaaattacgagttcaaacgcaacgatgatacttgtctgacctttatgcgtgctatttccgtgctgaaatgccttccgtttgaggtagttagcctgaaagacacggaaggattgccctggatcggtgatgaagtcaaagggattatggaagaaatcatcgaggtcggtgaatcgctggaagtgcaggccgtgctcaatgatgagcgctatcaaagcttcaaactgtttaagagtgtctttggagtgggggtgaagacagcagacaaatggtaccgtatgggtctgcgcacgctcgaggatgttcgttccagcaagaccctgaagttgaccaagatgcagaaagcgggtctgtgctattatgaagatcttgctgatggcgttacgaaagccgaagctgacgcgatttctctgctggttcaggatgcagtctggactttcgacccggatgcgctggtggagattacgggtggatttcgtcgtgggaaaccttttggtcacgacgttgatctgcttatcacatctccgggagctgagaaagaacaagaagaccagctcctgcagaaagtgaccaatctgtggaagaaacaagggttgttgctgtacggtgatctgcgtgaaagtcgctttgaagatgggaaactcccatcccgcaagatcgatgccctggaccattttcagaaatgctttgctatcctcaaactttatcaccataaagtggacaaaagcaaatgggaaatgccgacgggttcgaacgaaagcgaggccaaaagttggaaagcaattcgcgtagatctggttgtttgtccctacgatcgttttgcgtttgcgttgttgggttggaccggaagccgcatgttcgaacgtgatctgcgccgctacgccacccacgagaagaagatgatgctggacaatcatgcgctgtatgacctgaccaagaaaatctttctcaaagctaaatcggaagaggaaattttcgcacatctggggcttgaatacctggaaccgtccgaacgtaacgca

SEQ ID NO: 524 - protein, 529 aa, synthetic construct
  REGION 1..529: note = Variant of terminal deoxynucleotidyltransferase
MHHHHHHGGSGMHRIRTIDSDFGKKRQKKMDNHISSMIYEIKFHEFVLFILEKKMGATRRTFLTDLARKKGFRVENELSDSVTHIVAENNSGSDVLAWLKGHKMEKTTQFELLDISWLIESMKVGKPVDTKGKYQLMESRVDSANPDPTAGTLNILPPTTKTISQYACQRRTTLNNHNQRFTDALEILAENYEFKRNDDTCLTFMRAISVLKCLPFEVVSLKDTEGLPWIGDEVKGIMEEIIEVGESLEVQAVLNDERYQSFKLFKSVFGVGVKTADKWYRMGLRTLEDVRSSKTLKLTKMQKAGLCYYEDLADGVTKAEADAISLLVQDAVWTFDPDALVEITGGFRRGKPFGHDVDLLITSPGAEKEQEDQLLQKVTNLWKKQGLLLYGDLRESRFEDGKLPSRKIDALDHFQKCFAILKLYHHKVDKSKWEMPTGSNESEAKSWKAIRVDLVVCPYDRFAFALLGWTGSRMFERDLRRYATHEKKMMLDNHALYDLTKKIFLKAKSEEEIFAHLGLEYLEPSERNA

SEQ ID NO: 525 - DNA, 1587 bp, synthetic construct
  misc_feature 1..1587: note = Variant of terminal deoxynucleotidyltransferase
  source 1..1587: mol_type = other DNA
atgcaccatcatcatcatcatggcggtagcggcatgcaccgcattcgtaccatcgattcggacttcgggaagaaacgccagaagaagatggataaccacattagttccatgatctatgaaatcaaatttcacgagtttgtgctgttcattctcgaaaagaaaatgggtgcgacgcgtcgtacttttctgacagatttagcccgcaagaaagggttccgcgtcgagaatgaactgtcagacagcgttacccacatcgtggcagaaaataattcaggatctgacgtattggcttggctgaagacccacaagatggagaagacgacgcaatttgaactgctggatattagctggcttatcgaaagcatgatggttggtaaaccggtggacaccaaggggaaataccagttgatggaatcgcgtgtcgatagtgcgaacccagatccgacagccggtaccctcaacattctgcctcctactacgaagaccatttctcagtatgcgtgtcaacgccgcaccaccctgaacaaccataatcaacgttttacggacgcactggaaattcttgcggaaaattacgagttcaaacgcaacgatgatacttgtctgacctttatgcgtgctatttccgtgctgaaatgccttccgtttgaggtagttagcctgaaagacacggaaggattgccctggatcggtgatgaagtcaaagggattatggaagaaatcatcgaggtcggtgaatcgctggaagtgcaggccgtgctcaatgatgagcgctatcaaagcttcaaactgtttaagagtgtctttggagtgggggtgaagacagcagacaaatggtaccgtatgggtctgcgcacgctcgaggatgttcgttccagcaagaccctgaagttgaccaagatgcagaaagcgggtctgtgctattatgaagatcttgctgatggcgttacgaaagccgaagctgacgcgatttctctgctggttcaggatgcagtctggactttcgacccggatgcgctggtggagattacgggtggatttcgtcgtgggaaaccttttggtcacgacgttgatctgcttatcacatctccgggagctgagaaagaacaagaagaccagctcctgcagaaagtgaccaatctgtggaagaaacaagggttgttgctgtacggtgatctgcgtgaaagtcgctttgaagatgggaaactcccatcccgcaagatcgatgccctggaccattttcagaaatgctttgctatcctcaaactttatcaccataaagtggacaaaagcaaatgggaaatgccgacgggttcgaacgaaagcgaggccaaaagttggaaagcaattcgcgtagatctggttgtttgtccctacgatcgttttgcgtttgcgttgttgggttggaccggaagccgcatgttcgaacgtgatctgcgccgctacgccacccacgagaagaagatgatgctggacaatcatgcgctgtatgacctgaccaagaaaatctttctcaaagctaaatcggaagaggaaattttcgcacatctggggcttgaatacctggaaccgtccgaacgtaacgca

SEQ ID NO: 526 - protein, 529 aa, synthetic construct
  REGION 1..529: note = Variant of terminal deoxynucleotidyltransferase
MHHHHHHGGSGMHRIRTIDSDFGKKRQKKMDNHISSMIYEIKFHEFVLFILEKKMGATRRTFLTDLARKKGFRVENELSDSVTHIVAENNSGSDVLAWLKTHKMEKTTQFELLDISWLIESMMVGKPVDTKGKYQLMESRVDSANPDPTAGTLNILPPTTKTISQYACQRRTTLNNHNQRFTDALEILAENYEFKRNDDTCLTFMRAISVLKCLPFEVVSLKDTEGLPWIGDEVKGIMEEIIEVGESLEVQAVLNDERYQSFKLFKSVFGVGVKTADKWYRMGLRTLEDVRSSKTLKLTKMQKAGLCYYEDLADGVTKAEADAISLLVQDAVWTFDPDALVEITGGFRRGKPFGHDVDLLITSPGAEKEQEDQLLQKVTNLWKKQGLLLYGDLRESRFEDGKLPSRKIDALDHFQKCFAILKLYHHKVDKSKWEMPTGSNESEAKSWKAIRVDLVVCPYDRFAFALLGWTGSRMFERDLRRYATHEKKMMLDNHALYDLTKKIFLKAKSEEEIFAHLGLEYLEPSERNA

SEQ ID NO: 527 - DNA, 1587 bp, synthetic construct
  misc_feature 1..1587: note = Variant of terminal deoxynucleotidyltransferase
  source 1..1587: mol_type = other DNA
atgcaccatcatcatcatcatggcggtagcggcatgcaccgcattcgtaccatcgattcggacttcgggaagaaacgccagaagaagatggataaccacattagttccatgatctatgaaatcaaatttcacgagtttgtgctgttcattctcgaaaagaaaatgggtgcgacgcgtcgtacttttctgacagatttagcccgcaagaaagggttccgcgtcgagaatgaactgtcagacagcgttacccacatcgtggcagaaaataattcaggatctgacgtattggcttggctgaagacccacaagatggagaagacgacgcaaatggaactgctggatattagctggcttatcgaaagcatgaaagttggtaaaccggtggacaccaaggggaaataccagttgatggaatcgcgtgtcgatagtgcgaacccagatccgacagccggtaccctcaacattctgcctcctactacgaagaccatttctcagtatgcgtgtcaacgccgcaccaccctgaacaaccataatcaacgttttacggacgcactggaaattcttgcggaaaattacgagttcaaacgcaacgatgatacttgtctgacctttatgcgtgctatttccgtgctgaaatgccttccgtttgaggtagttagcctgaaagacacggaaggattgccctggatcggtgatgaagtcaaagggattatggaagaaatcatcgaggtcggtgaatcgctggaagtgcaggccgtgctcaatgatgagcgctatcaaagcttcaaactgtttaagagtgtctttggagtgggggtgaagacagcagacaaatggtaccgtatgggtctgcgcacgctcgaggatgttcgttccagcaagaccctgaagttgaccaagatgcagaaagcgggtctgtgctattatgaagatcttgctgatggcgttacgaaagccgaagctgacgcgatttctctgctggttcaggatgcagtctggactttcgacccggatgcgctggtggagattacgggtggatttcgtcgtgggaaaccttttggtcacgacgttgatctgcttatcacatctccgggagctgagaaagaacaagaagaccagctcctgcagaaagtgaccaatctgtggaagaaacaagggttgttgctgtacggtgatctgcgtgaaagtcgctttgaagatgggaaactcccatcccgcaagatcgatgccctggaccattttcagaaatgctttgctatcctcaaactttatcaccataaagtggacaaaagcaaatgggaaatgccgacgggttcgaacgaaagcgaggccaaaagttggaaagcaattcgcgtagatctggttgtttgtccctacgatcgttttgcgtttgcgttgttgggttggaccggaagccgcatgttcgaacgtgatctgcgccgctacgccacccacgagaagaagatgatgctggacaatcatgcgctgtatgacctgaccaagaaaatctttctcaaagctaaatcggaagaggaaattttcgcacatctggggcttgaatacctggaaccgtccgaacgtaacgca

SEQ ID NO: 528 - protein, 529 aa, synthetic construct
  REGION 1..529: note = Variant of terminal deoxynucleotidyltransferase
MHHHHHHGGSGMHRIRTIDSDFGKKRQKKMDNHISSMIYEIKFHEFVLFILEKKMGATRRTFLTDLARKKGFRVENELSDSVTHIVAENNSGSDVLAWLKTHKMEKTTQMELLDISWLIESMKVGKPVDTKGKYQLMESRVDSANPDPTAGTLNILPPTTKTISQYACQRRTTLNNHNQRFTDALEILAENYEFKRNDDTCLTFMRAISVLKCLPFEVVSLKDTEGLPWIGDEVKGIMEEIIEVGESLEVQAVLNDERYQSFKLFKSVFGVGVKTADKWYRMGLRTLEDVRSSKTLKLTKMQKAGLCYYEDLADGVTKAEADAISLLVQDAVWTFDPDALVEITGGFRRGKPFGHDVDLLITSPGAEKEQEDQLLQKVTNLWKKQGLLLYGDLRESRFEDGKLPSRKIDALDHFQKCFAILKLYHHKVDKSKWEMPTGSNESEAKSWKAIRVDLVVCPYDRFAFALLGWTGSRMFERDLRRYATHEKKMMLDNHALYDLTKKIFLKAKSEEEIFAHLGLEYLEPSERNA

SEQ ID NO: 529 - DNA, 1587 bp, synthetic construct
  misc_feature 1..1587: note = Variant of terminal deoxynucleotidyltransferase
  source 1..1587: mol_type = other DNA
atgcaccatcatcatcatcatggcggtagcggcatgcaccgcattcgtaccatcgattcggacttcgggaagaaacgccagaagaagatggataaccacattagttccatgatctatgaaatcaaatttcacgagtttgtgctgttcattctcgaaaagaaaatgggtgcgacgcgtcgtacttttctgacagatttagcccgcaagaaagggttccgcgtcgagaatgaactgtcagacagcgttacccacatcgtggcagaaaataattcaggatctgacgtattggcttggctgaagacccacaagatggagaagacgacgcaatttgaactgctggatattagctggcttatcgaaagcatgaaaatgggtaaaccggtggacaccaaggggaaataccagttgatggaatcgcgtgtcgatagtgcgaacccagatccgacagccggtaccctcaacattctgcctcctactacgaagaccatttctcagtatgcgtgtcaacgccgcaccaccctgaacaaccataatcaacgttttacggacgcactggaaattcttgcggaaaattacgagttcaaacgcaacgatgatacttgtctgacctttatgcgtgctatttccgtgctgaaatgccttccgtttgaggtagttagcctgaaagacacggaaggattgccctggatcggtgatgaagtcaaagggattatggaagaaatcatcgaggtcggtgaatcgctggaagtgcaggccgtgctcaatgatgagcgctatcaaagcttcaaactgtttaagagtgtctttggagtgggggtgaagacagcagacaaatggtaccgtatgggtctgcgcacgctcgaggatgttcgttccagcaagaccctgaagttgaccaagatgcagaaagcgggtctgtgctattatgaagatcttgctgatggcgttacgaaagccgaagctgacgcgatttctctgctggttcaggatgcagtctggactttcgacccggatgcgctggtggagattacgggtggatttcgtcgtgggaaaccttttggtcacgacgttgatctgcttatcacatctccgggagctgagaaagaacaagaagaccagctcctgcagaaagtgaccaatctgtggaagaaacaagggttgttgctgtacggtgatctgcgtgaaagtcgctttgaagatgggaaactcccatcccgcaagatcgatgccctggaccattttcagaaatgctttgctatcctcaaactttatcaccataaagtggacaaaagcaaatgggaaatgccgacgggttcgaacgaaagcgaggccaaaagttggaaagcaattcgcgtagatctggttgtttgtccctacgatcgttttgcgtttgcgttgttgggttggaccggaagccgcatgttcgaacgtgatctgcgccgctacgccacccacgagaagaagatgatgctggacaatcatgcgctgtatgacctgaccaagaaaatctttctcaaagctaaatcggaagaggaaattttcgcacatctggggcttgaatacctggaaccgtccgaacgtaacgca

SEQ ID NO: 530 - protein, 529 aa, synthetic construct
  REGION 1..529: note = Variant of terminal deoxynucleotidyltransferase
MHHHHHHGGSGMHRIRTIDSDFGKKRQKKMDNHISSMIYEIKFHEFVLFILEKKMGATRRTFLTDLARKKGFRVENELSDSVTHIVAENNSGSDVLAWLKTHKMEKTTQFELLDISWLIESMKMGKPVDTKGKYQLMESRVDSANPDPTAGTLNILPPTTKTISQYACQRRTTLNNHNQRFTDALEILAENYEFKRNDDTCLTFMRAISVLKCLPFEVVSLKDTEGLPWIGDEVKGIMEEIIEVGESLEVQAVLNDERYQSFKLFKSVFGVGVKTADKWYRMGLRTLEDVRSSKTLKLTKMQKAGLCYYEDLADGVTKAEADAISLLVQDAVWTFDPDALVEITGGFRRGKPFGHDVDLLITSPGAEKEQEDQLLQKVTNLWKKQGLLLYGDLRESRFEDGKLPSRKIDALDHFQKCFAILKLYHHKVDKSKWEMPTGSNESEAKSWKAIRVDLVVCPYDRFAFALLGWTGSRMFERDLRRYATHEKKMMLDNHALYDLTKKIFLKAKSEEEIFAHLGLEYLEPSERNA

SEQ ID NO: 531 - DNA, 1587 bp, synthetic construct
  misc_feature 1..1587: note = Variant of terminal deoxynucleotidyltransferase
  source 1..1587: mol_type = other DNA
atgcaccatcatcatcatcatggcggtagcggcatgcaccgcattcgtaccatcgattcggacttctgtaagaaacgccagaagaagatggataaccacattagttccatgatctatgaaatcaaatttcacgagtttgtgctgttcattctcgaaaagaaaatgggtgcgacgcgtcgtacttttctgacagatttagcccgcaagaaagggttccgcgtcgagaatgaactgtcagacagcgttacccacatcgtggcagaaaataattcaggatctgacgtattggcttggctgaagacccacaagatggagaagacgacgcaatttgaactgctggatattagctggcttatcgaaagcatgaaagttggtaaaccggtggacaccaaggggaaataccagttgatggaatcgcgtgtcgatagtgcgaacccagatccgacagccggtaccctcaacattctgcctcctactacgaagaccatttctcagtatgcgtgtcaacgccgcaccaccctgaacaaccataatcaacgttttacggacgcactggaaattcttgcggaaaattacgagttcaaacgcaacgatgatacttgtctgacctttatgcgtgctatttccgtgctgaaatgccttccgtttgaggtagttagcctgaaagacacggaaggattgccctggatcggtgatgaagtcaaagggattatggaagaaatcatcgaggtcggtgaatcgctggaagtgcaggccgtgctcaatgatgagcgctatcaaagcttcaaactgtttaagagtgtctttggagtgggggtgaagacagcagacaaatggtaccgtatgggtctgcgcacgctcgaggatgttcgttccagcaagaccctgaagttgaccaagatgcagaaagcgggtctgtgctattatgaagatcttgctgatggcgttacgaaagccgaagctgacgcgatttctctgctggttcaggatgcagtctggactttcgacccggatgcgctggtggagattacgggtggatttcgtcgtgggaaaccttttggtcacgacgttgatctgcttatcacatctccgggagctgagaaagaacaagaagaccagctcctgcagaaagtgaccaatctgtggaagaaacaagggttgttgctgtacggtgatctgcgtgaaagtcgctttgaagatgggaaactcccatcccgcaagatcgatgccctggaccattttcagaaatgctttgctatcctcaaactttatcaccataaagtggacaaaagcaaatgggaaatgccgacgggttcgaacgaaagcgaggccaaaagttggaaagcaattcgcgtagatctggttgtttgtccctacgatcgttttgcgtttgcgttgttgggttggaccggaagccgcatgttcgaacgtgatctgcgccgctacgccacccacgagaagaagatgatgctggacaatcatgcgctgtatgacctgaccaagaaaatctttctcaaagctaaatcggaagaggaaattttcgcacatctggggcttgaatacctggaaccgtccgaacgtaacgca

SEQ ID NO: 532 - protein, 529 aa, synthetic construct
  REGION 1..529: note = Variant of terminal deoxynucleotidyltransferase
MHHHHHHGGSGMHRIRTIDSDFCKKRQKKMDNHISSMIYEIKFHEFVLFILEKKMGATRRTFLTDLARKKGFRVENELSDSVTHIVAENNSGSDVLAWLKTHKMEKTTQFELLDISWLIESMKVGKPVDTKGKYQLMESRVDSANPDPTAGTLNILPPTTKTISQYACQRRTTLNNHNQRFTDALEILAENYEFKRNDDTCLTFMRAISVLKCLPFEVVSLKDTEGLPWIGDEVKGIMEEIIEVGESLEVQAVLNDERYQSFKLFKSVFGVGVKTADKWYRMGLRTLEDVRSSKTLKLTKMQKAGLCYYEDLADGVTKAEADAISLLVQDAVWTFDPDALVEITGGFRRGKPFGHDVDLLITSPGAEKEQEDQLLQKVTNLWKKQGLLLYGDLRESRFEDGKLPSRKIDALDHFQKCFAILKLYHHKVDKSKWEMPTGSNESEAKSWKAIRVDLVVCPYDRFAFALLGWTGSRMFERDLRRYATHEKKMMLDNHALYDLTKKIFLKAKSEEEIFAHLGLEYLEPSERNA

SEQ ID NO: 533 - DNA, 1587 bp, synthetic construct
  misc_feature 1..1587: note = Variant of terminal deoxynucleotidyltransferase
  source 1..1587: mol_type = other DNA
atgcaccatcatcatcatcatggcggtagcggcatgcaccgcattcgtaccatcgattcggacttcgggatgaaacgccagaagaagatggataaccacattagttccatgatctatgaaatcaaatttcacgagtttgtgctgttcattctcgaaaagaaaatgggtgcgacgcgtcgtacttttctgacagatttagcccgcaagaaagggttccgcgtcgagaatgaactgtcagacagcgttacccacatcgtggcagaaaataattcaggatctgacgtattggcttggctgaagacccacaagatggagaagacgacgcaatttgaactgctggatattagctggcttatcgaaagcatgaaagttggtaaaccggtggacaccaaggggaaataccagttgatggaatcgcgtgtcgatagtgcgaacccagatccgacagccggtaccctcaacattctgcctcctactacgaagaccatttctcagtatgcgtgtcaacgccgcaccaccctgaacaaccataatcaacgttttacggacgcactggaaattcttgcggaaaattacgagttcaaacgcaacgatgatacttgtctgacctttatgcgtgctatttccgtgctgaaatgccttccgtttgaggtagttagcctgaaagacacggaaggattgccctggatcggtgatgaagtcaaagggattatggaagaaatcatcgaggtcggtgaatcgctggaagtgcaggccgtgctcaatgatgagcgctatcaaagcttcaaactgtttaagagtgtctttggagtgggggtgaagacagcagacaaatggtaccgtatgggtctgcgcacgctcgaggatgttcgttccagcaagaccctgaagttgaccaagatgcagaaagcgggtctgtgctattatgaagatcttgctgatggcgttacgaaagccgaagctgacgcgatttctctgctggttcaggatgcagtctggactttcgacccggatgcgctggtggagattacgggtggatttcgtcgtgggaaaccttttggtcacgacgttgatctgcttatcacatctccgggagctgagaaagaacaagaagaccagctcctgcagaaagtgaccaatctgtggaagaaacaagggttgttgctgtacggtgatctgcgtgaaagtcgctttgaagatgggaaactcccatcccgcaagatcgatgccctggaccattttcagaaatgctttgctatcctcaaactttatcaccataaagtggacaaaagcaaatgggaaatgccgacgggttcgaacgaaagcgaggccaaaagttggaaagcaattcgcgtagatctggttgtttgtccctacgatcgttttgcgtttgcgttgttgggttggaccggaagccgcatgttcgaacgtgatctgcgccgctacgccacccacgagaagaagatgatgctggacaatcatgcgctgtatgacctgaccaagaaaatctttctcaaagctaaatcggaagaggaaattttcgcacatctggggcttgaatacctggaaccgtccgaacgtaacgca

SEQ ID NO: 534 - protein, 529 aa, synthetic construct
  REGION 1..529: note = Variant of terminal deoxynucleotidyltransferase
MHHHHHHGGSGMHRIRTIDSDFGMKRQKKMDNHISSMIYEIKFHEFVLFILEKKMGATRRTFLTDLARKKGFRVENELSDSVTHIVAENNSGSDVLAWLKTHKMEKTTQFELLDISWLIESMKVGKPVDTKGKYQLMESRVDSANPDPTAGTLNILPPTTKTISQYACQRRTTLNNHNQRFTDALEILAENYEFKRNDDTCLTFMRAISVLKCLPFEVVSLKDTEGLPWIGDEVKGIMEEIIEVGESLEVQAVLNDERYQSFKLFKSVFGVGVKTADKWYRMGLRTLEDVRSSKTLKLTKMQKAGLCYYEDLADGVTKAEADAISLLVQDAVWTFDPDALVEITGGFRRGKPFGHDVDLLITSPGAEKEQEDQLLQKVTNLWKKQGLLLYGDLRESRFEDGKLPSRKIDALDHFQKCFAILKLYHHKVDKSKWEMPTGSNESEAKSWKAIRVDLVVCPYDRFAFALLGWTGSRMFERDLRRYATHEKKMMLDNHALYDLTKKIFLKAKSEEEIFAHLGLEYLEPSERNA

SEQ ID NO: 535 - DNA, 1587 bp, synthetic construct
  misc_feature 1..1587: note = Variant of terminal deoxynucleotidyltransferase
  source 1..1587: mol_type = other DNA
atgcaccatcatcatcatcatggcggtagcggcatgcacaatattcgtaccatcgattcggacttcgggaagaaacgccagaagaagatggataaccacattagttccatgatctatgaaatcaaatttcacgagtttgtgctgttcattctcgaaaagaaaatgggtgcgacgcgtcgtacttttctgacagatttagcccgcaagaaagggttccgcgtcgagaatgaactgtcagacagcgttacccacatcgtggcagaaaataattcaggatctgacgtattggcttggctgaagacccacaagatggagaagacgacgcaatttgaactgctggatattagctggcttatcgaaagcatgaaagttggtaaaccggtggacaccaaggggaaataccagttgatggaatcgcgtgtcgatagtgcgaacccagatccgacagccggtaccctcaacattctgcctcctactacgaagaccatttctcagtatgcgtgtcaacgccgcaccaccctgaacaaccataatcaacgttttacggacgcactggaaattcttgcggaaaattacgagttcaaacgcaacgatgatacttgtctgacctttatgcgtgctatttccgtgctgaaatgccttccgtttgaggtagttagcctgaaagacacggaaggattgccctggatcggtgatgaagtcaaagggattatggaagaaatcatcgaggtcggtgaatcgctggaagtgcaggccgtgctcaatgatgagcgctatcaaagcttcaaactgtttaagagtgtctttggagtgggggtgaagacagcagacaaatggtaccgtatgggtctgcgcacgctcgaggatgttcgttccagcaagaccctgaagttgaccaagatgcagaaagcgggtctgtgctattatgaagatcttgctgatggcgttacgaaagccgaagctgacgcgatttctctgctggttcaggatgcagtctggactttcgacccggatgcgctggtggagattacgggtggatttcgtcgtgggaaaccttttggtcacgacgttgatctgcttatcacatctccgggagctgagaaagaacaagaagaccagctcctgcagaaagtgaccaatctgtggaagaaacaagggttgttgctgtacggtgatctgcgtgaaagtcgctttgaagatgggaaactcccatcccgcaagatcgatgccctggaccattttcagaaatgctttgctatcctcaaactttatcaccataaagtggacaaaagcaaatgggaaatgccgacgggttcgaacgaaagcgaggccaaaagttggaaagcaattcgcgtagatctggttgtttgtccctacgatcgttttgcgtttgcgttgttgggttggaccggaagccgcatgttcgaacgtgatctgcgccgctacgccacccacgagaagaagatgatgctggacaatcatgcgctgtatgacctgaccaagaaaatctttctcaaagctaaatcggaagaggaaattttcgcacatctggggcttgaatacctggaaccgtccgaacgtaacgca

SEQ ID NO: 536 - protein, 529 aa, synthetic construct
  REGION 1..529: note = Variant of terminal deoxynucleotidyltransferase
MHHHHHHGGSGMHNIRTIDSDFGKKRQKKMDNHISSMIYEIKFHEFVLFILEKKMGATRRTFLTDLARKKGFRVENELSDSVTHIVAENNSGSDVLAWLKTHKMEKTTQFELLDISWLIESMKVGKPVDTKGKYQLMESRVDSANPDPTAGTLNILPPTTKTISQYACQRRTTLNNHNQRFTDALEILAENYEFKRNDDTCLTFMRAISVLKCLPFEVVSLKDTEGLPWIGDEVKGIMEEIIEVGESLEVQAVLNDERYQSFKLFKSVFGVGVKTADKWYRMGLRTLEDVRSSKTLKLTKMQKAGLCYYEDLADGVTKAEADAISLLVQDAVWTFDPDALVEITGGFRRGKPFGHDVDLLITSPGAEKEQEDQLLQKVTNLWKKQGLLLYGDLRESRFEDGKLPSRKIDALDHFQKCFAILKLYHHKVDKSKWEMPTGSNESEAKSWKAIRVDLVVCPYDRFAFALLGWTGSRMFERDLRRYATHEKKMMLDNHALYDLTKKIFLKAKSEEEIFAHLGLEYLEPSERNA

SEQ ID NO: 537 - DNA, 1587 bp, synthetic construct
  misc_feature 1..1587: note = Variant of terminal deoxynucleotidyltransferase
  source 1..1587: mol_type = other DNA
atgcaccatcatcatcatcatggcggtagcggcatgcaccgcattcgtaccatcgattcggacttcgggaagaaacgccagaagaagatggataaccacattagttccatgatctatgaaatcaaattttcggagtttgtgctgttcattctcgaaaagaaaatgggtgcgacgcgtcgtacttttctgacagatttagcccgcaagaaagggttccgcgtcgagaatgaactgtcagacagcgttacccacatcgtggcagaaaataattcaggatctgacgtattggcttggctgaagacccacaagatggagaagacgacgcaatttgaactgctggatattagctggcttatcgaaagcatgaaagttggtaaaccggtggacaccaaggggaaataccagttgatggaatcgcgtgtcgatagtgcgaacccagatccgacagccggtaccctcaacattctgcctcctactacgaagaccatttctcagtatgcgtgtcaacgccgcaccaccctgaacaaccataatcaacgttttacggacgcactggaaattcttgcggaaaattacgagttcaaacgcaacgatgatacttgtctgacctttatgcgtgctatttccgtgctgaaatgccttccgtttgaggtagttagcctgaaagacacggaaggattgccctggatcggtgatgaagtcaaagggattatggaagaaatcatcgaggtcggtgaatcgctggaagtgcaggccgtgctcaatgatgagcgctatcaaagcttcaaactgtttaagagtgtctttggagtgggggtgaagacagcagacaaatggtaccgtatgggtctgcgcacgctcgaggatgttcgttccagcaagaccctgaagttgaccaagatgcagaaagcgggtctgtgctattatgaagatcttgctgatggcgttacgaaagccgaagctgacgcgatttctctgctggttcaggatgcagtctggactttcgacccggatgcgctggtggagattacgggtggatttcgtcgtgggaaaccttttggtcacgacgttgatctgcttatcacatctccgggagctgagaaagaacaagaagaccagctcctgcagaaagtgaccaatctgtggaagaaacaagggttgttgctgtacggtgatctgcgtgaaagtcgctttgaagatgggaaactcccatcccgcaagatcgatgccctggaccattttcagaaatgctttgctatcctcaaactttatcaccataaagtggacaaaagcaaatgggaaatgccgacgggttcgaacgaaagcgaggccaaaagttggaaagcaattcgcgtagatctggttgtttgtccctacgatcgttttgcgtttgcgttgttgggttggaccggaagccgcatgttcgaacgtgatctgcgccgctacgccacccacgagaagaagatgatgctggacaatcatgcgctgtatgacctgaccaagaaaatctttctcaaagctaaatcggaagaggaaattttcgcacatctggggcttgaatacctggaaccgtccgaacgtaacgca

SEQ ID NO: 538 - protein, 529 aa, synthetic construct
  REGION 1..529: note = Variant of terminal deoxynucleotidyltransferase
MHHHHHHGGSGMHRIRTIDSDFGKKRQKKMDNHISSMIYEIKFSEFVLFILEKKMGATRRTFLTDLARKKGFRVENELSDSVTHIVAENNSGSDVLAWLKTHKMEKTTQFELLDISWLIESMKVGKPVDTKGKYQLMESRVDSANPDPTAGTLNILPPTTKTISQYACQRRTTLNNHNQRFTDALEILAENYEFKRNDDTCLTFMRAISVLKCLPFEVVSLKDTEGLPWIGDEVKGIMEEIIEVGESLEVQAVLNDERYQSFKLFKSVFGVGVKTADKWYRMGLRTLEDVRSSKTLKLTKMQKAGLCYYEDLADGVTKAEADAISLLVQDAVWTFDPDALVEITGGFRRGKPFGHDVDLLITSPGAEKEQEDQLLQKVTNLWKKQGLLLYGDLRESRFEDGKLPSRKIDALDHFQKCFAILKLYHHKVDKSKWEMPTGSNESEAKSWKAIRVDLVVCPYDRFAFALLGWTGSRMFERDLRRYATHEKKMMLDNHALYDLTKKIFLKAKSEEEIFAHLGLEYLEPSERNA

SEQ ID NO: 539 - DNA, 1587 bp, synthetic construct
  misc_feature 1..1587: note = Variant of terminal deoxynucleotidyltransferase
  source 1..1587: mol_type = other DNA
atgcaccatcatcatcatcatggcggtagcggcatggagcgcattcgtaccatcgattcggacttcgggaagaaacgccagaagaagatggataaccacattagttccatgatctatgaaatcaaatttcacgagtttgtgctgttcattctcgaaaagaaaatgggtgcgacgcgtcgtacttttctgacagatttagcccgcaagaaagggttccgcgtcgagaatgaactgtcagacagcgttacccacatcgtggcagaaaataattcaggatctgacgtattggcttggctgaagacccacaagatggagaagacgacgcaatttgaactgctggatattagctggcttatcgaaagcatgaaagttggtaaaccggtggacaccaaggggaaataccagttgatggaatcgcgtgtcgatagtgcgaacccagatccgacagccggtaccctcaacattctgcctcctactacgaagaccatttctcagtatgcgtgtcaacgccgcaccaccctgaacaaccataatcaacgttttacggacgcactggaaattcttgcggaaaattacgagttcaaacgcaacgatgatacttgtctgacctttatgcgtgctatttccgtgctgaaatgccttccgtttgaggtagttagcctgaaagacacggaaggattgccctggatcggtgatgaagtcaaagggattatggaagaaatcatcgaggtcggtgaatcgctggaagtgcaggccgtgctcaatgatgagcgctatcaaagcttcaaactgtttaagagtgtctttggagtgggggtgaagacagcagacaaatggtaccgtatgggtctgcgcacgctcgaggatgttcgttccagcaagaccctgaagttgaccaagatgcagaaagcgggtctgtgctattatgaagatcttgctgatggcgttacgaaagccgaagctgacgcgatttctctgctggttcaggatgcagtctggactttcgacccggatgcgctggtggagattacgggtggatttcgtcgtgggaaaccttttggtcacgacgttgatctgcttatcacatctccgggagctgagaaagaacaagaagaccagctcctgcagaaagtgaccaatctgtggaagaaacaagggttgttgctgtacggtgatctgcgtgaaagtcgctttgaagatgggaaactcccatcccgcaagatcgatgccctggaccattttcagaaatgctttgctatcctcaaactttatcaccataaagtggacaaaagcaaatgggaaatgccgacgggttcgaacgaaagcgaggccaaaagttggaaagcaattcgcgtagatctggttgtttgtccctacgatcgttttgcgtttgcgttgttgggttggaccggaagccgcatgttcgaacgtgatctgcgccgctacgccacccacgagaagaagatgatgctggacaatcatgcgctgtatgacctgaccaagaaaatctttctcaaagctaaatcggaagaggaaattttcgcacatctggggcttgaatacctggaaccgtccgaacgtaacgca

SEQ ID NO: 540 - protein, 529 aa, synthetic construct
  REGION 1..529: note = Variant of terminal deoxynucleotidyltransferase
MHHHHHHGGSGMERIRTIDSDFGKKRQKKMDNHISSMIYEIKFHEFVLFILEKKMGATRRTFLTDLARKKGFRVENELSDSVTHIVAENNSGSDVLAWLKTHKMEKTTQFELLDISWLIESMKVGKPVDTKGKYQLMESRVDSANPDPTAGTLNILPPTTKTISQYACQRRTTLNNHNQRFTDALEILAENYEFKRNDDTCLTFMRAISVLKCLPFEVVSLKDTEGLPWIGDEVKGIMEEIIEVGESLEVQAVLNDERYQSFKLFKSVFGVGVKTADKWYRMGLRTLEDVRSSKTLKLTKMQKAGLCYYEDLADGVTKAEADAISLLVQDAVWTFDPDALVEITGGFRRGKPFGHDVDLLITSPGAEKEQEDQLLQKVTNLWKKQGLLLYGDLRESRFEDGKLPSRKIDALDHFQKCFAILKLYHHKVDKSKWEMPTGSNESEAKSWKAIRVDLVVCPYDRFAFALLGWTGSRMFERDLRRYATHEKKMMLDNHALYDLTKKIFLKAKSEEEIFAHLGLEYLEPSERNA

SEQ ID NO: 541 - DNA, 1587 bp, synthetic construct
  misc_feature 1..1587: note = Variant of terminal deoxynucleotidyltransferase
  source 1..1587: mol_type = other DNA
atgcaccatcatcatcatcatggcggtagcggcatgcaccgcattcgtaccatcgattcggacttcgggaagaaacgccagaagaagatggataaccacattagttccatgatctatgaaatcaaatttcacgagtttgtgctgttcattctcgaaaagaaaatgggtgcgacgcgtcgtacttttctgacaagtttagcccgcaagaaagggttccgcgtcgagaatgaactgtcagacagcgttacccacatcgtggcagaaaataattcaggatctgacgtattggcttggctgaagacccacaagatggagaagacgacgcaatttgaactgctggatattagctggcttatcgaaagcatgaaagttggtaaaccggtggacaccaaggggaaataccagttgatggaatcgcgtgtcgatagtgcgaacccagatccgacagccggtaccctcaacattctgcctcctactacgaagaccatttctcagtatgcgtgtcaacgccgcaccaccctgaacaaccataatcaacgttttacggacgcactggaaattcttgcggaaaattacgagttcaaacgcaacgatgatacttgtctgacctttatgcgtgctatttccgtgctgaaatgccttccgtttgaggtagttagcctgaaagacacggaaggattgccctggatcggtgatgaagtcaaagggattatggaagaaatcatcgaggtcggtgaatcgctggaagtgcaggccgtgctcaatgatgagcgctatcaaagcttcaaactgtttaagagtgtctttggagtgggggtgaagacagcagacaaatggtaccgtatgggtctgcgcacgctcgaggatgttcgttccagcaagaccctgaagttgaccaagatgcagaaagcgggtctgtgctattatgaagatcttgctgatggcgttacgaaagccgaagctgacgcgatttctctgctggttcaggatgcagtctggactttcgacccggatgcgctggtggagattacgggtggatttcgtcgtgggaaaccttttggtcacgacgttgatctgcttatcacatctccgggagctgagaaagaacaagaagaccagctcctgcagaaagtgaccaatctgtggaagaaacaagggttgttgctgtacggtgatctgcgtgaaagtcgctttgaagatgggaaactcccatcccgcaagatcgatgccctggaccattttcagaaatgctttgctatcctcaaactttatcaccataaagtggacaaaagcaaatgggaaatgccgacgggttcgaacgaaagcgaggccaaaagttggaaagcaattcgcgtagatctggttgtttgtccctacgatcgttttgcgtttgcgttgttgggttggaccggaagccgcatgttcgaacgtgatctgcgccgctacgccacccacgagaagaagatgatgctggacaatcatgcgctgtatgacctgaccaagaaaatctttctcaaagctaaatcggaagaggaaattttcgcacatctggggcttgaatacctggaaccgtccgaacgtaacgca

SEQ ID NO: 542 - protein, 529 aa, synthetic construct
  REGION 1..529: note = Variant of terminal deoxynucleotidyltransferase
MHHHHHHGGSGMHRIRTIDSDFGKKRQKKMDNHISSMIYEIKFHEFVLFILEKKMGATRRTFLTSLARKKGFRVENELSDSVTHIVAENNSGSDVLAWLKTHKMEKTTQFELLDISWLIESMKVGKPVDTKGKYQLMESRVDSANPDPTAGTLNILPPTTKTISQYACQRRTTLNNHNQRFTDALEILAENYEFKRNDDTCLTFMRAISVLKCLPFEVVSLKDTEGLPWIGDEVKGIMEEIIEVGESLEVQAVLNDERYQSFKLFKSVFGVGVKTADKWYRMGLRTLEDVRSSKTLKLTKMQKAGLCYYEDLADGVTKAEADAISLLVQDAVWTFDPDALVEITGGFRRGKPFGHDVDLLITSPGAEKEQEDQLLQKVTNLWKKQGLLLYGDLRESRFEDGKLPSRKIDALDHFQKCFAILKLYHHKVDKSKWEMPTGSNESEAKSWKAIRVDLVVCPYDRFAFALLGWTGSRMFERDLRRYATHEKKMMLDNHALYDLTKKIFLKAKSEEEIFAHLGLEYLEPSERNA

SEQ ID NO: 543 - DNA, 1587 bp, synthetic construct
  misc_feature 1..1587: note = Variant of terminal deoxynucleotidyltransferase
  source 1..1587: mol_type = other DNA
atgcaccatcatcatcatcatggcggtagcggcatgcaccgcattcgtaccatcgattcggacttcgggaagaaacgccagaagaagatggataaccacattagttccatgatctatgaaatcaaatttcacgagtttgtgctgttcattctcgaaaagaaaatgggtgcgacgcgtcgtacttttctgacagatttagcccgcaagaaagggttccgcgtcgagaatgaactgtcagacagcgttacccacatcgtggcagaaaataattcaggatctgacgtattggcttggctgaagacccacaagatggagaagacgatgcaatttgaactgctggatattagctggcttatcgaaagcatgaaagttggtaaaccggtggacaccaaggggaaataccagttgatggaatcgcgtgtcgatagtgcgaacccagatccgacagccggtaccctcaacattctgcctcctactacgaagaccatttctcagtatgcgtgtcaacgccgcaccaccctgaacaaccataatcaacgttttacggacgcactggaaattcttgcggaaaattacgagttcaaacgcaacgatgatacttgtctgacctttatgcgtgctatttccgtgctgaaatgccttccgtttgaggtagttagcctgaaagacacggaaggattgccctggatcggtgatgaagtcaaagggattatggaagaaatcatcgaggtcggtgaatcgctggaagtgcaggccgtgctcaatgatgagcgctatcaaagcttcaaactgtttaagagtgtctttggagtgggggtgaagacagcagacaaatggtaccgtatgggtctgcgcacgctcgaggatgttcgttccagcaagaccctgaagttgaccaagatgcagaaagcgggtctgtgctattatgaagatcttgctgatggcgttacgaaagccgaagctgacgcgatttctctgctggttcaggatgcagtctggactttcgacccggatgcgctggtggagattacgggtggatttcgtcgtgggaaaccttttggtcacgacgttgatctgcttatcacatctccgggagctgagaaagaacaagaagaccagctcctgcagaaagtgaccaatctgtggaagaaacaagggttgttgctgtacggtgatctgcgtgaaagtcgctttgaagatgggaaactcccatcccgcaagatcgatgccctggaccattttcagaaatgctttgctatcctcaaactttatcaccataaagtggacaaaagcaaatgggaaatgccgacgggttcgaacgaaagcgaggccaaaagttggaaagcaattcgcgtagatctggttgtttgtccctacgatcgttttgcgtttgcgttgttgggttggaccggaagccgcatgttcgaacgtgatctgcgccgctacgccacccacgagaagaagatgatgctggacaatcatgcgctgtatgacctgaccaagaaaatctttctcaaagctaaatcggaagaggaaattttcgcacatctggggcttgaatacctggaaccgtccgaacgtaacgca

SEQ ID NO: 544 - protein, 529 aa, synthetic construct
  REGION 1..529: note = Variant of terminal deoxynucleotidyltransferase
MHHHHHHGGSGMHRIRTIDSDFGKKRQKKMDNHISSMIYEIKFHEFVLFILEKKMGATRRTFLTDLARKKGFRVENELSDSVTHIVAENNSGSDVLAWLKTHKMEKTMQFELLDISWLIESMKVGKPVDTKGKYQLMESRVDSANPDPTAGTLNILPPTTKTISQYACQRRTTLNNHNQRFTDALEILAENYEFKRNDDTCLTFMRAISVLKCLPFEVVSLKDTEGLPWIGDEVKGIMEEIIEVGESLEVQAVLNDERYQSFKLFKSVFGVGVKTADKWYRMGLRTLEDVRSSKTLKLTKMQKAGLCYYEDLADGVTKAEADAISLLVQDAVWTFDPDALVEITGGFRRGKPFGHDVDLLITSPGAEKEQEDQLLQKVTNLWKKQGLLLYGDLRESRFEDGKLPSRKIDALDHFQKCFAILKLYHHKVDKSKWEMPTGSNESEAKSWKAIRVDLVVCPYDRFAFALLGWTGSRMFERDLRRYATHEKKMMLDNHALYDLTKKIFLKAKSEEEIFAHLGLEYLEPSERNA

SEQ ID NO: 545 - DNA, 1587 bp, synthetic construct
  misc_feature 1..1587: note = Variant of terminal deoxynucleotidyltransferase
  source 1..1587: mol_type = other DNA
atgcaccatcatcatcatcatggcggtagcggcatgcaccgcattcgtaccatcgattcggacttcgggaagaaacgccagaagaagatggataaccacattagttccatgatctatgaaatcaaatttcacgagtttgtgctgttcattctcgaaaagaaaatgggtgcgacgcgtcgtacttttctgacagatttagcccgcaagaaagggttccgcgtcgagaatgaactgtcagacagcgttacccacatcgtggcagaaaataattcaggatctgacgtattggcttggctgaagacccacaagatggagaagacgacgcaatttgaactgctggatattagctggcttatcgaaagcatgcaggttggtaaaccggtggacaccaaggggaaataccagttgatggaatcgcgtgtcgatagtgcgaacccagatccgacagccggtaccctcaacattctgcctcctactacgaagaccatttctcagtatgcgtgtcaacgccgcaccaccctgaacaaccataatcaacgttttacggacgcactggaaattcttgcggaaaattacgagttcaaacgcaacgatgatacttgtctgacctttatgcgtgctatttccgtgctgaaatgccttccgtttgaggtagttagcctgaaagacacggaaggattgccctggatcggtgatgaagtcaaagggattatggaagaaatcatcgaggtcggtgaatcgctggaagtgcaggccgtgctcaatgatgagcgctatcaaagcttcaaactgtttaagagtgtctttggagtgggggtgaagacagcagacaaatggtaccgtatgggtctgcgcacgctcgaggatgttcgttccagcaagaccctgaagttgaccaagatgcagaaagcgggtctgtgctattatgaagatcttgctgatggcgttacgaaagccgaagctgacgcgatttctctgctggttcaggatgcagtctggactttcgacccggatgcgctggtggagattacgggtggatttcgtcgtgggaaaccttttggtcacgacgttgatctgcttatcacatctccgggagctgagaaagaacaagaagaccagctcctgcagaaagtgaccaatctgtggaagaaacaagggttgttgctgtacggtgatctgcgtgaaagtcgctttgaagatgggaaactcccatcccgcaagatcgatgccctggaccattttcagaaatgctttgctatcctcaaactttatcaccataaagtggacaaaagcaaatgggaaatgccgacgggttcgaacgaaagcgaggccaaaagttggaaagcaattcgcgtagatctggttgtttgtccctacgatcgttttgcgtttgcgttgttgggttggaccggaagccgcatgttcgaacgtgatctgcgccgctacgccacccacgagaagaagatgatgctggacaatcatgcgctgtatgacctgaccaagaaaatctttctcaaagctaaatcggaagaggaaattttcgcacatctggggcttgaatacctggaaccgtccgaacgtaacgca

SEQ ID NO: 546 - protein, 529 aa, synthetic construct
  REGION 1..529: note = Variant of terminal deoxynucleotidyltransferase
MHHHHHHGGSGMHRIRTIDSDFGKKRQKKMDNHISSMIYEIKFHEFVLFILEKKMGATRRTFLTDLARKKGFRVENELSDSVTHIVAENNSGSDVLAWLKTHKMEKTTQFELLDISWLIESMQVGKPVDTKGKYQLMESRVDSANPDPTAGTLNILPPTTKTISQYACQRRTTLNNHNQRFTDALEILAENYEFKRNDDTCLTFMRAISVLKCLPFEVVSLKDTEGLPWIGDEVKGIMEEIIEVGESLEVQAVLNDERYQSFKLFKSVFGVGVKTADKWYRMGLRTLEDVRSSKTLKLTKMQKAGLCYYEDLADGVTKAEADAISLLVQDAVWTFDPDALVEITGGFRRGKPFGHDVDLLITSPGAEKEQEDQLLQKVTNLWKKQGLLLYGDLRESRFEDGKLPSRKIDALDHFQKCFAILKLYHHKVDKSKWEMPTGSNESEAKSWKAIRVDLVVCPYDRFAFALLGWTGSRMFERDLRRYATHEKKMMLDNHALYDLTKKIFLKAKSEEEIFAHLGLEYLEPSERNA

SEQ ID NO: 547 - DNA, 1587 bp, synthetic construct
  misc_feature 1..1587: note = Variant of terminal deoxynucleotidyltransferase
  source 1..1587: mol_type = other DNA
atgcaccatcatcatcatcatggcggtagcggcatgcaccgcattcgtaccatcgattcggacttcgggaagaaacgccagaagaagatggataactgtattagttccatgatctatgaaatcaaatttcacgagtttgtgctgttcattctcgaaaagaaaatgggtgcgacgcgtcgtacttttctgacagatttagcccgcaagaaagggttccgcgtcgagaatgaactgtcagacagcgttacccacatcgtggcagaaaataattcaggatctgacgtattggcttggctgaagacccacaagatggagaagacgacgcaatttgaactgctggatattagctggcttatcgaaagcatgaaagttggtaaaccggtggacaccaaggggaaataccagttgatggaatcgcgtgtcgatagtgcgaacccagatccgacagccggtaccctcaacattctgcctcctactacgaagaccatttctcagtatgcgtgtcaacgccgcaccaccctgaacaaccataatcaacgttttacggacgcactggaaattcttgcggaaaattacgagttcaaacgcaacgatgatacttgtctgacctttatgcgtgctatttccgtgctgaaatgccttccgtttgaggtagttagcctgaaagacacggaaggattgccctggatcggtgatgaagtcaaagggattatggaagaaatcatcgaggtcggtgaatcgctggaagtgcaggccgtgctcaatgatgagcgctatcaaagcttcaaactgtttaagagtgtctttggagtgggggtgaagacagcagacaaatggtaccgtatgggtctgcgcacgctcgaggatgttcgttccagcaagaccctgaagttgaccaagatgcagaaagcgggtctgtgctattatgaagatcttgctgatggcgttacgaaagccgaagctgacgcgatttctctgctggttcaggatgcagtctggactttcgacccggatgcgctggtggagattacgggtggatttcgtcgtgggaaaccttttggtcacgacgttgatctgcttatcacatctccgggagctgagaaagaacaagaagaccagctcctgcagaaagtgaccaatctgtggaagaaacaagggttgttgctgtacggtgatctgcgtgaaagtcgctttgaagatgggaaactcccatcccgcaagatcgatgccctggaccattttcagaaatgctttgctatcctcaaactttatcaccataaagtggacaaaagcaaatgggaaatgccgacgggttcgaacgaaagcgaggccaaaagttggaaagcaattcgcgtagatctggttgtttgtccctacgatcgttttgcgtttgcgttgttgggttggaccggaagccgcatgttcgaacgtgatctgcgccgctacgccacccacgagaagaagatgatgctggacaatcatgcgctgtatgacctgaccaagaaaatctttctcaaagctaaatcggaagaggaaattttcgcacatctggggcttgaatacctggaaccgtccgaacgtaacgca

SEQ ID NO: 548 - protein, 529 aa, synthetic construct
  REGION 1..529: note = Variant of terminal deoxynucleotidyltransferase
MHHHHHHGGSGMHRIRTIDSDFGKKRQKKMDNCISSMIYEIKFHEFVLFILEKKMGATRRTFLTDLARKKGFRVENELSDSVTHIVAENNSGSDVLAWLKTHKMEKTTQFELLDISWLIESMKVGKPVDTKGKYQLMESRVDSANPDPTAGTLNILPPTTKTISQYACQRRTTLNNHNQRFTDALEILAENYEFKRNDDTCLTFMRAISVLKCLPFEVVSLKDTEGLPWIGDEVKGIMEEIIEVGESLEVQAVLNDERYQSFKLFKSVFGVGVKTADKWYRMGLRTLEDVRSSKTLKLTKMQKAGLCYYEDLADGVTKAEADAISLLVQDAVWTFDPDALVEITGGFRRGKPFGHDVDLLITSPGAEKEQEDQLLQKVTNLWKKQGLLLYGDLRESRFEDGKLPSRKIDALDHFQKCFAILKLYHHKVDKSKWEMPTGSNESEAKSWKAIRVDLVVCPYDRFAFALLGWTGSRMFERDLRRYATHEKKMMLDNHALYDLTKKIFLKAKSEEEIFAHLGLEYLEPSERNA

SEQ ID NO: 549 - DNA, 1587 bp, synthetic construct
  misc_feature 1..1587: note = Variant of terminal deoxynucleotidyltransferase
  source 1..1587: mol_type = other DNA
atgcaccatcatcatcatcatggcggtagcggcatgcaccgcattcgtaccatcgattcggacttcgggaagaaacgccagaagaagatggataaccacattagttccatgatctatgaaatcaaatttcacgagtttgtgctgttcattctcgaaaagaaaatgggtactacgcgtcgtacttttctgacagatttagcccgcaagaaagggttccgcgtcgagaatgaactgtcagacagcgttacccacatcgtggcagaaaataattcaggatctgacgtattggcttggctgaagacccacaagatggagaagacgacgcaatttgaactgctggatattagctggcttatcgaaagcatgaaagttggtaaaccggtggacaccaaggggaaataccagttgatggaatcgcgtgtcgatagtgcgaacccagatccgacagccggtaccctcaacattctgcctcctactacgaagaccatttctcagtatgcgtgtcaacgccgcaccaccctgaacaaccataatcaacgttttacggacgcactggaaattcttgcggaaaattacgagttcaaacgcaacgatgatacttgtctgacctttatgcgtgctatttccgtgctgaaatgccttccgtttgaggtagttagcctgaaagacacggaaggattgccctggatcggtgatgaagtcaaagggattatggaagaaatcatcgaggtcggtgaatcgctggaagtgcaggccgtgctcaatgatgagcgctatcaaagcttcaaactgtttaagagtgtctttggagtgggggtgaagacagcagacaaatggtaccgtatgggtctgcgcacgctcgaggatgttcgttccagcaagaccctgaagttgaccaagatgcagaaagcgggtctgtgctattatgaagatcttgctgatggcgttacgaaagccgaagctgacgcgatttctctgctggttcaggatgcagtctggactttcgacccggatgcgctggtggagattacgggtggatttcgtcgtgggaaaccttttggtcacgacgttgatctgcttatcacatctccgggagctgagaaagaacaagaagaccagctcctgcagaaagtgaccaatctgtggaagaaacaagggttgttgctgtacggtgatctgcgtgaaagtcgctttgaagatgggaaactcccatcccgcaagatcgatgccctggaccattttcagaaatgctttgctatcctcaaactttatcaccataaagtggacaaaagcaaatgggaaatgccgacgggttcgaacgaaagcgaggccaaaagttggaaagcaattcgcgtagatctggttgtttgtccctacgatcgttttgcgtttgcgttgttgggttggaccggaagccgcatgttcgaacgtgatctgcgccgctacgccacccacgagaagaagatgatgctggacaatcatgcgctgtatgacctgaccaagaaaatctttctcaaagctaaatcggaagaggaaattttcgcacatctggggcttgaatacctggaaccgtccgaacgtaacgca

SEQ ID NO: 550 - protein, 529 aa, synthetic construct
  REGION 1..529: note = Variant of terminal deoxynucleotidyltransferase
MHHHHHHGGSGMHRIRTIDSDFGKKRQKKMDNHISSMIYEIKFHEFVLFILEKKMGTTRRTFLTDLARKKGFRVENELSDSVTHIVAENNSGSDVLAWLKTHKMEKTTQFELLDISWLIESMKVGKPVDTKGKYQLMESRVDSANPDPTAGTLNILPPTTKTISQYACQRRTTLNNHNQRFTDALEILAENYEFKRNDDTCLTFMRAISVLKCLPFEVVSLKDTEGLPWIGDEVKGIMEEIIEVGESLEVQAVLNDERYQSFKLFKSVFGVGVKTADKWYRMGLRTLEDVRSSKTLKLTKMQKAGLCYYEDLADGVTKAEADAISLLVQDAVWTFDPDALVEITGGFRRGKPFGHDVDLLITSPGAEKEQEDQLLQKVTNLWKKQGLLLYGDLRESRFEDGKLPSRKIDALDHFQKCFAILKLYHHKVDKSKWEMPTGSNESEAKSWKAIRVDLVVCPYDRFAFALLGWTGSRMFERDLRRYATHEKKMMLDNHALYDLTKKIFLKAKSEEEIFAHLGLEYLEPSERNA

SEQ ID NO: 551 - DNA, 1587 bp, synthetic construct
  misc_feature 1..1587: note = Variant of terminal deoxynucleotidyltransferase
  source 1..1587: mol_type = other DNA
atgcaccatcatcatcatcatggcggtagcggcatgcaccgcattcgtaccatcgattcggacttcgggaagaaacgccagaagaagatggataaccacattagttccatgatctatgaaatcaaatttcacgagtttgtgctgttcattctcgaaaagaaaatgggtgcgacgcgtcgtacttttctgacagatttagcccgcaagaaagggttccgcgtcgagaatgaactgtcagacagcgttacccacatcgtggcagaaaataattcaggatctgacgtattggcttggctgaagacccacaagatggagaagacgacgcaatttgaactgctggatattagctggcttatcgaaagcatgaaagttggtaaaccggtggacatgaaggggaaataccagttgatggaatcgcgtgtcgatagtgcgaacccagatccgacagccggtaccctcaacattctgcctcctactacgaagaccatttctcagtatgcgtgtcaacgccgcaccaccctgaacaaccataatcaacgttttacggacgcactggaaattcttgcggaaaattacgagttcaaacgcaacgatgatacttgtctgacctttatgcgtgctatttccgtgctgaaatgccttccgtttgaggtagttagcctgaaagacacggaaggattgccctggatcggtgatgaagtcaaagggattatggaagaaatcatcgaggtcggtgaatcgctggaagtgcaggccgtgctcaatgatgagcgctatcaaagcttcaaactgtttaagagtgtctttggagtgggggtgaagacagcagacaaatggtaccgtatgggtctgcgcacgctcgaggatgttcgttccagcaagaccctgaagttgaccaagatgcagaaagcgggtctgtgctattatgaagatcttgctgatggcgttacgaaagccgaagctgacgcgatttctctgctggttcaggatgcagtctggactttcgacccggatgcgctggtggagattacgggtggatttcgtcgtgggaaaccttttggtcacgacgttgatctgcttatcacatctccgggagctgagaaagaacaagaagaccagctcctgcagaaagtgaccaatctgtggaagaaacaagggttgttgctgtacggtgatctgcgtgaaagtcgctttgaagatgggaaactcccatcccgcaagatcgatgccctggaccattttcagaaatgctttgctatcctcaaactttatcaccataaagtggacaaaagcaaatgggaaatgccgacgggttcgaacgaaagcgaggccaaaagttggaaagcaattcgcgtagatctggttgtttgtccctacgatcgttttgcgtttgcgttgttgggttggaccggaagccgcatgttcgaacgtgatctgcgccgctacgccacccacgagaagaagatgatgctggacaatcatgcgctgtatgacctgaccaagaaaatctttctcaaagctaaatcggaagaggaaattttcgcacatctggggcttgaatacctggaaccgtccgaacgtaacgca

SEQ ID NO: 552 - protein, 529 aa, synthetic construct
  REGION 1..529: note = Variant of terminal deoxynucleotidyltransferase
MHHHHHHGGSGMHRIRTIDSDFGKKRQKKMDNHISSMIYEIKFHEFVLFILEKKMGATRRTFLTDLARKKGFRVENELSDSVTHIVAENNSGSDVLAWLKTHKMEKTTQFELLDISWLIESMKVGKPVDMKGKYQLMESRVDSANPDPTAGTLNILPPTTKTISQYACQRRTTLNNHNQRFTDALEILAENYEFKRNDDTCLTFMRAISVLKCLPFEVVSLKDTEGLPWIGDEVKGIMEEIIEVGESLEVQAVLNDERYQSFKLFKSVFGVGVKTADKWYRMGLRTLEDVRSSKTLKLTKMQKAGLCYYEDLADGVTKAEADAISLLVQDAVWTFDPDALVEITGGFRRGKPFGHDVDLLITSPGAEKEQEDQLLQKVTNLWKKQGLLLYGDLRESRFEDGKLPSRKIDALDHFQKCFAILKLYHHKVDKSKWEMPTGSNESEAKSWKAIRVDLVVCPYDRFAFALLGWTGSRMFERDLRRYATHEKKMMLDNHALYDLTKKIFLKAKSEEEIFAHLGLEYLEPSERNA

SEQ ID NO: 553 - DNA, 1587 bp, synthetic construct
  misc_feature 1..1587: note = Variant of terminal deoxynucleotidyltransferase
  source 1..1587: mol_type = other DNA
atgcaccatcatcatcatcatggcggtagcggcatgcaccgcattcgtaccatcgattcggacttcgggaagaaacgccagaagaagatggataaccacattagttccatgatctatgaaatcaaatttcacgagtttgtgctgttcattctcgaaaagaaaatgggtgcgacgcgtcgtacttttctgacagatttagcccgcaagaaagggttccgcgtcgagaatgaactgtcagacagcgttacccacatcgtggcagaaaataattcaggatctgacgtattggcttggctgaagacccacaagatggagaagacgacgcaatttgaactgctggatattagctggcttatcgaaagcatgaaagttggtaaaccggtggacaccaaggggatgtaccagttgatggaatcgcgtgtcgatagtgcgaacccagatccgacagccggtaccctcaacattctgcctcctactacgaagaccatttctcagtatgcgtgtcaacgccgcaccaccctgaacaaccataatcaacgttttacggacgcactggaaattcttgcggaaaattacgagttcaaacgcaacgatgatacttgtctgacctttatgcgtgctatttccgtgctgaaatgccttccgtttgaggtagttagcctgaaagacacggaaggattgccctggatcggtgatgaagtcaaagggattatggaagaaatcatcgaggtcggtgaatcgctggaagtgcaggccgtgctcaatgatgagcgctatcaaagcttcaaactgtttaagagtgtctttggagtgggggtgaagacagcagacaaatggtaccgtatgggtctgcgcacgctcgaggatgttcgttccagcaagaccctgaagttgaccaagatgcagaaagcgggtctgtgctattatgaagatcttgctgatggcgttacgaaagccgaagctgacgcgatttctctgctggttcaggatgcagtctggactttcgacccggatgcgctggtggagattacgggtggatttcgtcgtgggaaaccttttggtcacgacgttgatctgcttatcacatctccgggagctgagaaagaacaagaagaccagctcctgcagaaagtgaccaatctgtggaagaaacaagggttgttgctgtacggtgatctgcgtgaaagtcgctttgaagatgggaaactcccatcccgcaagatcgatgccctggaccattttcagaaatgctttgctatcctcaaactttatcaccataaagtggacaaaagcaaatgggaaatgccgacgggttcgaacgaaagcgaggccaaaagttggaaagcaattcgcgtagatctggttgtttgtccctacgatcgttttgcgtttgcgttgttgggttggaccggaagccgcatgttcgaacgtgatctgcgccgctacgccacccacgagaagaagatgatgctggacaatcatgcgctgtatgacctgaccaagaaaatctttctcaaagctaaatcggaagaggaaattttcgcacatctggggcttgaatacctggaaccgtccgaacgtaacgca

SEQ ID NO: 554 - protein, 529 aa, synthetic construct
  REGION 1..529: note = Variant of terminal deoxynucleotidyltransferase
MHHHHHHGGSGMHRIRTIDSDFGKKRQKKMDNHISSMIYEIKFHEFVLFILEKKMGATRRTFLTDLARKKGFRVENELSDSVTHIVAENNSGSDVLAWLKTHKMEKTTQFELLDISWLIESMKVGKPVDTKGMYQLMESRVDSANPDPTAGTLNILPPTTKTISQYACQRRTTLNNHNQRFTDALEILAENYEFKRNDDTCLTFMRAISVLKCLPFEVVSLKDTEGLPWIGDEVKGIMEEIIEVGESLEVQAVLNDERYQSFKLFKSVFGVGVKTADKWYRMGLRTLEDVRSSKTLKLTKMQKAGLCYYEDLADGVTKAEADAISLLVQDAVWTFDPDALVEITGGFRRGKPFGHDVDLLITSPGAEKEQEDQLLQKVTNLWKKQGLLLYGDLRESRFEDGKLPSRKIDALDHFQKCFAILKLYHHKVDKSKWEMPTGSNESEAKSWKAIRVDLVVCPYDRFAFALLGWTGSRMFERDLRRYATHEKKMMLDNHALYDLTKKIFLKAKSEEEIFAHLGLEYLEPSERNA

SEQ ID NO: 555 - DNA, 1587 bp, synthetic construct
  misc_feature 1..1587: note = Variant of terminal deoxynucleotidyltransferase
  source 1..1587: mol_type = other DNA
atgcaccatcatcatcatcatggcggtagcggcatgcaccgcattcgtaccatcgattcggacttcgggaagaaacgccagaagaagatggataaccacattagttccatgatctatgaaatcaaatttcacgagtttgtgctgttcattctcgaaaagaaaatgggtgcgacgcgtcgtacttttctgacagatttagcccgcaagaaagggttccgcgtcgagaatgaactgtcagacagcgttacccacatcgtggcagaaaataattcaggatctaatgtattggcttggctgaagacccacaagatggagaagacgacgcaatttgaactgctggatattagctggcttatcgaaagcatgaaagttggtaaaccggtggacaccaaggggaaataccagttgatggaatcgcgtgtcgatagtgcgaacccagatccgacagccggtaccctcaacattctgcctcctactacgaagaccatttctcagtatgcgtgtcaacgccgcaccaccctgaacaaccataatcaacgttttacggacgcactggaaattcttgcggaaaattacgagttcaaacgcaacgatgatacttgtctgacctttatgcgtgctatttccgtgctgaaatgccttccgtttgaggtagttagcctgaaagacacggaaggattgccctggatcggtgatgaagtcaaagggattatggaagaaatcatcgaggtcggtgaatcgctggaagtgcaggccgtgctcaatgatgagcgctatcaaagcttcaaactgtttaagagtgtctttggagtgggggtgaagacagcagacaaatggtaccgtatgggtctgcgcacgctcgaggatgttcgttccagcaagaccctgaagttgaccaagatgcagaaagcgggtctgtgctattatgaagatcttgctgatggcgttacgaaagccgaagctgacgcgatttctctgctggttcaggatgcagtctggactttcgacccggatgcgctggtggagattacgggtggatttcgtcgtgggaaaccttttggtcacgacgttgatctgcttatcacatctccgggagctgagaaagaacaagaagaccagctcctgcagaaagtgaccaatctgtggaagaaacaagggttgttgctgtacggtgatctgcgtgaaagtcgctttgaagatgggaaactcccatcccgcaagatcgatgccctggaccattttcagaaatgctttgctatcctcaaactttatcaccataaagtggacaaaagcaaatgggaaatgccgacgggttcgaacgaaagcgaggccaaaagttggaaagcaattcgcgtagatctggttgtttgtccctacgatcgttttgcgtttgcgttgttgggttggaccggaagccgcatgttcgaacgtgatctgcgccgctacgccacccacgagaagaagatgatgctggacaatcatgcgctgtatgacctgaccaagaaaatctttctcaaagctaaatcggaagaggaaattttcgcacatctggggcttgaatacctggaaccgtccgaacgtaacgca

SEQ ID NO: 556 - protein, 529 aa, synthetic construct
  REGION 1..529: note = Variant of terminal deoxynucleotidyltransferase
MHHHHHHGGSGMHRIRTIDSDFGKKRQKKMDNHISSMIYEIKFHEFVLFILEKKMGATRRTFLTDLARKKGFRVENELSDSVTHIVAENNSGSNVLAWLKTHKMEKTTQFELLDISWLIESMKVGKPVDTKGKYQLMESRVDSANPDPTAGTLNILPPTTKTISQYACQRRTTLNNHNQRFTDALEILAENYEFKRNDDTCLTFMRAISVLKCLPFEVVSLKDTEGLPWIGDEVKGIMEEIIEVGESLEVQAVLNDERYQSFKLFKSVFGVGVKTADKWYRMGLRTLEDVRSSKTLKLTKMQKAGLCYYEDLADGVTKAEADAISLLVQDAVWTFDPDALVEITGGFRRGKPFGHDVDLLITSPGAEKEQEDQLLQKVTNLWKKQGLLLYGDLRESRFEDGKLPSRKIDALDHFQKCFAILKLYHHKVDKSKWEMPTGSNESEAKSWKAIRVDLVVCPYDRFAFALLGWTGSRMFERDLRRYATHEKKMMLDNHALYDLTKKIFLKAKSEEEIFAHLGLEYLEPSERNA

SEQ ID NO: 557 - DNA, 1587 bp, synthetic construct
  misc_feature 1..1587: note = Variant of terminal deoxynucleotidyltransferase
  source 1..1587: mol_type = other DNA
atgcaccatcatcatcatcatggcggtagcggcatgcaccgcattcgtaccatcgattcggacttcacgaagaaacgccagaagaagatggataaccacattagttccatgatctatgaaatcaaatttcacgagtttgtgctgttcattctcgaaaagaaaatgggtgcgacgcgtcgtacttttctgacagatttagcccgcaagaaagggttccgcgtcgagaatgaactgtcagacagcgttacccacatcgtggcagaaaataattcaggatctgacgtattggcttggctgaagacccacaagatggagaagacgacgcaatttgaactgctggatattagctggcttatcgaaagcatgaaagttggtaaaccggtggacaccaaggggaaataccagttgatggaatcgcgtgtcgatagtgcgaacccagatccgacagccggtaccctcaacattctgcctcctactacgaagaccatttctcagtatgcgtgtcaacgccgcaccaccctgaacaaccataatcaacgttttacggacgcactggaaattcttgcggaaaattacgagttcaaacgcaacgatgatacttgtctgacctttatgcgtgctatttccgtgctgaaatgccttccgtttgaggtagttagcctgaaagacacggaaggattgccctggatcggtgatgaagtcaaagggattatggaagaaatcatcgaggtcggtgaatcgctggaagtgcaggccgtgctcaatgatgagcgctatcaaagcttcaaactgtttaagagtgtctttggagtgggggtgaagacagcagacaaatggtaccgtatgggtctgcgcacgctcgaggatgttcgttccagcaagaccctgaagttgaccaagatgcagaaagcgggtctgtgctattatgaagatcttgctgatggcgttacgaaagccgaagctgacgcgatttctctgctggttcaggatgcagtctggactttcgacccggatgcgctggtggagattacgggtggatttcgtcgtgggaaaccttttggtcacgacgttgatctgcttatcacatctccgggagctgagaaagaacaagaagaccagctcctgcagaaagtgaccaatctgtggaagaaacaagggttgttgctgtacggtgatctgcgtgaaagtcgctttgaagatgggaaactcccatcccgcaagatcgatgccctggaccattttcagaaatgctttgctatcctcaaactttatcaccataaagtggacaaaagcaaatgggaaatgccgacgggttcgaacgaaagcgaggccaaaagttggaaagcaattcgcgtagatctggttgtttgtccctacgatcgttttgcgtttgcgttgttgggttggaccggaagccgcatgttcgaacgtgatctgcgccgctacgccacccacgagaagaagatgatgctggacaatcatgcgctgtatgacctgaccaagaaaatctttctcaaagctaaatcggaagaggaaattttcgcacatctggggcttgaatacctggaaccgtccgaacgtaacgca

SEQ ID NO: 558 - protein, 529 aa, synthetic construct
  REGION 1..529: note = Variant of terminal deoxynucleotidyltransferase
MHHHHHHGGSGMHRIRTIDSDFTKKRQKKMDNHISSMIYEIKFHEFVLFILEKKMGATRRTFLTDLARKKGFRVENELSDSVTHIVAENNSGSDVLAWLKTHKMEKTTQFELLDISWLIESMKVGKPVDTKGKYQLMESRVDSANPDPTAGTLNILPPTTKTISQYACQRRTTLNNHNQRFTDALEILAENYEFKRNDDTCLTFMRAISVLKCLPFEVVSLKDTEGLPWIGDEVKGIMEEIIEVGESLEVQAVLNDERYQSFKLFKSVFGVGVKTADKWYRMGLRTLEDVRSSKTLKLTKMQKAGLCYYEDLADGVTKAEADAISLLVQDAVWTFDPDALVEITGGFRRGKPFGHDVDLLITSPGAEKEQEDQLLQKVTNLWKKQGLLLYGDLRESRFEDGKLPSRKIDALDHFQKCFAILKLYHHKVDKSKWEMPTGSNESEAKSWKAIRVDLVVCPYDRFAFALLGWTGSRMFERDLRRYATHEKKMMLDNHALYDLTKKIFLKAKSEEEIFAHLGLEYLEPSERNA

SEQ ID NO: 559 - DNA, 1587 bp, synthetic construct
  misc_feature 1..1587: note = Variant of terminal deoxynucleotidyltransferase
  source 1..1587: mol_type = other DNA
atgcaccatcatcatcatcatggcggtagcggcatgcaccgcattcgtaccatcgattcggacttcgggaagaaacgccagaagaagatggataaccacattagttccatgatctatgaaatcaaatttcacgagtttgtgctgttcattctcgaaaagaaaatgggtgcgacgcgtcgtacttttctgacagatttagcccgcaagaaagggttccgcgtcgagaatgaactgtcagacagcgttacccacatcgtggcagaaaataattcaggatctgacgtattggcttggctgaagacccacaagatgtggaagacgacgcaatttgaactgctggatattagctggcttatcgaaagcatgaaagttggtaaaccggtggacaccaaggggaaataccagttgatggaatcgcgtgtcgatagtgcgaacccagatccgacagccggtaccctcaacattctgcctcctactacgaagaccatttctcagtatgcgtgtcaacgccgcaccaccctgaacaaccataatcaacgttttacggacgcactggaaattcttgcggaaaattacgagttcaaacgcaacgatgatacttgtctgacctttatgcgtgctatttccgtgctgaaatgccttccgtttgaggtagttagcctgaaagacacggaaggattgccctggatcggtgatgaagtcaaagggattatggaagaaatcatcgaggtcggtgaatcgctggaagtgcaggccgtgctcaatgatgagcgctatcaaagcttcaaactgtttaagagtgtctttggagtgggggtgaagacagcagacaaatggtaccgtatgggtctgcgcacgctcgaggatgttcgttccagcaagaccctgaagttgaccaagatgcagaaagcgggtctgtgctattatgaagatcttgctgatggcgttacgaaagccgaagctgacgcgatttctctgctggttcaggatgcagtctggactttcgacccggatgcgctggtggagattacgggtggatttcgtcgtgggaaaccttttggtcacgacgttgatctgcttatcacatctccgggagctgagaaagaacaagaagaccagctcctgcagaaagtgaccaatctgtggaagaaacaagggttgttgctgtacggtgatctgcgtgaaagtcgctttgaagatgggaaactcccatcccgcaagatcgatgccctggaccattttcagaaatgctttgctatcctcaaactttatcaccataaagtggacaaaagcaaatgggaaatgccgacgggttcgaacgaaagcgaggccaaaagttggaaagcaattcgcgtagatctggttgtttgtccctacgatcgttttgcgtttgcgttgttgggttggaccggaagccgcatgttcgaacgtgatctgcgccgctacgccacccacgagaagaagatgatgctggacaatcatgcgctgtatgacctgaccaagaaaatctttctcaaagctaaatcggaagaggaaattttcgcacatctggggcttgaatacctggaaccgtccgaacgtaacgca

SEQ ID NO: 560 - protein, 529 aa, synthetic construct
  REGION 1..529: note = Variant of terminal deoxynucleotidyltransferase
MHHHHHHGGSGMHRIRTIDSDFGKKRQKKMDNHISSMIYEIKFHEFVLFILEKKMGATRRTFLTDLARKKGFRVENELSDSVTHIVAENNSGSDVLAWLKTHKMWKTTQFELLDISWLIESMKVGKPVDTKGKYQLMESRVDSANPDPTAGTLNILPPTTKTISQYACQRRTTLNNHNQRFTDALEILAENYEFKRNDDTCLTFMRAISVLKCLPFEVVSLKDTEGLPWIGDEVKGIMEEIIEVGESLEVQAVLNDERYQSFKLFKSVFGVGVKTADKWYRMGLRTLEDVRSSKTLKLTKMQKAGLCYYEDLADGVTKAEADAISLLVQDAVWTFDPDALVEITGGFRRGKPFGHDVDLLITSPGAEKEQEDQLLQKVTNLWKKQGLLLYGDLRESRFEDGKLPSRKIDALDHFQKCFAILKLYHHKVDKSKWEMPTGSNESEAKSWKAIRVDLVVCPYDRFAFALLGWTGSRMFERDLRRYATHEKKMMLDNHALYDLTKKIFLKAKSEEEIFAHLGLEYLEPSERNA

SEQ ID NO: 561 - DNA, 1587 bp, synthetic construct
  misc_feature 1..1587: note = Variant of terminal deoxynucleotidyltransferase
  source 1..1587: mol_type = other DNA
atgcaccatcatcatcatcatggcggtagcggcatgcaccgcattcgtaccatcgattcggacttcgggaagaaacgccagaagaagatggataaccacattagttccatgatctatgaaatcaaatttcacgagtttgtgctgttcattctcgaaaagaaaatgggtgcgacgcgtcgtacttttctgacagatttagcccgcaagaaagggttccgcgtcgagaatgaactgtcagacagcgttacccacatcgtggcagaaaataattcaggatctgacgtattggcttggctgaagacccacaagatggagaagacgacgcaatttgaactgctggatattagctggcttatcgaaagcatgaaagttggtaaaccggtggacaccaagagtaaataccagttgatggaatcgcgtgtcgatagtgcgaacccagatccgacagccggtaccctcaacattctgcctcctactacgaagaccatttctcagtatgcgtgtcaacgccgcaccaccctgaacaaccataatcaacgttttacggacgcactggaaattcttgcggaaaattacgagttcaaacgcaacgatgatacttgtctgacctttatgcgtgctatttccgtgctgaaatgccttccgtttgaggtagttagcctgaaagacacggaaggattgccctggatcggtgatgaagtcaaagggattatggaagaaatcatcgaggtcggtgaatcgctggaagtgcaggccgtgctcaatgatgagcgctatcaaagcttcaaactgtttaagagtgtctttggagtgggggtgaagacagcagacaaatggtaccgtatgggtctgcgcacgctcgaggatgttcgttccagcaagaccctgaagttgaccaagatgcagaaagcgggtctgtgctattatgaagatcttgctgatggcgttacgaaagccgaagctgacgcgatttctctgctggttcaggatgcagtctggactttcgacccggatgcgctggtggagattacgggtggatttcgtcgtgggaaaccttttggtcacgacgttgatctgcttatcacatctccgggagctgagaaagaacaagaagaccagctcctgcagaaagtgaccaatctgtggaagaaacaagggttgttgctgtacggtgatctgcgtgaaagtcgctttgaagatgggaaactcccatcccgcaagatcgatgccctggaccattttcagaaatgctttgctatcctcaaactttatcaccataaagtggacaaaagcaaatgggaaatgccgacgggttcgaacgaaagcgaggccaaaagttggaaagcaattcgcgtagatctggttgtttgtccctacgatcgttttgcgtttgcgttgttgggttggaccggaagccgcatgttcgaacgtgatctgcgccgctacgccacccacgagaagaagatgatgctggacaatcatgcgctgtatgacctgaccaagaaaatctttctcaaagctaaatcggaagaggaaattttcgcacatctggggcttgaatacctggaaccgtccgaacgtaacgca

SEQ ID NO: 562 - protein, 529 aa, synthetic construct
  REGION 1..529: note = Variant of terminal deoxynucleotidyltransferase
MHHHHHHGGSGMHRIRTIDSDFGKKRQKKMDNHISSMIYEIKFHEFVLFILEKKMGATRRTFLTDLARKKGFRVENELSDSVTHIVAENNSGSDVLAWLKTHKMEKTTQFELLDISWLIESMKVGKPVDTKSKYQLMESRVDSANPDPTAGTLNILPPTTKTISQYACQRRTTLNNHNQRFTDALEILAENYEFKRNDDTCLTFMRAISVLKCLPFEVVSLKDTEGLPWIGDEVKGIMEEIIEVGESLEVQAVLNDERYQSFKLFKSVFGVGVKTADKWYRMGLRTLEDVRSSKTLKLTKMQKAGLCYYEDLADGVTKAEADAISLLVQDAVWTFDPDALVEITGGFRRGKPFGHDVDLLITSPGAEKEQEDQLLQKVTNLWKKQGLLLYGDLRESRFEDGKLPSRKIDALDHFQKCFAILKLYHHKVDKSKWEMPTGSNESEAKSWKAIRVDLVVCPYDRFAFALLGWTGSRMFERDLRRYATHEKKMMLDNHALYDLTKKIFLKAKSEEEIFAHLGLEYLEPSERNA

SEQ ID NO: 563 - DNA, 1587 bp, synthetic construct
  misc_feature 1..1587: note = Variant of terminal deoxynucleotidyltransferase
  source 1..1587: mol_type = other DNA
atgcaccatcatcatcatcatggcggtagcggcatgcaccgcattcgtaccatcgattcggacttcgggaagaaacgccagaagaagatggataaccacattagttccatgatctatgaaatcaaatttcacgagtttgtgctgttcattctcgaaaagaaaatgggtgcgacgcgtcgtacttttctgacagatttagcccgcaagaaagggttccgcgtcgagaattgtctgtcagacagcgttacccacatcgtggcagaaaataattcaggatctgacgtattggcttggctgaagacccacaagatggagaagacgacgcaatttgaactgctggatattagctggcttatcgaaagcatgaaagttggtaaaccggtggacaccaaggggaaataccagttgatggaatcgcgtgtcgatagtgcgaacccagatccgacagccggtaccctcaacattctgcctcctactacgaagaccatttctcagtatgcgtgtcaacgccgcaccaccctgaacaaccataatcaacgttttacggacgcactggaaattcttgcggaaaattacgagttcaaacgcaacgatgatacttgtctgacctttatgcgtgctatttccgtgctgaaatgccttccgtttgaggtagttagcctgaaagacacggaaggattgccctggatcggtgatgaagtcaaagggattatggaagaaatcatcgaggtcggtgaatcgctggaagtgcaggccgtgctcaatgatgagcgctatcaaagcttcaaactgtttaagagtgtctttggagtgggggtgaagacagcagacaaatggtaccgtatgggtctgcgcacgctcgaggatgttcgttccagcaagaccctgaagttgaccaagatgcagaaagcgggtctgtgctattatgaagatcttgctgatggcgttacgaaagccgaagctgacgcgatttctctgctggttcaggatgcagtctggactttcgacccggatgcgctggtggagattacgggtggatttcgtcgtgggaaaccttttggtcacgacgttgatctgcttatcacatctccgggagctgagaaagaacaagaagaccagctcctgcagaaagtgaccaatctgtggaagaaacaagggttgttgctgtacggtgatctgcgtgaaagtcgctttgaagatgggaaactcccatcccgcaagatcgatgccctggaccattttcagaaatgctttgctatcctcaaactttatcaccataaagtggacaaaagcaaatgggaaatgccgacgggttcgaacgaaagcgaggccaaaagttggaaagcaattcgcgtagatctggttgtttgtccctacgatcgttttgcgtttgcgttgttgggttggaccggaagccgcatgttcgaacgtgatctgcgccgctacgccacccacgagaagaagatgatgctggacaatcatgcgctgtatgacctgaccaagaaaatctttctcaaagctaaatcggaagaggaaattttcgcacatctggggcttgaatacctggaaccgtccgaacgtaacgca

SEQ ID NO: 564 - protein, 529 aa, synthetic construct
  REGION 1..529: note = Variant of terminal deoxynucleotidyltransferase
MHHHHHHGGSGMHRIRTIDSDFGKKRQKKMDNHISSMIYEIKFHEFVLFILEKKMGATRRTFLTDLARKKGFRVENCLSDSVTHIVAENNSGSDVLAWLKTHKMEKTTQFELLDISWLIESMKVGKPVDTKGKYQLMESRVDSANPDPTAGTLNILPPTTKTISQYACQRRTTLNNHNQRFTDALEILAENYEFKRNDDTCLTFMRAISVLKCLPFEVVSLKDTEGLPWIGDEVKGIMEEIIEVGESLEVQAVLNDERYQSFKLFKSVFGVGVKTADKWYRMGLRTLEDVRSSKTLKLTKMQKAGLCYYEDLADGVTKAEADAISLLVQDAVWTFDPDALVEITGGFRRGKPFGHDVDLLITSPGAEKEQEDQLLQKVTNLWKKQGLLLYGDLRESRFEDGKLPSRKIDALDHFQKCFAILKLYHHKVDKSKWEMPTGSNESEAKSWKAIRVDLVVCPYDRFAFALLGWTGSRMFERDLRRYATHEKKMMLDNHALYDLTKKIFLKAKSEEEIFAHLGLEYLEPSERNA

SEQ ID NO: 565 - DNA, 1587 bp, synthetic construct
  misc_feature 1..1587: note = Variant of terminal deoxynucleotidyltransferase
  source 1..1587: mol_type = other DNA
atgcaccatcatcatcatcatggcggtagcggcatgcaccgcattcgtaccatcgattcggacttcgggaagaaacgccagaagaagatggataaccacattagttccatgatctatgaaatcaaatttcacgagtttgtgctgttcattctcgaaaagaaaatgggtgcgacgcgtcgtacttttctgacagatttagcccgcaagaaagggttccgcgtcgagaatgaactgtcagacagcgttacccacatcgtggcagaaaataattcaggatctgacgtattggcttggctgaagacccacaagatggagaagacgacgcaatttgaactgctggatattagctggcttatcgaaagcatgaaaagtggtaaaccggtggacaccaaggggaaataccagttgatggaatcgcgtgtcgatagtgcgaacccagatccgacagccggtaccctcaacattctgcctcctactacgaagaccatttctcagtatgcgtgtcaacgccgcaccaccctgaacaaccataatcaacgttttacggacgcactggaaattcttgcggaaaattacgagttcaaacgcaacgatgatacttgtctgacctttatgcgtgctatttccgtgctgaaatgccttccgtttgaggtagttagcctgaaagacacggaaggattgccctggatcggtgatgaagtcaaagggattatggaagaaatcatcgaggtcggtgaatcgctggaagtgcaggccgtgctcaatgatgagcgctatcaaagcttcaaactgtttaagagtgtctttggagtgggggtgaagacagcagacaaatggtaccgtatgggtctgcgcacgctcgaggatgttcgttccagcaagaccctgaagttgaccaagatgcagaaagcgggtctgtgctattatgaagatcttgctgatggcgttacgaaagccgaagctgacgcgatttctctgctggttcaggatgcagtctggactttcgacccggatgcgctggtggagattacgggtggatttcgtcgtgggaaaccttttggtcacgacgttgatctgcttatcacatctccgggagctgagaaagaacaagaagaccagctcctgcagaaagtgaccaatctgtggaagaaacaagggttgttgctgtacggtgatctgcgtgaaagtcgctttgaagatgggaaactcccatcccgcaagatcgatgccctggaccattttcagaaatgctttgctatcctcaaactttatcaccataaagtggacaaaagcaaatgggaaatgccgacgggttcgaacgaaagcgaggccaaaagttggaaagcaattcgcgtagatctggttgtttgtccctacgatcgttttgcgtttgcgttgttgggttggaccggaagccgcatgttcgaacgtgatctgcgccgctacgccacccacgagaagaagatgatgctggacaatcatgcgctgtatgacctgaccaagaaaatctttctcaaagctaaatcggaagaggaaattttcgcacatctggggcttgaatacctggaaccgtccgaacgtaacgca

SEQ ID NO: 566 - protein, 529 aa, synthetic construct
  REGION 1..529: note = Variant of terminal deoxynucleotidyltransferase
MHHHHHHGGSGMHRIRTIDSDFGKKRQKKMDNHISSMIYEIKFHEFVLFILEKKMGATRRTFLTDLARKKGFRVENELSDSVTHIVAENNSGSDVLAWLKTHKMEKTTQFELLDISWLIESMKSGKPVDTKGKYQLMESRVDSANPDPTAGTLNILPPTTKTISQYACQRRTTLNNHNQRFTDALEILAENYEFKRNDDTCLTFMRAISVLKCLPFEVVSLKDTEGLPWIGDEVKGIMEEIIEVGESLEVQAVLNDERYQSFKLFKSVFGVGVKTADKWYRMGLRTLEDVRSSKTLKLTKMQKAGLCYYEDLADGVTKAEADAISLLVQDAVWTFDPDALVEITGGFRRGKPFGHDVDLLITSPGAEKEQEDQLLQKVTNLWKKQGLLLYGDLRESRFEDGKLPSRKIDALDHFQKCFAILKLYHHKVDKSKWEMPTGSNESEAKSWKAIRVDLVVCPYDRFAFALLGWTGSRMFERDLRRYATHEKKMMLDNHALYDLTKKIFLKAKSEEEIFAHLGLEYLEPSERNA

SEQ ID NO: 567 - DNA, 1587 bp, synthetic construct
  misc_feature 1..1587: note = Variant of terminal deoxynucleotidyltransferase
  source 1..1587: mol_type = other DNA
atgcaccatcatcatcatcatggcggtagcggcatgcaccgcattcgtaccatcgattcggacttcgggaagaaacgccagaagaagatggataaccacattagttccatgatctatgaaatcaaatttcacgagtttgtgctgttcattctcgaaaagaaaatgggtgcgacgcgtcgtacttttctgacagatttagcccgcaagaaagggttccgcgtcgagaattctctgtcagacagcgttacccacatcgtggcagaaaataattcaggatctgacgtattggcttggctgaagacccacaagatggagaagacgacgcaatttgaactgctggatattagctggcttatcgaaagcatgaaagttggtaaaccggtggacaccaaggggaaataccagttgatggaatcgcgtgtcgatagtgcgaacccagatccgacagccggtaccctcaacattctgcctcctactacgaagaccatttctcagtatgcgtgtcaacgccgcaccaccctgaacaaccataatcaacgttttacggacgcactggaaattcttgcggaaaattacgagttcaaacgcaacgatgatacttgtctgacctttatgcgtgctatttccgtgctgaaatgccttccgtttgaggtagttagcctgaaagacacggaaggattgccctggatcggtgatgaagtcaaagggattatggaagaaatcatcgaggtcggtgaatcgctggaagtgcaggccgtgctcaatgatgagcgctatcaaagcttcaaactgtttaagagtgtctttggagtgggggtgaagacagcagacaaatggtaccgtatgggtctgcgcacgctcgaggatgttcgttccagcaagaccctgaagttgaccaagatgcagaaagcgggtctgtgctattatgaagatcttgctgatggcgttacgaaagccgaagctgacgcgatttctctgctggttcaggatgcagtctggactttcgacccggatgcgctggtggagattacgggtggatttcgtcgtgggaaaccttttggtcacgacgttgatctgcttatcacatctccgggagctgagaaagaacaagaagaccagctcctgcagaaagtgaccaatctgtggaagaaacaagggttgttgctgtacggtgatctgcgtgaaagtcgctttgaagatgggaaactcccatcccgcaagatcgatgccctggaccattttcagaaatgctttgctatcctcaaactttatcaccataaagtggacaaaagcaaatgggaaatgccgacgggttcgaacgaaagcgaggccaaaagttggaaagcaattcgcgtagatctggttgtttgtccctacgatcgttttgcgtttgcgttgttgggttggaccggaagccgcatgttcgaacgtgatctgcgccgctacgccacccacgagaagaagatgatgctggacaatcatgcgctgtatgacctgaccaagaaaatctttctcaaagctaaatcggaagaggaaattttcgcacatctggggcttgaatacctggaaccgtccgaacgtaacgca

SEQ ID NO: 568 - protein, 529 aa, synthetic construct
  REGION 1..529: note = Variant of terminal deoxynucleotidyltransferase
MHHHHHHGGSGMHRIRTIDSDFGKKRQKKMDNHISSMIYEIKFHEFVLFILEKKMGATRRTFLTDLARKKGFRVENSLSDSVTHIVAENNSGSDVLAWLKTHKMEKTTQFELLDISWLIESMKVGKPVDTKGKYQLMESRVDSANPDPTAGTLNILPPTTKTISQYACQRRTTLNNHNQRFTDALEILAENYEFKRNDDTCLTFMRAISVLKCLPFEVVSLKDTEGLPWIGDEVKGIMEEIIEVGESLEVQAVLNDERYQSFKLFKSVFGVGVKTADKWYRMGLRTLEDVRSSKTLKLTKMQKAGLCYYEDLADGVTKAEADAISLLVQDAVWTFDPDALVEITGGFRRGKPFGHDVDLLITSPGAEKEQEDQLLQKVTNLWKKQGLLLYGDLRESRFEDGKLPSRKIDALDHFQKCFAILKLYHHKVDKSKWEMPTGSNESEAKSWKAIRVDLVVCPYDRFAFALLGWTGSRMFERDLRRYATHEKKMMLDNHALYDLTKKIFLKAKSEEEIFAHLGLEYLEPSERNA

SEQ ID NO: 569 - DNA, 1587 bp, synthetic construct
  misc_feature 1..1587: note = Variant of terminal deoxynucleotidyltransferase
  source 1..1587: mol_type = other DNA
atgcaccatcatcatcatcatggcggtagcggcatgcaccgcattcgtaccatcgattcggacttcgggaagaaacgccagaagaagatggataaccacattagttccatgatctatgaaatcaaatttcacgagtttgtgctgttcattctcgaaaagaaaatgggtgcgacgcgtcgtacttttctgacagatttagcccgcaagaaagggttccgcgtcgagaatgaactgtcagacagcgttacccacatcgtggcagaaaataattcaggatctgacgtattggcttggctgaagacccacaagatggagaagacgacgcaatttgaactgctggatattagctggcttatcgaaagcatgaaagttggtaaaccggtggacaccaaggggaaatacaagttgatggaatcgcgtgtcgatagtgcgaacccagatccgacagccggtaccctcaacattctgcctcctactacgaagaccatttctcagtatgcgtgtcaacgccgcaccaccctgaacaaccataatcaacgttttacggacgcactggaaattcttgcggaaaattacgagttcaaacgcaacgatgatacttgtctgacctttatgcgtgctatttccgtgctgaaatgccttccgtttgaggtagttagcctgaaagacacggaaggattgccctggatcggtgatgaagtcaaagggattatggaagaaatcatcgaggtcggtgaatcgctggaagtgcaggccgtgctcaatgatgagcgctatcaaagcttcaaactgtttaagagtgtctttggagtgggggtgaagacagcagacaaatggtaccgtatgggtctgcgcacgctcgaggatgttcgttccagcaagaccctgaagttgaccaagatgcagaaagcgggtctgtgctattatgaagatcttgctgatggcgttacgaaagccgaagctgacgcgatttctctgctggttcaggatgcagtctggactttcgacccggatgcgctggtggagattacgggtggatttcgtcgtgggaaaccttttggtcacgacgttgatctgcttatcacatctccgggagctgagaaagaacaagaagaccagctcctgcagaaagtgaccaatctgtggaagaaacaagggttgttgctgtacggtgatctgcgtgaaagtcgctttgaagatgggaaactcccatcccgcaagatcgatgccctggaccattttcagaaatgctttgctatcctcaaactttatcaccataaagtggacaaaagcaaatgggaaatgccgacgggttcgaacgaaagcgaggccaaaagttggaaagcaattcgcgtagatctggttgtttgtccctacgatcgttttgcgtttgcgttgttgggttggaccggaagccgcatgttcgaacgtgatctgcgccgctacgccacccacgagaagaagatgatgctggacaatcatgcgctgtatgacctgaccaagaaaatctttctcaaagctaaatcggaagaggaaattttcgcacatctggggcttgaatacctggaaccgtccgaacgtaacgca

SEQ ID NO: 570 - protein, 529 aa, synthetic construct
  REGION 1..529: note = Variant of terminal deoxynucleotidyltransferase
MHHHHHHGGSGMHRIRTIDSDFGKKRQKKMDNHISSMIYEIKFHEFVLFILEKKMGATRRTFLTDLARKKGFRVENELSDSVTHIVAENNSGSDVLAWLKTHKMEKTTQFELLDISWLIESMKVGKPVDTKGKYKLMESRVDSANPDPTAGTLNILPPTTKTISQYACQRRTTLNNHNQRFTDALEILAENYEFKRNDDTCLTFMRAISVLKCLPFEVVSLKDTEGLPWIGDEVKGIMEEIIEVGESLEVQAVLNDERYQSFKLFKSVFGVGVKTADKWYRMGLRTLEDVRSSKTLKLTKMQKAGLCYYEDLADGVTKAEADAISLLVQDAVWTFDPDALVEITGGFRRGKPFGHDVDLLITSPGAEKEQEDQLLQKVTNLWKKQGLLLYGDLRESRFEDGKLPSRKIDALDHFQKCFAILKLYHHKVDKSKWEMPTGSNESEAKSWKAIRVDLVVCPYDRFAFALLGWTGSRMFERDLRRYATHEKKMMLDNHALYDLTKKIFLKAKSEEEIFAHLGLEYLEPSERNA

SEQ ID NO: 571 - DNA, 1587 bp, synthetic construct
  misc_feature 1..1587: note = Variant of terminal deoxynucleotidyltransferase
  source 1..1587: mol_type = other DNA
atgcaccatcatcatcatcatggcggtagcggcatgcaccgcattcgtaccatcgattcggacttcgggaagaaacgccagaagaagatggataaccacattcattccatgatctatgaaatcaaatttcacgagtttgtgctgttcattctcgaaaagaaaatgggtgcgacgcgtcgtacttttctgacagatttagcccgcaagaaagggttccgcgtcgagaatgaactgtcagacagcgttacccacatcgtggcagaaaataattcaggatctgacgtattggcttggctgaagacccacaagatggagaagacgacgcaatttgaactgctggatattagctggcttatcgaaagcatgaaagttggtaaaccggtggacaccaaggggaaataccagttgatggaatcgcgtgtcgatagtgcgaacccagatccgacagccggtaccctcaacattctgcctcctactacgaagaccatttctcagtatgcgtgtcaacgccgcaccaccctgaacaaccataatcaacgttttacggacgcactggaaattcttgcggaaaattacgagttcaaacgcaacgatgatacttgtctgacctttatgcgtgctatttccgtgctgaaatgccttccgtttgaggtagttagcctgaaagacacggaaggattgccctggatcggtgatgaagtcaaagggattatggaagaaatcatcgaggtcggtgaatcgctggaagtgcaggccgtgctcaatgatgagcgctatcaaagcttcaaactgtttaagagtgtctttggagtgggggtgaagacagcagacaaatggtaccgtatgggtctgcgcacgctcgaggatgttcgttccagcaagaccctgaagttgaccaagatgcagaaagcgggtctgtgctattatgaagatcttgctgatggcgttacgaaagccgaagctgacgcgatttctctgctggttcaggatgcagtctggactttcgacccggatgcgctggtggagattacgggtggatttcgtcgtgggaaaccttttggtcacgacgttgatctgcttatcacatctccgggagctgagaaagaacaagaagaccagctcctgcagaaagtgaccaatctgtggaagaaacaagggttgttgctgtacggtgatctgcgtgaaagtcgctttgaagatgggaaactcccatcccgcaagatcgatgccctggaccattttcagaaatgctttgctatcctcaaactttatcaccataaagtggacaaaagcaaatgggaaatgccgacgggttcgaacgaaagcgaggccaaaagttggaaagcaattcgcgtagatctggttgtttgtccctacgatcgttttgcgtttgcgttgttgggttggaccggaagccgcatgttcgaacgtgatctgcgccgctacgccacccacgagaagaagatgatgctggacaatcatgcgctgtatgacctgaccaagaaaatctttctcaaagctaaatcggaagaggaaattttcgcacatctggggcttgaatacctggaaccgtccgaacgtaacgca

SEQ ID NO: 572 - protein, 529 aa, synthetic construct
  REGION 1..529: note = Variant of terminal deoxynucleotidyltransferase
MHHHHHHGGSGMHRIRTIDSDFGKKRQKKMDNHIHSMIYEIKFHEFVLFILEKKMGATRRTFLTDLARKKGFRVENELSDSVTHIVAENNSGSDVLAWLKTHKMEKTTQFELLDISWLIESMKVGKPVDTKGKYQLMESRVDSANPDPTAGTLNILPPTTKTISQYACQRRTTLNNHNQRFTDALEILAENYEFKRNDDTCLTFMRAISVLKCLPFEVVSLKDTEGLPWIGDEVKGIMEEIIEVGESLEVQAVLNDERYQSFKLFKSVFGVGVKTADKWYRMGLRTLEDVRSSKTLKLTKMQKAGLCYYEDLADGVTKAEADAISLLVQDAVWTFDPDALVEITGGFRRGKPFGHDVDLLITSPGAEKEQEDQLLQKVTNLWKKQGLLLYGDLRESRFEDGKLPSRKIDALDHFQKCFAILKLYHHKVDKSKWEMPTGSNESEAKSWKAIRVDLVVCPYDRFAFALLGWTGSRMFERDLRRYATHEKKMMLDNHALYDLTKKIFLKAKSEEEIFAHLGLEYLEPSERNA

SEQ ID NO: 573 - DNA, 1587 bp, synthetic construct
  misc_feature 1..1587: note = Variant of terminal deoxynucleotidyltransferase
  source 1..1587: mol_type = other DNA
atgcaccatcatcatcatcatggcggtagcggcatgcaccgcattcgtaccatcgattcggacttcgggaagaaacgccagaagaagatggataaccacattagttccatgatctatgaaatcaaatttcacgagtttgtgctgttcattctcgaaaagaaaatgggtgcgacgcgtcgtacttttctgacagatttagcccgcaagaaagggttccgcgtcgagaatgaactgtcagacagcgttacccacatcgtggcagaaaataattcaggatctgacgtattggcttggctgaagacccacaagatggagaagacgacgcaatttgaactgctggatattagctggcttatcgaaagcatgaaagttggtaaaccggtggacaccaaggggaaaatgcagttgatggaatcgcgtgtcgatagtgcgaacccagatccgacagccggtaccctcaacattctgcctcctactacgaagaccatttctcagtatgcgtgtcaacgccgcaccaccctgaacaaccataatcaacgttttacggacgcactggaaattcttgcggaaaattacgagttcaaacgcaacgatgatacttgtctgacctttatgcgtgctatttccgtgctgaaatgccttccgtttgaggtagttagcctgaaagacacggaaggattgccctggatcggtgatgaagtcaaagggattatggaagaaatcatcgaggtcggtgaatcgctggaagtgcaggccgtgctcaatgatgagcgctatcaaagcttcaaactgtttaagagtgtctttggagtgggggtgaagacagcagacaaatggtaccgtatgggtctgcgcacgctcgaggatgttcgttccagcaagaccctgaagttgaccaagatgcagaaagcgggtctgtgctattatgaagatcttgctgatggcgttacgaaagccgaagctgacgcgatttctctgctggttcaggatgcagtctggactttcgacccggatgcgctggtggagattacgggtggatttcgtcgtgggaaaccttttggtcacgacgttgatctgcttatcacatctccgggagctgagaaagaacaagaagaccagctcctgcagaaagtgaccaatctgtggaagaaacaagggttgttgctgtacggtgatctgcgtgaaagtcgctttgaagatgggaaactcccatcccgcaagatcgatgccctggaccattttcagaaatgctttgctatcctcaaactttatcaccataaagtggacaaaagcaaatgggaaatgccgacgggttcgaacgaaagcgaggccaaaagttggaaagcaattcgcgtagatctggttgtttgtccctacgatcgttttgcgtttgcgttgttgggttggaccggaagccgcatgttcgaacgtgatctgcgccgctacgccacccacgagaagaagatgatgctggacaatcatgcgctgtatgacctgaccaagaaaatctttctcaaagctaaatcggaagaggaaattttcgcacatctggggcttgaatacctggaaccgtccgaacgtaacgca

SEQ ID NO: 574 - protein, 529 aa, synthetic construct
  REGION 1..529: note = Variant of terminal deoxynucleotidyltransferase
MHHHHHHGGSGMHRIRTIDSDFGKKRQKKMDNHISSMIYEIKFHEFVLFILEKKMGATRRTFLTDLARKKGFRVENELSDSVTHIVAENNSGSDVLAWLKTHKMEKTTQFELLDISWLIESMKVGKPVDTKGKMQLMESRVDSANPDPTAGTLNILPPTTKTISQYACQRRTTLNNHNQRFTDALEILAENYEFKRNDDTCLTFMRAISVLKCLPFEVVSLKDTEGLPWIGDEVKGIMEEIIEVGESLEVQAVLNDERYQSFKLFKSVFGVGVKTADKWYRMGLRTLEDVRSSKTLKLTKMQKAGLCYYEDLADGVTKAEADAISLLVQDAVWTFDPDALVEITGGFRRGKPFGHDVDLLITSPGAEKEQEDQLLQKVTNLWKKQGLLLYGDLRESRFEDGKLPSRKIDALDHFQKCFAILKLYHHKVDKSKWEMPTGSNESEAKSWKAIRVDLVVCPYDRFAFALLGWTGSRMFERDLRRYATHEKKMMLDNHALYDLTKKIFLKAKSEEEIFAHLGLEYLEPSERNA

SEQ ID NO: 575 - DNA, 1587 bp, synthetic construct
  misc_feature 1..1587: note = Variant of terminal deoxynucleotidyltransferase
  source 1..1587: mol_type = other DNA
atgcaccatcatcatcatcatggcggtagcggcatgcaccgcattcgtaccatcgattcggacttcgggaagaaacgccagaagaagatggataaccacattagttccatgatctatgaaatcaaatttcacgagtttgtgctgttcattctcgaaaagaaaatgggtgcgacgcgtcgtacttttctgacagatttagcccgcaagaaagggttccgcgtcgagaatgaactgtcagacagcgttacccacatcgtggcagaaaataattcaggatctgacgtattggcttggctgaagacccacaagatggagaagacgacgcaatttgaactgctggatattagctggcttatcgaaagcatgaaagttggtaaaccggtggacaccaaggggaaataccatttgatggaatcgcgtgtcgatagtgcgaacccagatccgacagccggtaccctcaacattctgcctcctactacgaagaccatttctcagtatgcgtgtcaacgccgcaccaccctgaacaaccataatcaacgttttacggacgcactggaaattcttgcggaaaattacgagttcaaacgcaacgatgatacttgtctgacctttatgcgtgctatttccgtgctgaaatgccttccgtttgaggtagttagcctgaaagacacggaaggattgccctggatcggtgatgaagtcaaagggattatggaagaaatcatcgaggtcggtgaatcgctggaagtgcaggccgtgctcaatgatgagcgctatcaaagcttcaaactgtttaagagtgtctttggagtgggggtgaagacagcagacaaatggtaccgtatgggtctgcgcacgctcgaggatgttcgttccagcaagaccctgaagttgaccaagatgcagaaagcgggtctgtgctattatgaagatcttgctgatggcgttacgaaagccgaagctgacgcgatttctctgctggttcaggatgcagtctggactttcgacccggatgcgctggtggagattacgggtggatttcgtcgtgggaaaccttttggtcacgacgttgatctgcttatcacatctccgggagctgagaaagaacaagaagaccagctcctgcagaaagtgaccaatctgtggaagaaacaagggttgttgctgtacggtgatctgcgtgaaagtcgctttgaagatgggaaactcccatcccgcaagatcgatgccctggaccattttcagaaatgctttgctatcctcaaactttatcaccataaagtggacaaaagcaaatgggaaatgccgacgggttcgaacgaaagcgaggccaaaagttggaaagcaattcgcgtagatctggttgtttgtccctacgatcgttttgcgtttgcgttgttgggttggaccggaagccgcatgttcgaacgtgatctgcgccgctacgccacccacgagaagaagatgatgctggacaatcatgcgctgtatgacctgaccaagaaaatctttctcaaagctaaatcggaagaggaaattttcgcacatctggggcttgaatacctggaaccgtccgaacgtaacgca

SEQ ID NO: 576 - protein, 529 aa, synthetic construct
  REGION 1..529: note = Variant of terminal deoxynucleotidyltransferase
MHHHHHHGGSGMHRIRTIDSDFGKKRQKKMDNHISSMIYEIKFHEFVLFILEKKMGATRRTFLTDLARKKGFRVENELSDSVTHIVAENNSGSDVLAWLKTHKMEKTTQFELLDISWLIESMKVGKPVDTKGKYHLMESRVDSANPDPTAGTLNILPPTTKTISQYACQRRTTLNNHNQRFTDALEILAENYEFKRNDDTCLTFMRAISVLKCLPFEVVSLKDTEGLPWIGDEVKGIMEEIIEVGESLEVQAVLNDERYQSFKLFKSVFGVGVKTADKWYRMGLRTLEDVRSSKTLKLTKMQKAGLCYYEDLADGVTKAEADAISLLVQDAVWTFDPDALVEITGGFRRGKPFGHDVDLLITSPGAEKEQEDQLLQKVTNLWKKQGLLLYGDLRESRFEDGKLPSRKIDALDHFQKCFAILKLYHHKVDKSKWEMPTGSNESEAKSWKAIRVDLVVCPYDRFAFALLGWTGSRMFERDLRRYATHEKKMMLDNHALYDLTKKIFLKAKSEEEIFAHLGLEYLEPSERNA

SEQ ID NO: 577 - DNA, 1587 bp, synthetic construct
  misc_feature 1..1587: note = Variant of terminal deoxynucleotidyltransferase
  source 1..1587: mol_type = other DNA
atgcaccatcatcatcatcatggcggtagcggcatgcaccgcattcgtaccatcgattcggacttcgggaagaaacgccagaagaagatggataaccacattagttccatgatctatgaaatcaaatttcacgagtttgtgctgttcattctcgaaaagaaaatgggtgcgacgcgtcgtacttttctgacagatttagcccgcaagaaagggttccgcgtcgagaatgaactgtcagacagcgttacccacatcgtggcagaaaataattcaggatctgacgtattggcttggctgaagacccacaagatggagaagacgacgcaatttgaactgctggatattagctggcttatcgaaagcatgaaagttggtaaaccggtggacaccaaggggaaataccagttggaggaatcgcgtgtcgatagtgcgaacccagatccgacagccggtaccctcaacattctgcctcctactacgaagaccatttctcagtatgcgtgtcaacgccgcaccaccctgaacaaccataatcaacgttttacggacgcactggaaattcttgcggaaaattacgagttcaaacgcaacgatgatacttgtctgacctttatgcgtgctatttccgtgctgaaatgccttccgtttgaggtagttagcctgaaagacacggaaggattgccctggatcggtgatgaagtcaaagggattatggaagaaatcatcgaggtcggtgaatcgctggaagtgcaggccgtgctcaatgatgagcgctatcaaagcttcaaactgtttaagagtgtctttggagtgggggtgaagacagcagacaaatggtaccgtatgggtctgcgcacgctcgaggatgttcgttccagcaagaccctgaagttgaccaagatgcagaaagcgggtctgtgctattatgaagatcttgctgatggcgttacgaaagccgaagctgacgcgatttctctgctggttcaggatgcagtctggactttcgacccggatgcgctggtggagattacgggtggatttcgtcgtgggaaaccttttggtcacgacgttgatctgcttatcacatctccgggagctgagaaagaacaagaagaccagctcctgcagaaagtgaccaatctgtggaagaaacaagggttgttgctgtacggtgatctgcgtgaaagtcgctttgaagatgggaaactcccatcccgcaagatcgatgccctggaccattttcagaaatgctttgctatcctcaaactttatcaccataaagtggacaaaagcaaatgggaaatgccgacgggttcgaacgaaagcgaggccaaaagttggaaagcaattcgcgtagatctggttgtttgtccctacgatcgttttgcgtttgcgttgttgggttggaccggaagccgcatgttcgaacgtgatctgcgccgctacgccacccacgagaagaagatgatgctggacaatcatgcgctgtatgacctgaccaagaaaatctttctcaaagctaaatcggaagaggaaattttcgcacatctggggcttgaatacctggaaccgtccgaacgtaacgca

SEQ ID NO: 578 - protein, 529 aa, synthetic construct
  REGION 1..529: note = Variant of terminal deoxynucleotidyltransferase
MHHHHHHGGSGMHRIRTIDSDFGKKRQKKMDNHISSMIYEIKFHEFVLFILEKKMGATRRTFLTDLARKKGFRVENELSDSVTHIVAENNSGSDVLAWLKTHKMEKTTQFELLDISWLIESMKVGKPVDTKGKYQLEESRVDSANPDPTAGTLNILPPTTKTISQYACQRRTTLNNHNQRFTDALEILAENYEFKRNDDTCLTFMRAISVLKCLPFEVVSLKDTEGLPWIGDEVKGIMEEIIEVGESLEVQAVLNDERYQSFKLFKSVFGVGVKTADKWYRMGLRTLEDVRSSKTLKLTKMQKAGLCYYEDLADGVTKAEADAISLLVQDAVWTFDPDALVEITGGFRRGKPFGHDVDLLITSPGAEKEQEDQLLQKVTNLWKKQGLLLYGDLRESRFEDGKLPSRKIDALDHFQKCFAILKLYHHKVDKSKWEMPTGSNESEAKSWKAIRVDLVVCPYDRFAFALLGWTGSRMFERDLRRYATHEKKMMLDNHALYDLTKKIFLKAKSEEEIFAHLGLEYLEPSERNA

SEQ ID NO: 579 - DNA, 1587 bp, synthetic construct
  misc_feature 1..1587: note = Variant of terminal deoxynucleotidyltransferase
  source 1..1587: mol_type = other DNA
atgcaccatcatcatcatcatggcggtagcggcatgcaccgcattcgtaccatcgattcggacttcgggaagaaacgccagaagaagatggatgagcacattagttccatgatctatgaaatcaaatttcacgagtttgtgctgttcattctcgaaaagaaaatgggtgcgacgcgtcgtacttttctgacagatttagcccgcaagaaagggttccgcgtcgagaatgaactgtcagacagcgttacccacatcgtggcagaaaataattcaggatctgacgtattggcttggctgaagacccacaagatggagaagacgacgcaatttgaactgctggatattagctggcttatcgaaagcatgaaagttggtaaaccggtggacaccaaggggaaataccagttgatggaatcgcgtgtcgatagtgcgaacccagatccgacagccggtaccctcaacattctgcctcctactacgaagaccatttctcagtatgcgtgtcaacgccgcaccaccctgaacaaccataatcaacgttttacggacgcactggaaattcttgcggaaaattacgagttcaaacgcaacgatgatacttgtctgacctttatgcgtgctatttccgtgctgaaatgccttccgtttgaggtagttagcctgaaagacacggaaggattgccctggatcggtgatgaagtcaaagggattatggaagaaatcatcgaggtcggtgaatcgctggaagtgcaggccgtgctcaatgatgagcgctatcaaagcttcaaactgtttaagagtgtctttggagtgggggtgaagacagcagacaaatggtaccgtatgggtctgcgcacgctcgaggatgttcgttccagcaagaccctgaagttgaccaagatgcagaaagcgggtctgtgctattatgaagatcttgctgatggcgttacgaaagccgaagctgacgcgatttctctgctggttcaggatgcagtctggactttcgacccggatgcgctggtggagattacgggtggatttcgtcgtgggaaaccttttggtcacgacgttgatctgcttatcacatctccgggagctgagaaagaacaagaagaccagctcctgcagaaagtgaccaatctgtggaagaaacaagggttgttgctgtacggtgatctgcgtgaaagtcgctttgaagatgggaaactcccatcccgcaagatcgatgccctggaccattttcagaaatgctttgctatcctcaaactttatcaccataaagtggacaaaagcaaatgggaaatgccgacgggttcgaacgaaagcgaggccaaaagttggaaagcaattcgcgtagatctggttgtttgtccctacgatcgttttgcgtttgcgttgttgggttggaccggaagccgcatgttcgaacgtgatctgcgccgctacgccacccacgagaagaagatgatgctggacaatcatgcgctgtatgacctgaccaagaaaatctttctcaaagctaaatcggaagaggaaattttcgcacatctggggcttgaatacctggaaccgtccgaacgtaacgca

SEQ ID NO: 580 - protein, 529 aa, synthetic construct
  REGION 1..529: note = Variant of terminal deoxynucleotidyltransferase
MHHHHHHGGSGMHRIRTIDSDFGKKRQKKMDEHISSMIYEIKFHEFVLFILEKKMGATRRTFLTDLARKKGFRVENELSDSVTHIVAENNSGSDVLAWLKTHKMEKTTQFELLDISWLIESMKVGKPVDTKGKYQLMESRVDSANPDPTAGTLNILPPTTKTISQYACQRRTTLNNHNQRFTDALEILAENYEFKRNDDTCLTFMRAISVLKCLPFEVVSLKDTEGLPWIGDEVKGIMEEIIEVGESLEVQAVLNDERYQSFKLFKSVFGVGVKTADKWYRMGLRTLEDVRSSKTLKLTKMQKAGLCYYEDLADGVTKAEADAISLLVQDAVWTFDPDALVEITGGFRRGKPFGHDVDLLITSPGAEKEQEDQLLQKVTNLWKKQGLLLYGDLRESRFEDGKLPSRKIDALDHFQKCFAILKLYHHKVDKSKWEMPTGSNESEAKSWKAIRVDLVVCPYDRFAFALLGWTGSRMFERDLRRYATHEKKMMLDNHALYDLTKKIFLKAKSEEEIFAHLGLEYLEPSERNA

SEQ ID NO: 581 - DNA, 1587 bp, synthetic construct
  misc_feature 1..1587: note = Variant of terminal deoxynucleotidyltransferase
  source 1..1587: mol_type = other DNA
atgcaccatcatcatcatcatggcggtagcggcatgcaccgcattcgtaccatcgattcggacttcgggaagaaacgccagaagaagatggataaccacattagttccatgatctatgaaatcaaatttcacgagtttgtgctgttcattctcgaaaagaaaatgggtgcgacgcgtcgtacttttctgacagatttagcccgcaagaaagggttccgcgtcgagaatgaactgtcagacagcgttacccacatcgtggcagaaaataattcaggatctgacgtattggcttggctgaagacccacaagatggagaagacgacgcaatttgaactgctggatattagctggcttatcgaaagcatgaaagttggtaaaccggtggacaccggggggaaataccagttgatggaatcgcgtgtcgatagtgcgaacccagatccgacagccggtaccctcaacattctgcctcctactacgaagaccatttctcagtatgcgtgtcaacgccgcaccaccctgaacaaccataatcaacgttttacggacgcactggaaattcttgcggaaaattacgagttcaaacgcaacgatgatacttgtctgacctttatgcgtgctatttccgtgctgaaatgccttccgtttgaggtagttagcctgaaagacacggaaggattgccctggatcggtgatgaagtcaaagggattatggaagaaatcatcgaggtcggtgaatcgctggaagtgcaggccgtgctcaatgatgagcgctatcaaagcttcaaactgtttaagagtgtctttggagtgggggtgaagacagcagacaaatggtaccgtatgggtctgcgcacgctcgaggatgttcgttccagcaagaccctgaagttgaccaagatgcagaaagcgggtctgtgctattatgaagatcttgctgatggcgttacgaaagccgaagctgacgcgatttctctgctggttcaggatgcagtctggactttcgacccggatgcgctggtggagattacgggtggatttcgtcgtgggaaaccttttggtcacgacgttgatctgcttatcacatctccgggagctgagaaagaacaagaagaccagctcctgcagaaagtgaccaatctgtggaagaaacaagggttgttgctgtacggtgatctgcgtgaaagtcgctttgaagatgggaaactcccatcccgcaagatcgatgccctggaccattttcagaaatgctttgctatcctcaaactttatcaccataaagtggacaaaagcaaatgggaaatgccgacgggttcgaacgaaagcgaggccaaaagttggaaagcaattcgcgtagatctggttgtttgtccctacgatcgttttgcgtttgcgttgttgggttggaccggaagccgcatgttcgaacgtgatctgcgccgctacgccacccacgagaagaagatgatgctggacaatcatgcgctgtatgacctgaccaagaaaatctttctcaaagctaaatcggaagaggaaattttcgcacatctggggcttgaatacctggaaccgtccgaacgtaacgca

SEQ ID NO: 582 - protein, 529 aa, synthetic construct
  REGION 1..529: note = Variant of terminal deoxynucleotidyltransferase
MHHHHHHGGSGMHRIRTIDSDFGKKRQKKMDNHISSMIYEIKFHEFVLFILEKKMGATRRTFLTDLARKKGFRVENELSDSVTHIVAENNSGSDVLAWLKTHKMEKTTQFELLDISWLIESMKVGKPVDTGGKYQLMESRVDSANPDPTAGTLNILPPTTKTISQYACQRRTTLNNHNQRFTDALEILAENYEFKRNDDTCLTFMRAISVLKCLPFEVVSLKDTEGLPWIGDEVKGIMEEIIEVGESLEVQAVLNDERYQSFKLFKSVFGVGVKTADKWYRMGLRTLEDVRSSKTLKLTKMQKAGLCYYEDLADGVTKAEADAISLLVQDAVWTFDPDALVEITGGFRRGKPFGHDVDLLITSPGAEKEQEDQLLQKVTNLWKKQGLLLYGDLRESRFEDGKLPSRKIDALDHFQKCFAILKLYHHKVDKSKWEMPTGSNESEAKSWKAIRVDLVVCPYDRFAFALLGWTGSRMFERDLRRYATHEKKMMLDNHALYDLTKKIFLKAKSEEEIFAHLGLEYLEPSERNA

SEQ ID NO: 583 - DNA, 1587 bp, synthetic construct
  misc_feature 1..1587: note = Variant of terminal deoxynucleotidyltransferase
  source 1..1587: mol_type = other DNA
atgcaccatcatcatcatcatggcggtagcggcatgcaccgcattcgtaccatcgattcggacttcgggaagaaacgccagaagaagatggataaccacattagttccatgatctatgaaatcaaatttcacgagtttgtgctgttcattctcgaaaagaaaatgggtgcgacgcgtcgtacttttctgacagatttagcccgcaagaaagggttccgcgtcgagaatgaactgtcagacagcgttacccacatcgtggcagaagcgaattcaggatctgacgtattggcttggctgaagacccacaagatggagaagacgacgcaatttgaactgctggatattagctggcttatcgaaagcatgaaagttggtaaaccggtggacaccaaggggaaataccagttgatggaatcgcgtgtcgatagtgcgaacccagatccgacagccggtaccctcaacattctgcctcctactacgaagaccatttctcagtatgcgtgtcaacgccgcaccaccctgaacaaccataatcaacgttttacggacgcactggaaattcttgcggaaaattacgagttcaaacgcaacgatgatacttgtctgacctttatgcgtgctatttccgtgctgaaatgccttccgtttgaggtagttagcctgaaagacacggaaggattgccctggatcggtgatgaagtcaaagggattatggaagaaatcatcgaggtcggtgaatcgctggaagtgcaggccgtgctcaatgatgagcgctatcaaagcttcaaactgtttaagagtgtctttggagtgggggtgaagacagcagacaaatggtaccgtatgggtctgcgcacgctcgaggatgttcgttccagcaagaccctgaagttgaccaagatgcagaaagcgggtctgtgctattatgaagatcttgctgatggcgttacgaaagccgaagctgacgcgatttctctgctggttcaggatgcagtctggactttcgacccggatgcgctggtggagattacgggtggatttcgtcgtgggaaaccttttggtcacgacgttgatctgcttatcacatctccgggagctgagaaagaacaagaagaccagctcctgcagaaagtgaccaatctgtggaagaaacaagggttgttgctgtacggtgatctgcgtgaaagtcgctttgaagatgggaaactcccatcccgcaagatcgatgccctggaccattttcagaaatgctttgctatcctcaaactttatcaccataaagtggacaaaagcaaatgggaaatgccgacgggttcgaacgaaagcgaggccaaaagttggaaagcaattcgcgtagatctggttgtttgtccctacgatcgttttgcgtttgcgttgttgggttggaccggaagccgcatgttcgaacgtgatctgcgccgctacgccacccacgagaagaagatgatgctggacaatcatgcgctgtatgacctgaccaagaaaatctttctcaaagctaaatcggaagaggaaattttcgcacatctggggcttgaatacctggaaccgtccgaacgtaacgca

SEQ ID NO: 584 - protein, 529 aa, synthetic construct
  REGION 1..529: note = Variant of terminal deoxynucleotidyltransferase
MHHHHHHGGSGMHRIRTIDSDFGKKRQKKMDNHISSMIYEIKFHEFVLFILEKKMGATRRTFLTDLARKKGFRVENELSDSVTHIVAEANSGSDVLAWLKTHKMEKTTQFELLDISWLIESMKVGKPVDTKGKYQLMESRVDSANPDPTAGTLNILPPTTKTISQYACQRRTTLNNHNQRFTDALEILAENYEFKRNDDTCLTFMRAISVLKCLPFEVVSLKDTEGLPWIGDEVKGIMEEIIEVGESLEVQAVLNDERYQSFKLFKSVFGVGVKTADKWYRMGLRTLEDVRSSKTLKLTKMQKAGLCYYEDLADGVTKAEADAISLLVQDAVWTFDPDALVEITGGFRRGKPFGHDVDLLITSPGAEKEQEDQLLQKVTNLWKKQGLLLYGDLRESRFEDGKLPSRKIDALDHFQKCFAILKLYHHKVDKSKWEMPTGSNESEAKSWKAIRVDLVVCPYDRFAFALLGWTGSRMFERDLRRYATHEKKMMLDNHALYDLTKKIFLKAKSEEEIFAHLGLEYLEPSERNA

SEQ ID NO: 585 - DNA, 1587 bp, synthetic construct
  misc_feature 1..1587: note = Variant of terminal deoxynucleotidyltransferase
  source 1..1587: mol_type = other DNA
atgcaccatcatcatcatcatggcggtagcggcatgcaccgcattcgtaccatcgattcggacttcgggaagaaacgccagaagaagatggataaccacattagttccatgatctatgaaatcaaatttcacgagtttgtgctgttcattctcgaaaagaaaatgggtgcgacgcgtcgtacttttctgacagatttagcccgcaagaaagggttccgcgtcgagaatgaactgtcagacagcgttacccacatcgtggcagaaaataattcaggatctgacgtattggcttggctgaagacccacaagatggagaagacgacgcaatttgaactgctggatattagctggcttatcgaaagcatgaaagttggtaaaccggtggacaccaaggggcagtaccagttgatggaatcgcgtgtcgatagtgcgaacccagatccgacagccggtaccctcaacattctgcctcctactacgaagaccatttctcagtatgcgtgtcaacgccgcaccaccctgaacaaccataatcaacgttttacggacgcactggaaattcttgcggaaaattacgagttcaaacgcaacgatgatacttgtctgacctttatgcgtgctatttccgtgctgaaatgccttccgtttgaggtagttagcctgaaagacacggaaggattgccctggatcggtgatgaagtcaaagggattatggaagaaatcatcgaggtcggtgaatcgctggaagtgcaggccgtgctcaatgatgagcgctatcaaagcttcaaactgtttaagagtgtctttggagtgggggtgaagacagcagacaaatggtaccgtatgggtctgcgcacgctcgaggatgttcgttccagcaagaccctgaagttgaccaagatgcagaaagcgggtctgtgctattatgaagatcttgctgatggcgttacgaaagccgaagctgacgcgatttctctgctggttcaggatgcagtctggactttcgacccggatgcgctggtggagattacgggtggatttcgtcgtgggaaaccttttggtcacgacgttgatctgcttatcacatctccgggagctgagaaagaacaagaagaccagctcctgcagaaagtgaccaatctgtggaagaaacaagggttgttgctgtacggtgatctgcgtgaaagtcgctttgaagatgggaaactcccatcccgcaagatcgatgccctggaccattttcagaaatgctttgctatcctcaaactttatcaccataaagtggacaaaagcaaatgggaaatgccgacgggttcgaacgaaagcgaggccaaaagttggaaagcaattcgcgtagatctggttgtttgtccctacgatcgttttgcgtttgcgttgttgggttggaccggaagccgcatgttcgaacgtgatctgcgccgctacgccacccacgagaagaagatgatgctggacaatcatgcgctgtatgacctgaccaagaaaatctttctcaaagctaaatcggaagaggaaattttcgcacatctggggcttgaatacctggaaccgtccgaacgtaacgca

SEQ ID NO: 586 - protein, 529 aa, synthetic construct
  REGION 1..529: note = Variant of terminal deoxynucleotidyltransferase
MHHHHHHGGSGMHRIRTIDSDFGKKRQKKMDNHISSMIYEIKFHEFVLFILEKKMGATRRTFLTDLARKKGFRVENELSDSVTHIVAENNSGSDVLAWLKTHKMEKTTQFELLDISWLIESMKVGKPVDTKGQYQLMESRVDSANPDPTAGTLNILPPTTKTISQYACQRRTTLNNHNQRFTDALEILAENYEFKRNDDTCLTFMRAISVLKCLPFEVVSLKDTEGLPWIGDEVKGIMEEIIEVGESLEVQAVLNDERYQSFKLFKSVFGVGVKTADKWYRMGLRTLEDVRSSKTLKLTKMQKAGLCYYEDLADGVTKAEADAISLLVQDAVWTFDPDALVEITGGFRRGKPFGHDVDLLITSPGAEKEQEDQLLQKVTNLWKKQGLLLYGDLRESRFEDGKLPSRKIDALDHFQKCFAILKLYHHKVDKSKWEMPTGSNESEAKSWKAIRVDLVVCPYDRFAFALLGWTGSRMFERDLRRYATHEKKMMLDNHALYDLTKKIFLKAKSEEEIFAHLGLEYLEPSERNA

SEQ ID NO: 587 - DNA, 1587 bp, synthetic construct
  misc_feature 1..1587: note = Variant of terminal deoxynucleotidyltransferase
  source 1..1587: mol_type = other DNA
atgcaccatcatcatcatcatggcggtagcggcatgcaccgcattcgtaccatcgattcggacttcgggaagaaacgccagaagaagatggataaccacattagttccatgatctatgaaatcaaatttcacgagtttgtgctgttcattctcgaaaagaaaatgggtgcgacgcgtcgtacttttctgacagatttagcccgcaagaaagggttccgcgtcgagaatgaactgtcagacagcgttacccacatcgtggcagaaaataattcaggatctgacgtattggcttggctgaagacccacaagatggagaagacggggcaatttgaactgctggatattagctggcttatcgaaagcatgaaagttggtaaaccggtggacaccaaggggaaataccagttgatggaatcgcgtgtcgatagtgcgaacccagatccgacagccggtaccctcaacattctgcctcctactacgaagaccatttctcagtatgcgtgtcaacgccgcaccaccctgaacaaccataatcaacgttttacggacgcactggaaattcttgcggaaaattacgagttcaaacgcaacgatgatacttgtctgacctttatgcgtgctatttccgtgctgaaatgccttccgtttgaggtagttagcctgaaagacacggaaggattgccctggatcggtgatgaagtcaaagggattatggaagaaatcatcgaggtcggtgaatcgctggaagtgcaggccgtgctcaatgatgagcgctatcaaagcttcaaactgtttaagagtgtctttggagtgggggtgaagacagcagacaaatggtaccgtatgggtctgcgcacgctcgaggatgttcgttccagcaagaccctgaagttgaccaagatgcagaaagcgggtctgtgctattatgaagatcttgctgatggcgttacgaaagccgaagctgacgcgatttctctgctggttcaggatgcagtctggactttcgacccggatgcgctggtggagattacgggtggatttcgtcgtgggaaaccttttggtcacgacgttgatctgcttatcacatctccgggagctgagaaagaacaagaagaccagctcctgcagaaagtgaccaatctgtggaagaaacaagggttgttgctgtacggtgatctgcgtgaaagtcgctttgaagatgggaaactcccatcccgcaagatcgatgccctggaccattttcagaaatgctttgctatcctcaaactttatcaccataaagtggacaaaagcaaatgggaaatgccgacgggttcgaacgaaagcgaggccaaaagttggaaagcaattcgcgtagatctggttgtttgtccctacgatcgttttgcgtttgcgttgttgggttggaccggaagccgcatgttcgaacgtgatctgcgccgctacgccacccacgagaagaagatgatgctggacaatcatgcgctgtatgacctgaccaagaaaatctttctcaaagctaaatcggaagaggaaattttcgcacatctggggcttgaatacctggaaccgtccgaacgtaacgca

SEQ ID NO: 588 - protein, 529 aa, synthetic construct
  REGION 1..529: note = Variant of terminal deoxynucleotidyltransferase
MHHHHHHGGSGMHRIRTIDSDFGKKRQKKMDNHISSMIYEIKFHEFVLFILEKKMGATRRTFLTDLARKKGFRVENELSDSVTHIVAENNSGSDVLAWLKTHKMEKTGQFELLDISWLIESMKVGKPVDTKGKYQLMESRVDSANPDPTAGTLNILPPTTKTISQYACQRRTTLNNHNQRFTDALEILAENYEFKRNDDTCLTFMRAISVLKCLPFEVVSLKDTEGLPWIGDEVKGIMEEIIEVGESLEVQAVLNDERYQSFKLFKSVFGVGVKTADKWYRMGLRTLEDVRSSKTLKLTKMQKAGLCYYEDLADGVTKAEADAISLLVQDAVWTFDPDALVEITGGFRRGKPFGHDVDLLITSPGAEKEQEDQLLQKVTNLWKKQGLLLYGDLRESRFEDGKLPSRKIDALDHFQKCFAILKLYHHKVDKSKWEMPTGSNESEAKSWKAIRVDLVVCPYDRFAFALLGWTGSRMFERDLRRYATHEKKMMLDNHALYDLTKKIFLKAKSEEEIFAHLGLEYLEPSERNA

SEQ ID NO: 589 - DNA, 1587 bp, synthetic construct
  misc_feature 1..1587: note = Variant of terminal deoxynucleotidyltransferase
  source 1..1587: mol_type = other DNA
atgcaccatcatcatcatcatggcggtagcggcatgcaccgcattcgtaccatcgattcggacttcgggaagaaacgctttaagaagatggataaccacattagttccatgatctatgaaatcaaatttcacgagtttgtgctgttcattctcgaaaagaaaatgggtgcgacgcgtcgtacttttctgacagatttagcccgcaagaaagggttccgcgtcgagaatgaactgtcagacagcgttacccacatcgtggcagaaaataattcaggatctgacgtattggcttggctgaagacccacaagatggagaagacgacgcaatttgaactgctggatattagctggcttatcgaaagcatgaaagttggtaaaccggtggacaccaaggggaaataccagttgatggaatcgcgtgtcgatagtgcgaacccagatccgacagccggtaccctcaacattctgcctcctactacgaagaccatttctcagtatgcgtgtcaacgccgcaccaccctgaacaaccataatcaacgttttacggacgcactggaaattcttgcggaaaattacgagttcaaacgcaacgatgatacttgtctgacctttatgcgtgctatttccgtgctgaaatgccttccgtttgaggtagttagcctgaaagacacggaaggattgccctggatcggtgatgaagtcaaagggattatggaagaaatcatcgaggtcggtgaatcgctggaagtgcaggccgtgctcaatgatgagcgctatcaaagcttcaaactgtttaagagtgtctttggagtgggggtgaagacagcagacaaatggtaccgtatgggtctgcgcacgctcgaggatgttcgttccagcaagaccctgaagttgaccaagatgcagaaagcgggtctgtgctattatgaagatcttgctgatggcgttacgaaagccgaagctgacgcgatttctctgctggttcaggatgcagtctggactttcgacccggatgcgctggtggagattacgggtggatttcgtcgtgggaaaccttttggtcacgacgttgatctgcttatcacatctccgggagctgagaaagaacaagaagaccagctcctgcagaaagtgaccaatctgtggaagaaacaagggttgttgctgtacggtgatctgcgtgaaagtcgctttgaagatgggaaactcccatcccgcaagatcgatgccctggaccattttcagaaatgctttgctatcctcaaactttatcaccataaagtggacaaaagcaaatgggaaatgccgacgggttcgaacgaaagcgaggccaaaagttggaaagcaattcgcgtagatctggttgtttgtccctacgatcgttttgcgtttgcgttgttgggttggaccggaagccgcatgttcgaacgtgatctgcgccgctacgccacccacgagaagaagatgatgctggacaatcatgcgctgtatgacctgaccaagaaaatctttctcaaagctaaatcggaagaggaaattttcgcacatctggggcttgaatacctggaaccgtccgaacgtaacgca

SEQ ID NO: 590 - protein, 529 aa, synthetic construct
  REGION 1..529: note = Variant of terminal deoxynucleotidyltransferase
MHHHHHHGGSGMHRIRTIDSDFGKKRFKKMDNHISSMIYEIKFHEFVLFILEKKMGATRRTFLTDLARKKGFRVENELSDSVTHIVAENNSGSDVLAWLKTHKMEKTTQFELLDISWLIESMKVGKPVDTKGKYQLMESRVDSANPDPTAGTLNILPPTTKTISQYACQRRTTLNNHNQRFTDALEILAENYEFKRNDDTCLTFMRAISVLKCLPFEVVSLKDTEGLPWIGDEVKGIMEEIIEVGESLEVQAVLNDERYQSFKLFKSVFGVGVKTADKWYRMGLRTLEDVRSSKTLKLTKMQKAGLCYYEDLADGVTKAEADAISLLVQDAVWTFDPDALVEITGGFRRGKPFGHDVDLLITSPGAEKEQEDQLLQKVTNLWKKQGLLLYGDLRESRFEDGKLPSRKIDALDHFQKCFAILKLYHHKVDKSKWEMPTGSNESEAKSWKAIRVDLVVCPYDRFAFALLGWTGSRMFERDLRRYATHEKKMMLDNHALYDLTKKIFLKAKSEEEIFAHLGLEYLEPSERNA

SEQ ID NO: 591 - DNA, 1587 bp, synthetic construct
  misc_feature 1..1587: note = Variant of terminal deoxynucleotidyltransferase
  source 1..1587: mol_type = other DNA
atgcaccatcatcatcatcatggcggtagcggcatgcaccgcattcgtaccatcgattcggacttcgggaagaaacgccagaagaagatggataaccacattagttccatgatctatgaaatcaaatttcacgagtttgtgctgttcattctcgaaaagaaaatgggtgcgacgcgtcgtacttttctgacagatttagcccgcaagaaagggttccgcgtcgagaatgaactgtcagacagcgttacccacatcgtggcagaaaataattcaggatctgacgtattggcttggctgaagacccacaagatggagaagacgacgcaatttgaactgctggatattagctggcttcaggaaagcatgaaagttggtaaaccggtggacaccaaggggaaataccagttgatggaatcgcgtgtcgatagtgcgaacccagatccgacagccggtaccctcaacattctgcctcctactacgaagaccatttctcagtatgcgtgtcaacgccgcaccaccctgaacaaccataatcaacgttttacggacgcactggaaattcttgcggaaaattacgagttcaaacgcaacgatgatacttgtctgacctttatgcgtgctatttccgtgctgaaatgccttccgtttgaggtagttagcctgaaagacacggaaggattgccctggatcggtgatgaagtcaaagggattatggaagaaatcatcgaggtcggtgaatcgctggaagtgcaggccgtgctcaatgatgagcgctatcaaagcttcaaactgtttaagagtgtctttggagtgggggtgaagacagcagacaaatggtaccgtatgggtctgcgcacgctcgaggatgttcgttccagcaagaccctgaagttgaccaagatgcagaaagcgggtctgtgctattatgaagatcttgctgatggcgttacgaaagccgaagctgacgcgatttctctgctggttcaggatgcagtctggactttcgacccggatgcgctggtggagattacgggtggatttcgtcgtgggaaaccttttggtcacgacgttgatctgcttatcacatctccgggagctgagaaagaacaagaagaccagctcctgcagaaagtgaccaatctgtggaagaaacaagggttgttgctgtacggtgatctgcgtgaaagtcgctttgaagatgggaaactcccatcccgcaagatcgatgccctggaccattttcagaaatgctttgctatcctcaaactttatcaccataaagtggacaaaagcaaatgggaaatgccgacgggttcgaacgaaagcgaggccaaaagttggaaagcaattcgcgtagatctggttgtttgtccctacgatcgttttgcgtttgcgttgttgggttggaccggaagccgcatgttcgaacgtgatctgcgccgctacgccacccacgagaagaagatgatgctggacaatcatgcgctgtatgacctgaccaagaaaatctttctcaaagctaaatcggaagaggaaattttcgcacatctggggcttgaatacctggaaccgtccgaacgtaacgca

SEQ ID NO: 592 - protein, 529 aa, synthetic construct
  REGION 1..529: note = Variant of terminal deoxynucleotidyltransferase
MHHHHHHGGSGMHRIRTIDSDFGKKRQKKMDNHISSMIYEIKFHEFVLFILEKKMGATRRTFLTDLARKKGFRVENELSDSVTHIVAENNSGSDVLAWLKTHKMEKTTQFELLDISWLQESMKVGKPVDTKGKYQLMESRVDSANPDPTAGTLNILPPTTKTISQYACQRRTTLNNHNQRFTDALEILAENYEFKRNDDTCLTFMRAISVLKCLPFEVVSLKDTEGLPWIGDEVKGIMEEIIEVGESLEVQAVLNDERYQSFKLFKSVFGVGVKTADKWYRMGLRTLEDVRSSKTLKLTKMQKAGLCYYEDLADGVTKAEADAISLLVQDAVWTFDPDALVEITGGFRRGKPFGHDVDLLITSPGAEKEQEDQLLQKVTNLWKKQGLLLYGDLRESRFEDGKLPSRKIDALDHFQKCFAILKLYHHKVDKSKWEMPTGSNESEAKSWKAIRVDLVVCPYDRFAFALLGWTGSRMFERDLRRYATHEKKMMLDNHALYDLTKKIFLKAKSEEEIFAHLGLEYLEPSERNA

SEQ ID NO: 593 - DNA, 1587 bp, synthetic construct
  misc_feature 1..1587: note = Variant of terminal deoxynucleotidyltransferase
  source 1..1587: mol_type = other DNA
atgcaccatcatcatcatcatggcggtagcggcatgcaccgcattcgtaccatcgattcggacttcgggaagaaacgccagaagaagatggataaccacattagttccatgatctatgaaatcaaatttcacgagtttgtgctgttcattctcgaaaagaaaatgggtgcgacgcgtcgtacttttctgacagatttagcccgcaagaaagggttccgcgtcgagaatgaactgtcagacagcgttacccacatcgtggcagaaaataattcaggatctgacgtattggcttggctgaagacccacaagatggagaagacgacgcaatttgaactgctggatattagctggcttatcgaaagcatgaaagttggtaaaccggtggacaccaaggggaaatggcagttgatggaatcgcgtgtcgatagtgcgaacccagatccgacagccggtaccctcaacattctgcctcctactacgaagaccatttctcagtatgcgtgtcaacgccgcaccaccctgaacaaccataatcaacgttttacggacgcactggaaattcttgcggaaaattacgagttcaaacgcaacgatgatacttgtctgacctttatgcgtgctatttccgtgctgaaatgccttccgtttgaggtagttagcctgaaagacacggaaggattgccctggatcggtgatgaagtcaaagggattatggaagaaatcatcgaggtcggtgaatcgctggaagtgcaggccgtgctcaatgatgagcgctatcaaagcttcaaactgtttaagagtgtctttggagtgggggtgaagacagcagacaaatggtaccgtatgggtctgcgcacgctcgaggatgttcgttccagcaagaccctgaagttgaccaagatgcagaaagcgggtctgtgctattatgaagatcttgctgatggcgttacgaaagccgaagctgacgcgatttctctgctggttcaggatgcagtctggactttcgacccggatgcgctggtggagattacgggtggatttcgtcgtgggaaaccttttggtcacgacgttgatctgcttatcacatctccgggagctgagaaagaacaagaagaccagctcctgcagaaagtgaccaatctgtggaagaaacaagggttgttgctgtacggtgatctgcgtgaaagtcgctttgaagatgggaaactcccatcccgcaagatcgatgccctggaccattttcagaaatgctttgctatcctcaaactttatcaccataaagtggacaaaagcaaatgggaaatgccgacgggttcgaacgaaagcgaggccaaaagttggaaagcaattcgcgtagatctggttgtttgtccctacgatcgttttgcgtttgcgttgttgggttggaccggaagccgcatgttcgaacgtgatctgcgccgctacgccacccacgagaagaagatgatgctggacaatcatgcgctgtatgacctgaccaagaaaatctttctcaaagctaaatcggaagaggaaattttcgcacatctggggcttgaatacctggaaccgtccgaacgtaacgca

SEQ ID NO: 594 - protein, 529 aa, synthetic construct
  REGION 1..529: note = Variant of terminal deoxynucleotidyltransferase
MHHHHHHGGSGMHRIRTIDSDFGKKRQKKMDNHISSMIYEIKFHEFVLFILEKKMGATRRTFLTDLARKKGFRVENELSDSVTHIVAENNSGSDVLAWLKTHKMEKTTQFELLDISWLIESMKVGKPVDTKGKWQLMESRVDSANPDPTAGTLNILPPTTKTISQYACQRRTTLNNHNQRFTDALEILAENYEFKRNDDTCLTFMRAISVLKCLPFEVVSLKDTEGLPWIGDEVKGIMEEIIEVGESLEVQAVLNDERYQSFKLFKSVFGVGVKTADKWYRMGLRTLEDVRSSKTLKLTKMQKAGLCYYEDLADGVTKAEADAISLLVQDAVWTFDPDALVEITGGFRRGKPFGHDVDLLITSPGAEKEQEDQLLQKVTNLWKKQGLLLYGDLRESRFEDGKLPSRKIDALDHFQKCFAILKLYHHKVDKSKWEMPTGSNESEAKSWKAIRVDLVVCPYDRFAFALLGWTGSRMFERDLRRYATHEKKMMLDNHALYDLTKKIFLKAKSEEEIFAHLGLEYLEPSERNA

SEQ ID NO: 595 - DNA, 1587 bp, synthetic construct
  misc_feature 1..1587: note = Variant of terminal deoxynucleotidyltransferase
  source 1..1587: mol_type = other DNA
atgcaccatcatcatcatcatggcggtagcggcatgcaccgcattcgtaccatcgattcggacttcgggaagaaacgccagaaggggatggataaccacattagttccatgatctatgaaatcaaatttcacgagtttgtgctgttcattctcgaaaagaaaatgggtgcgacgcgtcgtacttttctgacagatttagcccgcaagaaagggttccgcgtcgagaatgaactgtcagacagcgttacccacatcgtggcagaaaataattcaggatctgacgtattggcttggctgaagacccacaagatggagaagacgacgcaatttgaactgctggatattagctggcttatcgaaagcatgaaagttggtaaaccggtggacaccaaggggaaataccagttgatggaatcgcgtgtcgatagtgcgaacccagatccgacagccggtaccctcaacattctgcctcctactacgaagaccatttctcagtatgcgtgtcaacgccgcaccaccctgaacaaccataatcaacgttttacggacgcactggaaattcttgcggaaaattacgagttcaaacgcaacgatgatacttgtctgacctttatgcgtgctatttccgtgctgaaatgccttccgtttgaggtagttagcctgaaagacacggaaggattgccctggatcggtgatgaagtcaaagggattatggaagaaatcatcgaggtcggtgaatcgctggaagtgcaggccgtgctcaatgatgagcgctatcaaagcttcaaactgtttaagagtgtctttggagtgggggtgaagacagcagacaaatggtaccgtatgggtctgcgcacgctcgaggatgttcgttccagcaagaccctgaagttgaccaagatgcagaaagcgggtctgtgctattatgaagatcttgctgatggcgttacgaaagccgaagctgacgcgatttctctgctggttcaggatgcagtctggactttcgacccggatgcgctggtggagattacgggtggatttcgtcgtgggaaaccttttggtcacgacgttgatctgcttatcacatctccgggagctgagaaagaacaagaagaccagctcctgcagaaagtgaccaatctgtggaagaaacaagggttgttgctgtacggtgatctgcgtgaaagtcgctttgaagatgggaaactcccatcccgcaagatcgatgccctggaccattttcagaaatgctttgctatcctcaaactttatcaccataaagtggacaaaagcaaatgggaaatgccgacgggttcgaacgaaagcgaggccaaaagttggaaagcaattcgcgtagatctggttgtttgtccctacgatcgttttgcgtttgcgttgttgggttggaccggaagccgcatgttcgaacgtgatctgcgccgctacgccacccacgagaagaagatgatgctggacaatcatgcgctgtatgacctgaccaagaaaatctttctcaaagctaaatcggaagaggaaattttcgcacatctggggcttgaatacctggaaccgtccgaacgtaacgca

SEQ ID NO: 596 - protein, 529 aa, synthetic construct
  REGION 1..529: note = Variant of terminal deoxynucleotidyltransferase
MHHHHHHGGSGMHRIRTIDSDFGKKRQKGMDNHISSMIYEIKFHEFVLFILEKKMGATRRTFLTDLARKKGFRVENELSDSVTHIVAENNSGSDVLAWLKTHKMEKTTQFELLDISWLIESMKVGKPVDTKGKYQLMESRVDSANPDPTAGTLNILPPTTKTISQYACQRRTTLNNHNQRFTDALEILAENYEFKRNDDTCLTFMRAISVLKCLPFEVVSLKDTEGLPWIGDEVKGIMEEIIEVGESLEVQAVLNDERYQSFKLFKSVFGVGVKTADKWYRMGLRTLEDVRSSKTLKLTKMQKAGLCYYEDLADGVTKAEADAISLLVQDAVWTFDPDALVEITGGFRRGKPFGHDVDLLITSPGAEKEQEDQLLQKVTNLWKKQGLLLYGDLRESRFEDGKLPSRKIDALDHFQKCFAILKLYHHKVDKSKWEMPTGSNESEAKSWKAIRVDLVVCPYDRFAFALLGWTGSRMFERDLRRYATHEKKMMLDNHALYDLTKKIFLKAKSEEEIFAHLGLEYLEPSERNA

SEQ ID NO: 597 - DNA, 1587 bp, synthetic construct
  misc_feature 1..1587: note = Variant of terminal deoxynucleotidyltransferase
  source 1..1587: mol_type = other DNA
atgcaccatcatcatcatcatggcggtagcggcatgcaccgcattcgtaccatcgattcggacttcgggaagaatcgccagaagaagatggataaccacattagttccatgatctatgaaatcaaatttcacgagtttgtgctgttcattctcgaaaagaaaatgggtgcgacgcgtcgtacttttctgacagatttagcccgcaagaaagggttccgcgtcgagaatgaactgtcagacagcgttacccacatcgtggcagaaaataattcaggatctgacgtattggcttggctgaagacccacaagatggagaagacgacgcaatttgaactgctggatattagctggcttatcgaaagcatgaaagttggtaaaccggtggacaccaaggggaaataccagttgatggaatcgcgtgtcgatagtgcgaacccagatccgacagccggtaccctcaacattctgcctcctactacgaagaccatttctcagtatgcgtgtcaacgccgcaccaccctgaacaaccataatcaacgttttacggacgcactggaaattcttgcggaaaattacgagttcaaacgcaacgatgatacttgtctgacctttatgcgtgctatttccgtgctgaaatgccttccgtttgaggtagttagcctgaaagacacggaaggattgccctggatcggtgatgaagtcaaagggattatggaagaaatcatcgaggtcggtgaatcgctggaagtgcaggccgtgctcaatgatgagcgctatcaaagcttcaaactgtttaagagtgtctttggagtgggggtgaagacagcagacaaatggtaccgtatgggtctgcgcacgctcgaggatgttcgttccagcaagaccctgaagttgaccaagatgcagaaagcgggtctgtgctattatgaagatcttgctgatggcgttacgaaagccgaagctgacgcgatttctctgctggttcaggatgcagtctggactttcgacccggatgcgctggtggagattacgggtggatttcgtcgtgggaaaccttttggtcacgacgttgatctgcttatcacatctccgggagctgagaaagaacaagaagaccagctcctgcagaaagtgaccaatctgtggaagaaacaagggttgttgctgtacggtgatctgcgtgaaagtcgctttgaagatgggaaactcccatcccgcaagatcgatgccctggaccattttcagaaatgctttgctatcctcaaactttatcaccataaagtggacaaaagcaaatgggaaatgccgacgggttcgaacgaaagcgaggccaaaagttggaaagcaattcgcgtagatctggttgtttgtccctacgatcgttttgcgtttgcgttgttgggttggaccggaagccgcatgttcgaacgtgatctgcgccgctacgccacccacgagaagaagatgatgctggacaatcatgcgctgtatgacctgaccaagaaaatctttctcaaagctaaatcggaagaggaaattttcgcacatctggggcttgaatacctggaaccgtccgaacgtaacgca

SEQ ID NO: 598 - protein, 529 aa, synthetic construct
  REGION 1..529: note = Variant of terminal deoxynucleotidyltransferase
MHHHHHHGGSGMHRIRTIDSDFGKNRQKKMDNHISSMIYEIKFHEFVLFILEKKMGATRRTFLTDLARKKGFRVENELSDSVTHIVAENNSGSDVLAWLKTHKMEKTTQFELLDISWLIESMKVGKPVDTKGKYQLMESRVDSANPDPTAGTLNILPPTTKTISQYACQRRTTLNNHNQRFTDALEILAENYEFKRNDDTCLTFMRAISVLKCLPFEVVSLKDTEGLPWIGDEVKGIMEEIIEVGESLEVQAVLNDERYQSFKLFKSVFGVGVKTADKWYRMGLRTLEDVRSSKTLKLTKMQKAGLCYYEDLADGVTKAEADAISLLVQDAVWTFDPDALVEITGGFRRGKPFGHDVDLLITSPGAEKEQEDQLLQKVTNLWKKQGLLLYGDLRESRFEDGKLPSRKIDALDHFQKCFAILKLYHHKVDKSKWEMPTGSNESEAKSWKAIRVDLVVCPYDRFAFALLGWTGSRMFERDLRRYATHEKKMMLDNHALYDLTKKIFLKAKSEEEIFAHLGLEYLEPSERNA

SEQ ID NO: 599 - DNA, 1587 bp, synthetic construct
  misc_feature 1..1587: note = Variant of terminal deoxynucleotidyltransferase
  source 1..1587: mol_type = other DNA
atgcaccatcatcatcatcatggcggtagcggcatgcaccgcattcgtaccatcgattcggacttcgggccgaaacgccagaagaagatggataaccacattagttccatgatctatgaaatcaaatttcacgagtttgtgctgttcattctcgaaaagaaaatgggtgcgacgcgtcgtacttttctgacagatttagcccgcaagaaagggttccgcgtcgagaatgaactgtcagacagcgttacccacatcgtggcagaaaataattcaggatctgacgtattggcttggctgaagacccacaagatggagaagacgacgcaatttgaactgctggatattagctggcttatcgaaagcatgaaagttggtaaaccggtggacaccaaggggaaataccagttgatggaatcgcgtgtcgatagtgcgaacccagatccgacagccggtaccctcaacattctgcctcctactacgaagaccatttctcagtatgcgtgtcaacgccgcaccaccctgaacaaccataatcaacgttttacggacgcactggaaattcttgcggaaaattacgagttcaaacgcaacgatgatacttgtctgacctttatgcgtgctatttccgtgctgaaatgccttccgtttgaggtagttagcctgaaagacacggaaggattgccctggatcggtgatgaagtcaaagggattatggaagaaatcatcgaggtcggtgaatcgctggaagtgcaggccgtgctcaatgatgagcgctatcaaagcttcaaactgtttaagagtgtctttggagtgggggtgaagacagcagacaaatggtaccgtatgggtctgcgcacgctcgaggatgttcgttccagcaagaccctgaagttgaccaagatgcagaaagcgggtctgtgctattatgaagatcttgctgatggcgttacgaaagccgaagctgacgcgatttctctgctggttcaggatgcagtctggactttcgacccggatgcgctggtggagattacgggtggatttcgtcgtgggaaaccttttggtcacgacgttgatctgcttatcacatctccgggagctgagaaagaacaagaagaccagctcctgcagaaagtgaccaatctgtggaagaaacaagggttgttgctgtacggtgatctgcgtgaaagtcgctttgaagatgggaaactcccatcccgcaagatcgatgccctggaccattttcagaaatgctttgctatcctcaaactttatcaccataaagtggacaaaagcaaatgggaaatgccgacgggttcgaacgaaagcgaggccaaaagttggaaagcaattcgcgtagatctggttgtttgtccctacgatcgttttgcgtttgcgttgttgggttggaccggaagccgcatgttcgaacgtgatctgcgccgctacgccacccacgagaagaagatgatgctggacaatcatgcgctgtatgacctgaccaagaaaatctttctcaaagctaaatcggaagaggaaattttcgcacatctggggcttgaatacctggaaccgtccgaacgtaacgca

SEQ ID NO: 600 - protein, 529 aa, synthetic construct
  REGION 1..529: note = Variant of terminal deoxynucleotidyltransferase
MHHHHHHGGSGMHRIRTIDSDFGPKRQKKMDNHISSMIYEIKFHEFVLFILEKKMGATRRTFLTDLARKKGFRVENELSDSVTHIVAENNSGSDVLAWLKTHKMEKTTQFELLDISWLIESMKVGKPVDTKGKYQLMESRVDSANPDPTAGTLNILPPTTKTISQYACQRRTTLNNHNQRFTDALEILAENYEFKRNDDTCLTFMRAISVLKCLPFEVVSLKDTEGLPWIGDEVKGIMEEIIEVGESLEVQAVLNDERYQSFKLFKSVFGVGVKTADKWYRMGLRTLEDVRSSKTLKLTKMQKAGLCYYEDLADGVTKAEADAISLLVQDAVWTFDPDALVEITGGFRRGKPFGHDVDLLITSPGAEKEQEDQLLQKVTNLWKKQGLLLYGDLRESRFEDGKLPSRKIDALDHFQKCFAILKLYHHKVDKSKWEMPTGSNESEAKSWKAIRVDLVVCPYDRFAFALLGWTGSRMFERDLRRYATHEKKMMLDNHALYDLTKKIFLKAKSEEEIFAHLGLEYLEPSERNA

SEQ ID NO: 601 - DNA, 1587 bp, synthetic construct
  misc_feature 1..1587: note = Variant of terminal deoxynucleotidyltransferase
  source 1..1587: mol_type = other DNA
atgcaccatcatcatcatcatggcggtagcggcatgcaccgcattcgtaccatcgattcggacttcgggaagaaacgccagaagaagatggataaccacattagttccatgatctatgaaatcaaatttcacgagtttgtgctgttcattctcgaaaagaaaatgggtgcgacgcgtcgtacttttctgacagatttagcccgcaagaaagggttccgcgtcgagaatgaactgtcagacagcgttacccacatcgtggcagaaaataattcaggatctgacgtattggcttggctgaagacccacaagatggagaagacgacgcaatttgaactgctggatattagctggcttatcgaaagcatgaaagttggtaaaccggtggacaccaaggggaaataccagttgatggaagggcgtgtcgatagtgcgaacccagatccgacagccggtaccctcaacattctgcctcctactacgaagaccatttctcagtatgcgtgtcaacgccgcaccaccctgaacaaccataatcaacgttttacggacgcactggaaattcttgcggaaaattacgagttcaaacgcaacgatgatacttgtctgacctttatgcgtgctatttccgtgctgaaatgccttccgtttgaggtagttagcctgaaagacacggaaggattgccctggatcggtgatgaagtcaaagggattatggaagaaatcatcgaggtcggtgaatcgctggaagtgcaggccgtgctcaatgatgagcgctatcaaagcttcaaactgtttaagagtgtctttggagtgggggtgaagacagcagacaaatggtaccgtatgggtctgcgcacgctcgaggatgttcgttccagcaagaccctgaagttgaccaagatgcagaaagcgggtctgtgctattatgaagatcttgctgatggcgttacgaaagccgaagctgacgcgatttctctgctggttcaggatgcagtctggactttcgacccggatgcgctggtggagattacgggtggatttcgtcgtgggaaaccttttggtcacgacgttgatctgcttatcacatctccgggagctgagaaagaacaagaagaccagctcctgcagaaagtgaccaatctgtggaagaaacaagggttgttgctgtacggtgatctgcgtgaaagtcgctttgaagatgggaaactcccatcccgcaagatcgatgccctggaccattttcagaaatgctttgctatcctcaaactttatcaccataaagtggacaaaagcaaatgggaaatgccgacgggttcgaacgaaagcgaggccaaaagttggaaagcaattcgcgtagatctggttgtttgtccctacgatcgttttgcgtttgcgttgttgggttggaccggaagccgcatgttcgaacgtgatctgcgccgctacgccacccacgagaagaagatgatgctggacaatcatgcgctgtatgacctgaccaagaaaatctttctcaaagctaaatcggaagaggaaattttcgcacatctggggcttgaatacctggaaccgtccgaacgtaacgca

SEQ ID NO: 602 - protein, 529 aa, synthetic construct
  REGION 1..529: note = Variant of terminal deoxynucleotidyltransferase
MHHHHHHGGSGMHRIRTIDSDFGKKRQKKMDNHISSMIYEIKFHEFVLFILEKKMGATRRTFLTDLARKKGFRVENELSDSVTHIVAENNSGSDVLAWLKTHKMEKTTQFELLDISWLIESMKVGKPVDTKGKYQLMEGRVDSANPDPTAGTLNILPPTTKTISQYACQRRTTLNNHNQRFTDALEILAENYEFKRNDDTCLTFMRAISVLKCLPFEVVSLKDTEGLPWIGDEVKGIMEEIIEVGESLEVQAVLNDERYQSFKLFKSVFGVGVKTADKWYRMGLRTLEDVRSSKTLKLTKMQKAGLCYYEDLADGVTKAEADAISLLVQDAVWTFDPDALVEITGGFRRGKPFGHDVDLLITSPGAEKEQEDQLLQKVTNLWKKQGLLLYGDLRESRFEDGKLPSRKIDALDHFQKCFAILKLYHHKVDKSKWEMPTGSNESEAKSWKAIRVDLVVCPYDRFAFALLGWTGSRMFERDLRRYATHEKKMMLDNHALYDLTKKIFLKAKSEEEIFAHLGLEYLEPSERNA

SEQ ID NO: 603 - DNA, 1587 bp, synthetic construct
  misc_feature 1..1587: note = Variant of terminal deoxynucleotidyltransferase
  source 1..1587: mol_type = other DNA
atgcaccatcatcatcatcatggcggtagcggcatgcaccgcattcgtaccatcgattcggacttcgggaagaaacgccagaagaagatggataaccacattagttccatgatctatgaaatcaaatttcacgagtttgtgctgttcattctcgaaaagaaaatgggtgcgacgcgtcgtacttttctgacagatttagcccgcaagaaagggttccgcgtcgagaatgaactgtcagacagcgttacccacatcgtggcagaaaataattcaggatctgacgtattggcttggctgaagacccacaagatggagaagacgacgcaatttgaactgctggatattagctggcttatcgaaagcatgaaagttggtaaaccggtggacgcgaaggggaaataccagttgatggaatcgcgtgtcgatagtgcgaacccagatccgacagccggtaccctcaacattctgcctcctactacgaagaccatttctcagtatgcgtgtcaacgccgcaccaccctgaacaaccataatcaacgttttacggacgcactggaaattcttgcggaaaattacgagttcaaacgcaacgatgatacttgtctgacctttatgcgtgctatttccgtgctgaaatgccttccgtttgaggtagttagcctgaaagacacggaaggattgccctggatcggtgatgaagtcaaagggattatggaagaaatcatcgaggtcggtgaatcgctggaagtgcaggccgtgctcaatgatgagcgctatcaaagcttcaaactgtttaagagtgtctttggagtgggggtgaagacagcagacaaatggtaccgtatgggtctgcgcacgctcgaggatgttcgttccagcaagaccctgaagttgaccaagatgcagaaagcgggtctgtgctattatgaagatcttgctgatggcgttacgaaagccgaagctgacgcgatttctctgctggttcaggatgcagtctggactttcgacccggatgcgctggtggagattacgggtggatttcgtcgtgggaaaccttttggtcacgacgttgatctgcttatcacatctccgggagctgagaaagaacaagaagaccagctcctgcagaaagtgaccaatctgtggaagaaacaagggttgttgctgtacggtgatctgcgtgaaagtcgctttgaagatgggaaactcccatcccgcaagatcgatgccctggaccattttcagaaatgctttgctatcctcaaactttatcaccataaagtggacaaaagcaaatgggaaatgccgacgggttcgaacgaaagcgaggccaaaagttggaaagcaattcgcgtagatctggttgtttgtccctacgatcgttttgcgtttgcgttgttgggttggaccggaagccgcatgttcgaacgtgatctgcgccgctacgccacccacgagaagaagatgatgctggacaatcatgcgctgtatgacctgaccaagaaaatctttctcaaagctaaatcggaagaggaaattttcgcacatctggggcttgaatacctggaaccgtccgaacgtaacgca

SEQ ID NO: 604 - protein, 529 aa, synthetic construct
  REGION 1..529: note = Variant of terminal deoxynucleotidyltransferase
MHHHHHHGGSGMHRIRTIDSDFGKKRQKKMDNHISSMIYEIKFHEFVLFILEKKMGATRRTFLTDLARKKGFRVENELSDSVTHIVAENNSGSDVLAWLKTHKMEKTTQFELLDISWLIESMKVGKPVDAKGKYQLMESRVDSANPDPTAGTLNILPPTTKTISQYACQRRTTLNNHNQRFTDALEILAENYEFKRNDDTCLTFMRAISVLKCLPFEVVSLKDTEGLPWIGDEVKGIMEEIIEVGESLEVQAVLNDERYQSFKLFKSVFGVGVKTADKWYRMGLRTLEDVRSSKTLKLTKMQKAGLCYYEDLADGVTKAEADAISLLVQDAVWTFDPDALVEITGGFRRGKPFGHDVDLLITSPGAEKEQEDQLLQKVTNLWKKQGLLLYGDLRESRFEDGKLPSRKIDALDHFQKCFAILKLYHHKVDKSKWEMPTGSNESEAKSWKAIRVDLVVCPYDRFAFALLGWTGSRMFERDLRRYATHEKKMMLDNHALYDLTKKIFLKAKSEEEIFAHLGLEYLEPSERNA

SEQ ID NO: 605 - DNA, 1587 bp, synthetic construct
  misc_feature 1..1587: note = Variant of terminal deoxynucleotidyltransferase
  source 1..1587: mol_type = other DNA
atgcaccatcatcatcatcatggcggtagcggcatgcaccgcattcgtaccatcgattcggacttcgggaagaaacgccagaagaagatggataaccacattagttccatgatctatgaaatcaaatttcacgagtttgtgctgttcattctcgaaaagaaaatgggtgcgacgcgtcgtacttttctgacagatttagcccgcaagaaagggttccgcgtcgagaatgaactgtcagacagcgttacccacatcgtggcagaaaataattcaggatctgacgtattggcttggctgaagacccacaagatggagaagacgacgcaatttgaactgctggatattagctggcttatcgaaagcatgaaagttggttgtccggtggacaccaaggggaaataccagttgatggaatcgcgtgtcgatagtgcgaacccagatccgacagccggtaccctcaacattctgcctcctactacgaagaccatttctcagtatgcgtgtcaacgccgcaccaccctgaacaaccataatcaacgttttacggacgcactggaaattcttgcggaaaattacgagttcaaacgcaacgatgatacttgtctgacctttatgcgtgctatttccgtgctgaaatgccttccgtttgaggtagttagcctgaaagacacggaaggattgccctggatcggtgatgaagtcaaagggattatggaagaaatcatcgaggtcggtgaatcgctggaagtgcaggccgtgctcaatgatgagcgctatcaaagcttcaaactgtttaagagtgtctttggagtgggggtgaagacagcagacaaatggtaccgtatgggtctgcgcacgctcgaggatgttcgttccagcaagaccctgaagttgaccaagatgcagaaagcgggtctgtgctattatgaagatcttgctgatggcgttacgaaagccgaagctgacgcgatttctctgctggttcaggatgcagtctggactttcgacccggatgcgctggtggagattacgggtggatttcgtcgtgggaaaccttttggtcacgacgttgatctgcttatcacatctccgggagctgagaaagaacaagaagaccagctcctgcagaaagtgaccaatctgtggaagaaacaagggttgttgctgtacggtgatctgcgtgaaagtcgctttgaagatgggaaactcccatcccgcaagatcgatgccctggaccattttcagaaatgctttgctatcctcaaactttatcaccataaagtggacaaaagcaaatgggaaatgccgacgggttcgaacgaaagcgaggccaaaagttggaaagcaattcgcgtagatctggttgtttgtccctacgatcgttttgcgtttgcgttgttgggttggaccggaagccgcatgttcgaacgtgatctgcgccgctacgccacccacgagaagaagatgatgctggacaatcatgcgctgtatgacctgaccaagaaaatctttctcaaagctaaatcggaagaggaaattttcgcacatctggggcttgaatacctggaaccgtccgaacgtaacgca

SEQ ID NO: 606 - protein, 529 aa, synthetic construct
  REGION 1..529: note = Variant of terminal deoxynucleotidyltransferase
MHHHHHHGGSGMHRIRTIDSDFGKKRQKKMDNHISSMIYEIKFHEFVLFILEKKMGATRRTFLTDLARKKGFRVENELSDSVTHIVAENNSGSDVLAWLKTHKMEKTTQFELLDISWLIESMKVGCPVDTKGKYQLMESRVDSANPDPTAGTLNILPPTTKTISQYACQRRTTLNNHNQRFTDALEILAENYEFKRNDDTCLTFMRAISVLKCLPFEVVSLKDTEGLPWIGDEVKGIMEEIIEVGESLEVQAVLNDERYQSFKLFKSVFGVGVKTADKWYRMGLRTLEDVRSSKTLKLTKMQKAGLCYYEDLADGVTKAEADAISLLVQDAVWTFDPDALVEITGGFRRGKPFGHDVDLLITSPGAEKEQEDQLLQKVTNLWKKQGLLLYGDLRESRFEDGKLPSRKIDALDHFQKCFAILKLYHHKVDKSKWEMPTGSNESEAKSWKAIRVDLVVCPYDRFAFALLGWTGSRMFERDLRRYATHEKKMMLDNHALYDLTKKIFLKAKSEEEIFAHLGLEYLEPSERNA

SEQ ID NO: 607 - DNA, 1587 bp, synthetic construct
  misc_feature 1..1587: note = Variant of terminal deoxynucleotidyltransferase
  source 1..1587: mol_type = other DNA
atgcaccatcatcatcatcatggcggtagcggcatgcaccgcattcgtaccatcgatcctgacttcgggaagaaacgccagaagaagatggataaccacattagttccatgatctatgaaatcaaatttcacgagtttgtgctgttcattctcgaaaagaaaatgggtgcgacgcgtcgtacttttctgacagatttagcccgcaagaaagggttccgcgtcgagaatgaactgtcagacagcgttacccacatcgtggcagaaaataattcaggatctgacgtattggcttggctgaagacccacaagatggagaagacgacgcaatttgaactgctggatattagctggcttatcgaaagcatgaaagttggtaaaccggtggacaccaaggggaaataccagttgatggaatcgcgtgtcgatagtgcgaacccagatccgacagccggtaccctcaacattctgcctcctactacgaagaccatttctcagtatgcgtgtcaacgccgcaccaccctgaacaaccataatcaacgttttacggacgcactggaaattcttgcggaaaattacgagttcaaacgcaacgatgatacttgtctgacctttatgcgtgctatttccgtgctgaaatgccttccgtttgaggtagttagcctgaaagacacggaaggattgccctggatcggtgatgaagtcaaagggattatggaagaaatcatcgaggtcggtgaatcgctggaagtgcaggccgtgctcaatgatgagcgctatcaaagcttcaaactgtttaagagtgtctttggagtgggggtgaagacagcagacaaatggtaccgtatgggtctgcgcacgctcgaggatgttcgttccagcaagaccctgaagttgaccaagatgcagaaagcgggtctgtgctattatgaagatcttgctgatggcgttacgaaagccgaagctgacgcgatttctctgctggttcaggatgcagtctggactttcgacccggatgcgctggtggagattacgggtggatttcgtcgtgggaaaccttttggtcacgacgttgatctgcttatcacatctccgggagctgagaaagaacaagaagaccagctcctgcagaaagtgaccaatctgtggaagaaacaagggttgttgctgtacggtgatctgcgtgaaagtcgctttgaagatgggaaactcccatcccgcaagatcgatgccctggaccattttcagaaatgctttgctatcctcaaactttatcaccataaagtggacaaaagcaaatgggaaatgccgacgggttcgaacgaaagcgaggccaaaagttggaaagcaattcgcgtagatctggttgtttgtccctacgatcgttttgcgtttgcgttgttgggttggaccggaagccgcatgttcgaacgtgatctgcgccgctacgccacccacgagaagaagatgatgctggacaatcatgcgctgtatgacctgaccaagaaaatctttctcaaagctaaatcggaagaggaaattttcgcacatctggggcttgaatacctggaaccgtccgaacgtaacgca

SEQ ID NO: 608 - protein, 529 aa, synthetic construct
  REGION 1..529: note = Variant of terminal deoxynucleotidyltransferase
MHHHHHHGGSGMHRIRTIDPDFGKKRQKKMDNHISSMIYEIKFHEFVLFILEKKMGATRRTFLTDLARKKGFRVENELSDSVTHIVAENNSGSDVLAWLKTHKMEKTTQFELLDISWLIESMKVGKPVDTKGKYQLMESRVDSANPDPTAGTLNILPPTTKTISQYACQRRTTLNNHNQRFTDALEILAENYEFKRNDDTCLTFMRAISVLKCLPFEVVSLKDTEGLPWIGDEVKGIMEEIIEVGESLEVQAVLNDERYQSFKLFKSVFGVGVKTADKWYRMGLRTLEDVRSSKTLKLTKMQKAGLCYYEDLADGVTKAEADAISLLVQDAVWTFDPDALVEITGGFRRGKPFGHDVDLLITSPGAEKEQEDQLLQKVTNLWKKQGLLLYGDLRESRFEDGKLPSRKIDALDHFQKCFAILKLYHHKVDKSKWEMPTGSNESEAKSWKAIRVDLVVCPYDRFAFALLGWTGSRMFERDLRRYATHEKKMMLDNHALYDLTKKIFLKAKSEEEIFAHLGLEYLEPSERNA

SEQ ID NO: 609 - DNA, 1587 bp, synthetic construct
  misc_feature 1..1587: note = Variant of terminal deoxynucleotidyltransferase
  source 1..1587: mol_type = other DNA
atgcaccatcatcatcatcatggcggtagcggcatgcaccgcattcgtaccatcgattcggacttcgggaagaaacgccagaagaagatggataaccacattagttccatgatctatgaaatcaaatttcaccggtttgtgctgttcattctcgaaaagaaaatgggtgcgacgcgtcgtacttttctgacagatttagcccgcaagaaagggttccgcgtcgagaatgaactgtcagacagcgttacccacatcgtggcagaaaataattcaggatctgacgtattggcttggctgaagacccacaagatggagaagacgacgcaatttgaactgctggatattagctggcttatcgaaagcatgaaagttggtaaaccggtggacaccaaggggaaataccagttgatggaatcgcgtgtcgatagtgcgaacccagatccgacagccggtaccctcaacattctgcctcctactacgaagaccatttctcagtatgcgtgtcaacgccgcaccaccctgaacaaccataatcaacgttttacggacgcactggaaattcttgcggaaaattacgagttcaaacgcaacgatgatacttgtctgacctttatgcgtgctatttccgtgctgaaatgccttccgtttgaggtagttagcctgaaagacacggaaggattgccctggatcggtgatgaagtcaaagggattatggaagaaatcatcgaggtcggtgaatcgctggaagtgcaggccgtgctcaatgatgagcgctatcaaagcttcaaactgtttaagagtgtctttggagtgggggtgaagacagcagacaaatggtaccgtatgggtctgcgcacgctcgaggatgttcgttccagcaagaccctgaagttgaccaagatgcagaaagcgggtctgtgctattatgaagatcttgctgatggcgttacgaaagccgaagctgacgcgatttctctgctggttcaggatgcagtctggactttcgacccggatgcgctggtggagattacgggtggatttcgtcgtgggaaaccttttggtcacgacgttgatctgcttatcacatctccgggagctgagaaagaacaagaagaccagctcctgcagaaagtgaccaatctgtggaagaaacaagggttgttgctgtacggtgatctgcgtgaaagtcgctttgaagatgggaaactcccatcccgcaagatcgatgccctggaccattttcagaaatgctttgctatcctcaaactttatcaccataaagtggacaaaagcaaatgggaaatgccgacgggttcgaacgaaagcgaggccaaaagttggaaagcaattcgcgtagatctggttgtttgtccctacgatcgttttgcgtttgcgttgttgggttggaccggaagccgcatgttcgaacgtgatctgcgccgctacgccacccacgagaagaagatgatgctggacaatcatgcgctgtatgacctgaccaagaaaatctttctcaaagctaaatcggaagaggaaattttcgcacatctggggcttgaatacctggaaccgtccgaacgtaacgca

SEQ ID NO: 610 - protein, 529 aa, synthetic construct
  REGION 1..529: note = Variant of terminal deoxynucleotidyltransferase
MHHHHHHGGSGMHRIRTIDSDFGKKRQKKMDNHISSMIYEIKFHRFVLFILEKKMGATRRTFLTDLARKKGFRVENELSDSVTHIVAENNSGSDVLAWLKTHKMEKTTQFELLDISWLIESMKVGKPVDTKGKYQLMESRVDSANPDPTAGTLNILPPTTKTISQYACQRRTTLNNHNQRFTDALEILAENYEFKRNDDTCLTFMRAISVLKCLPFEVVSLKDTEGLPWIGDEVKGIMEEIIEVGESLEVQAVLNDERYQSFKLFKSVFGVGVKTADKWYRMGLRTLEDVRSSKTLKLTKMQKAGLCYYEDLADGVTKAEADAISLLVQDAVWTFDPDALVEITGGFRRGKPFGHDVDLLITSPGAEKEQEDQLLQKVTNLWKKQGLLLYGDLRESRFEDGKLPSRKIDALDHFQKCFAILKLYHHKVDKSKWEMPTGSNESEAKSWKAIRVDLVVCPYDRFAFALLGWTGSRMFERDLRRYATHEKKMMLDNHALYDLTKKIFLKAKSEEEIFAHLGLEYLEPSERNA

SEQ ID NO: 611 - DNA, 1587 bp, synthetic construct
  misc_feature 1..1587: note = Variant of terminal deoxynucleotidyltransferase
  source 1..1587: mol_type = other DNA
atgcaccatcatcatcatcatggcggtagcggcatgcaccgcctgcgtaccatcgattcggacttcgggaagaaacgccagaagaagatggataaccacattagttccatgatctatgaaatcaaatttcacgagtttgtgctgttcattctcgaaaagaaaatgggtgcgacgcgtcgtacttttctgacagatttagcccgcaagaaagggttccgcgtcgagaatgaactgtcagacagcgttacccacatcgtggcagaaaataattcaggatctgacgtattggcttggctgaagacccacaagatggagaagacgacgcaatttgaactgctggatattagctggcttatcgaaagcatgaaagttggtaaaccggtggacaccaaggggaaataccagttgatggaatcgcgtgtcgatagtgcgaacccagatccgacagccggtaccctcaacattctgcctcctactacgaagaccatttctcagtatgcgtgtcaacgccgcaccaccctgaacaaccataatcaacgttttacggacgcactggaaattcttgcggaaaattacgagttcaaacgcaacgatgatacttgtctgacctttatgcgtgctatttccgtgctgaaatgccttccgtttgaggtagttagcctgaaagacacggaaggattgccctggatcggtgatgaagtcaaagggattatggaagaaatcatcgaggtcggtgaatcgctggaagtgcaggccgtgctcaatgatgagcgctatcaaagcttcaaactgtttaagagtgtctttggagtgggggtgaagacagcagacaaatggtaccgtatgggtctgcgcacgctcgaggatgttcgttccagcaagaccctgaagttgaccaagatgcagaaagcgggtctgtgctattatgaagatcttgctgatggcgttacgaaagccgaagctgacgcgatttctctgctggttcaggatgcagtctggactttcgacccggatgcgctggtggagattacgggtggatttcgtcgtgggaaaccttttggtcacgacgttgatctgcttatcacatctccgggagctgagaaagaacaagaagaccagctcctgcagaaagtgaccaatctgtggaagaaacaagggttgttgctgtacggtgatctgcgtgaaagtcgctttgaagatgggaaactcccatcccgcaagatcgatgccctggaccattttcagaaatgctttgctatcctcaaactttatcaccataaagtggacaaaagcaaatgggaaatgccgacgggttcgaacgaaagcgaggccaaaagttggaaagcaattcgcgtagatctggttgtttgtccctacgatcgttttgcgtttgcgttgttgggttggaccggaagccgcatgttcgaacgtgatctgcgccgctacgccacccacgagaagaagatgatgctggacaatcatgcgctgtatgacctgaccaagaaaatctttctcaaagctaaatcggaagaggaaattttcgcacatctggggcttgaatacctggaaccgtccgaacgtaacgca

SEQ ID NO: 612 - protein, 529 aa, synthetic construct
  REGION 1..529: note = Variant of terminal deoxynucleotidyltransferase
MHHHHHHGGSGMHRLRTIDSDFGKKRQKKMDNHISSMIYEIKFHEFVLFILEKKMGATRRTFLTDLARKKGFRVENELSDSVTHIVAENNSGSDVLAWLKTHKMEKTTQFELLDISWLIESMKVGKPVDTKGKYQLMESRVDSANPDPTAGTLNILPPTTKTISQYACQRRTTLNNHNQRFTDALEILAENYEFKRNDDTCLTFMRAISVLKCLPFEVVSLKDTEGLPWIGDEVKGIMEEIIEVGESLEVQAVLNDERYQSFKLFKSVFGVGVKTADKWYRMGLRTLEDVRSSKTLKLTKMQKAGLCYYEDLADGVTKAEADAISLLVQDAVWTFDPDALVEITGGFRRGKPFGHDVDLLITSPGAEKEQEDQLLQKVTNLWKKQGLLLYGDLRESRFEDGKLPSRKIDALDHFQKCFAILKLYHHKVDKSKWEMPTGSNESEAKSWKAIRVDLVVCPYDRFAFALLGWTGSRMFERDLRRYATHEKKMMLDNHALYDLTKKIFLKAKSEEEIFAHLGLEYLEPSERNA

SEQ ID NO: 613 - DNA, 1587 bp, synthetic construct
  misc_feature 1..1587: note = Variant of terminal deoxynucleotidyltransferase
  source 1..1587: mol_type = other DNA
atgcaccatcatcatcatcatggcggtagcggcatgcaccgcattcgtaccatcgattcggacttcgggaagaaacgccagaagaagatggataaccacattagttccatgatctatgaaatcaaatttcacgagtttgtgctgttcattctcgaaaagaaaatgggtgcgacgcgtcgtacttttctgacagatttagcccgcaagaaagggttccgcgtcgagaatgaactgtcagacagcgttacccacatcgtggcagaaaataattcaggatctgacgtattggcttggctgaagacccacaagatggagaagacgacgcaatttgaactgctggatattagctggcttatcgaaagcatgaaagttggtaaaccggtggaccagaaggggaaataccagttgatggaatcgcgtgtcgatagtgcgaacccagatccgacagccggtaccctcaacattctgcctcctactacgaagaccatttctcagtatgcgtgtcaacgccgcaccaccctgaacaaccataatcaacgttttacggacgcactggaaattcttgcggaaaattacgagttcaaacgcaacgatgatacttgtctgacctttatgcgtgctatttccgtgctgaaatgccttccgtttgaggtagttagcctgaaagacacggaaggattgccctggatcggtgatgaagtcaaagggattatggaagaaatcatcgaggtcggtgaatcgctggaagtgcaggccgtgctcaatgatgagcgctatcaaagcttcaaactgtttaagagtgtctttggagtgggggtgaagacagcagacaaatggtaccgtatgggtctgcgcacgctcgaggatgttcgttccagcaagaccctgaagttgaccaagatgcagaaagcgggtctgtgctattatgaagatcttgctgatggcgttacgaaagccgaagctgacgcgatttctctgctggttcaggatgcagtctggactttcgacccggatgcgctggtggagattacgggtggatttcgtcgtgggaaaccttttggtcacgacgttgatctgcttatcacatctccgggagctgagaaagaacaagaagaccagctcctgcagaaagtgaccaatctgtggaagaaacaagggttgttgctgtacggtgatctgcgtgaaagtcgctttgaagatgggaaactcccatcccgcaagatcgatgccctggaccattttcagaaatgctttgctatcctcaaactttatcaccataaagtggacaaaagcaaatgggaaatgccgacgggttcgaacgaaagcgaggccaaaagttggaaagcaattcgcgtagatctggttgtttgtccctacgatcgttttgcgtttgcgttgttgggttggaccggaagccgcatgttcgaacgtgatctgcgccgctacgccacccacgagaagaagatgatgctggacaatcatgcgctgtatgacctgaccaagaaaatctttctcaaagctaaatcggaagaggaaattttcgcacatctggggcttgaatacctggaaccgtccgaacgtaacgca

SEQ ID NO: 614 - protein, 529 aa, synthetic construct
  REGION 1..529: note = Variant of terminal deoxynucleotidyltransferase
MHHHHHHGGSGMHRIRTIDSDFGKKRQKKMDNHISSMIYEIKFHEFVLFILEKKMGATRRTFLTDLARKKGFRVENELSDSVTHIVAENNSGSDVLAWLKTHKMEKTTQFELLDISWLIESMKVGKPVDQKGKYQLMESRVDSANPDPTAGTLNILPPTTKTISQYACQRRTTLNNHNQRFTDALEILAENYEFKRNDDTCLTFMRAISVLKCLPFEVVSLKDTEGLPWIGDEVKGIMEEIIEVGESLEVQAVLNDERYQSFKLFKSVFGVGVKTADKWYRMGLRTLEDVRSSKTLKLTKMQKAGLCYYEDLADGVTKAEADAISLLVQDAVWTFDPDALVEITGGFRRGKPFGHDVDLLITSPGAEKEQEDQLLQKVTNLWKKQGLLLYGDLRESRFEDGKLPSRKIDALDHFQKCFAILKLYHHKVDKSKWEMPTGSNESEAKSWKAIRVDLVVCPYDRFAFALLGWTGSRMFERDLRRYATHEKKMMLDNHALYDLTKKIFLKAKSEEEIFAHLGLEYLEPSERNA

SEQ ID NO: 615 - DNA, 1587 bp, synthetic construct
  misc_feature 1..1587: note = Variant of terminal deoxynucleotidyltransferase
  source 1..1587: mol_type = other DNA
atgcaccatcatcatcatcatggcggtagcggcatgcaccgcattcgtaccatcgattcggacttcgggaagaaacgccagaagaagatggataaccacattagttccatgatctatgaaatcaaatttcacgagtttgtgctgttcattctcgaaaagaaaatgggtgcgacgcgtcgtacttttctgacagatttagcccgcaagaaagggttccgcgtcgagaatgaactgtcagacagcgttacccacatcgtggcagaaaataattcaggatctgacgtattggcttggctgaagacccacaagatggagaagacgacgcaatttgaactgctggatattagctggcttatcgaaagcatgaaagttggtaaaccggtggactctaaggggaaataccagttgatggaatcgcgtgtcgatagtgcgaacccagatccgacagccggtaccctcaacattctgcctcctactacgaagaccatttctcagtatgcgtgtcaacgccgcaccaccctgaacaaccataatcaacgttttacggacgcactggaaattcttgcggaaaattacgagttcaaacgcaacgatgatacttgtctgacctttatgcgtgctatttccgtgctgaaatgccttccgtttgaggtagttagcctgaaagacacggaaggattgccctggatcggtgatgaagtcaaagggattatggaagaaatcatcgaggtcggtgaatcgctggaagtgcaggccgtgctcaatgatgagcgctatcaaagcttcaaactgtttaagagtgtctttggagtgggggtgaagacagcagacaaatggtaccgtatgggtctgcgcacgctcgaggatgttcgttccagcaagaccctgaagttgaccaagatgcagaaagcgggtctgtgctattatgaagatcttgctgatggcgttacgaaagccgaagctgacgcgatttctctgctggttcaggatgcagtctggactttcgacccggatgcgctggtggagattacgggtggatttcgtcgtgggaaaccttttggtcacgacgttgatctgcttatcacatctccgggagctgagaaagaacaagaagaccagctcctgcagaaagtgaccaatctgtggaagaaacaagggttgttgctgtacggtgatctgcgtgaaagtcgctttgaagatgggaaactcccatcccgcaagatcgatgccctggaccattttcagaaatgctttgctatcctcaaactttatcaccataaagtggacaaaagcaaatgggaaatgccgacgggttcgaacgaaagcgaggccaaaagttggaaagcaattcgcgtagatctggttgtttgtccctacgatcgttttgcgtttgcgttgttgggttggaccggaagccgcatgttcgaacgtgatctgcgccgctacgccacccacgagaagaagatgatgctggacaatcatgcgctgtatgacctgaccaagaaaatctttctcaaagctaaatcggaagaggaaattttcgcacatctggggcttgaatacctggaaccgtccgaacgtaacgca

SEQ ID NO: 616 - protein, 529 aa, synthetic construct
  REGION 1..529: note = Variant of terminal deoxynucleotidyltransferase
MHHHHHHGGSGMHRIRTIDSDFGKKRQKKMDNHISSMIYEIKFHEFVLFILEKKMGATRRTFLTDLARKKGFRVENELSDSVTHIVAENNSGSDVLAWLKTHKMEKTTQFELLDISWLIESMKVGKPVDSKGKYQLMESRVDSANPDPTAGTLNILPPTTKTISQYACQRRTTLNNHNQRFTDALEILAENYEFKRNDDTCLTFMRAISVLKCLPFEVVSLKDTEGLPWIGDEVKGIMEEIIEVGESLEVQAVLNDERYQSFKLFKSVFGVGVKTADKWYRMGLRTLEDVRSSKTLKLTKMQKAGLCYYEDLADGVTKAEADAISLLVQDAVWTFDPDALVEITGGFRRGKPFGHDVDLLITSPGAEKEQEDQLLQKVTNLWKKQGLLLYGDLRESRFEDGKLPSRKIDALDHFQKCFAILKLYHHKVDKSKWEMPTGSNESEAKSWKAIRVDLVVCPYDRFAFALLGWTGSRMFERDLRRYATHEKKMMLDNHALYDLTKKIFLKAKSEEEIFAHLGLEYLEPSERNA

SEQ ID NO: 617 - DNA, 1587 bp, synthetic construct
  misc_feature 1..1587: note = Variant of terminal deoxynucleotidyltransferase
  source 1..1587: mol_type = other DNA
atgcaccatcatcatcatcatggcggtagcggcatgcaccgcattcgtaccatcgattcggacttcgggaagaaacgccagaagaagatggataaccacattagttccatgatctatgaaatcaaatttcacgagtttgtgctgttcattctcgaaaagaaaatgggtgcgacgcgtcgtacttttctgacagatttagcccgcaagaaagggttccgcgtcgagaatgaactgtcagacagcgttacccacatcgtggcagaaaataattcaggatctgacgtattgacgtggctgaagacccacaagatggagaagacgacgcaatttgaactgctggatattagctggcttatcgaaagcatgaaagttggtaaaccggtggacaccaaggggaaataccagttgatggaatcgcgtgtcgatagtgcgaacccagatccgacagccggtaccctcaacattctgcctcctactacgaagaccatttctcagtatgcgtgtcaacgccgcaccaccctgaacaaccataatcaacgttttacggacgcactggaaattcttgcggaaaattacgagttcaaacgcaacgatgatacttgtctgacctttatgcgtgctatttccgtgctgaaatgccttccgtttgaggtagttagcctgaaagacacggaaggattgccctggatcggtgatgaagtcaaagggattatggaagaaatcatcgaggtcggtgaatcgctggaagtgcaggccgtgctcaatgatgagcgctatcaaagcttcaaactgtttaagagtgtctttggagtgggggtgaagacagcagacaaatggtaccgtatgggtctgcgcacgctcgaggatgttcgttccagcaagaccctgaagttgaccaagatgcagaaagcgggtctgtgctattatgaagatcttgctgatggcgttacgaaagccgaagctgacgcgatttctctgctggttcaggatgcagtctggactttcgacccggatgcgctggtggagattacgggtggatttcgtcgtgggaaaccttttggtcacgacgttgatctgcttatcacatctccgggagctgagaaagaacaagaagaccagctcctgcagaaagtgaccaatctgtggaagaaacaagggttgttgctgtacggtgatctgcgtgaaagtcgctttgaagatgggaaactcccatcccgcaagatcgatgccctggaccattttcagaaatgctttgctatcctcaaactttatcaccataaagtggacaaaagcaaatgggaaatgccgacgggttcgaacgaaagcgaggccaaaagttggaaagcaattcgcgtagatctggttgtttgtccctacgatcgttttgcgtttgcgttgttgggttggaccggaagccgcatgttcgaacgtgatctgcgccgctacgccacccacgagaagaagatgatgctggacaatcatgcgctgtatgacctgaccaagaaaatctttctcaaagctaaatcggaagaggaaattttcgcacatctggggcttgaatacctggaaccgtccgaacgtaacgca

SEQ ID NO: 618 - protein, 529 aa, synthetic construct
  REGION 1..529: note = Variant of terminal deoxynucleotidyltransferase
MHHHHHHGGSGMHRIRTIDSDFGKKRQKKMDNHISSMIYEIKFHEFVLFILEKKMGATRRTFLTDLARKKGFRVENELSDSVTHIVAENNSGSDVLTWLKTHKMEKTTQFELLDISWLIESMKVGKPVDTKGKYQLMESRVDSANPDPTAGTLNILPPTTKTISQYACQRRTTLNNHNQRFTDALEILAENYEFKRNDDTCLTFMRAISVLKCLPFEVVSLKDTEGLPWIGDEVKGIMEEIIEVGESLEVQAVLNDERYQSFKLFKSVFGVGVKTADKWYRMGLRTLEDVRSSKTLKLTKMQKAGLCYYEDLADGVTKAEADAISLLVQDAVWTFDPDALVEITGGFRRGKPFGHDVDLLITSPGAEKEQEDQLLQKVTNLWKKQGLLLYGDLRESRFEDGKLPSRKIDALDHFQKCFAILKLYHHKVDKSKWEMPTGSNESEAKSWKAIRVDLVVCPYDRFAFALLGWTGSRMFERDLRRYATHEKKMMLDNHALYDLTKKIFLKAKSEEEIFAHLGLEYLEPSERNA

SEQ ID NO: 619 - DNA, 1587 bp, synthetic construct
  misc_feature 1..1587: note = Variant of terminal deoxynucleotidyltransferase
  source 1..1587: mol_type = other DNA
atgcaccatcatcatcatcatggcggtagcggcatgcaccgcattcgtaccatcgattcggacttcgggaagaaacgccagaggaagatggataaccacattagttccatgatctatgaaatcaaatttcacgagtttgtgctgttcattctcgaaaagaaaatgggtgcgacgcgtcgtacttttctgacagatttagcccgcaagaaagggttccgcgtcgagaatgaactgtcagacagcgttacccacatcgtggcagaaaataattcaggatctgacgtattggcttggctgaagacccacaagatggagaagacgacgcaatttgaactgctggatattagctggcttatcgaaagcatgaaagttggtaaaccggtggacaccaaggggaaataccagttgatggaatcgcgtgtcgatagtgcgaacccagatccgacagccggtaccctcaacattctgcctcctactacgaagaccatttctcagtatgcgtgtcaacgccgcaccaccctgaacaaccataatcaacgttttacggacgcactggaaattcttgcggaaaattacgagttcaaacgcaacgatgatacttgtctgacctttatgcgtgctatttccgtgctgaaatgccttccgtttgaggtagttagcctgaaagacacggaaggattgccctggatcggtgatgaagtcaaagggattatggaagaaatcatcgaggtcggtgaatcgctggaagtgcaggccgtgctcaatgatgagcgctatcaaagcttcaaactgtttaagagtgtctttggagtgggggtgaagacagcagacaaatggtaccgtatgggtctgcgcacgctcgaggatgttcgttccagcaagaccctgaagttgaccaagatgcagaaagcgggtctgtgctattatgaagatcttgctgatggcgttacgaaagccgaagctgacgcgatttctctgctggttcaggatgcagtctggactttcgacccggatgcgctggtggagattacgggtggatttcgtcgtgggaaaccttttggtcacgacgttgatctgcttatcacatctccgggagctgagaaagaacaagaagaccagctcctgcagaaagtgaccaatctgtggaagaaacaagggttgttgctgtacggtgatctgcgtgaaagtcgctttgaagatgggaaactcccatcccgcaagatcgatgccctggaccattttcagaaatgctttgctatcctcaaactttatcaccataaagtggacaaaagcaaatgggaaatgccgacgggttcgaacgaaagcgaggccaaaagttggaaagcaattcgcgtagatctggttgtttgtccctacgatcgttttgcgtttgcgttgttgggttggaccggaagccgcatgttcgaacgtgatctgcgccgctacgccacccacgagaagaagatgatgctggacaatcatgcgctgtatgacctgaccaagaaaatctttctcaaagctaaatcggaagaggaaattttcgcacatctggggcttgaatacctggaaccgtccgaacgtaacgca

SEQ ID NO: 620 - protein, 529 aa, synthetic construct
  REGION 1..529: note = Variant of terminal deoxynucleotidyltransferase
MHHHHHHGGSGMHRIRTIDSDFGKKRQRKMDNHISSMIYEIKFHEFVLFILEKKMGATRRTFLTDLARKKGFRVENELSDSVTHIVAENNSGSDVLAWLKTHKMEKTTQFELLDISWLIESMKVGKPVDTKGKYQLMESRVDSANPDPTAGTLNILPPTTKTISQYACQRRTTLNNHNQRFTDALEILAENYEFKRNDDTCLTFMRAISVLKCLPFEVVSLKDTEGLPWIGDEVKGIMEEIIEVGESLEVQAVLNDERYQSFKLFKSVFGVGVKTADKWYRMGLRTLEDVRSSKTLKLTKMQKAGLCYYEDLADGVTKAEADAISLLVQDAVWTFDPDALVEITGGFRRGKPFGHDVDLLITSPGAEKEQEDQLLQKVTNLWKKQGLLLYGDLRESRFEDGKLPSRKIDALDHFQKCFAILKLYHHKVDKSKWEMPTGSNESEAKSWKAIRVDLVVCPYDRFAFALLGWTGSRMFERDLRRYATHEKKMMLDNHALYDLTKKIFLKAKSEEEIFAHLGLEYLEPSERNA

SEQ ID NO: 621 - DNA, 1587 bp, synthetic construct
  misc_feature 1..1587: note = Variant of terminal deoxynucleotidyltransferase
  source 1..1587: mol_type = other DNA
atgcaccatcatcatcatcatggcggtagcggcatgcaccgcattcgtaccatcgattcggacttcgggaagaaacgccagaagaagatggataaccacattagttccatgatctatgaaatcaaatttcacgagtttgtgctgttcattctcgaaaagaaaatgggtgcgacgcgtcgtacttttctgacagatttagcccgcaagaaagggttccgcgtcgagaatgaactgtcagacagcgttacccacatcgtggcagaaaataattcaggatctgacgtattggcttggctgaagacccacaagatggagaagacgacgaattttgaactgctggatattagctggcttatcgaaagcatgaaagttggtaaaccggtggacaccaaggggaaataccagttgatggaatcgcgtgtcgatagtgcgaacccagatccgacagccggtaccctcaacattctgcctcctactacgaagaccatttctcagtatgcgtgtcaacgccgcaccaccctgaacaaccataatcaacgttttacggacgcactggaaattcttgcggaaaattacgagttcaaacgcaacgatgatacttgtctgacctttatgcgtgctatttccgtgctgaaatgccttccgtttgaggtagttagcctgaaagacacggaaggattgccctggatcggtgatgaagtcaaagggattatggaagaaatcatcgaggtcggtgaatcgctggaagtgcaggccgtgctcaatgatgagcgctatcaaagcttcaaactgtttaagagtgtctttggagtgggggtgaagacagcagacaaatggtaccgtatgggtctgcgcacgctcgaggatgttcgttccagcaagaccctgaagttgaccaagatgcagaaagcgggtctgtgctattatgaagatcttgctgatggcgttacgaaagccgaagctgacgcgatttctctgctggttcaggatgcagtctggactttcgacccggatgcgctggtggagattacgggtggatttcgtcgtgggaaaccttttggtcacgacgttgatctgcttatcacatctccgggagctgagaaagaacaagaagaccagctcctgcagaaagtgaccaatctgtggaagaaacaagggttgttgctgtacggtgatctgcgtgaaagtcgctttgaagatgggaaactcccatcccgcaagatcgatgccctggaccattttcagaaatgctttgctatcctcaaactttatcaccataaagtggacaaaagcaaatgggaaatgccgacgggttcgaacgaaagcgaggccaaaagttggaaagcaattcgcgtagatctggttgtttgtccctacgatcgttttgcgtttgcgttgttgggttggaccggaagccgcatgttcgaacgtgatctgcgccgctacgccacccacgagaagaagatgatgctggacaatcatgcgctgtatgacctgaccaagaaaatctttctcaaagctaaatcggaagaggaaattttcgcacatctggggcttgaatacctggaaccgtccgaacgtaacgca

SEQ ID NO: 622 - protein, 529 aa, synthetic construct
  REGION 1..529: note = Variant of terminal deoxynucleotidyltransferase
MHHHHHHGGSGMHRIRTIDSDFGKKRQKKMDNHISSMIYEIKFHEFVLFILEKKMGATRRTFLTDLARKKGFRVENELSDSVTHIVAENNSGSDVLAWLKTHKMEKTTNFELLDISWLIESMKVGKPVDTKGKYQLMESRVDSANPDPTAGTLNILPPTTKTISQYACQRRTTLNNHNQRFTDALEILAENYEFKRNDDTCLTFMRAISVLKCLPFEVVSLKDTEGLPWIGDEVKGIMEEIIEVGESLEVQAVLNDERYQSFKLFKSVFGVGVKTADKWYRMGLRTLEDVRSSKTLKLTKMQKAGLCYYEDLADGVTKAEADAISLLVQDAVWTFDPDALVEITGGFRRGKPFGHDVDLLITSPGAEKEQEDQLLQKVTNLWKKQGLLLYGDLRESRFEDGKLPSRKIDALDHFQKCFAILKLYHHKVDKSKWEMPTGSNESEAKSWKAIRVDLVVCPYDRFAFALLGWTGSRMFERDLRRYATHEKKMMLDNHALYDLTKKIFLKAKSEEEIFAHLGLEYLEPSERNA

SEQ ID NO: 623 - DNA, 1587 bp, synthetic construct
  misc_feature 1..1587: note = Variant of terminal deoxynucleotidyltransferase
  source 1..1587: mol_type = other DNA
atgcaccatcatcatcatcatggcggtagcggcatgcaccgcattcgtaccatcgattcggacttcgggaagaaacgccagaagaagatggataaccacattagttccatgatctatgaaatcaaatttcacgagatggtgctgttcattctcgaaaagaaaatgggtgcgacgcgtcgtacttttctgacagatttagcccgcaagaaagggttccgcgtcgagaatgaactgtcagacagcgttacccacatcgtggcagaaaataattcaggatctgacgtattggcttggctgaagacccacaagatggagaagacgacgcaatttgaactgctggatattagctggcttatcgaaagcatgaaagttggtaaaccggtggacaccaaggggaaataccagttgatggaatcgcgtgtcgatagtgcgaacccagatccgacagccggtaccctcaacattctgcctcctactacgaagaccatttctcagtatgcgtgtcaacgccgcaccaccctgaacaaccataatcaacgttttacggacgcactggaaattcttgcggaaaattacgagttcaaacgcaacgatgatacttgtctgacctttatgcgtgctatttccgtgctgaaatgccttccgtttgaggtagttagcctgaaagacacggaaggattgccctggatcggtgatgaagtcaaagggattatggaagaaatcatcgaggtcggtgaatcgctggaagtgcaggccgtgctcaatgatgagcgctatcaaagcttcaaactgtttaagagtgtctttggagtgggggtgaagacagcagacaaatggtaccgtatgggtctgcgcacgctcgaggatgttcgttccagcaagaccctgaagttgaccaagatgcagaaagcgggtctgtgctattatgaagatcttgctgatggcgttacgaaagccgaagctgacgcgatttctctgctggttcaggatgcagtctggactttcgacccggatgcgctggtggagattacgggtggatttcgtcgtgggaaaccttttggtcacgacgttgatctgcttatcacatctccgggagctgagaaagaacaagaagaccagctcctgcagaaagtgaccaatctgtggaagaaacaagggttgttgctgtacggtgatctgcgtgaaagtcgctttgaagatgggaaactcccatcccgcaagatcgatgccctggaccattttcagaaatgctttgctatcctcaaactttatcaccataaagtggacaaaagcaaatgggaaatgccgacgggttcgaacgaaagcgaggccaaaagttggaaagcaattcgcgtagatctggttgtttgtccctacgatcgttttgcgtttgcgttgttgggttggaccggaagccgcatgttcgaacgtgatctgcgccgctacgccacccacgagaagaagatgatgctggacaatcatgcgctgtatgacctgaccaagaaaatctttctcaaagctaaatcggaagaggaaattttcgcacatctggggcttgaatacctggaaccgtccgaacgtaacgca

SEQ ID NO: 624 - protein, 529 aa, synthetic construct
  REGION 1..529: note = Variant of terminal deoxynucleotidyltransferase
MHHHHHHGGSGMHRIRTIDSDFGKKRQKKMDNHISSMIYEIKFHEMVLFILEKKMGATRRTFLTDLARKKGFRVENELSDSVTHIVAENNSGSDVLAWLKTHKMEKTTQFELLDISWLIESMKVGKPVDTKGKYQLMESRVDSANPDPTAGTLNILPPTTKTISQYACQRRTTLNNHNQRFTDALEILAENYEFKRNDDTCLTFMRAISVLKCLPFEVVSLKDTEGLPWIGDEVKGIMEEIIEVGESLEVQAVLNDERYQSFKLFKSVFGVGVKTADKWYRMGLRTLEDVRSSKTLKLTKMQKAGLCYYEDLADGVTKAEADAISLLVQDAVWTFDPDALVEITGGFRRGKPFGHDVDLLITSPGAEKEQEDQLLQKVTNLWKKQGLLLYGDLRESRFEDGKLPSRKIDALDHFQKCFAILKLYHHKVDKSKWEMPTGSNESEAKSWKAIRVDLVVCPYDRFAFALLGWTGSRMFERDLRRYATHEKKMMLDNHALYDLTKKIFLKAKSEEEIFAHLGLEYLEPSERNA

SEQ ID NO: 625 - DNA, 1587 bp, synthetic construct
  misc_feature 1..1587: note = Variant of terminal deoxynucleotidyltransferase
  source 1..1587: mol_type = other DNA
atgcaccatcatcatcatcatggcggtagcggcatgcaccgcattcgtaccatcgattcggacttcgggaagaaacgccagaagaagatggataaccacattagttccatgatctatgaaatcaaatttcacgagtttgtgctgttcattctcgaaaagaaaatgggtgcgacgcgtcgtacttttctgacagatttagcccgcaagaaagggttccgcgtcgagaatgaactgtcagacagcgttacccacatcgtggcagaaaataattcaggatctgacgtattggcttggctgaagacccacaagatggaggttacgacgcaatttgaactgctggatattagctggcttatcgaaagcatgaaagttggtaaaccggtggacaccaaggggaaataccagttgatggaatcgcgtgtcgatagtgcgaacccagatccgacagccggtaccctcaacattctgcctcctactacgaagaccatttctcagtatgcgtgtcaacgccgcaccaccctgaacaaccataatcaacgttttacggacgcactggaaattcttgcggaaaattacgagttcaaacgcaacgatgatacttgtctgacctttatgcgtgctatttccgtgctgaaatgccttccgtttgaggtagttagcctgaaagacacggaaggattgccctggatcggtgatgaagtcaaagggattatggaagaaatcatcgaggtcggtgaatcgctggaagtgcaggccgtgctcaatgatgagcgctatcaaagcttcaaactgtttaagagtgtctttggagtgggggtgaagacagcagacaaatggtaccgtatgggtctgcgcacgctcgaggatgttcgttccagcaagaccctgaagttgaccaagatgcagaaagcgggtctgtgctattatgaagatcttgctgatggcgttacgaaagccgaagctgacgcgatttctctgctggttcaggatgcagtctggactttcgacccggatgcgctggtggagattacgggtggatttcgtcgtgggaaaccttttggtcacgacgttgatctgcttatcacatctccgggagctgagaaagaacaagaagaccagctcctgcagaaagtgaccaatctgtggaagaaacaagggttgttgctgtacggtgatctgcgtgaaagtcgctttgaagatgggaaactcccatcccgcaagatcgatgccctggaccattttcagaaatgctttgctatcctcaaactttatcaccataaagtggacaaaagcaaatgggaaatgccgacgggttcgaacgaaagcgaggccaaaagttggaaagcaattcgcgtagatctggttgtttgtccctacgatcgttttgcgtttgcgttgttgggttggaccggaagccgcatgttcgaacgtgatctgcgccgctacgccacccacgagaagaagatgatgctggacaatcatgcgctgtatgacctgaccaagaaaatctttctcaaagctaaatcggaagaggaaattttcgcacatctggggcttgaatacctggaaccgtccgaacgtaacgca

SEQ ID NO: 626 - protein, 529 aa, synthetic construct
  REGION 1..529: note = Variant of terminal deoxynucleotidyltransferase
MHHHHHHGGSGMHRIRTIDSDFGKKRQKKMDNHISSMIYEIKFHEFVLFILEKKMGATRRTFLTDLARKKGFRVENELSDSVTHIVAENNSGSDVLAWLKTHKMEVTTQFELLDISWLIESMKVGKPVDTKGKYQLMESRVDSANPDPTAGTLNILPPTTKTISQYACQRRTTLNNHNQRFTDALEILAENYEFKRNDDTCLTFMRAISVLKCLPFEVVSLKDTEGLPWIGDEVKGIMEEIIEVGESLEVQAVLNDERYQSFKLFKSVFGVGVKTADKWYRMGLRTLEDVRSSKTLKLTKMQKAGLCYYEDLADGVTKAEADAISLLVQDAVWTFDPDALVEITGGFRRGKPFGHDVDLLITSPGAEKEQEDQLLQKVTNLWKKQGLLLYGDLRESRFEDGKLPSRKIDALDHFQKCFAILKLYHHKVDKSKWEMPTGSNESEAKSWKAIRVDLVVCPYDRFAFALLGWTGSRMFERDLRRYATHEKKMMLDNHALYDLTKKIFLKAKSEEEIFAHLGLEYLEPSERNA

SEQ ID NO: 627 - DNA, 1587 bp, synthetic construct
  misc_feature 1..1587: note = Variant of terminal deoxynucleotidyltransferase
  source 1..1587: mol_type = other DNA
atgcaccatcatcatcatcatggcggtagcggcatgcaccgcattcgtaccatcgattcggacttcgggaagaaacgccagaagaagatggataaccacattagttccatgatctatgaaatcaaatttcacgagtttgtgctgttcattctcgaaaagaaaatgggtgcgacgcgtcgtacttttctgacagatttagcccgcaagaaagggttccgcgtcgagaatgaactgtcagacagcgttacccacatcgtggcagaaaataattcaggatctgacgtattggcttggctgaagacccacaagatggagaagacgacgcaatttgaactgctggatattagctggctttttgaaagcatgaaagttggtaaaccggtggacaccaaggggaaataccagttgatggaatcgcgtgtcgatagtgcgaacccagatccgacagccggtaccctcaacattctgcctcctactacgaagaccatttctcagtatgcgtgtcaacgccgcaccaccctgaacaaccataatcaacgttttacggacgcactggaaattcttgcggaaaattacgagttcaaacgcaacgatgatacttgtctgacctttatgcgtgctatttccgtgctgaaatgccttccgtttgaggtagttagcctgaaagacacggaaggattgccctggatcggtgatgaagtcaaagggattatggaagaaatcatcgaggtcggtgaatcgctggaagtgcaggccgtgctcaatgatgagcgctatcaaagcttcaaactgtttaagagtgtctttggagtgggggtgaagacagcagacaaatggtaccgtatgggtctgcgcacgctcgaggatgttcgttccagcaagaccctgaagttgaccaagatgcagaaagcgggtctgtgctattatgaagatcttgctgatggcgttacgaaagccgaagctgacgcgatttctctgctggttcaggatgcagtctggactttcgacccggatgcgctggtggagattacgggtggatttcgtcgtgggaaaccttttggtcacgacgttgatctgcttatcacatctccgggagctgagaaagaacaagaagaccagctcctgcagaaagtgaccaatctgtggaagaaacaagggttgttgctgtacggtgatctgcgtgaaagtcgctttgaagatgggaaactcccatcccgcaagatcgatgccctggaccattttcagaaatgctttgctatcctcaaactttatcaccataaagtggacaaaagcaaatgggaaatgccgacgggttcgaacgaaagcgaggccaaaagttggaaagcaattcgcgtagatctggttgtttgtccctacgatcgttttgcgtttgcgttgttgggttggaccggaagccgcatgttcgaacgtgatctgcgccgctacgccacccacgagaagaagatgatgctggacaatcatgcgctgtatgacctgaccaagaaaatctttctcaaagctaaatcggaagaggaaattttcgcacatctggggcttgaatacctggaaccgtccgaacgtaacgca

SEQ ID NO: 628 - protein, 529 aa, synthetic construct
  REGION 1..529: note = Variant of terminal deoxynucleotidyltransferase
MHHHHHHGGSGMHRIRTIDSDFGKKRQKKMDNHISSMIYEIKFHEFVLFILEKKMGATRRTFLTDLARKKGFRVENELSDSVTHIVAENNSGSDVLAWLKTHKMEKTTQFELLDISWLFESMKVGKPVDTKGKYQLMESRVDSANPDPTAGTLNILPPTTKTISQYACQRRTTLNNHNQRFTDALEILAENYEFKRNDDTCLTFMRAISVLKCLPFEVVSLKDTEGLPWIGDEVKGIMEEIIEVGESLEVQAVLNDERYQSFKLFKSVFGVGVKTADKWYRMGLRTLEDVRSSKTLKLTKMQKAGLCYYEDLADGVTKAEADAISLLVQDAVWTFDPDALVEITGGFRRGKPFGHDVDLLITSPGAEKEQEDQLLQKVTNLWKKQGLLLYGDLRESRFEDGKLPSRKIDALDHFQKCFAILKLYHHKVDKSKWEMPTGSNESEAKSWKAIRVDLVVCPYDRFAFALLGWTGSRMFERDLRRYATHEKKMMLDNHALYDLTKKIFLKAKSEEEIFAHLGLEYLEPSERNA

SEQ ID NO: 629 - DNA, 1587 bp, synthetic construct
  misc_feature 1..1587: note = Variant of terminal deoxynucleotidyltransferase
  source 1..1587: mol_type = other DNA
atgcaccatcatcatcatcatggcggtagcggcatgcaccgcattcgtacctatgattcggacttcgggaagaaacgccagaagaagatggataaccacattagttccatgatctatgaaatcaaatttcacgagtttgtgctgttcattctcgaaaagaaaatgggtgcgacgcgtcgtacttttctgacagatttagcccgcaagaaagggttccgcgtcgagaatgaactgtcagacagcgttacccacatcgtggcagaaaataattcaggatctgacgtattggcttggctgaagacccacaagatggagaagacgacgcaatttgaactgctggatattagctggcttatcgaaagcatgaaagttggtaaaccggtggacaccaaggggaaataccagttgatggaatcgcgtgtcgatagtgcgaacccagatccgacagccggtaccctcaacattctgcctcctactacgaagaccatttctcagtatgcgtgtcaacgccgcaccaccctgaacaaccataatcaacgttttacggacgcactggaaattcttgcggaaaattacgagttcaaacgcaacgatgatacttgtctgacctttatgcgtgctatttccgtgctgaaatgccttccgtttgaggtagttagcctgaaagacacggaaggattgccctggatcggtgatgaagtcaaagggattatggaagaaatcatcgaggtcggtgaatcgctggaagtgcaggccgtgctcaatgatgagcgctatcaaagcttcaaactgtttaagagtgtctttggagtgggggtgaagacagcagacaaatggtaccgtatgggtctgcgcacgctcgaggatgttcgttccagcaagaccctgaagttgaccaagatgcagaaagcgggtctgtgctattatgaagatcttgctgatggcgttacgaaagccgaagctgacgcgatttctctgctggttcaggatgcagtctggactttcgacccggatgcgctggtggagattacgggtggatttcgtcgtgggaaaccttttggtcacgacgttgatctgcttatcacatctccgggagctgagaaagaacaagaagaccagctcctgcagaaagtgaccaatctgtggaagaaacaagggttgttgctgtacggtgatctgcgtgaaagtcgctttgaagatgggaaactcccatcccgcaagatcgatgccctggaccattttcagaaatgctttgctatcctcaaactttatcaccataaagtggacaaaagcaaatgggaaatgccgacgggttcgaacgaaagcgaggccaaaagttggaaagcaattcgcgtagatctggttgtttgtccctacgatcgttttgcgtttgcgttgttgggttggaccggaagccgcatgttcgaacgtgatctgcgccgctacgccacccacgagaagaagatgatgctggacaatcatgcgctgtatgacctgaccaagaaaatctttctcaaagctaaatcggaagaggaaattttcgcacatctggggcttgaatacctggaaccgtccgaacgtaacgca

SEQ ID NO: 630 - protein, 529 aa, synthetic construct
  REGION 1..529: note = Variant of terminal deoxynucleotidyltransferase
MHHHHHHGGSGMHRIRTYDSDFGKKRQKKMDNHISSMIYEIKFHEFVLFILEKKMGATRRTFLTDLARKKGFRVENELSDSVTHIVAENNSGSDVLAWLKTHKMEKTTQFELLDISWLIESMKVGKPVDTKGKYQLMESRVDSANPDPTAGTLNILPPTTKTISQYACQRRTTLNNHNQRFTDALEILAENYEFKRNDDTCLTFMRAISVLKCLPFEVVSLKDTEGLPWIGDEVKGIMEEIIEVGESLEVQAVLNDERYQSFKLFKSVFGVGVKTADKWYRMGLRTLEDVRSSKTLKLTKMQKAGLCYYEDLADGVTKAEADAISLLVQDAVWTFDPDALVEITGGFRRGKPFGHDVDLLITSPGAEKEQEDQLLQKVTNLWKKQGLLLYGDLRESRFEDGKLPSRKIDALDHFQKCFAILKLYHHKVDKSKWEMPTGSNESEAKSWKAIRVDLVVCPYDRFAFALLGWTGSRMFERDLRRYATHEKKMMLDNHALYDLTKKIFLKAKSEEEIFAHLGLEYLEPSERNA

SEQ ID NO: 631 - DNA, 1587 bp, synthetic construct
  misc_feature 1..1587: note = Variant of terminal deoxynucleotidyltransferase
  source 1..1587: mol_type = other DNA
atgcaccatcatcatcatcatggcggtagcggcatgcaccgcattcgtaccatcgattcggacttcgggaagaaacgccagaagaagatggataacgctattagttccatgatctatgaaatcaaatttcacgagtttgtgctgttcattctcgaaaagaaaatgggtgcgacgcgtcgtacttttctgacagatttagcccgcaagaaagggttccgcgtcgagaatgaactgtcagacagcgttacccacatcgtggcagaaaataattcaggatctgacgtattggcttggctgaagacccacaagatggagaagacgacgcaatttgaactgctggatattagctggcttatcgaaagcatgaaagttggtaaaccggtggacaccaaggggaaataccagttgatggaatcgcgtgtcgatagtgcgaacccagatccgacagccggtaccctcaacattctgcctcctactacgaagaccatttctcagtatgcgtgtcaacgccgcaccaccctgaacaaccataatcaacgttttacggacgcactggaaattcttgcggaaaattacgagttcaaacgcaacgatgatacttgtctgacctttatgcgtgctatttccgtgctgaaatgccttccgtttgaggtagttagcctgaaagacacggaaggattgccctggatcggtgatgaagtcaaagggattatggaagaaatcatcgaggtcggtgaatcgctggaagtgcaggccgtgctcaatgatgagcgctatcaaagcttcaaactgtttaagagtgtctttggagtgggggtgaagacagcagacaaatggtaccgtatgggtctgcgcacgctcgaggatgttcgttccagcaagaccctgaagttgaccaagatgcagaaagcgggtctgtgctattatgaagatcttgctgatggcgttacgaaagccgaagctgacgcgatttctctgctggttcaggatgcagtctggactttcgacccggatgcgctggtggagattacgggtggatttcgtcgtgggaaaccttttggtcacgacgttgatctgcttatcacatctccgggagctgagaaagaacaagaagaccagctcctgcagaaagtgaccaatctgtggaagaaacaagggttgttgctgtacggtgatctgcgtgaaagtcgctttgaagatgggaaactcccatcccgcaagatcgatgccctggaccattttcagaaatgctttgctatcctcaaactttatcaccataaagtggacaaaagcaaatgggaaatgccgacgggttcgaacgaaagcgaggccaaaagttggaaagcaattcgcgtagatctggttgtttgtccctacgatcgttttgcgtttgcgttgttgggttggaccggaagccgcatgttcgaacgtgatctgcgccgctacgccacccacgagaagaagatgatgctggacaatcatgcgctgtatgacctgaccaagaaaatctttctcaaagctaaatcggaagaggaaattttcgcacatctggggcttgaatacctggaaccgtccgaacgtaacgca

SEQ ID NO: 632 - protein, 529 aa, synthetic construct
  REGION 1..529: note = Variant of terminal deoxynucleotidyltransferase
MHHHHHHGGSGMHRIRTIDSDFGKKRQKKMDNAISSMIYEIKFHEFVLFILEKKMGATRRTFLTDLARKKGFRVENELSDSVTHIVAENNSGSDVLAWLKTHKMEKTTQFELLDISWLIESMKVGKPVDTKGKYQLMESRVDSANPDPTAGTLNILPPTTKTISQYACQRRTTLNNHNQRFTDALEILAENYEFKRNDDTCLTFMRAISVLKCLPFEVVSLKDTEGLPWIGDEVKGIMEEIIEVGESLEVQAVLNDERYQSFKLFKSVFGVGVKTADKWYRMGLRTLEDVRSSKTLKLTKMQKAGLCYYEDLADGVTKAEADAISLLVQDAVWTFDPDALVEITGGFRRGKPFGHDVDLLITSPGAEKEQEDQLLQKVTNLWKKQGLLLYGDLRESRFEDGKLPSRKIDALDHFQKCFAILKLYHHKVDKSKWEMPTGSNESEAKSWKAIRVDLVVCPYDRFAFALLGWTGSRMFERDLRRYATHEKKMMLDNHALYDLTKKIFLKAKSEEEIFAHLGLEYLEPSERNA

SEQ ID NO: 633 - DNA, 1587 bp, synthetic construct
  misc_feature 1..1587: note = Variant of terminal deoxynucleotidyltransferase
  source 1..1587: mol_type = other DNA
atgcaccatcatcatcatcatggcggtagcggcatgcaccgcattcgtaccatcgattcggacttcgggaagaaacgccagaagaagatggttaaccacattagttccatgatctatgaaatcaaatttcacgagtttgtgctgttcattctcgaaaagaaaatgggtgcgacgcgtcgtacttttctgacagatttagcccgcaagaaagggttccgcgtcgagaatgaactgtcagacagcgttacccacatcgtggcagaaaataattcaggatctgacgtattggcttggctgaagacccacaagatggagaagacgacgcaatttgaactgctggatattagctggcttatcgaaagcatgaaagttggtaaaccggtggacaccaaggggaaataccagttgatggaatcgcgtgtcgatagtgcgaacccagatccgacagccggtaccctcaacattctgcctcctactacgaagaccatttctcagtatgcgtgtcaacgccgcaccaccctgaacaaccataatcaacgttttacggacgcactggaaattcttgcggaaaattacgagttcaaacgcaacgatgatacttgtctgacctttatgcgtgctatttccgtgctgaaatgccttccgtttgaggtagttagcctgaaagacacggaaggattgccctggatcggtgatgaagtcaaagggattatggaagaaatcatcgaggtcggtgaatcgctggaagtgcaggccgtgctcaatgatgagcgctatcaaagcttcaaactgtttaagagtgtctttggagtgggggtgaagacagcagacaaatggtaccgtatgggtctgcgcacgctcgaggatgttcgttccagcaagaccctgaagttgaccaagatgcagaaagcgggtctgtgctattatgaagatcttgctgatggcgttacgaaagccgaagctgacgcgatttctctgctggttcaggatgcagtctggactttcgacccggatgcgctggtggagattacgggtggatttcgtcgtgggaaaccttttggtcacgacgttgatctgcttatcacatctccgggagctgagaaagaacaagaagaccagctcctgcagaaagtgaccaatctgtggaagaaacaagggttgttgctgtacggtgatctgcgtgaaagtcgctttgaagatgggaaactcccatcccgcaagatcgatgccctggaccattttcagaaatgctttgctatcctcaaactttatcaccataaagtggacaaaagcaaatgggaaatgccgacgggttcgaacgaaagcgaggccaaaagttggaaagcaattcgcgtagatctggttgtttgtccctacgatcgttttgcgtttgcgttgttgggttggaccggaagccgcatgttcgaacgtgatctgcgccgctacgccacccacgagaagaagatgatgctggacaatcatgcgctgtatgacctgaccaagaaaatctttctcaaagctaaatcggaagaggaaattttcgcacatctggggcttgaatacctggaaccgtccgaacgtaacgca

SEQ ID NO: 634 - protein, 529 aa, synthetic construct
  REGION 1..529: note = Variant of terminal deoxynucleotidyltransferase
MHHHHHHGGSGMHRIRTIDSDFGKKRQKKMVNHISSMIYEIKFHEFVLFILEKKMGATRRTFLTDLARKKGFRVENELSDSVTHIVAENNSGSDVLAWLKTHKMEKTTQFELLDISWLIESMKVGKPVDTKGKYQLMESRVDSANPDPTAGTLNILPPTTKTISQYACQRRTTLNNHNQRFTDALEILAENYEFKRNDDTCLTFMRAISVLKCLPFEVVSLKDTEGLPWIGDEVKGIMEEIIEVGESLEVQAVLNDERYQSFKLFKSVFGVGVKTADKWYRMGLRTLEDVRSSKTLKLTKMQKAGLCYYEDLADGVTKAEADAISLLVQDAVWTFDPDALVEITGGFRRGKPFGHDVDLLITSPGAEKEQEDQLLQKVTNLWKKQGLLLYGDLRESRFEDGKLPSRKIDALDHFQKCFAILKLYHHKVDKSKWEMPTGSNESEAKSWKAIRVDLVVCPYDRFAFALLGWTGSRMFERDLRRYATHEKKMMLDNHALYDLTKKIFLKAKSEEEIFAHLGLEYLEPSERNA

SEQ ID NO: 635 - DNA, 1587 bp, synthetic construct
  misc_feature 1..1587: note = Variant of terminal deoxynucleotidyltransferase
  source 1..1587: mol_type = other DNA
atgcaccatcatcatcatcatggcggtagcggcatgcaccgcattcgtaccatcgattcggacttcgggaagaaacgccagaagaagatggataaccacattagttccatgatctatgaaatcaaatttcacgagtttgtgctgttcattctcgaaaagaaaatgggtgcgacgcgtcgtacttttctgacagatttagcccgcaagaaagggttccgcgtcgagaatgaactgtcagacagcgttacccacatcgtggcagaaaataattcaggatctgacgtattggcttggctgaagacccacaagatggagaagacgacgacttttgaactgctggatattagctggcttatcgaaagcatgaaagttggtaaaccggtggacaccaaggggaaataccagttgatggaatcgcgtgtcgatagtgcgaacccagatccgacagccggtaccctcaacattctgcctcctactacgaagaccatttctcagtatgcgtgtcaacgccgcaccaccctgaacaaccataatcaacgttttacggacgcactggaaattcttgcggaaaattacgagttcaaacgcaacgatgatacttgtctgacctttatgcgtgctatttccgtgctgaaatgccttccgtttgaggtagttagcctgaaagacacggaaggattgccctggatcggtgatgaagtcaaagggattatggaagaaatcatcgaggtcggtgaatcgctggaagtgcaggccgtgctcaatgatgagcgctatcaaagcttcaaactgtttaagagtgtctttggagtgggggtgaagacagcagacaaatggtaccgtatgggtctgcgcacgctcgaggatgttcgttccagcaagaccctgaagttgaccaagatgcagaaagcgggtctgtgctattatgaagatcttgctgatggcgttacgaaagccgaagctgacgcgatttctctgctggttcaggatgcagtctggactttcgacccggatgcgctggtggagattacgggtggatttcgtcgtgggaaaccttttggtcacgacgttgatctgcttatcacatctccgggagctgagaaagaacaagaagaccagctcctgcagaaagtgaccaatctgtggaagaaacaagggttgttgctgtacggtgatctgcgtgaaagtcgctttgaagatgggaaactcccatcccgcaagatcgatgccctggaccattttcagaaatgctttgctatcctcaaactttatcaccataaagtggacaaaagcaaatgggaaatgccgacgggttcgaacgaaagcgaggccaaaagttggaaagcaattcgcgtagatctggttgtttgtccctacgatcgttttgcgtttgcgttgttgggttggaccggaagccgcatgttcgaacgtgatctgcgccgctacgccacccacgagaagaagatgatgctggacaatcatgcgctgtatgacctgaccaagaaaatctttctcaaagctaaatcggaagaggaaattttcgcacatctggggcttgaatacctggaaccgtccgaacgtaacgca

SEQ ID NO: 636 - protein, 529 aa, synthetic construct
  REGION 1..529: note = Variant of terminal deoxynucleotidyltransferase
MHHHHHHGGSGMHRIRTIDSDFGKKRQKKMDNHISSMIYEIKFHEFVLFILEKKMGATRRTFLTDLARKKGFRVENELSDSVTHIVAENNSGSDVLAWLKTHKMEKTTTFELLDISWLIESMKVGKPVDTKGKYQLMESRVDSANPDPTAGTLNILPPTTKTISQYACQRRTTLNNHNQRFTDALEILAENYEFKRNDDTCLTFMRAISVLKCLPFEVVSLKDTEGLPWIGDEVKGIMEEIIEVGESLEVQAVLNDERYQSFKLFKSVFGVGVKTADKWYRMGLRTLEDVRSSKTLKLTKMQKAGLCYYEDLADGVTKAEADAISLLVQDAVWTFDPDALVEITGGFRRGKPFGHDVDLLITSPGAEKEQEDQLLQKVTNLWKKQGLLLYGDLRESRFEDGKLPSRKIDALDHFQKCFAILKLYHHKVDKSKWEMPTGSNESEAKSWKAIRVDLVVCPYDRFAFALLGWTGSRMFERDLRRYATHEKKMMLDNHALYDLTKKIFLKAKSEEEIFAHLGLEYLEPSERNA

SEQ ID NO: 637 - DNA, 1587 bp, synthetic construct
  misc_feature 1..1587: note = Variant of terminal deoxynucleotidyltransferase
  source 1..1587: mol_type = other DNA
atgcaccatcatcatcatcatggcggtagcggcatgcaccgcattcgtaccatcgattcggacttcgggaagaaacgccagaagaagatggataaccacattagttccatgatctatgaaatcaaatttcacgagtttgtgctgttcattctcgaaaagaaaatgggtgcgacgcgtcgtacttttctgacagatttagcccgcaagaaagggttccgcgtcgagaatgaactgtcagacagcgttacccacatcgtggcagaaaataattcaggatctgacgtattggcttggctgaagacccacaagatggagaagacgacgcaatttgaactgctggatattagctggcttatcgaaagcatgaaagttggtaaaccggtggacaccaaggggaaataccagttgatggcgtcgcgtgtcgatagtgcgaacccagatccgacagccggtaccctcaacattctgcctcctactacgaagaccatttctcagtatgcgtgtcaacgccgcaccaccctgaacaaccataatcaacgttttacggacgcactggaaattcttgcggaaaattacgagttcaaacgcaacgatgatacttgtctgacctttatgcgtgctatttccgtgctgaaatgccttccgtttgaggtagttagcctgaaagacacggaaggattgccctggatcggtgatgaagtcaaagggattatggaagaaatcatcgaggtcggtgaatcgctggaagtgcaggccgtgctcaatgatgagcgctatcaaagcttcaaactgtttaagagtgtctttggagtgggggtgaagacagcagacaaatggtaccgtatgggtctgcgcacgctcgaggatgttcgttccagcaagaccctgaagttgaccaagatgcagaaagcgggtctgtgctattatgaagatcttgctgatggcgttacgaaagccgaagctgacgcgatttctctgctggttcaggatgcagtctggactttcgacccggatgcgctggtggagattacgggtggatttcgtcgtgggaaaccttttggtcacgacgttgatctgcttatcacatctccgggagctgagaaagaacaagaagaccagctcctgcagaaagtgaccaatctgtggaagaaacaagggttgttgctgtacggtgatctgcgtgaaagtcgctttgaagatgggaaactcccatcccgcaagatcgatgccctggaccattttcagaaatgctttgctatcctcaaactttatcaccataaagtggacaaaagcaaatgggaaatgccgacgggttcgaacgaaagcgaggccaaaagttggaaagcaattcgcgtagatctggttgtttgtccctacgatcgttttgcgtttgcgttgttgggttggaccggaagccgcatgttcgaacgtgatctgcgccgctacgccacccacgagaagaagatgatgctggacaatcatgcgctgtatgacctgaccaagaaaatctttctcaaagctaaatcggaagaggaaattttcgcacatctggggcttgaatacctggaaccgtccgaacgtaacgca

SEQ ID NO: 638 - protein, 529 aa, synthetic construct
  REGION 1..529: note = Variant of terminal deoxynucleotidyltransferase
MHHHHHHGGSGMHRIRTIDSDFGKKRQKKMDNHISSMIYEIKFHEFVLFILEKKMGATRRTFLTDLARKKGFRVENELSDSVTHIVAENNSGSDVLAWLKTHKMEKTTQFELLDISWLIESMKVGKPVDTKGKYQLMASRVDSANPDPTAGTLNILPPTTKTISQYACQRRTTLNNHNQRFTDALEILAENYEFKRNDDTCLTFMRAISVLKCLPFEVVSLKDTEGLPWIGDEVKGIMEEIIEVGESLEVQAVLNDERYQSFKLFKSVFGVGVKTADKWYRMGLRTLEDVRSSKTLKLTKMQKAGLCYYEDLADGVTKAEADAISLLVQDAVWTFDPDALVEITGGFRRGKPFGHDVDLLITSPGAEKEQEDQLLQKVTNLWKKQGLLLYGDLRESRFEDGKLPSRKIDALDHFQKCFAILKLYHHKVDKSKWEMPTGSNESEAKSWKAIRVDLVVCPYDRFAFALLGWTGSRMFERDLRRYATHEKKMMLDNHALYDLTKKIFLKAKSEEEIFAHLGLEYLEPSERNA

SEQ ID NO: 639 - DNA, 1587 bp, synthetic construct
  misc_feature 1..1587: note = Variant of terminal deoxynucleotidyltransferase
  source 1..1587: mol_type = other DNA
atgcaccatcatcatcatcatggcggtagcggcatgcaccgcattcgtaccatcgattcggacttcgggaagaaacgccagaagaagatggataaccacattagttccatgatctatgaaatcaaatttcacgagtttgtgctgttcattctcgaaaagaaaatgggtgcgacgcgtcgtacttttctgacagatttagcccgcaagaaagggttccgcgtcgagaatgaactgtcagacagcgttacccacatcgtggcagaaaataattcaggagttgacgtattggcttggctgaagacccacaagatggagaagacgacgcaatttgaactgctggatattagctggcttatcgaaagcatgaaagttggtaaaccggtggacaccaaggggaaataccagttgatggaatcgcgtgtcgatagtgcgaacccagatccgacagccggtaccctcaacattctgcctcctactacgaagaccatttctcagtatgcgtgtcaacgccgcaccaccctgaacaaccataatcaacgttttacggacgcactggaaattcttgcggaaaattacgagttcaaacgcaacgatgatacttgtctgacctttatgcgtgctatttccgtgctgaaatgccttccgtttgaggtagttagcctgaaagacacggaaggattgccctggatcggtgatgaagtcaaagggattatggaagaaatcatcgaggtcggtgaatcgctggaagtgcaggccgtgctcaatgatgagcgctatcaaagcttcaaactgtttaagagtgtctttggagtgggggtgaagacagcagacaaatggtaccgtatgggtctgcgcacgctcgaggatgttcgttccagcaagaccctgaagttgaccaagatgcagaaagcgggtctgtgctattatgaagatcttgctgatggcgttacgaaagccgaagctgacgcgatttctctgctggttcaggatgcagtctggactttcgacccggatgcgctggtggagattacgggtggatttcgtcgtgggaaaccttttggtcacgacgttgatctgcttatcacatctccgggagctgagaaagaacaagaagaccagctcctgcagaaagtgaccaatctgtggaagaaacaagggttgttgctgtacggtgatctgcgtgaaagtcgctttgaagatgggaaactcccatcccgcaagatcgatgccctggaccattttcagaaatgctttgctatcctcaaactttatcaccataaagtggacaaaagcaaatgggaaatgccgacgggttcgaacgaaagcgaggccaaaagttggaaagcaattcgcgtagatctggttgtttgtccctacgatcgttttgcgtttgcgttgttgggttggaccggaagccgcatgttcgaacgtgatctgcgccgctacgccacccacgagaagaagatgatgctggacaatcatgcgctgtatgacctgaccaagaaaatctttctcaaagctaaatcggaagaggaaattttcgcacatctggggcttgaatacctggaaccgtccgaacgtaacgca

SEQ ID NO: 640 - protein, 529 aa, synthetic construct
  REGION 1..529: note = Variant of terminal deoxynucleotidyltransferase
MHHHHHHGGSGMHRIRTIDSDFGKKRQKKMDNHISSMIYEIKFHEFVLFILEKKMGATRRTFLTDLARKKGFRVENELSDSVTHIVAENNSGVDVLAWLKTHKMEKTTQFELLDISWLIESMKVGKPVDTKGKYQLMESRVDSANPDPTAGTLNILPPTTKTISQYACQRRTTLNNHNQRFTDALEILAENYEFKRNDDTCLTFMRAISVLKCLPFEVVSLKDTEGLPWIGDEVKGIMEEIIEVGESLEVQAVLNDERYQSFKLFKSVFGVGVKTADKWYRMGLRTLEDVRSSKTLKLTKMQKAGLCYYEDLADGVTKAEADAISLLVQDAVWTFDPDALVEITGGFRRGKPFGHDVDLLITSPGAEKEQEDQLLQKVTNLWKKQGLLLYGDLRESRFEDGKLPSRKIDALDHFQKCFAILKLYHHKVDKSKWEMPTGSNESEAKSWKAIRVDLVVCPYDRFAFALLGWTGSRMFERDLRRYATHEKKMMLDNHALYDLTKKIFLKAKSEEEIFAHLGLEYLEPSERNA

SEQ ID NO: 641 - DNA, 1587 bp, synthetic construct
  misc_feature 1..1587: note = Variant of terminal deoxynucleotidyltransferase
  source 1..1587: mol_type = other DNA
atgcaccatcatcatcatcatggcggtagcggcatgcaccgcattcgtgccatcgattcggacttcgggaagaaacgccagaagaagatggataaccacattagttccatgatctatgaaatcaaatttcacgagtttgtgctgttcattctcgaaaagaaaatgggtgcgacgcgtcgtacttttctgacagatttagcccgcaagaaagggttccgcgtcgagaatgaactgtcagacagcgttacccacatcgtggcagaaaataattcaggatctgacgtattggcttggctgaagacccacaagatggagaagacgacgcaatttgaactgctggatattagctggcttatcgaaagcatgaaagttggtaaaccggtggacaccagggggaaataccagttgatggaatcgcgtgtcgatagtgcgaacccagatccgacagccggtaccctcaacattctgcctcctactacgaagaccatttctcagtatgcgtgtcaacgccgcaccaccctgaacaaccataatcaacgttttacggacgcactggaaattcttgcggaaaattacgagttcaaacgcaacgatgatacttgtctgacctttatgcgtgctatttccgtgctgaaatgccttccgtttgaggtagttagcctgaaagacacggaaggattgccctggatcggtgatgaagtcaaagggattatggaagaaatcatcgaggtcggtgaatcgctggaagtgcaggccgtgctcaatgatgagcgctatcaaagcttcaaactgtttaagagtgtctttggagtgggggtgaagacagcagacaaatggtaccgtatgggtctgcgcacgctcgaggatgttcgttccagcaagaccctgaagttgaccaagatgcagaaagcgggtctgtgctattatgaagatcttgctgatggcgttacgaaagccgaagctgacgcgatttctctgctggttcaggatgcagtctggactttcgacccggatgcgctggtggagattacgggtggatttcgtcgtgggaaaccttttggtcacgacgttgatctgcttatcacatctccgggagctgagaaagaacaagaagaccagctcctgcagaaagtgaccaatctgtggaagaaacaagggttgttgctgtacggtgatctgcgtgaaagtcgctttgaagatgggaaactcccatcccgcaagatcgatgccctggaccattttcagaaatgctttgctatcctcaaactttatcaccataaagtggacaaaagcaaatgggaaatgccgacgggttcgaacgaaagcgaggccaaaagttggaaagcaattcgcgtagatctggttgtttgtccctacgatcgttttgcgtttgcgttgttgggttggaccggaagccgcatgttcgaacgtgatctgcgccgctacgccacccacgagaagaagatgatgctggacaatcatgcgctgtatgacctgaccaagaaaatctttctcaaagctaaatcggaagaggaaattttcgcacatctggggcttgaatacctggaaccgtccgaacgtaacgca

SEQ ID NO: 642 - protein, 529 aa, synthetic construct
  REGION 1..529: note = Variant of terminal deoxynucleotidyltransferase
MHHHHHHGGSGMHRIRAIDSDFGKKRQKKMDNHISSMIYEIKFHEFVLFILEKKMGATRRTFLTDLARKKGFRVENELSDSVTHIVAENNSGSDVLAWLKTHKMEKTTQFELLDISWLIESMKVGKPVDTRGKYQLMESRVDSANPDPTAGTLNILPPTTKTISQYACQRRTTLNNHNQRFTDALEILAENYEFKRNDDTCLTFMRAISVLKCLPFEVVSLKDTEGLPWIGDEVKGIMEEIIEVGESLEVQAVLNDERYQSFKLFKSVFGVGVKTADKWYRMGLRTLEDVRSSKTLKLTKMQKAGLCYYEDLADGVTKAEADAISLLVQDAVWTFDPDALVEITGGFRRGKPFGHDVDLLITSPGAEKEQEDQLLQKVTNLWKKQGLLLYGDLRESRFEDGKLPSRKIDALDHFQKCFAILKLYHHKVDKSKWEMPTGSNESEAKSWKAIRVDLVVCPYDRFAFALLGWTGSRMFERDLRRYATHEKKMMLDNHALYDLTKKIFLKAKSEEEIFAHLGLEYLEPSERNA

SEQ ID NO: 643 - DNA, 1587 bp, synthetic construct
  misc_feature 1..1587: note = Variant of terminal deoxynucleotidyltransferase
  source 1..1587: mol_type = other DNA
atgcaccatcatcatcatcatggcggtagcggctttcaccgcattcgtaccatcgattcggacttcgggaagaaacgccagaagaagatggataaccacattagttccatgatctatgaaatcaaatttcacgagtttgtgctgttcattctcgaaaagaaaatgggtgcgacgcgtcgtacttttctgacagatttagcccgcaagaaagggttccgcgtcgagaatgaactgtcagacagcgttacccacatcgtggcagaaaataattcaggatctgacgtattggcttggctgaagacccacaagatggagaagacgacgcaatttgaactgctggatattagctggcttatcgaaagcatgaaagttggtaaaccggtggacaccaaggggaaataccagttgatggaatcgcgtgtcgatagtgcgaacccagatccgacagccggtaccctcaacattctgcctcctactacgaagaccatttctcagtatgcgtgtcaacgccgcaccaccctgaacaaccataatcaacgttttacggacgcactggaaattcttgcggaaaattacgagttcaaacgcaacgatgatacttgtctgacctttatgcgtgctatttccgtgctgaaatgccttccgtttgaggtagttagcctgaaagacacggaaggattgccctggatcggtgatgaagtcaaagggattatggaagaaatcatcgaggtcggtgaatcgctggaagtgcaggccgtgctcaatgatgagcgctatcaaagcttcaaactgtttaagagtgtctttggagtgggggtgaagacagcagacaaatggtaccgtatgggtctgcgcacgctcgaggatgttcgttccagcaagaccctgaagttgaccaagatgcagaaagcgggtctgtgctattatgaagatcttgctgatggcgttacgaaagccgaagctgacgcgatttctctgctggttcaggatgcagtctggactttcgacccggatgcgctggtggagattacgggtggatttcgtcgtgggaaaccttttggtcacgacgttgatctgcttatcacatctccgggagctgagaaagaacaagaagaccagctcctgcagaaagtgaccaatctgtggaagaaacaagggttgttgctgtacggtgatctgcgtgaaagtcgctttgaagatgggaaactcccatcccgcaagatcgatgccctggaccattttcagaaatgctttgctatcctcaaactttatcaccataaagtggacaaaagcaaatgggaaatgccgacgggttcgaacgaaagcgaggccaaaagttggaaagcaattcgcgtagatctggttgtttgtccctacgatcgttttgcgtttgcgttgttgggttggaccggaagccgcatgttcgaacgtgatctgcgccgctacgccacccacgagaagaagatgatgctggacaatcatgcgctgtatgacctgaccaagaaaatctttctcaaagctaaatcggaagaggaaattttcgcacatctggggcttgaatacctggaaccgtccgaacgtaacgca

SEQ ID NO: 644 - protein, 529 aa, synthetic construct
  REGION 1..529: note = Variant of terminal deoxynucleotidyltransferase
MHHHHHHGGSGFHRIRTIDSDFGKKRQKKMDNHISSMIYEIKFHEFVLFILEKKMGATRRTFLTDLARKKGFRVENELSDSVTHIVAENNSGSDVLAWLKTHKMEKTTQFELLDISWLIESMKVGKPVDTKGKYQLMESRVDSANPDPTAGTLNILPPTTKTISQYACQRRTTLNNHNQRFTDALEILAENYEFKRNDDTCLTFMRAISVLKCLPFEVVSLKDTEGLPWIGDEVKGIMEEIIEVGESLEVQAVLNDERYQSFKLFKSVFGVGVKTADKWYRMGLRTLEDVRSSKTLKLTKMQKAGLCYYEDLADGVTKAEADAISLLVQDAVWTFDPDALVEITGGFRRGKPFGHDVDLLITSPGAEKEQEDQLLQKVTNLWKKQGLLLYGDLRESRFEDGKLPSRKIDALDHFQKCFAILKLYHHKVDKSKWEMPTGSNESEAKSWKAIRVDLVVCPYDRFAFALLGWTGSRMFERDLRRYATHEKKMMLDNHALYDLTKKIFLKAKSEEEIFAHLGLEYLEPSERNA

SEQ ID NO: 645 - DNA, 1587 bp, synthetic construct
  misc_feature 1..1587: note = Variant of terminal deoxynucleotidyltransferase
  source 1..1587: mol_type = other DNA
atgcaccatcatcatcatcatggcggtagcggcatgcaccgtattcgtaccatcgattcggacttcgggaagaaacgccagaagaagatggataaccacattagttccatgatctatgaaatcaaatttcacgagtttgtgctgttcattctcgaagagaaaatgggtgcgacgcgtcgtacttttctgacagatttagcccgcaagaaagggttccgcgtcgagaatgaactgtcagacagcgttacccacatcgtggcagaaaataattcaggatctgacgtattggcttggctgaagactcacaagatggagaagacgacgcaatttgaactgctggatattagctggcttatcgaaagcatgaaagttggtaaaccggtggacaccaaggggaaataccagttgatggaatcgcgtgtcgatagtgcgaacccagatccgacagccggtaccctcaacattctgcctcctactacgaagaccatttctcagtatgcgtgtcaacgccgcaccaccctgaacaaccataatcaacgttttacggacgcactggaaattcttgcggaaaattacgagttcaaacgcaacgatgatacttgtctgacctttatgcgtgctatttccgtgctgaaatgccttccgtttgaggtagttagcctgaaagacacggaaggattgccctggatcggtgatgaagtcaaagggattatggaagaaatcatcgaggtcggtgaatcgctggaagtgcaggccgtgctcaatgatgagcgctatcaaagcttcaaactgtttaagagtgtctttggagtgggggtgaagacagcagacaaatggtaccgtatgggtctgcgcacgctcgaggatgttcgttccagcaagaccctgaagttgaccccgatgcagaaagcgggtctgtgctattatgaagatcttgctgatggcgttacgaaagccgaagctgacgcgatttctctgctggttcaggatgcagtctggactttcgacccggatgcgctggtggagattacgggtggatttcgtcgtgggaaaccttttggtcacgacgttgatctgcttatcacatctccgggagctgagaaagaacaagaagaccagctcctgcagaaagtgaccaatctgtggaagaaacaagggttgttgctgtacggtgacctgcgttacagtcgctttgaagatgggaaactcccatcccgcaagatcgatgccctggaccattttcaaaaatgctttctgatcctcaaactttatcaccataaagtggacaaaagcaaatgggaaatgccgacgggttcgaacgaaagcgaggccaaaagttggaaagcaattcgcgtagatctggttgtttgtccctacgatcgttttgcgtttgcgttgttgggttggaccggaagccgcatgttcgaacgtgatctgcgccgctacgccacccacgagaagaagatgatgctggacaatcatgcgctgtatgacctgaccaagaaaatctttctcaaagctaaatcggaagaggaaattttcgcacatctggggcttgaatacctggaaccgtccgaacgtaacgca

SEQ ID NO: 646 - protein, 529 aa, synthetic construct
  REGION 1..529: note = Variant of terminal deoxynucleotidyltransferase
MHHHHHHGGSGMHRIRTIDSDFGKKRQKKMDNHISSMIYEIKFHEFVLFILEEKMGATRRTFLTDLARKKGFRVENELSDSVTHIVAENNSGSDVLAWLKTHKMEKTTQFELLDISWLIESMKVGKPVDTKGKYQLMESRVDSANPDPTAGTLNILPPTTKTISQYACQRRTTLNNHNQRFTDALEILAENYEFKRNDDTCLTFMRAISVLKCLPFEVVSLKDTEGLPWIGDEVKGIMEEIIEVGESLEVQAVLNDERYQSFKLFKSVFGVGVKTADKWYRMGLRTLEDVRSSKTLKLTPMQKAGLCYYEDLADGVTKAEADAISLLVQDAVWTFDPDALVEITGGFRRGKPFGHDVDLLITSPGAEKEQEDQLLQKVTNLWKKQGLLLYGDLRYSRFEDGKLPSRKIDALDHFQKCFLILKLYHHKVDKSKWEMPTGSNESEAKSWKAIRVDLVVCPYDRFAFALLGWTGSRMFERDLRRYATHEKKMMLDNHALYDLTKKIFLKAKSEEEIFAHLGLEYLEPSERNA

SEQ ID NO: 647 - DNA, 1587 bp, synthetic construct
  misc_feature 1..1587: note = Variant of terminal deoxynucleotidyltransferase
  source 1..1587: mol_type = other DNA
atgcaccatcatcatcatcatggcggtagcggcatgcaccgtattcgtaccatcgattcggacttcgggaagaaacgccagaagaagatggataaccacattagttccatgatctatgaaatcaaatttcacgagtttgtgctgttcattctcgaagagaaaatgggtgcgacgcgtcgtacttttctgacagatttagcccgcaagaaagggttccgcgtcgagaatgaactgtcagacagcgttacccacatcgtggcagaaaataattcaggatctgacgtattggcttggctgaagactcacaagatggaggtcacgacgcaatttgaactgctggatattagctggcttatcgaaagcatgaaagttggtaaaccggtggacaccaaggggaaataccagttgatggaatcgcgtgtcgatagtgcgaacccagatccgacagccggtaccctcaacattctgcctcctactacgaagaccatttctcagtatgcgtgtcaacgccgcaccaccctgaacaaccataatcaacgttttacggacgcactggaaattcttgcggaaaattacgagttcaaacgcaacgatgatacttgtctgacctttatgcgtgctatttccgtgctgaaatgccttccgtttgaggtagttagcctgaaagacacggaaggattgccctggatcggtgatgaagtcaaagggattatggaagaaatcatcgaggtcggtgaatcgctggaagtgcaggccgtgctcaatgatgagcgctatcaaagcttcaaactgtttaagagtgtctttggagtgggggtgaagacagcagacaaatggtaccgtatgggtctgcgcacgctcgaggatgttcgttccagcaagaccctgaagttgaccccgatgcagaaagcgggtctgtgctattatgaagatcttgctgatggcgttacgaaagccgaagctgacgcgatttctctgctggttcaggatgcagtctggactttcgacccggatgcgctggtggagattacgggtggatttcgtcgtgggaaaccttttggtcacgacgttgatctgcttatcacatctccgggagctgagaaagaacaagaagaccagctcctgcagaaagtgaccaatctgtggaagaaacaagggttgttgctgtacggtgacctgcgtgaaagtcgctttgaagatgggaaactcccatcccgcaagatcgatgccctggaccattttgcgaaatgctttctgatcctcaaactttatcaccataaagtggacaaaagcaaatgggaaatgccgacgggttcgaacgaaagcgaggccaaaagttggaaagcaattcgcgtagatctggttcgttgtccctacgatcgttttgcgtttgcgttgttgggttggaccggaagccgcatgttcgaacgtgatctgcgccgctacgccacccacgagaagaagatgatgctggacaatcatgcgctgtatgacctgaccaagaaaatctttctcaaagctaaatcggaagaggaaattttcgcacatctggggcttgaatacctggaaccgtccgaacgtaacgca

SEQ ID NO: 648 - protein, 529 aa, synthetic construct
  REGION 1..529: note = Variant of terminal deoxynucleotidyltransferase
MHHHHHHGGSGMHRIRTIDSDFGKKRQKKMDNHISSMIYEIKFHEFVLFILEEKMGATRRTFLTDLARKKGFRVENELSDSVTHIVAENNSGSDVLAWLKTHKMEVTTQFELLDISWLIESMKVGKPVDTKGKYQLMESRVDSANPDPTAGTLNILPPTTKTISQYACQRRTTLNNHNQRFTDALEILAENYEFKRNDDTCLTFMRAISVLKCLPFEVVSLKDTEGLPWIGDEVKGIMEEIIEVGESLEVQAVLNDERYQSFKLFKSVFGVGVKTADKWYRMGLRTLEDVRSSKTLKLTPMQKAGLCYYEDLADGVTKAEADAISLLVQDAVWTFDPDALVEITGGFRRGKPFGHDVDLLITSPGAEKEQEDQLLQKVTNLWKKQGLLLYGDLRESRFEDGKLPSRKIDALDHFAKCFLILKLYHHKVDKSKWEMPTGSNESEAKSWKAIRVDLVRCPYDRFAFALLGWTGSRMFERDLRRYATHEKKMMLDNHALYDLTKKIFLKAKSEEEIFAHLGLEYLEPSERNA

SEQ ID NO: 649 - DNA, 1587 bp, synthetic construct
  misc_feature 1..1587: note = Variant of terminal deoxynucleotidyltransferase
  source 1..1587: mol_type = other DNA
atgcaccatcatcatcatcatggcggtagcggcatgcaccgtattcgtaccatcgattcggacttcgggaagaaacgccagaagaagatggataaccacattagttccatgatctatgaaatcaaatttcacgagtttgtgctgttcattctcgaagagaaaatgggtgcgacgcgtcgtacttttctgacagatttagcccgcaagaaagggttccgcgtcgagaatgaactgtcagacagcgttacccacatcgtggcagaaaataattcaggatctgacgtattggcttggctgaagactcacaagatggagaagacgacgcaatttgaactgctggatattagctggcttatcgaaagcatgaaagttggtaaaccggtggacaccaaggggaaataccagttgatggaatcgggtgtcgatagtgcgaacccagatccgacagccggtaccctcaacattctgcctcctactacgaagaccatttctcagtatgcgtgtcaacgccgcaccaccctgaacaaccataatcaacgttttacggacgcactggaaattcttgcggaaaattacgagttcaaacgcaacgatgatacttgtctgacctttatgcgtgctatttccgtgctgaaatgccttccgtttgaggtagttagcctgaaagacacggaaggattgccctggatcggtgatgaagtcaaagggattatggaagaaatcatcgaggtcggtgaatcgctggaagtgcaggccgtgctcaatgatgagcgctatcaaagcttcaaactgtttaagagtgtctttggagtgggggtgaagacagcagacaaatggtaccgtatgggtctgcgcacgctcgaggatgttcgttccagcaagaccctgaagttgaccaaaatgcagaaagcgggtctgtgctattatgaagatcttgctgatggcgttacgaaagccgaagctgacgcgatttctctgctggttcaggatgcagtctggactttcgacccggatgcgctggtggagattacgggtggatttcgtcgtgggaaaccttttggtcacgacgttgatctgcttatcacatctccgggagctgagaaagaacaagaagaccagctcctgcagaaagtgaccaatctgtggaagaaacaagggttgttgctgtacggtgacctgcgtgaaagtcgctttgaagatgggaaactcccatcccgcaagatcgatgccctggaccattttcaaaaatgctttgctatcctcaaactttatcaccataaagtggacaaaagcaaatgggaaatgccgacgggttcgaacgaaagcgaggccaaaagttggaaagcaattcgcgtagatctggttgtttgtccctacgatcgttttgcgtttgcgttgttgggttggaccggaagccgcatgttcgaacgtgatctgcgccgctacgccacccacgagaagaagatgatgctggacaatcatgcgctgtatgacctgaccaagaaaatctttctcaaagctaaatcggaagaggaaattttcgcacatctggggcttgaatacctggaaccgtccgaacgtaacgca

SEQ ID NO: 650 - protein, 529 aa, synthetic construct
  REGION 1..529: note = Variant of terminal deoxynucleotidyltransferase
MHHHHHHGGSGMHRIRTIDSDFGKKRQKKMDNHISSMIYEIKFHEFVLFILEEKMGATRRTFLTDLARKKGFRVENELSDSVTHIVAENNSGSDVLAWLKTHKMEKTTQFELLDISWLIESMKVGKPVDTKGKYQLMESGVDSANPDPTAGTLNILPPTTKTISQYACQRRTTLNNHNQRFTDALEILAENYEFKRNDDTCLTFMRAISVLKCLPFEVVSLKDTEGLPWIGDEVKGIMEEIIEVGESLEVQAVLNDERYQSFKLFKSVFGVGVKTADKWYRMGLRTLEDVRSSKTLKLTKMQKAGLCYYEDLADGVTKAEADAISLLVQDAVWTFDPDALVEITGGFRRGKPFGHDVDLLITSPGAEKEQEDQLLQKVTNLWKKQGLLLYGDLRESRFEDGKLPSRKIDALDHFQKCFAILKLYHHKVDKSKWEMPTGSNESEAKSWKAIRVDLVVCPYDRFAFALLGWTGSRMFERDLRRYATHEKKMMLDNHALYDLTKKIFLKAKSEEEIFAHLGLEYLEPSERNA

SEQ ID NO: 651 - DNA, 1587 bp, synthetic construct
  misc_feature 1..1587: note = Variant of terminal deoxynucleotidyltransferase
  source 1..1587: mol_type = other DNA
atgcaccatcatcatcatcatggcggtagcggcatgcacggtattcgtaccatcgattcggacttcgggaagaaacgccagaagaagatggataaccacattagttccatgatctatgaaatcaaatttcacgagtttgtgctgttcattctcgaaaagaaaatgggtgcgacgcgtcgtacttttctgacagatttagcccgcaagaaagggttccgcgtcgagaatgaactgtcagacagcgttacccacatcgtggcagaaaataattcaggatctgacgtattggcttggctgaagactcacaagatggagaagacgacgcaatttgaactgctggatattagctggcttatcgaaagcatgaaagttggtaaaccggtggacaccaaggggaaataccagttgatggaatcgcgtgtcgatagtgcgaacccagatccgacagccggtaccctcaacattctgcctcctactacgaagaccatttctcagtatgcgtgtcaacgccgcaccaccctgaacaaccataatcaacgttttacggacgcactggaaattcttgcggaaaattacgagttcaaacgcaacgatgatacttgtctgacctttatgcgtgctatttccgtgctgaaatgccttccgtttgaggtagttagcctgaaagacacggaaggattgccctggatcggtgatgaagtcaaagggattatggaagaaatcatcgaggtcggtgaatcgctggaagtgcaggccgtgctcaatgatgagcgctatcaaagcttcaaactgtttaagagtgtctttggagtgggggtgaagacagcagacaaatggtaccgtatgggtctgcgcacgctcgaggatgttcgttccagcaagaccctgaagttgaccaagatgcagaaagcgggtctgtgctattatgaagatcttgctgatggcgttacgaaagccgaagctgacgcgatttctctgctggttcaggatgcagtctggactttcgacccggatgcgctggtggagattacgggtggatttcgtcgtgggaaaccttttggtcacgacgttgatctgcttatcacatctccgggagctgagaaagaacaagaagaccagctcctgcagaaagtgaccaatctgtggaagaaacaagggttgttgctgtacggtgatctgcgtgaaagtcgctttgaagatgggaaactcccatcccgcaagatcgatgccctggaccattttcaaaaatgctttctgatcctcaaactttatcaccataaagtggacaaaagcaaatgggaaatgccgacgggttcgaacgaaagcgaggccaaaagttggaaagcaattcgcgtagatctggttgtttgtccctacgatcgttttgcgtttgcgttgttgggttggaccggaagccgcatgttcgaacgtgatctgcgccgctacgccacccacgagaagaagatgatgctggacaatcatgcgctgtatgacctgaccaagaaaatctttctcaaagctaaatcggaagaggaaattttcgcacatctggggcttgaatacctggaaccgtccgaacgtaacgca

SEQ ID NO: 652 - protein, 529 aa, synthetic construct
  REGION 1..529: note = Variant of terminal deoxynucleotidyltransferase
MHHHHHHGGSGMHGIRTIDSDFGKKRQKKMDNHISSMIYEIKFHEFVLFILEKKMGATRRTFLTDLARKKGFRVENELSDSVTHIVAENNSGSDVLAWLKTHKMEKTTQFELLDISWLIESMKVGKPVDTKGKYQLMESRVDSANPDPTAGTLNILPPTTKTISQYACQRRTTLNNHNQRFTDALEILAENYEFKRNDDTCLTFMRAISVLKCLPFEVVSLKDTEGLPWIGDEVKGIMEEIIEVGESLEVQAVLNDERYQSFKLFKSVFGVGVKTADKWYRMGLRTLEDVRSSKTLKLTKMQKAGLCYYEDLADGVTKAEADAISLLVQDAVWTFDPDALVEITGGFRRGKPFGHDVDLLITSPGAEKEQEDQLLQKVTNLWKKQGLLLYGDLRESRFEDGKLPSRKIDALDHFQKCFLILKLYHHKVDKSKWEMPTGSNESEAKSWKAIRVDLVVCPYDRFAFALLGWTGSRMFERDLRRYATHEKKMMLDNHALYDLTKKIFLKAKSEEEIFAHLGLEYLEPSERNA

SEQ ID NO: 653 - DNA, 1587 bp, synthetic construct
  misc_feature 1..1587: note = Variant of terminal deoxynucleotidyltransferase
  source 1..1587: mol_type = other DNA
atgcaccatcatcatcatcatggcggtagcggcatgcacggtattcgtaccatcgattcggacttcgggaagaaacgccagaagaagatggataaccacattagttccatgatctatgaaatcaaatttcacgagtttgtgctgttcattctcgaaaagaaaatgggtgcgacgcgtcgtacttttctgacagatttagcccgcaagaaagggttccgcgtcgagaatgaactgtcagacagcgttacccacatcgtggcagaaaataattcaggatctgacgtattggcttggctgaagactcacaagatggagaagacgacgcaatttgaactgctggatattagctggcttatcgaaagcatgaaagttggtaaaccggtggacaccaaggggaaataccagttgatggaatcgcgtgtcgatagtgcgaacccagatccgacagccggtaccctcaacattctgcctcctactacgaagaccatttctcagtatgcgtgtcaacgccgcaccaccctgaacaaccataatcaacgttttacggacgcactggaaattcttgcggaaaattacgagttcaaacgcaacgatgatacttgtctgacctttatgcgtgctatttccgtgctgaaatgccttccgtttgaggtagttagcctgaaagacacggaaggattgccctggatcggtgatgaagtcaaagggattatggaagaaatcatcgaggtcggtgaatcgctggaagtgcaggccgtgctcaatgatgagcgctatcaaagcttcaaactgtttaagagtgtctttggagtgggggtgaagacagcagacaaatggtaccgtatgggtctgcgcacgctcgaggatgttcgttccagcaagaccctgaagttgaccccgatgcagaaagcgggtctgtgctattatgaagatcttgctgatggcgttacgaaagccgaagctgacgcgatttctctgctggttcaggatgcagtctggactttcgacccggatgcgctggtggagattacgggtggatttcgtcgtgggaaaccttttggtcacgacgttgatctgcttatcacatctccgggagctgagaaagaacaagaagaccagctcctgcagaaagtgaccaatctgtggaagaaacaagggttgttgctgtacggtgacctgcgtgaaagtcgctttgaagatgggaaactcccatcccgcaagatcgatgccctggaccattttcagaaatgctttgctatcctcaaactttatcaccataaagtggacaaaagcaaatgggaaatgccgacgggttcgaacgaaagcgaggccaaaagttggaaagcaattcgcgtagatctggttgtttgtccctacgatcgttttgcgtttgcgttgttgggttggaccggaagccgcatgttcgaacgtgatctgcgccgctacgccacccacgagaagaagatgatgctggacaatcatgcgctgtatgacctgaccaagaaaatctttctcaaagctaaatcggaagaggaaattttcgcacatctggggcttgaatacctggaaccgtccgaacgtaacgca

SEQ ID NO: 654 - protein, 529 aa, synthetic construct
  REGION 1..529: note = Variant of terminal deoxynucleotidyltransferase
MHHHHHHGGSGMHGIRTIDSDFGKKRQKKMDNHISSMIYEIKFHEFVLFILEKKMGATRRTFLTDLARKKGFRVENELSDSVTHIVAENNSGSDVLAWLKTHKMEKTTQFELLDISWLIESMKVGKPVDTKGKYQLMESRVDSANPDPTAGTLNILPPTTKTISQYACQRRTTLNNHNQRFTDALEILAENYEFKRNDDTCLTFMRAISVLKCLPFEVVSLKDTEGLPWIGDEVKGIMEEIIEVGESLEVQAVLNDERYQSFKLFKSVFGVGVKTADKWYRMGLRTLEDVRSSKTLKLTPMQKAGLCYYEDLADGVTKAEADAISLLVQDAVWTFDPDALVEITGGFRRGKPFGHDVDLLITSPGAEKEQEDQLLQKVTNLWKKQGLLLYGDLRESRFEDGKLPSRKIDALDHFQKCFAILKLYHHKVDKSKWEMPTGSNESEAKSWKAIRVDLVVCPYDRFAFALLGWTGSRMFERDLRRYATHEKKMMLDNHALYDLTKKIFLKAKSEEEIFAHLGLEYLEPSERNA

SEQ ID NO: 655 - DNA, 1587 bp, synthetic construct
  misc_feature 1..1587: note = Variant of terminal deoxynucleotidyltransferase
  source 1..1587: mol_type = other DNA
atgcaccatcatcatcatcatggcggtagcggcatgcacggcattcgtaccatcgattcggacttcgggaagaaacgccagaagaagatggataaccacgatagttccatgatctatgaaatcaaatttcacgagtttgtgctgttcattctcgaagagaaaatgggtgcgacgcgtcgtacttttctgacagatttagcccgcaagaaagggttccgcgtcgagaatgaactgtcagacagcgttacccacatcgtggcagaaaataattcaggttctgaggtattggcttggctgaagactcacaagatggagaagaccaagcaatttgaactgctggatattagctggcttatcgaaagcatgaaagttggtaaaccggtggacaccaaggggaaataccagttgatggaatcgcgtgaggatagtgcgaacccagatccgacagccggtaccctcaacattctgcctcctactacgaagaccatttctcagtatgcgtgtcaacgccgcaccaccctgaacaaccataatcaacgttttacggacgcactggaaattcttgcggaaaattacgagttcaaacgcaacgatgatacttgtctgacctttatgcgtgctatttccgtgctgaaatgccttccgtttgaggtagttagcctgaaagacacggaaggattgccctggatcggtgatgaagtcaaagggattatggaagaaatcatcgaggtcggtgaatcgctggaagtgcaggccgtgctcaatgatgagcgctatcaaagcttcaaactgtttaagagtgtctttggagtgggggtgaagacagcagacaaatggtaccgtatgggtctgcgcacgctcgaggatgttcgttccagcaagaccctgaagttgaccccgatgcagaaagcgggtctgtgctattatgaagatcttgctgatggcgttacgaaagccgaagctgacgcgatttctctgctggttcaggatgcagtctggactttcgacccggatgcgctggtggagattacgggtggatttcgtcgtgggaaaccttttggtcacgacgttgatctgcttatcacatctccgggagctgagaaagaacaagaagaccagctcctgcagaaagtgaccaatctgtggaagaaacaggggttgttgctgtacggtgacctgcgtgaaagtcgctttgaagatgggaaactcccatcccgcaagatcgatgccctggaccattttgcgaaatgctttctgatcctcaaactttatcaccataaagtggacaaaagcaaatgggaaatgccgacgggttcgaacgaaagcgaggccaaaagttggaaagcaattcgcgtagatctggttcgttgtccctacgatcgttttgcgtttgcgttgttgggttggaccggaagccgcatgttcgaacgtgatctgcgccgctacgccacccacgagaagaagatgatgctggacaatcatgcgctgtatgacctgaccaagaaaatctttctcaaagctaaatcggaagaggaaattttcgcacatctggggcttgaatacctggaaccgtccgaacgtaacgca

SEQ ID NO: 656 - protein, 529 aa, synthetic construct
  REGION 1..529: note = Variant of terminal deoxynucleotidyltransferase
MHHHHHHGGSGMHGIRTIDSDFGKKRQKKMDNHDSSMIYEIKFHEFVLFILEEKMGATRRTFLTDLARKKGFRVENELSDSVTHIVAENNSGSEVLAWLKTHKMEKTKQFELLDISWLIESMKVGKPVDTKGKYQLMESREDSANPDPTAGTLNILPPTTKTISQYACQRRTTLNNHNQRFTDALEILAENYEFKRNDDTCLTFMRAISVLKCLPFEVVSLKDTEGLPWIGDEVKGIMEEIIEVGESLEVQAVLNDERYQSFKLFKSVFGVGVKTADKWYRMGLRTLEDVRSSKTLKLTPMQKAGLCYYEDLADGVTKAEADAISLLVQDAVWTFDPDALVEITGGFRRGKPFGHDVDLLITSPGAEKEQEDQLLQKVTNLWKKQGLLLYGDLRESRFEDGKLPSRKIDALDHFAKCFLILKLYHHKVDKSKWEMPTGSNESEAKSWKAIRVDLVRCPYDRFAFALLGWTGSRMFERDLRRYATHEKKMMLDNHALYDLTKKIFLKAKSEEEIFAHLGLEYLEPSERNA

SEQ ID NO: 657 - DNA, 1587 bp, synthetic construct
  misc_feature 1..1587: note = Variant of terminal deoxynucleotidyltransferase
  source 1..1587: mol_type = other DNA
atgcaccatcatcatcatcatggcggtagcggcatgcaccgtattcgtaccatcgattcggacttcgggaagaaacgccagaagaagatggataaccacgatagttccgccatctatgaaatcaaatttcacgagtttgtgctgttcattctcgaagagaaaatgggtgcgacgcgtcgtacttttctgacagatttagcccgcaagaaagggttccgcgtcgagaatgaactgtcagacagcgttacccacatcgtggcagaaaataattcacgttctgatgtattggcttggctgaagactcacaagatggaggtcacgacgcaatttgaactgctggatattagctggcttatcgaaagcatgaaagttggtaaaccggtggacaccaaggggaaataccagttgatggaatcgcgtgtggatagtgcgaacccagatccgacagccggtaccctgaacattctgcctcctactacgaagaccatttctcagtatgcgtgtcaacgccgcaccaccctgaacaaccataatcaacgttttacggacgcactggaaattcttgcggaaaattacgagttcaaacgcaacgatgatacttgtctgacctttatgcgtgctatttccgtgctgaaatgccttccgtttgaggtagttagcctgaaagacacggaaggattgccctggatcggtgatgaagtcaaagggattatggaagaaatcatcgaggtcggtgaatcgctggaagtgcaggccgtgctcaatgatgagcgctatcaaagcttcaaactgtttaagagtgtctttggagtgggggtgaagacagcagacaaatggtaccgtatgggtctgcgcacgctcgaggatgttcgttccagcaagaccctgaagttgaccccgatgcagaaagcgggtctgtgctattatgaagatcttgctgatggcgttacgaaagccgaagctgacgcgatttctctgctggttcaggatgcagtctggactttcgacccggatgcgctggtggagattacgggtggatttcgtcgtgggaaaccttttggtcacgacgttgatctgcttatcacatctccgggagctgagaaagaacaagaagaccagctcctgcagaaagtgaccaatctgtggaagaaacaagggttgttgctgtacggtgacctgcgtgaaagtcgctttgaagatgggaaactcccatcccgcaagatcgatgccctggaccattttgcgaaatgctttctgatcctcaaactttatcaccataaagtggacaaaagcaaatgggaaatgccgacgggttcgaacgaaagcgaggccaaaagttggaaagcaattcgcgtagatctggttcgttgtccctacgatcgttttgcgtttgcgttgttgggttggaccggaagccgcatgttcgaacgtgatctgcgccgctacgccacccacgagaagaagatgatgctggacaatcatgcgctgtatgacctgaccaagaaaatctttctcaaagctaaatcggaagaggaaattttcgcacatctggggcttgaatacctggaaccgtccgaacgtaacgca

SEQ ID NO: 658 - protein, 529 aa, synthetic construct
  REGION 1..529: note = Variant of terminal deoxynucleotidyltransferase
MHHHHHHGGSGMHRIRTIDSDFGKKRQKKMDNHDSSAIYEIKFHEFVLFILEEKMGATRRTFLTDLARKKGFRVENELSDSVTHIVAENNSRSDVLAWLKTHKMEVTTQFELLDISWLIESMKVGKPVDTKGKYQLMESRVDSANPDPTAGTLNILPPTTKTISQYACQRRTTLNNHNQRFTDALEILAENYEFKRNDDTCLTFMRAISVLKCLPFEVVSLKDTEGLPWIGDEVKGIMEEIIEVGESLEVQAVLNDERYQSFKLFKSVFGVGVKTADKWYRMGLRTLEDVRSSKTLKLTPMQKAGLCYYEDLADGVTKAEADAISLLVQDAVWTFDPDALVEITGGFRRGKPFGHDVDLLITSPGAEKEQEDQLLQKVTNLWKKQGLLLYGDLRESRFEDGKLPSRKIDALDHFAKCFLILKLYHHKVDKSKWEMPTGSNESEAKSWKAIRVDLVRCPYDRFAFALLGWTGSRMFERDLRRYATHEKKMMLDNHALYDLTKKIFLKAKSEEEIFAHLGLEYLEPSERNA

SEQ ID NO: 659 - DNA, 1587 bp, synthetic construct
  misc_feature 1..1587: note = Variant of terminal deoxynucleotidyltransferase
  source 1..1587: mol_type = other DNA
atgcaccatcatcatcatcatggcggtagcggcagccacggcattcgtaccatcgattcggacttcgggaagaaacgccagaagaagatggataaccacgatagttccgccatctatgaaatcaaatttcacgagtttgtgctgttcattctcgaagagaaaatgggtgcgacgcgtcgtacttttctgacagatttagcccgcaagaaagggttccgcgtcgagaatgaactgtcagacagcgttacccacatcgtggcagaaaataattcaggatctgacgtattggcttggctgaagactcacaagatggagaagaccacgcaatttgaactgctggatattagctggcttatcgaaagcatgaaagttggtaaaccggtggacaccaaggggaaataccagttgatggaatcgggtgtgatgagtgcgaacccagatccgacagagggtcgtgaaaacattctgcctcctactacgaagaccatttctcagtatgcgtgtcaacgccgcaccaccctgaacaaccataatcaacgttttacggacgcactggaaattcttgcggaaaattacgagttcaaacgcaacgatgatacttgtctgacctttatgcgtgctatttccgtgctgaaatgccttccgtttgaggtagttagcctgaaagacacggaaggattgccctggatcggtgatgaagtcaaagggattatggaagaaatcatcgaggtcggtgaatcgctggaagtgcaggccgtgctcaatgatgagcgctatcaaagcttcaaactgtttaagagtgtctttggagtgggggtgaagacagcagacaaatggtaccgtatgggtctgcgcacgctcgaggatgttcgttccagcaagaccctgaagttgaccccgatgcagaaagcgggtctgtgctattatgaagatcttgctgatggcgttacgaaagccgaagctgacgcgatttctctgctggttcaggatgcagtctggactttcgacccggatgcgctggtggagattacgggtggatttcgtcgtgggaaaccttttggtcacgacgttgatctgcttatcacatctccgggagctgagaaagaacaagaagaccagctcctgcagaaagtgaccaatctgtggaagaaacaagggttgttgctgtacggtgacctgcgtgaaagtcgctttgaagatgggaaactcccatcccgcaagatcgatgccctggaccattttgcgaaatgctttctgatcctcaaactttatcaccataaagtggacaaaagcaaatgggaaatgccgacgggttcgaacgaaagcgaggccaaaagttggaaagcaattcgcgtagatctggttcgttgtccctacgatcgttttgcgtttgcgttgttgggttggaccggaagccgcatgttcgaacgtgatctgcgccgctacgccacccacgagaagaagatgatgctggacaatcatgcgctgtatgacctgaccaagaaaatctttctcaaagctaaatcggaagaggaaattttcgcacatctggggcttgaatacctggaaccgtccgaacgtaacgca

SEQ ID NO: 660 - protein, 529 aa, synthetic construct
  REGION 1..529: note = Variant of terminal deoxynucleotidyltransferase
MHHHHHHGGSGSHGIRTIDSDFGKKRQKKMDNHDSSAIYEIKFHEFVLFILEEKMGATRRTFLTDLARKKGFRVENELSDSVTHIVAENNSGSDVLAWLKTHKMEKTTQFELLDISWLIESMKVGKPVDTKGKYQLMESGVMSANPDPTEGRENILPPTTKTISQYACQRRTTLNNHNQRFTDALEILAENYEFKRNDDTCLTFMRAISVLKCLPFEVVSLKDTEGLPWIGDEVKGIMEEIIEVGESLEVQAVLNDERYQSFKLFKSVFGVGVKTADKWYRMGLRTLEDVRSSKTLKLTPMQKAGLCYYEDLADGVTKAEADAISLLVQDAVWTFDPDALVEITGGFRRGKPFGHDVDLLITSPGAEKEQEDQLLQKVTNLWKKQGLLLYGDLRESRFEDGKLPSRKIDALDHFAKCFLILKLYHHKVDKSKWEMPTGSNESEAKSWKAIRVDLVRCPYDRFAFALLGWTGSRMFERDLRRYATHEKKMMLDNHALYDLTKKIFLKAKSEEEIFAHLGLEYLEPSERNA

SEQ ID NO: 661 - DNA, 1587 bp, synthetic construct
  misc_feature 1..1587: note = Variant of terminal deoxynucleotidyltransferase
  source 1..1587: mol_type = other DNA
atgcaccatcatcatcatcatggcggtagcggcatgcaccgcattcgtaccatcgattcggacttcgggaagaaacgccagaagaagatggataaccacgatagttccatgatctatgaaatcaaatttcacgagtttgtgctgttcattctcgaagagaaaatgggtgcgacgcgtcgtacttttctgacagatttagcccgcaagaaagggttccgcgtcgagaatgaactgtcagacagcgttacccacatcgtggcagaaaataattcacgttctgaggtattggcttggctgaagactcacaagatggaggtcacgacgcaatttgaactgctggatattagctggcttatcgaaagcatgaaagttggtaaaccggtggacaccaaggggaaataccagttgatggaatcgcgtgagatgagtgcgaacccagatccgacagccggtaccctgaacattctgcctcctactacgaagaccatttctcagtatgcgtgtcaacgccgcaccaccctgaacaaccataatcaacgttttacggacgcactggaaattcttgcggaaaattacgagttcaaacgcaacgatgatacttgtctgacctttatgcgtgctatttccgtgctgaaatgccttccgtttgaggtagttagcctgaaagacacggaaggattgccctggatcggtgatgaagtcaaagggattatggaagaaatcatcgaggtcggtgaatcgctggaagtgcaggccgtgctcaatgatgaacgctatcaaagcttcaaactgtttaagagtgtctttggagtgggggtgaagacagcagacaaatggtaccgtatgggtctgcgcacgctcgaggatgttcgttccagcaagaccctgaagttgaccccgatgcagaaagcgggtctgtgctattatgaagatcttgctgatggcgttacgaaagccgaagctgacgcgatttctctgctggttcaggatgcagtctggactttcgacccggatgcgctggtggagattacgggtggatttcgtcgtgggaaaccttttggtcacgacgttgatctgcttatcacatctccgggagctgagaaagaacaagaagaccagctcctgcagaaagtgaccaatctgtggaagaaacaagggttgttgctgtacggtgacctgcgtgaaagtcgctttgaagatgggaaactcccatcccgcaagatcgatgccctggaccattttgcgaaatgctttctgatcctcaaactttatcaccataaagtggacaaaagcaaatgggaaatgccgacgggttcgaacgaaagcgaggccaaaagttggaaagcaattcgcgtagatctggttcgttgtccctacgatcgttttgcgtttgcgttgttgggttggaccggaagccgcatgttcgaacgtgatctgcgccgctacgccacccacgagaagaagatgatgctggacaatcatgcgctgtatgacctgaccaagaaaatctttctcaaagctaaatcggaagaggaaattttcgcacatctggggcttgaatacctggaaccgtccgaacgtaacgca

SEQ ID NO: 662 - protein, 529 aa, synthetic construct
  REGION 1..529: note = Variant of terminal deoxynucleotidyltransferase
MHHHHHHGGSGMHRIRTIDSDFGKKRQKKMDNHDSSMIYEIKFHEFVLFILEEKMGATRRTFLTDLARKKGFRVENELSDSVTHIVAENNSRSEVLAWLKTHKMEVTTQFELLDISWLIESMKVGKPVDTKGKYQLMESREMSANPDPTAGTLNILPPTTKTISQYACQRRTTLNNHNQRFTDALEILAENYEFKRNDDTCLTFMRAISVLKCLPFEVVSLKDTEGLPWIGDEVKGIMEEIIEVGESLEVQAVLNDERYQSFKLFKSVFGVGVKTADKWYRMGLRTLEDVRSSKTLKLTPMQKAGLCYYEDLADGVTKAEADAISLLVQDAVWTFDPDALVEITGGFRRGKPFGHDVDLLITSPGAEKEQEDQLLQKVTNLWKKQGLLLYGDLRESRFEDGKLPSRKIDALDHFAKCFLILKLYHHKVDKSKWEMPTGSNESEAKSWKAIRVDLVRCPYDRFAFALLGWTGSRMFERDLRRYATHEKKMMLDNHALYDLTKKIFLKAKSEEEIFAHLGLEYLEPSERNA

SEQ ID NO: 663 - DNA, 1587 bp, synthetic construct
  misc_feature 1..1587: note = Variant of terminal deoxynucleotidyltransferase
  source 1..1587: mol_type = other DNA
atgcaccatcatcatcatcatggcggtagcggcagccaccgcattcgtaccatcgattcggacttcgggaagaaacgccagaagaagatggataaccacattagttccgccatctatgaaatcaaatttcacgagtttgtgctgttcattctcgaagagaaaatgggtgcgacgcgtcgtacttttctgacagatttagcccgcaagaaagggttccgcgtcgagaatgaactgtcagacagcgttacccacatcgtggcagaaaataattcaggttctgaggtattggcttggctgaagactcacaagatggaggtcacgacgcaatttgaactgctggatattagctggcttatcgaaagcatgaaagttggtaaaccggtggacaccaaggggaaataccagttgatggaatcgcgtgaggatagtgcgaacccagatccgacagagggtcgtgaaaacattctgcctcctactacgaagactatttctcagtatgcgtgtcaacgccgcaccaccctgaacaaccataatcaacgttttacggacgcactggaaattcttgcggaaaattacgagttcaaacgcaacgatgatacttgtctgacctttatgcgtgctatttccgtgctgaaatgccttccgtttgaggtagttagcctgaaagacacggaaggattgccctggatcggtgatgaagtcaaagggattatggaagaaatcatcgaggtcggtgaatcgctggaagtgcaggccgtgctcaatgatgagcgctatcaaagcttcaaactgtttaagagtgtctttggagtgggggtgaagacagcagacaaatggtaccgtatgggtctgcgcacgctcgaggatgttcgttccagcaagaccctgaagttgaccccgatgcagaaagcgggtctgtgctattatgaagatcttgctgatggcgttacgaaagccgaagctgacgcgatttctctgctggttcaggatgcagtctggactttcgacccggatgcgctggtggagattacgggtggatttcgtcgtgggaaaccttttggtcacgacgttgatctgcttatcacatctccgggagctgagaaagaacaagaagaccagctcctgcagaaagtgaccaatctgtggaagaaacaagggttgttgctgtacggtgacctgcgtgaaagtcgctttgaagatgggaaactcccatcccgcaagatcgatgccctggaccattttgcgaaatgctttctgatcctcaaactttatcaccataaagtggacaaaagcaaatgggaaatgccgacgggttcgaacgaaagcgaggccaaaagttggaaagcaattcgcgtagatctggttcgttgtccctacgatcgttttgcgtttgcgttgttgggttggaccggaagccgcatgttcgaacgtgatctgcgccgctacgccacccacgagaagaagatgatgctggacaatcatgcgctgtatgacctgaccaagaaaatctttctcaaagctaaatcggaagaggaaattttcgcacatctggggcttgaatacctggaaccgtccgaacgtaacgca

SEQ ID NO: 664 - protein, 529 aa, synthetic construct
  REGION 1..529: note = Variant of terminal deoxynucleotidyltransferase
MHHHHHHGGSGSHRIRTIDSDFGKKRQKKMDNHISSAIYEIKFHEFVLFILEEKMGATRRTFLTDLARKKGFRVENELSDSVTHIVAENNSGSEVLAWLKTHKMEVTTQFELLDISWLIESMKVGKPVDTKGKYQLMESREDSANPDPTEGRENILPPTTKTISQYACQRRTTLNNHNQRFTDALEILAENYEFKRNDDTCLTFMRAISVLKCLPFEVVSLKDTEGLPWIGDEVKGIMEEIIEVGESLEVQAVLNDERYQSFKLFKSVFGVGVKTADKWYRMGLRTLEDVRSSKTLKLTPMQKAGLCYYEDLADGVTKAEADAISLLVQDAVWTFDPDALVEITGGFRRGKPFGHDVDLLITSPGAEKEQEDQLLQKVTNLWKKQGLLLYGDLRESRFEDGKLPSRKIDALDHFAKCFLILKLYHHKVDKSKWEMPTGSNESEAKSWKAIRVDLVRCPYDRFAFALLGWTGSRMFERDLRRYATHEKKMMLDNHALYDLTKKIFLKAKSEEEIFAHLGLEYLEPSERNA

SEQ ID NO: 665 - DNA, 1587 bp, synthetic construct
  misc_feature 1..1587: note = Variant of terminal deoxynucleotidyltransferase
  source 1..1587: mol_type = other DNA
atgcaccatcatcatcatcatggcggtagcggcagccaccgcattcgtaccatcgattcggacttcgggaagaaacgccagaagaagatggataaccacgatagttccatgatctatgaaatcaaatttcacgagtttgtgctgttcattctcgaagagaaaatgggtgcgacgcgtcgtacttttctgacagatttagcccgcaagaaagggttccgcgtcgagaatgaactgtcagacagcgttacccacatcgtggcagaaaataattcacgttctgatgtattggcttggctgaagactcacaagatggaggtcacgacgcaatttgaactgctggatattagctggcttatcgaaagcatgaaagttggtaaaccggtggacaccaaggggaaataccagttgatggaatcgggtgtggatagtgcgaacccagatccgacagccggtaccctcaacattctgcctcctactacgaagaccatttctcagtatgcgtgtcaacgccgcaccaccctgaacaaccataatcaacgttttacggacgcactggaaattcttgcggaaaattacgagttcaaacgcaacgatgatacttgtctgacctttatgcgtgctatttccgtgctgaaatgccttccgtttgaggtagttagcctgaaagacacggaaggattgccctggatcggtgatgaagtcaaagggattatggaagaaatcatcgaggtcggtgaatcgctggaagtgcaggccgtgctcaatgatgagcgctatcaaagcttcaaactgtttaagagtgtctttggagtgggggtgaagacagcagacaaatggtaccgtatgggtctgcgcacgctcgaggatgttcgttccagcaagaccctgaagttgaccccgatgcagaaagcgggtctgtgctattatgaagatcttgctgatggcgttacgaaagccgaagctgacgcgatttctctgctggttcaggatgcagtctggactttcgacccggatgcgctggtggagattacgggtggatttcgtcgtgggaaaccttttggtcacgacgttgatctgcttatcacatctccgggagctgagaaagaacaagaagaccagctcctgcagaaagtgaccaatctgtggaagaaacaagggttgttgctgtacggtgacctgcgtgaaagtcgctttgaagatgggaaactcccatcccgcaagatcgatgccctggaccattttgcgaaatgctttctgatcctcaaactttatcaccataaagtggacaaaagcaaatgggaaatgccgacgggttcgaacgaaagcgaggccaaaagttggaaagcaattcgcgtagatctggttcgttgtccctacgatcgttttgcgtttgcgttgttgggttggaccggaagccgcatgttcgaacgtgatctgcgccgctacgccacccacgagaagaagatgatgctggacaatcatgcgctgtatgacctgaccaagaaaatctttctcaaagctaaatcggaagaggaaattttcgcacatctggggcttgaatacctggaaccgtccgaacgtaacgca

SEQ ID NO: 666 - protein, 529 aa, synthetic construct
  REGION 1..529: note = Variant of terminal deoxynucleotidyltransferase
MHHHHHHGGSGSHRIRTIDSDFGKKRQKKMDNHDSSMIYEIKFHEFVLFILEEKMGATRRTFLTDLARKKGFRVENELSDSVTHIVAENNSRSDVLAWLKTHKMEVTTQFELLDISWLIESMKVGKPVDTKGKYQLMESGVDSANPDPTAGTLNILPPTTKTISQYACQRRTTLNNHNQRFTDALEILAENYEFKRNDDTCLTFMRAISVLKCLPFEVVSLKDTEGLPWIGDEVKGIMEEIIEVGESLEVQAVLNDERYQSFKLFKSVFGVGVKTADKWYRMGLRTLEDVRSSKTLKLTPMQKAGLCYYEDLADGVTKAEADAISLLVQDAVWTFDPDALVEITGGFRRGKPFGHDVDLLITSPGAEKEQEDQLLQKVTNLWKKQGLLLYGDLRESRFEDGKLPSRKIDALDHFAKCFLILKLYHHKVDKSKWEMPTGSNESEAKSWKAIRVDLVRCPYDRFAFALLGWTGSRMFERDLRRYATHEKKMMLDNHALYDLTKKIFLKAKSEEEIFAHLGLEYLEPSERNA

SEQ ID NO: 667 - DNA, 1587 bp, synthetic construct
  misc_feature 1..1587: note = Variant of terminal deoxynucleotidyltransferase
  source 1..1587: mol_type = other DNA
atgcaccatcatcatcatcatggcggtagcggcatgcaccgcattcgtaccatcgattcggacttcgggaagaaacgccagaagaagatggataaccacgatagttccatgatctatgaaatcaaatttcacgagtttgtgctgttcattctcgaagagaaaatgggtgcgacgcgtcgtacttttctgacagatttagcccgcaagaaagggttccgcgtcgagaatgaactgtcagacagcgttacccacatcgtggcagaaaataattcaggatctgacgtattggcttggctgaagactcacaagatggaggtcacgacgcaatttgaactgctggatattagctggcttatcgaaagcatgaaagttggtaaaccggtggacaccaaggggaaataccagttgatggaatcgcgtgtcgatagtgcgaacccagatccgacagagggtcgtgaaaacattctgcctcctactacgaagaccatttctcagtatgcgtgtcaacgccgcaccaccctgaacaaccataatcaacgttttacggacgcactggaaattcttgcggaaaattacgagttcaaacgcaacgatgatacttgtctgacctttatgcgtgctatttccgtgctgaaatgccttccgtttgaggtagttagcctgaaagacacggaaggattgccctggatcggtgatgaagtcaaagggattatggaagaaatcatcgaggtcggtgaatcgctggaagtgcaggccgtgctcaatgatgagcgctatcaaagcttcaaactgtttaagagtgtctttggagtgggggtgaagacagcagacaaatggtaccgtatgggtctgcgcacgctcgaggatgttcgttccagcaagaccctgaagttgaccccgatgcagaaagcgggtctgtgctattatgaagatcttgctgatggcgttacgaaagccgaagctgacgcgatttctctgctggttcaggatgcagtctggactttcgacccggatgcgctggtggagattacgggtggatttcgtcgtgggaaaccttttggtcacgacgttgatctgcttatcacatctccgggagctgagaaagaacaagaagaccagctcctgcagaaagtgaccaatctgtggaagaaacaagggttgttgctgtacggtgacctgcgtgaaagtcgctttgaagatgggaaactcccatcccgcaagatcgatgccctggaccattttgcgaaatgctttctgatcctcaaactttatcaccataaagtggacaaaagcaaatgggaaatgccgacgggttcgaacgaaagcgaggccaaaagttggaaagcaattcgcgtagatctggttcgttgtccctacgatcgttttgcgtttgcgttgttgggttggaccggaagccgcatgttcgaacgtgatctgcgccgctacgccacccacgagaagaagatgatgctggacaatcatgcgctgtatgacctgaccaagaaaatctttctcaaagctaaatcggaagaggaaattttcgcacatctggggcttgaatacctggaaccgtccgaacgtaacgca

SEQ ID NO: 668 - protein, 529 aa, synthetic construct
  REGION 1..529: note = Variant of terminal deoxynucleotidyltransferase
MHHHHHHGGSGMHRIRTIDSDFGKKRQKKMDNHDSSMIYEIKFHEFVLFILEEKMGATRRTFLTDLARKKGFRVENELSDSVTHIVAENNSGSDVLAWLKTHKMEVTTQFELLDISWLIESMKVGKPVDTKGKYQLMESRVDSANPDPTEGRENILPPTTKTISQYACQRRTTLNNHNQRFTDALEILAENYEFKRNDDTCLTFMRAISVLKCLPFEVVSLKDTEGLPWIGDEVKGIMEEIIEVGESLEVQAVLNDERYQSFKLFKSVFGVGVKTADKWYRMGLRTLEDVRSSKTLKLTPMQKAGLCYYEDLADGVTKAEADAISLLVQDAVWTFDPDALVEITGGFRRGKPFGHDVDLLITSPGAEKEQEDQLLQKVTNLWKKQGLLLYGDLRESRFEDGKLPSRKIDALDHFAKCFLILKLYHHKVDKSKWEMPTGSNESEAKSWKAIRVDLVRCPYDRFAFALLGWTGSRMFERDLRRYATHEKKMMLDNHALYDLTKKIFLKAKSEEEIFAHLGLEYLEPSERNA

SEQ ID NO: 669 - DNA, 1587 bp, synthetic construct
  misc_feature 1..1587: note = Variant of terminal deoxynucleotidyltransferase
  source 1..1587: mol_type = other DNA
atgcaccatcatcatcatcatggcggtagcggcagccacggcattcgtaccatcgattcggacttcgggaagaaacgccagaagaagatggataaccacgatagttcctttatctatgaaatcaaatttcacgagtttgtgctgttcattctcgaagagaaaatgggtgcgacgcgtcgtacttttctgacagatttagcccgcaagaaagggttccgcgtcgagaatgaactgtcagacagcgttacccacatcgtggcagaaaataattcaggttctgaggtattggcttggctgaagactcacaagatggaggtcacgacgcaatttgaactgctggatattagctggcttatcgaaagcatgaaagttggtaaaccggtggacaccaaggggaaataccagttgatggaatcgggtgaggatagtgcggagccagatccgacagccggtaccctcaacattctgcctcctactacgaagaccatttctcagtatgcgtgtcaacgccgcaccaccctgaacaaccataatcaacgttttacggacgcactggaaattcttgcggaaaattacgagttcaaacgcaacgatgatacttgtctgacctttatgcgtgctatttccgtgctgaaatgccttccgtttgaggtagttagcctgaaagacacggaaggattgccctggatcggtgatgaagtcaaagggattatggaagaaatcatcgaggtcggtgaatcgctggaagtgcaggccgtgctcaatgatgagcgctatcaaagcttcaaactgtttaagagtgtctttggagtgggggtgaagacagcagacaaatggtaccgtatgggtctgcgcacgctcgaggatgttcgttccagcaagaccctgaagttgaccccgatgcagaaagcgggtctgtgctattatgaagatcttgctgatggcgttacgaaagccgaagctgacgcgatttctctgctggttcaggatgcagtctggactttcgacccggatgcgctggtggagattacgggtggatttcgtcgtgggaaaccttttggtcacgacgttgatctgcttatcacatctccgggagctgagaaagaacaagaagaccagctcctgcagaaagtgaccaatctgtggaagaaacaagggttgttgctgtacggtgacctgcgtgaaagtcgctttgaagatgggaaactcccatcccgcaagatcgatgccctggaccattttgcgaaatgctttctgatcctcaaactttatcaccataaagtggacaaaagcaaatgggaaatgccgacgggttcgaacgaaagcgaggccaaaagttggaaagcaattcgcgtagatctggttcgttgtccctacgatcgttttgcgtttgcgttgttgggttggaccggaagccgcatgttcgaacgtgatctgcgccgctacgccacccacgagaagaagatgatgctggacaatcatgcgctgtatgacctgaccaagaaaatctttctcaaagctaaatcggaagaggaaattttcgcacatctggggcttgaatacctggaaccgtccgaacgtaacgca

SEQ ID NO: 670 - protein, 529 aa, synthetic construct
  REGION 1..529: note = Variant of terminal deoxynucleotidyltransferase
MHHHHHHGGSGSHGIRTIDSDFGKKRQKKMDNHDSSFIYEIKFHEFVLFILEEKMGATRRTFLTDLARKKGFRVENELSDSVTHIVAENNSGSEVLAWLKTHKMEVTTQFELLDISWLIESMKVGKPVDTKGKYQLMESGEDSAEPDPTAGTLNILPPTTKTISQYACQRRTTLNNHNQRFTDALEILAENYEFKRNDDTCLTFMRAISVLKCLPFEVVSLKDTEGLPWIGDEVKGIMEEIIEVGESLEVQAVLNDERYQSFKLFKSVFGVGVKTADKWYRMGLRTLEDVRSSKTLKLTPMQKAGLCYYEDLADGVTKAEADAISLLVQDAVWTFDPDALVEITGGFRRGKPFGHDVDLLITSPGAEKEQEDQLLQKVTNLWKKQGLLLYGDLRESRFEDGKLPSRKIDALDHFAKCFLILKLYHHKVDKSKWEMPTGSNESEAKSWKAIRVDLVRCPYDRFAFALLGWTGSRMFERDLRRYATHEKKMMLDNHALYDLTKKIFLKAKSEEEIFAHLGLEYLEPSERNA

SEQ ID NO: 671 - DNA, 1587 bp, synthetic construct
  misc_feature 1..1587: note = Variant of terminal deoxynucleotidyltransferase
  source 1..1587: mol_type = other DNA
atgcaccatcatcatcatcatggcggtagcggcatgcaccgtattcgtaccatcgattcggacttcgggaagaaacgccagaagaagatggataaccacattagttccatgatctatgaaatcaaatttcacgagtttgtgctgttcattctcgaagagaaaatgggtgcgacgcgtcgtacttttctgacagatttagcccgcaagaaagggttccgcgtcgagaatgaactgtcagacagcgttacccacatcgtggcagaaaataattcaggatctgacgtattggcttggctgaaggagcacaagatggagtcgacgacgcaatttgaactgctggatattagctggcttatcgaaagcatgaaagaaggtaaaccggtggacaccaaggggaaataccagttgatggaatcgcgtgtcgatagtgcgaacccagatccgacagccggtaccctcaacgaactgcctcctactacgaagaccatttctcagtatgcgtgtcaacgccgcaccaccctgaacaaccataatcaacgttttacggacgcactggaaattcttgcggaaaattacgagttcaaacgcaacgatgatacttgtctgacctttatgcgtgctatttccgtgctgaaatgccttccgtttgaggtagttagcctgaaagacacggaaggattgccctggatcggtgatgaagtcaaagggattatggaagaaatcatcgaggtcggtgaatcgctggaagtgcaggccgtgctcaatgatgagcgctatcaaagcttcaaactgtttaagagtgtctttggagtgggggtgaagacagcagacaaatggtaccgtatgggtctgcgcacgctcgaggatgttcgttccagcaagaccctgaagttgaccccgatgcagaaagcgggtctgtgctattatgaagatcttgctgatggcgttacgaaagccgaagctgacgcgatttctctgctggttcaggatgcagtctggactttcgacccggatgcgctggtggagattacgggtggatttcgtcgtgggaaaccttttggtcacgacgttgatctgcttatcacatctccgggagctgagaaagaacaagaagaccagctcctgcagaaagtgaccaatctgtggaagaaacaagggttgttgctgtacggtgacctgcgtgaaagtcgctttgaagatgggaaactcccatcccgcaagatcgatgccctggaccattttgcgaaatgctttctgatcctcaaactttatcaccataaagtggacaaaagcaaatgggaaatgccgacgggttcgaacgaaagcgaggccaaaagttggaaagcaattcgcgtagatctggttcgttgtccctacgatcgttttgcgtttgcgttgttgggttggaccggaagccgcatgttcgaacgtgatctgcgccgctacgccacccacgagaagaagatgatgctggacaatcatgcgctgtatgacctgaccaagaaaatctttctcaaagctaaatcggaagaggaaattttcgcacatctggggcttgaatacctggaaccgtccgaacgtaacgca

SEQ ID NO: 672 - protein, 529 aa, synthetic construct
  REGION 1..529: note = Variant of terminal deoxynucleotidyltransferase
MHHHHHHGGSGMHRIRTIDSDFGKKRQKKMDNHISSMIYEIKFHEFVLFILEEKMGATRRTFLTDLARKKGFRVENELSDSVTHIVAENNSGSDVLAWLKEHKMESTTQFELLDISWLIESMKEGKPVDTKGKYQLMESRVDSANPDPTAGTLNELPPTTKTISQYACQRRTTLNNHNQRFTDALEILAENYEFKRNDDTCLTFMRAISVLKCLPFEVVSLKDTEGLPWIGDEVKGIMEEIIEVGESLEVQAVLNDERYQSFKLFKSVFGVGVKTADKWYRMGLRTLEDVRSSKTLKLTPMQKAGLCYYEDLADGVTKAEADAISLLVQDAVWTFDPDALVEITGGFRRGKPFGHDVDLLITSPGAEKEQEDQLLQKVTNLWKKQGLLLYGDLRESRFEDGKLPSRKIDALDHFAKCFLILKLYHHKVDKSKWEMPTGSNESEAKSWKAIRVDLVRCPYDRFAFALLGWTGSRMFERDLRRYATHEKKMMLDNHALYDLTKKIFLKAKSEEEIFAHLGLEYLEPSERNA

SEQ ID NO: 673 - DNA, 1587 bp, synthetic construct
  misc_feature 1..1587: note = Variant of terminal deoxynucleotidyltransferase
  source 1..1587: mol_type = other DNA
atgcaccatcatcatcatcatggcggtagcggcatgcaccgtattcgtaccatcgattcggacttcgggaagaaacgccagaagaagatggataaccacattagttccatgatctatgaaatcaaatttcacgagtttgtgctgttcattctcgaagagaaaatgggtgcgacgcgtcgtacttttctgacagatttagcccgcaagaaagggttccgcgtcgagaatgaactgtcagacagcgttacccacatcgtggcagaaaataattcacgttctgaggtattggcttggctgaagactcacaagatggagaagaccacgcaatttgaactgctggatattagctggcttatcgaaagcatgaaagttggtaaaccggtggacaccaaggggaaataccagttgatggaatcgcgtgtgagcagtgcggagccagatccgacagccggtaccctcaacattctgcctcctactacgaagaccatttctcagtatgcgtgtcaacgccgcaccaccctgaacaaccataatcaacgttttacggacgcactggaaattcttgcggaaaattacgagttcaaacgcaacgatgatacttgtctgacctttatgcgtgctatttccgtgctgaaatgccttccgtttgaggtagttagcctgaaagacacggaaggattgccctggatcggtgatgaagtcaaagggattatggaagaaatcatcgaggtcggtgaatcgctggaagtgcaggccgtgctcaatgatgagcgctatcaaagcttcaaactgtttaagagtgtctttggagtgggggtgaagacagcagacaaatggtaccgtatgggtctgcgcacgctcgaggatgttcgttccagcaagaccctgaagttgaccccgatgcagaaagcgggtctgtgctattatgaagatcttgctgatggcgttacgaaagccgaagctgacgcgatttctctgctggttcaggatgcagtctggactttcgacccggatgcgctggtggagattacgggtggatttcgtcgtgggaaaccttttggtcacgacgttgatctgcttatcacatctccgggagctgagaaagaacaagaagaccagctcctgcagaaagtgaccaatctgtggaagaaacaagggttgttgctgtacggtgacctgcgtgaaagtcgctttgaagatgggaaactcccatcccgcaagatcgatgccctggaccattttgcgaaatgctttctgatcctcaaactttatcaccataaagtggacaaaagcaaatgggaaatgccgacgggttcgaacgaaagcgaggccaaaagttggaaagcaattcgcgtagatctggttcgttgtccctacgatcgttttgcgtttgcgttgttgggttggaccggaagccgcatgttcgaacgtgatctgcgccgctacgccacccacgagaagaagatgatgctggacaatcatgcgctgtatgacctgaccaagaaaatctttctcaaagctaaatcggaagaggaaattttcgcacatctggggcttgaatacctggaaccgtccgaacgtaacgca

SEQ ID NO: 674 - protein, 529 aa, synthetic construct
  REGION 1..529: note = Variant of terminal deoxynucleotidyltransferase
MHHHHHHGGSGMHRIRTIDSDFGKKRQKKMDNHISSMIYEIKFHEFVLFILEEKMGATRRTFLTDLARKKGFRVENELSDSVTHIVAENNSRSEVLAWLKTHKMEKTTQFELLDISWLIESMKVGKPVDTKGKYQLMESRVSSAEPDPTAGTLNILPPTTKTISQYACQRRTTLNNHNQRFTDALEILAENYEFKRNDDTCLTFMRAISVLKCLPFEVVSLKDTEGLPWIGDEVKGIMEEIIEVGESLEVQAVLNDERYQSFKLFKSVFGVGVKTADKWYRMGLRTLEDVRSSKTLKLTPMQKAGLCYYEDLADGVTKAEADAISLLVQDAVWTFDPDALVEITGGFRRGKPFGHDVDLLITSPGAEKEQEDQLLQKVTNLWKKQGLLLYGDLRESRFEDGKLPSRKIDALDHFAKCFLILKLYHHKVDKSKWEMPTGSNESEAKSWKAIRVDLVRCPYDRFAFALLGWTGSRMFERDLRRYATHEKKMMLDNHALYDLTKKIFLKAKSEEEIFAHLGLEYLEPSERNA

SEQ ID NO: 675 - DNA, 1587 bp, synthetic construct
  misc_feature 1..1587: note = Variant of terminal deoxynucleotidyltransferase
  source 1..1587: mol_type = other DNA
atgcaccatcatcatcatcatggcggtagcggcatgcaccgtattcgtaccatcgataccgaattcgggggtaaacgccagaagaagatggataacaagattagttccatgatctatgaaatcaaatttcacgagtttgtgctgttcattctcgaagagaaaatgggtgcggcgcgtcgtacttttctgacagatttagcccgcaagaaagggttccgcgtcgagaatgaactgtcagacagcgttacccacatcgtggcagaaaataattcaggatctgacgtattggcttggctgaagactcacaagccggagtcgacgacgcaatttgaactgctggatattagctggcttatcgaaagcatgaaagaaggtaaaccggtggacaccaaggggaaataccagttgatggaatcgcgtgtcgatagtgcgaacccagatccgacagccggtaccctcaacgaagaacctcctactacgaagaccatttctcagtatgcgtgtcaacgccgcaccaccctgaacaaccataatcaacgttttacggacgcactggaaattcttgcggaaaattacgagttcaaacgcaacgatgatacttgtctgacctttatgcgtgctatttccgtgctgaaatgccttccgtttgaggtagttagcctgaaagacacggaaggattgccctggatcggtgatgaagtcaaagggattatggaagaaatcatcgaggtcggtgaatcgctggaagtgcaggccgtgctcaatgatgagcgctatcaaagcttcaaactgtttaagagtgtctttggagtgggggtgaagacagcagacaaatggtaccgtatgggtctgcgcacgctcgaggatgttcgttccagcaagaccctgaagttgaccccgatgcagaaagcgggtctgtgctattatgaagatcttgctgatggcgttacgaaagccgaagctgacgcgatttctctgctggttcaggatgcagtctggactttcgacccggatgcgctggtggagattacgggtggatttcgtcgtgggaaaccttttggtcacgacgttgatctgcttatcacatctccgggagctgagaaagaacaagaagaccagctcctgcagaaagtgaccaatctgtggaagaaacaagggttgttgctgtacggtgacctgcgtgaaagtcgctttgaagatgggaaactcccatcccgcaagatcgatgccctggaccattttgcgaaatgctttctgatcctcaaactttatcaccataaagtggacaaaagcaaatgggaaatgccgacgggttcgaacgaaagcgaggccaaaagttggaaagcaattcgcgtagatctggttcgttgtccctacgatcgttttgcgtttgcgttgttgggttggaccggaagccgcatgttcgaacgtgatctgcgccgctacgccacccacgagaagaagatgatgctggacaatcatgcgctgtatgacctgaccaagaaaatctttctcaaagctaaatcggaagaggaaattttcgcacatctggggcttgaatacctggaaccgtccgaacgtaacgca

SEQ ID NO: 676 - protein, 529 aa, synthetic construct
  REGION 1..529: note = Variant of terminal deoxynucleotidyltransferase
MHHHHHHGGSGMHRIRTIDTEFGGKRQKKMDNKISSMIYEIKFHEFVLFILEEKMGAARRTFLTDLARKKGFRVENELSDSVTHIVAENNSGSDVLAWLKTHKPESTTQFELLDISWLIESMKEGKPVDTKGKYQLMESRVDSANPDPTAGTLNEEPPTTKTISQYACQRRTTLNNHNQRFTDALEILAENYEFKRNDDTCLTFMRAISVLKCLPFEVVSLKDTEGLPWIGDEVKGIMEEIIEVGESLEVQAVLNDERYQSFKLFKSVFGVGVKTADKWYRMGLRTLEDVRSSKTLKLTPMQKAGLCYYEDLADGVTKAEADAISLLVQDAVWTFDPDALVEITGGFRRGKPFGHDVDLLITSPGAEKEQEDQLLQKVTNLWKKQGLLLYGDLRESRFEDGKLPSRKIDALDHFAKCFLILKLYHHKVDKSKWEMPTGSNESEAKSWKAIRVDLVRCPYDRFAFALLGWTGSRMFERDLRRYATHEKKMMLDNHALYDLTKKIFLKAKSEEEIFAHLGLEYLEPSERNA

SEQ ID NO: 677 - DNA, 1587 bp, synthetic construct
  misc_feature 1..1587: note = Variant of terminal deoxynucleotidyltransferase
  source 1..1587: mol_type = other DNA
atgcaccatcatcatcatcatggcggtagcggcagccacggcattcgtaccatcgattcggacttcgggaagaaacgccagaagaagatggataaccacgatagttccgccatctatgaaatcaaatttcacgagtttgtgctgttcattctcgaagagaaaatgggtgcgacgcgtcgtacttttctgacagatttagcccgcaagaaagggttccgcgtcgagaatgaactgtcagacagcgttacccacatcgtggcagaaaataattcaggatctgacgtattggcttggctgaagactcacaagatggaggtcacgacgcaatttgaactgctggatattagctggcttatcgaaagcatgaaagttggtaaaccggtggacaccaaggggaaataccagttgatggaatcgcgtgtcgatagtgcgaacccagatccgacagagggtaccctgaacattctgcctcctactacgaagaccatttctcagtatgcgtgtcaacgccgcaccaccctgaacaaccataatcaacgttttacggacgcactggaaattcttgcggaaaattacgagttcaaacgcaacgatgatacttgtctgacctttatgcgtgctatttccgtgctgaaatgccttccgtttgaggtagttagcctgaaagacacggaaggattgccctggatcggtgatgaagtcaaagggattatggaagaaatcatcgaggtcggtgaatcgctggaagtgcaggccgtgctcaatgatgagcgctatcaaagcttcaaactgtttaagagtgtctttggagtgggggtgaagacagcagacaaatggtaccgtatgggtctgcgcacgctcgaggatgttcgttccagcaagaccctgaagttgaccccgatgcagaaagcgggtctgtgctattatgaagatcttgctgatggcgttacgaaagccgaagctgacgcgatttctctgctggttcaggatgcagtctggactttcgacccggatgcgctggtggagattacgggtggatttcgtcgtgggaaaccttttggtcacgacgttgatctgcttatcacatctccgggagctgagaaagaacaagaagaccagctcctgcagaaagtgaccaatctgtggaagaaacaagggttgttgctgtacggtgacctgcgtgaaagtcgctttgaagatgggaaactcccatcccgcaagatcgatgccctggaccattttgcgaaatgctttctgatcctcaaactttatcaccataaagtggacaaaagcaaatgggaaatgccgacgggttcgaacgaaagcgaggccaaaagttggaaagcaattcgcgtagatctggttcgttgtccctacgatcgttttgcgtttgcgttgttgggttggaccggaagccgcatgttcgaacgtgatctgcgccgctacgccacccacgagaagaagatgatgctggacaatcatgcgctgtatgacctgaccaagaaaatctttctcaaagctaaatcggaagaggaaattttcgcacatctggggcttgaatacctggaaccgtccgaacgtaacgca

SEQ ID NO: 678 - protein, 529 aa, synthetic construct
  REGION 1..529: note = Variant of terminal deoxynucleotidyltransferase
MHHHHHHGGSGSHGIRTIDSDFGKKRQKKMDNHDSSAIYEIKFHEFVLFILEEKMGATRRTFLTDLARKKGFRVENELSDSVTHIVAENNSGSDVLAWLKTHKMEVTTQFELLDISWLIESMKVGKPVDTKGKYQLMESRVDSANPDPTEGTLNILPPTTKTISQYACQRRTTLNNHNQRFTDALEILAENYEFKRNDDTCLTFMRAISVLKCLPFEVVSLKDTEGLPWIGDEVKGIMEEIIEVGESLEVQAVLNDERYQSFKLFKSVFGVGVKTADKWYRMGLRTLEDVRSSKTLKLTPMQKAGLCYYEDLADGVTKAEADAISLLVQDAVWTFDPDALVEITGGFRRGKPFGHDVDLLITSPGAEKEQEDQLLQKVTNLWKKQGLLLYGDLRESRFEDGKLPSRKIDALDHFAKCFLILKLYHHKVDKSKWEMPTGSNESEAKSWKAIRVDLVRCPYDRFAFALLGWTGSRMFERDLRRYATHEKKMMLDNHALYDLTKKIFLKAKSEEEIFAHLGLEYLEPSERNA

SEQ ID NO: 679 - DNA, 1587 bp, synthetic construct
  misc_feature 1..1587: note = Variant of terminal deoxynucleotidyltransferase
  source 1..1587: mol_type = other DNA
atgcaccatcatcatcatcatggcggtagcggcatgcaccgtattcgtaccatcgataccgaattcgggaagaaacgccagaagaagatggataacaagattagttccatgatctatgaaatcaaatttcacgagtttgtgctgttcattctcgaagagaaaatgggtgcggcgcgtcgtacttttctgacagatttagcccgcaagaaagggttccgcgtcgagaatgaactgtcagacagcgttacccacatcgtggcagaaaataattcaggatctgacgtattggcttggctgaaggagcacaagccggagaaaacgacgcaatttgaactgctggatattagctggcttatcgaaagcatgaaagaaggtaaaccggtggacaccaaggggaaataccagttgatggaatcgcgtgtcgatagtgcgaacccagatccgacagccggtaccctcaacgaactgcctcctactacgaagaccatttctcagtatgcgtgtcaacgccgcaccaccctgaacaaccataatcaacgttttacggacgcactggaaattcttgcggaaaattacgagttcaaacgcaacgatgatacttgtctgacctttatgcgtgctatttccgtgctgaaatgccttccgtttgaggtagttagcctgaaagacacggaaggattgccctggatcggtgatgaagtcaaagggattatggaagaaatcatcgaggtcggtgaatcgctggaagtgcaggccgtgctcaatgatgagcgctatcaaagcttcaaactgtttaagagtgtctttggagtgggggtgaagacagcagacaaatggtaccgtatgggtctgcgcacgctcgaggatgttcgttccagcaagaccctgaagttgaccccgatgcagaaagcgggtctgtgctattatgaagatcttgctgatggcgttacgaaagccgaagctgacgcgatttctctgctggttcaggatgcagtctggactttcgacccggatgcgctggtggagattacgggtggatttcgtcgtgggaaaccttttggtcacgacgttgatctgcttatcacatctccgggagctgagaaagaacaagaagaccagctcctgcagaaagtgaccaatctgtggaagaaacaagggttgttgctgtacggtgacctgcgtgaaagtcgctttgaagatgggaaactcccatcccgcaagatcgatgccctggaccattttgcgaaatgctttctgatcctcaaactttatcaccataaagtggacaaaagcaaatgggaaatgccgacgggttcgaacgaaagcgaggccaaaagttggaaagcaattcgcgtagatctggttcgttgtccctacgatcgttttgcgtttgcgttgttgggttggaccggaagccgcatgttcgaacgtgatctgcgccgctacgccacccacgagaagaagatgatgctggacaatcatgcgctgtatgacctgaccaagaaaatctttctcaaagctaaatcggaagaggaaattttcgcacatctggggcttgaatacctggaaccgtccgaacgtaacgca

SEQ ID NO: 680 - protein, 529 aa, synthetic construct
  REGION 1..529: note = Variant of terminal deoxynucleotidyltransferase
MHHHHHHGGSGMHRIRTIDTEFGKKRQKKMDNKISSMIYEIKFHEFVLFILEEKMGAARRTFLTDLARKKGFRVENELSDSVTHIVAENNSGSDVLAWLKEHKPEKTTQFELLDISWLIESMKEGKPVDTKGKYQLMESRVDSANPDPTAGTLNELPPTTKTISQYACQRRTTLNNHNQRFTDALEILAENYEFKRNDDTCLTFMRAISVLKCLPFEVVSLKDTEGLPWIGDEVKGIMEEIIEVGESLEVQAVLNDERYQSFKLFKSVFGVGVKTADKWYRMGLRTLEDVRSSKTLKLTPMQKAGLCYYEDLADGVTKAEADAISLLVQDAVWTFDPDALVEITGGFRRGKPFGHDVDLLITSPGAEKEQEDQLLQKVTNLWKKQGLLLYGDLRESRFEDGKLPSRKIDALDHFAKCFLILKLYHHKVDKSKWEMPTGSNESEAKSWKAIRVDLVRCPYDRFAFALLGWTGSRMFERDLRRYATHEKKMMLDNHALYDLTKKIFLKAKSEEEIFAHLGLEYLEPSERNA

SEQ ID NO: 681 - DNA, 1587 bp, synthetic construct
  misc_feature 1..1587: note = Variant of terminal deoxynucleotidyltransferase
  source 1..1587: mol_type = other DNA
atgcaccatcatcatcatcatggcggtagcggcatgcaccgcattcgtaccatcgattcggacttcgggaagaaacgccagaagaagatggataaccacagtagttccgccatctatgaaatcaaatttcacgagtttgtgctgttcattctcgaagagaaaatgggtgcgacgcgtcgtacttttctgacagatttagcccgcaagaaagggttccgcgtcgagaatgaactgtcagacagcgttacccacatcgtggcagaaaataattcaggatctgacgtattggcttggctgaagactcacaagatggaggtcacgacgcaatttgaactgctggatattagctggcttatcgaaagcatgaaagttggtaaaccggtggacaccaaggggaaataccagttgatggaatcgcgtgtcgatagtgcgaacccagatccgacagagggtaccgaaaacattctgcctcctactacgaagaccatttctcagtatgcgtgtcaacgccgcaccaccctgaacaaccataatcaacgttttacggacgcactggaaattcttgcggaaaattacgagttcaaacgcaacgatgatacttgtctgacctttatgcgtgctatttccgtgctgaaatgccttccgtttgaggtagttagcctgaaagacacggaaggattgccctggatcggtgatgaagtcaaagggattatggaagaaatcatcgaggtcggtgaatcgctggaagtgcaggccgtgctcaatgatgagcgctatcaaagcttcaaactgtttaagagtgtctttggagtgggggtgaagacagcagacaaatggtaccgtatgggtctgcgcacgctcgaggatgttcgttccagcaagaccctgaagttgaccccgatgcagaaagcgggtctgtgctattatgaagatcttgctgatggcgttacgaaagccgaagctgacgcgatttctctgctggttcaggatgcagtctggactttcgacccggatgcgctggtggagattacgggtggatttcgtcgtgggaaaccttttggtcacgacgttgatctgcttatcacatctccgggagctgagaaagaacaagaagaccagctcctgcagaaagtgaccaatctgtggaagaaacaagggttgttgctgtacggtgacctgcgtgaaagtcgctttgaagatgggaaactcccatcccgcaagatcgatgccctggaccattttgcgaaatgctttctgatcctcaaactttatcaccataaagtggacaaaagcaaatgggaaatgccgacgggttcgaacgaaagcgaggccaaaagttggaaagcaattcgcgtagatctggttcgttgtccctacgatcgttttgcgtttgcgttgttgggttggaccggaagccgcatgttcgaacgtgatctgcgccgctacgccacccacgagaagaagatgatgctggacaatcatgcgctgtatgacctgaccaagaaaatctttctcaaagctaaatcggaagaggaaattttcgcacatctggggcttgaatacctggaaccgtccgaacgtaacgca

SEQ ID NO: 682 - protein, 529 aa, synthetic construct
  REGION 1..529: note = Variant of terminal deoxynucleotidyltransferase
MHHHHHHGGSGMHRIRTIDSDFGKKRQKKMDNHSSSAIYEIKFHEFVLFILEEKMGATRRTFLTDLARKKGFRVENELSDSVTHIVAENNSGSDVLAWLKTHKMEVTTQFELLDISWLIESMKVGKPVDTKGKYQLMESRVDSANPDPTEGTENILPPTTKTISQYACQRRTTLNNHNQRFTDALEILAENYEFKRNDDTCLTFMRAISVLKCLPFEVVSLKDTEGLPWIGDEVKGIMEEIIEVGESLEVQAVLNDERYQSFKLFKSVFGVGVKTADKWYRMGLRTLEDVRSSKTLKLTPMQKAGLCYYEDLADGVTKAEADAISLLVQDAVWTFDPDALVEITGGFRRGKPFGHDVDLLITSPGAEKEQEDQLLQKVTNLWKKQGLLLYGDLRESRFEDGKLPSRKIDALDHFAKCFLILKLYHHKVDKSKWEMPTGSNESEAKSWKAIRVDLVRCPYDRFAFALLGWTGSRMFERDLRRYATHEKKMMLDNHALYDLTKKIFLKAKSEEEIFAHLGLEYLEPSERNA

SEQ ID NO: 683 - DNA, 1587 bp, synthetic construct
  misc_feature 1..1587: note = Variant of terminal deoxynucleotidyltransferase
  source 1..1587: mol_type = other DNA
atgcaccatcatcatcatcatggcggtagcggcagccacggcattcgtaccatcgattcggacttcgggaagaaacgccagaagaagatggataaccacattagttccatgatctatgaaatcaaatttcacgagtttgtgctgttcattctcgaagagaaaatgggtgcgacgcgtcgtacttttctgacagatttagcccgcaagaaagggttccgcgtcgagaatgaactgtcagacagcgttacccacatcgtggcagaaaataattcaggatctgacgtattggcttggctgaagactcacaagatggagaagaccaagcaatttgaactgctggatattagctggcttatcgaaagcatgaaagttggtaaaccggtggacaccaaggggaaataccagttgatggaatcgggtgaggatagtgcggagccagatccgacagagggtaccctgaacattctgcctcctactacgaagactatttctcagtatgcgtgtcaacgccgcaccaccctgaacaaccataatcaacgttttacggacgcactggaaattcttgcggaaaattacgagttcaaacgcaacgatgatacttgtctgacctttatgcgtgctatttccgtgctgaaatgccttccgtttgaggtagttagcctgaaagacacggaaggattgccctggatcggtgatgaagtcaaagggattatggaagaaatcatcgaggtcggtgaatcgctggaagtgcaggccgtgctcaatgatgagcgctatcaaagcttcaaactgtttaagagtgtctttggagtgggggtgaagacagcagacaaatggtaccgtatgggtctgcgcacgctcgaggatgttcgttccagcaagaccctgaagttgaccccgatgcagaaagcgggtctgtgctattatgaagatcttgctgatggcgttacgaaagccgaagctgacgcgatttctctgctggttcaggatgcagtctggactttcgacccggatgcgctggtggagattacgggtggatttcgtcgtgggaaaccttttggtcacgacgttgatctgcttatcacatctccgggagctgagaaagaacaagaagaccagctcctgcagaaagtgaccaatctgtggaagaaacaagggttgttgctgtacggtgacctgcgtgaaagtcgctttgaagatgggaaactcccatcccgcaagatcgatgccctggaccattttgcgaaatgctttctgatcctcaaactttatcaccataaagtggacaaaagcaaatgggaaatgccgacgggttcgaacgaaagcgaggccaaaagttggaaagcaattcgcgtagatctggttcgttgtccctacgatcgttttgcgtttgcgttgttgggttggaccggaagccgcatgttcgaacgtgatctgcgccgctacgccacccacgagaagaagatgatgctggacaatcatgcgctgtatgacctgaccaagaaaatctttctcaaagctaaatcggaagaggaaattttcgcacatctggggcttgaatacctggaaccgtccgaacgtaacgca

SEQ ID NO: 684 - protein, 529 aa, synthetic construct
  REGION 1..529: note = Variant of terminal deoxynucleotidyltransferase
MHHHHHHGGSGSHGIRTIDSDFGKKRQKKMDNHISSMIYEIKFHEFVLFILEEKMGATRRTFLTDLARKKGFRVENELSDSVTHIVAENNSGSDVLAWLKTHKMEKTKQFELLDISWLIESMKVGKPVDTKGKYQLMESGEDSAEPDPTEGTLNILPPTTKTISQYACQRRTTLNNHNQRFTDALEILAENYEFKRNDDTCLTFMRAISVLKCLPFEVVSLKDTEGLPWIGDEVKGIMEEIIEVGESLEVQAVLNDERYQSFKLFKSVFGVGVKTADKWYRMGLRTLEDVRSSKTLKLTPMQKAGLCYYEDLADGVTKAEADAISLLVQDAVWTFDPDALVEITGGFRRGKPFGHDVDLLITSPGAEKEQEDQLLQKVTNLWKKQGLLLYGDLRESRFEDGKLPSRKIDALDHFAKCFLILKLYHHKVDKSKWEMPTGSNESEAKSWKAIRVDLVRCPYDRFAFALLGWTGSRMFERDLRRYATHEKKMMLDNHALYDLTKKIFLKAKSEEEIFAHLGLEYLEPSERNA

SEQ ID NO: 685 - DNA, 1587 bp, synthetic construct
  misc_feature 1..1587: note = Variant of terminal deoxynucleotidyltransferase
  source 1..1587: mol_type = other DNA
atgcaccatcatcatcatcatggcggtagcggcagccacggcattcgtaccatcgattcggacttcgggaagaaacgccagaagaagatggataaccacgatagttccatgatctatgaaatcaaatttcacgagtttgtgctgttcattctcgaagagaaaatgggtgcgacgcgtcgtacttttctgacagatttagcccgcaagaaagggttccgcgtcgagaatgaactgtcagacagcgttacccacatcgtggcagaaaataattcaggatctgacgtattggcttggctgaagactcacaagatggaggtcacgacgcaatttgaactgctggatattagctggcttatcgaaagcatgaaagttggtaaaccggtggacaccaaggggaaataccagttgatggaatcgggtgtggatagtgcgaacccagatccgacagagggtaccctcaacattctgcctcctactacgaagaccatttctcagtatgcgtgtcaacgccgcaccaccctgaacaaccataatcaacgttttacggacgcactggaaattcttgcggaaaattacgagttcaaacgcaacgatgatacttgtctgacctttatgcgtgctatttccgtgctgaaatgccttccgtttgaggtagttagcctgaaagacacggaaggattgccctggatcggtgatgaagtcaaagggattatggaagaaatcatcgaggtcggtgaatcgctggaagtgcaggccgtgctcaatgatgagcgctatcaaagcttcaaactgtttaagagtgtctttggagtgggggtgaagacagcagacaaatggtaccgtatgggtctgcgcacgctcgaggatgttcgttccagcaagaccctgaagttgaccccgatgcagaaagcgggtctgtgctattatgaagatcttgctgatggcgttacgaaagccgaagctgacgcgatttctctgctggttcaggatgcagtctggactttcgacccggatgcgctggtggagattacgggtggatttcgtcgtgggaaaccttttggtcacgacgttgatctgcttatcacatctccgggagctgagaaagaacaagaagaccagctcctgcagaaagtgaccaatctgtggaagaaacaagggttgttgctgtacggtgacctgcgtgaaagtcgctttgaagatgggaaactcccatcccgcaagatcgatgccctggaccattttgcgaaatgctttctgatcctcaaactttatcaccataaagtggacaaaagcaaatgggaaatgccgacgggttcgaacgaaagcgaggccaaaagttggaaagcaattcgcgtagatctggttcgttgtccctacgatcgttttgcgtttgcgttgttgggttggaccggaagccgcatgttcgaacgtgatctgcgccgctacgccacccacgagaagaagatgatgctggacaatcatgcgctgtatgacctgaccaagaaaatctttctcaaagctaaatcggaagaggaaattttcgcacatctggggcttgaatacctggaaccgtccgaacgtaacgca

SEQ ID NO: 686 - protein, 529 aa, synthetic construct
  REGION 1..529: note = Variant of terminal deoxynucleotidyltransferase
MHHHHHHGGSGSHGIRTIDSDFGKKRQKKMDNHDSSMIYEIKFHEFVLFILEEKMGATRRTFLTDLARKKGFRVENELSDSVTHIVAENNSGSDVLAWLKTHKMEVTTQFELLDISWLIESMKVGKPVDTKGKYQLMESGVDSANPDPTEGTLNILPPTTKTISQYACQRRTTLNNHNQRFTDALEILAENYEFKRNDDTCLTFMRAISVLKCLPFEVVSLKDTEGLPWIGDEVKGIMEEIIEVGESLEVQAVLNDERYQSFKLFKSVFGVGVKTADKWYRMGLRTLEDVRSSKTLKLTPMQKAGLCYYEDLADGVTKAEADAISLLVQDAVWTFDPDALVEITGGFRRGKPFGHDVDLLITSPGAEKEQEDQLLQKVTNLWKKQGLLLYGDLRESRFEDGKLPSRKIDALDHFAKCFLILKLYHHKVDKSKWEMPTGSNESEAKSWKAIRVDLVRCPYDRFAFALLGWTGSRMFERDLRRYATHEKKMMLDNHALYDLTKKIFLKAKSEEEIFAHLGLEYLEPSERNA

SEQ ID NO: 687 - DNA, 1587 bp, synthetic construct
  misc_feature 1..1587: note = Variant of terminal deoxynucleotidyltransferase
  source 1..1587: mol_type = other DNA
atgcaccatcatcatcatcatggcggtagcggcatgcacggcattcgtaccatcgattcggacttcgggaagaaacgccagaagaagatggataaccacagtagttccatgatctatgaaatcaaatttcacgagtttgtgctgttcattctcgaagagaaaatgggtgcgacgcgtcgtacttttctgacagatttagcccgcaagaaagggttccgcgtcgagaatgaactgtcagacagcgttacccacatcgtggcagaaaataattcaggatctgacgtattggcttggctgaagactcacaagatggaggtcacgacgcaatttgaactgctggatattagctggcttatcgaaagcatgaaagttggtaaaccggtggacaccaaggggaaataccagttgatggaatcgcgtgtcgatagtgcgaacccagatccgacagagggtaccgaaaacattctgcctcctactacgaagaccatttctcagtatgcgtgtcaacgccgcaccaccctgaacaaccataatcaacgttttacggacgcactggaaattcttgcggaaaattacgagttcaaacgcaacgatgatacttgtctgacctttatgcgtgctatttccgtgctgaaatgccttccgtttgaggtagttagcctgaaagacacggaaggattgccctggatcggtgatgaagtcaaagggattatggaagaaatcatcgaggtcggtgaatcgctggaagtgcaggccgtgctcaatgatgagcgctatcaaagcttcaaactgtttaagagtgtctttggagtgggggtgaagacagcagacaaatggtaccgtatgggtctgcgcacgctcgaggatgttcgttccagcaagaccctgaagttgaccccgatgcagaaagcgggtctgtgctattatgaagatcttgctgatggcgttacgaaagccgaagctgacgcgatttctctgctggttcaggatgcagtctggactttcgacccggatgcgctggtggagattacgggtggatttcgtcgtgggaaaccttttggtcacgacgttgatctgcttatcacatctccgggagctgagaaagaacaagaagaccagctcctgcagaaagtgaccaatctgtggaagaaacaagggttgttgctgtacggtgacctgcgtgaaagtcgctttgaagatgggaaactcccatcccgcaagatcgatgccctggaccattttgcgaaatgctttctgatcctcaaactttatcaccataaagtggacaaaagcaaatgggaaatgccgacgggttcgaacgaaagcgaggccaaaagttggaaagcaattcgcgtagatctggttcgttgtccctacgatcgttttgcgtttgcgttgttgggttggaccggaagccgcatgttcgaacgtgatctgcgccgctacgccacccacgagaagaagatgatgctggacaatcatgcgctgtatgacctgaccaagaaaatctttctcaaagctaaatcggaagaggaaattttcgcacatctggggcttgaatacctggaaccgtccgaacgtaacgca

SEQ ID NO: 688 - protein, 529 aa, synthetic construct
  REGION 1..529: note = Variant of terminal deoxynucleotidyltransferase
MHHHHHHGGSGMHGIRTIDSDFGKKRQKKMDNHSSSMIYEIKFHEFVLFILEEKMGATRRTFLTDLARKKGFRVENELSDSVTHIVAENNSGSDVLAWLKTHKMEVTTQFELLDISWLIESMKVGKPVDTKGKYQLMESRVDSANPDPTEGTENILPPTTKTISQYACQRRTTLNNHNQRFTDALEILAENYEFKRNDDTCLTFMRAISVLKCLPFEVVSLKDTEGLPWIGDEVKGIMEEIIEVGESLEVQAVLNDERYQSFKLFKSVFGVGVKTADKWYRMGLRTLEDVRSSKTLKLTPMQKAGLCYYEDLADGVTKAEADAISLLVQDAVWTFDPDALVEITGGFRRGKPFGHDVDLLITSPGAEKEQEDQLLQKVTNLWKKQGLLLYGDLRESRFEDGKLPSRKIDALDHFAKCFLILKLYHHKVDKSKWEMPTGSNESEAKSWKAIRVDLVRCPYDRFAFALLGWTGSRMFERDLRRYATHEKKMMLDNHALYDLTKKIFLKAKSEEEIFAHLGLEYLEPSERNA

SEQ ID NO: 689 - DNA, 1587 bp, synthetic construct
  misc_feature 1..1587: note = Variant of terminal deoxynucleotidyltransferase
  source 1..1587: mol_type = other DNA
atgcaccatcatcatcatcatggcggtagcggcatgcaccgtattcgtaccatcgattcggacttcgggaagaaacgccagaagaagatggataaccacgatagttccgccatctatgaaatcaaatttcacgagtttgtgctgttcattctcgaagagaaaatgggtgcgacgcgtcgtacttttctgacagatttagcccgcaagaaagggttccgcgtcgagaatgaactgtcagacagcgttacccacatcgtggcagaaaataattcaggatctgacgtattggcttggctgaagactcacaagatggaggtcacgacgcaatttgaactgctggatattagctggcttatcgaaagcatgaaagttggtaaaccggtggacaccaaggggaaataccagttgatggaatcgcgtgtcgatagtgcgaacccagatccgacagccggtaccctcaacattctgcctcctactacgaagaccatttctcagtatgcgtgtcaacgccgcaccaccctgaacaaccataatcaacgttttacggacgcactggaaattcttgcggaaaattacgagttcaaacgcaacgatgatacttgtctgacctttatgcgtgctatttccgtgctgaaatgccttccgtttgaggtagttagcctgaaagacacggaaggattgccctggatcggtgatgaagtcaaagggattatggaagaaatcatcgaggtcggtgaatcgctggaagtgcaggccgtgctcaatgatgagcgctatcaaagcttcaaactgtttaagagtgtctttggagtgggggtgaagacagcagacaaatggtaccgtatgggtctgcgcacgctcgaggatgttcgttccagcaagaccctgaagttgaccccgatgcagaaagcgggtctgtgctattatgaagatcttgctgatggcgttacgaaagccgaagctgacgcgatttctctgctggttcaggatgcagtctggactttcgacccggatgcgctggtggagattacgggtggatttcgtcgtgggaaaccttttggtcacgacgttgatctgcttatcacatctccgggagctgagaaagaacaagaagaccagctcctgcagaaagtgaccaatctgtggaagaaacaagggttgttgctgtacggtgacctgcgtgaaagtcgctttgaagatgggaaactcccatcccgcaagatcgatgccctggaccattttgcgaaatgctttctgatcctcaaactttatcaccataaagtggacaaaagcaaatgggaaatgccgacgggttcgaacgaaagcgaggccaaaagttggaaagcaattcgcgtagatctggttcgttgtccctacgatcgttttgcgtttgcgttgttgggttggaccggaagccgcatgttcgaacgtgatctgcgccgctacgccacccacgagaagaagatgatgctggacaatcatgcgctgtatgacctgaccaagaaaatctttctcaaagctaaatcggaagaggaaattttcgcacatctggggcttgaatacctggaaccgtccgaacgtaacgca

SEQ ID NO: 690 - protein, 529 aa, synthetic construct
  REGION 1..529: note = Variant of terminal deoxynucleotidyltransferase
MHHHHHHGGSGMHRIRTIDSDFGKKRQKKMDNHDSSAIYEIKFHEFVLFILEEKMGATRRTFLTDLARKKGFRVENELSDSVTHIVAENNSGSDVLAWLKTHKMEVTTQFELLDISWLIESMKVGKPVDTKGKYQLMESRVDSANPDPTAGTLNILPPTTKTISQYACQRRTTLNNHNQRFTDALEILAENYEFKRNDDTCLTFMRAISVLKCLPFEVVSLKDTEGLPWIGDEVKGIMEEIIEVGESLEVQAVLNDERYQSFKLFKSVFGVGVKTADKWYRMGLRTLEDVRSSKTLKLTPMQKAGLCYYEDLADGVTKAEADAISLLVQDAVWTFDPDALVEITGGFRRGKPFGHDVDLLITSPGAEKEQEDQLLQKVTNLWKKQGLLLYGDLRESRFEDGKLPSRKIDALDHFAKCFLILKLYHHKVDKSKWEMPTGSNESEAKSWKAIRVDLVRCPYDRFAFALLGWTGSRMFERDLRRYATHEKKMMLDNHALYDLTKKIFLKAKSEEEIFAHLGLEYLEPSERNA

SEQ ID NO: 691 - DNA, 1587 bp, synthetic construct
  misc_feature 1..1587: note = Variant of terminal deoxynucleotidyltransferase
  source 1..1587: mol_type = other DNA
atgcaccatcatcatcatcatggcggtagcggcatgcaccgtattcgtaccatcgatagcgacttcgggaagaaacgccagaagaagggtgataaccacattagttccatgatctatgaaatcaaatttcacgagtttgtgctgttcattctcgaagagaaaatgggtgcgacgcgtcgtacttttctgacagatttagcccgcaagaaagggttccgcgtcgagaatgaactgtcagacagcgttacccacatcgtggcagaaaataattcaggatctgacgtattggcttggctgaagactcacaagccggagtcgacgacgcaatttgaactgctggatattagctggcttatcgaaagcatgaaagttggtaaaccggtggacaccaaggggaaataccagttgatggaatcgcgtgtcgatagtgcgaacccagatccgacagccggtaccctcaacgaagaacctcctactacgaagaccatttctcagtatgcgtgtcaacgccgcaccaccctgaacaaccataatcaacgttttacggacgcactggaaattcttgcggaaaattacgagttcaaacgcaacgatgatacttgtctgacctttatgcgtgctatttccgtgctgaaatgccttccgtttgaggtagttagcctgaaagacacggaaggattgccctggatcggtgatgaagtcaaagggattatggaagaaatcatcgaggtcggtgaatcgctggaagtgcaggccgtgctcaatgatgagcgctatcaaagcttcaaactgtttaagagtgtctttggagtgggggtgaagacagcagacaaatggtaccgtatgggtctgcgcacgctcgaggatgttcgttccagcaagaccctgaagttgaccccgatgcagaaagcgggtctgtgctattatgaagatcttgctgatggcgttacgaaagccgaagctgacgcgatttctctgctggttcaggatgcagtctggactttcgacccggatgcgctggtggagattacgggtggatttcgtcgtgggaaaccttttggtcacgacgttgatctgcttatcacatctccgggagctgagaaagaacaagaagaccagctcctgcagaaagtgaccaatctgtggaagaaacaagggttgttgctgtacggtgacctgcgtgaaagtcgctttgaagatgggaaactcccatcccgcaagatcgatgccctggaccattttgcgaaatgctttctgatcctcaaactttatcaccataaagtggacaaaagcaaatgggaaatgccgacgggttcgaacgaaagcgaggccaaaagttggaaagcaattcgcgtagatctggttcgttgtccctacgatcgttttgcgtttgcgttgttgggttggaccggaagccgcatgttcgaacgtgatctgcgccgctacgccacccacgagaagaagatgatgctggacaatcatgcgctgtatgacctgaccaagaaaatctttctcaaagctaaatcggaagaggaaattttcgcacatctggggcttgaatacctggaaccgtccgaacgtaacgca

SEQ ID NO: 692 - protein, 529 aa, synthetic construct
  REGION 1..529: note = Variant of terminal deoxynucleotidyltransferase
MHHHHHHGGSGMHRIRTIDSDFGKKRQKKGDNHISSMIYEIKFHEFVLFILEEKMGATRRTFLTDLARKKGFRVENELSDSVTHIVAENNSGSDVLAWLKTHKPESTTQFELLDISWLIESMKVGKPVDTKGKYQLMESRVDSANPDPTAGTLNEEPPTTKTISQYACQRRTTLNNHNQRFTDALEILAENYEFKRNDDTCLTFMRAISVLKCLPFEVVSLKDTEGLPWIGDEVKGIMEEIIEVGESLEVQAVLNDERYQSFKLFKSVFGVGVKTADKWYRMGLRTLEDVRSSKTLKLTPMQKAGLCYYEDLADGVTKAEADAISLLVQDAVWTFDPDALVEITGGFRRGKPFGHDVDLLITSPGAEKEQEDQLLQKVTNLWKKQGLLLYGDLRESRFEDGKLPSRKIDALDHFAKCFLILKLYHHKVDKSKWEMPTGSNESEAKSWKAIRVDLVRCPYDRFAFALLGWTGSRMFERDLRRYATHEKKMMLDNHALYDLTKKIFLKAKSEEEIFAHLGLEYLEPSERNA

SEQ ID NO: 693 - DNA, 1587 bp, synthetic construct
  misc_feature 1..1587: note = Variant of terminal deoxynucleotidyltransferase
  source 1..1587: mol_type = other DNA
atgcaccatcatcatcatcatggcggtagcggcagccacggcattcgtaccatcgattcggacttcgggaagaaacgccagaagaagatggataaccacgatagttccgccatctatgaaatcaaatttcacgagtttgtgctgttcattctcgaagagaaaatgggtgcgacgcgtcgtacttttctgacagatttagcccgcaagaaagggttccgcgtcgagaatgaactgtcagacagcgttacccacatcgtggcagaaaataattcaggatctgacgtattggcttggctgaagactcacaagatggaggtcacgacgcaatttgaactgctggatattagctggcttatcgaaagcatgaaagttggtaaaccggtggacaccaaggggaaataccagttgatggaatcgcgtgagagcagtgcgaacccagatccgacagccggtaccctcaacattctgcctcctactacgaagaccatttctcagtatgcgtgtcaacgccgcaccaccctgaacaaccataatcaacgttttacggacgcactggaaattcttgcggaaaattacgagttcaaacgcaacgatgatacttgtctgacctttatgcgtgctatttccgtgctgaaatgccttccgtttgaggtagttagcctgaaagacacggaaggattgccctggatcggtgatgaagtcaaagggattatggaagaaatcatcgaggtcggtgaatcgctggaagtgcaggccgtgctcaatgatgagcgctatcaaagcttcaaactgtttaagagtgtctttggagtgggggtgaagacagcagacaaatggtaccgtatgggtctgcgcacgctcgaggatgttcgttccagcaagaccctgaagttgaccccgatgcagaaagcgggtctgtgctattatgaagatcttgctgatggcgttacgaaagccgaagctgacgcgatttctctgctggttcaggatgcagtctggactttcgacccggatgcgctggtggagattacgggtggatttcgtcgtgggaaaccttttggtcacgacgttgatctgcttatcacatctccgggagctgagaaagaacaagaagaccagctcctgcagaaagtgaccaatctgtggaagaaacaagggttgttgctgtacggtgacctgcgtgaaagtcgctttgaagatgggaaactcccatcccgcaagatcgatgccctggaccattttgcgaaatgctttctgatcctcaaactttatcaccataaagtggacaaaagcaaatgggaaatgccgacgggttcgaacgaaagcgaggccaaaagttggaaagcaattcgcgtagatctggttcgttgtccctacgatcgttttgcgtttgcgttgttgggttggaccggaagccgcatgttcgaacgtgatctgcgccgctacgccacccacgagaagaagatgatgctggacaatcatgcgctgtatgacctgaccaagaaaatctttctcaaagctaaatcggaagaggaaattttcgcacatctggggcttgaatacctggaaccgtccgaacgtaacgca

SEQ ID NO: 694 - protein, 529 aa, synthetic construct
  REGION 1..529: note = Variant of terminal deoxynucleotidyltransferase
MHHHHHHGGSGSHGIRTIDSDFGKKRQKKMDNHDSSAIYEIKFHEFVLFILEEKMGATRRTFLTDLARKKGFRVENELSDSVTHIVAENNSGSDVLAWLKTHKMEVTTQFELLDISWLIESMKVGKPVDTKGKYQLMESRESSANPDPTAGTLNILPPTTKTISQYACQRRTTLNNHNQRFTDALEILAENYEFKRNDDTCLTFMRAISVLKCLPFEVVSLKDTEGLPWIGDEVKGIMEEIIEVGESLEVQAVLNDERYQSFKLFKSVFGVGVKTADKWYRMGLRTLEDVRSSKTLKLTPMQKAGLCYYEDLADGVTKAEADAISLLVQDAVWTFDPDALVEITGGFRRGKPFGHDVDLLITSPGAEKEQEDQLLQKVTNLWKKQGLLLYGDLRESRFEDGKLPSRKIDALDHFAKCFLILKLYHHKVDKSKWEMPTGSNESEAKSWKAIRVDLVRCPYDRFAFALLGWTGSRMFERDLRRYATHEKKMMLDNHALYDLTKKIFLKAKSEEEIFAHLGLEYLEPSERNA

SEQ ID NO: 695 - DNA, 1587 bp, synthetic construct
  misc_feature 1..1587: note = Variant of terminal deoxynucleotidyltransferase
  source 1..1587: mol_type = other DNA
atgcaccatcatcatcatcatggcggtagcggcatgcacggcattcgtaccatcgattcggacttcgggaagaaacgccagaagaagatgggtaaccacgatagttccgccatctatgaaatcaaatttcacgagtttgtgctgttcattctcgaagagaaaatgggtgcgacgcgtcgtacttttctgacagatttagcccgcaagaaagggttccgcgtcgagaatgaactgtcagacagcgttacccacatcgtggcagaaaataattcaggatctgacgtattggcttggctgaagactcacaagatggaggtcacgacgcaatttgaactgctggatattagctggcttatcgaaagcatgaaagttggtaaaccggtggacaccaaggggaaataccagttgatggaatcgggtgaggatagtgcggagccagatccgacagccggtaccctcaacattctgcctcctactacggaggagatttctcagtatgcgtgtcaacgccgcaccaccctgaacaaccataatcaacgttttacggacgcactggaaattcttgcggaaaattacgagttcaaacgcaacgatgatacttgtctgacctttatgcgtgctatttccgtgctgaaatgccttccgtttgaggtagttagcctgaaagacacggaaggattgccctggatcggtgatgaagtcaaagggattatggaagaaatcatcgaggtcggtgaatcgctggaagtgcaggccgtgctcaatgatgagcgctatcaaagcttcaaactgtttaagagtgtctttggagtgggggtgaagacagcagacaaatggtaccgtatgggtctgcgcacgctcgaggatgttcgttccagcaagaccctgaagttgaccccgatgcagaaagcgggtctgtgctattatgaagatcttgctgatggcgttacgaaagccgaagctgacgcgatttctctgctggttcaggatgcagtctggactttcgacccggatgcgctggtggagattacgggtggatttcgtcgtgggaaaccttttggtcacgacgttgatctgcttatcacatctccgggagctgagaaagaacaagaagaccagctcctgcagaaagtgaccaatctgtggaagaaacaagggttgttgctgtacggtgacctgcgtgaaagtcgctttgaagatgggaaactcccatcccgcaagatcgatgccctggaccattttgcgaaatgctttctgatcctcaaactttatcaccataaagtggacaaaagcaaatgggaaatgccgacgggttcgaacgaaagcgaggccaaaagttggaaagcaattcgcgtagatctggttcgttgtccctacgatcgttttgcgtttgcgttgttgggttggaccggaagccgcatgttcgaacgtgatctgcgccgctacgccacccacgagaagaagatgatgctggacaatcatgcgctgtatgacctgaccaagaaaatctttctcaaagctaaatcggaagaggaaattttcgcacatctggggcttgaatacctggaaccgtccgaacgtaacgca

SEQ ID NO: 696 - protein, 529 aa, synthetic construct
  REGION 1..529: note = Variant of terminal deoxynucleotidyltransferase
MHHHHHHGGSGMHGIRTIDSDFGKKRQKKMGNHDSSAIYEIKFHEFVLFILEEKMGATRRTFLTDLARKKGFRVENELSDSVTHIVAENNSGSDVLAWLKTHKMEVTTQFELLDISWLIESMKVGKPVDTKGKYQLMESGEDSAEPDPTAGTLNILPPTTEEISQYACQRRTTLNNHNQRFTDALEILAENYEFKRNDDTCLTFMRAISVLKCLPFEVVSLKDTEGLPWIGDEVKGIMEEIIEVGESLEVQAVLNDERYQSFKLFKSVFGVGVKTADKWYRMGLRTLEDVRSSKTLKLTPMQKAGLCYYEDLADGVTKAEADAISLLVQDAVWTFDPDALVEITGGFRRGKPFGHDVDLLITSPGAEKEQEDQLLQKVTNLWKKQGLLLYGDLRESRFEDGKLPSRKIDALDHFAKCFLILKLYHHKVDKSKWEMPTGSNESEAKSWKAIRVDLVRCPYDRFAFALLGWTGSRMFERDLRRYATHEKKMMLDNHALYDLTKKIFLKAKSEEEIFAHLGLEYLEPSERNA

SEQ ID NO: 697 - DNA, 1587 bp, synthetic construct
  misc_feature 1..1587: note = Variant of terminal deoxynucleotidyltransferase
  source 1..1587: mol_type = other DNA
atgcaccatcatcatcatcatggcggtagcggcatgcaccgcattcgtaccatcgattcggacttcgggaagaaacgccagaagaagatggataaccacattagttccatgatctatgaaatcaaatttcacgagtttgtgctgttcattctcgaagagaaaatgggtgcgacgcgtcgtacttttctgacagatttagcccgcaagaaagggttccgcgtcgagaatgaactgtcagacagcgttacccacatcgtggcagaaaataattcaggatctgacgtattggcttggctgaagactcacaagatggagaagaccaagcaatttgaactgctggatattagctggcttatcgaaagcatgaaagttggtaaaccggtggacaccaaggggaaataccagttgatggaatcgggtgaggatagtgcgaacccagatccgacagcgggtcgtgaaaacattctgcctcctactacgaagaccatttctcagtatgcgtgtcaacgccgcaccaccctgaacaaccataatcaacgttttacggacgcactggaaattcttgcggaaaattacgagttcaaacgcaacgatgatacttgtctgacctttatgcgtgctatttccgtgctgaaatgccttccgtttgaggtagttagcctgaaagacacggaaggattgccctggatcggtgatgaagtcaaagggattatggaagaaatcatcgaggtcggtgaatcgctggaagtgcaggccgtgctcaatgatgagcgctatcaaagcttcaaactgtttaagagtgtctttggagtgggggtgaagacagcagacaaatggtaccgtatgggtctgcgcacgctcgaggatgttcgttccagcaagaccctgaagttgaccccgatgcagaaagcgggtctgtgctattatgaagatcttgctgatggcgttacgaaagccgaagctgacgcgatttctctgctggttcaggatgcagtctggactttcgacccggatgcgctggtggagattacgggtggatttcgtcgtgggaaaccttttggtcacgacgttgatctgcttatcacatctccgggagctgagaaagaacaagaagaccagctcctgcagaaagtgaccaatctgtggaagaaacaagggttgttgctgtacggtgacctgcgtgaaagtcgctttgaagatgggaaactcccatcccgcaagatcgatgccctggaccattttgcgaaatgctttctgatcctcaaactttatcaccataaagtggacaaaagcaaatgggaaatgccgacgggttcgaacgaaagcgaggccaaaagttggaaagcaattcgcgtagatctggttcgttgtccctacgatcgttttgcgtttgcgttgttgggttggaccggaagccgcatgttcgaacgtgatctgcgccgctacgccacccacgagaagaagatgatgctggacaatcatgcgctgtatgacctgaccaagaaaatctttctcaaagctaaatcggaagaggaaattttcgcacatctggggcttgaatacctggaaccgtccgaacgtaacgca

SEQ ID NO: 698 - protein, 529 aa, synthetic construct
  REGION 1..529: note = Variant of terminal deoxynucleotidyltransferase
MHHHHHHGGSGMHRIRTIDSDFGKKRQKKMDNHISSMIYEIKFHEFVLFILEEKMGATRRTFLTDLARKKGFRVENELSDSVTHIVAENNSGSDVLAWLKTHKMEKTKQFELLDISWLIESMKVGKPVDTKGKYQLMESGEDSANPDPTAGRENILPPTTKTISQYACQRRTTLNNHNQRFTDALEILAENYEFKRNDDTCLTFMRAISVLKCLPFEVVSLKDTEGLPWIGDEVKGIMEEIIEVGESLEVQAVLNDERYQSFKLFKSVFGVGVKTADKWYRMGLRTLEDVRSSKTLKLTPMQKAGLCYYEDLADGVTKAEADAISLLVQDAVWTFDPDALVEITGGFRRGKPFGHDVDLLITSPGAEKEQEDQLLQKVTNLWKKQGLLLYGDLRESRFEDGKLPSRKIDALDHFAKCFLILKLYHHKVDKSKWEMPTGSNESEAKSWKAIRVDLVRCPYDRFAFALLGWTGSRMFERDLRRYATHEKKMMLDNHALYDLTKKIFLKAKSEEEIFAHLGLEYLEPSERNA

SEQ ID NO: 699 - DNA, 1587 bp, synthetic construct
  misc_feature 1..1587: note = Variant of terminal deoxynucleotidyltransferase
  source 1..1587: mol_type = other DNA
atgcaccatcatcatcatcatggcggtagcggcatgcaccgtattcgtaccatcgattcggacttcgggaagaaacgccagaagaagggtgataaccacattagttccatgatctatgaaatcaaatttcacgagtttgtgctgttcattctcgaagagaaaatgggtgcgacgcgtcgtacttttctgacagatttagcccgcaagaaagggttccgcgtcgagaatgaactgtcagacagcgttacccacatcgtggcagaaaataattcaggatctgacgtattggcttggctgaaggagcacaagccggagtcgacgacgcaatttgaactgctggatattagctggcttatcgaaagcatgaaagttggtaaaccggtggacaccaaggggaaataccagttgatggaatcgcgtgtcgatagtgcgaacccagatccgacagccggtaccctcaacgaagaacctcctactacgaagaccatttctcagtatgcgtgtcaacgccgcaccaccctgaacaaccataatcaacgttttacggacgcactggaaattcttgcggaaaattacgagttcaaacgcaacgatgatacttgtctgacctttatgcgtgctatttccgtgctgaaatgccttccgtttgaggtagttagcctgaaagacacggaaggattgccctggatcggtgatgaagtcaaagggattatggaagaaatcatcgaggtcggtgaatcgctggaagtgcaggccgtgctcaatgatgagcgctatcaaagcttcaaactgtttaagagtgtctttggagtgggggtgaagacagcagacaaatggtaccgtatgggtctgcgcacgctcgaggatgttcgttccagcaagaccctgaagttgaccccgatgcagaaagcgggtctgtgctattatgaagatcttgctgatggcgttacgaaagccgaagctgacgcgatttctctgctggttcaggatgcagtctggactttcgacccggatgcgctggtggagattacgggtggatttcgtcgtgggaaaccttttggtcacgacgttgatctgcttatcacatctccgggagctgagaaagaacaagaagaccagctcctgcagaaagtgaccaatctgtggaagaaacaagggttgttgctgtacggtgacctgcgtgaaagtcgctttgaagatgggaaactcccatcccgcaagatcgatgccctggaccattttgcgaaatgctttctgatcctcaaactttatcaccataaagtggacaaaagcaaatgggaaatgccgacgggttcgaacgaaagcgaggccaaaagttggaaagcaattcgcgtagatctggttcgttgtccctacgatcgttttgcgtttgcgttgttgggttggaccggaagccgcatgttcgaacgtgatctgcgccgctacgccacccacgagaagaagatgatgctggacaatcatgcgctgtatgacctgaccaagaaaatctttctcaaagctaaatcggaagaggaaattttcgcacatctggggcttgaatacctggaaccgtccgaacgtaacgca

SEQ ID NO: 700 - protein, 529 aa, synthetic construct
  REGION 1..529: note = Variant of terminal deoxynucleotidyltransferase
MHHHHHHGGSGMHRIRTIDSDFGKKRQKKGDNHISSMIYEIKFHEFVLFILEEKMGATRRTFLTDLARKKGFRVENELSDSVTHIVAENNSGSDVLAWLKEHKPESTTQFELLDISWLIESMKVGKPVDTKGKYQLMESRVDSANPDPTAGTLNEEPPTTKTISQYACQRRTTLNNHNQRFTDALEILAENYEFKRNDDTCLTFMRAISVLKCLPFEVVSLKDTEGLPWIGDEVKGIMEEIIEVGESLEVQAVLNDERYQSFKLFKSVFGVGVKTADKWYRMGLRTLEDVRSSKTLKLTPMQKAGLCYYEDLADGVTKAEADAISLLVQDAVWTFDPDALVEITGGFRRGKPFGHDVDLLITSPGAEKEQEDQLLQKVTNLWKKQGLLLYGDLRESRFEDGKLPSRKIDALDHFAKCFLILKLYHHKVDKSKWEMPTGSNESEAKSWKAIRVDLVRCPYDRFAFALLGWTGSRMFERDLRRYATHEKKMMLDNHALYDLTKKIFLKAKSEEEIFAHLGLEYLEPSERNA

SEQ ID NO: 701 - DNA, 1587 bp, synthetic construct
  misc_feature 1..1587: note = Variant of terminal deoxynucleotidyltransferase
  source 1..1587: mol_type = other DNA
atgcaccatcatcatcatcatggcggtagcggcatgcaccgtattcgtaccatcgatagcgaattcgggaagaaacgccagaagaagatggataaccacattagttccatgatctatgaaatcaaatttcacgagtttgtgctgttcattctcgaagagaaaatgggtgcgacgcgtcgtacttttctgacagatttagcccgcaagaaagggttccgcgtcgagaatgaactgtcagacagcgttacccacatcgtggcagaaaataattcaggatctgacgtattggcttggctgaaggagcacaagccggagtcgacgacgcaatttgaactgctggatattagctggcttatcgaaagcatgaaagttggtaaaccggtggacaccaaggggaaataccagttgatggaatcgcgtgtcgatagtgcgaacccagatccgacagccggtaccctcaacatcgaacctcctactacgaagaccatttctcagtatgcgtgtcaacgccgcaccaccctgaacaaccataatcaacgttttacggacgcactggaaattcttgcggaaaattacgagttcaaacgcaacgatgatacttgtctgacctttatgcgtgctatttccgtgctgaaatgccttccgtttgaggtagttagcctgaaagacacggaaggattgccctggatcggtgatgaagtcaaagggattatggaagaaatcatcgaggtcggtgaatcgctggaagtgcaggccgtgctcaatgatgagcgctatcaaagcttcaaactgtttaagagtgtctttggagtgggggtgaagacagcagacaaatggtaccgtatgggtctgcgcacgctcgaggatgttcgttccagcaagaccctgaagttgaccccgatgcagaaagcgggtctgtgctattatgaagatcttgctgatggcgttacgaaagccgaagctgacgcgatttctctgctggttcaggatgcagtctggactttcgacccggatgcgctggtggagattacgggtggatttcgtcgtgggaaaccttttggtcacgacgttgatctgcttatcacatctccgggagctgagaaagaacaagaagaccagctcctgcagaaagtgaccaatctgtggaagaaacaagggttgttgctgtacggtgacctgcgtgaaagtcgctttgaagatgggaaactcccatcccgcaagatcgatgccctggaccattttgcgaaatgctttctgatcctcaaactttatcaccataaagtggacaaaagcaaatgggaaatgccgacgggttcgaacgaaagcgaggccaaaagttggaaagcaattcgcgtagatctggttcgttgtccctacgatcgttttgcgtttgcgttgttgggttggaccggaagccgcatgttcgaacgtgatctgcgccgctacgccacccacgagaagaagatgatgctggacaatcatgcgctgtatgacctgaccaagaaaatctttctcaaagctaaatcggaagaggaaattttcgcacatctggggcttgaatacctggaaccgtccgaacgtaacgca

SEQ ID NO: 702 - protein, 529 aa, synthetic construct
  REGION 1..529: note = Variant of terminal deoxynucleotidyltransferase
MHHHHHHGGSGMHRIRTIDSEFGKKRQKKMDNHISSMIYEIKFHEFVLFILEEKMGATRRTFLTDLARKKGFRVENELSDSVTHIVAENNSGSDVLAWLKEHKPESTTQFELLDISWLIESMKVGKPVDTKGKYQLMESRVDSANPDPTAGTLNIEPPTTKTISQYACQRRTTLNNHNQRFTDALEILAENYEFKRNDDTCLTFMRAISVLKCLPFEVVSLKDTEGLPWIGDEVKGIMEEIIEVGESLEVQAVLNDERYQSFKLFKSVFGVGVKTADKWYRMGLRTLEDVRSSKTLKLTPMQKAGLCYYEDLADGVTKAEADAISLLVQDAVWTFDPDALVEITGGFRRGKPFGHDVDLLITSPGAEKEQEDQLLQKVTNLWKKQGLLLYGDLRESRFEDGKLPSRKIDALDHFAKCFLILKLYHHKVDKSKWEMPTGSNESEAKSWKAIRVDLVRCPYDRFAFALLGWTGSRMFERDLRRYATHEKKMMLDNHALYDLTKKIFLKAKSEEEIFAHLGLEYLEPSERNA

SEQ ID NO: 703 - DNA, 1587 bp, synthetic construct
  misc_feature 1..1587: note = Variant of terminal deoxynucleotidyltransferase
  source 1..1587: mol_type = other DNA
atgcaccatcatcatcatcatggcggtagcggcatgcaccgtattcgtaccatcgatagcgaattcgggaagaaacgccagaagaagatggataacaagattagttccatgatctatgaaatcaaatttcacgagtttgtgctgttcattctcgaagagaaaatgggtgcggcgcgtcgtacttttctgacagatttagcccgcaagaaagggttccgcgtcgagaatgaactgtcagacagcgttacccacatcgtggcagaaaataattcaggatctgacgtattggcttggctgaaggagcacaagatggagaaaacgacgcaatttgaactgctggatattagctggcttatcgaaagcatgaaagttggtaaaccggtggacaccaaggggaaataccagttgatggaatcgcgtgtcgatagtgcgaacccagatccgacagccggtaccctcaacatcctgcctcctactacgaagaccatttctcagtatgcgtgtcaacgccgcaccaccctgaacaaccataatcaacgttttacggacgcactggaaattcttgcggaaaattacgagttcaaacgcaacgatgatacttgtctgacctttatgcgtgctatttccgtgctgaaatgccttccgtttgaggtagttagcctgaaagacacggaaggattgccctggatcggtgatgaagtcaaagggattatggaagaaatcatcgaggtcggtgaatcgctggaagtgcaggccgtgctcaatgatgagcgctatcaaagcttcaaactgtttaagagtgtctttggagtgggggtgaagacagcagacaaatggtaccgtatgggtctgcgcacgctcgaggatgttcgttccagcaagaccctgaagttgaccccgatgcagaaagcgggtctgtgctattatgaagatcttgctgatggcgttacgaaagccgaagctgacgcgatttctctgctggttcaggatgcagtctggactttcgacccggatgcgctggtggagattacgggtggatttcgtcgtgggaaaccttttggtcacgacgttgatctgcttatcacatctccgggagctgagaaagaacaagaagaccagctcctgcagaaagtgaccaatctgtggaagaaacaagggttgttgctgtacggtgacctgcgtgaaagtcgctttgaagatgggaaactcccatcccgcaagatcgatgccctggaccattttgcgaaatgctttctgatcctcaaactttatcaccataaagtggacaaaagcaaatgggaaatgccgacgggttcgaacgaaagcgaggccaaaagttggaaagcaattcgcgtagatctggttcgttgtccctacgatcgttttgcgtttgcgttgttgggttggaccggaagccgcatgttcgaacgtgatctgcgccgctacgccacccacgagaagaagatgatgctggacaatcatgcgctgtatgacctgaccaagaaaatctttctcaaagctaaatcggaagaggaaattttcgcacatctggggcttgaatacctggaaccgtccgaacgtaacgca

SEQ ID NO: 704 - protein, 529 aa, synthetic construct
  REGION 1..529: note = Variant of terminal deoxynucleotidyltransferase
MHHHHHHGGSGMHRIRTIDSEFGKKRQKKMDNKISSMIYEIKFHEFVLFILEEKMGAARRTFLTDLARKKGFRVENELSDSVTHIVAENNSGSDVLAWLKEHKMEKTTQFELLDISWLIESMKVGKPVDTKGKYQLMESRVDSANPDPTAGTLNILPPTTKTISQYACQRRTTLNNHNQRFTDALEILAENYEFKRNDDTCLTFMRAISVLKCLPFEVVSLKDTEGLPWIGDEVKGIMEEIIEVGESLEVQAVLNDERYQSFKLFKSVFGVGVKTADKWYRMGLRTLEDVRSSKTLKLTPMQKAGLCYYEDLADGVTKAEADAISLLVQDAVWTFDPDALVEITGGFRRGKPFGHDVDLLITSPGAEKEQEDQLLQKVTNLWKKQGLLLYGDLRESRFEDGKLPSRKIDALDHFAKCFLILKLYHHKVDKSKWEMPTGSNESEAKSWKAIRVDLVRCPYDRFAFALLGWTGSRMFERDLRRYATHEKKMMLDNHALYDLTKKIFLKAKSEEEIFAHLGLEYLEPSERNA

SEQ ID NO: 705 - DNA, 1587 bp, synthetic construct
  misc_feature 1..1587: note = Variant of terminal deoxynucleotidyltransferase
  source 1..1587: mol_type = other DNA
atgcaccatcatcatcatcatggcggtagcggcatgcacggcattcgtaccatcgattcggacttcgggaagaaacgccagaagaagatggataaccacagtagttccgccatctatgaaatcaaatttcacgagtttgtgctgttcattctcgaagagaaaatgggtgcgacgcgtcgtacttttctgacagatttagcccgcaagaaagggttccgcgtcgagaatgaactgtcagacagcgttacccacatcgtggcagaaaataattcaggatctgacgtattggcttggctgaagactcacaagatggaggtcacgacgcaatttgaactgctggatattagctggcttatcgaaagcatgaaagttggtaaaccggtggacaccaaggggaaataccagttgatggaatcgcgtgtcgatagtgcgaacccagatccgacagccggtaccctcaacattctgcctcctactacgaagaccatttctcagtatgcgtgtcaacgccgcaccaccctgaacaaccataatcaacgttttacggacgcactggaaattcttgcggaaaattacgagttcaaacgcaacgatgatacttgtctgacctttatgcgtgctatttccgtgctgaaatgccttccgtttgaggtagttagcctgaaagacacggaaggattgccctggatcggtgatgaagtcaaagggattatggaagaaatcatcgaggtcggtgaatcgctggaagtgcaggccgtgctcaatgatgagcgctatcaaagcttcaaactgtttaagagtgtctttggagtgggggtgaagacagcagacaaatggtaccgtatgggtctgcgcacgctcgaggatgttcgttccagcaagaccctgaagttgaccccgatgcagaaagcgggtctgtgctattatgaagatcttgctgatggcgttacgaaagccgaagctgacgcgatttctctgctggttcaggatgcagtctggactttcgacccggatgcgctggtggagattacgggtggatttcgtcgtgggaaaccttttggtcacgacgttgatctgcttatcacatctccgggagctgagaaagaacaagaagaccagctcctgcagaaagtgaccaatctgtggaagaaacaagggttgttgctgtacggtgacctgcgtgaaagtcgctttgaagatgggaaactcccatcccgcaagatcgatgccctggaccattttgcgaaatgctttctgatcctcaaactttatcaccataaagtggacaaaagcaaatgggaaatgccgacgggttcgaacgaaagcgaggccaaaagttggaaagcaattcgcgtagatctggttcgttgtccctacgatcgttttgcgtttgcgttgttgggttggaccggaagccgcatgttcgaacgtgatctgcgccgctacgccacccacgagaagaagatgatgctggacaatcatgcgctgtatgacctgaccaagaaaatctttctcaaagctaaatcggaagaggaaattttcgcacatctggggcttgaatacctggaaccgtccgaacgtaacgca

SEQ ID NO: 706 - protein, 529 aa, synthetic construct
  REGION 1..529: note = Variant of terminal deoxynucleotidyltransferase
MHHHHHHGGSGMHGIRTIDSDFGKKRQKKMDNHSSSAIYEIKFHEFVLFILEEKMGATRRTFLTDLARKKGFRVENELSDSVTHIVAENNSGSDVLAWLKTHKMEVTTQFELLDISWLIESMKVGKPVDTKGKYQLMESRVDSANPDPTAGTLNILPPTTKTISQYACQRRTTLNNHNQRFTDALEILAENYEFKRNDDTCLTFMRAISVLKCLPFEVVSLKDTEGLPWIGDEVKGIMEEIIEVGESLEVQAVLNDERYQSFKLFKSVFGVGVKTADKWYRMGLRTLEDVRSSKTLKLTPMQKAGLCYYEDLADGVTKAEADAISLLVQDAVWTFDPDALVEITGGFRRGKPFGHDVDLLITSPGAEKEQEDQLLQKVTNLWKKQGLLLYGDLRESRFEDGKLPSRKIDALDHFAKCFLILKLYHHKVDKSKWEMPTGSNESEAKSWKAIRVDLVRCPYDRFAFALLGWTGSRMFERDLRRYATHEKKMMLDNHALYDLTKKIFLKAKSEEEIFAHLGLEYLEPSERNA

SEQ ID NO: 707 - DNA, 1587 bp, synthetic construct
  misc_feature 1..1587: note = Variant of terminal deoxynucleotidyltransferase
  source 1..1587: mol_type = other DNA
atgcaccatcatcatcatcatggcggtagcggcatgcaccgtattcgtaccatcgattcggacttcgggaagaaacgccagaagaagatggataaccacattagttccatgatctatgaaatcaaatttcacgagtttgtgctgttcattctcgaagagaaaatgggtgcgacgcgtcgtacttttctgacagatttagcccgcaagaaagggttccgcgtcgagaatgaactgtcagacagcgttacccacatcgtggcagaaaataattcaggatctgacgtattggcttggctgaagactcacaagccggagtcgacgacgcaatttgaactgctggatattagctggcttatcgaaagcatgaaagttggtaaaccggtggacaccaaggggaaataccagttgatggaatcgcgtgtcgatagtgcgaacccagatccgacagccggtaccctcaacattctgcctcctactacgaagaccatttctcagtatgcgtgtcaacgccgcaccaccctgaacaaccataatcaacgttttacggacgcactggaaattcttgcggaaaattacgagttcaaacgcaacgatgatacttgtctgacctttatgcgtgctatttccgtgctgaaatgccttccgtttgaggtagttagcctgaaagacacggaaggattgccctggatcggtgatgaagtcaaagggattatggaagaaatcatcgaggtcggtgaatcgctggaagtgcaggccgtgctcaatgatgagcgctatcaaagcttcaaactgtttaagagtgtctttggagtgggggtgaagacagcagacaaatggtaccgtatgggtctgcgcacgctcgaggatgttcgttccagcaagaccctgaagttgaccccgatgcagaaagcgggtctgtgctattatgaagatcttgctgatggcgttacgaaagccgaagctgacgcgatttctctgctggttcaggatgcagtctggactttcgacccggatgcgctggtggagattacgggtggatttcgtcgtgggaaaccttttggtcacgacgttgatctgcttatcacatctccgggagctgagaaagaacaagaagaccagctcctgcagaaagtgaccaatctgtggaagaaacaagggttgttgctgtacggtgacctgcgtgaaagtcgctttgaagatgggaaactcccatcccgcaagatcgatgccctggaccattttgcgaaatgctttctgatcctcaaactttatcaccataaagtggacaaaagcaaatgggaaatgccgacgggttcgaacgaaagcgaggccaaaagttggaaagcaattcgcgtagatctggttcgttgtccctacgatcgttttgcgtttgcgttgttgggttggaccggaagccgcatgttcgaacgtgatctgcgccgctacgccacccacgagaagaagatgatgctggacaatcatgcgctgtatgacctgaccaagaaaatctttctcaaagctaaatcggaagaggaaattttcgcacatctggggcttgaatacctggaaccgtccgaacgtaacgca

SEQ ID NO: 708 - protein, 529 aa, synthetic construct
  REGION 1..529: note = Variant of terminal deoxynucleotidyltransferase
MHHHHHHGGSGMHRIRTIDSDFGKKRQKKMDNHISSMIYEIKFHEFVLFILEEKMGATRRTFLTDLARKKGFRVENELSDSVTHIVAENNSGSDVLAWLKTHKPESTTQFELLDISWLIESMKVGKPVDTKGKYQLMESRVDSANPDPTAGTLNILPPTTKTISQYACQRRTTLNNHNQRFTDALEILAENYEFKRNDDTCLTFMRAISVLKCLPFEVVSLKDTEGLPWIGDEVKGIMEEIIEVGESLEVQAVLNDERYQSFKLFKSVFGVGVKTADKWYRMGLRTLEDVRSSKTLKLTPMQKAGLCYYEDLADGVTKAEADAISLLVQDAVWTFDPDALVEITGGFRRGKPFGHDVDLLITSPGAEKEQEDQLLQKVTNLWKKQGLLLYGDLRESRFEDGKLPSRKIDALDHFAKCFLILKLYHHKVDKSKWEMPTGSNESEAKSWKAIRVDLVRCPYDRFAFALLGWTGSRMFERDLRRYATHEKKMMLDNHALYDLTKKIFLKAKSEEEIFAHLGLEYLEPSERNA

SEQ ID NO: 709 - DNA, 1587 bp, synthetic construct
  misc_feature 1..1587: note = Variant of terminal deoxynucleotidyltransferase
  source 1..1587: mol_type = other DNA
atgcaccatcatcatcatcatggcggtagcggcagccaccgcattcgtaccatcgattcggacttcgggaagaaacgccagaagaagatggataaccacattagttcctttatctatgaaatcaaatttcacgagtttgtgctgttcattctcgaagagaaaatgggtgcgacgcgtcgtacttttctgacagatttagcccgcaagaaagggttccgcgtcgagaatgaactgtcagacagcgttacccacatcgtggcagaaaataattcaggatctgacgtattggcttggctgaagactcacaagatggaggtcacgacgcaatttgaactgctggatattagctggcttatcgaaagcatgaaagttggtaaaccggtggacaccaaggggaaataccagttgatggaatcgggtgaggatagtgcgaacccagatccgacagagggtaccctgaacattctgcctcctactacgaaggagatttctcagtatgcgtgtcaacgccgcaccaccctgaacaaccataatcaacgttttacggacgcactggaaattcttgcggaaaattacgagttcaaacgcaacgatgatacttgtctgacctttatgcgtgctatttccgtgctgaaatgccttccgtttgaggtagttagcctgaaagacacggaaggattgccctggatcggtgatgaagtcaaagggattatggaagaaatcatcgaggtcggtgaatcgctggaagtgcaggccgtgctcaatgatgagcgctatcaaagcttcaaactgtttaagagtgtctttggagtgggggtgaagacagcagacaaatggtaccgtatgggtctgcgcacgctcgaggatgttcgttccagcaagaccctgaagttgaccccgatgcagaaagcgggtctgtgctattatgaagatcttgctgatggcgttacgaaagccgaagctgacgcgatttctctgctggttcaggatgcagtctggactttcgacccggatgcgctggtggagattacgggtggatttcgtcgtgggaaaccttttggtcacgacgttgatctgcttatcacatctccgggagctgagaaagaacaagaagaccagctcctgcagaaagtgaccaatctgtggaagaaacaagggttgttgctgtacggtgacctgcgtgaaagtcgctttgaagatgggaaactcccatcccgcaagatcgatgccctggaccattttgcgaaatgctttctgatcctcaaactttatcaccataaagtggacaaaagcaaatgggaaatgccgacgggttcgaacgaaagcgaggccaaaagttggaaagcaattcgcgtagatctggttcgttgtccctacgatcgttttgcgtttgcgttgttgggttggaccggaagccgcatgttcgaacgtgatctgcgccgctacgccacccacgagaagaagatgatgctggacaatcatgcgctgtatgacctgaccaagaaaatctttctcaaagctaaatcggaagaggaaattttcgcacatctggggcttgaatacctggaaccgtccgaacgtaacgca

SEQ ID NO: 710 - protein, 529 aa, synthetic construct
  REGION 1..529: note = Variant of terminal deoxynucleotidyltransferase
MHHHHHHGGSGSHRIRTIDSDFGKKRQKKMDNHISSFIYEIKFHEFVLFILEEKMGATRRTFLTDLARKKGFRVENELSDSVTHIVAENNSGSDVLAWLKTHKMEVTTQFELLDISWLIESMKVGKPVDTKGKYQLMESGEDSANPDPTEGTLNILPPTTKEISQYACQRRTTLNNHNQRFTDALEILAENYEFKRNDDTCLTFMRAISVLKCLPFEVVSLKDTEGLPWIGDEVKGIMEEIIEVGESLEVQAVLNDERYQSFKLFKSVFGVGVKTADKWYRMGLRTLEDVRSSKTLKLTPMQKAGLCYYEDLADGVTKAEADAISLLVQDAVWTFDPDALVEITGGFRRGKPFGHDVDLLITSPGAEKEQEDQLLQKVTNLWKKQGLLLYGDLRESRFEDGKLPSRKIDALDHFAKCFLILKLYHHKVDKSKWEMPTGSNESEAKSWKAIRVDLVRCPYDRFAFALLGWTGSRMFERDLRRYATHEKKMMLDNHALYDLTKKIFLKAKSEEEIFAHLGLEYLEPSERNA

SEQ ID NO: 711 - DNA, 1587 bp, synthetic construct
  misc_feature 1..1587: note = Variant of terminal deoxynucleotidyltransferase
  source 1..1587: mol_type = other DNA
atgcaccatcatcatcatcatggcggtagcggcagccacggcattcgtaccatcgattcggacttcgggaagaaacgccagaagaagatggataaccacattagttccatgatctatgaaatcaaatttcacgagtttgtgctgttcattctcgaagagaaaatgggtgcgacgcgtcgtacttttctgacagatttagcccgcaagaaagggttccgcgtcgagaatgaactgtcagacagcgttacccacatcgtggcagaaaataattcacgttctgaggtattggcttggctgaagactcacaagatggaggtcacgacgcaatttgaactgctggatattagctggcttatcgaaagcatgaaagttggtaaaccggtggacaccaaggggaaataccagttgatggaatcgcgtgtcgatagtgcgaacccagatccgacagccggtaccctcaacattctgcctcctactacgaagaccatttctcagtatgcgtgtcaacgccgcaccaccctgaacaaccataatcaacgttttacggacgcactggaaattcttgcggaaaattacgagttcaaacgcaacgatgatacttgtctgacctttatgcgtgctatttccgtgctgaaatgccttccgtttgaggtagttagcctgaaagacacggaaggattgccctggatcggtgatgaagtcaaagggattatggaagaaatcatcgaggtcggtgaatcgctggaagtgcaggccgtgctcaatgatgagcgctatcaaagcttcaaactgtttaagagtgtctttggagtgggggtgaagacagcagacaaatggtaccgtatgggtctgcgcacgctcgaggatgttcgttccagcaagaccctgaagttgaccccgatgcagaaagcgggtctgtgctattatgaagatcttgctgatggcgttacgaaagccgaagctgacgcgatttctctgctggttcaggatgcagtctggactttcgacccggatgcgctggtggagattacgggtggatttcgtcgtgggaaaccttttggtcacgacgttgatctgcttatcacatctccgggagctgagaaagaacaagaagaccagctcctgcagaaagtgaccaatctgtggaagaaacaagggttgttgctgtacggtgacctgcgtgaaagtcgctttgaagatgggaaactcccatcccgcaagatcgatgccctggaccattttgcgaaatgctttctgatcctcaaactttatcaccataaagtggacaaaagcaaatgggaaatgccgacgggttcgaacgaaagcgaggccaaaagttggaaagcaattcgcgtagatctggttcgttgtccctacgatcgttttgcgtttgcgttgttgggttggaccggaagccgcatgttcgaacgtgatctgcgccgctacgccacccacgagaagaagatgatgctggacaatcatgcgctgtatgacctgaccaagaaaatctttctcaaagctaaatcggaagaggaaattttcgcacatctggggcttgaatacctggaaccgtccgaacgtaacgca

SEQ ID NO: 712 - protein, 529 aa, synthetic construct
  REGION 1..529: note = Variant of terminal deoxynucleotidyltransferase
MHHHHHHGGSGSHGIRTIDSDFGKKRQKKMDNHISSMIYEIKFHEFVLFILEEKMGATRRTFLTDLARKKGFRVENELSDSVTHIVAENNSRSEVLAWLKTHKMEVTTQFELLDISWLIESMKVGKPVDTKGKYQLMESRVDSANPDPTAGTLNILPPTTKTISQYACQRRTTLNNHNQRFTDALEILAENYEFKRNDDTCLTFMRAISVLKCLPFEVVSLKDTEGLPWIGDEVKGIMEEIIEVGESLEVQAVLNDERYQSFKLFKSVFGVGVKTADKWYRMGLRTLEDVRSSKTLKLTPMQKAGLCYYEDLADGVTKAEADAISLLVQDAVWTFDPDALVEITGGFRRGKPFGHDVDLLITSPGAEKEQEDQLLQKVTNLWKKQGLLLYGDLRESRFEDGKLPSRKIDALDHFAKCFLILKLYHHKVDKSKWEMPTGSNESEAKSWKAIRVDLVRCPYDRFAFALLGWTGSRMFERDLRRYATHEKKMMLDNHALYDLTKKIFLKAKSEEEIFAHLGLEYLEPSERNA

SEQ ID NO: 713 - DNA, 1587 bp, synthetic construct
  misc_feature 1..1587: note = Variant of terminal deoxynucleotidyltransferase
  source 1..1587: mol_type = other DNA
atgcaccatcatcatcatcatggcggtagcggcagccaccgcattcgtaccatcgattcggacttcgggaagaaacgccagaagaagatggataaccacgatagttccatgatctatgaaatcaaatttcacgagtttgtgctgttcattctcgaagagaaaatgggtgcgacgcgtcgtacttttctgacagatttagcccgcaagaaagggttccgcgtcgagaatgaactgtcagacagcgttacccacatcgtggcagaaaataattcaggatctgacgtattggcttggctgaagactcacaagatggaggtcacgacgcaatttgaactgctggatattagctggcttatcgaaagcatgaaagttggtaaaccggtggacaccaaggggaaataccagttgatggaatcgcgtgtcgatagtgcgaacccagatccgacagagggtcgtctgaacattctgcctcctactacgaagaccatttctcagtatgcgtgtcaacgccgcaccaccctgaacaaccataatcaacgttttacggacgcactggaaattcttgcggaaaattacgagttcaaacgcaacgatgatacttgtctgacctttatgcgtgctatttccgtgctgaaatgccttccgtttgaggtagttagcctgaaagacacggaaggattgccctggatcggtgatgaagtcaaagggattatggaagaaatcatcgaggtcggtgaatcgctggaagtgcaggccgtgctcaatgatgagcgctatcaaagcttcaaactgtttaagagtgtctttggagtgggggtgaagacagcagacaaatggtaccgtatgggtctgcgcacgctcgaggatgttcgttccagcaagaccctgaagttgaccccgatgcagaaagcgggtctgtgctattatgaagatcttgctgatggcgttacgaaagccgaagctgacgcgatttctctgctggttcaggatgcagtctggactttcgacccggatgcgctggtggagattacgggtggatttcgtcgtgggaaaccttttggtcacgacgttgatctgcttatcacatctccgggagctgagaaagaacaagaagaccagctcctgcagaaagtgaccaatctgtggaagaaacaagggttgttgctgtacggtgacctgcgtgaaagtcgctttgaagatgggaaactcccatcccgcaagatcgatgccctggaccattttgcgaaatgctttctgatcctcaaactttatcaccataaagtggacaaaagcaaatgggaaatgccgacgggttcgaacgaaagcgaggccaaaagttggaaagcaattcgcgtagatctggttcgttgtccctacgatcgttttgcgtttgcgttgttgggttggaccggaagccgcatgttcgaacgtgatctgcgccgctacgccacccacgagaagaagatgatgctggacaatcatgcgctgtatgacctgaccaagaaaatctttctcaaagctaaatcggaagaggaaattttcgcacatctggggcttgaatacctggaaccgtccgaacgtaacgca

SEQ ID NO: 714 - protein, 529 aa, synthetic construct
  REGION 1..529: note = Variant of terminal deoxynucleotidyltransferase
MHHHHHHGGSGSHRIRTIDSDFGKKRQKKMDNHDSSMIYEIKFHEFVLFILEEKMGATRRTFLTDLARKKGFRVENELSDSVTHIVAENNSGSDVLAWLKTHKMEVTTQFELLDISWLIESMKVGKPVDTKGKYQLMESRVDSANPDPTEGRLNILPPTTKTISQYACQRRTTLNNHNQRFTDALEILAENYEFKRNDDTCLTFMRAISVLKCLPFEVVSLKDTEGLPWIGDEVKGIMEEIIEVGESLEVQAVLNDERYQSFKLFKSVFGVGVKTADKWYRMGLRTLEDVRSSKTLKLTPMQKAGLCYYEDLADGVTKAEADAISLLVQDAVWTFDPDALVEITGGFRRGKPFGHDVDLLITSPGAEKEQEDQLLQKVTNLWKKQGLLLYGDLRESRFEDGKLPSRKIDALDHFAKCFLILKLYHHKVDKSKWEMPTGSNESEAKSWKAIRVDLVRCPYDRFAFALLGWTGSRMFERDLRRYATHEKKMMLDNHALYDLTKKIFLKAKSEEEIFAHLGLEYLEPSERNA

SEQ ID NO: 715 - DNA, 1587 bp, synthetic construct
  misc_feature 1..1587: note = Variant of terminal deoxynucleotidyltransferase
  source 1..1587: mol_type = other DNA
atgcaccatcatcatcatcatggcggtagcggcatgcaccgtattcgtaccatcgatagcgacttcgggaagaaacgccagaagaagatggataaccacattagttccatgatctatgaaatcaaatttcacgagtttgtgctgttcattctcgaagagaaaatgggtgcgtcgcgtcgtacttttctgacagatttagcccgcaagaaagggttccgcgtcgagaatgaactgtcagacagcgttacccacatcgtggcagaaaataattcaggatctgacgtattggcttggctgaaggagcacaagccggagtcgacgacgcaatttgaactgctggatattagctggcttatcgaaagcatgaaagttggtaaaccggtggacaccaaggggaaataccagttgatggaatcgcgtgtcgatagtgcgaacccagatccgacagccggtaccctcaacatcgaacctcctactacgaagaccatttctcagtatgcgtgtcaacgccgcaccaccctgaacaaccataatcaacgttttacggacgcactggaaattcttgcggaaaattacgagttcaaacgcaacgatgatacttgtctgacctttatgcgtgctatttccgtgctgaaatgccttccgtttgaggtagttagcctgaaagacacggaaggattgccctggatcggtgatgaagtcaaagggattatggaagaaatcatcgaggtcggtgaatcgctggaagtgcaggccgtgctcaatgatgagcgctatcaaagcttcaaactgtttaagagtgtctttggagtgggggtgaagacagcagacaaatggtaccgtatgggtctgcgcacgctcgaggatgttcgttccagcaagaccctgaagttgaccccgatgcagaaagcgggtctgtgctattatgaagatcttgctgatggcgttacgaaagccgaagctgacgcgatttctctgctggttcaggatgcagtctggactttcgacccggatgcgctggtggagattacgggtggatttcgtcgtgggaaaccttttggtcacgacgttgatctgcttatcacatctccgggagctgagaaagaacaagaagaccagctcctgcagaaagtgaccaatctgtggaagaaacaagggttgttgctgtacggtgacctgcgtgaaagtcgctttgaagatgggaaactcccatcccgcaagatcgatgccctggaccattttgcgaaatgctttctgatcctcaaactttatcaccataaagtggacaaaagcaaatgggaaatgccgacgggttcgaacgaaagcgaggccaaaagttggaaagcaattcgcgtagatctggttcgttgtccctacgatcgttttgcgtttgcgttgttgggttggaccggaagccgcatgttcgaacgtgatctgcgccgctacgccacccacgagaagaagatgatgctggacaatcatgcgctgtatgacctgaccaagaaaatctttctcaaagctaaatcggaagaggaaattttcgcacatctggggcttgaatacctggaaccgtccgaacgtaacgca

SEQ ID NO: 716 - protein, 529 aa, synthetic construct
  REGION 1..529: note = Variant of terminal deoxynucleotidyltransferase
MHHHHHHGGSGMHRIRTIDSDFGKKRQKKMDNHISSMIYEIKFHEFVLFILEEKMGASRRTFLTDLARKKGFRVENELSDSVTHIVAENNSGSDVLAWLKEHKPESTTQFELLDISWLIESMKVGKPVDTKGKYQLMESRVDSANPDPTAGTLNIEPPTTKTISQYACQRRTTLNNHNQRFTDALEILAENYEFKRNDDTCLTFMRAISVLKCLPFEVVSLKDTEGLPWIGDEVKGIMEEIIEVGESLEVQAVLNDERYQSFKLFKSVFGVGVKTADKWYRMGLRTLEDVRSSKTLKLTPMQKAGLCYYEDLADGVTKAEADAISLLVQDAVWTFDPDALVEITGGFRRGKPFGHDVDLLITSPGAEKEQEDQLLQKVTNLWKKQGLLLYGDLRESRFEDGKLPSRKIDALDHFAKCFLILKLYHHKVDKSKWEMPTGSNESEAKSWKAIRVDLVRCPYDRFAFALLGWTGSRMFERDLRRYATHEKKMMLDNHALYDLTKKIFLKAKSEEEIFAHLGLEYLEPSERNA

SEQ ID NO: 717 - DNA, 1587 bp, synthetic construct
  misc_feature 1..1587: note = Variant of terminal deoxynucleotidyltransferase
  source 1..1587: mol_type = other DNA
atgcaccatcatcatcatcatggcggtagcggcatgcacggcattcgtaccatcgattcggacttcgggaagaaacgccagaagaagatggataaccacattagttccatgatctatgaaatcaaatttcacgagtttgtgctgttcattctcgaagagaaaatgggtgcgacgcgtcgtacttttctgacagatttagcccgcaagaaagggttccgcgtcgagaatgaactgtcagacagcgttacccacatcgtggcagaaaataattcaggatctgacgtattggcttggctgaagactcacaagatggaggtcacgacgcaatttgaactgctggatattagctggcttatcgaaagcatgaaagttggtaaaccggtggacaccaaggggaaataccagttgatggaatcgcgtgaggatagtgcgaacccagatccgacagccggtaccctgaacattctgcctcctactacggagactatttctcagtatgcgtgtcaacgccgcaccaccctgaacaaccataatcaacgttttacggacgcactggaaattcttgcggaaaattacgagttcaaacgcaacgatgatacttgtctgacctttatgcgtgctatttccgtgctgaaatgccttccgtttgaggtagttagcctgaaagacacggaaggattgccctggatcggtgatgaagtcaaagggattatggaagaaatcatcgaggtcggtgaatcgctggaagtgcaggccgtgctcaatgatgagcgctatcaaagcttcaaactgtttaagagtgtctttggagtgggggtgaagacagcagacaaatggtaccgtatgggtctgcgcacgctcgaggatgttcgttccagcaagaccctgaagttgaccccgatgcagaaagcgggtctgtgctattatgaagatcttgctgatggcgttacgaaagccgaagctgacgcgatttctctgctggttcaggatgcagtctggactttcgacccggatgcgctggtggagattacgggtggatttcgtcgtgggaaaccttttggtcacgacgttgatctgcttatcacatctccgggagctgagaaagaacaagaagaccagctcctgcagaaagtgaccaatctgtggaagaaacaagggttgttgctgtacggtgacctgcgtgaaagtcgctttgaagatgggaaactcccatcccgcaagatcgatgccctggaccattttgcgaaatgctttctgatcctcaaactttatcaccataaagtggacaaaagcaaatgggaaatgccgacgggttcgaacgaaagcgaggccaaaagttggaaagcaattcgcgtagatctggttcgttgtccctacgatcgttttgcgtttgcgttgttgggttggaccggaagccgcatgttcgaacgtgatctgcgccgctacgccacccacgagaagaagatgatgctggacaatcatgcgctgtatgacctgaccaagaaaatctttctcaaagctaaatcggaagaggaaattttcgcacatctggggcttgaatacctggaaccgtccgaacgtaacgca

SEQ ID NO: 718 - protein, 529 aa, synthetic construct
  REGION 1..529: note = Variant of terminal deoxynucleotidyltransferase
MHHHHHHGGSGMHGIRTIDSDFGKKRQKKMDNHISSMIYEIKFHEFVLFILEEKMGATRRTFLTDLARKKGFRVENELSDSVTHIVAENNSGSDVLAWLKTHKMEVTTQFELLDISWLIESMKVGKPVDTKGKYQLMESREDSANPDPTAGTLNILPPTTETISQYACQRRTTLNNHNQRFTDALEILAENYEFKRNDDTCLTFMRAISVLKCLPFEVVSLKDTEGLPWIGDEVKGIMEEIIEVGESLEVQAVLNDERYQSFKLFKSVFGVGVKTADKWYRMGLRTLEDVRSSKTLKLTPMQKAGLCYYEDLADGVTKAEADAISLLVQDAVWTFDPDALVEITGGFRRGKPFGHDVDLLITSPGAEKEQEDQLLQKVTNLWKKQGLLLYGDLRESRFEDGKLPSRKIDALDHFAKCFLILKLYHHKVDKSKWEMPTGSNESEAKSWKAIRVDLVRCPYDRFAFALLGWTGSRMFERDLRRYATHEKKMMLDNHALYDLTKKIFLKAKSEEEIFAHLGLEYLEPSERNA

SEQ ID NO: 719 - DNA, 1587 bp, synthetic construct
  misc_feature 1..1587: note = Variant of terminal deoxynucleotidyltransferase
  source 1..1587: mol_type = other DNA
atgcaccatcatcatcatcatggcggtagcggcatgcacggcattcgtaccatcgattcggacttcgggaagaaacgccagaagaagatggataaccacgatagttccatgatctatgaaatcaaatttcacgagtttgtgctgttcattctcgaagagaaaatgggtgcgacgcgtcgtacttttctgacagatttagcccgcaagaaagggttccgcgtcgagaatgaactgtcagacagcgttacccacatcgtggcagaaaataattcaggatctgacgtattggcttggctgaagactcacaagatggaggtcacgacgcaatttgaactgctggatattagctggcttatcgaaagcatgaaagttggtaaaccggtggacaccaaggggaaataccagttgatggaatcgcgtgtcgatagtgcgaacccagatccgacagagggtaccgaaaacattctgcctcctactacgaagaccatttctcagtatgcgtgtcaacgccgcaccaccctgaacaaccataatcaacgttttacggacgcactggaaattcttgcggaaaattacgagttcaaacgcaacgatgatacttgtctgacctttatgcgtgctatttccgtgctgaaatgccttccgtttgaggtagttagcctgaaagacacggaaggattgccctggatcggtgatgaagtcaaagggattatggaagaaatcatcgaggtcggtgaatcgctggaagtgcaggccgtgctcaatgatgagcgctatcaaagcttcaaactgtttaagagtgtctttggagtgggggtgaagacagcagacaaatggtaccgtatgggtctgcgcacgctcgaggatgttcgttccagcaagaccctgaagttgaccccgatgcagaaagcgggtctgtgctattatgaagatcttgctgatggcgttacgaaagccgaagctgacgcgatttctctgctggttcaggatgcagtctggactttcgacccggatgcgctggtggagattacgggtggatttcgtcgtgggaaaccttttggtcacgacgttgatctgcttatcacatctccgggagctgagaaagaacaagaagaccagctcctgcagaaagtgaccaatctgtggaagaaacaagggttgttgctgtacggtgacctgcgtgaaagtcgctttgaagatgggaaactcccatcccgcaagatcgatgccctggaccattttgcgaaatgctttctgatcctcaaactttatcaccataaagtggacaaaagcaaatgggaaatgccgacgggttcgaacgaaagcgaggccaaaagttggaaagcaattcgcgtagatctggttcgttgtccctacgatcgttttgcgtttgcgttgttgggttggaccggaagccgcatgttcgaacgtgatctgcgccgctacgccacccacgagaagaagatgatgctggacaatcatgcgctgtatgacctgaccaagaaaatctttctcaaagctaaatcggaagaggaaattttcgcacatctggggcttgaatacctggaaccgtccgaacgtaacgca

SEQ ID NO: 720 - protein, 529 aa, synthetic construct
  REGION 1..529: note = Variant of terminal deoxynucleotidyltransferase
MHHHHHHGGSGMHGIRTIDSDFGKKRQKKMDNHDSSMIYEIKFHEFVLFILEEKMGATRRTFLTDLARKKGFRVENELSDSVTHIVAENNSGSDVLAWLKTHKMEVTTQFELLDISWLIESMKVGKPVDTKGKYQLMESRVDSANPDPTEGTENILPPTTKTISQYACQRRTTLNNHNQRFTDALEILAENYEFKRNDDTCLTFMRAISVLKCLPFEVVSLKDTEGLPWIGDEVKGIMEEIIEVGESLEVQAVLNDERYQSFKLFKSVFGVGVKTADKWYRMGLRTLEDVRSSKTLKLTPMQKAGLCYYEDLADGVTKAEADAISLLVQDAVWTFDPDALVEITGGFRRGKPFGHDVDLLITSPGAEKEQEDQLLQKVTNLWKKQGLLLYGDLRESRFEDGKLPSRKIDALDHFAKCFLILKLYHHKVDKSKWEMPTGSNESEAKSWKAIRVDLVRCPYDRFAFALLGWTGSRMFERDLRRYATHEKKMMLDNHALYDLTKKIFLKAKSEEEIFAHLGLEYLEPSERNA

SEQ ID NO: 721 - DNA, 1587 bp, synthetic construct
  misc_feature 1..1587: note = Variant of terminal deoxynucleotidyltransferase
  source 1..1587: mol_type = other DNA
atgcaccatcatcatcatcatggcggtagcggcatgcacggcattcgtaccatcgattcggacttcgggaagaaacgccagaagaagatggataaccacagtagttccgccatctatgaaatcaaatttcacgagtttgtgctgttcattctcgaagagaaaatgggtgcgacgcgtcgtacttttctgacagatttagcccgcaagaaagggttccgcgtcgagaatgaactgtcagacagcgttacccacatcgtggcagaaaataattcaggatctgacgtattggcttggctgaagactcacaagatggaggtcacgacgcaatttgaactgctggatattagctggcttatcgaaagcatgaaagttggtaaaccggtggacaccaaggggaaataccagttgatggaatcgcgtgtcgatagtgcgaacccagatccgacagcgggtcgtctgaacattctgcctcctactacgaagaccatttctcagtatgcgtgtcaacgccgcaccaccctgaacaaccataatcaacgttttacggacgcactggaaattcttgcggaaaattacgagttcaaacgcaacgatgatacttgtctgacctttatgcgtgctatttccgtgctgaaatgccttccgtttgaggtagttagcctgaaagacacggaaggattgccctggatcggtgatgaagtcaaagggattatggaagaaatcatcgaggtcggtgaatcgctggaagtgcaggccgtgctcaatgatgagcgctatcaaagcttcaaactgtttaagagtgtctttggagtgggggtgaagacagcagacaaatggtaccgtatgggtctgcgcacgctcgaggatgttcgttccagcaagaccctgaagttgaccccgatgcagaaagcgggtctgtgctattatgaagatcttgctgatggcgttacgaaagccgaagctgacgcgatttctctgctggttcaggatgcagtctggactttcgacccggatgcgctggtggagattacgggtggatttcgtcgtgggaaaccttttggtcacgacgttgatctgcttatcacatctccgggagctgagaaagaacaagaagaccagctcctgcagaaagtgaccaatctgtggaagaaacaagggttgttgctgtacggtgacctgcgtgaaagtcgctttgaagatgggaaactcccatcccgcaagatcgatgccctggaccattttgcgaaatgctttctgatcctcaaactttatcaccataaagtggacaaaagcaaatgggaaatgccgacgggttcgaacgaaagcgaggccaaaagttggaaagcaattcgcgtagatctggttcgttgtccctacgatcgttttgcgtttgcgttgttgggttggaccggaagccgcatgttcgaacgtgatctgcgccgctacgccacccacgagaagaagatgatgctggacaatcatgcgctgtatgacctgaccaagaaaatctttctcaaagctaaatcggaagaggaaattttcgcacatctggggcttgaatacctggaaccgtccgaacgtaacgca

SEQ ID NO: 722 - protein, 529 aa, synthetic construct
  REGION 1..529: note = Variant of terminal deoxynucleotidyltransferase
MHHHHHHGGSGMHGIRTIDSDFGKKRQKKMDNHSSSAIYEIKFHEFVLFILEEKMGATRRTFLTDLARKKGFRVENELSDSVTHIVAENNSGSDVLAWLKTHKMEVTTQFELLDISWLIESMKVGKPVDTKGKYQLMESRVDSANPDPTAGRLNILPPTTKTISQYACQRRTTLNNHNQRFTDALEILAENYEFKRNDDTCLTFMRAISVLKCLPFEVVSLKDTEGLPWIGDEVKGIMEEIIEVGESLEVQAVLNDERYQSFKLFKSVFGVGVKTADKWYRMGLRTLEDVRSSKTLKLTPMQKAGLCYYEDLADGVTKAEADAISLLVQDAVWTFDPDALVEITGGFRRGKPFGHDVDLLITSPGAEKEQEDQLLQKVTNLWKKQGLLLYGDLRESRFEDGKLPSRKIDALDHFAKCFLILKLYHHKVDKSKWEMPTGSNESEAKSWKAIRVDLVRCPYDRFAFALLGWTGSRMFERDLRRYATHEKKMMLDNHALYDLTKKIFLKAKSEEEIFAHLGLEYLEPSERNA

SEQ ID NO: 723 - DNA, 1587 bp, synthetic construct
  misc_feature 1..1587: note = Variant of terminal deoxynucleotidyltransferase
  source 1..1587: mol_type = other DNA
atgcaccatcatcatcatcatggcggtagcggcatgcaccgtattcgtaccatcgattcggacttcgggaagaaacgccagaagaagatggataaccacattagttccatgatctatgaaatcaaatttcacgagtttgtgctgttcattctcgaagagaaaatgggtgcgacgcgtcgtacttttctgacagatttagcccgcaagaaagggttccgcgtcgagaatgaactgtcagacagcgttacccacatcgtggcagaaaataattcaggatctgacgtattggcttggctgaagactcacaagatggagaagaccaagcaatttgaactgctggatattagctggcttatcgaaagcatgaaagttggtaaaccggtggacaccaaggggaaataccagttgatggaatcgggtgtgagcagtgcgaacccagatccgacagagggtaccgaaaacattctgcctcctactacgaagaccatttctcagtatgcgtgtcaacgccgcaccaccctgaacaaccataatcaacgttttacggacgcactggaaattcttgcggaaaattacgagttcaaacgcaacgatgatacttgtctgacctttatgcgtgctatttccgtgctgaaatgccttccgtttgaggtagttagcctgaaagacacggaaggattgccctggatcggtgatgaagtcaaagggattatggaagaaatcatcgaggtcggtgaatcgctggaagtgcaggccgtgctcaatgatgagcgctatcaaagcttcaaactgtttaagagtgtctttggagtgggggtgaagacagcagacaaatggtaccgtatgggtctgcgcacgctcgaggatgttcgttccagcaagaccctgaagttgaccccgatgcagaaagcgggtctgtgctattatgaagatcttgctgatggcgttacgaaagccgaagctgacgcgatttctctgctggttcaggatgcagtctggactttcgacccggatgcgctggtggagattacgggtggatttcgtcgtgggaaaccttttggtcacgacgttgatctgcttatcacatctccgggagctgagaaagaacaagaagaccagctcctgcagaaagtgaccaatctgtggaagaaacaagggttgttgctgtacggtgacctgcgtgaaagtcgctttgaagatgggaaactcccatcccgcaagatcgatgccctggaccattttgcgaaatgctttctgatcctcaaactttatcaccataaagtggacaaaagcaaatgggaaatgccgacgggttcgaacgaaagcgaggccaaaagttggaaagcaattcgcgtagatctggttcgttgtccctacgatcgttttgcgtttgcgttgttgggttggaccggaagccgcatgttcgaacgtgatctgcgccgctacgccacccacgagaagaagatgatgctggacaatcatgcgctgtatgacctgaccaagaaaatctttctcaaagctaaatcggaagaggaaattttcgcacatctggggcttgaatacctggaaccgtccgaacgtaacgca

SEQ ID NO: 724 - protein, 529 aa, synthetic construct
  REGION 1..529: note = Variant of terminal deoxynucleotidyltransferase
MHHHHHHGGSGMHRIRTIDSDFGKKRQKKMDNHISSMIYEIKFHEFVLFILEEKMGATRRTFLTDLARKKGFRVENELSDSVTHIVAENNSGSDVLAWLKTHKMEKTKQFELLDISWLIESMKVGKPVDTKGKYQLMESGVSSANPDPTEGTENILPPTTKTISQYACQRRTTLNNHNQRFTDALEILAENYEFKRNDDTCLTFMRAISVLKCLPFEVVSLKDTEGLPWIGDEVKGIMEEIIEVGESLEVQAVLNDERYQSFKLFKSVFGVGVKTADKWYRMGLRTLEDVRSSKTLKLTPMQKAGLCYYEDLADGVTKAEADAISLLVQDAVWTFDPDALVEITGGFRRGKPFGHDVDLLITSPGAEKEQEDQLLQKVTNLWKKQGLLLYGDLRESRFEDGKLPSRKIDALDHFAKCFLILKLYHHKVDKSKWEMPTGSNESEAKSWKAIRVDLVRCPYDRFAFALLGWTGSRMFERDLRRYATHEKKMMLDNHALYDLTKKIFLKAKSEEEIFAHLGLEYLEPSERNA

SEQ ID NO: 725 - DNA, 1587 bp, synthetic construct
  misc_feature 1..1587: note = Variant of terminal deoxynucleotidyltransferase
  source 1..1587: mol_type = other DNA
atgcaccatcatcatcatcatggcggtagcggcagccacggcattcgtaccatcgattcggacttcgggaagaaacgccagaagaagatggataaccacgatagttccatgatctatgaaatcaaatttcacgagtttgtgctgttcattctcgaagagaaaatgggtgcgacgcgtcgtacttttctgacagatttagcccgcaagaaagggttccgcgtcgagaatgaactgtcagacagcgttacccacatcgtggcagaaaataattcaggttctgatgtattggcttggctgaagactcacaagatggaggtcacgacgcaatttgaactgctggatattagctggcttatcgaaagcatgaaagttggtaaaccggtggacaccaaggggaaataccagttgatggaatcgggtgtgagcagtgcgaacccagatccgacagccggtaccctcaacattctgcctcctactacgaagactatttctcagtatgcgtgtcaacgccgcaccaccctgaacaaccataatcaacgttttacggacgcactggaaattcttgcggaaaattacgagttcaaacgcaacgatgatacttgtctgacctttatgcgtgctatttccgtgctgaaatgccttccgtttgaggtagttagcctgaaagacacggaaggattgccctggatcggtgatgaagtcaaagggattatggaagaaatcatcgaggtcggtgaatcgctggaagtgcaggccgtgctcaatgatgagcgctatcaaagcttcaaactgtttaagagtgtctttggagtgggggtgaagacagcagacaaatggtaccgtatgggtctgcgcacgctcgaggatgttcgttccagcaagaccctgaagttgaccccgatgcagaaagcgggtctgtgctattatgaagatcttgctgatggcgttacgaaagccgaagctgacgcgatttctctgctggttcaggatgcagtctggactttcgacccggatgcgctggtggagattacgggtggatttcgtcgtgggaaaccttttggtcacgacgttgatctgcttatcacatctccgggagctgagaaagaacaagaagaccagctcctgcagaaagtgaccaatctgtggaagaaacaagggttgttgctgtacggtgacctgcgtgaaagtcgctttgaagatgggaaactcccatcccgcaagatcgatgccctggaccattttgcgaaatgctttctgatcctcaaactttatcaccataaagtggacaaaagcaaatgggaaatgccgacgggttcgaacgaaagcgaggccaaaagttggaaagcaattcgcgtagatctggttcgttgtccctacgatcgttttgcgtttgcgttgttgggttggaccggaagccgcatgttcgaacgtgatctgcgccgctacgccacccacgagaagaagatgatgctggacaatcatgcgctgtatgacctgaccaagaaaatctttctcaaagctaaatcggaagaggaaattttcgcacatctggggcttgaatacctggaaccgtccgaacgtaacgca

SEQ ID NO: 726 - protein, 529 aa, synthetic construct
  REGION 1..529: note = Variant of terminal deoxynucleotidyltransferase
MHHHHHHGGSGSHGIRTIDSDFGKKRQKKMDNHDSSMIYEIKFHEFVLFILEEKMGATRRTFLTDLARKKGFRVENELSDSVTHIVAENNSGSDVLAWLKTHKMEVTTQFELLDISWLIESMKVGKPVDTKGKYQLMESGVSSANPDPTAGTLNILPPTTKTISQYACQRRTTLNNHNQRFTDALEILAENYEFKRNDDTCLTFMRAISVLKCLPFEVVSLKDTEGLPWIGDEVKGIMEEIIEVGESLEVQAVLNDERYQSFKLFKSVFGVGVKTADKWYRMGLRTLEDVRSSKTLKLTPMQKAGLCYYEDLADGVTKAEADAISLLVQDAVWTFDPDALVEITGGFRRGKPFGHDVDLLITSPGAEKEQEDQLLQKVTNLWKKQGLLLYGDLRESRFEDGKLPSRKIDALDHFAKCFLILKLYHHKVDKSKWEMPTGSNESEAKSWKAIRVDLVRCPYDRFAFALLGWTGSRMFERDLRRYATHEKKMMLDNHALYDLTKKIFLKAKSEEEIFAHLGLEYLEPSERNA

SEQ ID NO: 727 - DNA, 1587 bp, synthetic construct
  misc_feature 1..1587: note = Variant of terminal deoxynucleotidyltransferase
  source 1..1587: mol_type = other DNA
atgcaccatcatcatcatcatggcggtagcggcatgcaccgtattcgtaccatcgatagcgaattcgggaagaaacgccagaagaagatggataacaagattagttccatgatctatgaaatcaaatttcacgagtttgtgctgttcattctcgaagagaaaatgggtgcgacgcgtcgtacttttctgacagatttagcccgcaagaaagggttccgcgtcgagaatgaactgtcagacagcgttacccacatcgtggcagaaaataattcaggatctgacgtattggcttggctgaaggagcacaagccggagtcgacgacgcaatttgaactgctggatattagctggcttatcgaaagcatgaaagtaggtaaaccggtggacaccaaggggaaataccagttgatggaatcgcgtgtcgatagtgcgaacccagatccgacagccggtaccctcaacatcctgcctcctactacgaagaccatttctcagtatgcgtgtcaacgccgcaccaccctgaacaaccataatcaacgttttacggacgcactggaaattcttgcggaaaattacgagttcaaacgcaacgatgatacttgtctgacctttatgcgtgctatttccgtgctgaaatgccttccgtttgaggtagttagcctgaaagacacggaaggattgccctggatcggtgatgaagtcaaagggattatggaagaaatcatcgaggtcggtgaatcgctggaagtgcaggccgtgctcaatgatgagcgctatcaaagcttcaaactgtttaagagtgtctttggagtgggggtgaagacagcagacaaatggtaccgtatgggtctgcgcacgctcgaggatgttcgttccagcaagaccctgaagttgaccccgatgcagaaagcgggtctgtgctattatgaagatcttgctgatggcgttacgaaagccgaagctgacgcgatttctctgctggttcaggatgcagtctggactttcgacccggatgcgctggtggagattacgggtggatttcgtcgtgggaaaccttttggtcacgacgttgatctgcttatcacatctccgggagctgagaaagaacaagaagaccagctcctgcagaaagtgaccaatctgtggaagaaacaagggttgttgctgtacggtgacctgcgtgaaagtcgctttgaagatgggaaactcccatcccgcaagatcgatgccctggaccattttgcgaaatgctttctgatcctcaaactttatcaccataaagtggacaaaagcaaatgggaaatgccgacgggttcgaacgaaagcgaggccaaaagttggaaagcaattcgcgtagatctggttcgttgtccctacgatcgttttgcgtttgcgttgttgggttggaccggaagccgcatgttcgaacgtgatctgcgccgctacgccacccacgagaagaagatgatgctggacaatcatgcgctgtatgacctgaccaagaaaatctttctcaaagctaaatcggaagaggaaattttcgcacatctggggcttgaatacctggaaccgtccgaacgtaacgca

SEQ ID NO: 728 - protein, 529 aa, synthetic construct
  REGION 1..529: note = Variant of terminal deoxynucleotidyltransferase
MHHHHHHGGSGMHRIRTIDSEFGKKRQKKMDNKISSMIYEIKFHEFVLFILEEKMGATRRTFLTDLARKKGFRVENELSDSVTHIVAENNSGSDVLAWLKEHKPESTTQFELLDISWLIESMKVGKPVDTKGKYQLMESRVDSANPDPTAGTLNILPPTTKTISQYACQRRTTLNNHNQRFTDALEILAENYEFKRNDDTCLTFMRAISVLKCLPFEVVSLKDTEGLPWIGDEVKGIMEEIIEVGESLEVQAVLNDERYQSFKLFKSVFGVGVKTADKWYRMGLRTLEDVRSSKTLKLTPMQKAGLCYYEDLADGVTKAEADAISLLVQDAVWTFDPDALVEITGGFRRGKPFGHDVDLLITSPGAEKEQEDQLLQKVTNLWKKQGLLLYGDLRESRFEDGKLPSRKIDALDHFAKCFLILKLYHHKVDKSKWEMPTGSNESEAKSWKAIRVDLVRCPYDRFAFALLGWTGSRMFERDLRRYATHEKKMMLDNHALYDLTKKIFLKAKSEEEIFAHLGLEYLEPSERNA

SEQ ID NO: 729 - DNA, 1587 bp, synthetic construct
  misc_feature 1..1587: note = Variant of terminal deoxynucleotidyltransferase
  source 1..1587: mol_type = other DNA
atgcaccatcatcatcatcatggcggtagcggcatgcacggcattcgtaccatcgattcggacttcgggaagaaacgccagaagaagatggataaccacattagttccatgatctatgaaatcaaatttcacgagtttgtgctgttcattctcgaagagaaaatgggtgcgacgcgtcgtacttttctgacagatttagcccgcaagaaagggttccgcgtcgagaatgaactgtcagacagcgttacccacatcgtggcagaaaataattcaggatctgacgtattggcttggctgaagactcacaagatggaggtcacgacgcaatttgaactgctggatattagctggcttatcgaaagcatgaaagttggtaaaccggtggacaccaaggggaaataccagttgatggaatcgcgtgtcgatagtgcgaacccagatccgacagccggtaccctcaacattctgcctcctactacggagactatttctcagtatgcgtgtcaacgccgcaccaccctgaacaaccataatcaacgttttacggacgcactggaaattcttgcggaaaattacgagttcaaacgcaacgatgatacttgtctgacctttatgcgtgctatttccgtgctgaaatgccttccgtttgaggtagttagcctgaaagacacggaaggattgccctggatcggtgatgaagtcaaagggattatggaagaaatcatcgaggtcggtgaatcgctggaagtgcaggccgtgctcaatgatgagcgctatcaaagcttcaaactgtttaagagtgtctttggagtgggggtgaagacagcagacaaatggtaccgtatgggtctgcgcacgctcgaggatgttcgttccagcaagaccctgaagttgaccccgatgcagaaagcgggtctgtgctattatgaagatcttgctgatggcgttacgaaagccgaagctgacgcgatttctctgctggttcaggatgcagtctggactttcgacccggatgcgctggtggagattacgggtggatttcgtcgtgggaaaccttttggtcacgacgttgatctgcttatcacatctccgggagctgagaaagaacaagaagaccagctcctgcagaaagtgaccaatctgtggaagaaacaagggttgttgctgtacggtgacctgcgtgaaagtcgctttgaagatgggaaactcccatcccgcaagatcgatgccctggaccattttgcgaaatgctttctgatcctcaaactttatcaccataaagtggacaaaagcaaatgggaaatgccgacgggttcgaacgaaagcgaggccaaaagttggaaagcaattcgcgtagatctggttcgttgtccctacgatcgttttgcgtttgcgttgttgggttggaccggaagccgcatgttcgaacgtgatctgcgccgctacgccacccacgagaagaagatgatgctggacaatcatgcgctgtatgacctgaccaagaaaatctttctcaaagctaaatcggaagaggaaattttcgcacatctggggcttgaatacctggaaccgtccgaacgtaacgca

SEQ ID NO: 730 - protein, 529 aa, synthetic construct
  REGION 1..529: note = Variant of terminal deoxynucleotidyltransferase
MHHHHHHGGSGMHGIRTIDSDFGKKRQKKMDNHISSMIYEIKFHEFVLFILEEKMGATRRTFLTDLARKKGFRVENELSDSVTHIVAENNSGSDVLAWLKTHKMEVTTQFELLDISWLIESMKVGKPVDTKGKYQLMESRVDSANPDPTAGTLNILPPTTETISQYACQRRTTLNNHNQRFTDALEILAENYEFKRNDDTCLTFMRAISVLKCLPFEVVSLKDTEGLPWIGDEVKGIMEEIIEVGESLEVQAVLNDERYQSFKLFKSVFGVGVKTADKWYRMGLRTLEDVRSSKTLKLTPMQKAGLCYYEDLADGVTKAEADAISLLVQDAVWTFDPDALVEITGGFRRGKPFGHDVDLLITSPGAEKEQEDQLLQKVTNLWKKQGLLLYGDLRESRFEDGKLPSRKIDALDHFAKCFLILKLYHHKVDKSKWEMPTGSNESEAKSWKAIRVDLVRCPYDRFAFALLGWTGSRMFERDLRRYATHEKKMMLDNHALYDLTKKIFLKAKSEEEIFAHLGLEYLEPSERNA

SEQ ID NO: 731 - DNA, 1587 bp, synthetic construct
  misc_feature 1..1587: note = Variant of terminal deoxynucleotidyltransferase
  source 1..1587: mol_type = other DNA
atgcaccatcatcatcatcatggcggtagcggcatgcaccgtattcgtaccatcgattcggacttcgggaagaaacgccagaagaagatggataaccacattagttccatgatctatgaaatcaaatttcacgagtttgtgctgttcattctcgaagagaaaatgggtgcggcgcgtcgtacttttctgacagatttagcccgcaagaaagggttccgcgtcgagaatgaactgtcagacagcgttacccacatcgtggcagaaaataattcaggatctgacgtattggcttggctgaaggagcacaagatggagaaaacgacgcaatttgaactgctggatattagctggcttatcgaaagcatgaaagttggtaaaccggtggacaccaaggggaaataccagttgatggaatcgcgtgtcgatagtgcgaacccagatccgacagccggtaccctcaacgaactgcctcctactacgaagaccatttctcagtatgcgtgtcaacgccgcaccaccctgaacaaccataatcaacgttttacggacgcactggaaattcttgcggaaaattacgagttcaaacgcaacgatgatacttgtctgacctttatgcgtgctatttccgtgctgaaatgccttccgtttgaggtagttagcctgaaagacacggaaggattgccctggatcggtgatgaagtcaaagggattatggaagaaatcatcgaggtcggtgaatcgctggaagtgcaggccgtgctcaatgatgagcgctatcaaagcttcaaactgtttaagagtgtctttggagtgggggtgaagacagcagacaaatggtaccgtatgggtctgcgcacgctcgaggatgttcgttccagcaagaccctgaagttgaccccgatgcagaaagcgggtctgtgctattatgaagatcttgctgatggcgttacgaaagccgaagctgacgcgatttctctgctggttcaggatgcagtctggactttcgacccggatgcgctggtggagattacgggtggatttcgtcgtgggaaaccttttggtcacgacgttgatctgcttatcacatctccgggagctgagaaagaacaagaagaccagctcctgcagaaagtgaccaatctgtggaagaaacaagggttgttgctgtacggtgacctgcgtgaaagtcgctttgaagatgggaaactcccatcccgcaagatcgatgccctggaccattttgcgaaatgctttctgatcctcaaactttatcaccataaagtggacaaaagcaaatgggaaatgccgacgggttcgaacgaaagcgaggccaaaagttggaaagcaattcgcgtagatctggttcgttgtccctacgatcgttttgcgtttgcgttgttgggttggaccggaagccgcatgttcgaacgtgatctgcgccgctacgccacccacgagaagaagatgatgctggacaatcatgcgctgtatgacctgaccaagaaaatctttctcaaagctaaatcggaagaggaaattttcgcacatctggggcttgaatacctggaaccgtccgaacgtaacgca

SEQ ID NO: 732 - protein, 529 aa, synthetic construct
  REGION 1..529: note = Variant of terminal deoxynucleotidyltransferase
MHHHHHHGGSGMHRIRTIDSDFGKKRQKKMDNHISSMIYEIKFHEFVLFILEEKMGAARRTFLTDLARKKGFRVENELSDSVTHIVAENNSGSDVLAWLKEHKMEKTTQFELLDISWLIESMKVGKPVDTKGKYQLMESRVDSANPDPTAGTLNELPPTTKTISQYACQRRTTLNNHNQRFTDALEILAENYEFKRNDDTCLTFMRAISVLKCLPFEVVSLKDTEGLPWIGDEVKGIMEEIIEVGESLEVQAVLNDERYQSFKLFKSVFGVGVKTADKWYRMGLRTLEDVRSSKTLKLTPMQKAGLCYYEDLADGVTKAEADAISLLVQDAVWTFDPDALVEITGGFRRGKPFGHDVDLLITSPGAEKEQEDQLLQKVTNLWKKQGLLLYGDLRESRFEDGKLPSRKIDALDHFAKCFLILKLYHHKVDKSKWEMPTGSNESEAKSWKAIRVDLVRCPYDRFAFALLGWTGSRMFERDLRRYATHEKKMMLDNHALYDLTKKIFLKAKSEEEIFAHLGLEYLEPSERNA

SEQ ID NO: 733 - DNA, 1587 bp, synthetic construct
  misc_feature 1..1587: note = Variant of terminal deoxynucleotidyltransferase
  source 1..1587: mol_type = other DNA
atgcaccatcatcatcatcatggcggtagcggcagccacggcattcgtaccatcgattcggacttcgggaagaaacgccagaagaagatggataaccacattagttccatgatctatgaaatcaaatttcacgagtttgtgctgttcattctcgaagagaaaatgggtgcgacgcgtcgtacttttctgacagatttagcccgcaagaaagggttccgcgtcgagaatgaactgtcagacagcgttacccacatcgtggcagaaaataattcaggttctgaggtattggcttggctgaagactcacaagatggaggtcacgacgcaatttgaactgctggatattagctggcttatcgaaagcatgaaagttggtaaaccggtggacaccaaggggaaataccagttgatggaatcgcgtgtcgatagtgcgaacccagatccgacagagggtcgtctgaacattctgcctcctactacgaagaccatttctcagtatgcgtgtcaacgccgcaccaccctgaacaaccataatcaacgttttacggacgcactggaaattcttgcggaaaattacgagttcaaacgcaacgatgatacttgtctgacctttatgcgtgctatttccgtgctgaaatgccttccgtttgaggtagttagcctgaaagacacggaaggattgccctggatcggtgatgaagtcaaagggattatggaagaaatcatcgaggtcggtgaatcgctggaagtgcaggccgtgctcaatgatgagcgctatcaaagcttcaaactgtttaagagtgtctttggagtgggggtgaagacagcagacaaatggtaccgtatgggtctgcgcacgctcgaggatgttcgttccagcaagaccctgaagttgaccccgatgcagaaagcgggtctgtgctattatgaagatcttgctgatggcgttacgaaagccgaagctgacgcgatttctctgctggttcaggatgcagtctggactttcgacccggatgcgctggtggagattacgggtggatttcgtcgtgggaaaccttttggtcacgacgttgatctgcttatcacatctccgggagctgagaaagaacaagaagaccagctcctgcagaaagtgaccaatctgtggaagaaacaagggttgttgctgtacggtgacctgcgtgaaagtcgctttgaagatgggaaactcccatcccgcaagatcgatgccctggaccattttgcgaaatgctttctgatcctcaaactttatcaccataaagtggacaaaagcaaatgggaaatgccgacgggttcgaacgaaagcgaggccaaaagttggaaagcaattcgcgtagatctggttcgttgtccctacgatcgttttgcgtttgcgttgttgggttggaccggaagccgcatgttcgaacgtgatctgcgccgctacgccacccacgagaagaagatgatgctggacaatcatgcgctgtatgacctgaccaagaaaatctttctcaaagctaaatcggaagaggaaattttcgcacatctggggcttgaatacctggaaccgtccgaacgtaacgca

SEQ ID NO: 734 - protein, 529 aa, synthetic construct
  REGION 1..529: note = Variant of terminal deoxynucleotidyltransferase
MHHHHHHGGSGSHGIRTIDSDFGKKRQKKMDNHISSMIYEIKFHEFVLFILEEKMGATRRTFLTDLARKKGFRVENELSDSVTHIVAENNSGSEVLAWLKTHKMEVTTQFELLDISWLIESMKVGKPVDTKGKYQLMESRVDSANPDPTEGRLNILPPTTKTISQYACQRRTTLNNHNQRFTDALEILAENYEFKRNDDTCLTFMRAISVLKCLPFEVVSLKDTEGLPWIGDEVKGIMEEIIEVGESLEVQAVLNDERYQSFKLFKSVFGVGVKTADKWYRMGLRTLEDVRSSKTLKLTPMQKAGLCYYEDLADGVTKAEADAISLLVQDAVWTFDPDALVEITGGFRRGKPFGHDVDLLITSPGAEKEQEDQLLQKVTNLWKKQGLLLYGDLRESRFEDGKLPSRKIDALDHFAKCFLILKLYHHKVDKSKWEMPTGSNESEAKSWKAIRVDLVRCPYDRFAFALLGWTGSRMFERDLRRYATHEKKMMLDNHALYDLTKKIFLKAKSEEEIFAHLGLEYLEPSERNA

SEQ ID NO: 735 - DNA, 1587 bp, synthetic construct
  misc_feature 1..1587: note = Variant of terminal deoxynucleotidyltransferase
  source 1..1587: mol_type = other DNA
atgcaccatcatcatcatcatggcggtagcggcagccacggcattcgtaccatcgattcggacttcgggaagaaacgccagaagaagatggataaccacgatagttcctttatctatgaaatcaaatttcacgagtttgtgctgttcattctcgaagagaaaatgggtgcgacgcgtcgtacttttctgacagatttagcccgcaagaaagggttccgcgtcgagaatgaactgtcagacagcgttacccacatcgtggcagaaaataattcaggatctgacgtattggcttggctgaagactcacaagatggaggtcacgacgcaatttgaactgctggatattagctggcttatcgaaagcatgaaagttggtaaaccggtggacaccaaggggaaataccagttgatggaatcgcgtgtcgatagtgcgaacccagatccgacagagggtaccgaaaacattctgcctcctactacgaagaccatttctcagtatgcgtgtcaacgccgcaccaccctgaacaaccataatcaacgttttacggacgcactggaaattcttgcggaaaattacgagttcaaacgcaacgatgatacttgtctgacctttatgcgtgctatttccgtgctgaaatgccttccgtttgaggtagttagcctgaaagacacggaaggattgccctggatcggtgatgaagtcaaagggattatggaagaaatcatcgaggtcggtgaatcgctggaagtgcaggccgtgctcaatgatgagcgctatcaaagcttcaaactgtttaagagtgtctttggagtgggggtgaagacagcagacaaatggtaccgtatgggtctgcgcacgctcgaggatgttcgttccagcaagaccctgaagttgaccccgatgcagaaagcgggtctgtgctattatgaagatcttgctgatggcgttacgaaagccgaagctgacgcgatttctctgctggttcaggatgcagtctggactttcgacccggatgcgctggtggagattacgggtggatttcgtcgtgggaaaccttttggtcacgacgttgatctgcttatcacatctccgggagctgagaaagaacaagaagaccagctcctgcagaaagttaccaatctgtggaagaaacaagggttgttgctgtacggtgacctgcgtgaaagtcgctttgaagatgggaaactcccatcccgcaagatcgatgccctggaccattttgcgaaatgctttctgatcctcaaactttatcaccataaagtggacaaaagcaaatgggaaatgccgacgggttcgaacgaaagcgaggccaaaagttggaaagcaattcgcgtagatctggttcgttgtccctacgatcgttttgcgtttgcgttgttgggttggaccggaagccgcatgttcgaacgtgatctgcgccgctacgccacccacgagaagaagatgatgctggacaatcatgcgctgtatgacctgaccaagaaaatctttctcaaagctaaatcggaagaggaaattttcgcacatctggggcttgaatacctggaaccgtccgaacgtaacgca

SEQ ID NO: 736 - protein, 529 aa, synthetic construct
  REGION 1..529: note = Variant of terminal deoxynucleotidyltransferase
MHHHHHHGGSGSHGIRTIDSDFGKKRQKKMDNHDSSFIYEIKFHEFVLFILEEKMGATRRTFLTDLARKKGFRVENELSDSVTHIVAENNSGSDVLAWLKTHKMEVTTQFELLDISWLIESMKVGKPVDTKGKYQLMESRVDSANPDPTEGTENILPPTTKTISQYACQRRTTLNNHNQRFTDALEILAENYEFKRNDDTCLTFMRAISVLKCLPFEVVSLKDTEGLPWIGDEVKGIMEEIIEVGESLEVQAVLNDERYQSFKLFKSVFGVGVKTADKWYRMGLRTLEDVRSSKTLKLTPMQKAGLCYYEDLADGVTKAEADAISLLVQDAVWTFDPDALVEITGGFRRGKPFGHDVDLLITSPGAEKEQEDQLLQKVTNLWKKQGLLLYGDLRESRFEDGKLPSRKIDALDHFAKCFLILKLYHHKVDKSKWEMPTGSNESEAKSWKAIRVDLVRCPYDRFAFALLGWTGSRMFERDLRRYATHEKKMMLDNHALYDLTKKIFLKAKSEEEIFAHLGLEYLEPSERNA

SEQ ID NO: 737 - DNA, 1587 bp, synthetic construct
  misc_feature 1..1587: note = Variant of terminal deoxynucleotidyltransferase
  source 1..1587: mol_type = other DNA
atgcaccatcatcatcatcatggcggtagcggcatgcaccgtattcgtaccatcgattcggacttcgggaagaaacgccagaagaagatggataaccacattagttccatgatctatgaaatcaaatttcacgagtttgtgctgttcattctcgaagagaaaatgggtgcgacgcgtcgtacttttctgacagatttagcccgcaagaaagggttccgcgtcgagaatgaactgtcagacagcgttacccacatcgtggcagaaaataattcaggatctgacgtattggcttggctgaaggagcacaagatggagaaaacgacgcaatttgaactgctggatattagctggcttatcgaaagcatgaaagttggtaaaccggtggacaccaaggggaaataccagttgatggaatcgcgtgtcgatagtgcgaacccagatccgacagccggtaccctcaacgaagaacctcctactacgaagaccatttctcagtatgcgtgtcaacgccgcaccaccctgaacaaccataatcaacgttttacggacgcactggaaattcttgcggaaaattacgagttcaaacgcaacgatgatacttgtctgacctttatgcgtgctatttccgtgctgaaatgccttccgtttgaggtagttagcctgaaagacacggaaggattgccctggatcggtgatgaagtcaaagggattatggaagaaatcatcgaggtcggtgaatcgctggaagtgcaggccgtgctcaatgatgagcgctatcaaagcttcaaactgtttaagagtgtctttggagtgggggtgaagacagcagacaaatggtaccgtatgggtctgcgcacgctcgaggatgttcgttccagcaagaccctgaagttgaccccgatgcagaaagcgggtctgtgctattatgaagatcttgctgatggcgttacgaaagccgaagctgacgcgatttctctgctggttcaggatgcagtctggactttcgacccggatgcgctggtggagattacgggtggatttcgtcgtgggaaaccttttggtcacgacgttgatctgcttatcacatctccgggagctgagaaagaacaagaagaccagctcctgcagaaagtgaccaatctgtggaagaaacaagggttgttgctgtacggtgacctgcgtgaaagtcgctttgaagatgggaaactcccatcccgcaagatcgatgccctggaccattttgcgaaatgctttctgatcctcaaactttatcaccataaagtggacaaaagcaaatgggaaatgccgacgggttcgaacgaaagcgaggccaaaagttggaaagcaattcgcgtagatctggttcgttgtccctacgatcgttttgcgtttgcgttgttgggttggaccggaagccgcatgttcgaacgtgatctgcgccgctacgccacccacgagaagaagatgatgctggacaatcatgcgctgtatgacctgaccaagaaaatctttctcaaagctaaatcggaagaggaaattttcgcacatctggggcttgaatacctggaaccgtccgaacgtaacgca

SEQ ID NO: 738 - protein, 529 aa, synthetic construct
  REGION 1..529: note = Variant of terminal deoxynucleotidyltransferase
MHHHHHHGGSGMHRIRTIDSDFGKKRQKKMDNHISSMIYEIKFHEFVLFILEEKMGATRRTFLTDLARKKGFRVENELSDSVTHIVAENNSGSDVLAWLKEHKMEKTTQFELLDISWLIESMKVGKPVDTKGKYQLMESRVDSANPDPTAGTLNEEPPTTKTISQYACQRRTTLNNHNQRFTDALEILAENYEFKRNDDTCLTFMRAISVLKCLPFEVVSLKDTEGLPWIGDEVKGIMEEIIEVGESLEVQAVLNDERYQSFKLFKSVFGVGVKTADKWYRMGLRTLEDVRSSKTLKLTPMQKAGLCYYEDLADGVTKAEADAISLLVQDAVWTFDPDALVEITGGFRRGKPFGHDVDLLITSPGAEKEQEDQLLQKVTNLWKKQGLLLYGDLRESRFEDGKLPSRKIDALDHFAKCFLILKLYHHKVDKSKWEMPTGSNESEAKSWKAIRVDLVRCPYDRFAFALLGWTGSRMFERDLRRYATHEKKMMLDNHALYDLTKKIFLKAKSEEEIFAHLGLEYLEPSERNA

SEQ ID NO: 739 - DNA, 1587 bp, synthetic construct
  misc_feature 1..1587: note = Variant of terminal deoxynucleotidyltransferase
  source 1..1587: mol_type = other DNA
atgcaccatcatcatcatcatggcggtagcggcatgcaccgtattcgtaccatcgatagcgacttcgggaagaaacgccagaagaagatggataaccacattagttccatgatctatgaaatcaaatttcacgagtttgtgctgttcattctcgaagagaaaatgggtgcgacgcgtcgtacttttctgacagatttagcccgcaagaaagggttccgcgtcgagaatgaactgtcagacagcgttacccacatcgtggcagaaaataattcaggatctgacgtattggcttggctgaagactcacaagccggagtcgacgacgcaatttgaactgctggatattagctggcttatcgaaagcatgaaagttggtaaaccggtggacaccaaggggaaataccagttgatggaatcgcgtgtcgatagtgcgaacccagatccgacagccggtaccctcaacgaactgcctcctactacgaagaccatttctcagtatgcgtgtcaacgccgcaccaccctgaacaaccataatcaacgttttacggacgcactggaaattcttgcggaaaattacgagttcaaacgcaacgatgatacttgtctgacctttatgcgtgctatttccgtgctgaaatgccttccgtttgaggtagttagcctgaaagacacggaaggattgccctggatcggtgatgaagtcaaagggattatggaagaaatcatcgaggtcggtgaatcgctggaagtgcaggccgtgctcaatgatgagcgctatcaaagcttcaaactgtttaagagtgtctttggagtgggggtgaagacagcagacaaatggtaccgtatgggtctgcgcacgctcgaggatgttcgttccagcaagaccctgaagttgaccccgatgcagaaagcgggtctgtgctattatgaagatcttgctgatggcgttacgaaagccgaagctgacgcgatttctctgctggttcaggatgcagtctggactttcgacccggatgcgctggtggagattacgggtggatttcgtcgtgggaaaccttttggtcacgacgttgatctgcttatcacatctccgggagctgagaaagaacaagaagaccagctcctgcagaaagtgaccaatctgtggaagaaacaagggttgttgctgtacggtgacctgcgtgaaagtcgctttgaagatgggaaactcccatcccgcaagatcgatgccctggaccattttgcgaaatgctttctgatcctcaaactttatcaccataaagtggacaaaagcaaatgggaaatgccgacgggttcgaacgaaagcgaggccaaaagttggaaagcaattcgcgtagatctggttcgttgtccctacgatcgttttgcgtttgcgttgttgggttggaccggaagccgcatgttcgaacgtgatctgcgccgctacgccacccacgagaagaagatgatgctggacaatcatgcgctgtatgacctgaccaagaaaatctttctcaaagctaaatcggaagaggaaattttcgcacatctggggcttgaatacctggaaccgtccgaacgtaacgca

SEQ ID NO: 740 - protein, 529 aa, synthetic construct
  REGION 1..529: note = Variant of terminal deoxynucleotidyltransferase
MHHHHHHGGSGMHRIRTIDSDFGKKRQKKMDNHISSMIYEIKFHEFVLFILEEKMGATRRTFLTDLARKKGFRVENELSDSVTHIVAENNSGSDVLAWLKTHKPESTTQFELLDISWLIESMKVGKPVDTKGKYQLMESRVDSANPDPTAGTLNELPPTTKTISQYACQRRTTLNNHNQRFTDALEILAENYEFKRNDDTCLTFMRAISVLKCLPFEVVSLKDTEGLPWIGDEVKGIMEEIIEVGESLEVQAVLNDERYQSFKLFKSVFGVGVKTADKWYRMGLRTLEDVRSSKTLKLTPMQKAGLCYYEDLADGVTKAEADAISLLVQDAVWTFDPDALVEITGGFRRGKPFGHDVDLLITSPGAEKEQEDQLLQKVTNLWKKQGLLLYGDLRESRFEDGKLPSRKIDALDHFAKCFLILKLYHHKVDKSKWEMPTGSNESEAKSWKAIRVDLVRCPYDRFAFALLGWTGSRMFERDLRRYATHEKKMMLDNHALYDLTKKIFLKAKSEEEIFAHLGLEYLEPSERNA

SEQ ID NO: 741 - DNA, 1587 bp, synthetic construct
  misc_feature 1..1587: note = Variant of terminal deoxynucleotidyltransferase
  source 1..1587: mol_type = other DNA
atgcaccatcatcatcatcatggcggtagcggcatgcaccgtattcgtaccatcgattcggacttcgggaagaaacgccagaagaagggtgataaccacattagttccatgatctatgaaatcaaatttcacgagtttgtgctgttcattctcgaagagaaaatgggtgcgacgcgtcgtacttttctgacagatttagcccgcaagaaagggttccgcgtcgagaatgaactgtcagacagcgttacccacatcgtggcagaaaataattcaggatctgacgtattggcttggctgaagactcacaagccggagtcgacgacgcaatttgaactgctggatattagctggcttatcgaaagcatgaaagttggtaaaccggtggacaccaaggggaaataccagttgatggaatcgcgtgtcgatagtgcgaacccagatccgacagccggtaccctcaacgaactgcctcctactacgaagaccatttctcagtatgcgtgtcaacgccgcaccaccctgaacaaccataatcaacgttttacggacgcactggaaattcttgcggaaaattacgagttcaaacgcaacgatgatacttgtctgacctttatgcgtgctatttccgtgctgaaatgccttccgtttgaggtagttagcctgaaagacacggaaggattgccctggatcggtgatgaagtcaaagggattatggaagaaatcatcgaggtcggtgaatcgctggaagtgcaggccgtgctcaatgatgagcgctatcaaagcttcaaactgtttaagagtgtctttggagtgggggtgaagacagcagacaaatggtaccgtatgggtctgcgcacgctcgaggatgttcgttccagcaagaccctgaagttgaccccgatgcagaaagcgggtctgtgctattatgaagatcttgctgatggcgttacgaaagccgaagctgacgcgatttctctgctggttcaggatgcagtctggactttcgacccggatgcgctggtggagattacgggtggatttcgtcgtgggaaaccttttggtcacgacgttgatctgcttatcacatctccgggagctgagaaagaacaagaagaccagctcctgcagaaagtgaccaatctgtggaagaaacaagggttgttgctgtacggtgacctgcgtgaaagtcgctttgaagatgggaaactcccatcccgcaagatcgatgccctggaccattttgcgaaatgctttctgatcctcaaactttatcaccataaagtggacaaaagcaaatgggaaatgccgacgggttcgaacgaaagcgaggccaaaagttggaaagcaattcgcgtagatctggttcgttgtccctacgatcgttttgcgtttgcgttgttgggttggaccggaagccgcatgttcgaacgtgatctgcgccgctacgccacccacgagaagaagatgatgctggacaatcatgcgctgtatgacctgaccaagaaaatctttctcaaagctaaatcggaagaggaaattttcgcacatctggggcttgaatacctggaaccgtccgaacgtaacgca

SEQ ID NO: 742 - protein, 529 aa, synthetic construct
  REGION 1..529: note = Variant of terminal deoxynucleotidyltransferase
MHHHHHHGGSGMHRIRTIDSDFGKKRQKKGDNHISSMIYEIKFHEFVLFILEEKMGATRRTFLTDLARKKGFRVENELSDSVTHIVAENNSGSDVLAWLKTHKPESTTQFELLDISWLIESMKVGKPVDTKGKYQLMESRVDSANPDPTAGTLNELPPTTKTISQYACQRRTTLNNHNQRFTDALEILAENYEFKRNDDTCLTFMRAISVLKCLPFEVVSLKDTEGLPWIGDEVKGIMEEIIEVGESLEVQAVLNDERYQSFKLFKSVFGVGVKTADKWYRMGLRTLEDVRSSKTLKLTPMQKAGLCYYEDLADGVTKAEADAISLLVQDAVWTFDPDALVEITGGFRRGKPFGHDVDLLITSPGAEKEQEDQLLQKVTNLWKKQGLLLYGDLRESRFEDGKLPSRKIDALDHFAKCFLILKLYHHKVDKSKWEMPTGSNESEAKSWKAIRVDLVRCPYDRFAFALLGWTGSRMFERDLRRYATHEKKMMLDNHALYDLTKKIFLKAKSEEEIFAHLGLEYLEPSERNA

SEQ ID NO: 743 - DNA, 1587 bp, synthetic construct
  misc_feature 1..1587: note = Variant of terminal deoxynucleotidyltransferase
  source 1..1587: mol_type = other DNA
atgcaccatcatcatcatcatggcggtagcggcagccacggcattcgtaccatcgattcggacttcgggaagaaacgccagaagaagatggataaccacagtagttccgccatctatgaaatcaaatttcacgagtttgtgctgttcattctcgaagagaaaatgggtgcgacgcgtcgtacttttctgacagatttagcccgcaagaaagggttccgcgtcgagaatgaactgtcagacagcgttacccacatcgtggcagaaaataattcaggatctgacgtattggcttggctgaagactcacaagatggaggtcacgacgcaatttgaactgctggatattagctggcttatcgaaagcatgaaagttggtaaaccggtggacaccaaggggaaataccagttgatggaatcgcgtgtgatgagtgcgaacccagatccgacagccggtaccctcaacattctgcctcctactacggagactatttctcagtatgcgtgtcaacgccgcaccaccctgaacaaccataatcaacgttttacggacgcactggaaattcttgcggaaaattacgagttcaaacgcaacgatgatacttgtctgacctttatgcgtgctatttccgtgctgaaatgccttccgtttgaggtagttagcctgaaagacacggaaggattgccctggatcggtgatgaagtcaaagggattatggaagaaatcatcgaggtcggtgaatcgctggaagtgcaggccgtgctcaatgatgagcgctatcaaagcttcaaactgtttaagagtgtctttggagtgggggtgaagacagcagacaaatggtaccgtatgggtctgcgcacgctcgaggatgttcgttccagcaagaccctgaagttgaccccgatgcagaaagcgggtctgtgctattatgaagatcttgctgatggcgttacgaaagccgaagctgacgcgatttctctgctggttcaggatgcagtctggactttcgacccggatgcgctggtggagattacgggtggatttcgtcgtgggaaaccttttggtcacgacgttgatctgcttatcacatctccgggagctgagaaagaacaagaagaccagctcctgcagaaagtgaccaatctgtggaagaaacaagggttgttgctgtacggtgacctgcgtgaaagtcgctttgaagatgggaaactcccatcccgcaagatcgatgccctggaccattttgcgaaatgctttctgatcctcaaactttatcaccataaagtggacaaaagcaaatgggaaatgccgacgggttcgaacgaaagcgaggccaaaagttggaaagcaattcgcgtagatctggttcgttgtccctacgatcgttttgcgtttgcgttgttgggttggaccggaagccgcatgttcgaacgtgatctgcgccgctacgccacccacgagaagaagatgatgctggacaatcatgcgctgtatgacctgaccaagaaaatctttctcaaagctaaatcggaagaggaaattttcgcacatctggggcttgaatacctggaaccgtccgaacgtaacgca

SEQ ID NO: 744 - protein, 529 aa, synthetic construct
  REGION 1..529: note = Variant of terminal deoxynucleotidyltransferase
MHHHHHHGGSGSHGIRTIDSDFGKKRQKKMDNHSSSAIYEIKFHEFVLFILEEKMGATRRTFLTDLARKKGFRVENELSDSVTHIVAENNSGSDVLAWLKTHKMEVTTQFELLDISWLIESMKVGKPVDTKGKYQLMESRVMSANPDPTAGTLNILPPTTETISQYACQRRTTLNNHNQRFTDALEILAENYEFKRNDDTCLTFMRAISVLKCLPFEVVSLKDTEGLPWIGDEVKGIMEEIIEVGESLEVQAVLNDERYQSFKLFKSVFGVGVKTADKWYRMGLRTLEDVRSSKTLKLTPMQKAGLCYYEDLADGVTKAEADAISLLVQDAVWTFDPDALVEITGGFRRGKPFGHDVDLLITSPGAEKEQEDQLLQKVTNLWKKQGLLLYGDLRESRFEDGKLPSRKIDALDHFAKCFLILKLYHHKVDKSKWEMPTGSNESEAKSWKAIRVDLVRCPYDRFAFALLGWTGSRMFERDLRRYATHEKKMMLDNHALYDLTKKIFLKAKSEEEIFAHLGLEYLEPSERNA

SEQ ID NO: 745 - DNA, 1587 bp, synthetic construct
  misc_feature 1..1587: note = Variant of terminal deoxynucleotidyltransferase
  source 1..1587: mol_type = other DNA
atgcaccatcatcatcatcatggcggtagcggcatgcaccgtattcgtaccatcgattcggacttcgggaagaaacgccagaagaagggtgataaccacattagttccatgatctatgaaatcaaatttcacgagtttgtgctgttcattctcgaagagaaaatgggtgcgacgcgtcgtacttttctgacagatttagcccgcaagaaagggttccgcgtcgagaatgaactgtcagacagcgttacccacatcgtggcagaaaataattcaggatctgacgtattggcttggctgaagactcacaagatggagaaaacgacgcaatttgaactgctggatattagctggcttatcgaaagcatgaaagttggtaaaccggtggacaccaaggggaaataccagttgatggaatcgcgtgtcgatagtgcgaacccagatccgacagccggtaccctcaacgaactgcctcctactacgaagaccatttctcagtatgcgtgtcaacgccgcaccaccctgaacaaccataatcaacgttttacggacgcactggaaattcttgcggaaaattacgagttcaaacgcaacgatgatacttgtctgacctttatgcgtgctatttccgtgctgaaatgccttccgtttgaggtagttagcctgaaagacacggaaggattgccctggatcggtgatgaagtcaaagggattatggaagaaatcatcgaggtcggtgaatcgctggaagtgcaggccgtgctcaatgatgagcgctatcaaagcttcaaactgtttaagagtgtctttggagtgggggtgaagacagcagacaaatggtaccgtatgggtctgcgcacgctcgaggatgttcgttccagcaagaccctgaagttgaccccgatgcagaaagcgggtctgtgctattatgaagatcttgctgatggcgttacgaaagccgaagctgacgcgatttctctgctggttcaggatgcagtctggactttcgacccggatgcgctggtggagattacgggtggatttcgtcgtgggaaaccttttggtcacgacgttgatctgcttatcacatctccgggagctgagaaagaacaagaagaccagctcctgcagaaagtgaccaatctgtggaagaaacaagggttgttgctgtacggtgacctgcgtgaaagtcgctttgaagatgggaaactcccatcccgcaagatcgatgccctggaccattttgcgaaatgctttctgatcctcaaactttatcaccataaagtggacaaaagcaaatgggaaatgccgacgggttcgaacgaaagcgaggccaaaagttggaaagcaattcgcgtagatctggttcgttgtccctacgatcgttttgcgtttgcgttgttgggttggaccggaagccgcatgttcgaacgtgatctgcgccgctacgccacccacgagaagaagatgatgctggacaatcatgcgctgtatgacctgaccaagaaaatctttctcaaagctaaatcggaagaggaaattttcgcacatctggggcttgaatacctggaaccgtccgaacgtaacgca

SEQ ID NO: 746 - protein, 529 aa, synthetic construct
  REGION 1..529: note = Variant of terminal deoxynucleotidyltransferase
MHHHHHHGGSGMHRIRTIDSDFGKKRQKKGDNHISSMIYEIKFHEFVLFILEEKMGATRRTFLTDLARKKGFRVENELSDSVTHIVAENNSGSDVLAWLKTHKMEKTTQFELLDISWLIESMKVGKPVDTKGKYQLMESRVDSANPDPTAGTLNELPPTTKTISQYACQRRTTLNNHNQRFTDALEILAENYEFKRNDDTCLTFMRAISVLKCLPFEVVSLKDTEGLPWIGDEVKGIMEEIIEVGESLEVQAVLNDERYQSFKLFKSVFGVGVKTADKWYRMGLRTLEDVRSSKTLKLTPMQKAGLCYYEDLADGVTKAEADAISLLVQDAVWTFDPDALVEITGGFRRGKPFGHDVDLLITSPGAEKEQEDQLLQKVTNLWKKQGLLLYGDLRESRFEDGKLPSRKIDALDHFAKCFLILKLYHHKVDKSKWEMPTGSNESEAKSWKAIRVDLVRCPYDRFAFALLGWTGSRMFERDLRRYATHEKKMMLDNHALYDLTKKIFLKAKSEEEIFAHLGLEYLEPSERNA

SEQ ID NO: 747 - DNA, 1587 bp, synthetic construct
  misc_feature 1..1587: note = Variant of terminal deoxynucleotidyltransferase
  source 1..1587: mol_type = other DNA
atgcaccatcatcatcatcatggcggtagcggcagccacggcattcgtaccatcgattcggacttcgggaagaaacgccagaagaagatggataaccacattagttccatgatctatgaaatcaaatttcacgagtttgtgctgttcattctcgaagagaaaatgggtgcgacgcgtcgtacttttctgacagatttagcccgcaagaaagggttccgcgtcgagaatgaactgtcagacagcgttacccacatcgtggcagaaaataattcaggatctgacgtattggcttggctgaagactcacaagatggaggtcacgacgcaatttgaactgctggatattagctggcttatcgaaagcatgaaagttggtaaaccggtggacaccaaggggaaataccagttgatggaatcgcgtgtcgatagtgcgaacccagatccgacagagggtcgtgaaaacattctgcctcctactacgaagaccatttctcagtatgcgtgtcaacgccgcaccaccctgaacaaccataatcaacgttttacggacgcactggaaattcttgcggaaaattacgagttcaaacgcaacgatgatacttgtctgacctttatgcgtgctatttccgtgctgaaatgccttccgtttgaggtagttagcctgaaagacacggaaggattgccctggatcggtgatgaagtcaaagggattatggaagaaatcatcgaggtcggtgaatcgctggaagtgcaggccgtgctcaatgatgagcgctatcaaagcttcaaactgtttaagagtgtctttggagtgggggtgaagacagcagacaaatggtaccgtatgggtctgcgcacgctcgaggatgttcgttccagcaagaccctgaagttgaccccgatgcagaaagcgggtctgtgctattatgaagatcttgctgatggcgttacgaaagccgaagctgacgcgatttctctgctggttcaggatgcagtctggactttcgacccggatgcgctggtggagattacgggtggatttcgtcgtgggaaaccttttggtcacgacgttgatctgcttatcacatctccgggagctgagaaagaacaagaagaccagctcctgcagaaagtgaccaatctgtggaagaaacaagggttgttgctgtacggtgacctgcgtgaaagtcgctttgaagatgggaaactcccatcccgcaagatcgatgccctggaccattttgcgaaatgctttctgatcctcaaactttatcaccataaagtggacaaaagcaaatgggaaatgccgacgggttcgaacgaaagcgaggccaaaagttggaaagcaattcgcgtagatctggttcgttgtccctacgatcgttttgcgtttgcgttgttgggttggaccggaagccgcatgttcgaacgtgatctgcgccgctacgccacccacgagaagaagatgatgctggacaatcatgcgctgtatgacctgaccaagaaaatctttctcaaagctaaatcggaagaggaaattttcgcacatctggggcttgaatacctggaaccgtccgaacgtaacgca

SEQ ID NO: 748 - protein, 529 aa, synthetic construct
  REGION 1..529: note = Variant of terminal deoxynucleotidyltransferase
MHHHHHHGGSGSHGIRTIDSDFGKKRQKKMDNHISSMIYEIKFHEFVLFILEEKMGATRRTFLTDLARKKGFRVENELSDSVTHIVAENNSGSDVLAWLKTHKMEVTTQFELLDISWLIESMKVGKPVDTKGKYQLMESRVDSANPDPTEGRENILPPTTKTISQYACQRRTTLNNHNQRFTDALEILAENYEFKRNDDTCLTFMRAISVLKCLPFEVVSLKDTEGLPWIGDEVKGIMEEIIEVGESLEVQAVLNDERYQSFKLFKSVFGVGVKTADKWYRMGLRTLEDVRSSKTLKLTPMQKAGLCYYEDLADGVTKAEADAISLLVQDAVWTFDPDALVEITGGFRRGKPFGHDVDLLITSPGAEKEQEDQLLQKVTNLWKKQGLLLYGDLRESRFEDGKLPSRKIDALDHFAKCFLILKLYHHKVDKSKWEMPTGSNESEAKSWKAIRVDLVRCPYDRFAFALLGWTGSRMFERDLRRYATHEKKMMLDNHALYDLTKKIFLKAKSEEEIFAHLGLEYLEPSERNA

SEQ ID NO: 749 - DNA, 1587 bp, synthetic construct
  misc_feature 1..1587: note = Variant of terminal deoxynucleotidyltransferase
  source 1..1587: mol_type = other DNA
atgcaccatcatcatcatcatggcggtagcggcatgcaccgtattcgtaccatcgataccgacttcgggaagaaacgccagaagaagatggataaccacattagttccatgatctatgaaatcaaatttcacgagtttgtgctgttcattctcgaagagaaaatgggtgcgtcgcgtcgtacttttctgacagatttagcccgcaagaaagggttccgcgtcgagaatgaactgtcagacagcgttacccacatcgtggcagaaaataattcaggatctgacgtattggcttggctgaaggagcacaagccggagtcgacgacgcaatttgaactgctggatattagctggcttatcgaaagcatgaaagttggtaaaccggtggacaccaaggggaaataccagttgatggaatcgcgtgtcgatagtgcgaacccagatccgacagccggtaccctcaacatcgaacctcctactacgaagaccatttctcagtatgcgtgtcaacgccgcaccaccctgaacaaccataatcaacgttttacggacgcactggaaattcttgcggaaaattacgagttcaaacgcaacgatgatacttgtctgacctttatgcgtgctatttccgtgctgaaatgccttccgtttgaggtagttagcctgaaagacacggaaggattgccctggatcggtgatgaagtcaaagggattatggaagaaatcatcgaggtcggtgaatcgctggaagtgcaggccgtgctcaatgatgagcgctatcaaagcttcaaactgtttaagagtgtctttggagtgggggtgaagacagcagacaaatggtaccgtatgggtctgcgcacgctcgaggatgttcgttccagcaagaccctgaagttgaccccgatgcagaaagcgggtctgtgctattatgaagatcttgctgatggcgttacgaaagccgaagctgacgcgatttctctgctggttcaggatgcagtctggactttcgacccggatgcgctggtggagattacgggtggatttcgtcgtgggaaaccttttggtcacgacgttgatctgcttatcacatctccgggagctgagaaagaacaagaagaccagctcctgcagaaagtgaccaatctgtggaagaaacaagggttgttgctgtacggtgacctgcgtgaaagtcgctttgaagatgggaaactcccatcccgcaagatcgatgccctggaccattttgcgaaatgctttctgatcctcaaactttatcaccataaagtggacaaaagcaaatgggaaatgccgacgggttcgaacgaaagcgaggccaaaagttggaaagcaattcgcgtagatctggttcgttgtccctacgatcgttttgcgtttgcgttgttgggttggaccggaagccgcatgttcgaacgtgatctgcgccgctacgccacccacgagaagaagatgatgctggacaatcatgcgctgtatgacctgaccaagaaaatctttctcaaagctaaatcggaagaggaaattttcgcacatctggggcttgaatacctggaaccgtccgaacgtaacgca

SEQ ID NO: 750 - protein, 529 aa, synthetic construct
  REGION 1..529: note = Variant of terminal deoxynucleotidyltransferase
MHHHHHHGGSGMHRIRTIDTDFGKKRQKKMDNHISSMIYEIKFHEFVLFILEEKMGASRRTFLTDLARKKGFRVENELSDSVTHIVAENNSGSDVLAWLKEHKPESTTQFELLDISWLIESMKVGKPVDTKGKYQLMESRVDSANPDPTAGTLNIEPPTTKTISQYACQRRTTLNNHNQRFTDALEILAENYEFKRNDDTCLTFMRAISVLKCLPFEVVSLKDTEGLPWIGDEVKGIMEEIIEVGESLEVQAVLNDERYQSFKLFKSVFGVGVKTADKWYRMGLRTLEDVRSSKTLKLTPMQKAGLCYYEDLADGVTKAEADAISLLVQDAVWTFDPDALVEITGGFRRGKPFGHDVDLLITSPGAEKEQEDQLLQKVTNLWKKQGLLLYGDLRESRFEDGKLPSRKIDALDHFAKCFLILKLYHHKVDKSKWEMPTGSNESEAKSWKAIRVDLVRCPYDRFAFALLGWTGSRMFERDLRRYATHEKKMMLDNHALYDLTKKIFLKAKSEEEIFAHLGLEYLEPSERNA

SEQ ID NO: 751 - DNA, 1587 bp, synthetic construct
  misc_feature 1..1587: note = Variant of terminal deoxynucleotidyltransferase
  source 1..1587: mol_type = other DNA
atgcaccatcatcatcatcatggcggtagcggcatgcaccgtattcgtaccatcgattcggacttcgggaagaaacgccagaagaagggtgataacaagattagttccatgatctatgaaatcaaatttcacgagtttgtgctgttcattctcgaagagaaaatgggtgcgtcgcgtcgtacttttctgacagatttagcccgcaagaaagggttccgcgtcgagaatgaactgtcagacagcgttacccacatcgtggcagaaaataattcaggatctgacgtattggcttggctgaagactcacaagccggagtcgacgacgcaatttgaactgctggatattagctggcttatcgaaagcatgaaagtaggtaaaccggtggacaccaaggggaaataccagttgatggaatcgcgtgtcgatagtgcgaacccagatccgacagccggtaccctcaacgaagaacctcctactacgaagaccatttctcagtatgcgtgtcaacgccgcaccaccctgaacaaccataatcaacgttttacggacgcactggaaattcttgcggaaaattacgagttcaaacgcaacgatgatacttgtctgacctttatgcgtgctatttccgtgctgaaatgccttccgtttgaggtagttagcctgaaagacacggaaggattgccctggatcggtgatgaagtcaaagggattatggaagaaatcatcgaggtcggtgaatcgctggaagtgcaggccgtgctcaatgatgagcgctatcaaagcttcaaactgtttaagagtgtctttggagtgggggtgaagacagcagacaaatggtaccgtatgggtctgcgcacgctcgaggatgttcgttccagcaagaccctgaagttgaccccgatgcagaaagcgggtctgtgctattatgaagatcttgctgatggcgttacgaaagccgaagctgacgcgatttctctgctggttcaggatgcagtctggactttcgacccggatgcgctggtggagattacgggtggatttcgtcgtgggaaaccttttggtcacgacgttgatctgcttatcacatctccgggagctgagaaagaacaagaagaccagctcctgcagaaagtgaccaatctgtggaagaaacaagggttgttgctgtacggtgacctgcgtgaaagtcgctttgaagatgggaaactcccatcccgcaagatcgatgccctggaccattttgcgaaatgctttctgatcctcaaactttatcaccataaagtggacaaaagcaaatgggaaatgccgacgggttcgaacgaaagcgaggccaaaagttggaaagcaattcgcgtagatctggttcgttgtccctacgatcgttttgcgtttgcgttgttgggttggaccggaagccgcatgttcgaacgtgatctgcgccgctacgccacccacgagaagaagatgatgctggacaatcatgcgctgtatgacctgaccaagaaaatctttctcaaagctaaatcggaagaggaaattttcgcacatctggggcttgaatacctggaaccgtccgaacgtaacgca

SEQ ID NO: 752 - protein, 529 aa, synthetic construct
  REGION 1..529: note = Variant of terminal deoxynucleotidyltransferase
MHHHHHHGGSGMHRIRTIDSDFGKKRQKKGDNKISSMIYEIKFHEFVLFILEEKMGASRRTFLTDLARKKGFRVENELSDSVTHIVAENNSGSDVLAWLKTHKPESTTQFELLDISWLIESMKVGKPVDTKGKYQLMESRVDSANPDPTAGTLNEEPPTTKTISQYACQRRTTLNNHNQRFTDALEILAENYEFKRNDDTCLTFMRAISVLKCLPFEVVSLKDTEGLPWIGDEVKGIMEEIIEVGESLEVQAVLNDERYQSFKLFKSVFGVGVKTADKWYRMGLRTLEDVRSSKTLKLTPMQKAGLCYYEDLADGVTKAEADAISLLVQDAVWTFDPDALVEITGGFRRGKPFGHDVDLLITSPGAEKEQEDQLLQKVTNLWKKQGLLLYGDLRESRFEDGKLPSRKIDALDHFAKCFLILKLYHHKVDKSKWEMPTGSNESEAKSWKAIRVDLVRCPYDRFAFALLGWTGSRMFERDLRRYATHEKKMMLDNHALYDLTKKIFLKAKSEEEIFAHLGLEYLEPSERNA

SEQ ID NO: 753 - DNA, 1587 bp, synthetic construct
  misc_feature 1..1587: note = Variant of terminal deoxynucleotidyltransferase
  source 1..1587: mol_type = other DNA
atgcaccatcatcatcatcatggcggtagcggcatgcaccgtattcgtaccatcgattcggacttcgggaagaaacgccagaagaagatggataaccacattagttccatgatctatgaaatcaaatttcacgagtttgtgctgttcattctcgaagagaaaatgggtgcgacgcgtcgtacttttctgacagatttagcccgcaagaaagggttccgcgtcgagaatgaactgtcagacagcgttacccacatcgtggcagaaaataattcaggatctgacgtattggcttggctgaaggagcacaagatggagaaaacgacgcaatttgaactgctggatattagctggcttatcgaaagcatgaaagttggtaaaccggtggacaccaaggggaaataccagttgatggaatcgcgtgtcgatagtgcgaacccagatccgacagccggtaccctcaacatcctgcctcctactacgaagaccatttctcagtatgcgtgtcaacgccgcaccaccctgaacaaccataatcaacgttttacggacgcactggaaattcttgcggaaaattacgagttcaaacgcaacgatgatacttgtctgacctttatgcgtgctatttccgtgctgaaatgccttccgtttgaggtagttagcctgaaagacacggaaggattgccctggatcggtgatgaagtcaaagggattatggaagaaatcatcgaggtcggtgaatcgctggaagtgcaggccgtgctcaatgatgagcgctatcaaagcttcaaactgtttaagagtgtctttggagtgggggtgaagacagcagacaaatggtaccgtatgggtctgcgcacgctcgaggatgttcgttccagcaagaccctgaagttgaccccgatgcagaaagcgggtctgtgctattatgaagatcttgctgatggcgttacgaaagccgaagctgacgcgatttctctgctggttcaggatgcagtctggactttcgacccggatgcgctggtggagattacgggtggatttcgtcgtgggaaaccttttggtcacgacgttgatctgcttatcacatctccgggagctgagaaagaacaagaagaccagctcctgcagaaagtgaccaatctgtggaagaaacaagggttgttgctgtacggtgacctgcgtgaaagtcgctttgaagatgggaaactcccatcccgcaagatcgatgccctggaccattttgcgaaatgctttctgatcctcaaactttatcaccataaagtggacaaaagcaaatgggaaatgccgacgggttcgaacgaaagcgaggccaaaagttggaaagcaattcgcgtagatctggttcgttgtccctacgatcgttttgcgtttgcgttgttgggttggaccggaagccgcatgttcgaacgtgatctgcgccgctacgccacccacgagaagaagatgatgctggacaatcatgcgctgtatgacctgaccaagaaaatctttctcaaagctaaatcggaagaggaaattttcgcacatctggggcttgaatacctggaaccgtccgaacgtaacgca

SEQ ID NO: 754 - protein, 529 aa, synthetic construct
  REGION 1..529: note = Variant of terminal deoxynucleotidyltransferase
MHHHHHHGGSGMHRIRTIDSDFGKKRQKKMDNHISSMIYEIKFHEFVLFILEEKMGATRRTFLTDLARKKGFRVENELSDSVTHIVAENNSGSDVLAWLKEHKMEKTTQFELLDISWLIESMKVGKPVDTKGKYQLMESRVDSANPDPTAGTLNILPPTTKTISQYACQRRTTLNNHNQRFTDALEILAENYEFKRNDDTCLTFMRAISVLKCLPFEVVSLKDTEGLPWIGDEVKGIMEEIIEVGESLEVQAVLNDERYQSFKLFKSVFGVGVKTADKWYRMGLRTLEDVRSSKTLKLTPMQKAGLCYYEDLADGVTKAEADAISLLVQDAVWTFDPDALVEITGGFRRGKPFGHDVDLLITSPGAEKEQEDQLLQKVTNLWKKQGLLLYGDLRESRFEDGKLPSRKIDALDHFAKCFLILKLYHHKVDKSKWEMPTGSNESEAKSWKAIRVDLVRCPYDRFAFALLGWTGSRMFERDLRRYATHEKKMMLDNHALYDLTKKIFLKAKSEEEIFAHLGLEYLEPSERNA

SEQ ID NO: 755 - DNA, 1587 bp, synthetic construct
  misc_feature 1..1587: note = Variant of terminal deoxynucleotidyltransferase
  source 1..1587: mol_type = other DNA
atgcaccatcatcatcatcatggcggtagcggcatgcaccgtattcgtaccatcgattcggacttcgggaagaaacgccagaagaagatggataaccacattagttccatgatctatgaaatcaaatttcacgagtttgtgctgttcattctcgaagagaaaatgggtgcgacgcgtcgtacttttctgacagatttagcccgcaagaaagggttccgcgtcgagaatgaactgtcagacagcgttacccacatcgtggcagaaaataattcaggatctgacgtattggcttggctgaagactcacaagccggagaaaacgacgcaatttgaactgctggatattagctggcttatcgaaagcatgaaagttggtaaaccggtggacaccaaggggaaataccagttgatggaatcgcgtgtcgatagtgcgaacccagatccgacagccggtaccctcaacgaactgcctcctactacgaagaccatttctcagtatgcgtgtcaacgccgcaccaccctgaacaaccataatcaacgttttacggacgcactggaaattcttgcggaaaattacgagttcaaacgcaacgatgatacttgtctgacctttatgcgtgctatttccgtgctgaaatgccttccgtttgaggtagttagcctgaaagacacggaaggattgccctggatcggtgatgaagtcaaagggattatggaagaaatcatcgaggtcggtgaatcgctggaagtgcaggccgtgctcaatgatgagcgctatcaaagcttcaaactgtttaagagtgtctttggagtgggggtgaagacagcagacaaatggtaccgtatgggtctgcgcacgctcgaggatgttcgttccagcaagaccctgaagttgaccccgatgcagaaagcgggtctgtgctattatgaagatcttgctgatggcgttacgaaagccgaagctgacgcgatttctctgctggttcaggatgcagtctggactttcgacccggatgcgctggtggagattacgggtggatttcgtcgtgggaaaccttttggtcacgacgttgatctgcttatcacatctccgggagctgagaaagaacaagaagaccagctcctgcagaaagtgaccaatctgtggaagaaacaagggttgttgctgtacggtgacctgcgtgaaagtcgctttgaagatgggaaactcccatcccgcaagatcgatgccctggaccattttgcgaaatgctttctgatcctcaaactttatcaccataaagtggacaaaagcaaatgggaaatgccgacgggttcgaacgaaagcgaggccaaaagttggaaagcaattcgcgtagatctggttcgttgtccctacgatcgttttgcgtttgcgttgttgggttggaccggaagccgcatgttcgaacgtgatctgcgccgctacgccacccacgagaagaagatgatgctggacaatcatgcgctgtatgacctgaccaagaaaatctttctcaaagctaaatcggaagaggaaattttcgcacatctggggcttgaatacctggaaccgtccgaacgtaacgca

SEQ ID NO: 756 - protein, 529 aa, synthetic construct
  REGION 1..529: note = Variant of terminal deoxynucleotidyltransferase
MHHHHHHGGSGMHRIRTIDSDFGKKRQKKMDNHISSMIYEIKFHEFVLFILEEKMGATRRTFLTDLARKKGFRVENELSDSVTHIVAENNSGSDVLAWLKTHKPEKTTQFELLDISWLIESMKVGKPVDTKGKYQLMESRVDSANPDPTAGTLNELPPTTKTISQYACQRRTTLNNHNQRFTDALEILAENYEFKRNDDTCLTFMRAISVLKCLPFEVVSLKDTEGLPWIGDEVKGIMEEIIEVGESLEVQAVLNDERYQSFKLFKSVFGVGVKTADKWYRMGLRTLEDVRSSKTLKLTPMQKAGLCYYEDLADGVTKAEADAISLLVQDAVWTFDPDALVEITGGFRRGKPFGHDVDLLITSPGAEKEQEDQLLQKVTNLWKKQGLLLYGDLRESRFEDGKLPSRKIDALDHFAKCFLILKLYHHKVDKSKWEMPTGSNESEAKSWKAIRVDLVRCPYDRFAFALLGWTGSRMFERDLRRYATHEKKMMLDNHALYDLTKKIFLKAKSEEEIFAHLGLEYLEPSERNA

SEQ ID NO: 757 - DNA, 1587 bp, synthetic construct
  misc_feature 1..1587: note = Variant of terminal deoxynucleotidyltransferase
  source 1..1587: mol_type = other DNA
atgcaccatcatcatcatcatggcggtagcggcatgcaccgtattcgtaccatcgattcggacttcgggaagaaacgccagaagaagggtgataacaagattagttccatgatctatgaaatcaaatttcacgagtttgtgctgttcattctcgaagagaaaatgggtgcgacgcgtcgtacttttctgacagatttagcccgcaagaaagggttccgcgtcgagaatgaactgtcagacagcgttacccacatcgtggcagaaaataattcaggatctgacgtattggcttggctgaagactcacaagatcgagtcgacgacgcaatttgaactgctggatattagctggcttatcgaaagcatgaaagttggtaaaccggtggacaccaaggggaaataccagttgatggaatcgcgtgtcgatagtgcgaacccagatccgacagccggtaccctcaacgaagaacctcctactacgaagaccatttctcagtatgcgtgtcaacgccgcaccaccctgaacaaccataatcaacgttttacggacgcactggaaattcttgcggaaaattacgagttcaaacgcaacgatgatacttgtctgacctttatgcgtgctatttccgtgctgaaatgccttccgtttgaggtagttagcctgaaagacacggaaggattgccctggatcggtgatgaagtcaaagggattatggaagaaatcatcgaggtcggtgaatcgctggaagtgcaggccgtgctcaatgatgagcgctatcaaagcttcaaactgtttaagagtgtctttggagtgggggtgaagacagcagacaaatggtaccgtatgggtctgcgcacgctcgaggatgttcgttccagcaagaccctgaagttgaccccgatgcagaaagcgggtctgtgctattatgaagatcttgctgatggcgttacgaaagccgaagctgacgcgatttctctgctggttcaggatgcagtctggactttcgacccggatgcgctggtggagattacgggtggatttcgtcgtgggaaaccttttggtcacgacgttgatctgcttatcacatctccgggagctgagaaagaacaagaagaccagctcctgcagaaagtgaccaatctgtggaagaaacaagggttgttgctgtacggtgacctgcgtgaaagtcgctttgaagatgggaaactcccatcccgcaagatcgatgccctggaccattttgcgaaatgctttctgatcctcaaactttatcaccataaagtggacaaaagcaaatgggaaatgccgacgggttcgaacgaaagcgaggccaaaagttggaaagcaattcgcgtagatctggttcgttgtccctacgatcgttttgcgtttgcgttgttgggttggaccggaagccgcatgttcgaacgtgatctgcgccgctacgccacccacgagaagaagatgatgctggacaatcatgcgctgtatgacctgaccaagaaaatctttctcaaagctaaatcggaagaggaaattttcgcacatctggggcttgaatacctggaaccgtccgaacgtaacgca

SEQ ID NO: 758 - protein, 529 aa, synthetic construct
  REGION 1..529: note = Variant of terminal deoxynucleotidyltransferase
MHHHHHHGGSGMHRIRTIDSDFGKKRQKKGDNKISSMIYEIKFHEFVLFILEEKMGATRRTFLTDLARKKGFRVENELSDSVTHIVAENNSGSDVLAWLKTHKIESTTQFELLDISWLIESMKVGKPVDTKGKYQLMESRVDSANPDPTAGTLNEEPPTTKTISQYACQRRTTLNNHNQRFTDALEILAENYEFKRNDDTCLTFMRAISVLKCLPFEVVSLKDTEGLPWIGDEVKGIMEEIIEVGESLEVQAVLNDERYQSFKLFKSVFGVGVKTADKWYRMGLRTLEDVRSSKTLKLTPMQKAGLCYYEDLADGVTKAEADAISLLVQDAVWTFDPDALVEITGGFRRGKPFGHDVDLLITSPGAEKEQEDQLLQKVTNLWKKQGLLLYGDLRESRFEDGKLPSRKIDALDHFAKCFLILKLYHHKVDKSKWEMPTGSNESEAKSWKAIRVDLVRCPYDRFAFALLGWTGSRMFERDLRRYATHEKKMMLDNHALYDLTKKIFLKAKSEEEIFAHLGLEYLEPSERNA

SEQ ID NO: 759 - DNA, 1587 bp, synthetic construct
  misc_feature 1..1587: note = Variant of terminal deoxynucleotidyltransferase
  source 1..1587: mol_type = other DNA
atgcaccatcatcatcatcatggcggtagcggcagccacggcattcgtaccatcgattcggacttcgggaagaaacgccagaagaagatggataaccacagtagttccatgatctatgaaatcaaatttcacgagtttgtgctgttcattctcgaagagaaaatgggtgcgacgcgtcgtacttttctgacagatttagcccgcaagaaagggttccgcgtcgagaatgaactgtcagacagcgttacccacatcgtggcagaaaataattcaggatctgacgtattggcttggctgaagactcacaagatggaggtcacgacgcaatttgaactgctggatattagctggcttatcgaaagcatgaaagttggtaaaccggtggacaccaaggggaaataccagttgatggaatcgcgtgtgagcagtgcgaacccagatccgacagagggtaccgaaaacattctgcctcctactacgaagaccatttctcagtatgcgtgtcaacgccgcaccaccctgaacaaccataatcaacgttttacggacgcactggaaattcttgcggaaaattacgagttcaaacgcaacgatgatacttgtctgacctttatgcgtgctatttccgtgctgaaatgccttccgtttgaggtagttagcctgaaagacacggaaggattgccctggatcggtgatgaagtcaaagggattatggaagaaatcatcgaggtcggtgaatcgctggaagtgcaggccgtgctcaatgatgagcgctatcaaagcttcaaactgtttaagagtgtctttggagtgggggtgaagacagcagacaaatggtaccgtatgggtctgcgcacgctcgaggatgttcgttccagcaagaccctgaagttgaccccgatgcagaaagcgggtctgtgctattatgaagatcttgctgatggcgttacgaaagccgaagctgacgcgatttctctgctggttcaggatgcagtctggactttcgacccggatgcgctggtggagattacgggtggatttcgtcgtgggaaaccttttggtcacgacgttgatctgcttatcacatctccgggagctgagaaagaacaagaagaccagctcctgcagaaagtgaccaatctgtggaagaaacaagggttgttgctgtacggtgacctgcgtgaaagtcgctttgaagatgggaaactcccatcccgcaagatcgatgccctggaccattttgcgaaatgctttctgatcctcaaactttatcaccataaagtggacaaaagcaaatgggaaatgccgacgggttcgaacgaaagcgaggccaaaagttggaaagcaattcgcgtagatctggttcgttgtccctacgatcgttttgcgtttgcgttgttgggttggaccggaagccgcatgttcgaacgtgatctgcgccgctacgccacccacgagaagaagatgatgctggacaatcatgcgctgtatgacctgaccaagaaaatctttctcaaagctaaatcggaagaggaaattttcgcacatctggggcttgaatacctggaaccgtccgaacgtaacgca

SEQ ID NO: 760 - protein, 529 aa, synthetic construct
  REGION 1..529: note = Variant of terminal deoxynucleotidyltransferase
MHHHHHHGGSGSHGIRTIDSDFGKKRQKKMDNHSSSMIYEIKFHEFVLFILEEKMGATRRTFLTDLARKKGFRVENELSDSVTHIVAENNSGSDVLAWLKTHKMEVTTQFELLDISWLIESMKVGKPVDTKGKYQLMESRVSSANPDPTEGTENILPPTTKTISQYACQRRTTLNNHNQRFTDALEILAENYEFKRNDDTCLTFMRAISVLKCLPFEVVSLKDTEGLPWIGDEVKGIMEEIIEVGESLEVQAVLNDERYQSFKLFKSVFGVGVKTADKWYRMGLRTLEDVRSSKTLKLTPMQKAGLCYYEDLADGVTKAEADAISLLVQDAVWTFDPDALVEITGGFRRGKPFGHDVDLLITSPGAEKEQEDQLLQKVTNLWKKQGLLLYGDLRESRFEDGKLPSRKIDALDHFAKCFLILKLYHHKVDKSKWEMPTGSNESEAKSWKAIRVDLVRCPYDRFAFALLGWTGSRMFERDLRRYATHEKKMMLDNHALYDLTKKIFLKAKSEEEIFAHLGLEYLEPSERNA

SEQ ID NO: 761 - DNA, 1587 bp, synthetic construct
  misc_feature 1..1587: note = Variant of terminal deoxynucleotidyltransferase
  source 1..1587: mol_type = other DNA
atgcaccatcatcatcatcatggcggtagcggcatgcaccgtattcgtaccatcgatagcgaattcgggaagaaacgccagaagaagatggataaccacattagttccatgatctatgaaatcaaatttcacgagtttgtgctgttcattctcgaagagaaaatgggtgcgacgcgtcgtacttttctgacagatttagcccgcaagaaagggttccgcgtcgagaatgaactgtcagacagcgttacccacatcgtggcagaaaataattcaggatctgacgtattggcttggctgaagactcacaagccggagtcgacgacgcaatttgaactgctggatattagctggcttatcgaaagcatgaaagttggtaaaccggtggacaccaaggggaaataccagttgatggaatcgcgtgtcgatagtgcgaacccagatccgacagccggtaccctcaacatcctgcctcctactacgaagaccatttctcagtatgcgtgtcaacgccgcaccaccctgaacaaccataatcaacgttttacggacgcactggaaattcttgcggaaaattacgagttcaaacgcaacgatgatacttgtctgacctttatgcgtgctatttccgtgctgaaatgccttccgtttgaggtagttagcctgaaagacacggaaggattgccctggatcggtgatgaagtcaaagggattatggaagaaatcatcgaggtcggtgaatcgctggaagtgcaggccgtgctcaatgatgagcgctatcaaagcttcaaactgtttaagagtgtctttggagtgggggtgaagacagcagacaaatggtaccgtatgggtctgcgcacgctcgaggatgttcgttccagcaagaccctgaagttgaccccgatgcagaaagcgggtctgtgctattatgaagatcttgctgatggcgttacgaaagccgaagctgacgcgatttctctgctggttcaggatgcagtctggactttcgacccggatgcgctggtggagattacgggtggatttcgtcgtgggaaaccttttggtcacgacgttgatctgcttatcacatctccgggagctgagaaagaacaagaagaccagctcctgcagaaagtgaccaatctgtggaagaaacaagggttgttgctgtacggtgacctgcgtgaaagtcgctttgaagatgggaaactcccatcccgcaagatcgatgccctggaccattttgcgaaatgctttctgatcctcaaactttatcaccataaagtggacaaaagcaaatgggaaatgccgacgggttcgaacgaaagcgaggccaaaagttggaaagcaattcgcgtagatctggttcgttgtccctacgatcgttttgcgtttgcgttgttgggttggaccggaagccgcatgttcgaacgtgatctgcgccgctacgccacccacgagaagaagatgatgctggacaatcatgcgctgtatgacctgaccaagaaaatctttctcaaagctaaatcggaagaggaaattttcgcacatctggggcttgaatacctggaaccgtccgaacgtaacgca

SEQ ID NO: 762 - protein, 529 aa, synthetic construct
  REGION 1..529: note = Variant of terminal deoxynucleotidyltransferase
MHHHHHHGGSGMHRIRTIDSEFGKKRQKKMDNHISSMIYEIKFHEFVLFILEEKMGATRRTFLTDLARKKGFRVENELSDSVTHIVAENNSGSDVLAWLKTHKPESTTQFELLDISWLIESMKVGKPVDTKGKYQLMESRVDSANPDPTAGTLNILPPTTKTISQYACQRRTTLNNHNQRFTDALEILAENYEFKRNDDTCLTFMRAISVLKCLPFEVVSLKDTEGLPWIGDEVKGIMEEIIEVGESLEVQAVLNDERYQSFKLFKSVFGVGVKTADKWYRMGLRTLEDVRSSKTLKLTPMQKAGLCYYEDLADGVTKAEADAISLLVQDAVWTFDPDALVEITGGFRRGKPFGHDVDLLITSPGAEKEQEDQLLQKVTNLWKKQGLLLYGDLRESRFEDGKLPSRKIDALDHFAKCFLILKLYHHKVDKSKWEMPTGSNESEAKSWKAIRVDLVRCPYDRFAFALLGWTGSRMFERDLRRYATHEKKMMLDNHALYDLTKKIFLKAKSEEEIFAHLGLEYLEPSERNA

SEQ ID NO: 763 - DNA, 1587 bp, synthetic construct
  misc_feature 1..1587: note = Variant of terminal deoxynucleotidyltransferase
  source 1..1587: mol_type = other DNA
atgcaccatcatcatcatcatggcggtagcggcatgcaccgtattcgtaccatcgatagcgaattcgggaagaaacgccagaagaagatggataaccacattagttccatgatctatgaaatcaaatttcacgagtttgtgctgttcattctcgaagagaaaatgggtgcgtcgcgtcgtacttttctgacagatttagcccgcaagaaagggttccgcgtcgagaatgaactgtcagacagcgttacccacatcgtggcagaaaataattcaggatctgacgtattggcttggctgaaggagcacaagatcgagtcgacgacgcaatttgaactgctggatattagctggcttatcgaaagcatgaaagtaggtaaaccggtggacaccaaggggaaataccagttgatggaatcgcgtgtcgatagtgcgaacccagatccgacagccggtaccctcaacgaactgcctcctactacgaagaccatttctcagtatgcgtgtcaacgccgcaccaccctgaacaaccataatcaacgttttacggacgcactggaaattcttgcggaaaattacgagttcaaacgcaacgatgatacttgtctgacctttatgcgtgctatttccgtgctgaaatgccttccgtttgaggtagttagcctgaaagacacggaaggattgccctggatcggtgatgaagtcaaagggattatggaagaaatcatcgaggtcggtgaatcgctggaagtgcaggccgtgctcaatgatgagcgctatcaaagcttcaaactgtttaagagtgtctttggagtgggggtgaagacagcagacaaatggtaccgtatgggtctgcgcacgctcgaggatgttcgttccagcaagaccctgaagttgaccccgatgcagaaagcgggtctgtgctattatgaagatcttgctgatggcgttacgaaagccgaagctgacgcgatttctctgctggttcaggatgcagtctggactttcgacccggatgcgctggtggagattacgggtggatttcgtcgtgggaaaccttttggtcacgacgttgatctgcttatcacatctccgggagctgagaaagaacaagaagaccagctcctgcagaaagtgaccaatctgtggaagaaacaagggttgttgctgtacggtgacctgcgtgaaagtcgctttgaagatgggaaactcccatcccgcaagatcgatgccctggaccattttgcgaaatgctttctgatcctcaaactttatcaccataaagtggacaaaagcaaatgggaaatgccgacgggttcgaacgaaagcgaggccaaaagttggaaagcaattcgcgtagatctggttcgttgtccctacgatcgttttgcgtttgcgttgttgggttggaccggaagccgcatgttcgaacgtgatctgcgccgctacgccacccacgagaagaagatgatgctggacaatcatgcgctgtatgacctgaccaagaaaatctttctcaaagctaaatcggaagaggaaattttcgcacatctggggcttgaatacctggaaccgtccgaacgtaacgca

SEQ ID NO: 764 - protein, 529 aa, synthetic construct
  REGION 1..529: note = Variant of terminal deoxynucleotidyltransferase
MHHHHHHGGSGMHRIRTIDSEFGKKRQKKMDNHISSMIYEIKFHEFVLFILEEKMGASRRTFLTDLARKKGFRVENELSDSVTHIVAENNSGSDVLAWLKEHKIESTTQFELLDISWLIESMKVGKPVDTKGKYQLMESRVDSANPDPTAGTLNELPPTTKTISQYACQRRTTLNNHNQRFTDALEILAENYEFKRNDDTCLTFMRAISVLKCLPFEVVSLKDTEGLPWIGDEVKGIMEEIIEVGESLEVQAVLNDERYQSFKLFKSVFGVGVKTADKWYRMGLRTLEDVRSSKTLKLTPMQKAGLCYYEDLADGVTKAEADAISLLVQDAVWTFDPDALVEITGGFRRGKPFGHDVDLLITSPGAEKEQEDQLLQKVTNLWKKQGLLLYGDLRESRFEDGKLPSRKIDALDHFAKCFLILKLYHHKVDKSKWEMPTGSNESEAKSWKAIRVDLVRCPYDRFAFALLGWTGSRMFERDLRRYATHEKKMMLDNHALYDLTKKIFLKAKSEEEIFAHLGLEYLEPSERNA

SEQ ID NO: 765 - DNA, 1587 bp, synthetic construct
  misc_feature 1..1587: note = Variant of terminal deoxynucleotidyltransferase
  source 1..1587: mol_type = other DNA
atgcaccatcatcatcatcatggcggtagcggcatgcaccgcattcgtaccatcgattcggacttcgggaagaaacgccagaagaagatggataaccacattagttccatgatctatgaaatcaaatttcacgagtttgtgctgttcattctcgaagagaaaatgggtgcgacgcgtcgtacttttctgacagatttagcccgcaagaaagggttccgcgtcgagaatgaactgtcagacagcgttacccacatcgtggcagaaaataattcaggatctgacgtattggcttggctgaagactcacaagatggaggtcacgacgcaatttgaactgctggatattagctggcttatcgaaagcatgaaagttggtaaaccggtggacaccaaggggaaataccagttgatggaatcgcgtgtcgatagtgcgaacccagatccgacagccggtaccctcaacattctgcctcctactacggagactatttctcagtatgcgtgtcaacgccgcaccaccctgaacaaccataatcaacgttttacggacgcactggaaattcttgcggaaaattacgagttcaaacgcaacgatgatacttgtctgacctttatgcgtgctatttccgtgctgaaatgccttccgtttgaggtagttagcctgaaagacacggaaggattgccctggatcggtgatgaagtcaaagggattatggaagaaatcatcgaggtcggtgaatcgctggaagtgcaggccgtgctcaatgatgagcgctatcaaagcttcaaactgtttaagagtgtctttggagtgggggtgaagacagcagacaaatggtaccgtatgggtctgcgcacgctcgaggatgttcgttccagcaagaccctgaagttgaccccgatgcagaaagcgggtctgtgctattatgaagatcttgctgatggcgttacgaaagccgaagctgacgcgatttctctgctggttcaggatgcagtctggactttcgacccggatgcgctggtggagattacgggtggatttcgtcgtgggaaaccttttggtcacgacgttgatctgcttatcacatctccgggagctgagaaagaacaagaagaccagctcctgcagaaagtgaccaatctgtggaagaaacaagggttgttgctgtacggtgacctgcgtgaaagtcgctttgaagatgggaaactcccatcccgcaagatcgatgccctggaccattttgcgaaatgctttctgatcctcaaactttatcaccataaagtggacaaaagcaaatgggaaatgccgacgggttcgaacgaaagcgaggccaaaagttggaaagcaattcgcgtagatctggttcgttgtccctacgatcgttttgcgtttgcgttgttgggttggaccggaagccgcatgttcgaacgtgatctgcgccgctacgccacccacgagaagaagatgatgctggacaatcatgcgctgtatgacctgaccaagaaaatctttctcaaagctaaatcggaagaggaaattttcgcacatctggggcttgaatacctggaaccgtccgaacgtaacgca

SEQ ID NO: 766 - protein, 529 aa, synthetic construct
  REGION 1..529: note = Variant of terminal deoxynucleotidyltransferase
MHHHHHHGGSGMHRIRTIDSDFGKKRQKKMDNHISSMIYEIKFHEFVLFILEEKMGATRRTFLTDLARKKGFRVENELSDSVTHIVAENNSGSDVLAWLKTHKMEVTTQFELLDISWLIESMKVGKPVDTKGKYQLMESRVDSANPDPTAGTLNILPPTTETISQYACQRRTTLNNHNQRFTDALEILAENYEFKRNDDTCLTFMRAISVLKCLPFEVVSLKDTEGLPWIGDEVKGIMEEIIEVGESLEVQAVLNDERYQSFKLFKSVFGVGVKTADKWYRMGLRTLEDVRSSKTLKLTPMQKAGLCYYEDLADGVTKAEADAISLLVQDAVWTFDPDALVEITGGFRRGKPFGHDVDLLITSPGAEKEQEDQLLQKVTNLWKKQGLLLYGDLRESRFEDGKLPSRKIDALDHFAKCFLILKLYHHKVDKSKWEMPTGSNESEAKSWKAIRVDLVRCPYDRFAFALLGWTGSRMFERDLRRYATHEKKMMLDNHALYDLTKKIFLKAKSEEEIFAHLGLEYLEPSERNA

SEQ ID NO: 767 - DNA, 1587 bp, synthetic construct
  misc_feature 1..1587: note = Variant of terminal deoxynucleotidyltransferase
  source 1..1587: mol_type = other DNA
atgcaccatcatcatcatcatggcggtagcggcatgcaccgtattcgtaccatcgatagcgaattcgggaagaaacgccagaagaagatggataaccacattagttccatgatctatgaaatcaaatttcacgagtttgtgctgttcattctcgaagagaaaatgggtgcgacgcgtcgtacttttctgacagatttagcccgcaagaaagggttccgcgtcgagaatgaactgtcagacagcgttacccacatcgtggcagaaaataattcaggatctgacgtattggcttggctgaagactcacaagccggagtcgacgacgcaatttgaactgctggatattagctggcttatcgaaagcatgaaagttggtaaaccggtggacaccaaggggaaataccagttgatggaatcgcgtgtcgatagtgcgaacccagatccgacagccggtaccctcaacatcgaacctcctactacgaagaccatttctcagtatgcgtgtcaacgccgcaccaccctgaacaaccataatcaacgttttacggacgcactggaaattcttgcggaaaattacgagttcaaacgcaacgatgatacttgtctgacctttatgcgtgctatttccgtgctgaaatgccttccgtttgaggtagttagcctgaaagacacggaaggattgccctggatcggtgatgaagtcaaagggattatggaagaaatcatcgaggtcggtgaatcgctggaagtgcaggccgtgctcaatgatgagcgctatcaaagcttcaaactgtttaagagtgtctttggagtgggggtgaagacagcagacaaatggtaccgtatgggtctgcgcacgctcgaggatgttcgttccagcaagaccctgaagttgaccccgatgcagaaagcgggtctgtgctattatgaagatcttgctgatggcgttacgaaagccgaagctgacgcgatttctctgctggttcaggatgcagtctggactttcgacccggatgcgctggtggagattacgggtggatttcgtcgtgggaaaccttttggtcacgacgttgatctgcttatcacatctccgggagctgagaaagaacaagaagaccagctcctgcagaaagtgaccaatctgtggaagaaacaagggttgttgctgtacggtgacctgcgtgaaagtcgctttgaagatgggaaactcccatcccgcaagatcgatgccctggaccattttgcgaaatgctttctgatcctcaaactttatcaccataaagtggacaaaagcaaatgggaaatgccgacgggttcgaacgaaagcgaggccaaaagttggaaagcaattcgcgtagatctggttcgttgtccctacgatcgttttgcgtttgcgttgttgggttggaccggaagccgcatgttcgaacgtgatctgcgccgctacgccacccacgagaagaagatgatgctggacaatcatgcgctgtatgacctgaccaagaaaatctttctcaaagctaaatcggaagaggaaattttcgcacatctggggcttgaatacctggaaccgtccgaacgtaacgca

SEQ ID NO: 768 - protein, 529 aa, synthetic construct
  REGION 1..529: note = Variant of terminal deoxynucleotidyltransferase
MHHHHHHGGSGMHRIRTIDSEFGKKRQKKMDNHISSMIYEIKFHEFVLFILEEKMGATRRTFLTDLARKKGFRVENELSDSVTHIVAENNSGSDVLAWLKTHKPESTTQFELLDISWLIESMKVGKPVDTKGKYQLMESRVDSANPDPTAGTLNIEPPTTKTISQYACQRRTTLNNHNQRFTDALEILAENYEFKRNDDTCLTFMRAISVLKCLPFEVVSLKDTEGLPWIGDEVKGIMEEIIEVGESLEVQAVLNDERYQSFKLFKSVFGVGVKTADKWYRMGLRTLEDVRSSKTLKLTPMQKAGLCYYEDLADGVTKAEADAISLLVQDAVWTFDPDALVEITGGFRRGKPFGHDVDLLITSPGAEKEQEDQLLQKVTNLWKKQGLLLYGDLRESRFEDGKLPSRKIDALDHFAKCFLILKLYHHKVDKSKWEMPTGSNESEAKSWKAIRVDLVRCPYDRFAFALLGWTGSRMFERDLRRYATHEKKMMLDNHALYDLTKKIFLKAKSEEEIFAHLGLEYLEPSERNA

SEQ ID NO: 769 - DNA, 1587 bp, synthetic construct
  misc_feature 1..1587: note = Variant of terminal deoxynucleotidyltransferase
  source 1..1587: mol_type = other DNA
atgcaccatcatcatcatcatggcggtagcggcagccacggcattcgtaccatcgattcggacttcgggaagaaacgccagaagaagatggataaccacgatagttccatgatctatgaaatcaaatttcacgagtttgtgctgttcattctcgaagagaaaatgggtgcgacgcgtcgtacttttctgacagatttagcccgcaagaaagggttccgcgtcgagaatgaactgtcagacagcgttacccacatcgtggcagaaaataattcaggatctgacgtattggcttggctgaagactcacaagatggaggtcacgacgcaatttgaactgctggatattagctggcttatcgaaagcatgaaagttggtaaaccggtggacaccaaggggaaataccagttgatggaatcgcgtgtcgatagtgcgaacccagatccgacagccggtaccctcaacattctgcctcctactacgaagaccatttctcagtatgcgtgtcaacgccgcaccaccctgaacaaccataatcaacgttttacggacgcactggaaattcttgcggaaaattacgagttcaaacgcaacgatgatacttgtctgacctttatgcgtgctatttccgtgctgaaatgccttccgtttgaggtagttagcctgaaagacacggaaggattgccctggatcggtgatgaagtcaaagggattatggaagaaatcatcgaggtcggtgaatcgctggaagtgcaggccgtgctcaatgatgagcgctatcaaagcttcaaactgtttaagagtgtctttggagtgggggtgaagacagcagacaaatggtaccgtatgggtctgcgcacgctcgaggatgttcgttccagcaagaccctgaagttgaccccgatgcagaaagcgggtctgtgctattatgaagatcttgctgatggcgttacgaaagccgaagctgacgcgatttctctgctggttcaggatgcagtctggactttcgacccggatgcgctggtggagattacgggtggatttcgtcgtgggaaaccttttggtcacgacgttgatctgcttatcacatctccgggagctgagaaagaacaagaagaccagctcctgcagaaagtgaccaatctgtggaagaaacaagggttgttgctgtacggtgacctgcgtgaaagtcgctttgaagatgggaaactcccatcccgcaagatcgatgccctggaccattttgcgaaatgctttctgatcctcaaactttatcaccataaagtggacaaaagcaaatgggaaatgccgacgggttcgaacgaaagcgaggccaaaagttggaaagcaattcgcgtagatctggttcgttgtccctacgatcgttttgcgtttgcgttgttgggttggaccggaagccgcatgttcgaacgtgatctgcgccgctacgccacccacgagaagaagatgatgctggacaatcatgcgctgtatgacctgaccaagaaaatctttctcaaagctaaatcggaagaggaaattttcgcacatctggggcttgaatacctggaaccgtccgaacgtaacgca

SEQ ID NO: 770 - protein, 529 aa, synthetic construct
  REGION 1..529: note = Variant of terminal deoxynucleotidyltransferase
MHHHHHHGGSGSHGIRTIDSDFGKKRQKKMDNHDSSMIYEIKFHEFVLFILEEKMGATRRTFLTDLARKKGFRVENELSDSVTHIVAENNSGSDVLAWLKTHKMEVTTQFELLDISWLIESMKVGKPVDTKGKYQLMESRVDSANPDPTAGTLNILPPTTKTISQYACQRRTTLNNHNQRFTDALEILAENYEFKRNDDTCLTFMRAISVLKCLPFEVVSLKDTEGLPWIGDEVKGIMEEIIEVGESLEVQAVLNDERYQSFKLFKSVFGVGVKTADKWYRMGLRTLEDVRSSKTLKLTPMQKAGLCYYEDLADGVTKAEADAISLLVQDAVWTFDPDALVEITGGFRRGKPFGHDVDLLITSPGAEKEQEDQLLQKVTNLWKKQGLLLYGDLRESRFEDGKLPSRKIDALDHFAKCFLILKLYHHKVDKSKWEMPTGSNESEAKSWKAIRVDLVRCPYDRFAFALLGWTGSRMFERDLRRYATHEKKMMLDNHALYDLTKKIFLKAKSEEEIFAHLGLEYLEPSERNA

SEQ ID NO: 771 - DNA, 1587 bp, synthetic construct
  misc_feature 1..1587: note = Variant of terminal deoxynucleotidyltransferase
  source 1..1587: mol_type = other DNA
atgcaccatcatcatcatcatggcggtagcggcatgcacggcattcgtaccatcgattcggacttcgggaagaaacgccagaagaagatggataaccacattagttccatgatctatgaaatcaaatttcacgagtttgtgctgttcattctcgaagagaaaatgggtgcgacgcgtcgtacttttctgacagatttagcccgcaagaaagggttccgcgtcgagaatgaactgtcagacagcgttacccacatcgtggcagaaaataattcaggatctgacgtattggcttggctgaagactcacaagatggaggtcacgacgcaatttgaactgctggatattagctggcttatcgaaagcatgaaagttggtaaaccggtggacaccaaggggaaataccagttgatggaatcgcgtgtcgatagtgcgaacccagatccgacagcgggtaccgaaaacattctgcctcctactacgaagaccatttctcagtatgcgtgtcaacgccgcaccaccctgaacaaccataatcaacgttttacggacgcactggaaattcttgcggaaaattacgagttcaaacgcaacgatgatacttgtctgacctttatgcgtgctatttccgtgctgaaatgccttccgtttgaggtagttagcctgaaagacacggaaggattgccctggatcggtgatgaagtcaaagggattatggaagaaatcatcgaggtcggtgaatcgctggaagtgcaggccgtgctcaatgatgagcgctatcaaagcttcaaactgtttaagagtgtctttggagtgggggtgaagacagcagacaaatggtaccgtatgggtctgcgcacgctcgaggatgttcgttccagcaagaccctgaagttgaccccgatgcagaaagcgggtctgtgctattatgaagatcttgctgatggcgttacgaaagccgaagctgacgcgatttctctgctggttcaggatgcagtctggactttcgacccggatgcgctggtggagattacgggtggatttcgtcgtgggaaaccttttggtcacgacgttgatctgcttatcacatctccgggagctgagaaagaacaagaagaccagctcctgcagaaagtgaccaatctgtggaagaaacaagggttgttgctgtacggtgacctgcgtgaaagtcgctttgaagatgggaaactcccatcccgcaagatcgatgccctggaccattttgcgaaatgctttctgatcctcaaactttatcaccataaagtggacaaaagcaaatgggaaatgccgacgggttcgaacgaaagcgaggccaaaagttggaaagcaattcgcgtagatctggttcgttgtccctacgatcgttttgcgtttgcgttgttgggttggaccggaagccgcatgttcgaacgtgatctgcgccgctacgccacccacgagaagaagatgatgctggacaatcatgcgctgtatgacctgaccaagaaaatctttctcaaagctaaatcggaagaggaaattttcgcacatctggggcttgaatacctggaaccgtccgaacgtaacgca

SEQ ID NO: 772 - protein, 529 aa, synthetic construct
  REGION 1..529: note = Variant of terminal deoxynucleotidyltransferase
MHHHHHHGGSGMHGIRTIDSDFGKKRQKKMDNHISSMIYEIKFHEFVLFILEEKMGATRRTFLTDLARKKGFRVENELSDSVTHIVAENNSGSDVLAWLKTHKMEVTTQFELLDISWLIESMKVGKPVDTKGKYQLMESRVDSANPDPTAGTENILPPTTKTISQYACQRRTTLNNHNQRFTDALEILAENYEFKRNDDTCLTFMRAISVLKCLPFEVVSLKDTEGLPWIGDEVKGIMEEIIEVGESLEVQAVLNDERYQSFKLFKSVFGVGVKTADKWYRMGLRTLEDVRSSKTLKLTPMQKAGLCYYEDLADGVTKAEADAISLLVQDAVWTFDPDALVEITGGFRRGKPFGHDVDLLITSPGAEKEQEDQLLQKVTNLWKKQGLLLYGDLRESRFEDGKLPSRKIDALDHFAKCFLILKLYHHKVDKSKWEMPTGSNESEAKSWKAIRVDLVRCPYDRFAFALLGWTGSRMFERDLRRYATHEKKMMLDNHALYDLTKKIFLKAKSEEEIFAHLGLEYLEPSERNA

SEQ ID NO: 773 - DNA, 1587 bp, synthetic construct
  misc_feature 1..1587: note = Variant of terminal deoxynucleotidyltransferase
  source 1..1587: mol_type = other DNA
atgcaccatcatcatcatcatggcggtagcggcagccacggcattcgtaccatcgattcggacttcgggaagaaacgccagaagaagatggataaccacattagttccatgatctatgaaatcaaatttcacgagtttgtgctgttcattctcgaagagaaaatgggtgcgacgcgtcgtacttttctgacagatttagcccgcaagaaagggttccgcgtcgagaatgaactgtcagacagcgttacccacatcgtggcagaaaataattcaggatctgacgtattggcttggctgaagactcacaagatggaggtcacgacgcaatttgaactgctggatattagctggcttatcgaaagcatgaaagttggtaaaccggtggacaccaaggggaaataccagttgatggaatcgcgtgtcgatagtgcgaacccagatccgacagcgggtaccgaaaacattctgcctcctactacgaagaccatttctcagtatgcgtgtcaacgccgcaccaccctgaacaaccataatcaacgttttacggacgcactggaaattcttgcggaaaattacgagttcaaacgcaacgatgatacttgtctgacctttatgcgtgctatttccgtgctgaaatgccttccgtttgaggtagttagcctgaaagacacggaaggattgccctggatcggtgatgaagtcaaagggattatggaagaaatcatcgaggtcggtgaatcgctggaagtgcaggccgtgctcaatgatgagcgctatcaaagcttcaaactgtttaagagtgtctttggagtgggggtgaagacagcagacaaatggtaccgtatgggtctgcgcacgctcgaggatgttcgttccagcaagaccctgaagttgaccccgatgcagaaagcgggtctgtgctattatgaagatcttgctgatggcgttacgaaagccgaagctgacgcgatttctctgctggttcaggatgcagtctggactttcgacccggatgcgctggtggagattacgggtggatttcgtcgtgggaaaccttttggtcacgacgttgatctgcttatcacatctccgggagctgagaaagaacaagaagaccagctcctgcagaaagtgaccaatctgtggaagaaacaagggttgttgctgtacggtgacctgcgtgaaagtcgctttgaagatgggaaactcccatcccgcaagatcgatgccctggaccattttgcgaaatgctttctgatcctcaaactttatcaccataaagtggacaaaagcaaatgggaaatgccgacgggttcgaacgaaagcgaggccaaaagttggaaagcaattcgcgtagatctggttcgttgtccctacgatcgttttgcgtttgcgttgttgggttggaccggaagccgcatgttcgaacgtgatctgcgccgctacgccacccacgagaagaagatgatgctggacaatcatgcgctgtatgacctgaccaagaaaatctttctcaaagctaaatcggaagaggaaattttcgcacatctggggcttgaatacctggaaccgtccgaacgtaacgca

SEQ ID NO: 774 - protein, 529 aa, synthetic construct
  REGION 1..529: note = Variant of terminal deoxynucleotidyltransferase
MHHHHHHGGSGSHGIRTIDSDFGKKRQKKMDNHISSMIYEIKFHEFVLFILEEKMGATRRTFLTDLARKKGFRVENELSDSVTHIVAENNSGSDVLAWLKTHKMEVTTQFELLDISWLIESMKVGKPVDTKGKYQLMESRVDSANPDPTAGTENILPPTTKTISQYACQRRTTLNNHNQRFTDALEILAENYEFKRNDDTCLTFMRAISVLKCLPFEVVSLKDTEGLPWIGDEVKGIMEEIIEVGESLEVQAVLNDERYQSFKLFKSVFGVGVKTADKWYRMGLRTLEDVRSSKTLKLTPMQKAGLCYYEDLADGVTKAEADAISLLVQDAVWTFDPDALVEITGGFRRGKPFGHDVDLLITSPGAEKEQEDQLLQKVTNLWKKQGLLLYGDLRESRFEDGKLPSRKIDALDHFAKCFLILKLYHHKVDKSKWEMPTGSNESEAKSWKAIRVDLVRCPYDRFAFALLGWTGSRMFERDLRRYATHEKKMMLDNHALYDLTKKIFLKAKSEEEIFAHLGLEYLEPSERNA

SEQ ID NO: 775 - DNA, 1587 bp, synthetic construct
  misc_feature 1..1587: note = Variant of terminal deoxynucleotidyltransferase
  source 1..1587: mol_type = other DNA
atgcaccatcatcatcatcatggcggtagcggcatgcaccgtattcgtaccatcgataccgacttcgggaagaaacgccagaagaagatggataaccacattagttccatgatctatgaaatcaaatttcacgagtttgtgctgttcattctcgaagagaaaatgggtgcggcgcgtcgtacttttctgacagatttagcccgcaagaaagggttccgcgtcgagaatgaactgtcagacagcgttacccacatcgtggcagaaaataattcaggatctgacgtattggcttggctgaaggagcacaagatggagaaaacgacgcaatttgaactgctggatattagctggcttatcgaaagcatgaaagtaggtaaaccggtggacaccaaggggaaataccagttgatggaatcgcgtgtcgatagtgcgaacccagatccgacagccggtaccctcaacattctgcctcctactacgaagaccatttctcagtatgcgtgtcaacgccgcaccaccctgaacaaccataatcaacgttttacggacgcactggaaattcttgcggaaaattacgagttcaaacgcaacgatgatacttgtctgacctttatgcgtgctatttccgtgctgaaatgccttccgtttgaggtagttagcctgaaagacacggaaggattgccctggatcggtgatgaagtcaaagggattatggaagaaatcatcgaggtcggtgaatcgctggaagtgcaggccgtgctcaatgatgagcgctatcaaagcttcaaactgtttaagagtgtctttggagtgggggtgaagacagcagacaaatggtaccgtatgggtctgcgcacgctcgaggatgttcgttccagcaagaccctgaagttgaccccgatgcagaaagcgggtctgtgctattatgaagatcttgctgatggcgttacgaaagccgaagctgacgcgatttctctgctggttcaggatgcagtctggactttcgacccggatgcgctggtggagattacgggtggatttcgtcgtgggaaaccttttggtcacgacgttgatctgcttatcacatctccgggagctgagaaagaacaagaagaccagctcctgcagaaagtgaccaatctgtggaagaaacaagggttgttgctgtacggtgacctgcgtgaaagtcgctttgaagatgggaaactcccatcccgcaagatcgatgccctggaccattttgcgaaatgctttctgatcctcaaactttatcaccataaagtggacaaaagcaaatgggaaatgccgacgggttcgaacgaaagcgaggccaaaagttggaaagcaattcgcgtagatctggttcgttgtccctacgatcgttttgcgtttgcgttgttgggttggaccggaagccgcatgttcgaacgtgatctgcgccgctacgccacccacgagaagaagatgatgctggacaatcatgcgctgtatgacctgaccaagaaaatctttctcaaagctaaatcggaagaggaaattttcgcacatctggggcttgaatacctggaaccgtccgaacgtaacgca

SEQ ID NO: 776 - protein, 529 aa, synthetic construct
  REGION 1..529: note = Variant of terminal deoxynucleotidyltransferase
MHHHHHHGGSGMHRIRTIDTDFGKKRQKKMDNHISSMIYEIKFHEFVLFILEEKMGAARRTFLTDLARKKGFRVENELSDSVTHIVAENNSGSDVLAWLKEHKMEKTTQFELLDISWLIESMKVGKPVDTKGKYQLMESRVDSANPDPTAGTLNILPPTTKTISQYACQRRTTLNNHNQRFTDALEILAENYEFKRNDDTCLTFMRAISVLKCLPFEVVSLKDTEGLPWIGDEVKGIMEEIIEVGESLEVQAVLNDERYQSFKLFKSVFGVGVKTADKWYRMGLRTLEDVRSSKTLKLTPMQKAGLCYYEDLADGVTKAEADAISLLVQDAVWTFDPDALVEITGGFRRGKPFGHDVDLLITSPGAEKEQEDQLLQKVTNLWKKQGLLLYGDLRESRFEDGKLPSRKIDALDHFAKCFLILKLYHHKVDKSKWEMPTGSNESEAKSWKAIRVDLVRCPYDRFAFALLGWTGSRMFERDLRRYATHEKKMMLDNHALYDLTKKIFLKAKSEEEIFAHLGLEYLEPSERNA

SEQ ID NO: 777 - DNA, 1587 bp, synthetic construct
  misc_feature 1..1587: note = Variant of terminal deoxynucleotidyltransferase
  source 1..1587: mol_type = other DNA
atgcaccatcatcatcatcatggcggtagcggcatgcaccgtattcgtaccatcgattcggacttcgggaagaaacgccagaagaagatggataaccacattagttccatgatctatgaaatcaaatttcacgagtttgtgctgttcattctcgaagagaaaatgggtgcgacgcgtcgtacttttctgacagatttagcccgcaagaaagggttccgcgtcgagaatgaactgtcagacagcgttacccacatcgtggcagaaaataattcaggatctgacgtattggcttggctgaagactcacaagatggaggtcacgacgcaatttgaactgctggatattagctggcttatcgaaagcatgaaagttggtaaaccggtggacaccaaggggaaataccagttgatggaatcgggtgtggatagtgcggagccagatccgacagccggtaccctcaacattctgcctcctactacgaagaccatttctcagtatgcgtgtcaacgccgcaccaccctgaacaaccataatcaacgttttacggacgcactggaaattcttgcggaaaattacgagttcaaacgcaacgatgatacttgtctgacctttatgcgtgctatttccgtgctgaaatgccttccgtttgaggtagttagcctgaaagacacggaaggattgccctggatcggtgatgaagtcaaagggattatggaagaaatcatcgaggtcggtgaatcgctggaagtgcaggccgtgctcaatgatgagcgctatcaaagcttcaaactgtttaagagtgtctttggagtgggggtgaagacagcagacaaatggtaccgtatgggtctgcgcacgctcgaggatgttcgttccagcaagaccctgaagttgaccccgatgcagaaagcgggtctgtgctattatgaagatcttgctgatggcgttacgaaagccgaagctgacgcgatttctctgctggttcaggatgcagtctggactttcgacccggatgcgctggtggagattacgggtggatttcgtcgtgggaaaccttttggtcacgacgttgatctgcttatcacatctccgggagctgagaaagaacaagaagaccagctcctgcagaaagtgaccaatctgtggaagaaacaagggttgttgctgtacggtgacctgcgtgaaagtcgctttgaagatgggaaactcccatcccgcaagatcgatgccctggaccattttgcgaaatgctttctgatcctcaaactttatcaccataaagtggacaaaagcaaatgggaaatgccgacgggttcgaacgaaagcgaggccaaaagttggaaagcaattcgcgtagatctggttcgttgtccctacgatcgttttgcgtttgcgttgttgggttggaccggaagccgcatgttcgaacgtgatctgcgccgctacgccacccacgagaagaagatgatgctggacaatcatgcgctgtatgacctgaccaagaaaatctttctcaaagctaaatcggaagaggaaattttcgcacatctggggcttgaatacctggaaccgtccgaacgtaacgca

SEQ ID NO: 778 - protein, 529 aa, synthetic construct
  REGION 1..529: note = Variant of terminal deoxynucleotidyltransferase
MHHHHHHGGSGMHRIRTIDSDFGKKRQKKMDNHISSMIYEIKFHEFVLFILEEKMGATRRTFLTDLARKKGFRVENELSDSVTHIVAENNSGSDVLAWLKTHKMEVTTQFELLDISWLIESMKVGKPVDTKGKYQLMESGVDSAEPDPTAGTLNILPPTTKTISQYACQRRTTLNNHNQRFTDALEILAENYEFKRNDDTCLTFMRAISVLKCLPFEVVSLKDTEGLPWIGDEVKGIMEEIIEVGESLEVQAVLNDERYQSFKLFKSVFGVGVKTADKWYRMGLRTLEDVRSSKTLKLTPMQKAGLCYYEDLADGVTKAEADAISLLVQDAVWTFDPDALVEITGGFRRGKPFGHDVDLLITSPGAEKEQEDQLLQKVTNLWKKQGLLLYGDLRESRFEDGKLPSRKIDALDHFAKCFLILKLYHHKVDKSKWEMPTGSNESEAKSWKAIRVDLVRCPYDRFAFALLGWTGSRMFERDLRRYATHEKKMMLDNHALYDLTKKIFLKAKSEEEIFAHLGLEYLEPSERNA

SEQ ID NO: 779 - DNA, 1587 bp, synthetic construct
  misc_feature 1..1587: note = Variant of terminal deoxynucleotidyltransferase
  source 1..1587: mol_type = other DNA
atgcaccatcatcatcatcatggcggtagcggcatgcaccgtattcgtaccatcgataccgacttcgggaagaaacgccagaagaagatggataacaagattagttccatgatctatgaaatcaaatttcacgagtttgtgctgttcattctcgaagagaaaatgggtgcgacgcgtcgtacttttctgacagatttagcccgcaagaaagggttccgcgtcgagaatgaactgtcagacagcgttacccacatcgtggcagaaaataattcaggatctgacgtattggcttggctgaagactcacaagccggagaaaacgacgcaatttgaactgctggatattagctggcttatcgaaagcatgaaagaaggtaaaccggtggacaccaaggggaaataccagttgatggaatcgcgtgtcgatagtgcgaacccagatccgacagccggtaccctcaacatcgaacctcctactacgaagaccatttctcagtatgcgtgtcaacgccgcaccaccctgaacaaccataatcaacgttttacggacgcactggaaattcttgcggaaaattacgagttcaaacgcaacgatgatacttgtctgacctttatgcgtgctatttccgtgctgaaatgccttccgtttgaggtagttagcctgaaagacacggaaggattgccctggatcggtgatgaagtcaaagggattatggaagaaatcatcgaggtcggtgaatcgctggaagtgcaggccgtgctcaatgatgagcgctatcaaagcttcaaactgtttaagagtgtctttggagtgggggtgaagacagcagacaaatggtaccgtatgggtctgcgcacgctcgaggatgttcgttccagcaagaccctgaagttgaccccgatgcagaaagcgggtctgtgctattatgaagatcttgctgatggcgttacgaaagccgaagctgacgcgatttctctgctggttcaggatgcagtctggactttcgacccggatgcgctggtggagattacgggtggatttcgtcgtgggaaaccttttggtcacgacgttgatctgcttatcacatctccgggagctgagaaagaacaagaagaccagctcctgcagaaagtgaccaatctgtggaagaaacaagggttgttgctgtacggtgacctgcgtgaaagtcgctttgaagatgggaaactcccatcccgcaagatcgatgccctggaccattttgcgaaatgctttctgatcctcaaactttatcaccataaagtggacaaaagcaaatgggaaatgccgacgggttcgaacgaaagcgaggccaaaagttggaaagcaattcgcgtagatctggttcgttgtccctacgatcgttttgcgtttgcgttgttgggttggaccggaagccgcatgttcgaacgtgatctgcgccgctacgccacccacgagaagaagatgatgctggacaatcatgcgctgtatgacctgaccaagaaaatctttctcaaagctaaatcggaagaggaaattttcgcacatctggggcttgaatacctggaaccgtccgaacgtaacgca

SEQ ID NO: 780 - protein, 529 aa, synthetic construct
  REGION 1..529: note = Variant of terminal deoxynucleotidyltransferase
MHHHHHHGGSGMHRIRTIDTDFGKKRQKKMDNKISSMIYEIKFHEFVLFILEEKMGATRRTFLTDLARKKGFRVENELSDSVTHIVAENNSGSDVLAWLKTHKPEKTTQFELLDISWLIESMKEGKPVDTKGKYQLMESRVDSANPDPTAGTLNIEPPTTKTISQYACQRRTTLNNHNQRFTDALEILAENYEFKRNDDTCLTFMRAISVLKCLPFEVVSLKDTEGLPWIGDEVKGIMEEIIEVGESLEVQAVLNDERYQSFKLFKSVFGVGVKTADKWYRMGLRTLEDVRSSKTLKLTPMQKAGLCYYEDLADGVTKAEADAISLLVQDAVWTFDPDALVEITGGFRRGKPFGHDVDLLITSPGAEKEQEDQLLQKVTNLWKKQGLLLYGDLRESRFEDGKLPSRKIDALDHFAKCFLILKLYHHKVDKSKWEMPTGSNESEAKSWKAIRVDLVRCPYDRFAFALLGWTGSRMFERDLRRYATHEKKMMLDNHALYDLTKKIFLKAKSEEEIFAHLGLEYLEPSERNA

SEQ ID NO: 781 - DNA, 1587 bp, synthetic construct
  misc_feature 1..1587: note = Variant of terminal deoxynucleotidyltransferase
  source 1..1587: mol_type = other DNA
atgcaccatcatcatcatcatggcggtagcggcatgcaccgtattcgtaccatcgatagcgaattcgggaagaaacgccagaagaagatggataacaagattagttccatgatctatgaaatcaaatttcacgagtttgtgctgttcattctcgaagagaaaatgggtgcgtcgcgtcgtacttttctgacagatttagcccgcaagaaagggttccgcgtcgagaatgaactgtcagacagcgttacccacatcgtggcagaaaataattcaggatctgacgtattggcttggctgaagactcacaagatggagtcgacgacgcaatttgaactgctggatattagctggcttatcgaaagcatgaaagttggtaaaccggtggacaccaaggggaaataccagttgatggaatcgcgtgtcgatagtgcgaacccagatccgacagccggtaccctcaacgaagaacctcctactacgaagaccatttctcagtatgcgtgtcaacgccgcaccaccctgaacaaccataatcaacgttttacggacgcactggaaattcttgcggaaaattacgagttcaaacgcaacgatgatacttgtctgacctttatgcgtgctatttccgtgctgaaatgccttccgtttgaggtagttagcctgaaagacacggaaggattgccctggatcggtgatgaagtcaaagggattatggaagaaatcatcgaggtcggtgaatcgctggaagtgcaggccgtgctcaatgatgagcgctatcaaagcttcaaactgtttaagagtgtctttggagtgggggtgaagacagcagacaaatggtaccgtatgggtctgcgcacgctcgaggatgttcgttccagcaagaccctgaagttgaccccgatgcagaaagcgggtctgtgctattatgaagatcttgctgatggcgttacgaaagccgaagctgacgcgatttctctgctggttcaggatgcagtctggactttcgacccggatgcgctggtggagattacgggtggatttcgtcgtgggaaaccttttggtcacgacgttgatctgcttatcacatctccgggagctgagaaagaacaagaagaccagctcctgcagaaagtgaccaatctgtggaagaaacaagggttgttgctgtacggtgacctgcgtgaaagtcgctttgaagatgggaaactcccatcccgcaagatcgatgccctggaccattttgcgaaatgctttctgatcctcaaactttatcaccataaagtggacaaaagcaaatgggaaatgccgacgggttcgaacgaaagcgaggccaaaagttggaaagcaattcgcgtagatctggttcgttgtccctacgatcgttttgcgtttgcgttgttgggttggaccggaagccgcatgttcgaacgtgatctgcgccgctacgccacccacgagaagaagatgatgctggacaatcatgcgctgtatgacctgaccaagaaaatctttctcaaagctaaatcggaagaggaaattttcgcacatctggggcttgaatacctggaaccgtccgaacgtaacgca

SEQ ID NO: 782 - protein, 529 aa, synthetic construct
  REGION 1..529: note = Variant of terminal deoxynucleotidyltransferase
MHHHHHHGGSGMHRIRTIDSEFGKKRQKKMDNKISSMIYEIKFHEFVLFILEEKMGASRRTFLTDLARKKGFRVENELSDSVTHIVAENNSGSDVLAWLKTHKMESTTQFELLDISWLIESMKVGKPVDTKGKYQLMESRVDSANPDPTAGTLNEEPPTTKTISQYACQRRTTLNNHNQRFTDALEILAENYEFKRNDDTCLTFMRAISVLKCLPFEVVSLKDTEGLPWIGDEVKGIMEEIIEVGESLEVQAVLNDERYQSFKLFKSVFGVGVKTADKWYRMGLRTLEDVRSSKTLKLTPMQKAGLCYYEDLADGVTKAEADAISLLVQDAVWTFDPDALVEITGGFRRGKPFGHDVDLLITSPGAEKEQEDQLLQKVTNLWKKQGLLLYGDLRESRFEDGKLPSRKIDALDHFAKCFLILKLYHHKVDKSKWEMPTGSNESEAKSWKAIRVDLVRCPYDRFAFALLGWTGSRMFERDLRRYATHEKKMMLDNHALYDLTKKIFLKAKSEEEIFAHLGLEYLEPSERNA

SEQ ID NO: 783 - DNA, 1587 bp, synthetic construct
  misc_feature 1..1587: note = Variant of terminal deoxynucleotidyltransferase
  source 1..1587: mol_type = other DNA
atgcaccatcatcatcatcatggcggtagcggcatgcaccgtattcgtaccatcgatagcgaattcgggaagaaacgccagaagaagatggataaccacattagttccatgatctatgaaatcaaatttcacgagtttgtgctgttcattctcgaagagaaaatgggtgcggcgcgtcgtacttttctgacagatttagcccgcaagaaagggttccgcgtcgagaatgaactgtcagacagcgttacccacatcgtggcagaaaataattcaggatctgacgtattggcttggctgaagactcacaagatggagaaaacgacgcaatttgaactgctggatattagctggcttatcgaaagcatgaaagtaggtaaaccggtggacaccaaggggaaataccagttgatggaatcgcgtgtcgatagtgcgaacccagatccgacagccggtaccctcaacgaagaacctcctactacgaagaccatttctcagtatgcgtgtcaacgccgcaccaccctgaacaaccataatcaacgttttacggacgcactggaaattcttgcggaaaattacgagttcaaacgcaacgatgatacttgtctgacctttatgcgtgctatttccgtgctgaaatgccttccgtttgaggtagttagcctgaaagacacggaaggattgccctggatcggtgatgaagtcaaagggattatggaagaaatcatcgaggtcggtgaatcgctggaagtgcaggccgtgctcaatgatgagcgctatcaaagcttcaaactgtttaagagtgtctttggagtgggggtgaagacagcagacaaatggtaccgtatgggtctgcgcacgctcgaggatgttcgttccagcaagaccctgaagttgaccccgatgcagaaagcgggtctgtgctattatgaagatcttgctgatggcgttacgaaagccgaagctgacgcgatttctctgctggttcaggatgcagtctggactttcgacccggatgcgctggtggagattacgggtggatttcgtcgtgggaaaccttttggtcacgacgttgatctgcttatcacatctccgggagctgagaaagaacaagaagaccagctcctgcagaaagtgaccaatctgtggaagaaacaagggttgttgctgtacggtgacctgcgtgaaagtcgctttgaagatgggaaactcccatcccgcaagatcgatgccctggaccattttgcgaaatgctttctgatcctcaaactttatcaccataaagtggacaaaagcaaatgggaaatgccgacgggttcgaacgaaagcgaggccaaaagttggaaagcaattcgcgtagatctggttcgttgtccctacgatcgttttgcgtttgcgttgttgggttggaccggaagccgcatgttcgaacgtgatctgcgccgctacgccacccacgagaagaagatgatgctggacaatcatgcgctgtatgacctgaccaagaaaatctttctcaaagctaaatcggaagaggaaattttcgcacatctggggcttgaatacctggaaccgtccgaacgtaacgca

SEQ ID NO: 784 - protein, 529 aa, synthetic construct
  REGION 1..529: note = Variant of terminal deoxynucleotidyltransferase
MHHHHHHGGSGMHRIRTIDSEFGKKRQKKMDNHISSMIYEIKFHEFVLFILEEKMGAARRTFLTDLARKKGFRVENELSDSVTHIVAENNSGSDVLAWLKTHKMEKTTQFELLDISWLIESMKVGKPVDTKGKYQLMESRVDSANPDPTAGTLNEEPPTTKTISQYACQRRTTLNNHNQRFTDALEILAENYEFKRNDDTCLTFMRAISVLKCLPFEVVSLKDTEGLPWIGDEVKGIMEEIIEVGESLEVQAVLNDERYQSFKLFKSVFGVGVKTADKWYRMGLRTLEDVRSSKTLKLTPMQKAGLCYYEDLADGVTKAEADAISLLVQDAVWTFDPDALVEITGGFRRGKPFGHDVDLLITSPGAEKEQEDQLLQKVTNLWKKQGLLLYGDLRESRFEDGKLPSRKIDALDHFAKCFLILKLYHHKVDKSKWEMPTGSNESEAKSWKAIRVDLVRCPYDRFAFALLGWTGSRMFERDLRRYATHEKKMMLDNHALYDLTKKIFLKAKSEEEIFAHLGLEYLEPSERNA

SEQ ID NO: 785 - DNA, 1587 bp, synthetic construct
  misc_feature 1..1587: note = Variant of terminal deoxynucleotidyltransferase
  source 1..1587: mol_type = other DNA
atgcaccatcatcatcatcatggcggtagcggcatgcaccgtattcgtaccatcgattcggacttcgggaagaaacgccagaagaagatggataacaagattagttccatgatctatgaaatcaaatttcacgagtttgtgctgttcattctcgaagagaaaatgggtgcggcgcgtcgtacttttctgacagatttagcccgcaagaaagggttccgcgtcgagaatgaactgtcagacagcgttacccacatcgtggcagaaaataattcaggatctgacgtattggcttggctgaagactcacaagatcgagtcgacgacgcaatttgaactgctggatattagctggcttatcgaaagcatgaaagttggtaaaccggtggacaccaaggggaaataccagttgatggaatcgcgtgtcgatagtgcgaacccagatccgacagccggtaccctcaacattctgcctcctactacgaagaccatttctcagtatgcgtgtcaacgccgcaccaccctgaacaaccataatcaacgttttacggacgcactggaaattcttgcggaaaattacgagttcaaacgcaacgatgatacttgtctgacctttatgcgtgctatttccgtgctgaaatgccttccgtttgaggtagttagcctgaaagacacggaaggattgccctggatcggtgatgaagtcaaagggattatggaagaaatcatcgaggtcggtgaatcgctggaagtgcaggccgtgctcaatgatgagcgctatcaaagcttcaaactgtttaagagtgtctttggagtgggggtgaagacagcagacaaatggtaccgtatgggtctgcgcacgctcgaggatgttcgttccagcaagaccctgaagttgaccccgatgcagaaagcgggtctgtgctattatgaagatcttgctgatggcgttacgaaagccgaagctgacgcgatttctctgctggttcaggatgcagtctggactttcgacccggatgcgctggtggagattacgggtggatttcgtcgtgggaaaccttttggtcacgacgttgatctgcttatcacatctccgggagctgagaaagaacaagaagaccagctcctgcagaaagtgaccaatctgtggaagaaacaagggttgttgctgtacggtgacctgcgtgaaagtcgctttgaagatgggaaactcccatcccgcaagatcgatgccctggaccattttgcgaaatgctttctgatcctcaaactttatcaccataaagtggacaaaagcaaatgggaaatgccgacgggttcgaacgaaagcgaggccaaaagttggaaagcaattcgcgtagatctggttcgttgtccctacgatcgttttgcgtttgcgttgttgggttggaccggaagccgcatgttcgaacgtgatctgcgccgctacgccacccacgagaagaagatgatgctggacaatcatgcgctgtatgacctgaccaagaaaatctttctcaaagctaaatcggaagaggaaattttcgcacatctggggcttgaatacctggaaccgtccgaacgtaacgca

SEQ ID NO: 786 - protein, 529 aa, synthetic construct
  REGION 1..529: note = Variant of terminal deoxynucleotidyltransferase
MHHHHHHGGSGMHRIRTIDSDFGKKRQKKMDNKISSMIYEIKFHEFVLFILEEKMGAARRTFLTDLARKKGFRVENELSDSVTHIVAENNSGSDVLAWLKTHKIESTTQFELLDISWLIESMKVGKPVDTKGKYQLMESRVDSANPDPTAGTLNILPPTTKTISQYACQRRTTLNNHNQRFTDALEILAENYEFKRNDDTCLTFMRAISVLKCLPFEVVSLKDTEGLPWIGDEVKGIMEEIIEVGESLEVQAVLNDERYQSFKLFKSVFGVGVKTADKWYRMGLRTLEDVRSSKTLKLTPMQKAGLCYYEDLADGVTKAEADAISLLVQDAVWTFDPDALVEITGGFRRGKPFGHDVDLLITSPGAEKEQEDQLLQKVTNLWKKQGLLLYGDLRESRFEDGKLPSRKIDALDHFAKCFLILKLYHHKVDKSKWEMPTGSNESEAKSWKAIRVDLVRCPYDRFAFALLGWTGSRMFERDLRRYATHEKKMMLDNHALYDLTKKIFLKAKSEEEIFAHLGLEYLEPSERNA

SEQ ID NO: 787 - DNA, 1587 bp, synthetic construct
  misc_feature 1..1587: note = Variant of terminal deoxynucleotidyltransferase
  source 1..1587: mol_type = other DNA
atgcaccatcatcatcatcatggcggtagcggcatgcaccgcattcgtaccatcgattcggacttcgggaagaaacgccagaagaagatggataaccacagtagttcctttatctatgaaatcaaatttcacgagtttgtgctgttcattctcgaagagaaaatgggtgcgacgcgtcgtacttttctgacagatttagcccgcaagaaagggttccgcgtcgagaatgaactgtcagacagcgttacccacatcgtggcagaaaataattcaggatctgacgtattggcttggctgaagactcacaagatggaggtcacgacgcaatttgaactgctggatattagctggcttatcgaaagcatgaaagttggtaaaccggtggacaccaaggggaaataccagttgatggaatcgggtgagatgagtgcggagccagatccgacagccggtaccctcaacattctgcctcctactacgaagaccatttctcagtatgcgtgtcaacgccgcaccaccctgaacaaccataatcaacgttttacggacgcactggaaattcttgcggaaaattacgagttcaaacgcaacgatgatacttgtctgacctttatgcgtgctatttccgtgctgaaatgccttccgtttgaggtagttagcctgaaagacacggaaggattgccctggatcggtgatgaagtcaaagggattatggaagaaatcatcgaggtcggtgaatcgctggaagtgcaggccgtgctcaatgatgagcgctatcaaagcttcaaactgtttaagagtgtctttggagtgggggtgaagacagcagacaaatggtaccgtatgggtctgcgcacgctcgaggatgttcgttccagcaagaccctgaagttgaccccgatgcagaaagcgggtctgtgctattatgaagatcttgctgatggcgttacgaaagccgaagctgacgcgatttctctgctggttcaggatgcagtctggactttcgacccggatgcgctggtggagattacgggtggatttcgtcgtgggaaaccttttggtcacgacgttgatctgcttatcacatctccgggagctgagaaagaacaagaagaccagctcctgcagaaagtgaccaatctgtggaagaaacaagggttgttgctgtacggtgacctgcgtgaaagtcgctttgaagatgggaaactcccatcccgcaagatcgatgccctggaccattttgcgaaatgctttctgatcctcaaactttatcaccataaagtggacaaaagcaaatgggaaatgccgacgggttcgaacgaaagcgaggccaaaagttggaaagcaattcgcgtagatctggttcgttgtccctacgatcgttttgcgtttgcgttgttgggttggaccggaagccgcatgttcgaacgtgatctgcgccgctacgccacccacgagaagaagatgatgctggacaatcatgcgctgtatgacctgaccaagaaaatctttctcaaagctaaatcggaagaggaaattttcgcacatctggggcttgaatacctggaaccgtccgaacgtaacgca

SEQ ID NO: 788 - protein, 529 aa, synthetic construct
  REGION 1..529: note = Variant of terminal deoxynucleotidyltransferase
MHHHHHHGGSGMHRIRTIDSDFGKKRQKKMDNHSSSFIYEIKFHEFVLFILEEKMGATRRTFLTDLARKKGFRVENELSDSVTHIVAENNSGSDVLAWLKTHKMEVTTQFELLDISWLIESMKVGKPVDTKGKYQLMESGEMSAEPDPTAGTLNILPPTTKTISQYACQRRTTLNNHNQRFTDALEILAENYEFKRNDDTCLTFMRAISVLKCLPFEVVSLKDTEGLPWIGDEVKGIMEEIIEVGESLEVQAVLNDERYQSFKLFKSVFGVGVKTADKWYRMGLRTLEDVRSSKTLKLTPMQKAGLCYYEDLADGVTKAEADAISLLVQDAVWTFDPDALVEITGGFRRGKPFGHDVDLLITSPGAEKEQEDQLLQKVTNLWKKQGLLLYGDLRESRFEDGKLPSRKIDALDHFAKCFLILKLYHHKVDKSKWEMPTGSNESEAKSWKAIRVDLVRCPYDRFAFALLGWTGSRMFERDLRRYATHEKKMMLDNHALYDLTKKIFLKAKSEEEIFAHLGLEYLEPSERNA

SEQ ID NO: 789 - DNA, 1587 bp, synthetic construct
  misc_feature 1..1587: note = Variant of terminal deoxynucleotidyltransferase
  source 1..1587: mol_type = other DNA
atgcaccatcatcatcatcatggcggtagcggcagccacggcattcgtaccatcgattcggacttcgggaagaaacgccagaagaagatggataaccacattagttccatgatctatgaaatcaaatttcacgagtttgtgctgttcattctcgaagagaaaatgggtgcgacgcgtcgtacttttctgacagatttagcccgcaagaaagggttccgcgtcgagaatgaactgtcagacagcgttacccacatcgtggcagaaaataattcaggatctgacgtattggcttggctgaagactcacaagatggaggtcacgacgcaatttgaactgctggatattagctggcttatcgaaagcatgaaagttggtaaaccggtggacaccaaggggaaataccagttgatggaatcgcgtgagagcagtgcgaacccagatccgacagccggtaccctcaacattctgcctcctactacgaagaccatttctcagtatgcgtgtcaacgccgcaccaccctgaacaaccataatcaacgttttacggacgcactggaaattcttgcggaaaattacgagttcaaacgcaacgatgatacttgtctgacctttatgcgtgctatttccgtgctgaaatgccttccgtttgaggtagttagcctgaaagacacggaaggattgccctggatcggtgatgaagtcaaagggattatggaagaaatcatcgaggtcggtgaatcgctggaagtgcaggccgtgctcaatgatgagcgctatcaaagcttcaaactgtttaagagtgtctttggagtgggggtgaagacagcagacaaatggtaccgtatgggtctgcgcacgctcgaggatgttcgttccagcaagaccctgaagttgaccccgatgcagaaagcgggtctgtgctattatgaagatcttgctgatggcgttacgaaagccgaagctgacgcgatttctctgctggttcaggatgcagtctggactttcgacccggatgcgctggtggagattacgggtggatttcgtcgtgggaaaccttttggtcacgacgttgatctgcttatcacatctccgggagctgagaaagaacaagaagaccagctcctgcagaaagtgaccaatctgtggaagaaacaagggttgttgctgtacggtgacctgcgtgaaagtcgctttgaagatgggaaactcccatcccgcaagatcgatgccctggaccattttgcgaaatgctttctgatcctcaaactttatcaccataaagtggacaaaagcaaatgggaaatgccgacgggttcgaacgaaagcgaggccaaaagttggaaagcaattcgcgtagatctggttcgttgtccctacgatcgttttgcgtttgcgttgttgggttggaccggaagccgcatgttcgaacgtgatctgcgccgctacgccacccacgagaagaagatgatgctggacaatcatgcgctgtatgacctgaccaagaaaatctttctcaaagctaaatcggaagaggaaattttcgcacatctggggcttgaatacctggaaccgtccgaacgtaacgca

SEQ ID NO: 790 - protein, 529 aa, synthetic construct
  REGION 1..529: note = Variant of terminal deoxynucleotidyltransferase
MHHHHHHGGSGSHGIRTIDSDFGKKRQKKMDNHISSMIYEIKFHEFVLFILEEKMGATRRTFLTDLARKKGFRVENELSDSVTHIVAENNSGSDVLAWLKTHKMEVTTQFELLDISWLIESMKVGKPVDTKGKYQLMESRESSANPDPTAGTLNILPPTTKTISQYACQRRTTLNNHNQRFTDALEILAENYEFKRNDDTCLTFMRAISVLKCLPFEVVSLKDTEGLPWIGDEVKGIMEEIIEVGESLEVQAVLNDERYQSFKLFKSVFGVGVKTADKWYRMGLRTLEDVRSSKTLKLTPMQKAGLCYYEDLADGVTKAEADAISLLVQDAVWTFDPDALVEITGGFRRGKPFGHDVDLLITSPGAEKEQEDQLLQKVTNLWKKQGLLLYGDLRESRFEDGKLPSRKIDALDHFAKCFLILKLYHHKVDKSKWEMPTGSNESEAKSWKAIRVDLVRCPYDRFAFALLGWTGSRMFERDLRRYATHEKKMMLDNHALYDLTKKIFLKAKSEEEIFAHLGLEYLEPSERNA

SEQ ID NO: 791 - DNA, 1587 bp, synthetic construct
  misc_feature 1..1587: note = Variant of terminal deoxynucleotidyltransferase
  source 1..1587: mol_type = other DNA
atgcaccatcatcatcatcatggcggtagcggcatgcaccgtattcgtaccatcgattcggacttcgggaagaaacgccagaagaagatggataaccacattagttccatgatctatgaaatcaaatttcacgagtttgtgctgttcattctcgaagagaaaatgggtgcgacgcgtcgtacttttctgacagatttagcccgcaagaaagggttccgcgtcgagaatgaactgtcagacagcgttacccacatcgtggcagaaaataattcaggatctgacgtattggcttggctgaagactcacaagatggaggtcacgacgcaatttgaactgctggatattagctggcttatcgaaagcatgaaagttggtaaaccggtggacaccaaggggaaataccagttgatggaatcgggtgtggatagtgcggagccagatccgacagagggtcgtctgaacattctgcctcctactacgaagaccatttctcagtatgcgtgtcaacgccgcaccaccctgaacaaccataatcaacgttttacggacgcactggaaattcttgcggaaaattacgagttcaaacgcaacgatgatacttgtctgacctttatgcgtgctatttccgtgctgaaatgccttccgtttgaggtagttagcctgaaagacacggaaggattgccctggatcggtgatgaagtcaaagggattatggaagaaatcatcgaggtcggtgaatcgctggaagtgcaggccgtgctcaatgatgagcgctatcaaagcttcaaactgtttaagagtgtctttggagtgggggtgaagacagcagacaaatggtaccgtatgggtctgcgcacgctcgaggatgttcgttccagcaagaccctgaagttgaccccgatgcagaaagcgggtctgtgctattatgaagatcttgctgatggcgttacgaaagccgaagctgacgcgatttctctgctggttcaggatgcagtctggactttcgacccggatgcgctggtggagattacgggtggatttcgtcgtgggaaaccttttggtcacgacgttgatctgcttatcacatctccgggagctgagaaagaacaagaagaccagctcctgcagaaagtgaccaatctgtggaagaaacaagggttgttgctgtacggtgacctgcgtgaaagtcgctttgaagatgggaaactcccatcccgcaagatcgatgccctggaccattttgcgaaatgctttctgatcctcaaactttatcaccataaagtggacaaaagcaaatgggaaatgccgacgggttcgaacgaaagcgaggccaaaagttggaaagcaattcgcgtagatctggttcgttgtccctacgatcgttttgcgtttgcgttgttgggttggaccggaagccgcatgttcgaacgtgatctgcgccgctacgccacccacgagaagaagatgatgctggacaatcatgcgctgtatgacctgaccaagaaaatctttctcaaagctaaatcggaagaggaaattttcgcacatctggggcttgaatacctggaaccgtccgaacgtaacgca

SEQ ID NO: 792 - protein, 529 aa, synthetic construct
  REGION 1..529: note = Variant of terminal deoxynucleotidyltransferase
MHHHHHHGGSGMHRIRTIDSDFGKKRQKKMDNHISSMIYEIKFHEFVLFILEEKMGATRRTFLTDLARKKGFRVENELSDSVTHIVAENNSGSDVLAWLKTHKMEVTTQFELLDISWLIESMKVGKPVDTKGKYQLMESGVDSAEPDPTEGRLNILPPTTKTISQYACQRRTTLNNHNQRFTDALEILAENYEFKRNDDTCLTFMRAISVLKCLPFEVVSLKDTEGLPWIGDEVKGIMEEIIEVGESLEVQAVLNDERYQSFKLFKSVFGVGVKTADKWYRMGLRTLEDVRSSKTLKLTPMQKAGLCYYEDLADGVTKAEADAISLLVQDAVWTFDPDALVEITGGFRRGKPFGHDVDLLITSPGAEKEQEDQLLQKVTNLWKKQGLLLYGDLRESRFEDGKLPSRKIDALDHFAKCFLILKLYHHKVDKSKWEMPTGSNESEAKSWKAIRVDLVRCPYDRFAFALLGWTGSRMFERDLRRYATHEKKMMLDNHALYDLTKKIFLKAKSEEEIFAHLGLEYLEPSERNA

SEQ ID NO: 793 - DNA, 1587 bp, synthetic construct
  misc_feature 1..1587: note = Variant of terminal deoxynucleotidyltransferase
  source 1..1587: mol_type = other DNA
atgcaccatcatcatcatcatggcggtagcggcatgcaccgtattcgtaccatcgatagcgacttcgggaagaaacgccagaagaagatggataacaagattagttccatgatctatgaaatcaaatttcacgagtttgtgctgttcattctcgaagagaaaatgggtgcgacgcgtcgtacttttctgacagatttagcccgcaagaaagggttccgcgtcgagaatgaactgtcagacagcgttacccacatcgtggcagaaaataattcaggatctgacgtattggcttggctgaaggagcacaagccggagaaaacgacgcaatttgaactgctggatattagctggcttatcgaaagcatgaaagtaggtaaaccggtggacaccaaggggaaataccagttgatggaatcgcgtgtcgatagtgcgaacccagatccgacagccggtaccctcaacgaactgcctcctactacgaagaccatttctcagtatgcgtgtcaacgccgcaccaccctgaacaaccataatcaacgttttacggacgcactggaaattcttgcggaaaattacgagttcaaacgcaacgatgatacttgtctgacctttatgcgtgctatttccgtgctgaaatgccttccgtttgaggtagttagcctgaaagacacggaaggattgccctggatcggtgatgaagtcaaagggattatggaagaaatcatcgaggtcggtgaatcgctggaagtgcaggccgtgctcaatgatgagcgctatcaaagcttcaaactgtttaagagtgtctttggagtgggggtgaagacagcagacaaatggtaccgtatgggtctgcgcacgctcgaggatgttcgttccagcaagaccctgaagttgaccccgatgcagaaagcgggtctgtgctattatgaagatcttgctgatggcgttacgaaagccgaagctgacgcgatttctctgctggttcaggatgcagtctggactttcgacccggatgcgctggtggagattacgggtggatttcgtcgtgggaaaccttttggtcacgacgttgatctgcttatcacatctccgggagctgagaaagaacaagaagaccagctcctgcagaaagtgaccaatctgtggaagaaacaagggttgttgctgtacggtgacctgcgtgaaagtcgctttgaagatgggaaactcccatcccgcaagatcgatgccctggaccattttgcgaaatgctttctgatcctcaaactttatcaccataaagtggacaaaagcaaatgggaaatgccgacgggttcgaacgaaagcgaggccaaaagttggaaagcaattcgcgtagatctggttcgttgtccctacgatcgttttgcgtttgcgttgttgggttggaccggaagccgcatgttcgaacgtgatctgcgccgctacgccacccacgagaagaagatgatgctggacaatcatgcgctgtatgacctgaccaagaaaatctttctcaaagctaaatcggaagaggaaattttcgcacatctggggcttgaatacctggaaccgtccgaacgtaacgca

SEQ ID NO: 794 - protein, 529 aa, synthetic construct
  REGION 1..529: note = Variant of terminal deoxynucleotidyltransferase
MHHHHHHGGSGMHRIRTIDSDFGKKRQKKMDNKISSMIYEIKFHEFVLFILEEKMGATRRTFLTDLARKKGFRVENELSDSVTHIVAENNSGSDVLAWLKEHKPEKTTQFELLDISWLIESMKVGKPVDTKGKYQLMESRVDSANPDPTAGTLNELPPTTKTISQYACQRRTTLNNHNQRFTDALEILAENYEFKRNDDTCLTFMRAISVLKCLPFEVVSLKDTEGLPWIGDEVKGIMEEIIEVGESLEVQAVLNDERYQSFKLFKSVFGVGVKTADKWYRMGLRTLEDVRSSKTLKLTPMQKAGLCYYEDLADGVTKAEADAISLLVQDAVWTFDPDALVEITGGFRRGKPFGHDVDLLITSPGAEKEQEDQLLQKVTNLWKKQGLLLYGDLRESRFEDGKLPSRKIDALDHFAKCFLILKLYHHKVDKSKWEMPTGSNESEAKSWKAIRVDLVRCPYDRFAFALLGWTGSRMFERDLRRYATHEKKMMLDNHALYDLTKKIFLKAKSEEEIFAHLGLEYLEPSERNA

SEQ ID NO: 795 - DNA, 1587 bp, synthetic construct
  misc_feature 1..1587: note = Variant of terminal deoxynucleotidyltransferase
  source 1..1587: mol_type = other DNA
atgcaccatcatcatcatcatggcggtagcggcatgcaccgtattcgtaccatcgattcggacttcgggaagaaacgccagaagaagatggataaccacattagttccatgatctatgaaatcaaatttcacgagtttgtgctgttcattctcgaagagaaaatgggtgcgacgcgtcgtacttttctgacagatttagcccgcaagaaagggttccgcgtcgagaatgaactgtcagacagcgttacccacatcgtggcagaaaataattcaggatctgacgtattggcttggctgaaggagcacaagatcgagaaaacgacgcaatttgaactgctggatattagctggcttatcgaaagcatgaaagttggtaaaccggtggacaccaaggggaaataccagttgatggaatcgcgtgtcgatagtgcgaacccagatccgacagccggtaccctcaacatcgaacctcctactacgaagaccatttctcagtatgcgtgtcaacgccgcaccaccctgaacaaccataatcaacgttttacggacgcactggaaattcttgcggaaaattacgagttcaaacgcaacgatgatacttgtctgacctttatgcgtgctatttccgtgctgaaatgccttccgtttgaggtagttagcctgaaagacacggaaggattgccctggatcggtgatgaagtcaaagggattatggaagaaatcatcgaggtcggtgaatcgctggaagtgcaggccgtgctcaatgatgagcgctatcaaagcttcaaactgtttaagagtgtctttggagtgggggtgaagacagcagacaaatggtaccgtatgggtctgcgcacgctcgaggatgttcgttccagcaagaccctgaagttgaccccgatgcagaaagcgggtctgtgctattatgaagatcttgctgatggcgttacgaaagccgaagctgacgcgatttctctgctggttcaggatgcagtctggactttcgacccggatgcgctggtggagattacgggtggatttcgtcgtgggaaaccttttggtcacgacgttgatctgcttatcacatctccgggagctgagaaagaacaagaagaccagctcctgcagaaagtgaccaatctgtggaagaaacaagggttgttgctgtacggtgacctgcgtgaaagtcgctttgaagatgggaaactcccatcccgcaagatcgatgccctggaccattttgcgaaatgctttctgatcctcaaactttatcaccataaagtggacaaaagcaaatgggaaatgccgacgggttcgaacgaaagcgaggccaaaagttggaaagcaattcgcgtagatctggttcgttgtccctacgatcgttttgcgtttgcgttgttgggttggaccggaagccgcatgttcgaacgtgatctgcgccgctacgccacccacgagaagaagatgatgctggacaatcatgcgctgtatgacctgaccaagaaaatctttctcaaagctaaatcggaagaggaaattttcgcacatctggggcttgaatacctggaaccgtccgaacgtaacgca

SEQ ID NO: 796 - protein, 529 aa, synthetic construct
  REGION 1..529: note = Variant of terminal deoxynucleotidyltransferase
MHHHHHHGGSGMHRIRTIDSDFGKKRQKKMDNHISSMIYEIKFHEFVLFILEEKMGATRRTFLTDLARKKGFRVENELSDSVTHIVAENNSGSDVLAWLKEHKIEKTTQFELLDISWLIESMKVGKPVDTKGKYQLMESRVDSANPDPTAGTLNIEPPTTKTISQYACQRRTTLNNHNQRFTDALEILAENYEFKRNDDTCLTFMRAISVLKCLPFEVVSLKDTEGLPWIGDEVKGIMEEIIEVGESLEVQAVLNDERYQSFKLFKSVFGVGVKTADKWYRMGLRTLEDVRSSKTLKLTPMQKAGLCYYEDLADGVTKAEADAISLLVQDAVWTFDPDALVEITGGFRRGKPFGHDVDLLITSPGAEKEQEDQLLQKVTNLWKKQGLLLYGDLRESRFEDGKLPSRKIDALDHFAKCFLILKLYHHKVDKSKWEMPTGSNESEAKSWKAIRVDLVRCPYDRFAFALLGWTGSRMFERDLRRYATHEKKMMLDNHALYDLTKKIFLKAKSEEEIFAHLGLEYLEPSERNA

SEQ ID NO: 797 - DNA, 1587 bp, synthetic construct
  misc_feature 1..1587: note = Variant of terminal deoxynucleotidyltransferase
  source 1..1587: mol_type = other DNA
atgcaccatcatcatcatcatggcggtagcggcatgcaccgtattcgtaccatcgattcggacttcgggaagaaacgccagaagaagatggataaccacattagttccatgatctatgaaatcaaatttcacgagtttgtgctgttcattctcgaagagaaaatgggtgcgacgcgtcgtacttttctgacagatttagcccgcaagaaagggttccgcgtcgagaatgaactgtcagacagcgttacccacatcgtggcagaaaataattcaggatctgacgtattggcttggctgaaggagcacaagatcgagaaaacgacgcaatttgaactgctggatattagctggcttatcgaaagcatgaaagttggtaaaccggtggacaccaaggggaaataccagttgatggaatcgcgtgtcgatagtgcgaacccagatccgacagccggtaccctcaacattctgcctcctactacgaagaccatttctcagtatgcgtgtcaacgccgcaccaccctgaacaaccataatcaacgttttacggacgcactggaaattcttgcggaaaattacgagttcaaacgcaacgatgatacttgtctgacctttatgcgtgctatttccgtgctgaaatgccttccgtttgaggtagttagcctgaaagacacggaaggattgccctggatcggtgatgaagtcaaagggattatggaagaaatcatcgaggtcggtgaatcgctggaagtgcaggccgtgctcaatgatgagcgctatcaaagcttcaaactgtttaagagtgtctttggagtgggggtgaagacagcagacaaatggtaccgtatgggtctgcgcacgctcgaggatgttcgttccagcaagaccctgaagttgaccccgatgcagaaagcgggtctgtgctattatgaagatcttgctgatggcgttacgaaagccgaagctgacgcgatttctctgctggttcaggatgcagtctggactttcgacccggatgcgctggtggagattacgggtggatttcgtcgtgggaaaccttttggtcacgacgttgatctgcttatcacatctccgggagctgagaaagaacaagaagaccagctcctgcagaaagtgaccaatctgtggaagaaacaagggttgttgctgtacggtgacctgcgtgaaagtcgctttgaagatgggaaactcccatcccgcaagatcgatgccctggaccattttgcgaaatgctttctgatcctcaaactttatcaccataaagtggacaaaagcaaatgggaaatgccgacgggttcgaacgaaagcgaggccaaaagttggaaagcaattcgcgtagatctggttcgttgtccctacgatcgttttgcgtttgcgttgttgggttggaccggaagccgcatgttcgaacgtgatctgcgccgctacgccacccacgagaagaagatgatgctggacaatcatgcgctgtatgacctgaccaagaaaatctttctcaaagctaaatcggaagaggaaattttcgcacatctggggcttgaatacctggaaccgtccgaacgtaacgca

SEQ ID NO: 798 - protein, 529 aa, synthetic construct
  REGION 1..529: note = Variant of terminal deoxynucleotidyltransferase
MHHHHHHGGSGMHRIRTIDSDFGKKRQKKMDNHISSMIYEIKFHEFVLFILEEKMGATRRTFLTDLARKKGFRVENELSDSVTHIVAENNSGSDVLAWLKEHKIEKTTQFELLDISWLIESMKVGKPVDTKGKYQLMESRVDSANPDPTAGTLNILPPTTKTISQYACQRRTTLNNHNQRFTDALEILAENYEFKRNDDTCLTFMRAISVLKCLPFEVVSLKDTEGLPWIGDEVKGIMEEIIEVGESLEVQAVLNDERYQSFKLFKSVFGVGVKTADKWYRMGLRTLEDVRSSKTLKLTPMQKAGLCYYEDLADGVTKAEADAISLLVQDAVWTFDPDALVEITGGFRRGKPFGHDVDLLITSPGAEKEQEDQLLQKVTNLWKKQGLLLYGDLRESRFEDGKLPSRKIDALDHFAKCFLILKLYHHKVDKSKWEMPTGSNESEAKSWKAIRVDLVRCPYDRFAFALLGWTGSRMFERDLRRYATHEKKMMLDNHALYDLTKKIFLKAKSEEEIFAHLGLEYLEPSERNA

SEQ ID NO: 799 - DNA, 1587 bp, synthetic construct
  misc_feature 1..1587: note = Variant of terminal deoxynucleotidyltransferase
  source 1..1587: mol_type = other DNA
atgcaccatcatcatcatcatggcggtagcggcatgcaccgtattcgtaccatcgatagcgacttcgggaagaaacgccagaagaagatggataaccacattagttccatgatctatgaaatcaaatttcacgagtttgtgctgttcattctcgaagagaaaatgggtgcgacgcgtcgtacttttctgacagatttagcccgcaagaaagggttccgcgtcgagaatgaactgtcagacagcgttacccacatcgtggcagaaaataattcaggatctgacgtattggcttggctgaagactcacaagatcgagaaaacgacgcaatttgaactgctggatattagctggcttatcgaaagcatgaaagttggtaaaccggtggacaccaaggggaaataccagttgatggaatcgcgtgtcgatagtgcgaacccagatccgacagccggtaccctcaacatcctgcctcctactacgaagaccatttctcagtatgcgtgtcaacgccgcaccaccctgaacaaccataatcaacgttttacggacgcactggaaattcttgcggaaaattacgagttcaaacgcaacgatgatacttgtctgacctttatgcgtgctatttccgtgctgaaatgccttccgtttgaggtagttagcctgaaagacacggaaggattgccctggatcggtgatgaagtcaaagggattatggaagaaatcatcgaggtcggtgaatcgctggaagtgcaggccgtgctcaatgatgagcgctatcaaagcttcaaactgtttaagagtgtctttggagtgggggtgaagacagcagacaaatggtaccgtatgggtctgcgcacgctcgaggatgttcgttccagcaagaccctgaagttgaccccgatgcagaaagcgggtctgtgctattatgaagatcttgctgatggcgttacgaaagccgaagctgacgcgatttctctgctggttcaggatgcagtctggactttcgacccggatgcgctggtggagattacgggtggatttcgtcgtgggaaaccttttggtcacgacgttgatctgcttatcacatctccgggagctgagaaagaacaagaagaccagctcctgcagaaagtgaccaatctgtggaagaaacaagggttgttgctgtacggtgacctgcgtgaaagtcgctttgaagatgggaaactcccatcccgcaagatcgatgccctggaccattttgcgaaatgctttctgatcctcaaactttatcaccataaagtggacaaaagcaaatgggaaatgccgacgggttcgaacgaaagcgaggccaaaagttggaaagcaattcgcgtagatctggttcgttgtccctacgatcgttttgcgtttgcgttgttgggttggaccggaagccgcatgttcgaacgtgatctgcgccgctacgccacccacgagaagaagatgatgctggacaatcatgcgctgtatgacctgaccaagaaaatctttctcaaagctaaatcggaagaggaaattttcgcacatctggggcttgaatacctggaaccgtccgaacgtaacgca

SEQ ID NO: 800 - protein, 529 aa, synthetic construct
  REGION 1..529: note = Variant of terminal deoxynucleotidyltransferase
MHHHHHHGGSGMHRIRTIDSDFGKKRQKKMDNHISSMIYEIKFHEFVLFILEEKMGATRRTFLTDLARKKGFRVENELSDSVTHIVAENNSGSDVLAWLKTHKIEKTTQFELLDISWLIESMKVGKPVDTKGKYQLMESRVDSANPDPTAGTLNILPPTTKTISQYACQRRTTLNNHNQRFTDALEILAENYEFKRNDDTCLTFMRAISVLKCLPFEVVSLKDTEGLPWIGDEVKGIMEEIIEVGESLEVQAVLNDERYQSFKLFKSVFGVGVKTADKWYRMGLRTLEDVRSSKTLKLTPMQKAGLCYYEDLADGVTKAEADAISLLVQDAVWTFDPDALVEITGGFRRGKPFGHDVDLLITSPGAEKEQEDQLLQKVTNLWKKQGLLLYGDLRESRFEDGKLPSRKIDALDHFAKCFLILKLYHHKVDKSKWEMPTGSNESEAKSWKAIRVDLVRCPYDRFAFALLGWTGSRMFERDLRRYATHEKKMMLDNHALYDLTKKIFLKAKSEEEIFAHLGLEYLEPSERNA

SEQ ID NO: 801 - DNA, 1587 bp, synthetic construct
  misc_feature 1..1587: note = Variant of terminal deoxynucleotidyltransferase
  source 1..1587: mol_type = other DNA
atgcaccatcatcatcatcatggcggtagcggcagccacggcattcgtaccatcgattcggacttcgggaagaaacgccagaagaagatggataaccacattagttccatgatctatgaaatcaaatttcacgagtttgtgctgttcattctcgaagagaaaatgggtgcgacgcgtcgtacttttctgacagatttagcccgcaagaaagggttccgcgtcgagaatgaactgtcagacagcgttacccacatcgtggcagaaaataattcaggttctgatgtattggcttggctgaagactcacaagatggagaagaccaagcaatttgaactgctggatattagctggcttatcgaaagcatgaaagttggtaaaccggtggacaccaaggggaaataccagttgatggaatcgcgtgtcgatagtgcgaacccagatccgacagcgggtcgtctgaacattctgcctcctactacgaagaccatttctcagtatgcgtgtcaacgccgcaccaccctgaacaaccataatcaacgttttacggacgcactggaaattcttgcggaaaattacgagttcaaacgcaacgatgatacttgtctgacctttatgcgtgctatttccgtgctgaaatgccttccgtttgaggtagttagcctgaaagacacggaaggattgccctggatcggtgatgaagtcaaagggattatggaagaaatcatcgaggtcggtgaatcgctggaagtgcaggccgtgctcaatgatgagcgctatcaaagcttcaaactgtttaagagtgtctttggagtgggggtgaagacagcagacaaatggtaccgtatgggtctgcgcacgctcgaggatgttcgttccagcaagaccctgaagttgaccccgatgcagaaagcgggtctgtgctattatgaagatcttgctgatggcgttacgaaagccgaagctgacgcgatttctctgctggttcaggatgcagtctggactttcgacccggatgcgctggtggagattacgggtggatttcgtcgtgggaaaccttttggtcacgacgttgatctgcttatcacatctccgggagctgagaaagaacaagaagaccagctcctgcagaaagtgaccaatctgtggaagaaacaagggttgttgctgtacggtgacctgcgtgaaagtcgctttgaagatgggaaactcccatcccgcaagatcgatgccctggaccattttgcgaaatgctttctgatcctcaaactttatcaccataaagtggacaaaagcaaatgggaaatgccgacgggttcgaacgaaagcgaggccaaaagttggaaagcaattcgcgtagatctggttcgttgtccctacgatcgttttgcgtttgcgttgttgggttggaccggaagccgcatgttcgaacgtgatctgcgccgctacgccacccacgagaagaagatgatgctggacaatcatgcgctgtatgacctgaccaagaaaatctttctcaaagctaaatcggaagaggaaattttcgcacatctggggcttgaatacctggaaccgtccgaacgtaacgca

SEQ ID NO: 802 - protein, 529 aa, synthetic construct
  REGION 1..529: note = Variant of terminal deoxynucleotidyltransferase
MHHHHHHGGSGSHGIRTIDSDFGKKRQKKMDNHISSMIYEIKFHEFVLFILEEKMGATRRTFLTDLARKKGFRVENELSDSVTHIVAENNSGSDVLAWLKTHKMEKTKQFELLDISWLIESMKVGKPVDTKGKYQLMESRVDSANPDPTAGRLNILPPTTKTISQYACQRRTTLNNHNQRFTDALEILAENYEFKRNDDTCLTFMRAISVLKCLPFEVVSLKDTEGLPWIGDEVKGIMEEIIEVGESLEVQAVLNDERYQSFKLFKSVFGVGVKTADKWYRMGLRTLEDVRSSKTLKLTPMQKAGLCYYEDLADGVTKAEADAISLLVQDAVWTFDPDALVEITGGFRRGKPFGHDVDLLITSPGAEKEQEDQLLQKVTNLWKKQGLLLYGDLRESRFEDGKLPSRKIDALDHFAKCFLILKLYHHKVDKSKWEMPTGSNESEAKSWKAIRVDLVRCPYDRFAFALLGWTGSRMFERDLRRYATHEKKMMLDNHALYDLTKKIFLKAKSEEEIFAHLGLEYLEPSERNA

SEQ ID NO: 803 - DNA, 1587 bp, synthetic construct
  misc_feature 1..1587: note = Variant of terminal deoxynucleotidyltransferase
  source 1..1587: mol_type = other DNA
atgcaccatcatcatcatcatggcggtagcggcagccacggcattcgtaccatcgattcggacttcgggaagaaacgccagaagaagatggataaccacgatagttcctttatctatgaaatcaaatttcacgagtttgtgctgttcattctcgaagagaaaatgggtgcgacgcgtcgtacttttctgacagatttagcccgcaagaaagggttccgcgtcgagaatgaactgtcagacagcgttacccacatcgtggcagaaaataattcaggatctgacgtattggcttggctgaagactcacaagatggaggtcacgacgcaatttgaactgctggatattagctggcttatcgaaagcatgaaagttggtaaaccggtggacaccaaggggaaataccagttgatggaatcgcgtgtgagcagtgcggagccagatccgacagccggtaccctcaacattctgcctcctactacgaagaccatttctcagtatgcgtgtcaacgccgcaccaccctgaacaaccataatcaacgttttacggacgcactggaaattcttgcggaaaattacgagttcaaacgcaacgatgatacttgtctgacctttatgcgtgctatttccgtgctgaaatgccttccgtttgaggtagttagcctgaaagacacggaaggattgccctggatcggtgatgaagtcaaagggattatggaagaaatcatcgaggtcggtgaatcgctggaagtgcaggccgtgctcaatgatgagcgctatcaaagcttcaaactgtttaagagtgtctttggagtgggggtgaagacagcagacaaatggtaccgtatgggtctgcgcacgctcgaggatgttcgttccagcaagaccctgaagttgaccccgatgcagaaagcgggtctgtgctattatgaagatcttgctgatggcgttacgaaagccgaagctgacgcgatttctctgctggttcaggatgcagtctggactttcgacccggatgcgctggtggagattacgggtggatttcgtcgtgggaaaccttttggtcacgacgttgatctgcttatcacatctccgggagctgagaaagaacaagaagaccagctcctgcagaaagtgaccaatctgtggaagaaacaagggttgttgctgtacggtgacctgcgtgaaagtcgctttgaagatgggaaactcccatcccgcaagatcgatgccctggaccattttgcgaaatgctttctgatcctcaaactttatcaccataaagtggacaaaagcaaatgggaaatgccgacgggttcgaacgaaagcgaggccaaaagttggaaagcaattcgcgtagatctggttcgttgtccctacgatcgttttgcgtttgcgttgttgggttggaccggaagccgcatgttcgaacgtgatctgcgccgctacgccacccacgagaagaagatgatgctggacaatcatgcgctgtatgacctgaccaagaaaatctttctcaaagctaaatcggaagaggaaattttcgcacatctggggcttgaatacctggaaccgtccgaacgtaacgca

SEQ ID NO: 804 - protein, 529 aa, synthetic construct
  REGION 1..529: note = Variant of terminal deoxynucleotidyltransferase
MHHHHHHGGSGSHGIRTIDSDFGKKRQKKMDNHDSSFIYEIKFHEFVLFILEEKMGATRRTFLTDLARKKGFRVENELSDSVTHIVAENNSGSDVLAWLKTHKMEVTTQFELLDISWLIESMKVGKPVDTKGKYQLMESRVSSAEPDPTAGTLNILPPTTKTISQYACQRRTTLNNHNQRFTDALEILAENYEFKRNDDTCLTFMRAISVLKCLPFEVVSLKDTEGLPWIGDEVKGIMEEIIEVGESLEVQAVLNDERYQSFKLFKSVFGVGVKTADKWYRMGLRTLEDVRSSKTLKLTPMQKAGLCYYEDLADGVTKAEADAISLLVQDAVWTFDPDALVEITGGFRRGKPFGHDVDLLITSPGAEKEQEDQLLQKVTNLWKKQGLLLYGDLRESRFEDGKLPSRKIDALDHFAKCFLILKLYHHKVDKSKWEMPTGSNESEAKSWKAIRVDLVRCPYDRFAFALLGWTGSRMFERDLRRYATHEKKMMLDNHALYDLTKKIFLKAKSEEEIFAHLGLEYLEPSERNA

SEQ ID NO: 805 - DNA, 1587 bp, synthetic construct
  misc_feature 1..1587: note = Variant of terminal deoxynucleotidyltransferase
  source 1..1587: mol_type = other DNA
atgcaccatcatcatcatcatggcggtagcggcatgcaccgtattcgtaccatcgattcggacttcgggaagaaacgccagaagaagatggataaccacattagttccgccatctatgaaatcaaatttcacgagtttgtgctgttcattctcgaagagaaaatgggtgcgacgcgtcgtacttttctgacagatttagcccgcaagaaagggttccgcgtcgagaatgaactgtcagacagcgttacccacatcgtggcagaaaataattcaggatctgacgtattggcttggctgaagactcacaagatggaggtcacgacgcaatttgaactgctggatattagctggcttatcgaaagcatgaaagttggtaaaccggtggacaccaaggggaaataccagttgatggaatcgcgtgagagcagtgcgaacccagatccgacagccggtaccctcaacattctgcctcctactacgaagaccatttctcagtatgcgtgtcaacgccgcaccaccctgaacaaccataatcaacgttttacggacgcactggaaattcttgcggaaaattacgagttcaaacgcaacgatgatacttgtctgacctttatgcgtgctatttccgtgctgaaatgccttccgtttgaggtagttagcctgaaagacacggaaggattgccctggatcggtgatgaagtcaaagggattatggaagaaatcatcgaggtcggtgaatcgctggaagtgcaggccgtgctcaatgatgagcgctatcaaagcttcaaactgtttaagagtgtctttggagtgggggtgaagacagcagacaaatggtaccgtatgggtctgcgcacgctcgaggatgttcgttccagcaagaccctgaagttgaccccgatgcagaaagcgggtctgtgctattatgaagatcttgctgatggcgttacgaaagccgaagctgacgcgatttctctgctggttcaggatgcagtctggactttcgacccggatgcgctggtggagattacgggtggatttcgtcgtgggaaaccttttggtcacgacgttgatctgcttatcacatctccgggagctgagaaagaacaagaagaccagctcctgcagaaagtgaccaatctgtggaagaaacaagggttgttgctgtacggtgacctgcgtgaaagtcgctttgaagatgggaaactcccatcccgcaagatcgatgccctggaccattttgcgaaatgctttctgatcctcaaactttatcaccataaagtggacaaaagcaaatgggaaatgccgacgggttcgaacgaaagcgaggccaaaagttggaaagcaattcgcgtagatctggttcgttgtccctacgatcgttttgcgtttgcgttgttgggttggaccggaagccgcatgttcgaacgtgatctgcgccgctacgccacccacgagaagaagatgatgctggacaatcatgcgctgtatgacctgaccaagaaaatctttctcaaagctaaatcggaagaggaaattttcgcacatctggggcttgaatacctggaaccgtccgaacgtaacgca

SEQ ID NO: 806 - protein, 529 aa, synthetic construct
  REGION 1..529: note = Variant of terminal deoxynucleotidyltransferase
MHHHHHHGGSGMHRIRTIDSDFGKKRQKKMDNHISSAIYEIKFHEFVLFILEEKMGATRRTFLTDLARKKGFRVENELSDSVTHIVAENNSGSDVLAWLKTHKMEVTTQFELLDISWLIESMKVGKPVDTKGKYQLMESRESSANPDPTAGTLNILPPTTKTISQYACQRRTTLNNHNQRFTDALEILAENYEFKRNDDTCLTFMRAISVLKCLPFEVVSLKDTEGLPWIGDEVKGIMEEIIEVGESLEVQAVLNDERYQSFKLFKSVFGVGVKTADKWYRMGLRTLEDVRSSKTLKLTPMQKAGLCYYEDLADGVTKAEADAISLLVQDAVWTFDPDALVEITGGFRRGKPFGHDVDLLITSPGAEKEQEDQLLQKVTNLWKKQGLLLYGDLRESRFEDGKLPSRKIDALDHFAKCFLILKLYHHKVDKSKWEMPTGSNESEAKSWKAIRVDLVRCPYDRFAFALLGWTGSRMFERDLRRYATHEKKMMLDNHALYDLTKKIFLKAKSEEEIFAHLGLEYLEPSERNA

SEQ ID NO: 807 - DNA, 1587 bp, synthetic construct
  misc_feature 1..1587: note = Variant of terminal deoxynucleotidyltransferase
  source 1..1587: mol_type = other DNA
atgcaccatcatcatcatcatggcggtagcggcatgcaccgcattcgtaccatcgattcggacttcgggaagaaacgccagaagaagatggataaccacgatagttccatgatctatgaaatcaaatttcacgagtttgtgctgttcattctcgaagagaaaatgggtgcgacgcgtcgtacttttctgacagatttagcccgcaagaaagggttccgcgtcgagaatgaactgtcagacagcgttacccacatcgtggcagaaaataattcaggatctgacgtattggcttggctgaagactcacaagatggaggtcacgacgcaatttgaactgctggatattagctggcttatcgaaagcatgaaagttggtaaaccggtggacaccaaggggaaataccagttgatggaatcgcgtgagagcagtgcggagccagatccgacagccggtaccctgaacattctgcctcctactacgaagaccatttctcagtatgcgtgtcaacgccgcaccaccctgaacaaccataatcaacgttttacggacgcactggaaattcttgcggaaaattacgagttcaaacgcaacgatgatacttgtctgacctttatgcgtgctatttccgtgctgaaatgccttccgtttgaggtagttagcctgaaagacacggaaggattgccctggatcggtgatgaagtcaaagggattatggaagaaatcatcgaggtcggtgaatcgctggaagtgcaggccgtgctcaatgatgagcgctatcaaagcttcaaactgtttaagagtgtctttggagtgggggtgaagacagcagacaaatggtaccgtatgggtctgcgcacgctcgaggatgttcgttccagcaagaccctgaagttgaccccgatgcagaaagcgggtctgtgctattatgaagatcttgctgatggcgttacgaaagccgaagctgacgcgatttctctgctggttcaggatgcagtctggactttcgacccggatgcgctggtggagattacgggtggatttcgtcgtgggaaaccttttggtcacgacgttgatctgcttatcacatctccgggagctgagaaagaacaagaagaccagctcctgcagaaagtgaccaatctgtggaagaaacaagggttgttgctgtacggtgacctgcgtgaaagtcgctttgaagatgggaaactcccatcccgcaagatcgatgccctggaccattttgcgaaatgctttctgatcctcaaactttatcaccataaagtggacaaaagcaaatgggaaatgccgacgggttcgaacgaaagcgaggccaaaagttggaaagcaattcgcgtagatctggttcgttgtccctacgatcgttttgcgtttgcgttgttgggttggaccggaagccgcatgttcgaacgtgatctgcgccgctacgccacccacgagaagaagatgatgctggacaatcatgcgctgtatgacctgaccaagaaaatctttctcaaagctaaatcggaagaggaaattttcgcacatctggggcttgaatacctggaaccgtccgaacgtaacgca

SEQ ID NO: 808 - protein, 529 aa, synthetic construct
  REGION 1..529: note = Variant of terminal deoxynucleotidyltransferase
MHHHHHHGGSGMHRIRTIDSDFGKKRQKKMDNHDSSMIYEIKFHEFVLFILEEKMGATRRTFLTDLARKKGFRVENELSDSVTHIVAENNSGSDVLAWLKTHKMEVTTQFELLDISWLIESMKVGKPVDTKGKYQLMESRESSAEPDPTAGTLNILPPTTKTISQYACQRRTTLNNHNQRFTDALEILAENYEFKRNDDTCLTFMRAISVLKCLPFEVVSLKDTEGLPWIGDEVKGIMEEIIEVGESLEVQAVLNDERYQSFKLFKSVFGVGVKTADKWYRMGLRTLEDVRSSKTLKLTPMQKAGLCYYEDLADGVTKAEADAISLLVQDAVWTFDPDALVEITGGFRRGKPFGHDVDLLITSPGAEKEQEDQLLQKVTNLWKKQGLLLYGDLRESRFEDGKLPSRKIDALDHFAKCFLILKLYHHKVDKSKWEMPTGSNESEAKSWKAIRVDLVRCPYDRFAFALLGWTGSRMFERDLRRYATHEKKMMLDNHALYDLTKKIFLKAKSEEEIFAHLGLEYLEPSERNA

SEQ ID NO: 809 - DNA, 1587 bp, synthetic construct
  misc_feature 1..1587: note = Variant of terminal deoxynucleotidyltransferase
  source 1..1587: mol_type = other DNA
atgcaccatcatcatcatcatggcggtagcggcatgcaccgtattcgtaccatcgattcggacttcgggaagaaacgccagaagaagatggataaccacattagttccatgatctatgaaatcaaatttcacgagtttgtgctgttcattctcgaagagaaaatgggtgcgacgcgtcgtacttttctgacagatttagcccgcaagaaagggttccgcgtcgagaatgaactgtcagacagcgttacccacatcgtggcagaaaataattcaggatctgacgtattggcttggctgaagactcacaagatcgagaaaacgacgcaatttgaactgctggatattagctggcttatcgaaagcatgaaagaaggtaaaccggtggacaccaaggggaaataccagttgatggaatcgcgtgtcgatagtgcgaacccagatccgacagccggtaccctcaacattctgcctcctactacgaagaccatttctcagtatgcgtgtcaacgccgcaccaccctgaacaaccataatcaacgttttacggacgcactggaaattcttgcggaaaattacgagttcaaacgcaacgatgatacttgtctgacctttatgcgtgctatttccgtgctgaaatgccttccgtttgaggtagttagcctgaaagacacggaaggattgccctggatcggtgatgaagtcaaagggattatggaagaaatcatcgaggtcggtgaatcgctggaagtgcaggccgtgctcaatgatgagcgctatcaaagcttcaaactgtttaagagtgtctttggagtgggggtgaagacagcagacaaatggtaccgtatgggtctgcgcacgctcgaggatgttcgttccagcaagaccctgaagttgaccccgatgcagaaagcgggtctgtgctattatgaagatcttgctgatggcgttacgaaagccgaagctgacgcgatttctctgctggttcaggatgcagtctggactttcgacccggatgcgctggtggagattacgggtggatttcgtcgtgggaaaccttttggtcacgacgttgatctgcttatcacatctccgggagctgagaaagaacaagaagaccagctcctgcagaaagtgaccaatctgtggaagaaacaagggttgttgctgtacggtgacctgcgtgaaagtcgctttgaagatgggaaactcccatcccgcaagatcgatgccctggaccattttgcgaaatgctttctgatcctcaaactttatcaccataaagtggacaaaagcaaatgggaaatgccgacgggttcgaacgaaagcgaggccaaaagttggaaagcaattcgcgtagatctggttcgttgtccctacgatcgttttgcgtttgcgttgttgggttggaccggaagccgcatgttcgaacgtgatctgcgccgctacgccacccacgagaagaagatgatgctggacaatcatgcgctgtatgacctgaccaagaaaatctttctcaaagctaaatcggaagaggaaattttcgcacatctggggcttgaatacctggaaccgtccgaacgtaacgca

SEQ ID NO: 810 - protein, 529 aa, synthetic construct
  REGION 1..529: note = Variant of terminal deoxynucleotidyltransferase
MHHHHHHGGSGMHRIRTIDSDFGKKRQKKMDNHISSMIYEIKFHEFVLFILEEKMGATRRTFLTDLARKKGFRVENELSDSVTHIVAENNSGSDVLAWLKTHKIEKTTQFELLDISWLIESMKEGKPVDTKGKYQLMESRVDSANPDPTAGTLNILPPTTKTISQYACQRRTTLNNHNQRFTDALEILAENYEFKRNDDTCLTFMRAISVLKCLPFEVVSLKDTEGLPWIGDEVKGIMEEIIEVGESLEVQAVLNDERYQSFKLFKSVFGVGVKTADKWYRMGLRTLEDVRSSKTLKLTPMQKAGLCYYEDLADGVTKAEADAISLLVQDAVWTFDPDALVEITGGFRRGKPFGHDVDLLITSPGAEKEQEDQLLQKVTNLWKKQGLLLYGDLRESRFEDGKLPSRKIDALDHFAKCFLILKLYHHKVDKSKWEMPTGSNESEAKSWKAIRVDLVRCPYDRFAFALLGWTGSRMFERDLRRYATHEKKMMLDNHALYDLTKKIFLKAKSEEEIFAHLGLEYLEPSERNA

SEQ ID NO: 811 - DNA, 1587 bp, synthetic construct
  misc_feature 1..1587: note = Variant of terminal deoxynucleotidyltransferase
  source 1..1587: mol_type = other DNA
atgcaccatcatcatcatcatggcggtagcggcatgcaccgtattcgtaccatcgattcggacttcgggaagaaacgccagaagaagatggataaccacattagttccatgatctatgaaatcaaatttcacgagtttgtgctgttcattctcgaagagaaaatgggtgcgacgcgtcgtacttttctgacagatttagcccgcaagaaagggttccgcgtcgagaatgaactgtcagacagcgttacccacatcgtggcagaaaataattcaggatctgacgtattggcttggctgaaggagcacaagatcgagtcgacgacgcaatttgaactgctggatattagctggcttatcgaaagcatgaaagttggtaaaccggtggacaccaaggggaaataccagttgatggaatcgcgtgtcgatagtgcgaacccagatccgacagccggtaccctcaacatcgaacctcctactacgaagaccatttctcagtatgcgtgtcaacgccgcaccaccctgaacaaccataatcaacgttttacggacgcactggaaattcttgcggaaaattacgagttcaaacgcaacgatgatacttgtctgacctttatgcgtgctatttccgtgctgaaatgccttccgtttgaggtagttagcctgaaagacacggaaggattgccctggatcggtgatgaagtcaaagggattatggaagaaatcatcgaggtcggtgaatcgctggaagtgcaggccgtgctcaatgatgagcgctatcaaagcttcaaactgtttaagagtgtctttggagtgggggtgaagacagcagacaaatggtaccgtatgggtctgcgcacgctcgaggatgttcgttccagcaagaccctgaagttgaccccgatgcagaaagcgggtctgtgctattatgaagatcttgctgatggcgttacgaaagccgaagctgacgcgatttctctgctggttcaggatgcagtctggactttcgacccggatgcgctggtggagattacgggtggatttcgtcgtgggaaaccttttggtcacgacgttgatctgcttatcacatctccgggagctgagaaagaacaagaagaccagctcctgcagaaagtgaccaatctgtggaagaaacaagggttgttgctgtacggtgacctgcgtgaaagtcgctttgaagatgggaaactcccatcccgcaagatcgatgccctggaccattttgcgaaatgctttctgatcctcaaactttatcaccataaagtggacaaaagcaaatgggaaatgccgacgggttcgaacgaaagcgaggccaaaagttggaaagcaattcgcgtagatctggttcgttgtccctacgatcgttttgcgtttgcgttgttgggttggaccggaagccgcatgttcgaacgtgatctgcgccgctacgccacccacgagaagaagatgatgctggacaatcatgcgctgtatgacctgaccaagaaaatctttctcaaagctaaatcggaagaggaaattttcgcacatctggggcttgaatacctggaaccgtccgaacgtaacgca

SEQ ID NO: 812 - protein, 529 aa, synthetic construct
  REGION 1..529: note = Variant of terminal deoxynucleotidyltransferase
MHHHHHHGGSGMHRIRTIDSDFGKKRQKKMDNHISSMIYEIKFHEFVLFILEEKMGATRRTFLTDLARKKGFRVENELSDSVTHIVAENNSGSDVLAWLKEHKIESTTQFELLDISWLIESMKVGKPVDTKGKYQLMESRVDSANPDPTAGTLNIEPPTTKTISQYACQRRTTLNNHNQRFTDALEILAENYEFKRNDDTCLTFMRAISVLKCLPFEVVSLKDTEGLPWIGDEVKGIMEEIIEVGESLEVQAVLNDERYQSFKLFKSVFGVGVKTADKWYRMGLRTLEDVRSSKTLKLTPMQKAGLCYYEDLADGVTKAEADAISLLVQDAVWTFDPDALVEITGGFRRGKPFGHDVDLLITSPGAEKEQEDQLLQKVTNLWKKQGLLLYGDLRESRFEDGKLPSRKIDALDHFAKCFLILKLYHHKVDKSKWEMPTGSNESEAKSWKAIRVDLVRCPYDRFAFALLGWTGSRMFERDLRRYATHEKKMMLDNHALYDLTKKIFLKAKSEEEIFAHLGLEYLEPSERNA

SEQ ID NO: 813 - DNA, 1587 bp, synthetic construct
  misc_feature 1..1587: note = Variant of terminal deoxynucleotidyltransferase
  source 1..1587: mol_type = other DNA
atgcaccatcatcatcatcatggcggtagcggcatgcaccgtattcgtaccatcgattcggacttcgggaagaaacgccagaagaagatggataaccacattagttccatgatctatgaaatcaaatttcacgagtttgtgctgttcattctcgaagagaaaatgggtgcgacgcgtcgtacttttctgacagatttagcccgcaagaaagggttccgcgtcgagaatgaactgtcagacagcgttacccacatcgtggcagaaaataattcaggatctgacgtattggcttggctgaagactcacaagatcgagtcgacgacgcaatttgaactgctggatattagctggcttatcgaaagcatgaaagttggtaaaccggtggacaccaaggggaaataccagttgatggaatcgcgtgtcgatagtgcgaacccagatccgacagccggtaccctcaacgaagaacctcctactacgaagaccatttctcagtatgcgtgtcaacgccgcaccaccctgaacaaccataatcaacgttttacggacgcactggaaattcttgcggaaaattacgagttcaaacgcaacgatgatacttgtctgacctttatgcgtgctatttccgtgctgaaatgccttccgtttgaggtagttagcctgaaagacacggaaggattgccctggatcggtgatgaagtcaaagggattatggaagaaatcatcgaggtcggtgaatcgctggaagtgcaggccgtgctcaatgatgagcgctatcaaagcttcaaactgtttaagagtgtctttggagtgggggtgaagacagcagacaaatggtaccgtatgggtctgcgcacgctcgaggatgttcgttccagcaagaccctgaagttgaccccgatgcagaaagcgggtctgtgctattatgaagatcttgctgatggcgttacgaaagccgaagctgacgcgatttctctgctggttcaggatgcagtctggactttcgacccggatgcgctggtggagattacgggtggatttcgtcgtgggaaaccttttggtcacgacgttgatctgcttatcacatctccgggagctgagaaagaacaagaagaccagctcctgcagaaagtgaccaatctgtggaagaaacaagggttgttgctgtacggtgacctgcgtgaaagtcgctttgaagatgggaaactcccatcccgcaagatcgatgccctggaccattttgcgaaatgctttctgatcctcaaactttatcaccataaagtggacaaaagcaaatgggaaatgccgacgggttcgaacgaaagcgaggccaaaagttggaaagcaattcgcgtagatctggttcgttgtccctacgatcgttttgcgtttgcgttgttgggttggaccggaagccgcatgttcgaacgtgatctgcgccgctacgccacccacgagaagaagatgatgctggacaatcatgcgctgtatgacctgaccaagaaaatctttctcaaagctaaatcggaagaggaaattttcgcacatctggggcttgaatacctggaaccgtccgaacgtaacgca

SEQ ID NO: 814 - protein, 529 aa, synthetic construct
  REGION 1..529: note = Variant of terminal deoxynucleotidyltransferase
MHHHHHHGGSGMHRIRTIDSDFGKKRQKKMDNHISSMIYEIKFHEFVLFILEEKMGATRRTFLTDLARKKGFRVENELSDSVTHIVAENNSGSDVLAWLKTHKIESTTQFELLDISWLIESMKVGKPVDTKGKYQLMESRVDSANPDPTAGTLNEEPPTTKTISQYACQRRTTLNNHNQRFTDALEILAENYEFKRNDDTCLTFMRAISVLKCLPFEVVSLKDTEGLPWIGDEVKGIMEEIIEVGESLEVQAVLNDERYQSFKLFKSVFGVGVKTADKWYRMGLRTLEDVRSSKTLKLTPMQKAGLCYYEDLADGVTKAEADAISLLVQDAVWTFDPDALVEITGGFRRGKPFGHDVDLLITSPGAEKEQEDQLLQKVTNLWKKQGLLLYGDLRESRFEDGKLPSRKIDALDHFAKCFLILKLYHHKVDKSKWEMPTGSNESEAKSWKAIRVDLVRCPYDRFAFALLGWTGSRMFERDLRRYATHEKKMMLDNHALYDLTKKIFLKAKSEEEIFAHLGLEYLEPSERNA

SEQ ID NO: 815 - DNA, 1587 bp, synthetic construct
  misc_feature 1..1587: note = Variant of terminal deoxynucleotidyltransferase
  source 1..1587: mol_type = other DNA
atgcaccatcatcatcatcatggcggtagcggcatgcaccgtattcgtaccatcgattcggacttcgggaagaaacgccagaagaagatggataaccacattagttccatgatctatgaaatcaaatttcacgagtttgtgctgttcattctcgaagagaaaatgggtgcgacgcgtcgtacttttctgacagatttagcccgcaagaaagggttccgcgtcgagaatgaactgtcagacagcgttacccacatcgtggcagaaaataattcaggatctgacgtattggcttggctgaagactcacaagatggaggtcacgacgcaatttgaactgctggatattagctggcttatcgaaagcatgaaagttggtaaaccggtggacaccaaggggaaataccagttgatggaatcgcgtgaggatagtgcgaacccagatccgacagcgggtcgtctgaacattctgcctcctactacgaagactatttctcagtatgcgtgtcaacgccgcaccaccctgaacaaccataatcaacgttttacggacgcactggaaattcttgcggaaaattacgagttcaaacgcaacgatgatacttgtctgacctttatgcgtgctatttccgtgctgaaatgccttccgtttgaggtagttagcctgaaagacacggaaggattgccctggatcggtgatgaagtcaaagggattatggaagaaatcatcgaggtcggtgaatcgctggaagtgcaggccgtgctcaatgatgagcgctatcaaagcttcaaactgtttaagagtgtctttggagtgggggtgaagacagcagacaaatggtaccgtatgggtctgcgcacgctcgaggatgttcgttccagcaagaccctgaagttgaccccgatgcagaaagcgggtctgtgctattatgaagatcttgctgatggcgttacgaaagccgaagctgacgcgatttctctgctggttcaggatgcagtctggactttcgacccggatgcgctggtggagattacgggtggatttcgtcgtgggaaaccttttggtcacgacgttgatctgcttatcacatctccgggagctgagaaagaacaagaagaccagctcctgcagaaagtgaccaatctgtggaagaaacaagggttgttgctgtacggtgacctgcgtgaaagtcgctttgaagatgggaaactcccatcccgcaagatcgatgccctggaccattttgcgaaatgctttctgatcctcaaactttatcaccataaagtggacaaaagcaaatgggaaatgccgacgggttcgaacgaaagcgaggccaaaagttggaaagcaattcgcgtagatctggttcgttgtccctacgatcgttttgcgtttgcgttgttgggttggaccggaagccgcatgttcgaacgtgatctgcgccgctacgccacccacgagaagaagatgatgctggacaatcatgcgctgtatgacctgaccaagaaaatctttctcaaagctaaatcggaagaggaaattttcgcacatctggggcttgaatacctggaaccgtccgaacgtaacgca

SEQ ID NO: 816 - protein, 529 aa, synthetic construct
  REGION 1..529: note = Variant of terminal deoxynucleotidyltransferase
MHHHHHHGGSGMHRIRTIDSDFGKKRQKKMDNHISSMIYEIKFHEFVLFILEEKMGATRRTFLTDLARKKGFRVENELSDSVTHIVAENNSGSDVLAWLKTHKMEVTTQFELLDISWLIESMKVGKPVDTKGKYQLMESREDSANPDPTAGRLNILPPTTKTISQYACQRRTTLNNHNQRFTDALEILAENYEFKRNDDTCLTFMRAISVLKCLPFEVVSLKDTEGLPWIGDEVKGIMEEIIEVGESLEVQAVLNDERYQSFKLFKSVFGVGVKTADKWYRMGLRTLEDVRSSKTLKLTPMQKAGLCYYEDLADGVTKAEADAISLLVQDAVWTFDPDALVEITGGFRRGKPFGHDVDLLITSPGAEKEQEDQLLQKVTNLWKKQGLLLYGDLRESRFEDGKLPSRKIDALDHFAKCFLILKLYHHKVDKSKWEMPTGSNESEAKSWKAIRVDLVRCPYDRFAFALLGWTGSRMFERDLRRYATHEKKMMLDNHALYDLTKKIFLKAKSEEEIFAHLGLEYLEPSERNA

SEQ ID NO: 817 - DNA, 1587 bp, synthetic construct
  misc_feature 1..1587: note = Variant of terminal deoxynucleotidyltransferase
  source 1..1587: mol_type = other DNA
atgcaccatcatcatcatcatggcggtagcggcatgcaccgtattcgtaccatcgattcggacttcgggaagaaacgccagaagaagggtgataacaagattagttccatgatctatgaaatcaaatttcacgagtttgtgctgttcattctcgaagagaaaatgggtgcgacgcgtcgtacttttctgacagatttagcccgcaagaaagggttccgcgtcgagaatgaactgtcagacagcgttacccacatcgtggcagaaaataattcaggatctgacgtattggcttggctgaaggagcacaagatggagtcgacgacgcaatttgaactgctggatattagctggcttatcgaaagcatgaaagtaggtaaaccggtggacaccaaggggaaataccagttgatggaatcgcgtgtcgatagtgcgaacccagatccgacagccggtaccctcaacatcgaacctcctactacgaagaccatttctcagtatgcgtgtcaacgccgcaccaccctgaacaaccataatcaacgttttacggacgcactggaaattcttgcggaaaattacgagttcaaacgcaacgatgatacttgtctgacctttatgcgtgctatttccgtgctgaaatgccttccgtttgaggtagttagcctgaaagacacggaaggattgccctggatcggtgatgaagtcaaagggattatggaagaaatcatcgaggtcggtgaatcgctggaagtgcaggccgtgctcaatgatgagcgctatcaaagcttcaaactgtttaagagtgtctttggagtgggggtgaagacagcagacaaatggtaccgtatgggtctgcgcacgctcgaggatgttcgttccagcaagaccctgaagttgaccccgatgcagaaagcgggtctgtgctattatgaagatcttgctgatggcgttacgaaagccgaagctgacgcgatttctctgctggttcaggatgcagtctggactttcgacccggatgcgctggtggagattacgggtggatttcgtcgtgggaaaccttttggtcacgacgttgatctgcttatcacatctccgggagctgagaaagaacaagaagaccagctcctgcagaaagtgaccaatctgtggaagaaacaagggttgttgctgtacggtgacctgcgtgaaagtcgctttgaagatgggaaactcccatcccgcaagatcgatgccctggaccattttgcgaaatgctttctgatcctcaaactttatcaccataaagtggacaaaagcaaatgggaaatgccgacgggttcgaacgaaagcgaggccaaaagttggaaagcaattcgcgtagatctggttcgttgtccctacgatcgttttgcgtttgcgttgttgggttggaccggaagccgcatgttcgaacgtgatctgcgccgctacgccacccacgagaagaagatgatgctggacaatcatgcgctgtatgacctgaccaagaaaatctttctcaaagctaaatcggaagaggaaattttcgcacatctggggcttgaatacctggaaccgtccgaacgtaacgca

SEQ ID NO: 818 - protein, 529 aa, synthetic construct
  REGION 1..529: note = Variant of terminal deoxynucleotidyltransferase
MHHHHHHGGSGMHRIRTIDSDFGKKRQKKGDNKISSMIYEIKFHEFVLFILEEKMGATRRTFLTDLARKKGFRVENELSDSVTHIVAENNSGSDVLAWLKEHKMESTTQFELLDISWLIESMKVGKPVDTKGKYQLMESRVDSANPDPTAGTLNIEPPTTKTISQYACQRRTTLNNHNQRFTDALEILAENYEFKRNDDTCLTFMRAISVLKCLPFEVVSLKDTEGLPWIGDEVKGIMEEIIEVGESLEVQAVLNDERYQSFKLFKSVFGVGVKTADKWYRMGLRTLEDVRSSKTLKLTPMQKAGLCYYEDLADGVTKAEADAISLLVQDAVWTFDPDALVEITGGFRRGKPFGHDVDLLITSPGAEKEQEDQLLQKVTNLWKKQGLLLYGDLRESRFEDGKLPSRKIDALDHFAKCFLILKLYHHKVDKSKWEMPTGSNESEAKSWKAIRVDLVRCPYDRFAFALLGWTGSRMFERDLRRYATHEKKMMLDNHALYDLTKKIFLKAKSEEEIFAHLGLEYLEPSERNA

SEQ ID NO: 819 - DNA, 1587 bp, synthetic construct
  misc_feature 1..1587: note = Variant of terminal deoxynucleotidyltransferase
  source 1..1587: mol_type = other DNA
atgcaccatcatcatcatcatggcggtagcggcatgcacggcattcgtaccatcgattcggacttcgggaagaaacgccagaagaagatggataaccacagtagttcctttatctatgaaatcaaatttcacgagtttgtgctgttcattctcgaagagaaaatgggtgcgacgcgtcgtacttttctgacagatttagcccgcaagaaagggttccgcgtcgagaatgaactgtcagacagcgttacccacatcgtggcagaaaataattcaggatctgacgtattggcttggctgaagactcacaagatggaggtcacgacgcaatttgaactgctggatattagctggcttatcgaaagcatgaaagttggtaaaccggtggacaccaaggggaaataccagttgatggaatcgcgtgtggatagtgcggagccagatccgacagccggtaccctcaacattctgcctcctactacgaagactatttctcagtatgcgtgtcaacgccgcaccaccctgaacaaccataatcaacgttttacggacgcactggaaattcttgcggaaaattacgagttcaaacgcaacgatgatacttgtctgacctttatgcgtgctatttccgtgctgaaatgccttccgtttgaggtagttagcctgaaagacacggaaggattgccctggatcggtgatgaagtcaaagggattatggaagaaatcatcgaggtcggtgaatcgctggaagtgcaggccgtgctcaatgatgagcgctatcaaagcttcaaactgtttaagagtgtctttggagtgggggtgaagacagcagacaaatggtaccgtatgggtctgcgcacgctcgaggatgttcgttccagcaagaccctgaagttgaccccgatgcagaaagcgggtctgtgctattatgaagatcttgctgatggcgttacgaaagccgaagctgacgcgatttctctgctggttcaggatgcagtctggactttcgacccggatgcgctggtggagattacgggtggatttcgtcgtgggaaaccttttggtcacgacgttgatctgcttatcacatctccgggagctgagaaagaacaagaagaccagctcctgcagaaagtgaccaatctgtggaagaaacaagggttgttgctgtacggtgacctgcgtgaaagtcgctttgaagatgggaaactcccatcccgcaagatcgatgccctggaccattttgcgaaatgctttctgatcctcaaactttatcaccataaagtggacaaaagcaaatgggaaatgccgacgggttcgaacgaaagcgaggccaaaagttggaaagcaattcgcgtagatctggttcgttgtccctacgatcgttttgcgtttgcgttgttgggttggaccggaagccgcatgttcgaacgtgatctgcgccgctacgccacccacgagaagaagatgatgctggacaatcatgcgctgtatgacctgaccaagaaaatctttctcaaagctaaatcggaagaggaaattttcgcacatctggggcttgaatacctggaaccgtccgaacgtaacgca

SEQ ID NO: 820 - protein, 529 aa, synthetic construct
  REGION 1..529: note = Variant of terminal deoxynucleotidyltransferase
MHHHHHHGGSGMHGIRTIDSDFGKKRQKKMDNHSSSFIYEIKFHEFVLFILEEKMGATRRTFLTDLARKKGFRVENELSDSVTHIVAENNSGSDVLAWLKTHKMEVTTQFELLDISWLIESMKVGKPVDTKGKYQLMESRVDSAEPDPTAGTLNILPPTTKTISQYACQRRTTLNNHNQRFTDALEILAENYEFKRNDDTCLTFMRAISVLKCLPFEVVSLKDTEGLPWIGDEVKGIMEEIIEVGESLEVQAVLNDERYQSFKLFKSVFGVGVKTADKWYRMGLRTLEDVRSSKTLKLTPMQKAGLCYYEDLADGVTKAEADAISLLVQDAVWTFDPDALVEITGGFRRGKPFGHDVDLLITSPGAEKEQEDQLLQKVTNLWKKQGLLLYGDLRESRFEDGKLPSRKIDALDHFAKCFLILKLYHHKVDKSKWEMPTGSNESEAKSWKAIRVDLVRCPYDRFAFALLGWTGSRMFERDLRRYATHEKKMMLDNHALYDLTKKIFLKAKSEEEIFAHLGLEYLEPSERNA

SEQ ID NO: 821 - DNA, 1587 bp, synthetic construct
  misc_feature 1..1587: note = Variant of terminal deoxynucleotidyltransferase
  source 1..1587: mol_type = other DNA
atgcaccatcatcatcatcatggcggtagcggcatgcaccgtattcgtaccatcgataccgacttcgggaagaaacgccagaagaagatggataaccacattagttccatgatctatgaaatcaaatttcacgagtttgtgctgttcattctcgaagagaaaatgggtgcgacgcgtcgtacttttctgacagatttagcccgcaagaaagggttccgcgtcgagaatgaactgtcagacagcgttacccacatcgtggcagaaaataattcaggatctgacgtattggcttggctgaaggagcacaagatggagaaaacgacgcaatttgaactgctggatattagctggcttatcgaaagcatgaaagttggtaaaccggtggacaccaaggggaaataccagttgatggaatcgcgtgtcgatagtgcgaacccagatccgacagccggtaccctcaacatcgaacctcctactacgaagaccatttctcagtatgcgtgtcaacgccgcaccaccctgaacaaccataatcaacgttttacggacgcactggaaattcttgcggaaaattacgagttcaaacgcaacgatgatacttgtctgacctttatgcgtgctatttccgtgctgaaatgccttccgtttgaggtagttagcctgaaagacacggaaggattgccctggatcggtgatgaagtcaaagggattatggaagaaatcatcgaggtcggtgaatcgctggaagtgcaggccgtgctcaatgatgagcgctatcaaagcttcaaactgtttaagagtgtctttggagtgggggtgaagacagcagacaaatggtaccgtatgggtctgcgcacgctcgaggatgttcgttccagcaagaccctgaagttgaccccgatgcagaaagcgggtctgtgctattatgaagatcttgctgatggcgttacgaaagccgaagctgacgcgatttctctgctggttcaggatgcagtctggactttcgacccggatgcgctggtggagattacgggtggatttcgtcgtgggaaaccttttggtcacgacgttgatctgcttatcacatctccgggagctgagaaagaacaagaagaccagctcctgcagaaagtgaccaatctgtggaagaaacaagggttgttgctgtacggtgacctgcgtgaaagtcgctttgaagatgggaaactcccatcccgcaagatcgatgccctggaccattttgcgaaatgctttctgatcctcaaactttatcaccataaagtggacaaaagcaaatgggaaatgccgacgggttcgaacgaaagcgaggccaaaagttggaaagcaattcgcgtagatctggttcgttgtccctacgatcgttttgcgtttgcgttgttgggttggaccggaagccgcatgttcgaacgtgatctgcgccgctacgccacccacgagaagaagatgatgctggacaatcatgcgctgtatgacctgaccaagaaaatctttctcaaagctaaatcggaagaggaaattttcgcacatctggggcttgaatacctggaaccgtccgaacgtaacgca

SEQ ID NO: 822 - protein, 529 aa, synthetic construct
  REGION 1..529: note = Variant of terminal deoxynucleotidyltransferase
MHHHHHHGGSGMHRIRTIDTDFGKKRQKKMDNHISSMIYEIKFHEFVLFILEEKMGATRRTFLTDLARKKGFRVENELSDSVTHIVAENNSGSDVLAWLKEHKMEKTTQFELLDISWLIESMKVGKPVDTKGKYQLMESRVDSANPDPTAGTLNIEPPTTKTISQYACQRRTTLNNHNQRFTDALEILAENYEFKRNDDTCLTFMRAISVLKCLPFEVVSLKDTEGLPWIGDEVKGIMEEIIEVGESLEVQAVLNDERYQSFKLFKSVFGVGVKTADKWYRMGLRTLEDVRSSKTLKLTPMQKAGLCYYEDLADGVTKAEADAISLLVQDAVWTFDPDALVEITGGFRRGKPFGHDVDLLITSPGAEKEQEDQLLQKVTNLWKKQGLLLYGDLRESRFEDGKLPSRKIDALDHFAKCFLILKLYHHKVDKSKWEMPTGSNESEAKSWKAIRVDLVRCPYDRFAFALLGWTGSRMFERDLRRYATHEKKMMLDNHALYDLTKKIFLKAKSEEEIFAHLGLEYLEPSERNA

SEQ ID NO: 823 - DNA, 1587 bp, synthetic construct
  misc_feature 1..1587: note = Variant of terminal deoxynucleotidyltransferase
  source 1..1587: mol_type = other DNA
atgcaccatcatcatcatcatggcggtagcggcatgcaccgtattcgtaccatcgattcggacttcgggaagaaacgccagaagaagatggataaccacattagttccatgatctatgaaatcaaatttcacgagtttgtgctgttcattctcgaagagaaaatgggtgcgacgcgtcgtacttttctgacagatttagcccgcaagaaagggttccgcgtcgagaatgaactgtcagacagcgttacccacatcgtggcagaaaataattcaggatctgacgtattggcttggctgaagactcacaagatggaggtcacgacgcaatttgaactgctggatattagctggcttatcgaaagcatgaaagttggtaaaccggtggacaccaaggggaaataccagttgatggaatcgcgtgaggatagtgcgaacccagatccgacagccggtaccctcaacattctgcctcctactacgaagaccatttctcagtatgcgtgtcaacgccgcaccaccctgaacaaccataatcaacgttttacggacgcactggaaattcttgcggaaaattacgagttcaaacgcaacgatgatacttgtctgacctttatgcgtgctatttccgtgctgaaatgccttccgtttgaggtagttagcctgaaagacacggaaggattgccctggatcggtgatgaagtcaaagggattatggaagaaatcatcgaggtcggtgaatcgctggaagtgcaggccgtgctcaatgatgagcgctatcaaagcttcaaactgtttaagagtgtctttggagtgggggtgaagacagcagacaaatggtaccgtatgggtctgcgcacgctcgaggatgttcgttccagcaagaccctgaagttgaccccgatgcagaaagcgggtctgtgctattatgaagatcttgctgatggcgttacgaaagccgaagctgacgcgatttctctgctggttcaggatgcagtctggactttcgacccggatgcgctggtggagattacgggtggatttcgtcgtgggaaaccttttggtcacgacgttgatctgcttatcacatctccgggagctgagaaagaacaagaagaccagctcctgcagaaagtgaccaatctgtggaagaaacaagggttgttgctgtacggtgacctgcgtgaaagtcgctttgaagatgggaaactcccatcccgcaagatcgatgccctggaccattttgcgaaatgctttctgatcctcaaactttatcaccataaagtggacaaaagcaaatgggaaatgccgacgggttcgaacgaaagcgaggccaaaagttggaaagcaattcgcgtagatctggttcgttgtccctacgatcgttttgcgtttgcgttgttgggttggaccggaagccgcatgttcgaacgtgatctgcgccgctacgccacccacgagaagaagatgatgctggacaatcatgcgctgtatgacctgaccaagaaaatctttctcaaagctaaatcggaagaggaaattttcgcacatctggggcttgaatacctggaaccgtccgaacgtaacgca

SEQ ID NO: 824 - protein, 529 aa, synthetic construct
  REGION 1..529: note = Variant of terminal deoxynucleotidyltransferase
MHHHHHHGGSGMHRIRTIDSDFGKKRQKKMDNHISSMIYEIKFHEFVLFILEEKMGATRRTFLTDLARKKGFRVENELSDSVTHIVAENNSGSDVLAWLKTHKMEVTTQFELLDISWLIESMKVGKPVDTKGKYQLMESREDSANPDPTAGTLNILPPTTKTISQYACQRRTTLNNHNQRFTDALEILAENYEFKRNDDTCLTFMRAISVLKCLPFEVVSLKDTEGLPWIGDEVKGIMEEIIEVGESLEVQAVLNDERYQSFKLFKSVFGVGVKTADKWYRMGLRTLEDVRSSKTLKLTPMQKAGLCYYEDLADGVTKAEADAISLLVQDAVWTFDPDALVEITGGFRRGKPFGHDVDLLITSPGAEKEQEDQLLQKVTNLWKKQGLLLYGDLRESRFEDGKLPSRKIDALDHFAKCFLILKLYHHKVDKSKWEMPTGSNESEAKSWKAIRVDLVRCPYDRFAFALLGWTGSRMFERDLRRYATHEKKMMLDNHALYDLTKKIFLKAKSEEEIFAHLGLEYLEPSERNA

SEQ ID NO: 825 - DNA, 1587 bp, synthetic construct
  misc_feature 1..1587: note = Variant of terminal deoxynucleotidyltransferase
  source 1..1587: mol_type = other DNA
atgcaccatcatcatcatcatggcggtagcggcatgcaccgtattcgtaccatcgataccgaattcgggaagaaacgccagaagaagatggataaccacattagttccatgatctatgaaatcaaatttcacgagtttgtgctgttcattctcgaagagaaaatgggtgcggcgcgtcgtacttttctgacagatttagcccgcaagaaagggttccgcgtcgagaatgaactgtcagacagcgttacccacatcgtggcagaaaataattcaggatctgacgtattggcttggctgaagactcacaagatcgagtcgacgacgcaatttgaactgctggatattagctggcttatcgaaagcatgaaagttggtaaaccggtggacaccaaggggaaataccagttgatggaatcgcgtgtcgatagtgcgaacccagatccgacagccggtaccctcaacgaagaacctcctactacgaagaccatttctcagtatgcgtgtcaacgccgcaccaccctgaacaaccataatcaacgttttacggacgcactggaaattcttgcggaaaattacgagttcaaacgcaacgatgatacttgtctgacctttatgcgtgctatttccgtgctgaaatgccttccgtttgaggtagttagcctgaaagacacggaaggattgccctggatcggtgatgaagtcaaagggattatggaagaaatcatcgaggtcggtgaatcgctggaagtgcaggccgtgctcaatgatgagcgctatcaaagcttcaaactgtttaagagtgtctttggagtgggggtgaagacagcagacaaatggtaccgtatgggtctgcgcacgctcgaggatgttcgttccagcaagaccctgaagttgaccccgatgcagaaagcgggtctgtgctattatgaagatcttgctgatggcgttacgaaagccgaagctgacgcgatttctctgctggttcaggatgcagtctggactttcgacccggatgcgctggtggagattacgggtggatttcgtcgtgggaaaccttttggtcacgacgttgatctgcttatcacatctccgggagctgagaaagaacaagaagaccagctcctgcagaaagtgaccaatctgtggaagaaacaagggttgttgctgtacggtgacctgcgtgaaagtcgctttgaagatgggaaactcccatcccgcaagatcgatgccctggaccattttgcgaaatgctttctgatcctcaaactttatcaccataaagtggacaaaagcaaatgggaaatgccgacgggttcgaacgaaagcgaggccaaaagttggaaagcaattcgcgtagatctggttcgttgtccctacgatcgttttgcgtttgcgttgttgggttggaccggaagccgcatgttcgaacgtgatctgcgccgctacgccacccacgagaagaagatgatgctggacaatcatgcgctgtatgacctgaccaagaaaatctttctcaaagctaaatcggaagaggaaattttcgcacatctggggcttgaatacctggaaccgtccgaacgtaacgca

SEQ ID NO: 826 - protein, 529 aa, synthetic construct
  REGION 1..529: note = Variant of terminal deoxynucleotidyltransferase
MHHHHHHGGSGMHRIRTIDTEFGKKRQKKMDNHISSMIYEIKFHEFVLFILEEKMGAARRTFLTDLARKKGFRVENELSDSVTHIVAENNSGSDVLAWLKTHKIESTTQFELLDISWLIESMKVGKPVDTKGKYQLMESRVDSANPDPTAGTLNEEPPTTKTISQYACQRRTTLNNHNQRFTDALEILAENYEFKRNDDTCLTFMRAISVLKCLPFEVVSLKDTEGLPWIGDEVKGIMEEIIEVGESLEVQAVLNDERYQSFKLFKSVFGVGVKTADKWYRMGLRTLEDVRSSKTLKLTPMQKAGLCYYEDLADGVTKAEADAISLLVQDAVWTFDPDALVEITGGFRRGKPFGHDVDLLITSPGAEKEQEDQLLQKVTNLWKKQGLLLYGDLRESRFEDGKLPSRKIDALDHFAKCFLILKLYHHKVDKSKWEMPTGSNESEAKSWKAIRVDLVRCPYDRFAFALLGWTGSRMFERDLRRYATHEKKMMLDNHALYDLTKKIFLKAKSEEEIFAHLGLEYLEPSERNA

SEQ ID NO: 827 - DNA, 1587 bp, synthetic construct
  misc_feature 1..1587: note = Variant of terminal deoxynucleotidyltransferase
  source 1..1587: mol_type = other DNA
atgcaccatcatcatcatcatggcggtagcggcagccaccgcattcgtaccatcgattcggacttcgggaagaaacgccagaagaagatggataaccacattagttccatgatctatgaaatcaaatttcacgagtttgtgctgttcattctcgaagagaaaatgggtgcgacgcgtcgtacttttctgacagatttagcccgcaagaaagggttccgcgtcgagaatgaactgtcagacagcgttacccacatcgtggcagaaaataattcaggatctgacgtattggcttggctgaagactcacaagatggaggtcacgacgcaatttgaactgctggatattagctggcttatcgaaagcatgaaagttggtaaaccggtggacaccaaggggaaataccagttgatggaatcgcgtgtcgatagtgcgaacccagatccgacagccggtaccctcaacattctgcctcctactacggagactatttctcagtatgcgtgtcaacgccgcaccaccctgaacaaccataatcaacgttttacggacgcactggaaattcttgcggaaaattacgagttcaaacgcaacgatgatacttgtctgacctttatgcgtgctatttccgtgctgaaatgccttccgtttgaggtagttagcctgaaagacacggaaggattgccctggatcggtgatgaagtcaaagggattatggaagaaatcatcgaggtcggtgaatcgctggaagtgcaggccgtgctcaatgatgagcgctatcaaagcttcaaactgtttaagagtgtctttggagtgggggtgaagacagcagacaaatggtaccgtatgggtctgcgcacgctcgaggatgttcgttccagcaagaccctgaagttgaccccgatgcagaaagcgggtctgtgctattatgaagatcttgctgatggcgttacgaaagccgaagctgacgcgatttctctgctggttcaggatgcagtctggactttcgacccggatgcgctggtggagattacgggtggatttcgtcgtgggaaaccttttggtcacgacgttgatctgcttatcacatctccgggagctgagaaagaacaagaagaccagctcctgcagaaagtgaccaatctgtggaagaaacaagggttgttgctgtacggtgacctgcgtgaaagtcgctttgaagatgggaaactcccatcccgcaagatcgatgccctggaccattttgcgaaatgctttctgatcctcaaactttatcaccataaagtggacaaaagcaaatgggaaatgccgacgggttcgaacgaaagcgaggccaaaagttggaaagcaattcgcgtagatctggttcgttgtccctacgatcgttttgcgtttgcgttgttgggttggaccggaagccgcatgttcgaacgtgatctgcgccgctacgccacccacgagaagaagatgatgctggacaatcatgcgctgtatgacctgaccaagaaaatctttctcaaagctaaatcggaagaggaaattttcgcacatctggggcttgaatacctggaaccgtccgaacgtaacgca

SEQ ID NO: 828 - protein, 529 aa, synthetic construct
  REGION 1..529: note = Variant of terminal deoxynucleotidyltransferase
MHHHHHHGGSGSHRIRTIDSDFGKKRQKKMDNHISSMIYEIKFHEFVLFILEEKMGATRRTFLTDLARKKGFRVENELSDSVTHIVAENNSGSDVLAWLKTHKMEVTTQFELLDISWLIESMKVGKPVDTKGKYQLMESRVDSANPDPTAGTLNILPPTTETISQYACQRRTTLNNHNQRFTDALEILAENYEFKRNDDTCLTFMRAISVLKCLPFEVVSLKDTEGLPWIGDEVKGIMEEIIEVGESLEVQAVLNDERYQSFKLFKSVFGVGVKTADKWYRMGLRTLEDVRSSKTLKLTPMQKAGLCYYEDLADGVTKAEADAISLLVQDAVWTFDPDALVEITGGFRRGKPFGHDVDLLITSPGAEKEQEDQLLQKVTNLWKKQGLLLYGDLRESRFEDGKLPSRKIDALDHFAKCFLILKLYHHKVDKSKWEMPTGSNESEAKSWKAIRVDLVRCPYDRFAFALLGWTGSRMFERDLRRYATHEKKMMLDNHALYDLTKKIFLKAKSEEEIFAHLGLEYLEPSERNA

SEQ ID NO: 829 - DNA, 1587 bp, synthetic construct
  misc_feature 1..1587: note = Variant of terminal deoxynucleotidyltransferase
  source 1..1587: mol_type = other DNA
atgcaccatcatcatcatcatggcggtagcggcatgcacggcattcgtaccatcgattcggacttcgggaagaaacgccagaagaagatggataaccacattagttccatgatctatgaaatcaaatttcacgagtttgtgctgttcattctcgaagagaaaatgggtgcgacgcgtcgtacttttctgacagatttagcccgcaagaaagggttccgcgtcgagaatgaactgtcagacagcgttacccacatcgtggcagaaaataattcaggatctgacgtattggcttggctgaagactcacaagatggaggtcacgacgcaatttgaactgctggatattagctggcttatcgaaagcatgaaagttggtaaaccggtggacaccaaggggaaataccagttgatggaatcgcgtgtcgatagtgcgaacccagatccgacagccggtaccctcaacattctgcctcctactacgaagaccatttctcagtatgcgtgtcaacgccgcaccaccctgaacaaccataatcaacgttttacggacgcactggaaattcttgcggaaaattacgagttcaaacgcaacgatgatacttgtctgacctttatgcgtgctatttccgtgctgaaatgccttccgtttgaggtagttagcctgaaagacacggaaggattgccctggatcggtgatgaagtcaaagggattatggaagaaatcatcgaggtcggtgaatcgctggaagtgcaggccgtgctcaatgatgagcgctatcaaagcttcaaactgtttaagagtgtctttggagtgggggtgaagacagcagacaaatggtaccgtatgggtctgcgcacgctcgaggatgttcgttccagcaagaccctgaagttgaccccgatgcagaaagcgggtctgtgctattatgaagatcttgctgatggcgttacgaaagccgaagctgacgcgatttctctgctggttcaggatgcagtctggactttcgacccggatgcgctggtggagattacgggtggatttcgtcgtgggaaaccttttggtcacgacgttgatctgcttatcacatctccgggagctgagaaagaacaagaagaccagctcctgcagaaagtgaccaatctgtggaagaaacaagggttgttgctgtacggtgacctgcgtgaaagtcgctttgaagatgggaaactcccatcccgcaagatcgatgccctggaccattttgcgaaatgctttctgatcctcaaactttatcaccataaagtggacaaaagcaaatgggaaatgccgacgggttcgaacgaaagcgaggccaaaagttggaaagcaattcgcgtagatctggttcgttgtccctacgatcgttttgcgtttgcgttgttgggttggaccggaagccgcatgttcgaacgtgatctgcgccgctacgccacccacgagaagaagatgatgctggacaatcatgcgctgtatgacctgaccaagaaaatctttctcaaagctaaatcggaagaggaaattttcgcacatctggggcttgaatacctggaaccgtccgaacgtaacgca

SEQ ID NO: 830 - protein, 529 aa, synthetic construct
  REGION 1..529: note = Variant of terminal deoxynucleotidyltransferase
MHHHHHHGGSGMHGIRTIDSDFGKKRQKKMDNHISSMIYEIKFHEFVLFILEEKMGATRRTFLTDLARKKGFRVENELSDSVTHIVAENNSGSDVLAWLKTHKMEVTTQFELLDISWLIESMKVGKPVDTKGKYQLMESRVDSANPDPTAGTLNILPPTTKTISQYACQRRTTLNNHNQRFTDALEILAENYEFKRNDDTCLTFMRAISVLKCLPFEVVSLKDTEGLPWIGDEVKGIMEEIIEVGESLEVQAVLNDERYQSFKLFKSVFGVGVKTADKWYRMGLRTLEDVRSSKTLKLTPMQKAGLCYYEDLADGVTKAEADAISLLVQDAVWTFDPDALVEITGGFRRGKPFGHDVDLLITSPGAEKEQEDQLLQKVTNLWKKQGLLLYGDLRESRFEDGKLPSRKIDALDHFAKCFLILKLYHHKVDKSKWEMPTGSNESEAKSWKAIRVDLVRCPYDRFAFALLGWTGSRMFERDLRRYATHEKKMMLDNHALYDLTKKIFLKAKSEEEIFAHLGLEYLEPSERNA

SEQ ID NO: 831 - DNA, 1587 bp, synthetic construct
  misc_feature 1..1587: note = Variant of terminal deoxynucleotidyltransferase
  source 1..1587: mol_type = other DNA
atgcaccatcatcatcatcatggcggtagcggcatgcaccgtattcgtaccatcgattcggacttcgggaagaaacgccagaagaagatggataaccacattagttcctttatctatgaaatcaaatttcacgagtttgtgctgttcattctcgaagagaaaatgggtgcgacgcgtcgtacttttctgacagatttagcccgcaagaaagggttccgcgtcgagaatgaactgtcagacagcgttacccacatcgtggcagaaaataattcaggatctgacgtattggcttggctgaagactcacaagatggaggtcacgacgcaatttgaactgctggatattagctggcttatcgaaagcatgaaagttggtaaaccggtggacaccaaggggaaataccagttgatggaatcgcgtgtcgatagtgcgaacccagatccgacagcgggtaccgaaaacattctgcctcctactacgaagaccatttctcagtatgcgtgtcaacgccgcaccaccctgaacaaccataatcaacgttttacggacgcactggaaattcttgcggaaaattacgagttcaaacgcaacgatgatacttgtctgacctttatgcgtgctatttccgtgctgaaatgccttccgtttgaggtagttagcctgaaagacacggaaggattgccctggatcggtgatgaagtcaaagggattatggaagaaatcatcgaggtcggtgaatcgctggaagtgcaggccgtgctcaatgatgagcgctatcaaagcttcaaactgtttaagagtgtctttggagtgggggtgaagacagcagacaaatggtaccgtatgggtctgcgcacgctcgaggatgttcgttccagcaagaccctgaagttgaccccgatgcagaaagcgggtctgtgctattatgaagatcttgctgatggcgttacgaaagccgaagctgacgcgatttctctgctggttcaggatgcagtctggactttcgacccggatgcgctggtggagattacgggtggatttcgtcgtgggaaaccttttggtcacgacgttgatctgcttatcacatctccgggagctgagaaagaacaagaagaccagctcctgcagaaagtgaccaatctgtggaagaaacaagggttgttgctgtacggtgacctgcgtgaaagtcgctttgaagatgggaaactcccatcccgcaagatcgatgccctggaccattttgcgaaatgctttctgatcctcaaactttatcaccataaagtggacaaaagcaaatgggaaatgccgacgggttcgaacgaaagcgaggccaaaagttggaaagcaattcgcgtagatctggttcgttgtccctacgatcgttttgcgtttgcgttgttgggttggaccggaagccgcatgttcgaacgtgatctgcgccgctacgccacccacgagaagaagatgatgctggacaatcatgcgctgtatgacctgaccaagaaaatctttctcaaagctaaatcggaagaggaaattttcgcacatctggggcttgaatacctggaaccgtccgaacgtaacgca

SEQ ID NO: 832 - protein, 529 aa, synthetic construct
  REGION 1..529: note = Variant of terminal deoxynucleotidyltransferase
MHHHHHHGGSGMHRIRTIDSDFGKKRQKKMDNHISSFIYEIKFHEFVLFILEEKMGATRRTFLTDLARKKGFRVENELSDSVTHIVAENNSGSDVLAWLKTHKMEVTTQFELLDISWLIESMKVGKPVDTKGKYQLMESRVDSANPDPTAGTENILPPTTKTISQYACQRRTTLNNHNQRFTDALEILAENYEFKRNDDTCLTFMRAISVLKCLPFEVVSLKDTEGLPWIGDEVKGIMEEIIEVGESLEVQAVLNDERYQSFKLFKSVFGVGVKTADKWYRMGLRTLEDVRSSKTLKLTPMQKAGLCYYEDLADGVTKAEADAISLLVQDAVWTFDPDALVEITGGFRRGKPFGHDVDLLITSPGAEKEQEDQLLQKVTNLWKKQGLLLYGDLRESRFEDGKLPSRKIDALDHFAKCFLILKLYHHKVDKSKWEMPTGSNESEAKSWKAIRVDLVRCPYDRFAFALLGWTGSRMFERDLRRYATHEKKMMLDNHALYDLTKKIFLKAKSEEEIFAHLGLEYLEPSERNA

SEQ ID NO: 833 - DNA, 1587 bp, synthetic construct
  misc_feature 1..1587: note = Variant of terminal deoxynucleotidyltransferase
  source 1..1587: mol_type = other DNA
atgcaccatcatcatcatcatggcggtagcggcatgcaccgtattcgtaccatcgattcggacttcgggaagaaacgccagaagaagatggataaccacattagttccatgatctatgaaatcaaatttcacgagtttgtgctgttcattctcgaagagaaaatgggtgcgacgcgtcgtacttttctgacagatttagcccgcaagaaagggttccgcgtcgagaatgaactgtcagacagcgttacccacatcgtggcagaaaataattcaggatctgacgtattggcttggctgaaggagcacaagccggagaaaacgacgcaatttgaactgctggatattagctggcttatcgaaagcatgaaagttggtaaaccggtggacaccaaggggaaataccagttgatggaatcgcgtgtcgatagtgcgaacccagatccgacagccggtaccctcaacgaagaacctcctactacgaagaccatttctcagtatgcgtgtcaacgccgcaccaccctgaacaaccataatcaacgttttacggacgcactggaaattcttgcggaaaattacgagttcaaacgcaacgatgatacttgtctgacctttatgcgtgctatttccgtgctgaaatgccttccgtttgaggtagttagcctgaaagacacggaaggattgccctggatcggtgatgaagtcaaagggattatggaagaaatcatcgaggtcggtgaatcgctggaagtgcaggccgtgctcaatgatgagcgctatcaaagcttcaaactgtttaagagtgtctttggagtgggggtgaagacagcagacaaatggtaccgtatgggtctgcgcacgctcgaggatgttcgttccagcaagaccctgaagttgaccccgatgcagaaagcgggtctgtgctattatgaagatcttgctgatggcgttacgaaagccgaagctgacgcgatttctctgctggttcaggatgcagtctggactttcgacccggatgcgctggtggagattacgggtggatttcgtcgtgggaaaccttttggtcacgacgttgatctgcttatcacatctccgggagctgagaaagaacaagaagaccagctcctgcagaaagtgaccaatctgtggaagaaacaagggttgttgctgtacggtgacctgcgtgaaagtcgctttgaagatgggaaactcccatcccgcaagatcgatgccctggaccattttgcgaaatgctttctgatcctcaaactttatcaccataaagtggacaaaagcaaatgggaaatgccgacgggttcgaacgaaagcgaggccaaaagttggaaagcaattcgcgtagatctggttcgttgtccctacgatcgttttgcgtttgcgttgttgggttggaccggaagccgcatgttcgaacgtgatctgcgccgctacgccacccacgagaagaagatgatgctggacaatcatgcgctgtatgacctgaccaagaaaatctttctcaaagctaaatcggaagaggaaattttcgcacatctggggcttgaatacctggaaccgtccgaacgtaacgca

SEQ ID NO: 834 - protein, 529 aa, synthetic construct
  REGION 1..529: note = Variant of terminal deoxynucleotidyltransferase
MHHHHHHGGSGMHRIRTIDSDFGKKRQKKMDNHISSMIYEIKFHEFVLFILEEKMGATRRTFLTDLARKKGFRVENELSDSVTHIVAENNSGSDVLAWLKEHKPEKTTQFELLDISWLIESMKVGKPVDTKGKYQLMESRVDSANPDPTAGTLNEEPPTTKTISQYACQRRTTLNNHNQRFTDALEILAENYEFKRNDDTCLTFMRAISVLKCLPFEVVSLKDTEGLPWIGDEVKGIMEEIIEVGESLEVQAVLNDERYQSFKLFKSVFGVGVKTADKWYRMGLRTLEDVRSSKTLKLTPMQKAGLCYYEDLADGVTKAEADAISLLVQDAVWTFDPDALVEITGGFRRGKPFGHDVDLLITSPGAEKEQEDQLLQKVTNLWKKQGLLLYGDLRESRFEDGKLPSRKIDALDHFAKCFLILKLYHHKVDKSKWEMPTGSNESEAKSWKAIRVDLVRCPYDRFAFALLGWTGSRMFERDLRRYATHEKKMMLDNHALYDLTKKIFLKAKSEEEIFAHLGLEYLEPSERNA

SEQ ID NO: 835 - DNA, 1587 bp, synthetic construct
  misc_feature 1..1587: note = Variant of terminal deoxynucleotidyltransferase
  source 1..1587: mol_type = other DNA
atgcaccatcatcatcatcatggcggtagcggcatgcaccgtattcgtaccatcgattcggacttcgggaagaaacgccagaagaagatggataaccacattagttccatgatctatgaaatcaaatttcacgagtttgtgctgttcattctcgaagagaaaatgggtgcgacgcgtcgtacttttctgacagatttagcccgcaagaaagggttccgcgtcgagaatgaactgtcagacagcgttacccacatcgtggcagaaaataattcaggatctgacgtattggcttggctgaagactcacaagatcgagtcgacgacgcaatttgaactgctggatattagctggcttatcgaaagcatgaaagttggtaaaccggtggacaccaaggggaaataccagttgatggaatcgcgtgtcgatagtgcgaacccagatccgacagccggtaccctcaacattctgcctcctactacgaagaccatttctcagtatgcgtgtcaacgccgcaccaccctgaacaaccataatcaacgttttacggacgcactggaaattcttgcggaaaattacgagttcaaacgcaacgatgatacttgtctgacctttatgcgtgctatttccgtgctgaaatgccttccgtttgaggtagttagcctgaaagacacggaaggattgccctggatcggtgatgaagtcaaagggattatggaagaaatcatcgaggtcggtgaatcgctggaagtgcaggccgtgctcaatgatgagcgctatcaaagcttcaaactgtttaagagtgtctttggagtgggggtgaagacagcagacaaatggtaccgtatgggtctgcgcacgctcgaggatgttcgttccagcaagaccctgaagttgaccccgatgcagaaagcgggtctgtgctattatgaagatcttgctgatggcgttacgaaagccgaagctgacgcgatttctctgctggttcaggatgcagtctggactttcgacccggatgcgctggtggagattacgggtggatttcgtcgtgggaaaccttttggtcacgacgttgatctgcttatcacatctccgggagctgagaaagaacaagaagaccagctcctgcagaaagtgaccaatctgtggaagaaacaagggttgttgctgtacggtgacctgcgtgaaagtcgctttgaagatgggaaactcccatcccgcaagatcgatgccctggaccattttgcgaaatgctttctgatcctcaaactttatcaccataaagtggacaaaagcaaatgggaaatgccgacgggttcgaacgaaagcgaggccaaaagttggaaagcaattcgcgtagatctggttcgttgtccctacgatcgttttgcgtttgcgttgttgggttggaccggaagccgcatgttcgaacgtgatctgcgccgctacgccacccacgagaagaagatgatgctggacaatcatgcgctgtatgacctgaccaagaaaatctttctcaaagctaaatcggaagaggaaattttcgcacatctggggcttgaatacctggaaccgtccgaacgtaacgca

SEQ ID NO: 836 - protein, 529 aa, synthetic construct
  REGION 1..529: note = Variant of terminal deoxynucleotidyltransferase
MHHHHHHGGSGMHRIRTIDSDFGKKRQKKMDNHISSMIYEIKFHEFVLFILEEKMGATRRTFLTDLARKKGFRVENELSDSVTHIVAENNSGSDVLAWLKTHKIESTTQFELLDISWLIESMKVGKPVDTKGKYQLMESRVDSANPDPTAGTLNILPPTTKTISQYACQRRTTLNNHNQRFTDALEILAENYEFKRNDDTCLTFMRAISVLKCLPFEVVSLKDTEGLPWIGDEVKGIMEEIIEVGESLEVQAVLNDERYQSFKLFKSVFGVGVKTADKWYRMGLRTLEDVRSSKTLKLTPMQKAGLCYYEDLADGVTKAEADAISLLVQDAVWTFDPDALVEITGGFRRGKPFGHDVDLLITSPGAEKEQEDQLLQKVTNLWKKQGLLLYGDLRESRFEDGKLPSRKIDALDHFAKCFLILKLYHHKVDKSKWEMPTGSNESEAKSWKAIRVDLVRCPYDRFAFALLGWTGSRMFERDLRRYATHEKKMMLDNHALYDLTKKIFLKAKSEEEIFAHLGLEYLEPSERNA

SEQ ID NO: 837 - DNA, 1587 bp, synthetic construct
  misc_feature 1..1587: note = Variant of terminal deoxynucleotidyltransferase
  source 1..1587: mol_type = other DNA
atgcaccatcatcatcatcatggcggtagcggcatgcaccgtattcgtaccatcgatagcgaattcgggaagaaacgccagaagaagatggataacaagattagttccatgatctatgaaatcaaatttcacgagtttgtgctgttcattctcgaagagaaaatgggtgcgacgcgtcgtacttttctgacagatttagcccgcaagaaagggttccgcgtcgagaatgaactgtcagacagcgttacccacatcgtggcagaaaataattcaggatctgacgtattggcttggctgaagactcacaagatggagtcgacgacgcaatttgaactgctggatattagctggcttatcgaaagcatgaaagtaggtaaaccggtggacaccaaggggaaataccagttgatggaatcgcgtgtcgatagtgcgaacccagatccgacagccggtaccctcaacattctgcctcctactacgaagaccatttctcagtatgcgtgtcaacgccgcaccaccctgaacaaccataatcaacgttttacggacgcactggaaattcttgcggaaaattacgagttcaaacgcaacgatgatacttgtctgacctttatgcgtgctatttccgtgctgaaatgccttccgtttgaggtagttagcctgaaagacacggaaggattgccctggatcggtgatgaagtcaaagggattatggaagaaatcatcgaggtcggtgaatcgctggaagtgcaggccgtgctcaatgatgagcgctatcaaagcttcaaactgtttaagagtgtctttggagtgggggtgaagacagcagacaaatggtaccgtatgggtctgcgcacgctcgaggatgttcgttccagcaagaccctgaagttgaccccgatgcagaaagcgggtctgtgctattatgaagatcttgctgatggcgttacgaaagccgaagctgacgcgatttctctgctggttcaggatgcagtctggactttcgacccggatgcgctggtggagattacgggtggatttcgtcgtgggaaaccttttggtcacgacgttgatctgcttatcacatctccgggagctgagaaagaacaagaagaccagctcctgcagaaagtgaccaatctgtggaagaaacaagggttgttgctgtacggtgacctgcgtgaaagtcgctttgaagatgggaaactcccatcccgcaagatcgatgccctggaccattttgcgaaatgctttctgatcctcaaactttatcaccataaagtggacaaaagcaaatgggaaatgccgacgggttcgaacgaaagcgaggccaaaagttggaaagcaattcgcgtagatctggttcgttgtccctacgatcgttttgcgtttgcgttgttgggttggaccggaagccgcatgttcgaacgtgatctgcgccgctacgccacccacgagaagaagatgatgctggacaatcatgcgctgtatgacctgaccaagaaaatctttctcaaagctaaatcggaagaggaaattttcgcacatctggggcttgaatacctggaaccgtccgaacgtaacgca

SEQ ID NO: 838 - protein, 529 aa, synthetic construct
  REGION 1..529: note = Variant of terminal deoxynucleotidyltransferase
MHHHHHHGGSGMHRIRTIDSEFGKKRQKKMDNKISSMIYEIKFHEFVLFILEEKMGATRRTFLTDLARKKGFRVENELSDSVTHIVAENNSGSDVLAWLKTHKMESTTQFELLDISWLIESMKVGKPVDTKGKYQLMESRVDSANPDPTAGTLNILPPTTKTISQYACQRRTTLNNHNQRFTDALEILAENYEFKRNDDTCLTFMRAISVLKCLPFEVVSLKDTEGLPWIGDEVKGIMEEIIEVGESLEVQAVLNDERYQSFKLFKSVFGVGVKTADKWYRMGLRTLEDVRSSKTLKLTPMQKAGLCYYEDLADGVTKAEADAISLLVQDAVWTFDPDALVEITGGFRRGKPFGHDVDLLITSPGAEKEQEDQLLQKVTNLWKKQGLLLYGDLRESRFEDGKLPSRKIDALDHFAKCFLILKLYHHKVDKSKWEMPTGSNESEAKSWKAIRVDLVRCPYDRFAFALLGWTGSRMFERDLRRYATHEKKMMLDNHALYDLTKKIFLKAKSEEEIFAHLGLEYLEPSERNA

SEQ ID NO: 839 - DNA, 1587 bp, synthetic construct
  misc_feature 1..1587: note = Variant of terminal deoxynucleotidyltransferase
  source 1..1587: mol_type = other DNA
atgcaccatcatcatcatcatggcggtagcggcatgcaccgtattcgtaccatcgattcggacttcgggaagaaacgccagaagaagatggataaccacgatagttcctttatctatgaaatcaaatttcacgagtttgtgctgttcattctcgaagagaaaatgggtgcgacgcgtcgtacttttctgacagatttagcccgcaagaaagggttccgcgtcgagaatgaactgtcagacagcgttacccacatcgtggcagaaaataattcaggatctgacgtattggcttggctgaagactcacaagatggaggtcacgacgcaatttgaactgctggatattagctggcttatcgaaagcatgaaagttggtaaaccggtggacaccaaggggaaataccagttgatggaatcgcgtgagagcagtgcgaacccagatccgacagccggtaccctcaacattctgcctcctactacgaagaccatttctcagtatgcgtgtcaacgccgcaccaccctgaacaaccataatcaacgttttacggacgcactggaaattcttgcggaaaattacgagttcaaacgcaacgatgatacttgtctgacctttatgcgtgctatttccgtgctgaaatgccttccgtttgaggtagttagcctgaaagacacggaaggattgccctggatcggtgatgaagtcaaagggattatggaagaaatcatcgaggtcggtgaatcgctggaagtgcaggccgtgctcaatgatgagcgctatcaaagcttcaaactgtttaagagtgtctttggagtgggggtgaagacagcagacaaatggtaccgtatgggtctgcgcacgctcgaggatgttcgttccagcaagaccctgaagttgaccccgatgcagaaagcgggtctgtgctattatgaagatcttgctgatggcgttacgaaagccgaagctgacgcgatttctctgctggttcaggatgcagtctggactttcgacccggatgcgctggtggagattacgggtggatttcgtcgtgggaaaccttttggtcacgacgttgatctgcttatcacatctccgggagctgagaaagaacaagaagaccagctcctgcagaaagtgaccaatctgtggaagaaacaagggttgttgctgtacggtgacctgcgtgaaagtcgctttgaagatgggaaactcccatcccgcaagatcgatgccctggaccattttgcgaaatgctttctgatcctcaaactttatcaccataaagtggacaaaagcaaatgggaaatgccgacgggttcgaacgaaagcgaggccaaaagttggaaagcaattcgcgtagatctggttcgttgtccctacgatcgttttgcgtttgcgttgttgggttggaccggaagccgcatgttcgaacgtgatctgcgccgctacgccacccacgagaagaagatgatgctggacaatcatgcgctgtatgacctgaccaagaaaatctttctcaaagctaaatcggaagaggaaattttcgcacatctggggcttgaatacctggaaccgtccgaacgtaacgca

SEQ ID NO: 840 - protein, 529 aa, synthetic construct
  REGION 1..529: note = Variant of terminal deoxynucleotidyltransferase
MHHHHHHGGSGMHRIRTIDSDFGKKRQKKMDNHDSSFIYEIKFHEFVLFILEEKMGATRRTFLTDLARKKGFRVENELSDSVTHIVAENNSGSDVLAWLKTHKMEVTTQFELLDISWLIESMKVGKPVDTKGKYQLMESRESSANPDPTAGTLNILPPTTKTISQYACQRRTTLNNHNQRFTDALEILAENYEFKRNDDTCLTFMRAISVLKCLPFEVVSLKDTEGLPWIGDEVKGIMEEIIEVGESLEVQAVLNDERYQSFKLFKSVFGVGVKTADKWYRMGLRTLEDVRSSKTLKLTPMQKAGLCYYEDLADGVTKAEADAISLLVQDAVWTFDPDALVEITGGFRRGKPFGHDVDLLITSPGAEKEQEDQLLQKVTNLWKKQGLLLYGDLRESRFEDGKLPSRKIDALDHFAKCFLILKLYHHKVDKSKWEMPTGSNESEAKSWKAIRVDLVRCPYDRFAFALLGWTGSRMFERDLRRYATHEKKMMLDNHALYDLTKKIFLKAKSEEEIFAHLGLEYLEPSERNA

SEQ ID NO: 841 - DNA, 1587 bp, synthetic construct
  misc_feature 1..1587: note = Variant of terminal deoxynucleotidyltransferase
  source 1..1587: mol_type = other DNA
atgcaccatcatcatcatcatggcggtagcggcatgcaccgtattcgtaccatcgatagcgacttcgggaagaaacgccagaagaagatggataaccacattagttccatgatctatgaaatcaaatttcacgagtttgtgctgttcattctcgaagagaaaatgggtgcgacgcgtcgtacttttctgacagatttagcccgcaagaaagggttccgcgtcgagaatgaactgtcagacagcgttacccacatcgtggcagaaaataattcaggatctgacgtattggcttggctgaagactcacaagccggagaaaacgacgcaatttgaactgctggatattagctggcttatcgaaagcatgaaagttggtaaaccggtggacaccaaggggaaataccagttgatggaatcgcgtgtcgatagtgcgaacccagatccgacagccggtaccctcaacatcgaacctcctactacgaagaccatttctcagtatgcgtgtcaacgccgcaccaccctgaacaaccataatcaacgttttacggacgcactggaaattcttgcggaaaattacgagttcaaacgcaacgatgatacttgtctgacctttatgcgtgctatttccgtgctgaaatgccttccgtttgaggtagttagcctgaaagacacggaaggattgccctggatcggtgatgaagtcaaagggattatggaagaaatcatcgaggtcggtgaatcgctggaagtgcaggccgtgctcaatgatgagcgctatcaaagcttcaaactgtttaagagtgtctttggagtgggggtgaagacagcagacaaatggtaccgtatgggtctgcgcacgctcgaggatgttcgttccagcaagaccctgaagttgaccccgatgcagaaagcgggtctgtgctattatgaagatcttgctgatggcgttacgaaagccgaagctgacgcgatttctctgctggttcaggatgcagtctggactttcgacccggatgcgctggtggagattacgggtggatttcgtcgtgggaaaccttttggtcacgacgttgatctgcttatcacatctccgggagctgagaaagaacaagaagaccagctcctgcagaaagtgaccaatctgtggaagaaacaagggttgttgctgtacggtgacctgcgtgaaagtcgctttgaagatgggaaactcccatcccgcaagatcgatgccctggaccattttgcgaaatgctttctgatcctcaaactttatcaccataaagtggacaaaagcaaatgggaaatgccgacgggttcgaacgaaagcgaggccaaaagttggaaagcaattcgcgtagatctggttcgttgtccctacgatcgttttgcgtttgcgttgttgggttggaccggaagccgcatgttcgaacgtgatctgcgccgctacgccacccacgagaagaagatgatgctggacaatcatgcgctgtatgacctgaccaagaaaatctttctcaaagctaaatcggaagaggaaattttcgcacatctggggcttgaatacctggaaccgtccgaacgtaacgca

SEQ ID NO: 842 - protein, 529 aa, synthetic construct
  REGION 1..529: note = Variant of terminal deoxynucleotidyltransferase
MHHHHHHGGSGMHRIRTIDSDFGKKRQKKMDNHISSMIYEIKFHEFVLFILEEKMGATRRTFLTDLARKKGFRVENELSDSVTHIVAENNSGSDVLAWLKTHKPEKTTQFELLDISWLIESMKVGKPVDTKGKYQLMESRVDSANPDPTAGTLNIEPPTTKTISQYACQRRTTLNNHNQRFTDALEILAENYEFKRNDDTCLTFMRAISVLKCLPFEVVSLKDTEGLPWIGDEVKGIMEEIIEVGESLEVQAVLNDERYQSFKLFKSVFGVGVKTADKWYRMGLRTLEDVRSSKTLKLTPMQKAGLCYYEDLADGVTKAEADAISLLVQDAVWTFDPDALVEITGGFRRGKPFGHDVDLLITSPGAEKEQEDQLLQKVTNLWKKQGLLLYGDLRESRFEDGKLPSRKIDALDHFAKCFLILKLYHHKVDKSKWEMPTGSNESEAKSWKAIRVDLVRCPYDRFAFALLGWTGSRMFERDLRRYATHEKKMMLDNHALYDLTKKIFLKAKSEEEIFAHLGLEYLEPSERNA

SEQ ID NO: 843 - DNA, 1587 bp, synthetic construct
  misc_feature 1..1587: note = Variant of terminal deoxynucleotidyltransferase
  source 1..1587: mol_type = other DNA
atgcaccatcatcatcatcatggcggtagcggcatgcaccgtattcgtaccatcgattcggacttcgggaagaaacgccagaagaagatggataaccacattagttccatgatctatgaaatcaaatttcacgagtttgtgctgttcattctcgaagagaaaatgggtgcgtcgcgtcgtacttttctgacagatttagcccgcaagaaagggttccgcgtcgagaatgaactgtcagacagcgttacccacatcgtggcagaaaataattcaggatctgacgtattggcttggctgaagactcacaagatcgagaaaacgacgcaatttgaactgctggatattagctggcttatcgaaagcatgaaagttggtaaaccggtggacaccaaggggaaataccagttgatggaatcgcgtgtcgatagtgcgaacccagatccgacagccggtaccctcaacgaagaacctcctactacgaagaccatttctcagtatgcgtgtcaacgccgcaccaccctgaacaaccataatcaacgttttacggacgcactggaaattcttgcggaaaattacgagttcaaacgcaacgatgatacttgtctgacctttatgcgtgctatttccgtgctgaaatgccttccgtttgaggtagttagcctgaaagacacggaaggattgccctggatcggtgatgaagtcaaagggattatggaagaaatcatcgaggtcggtgaatcgctggaagtgcaggccgtgctcaatgatgagcgctatcaaagcttcaaactgtttaagagtgtctttggagtgggggtgaagacagcagacaaatggtaccgtatgggtctgcgcacgctcgaggatgttcgttccagcaagaccctgaagttgaccccgatgcagaaagcgggtctgtgctattatgaagatcttgctgatggcgttacgaaagccgaagctgacgcgatttctctgctggttcaggatgcagtctggactttcgacccggatgcgctggtggagattacgggtggatttcgtcgtgggaaaccttttggtcacgacgttgatctgcttatcacatctccgggagctgagaaagaacaagaagaccagctcctgcagaaagtgaccaatctgtggaagaaacaagggttgttgctgtacggtgacctgcgtgaaagtcgctttgaagatgggaaactcccatcccgcaagatcgatgccctggaccattttgcgaaatgctttctgatcctcaaactttatcaccataaagtggacaaaagcaaatgggaaatgccgacgggttcgaacgaaagcgaggccaaaagttggaaagcaattcgcgtagatctggttcgttgtccctacgatcgttttgcgtttgcgttgttgggttggaccggaagccgcatgttcgaacgtgatctgcgccgctacgccacccacgagaagaagatgatgctggacaatcatgcgctgtatgacctgaccaagaaaatctttctcaaagctaaatcggaagaggaaattttcgcacatctggggcttgaatacctggaaccgtccgaacgtaacgca

SEQ ID NO: 844 - protein, 529 aa, synthetic construct
  REGION 1..529: note = Variant of terminal deoxynucleotidyltransferase
MHHHHHHGGSGMHRIRTIDSDFGKKRQKKMDNHISSMIYEIKFHEFVLFILEEKMGASRRTFLTDLARKKGFRVENELSDSVTHIVAENNSGSDVLAWLKTHKIEKTTQFELLDISWLIESMKVGKPVDTKGKYQLMESRVDSANPDPTAGTLNEEPPTTKTISQYACQRRTTLNNHNQRFTDALEILAENYEFKRNDDTCLTFMRAISVLKCLPFEVVSLKDTEGLPWIGDEVKGIMEEIIEVGESLEVQAVLNDERYQSFKLFKSVFGVGVKTADKWYRMGLRTLEDVRSSKTLKLTPMQKAGLCYYEDLADGVTKAEADAISLLVQDAVWTFDPDALVEITGGFRRGKPFGHDVDLLITSPGAEKEQEDQLLQKVTNLWKKQGLLLYGDLRESRFEDGKLPSRKIDALDHFAKCFLILKLYHHKVDKSKWEMPTGSNESEAKSWKAIRVDLVRCPYDRFAFALLGWTGSRMFERDLRRYATHEKKMMLDNHALYDLTKKIFLKAKSEEEIFAHLGLEYLEPSERNA

SEQ ID NO: 845 - DNA, 1587 bp, synthetic construct
  misc_feature 1..1587: note = Variant of terminal deoxynucleotidyltransferase
  source 1..1587: mol_type = other DNA
atgcaccatcatcatcatcatggcggtagcggcatgcaccgcattcgtaccatcgattcggacttcgggaagaaacgccagaagaagatggataaccacattagttccatgatctatgaaatcaaatttcacgagtttgtgctgttcattctcgaagagaaaatgggtgcgacgcgtcgtacttttctgacagatttagcccgcaagaaagggttccgcgtcgagaatgaactgtcagacagcgttacccacatcgtggcagaaaataattcaggatctgacgtattggcttggctgaagactcacaagatggagaagcgcaagcaatttgaactgctggatattagctggcttatcgaaagcatgaaagttggtaaaccggtggacaccaaggggaaataccagttgatggaatcgcgtgtgagcagtgcgaacccagatccgacagccggtaccctgaacattctgcctcctactacgaagaccatttctcagtatgcgtgtcaacgccgcaccaccctgaacaaccataatcaacgttttacggacgcactggaaattcttgcggaaaattacgagttcaaacgcaacgatgatacttgtctgacctttatgcgtgctatttccgtgctgaaatgccttccgtttgaggtagttaggctgaaagacacggaaggattgccctggatcggtgatgaagtcaaagggattatggaagaaatcatcgaggtcggtgaatcgctggaagtgcaggccgtgctcaatgatgagcgctatcaaagcttcaaactgtttaagagtgtctttggagtgggggtgaagacagcagacaaatggtaccgtatgggtctgcgcacgctcgaggatgttcgttccagcaagaccctgaagttgaccccgatgcagaaagcgggtctgtgctattatgaagatcttgctgatggcgttacgaaagccgaagctgacgcgatttctctgctggttcaggatgcagtctggactttcgacccggatgcgctggtggagattacgggtggatttcgtcgtgggaaaccttttggtcacgacgttgatctgcttatcacatctccgggagctgagaaagaacaagaagaccagctcctgcagaaagtgaccaatctgtggaagaaacaagggttgttgctgtacggtgacctgcgtgaaagtcgctttgaagatgggaaactcccatcccgcaagatcgatgccctggaccattttgcgaaatgctttctgatcctcaaactttatcaccataaagtggacaaaagcaaatgggaaatgccgacgggttcgaacgaaagcgaggccaaaagttggaaagcaattcgcgtagatctggttcgttgtccctacgatcgttttgcgtttgcgttgttgggttggaccggaagccgcatgttcgaacgtgatctgcgccgctacgccacccacgagaagaagatgatgctggacaatcatgcgctgtatgacctgaccaagaaaatctttctcaaagctaaatcggaagaggaaattttcgcacatctggggcttgaatacctggaaccgtccgaacgtaacgca

SEQ ID NO: 846 - protein, 529 aa, synthetic construct
  REGION 1..529: note = Variant of terminal deoxynucleotidyltransferase
MHHHHHHGGSGMHRIRTIDSDFGKKRQKKMDNHISSMIYEIKFHEFVLFILEEKMGATRRTFLTDLARKKGFRVENELSDSVTHIVAENNSGSDVLAWLKTHKMEKRKQFELLDISWLIESMKVGKPVDTKGKYQLMESRVSSANPDPTAGTLNILPPTTKTISQYACQRRTTLNNHNQRFTDALEILAENYEFKRNDDTCLTFMRAISVLKCLPFEVVRLKDTEGLPWIGDEVKGIMEEIIEVGESLEVQAVLNDERYQSFKLFKSVFGVGVKTADKWYRMGLRTLEDVRSSKTLKLTPMQKAGLCYYEDLADGVTKAEADAISLLVQDAVWTFDPDALVEITGGFRRGKPFGHDVDLLITSPGAEKEQEDQLLQKVTNLWKKQGLLLYGDLRESRFEDGKLPSRKIDALDHFAKCFLILKLYHHKVDKSKWEMPTGSNESEAKSWKAIRVDLVRCPYDRFAFALLGWTGSRMFERDLRRYATHEKKMMLDNHALYDLTKKIFLKAKSEEEIFAHLGLEYLEPSERNA

SEQ ID NO: 847 - DNA, 1587 bp, synthetic construct
  misc_feature 1..1587: note = Variant of terminal deoxynucleotidyltransferase
  source 1..1587: mol_type = other DNA
atgcaccatcatcatcatcatggcggtagcggcatgcaccgtattcgtaccatcgattcggacttcgggaagaaacgccagaagaagatggataaccacattagttcctttatctatgaaatcaaatttcacgagtttgtgctgttcattctcgaagagaaaatgggtgcgacgcgtcgtacttttctgacagatttagcccgcaagaaagggttccgcgtcgagaatgaactgtcagacagcgttacccacatcgtggcagaaaataattcacgttctgatgtattggcttggctgaagactcacaagatggaggtcacgacgcaatttgaactgctggatattagctggcttatcgaaagcatgaaagttggtaaaccggtggacaccaaggggaaataccagttgatggaatcgcgtgtgatgagtgcgaacccagatccgacagccggtaccctcaacattctgcctcctactacgaagaccatttctcagtatgcgtgtcaacgccgcaccaccctgaacaaccataatcaacgttttacggacgcactggaaattcttgcggaaaattacgagttcaaacgcaacgatgatacttgtctgacctttatgcgtgctatttccgtgctgaaatgccttccgtttgaggtagttagcctgaaagacacggaaggattgccctggatcggtgatgaagtcaaagggattatggaagaaatcatcgaggtcggtgaatcgctggaagtgcaggccgtgctcaatgatgagcgctatcaaagcttcaaactgtttaagagtgtctttggagtgggggtgaagacagcagacaaatggtaccgtatgggtctgcgcacgctcgaggatgttcgttccagcaagaccctgaagttgaccccgatgcagaaagcgggtctgtgctattatgaagatcttgctgatggcgttacgaaagccgaagctgacgcgatttctctgctggttcaggatgcagtctggactttcgacccggatgcgctggtggagattacgggtggatttcgtcgtgggaaaccttttggtcacgacgttgatctgcttatcacatctccgggagctgagaaagaacaagaagaccagctcctgcagaaagtgaccaatctgtggaagaaacaagggttgttgctgtacggtgacctgcgtgaaagtcgctttgaagatgggaaactcccatcccgcaagatcgatgccctggaccattttgcgaaatgctttctgatcctcaaactttatcaccataaagtggacaaaagcaaatgggaaatgccgacgggttcgaacgaaagcgaggccaaaagttggaaagcaattcgcgtagatctggttcgttgtccctacgatcgttttgcgtttgcgttgttgggttggaccggaagccgcatgttcgaacgtgatctgcgccgctacgccacccacgagaagaagatgatgctggacaatcatgcgctgtatgacctgaccaagaaaatctttctcaaagctaaatcggaagaggaaattttcgcacatctggggcttgaatacctggaaccgtccgaacgtaacgca

SEQ ID NO: 848 - protein, 529 aa, synthetic construct
  REGION 1..529: note = Variant of terminal deoxynucleotidyltransferase
MHHHHHHGGSGMHRIRTIDSDFGKKRQKKMDNHISSFIYEIKFHEFVLFILEEKMGATRRTFLTDLARKKGFRVENELSDSVTHIVAENNSRSDVLAWLKTHKMEVTTQFELLDISWLIESMKVGKPVDTKGKYQLMESRVMSANPDPTAGTLNILPPTTKTISQYACQRRTTLNNHNQRFTDALEILAENYEFKRNDDTCLTFMRAISVLKCLPFEVVSLKDTEGLPWIGDEVKGIMEEIIEVGESLEVQAVLNDERYQSFKLFKSVFGVGVKTADKWYRMGLRTLEDVRSSKTLKLTPMQKAGLCYYEDLADGVTKAEADAISLLVQDAVWTFDPDALVEITGGFRRGKPFGHDVDLLITSPGAEKEQEDQLLQKVTNLWKKQGLLLYGDLRESRFEDGKLPSRKIDALDHFAKCFLILKLYHHKVDKSKWEMPTGSNESEAKSWKAIRVDLVRCPYDRFAFALLGWTGSRMFERDLRRYATHEKKMMLDNHALYDLTKKIFLKAKSEEEIFAHLGLEYLEPSERNA

SEQ ID NO: 849 - DNA, 1587 bp, synthetic construct
  misc_feature 1..1587: note = Variant of terminal deoxynucleotidyltransferase
  source 1..1587: mol_type = other DNA
atgcaccatcatcatcatcatggcggtagcggcatgcaccgtattcgtaccatcgattcggacttcgggaagaaacgccagaagaagatggataaccacattagttccatgatctatgaaatcaaatttcacgagtttgtgctgttcattctcgaagagaaaatgggtgcgacgcgtcgtacttttctgacagatttagcccgcaagaaagggttccgcgtcgagaatgaactgtcagacagcgttacccacatcgtggcagaaaataattcaggatctgacgtattggcttggctgaagactcacaagatggagaaaacgacgcaatttgaactgctggatattagctggcttatcgaaagcatgaaagttggtaaaccggtggacaccaaggggaaataccagttgatggaatcgcgtgtcgatagtgcgaacccagatccgacagccggtaccctcaacatcgaacctcctactacgaagaccatttctcagtatgcgtgtcaacgccgcaccaccctgaacaaccataatcaacgttttacggacgcactggaaattcttgcggaaaattacgagttcaaacgcaacgatgatacttgtctgacctttatgcgtgctatttccgtgctgaaatgccttccgtttgaggtagttagcctgaaagacacggaaggattgccctggatcggtgatgaagtcaaagggattatggaagaaatcatcgaggtcggtgaatcgctggaagtgcaggccgtgctcaatgatgagcgctatcaaagcttcaaactgtttaagagtgtctttggagtgggggtgaagacagcagacaaatggtaccgtatgggtctgcgcacgctcgaggatgttcgttccagcaagaccctgaagttgaccccgatgcagaaagcgggtctgtgctattatgaagatcttgctgatggcgttacgaaagccgaagctgacgcgatttctctgctggttcaggatgcagtctggactttcgacccggatgcgctggtggagattacgggtggatttcgtcgtgggaaaccttttggtcacgacgttgatctgcttatcacatctccgggagctgagaaagaacaagaagaccagctcctgcagaaagtgaccaatctgtggaagaaacaagggttgttgctgtacggtgacctgcgtgaaagtcgctttgaagatgggaaactcccatcccgcaagatcgatgccctggaccattttgcgaaatgctttctgatcctcaaactttatcaccataaagtggacaaaagcaaatgggaaatgccgacgggttcgaacgaaagcgaggccaaaagttggaaagcaattcgcgtagatctggttcgttgtccctacgatcgttttgcgtttgcgttgttgggttggaccggaagccgcatgttcgaacgtgatctgcgccgctacgccacccacgagaagaagatgatgctggacaatcatgcgctgtatgacctgaccaagaaaatctttctcaaagctaaatcggaagaggaaattttcgcacatctggggcttgaatacctggaaccgtccgaacgtaacgca

SEQ ID NO: 850 - protein, 529 aa, synthetic construct
  REGION 1..529: note = Variant of terminal deoxynucleotidyltransferase
MHHHHHHGGSGMHRIRTIDSDFGKKRQKKMDNHISSMIYEIKFHEFVLFILEEKMGATRRTFLTDLARKKGFRVENELSDSVTHIVAENNSGSDVLAWLKTHKMEKTTQFELLDISWLIESMKVGKPVDTKGKYQLMESRVDSANPDPTAGTLNIEPPTTKTISQYACQRRTTLNNHNQRFTDALEILAENYEFKRNDDTCLTFMRAISVLKCLPFEVVSLKDTEGLPWIGDEVKGIMEEIIEVGESLEVQAVLNDERYQSFKLFKSVFGVGVKTADKWYRMGLRTLEDVRSSKTLKLTPMQKAGLCYYEDLADGVTKAEADAISLLVQDAVWTFDPDALVEITGGFRRGKPFGHDVDLLITSPGAEKEQEDQLLQKVTNLWKKQGLLLYGDLRESRFEDGKLPSRKIDALDHFAKCFLILKLYHHKVDKSKWEMPTGSNESEAKSWKAIRVDLVRCPYDRFAFALLGWTGSRMFERDLRRYATHEKKMMLDNHALYDLTKKIFLKAKSEEEIFAHLGLEYLEPSERNA

SEQ ID NO: 851 - DNA, 1587 bp, synthetic construct
  misc_feature 1..1587: note = Variant of terminal deoxynucleotidyltransferase
  source 1..1587: mol_type = other DNA
atgcaccatcatcatcatcatggcggtagcggcatgcacggcattcgtaccatcgattcggacttcgggaagaaacgccagaagaagatggataaccacattagttccatgatctatgaaatcaaatttcacgagtttgtgctgttcattctcgaagagaaaatgggtgcgacgcgtcgtacttttctgacagatttagcccgcaagaaagggttccgcgtcgagaatgaactgtcagacagcgttacccacatcgtggcagaaaataattcaggatctgatgtattggcttggctgaagactcacaagatggagaagaccacgcaatttgaactgctggatattagctggcttatcgaaagcatgaaagttggtaaaccggtggacaccaaggggaaataccagttgatggaatcgcgtgtcgatagtgcgaacccagatccgacagcgggtaccctgaacattctgcctcctactacgaagaccatttctcagtatgcgtgtcaacgccgcaccaccctgaacaaccataatcaacgttttacggacgcactggaaattcttgcggaaaattacgagttcaaacgcaacgatgatacttgtctgacctttatgcgtgctatttccgtgctgaaatgccttccgtttgaggtagttagcctgaaagacacggaaggattgccctggatcggtgatgaagtcaaagggattatggaagaaatcatcgaggtcggtgaatcgctggaagtgcaggccgtgctcaatgatgagcgctatcaaagcttcaaactgtttaagagtgtctttggagtgggggtgaagacagcagacaaatggtaccgtatgggtctgcgcacgctcgaggatgttcgttccagcaagaccctgaagttgaccccgatgcagaaagcgggtctgtgctattatgaagatcttgctgatggcgttacgaaagccgaagctgacgcgatttctctgctggttcaggatgcagtctggactttcgacccggatgcgctggtggagattacgggtggatttcgtcgtgggaaaccttttggtcacgacgttgatctgcttatcacatctccgggagctgagaaagaacaagaagaccagctcctgcagaaagtgaccaatctgtggaagaaacaagggttgttgctgtacggtgacctgcgtgaaagtcgctttgaagatgggaaactcccatcccgcaagatcgatgccctggaccattttgcgaaatgctttctgatcctcaaactttatcaccataaagtggacaaaagcaaatgggaaatgccgacgggttcgaacgaaagcgaggccaaaagttggaaagcaattcgcgtagatctggttcgttgtccctacgatcgttttgcgtttgcgttgttgggttggaccggaagccgcatgttcgaacgtgatctgcgccgctacgccacccacgagaagaagatgatgctggacaatcatgcgctgtatgacctgaccaagaaaatctttctcaaagctaaatcggaagaggaaattttcgcacatctggggcttgaatacctggaaccgtccgaacgtaacgca

SEQ ID NO: 852 - protein, 529 aa, synthetic construct
  REGION 1..529: note = Variant of terminal deoxynucleotidyltransferase
MHHHHHHGGSGMHGIRTIDSDFGKKRQKKMDNHISSMIYEIKFHEFVLFILEEKMGATRRTFLTDLARKKGFRVENELSDSVTHIVAENNSGSDVLAWLKTHKMEKTTQFELLDISWLIESMKVGKPVDTKGKYQLMESRVDSANPDPTAGTLNILPPTTKTISQYACQRRTTLNNHNQRFTDALEILAENYEFKRNDDTCLTFMRAISVLKCLPFEVVSLKDTEGLPWIGDEVKGIMEEIIEVGESLEVQAVLNDERYQSFKLFKSVFGVGVKTADKWYRMGLRTLEDVRSSKTLKLTPMQKAGLCYYEDLADGVTKAEADAISLLVQDAVWTFDPDALVEITGGFRRGKPFGHDVDLLITSPGAEKEQEDQLLQKVTNLWKKQGLLLYGDLRESRFEDGKLPSRKIDALDHFAKCFLILKLYHHKVDKSKWEMPTGSNESEAKSWKAIRVDLVRCPYDRFAFALLGWTGSRMFERDLRRYATHEKKMMLDNHALYDLTKKIFLKAKSEEEIFAHLGLEYLEPSERNA

SEQ ID NO: 853 - DNA, 1587 bp, synthetic construct
  misc_feature 1..1587: note = Variant of terminal deoxynucleotidyltransferase
  source 1..1587: mol_type = other DNA
atgcaccatcatcatcatcatggcggtagcggcatgcaccgtattcgtaccatcgatagcgaattcgggaagaaacgccagaagaagatggataaccacattagttccatgatctatgaaatcaaatttcacgagtttgtgctgttcattctcgaagagaaaatgggtgcgacgcgtcgtacttttctgacagatttagcccgcaagaaagggttccgcgtcgagaatgaactgtcagacagcgttacccacatcgtggcagaaaataattcaggatctgacgtattggcttggctgaagactcacaagatcgagtcgacgacgcaatttgaactgctggatattagctggcttatcgaaagcatgaaagaaggtaaaccggtggacaccaaggggaaataccagttgatggaatcgcgtgtcgatagtgcgaacccagatccgacagccggtaccctcaacattctgcctcctactacgaagaccatttctcagtatgcgtgtcaacgccgcaccaccctgaacaaccataatcaacgttttacggacgcactggaaattcttgcggaaaattacgagttcaaacgcaacgatgatacttgtctgacctttatgcgtgctatttccgtgctgaaatgccttccgtttgaggtagttagcctgaaagacacggaaggattgccctggatcggtgatgaagtcaaagggattatggaagaaatcatcgaggtcggtgaatcgctggaagtgcaggccgtgctcaatgatgagcgctatcaaagcttcaaactgtttaagagtgtctttggagtgggggtgaagacagcagacaaatggtaccgtatgggtctgcgcacgctcgaggatgttcgttccagcaagaccctgaagttgaccccgatgcagaaagcgggtctgtgctattatgaagatcttgctgatggcgttacgaaagccgaagctgacgcgatttctctgctggttcaggatgcagtctggactttcgacccggatgcgctggtggagattacgggtggatttcgtcgtgggaaaccttttggtcacgacgttgatctgcttatcacatctccgggagctgagaaagaacaagaagaccagctcctgcagaaagtgaccaatctgtggaagaaacaagggttgttgctgtacggtgacctgcgtgaaagtcgctttgaagatgggaaactcccatcccgcaagatcgatgccctggaccattttgcgaaatgctttctgatcctcaaactttatcaccataaagtggacaaaagcaaatgggaaatgccgacgggttcgaacgaaagcgaggccaaaagttggaaagcaattcgcgtagatctggttcgttgtccctacgatcgttttgcgtttgcgttgttgggttggaccggaagccgcatgttcgaacgtgatctgcgccgctacgccacccacgagaagaagatgatgctggacaatcatgcgctgtatgacctgaccaagaaaatctttctcaaagctaaatcggaagaggaaattttcgcacatctggggcttgaatacctggaaccgtccgaacgtaacgca

SEQ ID NO: 854 - protein, 529 aa, synthetic construct
  REGION 1..529: note = Variant of terminal deoxynucleotidyltransferase
MHHHHHHGGSGMHRIRTIDSEFGKKRQKKMDNHISSMIYEIKFHEFVLFILEEKMGATRRTFLTDLARKKGFRVENELSDSVTHIVAENNSGSDVLAWLKTHKIESTTQFELLDISWLIESMKEGKPVDTKGKYQLMESRVDSANPDPTAGTLNILPPTTKTISQYACQRRTTLNNHNQRFTDALEILAENYEFKRNDDTCLTFMRAISVLKCLPFEVVSLKDTEGLPWIGDEVKGIMEEIIEVGESLEVQAVLNDERYQSFKLFKSVFGVGVKTADKWYRMGLRTLEDVRSSKTLKLTPMQKAGLCYYEDLADGVTKAEADAISLLVQDAVWTFDPDALVEITGGFRRGKPFGHDVDLLITSPGAEKEQEDQLLQKVTNLWKKQGLLLYGDLRESRFEDGKLPSRKIDALDHFAKCFLILKLYHHKVDKSKWEMPTGSNESEAKSWKAIRVDLVRCPYDRFAFALLGWTGSRMFERDLRRYATHEKKMMLDNHALYDLTKKIFLKAKSEEEIFAHLGLEYLEPSERNA

SEQ ID NO: 855 - DNA, 1587 bp, synthetic construct
  misc_feature 1..1587: note = Variant of terminal deoxynucleotidyltransferase
  source 1..1587: mol_type = other DNA
atgcaccatcatcatcatcatggcggtagcggcatgcacggcattcgtaccatcgattcggacttcgggaagaaacgccagaagaagatggataaccacattagttccatgatctatgaaatcaaatttcacgagtttgtgctgttcattctcgaagagaaaatgggtgcgacgcgtcgtacttttctgacagatttagcccgcaagaaagggttccgcgtcgagaatgaactgtcagacagcgttacccacatcgtggcagaaaataattcaggatctgacgtattggcttggctgaagactcacaagatggaggtcacgacgcaatttgaactgctggatattagctggcttatcgaaagcatgaaagttggtaaaccggtggacaccaaggggaaataccagttgatggaatcgggtgtggatagtgcgaacccagatccgacagccggtaccctcaacattctgcctcctactacgaagaccatttctcagtatgcgtgtcaacgccgcaccaccctgaacaaccataatcaacgttttacggacgcactggaaattcttgcggaaaattacgagttcaaacgcaacgatgatacttgtctgacctttatgcgtgctatttccgtgctgaaatgccttccgtttgaggtagttagcctgaaagacacggaaggattgccctggatcggtgatgaagtcaaagggattatggaagaaatcatcgaggtcggtgaatcgctggaagtgcaggccgtgctcaatgatgagcgctatcaaagcttcaaactgtttaagagtgtctttggagtgggggtgaagacagcagacaaatggtaccgtatgggtctgcgcacgctcgaggatgttcgttccagcaagaccctgaagttgaccccgatgcagaaagcgggtctgtgctattatgaagatcttgctgatggcgttacgaaagccgaagctgacgcgatttctctgctggttcaggatgcagtctggactttcgacccggatgcgctggtggagattacgggtggatttcgtcgtgggaaaccttttggtcacgacgttgatctgcttatcacatctccgggagctgagaaagaacaagaagaccagctcctgcagaaagtgaccaatctgtggaagaaacaagggttgttgctgtacggtgacctgcgtgaaagtcgctttgaagatgggaaactcccatcccgcaagatcgatgccctggaccattttgcgaaatgctttctgatcctcaaactttatcaccataaagtggacaaaagcaaatgggaaatgccgacgggttcgaacgaaagcgaggccaaaagttggaaagcaattcgcgtagatctggttcgttgtccctacgatcgttttgcgtttgcgttgttgggttggaccggaagccgcatgttcgaacgtgatctgcgccgctacgccacccacgagaagaagatgatgctggacaatcatgcgctgtatgacctgaccaagaaaatctttctcaaagctaaatcggaagaggaaattttcgcacatctggggcttgaatacctggaaccgtccgaacgtaacgca

SEQ ID NO: 856 - protein, 529 aa, synthetic construct
  REGION 1..529: note = Variant of terminal deoxynucleotidyltransferase
MHHHHHHGGSGMHGIRTIDSDFGKKRQKKMDNHISSMIYEIKFHEFVLFILEEKMGATRRTFLTDLARKKGFRVENELSDSVTHIVAENNSGSDVLAWLKTHKMEVTTQFELLDISWLIESMKVGKPVDTKGKYQLMESGVDSANPDPTAGTLNILPPTTKTISQYACQRRTTLNNHNQRFTDALEILAENYEFKRNDDTCLTFMRAISVLKCLPFEVVSLKDTEGLPWIGDEVKGIMEEIIEVGESLEVQAVLNDERYQSFKLFKSVFGVGVKTADKWYRMGLRTLEDVRSSKTLKLTPMQKAGLCYYEDLADGVTKAEADAISLLVQDAVWTFDPDALVEITGGFRRGKPFGHDVDLLITSPGAEKEQEDQLLQKVTNLWKKQGLLLYGDLRESRFEDGKLPSRKIDALDHFAKCFLILKLYHHKVDKSKWEMPTGSNESEAKSWKAIRVDLVRCPYDRFAFALLGWTGSRMFERDLRRYATHEKKMMLDNHALYDLTKKIFLKAKSEEEIFAHLGLEYLEPSERNA

SEQ ID NO: 857 - DNA, 1587 bp, synthetic construct
  misc_feature 1..1587: note = Variant of terminal deoxynucleotidyltransferase
  source 1..1587: mol_type = other DNA
atgcaccatcatcatcatcatggcggtagcggcatgcacggcattcgtaccatcgattcggacttcgggaagaaacgccagaagaagatggataaccacattagttccatgatctatgaaatcaaatttcacgagtttgtgctgttcattctcgaagagaaaatgggtgcgacgcgtcgtacttttctgacagatttagcccgcaagaaagggttccgcgtcgagaatgaactgtcagacagcgttacccacatcgtggcagaaaataattcaggatctgacgtattggcttggctgaagactcacaagatggaggtcacgacgcaatttgaactgctggatattagctggcttatcgaaagcatgaaagttggtaaaccggtggacaccaaggggaaataccagttgatggaatcgcgtgtgatgagtgcgaacccagatccgacagccggtaccctcaacattctgcctcctactacgaagaccatttctcagtatgcgtgtcaacgccgcaccaccctgaacaaccataatcaacgttttacggacgcactggaaattcttgcggaaaattacgagttcaaacgcaacgatgatacttgtctgacctttatgcgtgctatttccgtgctgaaatgccttccgtttgaggtagttagcctgaaagacacggaaggattgccctggatcggtgatgaagtcaaagggattatggaagaaatcatcgaggtcggtgaatcgctggaagtgcaggccgtgctcaatgatgagcgctatcaaagcttcaaactgtttaagagtgtctttggagtgggggtgaagacagcagacaaatggtaccgtatgggtctgcgcacgctcgaggatgttcgttccagcaagaccctgaagttgaccccgatgcagaaagcgggtctgtgctattatgaagatcttgctgatggcgttacgaaagccgaagctgacgcgatttctctgctggttcaggatgcagtctggactttcgacccggatgcgctggtggagattacgggtggatttcgtcgtgggaaaccttttggtcacgacgttgatctgcttatcacatctccgggagctgagaaagaacaagaagaccagctcctgcagaaagtgaccaatctgtggaagaaacaagggttgttgctgtacggtgacctgcgtgaaagtcgctttgaagatgggaaactcccatcccgcaagatcgatgccctggaccattttgcgaaatgctttctgatcctcaaactttatcaccataaagtggacaaaagcaaatgggaaatgccgacgggttcgaacgaaagcgaggccaaaagttggaaagcaattcgcgtagatctggttcgttgtccctacgatcgttttgcgtttgcgttgttgggttggaccggaagccgcatgttcgaacgtgatctgcgccgctacgccacccacgagaagaagatgatgctggacaatcatgcgctgtatgacctgaccaagaaaatctttctcaaagctaaatcggaagaggaaattttcgcacatctggggcttgaatacctggaaccgtccgaacgtaacgca

SEQ ID NO: 858 - protein, 529 aa, synthetic construct
  REGION 1..529: note = Variant of terminal deoxynucleotidyltransferase
MHHHHHHGGSGMHGIRTIDSDFGKKRQKKMDNHISSMIYEIKFHEFVLFILEEKMGATRRTFLTDLARKKGFRVENELSDSVTHIVAENNSGSDVLAWLKTHKMEVTTQFELLDISWLIESMKVGKPVDTKGKYQLMESRVMSANPDPTAGTLNILPPTTKTISQYACQRRTTLNNHNQRFTDALEILAENYEFKRNDDTCLTFMRAISVLKCLPFEVVSLKDTEGLPWIGDEVKGIMEEIIEVGESLEVQAVLNDERYQSFKLFKSVFGVGVKTADKWYRMGLRTLEDVRSSKTLKLTPMQKAGLCYYEDLADGVTKAEADAISLLVQDAVWTFDPDALVEITGGFRRGKPFGHDVDLLITSPGAEKEQEDQLLQKVTNLWKKQGLLLYGDLRESRFEDGKLPSRKIDALDHFAKCFLILKLYHHKVDKSKWEMPTGSNESEAKSWKAIRVDLVRCPYDRFAFALLGWTGSRMFERDLRRYATHEKKMMLDNHALYDLTKKIFLKAKSEEEIFAHLGLEYLEPSERNA

SEQ ID NO: 859 - DNA, 1587 bp, synthetic construct
  misc_feature 1..1587: note = Variant of terminal deoxynucleotidyltransferase
  source 1..1587: mol_type = other DNA
atgcaccatcatcatcatcatggcggtagcggcatgcaccgtattcgtaccatcgattcggacttcgggaagaaacgccagaagaagatggataaccacattagttccatgatctatgaaatcaaatttcacgagtttgtgctgttcattctcgaagagaaaatgggtgcgacgcgtcgtacttttctgacagatttagcccgcaagaaagggttccgcgtcgagaatgaactgtcagacagcgttacccacatcgtggcagaaaataattcaggatctgatgtattggcttggctgaagactcacaagatggaggtcacgacgcaatttgaactgctggatattagctggcttatcgaaagcatgaaagttggtaaaccggtggacaccaaggggaaataccagttgatggaatcgggtgagatgagtgcgaacccagatccgacagccggtaccctcaacattctgcctcctactacgaagaccatttctcagtatgcgtgtcaacgccgcaccaccctgaacaaccataatcaacgttttacggacgcactggaaattcttgcggaaaattacgagttcaaacgcaacgatgatacttgtctgacctttatgcgtgctatttccgtgctgaaatgccttccgtttgaggtagttagcctgaaagacacggaaggattgccctggatcggtgatgaagtcaaagggattatggaagaaatcatcgaggtcggtgaatcgctggaagtgcaggccgtgctcaatgatgagcgctatcaaagcttcaaactgtttaagagtgtctttggagtgggggtgaagacagcagacaaatggtaccgtatgggtctgcgcacgctcgaggatgttcgttccagcaagaccctgaagttgaccccgatgcagaaagcgggtctgtgctattatgaagatcttgctgatggcgttacgaaagccgaagctgacgcgatttctctgctggttcaggatgcagtctggactttcgacccggatgcgctggtggagattacgggtggatttcgtcgtgggaaaccttttggtcacgacgttgatctgcttatcacatctccgggagctgagaaagaacaagaagaccagctcctgcagaaagtgaccaatctgtggaagaaacaagggttgttgctgtacggtgacctgcgtgaaagtcgctttgaagatgggaaactcccatcccgcaagatcgatgccctggaccattttgcgaaatgctttctgatcctcaaactttatcaccataaagtggacaaaagcaaatgggaaatgccgacgggttcgaacgaaagcgaggccaaaagttggaaagcaattcgcgtagatctggttcgttgtccctacgatcgttttgcgtttgcgttgttgggttggaccggaagccgcatgttcgaacgtgatctgcgccgctacgccacccacgagaagaagatgatgctggacaatcatgcgctgtatgacctgaccaagaaaatctttctcaaagctaaatcggaagaggaaattttcgcacatctggggcttgaatacctggaaccgtccgaacgtaacgca

SEQ ID NO: 860 - protein, 529 aa, synthetic construct
  REGION 1..529: note = Variant of terminal deoxynucleotidyltransferase
MHHHHHHGGSGMHRIRTIDSDFGKKRQKKMDNHISSMIYEIKFHEFVLFILEEKMGATRRTFLTDLARKKGFRVENELSDSVTHIVAENNSGSDVLAWLKTHKMEVTTQFELLDISWLIESMKVGKPVDTKGKYQLMESGEMSANPDPTAGTLNILPPTTKTISQYACQRRTTLNNHNQRFTDALEILAENYEFKRNDDTCLTFMRAISVLKCLPFEVVSLKDTEGLPWIGDEVKGIMEEIIEVGESLEVQAVLNDERYQSFKLFKSVFGVGVKTADKWYRMGLRTLEDVRSSKTLKLTPMQKAGLCYYEDLADGVTKAEADAISLLVQDAVWTFDPDALVEITGGFRRGKPFGHDVDLLITSPGAEKEQEDQLLQKVTNLWKKQGLLLYGDLRESRFEDGKLPSRKIDALDHFAKCFLILKLYHHKVDKSKWEMPTGSNESEAKSWKAIRVDLVRCPYDRFAFALLGWTGSRMFERDLRRYATHEKKMMLDNHALYDLTKKIFLKAKSEEEIFAHLGLEYLEPSERNA

SEQ ID NO: 861 - DNA, 1587 bp, synthetic construct
  misc_feature 1..1587: note = Variant of terminal deoxynucleotidyltransferase
  source 1..1587: mol_type = other DNA
atgcaccatcatcatcatcatggcggtagcggcatgcaccgtattcgtaccatcgattcggacttcgggaagaaacgccagaagaagatggataaccacattagttccatgatctatgaaatcaaatttcacgagtttgtgctgttcattctcgaagagaaaatgggtgcgacgcgtcgtacttttctgacagatttagcccgcaagaaagggttccgcgtcgagaatgaactgtcagacagcgttacccacatcgtggcagaaaataattcaggatctgacgtattggcttggctgaagactcacaagccggagaaaacgacgcaatttgaactgctggatattagctggcttatcgaaagcatgaaagtaggtaaaccggtggacaccaaggggaaataccagttgatggaatcgcgtgtcgatagtgcgaacccagatccgacagccggtaccctcaacattctgcctcctactacgaagaccatttctcagtatgcgtgtcaacgccgcaccaccctgaacaaccataatcaacgttttacggacgcactggaaattcttgcggaaaattacgagttcaaacgcaacgatgatacttgtctgacctttatgcgtgctatttccgtgctgaaatgccttccgtttgaggtagttagcctgaaagacacggaaggattgccctggatcggtgatgaagtcaaagggattatggaagaaatcatcgaggtcggtgaatcgctggaagtgcaggccgtgctcaatgatgagcgctatcaaagcttcaaactgtttaagagtgtctttggagtgggggtgaagacagcagacaaatggtaccgtatgggtctgcgcacgctcgaggatgttcgttccagcaagaccctgaagttgaccccgatgcagaaagcgggtctgtgctattatgaagatcttgctgatggcgttacgaaagccgaagctgacgcgatttctctgctggttcaggatgcagtctggactttcgacccggatgcgctggtggagattacgggtggatttcgtcgtgggaaaccttttggtcacgacgttgatctgcttatcacatctccgggagctgagaaagaacaagaagaccagctcctgcagaaagtgaccaatctgtggaagaaacaagggttgttgctgtacggtgacctgcgtgaaagtcgctttgaagatgggaaactcccatcccgcaagatcgatgccctggaccattttgcgaaatgctttctgatcctcaaactttatcaccataaagtggacaaaagcaaatgggaaatgccgacgggttcgaacgaaagcgaggccaaaagttggaaagcaattcgcgtagatctggttcgttgtccctacgatcgttttgcgtttgcgttgttgggttggaccggaagccgcatgttcgaacgtgatctgcgccgctacgccacccacgagaagaagatgatgctggacaatcatgcgctgtatgacctgaccaagaaaatctttctcaaagctaaatcggaagaggaaattttcgcacatctggggcttgaatacctggaaccgtccgaacgtaacgca

SEQ ID NO: 862 - protein, 529 aa, synthetic construct
  REGION 1..529: note = Variant of terminal deoxynucleotidyltransferase
MHHHHHHGGSGMHRIRTIDSDFGKKRQKKMDNHISSMIYEIKFHEFVLFILEEKMGATRRTFLTDLARKKGFRVENELSDSVTHIVAENNSGSDVLAWLKTHKPEKTTQFELLDISWLIESMKVGKPVDTKGKYQLMESRVDSANPDPTAGTLNILPPTTKTISQYACQRRTTLNNHNQRFTDALEILAENYEFKRNDDTCLTFMRAISVLKCLPFEVVSLKDTEGLPWIGDEVKGIMEEIIEVGESLEVQAVLNDERYQSFKLFKSVFGVGVKTADKWYRMGLRTLEDVRSSKTLKLTPMQKAGLCYYEDLADGVTKAEADAISLLVQDAVWTFDPDALVEITGGFRRGKPFGHDVDLLITSPGAEKEQEDQLLQKVTNLWKKQGLLLYGDLRESRFEDGKLPSRKIDALDHFAKCFLILKLYHHKVDKSKWEMPTGSNESEAKSWKAIRVDLVRCPYDRFAFALLGWTGSRMFERDLRRYATHEKKMMLDNHALYDLTKKIFLKAKSEEEIFAHLGLEYLEPSERNA

SEQ ID NO: 863 - DNA, 1587 bp, synthetic construct
  misc_feature 1..1587: note = Variant of terminal deoxynucleotidyltransferase
  source 1..1587: mol_type = other DNA
atgcaccatcatcatcatcatggcggtagcggcatgcacggcattcgtaccatcgattcggacttcgggaagaaacgccagaagaagatggataaccacattagttccatgatctatgaaatcaaatttcacgagtttgtgctgttcattctcgaagagaaaatgggtgcgacgcgtcgtacttttctgacagatttagcccgcaagaaagggttccgcgtcgagaatgaactgtcagacagcgttacccacatcgtggcagaaaataattcaggatctgacgtattggcttggctgaagactcacaagatggaggtcacgacgcaatttgaactgctggatattagctggcttatcgaaagcatgaaagttggtaaaccggtggacaccaaggggaaataccagttgatggaatcgcgtgtgagcagtgcgaacccagatccgacagccggtaccctcaacattctgcctcctactacggaggagatttctcagtatgcgtgtcaacgccgcaccaccctgaacaaccataatcaacgttttacggacgcactggaaattcttgcggaaaattacgagttcaaacgcaacgatgatacttgtctgacctttatgcgtgctatttccgtgctgaaatgccttccgtttgaggtagttagcctgaaagacacggaaggattgccctggatcggtgatgaagtcaaagggattatggaagaaatcatcgaggtcggtgaatcgctggaagtgcaggccgtgctcaatgatgagcgctatcaaagcttcaaactgtttaagagtgtctttggagtgggggtgaagacagcagacaaatggtaccgtatgggtctgcgcacgctcgaggatgttcgttccagcaagaccctgaagttgaccccgatgcagaaagcgggtctgtgctattatgaagatcttgctgatggcgttacgaaagccgaagctgacgcgatttctctgctggttcaggatgcagtctggactttcgacccggatgcgctggtggagattacgggtggatttcgtcgtgggaaaccttttggtcacgacgttgatctgcttatcacatctccgggagctgagaaagaacaagaagaccagctcctgcagaaagtgaccaatctgtggaagaaacaagggttgttgctgtacggtgacctgcgtgaaagtcgctttgaagatgggaaactcccatcccgcaagatcgatgccctggaccattttgcgaaatgctttctgatcctcaaactttatcaccataaagtggacaaaagcaaatgggaaatgccgacgggttcgaacgaaagcgaggccaaaagttggaaagcaattcgcgtagatctggttcgttgtccctacgatcgttttgcgtttgcgttgttgggttggaccggaagccgcatgttcgaacgtgatctgcgccgctacgccacccacgagaagaagatgatgctggacaatcatgcgctgtatgacctgaccaagaaaatctttctcaaagctaaatcggaagaggaaattttcgcacatctggggcttgaatacctggaaccgtccgaacgtaacgca

SEQ ID NO: 864 - protein, 529 aa, synthetic construct
  REGION 1..529: note = Variant of terminal deoxynucleotidyltransferase
MHHHHHHGGSGMHGIRTIDSDFGKKRQKKMDNHISSMIYEIKFHEFVLFILEEKMGATRRTFLTDLARKKGFRVENELSDSVTHIVAENNSGSDVLAWLKTHKMEVTTQFELLDISWLIESMKVGKPVDTKGKYQLMESRVSSANPDPTAGTLNILPPTTEEISQYACQRRTTLNNHNQRFTDALEILAENYEFKRNDDTCLTFMRAISVLKCLPFEVVSLKDTEGLPWIGDEVKGIMEEIIEVGESLEVQAVLNDERYQSFKLFKSVFGVGVKTADKWYRMGLRTLEDVRSSKTLKLTPMQKAGLCYYEDLADGVTKAEADAISLLVQDAVWTFDPDALVEITGGFRRGKPFGHDVDLLITSPGAEKEQEDQLLQKVTNLWKKQGLLLYGDLRESRFEDGKLPSRKIDALDHFAKCFLILKLYHHKVDKSKWEMPTGSNESEAKSWKAIRVDLVRCPYDRFAFALLGWTGSRMFERDLRRYATHEKKMMLDNHALYDLTKKIFLKAKSEEEIFAHLGLEYLEPSERNA

SEQ ID NO: 865 - DNA, 1587 bp, synthetic construct
  misc_feature 1..1587: note = Variant of terminal deoxynucleotidyltransferase
  source 1..1587: mol_type = other DNA
atgcaccatcatcatcatcatggcggtagcggcagccacggcattcgtaccatcgattcggacttcgggaagaaacgccagaagaagatggataaccacattagttccatgatctatgaaatcaaatttcacgagtttgtgctgttcattctcgaagagaaaatgggtgcgacgcgtcgtacttttctgacagatttagcccgcaagaaagggttccgcgtcgagaatgaactgtcagacagcgttacccacatcgtggcagaaaataattcaggatctgacgtattggcttggctgaagactcacaagatggagaagcgcacgcaatttgaactgctggatattagctggcttatcgaaagcatgaaagttggtaaaccggtggacaccaaggggaaataccagttgatggaatcgcgtgagatgagtgcgaacccagatccgacagccggtaccctcaacattctgcctcctactacgaagaccatttctcagtatgcgtgtcaacgccgcaccaccctgaacaaccataatcaacgttttacggacgcactggaaattcttgcggaaaattacgagttcaaacgcaacgatgatacttgtctgacctttatgcgtgctatttccgtgctgaaatgccttccgtttgaggtagttagcctgaaagacacggaaggattgccctggatcggtgatgaagtcaaagggattatggaagaaatcatcgaggtcggtgaatcgctggaagtgcaggccgtgctcaatgatgagcgctatcaaagcttcaaactgtttaagagtgtctttggagtgggggtgaagacagcagacaaatggtaccgtatgggtctgcgcacgctcgaggatgttcgttccagcaagaccctgaagttgaccccgatgcagaaagcgggtctgtgctattatgaagatcttgctgatggcgttacgaaagccgaagctgacgcgatttctctgctggttcaggatgcagtctggactttcgacccggatgcgctggtggagattacgggtggatttcgtcgtgggaaaccttttggtcacgacgttgatctgcttatcacatctccgggagctgagaaagaacaagaagaccagctcctgcagaaagtgaccaatctgtggaagaaacaagggttgttgctgtacggtgacctgcgtgaaagtcgctttgaagatgggaaactcccatcccgcaagatcgatgccctggaccattttgcgaaatgctttctgatcctcaaactttatcaccataaagtggacaaaagcaaatgggaaatgccgacgggttcgaacgaaagcgaggccaaaagttggaaagcaattcgcgtagatctggttcgttgtccctacgatcgttttgcgtttgcgttgttgggttggaccggaagccgcatgttcgaacgtgatctgcgccgctacgccacccacgagaagaagatgatgctggacaatcatgcgctgtatgacctgaccaagaaaatctttctcaaagctaaatcggaagaggaaattttcgcacatctggggcttgaatacctggaaccgtccgaacgtaacgca

SEQ ID NO: 866 - protein, 529 aa, synthetic construct
  REGION 1..529: note = Variant of terminal deoxynucleotidyltransferase
MHHHHHHGGSGSHGIRTIDSDFGKKRQKKMDNHISSMIYEIKFHEFVLFILEEKMGATRRTFLTDLARKKGFRVENELSDSVTHIVAENNSGSDVLAWLKTHKMEKRTQFELLDISWLIESMKVGKPVDTKGKYQLMESREMSANPDPTAGTLNILPPTTKTISQYACQRRTTLNNHNQRFTDALEILAENYEFKRNDDTCLTFMRAISVLKCLPFEVVSLKDTEGLPWIGDEVKGIMEEIIEVGESLEVQAVLNDERYQSFKLFKSVFGVGVKTADKWYRMGLRTLEDVRSSKTLKLTPMQKAGLCYYEDLADGVTKAEADAISLLVQDAVWTFDPDALVEITGGFRRGKPFGHDVDLLITSPGAEKEQEDQLLQKVTNLWKKQGLLLYGDLRESRFEDGKLPSRKIDALDHFAKCFLILKLYHHKVDKSKWEMPTGSNESEAKSWKAIRVDLVRCPYDRFAFALLGWTGSRMFERDLRRYATHEKKMMLDNHALYDLTKKIFLKAKSEEEIFAHLGLEYLEPSERNA

SEQ ID NO: 867 - DNA, 1587 bp, synthetic construct
  misc_feature 1..1587: note = Variant of terminal deoxynucleotidyltransferase
  source 1..1587: mol_type = other DNA
atgcaccatcatcatcatcatggcggtagcggcagccacggcattgtaaccatcgattcggacttcgggaagaaacgccagaagattgaagataaccacgatagttccgccatctatgaaatcaaatttcacgagtttgtgctgttcattctcgaagagaaaatgggtgcgacgcgtcgtacttttctgacagatttagcccgcaagaaagggttccgcgtcgagaatgaactgtcagacagcgttacccacatcgtggcagaaaataattcaggatctgacgtattggcttggctgaaggagcacaaggtggagaagaccacgcaatttgaactgctggatattagctggcttatcgaaagcatgaaagttggtaaaccggtggacaccaaggggaaataccagttgatggaatcgggtgtgatgagtgcgaacccagatccgacagagggtcgtgaaaacattctgcctcctactacgaagaccatttctcagtatgcgtgtcaacgccgcaccaccctgaacaaccataatcaacgttttacggacgcactggaaattcttgcggaaaattacgagttcaaacgcaacgatgatacttgtctgacctttatgcgtgctatttccgtgctgaaatgccttccgtttgaggtagttagcctgaaagacacggaaggattgccctggatcggtgatgaagtcaaagggattatggaagaaatcatcgaggtcggtgaatcgctggaagtgcaggccgtgctcaatgatgagcgctatcaaagcttcaaactgtttaagagtgtctttggagtgggggtgaagacagcagacaaatggtaccgtatgggtctgcgcacgctcgaggatgttcgttccagcaagaccctgaagttgaccccgatgcagaaagcgggtctgtgctattatgaagatcttgctgatggcgttacgaaagccgaagctgacgcgatttctctgctggttcaggatgcagtctggactttcgacccggatgcgctggtggagattacgggtggatttcgtcgtgggaaaccttttggtcacgacgttgatctgcttatcacatctccgggagctgagaaagaacaagaagaccagctcctgcagaaagtgaccaatctgtggaagaaacaagggttgttgctgtacggtgacctgcgtgaaagtcgctttgaagatgggaaactcccatcccgcaagatcgatgccctggaccattttgcgaaatgctttctgatcctcaaactttatcaccataaagtggacaaaagcaaatgggaaatgccgacgggttcgaacgaaagcgaggccaaaagttggaaagcaattcgcgtagatctggttcgttgtccctacgatcgttttgcgtttgcgttgttgggttggaccggaagccgcatgttcgaacgtgatctgcgccgctacgccacccacgagaagaagatgatgctggacaatcatgcgctgtatgacctgaccaagaaaatctttctcaaagctaaatcggaagaggaaattttcgcacatctggggcttgaatacctggaaccgtccgaacgtaacgca

SEQ ID NO: 868 - protein, 529 aa, synthetic construct
  REGION 1..529: note = Variant of terminal deoxynucleotidyltransferase
MHHHHHHGGSGSHGIVTIDSDFGKKRQKIEDNHDSSAIYEIKFHEFVLFILEEKMGATRRTFLTDLARKKGFRVENELSDSVTHIVAENNSGSDVLAWLKEHKVEKTTQFELLDISWLIESMKVGKPVDTKGKYQLMESGVMSANPDPTEGRENILPPTTKTISQYACQRRTTLNNHNQRFTDALEILAENYEFKRNDDTCLTFMRAISVLKCLPFEVVSLKDTEGLPWIGDEVKGIMEEIIEVGESLEVQAVLNDERYQSFKLFKSVFGVGVKTADKWYRMGLRTLEDVRSSKTLKLTPMQKAGLCYYEDLADGVTKAEADAISLLVQDAVWTFDPDALVEITGGFRRGKPFGHDVDLLITSPGAEKEQEDQLLQKVTNLWKKQGLLLYGDLRESRFEDGKLPSRKIDALDHFAKCFLILKLYHHKVDKSKWEMPTGSNESEAKSWKAIRVDLVRCPYDRFAFALLGWTGSRMFERDLRRYATHEKKMMLDNHALYDLTKKIFLKAKSEEEIFAHLGLEYLEPSERNA

SEQ ID NO: 869 - DNA, 1587 bp, synthetic construct
  misc_feature 1..1587: note = Variant of terminal deoxynucleotidyltransferase
  source 1..1587: mol_type = other DNA
atgcaccatcatcatcatcatggcggtagcggcagccacggcattcgtaccatcgattcggacttcgggaagaaacgccagaagaagatggataaccacgatagttccgccatctatgaaatcaaatttcacgagtttgtgctgttcattctcgaagagaaaatgggtgcgacgcgtcgtacttttctgacagatttagcccgcaagaaagggttccgcgtcgagaatgaactgtcagacagcgttacccacatcgtggcagaaaataattcaggatctgacgtattggcttggctgaaggagcacaagatggagaagaccacgcaattcgaactgctggatattagctggcttatcgaaagcatgaaagttggtaaaccggtggacaccaaggggaaataccagttgatggaatcgggtgagatgagtgcgaacccagatccgacagagggtcgtgaaaacgaggagcctcctactacgaagaccatttctcagtatgcgtgtcaacgccgcaccaccctgaacaaccataatcaacgttttacggacgcactggaaattcttgcggaaaattacgagttcaaacgcaacgatgatacttgtctgacctttatgcgtgctatttccgtgctgaaatgccttccgtttgaggtagttagcctgaaagacacggaaggattgccctggatcggtgatgaagtcaaagggattatggaagaaatcatcgaggtcggtgaatcgctggaagtgcaggccgtgctcaatgatgagcgctatcaaagcttcaaactgtttaagagtgtctttggagtgggggtgaagacagcagacaaatggtaccgtatgggtctgcgcacgctcgaggatgttcgttccagcaagaccctgaagttgaccccgatgcagaaagcgggtctgtgctattatgaagatcttgctgatggcgttacgaaagccgaagctgacgcgatttctctgctggttcaggatgcagtctggactttcgacccggatgcgctggtggagattacgggtggatttcgtcgtgggaaaccttttggtcacgacgttgatctgcttatcacatctccgggagctgagaaagaacaagaagaccagctcctgcagaaagtgaccaatctgtggaagaaacaagggttgttgctgtacggtgatctgcgtgaaagtcgctttgaagatgggaaactcccatcccgcaagatcgatgccctggaccattttgcgaaatgctttctgatcctcaaactttatcaccataaagtggacaaaagcaaatgggaaatgccgacgggttcgaacgaaagcgaggccaaaagttggaaagcaattcgcgtagatctggttcgttgtccctacgatcgttttgcgtttgcgttgttgggttggaccggaagccgcatgttcgaacgtgatctgcgccgctacgccacccacgagaagaagatgatgctggacaatcatgcgctgtatgacctgaccaagaaaatctttctcaaagctaaatcggaagaggaaattttcgcacatctggggcttgaatacctggaaccgtccgaacgtaacgca

SEQ ID NO: 870 - protein, 529 aa, synthetic construct
  REGION 1..529: note = Variant of terminal deoxynucleotidyltransferase
MHHHHHHGGSGSHGIRTIDSDFGKKRQKKMDNHDSSAIYEIKFHEFVLFILEEKMGATRRTFLTDLARKKGFRVENELSDSVTHIVAENNSGSDVLAWLKEHKMEKTTQFELLDISWLIESMKVGKPVDTKGKYQLMESGEMSANPDPTEGRENEEPPTTKTISQYACQRRTTLNNHNQRFTDALEILAENYEFKRNDDTCLTFMRAISVLKCLPFEVVSLKDTEGLPWIGDEVKGIMEEIIEVGESLEVQAVLNDERYQSFKLFKSVFGVGVKTADKWYRMGLRTLEDVRSSKTLKLTPMQKAGLCYYEDLADGVTKAEADAISLLVQDAVWTFDPDALVEITGGFRRGKPFGHDVDLLITSPGAEKEQEDQLLQKVTNLWKKQGLLLYGDLRESRFEDGKLPSRKIDALDHFAKCFLILKLYHHKVDKSKWEMPTGSNESEAKSWKAIRVDLVRCPYDRFAFALLGWTGSRMFERDLRRYATHEKKMMLDNHALYDLTKKIFLKAKSEEEIFAHLGLEYLEPSERNA

SEQ ID NO: 871 - DNA, 1587 bp, synthetic construct
  misc_feature 1..1587: note = Variant of terminal deoxynucleotidyltransferase
  source 1..1587: mol_type = other DNA
atgcaccatcatcatcatcatggcggtagcggcagccacggcattcgtaccatcgattcggacttcgggaagaaacgccagaagaagatggataaccacgatagttccgccatctatgaaatcaaatttcacgagtttgtgctgttcattctcgaagagaaaatgggtgcgacgcgtcgtacttttctgacagatttagcccgcaagaaagggttccgcgtcgagaatgaactgtcagacagcgttacccacatcgtggcagaaaataattcaggatctgacgtattggcttggctgaaggagcacaagatggagaagaccacgcaatttgaactgctggatattagctggcttatcgaaagcatgaaagttggtaaaccggtggacaccaaggggaaataccagttggaagaatcgggtgtgatgagtgcgaacccagatccgacagagggtcgtgaaaacgagctgcctcctactacgaagaccatttctcagtatgcgtgtcaacgccgcaccaccctgaacaaccataatcaacgttttacggacgcactggaaattcttgcggaaaattacgagttcaaacgcaacgatgatacttgtctgacctttatgcgtgctatttccgtgctgaaatgccttccgtttgaggtagttagcctgaaagacacggaaggattgccctggatcggtgatgaagtcaaagggattatggaagaaatcatcgaggtcggtgaatcgctggaagtgcaggccgtgctcaatgatgagcgctatcaaagcttcaaactgtttaagagtgtctttggagtgggggtgaagacagcagacaaatggtaccgtatgggtctgcgcacgctcgaggatgttcgttccagcaagaccctgaagttgaccccgatgcagaaagcgggtctgtgctattatgaagatcttgctgatggcgttacgaaagccgaagctgacgcgatttctctgctggttcaggatgcagtctggactttcgacccggatgcgctggtggagattacgggtggatttcgtcgtgggaaaccttttggtcacgacgttgatctgcttatcacatctccgggagctgagaaagaacaagaagaccagctcctgcagaaagtgaccaatctgtggaagaaacaagggttgttgctgtacggtgatctgcgtgaaagtcgctttgaagatgggaaactcccatcccgcaagatcgatgccctggaccattttgcgaaatgctttctgatcctcaaactttatcaccataaagtggacaaaagcaaatgggaaatgccgacgggttcgaacgaaagcgaggccaaaagttggaaagcaattcgcgtagatctggttcgttgtccctacgatcgttttgcgtttgcgttgttgggttggaccggaagccgcatgttcgaacgtgatctgcgccgctacgccacccacgagaagaagatgatgctggacaatcatgcgctgtatgacctgaccaagaaaatctttctcaaagctaaatcggaagaggaaattttcgcacatctggggcttgaatacctggaaccgtccgaacgtaacgca

SEQ ID NO: 872 - protein, 529 aa, synthetic construct
  REGION 1..529: note = Variant of terminal deoxynucleotidyltransferase
MHHHHHHGGSGSHGIRTIDSDFGKKRQKKMDNHDSSAIYEIKFHEFVLFILEEKMGATRRTFLTDLARKKGFRVENELSDSVTHIVAENNSGSDVLAWLKEHKMEKTTQFELLDISWLIESMKVGKPVDTKGKYQLEESGVMSANPDPTEGRENELPPTTKTISQYACQRRTTLNNHNQRFTDALEILAENYEFKRNDDTCLTFMRAISVLKCLPFEVVSLKDTEGLPWIGDEVKGIMEEIIEVGESLEVQAVLNDERYQSFKLFKSVFGVGVKTADKWYRMGLRTLEDVRSSKTLKLTPMQKAGLCYYEDLADGVTKAEADAISLLVQDAVWTFDPDALVEITGGFRRGKPFGHDVDLLITSPGAEKEQEDQLLQKVTNLWKKQGLLLYGDLRESRFEDGKLPSRKIDALDHFAKCFLILKLYHHKVDKSKWEMPTGSNESEAKSWKAIRVDLVRCPYDRFAFALLGWTGSRMFERDLRRYATHEKKMMLDNHALYDLTKKIFLKAKSEEEIFAHLGLEYLEPSERNA

SEQ ID NO: 873 - DNA, 1587 bp, synthetic construct
  misc_feature 1..1587: note = Variant of terminal deoxynucleotidyltransferase
  source 1..1587: mol_type = other DNA
atgcaccatcatcatcatcatggcggtagcggcagccacggcattcgtaccatcgattcggacttcggtaaaaaacgccagaagaagatggataaccacgatagttccgccatctatgaaatcaaatttcacgagtttgtgctgttcattctcgaagagaaaatgggtgcgacgcgtcgtacttttctgacagatttagcccgcaagaaagggttccgcgtcgagaatgaactgtcagacagcgttacccacatcgtggcagaaaataattcacgctctgatgtattggcttggctgaaggagcacaagatggagaagaccacgcaatttgaactgctggatattagctggcttatcgaaagcatgaaagttggtaaaccggtggacaccaaggggaaataccagttggcagaatcgggtgtgatgagtgcgaacccagatccgacagagggtcgtgaaaacgagctgcctcctactacgaagaccatttctcagtatgcgtgtcaacgccgcaccaccctgaacaaccataatcaacgttttacggacgcactggaaattcttgcggaaaattacgagttcaaacgcaacgatgatacttgtctgacctttatgcgtgctatttccgtgctgaaatgccttccgtttgaggtagttagcctgaaagacacggaaggattgccctggatcggtgatgaagtcaaagggattatggaagaaatcatcgaggtcggtgaatcgctggaagtgcaggccgtgctcaatgatgagcgctatcaaagcttcaaactgtttaagagtgtctttggagtgggggtgaagacagcagacaaatggtaccgtatgggtctgcgcacgctcgaggatgttcgttccagcaagaccctgaagttgaccccgatgcagaaagcgggtctgtgctattatgaagatcttgctgatggcgttacgaaagccgaagctgacgcgatttctctgctggttcaggatgcagtctggactttcgacccggatgcgctggtggagattacgggtggatttcgtcgtgggaaaccttttggtcacgacgttgatctgcttatcacatctccgggagctgagaaagaacaagaagaccagctcctgcagaaagtgaccaatctgtggaagaaacaagggttgttgctgtacggtgatctgcgtgaaagtcgctttgaagatgggaaactcccatcccgcaagatcgatgccctggaccattttgcgaaatgctttctgatcctcaaactttatcaccataaagtggacaaaagcaaatgggaaatgccgacgggttcgaacgaaagcgaggccaaaagttggaaagcaattcgcgtagatctggttcgttgtccctacgatcgttttgcgtttgcgttgttgggttggaccggaagccgcatgttccgtcgtgatctgcgccgctacgccacccacgagaagaagatgatgctggacaatcatgcgctgtatgacctgaccaagaaaatctttctcaaagctaaatcggaagaggaaattttcgcacatctggggcttgaatacctggaaccgtccgaacgtaacgca

SEQ ID NO: 874 - protein, 529 aa, synthetic construct
  REGION 1..529: note = Variant of terminal deoxynucleotidyltransferase
MHHHHHHGGSGSHGIRTIDSDFGKKRQKKMDNHDSSAIYEIKFHEFVLFILEEKMGATRRTFLTDLARKKGFRVENELSDSVTHIVAENNSRSDVLAWLKEHKMEKTTQFELLDISWLIESMKVGKPVDTKGKYQLAESGVMSANPDPTEGRENELPPTTKTISQYACQRRTTLNNHNQRFTDALEILAENYEFKRNDDTCLTFMRAISVLKCLPFEVVSLKDTEGLPWIGDEVKGIMEEIIEVGESLEVQAVLNDERYQSFKLFKSVFGVGVKTADKWYRMGLRTLEDVRSSKTLKLTPMQKAGLCYYEDLADGVTKAEADAISLLVQDAVWTFDPDALVEITGGFRRGKPFGHDVDLLITSPGAEKEQEDQLLQKVTNLWKKQGLLLYGDLRESRFEDGKLPSRKIDALDHFAKCFLILKLYHHKVDKSKWEMPTGSNESEAKSWKAIRVDLVRCPYDRFAFALLGWTGSRMFRRDLRRYATHEKKMMLDNHALYDLTKKIFLKAKSEEEIFAHLGLEYLEPSERNA

SEQ ID NO: 875 - DNA, 1587 bp, synthetic construct
  misc_feature 1..1587: note = Variant of terminal deoxynucleotidyltransferase
  source 1..1587: mol_type = other DNA
atgcaccatcatcatcatcatggcggtagcggcagccacggcattcgcaccatcgattcggacttcgggaagaaacgccagaagaagatggataaccacgatagttccgccatctatgaaatcaaatttcacgagtttgtgctgttcattctcgaagagaaaatgggtgcgacgcgtcgtacttttctgacagatttagcccgcaagaaagggttccgcgtcgagaatgaactgtcagacagcgttacccacatcgtggcagaaaataattcaggatctgacgtattggcttggctgaaggagcacaaggtggagaagaccacgcaatttgaactgctggatattagctggcttatcgaaagcatgaaagttggtaaaccggtggacaccaaggggaaataccagttgatggaatcgggtgtgatgagtgcgaacccagatccgacagagggtcgtgaaaacattctgcctcctactacgaagaccatttctcagtatgcgtgtcaacgccgcaccaccctgaacaaccataatcaacgttttacggacgcactggaaattcttgcggaaaattacgagttcaaacgcaacgatgatacttgtctgacctttatgcgtgctatttccgtgctgaaatgccttccgtttgaggtagttagcctgaaagacacggaaggattgccctggatcggtgatgaagtcaaagggattatggaagaaatcatcgaggtcggtgaatcgctggaagtgcaggccgtgctcaatgatgagcgctatcaaagcttcaaactgtttaagagtgtctttggagtgggggtgaagacagcagacaaatggtaccgtatgggtctgcgcacgctcgaggatgttcgttccagcaagaccctgaagttgaccccgatgcagaaagcgggtctgtgctattatgaagatcttgctgatggcgttacgaaagccgaagctgacgcgatttctctgctggttcaggatgcagtctggactttcgacccggatgcgctggtggagattacgggtggatttcgtcgtgggaaaccttttggtcacgacgttgatctgcttatcacatctccgggagctgagaaagaacaagaagaccagctcctgcagaaagtgaccaatctgtggaagaaacaagggttgttgctgtacggtgacctgcgtgaaagtcgctttgaagatgggaaactcccatcccgcaagatcgatgccctggaccattttgcgaaatgctttctgatcctcaaactttatcaccataaagtggacaaaagcaaatgggaaatgccgacgggttcgaacgaaagcgaggccaaaagttggaaagcaattcgcgtagatctggttcgttgtccctacgatcgttttgcgtttgcgttgttgggttggaccggaagccgcatgttcgaacgtgatctgcgccgctacgccacccacgagaagaagatgatgctggacaatcatgcgctgtatgacctgaccaagaaaatctttctcaaagctaaatcggaagaggaaattttcgcacatctggggcttgaatacctggaaccgtccgaacgtaacgca

SEQ ID NO: 876 - protein, 529 aa, synthetic construct
  REGION 1..529: note = Variant of terminal deoxynucleotidyltransferase
MHHHHHHGGSGSHGIRTIDSDFGKKRQKKMDNHDSSAIYEIKFHEFVLFILEEKMGATRRTFLTDLARKKGFRVENELSDSVTHIVAENNSGSDVLAWLKEHKVEKTTQFELLDISWLIESMKVGKPVDTKGKYQLMESGVMSANPDPTEGRENILPPTTKTISQYACQRRTTLNNHNQRFTDALEILAENYEFKRNDDTCLTFMRAISVLKCLPFEVVSLKDTEGLPWIGDEVKGIMEEIIEVGESLEVQAVLNDERYQSFKLFKSVFGVGVKTADKWYRMGLRTLEDVRSSKTLKLTPMQKAGLCYYEDLADGVTKAEADAISLLVQDAVWTFDPDALVEITGGFRRGKPFGHDVDLLITSPGAEKEQEDQLLQKVTNLWKKQGLLLYGDLRESRFEDGKLPSRKIDALDHFAKCFLILKLYHHKVDKSKWEMPTGSNESEAKSWKAIRVDLVRCPYDRFAFALLGWTGSRMFERDLRRYATHEKKMMLDNHALYDLTKKIFLKAKSEEEIFAHLGLEYLEPSERNA

SEQ ID NO: 877 - DNA, 1587 bp, synthetic construct
  misc_feature 1..1587: note = Variant of terminal deoxynucleotidyltransferase
  source 1..1587: mol_type = other DNA
atgcaccatcatcatcatcatggcggtagcggcagccacggcattcgtaccatcgattcggacttcgggaagaaacgccagaagaagatggataaccacgatagttccgccatctatgaaatcaaatttcacgagtttgtgctgttcattctcgaagagaaaatgggtgcgacgcgtcgtacttttctgacagatttagcccgcaagaaagggttccgcgtcgagaatgaactgtcagacagcgttacccacatcgtggcagaaaataattcaggatctgacgtattggcttggctgaaggagcacaagatggagaagaccacgcaatttgaactgctggatattagctggcttatcgaaagcatgaaagttggtaaaccggtggacaccaaggggaaataccagttgatggaatcgggtgtgatgagtgcgaacccagatccgacagagggtcgtgaaaacatcctgcctcctactacgaagaccatttctcagtatgcgtgtcaacgccgcaccaccctgaacaaccataatcaacgttttacggacgcactggaaattcttgcggaaaattacgagttcaaacgcaacgatgatacttgtctgacctttatgcgtgctatttccgtgctgaaatgccttccgtttgaggtagttagcctgaaagacacggaaggattgccctggatcggtgatgaagtcaaagggattatggaagaaatcatcgaggtcggtgaatcgctggaagtgcaggccgtgctcaatgatgagcgctatcaaagcttcaaactgtttaagagtgtctttggagtgggggtgaagacagcagacaaatggtaccgtatgggtctgcgcacgctcgaggatgttcgttccagcaagaccctgaagttgaccccgatgcagaaagcgggtctgtgctattatgaagatcttgctgatggcgttacgaaagccgaagctgacgcgatttctctgctggttcaggatgcagtctggactttcgacccggatgcgctggtggagattacgggtggatttcgtcgtgggaaaccttttggtcacgacgttgatctgcttatcacatctccgggagctgagaaagaacaagaagaccagctcctgcagaaagtgaccaatctgtggaagaaacaagggttgttgctgtacggtgacctgcgtgaaagtcgctttgaagatgggaaactcccatcccgcaagatcgatgccctggaccattttgcgaaatgctttctgatcctcaaactttatcaccataaagtggacaaaagcaaatgggaaatgccgacgggttcgaacgaaagcgaggccaaaagttggaaagcaattcgcgtagatctggttcgttgtccctacgatcgttttgcgtttgcgttgttgggttggaccggaagccgcatgttcgaacgtgatctgcgccgctacgccacccacgagaagaagatgatgctggacaatcatgcgctgtatgacctgaccaagaaaatctttctcaaagctaaatcggaagaggaaattttcgcacatctggggcttgaatacctggaaccgtccgaacgtaacgca

SEQ ID NO: 878 - protein, 529 aa, synthetic construct
  REGION 1..529: note = Variant of terminal deoxynucleotidyltransferase
MHHHHHHGGSGSHGIRTIDSDFGKKRQKKMDNHDSSAIYEIKFHEFVLFILEEKMGATRRTFLTDLARKKGFRVENELSDSVTHIVAENNSGSDVLAWLKEHKMEKTTQFELLDISWLIESMKVGKPVDTKGKYQLMESGVMSANPDPTEGRENILPPTTKTISQYACQRRTTLNNHNQRFTDALEILAENYEFKRNDDTCLTFMRAISVLKCLPFEVVSLKDTEGLPWIGDEVKGIMEEIIEVGESLEVQAVLNDERYQSFKLFKSVFGVGVKTADKWYRMGLRTLEDVRSSKTLKLTPMQKAGLCYYEDLADGVTKAEADAISLLVQDAVWTFDPDALVEITGGFRRGKPFGHDVDLLITSPGAEKEQEDQLLQKVTNLWKKQGLLLYGDLRESRFEDGKLPSRKIDALDHFAKCFLILKLYHHKVDKSKWEMPTGSNESEAKSWKAIRVDLVRCPYDRFAFALLGWTGSRMFERDLRRYATHEKKMMLDNHALYDLTKKIFLKAKSEEEIFAHLGLEYLEPSERNA

SEQ ID NO: 879 - DNA, 1587 bp, synthetic construct
  misc_feature 1..1587: note = Variant of terminal deoxynucleotidyltransferase
  source 1..1587: mol_type = other DNA
atgcaccatcatcatcatcatggcggtagcggcagccacggcattgtaaccatcgattcggacttcgggaagaaacgccagaagattgaagataaccacgatagttccgccatctatgaaatcaaatttcacgagtttgtgctgttcattctcgaagagaaaatgggtgcgacgcgtcgtacttttctgacagatttagcccgcaagaaagggttccgcgtcgagaatgaactgtcagacagcgttacccacatcgtggcagaaaataattcaggatctgacgtattggcttggctgaagactcacaagatggagaagaccacgcaatttgaactgctggatattagctggcttatcgaaagcatgaaagttggtaaaccggtggacaccaaggggaaataccagttgatggaatcgggtgtgatgagtgcgaacccagatccgacagagggtcgtgaaaacattctgcctcctactacgaagaccatttctcagtatgcgtgtcaacgccgcaccaccctgaacaaccataatcaacgttttacggacgcactggaaattcttgcggaaaattacgagttcaaacgcaacgatgatacttgtctgacctttatgcgtgctatttccgtgctgaaatgccttccgtttgaggtagttagcctgaaagacacggaaggattgccctggatcggtgatgaagtcaaagggattatggaagaaatcatcgaggtcggtgaatcgctggaagtgcaggccgtgctcaatgatgagcgctatcaaagcttcaaactgtttaagagtgtctttggagtgggggtgaagacagcagacaaatggtaccgtatgggtctgcgcacgctcgaggatgttcgttccagcaagaccctgaagttgaccccgatgcagaaagcgggtctgtgctattatgaagatcttgctgatggcgttacgaaagccgaagctgacgcgatttctctgctggttcaggatgcagtctggactttcgacccggatgcgctggtggagattacgggtggatttcgtcgtgggaaaccttttggtcacgacgttgatctgcttatcacatctccgggagctgagaaagaacaagaagaccagctcctgcagaaagtgaccaatctgtggaagaaacaagggttgttgctgtacggtgacctgcgtgaaagtcgctttgaagatgggaaactcccatcccgcaagatcgatgccctggaccattttgcgaaatgctttctgatcctcaaactttatcaccataaagtggacaaaagcaaatgggaaatgccgacgggttcgaacgaaagcgaggccaaaagttggaaagcaattcgcgtagatctggttcgttgtccctacgatcgttttgcgtttgcgttgttgggttggaccggaagccgcatgttcgaacgtgatctgcgccgctacgccacccacgagaagaagatgatgctggacaatcatgcgctgtatgacctgaccaagaaaatctttctcaaagctaaatcggaagaggaaattttcgcacatctggggcttgaatacctggaaccgtccgaacgtaacgca

SEQ ID NO: 880 - protein, 529 aa, synthetic construct
  REGION 1..529: note = Variant of terminal deoxynucleotidyltransferase
MHHHHHHGGSGSHGIVTIDSDFGKKRQKIEDNHDSSAIYEIKFHEFVLFILEEKMGATRRTFLTDLARKKGFRVENELSDSVTHIVAENNSGSDVLAWLKTHKMEKTTQFELLDISWLIESMKVGKPVDTKGKYQLMESGVMSANPDPTEGRENILPPTTKTISQYACQRRTTLNNHNQRFTDALEILAENYEFKRNDDTCLTFMRAISVLKCLPFEVVSLKDTEGLPWIGDEVKGIMEEIIEVGESLEVQAVLNDERYQSFKLFKSVFGVGVKTADKWYRMGLRTLEDVRSSKTLKLTPMQKAGLCYYEDLADGVTKAEADAISLLVQDAVWTFDPDALVEITGGFRRGKPFGHDVDLLITSPGAEKEQEDQLLQKVTNLWKKQGLLLYGDLRESRFEDGKLPSRKIDALDHFAKCFLILKLYHHKVDKSKWEMPTGSNESEAKSWKAIRVDLVRCPYDRFAFALLGWTGSRMFERDLRRYATHEKKMMLDNHALYDLTKKIFLKAKSEEEIFAHLGLEYLEPSERNA

SEQ ID NO: 881 - DNA, 1587 bp, synthetic construct
  misc_feature 1..1587: note = Variant of terminal deoxynucleotidyltransferase
  source 1..1587: mol_type = other DNA
atgcaccatcatcatcatcatggcggtagcggcagccacggcattcgtaccatcgattcggacttcgggaagaaacgccagaagaagatggataaccacgatagttccgccatctatgaaatcaaatttcacgagtttgtgctgttcattctcgaagagaaaatgggtgcgacgcgtcgtacttttctgacagatttagcccgcaagaaagggttccgcgtcgagaatgaactgtcagacagcgttacccacatcgtggcagaaaataattcacgctctgaagtattggcttggctgaagactcacaagatggagaagaccaagcaattcgaactgctggatattagctggcttatcgaaagcatgaaagttggtaaaccggtggacaccaaggggaaataccagttgatggaatcgggtgagatgagtgcgaacccagatccgacagagggtcgtgaaaacgagctgcctcctactacgaagaccatttctcagtatgcgtgtcaacgccgcaccaccctgaacaaccataatcaacgttttacggacgcactggaaattcttgcggaaaattacgagttcaaacgcaacgatgatacttgtctgacctttatgcgtgctatttccgtgctgaaatgccttccgtttgaggtagttagcctgaaagacacggaaggattgccctggatcggtgatgaagtcaaagggattatggaagaaatcatcgaggtcggtgaatcgctggaagtgcaggccgtgctcaatgatgagcgctatcaaagcttcaaactgtttaagagtgtctttggagtgggggtgaagacagcagacaaatggtaccgtatgggtctgcgcacgctcgaggatgttcgttccagcaagaccctgaagttgaccccgatgcagaaagcgggtctgtgctattatgaagatcttgctgatggcgttacgaaagccgaagctgacgcgatttctctgctggttcaggatgcagtctggactttcgacccggatgcgctggtggagattacgggtggatttcgtcgtgggaaaccttttggtcacgacgttgatctgcttatcacatctccgggagctgagaaagaacaagaagaccagctcctgcagaaagtgaccaatctgtggaagaaacaagggttgttgctgtacggtcgtctgcgtgaaagtcgctttgaagatgggaaactcccatcccgcaagatcgatgccctggaccattttgcgaaatgctttctgatcctcaaactttatcaccataaagtggacaaaagcaaatgggaaatgccgacgggttcgaacgaaagcgaggccaaaagttggaaagcaattcgcgtagatctggttcgttgtccctacgatcgttttgcgtttgcgttgttgggttggaccggaagccgcatgttcgaacgtgatctgcgccgctacgccacccacgagaagaagatgatgctggacaatcatgcgctgtatgacctgaccaagaaaatctttctcaaagctaaatcggaagaggaaattttcgcacatctggggcttgaatacctggaaccgtccgaacgtaacgca

SEQ ID NO: 882 - protein, 529 aa, synthetic construct
  REGION 1..529: note = Variant of terminal deoxynucleotidyltransferase
MHHHHHHGGSGSHGIRTIDSDFGKKRQKKMDNHDSSAIYEIKFHEFVLFILEEKMGATRRTFLTDLARKKGFRVENELSDSVTHIVAENNSRSEVLAWLKTHKMEKTKQFELLDISWLIESMKVGKPVDTKGKYQLMESGEMSANPDPTEGRENELPPTTKTISQYACQRRTTLNNHNQRFTDALEILAENYEFKRNDDTCLTFMRAISVLKCLPFEVVSLKDTEGLPWIGDEVKGIMEEIIEVGESLEVQAVLNDERYQSFKLFKSVFGVGVKTADKWYRMGLRTLEDVRSSKTLKLTPMQKAGLCYYEDLADGVTKAEADAISLLVQDAVWTFDPDALVEITGGFRRGKPFGHDVDLLITSPGAEKEQEDQLLQKVTNLWKKQGLLLYGRLRESRFEDGKLPSRKIDALDHFAKCFLILKLYHHKVDKSKWEMPTGSNESEAKSWKAIRVDLVRCPYDRFAFALLGWTGSRMFERDLRRYATHEKKMMLDNHALYDLTKKIFLKAKSEEEIFAHLGLEYLEPSERNA

SEQ ID NO: 883 - DNA, 1587 bp, synthetic construct
  misc_feature 1..1587: note = Variant of terminal deoxynucleotidyltransferase
  source 1..1587: mol_type = other DNA
atgcaccatcatcatcatcatggcggtagcggcagccacggcattcgcaccatcgattcggacttcgggaagaaacgccagaagaagatggataaccacgatagttccgccatctatgaaatcaaatttcacgagtttgtgctgttcattctcgaagagaaaatgggtgcggcccgtcgtacttttctgacagatttagcccgcaagaaagggttccgcgtcgagaatgaactgtcagacagcgttacccacatcgtggcagaaaataattcaggatctgacgtattggcttggctgaagactcacaagatggagaagaccacgcaatttgaactgctggatattagctggcttatcgaaagcatgaaagttggtaaaccggtggacaccaaggggaaataccagttgatggaatcgggtgtgatgagtgcgaacccagatccgacagagggtcgtgaaaacattctgcctcctactacgaagaccatttctcagtatgcgtgtcaacgccgcaccaccctgaacaaccataatcaacgttttacggacgcactggaaattcttgcggaaaattacgagttcaaacgcaacgatgatacttgtctgacctttatgcgtgctatttccgtgctgaaatgccttccgtttgaggtagttagcctgaaagacacggaaggattgccctggatcggtgatgaagtcaaagggattatggaagaaatcatcgaggtcggtgaatcgctggaagtgcaggccgtgctcaatgatgagcgctatcaaagcttcaaactgtttaagagtgtctttggagtgggggtgaagacagcagacaaatggtaccgtatgggtctgcgcacgctcgaggatgttcgttccagcaagaccctgaagttgaccccgatgcagaaagcgggtctgtgctattatgaagatcttgctgatggcgttacgaaagccgaagctgacgcgatttctctgctggttcaggatgcagtctggactttcgacccggatgcgctggtggagattacgggtggatttcgtcgtgggaaaccttttggtcacgacgttgatctgcttatcacatctccgggagctgagaaagaacaagaagaccagctcctgcagaaagtgaccaatctgtggaagaaacaagggttgttgctgtacggtgacctgcgtgaaagtcgctttgaagatgggaaactcccatcccgcaagatcgatgccctggaccattttgcgaaatgctttctgatcctcaaactttatcaccataaagtggacaaaagcaaatgggaaatgccgacgggttcgaacgaaagcgaggccaaaagttggaaagcaattcgcgtagatctggttcgttgtccctacgatcgttttgcgtttgcgttgttgggttggaccggaagccgcatgttcgaacgtgatctgcgccgctacgccacccacgagaagaagatgatgctggacaatcatgcgctgtatgacctgaccaagaaaatctttctcaaagctaaatcggaagaggaaattttcgcacatctggggcttgaatacctggaaccgtccgaacgtaacgca

SEQ ID NO: 884 - protein, 529 aa, synthetic construct
  REGION 1..529: note = Variant of terminal deoxynucleotidyltransferase
MHHHHHHGGSGSHGIRTIDSDFGKKRQKKMDNHDSSAIYEIKFHEFVLFILEEKMGAARRTFLTDLARKKGFRVENELSDSVTHIVAENNSGSDVLAWLKTHKMEKTTQFELLDISWLIESMKVGKPVDTKGKYQLMESGVMSANPDPTEGRENILPPTTKTISQYACQRRTTLNNHNQRFTDALEILAENYEFKRNDDTCLTFMRAISVLKCLPFEVVSLKDTEGLPWIGDEVKGIMEEIIEVGESLEVQAVLNDERYQSFKLFKSVFGVGVKTADKWYRMGLRTLEDVRSSKTLKLTPMQKAGLCYYEDLADGVTKAEADAISLLVQDAVWTFDPDALVEITGGFRRGKPFGHDVDLLITSPGAEKEQEDQLLQKVTNLWKKQGLLLYGDLRESRFEDGKLPSRKIDALDHFAKCFLILKLYHHKVDKSKWEMPTGSNESEAKSWKAIRVDLVRCPYDRFAFALLGWTGSRMFERDLRRYATHEKKMMLDNHALYDLTKKIFLKAKSEEEIFAHLGLEYLEPSERNA

SEQ ID NO: 885 - DNA, 1587 bp, synthetic construct
  misc_feature 1..1587: note = Variant of terminal deoxynucleotidyltransferase
  source 1..1587: mol_type = other DNA
atgcaccatcatcatcatcatggcggtagcggcagccacggcattcgtaccatcgattcggacttcgggaagaaacgccagaagaagatggataaccacgatagttccgccatctatgaaatcaaatttcacgagtttgtgctgttcattctcgaagagaaaatgggtgcgacgcgtcgtacttttctgacagatttagcccgcaagaaagggttccgcgtcgagaatgaactgtcagacagcgttacccacatcgtggcagaaaataattcaggatctgacgtattggcttggctgaagactcacaagatggagaagaccaagcaattcgaactgctggatattagctggcttatcgaaagcatgaaagttggtaaaccggtggacaccaaggggaaataccagttgatggaatcgggtgtgatgagtgcgaacccagatccgacagagggtcgtgaaaacattctgcctcctactacgaagaccatttctcagtatgcgtgtcaacgccgcaccaccctgaacaaccataatcaacgttttacggacgcactggaaattcttgcggaaaattacgagttcaaacgcaacgatgatacttgtctgacctttatgcgtgctatttccgtgctgaaatgccttccgtttgaggtagttagcctgaaagacacggaaggattgccctggatcggtgatgaagtcaaagggattatggaagaaatcatcgaggtcggtgaatcgctggaagtgcaggccgtgctcaatgatgagcgctatcaaagcttcaaactgtttaagagtgtctttggagtgggggtgaagacagcagacaaatggtaccgtatgggtctgcgcacgctcgaggatgttcgttccagcaagaccctgaagttgaccccgatgcagaaagcgggtctgtgctattatgaagatcttgctgatggcgttacgaaagccgaagctgacgcgatttctctgctggttcaggatgcagtctggactttcgacccggatgcgctggtggagattacgggtggatttcgtcgtgggaaaccttttggtcacgacgttgatctgcttatcacatctccgggagctgagaaagaacaagaagaccagctcctgcagaaagtgaccaatctgtggaagaaacaagggttgttgctgtacggtgatctgcgtgaaagtcgctttgaagatgggaaactcccatcccgcaagatcgatgccctggaccattttgcgaaatgctttctgatcctcaaactttatcaccataaagtggacaaaagcaaatgggaaatgccgacgggttcgaacgaaagcgaggccaaaagttggaaagcaattcgcgtagatctggttcgttgtccctacgatcgttttgcgtttgcgttgttgggttggaccggaagccgcatgttcgaacgtgatctgcgccgctacgccacccacgagaagaagatgatgctggacaatcatgcgctgtatgacctgaccaagaaaatctttctcaaagctaaatcggaagaggaaattttcgcacatctggggcttgaatacctggaaccgtccgaacgtaacgca

SEQ ID NO: 886 - protein, 529 aa, synthetic construct
  REGION 1..529: note = Variant of terminal deoxynucleotidyltransferase
MHHHHHHGGSGSHGIRTIDSDFGKKRQKKMDNHDSSAIYEIKFHEFVLFILEEKMGATRRTFLTDLARKKGFRVENELSDSVTHIVAENNSGSDVLAWLKTHKMEKTKQFELLDISWLIESMKVGKPVDTKGKYQLMESGVMSANPDPTEGRENILPPTTKTISQYACQRRTTLNNHNQRFTDALEILAENYEFKRNDDTCLTFMRAISVLKCLPFEVVSLKDTEGLPWIGDEVKGIMEEIIEVGESLEVQAVLNDERYQSFKLFKSVFGVGVKTADKWYRMGLRTLEDVRSSKTLKLTPMQKAGLCYYEDLADGVTKAEADAISLLVQDAVWTFDPDALVEITGGFRRGKPFGHDVDLLITSPGAEKEQEDQLLQKVTNLWKKQGLLLYGDLRESRFEDGKLPSRKIDALDHFAKCFLILKLYHHKVDKSKWEMPTGSNESEAKSWKAIRVDLVRCPYDRFAFALLGWTGSRMFERDLRRYATHEKKMMLDNHALYDLTKKIFLKAKSEEEIFAHLGLEYLEPSERNA

SEQ ID NO: 887 - DNA, 1587 bp, synthetic construct
  misc_feature 1..1587: note = Variant of terminal deoxynucleotidyltransferase
  source 1..1587: mol_type = other DNA
atgcaccatcatcatcatcatggcggtagcggcagccacggcattcgtaccatcgattcggacttcgggaagaaacgccagaagaagatggataaccacgatagttccgccatctatgaaatcaaatttcacgagtttgtgctgttcattctcgaagagaaaatgggtgcgacgcgtcgtacttttctgacagatttagcccgcaagaaagggttccgcgtcgagaatgaactgtcagacagcgttacccacatcgtggcagaaaataattcaggctctgaagtattggcttggctgaaggagcacaagatggagaagaccacgcaatttgaactgctggatattagctggcttatcgaaagcatgaaagttggtaaaccggtggacaccaaggggaaataccagttgatggaatcgggtgtgatgagtgcgaacccagatccgacagagggtcgtgaaaacatcgagcctcctactacgaagaccatttctcagtatgcgtgtcaacgccgcaccaccctgaacaaccataatcaacgttttacggacgcactggaaattcttgcggaaaattacgagttcaaacgcaacgatgatacttgtctgacctttatgcgtgctatttccgtgctgaaatgccttccgtttgaggtagttagcctgaaagacacggaaggattgccctggatcggtgatgaagtcaaagggattatggaagaaatcatcgaggtcggtgaatcgctggaagtgcaggccgtgctcaatgatgagcgctatcaaagcttcaaactgtttaagagtgtctttggagtgggggtgaagacagcagacaaatggtaccgtatgggtctgcgcacgctcgaggatgttcgttccagcaagaccctgaagttgaccccgatgcagaaagcgggtctgtgctattatgaagatcttgctgatggcgttacgaaagccgaagctgacgcgatttctctgctggttcaggatgcagtctggactttcgacccggatgcgctggtggagattacgggtggatttcgtcgtgggaaaccttttggtcacgacgttgatctgcttatcacatctccgggagctgagaaagaacaagaagaccagctcctgcagaaagtgaccaatctgtggaagaaacaagggttgttgctgtacggtgacctgcgtgaaagtcgctttgaagatgggaaactcccatcccgcaagatcgatgccctggaccattttgcgaaatgctttctgatcctcaaactttatcaccataaagtggacaaaagcaaatgggaaatgccgacgggttcgaacgaaagcgaggccaaaagttggaaagcaattcgcgtagatctggttcgttgtccctacgatcgttttgcgtttgcgttgttgggttggaccggaagccgcatgttccgtcgtgatctgcgccgctacgccacccacgagaagaagatgatgctggacaatcatgcgctgtatgacctgaccaagaaaatctttctcaaagctaaatcggaagaggaaattttcgcacatctggggcttgaatacctggaaccgtccgaacgtaacgca

SEQ ID NO: 888 - protein, 529 aa, synthetic construct
  REGION 1..529: note = Variant of terminal deoxynucleotidyltransferase
MHHHHHHGGSGSHGIRTIDSDFGKKRQKKMDNHDSSAIYEIKFHEFVLFILEEKMGATRRTFLTDLARKKGFRVENELSDSVTHIVAENNSGSEVLAWLKEHKMEKTTQFELLDISWLIESMKVGKPVDTKGKYQLMESGVMSANPDPTEGRENIEPPTTKTISQYACQRRTTLNNHNQRFTDALEILAENYEFKRNDDTCLTFMRAISVLKCLPFEVVSLKDTEGLPWIGDEVKGIMEEIIEVGESLEVQAVLNDERYQSFKLFKSVFGVGVKTADKWYRMGLRTLEDVRSSKTLKLTPMQKAGLCYYEDLADGVTKAEADAISLLVQDAVWTFDPDALVEITGGFRRGKPFGHDVDLLITSPGAEKEQEDQLLQKVTNLWKKQGLLLYGDLRESRFEDGKLPSRKIDALDHFAKCFLILKLYHHKVDKSKWEMPTGSNESEAKSWKAIRVDLVRCPYDRFAFALLGWTGSRMFRRDLRRYATHEKKMMLDNHALYDLTKKIFLKAKSEEEIFAHLGLEYLEPSERNA

SEQ ID NO: 889 - DNA, 1587 bp, synthetic construct
  misc_feature 1..1587: note = Variant of terminal deoxynucleotidyltransferase
  source 1..1587: mol_type = other DNA
atgcaccatcatcatcatcatggcggtagcggcagccacggcattgtaaccatcgattcggacttcgggaagaaacgccagaagaagctggataaccacgatagttccgccatctatgaaatcaaatttcacgagtttgtgctgttcattctcgaagagaaaatgggtgcgacgcgtcgtacttttctgacagatttagcccgcaagaaagggttccgcgtcgagaatgaactgtcagacagcgttacccacatcgtggcagaaaataattcaggatctgacgtattggcttggctgaagactcacaaggtggagaagaccacgcaatttgaactgctggatattagctggcttatcgaaagcatgaaagttggtaaaccggtggacaccaaggggaaataccagttgatggaatcgggtgtgatgagtgcgaacccagatccgacagagggtcgtgaaaacattctgcctcctactacgaagaccatttctcagtatgcgtgtcaacgccgcaccaccctgaacaaccataatcaacgttttacggacgcactggaaattcttgcggaaaattacgagttcaaacgcaacgatgatacttgtctgacctttatgcgtgctatttccgtgctgaaatgccttccgtttgaggtagttagcctgaaagacacggaaggattgccctggatcggtgatgaagtcaaagggattatggaagaaatcatcgaggtcggtgaatcgctggaagtgcaggccgtgctcaatgatgagcgctatcaaagcttcaaactgtttaagagtgtctttggagtgggggtgaagacagcagacaaatggtaccgtatgggtctgcgcacgctcgaggatgttcgttccagcaagaccctgaagttgaccccgatgcagaaagcgggtctgtgctattatgaagatcttgctgatggcgttacgaaagccgaagctgacgcgatttctctgctggttcaggatgcagtctggactttcgacccggatgcgctggtggagattacgggtggatttcgtcgtgggaaaccttttggtcacgacgttgatctgcttatcacatctccgggagctgagaaagaacaagaagaccagctcctgcagaaagtgaccaatctgtggaagaaacaagggttgttgctgtacggtgacctgcgtgaaagtcgctttgaagatgggaaactcccatcccgcaagatcgatgccctggaccattttgcgaaatgctttctgatcctcaaactttatcaccataaagtggacaaaagcaaatgggaaatgccgacgggttcgaacgaaagcgaggccaaaagttggaaagcaattcgcgtagatctggttcgttgtccctacgatcgttttgcgtttgcgttgttgggttggaccggaagccgcatgttcgaacgtgatctgcgccgctacgccacccacgagaagaagatgatgctggacaatcatgcgctgtatgacctgaccaagaaaatctttctcaaagctaaatcggaagaggaaattttcgcacatctggggcttgaatacctggaaccgtccgaacgtaacgca

SEQ ID NO: 890 - protein, 529 aa, synthetic construct
  REGION 1..529: note = Variant of terminal deoxynucleotidyltransferase
MHHHHHHGGSGSHGIVTIDSDFGKKRQKKLDNHDSSAIYEIKFHEFVLFILEEKMGATRRTFLTDLARKKGFRVENELSDSVTHIVAENNSGSDVLAWLKTHKVEKTTQFELLDISWLIESMKVGKPVDTKGKYQLMESGVMSANPDPTEGRENILPPTTKTISQYACQRRTTLNNHNQRFTDALEILAENYEFKRNDDTCLTFMRAISVLKCLPFEVVSLKDTEGLPWIGDEVKGIMEEIIEVGESLEVQAVLNDERYQSFKLFKSVFGVGVKTADKWYRMGLRTLEDVRSSKTLKLTPMQKAGLCYYEDLADGVTKAEADAISLLVQDAVWTFDPDALVEITGGFRRGKPFGHDVDLLITSPGAEKEQEDQLLQKVTNLWKKQGLLLYGDLRESRFEDGKLPSRKIDALDHFAKCFLILKLYHHKVDKSKWEMPTGSNESEAKSWKAIRVDLVRCPYDRFAFALLGWTGSRMFERDLRRYATHEKKMMLDNHALYDLTKKIFLKAKSEEEIFAHLGLEYLEPSERNA

SEQ ID NO: 891 - DNA, 1587 bp, synthetic construct
  misc_feature 1..1587: note = Variant of terminal deoxynucleotidyltransferase
  source 1..1587: mol_type = other DNA
atgcaccatcatcatcatcatggcggtagcggcagccacggcattcgtaccatcgattcggacttcgggaagaaacgccagaagattgaagataaccacgatagttccgccatctatgaaatcaaatttcacgagtttgtgctgttcattctcgaagagaaaatgggtgcgacgcgtcgtacttttctgacagatttagcccgcaagaaagggttccgcgtcgagaatgaactgtcagacagcgttacccacatcgtggcagaaaataattcaggatctgacgtattggcttggctgaagactcacaagatggagaagaccacgcaatttgaactgctggatattagctggcttatcgaaagcatgaaagttggtaaaccggtggacaccaaggggaaataccagttgatggaatcgggtgtgatgagtgcgaacccagatccgacagagggtcgtgaaaacattctgcctcctactacgaagaccatttctcagtatgcgtgtcaacgccgcaccaccctgaacaaccataatcaacgttttacggacgcactggaaattcttgcggaaaattacgagttcaaacgcaacgatgatacttgtctgacctttatgcgtgctatttccgtgctgaaatgccttccgtttgaggtagttagcctgaaagacacggaaggattgccctggatcggtgatgaagtcaaagggattatggaagaaatcatcgaggtcggtgaatcgctggaagtgcaggccgtgctcaatgatgagcgctatcaaagcttcaaactgtttaagagtgtctttggagtgggggtgaagacagcagacaaatggtaccgtatgggtctgcgcacgctcgaggatgttcgttccagcaagaccctgaagttgaccccgatgcagaaagcgggtctgtgctattatgaagatcttgctgatggcgttacgaaagccgaagctgacgcgatttctctgctggttcaggatgcagtctggactttcgacccggatgcgctggtggagattacgggtggatttcgtcgtgggaaaccttttggtcacgacgttgatctgcttatcacatctccgggagctgagaaagaacaagaagaccagctcctgcagaaagtgaccaatctgtggaagaaacaagggttgttgctgtacggtgacctgcgtgaaagtcgctttgaagatgggaaactcccatcccgcaagatcgatgccctggaccattttgcgaaatgctttctgatcctcaaactttatcaccataaagtggacaaaagcaaatgggaaatgccgacgggttcgaacgaaagcgaggccaaaagttggaaagcaattcgcgtagatctggttcgttgtccctacgatcgttttgcgtttgcgttgttgggttggaccggaagccgcatgttcgaacgtgatctgcgccgctacgccacccacgagaagaagatgatgctggacaatcatgcgctgtatgacctgaccaagaaaatctttctcaaagctaaatcggaagaggaaattttcgcacatctggggcttgaatacctggaaccgtccgaacgtaacgca

SEQ ID NO: 892 - protein, 529 aa, synthetic construct
  REGION 1..529: note = Variant of terminal deoxynucleotidyltransferase
MHHHHHHGGSGSHGIRTIDSDFGKKRQKIEDNHDSSAIYEIKFHEFVLFILEEKMGATRRTFLTDLARKKGFRVENELSDSVTHIVAENNSGSDVLAWLKTHKMEKTTQFELLDISWLIESMKVGKPVDTKGKYQLMESGVMSANPDPTEGRENILPPTTKTISQYACQRRTTLNNHNQRFTDALEILAENYEFKRNDDTCLTFMRAISVLKCLPFEVVSLKDTEGLPWIGDEVKGIMEEIIEVGESLEVQAVLNDERYQSFKLFKSVFGVGVKTADKWYRMGLRTLEDVRSSKTLKLTPMQKAGLCYYEDLADGVTKAEADAISLLVQDAVWTFDPDALVEITGGFRRGKPFGHDVDLLITSPGAEKEQEDQLLQKVTNLWKKQGLLLYGDLRESRFEDGKLPSRKIDALDHFAKCFLILKLYHHKVDKSKWEMPTGSNESEAKSWKAIRVDLVRCPYDRFAFALLGWTGSRMFERDLRRYATHEKKMMLDNHALYDLTKKIFLKAKSEEEIFAHLGLEYLEPSERNA

SEQ ID NO: 893 - DNA, 1587 bp, synthetic construct
  misc_feature 1..1587: note = Variant of terminal deoxynucleotidyltransferase
  source 1..1587: mol_type = other DNA
atgcaccatcatcatcatcatggcggtagcggcagccacggcattgtaaccatcgattcggacttcgggaagaaacgccagaagattgaagataacaaagatagttccgccatctatgaaatcaaatttcacgagtttgtgctgttcattctcgaagagaaaatgggtgcgacgcgtcgtacttttctgacagatttagcccgcaagaaagggttccgcgtcgagaatgaactgtcagacagcgttacccacatcgtggcagaaaataattcaggatctgacgtattggcttggctgaagactcacaagatggagaagaccacgcaatttgaactgctggatattagctggcttatcgaaagcatgaaagttggtaaaccggtggacaccaaggggaaataccagttgatggaatcgggtgtgatgagtgcgaacccagatccgacagagggtcgtccaaacattctgcctcctactacgaagaccatttctcagtatgcgtgtcaacgccgcaccaccctgaacaaccataatcaacgttttacggacgcactggaaattcttgcggaaaattacgagttcaaacgcaacgatgatacttgtctgacctttatgcgtgctatttccgtgctgaaatgccttccgtttgaggtagttagcctgaaagacacggaaggattgccctggatcggtgatgaagtcaaagggattatggaagaaatcatcgaggtcggtgaatcgctggaagtgcaggccgtgctcaatgatgagcgctatcaaagcttcaaactgtttaagagtgtctttggagtgggggtgaagacagcagacaaatggtaccgtatgggtctgcgcacgctcgaggatgttcgttccagcaagaccctgaagttgaccccgatgcagaaagcgggtctgtgctattatgaagatcttgctgatggcgttacgaaagccgaagctgacgcgatttctctgctggttcaggatgcagtctggactttcgacccggatgcgctggtggagattacgggtggatttcgtcgtgggaaaccttttggtcacgacgttgatctgcttatcacatctccgggagctgagaaagaacaagaagaccagctcctgcagaaagtgaccaatctgtggaagaaacaagggttgttgctgtacggtgacctgcgtgaaagtcgctttgaagatgggaaactcccatcccgcaagatcgatgccctggaccattttgcgaaatgctttctgatcctcaaactttatcaccataaagtggacaaaagcaaatgggaaatgccgacgggttcgaacgaaagcgaggccaaaagttggaaagcaattcgcgtagatctggttcgttgtccctacgatcgttttgcgtttgcgttgttgggttggaccggaagccgcatgttcgaacgtgatctgcgccgctacgccacccacgagaagaagatgatgctggacaatcatgcgctgtatgacctgaccaagaaaatctttctcaaagctaaatcggaagaggaaattttcgcacatctggggcttgaatacctggaaccgtccgaacgtaacgca

SEQ ID NO: 894 - protein, 529 aa, synthetic construct
  REGION 1..529: note = Variant of terminal deoxynucleotidyltransferase
MHHHHHHGGSGSHGIVTIDSDFGKKRQKIEDNKDSSAIYEIKFHEFVLFILEEKMGATRRTFLTDLARKKGFRVENELSDSVTHIVAENNSGSDVLAWLKTHKMEKTTQFELLDISWLIESMKVGKPVDTKGKYQLMESGVMSANPDPTEGRPNILPPTTKTISQYACQRRTTLNNHNQRFTDALEILAENYEFKRNDDTCLTFMRAISVLKCLPFEVVSLKDTEGLPWIGDEVKGIMEEIIEVGESLEVQAVLNDERYQSFKLFKSVFGVGVKTADKWYRMGLRTLEDVRSSKTLKLTPMQKAGLCYYEDLADGVTKAEADAISLLVQDAVWTFDPDALVEITGGFRRGKPFGHDVDLLITSPGAEKEQEDQLLQKVTNLWKKQGLLLYGDLRESRFEDGKLPSRKIDALDHFAKCFLILKLYHHKVDKSKWEMPTGSNESEAKSWKAIRVDLVRCPYDRFAFALLGWTGSRMFERDLRRYATHEKKMMLDNHALYDLTKKIFLKAKSEEEIFAHLGLEYLEPSERNA

SEQ ID NO: 895 - DNA, 1587 bp, synthetic construct
  misc_feature 1..1587: note = Variant of terminal deoxynucleotidyltransferase
  source 1..1587: mol_type = other DNA
atgcaccatcatcatcatcatggcggtagcggcagccacggcattgtaaccatcgattcggacttcgggaagaaacgccagaagaagatggataacaaagatagttccgccatctatgaaatcaaatttcacgagtttgtgctgttcattctcgaagagaaaatgggtgcgacgcgtcgtacttttctgacagatttagcccgcaagaaagggttccgcgtcgagaatgaactgtcagacagcgttacccacatcgtggcagaaaataattcaggatctgacgtattggcttggctgaagactcacaagatggagaagaccacgcaatttgaactgctggatattagctggcttatcgaaagcatgaaagttggtaaaccggtggacaccaaggggaaataccagttgatggaatcgggtgtgatgagtgcgaacccagatccgacagagggtcgtgaaaacattctgcctcctactacgaagaccatttctcagtatgcgtgtcaacgccgcaccaccctgaacaaccataatcaacgttttacggacgcactggaaattcttgcggaaaattacgagttcaaacgcaacgatgatacttgtctgacctttatgcgtgctatttccgtgctgaaatgccttccgtttgaggtagttagcctgaaagacacggaaggattgccctggatcggtgatgaagtcaaagggattatggaagaaatcatcgaggtcggtgaatcgctggaagtgcaggccgtgctcaatgatgagcgctatcaaagcttcaaactgtttaagagtgtctttggagtgggggtgaagacagcagacaaatggtaccgtatgggtctgcgcacgctcgaggatgttcgttccagcaagaccctgaagttgaccccgatgcagaaagcgggtctgtgctattatgaagatcttgctgatggcgttacgaaagccgaagctgacgcgatttctctgctggttcaggatgcagtctggactttcgacccggatgcgctggtggagattacgggtggatttcgtcgtgggaaaccttttggtcacgacgttgatctgcttatcacatctccgggagctgagaaagaacaagaagaccagctcctgcagaaagtgaccaatctgtggaagaaacaagggttgttgctgtacggtgacctgcgtgaaagtcgctttgaagatgggaaactcccatcccgcaagatcgatgccctggaccattttgcgaaatgctttctgatcctcaaactttatcaccataaagtggacaaaagcaaatgggaaatgccgacgggttcgaacgaaagcgaggccaaaagttggaaagcaattcgcgtagatctggttcgttgtccctacgatcgttttgcgtttgcgttgttgggttggaccggaagccgcatgttcgaacgtgatctgcgccgctacgccacccacgagaagaagatgatgctggacaatcatgcgctgtatgacctgaccaagaaaatctttctcaaagctaaatcggaagaggaaattttcgcacatctggggcttgaatacctggaaccgtccgaacgtaacgca

SEQ ID NO: 896 - protein, 529 aa, synthetic construct
  REGION 1..529: note = Variant of terminal deoxynucleotidyltransferase
MHHHHHHGGSGSHGIVTIDSDFGKKRQKKMDNKDSSAIYEIKFHEFVLFILEEKMGATRRTFLTDLARKKGFRVENELSDSVTHIVAENNSGSDVLAWLKTHKMEKTTQFELLDISWLIESMKVGKPVDTKGKYQLMESGVMSANPDPTEGRENILPPTTKTISQYACQRRTTLNNHNQRFTDALEILAENYEFKRNDDTCLTFMRAISVLKCLPFEVVSLKDTEGLPWIGDEVKGIMEEIIEVGESLEVQAVLNDERYQSFKLFKSVFGVGVKTADKWYRMGLRTLEDVRSSKTLKLTPMQKAGLCYYEDLADGVTKAEADAISLLVQDAVWTFDPDALVEITGGFRRGKPFGHDVDLLITSPGAEKEQEDQLLQKVTNLWKKQGLLLYGDLRESRFEDGKLPSRKIDALDHFAKCFLILKLYHHKVDKSKWEMPTGSNESEAKSWKAIRVDLVRCPYDRFAFALLGWTGSRMFERDLRRYATHEKKMMLDNHALYDLTKKIFLKAKSEEEIFAHLGLEYLEPSERNA

SEQ ID NO: 897 - DNA, 1587 bp, synthetic construct
  misc_feature 1..1587: note = Variant of terminal deoxynucleotidyltransferase
  source 1..1587: mol_type = other DNA
atgcaccatcatcatcatcatggcggtagcggcagccacggcattcgtaccatcgattcggacttcgggaagaaacgccagaagaagatggataaccacgatagttccgccatctatgaaatcaaatttcacgagtttgtgctgttcattctcgaagagaaaatgggtgcgacgcgtcgtacttttctgacagatttagcccgcaagaaagggttccgcgtcgagaatgaactgtcagacagcgttacccacatcgtggcagaaaataattcaggatctgacgtattggcttggctgaagactcacaagatggagaagaccacgcaatttgaactgctggatattagctggcttatcgaaagcatgaaagttggtaaaccggtggacaccaaggggaaataccagttgatggaatcgggtgtgatgagtgcgaacccagatccgacagagggtcgtgaaaacattctgcctcctactacgaagaccatttctcagtatgcgtgtcaacgccgcaccaccctgaacaaccataatcaacgttttacggacgcactggaaattcttgcggaaaattacgagttcaaacgcaacgatgatacttgtctgacctttatgcgtgctatttccgtgctgaaatgccttccgtttgaggtagttagcctgaaagacacggaaggattgccctggatcggtgatgaagtcaaagggattatggaagaaatcatcgaggtcggtgaatcgctggaagtgcaggccgtgctcaatgatgagcgctatcaaagcttcaaactgtttaagagtgtctttggagtgggggtgaagacagcagacaaatggtaccgtatgggtctgcgcacgctcgaggatgttcgttccagcaagaccctgaagttgaccccgatgcagaaagcgggtctgtgctattatgaagatcttgctgatggcgttacgaaagccgaagctgacgcgatttctctgctggttcaggatgcagtctggactttcgacccggatgcgctggtggtgattacgggtggatttcgtcgtgggaaaccttttggtcacgacgttgatctgcttatcacatctccgggagctgagaaagaacaagaagaccagctcctgcagaaagtgaccaatctgtggaagaaacaagggttgttgctgtacggtgacctgcgtgaaagtcgctttgaagatgggaaactcccatcccgcaagatcgatgccctggaccattttgcgaaatgctttctgatcctcaaactttatcaccataaagtggacaaaagcaaatgggaaatgccgacgggttcgaacgaaagcgaggccaaaagttggaaagcaattcgcgtagatctggttcgttgtccctacgatcgttttgcgtttgcgttgttgggttggaccggaagccgcatgttcgaacgtgatctgcgccgctacgccacccacgagaagaagatgatgctggacaatcatgcgctgtatgacctgaccaagaaaatctttctcaaagctaaatcggaagaggaaattttcgcacatctggggcttgaatacctggaaccgtccgaacgtaacgca

SEQ ID NO: 898 - protein, 529 aa, synthetic construct
  REGION 1..529: note = Variant of terminal deoxynucleotidyltransferase
MHHHHHHGGSGSHGIRTIDSDFGKKRQKKMDNHDSSAIYEIKFHEFVLFILEEKMGATRRTFLTDLARKKGFRVENELSDSVTHIVAENNSGSDVLAWLKTHKMEKTTQFELLDISWLIESMKVGKPVDTKGKYQLMESGVMSANPDPTEGRENILPPTTKTISQYACQRRTTLNNHNQRFTDALEILAENYEFKRNDDTCLTFMRAISVLKCLPFEVVSLKDTEGLPWIGDEVKGIMEEIIEVGESLEVQAVLNDERYQSFKLFKSVFGVGVKTADKWYRMGLRTLEDVRSSKTLKLTPMQKAGLCYYEDLADGVTKAEADAISLLVQDAVWTFDPDALVVITGGFRRGKPFGHDVDLLITSPGAEKEQEDQLLQKVTNLWKKQGLLLYGDLRESRFEDGKLPSRKIDALDHFAKCFLILKLYHHKVDKSKWEMPTGSNESEAKSWKAIRVDLVRCPYDRFAFALLGWTGSRMFERDLRRYATHEKKMMLDNHALYDLTKKIFLKAKSEEEIFAHLGLEYLEPSERNA

SEQ ID NO: 899 - DNA, 1587 bp, synthetic construct
  misc_feature 1..1587: note = Variant of terminal deoxynucleotidyltransferase
  source 1..1587: mol_type = other DNA
atgcaccatcatcatcatcatggcggtagcggcagccacggcattcgtaccatcgattcggacttcgggaagaaacgccagaagaagatggataaccacgatagttccgccatctatgaaatcaaatttcacgagtttgtgctgttcattctcgaagagaaaatgggtgcgacgcgtcgtacttttctgacagatttagcccgcaagaaagggttccgcgtcgagaatgaactgtcagacagcgttacccacatcgtggcagaaaataattcaggatctgacgtattggcttggctgaagactcacaagatggagaagaccacgcaatttgaactgctggatattagctggcttatcgaaagcatgaaagttggtaaaccggtggacaccaaggggaaataccagttgatggaatcgggtgtgatgagtgcgaacccagatccgacagagggtcgtgaaaacattctgcctcctactacgaagaccatttctcagtatgcgtgtcaacgccgcaccaccctgaacaaccataatcaacgttttacggacgcactggaaattcttgcggaaaattacgagttcaaacgcaacgatgatacttgtctgacccttatgcgtgctatttccgtgctgaaatgccttccgtttgaggtagttagcctgaaagacacggaaggattgccctggatcggtgatgaagtcaaagggattatggaagaaatcatcgaggtcggtgaatcgctggaagtgcaggccgtgctcaatgatgagcgctatcaaagcttcaaactgtttaagagtgtctttggagtgggggtgaagacagcagacaaatggtaccgtatgggtctgcgcacgctcgaggatgttcgttccagcaagaccctgaagttgaccccgatgcagaaagcgggtctgtgctattatgaagatcttgctgatggcgttacgaaagccgaagctgacgcgatttctctgctggttcaggatgcagtctggactttcgacccggatgcgctggtgtggattacgggtggatttcgtcgtgggaaaccttttggtcacgacgttgatctgcttatcacatctccgggagctgagaaagaacaagaagaccagctcctgcagaaagtgaccaatctgtggaagaaacaagggttgttgctgtacggtgacctgcgtgaaagtcgctttgaagatgggaaactcccatcccgcaagatcgatgccctggaccattttgcgaaatgctttctgatcctcaaactttatcaccataaagtggacaaaagcaaatgggaaatgccgacgggttcgaacgaaagcgaggccaaaagttggaaagcaattcgcgtagatctggttcgttgtccctacgatcgttttgcgtttgcgttgttgggttggaccggaagccgcatgttcgaacgtgatctgcgccgctacgccacccacgagaagaagatgatgctggacaatcatgcgctgtatgacctgaccaagaaaatctttctcaaagctaaatcggaagaggaaattttcgcacatctggggcttgaatacctggaaccgtccgaacgtaacgca

SEQ ID NO: 900 - protein, 529 aa, synthetic construct
  REGION 1..529: note = Variant of terminal deoxynucleotidyltransferase
MHHHHHHGGSGSHGIRTIDSDFGKKRQKKMDNHDSSAIYEIKFHEFVLFILEEKMGATRRTFLTDLARKKGFRVENELSDSVTHIVAENNSGSDVLAWLKTHKMEKTTQFELLDISWLIESMKVGKPVDTKGKYQLMESGVMSANPDPTEGRENILPPTTKTISQYACQRRTTLNNHNQRFTDALEILAENYEFKRNDDTCLTLMRAISVLKCLPFEVVSLKDTEGLPWIGDEVKGIMEEIIEVGESLEVQAVLNDERYQSFKLFKSVFGVGVKTADKWYRMGLRTLEDVRSSKTLKLTPMQKAGLCYYEDLADGVTKAEADAISLLVQDAVWTFDPDALVWITGGFRRGKPFGHDVDLLITSPGAEKEQEDQLLQKVTNLWKKQGLLLYGDLRESRFEDGKLPSRKIDALDHFAKCFLILKLYHHKVDKSKWEMPTGSNESEAKSWKAIRVDLVRCPYDRFAFALLGWTGSRMFERDLRRYATHEKKMMLDNHALYDLTKKIFLKAKSEEEIFAHLGLEYLEPSERNA

SEQ ID NO: 901 - DNA, 1587 bp, synthetic construct
  misc_feature 1..1587: note = Variant of terminal deoxynucleotidyltransferase
  source 1..1587: mol_type = other DNA
atgcaccatcatcatcatcatggcggtagcggcagccacggcattcgtaccatcgattcggacttcgggaagaaacgccagaagaagatggataaccacgatagttccgccatctatgaaatcaaatttcacgagtttgtgctgttcattctcgaagagaaaatgggtgcgacgcgtcgtacttttctgacagatttagcccgcaagaaagggttccgcgtcgagaatgaactgtcagacagcgttacccacatcgtggcagaaaataattcaggatctgacgtattggcttggctgaagactcacaagatggagaagaccacgcaatttgaactgctggatattagctggcttatcgaaagcatgaaagttggtaaaccggtggacaccaaggggaaataccagttgatggaatcgggtgtgatgagtgcgaacccagatccgacagagggtcgtgaaaacattctgcctcctactacgaagaccatttctcagtatgcgtgtcaacgccgcaccaccctgaacaaccataatcaacgttttacggacgcactggaaattcttgcggaaaattacgagttcaaacgcaacgatgatacttgtctgacctttatgcgtgctatttccgtgctgaaatgccttccgtttgaggtagttagcctgaaagacacggaaggattgccctggatcggtgatgaagtcaaagggattatggaagaaatcatcgaggtcggtgaatcgctggaagtgcaggccgtgctcaatgatgagcgctatcaaagcttcaaaaggtttaagagtgtctttggagtgggggtgaagacagcagacaaatggtaccgtatgggtctgcgcacgctcgaggatgttcgttccagcaagaccctgaagttgaccccgatgcagaaagcgggtctgtgctattatgaagatcttgctgatggcgttacgaaagccgaagctgacgcgatttctctgctggttcaggatgcagtctggactttcgacccggatgcgctggtggagattacgggtggatttcgtcgtgggaaaccttttggtcacgacgttgatctgcttatcacatctccgggagctgagaaagaacaagaagaccagctcctgcagaaagtgaccaatctgtggaagaaacaagggttgttgctgtacggtgacctgcgtgaaagtcgctttgaagatgggaaactcccatcccgcaagatcgatgccctggaccattttgcgaaatgctttctgatcctcaaactttatcaccataaagtggacaaaagcaaatgggaaatgccgacgggttcgaacgaaagcgaggccaaaagttggaaagcaattcgcgtagatctggttcgttgtccctacgatcgttttgcgtttgcgttgttgggttggaccggaagccgcatgttcgaacgtgatctgcgccgctacgccacccacgagaagaagatgatgctggacaatcatgcgctgtatgacctgaccaagaaaatctttctcaaagctaaatcggaagaggaaattttcgcacatctggggcttgaatacctggaaccgtccgaacgtaacgca

SEQ ID NO: 902 - protein, 529 aa, synthetic construct
  REGION 1..529: note = Variant of terminal deoxynucleotidyltransferase
MHHHHHHGGSGSHGIRTIDSDFGKKRQKKMDNHDSSAIYEIKFHEFVLFILEEKMGATRRTFLTDLARKKGFRVENELSDSVTHIVAENNSGSDVLAWLKTHKMEKTTQFELLDISWLIESMKVGKPVDTKGKYQLMESGVMSANPDPTEGRENILPPTTKTISQYACQRRTTLNNHNQRFTDALEILAENYEFKRNDDTCLTFMRAISVLKCLPFEVVSLKDTEGLPWIGDEVKGIMEEIIEVGESLEVQAVLNDERYQSFKRFKSVFGVGVKTADKWYRMGLRTLEDVRSSKTLKLTPMQKAGLCYYEDLADGVTKAEADAISLLVQDAVWTFDPDALVEITGGFRRGKPFGHDVDLLITSPGAEKEQEDQLLQKVTNLWKKQGLLLYGDLRESRFEDGKLPSRKIDALDHFAKCFLILKLYHHKVDKSKWEMPTGSNESEAKSWKAIRVDLVRCPYDRFAFALLGWTGSRMFERDLRRYATHEKKMMLDNHALYDLTKKIFLKAKSEEEIFAHLGLEYLEPSERNA

SEQ ID NO: 903 - DNA, 1587 bp, synthetic construct
  misc_feature 1..1587: note = Variant of terminal deoxynucleotidyltransferase
  source 1..1587: mol_type = other DNA
atgcaccatcatcatcatcatggcggtagcggcagccacggcattcgtaccatcgattcggacttcgggaagaaacgccagaagaagatggataaccacgatagttccgccatctatgaaatcaaatttcacgagtttgtgctgttcattctcgaagagaaaatgggtgcgacgcgtcgtacttttctgacagatttagcccgcaagaaagggttccgcgtcgagaatgaactgtcagacagcgttacccacatcgtggcagaaaataattcaggatctgacgtattggcttggctgaagactcacaagatggagaagaccacgcaatttgaactgctggatattagctggcttatcgaaagcatgaaagttggtaaaccggtggacaccaaggggaaataccagttgatggaatcgggtgtgatgagtgcgaacccagatccgacagagggtcgtgaaaacattctgcctcctactacgaagaccatttctcagtatgcgtgtcaacgccgcaccaccctgaacaaccataatcaacgttttacggacgcactggaaattcttgcggaaaattacgagttcaaacgcaacgatgatacttgtctgacctttatgcgtgctatttccgtgctgaaatgccttccgtttgaggtagttagcctgaaagacacggaaggattgccctggatcggtgatgaagtcaaagggattatggaagaaatcatcgaggtcggtgaatcgctggaagtgcaggccgtgctcaatgatgagcgctatcaaagcttcaaactgtttaagagtgtctttggagtgggggtgaagacagcagacaaatggtaccgtatgggtctgcgcacgctcgaggatgttcgttccagcaagaccctgaagttgaccccgatgcagaaagcgggtctgtgctattatgcggatcttgctgatggcgttacgaaagccgaagctgacgcgatttctctgctggttcaggatgcagtctggactttcgacccggatgcgctggtggagattacgggtggatttcgtcgtgggaaaccttttggtcacgacgttgatctgcttatcacatctccgggagctgagaaagaacaagaagaccagctcctgcagaaagtgaccaatctgtggaagaaacaagggttgttgctgtacggtgacctgcgtgaaagtcgctttgaagatgggaaactcccatcccgcaagatcgatgccctggaccattttgcgaaatgctttctgatcctcaaactttatcaccataaagtggacaaaagcaaatgggaaatgccgacgggttcgaacgaaagcgaggccaaaagttggaaagcaattcgcgtagatctggttcgttgtccctacgatcgttttgcgtttgcgttgttgggttggaccggaagccgcatgttcgaacgtgatctgcgccgctacgccacccacgagaagaagatgatgctggacaatcatgcgctgtatgacctgaccaagaaaatctttctcaaagctaaatcggaagaggaaattttcgcacatctggggcttgaatacctggaaccgtccgaacgtaacgca

SEQ ID NO: 904 - protein, 529 aa, synthetic construct
  REGION 1..529: note = Variant of terminal deoxynucleotidyltransferase
MHHHHHHGGSGSHGIRTIDSDFGKKRQKKMDNHDSSAIYEIKFHEFVLFILEEKMGATRRTFLTDLARKKGFRVENELSDSVTHIVAENNSGSDVLAWLKTHKMEKTTQFELLDISWLIESMKVGKPVDTKGKYQLMESGVMSANPDPTEGRENILPPTTKTISQYACQRRTTLNNHNQRFTDALEILAENYEFKRNDDTCLTFMRAISVLKCLPFEVVSLKDTEGLPWIGDEVKGIMEEIIEVGESLEVQAVLNDERYQSFKLFKSVFGVGVKTADKWYRMGLRTLEDVRSSKTLKLTPMQKAGLCYYADLADGVTKAEADAISLLVQDAVWTFDPDALVEITGGFRRGKPFGHDVDLLITSPGAEKEQEDQLLQKVTNLWKKQGLLLYGDLRESRFEDGKLPSRKIDALDHFAKCFLILKLYHHKVDKSKWEMPTGSNESEAKSWKAIRVDLVRCPYDRFAFALLGWTGSRMFERDLRRYATHEKKMMLDNHALYDLTKKIFLKAKSEEEIFAHLGLEYLEPSERNA

SEQ ID NO: 905 - DNA, 1587 bp, synthetic construct
  misc_feature 1..1587: note = Variant of terminal deoxynucleotidyltransferase
  source 1..1587: mol_type = other DNA
atgcaccatcatcatcatcatggcggtagcggcagccacggcattcgtaccatcgattcggacttcgggaagaaacgccagaagaagatggataaccacgatagttccgccatctatgaaatcaaatttcacgagtttgtgctgttcattctcgaagagaaaatgggtgcgacgcgtcgtacttttctgacagatttagcccgcaagaaagggttccgcgtcgagaatgaactgtcagacagcgttacccacatcgtggcagaaaataattcaggatctgacgtattggcttggctgaagactcacaagatggagaagaccacgcaatttgaactgctggatattagctggcttatcgaaagcatgaaagttggtaaaccggtggacaccaaggggaaataccagttgatggaatcgggtgtgatgagtgcgaacccagatccgacagagggtcgtgaaaacattctgcctcctactacgaagaccatttctcagtatgcgtgtcaacgccgcaccaccctgaacaaccataatcaacgttttacggacgcactggaaattcttgcggaaaattacgagttcaaacgcaacgatgatacttgtctgacctttatgcgtgctatttccgtgctgaaatgccttccgtttgaggtagttagcctgaaagacacggaaggattgccctggatcggtgatgaagtcaaagggattatggaagaaatcatcgaggtcggtgaatcgctggaagtgcaggccgtgctcaatgatgagcgctatcaaagcttcaaactgtttaagagtgtctttggagtgggggtgaagacagcagacaaatggtaccgtatgggtctgcgcacgctcgaggatgttcgttccagcaagaccctgaagttgaccccgatgcaggttgcgggtctgtgctattatgaagatcttgctgatggcgttacgaaagccgaagctgacgcgatttctctgctggttcaggatgcagtctggactttcgacccggatgcgctggtggagattacgggtggatttcgtcgtgggaaaccttttggtcacgacgttgatctgcttatcacatctccgggagctgagaaagaacaagaagaccagctcctgcagaaagtgaccaatctgtggaagaaacaagggttgttgctgtacggtgacctgcgtgaaagtcgctttgaagatgggaaactcccatcccgcaagatcgatgccctggaccattttgcgaaatgctttctgatcctcaaactttatcaccataaagtggacaaaagcaaatgggaaatgccgacgggttcgaacgaaagcgaggccaaaagttggaaagcaattcgcgtagatctggttcgttgtccctacgatcgttttgcgtttgcgttgttgggttggaccggaagccgcatgttcgaacgtgatctgcgccgctacgccacccacgagaagaagatgatgctggacaatcatgcgctgtatgacctgaccaagaaaatctttctcaaagctaaatcggaagaggaaattttcgcacatctggggcttgaatacctggaaccgtccgaacgtaacgca

SEQ ID NO: 906 - protein, 529 aa, synthetic construct
  REGION 1..529: note = Variant of terminal deoxynucleotidyltransferase
MHHHHHHGGSGSHGIRTIDSDFGKKRQKKMDNHDSSAIYEIKFHEFVLFILEEKMGATRRTFLTDLARKKGFRVENELSDSVTHIVAENNSGSDVLAWLKTHKMEKTTQFELLDISWLIESMKVGKPVDTKGKYQLMESGVMSANPDPTEGRENILPPTTKTISQYACQRRTTLNNHNQRFTDALEILAENYEFKRNDDTCLTFMRAISVLKCLPFEVVSLKDTEGLPWIGDEVKGIMEEIIEVGESLEVQAVLNDERYQSFKLFKSVFGVGVKTADKWYRMGLRTLEDVRSSKTLKLTPMQVAGLCYYEDLADGVTKAEADAISLLVQDAVWTFDPDALVEITGGFRRGKPFGHDVDLLITSPGAEKEQEDQLLQKVTNLWKKQGLLLYGDLRESRFEDGKLPSRKIDALDHFAKCFLILKLYHHKVDKSKWEMPTGSNESEAKSWKAIRVDLVRCPYDRFAFALLGWTGSRMFERDLRRYATHEKKMMLDNHALYDLTKKIFLKAKSEEEIFAHLGLEYLEPSERNA

SEQ ID NO: 907 - DNA, 1587 bp, synthetic construct
  misc_feature 1..1587: note = Variant of terminal deoxynucleotidyltransferase
  source 1..1587: mol_type = other DNA
atgcaccatcatcatcatcatggcggtagcggcagccacggcattcgtaccatcgattcggacttcgggaagaaacgccagaagaagatggataaccacgatagttccgccatctatgaaatcaaatttcacgagtttgtgctgttcattctcgaagagaaaatgggtgcgacgcgtcgtacttttctgacagatttagcccgcaagaaagggttccgcgtcgagaatgaactgtcagacagcgttacccacatcgtggcagaaaataattcaggatctgacgtattggcttggctgaagactcacaagatggagaagaccacgcaatttgaactgctggatattagctggcttatcgaaagcatgaaagttggtaaaccggtggacaccaaggggaaataccagttgatggaatcgggtgtgatgagtgcgaacccagatccgacagagggtcgtgaaaacattctgcctcctactacgaagaccatttctcagtatgcgtgtcaacgccgcaccaccctgaacaaccataatcaacgttttacggacgcactggaaattcttgcggaaaattacgagttcaaacgcaacgatgatacttgtctgacctttatgcgtgctatttccgtgctgaaatgccttccgtttgaggtagttagcctgaaagacacggaaggattgccctggatcggtgatgaagtcaaagggattatggaagaaatcatcgaggtcggtgaatcgctggaagtgcaggccgtgctcaatgatgagcgctatcaaagcttcaaactgtttaagagtgtctttggagtgggggtgaagacagcagacaaatggtaccgtatgggtctgcgcacgctcgaggatctgcgttccagcaagaccctgaagttgaccccgatgcagaaagcgggtctgtgctattatgaagatcttgctgatggcgttacgaaagccgaagctgacgcgatttctctgctggttcaggatgcagtctggactttcgacccggatgcgctggtggagattacgggtggatttcgtcgtgggaaaccttttggtcacgacgttgatctgcttatcacatctccgggagctgagaaagaacaagaagaccagctcctgcagaaagtgaccaatctgtggaagaaacaagggttgttgctgtacggtgacctgcgtgaaagtcgctttgaagatgggaaactcccatcccgcaagatcgatgccctggaccattttgcgaaatgctttctgatcctcaaactttatcaccataaagtggacaaaagcaaatgggaaatgccgacgggttcgaacgaaagcgaggccaaaagttggaaagcaattcgcgtagatctggttcgttgtccctacgatcgttttgcgtttgcgttgttgggttggaccggaagccgcatgttcgaacgtgatctgcgccgctacgccacccacgagaagaagatgatgctggacaatcatgcgctgtatgacctgaccaagaaaatctttctcaaagctaaatcggaagaggaaattttcgcacatctggggcttgaatacctggaaccgtccgaacgtaacgca

SEQ ID NO: 908 - protein, 529 aa, synthetic construct
  REGION 1..529: note = Variant of terminal deoxynucleotidyltransferase
MHHHHHHGGSGSHGIRTIDSDFGKKRQKKMDNHDSSAIYEIKFHEFVLFILEEKMGATRRTFLTDLARKKGFRVENELSDSVTHIVAENNSGSDVLAWLKTHKMEKTTQFELLDISWLIESMKVGKPVDTKGKYQLMESGVMSANPDPTEGRENILPPTTKTISQYACQRRTTLNNHNQRFTDALEILAENYEFKRNDDTCLTFMRAISVLKCLPFEVVSLKDTEGLPWIGDEVKGIMEEIIEVGESLEVQAVLNDERYQSFKLFKSVFGVGVKTADKWYRMGLRTLEDLRSSKTLKLTPMQKAGLCYYEDLADGVTKAEADAISLLVQDAVWTFDPDALVEITGGFRRGKPFGHDVDLLITSPGAEKEQEDQLLQKVTNLWKKQGLLLYGDLRESRFEDGKLPSRKIDALDHFAKCFLILKLYHHKVDKSKWEMPTGSNESEAKSWKAIRVDLVRCPYDRFAFALLGWTGSRMFERDLRRYATHEKKMMLDNHALYDLTKKIFLKAKSEEEIFAHLGLEYLEPSERNA

SEQ ID NO: 909 - DNA, 1587 bp, synthetic construct
  misc_feature 1..1587: note = Variant of terminal deoxynucleotidyltransferase
  source 1..1587: mol_type = other DNA
atgcaccatcatcatcatcatggcggtagcggcagccacggcattcgtaccatcgattcggacttcgggaagaaacgccagaagaagatggataaccacgatagttccgccatctatgaaatcaaatttcacgagtttgtgctgttcattctcgaagagaaaatgggtgcgacgcgtcgtacttttctgacagatttagcccgcaagaaagggttccgcgtcgagaatgaactgtcagacagcgttacccacatcgtggcagaaaataattcaggatctgacgtattggcttggctgaagactcacaagatggagaagaccacgcaatttgaactgctggatattagctggcttatcgaaagcatgaaagttggtaaaccggtggacaccaaggggaaataccagttgatggaatcgggtgtgatgagtgcgaacccagatccgacagagggtcgtgaaaacattctgcctcctactacgaagaccatttctcagtatgcgtgtcaacgccgcaccaccctgaacaaccataatcaacgttttacggacgcactggaaattcttgcggaaaattacgagttcaaacgcaacgatgatacttgtctgacctttatgcgtgctatttccgtgctgaaatgccttccgtttgaggtagttagcctgaaagacacggaaggattgccctggatcggtgatgaagtcaaagggattatggaagaaatcatcgaggtcggtgaatcgctggaagtgcaggccgtgctcaatgatgagcgctatcaaagcttcaaactgtttaagagtgtctttggagtgggggtgaagacagcagacaaatggtaccgtatgggtctgcgcacgctcgaggatgttcgttccagcaagaccctgaagttgaccccgatgcagaaagcgggtctgtgctattatgaagatcttgctgatggcgttacgaaagccgaagctgacgcgatttctctgctggttcaggatgcagtctggactttcgacccggatgcgctggtggagattacgggtggatttcgtcgtgggaaaccttttggtcacgacgttgatctgcttatcacatctccgggagctgagaaagaacaagaagaccagctcctgcagaaagtgaccaatctgtggaagaaacaagggttgttgctgtacagggacctgcgtgaaagtcgctttgaagatgggaaactcccatcccgcaagatcgatgccctggaccattttgcgaaatgctttctgatcctcaaactttatcaccataaagtggacaaaagcaaatgggaaatgccgacgggttcgaacgaaagcgaggccaaaagttggaaagcaattcgcgtagatctggttcgttgtccctacgatcgttttgcgtttgcgttgttgggttggaccggaagccgcatgttcgaacgtgatctgcgccgctacgccacccacgagaagaagatgatgctggacaatcatgcgctgtatgacctgaccaagaaaatctttctcaaagctaaatcggaagaggaaattttcgcacatctggggcttgaatacctggaaccgtccgaacgtaacgca

SEQ ID NO: 910 - protein, 529 aa, synthetic construct
  REGION 1..529: note = Variant of terminal deoxynucleotidyltransferase
MHHHHHHGGSGSHGIRTIDSDFGKKRQKKMDNHDSSAIYEIKFHEFVLFILEEKMGATRRTFLTDLARKKGFRVENELSDSVTHIVAENNSGSDVLAWLKTHKMEKTTQFELLDISWLIESMKVGKPVDTKGKYQLMESGVMSANPDPTEGRENILPPTTKTISQYACQRRTTLNNHNQRFTDALEILAENYEFKRNDDTCLTFMRAISVLKCLPFEVVSLKDTEGLPWIGDEVKGIMEEIIEVGESLEVQAVLNDERYQSFKLFKSVFGVGVKTADKWYRMGLRTLEDVRSSKTLKLTPMQKAGLCYYEDLADGVTKAEADAISLLVQDAVWTFDPDALVEITGGFRRGKPFGHDVDLLITSPGAEKEQEDQLLQKVTNLWKKQGLLLYRDLRESRFEDGKLPSRKIDALDHFAKCFLILKLYHHKVDKSKWEMPTGSNESEAKSWKAIRVDLVRCPYDRFAFALLGWTGSRMFERDLRRYATHEKKMMLDNHALYDLTKKIFLKAKSEEEIFAHLGLEYLEPSERNA

SEQ ID NO: 911 - DNA, 1587 bp, synthetic construct
  misc_feature 1..1587: note = Variant of terminal deoxynucleotidyltransferase
  source 1..1587: mol_type = other DNA
atgcaccatcatcatcatcatggcggtagcggcagccacggcattcgtaccatcgattcggacttcgggaagaaacgccagaagaagatggataaccacgatagttccgccatctatgaaatcaaatttcacgagtttgtgctgttcattctcgaagagaaaatgggtgcgacgcgtcgtacttttctgacagatttagcccgcaagaaagggttccgcgtcgagaatgaactgtcagacagcgttacccacatcgtggcagaaaataattcaggatctgacgtattggcttggctgaagactcacaagatggagaagaccacgcaatttgaactgctggatattagctggcttatcgaaagcatgaaagttggtaaaccggtggacaccaaggggaaataccagttgatggaatcgggtgtgatgagtgcgaacccagatccgacagagggtcgtgaaaacattctgcctcctactacgaagaccatttctcagtatgcgtgtcaacgccgcaccaccctgaacaaccataatcaacgttttacggacgcactggaaattcttgcggaaaattacgagttcaaacgcaacgatgatacttgtctgacctttatgcgtgctatttccgtgctgaaatgccttccgtttgaggtagttagcctgaaagacacggaaggattgccctggatcggtgatgaagtcaaagggattatggaagaaatcatcgaggtcggtgaatcgctggaagtgcaggccgtgctcaatgatgagcgctatcaaagcttcaaactgtttaagagtgtctttggagtgggggtgaagacagcagacaaatggtaccgtatgggtctgcgcacgctcgaggatgttcgttccagcaagaccctgaagttgaccccgatgcagaaagcgggtctgtgctattatgaagatcttgctgatggcgttacgaaagccgaagctgacgcgatttctctgctggttcaggatgcagtctggactttcgacccggatgcgctggtggagattacgggtggatttcgtcgtgggaaaccttttggtcacgacgttgatctgcttatcacatctccgggagctgagaaagaacaagaagaccagctcctgcagaaagtgaccaatctgtggaagaaacaagggttgttgctgtacggtgacctgcgtgaaagtcgctttgaagatgggaaactcccatcccgcaagatcgatgccctggaccattttgcgaaatgctttctgatctttaaactttatcaccataaagtggacaaaagcaaatgggaaatgccgacgggttcgaacgaaagcgaggccaaaagttggaaagcaattcgcgtagatctggttcgttgtccctacgatcgttttgcgtttgcgttgttgggttggaccggaagccgcatgttcgaacgtgatctgcgccgctacgccacccacgagaagaagatgatgctggacaatcatgcgctgtatgacctgaccaagaaaatctttctcaaagctaaatcggaagaggaaattttcgcacatctggggcttgaatacctggaaccgtccgaacgtaacgca

SEQ ID NO: 912 - protein, 529 aa, synthetic construct
  REGION 1..529: note = Variant of terminal deoxynucleotidyltransferase
MHHHHHHGGSGSHGIRTIDSDFGKKRQKKMDNHDSSAIYEIKFHEFVLFILEEKMGATRRTFLTDLARKKGFRVENELSDSVTHIVAENNSGSDVLAWLKTHKMEKTTQFELLDISWLIESMKVGKPVDTKGKYQLMESGVMSANPDPTEGRENILPPTTKTISQYACQRRTTLNNHNQRFTDALEILAENYEFKRNDDTCLTFMRAISVLKCLPFEVVSLKDTEGLPWIGDEVKGIMEEIIEVGESLEVQAVLNDERYQSFKLFKSVFGVGVKTADKWYRMGLRTLEDVRSSKTLKLTPMQKAGLCYYEDLADGVTKAEADAISLLVQDAVWTFDPDALVEITGGFRRGKPFGHDVDLLITSPGAEKEQEDQLLQKVTNLWKKQGLLLYGDLRESRFEDGKLPSRKIDALDHFAKCFLIFKLYHHKVDKSKWEMPTGSNESEAKSWKAIRVDLVRCPYDRFAFALLGWTGSRMFERDLRRYATHEKKMMLDNHALYDLTKKIFLKAKSEEEIFAHLGLEYLEPSERNA

SEQ ID NO: 913 - DNA, 1587 bp, synthetic construct
  misc_feature 1..1587: note = Variant of terminal deoxynucleotidyltransferase
  source 1..1587: mol_type = other DNA
atgcaccatcatcatcatcatggcggtagcggcagccacggcattcgtaccatcgattcggacttcgggaagaaacgccagaagaagatggataaccacgatagttccgccatctatgaaatcaaatttcacgagtttgtgctgttcattctcgaagagaaaatgggtgcgacgcgtcgtacttttctgacagatttagcccgcaagaaagggttccgcgtcgagaatgaactgtcagacagcgttacccacatcgtggcagaaaataattcaggatctgacgtattggcttggctgaagactcacaagatggagaagaccacgcaatttgaactgctggatattagctggcttatcgaaagcatgaaagttggtaaaccggtggacaccaaggggaaataccagttgatggaatcgggtgtgatgagtgcgaacccagatccgacagagggtcgtgaaaacattctgcctcctactacgaagaccatttctcagtatgcgtgtcaacgccgcaccaccctgaacaaccataatcaacgttttacggacgcactggaaattcttgcggaaaattacgagttcaaacgcaacgatgatacttgtctgacctttatgcgtgctatttccgtgctgaaatgccttccgtttgaggtagttagcctgaaagacacggaaggattgccctggatcggtgatgaagtcaaagggattatggaagaaatcatcgaggtcggtgaatcgctggaagtgcaggccgtgctcaatgatgagcgctatcaaagcttcaaactgtttaagagtgtctttggagtgggggtgaagacagcagacaaatggtaccgtatgggtctgcgcacgctcgaggatgttcgttccagcaagaccctgaagttgaccccgatgcagaaagcgggtctgtgcttttatgaagatcttgctgatggcgttacgaaagccgaagctgacgcgatttctctgctggttcaggatgcagtctggactttcgacccggatgcgctggtggagattacgggtggatttcgtcgtgggaaaccttttggtcacgacgttgatctgcttatcacatctccgggagctgagaaagaacaagaagaccagctcctgcagaaagtgaccaatctgtggaagaaacaagggttgttgctgtacggtgacctgcgtgaaagtcgctttgaagatgggaaactcccatcccgcaagatcgatgccctggaccattttgcgaaatgctttctgatcctcaaactttatcaccataaagtggacaaaagcaaatgggaaatgccgacgggttcgaacgaaagcgaggccaaaagttggaaagcaattcgcgtagatctggttcgttgtccctacgatcgttttgcgtttgcgttgttgggttggaccggaagccgcatgttcgaacgtgatctgcgccgctacgccacccacgagaagaagatgatgctggacaatcatgcgctgtatgacctgaccaagaaaatctttctcaaagctaaatcggaagaggaaattttcgcacatctggggcttgaatacctggaaccgtccgaacgtaacgca

SEQ ID NO: 914 - protein, 529 aa, synthetic construct
  REGION 1..529: note = Variant of terminal deoxynucleotidyltransferase
MHHHHHHGGSGSHGIRTIDSDFGKKRQKKMDNHDSSAIYEIKFHEFVLFILEEKMGATRRTFLTDLARKKGFRVENELSDSVTHIVAENNSGSDVLAWLKTHKMEKTTQFELLDISWLIESMKVGKPVDTKGKYQLMESGVMSANPDPTEGRENILPPTTKTISQYACQRRTTLNNHNQRFTDALEILAENYEFKRNDDTCLTFMRAISVLKCLPFEVVSLKDTEGLPWIGDEVKGIMEEIIEVGESLEVQAVLNDERYQSFKLFKSVFGVGVKTADKWYRMGLRTLEDVRSSKTLKLTPMQKAGLCFYEDLADGVTKAEADAISLLVQDAVWTFDPDALVEITGGFRRGKPFGHDVDLLITSPGAEKEQEDQLLQKVTNLWKKQGLLLYGDLRESRFEDGKLPSRKIDALDHFAKCFLILKLYHHKVDKSKWEMPTGSNESEAKSWKAIRVDLVRCPYDRFAFALLGWTGSRMFERDLRRYATHEKKMMLDNHALYDLTKKIFLKAKSEEEIFAHLGLEYLEPSERNA

SEQ ID NO: 915 - DNA, 1587 bp, synthetic construct
  misc_feature 1..1587: note = Variant of terminal deoxynucleotidyltransferase
  source 1..1587: mol_type = other DNA
atgcaccatcatcatcatcatggcggtagcggcagccacggcattcgtaccatcgattcggacttcgggaagaaacgccagaagaagatggataaccacgatagttccgccatctatgaaatcaaatttcacgagtttgtgctgttcattctcgaagagaaaatgggtgcgacgcgtcgtacttttctgacagatttagcccgcaagaaagggttccgcgtcgagaatgaactgtcagacagcgttacccacatcgtggcagaaaataattcaggatctgacgtattggcttggctgaagactcacaagatggagaagaccacgcaatttgaactgctggatattagctggcttatcgaaagcatgaaagttggtaaaccggtggacaccaaggggaaataccagttgatggaatcgggtgtgatgagtgcgaacccagatccgacagagggtcgtgaaaacattctgcctcctactacgaagaccatttctcagtatgcgtgtcaacgccgcaccaccctgaacaaccataatcaacgttttacggacgcactggaaattcttgcggaaaattacgagttcaaacgcaacgatgatacttgtctgacctttatgcgtgctatttccgtgctgaaatgccttccgtttgaggtagttagcctgaaagacacggaaggattgccctggatcggtgatgaagtcaaagggattatggaagaaatcatcgaggtcggtgaatcgctggaagtgcaggccgtgctcaatgatgagcgctatcaaagcttcaaactgtttaagagtgtctttggagtgggggtgaagacagcagacaaatggtaccgtatgggtctgcgcacgctcgaggatgttcgttccagcaagaccctgaagttgaccccgatgcagaaagcgggtttttgctattatgaagatcttgctgatggcgttacgaaagccgaagctgacgcgatttctctgctggttcaggatgcagtctggactttcgacccggatgcgctggtggagattacgggtggatttcgtcgtgggaaaccttttggtcacgacgttgatctgcttatcacatctccgggagctgagaaagaacaagaagaccagctcctgcagaaagtgaccaatctgtggaagaaacaagggttgttgctgtacggtgacctgcgtgaaagtcgctttgaagatgggaaactcccatcccgcaagatcgatgccctggaccattttgcgaaatgctttctgatcctcaaactttatcaccataaagtggacaaaagcaaatgggaaatgccgacgggttcgaacgaaagcgaggccaaaagttggaaagcaattcgcgtagatctggttcgttgtccctacgatcgttttgcgtttgcgttgttgggttggaccggaagccgcatgttcgaacgtgatctgcgccgctacgccacccacgagaagaagatgatgctggacaatcatgcgctgtatgacctgaccaagaaaatctttctcaaagctaaatcggaagaggaaattttcgcacatctggggcttgaatacctggaaccgtccgaacgtaacgca

SEQ ID NO: 916 - protein, 529 aa, synthetic construct
  REGION 1..529: note = Variant of terminal deoxynucleotidyltransferase
MHHHHHHGGSGSHGIRTIDSDFGKKRQKKMDNHDSSAIYEIKFHEFVLFILEEKMGATRRTFLTDLARKKGFRVENELSDSVTHIVAENNSGSDVLAWLKTHKMEKTTQFELLDISWLIESMKVGKPVDTKGKYQLMESGVMSANPDPTEGRENILPPTTKTISQYACQRRTTLNNHNQRFTDALEILAENYEFKRNDDTCLTFMRAISVLKCLPFEVVSLKDTEGLPWIGDEVKGIMEEIIEVGESLEVQAVLNDERYQSFKLFKSVFGVGVKTADKWYRMGLRTLEDVRSSKTLKLTPMQKAGFCYYEDLADGVTKAEADAISLLVQDAVWTFDPDALVEITGGFRRGKPFGHDVDLLITSPGAEKEQEDQLLQKVTNLWKKQGLLLYGDLRESRFEDGKLPSRKIDALDHFAKCFLILKLYHHKVDKSKWEMPTGSNESEAKSWKAIRVDLVRCPYDRFAFALLGWTGSRMFERDLRRYATHEKKMMLDNHALYDLTKKIFLKAKSEEEIFAHLGLEYLEPSERNA

SEQ ID NO: 917 - DNA, 1587 bp, synthetic construct
  misc_feature 1..1587: note = Variant of terminal deoxynucleotidyltransferase
  source 1..1587: mol_type = other DNA
atgcaccatcatcatcatcatggcggtagcggcagccacggcattcgtaccatcgattcggacttcgggaagaaacgccagaagaagatggataaccacgatagttccgccatctatgaaatcaaatttcacgagtttgtgctgttcattctcgaagagaaaatgggtgcgacgcgtcgtacttttctgacagatttagcccgcaagaaagggttccgcgtcgagaatgaactgtcagacagcgttacccacatcgtggcagaaaataattcaggatctgacgtattggcttggctgaagactcacaagatggagaagaccacgcaatttgaactgctggatattagctggcttatcgaaagcatgaaagttggtaaaccggtggacaccaaggggaaataccagttgatggaatcgggtgtgatgagtgcgaacccagatccgacagagggtcgtgaaaacattctgcctcctactacgaagaccatttctcagtatgcgtgtcaacgccgcaccaccctgaacaaccataatcaacgttttacggacgcactggaaattcttgcggaaaattacgagttcaaacgcaacgatgatacttgtctgacctttatgcgtgctatttccgtgctgaaatgccttccgtttgaggtagttagcctgaaagacacggaaggattgccctggatcggtgatgaagtcaaagggattatggaagaaatcatcgaggtcggtgaatcgctggaagtgcaggccgtgctcaatgatgagcgctatcaaagcttcaaactgtttaagagtgtctttggagtgggggtgaagacagcagacaaatggtaccgtatgggtctgcgcacgctcgaggatgttcgttccagcaagaccctgaagttgaccccgatgcagaaagcgggtctgtgctattatgaagatcttgctgatggcgttacgaaagccgaagctgacgcgatttctctgctggttcaggatgcagtctggactttcgacccggatgcgctggtggagattacgggtggatttcgtcgtgggaaaccttttggtcacgacgttgatctgcttatcacatctccgggagctgagaaagaacaagaagaccagctcctgcagaaagtgaccaatctgtggaagaaacaagggttgttgctgtacggtgacctgcgtgaaagtcgctttgaagatgggaaactcccatcccgcaagatcgatgccctggaccattttgcgaaatgctttctgatcctcaaactttatcaccataaagtggacaaaagcaaatgggaaatgccgacgggttcgaacgaaagcgaggccaaaagttggaaagcaattcgcgtagatatggttcgttgtccctacgatcgttttgcgtttgcgttgttgggttggaccggaagccgcatgttcgaacgtgatctgcgccgctacgccacccacgagaagaagatgatgctggacaatcatgcgctgtatgacctgaccaagaaaatctttctcaaagctaaatcggaagaggaaattttcgcacatctggggcttgaatacctggaaccgtccgaacgtaacgca

SEQ ID NO: 918 - protein, 529 aa, synthetic construct
  REGION 1..529: note = Variant of terminal deoxynucleotidyltransferase
MHHHHHHGGSGSHGIRTIDSDFGKKRQKKMDNHDSSAIYEIKFHEFVLFILEEKMGATRRTFLTDLARKKGFRVENELSDSVTHIVAENNSGSDVLAWLKTHKMEKTTQFELLDISWLIESMKVGKPVDTKGKYQLMESGVMSANPDPTEGRENILPPTTKTISQYACQRRTTLNNHNQRFTDALEILAENYEFKRNDDTCLTFMRAISVLKCLPFEVVSLKDTEGLPWIGDEVKGIMEEIIEVGESLEVQAVLNDERYQSFKLFKSVFGVGVKTADKWYRMGLRTLEDVRSSKTLKLTPMQKAGLCYYEDLADGVTKAEADAISLLVQDAVWTFDPDALVEITGGFRRGKPFGHDVDLLITSPGAEKEQEDQLLQKVTNLWKKQGLLLYGDLRESRFEDGKLPSRKIDALDHFAKCFLILKLYHHKVDKSKWEMPTGSNESEAKSWKAIRVDMVRCPYDRFAFALLGWTGSRMFERDLRRYATHEKKMMLDNHALYDLTKKIFLKAKSEEEIFAHLGLEYLEPSERNA

SEQ ID NO: 919 - DNA, 1587 bp, synthetic construct
  misc_feature 1..1587: note = Variant of terminal deoxynucleotidyltransferase
  source 1..1587: mol_type = other DNA
atgcaccatcatcatcatcatggcggtagcggcagccacggcattcgtaccatcgattcggacttcgggaagaaacgccagaagaagatggataaccacgatagttccgccatctatgaaatcaaatttcacgagtttgtgctgttcattctcgaagagaaaatgggtgcgacgcgtcgtacttttctgacagatttagcccgcaagaaagggttccgcgtcgagaatgaactgtcagacagcgttacccacatcgtggcagaaaataattcaggatctgacgtattggcttggctgaagactcacaagatggagaagaccacgcaatttgaactgctggatattagctggcttatcgaaagcatgaaagttggtaaaccggtggacaccaaggggaaataccagttgatggaatcgggtgtgatgagtgcgaacccagatccgacagagggtcgtgaaaacattctgcctcctactacgaagaccatttctcagtatgcgtgtcaacgccgcaccaccctgaacaaccataatcaacgttttacggacgcactggaaattcttgcggaaaattacgagttcaaacgcaacgatgatacttgtctgacctttatgcgtgctatttccgtgctgaaatgccttccgtttgaggtagttagcctgaaagacacggaaggattgccctggatcggtgatgaagtcaaagggattatggaagaaatcatcgaggtcggtgaatcgctggaagtgcaggccgtgctcaatgatgagcgctatcaaagcttcaaactgtttaagagtgtctttggagtgggggtgaagacagcagacgtttggtaccgtatgggtctgcgcacgctcgaggatgttcgttccagcaagaccctgaagttgaccccgatgcagaaagcgggtctgtgctattatgaagatcttgctgatggcgttacgaaagccgaagctgacgcgatttctctgctggttcaggatgcagtctggactttcgacccggatgcgctggtggagattacgggtggatttcgtcgtgggaaaccttttggtcacgacgttgatctgcttatcacatctccgggagctgagaaagaacaagaagaccagctcctgcagaaagtgaccaatctgtggaagaaacaagggttgttgctgtacggtgacctgcgtgaaagtcgctttgaagatgggaaactcccatcccgcaagatcgatgccctggaccattttgcgaaatgctttctgatcctcaaactttatcaccataaagtggacaaaagcaaatgggaaatgccgacgggttcgaacgaaagcgaggccaaaagttggaaagcaattcgcgtagatctggttcgttgtccctacgatcgttttgcgtttgcgttgttgggttggaccggaagccgcatgttcgaacgtgatctgcgccgctacgccacccacgagaagaagatgatgctggacaatcatgcgctgtatgacctgaccaagaaaatctttctcaaagctaaatcggaagaggaaattttcgcacatctggggcttgaatacctggaaccgtccgaacgtaacgca

SEQ ID NO: 920 - protein, 529 aa, synthetic construct
  REGION 1..529: note = Variant of terminal deoxynucleotidyltransferase
MHHHHHHGGSGSHGIRTIDSDFGKKRQKKMDNHDSSAIYEIKFHEFVLFILEEKMGATRRTFLTDLARKKGFRVENELSDSVTHIVAENNSGSDVLAWLKTHKMEKTTQFELLDISWLIESMKVGKPVDTKGKYQLMESGVMSANPDPTEGRENILPPTTKTISQYACQRRTTLNNHNQRFTDALEILAENYEFKRNDDTCLTFMRAISVLKCLPFEVVSLKDTEGLPWIGDEVKGIMEEIIEVGESLEVQAVLNDERYQSFKLFKSVFGVGVKTADVWYRMGLRTLEDVRSSKTLKLTPMQKAGLCYYEDLADGVTKAEADAISLLVQDAVWTFDPDALVEITGGFRRGKPFGHDVDLLITSPGAEKEQEDQLLQKVTNLWKKQGLLLYGDLRESRFEDGKLPSRKIDALDHFAKCFLILKLYHHKVDKSKWEMPTGSNESEAKSWKAIRVDLVRCPYDRFAFALLGWTGSRMFERDLRRYATHEKKMMLDNHALYDLTKKIFLKAKSEEEIFAHLGLEYLEPSERNA

SEQ ID NO: 921 - DNA, 1587 bp, synthetic construct
  misc_feature 1..1587: note = Variant of terminal deoxynucleotidyltransferase
  source 1..1587: mol_type = other DNA
atgcaccatcatcatcatcatggcggtagcggcagccacggcattcgtaccatcgattcggacttcgggaagaaacgccagaagaagatggataaccacgatagttccgccatctatgaaatcaaatttcacgagtttgtgctgttcattctcgaagagaaaatgggtgcgacgcgtcgtacttttctgacagatttagcccgcaagaaagggttccgcgtcgagaatgaactgtcagacagcgttacccacatcgtggcagaaaataattcaggatctgacgtattggcttggctgaagactcacaagatggagaagaccacgcaatttgaactgctggatattagctggcttatcgaaagcatgaaagttggtaaaccggtggacaccaaggggaaataccagttgatggaatcgggtgtgatgagtgcgaacccagatccgacagagggtcgtgaaaacattctgcctcctactacgaagaccatttctcagtatgcgtgtcaacgccgcaccaccctgaacaaccataatcaacgttttacggacgcactggaaattcttgcggaaaattacgagttcaaacgcaacgatgatacttgtctgacctttatgcgtgctatttccgtgctgaaatgccttccgtttgaggtagttagcctgaaagacacggaaggattgccctggatcggtgatgaagtcaaagggattatggaagaaatcatcgaggtcggtgaatcgctggaagtgcaggccgtgctcaatgatgagcgctatcaaagcttcaaactgtttaagagtgtctttggagtgggggtgaagacagcagacaaatggtaccgtatgggtctgcgcacgctcgaggatgttcgttccagcaagaccctgaagttgaccccgatgcaggctgcgggtctgtgctattatgaagatcttgctgatggcgttacgaaagccgaagctgacgcgatttctctgctggttcaggatgcagtctggactttcgacccggatgcgctggtggagattacgggtggatttcgtcgtgggaaaccttttggtcacgacgttgatctgcttatcacatctccgggagctgagaaagaacaagaagaccagctcctgcagaaagtgaccaatctgtggaagaaacaagggttgttgctgtacggtgacctgcgtgaaagtcgctttgaagatgggaaactcccatcccgcaagatcgatgccctggaccattttgcgaaatgctttctgatcctcaaactttatcaccataaagtggacaaaagcaaatgggaaatgccgacgggttcgaacgaaagcgaggccaaaagttggaaagcaattcgcgtagatctggttcgttgtccctacgatcgttttgcgtttgcgttgttgggttggaccggaagccgcatgttcgaacgtgatctgcgccgctacgccacccacgagaagaagatgatgctggacaatcatgcgctgtatgacctgaccaagaaaatctttctcaaagctaaatcggaagaggaaattttcgcacatctggggcttgaatacctggaaccgtccgaacgtaacgca

SEQ ID NO: 922 - protein, 529 aa, synthetic construct
  REGION 1..529: note = Variant of terminal deoxynucleotidyltransferase
MHHHHHHGGSGSHGIRTIDSDFGKKRQKKMDNHDSSAIYEIKFHEFVLFILEEKMGATRRTFLTDLARKKGFRVENELSDSVTHIVAENNSGSDVLAWLKTHKMEKTTQFELLDISWLIESMKVGKPVDTKGKYQLMESGVMSANPDPTEGRENILPPTTKTISQYACQRRTTLNNHNQRFTDALEILAENYEFKRNDDTCLTFMRAISVLKCLPFEVVSLKDTEGLPWIGDEVKGIMEEIIEVGESLEVQAVLNDERYQSFKLFKSVFGVGVKTADKWYRMGLRTLEDVRSSKTLKLTPMQAAGLCYYEDLADGVTKAEADAISLLVQDAVWTFDPDALVEITGGFRRGKPFGHDVDLLITSPGAEKEQEDQLLQKVTNLWKKQGLLLYGDLRESRFEDGKLPSRKIDALDHFAKCFLILKLYHHKVDKSKWEMPTGSNESEAKSWKAIRVDLVRCPYDRFAFALLGWTGSRMFERDLRRYATHEKKMMLDNHALYDLTKKIFLKAKSEEEIFAHLGLEYLEPSERNA

SEQ ID NO: 923 - DNA, 1587 bp, synthetic construct
  misc_feature 1..1587: note = Variant of terminal deoxynucleotidyltransferase
  source 1..1587: mol_type = other DNA
atgcaccatcatcatcatcatggcggtagcggcagccacggcattcgtaccatcgattcggacttcgggaagaaacgccagaagaagatggataaccacgatagttccgccatctatgaaatcaaatttcacgagtttgtgctgttcattctcgaagagaaaatgggtgcgacgcgtcgtacttttctgacagatttagcccgcaagaaagggttccgcgtcgagaatgaactgtcagacagcgttacccacatcgtggcagaaaataattcaggatctgacgtattggcttggctgaagactcacaagatggagaagaccacgcaatttgaactgctggatattagctggcttatcgaaagcatgaaagttggtaaaccggtggacaccaaggggaaataccagttgatggaatcgggtgtgatgagtgcgaacccagatccgacagagggtcgtgaaaacattctgcctcctactacgaagaccatttctcagtatgcgtgtcaacgccgcaccaccctgaacaaccataatcaacgttttacggacgcactggaaattcttgcggaaaattacgagttcaaacgcaacgatgatacttgtctgacctttatgcgtgctatttccgtgctgaaatgccttccgtttgaggtagttagcctgaaagacacggaaggattgccctggatcggtgatgaagtcaaagggattatggaagaaatcatcgaggtcggtgaatcgctggaagtgcaggccgtgctcaatgatgagcgctatcaaagcttcaaactgtttaagagtgtctttggagtgggggtgaagacagcagacgagtggtaccgtatgggtctgcgcacgctcgaggatgttcgttccagcaagaccctgaagttgaccccgatgcagaaagcgggtctgtgctattatgaagatcttgctgatggcgttacgaaagccgaagctgacgcgatttctctgctggttcaggatgcagtctggactttcgacccggatgcgctggtggagattacgggtggatttcgtcgtgggaaaccttttggtcacgacgttgatctgcttatcacatctccgggagctgagaaagaacaagaagaccagctcctgcagaaagtgaccaatctgtggaagaaacaagggttgttgctgtacggtgacctgcgtgaaagtcgctttgaagatgggaaactcccatcccgcaagatcgatgccctggaccattttgcgaaatgctttctgatcctcaaactttatcaccataaagtggacaaaagcaaatgggaaatgccgacgggttcgaacgaaagcgaggccaaaagttggaaagcaattcgcgtagatctggttcgttgtccctacgatcgttttgcgtttgcgttgttgggttggaccggaagccgcatgttcgaacgtgatctgcgccgctacgccacccacgagaagaagatgatgctggacaatcatgcgctgtatgacctgaccaagaaaatctttctcaaagctaaatcggaagaggaaattttcgcacatctggggcttgaatacctggaaccgtccgaacgtaacgca

SEQ ID NO: 924 - protein, 529 aa, synthetic construct
  REGION 1..529: note = Variant of terminal deoxynucleotidyltransferase
MHHHHHHGGSGSHGIRTIDSDFGKKRQKKMDNHDSSAIYEIKFHEFVLFILEEKMGATRRTFLTDLARKKGFRVENELSDSVTHIVAENNSGSDVLAWLKTHKMEKTTQFELLDISWLIESMKVGKPVDTKGKYQLMESGVMSANPDPTEGRENILPPTTKTISQYACQRRTTLNNHNQRFTDALEILAENYEFKRNDDTCLTFMRAISVLKCLPFEVVSLKDTEGLPWIGDEVKGIMEEIIEVGESLEVQAVLNDERYQSFKLFKSVFGVGVKTADEWYRMGLRTLEDVRSSKTLKLTPMQKAGLCYYEDLADGVTKAEADAISLLVQDAVWTFDPDALVEITGGFRRGKPFGHDVDLLITSPGAEKEQEDQLLQKVTNLWKKQGLLLYGDLRESRFEDGKLPSRKIDALDHFAKCFLILKLYHHKVDKSKWEMPTGSNESEAKSWKAIRVDLVRCPYDRFAFALLGWTGSRMFERDLRRYATHEKKMMLDNHALYDLTKKIFLKAKSEEEIFAHLGLEYLEPSERNA

SEQ ID NO: 925 - DNA, 1587 bp, synthetic construct
  misc_feature 1..1587: note = Variant of terminal deoxynucleotidyltransferase
  source 1..1587: mol_type = other DNA
atgcaccatcatcatcatcatggcggtagcggcagccacggcattcgtaccatcgattcggacttcgggaagaaacgccagaagaagatggataaccacgatagttccgccatctatgaaatcaaatttcacgagtttgtgctgttcattctcgaagagaaaatgggtgcgacgcgtcgtacttttctgacagatttagcccgcaagaaagggttccgcgtcgagaatgaactgtcagacagcgttacccacatcgtggcagaaaataattcaggatctgacgtattggcttggctgaagactcacaagatggagaagaccacgcaatttgaactgctggatattagctggcttatcgaaagcatgaaagttggtaaaccggtggacaccaaggggaaataccagttgatggaatcgggtgtgatgagtgcgaacccagatccgacagagggtcgtgaaaacattctgcctcctactacgaagaccatttctcagtatgcgtgtcaacgccgcaccaccctgaacaaccataatcaacgttttacggacgcactggaaattcttgcggaaaattacgagttcaaacgcaacgatgatacttgtctgacctttatgcgtgctatttccgtgctgaaatgccttccgtttgaggtagttagcctgaaagacacggaaggattgccctggatcggtgatgaagtcaaagggattatggaagaaatcatcgaggtcggtgaatcgctggaagtgcaggccgtgctcaatgatgagcgctatcaaagcttcaaactgtttaagagtgtctttggagtgggggtgaagacagcagacaaatggtaccgtatgggtctgcgcacgctcgaggatgttcgttccagcaagaccctgaagttgaccccgatgcagaaagcgggtctgtgctattatgaagatcttgctgatggcctgacgaaagccgaagctgacgcgatttctctgctggttcaggatgcagtctggactttcgacccggatgcgctggtggagattacgggtggatttcgtcgtgggaaaccttttggtcacgacgttgatctgcttatcacatctccgggagctgagaaagaacaagaagaccagctcctgcagaaagtgaccaatctgtggaagaaacaagggttgttgctgtacggtgacctgcgtgaaagtcgctttgaagatgggaaactcccatcccgcaagatcgatgccctggaccattttgcgaaatgctttctgatcctcaaactttatcaccataaagtggacaaaagcaaatgggaaatgccgacgggttcgaacgaaagcgaggccaaaagttggaaagcaattcgcgtagatctggttcgttgtccctacgatcgttttgcgtttgcgttgttgggttggaccggaagccgcatgttcgaacgtgatctgcgccgctacgccacccacgagaagaagatgatgctggacaatcatgcgctgtatgacctgaccaagaaaatctttctcaaagctaaatcggaagaggaaattttcgcacatctggggcttgaatacctggaaccgtccgaacgtaacgca

SEQ ID NO: 926 - protein, 529 aa, synthetic construct
  REGION 1..529: note = Variant of terminal deoxynucleotidyltransferase
MHHHHHHGGSGSHGIRTIDSDFGKKRQKKMDNHDSSAIYEIKFHEFVLFILEEKMGATRRTFLTDLARKKGFRVENELSDSVTHIVAENNSGSDVLAWLKTHKMEKTTQFELLDISWLIESMKVGKPVDTKGKYQLMESGVMSANPDPTEGRENILPPTTKTISQYACQRRTTLNNHNQRFTDALEILAENYEFKRNDDTCLTFMRAISVLKCLPFEVVSLKDTEGLPWIGDEVKGIMEEIIEVGESLEVQAVLNDERYQSFKLFKSVFGVGVKTADKWYRMGLRTLEDVRSSKTLKLTPMQKAGLCYYEDLADGLTKAEADAISLLVQDAVWTFDPDALVEITGGFRRGKPFGHDVDLLITSPGAEKEQEDQLLQKVTNLWKKQGLLLYGDLRESRFEDGKLPSRKIDALDHFAKCFLILKLYHHKVDKSKWEMPTGSNESEAKSWKAIRVDLVRCPYDRFAFALLGWTGSRMFERDLRRYATHEKKMMLDNHALYDLTKKIFLKAKSEEEIFAHLGLEYLEPSERNA

SEQ ID NO: 927 - DNA, 1587 bp, synthetic construct
  misc_feature 1..1587: note = Variant of terminal deoxynucleotidyltransferase
  source 1..1587: mol_type = other DNA
atgcaccatcatcatcatcatggcggtagcggcagccacggcattcgtaccatcgattcggacttcgggaagaaacgccagaagaagatggataaccacgatagttccgccatctatgaaatcaaatttcacgagtttgtgctgttcattctcgaagagaaaatgggtgcgacgcgtcgtacttttctgacagatttagcccgcaagaaagggttccgcgtcgagaatgaactgtcagacagcgttacccacatcgtggcagaaaataattcaggatctgacgtattggcttggctgaagactcacaagatggagaagaccacgcaatttgaactgctggatattagctggcttatcgaaagcatgaaagttggtaaaccggtggacaccaaggggaaataccagttgatggaatcgggtgtgatgagtgcgaacccagatccgacagagggtcgtgaaaacattctgcctcctactacgaagaccatttctcagtatgcgtgtcaacgccgcaccaccctgaacaaccataatcaacgttttacggacgcactggaaattcttgcggaaaattacgagttcaaacgcaacgatgatacttgtctgacctttatgcgtgctatttccgtgctgaaatgccttccgtttgaggtagttagcctgaaagacacggaaggattgccctggatcggtgatgaagtcaaagggattatggaagaaatcatcgaggtcggtgaatcgctggaagtgcaggccgtgctcaatgatgagcgctatcaaagcttcaaactgtttaagagtgtctttggagtgggggtgaagacagcagacaaatggtacactatgggtctgcgcacgctcgaggatgttcgttccagcaagaccctgaagttgaccccgatgcagaaagcgggtctgtgctattatgaagatcttgctgatggcgttacgaaagccgaagctgacgcgatttctctgctggttcaggatgcagtctggactttcgacccggatgcgctggtggagattacgggtggatttcgtcgtgggaaaccttttggtcacgacgttgatctgcttatcacatctccgggagctgagaaagaacaagaagaccagctcctgcagaaagtgaccaatctgtggaagaaacaagggttgttgctgtacggtgacctgcgtgaaagtcgctttgaagatgggaaactcccatcccgcaagatcgatgccctggaccattttgcgaaatgctttctgatcctcaaactttatcaccataaagtggacaaaagcaaatgggaaatgccgacgggttcgaacgaaagcgaggccaaaagttggaaagcaattcgcgtagatctggttcgttgtccctacgatcgttttgcgtttgcgttgttgggttggaccggaagccgcatgttcgaacgtgatctgcgccgctacgccacccacgagaagaagatgatgctggacaatcatgcgctgtatgacctgaccaagaaaatctttctcaaagctaaatcggaagaggaaattttcgcacatctggggcttgaatacctggaaccgtccgaacgtaacgca

SEQ ID NO: 928 - protein, 529 aa, synthetic construct
  REGION 1..529: note = Variant of terminal deoxynucleotidyltransferase
MHHHHHHGGSGSHGIRTIDSDFGKKRQKKMDNHDSSAIYEIKFHEFVLFILEEKMGATRRTFLTDLARKKGFRVENELSDSVTHIVAENNSGSDVLAWLKTHKMEKTTQFELLDISWLIESMKVGKPVDTKGKYQLMESGVMSANPDPTEGRENILPPTTKTISQYACQRRTTLNNHNQRFTDALEILAENYEFKRNDDTCLTFMRAISVLKCLPFEVVSLKDTEGLPWIGDEVKGIMEEIIEVGESLEVQAVLNDERYQSFKLFKSVFGVGVKTADKWYTMGLRTLEDVRSSKTLKLTPMQKAGLCYYEDLADGVTKAEADAISLLVQDAVWTFDPDALVEITGGFRRGKPFGHDVDLLITSPGAEKEQEDQLLQKVTNLWKKQGLLLYGDLRESRFEDGKLPSRKIDALDHFAKCFLILKLYHHKVDKSKWEMPTGSNESEAKSWKAIRVDLVRCPYDRFAFALLGWTGSRMFERDLRRYATHEKKMMLDNHALYDLTKKIFLKAKSEEEIFAHLGLEYLEPSERNA

SEQ ID NO: 929 - DNA, 1587 bp, synthetic construct
  misc_feature 1..1587: note = Variant of terminal deoxynucleotidyltransferase
  source 1..1587: mol_type = other DNA
atgcaccatcatcatcatcatggcggtagcggcagccacggcattcgtaccatcgattcggacttcgggaagaaacgccagaagaagatggataaccacgatagttccgccatctatgaaatcaaatttcacgagtttgtgctgttcattctcgaagagaaaatgggtgcgacgcgtcgtacttttctgacagatttagcccgcaagaaagggttccgcgtcgagaatgaactgtcagacagcgttacccacatcgtggcagaaaataattcaggatctgacgtattggcttggctgaagactcacaagatggagaagaccacgcaatttgaactgctggatattagctggcttatcgaaagcatgaaagttggtaaaccggtggacaccaaggggaaataccagttgatggaatcgggtgtgatgagtgcgaacccagatccgacagagggtcgtgaaaacattctgcctcctactacgaagaccatttctcagtatgcgtgtcaacgccgcaccaccctgaacaaccataatcaacgttttacggacgcactggaaattcttgcggaaaattacgagttcaaacgcaacgatgatacttgtctgacctttatgcgtgctatttccgtgctgaaatgccttccgtttgaggtagttagcctgaaagacacggaaggattgccctggatcggtgatgaagtcaaagggattatggaagaaatcatcgaggtcggtgaatcgctggaagtgcaggccgtgctcaatgatgagcgctatcaaagcttcaaactgtttaagagtgtctttggagtgggggtgaagacagcagacaaatggtaccgtatgggtctgcgcacgctcgaggatgttcgttccagcaagaccctgaagttgaccccgatgcagaaagcgggtctgtgctattatagggatcttgctgatggcgttacgaaagccgaagctgacgcgatttctctgctggttcaggatgcagtctggactttcgacccggatgcgctggtggagattacgggtggatttcgtcgtgggaaaccttttggtcacgacgttgatctgcttatcacatctccgggagctgagaaagaacaagaagaccagctcctgcagaaagtgaccaatctgtggaagaaacaagggttgttgctgtacggtgacctgcgtgaaagtcgctttgaagatgggaaactcccatcccgcaagatcgatgccctggaccattttgcgaaatgctttctgatcctcaaactttatcaccataaagtggacaaaagcaaatgggaaatgccgacgggttcgaacgaaagcgaggccaaaagttggaaagcaattcgcgtagatctggttcgttgtccctacgatcgttttgcgtttgcgttgttgggttggaccggaagccgcatgttcgaacgtgatctgcgccgctacgccacccacgagaagaagatgatgctggacaatcatgcgctgtatgacctgaccaagaaaatctttctcaaagctaaatcggaagaggaaattttcgcacatctggggcttgaatacctggaaccgtccgaacgtaacgca

SEQ ID NO: 930 - protein, 529 aa, synthetic construct
  REGION 1..529: note = Variant of terminal deoxynucleotidyltransferase
MHHHHHHGGSGSHGIRTIDSDFGKKRQKKMDNHDSSAIYEIKFHEFVLFILEEKMGATRRTFLTDLARKKGFRVENELSDSVTHIVAENNSGSDVLAWLKTHKMEKTTQFELLDISWLIESMKVGKPVDTKGKYQLMESGVMSANPDPTEGRENILPPTTKTISQYACQRRTTLNNHNQRFTDALEILAENYEFKRNDDTCLTFMRAISVLKCLPFEVVSLKDTEGLPWIGDEVKGIMEEIIEVGESLEVQAVLNDERYQSFKLFKSVFGVGVKTADKWYRMGLRTLEDVRSSKTLKLTPMQKAGLCYYRDLADGVTKAEADAISLLVQDAVWTFDPDALVEITGGFRRGKPFGHDVDLLITSPGAEKEQEDQLLQKVTNLWKKQGLLLYGDLRESRFEDGKLPSRKIDALDHFAKCFLILKLYHHKVDKSKWEMPTGSNESEAKSWKAIRVDLVRCPYDRFAFALLGWTGSRMFERDLRRYATHEKKMMLDNHALYDLTKKIFLKAKSEEEIFAHLGLEYLEPSERNA

SEQ ID NO: 931 - DNA, 1587 bp, synthetic construct
  misc_feature 1..1587: note = Variant of terminal deoxynucleotidyltransferase
  source 1..1587: mol_type = other DNA
atgcaccatcatcatcatcatggcggtagcggcagccacggcattcgtaccatcgattcggacttcgggaagaaacgccagaagaagatggataaccacgatagttccgccatctatgaaatcaaatttcacgagtttgtgctgttcattctcgaagagaaaatgggtgcgacgcgtcgtacttttctgacagatttagcccgcaagaaagggttccgcgtcgagaatgaactgtcagacagcgttacccacatcgtggcagaaaataattcaggatctgacgtattggcttggctgaagactcacaagatggagaagaccacgcaatttgaactgctggatattagctggcttatcgaaagcatgaaagttggtaaaccggtggacaccaaggggaaataccagttgatggaatcgggtgtgatgagtgcgaacccagatccgacagagggtcgtgaaaacattctgcctcctactacgaagaccatttctcagtatgcgtgtcaacgccgcaccaccctgaacaaccataatcaacgttttacggacgcactggaaattcttgcggaaaattacgagttcaaacgcaacgatgatacttgtctgacctttatgcgtgctatttccgtgctgaaatgccttccgtttgaggtagttagcctgaaagacacggaaggattgccctggatcggtgatgaagtcaaagggattatggaagaaatcatcgaggtcggtgaatcgctggaagtgcaggccgtgctcaatgatgagcgctatcaaagcttcaaactgtttaagagtgtctttggagtgggggtgaagacagcagactgttggtaccgtatgggtctgcgcacgctcgaggatgttcgttccagcaagaccctgaagttgaccccgatgcagaaagcgggtctgtgctattatgaagatcttgctgatggcgttacgaaagccgaagctgacgcgatttctctgctggttcaggatgcagtctggactttcgacccggatgcgctggtggagattacgggtggatttcgtcgtgggaaaccttttggtcacgacgttgatctgcttatcacatctccgggagctgagaaagaacaagaagaccagctcctgcagaaagtgaccaatctgtggaagaaacaagggttgttgctgtacggtgacctgcgtgaaagtcgctttgaagatgggaaactcccatcccgcaagatcgatgccctggaccattttgcgaaatgctttctgatcctcaaactttatcaccataaagtggacaaaagcaaatgggaaatgccgacgggttcgaacgaaagcgaggccaaaagttggaaagcaattcgcgtagatctggttcgttgtccctacgatcgttttgcgtttgcgttgttgggttggaccggaagccgcatgttcgaacgtgatctgcgccgctacgccacccacgagaagaagatgatgctggacaatcatgcgctgtatgacctgaccaagaaaatctttctcaaagctaaatcggaagaggaaattttcgcacatctggggcttgaatacctggaaccgtccgaacgtaacgca

SEQ ID NO: 932 - protein, 529 aa, synthetic construct
  REGION 1..529: note = Variant of terminal deoxynucleotidyltransferase
MHHHHHHGGSGSHGIRTIDSDFGKKRQKKMDNHDSSAIYEIKFHEFVLFILEEKMGATRRTFLTDLARKKGFRVENELSDSVTHIVAENNSGSDVLAWLKTHKMEKTTQFELLDISWLIESMKVGKPVDTKGKYQLMESGVMSANPDPTEGRENILPPTTKTISQYACQRRTTLNNHNQRFTDALEILAENYEFKRNDDTCLTFMRAISVLKCLPFEVVSLKDTEGLPWIGDEVKGIMEEIIEVGESLEVQAVLNDERYQSFKLFKSVFGVGVKTADCWYRMGLRTLEDVRSSKTLKLTPMQKAGLCYYEDLADGVTKAEADAISLLVQDAVWTFDPDALVEITGGFRRGKPFGHDVDLLITSPGAEKEQEDQLLQKVTNLWKKQGLLLYGDLRESRFEDGKLPSRKIDALDHFAKCFLILKLYHHKVDKSKWEMPTGSNESEAKSWKAIRVDLVRCPYDRFAFALLGWTGSRMFERDLRRYATHEKKMMLDNHALYDLTKKIFLKAKSEEEIFAHLGLEYLEPSERNA

SEQ ID NO: 933 - DNA, 1587 bp, synthetic construct
  misc_feature 1..1587: note = Variant of terminal deoxynucleotidyltransferase
  source 1..1587: mol_type = other DNA
atgcaccatcatcatcatcatggcggtagcggcagccacggcattcgtaccatcgattcggacttcgggaagaaacgccagaagaagatggataaccacgatagttccgccatctatgaaatcaaatttcacgagtttgtgctgttcattctcgaagagaaaatgggtgcgacgcgtcgtacttttctgacagatttagcccgcaagaaagggttccgcgtcgagaatgaactgtcagacagcgttacccacatcgtggcagaaaataattcaggatctgacgtattggcttggctgaagactcacaagatggagaagaccacgcaatttgaactgctggatattagctggcttatcgaaagcatgaaagttggtaaaccggtggacaccaaggggaaataccagttgatggaatcgggtgtgatgagtgcgaacccagatccgacagagggtcgtgaaaacattctgcctcctactacgaagaccatttctcagtatgcgtgtcaacgccgcaccaccctgaacaaccataatcaacgttttacggacgcactggaaattcttgcggaaaattacgagttcaaacgcaacgatgatacttgtctgacctttatgcgtgctatttccgtgctgaaatgccttccgtttgaggtagttagcctgaaagacacggaaggattgccctggatcggtgatgaagtcaaagggattatggaagaaatcatcgaggtcggtgaatcgctggaagtgcaggccgtgctcaatgatgagcgctatcaaagcttcaaactgtttaagagtgtctttggagtgggggtgaagacagcagacaaatggtactgtatgggtctgcgcacgctcgaggatgttcgttccagcaagaccctgaagttgaccccgatgcagaaagcgggtctgtgctattatgaagatcttgctgatggcgttacgaaagccgaagctgacgcgatttctctgctggttcaggatgcagtctggactttcgacccggatgcgctggtggagattacgggtggatttcgtcgtgggaaaccttttggtcacgacgttgatctgcttatcacatctccgggagctgagaaagaacaagaagaccagctcctgcagaaagtgaccaatctgtggaagaaacaagggttgttgctgtacggtgacctgcgtgaaagtcgctttgaagatgggaaactcccatcccgcaagatcgatgccctggaccattttgcgaaatgctttctgatcctcaaactttatcaccataaagtggacaaaagcaaatgggaaatgccgacgggttcgaacgaaagcgaggccaaaagttggaaagcaattcgcgtagatctggttcgttgtccctacgatcgttttgcgtttgcgttgttgggttggaccggaagccgcatgttcgaacgtgatctgcgccgctacgccacccacgagaagaagatgatgctggacaatcatgcgctgtatgacctgaccaagaaaatctttctcaaagctaaatcggaagaggaaattttcgcacatctggggcttgaatacctggaaccgtccgaacgtaacgca

SEQ ID NO: 934 - protein, 529 aa, synthetic construct
  REGION 1..529: note = Variant of terminal deoxynucleotidyltransferase
MHHHHHHGGSGSHGIRTIDSDFGKKRQKKMDNHDSSAIYEIKFHEFVLFILEEKMGATRRTFLTDLARKKGFRVENELSDSVTHIVAENNSGSDVLAWLKTHKMEKTTQFELLDISWLIESMKVGKPVDTKGKYQLMESGVMSANPDPTEGRENILPPTTKTISQYACQRRTTLNNHNQRFTDALEILAENYEFKRNDDTCLTFMRAISVLKCLPFEVVSLKDTEGLPWIGDEVKGIMEEIIEVGESLEVQAVLNDERYQSFKLFKSVFGVGVKTADKWYCMGLRTLEDVRSSKTLKLTPMQKAGLCYYEDLADGVTKAEADAISLLVQDAVWTFDPDALVEITGGFRRGKPFGHDVDLLITSPGAEKEQEDQLLQKVTNLWKKQGLLLYGDLRESRFEDGKLPSRKIDALDHFAKCFLILKLYHHKVDKSKWEMPTGSNESEAKSWKAIRVDLVRCPYDRFAFALLGWTGSRMFERDLRRYATHEKKMMLDNHALYDLTKKIFLKAKSEEEIFAHLGLEYLEPSERNA

SEQ ID NO: 935 - DNA, 1587 bp, synthetic construct
  misc_feature 1..1587: note = Variant of terminal deoxynucleotidyltransferase
  source 1..1587: mol_type = other DNA
atgcaccatcatcatcatcatggcggtagcggcagccacggcattcgtaccatcgattcggacttcgggaagaaacgccagaagaagatggataaccacgatagttccgccatctatgaaatcaaatttcatgagtttgtgctgttcattctcgaagagaaaatgggtgcgacgcgtcgtacttttctgacagatttagcccgcaagaaagggttccgcgtcgagaatgaactgtcagacagcgttacccacatcgtggcagaaaataattcaggatctgacgtattggcttggctgaagactcacaagatggagaagaccacgcaatttgaactgctggatattagctggcttatcgaaagcatgaaagttggtaaaccggtggacaccaaggggaaataccagttgatggaatcgggtgtgatgagtgcgaacccagatccgacagagggtcgtgaaaacattctgcctcctactacgaagaccatttctcagtatgcgtgtcaacgccgcaccaccctgaacaaccataatcaacgttttacggacgcactggaaattcttgcggaaaattacgagttcaaacgcaacgatgatacttgtctgacctttatgcgtgctatttccgtgctgaaatgccttccgtttgaggtagttagcctgaaagacacggaaggattgccctggatcggtgatgaagtcaaagggattatggaagaaatcatcgaggtcggtgaatcgctggaagtgcaggccgtgctcaatgatgagcgctatcaaagcttcaaactgtttaagagtgtctttggagtgggggtgaagacagcagacatttggtaccgtatgggtctgcgcacgctcgaggatgttcgttccagcaagaccctgaagttgaccccgatgcagaaagcgggtctgtgctattatgaagatcttgctgatggcgttacgaaagccgaagctgacgcgatttctctgctggttcaggatgcagtctggactttcgacccggatgcgctggtggagattacgggtggatttcgtcgtgggaaaccttttggtcacgacgttgatctgcttatcacatctccgggagctgagaaagaacaagaagaccagctcctgcagaaagtgaccaatctgtggaagaaacaagggttgttgctgtacggtgacctgcgtgaaagtcgctttgaagatgggaaactcccatcccgcaagatcgatgccctggaccattttgcgaaatgctttctgatcctcaaactttatcaccataaagtggacaaaagcaaatgggaaatgccgacgggttcgaacgaaagcgaggccaaaagttggaaagcaattcgcgtagatctggttcgttgtccctacgatcgttttgcgtttgcgttgttgggttggaccggaagccgcatgttcgaacgtgatctgcgccgctacgccacccacgagaagaagatgatgctggacaatcatgcgctgtatgacctgaccaagaaaatctttctcaaagctaaatcggaagaggaaattttcgcacatctggggcttgaatacctggaaccgtccgaacgtaacgca

SEQ ID NO: 936 - protein, 529 aa, synthetic construct
  REGION 1..529: note = Variant of terminal deoxynucleotidyltransferase
MHHHHHHGGSGSHGIRTIDSDFGKKRQKKMDNHDSSAIYEIKFHEFVLFILEEKMGATRRTFLTDLARKKGFRVENELSDSVTHIVAENNSGSDVLAWLKTHKMEKTTQFELLDISWLIESMKVGKPVDTKGKYQLMESGVMSANPDPTEGRENILPPTTKTISQYACQRRTTLNNHNQRFTDALEILAENYEFKRNDDTCLTFMRAISVLKCLPFEVVSLKDTEGLPWIGDEVKGIMEEIIEVGESLEVQAVLNDERYQSFKLFKSVFGVGVKTADIWYRMGLRTLEDVRSSKTLKLTPMQKAGLCYYEDLADGVTKAEADAISLLVQDAVWTFDPDALVEITGGFRRGKPFGHDVDLLITSPGAEKEQEDQLLQKVTNLWKKQGLLLYGDLRESRFEDGKLPSRKIDALDHFAKCFLILKLYHHKVDKSKWEMPTGSNESEAKSWKAIRVDLVRCPYDRFAFALLGWTGSRMFERDLRRYATHEKKMMLDNHALYDLTKKIFLKAKSEEEIFAHLGLEYLEPSERNA

SEQ ID NO: 937 - DNA, 1587 bp, synthetic construct
  misc_feature 1..1587: note = Variant of terminal deoxynucleotidyltransferase
  source 1..1587: mol_type = other DNA
atgcaccatcatcatcatcatggcggtagcggcagccacggcattcgtaccatcgattcggacttcgggaagaaacgccagaagaagatggataaccacgatagttccgccatctatgaaatcaaatttcacgagtttgtgctgttcattctcgaagagaaaatgggtgcgacgcgtcgtacttttctgacagatttagcccgcaagaaagggttccgcgtcgagaatgaactgtcagacagcgttacccacatcgtggcagaaaataattcaggatctgacgtattggcttggctgaagactcacaagatggagaagaccacgcaatttgaactgctggatattagctggcttatcgaaagcatgaaagttggtaaaccggtggacaccaaggggaaataccagttgatggaatcgggtgtgatgagtgcgaacccagatccgacagagggtcgtgaaaacattctgcctcctactacgaagaccatttctcagtatgcgtgtcaacgccgcaccaccctgaacaaccataatcaacgttttacggacgcactggaaattcttgcggaaaattacgagttcaaacgcaacgatgatacttgtctgacctttatgcgtgctatttccgtgctgaaatgccttccgtttgaggtagttagcctgaaagacacggaaggattgccctggatcggtgatgaagtcaaagggattatggaagaaatcatcgaggtcggtgaatcgctggaagtgcaggccgtgctcaatgatgagcgctatcaaagcttcaaactgtttaagagtgtctttggagtgggggtgaagacagcagacaaatggtaccgtatgggtctgcgcacgctcgaggatgttcgttccagcaagaccctggtgttgaccccgatgcagaaagcgggtctgtgctattatgaagatcttgctgatggcgttacgaaagccgaagctgacgcgatttctctgctggttcaggatgcagtctggactttcgacccggatgcgctggtggagattacgggtggatttcgtcgtgggaaaccttttggtcacgacgttgatctgcttatcacatctccgggagctgagaaagaacaagaagaccagctcctgcagaaagtgaccaatctgtggaagaaacaagggttgttgctgtacggtgacctgcgtgaaagtcgctttgaagatgggaaactcccatcccgcaagatcgatgccctggaccattttgcgaaatgctttctgatcctcaaactttatcaccataaagtggacaaaagcaaatgggaaatgccgacgggttcgaacgaaagcgaggccaaaagttggaaagcaattcgcgtagatctggttcgttgtccctacgatcgttttgcgtttgcgttgttgggttggaccggaagccgcatgttcgaacgtgatctgcgccgctacgccacccacgagaagaagatgatgctggacaatcatgcgctgtatgacctgaccaagaaaatctttctcaaagctaaatcggaagaggaaattttcgcacatctggggcttgaatacctggaaccgtccgaacgtaacgca

SEQ ID NO: 938 - protein, 529 aa, synthetic construct
  REGION 1..529: note = Variant of terminal deoxynucleotidyltransferase
MHHHHHHGGSGSHGIRTIDSDFGKKRQKKMDNHDSSAIYEIKFHEFVLFILEEKMGATRRTFLTDLARKKGFRVENELSDSVTHIVAENNSGSDVLAWLKTHKMEKTTQFELLDISWLIESMKVGKPVDTKGKYQLMESGVMSANPDPTEGRENILPPTTKTISQYACQRRTTLNNHNQRFTDALEILAENYEFKRNDDTCLTFMRAISVLKCLPFEVVSLKDTEGLPWIGDEVKGIMEEIIEVGESLEVQAVLNDERYQSFKLFKSVFGVGVKTADKWYRMGLRTLEDVRSSKTLVLTPMQKAGLCYYEDLADGVTKAEADAISLLVQDAVWTFDPDALVEITGGFRRGKPFGHDVDLLITSPGAEKEQEDQLLQKVTNLWKKQGLLLYGDLRESRFEDGKLPSRKIDALDHFAKCFLILKLYHHKVDKSKWEMPTGSNESEAKSWKAIRVDLVRCPYDRFAFALLGWTGSRMFERDLRRYATHEKKMMLDNHALYDLTKKIFLKAKSEEEIFAHLGLEYLEPSERNA

SEQ ID NO: 939 - DNA, 1587 bp, synthetic construct
  misc_feature 1..1587: note = Variant of terminal deoxynucleotidyltransferase
  source 1..1587: mol_type = other DNA
atgcaccatcatcatcatcatggcggtagcggcagccacggcattcgtaccatcgattcggacttcgggaagaaacgccagaagaagatggataaccacgatagttccgccatctatgaaatcaaatttcacgagtttgtgctgttcattctcgaagagaaaatgggtgcgacgcgtcgtacttttctgacagatttagcccgcaagaaagggttccgcgtcgagaatgaactgtcagacagcgttacccacatcgtggcagaaaataattcaggatctgacgtattggcttggctgaagactcacaagatggagaagaccacgcaatttgaactgctggatattagctggcttatcgaaagcatgaaagttggtaaaccggtggacaccaaggggaaataccagttgatggaatcgggtgtgatgagtgcgaacccagatccgacagagggtcgtgaaaacattctgcctcctactacgaagaccatttctcagtatgcgtgtcaacgccgcaccaccctgaacaaccataatcaacgttttacggacgcactggaaattcttgcggaaaattacgagttcaaacgcaacgatgatacttgtctgacctttatgcgtgctatttccgtgctgaaatgccttccgtttgaggtagttagcctgaaagacacggaaggattgccctggatcggtgatgaagtcaaagggattatggaagaaatcatcgaggtcggtgaatcgctggaagtgcaggccgtgctcaatgatgagcgctatcaaagcttcaaactgtttaagagtgtctttggagtgggggtgaagacagcagacaaatggtaccgtatgggtctgcgcacgctcgaggatgttcgttccagcaagaccctgaagttgaccccgatgcagaaagcgggtctgtgctattatgaagatcttgctgatggcgttacgaaagccgaagctgacgcgatttctctgctggttcaggatgcagtctggactttcgacccggatgcgctggtggagattacgggtggatttcgtcgtgggaaaccttttggtcacgacgttgatctgcttatcacatctccgggagctgagaaagaacaagaagaccagctcctgcagaaagtgaccaatctgtggaagaaacaagggttgttgctgtacggtgacctgcgtgaaagtcgctttgaagatgggaaactcccatcccgcaagatcgatgccctggaccattttgcgaaatgctttctgatcctcaaactttatcaccataaagtggacaaaagcaaatgggaaatgccgacgggttcgaacgaaagcgaggccaaaagttggaaagcaattcgcgtagatctggtttcttgtccctacgatcgttttgcgtttgcgttgttgggttggaccggaagccgcatgttcgaacgtgatctgcgccgctacgccacccacgagaagaagatgatgctggacaatcatgcgctgtatgacctgaccaagaaaatctttctcaaagctaaatcggaagaggaaattttcgcacatctggggcttgaatacctggaaccgtccgaacgtaacgca

SEQ ID NO: 940 - protein, 529 aa, synthetic construct
  REGION 1..529: note = Variant of terminal deoxynucleotidyltransferase
MHHHHHHGGSGSHGIRTIDSDFGKKRQKKMDNHDSSAIYEIKFHEFVLFILEEKMGATRRTFLTDLARKKGFRVENELSDSVTHIVAENNSGSDVLAWLKTHKMEKTTQFELLDISWLIESMKVGKPVDTKGKYQLMESGVMSANPDPTEGRENILPPTTKTISQYACQRRTTLNNHNQRFTDALEILAENYEFKRNDDTCLTFMRAISVLKCLPFEVVSLKDTEGLPWIGDEVKGIMEEIIEVGESLEVQAVLNDERYQSFKLFKSVFGVGVKTADKWYRMGLRTLEDVRSSKTLKLTPMQKAGLCYYEDLADGVTKAEADAISLLVQDAVWTFDPDALVEITGGFRRGKPFGHDVDLLITSPGAEKEQEDQLLQKVTNLWKKQGLLLYGDLRESRFEDGKLPSRKIDALDHFAKCFLILKLYHHKVDKSKWEMPTGSNESEAKSWKAIRVDLVSCPYDRFAFALLGWTGSRMFERDLRRYATHEKKMMLDNHALYDLTKKIFLKAKSEEEIFAHLGLEYLEPSERNA

SEQ ID NO: 941 - DNA, 1587 bp, synthetic construct
  misc_feature 1..1587: note = Variant of terminal deoxynucleotidyltransferase
  source 1..1587: mol_type = other DNA
atgcaccatcatcatcatcatggcggtagcggcagccacggcattcgtaccatcgattcggacttcgggaagaaacgccagaagaagatggataaccacgatagttccgccatctatgaaatcaaatttcacgagtttgtgctgttcattctcgaagagaaaatgggtgcgacgcgtcgtacttttctgacagatttagcccgcaagaaagggttccgcgtcgagaatgaactgtcagacagcgttacccacatcgtggcagaaaataattcaggatctgacgtattggcttggctgaagactcacaagatggagaagaccacgcaatttgaactgctggatattagctggcttatcgaaagcatgaaagttggtaaaccggtggacaccaaggggaaataccagttgatggaatcgggtgtgatgagtgcgaacccagatccgacagagggtcgtgaaaacattctgcctcctactacgaagaccatttctcagtatgcgtgtcaacgccgcaccaccctgaacaaccataatcaacgttttacggacgcactggaaattcttgcggaaaattacgagttcaaacgcaacgatgatacttgtctgacctttatgcgtgctatttccgtgctgaaatgccttccgtttgaggtagttagcctgaaagacacggaaggattgccctggatcggtgatgaagtcaaagggattatggaagaaatcatcgaggtcggtgaatcgctggaagtgcaggccgtgctcaatgatgagcgctatcaaagcttcaaactgtttaagagtgtctttggagtgggggtgaagacagcagacaaatggtaccgtatgggtctgcgcacgctcgaggatgttcgttccagcaagaccctgaagttgaccccgatgcagaaagcgggtctgtgctattatgaagatcttgctgatggcgttacgaaagccgaagctgacgcgatttctctgctggttcaggatgcagtctggactttcgacccggatgcgctggtggagattacgggtggatttcgtcgtgggaaaccttttggtcacgacgttgatctgcttatcacatctccgggagctgagaaagaacaagaagaccagctcctgcagaaagtgaccaatctgtggaagaaacaagggttgttgctgtacggtgacctgcgtgaaagtcgctttgaagatgggaaactcccatcccgcaagatcgatgccctggaccattttgcgaaatgctttctgatcctcaaactttatcaccataaagtggacaaaagcaaatgggaaatgccgacgggttcgaacgaaagcgaggccaaaagttggaaagcaattcgcgtagatctggttcgttgtccctacgatcgttttgcgtttgcgttgttgggttggaccggaagccgcatgttcgaacgtgatctgcgccgctacgccacccacgagaagaagatgatgctggacaatcatgcgctgtatgacctgaccaagaaaatctttctcaaagctaaatcggaagaggaaattttcgcacatctggggcttgaatacctggaaccgtttgaacgtaacgca

SEQ ID NO: 942 - protein, 529 aa, synthetic construct
  REGION 1..529: note = Variant of terminal deoxynucleotidyltransferase
MHHHHHHGGSGSHGIRTIDSDFGKKRQKKMDNHDSSAIYEIKFHEFVLFILEEKMGATRRTFLTDLARKKGFRVENELSDSVTHIVAENNSGSDVLAWLKTHKMEKTTQFELLDISWLIESMKVGKPVDTKGKYQLMESGVMSANPDPTEGRENILPPTTKTISQYACQRRTTLNNHNQRFTDALEILAENYEFKRNDDTCLTFMRAISVLKCLPFEVVSLKDTEGLPWIGDEVKGIMEEIIEVGESLEVQAVLNDERYQSFKLFKSVFGVGVKTADKWYRMGLRTLEDVRSSKTLKLTPMQKAGLCYYEDLADGVTKAEADAISLLVQDAVWTFDPDALVEITGGFRRGKPFGHDVDLLITSPGAEKEQEDQLLQKVTNLWKKQGLLLYGDLRESRFEDGKLPSRKIDALDHFAKCFLILKLYHHKVDKSKWEMPTGSNESEAKSWKAIRVDLVRCPYDRFAFALLGWTGSRMFERDLRRYATHEKKMMLDNHALYDLTKKIFLKAKSEEEIFAHLGLEYLEPFERNA

SEQ ID NO: 943 - DNA, 1587 bp, synthetic construct
  misc_feature 1..1587: note = Variant of terminal deoxynucleotidyltransferase
  source 1..1587: mol_type = other DNA
atgcaccatcatcatcatcatggcggtagcggcagccacggcattcgtaccatcgattcggacttcgggaagaaacgccagaagaagatggataaccacgatagttccgccatctatgaaatcaaatttcacgagtttgtgctgttcattctcgaagagaaaatgggtgcgacgcgtcgtacttttctgacagatttagcccgcaagaaagggttccgcgtcgagaatgaactgtcagacagcgttacccacatcgtggcagaaaataattcaggatctgacgtattggcttggctgaagactcacaagatggagaagaccacgcaatttgaactgctggatattagctggcttatcgaaagcatgaaagttggtaaaccggtggacaccaaggggaaataccagttgatggaatcgggtgtgatgagtgcgaacccagatccgacagagggtcgtgaaaacattctgcctcctactacgaagaccatttctcagtatgcgtgtcaacgccgcaccaccctgaacaaccataatcaacgttttacggacgcactggaaattcttgcggaaaattacgagttcaaacgcaacgatgatacttgtctgacctttatgcgtgctatttccgtgctgaaatgccttccgtttgaggtagttagcctgaaagacacggaaggattgccctggatcggtgatgaagtcaaagggattatggaagaaatcatcgaggtcggtgaatcgctggaagtgcaggccgtgctcaatgatgagcgctatcaaagcttcaaactgtttaagagtgtctttggagtgggggtgaagacagcagacaaatggtaccgtatgggtctgcgcacgctcgaggatgttcgttccagcaagaccctgaagttgaccccgatgcagaaagcgggtctgtgctattatgaagatcttgctgatggcgttacgaaagccgaagctgacgcgatttctctgctggttcaggatgcagtctggactttcgacccggatgcgctggtggagattacgggtggatttcgtcgtgggaaaccttttggtcacgacgttgatctgattatcacatctccgggagctgagaaagaacaagaagaccagctcctgcagaaagtgaccaatctgtggaagaaacaagggttgttgctgtacggtgacctgcgtgaaagtcgctttgaagatgggaaactcccatcccgcaagatcgatgccctggaccattttgcgaaatgctttctgatcctcaaactttatcaccataaagtggacaaaagcaaatgggaaatgccgacgggttcgaacgaaagcgaggccaaaagttggaaagcaattcgcgtagatctggttcgttgtccctacgatcgttttgcgtttgcgttgttgggttggaccggaagccgcatgttcgaacgtgatctgcgccgctacgccacccacgagaagaagatgatgctggacaatcatgcgctgtatgacctgaccaagaaaatctttctcaaagctaaatcggaagaggaaattttcgcacatctggggcttgaatacctggaaccgtccgaacgtaacgca

SEQ ID NO: 944 - protein, 529 aa, synthetic construct
  REGION 1..529: note = Variant of terminal deoxynucleotidyltransferase
MHHHHHHGGSGSHGIRTIDSDFGKKRQKKMDNHDSSAIYEIKFHEFVLFILEEKMGATRRTFLTDLARKKGFRVENELSDSVTHIVAENNSGSDVLAWLKTHKMEKTTQFELLDISWLIESMKVGKPVDTKGKYQLMESGVMSANPDPTEGRENILPPTTKTISQYACQRRTTLNNHNQRFTDALEILAENYEFKRNDDTCLTFMRAISVLKCLPFEVVSLKDTEGLPWIGDEVKGIMEEIIEVGESLEVQAVLNDERYQSFKLFKSVFGVGVKTADKWYRMGLRTLEDVRSSKTLKLTPMQKAGLCYYEDLADGVTKAEADAISLLVQDAVWTFDPDALVEITGGFRRGKPFGHDVDLIITSPGAEKEQEDQLLQKVTNLWKKQGLLLYGDLRESRFEDGKLPSRKIDALDHFAKCFLILKLYHHKVDKSKWEMPTGSNESEAKSWKAIRVDLVRCPYDRFAFALLGWTGSRMFERDLRRYATHEKKMMLDNHALYDLTKKIFLKAKSEEEIFAHLGLEYLEPSERNA

SEQ ID NO: 945 - DNA, 1587 bp, synthetic construct
  misc_feature 1..1587: note = Variant of terminal deoxynucleotidyltransferase
  source 1..1587: mol_type = other DNA
atgcaccatcatcatcatcatggcggtagcggcagccacggcattcgtaccatcgattcggacttcgggaagaaacgccagaagaagatggataaccacgatagttccgccatctatgaaatcaaatttcacgagtttgtgctgttcattctcgaagagaaaatgggtgcgacgcgtcgtacttttctgacagatttagcccgcaagaaagggttccgcgtcgagaatgaactgtcagacagcgttacccacatcgtggcagaaaataattcaggatctgacgtattggcttggctgaagactcacaagatggagaagaccacgcaatttgaactgctggatattagctggcttatcgaaagcatgaaagttggtaaaccggtggacaccaaggggaaataccagttgatggaatcgggtgtgatgagtgcgaacccagatccgacagagggtcgtgaaaacattctgcctcctactacgaagaccatttctcagtatgcgtgtcaacgccgcaccaccctgaacaaccataatcaacgttttacggacgcactggaaattcttgcggaaaattacgagttcaaacgcaacgatgatacttgtctgacctttatgcgtgctatttccgtgctgaaatgccttccgtttgaggtagttagcctgaaagacacggaaggattgccctggatcggtgatgaagtcaaagagattatggaagaaatcatcgaggtcggtgaatcgctggaagtgcaggccgtgctcaatgatgagcgctatcaaagcttcaaactgtttaagagtgtctttggagtgggggtgaagacagcagacaaatggtaccgtatgggtctgcgcacgctcgaggatgttcgttccagcaagaccctgttgttgaccccgatgcagaaagcgggtctgtgctattatgaagatcttgctgatggcgttacgaaagccgaagctgacgcgatttctctgctggttcaggatgcagtctggactttcgacccggatgcgctggtggagattacgggtggatttcgtcgtgggaaaccttttggtcacgacgttgatctgcttatcacatctccgggagctgagaaagaacaagaagaccagctcctgcagaaagtgaccaatctgtggaagaaacaagggttgttgctgtacggtgacctgcgtgaaagtcgctttgaagatgggaaactcccatcccgcaagatcgatgccctggaccattttgcgaaatgctttctgatcctcaaactttatcaccataaagtggacaaaagcaaatgggaaatgccgacgggttcgaacgaaagcgaggccaaaagttggaaagcaattcgcgtagatctggttcgttgtccctacgatcgttttgcgtttgcgttgttgggttggaccggaagccgcatgttcgaacgtgatctgcgccgctacgccacccacgagaagaagatgatgctggacaatcatgcgctgtatgacctgaccaagaaaatctttctcaaagctaaatcggaagaggaaattttcgcacatctggggcttgaatacctggaaccgtccgaacgtaacgca

SEQ ID NO: 946 - protein, 529 aa, synthetic construct
  REGION 1..529: note = Variant of terminal deoxynucleotidyltransferase
MHHHHHHGGSGSHGIRTIDSDFGKKRQKKMDNHDSSAIYEIKFHEFVLFILEEKMGATRRTFLTDLARKKGFRVENELSDSVTHIVAENNSGSDVLAWLKTHKMEKTTQFELLDISWLIESMKVGKPVDTKGKYQLMESGVMSANPDPTEGRENILPPTTKTISQYACQRRTTLNNHNQRFTDALEILAENYEFKRNDDTCLTFMRAISVLKCLPFEVVSLKDTEGLPWIGDEVKEIMEEIIEVGESLEVQAVLNDERYQSFKLFKSVFGVGVKTADKWYRMGLRTLEDVRSSKTLLLTPMQKAGLCYYEDLADGVTKAEADAISLLVQDAVWTFDPDALVEITGGFRRGKPFGHDVDLLITSPGAEKEQEDQLLQKVTNLWKKQGLLLYGDLRESRFEDGKLPSRKIDALDHFAKCFLILKLYHHKVDKSKWEMPTGSNESEAKSWKAIRVDLVRCPYDRFAFALLGWTGSRMFERDLRRYATHEKKMMLDNHALYDLTKKIFLKAKSEEEIFAHLGLEYLEPSERNA

SEQ ID NO: 947 - DNA, 1587 bp, synthetic construct
  misc_feature 1..1587: note = Variant of terminal deoxynucleotidyltransferase
  source 1..1587: mol_type = other DNA
atgcaccatcatcatcatcatggcggtagcggcagccacggcattcgtaccatcgattcggacttcgggaagaaacgccagaagaagatggataaccacgatagttccgccatctatgaaatcaaatttcacgagtttgtgctgttcattctcgaagagaaaatgggtgcgacgcgtcgtacttttctgacagatttagcccgcaagaaagggttccgcgtcgagaatgaactgtcagacagcgttacccacatcgtggcagaaaataattcaggatctgacgtattggcttggctgaagactcacaagatggagaagaccacgcaatttgaactgctggatattagctggcttatcgaaagcatgaaagttggtaaaccggtggacaccaaggggaaataccagttgatggaatcgggtgtgatgagtgcgaacccagatccgacagagggtcgtgaaaacattctgcctcctactacgaagaccatttctcagtatgcgtgtcaacgccgcaccaccctgaacaaccataatcaacgttttacggacgcactggaaattcttgcggaaaattacgagttcaaacgcaacgatgatacttgtctgacctttatgcgtgctatttccgtgctgaaatgccttccgtttgaggtagttagcctgaaagacacggaaggattgccctggatcggtgatgaagtcaaagggattatggaagaaatcatcgaggtcggtgaatcgctggaagtgcaggccgtgctcaatgatgagcgctatcaaagcttcaaactgtttaagagtgtctttggagtgggggtgaagacagcagacaaatggtaccgtatgggtctgcgcacgctcgaggatgttcgttccagcaagaccctgaagttgaccccgatgcagaaagcgggtctgtgctattatgaagatcttgctgatggcgttacgaaagccgaagctgacgcgatttctctgctggttcaggatgcagtctggactttcgacccggatgcgctggtggagattacgggtggatttcgtcgtgggaaaccttttggtcacgacgttgatctgcttatcacatctccgggagctgagaaagaacaagaagaccagctcctgcagaaagtgaccaatctgtggaagaaacgagggttgttgctgtacggtgacctgcgtgaaagtcgctttgaagatgggaaactcccatcccgcaagatcgatgccctggaccattttgcgaaatgctttttgatcctcaaactttatcaccataaagtggacaaaagcaaatgggaaatgccgacgggttcgaacgaaagcgaggccaaaagttggaaagcaattcgcgtagatctggttcgttgtccctacgatcgttttgcgtttgcgttgttgggttggaccggaagccgcatgttcgaacgtgatctgcgccgctacgccacccacgagaagaagatgatgctggacaatcatgcgctgtatgacctgaccaagaaaatctttctcaaagctaaatcggaagaggaaattttcgcacatctggggcttgaatacctggaaccgtccgaacgtaacgca

SEQ ID NO: 948 - protein, 529 aa, synthetic construct
  REGION 1..529: note = Variant of terminal deoxynucleotidyltransferase
MHHHHHHGGSGSHGIRTIDSDFGKKRQKKMDNHDSSAIYEIKFHEFVLFILEEKMGATRRTFLTDLARKKGFRVENELSDSVTHIVAENNSGSDVLAWLKTHKMEKTTQFELLDISWLIESMKVGKPVDTKGKYQLMESGVMSANPDPTEGRENILPPTTKTISQYACQRRTTLNNHNQRFTDALEILAENYEFKRNDDTCLTFMRAISVLKCLPFEVVSLKDTEGLPWIGDEVKGIMEEIIEVGESLEVQAVLNDERYQSFKLFKSVFGVGVKTADKWYRMGLRTLEDVRSSKTLKLTPMQKAGLCYYEDLADGVTKAEADAISLLVQDAVWTFDPDALVEITGGFRRGKPFGHDVDLLITSPGAEKEQEDQLLQKVTNLWKKRGLLLYGDLRESRFEDGKLPSRKIDALDHFAKCFLILKLYHHKVDKSKWEMPTGSNESEAKSWKAIRVDLVRCPYDRFAFALLGWTGSRMFERDLRRYATHEKKMMLDNHALYDLTKKIFLKAKSEEEIFAHLGLEYLEPSERNA

SEQ ID NO: 949 - DNA, 1587 bp, synthetic construct
  misc_feature 1..1587: note = Variant of terminal deoxynucleotidyltransferase
  source 1..1587: mol_type = other DNA
atgcaccatcatcatcatcatggcggtagcggcagccacggcattcgtaccatcgattcggacttcgggaagaaacgccagaagaagatggataaccacgatagttccgccatctatgaaatcaaatttcacgagtttgtgctgttcattctcgaagagaaaatgggtgcgacgcgtcgtacttttctgacagatttagcccgcaagaaagggttccgcgtcgagaatgaactgtcagacagcgttacccacatcgtggcagaaaataattcaggatctgacgtattggcttggctgaagactcacaagatggagaagaccacgcaatttgaactgctggatattagctggcttatcgaaagcatgaaagttggtaaaccggtggacaccaaggggaaataccagttgatggaatcgggtgtgatgagtgcgaacccagatccgacagagggtcgtgaaaacattctgcctcctactacgaagaccatttctcagtatgcgtgtcaacgccgcaccaccctgaacaaccataatcaacgttttacggacgcactggaaattcttgcggaaaattacgagttcaaacgcaacgatgatacttgtctgacctttatgcgtgctatttccgtgctgaaatgccttccgtttgaggtagttagcctgaaagacacggaaggattgccctggatcggtgatgaagtcaaagggattatggaagaaatcatcgaggtcggtgaatcgctggaagtgcaggccgtgctcaatgatgagcgctatcaaagcttcaaactgtttaagagtgtctttggagtgggggtgaagacagcagacaaatggtaccgtatgggtctgcgcacgctcgaggatgttcgttccagcaagaccctgaagttgaccccgatgcagaaagcgggtctgtgctattatggggatcttgctgatggcgttacgaaagccgaagctgacgcgatttctctgctggttcaggatgcagtctggactttcgacccggatgcgctggtggagattacgggtggatttcgtcgtgggaaaccttttggtcacgacgttgatctgcttatcacatctccgggagctgagaaagaacaagaagaccagctcctgcagaaagtgaccaatctgtggaagaaacaagggttgttgctgtacggtgacctgcgtgaaagtcgctttgaagatgggaaactcccatcccgcaagatcgatgccctggaccattttgcgaaatgctttctgatcctcaaactttatcaccataaagtggacaaaagcaaatgggaaatgccgacgggttcgaacgaaagcgaggccaaaagttggaaagcaattcgcgtagatctggttcgttgtccctacgatcgttttgcgtttgcgttgttgggttggaccggaagccgcatgttcgaacgtgatctgcgccgctacgccacccacgagaagaagatgatgctggacaatcatgcgctgtatgacctgaccaagaaaatctttctcaaagctaaatcggaagaggaaattttcgcacatctggggcttgaatacctggaaccgtccgaacgtaacgca

SEQ ID NO: 950 - protein, 529 aa, synthetic construct
  REGION 1..529: note = Variant of terminal deoxynucleotidyltransferase
MHHHHHHGGSGSHGIRTIDSDFGKKRQKKMDNHDSSAIYEIKFHEFVLFILEEKMGATRRTFLTDLARKKGFRVENELSDSVTHIVAENNSGSDVLAWLKTHKMEKTTQFELLDISWLIESMKVGKPVDTKGKYQLMESGVMSANPDPTEGRENILPPTTKTISQYACQRRTTLNNHNQRFTDALEILAENYEFKRNDDTCLTFMRAISVLKCLPFEVVSLKDTEGLPWIGDEVKGIMEEIIEVGESLEVQAVLNDERYQSFKLFKSVFGVGVKTADKWYRMGLRTLEDVRSSKTLKLTPMQKAGLCYYGDLADGVTKAEADAISLLVQDAVWTFDPDALVEITGGFRRGKPFGHDVDLLITSPGAEKEQEDQLLQKVTNLWKKQGLLLYGDLRESRFEDGKLPSRKIDALDHFAKCFLILKLYHHKVDKSKWEMPTGSNESEAKSWKAIRVDLVRCPYDRFAFALLGWTGSRMFERDLRRYATHEKKMMLDNHALYDLTKKIFLKAKSEEEIFAHLGLEYLEPSERNA

SEQ ID NO: 951 - DNA, 1587 bp, synthetic construct
  misc_feature 1..1587: note = Variant of terminal deoxynucleotidyltransferase
  source 1..1587: mol_type = other DNA
atgcaccatcatcatcatcatggcggtagcggcagccacggcattcgtaccatcgattcggacttcgggaagaaacgccagaagaagatggataaccacgatagttccgccatctatgaaatcaaatttcacgagtttgtgctgttcattctcgaagagaaaatgggtgcgacgcgtcgtacttttctgacagatttagcccgcaagaaagggttccgcgtcgagaatgaactgtcagacagcgttacccacatcgtggcagaaaataattcaggatctgacgtattggcttggctgaagactcacaagatggagaagaccacgcaatttgaactgctggatattagctggcttatcgaaagcatgaaagttggtaaaccggtggacaccaaggggaaataccagttgatggaatcgggtgtgatgagtgcgaacccagatccgacagagggtcgtgaaaacattctgcctcctactacgaagaccatttctcagtatgcgtgtcaacgccgcaccaccctgaacaaccataatcaacgttttacggacgcactggaaattcttgcggaaaattacgagttcaaacgcaacgatgatacttgtctgacctttatgcgtgctatttccgtgctgaaatgccttccgtttgaggtagttagcctgaaagacacggaaggattgccctggatcggtgatgaagtcaaagggattatggaagaaatcatcgaggtcggtgaatcgctggaagtgcaggccgtgctcaatgatgagcgctatcaaagcttcaaactgtttaagagtgtctttggagtgggggtgaagacagcagacaaatggtacggtatgggtctgcgcacgctcgaggatgttcgttccagcaagaccctgaagttgaccccgatgcagaaagcgggtctgtgctattatgaagatcttgctgatggcgttacgaaagccgaagctgacgcgatttctctgctggttcaggatgcagtctggactttcgacccggatgcgctggtggagattacgggtggatttcgtcgtgggaaaccttttggtcacgacgttgatctgcttatcacatctccgggagctgagaaagaacaagaagaccagctcctgcagaaagtgaccaatctgtggaagaaacaagggttgttgctgtacggtgacctgcgtgaaagtcgctttgaagatgggaaactcccatcccgcaagatcgatgccctggaccattttgcgaaatgctttctgatcctcaaactttatcaccataaagtggacaaaagcaaatgggaaatgccgacgggttcgaacgaaagcgaggccaaaagttggaaagcaattcgcgtagatctggttcgttgtccctacgatcgttttgcgtttgcgttgttgggttggaccggaagccgcatgttcgaacgtgatctgcgccgctacgccacccacgagaagaagatgatgctggacaatcatgcgctgtatgacctgaccaagaaaatctttctcaaagctaaatcggaagaggaaattttcgcacatctggggcttgaatacctggaaccgtccgaacgtaacgca

SEQ ID NO: 952 - protein, 529 aa, synthetic construct
  REGION 1..529: note = Variant of terminal deoxynucleotidyltransferase
MHHHHHHGGSGSHGIRTIDSDFGKKRQKKMDNHDSSAIYEIKFHEFVLFILEEKMGATRRTFLTDLARKKGFRVENELSDSVTHIVAENNSGSDVLAWLKTHKMEKTTQFELLDISWLIESMKVGKPVDTKGKYQLMESGVMSANPDPTEGRENILPPTTKTISQYACQRRTTLNNHNQRFTDALEILAENYEFKRNDDTCLTFMRAISVLKCLPFEVVSLKDTEGLPWIGDEVKGIMEEIIEVGESLEVQAVLNDERYQSFKLFKSVFGVGVKTADKWYGMGLRTLEDVRSSKTLKLTPMQKAGLCYYEDLADGVTKAEADAISLLVQDAVWTFDPDALVEITGGFRRGKPFGHDVDLLITSPGAEKEQEDQLLQKVTNLWKKQGLLLYGDLRESRFEDGKLPSRKIDALDHFAKCFLILKLYHHKVDKSKWEMPTGSNESEAKSWKAIRVDLVRCPYDRFAFALLGWTGSRMFERDLRRYATHEKKMMLDNHALYDLTKKIFLKAKSEEEIFAHLGLEYLEPSERNA

SEQ ID NO: 953 - DNA, 1587 bp, synthetic construct
  misc_feature 1..1587: note = Variant of terminal deoxynucleotidyltransferase
  source 1..1587: mol_type = other DNA
atgcaccatcatcatcatcatggcggtagcggcagccacggcattcgtaccatcgattcggacttcgggaagaaacgccagaagaagatggataaccacgatagttccgccatctatgaaatcaaatttcacgagtttgtgctgttcattctcgaagagaaaatgggtgcgacgcgtcgtacttttctgacagatttagcccgcaagaaagggttccgcgtcgagaatgaactgtcagacagcgttacccacatcgtggcagaaaataattcaggatctgacgtattggcttggctgaagactcacaagatggagaagaccacgcaatttgaactgctggatattagctggcttatcgaaagcatgaaagttggtaaaccggtggacaccaaggggaaataccagttgatggaatcgggtgtgatgagtgcgaacccagatccgacagagggtcgtgaaaacattctgcctcctactacgaagaccatttctcagtatgcgtgtcaacgccgcaccaccctgaacaaccataatcaacgttttacggacgcactggaaattcttgcggaaaattacgagttcaaacgcaacgatgatacttgtctgacctttatgcgtgctatttccgtgctgaaatgccttccgtttgaggtagttagcctgaaagacacggaaggattgccctggatcggtgatgaagtcaaagggattatggaagaaatcatcgaggtcggtgaatcgctggaagtgcaggccgtgctcaatgatgagcgctatcaaagcttcaaactgtttaagagtgtctttggagtgggggtgaagacagcagacaaatggtaccttatgggtctgcgcacgctcgaggatgttcgttccagcaagaccctgaagttgaccccgatgcagaaagcgggtctgtgctattatgaagatcttgctgatggcgttacgaaagccgaagctgacgcgatttctctgctggttcaggatgcagtctggactttcgacccggatgcgctggtggagattacgggtggatttcgtcgtgggaaaccttttggtcacgacgttgatctgcttatcacatctccgggagctgagaaagaacaagaagaccagctcctgcagaaagtgaccaatctgtggaagaaacaagggttgttgctgtacggtgacctgcgtgaaagtcgctttgaagatgggaaactcccatcccgcaagatcgatgccctggaccattttgcgaaatgctttctgatcctcaaactttatcaccataaagtggacaaaagcaaatgggaaatgccgacgggttcgaacgaaagcgaggccaaaagttggaaagcaattcgcgtagatctggttcgttgtccctacgatcgttttgcgtttgcgttgttgggttggaccggaagccgcatgttcgaacgtgatctgcgccgctacgccacccacgagaagaagatgatgctggacaatcatgcgctgtatgacctgaccaagaaaatctttctcaaagctaaatcggaagaggaaattttcgcacatctggggcttgaatacctggaaccgtccgaacgtaacgca

SEQ ID NO: 954 - protein, 529 aa, synthetic construct
  REGION 1..529: note = Variant of terminal deoxynucleotidyltransferase
MHHHHHHGGSGSHGIRTIDSDFGKKRQKKMDNHDSSAIYEIKFHEFVLFILEEKMGATRRTFLTDLARKKGFRVENELSDSVTHIVAENNSGSDVLAWLKTHKMEKTTQFELLDISWLIESMKVGKPVDTKGKYQLMESGVMSANPDPTEGRENILPPTTKTISQYACQRRTTLNNHNQRFTDALEILAENYEFKRNDDTCLTFMRAISVLKCLPFEVVSLKDTEGLPWIGDEVKGIMEEIIEVGESLEVQAVLNDERYQSFKLFKSVFGVGVKTADKWYLMGLRTLEDVRSSKTLKLTPMQKAGLCYYEDLADGVTKAEADAISLLVQDAVWTFDPDALVEITGGFRRGKPFGHDVDLLITSPGAEKEQEDQLLQKVTNLWKKQGLLLYGDLRESRFEDGKLPSRKIDALDHFAKCFLILKLYHHKVDKSKWEMPTGSNESEAKSWKAIRVDLVRCPYDRFAFALLGWTGSRMFERDLRRYATHEKKMMLDNHALYDLTKKIFLKAKSEEEIFAHLGLEYLEPSERNA

SEQ ID NO: 955 - DNA, 1587 bp, synthetic construct
  misc_feature 1..1587: note = Variant of terminal deoxynucleotidyltransferase
  source 1..1587: mol_type = other DNA
atgcaccatcatcatcatcatggcggtagcggcagccacggcattcgtaccatcgattcggacttcgggaagaaacgccagaagaagatggataaccacgatagttccgccatctatgaaatcaaatttcacgagtttgtgctgttcattctcgaagagaaaatgggtgcgacgcgtcgtacttttctgacagatttagcccgcaagaaagggttccgcgtcgagaatgaactgtcagacagcgttacccacatcgtggcagaaaataattcaggatctgacgtattggcttggctgaagactcacaagatggagaagaccacgcaatttgaactgctggatattagctggcttatcgaaagcatgaaagttggtaaaccggtggacaccaaggggaaataccagttgatggaatcgggtgtgatgagtgcgaacccagatccgacagagggtcgtgaaaacattctgcctcctactacgaagaccatttctcagtatgcgtgtcaacgccgcaccaccctgaacaaccataatcaacgttttacggacgcactggaaattcttgcggaaaattacgagttcaaacgcaacgatgatacttgtctgacctttatgcgtgctatttccgtgctgaaatgccttccgtttgaggtagttagcctgaaagacacggaaggattgccctggatcggtgatgaagtcaaagggattatggaagaaatcatcgaggtcggtgaatcgctggaagtgcaggccgtgctcaatgatgagcgctatcaaagcttcaaactgtttaagagtgtctttggagtgggggtgaagacagcagacaaatggtaccgtatgggtctgcgcacgctcgaggatgttcgttccagcaagaccctgaagttgaccccgatgcagaaagcgggtctgtgctattatgaagatcttgctgatggcgttacgaaagccgaagctgacgcgatttctctgctggttcaggatgcagtctggactttcgacccggatgcgctggtggagattacgggtggatttcgtcgtgggaaaccttttggtcacgacgttgatctgcttatcacatctccgggagctgagaaagaacaagaagaccagctcctgcagaaagtgaccaatctgtggaagaaacaagggttgttgctgtaccttgacctgcgtgaaagtcgctttgaagatgggaaactcccatcccgcaagatcgatgccctggaccattttgcgaaatgctttctgatcctcaaactttatcaccataaagtggacaaaagcaaatgggaaatgccgacgggttcgaacgaaagcgaggccaaaagttggaaagcaattcgcgtagatctggttcgttgtccctacgatcgttttgcgtttgcgttgttgggttggaccggaagccgcatgttcgaacgtgatctgcgccgctacgccacccacgagaagaagatgatgctggacaatcatgcgctgtatgacctgaccaagaaaatctttctcaaagctaaatcggaagaggaaattttcgcacatctggggcttgaatacctggaaccgtccgaacgtaacgca

SEQ ID NO: 956 - protein, 529 aa, synthetic construct
  REGION 1..529: note = Variant of terminal deoxynucleotidyltransferase
MHHHHHHGGSGSHGIRTIDSDFGKKRQKKMDNHDSSAIYEIKFHEFVLFILEEKMGATRRTFLTDLARKKGFRVENELSDSVTHIVAENNSGSDVLAWLKTHKMEKTTQFELLDISWLIESMKVGKPVDTKGKYQLMESGVMSANPDPTEGRENILPPTTKTISQYACQRRTTLNNHNQRFTDALEILAENYEFKRNDDTCLTFMRAISVLKCLPFEVVSLKDTEGLPWIGDEVKGIMEEIIEVGESLEVQAVLNDERYQSFKLFKSVFGVGVKTADKWYRMGLRTLEDVRSSKTLKLTPMQKAGLCYYEDLADGVTKAEADAISLLVQDAVWTFDPDALVEITGGFRRGKPFGHDVDLLITSPGAEKEQEDQLLQKVTNLWKKQGLLLYLDLRESRFEDGKLPSRKIDALDHFAKCFLILKLYHHKVDKSKWEMPTGSNESEAKSWKAIRVDLVRCPYDRFAFALLGWTGSRMFERDLRRYATHEKKMMLDNHALYDLTKKIFLKAKSEEEIFAHLGLEYLEPSERNA

SEQ ID NO: 957 - DNA, 1587 bp, synthetic construct
  misc_feature 1..1587: note = Variant of terminal deoxynucleotidyltransferase
  source 1..1587: mol_type = other DNA
atgcaccatcatcatcatcatggcggtagcggcagccacggcattcgtaccatcgattcggacttcgggaagaaacgccagaagaagatggataaccacgatagttccgccatctatgaaatcaaatttcacgagtttgtgctgttcattctcgaagagaaaatgggtgcgacgcgtcgtacttttctgacagatttagcccgcaagaaagggttccgcgtcgagaatgaactgtcagacagcgttacccacatcgtggcagaaaataattcaggatctgacgtattggcttggctgaagactcacaagatggagaagaccacgcaatttgaactgctggatattagctggcttatcgaaagcatgaaagttggtaaaccggtggacaccaaggggaaataccagttgatggaatcgggtgtgatgagtgcgaacccagatccgacagagggtcgtgaaaacattctgcctcctactacgaagaccatttctcagtatgcgtgtcaacgccgcaccaccctgaacaaccataatcaacgttttacggacgcactggaaattcttgcggaaaattacgagttcaaacgcaacgatgatacttgtctgacctttatgcgtgctatttccgtgctgaaatgccttccgtttgaggtagttagcctgaaagacacggaaggattgccctggatcggtgatgaagtcaaagggattatggaagaaatcatcgaggtcggtgaatcgctggaagtgcaggccgtgctcaatgatgagcgctatcaaagcttcaaactgtttaagagtgtctttggagtgggggtgaagacagcagacaaatggtaccgtatgggtctgcgcacgctcgaggatgttcgttccagcaagaccctgaagttgaccccgatgcagaatgcgggtctgtgctattatgaagatcttgctgatggcgttacgaaagccgaagctgacgcgatttctctgctggttcaggatgcagtctggactttcgacccggatgcgctggtggagattacgggtggatttcgtcgtgggaaaccttttggtcacgacgttgatctgcttatcacatctccgggagctgagaaagaacaagaagaccagctcctgcagaaagtgaccaatctgtggaagaaacaagggttgttgctgtacggtgacctgcgtgaaagtcgctttgaagatgggaaactcccatcccgcaagatcgatgccctggaccattttgcgaaatgctttctgatcctcaaactttatcaccataaagtggacaaaagcaaatgggaaatgccgacgggttcgaacgaaagcgaggccaaaagttggaaagcaattcgcgtagatctggttcgttgtccctacgatcgttttgcgtttgcgttgttgggttggaccggaagccgcatgttcgaacgtgatctgcgccgctacgccacccacgagaagaagatgatgctggacaatcatgcgctgtatgacctgaccaagaaaatctttctcaaagctaaatcggaagaggaaattttcgcacatctggggcttgaatacctggaaccgtccgaacgtaacgca

SEQ ID NO: 958 - protein, 529 aa, synthetic construct
  REGION 1..529: note = Variant of terminal deoxynucleotidyltransferase
MHHHHHHGGSGSHGIRTIDSDFGKKRQKKMDNHDSSAIYEIKFHEFVLFILEEKMGATRRTFLTDLARKKGFRVENELSDSVTHIVAENNSGSDVLAWLKTHKMEKTTQFELLDISWLIESMKVGKPVDTKGKYQLMESGVMSANPDPTEGRENILPPTTKTISQYACQRRTTLNNHNQRFTDALEILAENYEFKRNDDTCLTFMRAISVLKCLPFEVVSLKDTEGLPWIGDEVKGIMEEIIEVGESLEVQAVLNDERYQSFKLFKSVFGVGVKTADKWYRMGLRTLEDVRSSKTLKLTPMQNAGLCYYEDLADGVTKAEADAISLLVQDAVWTFDPDALVEITGGFRRGKPFGHDVDLLITSPGAEKEQEDQLLQKVTNLWKKQGLLLYGDLRESRFEDGKLPSRKIDALDHFAKCFLILKLYHHKVDKSKWEMPTGSNESEAKSWKAIRVDLVRCPYDRFAFALLGWTGSRMFERDLRRYATHEKKMMLDNHALYDLTKKIFLKAKSEEEIFAHLGLEYLEPSERNA

SEQ ID NO: 959 - DNA, 1587 bp, synthetic construct
  misc_feature 1..1587: note = Variant of terminal deoxynucleotidyltransferase
  source 1..1587: mol_type = other DNA
atgcaccatcatcatcatcatggcggtagcggcagccacggcattcgtaccatcgattcggacttcgggaagaaacgccagaagaagatggataaccacgatagttccgccatctatgaaatcaaatttcacgagtttgtgctgttcattctcgaagagaaaatgggtgcgacgcgtcgtacttttctgacagatttagcccgcaagaaagggttccgcgtcgagaatgaactgtcagacagcgttacccacatcgtggcagaaaataattcaggatctgacgtattggcttggctgaagactcacaagatggagaagaccacgcaatttgaactgctggatattagctggcttatcgaaagcatgaaagttggtaaaccggtggacaccaaggggaaataccagttgatggaatcgggtgtgatgagtgcgaacccagatccgacagagggtcgtgaaaacattctgcctcctactacgaagaccatttctcagtatgcgtgtcaacgccgcaccaccctgaacaaccataatcaacgttttacggacgcactggaaattcttgcggaaaattacgagttcaaacgcaacgatgatacttgtctgacctttatgcgtgctatttccgtgctgaaatgccttccgtttgaggtagttagcctgaaagacacggaaggattgccctggatcggtgatgaagtcaaagggattatggaagaaatcatcgaggtcggtgaatcgctggaagtgcaggccgtgctcaatgatgagcgctatcaaagcttcaaactgtttaagagtctttttggagtgggggtgaagacagcagacaaatggtaccgtatgggtctgcgcacgctcgaggatgttcgttccagcaagaccctgaagttgaccccgatgcagaaagcgggtctgtgctattatgaagatcttgctgatggcgttacgaaagccgaagctgacgcgatttctctgctggttcaggatgcagtctggactttcgacccggatgcgctggtggagattacgggtggatttcgtcgtgggaaaccttttggtcacgacgttgatctgcttatcacatctccgggagctgagaaagaacaagaagaccagctcctgcagaaagtgaccaatctgtggaagaaacaagggttgttgctgtacggtgacctgcgtgaaagtcgctttgaagatgggaaactcccatcccgcaagatcgatgccctggaccattttgcgaaatgctttctgatcctcaaactttatcaccataaagtggacaaaagcaaatgggaaatgccgacgggttcgaacgaaagcgaggccaaaagttggaaagcaattcgcgtagatctggttcgttgtccctacgatcgttttgcgtttgcgttgttgggttggaccggaagccgcatgttcgaacgtgatctgcgccgctacgccacccacgagaagaagatgatgctggacaatcatgcgctgtatgacctgaccaagaaaatctttctcaaagctaaatcggaagaggaaattttcgcacatctggggcttgaatacctggaaccgtccgaacgtaacgca

SEQ ID NO: 960 - protein, 529 aa, synthetic construct
  REGION 1..529: note = Variant of terminal deoxynucleotidyltransferase
MHHHHHHGGSGSHGIRTIDSDFGKKRQKKMDNHDSSAIYEIKFHEFVLFILEEKMGATRRTFLTDLARKKGFRVENELSDSVTHIVAENNSGSDVLAWLKTHKMEKTTQFELLDISWLIESMKVGKPVDTKGKYQLMESGVMSANPDPTEGRENILPPTTKTISQYACQRRTTLNNHNQRFTDALEILAENYEFKRNDDTCLTFMRAISVLKCLPFEVVSLKDTEGLPWIGDEVKGIMEEIIEVGESLEVQAVLNDERYQSFKLFKSLFGVGVKTADKWYRMGLRTLEDVRSSKTLKLTPMQKAGLCYYEDLADGVTKAEADAISLLVQDAVWTFDPDALVEITGGFRRGKPFGHDVDLLITSPGAEKEQEDQLLQKVTNLWKKQGLLLYGDLRESRFEDGKLPSRKIDALDHFAKCFLILKLYHHKVDKSKWEMPTGSNESEAKSWKAIRVDLVRCPYDRFAFALLGWTGSRMFERDLRRYATHEKKMMLDNHALYDLTKKIFLKAKSEEEIFAHLGLEYLEPSERNA

SEQ ID NO: 961 - DNA, 1587 bp, synthetic construct
  misc_feature 1..1587: note = Variant of terminal deoxynucleotidyltransferase
  source 1..1587: mol_type = other DNA
atgcaccatcatcatcatcatggcggtagcggcagccacggcattcgtaccatcgattcggacttcgggaagaaacgccagaagaagatggataaccacgatagttccgccatctatgaaatcaaatttcacgagtttgtgctgttcattctcgaagagaaaatgggtgcgacgcgtcgtacttttctgacagatttagcccgcaagaaagggttccgcgtcgagaatgaactgtcagacagcgttacccacatcgtggcagaaaataattcaggatctgacgtattggcttggctgaagactcacaagatggagaagaccacgcaatttgaactgctggatattagctggcttatcgaaagcatgaaagttggtaaaccggtggacaccaaggggaaataccagttgatggaatcgggtgtgatgagtgcgaacccagatccgacagagggtcgtgaaaacattctgcctcctactacgaagaccatttctcagtatgcgtgtcaacgccgcaccaccctgaacaaccataatcaacgttttacggacgcactggaaattcttgcggaaaattacgagttcaaacgcaacgatgatacttgtctgacctttatgcgtgctatttccgtgctgaaatgccttccgtttgaggtagttagcctgaaagacacggaaggattgccctggatcggtgatgaagtcaaagggattatggaagaaatcatcgaggtcggtgaatcgctggaagtgcaggccgtgctcaatgatgagcgctatcaaagcttcaaactgtttaagagtgtctttggagtgggggtgaagacagcagacaaatggtaccgtatgggtctgcgcacgctcgaggatgttcgttccagcaagaccctgaagttgaccccgatgcagaaagcgggtctgtgctattatgaagatcttgctgatggcgttacgaaagccgaagctgacgcgatttctctgctggttcaggatgcagtctggactttcgacccggatgcgctggtggagattacgggtggatttcgtcgtgggaaaccttttggtcacgacgttgatctgcttatcacatctccgggagctgagaaagaacaagaagaccagctcctgcagaaagtgaccaatctgtggaagaaacaagggttgttgctgtacggtgacctgcgtgaaagtcgctttgaagatgggaaactcccatcccgcaagatcgatgccctggaccattttgcgaaatgctttgggatcctcaaactttatcaccataaagtggacaaaagcaaatgggaaatgccgacgggttcgaacgaaagcgaggccaaaagttggaaagcaattcgcgtagatctggttcgttgtccctacgatcgttttgcgtttgcgttgttgggttggaccggaagccgcatgttcgaacgtgatctgcgccgctacgccacccacgagaagaagatgatgctggacaatcatgcgctgtatgacctgaccaagaaaatctttctcaaagctaaatcggaagaggaaattttcgcacatctggggcttgaatacctggaaccgtccgaacgtaacgca

SEQ ID NO: 962 - protein, 529 aa, synthetic construct
  REGION 1..529: note = Variant of terminal deoxynucleotidyltransferase
MHHHHHHGGSGSHGIRTIDSDFGKKRQKKMDNHDSSAIYEIKFHEFVLFILEEKMGATRRTFLTDLARKKGFRVENELSDSVTHIVAENNSGSDVLAWLKTHKMEKTTQFELLDISWLIESMKVGKPVDTKGKYQLMESGVMSANPDPTEGRENILPPTTKTISQYACQRRTTLNNHNQRFTDALEILAENYEFKRNDDTCLTFMRAISVLKCLPFEVVSLKDTEGLPWIGDEVKGIMEEIIEVGESLEVQAVLNDERYQSFKLFKSVFGVGVKTADKWYRMGLRTLEDVRSSKTLKLTPMQKAGLCYYEDLADGVTKAEADAISLLVQDAVWTFDPDALVEITGGFRRGKPFGHDVDLLITSPGAEKEQEDQLLQKVTNLWKKQGLLLYGDLRESRFEDGKLPSRKIDALDHFAKCFGILKLYHHKVDKSKWEMPTGSNESEAKSWKAIRVDLVRCPYDRFAFALLGWTGSRMFERDLRRYATHEKKMMLDNHALYDLTKKIFLKAKSEEEIFAHLGLEYLEPSERNA

SEQ ID NO: 963 - DNA, 1587 bp, synthetic construct
  misc_feature 1..1587: note = Variant of terminal deoxynucleotidyltransferase
  source 1..1587: mol_type = other DNA
atgcaccatcatcatcatcatggcggtagcggcagccacggcattcgtaccatcgattcggacttcgggaagaaacgccagaagaagatggataaccacgatagttccgccatctatgaaatcaaatttcacgagtttgtgctgttcattctcgaagagaaaatgggtgcgacgcgtcgtacttttctgacagatttagcccgcaagaaagggttccgcgtcgagaatgaactgtcagacagcgttacccacatcgtggcagaaaataattcaggatctgacgtattggcttggctgaagactcacaagatggagaagaccacgcaatttgaactgctggatattagctggcttatcgaaagcatgaaagttggtaaaccggtggacaccaaggggaaataccagttgatggaatcgggtgtgatgagtgcgaacccagatccgacagagggtcgtgaaaacattctgcctcctactacgaagaccatttctcagtatgcgtgtcaacgccgcaccaccctgaacaaccataatcaacgttttacggacgcactggaaattcttgcggaaaattacgagttcaaacgcaacgatgatacttgtctgacctttatgcgtgctatttccgtgctgaaatgccttccgtttgaggtagttagcctgaaagacacggaaggattgccctggatcggtgatgaagtcaaagggattatggaagaaatcatcgaggtcggtgaatcgctggaagtgcaggccgtgctcaatgatgagcgctatcaaagcttcaaactgtttaagagtgtctttggagtgggggtgaagacagcagacaaatggtaccgtatgggtctgcgcacgctcgaggatgttcgttccagcaagaccctgaagttgaccccgatgcagaaagcgggtctgtgctattatgaagatcttgctgatggcgttacgaaagccgaagctgacgcgatttctctgctggttcaggatgcagtctggactttcgacccggatgcgctggtggagattacgggtggatttcgtcgtgggaaaccttttggtcacgacgttgatctgcttatcacatctccgggagctgagaaagaacaagaagaccagctcctgcagaaagtgaccaatctgtggaagaaacaagggttgttgctgtacggtgacctgcgtgaaagtcgctttgaagatgggaaactcccatcccgcaagatcgatgccctggaccattttgcgaaatgctttctgatcctcaaactttatcaccataaagtggacaaaagcaaatgggaaatgccgacgggttcgaacgaaagcgaggccaaaagttggcgtgcaattcgcgtagatctggttcgttgtccctacgatcgttttgcgtttgcgttgttgggttggaccggaagccgcatgttcgaacgtgatctgcgccgctacgccacccacgagaagaagatgatgctggacaatcatgcgctgtatgacctgaccaagaaaatctttctcaaagctaaatcggaagaggaaattttcgcacatctggggcttgaatacctggaaccgtccgaacgtaacgca

SEQ ID NO: 964 - protein, 529 aa, synthetic construct
  REGION 1..529: note = Variant of terminal deoxynucleotidyltransferase
MHHHHHHGGSGSHGIRTIDSDFGKKRQKKMDNHDSSAIYEIKFHEFVLFILEEKMGATRRTFLTDLARKKGFRVENELSDSVTHIVAENNSGSDVLAWLKTHKMEKTTQFELLDISWLIESMKVGKPVDTKGKYQLMESGVMSANPDPTEGRENILPPTTKTISQYACQRRTTLNNHNQRFTDALEILAENYEFKRNDDTCLTFMRAISVLKCLPFEVVSLKDTEGLPWIGDEVKGIMEEIIEVGESLEVQAVLNDERYQSFKLFKSVFGVGVKTADKWYRMGLRTLEDVRSSKTLKLTPMQKAGLCYYEDLADGVTKAEADAISLLVQDAVWTFDPDALVEITGGFRRGKPFGHDVDLLITSPGAEKEQEDQLLQKVTNLWKKQGLLLYGDLRESRFEDGKLPSRKIDALDHFAKCFLILKLYHHKVDKSKWEMPTGSNESEAKSWRAIRVDLVRCPYDRFAFALLGWTGSRMFERDLRRYATHEKKMMLDNHALYDLTKKIFLKAKSEEEIFAHLGLEYLEPSERNA

SEQ ID NO: 965 - DNA, 1587 bp, synthetic construct
  misc_feature 1..1587: note = Variant of terminal deoxynucleotidyltransferase
  source 1..1587: mol_type = other DNA
atgcaccatcatcatcatcatggcggtagcggcagccacggcattcgtaccatcgattcggacttcgggaagaaacgccagaagaagatggataaccacgatagttccgccatctatgaaatcaaatttcacgagtttgtgctgttcattctcgaagagaaaatgggtgcgacgcgtcgtacttttctgacagatttagcccgcaagaaagggttccgcgtcgagaatgaactgtcagacagcgttacccacatcgtggcagaaaataattcaggatctgacgtattggcttggctgaagactcacaagatggagaagaccacgcaatttgaactgctggatattagctggcttatcgaaagcatgaaagttggtaaaccggtggacaccaaggggaaataccagttgatggaatcgggtgtgatgagtgcgaacccagatccgacagagggtcgtgaaaacattctgcctcctactacgaagaccatttctcagtatgcgtgtcaacgccgcaccaccctgaacaaccataatcaacgttttacggacgcactggaaattcttgcggaaaattacgagttcaaacgcaacgatgatacttgtctgacctttatgcgtgctatttccgtgctgaaatgccttccgtttgaggtagttagcctgaaagacacggaaggattgccctggatcggtgatgaagtcaaagggattatggaagaaatcatcgaggtcggtgaatcgctggaagtgcaggccgtgctcaatgatgagcgctatcaaagcttcaaactgtttaagagtgtctttggagtgggggtgaagacagcagacaaatggtaccgtggtggtctgcgcacgctcgaggatgttcgttccagcaagaccctgaagttgaccccgatgcagaaagcgggtctgtgctattatgaagatcttgctgatggcgttacgaaagccgaagctgacgcgatttctctgctggttcaggatgcagtctggactttcgacccggatgcgctggtggagattacgggtggatttcgtcgtgggaaaccttttggtcacgacgttgatctgcttatcacatctccgggagctgagaaagaacaagaagaccagctcctgcagaaagtgaccaatctgtggaagaaacaagggttgttgctgtacggtgacctgcgtgaaagtcgctttgaagatgggaaactcccatcccgcaagatcgatgccctggaccattttgcgaaatgctttctgatcctcaaactttatcaccataaagtggacaaaagcaaatgggaaatgccgacgggttcgaacgaaagcgaggccaaaagttggaaagcaattcgcgtagatctggttcgttgtccctacgatcgttttgcgtttgcgttgttgggttggaccggaagccgcatgttcgaacgtgatctgcgccgctacgccacccacgagaagaagatgatgctggacaatcatgcgctgtatgacctgaccaagaaaatctttctcaaagctaaatcggaagaggaaattttcgcacatctggggcttgaatacctggaaccgtccgaacgtaacgca

SEQ ID NO: 966 - protein, 529 aa, synthetic construct
  REGION 1..529: note = Variant of terminal deoxynucleotidyltransferase
MHHHHHHGGSGSHGIRTIDSDFGKKRQKKMDNHDSSAIYEIKFHEFVLFILEEKMGATRRTFLTDLARKKGFRVENELSDSVTHIVAENNSGSDVLAWLKTHKMEKTTQFELLDISWLIESMKVGKPVDTKGKYQLMESGVMSANPDPTEGRENILPPTTKTISQYACQRRTTLNNHNQRFTDALEILAENYEFKRNDDTCLTFMRAISVLKCLPFEVVSLKDTEGLPWIGDEVKGIMEEIIEVGESLEVQAVLNDERYQSFKLFKSVFGVGVKTADKWYRGGLRTLEDVRSSKTLKLTPMQKAGLCYYEDLADGVTKAEADAISLLVQDAVWTFDPDALVEITGGFRRGKPFGHDVDLLITSPGAEKEQEDQLLQKVTNLWKKQGLLLYGDLRESRFEDGKLPSRKIDALDHFAKCFLILKLYHHKVDKSKWEMPTGSNESEAKSWKAIRVDLVRCPYDRFAFALLGWTGSRMFERDLRRYATHEKKMMLDNHALYDLTKKIFLKAKSEEEIFAHLGLEYLEPSERNA

SEQ ID NO: 967 - DNA, 1587 bp, synthetic construct
  misc_feature 1..1587: note = Variant of terminal deoxynucleotidyltransferase
  source 1..1587: mol_type = other DNA
atgcaccatcatcatcatcatggcggtagcggcagccacggcattcgtaccatcgattcggacttcgggaagaaacgccagaagaagatggataaccacgatagttccgccatctatgaaatcaaatttcacgagtttgtgctgttcattctcgaagagaaaatgggtgcgacgcgtcgtacttttctgacagatttagcccgcaagaaagggttccgcgtcgagaatgaactgtcagacagcgttacccacatcgtggcagaaaataattcaggatctgacgtattggcttggctgaagactcacaagatggagaagaccacgcaatttgaactgctggatattagctggcttatcgaaagcatgaaagttggtaaaccggtggacaccaaggggaaataccagttgatggaatcgggtgtgatgagtgcgaacccagatccgacagagggtcgtgaaaacattctgcctcctactacgaagaccatttctcagtatgcgtgtcaacgccgcaccaccctgaacaaccataatcaacgttttacggacgcactggaaattcttgcggaaaattacgagttcaaacgcaacgatgatacttgtctgacctttatgcgtgctatttccgtgctgaaatgccttccgtttgaggtagttagcctgaaagacacggaaggattgccctggatcggtgatgaagtcaaagggattatggaagaaatcatcgaggtcggtgaatcgctggaagtgcaggccgtgctcaatgatgagcgctatcaaagcttcaaactgtttaagagtgtctttggagtgggggtgaagacagcagacacgtggtaccgtatgggtctgcgcacgctcgaggatgttcgttccagcaagaccctgaagttgaccccgatgcagaaagcgggtctgtgctattatgaagatcttgctgatggcgttacgaaagccgaagctgacgcgatttctctgctggttcaggatgcagtctggactttcgacccggatgcgctggtggagattacgggtggatttcgtcgtgggaaaccttttggtcacgacgttgatctgcttatcacatctccgggagctgagaaagaacaagaagaccagctcctgcagaaagtgaccaatctgtggaagaaacaagggttgttgctgtacggtgacctgcgtgaaagtcgctttgaagatgggaaactcccatcccgcaagatcgatgccctggaccattttgcgaaatgctttctgatcctcaaactttatcaccataaagtggacaaaagcaaatgggaaatgccgacgggttcgaacgaaagcgaggccaaaagttggaaagcaattcgcgtagatctggttcgttgtccctacgatcgttttgcgtttgcgttgttgggttggaccggaagccgcatgttcgaacgtgatctgcgccgctacgccacccacgagaagaagatgatgctggacaatcatgcgctgtatgacctgaccaagaaaatctttctcaaagctaaatcggaagaggaaattttcgcacatctggggcttgaatacctggaaccgtccgaacgtaacgca

SEQ ID NO: 968 - protein, 529 aa, synthetic construct
  REGION 1..529: note = Variant of terminal deoxynucleotidyltransferase
MHHHHHHGGSGSHGIRTIDSDFGKKRQKKMDNHDSSAIYEIKFHEFVLFILEEKMGATRRTFLTDLARKKGFRVENELSDSVTHIVAENNSGSDVLAWLKTHKMEKTTQFELLDISWLIESMKVGKPVDTKGKYQLMESGVMSANPDPTEGRENILPPTTKTISQYACQRRTTLNNHNQRFTDALEILAENYEFKRNDDTCLTFMRAISVLKCLPFEVVSLKDTEGLPWIGDEVKGIMEEIIEVGESLEVQAVLNDERYQSFKLFKSVFGVGVKTADTWYRMGLRTLEDVRSSKTLKLTPMQKAGLCYYEDLADGVTKAEADAISLLVQDAVWTFDPDALVEITGGFRRGKPFGHDVDLLITSPGAEKEQEDQLLQKVTNLWKKQGLLLYGDLRESRFEDGKLPSRKIDALDHFAKCFLILKLYHHKVDKSKWEMPTGSNESEAKSWKAIRVDLVRCPYDRFAFALLGWTGSRMFERDLRRYATHEKKMMLDNHALYDLTKKIFLKAKSEEEIFAHLGLEYLEPSERNA

SEQ ID NO: 969 - DNA, 1587 bp, synthetic construct
  misc_feature 1..1587: note = Variant of terminal deoxynucleotidyltransferase
  source 1..1587: mol_type = other DNA
atgcaccatcatcatcatcatggcggtagcggcagccacggcattcgtaccatcgattcggacttcgggaagaaacgccagaagaagatggataaccacgatagttccgccatctatgaaatcaaatttcacgagtttgtgctgttcattctcgaagagaaaatgggtgcgacgcgtcgtacttttctgacagatttagcccgcaagaaagggttccgcgtcgagaatgaactgtcagacagcgttacccacatcgtggcagaaaataattcaggatctgacgtattggcttggctgaagactcacaagatggagaagaccacgcaatttgaactgctggatattagctggcttatcgaaagcatgaaagttggtaaaccggtggacaccaaggggaaataccagttgatggaatcgggtgtgatgagtgcgaacccagatccgacagagggtcgtgaaaacattctgcctcctactacgaagaccatttctcagtatgcgtgtcaacgccgcaccaccctgaacaaccataatcaacgttttacggacgcactggaaattcttgcggaaaattacgagttcaaacgcaacgatgatacttgtctgacctttatgcgtgctatttccgtgctgaaatgccttccgtttgaggtagttagcctgaaagacacggaaggattgccctggatcggtgatgaagtcaaagggattatggaagaaatcatcgaggtcggtgaatcgctggaagtgcaggccgtgctcaatgatgagcgctatcaaagcttcaaactgtttaagagtgtctttggagtgggggtgaagacagcagacaaatggtaccgtatgggtctgcgcacgctcgaggatgttcgttccagcaagaccctggatttgaccccgatgcagaaagcgggtctgtgctattatgaagatcttgctgatggcgttacgaaagccgaagctgacgcgatttctctgctggttcaggatgcagtctggactttcgacccggatgcgctggtggagattacgggtggatttcgtcgtgggaaaccttttggtcacgacgttgatctgcttatcacatctccgggagctgagaaagaacaagaagaccagctcctgcagaaagtgaccaatctgtggaagaaacaagggttgttgctgtacggtgacctgcgtgaaagtcgctttgaagatgggaaactcccatcccgcaagatcgatgccctggaccattttgcgaaatgctttctgatcctcaaactttatcaccataaagtggacaaaagcaaatgggaaatgccgacgggttcgaacgaaagcgaggccaaaagttggaaagcaattcgcgtagatctggttcgttgtccctacgatcgttttgcgtttgcgttgttgggttggaccggaagccgcatgttcgaacgtgatctgcgccgctacgccacccacgagaagaagatgatgctggacaatcatgcgctgtatgacctgaccaagaaaatctttctcaaagctaaatcggaagaggaaattttcgcacatctggggcttgaatacctggaaccgtccgaacgtaacgca

SEQ ID NO: 970 - protein, 529 aa, synthetic construct
  REGION 1..529: note = Variant of terminal deoxynucleotidyltransferase
MHHHHHHGGSGSHGIRTIDSDFGKKRQKKMDNHDSSAIYEIKFHEFVLFILEEKMGATRRTFLTDLARKKGFRVENELSDSVTHIVAENNSGSDVLAWLKTHKMEKTTQFELLDISWLIESMKVGKPVDTKGKYQLMESGVMSANPDPTEGRENILPPTTKTISQYACQRRTTLNNHNQRFTDALEILAENYEFKRNDDTCLTFMRAISVLKCLPFEVVSLKDTEGLPWIGDEVKGIMEEIIEVGESLEVQAVLNDERYQSFKLFKSVFGVGVKTADKWYRMGLRTLEDVRSSKTLDLTPMQKAGLCYYEDLADGVTKAEADAISLLVQDAVWTFDPDALVEITGGFRRGKPFGHDVDLLITSPGAEKEQEDQLLQKVTNLWKKQGLLLYGDLRESRFEDGKLPSRKIDALDHFAKCFLILKLYHHKVDKSKWEMPTGSNESEAKSWKAIRVDLVRCPYDRFAFALLGWTGSRMFERDLRRYATHEKKMMLDNHALYDLTKKIFLKAKSEEEIFAHLGLEYLEPSERNA

SEQ ID NO: 971 - DNA, 1587 bp, synthetic construct
  misc_feature 1..1587: note = Variant of terminal deoxynucleotidyltransferase
  source 1..1587: mol_type = other DNA
atgcaccatcatcatcatcatggcggtagcggcagccacggcattcgtaccatcgattcggacttcgggaagaaacgccagaagaagatggataaccacgatagttccgccatctatgaaatcaaatttcacgagtttgtgctgttcattctcgaagagaaaatgggtgcgacgcgtcgtacttttctgacagatttagcccgcaagaaagggttccgcgtcgagaatgaactgtcagacagcgttacccacatcgtggcagaaaataattcaggatctgacgtattggcttggctgaagactcacaagatggagaagaccacgcaatttgaactgctggatattagctggcttatcgaaagcatgaaagttggtaaaccggtggacaccaaggggaaataccagttgatggaatcgggtgtgatgagtgcgaacccagatccgacagagggtcgtgaaaacattctgcctcctactacgaagaccatttctcagtatgcgtgtcaacgccgcaccaccctgaacaaccataatcaacgttttacggacgcactggaaattcttgcggaaaattacgagttcaaacgcaacgatgatacttgtctgacctttatgcgtgctatttccgtgctgaaatgccttccgtttgaggtagttagcctgaaagacacggaaggattgccctggatcggtgatgaagtcaaagggattatggaagaaatcatcgaggtcggtgaatcgctggaagtgcaggccgtgctcaatgatgagcgctatcaaagcttcaaactgtttaagagtgtctttggagtgggggtgaagacagcagacaaatggtaccgtatgggtctgcgcacgctcgaggatgttcgttccagcaagaccctgaagttgaccccgatgcagaaagcgggtctgtgctattatgaagatcttgctgatggcgttacgaaagccgaagctgacgcgatttctctgctggttcaggatgcagtctggactttcgacccggatgcgctggtgaggattacgggtggatttcgtcgtgggaaaccttttggtcacgacgttgatctgcttatcacatctccgggagctgagaaagaacaagaagaccagctcctgcagaaagtgaccaatctgtggaagaaacaagggttgttgctgtacggtgacctgcgtgaaagtcgctttgaagatgggaaactcccatcccgcaagatcgatgccctggaccattttgcgaaatgctttctgatcctcaaactttatcaccataaagtggacaaaagcaaatgggaaatgccgacgggttcgaacgaaagcgaggccaaaagttggaaagcaattcgcgtagatctggttcgttgtccctacgatcgttttgcgtttgcgttgttgggttggaccggaagccgcatgttcgaacgtgatctgcgccgctacgccacccacgagaagaagatgatgctggacaatcatgcgctgtatgacctgaccaagaaaatctttctcaaagctaaatcggaagaggaaattttcgcacatctggggcttgaatacctggaaccgtccgaacgtaacgca

SEQ ID NO: 972 - protein, 529 aa, synthetic construct
  REGION 1..529: note = Variant of terminal deoxynucleotidyltransferase
MHHHHHHGGSGSHGIRTIDSDFGKKRQKKMDNHDSSAIYEIKFHEFVLFILEEKMGATRRTFLTDLARKKGFRVENELSDSVTHIVAENNSGSDVLAWLKTHKMEKTTQFELLDISWLIESMKVGKPVDTKGKYQLMESGVMSANPDPTEGRENILPPTTKTISQYACQRRTTLNNHNQRFTDALEILAENYEFKRNDDTCLTFMRAISVLKCLPFEVVSLKDTEGLPWIGDEVKGIMEEIIEVGESLEVQAVLNDERYQSFKLFKSVFGVGVKTADKWYRMGLRTLEDVRSSKTLKLTPMQKAGLCYYEDLADGVTKAEADAISLLVQDAVWTFDPDALVRITGGFRRGKPFGHDVDLLITSPGAEKEQEDQLLQKVTNLWKKQGLLLYGDLRESRFEDGKLPSRKIDALDHFAKCFLILKLYHHKVDKSKWEMPTGSNESEAKSWKAIRVDLVRCPYDRFAFALLGWTGSRMFERDLRRYATHEKKMMLDNHALYDLTKKIFLKAKSEEEIFAHLGLEYLEPSERNA

SEQ ID NO: 973 - DNA, 1587 bp, synthetic construct
  misc_feature 1..1587: note = Variant of terminal deoxynucleotidyltransferase
  source 1..1587: mol_type = other DNA
atgcaccatcatcatcatcatggcggtagcggcagccacggcattcgtaccatcgattcggacttcgggaagaaacgccagaagaagatggataaccacgatagttccgccatctatgaaatcaaatttcacgagtttgtgctgttcattctcgaagagaaaatgggtgcgacgcgtcgtacttttctgacagatttagcccgcaagaaagggttccgcgtcgagaatgaactgtcagacagcgttacccacatcgtggcagaaaataattcaggatctgacgtattggcttggctgaagactcacaagatggagaagaccacgcaatttgaactgctggatattagctggcttatcgaaagcatgaaagttggtaaaccggtggacaccaaggggaaataccagttgatggaatcgggtgtgatgagtgcgaacccagatccgacagagggtcgtgaaaacattctgcctcctactacgaagaccatttctcagtatgcgtgtcaacgccgcaccaccctgaacaaccataatcaacgttttacggacgcactggaaattcttgcggaaaattacgagttcaaacgcaacgatgatacttgtctgacctttatgcgtgctatttccgtgctgaaatgccttccgtttgaggtagttagcctgaaagacacggaaggattgccctggatcggtgatgaagtcaaagggattatggaagaaatcatcgaggtcggtgaatcgctggaagtgcaggccgtgctcaatgatgagcgctatcaaagcttcaaactgtttaagagtgtctttggagtgggggtgaagacagcagacaaatggtaccgtatgggtctgcgcacgctcgaggatgttcgttccagcaagaccctgaagttgacccgtatgcagaaagcgggtctgtgctattatgaagatcttgctgatggcgttacgaaagccgaagctgacgcgatttctctgctggttcaggatgcagtctggactttcgacccggatgcgctggtggagattacgggtggatttcgtcgtgggaaaccttttggtcacgacgttgatctgcttatcacatctccgggagctgagaaagaacaagaagaccagctcctgcagaaagtgaccaatctgtggaagaaacaagggttgttgctgtacggtgacctgcgtgaaagtcgctttgaagatgggaaactcccatcccgcaagatcgatgccctggaccattttgcgaaatgctttctgatcctcaaactttatcaccataaagtggacaaaagcaaatgggaaatgccgacgggttcgaacgaaagcgaggccaaaagttggaaagcaattcgcgtagatctggttcgttgtccctacgatcgttttgcgtttgcgttgttgggttggaccggaagccgcatgttcgaacgtgatctgcgccgctacgccacccacgagaagaagatgatgctggacaatcatgcgctgtatgacctgaccaagaaaatctttctcaaagctaaatcggaagaggaaattttcgcacatctggggcttgaatacctggaaccgtccgaacgtaacgca

SEQ ID NO: 974 - protein, 529 aa, synthetic construct
  REGION 1..529: note = Variant of terminal deoxynucleotidyltransferase
MHHHHHHGGSGSHGIRTIDSDFGKKRQKKMDNHDSSAIYEIKFHEFVLFILEEKMGATRRTFLTDLARKKGFRVENELSDSVTHIVAENNSGSDVLAWLKTHKMEKTTQFELLDISWLIESMKVGKPVDTKGKYQLMESGVMSANPDPTEGRENILPPTTKTISQYACQRRTTLNNHNQRFTDALEILAENYEFKRNDDTCLTFMRAISVLKCLPFEVVSLKDTEGLPWIGDEVKGIMEEIIEVGESLEVQAVLNDERYQSFKLFKSVFGVGVKTADKWYRMGLRTLEDVRSSKTLKLTRMQKAGLCYYEDLADGVTKAEADAISLLVQDAVWTFDPDALVEITGGFRRGKPFGHDVDLLITSPGAEKEQEDQLLQKVTNLWKKQGLLLYGDLRESRFEDGKLPSRKIDALDHFAKCFLILKLYHHKVDKSKWEMPTGSNESEAKSWKAIRVDLVRCPYDRFAFALLGWTGSRMFERDLRRYATHEKKMMLDNHALYDLTKKIFLKAKSEEEIFAHLGLEYLEPSERNA

SEQ ID NO: 975 - DNA, 1587 bp, synthetic construct
  misc_feature 1..1587: note = Variant of terminal deoxynucleotidyltransferase
  source 1..1587: mol_type = other DNA
atgcaccatcatcatcatcatggcggtagcggcagccacggcattcgtaccatcgattcggacttcgggaagaaacgccagaagaagatggataaccacgatagttccgccatctatgaaatcaaatttcacgagtttgtgctgttcattctcgaagagaaaatgggtgcgacgcgtcgtacttttctgacagatttagcccgcaagaaagggttccgcgtcgagaatgaactgtcagacagcgttacccacatcgtggcagaaaataattcaggatctgacgtattggcttggctgaagactcacaagatggagaagaccacgcaatttgaactgctggatattagctggcttatcgaaagcatgaaagttggtaaaccggtggacaccaaggggaaataccagttgatggaatcgggtgtgatgagtgcgaacccagatccgacagagggtcgtgaaaacattctgcctcctactacgaagaccatttctcagtatgcgtgtcaacgccgcaccaccctgaacaaccataatcaacgttttacggacgcactggaaattcttgcggaaaattacgagttcaaacgcaacgatgatacttgtctgacctttatgcgtgctatttccgtgctgaaatgccttccgtttgaggtagttagcctgaaagacacggaaggattgccctggatcggtgatgaagtcaaagggattatggaagaaatcatcgaggtcggtgaatcgctggaagtgcaggccgtgctcaatgatgagcgctatcaaagcttcaaactgtttaagagtgtctttggagtgggggtgaagacagcagacaaatggtacagtatgggtctgcgcacgctcgaggatgttcgttccagcaagaccctgaagttgaccccgatgcagaaagcgggtctgtgctattatgaagatcttgctgatggcgttacgaaagccgaagctgacgcgatttctctgctggttcaggatgcagtctggactttcgacccggatgcgctggtggagattacgggtggatttcgtcgtgggaaaccttttggtcacgacgttgatctgcttatcacatctccgggagctgagaaagaacaagaagaccagctcctgcagaaagtgaccaatctgtggaagaaacaagggttgttgctgtacggtgacctgcgtgaaagtcgctttgaagatgggaaactcccatcccgcaagatcgatgccctggaccattttgcgaaatgctttctgatcctcaaactttatcaccataaagtggacaaaagcaaatgggaaatgccgacgggttcgaacgaaagcgaggccaaaagttggaaagcaattcgcgtagatctggttcgttgtccctacgatcgttttgcgtttgcgttgttgggttggaccggaagccgcatgttcgaacgtgatctgcgccgctacgccacccacgagaagaagatgatgctggacaatcatgcgctgtatgacctgaccaagaaaatctttctcaaagctaaatcggaagaggaaattttcgcacatctggggcttgaatacctggaaccgtccgaacgtaacgca

SEQ ID NO: 976 - protein, 529 aa, synthetic construct
  REGION 1..529: note = Variant of terminal deoxynucleotidyltransferase
MHHHHHHGGSGSHGIRTIDSDFGKKRQKKMDNHDSSAIYEIKFHEFVLFILEEKMGATRRTFLTDLARKKGFRVENELSDSVTHIVAENNSGSDVLAWLKTHKMEKTTQFELLDISWLIESMKVGKPVDTKGKYQLMESGVMSANPDPTEGRENILPPTTKTISQYACQRRTTLNNHNQRFTDALEILAENYEFKRNDDTCLTFMRAISVLKCLPFEVVSLKDTEGLPWIGDEVKGIMEEIIEVGESLEVQAVLNDERYQSFKLFKSVFGVGVKTADKWYSMGLRTLEDVRSSKTLKLTPMQKAGLCYYEDLADGVTKAEADAISLLVQDAVWTFDPDALVEITGGFRRGKPFGHDVDLLITSPGAEKEQEDQLLQKVTNLWKKQGLLLYGDLRESRFEDGKLPSRKIDALDHFAKCFLILKLYHHKVDKSKWEMPTGSNESEAKSWKAIRVDLVRCPYDRFAFALLGWTGSRMFERDLRRYATHEKKMMLDNHALYDLTKKIFLKAKSEEEIFAHLGLEYLEPSERNA

SEQ ID NO: 977 - DNA, 1587 bp, synthetic construct
  misc_feature 1..1587: note = Variant of terminal deoxynucleotidyltransferase
  source 1..1587: mol_type = other DNA
atgcaccatcatcatcatcatggcggtagcggcagccacggcattcgtaccatcgattcggacttcgggaagaaacgccagaagaagatggataaccacgatagttccgccatctatgaaatcaaatttcacgagtttgtgctgttcattctcgaagagaaaatgggtgcgacgcgtcgtacttttctgacagatttagcccgcaagaaagggttccgcgtcgagaatgaactgtcagacagcgttacccacatcgtggcagaaaataattcaggatctgacgtattggcttggctgaagactcacaagatggagaagaccacgcaatttgaactgctggatattagctggcttatcgaaagcatgaaagttggtaaaccggtggacaccaaggggaaataccagttgatggaatcgggtgtgatgagtgcgaacccagatccgacagagggtcgtgaaaacattctgcctcctactacgaagaccatttctcagtatgcgtgtcaacgccgcaccaccctgaacaaccataatcaacgttttacggacgcactggaaattcttgcggaaaattacgagttcaaacgcaacgatgatacttgtctgacctttatgcgtgctatttccgtgctgaaatgccttccgtttgaggtagttagcctgaaagacacggaaggattgccctggatcggtgatgaagtcaaagggattatggaagaaatcatcgaggtcggtgaatcgctggaagtgcaggccgtgctcaatgatgagcgctatcaaagcttcaaactgtttaagagtgtctttggagtgggggtgaagacagcagacaaatggtacgtgatgggtctgcgcacgctcgaggatgttcgttccagcaagaccctgaagttgaccccgatgcagaaagcgggtctgtgctattatgaagatcttgctgatggcgttacgaaagccgaagctgacgcgatttctctgctggttcaggatgcagtctggactttcgacccggatgcgctggtggagattacgggtggatttcgtcgtgggaaaccttttggtcacgacgttgatctgcttatcacatctccgggagctgagaaagaacaagaagaccagctcctgcagaaagtgaccaatctgtggaagaaacaagggttgttgctgtacggtgacctgcgtgaaagtcgctttgaagatgggaaactcccatcccgcaagatcgatgccctggaccattttgcgaaatgctttctgatcctcaaactttatcaccataaagtggacaaaagcaaatgggaaatgccgacgggttcgaacgaaagcgaggccaaaagttggaaagcaattcgcgtagatctggttcgttgtccctacgatcgttttgcgtttgcgttgttgggttggaccggaagccgcatgttcgaacgtgatctgcgccgctacgccacccacgagaagaagatgatgctggacaatcatgcgctgtatgacctgaccaagaaaatctttctcaaagctaaatcggaagaggaaattttcgcacatctggggcttgaatacctggaaccgtccgaacgtaacgca

SEQ ID NO: 978 - protein, 529 aa, synthetic construct
  REGION 1..529: note = Variant of terminal deoxynucleotidyltransferase
MHHHHHHGGSGSHGIRTIDSDFGKKRQKKMDNHDSSAIYEIKFHEFVLFILEEKMGATRRTFLTDLARKKGFRVENELSDSVTHIVAENNSGSDVLAWLKTHKMEKTTQFELLDISWLIESMKVGKPVDTKGKYQLMESGVMSANPDPTEGRENILPPTTKTISQYACQRRTTLNNHNQRFTDALEILAENYEFKRNDDTCLTFMRAISVLKCLPFEVVSLKDTEGLPWIGDEVKGIMEEIIEVGESLEVQAVLNDERYQSFKLFKSVFGVGVKTADKWYVMGLRTLEDVRSSKTLKLTPMQKAGLCYYEDLADGVTKAEADAISLLVQDAVWTFDPDALVEITGGFRRGKPFGHDVDLLITSPGAEKEQEDQLLQKVTNLWKKQGLLLYGDLRESRFEDGKLPSRKIDALDHFAKCFLILKLYHHKVDKSKWEMPTGSNESEAKSWKAIRVDLVRCPYDRFAFALLGWTGSRMFERDLRRYATHEKKMMLDNHALYDLTKKIFLKAKSEEEIFAHLGLEYLEPSERNA

SEQ ID NO: 979 - DNA, 1587 bp, synthetic construct
  misc_feature 1..1587: note = Variant of terminal deoxynucleotidyltransferase
  source 1..1587: mol_type = other DNA
atgcaccatcatcatcatcatggcggtagcggcagccacggcattcgtaccatcgattcggacttcgggaagaaacgccagaagaagatggataaccacgatagttccgccatctatgaaatcaaatttcacgagtttgtgctgttcattctcgaagagaaaatgggtgcgacgcgtcgtacttttctgacagatttagcccgcaagaaagggttccgcgtcgagaatgaactgtcagacagcgttacccacatcgtggcagaaaataattcaggatctgacgtattggcttggctgaagactcacaagatggagaagaccacgcaatttgaactgctggatattagctggcttatcgaaagcatgaaagttggtaaaccggtggacaccaaggggaaataccagttgatggaatcgggtgtgatgagtgcgaacccagatccgacagagggtcgtgaaaacattctgcctcctactacgaagaccatttctcagtatgcgtgtcaacgccgcaccaccctgaacaaccataatcaacgttttacggacgcactggaaattcttgcggaaaattacgagttcaaacgcaacgatgatacttgtctgacctttatgcgtgctatttccgtgctgaaatgccttccgtttgaggtagttagcctgaaagacacggaaggattgccctggatcggtgatgaagtcaaagggattatggaagaaatcatcgaggtcggtgaatcgctggaagtgcaggccgtgctcaatgatgagcgctatcaaagcttcaaactgtttaagagtgtctttggagtgggggtgaagacagcagacaaatggtaccgtatgggtctgcgcacgctcgaggatgttcgttccagcaagaccctgaagttgaccccgatgcagagtgcgggtctgtgctattatgaagatcttgctgatggcgttacgaaagccgaagctgacgcgatttctctgctggttcaggatgcagtctggactttcgacccggatgcgctggtggagattacgggtggatttcgtcgtgggaaaccttttggtcacgacgttgatctgcttatcacatctccgggagctgagaaagaacaagaagaccagctcctgcagaaagtgaccaatctgtggaagaaacaagggttgttgctgtacggtgacctgcgtgaaagtcgctttgaagatgggaaactcccatcccgcaagatcgatgccctggaccattttgcgaaatgctttctgatcctcaaactttatcaccataaagtggacaaaagcaaatgggaaatgccgacgggttcgaacgaaagcgaggccaaaagttggaaagcaattcgcgtagatctggttcgttgtccctacgatcgttttgcgtttgcgttgttgggttggaccggaagccgcatgttcgaacgtgatctgcgccgctacgccacccacgagaagaagatgatgctggacaatcatgcgctgtatgacctgaccaagaaaatctttctcaaagctaaatcggaagaggaaattttcgcacatctggggcttgaatacctggaaccgtccgaacgtaacgca

SEQ ID NO: 980 - protein, 529 aa, synthetic construct
  REGION 1..529: note = Variant of terminal deoxynucleotidyltransferase
MHHHHHHGGSGSHGIRTIDSDFGKKRQKKMDNHDSSAIYEIKFHEFVLFILEEKMGATRRTFLTDLARKKGFRVENELSDSVTHIVAENNSGSDVLAWLKTHKMEKTTQFELLDISWLIESMKVGKPVDTKGKYQLMESGVMSANPDPTEGRENILPPTTKTISQYACQRRTTLNNHNQRFTDALEILAENYEFKRNDDTCLTFMRAISVLKCLPFEVVSLKDTEGLPWIGDEVKGIMEEIIEVGESLEVQAVLNDERYQSFKLFKSVFGVGVKTADKWYRMGLRTLEDVRSSKTLKLTPMQSAGLCYYEDLADGVTKAEADAISLLVQDAVWTFDPDALVEITGGFRRGKPFGHDVDLLITSPGAEKEQEDQLLQKVTNLWKKQGLLLYGDLRESRFEDGKLPSRKIDALDHFAKCFLILKLYHHKVDKSKWEMPTGSNESEAKSWKAIRVDLVRCPYDRFAFALLGWTGSRMFERDLRRYATHEKKMMLDNHALYDLTKKIFLKAKSEEEIFAHLGLEYLEPSERNA

SEQ ID NO: 981 - DNA, 1587 bp, synthetic construct
  misc_feature 1..1587: note = Variant of terminal deoxynucleotidyltransferase
  source 1..1587: mol_type = other DNA
atgcaccatcatcatcatcatggcggtagcggcagccacggcattcgtaccatcgattcggacttcgggaagaaacgccagaagaagatggataaccacgatagttccgccatctatgaaatcaaatttcacgagtttgtgctgttcattctcgaagagaaaatgggtgcgacgcgtcgtacttttctgacagatttagcccgcaagaaagggttccgcgtcgagaatgaactgtcagacagcgttacccacatcgtggcagaaaataattcaggatctgacgtattggcttggctgaagactcacaagatggagaagaccacgcaatttgaactgctggatattagctggcttatcgaaagcatgaaagttggtaaaccggtggacaccaaggggaaataccagttgatggaatcgggtgtgatgagtgcgaacccagatccgacagagggtcgtgaaaacattctgcctcctactacgaagaccatttctcagtatgcgtgtcaacgccgcaccaccctgaacaaccataatcaacgttttacggacgcactggaaattcttgcggaaaattacgagttcaaacgcaacgatgatacttgtctgacctttatgcgtgctatttccgtgctgaaatgccttccgtttgaggtagttagcctgaaagacacggaaggattgccctggatcggtgatgaagtcaaagggattatggaagaaatcatcgaggtcggtgaatcgctggaagtgcaggccgtgctcaatgatgagcgctatcaaagcttcaaactgtttaagagtgtctttggagtgggggtgaagacagcagacaaatggtaccgtatgggtctgcgcacgctcgaggatgttcgttccagcaagaccctgtctttgaccccgatgcagaaagcgggtctgtgctattatgaagatcttgctgatggcgttacgaaagccgaagctgacgcgatttctctgctggttcaggatgcagtctggactttcgacccggatgcgctggtggagattacgggtggatttcgtcgtgggaaaccttttggtcacgacgttgatctgcttatcacatctccgggagctgagaaagaacaagaagaccagctcctgcagaaagtgaccaatctgtggaagaaacaagggttgttgctgtacggtgacctgcgtgaaagtcgctttgaagatgggaaactcccatcccgcaagatcgatgccctggaccattttgcgaaatgctttctgatcctcaaactttatcaccataaagtggacaaaagcaaatgggaaatgccgacgggttcgaacgaaagcgaggccaaaagttggaaagcaattcgcgtagatctggttcgttgtccctacgatcgttttgcgtttgcgttgttgggttggaccggaagccgcatgttcgaacgtgatctgcgccgctacgccacccacgagaagaagatgatgctggacaatcatgcgctgtatgacctgaccaagaaaatctttctcaaagctaaatcggaagaggaaattttcgcacatctggggcttgaatacctggaaccgtccgaacgtaacgca

SEQ ID NO: 982 - protein, 529 aa, synthetic construct
  REGION 1..529: note = Variant of terminal deoxynucleotidyltransferase
MHHHHHHGGSGSHGIRTIDSDFGKKRQKKMDNHDSSAIYEIKFHEFVLFILEEKMGATRRTFLTDLARKKGFRVENELSDSVTHIVAENNSGSDVLAWLKTHKMEKTTQFELLDISWLIESMKVGKPVDTKGKYQLMESGVMSANPDPTEGRENILPPTTKTISQYACQRRTTLNNHNQRFTDALEILAENYEFKRNDDTCLTFMRAISVLKCLPFEVVSLKDTEGLPWIGDEVKGIMEEIIEVGESLEVQAVLNDERYQSFKLFKSVFGVGVKTADKWYRMGLRTLEDVRSSKTLSLTPMQKAGLCYYEDLADGVTKAEADAISLLVQDAVWTFDPDALVEITGGFRRGKPFGHDVDLLITSPGAEKEQEDQLLQKVTNLWKKQGLLLYGDLRESRFEDGKLPSRKIDALDHFAKCFLILKLYHHKVDKSKWEMPTGSNESEAKSWKAIRVDLVRCPYDRFAFALLGWTGSRMFERDLRRYATHEKKMMLDNHALYDLTKKIFLKAKSEEEIFAHLGLEYLEPSERNA

SEQ ID NO: 983 - DNA, 1587 bp, synthetic construct
  misc_feature 1..1587: note = Variant of terminal deoxynucleotidyltransferase
  source 1..1587: mol_type = other DNA
atgcaccatcatcatcatcatggcggtagcggcagccacggcattcgtaccatcgattcggacttcgggaagaaacgccagaagaagatggataaccacgatagttccgccatctatgaaatcaaatttcacgagtttgtgctgttcattctcgaagagaaaatgggtgcgacgcgtcgtacttttctgacagatttagcccgcaagaaagggttccgcgtcgagaatgaactgtcagacagcgttacccacatcgtggcagaaaataattcaggatctgacgtattggcttggctgaagactcacaagatggaaaagaccacgcaatttgaactgctggatattagctggcttatcgaaagcatgaaagttggtaaaccggtggacaccaaggggaaataccagttgatggaatcgggtgtgatgagtgcgaacccagatccgacagagggtcgtgaaaacattctgcctcctactacgaagaccatttctcagtatgcgtgtcaacgccgcaccaccctgaacaaccataatcaacgttttacggacgcactggaaattcttgcggaaaattacgagttcaaacgcaacgatgatacttgtctgacctttatgcgtgctatttccgtgctgaaatgccttccgtttgaggtagttagcctgaaagacacggaaggattgccctggatcggtgatgaagtcaaagggattatggaagaaatcatcgaggtcggtgaatcgctggaagtgcaggccgtgctcaatgatgagcgctatcaaagcttcaaactgtttaagagtgtctttggagtgggggtgaagacagcagacaaatggtaccgtatgggtctgcgcacgctcgaggatgttcgttccagcaagaccctgaagttgaccccgatgcagaaagcgggtctgtgctattatgaagatcttgctgatggcgttacgaaagccgaagctgacgcgatttctctgctggttcaggatgcagtctggactttcgacccggatgcgctggtggagattacgggtggatttcgtcgtgggaaaccttttggtcacgacgttgatctgcttatcacatctccgggagctgagaaagaacaagaagaccagctcctgcagaaagtgaccaatctgtggaagaaacaagggttgttgctgtacggtgacctgcgtgaaagtcgctttgaagatgggaaactcccatcccgcaagatcgatgccctggacttttttgcgaaatgctttctgatcctcaaactttatcaccataaagtggacaaaagcaaatgggaaatgccgacgggttcgaacgaaagcgaggccaaaagttggaaagcaattcgcgtagatctggttcgttgtccctacgatcgttttgcgtttgcgttgttgggttggaccggaagccgcatgttcgaacgtgatctgcgccgctacgccacccacgagaagaagatgatgctggacaatcatgcgctgtatgacctgaccaagaaaatctttctcaaagctaaatcggaagaggaaattttcgcacatctggggcttgaatacctggaaccgtccgaacgtaacgca

SEQ ID NO: 984 - protein, 529 aa, synthetic construct
  REGION 1..529: note = Variant of terminal deoxynucleotidyltransferase
MHHHHHHGGSGSHGIRTIDSDFGKKRQKKMDNHDSSAIYEIKFHEFVLFILEEKMGATRRTFLTDLARKKGFRVENELSDSVTHIVAENNSGSDVLAWLKTHKMEKTTQFELLDISWLIESMKVGKPVDTKGKYQLMESGVMSANPDPTEGRENILPPTTKTISQYACQRRTTLNNHNQRFTDALEILAENYEFKRNDDTCLTFMRAISVLKCLPFEVVSLKDTEGLPWIGDEVKGIMEEIIEVGESLEVQAVLNDERYQSFKLFKSVFGVGVKTADKWYRMGLRTLEDVRSSKTLKLTPMQKAGLCYYEDLADGVTKAEADAISLLVQDAVWTFDPDALVEITGGFRRGKPFGHDVDLLITSPGAEKEQEDQLLQKVTNLWKKQGLLLYGDLRESRFEDGKLPSRKIDALDFFAKCFLILKLYHHKVDKSKWEMPTGSNESEAKSWKAIRVDLVRCPYDRFAFALLGWTGSRMFERDLRRYATHEKKMMLDNHALYDLTKKIFLKAKSEEEIFAHLGLEYLEPSERNA

SEQ ID NO: 985 - DNA, 1587 bp, synthetic construct
  misc_feature 1..1587: note = Variant of terminal deoxynucleotidyltransferase
  source 1..1587: mol_type = other DNA
atgcaccatcatcatcatcatggcggtagcggcagccacggcattcgtaccatcgattcggacttcgggaagaaacgccagaagaagatggataaccacgatagttccgccatctatgaaatcaaatttcacgagtttgtgctgttcattctcgaagagaaaatgggtgcgacgcgtcgtacttttctgacagatttagcccgcaagaaagggttccgcgtcgagaatgaactgtcagacagcgttacccacatcgtggcagaaaataattcaggatctgacgtattggcttggctgaagactcacaagatggagaagaccacgcaatttgaactgctggatattagctggcttatcgaaagcatgaaagttggtaaaccggtggacaccaaggggaaataccagttgatggaatcgggtgtgatgagtgcgaacccagatccgacagagggtcgtgaaaacattctgcctcctactacgaagaccatttctcagtatgcgtgtcaacgccgcaccaccctgaacaaccataatcaacgttttacggacgcactggaaattcttgcggaaaattacgagttcaaacgcaacgatgatacttgtctgacctttatgcgtgctatttccgtgctgaaatgccttccgtttgaggtagttagcctgaaagacacggaaggattgccctggatcggtgatgaagtcaaagggattatggaagaaatcatcgaggtcggtgaatcgctggaagtgcaggccgtgctcaatgatgagcgctatcaaagcttcaaactgtttaagagtgtctttggagtgggggtgaagacagcagacaaatggtaccgttggggtctgcgcacgctcgaggatgttcgttccagcaagaccctgaagttgaccccgatgcagaaagcgggtctgtgctattatgaagatcttgctgatggcgttacgaaagccgaagctgacgcgatttctctgctggttcaggatgcagtctggactttcgacccggatgcgctggtggagattacgggtggatttcgtcgtgggaaaccttttggtcacgacgttgatctgcttatcacatctccgggagctgagaaagaacaagaagaccagctcctgcagaaagtgaccaatctgtggaagaaacaagggttgttgctgtacggtgacctgcgtgaaagtcgctttgaagatgggaaactcccatcccgcaagatcgatgccctggaccattttgcgaaatgctttctgatcctcaaactttatcaccataaagtggacaaaagcaaatgggaaatgccgacgggttcgaacgaaagcgaggccaaaagttggaaagcaattcgcgtagatctggttcgttgtccctacgatcgttttgcgtttgcgttgttgggttggaccggaagccgcatgttcgaacgtgatctgcgccgctacgccacccacgagaagaagatgatgctggacaatcatgcgctgtatgacctgaccaagaaaatctttctcaaagctaaatcggaagaggaaattttcgcacatctggggcttgaatacctggaaccgtccgaacgtaacgca

SEQ ID NO: 986 - protein, 529 aa, synthetic construct
  REGION 1..529: note = Variant of terminal deoxynucleotidyltransferase
MHHHHHHGGSGSHGIRTIDSDFGKKRQKKMDNHDSSAIYEIKFHEFVLFILEEKMGATRRTFLTDLARKKGFRVENELSDSVTHIVAENNSGSDVLAWLKTHKMEKTTQFELLDISWLIESMKVGKPVDTKGKYQLMESGVMSANPDPTEGRENILPPTTKTISQYACQRRTTLNNHNQRFTDALEILAENYEFKRNDDTCLTFMRAISVLKCLPFEVVSLKDTEGLPWIGDEVKGIMEEIIEVGESLEVQAVLNDERYQSFKLFKSVFGVGVKTADKWYRWGLRTLEDVRSSKTLKLTPMQKAGLCYYEDLADGVTKAEADAISLLVQDAVWTFDPDALVEITGGFRRGKPFGHDVDLLITSPGAEKEQEDQLLQKVTNLWKKQGLLLYGDLRESRFEDGKLPSRKIDALDHFAKCFLILKLYHHKVDKSKWEMPTGSNESEAKSWKAIRVDLVRCPYDRFAFALLGWTGSRMFERDLRRYATHEKKMMLDNHALYDLTKKIFLKAKSEEEIFAHLGLEYLEPSERNA

SEQ ID NO: 987 - DNA, 1587 bp, synthetic construct
  misc_feature 1..1587: note = Variant of terminal deoxynucleotidyltransferase
  source 1..1587: mol_type = other DNA
atgcaccatcatcatcatcatggcggtagcggcagccacggcattcgtaccatcgattcggacttcgggaagaaacgccagaagaagatggataaccacgatagttccgccatctatgaaatcaaatttcacgagtttgtgctgttcattctcgaagagaaaatgggtgcgacgcgtcgtacttttctgacagatttagcccgcaagaaagggttccgcgtcgagaatgaactgtcagacagcgttacccacatcgtggcagaaaataattcaggatctgacgtattggcttggctgaagactcacaagatggagaagaccacgcaatttgaactgctggatattagctggcttatcgaaagcatgaaagttggtaaaccggtggacaccaaggggaaataccagttgatggaatcgggtgtgatgagtgcgaacccagatccgacagagggtcgtgaaaacattctgcctcctactacgaagaccatttctcagtatgcgtgtcaacgccgcaccaccctgaacaaccataatcaacgttttacggacgcactggaaattcttgcggaaaattacgagttcaaacgcaacgatgatacttgtctgacctttatgcgtgctatttccgtgctgaaatgccttccgtttgaggtagttagcctgaaagacacggaaggattgccctggatcggtgatgaagtcaaagggattatggaagaaatcatcgaggtcggtgaatcgctggaagtgcaggccgtgctcaatgatgagcgctatcaaagcttcaaactgtttaagagtgtctttggagtgggggtgaagacagcagacaaatggtaccgtatgggtctgcgcacgctcgaggatgttcgttccagcaagaccctgaagttgaccccgatgcagaaagcgggtctgtgctattatgaagatcttgctgatggcgttacgaaagccgaagctgacgcgatttctctgctggttcaggatgcagtctggactttcgacccggatgcgctggtggagattacgggtggatttcgtcgtgggaaaccttttggtcacgacgttgatctgcttatcacatctccgggagctgagaaagaacaagaagaccagctcctgcagaaagtgaccaatctgtggaagaaacaagggttgttgctgtacggtgacctgcgtgaaagtcgctttgaagatgggaaactcccatcccgcaagatcgatgccctggaccattttgcgaaatgctttctgatcctcaaactttatcaccataaagtggacaaaagcaaatgggaaatgccgacgggttcgaacgaaagcgaggccaaaagttggaaagcaattcgcgtagatctggttcgttgtccctacgatcgttttgcgtttgcgttgttgggttggaccggaagccgcatgttcgtgcgtgatctgcgccgctacgccacccacgagaagaagatgatgctggacaatcatgcgctgtatgacctgaccaagaaaatctttctcaaagctaaatcggaagaggaaattttcgcacatctggggcttgaatacctggaaccgtccgaacgtaacgca

SEQ ID NO: 988 - protein, 529 aa, synthetic construct
  REGION 1..529: note = Variant of terminal deoxynucleotidyltransferase
MHHHHHHGGSGSHGIRTIDSDFGKKRQKKMDNHDSSAIYEIKFHEFVLFILEEKMGATRRTFLTDLARKKGFRVENELSDSVTHIVAENNSGSDVLAWLKTHKMEKTTQFELLDISWLIESMKVGKPVDTKGKYQLMESGVMSANPDPTEGRENILPPTTKTISQYACQRRTTLNNHNQRFTDALEILAENYEFKRNDDTCLTFMRAISVLKCLPFEVVSLKDTEGLPWIGDEVKGIMEEIIEVGESLEVQAVLNDERYQSFKLFKSVFGVGVKTADKWYRMGLRTLEDVRSSKTLKLTPMQKAGLCYYEDLADGVTKAEADAISLLVQDAVWTFDPDALVEITGGFRRGKPFGHDVDLLITSPGAEKEQEDQLLQKVTNLWKKQGLLLYGDLRESRFEDGKLPSRKIDALDHFAKCFLILKLYHHKVDKSKWEMPTGSNESEAKSWKAIRVDLVRCPYDRFAFALLGWTGSRMFVRDLRRYATHEKKMMLDNHALYDLTKKIFLKAKSEEEIFAHLGLEYLEPSERNA

SEQ ID NO: 989 - DNA, 1587 bp, synthetic construct
  misc_feature 1..1587: note = Variant of terminal deoxynucleotidyltransferase
  source 1..1587: mol_type = other DNA
atgcaccatcatcatcatcatggcggtagcggcagccacggcattcgtaccatcgattcggacttcgggaagaaacgccagaagaagatggataaccacgatagttccgccatctatgaaatcaaatttcacgagtttgtgctgttcattctcgaagagaaaatgggtgcgacgcgtcgtacttttctgacagatttagcccgcaagaaagggttccgcgtcgagaatgaactgtcagacagcgttacccacatcgtggcagaaaataattcaggatctgacgtattggcttggctgaagactcacaagatggagaagaccacgcaatttgaactgctggatattagctggcttatcgaaagcatgaaagttggtaaaccggtggacaccaaggggaaataccagttgatggaatcgggtgtgatgagtgcgaacccagatccgacagagggtcgtgaaaacattctgcctcctactacgaagaccatttctcagtatgcgtgtcaacgccgcaccaccctgaacaaccataatcaacgttttacggacgcactggaaattcttgcggaaaattacgagttcaaacgcaacgatgatacttgtctgacctttatgcgtgctatttccgtgctgaaatgccttccgtttgaggtagttagcctgaaagacacggaaggattgccctggatcggtgatgaagtcaaagggattatggaagaaatcatcgaggtcggtgaatcgctggaagtgcaggccgtgctcaatgatgagcgctatcaaagcttcaaactgtttaagagtgtctttggagtgggggtgaagacagcagacaaatggtacgctatgggtctgcgcacgctcgaggatgttcgttccagcaagaccctgaagttgaccccgatgcagaaagcgggtctgtgctattatgaagatcttgctgatggcgttacgaaagccgaagctgacgcgatttctctgctggttcaggatgcagtctggactttcgacccggatgcgctggtggagattacgggtggatttcgtcgtgggaaaccttttggtcacgacgttgatctgcttatcacatctccgggagctgagaaagaacaagaagaccagctcctgcagaaagtgaccaatctgtggaagaaacaagggttgttgctgtacggtgacctgcgtgaaagtcgctttgaagatgggaaactcccatcccgcaagatcgatgccctggaccattttgcgaaatgctttctgatcctcaaactttatcaccataaagtggacaaaagcaaatgggaaatgccgacgggttcgaacgaaagcgaggccaaaagttggaaagcaattcgcgtagatctggttcgttgtccctacgatcgttttgcgtttgcgttgttgggttggaccggaagccgcatgttcgaacgtgatctgcgccgctacgccacccacgagaagaagatgatgctggacaatcatgcgctgtatgacctgaccaagaaaatctttctcaaagctaaatcggaagaggaaattttcgcacatctggggcttgaatacctggaaccgtccgaacgtaacgca

SEQ ID NO: 990 - protein, 529 aa, synthetic construct
  REGION 1..529: note = Variant of terminal deoxynucleotidyltransferase
MHHHHHHGGSGSHGIRTIDSDFGKKRQKKMDNHDSSAIYEIKFHEFVLFILEEKMGATRRTFLTDLARKKGFRVENELSDSVTHIVAENNSGSDVLAWLKTHKMEKTTQFELLDISWLIESMKVGKPVDTKGKYQLMESGVMSANPDPTEGRENILPPTTKTISQYACQRRTTLNNHNQRFTDALEILAENYEFKRNDDTCLTFMRAISVLKCLPFEVVSLKDTEGLPWIGDEVKGIMEEIIEVGESLEVQAVLNDERYQSFKLFKSVFGVGVKTADKWYAMGLRTLEDVRSSKTLKLTPMQKAGLCYYEDLADGVTKAEADAISLLVQDAVWTFDPDALVEITGGFRRGKPFGHDVDLLITSPGAEKEQEDQLLQKVTNLWKKQGLLLYGDLRESRFEDGKLPSRKIDALDHFAKCFLILKLYHHKVDKSKWEMPTGSNESEAKSWKAIRVDLVRCPYDRFAFALLGWTGSRMFERDLRRYATHEKKMMLDNHALYDLTKKIFLKAKSEEEIFAHLGLEYLEPSERNA

SEQ ID NO: 991 - DNA, 1587 bp, synthetic construct
  misc_feature 1..1587: note = Variant of terminal deoxynucleotidyltransferase
  source 1..1587: mol_type = other DNA
atgcaccatcatcatcatcatggcggtagcggcagccacggcattcgtaccatcgattcggacttcgggaagaaacgccagaagaagatggataaccacgatagttccgccatctatgaaatcaaatttcacgagtttgtgctgttcattctcgaagagaaaatgggtgcgacgcgtcgtacttttctgacagatttagcccgcaagaaagggttccgcgtcgagaatgaactgtcagacagcgttacccacatcgtggcagaaaataattcaggatctgacgtattggcttggctgaagactcacaagatggagaagaccacgcaatttgaactgctggatattagctggcttatcgaaagcatgaaagttggtaaaccggtggacaccaaggggaaataccagttgatggaatcgggtgtgatgagtgcgaacccagatccgacagagggtcgtgaaaacattctgcctcctactacgaagaccatttctcagtatgcgtgtcaacgccgcaccaccctgaacaaccataatcaacgttttacggacgcactggaaattcttgcggaaaattacgagttcaaacgcaacgatgatacttgtctgacctttatgcgtgctatttccgtgctgaaatgccttccgtttgaggtagttagcctgaaagacacggaaggattgccctggatcggtgatgaagtcaaagggattatggaagaaatcatcgaggtcggtgaatcgctggaagtgcaggccgtgctcaatgatgagcgctatcaaagcttcaaactgtttaagagtgtctttggagtgggggtgaagacagcagacaaatggtaccgtatgggtctgcgcacgctcgaggatgttcgttccagcaagaccctgaagttgaccccgatgcagaaagcgggtctgtgctattatgaagatcttgctgatggcgttacgaaagccgaagctgacgcgatttctctgctggttcaggatgcagtctggactttcgacccggatgcgctggtggagattacgggtggatttcgtcgtgggaaaccttttggtcacgacgttgatctgcttatcacatctccgggagctgagaaagaacaagaagaccagctcctgcagaaagtgaccaatctgtggaagaaacaagggttgttgctgtacggtgacctgcgtgaaagtcgctttgaagatgggaaactcccatcccgcaagatcgatgccctggactgttttgcgaaatgctttctgatcctcaaactttatcaccataaagtggacaaaagcaaatgggaaatgccgacgggttcgaacgaaagcgaggccaaaagttggaaagcaattcgcgtagatctggttcgttgtccctacgatcgttttgcgtttgcgttgttgggttggaccggaagccgcatgttcgaacgtgatctgcgccgctacgccacccacgagaagaagatgatgctggacaatcatgcgctgtatgacctgaccaagaaaatctttctcaaagctaaatcggaagaggaaattttcgcacatctggggcttgaatacctggaaccgtccgaacgtaacgca

SEQ ID NO: 992 - protein, 529 aa, synthetic construct
  REGION 1..529: note = Variant of terminal deoxynucleotidyltransferase
MHHHHHHGGSGSHGIRTIDSDFGKKRQKKMDNHDSSAIYEIKFHEFVLFILEEKMGATRRTFLTDLARKKGFRVENELSDSVTHIVAENNSGSDVLAWLKTHKMEKTTQFELLDISWLIESMKVGKPVDTKGKYQLMESGVMSANPDPTEGRENILPPTTKTISQYACQRRTTLNNHNQRFTDALEILAENYEFKRNDDTCLTFMRAISVLKCLPFEVVSLKDTEGLPWIGDEVKGIMEEIIEVGESLEVQAVLNDERYQSFKLFKSVFGVGVKTADKWYRMGLRTLEDVRSSKTLKLTPMQKAGLCYYEDLADGVTKAEADAISLLVQDAVWTFDPDALVEITGGFRRGKPFGHDVDLLITSPGAEKEQEDQLLQKVTNLWKKQGLLLYGDLRESRFEDGKLPSRKIDALDCFAKCFLILKLYHHKVDKSKWEMPTGSNESEAKSWKAIRVDLVRCPYDRFAFALLGWTGSRMFERDLRRYATHEKKMMLDNHALYDLTKKIFLKAKSEEEIFAHLGLEYLEPSERNA

SEQ ID NO: 993 - DNA, 1587 bp, synthetic construct
  misc_feature 1..1587: note = Variant of terminal deoxynucleotidyltransferase
  source 1..1587: mol_type = other DNA
atgcaccatcatcatcatcatggcggtagcggcagccacggcattcgtaccatcgattcggacttcgggaagaaacgccagaagaagatggataaccacgatagttccgccatctatgaaatcaaatttcacgagtttgtgctgttcattctcgaagagaaaatgggtgcgacgcgtcgtacttttctgacagatttagcccgcaagaaagggttccgcgtcgagaatgaactgtcagacagcgttacccacatcgtggcagaaaataattcaggatctgacgtattggcttggctgaagactcacaagatggagaagaccacgcaatttgaactgctggatattagctggcttatcgaaagcatgaaagttggtaaaccggtggacaccaaggggaaataccagttgatggaatcgggtgtgatgagtgcgaacccagatccgacagagggtcgtgaaaacattctgcctcctactacgaagaccatttctcagtatgcgtgtcaacgccgcaccaccctgaacaaccataatcaacgttttacggacgcactggaaattcttgcggaaaattacgagttcaaacgcaacgatgatacttgtctgacctttatgcgtgctatttccgtgctgaaatgccttccgtttgaggtagttagcctgaaagacacggaaggattgccctggatcggtgatgaagtcaaagggattatggaagaaatcatcgaggtcggtgaatcgctggaagtgcaggccgtgctcaatgatgagcgctatcaaagcttcaaactgtttaagagtgtctttggagtgggggtgaagacagcagacaaatggtaccgtatgggtctgcgcacgctcgaggatgttcgttccagcaagaccctgaagttgaccccgatgcagaaagcgggtctgtgctattatgaagatcttgctgatggcgttacgaaagccgaagctgacgcgatttctctgctggttcaggatgcagtctggactttcgacccggatgcgctggtggagattacgggtggatttcgtcgtgggaaaccttttggtcacgacgttgatctgcttatcacatctccgggagctgagaaagaacaagaagaccagctcctgcagaaagtgaccaatctgtggaagaaacaagggttgttgctgtacggtgacctgcgtgaaagtcgctttgaagatgggaaactcccatcccgcaagatcgatgccctggacgtgtttgcgaaatgctttctgatcctcaaactttatcaccataaagtggacaaaagcaaatgggaaatgccgacgggttcgaacgaaagcgaggccaaaagttggaaagcaattcgcgtagatctggttcgttgtccctacgatcgttttgcgtttgcgttgttgggttggaccggaagccgcatgttcgaacgtgatctgcgccgctacgccacccacgagaagaagatgatgctggacaatcatgcgctgtatgacctgaccaagaaaatctttctcaaagctaaatcggaagaggaaattttcgcacatctggggcttgaatacctggaaccgtccgaacgtaacgca

SEQ ID NO: 994 - protein, 529 aa, synthetic construct
  REGION 1..529: note = Variant of terminal deoxynucleotidyltransferase
MHHHHHHGGSGSHGIRTIDSDFGKKRQKKMDNHDSSAIYEIKFHEFVLFILEEKMGATRRTFLTDLARKKGFRVENELSDSVTHIVAENNSGSDVLAWLKTHKMEKTTQFELLDISWLIESMKVGKPVDTKGKYQLMESGVMSANPDPTEGRENILPPTTKTISQYACQRRTTLNNHNQRFTDALEILAENYEFKRNDDTCLTFMRAISVLKCLPFEVVSLKDTEGLPWIGDEVKGIMEEIIEVGESLEVQAVLNDERYQSFKLFKSVFGVGVKTADKWYRMGLRTLEDVRSSKTLKLTPMQKAGLCYYEDLADGVTKAEADAISLLVQDAVWTFDPDALVEITGGFRRGKPFGHDVDLLITSPGAEKEQEDQLLQKVTNLWKKQGLLLYGDLRESRFEDGKLPSRKIDALDVFAKCFLILKLYHHKVDKSKWEMPTGSNESEAKSWKAIRVDLVRCPYDRFAFALLGWTGSRMFERDLRRYATHEKKMMLDNHALYDLTKKIFLKAKSEEEIFAHLGLEYLEPSERNA

SEQ ID NO: 995 - DNA, 1587 bp, synthetic construct
  misc_feature 1..1587: note = Variant of terminal deoxynucleotidyltransferase
  source 1..1587: mol_type = other DNA
atgcaccatcatcatcatcatggcggtagcggcagccacggcattcgtaccatcgattcggacttcgggaagaaacgccagaagaagatggataaccacgatagttccgccatctatgaaatcaaatttcacgagtttgtgctgttcattctcgaagagaaaatgggtgcgacgcgtcgtacttttctgacagatttagcccgcaagaaagggttccgcgtcgagaatgaactgtcagacagcgttacccacatcgtggcagaaaataattcaggatctgacgtattggcttggctgaagactcacaagatggagaagaccacgcaatttgaactgctggatattagctggcttatcgaaagcatgaaagttggtaaaccggtggacaccaaggggaaataccagttgatggaatcgggtgtgatgagtgcgaacccagatccgacagagggtcgtgaaaacattctgcctcctactacgaagaccatttctcagtatgcgtgtcaacgccgcaccaccctgaacaaccataatcaacgttttacggacgcactggaaattcttgcggaaaattacgagttcaaacgcaacgatgatacttgtctgacctttatgcgtgctatttccgtgctgaaatgccttccgtttgaggtagttagcctgaaagacacggaaggattgccctggatcggtgatgaagtcaaagggattatggaagaaatcatcgaggtcggtgaatcgctggaagtgcaggccgtgctcaatgatgagtcttatcaaagcttcaaactgtttaagagtgtctttggagtgggggtgaagacagcagacaaatggtaccgtatgggtctgcgcacgctcgaggatgttcgttccagcaagaccctgaagttgaccccgatgcagaaagcgggtctgtgctattatgaagatcttgctgatggcgttacgaaagccgaagctgacgcgatttctctgctggttcaggatgcagtctggactttcgacccggatgcgctggtggagattacgggtggatttcgtcgtgggaaaccttttggtcacgacgttgatctgcttatcacatctccgggagctgagaaagaacaagaagaccagctcctgcagaaagtgaccaatctgtggaagaaacaagggttgttgctgtacggtgacctgcgtgaaagtcgctttgaagatgggaaactcccatcccgcaagatcgatgccctggaccattttgcgaaatgctttctgatcctcaaactttatcaccataaagtggacaaaagcaaatgggaaatgccgacgggttcgaacgaaagcgaggccaaaagttggaaagcaattcgcgtagatctggttcgttgtccctacgatcgttttgcgtttgcgttgttgggttggaccggaagccgcatgttcgaacgtgatctgcgccgctacgccacccacgagaagaagatgatgctggacaatcatgcgctgtatgacctgaccaagaaaatctttctcaaagctaaatcggaagaggaaattttcgcacatctggggcttgaatacctggaaccgtccgaacgtaacgca

SEQ ID NO: 996 - protein, 529 aa, synthetic construct
  REGION 1..529: note = Variant of terminal deoxynucleotidyltransferase
MHHHHHHGGSGSHGIRTIDSDFGKKRQKKMDNHDSSAIYEIKFHEFVLFILEEKMGATRRTFLTDLARKKGFRVENELSDSVTHIVAENNSGSDVLAWLKTHKMEKTTQFELLDISWLIESMKVGKPVDTKGKYQLMESGVMSANPDPTEGRENILPPTTKTISQYACQRRTTLNNHNQRFTDALEILAENYEFKRNDDTCLTFMRAISVLKCLPFEVVSLKDTEGLPWIGDEVKGIMEEIIEVGESLEVQAVLNDESYQSFKLFKSVFGVGVKTADKWYRMGLRTLEDVRSSKTLKLTPMQKAGLCYYEDLADGVTKAEADAISLLVQDAVWTFDPDALVEITGGFRRGKPFGHDVDLLITSPGAEKEQEDQLLQKVTNLWKKQGLLLYGDLRESRFEDGKLPSRKIDALDHFAKCFLILKLYHHKVDKSKWEMPTGSNESEAKSWKAIRVDLVRCPYDRFAFALLGWTGSRMFERDLRRYATHEKKMMLDNHALYDLTKKIFLKAKSEEEIFAHLGLEYLEPSERNA

SEQ ID NO: 997 - DNA, 1587 bp, synthetic construct
  misc_feature 1..1587: note = Variant of terminal deoxynucleotidyltransferase
  source 1..1587: mol_type = other DNA
atgcaccatcatcatcatcatggcggtagcggcagccacggcattcgtaccatcgattcggacttcgggaagaaacgccagaagaagatggataaccacgatagttccgccatctatgaaatcaaatttcacgagtttgtgctgttcattctcgaagagaaaatgggtgcgacgcgtcgtacttttctgacagatttagcccgcaagaaagggttccgcgtcgagaatgaactgtcagacagcgttacccacatcgtggcagaaaataattcaggatctgacgtattggcttggctgaagactcacaagatggagaagaccacgcaatttgaactgctggatattagctggcttatcgaaagcatgaaagttggtaaaccggtggacaccaaggggaaataccagttgatggaatcgggtgtgatgagtgcgaacccagatccgacagagggtcgtgaaaacattctgcctcctactacgaagaccatttctcagtatgcgtgtcaacgccgcaccaccctgaacaaccataatcaacgttttacggacgcactggaaattcttgcggaaaattacgagttcaaacgcaacgatgatacttgtctgacctttatgcgtgctatttccgtgctgaaatgccttccgtttgaggtagttagcctgaaagacacggaaggattgccctggatcggtgatgaagtcaaagggattatggaagaaatcatcgaggtcggtgaatcgctggaagtgcaggccgtgctcaatgatgagcgctatcaaagcttcaaactgtttaagagtgtctttggagtgggggtgaagacagcagacaaatggtaccgtatgggtctgcgcacgctcgaggatgttcgttccagcaagaccctgaagttgaccccgatgcagaaagcgggtctgtgctggtatgaagatcttgctgatggcgttacgaaagccgaagctgacgcgatttctctgctggttcaggatgcagtctggactttcgacccggatgcgctggtggagattacgggtggatttcgtcgtgggaaaccttttggtcacgacgttgatctgcttatcacatctccgggagctgagaaagaacaagaagaccagctcctgcagaaagtgaccaatctgtggaagaaacaagggttgttgctgtacggtgacctgcgtgaaagtcgctttgaagatgggaaactcccatcccgcaagatcgatgccctggaccattttgcgaaatgctttctgatcctcaaactttatcaccataaagtggacaaaagcaaatgggaaatgccgacgggttcgaacgaaagcgaggccaaaagttggaaagcaattcgcgtagatctggttcgttgtccctacgatcgttttgcgtttgcgttgttgggttggaccggaagccgcatgttcgaacgtgatctgcgccgctacgccacccacgagaagaagatgatgctggacaatcatgcgctgtatgacctgaccaagaaaatctttctcaaagctaaatcggaagaggaaattttcgcacatctggggcttgaatacctggaaccgtccgaacgtaacgca

SEQ ID NO: 998 - protein, 529 aa, synthetic construct
  REGION 1..529: note = Variant of terminal deoxynucleotidyltransferase
MHHHHHHGGSGSHGIRTIDSDFGKKRQKKMDNHDSSAIYEIKFHEFVLFILEEKMGATRRTFLTDLARKKGFRVENELSDSVTHIVAENNSGSDVLAWLKTHKMEKTTQFELLDISWLIESMKVGKPVDTKGKYQLMESGVMSANPDPTEGRENILPPTTKTISQYACQRRTTLNNHNQRFTDALEILAENYEFKRNDDTCLTFMRAISVLKCLPFEVVSLKDTEGLPWIGDEVKGIMEEIIEVGESLEVQAVLNDERYQSFKLFKSVFGVGVKTADKWYRMGLRTLEDVRSSKTLKLTPMQKAGLCWYEDLADGVTKAEADAISLLVQDAVWTFDPDALVEITGGFRRGKPFGHDVDLLITSPGAEKEQEDQLLQKVTNLWKKQGLLLYGDLRESRFEDGKLPSRKIDALDHFAKCFLILKLYHHKVDKSKWEMPTGSNESEAKSWKAIRVDLVRCPYDRFAFALLGWTGSRMFERDLRRYATHEKKMMLDNHALYDLTKKIFLKAKSEEEIFAHLGLEYLEPSERNA

SEQ ID NO: 999 - DNA, 1587 bp, synthetic construct
  misc_feature 1..1587: note = Variant of terminal deoxynucleotidyltransferase
  source 1..1587: mol_type = other DNA
atgcaccatcatcatcatcatggcggtagcggcagccacggcattcgtaccatcgattcggacttcgggaagaaacgccagaagaagatggataaccacgatagttccgccatctatgaaatcaaatttcacgagtttgtgctgttcattctcgaagagaaaatgggtgcgacgcgtcgtacttttctgacagatttagcccgcaagaaagggttccgcgtcgagaatgaactgtcagacagcgttacccacatcgtggcagaaaataattcaggatctgacgtattggcttggctgaagactcacaagatggagaagaccacgcaatttgaactgctggatattagctggcttatcgaaagcatgaaagttggtaaaccggtggacaccaaggggaaataccagttgatggaatcgggtgtgatgagtgcgaacccagatccgacagagggtcgtgaaaacattctgcctcctactacgaagaccatttctcagtatgcgtgtcaacgccgcaccaccctgaacaaccataatcaacgttttacggacgcactggaaattcttgcggaaaattacgagttcaaacgcaacgatgatacttgtctgacctttgagcgtgctatttccgtgctgaaatgccttccgtttgaggtagttagcctgaaagacacggaaggattgccctggatcggtgatgaagtcaaagggattatggaagaaatcatcgaggtcggtgaatcgctggaagtgcaggccgtgctcaatgatgagcgctatcaaagcttcaaactgtttaagagtgtctttggagtgggggtgaagacagcagacaaatggtaccgtatgggtctgcgcacgctcgaggatgttcgttccagcaagaccctgaagttgaccccgatgcagaaagcgggtctgtgctattatgaagatcttgctgatggcgttacgaaagccgaagctgacgcgatttctctgctggttcaggatgcagtctggactttcgacccggatgcgctggtggagattacgggtggatttcgtcgtgggaaaccttttggtcacgacgttgatctgcttatcacatctccgggagctgagaaagaacaagaagaccagctcctgcagaaagtgaccaatctgtggaagaaacaagggttgttgctgtacggtgacctgcgtgaaagtcgctttgaagatgggaaactcccatcccgcaagatcgatgccctggaccattttgcgaaatgctttctgatcctcaaactttatcaccataaagtggacaaaagcaaatgggaaatgccgacgggttcgaacgaaagcgaggccaaaagttggaaagcaattcgcgtagatctggttcgttgtccctacgatcgttttgcgtttgcgttgttgggttggaccggaagccgcatgttcgaacgtgatctgcgccgctacgccacccacgagaagaagatgatgctggacaatcatgcgctgtatgacctgaccaagaaaatctttctcaaagctaaatcggaagaggaaattttcgcacatctggggcttgaatacctggaaccgtccgaacgtaacgca

SEQ ID NO: 1000 - protein, 529 aa, synthetic construct
  REGION 1..529: note = Variant of terminal deoxynucleotidyltransferase
MHHHHHHGGSGSHGIRTIDSDFGKKRQKKMDNHDSSAIYEIKFHEFVLFILEEKMGATRRTFLTDLARKKGFRVENELSDSVTHIVAENNSGSDVLAWLKTHKMEKTTQFELLDISWLIESMKVGKPVDTKGKYQLMESGVMSANPDPTEGRENILPPTTKTISQYACQRRTTLNNHNQRFTDALEILAENYEFKRNDDTCLTFERAISVLKCLPFEVVSLKDTEGLPWIGDEVKGIMEEIIEVGESLEVQAVLNDERYQSFKLFKSVFGVGVKTADKWYRMGLRTLEDVRSSKTLKLTPMQKAGLCYYEDLADGVTKAEADAISLLVQDAVWTFDPDALVEITGGFRRGKPFGHDVDLLITSPGAEKEQEDQLLQKVTNLWKKQGLLLYGDLRESRFEDGKLPSRKIDALDHFAKCFLILKLYHHKVDKSKWEMPTGSNESEAKSWKAIRVDLVRCPYDRFAFALLGWTGSRMFERDLRRYATHEKKMMLDNHALYDLTKKIFLKAKSEEEIFAHLGLEYLEPSERNA

SEQ ID NO: 1001 - DNA, 1587 bp, synthetic construct
  misc_feature 1..1587: note = Variant of terminal deoxynucleotidyltransferase
  source 1..1587: mol_type = other DNA
atgcaccatcatcatcatcatggcggtagcggcagccacggcattcgtaccatcgattcggacttcgggaagaaacgccagaagaagatggataaccacgatagttccgccatctatgaaatcaaatttcacgagtttgtgctgttcattctcgaagagaaaatgggtgcgacgcgtcgtacttttctgacagatttagcccgcaagaaagggttccgcgtcgagaatgaactgtcagacagcgttacccacatcgtggcagaaaataattcaggatctgacgtattggcttggctgaagactcacaagatggagaagaccacgcaatttgaactgctggatattagctggcttatcgaaagcatgaaagttggtaaaccggtggacaccaaggggaaataccagttgatggaatcgggtgtgatgagtgcgaacccagatccgacagagggtcgtgaaaacattctgcctcctactacgaagaccatttctcagtatgcgtgtcaacgccgcaccaccctgaacaaccataatcaacgttttacggacgcactggaaattcttgcggaaaattacgagttcaaacgcaacgatgatacttgtctgacctttatgcgtgctatttccgtgctgaaatgccttccgtttgaggtagttagcctgaaagacacggaaggattgccctggatcggtgatgaagtcaaagggattatggaagaaatcatcgaggtcggtgaatcgctggaagtgcaggccgtgctcaatgatgagtggtatcaaagcttcaaactgtttaagagtgtctttggagtgggggtgaagacagcagacaaatggtaccgtatgggtctgcgcacgctcgaggatgttcgttccagcaagaccctgaagttgaccccgatgcagaaagcgggtctgtgctattatgaagatcttgctgatggcgttacgaaagccgaagctgacgcgatttctctgctggttcaggatgcagtctggactttcgacccggatgcgctggtggagattacgggtggatttcgtcgtgggaaaccttttggtcacgacgttgatctgcttatcacatctccgggagctgagaaagaacaagaagaccagctcctgcagaaagtgaccaatctgtggaagaaacaagggttgttgctgtacggtgacctgcgtgaaagtcgctttgaagatgggaaactcccatcccgcaagatcgatgccctggaccattttgcgaaatgctttctgatcctcaaactttatcaccataaagtggacaaaagcaaatgggaaatgccgacgggttcgaacgaaagcgaggccaaaagttggaaagcaattcgcgtagatctggttcgttgtccctacgatcgttttgcgtttgcgttgttgggttggaccggaagccgcatgttcgaacgtgatctgcgccgctacgccacccacgagaagaagatgatgctggacaatcatgcgctgtatgacctgaccaagaaaatctttctcaaagctaaatcggaagaggaaattttcgcacatctggggcttgaatacctggaaccgtccgaacgtaacgca

SEQ ID NO: 1002 - protein, 529 aa, synthetic construct
  REGION 1..529: note = Variant of terminal deoxynucleotidyltransferase
MHHHHHHGGSGSHGIRTIDSDFGKKRQKKMDNHDSSAIYEIKFHEFVLFILEEKMGATRRTFLTDLARKKGFRVENELSDSVTHIVAENNSGSDVLAWLKTHKMEKTTQFELLDISWLIESMKVGKPVDTKGKYQLMESGVMSANPDPTEGRENILPPTTKTISQYACQRRTTLNNHNQRFTDALEILAENYEFKRNDDTCLTFMRAISVLKCLPFEVVSLKDTEGLPWIGDEVKGIMEEIIEVGESLEVQAVLNDEWYQSFKLFKSVFGVGVKTADKWYRMGLRTLEDVRSSKTLKLTPMQKAGLCYYEDLADGVTKAEADAISLLVQDAVWTFDPDALVEITGGFRRGKPFGHDVDLLITSPGAEKEQEDQLLQKVTNLWKKQGLLLYGDLRESRFEDGKLPSRKIDALDHFAKCFLILKLYHHKVDKSKWEMPTGSNESEAKSWKAIRVDLVRCPYDRFAFALLGWTGSRMFERDLRRYATHEKKMMLDNHALYDLTKKIFLKAKSEEEIFAHLGLEYLEPSERNA

SEQ ID NO: 1003 - DNA, 1587 bp, synthetic construct
  misc_feature 1..1587: note = Variant of terminal deoxynucleotidyltransferase
  source 1..1587: mol_type = other DNA
atgcaccatcatcatcatcatggcggtagcggcagccacggcattcgtaccatcgattcggacttcgggaagaaacgccagaagaagatggataaccacgatagttccgccatctatgaaatcaaatttcacgagtttgtgctgttcattctcgaagagaaaatgggtgcgacgcgtcgtacttttctgacagatttagcccgcaagaaagggttccgcgtcgagaatgaactgtcagacagcgttacccacatcgtggcagaaaataattcaggatctgacgtattggcttggctgaagactcacaagatggagaagaccacgcaatttgaactgctggatattagctggcttatcgaaagcatgaaagttggtaaaccggtggacaccaaggggaaataccagttgatggaatcgggtgtgatgagtgcgaacccagatccgacagagggtcgtgaaaacattctgcctcctactacgaagaccatttctcagtatgcgtgtcaacgccgcaccaccctgaacaaccataatcaacgttttacggacgcactggaaattcttgcggaaaattacgagttcaaacgcaacgatgatacttgtctgacctttatgcgtgctatttccgtgctgaaatgccttccgtttgaggtagttagcctgaaagacacggaaggattgccctggatcggtgatgaagtcaaagggattatggaagaaatcatcgaggtcggtgaatcgctggaagtgcaggccgtgctcaatgatgagcgctatcaaagcttcaaactgtttaagagtgtctttggagtgggggtgaagacagcagacaaatggtaccgtatgggtctgcgcacgctcgaggatgttcgttccagcaagaccctgaagttgaccccgatgcagaaagcgggtctgtgctattatgaagatcttgctgattcggttacgaaagccgaagctgacgcgatttctctgctggttcaggatgcagtctggactttcgacccggatgcgctggtggagattacgggtggatttcgtcgtgggaaaccttttggtcacgacgttgatctgcttatcacatctccgggagctgagaaagaacaagaagaccagctcctgcagaaagtgaccaatctgtggaagaaacaagggttgttgctgtacggtgacctgcgtgaaagtcgctttgaagatgggaaactcccatcccgcaagatcgatgccctggaccattttgcgaaatgctttctgatcctcaaactttatcaccataaagtggacaaaagcaaatgggaaatgccgacgggttcgaacgaaagcgaggccaaaagttggaaagcaattcgcgtagatctggttcgttgtccctacgatcgttttgcgtttgcgttgttgggttggaccggaagccgcatgttcgaacgtgatctgcgccgctacgccacccacgagaagaagatgatgctggacaatcatgcgctgtatgacctgaccaagaaaatctttctcaaagctaaatcggaagaggaaattttcgcacatctggggcttgaatacctggaaccgtccgaacgtaacgca

SEQ ID NO: 1004 - protein, 529 aa, synthetic construct
  REGION 1..529: note = Variant of terminal deoxynucleotidyltransferase
MHHHHHHGGSGSHGIRTIDSDFGKKRQKKMDNHDSSAIYEIKFHEFVLFILEEKMGATRRTFLTDLARKKGFRVENELSDSVTHIVAENNSGSDVLAWLKTHKMEKTTQFELLDISWLIESMKVGKPVDTKGKYQLMESGVMSANPDPTEGRENILPPTTKTISQYACQRRTTLNNHNQRFTDALEILAENYEFKRNDDTCLTFMRAISVLKCLPFEVVSLKDTEGLPWIGDEVKGIMEEIIEVGESLEVQAVLNDERYQSFKLFKSVFGVGVKTADKWYRMGLRTLEDVRSSKTLKLTPMQKAGLCYYEDLADSVTKAEADAISLLVQDAVWTFDPDALVEITGGFRRGKPFGHDVDLLITSPGAEKEQEDQLLQKVTNLWKKQGLLLYGDLRESRFEDGKLPSRKIDALDHFAKCFLILKLYHHKVDKSKWEMPTGSNESEAKSWKAIRVDLVRCPYDRFAFALLGWTGSRMFERDLRRYATHEKKMMLDNHALYDLTKKIFLKAKSEEEIFAHLGLEYLEPSERNA

SEQ ID NO: 1005 - DNA, 1587 bp, synthetic construct
  misc_feature 1..1587: note = Variant of terminal deoxynucleotidyltransferase
  source 1..1587: mol_type = other DNA
atgcaccatcatcatcatcatggcggtagcggcagccacggcattcgtaccatcgattcggacttcgggaagaaacgccagaagaagatggataaccacgatagttccgccatctatgaaatcaaatttcacgagtttgtgctgttcattctcgaagagaaaatgggtgcgacgcgtcgtacttttctgacagatttagcccgcaagaaagggttccgcgtcgagaatgaactgtcagacagcgttacccacatcgtggcagaaaataattcaggatctgacgtattggcttggctgaagactcacaagatggagaagaccacgcaatttgaactgctggatattagctggcttatcgaaagcatgaaagttggtaaaccggtggacaccaaggggaaataccagttgatggaatcgggtgtgatgagtgcgaacccagatccgacagagggtcgtgaaaacattctgcctcctactacgaagaccatttctcagtatgcgtgtcaacgccgcaccaccctgaacaaccataatcaacgttttacggacgcactggaaattcttgcggaaaattacgagttcaaacgcaacgatgatacttgtctgacctttatgcgtgctatttccgtgctgaaatgccttccgtttgaggtagttagcctgaaagacacggaaggattgccctggatcggtgatgaagtcaaagggattatggaagaaatcatcgaggtcggtgaatcgctggaagtgcaggccgtgctcaatgatgagcgctatcaaagcttcaaactgtttaagagtgtctttggagtgggggtgaagacagcagacaaatggtaccgttgtggtctgcgcacgctcgaggatgttcgttccagcaagaccctgaagttgaccccgatgcagaaagcgggtctgtgctattatgaagatcttgctgatggcgttacgaaagccgaagctgacgcgatttctctgctggttcaggatgcagtctggactttcgacccggatgcgctggtggagattacgggtggatttcgtcgtgggaaaccttttggtcacgacgttgatctgcttatcacatctccgggagctgagaaagaacaagaagaccagctcctgcagaaagtgaccaatctgtggaagaaacaagggttgttgctgtacggtgacctgcgtgaaagtcgctttgaagatgggaaactcccatcccgcaagatcgatgccctggaccattttgcgaaatgctttctgatcctcaaactttatcaccataaagtggacaaaagcaaatgggaaatgccgacgggttcgaacgaaagcgaggccaaaagttggaaagcaattcgcgtagatctggttcgttgtccctacgatcgttttgcgtttgcgttgttgggttggaccggaagccgcatgttcgaacgtgatctgcgccgctacgccacccacgagaagaagatgatgctggacaatcatgcgctgtatgacctgaccaagaaaatctttctcaaagctaaatcggaagaggaaattttcgcacatctggggcttgaatacctggaaccgtccgaacgtaacgca

SEQ ID NO: 1006 - protein, 529 aa, synthetic construct
  REGION 1..529: note = Variant of terminal deoxynucleotidyltransferase
MHHHHHHGGSGSHGIRTIDSDFGKKRQKKMDNHDSSAIYEIKFHEFVLFILEEKMGATRRTFLTDLARKKGFRVENELSDSVTHIVAENNSGSDVLAWLKTHKMEKTTQFELLDISWLIESMKVGKPVDTKGKYQLMESGVMSANPDPTEGRENILPPTTKTISQYACQRRTTLNNHNQRFTDALEILAENYEFKRNDDTCLTFMRAISVLKCLPFEVVSLKDTEGLPWIGDEVKGIMEEIIEVGESLEVQAVLNDERYQSFKLFKSVFGVGVKTADKWYRCGLRTLEDVRSSKTLKLTPMQKAGLCYYEDLADGVTKAEADAISLLVQDAVWTFDPDALVEITGGFRRGKPFGHDVDLLITSPGAEKEQEDQLLQKVTNLWKKQGLLLYGDLRESRFEDGKLPSRKIDALDHFAKCFLILKLYHHKVDKSKWEMPTGSNESEAKSWKAIRVDLVRCPYDRFAFALLGWTGSRMFERDLRRYATHEKKMMLDNHALYDLTKKIFLKAKSEEEIFAHLGLEYLEPSERNA

SEQ ID NO: 1007 - DNA, 1587 bp, synthetic construct
  misc_feature 1..1587: note = Variant of terminal deoxynucleotidyltransferase
  source 1..1587: mol_type = other DNA
atgcaccatcatcatcatcatggcggtagcggcagccacggcattcgtaccatcgattcggacttcgggaagaaacgccagaagaagatggataaccacgatagttccgccatctatgaaatcaaatttcacgagtttgtgctgttcattctcgaagagaaaatgggtgcgacgcgtcgtacttttctgacagatttagcccgcaagaaagggttccgcgtcgagaatgaactgtcagacagcgttacccacatcgtggcagaaaataattcaggatctgacgtattggcttggctgaagactcacaagatggagaagaccacgcaatttgaactgctggatattagctggcttatcgaaagcatgaaagttggtaaaccggtggacaccaaggggaaataccagttgatggaatcgggtgtgatgagtgcgaacccagatccgacagagggtcgtgaaaacattctgcctcctactacgaagaccatttctcagtatgcgtgtcaacgccgcaccaccctgaacaaccataatcaacgttttacggacgcactggaaattcttgcggaaaattacgagttcaaacgcaacgatgatacttgtctgacctttatgcgtgctatttccgtgctgaaatgccttccgtttgaggtagttagcctgaaagacacggaaggattgccctggatcggtgatgaagtcaaagggattatggaagaaatcatcgaggtcggtgaatcgctggaagtgcaggccgtgctcaatgatgagcgctatcaaagcttcaaactgtttaagagtgtctttggagtgggggtgaagacagcagacaaatggtaccgtatgggtctgcgcacgctcgaggatgttagttccagcaagaccctgaagttgaccccgatgcagaaagcgggtctgtgctattatgaagatcttgctgatggcgttacgaaagccgaagctgacgcgatttctctgctggttcaggatgcagtctggactttcgacccggatgcgctggtggagattacgggtggatttcgtcgtgggaaaccttttggtcacgacgttgatctgcttatcacatctccgggagctgagaaagaacaagaagaccagctcctgcagaaagtgaccaatctgtggaagaaacaagggttgttgctgtacggtgacctgcgtgaaagtcgctttgaagatgggaaactcccatcccgcaagatcgatgccctggaccattttgcgaaatgctttctgatcctcaaactttatcaccataaagtggacaaaagcaaatgggaaatgccgacgggttcgaacgaaagcgaggccaaaagttggaaagcaattcgcgtagatctggttcgttgtccctacgatcgttttgcgtttgcgttgttgggttggaccggaagccgcatgttcgaacgtgatctgcgccgctacgccacccacgagaagaagatgatgctggacaatcatgcgctgtatgacctgaccaagaaaatctttctcaaagctaaatcggaagaggaaattttcgcacatctggggcttgaatacctggaaccgtccgaacgtaacgca

SEQ ID NO: 1008 - protein, 529 aa, synthetic construct
  REGION 1..529: note = Variant of terminal deoxynucleotidyltransferase
MHHHHHHGGSGSHGIRTIDSDFGKKRQKKMDNHDSSAIYEIKFHEFVLFILEEKMGATRRTFLTDLARKKGFRVENELSDSVTHIVAENNSGSDVLAWLKTHKMEKTTQFELLDISWLIESMKVGKPVDTKGKYQLMESGVMSANPDPTEGRENILPPTTKTISQYACQRRTTLNNHNQRFTDALEILAENYEFKRNDDTCLTFMRAISVLKCLPFEVVSLKDTEGLPWIGDEVKGIMEEIIEVGESLEVQAVLNDERYQSFKLFKSVFGVGVKTADKWYRMGLRTLEDVSSSKTLKLTPMQKAGLCYYEDLADGVTKAEADAISLLVQDAVWTFDPDALVEITGGFRRGKPFGHDVDLLITSPGAEKEQEDQLLQKVTNLWKKQGLLLYGDLRESRFEDGKLPSRKIDALDHFAKCFLILKLYHHKVDKSKWEMPTGSNESEAKSWKAIRVDLVRCPYDRFAFALLGWTGSRMFERDLRRYATHEKKMMLDNHALYDLTKKIFLKAKSEEEIFAHLGLEYLEPSERNA

SEQ ID NO: 1009 - DNA, 1587 bp, synthetic construct
  misc_feature 1..1587: note = Variant of terminal deoxynucleotidyltransferase
  source 1..1587: mol_type = other DNA
atgcaccatcatcatcatcatggcggtagcggcagccacggcattcgtaccatcgattcggacttcgggaagaaacgccagaagaagatggataaccacgatagttccgccatctatgaaatcaaatttcacgagtttgtgctgttcattctcgaagagaaaatgggtgcgacgcgtcgtacttttctgacagatttagcccgcaagaaagggttccgcgtcgagaatgaactgtcagacagcgttacccacatcgtggcagaaaataattcaggatctgacgtattggcttggctgaagactcacaagatggagaagaccacgcaatttgaactgctggatattagctggcttatcgaaagcatgaaagttggtaaaccggtggacaccaaggggaaataccagttgatggaatcgggtgtgatgagtgcgaacccagatccgacagagggtcgtgaaaacattctgcctcctactacgaagaccatttctcagtatgcgtgtcaacgccgcaccaccctgaacaaccataatcaacgttttacggacgcactggaaattcttgcggaaaattacgagttcaaacgcaacgatgatacttgtctgacctttatgcgtgctatttccgtgctgaaatgccttccgtttgaggtagttagcctgaaagacacggaaggattgccctggatcggtgatgaagtcaaagggattatggaagaaatcatcgaggtcggtgaatcgctggaagtgcaggccgtgctcaatgatgagcgctatcaaagcttcaaactgtttaagagtgtctttggagtgggggtgaagacagcagacaaatggtaccgtatgggtctgcgcacgctcgaggatgttcgttccagcaagaccctgtgtttgaccccgatgcagaaagcgggtctgtgctattatgaagatcttgctgatggcgttacgaaagccgaagctgacgcgatttctctgctggttcaggatgcagtctggactttcgacccggatgcgctggtggagattacgggtggatttcgtcgtgggaaaccttttggtcacgacgttgatctgcttatcacatctccgggagctgagaaagaacaagaagaccagctcctgcagaaagtgaccaatctgtggaagaaacaagggttgttgctgtacggtgacctgcgtgaaagtcgctttgaagatgggaaactcccatcccgcaagatcgatgccctggaccattttgcgaaatgctttctgatcctcaaactttatcaccataaagtggacaaaagcaaatgggaaatgccgacgggttcgaacgaaagcgaggccaaaagttggaaagcaattcgcgtagatctggttcgttgtccctacgatcgttttgcgtttgcgttgttgggttggaccggaagccgcatgttcgaacgtgatctgcgccgctacgccacccacgagaagaagatgatgctggacaatcatgcgctgtatgacctgaccaagaaaatctttctcaaagctaaatcggaagaggaaattttcgcacatctggggcttgaatacctggaaccgtccgaacgtaacgca

SEQ ID NO: 1010 - protein, 529 aa, synthetic construct
  REGION 1..529: note = Variant of terminal deoxynucleotidyltransferase
MHHHHHHGGSGSHGIRTIDSDFGKKRQKKMDNHDSSAIYEIKFHEFVLFILEEKMGATRRTFLTDLARKKGFRVENELSDSVTHIVAENNSGSDVLAWLKTHKMEKTTQFELLDISWLIESMKVGKPVDTKGKYQLMESGVMSANPDPTEGRENILPPTTKTISQYACQRRTTLNNHNQRFTDALEILAENYEFKRNDDTCLTFMRAISVLKCLPFEVVSLKDTEGLPWIGDEVKGIMEEIIEVGESLEVQAVLNDERYQSFKLFKSVFGVGVKTADKWYRMGLRTLEDVRSSKTLCLTPMQKAGLCYYEDLADGVTKAEADAISLLVQDAVWTFDPDALVEITGGFRRGKPFGHDVDLLITSPGAEKEQEDQLLQKVTNLWKKQGLLLYGDLRESRFEDGKLPSRKIDALDHFAKCFLILKLYHHKVDKSKWEMPTGSNESEAKSWKAIRVDLVRCPYDRFAFALLGWTGSRMFERDLRRYATHEKKMMLDNHALYDLTKKIFLKAKSEEEIFAHLGLEYLEPSERNA

SEQ ID NO: 1011 - DNA, 1587 bp, synthetic construct
  misc_feature 1..1587: note = Variant of terminal deoxynucleotidyltransferase
  source 1..1587: mol_type = other DNA
atgcaccatcatcatcatcatggcggtagcggcagccacggcattcgtaccatcgattcggacttcgggaagaaacgccagaagaagatggataaccacgatagttccgccatctatgaaatcaaatttcacgagtttgtgctgttcattctcgaagagaaaatgggtgcgacgcgtcgtacttttctgacagatttagcccgcaagaaagggttccgcgtcgagaatgaactgtcagacagcgttacccacatcgtggcagaaaataattcaggatctgacgtattggcttggctgaagactcacaagatggagaagaccacgcaatttgaactgctggatattagctggcttatcgaaagcatgaaagttggtaaaccggtggacaccaaggggaaataccagttgatggaatcgggtgtgatgagtgcgaacccagatccgacagagggtcgtgaaaacattctgcctcctactacgaagaccatttctcagtatgcgtgtcaacgccgcaccaccctgaacaaccataatcaacgttttacggacgcactggaaattcttgcggaaaattacgagttcaaacgcaacgatgatacttgtctgacctttatgcgtgctatttccgtgctgaaatgccttccgtttgaggtagttagcctgaaagacacggaaggattgccctggatcggtgatgaagtcaaagggattatggaagaaatcatcgaggtcggtgaatcgctggaagtgcaggccgtgctcaatgatgagcgctatcaaagcttcaaagcgtttaagagtgtctttggagtgggggtgaagacagcagacaaatggtaccgtatgggtctgcgcacgctcgaggatgttcgttccagcaagaccctgaagttgaccccgatgcagaaagcgggtctgtgctattatgaagatcttgctgatggcgttacgaaagccgaagctgacgcgatttctctgctggttcaggatgcagtctggactttcgacccggatgcgctggtggagattacgggtggatttcgtcgtgggaaaccttttggtcacgacgttgatctgcttatcacatctccgggagctgagaaagaacaagaagaccagctcctgcagaaagtgaccaatctgtggaagaaacaagggttgttgctgtacggtgacctgcgtgaaagtcgctttgaagatgggaaactcccatcccgcaagatcgatgccctggaccattttgcgaaatgctttctgatcctcaaactttatcaccataaagtggacaaaagcaaatgggaaatgccgacgggttcgaacgaaagcgaggccaaaagttggaaagcaattcgcgtagatctggttcgttgtccctacgatcgttttgcgtttgcgttgttgggttggaccggaagccgcatgttcgaacgtgatctgcgccgctacgccacccacgagaagaagatgatgctggacaatcatgcgctgtatgacctgaccaagaaaatctttctcaaagctaaatcggaagaggaaattttcgcacatctggggcttgaatacctggaaccgtccgaacgtaacgca

SEQ ID NO: 1012 - protein, 529 aa, synthetic construct
  REGION 1..529: note = Variant of terminal deoxynucleotidyltransferase
MHHHHHHGGSGSHGIRTIDSDFGKKRQKKMDNHDSSAIYEIKFHEFVLFILEEKMGATRRTFLTDLARKKGFRVENELSDSVTHIVAENNSGSDVLAWLKTHKMEKTTQFELLDISWLIESMKVGKPVDTKGKYQLMESGVMSANPDPTEGRENILPPTTKTISQYACQRRTTLNNHNQRFTDALEILAENYEFKRNDDTCLTFMRAISVLKCLPFEVVSLKDTEGLPWIGDEVKGIMEEIIEVGESLEVQAVLNDERYQSFKAFKSVFGVGVKTADKWYRMGLRTLEDVRSSKTLKLTPMQKAGLCYYEDLADGVTKAEADAISLLVQDAVWTFDPDALVEITGGFRRGKPFGHDVDLLITSPGAEKEQEDQLLQKVTNLWKKQGLLLYGDLRESRFEDGKLPSRKIDALDHFAKCFLILKLYHHKVDKSKWEMPTGSNESEAKSWKAIRVDLVRCPYDRFAFALLGWTGSRMFERDLRRYATHEKKMMLDNHALYDLTKKIFLKAKSEEEIFAHLGLEYLEPSERNA

SEQ ID NO: 1013 - DNA, 1587 bp, synthetic construct
  misc_feature 1..1587: note = Variant of terminal deoxynucleotidyltransferase
  source 1..1587: mol_type = other DNA
atgcaccatcatcatcatcatggcggtagcggcagccacggcattcgtaccatcgattcggacttcgggaagaaacgccagaagaagatggataaccacgatagttccgccatctatgaaatcaaatttcacgagtttgtgctgttcattctcgaagagaaaatgggtgcgacgcgtcgtacttttctgacagatttagcccgcaagaaagggttccgcgtcgagaatgaactgtcagacagcgttacccacatcgtggcagaaaataattcaggatctgacgtattggcttggctgaagactcacaagatggagaagaccacgcaatttgaactgctggatattagctggcttatcgaaagcatgaaagttggtaaaccggtggacaccaaggggaaataccagttgatggaatcgggtgtgatgagtgcgaacccagatccgacagagggtcgtgaaaacattctgcctcctactacgaagaccatttctcagtatgcgtgtcaacgccgcaccaccctgaacaaccataatcaacgttttacggacgcactggaaattcttgcggaaaattacgagttcaaacgcaacgatgatacttgtctgacctttatgcgtgctatttccgtgctgaaatgccttccgtttgaggtagttagcctgaaagacacggaaggattgccctggatcggtgatgaagtcaaagggattatggaagaaatcatcgaggtcggtgaatcgctggaagtgcaggccgtgctcaatgatgagcgctatcaaagcttcaaactgtttaagagtgtctttggagtgggggtgaagacagcagacaaatggtaccgtatgggtctgcgcacgctcgaggatgttcgttccagcaagaccctgaagttgaccccgatgcagaaagcgggtctgtgctattttgaagatcttgctgatggcgttacgaaagccgaagctgacgcgatttctctgctggttcaggatgcagtctggactttcgacccggatgcgctggtggagattacgggtggatttcgtcgtgggaaaccttttggtcacgacgttgatctgcttatcacatctccgggagctgagaaagaacaagaagaccagctcctgcagaaagtgaccaatctgtggaagaaacaagggttgttgctgtacggtgacctgcgtgaaagtcgctttgaagatgggaaactcccatcccgcaagatcgatgccctggaccattttgcgaaatgctttctgatcctcaaactttatcaccataaagtggacaaaagcaaatgggaaatgccgacgggttcgaacgaaagcgaggccaaaagttggaaagcaattcgcgtagatctggttcgttgtccctacgatcgttttgcgtttgcgttgttgggttggaccggaagccgcatgttcgaacgtgatctgcgccgctacgccacccacgagaagaagatgatgctggacaatcatgcgctgtatgacctgaccaagaaaatctttctcaaagctaaatcggaagaggaaattttcgcacatctggggcttgaatacctggaaccgtccgaacgtaacgca

SEQ ID NO: 1014 - protein, 529 aa, synthetic construct
  REGION 1..529: note = Variant of terminal deoxynucleotidyltransferase
MHHHHHHGGSGSHGIRTIDSDFGKKRQKKMDNHDSSAIYEIKFHEFVLFILEEKMGATRRTFLTDLARKKGFRVENELSDSVTHIVAENNSGSDVLAWLKTHKMEKTTQFELLDISWLIESMKVGKPVDTKGKYQLMESGVMSANPDPTEGRENILPPTTKTISQYACQRRTTLNNHNQRFTDALEILAENYEFKRNDDTCLTFMRAISVLKCLPFEVVSLKDTEGLPWIGDEVKGIMEEIIEVGESLEVQAVLNDERYQSFKLFKSVFGVGVKTADKWYRMGLRTLEDVRSSKTLKLTPMQKAGLCYFEDLADGVTKAEADAISLLVQDAVWTFDPDALVEITGGFRRGKPFGHDVDLLITSPGAEKEQEDQLLQKVTNLWKKQGLLLYGDLRESRFEDGKLPSRKIDALDHFAKCFLILKLYHHKVDKSKWEMPTGSNESEAKSWKAIRVDLVRCPYDRFAFALLGWTGSRMFERDLRRYATHEKKMMLDNHALYDLTKKIFLKAKSEEEIFAHLGLEYLEPSERNA

SEQ ID NO: 1015 - DNA, 1587 bp, synthetic construct
  misc_feature 1..1587: note = Variant of terminal deoxynucleotidyltransferase
  source 1..1587: mol_type = other DNA
atgcaccatcatcatcatcatggcggtagcggcagccacggcattcgtaccatcgattcggacttcgggaagaaacgccagaagaagatggataaccacgatagttccgccatctatgaaatcaaatttcacgagtttgtgctgttcattctcgaagagaaaatgggtgcgacgcgtcgtacttttctgacagatttagcccgcaagaaagggttccgcgtcgagaatgaactgtcagacagcgttacccacatcgtggcagaaaataattcaggatctgacgtattggcttggctgaagactcacaagatggagaagaccacgcaatttgaactgctggatattagctggcttatcgaaagcatgaaagttggtaaaccggtggacaccaaggggaaataccagttgatggaatcgggtgtgatgagtgcgaacccagatccgacagagggtcgtgaaaacattctgcctcctactacgaagaccatttctcagtatgcgtgtcaacgccgcaccaccctgaacaaccataatcaacgttttacggacgcactggaaattcttgcggaaaattacgagttcaaacgcaacgatgatacttgtctgacctttatgcgtgctatttccgtgctgaaatgccttccgtttgaggtagttagcctgaaagacacggaaggattgccctggatcggtgatgaagtcaaagggattatggaagaaatcatcgaggtcggtgaatcgctggaagtgcaggccgtgctcaatgatgagcgctatcaaagcttcaaagagtttaagagtgtctttggagtgggggtgaagacagcagacaaatggtaccgtatgggtctgcgcacgctcgaggatgttcgttccagcaagaccctgaagttgaccccgatgcagaaagcgggtctgtgctattatgaagatcttgctgatggcgttacgaaagccgaagctgacgcgatttctctgctggttcaggatgcagtctggactttcgacccggatgcgctggtggagattacgggtggatttcgtcgtgggaaaccttttggtcacgacgttgatctgcttatcacatctccgggagctgagaaagaacaagaagaccagctcctgcagaaagtgaccaatctgtggaagaaacaagggttgttgctgtacggtgacctgcgtgaaagtcgctttgaagatgggaaactcccatcccgcaagatcgatgccctggaccattttgcgaaatgctttctgatcctcaaactttatcaccataaagtggacaaaagcaaatgggaaatgccgacgggttcgaacgaaagcgaggccaaaagttggaaagcaattcgcgtagatctggttcgttgtccctacgatcgttttgcgtttgcgttgttgggttggaccggaagccgcatgttcgaacgtgatctgcgccgctacgccacccacgagaagaagatgatgctggacaatcatgcgctgtatgacctgaccaagaaaatctttctcaaagctaaatcggaagaggaaattttcgcacatctggggcttgaatacctggaaccgtccgaacgtaacgca

SEQ ID NO: 1016 - protein, 529 aa, synthetic construct
  REGION 1..529: note = Variant of terminal deoxynucleotidyltransferase
MHHHHHHGGSGSHGIRTIDSDFGKKRQKKMDNHDSSAIYEIKFHEFVLFILEEKMGATRRTFLTDLARKKGFRVENELSDSVTHIVAENNSGSDVLAWLKTHKMEKTTQFELLDISWLIESMKVGKPVDTKGKYQLMESGVMSANPDPTEGRENILPPTTKTISQYACQRRTTLNNHNQRFTDALEILAENYEFKRNDDTCLTFMRAISVLKCLPFEVVSLKDTEGLPWIGDEVKGIMEEIIEVGESLEVQAVLNDERYQSFKEFKSVFGVGVKTADKWYRMGLRTLEDVRSSKTLKLTPMQKAGLCYYEDLADGVTKAEADAISLLVQDAVWTFDPDALVEITGGFRRGKPFGHDVDLLITSPGAEKEQEDQLLQKVTNLWKKQGLLLYGDLRESRFEDGKLPSRKIDALDHFAKCFLILKLYHHKVDKSKWEMPTGSNESEAKSWKAIRVDLVRCPYDRFAFALLGWTGSRMFERDLRRYATHEKKMMLDNHALYDLTKKIFLKAKSEEEIFAHLGLEYLEPSERNA

SEQ ID NO: 1017 - DNA, 1587 bp, synthetic construct
  misc_feature 1..1587: note = Variant of terminal deoxynucleotidyltransferase
  source 1..1587: mol_type = other DNA
atgcaccatcatcatcatcatggcggtagcggcagccacggcattcgtaccatcgattcggacttcgggaagaaacgccagaagaagatggataaccacgatagttccgccatctatgaaatcaaatttcacgagtttgtgctgttcattctcgaagagaaaatgggtgcgacgcgtcgtacttttctgacagatttagcccgcaagaaagggttccgcgtcgagaatgaactgtcagacagcgttacccacatcgtggcagaaaataattcaggatctgacgtattggcttggctgaagactcacaagatggagaagaccacgcaatttgaactgctggatattagctggcttatcgaaagcatgaaagttggtaaaccggtggacaccaaggggaaataccagttgatggaatcgggtgtgatgagtgcgaacccagatccgacagagggtcgtgaaaacattctgcctcctactacgaagaccatttctcagtatgcgtgtcaacgccgcaccaccctgaacaaccataatcaacgttttacggacgcactggaaattcttgcggaaaattacgagttcaaacgcaacgatgatacttgtctgacctttatgcgtgctatttccgtgctgaaatgccttccgtttgaggtagttagcctgaaagacacggaaggattgccctggatcggtgatgaagtcaaagggattatggaagaaatcatcgaggtcggtgaatcgctggaagtgcaggccgtgctcaatgatgagcgctatcaaagcttcaaactgtttaagagtgtctttggagtgggggtgaagacagcagacaaatggtaccgtatgggtctgcgcacgctcgaggatgttcgttccagcaagaccctgaagttgaccccgatgcagaaagcgggtctgtgctattatgaagatcttgctgatggcgttacgaaagccgaagctgacgcgatttctctgctggttcaggatgcagtctggactttcgacccggatgcgctggtggagattacgggtggatttcgtcgtgggaaaccttttggtcacgacgttgatctgcttatcacatctccgggagctgagaaagaacaagaagaccagctcctgcagaaagtgaccaatctgtggaagaaacaagggttgttgctgtacggtgacctgcgtgaaagtcgctttgaagatgggaaactcccatcccgcaagatcgatgccctggaccattttgcgaaatgctttctgatcctcaaactttatcaccataaagtggacaaaagcaaatgggaaatgccgacgggttcgaacgaaagcgaggccaaaagttggaaagcaattcgcgtagatctggttcgttgtccctacgatcgttttgcgtttgcgttgttgggttggaccggaagcgttatgttcgaacgtgatctgcgccgctacgccacccacgagaagaagatgatgctggacaatcatgcgctgtatgacctgaccaagaaaatctttctcaaagctaaatcggaagaggaaattttcgcacatctggggcttgaatacctggaaccgtccgaacgtaacgca

SEQ ID NO: 1018 - protein, 529 aa, synthetic construct
  REGION 1..529: note = Variant of terminal deoxynucleotidyltransferase
MHHHHHHGGSGSHGIRTIDSDFGKKRQKKMDNHDSSAIYEIKFHEFVLFILEEKMGATRRTFLTDLARKKGFRVENELSDSVTHIVAENNSGSDVLAWLKTHKMEKTTQFELLDISWLIESMKVGKPVDTKGKYQLMESGVMSANPDPTEGRENILPPTTKTISQYACQRRTTLNNHNQRFTDALEILAENYEFKRNDDTCLTFMRAISVLKCLPFEVVSLKDTEGLPWIGDEVKGIMEEIIEVGESLEVQAVLNDERYQSFKLFKSVFGVGVKTADKWYRMGLRTLEDVRSSKTLKLTPMQKAGLCYYEDLADGVTKAEADAISLLVQDAVWTFDPDALVEITGGFRRGKPFGHDVDLLITSPGAEKEQEDQLLQKVTNLWKKQGLLLYGDLRESRFEDGKLPSRKIDALDHFAKCFLILKLYHHKVDKSKWEMPTGSNESEAKSWKAIRVDLVRCPYDRFAFALLGWTGSVMFERDLRRYATHEKKMMLDNHALYDLTKKIFLKAKSEEEIFAHLGLEYLEPSERNA

SEQ ID NO: 1019 - DNA, 1587 bp, synthetic construct
  misc_feature 1..1587: note = Variant of terminal deoxynucleotidyltransferase
  source 1..1587: mol_type = other DNA
atgcaccatcatcatcatcatggcggtagcggcagccacggcattcgtaccatcgattcggacttcgggaagaaacgccagaagaagatggataaccacgatagttccgccatctatgaaatcaaatttcacgagtttgtgctgttcattctcgaagagaaaatgggtgcgacgcgtcgtacttttctgacagatttagcccgcaagaaagggttccgcgtcgagaatgaactgtcagacagcgttacccacatcgtggcagaaaataattcaggatctgacgtattggcttggctgaagactcacaagatggagaagaccacgcaatttgaactgctggatattagctggcttatcgaaagcatgaaagttggtaaaccggtggacaccaaggggaaataccagttgatggaatcgggtgtgatgagtgcgaacccagatccgacagagggtcgtgaaaacattctgcctcctactacgaagaccatttctcagtatgcgtgtcaacgccgcaccaccctgaacaaccataatcaacgttttacggacgcactggaaattcttgcggaaaattacgagttcaaacgcaacgatgatacttgtctgacctttatgcgtgctatttccgtgctgaaatgccttccgtttgaggtagttagcctgaaagacacggaaggattgccctggatcggtgatgaagtcaaagggattatggaagaaatcatcgaggtcggtgaatcgctggaagtgcaggccgtgctcaatgatgagcgctatcaaagcttcaaactgtttaagagtgtctttggagtgggggtgaagacaagtgacaaatggtaccgtatgggtctgcgcacgctcgaggatgttcgttccagcaagaccctgaagttgaccccgatgcagaaagcgggtctgtgctattatgaagatcttgctgatggcgttacgaaagccgaagctgacgcgatttctctgctggttcaggatgcagtctggactttcgacccggatgcgctggtggagattacgggtggatttcgtcgtgggaaaccttttggtcacgacgttgatctgcttatcacatctccgggagctgagaaagaacaagaagaccagctcctgcagaaagtgaccaatctgtggaagaaacaagggttgttgctgtacggtgacctgcgtgaaagtcgctttgaagatgggaaactcccatcccgcaagatcgatgccctggaccattttgcgaaatgctttctgatcctcaaactttatcaccataaagtggacaaaagcaaatgggaaatgccgacgggttcgaacgaaagcgaggccaaaagttggaaagcaattcgcgtagatctggttcgttgtccctacgatcgttttgcgtttgcgttgttgggttggaccggaagccgcatgttcgaacgtgatctgcgccgctacgccacccacgagaagaagatgatgctggacaatcatgcgctgtatgacctgaccaagaaaatctttctcaaagctaaatcggaagaggaaattttcgcacatctggggcttgaatacctggaaccgtccgaacgtaacgca

SEQ ID NO: 1020 - protein, 529 aa, synthetic construct
  REGION 1..529: note = Variant of terminal deoxynucleotidyltransferase
MHHHHHHGGSGSHGIRTIDSDFGKKRQKKMDNHDSSAIYEIKFHEFVLFILEEKMGATRRTFLTDLARKKGFRVENELSDSVTHIVAENNSGSDVLAWLKTHKMEKTTQFELLDISWLIESMKVGKPVDTKGKYQLMESGVMSANPDPTEGRENILPPTTKTISQYACQRRTTLNNHNQRFTDALEILAENYEFKRNDDTCLTFMRAISVLKCLPFEVVSLKDTEGLPWIGDEVKGIMEEIIEVGESLEVQAVLNDERYQSFKLFKSVFGVGVKTSDKWYRMGLRTLEDVRSSKTLKLTPMQKAGLCYYEDLADGVTKAEADAISLLVQDAVWTFDPDALVEITGGFRRGKPFGHDVDLLITSPGAEKEQEDQLLQKVTNLWKKQGLLLYGDLRESRFEDGKLPSRKIDALDHFAKCFLILKLYHHKVDKSKWEMPTGSNESEAKSWKAIRVDLVRCPYDRFAFALLGWTGSRMFERDLRRYATHEKKMMLDNHALYDLTKKIFLKAKSEEEIFAHLGLEYLEPSERNA

SEQ ID NO: 1021 - DNA, 1587 bp, synthetic construct
  misc_feature 1..1587: note = Variant of terminal deoxynucleotidyltransferase
  source 1..1587: mol_type = other DNA
atgcaccatcatcatcatcatggcggtagcggcagccacggcattcgtaccatcgattcggacttcgggaagaaacgccagaagaagatggataaccacgatagttccgccatctatgaaatcaaatttcacgagtttgtgctgttcattctcgaagagaaaatgggtgcgacgcgtcgtacttttctgacagatttagcccgcaagaaagggttccgcgtcgagaatgaactgtcagacagcgttacccacatcgtggcagaaaataattcaggatctgacgtattggcttggctgaagactcacaagatggagaagaccacgcaatttgaactgctggatattagctggcttatcgaaagcatgaaagttggtaaaccggtggacaccaaggggaaataccagttgatggaatcgggtgtgatgagtgcgaacccagatccgacagagggtcgtgaaaacattctgcctcctactacgaagaccatttctcagtatgcgtgtcaacgccgcaccaccctgaacaaccataatcaacgttttacggacgcactggaaattcttgcggaaaattacgagttcaaacgcaacgatgatacttgtctgacctttatgcgtgctatttccgtgctgaaatgccttccgtttgaggtagttagcctgaaagacacggaaggattgccctggatcggtgatgaagtcaaagggattatggaagaaatcatcgaggtcggtgaatcgctggaagtgcaggccgtgctcaatgatgagcgctatcaaagcttcaaactgtttaagagtgtctttggagtgggggtgaagacagcagacaaatggtaccgtatgggtctgcgcacgctcgaggatgttcgttccagcaagaccctgaagttgaccccgatgcagaaagcgggtctgtgctattatgaagatcttgctgatggcgttacgaaagccgaagctgacgcgatttctctgctggttcaggatgcagtctggactttcgacccggatgcgctggtggagattacgggtggatttcgtcgtgggaaacctaagggtcacgacgttgatctgcttatcacatctccgggagctgagaaagaacaagaagaccagctcctgcagaaagtaaccaatctgtggaagaaacaagggttgttgctgtacggtgacctgcgtgaaagtcgctttgaagatgggaaactcccatcccgcaagatcgatgccctggaccattttgcgaaatgctttctgatcctcaaactttatcaccataaagtggacaaaagcaaatgggaaatgccgacgggttcgaacgaaagcgaggccaaaagttggaaagcaattcgcgtagatctggttcgttgtccctacgatcgttttgcgtttgcgttgttgggttggaccggaagccgcatgttcgaacgtgatctgcgccgctacgccacccacgagaagaagatgatgctggacaatcatgcgctgtatgacctgaccaagaaaatctttctcaaagctaaatcggaagaggaaattttcgcacatctggggcttgaatacctggaaccgtccgaacgtaacgca

SEQ ID NO: 1022 - protein, 529 aa, synthetic construct
  REGION 1..529: note = Variant of terminal deoxynucleotidyltransferase
MHHHHHHGGSGSHGIRTIDSDFGKKRQKKMDNHDSSAIYEIKFHEFVLFILEEKMGATRRTFLTDLARKKGFRVENELSDSVTHIVAENNSGSDVLAWLKTHKMEKTTQFELLDISWLIESMKVGKPVDTKGKYQLMESGVMSANPDPTEGRENILPPTTKTISQYACQRRTTLNNHNQRFTDALEILAENYEFKRNDDTCLTFMRAISVLKCLPFEVVSLKDTEGLPWIGDEVKGIMEEIIEVGESLEVQAVLNDERYQSFKLFKSVFGVGVKTADKWYRMGLRTLEDVRSSKTLKLTPMQKAGLCYYEDLADGVTKAEADAISLLVQDAVWTFDPDALVEITGGFRRGKPKGHDVDLLITSPGAEKEQEDQLLQKVTNLWKKQGLLLYGDLRESRFEDGKLPSRKIDALDHFAKCFLILKLYHHKVDKSKWEMPTGSNESEAKSWKAIRVDLVRCPYDRFAFALLGWTGSRMFERDLRRYATHEKKMMLDNHALYDLTKKIFLKAKSEEEIFAHLGLEYLEPSERNA

SEQ ID NO: 1023 - DNA, 1587 bp, synthetic construct
  misc_feature 1..1587: note = Variant of terminal deoxynucleotidyltransferase
  source 1..1587: mol_type = other DNA
atgcaccatcatcatcatcatggcggtagcggcagccacggcattcgtaccatcgattcggacttcgggaagaaacgccagaagaagatggataaccacgatagttccgccatctatgaaatcaaatttcacgagtttgtgctgttcattctcgaagagaaaatgggtgcgacgcgtcgtacttttctgacagatttagcccgcaagaaagggttccgcgtcgagaatgaactgtcagacagcgttacccacatcgtggcagaaaataattcaggatctgacgtattggcttggctgaagactcacaagatggagaagaccacgcaatttgaactgctggatattagctggcttatcgaaagcatgaaagttggtaaaccggtggacaccaaggggaaataccagttgatggaatcgggtgtgatgagtgcgaacccagatccgacagagggtcgtgaaaacattctgcctcctactacgaagaccatttctcagtatgcgtgtcaacgccgcaccaccctgaacaaccataatcaacgttttacggacgcactggaaattcttgcggaaaattacgagttcaaacgcaacgatgatacttgtctgacctttatgcgtgctatttccgtgctgaaatgccttccgtttgaggtagttagcctgaaagacacggaaggattgccctggatcggtgatgaagtcaaagggattatggaagaaatcatcgaggtcggtgaatcgctggaagtgcaggccgtgctcaatgatgagcgctatcaaagcttcaaactgtttaagagtgtctttggagtgggggtgaagacagcagacaaatggtaccgtatgggtctgcgcacgctcgaggatgttcgttccagcaagaccctgaagttgaccccgatgcagaaagcgggtctgtgctattatgaagatcttgctgatggcgttacgaaagccgaagctgacgcgatttctctgctggttcaggatgcagtctggactttcgacccggatgcgctggtggagattgttggtggatttcgtcgtgggaaaccttttggtcacgacgttgatctgcttatcacatctccgggagctgagaaagaacaagaagaccagctcctgcagaaagtgaccaatctgtggaagaaacaagggttgttgctgtacggtgacctgcgtgaaagtcgctttgaagatgggaaactcccatcccgcaagatcgatgccctggaccattttgcgaaatgctttctgatcctcaaactttatcaccataaagtggacaaaagcaaatgggaaatgccgacgggttcgaacgaaagcgaggccaaaagttggaaagcaattcgcgtagatctggttcgttgtccctacgatcgttttgcgtttgcgttgttgggttggaccggaagccgcatgttcgaacgtgatctgcgccgctacgccacccacgagaagaagatgatgctggacaatcatgcgctgtatgacctgaccaagaaaatctttctcaaagctaaatcggaagaggaaattttcgcacatctggggcttgaatacctggaaccgtccgaacgtaacgca

SEQ ID NO: 1024 - protein, 529 aa, synthetic construct
  REGION 1..529: note = Variant of terminal deoxynucleotidyltransferase
MHHHHHHGGSGSHGIRTIDSDFGKKRQKKMDNHDSSAIYEIKFHEFVLFILEEKMGATRRTFLTDLARKKGFRVENELSDSVTHIVAENNSGSDVLAWLKTHKMEKTTQFELLDISWLIESMKVGKPVDTKGKYQLMESGVMSANPDPTEGRENILPPTTKTISQYACQRRTTLNNHNQRFTDALEILAENYEFKRNDDTCLTFMRAISVLKCLPFEVVSLKDTEGLPWIGDEVKGIMEEIIEVGESLEVQAVLNDERYQSFKLFKSVFGVGVKTADKWYRMGLRTLEDVRSSKTLKLTPMQKAGLCYYEDLADGVTKAEADAISLLVQDAVWTFDPDALVEIVGGFRRGKPFGHDVDLLITSPGAEKEQEDQLLQKVTNLWKKQGLLLYGDLRESRFEDGKLPSRKIDALDHFAKCFLILKLYHHKVDKSKWEMPTGSNESEAKSWKAIRVDLVRCPYDRFAFALLGWTGSRMFERDLRRYATHEKKMMLDNHALYDLTKKIFLKAKSEEEIFAHLGLEYLEPSERNA

SEQ ID NO: 1025 - DNA, 1587 bp, synthetic construct
  misc_feature 1..1587: note = Variant of terminal deoxynucleotidyltransferase
  source 1..1587: mol_type = other DNA
atgcaccatcatcatcatcatggcggtagcggcagccacggcattcgtaccatcgattcggacttcgggaagaaacgccagaagaagatggataaccacgatagttccgccatctatgaaatcaaatttcacgagtttgtgctgttcattctcgaagagaaaatgggtgcgacgcgtcgtacttttctgacagatttagcccgcaagaaagggttccgcgtcgagaatgaactgtcagacagcgttacccacatcgtggcagaaaataattcaggatctgacgtattggcttggctgaagactcacaagatggagaagaccacgcaatttgaactgctggatattagctggcttatcgaaagcatgaaagttggtaaaccggtggacaccaaggggaaataccagttgatggaatcgggtgtgatgagtgcgaacccagatccgacagagggtcgtgaaaacattctgcctcctactacgaagaccatttctcagtatgcgtgtcaacgccgcaccaccctgaacaaccataatcaacgttttacggacgcactggaaattcttgcggaaaattacgagttcaaacgcaacgatgatacttgtctgacctttatgcgtgctatttccgtgctgaaatgccttccgtttgaggtagttagcctgaaagacacggaaggattgccctggatcggtgatgaagtcaaagggattatggaagaaatcatcgaggtcggtgaatcgctggaagtgcaggccgtgctcaatgatgagggttatcaaagcttcaaactgtttaagagtgtctttggagtgggggtgaagacagcagacaaatggtaccgtatgggtctgcgcacgctcgaggatgttcgttccagcaagaccctgaagttgaccccgatgcagaaagcgggtctgtgctattatgaagatcttgctgatggcgttacgaaagccgaagctgacgcgatttctctgctggttcaggatgcagtctggactttcgacccggatgcgctggtggagattacgggtggatttcgtcgtgggaaaccttttggtcacgacgttgatctgcttatcacatctccgggagctgagaaagaacaagaagaccagctcctgcagaaagtgaccaatctgtggaagaaacaagggttgttgctgtacggtgacctgcgtgaaagtcgctttgaagatgggaaactcccatcccgcaagatcgatgccctggaccattttgcgaaatgctttctgatcctcaaactttatcaccataaagtggacaaaagcaaatgggaaatgccgacgggttcgaacgaaagcgaggccaaaagttggaaagcaattcgcgtagatctggttcgttgtccctacgatcgttttgcgtttgcgttgttgggttggaccggaagccgcatgttcgaacgtgatctgcgccgctacgccacccacgagaagaagatgatgctggacaatcatgcgctgtatgacctgaccaagaaaatctttctcaaagctaaatcggaagaggaaattttcgcacatctggggcttgaatacctggaaccgtccgaacgtaacgca

SEQ ID NO: 1026 - protein, 529 aa, synthetic construct
  REGION 1..529: note = Variant of terminal deoxynucleotidyltransferase
MHHHHHHGGSGSHGIRTIDSDFGKKRQKKMDNHDSSAIYEIKFHEFVLFILEEKMGATRRTFLTDLARKKGFRVENELSDSVTHIVAENNSGSDVLAWLKTHKMEKTTQFELLDISWLIESMKVGKPVDTKGKYQLMESGVMSANPDPTEGRENILPPTTKTISQYACQRRTTLNNHNQRFTDALEILAENYEFKRNDDTCLTFMRAISVLKCLPFEVVSLKDTEGLPWIGDEVKGIMEEIIEVGESLEVQAVLNDEGYQSFKLFKSVFGVGVKTADKWYRMGLRTLEDVRSSKTLKLTPMQKAGLCYYEDLADGVTKAEADAISLLVQDAVWTFDPDALVEITGGFRRGKPFGHDVDLLITSPGAEKEQEDQLLQKVTNLWKKQGLLLYGDLRESRFEDGKLPSRKIDALDHFAKCFLILKLYHHKVDKSKWEMPTGSNESEAKSWKAIRVDLVRCPYDRFAFALLGWTGSRMFERDLRRYATHEKKMMLDNHALYDLTKKIFLKAKSEEEIFAHLGLEYLEPSERNA

SEQ ID NO: 1027 - DNA, 1587 bp, synthetic construct
  misc_feature 1..1587: note = Variant of terminal deoxynucleotidyltransferase
  source 1..1587: mol_type = other DNA
atgcaccatcatcatcatcatggcggtagcggcagccacggcattcgtaccatcgattcggacttcgggaagaaacgccagaagaagatggataaccacgatagttccgccatctatgaaatcaaatttcacgagtttgtgctgttcattctcgaagagaaaatgggtgcgacgcgtcgtacttttctgacagatttagcccgcaagaaagggttccgcgtcgagaatgaactgtcagacagcgttacccacatcgtggcagaaaataattcaggatctgacgtattggcttggctgaagactcacaagatggagaagaccacgcaatttgaactgctggatattagctggcttatcgaaagcatgaaagttggtaaaccggtggacaccaaggggaaataccagttgatggaatcgggtgtgatgagtgcgaacccagatccgacagagggtcgtgaaaacattctgcctcctactacgaagaccatttctcagtatgcgtgtcaacgccgcaccaccctgaacaaccataatcaacgttttacggacgcactggaaattcttgcggaaaattacgagttcaaacgcaacgatgatacttgtctgacctttatgcgtgctatttccgtgctgaaatgccttccgtttgaggtagttagcctgaaagacacggaaggattgccctggatcggtgatgaagtcaaagggattatggaagaaatcatcgaggtcggtgaatcgctggaagtgcaggccgtgctcaatgatgagcgctatcaaagcttcaaatcttttaagagtgtctttggagtgggggtgaagacagcagacaaatggtaccgtatgggtctgcgcacgctcgaggatgttcgttccagcaagaccctgaagttgaccccgatgcagaaagcgggtctgtgctattatgaagatcttgctgatggcgttacgaaagccgaagctgacgcgatttctctgctggttcaggatgcagtctggactttcgacccggatgcgctggtggagattacgggtggatttcgtcgtgggaaaccttttggtcacgacgttgatctgcttatcacatctccgggagctgagaaagaacaagaagaccagctcctgcagaaagtgaccaatctgtggaagaaacaagggttgttgctgtacggtgacctgcgtgaaagtcgctttgaagatgggaaactcccatcccgcaagatcgatgccctggaccattttgcgaaatgctttctgatcctcaaactttatcaccataaagtggacaaaagcaaatgggaaatgccgacgggttcgaacgaaagcgaggccaaaagttggaaagcaattcgcgtagatctggttcgttgtccctacgatcgttttgcgtttgcgttgttgggttggaccggaagccgcatgttcgaacgtgatctgcgccgctacgccacccacgagaagaagatgatgctggacaatcatgcgctgtatgacctgaccaagaaaatctttctcaaagctaaatcggaagaggaaattttcgcacatctggggcttgaatacctggaaccgtccgaacgtaacgca

SEQ ID NO: 1028 - protein, 529 aa, synthetic construct
  REGION 1..529: note = Variant of terminal deoxynucleotidyltransferase
MHHHHHHGGSGSHGIRTIDSDFGKKRQKKMDNHDSSAIYEIKFHEFVLFILEEKMGATRRTFLTDLARKKGFRVENELSDSVTHIVAENNSGSDVLAWLKTHKMEKTTQFELLDISWLIESMKVGKPVDTKGKYQLMESGVMSANPDPTEGRENILPPTTKTISQYACQRRTTLNNHNQRFTDALEILAENYEFKRNDDTCLTFMRAISVLKCLPFEVVSLKDTEGLPWIGDEVKGIMEEIIEVGESLEVQAVLNDERYQSFKSFKSVFGVGVKTADKWYRMGLRTLEDVRSSKTLKLTPMQKAGLCYYEDLADGVTKAEADAISLLVQDAVWTFDPDALVEITGGFRRGKPFGHDVDLLITSPGAEKEQEDQLLQKVTNLWKKQGLLLYGDLRESRFEDGKLPSRKIDALDHFAKCFLILKLYHHKVDKSKWEMPTGSNESEAKSWKAIRVDLVRCPYDRFAFALLGWTGSRMFERDLRRYATHEKKMMLDNHALYDLTKKIFLKAKSEEEIFAHLGLEYLEPSERNA

SEQ ID NO: 1029 - DNA, 1587 bp, synthetic construct
  misc_feature 1..1587: note = Variant of terminal deoxynucleotidyltransferase
  source 1..1587: mol_type = other DNA
atgcaccatcatcatcatcatggcggtagcggcagccacggcattcgtaccatcgattcggacttcgggaagaaacgccagaagaagatggataaccacgatagttccgccatctatgaaatcaaatttcacgagtttgtgctgttcattctcgaagagaaaatgggtgcgacgcgtcgtacttttctgacagatttagcccgcaagaaagggttccgcgtcgagaatgaactgtcagacagcgttacccacatcgtggcagaaaataattcaggatctgacgtattggcttggctgaagactcacaagatggagaagaccacgcaatttgaactgctggatattagctggcttatcgaaagcatgaaagttggtaaaccggtggacaccaaggggaaataccagttgatggaatcgggtgtgatgagtgcgaacccagatccgacagagggtcgtgaaaacattctgcctcctactacgaagaccatttctcagtatgcgtgtcaacgccgcaccaccctgaacaaccataatcaacgttttacggacgcactggaaattcttgcggaaaattacgagttcaaacgcaacgatgatacttgtctgacctttatgcgtgctatttccgtgctgaaatgccttccgtttgaggtagttagcctgaaagacacggaaggattgccctggatcggtgatgaagtcaaagggattatggaagaaatcatcgaggtcggtgaatcgctggaagtgcaggccgtgctcaatgatgaggcgtatcaaagcttcaaactgtttaagagtgtctttggagtgggggtgaagacagcagacaaatggtaccgtatgggtctgcgcacgctcgaggatgttcgttccagcaagaccctgaagttgaccccgatgcagaaagcgggtctgtgctattatgaagatcttgctgatggcgttacgaaagccgaagctgacgcgatttctctgctggttcaggatgcagtctggactttcgacccggatgcgctggtggagattacgggtggatttcgtcgtgggaaaccttttggtcacgacgttgatctgcttatcacatctccgggagctgagaaagaacaagaagaccagctcctgcagaaagtgaccaatctgtggaagaaacaagggttgttgctgtacggtgacctgcgtgaaagtcgctttgaagatgggaaactcccatcccgcaagatcgatgccctggaccattttgcgaaatgctttctgatcctcaaactttatcaccataaagtggacaaaagcaaatgggaaatgccgacgggttcgaacgaaagcgaggccaaaagttggaaagcaattcgcgtagatctggttcgttgtccctacgatcgttttgcgtttgcgttgttgggttggaccggaagccgcatgttcgaacgtgatctgcgccgctacgccacccacgagaagaagatgatgctggacaatcatgcgctgtatgacctgaccaagaaaatctttctcaaagctaaatcggaagaggaaattttcgcacatctggggcttgaatacctggaaccgtccgaacgtaacgca

SEQ ID NO: 1030 - protein, 529 aa, synthetic construct
  REGION 1..529: note = Variant of terminal deoxynucleotidyltransferase
MHHHHHHGGSGSHGIRTIDSDFGKKRQKKMDNHDSSAIYEIKFHEFVLFILEEKMGATRRTFLTDLARKKGFRVENELSDSVTHIVAENNSGSDVLAWLKTHKMEKTTQFELLDISWLIESMKVGKPVDTKGKYQLMESGVMSANPDPTEGRENILPPTTKTISQYACQRRTTLNNHNQRFTDALEILAENYEFKRNDDTCLTFMRAISVLKCLPFEVVSLKDTEGLPWIGDEVKGIMEEIIEVGESLEVQAVLNDEAYQSFKLFKSVFGVGVKTADKWYRMGLRTLEDVRSSKTLKLTPMQKAGLCYYEDLADGVTKAEADAISLLVQDAVWTFDPDALVEITGGFRRGKPFGHDVDLLITSPGAEKEQEDQLLQKVTNLWKKQGLLLYGDLRESRFEDGKLPSRKIDALDHFAKCFLILKLYHHKVDKSKWEMPTGSNESEAKSWKAIRVDLVRCPYDRFAFALLGWTGSRMFERDLRRYATHEKKMMLDNHALYDLTKKIFLKAKSEEEIFAHLGLEYLEPSERNA

SEQ ID NO: 1031 - DNA, 1587 bp, synthetic construct
  misc_feature 1..1587: note = Variant of terminal deoxynucleotidyltransferase
  source 1..1587: mol_type = other DNA
atgcaccatcatcatcatcatggcggtagcggcagccacggcattcgtaccatcgattcggacttcgggaagaaacgccagaagaagatggataaccacgatagttccgccatctatgaaatcaaatttcacgagtttgtgctgttcattctcgaagagaaaatgggtgcgacgcgtcgtacttttctgacagatttagcccgcaagaaagggttccgcgtcgagaatgaactgtcagacagcgttacccacatcgtggcagaaaataattcaggatctgacgtattggcttggctgaagactcacaagatggagaagaccacgcaatttgaactgctggatattagctggcttatcgaaagcatgaaagttggtaaaccggtggacaccaaggggaaataccagttgatggaatcgggtgtgatgagtgcgaacccagatccgacagagggtcgtgaaaacattctgcctcctactacgaagaccatttctcagtatgcgtgtcaacgccgcaccaccctgaacaaccataatcaacgttttacggacgcactggaaattcttgcggaaaattacgagttcaaacgcaacgatgatacttgtctgacctttatgcgtgctatttccgtgctgaaatgccttccgtttgaggtagttagcctgaaagacacggaaggattgccctggatcggtgatgaagtcaaagggattatggaagaaatcatcgaggtcggtgaatcgctggaagtgcaggccgtgctcaatgatgagcgctatcaaagcttcaaactgtttaagagtgtctttggagtgggggtgaagacagcagacaaatggtaccgtatgggtctgcgcacgctcgaggatgcgcgttccagcaagaccctgaagttgaccccgatgcagaaagcgggtctgtgctattatgaagatcttgctgatggcgttacgaaagccgaagctgacgcgatttctctgctggttcaggatgcagtctggactttcgacccggatgcgctggtggagattacgggtggatttcgtcgtgggaaaccttttggtcacgacgttgatctgcttatcacatctccgggagctgagaaagaacaagaagaccagctcctgcagaaagtgaccaatctgtggaagaaacaagggttgttgctgtacggtgacctgcgtgaaagtcgctttgaagatgggaaactcccatcccgcaagatcgatgccctggaccattttgcgaaatgctttctgatcctcaaactttatcaccataaagtggacaaaagcaaatgggaaatgccgacgggttcgaacgaaagcgaggccaaaagttggaaagcaattcgcgtagatctggttcgttgtccctacgatcgttttgcgtttgcgttgttgggttggaccggaagccgcatgttcgaacgtgatctgcgccgctacgccacccacgagaagaagatgatgctggacaatcatgcgctgtatgacctgaccaagaaaatctttctcaaagccaaatcggaagaggaaattttcgcacatctggggcttgaatacctggaaccgtccgaacgtaacgca

SEQ ID NO: 1032 - protein, 529 aa, synthetic construct
  REGION 1..529: note = Variant of terminal deoxynucleotidyltransferase
MHHHHHHGGSGSHGIRTIDSDFGKKRQKKMDNHDSSAIYEIKFHEFVLFILEEKMGATRRTFLTDLARKKGFRVENELSDSVTHIVAENNSGSDVLAWLKTHKMEKTTQFELLDISWLIESMKVGKPVDTKGKYQLMESGVMSANPDPTEGRENILPPTTKTISQYACQRRTTLNNHNQRFTDALEILAENYEFKRNDDTCLTFMRAISVLKCLPFEVVSLKDTEGLPWIGDEVKGIMEEIIEVGESLEVQAVLNDERYQSFKLFKSVFGVGVKTADKWYRMGLRTLEDARSSKTLKLTPMQKAGLCYYEDLADGVTKAEADAISLLVQDAVWTFDPDALVEITGGFRRGKPFGHDVDLLITSPGAEKEQEDQLLQKVTNLWKKQGLLLYGDLRESRFEDGKLPSRKIDALDHFAKCFLILKLYHHKVDKSKWEMPTGSNESEAKSWKAIRVDLVRCPYDRFAFALLGWTGSRMFERDLRRYATHEKKMMLDNHALYDLTKKIFLKAKSEEEIFAHLGLEYLEPSERNA

SEQ ID NO: 1033 - DNA, 1587 bp, synthetic construct
  misc_feature 1..1587: note = Variant of terminal deoxynucleotidyltransferase
  source 1..1587: mol_type = other DNA
atgcaccatcatcatcatcatggcggtagcggcagccacggcattcgtaccatcgattcggacttcgggaagaaacgccagaagaagatggataaccacgatagttccgccatctatgaaatcaaatttcacgagtttgtgctgttcattctcgaagagaaaatgggtgcgacgcgtcgtacttttctgacagatttagcccgcaagaaagggttccgcgtcgagaatgaactgtcagacagcgttacccacatcgtggcagaaaataattcaggatctgacgtattggcttggctgaagactcacaagatggagaagaccacgcaatttgaactgctggatattagctggcttatcgaaagcatgaaagttggtaaaccggtggacaccaaggggaaataccagttgatggaatcgggtgtgatgagtgcgaacccagatccgacagagggtcgtgaaaacattctgcctcctactacgaagaccatttctcagtatgcgtgtcaacgccgcaccaccctgaacaaccataatcaacgttttacggacgcactggaaattcttgcggaaaattacgagttcaaacgcaacgatgatacttgtctgacctttatgcgtgctatttccgtgctgaaatgccttccgtttgaggtagttagcctgaaagacacggaaggattgccctggatcggtgatgaagtcaaagggattatggaagaaatcatcgaggtcggtgaatcgctggaagtgcaggccgtgctcaatgatgagctgtatcaaagcttcaaactgtttaagagtgtctttggagtgggggtgaagacagcagacaaatggtaccgtatgggtctgcgcacgctcgaggatgttcgttccagcaagaccctgaagttgaccccgatgcagaaagcgggtctgtgctattatgaagatcttgctgatggcgttacgaaagccgaagctgacgcgatttctctgctggttcaggatgcagtctggactttcgacccggatgcgctggtggagattacgggtggatttcgtcgtgggaaaccttttggtcacgacgttgatctgcttatcacatctccgggagctgagaaagaacaagaagaccagctcctgcagaaagtgaccaatctgtggaagaaacaagggttgttgctgtacggtgacctgcgtgaaagtcgctttgaagatgggaaactcccatcccgcaagatcgatgccctggaccattttgcgaaatgctttctgatcctcaaactttatcaccataaagtggacaaaagcaaatgggaaatgccgacgggttcgaacgaaagcgaggccaaaagttggaaagcaattcgcgtagatctggttcgttgtccctacgatcgttttgcgtttgcgttgttgggttggaccggaagccgcatgttcgaacgtgatctgcgccgctacgccacccacgagaagaagatgatgctggacaatcatgcgctgtatgacctgaccaagaaaatctttctcaaagctaaatcggaagaggaaattttcgcacatctggggcttgaatacctggaaccgtccgaacgtaacgca

SEQ ID NO: 1034 - protein, 529 aa, synthetic construct
  REGION 1..529: note = Variant of terminal deoxynucleotidyltransferase
MHHHHHHGGSGSHGIRTIDSDFGKKRQKKMDNHDSSAIYEIKFHEFVLFILEEKMGATRRTFLTDLARKKGFRVENELSDSVTHIVAENNSGSDVLAWLKTHKMEKTTQFELLDISWLIESMKVGKPVDTKGKYQLMESGVMSANPDPTEGRENILPPTTKTISQYACQRRTTLNNHNQRFTDALEILAENYEFKRNDDTCLTFMRAISVLKCLPFEVVSLKDTEGLPWIGDEVKGIMEEIIEVGESLEVQAVLNDELYQSFKLFKSVFGVGVKTADKWYRMGLRTLEDVRSSKTLKLTPMQKAGLCYYEDLADGVTKAEADAISLLVQDAVWTFDPDALVEITGGFRRGKPFGHDVDLLITSPGAEKEQEDQLLQKVTNLWKKQGLLLYGDLRESRFEDGKLPSRKIDALDHFAKCFLILKLYHHKVDKSKWEMPTGSNESEAKSWKAIRVDLVRCPYDRFAFALLGWTGSRMFERDLRRYATHEKKMMLDNHALYDLTKKIFLKAKSEEEIFAHLGLEYLEPSERNA

SEQ ID NO: 1035 - DNA, 1587 bp, synthetic construct
  misc_feature 1..1587: note = Variant of terminal deoxynucleotidyltransferase
  source 1..1587: mol_type = other DNA
atgcaccatcatcatcatcatggcggtagcggcagccacggcattcgtaccatcgattcggacttcgggaagaaacgccagaagaagatggataaccacgatagttccgccatctatgaaatcaaatttcacgagtttgtgctgttcattctcgaagagaaaatgggtgcgacgcgtcgtacttttctgacagatttagcccgcaagaaagggttccgcgtcgagaatgaactgtcagacagcgttacccacatcgtggcagaaaataattcaggatctgacgtattggcttggctgaagactcacaagatggagaagaccacgcaatttgaactgctggatattagctggcttatcgaaagcatgaaagttggtaaaccggtggacaccaaggggaaataccagttgatggaatcgggtgtgatgagtgcgaacccagatccgacagagggtcgtgaaaacattctgcctcctactacgaagaccatttctcagtatgcgtgtcaacgccgcaccaccctgaacaaccataatcaacgttttacggacgcactggaaattcttgcggaaaattacgagttcaaacgcaacgatgatacttgtctgacctttatgcgtgctatttccgtgctgaaatgccttccgtttgaggtagttagcctgaaagacacggaaggattgccctggatcggtgatgaagtcaaagggattatggaagaaatcatcgaggtcggtgaatcgctggaagtgcaggccgtgctcaatgatgagcgctatcaaagcttcaaactgtttaagagtgtctttggagtgggggtgaagacagcagacaaatggtaccgtatgggtctgcgcacgctcgaggatgttcgttccagcaagaccctgaagttgaccccgatgcagaaagcgggtctgtgctattatagtgatcttgctgatggcgttacgaaagccgaagctgacgcgatctctctgctggttcaggatgcagtctggactttcgacccggatgcgctggtggagattacgggtggatttcgtcgtgggaaaccttttggtcacgacgttgatctgcttatcacatctccgggagctgagaaagaacaagaagaccagctcctgcagaaagtgaccaatctgtggaagaaacaagggttgttgctgtacggtgacctgcgtgaaagtcgctttgaagatgggaaactcccatcccgcaagatcgatgccctggaccattttgcgaaatgctttctgatcctcaaactttatcaccataaagtggacaaaagcaaatgggaaatgccgacgggttcgaacgaaagcgaggccaaaagttggaaagcaattcgcgtagatctggttcgttgtccctacgatcgttttgcgtttgcgttgttgggttggaccggaagccgcatgttcgaacgtgatctgcgccgctacgccacccacgagaagaagatgatgctggacaatcatgcgctgtatgacctgaccaagaaaatctttctcaaagctaaatcggaagaggaaattttcgcacatctggggcttgaatacctggaaccgtccgaacgtaacgca

SEQ ID NO: 1036 - protein, 529 aa, synthetic construct
  REGION 1..529: note = Variant of terminal deoxynucleotidyltransferase
MHHHHHHGGSGSHGIRTIDSDFGKKRQKKMDNHDSSAIYEIKFHEFVLFILEEKMGATRRTFLTDLARKKGFRVENELSDSVTHIVAENNSGSDVLAWLKTHKMEKTTQFELLDISWLIESMKVGKPVDTKGKYQLMESGVMSANPDPTEGRENILPPTTKTISQYACQRRTTLNNHNQRFTDALEILAENYEFKRNDDTCLTFMRAISVLKCLPFEVVSLKDTEGLPWIGDEVKGIMEEIIEVGESLEVQAVLNDERYQSFKLFKSVFGVGVKTADKWYRMGLRTLEDVRSSKTLKLTPMQKAGLCYYSDLADGVTKAEADAISLLVQDAVWTFDPDALVEITGGFRRGKPFGHDVDLLITSPGAEKEQEDQLLQKVTNLWKKQGLLLYGDLRESRFEDGKLPSRKIDALDHFAKCFLILKLYHHKVDKSKWEMPTGSNESEAKSWKAIRVDLVRCPYDRFAFALLGWTGSRMFERDLRRYATHEKKMMLDNHALYDLTKKIFLKAKSEEEIFAHLGLEYLEPSERNA

SEQ ID NO: 1037 - DNA, 1587 bp, synthetic construct
  misc_feature 1..1587: note = Variant of terminal deoxynucleotidyltransferase
  source 1..1587: mol_type = other DNA
atgcaccatcatcatcatcatggcggtagcggcagccacggcattcgtaccatcgattcggacttcgggaagaaacgccagaagaagatggataaccacgatagttccgccatctatgaaatcaaatttcacgagtttgtgctgttcattctcgaagagaaaatgggtgcgacgcgtcgtacttttctgacagatttagcccgcaagaaagggttccgcgtcgagaatgaactgtcagacagcgttacccacatcgtggcagaaaataattcaggatctgacgtattggcttggctgaagactcacaagatggagaagaccacgcaatttgaactgctggatattagctggcttatcgaaagcatgaaagttggtaaaccggtggacaccaaggggaaataccagttgatggaatcgggtgtgatgagtgcgaacccagatccgacagagggtcgtgaaaacattctgcctcctactacgaagaccatttctcagtatgcgtgtcaacgccgcaccaccctgaacaaccataatcaacgttttacggacgcactggaaattcttgcggaaaattacgagttcaaacgcaacgatgatacttgtctgacctttatgcgtgctatttccgtgctgaaatgccttccgtttgaggtagttagcctgaaagacacggaaggattgccctggatcggtgatgaagtcaaagggattatggaagaaatcatcgaggtcggtgaatcgctggaagtgcaggccgtgctcaatgatgagcgctatcaaagcttcaaactgtttaagagtgtctttggagtgggggtgaagacagcagacaaatggtaccgtcatggtctgcgcacgctcgaggatgttcgttccagcaagaccctgaagttgaccccgatgcagaaagcgggtctgtgctattatgaagatcttgctgatggcgttacgaaagccgaagctgacgcgatttctctgctggttcaggatgcagtctggactttcgacccggatgcgctggtggagattacgggtggatttcgtcgtgggaaaccttttggtcacgacgttgatctgcttatcacatctccgggagctgagaaagaacaagaagaccagctcctgcagaaagtgaccaatctgtggaagaaacaagggttgttgctgtacggtgacctgcgtgaaagtcgctttgaagatgggaaactcccatcccgcaagatcgatgccctggaccattttgcgaaatgctttctgatcctcaaactttatcaccataaagtggacaaaagcaaatgggaaatgccgacgggttcgaacgaaagcgaggccaaaagttggaaagcaattcgcgtagatctggttcgttgtccctacgatcgttttgcgtttgcgttgttgggttggaccggaagccgcatgttcgaacgtgatctgcgccgctacgccacccacgagaagaagatgatgctggacaatcatgcgctgtatgacctgaccaagaaaatctttctcaaagctaaatcggaagaggaaattttcgcacatctggggcttgaatacctggaaccgtccgaacgtaacgca

SEQ ID NO: 1038 - protein, 529 aa, synthetic construct
  REGION 1..529: note = Variant of terminal deoxynucleotidyltransferase
MHHHHHHGGSGSHGIRTIDSDFGKKRQKKMDNHDSSAIYEIKFHEFVLFILEEKMGATRRTFLTDLARKKGFRVENELSDSVTHIVAENNSGSDVLAWLKTHKMEKTTQFELLDISWLIESMKVGKPVDTKGKYQLMESGVMSANPDPTEGRENILPPTTKTISQYACQRRTTLNNHNQRFTDALEILAENYEFKRNDDTCLTFMRAISVLKCLPFEVVSLKDTEGLPWIGDEVKGIMEEIIEVGESLEVQAVLNDERYQSFKLFKSVFGVGVKTADKWYRHGLRTLEDVRSSKTLKLTPMQKAGLCYYEDLADGVTKAEADAISLLVQDAVWTFDPDALVEITGGFRRGKPFGHDVDLLITSPGAEKEQEDQLLQKVTNLWKKQGLLLYGDLRESRFEDGKLPSRKIDALDHFAKCFLILKLYHHKVDKSKWEMPTGSNESEAKSWKAIRVDLVRCPYDRFAFALLGWTGSRMFERDLRRYATHEKKMMLDNHALYDLTKKIFLKAKSEEEIFAHLGLEYLEPSERNA

SEQ ID NO: 1039 - DNA, 1587 bp, synthetic construct
  misc_feature 1..1587: note = Variant of terminal deoxynucleotidyltransferase
  source 1..1587: mol_type = other DNA
atgcaccatcatcatcatcatggcggtagcggcagccacggcattcgtaccatcgattcggacttcgggaagaaacgccagaagaagatggataaccacgatagttccgccatctatgaaatcaaatttcacgagtttgtgctgttcattctcgaagagaaaatgggtgcgacgcgtcgtacttttctgacagatttagcccgcaagaaagggttccgcgtcgagaatgaactgtcagacagcgttacccacatcgtggcagaaaataattcaggatctgacgtattggcttggctgaagactcacaagatggagaagaccacgcaatttgaactgctggatattagctggcttatcgaaagcatgaaagttggtaaaccggtggacaccaaggggaaataccagttgatggaatcgggtgtgatgagtgcgaacccagatccgacagagggtcgtgaaaacattctgcctcctactacgaagaccatttctcagtatgcgtgtcaacgccgcaccaccctgaacaaccataatcaacgttttacggacgcactggaaattcttgcggaaaattacgagttcaaacgcaacgatgatacttgtctgacctttatgcgtgctatttccgtgctgaaatgccttccgtttgaggtagttagcctgaaagacacggaaggattgccctggatcggtgatgaagtcaaagggattatggaagaaatcatcgaggtcggtgaatcgctggaagtgcaggccgtgctcaatgatgagcgctatcaaagcttcaaactgtttaagagtgtctttggagtgggggtgaagacagcagacaaatggtaccgtatgggtctgcgcacgctcgaggatgttcgttccagcaagaccctgaagttgaccccgatgcagaaagcgggtctgtgctattatgaagatcttgctgatgctgttacgaaagccgaagctgacgcgatttctctgctggttcaggatgcagtctggactttcgacccggatgcgctggtggagattacgggtggatttcgtcgtgggaaaccttttggtcacgacgttgatctgcttatcacatctccgggagctgagaaagaacaagaagaccagctcctgcagaaagtgaccaatctgtggaagaaacaagggttgttgctgtacggtgacctgcgtgaaagtcgctttgaagatgggaaactcccatcccgcaagatcgatgccctggaccattttgcgaaatgctttctgatcctcaaactttatcaccataaagtggacaaaagcaaatgggaaatgccgacgggttcgaacgaaagcgaggccaaaagttggaaagcaattcgcgtagatctggttcgttgtccctacgatcgttttgcgtttgcgttgttgggttggaccggaagccgcatgttcgaacgtgatctgcgccgctacgccacccacgagaagaagatgatgctggacaatcatgcgctgtatgacctgaccaagaaaatctttctcaaagctaaatcggaagaggaaattttcgcacatctggggcttgaatacctggaaccgtccgaacgtaacgca

SEQ ID NO: 1040 - protein, 529 aa, synthetic construct
  REGION 1..529: note = Variant of terminal deoxynucleotidyltransferase
MHHHHHHGGSGSHGIRTIDSDFGKKRQKKMDNHDSSAIYEIKFHEFVLFILEEKMGATRRTFLTDLARKKGFRVENELSDSVTHIVAENNSGSDVLAWLKTHKMEKTTQFELLDISWLIESMKVGKPVDTKGKYQLMESGVMSANPDPTEGRENILPPTTKTISQYACQRRTTLNNHNQRFTDALEILAENYEFKRNDDTCLTFMRAISVLKCLPFEVVSLKDTEGLPWIGDEVKGIMEEIIEVGESLEVQAVLNDERYQSFKLFKSVFGVGVKTADKWYRMGLRTLEDVRSSKTLKLTPMQKAGLCYYEDLADAVTKAEADAISLLVQDAVWTFDPDALVEITGGFRRGKPFGHDVDLLITSPGAEKEQEDQLLQKVTNLWKKQGLLLYGDLRESRFEDGKLPSRKIDALDHFAKCFLILKLYHHKVDKSKWEMPTGSNESEAKSWKAIRVDLVRCPYDRFAFALLGWTGSRMFERDLRRYATHEKKMMLDNHALYDLTKKIFLKAKSEEEIFAHLGLEYLEPSERNA

SEQ ID NO: 1041 - DNA, 1587 bp, synthetic construct
  misc_feature 1..1587: note = Variant of terminal deoxynucleotidyltransferase
  source 1..1587: mol_type = other DNA
atgcaccatcatcatcatcatggcggtagcggcagccacggcattcgtaccatcgattcggacttcgggaagaaacgccagaagaagatggataaccacgatagttccgccatctatgaaatcaaatttcacgagtttgtgctgttcattctcgaagagaaaatgggtgcgacgcgtcgtacttttctgacagatttagcccgcaagaaagggttccgcgtcgagaatgaactgtcagacagcgttacccacatcgtggcagaaaataattcaggatctgacgtattggcttggctgaagactcacaagatggagaagaccacgcaatttgaactgctggatattagctggcttatcgaaagcatgaaagttggtaaaccggtggacaccaaggggaaataccagttgatggaatcgggtgtgatgagtgcgaacccagatccgacagagggtcgtgaaaacattctgcctcctactacgaagaccatttctcagtatgcgtgtcaacgccgcaccaccctgaacaaccataatcaacgttttacggacgcactggaaattcttgcggaaaattacgagttcaaacgcaacgatgatacttgtctgacctttatgcgtgctatttccgtgctgaaatgccttccgtttgaggtagttagcctgaaagacacggaaggattgccctggatcggtgatgaagtcaaagggattatggaagaaatcatcgaggtcggtgaatcgctggaagtgcaggccgtgctcaatgatgagcgctatcaaagcttcaaactgtttaagagtgtctttggagtgggggtgaagacagcagacaaatggtaccgtatgggtctgcgcacgctcgaggatgttcgttccagcaagaccctgaagttgaccccgatgcagaaagcgggtctgtgctattatgaagatcttgctgatggcgcgacgaaagccgaagctgacgcgatttctctgctggttcaggatgcagtctggactttcgacccggatgcgctggtggagattacgggtggattccgtcgtgggaaaccttttggtcacgacgttgatctgcttatcacatctccgggagctgagaaagaacaagaagaccagctcctgcagaaagtgaccaatctgtggaagaaacaagggttgttgctgtacggtgacctgcgtgaaagtcgctttgaagatgggaaactcccatcccgcaagatcgatgccctggaccattttgcgaaatgctttctgatcctcaaactttatcaccataaagtggacaaaagcaaatgggaaatgccgacgggttcgaacgaaagcgaggccaaaagttggaaagcaattcgcgtagatctggttcgttgtccctacgatcgttttgcgtttgcgttgttgggttggaccggaagccgcatgttcgaacgtgatctgcgccgctacgccacccacgagaagaagatgatgctggacaatcatgcgctgtatgacctgaccaagaaaatctttctcaaagctaaatcggaagaggaaattttcgcacatctggggcttgaatacctggaaccgtccgaacgtaacgca

SEQ ID NO: 1042 - protein, 529 aa, synthetic construct
  REGION 1..529: note = Variant of terminal deoxynucleotidyltransferase
MHHHHHHGGSGSHGIRTIDSDFGKKRQKKMDNHDSSAIYEIKFHEFVLFILEEKMGATRRTFLTDLARKKGFRVENELSDSVTHIVAENNSGSDVLAWLKTHKMEKTTQFELLDISWLIESMKVGKPVDTKGKYQLMESGVMSANPDPTEGRENILPPTTKTISQYACQRRTTLNNHNQRFTDALEILAENYEFKRNDDTCLTFMRAISVLKCLPFEVVSLKDTEGLPWIGDEVKGIMEEIIEVGESLEVQAVLNDERYQSFKLFKSVFGVGVKTADKWYRMGLRTLEDVRSSKTLKLTPMQKAGLCYYEDLADGATKAEADAISLLVQDAVWTFDPDALVEITGGFRRGKPFGHDVDLLITSPGAEKEQEDQLLQKVTNLWKKQGLLLYGDLRESRFEDGKLPSRKIDALDHFAKCFLILKLYHHKVDKSKWEMPTGSNESEAKSWKAIRVDLVRCPYDRFAFALLGWTGSRMFERDLRRYATHEKKMMLDNHALYDLTKKIFLKAKSEEEIFAHLGLEYLEPSERNA

SEQ ID NO: 1043 - DNA, 1587 bp, synthetic construct
  misc_feature 1..1587: note = Variant of terminal deoxynucleotidyltransferase
  source 1..1587: mol_type = other DNA
atgcaccatcatcatcatcatggcggtagcggcagccacggcattcgtaccatcgattcggacttcgggaagaaacgccagaagaagatggataaccacgatagttccgccatctatgaaatcaaatttcacgagtttgtgctgttcattctcgaagagaaaatgggtgcgacgcgtcgtacttttctgacagatttagcccgcaagaaagggttccgcgtcgagaatgaactgtcagacagcgttacccacatcgtggcagaaaataattcaggatctgacgtattggcttggctgaagactcacaagatggagaagaccacgcaatttgaactgctggatattagctggcttatcgaaagcatgaaagttggtaaaccggtggacaccaaggggaaataccagttgatggaatcgggtgtgatgagtgcgaacccagatccgacagagggtcgtgaaaacattctgcctcctactacgaagaccatttctcagtatgcgtgtcaacgccgcaccaccctgaacaaccataatcaacgttttacggacgcactggaaattcttgcggaaaattacgagttcaaacgcaacgatgatacttgtctgacctttatgcgtgctatttccgtgctgaaatgccttccgtttgaggtagttagcctgaaagacacggaaggattgccctggatcggtgatgaagtcaaagggattatggaagaaatcatcgaggtcggtgaatcgctggaagtgcaggccgtgctcaatgatgagatgtatcaaagcttcaaactgtttaagagtgtctttggagtgggggtgaagacagcagacaaatggtaccgtatgggtctgcgcacgctcgaggatgttcgttccagcaagaccctgaagttgaccccgatgcagaaagcgggtctgtgctattatgaagatcttgctgatggcgttacgaaagccgaagctgacgcgatttctctgctggttcaggatgcagtctggactttcgacccggatgcgctggtggagattacgggtggatttcgtcgtgggaaaccttttggtcacgacgttgatctgcttatcacatctccgggagctgagaaagaacaagaagaccagctcctgcagaaagtgaccaatctgtggaagaaacaagggttgttgctgtacggtgacctgcgtgaaagtcgctttgaagatgggaaactcccatcccgcaagatcgatgccctggaccattttgcgaaatgctttctgatcctcaaactttatcaccataaagtggacaaaagcaaatgggaaatgccgacgggttcgaacgaaagcgaggccaaaagttggaaagcaattcgcgtagatctggttcgttgtccctacgatcgttttgcgtttgcgttgttgggttggaccggaagccgcatgttcgaacgtgatctgcgccgctacgccacccacgagaagaagatgatgctggacaatcatgcgctgtatgacctgaccaagaaaatctttctcaaagctaaatcggaagaggaaattttcgcacatctggggcttgaatacctggaaccgtccgaacgtaacgca

SEQ ID NO: 1044 - protein, 529 aa, synthetic construct
  REGION 1..529: note = Variant of terminal deoxynucleotidyltransferase
MHHHHHHGGSGSHGIRTIDSDFGKKRQKKMDNHDSSAIYEIKFHEFVLFILEEKMGATRRTFLTDLARKKGFRVENELSDSVTHIVAENNSGSDVLAWLKTHKMEKTTQFELLDISWLIESMKVGKPVDTKGKYQLMESGVMSANPDPTEGRENILPPTTKTISQYACQRRTTLNNHNQRFTDALEILAENYEFKRNDDTCLTFMRAISVLKCLPFEVVSLKDTEGLPWIGDEVKGIMEEIIEVGESLEVQAVLNDEMYQSFKLFKSVFGVGVKTADKWYRMGLRTLEDVRSSKTLKLTPMQKAGLCYYEDLADGVTKAEADAISLLVQDAVWTFDPDALVEITGGFRRGKPFGHDVDLLITSPGAEKEQEDQLLQKVTNLWKKQGLLLYGDLRESRFEDGKLPSRKIDALDHFAKCFLILKLYHHKVDKSKWEMPTGSNESEAKSWKAIRVDLVRCPYDRFAFALLGWTGSRMFERDLRRYATHEKKMMLDNHALYDLTKKIFLKAKSEEEIFAHLGLEYLEPSERNA

SEQ ID NO: 1045 - DNA, 1587 bp, synthetic construct
  misc_feature 1..1587: note = Variant of terminal deoxynucleotidyltransferase
  source 1..1587: mol_type = other DNA
atgcaccatcatcatcatcatggcggtagcggcagccacggcattcgtaccatcgattcggacttcgggaagaaacgccagaagaagatggataaccacgatagttccgccatctatgaaatcaaatttcacgagtttgtgctgttcattctcgaagagaaaatgggtgcgacgcgtcgtacttttctgacagatttagcccgcaagaaagggttccgcgtcgagaatgaactgtcagacagcgttacccacatcgtggcagaaaataattcaggatctgacgtattggcttggctgaagactcacaagatggagaagaccacgcaatttgaactgctggatattagctggcttatcgaaagcatgaaagttggtaaaccggtggacaccaaggggaaataccagttgatggaatcgggtgtgatgagtgcgaacccagatccgacagagggtcgtgaaaacattctgcctcctactacgaagaccatttctcagtatgcgtgtcaacgccgcaccaccctgaacaaccataatcaacgttttacggacgcactggaaattcttgcggaaaattacgagttcaaacgcaacgatgatacttgtctgacctttatgcgtgctatttccgtgctgaaatgccttccgtttgaggtagttagcctgaaagacacggaaggattgccctggatcggtgatgaagtcaaagggattatggaagaaatcatcgaggtcggtgaatcgctggaagtgcaggccgtgctcaatgatgagcgctatcaagtgttcaaactgtttaagagtgtctttggagtgggggtgaagacagcagacaaatggtaccgtatgggtctgcgcacgctcgaggatgttcgttccagcaagaccctgaagttgaccccgatgcagaaagcgggtctgtgctattatgaagatcttgctgatggcgttacgaaagccgaagctgacgcgatttctctgctggttcaggatgcagtctggactttcgacccggatgcgctggtggagattacgggtggatttcgtcgtgggaaaccttttggtcacgacgttgatctgcttatcacatctccgggagctgagaaagaacaagaagaccagctcctgcagaaagtgaccaatctgtggaagaaacaagggttgttgctgtacggtgacctgcgtgaaagtcgctttgaagatgggaaactcccatcccgcaagatcgatgccctggaccattttgcgaaatgctttctgatcctcaaactttatcaccataaagtggacaaaagcaaatgggaaatgccgacgggttcgaacgaaagcgaggccaaaagttggaaagcaattcgcgtagatctggttcgttgtccctacgatcgttttgcgtttgcgttgttgggttggaccggaagccgcatgttcgaacgtgatctgcgccgctacgccacccacgagaagaagatgatgctggacaatcatgcgctgtatgacctgaccaagaaaatctttctcaaagctaaatcggaagaggaaattttcgcacatctggggcttgaatacctggaaccgtccgaacgtaacgca

SEQ ID NO: 1046 - protein, 529 aa, synthetic construct
  REGION 1..529: note = Variant of terminal deoxynucleotidyltransferase
MHHHHHHGGSGSHGIRTIDSDFGKKRQKKMDNHDSSAIYEIKFHEFVLFILEEKMGATRRTFLTDLARKKGFRVENELSDSVTHIVAENNSGSDVLAWLKTHKMEKTTQFELLDISWLIESMKVGKPVDTKGKYQLMESGVMSANPDPTEGRENILPPTTKTISQYACQRRTTLNNHNQRFTDALEILAENYEFKRNDDTCLTFMRAISVLKCLPFEVVSLKDTEGLPWIGDEVKGIMEEIIEVGESLEVQAVLNDERYQVFKLFKSVFGVGVKTADKWYRMGLRTLEDVRSSKTLKLTPMQKAGLCYYEDLADGVTKAEADAISLLVQDAVWTFDPDALVEITGGFRRGKPFGHDVDLLITSPGAEKEQEDQLLQKVTNLWKKQGLLLYGDLRESRFEDGKLPSRKIDALDHFAKCFLILKLYHHKVDKSKWEMPTGSNESEAKSWKAIRVDLVRCPYDRFAFALLGWTGSRMFERDLRRYATHEKKMMLDNHALYDLTKKIFLKAKSEEEIFAHLGLEYLEPSERNA

SEQ ID NO: 1047 - DNA, 1587 bp, synthetic construct
  misc_feature 1..1587: note = Variant of terminal deoxynucleotidyltransferase
  source 1..1587: mol_type = other DNA
atgcaccatcatcatcatcatggcggtagcggcagccacggcattcgtaccatcgattcggacttcgggaagaaacgccagaagaagatggataaccacgatagttccgccatctatgaaatcaaatttcacgagtttgtgctgttcattctcgaagagaaaatgggtgcgacgcgtcgtacttttctgacagatttagcccgcaagaaagggttccgcgtcgagaatgaactgtcagacagcgttacccacatcgtggcagaaaataattcaggatctgacgtattggcttggctgaagactcacaagatggagaagaccacgcaatttgaactgctggatattagctggcttatcgaaagcatgaaagttggtaaaccggtggacaccaaggggaaataccagttgatggaatcgggtgtgatgagtgcgaacccagatccgacagagggtcgtgaaaacattctgcctcctactacgaagaccatttctcagtatgcgtgtcaacgccgcaccaccctgaacaaccataatcaacgttttacggacgcactggaaattcttgcggaaaattacgagttcaaacgcaacgatgatacttgtctgacctttatgcgtgctatttccgtgctgaaatgccttccgtttgaggtagttagcctgaaagacacggaaggattgccctggatcggtgatgaagtcaaagggattatggaagaaatcatcgaggtcggtgaatcgctggaagtgcaggccgtgctcaatgatgagcgctatcaaagcttcaaactgtttaagagtgtctttggagtgggggtgaagacagcagacaaatggtatcgtatgggtctgcgcacgctcgaggatgttcgttccagcaagaccctgaagttgaccccgatgcagaaagcgggtctgtgctattatgaagatcttgctgatggcgttacgaaagccgaagctgacgcgatttctctgctggttcaggatgcagtctggactttcgacccggatgcgctggtggagattacgggtggatttcgtcgtgggaaaccttttggtcacgacgttgatctgcttatcacatctccgggagctgagaaagaacaagaagaccagctcctgcagaaagtgaccaatctgtggaagaaacaagggttgttgctgtacggtgacctgcgtgaaagtcgctttgaagatgggaaactcccatcccgcaagatcgatgccctggaccattttgcgaaatgctttctgatcctcaaactttatcaccataaagtggacaaaagcaaatgggaaatgccgacgggttcgaacgaaagcgaggccaaaagttggaaagcaattcgcgtagatctggttcgttgtccctacgatcgttttgcgtttgcgttgttgggttggaccggaagccgcatgttcgaacgtgatctgcgccgctacgccacccacgagaagaagatgatgctggacaatcatgcgctgtatgacctgaccaagaaaatctttctcaaagctaaatcggaagaggaaattttcgtacatctggggcttgaatacctggaaccgtccgaacgtaacgca

SEQ ID NO: 1048 - protein, 529 aa, synthetic construct
  REGION 1..529: note = Variant of terminal deoxynucleotidyltransferase
MHHHHHHGGSGSHGIRTIDSDFGKKRQKKMDNHDSSAIYEIKFHEFVLFILEEKMGATRRTFLTDLARKKGFRVENELSDSVTHIVAENNSGSDVLAWLKTHKMEKTTQFELLDISWLIESMKVGKPVDTKGKYQLMESGVMSANPDPTEGRENILPPTTKTISQYACQRRTTLNNHNQRFTDALEILAENYEFKRNDDTCLTFMRAISVLKCLPFEVVSLKDTEGLPWIGDEVKGIMEEIIEVGESLEVQAVLNDERYQSFKLFKSVFGVGVKTADKWYRMGLRTLEDVRSSKTLKLTPMQKAGLCYYEDLADGVTKAEADAISLLVQDAVWTFDPDALVEITGGFRRGKPFGHDVDLLITSPGAEKEQEDQLLQKVTNLWKKQGLLLYGDLRESRFEDGKLPSRKIDALDHFAKCFLILKLYHHKVDKSKWEMPTGSNESEAKSWKAIRVDLVRCPYDRFAFALLGWTGSRMFERDLRRYATHEKKMMLDNHALYDLTKKIFLKAKSEEEIFVHLGLEYLEPSERNA

SEQ ID NO: 1049 - DNA, 1587 bp, synthetic construct
  misc_feature 1..1587: note = Variant of terminal deoxynucleotidyltransferase
  source 1..1587: mol_type = other DNA
atgcaccatcatcatcatcatggcggtagcggcagccacggcattcgtaccatcgattcggacttcgggaagaaacgccagaagaagatggataaccacgatagttccgccatctatgaaatcaaatttcacgagtttgtgctgttcattctcgaagagaaaatgggtgcgacgcgtcgtacttttctgacagatttagcccgcaagaaagggttccgcgtcgagaatgaactgtcagacagcgttacccacatcgtggcagaaaataattcaggatctgacgtattggcttggctgaagactcacaagatggagaagaccacgcaatttgaactgctggatattagctggcttatcgaaagcatgaaagttggtaaaccggtggacaccaaggggaaataccagttgatggaatcgggtgtgatgagtgcgaacccagatccgacagagggtcgtgaaaacattctgcctcctactacgaagaccatttctcagtatgcgtgtcaacgccgcaccaccctgaacaaccataatcaacgttttacggacgcactggaaattcttgcggaaaattacgagttcaaacgcatggatgatacttgtctgacctttatgcgtgctatttccgtgctgaaatgccttccgtttgaggtagttagcctgaaagacacggaaggattgccctggatcggtgatgaagtcaaagggattatggaagaaatcatcgaggtcggtgaatcgctggaagtgcaggccgtgctcaatgatgagcgctatcaaagcttcaaactgtttaagagtgtctttggagtgggggtgaagacagcagacaaatggtaccgtatgggtctgcgcacgctcgaggatgttcgttccagcaagaccctgaagttgaccccgatgcagaaagcgggtctgtgctattatgaagatcttgctgatggcgttacgaaagccgaagctgacgcgatttctctgctggttcaggatgcagtctggactttcgacccggatgcgctggtggagattacgggtggatttcgtcgtgggaaaccttttggtcacgacgttgatctgcttatcacatctccgggagctgagaaagaacaagaagaccagctcctgcagaaagtgaccaatctgtggaagaaacaagggttgttgctgtacggtgacctgcgtgaaagtcgctttgaagatgggaaactcccatcccgcaagatcgatgccctggaccattttgcgaaatgctttctgatcctcaaactttatcaccataaagtggacaaaagcaaatgggaaatgccgacgggttcgaacgaaagcgaggccaaaagttggaaagcaattcgcgtagatctggttcgttgtccctacgatcgttttgcgtttgcgttgttgggttggaccggaagccgcatgttcgaacgtgatctgcgccgctacgccacccacgagaagaagatgatgctggacaatcatgcgctgtatgacctgaccaagaaaatctttctcaaagctaaatcggaagaggaaattttcgcacatctggggcttgaatacctggaaccgtccgaacgtaacgca

SEQ ID NO: 1050 - protein, 529 aa, synthetic construct
  REGION 1..529: note = Variant of terminal deoxynucleotidyltransferase
MHHHHHHGGSGSHGIRTIDSDFGKKRQKKMDNHDSSAIYEIKFHEFVLFILEEKMGATRRTFLTDLARKKGFRVENELSDSVTHIVAENNSGSDVLAWLKTHKMEKTTQFELLDISWLIESMKVGKPVDTKGKYQLMESGVMSANPDPTEGRENILPPTTKTISQYACQRRTTLNNHNQRFTDALEILAENYEFKRMDDTCLTFMRAISVLKCLPFEVVSLKDTEGLPWIGDEVKGIMEEIIEVGESLEVQAVLNDERYQSFKLFKSVFGVGVKTADKWYRMGLRTLEDVRSSKTLKLTPMQKAGLCYYEDLADGVTKAEADAISLLVQDAVWTFDPDALVEITGGFRRGKPFGHDVDLLITSPGAEKEQEDQLLQKVTNLWKKQGLLLYGDLRESRFEDGKLPSRKIDALDHFAKCFLILKLYHHKVDKSKWEMPTGSNESEAKSWKAIRVDLVRCPYDRFAFALLGWTGSRMFERDLRRYATHEKKMMLDNHALYDLTKKIFLKAKSEEEIFAHLGLEYLEPSERNA

SEQ ID NO: 1051 - DNA, 1587 bp, synthetic construct
  misc_feature 1..1587: note = Variant of terminal deoxynucleotidyltransferase
  source 1..1587: mol_type = other DNA
atgcaccatcatcatcatcatggcggtagcggcagccacggcattcgtaccatcgattcggacttcgggaagaaacgccagaagaagatggataaccacgatagttccgccatctatgaaatcaaatttcacgagtttgtgctgttcattctcgaagagaaaatgggtgcgacgcgtcgtacttttctgacagatttagcccgcaagaaagggttccgcgtcgagaatgaactgtcagacagcgttacccacatcgtggcagaaaataattcaggatctgacgtattggcttggctgaagactcacaagatggagaagaccacgcaatttgaactgctggatattagctggcttatcgaaagcatgaaagttggtaaaccggtggacaccaaggggaaataccagttgatggaatcgggtgtgatgagtgcgaacccagatccgacagagggtcgtgaaaacattctgcctcctactacgaagaccatttctcagtatgcgtgtcaacgccgcaccaccctgaacaaccataatcaacgttttacggacgcactggaaattcttgcggaaaattacgagttcaaacgcaacgatgatacttgtctgacctttatgcgtgctatttccgtgctgaaatgccttccgtttgaggtagttagcctgaaagacacggaaggattgccctggatcggtgatgaagtcaaagggattatggaagaaatcatcgaggtcggtgaatcgctggaagtgcaggccgtgctcaatgatgagcgctatcaaagcttcaaactgtttaagagtgtctttggagtgggggtgaagacagcagacaaatggtaccgtatgggtctgcgcacgctcgaggatgttcgttccagcaagaccctgaagttgaccccgatgcagaaagcgggtctgtgctattatgaagatcttgctgatggcgttacgaaagccgaagctgacgcgatttctctgctggttcaggatgcagtctggactttcgacccggatgcgctggtggagattacgggtggatttcgtcgtgggaaaccttttggtcacgacgttgatctgcttatcacatctccgggagctgagaaagaacaagaagaccagctcctgcagaaagtgaccaatctgtggaagaaacaagggttgttgctgtacggtgacctgcgtgaaagtcgctttgaagatgggaaactcccatcccgcaagatcgatgccctggaccattttgcgaaatgctttcatatcctcaaactttatcaccataaagtggacaaaagcaaatgggaaatgccgacgggttcgaacgaaagcgaggccaaaagttggaaagcaattcgcgtagatctggttcgttgtccctacgatcgttttgcgtttgcgttgttgggttggaccggaagccgcatgttcgaacgtgatctgcgccgctacgccacccacgagaagaagatgatgctggacaatcatgcgctgtatgacctgaccaagaaaatctttctcaaagctaaatcggaagaggaaattttcgcacatctggggcttgaatacctggaaccgtccgaacgtaacgca

SEQ ID NO: 1052 - protein, 529 aa, synthetic construct
  REGION 1..529: note = Variant of terminal deoxynucleotidyltransferase
MHHHHHHGGSGSHGIRTIDSDFGKKRQKKMDNHDSSAIYEIKFHEFVLFILEEKMGATRRTFLTDLARKKGFRVENELSDSVTHIVAENNSGSDVLAWLKTHKMEKTTQFELLDISWLIESMKVGKPVDTKGKYQLMESGVMSANPDPTEGRENILPPTTKTISQYACQRRTTLNNHNQRFTDALEILAENYEFKRNDDTCLTFMRAISVLKCLPFEVVSLKDTEGLPWIGDEVKGIMEEIIEVGESLEVQAVLNDERYQSFKLFKSVFGVGVKTADKWYRMGLRTLEDVRSSKTLKLTPMQKAGLCYYEDLADGVTKAEADAISLLVQDAVWTFDPDALVEITGGFRRGKPFGHDVDLLITSPGAEKEQEDQLLQKVTNLWKKQGLLLYGDLRESRFEDGKLPSRKIDALDHFAKCFHILKLYHHKVDKSKWEMPTGSNESEAKSWKAIRVDLVRCPYDRFAFALLGWTGSRMFERDLRRYATHEKKMMLDNHALYDLTKKIFLKAKSEEEIFAHLGLEYLEPSERNA

SEQ ID NO: 1053 - DNA, 1587 bp, synthetic construct
  misc_feature 1..1587: note = Variant of terminal deoxynucleotidyltransferase
  source 1..1587: mol_type = other DNA
atgcaccatcatcatcatcatggcggtagcggcagccacggcattcgtaccatcgattcggacttcgggaagaaacgccagaagaagatggataaccacgatagttccgccatctatgaaatcaaatttcacgagtttgtgctgttcattctcgaagagaaaatgggtgcgacgcgtcgtacttttctgacagatttagcccgcaagaaagggttccgcgtcgagaatgaactgtcagacagcgttacccacatcgtggcagaaaataattcaggatctgacgtattggcttggctgaagactcacaagatggagaagaccacgcaatttgaactgctggatattagctggcttatcgaaagcatgaaagttggtaaaccggtggacaccaaggggaaataccagttgatggaatcgggtgtgatgagtgcgaacccagatccgacagagggtcgtgaaaacattctgcctcctactacgaagaccatttctcagtatgcgtgtcaacgccgcaccaccctgaacaaccataatcaacgttttacggacgcactggaaattcttgcggaaaattacgagttcaaacgcaacgatgatacttgtctgacctttatgcgtgctatttccgtgctgaaatgccttccgtttgaggtagttagcctgaaagacacggaaggattgccctggatcggtgatgaagtcaaagggattatggaagaaatcatcgaggtcggtgaatcgctggaagtgcaggccgtgctcaatgatgagcgctatcaaagcttcaaactgtttaagagtgtctttggagtgggggtgaagacagcagacaaatggtaccgtatgggtctgcgcacgctcgaggatgttcgttccagcaagaccctgaagttgaccccgatgcagcaggcgggtctgtgctattatgaagatcttgctgatggcgttacgaaagccgaagctgacgcgatttctctgctggttcaggatgcagtctggactttcgacccggatgcgctggtggagattacgggtggatttcgtcgtgggaaaccttttggtcacgacgttgatctgcttatcacatctccgggagctgagaaagaacaagaagaccagctcctgcagaaagtgaccaatctgtggaagaaacaagggttgttgctgtacggtgacctgcgtgaaagtcgctttgaagatgggaaactcccatcccgcaagatcgatgccctggaccattttgcgaaatgctttctgatcctcaaactttatcaccataaagtggacaaaagcaaatgggaaatgccgacgggttcgaacgaaagcgaggccaaaagttggaaagcaattcgcgtagatctggttcgttgtccctacgatcgttttgcgtttgcgttgttgggttggaccggaagccgcatgttcgaacgtgatctgcgccgctacgccacccacgagaagaagatgatgctggacaatcatgcgctgtatgacctgaccaagaaaatctttctcaaagctaaatcggaagaggaaattttcgcacatctggggcttgaatacctggaaccgtccgaacgtaacgca

SEQ ID NO: 1054 - protein, 529 aa, synthetic construct
  REGION 1..529: note = Variant of terminal deoxynucleotidyltransferase
MHHHHHHGGSGSHGIRTIDSDFGKKRQKKMDNHDSSAIYEIKFHEFVLFILEEKMGATRRTFLTDLARKKGFRVENELSDSVTHIVAENNSGSDVLAWLKTHKMEKTTQFELLDISWLIESMKVGKPVDTKGKYQLMESGVMSANPDPTEGRENILPPTTKTISQYACQRRTTLNNHNQRFTDALEILAENYEFKRNDDTCLTFMRAISVLKCLPFEVVSLKDTEGLPWIGDEVKGIMEEIIEVGESLEVQAVLNDERYQSFKLFKSVFGVGVKTADKWYRMGLRTLEDVRSSKTLKLTPMQQAGLCYYEDLADGVTKAEADAISLLVQDAVWTFDPDALVEITGGFRRGKPFGHDVDLLITSPGAEKEQEDQLLQKVTNLWKKQGLLLYGDLRESRFEDGKLPSRKIDALDHFAKCFLILKLYHHKVDKSKWEMPTGSNESEAKSWKAIRVDLVRCPYDRFAFALLGWTGSRMFERDLRRYATHEKKMMLDNHALYDLTKKIFLKAKSEEEIFAHLGLEYLEPSERNA

SEQ ID NO: 1055 - DNA, 1587 bp, synthetic construct
  misc_feature 1..1587: note = Variant of terminal deoxynucleotidyltransferase
  source 1..1587: mol_type = other DNA
atgcaccatcatcatcatcatggcggtagcggcagccacggcattcgtaccatcgattcggacttcgggaagaaacgccagaagaagatggataaccacgatagttccgccatctatgaaatcaaatttcacgagtttgtgctgttcattctcgaagagaaaatgggtgcgacgcgtcgtacttttctgacagatttagcccgcaagaaagggttccgcgtcgagaatgaactgtcagacagcgttacccacatcgtggcagaaaataattcaggatctgacgtattggcttggctgaagactcacaagatggagaagaccacgcaatttgaactgctggatattagctggcttatcgaaagcatgaaagttggtaaaccggtggacaccaaggggaaataccagttgatggaatcgggtgtgatgagtgcgaacccagatccgacagagggtcgtgaaaacattctgcctcctactacgaagaccatttctcagtatgcgtgtcaacgccgcaccaccctgaacaaccataatcaacgttttacggacgcactggaaattcttgcggaaaattacgagttcaaacgcaacgatgatacttgtctgacctttatgcgtgctatttccgtgctgaaatgccttccgtttgaggtagttagcctgaaagacacggaaggattgccctggatcggtgatgaagtcaaagggattatggaagaaatcatcgaggtcggtgaatcgctggaagtgcaggccgtgctcaatgatgagcgctatcaaagcttcaaactgtttaagagtgtctttggagtgggggtgaagacagcagacaaatggtaccgtatgggtctgcgcacgctcgaggatgttcgttccagcaagaccctgaagttgaccccgatgcagaaagcgggtctgtgctattatgaagatgtggctgatggcgttacgaaagccgaagctgacgcgatttctctgctggttcaggatgcagtctggactttcgacccggatgcgctggtggagattacgggtggatttcgtcgtgggaaaccttttggtcacgacgttgatctgcttatcacatctccgggagctgagaaagaacaagaagaccagctcctgcagaaagtgaccaatctgtggaagaaacaagggttgttgctgtacggtgacctgcgtgaaagtcgctttgaagatgggaaactcccatcccgcaagatcgatgccctggaccattttgcgaaatgctttctgatcctcaaactttatcaccataaagtggacaaaagcaaatgggaaatgccgacgggttcgaacgaaagcgaggccaaaagttggaaagcaattcgcgtagatctggttcgttgtccctacgatcgttttgcgtttgcgttgttgggttggaccggaagccgcatgttcgaacgtgatctgcgccgctacgccacccacgagaagaagatgatgctggacaatcatgcgctgtatgacctgaccaagaaaatctttctcaaagctaaatcggaagaggaaattttcgcacatctggggcttgaatacctggaaccgtccgaacgtaacgca

SEQ ID NO: 1056 - protein, 529 aa, synthetic construct
  REGION 1..529: note = Variant of terminal deoxynucleotidyltransferase
MHHHHHHGGSGSHGIRTIDSDFGKKRQKKMDNHDSSAIYEIKFHEFVLFILEEKMGATRRTFLTDLARKKGFRVENELSDSVTHIVAENNSGSDVLAWLKTHKMEKTTQFELLDISWLIESMKVGKPVDTKGKYQLMESGVMSANPDPTEGRENILPPTTKTISQYACQRRTTLNNHNQRFTDALEILAENYEFKRNDDTCLTFMRAISVLKCLPFEVVSLKDTEGLPWIGDEVKGIMEEIIEVGESLEVQAVLNDERYQSFKLFKSVFGVGVKTADKWYRMGLRTLEDVRSSKTLKLTPMQKAGLCYYEDVADGVTKAEADAISLLVQDAVWTFDPDALVEITGGFRRGKPFGHDVDLLITSPGAEKEQEDQLLQKVTNLWKKQGLLLYGDLRESRFEDGKLPSRKIDALDHFAKCFLILKLYHHKVDKSKWEMPTGSNESEAKSWKAIRVDLVRCPYDRFAFALLGWTGSRMFERDLRRYATHEKKMMLDNHALYDLTKKIFLKAKSEEEIFAHLGLEYLEPSERNA

SEQ ID NO: 1057 - DNA, 1587 bp, synthetic construct
  misc_feature 1..1587: note = Variant of terminal deoxynucleotidyltransferase
  source 1..1587: mol_type = other DNA
atgcaccatcatcatcatcatggcggtagcggcagccacggcattcgtaccatcgattcggacttcgggaagaaacgccagaagaagatggataaccacgatagttccgccatctatgaaatcaaatttcacgagtttgtgctgttcattctcgaagagaaaatgggtgcgacgcgtcgtacttttctgacagatttagcccgcaagaaagggttccgcgtcgagaatgaactgtcagacagcgttacccacatcgtggcagaaaataattcaggatctgacgtattggcttggctgaagactcacaagatggagaagaccacgcaatttgaactgctggatattagctggcttatcgaaagcatgaaagttggtaaaccggtggacaccaaggggaaataccagttgatggaatcgggtgtgatgagtgcgaacccagatccgacagagggtcgtgaaaacattctgcctcctactacgaagaccatttctcagtatgcgtgtcaacgccgcaccaccctgaacaaccataatcaacgttttacggacgcactggaaattcttgcggaaaattacgagttcaaacgcaacgatgatacttgtctgacctttatgcgtgctatttccgtgctgaaatgccttccgtttgaggtagttagcctgaaagacacggaaggattgccctggatcggtgatgaagtcaaagggattatggaagaaatcatcgaggtcggtgaatcgctggaagtgcaggccgtgctcaatgatgagcgctatcaaagcttcaaactgtttaagagtgtctttggagtgggggtgaagacagcagacaaatggtaccgtatgggtctgcgcacgctcgaggatgttcgttccagcaagaccctgaagttgaccccgatgcagaaagcgggtctgtgctattatgaagatcttgctgatggcgttacgaaagccgaagctgacgcgatttctctgctggttcaggatgcagtctggactttcgacccggatgcgctggtggagattacgggtggatttcgtcgtgggaaacctatgggtcacgacgttgatctgcttatcacatctccgggagctgagaaagaacaagaagaccagctcctgcagaaagtgaccaatctgtggaagaaacaagggttgttgctgtacggtgacctgcgtgaaagtcgctttgaagatgggaaactcccatcccgcaagatcgatgccctggaccattttgcgaaatgctttctgatcctcaaactttatcaccataaagtggacaaaagcaaatgggaaatgccgacgggttcgaacgaaagcgaggccaaaagttggaaagcaattcgcgtagatctggttcgttgtccctacgatcgttttgcgtttgcgttgttgggttggaccggaagccgcatgttcgaacgtgatctgcgccgctacgccacccacgagaagaagatgatgctggacaatcatgcgctgtatgacctgaccaagaaaatctttctcaaagctaaatcggaagaggaaattttcgcacatctggggcttgaatacctggaaccgtccgaacgtaacgca

SEQ ID NO: 1058 - protein, 529 aa, synthetic construct
  REGION 1..529: note = Variant of terminal deoxynucleotidyltransferase
MHHHHHHGGSGSHGIRTIDSDFGKKRQKKMDNHDSSAIYEIKFHEFVLFILEEKMGATRRTFLTDLARKKGFRVENELSDSVTHIVAENNSGSDVLAWLKTHKMEKTTQFELLDISWLIESMKVGKPVDTKGKYQLMESGVMSANPDPTEGRENILPPTTKTISQYACQRRTTLNNHNQRFTDALEILAENYEFKRNDDTCLTFMRAISVLKCLPFEVVSLKDTEGLPWIGDEVKGIMEEIIEVGESLEVQAVLNDERYQSFKLFKSVFGVGVKTADKWYRMGLRTLEDVRSSKTLKLTPMQKAGLCYYEDLADGVTKAEADAISLLVQDAVWTFDPDALVEITGGFRRGKPMGHDVDLLITSPGAEKEQEDQLLQKVTNLWKKQGLLLYGDLRESRFEDGKLPSRKIDALDHFAKCFLILKLYHHKVDKSKWEMPTGSNESEAKSWKAIRVDLVRCPYDRFAFALLGWTGSRMFERDLRRYATHEKKMMLDNHALYDLTKKIFLKAKSEEEIFAHLGLEYLEPSERNA

SEQ ID NO: 1059 - DNA, 1587 bp, synthetic construct
  misc_feature 1..1587: note = Variant of terminal deoxynucleotidyltransferase
  source 1..1587: mol_type = other DNA
atgcaccatcatcatcatcatggcggtagcggcagccacggcattcgtaccatcgattcggacttcgggaagaaacgccagaagaagatggataaccacgatagttccgccatctatgaaatcaaatttcacgagtttgtgctgttcattctcgaagagaaaatgggtgcgacgcgtcgtacttttctgacagatttagcccgcaagaaagggttccgcgtcgagaatgaactgtcagacagcgttacccacatcgtggcagaaaataattcaggatctgacgtattggcttggctgaagactcacaagatggagaagaccacgcaatttgaactgctggatattagctggcttatcgaaagcatgaaagttggtaaaccggtggacaccaaggggaaataccagttgatggaatcgggtgtgatgagtgcgaacccagatccgacagagggtcgtgaaaacattctgcctcctactacgaagaccatttctcagtatgcgtgtcaacgccgcaccaccctgaacaaccataatcaacgttttacggacgcactggaaattcttgcggaaaattacgagttcaaacgcaacgatgatacttgtctgacctttatgcgtgctatttccgtgctgaaatgccttccgtttgaggtagttagcctgaaagacacggaaggattgccctggatcggtgatgaagtcaaagggattatggaagaaatcatcgaggtcggtgaatcgctggaagtgcaggccgtgctcaatgatgagcgctatcaaagcttcaaactgtttaagagtgtctttggagtgggggtgaagacagcagacaaatggtaccgtatgggtctgcgcacgctcgaggatgttcgttccagcaagaccctgaagttgaccccgatgcagaaagcgggtctgtgctattatgaagatcttgctgatggcgttacgaaagccgaagctgacgcgatttctctgctggttcaggatgcagtctggactttcgacccggatgcgctggtggagattacgggtggatttcgtcgtgggaaacctgcgggtcacgacgttgatctgcttatcacatctccgggagctgagaaagaacaagaagaccagctcctgcagaaagtgaccaatctgtggaagaaacaagggttgttgctgtacggtgacctgcgtgaaagtcgctttgaagatgggaaactcccatcccgcaagatcgatgccctggaccattttgcgaaatgctttctgatcctcaaactttatcaccataaagtggacaaaagcaaatgggaaatgccgacgggttcgaacgaaagcgaggccaaaagttggaaagcaattcgcgtagatctggttcgttgtccctacgatcgttttgcgtttgcgttgttgggttggaccggaagccgcatgttcgaacgtgatctgcgccgctacgccacccacgagaagaagatgatgctggacaatcatgcgctgtatgacctgaccaagaaaatctttctcaaagctaaatcggaagaggaaattttcgcacatctggggcttgaatacctggaaccgtccgaacgtaacgca

SEQ ID NO: 1060 - protein, 529 aa, synthetic construct
  REGION 1..529: note = Variant of terminal deoxynucleotidyltransferase
MHHHHHHGGSGSHGIRTIDSDFGKKRQKKMDNHDSSAIYEIKFHEFVLFILEEKMGATRRTFLTDLARKKGFRVENELSDSVTHIVAENNSGSDVLAWLKTHKMEKTTQFELLDISWLIESMKVGKPVDTKGKYQLMESGVMSANPDPTEGRENILPPTTKTISQYACQRRTTLNNHNQRFTDALEILAENYEFKRNDDTCLTFMRAISVLKCLPFEVVSLKDTEGLPWIGDEVKGIMEEIIEVGESLEVQAVLNDERYQSFKLFKSVFGVGVKTADKWYRMGLRTLEDVRSSKTLKLTPMQKAGLCYYEDLADGVTKAEADAISLLVQDAVWTFDPDALVEITGGFRRGKPAGHDVDLLITSPGAEKEQEDQLLQKVTNLWKKQGLLLYGDLRESRFEDGKLPSRKIDALDHFAKCFLILKLYHHKVDKSKWEMPTGSNESEAKSWKAIRVDLVRCPYDRFAFALLGWTGSRMFERDLRRYATHEKKMMLDNHALYDLTKKIFLKAKSEEEIFAHLGLEYLEPSERNA

SEQ ID NO: 1061 - DNA, 1587 bp, synthetic construct
  misc_feature 1..1587: note = Variant of terminal deoxynucleotidyltransferase
  source 1..1587: mol_type = other DNA
atgcaccatcatcatcatcatggcggtagcggcagccacggcattcgtaccatcgattcggacttcgggaagaaacgccagaagaagatggataaccacgatagttccgccatctatgaaatcaaatttcacgagtttgtgctgttcattctcgaagagaaaatgggtgcgacgcgtcgtacttttctgacagatttagcccgcaagaaagggttccgcgtcgagaatgaactgtcagacagcgttacccacatcgtggcagaaaataattcaggatctgacgtattggcttggctgaagactcacaagatggagaagaccacgcaatttgaactgctggatattagctggcttatcgaaagcatgaaagttggtaaaccggtggacaccaaggggaaataccagttgatggaatcgggtgtgatgagtgcgaacccagatccgacagagggtcgtgaaaacattctgcctcctactacgaagaccatttctcagtatgcgtgtcaacgccgcaccaccctgaacaaccataatcaacgttttacggacgcactggaaattcttgcggaaaattacgagttcaaacgcaacgatgatacttgtctgacctttatgcgtgctatttccgtgctgaaatgccttccgtttgaggtagttagcctgaaagacacggaaggattgccctggatcggtgatgaagtcaaagggattatggaagaaatcatcgaggtcggtgaatcgctggaagtgcaggccgtgctcaatgatgagcgctatcaaagcttcaaactgtttaagagtgtctttggagtgggggtgaagacagcagacaaatggtttcgtatgggtctgcgcacgctcgaggatgttcgttccagcaagaccctgaagttgaccccgatgcagaaagcgggtctgtgctattatgaagatcttgctgatggcgttacgaaagccgaagctgacgcgatttctctgctggttcaggatgcagtctggactttcgacccggatgcgctggtggagattacgggtggatttcgtcgtgggaaaccttttggtcacgacgttgatctgcttatcacatctccgggagctgagaaagaacaagaagaccagctcctgcagaaagtgaccaatctgtggaagaaacaagggttgttgctgtacggtgacctgcgtgaaagtcgctttgaagatgggaaactcccatcccgcaagatcgatgccctggaccattttgcgaaatgctttctgatcctcaaactttatcaccataaagtggacaaaagcaaatgggaaatgccgacgggttcgaacgaaagcgaggccaaaagttggaaagcaattcgcgtagatctggttcgttgtccctacgatcgttttgcgtttgcgttgttgggttggaccggaagccgcatgttcgaacgtgatctgcgccgctacgccacccacgagaagaagatgatgctggacaatcatgcgctgtatgacctgaccaagaaaatctttctcaaagctaaatcggaagaggaaattttcgcacatctggggcttgaatacctggaaccgtccgaacgtaacgca

SEQ ID NO: 1062 - protein, 529 aa, synthetic construct
  REGION 1..529: note = Variant of terminal deoxynucleotidyltransferase
MHHHHHHGGSGSHGIRTIDSDFGKKRQKKMDNHDSSAIYEIKFHEFVLFILEEKMGATRRTFLTDLARKKGFRVENELSDSVTHIVAENNSGSDVLAWLKTHKMEKTTQFELLDISWLIESMKVGKPVDTKGKYQLMESGVMSANPDPTEGRENILPPTTKTISQYACQRRTTLNNHNQRFTDALEILAENYEFKRNDDTCLTFMRAISVLKCLPFEVVSLKDTEGLPWIGDEVKGIMEEIIEVGESLEVQAVLNDERYQSFKLFKSVFGVGVKTADKWFRMGLRTLEDVRSSKTLKLTPMQKAGLCYYEDLADGVTKAEADAISLLVQDAVWTFDPDALVEITGGFRRGKPFGHDVDLLITSPGAEKEQEDQLLQKVTNLWKKQGLLLYGDLRESRFEDGKLPSRKIDALDHFAKCFLILKLYHHKVDKSKWEMPTGSNESEAKSWKAIRVDLVRCPYDRFAFALLGWTGSRMFERDLRRYATHEKKMMLDNHALYDLTKKIFLKAKSEEEIFAHLGLEYLEPSERNA

SEQ ID NO: 1063 - DNA, 1587 bp, synthetic construct
  misc_feature 1..1587: note = Variant of terminal deoxynucleotidyltransferase
  source 1..1587: mol_type = other DNA
atgcaccatcatcatcatcatggcggtagcggcagccacggcattcgtaccatcgattcggacttcgggaagaaacgccagaagaagatggataaccacgatagttccgccatctatgaaatcaaatttcacgagtttgtgctgttcattctcgaagagaaaatgggtgcgacgcgtcgtacttttctgacagatttagcccgcaagaaagggttccgcgtcgagaatgaactgtcagacagcgttacccacatcgtggcagaaaataattcaggatctgacgtattggcttggctgaagactcacaagatggagaagaccacgcaatttgaactgctggatattagctggcttatcgaaagcatgaaagttggtaaaccggtggacaccaaggggaaataccagttgatggaatcgggtgtgatgagtgcgaacccagatccgacagagggtcgtgaaaacattctgcctcctactacgaagaccatttctcagtatgcgtgtcaacgccgcaccaccctgaacaaccataatcaacgttttacggacgcactggaaattcttgcggaaaattacgagttcaaacgcaacgatgatacttgtctgacctttatgcgtgctatttccgtgctgaaatgccttccgtttgaggtagttagcctgaaagacacggaaggattgccctggatcggtgatgaagtcaaagggattatggaagaaatcatcgaggtcggtgaatcgctggaagtgcaggccgtgctcaatgatgagcgctatcaaaggttcaaactgtttaagagtgtctttggagtgggggtgaagacagcagacaaatggtaccgtatgggtctgcgcacgctcgaggatgttcgttccagcaagaccctgaagttgaccccgatgcagaaagcgggtctgtgctattatgaagatcttgctgatggcgttacgaaagccgaagctgacgcgatttctctgctggttcaggatgcagtctggactttcgacccggatgcgctggtggagattacgggtggatttcgtcgtgggaaaccttttggtcacgacgttgatctgcttatcacatctccgggagctgagaaagaacaagaagaccagctcctgcagaaagtgaccaatctgtggaagaaacaagggttgttgctgtacggtgacctgcgtgaaagtcgctttgaagatgggaaactcccatcccgcaagatcgatgccctggaccattttgcgaaatgctttctgatcctcaaactttatcaccataaagtggacaaaagcaaatgggaaatgccgacgggttcgaacgaaagcgaggccaaaagttggaaagcaattcgcgtagatctggttcgttgtccctacgatcgttttgcgtttgcgttgttgggttggaccggaagccgcatgttcgaacgtgatctgcgccgctacgccacccacgagaagaagatgatgctggacaatcatgcgctgtatgacctgaccaagaaaatctttctcaaagctaaatcggaagaggaaattttcgcacatctggggcttgaatacctggaaccgtccgaacgtaacgca

SEQ ID NO: 1064 - protein, 529 aa, synthetic construct
  REGION 1..529: note = Variant of terminal deoxynucleotidyltransferase
MHHHHHHGGSGSHGIRTIDSDFGKKRQKKMDNHDSSAIYEIKFHEFVLFILEEKMGATRRTFLTDLARKKGFRVENELSDSVTHIVAENNSGSDVLAWLKTHKMEKTTQFELLDISWLIESMKVGKPVDTKGKYQLMESGVMSANPDPTEGRENILPPTTKTISQYACQRRTTLNNHNQRFTDALEILAENYEFKRNDDTCLTFMRAISVLKCLPFEVVSLKDTEGLPWIGDEVKGIMEEIIEVGESLEVQAVLNDERYQRFKLFKSVFGVGVKTADKWYRMGLRTLEDVRSSKTLKLTPMQKAGLCYYEDLADGVTKAEADAISLLVQDAVWTFDPDALVEITGGFRRGKPFGHDVDLLITSPGAEKEQEDQLLQKVTNLWKKQGLLLYGDLRESRFEDGKLPSRKIDALDHFAKCFLILKLYHHKVDKSKWEMPTGSNESEAKSWKAIRVDLVRCPYDRFAFALLGWTGSRMFERDLRRYATHEKKMMLDNHALYDLTKKIFLKAKSEEEIFAHLGLEYLEPSERNA

SEQ ID NO: 1065 - DNA, 1587 bp, synthetic construct
  misc_feature 1..1587: note = Variant of terminal deoxynucleotidyltransferase
  source 1..1587: mol_type = other DNA
atgcaccatcatcatcatcatggcggtagcggcagccacggcattcgtaccatcgattcggacttcgggaagaaacgccagaagaagatggataaccacgatagttccgccatctatgaaatcaaatttcacgagtttgtgctgttcattctcgaagagaaaatgggtgcgacgcgtcgtacttttctgacagatttagcccgcaagaaagggttccgcgtcgagaatgaactgtcagacagcgttacccacatcgtggcagaaaataattcaggatctgacgtattggcttggctgaagactcacaagatggagaagaccacgcaatttgaactgctggatattagctggcttatcgaaagcatgaaagttggtaaaccggtggacaccaaggggaaataccagttgatggaatcgggtgtgatgagtgcgaacccagatccgacagagggtcgtgaaaacattctgcctcctactacgaagaccatttctcagtatgcgtgtcaacgccgcaccaccctgaacaaccataatcaacgttttacggacgcactggaaattcttgcggaaaattacgagttcaaacgcaacgatgatacttgtctgacctttctgcgtgctatttccgtgctgaaatgccttccgtttgaggtagttagcctgaaagacacggaaggattgccctggatcggtgatgaagtcaaagggattatggaagaaatcatcgaggtcggtgaatcgctggaagtgcaggccgtgctcaatgatgagcgctatcaaagcttcaaactgtttaagagtgtctttggagtgggggtgaagacagcagacaaatggtaccgtatgggtctgcgcacgctcgaggatgttcgttccagcaagaccctgaagttgaccccgatgcagaaagcgggtctgtgctattatgaagatcttgctgatggcgttacgaaagccgaagctgacgcgatttctctgctggttcaggatgcagtctggactttcgacccggatgcgctggtggagattacgggtggatttcgtcgtgggaaaccttttggtcacgacgttgatctgcttatcacatctccgggagctgagaaagaacaagaagaccagctcctgcagaaagtgaccaatctgtggaagaaacaagggttgttgctgtacggtgacctgcgtgaaagtcgctttgaagatgggaaactcccatcccgcaagatcgatgccctggaccattttgcgaaatgctttctgatcctcaaactttatcaccataaagtggacaaaagcaaatgggaaatgccgacgggttcgaacgaaagcgaggccaaaagttggaaagcaattcgcgtagatctggttcgttgtccctacgatcgttttgcgtttgcgttgttgggttggaccggaagccgcatgttcgaacgtgatctgcgccgctacgccacccacgagaagaagatgatgctggacaatcatgcgctgtatgacctgaccaagaaaatctttctcaaagctaaatcggaagaggaaattttcgcacatctggggcttgaatacctggaaccgtccgaacgtaacgca

SEQ ID NO: 1066 - protein, 529 aa, synthetic construct
  REGION 1..529: note = Variant of terminal deoxynucleotidyltransferase
MHHHHHHGGSGSHGIRTIDSDFGKKRQKKMDNHDSSAIYEIKFHEFVLFILEEKMGATRRTFLTDLARKKGFRVENELSDSVTHIVAENNSGSDVLAWLKTHKMEKTTQFELLDISWLIESMKVGKPVDTKGKYQLMESGVMSANPDPTEGRENILPPTTKTISQYACQRRTTLNNHNQRFTDALEILAENYEFKRNDDTCLTFLRAISVLKCLPFEVVSLKDTEGLPWIGDEVKGIMEEIIEVGESLEVQAVLNDERYQSFKLFKSVFGVGVKTADKWYRMGLRTLEDVRSSKTLKLTPMQKAGLCYYEDLADGVTKAEADAISLLVQDAVWTFDPDALVEITGGFRRGKPFGHDVDLLITSPGAEKEQEDQLLQKVTNLWKKQGLLLYGDLRESRFEDGKLPSRKIDALDHFAKCFLILKLYHHKVDKSKWEMPTGSNESEAKSWKAIRVDLVRCPYDRFAFALLGWTGSRMFERDLRRYATHEKKMMLDNHALYDLTKKIFLKAKSEEEIFAHLGLEYLEPSERNA

SEQ ID NO: 1067 - DNA, 1587 bp, synthetic construct
  misc_feature 1..1587: note = Variant of terminal deoxynucleotidyltransferase
  source 1..1587: mol_type = other DNA
atgcaccatcatcatcatcatggcggtagcggcagccacggcattcgtaccatcgattcggacttcgggaagaaacgccagaagaagatggataaccacgatagttccgccatctatgaaatcaaatttcacgagtttgtgctgttcattctcgaagagaaaatgggtgcgacgcgtcgtacttttctgacagatttagcccgcaagaaagggttccgcgtcgagaatgaactgtcagacagcgttacccacatcgtggcagaaaataattcaggatctgacgtattggcttggctgaagactcacaagatggagaagaccacgcaatttgaactgctggatattagctggcttatcgaaagcatgaaagttggtaaaccggtggacaccaaggggaaataccagttgatggaatcgggtgtgatgagtgcgaacccagatccgacagagggtcgtgaaaacattctgcctcctactacgaagaccatttctcagtatgcgtgtcaacgccgcaccaccctgaacaaccataatcaacgttttacggacgcactggaaattcttgcggaaaattacgagttcaaacgcaacgatgatacttgtctgacctttatgcgtgctatttccgtgctgaaatgccttccgtttgaggtagttagcctgaaagacacggaaggattgccctggatcggtgatgaagtcaaagggattatggaagaaatcatcgaggtcggtgaatcgctggaagtgcaggccgtgctcaatgatgagcgctatcaaagcttcaaactgtttaagagtgtctttggagtgggggtgaagacagcagacaaatggtaccgtatgggtctgcgcacgctcgaggatgttcgttccagcaagaccctgaagttgaccccgatgcagaaagcgggtctgtgctattatcatgatcttgctgatggcgttacgaaagccgaagctgacgcgatttctctgctggttcaggatgcagtctggactttcgacccggatgcgctggtggagattacgggtggatttcgtcgtgggaaaccttttggtcacgacgttgatctgcttatcacatctccgggagctgagaaagaacaagaagaccagctcctgcagaaagtgaccaatctgtggaagaaacaagggttgttgctgtacggtgacctgcgtgaaagtcgctttgaagatgggaaactcccatcccgcaagatcgatgccctggaccattttgcgaaatgctttctgatcctcaaactttatcaccataaagtggacaaaagcaaatgggaaatgccgacgggttcgaacgaaagcgaggccaaaagttggaaagcaattcgcgtagatctggttcgttgtccctacgatcgttttgcgtttgcgttgttgggttggaccggaagccgcatgttcgaacgtgatctgcgccgctacgccacccacgagaagaagatgatgctggacaatcatgcgctgtatgacctgaccaagaaaatctttctcaaagctaaatcggaagaggaaattttcgcacatctggggcttgaatacctggaaccgtccgaacgtaacgca

SEQ ID NO: 1068 - protein, 529 aa, synthetic construct
  REGION 1..529: note = Variant of terminal deoxynucleotidyltransferase
MHHHHHHGGSGSHGIRTIDSDFGKKRQKKMDNHDSSAIYEIKFHEFVLFILEEKMGATRRTFLTDLARKKGFRVENELSDSVTHIVAENNSGSDVLAWLKTHKMEKTTQFELLDISWLIESMKVGKPVDTKGKYQLMESGVMSANPDPTEGRENILPPTTKTISQYACQRRTTLNNHNQRFTDALEILAENYEFKRNDDTCLTFMRAISVLKCLPFEVVSLKDTEGLPWIGDEVKGIMEEIIEVGESLEVQAVLNDERYQSFKLFKSVFGVGVKTADKWYRMGLRTLEDVRSSKTLKLTPMQKAGLCYYHDLADGVTKAEADAISLLVQDAVWTFDPDALVEITGGFRRGKPFGHDVDLLITSPGAEKEQEDQLLQKVTNLWKKQGLLLYGDLRESRFEDGKLPSRKIDALDHFAKCFLILKLYHHKVDKSKWEMPTGSNESEAKSWKAIRVDLVRCPYDRFAFALLGWTGSRMFERDLRRYATHEKKMMLDNHALYDLTKKIFLKAKSEEEIFAHLGLEYLEPSERNA

SEQ ID NO: 1069 - DNA, 1587 bp, synthetic construct
  misc_feature 1..1587: note = Variant of terminal deoxynucleotidyltransferase
  source 1..1587: mol_type = other DNA
atgcaccatcatcatcatcatggcggtagcggcagccacggcattcgtaccatcgattcggacttcgggaagaaacgccagaagaagatggataaccacgatagttccgccatctatgaaatcaaatttcacgagtttgtgctgttcattctcgaagagaaaatgggtgcgacgcgtcgtacttttctgacagatttagcccgcaagaaagggttccgcgtcgagaatgaactgtcagacagcgttacccacatcgtggcagaaaataattcaggatctgacgtattggcttggctgaagactcacaagatggagaagaccacgcaatttgaactgctggatattagctggcttatcgaaagcatgaaagttggtaaaccggtggacaccaaggggaaataccagttgatggaatcgggtgtgatgagtgcgaacccagatccgacagagggtcgtgaaaacattctgcctcctactacgaagaccatttctcagtatgcgtgtcaacgccgcaccaccctgaacaaccataatcaacgttttacggacgcactggaaattcttgcggaaaattacgagttcaaacgcaacgatgatacttgtctgacctttatgcgtgctatttccgtgctgaaatgccttccgtttgaggtagttagcctgaaagacacggaaggattgccctggatcggtgatgaagtcaaagggattatggaagaaatcatcgaggtcggtgaatcgctggaagtgcaggccgtgctcaatgatgagcgctatcaaagcattaaactgtttaagagtgtctttggagtgggggtgaagacagcagacaaatggtaccgtatgggtctgcgcacgctcgaggatgttcgttccagcaagaccctgaagttgaccccgatgcagaaagcgggtctgtgctattatgaagatcttgctgatggcgttacgaaagccgaagctgacgcgatttctctgctggttcaggatgcagtctggactttcgacccggatgcgctggtggagattacgggtggatttcgtcgtgggaaaccttttggtcacgacgttgatctgcttatcacatctccgggagctgagaaagaacaagaagaccagctcctgcagaaagtgaccaatctgtggaagaaacaagggttgttgctgtacggtgacctgcgtgaaagtcgctttgaagatgggaaactcccatcccgcaagatcgatgccctggaccattttgcgaaatgctttctgatcctcaaactttatcaccataaagtggacaaaagcaaatgggaaatgccgacgggttcgaacgaaagcgaggccaaaagttggaaagcaattcgcgtagatctggttcgttgtccctacgatcgttttgcgtttgcgttgttgggttggaccggaagccgcatgttcgaacgtgatctgcgccgctacgccacccacgagaagaagatgatgctggacaatcatgcgctgtatgacctgaccaagaaaatctttctcaaagctaaatcggaagaggaaattttcgcacatctggggcttgaatacctggaaccgtccgaacgtaacgca

SEQ ID NO: 1070 - protein, 529 aa, synthetic construct
  REGION 1..529: note = Variant of terminal deoxynucleotidyltransferase
MHHHHHHGGSGSHGIRTIDSDFGKKRQKKMDNHDSSAIYEIKFHEFVLFILEEKMGATRRTFLTDLARKKGFRVENELSDSVTHIVAENNSGSDVLAWLKTHKMEKTTQFELLDISWLIESMKVGKPVDTKGKYQLMESGVMSANPDPTEGRENILPPTTKTISQYACQRRTTLNNHNQRFTDALEILAENYEFKRNDDTCLTFMRAISVLKCLPFEVVSLKDTEGLPWIGDEVKGIMEEIIEVGESLEVQAVLNDERYQSIKLFKSVFGVGVKTADKWYRMGLRTLEDVRSSKTLKLTPMQKAGLCYYEDLADGVTKAEADAISLLVQDAVWTFDPDALVEITGGFRRGKPFGHDVDLLITSPGAEKEQEDQLLQKVTNLWKKQGLLLYGDLRESRFEDGKLPSRKIDALDHFAKCFLILKLYHHKVDKSKWEMPTGSNESEAKSWKAIRVDLVRCPYDRFAFALLGWTGSRMFERDLRRYATHEKKMMLDNHALYDLTKKIFLKAKSEEEIFAHLGLEYLEPSERNA

SEQ ID NO: 1071 - DNA, 1587 bp, synthetic construct
  misc_feature 1..1587: note = Variant of terminal deoxynucleotidyltransferase
  source 1..1587: mol_type = other DNA
atgcaccatcatcatcatcatggcggtagcggcagccacggcattcgtaccatcgattcggacttcgggaagaaacgccagaagaagatggataaccacgatagttccgccatctatgaaatcaaatttcacgagtttgtgctgttcattctcgaagagaaaatgggtgcgacgcgtcgtacttttctgacagatttagcccgcaagaaagggttccgcgtcgagaatgaactgtcagacagcgttacccacatcgtggcagaaaataattcaggatctgacgtattggcttggctgaagactcacaagatggagaagaccacgcaatttgaactgctggatattagctggcttatcgaaagcatgaaagttggtaaaccggtggacaccaaggggaaataccagttgatggaatcgggtgtgatgagtgcgaacccagatccgacagagggtcgtgaaaacattctgcctcctactacgaagaccatttctcagtatgcgtgtcaacgccgcaccaccctgaacaaccataatcaacgttttacggacgcactggaaattcttgcggaaaattacgagttcaaacgcaacgatgatacttgtctgacctttatgcgtgctatttccgtgctgaaatgccttccgtttgaggtagttagcctgaaagacacggaaggattgccctggatcggtgatgaagtcaaagggattatggaagaaatcatcgaggtcggtgaatcgctggaagtgcaggccgtgctcaatgatgagcgctatcaaagcttcaaactgtttaagagtgtctttggagtgggggtgaagacagcagacaaatggtaccgtatgggtctgcgcacgctcgaggatgttcgttccagcaagaccctgaagttgaccccgatgcagaaagcgggtctgtgctattatgaagatcttgctgatggcgttacgaaagccgaagctgacgcgatttctctgctggttcaggatgcagtctggactttcgacccggatgcgctggtggagattacgggtggatttcgtcgtgggaaaccttttggtcacgacgttgatctgcttatcacatctccgggagctgagaaagaacaagaagaccagctcctgcagaaagtgaccaatctgtggaagaaacaagggttgttgctgtacggtgacctgcgtgaaagtcgctttgaagatgggaaactcccatcccgcaagatcgatgccctggaccattttgcgaaatgctttctgatcctcaaactttatcaccataaagtggacaaaagcaaatgggaaatgccgacgggttcgaacgaaagcgaggccaaaagttggaaagcaattcgcgtagatctggttcgttgtccctacgatcgttttgcgtttgcgttgttgggttggaccggaagccgcatgttcgaacgtgatctgcgccgctacgccacccacgagaagaagatgatgctggacaatcatgcgctgtatgacctgaccaagaaaatctttctcaaagctaaatcggaagaggaaattttcgcacatctggggcttgaatacctggaaccgcatgaacgtaacgca

SEQ ID NO: 1072 - protein, 529 aa, synthetic construct
  REGION 1..529: note = Variant of terminal deoxynucleotidyltransferase
MHHHHHHGGSGSHGIRTIDSDFGKKRQKKMDNHDSSAIYEIKFHEFVLFILEEKMGATRRTFLTDLARKKGFRVENELSDSVTHIVAENNSGSDVLAWLKTHKMEKTTQFELLDISWLIESMKVGKPVDTKGKYQLMESGVMSANPDPTEGRENILPPTTKTISQYACQRRTTLNNHNQRFTDALEILAENYEFKRNDDTCLTFMRAISVLKCLPFEVVSLKDTEGLPWIGDEVKGIMEEIIEVGESLEVQAVLNDERYQSFKLFKSVFGVGVKTADKWYRMGLRTLEDVRSSKTLKLTPMQKAGLCYYEDLADGVTKAEADAISLLVQDAVWTFDPDALVEITGGFRRGKPFGHDVDLLITSPGAEKEQEDQLLQKVTNLWKKQGLLLYGDLRESRFEDGKLPSRKIDALDHFAKCFLILKLYHHKVDKSKWEMPTGSNESEAKSWKAIRVDLVRCPYDRFAFALLGWTGSRMFERDLRRYATHEKKMMLDNHALYDLTKKIFLKAKSEEEIFAHLGLEYLEPHERNA

SEQ ID NO: 1073 - DNA, 1587 bp, synthetic construct
  misc_feature 1..1587: note = Variant of terminal deoxynucleotidyltransferase
  source 1..1587: mol_type = other DNA
atgcaccatcatcatcatcatggcggtagcggcagccacggcattcgtaccatcgattcggacttcgggaagaaacgccagaagaagatggataaccacgatagttccgccatctatgaaatcaaatttcacgagtttgtgctgttcattctcgaagagaaaatgggtgcgacgcgtcgtacttttctgacagatttagcccgcaagaaagggttccgcgtcgagaatgaactgtcagacagcgttacccacatcgtggcagaaaataattcaggatctgacgtattggcttggctgaagactcacaagatggagaagaccacgcaatttgaactgctggatattagctggcttatcgaaagcatgaaagttggtaaaccggtggacaccaaggggaaataccagttgatggaatcgggtgtgatgagtgcgaacccagatccgacagagggtcgtgaaaacattctgcctcctactacgaagaccatttctcagtatgcgtgtcaacgccgcaccaccctgaacaaccataatcaacgttttacggacgcactggaaattcttgcggaaaattacgagttcaaacgcaacgatgatacttgtctgacctttatgcgtgctatttccgtgctgaaatgccttccgtttgaggtagttagcctgaaagacacggaaggattgccctggatcggtgatgaagtcaaagggattatggaagaaatcatcgaggtcggtgaatcgctggaagtgcaggccgtgctcaatgatgagcgctatcaaagcttcaaactgtttaagagtgtctttggagtgggggtgaagacagcagaccggtggtaccgtatgggtctgcgcacgctcgaggatgttcgttccagcaagaccctgaagttgaccccgatgcagaaagcgggtctgtgctattatgaagatcttgctgatggcgttacgaaagccgaagctgacgcgatttctctgctggttcaggatgcagtctggactttcgacccggatgcgctggtggagattacgggtggatttcgtcgtgggaaaccttttggtcacgacgttgatctgcttatcacatctccgggagctgagaaagaacaagaagaccagctcctgcagaaagtgaccaatctgtggaagaaacaagggttgttgctgtacggtgacctgcgtgaaagtcgctttgaagatgggaaactcccatcccgcaagatcgatgccctggaccattttgcgaaatgctttctgatcctcaaactttatcaccataaagtggacaaaagcaaatgggaaatgccgacgggttcgaacgaaagcgaggccaaaagttggaaagcaattcgcgtagatctggttcgttgtccctacgatcgttttgcgtttgcgttgttgggttggaccggaagccgcatgttcgaacgtgatctgcgccgctacgccacccacgagaagaagatgatgctggacaatcatgcgctgtatgacctgaccaagaaaatctttctcaaagctaaatcggaagaggaaattttcgcacatctggggcttgaatacctggaaccgtccgaacgtaacgca

SEQ ID NO: 1074 - protein, 529 aa, synthetic construct
  REGION 1..529: note = Variant of terminal deoxynucleotidyltransferase
MHHHHHHGGSGSHGIRTIDSDFGKKRQKKMDNHDSSAIYEIKFHEFVLFILEEKMGATRRTFLTDLARKKGFRVENELSDSVTHIVAENNSGSDVLAWLKTHKMEKTTQFELLDISWLIESMKVGKPVDTKGKYQLMESGVMSANPDPTEGRENILPPTTKTISQYACQRRTTLNNHNQRFTDALEILAENYEFKRNDDTCLTFMRAISVLKCLPFEVVSLKDTEGLPWIGDEVKGIMEEIIEVGESLEVQAVLNDERYQSFKLFKSVFGVGVKTADRWYRMGLRTLEDVRSSKTLKLTPMQKAGLCYYEDLADGVTKAEADAISLLVQDAVWTFDPDALVEITGGFRRGKPFGHDVDLLITSPGAEKEQEDQLLQKVTNLWKKQGLLLYGDLRESRFEDGKLPSRKIDALDHFAKCFLILKLYHHKVDKSKWEMPTGSNESEAKSWKAIRVDLVRCPYDRFAFALLGWTGSRMFERDLRRYATHEKKMMLDNHALYDLTKKIFLKAKSEEEIFAHLGLEYLEPSERNA

SEQ ID NO: 1075 - DNA, 1587 bp, synthetic construct
  misc_feature 1..1587: note = Variant of terminal deoxynucleotidyltransferase
  source 1..1587: mol_type = other DNA
atgcaccatcatcatcatcatggcggtagcggcagccacggcattcgtaccatcgattcggacttcgggaagaaacgccagaagaagatggataaccacgatagttccgccatctatgaaatcaaatttcacgagtttgtgctgttcattctcgaagagaaaatgggtgcgacgcgtcgtacttttctgacagatttagcccgcaagaaagggttccgcgtcgagaatgaactgtcagacagcgttacccacatcgtggcagaaaataattcaggatctgacgtattggcttggctgaagactcacaagatggagaagaccacgcaatttgaactgctggatattagctggcttatcgaaagcatgaaagttggtaaaccggtggacaccaaggggaaataccagttgatggaatcgggtgtgatgagtgcgaacccagatccgacagagggtcgtgaaaacattctgcctcctactacgaagaccatttctcagtatgcgtgtcaacgccgcaccaccctgaacaaccataatcaacgttttacggacgcactggaaattcttgcggaaaattacgagttcaaacgcaacgatgatacttgtctgacctttatgcgtgctatttccgtgctgaaatgccttccgtttgaggtagttagcctgaaagacacggaaggattgccctggatcggtgatgaagtcaaagggattatggaagaaatcatcgaggtcggtgaatcgctggaagtgcaggccgtgctcaatgatgagtgttatcaaagcttcaaactgtttaagagtgtctttggagtgggggtgaagacagcagacaaatggtaccgtatgggtctgcgcacgctcgaggatgttcgttccagcaagaccctgaagttgaccccgatgcagaaagcgggtctgtgctattatgaagatcttgctgatggcgttacgaaagccgaagctgacgcgatttctctgctggttcaggatgcagtctggactttcgacccggatgcgctggtggagattacgggtggatttcgtcgtgggaaaccttttggtcacgacgttgatctgcttatcacatctccgggagctgagaaagaacaagaagaccagctcctgcagaaagtgaccaatctgtggaagaaacaagggttgttgctgtacggtgacctgcgtgaaagtcgctttgaagatgggaaactcccatcccgcaagatcgatgccctggaccattttgcgaaatgctttctgatcctcaaactttatcaccataaagtggacaaaagcaaatgggaaatgccgacgggttcgaacgaaagcgaggccaaaagttggaaagcaattcgcgtagatctggttcgttgtccctacgatcgttttgcgtttgcgttgttgggttggaccggaagccgcatgttcgaacgtgatctgcgccgctacgccacccacgagaagaagatgatgctggacaatcatgcgctgtatgacctgaccaagaaaatctttctcaaagctaaatcggaagaggaaattttcgcacatctggggcttgaatacctggaaccgtccgaacgtaacgca

SEQ ID NO: 1076 - protein, 529 aa, synthetic construct
  REGION 1..529: note = Variant of terminal deoxynucleotidyltransferase
MHHHHHHGGSGSHGIRTIDSDFGKKRQKKMDNHDSSAIYEIKFHEFVLFILEEKMGATRRTFLTDLARKKGFRVENELSDSVTHIVAENNSGSDVLAWLKTHKMEKTTQFELLDISWLIESMKVGKPVDTKGKYQLMESGVMSANPDPTEGRENILPPTTKTISQYACQRRTTLNNHNQRFTDALEILAENYEFKRNDDTCLTFMRAISVLKCLPFEVVSLKDTEGLPWIGDEVKGIMEEIIEVGESLEVQAVLNDECYQSFKLFKSVFGVGVKTADKWYRMGLRTLEDVRSSKTLKLTPMQKAGLCYYEDLADGVTKAEADAISLLVQDAVWTFDPDALVEITGGFRRGKPFGHDVDLLITSPGAEKEQEDQLLQKVTNLWKKQGLLLYGDLRESRFEDGKLPSRKIDALDHFAKCFLILKLYHHKVDKSKWEMPTGSNESEAKSWKAIRVDLVRCPYDRFAFALLGWTGSRMFERDLRRYATHEKKMMLDNHALYDLTKKIFLKAKSEEEIFAHLGLEYLEPSERNA

SEQ ID NO: 1077 - DNA, 1587 bp, synthetic construct
  misc_feature 1..1587: note = Variant of terminal deoxynucleotidyltransferase
  source 1..1587: mol_type = other DNA
atgcaccatcatcatcatcatggcggtagcggcagccacggcattcgtaccatcgattcggacttcgggaagaaacgccagaagaagatggataaccacgatagttccgccatctatgaaatcaaatttcacgagtttgtgctgttcattctcgaagagaaaatgggtgcgacgcgtcgtacttttctgacagatttagcccgcaagaaagggttccgcgtcgagaatgaactgtcagacagcgttacccacatcgtggcagaaaataattcaggatctgacgtattggcttggctgaagactcacaagatggagaagaccacgcaatttgaactgctggatattagctggcttatcgaaagcatgaaagttggtaaaccggtggacaccaaggggaaataccagttgatggaatcgggtgtgatgagtgcgaacccagatccgacagagggtcgtgaaaacattctgcctcctactacgaagaccatttctcagtatgcgtgtcaacgccgcaccaccctgaacaaccataatcaacgttttacggacgcactggaaattcttgcggaaaattacgagttcaaacgcaacgatgatacttgtctgacctttatgcgtgctatttccgtgctgaaatgccttccgtttgaggtagttagcctgaaagacacggaaggattgccctggatcggtgatgaagtcaaagggattatggaagaaatcatcgaggtcggtgaatcgctggaagtgcaggccgtgctcaatgatgagcgctatcaagggttcaaactgtttaagagtgtctttggagtgggggtgaagacagcagacaaatggtaccgtatgggtctgcgcacgctcgaggatgttcgttccagcaagaccctgaagttgaccccgatgcagaaagcgggtctgtgctattatgaagatcttgctgatggcgttacgaaagccgaagctgacgcgatttctctgctggttcaggatgcagtctggactttcgacccggatgcgctggtggagattacgggtggatttcgtcgtgggaaaccttttggtcacgacgttgatctgcttatcacatctccgggagctgagaaagaacaagaagaccagctcctgcagaaagtgaccaatctgtggaagaaacaagggttgttgctgtacggtgacctgcgtgaaagtcgctttgaagatgggaaactcccatcccgcaagatcgatgccctggaccattttgcgaaatgctttctgatcctcaaactttatcaccataaagtggacaaaagcaaatgggaaatgccgacgggttcgaacgaaagcgaggccaaaagttggaaagcaattcgcgtagatctggttcgttgtccctacgatcgttttgcgtttgcgttgttgggttggaccggaagccgcatgttcgaacgtgatctgcgccgctacgccacccacgagaagaagatgatgctggacaatcatgcgctgtatgacctgaccaagaaaatctttctcaaagctaaatcggaagaggaaattttcgcacatctggggcttgaatacctggaaccgtccgaacgtaacgca

SEQ ID NO: 1078 - protein, 529 aa, synthetic construct
  REGION 1..529: note = Variant of terminal deoxynucleotidyltransferase
MHHHHHHGGSGSHGIRTIDSDFGKKRQKKMDNHDSSAIYEIKFHEFVLFILEEKMGATRRTFLTDLARKKGFRVENELSDSVTHIVAENNSGSDVLAWLKTHKMEKTTQFELLDISWLIESMKVGKPVDTKGKYQLMESGVMSANPDPTEGRENILPPTTKTISQYACQRRTTLNNHNQRFTDALEILAENYEFKRNDDTCLTFMRAISVLKCLPFEVVSLKDTEGLPWIGDEVKGIMEEIIEVGESLEVQAVLNDERYQGFKLFKSVFGVGVKTADKWYRMGLRTLEDVRSSKTLKLTPMQKAGLCYYEDLADGVTKAEADAISLLVQDAVWTFDPDALVEITGGFRRGKPFGHDVDLLITSPGAEKEQEDQLLQKVTNLWKKQGLLLYGDLRESRFEDGKLPSRKIDALDHFAKCFLILKLYHHKVDKSKWEMPTGSNESEAKSWKAIRVDLVRCPYDRFAFALLGWTGSRMFERDLRRYATHEKKMMLDNHALYDLTKKIFLKAKSEEEIFAHLGLEYLEPSERNA

SEQ ID NO: 1079 - DNA, 1587 bp, synthetic construct
  misc_feature 1..1587: note = Variant of terminal deoxynucleotidyltransferase
  source 1..1587: mol_type = other DNA
atgcaccatcatcatcatcatggcggtagcggcagccacggcattcgtaccatcgattcggacttcgggaagaaacgccagaagaagatggataaccacgatagttccgccatctatgaaatcaaatttcacgagtttgtgctgttcattctcgaagagaaaatgggtgcgacgcgtcgtacttttctgacagatttagcccgcaagaaagggttccgcgtcgagaatgaactgtcagacagcgttacccacatcgtggcagaaaataattcaggatctgacgtattggcttggctgaagactcacaagatggagaagaccacgcaatttgaactgctggatattagctggcttatcgaaagcatgaaagttggtaaaccggtggacaccaaggggaaataccagttgatggaatcgggtgtgatgagtgcgaacccagatccgacagagggtcgtgaaaacattctgcctcctactacgaagaccatttctcagtatgcgtgtcaacgccgcaccaccctgaacaaccataatcaacgttttacggacgcactggaaattcttgcggaaaattacgagttcaaacgcaacgatgatacttgtctgacctttatgcgtgctatttccgtgctgaaatgccttccgtttgaggtagttagcctgaaagacacggaaggattgccctggatcggtgatgaagtcaaagggattatggaagaaatcatcgaggtcggtgaatcgctggaagtgcaggccgtgctcaatgatgagcgctatcaaagcttcaaactgtttaagagtgtctttggagtgggggtgaagacagcagacaaatggtaccgtatgggtctgcgcacgctcgaggatgttcgttccagcaagaccctgaagttgaccccgatgcagaaagcgggtctgtgctattatgaagatcttgctgatggcgttacgaaagccgaagctgacgcgatttctctgctggttcaggatgcagtctggactttcgacccggatgcgctggtggagattacgggtggatttcgtcgtgggaaacctcggggtcacgacgttgatctgcttatcacatctccgggagctgagaaagaacaagaagaccagctcctgcagaaagtgaccaatctgtggaagaaacaagggttgttgctgtacggtgacctgcgtgaaagtcgctttgaagatgggaaactcccatcccgcaagatcgatgccctggaccattttgcgaaatgctttctgatcctcaaactttatcaccataaagtggacaaaagcaaatgggaaatgccgacgggttcgaacgaaagcgaggccaaaagttggaaagcaattcgcgtagatctggttcgttgtccctacgatcgttttgcgtttgcgttgttgggttggaccggaagccgcatgttcgaacgtgatctgcgccgctacgccacccacgagaagaagatgatgctggacaatcatgcgctgtatgacctgaccaagaaaatctttctcaaagctaaatcggaagaggaaattttcgcacatctggggcttgaatacctggaaccgtccgaacgtaacgca

SEQ ID NO: 1080 - protein, 529 aa, synthetic construct
  REGION 1..529: note = Variant of terminal deoxynucleotidyltransferase
MHHHHHHGGSGSHGIRTIDSDFGKKRQKKMDNHDSSAIYEIKFHEFVLFILEEKMGATRRTFLTDLARKKGFRVENELSDSVTHIVAENNSGSDVLAWLKTHKMEKTTQFELLDISWLIESMKVGKPVDTKGKYQLMESGVMSANPDPTEGRENILPPTTKTISQYACQRRTTLNNHNQRFTDALEILAENYEFKRNDDTCLTFMRAISVLKCLPFEVVSLKDTEGLPWIGDEVKGIMEEIIEVGESLEVQAVLNDERYQSFKLFKSVFGVGVKTADKWYRMGLRTLEDVRSSKTLKLTPMQKAGLCYYEDLADGVTKAEADAISLLVQDAVWTFDPDALVEITGGFRRGKPRGHDVDLLITSPGAEKEQEDQLLQKVTNLWKKQGLLLYGDLRESRFEDGKLPSRKIDALDHFAKCFLILKLYHHKVDKSKWEMPTGSNESEAKSWKAIRVDLVRCPYDRFAFALLGWTGSRMFERDLRRYATHEKKMMLDNHALYDLTKKIFLKAKSEEEIFAHLGLEYLEPSERNA

SEQ ID NO: 1081 - DNA, 1587 bp, synthetic construct
  misc_feature 1..1587: note = Variant of terminal deoxynucleotidyltransferase
  source 1..1587: mol_type = other DNA
atgcaccatcatcatcatcatggcggtagcggcagccacggcattcgtaccatcgattcggacttcgggaagaaacgccagaagaagatggataaccacgatagttccgccatctatgaaatcaaatttcacgagtttgtgctgttcattctcgaagagaaaatgggtgcgacgcgtcgtacttttctgacagatttagcccgcaagaaagggttccgcgtcgagaatgaactgtcagacagcgttacccacatcgtggcagaaaataattcaggatctgacgtattggcttggctgaagactcacaagatggagaagaccacgcaatttgaactgctggatattagctggcttatcgaaagcatgaaagttggtaaaccggtggacaccaaggggaaataccagttgatggaatcgggtgtgatgagtgcgaacccagatccgacagagggtcgtgaaaacattctgcctcctactacgaagaccatttctcagtatgcgtgtcaacgccgcaccaccctgaacaaccataatcaacgttttacggacgcactggaaattcttgcggaaaattacgagttcaaacgcaacgatgatacttgtctgacctttatgcgtgctatttccgtgctgaaatgccttccgtttgaggtagttagcctgaaagacacggaaggattgccctggatcggtgatgaagtcaaagggattatggaagaaatcatcgaggtcggtgaatcgctggaagtgcaggccgtgctcaatgatgagcgctatcaaagcttcaaactgtttaagagtgtctttggagtgggggtgaagacagcagacaaatggtaccgtatgggtctgcgcacgctcgaggatgttcgttccagcaagaccctgaagttgaccccgatgcagaaagcgggtctgtgctattatgaagatcttgctgatggcgttacgaaagccgaagctgacgcgatttctctgctggttcaggatgcagtctggactttcgacccggatgcgctggtggagattacgggtggatttcgtcgtgggaaaccttttggtcacgacgttgatctgcttatcacatctccgggagctgagaaagaacaagaagaccagctcctgcagaaagtgaccaatctgtggaagaaacaagggttgttgctgtacggtgacctgcgtgaaagtcgctttgaagatgggaaactcccatcccgcaagatcgatgagctggaccattttgcgaaatgctttctgatcctcaaactttatcaccataaagtggacaaaagcaaatgggaaatgccgacgggttcgaacgaaagcgaggccaaaagttggaaagcaattcgcgtagatctggttcgttgtccctacgatcgttttgcgtttgcgttgttgggttggaccggaagccgcatgttcgaacgtgatctgcgccgctacgccacccacgagaagaagatgatgctggacaatcatgcgctgtatgacctgaccaagaaaatctttctcaaagctaaatcggaagaggaaattttcgcacatctggggcttgaatacctggaaccgtccgaacgtaacgca

SEQ ID NO: 1082 - protein, 529 aa, synthetic construct
  REGION 1..529: note = Variant of terminal deoxynucleotidyltransferase
MHHHHHHGGSGSHGIRTIDSDFGKKRQKKMDNHDSSAIYEIKFHEFVLFILEEKMGATRRTFLTDLARKKGFRVENELSDSVTHIVAENNSGSDVLAWLKTHKMEKTTQFELLDISWLIESMKVGKPVDTKGKYQLMESGVMSANPDPTEGRENILPPTTKTISQYACQRRTTLNNHNQRFTDALEILAENYEFKRNDDTCLTFMRAISVLKCLPFEVVSLKDTEGLPWIGDEVKGIMEEIIEVGESLEVQAVLNDERYQSFKLFKSVFGVGVKTADKWYRMGLRTLEDVRSSKTLKLTPMQKAGLCYYEDLADGVTKAEADAISLLVQDAVWTFDPDALVEITGGFRRGKPFGHDVDLLITSPGAEKEQEDQLLQKVTNLWKKQGLLLYGDLRESRFEDGKLPSRKIDELDHFAKCFLILKLYHHKVDKSKWEMPTGSNESEAKSWKAIRVDLVRCPYDRFAFALLGWTGSRMFERDLRRYATHEKKMMLDNHALYDLTKKIFLKAKSEEEIFAHLGLEYLEPSERNA

SEQ ID NO: 1083 - DNA, 1587 bp, synthetic construct
  misc_feature 1..1587: note = Variant of terminal deoxynucleotidyltransferase
  source 1..1587: mol_type = other DNA
atgcaccatcatcatcatcatggcggtagcggcagccacggcattcgtaccatcgattcggacttcgggaagaaacgccagaagaagatggataaccacgatagttccgccatctatgaaatcaaatttcacgagtttgtgctgttcattctcgaagagaaaatgggtgcgacgcgtcgtacttttctgacagatttagcccgcaagaaagggttccgcgtcgagaatgaactgtcagacagcgttacccacatcgtggcagaaaataattcaggatctgacgtattggcttggctgaagactcacaagatggagaagaccacgcaatttgaactgctggatattagctggcttatcgaaagcatgaaagttggtaaaccggtggacaccaaggggaaataccagttgatggaatcgggtgtgatgagtgcgaacccagatccgacagagggtcgtgaaaacattctgcctcctactacgaagaccatttctcagtatgcgtgtcaacgccgcaccaccctgaacaaccataatcaacgttttacggacgcactggaaattcttgcggaaaattacgagttcgagcgcaacgatgatacttgtctgacctttatgcgtgctatttccgtgctgaaatgccttccgtttgaggtagttagcctgaaagacacggaaggattgccctggatcggtgatgaagtcaaagggattatggaagaaatcatcgaggtcggtgaatcgctggaagtgcaggccgtgctcaatgatgagcgctatcaaagcttcaaactgtttaagagtgtctttggagtgggggtgaagacagcagacaaatggtaccgtatgggtctgcgcacgctcgaggatgttcgttccagcaagaccctgaagttgaccccgatgcagaaagcgggtctgtgctattatgaagatcttgctgatggcgttacgaaagccgaagctgacgcgatttctctgctggttcaggatgcagtctggactttcgacccggatgcgctggtggagattacgggtggatttcgtcgtgggaaaccttttggtcacgacgttgatctgcttatcacatctccgggagctgagaaagaacaagaagaccagctcctgcagaaagtgaccaatctgtggaagaaacaagggttgttgctgtacggtgacctgcgtgaaagtcgctttgaagatgggaaactcccatcccgcaagatcgatgccctggaccattttgcgaaatgctttctgatcctcaaactttatcaccataaagtggacaaaagcaaatgggaaatgccgacgggttcgaacgaaagcgaggccaaaagttggaaagcaattcgcgtagatctggttcgttgtccctacgatcgttttgcgtttgcgttgttgggttggaccggaagccgcatgttcgaacgtgatctgcgccgctacgccacccacgagaagaagatgatgctggacaatcatgcgctgtatgacctgaccaagaaaatctttctcaaagctaaatcggaagaggaaattttcgcacatctggggcttgaatacctggaaccgtccgaacgtaacgca

SEQ ID NO: 1084 - protein, 529 aa, synthetic construct
  REGION 1..529: note = Variant of terminal deoxynucleotidyltransferase
MHHHHHHGGSGSHGIRTIDSDFGKKRQKKMDNHDSSAIYEIKFHEFVLFILEEKMGATRRTFLTDLARKKGFRVENELSDSVTHIVAENNSGSDVLAWLKTHKMEKTTQFELLDISWLIESMKVGKPVDTKGKYQLMESGVMSANPDPTEGRENILPPTTKTISQYACQRRTTLNNHNQRFTDALEILAENYEFERNDDTCLTFMRAISVLKCLPFEVVSLKDTEGLPWIGDEVKGIMEEIIEVGESLEVQAVLNDERYQSFKLFKSVFGVGVKTADKWYRMGLRTLEDVRSSKTLKLTPMQKAGLCYYEDLADGVTKAEADAISLLVQDAVWTFDPDALVEITGGFRRGKPFGHDVDLLITSPGAEKEQEDQLLQKVTNLWKKQGLLLYGDLRESRFEDGKLPSRKIDALDHFAKCFLILKLYHHKVDKSKWEMPTGSNESEAKSWKAIRVDLVRCPYDRFAFALLGWTGSRMFERDLRRYATHEKKMMLDNHALYDLTKKIFLKAKSEEEIFAHLGLEYLEPSERNA

SEQ ID NO: 1085 - DNA, 1587 bp, synthetic construct
  misc_feature 1..1587: note = Variant of terminal deoxynucleotidyltransferase
  source 1..1587: mol_type = other DNA
atgcaccatcatcatcatcatggcggtagcggcagccacggcattcgtaccatcgattcggacttcgggaagaaacgccagaagaagatggataaccacgatagttccgccatctatgaaatcaaatttcacgagtttgtgctgttcattctcgaagagaaaatgggtgcgacgcgtcgtacttttctgacagatttagcccgcaagaaagggttccgcgtcgagaatgaactgtcagacagcgttacccacatcgtggcagaaaataattcaggatctgacgtattggcttggctgaagactcacaagatggagaagaccacgcaatttgaactgctggatattagctggcttatcgaaagcatgaaagttggtaaaccggtggacaccaaggggaaataccagttgatggaatcgggtgtgatgagtgcgaacccagatccgacagagggtcgtgaaaacattctgcctcctactacgaagaccatttctcagtatgcgtgtcaacgccgcaccaccctgaacaaccataatcaacgttttacggacgcactggaaattcttgcggaaaattacgagttcaaacgcaacgatgatacttgtctgacctttatgcgtgctatttccgtgctgaaatgccttccgtttgaggtagttagcctgaaagacacggaaggattgccctggatcggtgatgaagtcaaagggattatggaagaaatcatcgaggtcggtgaatcgctggaagtgcaggccgtgctcaatgatgagcgctatcaaagcttcaaactgtttaagagtgtctttggagtgggggtgaagacagcagacaaatggtaccgtatgggtctgcgcacgctcgaggatgttcgttccagcaagaccctgaagttgaccccgatgcagaaagcgggtctgtgctattatgaagatcttgctgatggcgttacgaaagccgaagctgacgcgatttctctgctggttcaggatgcagtctggactttcgacccggatgcgctggtggagattacgggtggatttcgtcgtgggaaaccttcgggtcacgacgttgatctgcttatcacatctccgggagctgagaaagaacaagaagaccagctcctgcagaaagtgaccaatctgtggaagaaacaagggttgttgctgtacggtgacctgcgtgaaagtcgctttgaagatgggaaactcccatcccgcaagatcgatgccctggaccattttgcgaaatgctttctgatcctcaaactttatcaccataaagtggacaaaagcaaatgggaaatgccgacgggttcgaacgaaagcgaggccaaaagttggaaagcaattcgcgtagatctggttcgttgtccctacgatcgttttgcgtttgcgttgttgggttggaccggaagccgcatgttcgaacgtgatctgcgccgctacgccacccacgagaagaagatgatgctggacaatcatgcgctgtatgacctgaccaagaaaatctttctcaaagctaaatcggaagaggaaattttcgcacatctggggcttgaatacctggaaccgtccgaacgtaacgca

SEQ ID NO: 1086 - protein, 529 aa, synthetic construct
  REGION 1..529: note = Variant of terminal deoxynucleotidyltransferase
MHHHHHHGGSGSHGIRTIDSDFGKKRQKKMDNHDSSAIYEIKFHEFVLFILEEKMGATRRTFLTDLARKKGFRVENELSDSVTHIVAENNSGSDVLAWLKTHKMEKTTQFELLDISWLIESMKVGKPVDTKGKYQLMESGVMSANPDPTEGRENILPPTTKTISQYACQRRTTLNNHNQRFTDALEILAENYEFKRNDDTCLTFMRAISVLKCLPFEVVSLKDTEGLPWIGDEVKGIMEEIIEVGESLEVQAVLNDERYQSFKLFKSVFGVGVKTADKWYRMGLRTLEDVRSSKTLKLTPMQKAGLCYYEDLADGVTKAEADAISLLVQDAVWTFDPDALVEITGGFRRGKPSGHDVDLLITSPGAEKEQEDQLLQKVTNLWKKQGLLLYGDLRESRFEDGKLPSRKIDALDHFAKCFLILKLYHHKVDKSKWEMPTGSNESEAKSWKAIRVDLVRCPYDRFAFALLGWTGSRMFERDLRRYATHEKKMMLDNHALYDLTKKIFLKAKSEEEIFAHLGLEYLEPSERNA

SEQ ID NO: 1087 - DNA, 1587 bp, synthetic construct
  misc_feature 1..1587: note = Variant of terminal deoxynucleotidyltransferase
  source 1..1587: mol_type = other DNA
atgcaccatcatcatcatcatggcggtagcggcagccacggcattcgtaccatcgattcggacttcgggaagaaacgccagaagaagatggataaccacgatagttccgccatctatgaaatcaaatttcacgagtttgtgctgttcattctcgaagagaaaatgggtgcgacgcgtcgtacttttctgacagatttagcccgcaagaaagggttccgcgtcgagaatgaactgtcagacagcgttacccacatcgtggcagaaaataattcaggatctgacgtattggcttggctgaagactcacaagatggagaagaccacgcaatttgaactgctggatattagctggcttatcgaaagcatgaaagttggtaaaccggtggacaccaaggggaaataccagttgatggaatcgggtgtgatgagtgcgaacccagatccgacagagggtcgtgaaaacattctgcctcctactacgaagaccatttctcagtatgcgtgtcaacgccgcaccaccctgaacaaccataatcaacgttttacggacgcactggaaattcttgcggaaaattacgagttcaaacgcaacgatgatacttgtctgacctttatgcgtgctatttccgtgctgaaatgccttccgtttgaggtagttagcctgaaagacacggaaggattgccctggatcggtgatgaagtcaaagggattatggaagaaatcatcgaggtcggtgaatcgctggaagtgcaggccgtgctcaatgatgagcgctatcaaagcttcaaactgtttaagagtgtctggggagtgggggtgaagacagcagacaaatggtaccgtatgggtctgcgcacgctcgaggatgttcgttccagcaagaccctgaagttgaccccgatgcagaaagcgggtctgtgctattatgaagatcttgctgatggcgttacgaaagccgaagctgacgcgatttctctgctggttcaggatgcagtctggactttcgacccggatgcgctggtggagattacgggtggatttcgtcgtgggaaaccttttggtcacgacgttgatctgcttatcacatctccgggagctgagaaagaacaagaagaccagctcctgcagaaagtgaccaatctgtggaagaaacaagggttgttgctgtacggtgacctgcgtgaaagtcgctttgaagatgggaaactcccatcccgcaagatcgatgccctggaccattttgcgaaatgctttctgatcctcaaactttatcaccataaagtggacaaaagcaaatgggaaatgccgacgggttcgaacgaaagcgaggccaaaagttggaaagcaattcgcgtagatctggttcgttgtccctacgatcgttttgcgtttgcgttgttgggttggaccggaagccgcatgttcgaacgtgatctgcgccgctacgccacccacgagaagaagatgatgctggacaatcatgcgctgtatgacctgaccaagaaaatctttctcaaagctaaatcggaagaggaaattttcgcacatctggggcttgaatacctggaaccgtccgaacgtaacgca

SEQ ID NO: 1088 - protein, 529 aa, synthetic construct
  REGION 1..529: note = Variant of terminal deoxynucleotidyltransferase
MHHHHHHGGSGSHGIRTIDSDFGKKRQKKMDNHDSSAIYEIKFHEFVLFILEEKMGATRRTFLTDLARKKGFRVENELSDSVTHIVAENNSGSDVLAWLKTHKMEKTTQFELLDISWLIESMKVGKPVDTKGKYQLMESGVMSANPDPTEGRENILPPTTKTISQYACQRRTTLNNHNQRFTDALEILAENYEFKRNDDTCLTFMRAISVLKCLPFEVVSLKDTEGLPWIGDEVKGIMEEIIEVGESLEVQAVLNDERYQSFKLFKSVWGVGVKTADKWYRMGLRTLEDVRSSKTLKLTPMQKAGLCYYEDLADGVTKAEADAISLLVQDAVWTFDPDALVEITGGFRRGKPFGHDVDLLITSPGAEKEQEDQLLQKVTNLWKKQGLLLYGDLRESRFEDGKLPSRKIDALDHFAKCFLILKLYHHKVDKSKWEMPTGSNESEAKSWKAIRVDLVRCPYDRFAFALLGWTGSRMFERDLRRYATHEKKMMLDNHALYDLTKKIFLKAKSEEEIFAHLGLEYLEPSERNA

SEQ ID NO: 1089 - DNA, 1587 bp, synthetic construct
  misc_feature 1..1587: note = Variant of terminal deoxynucleotidyltransferase
  source 1..1587: mol_type = other DNA
atgcaccatcatcatcatcatggcggtagcggcagccacggcattcgtaccatcgattcggacttcgggaagaaacgccagaagaagatggataaccacgatagttccgccatctatgaaatcaaatttcacgagtttgtgctgttcattctcgaagagaaaatgggtgcgacgcgtcgtacttttctgacagatttagcccgcaagaaagggttccgcgtcgagaatgaactgtcagacagcgttacccacatcgtggcagaaaataattcacgctctgaagtattggcttggctgaagactcacaagatggagaagaccaagcaattcgaactgctggatattagctggcttatcgaaagcatgaaagttggtaaaccggtggacaccaaggggaaataccagttgatggaatcgggtgagatgagtgcgaacccagatccgacagagggtcgtgaaaacgagctgcctcctactacgaagaccatttctcagtatgcgtgtcaacgccgcaccaccctgaacaaccataatcaacgttttacggacgcactggaaattcttgcggaaaattacgagttcaaacgcaacgatgatacttgtctggcgtttatgcgtgctatttccgtgctgaaatgccttccgtttgaggtagttagcctgaaagacacggaaggattgccctggatcggtgatgaagtcaaagggattatggaagaaatcatcgaggtcggtgaatcgctggaagtgcaggccgtgctcaatgatgagcgctatcaaagcttcaaactgtttaagagtgtctttggagtgggggtgaagacagcagacaaatggtaccgtatgggtctgcgcacgctcgaggatgttcgttccagcaagaccctgaagttgaccccgatgcagaaagcgggtctgtgctattatgaagatcttgctgatggcgttacgaaagccgaagctgacgcgatttctctgctggttcaggatgcagtctggactttcgacccggatgcgctggtggagattacgggtggatttcgtcgtgggaaaccttttggtcacgacgttgatctgcttatcacatctccgggagctgagaaagaacaagaagaccagctcctgcagaaagtgaccaatctgtggaagaaacaagggttgttgctgtacggtcgtctgcgtgaaagtcgctttgaagatgggaaactcccatcccgcaagatcgatgccctggaccattttgcgaaatgctttctgatcctcaaactttatcaccataaagtggacaaaagcaaatgggaaatgccgacgggttcgaacgaaagcgaggccaaaagttggaaagcaattcgcgtagatctggttcgttgtccctacgatcgttttgcgtttgcgttgttgggttggaccggaagccgcatgttcgaacgtgatctgcgccgctacgccacccacgagaagaagatgatgctggacaatcatgcgctgtatgacctgaccaagaaaatctttctcaaagctaaatcggaagaggaaattttcgcacatctggggcttgaatacctggaaccgtccgaacgtaacgca

SEQ ID NO: 1090 - protein, 529 aa, synthetic construct
  REGION 1..529: note = Variant of terminal deoxynucleotidyltransferase
MHHHHHHGGSGSHGIRTIDSDFGKKRQKKMDNHDSSAIYEIKFHEFVLFILEEKMGATRRTFLTDLARKKGFRVENELSDSVTHIVAENNSRSEVLAWLKTHKMEKTKQFELLDISWLIESMKVGKPVDTKGKYQLMESGEMSANPDPTEGRENELPPTTKTISQYACQRRTTLNNHNQRFTDALEILAENYEFKRNDDTCLAFMRAISVLKCLPFEVVSLKDTEGLPWIGDEVKGIMEEIIEVGESLEVQAVLNDERYQSFKLFKSVFGVGVKTADKWYRMGLRTLEDVRSSKTLKLTPMQKAGLCYYEDLADGVTKAEADAISLLVQDAVWTFDPDALVEITGGFRRGKPFGHDVDLLITSPGAEKEQEDQLLQKVTNLWKKQGLLLYGRLRESRFEDGKLPSRKIDALDHFAKCFLILKLYHHKVDKSKWEMPTGSNESEAKSWKAIRVDLVRCPYDRFAFALLGWTGSRMFERDLRRYATHEKKMMLDNHALYDLTKKIFLKAKSEEEIFAHLGLEYLEPSERNA

SEQ ID NO: 1091 - DNA, 1587 bp, synthetic construct
  misc_feature 1..1587: note = Variant of terminal deoxynucleotidyltransferase
  source 1..1587: mol_type = other DNA
atgcaccatcatcatcatcatggcggtagcggcagccacggcattcgtaccatcgattcggacttcgggaagaaacgccagaagaagatggataaccacgatagttccgccatctatgaaatcaaatttcacgagtttgtgctgttcattctcgaagagaaaatgggtgcgacgcgtcgtacttttctgacagatttagcccgcaagaaagggttccgcgtcgagaatgaactgtcagacagcgttacccacatcgtggcagaaaataattcacgctctgaagtattggcttggctgaagactcacaagatggagaagaccaagcaattcgaactgctggatattagctggcttatcgaaagcatgaaagttggtaaaccggtggacaccaaggggaaataccagttgatggaatcgggtgagatgagtgcgaacccagatccgacagagggtcgtgaaaacgagctgcctcctactacgaagaccatttctcagtatgcgtgtcaacgccgcaccaccctgaacaaccataatcaacgttttacggacgcactggaaattcttgcggaaaattacgagttcaaacgcaacgatgatacttgtctgacctttatgcgtgctatttccgtgctgaaatgccttccgtttgaggtagttagcctgaaagacacggaaggattgccctggatcggtgatgaagtcaaagggattatggaagaaatcatcgaggtcggtgaatcgctggaagtgcaggccgtgctcaatgatgagcgctatcaaagcttcaaactgtttaagagtgtctttggagtgggggtgaagacagcagacaaatggtaccgtatgggtctgcgcacgctcgaggatgttcgttccagcaagaccctgaagttgaccccgatgcagaaagcgggtctgtgctattatgaagatcttgctgatggcgttacgaaagccgaagctgacgcgatttctctgctggttcaggatgcagtctggactttcgacccggatgcgctggtggagattacgggtggatttcgtcgtgggaaaccttttggtcacgacgttgatctgcttatcacatctccgggagctgagaaagaacaagaagaccagctcctgcagaaagtgaccaatctgtggaagaaacaagggttgttgctgtacggtcgtctggaggaaagtcgctttgaagatgggaaactcccatcccgcaagatcgatgccctggaccattttgcgaaatgctttctgatcctcaaactttatcaccataaagtggacaaaagcaaatgggaaatgccgacgggttcgaacgaaagcgaggccaaaagttggaaagcaattcgcgtagatctggttcgttgtccctacgatcgttttgcgtttgcgttgttgggttggaccggaagccgcatgttcgaacgtgatctgcgccgctacgccacccacgagaagaagatgatgctggacaatcatgcgctgtatgacctgaccaagaaaatctttctcaaagctaaatcggaagaggaaattttcgcacatctggggcttgaatacctggaaccgtccgaacgtaacgca

SEQ ID NO: 1092 - protein, 529 aa, synthetic construct
  REGION 1..529: note = Variant of terminal deoxynucleotidyltransferase
MHHHHHHGGSGSHGIRTIDSDFGKKRQKKMDNHDSSAIYEIKFHEFVLFILEEKMGATRRTFLTDLARKKGFRVENELSDSVTHIVAENNSRSEVLAWLKTHKMEKTKQFELLDISWLIESMKVGKPVDTKGKYQLMESGEMSANPDPTEGRENELPPTTKTISQYACQRRTTLNNHNQRFTDALEILAENYEFKRNDDTCLTFMRAISVLKCLPFEVVSLKDTEGLPWIGDEVKGIMEEIIEVGESLEVQAVLNDERYQSFKLFKSVFGVGVKTADKWYRMGLRTLEDVRSSKTLKLTPMQKAGLCYYEDLADGVTKAEADAISLLVQDAVWTFDPDALVEITGGFRRGKPFGHDVDLLITSPGAEKEQEDQLLQKVTNLWKKQGLLLYGRLEESRFEDGKLPSRKIDALDHFAKCFLILKLYHHKVDKSKWEMPTGSNESEAKSWKAIRVDLVRCPYDRFAFALLGWTGSRMFERDLRRYATHEKKMMLDNHALYDLTKKIFLKAKSEEEIFAHLGLEYLEPSERNA

SEQ ID NO: 1093 - DNA, 1587 bp, synthetic construct
  misc_feature 1..1587: note = Variant of terminal deoxynucleotidyltransferase
  source 1..1587: mol_type = other DNA
atgcaccatcatcatcatcatggcggtagcggcagccacggcattcgtaccatcgattcggacttcgggaagaaacgccagaagaagatggataaccacgatagttccgccatctatgaaatcaaatttcacgagtttgtgctgttcattctcgaagagaaaatgggtgcgacgcgtcgtacttttctgacagatttagcccgcaagaaagggttccgcgtcgagaatgaactgtcagacagcgttacccacatcgtggcagaaaataattcacgctctgaagtattggcttggctgaagactcacaagatggagaagaccaagcaattcgaactgctggatattagctggcttatcgaaagcatgaaagttggtaaaccggtggacaccaaggggaaataccagttgatggaatcgggtgagatgagtgcgaacccagatccgacagagggtcgtgaaaacgagctgcctcctactacgaagaccatttctcagtatgcgtgtcaacgccgcaccaccctgaacaaccataatcaacgttttacggacgcactggaaattcttgcggaaaattacgagttcaaacgcaacgatgatacttgtctgacctttatgcgtgctatttccgtgctgaaatgccttccgtttgaggtagttagcctgaaagacacggaaggattgccctggatcggtgatgaagtcaaagggattatggaagaaatcatcgaggtcggtgaatcgctggaagtgcaggccgtgctcaatgatgagcgctatcaaagcttcaaactgtttaagagtgtctttggagtgggggtgaagacagcagacaaatggtaccgtatgggtctgcgcacgctcgaggatgttcgttccagcaagaccctgaagttgaccccgatgcagaaagcgggtctgtgctattatgaagatcttgctgatggcgttacgaaagccgaagctgacgcgatttctctgctggttcaggatgcagtctggactttcgacccggatgcgctggtggagattacgggtggatttcgtcgtgggaaaccttttggtcacgacgttgatctgcttatcacatctccgggagctgagaaagaacaagaagaccagctcctgcagaaagtgaccaatctgtggaagaaacaagggttgttgctgtacggtcgtctgacggaaagtcgctttgaagatgggaaactcccatcccgcaagatcgatgccctggaccattttgcgaaatgctttctgatcctcaaactttatcaccataaagtggacaaaagcaaatgggaaatgccgacgggttcgaacgaaagcgaggccaaaagttggaaagcaattcgcgtagatctggttcgttgtccctacgatcgttttgcgtttgcgttgttgggttggaccggaagccgcatgttcgaacgtgatctgcgccgctacgccacccacgagaagaagatgatgctggacaatcatgcgctgtatgacctgaccaagaaaatctttctcaaagctaaatcggaagaggaaattttcgcacatctggggcttgaatacctggaaccgtccgaacgtaacgca

SEQ ID NO: 1094 - protein, 529 aa, synthetic construct
  REGION 1..529: note = Variant of terminal deoxynucleotidyltransferase
MHHHHHHGGSGSHGIRTIDSDFGKKRQKKMDNHDSSAIYEIKFHEFVLFILEEKMGATRRTFLTDLARKKGFRVENELSDSVTHIVAENNSRSEVLAWLKTHKMEKTKQFELLDISWLIESMKVGKPVDTKGKYQLMESGEMSANPDPTEGRENELPPTTKTISQYACQRRTTLNNHNQRFTDALEILAENYEFKRNDDTCLTFMRAISVLKCLPFEVVSLKDTEGLPWIGDEVKGIMEEIIEVGESLEVQAVLNDERYQSFKLFKSVFGVGVKTADKWYRMGLRTLEDVRSSKTLKLTPMQKAGLCYYEDLADGVTKAEADAISLLVQDAVWTFDPDALVEITGGFRRGKPFGHDVDLLITSPGAEKEQEDQLLQKVTNLWKKQGLLLYGRLTESRFEDGKLPSRKIDALDHFAKCFLILKLYHHKVDKSKWEMPTGSNESEAKSWKAIRVDLVRCPYDRFAFALLGWTGSRMFERDLRRYATHEKKMMLDNHALYDLTKKIFLKAKSEEEIFAHLGLEYLEPSERNA

SEQ ID NO: 1095 - DNA, 1587 bp, synthetic construct
  misc_feature 1..1587: note = Variant of terminal deoxynucleotidyltransferase
  source 1..1587: mol_type = other DNA
atgcaccatcatcatcatcatggcggtagcggcagccacggcattcgtaccatcgattcggacttcgggaagaaacgccagaagaagatggataaccacgatagttccgccatctatgaaatcaaatttcacgagtttgtgctgttcattctcgaagagaaaatgggtgcgacgcgtcgtacttttctgacagatttagcccgcaagaaagggttccgcgtcgagaatgaactgtcagacagcgttacccacatcgtggcagaaaataattcacgctctgaagtattggcttggctgaagactcacaagatggagaagaccaagcaattcgaactgctggatattagctggcttatcgaaagcatgaaagttggtaaaccggtggacaccaaggggaaataccagttgatggaatcgggtgagatgagtgcgaacccagatccgacagagggtcgtgaaaacgagctgcctcctactacgaagaccatttctcagtatgcgtgtcaacgccgcaccaccctgaacaaccataatcaacgttttacggacgcactggaaattcttgcggaaaattacgagttcaaacgcaacgatgatacttgtctgacctttatgcgtgctatttccgtgctgaaatgccttccgtttgaggtagttagcctgaaagacacggaaggattgccctggatcggtgatgaagtcaaagggattatggaagaaatcatcgaggtcggtgaatcgctggaagtgcaggccgtgctcaatgatgagcgctatcaaagcttcaaactgtttaagagtgtctttggagtgggggtgaagacagcagacaaatggtaccgtatgggtctgcgcacgctcgaggatgttcgttccagcaagaccctgaagttgaccccgatgcagaaagcgggtctgtgctattatgaagatcttgctaggggcgttacgaaagccgaagctgacgcgatttctctgctggttcaggatgcagtctggactttcgacccggatgcgctggtggagattacgggtggatttcgtcgtgggaaaccttttggtcacgacgttgatctgcttatcacatctccgggagctgagaaagaacaagaagaccagctcctgcagaaagtgaccaatctgtggaagaaacaagggttgttgctgtacggtcgtctgcgtgaaagtcgctttgaagatgggaaactcccatcccgcaagatcgatgccctggaccattttgcgaaatgctttctgatcctcaaactttatcaccataaagtggacaaaagcaaatgggaaatgccgacgggttcgaacgaaagcgaggccaaaagttggaaagcaattcgcgtagatctggttcgttgtccctacgatcgttttgcgtttgcgttgttgggttggaccggaagccgcatgttcgaacgtgatctgcgccgctacgccacccacgagaagaagatgatgctggacaatcatgcgctgtatgacctgaccaagaaaatctttctcaaagctaaatcggaagaggaaattttcgcacatctggggcttgaatacctggaaccgtccgaacgtaacgca

SEQ ID NO: 1096 - protein, 529 aa, synthetic construct
  REGION 1..529: note = Variant of terminal deoxynucleotidyltransferase
MHHHHHHGGSGSHGIRTIDSDFGKKRQKKMDNHDSSAIYEIKFHEFVLFILEEKMGATRRTFLTDLARKKGFRVENELSDSVTHIVAENNSRSEVLAWLKTHKMEKTKQFELLDISWLIESMKVGKPVDTKGKYQLMESGEMSANPDPTEGRENELPPTTKTISQYACQRRTTLNNHNQRFTDALEILAENYEFKRNDDTCLTFMRAISVLKCLPFEVVSLKDTEGLPWIGDEVKGIMEEIIEVGESLEVQAVLNDERYQSFKLFKSVFGVGVKTADKWYRMGLRTLEDVRSSKTLKLTPMQKAGLCYYEDLARGVTKAEADAISLLVQDAVWTFDPDALVEITGGFRRGKPFGHDVDLLITSPGAEKEQEDQLLQKVTNLWKKQGLLLYGRLRESRFEDGKLPSRKIDALDHFAKCFLILKLYHHKVDKSKWEMPTGSNESEAKSWKAIRVDLVRCPYDRFAFALLGWTGSRMFERDLRRYATHEKKMMLDNHALYDLTKKIFLKAKSEEEIFAHLGLEYLEPSERNA

SEQ ID NO: 1097 - DNA, 1587 bp, synthetic construct
  misc_feature 1..1587: note = Variant of terminal deoxynucleotidyltransferase
  source 1..1587: mol_type = other DNA
atgcaccatcatcatcatcatggcggtagcggcagccacggcattcgtaccatcgattcggacttcgggaagaaacgccagaagaagatggataaccacgatagttccgccatctatgaaatcaaatttcacgagtttgtgctgttcattctcgaagagaaaatgggtgcgacgcgtcgtacttttctgacagatttagcccgcaagaaagggttccgcgtcgagaatgaactgtcagacagcgttacccacatcgtggcagaaaataattcacgctctgaagtattggcttggctgaagactcacaagatggagaagaccaagcaattcgaactgctggatattagctggcttatcgaaagcatgaaagttggtaaaccggtggacaccaaggggaaataccagttgatggaatcgggtgagatgagtgcgaacccagatccgacagagggtcgtgaaaacgagctgcctcctactacgaagaccatttctcagtatgcgtgtcaacgccgcaccaccctgaacaaccataatcaacgttttacggacgcactggaaattcttgcggaaaattacgagttcaaacgcaacgatcggacttgtctgacctttatgcgtgctatttccgtgctgaaatgccttccgtttgaggtagttagcctgaaagacacggaaggattgccctggatcggtgatgaagtcaaagggattatggaagaaatcatcgaggtcggtgaatcgctggaagtgcaggccgtgctcaatgatgagcgctatcaaagcttcaaactgtttaagagtgtctttggagtgggggtgaagacagcagacaaatggtaccgtatgggtctgcgcacgctcgaggatgttcgttccagcaagaccctgaagttgaccccgatgcagaaagcgggtctgtgctattatgaagatcttgctgatggcgttacgaaagccgaagctgacgcgatttctctgctggttcaggatgcagtctggactttcgacccggatgcgctggtggagattacgggtggatttcgtcgtgggaaaccttttggtcacgacgttgatctgcttatcacatctccgggagctgagaaagaacaagaagaccagctcctgcagaaagtgaccaatctgtggaagaaacaagggttgttgctgtacggtcgtctgcgtgaaagtcgctttgaagatgggaaactcccatcccgcaagatcgatgccctggaccattttgcgaaatgctttctgatcctcaaactttatcaccataaagtggacaaaagcaaatgggaaatgccgacgggttcgaacgaaagcgaggccaaaagttggaaagcaattcgcgtagatctggttcgttgtccctacgatcgttttgcgtttgcgttgttgggttggaccggaagccgcatgttcgaacgtgatctgcgccgctacgccacccacgagaagaagatgatgctggacaatcatgcgctgtatgacctgaccaagaaaatctttctcaaagctaaatcggaagaggaaattttcgcacatctggggcttgaatacctggaaccgtccgaacgtaacgca

SEQ ID NO: 1098 - protein, 529 aa, synthetic construct
  REGION 1..529: note = Variant of terminal deoxynucleotidyltransferase
MHHHHHHGGSGSHGIRTIDSDFGKKRQKKMDNHDSSAIYEIKFHEFVLFILEEKMGATRRTFLTDLARKKGFRVENELSDSVTHIVAENNSRSEVLAWLKTHKMEKTKQFELLDISWLIESMKVGKPVDTKGKYQLMESGEMSANPDPTEGRENELPPTTKTISQYACQRRTTLNNHNQRFTDALEILAENYEFKRNDRTCLTFMRAISVLKCLPFEVVSLKDTEGLPWIGDEVKGIMEEIIEVGESLEVQAVLNDERYQSFKLFKSVFGVGVKTADKWYRMGLRTLEDVRSSKTLKLTPMQKAGLCYYEDLADGVTKAEADAISLLVQDAVWTFDPDALVEITGGFRRGKPFGHDVDLLITSPGAEKEQEDQLLQKVTNLWKKQGLLLYGRLRESRFEDGKLPSRKIDALDHFAKCFLILKLYHHKVDKSKWEMPTGSNESEAKSWKAIRVDLVRCPYDRFAFALLGWTGSRMFERDLRRYATHEKKMMLDNHALYDLTKKIFLKAKSEEEIFAHLGLEYLEPSERNA

SEQ ID NO: 1099 - DNA, 1587 bp, synthetic construct
  misc_feature 1..1587: note = Variant of terminal deoxynucleotidyltransferase
  source 1..1587: mol_type = other DNA
atgcaccatcatcatcatcatggcggtagcggcagccacggcattcgtaccatcgattcggacttcgggaagaaacgccagaagaagatggataaccacgatagttccgccatctatgaaatcaaatttcacgagtttgtgctgttcattctcgaagagaaaatgggtgcgacgcgtcgtacttttctgacagatttagcccgcaagaaagggttccgcgtcgagaatgaactgtcagacagcgttacccacatcgtggcagaaaataattcacgctctgaagtattggcttggctgaagactcacaagatggagaagaccaagcaattcgaactgctggatattagctggcttatcgaaagcatgaaagttggtaaaccggtggacaccaaggggaaataccagttgatggaatcgggtgagatgagtgcgaacccagatccgacagagggtcgtgaaaacgagctgcctcctactacgaagaccatttctcagtatgcgtgtcaacgccgcaccaccctgaacaaccataatcaacgttttacggacgcactggaaattcttgcggaaaattacgagttcaaacgcaacgatgatacttgtctgacctttatgcgtgctatttccgtgctgaaatgccttccgtttgaggtagttagcctgaaagacacggaaggattgccctggatcggtgatgaagtcaaagggattatggaagaaatcatcgaggtcggtgaatcgctggaagtgcaggccgtgctcaatgatgagcgctatcaaagcttcaaactgtttaagagtgtctttggagtgggggtgaagacagcagacaaatggtaccgtatgggtctgcgcacgctcgaggatgttcgttccagcaagaccctgaagttgaccccgatgcagaaagcgggtctgtgctattatgaagatcttgctgatggcgttacgaaagccgaagctgacgcgatttctctgctggttcaggatgcagtctggactttcgacccggatgcgctggtggagattacgggtggatttcgtcgtgggaaaccttttggtcacgacgttgatctgcttatcacatctccgggagctgagaaagaacaagaagaccagctcctgcagaaagtgaccaatctgtggaagaaacaagggttgttgctgtacggtcgtctgcgtgaaagtcgctttgaagatgggaaactcccatcccgcaagatcgatgccctggaccattttgcgaaatgctttctgatcctcaaactttatcaccataaagtggacaaaagcaaatgggaaatgccgacgggttcgaacgaaagcgaggccaaaagttggaaagcaattcgcgtagatctggttcgttgtccctacgatggttttgcgtttgcgttgttgggttggaccggaagccgcatgttcgaacgtgatctgcgccgctacgccacccacgagaagaagatgatgctggacaatcatgcgctgtatgacctgaccaagaaaatctttctcaaagctaaatcggaagaggaaattttcgcacatctggggcttgaatacctggaaccgtccgaacgtaacgca

SEQ ID NO: 1100 - protein, 529 aa, synthetic construct
  REGION 1..529: note = Variant of terminal deoxynucleotidyltransferase
MHHHHHHGGSGSHGIRTIDSDFGKKRQKKMDNHDSSAIYEIKFHEFVLFILEEKMGATRRTFLTDLARKKGFRVENELSDSVTHIVAENNSRSEVLAWLKTHKMEKTKQFELLDISWLIESMKVGKPVDTKGKYQLMESGEMSANPDPTEGRENELPPTTKTISQYACQRRTTLNNHNQRFTDALEILAENYEFKRNDDTCLTFMRAISVLKCLPFEVVSLKDTEGLPWIGDEVKGIMEEIIEVGESLEVQAVLNDERYQSFKLFKSVFGVGVKTADKWYRMGLRTLEDVRSSKTLKLTPMQKAGLCYYEDLADGVTKAEADAISLLVQDAVWTFDPDALVEITGGFRRGKPFGHDVDLLITSPGAEKEQEDQLLQKVTNLWKKQGLLLYGRLRESRFEDGKLPSRKIDALDHFAKCFLILKLYHHKVDKSKWEMPTGSNESEAKSWKAIRVDLVRCPYDGFAFALLGWTGSRMFERDLRRYATHEKKMMLDNHALYDLTKKIFLKAKSEEEIFAHLGLEYLEPSERNA

SEQ ID NO: 1101 - DNA, 1587 bp, synthetic construct
  misc_feature 1..1587: note = Variant of terminal deoxynucleotidyltransferase
  source 1..1587: mol_type = other DNA
atgcaccatcatcatcatcatggcggtagcggcagccacggcattcgtaccatcgattcggacttcgggaagaaacgccagaagaagatggataaccacgatagttccgccatctatgaaatcaaatttcacgagtttgtgctgttcattctcgaagagaaaatgggtgcgacgcgtcgtacttttctgacagatttagcccgcaagaaagggttccgcgtcgagaatgaactgtcagacagcgttacccacatcgtggcagaaaataattcacgctctgaagtattggcttggctgaagactcacaagatggagaagaccaagcaattcgaactgctggatattagctggcttatcgaaagcatgaaagttggtaaaccggtggacaccaaggggaaataccagttgatggaatcgggtgagatgagtgcgaacccagatccgacagagggtcgtgaaaacgagctgcctcctactacgaagaccatttctcagtatgcgtgtcaacgccgcaccaccctgaacaaccataatcaacgttttacggacgcactggaaattcttgcggaaaattacgagttcaaacgcaacgatgatacttgtctgacctttatgcgtgctatttccgtgctgaaatgccttccgtttgaggtagttagcctgaaagacacggaaggattgccctggatcggtgatgaagtcaaagggattatggaagaaatcatcgaggtcggtgaatcgctggaagtgcaggccgtgctcaatgatgagcgctatcaaagcttcaaactgtttaagagtgtctttggagtgggggtgaagacagcagacaaatggtaccgtatgggtctgcgcacgctcgaggatgttcgttccagcaagaccctgaagttgaccccgatgcagaaagcgggtctgtgctattatgaagatcttgctgatggcgttacgaaagccgaagctgacgcgatttctctgctggttcaggatgcagtctggactttcgacccggatgcgctggtggagattacgggtggatttcgtcgtgggaaaccttttggtcacgacgttgatctgcttatcacatctccgggagctgagaaagaacaagaagaccagctcctgcagaaagtgaccaatctgtggaagaaacaagggttgttgctgtacggtcgtctgcgtgaaagtcgctttgaagatgggaaattcccatcccgcaagatcgatgccctggaccattttgcgaaatgctttctgatcctcaaactttatcaccataaagtggacaaaagcaaatgggaaatgccgacgggttcgaacgaaagcgaggccaaaagttggaaagcaattcgcgtagatctggttcgttgtccctacgatcgtcatgcgtttgcgttgttgggttggaccggaagccgcatgttcgaacgtgatctgcgccgctacgccacccacgagaagaagatgatgctggacaatcatgcgctgtatgacctgaccaagaaaatctttctcaaagctaaatcggaagaggaaattttcgcacatctggggcttgaatacctggaaccgtccgaacgtaacgca

SEQ ID NO: 1102 - protein, 529 aa, synthetic construct
  REGION 1..529: note = Variant of terminal deoxynucleotidyltransferase
MHHHHHHGGSGSHGIRTIDSDFGKKRQKKMDNHDSSAIYEIKFHEFVLFILEEKMGATRRTFLTDLARKKGFRVENELSDSVTHIVAENNSRSEVLAWLKTHKMEKTKQFELLDISWLIESMKVGKPVDTKGKYQLMESGEMSANPDPTEGRENELPPTTKTISQYACQRRTTLNNHNQRFTDALEILAENYEFKRNDDTCLTFMRAISVLKCLPFEVVSLKDTEGLPWIGDEVKGIMEEIIEVGESLEVQAVLNDERYQSFKLFKSVFGVGVKTADKWYRMGLRTLEDVRSSKTLKLTPMQKAGLCYYEDLADGVTKAEADAISLLVQDAVWTFDPDALVEITGGFRRGKPFGHDVDLLITSPGAEKEQEDQLLQKVTNLWKKQGLLLYGRLRESRFEDGKFPSRKIDALDHFAKCFLILKLYHHKVDKSKWEMPTGSNESEAKSWKAIRVDLVRCPYDRHAFALLGWTGSRMFERDLRRYATHEKKMMLDNHALYDLTKKIFLKAKSEEEIFAHLGLEYLEPSERNA

SEQ ID NO: 1103 - DNA, 1587 bp, synthetic construct
  misc_feature 1..1587: note = Variant of terminal deoxynucleotidyltransferase
  source 1..1587: mol_type = other DNA
atgcaccatcatcatcatcatggcggtagcggcagccacggcattcgtaccatcgattcggacttcgggaagaaacgccagaagaagatggataaccacgatagttccgccatctatgaaatcaaatttcacgagtttgtgctgttcattctcgaagagaaaatgggtgcgacgcgtcgtacttttctgacagatttagcccgcaagaaagggttccgcgtcgagaatgaactgtcagacagcgttacccacatcgtggcagaaaataattcacgctctgaagtattggcttggctgaagactcacaagatggagaagaccaagcaattcgaactgctggatattagctggcttatcgaaagcatgaaagttggtaaaccggtggacaccaaggggaaataccagttgatggaatcgggtgagatgagtgcgaacccagatccgacagagggtcgtgaaaacgagctgcctcctactacgaagaccatttctcagtatgcgtgtcaacgccgcaccaccctgaacaaccataatcaacgttttacggacgcactggaaattcttgcggaaaattacgagttcaaacgcaacgatgatacttgtctgacctttatgcgtgctatttccgtgctgaaatgccttccgtttgaggtagttagcctgaaagacacggaaggattgccctggatcggtgatgaagtcaaagggattatggaagaaatcatcgaggtcggtgaatcgctggaagtgcaggccgtgctcaatgatgagcgctatcaaagcttcaaactgtttaagagtgtctttggagtgggggtgaagacagcagacaaatggtaccgtatgggtctgcgcacgctcgaggatgttcgttccagcaagaccctgaagttgaccccgatgcagaaagcgggtctgtgctattatgaagatcttgctgatggcgttacgaaagccgaagctgacgcgatttctctgctggttcaggatgcagtctggactttcgacccggatgcgctggtggagattacgggtggatttcgtcgtgggaaaccttttggtcacgacgttgatctgcttatcacatctccgggagctgagaaagaacaagaagaccagctcctgcagaaagtgaccaatctgtggaagaaacaagggttgttgctgtacggtcgtctgcgtgaaagtcgctttgaagatgggaaactcccatcccgcaagatcgatgccctggaccattttgcgaaatgctttctgatcctcaaactttatcaccataaagtggacaaaagcaaatgggaaatgccgacgggttcgaacgaaagcgaggccaaaagttggaaagcaattcgcgtagatctggttcgttgtccctacgatcgttttgcgtttgcgttgttgggttggaccggaagccgcatgttcgaacgtgatctgcgccgctacgcccggcacgagaagaagatgatgctggacaatcatgcgctgtatgacctgaccaagaaaatctttctcaaagctaaatcggaagaggaaattttcgcacatctggggcttgaatacctggaaccgtccgaacgtaacgca

SEQ ID NO: 1104 - protein, 529 aa, synthetic construct
  REGION 1..529: note = Variant of terminal deoxynucleotidyltransferase
MHHHHHHGGSGSHGIRTIDSDFGKKRQKKMDNHDSSAIYEIKFHEFVLFILEEKMGATRRTFLTDLARKKGFRVENELSDSVTHIVAENNSRSEVLAWLKTHKMEKTKQFELLDISWLIESMKVGKPVDTKGKYQLMESGEMSANPDPTEGRENELPPTTKTISQYACQRRTTLNNHNQRFTDALEILAENYEFKRNDDTCLTFMRAISVLKCLPFEVVSLKDTEGLPWIGDEVKGIMEEIIEVGESLEVQAVLNDERYQSFKLFKSVFGVGVKTADKWYRMGLRTLEDVRSSKTLKLTPMQKAGLCYYEDLADGVTKAEADAISLLVQDAVWTFDPDALVEITGGFRRGKPFGHDVDLLITSPGAEKEQEDQLLQKVTNLWKKQGLLLYGRLRESRFEDGKLPSRKIDALDHFAKCFLILKLYHHKVDKSKWEMPTGSNESEAKSWKAIRVDLVRCPYDRFAFALLGWTGSRMFERDLRRYARHEKKMMLDNHALYDLTKKIFLKAKSEEEIFAHLGLEYLEPSERNA

SEQ ID NO: 1105 - DNA, 1587 bp, synthetic construct
  misc_feature 1..1587: note = Variant of terminal deoxynucleotidyltransferase
  source 1..1587: mol_type = other DNA
atgcaccatcatcatcatcatggcggtagcggcagccacggcattcgtaccatcgattcggacttcgggaagaaacgccagaagaagatggataaccacgatagttccgccatctatgaaatcaaatttcacgagtttgtgctgttcattctcgaagagaaaatgggtgcgacgcgtcgtacttttctgacagatttagcccgcaagaaagggttccgcgtcgagaatgaactgtcagacagcgttacccacatcgtggcagaaaataattcacgctctgaagtattggcttggctgaagactcacaagatggagaagaccaagcaattcgaactgctggatattagctggcttatcgaaagcatgaaagttggtaaaccggtggacaccaaggggaaataccagttgatggaatcgggtgagatgagtgcgaacccagatccgacagagggtcgtgaaaacgagctgcctcctactacgaagaccatttctcagtatgcgtgtcaacgccgcaccaccctgaacaaccataatcaacgttttacggacgcactggaaattcttgcggaaaattacgagttcaaacgcaacgatgtgacttgtctgacctttatgcgtgctatttccgtgctgaaatgccttccgtttgaggtagttagcctgaaagacacggaaggattgccctggatcggtgatgaagtcaaagggattatggaagaaatcatcgaggtcggtgaatcgctggaagtgcaggccgtgctcaatgatgagcgctatcaaagcttcaaactgtttaagagtgtctttggagtgggggtgaagacagcagacaaatggtaccgtatgggtctgcgcacgctcgaggatgttcgttccagcaagaccctgaagttgaccccgatgcagaaagcgggtctgtgctattatgaagatcttgctgatggcgttacgaaagccgaagctgacgcgatttctctgctggttcaggatgcagtctggactttcgacccggatgcgctggtggagattacgggtggatttcgtcgtgggaaaccttttggtcacgacgttgatctgcttatcacatctccgggagctgagaaagaacaagaagaccagctcctgcagaaagtgaccaatctgtggaagaaacaagggttgttgctgtacggtcgtctgcgtgaaagtcgctttgaagatgggaaactcccatcccgcaagatcgatgccctggaccattttgcgaaatgctttctgatcctcaaactttatcaccataaagtggacaaaagcaaatgggaaatgccgacgggttcgaacgaaagcgaggccaaaagttggaaagcaattcgcgtagatctggttcgttgtccctacgatcgttttgcgtttgcgttgttgggttggaccggaagccgcatgttcgaacgtgatctgcgccgctacgccacccacgagaagaagatgatgctggacaatcatgcgctgtatgacctgaccaagaaaatctttctcaaagctaaatcggaagaggaaattttcgcacatctggggcttgaatacctggaaccgtccgaacgtaacgca

SEQ ID NO: 1106 - protein, 529 aa, synthetic construct
  REGION 1..529: note = Variant of terminal deoxynucleotidyltransferase
MHHHHHHGGSGSHGIRTIDSDFGKKRQKKMDNHDSSAIYEIKFHEFVLFILEEKMGATRRTFLTDLARKKGFRVENELSDSVTHIVAENNSRSEVLAWLKTHKMEKTKQFELLDISWLIESMKVGKPVDTKGKYQLMESGEMSANPDPTEGRENELPPTTKTISQYACQRRTTLNNHNQRFTDALEILAENYEFKRNDVTCLTFMRAISVLKCLPFEVVSLKDTEGLPWIGDEVKGIMEEIIEVGESLEVQAVLNDERYQSFKLFKSVFGVGVKTADKWYRMGLRTLEDVRSSKTLKLTPMQKAGLCYYEDLADGVTKAEADAISLLVQDAVWTFDPDALVEITGGFRRGKPFGHDVDLLITSPGAEKEQEDQLLQKVTNLWKKQGLLLYGRLRESRFEDGKLPSRKIDALDHFAKCFLILKLYHHKVDKSKWEMPTGSNESEAKSWKAIRVDLVRCPYDRFAFALLGWTGSRMFERDLRRYATHEKKMMLDNHALYDLTKKIFLKAKSEEEIFAHLGLEYLEPSERNA

SEQ ID NO: 1107 - DNA, 1587 bp, synthetic construct
  misc_feature 1..1587: note = Variant of terminal deoxynucleotidyltransferase
  source 1..1587: mol_type = other DNA
atgcaccatcatcatcatcatggcggtagcggcagccacggcattcgtaccatcgattcggacttcgggaagaaacgccagaagaagatggataaccacgatagttccgccatctatgaaatcaaatttcacgagtttgtgctgttcattctcgaagagaaaatgggtgcgacgcgtcgtacttttctgacagatttagcccgcaagaaagggttccgcgtcgagaatgaactgtcagacagcgttacccacatcgtggcagaaaataattcacgctctgaagtattggcttggctgaagactcacaagatggagaagaccaagcaattcgaactgctggatattagctggcttatcgaaagcatgaaagttggtaaaccggtggacaccaaggggaaataccagttgatggaatcgggtgagatgagtgcgaacccagatccgacagagggtcgtgaaaacgagctgcctcctactacgaagaccatttctcagtatgcgtgtcaacgccgcaccaccctgaacaaccataatcaacgttttacggacgcactggaaattcttgcggaaaattacgagttcaaacgcaacgatgatacttgtctgacctttatgcgtgctatttccgtgctgaaatgccttccgtttgaggtagttagcctgaaagacacggaaggattgccctggatcggtgatgaagtcaaagggattatggaagaaatcatcgaggtcggtgaatcgctggaagtgcaggccgtgctcaatgatgagcgctatcaaagcttcaaactgtttaagagtgtctttggagtgggggtgaagacagcagacaaatggtaccgtatgggtctgcgcacgctcgaggatgttcgttccagcaagaccctgaagttgaccccgatgcagaaagcgggtctgtgctattatgaagatcttgctgatggcgttacgaaagccgaagctgacgcgatttctctgctggttcaggatgcagtctggactttcgacccggatgcgctggtggagattacgggtggatttcgtcgtgggaaaccttttggtcacgacgttgatctgcttatcacatctccgggagctgagaaagaacaagaagaccagctcctgcagaaagtgtgtaatctgtggaagaaacaagggttgttgctgtacggtcgtctgcgtgaaagtcgctttgaagatgggaaactcccatcccgcaagatcgatgccctggaccattttgcgaaatgctttctgatcctcaaactttatcaccataaagtggacaaaagcaaatgggaaatgccgacgggttcgaacgaaagcgaggccaaaagttggaaagcaattcgcgtagatctggttcgttgtccctacgatcgttttgcgtttgcgttgttgggttggaccggaagccgcatgttcgaacgtgatctgcgccgctacgccacccacgagaagaagatgatgctggacaatcatgcgctgtatgacctgaccaagaaaatctttctcaaagctaaatcggaagaggaaattttcgcacatctggggcttgaatacctggaaccgtccgaacgtaacgca

SEQ ID NO: 1108 - protein, 529 aa, synthetic construct
  REGION 1..529: note = Variant of terminal deoxynucleotidyltransferase
MHHHHHHGGSGSHGIRTIDSDFGKKRQKKMDNHDSSAIYEIKFHEFVLFILEEKMGATRRTFLTDLARKKGFRVENELSDSVTHIVAENNSRSEVLAWLKTHKMEKTKQFELLDISWLIESMKVGKPVDTKGKYQLMESGEMSANPDPTEGRENELPPTTKTISQYACQRRTTLNNHNQRFTDALEILAENYEFKRNDDTCLTFMRAISVLKCLPFEVVSLKDTEGLPWIGDEVKGIMEEIIEVGESLEVQAVLNDERYQSFKLFKSVFGVGVKTADKWYRMGLRTLEDVRSSKTLKLTPMQKAGLCYYEDLADGVTKAEADAISLLVQDAVWTFDPDALVEITGGFRRGKPFGHDVDLLITSPGAEKEQEDQLLQKVCNLWKKQGLLLYGRLRESRFEDGKLPSRKIDALDHFAKCFLILKLYHHKVDKSKWEMPTGSNESEAKSWKAIRVDLVRCPYDRFAFALLGWTGSRMFERDLRRYATHEKKMMLDNHALYDLTKKIFLKAKSEEEIFAHLGLEYLEPSERNA

SEQ ID NO: 1109 - DNA, 1587 bp, synthetic construct
  misc_feature 1..1587: note = Variant of terminal deoxynucleotidyltransferase
  source 1..1587: mol_type = other DNA
atgcaccatcatcatcatcatggcggtagcggcagccacggcattcgtaccatcgattcggacttcgggaagaaacgccagaagaagatggataaccacgatagttccgccatctatgaaatcaaatttcacgagtttgtgctgttcattctcgaagagaaaatgggtgcgacgcgtcgtacttttctgacagatttagcccgcaagaaagggttccgcgtcgagaatgaactgtcagacagcgttacccacatcgtggcagaaaataattcacgctctgaagtattggcttggctgaagactcacaagatggagaagaccaagcaattcgaactgctggatattagctggcttatcgaaagcatgaaagttggtaaaccggtggacaccaaggggaaataccagttgatggaatcgggtgagatgagtgcgaacccagatccgacagagggtcgtgaaaacgagctgcctcctactacgaagaccatttctcagtatgcgtgtcaacgccgcaccaccctgaacaaccataatcaacgttttacggacgcactggaaattcttgcggaaaattacgagttcaaacgcaacgatgatacttgtctgacctttatgcgtgctatttccgtgctgaaatgccttccgtttgaggtagttagcctgaaagacacggaaggattgccctggatcggtgatgaagtcaaagggattatggaagaaatcatcgaggtcggtgaatcgctggaagtgcaggccgtgctcaatgatgagcgctatcaaagcttcaaactgtttaagagtgtctttggagtgggggtgaagacagcagacaaatggtaccgtatgggtctgcgcacgctcgaggatgttcgttccagcaagaccctgaagttgaccccgatgcagaaagcgggtctgtgctattatgaagatcttgctgatggcgttacgaaagccgaagctgacgcgatttttctgctggttcaggatgcagtctggactttcgacccggatgcgctggtggagattacgggtggatttcgtcgtgggaaaccttttggtcacgacgttgatctgcttatcacatctccgggagctgagaaagaacaagaagaccagctcctgcagaaagtgaccaatctgtggaagaaacaagggttgttgctgtacggtcgtctgcgtgaaagtcgctttgaagatgggaaactcccatcccgcaagatcgatgccctggaccattttgcgaaatgctttctgatcctcaaactttatcaccataaagtggacaaaagcaaatgggaaatgccgacgggttcgaacgaaagcgaggccaaaagttggaaagcaattcgcgtagatctggttcgttgtccctacgatcgttttgcgtttgcgttgttgggttggaccggaagccgcatgttcgaacgtgatctgcgccgctacgccacccacgagaagaagatgatgctggacaatcatgcgctgtatgacctgaccaagaaaatctttctcaaagctaaatcggaagaggaaattttcgcacatctggggcttgaatacctggaaccgtccgaacgtaacgca

SEQ ID NO: 1110 - protein, 529 aa, synthetic construct
  REGION 1..529: note = Variant of terminal deoxynucleotidyltransferase
MHHHHHHGGSGSHGIRTIDSDFGKKRQKKMDNHDSSAIYEIKFHEFVLFILEEKMGATRRTFLTDLARKKGFRVENELSDSVTHIVAENNSRSEVLAWLKTHKMEKTKQFELLDISWLIESMKVGKPVDTKGKYQLMESGEMSANPDPTEGRENELPPTTKTISQYACQRRTTLNNHNQRFTDALEILAENYEFKRNDDTCLTFMRAISVLKCLPFEVVSLKDTEGLPWIGDEVKGIMEEIIEVGESLEVQAVLNDERYQSFKLFKSVFGVGVKTADKWYRMGLRTLEDVRSSKTLKLTPMQKAGLCYYEDLADGVTKAEADAIFLLVQDAVWTFDPDALVEITGGFRRGKPFGHDVDLLITSPGAEKEQEDQLLQKVTNLWKKQGLLLYGRLRESRFEDGKLPSRKIDALDHFAKCFLILKLYHHKVDKSKWEMPTGSNESEAKSWKAIRVDLVRCPYDRFAFALLGWTGSRMFERDLRRYATHEKKMMLDNHALYDLTKKIFLKAKSEEEIFAHLGLEYLEPSERNA

SEQ ID NO: 1111 - DNA, 1587 bp, synthetic construct
  misc_feature 1..1587: note = Variant of terminal deoxynucleotidyltransferase
  source 1..1587: mol_type = other DNA
atgcaccatcatcatcatcatggcggtagcggcagccacggcattcgtaccatcgattcggacttcgggaagaaacgccagaagaagatggataaccacgatagttccgccatctatgaaatcaaatttcacgagtttgtgctgttcattctcgaagagaaaatgggtgcgacgcgtcgtacttttctgacagatttagcccgcaagaaagggttccgcgtcgagaatgaactgtcagacagcgttacccacatcgtggcagaaaataattcacgctctgaagtattggcttggctgaagactcacaagatggagaagaccaagcaattcgaactgctggatattagctggcttatcgaaagcatgaaagttggtaaaccggtggacaccaaggggaaataccagttgatggaatcgggtgagatgagtgcgaacccagatccgacagagggtcgtgaaaacgagctgcctcctactacgaagaccatttctcagtatgcgtgtcaacgccgcaccaccctgaacaaccataatcaacgttttacggacgcactggaaattcttgcggaaaattacgagttcaaacgcaacgatgatacttgtctgacctttatgcgtgctatttccgtgctgaaatgccttccgtttgaggtagttagcctgaaagacacggaaggattgccctggatcggtgatgaagtcaaagggattatggaagaaatcatcgaggtcggtgaatcgctggaagtgcaggccgtgctcaatgatgagcgctatcaaagcttcaaactgtttaagagtgtctttggagtgggggtgaagacagcagacaaatggtaccgtatgggtctgcgcacgctcgaggatgttcgttccagcaagaccctgaagttgaccccgatgcagaaagcgggtctgtgctattatgaagatcttgctgatggcgttacgaaagccgaagctgacgcgatttctctgctggttcaggatgcagtctggactttcgacccggatgcgctggtggagattacgggtggatttcgtcgtgggaaaccttttggtcacgacgttgatctgcttatcacatctccgggagctgagaaagaacaagaagaccagctcctgcagaaagtgaccaatctgtggaagaaacaagggttgttgctgtacggtcgtctgcgtgaaagtcgctttgaagatgggaaactcccatcccgcaagatcgatgccctggaccattttgcgaaatgctttctgatcctcaaactttatcaccataaagtggacaaaagcaaatgggaaatgccgacgggttcgaacgaaagcgaggccaaaagttggaaagcaattcgcgtagatctggttcgttgtccctacgatcgttttgcgtttgcgttgttgggttggaccggaagccgcatgttcgaacgtgatctgcgcgattacgccacccacgagaagaagatgatgctggacaatcatgcgctgtatgacctgaccaagaaaatctttctcaaagctaaatcggaagaggaaattttcgcacatctggggcttgaatacctggaaccgtccgaacgtaacgca

SEQ ID NO: 1112 - protein, 529 aa, synthetic construct
  REGION 1..529: note = Variant of terminal deoxynucleotidyltransferase
MHHHHHHGGSGSHGIRTIDSDFGKKRQKKMDNHDSSAIYEIKFHEFVLFILEEKMGATRRTFLTDLARKKGFRVENELSDSVTHIVAENNSRSEVLAWLKTHKMEKTKQFELLDISWLIESMKVGKPVDTKGKYQLMESGEMSANPDPTEGRENELPPTTKTISQYACQRRTTLNNHNQRFTDALEILAENYEFKRNDDTCLTFMRAISVLKCLPFEVVSLKDTEGLPWIGDEVKGIMEEIIEVGESLEVQAVLNDERYQSFKLFKSVFGVGVKTADKWYRMGLRTLEDVRSSKTLKLTPMQKAGLCYYEDLADGVTKAEADAISLLVQDAVWTFDPDALVEITGGFRRGKPFGHDVDLLITSPGAEKEQEDQLLQKVTNLWKKQGLLLYGRLRESRFEDGKLPSRKIDALDHFAKCFLILKLYHHKVDKSKWEMPTGSNESEAKSWKAIRVDLVRCPYDRFAFALLGWTGSRMFERDLRDYATHEKKMMLDNHALYDLTKKIFLKAKSEEEIFAHLGLEYLEPSERNA

SEQ ID NO: 1113 - DNA, 1587 bp, synthetic construct
  misc_feature 1..1587: note = Variant of terminal deoxynucleotidyltransferase
  source 1..1587: mol_type = other DNA
atgcaccatcatcatcatcatggcggtagcggcagccacggcattcgtaccatcgattcggacttcgggaagaaacgccagaagaagatggataaccacgatagttccgccatctatgaaatcaaatttcacgagtttgtgctgttcattctcgaagagaaaatgggtgcgacgcgtcgtacttttctgacagatttagcccgcaagaaagggttccgcgtcgagaatgaactgtcagacagcgttacccacatcgtggcagaaaataattcacgctctgaagtattggcttggctgaagactcacaagatggagaagaccaagcaattcgaactgctggatattagctggcttatcgaaagcatgaaagttggtaaaccggtggacaccaaggggaaataccagttgatggaatcgggtgagatgagtgcgaacccagatccgacagagggtcgtgaaaacgagctgcctcctactacgaagaccatttctcagtatgcgtgtcaacgccgcaccaccctgaacaaccataatcaacgttttacggacgcactggaaattcttgcggaaaattacgagttcaaacgcaacgatgatacttgtctgacctttatgcgtgctatttccgtgctgaaatgccttccgtttgaggtagttagcctgaaagacacggaaggattgccctggatcggtgatgaagtcaaagggattatggaagaaatcatcgaggtcggtgaatcgctggaagtgcaggccgtgctcaatgatgagcgctatcaaagcttcaaactgtttaagagtgtctttggagtgggggtgaagacagcagacaaatggtaccgtatgggtctgcgcacgctcgaggatgttcgttccagcaagaccctgaagttgaccccgatgcagaaagcgggtctgtgctattatgaagatcttgctgtgggcgttacgaaagccgaagctgacgcgatttctctgctggttcaggatgcagtctggactttcgacccggatgcgctggtggagattacgggtggatttcgtcgtgggaaaccttttggtcacgacgttgatctgcttatcacatctccgggagctgagaaagaacaagaagaccagctcctgcagaaagtgaccaatctgtggaagaaacaagggttgttgctgtacggtcgtctgcgtgaaagtcgctttgaagatgggaaactcccatcccgcaagatcgatgccctggaccattttgcgaaatgctttctgatcctcaaactttatcaccataaagtggacaaaagcaaatgggaaatgccgacgggttcgaacgaaagcgaggccaaaagttggaaagcaattcgcgtagatctggttcgttgtccctacgatcgttttgcgtttgcgttgttgggttggaccggaagccgcatgttcgaacgtgatctgcgccgctacgccacccacgagaagaagatgatgctggacaatcatgcgctgtatgacctgaccaagaaaatctttctcaaagctaaatcggaagaggaaattttcgcacatctggggcttgaatacctggaaccgtccgaacgtaacgca

SEQ ID NO: 1114 - protein, 529 aa, synthetic construct
  REGION 1..529: note = Variant of terminal deoxynucleotidyltransferase
MHHHHHHGGSGSHGIRTIDSDFGKKRQKKMDNHDSSAIYEIKFHEFVLFILEEKMGATRRTFLTDLARKKGFRVENELSDSVTHIVAENNSRSEVLAWLKTHKMEKTKQFELLDISWLIESMKVGKPVDTKGKYQLMESGEMSANPDPTEGRENELPPTTKTISQYACQRRTTLNNHNQRFTDALEILAENYEFKRNDDTCLTFMRAISVLKCLPFEVVSLKDTEGLPWIGDEVKGIMEEIIEVGESLEVQAVLNDERYQSFKLFKSVFGVGVKTADKWYRMGLRTLEDVRSSKTLKLTPMQKAGLCYYEDLAVGVTKAEADAISLLVQDAVWTFDPDALVEITGGFRRGKPFGHDVDLLITSPGAEKEQEDQLLQKVTNLWKKQGLLLYGRLRESRFEDGKLPSRKIDALDHFAKCFLILKLYHHKVDKSKWEMPTGSNESEAKSWKAIRVDLVRCPYDRFAFALLGWTGSRMFERDLRRYATHEKKMMLDNHALYDLTKKIFLKAKSEEEIFAHLGLEYLEPSERNA

SEQ ID NO: 1115 - DNA, 1587 bp, synthetic construct
  misc_feature 1..1587: note = Variant of terminal deoxynucleotidyltransferase
  source 1..1587: mol_type = other DNA
atgcaccatcatcatcatcatggcggtagcggcagccacggcattcgtaccatcgattcggacttcgggaagaaacgccagaagaagatggataaccacgatagttccgccatctatgaaatcaaatttcacgagtttgtgctgttcattctcgaagagaaaatgggtgcgacgcgtcgtacttttctgacagatttagcccgcaagaaagggttccgcgtcgagaatgaactgtcagacagcgttacccacatcgtggcagaaaataattcacgctctgaagtattggcttggctgaagactcacaagatggagaagaccaagcaattcgaactgctggatattagctggcttatcgaaagcatgaaagttggtaaaccggtggacaccaaggggaaataccagttgatggaatcgggtgagatgagtgcgaacccagatccgacagagggtcgtgaaaacgagctgcctcctactacgaagaccatttctcagtatgcgtgtcaacgccgcaccaccctgaacaaccataatcaacgttttacggacgcactggaaattcttgcggaaaattacgagttcaaacgcaacgatgatacttgtctgacctttatgcgtgctatttccgtgctgaaatgccttccgtttgaggtagttagcctgaaagacacggaaggattgccctggatcggtgatgaagtcaaagggattatggaagaaatcatcgaggtcggtgaatcgctggaagtgcaggccgtgctcaatgatgagcgctatcaaagcttcaaactgtttaagagtgtctttggagtgggggtgaagacagcagacaaatggtaccgtatgggtctgcgcacgctcgaggatgttcgttccagcaagaccctgaagttgaccccgatgcagaaagcgggtctgtgctattatgaagatcttgctgatggcgttacgaaagccgaagctgacgcgatttctctgctggttcaggatgcagtctggactttcgacccggatgcgctggtggagattacgggtggatttcgtcgtgggaaaccttttggtcacgacgttgatctgcttatcacatctccgggagctgagaaagaacaagaagaccagctcctgcagaaagtgaccaatctgtggaagaaacaagggttgttgctgtacggtcgtctgcgtgaaagtcgctttgaagatgggaaactcccatcccgcaagatcgatgccctggaccattttgcgaaatgctttctgatcctcaaactttatcaccataaagtggacaaaagcaaatgggaaatgccgacgggttcgaacgaaagcgaggccaaaagttggaaagcaattcgcgtagatctggttcgttgtccctacgatcgtattgcgtttgcgttgttgggttggaccggaagccgcatgttcgaacgtgatctgcgccgctacgccacccacgagaagaagatgatgctggacaatcatgcgctgtatgacctgaccaagaaaatctttctcaaagctaaatcggaagaggaaattttcgcacatctggggcttgaatacctggaaccgtccgaacgtaacgca

SEQ ID NO: 1116 - protein, 529 aa, synthetic construct
  REGION 1..529: note = Variant of terminal deoxynucleotidyltransferase
MHHHHHHGGSGSHGIRTIDSDFGKKRQKKMDNHDSSAIYEIKFHEFVLFILEEKMGATRRTFLTDLARKKGFRVENELSDSVTHIVAENNSRSEVLAWLKTHKMEKTKQFELLDISWLIESMKVGKPVDTKGKYQLMESGEMSANPDPTEGRENELPPTTKTISQYACQRRTTLNNHNQRFTDALEILAENYEFKRNDDTCLTFMRAISVLKCLPFEVVSLKDTEGLPWIGDEVKGIMEEIIEVGESLEVQAVLNDERYQSFKLFKSVFGVGVKTADKWYRMGLRTLEDVRSSKTLKLTPMQKAGLCYYEDLADGVTKAEADAISLLVQDAVWTFDPDALVEITGGFRRGKPFGHDVDLLITSPGAEKEQEDQLLQKVTNLWKKQGLLLYGRLRESRFEDGKLPSRKIDALDHFAKCFLILKLYHHKVDKSKWEMPTGSNESEAKSWKAIRVDLVRCPYDRIAFALLGWTGSRMFERDLRRYATHEKKMMLDNHALYDLTKKIFLKAKSEEEIFAHLGLEYLEPSERNA

SEQ ID NO: 1117 - DNA, 1587 bp, synthetic construct
  misc_feature 1..1587: note = Variant of terminal deoxynucleotidyltransferase
  source 1..1587: mol_type = other DNA
atgcaccatcatcatcatcatggcggtagcggcagccacggcattcgtaccatcgattcggacttcgggaagaaacgccagaagaagatggataaccacgatagttccgccatctatgaaatcaaatttcacgagtttgtgctgttcattctcgaagagaaaatgggtgcgacgcgtcgtacttttctgacagatttagcccgcaagaaagggttccgcgtcgagaatgaactgtcagacagcgttacccacatcgtggcagaaaataattcacgctctgaagtattggcttggctgaagactcacaagatggagaagaccaagcaattcgaactgctggatattagctggcttatcgaaagcatgaaagttggtaaaccggtggacaccaaggggaaataccagttgatggaatcgggtgagatgagtgcgaacccagatccgacagagggtcgtgaaaacgagctgcctcctactacgaagaccatttctcagtatgcgtgtcaacgccgcaccaccctgaacaaccataatcaacgttttacggacgcactggaaattcttgcggaaaattacgagttcaaacgcaacgatgatacttgtctgacctttatgcgtgctatttccgtgctgaaatgccttccgtttgaggtagttagcctgaaagacacggaaggattgccctggatcggtgatgaagtcaaagggattatggaagaaatcatcgaggtcggtgaatcgctggaagtgcaggccgtgctcaatgatgagcgctatcaaagcttcaaactgtttaagagtgtctttggagtgggggtgaagacagcagacaaatggtaccgtatgggtctgcgcacgctcgaggatgttcgttccagcaagaccctgaagttgaccccgatgcagaaagcgggtctgtgctattatgaagatcttgctgatggcgttacgaaagccgaagctgacgcgatttctctgctggttcaggatgcagtctggactttcgacccggatgcgctggtggagattacgggtggatttcgtcgtgggaaaccttttggtcacgacgttgatctgcttatcacatctccgggagctgagaaagaacaagaagaccagctcctgcagaaagtgaccaatctgtggaagaaacaagggttgttgctgtacggtcgtctgcgtgaaagtcgctttgaagatgggaaactcccatcccgcaagatcgatgccctggaccattttgcgaaatgctttctgatcctcaaactttatcaccataaagtggacaaaagcaaatgggaaatgccgacgggttcgaacgaaagcgaggccaaaagttggaaagcaattcgcgtagatctggttcgttgtccctacgatcgttttgcgtttgcgttgttgggttggaccggaagccgcatgttcgaacgtgatctgcgccgctacgccatgcacgagaagaagatgatgctggacaatcatgcgctgtatgacctgaccaagaaaatctttctcaaagctaaatcggaagaggaaattttcgcacatctggggcttgaatacctggaaccgtccgaacgtaacgca

SEQ ID NO: 1118 - protein, 529 aa, synthetic construct
  REGION 1..529: note = Variant of terminal deoxynucleotidyltransferase
MHHHHHHGGSGSHGIRTIDSDFGKKRQKKMDNHDSSAIYEIKFHEFVLFILEEKMGATRRTFLTDLARKKGFRVENELSDSVTHIVAENNSRSEVLAWLKTHKMEKTKQFELLDISWLIESMKVGKPVDTKGKYQLMESGEMSANPDPTEGRENELPPTTKTISQYACQRRTTLNNHNQRFTDALEILAENYEFKRNDDTCLTFMRAISVLKCLPFEVVSLKDTEGLPWIGDEVKGIMEEIIEVGESLEVQAVLNDERYQSFKLFKSVFGVGVKTADKWYRMGLRTLEDVRSSKTLKLTPMQKAGLCYYEDLADGVTKAEADAISLLVQDAVWTFDPDALVEITGGFRRGKPFGHDVDLLITSPGAEKEQEDQLLQKVTNLWKKQGLLLYGRLRESRFEDGKLPSRKIDALDHFAKCFLILKLYHHKVDKSKWEMPTGSNESEAKSWKAIRVDLVRCPYDRFAFALLGWTGSRMFERDLRRYAMHEKKMMLDNHALYDLTKKIFLKAKSEEEIFAHLGLEYLEPSERNA

SEQ ID NO: 1119 - DNA, 1587 bp, synthetic construct
  misc_feature 1..1587: note = Variant of terminal deoxynucleotidyltransferase
  source 1..1587: mol_type = other DNA
atgcaccatcatcatcatcatggcggtagcggcagccacggcattcgtaccatcgattcggacttcgggaagaaacgccagaagaagatggataaccacgatagttccgccatctatgaaatcaaatttcacgagtttgtgctgttcattctcgaagagaaaatgggtgcgacgcgtcgtacttttctgacagatttagcccgcaagaaagggttccgcgtcgagaatgaactgtcagacagcgttacccacatcgtggcagaaaataattcacgctctgaagtattggcttggctgaagactcacaagatggagaagaccaagcaattcgaactgctggatattagctggcttatcgaaagcatgaaagttggtaaaccggtggacaccaaggggaaataccagttgatggaatcgggtgagatgagtgcgaacccagatccgacagagggtcgtgaaaacgagctgcctcctactacgaagaccatttctcagtatgcgtgtcaacgccgcaccaccctgaacaaccataatcaacgttttacggacgcactggaaattcttgcggaaaattacgagttcaaacgcaacgatgatacttgtctgacctttatgcgtgctatttccgtgctgaaatgccttccgtttgaggtagttagcctgaaagacacggaaggattgccctggatcggtgatgaagtcaaagggattatggaagaaatcatcgaggtcggtgaatcgctggaagtgcaggccgtgctcaatgatgagcgctatcaaagcttcaaactgtttaagagtgtctttggagtgggggtgaagacagcagacaaatggtaccgtatgggtctgcgcacgctcgaggatgttcgttccagcaagaccctgaagttgaccccgatgcagaaagcgggtctgtgctattatgaagatcttgctaagggcgttacgaaagccgaagctgacgcgatttctctgctggttcaggatgcagtctggactttcgacccggatgcgctggtggagattacgggtggatttcgtcgtgggaaaccttttggtcacgacgttgatctgcttatcacatctccgggagctgagaaagaacaagaagaccagctcctgcagaaagtgaccaatctgtggaagaaacaagggttgttgctgtacggtcgtctgcgtgaaagtcgctttgaagatgggaaactcccatcccgcaagatcgatgccctggaccattttgcgaaatgctttctgatcctcaaactttatcaccataaagtggacaaaagcaaatgggaaatgccgacgggttcgaacgaaagcgaggccaaaagttggaaagcaattcgcgtagatctggttcgttgtccctacgatcgttttgcgtttgcgttgttgggttggaccggaagccgcatgttcgaacgtgatctgcgccgctacgccacccacgagaagaagatgatgctggacaatcatgcgctgtatgacctgaccaagaaaatctttctcaaagctaaatcggaagaggaaattttcgcacatctggggcttgaatacctggaaccgtccgaacgtaacgca

SEQ ID NO: 1120 - protein, 529 aa, synthetic construct
  REGION 1..529: note = Variant of terminal deoxynucleotidyltransferase
MHHHHHHGGSGSHGIRTIDSDFGKKRQKKMDNHDSSAIYEIKFHEFVLFILEEKMGATRRTFLTDLARKKGFRVENELSDSVTHIVAENNSRSEVLAWLKTHKMEKTKQFELLDISWLIESMKVGKPVDTKGKYQLMESGEMSANPDPTEGRENELPPTTKTISQYACQRRTTLNNHNQRFTDALEILAENYEFKRNDDTCLTFMRAISVLKCLPFEVVSLKDTEGLPWIGDEVKGIMEEIIEVGESLEVQAVLNDERYQSFKLFKSVFGVGVKTADKWYRMGLRTLEDVRSSKTLKLTPMQKAGLCYYEDLAKGVTKAEADAISLLVQDAVWTFDPDALVEITGGFRRGKPFGHDVDLLITSPGAEKEQEDQLLQKVTNLWKKQGLLLYGRLRESRFEDGKLPSRKIDALDHFAKCFLILKLYHHKVDKSKWEMPTGSNESEAKSWKAIRVDLVRCPYDRFAFALLGWTGSRMFERDLRRYATHEKKMMLDNHALYDLTKKIFLKAKSEEEIFAHLGLEYLEPSERNA

SEQ ID NO: 1121 - DNA, 1587 bp, synthetic construct
  misc_feature 1..1587: note = Variant of terminal deoxynucleotidyltransferase
  source 1..1587: mol_type = other DNA
atgcaccatcatcatcatcatggcggtagcggcagccacggcattcgtaccatcgattcggacttcgggaagaaacgccagaagaagatggataaccacgatagttccgccatctatgaaatcaaatttcacgagtttgtgctgttcattctcgaagagaaaatgggtgcgacgcgtcgtacttttctgacagatttagcccgcaagaaagggttccgcgtcgagaatgaactgtcagacagcgttacccacatcgtggcagaaaataattcacgctctgaagtattggcttggctgaagactcacaagatggagaagaccaagcaattcgaactgctggatattagctggcttatcgaaagcatgaaagttggtaaaccggtggacaccaaggggaaataccagttgatggaatcgggtgagatgagtgcgaacccagatccgacagagggtcgtgaaaacgagctgcctcctactacgaagaccatttctcagtatgcgtgtcaacgccgcaccaccctgaacaaccataatcaacgttttacggacgcactggaaattcttgcggaaaattacgagttcaaacgcaacgatgatacttgtctgacctttatgcgtgctatttccgtgctgaaatgccttccgtttgaggtagttagcctgaaagacacggaaggattgccctggatcggtgatgaagtcaaagggattatggaagaaatcatcgaggtcggtgaatcgctggaagtgcaggccgtgctcaatgatgagcgctatcaaagcttcaaactgtttaagagtgtctttggagtgggggtgaagacagcagacaaatggtaccgtatgggtctgcgcacgctcgaggatgttcgttccagcaagaccctgaagttgaccccgatgcagaaagcgggtctgtgctattatgaagatcttgctgatggcgttacgaaagccgaaaaggacgcgatttctctgctggttcaggatgcagtctggactttcgacccggatgcgctggtggagattacgggtggatttcgtcgtgggaaaccttttggtcacgacgttgatctgcttatcacatctccgggagctgagaaagaacaagaagaccagctcctgcagaaagtgaccaatctgtggaagaaacaagggttgttgctgtacggtcgtctgcgtgaaagtcgctttgaagatgggaaactcccatcccgcaagatcgatgccctggaccattttgcgaaatgctttctgatcctcaaactttatcaccataaagtggacaaaagcaaatgggaaatgccgacgggttcgaacgaaagcgaggccaaaagttggaaagcaattcgcgtagatctggttcgttgtccctacgatcgttttgcgtttgcgttgttgggttggaccggaagccgcatgttcgaacgtgatctgcgccgctacgccacccacgagaagaagatgatgctggacaatcatgcgctgtatgacctgaccaagaaaatctttctcaaagctaaatcggaagaggaaattttcgcacatctggggcttgaatacctggaaccgtccgaacgtaacgca

SEQ ID NO: 1122 - protein, 529 aa, synthetic construct
  REGION 1..529: note = Variant of terminal deoxynucleotidyltransferase
MHHHHHHGGSGSHGIRTIDSDFGKKRQKKMDNHDSSAIYEIKFHEFVLFILEEKMGATRRTFLTDLARKKGFRVENELSDSVTHIVAENNSRSEVLAWLKTHKMEKTKQFELLDISWLIESMKVGKPVDTKGKYQLMESGEMSANPDPTEGRENELPPTTKTISQYACQRRTTLNNHNQRFTDALEILAENYEFKRNDDTCLTFMRAISVLKCLPFEVVSLKDTEGLPWIGDEVKGIMEEIIEVGESLEVQAVLNDERYQSFKLFKSVFGVGVKTADKWYRMGLRTLEDVRSSKTLKLTPMQKAGLCYYEDLADGVTKAEKDAISLLVQDAVWTFDPDALVEITGGFRRGKPFGHDVDLLITSPGAEKEQEDQLLQKVTNLWKKQGLLLYGRLRESRFEDGKLPSRKIDALDHFAKCFLILKLYHHKVDKSKWEMPTGSNESEAKSWKAIRVDLVRCPYDRFAFALLGWTGSRMFERDLRRYATHEKKMMLDNHALYDLTKKIFLKAKSEEEIFAHLGLEYLEPSERNA

SEQ ID NO: 1123 - DNA, 1587 bp, synthetic construct
  misc_feature 1..1587: note = Variant of terminal deoxynucleotidyltransferase
  source 1..1587: mol_type = other DNA
atgcaccatcatcatcatcatggcggtagcggcagccacggcattcgtaccatcgattcggacttcgggaagaaacgccagaagaagatggataaccacgatagttccgccatctatgaaatcaaatttcacgagtttgtgctgttcattctcgaagagaaaatgggtgcgacgcgtcgtacttttctgacagatttagcccgcaagaaagggttccgcgtcgagaatgaactgtcagacagcgttacccacatcgtggcagaaaataattcacgctctgaagtattggcttggctgaagactcacaagatggagaagaccaagcaattcgaactgctggatattagctggcttatcgaaagcatgaaagttggtaaaccggtggacaccaaggggaaataccagttgatggaatcgggtgagatgagtgcgaacccagatccgacagagggtcgtgaaaacgagctgcctcctactacgaagaccatttctcagtatgcgtgtcaacgccgcaccaccctgaacaaccataatcaacgttttacggacgcactggaaattcttgcggaaaattacgagttcaaacgcaacgatgatacttgtctgacctttatgcgtgctatttccgtgctgaaatgccttccgtttgaggtagttagcctgaaagacacggaaggattgccctggatcggtgatgaagtcaaagggattatggaagaaatcatcgaggtcggtgaatcgctggaagtgcaggccgtgctcaatgatgagcgctatcaaagcttcaaactgtttaagagtgtctttggagtgggggtgaagacagcagacaaatggtaccgtatgggtctgcgcacgctcgaggatgttcgttccagcaagaccctgaagttgaccccgatgcagaaagcgggtctgtgctattatgaagatcttgctctgggcgttacgaaagccgaagctgacgcgatttctctgctggttcaggatgcagtctggactttcgacccggatgcgctggtggagattacgggtggatttcgtcgtgggaaaccttttggtcacgacgttgatctgcttatcacatctccgggagctgagaaagaacaagaagaccagctcctgcagaaagtgaccaatctgtggaagaaacaagggttgttgctgtacggtcgtctgcgtgaaagtcgctttgaagatgggaaactcccatcccgcaagatcgatgccctggaccattttgcgaaatgctttctgatcctcaaactttatcaccataaagtggacaaaagcaaatgggaaatgccgacgggttcgaacgaaagcgaggccaaaagttggaaagcaattcgcgtagatctggttcgttgtccctacgatcgttttgcgtttgcgttgttgggttggaccggaagccgcatgttcgaacgtgatctgcgccgctacgccacccacgagaagaagatgatgctggacaatcatgcgctgtatgacctgaccaagaaaatctttctcaaagctaaatcggaagaggaaattttcgcacatctggggcttgaatacctggaaccgtccgaacgtaacgca

SEQ ID NO: 1124 - protein, 529 aa, synthetic construct
  REGION 1..529: note = Variant of terminal deoxynucleotidyltransferase
MHHHHHHGGSGSHGIRTIDSDFGKKRQKKMDNHDSSAIYEIKFHEFVLFILEEKMGATRRTFLTDLARKKGFRVENELSDSVTHIVAENNSRSEVLAWLKTHKMEKTKQFELLDISWLIESMKVGKPVDTKGKYQLMESGEMSANPDPTEGRENELPPTTKTISQYACQRRTTLNNHNQRFTDALEILAENYEFKRNDDTCLTFMRAISVLKCLPFEVVSLKDTEGLPWIGDEVKGIMEEIIEVGESLEVQAVLNDERYQSFKLFKSVFGVGVKTADKWYRMGLRTLEDVRSSKTLKLTPMQKAGLCYYEDLALGVTKAEADAISLLVQDAVWTFDPDALVEITGGFRRGKPFGHDVDLLITSPGAEKEQEDQLLQKVTNLWKKQGLLLYGRLRESRFEDGKLPSRKIDALDHFAKCFLILKLYHHKVDKSKWEMPTGSNESEAKSWKAIRVDLVRCPYDRFAFALLGWTGSRMFERDLRRYATHEKKMMLDNHALYDLTKKIFLKAKSEEEIFAHLGLEYLEPSERNA

SEQ ID NO: 1125 - DNA, 1587 bp, synthetic construct
  misc_feature 1..1587: note = Variant of terminal deoxynucleotidyltransferase
  source 1..1587: mol_type = other DNA
atgcaccatcatcatcatcatggcggtagcggcagccacggcattcgtaccatcgattcggacttcgggaagaaacgccagaagaagatggataaccacgatagttccgccatctatgaaatcaaatttcacgagtttgtgctgttcattctcgaagagaaaatgggtgcgacgcgtcgtacttttctgacagatttagcccgcaagaaagggttccgcgtcgagaatgaactgtcagacagcgttacccacatcgtggcagaaaataattcacgctctgaagtattggcttggctgaagactcacaagatggagaagaccaagcaattcgaactgctggatattagctggcttatcgaaagcatgaaagttggtaaaccggtggacaccaaggggaaataccagttgatggaatcgggtgagatgagtgcgaacccagatccgacagagggtcgtgaaaacgagctgcctcctactacgaagaccatttctcagtatgcgtgtcaacgccgcaccaccctgaacaaccataatcaacgttttacggacgcactggaaattcttgcggaaaattacgagttcaaacgcaacgatgatacttgtctgagttttatgcgtgctatttccgtgctgaaatgccttccgtttgaggtagttagcctgaaagacacggaaggattgccctggatcggtgatgaagtcaaagggattatggaagaaatcatcgaggtcggtgaatcgctggaagtgcaggccgtgctcaatgatgagcgctatcaaagcttcaaactgtttaagagtgtctttggagtgggggtgaagacagcagacaaatggtaccgtatgggtctgcgcacgctcgaggatgttcgttccagcaagaccctgaagttgaccccgatgcagaaagcgggtctgtgctattatgaagatcttgctgatggcgttacgaaagccgaagctgacgcgatttctctgctggttcaggatgcagtctggactttcgacccggatgcgctggtggagattacgggtggatttcgtcgtgggaaaccttttggtcacgacgttgatctgcttatcacatctccgggagctgagaaagaacaagaagaccagctcctgcagaaagtgaccaatctgtggaagaaacaagggttgttgctgtacggtcgtctgcgtgaaagtcgctttgaagatgggaaactcccatcccgcaagatcgatgccctggaccattttgcgaaatgctttctgatcctcaaactttatcaccataaagtggacaaaagcaaatgggaaatgccgacgggttcgaacgaaagcgaggccaaaagttggaaagcaattcgcgtagatctggttcgttgtccctacgatcgttttgcgtttgcgttgttgggttggaccggaagccgcatgttcgaacgtgatctgcgccgctacgccacccacgagaagaagatgatgctggacaatcatgcgctgtatgacctgaccaagaaaatctttctcaaagctaaatcggaagaggaaattttcgcacatctggggcttgaatacctggaaccgtccgaacgtaacgca

SEQ ID NO: 1126 - protein, 529 aa, synthetic construct
  REGION 1..529: note = Variant of terminal deoxynucleotidyltransferase
MHHHHHHGGSGSHGIRTIDSDFGKKRQKKMDNHDSSAIYEIKFHEFVLFILEEKMGATRRTFLTDLARKKGFRVENELSDSVTHIVAENNSRSEVLAWLKTHKMEKTKQFELLDISWLIESMKVGKPVDTKGKYQLMESGEMSANPDPTEGRENELPPTTKTISQYACQRRTTLNNHNQRFTDALEILAENYEFKRNDDTCLSFMRAISVLKCLPFEVVSLKDTEGLPWIGDEVKGIMEEIIEVGESLEVQAVLNDERYQSFKLFKSVFGVGVKTADKWYRMGLRTLEDVRSSKTLKLTPMQKAGLCYYEDLADGVTKAEADAISLLVQDAVWTFDPDALVEITGGFRRGKPFGHDVDLLITSPGAEKEQEDQLLQKVTNLWKKQGLLLYGRLRESRFEDGKLPSRKIDALDHFAKCFLILKLYHHKVDKSKWEMPTGSNESEAKSWKAIRVDLVRCPYDRFAFALLGWTGSRMFERDLRRYATHEKKMMLDNHALYDLTKKIFLKAKSEEEIFAHLGLEYLEPSERNA

SEQ ID NO: 1127 - DNA, 1587 bp, synthetic construct
  misc_feature 1..1587: note = Variant of terminal deoxynucleotidyltransferase
  source 1..1587: mol_type = other DNA
atgcaccatcatcatcatcatggcggtagcggcagccacggcattcgtaccatcgattcggacttcgggaagaaacgccagaagaagatggataaccacgatagttccgccatctatgaaatcaaatttcacgagtttgtgctgttcattctcgaagagaaaatgggtgcgacgcgtcgtacttttctgacagatttagcccgcaagaaagggttccgcgtcgagaatgaactgtcagacagcgttacccacatcgtggcagaaaataattcacgctctgaagtattggcttggctgaagactcacaagatggagaagaccaagcaattcgaactgctggatattagctggcttatcgaaagcatgaaagttggtaaaccggtggacaccaaggggaaataccagttgatggaatcgggtgagatgagtgcgaacccagatccgacagagggtcgtgaaaacgagctgcctcctactacgaagaccatttctcagtatgcgtgtcaacgccgcaccaccctgaacaaccataatcaacgttttacggacgcactggaaattcttgcggaaaattacgagttcaaacgcaacgatgatacttgtctgacctttatgcgtgctgtgtccgtgctgaaatgccttccgtttgaggtagttagcctgaaagacacggaaggattgccctggatcggtgatgaagtcaaagggattatggaagaaatcatcgaggtcggtgaatcgctggaagtgcaggccgtgctcaatgatgagcgctatcaaagcttcaaactgtttaagagtgtctttggagtgggggtgaagacagcagacaaatggtaccgtatgggtctgcgcacgctcgaggatgttcgttccagcaagaccctgaagttgaccccgatgcagaaagcgggtctgtgctattatgaagatcttgctgatggcgttacgaaagccgaagctgacgcgatttctctgctggttcaggatgcagtctggactttcgacccggatgcgctggtggagattacgggtggatttcgtcgtgggaaaccttttggtcacgacgttgatctgcttatcacatctccgggagctgagaaagaacaagaagaccagctcctgcagaaagtgaccaatctgtggaagaaacaagggttgttgctgtacggtcgtctgcgtgaaagtcgctttgaagatgggaaactcccatcccgcaagatcgatgccctggaccattttgcgaaatgctttctgatcctcaaactttatcaccataaagtggacaaaagcaaatgggaaatgccgacgggttcgaacgaaagcgaggccaaaagttggaaagcaattcgcgtagatctggttcgttgtccctacgatcgttttgcgtttgcgttgttgggttggaccggaagccgcatgttcgaacgtgatctgcgccgctacgccacccacgagaagaagatgatgctggacaatcatgcgctgtatgacctgaccaagaaaatctttctcaaagctaaatcggaagaggaaattttcgcacatctggggcttgaatacctggaaccgtccgaacgtaacgca

SEQ ID NO: 1128 - protein, 529 aa, synthetic construct
  REGION 1..529: note = Variant of terminal deoxynucleotidyltransferase
MHHHHHHGGSGSHGIRTIDSDFGKKRQKKMDNHDSSAIYEIKFHEFVLFILEEKMGATRRTFLTDLARKKGFRVENELSDSVTHIVAENNSRSEVLAWLKTHKMEKTKQFELLDISWLIESMKVGKPVDTKGKYQLMESGEMSANPDPTEGRENELPPTTKTISQYACQRRTTLNNHNQRFTDALEILAENYEFKRNDDTCLTFMRAVSVLKCLPFEVVSLKDTEGLPWIGDEVKGIMEEIIEVGESLEVQAVLNDERYQSFKLFKSVFGVGVKTADKWYRMGLRTLEDVRSSKTLKLTPMQKAGLCYYEDLADGVTKAEADAISLLVQDAVWTFDPDALVEITGGFRRGKPFGHDVDLLITSPGAEKEQEDQLLQKVTNLWKKQGLLLYGRLRESRFEDGKLPSRKIDALDHFAKCFLILKLYHHKVDKSKWEMPTGSNESEAKSWKAIRVDLVRCPYDRFAFALLGWTGSRMFERDLRRYATHEKKMMLDNHALYDLTKKIFLKAKSEEEIFAHLGLEYLEPSERNA

SEQ ID NO: 1129 - DNA, 1587 bp, synthetic construct
  misc_feature 1..1587: note = Variant of terminal deoxynucleotidyltransferase
  source 1..1587: mol_type = other DNA
atgcaccatcatcatcatcatggcggtagcggcagccacggcattcgtaccatcgattcggacttcgggaagaaacgccagaagaagatggataaccacgatagttccgccatctatgaaatcaaatttcacgagtttgtgctgttcattctcgaagagaaaatgggtgcgacgcgtcgtacttttctgacagatttagcccgcaagaaagggttccgcgtcgagaatgaactgtcagacagcgttacccacatcgtggcagaaaataattcacgctctgaagtattggcttggctgaagactcacaagatggagaagaccaagcaattcgaactgctggatattagctggcttatcgaaagcatgaaagttggtaaaccggtggacaccaaggggaaataccagttgatggaatcgggtgagatgagtgcgaacccagatccgacagagggtcgtgaaaacgagctgcctcctactacgaagaccatttctcagtatgcgtgtcaacgccgcaccaccctgaacaaccataatcaacgttttacggacgcactggaaattcttgcggaaaattacgagttcaaacgcaacgatatgacttgtctgacctttatgcgtgctatttccgtgctgaaatgccttccgtttgaggtagttagcctgaaagacacggaaggattgccctggatcggtgatgaagtcaaagggattatggaagaaatcatcgaggtcggtgaatcgctggaagtgcaggccgtgctcaatgatgagcgctatcaaagcttcaaactgtttaagagtgtctttggagtgggggtgaagacagcagacaaatggtaccgtatgggtctgcgcacgctcgaggatgttcgttccagcaagaccctgaagttgaccccgatgcagaaagcgggtctgtgctattatgaagatcttgctgatggcgttacgaaagccgaagctgacgcgatttctctgctggttcaggatgcagtctggactttcgacccggatgcgctggtggagattacgggtggatttcgtcgtgggaaaccttttggtcacgacgttgatctgcttatcacatctccgggagctgagaaagaacaagaagaccagctcctgcagaaagtgaccaatctgtggaagaaacaagggttgttgctgtacggtcgtctgcgtgaaagtcgctttgaagatgggaaactcccatcccgcaagatcgatgccctggaccattttgcgaaatgctttctgatcctcaaactttatcaccataaagtggacaaaagcaaatgggaaatgccgacgggttcgaacgaaagcgaggccaaaagttggaaagcaattcgcgtagatctggttcgttgtccctacgatcgttttgcgtttgcgttgttgggttggaccggaagccgcatgttcgaacgtgatctgcgccgctacgccacccacgagaagaagatgatgctggacaatcatgcgctgtatgacctgaccaagaaaatctttctcaaagctaaatcggaagaggaaattttcgcacatctggggcttgaatacctggaaccgtccgaacgtaacgca

SEQ ID NO: 1130 - protein, 529 aa, synthetic construct
  REGION 1..529: note = Variant of terminal deoxynucleotidyltransferase
MHHHHHHGGSGSHGIRTIDSDFGKKRQKKMDNHDSSAIYEIKFHEFVLFILEEKMGATRRTFLTDLARKKGFRVENELSDSVTHIVAENNSRSEVLAWLKTHKMEKTKQFELLDISWLIESMKVGKPVDTKGKYQLMESGEMSANPDPTEGRENELPPTTKTISQYACQRRTTLNNHNQRFTDALEILAENYEFKRNDMTCLTFMRAISVLKCLPFEVVSLKDTEGLPWIGDEVKGIMEEIIEVGESLEVQAVLNDERYQSFKLFKSVFGVGVKTADKWYRMGLRTLEDVRSSKTLKLTPMQKAGLCYYEDLADGVTKAEADAISLLVQDAVWTFDPDALVEITGGFRRGKPFGHDVDLLITSPGAEKEQEDQLLQKVTNLWKKQGLLLYGRLRESRFEDGKLPSRKIDALDHFAKCFLILKLYHHKVDKSKWEMPTGSNESEAKSWKAIRVDLVRCPYDRFAFALLGWTGSRMFERDLRRYATHEKKMMLDNHALYDLTKKIFLKAKSEEEIFAHLGLEYLEPSERNA

SEQ ID NO: 1131 - DNA, 1587 bp, synthetic construct
  misc_feature 1..1587: note = Variant of terminal deoxynucleotidyltransferase
  source 1..1587: mol_type = other DNA
atgcaccatcatcatcatcatggcggtagcggcagccacggcattcgtaccatcgattcggacttcgggaagaaacgccagaagaagatggataaccacgatagttccgccatctatgaaatcaaatttcacgagtttgtgctgttcattctcgaagagaaaatgggtgcgacgcgtcgtacttttctgacagatttagcccgcaagaaagggttccgcgtcgagaatgaactgtcagacagcgttacccacatcgtggcagaaaataattcacgctctgaagtattggcttggctgaagactcacaagatggagaagaccaagcaattcgaactgctggatattagctggcttatcgaaagcatgaaagttggtaaaccggtggacaccaaggggaaataccagttgatggaatcgggtgagatgagtgcgaacccagatccgacagagggtcgtgaaaacgagctgcctcctactacgaagaccatttctcagtatgcgtgtcaacgccgcaccaccctgaacaaccataatcaacgttttacggacgcactggaaattcttgcggaaaattacgagttcaaacgcaacgatgatacttgtctgacctttatgcgtgctatttccgtgctgaaatgccttccgtttgaggtagttagcctgaaagacacggaaggattgccctggatcggtgatgaagtcaaagggattatggaagaaatcatcgaggtcggtgaatcgctggaagtgcaggccgtgctcaatgatgagcgctatcaaagcttcaaactgtttaagagtgtctttggagtgggggtgaagacagcagacaaatggtaccgtatgggtctgcgcacgctcgaggatgttcgttccagcaagaccctgaagttgaccccgatgcagaaagcgggtctgtgctattatgaagatcttgctgatggcgttacgaaagccgaagctgacgcgatttctctgctggttcaggatgcagtctggactttcgacccggatgcgctggtggagattacgggtggatttcgtcgtgggaaaccttttggtcacgacgttgatctgcttatcacatctccgggagctgagaaagaacaagaagaccagctcctgcagaaagtgaccaatctgtggaagaaacaagggttgttgctgtacggtcgtctgcgtgaaagtcgctttgaagatgggaaactcccatcccgcaagatcgatgccctggaccattttgcgaaatgctttctgatcctcaaactttatcaccataaagtggacaaaagcaaatgggaaatgccgacgggttcgaacgaaagcgaggccaaaagttggaaagcaattcgcgtagatctggttcgttgtccctacgatcgtagggcgtttgcgttgttgggttggaccggaagccgcatgttcgaacgtgatctgcgccgctacgccacccacgagaagaagatgatgctggacaatcatgcgctgtatgacctgaccaagaaaatctttctcaaagctaaatcggaagaggaaattttcgcacatctggggcttgaatacctggaaccgtccgaacgtaacgca

SEQ ID NO: 1132 - protein, 529 aa, synthetic construct
  REGION 1..529: note = Variant of terminal deoxynucleotidyltransferase
MHHHHHHGGSGSHGIRTIDSDFGKKRQKKMDNHDSSAIYEIKFHEFVLFILEEKMGATRRTFLTDLARKKGFRVENELSDSVTHIVAENNSRSEVLAWLKTHKMEKTKQFELLDISWLIESMKVGKPVDTKGKYQLMESGEMSANPDPTEGRENELPPTTKTISQYACQRRTTLNNHNQRFTDALEILAENYEFKRNDDTCLTFMRAISVLKCLPFEVVSLKDTEGLPWIGDEVKGIMEEIIEVGESLEVQAVLNDERYQSFKLFKSVFGVGVKTADKWYRMGLRTLEDVRSSKTLKLTPMQKAGLCYYEDLADGVTKAEADAISLLVQDAVWTFDPDALVEITGGFRRGKPFGHDVDLLITSPGAEKEQEDQLLQKVTNLWKKQGLLLYGRLRESRFEDGKLPSRKIDALDHFAKCFLILKLYHHKVDKSKWEMPTGSNESEAKSWKAIRVDLVRCPYDRRAFALLGWTGSRMFERDLRRYATHEKKMMLDNHALYDLTKKIFLKAKSEEEIFAHLGLEYLEPSERNA

SEQ ID NO: 1133 - DNA, 1587 bp, synthetic construct
  misc_feature 1..1587: note = Variant of terminal deoxynucleotidyltransferase
  source 1..1587: mol_type = other DNA
atgcaccatcatcatcatcatggcggtagcggcagccacggcattcgtaccatcgattcggacttcgggaagaaacgccagaagaagatggataaccacgatagttccgccatctatgaaatcaaatttcacgagtttgtgctgttcattctcgaagagaaaatgggtgcgacgcgtcgtacttttctgacagatttagcccgcaagaaagggttccgcgtcgagaatgaactgtcagacagcgttacccacatcgtggcagaaaataattcacgctctgaagtattggcttggctgaagactcacaagatggagaagaccaagcaattcgaactgctggatattagctggcttatcgaaagcatgaaagttggtaaaccggtggacaccaaggggaaataccagttgatggaatcgggtgagatgagtgcgaacccagatccgacagagggtcgtgaaaacgagctgcctcctactacgaagaccatttctcagtatgcgtgtcaacgccgcaccaccctgaacaaccataatcaacgttttacggacgcactggaaattcttgcggaaaattacgagttcaaacgcaacgatgatacttgtctgacctttatgcgtgctatttccgtgctgaaatgccttccgtttgaggtagttagcctgaaagacacggaaggattgccctggatcggtgatgaagtcaaagggattatggaagaaatcatcgaggtcggtgaatcgctggaagtgcaggccgtgctcaatgatgagcgctatcaaagcttcaaactgtttaagagtgtctttggagtgggggtgaagacagcagacaaatggtaccgtatgggtctgcgcacgctcgaggatgttcgttccagcaagaccctgaagttgaccccgatgcagaaagcgggtctgtgctattatgaagatcttgctgatggcgttacgaaagccgaagctgacgcgatttctctgctggttcaggatgcagtctggactttcgacccggatgcgctggtggagattacgggtggatttcgtcgtgggaaaccttttggtcacgacgttgatctgcttatcacatctccgggagctgagaaagaacaagaagaccagctcctgcagaaagtgaccaatctgtggaagaaacaagggttgttgctgtacggtcgtctgcgtgaaagtcgctttgaagatgggaaactcccatcccgcaaggctgatgccctggaccattttgcgaaatgctttctgatcctcaaactttatcaccataaagtggacaaaagcaaatgggaaatgccgacgggttcgaacgaaagcgaggccaaaagttggaaagcaattcgcgtagatctggttcgttgtccctacgatcgttttgcgtttgcgttgttgggttggaccggaagccgcatgttcgaacgtgatctgcgccgctacgccacccacgagaagaagatgatgctggacaatcatgcgctgtatgacctgaccaagaaaatctttctcaaagctaaatcggaagaggaaattttcgcacatctggggcttgaatacctggaaccgtccgaacgtaacgca

SEQ ID NO: 1134 - protein, 529 aa, synthetic construct
  REGION 1..529: note = Variant of terminal deoxynucleotidyltransferase
MHHHHHHGGSGSHGIRTIDSDFGKKRQKKMDNHDSSAIYEIKFHEFVLFILEEKMGATRRTFLTDLARKKGFRVENELSDSVTHIVAENNSRSEVLAWLKTHKMEKTKQFELLDISWLIESMKVGKPVDTKGKYQLMESGEMSANPDPTEGRENELPPTTKTISQYACQRRTTLNNHNQRFTDALEILAENYEFKRNDDTCLTFMRAISVLKCLPFEVVSLKDTEGLPWIGDEVKGIMEEIIEVGESLEVQAVLNDERYQSFKLFKSVFGVGVKTADKWYRMGLRTLEDVRSSKTLKLTPMQKAGLCYYEDLADGVTKAEADAISLLVQDAVWTFDPDALVEITGGFRRGKPFGHDVDLLITSPGAEKEQEDQLLQKVTNLWKKQGLLLYGRLRESRFEDGKLPSRKADALDHFAKCFLILKLYHHKVDKSKWEMPTGSNESEAKSWKAIRVDLVRCPYDRFAFALLGWTGSRMFERDLRRYATHEKKMMLDNHALYDLTKKIFLKAKSEEEIFAHLGLEYLEPSERNA

SEQ ID NO: 1135 - DNA, 1587 bp, synthetic construct
  misc_feature 1..1587: note = Variant of terminal deoxynucleotidyltransferase
  source 1..1587: mol_type = other DNA
atgcaccatcatcatcatcatggcggtagcggcagccacggcattcgtaccatcgattcggacttcgggaagaaacgccagaagaagatggataaccacgatagttccgccatctatgaaatcaaatttcacgagtttgtgctgttcattctcgaagagaaaatgggtgcgacgcgtcgtacttttctgacagatttagcccgcaagaaagggttccgcgtcgagaatgaactgtcagacagcgttacccacatcgtggcagaaaataattcacgctctgaagtattggcttggctgaagactcacaagatggagaagaccaagcaattcgaactgctggatattagctggcttatcgaaagcatgaaagttggtaaaccggtggacaccaaggggaaataccagttgatggaatcgggtgagatgagtgcgaacccagatccgacagagggtcgtgaaaacgagctgcctcctactacgaagaccatttctcagtatgcgtgtcaacgccgcaccaccctgaacaaccataatcaacgttttacggacgcactggaaattcttgcggaaaattacgagttcaaacgcaacgatgatacttgtctgacctttatgcgtgctatttccgtgctgaaatgccttccgtttgaggtagttagcctgaaagacacggaaggattgccctggatcggtgatgaagtcaaagggattatggaagaaatcatcgaggtcggtgaatcgctggaagtgcaggccgtgctcaatgatgagcgctatcaaagcttcaaactgtttaagagtgtctttggagtgggggtgaagacagcagacaaatggtaccgtatgggtctgcgcacgctcgaggatgttcgttccagcaagaccctgaagttgaccccgatgcagaaagcgggtctgtgctattatgaagatcttgctgatggcgttacgaaagccgaagctgacgcgatttctctgctggttcaggatgcagtctggactttcgacccggatgcgctggtggagattacgggtggatttcgtcgtgggaaaccttttggtcacgacgttgatctgcttatcacatctccgggagctgagaaagaacaagaagaccagctcctgcagaaagtgaccaatctgtggaagaaacaagggttgttgctgtacggtcgtctgcgtgaaagtcgctttgaagatgggaaactcccatcccgcaagatcgatgccctggaccattttgcgaaatgctttctgatcctcaaactttatcaccataaagtggacaaaagcaaatgggaaatgccgacgggttcgaacgaaagcgaggccaaaagttggaaagcaattcgcgtagatctggttcgtgtgccctacgatcgttttgcgtttgcgttgttgggttggaccggaagccgcatgttcgaacgtgatctgcgccgctacgccacccacgagaagaagatgatgctggacaatcatgcgctgtatgacctgaccaagaaaatctttctcaaagctaaatcggaagaggaaattttcgcacatctggggcttgaatacctggaaccgtccgaacgtaacgca

SEQ ID NO: 1136 - protein, 529 aa, synthetic construct
  REGION 1..529: note = Variant of terminal deoxynucleotidyltransferase
MHHHHHHGGSGSHGIRTIDSDFGKKRQKKMDNHDSSAIYEIKFHEFVLFILEEKMGATRRTFLTDLARKKGFRVENELSDSVTHIVAENNSRSEVLAWLKTHKMEKTKQFELLDISWLIESMKVGKPVDTKGKYQLMESGEMSANPDPTEGRENELPPTTKTISQYACQRRTTLNNHNQRFTDALEILAENYEFKRNDDTCLTFMRAISVLKCLPFEVVSLKDTEGLPWIGDEVKGIMEEIIEVGESLEVQAVLNDERYQSFKLFKSVFGVGVKTADKWYRMGLRTLEDVRSSKTLKLTPMQKAGLCYYEDLADGVTKAEADAISLLVQDAVWTFDPDALVEITGGFRRGKPFGHDVDLLITSPGAEKEQEDQLLQKVTNLWKKQGLLLYGRLRESRFEDGKLPSRKIDALDHFAKCFLILKLYHHKVDKSKWEMPTGSNESEAKSWKAIRVDLVRVPYDRFAFALLGWTGSRMFERDLRRYATHEKKMMLDNHALYDLTKKIFLKAKSEEEIFAHLGLEYLEPSERNA

SEQ ID NO: 1137 - DNA, 1587 bp, synthetic construct
  misc_feature 1..1587: note = Variant of terminal deoxynucleotidyltransferase
  source 1..1587: mol_type = other DNA
atgcaccatcatcatcatcatggcggtagcggcagccacggcattcgtaccatcgattcggacttcgggaagaaacgccagaagaagatggataaccacgatagttccgccatctatgaaatcaaatttcacgagtttgtgctgttcattctcgaagagaaaatgggtgcgacgcgtcgtacttttctgacagatttagcccgcaagaaagggttccgcgtcgagaatgaactgtcagacagcgttacccacatcgtggcagaaaataattcacgctctgaagtattggcttggctgaagactcacaagatggagaagaccaagcaattcgaactgctggatattagctggcttatcgaaagcatgaaagttggtaaaccggtggacaccaaggggaaataccagttgatggaatcgggtgagatgagtgcgaacccagatccgacagagggtcgtgaaaacgagctgcctcctactacgaagaccatttctcagtatgcgtgtcaacgccgcaccaccctgaacaaccataatcaacgttttacggacgcactggaaattcttgcggaaaattacgagttcaaacgcaacgatgatacttgtctgaggtttatgcgtgctatttccgtgctgaaatgccttccgtttgaggtagttagcctgaaagacacggaaggattgccctggatcggtgatgaagtcaaagggattatggaagaaatcatcgaggtcggtgaatcgctggaagtgcaggccgtgctcaatgatgagcgctatcaaagcttcaaactgtttaagagtgtctttggagtgggggtgaagacagcagacaaatggtaccgtatgggtctgcgcacgctcgaggatgttcgttccagcaagaccctgaagttgaccccgatgcagaaagcgggtctgtgctattatgaagatcttgctgatggcgttacgaaagccgaagctgacgcgatttctctgctggttcaggatgcagtctggactttcgacccggatgcgctggtggagattacgggtggatttcgtcgtgggaaaccttttggtcacgacgttgatctgcttatcacatctccgggagctgagaaagaacaagaagaccagctcctgcagaaagtgaccaatctgtggaagaaacaagggttgttgctgtacggtcgtctgcgtgaaagtcgctttgaagatgggaaactcccatcccgcaagatcgatgccctggaccattttgcgaaatgctttctgatcctcaaactttatcaccataaagtggacaaaagcaaatgggaaatgccgacgggttcgaacgaaagcgaggccaaaagttggaaagcaattcgcgtagatctggttcgttgtccctacgatcgttttgcgtttgcgttgttgggttggaccggaagccgcatgttcgaacgtgatctgcgccgctacgccacccacgagaagaagatgatgctggacaatcatgcgctgtatgacctgaccaagaaaatctttctcaaagctaaatcggaagaggaaattttcgcacatctggggcttgaatacctggaaccgtccgaacgtaacgca

SEQ ID NO: 1138 - protein, 529 aa, synthetic construct
  REGION 1..529: note = Variant of terminal deoxynucleotidyltransferase
MHHHHHHGGSGSHGIRTIDSDFGKKRQKKMDNHDSSAIYEIKFHEFVLFILEEKMGATRRTFLTDLARKKGFRVENELSDSVTHIVAENNSRSEVLAWLKTHKMEKTKQFELLDISWLIESMKVGKPVDTKGKYQLMESGEMSANPDPTEGRENELPPTTKTISQYACQRRTTLNNHNQRFTDALEILAENYEFKRNDDTCLRFMRAISVLKCLPFEVVSLKDTEGLPWIGDEVKGIMEEIIEVGESLEVQAVLNDERYQSFKLFKSVFGVGVKTADKWYRMGLRTLEDVRSSKTLKLTPMQKAGLCYYEDLADGVTKAEADAISLLVQDAVWTFDPDALVEITGGFRRGKPFGHDVDLLITSPGAEKEQEDQLLQKVTNLWKKQGLLLYGRLRESRFEDGKLPSRKIDALDHFAKCFLILKLYHHKVDKSKWEMPTGSNESEAKSWKAIRVDLVRCPYDRFAFALLGWTGSRMFERDLRRYATHEKKMMLDNHALYDLTKKIFLKAKSEEEIFAHLGLEYLEPSERNA

SEQ ID NO: 1139 - DNA, 1587 bp, synthetic construct
  misc_feature 1..1587: note = Variant of terminal deoxynucleotidyltransferase
  source 1..1587: mol_type = other DNA
atgcaccatcatcatcatcatggcggtagcggcagccacggcattcgtaccatcgattcggacttcgggaagaaacgccagaagaagatggataaccacgatagttccgccatctatgaaatcaaatttcacgagtttgtgctgttcattctcgaagagaaaatgggtgcgacgcgtcgtacttttctgacagatttagcccgcaagaaagggttccgcgtcgagaatgaactgtcagacagcgttacccacatcgtggcagaaaataattcacgctctgaagtattggcttggctgaagactcacaagatggagaagaccaagcaattcgaactgctggatattagctggcttatcgaaagcatgaaagttggtaaaccggtggacaccaaggggaaataccagttgatggaatcgggtgagatgagtgcgaacccagatccgacagagggtcgtgaaaacgagctgcctcctactacgaagaccatttctcagtatgcgtgtcaacgccgcaccaccctgaacaaccataatcaacgttttacggacgcactggaaattcttgcggaaaattacgagttcaaacgcaacgatgatacttgtctgctttttatgcgtgctatttccgtgctgaaatgccttccgtttgaggtagttagcctgaaagacacggaaggattgccctggatcggtgatgaagtcaaagggattatggaagaaatcatcgaggtcggtgaatcgctggaagtgcaggccgtgctcaatgatgagcgctatcaaagcttcaaactgtttaagagtgtctttggagtgggggtgaagacagcagacaaatggtaccgtatgggtctgcgcacgctcgaggatgttcgttccagcaagaccctgaagttgaccccgatgcagaaagcgggtctgtgctattatgaagatcttgctgatggcgttacgaaagccgaagctgacgcgatttctctgctggttcaggatgcagtctggactttcgacccggatgcgctggtggagattacgggtggatttcgtcgtgggaaaccttttggtcacgacgttgatctgcttatcacatctccgggagctgagaaagaacaagaagaccagctcctgcagaaagtgaccaatctgtggaagaaacaagggttgttgctgtacggtcgtctgcgtgaaagtcgctttgaagatgggaaactcccatcccgcaagatcgatgccctggaccattttgcgaaatgctttctgatcctcaaactttatcaccataaagtggacaaaagcaaatgggaaatgccgacgggttcgaacgaaagcgaggccaaaagttggaaagcaattcgcgtagatctggttcgttgtccctacgatcgttttgcgtttgcgttgttgggttggaccggaagccgcatgttcgaacgtgatctgcgccgctacgccacccacgagaagaagatgatgctggacaatcatgcgctgtatgacctgaccaagaaaatctttctcaaagctaaatcggaagaggaaattttcgcacatctggggcttgaatacctggaaccgtccgaacgtaacgca

SEQ ID NO: 1140 - protein, 529 aa, synthetic construct
  REGION 1..529: note = Variant of terminal deoxynucleotidyltransferase
MHHHHHHGGSGSHGIRTIDSDFGKKRQKKMDNHDSSAIYEIKFHEFVLFILEEKMGATRRTFLTDLARKKGFRVENELSDSVTHIVAENNSRSEVLAWLKTHKMEKTKQFELLDISWLIESMKVGKPVDTKGKYQLMESGEMSANPDPTEGRENELPPTTKTISQYACQRRTTLNNHNQRFTDALEILAENYEFKRNDDTCLLFMRAISVLKCLPFEVVSLKDTEGLPWIGDEVKGIMEEIIEVGESLEVQAVLNDERYQSFKLFKSVFGVGVKTADKWYRMGLRTLEDVRSSKTLKLTPMQKAGLCYYEDLADGVTKAEADAISLLVQDAVWTFDPDALVEITGGFRRGKPFGHDVDLLITSPGAEKEQEDQLLQKVTNLWKKQGLLLYGRLRESRFEDGKLPSRKIDALDHFAKCFLILKLYHHKVDKSKWEMPTGSNESEAKSWKAIRVDLVRCPYDRFAFALLGWTGSRMFERDLRRYATHEKKMMLDNHALYDLTKKIFLKAKSEEEIFAHLGLEYLEPSERNA

SEQ ID NO: 1141 - DNA, 1587 bp, synthetic construct
  misc_feature 1..1587: note = Variant of terminal deoxynucleotidyltransferase
  source 1..1587: mol_type = other DNA
atgcaccatcatcatcatcatggcggtagcggcagccacggcattcgtaccatcgattcggacttcgggaagaaacgccagaagaagatggataaccacgatagttccgccatctatgaaatcaaatttcacgagtttgtgctgttcattctcgaagagaaaatgggtgcgacgcgtcgtacttttctgacagatttagcccgcaagaaagggttccgcgtcgagaatgaactgtcagacagcgttacccacatcgtggcagaaaataattcacgctctgaagtattggcttggctgaagactcacaagatggagaagaccaagcaattcgaactgctggatattagctggcttatcgaaagcatgaaagttggtaaaccggtggacaccaaggggaaataccagttgatggaatcgggtgagatgagtgcgaacccagatccgacagagggtcgtgaaaacgagctgcctcctactacgaagaccatttctcagtatgcgtgtcaacgccgcaccaccctgaacaaccataatcaacgttttacggacgcactggaaattcttgcggaaaattacgagttcaaacgcaacgatgatacttgtctgacctttatgcgtgctatttccgtgctgaaatgccttccgtttgaggtagttagcctgaaagacacggaaggattgccctggatcggtgatgaagtcaaagggattatggaagaaatcatcgaggtcggtgaatcgctggaagtgcaggccgtgctcaatgatgagcgctatcaaagcttcaaactgtttaagagtgtctttggagtgggggtgaagacagcagacaaatggtaccgtatgggtctgcgcacgctcgaggatgttcgttccagcaagaccctgaagttgaccccgatgcagaaagcgggtctgtgctattatgaagatcttgctgatggcgttacgaaagccgaagctgacgcgatttctctgctggttcaggatgcagtctggactttcgacccggatgcgctggtggagattacgggtggatttcgtcgtgggaaaccttttggtcacgacgttgatctgcttatcacatctccgggagctgagaaagaacaagaagaccagctcctgcagaaagtgaccaatctgtggaagaaacaagggttgttgctgtacggtcgtctgcgtgaaagtcgctttgaagatgggaaactcccatcccgcaagatcgatgccctggaccattttgcgaaatgctttctgatcctcaaactttatcaccataaagtggacaaaagcaaatgggaaatgccgacgggttcgaacgaaagcgaggccaaaagttggaaagcaattcgcgtagatctggttcgttgtccctacgatcgttttgcgtttgcgttgttgggttggaccggaagccgcatgttcgaaactgatctgcgccgctacgccacccacgagaagaagatgatgctggacaatcatgcgctgtatgacctgaccaagaaaatctttctcaaagctaaatcggaagaggaaattttcgcacatctggggcttgaatacctggaaccgtccgaacgtaacgca

SEQ ID NO: 1142 - protein, 529 aa, synthetic construct
  REGION 1..529: note = Variant of terminal deoxynucleotidyltransferase
MHHHHHHGGSGSHGIRTIDSDFGKKRQKKMDNHDSSAIYEIKFHEFVLFILEEKMGATRRTFLTDLARKKGFRVENELSDSVTHIVAENNSRSEVLAWLKTHKMEKTKQFELLDISWLIESMKVGKPVDTKGKYQLMESGEMSANPDPTEGRENELPPTTKTISQYACQRRTTLNNHNQRFTDALEILAENYEFKRNDDTCLTFMRAISVLKCLPFEVVSLKDTEGLPWIGDEVKGIMEEIIEVGESLEVQAVLNDERYQSFKLFKSVFGVGVKTADKWYRMGLRTLEDVRSSKTLKLTPMQKAGLCYYEDLADGVTKAEADAISLLVQDAVWTFDPDALVEITGGFRRGKPFGHDVDLLITSPGAEKEQEDQLLQKVTNLWKKQGLLLYGRLRESRFEDGKLPSRKIDALDHFAKCFLILKLYHHKVDKSKWEMPTGSNESEAKSWKAIRVDLVRCPYDRFAFALLGWTGSRMFETDLRRYATHEKKMMLDNHALYDLTKKIFLKAKSEEEIFAHLGLEYLEPSERNA

SEQ ID NO: 1143 - DNA, 1587 bp, synthetic construct
  misc_feature 1..1587: note = Variant of terminal deoxynucleotidyltransferase
  source 1..1587: mol_type = other DNA
atgcaccatcatcatcatcatggcggtagcggcagccacggcattcgtaccatcgattcggacttcgggaagaaacgccagaagaagatggataaccacgatagttccgccatctatgaaatcaaatttcacgagtttgtgctgttcattctcgaagagaaaatgggtgcgacgcgtcgtacttttctgacagatttagcccgcaagaaagggttccgcgtcgagaatgaactgtcagacagcgttacccacatcgtggcagaaaataattcacgctctgaagtattggcttggctgaagactcacaagatggagaagaccaagcaattcgaactgctggatattagctggcttatcgaaagcatgaaagttggtaaaccggtggacaccaaggggaaataccagttgatggaatcgggtgagatgagtgcgaacccagatccgacagagggtcgtgaaaacgagctgcctcctactacgaagaccatttctcagtatgcgtgtcaacgccgcaccaccctgaacaaccataatcaacgttttacggacgcactggaaattcttgcggaaaattacgagttcaaacgcaacgatgatacttgtctgacctttatgcgtgctatttccgtgctgaaatgccttccgtttgaggtagttagcctgaaagacacggaaggattgccctggatcggtgatgaagtcaaagggattatggaagaaatcatcgaggtcggtgaatcgctggaagtgcaggccgtgctcaatgatgagcgctatcaaagcttcaaactgtttaagagtgtctttggagtgggggtgaagacagcagacaaatggtaccgtatgggtctgcgcacgctcgaggatgttcgttccagcaagaccctgaagttgaccccgatgcagaaagcgggtctgtgctattatgaagatcttgctgatggcgttacgaaagccgaatgtgacgcgatttctctgctggttcaggatgcagtctggactttcgacccggatgcgctggtggagattacgggtggatttcgtcgtgggaaaccttttggtcacgacgttgatctgcttatcacatctccgggagctgagaaagaacaagaagaccagctcctgcagaaagtgaccaatctgtggaagaaacaagggttgttgctgtacggtcgtctgcgtgaaagtcgctttgaagatgggaaactcccatcccgcaagatcgatgccctggaccattttgcgaaatgctttctgatcctcaaactttatcaccataaagtggacaaaagcaaatgggaaatgccgacgggttcgaacgaaagcgaggccaaaagttggaaagcaattcgcgtagatctggttcgttgtccctacgatcgttttgcgtttgcgttgttgggttggaccggaagccgcatgttcgaacgtgatctgcgccgctacgccacccacgagaagaagatgatgctggacaatcatgcgctgtatgacctgaccaagaaaatctttctcaaagctaaatcggaagaggaaattttcgcacatctggggcttgaatacctggaaccgtccgaacgtaacgca

SEQ ID NO: 1144 - protein, 529 aa, synthetic construct
  REGION 1..529: note = Variant of terminal deoxynucleotidyltransferase
MHHHHHHGGSGSHGIRTIDSDFGKKRQKKMDNHDSSAIYEIKFHEFVLFILEEKMGATRRTFLTDLARKKGFRVENELSDSVTHIVAENNSRSEVLAWLKTHKMEKTKQFELLDISWLIESMKVGKPVDTKGKYQLMESGEMSANPDPTEGRENELPPTTKTISQYACQRRTTLNNHNQRFTDALEILAENYEFKRNDDTCLTFMRAISVLKCLPFEVVSLKDTEGLPWIGDEVKGIMEEIIEVGESLEVQAVLNDERYQSFKLFKSVFGVGVKTADKWYRMGLRTLEDVRSSKTLKLTPMQKAGLCYYEDLADGVTKAECDAISLLVQDAVWTFDPDALVEITGGFRRGKPFGHDVDLLITSPGAEKEQEDQLLQKVTNLWKKQGLLLYGRLRESRFEDGKLPSRKIDALDHFAKCFLILKLYHHKVDKSKWEMPTGSNESEAKSWKAIRVDLVRCPYDRFAFALLGWTGSRMFERDLRRYATHEKKMMLDNHALYDLTKKIFLKAKSEEEIFAHLGLEYLEPSERNA

SEQ ID NO: 1145 - DNA, 1587 bp, synthetic construct
  misc_feature 1..1587: note = Variant of terminal deoxynucleotidyltransferase
  source 1..1587: mol_type = other DNA
atgcaccatcatcatcatcatggcggtagcggcagccacggcattcgtaccatcgattcggacttcgggaagaaacgccagaagaagatggataaccacgatagttccgccatctatgaaatcaaatttcacgagtttgtgctgttcattctcgaagagaaaatgggtgcgacgcgtcgtacttttctgacagatttagcccgcaagaaagggttccgcgtcgagaatgaactgtcagacagcgttacccacatcgtggcagaaaataattcacgctctgaagtattggcttggctgaagactcacaagatggagaagaccaagcaattcgaactgctggatattagctggcttatcgaaagcatgaaagttggtaaaccggtggacaccaaggggaaataccagttgatggaatcgggtgagatgagtgcgaacccagatccgacagagggtcgtgaaaacgagctgcctcctactacgaagaccatttctcagtatgcgtgtcaacgccgcaccaccctgaacaaccataatcaacgttttacggacgcactggaaattcttgcggaaaattacgagttcaaacgcaacgatgatacttgtctgacctttatgcgtgctatttccgtgctgaaatgccttccgtttgaggtagttagcctgaaagacacggaaggattgccctggatcggtgatgaagtcaaagggattatggaagaaatcatcgaggtcggtgaatcgctggaagtgcaggccgtgctcaatgatgagcgctatcaaagcttcaaactgtttaagagtgtctttggagtgggggtgaagacagcagacaaatggtaccgtatgggtctgcgcacgctcgaggatgttcgttccagcaagaccctgaagttgaccccgatgcagaaagcgggtctgtgctattatgaagatcttgcttatggcgttacgaaagccgaagctgacgcgatttctctgctggttcaggatgcagtctggactttcgacccggatgcgctggtggagattacgggtggatttcgtcgtgggaaaccttttggtcacgacgttgatctgcttatcacatctccgggagctgagaaagaacaagaagaccagctcctgcagaaagtgaccaatctgtggaagaaacaagggttgttgctgtacggtcgtctgcgtgaaagtcgctttgaagatgggaaactcccatcccgcaagatcgatgccctggaccattttgcgaaatgctttctgatcctcaaactttatcaccataaagtggacaaaagcaaatgggaaatgccgacgggttcgaacgaaagcgaggccaaaagttggaaagcaattcgcgtagatctggttcgttgtccctacgatcgttttgcgtttgcgttgttgggttggaccggaagccgcatgttcgaacgtgatctgcgccgctacgccacccacgagaagaagatgatgctggacaatcatgcgctgtatgacctgaccaagaaaatctttctcaaagctaaatcggaagaggaaattttcgcacatctggggcttgaatacctggaaccgtccgaacgtaacgca

SEQ ID NO: 1146 - protein, 529 aa, synthetic construct
  REGION 1..529: note = Variant of terminal deoxynucleotidyltransferase
MHHHHHHGGSGSHGIRTIDSDFGKKRQKKMDNHDSSAIYEIKFHEFVLFILEEKMGATRRTFLTDLARKKGFRVENELSDSVTHIVAENNSRSEVLAWLKTHKMEKTKQFELLDISWLIESMKVGKPVDTKGKYQLMESGEMSANPDPTEGRENELPPTTKTISQYACQRRTTLNNHNQRFTDALEILAENYEFKRNDDTCLTFMRAISVLKCLPFEVVSLKDTEGLPWIGDEVKGIMEEIIEVGESLEVQAVLNDERYQSFKLFKSVFGVGVKTADKWYRMGLRTLEDVRSSKTLKLTPMQKAGLCYYEDLAYGVTKAEADAISLLVQDAVWTFDPDALVEITGGFRRGKPFGHDVDLLITSPGAEKEQEDQLLQKVTNLWKKQGLLLYGRLRESRFEDGKLPSRKIDALDHFAKCFLILKLYHHKVDKSKWEMPTGSNESEAKSWKAIRVDLVRCPYDRFAFALLGWTGSRMFERDLRRYATHEKKMMLDNHALYDLTKKIFLKAKSEEEIFAHLGLEYLEPSERNA

SEQ ID NO: 1147 - DNA, 1587 bp, synthetic construct
  misc_feature 1..1587: note = Variant of terminal deoxynucleotidyltransferase
  source 1..1587: mol_type = other DNA
atgcaccatcatcatcatcatggcggtagcggcagccacggcattcgtaccatcgattcggacttcgggaagaaacgccagaagaagatggataaccacgatagttccgccatctatgaaatcaaatttcacgagtttgtgctgttcattctcgaagagaaaatgggtgcgacgcgtcgtacttttctgacagatttagcccgcaagaaagggttccgcgtcgagaatgaactgtcagacagcgttacccacatcgtggcagaaaataattcacgctctgaagtattggcttggctgaagactcacaagatggagaagaccaagcaattcgaactgctggatattagctggcttatcgaaagcatgaaagttggtaaaccggtggacaccaaggggaaataccagttgatggaatcgggtgagatgagtgcgaacccagatccgacagagggtcgtgaaaacgagctgcctcctactacgaagaccatttctcagtatgcgtgtcaacgccgcaccaccctgaacaaccataatcaacgttttacggacgcactggaaattcttgcggaaaattacgagttcaaacgcaacgatgatacttgtctgacctttatgcgtgctatttccgtgctgaaatgccttccgtttgaggtagttagcctgaaagacacggaaggattgccctggatcggtgatgaagtcaaagggattatggaagaaatcatcgaggtcggtgaatcgctggaagtgcaggccgtgctcaatgatgagcgctatcaaagcttcaaactgtttaagagtgtctttggagtgggggtgaagacagcagacaaatggtaccgtatgggtctgcgcacgctcgaggatgttcgttccagcaagaccctgaagttgaccccgatgcagaaagcgggtctgtgctattatgaagatcttgctgatggcgttacgaaagccgaagctgacgcgatttctctgctggttcaggatgcagtctggactttcgacccggatgcgctggtggagattacgggtggatttcgtcgtgggaaaccttttggtcacgacgttgatctgcttatcacatctccgggagctgagaaagaacaagaagaccagctcctgcagaaagtgaccaatctgtggaagaaacaagggttgttgctgtacggtcgtctgcgtgaaagtcgctttgaagatgggaaactcccatcccgcaagatcgatgccctggaccattttgcgaaatgctttctgatcctcaaactttatcaccataaagtggacaaaagcaaatgggaaatgccgacgggttcgaacgaaagcgaggccaaaagttggaaagcaattcgcgtagatctggttcgttgtccctacgatcgttgggcgtttgcgttgttgggttggaccggaagccgcatgttcgaacgtgatctgcgccgctacgccacccacgagaagaagatgatgctggacaatcatgcgctgtatgacctgaccaagaaaatctttctcaaagctaaatcggaagaggaaattttcgcacatctggggcttgaatacctggaaccgtccgaacgtaacgca

SEQ ID NO: 1148 - protein, 529 aa, synthetic construct
  REGION 1..529: note = Variant of terminal deoxynucleotidyltransferase
MHHHHHHGGSGSHGIRTIDSDFGKKRQKKMDNHDSSAIYEIKFHEFVLFILEEKMGATRRTFLTDLARKKGFRVENELSDSVTHIVAENNSRSEVLAWLKTHKMEKTKQFELLDISWLIESMKVGKPVDTKGKYQLMESGEMSANPDPTEGRENELPPTTKTISQYACQRRTTLNNHNQRFTDALEILAENYEFKRNDDTCLTFMRAISVLKCLPFEVVSLKDTEGLPWIGDEVKGIMEEIIEVGESLEVQAVLNDERYQSFKLFKSVFGVGVKTADKWYRMGLRTLEDVRSSKTLKLTPMQKAGLCYYEDLADGVTKAEADAISLLVQDAVWTFDPDALVEITGGFRRGKPFGHDVDLLITSPGAEKEQEDQLLQKVTNLWKKQGLLLYGRLRESRFEDGKLPSRKIDALDHFAKCFLILKLYHHKVDKSKWEMPTGSNESEAKSWKAIRVDLVRCPYDRWAFALLGWTGSRMFERDLRRYATHEKKMMLDNHALYDLTKKIFLKAKSEEEIFAHLGLEYLEPSERNA

SEQ ID NO: 1149 - DNA, 1587 bp, synthetic construct
  misc_feature 1..1587: note = Variant of terminal deoxynucleotidyltransferase
  source 1..1587: mol_type = other DNA
atgcaccatcatcatcatcatggcggtagcggcagccacggcattcgtaccatcgattcggacttcgggaagaaacgccagaagaagatggataaccacgatagttccgccatctatgaaatcaaatttcacgagtttgtgctgttcattctcgaagagaaaatgggtgcgacgcgtcgtacttttctgacagatttagcccgcaagaaagggttccgcgtcgagaatgaactgtcagacagcgttacccacatcgtggcagaaaataattcacgctctgaagtattggcttggctgaagactcacaagatggagaagaccaagcaattcgaactgctggatattagctggcttatcgaaagcatgaaagttggtaaaccggtggacaccaaggggaaataccagttgatggaatcgggtgagatgagtgcgaacccagatccgacagagggtcgtgaaaacgagctgcctcctactacgaagaccatttctcagtatgcgtgtcaacgccgcaccaccctgaacaaccataatcaacgttttacggacgcactggaaattcttgcggaaaattacgagttcaaacgcaacgatgatacttgtctgacctttatgcgtgctatttccgtgctgaaatgccttccgtttgaggtagttagcctgaaagacacggaaggattgccctggatcggtgatgaagtcaaagggattatggaagaaatcatcgaggtcggtgaatcgctggaagtgcaggccgtgctcaatgatgagcgctatcaaagcttcaaactgtttaagagtgtctttggagtgggggtgaagacagcagacaaatggtaccgtatgggtctgcgcacgctcgaggatgttcgttccagcaagaccctgaagttgaccccgatgcagaaagcgggtctgtgctattatgaagatcttgctgatggcgttacgaaagccgaagctgacgcgatttctctgctggttcaggatgcagtctggactttcgacccggatgcgctggtggagattacgggtggatttcgtcgtgggaaaccttttggtcacgacgttgatctgcttatcacatctccgggagctgagaaagaacaagaagaccagctcctgcagaaagtgaccaatctgtggaagaaacaagggttgttgctgtacggtcgtctgcgtgaaagccgctttgaagatgggaaactcccatcccgcaagatcgatgccctggaccattttgcgaaatgctttctgatcctcaaactttatcaccataaagtggacaaaagcaaatgggaaatgccgacgggttcgaacgaaagcgaggccaaaagttggaaagcaattcgcgtagatctggttcgttgtccctacgatcgttttgcgtttgcgttgttgggttggaccggaagccgcatgttcgaacgtgatctgcgccgctacgccacccacgagaagaagatgatgctggacaatcattctctgtatgacctgaccaagaaaatctttctcaaagctaaatcggaagaggaaattttcgcacatctggggcttgaatacctggaaccgtccgaacgtaacgca

SEQ ID NO: 1150 - protein, 529 aa, synthetic construct
  REGION 1..529: note = Variant of terminal deoxynucleotidyltransferase
MHHHHHHGGSGSHGIRTIDSDFGKKRQKKMDNHDSSAIYEIKFHEFVLFILEEKMGATRRTFLTDLARKKGFRVENELSDSVTHIVAENNSRSEVLAWLKTHKMEKTKQFELLDISWLIESMKVGKPVDTKGKYQLMESGEMSANPDPTEGRENELPPTTKTISQYACQRRTTLNNHNQRFTDALEILAENYEFKRNDDTCLTFMRAISVLKCLPFEVVSLKDTEGLPWIGDEVKGIMEEIIEVGESLEVQAVLNDERYQSFKLFKSVFGVGVKTADKWYRMGLRTLEDVRSSKTLKLTPMQKAGLCYYEDLADGVTKAEADAISLLVQDAVWTFDPDALVEITGGFRRGKPFGHDVDLLITSPGAEKEQEDQLLQKVTNLWKKQGLLLYGRLRESRFEDGKLPSRKIDALDHFAKCFLILKLYHHKVDKSKWEMPTGSNESEAKSWKAIRVDLVRCPYDRFAFALLGWTGSRMFERDLRRYATHEKKMMLDNHSLYDLTKKIFLKAKSEEEIFAHLGLEYLEPSERNA

SEQ ID NO: 1151 - DNA, 1587 bp, synthetic construct
  misc_feature 1..1587: note = Variant of terminal deoxynucleotidyltransferase
  source 1..1587: mol_type = other DNA
atgcaccatcatcatcatcatggcggtagcggcagccacggcattcgtaccatcgattcggacttcgggaagaaacgccagaagaagatggataaccacgatagttccgccatctatgaaatcaaatttcacgagtttgtgctgttcattctcgaagagaaaatgggtgcgacgcgtcgtacttttctgacagatttagcccgcaagaaagggttccgcgtcgagaatgaactgtcagacagcgttacccacatcgtggcagaaaataattcacgctctgaagtattggcttggctgaagactcacaagatggagaagaccaagcaattcgaactgctggatattagctggcttatcgaaagcatgaaagttggtaaaccggtggacaccaaggggaaataccagttgatggaatcgggtgagatgagtgcgaacccagatccgacagagggtcgtgaaaacgagctgcctcctactacgaagaccatttctcagtatgcgtgtcaacgccgcaccaccctgaacaaccataatcaacgttttacggacgcactggaaattcttgcggaaaattacgagttcaaacgcaacgatgatacttgtctgacctttatgcgtgctatttccgtgctgaaatgccttccgtttgaggtagttagcctgaaagacacggaaggattgccctggatcggtgatgaagtcaaagggattatggaagaaatcatcgaggtcggtgaatcgctggaagtgcaggccgtgctcaatgatgagcgctatcaaagcttcaaactgtttaagagtgtctttggagtgggggtgaagacagcagacaaatggtaccgtatgggtctgcgcacgctcgaggatgttcgttccagcaagaccctgaagttgaccccgatgcagaaagcgggtctgtgctattatgaagatcttgctgatggcgttacgaaagccgaagctgacgcgatttctctgctggttcgggatgcagtctggactttcgacccggatgcgctggtggagattacgggtggatttcgtcgtgggaaaccttttggtcacgacgttgatctgcttatcacatctccgggagctgagaaagaacaagaagaccagctcctgcagaaagtgaccaatctgtggaagaaacaagggttgttgctgtacggtcgtctgcgtgaaagtcgctttgaagatgggaaactcccatcccgcaagatcgatgccctggaccattttgcgaaatgctttctgatcctcaaactttatcaccataaagtggacaaaagcaaatgggaaatgccgacgggttcgaacgaaagcgaggccaaaagttggaaagcaattcgcgtagatctggttcgttgtccctacgatcgtgaggcgtttgcgttgttgggttggaccggaagccgcatgttcgaacgtgatctgcgccgctacgccacccacgagaagaagatgatgctggacaatcatgcgctgtatgacctgaccaagaaaatctttctcaaagctaaatcggaagaggaaattttcgcacatctggggcttgaatacctggaaccgtccgaacgtaacgca

SEQ ID NO: 1152 - protein, 529 aa, synthetic construct
  REGION 1..529: note = Variant of terminal deoxynucleotidyltransferase
MHHHHHHGGSGSHGIRTIDSDFGKKRQKKMDNHDSSAIYEIKFHEFVLFILEEKMGATRRTFLTDLARKKGFRVENELSDSVTHIVAENNSRSEVLAWLKTHKMEKTKQFELLDISWLIESMKVGKPVDTKGKYQLMESGEMSANPDPTEGRENELPPTTKTISQYACQRRTTLNNHNQRFTDALEILAENYEFKRNDDTCLTFMRAISVLKCLPFEVVSLKDTEGLPWIGDEVKGIMEEIIEVGESLEVQAVLNDERYQSFKLFKSVFGVGVKTADKWYRMGLRTLEDVRSSKTLKLTPMQKAGLCYYEDLADGVTKAEADAISLLVRDAVWTFDPDALVEITGGFRRGKPFGHDVDLLITSPGAEKEQEDQLLQKVTNLWKKQGLLLYGRLRESRFEDGKLPSRKIDALDHFAKCFLILKLYHHKVDKSKWEMPTGSNESEAKSWKAIRVDLVRCPYDREAFALLGWTGSRMFERDLRRYATHEKKMMLDNHALYDLTKKIFLKAKSEEEIFAHLGLEYLEPSERNA

SEQ ID NO: 1153 - DNA, 1587 bp, synthetic construct
  misc_feature 1..1587: note = Variant of terminal deoxynucleotidyltransferase
  source 1..1587: mol_type = other DNA
atgcaccatcatcatcatcatggcggtagcggcagccacggcattcgtaccatcgattcggacttcgggaagaaacgccagaagaagatggataaccacgatagttccgccatctatgaaatcaaatttcacgagtttgtgctgttcattctcgaagagaaaatgggtgcgacgcgtcgtacttttctgacagatttagcccgcaagaaagggttccgcgtcgagaatgaactgtcagacagcgttacccacatcgtggcagaaaataattcacgctctgaagtattggcttggctgaagactcacaagatggagaagaccaagcaattcgaactgctggatattagctggcttatcgaaagcatgaaagttggtaaaccggtggacaccaaggggaaataccagttgatggaatcgggtgagatgagtgcgaacccagatccgacagagggtcgtgaaaacgagctgcctcctactacgaagaccatttctcagtatgcgtgtcaacgccgcaccaccctgaacaaccataatcaacgttttacggacgcactggaaattcttgcggaaaattacgagttcaaacgcaacgatgatacttgtctgacctttatgcgtgctatttccgtgctgaaatgccttccgtttgaggtagttagcctgaaagacacggaaggattgccctggatcggtgatgaagtcaaagggattatggaagaaatcatcgaggtcggtgaatcgctggaagtgcaggccgtgctcaatgatgagcgctatcaaagcttcaaactgtttaagagtgtctttggagtgggggtgaagacagcagacaaatggtaccgtatgggtctgcgcacgctcgaggatgttcgttccagcaagaccctgaagttgaccccgatgcagaaagcgggtctgtgctattatgaagatcttgctgatggcgttggtaaagccgaagctgacgcgatttctctgctggttcaggatgcagtctggactttcgacccggatgcgctggtggagattacgggtggatttcgtcgtgggaaaccttttggtcacgacgttgatctgcttatcacatctccgggagctgagaaagaacaagaagaccagctcctgcagaaagtgaccaatctgtggaagaaacaagggttgttgctgtacggtcgtctgcgtgaaagtcgctttgaagatgggaaactcccatcccgcaagatcgatgccctggaccattttgcgaaatgctttctgatcctcaaactttatcaccataaagtggacaaaagcaaatgggaaatgccgacgggttcgaacgaaagcgaggccaaaagttggaaagcaattcgcgtagatctggttcgttgtccctacgatcgttttgcgtttgcgttgttgggttggaccggaagccgcatgttcgaacgtgatctgcgccgctacgccacccacgagaagaagatgatgctggacaatcatgcgctgtatgacctgaccaagaaaatctttctcaaagctaaatcggaagaggaaattttcgcacatctggggcttgaatacctggaaccgtccgaacgtaacgca

SEQ ID NO: 1154 - protein, 529 aa, synthetic construct
  REGION 1..529: note = Variant of terminal deoxynucleotidyltransferase
MHHHHHHGGSGSHGIRTIDSDFGKKRQKKMDNHDSSAIYEIKFHEFVLFILEEKMGATRRTFLTDLARKKGFRVENELSDSVTHIVAENNSRSEVLAWLKTHKMEKTKQFELLDISWLIESMKVGKPVDTKGKYQLMESGEMSANPDPTEGRENELPPTTKTISQYACQRRTTLNNHNQRFTDALEILAENYEFKRNDDTCLTFMRAISVLKCLPFEVVSLKDTEGLPWIGDEVKGIMEEIIEVGESLEVQAVLNDERYQSFKLFKSVFGVGVKTADKWYRMGLRTLEDVRSSKTLKLTPMQKAGLCYYEDLADGVGKAEADAISLLVQDAVWTFDPDALVEITGGFRRGKPFGHDVDLLITSPGAEKEQEDQLLQKVTNLWKKQGLLLYGRLRESRFEDGKLPSRKIDALDHFAKCFLILKLYHHKVDKSKWEMPTGSNESEAKSWKAIRVDLVRCPYDRFAFALLGWTGSRMFERDLRRYATHEKKMMLDNHALYDLTKKIFLKAKSEEEIFAHLGLEYLEPSERNA

SEQ ID NO: 1155 - DNA, 1587 bp, synthetic construct
  misc_feature 1..1587: note = Variant of terminal deoxynucleotidyltransferase
  source 1..1587: mol_type = other DNA
atgcaccatcatcatcatcatggcggtagcggcagccacggcattcgtaccatcgattcggacttcgggaagaaacgccagaagaagatggataaccacgatagttccgccatctatgaaatcaaatttcacgagtttgtgctgttcattctcgaagagaaaatgggtgcgacgcgtcgtacttttctgacagatttagcccgcaagaaagggttccgcgtcgagaatgaactgtcagacagcgttacccacatcgtggcagaaaataattcacgctctgaagtattggcttggctgaagactcacaagatggagaagaccaagcaattcgaactgctggatattagctggcttatcgaaagcatgaaagttggtaaaccggtggacaccaaggggaaataccagttgatggaatcgggtgagatgagtgcgaacccagatccgacagagggtcgtgaaaacgagctgcctcctactacgaagaccatttctcagtatgcgtgtcaacgccgcaccaccctgaacaaccataatcaacgttttacggacgcactggaaattcttgcggaaaattacgagttcaaacgcaacgatgatacttgtctgacctttatgcgtgctatttccgtgctgaaatgccttccgtttgaggtagttagcctgaaagacacggaaggattgccctggatcggtgatgaagtcaaagggattatggaagaaatcatcgaggtcggtgaatcgctggaagtgcaggccgtgctcaatgatgagcgctatcaaagcttcaaactgtttaagagtgtctttggagtgggggtgaagacagcagacaaatggtaccgtatgggtctgcgcacgctcgaggatgttcgttccagcaagaccctgaagttgaccccgatgcagaaagcgggtctgtgctattatgaagatcttgctgatggcgttacgaaagccgaaagtgacgcgatttctctgctggttcaggatgcagtctggactttcgacccggatgcgctggtggagattacgggtggatttcgtcgtgggaaaccttttggtcacgacgttgatctgcttatcacatctccgggagctgagaaagaacaagaagaccagctcctgcagaaagtgaccaatctgtggaagaaacaagggttgttgctgtacggtcgtctgcgtgaaagtcgctttgaagatgggaaactcccatcccgcaagatcgatgccctggaccattttgcgaaatgctttctgatcctcaaactttatcaccataaagtggacaaaagcaaatgggaaatgccgacgggttcgaacgaaagcgaggccaaaagttggaaagcaattcgcgtagatctggttcgttgtccctacgatcgttttgcgtttgcgttgttgggttggaccggaagccgcatgttcgaacgtgatctgcgccgctacgccacccacgagaagaagatgatgctggacaatcatgcgctgtatgacctgaccaagaaaatctttctcaaagctaaatcggaagaggaaattttcgcacatctggggcttgaatacctggaaccgtccgaacgtaacgca

SEQ ID NO: 1156 - protein, 529 aa, synthetic construct
  REGION 1..529: note = Variant of terminal deoxynucleotidyltransferase
MHHHHHHGGSGSHGIRTIDSDFGKKRQKKMDNHDSSAIYEIKFHEFVLFILEEKMGATRRTFLTDLARKKGFRVENELSDSVTHIVAENNSRSEVLAWLKTHKMEKTKQFELLDISWLIESMKVGKPVDTKGKYQLMESGEMSANPDPTEGRENELPPTTKTISQYACQRRTTLNNHNQRFTDALEILAENYEFKRNDDTCLTFMRAISVLKCLPFEVVSLKDTEGLPWIGDEVKGIMEEIIEVGESLEVQAVLNDERYQSFKLFKSVFGVGVKTADKWYRMGLRTLEDVRSSKTLKLTPMQKAGLCYYEDLADGVTKAESDAISLLVQDAVWTFDPDALVEITGGFRRGKPFGHDVDLLITSPGAEKEQEDQLLQKVTNLWKKQGLLLYGRLRESRFEDGKLPSRKIDALDHFAKCFLILKLYHHKVDKSKWEMPTGSNESEAKSWKAIRVDLVRCPYDRFAFALLGWTGSRMFERDLRRYATHEKKMMLDNHALYDLTKKIFLKAKSEEEIFAHLGLEYLEPSERNA

SEQ ID NO: 1157 - DNA, 1587 bp, synthetic construct
  misc_feature 1..1587: note = Variant of terminal deoxynucleotidyltransferase
  source 1..1587: mol_type = other DNA
atgcaccatcatcatcatcatggcggtagcggcagccacggcattcgtaccatcgattcggacttcgggaagaaacgccagaagaagatggataaccacgatagttccgccatctatgaaatcaaatttcacgagtttgtgctgttcattctcgaagagaaaatgggtgcgacgcgtcgtacttttctgacagatttagcccgcaagaaagggttccgcgtcgagaatgaactgtcagacagcgttacccacatcgtggcagaaaataattcacgctctgaagtattggcttggctgaagactcacaagatggagaagaccaagcaattcgaactgctggatattagctggcttatcgaaagcatgaaagttggtaaaccggtggacaccaaggggaaataccagttgatggaatcgggtgagatgagtgcgaacccagatccgacagagggtcgtgaaaacgagctgcctcctactacgaagaccatttctcagtatgcgtgtcaacgccgcaccaccctgaacaaccataatcaacgttttacggacgcactggaaattcttgcggaaaattacgagttcaaacgcaacgatgatacttgtctgacctttatgcgtgctatttccgtgctgaaatgccttccgtttgaggtagttagcctgaaagacacggaaggattgccctggatcggtgatgaagtcaaagggattatggaagaaatcatcgaggtcggtgaatcgctggaagtgcaggccgtgctcaatgatgagcgctatcaaagcttcaaactgtttaagagtgtctttggagtgggggtgaagacagcagacaaatggtaccgtatgggtctgcgcacgctcgaggatgttcgttccagcaagaccctgaagttgaccccgatgcagaaagcgggtctgtgctattatgaagatcttattgatggcgttacgaaagccgaagctgacgcgatttctctgctggttcaggatgcagtctggactttcgacccggatgcgctggtggagattacgggtggatttcgtcgtgggaaaccttttggtcacgacgttgatctgcttatcacatctccgggagctgagaaagaacaagaagaccagctcctgcagaaagtgaccaatctgtggaagaaacaagggttgttgctgtacggtcgtctgcgtgaaagtcgctttgaagatgggaaactcccatcccgcaagatcgatgccctggaccattttgcgaaatgctttctgatcctcaaactttatcaccataaagtggacaaaagcaaatgggaaatgccgacgggttcgaacgaaagcgaggccaaaagttggaaagcaattcgcgtagatctggttcgttgtccctacgatcgttttgcgtttgcgttgttgggttggaccggaagccgcatgttcgaacgtgatctgcgccgctacgccacccacgagaagaagatgatgctggacaatcatgcgctgtatgacctgaccaagaaaatctttctcaaagctaaatcggaagaggaaattttcgcacatctggggcttgaatacctggaaccgtccgaacgtaacgca

SEQ ID NO: 1158 - protein, 529 aa, synthetic construct
  REGION 1..529: note = Variant of terminal deoxynucleotidyltransferase
MHHHHHHGGSGSHGIRTIDSDFGKKRQKKMDNHDSSAIYEIKFHEFVLFILEEKMGATRRTFLTDLARKKGFRVENELSDSVTHIVAENNSRSEVLAWLKTHKMEKTKQFELLDISWLIESMKVGKPVDTKGKYQLMESGEMSANPDPTEGRENELPPTTKTISQYACQRRTTLNNHNQRFTDALEILAENYEFKRNDDTCLTFMRAISVLKCLPFEVVSLKDTEGLPWIGDEVKGIMEEIIEVGESLEVQAVLNDERYQSFKLFKSVFGVGVKTADKWYRMGLRTLEDVRSSKTLKLTPMQKAGLCYYEDLIDGVTKAEADAISLLVQDAVWTFDPDALVEITGGFRRGKPFGHDVDLLITSPGAEKEQEDQLLQKVTNLWKKQGLLLYGRLRESRFEDGKLPSRKIDALDHFAKCFLILKLYHHKVDKSKWEMPTGSNESEAKSWKAIRVDLVRCPYDRFAFALLGWTGSRMFERDLRRYATHEKKMMLDNHALYDLTKKIFLKAKSEEEIFAHLGLEYLEPSERNA

SEQ ID NO: 1159 - DNA, 1587 bp, synthetic construct
  misc_feature 1..1587: note = Variant of terminal deoxynucleotidyltransferase
  source 1..1587: mol_type = other DNA
atgcaccatcatcatcatcatggcggtagcggcagccacggcattcgtaccatcgattcggacttcgggaagaaacgccagaagaagatggataaccacgatagttccgccatctatgaaatcaaatttcacgagtttgtgctgttcattctcgaagagaaaatgggtgcgacgcgtcgtacttttctgacagatttagcccgcaagaaagggttccgcgtcgagaatgaactgtcagacagcgttacccacatcgtggcagaaaataattcacgctctgaagtattggcttggctgaagactcacaagatggagaagaccaagcaattcgaactgctggatattagctggcttatcgaaagcatgaaagttggtaaaccggtggacaccaaggggaaataccagttgatggaatcgggtgagatgagtgcgaacccagatccgacagagggtcgtgaaaacgagctgcctcctactacgaagaccatttctcagtatgcgtgtcaacgccgcaccaccctgaacaaccataatcaacgttttacggacgcactggaaattcttgcggaaaattacgagttcaaacgcaacgatgatacttgtctgacctttatgcgtgctatttccgtgctgaaatgccttccgtttgaggtagttagcctgaaagacacggaaggattgccctggatcggtgatgaagtcaaagggattatggaagaaatcatcgaggtcggtgaatcgctggaagtgcaggccgtgctcaatgatgagcgctatcaaagcttcaaactgtttaagagtgtctttggagtgggggtgaaggtggcagacaaatggtaccgtatgggtctgcgcacgctcgaggatgttcgttccagcaagaccctgaagttgaccccgatgcagaaagcgggtctgtgctattatgaagatcttgctgatggcgttacgaaagccgaagctgacgcgatttctctgctggttcaggatgcagtctggactttcgacccggatgcgctggtggagattacgggtggatttcgtcgtgggaaaccttttggtcacgacgttgatctgcttatcacatctccgggagctgagaaagaacaagaagaccagctcctgcagaaagtgaccaatctgtggaagaaacaagggttgttgctgtacggtcgtctgcgtgaaagtcgctttgaagatgggaaactcccatcccgcaagatcgatgccctggaccattttgcgaaatgctttctgatcctcaaactttatcaccataaagtggacaaaagcaaatgggaaatgccgacgggttcgaacgaaagcgaggccaaaagttggaaagcaattcgcgtagatctggttcgttgtccctacgatcgttttgcgtttgcgttgttgggttggaccggaagccgcatgttcgaacgtgatctgcgccgctacgccacccacgagaagaagatgatgctggacaatcatgcgctgtatgacctgaccaagaaaatctttctcaaagctaaatcggaagaggaaattttcgcacatctggggcttgaatacctggaaccgtccgaacgtaacgca

SEQ ID NO: 1160 - protein, 529 aa, synthetic construct
  REGION 1..529: note = Variant of terminal deoxynucleotidyltransferase
MHHHHHHGGSGSHGIRTIDSDFGKKRQKKMDNHDSSAIYEIKFHEFVLFILEEKMGATRRTFLTDLARKKGFRVENELSDSVTHIVAENNSRSEVLAWLKTHKMEKTKQFELLDISWLIESMKVGKPVDTKGKYQLMESGEMSANPDPTEGRENELPPTTKTISQYACQRRTTLNNHNQRFTDALEILAENYEFKRNDDTCLTFMRAISVLKCLPFEVVSLKDTEGLPWIGDEVKGIMEEIIEVGESLEVQAVLNDERYQSFKLFKSVFGVGVKVADKWYRMGLRTLEDVRSSKTLKLTPMQKAGLCYYEDLADGVTKAEADAISLLVQDAVWTFDPDALVEITGGFRRGKPFGHDVDLLITSPGAEKEQEDQLLQKVTNLWKKQGLLLYGRLRESRFEDGKLPSRKIDALDHFAKCFLILKLYHHKVDKSKWEMPTGSNESEAKSWKAIRVDLVRCPYDRFAFALLGWTGSRMFERDLRRYATHEKKMMLDNHALYDLTKKIFLKAKSEEEIFAHLGLEYLEPSERNA

SEQ ID NO: 1161 - DNA, 1587 bp, synthetic construct
  misc_feature 1..1587: note = Variant of terminal deoxynucleotidyltransferase
  source 1..1587: mol_type = other DNA
atgcaccatcatcatcatcatggcggtagcggcagccacggcattcgtaccatcgattcggacttcgggaagaaacgccagaagaagatggataaccacgatagttccgccatctatgaaatcaaatttcacgagtttgtgctgttcattctcgaagagaaaatgggtgcgacgcgtcgtacttttctgacagatttagcccgcaagaaagggttccgcgtcgagaatgaactgtcagacagcgttacccacatcgtggcagaaaataattcacgctctgaagtattggcttggctgaagactcacaagatggagaagaccaagcaattcgaactgctggatattagctggcttatcgaaagcatgaaagttggtaaaccggtggacaccaaggggaaataccagttgatggaatcgggtgagatgagtgcgaacccagatccgacagagggtcgtgaaaacgagctgcctcctactacgaagaccatttctcagtatgcgtgtcaacgccgcaccaccctgaacaaccataatcaacgttttacggacgcactggaaattcttgcggaaaattacgagttcaaacgcaacgatgatacttgtctgacctttatgcgtgctatttccgtgctgaaatgccttccgtttgaggtagttagcctgaaagacacggaaggattgccctggatcggtgatgaagtcaaagggattatggaagaaatcatcgaggtcggtgaatcgctggaagtgcaggccgtgctcaatgatgagcgctatcaaagcttcaaactgtttaagagtgtctttggagtgggggtgaagacagcagacaaatggtaccgtatgggtctgcgcacgctcgaggatgttcgttccagcaagaccctgaagttgaccccgatgcagaaagcgggtctgtgctattatgaagatcttgctgggggcgttacgaaagccgaagctgacgcgatttctctgctggttcaggatgcagtctggactttcgacccggatgcgctggtggagattacgggtggatttcgtcgtgggaaaccttttggtcacgacgttgatctgcttatcacatctccgggagctgagaaagaacaagaagaccagctcctgcagaaagtgaccaatctgtggaagaaacaagggttgttgctgtacggtcgtctgcgtgaaagtcgctttgaagatgggaaactcccatcccgcaagatcgatgccctggaccattttgcgaaatgctttctgatcctcaaactttatcaccataaagtggacaaaagcaaatgggaaatgccgacgggttcgaacgaaagcgaggccaaaagttggaaagcaattcgcgtagatctggttcgttgtccctacgatcgttttgcgtttgcgttgttgggttggaccggaagccgcatgttcgaacgtgatctgcgccgctacgccacccacgagaagaagatgatgctggacaatcatgcgctgtatgacctgaccaagaaaatctttctcaaagctaaatcggaagaggaaattttcgcacatctggggcttgaatacctggaaccgtccgaacgtaacgca

SEQ ID NO: 1162 - protein, 529 aa, synthetic construct
  REGION 1..529: note = Variant of terminal deoxynucleotidyltransferase
MHHHHHHGGSGSHGIRTIDSDFGKKRQKKMDNHDSSAIYEIKFHEFVLFILEEKMGATRRTFLTDLARKKGFRVENELSDSVTHIVAENNSRSEVLAWLKTHKMEKTKQFELLDISWLIESMKVGKPVDTKGKYQLMESGEMSANPDPTEGRENELPPTTKTISQYACQRRTTLNNHNQRFTDALEILAENYEFKRNDDTCLTFMRAISVLKCLPFEVVSLKDTEGLPWIGDEVKGIMEEIIEVGESLEVQAVLNDERYQSFKLFKSVFGVGVKTADKWYRMGLRTLEDVRSSKTLKLTPMQKAGLCYYEDLAGGVTKAEADAISLLVQDAVWTFDPDALVEITGGFRRGKPFGHDVDLLITSPGAEKEQEDQLLQKVTNLWKKQGLLLYGRLRESRFEDGKLPSRKIDALDHFAKCFLILKLYHHKVDKSKWEMPTGSNESEAKSWKAIRVDLVRCPYDRFAFALLGWTGSRMFERDLRRYATHEKKMMLDNHALYDLTKKIFLKAKSEEEIFAHLGLEYLEPSERNA

SEQ ID NO: 1163 - DNA, 1587 bp, synthetic construct
  misc_feature 1..1587: note = Variant of terminal deoxynucleotidyltransferase
  source 1..1587: mol_type = other DNA
atgcaccatcatcatcatcatggcggtagcggcagccacggcattcgtaccatcgattcggacttcgggaagaaacgccagaagaagatggataaccacgatagttccgccatctatgaaatcaaatttcacgagtttgtgctgttcattctcgaagagaaaatgggtgcgacgcgtcgtacttttctgacagatttagcccgcaagaaagggttccgcgtcgagaatgaactgtcagacagcgttacccacatcgtggcagaaaataattcacgctctgaagtattggcttggctgaagactcacaagatggagaagaccaagcaattcgaactgctggatattagctggcttatcgaaagcatgaaagttggtaaaccggtggacaccaaggggaaataccagttgatggaatcgggtgagatgagtgcgaacccagatccgacagagggtcgtgaaaacgagctgcctcctactacgaagaccatttctcagtatgcgtgtcaacgccgcaccaccctgaacaaccataatcaacgttttacggacgcactggaaattcttgcggaaaattacgagttcaaacgcaacgatgatacttgtctgacctttatgcgtgctatttccgtgctgaaatgccttccgtttgaggtagttagcctgaaagacacggaaggattgccctggatcggtgatgaagtcaaagggattatggaagaaatcatcgaggtcggtgaatcgctggaagtgcaggccgtgctcaatgatgagcgctatcaaagcttcaaactgtttaagagtgtctttggagtgggggtgaagacagcagacaaatggtaccgtatgggtctgcgcacgctcgaggatgttcgttccagcaagaccctgaagttgaccccgatgcagaaagcgggtctgtgctattatgaagatcttgctgatggcgttacgaaagccgaagctgacgcgattgttctgctggttcaggatgcagtctggactttcgacccggatgcgctggtggagattacgggtggatttcgtcgtgggaaaccttttggtcacgacgttgatctgcttatcacatctccgggagctgagaaagaacaagaagaccagctcctgcagaaagtgaccaatctgtggaagaaacaagggttgttgctgtacggtcgtctgcgtgaaagtcgctttgaagatgggaaactcccatcccgcaagatcgatgccctggaccattttgcgaaatgctttctgatcctcaaactttatcaccataaagtggacaaaagcaaatgggaaatgccgacgggttcgaacgaaagcgaggccaaaagttggaaagcaattcgcgtagatctggttcgttgtccctacgatcgttttgcgtttgcgttgttgggttggaccggaagccgcatgttcgaacgtgatctgcgccgctacgccacccacgagaagaagatgatgctggacaatcatgcgctgtatgacctgaccaagaaaatctttctcaaagctaaatcggaagaggaaattttcgcacatctggggcttgaatacctggaaccgtccgaacgtaacgca

SEQ ID NO: 1164 - protein, 529 aa, synthetic construct
  REGION 1..529: note = Variant of terminal deoxynucleotidyltransferase
MHHHHHHGGSGSHGIRTIDSDFGKKRQKKMDNHDSSAIYEIKFHEFVLFILEEKMGATRRTFLTDLARKKGFRVENELSDSVTHIVAENNSRSEVLAWLKTHKMEKTKQFELLDISWLIESMKVGKPVDTKGKYQLMESGEMSANPDPTEGRENELPPTTKTISQYACQRRTTLNNHNQRFTDALEILAENYEFKRNDDTCLTFMRAISVLKCLPFEVVSLKDTEGLPWIGDEVKGIMEEIIEVGESLEVQAVLNDERYQSFKLFKSVFGVGVKTADKWYRMGLRTLEDVRSSKTLKLTPMQKAGLCYYEDLADGVTKAEADAIVLLVQDAVWTFDPDALVEITGGFRRGKPFGHDVDLLITSPGAEKEQEDQLLQKVTNLWKKQGLLLYGRLRESRFEDGKLPSRKIDALDHFAKCFLILKLYHHKVDKSKWEMPTGSNESEAKSWKAIRVDLVRCPYDRFAFALLGWTGSRMFERDLRRYATHEKKMMLDNHALYDLTKKIFLKAKSEEEIFAHLGLEYLEPSERNA

SEQ ID NO: 1165 - DNA, 1587 bp, synthetic construct
  misc_feature 1..1587: note = Variant of terminal deoxynucleotidyltransferase
  source 1..1587: mol_type = other DNA
atgcaccatcatcatcatcatggcggtagcggcagccacggcattcgtaccatcgattcggacttcgggaagaaacgccagaagaagatggataaccacgatagttccgccatctatgaaatcaaatttcacgagtttgtgctgttcattctcgaagagaaaatgggtgcgacgcgtcgtacttttctgacagatttagcccgcaagaaagggttccgcgtcgagaatgaactgtcagacagcgttacccacatcgtggcagaaaataattcacgctctgaagtattggcttggctgaagactcacaagatggagaagaccaagcaattcgaactgctggatattagctggcttatcgaaagcatgaaagttggtaaaccggtggacaccaaggggaaataccagttgatggaatcgggtgagatgagtgcgaacccagatccgacagagggtcgtgaaaacgagctgcctcctactacgaagaccatttctcagtatgcgtgtcaacgccgcaccaccctgaacaaccataatcaacgttttacggacgcactggaaattcttgcggaaaattacgagttcaaacgcaacgatgggacttgtctgacctttatgcgtgctatttccgtgctgaaatgccttccgtttgaggtagttagcctgaaagacacggaaggattgccctggatcggtgatgaagtcaaagggattatggaagaaatcatcgaggtcggtgaatcgctggaagtgcaggccgtgctcaatgatgagcgctatcaaagcttcaaactgtttaagagtgtctttggagtgggggtgaagacagcagacaaatggtaccgtatgggtctgcgcacgctcgaggatgttcgttccagcaagaccctgaagttgaccccgatgcagaaagcgggtctgtgctattatgaagatcttgctgatggcgttacgaaagccgaagctgacgcgatttctctgctggttcaggatgcagtctggactttcgacccggatgcgctggtggagattacgggtggatttcgtcgtgggaaaccttttggtcacgacgttgatctgcttatcacatctccgggagctgagaaagaacaagaagaccagctcctgcagaaagtgaccaatctgtggaagaaacaagggttgttgctgtacggtcgtctgcgtgaaagtcgctttgaagatgggaaactcccatcccgcaagatcgatgccctggaccattttgcgaaatgctttctgatcctcaaactttatcaccataaagtggacaaaagcaaatgggaaatgccgacgggttcgaacgaaagcgaggccaaaagttggaaagcaattcgcgtagatctggttcgttgtccctacgatcgttttgcgtttgcgttgttgggttggaccggaagccgcatgttcgaacgtgatctgcgccgctacgccacccacgagaagaagatgatgctggacaatcatgcgctgtatgacctgaccaagaaaatctttctcaaagctaaatcggaagaggaaattttcgcacatctggggcttgaatacctggaaccgtccgaacgtaacgca

SEQ ID NO: 1166 - protein, 529 aa, synthetic construct
  REGION 1..529: note = Variant of terminal deoxynucleotidyltransferase
MHHHHHHGGSGSHGIRTIDSDFGKKRQKKMDNHDSSAIYEIKFHEFVLFILEEKMGATRRTFLTDLARKKGFRVENELSDSVTHIVAENNSRSEVLAWLKTHKMEKTKQFELLDISWLIESMKVGKPVDTKGKYQLMESGEMSANPDPTEGRENELPPTTKTISQYACQRRTTLNNHNQRFTDALEILAENYEFKRNDGTCLTFMRAISVLKCLPFEVVSLKDTEGLPWIGDEVKGIMEEIIEVGESLEVQAVLNDERYQSFKLFKSVFGVGVKTADKWYRMGLRTLEDVRSSKTLKLTPMQKAGLCYYEDLADGVTKAEADAISLLVQDAVWTFDPDALVEITGGFRRGKPFGHDVDLLITSPGAEKEQEDQLLQKVTNLWKKQGLLLYGRLRESRFEDGKLPSRKIDALDHFAKCFLILKLYHHKVDKSKWEMPTGSNESEAKSWKAIRVDLVRCPYDRFAFALLGWTGSRMFERDLRRYATHEKKMMLDNHALYDLTKKIFLKAKSEEEIFAHLGLEYLEPSERNA

SEQ ID NO: 1167 - DNA, 1587 bp, synthetic construct
  misc_feature 1..1587: note = Variant of terminal deoxynucleotidyltransferase
  source 1..1587: mol_type = other DNA
atgcaccatcatcatcatcatggcggtagcggcagccacggcattcgtaccatcgattcggacttcgggaagaaacgccagaagaagatggataaccacgatagttccgccatctatgaaatcaaatttcacgagtttgtgctgttcattctcgaagagaaaatgggtgcgacgcgtcgtacttttctgacagatttagcccgcaagaaagggttccgcgtcgagaatgaactgtcagacagcgttacccacatcgtggcagaaaataattcacgctctgaagtattggcttggctgaagactcacaagatggagaagaccaagcaattcgaactgctggatattagctggcttatcgaaagcatgaaagttggtaaaccggtggacaccaaggggaaataccagttgatggaatcgggtgagatgagtgcgaacccagatccgacagagggtcgtgaaaacgagctgcctcctactacgaagaccatttctcagtatgcgtgtcaacgccgcaccaccctgaacaaccataatcaacgttttacggacgcactggaaattcttgcggaaaattacgagttcaaacgcaacgatgatacttgtctgacctttatgcgtgctatttccgtgctgaaatgccttccgtttgaggtagttagcctgaaagacacggaaggattgccctggatcggtgatgaagtcaaagggattatggaagaaatcatcgaggtcggtgaatcgctggaagtgcaggccgtgctcaatgatgagcgctatcaaagcttcaaactgtttaagagtgtctttggagtgggggtgaagacagcagacaaatggtaccgtatgggtctgcgcacgctcgaggatgttcgttccagcaagaccctgaagttgaccccgatgcagaaagcgggtctgtgctattatgaagatcttgctgatggcgttacgaaagccgaagctgacgcgatttctctgctggttcaggatgcagtctggactttcgacccggatgcgctggtggagattacgggtggatttcgtcgtgggaaaccttttggtcacgacgttgatctgcttatcacatctccgggagctgagaaagaacaagaagaccagctcctgcagaaagtgaccaatctgtggaagaaacaagggttgttgctgtacggtcgtctgcgtgaaagtcgctttgaagatgggaaactcccatccgttaagatcgatgccctggaccattttgcgaaatgctttctgatcctcaaactttatcaccataaagtggacaaaagcaaatgggaaatgccgacgggttcgaacgaaagcgaggccaaaagttggaaagcaattcgcgtagatctggttcgttgtccctacgatcgttttgcgtttgcgttgttgggttggaccggaagccgcatgttcgaacgtgatctgcgccgctacgccacccacgagaagaagatgatgctggacaatcatgcgctgtatgacctgaccaagaaaatctttctcaaagctaaatcggaagaggaaattttcgcacatctggggcttgaatacctggaaccgtccgaacgtaacgca

SEQ ID NO: 1168 - protein, 529 aa, synthetic construct
  REGION 1..529: note = Variant of terminal deoxynucleotidyltransferase
MHHHHHHGGSGSHGIRTIDSDFGKKRQKKMDNHDSSAIYEIKFHEFVLFILEEKMGATRRTFLTDLARKKGFRVENELSDSVTHIVAENNSRSEVLAWLKTHKMEKTKQFELLDISWLIESMKVGKPVDTKGKYQLMESGEMSANPDPTEGRENELPPTTKTISQYACQRRTTLNNHNQRFTDALEILAENYEFKRNDDTCLTFMRAISVLKCLPFEVVSLKDTEGLPWIGDEVKGIMEEIIEVGESLEVQAVLNDERYQSFKLFKSVFGVGVKTADKWYRMGLRTLEDVRSSKTLKLTPMQKAGLCYYEDLADGVTKAEADAISLLVQDAVWTFDPDALVEITGGFRRGKPFGHDVDLLITSPGAEKEQEDQLLQKVTNLWKKQGLLLYGRLRESRFEDGKLPSVKIDALDHFAKCFLILKLYHHKVDKSKWEMPTGSNESEAKSWKAIRVDLVRCPYDRFAFALLGWTGSRMFERDLRRYATHEKKMMLDNHALYDLTKKIFLKAKSEEEIFAHLGLEYLEPSERNA

SEQ ID NO: 1169 - DNA, 1587 bp, synthetic construct
  misc_feature 1..1587: note = Variant of terminal deoxynucleotidyltransferase
  source 1..1587: mol_type = other DNA
atgcaccatcatcatcatcatggcggtagcggcagccacggcattcgtaccatcgattcggacttcgggaagaaacgccagaagaagatggataaccacgatagttccgccatctatgaaatcaaatttcacgagtttgtgctgttcattctcgaagagaaaatgggtgcgacgcgtcgtacttttctgacagatttagcccgcaagaaagggttccgcgtcgagaatgaactgtcagacagcgttacccacatcgtggcagaaaataattcacgctctgaagtattggcttggctgaagactcacaagatggagaagaccaagcaattcgaactgctggatattagctggcttatcgaaagcatgaaagttggtaaaccggtggacaccaaggggaaataccagttgatggaatcgggtgagatgagtgcgaacccagatccgacagagggtcgtgaaaacgagctgcctcctactacgaagaccatttctcagtatgcgtgtcaacgccgcaccaccctgaacaaccataatcaacgttttacggacgcactggaaattcttgcggaaaattacgagttcaaacgcaacgattcgacttgtctgacctttatgcgtgctatttccgtgctgaaatgccttccgtttgaggtagttagcctgaaagacacggaaggattgccctggatcggtgatgaagtcaaagggattatggaagaaatcatcgaggtcggtgaatcgctggaagtgcaggccgtgctcaatgatgagcgctatcaaagcttcaaactgtttaagagtgtctttggagtgggggtgaagacagcagacaaatggtaccgtatgggtctgcgcacgctcgaggatgttcgttccagcaagaccctgaagttgaccccgatgcagaaagcgggtctgtgctattatgaagatcttgctgatggcgttacgaaagccgaagctgacgcgatttctctgctggttcaggatgcagtctggactttcgacccggatgcgctggtggagattacgggtggatttcgtcgtgggaaaccttttggtcacgacgttgatctgcttatcacatctccgggagctgagaaagaacaagaagaccagctcctgcagaaagtgaccaatctgtggaagaaacaagggttgttgctgtacggtcgtctgcgtgaaagtcgctttgaagatgggaaactcccatcccgcaagatcgatgccctggaccattttgcgaaatgctttctgatcctcaaactttatcaccataaagtggacaaaagcaaatgggaaatgccgacgggttcgaacgaaagcgaggccaaaagttggaaagcaattcgcgtagatctggttcgttgtccctacgatcgttttgcgtttgcgttgttgggttggaccggaagccgcatgttcgaacgtgatctgcgccgctacgccacccacgagaagaagatgatgctggacaatcatgcgctgtatgacctgaccaagaaaatctttctcaaagctaaatcggaagaggaaattttcgcacatctggggcttgaatacctggaaccgtccgaacgtaacgca

SEQ ID NO: 1170 - protein, 529 aa, synthetic construct
  REGION 1..529: note = Variant of terminal deoxynucleotidyltransferase
MHHHHHHGGSGSHGIRTIDSDFGKKRQKKMDNHDSSAIYEIKFHEFVLFILEEKMGATRRTFLTDLARKKGFRVENELSDSVTHIVAENNSRSEVLAWLKTHKMEKTKQFELLDISWLIESMKVGKPVDTKGKYQLMESGEMSANPDPTEGRENELPPTTKTISQYACQRRTTLNNHNQRFTDALEILAENYEFKRNDSTCLTFMRAISVLKCLPFEVVSLKDTEGLPWIGDEVKGIMEEIIEVGESLEVQAVLNDERYQSFKLFKSVFGVGVKTADKWYRMGLRTLEDVRSSKTLKLTPMQKAGLCYYEDLADGVTKAEADAISLLVQDAVWTFDPDALVEITGGFRRGKPFGHDVDLLITSPGAEKEQEDQLLQKVTNLWKKQGLLLYGRLRESRFEDGKLPSRKIDALDHFAKCFLILKLYHHKVDKSKWEMPTGSNESEAKSWKAIRVDLVRCPYDRFAFALLGWTGSRMFERDLRRYATHEKKMMLDNHALYDLTKKIFLKAKSEEEIFAHLGLEYLEPSERNA

SEQ ID NO: 1171 - DNA, 1587 bp, synthetic construct
  misc_feature 1..1587: note = Variant of terminal deoxynucleotidyltransferase
  source 1..1587: mol_type = other DNA
atgcaccatcatcatcatcatggcggtagcggcagccacggcattcgtaccatcgattcggacttcgggaagaaacgccagaagaagatggataaccacgatagttccgccatctatgaaatcaaatttcacgagtttgtgctgttcattctcgaagagaaaatgggtgcgacgcgtcgtacttttctgacagatttagcccgcaagaaagggttccgcgtcgagaatgaactgtcagacagcgttacccacatcgtggcagaaaataattcacgctctgaagtattggcttggctgaagactcacaagatggagaagaccaagcaattcgaactgctggatattagctggcttatcgaaagcatgaaagttggtaaaccggtggacaccaaggggaaataccagttgatggaatcgggtgagatgagtgcgaacccagatccgacagagggtcgtgaaaacgagctgcctcctactacgaagaccatttctcagtatgcgtgtcaacgccgcaccaccctgaacaaccataatcaacgttttacggacgcactggaaattcttgcggaaaattacgagttcaaacgcaacgatgatacttgtctgacctttatgcgtgctatttccgtgctgaaatgccttccgtttgaggtagttagcctgaaagacacggaaggattgccctggatcggtgatgaagtcaaagggattatggaagaaatcatcgaggtcggtgaatcgctggaagtgcaggccgtgctcaatgatgagcgctatcaaagcttcaaactgtttaagagtgtctttggagtgggggtgaagacagcagacaaatggtaccgtatgggtctgcgcacgctcgaggatgttcgttccagcaagaccctgaagttgaccccgatgcagaaagcgggtctgtgctattatgaagatcttgctgatggcgttacgaaagccgaagctgacgcgatttctctgctggttcaggatgcagtctggactttcgacccggatgcgctggtggagattacgggtggatttcgtcgtgggaaaccttttggtcacgacgttgatctgcttatcacatctccgggagctgagaaagaacaagaagaccagctcctgcagaaagtgaccaatctgtggaagaaacaagggttgttgctgtacggtcgtctgcgtgaaagtcgctttgaagatgggaaactcccatcccgcaagatcgatgccctggaccattttgcgaaatgctttctgatcctcaaactttatcaccataaagtggacaaaagcaaatgggaaatgccgacgggttcgaacgaaagcgaggccaaaagttggaaagcaattcgcgtagatctggttcgtagtccctacgatcgttttgcgtttgcgttgttgggttggaccggaagccgcatgttcgaacgtgatctgcgccgctacgccacccacgagaagaagatgatgctggacaatcatgcgctgtatgacctgaccaagaaaatctttctcaaagctaaatcggaagaggaaattttcgcacatctggggcttgaatacctggaaccgtccgaacgtaacgca

SEQ ID NO: 1172 - protein, 529 aa, synthetic construct
  REGION 1..529: note = Variant of terminal deoxynucleotidyltransferase
MHHHHHHGGSGSHGIRTIDSDFGKKRQKKMDNHDSSAIYEIKFHEFVLFILEEKMGATRRTFLTDLARKKGFRVENELSDSVTHIVAENNSRSEVLAWLKTHKMEKTKQFELLDISWLIESMKVGKPVDTKGKYQLMESGEMSANPDPTEGRENELPPTTKTISQYACQRRTTLNNHNQRFTDALEILAENYEFKRNDDTCLTFMRAISVLKCLPFEVVSLKDTEGLPWIGDEVKGIMEEIIEVGESLEVQAVLNDERYQSFKLFKSVFGVGVKTADKWYRMGLRTLEDVRSSKTLKLTPMQKAGLCYYEDLADGVTKAEADAISLLVQDAVWTFDPDALVEITGGFRRGKPFGHDVDLLITSPGAEKEQEDQLLQKVTNLWKKQGLLLYGRLRESRFEDGKLPSRKIDALDHFAKCFLILKLYHHKVDKSKWEMPTGSNESEAKSWKAIRVDLVRSPYDRFAFALLGWTGSRMFERDLRRYATHEKKMMLDNHALYDLTKKIFLKAKSEEEIFAHLGLEYLEPSERNA

SEQ ID NO: 1173 - DNA, 1587 bp, synthetic construct
  misc_feature 1..1587: note = Variant of terminal deoxynucleotidyltransferase
  source 1..1587: mol_type = other DNA
atgcaccatcatcatcatcatggcggtagcggcagccacggcattcgtaccatcgattcggacttcgggaagaaacgccagaagaagatggataaccacgatagttccgccatctatgaaatcaaatttcacgagtttgtgctgttcattctcgaagagaaaatgggtgcgacgcgtcgtacttttctgacagatttagcccgcaagaaagggttccgcgtcgagaatgaactgtcagacagcgttacccacatcgtggcagaaaataattcacgctctgaagtattggcttggctgaagactcacaagatggagaagaccaagcaattcgaactgctggatattagctggcttatcgaaagcatgaaagttggtaaaccggtggacaccaaggggaaataccagttgatggaatcgggtgagatgagtgcgaacccagatccgacagagggtcgtgaaaacgagctgcctcctactacgaagaccatttctcagtatgcgtgtcaacgccgcaccaccctgaacaaccataatcaacgttttacggacgcactggaaattcttgcggaaaattacgagttcaaacgcaacgatgatacttgtctgacctttatgcgtgctatttccgtgctgaaatgccttccgtttgaggtagttagcctgaaagacacggaaggattgccctggatcggtgatgaagtcaaagggattatggaagaaatcatcgaggtcggtgaatcgctggaagtgcaggccgtgctcaatgatgagcgctatcaaagcttcaaactgtttaagagtgtctttggagtgggggtgaagacagcagacaaatggtaccgtatgggtctgcgcacgctcgaggatgttcgttccagcaagaccctgaagttgaccccgatgcagaaagcgggtctgtgctattatgaagatcttgctgatggcgttacgaaagccgaagctgacgcgatttctctgctggttcaggatgcagtctggactttcgacccggatgcgctggtggagattacgggtggatttcgtcgtgggaaaccttttggtcacgacgttgatctgcttatcacatctccgggagctgagaaagaacaagaagaccagctcctgcagaaagtgaccaatctgtggaagaaacaagggttgttgctgtacggtcgtctgcgtgaaagtcgctttgaagatgggaaactcccatccggtaagatcgatgccctggaccattttgcgaaatgctttctgatcctcaaactttatcaccataaagtggacaaaagcaaatgggaaatgccgacgggttcgaacgaaagcgaggccaaaagttggaaagcaattcgcgtagatctggttcgttgtccctacgatcgttttgcgtttgcgttgttgggttggaccggaagccgcatgttcgaacgtgatctgcgccgctacgccacccacgagaagaagatgatgctggacaatcatgcgctgtatgacctgaccaagaaaatctttctcaaagctaaatcggaagaggaaattttcgcacatctggggcttgaatacctggaaccgtccgaacgtaacgca

SEQ ID NO: 1174 - protein, 529 aa, synthetic construct
  REGION 1..529: note = Variant of terminal deoxynucleotidyltransferase
MHHHHHHGGSGSHGIRTIDSDFGKKRQKKMDNHDSSAIYEIKFHEFVLFILEEKMGATRRTFLTDLARKKGFRVENELSDSVTHIVAENNSRSEVLAWLKTHKMEKTKQFELLDISWLIESMKVGKPVDTKGKYQLMESGEMSANPDPTEGRENELPPTTKTISQYACQRRTTLNNHNQRFTDALEILAENYEFKRNDDTCLTFMRAISVLKCLPFEVVSLKDTEGLPWIGDEVKGIMEEIIEVGESLEVQAVLNDERYQSFKLFKSVFGVGVKTADKWYRMGLRTLEDVRSSKTLKLTPMQKAGLCYYEDLADGVTKAEADAISLLVQDAVWTFDPDALVEITGGFRRGKPFGHDVDLLITSPGAEKEQEDQLLQKVTNLWKKQGLLLYGRLRESRFEDGKLPSGKIDALDHFAKCFLILKLYHHKVDKSKWEMPTGSNESEAKSWKAIRVDLVRCPYDRFAFALLGWTGSRMFERDLRRYATHEKKMMLDNHALYDLTKKIFLKAKSEEEIFAHLGLEYLEPSERNA

SEQ ID NO: 1175 - DNA, 1587 bp, synthetic construct
  misc_feature 1..1587: note = Variant of terminal deoxynucleotidyltransferase
  source 1..1587: mol_type = other DNA
atgcaccatcatcatcatcatggcggtagcggcagccacggcattcgtaccatcgattcggacttcgggaagaaacgccagaagaagatggataaccacgatagttccgccatctatgaaatcaaatttcacgagtttgtgctgttcattctcgaagagaaaatgggtgcgacgcgtcgtacttttctgacagatttagcccgcaagaaagggttccgcgtcgagaatgaactgtcagacagcgttacccacatcgtggcagaaaataattcacgctctgaagtattggcttggctgaagactcacaagatggagaagaccaagcaattcgaactgctggatattagctggcttatcgaaagcatgaaagttggtaaaccggtggacaccaaggggaaataccagttgatggaatcgggtgagatgagtgcgaacccagatccgacagagggtcgtgaaaacgagctgcctcctactacgaagaccatttctcagtatgcgtgtcaacgccgcaccaccctgaacaaccataatcaacgttttacggacgcactggaaattcttgcggaaaattacgagttcaaagggaacgatgatacttgtctgacctttatgcgtgctatttccgtgctgaaatgccttccgtttgaggtagttagcctgaaagacacggaaggattgccctggatcggtgatgaagtcaaagggattatggaagaaatcatcgaggtcggtgaatcgctggaagtgcaggccgtgctcaatgatgagcgctatcaaagcttcaaactgtttaagagtgtctttggagtgggggtgaagacagcagacaaatggtaccgtatgggtctgcgcacgctcgaggatgttcgttccagcaagaccctgaagttgaccccgatgcagaaagcgggtctgtgctattatgaagatcttgctgatggcgttacgaaagccgaagctgacgcgatttctctgctggttcaggatgcagtctggactttcgacccggatgcgctggtggagattacgggtggatttcgtcgtgggaaaccttttggtcacgacgttgatctgcttatcacatctccgggagctgagaaagaacaagaagaccagctcctgcagaaagtgaccaatctgtggaagaaacaagggttgttgctgtacggtcgtctgcgtgaaagtcgctttgaagatgggaaactcccatcccgcaagatcgatgccctggaccattttgcgaaatgctttctgatcctcaaactttatcaccataaagtggacaaaagcaaatgggaaatgccgacgggttcgaacgaaagcgaggccaaaagttggaaagcaattcgcgtagatctggttcgttgtccctacgatcgttttgcgtttgcgttgttgggttggaccggaagccgcatgttcgaacgtgatctgcgccgctacgccacccacgagaagaagatgatgctggacaatcatgcgctgtatgacctgaccaagaaaatctttctcaaagctaaatcggaagaggaaattttcgcacatctggggcttgaatacctggaaccgtccgaacgtaacgca

SEQ ID NO: 1176 - protein, 529 aa, synthetic construct
  REGION 1..529: note = Variant of terminal deoxynucleotidyltransferase
MHHHHHHGGSGSHGIRTIDSDFGKKRQKKMDNHDSSAIYEIKFHEFVLFILEEKMGATRRTFLTDLARKKGFRVENELSDSVTHIVAENNSRSEVLAWLKTHKMEKTKQFELLDISWLIESMKVGKPVDTKGKYQLMESGEMSANPDPTEGRENELPPTTKTISQYACQRRTTLNNHNQRFTDALEILAENYEFKGNDDTCLTFMRAISVLKCLPFEVVSLKDTEGLPWIGDEVKGIMEEIIEVGESLEVQAVLNDERYQSFKLFKSVFGVGVKTADKWYRMGLRTLEDVRSSKTLKLTPMQKAGLCYYEDLADGVTKAEADAISLLVQDAVWTFDPDALVEITGGFRRGKPFGHDVDLLITSPGAEKEQEDQLLQKVTNLWKKQGLLLYGRLRESRFEDGKLPSRKIDALDHFAKCFLILKLYHHKVDKSKWEMPTGSNESEAKSWKAIRVDLVRCPYDRFAFALLGWTGSRMFERDLRRYATHEKKMMLDNHALYDLTKKIFLKAKSEEEIFAHLGLEYLEPSERNA

SEQ ID NO: 1177 - DNA, 1587 bp, synthetic construct
  misc_feature 1..1587: note = Variant of terminal deoxynucleotidyltransferase
  source 1..1587: mol_type = other DNA
atgcaccatcatcatcatcatggcggtagcggcagccacggcattcgtaccatcgattcggacttcgggaagaaacgccagaagaagatggataaccacgatagttccgccatctatgaaatcaaatttcacgagtttgtgctgttcattctcgaagagaaaatgggtgcgacgcgtcgtacttttctgacagatttagcccgcaagaaagggttccgcgtcgagaatgaactgtcagacagcgttacccacatcgtggcagaaaataattcacgctctgaagtattggcttggctgaagactcacaagatggagaagaccaagcaattcgaactgctggatattagctggcttatcgaaagcatgaaagttggtaaaccggtggacaccaaggggaaataccagttgatggaatcgggtgagatgagtgcgaacccagatccgacagagggtcgtgaaaacgagctgcctcctactacgaagaccatttctcagtatgcgtgtcaacgccgcaccaccctgaacaaccataatcaacgttttacggacgcactggaaattcttgcggaaaattacgagttcaaacgcaacgatgatacttgtctgacctttatgcgtgctatttccgtgctgaaatgccttccgtttgaggtagttagcctgaaagacacggaaggattgccctggatcggtgatgaagtcaaagggattatggaagaaatcatcgaggtcggtgaatcgctggaagtgcaggccgtgctcaatgatgagcgctatcaaagcttcaaactgtttaagagtgtctttggagtgggggtgaagacagcagacaaatggtaccgtatgggtctgcgcacgctcgaggatgttcgttccagcaagaccctgaagttgaccccgatgcagaaagcgggtctgtgctattatgaagatcttgctgatggcgttacgaaagccgaagctgacgcgatttctctgctggttcaggatgcagtctggactttcgacccggatgcgctggtggagattacgggtggatttcgtcgtgggaaaccttttggtcacgacgttgatctgcttatcacatctccgggagctgagaaagaacaagaagaccagctcctgcagaaagtgaccaatctgtggaagaaacaagggttgttgctgtacggtcgtctgcgtgaaagtcgctttgaagatgggaaactcccatcccgcaagatcgatgccctggaccattttgcgaaatgctttctgatcctcaaactttatcaccataaagtggacaaaagcaaatgggaaatgccgacgggttcgaacgaaagcgaggccaaaagttggaaagcaattcgcgtagatctggttcgttgtccctacgatcgttttgcgtttgcgttgttgggttggaccggaagccgcatgttcgaacgtgatctgcgcatgtacgccacccacgagaagaagatgatgctggacaatcatgcgctgtatgacctgaccaagaaaatctttctcaaagctaaatcggaagaggaaattttcgcacatctggggcttgaatacctggaaccgtccgaacgtaacgca

SEQ ID NO: 1178 - protein, 529 aa, synthetic construct
  REGION 1..529: note = Variant of terminal deoxynucleotidyltransferase
MHHHHHHGGSGSHGIRTIDSDFGKKRQKKMDNHDSSAIYEIKFHEFVLFILEEKMGATRRTFLTDLARKKGFRVENELSDSVTHIVAENNSRSEVLAWLKTHKMEKTKQFELLDISWLIESMKVGKPVDTKGKYQLMESGEMSANPDPTEGRENELPPTTKTISQYACQRRTTLNNHNQRFTDALEILAENYEFKRNDDTCLTFMRAISVLKCLPFEVVSLKDTEGLPWIGDEVKGIMEEIIEVGESLEVQAVLNDERYQSFKLFKSVFGVGVKTADKWYRMGLRTLEDVRSSKTLKLTPMQKAGLCYYEDLADGVTKAEADAISLLVQDAVWTFDPDALVEITGGFRRGKPFGHDVDLLITSPGAEKEQEDQLLQKVTNLWKKQGLLLYGRLRESRFEDGKLPSRKIDALDHFAKCFLILKLYHHKVDKSKWEMPTGSNESEAKSWKAIRVDLVRCPYDRFAFALLGWTGSRMFERDLRMYATHEKKMMLDNHALYDLTKKIFLKAKSEEEIFAHLGLEYLEPSERNA

SEQ ID NO: 1179 - DNA, 1587 bp, synthetic construct
  misc_feature 1..1587: note = Variant of terminal deoxynucleotidyltransferase
  source 1..1587: mol_type = other DNA
atgcaccatcatcatcatcatggcggtagcggcagccacggcattcgtaccatcgattcggacttcgggaagaaacgccagaagaagatggataaccacgatagttccgccatctatgaaatcaaatttcacgagtttgtgctgttcattctcgaagagaaaatgggtgcgacgcgtcgtacttttctgacagatttagcccgcaagaaagggttccgcgtcgagaatgaactgtcagacagcgttacccacatcgtggcagaaaataattcacgctctgaagtattggcttggctgaagactcacaagatggagaagaccaagcaattcgaactgctggatattagctggcttatcgaaagcatgaaagttggtaaaccggtggacaccaaggggaaataccagttgatggaatcgggtgagatgagtgcgaacccagatccgacagagggtcgtgaaaacgagctgcctcctactacgaagaccatttctcagtatgcgtgtcaacgccgcaccaccctgaacaaccataatcaacgttttacggacgcactggaaattcttgcggaaaattacgagttcaaacgcaacgatcagacttgtctgacctttatgcgtgctatttccgtgctgaaatgccttccgtttgaggtagttagcctgaaagacacggaaggattgccctggatcggtgatgaagtcaaagggattatggaagaaatcatcgaggtcggtgaatcgctggaagtgcaggccgtgctcaatgatgagcgctatcaaagcttcaaactgtttaagagtgtctttggagtgggggtgaagacagcagacaaatggtaccgtatgggtctgcgcacgctcgaggatgttcgttccagcaagaccctgaagttgaccccgatgcagaaagcgggtctgtgctattatgaagatcttgctgatggcgttacgaaagccgaagctgacgcgatttctctgctggttcaggatgcagtctggactttcgacccggatgcgctggtggagattacgggtggatttcgtcgtgggaaaccttttggtcacgacgttgatctgcttatcacatctccgggagctgagaaagaacaagaagaccagctcctgcagaaagtgaccaatctgtggaagaaacaagggttgttgctgtacggtcgtctgcgtgaaagtcgctttgaagatgggaaactcccatcccgcaagatcgatgccctggaccattttgcgaaatgctttctgatcctcaaactttatcaccataaagtggacaaaagcaaatgggaaatgccgacgggttcgaacgaaagcgaggccaaaagttggaaagcaattcgcgtagatctggttcgttgtccctacgatcgttttgcgtttgcgttgttgggttggaccggaagccgcatgttcgaacgtgatctgcgccgctacgccacccacgagaagaagatgatgctggacaatcatgcgctgtatgacctgaccaagaaaatctttctcaaagctaaatcggaagaggaaattttcgcacatctggggcttgaatacctggaaccgtccgaacgtaacgca

SEQ ID NO: 1180 - protein, 529 aa, synthetic construct
  REGION 1..529: note = Variant of terminal deoxynucleotidyltransferase
MHHHHHHGGSGSHGIRTIDSDFGKKRQKKMDNHDSSAIYEIKFHEFVLFILEEKMGATRRTFLTDLARKKGFRVENELSDSVTHIVAENNSRSEVLAWLKTHKMEKTKQFELLDISWLIESMKVGKPVDTKGKYQLMESGEMSANPDPTEGRENELPPTTKTISQYACQRRTTLNNHNQRFTDALEILAENYEFKRNDQTCLTFMRAISVLKCLPFEVVSLKDTEGLPWIGDEVKGIMEEIIEVGESLEVQAVLNDERYQSFKLFKSVFGVGVKTADKWYRMGLRTLEDVRSSKTLKLTPMQKAGLCYYEDLADGVTKAEADAISLLVQDAVWTFDPDALVEITGGFRRGKPFGHDVDLLITSPGAEKEQEDQLLQKVTNLWKKQGLLLYGRLRESRFEDGKLPSRKIDALDHFAKCFLILKLYHHKVDKSKWEMPTGSNESEAKSWKAIRVDLVRCPYDRFAFALLGWTGSRMFERDLRRYATHEKKMMLDNHALYDLTKKIFLKAKSEEEIFAHLGLEYLEPSERNA

SEQ ID NO: 1181 - DNA, 1587 bp, synthetic construct
  misc_feature 1..1587: note = Variant of terminal deoxynucleotidyltransferase
  source 1..1587: mol_type = other DNA
atgcaccatcatcatcatcatggcggtagcggcagccacggcattcgtaccatcgattcggacttcgggaagaaacgccagaagaagatggataaccacgatagttccgccatctatgaaatcaaatttcacgagtttgtgctgttcattctcgaagagaaaatgggtgcgacgcgtcgtacttttctgacagatttagcccgcaagaaagggttccgcgtcgagaatgaactgtcagacagcgttacccacatcgtggcagaaaataattcacgctctgaagtattggcttggctgaagactcacaagatggagaagaccaagcaattcgaactgctggatattagctggcttatcgaaagcatgaaagttggtaaaccggtggacaccaaggggaaataccagttgatggaatcgggtgagatgagtgcgaacccagatccgacagagggtcgtgaaaacgagctgcctcctactacgaagaccatttctcagtatgcgtgtcaacgccgcaccaccctgaacaaccataatcaacgttttacggacgcactggaaattcttgcggaaaattacgagttcaaacgcaacgatgatacttgtctgacctttatgcgtgctatttccgtgctgaaatgccttccgtttgaggtagttagcctgaaagacacggaaggattgccctggatcggtgatgaagtcaaagggattatggaagaaatcatcgaggtcggtgaatcgctggaagtgcaggccgtgctcaatgatgagcgctatcaaagcttcaaactgtttaagagtgtctttggagtgggggtgaagacagcagacaaatggtaccgtatgggtctgcgcacgctcgaggatgttcgttccagcaagaccctgaagttgaccccgatgcagaaagcgggtctgtgctattatgaagatcttgctgatggcgttacgaaagccgaagctgacgcgatttctctgctggttcaggatgcagtctggactttcgacccggatgcgctggtggagattacgggtggatttcgtcgtgggaaaccttttggtcacgacgttgatctgcttatcacatctccgggagctgagaaagaacaagaagaccagctcctgcagaaagtgaccaatctgtggaagaaacaagggttgttgctgtacggtcgtctgcgtgaaagtacttttgaagatgggaaactcccatcccgcaagatcgatgccctggaccattttgcgaaatgctttctgatcctcaaactttatcaccataaagtggacaaaagcaaatgggaaatgccgacgggttcgaacgaaagcgaggccaaaagttggaaagcaattcgcgtagatctggttcgttgtccctacgatcgttttgcgtttgcgttgttgggttggaccggaagccgcatgttcgaacgtgatctgcgccgctacgccacccacgagaagaagatgatgctggacaatcatgcgctgtatgacctgaccaagaaaatctttctcaaagctaaatcggaagaggaaattttcgcacatctggggcttgaatacctggaaccgtccgaacgtaacgca

SEQ ID NO: 1182 - protein, 529 aa, synthetic construct
  REGION 1..529: note = Variant of terminal deoxynucleotidyltransferase
MHHHHHHGGSGSHGIRTIDSDFGKKRQKKMDNHDSSAIYEIKFHEFVLFILEEKMGATRRTFLTDLARKKGFRVENELSDSVTHIVAENNSRSEVLAWLKTHKMEKTKQFELLDISWLIESMKVGKPVDTKGKYQLMESGEMSANPDPTEGRENELPPTTKTISQYACQRRTTLNNHNQRFTDALEILAENYEFKRNDDTCLTFMRAISVLKCLPFEVVSLKDTEGLPWIGDEVKGIMEEIIEVGESLEVQAVLNDERYQSFKLFKSVFGVGVKTADKWYRMGLRTLEDVRSSKTLKLTPMQKAGLCYYEDLADGVTKAEADAISLLVQDAVWTFDPDALVEITGGFRRGKPFGHDVDLLITSPGAEKEQEDQLLQKVTNLWKKQGLLLYGRLRESTFEDGKLPSRKIDALDHFAKCFLILKLYHHKVDKSKWEMPTGSNESEAKSWKAIRVDLVRCPYDRFAFALLGWTGSRMFERDLRRYATHEKKMMLDNHALYDLTKKIFLKAKSEEEIFAHLGLEYLEPSERNA

SEQ ID NO: 1183 - DNA, 1587 bp, synthetic construct
  misc_feature 1..1587: note = Variant of terminal deoxynucleotidyltransferase
  source 1..1587: mol_type = other DNA
atgcaccatcatcatcatcatggcggtagcggcagccacggcattcgtaccatcgattcggacttcgggaagaaacgccagaagaagatggataaccacgatagttccgccatctatgaaatcaaatttcacgagtttgtgctgttcattctcgaagagaaaatgggtgcgacgcgtcgtacttttctgacagatttagcccgcaagaaagggttccgcgtcgagaatgaactgtcagacagcgttacccacatcgtggcagaaaataattcacgctctgaagtattggcttggctgaagactcacaagatggagaagaccaagcaattcgaactgctggatattagctggcttatcgaaagcatgaaagttggtaaaccggtggacaccaaggggaaataccagttgatggaatcgggtgagatgagtgcgaacccagatccgacagagggtcgtgaaaacgagctgcctcctactacgaagaccatttctcagtatgcgtgtcaacgccgcaccaccctgaacaaccataatcaacgttttacggacgcactggaaattcttgcggaaaattacgagttcaaacgcaacgatgatacttgtctgacctttatgcgtgctatttccgtgctgaaatgccttccgtttgaggtagttagcctgaaagacacggaaggattgccctggatcggtgatgaagtcaaagggattatggaagaaatcatcgaggtcggtgaatcgctggaagtgcaggccgtgctcaatgatgagcgctatcaaagcttcaaactgtttaagagtgtctttggagtgggggtgaagacagcagacaaatggtaccgtatgggtctgcgcacgctcgaggatgttcgttccagcaagaccctgaagttgaccccgatgcagaaagcgggtctgtgctattatgaagatcttgctgatggcgttacgaaagccgaagctgacgcgattactctgctggttcaggatgcagtctggactttcgacccggatgcgctggtggagattacgggtggatttcgtcgtgggaaaccttttggtcacgacgttgatctgcttatcacatctccgggagctgagaaagaacaagaagaccagctcctgcagaaagtgaccaatctgtggaagaaacaagggttgttgctgtacggtcgtctgcgtgaaagtcgctttgaagatgggaaactcccatcccgcaagatcgatgccctggaccattttgcgaaatgctttctgatcctcaaactttatcaccataaagtggacaaaagcaaatgggaaatgccgacgggttcgaacgaaagcgaggccaaaagttggaaagcaattcgcgtagatctggttcgttgtccctacgatcgttttgcgtttgcgttgttgggttggaccggaagccgcatgttcgaacgtgatctgcgccgctacgccacccacgagaagaagatgatgctggacaatcatgcgctgtatgacctgaccaagaaaatctttctcaaagctaaatcggaagaggaaattttcgcacatctggggcttgaatacctggaaccgtccgaacgtaacgca

SEQ ID NO: 1184 - protein, 529 aa, synthetic construct
  REGION 1..529: note = Variant of terminal deoxynucleotidyltransferase
MHHHHHHGGSGSHGIRTIDSDFGKKRQKKMDNHDSSAIYEIKFHEFVLFILEEKMGATRRTFLTDLARKKGFRVENELSDSVTHIVAENNSRSEVLAWLKTHKMEKTKQFELLDISWLIESMKVGKPVDTKGKYQLMESGEMSANPDPTEGRENELPPTTKTISQYACQRRTTLNNHNQRFTDALEILAENYEFKRNDDTCLTFMRAISVLKCLPFEVVSLKDTEGLPWIGDEVKGIMEEIIEVGESLEVQAVLNDERYQSFKLFKSVFGVGVKTADKWYRMGLRTLEDVRSSKTLKLTPMQKAGLCYYEDLADGVTKAEADAITLLVQDAVWTFDPDALVEITGGFRRGKPFGHDVDLLITSPGAEKEQEDQLLQKVTNLWKKQGLLLYGRLRESRFEDGKLPSRKIDALDHFAKCFLILKLYHHKVDKSKWEMPTGSNESEAKSWKAIRVDLVRCPYDRFAFALLGWTGSRMFERDLRRYATHEKKMMLDNHALYDLTKKIFLKAKSEEEIFAHLGLEYLEPSERNA

SEQ ID NO: 1185 - DNA, 1587 bp, synthetic construct
  misc_feature 1..1587: note = Variant of terminal deoxynucleotidyltransferase
  source 1..1587: mol_type = other DNA
atgcaccatcatcatcatcatggcggtagcggcagccacggcattcgtaccatcgattcggacttcgggaagaaacgccagaagaagatggataaccacgatagttccgccatctatgaaatcaaatttcacgagtttgtgctgttcattctcgaagagaaaatgggtgcgacgcgtcgtacttttctgacagatttagcccgcaagaaagggttccgcgtcgagaatgaactgtcagacagcgttacccacatcgtggcagaaaataattcacgctctgaagtattggcttggctgaagactcacaagatggagaagaccaagcaattcgaactgctggatattagctggcttatcgaaagcatgaaagttggtaaaccggtggacaccaaggggaaataccagttgatggaatcgggtgagatgagtgcgaacccagatccgacagagggtcgtgaaaacgagctgcctcctactacgaagaccatttctcagtatgcgtgtcaacgccgcaccaccctgaacaaccataatcaacgttttacggacgcactggaaattcttgcggaaaattacgagttcaaatataacgatgatacttgtctgacctttatgcgtgctatttccgtgctgaaatgccttccgtttgaggtagttagcctgaaagacacggaaggattgccctggatcggtgatgaagtcaaagggattatggaagaaatcatcgaggtcggtgaatcgctggaagtgcaggccgtgctcaatgatgagcgctatcaaagcttcaaactgtttaagagtgtctttggagtgggggtgaagacagcagacaaatggtaccgtatgggtctgcgcacgctcgaggatgttcgttccagcaagaccctgaagttgaccccgatgcagaaagcgggtctgtgctattatgaagatcttgctgatggcgttacgaaagccgaagctgacgcgatttctctgctggttcaggatgcagtctggactttcgacccggatgcgctggtggagattacgggtggatttcgtcgtgggaaaccttttggtcacgacgttgatctgcttatcacatctccgggagctgagaaagaacaagaagaccagctcctgcagaaagtgaccaatctgtggaagaaacaagggttgttgctgtacggtcgtctgcgtgaaagtcgctttgaagatgggaaactcccatcccgcaagatcgatgccctggaccattttgcgaaatgctttctgatcctcaaactttatcaccataaagtggacaaaagcaaatgggaaatgccgacgggttcgaacgaaagcgaggccaaaagttggaaagcaattcgcgtagatctggttcgttgtccctacgatcgttttgcgtttgcgttgttgggttggaccggaagccgcatgttcgaacgtgatctgcgccgctacgccacccacgagaagaagatgatgctggacaatcatgcgctgtatgacctgaccaagaaaatctttctcaaagctaaatcggaagaggaaattttcgcacatctggggcttgaatacctggaaccgtccgaacgtaacgca

SEQ ID NO: 1186 - protein, 529 aa, synthetic construct
  REGION 1..529: note = Variant of terminal deoxynucleotidyltransferase
MHHHHHHGGSGSHGIRTIDSDFGKKRQKKMDNHDSSAIYEIKFHEFVLFILEEKMGATRRTFLTDLARKKGFRVENELSDSVTHIVAENNSRSEVLAWLKTHKMEKTKQFELLDISWLIESMKVGKPVDTKGKYQLMESGEMSANPDPTEGRENELPPTTKTISQYACQRRTTLNNHNQRFTDALEILAENYEFKYNDDTCLTFMRAISVLKCLPFEVVSLKDTEGLPWIGDEVKGIMEEIIEVGESLEVQAVLNDERYQSFKLFKSVFGVGVKTADKWYRMGLRTLEDVRSSKTLKLTPMQKAGLCYYEDLADGVTKAEADAISLLVQDAVWTFDPDALVEITGGFRRGKPFGHDVDLLITSPGAEKEQEDQLLQKVTNLWKKQGLLLYGRLRESRFEDGKLPSRKIDALDHFAKCFLILKLYHHKVDKSKWEMPTGSNESEAKSWKAIRVDLVRCPYDRFAFALLGWTGSRMFERDLRRYATHEKKMMLDNHALYDLTKKIFLKAKSEEEIFAHLGLEYLEPSERNA

SEQ ID NO: 1187 - DNA, 1587 bp, synthetic construct
  misc_feature 1..1587: note = Variant of terminal deoxynucleotidyltransferase
  source 1..1587: mol_type = other DNA
atgcaccatcatcatcatcatggcggtagcggcagccacggcattcgtaccatcgattcggacttcgggaagaaacgccagaagaagatggataaccacgatagttccgccatctatgaaatcaaatttcacgagtttgtgctgttcattctcgaagagaaaatgggtgcgacgcgtcgtacttttctgacagatttagcccgcaagaaagggttccgcgtcgagaatgaactgtcagacagcgttacccacatcgtggcagaaaataattcacgctctgaagtattggcttggctgaagactcacaagatggagaagaccaagcaattcgaactgctggatattagctggcttatcgaaagcatgaaagttggtaaaccggtggacaccaaggggaaataccagttgatggaatcgggtgagatgagtgcgaacccagatccgacagagggtcgtgaaaacgagctgcctcctactacgaagaccatttctcagtatgcgtgtcaacgccgcaccaccctgaacaaccataatcaacgttttacggacgcactggaaattcttgcggaaaattacgagttcaaacgcaacgatgatacttgtctgacctttatgcgtgctatttccgtgctgaaatgccttccgtttgaggtagttagcctgaaagacacggaaggattgccctggatcggtgatgaagtcaaagggattatggaagaaatcatcgaggtcggtgaatcgctggaagtgcaggccgtgctcaatgatgagcgctatcaaagcttcaaactgtttaagagtgtctttggagtgggggtgaagacagcagacaaatggtaccgtatgggtctgcgcacgctcgaggatgttcgttccagcaagaccctgaagttgaccccgatgcagaaagcgggtctgtgctattatgaagatcttgctgatggcgttacgaaagccgaagctgacgcgatttctctgctggttcaggatgcagtctggactttcgacccggatgcgctggtggagattacgggtggatttcgtcgtgggaaaccttttggtcacgacgttgatctgcttatcacatctccgggagctgagaaagaacaagaagaccagctcctgcagaaagtgaccaatctgtggaagaaacaagggttgttgctgtacggtcgtctgcgtgaaagtgattttgaagatgggaaactcccatcccgcaagatcgatgccctggaccattttgcgaaatgctttctgatcctcaaactttatcaccataaagtggacaaaagcaaatgggaaatgccgacgggttcgaacgaaagcgaggccaaaagttggaaagcaattcgcgtagatctggttcgttgtccctacgatcgttttgcgtttgcgttgttgggttggaccggaagccgcatgttcgaacgtgatctgcgccgctacgccacccacgagaagaagatgatgctggacaatcatgcgctgtatgacctgaccaagaaaatctttctcaaagctaaatcggaagaggaaattttcgcacatctggggcttgaatacctggaaccgtccgaacgtaacgca

SEQ ID NO: 1188 - protein, 529 aa, synthetic construct
  REGION 1..529: note = Variant of terminal deoxynucleotidyltransferase
MHHHHHHGGSGSHGIRTIDSDFGKKRQKKMDNHDSSAIYEIKFHEFVLFILEEKMGATRRTFLTDLARKKGFRVENELSDSVTHIVAENNSRSEVLAWLKTHKMEKTKQFELLDISWLIESMKVGKPVDTKGKYQLMESGEMSANPDPTEGRENELPPTTKTISQYACQRRTTLNNHNQRFTDALEILAENYEFKRNDDTCLTFMRAISVLKCLPFEVVSLKDTEGLPWIGDEVKGIMEEIIEVGESLEVQAVLNDERYQSFKLFKSVFGVGVKTADKWYRMGLRTLEDVRSSKTLKLTPMQKAGLCYYEDLADGVTKAEADAISLLVQDAVWTFDPDALVEITGGFRRGKPFGHDVDLLITSPGAEKEQEDQLLQKVTNLWKKQGLLLYGRLRESDFEDGKLPSRKIDALDHFAKCFLILKLYHHKVDKSKWEMPTGSNESEAKSWKAIRVDLVRCPYDRFAFALLGWTGSRMFERDLRRYATHEKKMMLDNHALYDLTKKIFLKAKSEEEIFAHLGLEYLEPSERNA

SEQ ID NO: 1189 - DNA, 1587 bp, synthetic construct
  misc_feature 1..1587: note = Variant of terminal deoxynucleotidyltransferase
  source 1..1587: mol_type = other DNA
atgcaccatcatcatcatcatggcggtagcggcagccacggcattcgtaccatcgattcggacttcgggaagaaacgccagaagaagatggataaccacgatagttccgccatctatgaaatcaaatttcacgagtttgtgctgttcattctcgaagagaaaatgggtgcgacgcgtcgtacttttctgacagatttagcccgcaagaaagggttccgcgtcgagaatgaactgtcagacagcgttacccacatcgtggcagaaaataattcacgctctgaagtattggcttggctgaagactcacaagatggagaagaccaagcaattcgaactgctggatattagctggcttatcgaaagcatgaaagttggtaaaccggtggacaccaaggggaaataccagttgatggaatcgggtgagatgagtgcgaacccagatccgacagagggtcgtgaaaacgagctgcctcctactacgaagaccatttctcagtatgcgtgtcaacgccgcaccaccctgaacaaccataatcaacgttttacggacgcactggaaattcttgcggaaaattacgagttcaaacgcaacgatgatacttgtctgacctttatgcgtgctatttccgtgctgaaatgccttccgtttgaggtagttagcctgaaagacacggaaggattgccctggatcggtgatgaagtcaaagggattatggaagaaatcatcgaggtcggtgaatcgctggaagtgcaggccgtgctcaatgatgagcgctatcaaagcttcaaactgtttaagagtgtctttggagtgggggtgaagacagcagacaaatggtaccgtatgggtctgcgcacgctcgaggatgttcgttccagcaagaccctgaagttgaccccgatgcagaaagcgggtctgtgctattatgaagatcttgctgatggcgttacgaaagccgaagctgacgcgatttggctgctggttcaggatgcagtctggactttcgacccggatgcgctggtggagattacgggtggatttcgtcgtgggaaaccttttggtcacgacgttgatctgcttatcacatctccgggagctgagaaagaacaagaagaccagctcctgcagaaagtgaccaatctgtggaagaaacaagggttgttgctgtacggtcgtctgcgtgaaagtcgctttgaagatgggaaactcccatcccgcaagatcgatgccctggaccattttgcgaaatgctttctgatcctcaaactttatcaccataaagtggacaaaagcaaatgggaaatgccgacgggttcgaacgaaagcgaggccaaaagttggaaagcaattcgcgtagatctggttcgttgtccctacgatcgttttgcgtttgcgttgttgggttggaccggaagccgcatgttcgaacgtgatctgcgccgctacgccacccacgagaagaagatgatgctggacaatcatgcgctgtatgacctgaccaagaaaatctttctcaaagctaaatcggaagaggaaattttcgcacatctggggcttgaatacctggaaccgtccgaacgtaacgca

SEQ ID NO: 1190 - protein, 529 aa, synthetic construct
  REGION 1..529: note = Variant of terminal deoxynucleotidyltransferase
MHHHHHHGGSGSHGIRTIDSDFGKKRQKKMDNHDSSAIYEIKFHEFVLFILEEKMGATRRTFLTDLARKKGFRVENELSDSVTHIVAENNSRSEVLAWLKTHKMEKTKQFELLDISWLIESMKVGKPVDTKGKYQLMESGEMSANPDPTEGRENELPPTTKTISQYACQRRTTLNNHNQRFTDALEILAENYEFKRNDDTCLTFMRAISVLKCLPFEVVSLKDTEGLPWIGDEVKGIMEEIIEVGESLEVQAVLNDERYQSFKLFKSVFGVGVKTADKWYRMGLRTLEDVRSSKTLKLTPMQKAGLCYYEDLADGVTKAEADAIWLLVQDAVWTFDPDALVEITGGFRRGKPFGHDVDLLITSPGAEKEQEDQLLQKVTNLWKKQGLLLYGRLRESRFEDGKLPSRKIDALDHFAKCFLILKLYHHKVDKSKWEMPTGSNESEAKSWKAIRVDLVRCPYDRFAFALLGWTGSRMFERDLRRYATHEKKMMLDNHALYDLTKKIFLKAKSEEEIFAHLGLEYLEPSERNA

SEQ ID NO: 1191 - DNA, 1587 bp, synthetic construct
  misc_feature 1..1587: note = Variant of terminal deoxynucleotidyltransferase
  source 1..1587: mol_type = other DNA
atgcaccatcatcatcatcatggcggtagcggcagccacggcattcgtaccatcgattcggacttcgggaagaaacgccagaagaagatggataaccacgatagttccgccatctatgaaatcaaatttcacgagtttgtgctgttcattctcgaagagaaaatgggtgcgacgcgtcgtacttttctgacagatttagcccgcaagaaagggttccgcgtcgagaatgaactgtcagacagcgttacccacatcgtggcagaaaataattcacgctctgaagtattggcttggctgaagactcacaagatggagaagaccaagcaattcgaactgctggatattagctggcttatcgaaagcatgaaagttggtaaaccggtggacaccaaggggaaataccagttgatggaatcgggtgagatgagtgcgaacccagatccgacagagggtcgtgaaaacgagctgcctcctactacgaagaccatttctcagtatgcgtgtcaacgccgcaccaccctgctgaaccataatcaacgttttacggacgcactggaaattcttgcggaaaattacgagttcaaacgcaacgatgatacttgtctgacctttatgcgtgctatttccgtgctgaaatgccttccgtttgaggtagttagcctgaaagacacggaaggattgccctggatcggtgatgaagtcaaagggattatggaagaaatcatcgaggtcggtgaatcgctggaagtgcaggccgtgctcaatgatgagcgctatcaaagcttcaaactgtttaagagtgtctttggagtgggggtgaagacagcagacaaatggtaccgtatgggtctgcgcacgctcgaggatgttcgttccagcaagaccctgaagttgaccccgatgcagaaagcgggtctgtgctattatgaagatcttgctgatggcgttacgaaagccgaagctgacgcgatttctctgctggttcaggatgcagtctggactttcgacccggatgcgctggtggagattacgggtggatttcgtcgtgggaaaccttttggtcacgacgttgatctgcttatcacatctccgggagctgagaaagaacaagaagaccagctcctgcagaaagtgaccaatctgtggaagaaacaagggttgttgctgtacggtcgtctgcgtgaaagtcgctttgaagatgggaaactcccatcccgcaagatcgatgccctggaccattttgcgaaatgctttctgatcctcaaactttatcaccataaagtggacaaaagcaaatgggaaatgccgacgggttcgaacgaaagcgaggccaaaagttggaaagcaattcgcgtagatctggttcgttgtccctacgatcgttttgcgtttgcgttgttgggttggaccggaagccgcatgttcgaacgtgatctgcgccgctacgccacccacgagaagaagatgatgctggacaatcatgcgctgtatgacctgaccaagaaaatctttctcaaagctaaatcggaagaggaaattttcgcacatctggggcttgaatacctggaaccgtccgaacgtaacgca

SEQ ID NO: 1192 - protein, 529 aa, synthetic construct
  REGION 1..529: note = Variant of terminal deoxynucleotidyltransferase
MHHHHHHGGSGSHGIRTIDSDFGKKRQKKMDNHDSSAIYEIKFHEFVLFILEEKMGATRRTFLTDLARKKGFRVENELSDSVTHIVAENNSRSEVLAWLKTHKMEKTKQFELLDISWLIESMKVGKPVDTKGKYQLMESGEMSANPDPTEGRENELPPTTKTISQYACQRRTTLLNHNQRFTDALEILAENYEFKRNDDTCLTFMRAISVLKCLPFEVVSLKDTEGLPWIGDEVKGIMEEIIEVGESLEVQAVLNDERYQSFKLFKSVFGVGVKTADKWYRMGLRTLEDVRSSKTLKLTPMQKAGLCYYEDLADGVTKAEADAISLLVQDAVWTFDPDALVEITGGFRRGKPFGHDVDLLITSPGAEKEQEDQLLQKVTNLWKKQGLLLYGRLRESRFEDGKLPSRKIDALDHFAKCFLILKLYHHKVDKSKWEMPTGSNESEAKSWKAIRVDLVRCPYDRFAFALLGWTGSRMFERDLRRYATHEKKMMLDNHALYDLTKKIFLKAKSEEEIFAHLGLEYLEPSERNA

SEQ ID NO: 1193 - DNA, 1587 bp, synthetic construct
  misc_feature 1..1587: note = Variant of terminal deoxynucleotidyltransferase
  source 1..1587: mol_type = other DNA
atgcaccatcatcatcatcatggcggtagcggcagccacggcattcgtaccatcgattcggacttcgggaagaaacgccagaagaagatggataaccacgatagttccgccatctatgaaatcaaatttcacgagtttgtgctgttcattctcgaagagaaaatgggtgcgacgcgtcgtacttttctgacagatttagcccgcaagaaagggttccgcgtcgagaatgaactgtcagacagcgttacccacatcgtggcagaaaataattcacgctctgaagtattggcttggctgaagactcacaagatggagaagaccaagcaattcgaactgctggatattagctggcttatcgaaagcatgaaagttggtaaaccggtggacaccaaggggaaataccagttgatggaatcgggtgagatgagtgcgaacccagatccgacagagggtcgtgaaaacgagctgcctcctactacgaagaccatttctcagtatgcgtgtcaacgccgcaccaccctgaacaaccataatcaacgttttacggacgcactggaaattcttgcggaaaattacgagttcaaacgcaacgatgatacttgtctgacctttatgcgtgctatttccgtgctgaaatgccttccgtttgaggtagttagcctgaaagacacggaaggattgccctggatcggtgatgaagtcaaagggattatggaagaaatcatcgaggtcggtgaatcgctggaagtgcaggccgtgctcaatgatgagcgctatcaaagcttcaaactgtttaagagtgtctttggagtgggggtgaagacagcagacaaatggtaccgtatgggtctgcgcacgctcgaggatgttcgttccagcaagaccctgaagttgaccccgatgcagaaagcgggtctgtgctattatgaagatcttgctgatggcgttacgaaagccgaagctgacgcgatttctctgctggttcaggatgcagtctggactttcgacccggatgcgctggtggagattacgggtggatttcgtcgtgggaaaccttttggtcacgacgttgatctgcttatcacatctccgggagctgagaaagaacaagaagaccagctcctgcagaaagtgaccaatctgtggaagaaacaagggttgttgctgtacggtcgtctgcgtgaaagtcgctttgaagatgggaaactcccatcccgcaagatcgatgccctggaccattttgcgaaatgctttctgatcctcaaactttatcaccataaagtggacaaaagcaaatgggaaatgccgacgggttcgaacgaaagcgaggccaaaagttggaaagcaattcgcgtagatctggttcgttgtccctacgatcgttttgcgtttgcgttgttgggttggaccggaagccgcatgttcgaacgtgatctgcgcacttacgccacccacgagaagaagatgatgctggacaatcatgcgctgtatgacctgaccaagaaaatctttctcaaagctaaatcggaagaggaaattttcgcacatctggggcttgaatacctggaaccgtccgaacgtaacgca

SEQ ID NO: 1194 - protein, 529 aa, synthetic construct
  REGION 1..529: note = Variant of terminal deoxynucleotidyltransferase
MHHHHHHGGSGSHGIRTIDSDFGKKRQKKMDNHDSSAIYEIKFHEFVLFILEEKMGATRRTFLTDLARKKGFRVENELSDSVTHIVAENNSRSEVLAWLKTHKMEKTKQFELLDISWLIESMKVGKPVDTKGKYQLMESGEMSANPDPTEGRENELPPTTKTISQYACQRRTTLNNHNQRFTDALEILAENYEFKRNDDTCLTFMRAISVLKCLPFEVVSLKDTEGLPWIGDEVKGIMEEIIEVGESLEVQAVLNDERYQSFKLFKSVFGVGVKTADKWYRMGLRTLEDVRSSKTLKLTPMQKAGLCYYEDLADGVTKAEADAISLLVQDAVWTFDPDALVEITGGFRRGKPFGHDVDLLITSPGAEKEQEDQLLQKVTNLWKKQGLLLYGRLRESRFEDGKLPSRKIDALDHFAKCFLILKLYHHKVDKSKWEMPTGSNESEAKSWKAIRVDLVRCPYDRFAFALLGWTGSRMFERDLRTYATHEKKMMLDNHALYDLTKKIFLKAKSEEEIFAHLGLEYLEPSERNA

SEQ ID NO: 1195 - DNA, 1587 bp, synthetic construct
  misc_feature 1..1587: note = Variant of terminal deoxynucleotidyltransferase
  source 1..1587: mol_type = other DNA
atgcaccatcatcatcatcatggcggtagcggcagccacggcattcgtaccatcgattcggacttcgggaagaaacgccagaagaagatggataaccacgatagttccgccatctatgaaatcaaatttcacgagtttgtgctgttcattctcgaagagaaaatgggtgcgacgcgtcgtacttttctgacagatttagcccgcaagaaagggttccgcgtcgagaatgaactgtcagacagcgttacccacatcgtggcagaaaataattcacgctctgaagtattggcttggctgaagactcacaagatggagaagaccaagcaattcgaactgctggatattagctggcttatcgaaagcatgaaagttggtaaaccggtggacaccaaggggaaataccagttgatggaatcgggtgagatgagtgcgaacccagatccgacagagggtcgtgaaaacgagctgcctcctactacgaagaccatttctcagtatgcgtgtcaacgccgcaccaccctgaacaaccataatcaacgttttacggacgcactggaaattcttgcggaaaattacgagttcaaacgcaacgatgatacttgtctgacctttatgcgtgctatttccgtgctgaaatgccttccgtttgaggtagttagcctgaaagacacggaaggattgccctggatcggtgatgaagtcaaagggattatggaagaaatcatcgaggtcggtgaatcgctggaagtgcaggccgtgctcaatgatgagcgctatcaaagcttcaaactgtttaagagtgtctttggagtgggggtgaagacagcagacaaatggtaccgtatgggtctgcgcacgctcgaggatgttcgttccagcaagaccctgaagttgaccccgatgcagaaagcgggtctgtgctattatgaagatcttgctgatggcgttacgaaagccgaagctgacgcgatttctctgctggttcaggatgcagtctggactttcgacccggatgcgctggtggagattacgggtggatttcgtcgtgggaaaccttttggtcacgacgttgatctgcttatcacatctccgggagctgagaaagaacaagaagaccagctcctgcagaaagtgaccaatctgtggaagaaacaagggttgttgctgtacggtcgtctgcgtgaaagtcgctttgaagatgggaaactcccatcccgcaagatcgatgccctggaccattttgcgaaatgctttctgatcctcaaactttatcaccataaagtggacaaaagcaaatgggaaatgccgacgggttcgaacgaaagcgaggccaaaagttggaaagcaattcgcgtagatctggttcgttgtccctacgatcgttttgcgtttgcgttgttgggtcagaccggaagccgcatgttcgaacgtgatctgcgccgctacgccacccacgagaagaagatgatgctggacaatcatgcgctgtatgacctgaccaagaaaatctttctcaaagctaaatcggaagaggaaattttcgcacatctggggcttgaatacctggaaccgtccgaacgtaacgca

SEQ ID NO: 1196 - protein, 529 aa, synthetic construct
  REGION 1..529: note = Variant of terminal deoxynucleotidyltransferase
MHHHHHHGGSGSHGIRTIDSDFGKKRQKKMDNHDSSAIYEIKFHEFVLFILEEKMGATRRTFLTDLARKKGFRVENELSDSVTHIVAENNSRSEVLAWLKTHKMEKTKQFELLDISWLIESMKVGKPVDTKGKYQLMESGEMSANPDPTEGRENELPPTTKTISQYACQRRTTLNNHNQRFTDALEILAENYEFKRNDDTCLTFMRAISVLKCLPFEVVSLKDTEGLPWIGDEVKGIMEEIIEVGESLEVQAVLNDERYQSFKLFKSVFGVGVKTADKWYRMGLRTLEDVRSSKTLKLTPMQKAGLCYYEDLADGVTKAEADAISLLVQDAVWTFDPDALVEITGGFRRGKPFGHDVDLLITSPGAEKEQEDQLLQKVTNLWKKQGLLLYGRLRESRFEDGKLPSRKIDALDHFAKCFLILKLYHHKVDKSKWEMPTGSNESEAKSWKAIRVDLVRCPYDRFAFALLGQTGSRMFERDLRRYATHEKKMMLDNHALYDLTKKIFLKAKSEEEIFAHLGLEYLEPSERNA

SEQ ID NO: 1197 - DNA, 1587 bp, synthetic construct
  misc_feature 1..1587: note = Variant of terminal deoxynucleotidyltransferase
  source 1..1587: mol_type = other DNA
atgcaccatcatcatcatcatggcggtagcggcagccacggcattcgtaccatcgattcggacttcgggaagaaacgccagaagaagatggataaccacgatagttccgccatctatgaaatcaaatttcacgagtttgtgctgttcattctcgaagagaaaatgggtgcgacgcgtcgtacttttctgacagatttagcccgcaagaaagggttccgcgtcgagaatgaactgtcagacagcgttacccacatcgtggcagaaaataattcacgctctgaagtattggcttggctgaagactcacaagatggagaagaccaagcaattcgaactgctggatattagctggcttatcgaaagcatgaaagttggtaaaccggtggacaccaaggggaaataccagttgatggaatcgggtgagatgagtgcgaacccagatccgacagagggtcgtgaaaacgagctgcctcctactacgaagaccatttctcagtatgcgtgtcaacgccgcaccaccctgaacaaccataatcaacgttttacggacgcactggaaattcttgcggaaaattacgagttcaaacgcaacgatgatacttgtctgggttttatgcgtgctatttccgtgctgaaatgccttccgtttgaggtagttagcctgaaagacacggaaggattgccctggatcggtgatgaagtcaaagggattatggaagaaatcatcgaggtcggtgaatcgctggaagtgcaggccgtgctcaatgatgagcgctatcaaagcttcaaactgtttaagagtgtctttggagtgggggtgaagacagcagacaaatggtaccgtatgggtctgcgcacgctcgaggatgttcgttccagcaagaccctgaagttgaccccgatgcagaaagcgggtctgtgctattatgaagatcttgctgatggcgttacgaaagccgaagctgacgcgatttctctgctggttcaggatgcagtctggactttcgacccggatgcgctggtggagattacgggtggatttcgtcgtgggaaaccttttggtcacgacgttgatctgcttatcacatctccgggagctgagaaagaacaagaagaccagctcctgcagaaagtgaccaatctgtggaagaaacaagggttgttgctgtacggtcgtctgcgtgaaagtcgctttgaagatgggaaactcccatcccgcaagatcgatgccctggaccattttgcgaaatgctttctgatcctcaaactttatcaccataaagtggacaaaagcaaatgggaaatgccgacgggttcgaacgaaagcgaggccaaaagttggaaagcaattcgcgtagatctggttcgttgtccctacgatcgttttgcgtttgcgttgttgggttggaccggaagccgcatgttcgaacgtgatctgcgccgctacgccacccacgagaagaagatgatgctggacaatcatgcgctgtatgacctgaccaagaaaatctttctcaaagctaaatcggaagaggaaattttcgcacatctggggcttgaatacctggaaccgtccgaacgtaacgca

SEQ ID NO: 1198 - protein, 529 aa, synthetic construct
  REGION 1..529: note = Variant of terminal deoxynucleotidyltransferase
MHHHHHHGGSGSHGIRTIDSDFGKKRQKKMDNHDSSAIYEIKFHEFVLFILEEKMGATRRTFLTDLARKKGFRVENELSDSVTHIVAENNSRSEVLAWLKTHKMEKTKQFELLDISWLIESMKVGKPVDTKGKYQLMESGEMSANPDPTEGRENELPPTTKTISQYACQRRTTLNNHNQRFTDALEILAENYEFKRNDDTCLGFMRAISVLKCLPFEVVSLKDTEGLPWIGDEVKGIMEEIIEVGESLEVQAVLNDERYQSFKLFKSVFGVGVKTADKWYRMGLRTLEDVRSSKTLKLTPMQKAGLCYYEDLADGVTKAEADAISLLVQDAVWTFDPDALVEITGGFRRGKPFGHDVDLLITSPGAEKEQEDQLLQKVTNLWKKQGLLLYGRLRESRFEDGKLPSRKIDALDHFAKCFLILKLYHHKVDKSKWEMPTGSNESEAKSWKAIRVDLVRCPYDRFAFALLGWTGSRMFERDLRRYATHEKKMMLDNHALYDLTKKIFLKAKSEEEIFAHLGLEYLEPSERNA

SEQ ID NO: 1199 - DNA, 1587 bp, synthetic construct
  misc_feature 1..1587: note = Variant of terminal deoxynucleotidyltransferase
  source 1..1587: mol_type = other DNA
atgcaccatcatcatcatcatggcggtagcggcagccacggcattcgtaccatcgattcggacttcgggaagaaacgccagaagaagatggataaccacgatagttccgccatctatgaaatcaaatttcacgagtttgtgctgttcattctcgaagagaaaatgggtgcgacgcgtcgtacttttctgacagatttagcccgcaagaaagggttccgcgtcgagaatgaactgtcagacagcgttacccacatcgtggcagaaaataattcacgctctgaagtattggcttggctgaagactcacaagatggagaagaccaagcaattcgaactgctggatattagctggcttatcgaaagcatgaaagttggtaaaccggtggacaccaaggggaaataccagttgatggaatcgggtgagatgagtgcgaacccagatccgacagagggtcgtgaaaacgagctgcctcctactacgaagaccatttctcagtatgcgtgtcaacgccgcaccaccctgaacaaccataatcaacgttttacggacgcactggaaattcttgcggaaaattacgagttcaaacgcaacgatgatacttgtctgacctttatgcgtgctatttccgtgctgaaatgccttccgtttgaggtagttagcctgaaagacacggaaggattgccctggatcggtgatgaagtcaaagggattatggaagaaatcatcgaggtcggtgaatcgctggaagtgcaggccgtgctcaatgatgagcgctatcaaagcttcaaactgtttaagagtgtctttggagtgggggtgaagacagcagacaaatggtaccgtatgggtctgcgcacgctcgaggatgttcgttccagcaagaccctgaagttgaccccgatgcagaaagcgggtctgtgctattatgaagatcttgctgatggcgttacgaaagccgaagctgacgcgatttctctgctggttcaggatgcagtctggactttcgacccggatgcgctggtggagattacgggtggatttcgtcgtgggaaaccttttggtcacgacgttgatctgcttatcacatctccgggagctgagaaagaacaagaagaccagctcctgcagaaagtgaccaatctgtggaagaaacaagggttgttgctgtacggtcgtctgcgtgaaagtcgctttgaagatgggaaactcccatcccgcaagatcgatgccctggaccattttgcgaaatgctttctgatcctcaaactttatcaccataaagtggacaaaagcaaatgggaaatgccgacgggttcgaacgaaagcgaggccaaaagttggaaagcaattcgcgtagatctggttcgttgtccctacgatgtgtttgcgtttgcgttgttgggttggaccggaagccgcatgttcgaacgtgatctgcgccgctacgccacccacgagaagaagatgatgctggacaatcatgcgctgtatgacctgaccaagaaaatctttctcaaagctaaatcggaagaggaaattttcgcacatctggggcttgaatacctggaaccgtccgaacgtaacgca

SEQ ID NO: 1200 - protein, 529 aa, synthetic construct
  REGION 1..529: note = Variant of terminal deoxynucleotidyltransferase
MHHHHHHGGSGSHGIRTIDSDFGKKRQKKMDNHDSSAIYEIKFHEFVLFILEEKMGATRRTFLTDLARKKGFRVENELSDSVTHIVAENNSRSEVLAWLKTHKMEKTKQFELLDISWLIESMKVGKPVDTKGKYQLMESGEMSANPDPTEGRENELPPTTKTISQYACQRRTTLNNHNQRFTDALEILAENYEFKRNDDTCLTFMRAISVLKCLPFEVVSLKDTEGLPWIGDEVKGIMEEIIEVGESLEVQAVLNDERYQSFKLFKSVFGVGVKTADKWYRMGLRTLEDVRSSKTLKLTPMQKAGLCYYEDLADGVTKAEADAISLLVQDAVWTFDPDALVEITGGFRRGKPFGHDVDLLITSPGAEKEQEDQLLQKVTNLWKKQGLLLYGRLRESRFEDGKLPSRKIDALDHFAKCFLILKLYHHKVDKSKWEMPTGSNESEAKSWKAIRVDLVRCPYDVFAFALLGWTGSRMFERDLRRYATHEKKMMLDNHALYDLTKKIFLKAKSEEEIFAHLGLEYLEPSERNA

SEQ ID NO: 1201 - DNA, 1587 bp, synthetic construct
  misc_feature 1..1587: note = Variant of terminal deoxynucleotidyltransferase
  source 1..1587: mol_type = other DNA
atgcaccatcatcatcatcatggcggtagcggcagccacggcattcgtaccatcgattcggacttcgggaagaaacgccagaagaagatggataaccacgatagttccgccatctatgaaatcaaatttcacgagtttgtgctgttcattctcgaagagaaaatgggtgcgacgcgtcgtacttttctgacagatttagcccgcaagaaagggttccgcgtcgagaatgaactgtcagacagcgttacccacatcgtggcagaaaataattcacgctctgaagtattggcttggctgaagactcacaagatggagaagaccaagcaattcgaactgctggatattagctggcttatcgaaagcatgaaagttggtaaaccggtggacaccaaggggaaataccagttgatggaatcgggtgagatgagtgcgaacccagatccgacagagggtcgtgaaaacgagctgcctcctactacgaagaccatttctcagtatgcgtgtcaacgccgcaccaccctgaacaaccataatcaacgttttacggacgcactggaaattcttgcggaaaattacgagttcaaacgcaacgatgatacttgtctgacctttatgcgtgctatttccgtgctgaaatgccttccgtttgaggtagttagcctgaaagacacggaaggattgccctggatcggtgatgaagtcaaagggattatggaagaaatcatcgaggtcggtgaatcgctggaagtgcaggccgtgctcaatgatgagcgctatcaaagcttcaaactgtttaagagtgtctttggagtgggggtgaagacagcagacaaatggtaccgtatgggtctgcgcacgctcgaggatgttcgttccagcaagaccctgaagttgaccccgatgcagaaagcgggtctgtgctattatgaagatcttgctgatggcgttacgaaagccgaagctgacgcgatttctctgctggttcaggatgcagtctggactttcgacccggatgcgctggtggagattacgggtggatttcgtcgtgggaaaccttttggtcacgacgttgatctgcttatcacatctccgggagctgagaaagaacaagaagaccagctcctgcagaaagtgaccaatctgtggaagaaacaagggttgttgctgtacggtcgtctgcgtgaaagtcgctttgaagatgggaaactcccatcccgcaagacggatgccctggaccattttgcgaaatgctttctgatcctcaaactttatcaccataaagtggacaaaagcaaatgggaaatgccgacgggttcgaacgaaagcgaggccaaaagttggaaagcaattcgcgtagatctggttcgttgtccctacgatcgttttgcgtttgcgttgttgggttggaccggaagccgcatgttcgaacgtgatctgcgccgctacgccacccacgagaagaagatgatgctggacaatcatgcgctgtatgacctgaccaagaaaatctttctcaaagctaaatcggaagaggaaattttcgcacatctggggcttgaatacctggaaccgtccgaacgtaacgca

SEQ ID NO: 1202 - protein, 529 aa, synthetic construct
  REGION 1..529: note = Variant of terminal deoxynucleotidyltransferase
MHHHHHHGGSGSHGIRTIDSDFGKKRQKKMDNHDSSAIYEIKFHEFVLFILEEKMGATRRTFLTDLARKKGFRVENELSDSVTHIVAENNSRSEVLAWLKTHKMEKTKQFELLDISWLIESMKVGKPVDTKGKYQLMESGEMSANPDPTEGRENELPPTTKTISQYACQRRTTLNNHNQRFTDALEILAENYEFKRNDDTCLTFMRAISVLKCLPFEVVSLKDTEGLPWIGDEVKGIMEEIIEVGESLEVQAVLNDERYQSFKLFKSVFGVGVKTADKWYRMGLRTLEDVRSSKTLKLTPMQKAGLCYYEDLADGVTKAEADAISLLVQDAVWTFDPDALVEITGGFRRGKPFGHDVDLLITSPGAEKEQEDQLLQKVTNLWKKQGLLLYGRLRESRFEDGKLPSRKTDALDHFAKCFLILKLYHHKVDKSKWEMPTGSNESEAKSWKAIRVDLVRCPYDRFAFALLGWTGSRMFERDLRRYATHEKKMMLDNHALYDLTKKIFLKAKSEEEIFAHLGLEYLEPSERNA

SEQ ID NO: 1203 - DNA, 1587 bp, synthetic construct
  misc_feature 1..1587: note = Variant of terminal deoxynucleotidyltransferase
  source 1..1587: mol_type = other DNA
atgcaccatcatcatcatcatggcggtagcggcagccacggcattcgtaccatcgattcggacttcgggaagaaacgccagaagaagatggataaccacgatagttccgccatctatgaaatcaaatttcacgagtttgtgctgttcattctcgaagagaaaatgggtgcgacgcgtcgtacttttctgacagatttagcccgcaagaaagggttccgcgtcgagaatgaactgtcagacagcgttacccacatcgtggcagaaaataattcacgctctgaagtattggcttggctgaagactcacaagatggagaagaccaagcaattcgaactgctggatattagctggcttatcgaaagcatgaaagttggtaaaccggtggacaccaaggggaaataccagttgatggaatcgggtgagatgagtgcgaacccagatccgacagagggtcgtgaaaacgagctgcctcctactacgaagaccatttctcagtatgcgtgtcaacgccgcaccaccctgaacaaccataatcaacgttttacggacgcactggaaattcttgcggaaaattacgagttcaaacgcaacgatgatacttgtctgacctttatgcgtgctatttccgtgctgaaatgccttccgtttgaggtagttagcctgaaagacacggaaggattgccctggatcggtgatgaagtcaaagggattatggaagaaatcatcgaggtcggtgaatcgctggaagtgcaggccgtgctcaatgatgagcgctatcaaagcttcaaactgtttaagagtgtctttggagtgggggtgaagacagcagacaaatggtaccgtatgggtctgcgcacgctcgaggatgttcgttccagcaagaccctgaagttgaccccgatgcagaaagcgggtctgtgctattatgaagatcttgctgatggcgttacgaaagccgaagctgcggcgatttctctgctggttcaggatgcagtctggactttcgacccggatgcgctggtggagattacgggtggatttcgtcgtgggaaaccttttggtcacgacgttgatctgcttatcacatctccgggagctgagaaagaacaagaagaccagctcctgcagaaagtgaccaatctgtggaagaaacaagggttgttgctgtacggtcgtctgcgtgaaagtcgctttgaagatgggaaactcccatcccgcaagatcgatgccctggaccattttgcgaaatgctttctgatcctcaaactttatcaccataaagtggacaaaagcaaatgggaaatgccgacgggttcgaacgaaagcgaggccaaaagttggaaagcaattcgcgtagatctggttcgttgtccctacgatcgttttgcgtttgcgttgttgggttggaccggaagccgcatgttcgaacgtgatctgcgccgctacgccacccacgagaagaagatgatgctggacaatcatgcgctgtatgacctgaccaagaaaatctttctcaaagctaaatcggaagaggaaattttcgcacatctggggcttgaatacctggaaccgtccgaacgtaacgca

SEQ ID NO: 1204 - protein, 529 aa, synthetic construct
  REGION 1..529: note = Variant of terminal deoxynucleotidyltransferase
MHHHHHHGGSGSHGIRTIDSDFGKKRQKKMDNHDSSAIYEIKFHEFVLFILEEKMGATRRTFLTDLARKKGFRVENELSDSVTHIVAENNSRSEVLAWLKTHKMEKTKQFELLDISWLIESMKVGKPVDTKGKYQLMESGEMSANPDPTEGRENELPPTTKTISQYACQRRTTLNNHNQRFTDALEILAENYEFKRNDDTCLTFMRAISVLKCLPFEVVSLKDTEGLPWIGDEVKGIMEEIIEVGESLEVQAVLNDERYQSFKLFKSVFGVGVKTADKWYRMGLRTLEDVRSSKTLKLTPMQKAGLCYYEDLADGVTKAEAAAISLLVQDAVWTFDPDALVEITGGFRRGKPFGHDVDLLITSPGAEKEQEDQLLQKVTNLWKKQGLLLYGRLRESRFEDGKLPSRKIDALDHFAKCFLILKLYHHKVDKSKWEMPTGSNESEAKSWKAIRVDLVRCPYDRFAFALLGWTGSRMFERDLRRYATHEKKMMLDNHALYDLTKKIFLKAKSEEEIFAHLGLEYLEPSERNA

SEQ ID NO: 1205 - DNA, 1587 bp, synthetic construct
  misc_feature 1..1587: note = Variant of terminal deoxynucleotidyltransferase
  source 1..1587: mol_type = other DNA
atgcaccatcatcatcatcatggcggtagcggcagccacggcattcgtaccatcgattcggacttcgggaagaaacgccagaagaagatggataaccacgatagttccgccatctatgaaatcaaatttcacgagtttgtgctgttcattctcgaagagaaaatgggtgcgacgcgtcgtacttttctgacagatttagcccgcaagaaagggttccgcgtcgagaatgaactgtcagacagcgttacccacatcgtggcagaaaataattcacgctctgaagtattggcttggctgaagactcacaagatggagaagaccaagcaattcgaactgctggatattagctggcttatcgaaagcatgaaagttggtaaaccggtggacaccaaggggaaataccagttgatggaatcgggtgagatgagtgcgaacccagatccgacagagggtcgtgaaaacgagctgcctcctactacgaagaccatttctcagtatgcgtgtcaacgccgcaccaccctgaacaaccataatcaacgttttacggacgcactggaaattcttgcggaaaattacgagttcaaacgcaacgatgatacttgtctgacctttatgcgtgctatttccgtgctgaaatgccttccgtttgaggtagttagcctgaaagacacggaaggattgccctggatcggtgatgaagtcaaagggattatggaagaaatcatcgaggtcggtgaatcgctggaagtgcaggccgtgctcaatgatgagcgctatcaaagcttcaaactgtttaagagtgtctttggagtgggggtgaagacagcagacaaatggtaccgtatgggtctgcgcacgctcgaggatgttcgttccagcaagaccctgaagttgaccccgatgcagaaagcgggtctgtgctattatgaagatcttgctgatggcgttacgaaagccgaagctgacgcgatttctctgctggttcaggatgcagtctggactttcgacccggatgcgctggtggagattacgggtggatttcgtcgtgggaaaccttttggtcacgacgttgatctgcttatcacatctccgggagctgagaaagaacaagaagaccagctcctgcagaaagtgaccaatctgtggaagaaacaagggttgttgctgtacggtcgtctgttggaaagtcgctttgaagatgggaaactcccatcccgcaagatcgatgccctggaccattttgcgaaatgctttctgatcctcaaactttatcaccataaagtggacaaaagcaaatgggaaatgccgacgggttcgaacgaaagcgaggccaaaagttggaaagcaattcgcgtagatctggttcgttgtccctacgatcgttttgcgtttgcgttgttgggttggaccggaagccgcatgttcgaacgtgatctgcgccgctacgccacccacgagaagaagatgatgctggacaatcatgcgctgtatgacctgaccaagaaaatctttctcaaagctaaatcggaagaggaaattttcgcacatctggggcttgaatacctggaaccgtccgaacgtaacgca

SEQ ID NO: 1206 - protein, 529 aa, synthetic construct
  REGION 1..529: note = Variant of terminal deoxynucleotidyltransferase
MHHHHHHGGSGSHGIRTIDSDFGKKRQKKMDNHDSSAIYEIKFHEFVLFILEEKMGATRRTFLTDLARKKGFRVENELSDSVTHIVAENNSRSEVLAWLKTHKMEKTKQFELLDISWLIESMKVGKPVDTKGKYQLMESGEMSANPDPTEGRENELPPTTKTISQYACQRRTTLNNHNQRFTDALEILAENYEFKRNDDTCLTFMRAISVLKCLPFEVVSLKDTEGLPWIGDEVKGIMEEIIEVGESLEVQAVLNDERYQSFKLFKSVFGVGVKTADKWYRMGLRTLEDVRSSKTLKLTPMQKAGLCYYEDLADGVTKAEADAISLLVQDAVWTFDPDALVEITGGFRRGKPFGHDVDLLITSPGAEKEQEDQLLQKVTNLWKKQGLLLYGRLLESRFEDGKLPSRKIDALDHFAKCFLILKLYHHKVDKSKWEMPTGSNESEAKSWKAIRVDLVRCPYDRFAFALLGWTGSRMFERDLRRYATHEKKMMLDNHALYDLTKKIFLKAKSEEEIFAHLGLEYLEPSERNA

SEQ ID NO: 1207 - DNA, 1587 bp, synthetic construct; identical to SEQ ID NO: 1093
  misc_feature 1..1587: note = Variant of terminal deoxynucleotidyltransferase
  source 1..1587: mol_type = other DNA

SEQ ID NO: 1208 - protein, 529 aa, synthetic construct; identical to SEQ ID NO: 1094
  REGION 1..529: note = Variant of terminal deoxynucleotidyltransferase

SEQ ID NO: 1209 - DNA, 1587 bp, synthetic construct
  misc_feature 1..1587: note = Variant of terminal deoxynucleotidyltransferase
  source 1..1587: mol_type = other DNA
atgcaccatcatcatcatcatggcggtagcggcagccacggcattcgtaccatcgattcggacttcgggaagaaacgccagaagaagatggataaccacgatagttccgccatctatgaaatcaaatttcacgagtttgtgctgttcattctcgaagagaaaatgggtgcgacgcgtcgtacttttctgacagatttagcccgcaagaaagggttccgcgtcgagaatgaactgtcagacagcgttacccacatcgtggcagaaaataattcacgctctgaagtattggcttggctgaagactcacaagatggagaagaccaagcaattcgaactgctggatattagctggcttatcgaaagcatgaaagttggtaaaccggtggacaccaaggggaaataccagttgatggaatcgggtgagatgagtgcgaacccagatccgacagagggtcgtgaaaacgagctgcctcctactacgaagaccatttctcagtatgcgtgtcaacgccgcaccaccctgaacaaccataatcaacgttttacggacgcactggaaattcttgcggaaaattacgagttcaaacgcaacgatgatacttgtctgacctttatgcgtgctatttccgtgctgaaatgccttccgtttgaggtagttagcctgaaagacacggaaggattgccctggatcggtgatgaagtcaaagggattatggaagaaatcatcgaggtcggtgaatcgctggaagtgcaggccgtgctcaatgatgagcgctatcaaagcttcaaactgtttaagagtgtctttggagtgggggtgaagacagcagacaaatggtaccgtatgggtctgcgcacgctcgaggatgttcgttccagcaagaccctgaagttgaccccgatgcagaaagcgggtctgtgctattatgaagatcttgctgatggcgttacgaaagccgaagctgacgcgatttctctgctggttcaggatgcagtctggactttcgacccggatgcgctggtggagattacgggtggatttcgtcgtgggaaaccttttggtcacgacgttgatctgcttatcacatctccgggagctgagaaagaacaagaagaccagctcctgcagaaagtgaccaatctgtggaagaaacaagggttgttgctgtacggtcgtctgcgtgaaagtcgctttgaagatgggaaactcccatcccgcaagatcgatgccctggaccattttgcgaaatgctttctgatcctcaaactttatcaccataaagtggacaaaagcaaatgggaaatgccgacgggttcgaacgaaagcgaggccaaaagttggaaagcaattcgcgtagatctggttcgttgtccctacgatagttttgcgtttgcgttgttgggttggaccggaagccgcatgttcgaacgtgatctgcgccgctacgccacccacgagaagaagatgatgctggacaatcatgcgctgtatgacctgaccaagaaaatctttctcaaagctaaatcggaagaggaaattttcgcacatctggggcttgaatacctggaaccgtccgaacgtaacgca

SEQ ID NO: 1210 - protein, 529 aa, synthetic construct
  REGION 1..529: note = Variant of terminal deoxynucleotidyltransferase
MHHHHHHGGSGSHGIRTIDSDFGKKRQKKMDNHDSSAIYEIKFHEFVLFILEEKMGATRRTFLTDLARKKGFRVENELSDSVTHIVAENNSRSEVLAWLKTHKMEKTKQFELLDISWLIESMKVGKPVDTKGKYQLMESGEMSANPDPTEGRENELPPTTKTISQYACQRRTTLNNHNQRFTDALEILAENYEFKRNDDTCLTFMRAISVLKCLPFEVVSLKDTEGLPWIGDEVKGIMEEIIEVGESLEVQAVLNDERYQSFKLFKSVFGVGVKTADKWYRMGLRTLEDVRSSKTLKLTPMQKAGLCYYEDLADGVTKAEADAISLLVQDAVWTFDPDALVEITGGFRRGKPFGHDVDLLITSPGAEKEQEDQLLQKVTNLWKKQGLLLYGRLRESRFEDGKLPSRKIDALDHFAKCFLILKLYHHKVDKSKWEMPTGSNESEAKSWKAIRVDLVRCPYDSFAFALLGWTGSRMFERDLRRYATHEKKMMLDNHALYDLTKKIFLKAKSEEEIFAHLGLEYLEPSERNA

SEQ ID NO: 1211 - DNA, 1587 bp, synthetic construct
  misc_feature 1..1587: note = Variant of terminal deoxynucleotidyltransferase
  source 1..1587: mol_type = other DNA
atgcaccatcatcatcatcatggcggtagcggcagccacggcattcgtaccatcgattcggacttcgggaagaaacgccagaagaagatggataaccacgatagttccgccatctatgaaatcaaatttcacgagtttgtgctgttcattctcgaagagaaaatgggtgcgacgcgtcgtacttttctgacagatttagcccgcaagaaagggttccgcgtcgagaatgaactgtcagacagcgttacccacatcgtggcagaaaataattcacgctctgaagtattggcttggctgaagactcacaagatggagaagaccaagcaattcgaactgctggatattagctggcttatcgaaagcatgaaagttggtaaaccggtggacaccaaggggaaataccagttgatggaatcgggtgagatgagtgcgaacccagatccgacagagggtcgtgaaaacgagctgcctcctactacgaagaccatttctcagtatgcgtgtcaacgccgcaccaccctgaacaaccataatcaacgttttacggacgcactggaaattcttgcggaaaattacgagttcaaacgcaacgatgatacttgtctgacctttatgcgtgctatttccgtgctgaaatgccttccgtttgaggtagttagcctgaaagacacggaaggattgccctggatcggtgatgaagtcaaagggattatggaagaaatcatcgaggtcggtgaatcgctggaagtgcaggccgtgctcaatgatgagcgctatcaaagcttcaaactgtttaagagtgtctttggagtgggggtgaagacagcagacaaatggtaccgtatgggtctgcgcacgctcgaggatgttcgttccagcaagaccctgaagttgaccccgatgcagaaagcgggtctgtgctattatgaagatcttgctgatggcgttacgaaagccgaagctgacgcgatttctctgctggttcaggatgcagtctggactttcgacccggatgcgctggtggagattacgggtggatttcgtcgtgggaaaccttttggtcacgacgttgatctgcttatcacatctccgggagctgagaaagaacaagaagaccagctcctgcagaaagtgaccaatctgtggaagaaacaagggttgttgctgtacggtcgtctgatggaaagtcgctttgaagatgggaaactcccatcccgcaagatcgatgccctggaccattttgcgaaatgctttctgatcctcaaactttatcaccataaagtggacaaaagcaaatgggaaatgccgacgggttcgaacgaaagcgaggccaaaagttggaaagcaattcgcgtagatctggttcgttgtccctacgatcgttttgcgtttgcgttgttgggttggaccggaagccgcatgttcgaacgtgatctgcgccgctacgccacccacgagaagaagatgatgctggacaatcatgcgctgtatgacctgaccaagaaaatctttctcaaagctaaatcggaagaggaaattttcgcacatctggggcttgaatacctggaaccgtccgaacgtaacgca

SEQ ID NO: 1212 - protein, 529 aa, synthetic construct
  REGION 1..529: note = Variant of terminal deoxynucleotidyltransferase
MHHHHHHGGSGSHGIRTIDSDFGKKRQKKMDNHDSSAIYEIKFHEFVLFILEEKMGATRRTFLTDLARKKGFRVENELSDSVTHIVAENNSRSEVLAWLKTHKMEKTKQFELLDISWLIESMKVGKPVDTKGKYQLMESGEMSANPDPTEGRENELPPTTKTISQYACQRRTTLNNHNQRFTDALEILAENYEFKRNDDTCLTFMRAISVLKCLPFEVVSLKDTEGLPWIGDEVKGIMEEIIEVGESLEVQAVLNDERYQSFKLFKSVFGVGVKTADKWYRMGLRTLEDVRSSKTLKLTPMQKAGLCYYEDLADGVTKAEADAISLLVQDAVWTFDPDALVEITGGFRRGKPFGHDVDLLITSPGAEKEQEDQLLQKVTNLWKKQGLLLYGRLMESRFEDGKLPSRKIDALDHFAKCFLILKLYHHKVDKSKWEMPTGSNESEAKSWKAIRVDLVRCPYDRFAFALLGWTGSRMFERDLRRYATHEKKMMLDNHALYDLTKKIFLKAKSEEEIFAHLGLEYLEPSERNA

SEQ ID NO: 1213 - DNA, 1587 bp, synthetic construct
  misc_feature 1..1587: note = Variant of terminal deoxynucleotidyltransferase
  source 1..1587: mol_type = other DNA
atgcaccatcatcatcatcatggcggtagcggcagccacggcattcgtaccatcgattcggacttcgggaagaaacgccagaagaagatggataaccacgatagttccgccatctatgaaatcaaatttcacgagtttgtgctgttcattctcgaagagaaaatgggtgcgacgcgtcgtacttttctgacagatttagcccgcaagaaagggttccgcgtcgagaatgaactgtcagacagcgttacccacatcgtggcagaaaataattcacgctctgaagtattggcttggctgaagactcacaagatggagaagaccaagcaattcgaactgctggatattagctggcttatcgaaagcatgaaagttggtaaaccggtggacaccaaggggaaataccagttgatggaatcgggtgagatgagtgcgaacccagatccgacagagggtcgtgaaaacgagctgcctcctactacgaagaccatttctcagtatgcgtgtcaacgccgcaccaccctgaacaaccataatcaacgttttacggacgcactggaaattcttgcggaaaattacgagttcaaacgcaacgatgatacttgtctgacctttatgcgtgctatttccgtgctgaaatgccttccgtttgaggtagttagcctgaaagacacggaaggattgccctggatcggtgatgaagtcaaagggattatggaagaaatcatcgaggtcggtgaatcgctggaagtgcaggccgtgctcaatgatgagcgctatcaaagcttcaaactgtttaagagtgtctttggagtgggggtgaagacagcagacaaatggtaccgtatgggtctgcgcacgctcgaggatgttcgttccagcaagaccctgaagttgaccccgatgcagaaagcgggtctgtgctattatgaagatcttgctgatggcgttacgaaagccgaagctgacgcgatttctctgctggttcaggatgcagtctggactttcgacccggatgcgctggtggagattacgggtggatttcgtcgtgggaaaccttttggtcacgacgttgatctgcttatcacatctccgggagctgagaaagaacaagaagaccagctcctgcagaaagtgaccaatctgtggaagaaacaagggttgttgctgtacggtcgtctgcgtgaaagtcgctttgaagatgggaaactcccatcccgcaagatcgatgccctggaccattttgcgaaatgctttctgatcctcaaactttatcaccataaagtggacaaaagcaaatgggaaatgccgacgggttcgaacgaaagcgaggccaaaagttggaaagcaattcgcgtagatctggttcgttgtccctacgatgggtttgcgtttgcgttgttgggttggaccggaagccgcatgttcgaacgtgatctgcgccgctacgccacccacgagaagaagatgatgctggacaatcatgcgctgtatgacctgaccaagaaaatctttctcaaagctaaatcggaagaggaaattttcgcacatctggggcttgaatacctggaaccgtccgaacgtaacgca

SEQ ID NO: 1214 - protein, 529 aa, synthetic construct; identical to SEQ ID NO: 1100
  REGION 1..529: note = Variant of terminal deoxynucleotidyltransferase

SEQ ID NO: 1215 - DNA, 1587 bp, synthetic construct
  misc_feature 1..1587: note = Variant of terminal deoxynucleotidyltransferase
  source 1..1587: mol_type = other DNA
atgcaccatcatcatcatcatggcggtagcggcagccacggcattcgtaccatcgattcggacttcgggaagaaacgccagaagaagatggataaccacgatagttccgccatctatgaaatcaaatttcacgagtttgtgctgttcattctcgaagagaaaatgggtgcgacgcgtcgtacttttctgacagatttagcccgcaagaaagggttccgcgtcgagaatgaactgtcagacagcgttacccacatcgtggcagaaaataattcacgctctgaagtattggcttggctgaagactcacaagatggagaagaccaagcaattcgaactgctggatattagctggcttatcgaaagcatgaaagttggtaaaccggtggacaccaaggggaaataccagttgatggaatcgggtgagatgagtgcgaacccagatccgacagagggtcgtgaaaacgagctgcctcctactacgaagaccatttctcagtatgcgtgtcaacgccgcaccaccctgaacaaccataatcaacgttttacggacgcactggaaattcttgcggaaaattacgagttcaaacgcaacgatgatacttgtctgacctttatgcgtgctatttccgtgctgaaatgccttccgtttgaggtagttagcctgaaagacacggaaggattgccctggatcggtgatgaagtcaaagggattatggaagaaatcatcgaggtcggtgaatcgctggaagtgcaggccgtgctcaatgatgagcgctatcaaagcttcaaactgtttaagagtgtctttggagtgggggtgaagacagcagacaaatggtaccgtatgggtctgcgcacgctcgaggatgttcgttccagcaagaccctgaagttgaccccgatgcagaaagcgggtctgtgctattatgaagatcttgctgatggcgttacgaaagccgaagctgacgcgatttctctgctggttcaggatgcagtctggactttcgacccggatgcgctggtggagattacgggtggatttcgtcgtgggaaaccttttggtcacgacgttgatctgcttatcacatctccgggagctgagaaagaacaagaagaccagctcctgcagaaagtgaccaatctgtggaagaaacaagggttgttgctgtacggtcgtctgcgtgaaagtcgctttgaagatgggaaactcccatcccgcaagatcgatgccctggaccattttgcgaaatgctttctgatcctcaaactttatcaccataaagtggacaaaagcaaatgggaaatgccgacgggttcgaacgaaagcgaggccaaaagttggaaagcaattcgcgtagatctggttcgttgtccctacgatgcgtttgcgtttgcgttgttgggttggaccggaagccgcatgttcgaacgtgatctgcgccgctacgccacccacgagaagaagatgatgctggacaatcatgcgctgtatgacctgaccaagaaaatctttctcaaagctaaatcggaagaggaaattttcgcacatctggggcttgaatacctggaaccgtccgaacgtaacgca

SEQ ID NO: 1216 - protein, 529 aa, synthetic construct
  REGION 1..529: note = Variant of terminal deoxynucleotidyltransferase
MHHHHHHGGSGSHGIRTIDSDFGKKRQKKMDNHDSSAIYEIKFHEFVLFILEEKMGATRRTFLTDLARKKGFRVENELSDSVTHIVAENNSRSEVLAWLKTHKMEKTKQFELLDISWLIESMKVGKPVDTKGKYQLMESGEMSANPDPTEGRENELPPTTKTISQYACQRRTTLNNHNQRFTDALEILAENYEFKRNDDTCLTFMRAISVLKCLPFEVVSLKDTEGLPWIGDEVKGIMEEIIEVGESLEVQAVLNDERYQSFKLFKSVFGVGVKTADKWYRMGLRTLEDVRSSKTLKLTPMQKAGLCYYEDLADGVTKAEADAISLLVQDAVWTFDPDALVEITGGFRRGKPFGHDVDLLITSPGAEKEQEDQLLQKVTNLWKKQGLLLYGRLRESRFEDGKLPSRKIDALDHFAKCFLILKLYHHKVDKSKWEMPTGSNESEAKSWKAIRVDLVRCPYDAFAFALLGWTGSRMFERDLRRYATHEKKMMLDNHALYDLTKKIFLKAKSEEEIFAHLGLEYLEPSERNA

SEQ ID NO: 1217 - DNA, 1587 bp, synthetic construct
  misc_feature 1..1587: note = Variant of terminal deoxynucleotidyltransferase
  source 1..1587: mol_type = other DNA
atgcaccatcatcatcatcatggcggtagcggcagccacggcattcgtaccatcgattcggacttcgggaagaaacgccagaagaagatggataaccacgatagttccgccatctatgaaatcaaatttcacgagtttgtgctgttcattctcgaagagaaaatgggtgcgacgcgtcgtacttttctgacagatttagcccgcaagaaagggttccgcgtcgagaatgaactgtcagacagcgttacccacatcgtggcagaaaataattcacgctctgaagtattggcttggctgaagactcacaagatggagaagaccaagcaattcgaactgctggatattagctggcttatcgaaagcatgaaagttggtaaaccggtggacaccaaggggaaataccagttgatggaatcgggtgagatgagtgcgaacccagatccgacagagggtcgtgaaaacgagctgcctcctactacgaagaccatttctcagtatgcgtgtcaacgccgcaccaccctgaacaaccataatcaacgttttacggacgcactggaaattcttgcggaaaattacgagttcaaacgcaacgatgatacttgtctgacctttatgcgtgctatttccgtgctgaaatgccttccgtttgaggtagttagcctgaaagacacggaaggattgccctggatcggtgatgaagtcaaagggattatggaagaaatcatcgaggtcggtgaatcgctggaagtgcaggccgtgctcaatgatgagcgctatcaaagcttcaaactgtttaagagtgtctttggagtgggggtgaagacagcagacaaatggtaccgtatgggtctgcgcacgctcgaggatgttcgttccagcaagaccctgaagttgaccccgatgcagaaagcgggtctgtgctattatgaagatcttgctgatggcgttacgaaagccgaagctgacgcgatttctctgctggttcaggatgcagtctggactttcgacccggatgcgctggtggagattacgggtggatttcgtcgtgggaaaccttttggtcacgacgttgatctgcttatcacatctccgggagctgagaaagaacaagaagaccagctcctgcagaaagtgaccaatctgtggaagaaacaagggttgttgctgtacggtcgtctgcgtgaaagtcgctttgaagatgggaaactcccatcccgcaagatcgatgccctggaccattttgcgaaatgctttctgatcctcaaactttatcaccataaagtggacaaaagcaaatgggaaatgccgacgggttcgaacgaaagcgaggccaaaagttggaaagcaattcgcgtagatctggttcgttgtccctacgatcgtttggcgtttgcgttgttgggttggaccggaagccgcatgttcgaacgtgatctgcgccgctacgccacccacgagaagaagatgatgctggacaatcatgcgctgtatgacctgaccaagaaaatctttctcaaagctaaatcggaagaggaaattttcgcacatctggggcttgaatacctggaaccgtccgaacgtaacgca

SEQ ID NO: 1218 - protein, 529 aa, synthetic construct
  REGION 1..529: note = Variant of terminal deoxynucleotidyltransferase
MHHHHHHGGSGSHGIRTIDSDFGKKRQKKMDNHDSSAIYEIKFHEFVLFILEEKMGATRRTFLTDLARKKGFRVENELSDSVTHIVAENNSRSEVLAWLKTHKMEKTKQFELLDISWLIESMKVGKPVDTKGKYQLMESGEMSANPDPTEGRENELPPTTKTISQYACQRRTTLNNHNQRFTDALEILAENYEFKRNDDTCLTFMRAISVLKCLPFEVVSLKDTEGLPWIGDEVKGIMEEIIEVGESLEVQAVLNDERYQSFKLFKSVFGVGVKTADKWYRMGLRTLEDVRSSKTLKLTPMQKAGLCYYEDLADGVTKAEADAISLLVQDAVWTFDPDALVEITGGFRRGKPFGHDVDLLITSPGAEKEQEDQLLQKVTNLWKKQGLLLYGRLRESRFEDGKLPSRKIDALDHFAKCFLILKLYHHKVDKSKWEMPTGSNESEAKSWKAIRVDLVRCPYDRLAFALLGWTGSRMFERDLRRYATHEKKMMLDNHALYDLTKKIFLKAKSEEEIFAHLGLEYLEPSERNA

SEQ ID NO: 1219 - DNA, 1587 bp, synthetic construct
  misc_feature 1..1587: note = Variant of terminal deoxynucleotidyltransferase
  source 1..1587: mol_type = other DNA
atgcaccatcatcatcatcatggcggtagcggcagccacggcattcgtaccatcgattcggacttcgggaagaaacgccagaagaagatggataaccacgatagttccgccatctatgaaatcaaatttcacgagtttgtgctgttcattctcgaagagaaaatgggtgcgacgcgtcgtacttttctgacagatttagcccgcaagaaagggttccgcgtcgagaatgaactgtcagacagcgttacccacatcgtggcagaaaataattcacgctctgaagtattggcttggctgaagactcacaagatggagaagaccaagcaattcgaactgctggatattagctggcttatcgaaagcatgaaagttggtaaaccggtggacaccaaggggaaataccagttgatggaatcgggtgagatgagtgcgaacccagatccgacagagggtcgtgaaaacgagctgcctcctactacgaagaccatttctcagtatgcgtgtcaacgccgcaccaccctgaacaaccataatcaacgttttacggacgcactggaaattcttgcggaaaattacgagttcaaacgcaacgatgatacttgtctgacctttatgcgtgctatttccgtgctgaaatgccttccgtttgaggtagttagcctgaaagacacggaaggattgccctggatcggtgatgaagtcaaagggattatggaagaaatcatcgaggtcggtgaatcgctggaagtgcaggccgtgctcaatgatgagcgctatcaaagcttcaaactgtttaagagtgtctttggagtgggggtgaagacagcagacaaatggtaccgtatgggtctgcgcacgctcgaggatgttcgttccagcaagaccctgaagttgaccccgatgcagaaagcgggtctgtgctattatgaagatcttgctgatggcgttacgaaagccgaagctgacgcgatttctctgctggttcaggatgcagtctggactttcgacccggatgcgctggtggagattacgggtggatttcgtcgtgggaaaccttttggtcacgacgttgatctgcttatcacatctccgggagctgagaaagaacaagaagaccagctcctgcagaaagtgaccaatctgtggaagaaacaagggttgttgctgtacggtcgtctgcgtgaaagtcgctttgaagatgggaaactcccatcccgcaagatcgatgccctggaccattttgcgaaatgctttctgatcctcaaactttatcaccataaagtggacaaaagcaaatgggaaatgccgacgggttcgaacgaaagcgaggccaaaagttggaaagcaattcgcgtagatctggttcgttgtccctacgatcgttttgcgtttgcgttgttgggttggaccggaagccgcatgttcgaacaggatctgcgccgctacgccacccacgagaagaagatgatgctggacaatcatgcgctgtatgacctgaccaagaaaatctttctcaaagctaaatcggaagaggaaattttcgcacatctggggcttgaatacctggaaccgtccgaacgtaacgca

SEQ ID NO: 1220 - protein, 529 aa, synthetic construct
  REGION 1..529: note = Variant of terminal deoxynucleotidyltransferase
MHHHHHHGGSGSHGIRTIDSDFGKKRQKKMDNHDSSAIYEIKFHEFVLFILEEKMGATRRTFLTDLARKKGFRVENELSDSVTHIVAENNSRSEVLAWLKTHKMEKTKQFELLDISWLIESMKVGKPVDTKGKYQLMESGEMSANPDPTEGRENELPPTTKTISQYACQRRTTLNNHNQRFTDALEILAENYEFKRNDDTCLTFMRAISVLKCLPFEVVSLKDTEGLPWIGDEVKGIMEEIIEVGESLEVQAVLNDERYQSFKLFKSVFGVGVKTADKWYRMGLRTLEDVRSSKTLKLTPMQKAGLCYYEDLADGVTKAEADAISLLVQDAVWTFDPDALVEITGGFRRGKPFGHDVDLLITSPGAEKEQEDQLLQKVTNLWKKQGLLLYGRLRESRFEDGKLPSRKIDALDHFAKCFLILKLYHHKVDKSKWEMPTGSNESEAKSWKAIRVDLVRCPYDRFAFALLGWTGSRMFEQDLRRYATHEKKMMLDNHALYDLTKKIFLKAKSEEEIFAHLGLEYLEPSERNA

SEQ ID NO: 1221 - DNA, 1587 bp, synthetic construct
  misc_feature 1..1587: note = Variant of terminal deoxynucleotidyltransferase
  source 1..1587: mol_type = other DNA
atgcaccatcatcatcatcatggcggtagcggcagccacggcattcgtaccatcgattcggacttcgggaagaaacgccagaagaagatggataaccacgatagttccgccatctatgaaatcaaatttcacgagtttgtgctgttcattctcgaagagaaaatgggtgcgacgcgtcgtacttttctgacagatttagcccgcaagaaagggttccgcgtcgagaatgaactgtcagacagcgttacccacatcgtggcagaaaataattcacgctctgaagtattggcttggctgaagactcacaagatggagaagaccaagcaattcgaactgctggatattagctggcttatcgaaagcatgaaagttggtaaaccggtggacaccaaggggaaataccagttgatggaatcgggtgagatgagtgcgaacccagatccgacagagggtcgtgaaaacgagctgcctcctactacgaagaccatttctcagtatgcgtgtcaacgccgcaccaccctgaacaaccataatcaacgttttacggacgcactggaaattcttgcggaaaattacgagttcaaacgcaacgatgatacttgtctgatgtttatgcgtgctatttccgtgctgaaatgccttccgtttgaggtagttagcctgaaagacacggaaggattgccctggatcggtgatgaagtcaaagggattatggaagaaatcatcgaggtcggtgaatcgctggaagtgcaggccgtgctcaatgatgagcgctatcaaagcttcaaactgtttaagagtgtctttggagtgggggtgaagacagcagacaaatggtaccgtatgggtctgcgcacgctcgaggatgttcgttccagcaagaccctgaagttgaccccgatgcagaaagcgggtctgtgctattatgaagatcttgctgatggcgttacgaaagccgaagctgacgcgatttctctgctggttcaggatgcagtctggactttcgacccggatgcgctggtggagattacgggtggatttcgtcgtgggaaaccttttggtcacgacgttgatctgcttatcacatctccgggagctgagaaagaacaagaagaccagctcctgcagaaagtgaccaatctgtggaagaaacaagggttgttgctgtacggtcgtctgcgtgaaagtcgctttgaagatgggaaactcccatcccgcaagatcgatgccctggaccattttgcgaaatgctttctgatcctcaaactttatcaccataaagtggacaaaagcaaatgggaaatgccgacgggttcgaacgaaagcgaggccaaaagttggaaagcaattcgcgtagatctggttcgttgtccctacgatcgttttgcgtttgcgttgttgggttggaccggaagccgcatgttcgaacgtgatctgcgccgctacgccacccacgagaagaagatgatgctggacaatcatgcgctgtatgacctgaccaagaaaatctttctcaaagctaaatcggaagaggaaattttcgcacatctggggcttgaatacctggaaccgtccgaacgtaacgca

SEQ ID NO: 1222 - protein, 529 aa, synthetic construct
  REGION 1..529: note = Variant of terminal deoxynucleotidyltransferase
MHHHHHHGGSGSHGIRTIDSDFGKKRQKKMDNHDSSAIYEIKFHEFVLFILEEKMGATRRTFLTDLARKKGFRVENELSDSVTHIVAENNSRSEVLAWLKTHKMEKTKQFELLDISWLIESMKVGKPVDTKGKYQLMESGEMSANPDPTEGRENELPPTTKTISQYACQRRTTLNNHNQRFTDALEILAENYEFKRNDDTCLMFMRAISVLKCLPFEVVSLKDTEGLPWIGDEVKGIMEEIIEVGESLEVQAVLNDERYQSFKLFKSVFGVGVKTADKWYRMGLRTLEDVRSSKTLKLTPMQKAGLCYYEDLADGVTKAEADAISLLVQDAVWTFDPDALVEITGGFRRGKPFGHDVDLLITSPGAEKEQEDQLLQKVTNLWKKQGLLLYGRLRESRFEDGKLPSRKIDALDHFAKCFLILKLYHHKVDKSKWEMPTGSNESEAKSWKAIRVDLVRCPYDRFAFALLGWTGSRMFERDLRRYATHEKKMMLDNHALYDLTKKIFLKAKSEEEIFAHLGLEYLEPSERNA

SEQ ID NO: 1223 - DNA, 1587 bp, synthetic construct
  misc_feature 1..1587: note = Variant of terminal deoxynucleotidyltransferase
  source 1..1587: mol_type = other DNA
atgcaccatcatcatcatcatggcggtagcggcagccacggcattcgtaccatcgattcggacttcgggaagaaacgccagaagaagatggataaccacgatagttccgccatctatgaaatcaaatttcacgagtttgtgctgttcattctcgaagagaaaatgggtgcgacgcgtcgtacttttctgacagatttagcccgcaagaaagggttccgcgtcgagaatgaactgtcagacagcgttacccacatcgtggcagaaaataattcacgctctgaagtattggcttggctgaagactcacaagatggagaagaccaagcaattcgaactgctggatattagctggcttatcgaaagcatgaaagttggtaaaccggtggacaccaaggggaaataccagttgatggaatcgggtgagatgagtgcgaacccagatccgacagagggtcgtgaaaacgagctgcctcctactacgaagaccatttctcagtatgcgtgtcaacgccgcaccaccctgaacaaccataatcaacgttttacggacgcactggaaattcttgcggaaaattacgagttcaaacgcaacgatgatacttgtctgacctttatgcgtgctatttccgtgctgaaatgccttccgtttgaggtagttagcctgaaagacacggaaggattgccctggatcggtgatgaagtcaaagggattatggaagaaatcatcgaggtcggtgaatcgctggaagtgcaggccgtgctcaatgatgagcgctatcaaagcttcaaactgtttaagagtgtctttggagtgggggtgaagacagcagacaaatggtaccgtatgggtctgcgcacgctcgaggatgttcgttccagcaagaccctgaagttgaccccgatgcagaaagcgggtctgtgctattatgaagatcttgctgatggcgttacgaaagccgaagctgacgcgatttctctgctggttcaggatgcagtctggactttcgacccggatgcgctggtggagattacgggtggatttcgtcgtgggaaaccttttggtcacgacgttgatctgcttatcacatctccgggagctgagaaagaacaagaagaccagctcctgcagaaagtgaccaatctgtggaagaaacaagggttgttgctgtacggtcgtctgagtgaaagtcgctttgaagatgggaaactcccatcccgcaagatcgatgccctggaccattttgcgaaatgctttctgatcctcaaactttatcaccataaagtggacaaaagcaaatgggaaatgccgacgggttcgaacgaaagcgaggccaaaagttggaaagcaattcgcgtagatctggttcgttgtccctacgatcgttttgcgtttgcgttgttgggttggaccggaagccgcatgttcgaacgtgatctgcgccgctacgccacccacgagaagaagatgatgctggacaatcatgcgctgtatgacctgaccaagaaaatctttctcaaagctaaatcggaagaggaaattttcgcacatctggggcttgaatacctggaaccgtccgaacgtaacgca

SEQ ID NO: 1224 - protein, 529 aa, synthetic construct
  REGION 1..529: note = Variant of terminal deoxynucleotidyltransferase
MHHHHHHGGSGSHGIRTIDSDFGKKRQKKMDNHDSSAIYEIKFHEFVLFILEEKMGATRRTFLTDLARKKGFRVENELSDSVTHIVAENNSRSEVLAWLKTHKMEKTKQFELLDISWLIESMKVGKPVDTKGKYQLMESGEMSANPDPTEGRENELPPTTKTISQYACQRRTTLNNHNQRFTDALEILAENYEFKRNDDTCLTFMRAISVLKCLPFEVVSLKDTEGLPWIGDEVKGIMEEIIEVGESLEVQAVLNDERYQSFKLFKSVFGVGVKTADKWYRMGLRTLEDVRSSKTLKLTPMQKAGLCYYEDLADGVTKAEADAISLLVQDAVWTFDPDALVEITGGFRRGKPFGHDVDLLITSPGAEKEQEDQLLQKVTNLWKKQGLLLYGRLSESRFEDGKLPSRKIDALDHFAKCFLILKLYHHKVDKSKWEMPTGSNESEAKSWKAIRVDLVRCPYDRFAFALLGWTGSRMFERDLRRYATHEKKMMLDNHALYDLTKKIFLKAKSEEEIFAHLGLEYLEPSERNA

SEQ ID NO: 1225 - DNA, 1587 bp, synthetic construct; identical to SEQ ID NO: 1097
  misc_feature 1..1587: note = Variant of terminal deoxynucleotidyltransferase
  source 1..1587: mol_type = other DNA

SEQ ID NO: 1226 - protein, 529 aa, synthetic construct; identical to SEQ ID NO: 1098
  REGION 1..529: note = Variant of terminal deoxynucleotidyltransferase

SEQ ID NO: 1227 - DNA, 1587 bp, synthetic construct
  misc_feature 1..1587: note = Variant of terminal deoxynucleotidyltransferase
  source 1..1587: mol_type = other DNA
atgcaccatcatcatcatcatggcggtagcggcagccacggcattcgtaccatcgattcggacttcgggaagaaacgccagaagaagatggataaccacgatagttccgccatctatgaaatcaaatttcacgagtttgtgctgttcattctcgaagagaaaatgggtgcgacgcgtcgtacttttctgacagatttagcccgcaagaaagggttccgcgtcgagaatgaactgtcagacagcgttacccacatcgtggcagaaaataattcacgctctgaagtattggcttggctgaagactcacaagatggagaagaccaagcaattcgaactgctggatattagctggcttatcgaaagcatgaaagttggtaaaccggtggacaccaaggggaaataccagttgatggaatcgggtgagatgagtgcgaacccagatccgacagagggtcgtgaaaacgagctgcctcctactacgaagaccatttctcagtatgcgtgtcaacgccgcaccaccctgaacaaccataatcaacgttttacggacgcactggaaattcttgcggaaaattacgagttcaaacgcaacgatgatacttgtctgacctttatgcgtgctatttccgtgctgaaatgccttccgtttgaggtagttagcctgaaagacacggaaggattgccctggatcggtgatgaagtcaaagggattatggaagaaatcatcgaggtcggtgaatcgctggaagtgcaggccgtgctcaatgatgagcgctatcaaagcttcaaactgtttaagagtgtctttggagtgggggtgaagacagcagacaaatggtaccgtatgggtctgcgcacgctcgaggatgttcgttccagcaagaccctgaagttgaccccgatgcagaaagcgggtctgtgctattatgaagatcttgctgatggcgttacgaaagccgaagctgacgcgatttctctgctggttcaggatgcagtctggactttcgacccggatgcgctggtggagattacgggtggatttcgtcgtgggaaaccttttggtcacgacgttgatctgcttatcacatctccgggagctgagaaagaacaagaagaccagctcctgcagaaagtgaccaatctgtggaagaaacaagggttgttgctgtacggtcgtctgcgtgaaagtcgctttgaagatgggaaactcccatcccgcaagatcgatgccctggaccattttgcgaaatgctttctgatcctcaaactttatcaccataaagtggacaaaagcaaatgggaaatgccgacgggttcgaacgaaagcgaggccaaaagttggaaagcaattcgcgtagatctggttcgttgtccctacgatcgttttgcgtttgcgttgttgggttggaccggaagccgcatgttcgaacgtgatctgcgccgctacgccacccacgagaagaagatgatgctggacaatcatgggctgtatgacctgaccaagaaaatctttctcaaagctaaatcggaagaggaaattttcgcacatctggggcttgaatacctggaaccgtccgaacgtaacgca

SEQ ID NO: 1228 - protein, 529 aa, synthetic construct
  REGION 1..529: note = Variant of terminal deoxynucleotidyltransferase
MHHHHHHGGSGSHGIRTIDSDFGKKRQKKMDNHDSSAIYEIKFHEFVLFILEEKMGATRRTFLTDLARKKGFRVENELSDSVTHIVAENNSRSEVLAWLKTHKMEKTKQFELLDISWLIESMKVGKPVDTKGKYQLMESGEMSANPDPTEGRENELPPTTKTISQYACQRRTTLNNHNQRFTDALEILAENYEFKRNDDTCLTFMRAISVLKCLPFEVVSLKDTEGLPWIGDEVKGIMEEIIEVGESLEVQAVLNDERYQSFKLFKSVFGVGVKTADKWYRMGLRTLEDVRSSKTLKLTPMQKAGLCYYEDLADGVTKAEADAISLLVQDAVWTFDPDALVEITGGFRRGKPFGHDVDLLITSPGAEKEQEDQLLQKVTNLWKKQGLLLYGRLRESRFEDGKLPSRKIDALDHFAKCFLILKLYHHKVDKSKWEMPTGSNESEAKSWKAIRVDLVRCPYDRFAFALLGWTGSRMFERDLRRYATHEKKMMLDNHGLYDLTKKIFLKAKSEEEIFAHLGLEYLEPSERNA

SEQ ID NO: 1229 - DNA, 1587 bp, synthetic construct
  misc_feature 1..1587: note = Variant of terminal deoxynucleotidyltransferase
  source 1..1587: mol_type = other DNA
atgcaccatcatcatcatcatggcggtagcggcagccacggcattcgtaccatcgattcggacttcgggaagaaacgccagaagaagatggataaccacgatagttccgccatctatgaaatcaaatttcacgagtttgtgctgttcattctcgaagagaaaatgggtgcgacgcgtcgtacttttctgacagatttagcccgcaagaaagggttccgcgtcgagaatgaactgtcagacagcgttacccacatcgtggcagaaaataattcacgctctgaagtattggcttggctgaagactcacaagatggagaagaccaagcaattcgaactgctggatattagctggcttatcgaaagcatgaaagttggtaaaccggtggacaccaaggggaaataccagttgatggaatcgggtgagatgagtgcgaacccagatccgacagagggtcgtgaaaacgagctgcctcctactacgaagaccatttctcagtatgcgtgtcaacgccgcaccaccctgaacaaccataatcaacgttttacggacgcactggaaattcttgcggaaaattacgagttcaaacgcaacgatgctacttgtctgacctttatgcgtgctatttccgtgctgaaatgccttccgtttgaggtagttagcctgaaagacacggaaggattgccctggatcggtgatgaagtcaaagggattatggaagaaatcatcgaggtcggtgaatcgctggaagtgcaggccgtgctcaatgatgagcgctatcaaagcttcaaactgtttaagagtgtctttggagtgggggtgaagacagcagacaaatggtaccgtatgggtctgcgcacgctcgaggatgttcgttccagcaagaccctgaagttgaccccgatgcagaaagcgggtctgtgctattatgaagatcttgctgatggcgttacgaaagccgaagctgacgcgatttctctgctggttcaggatgcagtctggactttcgacccggatgcgctggtggagattacgggtggatttcgtcgtgggaaaccttttggtcacgacgttgatctgcttatcacatctccgggagctgagaaagaacaagaagaccagctcctgcagaaagtgaccaatctgtggaagaaacaagggttgttgctgtacggtcgtctgcgtgaaagtcgctttgaagatgggaaactcccatcccgcaagatcgatgccctggaccattttgcgaaatgctttctgatcctcaaactttatcaccataaagtggacaaaagcaaatgggaaatgccgacgggttcgaacgaaagcgaggccaaaagttggaaagcaattcgcgtagatctggttcgttgtccctacgatcgttttgcgtttgcgttgttgggttggaccggaagccgcatgttcgaacgtgatctgcgccgctacgccacccacgagaagaagatgatgctggacaatcatgcgctgtatgacctgaccaagaaaatctttctcaaagctaaatcggaagaggaaattttcgcacatctggggcttgaatacctggaaccgtccgaacgtaacgca

SEQ ID NO: 1230 - protein, 529 aa, synthetic construct
  REGION 1..529: note = Variant of terminal deoxynucleotidyltransferase
MHHHHHHGGSGSHGIRTIDSDFGKKRQKKMDNHDSSAIYEIKFHEFVLFILEEKMGATRRTFLTDLARKKGFRVENELSDSVTHIVAENNSRSEVLAWLKTHKMEKTKQFELLDISWLIESMKVGKPVDTKGKYQLMESGEMSANPDPTEGRENELPPTTKTISQYACQRRTTLNNHNQRFTDALEILAENYEFKRNDATCLTFMRAISVLKCLPFEVVSLKDTEGLPWIGDEVKGIMEEIIEVGESLEVQAVLNDERYQSFKLFKSVFGVGVKTADKWYRMGLRTLEDVRSSKTLKLTPMQKAGLCYYEDLADGVTKAEADAISLLVQDAVWTFDPDALVEITGGFRRGKPFGHDVDLLITSPGAEKEQEDQLLQKVTNLWKKQGLLLYGRLRESRFEDGKLPSRKIDALDHFAKCFLILKLYHHKVDKSKWEMPTGSNESEAKSWKAIRVDLVRCPYDRFAFALLGWTGSRMFERDLRRYATHEKKMMLDNHALYDLTKKIFLKAKSEEEIFAHLGLEYLEPSERNA

SEQ ID NO: 1231 - DNA, 1587 bp, synthetic construct; identical to SEQ ID NO: 1103
  misc_feature 1..1587: note = Variant of terminal deoxynucleotidyltransferase
  source 1..1587: mol_type = other DNA

SEQ ID NO: 1232 - protein, 529 aa, synthetic construct; identical to SEQ ID NO: 1104
  REGION 1..529: note = Variant of terminal deoxynucleotidyltransferase

SEQ ID NO: 1233 - DNA, 1587 bp, synthetic construct
  misc_feature 1..1587: note = Variant of terminal deoxynucleotidyltransferase
  source 1..1587: mol_type = other DNA
atgcaccatcatcatcatcatggcggtagcggcagccacggcattcgtaccatcgattcggacttcgggaagaaacgccagaagaagatggataaccacgatagttccgccatctatgaaatcaaatttcacgagtttgtgctgttcattctcgaagagaaaatgggtgcgacgcgtcgtacttttctgacagatttagcccgcaagaaagggttccgcgtcgagaatgaactgtcagacagcgttacccacatcgtggcagaaaataattcacgctctgaagtattggcttggctgaagactcacaagatggagaagaccaagcaattcgaactgctggatattagctggcttatcgaaagcatgaaagttggtaaaccggtggacaccaaggggaaataccagttgatggaatcgggtgagatgagtgcgaacccagatccgacagagggtcgtgaaaacgagctgcctcctactacgaagaccatttctcagtatgcgtgtcaacgccgcaccaccctgaacaaccataatcaacgttttacggacgcactggaaattcttgcggaaaattacgagttcaaacgcaacgatgatacttgtctgacctttatgcgtgctatttccgtgctgaaatgccttccgtttgaggtagttagcctgaaagacacggaaggattgccctggatcggtgatgaagtcaaagggattatggaagaaatcatcgaggtcggtgaatcgctggaagtgcaggccgtgctcaatgatgagcgctatcaaagcttcaaactgtttaagagtgtctttggagtgggggtgaagacagcagacaaatggtaccgtatgggtctgcgcacgctcgaggatgttcgttccagcaagaccctgaagttgaccccgatgcagaaagcgggtctgtgctattatgaagatcttgctgatggcgttacgaaagccgaagctgacgcgatttctctgctggttcaggatgcagtctggactttcgacccggatgcgctggtggagattacgggtggatttcgtcgtgggaaaccttttggtcacgacgttgatctgcttatcacatctccgggagctgagaaagaacaagaagaccagctcctgcagaaagtgaccaatctgtggaagaaacaagggttgttgctgtacggtcgtctgcgtgaaagtcgctttgaagatgggaaactcccatcccgcaagttggatgccctggaccattttgcgaaatgctttctgatcctcaaactttatcaccataaagtggacaaaagcaaatgggaaatgccgacgggttcgaacgaaagcgaggccaaaagttggaaagcaattcgcgtagatctggttcgttgtccctacgatcgttttgcgtttgcgttgttgggttggaccggaagccgcatgttcgaacgtgatctgcgccgctacgccacccacgagaagaagatgatgctggacaatcatgcgctgtatgacctgaccaagaaaatctttctcaaagctaaatcggaagaggaaattttcgcacatctggggcttgaatacctggaaccgtccgaacgtaacgca

SEQ ID NO: 1234 - protein, 529 aa, synthetic construct
  REGION 1..529: note = Variant of terminal deoxynucleotidyltransferase
MHHHHHHGGSGSHGIRTIDSDFGKKRQKKMDNHDSSAIYEIKFHEFVLFILEEKMGATRRTFLTDLARKKGFRVENELSDSVTHIVAENNSRSEVLAWLKTHKMEKTKQFELLDISWLIESMKVGKPVDTKGKYQLMESGEMSANPDPTEGRENELPPTTKTISQYACQRRTTLNNHNQRFTDALEILAENYEFKRNDDTCLTFMRAISVLKCLPFEVVSLKDTEGLPWIGDEVKGIMEEIIEVGESLEVQAVLNDERYQSFKLFKSVFGVGVKTADKWYRMGLRTLEDVRSSKTLKLTPMQKAGLCYYEDLADGVTKAEADAISLLVQDAVWTFDPDALVEITGGFRRGKPFGHDVDLLITSPGAEKEQEDQLLQKVTNLWKKQGLLLYGRLRESRFEDGKLPSRKLDALDHFAKCFLILKLYHHKVDKSKWEMPTGSNESEAKSWKAIRVDLVRCPYDRFAFALLGWTGSRMFERDLRRYATHEKKMMLDNHALYDLTKKIFLKAKSEEEIFAHLGLEYLEPSERNA

SEQ ID NO: 1235 - DNA, 1587 bp, synthetic construct; identical to SEQ ID NO: 1117
  misc_feature 1..1587: note = Variant of terminal deoxynucleotidyltransferase
  source 1..1587: mol_type = other DNA

SEQ ID NO: 1236 - protein, 529 aa, synthetic construct; identical to SEQ ID NO: 1118
  REGION 1..529: note = Variant of terminal deoxynucleotidyltransferase

SEQ ID NO: 1237 - DNA, 1587 bp, synthetic construct
  misc_feature 1..1587: note = Variant of terminal deoxynucleotidyltransferase
  source 1..1587: mol_type = other DNA
atgcaccatcatcatcatcatggcggtagcggcagccacggcattcgtaccatcgattcggacttcgggaagaaacgccagaagaagatggataaccacgatagttccgccatctatgaaatcaaatttcacgagtttgtgctgttcattctcgaagagaaaatgggtgcgacgcgtcgtacttttctgacagatttagcccgcaagaaagggttccgcgtcgagaatgaactgtcagacagcgttacccacatcgtggcagaaaataattcacgctctgaagtattggcttggctgaagactcacaagatggagaagaccaagcaattcgaactgctggatattagctggcttatcgaaagcatgaaagttggtaaaccggtggacaccaaggggaaataccagttgatggaatcgggtgagatgagtgcgaacccagatccgacagagggtcgtgaaaacgagctgcctcctactacgaagaccatttctcagtatgcgtgtcaacgccgcaccaccctgaacaaccataatcaacgttttacggacgcactggaaattcttgcggaaaattacgagttcaaacgcaacgatgatacttgtctgacctttatgcgtgctatttccgtgctgaaatgccttccgtttgaggtagttagcctgaaagacacggaaggattgccctggatcggtgatgaagtcaaagggattatggaagaaatcatcgaggtcggtgaatcgctggaagtgcaggccgtgctcaatgatgagcgctatcaaagcttcaaactgtttaagagtgtctttggagtgggggtgaagacagcagacaaatggtaccgtatgggtctgcgcacgctcgaggatgttcgttccagcaagaccctgaagttgaccccgatgcagaaagcgggtctgtgctattatgaagatcttgctgatggcgttacgaaagccgaagctgacgcgatttctctgctggttcaggatgcagtctggactttcgacccggatgcgctggtggagattacgggtggatttcgtcgtgggaaaccttttggtcacgacgttgatctgcttatcacatctccgggagctgagaaagaacaagaagaccagctcctgcagaaagtgaccaatctgtggaagaaacaagggttgttgctgtacggtcgtctgcgtgaaagtcgctttgaagatgggaaactcccatcccgcaagatcgatgccctggaccattttgcgaaatgctttctgatcctcaaactttatcaccataaagtggacaaaagcaaatgggaaatgccgacgggttcgaacgaaagcgaggccaaaagttggaaagcaattcgcgtagatctggttcgttgtccctacgatcgttttgcgtttgcgttgttgggttggaccggaagccgcatgttcgaacgtgatctgcgccgctacgccacccacgagaagaagatgatgctgagtaatcatgcgctgtatgacctgaccaagaaaatctttctcaaagctaaatcggaagaggaaattttcgcacatctggggcttgaatacctggaaccgtccgaacgtaacgca

SEQ ID NO: 1238 - protein, 529 aa, synthetic construct
  REGION 1..529: note = Variant of terminal deoxynucleotidyltransferase
MHHHHHHGGSGSHGIRTIDSDFGKKRQKKMDNHDSSAIYEIKFHEFVLFILEEKMGATRRTFLTDLARKKGFRVENELSDSVTHIVAENNSRSEVLAWLKTHKMEKTKQFELLDISWLIESMKVGKPVDTKGKYQLMESGEMSANPDPTEGRENELPPTTKTISQYACQRRTTLNNHNQRFTDALEILAENYEFKRNDDTCLTFMRAISVLKCLPFEVVSLKDTEGLPWIGDEVKGIMEEIIEVGESLEVQAVLNDERYQSFKLFKSVFGVGVKTADKWYRMGLRTLEDVRSSKTLKLTPMQKAGLCYYEDLADGVTKAEADAISLLVQDAVWTFDPDALVEITGGFRRGKPFGHDVDLLITSPGAEKEQEDQLLQKVTNLWKKQGLLLYGRLRESRFEDGKLPSRKIDALDHFAKCFLILKLYHHKVDKSKWEMPTGSNESEAKSWKAIRVDLVRCPYDRFAFALLGWTGSRMFERDLRRYATHEKKMMLSNHALYDLTKKIFLKAKSEEEIFAHLGLEYLEPSERNA

SEQ ID NO: 1239 - DNA, 1587 bp, synthetic construct
  misc_feature 1..1587: note = Variant of terminal deoxynucleotidyltransferase
  source 1..1587: mol_type = other DNA
atgcaccatcatcatcatcatggcggtagcggcagccacggcattcgtaccatcgattcggacttcgggaagaaacgccagaagaagatggataaccacgatagttccgccatctatgaaatcaaatttcacgagtttgtgctgttcattctcgaagagaaaatgggtgcgacgcgtcgtacttttctgacagatttagcccgcaagaaagggttccgcgtcgagaatgaactgtcagacagcgttacccacatcgtggcagaaaataattcacgctctgaagtattggcttggctgaagactcacaagatggagaagaccaagcaattcgaactgctggatattagctggcttatcgaaagcatgaaagttggtaaaccggtggacaccaaggggaaataccagttgatggaatcgggtgagatgagtgcgaacccagatccgacagagggtcgtgaaaacgagctgcctcctactacgaagaccatttctcagtatgcgtgtcaacgccgcaccaccctgaacaaccataatcaacgttttacggacgcactggaaattcttgcggaaaattacgagttcaaacgcaacgatgatacttgtctgacctttatgcgtgctatttccgtgctgaaatgccttccgtttgaggtagttagcctgaaagacacggaaggattgccctggatcggtgatgaagtcaaagggattatggaagaaatcatcgaggtcggtgaatcgctggaagtgcaggccgtgctcaatgatgagcgctatcaaagcttcaaactgtttaagagtgtctttggagtggggtggaagacagcagacaaatggtaccgtatgggtctgcgcacgctcgaggatgttcgttccagcaagaccctgaagttgaccccgatgcagaaagcgggtctgtgctattatgaagatcttgctgatggcgttacgaaagccgaagctgacgcgatttctctgctggttcaggatgcagtctggactttcgacccggatgcgctggtggagattacgggtggatttcgtcgtgggaaaccttttggtcacgacgttgatctgcttatcacatctccgggagctgagaaagaacaagaagaccagctcctgcagaaagtgaccaatctgtggaagaaacaagggttgttgctgtacggtcgtctgcgtgaaagtcgctttgaagatgggaaactcccatcccgcaagatcgatgccctggaccattttgcgaaatgctttctgatcctcaaactttatcaccataaagtggacaaaagcaaatgggaaatgccgacgggttcgaacgaaagcgaggccaaaagttggaaagcaattcgcgtagatctggttcgttgtccctacgatcgttttgcgtttgcgttgttgggttggaccggaagccgcatgttcgaacgtgatctgcgccgctacgccacccacgagaagaagatgatgctggacaatcatgcgctgtatgacctgaccaagaaaatctttctcaaagctaaatcggaagaggaaattttcgcacatctggggcttgaatacctggaaccgtccgaacgtaacgca

SEQ ID NO: 1240 - protein, 529 aa, synthetic construct
  REGION 1..529: note = Variant of terminal deoxynucleotidyltransferase
MHHHHHHGGSGSHGIRTIDSDFGKKRQKKMDNHDSSAIYEIKFHEFVLFILEEKMGATRRTFLTDLARKKGFRVENELSDSVTHIVAENNSRSEVLAWLKTHKMEKTKQFELLDISWLIESMKVGKPVDTKGKYQLMESGEMSANPDPTEGRENELPPTTKTISQYACQRRTTLNNHNQRFTDALEILAENYEFKRNDDTCLTFMRAISVLKCLPFEVVSLKDTEGLPWIGDEVKGIMEEIIEVGESLEVQAVLNDERYQSFKLFKSVFGVGWKTADKWYRMGLRTLEDVRSSKTLKLTPMQKAGLCYYEDLADGVTKAEADAISLLVQDAVWTFDPDALVEITGGFRRGKPFGHDVDLLITSPGAEKEQEDQLLQKVTNLWKKQGLLLYGRLRESRFEDGKLPSRKIDALDHFAKCFLILKLYHHKVDKSKWEMPTGSNESEAKSWKAIRVDLVRCPYDRFAFALLGWTGSRMFERDLRRYATHEKKMMLDNHALYDLTKKIFLKAKSEEEIFAHLGLEYLEPSERNA

SEQ ID NO: 1241 - DNA, 1587 bp, synthetic construct
  misc_feature 1..1587: note = Variant of terminal deoxynucleotidyltransferase
  source 1..1587: mol_type = other DNA
atgcaccatcatcatcatcatggcggtagcggcagccacggcattcgtaccatcgattcggacttcgggaagaaacgccagaagaagatggataaccacgatagttccgccatctatgaaatcaaatttcacgagtttgtgctgttcattctcgaagagaaaatgggtgcgacgcgtcgtacttttctgacagatttagcccgcaagaaagggttccgcgtcgagaatgaactgtcagacagcgttacccacatcgtggcagaaaataattcacgctctgaagtattggcttggctgaagactcacaagatggagaagaccaagcaattcgaactgctggatattagctggcttatcgaaagcatgaaagttggtaaaccggtggacaccaaggggaaataccagttgatggaatcgggtgagatgagtgcgaacccagatccgacagagggtcgtgaaaacgagctgcctcctactacgaagaccatttctcagtatgcgtgtcaacgccgcaccaccctgaacaaccataatcaacgttttacggacgcactggaaattcttgcggaaaattacgagttcaaacgcaacgatgatacttgtctgacctttatgcgtgctatttccgtgctgaaatgccttccgtttgaggtagttagcctgaaagacacggaaggattgccctggatcggtgatgaagtcaaagggattatggaagaaatcatcgaggtcggtgaatcgctggaagtgcaggccgtgctcaatgatgagcgctatcaaagcttcaaactgtttaagagtgtctttggagtgggggtgaagacagcagacaaatggtaccgtatgggtctgcgcacgctcgaggatgttcgttccagcaagaccctgaagttgaccccgatgcagaaagcgggtctgtgctattatgaagatcttgctattggcgttacgaaagccgaagctgacgcgatttctctgctggttcaggatgcagtctggactttcgacccggatgcgctggtggagattacgggtggatttcgtcgtgggaaaccttttggtcacgacgttgatctgcttatcacatctccgggagctgagaaagaacaagaagaccagctcctgcagaaagtgaccaatctgtggaagaaacaagggttgttgctgtacggtcgtctgcgtgaaagtcgctttgaagatgggaaactcccatcccgcaagatcgatgccctggaccattttgcgaaatgctttctgatcctcaaactttatcaccataaagtggacaaaagcaaatgggaaatgccgacgggttcgaacgaaagcgaggccaaaagttggaaagcaattcgcgtagatctggttcgttgtccctacgatcgttttgcgtttgcgttgttgggttggaccggaagccgcatgttcgaacgtgatctgcgccgctacgccacccacgagaagaagatgatgctggacaatcatgcgctgtatgacctgaccaagaaaatctttctcaaagctaaatcggaagaggaaattttcgcacatctggggcttgaatacctggaaccgtccgaacgtaacgca

SEQ ID NO: 1242 - protein, 529 aa, synthetic construct
  REGION 1..529: note = Variant of terminal deoxynucleotidyltransferase
MHHHHHHGGSGSHGIRTIDSDFGKKRQKKMDNHDSSAIYEIKFHEFVLFILEEKMGATRRTFLTDLARKKGFRVENELSDSVTHIVAENNSRSEVLAWLKTHKMEKTKQFELLDISWLIESMKVGKPVDTKGKYQLMESGEMSANPDPTEGRENELPPTTKTISQYACQRRTTLNNHNQRFTDALEILAENYEFKRNDDTCLTFMRAISVLKCLPFEVVSLKDTEGLPWIGDEVKGIMEEIIEVGESLEVQAVLNDERYQSFKLFKSVFGVGVKTADKWYRMGLRTLEDVRSSKTLKLTPMQKAGLCYYEDLAIGVTKAEADAISLLVQDAVWTFDPDALVEITGGFRRGKPFGHDVDLLITSPGAEKEQEDQLLQKVTNLWKKQGLLLYGRLRESRFEDGKLPSRKIDALDHFAKCFLILKLYHHKVDKSKWEMPTGSNESEAKSWKAIRVDLVRCPYDRFAFALLGWTGSRMFERDLRRYATHEKKMMLDNHALYDLTKKIFLKAKSEEEIFAHLGLEYLEPSERNA

SEQ ID NO: 1243 - DNA, 1587 bp, synthetic construct
  misc_feature 1..1587: note = Variant of terminal deoxynucleotidyltransferase
  source 1..1587: mol_type = other DNA
atgcaccatcatcatcatcatggcggtagcggcagccacggcattcgtaccatcgattcggacttcgggaagaaacgccagaagaagatggataaccacgatagttccgccatctatgaaatcaaatttcacgagtttgtgctgttcattctcgaagagaaaatgggtgcgacgcgtcgtacttttctgacagatttagcccgcaagaaagggttccgcgtcgagaatgaactgtcagacagcgttacccacatcgtggcagaaaataattcacgctctgaagtattggcttggctgaagactcacaagatggagaagaccaagcaattcgaactgctggatattagctggcttatcgaaagcatgaaagttggtaaaccggtggacaccaaggggaaataccagttgatggaatcgggtgagatgagtgcgaacccagatccgacagagggtcgtgaaaacgagctgcctcctactacgaagaccatttctcagtatgcgtgtcaacgccgcaccaccctgaacaaccataatcaacgttttacggacgcactggaaattcttgcggaaaattacgagttcaaacgcaacgatgatactgcgctgacctttatgcgtgctatttccgtgctgaaatgccttccgtttgaggtagttagcctgaaagacacggaaggattgccctggatcggtgatgaagtcaaagggattatggaagaaatcatcgaggtcggtgaatcgctggaagtgcaggccgtgctcaatgatgagcgctatcaaagcttcaaactgtttaagagtgtctttggagtgggggtgaagacagcagacaaatggtaccgtatgggtctgcgcacgctcgaggatgttcgttccagcaagaccctgaagttgaccccgatgcagaaagcgggtctgtgctattatgaagatcttgctgatggcgttacgaaagccgaagctgacgcgatttctctgctggttcaggatgcagtctggactttcgacccggatgcgctggtggagattacgggtggatttcgtcgtgggaaaccttttggtcacgacgttgatctgcttatcacatctccgggagctgagaaagaacaagaagaccagctcctgcagaaagtgaccaatctgtggaagaaacaagggttgttgctgtacggtcgtctgcgtgaaagtcgctttgaagatgggaaactcccatcccgcaagatcgatgccctggaccattttgcgaaatgctttctgatcctcaaactttatcaccataaagtggacaaaagcaaatgggaaatgccgacgggttcgaacgaaagcgaggccaaaagttggaaagcaattcgcgtagatctggttcgttgtccctacgatcgttttgcgtttgcgttgttgggttggaccggaagccgcatgttcgaacgtgatctgcgccgctacgccacccacgagaagaagatgatgctggacaatcatgcgctgtatgacctgaccaagaaaatctttctcaaagctaaatcggaagaggaaattttcgcacatctggggcttgaatacctggaaccgtccgaacgtaacgca

SEQ ID NO: 1244 - protein, 529 aa, synthetic construct
  REGION 1..529: note = Variant of terminal deoxynucleotidyltransferase
MHHHHHHGGSGSHGIRTIDSDFGKKRQKKMDNHDSSAIYEIKFHEFVLFILEEKMGATRRTFLTDLARKKGFRVENELSDSVTHIVAENNSRSEVLAWLKTHKMEKTKQFELLDISWLIESMKVGKPVDTKGKYQLMESGEMSANPDPTEGRENELPPTTKTISQYACQRRTTLNNHNQRFTDALEILAENYEFKRNDDTALTFMRAISVLKCLPFEVVSLKDTEGLPWIGDEVKGIMEEIIEVGESLEVQAVLNDERYQSFKLFKSVFGVGVKTADKWYRMGLRTLEDVRSSKTLKLTPMQKAGLCYYEDLADGVTKAEADAISLLVQDAVWTFDPDALVEITGGFRRGKPFGHDVDLLITSPGAEKEQEDQLLQKVTNLWKKQGLLLYGRLRESRFEDGKLPSRKIDALDHFAKCFLILKLYHHKVDKSKWEMPTGSNESEAKSWKAIRVDLVRCPYDRFAFALLGWTGSRMFERDLRRYATHEKKMMLDNHALYDLTKKIFLKAKSEEEIFAHLGLEYLEPSERNA

SEQ ID NO: 1245 - DNA, 1587 bp, synthetic construct
  misc_feature 1..1587: note = Variant of terminal deoxynucleotidyltransferase
  source 1..1587: mol_type = other DNA
atgcaccatcatcatcatcatggcggtagcggcagccacggcattcgtaccatcgattcggacttcgggaagaaacgccagaagaagatggataaccacgatagttccgccatctatgaaatcaaatttcacgagtttgtgctgttcattctcgaagagaaaatgggtgcgacgcgtcgtacttttctgacagatttagcccgcaagaaagggttccgcgtcgagaatgaactgtcagacagcgttacccacatcgtggcagaaaataattcacgctctgaagtattggcttggctgaagactcacaagatggagaagaccaagcaattcgaactgctggatattagctggcttatcgaaagcatgaaagttggtaaaccggtggacaccaaggggaaataccagttgatggaatcgggtgagatgagtgcgaacccagatccgacagagggtcgtgaaaacgagctgcctcctactacgaagaccatttctcagtatgcgtgtcaacgccgcaccaccctgaacaaccataatcaacgttttacggacgcactggaaattcttgcggaaaattacgagttcaaacgcaacgatggtacttgtctgacctttatgcgtgctatttccgtgctgaaatgccttccgtttgaggtagttagcctgaaagacacggaaggattgccctggatcggtgatgaagtcaaagggattatggaagaaatcatcgaggtcggtgaatcgctggaagtgcaggccgtgctcaatgatgagcgctatcaaagcttcaaactgtttaagagtgtctttggagtgggggtgaagacagcagacaaatggtaccgtatgggtctgcgcacgctcgaggatgttcgttccagcaagaccctgaagttgaccccgatgcagaaagcgggtctgtgctattatgaagatcttgctgatggcgttacgaaagccgaagctgacgcgatttctctgctggttcaggatgcagtctggactttcgacccggatgcgctggtggagattacgggtggatttcgtcgtgggaaaccttttggtcacgacgttgatctgcttatcacatctccgggagctgagaaagaacaagaagaccagctcctgcagaaagtgaccaatctgtggaagaaacaagggttgttgctgtacggtcgtctgcgtgaaagtcgctttgaagatgggaaactcccatcccgcaagatcgatgccctggaccattttgcgaaatgctttctgatcctcaaactttatcaccataaagtggacaaaagcaaatgggaaatgccgacgggttcgaacgaaagcgaggccaaaagttggaaagcaattcgcgtagatctggttcgttgtccctacgatcgttttgcgtttgcgttgttgggttggaccggaagccgcatgttcgaacgtgatctgcgccgctacgccacccacgagaagaagatgatgctggacaatcatgcgctgtatgacctgaccaagaaaatctttctcaaagctaaatcggaagaggaaattttcgcacatctggggcttgaatacctggaaccgtccgaacgtaacgca

SEQ ID NO: 1246 - protein, 529 aa, synthetic construct; identical to SEQ ID NO: 1166
  REGION 1..529: note = Variant of terminal deoxynucleotidyltransferase

SEQ ID NO: 1247 - DNA, 1587 bp, synthetic construct
  misc_feature 1..1587: note = Variant of terminal deoxynucleotidyltransferase
  source 1..1587: mol_type = other DNA
atgcaccatcatcatcatcatggcggtagcggcagccacggcattcgtaccatcgattcggacttcgggaagaaacgccagaagaagatggataaccacgatagttccgccatctatgaaatcaaatttcacgagtttgtgctgttcattctcgaagagaaaatgggtgcgacgcgtcgtacttttctgacagatttagcccgcaagaaagggttccgcgtcgagaatgaactgtcagacagcgttacccacatcgtggcagaaaataattcacgctctgaagtattggcttggctgaagactcacaagatggagaagaccaagcaattcgaactgctggatattagctggcttatcgaaagcatgaaagttggtaaaccggtggacaccaaggggaaataccagttgatggaatcgggtgagatgagtgcgaacccagatccgacagagggtcgtgaaaacgagctgcctcctactacgaagaccatttctcagtatgcgtgtcaacgccgcaccaccctggtgaaccataatcaacgttttacggacgcactggaaattcttgcggaaaattacgagttcaaacgcaacgatgatacttgtctgacctttatgcgtgctatttccgtgctgaaatgccttccgtttgaggtagttagcctgaaagacacggaaggattgccctggatcggtgatgaagtcaaagggattatggaagaaatcatcgaggtcggtgaatcgctggaagtgcaggccgtgctcaatgatgagcgctatcaaagcttcaaactgtttaagagtgtctttggagtgggggtgaagacagcagacaaatggtaccgtatgggtctgcgcacgctcgaggatgttcgttccagcaagaccctgaagttgaccccgatgcagaaagcgggtctgtgctattatgaagatcttgctgatggcgttacgaaagccgaagctgacgcgatttctctgctggttcaggatgcagtctggactttcgacccggatgcgctggtggagattacgggtggatttcgtcgtgggaaaccttttggtcacgacgttgatctgcttatcacatctccgggagctgagaaagaacaagaagaccagctcctgcagaaagtgaccaatctgtggaagaaacaagggttgttgctgtacggtcgtctgcgtgaaagtcgctttgaagatgggaaactcccatcccgcaagatcgatgccctggaccattttgcgaaatgctttctgatcctcaaactttatcaccataaagtggacaaaagcaaatgggaaatgccgacgggttcgaacgaaagcgaggccaaaagttggaaagcaattcgcgtagatctggttcgttgtccctacgatcgttttgcgtttgcgttgttgggttggaccggaagccgcatgttcgaacgtgatctgcgccgctacgccacccacgagaagaagatgatgctggacaatcatgcgctgtatgacctgaccaagaaaatctttctcaaagctaaatcggaagaggaaattttcgcacatctggggcttgaatacctggaaccgtccgaacgtaacgca

SEQ ID NO: 1248 - protein, 529 aa, synthetic construct
  REGION 1..529: note = Variant of terminal deoxynucleotidyltransferase
MHHHHHHGGSGSHGIRTIDSDFGKKRQKKMDNHDSSAIYEIKFHEFVLFILEEKMGATRRTFLTDLARKKGFRVENELSDSVTHIVAENNSRSEVLAWLKTHKMEKTKQFELLDISWLIESMKVGKPVDTKGKYQLMESGEMSANPDPTEGRENELPPTTKTISQYACQRRTTLVNHNQRFTDALEILAENYEFKRNDDTCLTFMRAISVLKCLPFEVVSLKDTEGLPWIGDEVKGIMEEIIEVGESLEVQAVLNDERYQSFKLFKSVFGVGVKTADKWYRMGLRTLEDVRSSKTLKLTPMQKAGLCYYEDLADGVTKAEADAISLLVQDAVWTFDPDALVEITGGFRRGKPFGHDVDLLITSPGAEKEQEDQLLQKVTNLWKKQGLLLYGRLRESRFEDGKLPSRKIDALDHFAKCFLILKLYHHKVDKSKWEMPTGSNESEAKSWKAIRVDLVRCPYDRFAFALLGWTGSRMFERDLRRYATHEKKMMLDNHALYDLTKKIFLKAKSEEEIFAHLGLEYLEPSERNA

SEQ ID NO: 1249 - DNA, 1587 bp, synthetic construct
  misc_feature 1..1587: note = Variant of terminal deoxynucleotidyltransferase
  source 1..1587: mol_type = other DNA
atgcaccatcatcatcatcatggcggtagcggcagccacggcattcgtaccatcgattcggacttcgggaagaaacgccagaagaagatggataaccacgatagttccgccatctatgaaatcaaatttcacgagtttgtgctgttcattctcgaagagaaaatgggtgcgacgcgtcgtacttttctgacagatttagcccgcaagaaagggttccgcgtcgagaatgaactgtcagacagcgttacccacatcgtggcagaaaataattcacgctctgaagtattggcttggctgaagactcacaagatggagaagaccaagcaattcgaactgctggatattagctggcttatcgaaagcatgaaagttggtaaaccggtggacaccaaggggaaataccagttgatggaatcgggtgagatgagtgcgaacccagatccgacagagggtcgtgaaaacgagctgcctcctactacgaagaccatttctcagtatgcgtgtcaacgccgcaccaccctgaacaaccataatcaacgttttacggacgcactggaaattcttgcggaaaattacgagttcaaacgcaacgatgatacttgtctgacctttatgcgtgctatttccgtgctgaaatgccttccgtttgaggtagttagcctgaaagacacggaaggattgccctggatcggtgatgaagtcaaagggattatggaagaaatcatcgaggtcggtgaatcgctggaagtgcaggccgtgctcaatgatgagcgctatcaaagcttcaaactgtttaagagtgtctttggagtgggggtgaagacagcagacaaatggtaccgtatgggtctgcgcacgctcgaggatgttcgttccagcaagaccctgaagttgaccccgatgcagaaagcgggtctgtgctattatgaagatcttgctgatggcgttacgaaagccgaagctgacgcgatttctctgctggttcaggatgcagtctggactttcgacccggatgcgctggtggagattacgggtggatttcgtcgtgggaaaccttttggtcacgacgttgatctgcttatcacatctccgggagctgagaaagaacaagaagaccagctcctgcagaaagtgaccaatctgtggaagaaacaagggttgttgctgtacggtcgtctgcgtgaaagtcgctttgaagatgggaaactcccatcccgcaagatcgatgccctggaccattttgcgaaatgctttctgatcctcaaactttatcaccataaagtggacaaaagcaaatgggaaatgccgacgggttcgaacgaaagcgaggccaaaagttggaaagcaattcgcgtagatctggttcgttgtccctacgatcgttttgcgtttgcgttgttgggttggaccggaagccgcatgttcgaacgtgatctgcgccgctacgccacccacgagaagaagatgatgctgacgaatcatgcgctgtatgacctgaccaagaaaatctttctcaaagctaaatcggaagaggaaattttcgcacatctggggcttgaatacctggaaccgtccgaacgtaacgca

SEQ ID NO: 1250 - protein, 529 aa, synthetic construct
  REGION 1..529: note = Variant of terminal deoxynucleotidyltransferase
MHHHHHHGGSGSHGIRTIDSDFGKKRQKKMDNHDSSAIYEIKFHEFVLFILEEKMGATRRTFLTDLARKKGFRVENELSDSVTHIVAENNSRSEVLAWLKTHKMEKTKQFELLDISWLIESMKVGKPVDTKGKYQLMESGEMSANPDPTEGRENELPPTTKTISQYACQRRTTLNNHNQRFTDALEILAENYEFKRNDDTCLTFMRAISVLKCLPFEVVSLKDTEGLPWIGDEVKGIMEEIIEVGESLEVQAVLNDERYQSFKLFKSVFGVGVKTADKWYRMGLRTLEDVRSSKTLKLTPMQKAGLCYYEDLADGVTKAEADAISLLVQDAVWTFDPDALVEITGGFRRGKPFGHDVDLLITSPGAEKEQEDQLLQKVTNLWKKQGLLLYGRLRESRFEDGKLPSRKIDALDHFAKCFLILKLYHHKVDKSKWEMPTGSNESEAKSWKAIRVDLVRCPYDRFAFALLGWTGSRMFERDLRRYATHEKKMMLTNHALYDLTKKIFLKAKSEEEIFAHLGLEYLEPSERNA

SEQ ID NO: 1251 - DNA, 1587 bp, synthetic construct
  misc_feature 1..1587: note = Variant of terminal deoxynucleotidyltransferase
  source 1..1587: mol_type = other DNA
atgcaccatcatcatcatcatggcggtagcggcagccacggcattcgtaccatcgattcggacttcgggaagaaacgccagaagaagatggataaccacgatagttccgccatctatgaaatcaaatttcacgagtttgtgctgttcattctcgaagagaaaatgggtgcgacgcgtcgtacttttctgacagatttagcccgcaagaaagggttccgcgtcgagaatgaactgtcagacagcgttacccacatcgtggcagaaaataattcacgctctgaagtattggcttggctgaagactcacaagatggagaagaccaagcaattcgaactgctggatattagctggcttatcgaaagcatgaaagttggtaaaccggtggacaccaaggggaaataccagttgatggaatcgggtgagatgagtgcgaacccagatccgacagagggtcgtgaaaacgagctgcctcctactacgaagaccatttctcagtatgcgtgtcaacgccgcaccaccctgaacaaccataatcaacgttttacggacgcactggaaattcttgcggaaaattacgagttcaaacgcaacgatgatacttgtctgacctttatgcgtgctatttccgtgctgaaatgccttccgtttgaggtagttagcctgaaagacacggaaggattgccctggatcggtgatgaagtcaaagggattatggaagaaatcatcgaggtcggtgaatcgctggaagtgcaggccgtgctcaatgatgagcgctatcaaagcttcaaactgtttaagagtgtctttggagtgggggtgaagacagcagacaaatggtaccgtatgggtctgcgcacgctcgaggatgttcgttccagcaagaccctgaagttgaccccgatgcagaaagcgggtctgtgctattatgaagatcttcgggatggcgttacgaaagccgaagctgacgcgatttctctgctggttcaggatgcagtctggactttcgacccggatgcgctggtggagattacgggtggatttcgtcgtgggaaaccttttggtcacgacgttgatctgcttatcacatctccgggagctgagaaagaacaagaagaccagctcctgcagaaagtgaccaatctgtggaagaaacaagggttgttgctgtacggtcgtctgcgtgaaagtcgctttgaagatgggaaactcccatcccgcaagatcgatgccctggaccattttgcgaaatgctttctgatcctcaaactttatcaccataaagtggacaaaagcaaatgggaaatgccgacgggttcgaacgaaagcgaggccaaaagttggaaagcaattcgcgtagatctggttcgttgtccctacgatcgttttgcgtttgcgttgttgggttggaccggaagccgcatgttcgaacgtgatctgcgccgctacgccacccacgagaagaagatgatgctggacaatcatgcgctgtatgacctgaccaagaaaatctttctcaaagctaaatcggaagaggaaattttcgcacatctggggcttgaatacctggaaccgtccgaacgtaacgca

SEQ ID NO: 1252 - protein, 529 aa, synthetic construct
  REGION 1..529: note = Variant of terminal deoxynucleotidyltransferase
MHHHHHHGGSGSHGIRTIDSDFGKKRQKKMDNHDSSAIYEIKFHEFVLFILEEKMGATRRTFLTDLARKKGFRVENELSDSVTHIVAENNSRSEVLAWLKTHKMEKTKQFELLDISWLIESMKVGKPVDTKGKYQLMESGEMSANPDPTEGRENELPPTTKTISQYACQRRTTLNNHNQRFTDALEILAENYEFKRNDDTCLTFMRAISVLKCLPFEVVSLKDTEGLPWIGDEVKGIMEEIIEVGESLEVQAVLNDERYQSFKLFKSVFGVGVKTADKWYRMGLRTLEDVRSSKTLKLTPMQKAGLCYYEDLRDGVTKAEADAISLLVQDAVWTFDPDALVEITGGFRRGKPFGHDVDLLITSPGAEKEQEDQLLQKVTNLWKKQGLLLYGRLRESRFEDGKLPSRKIDALDHFAKCFLILKLYHHKVDKSKWEMPTGSNESEAKSWKAIRVDLVRCPYDRFAFALLGWTGSRMFERDLRRYATHEKKMMLDNHALYDLTKKIFLKAKSEEEIFAHLGLEYLEPSERNA

SEQ ID NO: 1253 - DNA, 1587 bp, synthetic construct
  misc_feature 1..1587: note = Variant of terminal deoxynucleotidyltransferase
  source 1..1587: mol_type = other DNA
atgcaccatcatcatcatcatggcggtagcggcagccacggcattcgtaccatcgattcggacttcgggaagaaacgccagaagaagatggataaccacgatagttccgccatctatgaaatcaaatttcacgagtttgtgctgttcattctcgaagagaaaatgggtgcgacgcgtcgtacttttctgacagatttagcccgcaagaaagggttccgcgtcgagaatgaactgtcagacagcgttacccacatcgtggcagaaaataattcacgctctgaagtattggcttggctgaagactcacaagatggagaagaccaagcaattcgaactgctggatattagctggcttatcgaaagcatgaaagttggtaaaccggtggacaccaaggggaaataccagttgatggaatcgggtgagatgagtgcgaacccagatccgacagagggtcgtgaaaacgagctgcctcctactacgaagaccatttctcagtatgcgtgtcaacgccgcaccaccctgaacaaccataatcaacgttttacggacgcactggaaattcttgcggaaaattacgagttcaaacgcaacgatcatacttgtctgacctttatgcgtgctatttccgtgctgaaatgccttccgtttgaggtagttagcctgaaagacacggaaggattgccctggatcggtgatgaagtcaaagggattatggaagaaatcatcgaggtcggtgaatcgctggaagtgcaggccgtgctcaatgatgagcgctatcaaagcttcaaactgtttaagagtgtctttggagtgggggtgaagacagcagacaaatggtaccgtatgggtctgcgcacgctcgaggatgttcgttccagcaagaccctgaagttgaccccgatgcagaaagcgggtctgtgctattatgaagatcttgctgatggcgttacgaaagccgaagctgacgcgatttctctgctggttcaggatgcagtctggactttcgacccggatgcgctggtggagattacgggtggatttcgtcgtgggaaaccttttggtcacgacgttgatctgcttatcacatctccgggagctgagaaagaacaagaagaccagctcctgcagaaagtgaccaatctgtggaagaaacaagggttgttgctgtacggtcgtctgcgtgaaagtcgctttgaagatgggaaactcccatcccgcaagatcgatgccctggaccattttgcgaaatgctttctgatcctcaaactttatcaccataaagtggacaaaagcaaatgggaaatgccgacgggttcgaacgaaagcgaggccaaaagttggaaagcaattcgcgtagatctggttcgttgtccctacgatcgttttgcgtttgcgttgttgggttggaccggaagccgcatgttcgaacgtgatctgcgccgctacgccacccacgagaagaagatgatgctggacaatcatgcgctgtatgacctgaccaagaaaatctttctcaaagctaaatcggaagaggaaattttcgcacatctggggcttgaatacctggaaccgtccgaacgtaacgca

SEQ ID NO: 1254 - protein, 529 aa, synthetic construct
  REGION 1..529: note = Variant of terminal deoxynucleotidyltransferase
MHHHHHHGGSGSHGIRTIDSDFGKKRQKKMDNHDSSAIYEIKFHEFVLFILEEKMGATRRTFLTDLARKKGFRVENELSDSVTHIVAENNSRSEVLAWLKTHKMEKTKQFELLDISWLIESMKVGKPVDTKGKYQLMESGEMSANPDPTEGRENELPPTTKTISQYACQRRTTLNNHNQRFTDALEILAENYEFKRNDHTCLTFMRAISVLKCLPFEVVSLKDTEGLPWIGDEVKGIMEEIIEVGESLEVQAVLNDERYQSFKLFKSVFGVGVKTADKWYRMGLRTLEDVRSSKTLKLTPMQKAGLCYYEDLADGVTKAEADAISLLVQDAVWTFDPDALVEITGGFRRGKPFGHDVDLLITSPGAEKEQEDQLLQKVTNLWKKQGLLLYGRLRESRFEDGKLPSRKIDALDHFAKCFLILKLYHHKVDKSKWEMPTGSNESEAKSWKAIRVDLVRCPYDRFAFALLGWTGSRMFERDLRRYATHEKKMMLDNHALYDLTKKIFLKAKSEEEIFAHLGLEYLEPSERNA

SEQ ID NO: 1255 - DNA, 1587 bp, synthetic construct
  misc_feature 1..1587: note = Variant of terminal deoxynucleotidyltransferase
  source 1..1587: mol_type = other DNA
atgcaccatcatcatcatcatggcggtagcggcagccacggcattcgtaccatcgattcggacttcgggaagaaacgccagaagaagatggataaccacgatagttccgccatctatgaaatcaaatttcacgagtttgtgctgttcattctcgaagagaaaatgggtgcgacgcgtcgtacttttctgacagatttagcccgcaagaaagggttccgcgtcgagaatgaactgtcagacagcgttacccacatcgtggcagaaaataattcacgctctgaagtattggcttggctgaagactcacaagatggagaagaccaagcaattcgaactgctggatattagctggcttatcgaaagcatgaaagttggtaaaccggtggacaccaaggggaaataccagttgatggaatcgggtgagatgagtgcgaacccagatccgacagagggtcgtgaaaacgagctgcctcctactacgaagaccatttctcagtatgcgtgtcaacgccgcaccaccctgaacaaccataatcaacgttttacggacgcactggaaattcttgcggaaaattacgagttcaaacgcaacgatgatacttgtctgacctttatgcgtgctatttccgtgctgaaatgccttccgtttgaggtagttagcctgaaagacacggaaggattgccctggatcggtgatgaagtcaaagggattatggaagaaatcatcgaggtcggtgaatcgctggaagtgcaggccgtgctcaatgatgagcgctatcaaagcttcaaactgtttaagagtgtctttggagtgggggtgaaggatgcagacaaatggtaccgtatgggtctgcgcacgctcgaggatgttcgttccagcaagaccctgaagttgaccccgatgcagaaagcgggtctgtgctattatgaagatcttgctgatggcgttacgaaagccgaagctgacgcgatttctctgctggttcaggatgcagtctggactttcgacccggatgcgctggtggagattacgggtggatttcgtcgtgggaaaccttttggtcacgacgttgatctgcttatcacatctccgggagctgagaaagaacaagaagaccagctcctgcagaaagtgaccaatctgtggaagaaacaagggttgttgctgtacggtcgtctgcgtgaaagtcgctttgaagatgggaaactcccatcccgcaagatcgatgccctggaccattttgcgaaatgctttctgatcctcaaactttatcaccataaagtggacaaaagcaaatgggaaatgccgacgggttcgaacgaaagcgaggccaaaagttggaaagcaattcgcgtagatctggttcgttgtccctacgatcgttttgcgtttgcgttgttgggttggaccggaagccgcatgttcgaacgtgatctgcgccgctacgccacccacgagaagaagatgatgctggacaatcatgcgctgtatgacctgaccaagaaaatctttctcaaagctaaatcggaagaggaaattttcgcacatctggggcttgaatacctggaaccgtccgaacgtaacgca

SEQ ID NO: 1256 - protein, 529 aa, synthetic construct
  REGION 1..529: note = Variant of terminal deoxynucleotidyltransferase
MHHHHHHGGSGSHGIRTIDSDFGKKRQKKMDNHDSSAIYEIKFHEFVLFILEEKMGATRRTFLTDLARKKGFRVENELSDSVTHIVAENNSRSEVLAWLKTHKMEKTKQFELLDISWLIESMKVGKPVDTKGKYQLMESGEMSANPDPTEGRENELPPTTKTISQYACQRRTTLNNHNQRFTDALEILAENYEFKRNDDTCLTFMRAISVLKCLPFEVVSLKDTEGLPWIGDEVKGIMEEIIEVGESLEVQAVLNDERYQSFKLFKSVFGVGVKDADKWYRMGLRTLEDVRSSKTLKLTPMQKAGLCYYEDLADGVTKAEADAISLLVQDAVWTFDPDALVEITGGFRRGKPFGHDVDLLITSPGAEKEQEDQLLQKVTNLWKKQGLLLYGRLRESRFEDGKLPSRKIDALDHFAKCFLILKLYHHKVDKSKWEMPTGSNESEAKSWKAIRVDLVRCPYDRFAFALLGWTGSRMFERDLRRYATHEKKMMLDNHALYDLTKKIFLKAKSEEEIFAHLGLEYLEPSERNA

SEQ ID NO: 1257 - DNA, 1587 bp, synthetic construct
  misc_feature 1..1587: note = Variant of terminal deoxynucleotidyltransferase
  source 1..1587: mol_type = other DNA
atgcaccatcatcatcatcatggcggtagcggcagccacggcattcgtaccatcgattcggacttcgggaagaaacgccagaagaagatggataaccacgatagttccgccatctatgaaatcaaatttcacgagtttgtgctgttcattctcgaagagaaaatgggtgcgacgcgtcgtacttttctgacagatttagcccgcaagaaagggttccgcgtcgagaatgaactgtcagacagcgttacccacatcgtggcagaaaataattcacgctctgaagtattggcttggctgaagactcacaagatggagaagaccaagcaattcgaactgctggatattagctggcttatcgaaagcatgaaagttggtaaaccggtggacaccaaggggaaataccagttgatggaatcgggtgagatgagtgcgaacccagatccgacagagggtcgtgaaaacgagctgcctcctactacgaagaccatttctcagtatgcgtgtcaacgccgcaccaccctgaacaaccataatcaacgttttacggacgcactggaaattcttgcggaaaattacgagttcaaacgcaacgatgatacttgtctgacctttatgcgtgctatttccgtgctgaaatgccttccgtttgaggtagttagcctgaaagacacggaaggattgccctggatcggtgatgaagtcaaagggattatggaagaaatcatcgaggtcggtgaatcgctggaagtgcaggccgtgctcaatgatgagcgctatcaaagcttcaaactgtttaagagtgtctttggagtgggggtgaagacagcagacaaatggtaccgtatgggtctgcgcacgctcgaggatgttcgttccagcaagaccctgaagttgaccccgatgcagaaagcgggtctgtgctattatgaagatcttgctgatggcgttacgaaagccgaagctgacgcgatttctctgctggttcaggatgcagtctggactttcgacccggatgcgctggtggagattacgggtggatttcgtcgtgggaaaccttttggtcacgacgttgatctgcttatcacatctccgggagctgagaaagaacaagaagaccagctcctgcagaaagtgaccaatctgtggaagaaacaagggttgttgctgtacggtcgtctgcgtgaaagtcgctttgaagatgggaaactcccatcccgcaagatcgatgccctggaccattttgcgaaatgctttctgatcctcaaactttatcaccataaagtggacaaaagcaaatgggaaatgccgacgggttcgaacgaaagcgaggccaaaagttggaaagcaattcgcgtagatctggttcgttgtccctacgatcgttttgcgtttgcgttgttgggttggaccggaagccgcatgttcgaacgtgatctgcgccgctacgccacccacgagaagaagatgatgctggacaatcattcgctgtatgacctgaccaagaaaatctttctcaaagctaaatcggaagaggaaattttcgcacatctggggcttgaatacctggaaccgtccgaacgtaacgca

SEQ ID NO: 1258 - protein, 529 aa, synthetic construct; identical to SEQ ID NO: 1150
  REGION 1..529: note = Variant of terminal deoxynucleotidyltransferase

SEQ ID NO: 1259 - DNA, 1587 bp, synthetic construct
  misc_feature 1..1587: note = Variant of terminal deoxynucleotidyltransferase
  source 1..1587: mol_type = other DNA
atgcaccatcatcatcatcatggcggtagcggcagccacggcattcgtaccatcgattcggacttcgggaagaaacgccagaagaagatggataaccacgatagttccgccatctatgaaatcaaatttcacgagtttgtgctgttcattctcgaagagaaaatgggtgcgacgcgtcgtacttttctgacagatttagcccgcaagaaagggttccgcgtcgagaatgaactgtcagacagcgttacccacatcgtggcagaaaataattcacgctctgaagtattggcttggctgaagactcacaagatggagaagaccaagcaattcgaactgctggatattagctggcttatcgaaagcatgaaagttggtaaaccggtggacaccaaggggaaataccagttgatggaatcgggtgagatgagtgcgaacccagatccgacagagggtcgtgaaaacgagctgcctcctactacgaagaccatttctcagtatgcgtgtcaacgccgcaccaccctgaacaaccataatcaacgttttacggacgcactggaaattcttgcggaaaattacgagttcaaacgcaacgatgatacttgtctgacctttatgcgtgctatttccgtgctgaaatgccttccgtttgaggtagttagcctgaaagacacggaaggattgccctggatcggtgatgaagtcaaagggattatggaagaaatcatcgaggtcggtgaatcgctggaagtgcaggccgtgctcaatgatgagcgctatcaaagcttcaaactgtttaagagtgtctttggagtgggggtgaagacagcagacaaatggtaccgtatgggtctgcgcacgctcgaggatgttcgttccagcaagaccctgaagttgaccccgatgcagaaagcgggtctgtgctattatgaagatcttcaggatggcgttacgaaagccgaagctgacgcgatttctctgctggttcaggatgcagtctggactttcgacccggatgcgctggtggagattacgggtggatttcgtcgtgggaaaccttttggtcacgacgttgatctgcttatcacatctccgggagctgagaaagaacaagaagaccagctcctgcagaaagtgaccaatctgtggaagaaacaagggttgttgctgtacggtcgtctgcgtgaaagtcgctttgaagatgggaaactcccatcccgcaagatcgatgccctggaccattttgcgaaatgctttctgatcctcaaactttatcaccataaagtggacaaaagcaaatgggaaatgccgacgggttcgaacgaaagcgaggccaaaagttggaaagcaattcgcgtagatctggttcgttgtccctacgatcgttttgcgtttgcgttgttgggttggaccggaagccgcatgttcgaacgtgatctgcgccgctacgccacccacgagaagaagatgatgctggacaatcatgcgctgtatgacctgaccaagaaaatctttctcaaagctaaatcggaagaggaaattttcgcacatctggggcttgaatacctggaaccgtccgaacgtaacgca

SEQ ID NO: 1260 - protein, 529 aa, synthetic construct
  REGION 1..529: note = Variant of terminal deoxynucleotidyltransferase
MHHHHHHGGSGSHGIRTIDSDFGKKRQKKMDNHDSSAIYEIKFHEFVLFILEEKMGATRRTFLTDLARKKGFRVENELSDSVTHIVAENNSRSEVLAWLKTHKMEKTKQFELLDISWLIESMKVGKPVDTKGKYQLMESGEMSANPDPTEGRENELPPTTKTISQYACQRRTTLNNHNQRFTDALEILAENYEFKRNDDTCLTFMRAISVLKCLPFEVVSLKDTEGLPWIGDEVKGIMEEIIEVGESLEVQAVLNDERYQSFKLFKSVFGVGVKTADKWYRMGLRTLEDVRSSKTLKLTPMQKAGLCYYEDLQDGVTKAEADAISLLVQDAVWTFDPDALVEITGGFRRGKPFGHDVDLLITSPGAEKEQEDQLLQKVTNLWKKQGLLLYGRLRESRFEDGKLPSRKIDALDHFAKCFLILKLYHHKVDKSKWEMPTGSNESEAKSWKAIRVDLVRCPYDRFAFALLGWTGSRMFERDLRRYATHEKKMMLDNHALYDLTKKIFLKAKSEEEIFAHLGLEYLEPSERNA

SEQ ID NO: 1261 - DNA, 1587 bp, synthetic construct; identical to SEQ ID NO: 1179
  misc_feature 1..1587: note = Variant of terminal deoxynucleotidyltransferase
  source 1..1587: mol_type = other DNA

SEQ ID NO: 1262 - protein, 529 aa, synthetic construct; identical to SEQ ID NO: 1180
  REGION 1..529: note = Variant of terminal deoxynucleotidyltransferase

SEQ ID NO: 1263 - DNA, 1587 bp, synthetic construct
  misc_feature 1..1587: note = Variant of terminal deoxynucleotidyltransferase
  source 1..1587: mol_type = other DNA
atgcaccatcatcatcatcatggcggtagcggcagccacggcattcgtaccatcgattcggacttcgggaagaaacgccagaagaagatggataaccacgatagttccgccatctatgaaatcaaatttcacgagtttgtgctgttcattctcgaagagaaaatgggtgcgacgcgtcgtacttttctgacagatttagcccgcaagaaagggttccgcgtcgagaatgaactgtcagacagcgttacccacatcgtggcagaaaataattcacgctctgaagtattggcttggctgaagactcacaagatggagaagaccaagcaattcgaactgctggatattagctggcttatcgaaagcatgaaagttggtaaaccggtggacaccaaggggaaataccagttgatggaatcgggtgagatgagtgcgaacccagatccgacagagggtcgtgaaaacgagctgcctcctactacgaagaccatttctcagtatgcgtgtcaacgccgcaccaccctgaacaaccataatcaacgttttacggacgcactggaaattcttgcggaaaattacgagttcaaacgcaacgatgatacttgtctgacctttatgcgtgctatttccgtgctgaaatgccttccgtttgaggtagttagcctgaaagacacggaaggattgccctggatcggtgatgaagtcaaagggattatggaagaaatcatcgaggtcggtgaatcgctggaagtgcaggccgtgctcaatgatgagcgctatcaaagcttcaaactgtttaagagtgtctttggagtgggggtgaagacagcagacaaatggtaccgtatgggtctgcgcacgctcgaggatgttcgttccagcaagaccctgaagttgaccccgatgcagaaagcgggtctgatgtattatgaagatcttgctgatggcgttacgaaagccgaagctgacgcgatttctctgctggttcaggatgcagtctggactttcgacccggatgcgctggtggagattacgggtggatttcgtcgtgggaaaccttttggtcacgacgttgatctgcttatcacatctccgggagctgagaaagaacaagaagaccagctcctgcagaaagtgaccaatctgtggaagaaacaagggttgttgctgtacggtcgtctgcgtgaaagtcgctttgaagatgggaaactcccatcccgcaagatcgatgccctggaccattttgcgaaatgctttctgatcctcaaactttatcaccataaagtggacaaaagcaaatgggaaatgccgacgggttcgaacgaaagcgaggccaaaagttggaaagcaattcgcgtagatctggttcgttgtccctacgatcgttttgcgtttgcgttgttgggttggaccggaagccgcatgttcgaacgtgatctgcgccgctacgccacccacgagaagaagatgatgctggacaatcatgcgctgtatgacctgaccaagaaaatctttctcaaagctaaatcggaagaggaaattttcgcacatctggggcttgaatacctggaaccgtccgaacgtaacgca

SEQ ID NO: 1264 - protein, 529 aa, synthetic construct
  REGION 1..529: note = Variant of terminal deoxynucleotidyltransferase
MHHHHHHGGSGSHGIRTIDSDFGKKRQKKMDNHDSSAIYEIKFHEFVLFILEEKMGATRRTFLTDLARKKGFRVENELSDSVTHIVAENNSRSEVLAWLKTHKMEKTKQFELLDISWLIESMKVGKPVDTKGKYQLMESGEMSANPDPTEGRENELPPTTKTISQYACQRRTTLNNHNQRFTDALEILAENYEFKRNDDTCLTFMRAISVLKCLPFEVVSLKDTEGLPWIGDEVKGIMEEIIEVGESLEVQAVLNDERYQSFKLFKSVFGVGVKTADKWYRMGLRTLEDVRSSKTLKLTPMQKAGLMYYEDLADGVTKAEADAISLLVQDAVWTFDPDALVEITGGFRRGKPFGHDVDLLITSPGAEKEQEDQLLQKVTNLWKKQGLLLYGRLRESRFEDGKLPSRKIDALDHFAKCFLILKLYHHKVDKSKWEMPTGSNESEAKSWKAIRVDLVRCPYDRFAFALLGWTGSRMFERDLRRYATHEKKMMLDNHALYDLTKKIFLKAKSEEEIFAHLGLEYLEPSERNA

SEQ ID NO: 1265 - DNA, 1587 bp, synthetic construct
  misc_feature 1..1587: note = Variant of terminal deoxynucleotidyltransferase
  source 1..1587: mol_type = other DNA
atgcaccatcatcatcatcatggcggtagcggcagccacggcattcgtaccatcgattcggacttcgggaagaaacgccagaagaagatggataaccacgatagttccgccatctatgaaatcaaatttcacgagtttgtgctgttcattctcgaagagaaaatgggtgcgacgcgtcgtacttttctgacagatttagcccgcaagaaagggttccgcgtcgagaatgaactgtcagacagcgttacccacatcgtggcagaaaataattcacgctctgaagtattggcttggctgaagactcacaagatggagaagaccaagcaattcgaactgctggatattagctggcttatcgaaagcatgaaagttggtaaaccggtggacaccaaggggaaataccagttgatggaatcgggtgagatgagtgcgaacccagatccgacagagggtcgtgaaaacgagctgcctcctactacgaagaccatttctcagtatgcgtgtcaacgccgcaccaccctgaacaaccataatcaacgttttacggacgcactggaaattcttgcggaaaattacgagttcaaacgcaacgatgatacttgtctgacctttatgcgtgctatttccgtgctgaaatgccttccgtttgaggtagttagcctgaaagacacggaaggattgccctggatcggtgatgaagtcaaagggattatggaagaaatcatcgaggtcggtgaatcgctggaagtgcaggccgtgctcaatgatgagcgctatcaaagcttcaaactgtttaagagtgtctttggagtgggggtgaagacagcagacaaatggtaccgtatgggtctgcgcacgctcgaggatgttcgttccagcaagaccctgaagttgaccccgatgcagaaagcgggtctgtgctattatgaagatcttgctgatggcgttacgaaagccgaagctgacgcgatttctctgctggttcaggatgcagtctggactttcgacccggatgcgctggtggagattacgggtggatttcgtcgtagtaaaccttttggtcacgacgttgatctgcttatcacatctccgggagctgagaaagaacaagaagaccagctcctgcagaaagtgaccaatctgtggaagaaacaagggttgttgctgtacggtcgtctgcgtgaaagtcgctttgaagatgggaaactcccatcccgcaagatcgatgccctggaccattttgcgaaatgctttctgatcctcaaactttatcaccataaagtggacaaaagcaaatgggaaatgccgacgggttcgaacgaaagcgaggccaaaagttggaaagcaattcgcgtagatctggttcgttgtccctacgatcgttttgcgtttgcgttgttgggttggaccggaagccgcatgttcgaacgtgatctgcgccgctacgccacccacgagaagaagatgatgctggacaatcatgcgctgtatgacctgaccaagaaaatctttctcaaagctaaatcggaagaggaaattttcgcacatctggggcttgaatacctggaaccgtccgaacgtaacgca

SEQ ID NO: 1266 - protein, 529 aa, synthetic construct
  REGION 1..529: note = Variant of terminal deoxynucleotidyltransferase
MHHHHHHGGSGSHGIRTIDSDFGKKRQKKMDNHDSSAIYEIKFHEFVLFILEEKMGATRRTFLTDLARKKGFRVENELSDSVTHIVAENNSRSEVLAWLKTHKMEKTKQFELLDISWLIESMKVGKPVDTKGKYQLMESGEMSANPDPTEGRENELPPTTKTISQYACQRRTTLNNHNQRFTDALEILAENYEFKRNDDTCLTFMRAISVLKCLPFEVVSLKDTEGLPWIGDEVKGIMEEIIEVGESLEVQAVLNDERYQSFKLFKSVFGVGVKTADKWYRMGLRTLEDVRSSKTLKLTPMQKAGLCYYEDLADGVTKAEADAISLLVQDAVWTFDPDALVEITGGFRRSKPFGHDVDLLITSPGAEKEQEDQLLQKVTNLWKKQGLLLYGRLRESRFEDGKLPSRKIDALDHFAKCFLILKLYHHKVDKSKWEMPTGSNESEAKSWKAIRVDLVRCPYDRFAFALLGWTGSRMFERDLRRYATHEKKMMLDNHALYDLTKKIFLKAKSEEEIFAHLGLEYLEPSERNA

SEQ ID NO: 1267 - DNA, 1587 bp, synthetic construct
  misc_feature 1..1587: note = Variant of terminal deoxynucleotidyltransferase
  source 1..1587: mol_type = other DNA
atgcaccatcatcatcatcatggcggtagcggcagccacggcattcgtaccatcgattcggacttcgggaagaaacgccagaagaagatggataaccacgatagttccgccatctatgaaatcaaatttcacgagtttgtgctgttcattctcgaagagaaaatgggtgcgacgcgtcgtacttttctgacagatttagcccgcaagaaagggttccgcgtcgagaatgaactgtcagacagcgttacccacatcgtggcagaaaataattcacgctctgaagtattggcttggctgaagactcacaagatggagaagaccaagcaattcgaactgctggatattagctggcttatcgaaagcatgaaagttggtaaaccggtggacaccaaggggaaataccagttgatggaatcgggtgagatgagtgcgaacccagatccgacagagggtcgtgaaaacgagctgcctcctactacgaagaccatttctcagtatgcgtgtcaacgccgcaccaccctgaacaaccataataggcgttttacggacgcactggaaattcttgcggaaaattacgagttcaaacgcaacgatgatacttgtctgacctttatgcgtgctatttccgtgctgaaatgccttccgtttgaggtagttagcctgaaagacacggaaggattgccctggatcggtgatgaagtcaaagggattatggaagaaatcatcgaggtcggtgaatcgctggaagtgcaggccgtgctcaatgatgagcgctatcaaagcttcaaactgtttaagagtgtctttggagtgggggtgaagacagcagacaaatggtaccgtatgggtctgcgcacgctcgaggatgttcgttccagcaagaccctgaagttgaccccgatgcagaaagcgggtctgtgctattatgaagatcttgctgatggcgttacgaaagccgaagctgacgcgatttctctgctggttcaggatgcagtctggactttcgacccggatgcgctggtggagattacgggtggatttcgtcgtgggaaaccttttggtcacgacgttgatctgcttatcacatctccgggagctgagaaagaacaagaagaccagctcctgcagaaagtgaccaatctgtggaagaaacaagggttgttgctgtacggtcgtctgcgtgaaagtcgctttgaagatgggaaactcccatcccgcaagatcgatgccctggaccattttgcgaaatgctttctgatcctcaaactttatcaccataaagtggacaaaagcaaatgggaaatgccgacgggttcgaacgaaagcgaggccaaaagttggaaagcaattcgcgtagatctggttcgttgtccctacgatcgttttgcgtttgcgttgttgggttggaccggaagccgcatgttcgaacgtgatctgcgccgctacgccacccacgagaagaagatgatgctggacaatcatgcgctgtatgacctgaccaagaaaatctttctcaaagctaaatcggaagaggaaattttcgcacatctggggcttgaatacctggaaccgtccgaacgtaacgca

SEQ ID NO: 1268 - protein, 529 aa, synthetic construct
  REGION 1..529: note = Variant of terminal deoxynucleotidyltransferase
MHHHHHHGGSGSHGIRTIDSDFGKKRQKKMDNHDSSAIYEIKFHEFVLFILEEKMGATRRTFLTDLARKKGFRVENELSDSVTHIVAENNSRSEVLAWLKTHKMEKTKQFELLDISWLIESMKVGKPVDTKGKYQLMESGEMSANPDPTEGRENELPPTTKTISQYACQRRTTLNNHNRRFTDALEILAENYEFKRNDDTCLTFMRAISVLKCLPFEVVSLKDTEGLPWIGDEVKGIMEEIIEVGESLEVQAVLNDERYQSFKLFKSVFGVGVKTADKWYRMGLRTLEDVRSSKTLKLTPMQKAGLCYYEDLADGVTKAEADAISLLVQDAVWTFDPDALVEITGGFRRGKPFGHDVDLLITSPGAEKEQEDQLLQKVTNLWKKQGLLLYGRLRESRFEDGKLPSRKIDALDHFAKCFLILKLYHHKVDKSKWEMPTGSNESEAKSWKAIRVDLVRCPYDRFAFALLGWTGSRMFERDLRRYATHEKKMMLDNHALYDLTKKIFLKAKSEEEIFAHLGLEYLEPSERNA

SEQ ID NO: 1269 - DNA, 1587 bp, synthetic construct
  misc_feature 1..1587: note = Variant of terminal deoxynucleotidyltransferase
  source 1..1587: mol_type = other DNA
atgcaccatcatcatcatcatggcggtagcggcagccacggcattcgtaccatcgattcggacttcgggaagaaacgccagaagaagatggataaccacgatagttccgccatctatgaaatcaaatttcacgagtttgtgctgttcattctcgaagagaaaatgggtgcgacgcgtcgtacttttctgacagatttagcccgcaagaaagggttccgcgtcgagaatgaactgtcagacagcgttacccacatcgtggcagaaaataattcacgctctgaagtattggcttggctgaagactcacaagatggagaagaccaagcaattcgaactgctggatattagctggcttatcgaaagcatgaaagttggtaaaccggtggacaccaaggggaaataccagttgatggaatcgggtgagatgagtgcgaacccagatccgacagagggtcgtgaaaacgagctgcctcctactacgaagaccatttctcagtatgcgtgtcaacgccgcaccaccctgaacaaccataatcaacgttttacggacgcactggaaattcttgcggaaaattacgagttcaaacgcaacgatgatacttgtctgacctttatgcgtgctatttccgtgctgaaatgccttccgtttgaggtagttagcctgaaagacacggaaggattgccctggatcggtgatgaagtcaaagggattatggaagaaatcatcgaggtcggtgaatcgctggaagtgcaggccgtgctcaatgatgagcgctatcaaagcttcaaactgtttaagagtgtctttggagtgggggtgaagacagcagacaaatggtaccgtatgggtctgcgcacgctcgaggatgttcgttccagcaagaccctgaagttgaccccgatgcagaaagcgggtctgtgctattatgaagatcttgctgatggcgttacgaaagccgaagctgacgcgattgtgctgctggttcaggatgcagtctggactttcgacccggatgcgctggtggagattacgggtggatttcgtcgtgggaaaccttttggtcacgacgttgatctgcttatcacatctccgggagctgagaaagaacaagaagaccagctcctgcagaaagtgaccaatctgtggaagaaacaagggttgttgctgtacggtcgtctgcgtgaaagtcgctttgaagatgggaaactcccatcccgcaagatcgatgccctggaccattttgcgaaatgctttctgatcctcaaactttatcaccataaagtggacaaaagcaaatgggaaatgccgacgggttcgaacgaaagcgaggccaaaagttggaaagcaattcgcgtagatctggttcgttgtccctacgatcgttttgcgtttgcgttgttgggttggaccggaagccgcatgttcgaacgtgatctgcgccgctacgccacccacgagaagaagatgatgctggacaatcatgcgctgtatgacctgaccaagaaaatctttctcaaagctaaatcggaagaggaaattttcgcacatctggggcttgaatacctggaaccgtccgaacgtaacgca

SEQ ID NO: 1270 - protein, 529 aa, synthetic construct; identical to SEQ ID NO: 1164
  REGION 1..529: note = Variant of terminal deoxynucleotidyltransferase

SEQ ID NO: 1271 - DNA, 1587 bp, synthetic construct
  misc_feature 1..1587: note = Variant of terminal deoxynucleotidyltransferase
  source 1..1587: mol_type = other DNA
atgcaccatcatcatcatcatggcggtagcggcagccacggcattcgtaccatcgattcggacttcgggaagaaacgccagaagaagatggataaccacgatagttccgccatctatgaaatcaaatttcacgagtttgtgctgttcattctcgaagagaaaatgggtgcgacgcgtcgtacttttctgacagatttagcccgcaagaaagggttccgcgtcgagaatgaactgtcagacagcgttacccacatcgtggcagaaaataattcacgctctgaagtattggcttggctgaagactcacaagatggagaagaccaagcaattcgaactgctggatattagctggcttatcgaaagcatgaaagttggtaaaccggtggacaccaaggggaaataccagttgatggaatcgggtgagatgagtgcgaacccagatccgacagagggtcgtgaaaacgagctgcctcctactacgaagaccatttctcagtatgcgtgtcaacgccgcaccaccctgaacaaccataatcaacgttttacggacgcactggaaattcttgcggaaaattacgagttcaaacgcaacgatattacttgtctgacctttatgcgtgctatttccgtgctgaaatgccttccgtttgaggtagttagcctgaaagacacggaaggattgccctggatcggtgatgaagtcaaagggattatggaagaaatcatcgaggtcggtgaatcgctggaagtgcaggccgtgctcaatgatgagcgctatcaaagcttcaaactgtttaagagtgtctttggagtgggggtgaagacagcagacaaatggtaccgtatgggtctgcgcacgctcgaggatgttcgttccagcaagaccctgaagttgaccccgatgcagaaagcgggtctgtgctattatgaagatcttgctgatggcgttacgaaagccgaagctgacgcgatttctctgctggttcaggatgcagtctggactttcgacccggatgcgctggtggagattacgggtggatttcgtcgtgggaaaccttttggtcacgacgttgatctgcttatcacatctccgggagctgagaaagaacaagaagaccagctcctgcagaaagtgaccaatctgtggaagaaacaagggttgttgctgtacggtcgtctgcgtgaaagtcgctttgaagatgggaaactcccatcccgcaagatcgatgccctggaccattttgcgaaatgctttctgatcctcaaactttatcaccataaagtggacaaaagcaaatgggaaatgccgacgggttcgaacgaaagcgaggccaaaagttggaaagcaattcgcgtagatctggttcgttgtccctacgatcgttttgcgtttgcgttgttgggttggaccggaagccgcatgttcgaacgtgatctgcgccgctacgccacccacgagaagaagatgatgctggacaatcatgcgctgtatgacctgaccaagaaaatctttctcaaagctaaatcggaagaggaaattttcgcacatctggggcttgaatacctggaaccgtccgaacgtaacgca

SEQ ID NO: 1272 - protein, 529 aa, synthetic construct
  REGION 1..529: note = Variant of terminal deoxynucleotidyltransferase
MHHHHHHGGSGSHGIRTIDSDFGKKRQKKMDNHDSSAIYEIKFHEFVLFILEEKMGATRRTFLTDLARKKGFRVENELSDSVTHIVAENNSRSEVLAWLKTHKMEKTKQFELLDISWLIESMKVGKPVDTKGKYQLMESGEMSANPDPTEGRENELPPTTKTISQYACQRRTTLNNHNQRFTDALEILAENYEFKRNDITCLTFMRAISVLKCLPFEVVSLKDTEGLPWIGDEVKGIMEEIIEVGESLEVQAVLNDERYQSFKLFKSVFGVGVKTADKWYRMGLRTLEDVRSSKTLKLTPMQKAGLCYYEDLADGVTKAEADAISLLVQDAVWTFDPDALVEITGGFRRGKPFGHDVDLLITSPGAEKEQEDQLLQKVTNLWKKQGLLLYGRLRESRFEDGKLPSRKIDALDHFAKCFLILKLYHHKVDKSKWEMPTGSNESEAKSWKAIRVDLVRCPYDRFAFALLGWTGSRMFERDLRRYATHEKKMMLDNHALYDLTKKIFLKAKSEEEIFAHLGLEYLEPSERNA

SEQ ID NO: 1273 - DNA, 1587 bp, synthetic construct
  misc_feature 1..1587: note = Variant of terminal deoxynucleotidyltransferase
  source 1..1587: mol_type = other DNA
atgcaccatcatcatcatcatggcggtagcggcagccacggcattcgtaccatcgattcggacttcgggaagaaacgccagaagaagatggataaccacgatagttccgccatctatgaaatcaaatttcacgagtttgtgctgttcattctcgaagagaaaatgggtgcgacgcgtcgtacttttctgacagatttagcccgcaagaaagggttccgcgtcgagaatgaactgtcagacagcgttacccacatcgtggcagaaaataattcacgctctgaagtattggcttggctgaagactcacaagatggagaagaccaagcaattcgaactgctggatattagctggcttatcgaaagcatgaaagttggtaaaccggtggacaccaaggggaaataccagttgatggaatcgggtgagatgagtgcgaacccagatccgacagagggtcgtgaaaacgagctgcctcctactacgaagaccatttctcagtatgcgtgtcaacgccgcaccaccctgaacaaccataatcaacgttttacggacgcactggaaattcttgcggaaaattacgagttcaaacgcaacgatgatacttgtctgacctttatgcgtgctatttccgtgctgaaatgccttccgtttgaggtagttagcctgaaagacacggaaggattgccctggatcggtgatgaagtcaaagggattatggaagaaatcatcgaggtcggtgaatcgctggaagtgcaggccgtgctcaatgatgagcgctatcaaagcttcaaactgtttaagagtgtctttggagtgggggtgaagacagcagacaaatggtaccgtatgggtctgcgcacgctcgaggatgttcgttccagcaagaccctgaagttgaccccgatgcagaaagcgggtctgtgctattatgaagatcttgctgatggcgttacgaaagccgaagctgacgcgatttctctgctggttcaggatgcagtctggactttcgacccggatgcgctggtggagattacgggtggatttcgtcgtgggaaaccttttggtcacgacgttgatctgcttatcacatctccgggagctgagaaagaacaagaagaccagctcctgcagaaagtgaccaatctgtggaagaaacaagggttgttgctgtacggtcgtctgcgtgaaagtcgctttgaagatgggaaactcccatcccgcaagatcgatgccctggaccattttgcgaaatgctttctgatcctcaaactttatcaccataaagtggacaaaagcaaatgggaaatgccgacgggttcgaacgaaagcgaggccaaaagttggaaagcaattcgcgtagatctggttcgttgtccctacgatcgttttgcgtttgcgttgttgggttggaccggaagccgcatgttcgaacgtgatctgcgctggtacgccacccacgagaagaagatgatgctggacaatcatgcgctgtatgacctgaccaagaaaatctttctcaaagctaaatcggaagaggaaattttcgcacatctggggcttgaatacctggaaccgtccgaacgtaacgca

SEQ ID NO: 1274 - protein, 529 aa, synthetic construct
  REGION 1..529: note = Variant of terminal deoxynucleotidyltransferase
MHHHHHHGGSGSHGIRTIDSDFGKKRQKKMDNHDSSAIYEIKFHEFVLFILEEKMGATRRTFLTDLARKKGFRVENELSDSVTHIVAENNSRSEVLAWLKTHKMEKTKQFELLDISWLIESMKVGKPVDTKGKYQLMESGEMSANPDPTEGRENELPPTTKTISQYACQRRTTLNNHNQRFTDALEILAENYEFKRNDDTCLTFMRAISVLKCLPFEVVSLKDTEGLPWIGDEVKGIMEEIIEVGESLEVQAVLNDERYQSFKLFKSVFGVGVKTADKWYRMGLRTLEDVRSSKTLKLTPMQKAGLCYYEDLADGVTKAEADAISLLVQDAVWTFDPDALVEITGGFRRGKPFGHDVDLLITSPGAEKEQEDQLLQKVTNLWKKQGLLLYGRLRESRFEDGKLPSRKIDALDHFAKCFLILKLYHHKVDKSKWEMPTGSNESEAKSWKAIRVDLVRCPYDRFAFALLGWTGSRMFERDLRWYATHEKKMMLDNHALYDLTKKIFLKAKSEEEIFAHLGLEYLEPSERNA

SEQ ID NO: 1275 - DNA, 1587 bp, synthetic construct; identical to SEQ ID NO: 1105
  misc_feature 1..1587: note = Variant of terminal deoxynucleotidyltransferase
  source 1..1587: mol_type = other DNA

SEQ ID NO: 1276 - protein, 529 aa, synthetic construct; identical to SEQ ID NO: 1106
  REGION 1..529: note = Variant of terminal deoxynucleotidyltransferase

SEQ ID NO: 1277 - DNA, 1587 bp, synthetic construct
  misc_feature 1..1587: note = Variant of terminal deoxynucleotidyltransferase
  source 1..1587: mol_type = other DNA
atgcaccatcatcatcatcatggcggtagcggcagccacggcattcgtaccatcgattcggacttcgggaagaaacgccagaagaagatggataaccacgatagttccgccatctatgaaatcaaatttcacgagtttgtgctgttcattctcgaagagaaaatgggtgcgacgcgtcgtacttttctgacagatttagcccgcaagaaagggttccgcgtcgagaatgaactgtcagacagcgttacccacatcgtggcagaaaataattcacgctctgaagtattggcttggctgaagactcacaagatggagaagaccaagcaattcgaactgctggatattagctggcttatcgaaagcatgaaagttggtaaaccggtggacaccaaggggaaataccagttgatggaatcgggtgagatgagtgcgaacccagatccgacagagggtcgtgaaaacgagctgcctcctactacgaagaccatttctcagtatgcgtgtcaacgccgcaccaccctgaacaaccataatcaacgttttacggacgcactggaaattcttgcggaaaattacgagttcaaacgcaacgatgagacttgtctgacctttatgcgtgctatttccgtgctgaaatgccttccgtttgaggtagttagcctgaaagacacggaaggattgccctggatcggtgatgaagtcaaagggattatggaagaaatcatcgaggtcggtgaatcgctggaagtgcaggccgtgctcaatgatgagcgctatcaaagcttcaaactgtttaagagtgtctttggagtgggggtgaagacagcagacaaatggtaccgtatgggtctgcgcacgctcgaggatgttcgttccagcaagaccctgaagttgaccccgatgcagaaagcgggtctgtgctattatgaagatcttgctgatggcgttacgaaagccgaagctgacgcgatttctctgctggttcaggatgcagtctggactttcgacccggatgcgctggtggagattacgggtggatttcgtcgtgggaaaccttttggtcacgacgttgatctgcttatcacatctccgggagctgagaaagaacaagaagaccagctcctgcagaaagtgaccaatctgtggaagaaacaagggttgttgctgtacggtcgtctgcgtgaaagtcgctttgaagatgggaaactcccatcccgcaagatcgatgccctggaccattttgcgaaatgctttctgatcctcaaactttatcaccataaagtggacaaaagcaaatgggaaatgccgacgggttcgaacgaaagcgaggccaaaagttggaaagcaattcgcgtagatctggttcgttgtccctacgatcgttttgcgtttgcgttgttgggttggaccggaagccgcatgttcgaacgtgatctgcgccgctacgccacccacgagaagaagatgatgctggacaatcatgcgctgtatgacctgaccaagaaaatctttctcaaagctaaatcggaagaggaaattttcgcacatctggggcttgaatacctggaaccgtccgaacgtaacgca

SEQ ID NO: 1278 - protein, 529 aa, synthetic construct
  REGION 1..529: note = Variant of terminal deoxynucleotidyltransferase
MHHHHHHGGSGSHGIRTIDSDFGKKRQKKMDNHDSSAIYEIKFHEFVLFILEEKMGATRRTFLTDLARKKGFRVENELSDSVTHIVAENNSRSEVLAWLKTHKMEKTKQFELLDISWLIESMKVGKPVDTKGKYQLMESGEMSANPDPTEGRENELPPTTKTISQYACQRRTTLNNHNQRFTDALEILAENYEFKRNDETCLTFMRAISVLKCLPFEVVSLKDTEGLPWIGDEVKGIMEEIIEVGESLEVQAVLNDERYQSFKLFKSVFGVGVKTADKWYRMGLRTLEDVRSSKTLKLTPMQKAGLCYYEDLADGVTKAEADAISLLVQDAVWTFDPDALVEITGGFRRGKPFGHDVDLLITSPGAEKEQEDQLLQKVTNLWKKQGLLLYGRLRESRFEDGKLPSRKIDALDHFAKCFLILKLYHHKVDKSKWEMPTGSNESEAKSWKAIRVDLVRCPYDRFAFALLGWTGSRMFERDLRRYATHEKKMMLDNHALYDLTKKIFLKAKSEEEIFAHLGLEYLEPSERNA

SEQ ID NO: 1279 - DNA, 1587 bp, synthetic construct
  misc_feature 1..1587: note = Variant of terminal deoxynucleotidyltransferase
  source 1..1587: mol_type = other DNA
atgcaccatcatcatcatcatggcggtagcggcagccacggcattcgtaccatcgattcggacttcgggaagaaacgccagaagaagatggataaccacgatagttccgccatctatgaaatcaaatttcacgagtttgtgctgttcattctcgaagagaaaatgggtgcgacgcgtcgtacttttctgacagatttagcccgcaagaaagggttccgcgtcgagaatgaactgtcagacagcgttacccacatcgtggcagaaaataattcacgctctgaagtattggcttggctgaagactcacaagatggagaagaccaagcaattcgaactgctggatattagctggcttatcgaaagcatgaaagttggtaaaccggtggacaccaaggggaaataccagttgatggaatcgggtgagatgagtgcgaacccagatccgacagagggtcgtgaaaacgagctgcctcctactacgaagaccatttctcagtatgcgtgtcaacgccgcaccaccctgaacaaccataatcaacgttttacggacgcactggaaattcttgcggaaaattacgagttcaaacgcaacgatgatacttgtctgacctttatgcgtgctatttccgtgctgaaatgccttccgtttgaggtagttagcctgaaagacacggaaggattgccctggatcggtgatgaagtcaaagggattatggaagaaatcatcgaggtcggtgaatcgctggaagtgcaggccgtgctcaatgatgagcgctatcaaagcttcaaactgtttaagagtgtctttggagtgggggtgaagacagcagacaaatggtaccgtatgggtctgcgcacgctcgaggatgttcgttccagcaagaccctgaagttgaccccgatgcagaaagcgggtctggtttattatgaagatcttgctgatggcgttacgaaagccgaagctgacgcgatttctctgctggttcaggatgcagtctggactttcgacccggatgcgctggtggagattacgggtggatttcgtcgtgggaaaccttttggtcacgacgttgatctgcttatcacatctccgggagctgagaaagaacaagaagaccagctcctgcagaaagtgaccaatctgtggaagaaacaagggttgttgctgtacggtcgtctgcgtgaaagtcgctttgaagatgggaaactcccatcccgcaagatcgatgccctggaccattttgcgaaatgctttctgatcctcaaactttatcaccataaagtggacaaaagcaaatgggaaatgccgacgggttcgaacgaaagcgaggccaaaagttggaaagcaattcgcgtagatctggttcgttgtccctacgatcgttttgcgtttgcgttgttgggttggaccggaagccgcatgttcgaacgtgatctgcgccgctacgccacccacgagaagaagatgatgctggacaatcatgcgctgtatgacctgaccaagaaaatctttctcaaagctaaatcggaagaggaaattttcgcacatctggggcttgaatacctggaaccgtccgaacgtaacgca

SEQ ID NO: 1280 - protein, 529 aa, synthetic construct
  REGION 1..529: note = Variant of terminal deoxynucleotidyltransferase
MHHHHHHGGSGSHGIRTIDSDFGKKRQKKMDNHDSSAIYEIKFHEFVLFILEEKMGATRRTFLTDLARKKGFRVENELSDSVTHIVAENNSRSEVLAWLKTHKMEKTKQFELLDISWLIESMKVGKPVDTKGKYQLMESGEMSANPDPTEGRENELPPTTKTISQYACQRRTTLNNHNQRFTDALEILAENYEFKRNDDTCLTFMRAISVLKCLPFEVVSLKDTEGLPWIGDEVKGIMEEIIEVGESLEVQAVLNDERYQSFKLFKSVFGVGVKTADKWYRMGLRTLEDVRSSKTLKLTPMQKAGLVYYEDLADGVTKAEADAISLLVQDAVWTFDPDALVEITGGFRRGKPFGHDVDLLITSPGAEKEQEDQLLQKVTNLWKKQGLLLYGRLRESRFEDGKLPSRKIDALDHFAKCFLILKLYHHKVDKSKWEMPTGSNESEAKSWKAIRVDLVRCPYDRFAFALLGWTGSRMFERDLRRYATHEKKMMLDNHALYDLTKKIFLKAKSEEEIFAHLGLEYLEPSERNA

SEQ ID NO: 1281 - DNA, 1587 bp, synthetic construct
  misc_feature 1..1587: note = Variant of terminal deoxynucleotidyltransferase
  source 1..1587: mol_type = other DNA
atgcaccatcatcatcatcatggcggtagcggcagccacggcattcgtaccatcgattcggacttcgggaagaaacgccagaagaagatggataaccacgatagttccgccatctatgaaatcaaatttcacgagtttgtgctgttcattctcgaagagaaaatgggtgcgacgcgtcgtacttttctgacagatttagcccgcaagaaagggttccgcgtcgagaatgaactgtcagacagcgttacccacatcgtggcagaaaataattcacgctctgaagtattggcttggctgaagactcacaagatggagaagaccaagcaattcgaactgctggatattagctggcttatcgaaagcatgaaagttggtaaaccggtggacaccaaggggaaataccagttgatggaatcgggtgagatgagtgcgaacccagatccgacagagggtcgtgaaaacgagctgcctcctactacgaagaccatttctcagtatgcgtgtcaacgccgcaccaccctgaacaaccataatcaacgttttacggacgcactggaaattcttgcggaaaattacgagttcaaacgcaacgatgatacttgtctgcgttttatgcgtgctatttccgtgctgaaatgccttccgtttgaggtagttagcctgaaagacacggaaggattgccctggatcggtgatgaagtcaaagggattatggaagaaatcatcgaggtcggtgaatcgctggaagtgcaggccgtgctcaatgatgagcgctatcaaagcttcaaactgtttaagagtgtctttggagtgggggtgaagacagcagacaaatggtaccgtatgggtctgcgcacgctcgaggatgttcgttccagcaagaccctgaagttgaccccgatgcagaaagcgggtctgtgctattatgaagatcttgctgatggcgttacgaaagccgaagctgacgcgatttctctgctggttcaggatgcagtctggactttcgacccggatgcgctggtggagattacgggtggatttcgtcgtgggaaaccttttggtcacgacgttgatctgcttatcacatctccgggagctgagaaagaacaagaagaccagctcctgcagaaagtgaccaatctgtggaagaaacaagggttgttgctgtacggtcgtctgcgtgaaagtcgctttgaagatgggaaactcccatcccgcaagatcgatgccctggaccattttgcgaaatgctttctgatcctcaaactttatcaccataaagtggacaaaagcaaatgggaaatgccgacgggttcgaacgaaagcgaggccaaaagttggaaagcaattcgcgtagatctggttcgttgtccctacgatcgttttgcgtttgcgttgttgggttggaccggaagccgcatgttcgaacgtgatctgcgccgctacgccacccacgagaagaagatgatgctggacaatcatgcgctgtatgacctgaccaagaaaatctttctcaaagctaaatcggaagaggaaattttcgcacatctggggcttgaatacctggaaccgtccgaacgtaacgca

SEQ ID NO: 1282 - protein, 529 aa, synthetic construct; identical to SEQ ID NO: 1138
  REGION 1..529: note = Variant of terminal deoxynucleotidyltransferase

SEQ ID NO: 1283 - DNA, 1587 bp, synthetic construct
  misc_feature 1..1587: note = Variant of terminal deoxynucleotidyltransferase
  source 1..1587: mol_type = other DNA
atgcaccatcatcatcatcatggcggtagcggcagccacggcattcgtaccatcgattcggacttcgggaagaaacgccagaagaagatggataaccacgatagttccgccatctatgaaatcaaatttcacgagtttgtgctgttcattctcgaagagaaaatgggtgcgacgcgtcgtacttttctgacagatttagcccgcaagaaagggttccgcgtcgagaatgaactgtcagacagcgttacccacatcgtggcagaaaataattcacgctctgaagtattggcttggctgaagactcacaagatggagaagaccaagcaattcgaactgctggatattagctggcttatcgaaagcatgaaagttggtaaaccggtggacaccaaggggaaataccagttgatggaatcgggtgagatgagtgcgaacccagatccgacagagggtcgtgaaaacgagctgcctcctactacgaagaccatttctcagtatgcgtgtcaacgccgcaccaccctgaacaaccataatcaacgttttacggacgcactggaaattcttgcggaaaattacgagttcaaacgcaacgatgatacttgtctgacctttatgcgtgctatttccgtgctgaaatgccttccgtttgaggtagttagcctgaaagacacggaaggattgccctggatcggtgatgaagtcaaagggattatggaagaaatcatcgaggtcggtgaatcgctggaagtgcaggccgtgctcaatgatgagcgctatcaaagcttcaaactgtttaagagtgtctttggagtgggggtgaagacagcagacaaatggtaccgtatgggtctgcgcacgctcgaggatgttcgttccagcaagaccctgaagttgaccccgatgcagaaagcgggtctgtgctattatgaagatcttgctgatggcgttacgaaaagggaagctgacgcgatttctctgctggttcaggatgcagtctggactttcgacccggatgcgctggtggagattacgggtggatttcgtcgtgggaaaccttttggtcacgacgttgatctgcttatcacatctccgggagctgagaaagaacaagaagaccagctcctgcagaaagtgaccaatctgtggaagaaacaagggttgttgctgtacggtcgtctgcgtgaaagtcgctttgaagatgggaaactcccatcccgcaagatcgatgccctggaccattttgcgaaatgctttctgatcctcaaactttatcaccataaagtggacaaaagcaaatgggaaatgccgacgggttcgaacgaaagcgaggccaaaagttggaaagcaattcgcgtagatctggttcgttgtccctacgatcgttttgcgtttgcgttgttgggttggaccggaagccgcatgttcgaacgtgatctgcgccgctacgccacccacgagaagaagatgatgctggacaatcatgcgctgtatgacctgaccaagaaaatctttctcaaagctaaatcggaagaggaaattttcgcacatctggggcttgaatacctggaaccgtccgaacgtaacgca

SEQ ID NO: 1284 - protein, 529 aa, synthetic construct
  REGION 1..529: note = Variant of terminal deoxynucleotidyltransferase
MHHHHHHGGSGSHGIRTIDSDFGKKRQKKMDNHDSSAIYEIKFHEFVLFILEEKMGATRRTFLTDLARKKGFRVENELSDSVTHIVAENNSRSEVLAWLKTHKMEKTKQFELLDISWLIESMKVGKPVDTKGKYQLMESGEMSANPDPTEGRENELPPTTKTISQYACQRRTTLNNHNQRFTDALEILAENYEFKRNDDTCLTFMRAISVLKCLPFEVVSLKDTEGLPWIGDEVKGIMEEIIEVGESLEVQAVLNDERYQSFKLFKSVFGVGVKTADKWYRMGLRTLEDVRSSKTLKLTPMQKAGLCYYEDLADGVTKREADAISLLVQDAVWTFDPDALVEITGGFRRGKPFGHDVDLLITSPGAEKEQEDQLLQKVTNLWKKQGLLLYGRLRESRFEDGKLPSRKIDALDHFAKCFLILKLYHHKVDKSKWEMPTGSNESEAKSWKAIRVDLVRCPYDRFAFALLGWTGSRMFERDLRRYATHEKKMMLDNHALYDLTKKIFLKAKSEEEIFAHLGLEYLEPSERNA

SEQ ID NO: 1285 - DNA, 1587 bp, synthetic construct
  misc_feature 1..1587: note = Variant of terminal deoxynucleotidyltransferase
  source 1..1587: mol_type = other DNA
atgcaccatcatcatcatcatggcggtagcggcagccacggcattcgtaccatcgattcggacttcgggaagaaacgccagaagaagatggataaccacgatagttccgccatctatgaaatcaaatttcacgagtttgtgctgttcattctcgaagagaaaatgggtgcgacgcgtcgtacttttctgacagatttagcccgcaagaaagggttccgcgtcgagaatgaactgtcagacagcgttacccacatcgtggcagaaaataattcacgctctgaagtattggcttggctgaagactcacaagatggagaagaccaagcaattcgaactgctggatattagctggcttatcgaaagcatgaaagttggtaaaccggtggacaccaaggggaaataccagttgatggaatcgggtgagatgagtgcgaacccagatccgacagagggtcgtgaaaacgagctgcctcctactacgaagaccatttctcagtatgcgtgtcaacgccgcaccaccctgaacaaccataatcaacgttttacggacgcactggaaattcttgcggaaaattacgagttcaaacgcaacgatgatacttgtctgacctttatgcgtgctatttccgtgctgaaatgccttccgtttgaggtagttagcctgaaagacacggaaggattgccctggatcggtgatgaagtcaaagggattatggaagaaatcatcgaggtcggtgaatcgctggaagtgcaggccgtgctcaatgatgagcgctatcaaagcttcaaactgtttaagagtgtctttggagtgacggtgaagacagcagacaaatggtaccgtatgggtctgcgcacgctcgaggatgttcgttccagcaagaccctgaagttgaccccgatgcagaaagcgggtctgtgctattatgaagatcttgctgatggcgttacgaaagccgaagctgacgcgatttctctgctggttcaggatgcagtctggactttcgacccggatgcgctggtggagattacgggtggatttcgtcgtgggaaaccttttggtcacgacgttgatctgcttatcacatctccgggagctgagaaagaacaagaagaccagctcctgcagaaagtgaccaatctgtggaagaaacaagggttgttgctgtacggtcgtctgcgtgaaagtcgctttgaagatgggaaactcccatcccgcaagatcgatgccctggaccattttgcgaaatgctttctgatcctcaaactttatcaccataaagtggacaaaagcaaatgggaaatgccgacgggttcgaacgaaagcgaggccaaaagttggaaagcaattcgcgtagatctggttcgttgtccctacgatcgttttgcgtttgcgttgttgggttggaccggaagccgcatgttcgaacgtgatctgcgccgctacgccacccacgagaagaagatgatgctggacaatcatgcgctgtatgacctgaccaagaaaatctttctcaaagctaaatcggaagaggaaattttcgcacatctggggcttgaatacctggaaccgtccgaacgtaacgca

SEQ ID NO: 1286 - protein, 529 aa, synthetic construct
  REGION 1..529: note = Variant of terminal deoxynucleotidyltransferase
MHHHHHHGGSGSHGIRTIDSDFGKKRQKKMDNHDSSAIYEIKFHEFVLFILEEKMGATRRTFLTDLARKKGFRVENELSDSVTHIVAENNSRSEVLAWLKTHKMEKTKQFELLDISWLIESMKVGKPVDTKGKYQLMESGEMSANPDPTEGRENELPPTTKTISQYACQRRTTLNNHNQRFTDALEILAENYEFKRNDDTCLTFMRAISVLKCLPFEVVSLKDTEGLPWIGDEVKGIMEEIIEVGESLEVQAVLNDERYQSFKLFKSVFGVTVKTADKWYRMGLRTLEDVRSSKTLKLTPMQKAGLCYYEDLADGVTKAEADAISLLVQDAVWTFDPDALVEITGGFRRGKPFGHDVDLLITSPGAEKEQEDQLLQKVTNLWKKQGLLLYGRLRESRFEDGKLPSRKIDALDHFAKCFLILKLYHHKVDKSKWEMPTGSNESEAKSWKAIRVDLVRCPYDRFAFALLGWTGSRMFERDLRRYATHEKKMMLDNHALYDLTKKIFLKAKSEEEIFAHLGLEYLEPSERNA

SEQ ID NO: 1287 - DNA, 1587 bp, synthetic construct; identical to SEQ ID NO: 1121
  misc_feature 1..1587: note = Variant of terminal deoxynucleotidyltransferase
  source 1..1587: mol_type = other DNA

SEQ ID NO: 1288 - protein, 529 aa, synthetic construct; identical to SEQ ID NO: 1122
  REGION 1..529: note = Variant of terminal deoxynucleotidyltransferase

SEQ ID NO: 1289 - DNA, 1587 bp, synthetic construct
  misc_feature 1..1587: note = Variant of terminal deoxynucleotidyltransferase
  source 1..1587: mol_type = other DNA
atgcaccatcatcatcatcatggcggtagcggcagccacggcattcgtaccatcgattcggacttcgggaagaaacgccagaagaagatggataaccacgatagttccgccatctatgaaatcaaatttcacgagtttgtgctgttcattctcgaagagaaaatgggtgcgacgcgtcgtacttttctgacagatttagcccgcaagaaagggttccgcgtcgagaatgaactgtcagacagcgttacccacatcgtggcagaaaataattcacgctctgaagtattggcttggctgaagactcacaagatggagaagaccaagcaattcgaactgctggatattagctggcttatcgaaagcatgaaagttggtaaaccggtggacaccaaggggaaataccagttgatggaatcgggtgagatgagtgcgaacccagatccgacagagggtcgtgaaaacgagctgcctcctactacgaagaccatttctcagtatgcgtgtcaacgccgcaccaccctggataaccataatcaacgttttacggacgcactggaaattcttgcggaaaattacgagttcaaacgcaacgatgatacttgtctgacctttatgcgtgctatttccgtgctgaaatgccttccgtttgaggtagttagcctgaaagacacggaaggattgccctggatcggtgatgaagtcaaagggattatggaagaaatcatcgaggtcggtgaatcgctggaagtgcaggccgtgctcaatgatgagcgctatcaaagcttcaaactgtttaagagtgtctttggagtgggggtgaagacagcagacaaatggtaccgtatgggtctgcgcacgctcgaggatgttcgttccagcaagaccctgaagttgaccccgatgcagaaagcgggtctgtgctattatgaagatcttgctgatggcgttacgaaagccgaagctgacgcgatttctctgctggttcaggatgcagtctggactttcgacccggatgcgctggtggagattacgggtggatttcgtcgtgggaaaccttttggtcacgacgttgatctgcttatcacatctccgggagctgagaaagaacaagaagaccagctcctgcagaaagtgaccaatctgtggaagaaacaagggttgttgctgtacggtcgtctgcgtgaaagtcgctttgaagatgggaaactcccatcccgcaagatcgatgccctggaccattttgcgaaatgctttctgatcctcaaactttatcaccataaagtggacaaaagcaaatgggaaatgccgacgggttcgaacgaaagcgaggccaaaagttggaaagcaattcgcgtagatctggttcgttgtccctacgatcgttttgcgtttgcgttgttgggttggaccggaagccgcatgttcgaacgtgatctgcgccgctacgccacccacgagaagaagatgatgctggacaatcatgcgctgtatgacctgaccaagaaaatctttctcaaagctaaatcggaagaggaaattttcgcacatctggggcttgaatacctggaaccgtccgaacgtaacgca

SEQ ID NO: 1290 - protein, 529 aa, synthetic construct
  REGION 1..529: note = Variant of terminal deoxynucleotidyltransferase
MHHHHHHGGSGSHGIRTIDSDFGKKRQKKMDNHDSSAIYEIKFHEFVLFILEEKMGATRRTFLTDLARKKGFRVENELSDSVTHIVAENNSRSEVLAWLKTHKMEKTKQFELLDISWLIESMKVGKPVDTKGKYQLMESGEMSANPDPTEGRENELPPTTKTISQYACQRRTTLDNHNQRFTDALEILAENYEFKRNDDTCLTFMRAISVLKCLPFEVVSLKDTEGLPWIGDEVKGIMEEIIEVGESLEVQAVLNDERYQSFKLFKSVFGVGVKTADKWYRMGLRTLEDVRSSKTLKLTPMQKAGLCYYEDLADGVTKAEADAISLLVQDAVWTFDPDALVEITGGFRRGKPFGHDVDLLITSPGAEKEQEDQLLQKVTNLWKKQGLLLYGRLRESRFEDGKLPSRKIDALDHFAKCFLILKLYHHKVDKSKWEMPTGSNESEAKSWKAIRVDLVRCPYDRFAFALLGWTGSRMFERDLRRYATHEKKMMLDNHALYDLTKKIFLKAKSEEEIFAHLGLEYLEPSERNA

SEQ ID NO: 1291 - DNA, 1587 bp, synthetic construct
  misc_feature 1..1587: note = Variant of terminal deoxynucleotidyltransferase
  source 1..1587: mol_type = other DNA
atgcaccatcatcatcatcatggcggtagcggcagccacggcattcgtaccatcgattcggacttcgggaagaaacgccagaagaagatggataaccacgatagttccgccatctatgaaatcaaatttcacgagtttgtgctgttcattctcgaagagaaaatgggtgcgacgcgtcgtacttttctgacagatttagcccgcaagaaagggttccgcgtcgagaatgaactgtcagacagcgttacccacatcgtggcagaaaataattcacgctctgaagtattggcttggctgaagactcacaagatggagaagaccaagcaattcgaactgctggatattagctggcttatcgaaagcatgaaagttggtaaaccggtggacaccaaggggaaataccagttgatggaatcgggtgagatgagtgcgaacccagatccgacagagggtcgtgaaaacgagctgcctcctactacgaagaccatttctcagtatgcgtgtcaacgccgcaccaccctgaacaaccataatcaacgttttacggacgcactggaaattcttgcggaaaattacgagttcaaacgcaacgatgatacttgtctgacctttatgcgtgctatttccgtgctgaaatgccttccgtttgaggtagttagcctgaaagacacggaaggattgccctggatcggtgatgaagtcaaagggattatggaagaaatcatcgaggtcggtgaatcgctggaagtgcaggccgtgctcaatgatgagcgctatcaaagcttcaaactgtttaagagtgtctttggagtgggggtgaagacagcagacaaatggtaccgtatgggtctgcgcacgctcgaggatgttcgttccagcaagaccctgaagttgaccccgatgcagaaagcgggtctgtgctattatgaagatcttgctgatggcgttacgaaagccgaagctgacgcgattgcgctgctggttcaggatgcagtctggactttcgacccggatgcgctggtggagattacgggtggatttcgtcgtgggaaaccttttggtcacgacgttgatctgcttatcacatctccgggagctgagaaagaacaagaagaccagctcctgcagaaagtgaccaatctgtggaagaaacaagggttgttgctgtacggtcgtctgcgtgaaagtcgctttgaagatgggaaactcccatcccgcaagatcgatgccctggaccattttgcgaaatgctttctgatcctcaaactttatcaccataaagtggacaaaagcaaatgggaaatgccgacgggttcgaacgaaagcgaggccaaaagttggaaagcaattcgcgtagatctggttcgttgtccctacgatcgttttgcgtttgcgttgttgggttggaccggaagccgcatgttcgaacgtgatctgcgccgctacgccacccacgagaagaagatgatgctggacaatcatgcgctgtatgacctgaccaagaaaatctttctcaaagctaaatcggaagaggaaattttcgcacatctggggcttgaatacctggaaccgtccgaacgtaacgca

SEQ ID NO: 1292 - protein, 529 aa, synthetic construct
  REGION 1..529: note = Variant of terminal deoxynucleotidyltransferase
MHHHHHHGGSGSHGIRTIDSDFGKKRQKKMDNHDSSAIYEIKFHEFVLFILEEKMGATRRTFLTDLARKKGFRVENELSDSVTHIVAENNSRSEVLAWLKTHKMEKTKQFELLDISWLIESMKVGKPVDTKGKYQLMESGEMSANPDPTEGRENELPPTTKTISQYACQRRTTLNNHNQRFTDALEILAENYEFKRNDDTCLTFMRAISVLKCLPFEVVSLKDTEGLPWIGDEVKGIMEEIIEVGESLEVQAVLNDERYQSFKLFKSVFGVGVKTADKWYRMGLRTLEDVRSSKTLKLTPMQKAGLCYYEDLADGVTKAEADAIALLVQDAVWTFDPDALVEITGGFRRGKPFGHDVDLLITSPGAEKEQEDQLLQKVTNLWKKQGLLLYGRLRESRFEDGKLPSRKIDALDHFAKCFLILKLYHHKVDKSKWEMPTGSNESEAKSWKAIRVDLVRCPYDRFAFALLGWTGSRMFERDLRRYATHEKKMMLDNHALYDLTKKIFLKAKSEEEIFAHLGLEYLEPSERNA

SEQ ID NO: 1293 - DNA, 1587 bp, synthetic construct
  misc_feature 1..1587: note = Variant of terminal deoxynucleotidyltransferase
  source 1..1587: mol_type = other DNA
atgcaccatcatcatcatcatggcggtagcggcagccacggcattcgtaccatcgattcggacttcgggaagaaacgccagaagaagatggataaccacgatagttccgccatctatgaaatcaaatttcacgagtttgtgctgttcattctcgaagagaaaatgggtgcgacgcgtcgtacttttctgacagatttagcccgcaagaaagggttccgcgtcgagaatgaactgtcagacagcgttacccacatcgtggcagaaaataattcacgctctgaagtattggcttggctgaagactcacaagatggagaagaccaagcaattcgaactgctggatattagctggcttatcgaaagcatgaaagttggtaaaccggtggacaccaaggggaaataccagttgatggaatcgggtgagatgagtgcgaacccagatccgacagagggtcgtgaaaacgagctgcctcctactacgaagaccatttctcagtatgcgtgtcaacgccgcaccaccctgaacaaccataatcaacgttttacggacgcactggaaattcttgcggaaaattacgagttcaaacgcaacgatgatacttgtctgacctttatgcgtgctatttccgtgctgaaatgccttccgtttgaggtagttagcctgaaagacacggaaggattgccctggatcggtgatgaagtcaaagggattatggaagaaatcatcgaggtcggtgaatcgctggaagtgcaggccgtgctcaatgatgagcgctatcaaagcttcaaactgtttaagagtgtctttggagtggggatgaagacagcagacaaatggtaccgtatgggtctgcgcacgctcgaggatgttcgttccagcaagaccctgaagttgaccccgatgcagaaagcgggtctgtgctattatgaagatcttgctgatggcgttacgaaagccgaagctgacgcgatttctctgctggttcaggatgcagtctggactttcgacccggatgcgctggtggagattacgggtggatttcgtcgtgggaaaccttttggtcacgacgttgatctgcttatcacatctccgggagctgagaaagaacaagaagaccagctcctgcagaaagtgaccaatctgtggaagaaacaagggttgttgctgtacggtcgtctgcgtgaaagtcgctttgaagatgggaaactcccatcccgcaagatcgatgccctggaccattttgcgaaatgctttctgatcctcaaactttatcaccataaagtggacaaaagcaaatgggaaatgccgacgggttcgaacgaaagcgaggccaaaagttggaaagcaattcgcgtagatctggttcgttgtccctacgatcgttttgcgtttgcgttgttgggttggaccggaagccgcatgttcgaacgtgatctgcgccgctacgccacccacgagaagaagatgatgctggacaatcatgcgctgtatgacctgaccaagaaaatctttctcaaagctaaatcggaagaggaaattttcgcacatctggggcttgaatacctggaaccgtccgaacgtaacgca

SEQ ID NO: 1294 - protein, 529 aa, synthetic construct
  REGION 1..529: note = Variant of terminal deoxynucleotidyltransferase
MHHHHHHGGSGSHGIRTIDSDFGKKRQKKMDNHDSSAIYEIKFHEFVLFILEEKMGATRRTFLTDLARKKGFRVENELSDSVTHIVAENNSRSEVLAWLKTHKMEKTKQFELLDISWLIESMKVGKPVDTKGKYQLMESGEMSANPDPTEGRENELPPTTKTISQYACQRRTTLNNHNQRFTDALEILAENYEFKRNDDTCLTFMRAISVLKCLPFEVVSLKDTEGLPWIGDEVKGIMEEIIEVGESLEVQAVLNDERYQSFKLFKSVFGVGMKTADKWYRMGLRTLEDVRSSKTLKLTPMQKAGLCYYEDLADGVTKAEADAISLLVQDAVWTFDPDALVEITGGFRRGKPFGHDVDLLITSPGAEKEQEDQLLQKVTNLWKKQGLLLYGRLRESRFEDGKLPSRKIDALDHFAKCFLILKLYHHKVDKSKWEMPTGSNESEAKSWKAIRVDLVRCPYDRFAFALLGWTGSRMFERDLRRYATHEKKMMLDNHALYDLTKKIFLKAKSEEEIFAHLGLEYLEPSERNA

SEQ ID NO: 1295 - DNA, 1587 bp, synthetic construct
  misc_feature 1..1587: note = Variant of terminal deoxynucleotidyltransferase
  source 1..1587: mol_type = other DNA
atgcaccatcatcatcatcatggcggtagcggcagccacggcattcgtaccatcgattcggacttcgggaagaaacgccagaagaagatggataaccacgatagttccgccatctatgaaatcaaatttcacgagtttgtgctgttcattctcgaagagaaaatgggtgcgacgcgtcgtacttttctgacagatttagcccgcaagaaagggttccgcgtcgagaatgaactgtcagacagcgttacccacatcgtggcagaaaataattcacgctctgaagtattggcttggctgaagactcacaagatggagaagaccaagcaattcgaactgctggatattagctggcttatcgaaagcatgaaagttggtaaaccggtggacaccaaggggaaataccagttgatggaatcgggtgagatgagtgcgaacccagatccgacagagggtcgtgaaaacgagctgcctcctactacgaagaccatttctcagtatgcgtgtcaacgccgcaccaccctgaacaaccataatcaacgttttacggacgcactggaaattcttgcggaaaattacgagttcaaacgcaacgatgatacttgtctgacctttatgcgtgctatttccgtgctgaaatgccttccgtttgaggtagttagcctgaaagacacggaaggattgccctggatcggtgatgaagtcaaagggattatggaagaaatcatcgaggtcggtgaatcgctggaagtgcaggccgtgctcaatgatgagcgctatcaaagcttcaaactgtttaagagtgtctttggagtgggggtgaagacagcagacaaatggtaccgtatgggtctgcgcacgctcgaggatgttcgttccagcaagaccctgaagttgaccccgatgcagaaagcgggtctgtgctattatgaagatcttgctgatggcgttacgaaagccgaagctaaggcgatttctctgctggttcaggatgcagtctggactttcgacccggatgcgctggtggagattacgggtggatttcgtcgtgggaaaccttttggtcacgacgttgatctgcttatcacatctccgggagctgagaaagaacaagaagaccagctcctgcagaaagtgaccaatctgtggaagaaacaagggttgttgctgtacggtcgtctgcgtgaaagtcgctttgaagatgggaaactcccatcccgcaagatcgatgccctggaccattttgcgaaatgctttctgatcctcaaactttatcaccataaagtggacaaaagcaaatgggaaatgccgacgggttcgaacgaaagcgaggccaaaagttggaaagcaattcgcgtagatctggttcgttgtccctacgatcgttttgcgtttgcgttgttgggttggaccggaagccgcatgttcgaacgtgatctgcgccgctacgccacccacgagaagaagatgatgctggacaatcatgcgctgtatgacctgaccaagaaaatctttctcaaagctaaatcggaagaggaaattttcgcacatctggggcttgaatacctggaaccgtccgaacgtaacgca

SEQ ID NO: 1296 - protein, 529 aa, synthetic construct
  REGION 1..529: note = Variant of terminal deoxynucleotidyltransferase
MHHHHHHGGSGSHGIRTIDSDFGKKRQKKMDNHDSSAIYEIKFHEFVLFILEEKMGATRRTFLTDLARKKGFRVENELSDSVTHIVAENNSRSEVLAWLKTHKMEKTKQFELLDISWLIESMKVGKPVDTKGKYQLMESGEMSANPDPTEGRENELPPTTKTISQYACQRRTTLNNHNQRFTDALEILAENYEFKRNDDTCLTFMRAISVLKCLPFEVVSLKDTEGLPWIGDEVKGIMEEIIEVGESLEVQAVLNDERYQSFKLFKSVFGVGVKTADKWYRMGLRTLEDVRSSKTLKLTPMQKAGLCYYEDLADGVTKAEAKAISLLVQDAVWTFDPDALVEITGGFRRGKPFGHDVDLLITSPGAEKEQEDQLLQKVTNLWKKQGLLLYGRLRESRFEDGKLPSRKIDALDHFAKCFLILKLYHHKVDKSKWEMPTGSNESEAKSWKAIRVDLVRCPYDRFAFALLGWTGSRMFERDLRRYATHEKKMMLDNHALYDLTKKIFLKAKSEEEIFAHLGLEYLEPSERNA

SEQ ID NO: 1297 - DNA, 1587 bp, synthetic construct
  misc_feature 1..1587: note = Variant of terminal deoxynucleotidyltransferase
  source 1..1587: mol_type = other DNA
atgcaccatcatcatcatcatggcggtagcggcagccacggcattcgtaccatcgattcggacttcgggaagaaacgccagaagaagatggataaccacgatagttccgccatctatgaaatcaaatttcacgagtttgtgctgttcattctcgaagagaaaatgggtgcgacgcgtcgtacttttctgacagatttagcccgcaagaaagggttccgcgtcgagaatgaactgtcagacagcgttacccacatcgtggcagaaaataattcacgctctgaagtattggcttggctgaagactcacaagatggagaagaccaagcaattcgaactgctggatattagctggcttatcgaaagcatgaaagttggtaaaccggtggacaccaaggggaaataccagttgatggaatcgggtgagatgagtgcgaacccagatccgacagagggtcgtgaaaacgagctgcctcctactacgaagaccatttctcagtatgcgtgtcaacgccgcaccaccctgaacaaccataatcaacgttttacggacgcactggaaattcttgcggaaaattacgagttcaaacgcaacgatgatacttgtctgacctttatgcgtgctatttccgtgctgaaatgccttccgtttgaggtagttagcctgaaagacacggaaggattgccctggatcggtgatgaagtcaaagggattatggaagaaatcatcgaggtcggtgaatcgctggaagtgcaggccgtgctcaatgatgagcgctatcaaagcttcaaactgtttaagagtgtctttggagtgggggtgaagacagcagacaaatggtaccgtatgggtctgcgcacgctcgaggatgttcgttccagcaagaccctgaagttgaccccgatgcagaaagcgggtctgtgctattatgaagatcttgctgatggcgttacgaaagccgaagctgacgcgatttctctgctggttcaggatgcagtctggactttcgacccggatgcgctggtggagattacgggtggatttcgtcgtgggaaaccttttggtcacgacgttgatctgcttatcacatctccgggagctgagaaagaacaagaagaccagctcctgcagaaagtgaccaatctgtggaagaaacaagggttgttgctgtacggtcgtctgcgtgaaagtcgctttgaagatgggaaactcccatcccgcaagatcgatgccctggaccattttgcgaaatgctttctgatcctcaaactttatcaccataaagtggacaaaagcaaatgggaaatgccgacgggttcgaacgaaagcgaggccaaaagttggaaagcaattcgcgtagatctggttcgttgtccctacgatcgtcaggcgtttgcgttgttgggttggaccggaagccgcatgttcgaacgtgatctgcgccgctacgccacccacgagaagaagatgatgctggacaatcatgcgctgtatgacctgaccaagaaaatctttctcaaagctaaatcggaagaggaaattttcgcacatctggggcttgaatacctggaaccgtccgaacgtaacgca

SEQ ID NO: 1298 - protein, 529 aa, synthetic construct
  REGION 1..529: note = Variant of terminal deoxynucleotidyltransferase
MHHHHHHGGSGSHGIRTIDSDFGKKRQKKMDNHDSSAIYEIKFHEFVLFILEEKMGATRRTFLTDLARKKGFRVENELSDSVTHIVAENNSRSEVLAWLKTHKMEKTKQFELLDISWLIESMKVGKPVDTKGKYQLMESGEMSANPDPTEGRENELPPTTKTISQYACQRRTTLNNHNQRFTDALEILAENYEFKRNDDTCLTFMRAISVLKCLPFEVVSLKDTEGLPWIGDEVKGIMEEIIEVGESLEVQAVLNDERYQSFKLFKSVFGVGVKTADKWYRMGLRTLEDVRSSKTLKLTPMQKAGLCYYEDLADGVTKAEADAISLLVQDAVWTFDPDALVEITGGFRRGKPFGHDVDLLITSPGAEKEQEDQLLQKVTNLWKKQGLLLYGRLRESRFEDGKLPSRKIDALDHFAKCFLILKLYHHKVDKSKWEMPTGSNESEAKSWKAIRVDLVRCPYDRQAFALLGWTGSRMFERDLRRYATHEKKMMLDNHALYDLTKKIFLKAKSEEEIFAHLGLEYLEPSERNA

SEQ ID NO: 1299 - DNA, 1587 bp, synthetic construct
  misc_feature 1..1587: note = Variant of terminal deoxynucleotidyltransferase
  source 1..1587: mol_type = other DNA
atgcaccatcatcatcatcatggcggtagcggcagccacggcattcgtaccatcgattcggacttcgggaagaaacgccagaagaagatggataaccacgatagttccgccatctatgaaatcaaatttcacgagtttgtgctgttcattctcgaagagaaaatgggtgcgacgcgtcgtacttttctgacagatttagcccgcaagaaagggttccgcgtcgagaatgaactgtcagacagcgttacccacatcgtggcagaaaataattcacgctctgaagtattggcttggctgaagactcacaagatggagaagaccaagcaattcgaactgctggatattagctggcttatcgaaagcatgaaagttggtaaaccggtggacaccaaggggaaataccagttgatggaatcgggtgagatgagtgcgaacccagatccgacagagggtcgtgaaaacgagctgcctcctactacgaagaccatttctcagtatgcgtgtcaacgccgcaccaccctgaacaaccataatcaacgttttacggacgcactggaaattcttgcggaaaattacgagttcaaacgcaacgatgatacttgtctgacctttatgcgtgctatttccgtgctgaaatgccttccgtttgaggtagttagcctgaaagacacggaaggattgccctggatcggtgatgaagtcaaagggattatggaagaaatcatcgaggtcggtgaatcgctggaagtgcaggccgtgctcaatgatgagcgctatcaaagcttcaaactgtttaagagtgtctttggagtgggggtgaagacagcagacaaatggtaccgtatgggtctgcgcacgctcgaggatgttcgttccagcaagaccctgaagttgaccccgatgcagaaagcgggtctgtgctattatgaagatcttgctgatggcgttacgaaagccgaagctgacgcgatttctctgctggttcaggatgcagtctggactttcgacccggatgcgctggtggagattacgggtggatttcgtcgtgggaaaccttttggtcacgacgttgatctgcttatcacatctccgggagctgagaaagaacaagaagaccagctcctgcagaaagtgaccaatctgtggaagaaacaagggttgttgctgtacggtcgtctgcgtgaaagtcgctttgaagatgggaaactcccatcccgcaagggggatgccctggaccattttgcgaaatgctttctgatcctcaaactttatcaccataaagtggacaaaagcaaatgggaaatgccgacgggttcgaacgaaagcgaggccaaaagttggaaagcaattcgcgtagatctggttcgttgtccctacgatcgttttgcgtttgcgttgttgggttggaccggaagccgcatgttcgaacgtgatctgcgccgctacgccacccacgagaagaagatgatgctggacaatcatgcgctgtatgacctgaccaagaaaatctttctcaaagctaaatcggaagaggaaattttcgcacatctggggcttgaatacctggaaccgtccgaacgtaacgca

SEQ ID NO: 1300 - protein, 529 aa, synthetic construct
  REGION 1..529: note = Variant of terminal deoxynucleotidyltransferase
MHHHHHHGGSGSHGIRTIDSDFGKKRQKKMDNHDSSAIYEIKFHEFVLFILEEKMGATRRTFLTDLARKKGFRVENELSDSVTHIVAENNSRSEVLAWLKTHKMEKTKQFELLDISWLIESMKVGKPVDTKGKYQLMESGEMSANPDPTEGRENELPPTTKTISQYACQRRTTLNNHNQRFTDALEILAENYEFKRNDDTCLTFMRAISVLKCLPFEVVSLKDTEGLPWIGDEVKGIMEEIIEVGESLEVQAVLNDERYQSFKLFKSVFGVGVKTADKWYRMGLRTLEDVRSSKTLKLTPMQKAGLCYYEDLADGVTKAEADAISLLVQDAVWTFDPDALVEITGGFRRGKPFGHDVDLLITSPGAEKEQEDQLLQKVTNLWKKQGLLLYGRLRESRFEDGKLPSRKGDALDHFAKCFLILKLYHHKVDKSKWEMPTGSNESEAKSWKAIRVDLVRCPYDRFAFALLGWTGSRMFERDLRRYATHEKKMMLDNHALYDLTKKIFLKAKSEEEIFAHLGLEYLEPSERNA

SEQ ID NO: 1301 - DNA, 1587 bp, synthetic construct
  misc_feature 1..1587: note = Variant of terminal deoxynucleotidyltransferase
  source 1..1587: mol_type = other DNA
atgcaccatcatcatcatcatggcggtagcggcagccacggcattcgtaccatcgattcggacttcgggaagaaacgccagaagaagatggataaccacgatagttccgccatctatgaaatcaaatttcacgagtttgtgctgttcattctcgaagagaaaatgggtgcgacgcgtcgtacttttctgacagatttagcccgcaagaaagggttccgcgtcgagaatgaactgtcagacagcgttacccacatcgtggcagaaaataattcacgctctgaagtattggcttggctgaagactcacaagatggagaagaccaagcaattcgaactgctggatattagctggcttatcgaaagcatgaaagttggtaaaccggtggacaccaaggggaaataccagttgatggaatcgggtgagatgagtgcgaacccagatccgacagagggtcgtgaaaacgagctgcctcctactacgaagaccatttctcagtatgcgtgtcaacgccgcaccaccctgaacaaccataatcaacgttttacggacgcactggaaattcttgcggaaaattacgagttcaaacgcaacgatgatacttggctgacctttatgcgtgctatttccgtgctgaaatgccttccgtttgaggtagttagcctgaaagacacggaaggattgccctggatcggtgatgaagtcaaagggattatggaagaaatcatcgaggtcggtgaatcgctggaagtgcaggccgtgctcaatgatgagcgctatcaaagcttcaaactgtttaagagtgtctttggagtgggggtgaagacagcagacaaatggtaccgtatgggtctgcgcacgctcgaggatgttcgttccagcaagaccctgaagttgaccccgatgcagaaagcgggtctgtgctattatgaagatcttgctgatggcgttacgaaagccgaagctgacgcgatttctctgctggttcaggatgcagtctggactttcgacccggatgcgctggtggagattacgggtggatttcgtcgtgggaaaccttttggtcacgacgttgatctgcttatcacatctccgggagctgagaaagaacaagaagaccagctcctgcagaaagtgaccaatctgtggaagaaacaagggttgttgctgtacggtcgtctgcgtgaaagtcgctttgaagatgggaaactcccatcccgcaagatcgatgccctggaccattttgcgaaatgctttctgatcctcaaactttatcaccataaagtggacaaaagcaaatgggaaatgccgacgggttcgaacgaaagcgaggccaaaagttggaaagcaattcgcgtagatctggttcgttgtccctacgatcgttttgcgtttgcgttgttgggttggaccggaagccgcatgttcgaacgtgatctgcgccgctacgccacccacgagaagaagatgatgctggacaatcatgcgctgtatgacctgaccaagaaaatctttctcaaagctaaatcggaagaggaaattttcgcacatctggggcttgaatacctggaaccgtccgaacgtaacgca

SEQ ID NO: 1302 - protein, 529 aa, synthetic construct
  REGION 1..529: note = Variant of terminal deoxynucleotidyltransferase
MHHHHHHGGSGSHGIRTIDSDFGKKRQKKMDNHDSSAIYEIKFHEFVLFILEEKMGATRRTFLTDLARKKGFRVENELSDSVTHIVAENNSRSEVLAWLKTHKMEKTKQFELLDISWLIESMKVGKPVDTKGKYQLMESGEMSANPDPTEGRENELPPTTKTISQYACQRRTTLNNHNQRFTDALEILAENYEFKRNDDTWLTFMRAISVLKCLPFEVVSLKDTEGLPWIGDEVKGIMEEIIEVGESLEVQAVLNDERYQSFKLFKSVFGVGVKTADKWYRMGLRTLEDVRSSKTLKLTPMQKAGLCYYEDLADGVTKAEADAISLLVQDAVWTFDPDALVEITGGFRRGKPFGHDVDLLITSPGAEKEQEDQLLQKVTNLWKKQGLLLYGRLRESRFEDGKLPSRKIDALDHFAKCFLILKLYHHKVDKSKWEMPTGSNESEAKSWKAIRVDLVRCPYDRFAFALLGWTGSRMFERDLRRYATHEKKMMLDNHALYDLTKKIFLKAKSEEEIFAHLGLEYLEPSERNA

SEQ ID NO: 1303 - DNA, 1587 bp, synthetic construct
  misc_feature 1..1587: note = Variant of terminal deoxynucleotidyltransferase
  source 1..1587: mol_type = other DNA
atgcaccatcatcatcatcatggcggtagcggcagccacggcattcgtaccatcgattcggacttcgggaagaaacgccagaagaagatggataaccacgatagttccgccatctatgaaatcaaatttcacgagtttgtgctgttcattctcgaagagaaaatgggtgcgacgcgtcgtacttttctgacagatttagcccgcaagaaagggttccgcgtcgagaatgaactgtcagacagcgttacccacatcgtggcagaaaataattcacgctctgaagtattggcttggctgaagactcacaagatggagaagaccaagcaattcgaactgctggatattagctggcttatcgaaagcatgaaagttggtaaaccggtggacaccaaggggaaataccagttgatggaatcgggtgagatgagtgcgaacccagatccgacagagggtcgtgaaaacgagctgcctcctactacgaagaccatttctcagtatgcgtgtcaacgccgcaccaccctgattaaccataatcaacgttttacggacgcactggaaattcttgcggaaaattacgagttcaaacgcaacgatgatacttgtctgacctttatgcgtgctatttccgtgctgaaatgccttccgtttgaggtagttagcctgaaagacacggaaggattgccctggatcggtgatgaagtcaaagggattatggaagaaatcatcgaggtcggtgaatcgctggaagtgcaggccgtgctcaatgatgagcgctatcaaagcttcaaactgtttaagagtgtctttggagtgggggtgaagacagcagacaaatggtaccgtatgggtctgcgcacgctcgaggatgttcgttccagcaagaccctgaagttgaccccgatgcagaaagcgggtctgtgctattatgaagatcttgctgatggcgttacgaaagccgaagctgacgcgatttctctgctggttcaggatgcagtctggactttcgacccggatgcgctggtggagattacgggtggatttcgtcgtgggaaaccttttggtcacgacgttgatctgcttatcacatctccgggagctgagaaagaacaagaagaccagctcctgcagaaagtgaccaatctgtggaagaaacaagggttgttgctgtacggtcgtctgcgtgaaagtcgctttgaagatgggaaactcccatcccgcaagatcgatgccctggaccattttgcgaaatgctttctgatcctcaaactttatcaccataaagtggacaaaagcaaatgggaaatgccgacgggttcgaacgaaagcgaggccaaaagttggaaagcaattcgcgtagatctggttcgttgtccctacgatcgttttgcgtttgcgttgttgggttggaccggaagccgcatgttcgaacgtgatctgcgccgctacgccacccacgagaagaagatgatgctggacaatcatgcgctgtatgacctgaccaagaaaatctttctcaaagctaaatcggaagaggaaattttcgcacatctggggcttgaatacctggaaccgtccgaacgtaacgca

SEQ ID NO: 1304 - protein, 529 aa, synthetic construct
  REGION 1..529: note = Variant of terminal deoxynucleotidyltransferase
MHHHHHHGGSGSHGIRTIDSDFGKKRQKKMDNHDSSAIYEIKFHEFVLFILEEKMGATRRTFLTDLARKKGFRVENELSDSVTHIVAENNSRSEVLAWLKTHKMEKTKQFELLDISWLIESMKVGKPVDTKGKYQLMESGEMSANPDPTEGRENELPPTTKTISQYACQRRTTLINHNQRFTDALEILAENYEFKRNDDTCLTFMRAISVLKCLPFEVVSLKDTEGLPWIGDEVKGIMEEIIEVGESLEVQAVLNDERYQSFKLFKSVFGVGVKTADKWYRMGLRTLEDVRSSKTLKLTPMQKAGLCYYEDLADGVTKAEADAISLLVQDAVWTFDPDALVEITGGFRRGKPFGHDVDLLITSPGAEKEQEDQLLQKVTNLWKKQGLLLYGRLRESRFEDGKLPSRKIDALDHFAKCFLILKLYHHKVDKSKWEMPTGSNESEAKSWKAIRVDLVRCPYDRFAFALLGWTGSRMFERDLRRYATHEKKMMLDNHALYDLTKKIFLKAKSEEEIFAHLGLEYLEPSERNA

SEQ ID NO: 1305 - DNA, 1587 bp, synthetic construct
  misc_feature 1..1587: note = Variant of terminal deoxynucleotidyltransferase
  source 1..1587: mol_type = other DNA
atgcaccatcatcatcatcatggcggtagcggcagccacggcattcgtaccatcgattcggacttcgggaagaaacgccagaagaagatggataaccacgatagttccgccatctatgaaatcaaatttcacgagtttgtgctgttcattctcgaagagaaaatgggtgcgacgcgtcgtacttttctgacagatttagcccgcaagaaagggttccgcgtcgagaatgaactgtcagacagcgttacccacatcgtggcagaaaataattcacgctctgaagtattggcttggctgaagactcacaagatggagaagaccaagcaattcgaactgctggatattagctggcttatcgaaagcatgaaagttggtaaaccggtggacaccaaggggaaataccagttgatggaatcgggtgagatgagtgcgaacccagatccgacagagggtcgtgaaaacgagctgcctcctactacgaagaccatttctcagtatgcgtgtcaacgccgcaccaccctgaacaaccataatcaacgttttacggacgcactggaaattcttgcggaaaattacgagttcaaaggtaacgatgatacttgtctgacctttatgcgtgctatttccgtgctgaaatgccttccgtttgaggtagttagcctgaaagacacggaaggattgccctggatcggtgatgaagtcaaagggattatggaagaaatcatcgaggtcggtgaatcgctggaagtgcaggccgtgctcaatgatgagcgctatcaaagcttcaaactgtttaagagtgtctttggagtgggggtgaagacagcagacaaatggtaccgtatgggtctgcgcacgctcgaggatgttcgttccagcaagaccctgaagttgaccccgatgcagaaagcgggtctgtgctattatgaagatcttgctgatggcgttacgaaagccgaagctgacgcgatttctctgctggttcaggatgcagtctggactttcgacccggatgcgctggtggagattacgggtggatttcgtcgtgggaaaccttttggtcacgacgttgatctgcttatcacatctccgggagctgagaaagaacaagaagaccagctcctgcagaaagtgaccaatctgtggaagaaacaagggttgttgctgtacggtcgtctgcgtgaaagtcgctttgaagatgggaaactcccatcccgcaagatcgatgccctggaccattttgcgaaatgctttctgatcctcaaactttatcaccataaagtggacaaaagcaaatgggaaatgccgacgggttcgaacgaaagcgaggccaaaagttggaaagcaattcgcgtagatctggttcgttgtccctacgatcgttttgcgtttgcgttgttgggttggaccggaagccgcatgttcgaacgtgatctgcgccgctacgccacccacgagaagaagatgatgctggacaatcatgcgctgtatgacctgaccaagaaaatctttctcaaagctaaatcggaagaggaaattttcgcacatctggggcttgaatacctggaaccgtccgaacgtaacgca

SEQ ID NO: 1306 - protein, 529 aa, synthetic construct; identical to SEQ ID NO: 1176
  REGION 1..529: note = Variant of terminal deoxynucleotidyltransferase

SEQ ID NO: 1307 - DNA, 1587 bp, synthetic construct
  misc_feature 1..1587: note = Variant of terminal deoxynucleotidyltransferase
  source 1..1587: mol_type = other DNA
atgcaccatcatcatcatcatggcggtagcggcagccacggcattcgtaccatcgattcggacttcgggaagaaacgccagaagaagatggataaccacgatagttccgccatctatgaaatcaaatttcacgagtttgtgctgttcattctcgaagagaaaatgggtgcgacgcgtcgtacttttctgacagatttagcccgcaagaaagggttccgcgtcgagaatgaactgtcagacagcgttacccacatcgtggcagaaaataattcacgctctgaagtattggcttggctgaagactcacaagatggagaagaccaagcaattcgaactgctggatattagctggcttatcgaaagcatgaaagttggtaaaccggtggacaccaaggggaaataccagttgatggaatcgggtgagatgagtgcgaacccagatccgacagagggtcgtgaaaacgagctgcctcctactacgaagaccatttctcagtatgcgtgtcaacgccgcaccaccctgaacaaccataatcaacgttttacggacgcactggaaattcttgcggaaaattacgagttcaaacgcaacgatgatacttgtctgacctttatgcgtgctatttccgtgctgaaatgccttccgtttgaggtagttagcctgaaagacacggaaggattgccctggatcggtgatgaagtcaaagggattatggaagaaatcatcgaggtcggtgaatcgctggaagtgcaggccgtgctcaatgatgagcgctatcaaagcttcaaactgtttaagagtgtctttggagtgggggtgaagacagcagacaaatggtaccgtatgggtctgcgcacgctcgaggatgttcgttccagcaagaccctgaagttgaccccgatgcagaaagcgggtctgtgctattatgaagatcttgctgatggcgttacgaaagccgaagctgacgcgatttctctgctggttcaggatgcagtctggactttcgacccggatgcgctggtggagattacgggtggatttcgtcgtgggaaaccttttggtcacgacgttgatctgcttatcacatctccgggagctgagaaagaacaagaagaccagctcctgcagaaagtgaccaatctgtggaagaaacaagggttgttgctgtacggtcgtctgcgtgaaagtcgctttgaagatgggaaactcttttcccgcaagatcgatgccctggaccattttgcgaaatgctttctgatcctcaaactttatcaccataaagtggacaaaagcaaatgggaaatgccgacgggttcgaacgaaagcgaggccaaaagttggaaagcaattcgcgtagatctggttcgttgtccctacgatcgttttgcgtttgcgttgttgggttggaccggaagccgcatgttcgaacgtgatctgcgccgctacgccacccacgagaagaagatgatgctggacaatcatgcgctgtatgacctgaccaagaaaatctttctcaaagctaaatcggaagaggaaattttcgcacatctggggcttgaatacctggaaccgtccgaacgtaacgca

SEQ ID NO: 1308 - protein, 529 aa, synthetic construct
  REGION 1..529: note = Variant of terminal deoxynucleotidyltransferase
MHHHHHHGGSGSHGIRTIDSDFGKKRQKKMDNHDSSAIYEIKFHEFVLFILEEKMGATRRTFLTDLARKKGFRVENELSDSVTHIVAENNSRSEVLAWLKTHKMEKTKQFELLDISWLIESMKVGKPVDTKGKYQLMESGEMSANPDPTEGRENELPPTTKTISQYACQRRTTLNNHNQRFTDALEILAENYEFKRNDDTCLTFMRAISVLKCLPFEVVSLKDTEGLPWIGDEVKGIMEEIIEVGESLEVQAVLNDERYQSFKLFKSVFGVGVKTADKWYRMGLRTLEDVRSSKTLKLTPMQKAGLCYYEDLADGVTKAEADAISLLVQDAVWTFDPDALVEITGGFRRGKPFGHDVDLLITSPGAEKEQEDQLLQKVTNLWKKQGLLLYGRLRESRFEDGKLFSRKIDALDHFAKCFLILKLYHHKVDKSKWEMPTGSNESEAKSWKAIRVDLVRCPYDRFAFALLGWTGSRMFERDLRRYATHEKKMMLDNHALYDLTKKIFLKAKSEEEIFAHLGLEYLEPSERNA

SEQ ID NO: 1309 - DNA, 1587 bp, synthetic construct
  misc_feature 1..1587: note = Variant of terminal deoxynucleotidyltransferase
  source 1..1587: mol_type = other DNA
atgcaccatcatcatcatcatggcggtagcggcagccacggcattcgtaccatcgattcggacttcgggaagaaacgccagaagaagatggataaccacgatagttccgccatctatgaaatcaaatttcacgagtttgtgctgttcattctcgaagagaaaatgggtgcgacgcgtcgtacttttctgacagatttagcccgcaagaaagggttccgcgtcgagaatgaactgtcagacagcgttacccacatcgtggcagaaaataattcacgctctgaagtattggcttggctgaagactcacaagatggagaagaccaagcaattcgaactgctggatattagctggcttatcgaaagcatgaaagttggtaaaccggtggacaccaaggggaaataccagttgatggaatcgggtgagatgagtgcgaacccagatccgacagagggtcgtgaaaacgagctgcctcctactacgaagaccatttctcagtatgcgtgtcaacgccgcaccaccctgaacaaccataatcaacgttttacggacgcactggaaattcttgcggaaaattacgagttcaaacgcaacgatgatacttgtctgacctttatgcgtgctatttccgtgctgaaatgccttccgtttgaggtagttagcctgaaagacacggaaggattgccctggatcggtgatgaagtcaaagggattatggaagaaatcatcgaggtcggtgaatcgctggaagtgcaggccgtgctcaatgatgagcgctatcaaagcttcaaactgtttaagagtgtctttggagtgggggtgaagacagcagacaaatggtaccgtatgggtctgcgcacgctcgaggatgttcgttccagcaagaccctgaagttgaccccgatgcagaaagcgggtctgtgctattatgaagatcttgctgatggcgttacgaaagccgaagctgacgcgatttctctgctggttcaggatgcagtctggactttcgacccggatgcgctggtggagattacgggtggatttcgtcgtgggaaaccttttggtcacgacgttgatctgcttatcacatctccgggagctgagaaagaacaagaagaccagctcctgcagaaagtgaccaatctgtggaagaaacaagggttgttgctgtacggtcgtctgcgtgaaagtcgctttgaagatgggaaactcccatcccgcaagcgggatgccctggaccattttgcgaaatgctttctgatcctcaaactttatcaccataaagtggacaaaagcaaatgggaaatgccgacgggttcgaacgaaagcgaggccaaaagttggaaagcaattcgcgtagatctggttcgttgtccctacgatcgttttgcgtttgcgttgttgggttggaccggaagccgcatgttcgaacgtgatctgcgccgctacgccacccacgagaagaagatgatgctggacaatcatgcgctgtatgacctgaccaagaaaatctttctcaaagctaaatcggaagaggaaattttcgcacatctggggcttgaatacctggaaccgtccgaacgtaacgca

SEQ ID NO: 1310 - protein, 529 aa, synthetic construct
  REGION 1..529: note = Variant of terminal deoxynucleotidyltransferase
MHHHHHHGGSGSHGIRTIDSDFGKKRQKKMDNHDSSAIYEIKFHEFVLFILEEKMGATRRTFLTDLARKKGFRVENELSDSVTHIVAENNSRSEVLAWLKTHKMEKTKQFELLDISWLIESMKVGKPVDTKGKYQLMESGEMSANPDPTEGRENELPPTTKTISQYACQRRTTLNNHNQRFTDALEILAENYEFKRNDDTCLTFMRAISVLKCLPFEVVSLKDTEGLPWIGDEVKGIMEEIIEVGESLEVQAVLNDERYQSFKLFKSVFGVGVKTADKWYRMGLRTLEDVRSSKTLKLTPMQKAGLCYYEDLADGVTKAEADAISLLVQDAVWTFDPDALVEITGGFRRGKPFGHDVDLLITSPGAEKEQEDQLLQKVTNLWKKQGLLLYGRLRESRFEDGKLPSRKRDALDHFAKCFLILKLYHHKVDKSKWEMPTGSNESEAKSWKAIRVDLVRCPYDRFAFALLGWTGSRMFERDLRRYATHEKKMMLDNHALYDLTKKIFLKAKSEEEIFAHLGLEYLEPSERNA

SEQ ID NO: 1311 - DNA, 1587 bp, synthetic construct
  misc_feature 1..1587: note = Variant of terminal deoxynucleotidyltransferase
  source 1..1587: mol_type = other DNA
atgcaccatcatcatcatcatggcggtagcggcagccacggcattcgtaccatcgattcggacttcgggaagaaacgccagaagaagatggataaccacgatagttccgccatctatgaaatcaaatttcacgagtttgtgctgttcattctcgaagagaaaatgggtgcgacgcgtcgtacttttctgacagatttagcccgcaagaaagggttccgcgtcgagaatgaactgtcagacagcgttacccacatcgtggcagaaaataattcacgctctgaagtattggcttggctgaagactcacaagatggagaagaccaagcaattcgaactgctggatattagctggcttatcgaaagcatgaaagttggtaaaccggtggacaccaaggggaaataccagttgatggaatcgggtgagatgagtgcgaacccagatccgacagagggtcgtgaaaacgagctgcctcctactacgaagaccatttctcagtatgcgtgtcaacgccgcaccaccctgaacaaccataatcaacgttttacggacgcactggaaattcttgcggaaaattacgagttcaaacgcaacgatgatacttgtctgacctttatgcgtgctatttccgtgctgaaatgccttccgtttgaggtagttagcctgaaagacacggaaggattgccctggatcggtgatgaagtcaaagggattatggaagaaatcatcgaggtcggtgaatcgctggaagtgcaggccgtgctcaatgatgagcgctatcaaagcttcaaactgtttaagagtgtctttggagtgggggtgaagacagcagacaaatggtaccgtatgggtctgcgcacgctcgaggatgttcgttccagcaagaccctgaagttgaccccgatgcagaaagcgggtctgtgctattatgaagatcttgctgatggcgttacgaaagccgaagctgacgcgatttctctgctggttcaggatgcagtctggactttcgacccggatgcgctggtggagattacgggtggatttcgtcgtgggaaaccttttggtcacgacgttgatctgcttatcacatctccgggagctgagaaagaacaagaagaccagctcctgcagaaagtgaccaatctgtggaagaaacaagggttgttgctgtacggtcgtctgcgtgaaagtcgctttgaagatgggaaactcccatcccgcaagatcgatgccctggaccattttgcgaaatgctttctgatcctcaaactttatcaccataaagtggacaaaagcaaatgggaaatgccgacgggttcgaacgaaagcgaggccaaaagttggaaagcaattcgcgtagatctggttcgttgtccctacgatcgttttgcgtttgcgttgttgggttggaccggaagccgcatgttcgaacgtgatctgcgccgctacgccacccacgagaagaagatgatgctggacaatcatgcgctgtatgacctgaccaagaaaatctttctcaaagctaaatcggaagaggaaattttcgcacatctggggcttgaatacctgcatccgtccgaacgtaacgca

SEQ ID NO: 1312 - protein, 529 aa, synthetic construct
  REGION 1..529: note = Variant of terminal deoxynucleotidyltransferase
MHHHHHHGGSGSHGIRTIDSDFGKKRQKKMDNHDSSAIYEIKFHEFVLFILEEKMGATRRTFLTDLARKKGFRVENELSDSVTHIVAENNSRSEVLAWLKTHKMEKTKQFELLDISWLIESMKVGKPVDTKGKYQLMESGEMSANPDPTEGRENELPPTTKTISQYACQRRTTLNNHNQRFTDALEILAENYEFKRNDDTCLTFMRAISVLKCLPFEVVSLKDTEGLPWIGDEVKGIMEEIIEVGESLEVQAVLNDERYQSFKLFKSVFGVGVKTADKWYRMGLRTLEDVRSSKTLKLTPMQKAGLCYYEDLADGVTKAEADAISLLVQDAVWTFDPDALVEITGGFRRGKPFGHDVDLLITSPGAEKEQEDQLLQKVTNLWKKQGLLLYGRLRESRFEDGKLPSRKIDALDHFAKCFLILKLYHHKVDKSKWEMPTGSNESEAKSWKAIRVDLVRCPYDRFAFALLGWTGSRMFERDLRRYATHEKKMMLDNHALYDLTKKIFLKAKSEEEIFAHLGLEYLHPSERNA

SEQ ID NO: 1313 - DNA, 1587 bp, synthetic construct
  misc_feature 1..1587: note = Variant of terminal deoxynucleotidyltransferase
  source 1..1587: mol_type = other DNA
atgcaccatcatcatcatcatggcggtagcggcagccacggcattcgtaccatcgattcggacttcgggaagaaacgccagaagaagatggataaccacgatagttccgccatctatgaaatcaaatttcacgagtttgtgctgttcattctcgaagagaaaatgggtgcgacgcgtcgtacttttctgacagatttagcccgcaagaaagggttccgcgtcgagaatgaactgtcagacagcgttacccacatcgtggcagaaaataattcacgctctgaagtattggcttggctgaagactcacaagatggagaagaccaagcaattcgaactgctggatattagctggcttatcgaaagcatgaaagttggtaaaccggtggacaccaaggggaaataccagttgatggaatcgggtgagatgagtgcgaacccagatccgacagagggtcgtgaaaacgagctgcctcctactacgaagaccatttctcagtatgcgtgtcaacgccgcaccaccctgaacaaccataatcaacgttttacggacgcactggaaattcttgcggaaaattacgagttcaaacgcaacgatgatacttgtctgacctttatgcgtgctatttccgtgctgaaatgccttccgtttgaggtagttagcctgaaagacacggaaggattgccctggatcggtgatgaagtcaaagggattatggaagaaatcatcgaggtcggtgaatcgctggaagtgcaggccgtgctcaatgatgagcgctatcaaagcttcaaactgtttaagagtgtctttggagtgggggtgaagacagcagacaaatggtaccgtatgggtctgcgcacgctcgaggatgttcgttccagcaagaccctgaagttgaccccgatgcagaaagcgggtctgtgctattatgaagatcttgctgatggcgttacgaaagccgaagctcaggcgatttctctgctggttcaggatgcagtctggactttcgacccggatgcgctggtggagattacgggtggatttcgtcgtgggaaaccttttggtcacgacgttgatctgcttatcacatctccgggagctgagaaagaacaagaagaccagctcctgcagaaagtgaccaatctgtggaagaaacaagggttgttgctgtacggtcgtctgcgtgaaagtcgctttgaagatgggaaactcccatcccgcaagatcgatgccctggaccattttgcgaaatgctttctgatcctcaaactttatcaccataaagtggacaaaagcaaatgggaaatgccgacgggttcgaacgaaagcgaggccaaaagttggaaagcaattcgcgtagatctggttcgttgtccctacgatcgttttgcgtttgcgttgttgggttggaccggaagccgcatgttcgaacgtgatctgcgccgctacgccacccacgagaagaagatgatgctggacaatcatgcgctgtatgacctgaccaagaaaatctttctcaaagctaaatcggaagaggaaattttcgcacatctggggcttgaatacctggaaccgtccgaacgtaacgca

SEQ ID NO: 1314 - protein, 529 aa, synthetic construct
  REGION 1..529: note = Variant of terminal deoxynucleotidyltransferase
MHHHHHHGGSGSHGIRTIDSDFGKKRQKKMDNHDSSAIYEIKFHEFVLFILEEKMGATRRTFLTDLARKKGFRVENELSDSVTHIVAENNSRSEVLAWLKTHKMEKTKQFELLDISWLIESMKVGKPVDTKGKYQLMESGEMSANPDPTEGRENELPPTTKTISQYACQRRTTLNNHNQRFTDALEILAENYEFKRNDDTCLTFMRAISVLKCLPFEVVSLKDTEGLPWIGDEVKGIMEEIIEVGESLEVQAVLNDERYQSFKLFKSVFGVGVKTADKWYRMGLRTLEDVRSSKTLKLTPMQKAGLCYYEDLADGVTKAEAQAISLLVQDAVWTFDPDALVEITGGFRRGKPFGHDVDLLITSPGAEKEQEDQLLQKVTNLWKKQGLLLYGRLRESRFEDGKLPSRKIDALDHFAKCFLILKLYHHKVDKSKWEMPTGSNESEAKSWKAIRVDLVRCPYDRFAFALLGWTGSRMFERDLRRYATHEKKMMLDNHALYDLTKKIFLKAKSEEEIFAHLGLEYLEPSERNA

SEQ ID NO: 1315 - DNA, 1587 bp, synthetic construct; identical to SEQ ID NO: 1161
  misc_feature 1..1587: note = Variant of terminal deoxynucleotidyltransferase
  source 1..1587: mol_type = other DNA

SEQ ID NO: 1316 - protein, 529 aa, synthetic construct; identical to SEQ ID NO: 1162
  REGION 1..529: note = Variant of terminal deoxynucleotidyltransferase

SEQ ID NO: 1317 - DNA, 1587 bp, synthetic construct
  misc_feature 1..1587: note = Variant of terminal deoxynucleotidyltransferase
  source 1..1587: mol_type = other DNA
atgcaccatcatcatcatcatggcggtagcggcagccacggcattcgtaccatcgattcggacttcgggaagaaacgccagaagaagatggataaccacgatagttccgccatctatgaaatcaaatttcacgagtttgtgctgttcattctcgaagagaaaatgggtgcgacgcgtcgtacttttctgacagatttagcccgcaagaaagggttccgcgtcgagaatgaactgtcagacagcgttacccacatcgtggcagaaaataattcacgctctgaagtattggcttggctgaagactcacaagatggagaagaccaagcaattcgaactgctggatattagctggcttatcgaaagcatgaaagttggtaaaccggtggacaccaaggggaaataccagttgatggaatcgggtgagatgagtgcgaacccagatccgacagagggtcgtgaaaacgagctgcctcctactacgaagaccatttctcagtatgcgtgtcaacgccgcaccaccctgaacaaccataatcaacgttttacggacgcactggaaattcttgcggaaaattacgagttcaaacgcaacgatgatacttgtctgacctttatgcgtgctatttccgtgctgaaatgccttccgtttgaggtagttagcctgaaagacacggaaggattgccctggatcggtgatgaagtcaaagggattatggaagaaatcatcgaggtcggtgaatcgctggaagtgcaggccgtgctcaatgatgagcgctatcaaagcttcaaactgtttaagagtgtctttggagtgggggtgaagacagcagacaaatggtaccgtatgggtctgcgcacgctcgaggatgttcgttccagcaagaccctgaagttgaccccgatgcagaaagcgggtctgtgctattatgaagatcttgctgatggcgttacgaaaggggaagctgacgcgatttctctgctggttcaggatgcagtctggactttcgacccggatgcgctggtggagattacgggtggatttcgtcgtgggaaaccttttggtcacgacgttgatctgcttatcacatctccgggagctgagaaagaacaagaagaccagctcctgcagaaagtgaccaatctgtggaagaaacaagggttgttgctgtacggtcgtctgcgtgaaagtcgctttgaagatgggaaactcccatcccgcaagatcgatgccctggaccattttgcgaaatgctttctgatcctcaaactttatcaccataaagtggacaaaagcaaatgggaaatgccgacgggttcgaacgaaagcgaggccaaaagttggaaagcaattcgcgtagatctggttcgttgtccctacgatcgttttgcgtttgcgttgttgggttggaccggaagccgcatgttcgaacgtgatctgcgccgctacgccacccacgagaagaagatgatgctggacaatcatgcgctgtatgacctgaccaagaaaatctttctcaaagctaaatcggaagaggaaattttcgcacatctggggcttgaatacctggaaccgtccgaacgtaacgca

SEQ ID NO: 1318 - protein, 529 aa, synthetic construct
  REGION 1..529: note = Variant of terminal deoxynucleotidyltransferase
MHHHHHHGGSGSHGIRTIDSDFGKKRQKKMDNHDSSAIYEIKFHEFVLFILEEKMGATRRTFLTDLARKKGFRVENELSDSVTHIVAENNSRSEVLAWLKTHKMEKTKQFELLDISWLIESMKVGKPVDTKGKYQLMESGEMSANPDPTEGRENELPPTTKTISQYACQRRTTLNNHNQRFTDALEILAENYEFKRNDDTCLTFMRAISVLKCLPFEVVSLKDTEGLPWIGDEVKGIMEEIIEVGESLEVQAVLNDERYQSFKLFKSVFGVGVKTADKWYRMGLRTLEDVRSSKTLKLTPMQKAGLCYYEDLADGVTKGEADAISLLVQDAVWTFDPDALVEITGGFRRGKPFGHDVDLLITSPGAEKEQEDQLLQKVTNLWKKQGLLLYGRLRESRFEDGKLPSRKIDALDHFAKCFLILKLYHHKVDKSKWEMPTGSNESEAKSWKAIRVDLVRCPYDRFAFALLGWTGSRMFERDLRRYATHEKKMMLDNHALYDLTKKIFLKAKSEEEIFAHLGLEYLEPSERNA

SEQ ID NO: 1319 - DNA, 1587 bp, synthetic construct
  misc_feature 1..1587: note = Variant of terminal deoxynucleotidyltransferase
  source 1..1587: mol_type = other DNA
atgcaccatcatcatcatcatggcggtagcggcagccacggcattcgtaccatcgattcggacttcgggaagaaacgccagaagaagatggataaccacgatagttccgccatctatgaaatcaaatttcacgagtttgtgctgttcattctcgaagagaaaatgggtgcgacgcgtcgtacttttctgacagatttagcccgcaagaaagggttccgcgtcgagaatgaactgtcagacagcgttacccacatcgtggcagaaaataattcacgctctgaagtattggcttggctgaagactcacaagatggagaagaccaagcaattcgaactgctggatattagctggcttatcgaaagcatgaaagttggtaaaccggtggacaccaaggggaaataccagttgatggaatcgggtgagatgagtgcgaacccagatccgacagagggtcgtgaaaacgagctgcctcctactacgaagaccatttctcagtatgcgtgtcaacgccgcaccaccctgaacaaccataatcaacgttttacggacgcactggaaattcttgcggaaaattacgagttcaaacgcaacgatgatacttgtctgacctttatgcgtgctatttccgtgctgaaatgccttccgtttgaggtagttagcctgaaagacacggaaggattgccctggatcggtgatgaagtcaaagggattatggaagaaatcatcgaggtcggtgaatcgctggaagtgcaggccgtgctcaatgatgagcgctatcaaagcttcaaactgtttaagagtgtctttggagtgggggtgaagacagcagacaaatggtaccgtatgggtctgcgcacgctcgaggatgttcgttccagcaagaccctgaagttgaccccgatgcagaaagcgggtctgtgctattatgaagatctttcggatggcgttacgaaagccgaagctgacgcgatttctctgctggttcaggatgcagtctggactttcgacccggatgcgctggtggagattacgggtggatttcgtcgtgggaaaccttttggtcacgacgttgatctgcttatcacatctccgggagctgagaaagaacaagaagaccagctcctgcagaaagtgaccaatctgtggaagaaacaagggttgttgctgtacggtcgtctgcgtgaaagtcgctttgaagatgggaaactcccatcccgcaagatcgatgccctggaccattttgcgaaatgctttctgatcctcaaactttatcaccataaagtggacaaaagcaaatgggaaatgccgacgggttcgaacgaaagcgaggccaaaagttggaaagcaattcgcgtagatctggttcgttgtccctacgatcgttttgcgtttgcgttgttgggttggaccggaagccgcatgttcgaacgtgatctgcgccgctacgccacccacgagaagaagatgatgctggacaatcatgcgctgtatgacctgaccaagaaaatctttctcaaagctaaatcggaagaggaaattttcgcacatctggggcttgaatacctggaaccgtccgaacgtaacgca

SEQ ID NO: 1320 - protein, 529 aa, synthetic construct
  REGION 1..529: note = Variant of terminal deoxynucleotidyltransferase
MHHHHHHGGSGSHGIRTIDSDFGKKRQKKMDNHDSSAIYEIKFHEFVLFILEEKMGATRRTFLTDLARKKGFRVENELSDSVTHIVAENNSRSEVLAWLKTHKMEKTKQFELLDISWLIESMKVGKPVDTKGKYQLMESGEMSANPDPTEGRENELPPTTKTISQYACQRRTTLNNHNQRFTDALEILAENYEFKRNDDTCLTFMRAISVLKCLPFEVVSLKDTEGLPWIGDEVKGIMEEIIEVGESLEVQAVLNDERYQSFKLFKSVFGVGVKTADKWYRMGLRTLEDVRSSKTLKLTPMQKAGLCYYEDLSDGVTKAEADAISLLVQDAVWTFDPDALVEITGGFRRGKPFGHDVDLLITSPGAEKEQEDQLLQKVTNLWKKQGLLLYGRLRESRFEDGKLPSRKIDALDHFAKCFLILKLYHHKVDKSKWEMPTGSNESEAKSWKAIRVDLVRCPYDRFAFALLGWTGSRMFERDLRRYATHEKKMMLDNHALYDLTKKIFLKAKSEEEIFAHLGLEYLEPSERNA

SEQ ID NO: 1321 - DNA, 1587 bp, synthetic construct; identical to SEQ ID NO: 1167
  misc_feature 1..1587: note = Variant of terminal deoxynucleotidyltransferase
  source 1..1587: mol_type = other DNA

SEQ ID NO: 1322 - protein, 529 aa, synthetic construct; identical to SEQ ID NO: 1168
  REGION 1..529: note = Variant of terminal deoxynucleotidyltransferase

SEQ ID NO: 1323 - DNA, 1587 bp, synthetic construct
  misc_feature 1..1587: note = Variant of terminal deoxynucleotidyltransferase
  source 1..1587: mol_type = other DNA
atgcaccatcatcatcatcatggcggtagcggcagccacggcattcgtaccatcgattcggacttcgggaagaaacgccagaagaagatggataaccacgatagttccgccatctatgaaatcaaatttcacgagtttgtgctgttcattctcgaagagaaaatgggtgcgacgcgtcgtacttttctgacagatttagcccgcaagaaagggttccgcgtcgagaatgaactgtcagacagcgttacccacatcgtggcagaaaataattcacgctctgaagtattggcttggctgaagactcacaagatggagaagaccaagcaattcgaactgctggatattagctggcttatcgaaagcatgaaagttggtaaaccggtggacaccaaggggaaataccagttgatggaatcgggtgagatgagtgcgaacccagatccgacagagggtcgtgaaaacgagctgcctcctactacgaagaccatttctcagtatgcgtgtcaacgccgcaccaccctgaacaaccataatcaacgttttacggacgcactggaaattcttgcggaaaattacgagttcaaacgcaacgatgatacttgtctgacctttatgcgtgctatttccgtgctgaaatgccttccgtttgaggtagttagcctgaaagacacggaaggattgccctggatcggtgatgaagtcaaagggattatggaagaaatcatcgaggtcggtgaatcgctggaagtgcaggccgtgctcaatgatgagcgctatcaaagcttcaaactgtttaagagtgtctttggagtgggggtgaagacagcagacaaatggtaccgtatgggtctgcgcacgctcgaggatgttcgttccagcaagaccctgaagttgaccccgatgcagaaagcgggtctgtgctattatgaagatcttgctgatggcgttacgaaagccgaagctgacgcgatttctctgctggttcaggatgcagtctggactttcgacccggatgcgctggtggagattacgggtggatttcgtcgtgggaaaccttttggtcacgacgttgatctgcttatcacatctccgggagctgagaaagaacaagaagaccagctcctgcagaaagtgaccaatctgtggaagaaacaagggttgttgctgtacggtcgtctgcgtgaaagtcgctttgaagatgggaaactcccatcccgcaagatcgatgccctggaccattttgcgaaatgctttctgatcctcaaactttatcaccataaagtggacaaaagcaaatgggaaatgccgacgggttcgaacgaaagcgaggccaaaagttggaaagcaattcgcgtagatctggttcgttgtccctacgatcgttttgcgtttgcgttgttgggttggaccggaagccgcatgttcgaacgtgatctgcgccgctacgccacccacgagaagaagatgatgattgacaatcatgcgctgtatgacctgaccaagaaaatctttctcaaagctaaatcggaagaggaaattttcgcacatctggggcttgaatacctggaaccgtccgaacgtaacgca

SEQ ID NO: 1324 - protein, 529 aa, synthetic construct
  REGION 1..529: note = Variant of terminal deoxynucleotidyltransferase
MHHHHHHGGSGSHGIRTIDSDFGKKRQKKMDNHDSSAIYEIKFHEFVLFILEEKMGATRRTFLTDLARKKGFRVENELSDSVTHIVAENNSRSEVLAWLKTHKMEKTKQFELLDISWLIESMKVGKPVDTKGKYQLMESGEMSANPDPTEGRENELPPTTKTISQYACQRRTTLNNHNQRFTDALEILAENYEFKRNDDTCLTFMRAISVLKCLPFEVVSLKDTEGLPWIGDEVKGIMEEIIEVGESLEVQAVLNDERYQSFKLFKSVFGVGVKTADKWYRMGLRTLEDVRSSKTLKLTPMQKAGLCYYEDLADGVTKAEADAISLLVQDAVWTFDPDALVEITGGFRRGKPFGHDVDLLITSPGAEKEQEDQLLQKVTNLWKKQGLLLYGRLRESRFEDGKLPSRKIDALDHFAKCFLILKLYHHKVDKSKWEMPTGSNESEAKSWKAIRVDLVRCPYDRFAFALLGWTGSRMFERDLRRYATHEKKMMIDNHALYDLTKKIFLKAKSEEEIFAHLGLEYLEPSERNA

SEQ ID NO: 1325 - DNA, 1587 bp, synthetic construct
  misc_feature 1..1587: note = Variant of terminal deoxynucleotidyltransferase
  source 1..1587: mol_type = other DNA
atgcaccatcatcatcatcatggcggtagcggcagccacggcattcgtaccatcgattcggacttcgggaagaaacgccagaagaagatggataaccacgatagttccgccatctatgaaatcaaatttcacgagtttgtgctgttcattctcgaagagaaaatgggtgcgacgcgtcgtacttttctgacagatttagcccgcaagaaagggttccgcgtcgagaatgaactgtcagacagcgttacccacatcgtggcagaaaataattcacgctctgaagtattggcttggctgaagactcacaagatggagaagaccaagcaattcgaactgctggatattagctggcttatcgaaagcatgaaagttggtaaaccggtggacaccaaggggaaataccagttgatggaatcgggtgagatgagtgcgaacccagatccgacagagggtcgtgaaaacgagctgcctcctactacgaagaccatttctcagtatgcgtgtcaacgccgcaccaccctgaacaaccataatcaacgttttacggacgcactggaaattcttgcggaaaattacgagttcaaacgcaacgatgatacttgtctgacctttatgcgtgctatttccgtgctgaaatgccttccgtttgaggtagttagcctgaaagacacggaaggattgccctggatcggtgatgaagtcaaagggattatggaagaaatcatcgaggtcggtgaatcgctggaagtgcaggccgtgctcaatgatgagcgctatcaaagcttcaaactgtttaagagtgtctttggagtgggggtgaagacagcagacaaatggtaccgtatgggtctgcgcacgctcgaggatgttcgttccagcaagaccctgaagttgaccccgatgcagaaagcgggtctgtgctattatgaagatcttgctgatggcgttacgaaagccgaagctgacgcgatttctctgctggttcaggatgcagtctggactttcgacccggatgcgctggtggagattacgggtggatttcgtcgtgggaaaccttttggtcacgacgttgatctgcttatcacatctccgggagctgagaaagaacaagaagaccagctcctgcagaaagtgaccaatctgtggaagaaacaagggttgttgctgtacggtcgtctgcgtgaaagtcgctttgaagatgggaaactcccatcccgcaagatcgatgccctggaccattttgcgaaatgctttctgatcctcaaactttatcaccataaagtggacaaaagcaaatgggaaatgccgacgggttcgaacgaaagcgaggccaaaagttggaaagcaattcgcgtagatctggttcgttgtccctacgatcagtttgcgtttgcgttgttgggttggaccggaagccgcatgttcgaacgtgatctgcgccgctacgccacccacgagaagaagatgatgctggacaatcatgcgctgtatgacctgaccaagaaaatctttctcaaagctaaatcggaagaggaaattttcgcacatctggggcttgaatacctggaaccgtccgaacgtaacgca

SEQ ID NO: 1326 - protein, 529 aa, synthetic construct
  REGION 1..529: note = Variant of terminal deoxynucleotidyltransferase
MHHHHHHGGSGSHGIRTIDSDFGKKRQKKMDNHDSSAIYEIKFHEFVLFILEEKMGATRRTFLTDLARKKGFRVENELSDSVTHIVAENNSRSEVLAWLKTHKMEKTKQFELLDISWLIESMKVGKPVDTKGKYQLMESGEMSANPDPTEGRENELPPTTKTISQYACQRRTTLNNHNQRFTDALEILAENYEFKRNDDTCLTFMRAISVLKCLPFEVVSLKDTEGLPWIGDEVKGIMEEIIEVGESLEVQAVLNDERYQSFKLFKSVFGVGVKTADKWYRMGLRTLEDVRSSKTLKLTPMQKAGLCYYEDLADGVTKAEADAISLLVQDAVWTFDPDALVEITGGFRRGKPFGHDVDLLITSPGAEKEQEDQLLQKVTNLWKKQGLLLYGRLRESRFEDGKLPSRKIDALDHFAKCFLILKLYHHKVDKSKWEMPTGSNESEAKSWKAIRVDLVRCPYDQFAFALLGWTGSRMFERDLRRYATHEKKMMLDNHALYDLTKKIFLKAKSEEEIFAHLGLEYLEPSERNA

SEQ ID NO: 1327 - DNA, 1587 bp, synthetic construct
  misc_feature 1..1587: note = Variant of terminal deoxynucleotidyltransferase
  source 1..1587: mol_type = other DNA
atgcaccatcatcatcatcatggcggtagcggcagccacggcattcgtaccatcgattcggacttcgggaagaaacgccagaagaagatggataaccacgatagttccgccatctatgaaatcaaatttcacgagtttgtgctgttcattctcgaagagaaaatgggtgcgacgcgtcgtacttttctgacagatttagcccgcaagaaagggttccgcgtcgagaatgaactgtcagacagcgttacccacatcgtggcagaaaataattcacgctctgaagtattggcttggctgaagactcacaagatggagaagaccaagcaattcgaactgctggatattagctggcttatcgaaagcatgaaagttggtaaaccggtggacaccaaggggaaataccagttgatggaatcgggtgagatgagtgcgaacccagatccgacagagggtcgtgaaaacgagctgcctcctactacgaagaccatttctcagtatgcgtgtcaacgccgcaccaccctgaacaaccataatcaacgttttacggacgcactggaaattcttgcggaaaattacgagttcaaacgcaacgatgatacttgtctgacctttatgcgtgctatttccgtgctgaaatgccttccgtttgaggtagttagcctgaaagacacggaaggattgccctggatcggtgatgaagtcaaagggattatggaagaaatcatcgaggtcggtgaatcgctggaagtgcaggccgtgctcaatgatgagcgctatcaaagcttcaaactgtttaagagtgtctttggagtgggggtgaagacagcagacaaatggtaccgtatgggtctgcgcacgctcgaggatgttcgttccagcaagaccctgaagttgaccccgatgcagaaagcgggtctgtgctattatgaagatcttgctgatggcgttacgaaagccgaagctgacgcgatttctctgctggttcaggatgcagtctggactttcgacccggatgcgctggtggagattacgggtggatttcgtcgtgggaaaccttttggtcacgacgttgatctgcttatcacatctccgggagctgagaaagaacaagaagaccagctcctggttaaagtgaccaatctgtggaagaaacaagggttgttgctgtacggtcgtctgcgtgaaagtcgctttgaagatgggaaactcccatcccgcaagatcgatgccctggaccattttgcgaaatgctttctgatcctcaaactttatcaccataaagtggacaaaagcaaatgggaaatgccgacgggttcgaacgaaagcgaggccaaaagttggaaagcaattcgcgtagatctggttcgttgtccctacgatcgttttgcgtttgcgttgttgggttggaccggaagccgcatgttcgaacgtgatctgcgccgctacgccacccacgagaagaagatgatgctggacaatcatgcgctgtatgacctgaccaagaaaatctttctcaaagctaaatcggaagaggaaattttcgcacatctggggcttgaatacctggaaccgtccgaacgtaacgca

SEQ ID NO: 1328 - protein, 529 aa, synthetic construct
  REGION 1..529: note = Variant of terminal deoxynucleotidyltransferase
MHHHHHHGGSGSHGIRTIDSDFGKKRQKKMDNHDSSAIYEIKFHEFVLFILEEKMGATRRTFLTDLARKKGFRVENELSDSVTHIVAENNSRSEVLAWLKTHKMEKTKQFELLDISWLIESMKVGKPVDTKGKYQLMESGEMSANPDPTEGRENELPPTTKTISQYACQRRTTLNNHNQRFTDALEILAENYEFKRNDDTCLTFMRAISVLKCLPFEVVSLKDTEGLPWIGDEVKGIMEEIIEVGESLEVQAVLNDERYQSFKLFKSVFGVGVKTADKWYRMGLRTLEDVRSSKTLKLTPMQKAGLCYYEDLADGVTKAEADAISLLVQDAVWTFDPDALVEITGGFRRGKPFGHDVDLLITSPGAEKEQEDQLLVKVTNLWKKQGLLLYGRLRESRFEDGKLPSRKIDALDHFAKCFLILKLYHHKVDKSKWEMPTGSNESEAKSWKAIRVDLVRCPYDRFAFALLGWTGSRMFERDLRRYATHEKKMMLDNHALYDLTKKIFLKAKSEEEIFAHLGLEYLEPSERNA

SEQ ID NO: 1329 - DNA, 1587 bp, synthetic construct
  misc_feature 1..1587: note = Variant of terminal deoxynucleotidyltransferase
  source 1..1587: mol_type = other DNA
atgcaccatcatcatcatcatggcggtagcggcagccacggcattcgtaccatcgattcggacttcgggaagaaacgccagaagaagatggataaccacgatagttccgccatctatgaaatcaaatttcacgagtttgtgctgttcattctcgaagagaaaatgggtgcgacgcgtcgtacttttctgacagatttagcccgcaagaaagggttccgcgtcgagaatgaactgtcagacagcgttacccacatcgtggcagaaaataattcacgctctgaagtattggcttggctgaagactcacaagatggagaagaccaagcaattcgaactgctggatattagctggcttatcgaaagcatgaaagttggtaaaccggtggacaccaaggggaaataccagttgatggaatcgggtgagatgagtgcgaacccagatccgacagagggtcgtgaaaacgagctgcctcctactacgaagaccatttctcagtatgcgtgtcaacgccgcaccaccctgaacaaccataatcaacgttttacggacgcactggaaattcttgcggaaaattacgagttcaaacgcaacgatgatacttgtctgacctttatgcgtgctatttccgtgctgaaatgccttccgtttgaggtagttagcctgaaagacacggaaggattgccctggatcggtgatgaagtcaaagggattatggaagaaatcatcgaggtcggtgaatcgctggaagtgcaggccgtgctcaatgatgagcgctatcaaagcttcaaactgtttaagagtgtctttggagtgggggtgaagacagcagacaaatggtaccgtatgggtctgcgcacgctcgaggatgttcgttccagcaagaccctgaagttgaccccgatgcagaaagcgggtctgtgctattatgaagatcttatggatggcgttacgaaagccgaagctgacgcgatttctctgctggttcaggatgcagtctggactttcgacccggatgcgctggtggagattacgggtggatttcgtcgtgggaaaccttttggtcacgacgttgatctgcttatcacatctccgggagctgagaaagaacaagaagaccagctcctgcagaaagtgaccaatctgtggaagaaacaagggttgttgctgtacggtcgtctgcgtgaaagtcgctttgaagatgggaaactcccatcccgcaagatcgatgccctggaccattttgcgaaatgctttctgatcctcaaactttatcaccataaagtggacaaaagcaaatgggaaatgccgacgggttcgaacgaaagcgaggccaaaagttggaaagcaattcgcgtagatctggttcgttgtccctacgatcgttttgcgtttgcgttgttgggttggaccggaagccgcatgttcgaacgtgatctgcgccgctacgccacccacgagaagaagatgatgctggacaatcatgcgctgtatgacctgaccaagaaaatctttctcaaagctaaatcggaagaggaaattttcgcacatctggggcttgaatacctggaaccgtccgaacgtaacgca

SEQ ID NO: 1330 - protein, 529 aa, synthetic construct
  REGION 1..529: note = Variant of terminal deoxynucleotidyltransferase
MHHHHHHGGSGSHGIRTIDSDFGKKRQKKMDNHDSSAIYEIKFHEFVLFILEEKMGATRRTFLTDLARKKGFRVENELSDSVTHIVAENNSRSEVLAWLKTHKMEKTKQFELLDISWLIESMKVGKPVDTKGKYQLMESGEMSANPDPTEGRENELPPTTKTISQYACQRRTTLNNHNQRFTDALEILAENYEFKRNDDTCLTFMRAISVLKCLPFEVVSLKDTEGLPWIGDEVKGIMEEIIEVGESLEVQAVLNDERYQSFKLFKSVFGVGVKTADKWYRMGLRTLEDVRSSKTLKLTPMQKAGLCYYEDLMDGVTKAEADAISLLVQDAVWTFDPDALVEITGGFRRGKPFGHDVDLLITSPGAEKEQEDQLLQKVTNLWKKQGLLLYGRLRESRFEDGKLPSRKIDALDHFAKCFLILKLYHHKVDKSKWEMPTGSNESEAKSWKAIRVDLVRCPYDRFAFALLGWTGSRMFERDLRRYATHEKKMMLDNHALYDLTKKIFLKAKSEEEIFAHLGLEYLEPSERNA

SEQ ID NO: 1331 - DNA, 1587 bp, synthetic construct
  misc_feature 1..1587: note = Variant of terminal deoxynucleotidyltransferase
  source 1..1587: mol_type = other DNA
atgcaccatcatcatcatcatggcggtagcggcagccacggcattcgtaccatcgattcggacttcgggaagaaacgccagaagaagatggataaccacgatagttccgccatctatgaaatcaaatttcacgagtttgtgctgttcattctcgaagagaaaatgggtgcgacgcgtcgtacttttctgacagatttagcccgcaagaaagggttccgcgtcgagaatgaactgtcagacagcgttacccacatcgtggcagaaaataattcacgctctgaagtattggcttggctgaagactcacaagatggagaagaccaagcaattcgaactgctggatattagctggcttatcgaaagcatgaaagttggtaaaccggtggacaccaaggggaaataccagttgatggaatcgggtgagatgagtgcgaacccagatccgacagagggtcgtgaaaacgagctgcctcctactacgaagaccatttctcagtatgcgtgtcaacgccgcaccaccctgaacaaccataatcaacgttttacggacgcactggaaattcttgcggaaaattacgagttcaaacgcaacgatgatacttgtctgacctttatgcgtgctatttccgtgctgaaatgccttccgtttgaggtagttagcctgaaagacacggaaggattgccctggatcggtgatgaagtcaaagggattatggaagaaatcatcgaggtcggtgaatcgctggaagtgcaggccgtgctcaatgatgagcgctatcaaagcttcaaactgtttaagagtgtctttggagtgggggtgaagacagcagacaaatggtaccgtatgggtctgcgcacgctcgaggatgttcgttccagcaagaccctgaagttgaccccgatgcagaaagcgggtctgtgctattatgaagatcttgctgatggcgttacgaaagccgaagctgacgcgatttctctgctggttcaggatgcagtctggactttcgacccggatgcgctggtggagattacgggtggatttcgtcgtgggaaaccttttggtcacgacgttgatctgcttatcacatctccgggagctgagaaagaacaagaagaccagctcctgcagaaagtgaccaatctgtggaagaaacaagggttgttgctgtacggtcgtctgcgtgaaagtcgctttgaagatgggaaactctggtcccgcaagatcgatgccctggaccattttgcgaaatgctttctgatcctcaaactttatcaccataaagtggacaaaagcaaatgggaaatgccgacgggttcgaacgaaagcgaggccaaaagttggaaagcaattcgcgtagatctggttcgttgtccctacgatcgttttgcgtttgcgttgttgggttggaccggaagccgcatgttcgaacgtgatctgcgccgctacgccacccacgagaagaagatgatgctggacaatcatgcgctgtatgacctgaccaagaaaatctttctcaaagctaaatcggaagaggaaattttcgcacatctggggcttgaatacctggaaccgtccgaacgtaacgca

SEQ ID NO: 1332 - protein, 529 aa, synthetic construct
  REGION 1..529: note = Variant of terminal deoxynucleotidyltransferase
MHHHHHHGGSGSHGIRTIDSDFGKKRQKKMDNHDSSAIYEIKFHEFVLFILEEKMGATRRTFLTDLARKKGFRVENELSDSVTHIVAENNSRSEVLAWLKTHKMEKTKQFELLDISWLIESMKVGKPVDTKGKYQLMESGEMSANPDPTEGRENELPPTTKTISQYACQRRTTLNNHNQRFTDALEILAENYEFKRNDDTCLTFMRAISVLKCLPFEVVSLKDTEGLPWIGDEVKGIMEEIIEVGESLEVQAVLNDERYQSFKLFKSVFGVGVKTADKWYRMGLRTLEDVRSSKTLKLTPMQKAGLCYYEDLADGVTKAEADAISLLVQDAVWTFDPDALVEITGGFRRGKPFGHDVDLLITSPGAEKEQEDQLLQKVTNLWKKQGLLLYGRLRESRFEDGKLWSRKIDALDHFAKCFLILKLYHHKVDKSKWEMPTGSNESEAKSWKAIRVDLVRCPYDRFAFALLGWTGSRMFERDLRRYATHEKKMMLDNHALYDLTKKIFLKAKSEEEIFAHLGLEYLEPSERNA

SEQ ID NO: 1333 - DNA, 1587 bp, synthetic construct
  misc_feature 1..1587: note = Variant of terminal deoxynucleotidyltransferase
  source 1..1587: mol_type = other DNA
atgcaccatcatcatcatcatggcggtagcggcagccacggcattcgtaccatcgattcggacttcgggaagaaacgccagaagaagatggataaccacgatagttccgccatctatgaaatcaaatttcacgagtttgtgctgttcattctcgaagagaaaatgggtgcgacgcgtcgtacttttctgacagatttagcccgcaagaaagggttccgcgtcgagaatgaactgtcagacagcgttacccacatcgtggcagaaaataattcacgctctgaagtattggcttggctgaagactcacaagatggagaagaccaagcaattcgaactgctggatattagctggcttatcgaaagcatgaaagttggtaaaccggtggacaccaaggggaaataccagttgatggaatcgggtgagatgagtgcgaacccagatccgacagagggtcgtgaaaacgagctgcctcctactacgaagaccatttctcagtatgcgtgtcaacgccgcaccaccctgaacaaccataatcaacgttttacggacgcactggaaattcttgcggaaaattacgagttcaaacgcaacgatgatacttgtctgacctttatgcgtgctatttccgtgctgaaatgccttccgtttgaggtagttagcctgaaagacacggaaggattgccctggatcggtgatgaagtcaaagggattatggaagaaatcatcgaggtcggtgaatcgctggaagtgcaggccgtgctcaatgatgagcgctatcaaagcttcaaactgtttaagagtgtctttggagtgggggtgaagacagcagacaaatggtaccgtatgggtctgcgcacgctcgaggatgttcgttccagcaagaccctgaagttgaccccgatgcagaaagcgggtctgtgctattatgaagatcttgctgatggcgttacgaaagccgaagctgacgcggtgtctctgctggttcaggatgcagtctggactttcgacccggatgcgctggtggagattacgggtggatttcgtcgtgggaaaccttttggtcacgacgttgatctgcttatcacatctccgggagctgagaaagaacaagaagaccagctcctgcagaaagtgaccaatctgtggaagaaacaagggttgttgctgtacggtcgtctgcgtgaaagtcgctttgaagatgggaaactcccatcccgcaagatcgatgccctggaccattttgcgaaatgctttctgatcctcaaactttatcaccataaagtggacaaaagcaaatgggaaatgccgacgggttcgaacgaaagcgaggccaaaagttggaaagcaattcgcgtagatctggttcgttgtccctacgatcgttttgcgtttgcgttgttgggttggaccggaagccgcatgttcgaacgtgatctgcgccgctacgccacccacgagaagaagatgatgctggacaatcatgcgctgtatgacctgaccaagaaaatctttctcaaagctaaatcggaagaggaaattttcgcacatctggggcttgaatacctggaaccgtccgaacgtaacgca

SEQ ID NO: 1334 - protein, 529 aa, synthetic construct
  REGION 1..529: note = Variant of terminal deoxynucleotidyltransferase
MHHHHHHGGSGSHGIRTIDSDFGKKRQKKMDNHDSSAIYEIKFHEFVLFILEEKMGATRRTFLTDLARKKGFRVENELSDSVTHIVAENNSRSEVLAWLKTHKMEKTKQFELLDISWLIESMKVGKPVDTKGKYQLMESGEMSANPDPTEGRENELPPTTKTISQYACQRRTTLNNHNQRFTDALEILAENYEFKRNDDTCLTFMRAISVLKCLPFEVVSLKDTEGLPWIGDEVKGIMEEIIEVGESLEVQAVLNDERYQSFKLFKSVFGVGVKTADKWYRMGLRTLEDVRSSKTLKLTPMQKAGLCYYEDLADGVTKAEADAVSLLVQDAVWTFDPDALVEITGGFRRGKPFGHDVDLLITSPGAEKEQEDQLLQKVTNLWKKQGLLLYGRLRESRFEDGKLPSRKIDALDHFAKCFLILKLYHHKVDKSKWEMPTGSNESEAKSWKAIRVDLVRCPYDRFAFALLGWTGSRMFERDLRRYATHEKKMMLDNHALYDLTKKIFLKAKSEEEIFAHLGLEYLEPSERNA

SEQ ID NO: 1335 - DNA, 1587 bp, synthetic construct
  misc_feature 1..1587: note = Variant of terminal deoxynucleotidyltransferase
  source 1..1587: mol_type = other DNA
atgcaccatcatcatcatcatggcggtagcggcagccacggcattcgtaccatcgattcggacttcgggaagaaacgccagaagaagatggataaccacgatagttccgccatctatgaaatcaaatttcacgagtttgtgctgttcattctcgaagagaaaatgggtgcgacgcgtcgtacttttctgacagatttagcccgcaagaaagggttccgcgtcgagaatgaactgtcagacagcgttacccacatcgtggcagaaaataattcacgctctgaagtattggcttggctgaaagaacacaagatggagaagaccaagcaattcgaactgctggatattagctggcttatcgaaagcatgaaagttggtaaaccggtggacaccaaggggaaataccagttggcggaatcgggtgagatgagtgcgaacccagatccgacagagggtcgtgaaaacgagctgcctcctactacgaagaccatttctcagtatgcgtgtcaacgccgcaccaccctgaacaaccataatcaacgttttacggacgcactggaaattcttgcggaaaattacgagttcaaacgcaacgatgatacttgtctgacctttatgcgtgctatttccgtgctgaaatgccttccgtttgaggtagttagcctgaaagacacggaaggattgccctggatcggtgatgaagtcaaagggattatggaagaaatcatcgaggtcggtgaatcgctggaagtgcaggccgtgctcaatgatgagcgctatcaaagcttcaaacgctttaagagtgtctttggagtgggggtgaagacagcagacaaatggtaccgtatgggtctgcgcacgctcgaggatgttcgttccagcaagaccctgaagttgaccccgatgcagaaagcgggtctgtgctattatgaagatcttgctgatggcgttacgaaagccgaagctgacgcgatttctctgctggttcaggatgcagtctggactttcgacccggatgcgctggtggagattacgggtggatttcgtcgtgggaaaccttttggtcacgacgttgatctgcttatcacatctccgggagctgagaaagaacaagaagaccagctcctgcagaaagtgaccaatctgtggaagaaacaagggttgttgctgtacggtcgtctgcgtgaaagtcgctttgaagatgggaaactcccatcccgcaagatcgatgccctggaccattttgcgaaatgctttctgatcctcaaactttatcaccataaagtggacaaaagcaaatgggaaatgccgacgggttcgaacgaaagcgaggccaaaagttggaaagcaattcgcgtagatctggttcgttgtccctacgatggttttgcgtttgcgttgttgggttggaccggaagccgcatgttccgccgtgatctgcgccgctacgccacccacgagaagaagatgatgctggacaatcatgcgctgtatgacctgaccaagaaaatctttctcaaagctaaatcggaagaggaaattttcgcacatctggggcttgaatacctggaaccgttcgaacgtaacgca

SEQ ID NO: 1336 - protein, 529 aa, synthetic construct
  REGION 1..529: note = Variant of terminal deoxynucleotidyltransferase
MHHHHHHGGSGSHGIRTIDSDFGKKRQKKMDNHDSSAIYEIKFHEFVLFILEEKMGATRRTFLTDLARKKGFRVENELSDSVTHIVAENNSRSEVLAWLKEHKMEKTKQFELLDISWLIESMKVGKPVDTKGKYQLAESGEMSANPDPTEGRENELPPTTKTISQYACQRRTTLNNHNQRFTDALEILAENYEFKRNDDTCLTFMRAISVLKCLPFEVVSLKDTEGLPWIGDEVKGIMEEIIEVGESLEVQAVLNDERYQSFKRFKSVFGVGVKTADKWYRMGLRTLEDVRSSKTLKLTPMQKAGLCYYEDLADGVTKAEADAISLLVQDAVWTFDPDALVEITGGFRRGKPFGHDVDLLITSPGAEKEQEDQLLQKVTNLWKKQGLLLYGRLRESRFEDGKLPSRKIDALDHFAKCFLILKLYHHKVDKSKWEMPTGSNESEAKSWKAIRVDLVRCPYDGFAFALLGWTGSRMFRRDLRRYATHEKKMMLDNHALYDLTKKIFLKAKSEEEIFAHLGLEYLEPFERNA

SEQ ID NO: 1337 - DNA, 1587 bp, synthetic construct
  misc_feature 1..1587: note = Variant of terminal deoxynucleotidyltransferase
  source 1..1587: mol_type = other DNA
atgcaccatcatcatcatcatggcggtagcggcagccacggcattcgtaccatcgattcggacttcgggaagaaacgccagaagaagatggataaccacgatagttccgccatctatgaaatcaaatttcacgagtttgtgctgttcattctcgaagagaaaatgggtgcgacgcgtcgtacttttctgacagatttagcccgcaagaaagggttccgcgtcgagaatgaactgtcagacagcgttacccacatcgtggcagaaaataattcacgctctgaagtattggcttggctgaaagaacacaagatggagaagaccaagcaattcgaactgctggatattagctggcttatcgaaagcatgaaagttggtaaaccggtggacaccaaggggaaataccagttggcggaatcgggtgagatgagtgcgaacccagatccgacagagggtcgtgaaaacgagctgcctcctactacgaagaccatttctcagtatgcgtgtcaacgccgcaccaccctgaacaaccataatcaacgttttacggacgcactggaaattcttgcggaaaattacgagttcaaacgcaacgatgatacttgtctggcttttatgcgtgctatttccgtgctgaaatgccttccgtttgaggtagttagcctgaaagacacggaaggattgccctggatcggtgatgaagtcaaagggattatggaagaaatcatcgaggtcggtgaatcgctggaagtgcaggccgtgctcaatgatgagcgctatcaaagcttcaaacgctttaagagtgtctttggagtgggggtgaagacagcagacaagtggtaccgtatgggtctgcgcacgctcgaggatgttcgttccagcaagaccctgaagttgaccccgatgcagaaagcgggtctgtgctattatgaagatcttgctgatggcgttacgaaagccgaagctgacgcgatttctctgctggttcaggatgcagtctggactttcgacccggatgcgctggtggagattgttggtggatttcgtcgtgggaaaccttttggtcacgacgttgatctgcttatcacatctccgggagctgagaaagaacaagaagaccagctcctgcagaaagtgaccaatctgtggaagaaacaagggttgttgctgtacggtcgtctggaagaaagtcgctttgaagatgggaaactcccatcccgcaagatcgatgccctggaccattttgcgaaatgctttctgatcctcaaactttatcaccataaagtggacaaaagcaaatgggaaatgccgacgggttcgaacgaaagcgaggccaaaagttggaaagcaattcgcgtagatctggttcgttgtccctacgatggttttgcgtttgcgttgttgggttggaccggaagccgcatgttccgccgtgatctgcgccgctacgccacccacgagaagaagatgatgctggacaatcatgcgctgtatgacctgaccaagaaaatctttctcaaagctaaatcggaagaggaaattttcgcacatctggggcttgaatacctggaaccgttcgaacgtaacgca

SEQ ID NO: 1338 - protein, 529 aa, synthetic construct
  REGION 1..529: note = Variant of terminal deoxynucleotidyltransferase
MHHHHHHGGSGSHGIRTIDSDFGKKRQKKMDNHDSSAIYEIKFHEFVLFILEEKMGATRRTFLTDLARKKGFRVENELSDSVTHIVAENNSRSEVLAWLKEHKMEKTKQFELLDISWLIESMKVGKPVDTKGKYQLAESGEMSANPDPTEGRENELPPTTKTISQYACQRRTTLNNHNQRFTDALEILAENYEFKRNDDTCLAFMRAISVLKCLPFEVVSLKDTEGLPWIGDEVKGIMEEIIEVGESLEVQAVLNDERYQSFKRFKSVFGVGVKTADKWYRMGLRTLEDVRSSKTLKLTPMQKAGLCYYEDLADGVTKAEADAISLLVQDAVWTFDPDALVEIVGGFRRGKPFGHDVDLLITSPGAEKEQEDQLLQKVTNLWKKQGLLLYGRLEESRFEDGKLPSRKIDALDHFAKCFLILKLYHHKVDKSKWEMPTGSNESEAKSWKAIRVDLVRCPYDGFAFALLGWTGSRMFRRDLRRYATHEKKMMLDNHALYDLTKKIFLKAKSEEEIFAHLGLEYLEPFERNA

SEQ ID NO: 1339 - DNA, 1587 bp, synthetic construct
  misc_feature 1..1587: note = Variant of terminal deoxynucleotidyltransferase
  source 1..1587: mol_type = other DNA
atgcaccatcatcatcatcatggcggtagcggcagccacggcattcgtaccatcgattcggacttcgggaagaaacgccagaagaagatggataaccacgatagttccgccatctatgaaatcaaatttcacgagtttgtgctgttcattctcgaagagaaaatgggtgcgacgcgtcgtacttttctgacagatttagcccgcaagaaagggttccgcgtcgagaatgaactgtcagacagcgttacccacatcgtggcagaaaataattcacgctctgaagtattggcttggctgaaagaacacaagatggagaagaccaagcaattcgaactgctggatattagctggcttatcgaaagcatgaaagttggtaaaccggtggacaccaaggggaaataccagttggcggaatcgggtgagatgagtgcgaacccagatccgacagagggtcgtgaaaacgagctgcctcctactacgaagaccatttctcagtatgcgtgtcaacgccgcaccaccctgaacaaccataatcaacgttttacggacgcactggaaattcttgcggaaaattacgagttcaaacgcaacgatgatacttgtctggcttttatgcgtgctatttccgtgctgaaatgccttccgtttgaggtagttagcctgaaagacacggaaggattgccctggatcggtgatgaagtcaaagggattatggaagaaatcatcgaggtcggtgaatcgctggaagtgcaggccgtgctcaatgatgagcgctatcaaagcttcaaacgctttaagagtgtctttggagtgggggtgaagacagcagacaagtggtaccgtatgggtctgcgcacgctcgaggatgttcgttccagcaagaccctggatttgaccccgatgcagaaagcgggtctgtgctattatgaagatcttgctcgcggcgttacgaaagccgaagctgacgcgatttctctgctggttcaggatgcagtctggactttcgacccggatgcgctggtggagattaccggtggatttcgtcgtgggaaaccttttggtcacgacgttgatctgcttatcacatctccgggagctgagaaagaacaagaagaccagctcctgcagaaagtgaccaatctgtggaagaaacaagggttgttgctgtacggtcgtctggaatggagtcgctttgaagatgggaaactcccatcccgcaagatcgatgccctggaccattttgcgaaatgctttctgatcctcaaactttatcaccataaagtggacaaaagcaaatgggaaatgccgacgggttcgaacgaaagcgaggccaaaagttggaaagcaattcgcgtagatctggttcgttgtccctacgatggttttgcgtttgcgttgttgggttggaccggaagccgcatgttccgccgtgatctgcgccgctacgccacccacgagaagaagatgatgctggacaatcatgcgctgtatgacctgaccaagaaaatctttctcaaagctaaatcggaagaggaaattttcgcacatctggggcttgaatacctggaaccgttcgaacgtaacgca

SEQ ID NO: 1340 - protein, 529 aa, synthetic construct
  REGION 1..529: note = Variant of terminal deoxynucleotidyltransferase
MHHHHHHGGSGSHGIRTIDSDFGKKRQKKMDNHDSSAIYEIKFHEFVLFILEEKMGATRRTFLTDLARKKGFRVENELSDSVTHIVAENNSRSEVLAWLKEHKMEKTKQFELLDISWLIESMKVGKPVDTKGKYQLAESGEMSANPDPTEGRENELPPTTKTISQYACQRRTTLNNHNQRFTDALEILAENYEFKRNDDTCLAFMRAISVLKCLPFEVVSLKDTEGLPWIGDEVKGIMEEIIEVGESLEVQAVLNDERYQSFKRFKSVFGVGVKTADKWYRMGLRTLEDVRSSKTLDLTPMQKAGLCYYEDLARGVTKAEADAISLLVQDAVWTFDPDALVEITGGFRRGKPFGHDVDLLITSPGAEKEQEDQLLQKVTNLWKKQGLLLYGRLEWSRFEDGKLPSRKIDALDHFAKCFLILKLYHHKVDKSKWEMPTGSNESEAKSWKAIRVDLVRCPYDGFAFALLGWTGSRMFRRDLRRYATHEKKMMLDNHALYDLTKKIFLKAKSEEEIFAHLGLEYLEPFERNA

SEQ ID NO: 1341 - DNA, 1587 bp, synthetic construct
  misc_feature 1..1587: note = Variant of terminal deoxynucleotidyltransferase
  source 1..1587: mol_type = other DNA
atgcaccatcatcatcatcatggcggtagcggcagccacggcattcgtaccatcgattcggacttcgggaagaaacgccagaagaagatggataaccacgatagttccgccatctatgaaatcaaatttcacgagtttgtgctgttcattctcgaagagaaaatgggtgcgacgcgtcgtacttttctgacagatttagcccgcaagaaagggttccgcgtcgagaatgaactgtcagacagcgttacccacatcgtggcagaaaataattcacgctctgaagtattggcttggctgaaagaacacaagatggagaagaccaagcaattcgaactgctggatattagctggcttatcgaaagcatgaaagttggtaaaccggtggacaccaaggggaaataccagttggcggaatcgggtgagatgagtgcgaacccagatccgacagagggtcgtgaaaacgagctgcctcctactacgaagaccatttctcagtatgcgtgtcaacgccgcaccaccctgaacaaccataatcaacgttttacggacgcactggaaattcttgcggaaaattacgagttcgaacgcaacgatgatacttgtctggcttttatgcgtgctatttccgtgctgaaatgccttccgtttgaggtagttagcctgaaagacacggaaggattgccctggatcggtgatgaagtcaaagggattatggaagaaatcatcgaggtcggtgaatcgctggaagtgcaggccgtgctcaatgatgagcgctatcaaagcttcaaacgctttaagagtgtctttggagtgggggtgaagacagcagacgagtggtaccgtatgggtctgcgcacgctcgaggatgttcgttccagcaagaccctgaagttgaccccgatgcagaaagcgggtctgtgctattatgaagatcttgctgatggcgttacgaaagccgaagctgacgcgatttctctgctggttcaggatgcagtctggactttcgacccggatgcgctggtggagattacgggtggatttcgtcgtgggaaaccttttggtcacgacgttgatctgcttatcacatctccgggagctgagaaagaacaagaagaccagctcctgcagaaagtgaccaatctgtggaagaaacaagggttgttgctgtacggtcgtctggaatggagtcgctttgaagatgggaaactcccatcccgcaagatcgatgccctggaccattttgcgaaatgctttctgatcctcaaactttatcaccataaagtggacaaaagcaaatgggaaatgccgacgggttcgaacgaaagcgaggccaaaagttggaaagcaattcgcgtagatctggttcgttgtccctacgatggttttgcgtttgcgttgttgggttggaccggaagccgcatgttccgccgtgatctgcgccgctacgccacccacgagaagaagatgatgctggacaatcatgcgctgtatgacctgaccaagaaaatctttctcaaagctaaatcggaagaggaaattttcgcacatctggggcttgaatacctggaaccgttcgaacgtaacgca

SEQ ID NO: 1342 - protein, 529 aa, synthetic construct
  REGION 1..529: note = Variant of terminal deoxynucleotidyltransferase
MHHHHHHGGSGSHGIRTIDSDFGKKRQKKMDNHDSSAIYEIKFHEFVLFILEEKMGATRRTFLTDLARKKGFRVENELSDSVTHIVAENNSRSEVLAWLKEHKMEKTKQFELLDISWLIESMKVGKPVDTKGKYQLAESGEMSANPDPTEGRENELPPTTKTISQYACQRRTTLNNHNQRFTDALEILAENYEFERNDDTCLAFMRAISVLKCLPFEVVSLKDTEGLPWIGDEVKGIMEEIIEVGESLEVQAVLNDERYQSFKRFKSVFGVGVKTADEWYRMGLRTLEDVRSSKTLKLTPMQKAGLCYYEDLADGVTKAEADAISLLVQDAVWTFDPDALVEITGGFRRGKPFGHDVDLLITSPGAEKEQEDQLLQKVTNLWKKQGLLLYGRLEWSRFEDGKLPSRKIDALDHFAKCFLILKLYHHKVDKSKWEMPTGSNESEAKSWKAIRVDLVRCPYDGFAFALLGWTGSRMFRRDLRRYATHEKKMMLDNHALYDLTKKIFLKAKSEEEIFAHLGLEYLEPFERNA

SEQ ID NO: 1343 - DNA, 1587 bp, synthetic construct
  misc_feature 1..1587: note = Variant of terminal deoxynucleotidyltransferase
  source 1..1587: mol_type = other DNA
atgcaccatcatcatcatcatggcggtagcggcagccacggcattcgtaccatcgattcggacttcgggaagaaacgccagaagaagatggataaccacgatagttccgccatctatgaaatcaaatttcacgagtttgtgctgttcattctcgaagagaaaatgggtgcgacgcgtcgtacttttctgacagatttagcccgcaagaaagggttccgcgtcgagaatgaactgtcagacagcgttacccacatcgtggcagaaaataattcacgctctgaagtattggcttggctgaaagaacacaagatggagaagaccaagcaattcgaactgctggatattagctggcttatcgaaagcatgaaagttggtaaaccggtggacaccaaggggaaataccagttggcggaatcgggtgagatgagtgcgaacccagatccgacagagggtcgtgaaaacgagctgcctcctactacgaagaccatttctcagtatgcgtgtcaacgccgcaccaccctgaacaaccataatcaacgttttacggacgcactggaaattcttgcggaaaattacgagttcaaacgcaacgatgatacttgtctgacctttatgcgtgctatttccgtgctgaaatgccttccgtttgaggtagttagcctgaaagacacggaaggattgccctggatcggtgatgaagtcaaagggattatggaagaaatcatcgaggtcggtgaatcgctggaagtgcaggccgtgctcaatgatgagcgctatcaaagcttcaaacgctttaagagtgtctttggagtgggggtgaagacagcagacaaatggtaccgtatgggtctgcgcacgctcgaggatgttcgttccagcaagaccctgaagttgaccccgatgcagaaagcgggtctgtgctattatgaagatcttgctgatggcgttacgaaagccgaagctgacgcgatttctctgctggttcaggatgcagtctggactttcgacccggatgcgctggtggagattgttggtggatttcgtcgtgggaaaccttttggtcacgacgttgatctgcttatcacatctccgggagctgagaaagaacaagaagaccagctcctgcagaaagtgaccaatctgtggaagaaacaagggttgttgctgtacggtcgtctggaatggagtcgctttgaagatgggaaactcccatcccgcaagatcgatgccctggaccattttgcgaaatgctttctgatcctcaaactttatcaccataaagtggacaaaagcaaatgggaaatgccgacgggttcgaacgaaagcgaggccaaaagttggaaagcaattcgcgtagatctggttcgttgtccctacgatggttttgcgtttgcgttgttgggttggaccggaagccgcatgttccgccgtgatctgcgccgctacgccacccacgagaagaagatgatgctggacaatcatgcgctgtatgacctgaccaagaaaatctttctcaaagctaaatcggaagaggaaattttcgcacatctggggcttgaatacctggaaccgttcgaacgtaacgca

SEQ ID NO: 1344 - protein, 529 aa, synthetic construct
  REGION 1..529: note = Variant of terminal deoxynucleotidyltransferase
MHHHHHHGGSGSHGIRTIDSDFGKKRQKKMDNHDSSAIYEIKFHEFVLFILEEKMGATRRTFLTDLARKKGFRVENELSDSVTHIVAENNSRSEVLAWLKEHKMEKTKQFELLDISWLIESMKVGKPVDTKGKYQLAESGEMSANPDPTEGRENELPPTTKTISQYACQRRTTLNNHNQRFTDALEILAENYEFKRNDDTCLTFMRAISVLKCLPFEVVSLKDTEGLPWIGDEVKGIMEEIIEVGESLEVQAVLNDERYQSFKRFKSVFGVGVKTADKWYRMGLRTLEDVRSSKTLKLTPMQKAGLCYYEDLADGVTKAEADAISLLVQDAVWTFDPDALVEIVGGFRRGKPFGHDVDLLITSPGAEKEQEDQLLQKVTNLWKKQGLLLYGRLEWSRFEDGKLPSRKIDALDHFAKCFLILKLYHHKVDKSKWEMPTGSNESEAKSWKAIRVDLVRCPYDGFAFALLGWTGSRMFRRDLRRYATHEKKMMLDNHALYDLTKKIFLKAKSEEEIFAHLGLEYLEPFERNA

SEQ ID NO: 1345 - DNA, 1587 bp, synthetic construct
  misc_feature 1..1587: note = Variant of terminal deoxynucleotidyltransferase
  source 1..1587: mol_type = other DNA
atgcaccatcatcatcatcatggcggtagcggcagccacggcattcgtaccatcgattcggacttcgggaagaaacgccagaagaagatggataaccacgatagttccgccatctatgaaatcaaatttcacgagtttgtgctgttcattctcgaagagaaaatgggtgcgacgcgtcgtacttttctgacagatttagcccgcaagaaagggttccgcgtcgagaatgaactgtcagacagcgttacccacatcgtggcagaaaataattcacgctctgaagtattggcttggctgaaagaacacaagatggagaagaccaagcaattcgaactgctggatattagctggcttatcgaaagcatgaaagttggtaaaccggtggacaccaaggggaaataccagttggcggaatcgggtgagatgagtgcgaacccagatccgacagagggtcgtgaaaacgagctgcctcctactacgaagaccatttctcagtatgcgtgtcaacgccgcaccaccctgaacaaccataatcaacgttttacggacgcactggaaattcttgcggaaaattacgagttcgaacgcaacgatgatacttgtctggcttttatgcgtgctatttccgtgctgaaatgccttccgtttgaggtagttagcctgaaagacacggaaggattgccctggatcggtgatgaagtcaaagggattatggaagaaatcatcgaggtcggtgaatcgctggaagtgcaggccgtgctcaatgatgagcgctatcaaagcttcaaacgctttaagagtgtctttggagtgggggtgaagacagcagacaaatggtaccgtatgggtctgcgcacgctcgaggatgttcgttccagcaagaccctgaaattgaccccgatgcagaaagcgggtctgtgctattatgaagatcttgctgatggcgttacgaaagccgaagctgacgcgatttctctgctggttcaggatgcagtctggactttcgacccggatgcgctggtggagattaccggtggatttcgtcgtgggaaaccttttggtcacgacgttgatctgcttatcacatctccgggagctgagaaagaacaagaagaccagctcctgcagaaagtgaccaatctgtggaagaaacaagggttgttgctgtacggtcgtctggaagaaagtcgctttgaagatgggaaactcccatcccgcaagatcgatgccctggaccattttgcgaaatgctttctgatcctcaaactttatcaccataaagtggacaaaagcaaatgggaaatgccgacgggttcgaacgaaagcgaggccaaaagttggaaagcaattcgcgtagatctggttcgttgtccctacgatggttttgcgtttgcgttgttgggttggaccggaagccgcatgttccgccgtgatctgcgccgctacgccacccacgagaagaagatgatgctggacaatcatgcgctgtatgacctgaccaagaaaatctttctcaaagctaaatcggaagaggaaattttcgcacatctggggcttgaatacctggaaccgttcgaacgtaacgca

SEQ ID NO: 1346 - protein, 529 aa, synthetic construct
  REGION 1..529: note = Variant of terminal deoxynucleotidyltransferase
MHHHHHHGGSGSHGIRTIDSDFGKKRQKKMDNHDSSAIYEIKFHEFVLFILEEKMGATRRTFLTDLARKKGFRVENELSDSVTHIVAENNSRSEVLAWLKEHKMEKTKQFELLDISWLIESMKVGKPVDTKGKYQLAESGEMSANPDPTEGRENELPPTTKTISQYACQRRTTLNNHNQRFTDALEILAENYEFERNDDTCLAFMRAISVLKCLPFEVVSLKDTEGLPWIGDEVKGIMEEIIEVGESLEVQAVLNDERYQSFKRFKSVFGVGVKTADKWYRMGLRTLEDVRSSKTLKLTPMQKAGLCYYEDLADGVTKAEADAISLLVQDAVWTFDPDALVEITGGFRRGKPFGHDVDLLITSPGAEKEQEDQLLQKVTNLWKKQGLLLYGRLEESRFEDGKLPSRKIDALDHFAKCFLILKLYHHKVDKSKWEMPTGSNESEAKSWKAIRVDLVRCPYDGFAFALLGWTGSRMFRRDLRRYATHEKKMMLDNHALYDLTKKIFLKAKSEEEIFAHLGLEYLEPFERNA

SEQ ID NO: 1347 - DNA, 1587 bp, synthetic construct
  misc_feature 1..1587: note = Variant of terminal deoxynucleotidyltransferase
  source 1..1587: mol_type = other DNA
atgcaccatcatcatcatcatggcggtagcggcagccacggcattcgtaccatcgattcggacttcgggaagaaacgccagaagaagatggataaccacgatagttccgccatctatgaaatcaaatttcacgagtttgtgctgttcattctcgaagagaaaatgggtgcgacgcgtcgtacttttctgacagatttagcccgcaagaaagggttccgcgtcgagaatgaactgtcagacagcgttacccacatcgtggcagaaaataattcacgctctgaagtattggcttggctgaaagaacacaagatggagaagaccaagcaattcgaactgctggatattagctggcttatcgaaagcatgaaagttggtaaaccggtggacaccaaggggaaataccagttggcggaatcgggtgagatgagtgcgaacccagatccgacagagggtcgtgaaaacgagctgcctcctactacgaagaccatttctcagtatgcgtgtcaacgccgcaccaccctgaacaaccataatcaacgttttacggacgcactggaaattcttgcggaaaattacgagttcaaacgcaacgatgatacttgtctgacttttatgcgtgctatttccgtgctgaaatgccttccgtttgaggtagttagcctgaaagacacggaaggattgccctggatcggtgatgaagtcaaagggattatggaagaaatcatcgaggtcggtgaatcgctggaagtgcaggccgtgctcaatgatgagcgctatcaaagcttcaaacgctttaagagtgtctttggagtgggggtgaagacagcagacaagtggtaccgtatgggtctgcgcacgctcgaggatgttcgttccagcaagaccctgaagttgaccccgatgcagaaagcgggtctgtgctattatgaagatcttgctcgcggcgttacgaaagccgaagctgacgcgatttctctgctggttcaggatgcagtctggactttcgacccggatgcgctggtggagattaccggtggatttcgtcgtgggaaaccttttggtcacgacgttgatctgcttatcacatctccgggagctgagaaagaacaagaagaccagctcctgcagaaagtgaccaatctgtggaagaaacaagggttgttgctgtacggtcgtctggaatggagtcgctttgaagatgggaaactcccatcccgcaagatcgatgccctggaccattttgcgaaatgctttctgatcctcaaactttatcaccataaagtggacaaaagcaaatgggaaatgccgacgggttcgaacgaaagcgaggccaaaagttggaaagcaattcgcgtagatctggttcgttgtccctacgatggttttgcgtttgcgttgttgggttggaccggaagccgcatgttccgccgtgatctgcgccgctacgccacccacgagaagaagatgatgctggacaatcatgcgctgtatgacctgaccaagaaaatctttctcaaagctaaatcggaagaggaaattttcgcacatctggggcttgaatacctggaaccgttcgaacgtaacgca

SEQ ID NO: 1348 - protein, 529 aa, synthetic construct
  REGION 1..529: note = Variant of terminal deoxynucleotidyltransferase
MHHHHHHGGSGSHGIRTIDSDFGKKRQKKMDNHDSSAIYEIKFHEFVLFILEEKMGATRRTFLTDLARKKGFRVENELSDSVTHIVAENNSRSEVLAWLKEHKMEKTKQFELLDISWLIESMKVGKPVDTKGKYQLAESGEMSANPDPTEGRENELPPTTKTISQYACQRRTTLNNHNQRFTDALEILAENYEFKRNDDTCLTFMRAISVLKCLPFEVVSLKDTEGLPWIGDEVKGIMEEIIEVGESLEVQAVLNDERYQSFKRFKSVFGVGVKTADKWYRMGLRTLEDVRSSKTLKLTPMQKAGLCYYEDLARGVTKAEADAISLLVQDAVWTFDPDALVEITGGFRRGKPFGHDVDLLITSPGAEKEQEDQLLQKVTNLWKKQGLLLYGRLEWSRFEDGKLPSRKIDALDHFAKCFLILKLYHHKVDKSKWEMPTGSNESEAKSWKAIRVDLVRCPYDGFAFALLGWTGSRMFRRDLRRYATHEKKMMLDNHALYDLTKKIFLKAKSEEEIFAHLGLEYLEPFERNA

SEQ ID NO: 1349 - DNA, 1587 bp, synthetic construct
  misc_feature 1..1587: note = Variant of terminal deoxynucleotidyltransferase
  source 1..1587: mol_type = other DNA
atgcaccatcatcatcatcatggcggtagcggcagccacggcattcgtaccatcgattcggacttcgggaagaaacgccagaagaagatggataaccacgatagttccgccatctatgaaatcaaatttcacgagtttgtgctgttcattctcgaagagaaaatgggtgcgacgcgtcgtacttttctgacagatttagcccgcaagaaagggttccgcgtcgagaatgaactgtcagacagcgttacccacatcgtggcagaaaataattcacgctctgaagtattggcttggctgaaagaacacaagatggagaagaccaagcaattcgaactgctggatattagctggcttatcgaaagcatgaaagttggtaaaccggtggacaccaaggggaaataccagttggcggaatcgggtgagatgagtgcgaacccagatccgacagagggtcgtgaaaacgagctgcctcctactacgaagaccatttctcagtatgcgtgtcaacgccgcaccaccctgaacaaccataatcaacgttttacggacgcactggaaattcttgcggaaaattacgagttcaaacgcaacgatgatacttgtctgacctttatgcgtgctatttccgtgctgaaatgccttccgtttgaggtagttagcctgaaagacacggaaggattgccctggatcggtgatgaagtcaaagggattatggaagaaatcatcgaggtcggtgaatcgctggaagtgcaggccgtgctcaatgatgagcgctatcaaagcttcaaacgctttaagagtgtctttggagtgggggtgaagacagcagacaaatggtaccgtatgggtctgcgcacgctcgaggatgttcgttccagcaagaccctgaaattgaccccgatgcagaaagcgggtctgtgctattatgaagatcttgctgatggcgttacgaaagccgaagctgacgcgatttctctgctggttcaggatgcagtctggactttcgacccggatgcgctggtggagattacgggtggatttcgtcgtgggaaaccttttggtcacgacgttgatctgcttatcacatctccgggagctgagaaagaacaagaagaccagctcctgcagaaagtgaccaatctgtggaagaaacaagggttgttgctgtacggtcgtctggaagaaagtcgctttgaagatgggaaactcccatcccgcaagatcgatgccctggaccattttgcgaaatgctttctgatcctcaaactttatcaccataaagtggacaaaagcaaatgggaaatgccgacgggttcgaacgaaagcgaggccaaaagttggaaagcaattcgcgtagatctggttcgttgtccctacgatggttttgcgtttgcgttgttgggttggaccggaagccgcatgttccgccgtgatctgcgccgctacgccacccacgagaagaagatgatgctggacaatcatgcgctgtatgacctgaccaagaaaatctttctcaaagctaaatcggaagaggaaattttcgcacatctggggcttgaatacctggaaccgttcgaacgtaacgca

SEQ ID NO: 1350 - protein, 529 aa, synthetic construct
  REGION 1..529: note = Variant of terminal deoxynucleotidyltransferase
MHHHHHHGGSGSHGIRTIDSDFGKKRQKKMDNHDSSAIYEIKFHEFVLFILEEKMGATRRTFLTDLARKKGFRVENELSDSVTHIVAENNSRSEVLAWLKEHKMEKTKQFELLDISWLIESMKVGKPVDTKGKYQLAESGEMSANPDPTEGRENELPPTTKTISQYACQRRTTLNNHNQRFTDALEILAENYEFKRNDDTCLTFMRAISVLKCLPFEVVSLKDTEGLPWIGDEVKGIMEEIIEVGESLEVQAVLNDERYQSFKRFKSVFGVGVKTADKWYRMGLRTLEDVRSSKTLKLTPMQKAGLCYYEDLADGVTKAEADAISLLVQDAVWTFDPDALVEITGGFRRGKPFGHDVDLLITSPGAEKEQEDQLLQKVTNLWKKQGLLLYGRLEESRFEDGKLPSRKIDALDHFAKCFLILKLYHHKVDKSKWEMPTGSNESEAKSWKAIRVDLVRCPYDGFAFALLGWTGSRMFRRDLRRYATHEKKMMLDNHALYDLTKKIFLKAKSEEEIFAHLGLEYLEPFERNA

SEQ ID NO: 1351 - DNA, 1587 bp, synthetic construct
  misc_feature 1..1587: note = Variant of terminal deoxynucleotidyltransferase
  source 1..1587: mol_type = other DNA
atgcaccatcatcatcatcatggcggtagcggcagccacggcattcgtaccatcgattcggacttcgggaagaaacgccagaagaagatggataaccacgatagttccgccatctatgaaatcaaatttcacgagtttgtgctgttcattctcgaagagaaaatgggtgcgacgcgtcgtacttttctgacagatttagcccgcaagaaagggttccgcgtcgagaatgaactgtcagacagcgttacccacatcgtggcagaaaataattcacgctctgaagtattggcttggctgaaagaacacaagatggagaagaccaagcaattcgaactgctggatattagctggcttatcgaaagcatgaaagttggtaaaccggtggacaccaaggggaaataccagttggcggaatcgggtgagatgagtgcgaacccagatccgacagagggtcgtgaaaacgagctgcctcctactacgaagaccatttctcagtatgcgtgtcaacgccgcaccaccctgaacaaccataatcaacgttttacggacgcactggaaattcttgcggaaaattacgagttcaaacgcaacgatcgcacttgtctggcttttatgcgtgctatttccgtgctgaaatgccttccgtttgaggtagttagcctgaaagacacggaaggattgccctggatcggtgatgaagtcaaagggattatggaagaaatcatcgaggtcggtgaatcgctggaagtgcaggccgtgctcaatgatgagcgctatcaaagcttcaaacgctttaagagtgtctttggagtgggggtgaagacagcagacaaatggtaccgtatgggtctgcgcacgctcgaggatgttcgttccagcaagaccctggatttgaccccgatgcagaaagcgggtctgtgctattatgaagatcttgctgatggcgttacgaaagccgaagctgacgcgatttctctgctggttcaggatgcagtctggactttcgacccggatgcgctggtggagattaccggtggatttcgtcgtgggaaaccttttggtcacgacgttgatctgcttatcacatctccgggagctgagaaagaacaagaagaccagctcctgcagaaagtgaccaatctgtggaagaaacaagggttgttgctgtacggtcgtctggaatggagtcgctttgaagatgggaaactcccatcccgcaagatcgatgccctggaccattttgcgaaatgctttctgatcctcaaactttatcaccataaagtggacaaaagcaaatgggaaatgccgacgggttcgaacgaaagcgaggccaaaagttggaaagcaattcgcgtagatctggttcgttgtccctacgatggttttgcgtttgcgttgttgggttggaccggaagccgcatgttccgccgtgatctgcgccgctacgccacccacgagaagaagatgatgctggacaatcatgcgctgtatgacctgaccaagaaaatctttctcaaagctaaatcggaagaggaaattttcgcacatctggggcttgaatacctggaaccgttcgaacgtaacgca

SEQ ID NO: 1352 - protein, 529 aa, synthetic construct
  REGION 1..529: note = Variant of terminal deoxynucleotidyltransferase
MHHHHHHGGSGSHGIRTIDSDFGKKRQKKMDNHDSSAIYEIKFHEFVLFILEEKMGATRRTFLTDLARKKGFRVENELSDSVTHIVAENNSRSEVLAWLKEHKMEKTKQFELLDISWLIESMKVGKPVDTKGKYQLAESGEMSANPDPTEGRENELPPTTKTISQYACQRRTTLNNHNQRFTDALEILAENYEFKRNDRTCLAFMRAISVLKCLPFEVVSLKDTEGLPWIGDEVKGIMEEIIEVGESLEVQAVLNDERYQSFKRFKSVFGVGVKTADKWYRMGLRTLEDVRSSKTLDLTPMQKAGLCYYEDLADGVTKAEADAISLLVQDAVWTFDPDALVEITGGFRRGKPFGHDVDLLITSPGAEKEQEDQLLQKVTNLWKKQGLLLYGRLEWSRFEDGKLPSRKIDALDHFAKCFLILKLYHHKVDKSKWEMPTGSNESEAKSWKAIRVDLVRCPYDGFAFALLGWTGSRMFRRDLRRYATHEKKMMLDNHALYDLTKKIFLKAKSEEEIFAHLGLEYLEPFERNA

SEQ ID NO: 1353 - DNA, 1587 bp, synthetic construct
  misc_feature 1..1587: note = Variant of terminal deoxynucleotidyltransferase
  source 1..1587: mol_type = other DNA
atgcaccatcatcatcatcatggcggtagcggcagccacggcattcgtaccatcgattcggacttcgggaagaaacgccagaagaagatggataaccacgatagttccgccatctatgaaatcaaatttcacgagtttgtgctgttcattctcgaagagaaaatgggtgcgacgcgtcgtacttttctgacagatttagcccgcaagaaagggttccgcgtcgagaatgaactgtcagacagcgttacccacatcgtggcagaaaataattcacgctctgaagtattggcttggctgaaagaacacaagatggagaagaccaagcaattcgaactgctggatattagctggcttatcgaaagcatgaaagttggtaaaccggtggacaccaaggggaaataccagttggcggaatcgggtgagatgagtgcgaacccagatccgacagagggtcgtgaaaacgagctgcctcctactacgaagaccatttctcagtatgcgtgtcaacgccgcaccaccctgaacaaccataatcaacgttttacggacgcactggaaattcttgcggaaaattacgagttcaaacgcaacgatgatacttgtctggcttttatgcgtgctatttccgtgctgaaatgccttccgtttgaggtagttagcctgaaagacacggaaggattgccctggatcggtgatgaagtcaaagggattatggaagaaatcatcgaggtcggtgaatcgctggaagtgcaggccgtgctcaatgatgagcgctatcaaagcttcaaacgctttaagagtgtctttggagtgggggtgaagacagcagacaagtggtaccgtatgggtctgcgcacgctcgaggatgttcgttccagcaagaccctgaagttgaccccgatgcagaaagcgggtctgtgctattatgaagatcttgctgatggcgttacgaaagccgaagctgacgcgatttctctgctggttcaggatgcagtctggactttcgacccggatgcgctggtggagattaccggtggatttcgtcgtgggaaacctttcggtcacgacgttgatctgcttatcacatctccgggagctgagaaagaacaagaagaccagctcctgcagaaagtgaccaatctgtggaagaaacaagggttgttgctgtacggtcgtctggaagaaagtcgctttgaagatgggaaactcccatcccgcaagatcgatgccctggaccattttgcgaaatgctttctgatcctcaaactttatcaccataaagtggacaaaagcaaatgggaaatgccgacgggttcgaacgaaagcgaggccaaaagttggaaagcaattcgcgtagatctggttcgttgtccctacgatggttttgcgtttgcgttgttgggttggaccggaagccgcatgttccgccgtgatctgcgccgctacgccacccacgagaagaagatgatgctggacaatcatgcgctgtatgacctgaccaagaaaatctttctcaaagctaaatcggaagaggaaattttcgcacatctggggcttgaatacctggaaccgttcgaacgtaacgca

SEQ ID NO: 1354 - protein, 529 aa, synthetic construct
  REGION 1..529: note = Variant of terminal deoxynucleotidyltransferase
MHHHHHHGGSGSHGIRTIDSDFGKKRQKKMDNHDSSAIYEIKFHEFVLFILEEKMGATRRTFLTDLARKKGFRVENELSDSVTHIVAENNSRSEVLAWLKEHKMEKTKQFELLDISWLIESMKVGKPVDTKGKYQLAESGEMSANPDPTEGRENELPPTTKTISQYACQRRTTLNNHNQRFTDALEILAENYEFKRNDDTCLAFMRAISVLKCLPFEVVSLKDTEGLPWIGDEVKGIMEEIIEVGESLEVQAVLNDERYQSFKRFKSVFGVGVKTADKWYRMGLRTLEDVRSSKTLKLTPMQKAGLCYYEDLADGVTKAEADAISLLVQDAVWTFDPDALVEITGGFRRGKPFGHDVDLLITSPGAEKEQEDQLLQKVTNLWKKQGLLLYGRLEESRFEDGKLPSRKIDALDHFAKCFLILKLYHHKVDKSKWEMPTGSNESEAKSWKAIRVDLVRCPYDGFAFALLGWTGSRMFRRDLRRYATHEKKMMLDNHALYDLTKKIFLKAKSEEEIFAHLGLEYLEPFERNA

SEQ ID NO: 1355 - DNA, 1587 bp, synthetic construct
  misc_feature 1..1587: note = Variant of terminal deoxynucleotidyltransferase
  source 1..1587: mol_type = other DNA
atgcaccatcatcatcatcatggcggtagcggcagccacggcattcgtaccatcgattcggacttcgggaagaaacgccagaagaagatggataaccacgatagttccgccatctatgaaatcaaatttcacgagtttgtgctgttcattctcgaagagaaaatgggtgcgacgcgtcgtacttttctgacagatttagcccgcaagaaagggttccgcgtcgagaatgaactgtcagacagcgttacccacatcgtggcagaaaataattcacgctctgaagtattggcttggctgaaagaacacaagatggagaagaccaagcaattcgaactgctggatattagctggcttatcgaaagcatgaaagttggtaaaccggtggacaccaaggggaaataccagttggcggaatcgggtgagatgagtgcgaacccagatccgacagagggtcgtgaaaacgagctgcctcctactacgaagaccatttctcagtatgcgtgtcaacgccgcaccaccctgaacaaccataatcaacgttttacggacgcactggaaattcttgcggaaaattacgagttcgaacgcaacgatgatacttgtctgacttttatgcgtgctatttccgtgctgaaatgccttccgtttgaggtagttagcctgaaagacacggaaggattgccctggatcggtgatgaagtcaaagggattatggaagaaatcatcgaggtcggtgaatcgctggaagtgcaggccgtgctcaatgatgagcgctatcaaagcttcaaacgctttaagagtgtctttggagtgggggtgaagacagcagacaaatggtaccgtatgggtctgcgcacgctcgaggatgttcgttccagcaagaccctgaagttgaccccgatgcagaaagcgggtctgtgctattatgaagatcttgctgatggcgttacgaaagccgaagctgacgcgatttctctgctggttcaggatgcagtctggactttcgacccggatgcgctggtggagattaccggtggatttcgtcgtgggaaaccttttggtcacgacgttgatctgcttatcacatctccgggagctgagaaagaacaagaagaccagctcctgcagaaagtgaccaatctgtggaagaaacaagggttgttgctgtacggtcgtctggaatggagtcgctttgaagatgggaaactcccatcccgcaagatcgatgccctggaccattttgcgaaatgctttctgatcctcaaactttatcaccataaagtggacaaaagcaaatgggaaatgccgacgggttcgaacgaaagcgaggccaaaagttggaaagcaattcgcgtagatctggttcgttgtccctacgatggttttgcgtttgcgttgttgggttggaccggaagccgcatgttccgccgtgatctgcgccgctacgccacccacgagaagaagatgatgctggacaatcatgcgctgtatgacctgaccaagaaaatctttctcaaagctaaatcggaagaggaaattttcgcacatctggggcttgaatacctggaaccgttcgaacgtaacgca

SEQ ID NO: 1356 - protein, 529 aa, synthetic construct
  REGION 1..529: note = Variant of terminal deoxynucleotidyltransferase
MHHHHHHGGSGSHGIRTIDSDFGKKRQKKMDNHDSSAIYEIKFHEFVLFILEEKMGATRRTFLTDLARKKGFRVENELSDSVTHIVAENNSRSEVLAWLKEHKMEKTKQFELLDISWLIESMKVGKPVDTKGKYQLAESGEMSANPDPTEGRENELPPTTKTISQYACQRRTTLNNHNQRFTDALEILAENYEFERNDDTCLTFMRAISVLKCLPFEVVSLKDTEGLPWIGDEVKGIMEEIIEVGESLEVQAVLNDERYQSFKRFKSVFGVGVKTADKWYRMGLRTLEDVRSSKTLKLTPMQKAGLCYYEDLADGVTKAEADAISLLVQDAVWTFDPDALVEITGGFRRGKPFGHDVDLLITSPGAEKEQEDQLLQKVTNLWKKQGLLLYGRLEWSRFEDGKLPSRKIDALDHFAKCFLILKLYHHKVDKSKWEMPTGSNESEAKSWKAIRVDLVRCPYDGFAFALLGWTGSRMFRRDLRRYATHEKKMMLDNHALYDLTKKIFLKAKSEEEIFAHLGLEYLEPFERNA

SEQ ID NO: 1357 - DNA, 1587 bp, synthetic construct
  misc_feature 1..1587: note = Variant of terminal deoxynucleotidyltransferase
  source 1..1587: mol_type = other DNA
atgcaccatcatcatcatcatggcggtagcggcagccacggcattcgtaccatcgattcggacttcgggaagaaacgccagaagaagatggataaccacgatagttccgccatctatgaaatcaaatttcacgagtttgtgctgttcattctcgaagagaaaatgggtgcgacgcgtcgtacttttctgacagatttagcccgcaagaaagggttccgcgtcgagaatgaactgtcagacagcgttacccacatcgtggcagaaaataattcacgctctgaagtattggcttggctgaaagaacacaagatggagaagaccaagcaattcgaactgctggatattagctggcttatcgaaagcatgaaagttggtaaaccggtggacaccaaggggaaataccagttggcggaatcgggtgagatgagtgcgaacccagatccgacagagggtcgtgaaaacgagctgcctcctactacgaagaccatttctcagtatgcgtgtcaacgccgcaccaccctgaacaaccataatcaacgttttacggacgcactggaaattcttgcggaaaattacgagttcaaacgcaacgatgatacttgtctggcttttatgcgtgctatttccgtgctgaaatgccttccgtttgaggtagttagcctgaaagacacggaaggattgccctggatcggtgatgaagtcaaagggattatggaagaaatcatcgaggtcggtgaatcgctggaagtgcaggccgtgctcaatgatgagcgctatcaaagcttcaaacgctttaagagtgtctttggagtgggggtgaagacagcagacgagtggtaccgtatgggtctgcgcacgctcgaggatgttcgttccagcaagaccctggatttgaccccgatgcagaaagcgggtctgtgctattatgaagatcttgctgatggcgttacgaaagccgaagctgacgcgatttctctgctggttcaggatgcagtctggactttcgacccggatgcgctggtggagattaccggtggatttcgtcgtgggaaacctttcggtcacgacgttgatctgcttatcacatctccgggagctgagaaagaacaagaagaccagctcctgcagaaagtgaccaatctgtggaagaaacaagggttgttgctgtacggtcgtctggaagaaagtcgctttgaagatgggaaactcccatcccgcaagatcgatgccctggaccattttgcgaaatgctttctgatcctcaaactttatcaccataaagtggacaaaagcaaatgggaaatgccgacgggttcgaacgaaagcgaggccaaaagttggaaagcaattcgcgtagatctggttcgttgtccctacgatggttttgcgtttgcgttgttgggttggaccggaagccgcatgttccgccgtgatctgcgccgctacgccacccacgagaagaagatgatgctggacaatcatgcgctgtatgacctgaccaagaaaatctttctcaaagctaaatcggaagaggaaattttcgcacatctggggcttgaatacctggaaccgttcgaacgtaacgca

SEQ ID NO: 1358 - protein, 529 aa, synthetic construct
  REGION 1..529: note = Variant of terminal deoxynucleotidyltransferase
MHHHHHHGGSGSHGIRTIDSDFGKKRQKKMDNHDSSAIYEIKFHEFVLFILEEKMGATRRTFLTDLARKKGFRVENELSDSVTHIVAENNSRSEVLAWLKEHKMEKTKQFELLDISWLIESMKVGKPVDTKGKYQLAESGEMSANPDPTEGRENELPPTTKTISQYACQRRTTLNNHNQRFTDALEILAENYEFKRNDDTCLAFMRAISVLKCLPFEVVSLKDTEGLPWIGDEVKGIMEEIIEVGESLEVQAVLNDERYQSFKRFKSVFGVGVKTADEWYRMGLRTLEDVRSSKTLDLTPMQKAGLCYYEDLADGVTKAEADAISLLVQDAVWTFDPDALVEITGGFRRGKPFGHDVDLLITSPGAEKEQEDQLLQKVTNLWKKQGLLLYGRLEESRFEDGKLPSRKIDALDHFAKCFLILKLYHHKVDKSKWEMPTGSNESEAKSWKAIRVDLVRCPYDGFAFALLGWTGSRMFRRDLRRYATHEKKMMLDNHALYDLTKKIFLKAKSEEEIFAHLGLEYLEPFERNA

SEQ ID NO: 1359 - DNA, 1587 bp, synthetic construct
  misc_feature 1..1587: note = Variant of terminal deoxynucleotidyltransferase
  source 1..1587: mol_type = other DNA
atgcaccatcatcatcatcatggcggtagcggcagccacggctttcgtaccatcgattcggacttcgggaagaaacgccagaagaagatggataaccacgatagttccgccatctatgaaatcaaatttcacgagtttgtgctgttcattctcgaagagaaaatgggtgcgacgcgtcgtacttttctgacagatttagcccgcaagaaagggttccgcgtcgagaatgaactgtcagacagcgttacccacatcgtggcagaaaataattcacgctctgaagtattggcttggctgaaagaacacaagatggagaagaccaagcaattcgaactgctggatattagctggcttatcgaaagcatgaaagttggtaaaccggtggacaccaaggggaaataccagttggcggaatcgggtgagatgagtgcgaacccagatccgacagagggtcgtgaaaacgagctgcctcctactacgaagaccatttctcagtatgcgtgtcaacgccgcaccaccctgaacaaccataatcaacgttttacggacgcactggaaattcttgcggaaaattacgagttcaaacgcaacgatcgcacttgtctggcttttatgcgtgctatttccgtgctgaaatgccttccgtttgaggtagttagcctgaaagacacggaaggattgccctggatcggtgatgaagtcaaagggattatggaagaaatcatcgaggtcggtgaatcgctggaagtgcaggccgtgctcaatgatgagcgctatcaaagcttcaaacgctttaagagtgtctttggagtgggggtgaagacagcagacaagtggtaccgtatgggtctgcgcacgctcgaggatgttcgttccagcaagaccctgaaattgaccccgatgcagaaagcgggtctgtgctattatgaagatcttgctgatggcgttacgaaagccgaagctgacgcgatttctctgctggttcaggatgcagtctggactttcgacccggatgcgctggtggagattaccggtggatttcgtcgtgggaaacctttcggtcacgacgttgatctgcttatcacatctccgggagctgagaaagaacaagaagaccagctcctgcagaaagtgaccaatctgtggaagaaacaagggttgttgctgtacggtcgtctggaagaaagtcgctttgaagatgggaaactcccatcccgcaagatcgatgccctggaccattttgcgaaatgctttctgatcctcaaactttatcaccataaagtggacaaaagcaaatgggaaatgccgacgggttcgaacgaaagcgaggccaaaagttggaaagcaattcgcgtagatctggttcgttgtccctacgatggttttgcgtttgcgttgttgggttggaccggaagccgcatgttccgccgtgatctgcgccgctacgccacccacgagaagaagatgatgctggacaatcatgcgctgtatgacctgaccaagaaaatctttctcaaagctaaatcggaagaggaaattttcgcacatctggggcttgaatacctggaaccgttcgaacgtaacgca

SEQ ID NO: 1360 - protein, 529 aa, synthetic construct
  REGION 1..529: note = Variant of terminal deoxynucleotidyltransferase
MHHHHHHGGSGSHGFRTIDSDFGKKRQKKMDNHDSSAIYEIKFHEFVLFILEEKMGATRRTFLTDLARKKGFRVENELSDSVTHIVAENNSRSEVLAWLKEHKMEKTKQFELLDISWLIESMKVGKPVDTKGKYQLAESGEMSANPDPTEGRENELPPTTKTISQYACQRRTTLNNHNQRFTDALEILAENYEFKRNDRTCLAFMRAISVLKCLPFEVVSLKDTEGLPWIGDEVKGIMEEIIEVGESLEVQAVLNDERYQSFKRFKSVFGVGVKTADKWYRMGLRTLEDVRSSKTLKLTPMQKAGLCYYEDLADGVTKAEADAISLLVQDAVWTFDPDALVEITGGFRRGKPFGHDVDLLITSPGAEKEQEDQLLQKVTNLWKKQGLLLYGRLEESRFEDGKLPSRKIDALDHFAKCFLILKLYHHKVDKSKWEMPTGSNESEAKSWKAIRVDLVRCPYDGFAFALLGWTGSRMFRRDLRRYATHEKKMMLDNHALYDLTKKIFLKAKSEEEIFAHLGLEYLEPFERNA

SEQ ID NO: 1361 - DNA, 1587 bp, synthetic construct
  misc_feature 1..1587: note = Variant of terminal deoxynucleotidyltransferase
  source 1..1587: mol_type = other DNA
atgcaccatcatcatcatcatggcggtagcggcagccacggcattcgtaccatcgattcggacttcgggaagaaacgccagaagaagatggataaccacgatagttccgccatctatgaaatcaaatttcacgagtttgtgctgttcattctcgaagagaaaatgggtgcgacgcgtcgtacttttctgacagatttagcccgcaagaaagggttccgcgtcgagaatgaactgtcagacagcgttacccacatcgtggcagaaaataattcacgctctgaagtattggcttggctgaaagaacacaagatggagaagaccaagcaattcgaactgctggatattagctggcttatcgaaagcatgaaagttggtaaaccggtggacaccaaggggaaataccagttggcggaatcgggtgagatgagtgcgaacccagatccgacagagggtcgtgaaaacgagctgcctcctactacgaagaccatttctcagtatgcgtgtcaacgccgcaccaccctgaacaaccataatcaacgttttacggacgcactggaaattcttgcggaaaattacgagttcgaacgcaacgatcgcacttgtctggcttttatgcgtgctatttccgtgctgaaatgccttccgtttgaggtagttagcctgaaagacacggaaggattgccctggatcggtgatgaagtcaaagggattatggaagaaatcatcgaggtcggtgaatcgctggaagtgcaggccgtgctcaatgatgagcgctatcaaagcttcaaacgctttaagagtgtctttggagtgggggtgaagacagcagacgagtggtaccgtatgggtctgcgcacgctcgaggatgttcgttccagcaagaccctgaagttgaccccgatgcagaaagcgggtctgtgctattatgaagatcttgctcgcggcgttacgaaagccgaagctgacgcgatttctctgctggttcaggatgcagtctggactttcgacccggatgcgctggtggagattaccggtggatttcgtcgtgggaaacctaaaggtcacgacgttgatctgcttatcacatctccgggagctgagaaagaacaagaagaccagctcctgcagaaagtgaccaatctgtggaagaaacaagggttgttgctgtacggtcgtctggaagaaagtcgctttgaagatgggaaactcccatcccgcaagatcgatgccctggaccattttgcgaaatgctttctgatcctcaaactttatcaccataaagtggacaaaagcaaatgggaaatgccgacgggttcgaacgaaagcgaggccaaaagttggaaagcaattcgcgtagatctggttcgttgtccctacgatggttttgcgtttgcgttgttgggttggaccggaagccgcatgttccgccgtgatctgcgccgctacgccacccacgagaagaagatgatgctggacaatcatgcgctgtatgacctgaccaagaaaatctttctcaaagctaaatcggaagaggaaattttcgcacatctggggcttgaatacctggaaccgttcgaacgtaacgca

SEQ ID NO: 1362 - protein, 529 aa, synthetic construct
  REGION 1..529: note = Variant of terminal deoxynucleotidyltransferase
MHHHHHHGGSGSHGIRTIDSDFGKKRQKKMDNHDSSAIYEIKFHEFVLFILEEKMGATRRTFLTDLARKKGFRVENELSDSVTHIVAENNSRSEVLAWLKEHKMEKTKQFELLDISWLIESMKVGKPVDTKGKYQLAESGEMSANPDPTEGRENELPPTTKTISQYACQRRTTLNNHNQRFTDALEILAENYEFERNDRTCLAFMRAISVLKCLPFEVVSLKDTEGLPWIGDEVKGIMEEIIEVGESLEVQAVLNDERYQSFKRFKSVFGVGVKTADEWYRMGLRTLEDVRSSKTLKLTPMQKAGLCYYEDLARGVTKAEADAISLLVQDAVWTFDPDALVEITGGFRRGKPKGHDVDLLITSPGAEKEQEDQLLQKVTNLWKKQGLLLYGRLEESRFEDGKLPSRKIDALDHFAKCFLILKLYHHKVDKSKWEMPTGSNESEAKSWKAIRVDLVRCPYDGFAFALLGWTGSRMFRRDLRRYATHEKKMMLDNHALYDLTKKIFLKAKSEEEIFAHLGLEYLEPFERNA

SEQ ID NO: 1363 - DNA, 1587 bp, synthetic construct
  misc_feature 1..1587: note = Variant of terminal deoxynucleotidyltransferase
  source 1..1587: mol_type = other DNA
atgcaccatcatcatcatcatggcggtagcggcagccacggcattcgtaccatcgattcggacttcgggaagaaacgccagaagaagatggataaccacgatagttccgccatctatgaaatcaaatttcacgagtttgtgctgttcattctcgaagagaaaatgggtgcgacgcgtcgtacttttctgacagatttagcccgcaagaaagggttccgcgtcgagaatgaactgtcagacagcgttacccacatcgtggcagaaaataattcacgctctgaagtattggcttggctgaaagaacacaagatggagaagaccaagcaattcgaactgctggatattagctggcttatcgaaagcatgaaagttggtaaaccggtggacaccaaggggaaataccagttggcggaatcgggtgagatgagtgcgaacccagatccgacagagggtcgtgaaaacgagctgcctcctactacgaagaccatttctcagtatgcgtgtcaacgccgcaccaccctgaacaaccataatcaacgttttacggacgcactggaaattcttgcggaaaattacgagttcgaacgcaacgatgatacttgtctgacttttatgcgtgctatttccgtgctgaaatgccttccgtttgaggtagttagcctgaaagacacggaaggattgccctggatcggtgatgaagtcaaagggattatggaagaaatcatcgaggtcggtgaatcgctggaagtgcaggccgtgctcaatgatgagcgctatcaaagcttcaaacgctttaagagtgtctttggagtgggggtgaagacagcagacgagtggtaccgtatgggtctgcgcacgctcgaggatgttcgttccagcaagaccctggatttgaccccgatgcagaaagcgggtctgtgctattatgaagatcttgctgatggcgttacgaaagccgaagctgacgcgatttctctgctggttcaggatgcagtctggactttcgacccggatgcgctggtggagattacgggtggatttcgtcgtgggaaaccttttggtcacgacgttgatctgcttatcacatctccgggagctgagaaagaacaagaagaccagctcctgcagaaagtgaccaatctgtggaagaaacaagggttgttgctgtacggtcgtctggaatggagtcgctttgaagatgggaaactcccatcccgcaagatcgatgccctggaccattttgcgaaatgctttctgatcctcaaactttatcaccataaagtggacaaaagcaaatgggaaatgccgacgggttcgaacgaaagcgaggccaaaagttggaaagcaattcgcgtagatctggttcgttgtccctacgatggttttgcgtttgcgttgttgggttggaccggaagccgcatgttccgccgtgatctgcgccgctacgccacccacgagaagaagatgatgctggacaatcatgcgctgtatgacctgaccaagaaaatctttctcaaagctaaatcggaagaggaaattttcgcacatctggggcttgaatacctggaaccgttcgaacgtaacgca

SEQ ID NO: 1364 - protein, 529 aa, synthetic construct
  REGION 1..529: note = Variant of terminal deoxynucleotidyltransferase
MHHHHHHGGSGSHGIRTIDSDFGKKRQKKMDNHDSSAIYEIKFHEFVLFILEEKMGATRRTFLTDLARKKGFRVENELSDSVTHIVAENNSRSEVLAWLKEHKMEKTKQFELLDISWLIESMKVGKPVDTKGKYQLAESGEMSANPDPTEGRENELPPTTKTISQYACQRRTTLNNHNQRFTDALEILAENYEFERNDDTCLTFMRAISVLKCLPFEVVSLKDTEGLPWIGDEVKGIMEEIIEVGESLEVQAVLNDERYQSFKRFKSVFGVGVKTADEWYRMGLRTLEDVRSSKTLDLTPMQKAGLCYYEDLADGVTKAEADAISLLVQDAVWTFDPDALVEITGGFRRGKPFGHDVDLLITSPGAEKEQEDQLLQKVTNLWKKQGLLLYGRLEWSRFEDGKLPSRKIDALDHFAKCFLILKLYHHKVDKSKWEMPTGSNESEAKSWKAIRVDLVRCPYDGFAFALLGWTGSRMFRRDLRRYATHEKKMMLDNHALYDLTKKIFLKAKSEEEIFAHLGLEYLEPFERNA

SEQ ID NO: 1365 - DNA, 1587 bp, synthetic construct
  misc_feature 1..1587: note = Variant of terminal deoxynucleotidyltransferase
  source 1..1587: mol_type = other DNA
atgcaccatcatcatcatcatggcggtagcggcagccacggcattcgtaccatcgattcggacttcgggaagaaacgccagaagaagatggataaccacgatagttccgccatctatgaaatcaaatttcacgagtttgtgctgttcattctcgaagagaaaatgggtgcgacgcgtcgtacttttctgacagatttagcccgcaagaaagggttccgcgtcgagaatgaactgtcagacagcgttacccacatcgtggcagaaaataattcacgctctgaagtattggcttggctgaaagaacacaagatggagaagaccaagcaattcgaactgctggatattagctggcttatcgaaagcatgaaagttggtaaaccggtggacaccaaggggaaataccagttggcggaatcgggtgagatgagtgcgaacccagatccgacagagggtcgtgaaaacgagctgcctcctactacgaagaccatttctcagtatgcgtgtcaacgccgcaccaccctgaacaaccataatcaacgttttacggacgcactggaaattcttgcggaaaattacgagttcaaacgcaacgatgatacttgtctgacttttatgcgtgctatttccgtgctgaaatgccttccgtttgaggtagttagcctgaaagacacggaaggattgccctggatcggtgatgaagtcaaagggattatggaagaaatcatcgaggtcggtgaatcgctggaagtgcaggccgtgctcaatgatgagcgctatcaaagcttcaaacgctttaagagtgtctttggagtgggggtgaagacagcagacaaatggtaccgtatgggtctgcgcacgctcgaggatgttcgttccagcaagaccctggatttgaccccgatgcagaaagcgggtctgtgctattatgaagatcttgctgatggcgttacgaaagccgaagctgacgcgatttctctgctggttcaggatgcagtctggactttcgacccggatgcgctggtggagattaccggtggatttcgtcgtgggaaaccttttggtcacgacgttgatctgcttatcacatctccgggagctgagaaagaacaagaagaccagctcctgcagaaagtgaccaatctgtggaagaaacaagggttgttgctgtacggtcgtctggaagaaagtcgctttgaagatgggaaactcccatcccgcaagatcgatgccctggaccattttgcgaaatgctttctgatcctcaaactttatcaccataaagtggacaaaagcaaatgggaaatgccgacgggttcgaacgaaagcgaggccaaaagttggaaagcaattcgcgtagatctggttcgttgtccctacgatggttttgcgtttgcgttgttgggttggaccggaagccgcatgttccgccgtgatctgcgccgctacgccacccacgagaagaagatgatgctggacaatcatgcgctgtatgacctgaccaagaaaatctttctcaaagctaaatcggaagaggaaattttcgcacatctggggcttgaatacctggaaccgttcgaacgtaacgca

SEQ ID NO: 1366 - protein, 529 aa, synthetic construct
  REGION 1..529: note = Variant of terminal deoxynucleotidyltransferase
MHHHHHHGGSGSHGIRTIDSDFGKKRQKKMDNHDSSAIYEIKFHEFVLFILEEKMGATRRTFLTDLARKKGFRVENELSDSVTHIVAENNSRSEVLAWLKEHKMEKTKQFELLDISWLIESMKVGKPVDTKGKYQLAESGEMSANPDPTEGRENELPPTTKTISQYACQRRTTLNNHNQRFTDALEILAENYEFKRNDDTCLTFMRAISVLKCLPFEVVSLKDTEGLPWIGDEVKGIMEEIIEVGESLEVQAVLNDERYQSFKRFKSVFGVGVKTADKWYRMGLRTLEDVRSSKTLDLTPMQKAGLCYYEDLADGVTKAEADAISLLVQDAVWTFDPDALVEITGGFRRGKPFGHDVDLLITSPGAEKEQEDQLLQKVTNLWKKQGLLLYGRLEESRFEDGKLPSRKIDALDHFAKCFLILKLYHHKVDKSKWEMPTGSNESEAKSWKAIRVDLVRCPYDGFAFALLGWTGSRMFRRDLRRYATHEKKMMLDNHALYDLTKKIFLKAKSEEEIFAHLGLEYLEPFERNA

SEQ ID NO: 1367 - DNA, 1587 bp, synthetic construct
  misc_feature 1..1587: note = Variant of terminal deoxynucleotidyltransferase
  source 1..1587: mol_type = other DNA
atgcaccatcatcatcatcatggcggtagcggcagccacggcattcgtaccatcgattcggacttcgggaagaaacgccagaagaagatggataaccacgatagttccgccatctatgaaatcaaatttcacgagtttgtgctgttcattctcgaagagaaaatgggtgcgacgcgtcgtacttttctgacagatttagcccgcaagaaagggttccgcgtcgagaatgaactgtcagacagcgttacccacatcgtggcagaaaataattcacgctctgaagtattggcttggctgaaagaacacaagatggagaagaccaagcaattcgaactgctggatattagctggcttatcgaaagcatgaaagttggtaaaccggtggacaccaaggggaaataccagttggcggaatcgggtgagatgagtgcgaacccagatccgacagagggtcgtgaaaacgagctgcctcctactacgaagaccatttctcagtatgcgtgtcaacgccgcaccaccctgaacaaccataatcaacgttttacggacgcactggaaattcttgcggaaaattacgagttcgaacgcaacgatcgcacttgtctggcttttatgcgtgctatttccgtgctgaaatgccttccgtttgaggtagttagcctgaaagacacggaaggattgccctggatcggtgatgaagtcaaagggattatggaagaaatcatcgaggtcggtgaatcgctggaagtgcaggccgtgctcaatgatgagcgctatcaaagcttcaaacgctttaagagtgtctttggagtgggggtgaagacagcagacgagtggtaccgtatgggtctgcgcacgctcgaggatgttcgttccagcaagaccctggatttgaccccgatgcagaaagcgggtctgtgctattatgaagatcttgctgatggcgttacgaaagccgaagctgacgcgatttctctgctggttcaggatgcagtctggactttcgacccggatgcgctggtggagattacgggtggatttcgtcgtgggaaaccttttggtcacgacgttgatctgcttatcacatctccgggagctgagaaagaacaagaagaccagctcctgcagaaagtgaccaatctgtggaagaaacaagggttgttgctgtacggtcgtctggaagaaagtcgctttgaagatgggaaactcccatcccgcaagatcgatgccctggaccattttgcgaaatgctttctgatcctcaaactttatcaccataaagtggacaaaagcaaatgggaaatgccgacgggttcgaacgaaagcgaggccaaaagttggaaagcaattcgcgtagatctggttcgttgtccctacgatggttttgcgtttgcgttgttgggttggaccggaagccgcatgttccgccgtgatctgcgccgctacgccacccacgagaagaagatgatgctggacaatcatgcgctgtatgacctgaccaagaaaatctttctcaaagctaaatcggaagaggaaattttcgcacatctggggcttgaatacctggaaccgttcgaacgtaacgca

SEQ ID NO: 1368 - protein, 529 aa, synthetic construct
  REGION 1..529: note = Variant of terminal deoxynucleotidyltransferase
MHHHHHHGGSGSHGIRTIDSDFGKKRQKKMDNHDSSAIYEIKFHEFVLFILEEKMGATRRTFLTDLARKKGFRVENELSDSVTHIVAENNSRSEVLAWLKEHKMEKTKQFELLDISWLIESMKVGKPVDTKGKYQLAESGEMSANPDPTEGRENELPPTTKTISQYACQRRTTLNNHNQRFTDALEILAENYEFERNDRTCLAFMRAISVLKCLPFEVVSLKDTEGLPWIGDEVKGIMEEIIEVGESLEVQAVLNDERYQSFKRFKSVFGVGVKTADEWYRMGLRTLEDVRSSKTLDLTPMQKAGLCYYEDLADGVTKAEADAISLLVQDAVWTFDPDALVEITGGFRRGKPFGHDVDLLITSPGAEKEQEDQLLQKVTNLWKKQGLLLYGRLEESRFEDGKLPSRKIDALDHFAKCFLILKLYHHKVDKSKWEMPTGSNESEAKSWKAIRVDLVRCPYDGFAFALLGWTGSRMFRRDLRRYATHEKKMMLDNHALYDLTKKIFLKAKSEEEIFAHLGLEYLEPFERNA

SEQ ID NO: 1369 - DNA, 1587 bp, synthetic construct
  misc_feature 1..1587: note = Variant of terminal deoxynucleotidyltransferase
  source 1..1587: mol_type = other DNA
atgcaccatcatcatcatcatggcggtagcggcagccacggcattcgtaccatcgattcggacttcgggaagaaacgccagaagaagatggataaccacgatagttccgccatctatgaaatcaaatttcacgagtttgtgctgttcattctcgaagagaaaatgggtgcgacgcgtcgtacttttctgacagatttagcccgcaagaaagggttccgcgtcgagaatgaactgtcagacagcgttacccacatcgtggcagaaaataattcacgctctgaagtattggcttggctgaaagaacacaagatggagaagaccaagcaattcgaactgctggatattagctggcttatcgaaagcatgaaagttggtaaaccggtggacaccaaggggaaataccagttggcggaatcgggtgagatgagtgcgaacccagatccgacagagggtcgtgaaaacgagctgcctcctactacgaagaccatttctcagtatgcgtgtcaacgccgcaccaccctgaacaaccataatcaacgttttacggacgcactggaaattcttgcggaaaattacgagttcgaacgcaacgatgatacttgtctggcttttatgcgtgctatttccgtgctgaaatgccttccgtttgaggtagttagcctgaaagacacggaaggattgccctggatcggtgatgaagtcaaagggattatggaagaaatcatcgaggtcggtgaatcgctggaagtgcaggccgtgctcaatgatgagcgctatcaaagcttcaaacgctttaagagtgtctttggagtgggggtgaagacagcagacaagtggtaccgtatgggtctgcgcacgctcgaggatgttcgttccagcaagaccctggatttgaccccgatgcagaaagcgggtctgtgctattatgaagatcttgctcgcggcgttacgaaagccgaagctgacgcgatttctctgctggttcaggatgcagtctggactttcgacccggatgcgctggtggagattacgggtggatttcgtcgtgggaaacctttcggtcacgacgttgatctgcttatcacatctccgggagctgagaaagaacaagaagaccagctcctgcagaaagtgaccaatctgtggaagaaacaagggttgttgctgtacggtcgtctggaagaaagtcgctttgaagatgggaaactcccatcccgcaagatcgatgccctggaccattttgcgaaatgctttctgatcctcaaactttatcaccataaagtggacaaaagcaaatgggaaatgccgacgggttcgaacgaaagcgaggccaaaagttggaaagcaattcgcgtagatctggttcgttgtccctacgatggttttgcgtttgcgttgttgggttggaccggaagccgcatgttccgccgtgatctgcgccgctacgccacccacgagaagaagatgatgctggacaatcatgcgctgtatgacctgaccaagaaaatctttctcaaagctaaatcggaagaggaaattttcgcacatctggggcttgaatacctggaaccgttcgaacgtaacgca

SEQ ID NO: 1370 - protein, 529 aa, synthetic construct
  REGION 1..529: note = Variant of terminal deoxynucleotidyltransferase
MHHHHHHGGSGSHGIRTIDSDFGKKRQKKMDNHDSSAIYEIKFHEFVLFILEEKMGATRRTFLTDLARKKGFRVENELSDSVTHIVAENNSRSEVLAWLKEHKMEKTKQFELLDISWLIESMKVGKPVDTKGKYQLAESGEMSANPDPTEGRENELPPTTKTISQYACQRRTTLNNHNQRFTDALEILAENYEFERNDDTCLAFMRAISVLKCLPFEVVSLKDTEGLPWIGDEVKGIMEEIIEVGESLEVQAVLNDERYQSFKRFKSVFGVGVKTADKWYRMGLRTLEDVRSSKTLDLTPMQKAGLCYYEDLARGVTKAEADAISLLVQDAVWTFDPDALVEITGGFRRGKPFGHDVDLLITSPGAEKEQEDQLLQKVTNLWKKQGLLLYGRLEESRFEDGKLPSRKIDALDHFAKCFLILKLYHHKVDKSKWEMPTGSNESEAKSWKAIRVDLVRCPYDGFAFALLGWTGSRMFRRDLRRYATHEKKMMLDNHALYDLTKKIFLKAKSEEEIFAHLGLEYLEPFERNA

SEQ ID NO: 1371 - DNA, 1587 bp, synthetic construct
  misc_feature 1..1587: note = Variant of terminal deoxynucleotidyltransferase
  source 1..1587: mol_type = other DNA
atgcaccatcatcatcatcatggcggtagcggcagccacggcattcgtaccatcgattcggacttcgggaagaaacgccagaagaagatggataaccacgatagttccgccatctatgaaatcaaatttcacgagtttgtgctgttcattctcgaagagaaaatgggtgcgacgcgtcgtacttttctgacagatttagcccgcaagaaagggttccgcgtcgagaatgaactgtcagacagcgttacccacatcgtggcagaaaataattcacgctctgaagtattggcttggctgaaagaacacaagatggagaagaccaagcaattcgaactgctggatattagctggcttatcgaaagcatgaaagttggtaaaccggtggacaccaaggggaaataccagttggcggaatcgggtgagatgagtgcgaacccagatccgacagagggtcgtgaaaacgagctgcctcctactacgaagaccatttctcagtatgcgtgtcaacgccgcaccaccctgaacaaccataatcaacgttttacggacgcactggaaattcttgcggaaaattacgagttcaaacgcaacgatgatacttgtctggcttttatgcgtgctatttccgtgctgaaatgccttccgtttgaggtagttagcctgaaagacacggaaggattgccctggatcggtgatgaagtcaaagggattatggaagaaatcatcgaggtcggtgaatcgctggaagtgcaggccgtgctcaatgatgagcgctatcaaagcttcaaacgctttaagagtgtctttggagtgggggtgaagacagcagacaagtggtaccgtatgggtctgcgcacgctcgaggatgttcgttccagcaagaccctgaagttgaccccgatgcagaaagcgggtctgtgctattatgaagatcttgctgatggcgttacgaaagccgaagctgacgcgatttctctgctggttcaggatgcagtctggactttcgacccggatgcgctggtggagattaccggtggatttcgtcgtgggaaaccttttggtcacgacgttgatctgcttatcacatctccgggagctgagaaagaacaagaagaccagctcctgcagaaagtgaccaatctgtggaagaaacaagggttgttgctgtacggtcgtctggaatggagtcgctttgaagatgggaaactcccatcccgcaagatcgatgccctggaccattttgcgaaatgctttctgatcctcaaactttatcaccataaagtggacaaaagcaaatgggaaatgccgacgggttcgaacgaaagcgaggccaaaagttggaaagcaattcgcgtagatctggttcgttgtccctacgatggttttgcgtttgcgttgttgggttggaccggaagccgcatgttccgccgtgatctgcgccgctacgccacccacgagaagaagatgatgctggacaatcatgcgctgtatgacctgaccaagaaaatctttctcaaagctaaatcggaagaggaaattttcgcacatctggggcttgaatacctggaaccgttcgaacgtaacgca

SEQ ID NO: 1372 - protein, 529 aa, synthetic construct
  REGION 1..529: note = Variant of terminal deoxynucleotidyltransferase
MHHHHHHGGSGSHGIRTIDSDFGKKRQKKMDNHDSSAIYEIKFHEFVLFILEEKMGATRRTFLTDLARKKGFRVENELSDSVTHIVAENNSRSEVLAWLKEHKMEKTKQFELLDISWLIESMKVGKPVDTKGKYQLAESGEMSANPDPTEGRENELPPTTKTISQYACQRRTTLNNHNQRFTDALEILAENYEFKRNDDTCLAFMRAISVLKCLPFEVVSLKDTEGLPWIGDEVKGIMEEIIEVGESLEVQAVLNDERYQSFKRFKSVFGVGVKTADKWYRMGLRTLEDVRSSKTLKLTPMQKAGLCYYEDLADGVTKAEADAISLLVQDAVWTFDPDALVEITGGFRRGKPFGHDVDLLITSPGAEKEQEDQLLQKVTNLWKKQGLLLYGRLEWSRFEDGKLPSRKIDALDHFAKCFLILKLYHHKVDKSKWEMPTGSNESEAKSWKAIRVDLVRCPYDGFAFALLGWTGSRMFRRDLRRYATHEKKMMLDNHALYDLTKKIFLKAKSEEEIFAHLGLEYLEPFERNA

SEQ ID NO: 1373 - DNA, 1587 bp, synthetic construct
  misc_feature 1..1587: note = Variant of terminal deoxynucleotidyltransferase
  source 1..1587: mol_type = other DNA
atgcaccatcatcatcatcatggcggtagcggcagccacggcattcgtaccatcgattcggacttcgggaagaaacgccagaagaagatggataaccacgatagttccgccatctatgaaatcaaatttcacgagtttgtgctgttcattctcgaagagaaaatgggtgcgacgcgtcgtacttttctgacagatttagcccgcaagaaagggttccgcgtcgagaatgaactgtcagacagcgttacccacatcgtggcagaaaataattcacgctctgaagtattggcttggctgaaagaacacaagatggagaagaccaagcaattcgaactgctggatattagctggcttatcgaaagcatgaaagttggtaaaccggtggacaccaaggggaaataccagttggcggaatcgggtgagatgagtgcgaacccagatccgacagagggtcgtgaaaacgagctgcctcctactacgaagaccatttctcagtatgcgtgtcaacgccgcaccaccctgaacaaccataatcaacgttttacggacgcactggaaattcttgcggaaaattacgagttcgaacgcaacgatgatacttgtctgacttttatgcgtgctatttccgtgctgaaatgccttccgtttgaggtagttagcctgaaagacacggaaggattgccctggatcggtgatgaagtcaaagggattatggaagaaatcatcgaggtcggtgaatcgctggaagtgcaggccgtgctcaatgatgagcgctatcaaagcttcaaacgctttaagagtgtctttggagtgggggtgaagacagcagacgagtggtaccgtatgggtctgcgcacgctcgaggatgttcgttccagcaagaccctggatttgaccccgatgcagaaagcgggtctgtgctattatgaagatcttgctgatggcgttacgaaagccgaagctgacgcgatttctctgctggttcaggatgcagtctggactttcgacccggatgcgctggtggagattaccggtggatttcgtcgtgggaaacctttcggtcacgacgttgatctgcttatcacatctccgggagctgagaaagaacaagaagaccagctcctgcagaaagtgaccaatctgtggaagaaacaagggttgttgctgtacggtcgtctggaagaaagtcgctttgaagatgggaaactcccatcccgcaagatcgatgccctggaccattttgcgaaatgctttctgatcctcaaactttatcaccataaagtggacaaaagcaaatgggaaatgccgacgggttcgaacgaaagcgaggccaaaagttggaaagcaattcgcgtagatctggttcgttgtccctacgatggttttgcgtttgcgttgttgggttggaccggaagccgcatgttccgccgtgatctgcgccgctacgccacccacgagaagaagatgatgctggacaatcatgcgctgtatgacctgaccaagaaaatctttctcaaagctaaatcggaagaggaaattttcgcacatctggggcttgaatacctggaaccgttcgaacgtaacgca

SEQ ID NO: 1374 - protein, 529 aa, synthetic construct
  REGION 1..529: note = Variant of terminal deoxynucleotidyltransferase
MHHHHHHGGSGSHGIRTIDSDFGKKRQKKMDNHDSSAIYEIKFHEFVLFILEEKMGATRRTFLTDLARKKGFRVENELSDSVTHIVAENNSRSEVLAWLKEHKMEKTKQFELLDISWLIESMKVGKPVDTKGKYQLAESGEMSANPDPTEGRENELPPTTKTISQYACQRRTTLNNHNQRFTDALEILAENYEFERNDDTCLTFMRAISVLKCLPFEVVSLKDTEGLPWIGDEVKGIMEEIIEVGESLEVQAVLNDERYQSFKRFKSVFGVGVKTADEWYRMGLRTLEDVRSSKTLDLTPMQKAGLCYYEDLADGVTKAEADAISLLVQDAVWTFDPDALVEITGGFRRGKPFGHDVDLLITSPGAEKEQEDQLLQKVTNLWKKQGLLLYGRLEESRFEDGKLPSRKIDALDHFAKCFLILKLYHHKVDKSKWEMPTGSNESEAKSWKAIRVDLVRCPYDGFAFALLGWTGSRMFRRDLRRYATHEKKMMLDNHALYDLTKKIFLKAKSEEEIFAHLGLEYLEPFERNA

SEQ ID NO: 1375 - DNA, 1587 bp, synthetic construct
  misc_feature 1..1587: note = Variant of terminal deoxynucleotidyltransferase
  source 1..1587: mol_type = other DNA
atgcaccatcatcatcatcatggcggtagcggcagccacggcattcgtaccatcgattcggacttcgggaagaaacgccagaagaagatggataaccacgatagttccgccatctatgaaatcaaatttcacgagtttgtgctgttcattctcgaagagaaaatgggtgcgacgcgtcgtacttttctgacagatttagcccgcaagaaagggttccgcgtcgagaatgaactgtcagacagcgttacccacatcgtggcagaaaataattcacgctctgaagtattggcttggctgaaagaacacaagatggagaagaccaagcaattcgaactgctggatattagctggcttatcgaaagcatgaaagttggtaaaccggtggacaccaaggggaaataccagttggcggaatcgggtgagatgagtgcgaacccagatccgacagagggtcgtgaaaacgagctgcctcctactacgaagaccatttctcagtatgcgtgtcaacgccgcaccaccctgaacaaccataatcaacgttttacggacgcactggaaattcttgcggaaaattacgagttcgaacgcaacgatgatacttgtctggcttttatgcgtgctatttccgtgctgaaatgccttccgtttgaggtagttagcctgaaagacacggaaggattgccctggatcggtgatgaagtcaaagggattatggaagaaatcatcgaggtcggtgaatcgctggaagtgcaggccgtgctcaatgatgagcgctatcaaagcttcaaacgctttaagagtgtctttggagtgggggtgaagacagcagacaaatggtaccgtatgggtctgcgcacgctcgaggatgttcgttccagcaagaccctggatttgaccccgatgcagaaagcgggtctgtgctattatgaagatcttgctgatggcgttacgaaagccgaagctgacgcgatttctctgctggttcaggatgcagtctggactttcgacccggatgcgctggtggagattaccggtggatttcgtcgtgggaaaccttttggtcacgacgttgatctgcttatcacatctccgggagctgagaaagaacaagaagaccagctcctgcagaaagtgaccaatctgtggaagaaacaagggttgttgctgtacggtcgtctggaagaaagtcgctttgaagatgggaaactcccatcccgcaagatcgatgccctggaccattttgcgaaatgctttatgatcctcaaactttatcaccataaagtggacaaaagcaaatgggaaatgccgacgggttcgaacgaaagcgaggccaaaagttggaaagcaattcgcgtagatctggttcgttgtccctacgatggttttgcgtttgcgttgttgggttggaccggaagccgcatgttccgccgtgatctgcgccgctacgccacccacgagaagaagatgatgctggacaatcatgcgctgtatgacctgaccaagaaaatctttctcaaagctaaatcggaagaggaaattttcgcacatctggggcttgaatacctggaaccgttcgaacgtaacgca

SEQ ID NO: 1376 - protein, 529 aa, synthetic construct
  REGION 1..529: note = Variant of terminal deoxynucleotidyltransferase
MHHHHHHGGSGSHGIRTIDSDFGKKRQKKMDNHDSSAIYEIKFHEFVLFILEEKMGATRRTFLTDLARKKGFRVENELSDSVTHIVAENNSRSEVLAWLKEHKMEKTKQFELLDISWLIESMKVGKPVDTKGKYQLAESGEMSANPDPTEGRENELPPTTKTISQYACQRRTTLNNHNQRFTDALEILAENYEFERNDDTCLAFMRAISVLKCLPFEVVSLKDTEGLPWIGDEVKGIMEEIIEVGESLEVQAVLNDERYQSFKRFKSVFGVGVKTADKWYRMGLRTLEDVRSSKTLDLTPMQKAGLCYYEDLADGVTKAEADAISLLVQDAVWTFDPDALVEITGGFRRGKPFGHDVDLLITSPGAEKEQEDQLLQKVTNLWKKQGLLLYGRLEESRFEDGKLPSRKIDALDHFAKCFMILKLYHHKVDKSKWEMPTGSNESEAKSWKAIRVDLVRCPYDGFAFALLGWTGSRMFRRDLRRYATHEKKMMLDNHALYDLTKKIFLKAKSEEEIFAHLGLEYLEPFERNA

SEQ ID NO: 1377 - DNA, 1587 bp, synthetic construct
  misc_feature 1..1587: note = Variant of terminal deoxynucleotidyltransferase
  source 1..1587: mol_type = other DNA
atgcaccatcatcatcatcatggcggtagcggcagccacggcattcgtaccatcgattcggacttcgggaagaaacgccagaagaagatggataaccacgatagttccgccatctatgaaatcaaatttcacgagtttgtgctgttcattctcgaagagaaaatgggtgcgacgcgtcgtacttttctgacagatttagcccgcaagaaagggttccgcgtcgagaatgaactgtcagacagcgttacccacatcgtggcagaaaataattcacgctctgaagtattggcttggctgaaagaacacaagatggagaagaccaagcaattcgaactgctggatattagctggcttatcgaaagcatgaaagttggtaaaccggtggacaccaaggggaaataccagttggcggaatcgggtgagatgagtgcgaacccagatccgacagagggtcgtgaaaacgagctgcctcctactacgaagaccatttctcagtatgcgtgtcaacgccgcaccaccctgaacaaccataatcaacgttttacggacgcactggaaattcttgcggaaaattacgagttcgaacgcaacgatgatacttgtctgacttttatgcgtgctatttccgtgctgaaatgccttccgtttgaggtagttagcctgaaagacacggaaggattgccctggatcggtgatgaagtcaaagggattatggaagaaatcatcgaggtcggtgaatcgctggaagtgcaggccgtgctcaatgatgagcgctatcaaagcttcaaacgctttaagagtgtctttggagtgggggtgaagacagcagacaaatggtaccgtatgggtctgcgcacgctcgaggatgttcgttccagcaagaccctgaaattgaccccgatgcagaaagcgggtctgtgctattatgaagatcttgctcgcggcgttacgaaagccgaagctgacgcgatttctctgctggttcaggatgcagtctggactttcgacccggatgcgctggtggagattgttggtggatttcgtcgtgggaaacctttcggtcacgacgttgatctgcttatcacatctccgggagctgagaaagaacaagaagaccagctcctgcagaaagtgaccaatctgtggaagaaacaagggttgttgctgtacggtcgtctgcgtgaaagtcgctttgaagatgggaaactcccatcccgcaagatcgatgccctggaccattttgcgaaatgctttctgatcctcaaactttatcaccataaagtggacaaaagcaaatgggaaatgccgacgggttcgaacgaaagcgaggccaaaagttggaaagcaattcgcgtagatctggttcgttgtccctacgatggttttgcgtttgcgttgttgggttggaccggaagccgcatgttccgccgtgatctgcgccgctacgccacccacgagaagaagatgatgctggacaatcatgcgctgtatgacctgaccaagaaaatctttctcaaagctaaatcggaagaggaaattttcgcacatctggggcttgaatacctggaaccgttcgaacgtaacgca

SEQ ID NO: 1378 - protein, 529 aa, synthetic construct
  REGION 1..529: note = Variant of terminal deoxynucleotidyltransferase
MHHHHHHGGSGSHGIRTIDSDFGKKRQKKMDNHDSSAIYEIKFHEFVLFILEEKMGATRRTFLTDLARKKGFRVENELSDSVTHIVAENNSRSEVLAWLKEHKMEKTKQFELLDISWLIESMKVGKPVDTKGKYQLAESGEMSANPDPTEGRENELPPTTKTISQYACQRRTTLNNHNQRFTDALEILAENYEFERNDDTCLTFMRAISVLKCLPFEVVSLKDTEGLPWIGDEVKGIMEEIIEVGESLEVQAVLNDERYQSFKRFKSVFGVGVKTADKWYRMGLRTLEDVRSSKTLKLTPMQKAGLCYYEDLARGVTKAEADAISLLVQDAVWTFDPDALVEIVGGFRRGKPFGHDVDLLITSPGAEKEQEDQLLQKVTNLWKKQGLLLYGRLRESRFEDGKLPSRKIDALDHFAKCFLILKLYHHKVDKSKWEMPTGSNESEAKSWKAIRVDLVRCPYDGFAFALLGWTGSRMFRRDLRRYATHEKKMMLDNHALYDLTKKIFLKAKSEEEIFAHLGLEYLEPFERNA

SEQ ID NO: 1379 - DNA, 1587 bp, synthetic construct
  misc_feature 1..1587: note = Variant of terminal deoxynucleotidyltransferase
  source 1..1587: mol_type = other DNA
atgcaccatcatcatcatcatggcggtagcggcagccacggcattcgtaccatcgattcggacttcgggaagaaacgccagaataagatggataaccacgatagttccgccatctatgaaatcaaatttcacgagtttgtgctgttcattctcgaagagaaaatgggtgcgacgcgtcgtacttttctgacagatttagcccgcaagaaagggttccgcgtcgagaatgaactgtcagacagcgttacccacatcgtggcagaaaataattcacgctctgaagtattggcttggctgaaagaacacaagatggagaagaccaagcaattcgaactgctggatattagctggcttatcgaaagcatgaaagttggtaaaccggtggacaccaaggggaaataccagttggcggaatcgggtgagatgagtgcgaacccagatccgacagagggtcgtgaaaacgagctgcctcctactacgaagaccatttctcagtatgcgtgtcaacgccgcaccaccctgaacaaccataatcaacgttttacggacgcactggaaattcttgcggaaaattacgagttcaaacgcaacgatgatacttgtctgacctttatgcgtgctatttccgtgctgaaatgccttccgtttgaggtagttagcctgaaagacacggaaggattgccctggatcggtgatgaagtcaaagggattatggaagaaatcatcgaggtcggtgaatcgctggaagtgcaggccgtgctcaatgatgagcgctatcaaagcttcaaacgctttaagagtgtctttggagtgggggtgaagacagcagacaagtggtaccgtatgggtctgcgcacgctcgaggatgttcgttccagcaagaccctgaagttgaccccgatgcagaaagcgggtctgtgctattatgaagatcttgctgatggcgttacgaaagccgaagctgacgcgatttctctgctggttcaggatgcagtctggactttcgacccggatgcgctggtggagattgttggtggatttcgtcgtgggaaacctaaaggtcacgacgttgatctgcttatcacatctccgggagctgagaaagaacaagaagaccagctcctgcagaaagtgaccaatctgtggaagaaacaagggttgttgctgtacggtcgtctgcgttggagtcgctttgaagatgggaaactcccatcccgcaagatcgatgccctggaccattttgcgaaatgctttctgatcctcaaactttatcaccataaagtggacaaaagcaaatgggaaatgccgacgggttcgaacgaaagcgaggccaaaagttggaaagcaattcgcgtagatctggttcgttgtccctacgatggttttgcgtttgcgttgttgggttggaccggaagccgcatgttccgccgtgatctgcgccgctacgccacccacgagaagaagatgatgctggacaatcatgcgctgtatgacctgaccaagaaaatctttctcaaagctaaatcggaagaggaaattttcgcacatctggggcttgaatacctggaaccgttcgaacgtaacgca

SEQ ID NO: 1380 - protein, 529 aa, synthetic construct
  REGION 1..529: note = Variant of terminal deoxynucleotidyltransferase
MHHHHHHGGSGSHGIRTIDSDFGKKRQNKMDNHDSSAIYEIKFHEFVLFILEEKMGATRRTFLTDLARKKGFRVENELSDSVTHIVAENNSRSEVLAWLKEHKMEKTKQFELLDISWLIESMKVGKPVDTKGKYQLAESGEMSANPDPTEGRENELPPTTKTISQYACQRRTTLNNHNQRFTDALEILAENYEFKRNDDTCLTFMRAISVLKCLPFEVVSLKDTEGLPWIGDEVKGIMEEIIEVGESLEVQAVLNDERYQSFKRFKSVFGVGVKTADKWYRMGLRTLEDVRSSKTLKLTPMQKAGLCYYEDLADGVTKAEADAISLLVQDAVWTFDPDALVEIVGGFRRGKPKGHDVDLLITSPGAEKEQEDQLLQKVTNLWKKQGLLLYGRLRWSRFEDGKLPSRKIDALDHFAKCFLILKLYHHKVDKSKWEMPTGSNESEAKSWKAIRVDLVRCPYDGFAFALLGWTGSRMFRRDLRRYATHEKKMMLDNHALYDLTKKIFLKAKSEEEIFAHLGLEYLEPFERNA

SEQ ID NO: 1381 - DNA, 1587 bp, synthetic construct
  misc_feature 1..1587: note = Variant of terminal deoxynucleotidyltransferase
  source 1..1587: mol_type = other DNA
atgcaccatcatcatcatcatggcggtagcggcagccacggcattcgtaccatcgattcggacttcgggaagaaacgccagaagaagatggataaccacgatagttccgccatctatgaaatcaaatttcacgagtttgtgctgttcattctcgaagagaaaatgggtgcgacgcgtcgtacttttctgacagatttagcccgcaagaaagggttccgcgtcgagaatgaactgtcagacagcgttacccacatcgtggcagaaaataattcacgctctgaagtattggcttggctgaaagaacacaagatggagaagaccaagcaattcgaactgctggatattagctggcttatcgaaagcatgaaagttggtaaaccggtggacaccaaggggaaataccagttggcggaatcgggtgagatgagtgcgaacccagatccgacagagggtcgtgaaaacgagctgcctcctactacgaagaccatttctcagtatgcgtgtcaacgccgcaccaccctgaacaaccataatcaacgttttacggacgcactggaaattcttgcggaaaattacgagttcaaacgcaacgatgatacttgtctggcttttatgcgtgctatttccgtgctgaaatgccttccgtttgaggtagttagcctgaaagacacggaaggattgccctggatcggtgatgaagtcaaagggattatggaagaaatcatcgaggtcggtgaatcgctggaagtgcaggccgtgctcaatgatgagcgctatcaaagcttcaaacgctttaagagtgtctttggagtgggggtgaagacagcagacaagtggtaccgtatgggtctgcgcacgctcgaggatgttcgttccagcaagaccctgaaattgaccccgatgcagaaagcgggtctgtgctattatcgcgatcttgctcgcggcgttacgaaagccgaagctgacgcgatttctctgctggttcaggatgcagtctggactttcgacccggatgcgctggtggagattaccggtggatttcgtcgtgggaaaccttttggtcacgacgttgatctgcttatcacatctccgggagctgagaaagaacaagaagaccagctcctgcagaaagtgaccaatctgtggaagaaacaagggttgttgctgtacggtcgtctggaatggagtcgctttgaagatgggaaactcccatcccgcaagatcgatgccctggaccattttgcgaaatgctttatgatcctcaaactttatcaccataaagtggacaaaagcaaatgggaaatgccgacgggttcgaacgaaagcgaggccaaaagttggaaagcaattcgcgtagatctggttcgttgtccctacgatggttttgcgtttgcgttgttgggttggaccggaagccgcatgttccgccgtgatctgcgccgctacgccacccacgagaagaagatgatgctggacaatcatgcgctgtatgacctgaccaagaaaatctttctcaaagctaaatcggaagaggaaattttcgcacatctggggcttgaatacctggaaccgttcgaacgtaacgca

SEQ ID NO: 1382 - protein, 529 aa, synthetic construct
  REGION 1..529: note = Variant of terminal deoxynucleotidyltransferase
MHHHHHHGGSGSHGIRTIDSDFGKKRQKKMDNHDSSAIYEIKFHEFVLFILEEKMGATRRTFLTDLARKKGFRVENELSDSVTHIVAENNSRSEVLAWLKEHKMEKTKQFELLDISWLIESMKVGKPVDTKGKYQLAESGEMSANPDPTEGRENELPPTTKTISQYACQRRTTLNNHNQRFTDALEILAENYEFKRNDDTCLAFMRAISVLKCLPFEVVSLKDTEGLPWIGDEVKGIMEEIIEVGESLEVQAVLNDERYQSFKRFKSVFGVGVKTADKWYRMGLRTLEDVRSSKTLKLTPMQKAGLCYYRDLARGVTKAEADAISLLVQDAVWTFDPDALVEITGGFRRGKPFGHDVDLLITSPGAEKEQEDQLLQKVTNLWKKQGLLLYGRLEWSRFEDGKLPSRKIDALDHFAKCFMILKLYHHKVDKSKWEMPTGSNESEAKSWKAIRVDLVRCPYDGFAFALLGWTGSRMFRRDLRRYATHEKKMMLDNHALYDLTKKIFLKAKSEEEIFAHLGLEYLEPFERNA

SEQ ID NO: 1383 - DNA, 1587 bp, synthetic construct
  misc_feature 1..1587: note = Variant of terminal deoxynucleotidyltransferase
  source 1..1587: mol_type = other DNA
atgcaccatcatcatcatcatggcggtagcggcagccacggcattcgtaccatcgattcggacttcgggaagaaacgccagaagaagatggataaccacgatagttccgccatctatgaaatcaaatttcacgagtttgtgctgttcattctcgaagagaaaatgggtgcgacgcgtcgtacttttctgacagatttagcccgcaagaaagggttccgcgtcgagaatgaactgtcagacagcgttacccacatcgtggcagaaaataattcacgctctgaagtattggcttggctgaaagaacacaagatggagaagaccaagcaattcgaactgctggatattagctggcttatcgaaagcatgaaagttggtaaaccggtggacaccaaggggaaataccagttggcggaatcgggtgagatgagtgcgaacccagatccgacagagggtcgtgaaaacgagctgcctcctactacgaagaccatttctcagtatgcgtgtcaacgccgcaccaccctgaacaaccataatcaacgttttacggacgcactggaaattcttgcggaaaattacgagttcaaacgcaacgatgatacttgtctggcttttatgcgtgctatttccgtgctgaaatgccttccgtttgaggtagttagcctgaaagacacggaaggattgccctggatcggtgatgaagtcaaagggattatggaagaaatcatcgaggtcggtgaatcgctggaagtgcaggccgtgctcaatgatgagcgctatcaaagcttcaaacgctttaagagtgtctttggagtgggggtgaagacagcagacaagtggtaccgtatgggtctgcgcacgctcgaggatgttcgttccagcaagaccctgaagttgaccccgatgcagaaagcgggtctgtgctattatgaagatcttgctgatggcgttacgaaagccgaagctgacgcgatttctctgctggttcaggatgcagtctggactttcgacccggatgcgctggtggagattacgggtggatttcgtcgtgggaaacctaaaggtcacgacgttgatctgcttatcacatctccgggagctgagaaagaacaagaagaccagctcctgcagaaagtgaccaatctgtggaagaaacaagggttgttgctgtacggtcgtctgcgtgaaagtcgctttgaagatgggaaactcccatcccgcaagatcgatgccctggaccattttgcgaaatgctttctgatcctcaaactttatcaccataaagtggacaaaagcaaatgggaaatgccgacgggttcgaacgaaagcgaggccaaaagttggaaagcaattcgcgtagatctggttcgttgtccctacgatggttttgcgtttgcgttgttgggttggaccggaagccgcatgttccgccgtgatctgcgccgctacgccacccacgagaagaagatgatgctggacaatcatgcgctgtatgacctgaccaagaaaatctttctcaaagctaaatcggaagaggaaattttcgcacatctggggcttgaatacctggaaccgttcgaacgtaacgca

SEQ ID NO: 1384 - protein, 529 aa, synthetic construct
  REGION 1..529: note = Variant of terminal deoxynucleotidyltransferase
MHHHHHHGGSGSHGIRTIDSDFGKKRQKKMDNHDSSAIYEIKFHEFVLFILEEKMGATRRTFLTDLARKKGFRVENELSDSVTHIVAENNSRSEVLAWLKEHKMEKTKQFELLDISWLIESMKVGKPVDTKGKYQLAESGEMSANPDPTEGRENELPPTTKTISQYACQRRTTLNNHNQRFTDALEILAENYEFKRNDDTCLAFMRAISVLKCLPFEVVSLKDTEGLPWIGDEVKGIMEEIIEVGESLEVQAVLNDERYQSFKRFKSVFGVGVKTADKWYRMGLRTLEDVRSSKTLKLTPMQKAGLCYYEDLADGVTKAEADAISLLVQDAVWTFDPDALVEITGGFRRGKPKGHDVDLLITSPGAEKEQEDQLLQKVTNLWKKQGLLLYGRLRESRFEDGKLPSRKIDALDHFAKCFLILKLYHHKVDKSKWEMPTGSNESEAKSWKAIRVDLVRCPYDGFAFALLGWTGSRMFRRDLRRYATHEKKMMLDNHALYDLTKKIFLKAKSEEEIFAHLGLEYLEPFERNA

SEQ ID NO: 1385 - DNA, 1587 bp, synthetic construct
  misc_feature 1..1587: note = Variant of terminal deoxynucleotidyltransferase
  source 1..1587: mol_type = other DNA
atgcaccatcatcatcatcatggcggtagcggcagccacggctttcgtaccatcgattcggacttcgggaagaaacgccagaagaagatggataaccacgatagttccgccatctatgaaatcaaatttcacgagtttgtgctgttcattctcgaagagaaaatgggtgcgacgcgtcgtacttttctgacagatttagcccgcaagaaagggttccgcgtcgagaatgaactgtcagacagcgttacccacatcgtggcagaaaataattcacgctctgaagtattggcttggctgaaagaacacaagatggagaagaccaagcaattcgaactgctggatattagctggcttatcgaaagcatgaaagttggtaaaccggtggacaccaaggggaaataccagttggcggaatcgggtgagatgagtgcgaacccagatccgacagagggtcgtgaaaacgagctgcctcctactacgaagaccatttctcagtatgcgtgtcaacgccgcaccaccctgaacaaccataatcaacgttttacggacgcactggaaattcttgcggaaaattacgagttcaaacgcaacgatcgcacttgtctgacttttatgcgtgctatttccgtgctgaaatgccttccgtttgaggtagttagcctgaaagacacggaaggattgccctggatcggtgatgaagtcaaagggattatggaagaaatcatcgaggtcggtgaatcgctggaagtgcaggccgtgctcaatgatgagcgctatcaaagcttcaaacgctttaagagtgtctttggagtgggggtgaagacagcagacaagtggtaccgtatgggtctgcgcacgctcgaggatgttcgttccagcaagaccctgaaattgaccccgatgcagaaagcgggtctgtgctattatgaagatcttgctgatggcgttacgaaagccgaagctgacgcgatttctctgctggttcaggatgcagtctggactttcgacccggatgcgctggtggagattacgggtggatttcgtcgtgggaaaccttttggtcacgacgttgatctgcttatcacatctccgggagctgagaaagaacaagaagaccagctcctgcagaaagtgaccaatctgtggaagaaacaagggttgttgctgtacggtcgtctggaagaaagtcgctttgaagatgggaaactcccatcccgcaagatcgatgccctggaccattttgcgaaatgctttctgatcctcaaactttatcaccataaagtggacaaaagcaaatgggaaatgccgacgggttcgaacgaaagcgaggccaaaagttggaaagcaattcgcgtagatctggttcgttgtccctacgatggttttgcgtttgcgttgttgggttggaccggaagccgcatgttccgccgtgatctgcgccgctacgccacccacgagaagaagatgatgctggacaatcatgcgctgtatgacctgaccaagaaaatctttctcaaagctaaatcggaagaggaaattttcgcacatctggggcttgaatacctggaaccgttcgaacgtaacgca

SEQ ID NO: 1386 - protein, 529 aa, synthetic construct
  REGION 1..529: note = Variant of terminal deoxynucleotidyltransferase
MHHHHHHGGSGSHGFRTIDSDFGKKRQKKMDNHDSSAIYEIKFHEFVLFILEEKMGATRRTFLTDLARKKGFRVENELSDSVTHIVAENNSRSEVLAWLKEHKMEKTKQFELLDISWLIESMKVGKPVDTKGKYQLAESGEMSANPDPTEGRENELPPTTKTISQYACQRRTTLNNHNQRFTDALEILAENYEFKRNDRTCLTFMRAISVLKCLPFEVVSLKDTEGLPWIGDEVKGIMEEIIEVGESLEVQAVLNDERYQSFKRFKSVFGVGVKTADKWYRMGLRTLEDVRSSKTLKLTPMQKAGLCYYEDLADGVTKAEADAISLLVQDAVWTFDPDALVEITGGFRRGKPFGHDVDLLITSPGAEKEQEDQLLQKVTNLWKKQGLLLYGRLEESRFEDGKLPSRKIDALDHFAKCFLILKLYHHKVDKSKWEMPTGSNESEAKSWKAIRVDLVRCPYDGFAFALLGWTGSRMFRRDLRRYATHEKKMMLDNHALYDLTKKIFLKAKSEEEIFAHLGLEYLEPFERNA

SEQ ID NO: 1387 - DNA, 1587 bp, synthetic construct
  misc_feature 1..1587: note = Variant of terminal deoxynucleotidyltransferase
  source 1..1587: mol_type = other DNA
atgcaccatcatcatcatcatggcggtagcggcagccacggcattcgtaccatcgattcggacttcgggaagaaacgccagaagaagatggataaccacgatagttccgccatctatgaaatcaaatttcacgagtttgtgctgttcattctcgaagagaaaatgggtgcgacgcgtcgtacttttctgacagatttagcccgcaagaaagggttccgcgtcgagaatgaactgtcagacagcgttacccacatcgtggcagaaaataattcacgctctgaagtattggcttggctgaaagaacacaagatggagaagaccaagcaattcgaactgctggatattagctggcttatcgaaagcatgaaagttggtaaaccggtggacaccaaggggaaataccagttggcggaatcgggtgagatgagtgcgaacccagatccgacagagggtcgtgaaaacgagctgcctcctactacgaagaccatttctcagtatgcgtgtcaacgccgcaccaccctgaacaaccataatcaacgttttacggacgcactggaaattcttgcggaaaattacgagttcaaacgcaacgatgatacttgtctgacttttatgcgtgctatttccgtgctgaaatgccttccgtttgaggtagttagcctgaaagacacggaaggattgccctggatcggtgatgaagtcaaagggattatggaagaaatcatcgaggtcggtgaatcgctggaagtgcaggccgtgctcaatgatgagcgctatcaaagcttcaaacgctttaagagtgtctttggagtgggggtgaagacagcagacaaatggtaccgtatgggtctgcgcacgctcgaggatgttcgttccagcaagaccctgaagttgaccccgatgcagaaagcgggtctgtgctattatgaagatcttgctgatggcgttacgaaagccgaagctgacgcgatttctctgctggttcaggatgcagtctggactttcgacccggatgcgctggtggagattacgggtggatttcgtcgtgggaaacctaaaggtcacgacgttgatctgcttatcacatctccgggagctgagaaagaacaagaagaccagctcctgcagaaagtgaccaatctgtggaagaaacaagggttgttgctgtacggtcgtctgcgtgaaagtcgctttgaagatgggaaactcccatcccgcaagatcgatgccctggaccattttgcgaaatgctttctgatcctcaaactttatcaccataaagtggacaaaagcaaatgggaaatgccgacgggttcgaacgaaagcgaggccaaaagttggaaagcaattcgcgtagatctggttcgttgtccctacgatggttttgcgtttgcgttgttgggttggaccggaagccgcatgttccgccgtgatctgcgccgctacgccacccacgagaagaagatgatgctggacaatcatgcgctgtatgacctgaccaagaaaatctttctcaaagctaaatcggaagaggaaattttcgcacatctggggcttgaatacctggaaccgttcgaacgtaacgca

SEQ ID NO: 1388 - protein, 529 aa, synthetic construct
  REGION 1..529: note = Variant of terminal deoxynucleotidyltransferase
MHHHHHHGGSGSHGIRTIDSDFGKKRQKKMDNHDSSAIYEIKFHEFVLFILEEKMGATRRTFLTDLARKKGFRVENELSDSVTHIVAENNSRSEVLAWLKEHKMEKTKQFELLDISWLIESMKVGKPVDTKGKYQLAESGEMSANPDPTEGRENELPPTTKTISQYACQRRTTLNNHNQRFTDALEILAENYEFKRNDDTCLTFMRAISVLKCLPFEVVSLKDTEGLPWIGDEVKGIMEEIIEVGESLEVQAVLNDERYQSFKRFKSVFGVGVKTADKWYRMGLRTLEDVRSSKTLKLTPMQKAGLCYYEDLADGVTKAEADAISLLVQDAVWTFDPDALVEITGGFRRGKPKGHDVDLLITSPGAEKEQEDQLLQKVTNLWKKQGLLLYGRLRESRFEDGKLPSRKIDALDHFAKCFLILKLYHHKVDKSKWEMPTGSNESEAKSWKAIRVDLVRCPYDGFAFALLGWTGSRMFRRDLRRYATHEKKMMLDNHALYDLTKKIFLKAKSEEEIFAHLGLEYLEPFERNA

SEQ ID NO: 1389 - DNA, 1587 bp, synthetic construct
  misc_feature 1..1587: note = Variant of terminal deoxynucleotidyltransferase
  source 1..1587: mol_type = other DNA
atgcaccatcatcatcatcatggcggtagcggcagccacggcattcgtaccatcgattcggacttcgggaagaaacgccagaagaagatggataaccacgatagttccgccatctatgaaatcaaatttcacgagtttgtgctgttcattctcgaagagaaaatgggtgcgacgcgtcgtacttttctgacagatttagcccgcaagaaagggttccgcgtcgagaatgaactgtcagacagcgttacccacatcgtggcagaaaataattcacgctctgaagtattggcttggctgaaagaacacaagatggagaagaccaagcaattcgaactgctggatattagctggcttatcgaaagcatgaaagttggtaaaccggtggacaccaaggggaaataccagttggcggaatcgggtgagatgagtgcgaacccagatccgacagagggtcgtgaaaacgagctgcctcctactacgaagaccatttctcagtatgcgtgtcaacgccgcaccaccctgaacaaccataatcaacgttttacggacgcactggaaattcttgcggaaaattacgagttcaaacgcaacgatgatacttgtctgacctttatgcgtgctatttccgtgctgaaatgccttccgtttgaggtagttagcctgaaagacacggaaggattgccctggatcggtgatgaagtcaaagggattatggaagaaatcatcgaggtcggtgaatcgctggaagtgcaggccgtgctcaatgatgagcgctatcaaagcttcaaacgctttaagagtgtctttggagtgggggtgaagacagcagacaaatggtaccgtatgggtctgcgcacgctcgaggatgttcgttccagcaagaccctgaagttgaccccgatgcagaaagcgggtctgtgctattatgaagatcttgctgatggcgttacgaaagccgaagctgacgcgatttctctgctggttcaggaggcagtctggactttcgacccggatgcgctggtggagattacgggtggatttcgtcgtgggaaaccttttggtcacgacgttgatctgcttatcacatctccgggagctgagaaagaacaagaagaccagctcctgcagaaagtgaccaatctgtggaagaaacaagggttgttgctgtacggtcgtctgcgtgaaagtcgctttgaagatgggaaactcccatcccgcaagatcgatgccctggaccattttgcgaaatgctttctgatcctcaaactttatcaccataaagtggacaaaagcaaatgggaaatgccgacgggttcgaacgaaagcgaggccaaaagttggaaagcaattcgcgtagatctggttcgttgtccctacgatggttttgcgtttgcgttgttgggttggaccggaagccgcatgttccgccgtgatctgcgccgctacgccacccacgagaagaagatgatgctggacaatcatgcgctgtatgacctgaccaagaaaatctttctcaaagctaaatcggaagaggaaattttcgcacatctggggcttgaatacctggaaccgttcgaacgtaacgca

SEQ ID NO: 1390 - protein, 529 aa, synthetic construct
  REGION 1..529: note = Variant of terminal deoxynucleotidyltransferase
MHHHHHHGGSGSHGIRTIDSDFGKKRQKKMDNHDSSAIYEIKFHEFVLFILEEKMGATRRTFLTDLARKKGFRVENELSDSVTHIVAENNSRSEVLAWLKEHKMEKTKQFELLDISWLIESMKVGKPVDTKGKYQLAESGEMSANPDPTEGRENELPPTTKTISQYACQRRTTLNNHNQRFTDALEILAENYEFKRNDDTCLTFMRAISVLKCLPFEVVSLKDTEGLPWIGDEVKGIMEEIIEVGESLEVQAVLNDERYQSFKRFKSVFGVGVKTADKWYRMGLRTLEDVRSSKTLKLTPMQKAGLCYYEDLADGVTKAEADAISLLVQEAVWTFDPDALVEITGGFRRGKPFGHDVDLLITSPGAEKEQEDQLLQKVTNLWKKQGLLLYGRLRESRFEDGKLPSRKIDALDHFAKCFLILKLYHHKVDKSKWEMPTGSNESEAKSWKAIRVDLVRCPYDGFAFALLGWTGSRMFRRDLRRYATHEKKMMLDNHALYDLTKKIFLKAKSEEEIFAHLGLEYLEPFERNA

SEQ ID NO: 1391 - DNA, 1587 bp, synthetic construct
  misc_feature 1..1587: note = Variant of terminal deoxynucleotidyltransferase
  source 1..1587: mol_type = other DNA
atgcaccatcatcatcatcatggcggtagcggcagccacggcattcgtaccatcgattcggacttcgggaagaaacgccagaagaagatggataaccacgatagttccgccatctatgaaatcaaatttcacgagtttgtgctgttcattctcgaagagaaaatgggtgcgacgcgtcgtacttttctgacagatttagcccgcaagaaagggttccgcgtcgagaatgaactgtcagacagcgttacccacatcgtggcagaaaataattcacgctctgaagtattggcttggctgaaagaacacaagatggagaagaccaagcaattcgaactgctggatattagctggcttatcgaaagcatgaaagttggtaaaccggtggacaccaaggggaaataccagttggcggaatcgggtgagatgagtgcgaacccagatccgacagagggtcgtgaaaacgagctgcctcctactacgaagaccatttctcagtatgcgtgtcaacgccgcaccaccctgaacaaccataatcaacgttttacggacgcactggaaattcttgcggaaaattacgagttcaaacgcaacgatgatacttgtctgacctttatgcgtgctatttccgtgctgaaatgccttccgtttgaggtagttagcctgaaagacacggaaggattgccctggatcggtgatgaagtcaaagggattatggaagaaatcatcgaggtcggtgaatcgctggaagtgcaggccgtgctcaatgatgagcgctatcaaagcttcaaacgctttaagagtgtctttggagtgggggtgaagacagcagacaaatggtaccgtatgggtctgcgcacgctcgaggatgttcgttccagcaagaccctgaagttgaccccgatgcagaaagcgggtctgtgctattatgaagatcttgctgatggcgttacgaaagccgaagctgacgcgatttctctgctggttcaggatgcagtccatactttcgacccggatgcgctggtggagattacgggtggatttcgtcgtgggaaaccttttggtcacgacgttgatctgcttatcacatctccgggagctgagaaagaacaagaagaccagctcctgcagaaagtgaccaatctgtggaagaaacaagggttgttgctgtacggtcgtctgcgtgaaagtcgctttgaagatgggaaactcccatcccgcaagatcgatgccctggaccattttgcgaaatgctttctgatcctcaaactttatcaccataaagtggacaaaagcaaatgggaaatgccgacgggttcgaacgaaagcgaggccaaaagttggaaagcaattcgcgtagatctggttcgttgtccctacgatggttttgcgtttgcgttgttgggttggaccggaagccgcatgttccgccgtgatctgcgccgctacgccacccacgagaagaagatgatgctggacaatcatgcgctgtatgacctgaccaagaaaatctttctcaaagctaaatcggaagaggaaattttcgcacatctggggcttgaatacctggaaccgttcgaacgtaacgca

SEQ ID NO: 1392 - protein, 529 aa, synthetic construct
  REGION 1..529: note = Variant of terminal deoxynucleotidyltransferase
MHHHHHHGGSGSHGIRTIDSDFGKKRQKKMDNHDSSAIYEIKFHEFVLFILEEKMGATRRTFLTDLARKKGFRVENELSDSVTHIVAENNSRSEVLAWLKEHKMEKTKQFELLDISWLIESMKVGKPVDTKGKYQLAESGEMSANPDPTEGRENELPPTTKTISQYACQRRTTLNNHNQRFTDALEILAENYEFKRNDDTCLTFMRAISVLKCLPFEVVSLKDTEGLPWIGDEVKGIMEEIIEVGESLEVQAVLNDERYQSFKRFKSVFGVGVKTADKWYRMGLRTLEDVRSSKTLKLTPMQKAGLCYYEDLADGVTKAEADAISLLVQDAVHTFDPDALVEITGGFRRGKPFGHDVDLLITSPGAEKEQEDQLLQKVTNLWKKQGLLLYGRLRESRFEDGKLPSRKIDALDHFAKCFLILKLYHHKVDKSKWEMPTGSNESEAKSWKAIRVDLVRCPYDGFAFALLGWTGSRMFRRDLRRYATHEKKMMLDNHALYDLTKKIFLKAKSEEEIFAHLGLEYLEPFERNA

SEQ ID NO: 1393 - DNA, 1587 bp, synthetic construct
  misc_feature 1..1587: note = Variant of terminal deoxynucleotidyltransferase
  source 1..1587: mol_type = other DNA
atgcaccatcatcatcatcatggcggtagcggcagccacggcattcgtaccatcgattcggacttcgggaagaaacgccagaagaagatggataaccacgatagttccgccatctatgaaatcaaatttcacgagtttgtgctgttcattctcgaagagaaaatgggtgcgacgcgtcgtacttttctgacagatttagcccgcaagaaagggttccgcgtcgagaatgaactgtcagacagcgttacccacatcgtggcagaaaataattcacgctctgaagtattggcttggctgaaagaacacaagatggagaagaccaagcaattcgaactgctggatattagctggcttatcgaaagcatgaaagttggtaaaccggtggacaccaaggggaaataccagttggcggaatcgggtgagatgagtgcgaacccagatccgacagagggtcgtgaaaacgagctgcctcctactacgaagaccatttctcagtatgcgtgtcaacgccgcaccaccctgaacaaccataatcaacgttttacggacgcactggaaattcttgcggaaaattacgagttcaaacgcaacgatgatacttgtctgacctttatgcgtgctatttccgtgctgaaatgccttccgtttgaggtagttagcctgaaagacacggaaggattgccctggatcggtgatgaagtcaaagggattatggaagaaatcatcgaggtcggtgaatcgctggaagtgcaggccgtgctcaatgatgagcgctatcaaagcttcaaacgctttaagagtgtctttggagtgggggtgaagacagcagacaaatggtaccgtatgggtctgcgcacgctcgaggatgttcgttccagcaagaccctgaagttgaccccgatgcagaaagcgggtctgtgctattatgaagatcttgctgatggcgttacgaaagccgaagctgacgcgatttctctgctggttcaggatgcagtccggactttcgacccggatgcgctggtggagattacgggtggatttcgtcgtgggaaaccttttggtcacgacgttgatctgcttatcacatctccgggagctgagaaagaacaagaagaccagctcctgcagaaagtgaccaatctgtggaagaaacaagggttgttgctgtacggtcgtctgcgtgaaagtcgctttgaagatgggaaactcccatcccgcaagatcgatgccctggaccattttgcgaaatgctttctgatcctcaaactttatcaccataaagtggacaaaagcaaatgggaaatgccgacgggttcgaacgaaagcgaggccaaaagttggaaagcaattcgcgtagatctggttcgttgtccctacgatggttttgcgtttgcgttgttgggttggaccggaagccgcatgttccgccgtgatctgcgccgctacgccacccacgagaagaagatgatgctggacaatcatgcgctgtatgacctgaccaagaaaatctttctcaaagctaaatcggaagaggaaattttcgcacatctggggcttgaatacctggaaccgttcgaacgtaacgca

SEQ ID NO: 1394 - protein, 529 aa, synthetic construct
  REGION 1..529: note = Variant of terminal deoxynucleotidyltransferase
MHHHHHHGGSGSHGIRTIDSDFGKKRQKKMDNHDSSAIYEIKFHEFVLFILEEKMGATRRTFLTDLARKKGFRVENELSDSVTHIVAENNSRSEVLAWLKEHKMEKTKQFELLDISWLIESMKVGKPVDTKGKYQLAESGEMSANPDPTEGRENELPPTTKTISQYACQRRTTLNNHNQRFTDALEILAENYEFKRNDDTCLTFMRAISVLKCLPFEVVSLKDTEGLPWIGDEVKGIMEEIIEVGESLEVQAVLNDERYQSFKRFKSVFGVGVKTADKWYRMGLRTLEDVRSSKTLKLTPMQKAGLCYYEDLADGVTKAEADAISLLVQDAVRTFDPDALVEITGGFRRGKPFGHDVDLLITSPGAEKEQEDQLLQKVTNLWKKQGLLLYGRLRESRFEDGKLPSRKIDALDHFAKCFLILKLYHHKVDKSKWEMPTGSNESEAKSWKAIRVDLVRCPYDGFAFALLGWTGSRMFRRDLRRYATHEKKMMLDNHALYDLTKKIFLKAKSEEEIFAHLGLEYLEPFERNA

SEQ ID NO: 1395 - DNA, 1587 bp, synthetic construct
  misc_feature 1..1587: note = Variant of terminal deoxynucleotidyltransferase
  source 1..1587: mol_type = other DNA
atgcaccatcatcatcatcatggcggtagcggcagccacggcattcgtaccatcgattcggacttcgggaagaaacgccagaagaagatggataaccacgatagttccgccatctatgaaatcaaatttcacgagtttgtgctgttcattctcgaagagaaaatgggtgcgacgcgtcgtacttttctgacagatttagcccgcaagaaagggttccgcgtcgagaatgaactgtcagacagcgttacccacatcgtggcagaaaataattcacgctctgaagtattggcttggctgaaagaacacaagatggagaagaccaagcaattcgaactgctggatattagctggcttatcgaaagcatgaaagttggtaaaccggtggacaccaaggggaaataccagttggcggaatcgggtgagatgagtgcgaacccagatccgacagagggtcgtgaaaacgagctgcctcctactacgaagaccatttctcagtatgcgtgtcaacgccgcaccaccctgaacaaccataatcaacgttttacggacgcactggaaattcttgcggaaaattacgagttcaaacgcaacgatgatacttgtctgacctttatgcgtgctatttccgtgctgaaatgccttccgtttgaggtagttagcctgaaagacacggaaggattgccctggatcggtgatgaagtcaaagggattatggaagaaatcatcgaggtcggtgaatcgctggaagtgcaggccgtgctcaatgatgagcgctatcaaagcttcaaacgctttaagagtgtctttggagtgggggtgaagacagcagacaaatggtaccgtatgggtctgcgcacgctcgaggatgttcgttccagcaagaccctgaagttgaccccgatgcagaaagcgggtctgtgctattatgaagatcttgctgatggcgttacgaaagccgaagctgacgcgatttctctgctggttcaggatgcagtctggactttcgacccggatgcgtcggtggagattacgggtggatttcgtcgtgggaaaccttttggtcacgacgttgatctgcttatcacatctccgggagctgagaaagaacaagaagaccagctcctgcagaaagtgaccaatctgtggaagaaacaagggttgttgctgtacggtcgtctgcgtgaaagtcgctttgaagatgggaaactcccatcccgcaagatcgatgccctggaccattttgcgaaatgctttctgatcctcaaactttatcaccataaagtggacaaaagcaaatgggaaatgccgacgggttcgaacgaaagcgaggccaaaagttggaaagcaattcgcgtagatctggttcgttgtccctacgatggttttgcgtttgcgttgttgggttggaccggaagccgcatgttccgccgtgatctgcgccgctacgccacccacgagaagaagatgatgctggacaatcatgcgctgtatgacctgaccaagaaaatctttctcaaagctaaatcggaagaggaaattttcgcacatctggggcttgaatacctggaaccgttcgaacgtaacgca

SEQ ID NO: 1396 - protein, 529 aa, synthetic construct
  REGION 1..529: note = Variant of terminal deoxynucleotidyltransferase
MHHHHHHGGSGSHGIRTIDSDFGKKRQKKMDNHDSSAIYEIKFHEFVLFILEEKMGATRRTFLTDLARKKGFRVENELSDSVTHIVAENNSRSEVLAWLKEHKMEKTKQFELLDISWLIESMKVGKPVDTKGKYQLAESGEMSANPDPTEGRENELPPTTKTISQYACQRRTTLNNHNQRFTDALEILAENYEFKRNDDTCLTFMRAISVLKCLPFEVVSLKDTEGLPWIGDEVKGIMEEIIEVGESLEVQAVLNDERYQSFKRFKSVFGVGVKTADKWYRMGLRTLEDVRSSKTLKLTPMQKAGLCYYEDLADGVTKAEADAISLLVQDAVWTFDPDASVEITGGFRRGKPFGHDVDLLITSPGAEKEQEDQLLQKVTNLWKKQGLLLYGRLRESRFEDGKLPSRKIDALDHFAKCFLILKLYHHKVDKSKWEMPTGSNESEAKSWKAIRVDLVRCPYDGFAFALLGWTGSRMFRRDLRRYATHEKKMMLDNHALYDLTKKIFLKAKSEEEIFAHLGLEYLEPFERNA

SEQ ID NO: 1397 - DNA, 1587 bp, synthetic construct
  misc_feature 1..1587: note = Variant of terminal deoxynucleotidyltransferase
  source 1..1587: mol_type = other DNA
atgcaccatcatcatcatcatggcggtagcggcagccacggcattcgtaccatcgattcggacttcgggaagaaacgccagaagaagatggataaccacgatagttccgccatctatgaaatcaaatttcacgagtttgtgctgttcattctcgaagagaaaatgggtgcgacgcgtcgtacttttctgacagatttagcccgcaagaaagggttccgcgtcgagaatgaactgtcagacagcgttacccacatcgtggcagaaaataattcacgctctgaagtattggcttggctgaaagaacacaagatggagaagaccaagcaattcgaactgctggatattagctggcttatcgaaagcatgaaagttggtaaaccggtggacaccaaggggaaataccagttggcggaatcgggtgagatgagtgcgaacccagatccgacagagggtcgtgaaaacgagctgcctcctactacgaagaccatttctcagtatgcgtgtcaacgccgcaccaccctgaacaaccataatcaacgttttacggacgcactggaaattcttgcggaaaattacgagttcaaacgcaacgatgatacttgtctgacctttatgcgtgctatttccgtgctgaaatgccttccgtttgaggtagttagcctgaaagacacggaaggattgccctggatcggtgatgaagtcaaagggattatggaagaaatcatcgaggtcggtgaatcgctggaagtgcaggccgtgctcaatgatgagcgctatcaaagcttcaaacgctttaagagtgtctttggagtgggggtgaagacagcagacaaatggtaccgtatgggtctgcgcacgctcgaggatgttcgtttgagcaagaccctgaagttgaccccgatgcagaaagcgggtctgtgctattatgaagatcttgctgatggcgttacgaaagccgaagctgacgcgatttctctgctggttcaggatgcagtctggactttcgacccggatgcgctggtggagattacgggtggatttcgtcgtgggaaaccttttggtcacgacgttgatctgcttatcacatctccgggagctgagaaagaacaagaagaccagctcctgcagaaagtgaccaatctgtggaagaaacaagggttgttgctgtacggtcgtctgcgtgaaagtcgctttgaagatgggaaactcccatcccgcaagatcgatgccccggaccattttgcgaaatgctttctgatcctcaaactttatcaccataaagtggacaaaagcaaatgggaaatgccgacgggttcgaacgaaagcgaggccaaaagttggaaagcaattcgcgtagatctggttcgttgtccctacgatggttttgcgtttgcgttgttgggttggaccggaagccgcatgttccgccgtgatctgcgccgctacgccacccacgagaagaagatgatgctggacaatcatgcgctgtatgacctgaccaagaaaatctttctcaaagctaaatcggaagaggaaattttcgcacatctggggcttgaatacctggaaccgttcgaacgtaacgca

SEQ ID NO: 1398 - protein, 529 aa, synthetic construct
  REGION 1..529: note = Variant of terminal deoxynucleotidyltransferase
MHHHHHHGGSGSHGIRTIDSDFGKKRQKKMDNHDSSAIYEIKFHEFVLFILEEKMGATRRTFLTDLARKKGFRVENELSDSVTHIVAENNSRSEVLAWLKEHKMEKTKQFELLDISWLIESMKVGKPVDTKGKYQLAESGEMSANPDPTEGRENELPPTTKTISQYACQRRTTLNNHNQRFTDALEILAENYEFKRNDDTCLTFMRAISVLKCLPFEVVSLKDTEGLPWIGDEVKGIMEEIIEVGESLEVQAVLNDERYQSFKRFKSVFGVGVKTADKWYRMGLRTLEDVRLSKTLKLTPMQKAGLCYYEDLADGVTKAEADAISLLVQDAVWTFDPDALVEITGGFRRGKPFGHDVDLLITSPGAEKEQEDQLLQKVTNLWKKQGLLLYGRLRESRFEDGKLPSRKIDAPDHFAKCFLILKLYHHKVDKSKWEMPTGSNESEAKSWKAIRVDLVRCPYDGFAFALLGWTGSRMFRRDLRRYATHEKKMMLDNHALYDLTKKIFLKAKSEEEIFAHLGLEYLEPFERNA

SEQ ID NO: 1399 - DNA, 1587 bp, synthetic construct
  misc_feature 1..1587: note = Variant of terminal deoxynucleotidyltransferase
  source 1..1587: mol_type = other DNA
atgcaccatcatcatcatcatggcggtagcggcagccacggcattcgtaccatcgattcggacttcgggaagaaacgccagaagaagatggataaccacgatagttccgccatctatgaaatcaaatttcacgagtttgtgctgttcattctcgaagagaaaatgggtgcgacgcgtcgtacttttctgacagatttagcccgcaagaaagggttccgcgtcgagaatgaactgtcagacagcgttacccacatcgtggcagaaaataattcacgctctgaagtattggcttggctgaaagaacacaagatggagaagaccaagcaattcgaactgctggatattagctggcttatcgaaagcatgaaagttggtaaaccggtggacaccaaggggaaataccagttggcggaatcgggtgagatgagtgcgaacccagatccgacagagggtcgtgaaaacgagctgcctcctactacgaagaccatttctcagtatgcgtgtcaacgccgcaccaccctgaacaaccataatcaacgttttacggacgcactggaaattcttgcggaaaattacgagttcaaacgcaacgatgatacttgtctgacctttatgcgtgctatttccgtgctgaaatgccttccgtttgaggtagttagcctgaaagacacggaaggattgccctggatcggtgatgaagtcaaagggattatggaagaaatcatcgaggtcggtgaatcgctggaagtgcaggccgtgctcaatgatgagcgctatcaaagcttcaaacgctttaagagtgtctttggagtgggggtgaagacagcagacaaatggtaccgtatgggtctgcgcacgctcgaggatgttcgttccagcaagaccctgaagttgaccccgatgcagaaagcgggtctgtgctattatgaagatcttgctgatggcgttacgaaagccgaagctgacgcgatttctctgctggttcaggatgcagtctggactttcgacccggatgcgctggtggagattacgggtggatttcgtcgtgggaaaccttttggtcacgacgttgatctgcttatcacatctccgggagctgagaaagaacaagaagaccagctcctgcagaaagtgaccaatctgtggaagaaacaagggttgttgctgtacggtcgtctgcgtgaaagtcgctttgaagatgggaaactcccatcccgcaagatcgatgccctggaccattttgcgaaatgctttctgatcctcaaactttatcaccataaagtggacaaaagcaaatgggaaatgccgacgggttcgaacgaaagcgaggccaaaagttggaaagcaattcgcgtagatctggttcgttgtccctacgatggttttgcgtttgcgttgttgggttggaccggaagccgcatgttccgccgtgatctgcgccgctacgccacccacgagaagaagatgaggctggacaatcatgcgctgtatgacctgaccaagaaaatctttctcaaagctaaatcggaagaggaaattttcgcacatctggggcttgaatacctggaaccgttcgaacgtaacgca

SEQ ID NO: 1400 - protein, 529 aa, synthetic construct
  REGION 1..529: note = Variant of terminal deoxynucleotidyltransferase
MHHHHHHGGSGSHGIRTIDSDFGKKRQKKMDNHDSSAIYEIKFHEFVLFILEEKMGATRRTFLTDLARKKGFRVENELSDSVTHIVAENNSRSEVLAWLKEHKMEKTKQFELLDISWLIESMKVGKPVDTKGKYQLAESGEMSANPDPTEGRENELPPTTKTISQYACQRRTTLNNHNQRFTDALEILAENYEFKRNDDTCLTFMRAISVLKCLPFEVVSLKDTEGLPWIGDEVKGIMEEIIEVGESLEVQAVLNDERYQSFKRFKSVFGVGVKTADKWYRMGLRTLEDVRSSKTLKLTPMQKAGLCYYEDLADGVTKAEADAISLLVQDAVWTFDPDALVEITGGFRRGKPFGHDVDLLITSPGAEKEQEDQLLQKVTNLWKKQGLLLYGRLRESRFEDGKLPSRKIDALDHFAKCFLILKLYHHKVDKSKWEMPTGSNESEAKSWKAIRVDLVRCPYDGFAFALLGWTGSRMFRRDLRRYATHEKKMRLDNHALYDLTKKIFLKAKSEEEIFAHLGLEYLEPFERNA

SEQ ID NO: 1401 - DNA, 1587 bp, synthetic construct
  misc_feature 1..1587: note = Variant of terminal deoxynucleotidyltransferase
  source 1..1587: mol_type = other DNA
atgcaccatcatcatcatcatggcggtagcggcagccacggcattcgtaccatcgattcggacttcgggaagaaacgccagaagaagatggataaccacgatagttccgccatctatgaaatcaaatttcacgagtttgtgctgttcattctcgaagagaaaatgggtgcgacgcgtcgtacttttctgacagatttagcccgcaagaaagggttccgcgtcgagaatgaactgtcagacagcgttacccacatcgtggcagaaaataattcacgctctgaagtattggcttggctgaaagaacacaagatggagaagaccaagcaattcgaactgctggatattagctggcttatcgaaagcatgaaagttggtaaaccggtggacaccaaggggaaataccagttggcggaatcgggtgagatgagtgcgaacccagatccgacagagggtcgtgaaaacgagctgcctcctactacgaagaccatttctcagtatgcgtgtcaacgccgcaccaccctgaacaaccataatcaacgttttacggacgcactggaaattcttgcggaaaattacgagttcaaacgcaacgatgatacttgtctgacctttatgcgtgctatttccgtgctgaaatgccttccgtttgaggtagttagcctgaaagacacggaaggattgccctggatcggtgatgaagtcaaagggattatggaagaaatcatcgaggtcggtgaatcgctggaagtgcaggccgtgctcaatgatgagcgctatcaaagcttcaaacgctttaagagtgtctttggagtgggggtgaagacagcagacaaatggtaccgtatgggtctgcgcacgctcgaggatgttcgttccagcaagaccctgaagttgaccccgatgcagaaagcgggtctgtgctattatgaagatcttgctgatggcgttacgaaagccgaagctgacgcgatttctctgctggttcaggatgcagtctggactttcgacccggatgcgctggtggagattacgggtggatttcgtcgtgggaaaccttttggtcacgacgttgatctgcttatcacatctccgggagctgagaaagaacaagaagaccagctcctgcagaaagtgaccaatctgtggaagaaacaagggttgttgctgtacggtcgtctgcgtgaaagtcgctttgaagatgggaaactcccatcccgcaagatcgatgccctggaccattttgcgaaatgctttctgatcctcaaactttatcaccataaagtggacaaaagcaaatgggaaatgccgacgggttcgaacgaaagcgaggccaaaagttggaaagcaattcgcgtagatctggttcgttgtccctacgatggttttgcgtttgcgttgttgggttggaccggaagccgcatgttccgccgtgatctgcgccgctacgccacccacgagaagaagatgatgctggacaatcatgcgctgtatgacctgaccaagaaagagtttctcaaagctaaatcggaagaggaaattttcgcacatctggggcttgaatacctggaaccgttcgaacgtaacgca

SEQ ID NO: 1402 - protein, 529 aa, synthetic construct
  REGION 1..529: note = Variant of terminal deoxynucleotidyltransferase
MHHHHHHGGSGSHGIRTIDSDFGKKRQKKMDNHDSSAIYEIKFHEFVLFILEEKMGATRRTFLTDLARKKGFRVENELSDSVTHIVAENNSRSEVLAWLKEHKMEKTKQFELLDISWLIESMKVGKPVDTKGKYQLAESGEMSANPDPTEGRENELPPTTKTISQYACQRRTTLNNHNQRFTDALEILAENYEFKRNDDTCLTFMRAISVLKCLPFEVVSLKDTEGLPWIGDEVKGIMEEIIEVGESLEVQAVLNDERYQSFKRFKSVFGVGVKTADKWYRMGLRTLEDVRSSKTLKLTPMQKAGLCYYEDLADGVTKAEADAISLLVQDAVWTFDPDALVEITGGFRRGKPFGHDVDLLITSPGAEKEQEDQLLQKVTNLWKKQGLLLYGRLRESRFEDGKLPSRKIDALDHFAKCFLILKLYHHKVDKSKWEMPTGSNESEAKSWKAIRVDLVRCPYDGFAFALLGWTGSRMFRRDLRRYATHEKKMMLDNHALYDLTKKEFLKAKSEEEIFAHLGLEYLEPFERNA

SEQ ID NO: 1403 - DNA, 1587 bp, synthetic construct
  misc_feature 1..1587: note = Variant of terminal deoxynucleotidyltransferase
  source 1..1587: mol_type = other DNA
atgcaccatcatcatcatcatggcggtagcggcagccacggcattcgtaccatcgattcggacttcgggaagaaacgccagaagaagatggataaccacgatagttccgccatctatgaaatcaaatttcacgagtttgtgctgttcattctcgaagagaaaatgggtgcgacgcgtcgtacttttctgacagatttagcccgcaagaaagggttccgcgtcgagaatgaactgtcagacagcgttacccacatcgtggcagaaaataattcacgctctgaagtattggcttggctgaaagaacacaagatggagaagaccaagcaattcgaactgctggatattagctggcttatcgaaagcatgaaagttggtaaaccggtggacaccaaggggaaataccagttggcggaatcgggtgagatgagtgcgaacccagatccgacagagggtcgtgaaaacgagctgcctcctactacgaagaccatttctcagtatgcgtgtcaacgccgcaccaccctgaacaacctgaatcaacgttttacggacgcactggaaattcttgcggaaaattacgagttcaaacgcaacgatgatacttgtctgacctttatgcgtgctatttccgtgctgaaatgccttccgtttgaggtagttagcctgaaagacacggaaggattgccctggatcggtgatgaagtcaaagggattatggaagaaatcatcgaggtcggtgaatcgctggaagtgcaggccgtgctcaatgatgagcgctatcaaagcttcaaacgctttaagagtgtctttggagtgggggtgaagacagcagacaaatggtaccgtatgggtctgcgcacgctcgaggatgttcgttccagcaagaccctgaagttgaccccgatgcagaaagcgggtctgtgctattatgaagatcttgctgatggcgttacgaaagccgaagctgacgcgatttctctgctggttcaggatgcagtctggactttcgacccggatgcgctggtggagattacgggtggatttcgtcgtgggaaaccttttggtcacgacgttgatctgcttatcacatctccgggagctgagaaagaacaagaagaccagctcctgcagaaagtgaccaatctgtggaagaaacaagggttgttgctgtacggtcgtctgcgtgaaagtcgctttgaagatgggaaactcccatcccgcaagatcgatgccctggaccattttgcgaaatgctttctgatcctcaaactttatcaccataaagtggacaaaagcaaatgggaaatgccgacgggttcgaacgaaagcgaggccaaaagttggaaagcaattcgcgtagatctggttcgttgtccctacgatggttttgcgtttgcgttgttgggttggaccggaagccgcatgttccgccgtgatctgcgccgctacgccacccacgagaagaagatgatgctggacaatcatgcgctgtatgacctgaccaagaaaatctttctcaaagctaaatcggaagaggaaattttcgcacatctggggcttgaatacctggaaccgttcgaacgtaacgca

SEQ ID NO: 1404 - protein, 529 aa, synthetic construct
  REGION 1..529: note = Variant of terminal deoxynucleotidyltransferase
MHHHHHHGGSGSHGIRTIDSDFGKKRQKKMDNHDSSAIYEIKFHEFVLFILEEKMGATRRTFLTDLARKKGFRVENELSDSVTHIVAENNSRSEVLAWLKEHKMEKTKQFELLDISWLIESMKVGKPVDTKGKYQLAESGEMSANPDPTEGRENELPPTTKTISQYACQRRTTLNNLNQRFTDALEILAENYEFKRNDDTCLTFMRAISVLKCLPFEVVSLKDTEGLPWIGDEVKGIMEEIIEVGESLEVQAVLNDERYQSFKRFKSVFGVGVKTADKWYRMGLRTLEDVRSSKTLKLTPMQKAGLCYYEDLADGVTKAEADAISLLVQDAVWTFDPDALVEITGGFRRGKPFGHDVDLLITSPGAEKEQEDQLLQKVTNLWKKQGLLLYGRLRESRFEDGKLPSRKIDALDHFAKCFLILKLYHHKVDKSKWEMPTGSNESEAKSWKAIRVDLVRCPYDGFAFALLGWTGSRMFRRDLRRYATHEKKMMLDNHALYDLTKKIFLKAKSEEEIFAHLGLEYLEPFERNA

SEQ ID NO: 1405 - DNA, 1587 bp, synthetic construct
  misc_feature 1..1587: note = Variant of terminal deoxynucleotidyltransferase
  source 1..1587: mol_type = other DNA
atgcaccatcatcatcatcatggcggtagcggcagccacggcattcgtaccatcgattcggacttcgggaagaaacgccagaagaagatggataaccacgatagttccgccatctatgaaatcaaatttcacgagtttgtgctgttcattctcgaagagaaaatgggtgcgacgcgtcgtacttttctgacagatttagcccgcaagaaagggttccgcgtcgagaatgaactgtcagacagcgttacccacatcgtggcagaaaataattcacgctctgaagtattggcttggctgaaagaacacaagatggagaagaccaagcaattcgaactgctggatattagctggcttatcgaaagcatgaaagttggtaaaccggtggacaccaaggggaaataccagttggcggaatcgggtgagatgagtgcgaacccagatccgacagagggtcgtgaaaacgagctgcctcctactacgaagaccatttctcagtatgcgtgtcaacgccgcaccaccctgaacaaccataatcaacgttttacggacgcactggaaattcttgcggaaaattacgagttcaaacgcaacgatgatacttgtctgacctttatgcgtgctatttccgtgctgaaatgccttccgtttgaggtagttagcctgaaagacacggaaggattgccctggatcggtgatgaagtcaaagggattatggaagaaatcatcgaggtcggtgaatcgctggaagtgcaggccgtgctcaatgatgagcgctatcaaagcttcaaacgctttaagagtgtctttggagtgggggtgaagacagcagacaaatggtaccgtatgggtctgcgcacgctcgaggatgttcgttccagcaagaccctgaagttgaccccgatgcagaaagcgggtctgtgctattatgaagatcttgctgatggcgttacgaaagccgaagctgacgcgatttctctgctggttcaggatgcagtctggactttcgacccggatgcgctggtggagattacgggtggatttcgtcgtgggaaaccttttggtcacgacgttgatctgcttatcacatctccgggagctgagaaagaacaagaagaccagctcctgcagaaagtgaccaatctgtggaagaaacaagggttgttgctgtacggtcgtctgcgtgaaagtcgctttgaagatgggaaactcccatcccgcaagatcgatgccctggaccattttgcgaaatgctttctgatcctcaaactttatcaccataaagtggacaaaagcaaatgggaatgtccgacgggttcgaacgaaagcgaggccaaaagttggaaagcaattcgcgtagatctggttcgttgtccctacgatggttttgcgtttgcgttgttgggttggaccggaagccgcatgttccgccgtgatctgcgccgctacgccacccacgagaagaagatgatgctggacaatcatgcgctgtatgacctgaccaagaaaatctttctcaaagctaaatcggaagaggaaattttcgcacatctggggcttgaatacctggaaccgttcgaacgtaacgca

SEQ ID NO: 1406 - protein, 529 aa, synthetic construct
  REGION 1..529: note = Variant of terminal deoxynucleotidyltransferase
MHHHHHHGGSGSHGIRTIDSDFGKKRQKKMDNHDSSAIYEIKFHEFVLFILEEKMGATRRTFLTDLARKKGFRVENELSDSVTHIVAENNSRSEVLAWLKEHKMEKTKQFELLDISWLIESMKVGKPVDTKGKYQLAESGEMSANPDPTEGRENELPPTTKTISQYACQRRTTLNNHNQRFTDALEILAENYEFKRNDDTCLTFMRAISVLKCLPFEVVSLKDTEGLPWIGDEVKGIMEEIIEVGESLEVQAVLNDERYQSFKRFKSVFGVGVKTADKWYRMGLRTLEDVRSSKTLKLTPMQKAGLCYYEDLADGVTKAEADAISLLVQDAVWTFDPDALVEITGGFRRGKPFGHDVDLLITSPGAEKEQEDQLLQKVTNLWKKQGLLLYGRLRESRFEDGKLPSRKIDALDHFAKCFLILKLYHHKVDKSKWECPTGSNESEAKSWKAIRVDLVRCPYDGFAFALLGWTGSRMFRRDLRRYATHEKKMMLDNHALYDLTKKIFLKAKSEEEIFAHLGLEYLEPFERNA

SEQ ID NO: 1407 - DNA, 1587 bp, synthetic construct
  misc_feature 1..1587: note = Variant of terminal deoxynucleotidyltransferase
  source 1..1587: mol_type = other DNA
atgcaccatcatcatcatcatggcggtagcggcagccacggcattcgtaccatcgattcggacttcgggaagaaacgccagaagaagatggataaccacgatagttccgccatctatgaaatcaaatttcacgagtttgtgctgttcattctcgaagagaaaatgggtgcgacgcgtcgtacttttctgacagatttagcccgcaagaaagggttccgcgtcgagaatgaactgtcagacagcgttacccacatcgtggcagaaaataattcacgctctgaagtattggcttggctgaaagaacacaagatggagaagaccaagcaattcgaactgctggatattagctggcttatcgaaagcatgaaagttggtaaaccggtggacaccaaggggaaataccagttggcggaatcgggtgagatgagtgcgaacccagatccgacagagggtcgtgaaaacgagctgcctcctactacgaagaccatttctcagtatgcgtgtcaacgccgcaccaccctgaacaaccataatcaacgttttacggacgcactggaaattcttgcggaaaattacgagttcaaacgcaacgatgatacttgtctgacctttatgcgtgctatttccgtgctgaaatgccttccgtttgaggtagttagcctgaaagacacggaaggattgccctggatcggtgatgaagtcaaagggattatggaagaaatcatcgaggtcggtgaatcgctggaagtgcaggccgtgctcaatgatgagcgctatcaaagcttcaaacgctttaagagtgtctttggagtgggggtgaagacagcagacaaatggtaccgtatgggtctgcgcacgctcgaggatgttcgttccagcaagaccctgaagttgaccccgatgcagaaagcgggtctgtgctattatgaagatcttgctgatggcgttacgaaagccgaagctgacgcgatttctctgctggttcaggatgcagtctggactttcgacccggatgcgctggtggagattacgggtggatttcgtcgtgggaaaccttttggtcacgacgttgatctgcttatcacatctccgggagctgagaaagaacaagaagaccagctcctgcagaaagtgaccaatctgtggaagaaacaagggttgttgctgtacggtcgtctgcgtgaaagtcgctttgaagatgggaaactcccatcccgcaagatcgatgccctggaccattttgcgaaatgctttctgatcctcaaactttatcaccataaagtggacaaaagcaaatgggaaatgccgacgggttcgaacgaaagcgaggccaaaagttggaaagcaattcgcgtagatctggttcgttgtccctacgggggttttgcgtttgcgttgttgggttggaccggaagccgcatgttccgccgtgatctgcgccgctacgccacccacgagaagaagatgatgctggacaatcatgcgctgtatgacctgaccaagaaaatctttctcaaagctaaatcggaagaggaaattttcgcacatctggggcttgaatacctggaaccgttcgaacgtaacgca

SEQ ID NO: 1408 - protein, 529 aa, synthetic construct
  REGION 1..529: note = Variant of terminal deoxynucleotidyltransferase
MHHHHHHGGSGSHGIRTIDSDFGKKRQKKMDNHDSSAIYEIKFHEFVLFILEEKMGATRRTFLTDLARKKGFRVENELSDSVTHIVAENNSRSEVLAWLKEHKMEKTKQFELLDISWLIESMKVGKPVDTKGKYQLAESGEMSANPDPTEGRENELPPTTKTISQYACQRRTTLNNHNQRFTDALEILAENYEFKRNDDTCLTFMRAISVLKCLPFEVVSLKDTEGLPWIGDEVKGIMEEIIEVGESLEVQAVLNDERYQSFKRFKSVFGVGVKTADKWYRMGLRTLEDVRSSKTLKLTPMQKAGLCYYEDLADGVTKAEADAISLLVQDAVWTFDPDALVEITGGFRRGKPFGHDVDLLITSPGAEKEQEDQLLQKVTNLWKKQGLLLYGRLRESRFEDGKLPSRKIDALDHFAKCFLILKLYHHKVDKSKWEMPTGSNESEAKSWKAIRVDLVRCPYGGFAFALLGWTGSRMFRRDLRRYATHEKKMMLDNHALYDLTKKIFLKAKSEEEIFAHLGLEYLEPFERNA

SEQ ID NO: 1409 - DNA, 1587 bp, synthetic construct
  misc_feature 1..1587: note = Variant of terminal deoxynucleotidyltransferase
  source 1..1587: mol_type = other DNA
atgcaccatcatcatcatcatggcggtagcggcagccacggcattcgtaccatcgattcggacttcgggaagaaacgccagaagaagatggataaccacgatagttccgccatctatgaaatcaaatttcacgagtttgtgctgttcattctcgaagagaaaatgggtgcgacgcgtcgtacttttctgacagatttagcccgcaagaaagggttccgcgtcgagaatgaactgtcagacagcgttacccacatcgtggcagaaaataattcacgctctgaagtattggcttggctgaaagaacacaagatggagaagaccaagcaattcgaactgctggatattagctggcttatcgaaagcatgaaagttggtaaaccggtggacaccaaggggaaataccagttggcggaatcgggtgagatgagtgcgaacccagatccgacagagggtcgtgaaaacgagctgcctcctactacgaagaccatttctcagtatgcgtgtcaacgccgcaccaccctgaacaaccataatcaacgttttacggacgcactggaaattcttgcggaaaattacgagttcaaacgcaacgatgatacttgtctgacctttatgcgtgctatttccgtgctgaaatgccttccgtttgaggtagttagcctgaaagacacggaaggattgccctggatcggtgatgaagtcaaagggattatggaagaaatcatcgaggtcggtgaatcgctggaagtgcaggccgtgctcaatgatgagcgctatcaaagcttcaaacgctttaagagtgtctttggagtgggggtgaagacagcagacaaatggtaccgtatgggtctgcgcacgctcgaggatgttcgttccagcaagaccctgaagttgaccccgatgcagaaagcgggtctgtgctattatgaagatcttgctgatggcgttacgaaagccgaagctgacgcgatttctctgctggttcaggatgcagtcggtactttcgacccggatgcgctggtggagattacgggtggatttcgtcgtgggaaaccttttggtcacgacgttgatctgcttatcacatctccgggagctgagaaagaacaagaagaccagctcctgcagaaagtgaccaatctgtggaagaaacaagggttgttgctgtacggtcgtctgcgtgaaagtcgctttgaagatgggaaactcccatcccgcaagatcgatgccctggaccattttgcgaaatgctttctgatcctcaaactttatcaccataaagtggacaaaagcaaatgggaaatgccgacgggttcgaacgaaagcgaggccaaaagttggaaagcaattcgcgtagatctggttcgttgtccctacgatggttttgcgtttgcgttgttgggttggaccggaagccgcatgttccgccgtgatctgcgccgctacgccacccacgagaagaagatgatgctggacaatcatgcgctgtatgacctgaccaagaaaatctttctcaaagctaaatcggaagaggaaattttcgcacatctggggcttgaatacctggaaccgttcgaacgtaacgca

SEQ ID NO: 1410 - protein, 529 aa, synthetic construct
  REGION 1..529: note = Variant of terminal deoxynucleotidyltransferase
MHHHHHHGGSGSHGIRTIDSDFGKKRQKKMDNHDSSAIYEIKFHEFVLFILEEKMGATRRTFLTDLARKKGFRVENELSDSVTHIVAENNSRSEVLAWLKEHKMEKTKQFELLDISWLIESMKVGKPVDTKGKYQLAESGEMSANPDPTEGRENELPPTTKTISQYACQRRTTLNNHNQRFTDALEILAENYEFKRNDDTCLTFMRAISVLKCLPFEVVSLKDTEGLPWIGDEVKGIMEEIIEVGESLEVQAVLNDERYQSFKRFKSVFGVGVKTADKWYRMGLRTLEDVRSSKTLKLTPMQKAGLCYYEDLADGVTKAEADAISLLVQDAVGTFDPDALVEITGGFRRGKPFGHDVDLLITSPGAEKEQEDQLLQKVTNLWKKQGLLLYGRLRESRFEDGKLPSRKIDALDHFAKCFLILKLYHHKVDKSKWEMPTGSNESEAKSWKAIRVDLVRCPYDGFAFALLGWTGSRMFRRDLRRYATHEKKMMLDNHALYDLTKKIFLKAKSEEEIFAHLGLEYLEPFERNA

SEQ ID NO: 1411 - DNA, 1587 bp, synthetic construct
  misc_feature 1..1587: note = Variant of terminal deoxynucleotidyltransferase
  source 1..1587: mol_type = other DNA
atgcaccatcatcatcatcatggcggtagcggcagccacggcattcgtaccatcgattcggacttcgggaagaaacgccagaagaagatggataaccacgatagttccgccatctatgaaatcaaatttcacgagtttgtgctgttcattctcgaagagaaaatgggtgcgacgcgtcgtacttttctgacagatttagcccgcaagaaagggttccgcgtcgagaatgaactgtcagacagcgttacccacatcgtggcagaaaataattcacgctctgaagtattggcttggctgaaagaacacaagatggagaagaccaagcaattcgaactgctggatattagctggcttatcgaaagcatgaaagttggtaaaccggtggacaccaaggggaaataccagttggcggaatcgggtgagatgagtgcgaacccagatccgacagagggtcgtgaaaacgagctgcctcctactacgaagaccatttctcagtatgcgtgtcaacgccgcaccaccctgaacaaccataatcaacgttttacggacgcactggaaattcttgcggaaaattacgagttcaaacgcaacgatgatacttgtctgacctttatgcgtgctatttccgtgctgaaatgccttccgtttgaggtagttagcctgaaagacacggaaggattgccctggatcggtgatgaagtcaaagggattatggaagaaatcatcgaggtcggtgaatcgctggaagtgcaggccgtgctcaatgatgagcgctatcaaagcttcaaacgctttaagagtgtctttggagtgggggtgaagacagcagacaaatggtaccgtatgggtctgcgcacgctcgaggatgttcgttccagcaagaccctgaagttgaccccgatgcagaaagcgggtctgtgctattatgaagatcttgctgatggcgttacgaaagccgaagctgacgcgatttctctgctggttcaggatgcagtcgcgactttcgacccggatgcgctggtggagattacgggtggatttcgtcgtgggaaaccttttggtcacgacgttgatctgcttatcacatctccgggagctgagaaagaacaagaagaccagctcctgcagaaagtgaccaatctgtggaagaaacaagggttgttgctgtacggtcgtctgcgtgaaagtcgctttgaagatgggaaactcccatcccgcaagatcgatgccctggaccattttgcgaaatgctttctgatcctcaaactttatcaccataaagtggacaaaagcaaatgggaaatgccgacgggttcgaacgaaagcgaggccaaaagttggaaagcaattcgcgtagatctggttcgttgtccctacgatggttttgcgtttgcgttgttgggttggaccggaagccgcatgttccgccgtgatctgcgccgctacgccacccacgagaagaagatgatgctggacaatcatgcgctgtatgacctgaccaagaaaatctttctcaaagctaaatcggaagaggaaattttcgcacatctggggcttgaatacctggaaccgttcgaacgtaacgca

SEQ ID NO: 1412 - protein, 529 aa, synthetic construct
  REGION 1..529: note = Variant of terminal deoxynucleotidyltransferase
MHHHHHHGGSGSHGIRTIDSDFGKKRQKKMDNHDSSAIYEIKFHEFVLFILEEKMGATRRTFLTDLARKKGFRVENELSDSVTHIVAENNSRSEVLAWLKEHKMEKTKQFELLDISWLIESMKVGKPVDTKGKYQLAESGEMSANPDPTEGRENELPPTTKTISQYACQRRTTLNNHNQRFTDALEILAENYEFKRNDDTCLTFMRAISVLKCLPFEVVSLKDTEGLPWIGDEVKGIMEEIIEVGESLEVQAVLNDERYQSFKRFKSVFGVGVKTADKWYRMGLRTLEDVRSSKTLKLTPMQKAGLCYYEDLADGVTKAEADAISLLVQDAVATFDPDALVEITGGFRRGKPFGHDVDLLITSPGAEKEQEDQLLQKVTNLWKKQGLLLYGRLRESRFEDGKLPSRKIDALDHFAKCFLILKLYHHKVDKSKWEMPTGSNESEAKSWKAIRVDLVRCPYDGFAFALLGWTGSRMFRRDLRRYATHEKKMMLDNHALYDLTKKIFLKAKSEEEIFAHLGLEYLEPFERNA

SEQ ID NO: 1413 - DNA, 1587 bp, synthetic construct
  misc_feature 1..1587: note = Variant of terminal deoxynucleotidyltransferase
  source 1..1587: mol_type = other DNA
atgcaccatcatcatcatcatggcggtagcggcagccacggcattcgtaccatcgattcggacttcgggaagaaacgccagaagaagatggataaccacgatagttccgccatctatgaaatcaaatttcacgagtttgtgctgttcattctcgaagagaaaatgggtgcgacgcgtcgtacttttctgacagatttagcccgcaagaaagggttccgcgtcgagaatgaactgtcagacagcgttacccacatcgtggcagaaaataattcacgctctgaagtattggcttggctgaaagaacacaagatggagaagaccaagcaattcgaactgctggatattagctggcttatcgaaagcatgaaagttggtaaaccggtggacaccaaggggaaataccagttggcggaatcgggtgagatgagtgcgaacccagatccgacagagggtcgtgaaaacgagctgcctcctactacgaagaccatttctcagtatgcgtgtcaacgccgcaccaccctgaacaaccataatcaacgttttacggacgcactggaaattcttgcggaaaattacgagttcaaacgcaacgatgattgttgtctgacctttatgcgtgctatttccgtgctgaaatgccttccgtttgaggtagttagcctgaaagacacggaaggattgccctggatcggtgatgaagtcaaagggattatggaagaaatcatcgaggtcggtgaatcgctggaagtgcaggccgtgctcaatgatgagcgctatcaaagcttcaaacgctttaagagtgtctttggagtgggggtgaagacagcagacaaatggtaccgtatgggtctgcgcacgctcgaggatgttcgttccagcaagaccctgaagttgaccccgatgcagaaagcgggtctgtgctattatgaagatcttgctgatggcgttacgaaagccgaagctgacgcgatttctctgctggttcaggatgcagtctggactttcgacccggatgcgctggtggagattacgggtggatttcgtcgtgggaaaccttttggtcacgacgttgatctgcttatcacatctccgggagctgagaaagaacaagaagaccagctcctgcagaaagtgaccaatctgtggaagaaacaagggttgttgctgtacggtcgtctgcgtgaaagtcgctttgaagatgggaaactcccatcccgcaagatcgatgccctggaccattttgcgaaatgctttctgatcctcaaactttataagcataaagtggacaaaagcaaatgggaaatgccgacgggttcgaacgaaagcgaggccaaaagttggaaagcaattcgcgtagatctggttcgttgtccctacgatggttttgcgtttgcgttgttgggttggaccggaagccgcatgttccgccgtgatctgcgccgctacgccacccacgagaagaagatgatgctggacaatcatgcgctgtatgacctgaccaagaaaatctttctcaaagctaaatcggaagaggaaattttcgcacatctggggcttgaatacctggaaccgttcgaacgtaacgca

SEQ ID NO: 1414 - protein, 529 aa, synthetic construct
  REGION 1..529: note = Variant of terminal deoxynucleotidyltransferase
MHHHHHHGGSGSHGIRTIDSDFGKKRQKKMDNHDSSAIYEIKFHEFVLFILEEKMGATRRTFLTDLARKKGFRVENELSDSVTHIVAENNSRSEVLAWLKEHKMEKTKQFELLDISWLIESMKVGKPVDTKGKYQLAESGEMSANPDPTEGRENELPPTTKTISQYACQRRTTLNNHNQRFTDALEILAENYEFKRNDDCCLTFMRAISVLKCLPFEVVSLKDTEGLPWIGDEVKGIMEEIIEVGESLEVQAVLNDERYQSFKRFKSVFGVGVKTADKWYRMGLRTLEDVRSSKTLKLTPMQKAGLCYYEDLADGVTKAEADAISLLVQDAVWTFDPDALVEITGGFRRGKPFGHDVDLLITSPGAEKEQEDQLLQKVTNLWKKQGLLLYGRLRESRFEDGKLPSRKIDALDHFAKCFLILKLYKHKVDKSKWEMPTGSNESEAKSWKAIRVDLVRCPYDGFAFALLGWTGSRMFRRDLRRYATHEKKMMLDNHALYDLTKKIFLKAKSEEEIFAHLGLEYLEPFERNA

SEQ ID NO: 1415 - DNA, 1587 bp, synthetic construct
  misc_feature 1..1587: note = Variant of terminal deoxynucleotidyltransferase
  source 1..1587: mol_type = other DNA
atgcaccatcatcatcatcatggcggtagcggcagccacggcattcgtaccatcgattcggacttcgggaagaaacgccagaagaagatggataaccacgatagttccgccatctatgaaatcaaatttcacgagtttgtgctgttcattctcgaagagaaaatgggtgcgacgcgtcgtacttttctgacagatttagcccgcaagaaagggttccgcgtcgagaatgaactgtcagacagcgttacccacatcgtggcagaaaataattcacgctctgaagtattggcttggctgaaagaacacaagatggagaagaccaagcaattcgaactgctggatattagctggcttatcgaaagcatgaaagttggtaaaccggtggacaccaaggggaaataccagttggcggaatcgggtgagatgagtgcgaacccagatccgacagagggtcgtgaaaacgagctgcctcctactacgaagaccatttctcagtatgcgtgtcaacgccgcaccaccctgaacaaccataatcaacgttttacggacgcactggaaattcttgcggaaaattacgagttcaaacgcaacgatgatacttgtctgacctttatgcgtgctatttccgtgctgaaatgccttccgtttgaggtagttagcctgaaagacacggaaggattgccctggatcggtgatgaagtcaaagggattatggaagaaatcatcgaggtcggtgaatcgctggaagtgcaggccgtgctcaatgatgagcgctatcaaagcttcaaacgctttaagagtgtctttggagtgggggtgaagacagcagacaaatggtaccgtatgggtctgcgcacgctcgaggatgttcgttccagcaagaccctgaagttgaccccgatgcagaaagcgggtctgtgctattatgaagatcttgctgatggcgttacgaaagccgaagctgacgcgatttctactctggttcaggatgcagtctggactttcgacccggatgcgctggtggagattacgggtggatttcgtcgtgggaaaccttttggtcacgacgttgatctgcttatcacatctccgggagctgagaaagaacaagaagaccagctcctgcagaaagtgaccaatctgtggaagaaacaagggttgttgctgtacggtcgtctgcgtgaaagtcgctttgaagatgggaaactcccatcccgcaagatcgatgccctggaccattttgcgaaatgctttctgatcctcaaactttatcaccataaagtggacaaaagcaaatgggaaatgccgacgggttcgaacgaaagcgaggccaaaagttggaaagcaattcgcgtagatctggttcgttgtccctacgatggttttgcgtttgcgttgttgggttggaccggaagccgcatgttccgccgtgatctgcgccgctacgccacccacgagaagaagatgatgctggacaatcatgcgctgtatgacctgaccaagaaaatctttctcaaagctaaatcggaagaggaaattttcgcacatctggggcttgaatacctggaaccgttcgaacgtaacgca

SEQ ID NO: 1416 - protein, 529 aa, synthetic construct
  REGION 1..529: note = Variant of terminal deoxynucleotidyltransferase
MHHHHHHGGSGSHGIRTIDSDFGKKRQKKMDNHDSSAIYEIKFHEFVLFILEEKMGATRRTFLTDLARKKGFRVENELSDSVTHIVAENNSRSEVLAWLKEHKMEKTKQFELLDISWLIESMKVGKPVDTKGKYQLAESGEMSANPDPTEGRENELPPTTKTISQYACQRRTTLNNHNQRFTDALEILAENYEFKRNDDTCLTFMRAISVLKCLPFEVVSLKDTEGLPWIGDEVKGIMEEIIEVGESLEVQAVLNDERYQSFKRFKSVFGVGVKTADKWYRMGLRTLEDVRSSKTLKLTPMQKAGLCYYEDLADGVTKAEADAISTLVQDAVWTFDPDALVEITGGFRRGKPFGHDVDLLITSPGAEKEQEDQLLQKVTNLWKKQGLLLYGRLRESRFEDGKLPSRKIDALDHFAKCFLILKLYHHKVDKSKWEMPTGSNESEAKSWKAIRVDLVRCPYDGFAFALLGWTGSRMFRRDLRRYATHEKKMMLDNHALYDLTKKIFLKAKSEEEIFAHLGLEYLEPFERNA

SEQ ID NO: 1417 - DNA, 1587 bp, synthetic construct
  misc_feature 1..1587: note = Variant of terminal deoxynucleotidyltransferase
  source 1..1587: mol_type = other DNA
atgcaccatcatcatcatcatggcggtagcggcagccacggcattcgtaccatcgattcggacttcgggaagaaacgccagaagaagatggataaccacgatagttccgccatctatgaaatcaaatttcacgagtttgtgctgttcattctcgaagagaaaatgggtgcgacgcgtcgtacttttctgacagatttagcccgcaagaaagggttccgcgtcgagaatgaactgtcagacagcgttacccacatcgtggcagaaaataattcacgctctgaagtattggcttggctgaaagaacacaagatggagaagaccaagcaattcgaactgctggatattagctggcttatcgaaagcatgaaagttggtaaaccggtggacaccaaggggaaataccagttggcggaatcgggtgagatgagtgcgaacccagatccgacagagggtcgtgaaaacgagctgcctcctactacgaagaccatttctcagtatgcgtgtcaacgccgcaccaccctgaacaaccataatcaacgttttacggacgcactggaaattcttgcggaaaattacgagttcaaacgcaacgatgatacttgtctgacctttatgcgtgctatttccgtgctgaaatgccttccgtttgaggtagttagcctgaaagacacggaaggattgccctggatcggtgatgaagtcaaagggattatggaagaaatcatcgaggtcggtgaatcgctggaagtgcaggccgtgctcaatgatgagcgctatcaaagcttcaaacgctttaagagtgtctttggagtgggggtgaagacagcagacaaatggtaccgtatgggtctgcgcacgctcgaggatgttcgttccagcaagaccctgaagttgaccccgatgcagaaagcgggtctgtgctattatgaagatcttgctgatggcgttacgaaagccgaagctgacgcgatttctctgctggttcaggatgcagtctggactttcgacccggatgcgagggtggagattacgggtggatttcgtcgtgggaaaccttttggtcacgacgttgatctgcttatcacatctccgggagctgagaaagaacaagaagaccagctcctgcagaaagtgaccaatctgtggaagaaacaagggttgttgctgtacggtcgtctgcgtgaaagtcgctttgaagatgggaaactcccatcccgcaagatcgatgccctggaccattttgcgaaatgctttctgatcctcaaactttatcaccataaagtggacaaaagcaaatgggaaatgccgacgggttcgaacgaaagcgaggccaaaagttggaaagcaattcgcgtagatctggttcgttgtccctacgatggttttgcgtttgcgttgttgggttggaccggaagccgcatgttccgccgtgatctgcgccgctacgccacccacgagaagaagatgatgctggacaatcatgcgctgtatgacctgaccaagaaaatctttctcaaagctaaatcggaagaggaaattttcgcacatctggggcttgaatacctggaaccgttcgaacgtaacgca

SEQ ID NO: 1418 - protein, 529 aa, synthetic construct
  REGION 1..529: note = Variant of terminal deoxynucleotidyltransferase
MHHHHHHGGSGSHGIRTIDSDFGKKRQKKMDNHDSSAIYEIKFHEFVLFILEEKMGATRRTFLTDLARKKGFRVENELSDSVTHIVAENNSRSEVLAWLKEHKMEKTKQFELLDISWLIESMKVGKPVDTKGKYQLAESGEMSANPDPTEGRENELPPTTKTISQYACQRRTTLNNHNQRFTDALEILAENYEFKRNDDTCLTFMRAISVLKCLPFEVVSLKDTEGLPWIGDEVKGIMEEIIEVGESLEVQAVLNDERYQSFKRFKSVFGVGVKTADKWYRMGLRTLEDVRSSKTLKLTPMQKAGLCYYEDLADGVTKAEADAISLLVQDAVWTFDPDARVEITGGFRRGKPFGHDVDLLITSPGAEKEQEDQLLQKVTNLWKKQGLLLYGRLRESRFEDGKLPSRKIDALDHFAKCFLILKLYHHKVDKSKWEMPTGSNESEAKSWKAIRVDLVRCPYDGFAFALLGWTGSRMFRRDLRRYATHEKKMMLDNHALYDLTKKIFLKAKSEEEIFAHLGLEYLEPFERNA

SEQ ID NO: 1419 - DNA, 1587 bp, synthetic construct
  misc_feature 1..1587: note = Variant of terminal deoxynucleotidyltransferase
  source 1..1587: mol_type = other DNA
atgcaccatcatcatcatcatggcggtagcggcagccacggcattcgtaccatcgattcggacttcgggaagaaacgccagaagaagatggataaccacgatagttccgccatctatgaaatcaaatttcacgagtttgtgctgttcattctcgaagagaaaatgggtgcgacgcgtcgtacttttctgacagatttagcccgcaagaaagggttccgcgtcgagaatgaactgtcagacagcgttacccacatcgtggcagaaaataattcacgctctgaagtattggcttggctgaaagaacacaagatggagaagaccaagcaattcgaactgctggatattagctggcttatcgaaagcatgaaagttggtaaaccggtggacaccaaggggaaataccagttggcggaatcgggtgagatgagtgcgaacccagatccgacagagggtcgtgaaaacgagctgcctcctactacgaagaccatttctcagtatgcgtgtcaacgccgcaccaccctgaacaaccataatcaacgttttacggacgcactggaaattcttgcggaaaattacgagttcaaacgcaacgatgatacttgtctgacctttatgcgtgctatttccgtgctgaaatgccttccgtttgaggtacggagcctgaaagacacggaaggattgccctggatcggtgatgaagtcaaagggattatggaagaaatcatcgaggtcggtgaatcgctggaagtgcaggccgtgctcaatgatgagcgctatcaaagcttcaaacgctttaagagtgtctttggagtgggggtgaagacagcagacaaatggtaccgtatgggtctgcgcacgctcgaggatgttcgttccagcaagaccctgaagttgaccccgatgcagaaagcgggtctgtgctattatgaagatcttgctgatggcgttacgaaagccgaagctgacgcgatttctctgctggttcaggatgcagtctggactttcgacccggatgcgctggtggagattacgggtggatttcgtcgtgggaaaccttttggtcacgacgttgatctgcttatcacatctccgggagctgagaaagaacaagaagaccagctcctgcagaaagtgaccaatctgtggaagaaacaagggttgttgctgtacggtcgtctgcgtgaaagtcgctttgaagatgggaaactcccatcccgcaagatcgatgccctggaccattttgcgaaatgctttctgatcctcaaactttatcaccataaagtggacaaaagcaaatgggaaatgccgacgggttcgaacgaaagcgaggccaaaagttggaaagcaattcgcgtagatctggttcgttgtccctacgatggttttgcgtttgcgttgttgggttggaccggaagccgcatgttccgccgtgatctgcgccgctacgccacccacgagaagaagatgatgctggacaatcatgcgctgtatgacctgaccaagaaaatctttctcaaagctaaatcggaagaggaaattttcgcacatctggggcttgaatacctggaaccgttcgaacgtaacgca

SEQ ID NO: 1420 - protein, 529 aa, synthetic construct
  REGION 1..529: note = Variant of terminal deoxynucleotidyltransferase
MHHHHHHGGSGSHGIRTIDSDFGKKRQKKMDNHDSSAIYEIKFHEFVLFILEEKMGATRRTFLTDLARKKGFRVENELSDSVTHIVAENNSRSEVLAWLKEHKMEKTKQFELLDISWLIESMKVGKPVDTKGKYQLAESGEMSANPDPTEGRENELPPTTKTISQYACQRRTTLNNHNQRFTDALEILAENYEFKRNDDTCLTFMRAISVLKCLPFEVRSLKDTEGLPWIGDEVKGIMEEIIEVGESLEVQAVLNDERYQSFKRFKSVFGVGVKTADKWYRMGLRTLEDVRSSKTLKLTPMQKAGLCYYEDLADGVTKAEADAISLLVQDAVWTFDPDALVEITGGFRRGKPFGHDVDLLITSPGAEKEQEDQLLQKVTNLWKKQGLLLYGRLRESRFEDGKLPSRKIDALDHFAKCFLILKLYHHKVDKSKWEMPTGSNESEAKSWKAIRVDLVRCPYDGFAFALLGWTGSRMFRRDLRRYATHEKKMMLDNHALYDLTKKIFLKAKSEEEIFAHLGLEYLEPFERNA

SEQ ID NO: 1421 - DNA, 1587 bp, synthetic construct
  misc_feature 1..1587: note = Variant of terminal deoxynucleotidyltransferase
  source 1..1587: mol_type = other DNA
atgcaccatcatcatcatcatggcggtagcggcagccacggcattcgtaccatcgattcggacttcgggaagaaacgccagaagaagatggataaccacgatagttccgccatctatgaaatcaaatttcacgagtttgtgctgttcattctcgaagagaaaatgggtgcgacgcgtcgtacttttctgacagatttagcccgcaagaaagggttccgcgtcgagaatgaactgtcagacagcgttacccacatcgtggcagaaaataattcacgctctgaagtattggcttggctgaaagaacacaagatggagaagaccaagcaattcgaactgctggatattagctggcttatcgaaagcatgaaagttggtaaaccggtggacaccaaggggaaataccagttggcggaatcgggtgagatgagtgcgaacccagatccgacagagggtcgtgaaaacgagctgcctcctactacgaagaccatttctcagtatgcgtgtcaacgccgcaccaccctgaacaaccataatcaacgttttacggacgcactggaaattcttgcggaaaattacgagttcaaacgcaacgatgatacttgtctgacctttatgcgtgctatttccgtgctgaaatgccttccgtttgaggtagttagcctgaaagacacggaaggattgccctggatcggtgatgaagtcaaagggattatggaagaaatcatcgaggtcggtgaatcgctggaagtgcaggccgtgctcaatgatgagcgctatcaaagcttcaaacgctttaagagtgtctttggagtgggggtgaagacagcagacaaatggtaccgtatgggtctgcgcacgctcgaggatgttcgttccagcaagaccctgaagttgaccccgatgcagaaagcgggtctgtgctattatgaagatcttgctgatggcgttacgaaagccgaagctgacgcgatttctctgctggttcaggatgcagtctggactttcgacccgacggcgctggtggagattacgggtggatttcgtcgtgggaaaccttttggtcacgacgttgatctgcttatcacatctccgggagctgagaaagaacaagaagaccagctcctgcagaaagtgaccaatctgtggaagaaacaagggttgttgctgtacggtcgtctgcgtgaaagtcgctttgaagatgggaaactcccatcccgcaagatcgatgccctggaccattttgcgaaatgctttctgatcctcaaactttatcaccataaagtggacaaaagcaaatgggaaatgccgacgggttcgaacgaaagcgaggccaaaagttggaaagcaattcgcgtagatctggttcgttgtccctacgatggttttgcgtttgcgttgttgggttggaccggaagccgcatgttccgccgtgatctgcgccgctacgccacccacgagaagaagatgatgctggacaatcatgcgctgtatgacctgaccaagaaaatctttctcaaagctaaatcggaagaggaaattttcgcacatctggggcttgaatacctggaaccgttcgaacgtaacgca

SEQ ID NO: 1422 - protein, 529 aa, synthetic construct
  REGION 1..529: note = Variant of terminal deoxynucleotidyltransferase
MHHHHHHGGSGSHGIRTIDSDFGKKRQKKMDNHDSSAIYEIKFHEFVLFILEEKMGATRRTFLTDLARKKGFRVENELSDSVTHIVAENNSRSEVLAWLKEHKMEKTKQFELLDISWLIESMKVGKPVDTKGKYQLAESGEMSANPDPTEGRENELPPTTKTISQYACQRRTTLNNHNQRFTDALEILAENYEFKRNDDTCLTFMRAISVLKCLPFEVVSLKDTEGLPWIGDEVKGIMEEIIEVGESLEVQAVLNDERYQSFKRFKSVFGVGVKTADKWYRMGLRTLEDVRSSKTLKLTPMQKAGLCYYEDLADGVTKAEADAISLLVQDAVWTFDPTALVEITGGFRRGKPFGHDVDLLITSPGAEKEQEDQLLQKVTNLWKKQGLLLYGRLRESRFEDGKLPSRKIDALDHFAKCFLILKLYHHKVDKSKWEMPTGSNESEAKSWKAIRVDLVRCPYDGFAFALLGWTGSRMFRRDLRRYATHEKKMMLDNHALYDLTKKIFLKAKSEEEIFAHLGLEYLEPFERNA

SEQ ID NO: 1423 - DNA, 1587 bp, synthetic construct
  misc_feature 1..1587: note = Variant of terminal deoxynucleotidyltransferase
  source 1..1587: mol_type = other DNA
atgcaccatcatcatcatcatggcggtagcggcagccacggcattcgtaccatcgattcggacttcgggaagaaacgccagaagaagatggataaccacgatagttccgccatctatgaaatcaaatttcacgagtttgtgctgttcattctcgaagagaaaatgggtgcgacgcgtcgtacttttctgacagatttagcccgcaagaaagggttccgcgtcgagaatgaactgtcagacagcgttacccacatcgtggcagaaaataattcacgctctgaagtattggcttggctgaaagaacacaagatggagaagaccaagcaattcgaactgctggatattagctggcttatcgaaagcatgaaagttggtaaaccggtggacaccaaggggaaataccagttggcggaatcgggtgagatgagtgcgaacccagatccgacagagggtcgtgaaaacgagctgcctcctactatgaagaccatttctcagtatgcgtgtcaacgccgcaccaccctgaacaaccataatcaacgttttacggacgcactggaaattcttgcggaaaattacgagttcaaacgcaacgatgatacttgtctgacctttatgcgtgctatttccgtgctgaaatgccttccgtttgaggtagttagcctgaaagacacggaaggattgccctggatcggtgatgaagtcaaagggattatggaagaaatcatcgaggtcggtgaatcgctggaagtgcaggccgtgctcaatgatgagcgctatcaaagcttcaaacgctttaagagtgtctttggagtgggggtgaagacagcagacaaatggtaccgtatgggtctgcgcacgctcgaggatgttcgttccagcaagaccctgaagttgaccccgatgcagaaagcgggtctgtgctattatgaagatcttgctgatggcgttacgaaagccgaagctgacgcgatttctctgctggttcaggatgcagtctggactttcgacccggatgcgctggtggagattacgggtggatttcgtcgtgggaaaccttttggtcacgacgttgatctgcttatcacatctccgggagctgagaaagaacaagaagaccagctcctgcagaaagtgaccaatctgtggaagaaacaagggttgttgctgtacggtcgtctgcgtgaaagtcgctttgaagatgggaaactcccatcccgcaagatcgatgccctggaccattttgcgaaatgctttctgatcctcaaactttatcaccataaagtggacaaaagcaaatgggaaatgccgacgggttcgaacgaaagcgaggccaaaagttggaaagcaattcgcgtagatctggttcgttgtccctacgatggttttgcgtttgcgttgttgggttggaccggaagccgcatgttccgccgtgatctgcgccgctacgccacccacgagaagaagatgatgctggacaatcatgcgctgtatgacctgaccaagaaaatctttctcaaagctaaatcggaagaggaaattttcgcacatctggggcttgaatacctggaaccgttcgaacgtaacgca

SEQ ID NO: 1424 - protein, 529 aa, synthetic construct
  REGION 1..529: note = Variant of terminal deoxynucleotidyltransferase
MHHHHHHGGSGSHGIRTIDSDFGKKRQKKMDNHDSSAIYEIKFHEFVLFILEEKMGATRRTFLTDLARKKGFRVENELSDSVTHIVAENNSRSEVLAWLKEHKMEKTKQFELLDISWLIESMKVGKPVDTKGKYQLAESGEMSANPDPTEGRENELPPTMKTISQYACQRRTTLNNHNQRFTDALEILAENYEFKRNDDTCLTFMRAISVLKCLPFEVVSLKDTEGLPWIGDEVKGIMEEIIEVGESLEVQAVLNDERYQSFKRFKSVFGVGVKTADKWYRMGLRTLEDVRSSKTLKLTPMQKAGLCYYEDLADGVTKAEADAISLLVQDAVWTFDPDALVEITGGFRRGKPFGHDVDLLITSPGAEKEQEDQLLQKVTNLWKKQGLLLYGRLRESRFEDGKLPSRKIDALDHFAKCFLILKLYHHKVDKSKWEMPTGSNESEAKSWKAIRVDLVRCPYDGFAFALLGWTGSRMFRRDLRRYATHEKKMMLDNHALYDLTKKIFLKAKSEEEIFAHLGLEYLEPFERNA

SEQ ID NO: 1425 - DNA, 1587 bp, synthetic construct
  misc_feature 1..1587: note = Variant of terminal deoxynucleotidyltransferase
  source 1..1587: mol_type = other DNA
atgcaccatcatcatcatcatggcggtagcggcagccacggcattcgtaccatcgattcggacttcgggaagaaacgccagaagaagatggataaccacgatagttccgccatctatgaaatcaaatttcacgagtttgtgctgttcattctcgaagagaaaatgggtgcgacgcgtcgtacttttctgacagatttagcccgcaagaaagggttccgcgtcgagaatgaactgtcagacagcgttacccacatcgtggcagaaaataattcacgctctgaagtattggcttggctgaaagaacacaagatggagaagaccaagcaattcgaactgctggatattagctggcttatcgaaagcatgaaagttggtaaaccggtggacaccaaggggaaataccagttggcggaatcgggtgagatgagtgcgaacccagatccgacagagggtcgtgaaaacgagctgcctcctactacgaagaccatttctcagtatgcgtgtcaacgccgcaccaccctgaacaaccataatcaacgttttacggacgcactggaaattcttgcggaaaattacgagttcaaacgcaacgatgatacttgtctgacctttatgcgtgctatttccgtgctgaaatgccttccgtttgaggtagttagcctgaaagacacggaaggattgccctggatcggtgatgaagtcaaagggattatggaagaaatcatcgaggtcggtgaatcgctggaagtgcaggccgtgctcaatgatgagcgctatcaaagcttcaaacgctttaagagtgtctttggagtgggggtgaagacagcagacaaatggtaccgtatgggtctgcgcacgctcgaggatgttcgttccagcaagaccctgaagttgaccccgatgcagaaagcgggtctgtgctattatgaagatcttgctgatggcgttacgaaagccgaagctgacgcgatttctctgctggttcaggatgcagtctggactttcgacccggatgcgctggtggagattacgggtggatttcgtcgtgggaaaccttttggtcacgacgttgatctgcttatcacatctccgggagctgagaaagaacaagaagaccagctcctgcagaaagtgaccaatctgtggaagaaacaagggttgttgctgtacggtcgtctgcgtgaaagtcgctttgaagatgggaaactcccatcccgcaagatcgatgccctggaccattttgcgaaatgctttctgatcctcaaactttatcaccataaagtggacaaaagcaaatgggaaatgccgacgggttcgaacgaaagcgaggccaaaccttggaaagcaattcgcgtagatctggttcgttgtccctacgatggttttgcgtttgcgttgttgggttggaccggaagccgcatgttccgccgtgatctgcgccgctacgccacccacgagaagaagatgatgctggacaatcatgcgctgtatgacctgaccaagaaaatctttctcaaagctaaatcggaagaggaaattttcgcacatctggggcttgaatacctggaaccgttcgaacgtaacgca

SEQ ID NO: 1426 - protein, 529 aa, synthetic construct
  REGION 1..529: note = Variant of terminal deoxynucleotidyltransferase
MHHHHHHGGSGSHGIRTIDSDFGKKRQKKMDNHDSSAIYEIKFHEFVLFILEEKMGATRRTFLTDLARKKGFRVENELSDSVTHIVAENNSRSEVLAWLKEHKMEKTKQFELLDISWLIESMKVGKPVDTKGKYQLAESGEMSANPDPTEGRENELPPTTKTISQYACQRRTTLNNHNQRFTDALEILAENYEFKRNDDTCLTFMRAISVLKCLPFEVVSLKDTEGLPWIGDEVKGIMEEIIEVGESLEVQAVLNDERYQSFKRFKSVFGVGVKTADKWYRMGLRTLEDVRSSKTLKLTPMQKAGLCYYEDLADGVTKAEADAISLLVQDAVWTFDPDALVEITGGFRRGKPFGHDVDLLITSPGAEKEQEDQLLQKVTNLWKKQGLLLYGRLRESRFEDGKLPSRKIDALDHFAKCFLILKLYHHKVDKSKWEMPTGSNESEAKPWKAIRVDLVRCPYDGFAFALLGWTGSRMFRRDLRRYATHEKKMMLDNHALYDLTKKIFLKAKSEEEIFAHLGLEYLEPFERNA

SEQ ID NO: 1427 - DNA, 1587 bp, synthetic construct
  misc_feature 1..1587: note = Variant of terminal deoxynucleotidyltransferase
  source 1..1587: mol_type = other DNA
atgcaccatcatcatcatcatggcggtagcggcagccacggcattcgtaccatcgattcggacttcgggaagaaacgccagaagaagatggataaccacgatagttccgccatctatgaaatcaaatttcacgagtttgtgctgttcattctcgaagagaaaatgggtgcgacgcgtcgtacttttctgacagatttagcccgcaagaaagggttccgcgtcgagaatgaactgtcagacagcgttacccacatcgtggcagaaaataattcacgctctgaagtattggcttggctgaaagaacacaagatggagaagaccaagcaattcgaactgctggatattagctggcttatcgaaagcatgaaagttggtaaaccggtggacaccaaggggaaataccagttggcggaatcgggtgagatgagtgcgaacccagatccgacagagggtcgtgaaaacgagctgcctcctactacgaagaccatttctcagtatgcgtgtcaacgccgcaccaccctgaacaaccataatcaacgttttacggacgcactggaaattcttgcggaaaattacgagttcaaacgcaacgatgatacttgtctgacctttatgcgtgctatttccgtgctgaaatgccttccgtttgaggtagttagcctgaaagacacggaaggattgccctggatcggtgatgaagtcaaagggattatggaagaaatcatcgaggtcggtgaatcgctggaagtgcaggccgtgctcaatgatgagcgctatcaaagcttcaaacgctttaagagtgtctttggagtgggggtgaagacagcagacaaatggtaccgtatgggtctgcgcacgctcgaggatgttcgttccagcaagaccctgaagttgaccccgatgcagaaagcgggtctgtgctattatgaagatcttgctgatggcgttacgaaagccgaagctgacgcgatttctctgctggttcaggatgcagtctggactttcgacccggatgcgatggtggagattacgggtggatttcgtcgtgggaaaccttttggtcacgacgttgatctgcttatcacatctccgggagctgagaaagaacaagaagaccagctcctgcagaaagtgaccaatctgtggaagaaacaagggttgttgctgtacggtcgtctgcgtgaaagtcgctttgaagatgggaaactcccatcccgcaagatcgatgccctggaccattttgcgaaatgctttctgatcctcaaactttatcaccataaagtggacaaaagcaaatgggaaatgccgacggtttcgaacgaaagcgaggccaaaagttggaaagcaattcgcgtagatctggttcgttgtccctacgatggttttgcgtttgcgttgttgggttggaccggaagccgcatgttccgccgtgatctgcgccgctacgccacccacgagaagaagatgatgctggacaatcatgcgctgtatgacctgaccaagaaaatctttctcaaagctaaatcggaagaggaaattttcgcacatctggggcttgaatacctggaaccgttcgaacgtaacgca

SEQ ID NO: 1428 - protein, 529 aa, synthetic construct
  REGION 1..529: note = Variant of terminal deoxynucleotidyltransferase
MHHHHHHGGSGSHGIRTIDSDFGKKRQKKMDNHDSSAIYEIKFHEFVLFILEEKMGATRRTFLTDLARKKGFRVENELSDSVTHIVAENNSRSEVLAWLKEHKMEKTKQFELLDISWLIESMKVGKPVDTKGKYQLAESGEMSANPDPTEGRENELPPTTKTISQYACQRRTTLNNHNQRFTDALEILAENYEFKRNDDTCLTFMRAISVLKCLPFEVVSLKDTEGLPWIGDEVKGIMEEIIEVGESLEVQAVLNDERYQSFKRFKSVFGVGVKTADKWYRMGLRTLEDVRSSKTLKLTPMQKAGLCYYEDLADGVTKAEADAISLLVQDAVWTFDPDAMVEITGGFRRGKPFGHDVDLLITSPGAEKEQEDQLLQKVTNLWKKQGLLLYGRLRESRFEDGKLPSRKIDALDHFAKCFLILKLYHHKVDKSKWEMPTVSNESEAKSWKAIRVDLVRCPYDGFAFALLGWTGSRMFRRDLRRYATHEKKMMLDNHALYDLTKKIFLKAKSEEEIFAHLGLEYLEPFERNA

SEQ ID NO: 1429 - DNA, 1587 bp, synthetic construct
  misc_feature 1..1587: note = Variant of terminal deoxynucleotidyltransferase
  source 1..1587: mol_type = other DNA
atgcaccatcatcatcatcatggcggtagcggcagccacggcattcgtaccatcgattcggacttcgggaagaaacgccagaagaagatggataaccacgatagttccgccatctatgaaatcaaatttcacgagtttgtgctgttcattctcgaagagaaaatgggtgcgacgcgtcgtacttttctgacagatttagcccgcaagaaagggttccgcgtcgagaatgaactgtcagacagcgttacccacatcgtggcagaaaataattcacgctctgaagtattggcttggctgaaagaacacaagatggagaagaccaagcaattcgaactgctggatattagctggcttatcgaaagcatgaaagttggtaaaccggtggacaccaaggggaaataccagttggcggaatcgggtgagatgagtgcgaacccagatccgacagagggtcgtgaaaacgagctgcctcctactacgaagaccatttctcagtatgcgtgtcaacgccgcaccaccctgaacaaccataatcaacgttttacggacgcactggaaattcttgcggaaaattacgagttcaaacgcaacgatgatacttgtctgacctttatgcgtgctatttccgtgctgaaatgccttccgtttgaggtagttagcctgaaagacacggaaggattgccctggatcggtgatgaagtcaaagggattatggaagaaatcatcgaggtcggtgaatcgctggaagtgcaggccgtgctcaatgatgagcgctatcaaagcttcaaacgctttaagagtgtctttggagtgggggtgaagacagcagacaaatggtaccgtatgggtctgcgcacgctcgaggatgttcgttccagcaagaccctgaagttgaccccgatgcagaaagcgggtctgtgctattatgaagatcttgctgatggcgttacgaaagccgaagctgacgcgatttctctgctggttcaggatgcagtctggactttcgacccggatgcgctggtggagattacgggtggatttcgtcgtgggaaaccttttggtcacgacgttgatctgcttatcacatctccgggagctgagaaagaacaagaagaccatctcctgcagaaagtgaccaatctgtggaagaaacaagggttgttgctgtacggtcgtctgcgtgaaagtcgctttgaagatgggaaactcccatcccgcaagatcgatgccctggaccattttgcgaaatgctttctgatcctcaaactttatcaccataaagtggacaaaagcaaatgggaaatgccgacgggttcgaacgaaagcgaggccaaaagttggaaagcaattcgcgtagatctggttcgttgtccctacgatggttttgcgtttgcgttgttgggttggaccggaagccgcatgttccgccgtgatctgcgccgctacgccacccacgagaagaagatgatgctggacaatcatgcgctgtatgacctgaccaagaaaatctttctcaaagctaaatcggaagaggaaattttcgcacatctggggcttgaatacctggaaccgttcgaacgtaacgca

SEQ ID NO: 1430 - protein, 529 aa, synthetic construct
  REGION 1..529: note = Variant of terminal deoxynucleotidyltransferase
MHHHHHHGGSGSHGIRTIDSDFGKKRQKKMDNHDSSAIYEIKFHEFVLFILEEKMGATRRTFLTDLARKKGFRVENELSDSVTHIVAENNSRSEVLAWLKEHKMEKTKQFELLDISWLIESMKVGKPVDTKGKYQLAESGEMSANPDPTEGRENELPPTTKTISQYACQRRTTLNNHNQRFTDALEILAENYEFKRNDDTCLTFMRAISVLKCLPFEVVSLKDTEGLPWIGDEVKGIMEEIIEVGESLEVQAVLNDERYQSFKRFKSVFGVGVKTADKWYRMGLRTLEDVRSSKTLKLTPMQKAGLCYYEDLADGVTKAEADAISLLVQDAVWTFDPDALVEITGGFRRGKPFGHDVDLLITSPGAEKEQEDHLLQKVTNLWKKQGLLLYGRLRESRFEDGKLPSRKIDALDHFAKCFLILKLYHHKVDKSKWEMPTGSNESEAKSWKAIRVDLVRCPYDGFAFALLGWTGSRMFRRDLRRYATHEKKMMLDNHALYDLTKKIFLKAKSEEEIFAHLGLEYLEPFERNA

SEQ ID NO: 1431 - DNA, 1587 bp, synthetic construct
  misc_feature 1..1587: note = Variant of terminal deoxynucleotidyltransferase
  source 1..1587: mol_type = other DNA
atgcaccatcatcatcatcatggcggtagcggcagccacggcattcgtaccatcgattcggacttcgggaagaaacgccagaagaagatggataaccacgatagttccgccatctatgaaatcaaatttcacgagtttgtgctgttcattctcgaagagaaaatgggtgcgacgcgtcgtacttttctgacagatttagcccgcaagaaagggttccgcgtcgagaatgaactgtcagacagcgttacccacatcgtggcagaaaataattcacgctctgaagtattggcttggctgaaagaacacaagatggagaagaccaagcaattcgaactgctggatattagctggcttatcgaaagcatgaaagttggtaaaccggtggacaccaaggggaaataccagttggcggaatcgggtgagatgagtgcgaacccagatccgacagagggtcgtgaaaacgagctgcctcctactacgaagaccatttctcagtatgcgtgtcaacgccgcaccaccctgaacaaccataatcaacgttttacggacgcactggaaattcttgcggaaaattacgagttcaaacgcaacgatgatacttgtctgacctttatgcgtgctatttccgtgctgaaatgccttccgtttgaggtagttagcctgaaagacacggaaggattgccctggatcggtgatgaagtcaaagggattatggaagaaatcatcgaggtcggtgaatcgctggaagtgcaggccgtgctcaatgatgagcgctatcaaagcttcaaacgctttaagagtgtctttggagtgggggtgaagacagcagacaaatggtaccgtatgggtctgcgcacgctcgaggatgttcgttccagcaagaccctgaagttgaccccgatgcagaaagcgggtctgtgctattatgaagatcttgctgatggcgttacgaaagccgaagctgacgcgatttctctgctggttcaggatgcagtctggaggttcgacccggatgcgctggtggagattacgggtggatttcgtcgtgggaaaccttttggtcacgacgttgatctgcttatcacatctccgggagctgagaaagaacaagaagaccagctcctgcagaaagtgaccaatctgtggaagaaacaagggttgttgctgtacggtcgtctgcgtgaaagtcgctttgaagatgggaaactcccatcccgcaagatcgatgccctggaccattttgcgaaatgctttctgatcctcaaactttatcaccataaagtggacaaaagcaaatgggaaatgccgacgggttcgaacgaaagcgaggccaaaagttggaaagcaattcgcgtagatctggttcgttgtccctacgatggttttgcgtttgcgttgttgggttggaccggaagccgcatgttccgccgtgatctgcgccgctacgccacccacgagaagaagatgatgctggacaatcatgcgctgtatgacctgaccaagaaaatctttctcaaagctaaatcggaagaggaaattttcgcacatctggggcttgaatacctggaaccgttcgaacgtaacgca

SEQ ID NO: 1432 - protein, 529 aa, synthetic construct
  REGION 1..529: note = Variant of terminal deoxynucleotidyltransferase
MHHHHHHGGSGSHGIRTIDSDFGKKRQKKMDNHDSSAIYEIKFHEFVLFILEEKMGATRRTFLTDLARKKGFRVENELSDSVTHIVAENNSRSEVLAWLKEHKMEKTKQFELLDISWLIESMKVGKPVDTKGKYQLAESGEMSANPDPTEGRENELPPTTKTISQYACQRRTTLNNHNQRFTDALEILAENYEFKRNDDTCLTFMRAISVLKCLPFEVVSLKDTEGLPWIGDEVKGIMEEIIEVGESLEVQAVLNDERYQSFKRFKSVFGVGVKTADKWYRMGLRTLEDVRSSKTLKLTPMQKAGLCYYEDLADGVTKAEADAISLLVQDAVWRFDPDALVEITGGFRRGKPFGHDVDLLITSPGAEKEQEDQLLQKVTNLWKKQGLLLYGRLRESRFEDGKLPSRKIDALDHFAKCFLILKLYHHKVDKSKWEMPTGSNESEAKSWKAIRVDLVRCPYDGFAFALLGWTGSRMFRRDLRRYATHEKKMMLDNHALYDLTKKIFLKAKSEEEIFAHLGLEYLEPFERNA

SEQ ID NO: 1433 - DNA, 1587 bp, synthetic construct
  misc_feature 1..1587: note = Variant of terminal deoxynucleotidyltransferase
  source 1..1587: mol_type = other DNA
atgcaccatcatcatcatcatggcggtagcggcagccacggcattcgtaccatcgattcggacttcgggaagaaacgccagaagaagatggataaccacgatagttccgccatctatgaaatcaaatttcacgagtttgtgctgttcattctcgaagagaaaatgggtgcgacgcgtcgtacttttctgacagatttagcccgcaagaaagggttccgcgtcgagaatgaactgtcagacagcgttacccacatcgtggcagaaaataattcacgctctgaagtattggcttggctgaaagaacacaagatggagaagaccaagcaattcgaactgctggatattagctggcttatcgaaagcatgaaagttggtaaaccggtggacaccaaggggaaataccagttggcggaatcgggtgagatgagtgcgaacccagatccgacagagggtcgtgaaaacgagctgcctcctactacgaagaccatttctcagtatgcgtgtcaacgccgcaccaccctgaacaaccataatcaacgttttacggacgcactggaaattcttgcggaaaattacgagttcaaacgcaacgatgatacttgtctgacctttatgcgtgctatttccgtgctgaaatgccttccgtttgaggtagttagcctgaaagacacggaaggattgccctggatcggtgatgaagtcaaagggattatggaagaaatcatcgaggtcggtgaatcgctggaagtgcaggccgtgctcaatgatgagcgctatcaaagcttcaaacgctttaagagtgtctttggagtgggggtgaagacagcagacaaatggtaccgtatgggtctgcgcacgctcgaggatgttcgttccagcaagaccctgaagttgaccccgatgcagaaagcgggtctgtgctattatgaagatcttgctgatggcgttacgaaagccgaagctgacgcgatttctaatctggttcaggatgcagtctggactttcgacccggatgcgctggtggagattacgggtggatttcgtcgtgggaaaccttttggtcacgacgttgatctgcttatcacatctccgggagctgagaaagaacaagaagaccagctcctgcagaaagtgaccaatctgtggaagaaacaagggttgttgctgtacggtcgtctgcgtgaaagtcgctttgaagatgggaaactcccatcccgcaagatcgatgccctggaccattttgcgaaatgctttctgatcctcaaactttatcaccataaagtggacaaaagcaaatgggaaatgccgacgggttcgaacgaaagcgaggccaaaagttggaaagcaattcgcgtagatctggttcgttgtccctacgatggttttgcgtttgcgttgttgggttggaccggaagccgcatgttccgccgtgatctgcgccgctacgccacccacgagaagaagatgatgctggacaatcatgcgctgtatgacctgaccaagaaaatctttctcaaagctaaatcggaagaggaaattttcgcacatctggggcttgaatacctggaaccgttcgaacgtaacgca

SEQ ID NO: 1434 - protein, 529 aa, synthetic construct
  REGION 1..529: note = Variant of terminal deoxynucleotidyltransferase
MHHHHHHGGSGSHGIRTIDSDFGKKRQKKMDNHDSSAIYEIKFHEFVLFILEEKMGATRRTFLTDLARKKGFRVENELSDSVTHIVAENNSRSEVLAWLKEHKMEKTKQFELLDISWLIESMKVGKPVDTKGKYQLAESGEMSANPDPTEGRENELPPTTKTISQYACQRRTTLNNHNQRFTDALEILAENYEFKRNDDTCLTFMRAISVLKCLPFEVVSLKDTEGLPWIGDEVKGIMEEIIEVGESLEVQAVLNDERYQSFKRFKSVFGVGVKTADKWYRMGLRTLEDVRSSKTLKLTPMQKAGLCYYEDLADGVTKAEADAISNLVQDAVWTFDPDALVEITGGFRRGKPFGHDVDLLITSPGAEKEQEDQLLQKVTNLWKKQGLLLYGRLRESRFEDGKLPSRKIDALDHFAKCFLILKLYHHKVDKSKWEMPTGSNESEAKSWKAIRVDLVRCPYDGFAFALLGWTGSRMFRRDLRRYATHEKKMMLDNHALYDLTKKIFLKAKSEEEIFAHLGLEYLEPFERNA

SEQ ID NO: 1435 - DNA, 1587 bp, synthetic construct
  misc_feature 1..1587: note = Variant of terminal deoxynucleotidyltransferase
  source 1..1587: mol_type = other DNA
atgcaccatcatcatcatcatggcggtagcggcagccacggcattcgtaccatcgattcggacttcgggaagaaacgccagaagaagatggataaccacgatagttccgccatctatgaaatcaaatttcacgagtttgtgctgttcattctcgaagagaaaatgggtgcgacgcgtcgtacttttctgacagatttagcccgcaagaaagggttccgcgtcgagaatgaactgtcagacagcgttacccacatcgtggcagaaaataattcacgctctgaagtattggcttggctgaaagaacacaagatggagaagaccaagcaattcgaactgctggatattagctggcttatcgaaagcatgaaagttggtaaaccggtggacaccaaggggaaataccagttggcggaatcgggtgagatgagtgcgaacccagatccgacagagggtcgtgaaaacgagctgcctcctactacgaagaccatttctcagtatgcgtgtcaacgccgcaccaccctgaacaaccataatcaacgttttacggacgcactggaaattcttgcggaaaattacgagttcaaacgcaacgatgatacttgtctgacctttatgcgtgctatttccgtgctgaaatgccttccgtttgaggtagttagcctgaaagacacggaaggattgccctggatcggtgatgaagtcaaagggattatggaagaaatcatcgaggtcggtgaatcgctggaagtgcaggccgtgctcaatgatgagcgctatcaaagcttcaaacgctttaagagtgtctttggagtgggggtgaagacagcagacaaatggtaccgtatgggtctgcgcacgctcgaggatgttcgttccagcaagaccctgaagttgaccccgatgcagaaagcgggtctgtgctattatgaagatcttgctgatggcgttacgaaagccgaagctgacgcgatttctctgctggttcaggatgcagtctggtctttcgacccggatgcgctggtggagattacgggtggatttcgtcgtgggaaaccttttggtcacgacgttgatctgcttatcacatctccgggagctgagaaagaacaagaagaccagctcctgcagaaagtgaccaatctgtggaagaaacaagggttgttgctgtacggtcgtctgcgtgaaagtcgctttgaagatgggaaactcccatcccgcaagatcgatgccctggaccattttgcgaaatgctttctgatcctcaaactttatcaccataaagtggacaaaagcaaatgggaaatgccgacgggttcgaacgaaagcgaggccaaaagttggaaagcaattcgcgtagatctggttcgttgtccctacgatggttttgcgtttgcgttgttgggttggaccggaagccgcatgttccgccgtgatctgcgccgctacgccacccacgagaagaagatgatgctggacaatcatgcgctgtatgacctgaccaagaaaatctttctcaaagctaaatcggaagaggaaattttcgcacatctggggcttgaatacctggaaccgttcgaacgtaacgca

SEQ ID NO: 1436 - protein, 529 aa, synthetic construct
  REGION 1..529: note = Variant of terminal deoxynucleotidyltransferase
MHHHHHHGGSGSHGIRTIDSDFGKKRQKKMDNHDSSAIYEIKFHEFVLFILEEKMGATRRTFLTDLARKKGFRVENELSDSVTHIVAENNSRSEVLAWLKEHKMEKTKQFELLDISWLIESMKVGKPVDTKGKYQLAESGEMSANPDPTEGRENELPPTTKTISQYACQRRTTLNNHNQRFTDALEILAENYEFKRNDDTCLTFMRAISVLKCLPFEVVSLKDTEGLPWIGDEVKGIMEEIIEVGESLEVQAVLNDERYQSFKRFKSVFGVGVKTADKWYRMGLRTLEDVRSSKTLKLTPMQKAGLCYYEDLADGVTKAEADAISLLVQDAVWSFDPDALVEITGGFRRGKPFGHDVDLLITSPGAEKEQEDQLLQKVTNLWKKQGLLLYGRLRESRFEDGKLPSRKIDALDHFAKCFLILKLYHHKVDKSKWEMPTGSNESEAKSWKAIRVDLVRCPYDGFAFALLGWTGSRMFRRDLRRYATHEKKMMLDNHALYDLTKKIFLKAKSEEEIFAHLGLEYLEPFERNA

SEQ ID NO: 1437 - DNA, 1587 bp, synthetic construct
  misc_feature 1..1587: note = Variant of terminal deoxynucleotidyltransferase
  source 1..1587: mol_type = other DNA
atgcaccatcatcatcatcatggcggtagcggcagccacggcattcgtaccatcgattcggacttcgggaagaaacgccagaagaagatggataaccacgatagttccgccatctatgaaatcaaatttcacgagtttgtgctgttcattctcgaagagaaaatgggtgcgacgcgtcgtacttttctgacagatttagcccgcaagaaagggttccgcgtcgagaatgaactgtcagacagcgttacccacatcgtggcagaaaataattcacgctctgaagtattggcttggctgaaagaacacaagatggagaagaccaagcaattcgaactgctggatattagctggcttatcgaaagcatgaaagttggtaaaccggtggacaccaaggggaaataccagttggcggaatcgggtgagatgagtgcgaacccagatccgacagagggtcgtgaaaacgagctgcctcctactacgaagaccatttctcagtatgcgtgtcaacgccgcaccaccctgaacaaccataatcaacgttttacggacgcactggaaattcttgcggaaaattacgagttcaaacgcaacgatgatacttgtctgacctttatgcgtgctatttccgtgctgaaatgccttccgtttgaggtagttagcctgaaagacacggaaggattgccctggatcggtgatgaagtcaaagggattatggaagaaatcatcgaggtcggtgaatcgctggaagtgcaggccgtgctcaatgatgagcgctatcaaagcttcaaacgctttaagagtgtctttggagtgggggtgaagacagcagacaaatggtaccgtatgggtctgcgcacgctcgaggatgttcgttccagcaagaccctgaagttgaccccgatgcagaaagcgggtctgtgctattatgaagatcttgctgatggcgttacgaaagccgaagctgacgcgatttctctgctggttcaggatgcagtctggactttcgacccggatgcggcggtggagattacgggtggatttcgtcgtgggaaaccttttggtcacgacgttgatctgcttatcacatctccgggagctgagaaagaacaagaagaccagctcctgcagaaagtgaccaatctgtggaagaaacaagggttgttgctgtacggtcgtctgcgtgaaagtcgctttgaagatgggaaactcccatcccgcaagatcgatgccctggaccattttgcgaaatgctttctgatcctcaaactttatcaccataaagtggacaaaagcaaatgggaaatgccgacgggttcgaacgaaagcgaggccaaaagttggaaagcaattcgcgtagatctggttcgttgtccctacgatggttttgcgtttgcgttgttgggttggaccggaagccgcatgttccgccgtgatctgcgccgctacgccacccacgagaagaagatgatgctggacaatcatgcgctgtatgacctgaccaagaaaatctttctcaaagctaaatcggaagaggaaattttcgcacatctggggcttgaatacctggaaccgttcgaacgtaacgca

SEQ ID NO: 1438 - protein, 529 aa, synthetic construct
  REGION 1..529: note = Variant of terminal deoxynucleotidyltransferase
MHHHHHHGGSGSHGIRTIDSDFGKKRQKKMDNHDSSAIYEIKFHEFVLFILEEKMGATRRTFLTDLARKKGFRVENELSDSVTHIVAENNSRSEVLAWLKEHKMEKTKQFELLDISWLIESMKVGKPVDTKGKYQLAESGEMSANPDPTEGRENELPPTTKTISQYACQRRTTLNNHNQRFTDALEILAENYEFKRNDDTCLTFMRAISVLKCLPFEVVSLKDTEGLPWIGDEVKGIMEEIIEVGESLEVQAVLNDERYQSFKRFKSVFGVGVKTADKWYRMGLRTLEDVRSSKTLKLTPMQKAGLCYYEDLADGVTKAEADAISLLVQDAVWTFDPDAAVEITGGFRRGKPFGHDVDLLITSPGAEKEQEDQLLQKVTNLWKKQGLLLYGRLRESRFEDGKLPSRKIDALDHFAKCFLILKLYHHKVDKSKWEMPTGSNESEAKSWKAIRVDLVRCPYDGFAFALLGWTGSRMFRRDLRRYATHEKKMMLDNHALYDLTKKIFLKAKSEEEIFAHLGLEYLEPFERNA

SEQ ID NO: 1439 - DNA, 1587 bp, synthetic construct
  misc_feature 1..1587: note = Variant of terminal deoxynucleotidyltransferase
  source 1..1587: mol_type = other DNA
atgcaccatcatcatcatcatggcggtagcggcagccacggcattcgtaccatcgattcggacttcgggaagaaacgccagaagaagatggataaccacgatagttccgccatctatgaaatcaaatttcacgagtttgtgctgttcattctcgaagagaaaatgggtgcgacgcgtcgtacttttctgacagatttagcccgcaagaaagggttccgcgtcgagaatgaactgtcagacagcgttacccacatcgtggcagaaaataattcacgctctgaagtattggcttggctgaaagaacacaagatggagaagaccaagcaattcgaactgctggatattagctggcttatcgaaagcatgaaagttggtaaaccggtggacaccaaggggaaataccagttggcggaatcgggtgagatgagtgcgaacccagatccgacagagggtcgtgaaaacgagctgcctcctactacgaagaccatttctcagtatgcgtgtcaacgccgcaccaccctgaacaaccataatcaacgttttacggacgcactggaaattcttgcggaaaattacgagttcaaacgcaacgatgatacttgtctgacctttatgcgtgctatttccgtgctgaaatgccttccgtttgaggtagttagcctgaaagacacggaaggattgccctggatcggtgatgaagtcaaagggattatggaagaaatcatcgaggtcggtgaatcgctggaagtgcaggccgtgctcaatgatgagcgctatcaaagcttcaaacgctttaagagtgtctttggagtgggggtgaagacagcagacaaatggtaccgtatgggtctgcgcacgctcgaggatgttcgttccagcaagaccctgaagttgaccccgatgcagaaagcgggtctgtgctattatgaagatcttgctgatggcgttacgaaagccgaagctgacgcgatttctctgctggttcaggatgcagtctggactttcgacccggatgcgctggtggagattacgggtggatttcgtcgtgggaaaccttttggtcacgacgttgatctgcttatcacatgtccgggagctgagaaagaacaagaagaccagctcctgcagaaagtgaccaatctgtggaagaaacaagggttgttgctgtacggtcgtctgcgtgaaagtcgctttgaagatgggaaactcccatcccgcaagatcgatgccctggaccattttgcgaaatgctttctgatcctcaaactttatcaccataaagtggacaaaagcaaatgggaaatgccgacgggttcgaacgaaagcgaggccaaaagttggaaagcaattcgcgtagatctggttcgttgtccctacgatggttttgcgtttgcgttgttgggttggaccggaagccgcatgttccgccgtgatctgcgccgctacgccacccacgagaagaagatgatgctggacaatcatgcgctgtatgacctgaccaagaaaatctttctcaaagctaaatcggaagaggaaattttcgcacatctggggcttgaatacctggaaccgttcgaacgtaacgca

SEQ ID NO: 1440 - protein, 529 aa, synthetic construct
  REGION 1..529: note = Variant of terminal deoxynucleotidyltransferase
MHHHHHHGGSGSHGIRTIDSDFGKKRQKKMDNHDSSAIYEIKFHEFVLFILEEKMGATRRTFLTDLARKKGFRVENELSDSVTHIVAENNSRSEVLAWLKEHKMEKTKQFELLDISWLIESMKVGKPVDTKGKYQLAESGEMSANPDPTEGRENELPPTTKTISQYACQRRTTLNNHNQRFTDALEILAENYEFKRNDDTCLTFMRAISVLKCLPFEVVSLKDTEGLPWIGDEVKGIMEEIIEVGESLEVQAVLNDERYQSFKRFKSVFGVGVKTADKWYRMGLRTLEDVRSSKTLKLTPMQKAGLCYYEDLADGVTKAEADAISLLVQDAVWTFDPDALVEITGGFRRGKPFGHDVDLLITCPGAEKEQEDQLLQKVTNLWKKQGLLLYGRLRESRFEDGKLPSRKIDALDHFAKCFLILKLYHHKVDKSKWEMPTGSNESEAKSWKAIRVDLVRCPYDGFAFALLGWTGSRMFRRDLRRYATHEKKMMLDNHALYDLTKKIFLKAKSEEEIFAHLGLEYLEPFERNA

SEQ ID NO: 1441 - DNA, 1587 bp, synthetic construct
  misc_feature 1..1587: note = Variant of terminal deoxynucleotidyltransferase
  source 1..1587: mol_type = other DNA
atgcaccatcatcatcatcatggcggtagcggcagccacggcattcgtaccatcgattcggacttcgggaagaaacgccagaagaagatggataaccacgatagttccgccatctatgaaatcaaatttcacgagtttgtgctgttcattctcgaagagaaaatgggtgcgacgcgtcgtacttttctgacagatttagcccgcaagaaagggttccgcgtcgagaatgaactgtcagacagcgttacccacatcgtggcagaaaataattcacgctctgaagtattggcttggctgaaagaacacaagatggagaagaccaagcaattcgaactgctggatattagctggcttatcgaaagcatgaaagttggtaaaccggtggacaccaaggggaaataccagttggcggaatcgggtgagatgagtgcgaacccagatccgacagagggtcgtgaaaacgagctgcctcctactacgaagaccatttctcagtatgcgtgtcaacgccgcaccaccctgaacaaccataatcaacgttttacggacgcactggaaattcttgcggaaaattacgagttcaaacgcaacgatgatacttgtctgacctttatgcgtgctatttccgtgctgaaatgccttccgtttgaggtagttagcctgaaagacacggaaggattgccctggatcggtgatgaagtcaaagggattatggaagaaatcatcgaggtcggtgaatcgctggaagtgcaggccgtgctcaatgatgagcgctatcaaagcttcaaacgctttaagagtgtctttggagtgggggtgaagacagcagacaaatggtaccgtatgggtctgcgcacgctcgaggatgttcgttccagcaagaccctgaagttgaccccgatgcagaaagcgggtctgtgctattatgaagatcttgctgatggcgttacgaaagccgaagctgacgcgatttctctgctggttcaggatgcagtctggactttcgacccggatgcgctggtggagattacgggtggatttcgtcgtgggaaaccttttggtcacgacgttgatctgcttatcacatctccgggagctgagaaagaacaagaagaccagctcctgcagaaagtgaccaatctgtggaagaaacaagggttgttgctgtacggtcgtctgcgtgaaagtcgctttgaagatgggaaactcccatcccgcaagatcgatgccctggaccattttgcgaaatgctttctgatcctcaaactttatcaccataaagtggacaaaagcaaatgggaaatgccgacgggttcgaacgaaagcgaggccaaaagttggaaagcaattcgcgtagatctggttcgttgtccctacgatggttttgcgtttgcgttgttgggttggaccggaagccgcatgttccgccgtgatctgcgccgctacgccacccacgagaagaagatgatgctggacaatcatgcgctgtatgacctgaccaagaaacagtttctcaaagctaaatcggaagaggaaattttcgcacatctggggcttgaatacctggaaccgttcgaacgtaacgca

SEQ ID NO: 1442 - protein, 529 aa, synthetic construct
  REGION 1..529: note = Variant of terminal deoxynucleotidyltransferase
MHHHHHHGGSGSHGIRTIDSDFGKKRQKKMDNHDSSAIYEIKFHEFVLFILEEKMGATRRTFLTDLARKKGFRVENELSDSVTHIVAENNSRSEVLAWLKEHKMEKTKQFELLDISWLIESMKVGKPVDTKGKYQLAESGEMSANPDPTEGRENELPPTTKTISQYACQRRTTLNNHNQRFTDALEILAENYEFKRNDDTCLTFMRAISVLKCLPFEVVSLKDTEGLPWIGDEVKGIMEEIIEVGESLEVQAVLNDERYQSFKRFKSVFGVGVKTADKWYRMGLRTLEDVRSSKTLKLTPMQKAGLCYYEDLADGVTKAEADAISLLVQDAVWTFDPDALVEITGGFRRGKPFGHDVDLLITSPGAEKEQEDQLLQKVTNLWKKQGLLLYGRLRESRFEDGKLPSRKIDALDHFAKCFLILKLYHHKVDKSKWEMPTGSNESEAKSWKAIRVDLVRCPYDGFAFALLGWTGSRMFRRDLRRYATHEKKMMLDNHALYDLTKKQFLKAKSEEEIFAHLGLEYLEPFERNA

SEQ ID NO: 1443 - DNA, 1587 bp, synthetic construct
  misc_feature 1..1587: note = Variant of terminal deoxynucleotidyltransferase
  source 1..1587: mol_type = other DNA
atgcaccatcatcatcatcatggcggtagcggcagccacggcattcgtaccatcgattcggacttcgggaagaaacgccagaagaagatggataaccacgatagttccgccatctatgaaatcaaatttcacgagtttgtgctgttcattctcgaagagaaaatgggtgcgacgcgtcgtacttttctgacagatttagcccgcaagaaagggttccgcgtcgagaatgaactgtcagacagcgttacccacatcgtggcagaaaataattcacgctctgaagtattggcttggctgaaagaacacaagatggagaagaccaagcaattcgaactgctggatattagctggcttatcgaaagcatgaaagttggtaaaccggtggacaccaaggggaaataccagttggcggaatcgggtgagatgagtgcgaacccagatccgacagagggtcgtgaaaacgagctgcctcctactacgaagaccatttctcagtatgcgtgtcaacgccgcaccaccctgaacaaccataatcaacgttttacggacgcactggaaattcttgcggaaaattacgagttcaaacgcaacgatgatacttgtctgacctttatgcgtgctatttccgtgctgaaatgccttccgtttgaggtagttagcctgaaagacacggaaggattgccctggatcggtgatgaagtcaaagggattatggaagaaatcatcgaggtcggtgaatcgctggaagtgcaggccgtgctcaatgatgagcgctatcaaagcttcaaacgctttaagagtgtctttggagtgggggtgaagacagcagacaaatggtaccgtatgggtctgcgcacgctcgaggatgttcgttccagcaagaccctgaagttgaccccgatgcagaaagcgggtctgtgctattatgaagatcttgctgatggcgttacgaaagccgaagctgacgcgatttctctgctggttcaggatgcagtctggactttcgacccggatgcgctggtggagattacgggtggatttcgtcgtgggaaaccttttggtcacgacgttgatctgcttatcacatctccgggagctgagaaagaacaagaagaccagctcctgcagaaagtgaccaatctgtggaagaaacaagggttgttgctgtacggtcgtctgcgtgaaagtcgctttgaagatgggaaactcccatcccgcaagatcgatgccctggaccattttgcgaaatgctttctgatcctcaaactttataggcataaagtggacaaaagcaaatgggaaatgccgacgggttcgaacgaaagcgaggccaaaagttggaaagcaattcgcgtagatctggttcgttgtccctacgatggttttgcgtttgcgttgttgggttggaccggaagccgcatgttccgccgtgatctgcgccgctacgccacccacgagaagaagatgatgctggacaatcatgcgctgtatgacctgaccaagaaaatctttctcaaagctaaatcggaagaggaaattttcgcacatctggggcttgaatacctggaaccgttcgaacgtaacgca

SEQ ID NO: 1444 - protein, 529 aa, synthetic construct
  REGION 1..529: note = Variant of terminal deoxynucleotidyltransferase
MHHHHHHGGSGSHGIRTIDSDFGKKRQKKMDNHDSSAIYEIKFHEFVLFILEEKMGATRRTFLTDLARKKGFRVENELSDSVTHIVAENNSRSEVLAWLKEHKMEKTKQFELLDISWLIESMKVGKPVDTKGKYQLAESGEMSANPDPTEGRENELPPTTKTISQYACQRRTTLNNHNQRFTDALEILAENYEFKRNDDTCLTFMRAISVLKCLPFEVVSLKDTEGLPWIGDEVKGIMEEIIEVGESLEVQAVLNDERYQSFKRFKSVFGVGVKTADKWYRMGLRTLEDVRSSKTLKLTPMQKAGLCYYEDLADGVTKAEADAISLLVQDAVWTFDPDALVEITGGFRRGKPFGHDVDLLITSPGAEKEQEDQLLQKVTNLWKKQGLLLYGRLRESRFEDGKLPSRKIDALDHFAKCFLILKLYRHKVDKSKWEMPTGSNESEAKSWKAIRVDLVRCPYDGFAFALLGWTGSRMFRRDLRRYATHEKKMMLDNHALYDLTKKIFLKAKSEEEIFAHLGLEYLEPFERNA

SEQ ID NO: 1445 - DNA, 1587 bp, synthetic construct
  misc_feature 1..1587: note = Variant of terminal deoxynucleotidyltransferase
  source 1..1587: mol_type = other DNA
atgcaccatcatcatcatcatggcggtagcggcagccacggcattcgtaccatcgattcggacttcgggaagaaacgccagaagaagatggataaccacgatagttccgccatctatgaaatcaaatttcacgagtttgtgctgttcattctcgaagagaaaatgggtgcgacgcgtcgtacttttctgacagatttagcccgcaagaaagggttccgcgtcgagaatgaactgtcagacagcgttacccacatcgtggcagaaaataattcacgctctgaagtattggcttggctgaaagaacacaagatggagaagaccaagcaattcgaactgctggatattagctggcttatcgaaagcatgaaagttggtaaaccggtggacaccaaggggaaataccagttggcggaatcgggtgagatgagtgcgaacccagatccgacagagggtcgtgaaaacgagctgcctcctactacgaagaccatttctcagtatgcgtgtcaacgccgcaccaccctgaacaaccataatcaacgttttacggacgcactggaaattcttgcggaaaattacgagttcaaacgcaacgatgatacttgtctgacctttatgcgtgctatttccgtgctgaaatgccttccgtttgaggtagttagcctgaaagacacggaaggattgccctggatcggtgatgaagtcaaagggattatggaagaaatcatcgaggtcggtgaatcgctggaagtgcaggccgtgctcaatgatgagcgctatcaaagcttcaaacgctttaagagtgtctttggagtgggggtgaagacagcagacaaatggtaccgtatgggtctgcgcacgctcgaggatgttcgttccagcaagaccctgaagttgaccccgatgcagaaagcgggtctgtgctattatgaagatcttgctgatggcgttacgaaagccgaagctgacgcgatttctctgctggttcaggatgcagtctggactttcgacccggatgcgctggtggagattacgggtggatttcgtcgtgggaaaccttttggtcacgacgttgatctgcttatcacatctccgggagctgagaaagaacaagaagaccagctcctgcagaaagtgaccaatctgtggaagaaacaagggttgttgctgtacggtcgtctgcgtgaaagtcgctttgaagatgggaaactcccatcccgcaagatcgatgccctggaccattttgcgaaatgctttctgatcctcaaactttatcaccataaagtggacaaaagcaaatgggaaatgccgacgggttcgaacgaaagcgaggccaaaagttggaaagcaattcgcgtagatctggttcgttgtccctacgatggttttgcgtttgcgttgttgggttggaccggaagccgcatgttccgccgtgatctgcgccgctacgccacccacgagaagaagatgatgctggacaatcatgcgctgtatgacctgaccaagaaagtttttctcaaagctaaatcggaagaggaaattttcgcacatctggggcttgaatacctggaaccgttcgaacgtaacgca

SEQ ID NO: 1446 - protein, 529 aa, synthetic construct
  REGION 1..529: note = Variant of terminal deoxynucleotidyltransferase
MHHHHHHGGSGSHGIRTIDSDFGKKRQKKMDNHDSSAIYEIKFHEFVLFILEEKMGATRRTFLTDLARKKGFRVENELSDSVTHIVAENNSRSEVLAWLKEHKMEKTKQFELLDISWLIESMKVGKPVDTKGKYQLAESGEMSANPDPTEGRENELPPTTKTISQYACQRRTTLNNHNQRFTDALEILAENYEFKRNDDTCLTFMRAISVLKCLPFEVVSLKDTEGLPWIGDEVKGIMEEIIEVGESLEVQAVLNDERYQSFKRFKSVFGVGVKTADKWYRMGLRTLEDVRSSKTLKLTPMQKAGLCYYEDLADGVTKAEADAISLLVQDAVWTFDPDALVEITGGFRRGKPFGHDVDLLITSPGAEKEQEDQLLQKVTNLWKKQGLLLYGRLRESRFEDGKLPSRKIDALDHFAKCFLILKLYHHKVDKSKWEMPTGSNESEAKSWKAIRVDLVRCPYDGFAFALLGWTGSRMFRRDLRRYATHEKKMMLDNHALYDLTKKVFLKAKSEEEIFAHLGLEYLEPFERNA

SEQ ID NO: 1447 - DNA, 1587 bp, synthetic construct
  misc_feature 1..1587: note = Variant of terminal deoxynucleotidyltransferase
  source 1..1587: mol_type = other DNA
atgcaccatcatcatcatcatggcggtagcggcagccacggcattcgtaccatcgattcggacttcgggaagaaacgccagaagaagatggataaccacgatagttccgccatctatgaaatcaaatttcacgagtttgtgctgttcattctcgaagagaaaatgggtgcgacgcgtcgtacttttctgacagatttagcccgcaagaaagggttccgcgtcgagaatgaactgtcagacagcgttacccacatcgtggcagaaaataattcacgctctgaagtattggcttggctgaaagaacacaagatggagaagaccaagcaattcgaactgctggatattagctggcttatcgaaagcatgaaagttggtaaaccggtggacaccaaggggaaataccagttggcggaatcgggtgagatgagtgcgaacccagatccgacagagggtcgtgaaaacgagctgcctcctactacgaagaccatttctcagtatgcgtgtcaacgccgcaccaccctgaacaaccataatcaacgttttacggacgcactggaaattcttgcggaaaattacgagttcaaacgcaacgatgatacttgtctgacctttatgcgtgctatttccgtgctgaaatgccttccgtttgaggtagttagcctgaaagacacggaaggattgccctggatcggtgatgaagtcaaagggattatggaagaaatcatcgaggtcggtgaatcgctggaagtgcaggccgtgctcaatgatgagcgctatcaaagcttcaaacgctttaagagtgtctttggagtgggggtgaagacagcagacaaatggtaccgtatgggtctgcgcacgctcgaggatgttcgttccagcaagaccctgaagttgaccccgatgcagaaagcgggtctgtgctattatgaagatcttgctgatggcgttacgaaagccgaagctgacgcgatttctctgctggttcaggatgcagtctggactttcgacccggatgcgctggtggagattacgggtggatttcgtcgtgggaaaccttttggtcacgacgttgatctgcttatcacatctccgggagctgagaaaaatcaagaagaccagctcctgcagaaagtgaccaatctgtggaagaaacaagggttgttgctgtacggtcgtctgcgtgaaagtcgctttgaagatgggaaactcccatcccgcaagatcgatgccctggaccattttgcgaaatgctttctgatcctcaaactttatcaccataaagtggacaaaagcaaatgggaaatgccgacgggttcgaacgaaagcgaggccaaaagttggaaagcaattcgcgtagatctggttcgttgtccctacgatggttttgcgtttgcgttgttgggttggaccggaagccgcatgttccgccgtgatctgcgccgctacgccacccacgagaagaagatgatgctggacaatcatgcgctgtatgacctgaccaagaaaatctttctcaaagctaaatcggaagaggaaattttcgcacatctggggcttgaatacctggaaccgttcgaacgtaacgca

SEQ ID NO: 1448 - protein, 529 aa, synthetic construct
  REGION 1..529: note = Variant of terminal deoxynucleotidyltransferase
MHHHHHHGGSGSHGIRTIDSDFGKKRQKKMDNHDSSAIYEIKFHEFVLFILEEKMGATRRTFLTDLARKKGFRVENELSDSVTHIVAENNSRSEVLAWLKEHKMEKTKQFELLDISWLIESMKVGKPVDTKGKYQLAESGEMSANPDPTEGRENELPPTTKTISQYACQRRTTLNNHNQRFTDALEILAENYEFKRNDDTCLTFMRAISVLKCLPFEVVSLKDTEGLPWIGDEVKGIMEEIIEVGESLEVQAVLNDERYQSFKRFKSVFGVGVKTADKWYRMGLRTLEDVRSSKTLKLTPMQKAGLCYYEDLADGVTKAEADAISLLVQDAVWTFDPDALVEITGGFRRGKPFGHDVDLLITSPGAEKNQEDQLLQKVTNLWKKQGLLLYGRLRESRFEDGKLPSRKIDALDHFAKCFLILKLYHHKVDKSKWEMPTGSNESEAKSWKAIRVDLVRCPYDGFAFALLGWTGSRMFRRDLRRYATHEKKMMLDNHALYDLTKKIFLKAKSEEEIFAHLGLEYLEPFERNA

SEQ ID NO: 1449 - DNA, 1587 bp, synthetic construct
  misc_feature 1..1587: note = Variant of terminal deoxynucleotidyltransferase
  source 1..1587: mol_type = other DNA
atgcaccatcatcatcatcatggcggtagcggcagccacggcattcgtaccatcgattcggacttcgggaagaaacgccagaagaagatggataaccacgatagttccgccatctatgaaatcaaatttcacgagtttgtgctgttcattctcgaagagaaaatgggtgcgacgcgtcgtacttttctgacagatttagcccgcaagaaagggttccgcgtcgagaatgaactgtcagacagcgttacccacatcgtggcagaaaataattcacgctctgaagtattggcttggctgaaagaacacaagatggagaagaccaagcaattcgaactgctggatattagctggcttatcgaaagcatgaaagttggtaaaccggtggacaccaaggggaaataccagttggcggaatcgggtgagatgagtgcgaacccagatccgacagagggtcgtgaaaacgagctgcctcctactacgaagaccatttctcagtatgcgtgtcaacgccgcaccaccctgaacaaccataatcaacgttttacggacgcactggaaattcttgcggaaaattacgagttcaaacgcaacgatgatacttgtctgacctttatgcgtgctatttccgtgctgaaatgccttccgtttgaggtagttagcctgaaagacacggaaggattgccctggatcggtgatgaagtcaaagggattatggaagaaatcatcgaggtcggtgaatcgctggaagtgcaggccgtgctcaatgatgagcgctatcaaagcttcaaacgctttaagagtgtctttggagtgggggtgaagacagcagacaaatggtaccgtatgggtctgcgcacgctcgaggatgttcgttccagcaagaccctgaagttgaccccgatgcagaaagcgggtctgtgctattatgaagatcttgctgatggcgttacgaaagccgaagctgacgcgatttctctgctggttcaggatgcagtctggactttcgacccggatgcgctggtggagattacgggtggatttcgtcgtgggaaaccttttggtcacgacgttgatctgcttatcacatctccgggagctgagaaagaacaagaagaccagctcctgcagaaagtgaccaatctgtggaagaaacaagggttgttgctgtacggtcgtctgcgtgaaagtcgctttgaagatgggaaactcccatcccgcaagatcgatgccctggaccattttgcgaaatgctttctgatcctcaaactttatcaccataaagtggacaaaagcaaatgggaaacgccgacgggttcgaacgaaagcgaggccaaaagttggaaagcaattcgcgtagatctggttcgttgtccctacgatggttttgcgtttgcgttgttgggttggaccggaagccgcatgttccgccgtgatctgcgccgctacgccacccacgagaagaagatgatgctggacaatcatgcgctgtatgacctgaccaagaaaatctttctcaaagctaaatcggaagaggaaattttcgcacatctggggcttgaatacctggaaccgttcgaacgtaacgca

SEQ ID NO: 1450 - protein, 529 aa, synthetic construct
  REGION 1..529: note = Variant of terminal deoxynucleotidyltransferase
MHHHHHHGGSGSHGIRTIDSDFGKKRQKKMDNHDSSAIYEIKFHEFVLFILEEKMGATRRTFLTDLARKKGFRVENELSDSVTHIVAENNSRSEVLAWLKEHKMEKTKQFELLDISWLIESMKVGKPVDTKGKYQLAESGEMSANPDPTEGRENELPPTTKTISQYACQRRTTLNNHNQRFTDALEILAENYEFKRNDDTCLTFMRAISVLKCLPFEVVSLKDTEGLPWIGDEVKGIMEEIIEVGESLEVQAVLNDERYQSFKRFKSVFGVGVKTADKWYRMGLRTLEDVRSSKTLKLTPMQKAGLCYYEDLADGVTKAEADAISLLVQDAVWTFDPDALVEITGGFRRGKPFGHDVDLLITSPGAEKEQEDQLLQKVTNLWKKQGLLLYGRLRESRFEDGKLPSRKIDALDHFAKCFLILKLYHHKVDKSKWETPTGSNESEAKSWKAIRVDLVRCPYDGFAFALLGWTGSRMFRRDLRRYATHEKKMMLDNHALYDLTKKIFLKAKSEEEIFAHLGLEYLEPFERNA

SEQ ID NO: 1451 - DNA, 1587 bp, synthetic construct
  misc_feature 1..1587: note = Variant of terminal deoxynucleotidyltransferase
  source 1..1587: mol_type = other DNA
atgcaccatcatcatcatcatggcggtagcggcagccacggcattcgtaccatcgattcggacttcgggaagaaacgccagaagaagatggataaccacgatagttccgccatctatgaaatcaaatttcacgagtttgtgctgttcattctcgaagagaaaatgggtgcgacgcgtcgtacttttctgacagatttagcccgcaagaaagggttccgcgtcgagaatgaactgtcagacagcgttacccacatcgtggcagaaaataattcacgctctgaagtattggcttggctgaaagaacacaagatggagaagaccaagcaattcgaactgctggatattagctggcttatcgaaagcatgaaagttggtaaaccggtggacaccaaggggaaataccagttggcggaatcgggtgagatgagtgcgaacccagatccgacagagggtcgtgaaaacgagctgcctcctactacgaagaccatttctcagtatgcgtgtcaacgccgcaccaccctgaacaaccataatcaacgttttacggacgcactggaaattcttgcggaaaattacgagttcaaacgcaacgatgatacttgtctgacctttatgcgtgctatttccgtgctgaaatgccttccgtttgaggtagttagcctgaaagacacggaaggattgccctggatcggtgatgaagtcaaagggattatggaagaaatcatcgaggtcggtgaatcgctggaagtgcaggccgtgctcaatgatgagcgctatcaaagcttcaaacgctttaagagtgtctttggagtgggggtgaagacagcagacaaatggtaccgtatgggtctgcgcacgctcgaggatgttcgtactagcaagaccctgaagttgaccccgatgcagaaagcgggtctgtgctattatgaagatcttgctgatggcgttacgaaagccgaagctgacgcgatttctctgctggttcaggatgcagtctggactttcgacccggatgcgctggtggagattacgggtggatttcgtcgtgggaaaccttttggtcacgacgttgatctgcttatcacatctccgggagctgagaaagaacaagaagaccagctcctgcagaaagtgaccaatctgtggaagaaacaagggttgttgctgtacggtcgtctgcgtgaaagtcgctttgaagatgggaaactcccatcccgcaagatcgatgccctggaccattttgcgaaatgctttctgatcctcaaactttatcaccataaagtggacaaaagcaaatgggaaatgccgacgggttcgaacgaaagcgaggccaaaagttggaaagcaattcgcgtagatctggttcgttgtccctacgatggttttgcgtttgcgttgttgggttggaccggaagccgcatgttccgccgtgatctgcgccgctacgccacccacgagaagaagatgatgctggacaatcatgcgctgtatgacctgaccaagaaaatctttctcaaagctaaatcggaagaggaaattttcgcacatctggggcttgaatacctggaaccgttcgaacgtaacgca

SEQ ID NO: 1452 - protein, 529 aa, synthetic construct
  REGION 1..529: note = Variant of terminal deoxynucleotidyltransferase
MHHHHHHGGSGSHGIRTIDSDFGKKRQKKMDNHDSSAIYEIKFHEFVLFILEEKMGATRRTFLTDLARKKGFRVENELSDSVTHIVAENNSRSEVLAWLKEHKMEKTKQFELLDISWLIESMKVGKPVDTKGKYQLAESGEMSANPDPTEGRENELPPTTKTISQYACQRRTTLNNHNQRFTDALEILAENYEFKRNDDTCLTFMRAISVLKCLPFEVVSLKDTEGLPWIGDEVKGIMEEIIEVGESLEVQAVLNDERYQSFKRFKSVFGVGVKTADKWYRMGLRTLEDVRTSKTLKLTPMQKAGLCYYEDLADGVTKAEADAISLLVQDAVWTFDPDALVEITGGFRRGKPFGHDVDLLITSPGAEKEQEDQLLQKVTNLWKKQGLLLYGRLRESRFEDGKLPSRKIDALDHFAKCFLILKLYHHKVDKSKWEMPTGSNESEAKSWKAIRVDLVRCPYDGFAFALLGWTGSRMFRRDLRRYATHEKKMMLDNHALYDLTKKIFLKAKSEEEIFAHLGLEYLEPFERNA

SEQ ID NO: 1453 - DNA, 1587 bp, synthetic construct
  misc_feature 1..1587: note = Variant of terminal deoxynucleotidyltransferase
  source 1..1587: mol_type = other DNA
atgcaccatcatcatcatcatggcggtagcggcagccacggcattcgtaccatcgattcggacttcgggaagaaacgccagaagaagatggataaccacgatagttccgccatctatgaaatcaaatttcacgagtttgtgctgttcattctcgaagagaaaatgggtgcgacgcgtcgtacttttctgacagatttagcccgcaagaaagggttccgcgtcgagaatgaactgtcagacagcgttacccacatcgtggcagaaaataattcacgctctgaagtattggcttggctgaaagaacacaagatggagaagaccaagcaattcgaactgctggatattagctggcttatcgaaagcatgaaagttggtaaaccggtggacaccaaggggaaataccagttggcggaatcgggtgagatgagtgcgaacccagatccgacagagggtcgtgaaaacgagctgcctcctactacgaagaccatttctcagtatgcgtgtcaacgccgcaccaccctgaacaaccataatcaacgttttacggacgcactggaaattcttgcggaaaattacgagttcaaacgcaacgatgatacttgtctgacctttatgcgtgctatttccgtgctgaaatgccttccgtttgaggtagttagcctgaaagacacggaaggattgccctggatcggtgatgaagtcaaagggattatggaagaaatcatcgaggtcggtgaatcgctggaagtgcaggccgtgctcaatgatgagcgctatcaaagcttcaaacgctttaagagtgtctttggagtgggggtgaagacagcagacaaatggtaccgtatgggtctgcgcacgctcgaggatgttcgttccagcaagaccctgaagttgaccccgatgcagaaagcgggtctgtgctattatgaagatcttgctgatggcgttacgaaagccgaagctgacgcgatttctctgctggttcaggatgcagtctggactttcgacccggatgcgctggtggagattacgggtggatttcgtcgtgggaaaccttttggtcacgacgttgatctgcttatcacatctccgggagctgagaaagaacaagaagaccagctcctgcagaaagtgaccaatctgtggaagaaacaagggttgttgctgtacggtcgtctgcgtgaaagtcgctttgaagatgggaaactcccatcccgcaagatcgatgccctggaccattttgcgaaatgctttctgatcctcaaactttatcaccataaagtggacaaaagcaaatgggaagctccgacgggttcgaacgaaagcgaggccaaaagttggaaagcaattcgcgtagatctggttcgttgtccctacgatggttttgcgtttgcgttgttgggttggaccggaagccgcatgttccgccgtgatctgcgccgctacgccacccacgagaagaagatgatgctggacaatcatgcgctgtatgacctgaccaagaaaatctttctcaaagctaaatcggaagaggaaattttcgcacatctggggcttgaatacctggaaccgttcgaacgtaacgca

SEQ ID NO: 1454 - protein, 529 aa, synthetic construct
  REGION 1..529: note = Variant of terminal deoxynucleotidyltransferase
MHHHHHHGGSGSHGIRTIDSDFGKKRQKKMDNHDSSAIYEIKFHEFVLFILEEKMGATRRTFLTDLARKKGFRVENELSDSVTHIVAENNSRSEVLAWLKEHKMEKTKQFELLDISWLIESMKVGKPVDTKGKYQLAESGEMSANPDPTEGRENELPPTTKTISQYACQRRTTLNNHNQRFTDALEILAENYEFKRNDDTCLTFMRAISVLKCLPFEVVSLKDTEGLPWIGDEVKGIMEEIIEVGESLEVQAVLNDERYQSFKRFKSVFGVGVKTADKWYRMGLRTLEDVRSSKTLKLTPMQKAGLCYYEDLADGVTKAEADAISLLVQDAVWTFDPDALVEITGGFRRGKPFGHDVDLLITSPGAEKEQEDQLLQKVTNLWKKQGLLLYGRLRESRFEDGKLPSRKIDALDHFAKCFLILKLYHHKVDKSKWEAPTGSNESEAKSWKAIRVDLVRCPYDGFAFALLGWTGSRMFRRDLRRYATHEKKMMLDNHALYDLTKKIFLKAKSEEEIFAHLGLEYLEPFERNA

SEQ ID NO: 1455 - DNA, 1587 bp, synthetic construct
  misc_feature 1..1587: note = Variant of terminal deoxynucleotidyltransferase
  source 1..1587: mol_type = other DNA
atgcaccatcatcatcatcatggcggtagcggcagccacggcattcgtaccatcgattcggacttcgggaagaaacgccagaagaagatggataaccacgatagttccgccatctatgaaatcaaatttcacgagtttgtgctgttcattctcgaagagaaaatgggtgcgacgcgtcgtacttttctgacagatttagcccgcaagaaagggttccgcgtcgagaatgaactgtcagacagcgttacccacatcgtggcagaaaataattcacgctctgaagtattggcttggctgaaagaacacaagatggagaagaccaagcaattcgaactgctggatattagctggcttatcgaaagcatgaaagttggtaaaccggtggacaccaaggggaaataccagttggcggaatcgggtgagatgagtgcgaacccagatccgacagagggtcgtgaaaacgagctgcctcctactacgaagaccatttctcagtatgcgtgtcaacgccgcaccaccctgaacaaccataatcaacgttttacggacgcactggaaattcttgcggaaaattacgagttcaaacgcaacgatgatacttgtctgacctttatgcgtgctatttccgtgctgaaatgccttccgtttgaggtagttagcctgaaagacacggaaggattgccctggatcggtgatgaagtcaaagggattatggaagaaatcatcgaggtcggtgaatcgctggaagtgcaggccgtgctcaatgatgagcgctatcaaagcttcaaacgctttaagagtgtctttggagtgggggtgaagacagcagacaaatggtaccgtatgggtctgcgcacgctcgaggatgttcgttccagcaagaccctgaagttgaccccgatgcagaaagcgggtctgtgctattatgaagatcttgctgatggcgttacgaaagccgaagctgacgcgatttctctgctggttcaggatgcagtctggactttcgacccggatgcgatggtggagattacgggtggatttcgtcgtgggaaaccttttggtcacgacgttgatctgcttatcacatctccgggagctgagaaagaacaagaagaccagctcctgcagaaagtgaccaatctgtggaagaaacaagggttgttgctgtacggtcgtctgcgtgaaagtcgctttgaagatgggaaactcccatcccgcaagatcgatgccctggaccattttgcgaaatgctttctgatcctcaaactttatcaccataaagtggacaaaagcaaatgggaaatgccgacgggttcgaacgaaagcgaggccaaaagttggaaagcaattcgcgtagatctggttcgttgtccctacgatggttttgcgtttgcgttgttgggttggaccggaagccgcatgttccgccgtgatctgcgccgctacgccacccacgagaagaagatgatgctggacaatcatgcgctgtatgacctgaccaagaaaatctttctcaaagctaaatcggaagaggaaattttcgcacatctggggcttgaatacctggaaccgttcgaacgtaacgca

SEQ ID NO: 1456 - protein, 529 aa, synthetic construct
  REGION 1..529: note = Variant of terminal deoxynucleotidyltransferase
MHHHHHHGGSGSHGIRTIDSDFGKKRQKKMDNHDSSAIYEIKFHEFVLFILEEKMGATRRTFLTDLARKKGFRVENELSDSVTHIVAENNSRSEVLAWLKEHKMEKTKQFELLDISWLIESMKVGKPVDTKGKYQLAESGEMSANPDPTEGRENELPPTTKTISQYACQRRTTLNNHNQRFTDALEILAENYEFKRNDDTCLTFMRAISVLKCLPFEVVSLKDTEGLPWIGDEVKGIMEEIIEVGESLEVQAVLNDERYQSFKRFKSVFGVGVKTADKWYRMGLRTLEDVRSSKTLKLTPMQKAGLCYYEDLADGVTKAEADAISLLVQDAVWTFDPDAMVEITGGFRRGKPFGHDVDLLITSPGAEKEQEDQLLQKVTNLWKKQGLLLYGRLRESRFEDGKLPSRKIDALDHFAKCFLILKLYHHKVDKSKWEMPTGSNESEAKSWKAIRVDLVRCPYDGFAFALLGWTGSRMFRRDLRRYATHEKKMMLDNHALYDLTKKIFLKAKSEEEIFAHLGLEYLEPFERNA

SEQ ID NO: 1457 - DNA, 1587 bp, synthetic construct
  misc_feature 1..1587: note = Variant of terminal deoxynucleotidyltransferase
  source 1..1587: mol_type = other DNA
atgcaccatcatcatcatcatggcggtagcggcagccacggcattcgtaccatcgattcggacttcgggaagaaacgccagaagaagatggataaccacgatagttccgccatctatgaaatcaaatttcacgagtttgtgctgttcattctcgaagagaaaatgggtgcgacgcgtcgtacttttctgacagatttagcccgcaagaaagggttccgcgtcgagaatgaactgtcagacagcgttacccacatcgtggcagaaaataattcacgctctgaagtattggcttggctgaaagaacacaagatggagaagaccaagcaattcgaactgctggatattagctggcttatcgaaagcatgaaagttggtaaaccggtggacaccaaggggaaataccagttggcggaatcgggtgagatgagtgcgaacccagatccgacagagggtcgtgaaaacgagctgcctcctactacgaagaccatttctcagtatgcgtgtcaacgccgcaccaccctgaacaaccataatcaacgttttacggacgcactggaaattcttgcggaaaattacgagttcaaacgcaacgatgatacttgtctgacctttatgcgtgctatttccgtgctgaaatgccttccgtttgaggtagttagcctgaaagacacggaaggattgccctggatcggtgatgaagtcaaagggattatggaagaaatcatcgaggtcggtgaatcgctggaagtgcaggccgtgctcaatgatgagcgctatcaaagcttcaaacgctttaagagtgtctttggagtgggggtgaagacagcagacaaatggtaccgtatgggtctgcgcacgctcgaggatgttcgttccagcaagaccctgaagttgaccccgatgcagaaagcgggtctgtgctattatgaagatcttgctgatggcgttacgaaagccgaagctgacgcgatttctctgctggttcaggatgcagtcgatactttcgacccggatgcgctggtggagattacgggtggatttcgtcgtgggaaaccttttggtcacgacgttgatctgcttatcacatctccgggagctgagaaagaacaagaagaccagctcctgcagaaagtgaccaatctgtggaagaaacaagggttgttgctgtacggtcgtctgcgtgaaagtcgctttgaagatgggaaactcccatcccgcaagatcgatgccctggaccattttgcgaaatgctttctgatcctcaaactttatcaccataaagtggacaaaagcaaatgggaaatgccgacgggttcgaacgaaagcgaggccaaaagttggaaagcaattcgcgtagatctggttcgttgtccctacgatggttttgcgtttgcgttgttgggttggaccggaagccgcatgttccgccgtgatctgcgccgctacgccacccacgagaagaagatgatgctggacaatcatgcgctgtatgacctgaccaagaaaatctttctcaaagctaaatcggaagaggaaattttcgcacatctggggcttgaatacctggaaccgttcgaacgtaacgca

SEQ ID NO: 1458 - protein, 529 aa, synthetic construct
  REGION 1..529: note = Variant of terminal deoxynucleotidyltransferase
MHHHHHHGGSGSHGIRTIDSDFGKKRQKKMDNHDSSAIYEIKFHEFVLFILEEKMGATRRTFLTDLARKKGFRVENELSDSVTHIVAENNSRSEVLAWLKEHKMEKTKQFELLDISWLIESMKVGKPVDTKGKYQLAESGEMSANPDPTEGRENELPPTTKTISQYACQRRTTLNNHNQRFTDALEILAENYEFKRNDDTCLTFMRAISVLKCLPFEVVSLKDTEGLPWIGDEVKGIMEEIIEVGESLEVQAVLNDERYQSFKRFKSVFGVGVKTADKWYRMGLRTLEDVRSSKTLKLTPMQKAGLCYYEDLADGVTKAEADAISLLVQDAVDTFDPDALVEITGGFRRGKPFGHDVDLLITSPGAEKEQEDQLLQKVTNLWKKQGLLLYGRLRESRFEDGKLPSRKIDALDHFAKCFLILKLYHHKVDKSKWEMPTGSNESEAKSWKAIRVDLVRCPYDGFAFALLGWTGSRMFRRDLRRYATHEKKMMLDNHALYDLTKKIFLKAKSEEEIFAHLGLEYLEPFERNA

SEQ ID NO: 1459 - DNA, 1587 bp, synthetic construct
  misc_feature 1..1587: note = Variant of terminal deoxynucleotidyltransferase
  source 1..1587: mol_type = other DNA
atgcaccatcatcatcatcatggcggtagcggcagccacggcattcgtaccatcgattcggacttcgggaagaaacgccagaagaagatggataaccacgatagttccgccatctatgaaatcaaatttcacgagtttgtgctgttcattctcgaagagaaaatgggtgcgacgcgtcgtacttttctgacagatttagcccgcaagaaagggttccgcgtcgagaatgaactgtcagacagcgttacccacatcgtggcagaaaataattcacgctctgaagtattggcttggctgaaagaacacaagatggagaagaccaagcaattcgaactgctggatattagctggcttatcgaaagcatgaaagttggtaaaccggtggacaccaaggggaaataccagttggcggaatcgggtgagatgagtgcgaacccagatccgacagagggtcgtgaaaacgagctgcctcctactacgaagaccatttctcagtatgcgtgtcaacgccgcaccaccctgaacaaccataatcaacgttttacggacgcactggaaattcttgcggaaaattacgagttcaaacgcaacgatgatacttgtctgacctttatgcgtgctatttccgtgctgaaatgccttccgtttgaggtagttagcctgaaagacacggaaggattgccctggatcggtgatgaagtcaaagggattatggaagaaatcatcgaggtcggtgaatcgctggaagtgcaggccgtgctcaatgatgagcgctatcaaagcttcaaacgctttaagagtgtctttggagtgggggtgaagacagcagacaaatggtaccgtatgggtctgcgcacgctcgaggatgttcgttccagcaagaccctgaagttgaccccgatgcagaaagcgggtctgtgctattatgaagatcttgctgatggcgttacgaaagccgaagctgacgcgatttctctgctggttcaggatgcagtctggactttcgacccggatgcgctggtggagattacgggtggatttcgtcgtgggaaaccttttggtcacgacgttgatctgcttatcacatctccgggagctgagaaagaacaagaagaccagctcctgcagaaagtgaccaatctgtggaagaaacaagggttgttgctgtacggtcgtctgcgtgaaagtcgctttgaagctgagtttctcccatcccgcaagatcgatgccctggaccattttgcgaaatgctttctgatcctcaaactttatcaccataaagtggacaaaagcaaatgggaaatgccgacgggttcgaacgaaagcgaggccaaaagttggaaagcaattcgcgtagatctggttcgttgtccctacgatggttttgcgtttgcgttgttgggttggaccggaagccgcatgttccgccgtgatctgcgccgctacgccacccacgagaagaagatgatgctggacaatcatgcgctgtatgacctgaccaagaaaatctttctcaaagctaaatcggaagaggaaattttcgcacatctggggcttgaatacctggaaccgttcgaacgtaacgca

SEQ ID NO: 1460 - protein, 529 aa, synthetic construct
  REGION 1..529: note = Variant of terminal deoxynucleotidyltransferase
MHHHHHHGGSGSHGIRTIDSDFGKKRQKKMDNHDSSAIYEIKFHEFVLFILEEKMGATRRTFLTDLARKKGFRVENELSDSVTHIVAENNSRSEVLAWLKEHKMEKTKQFELLDISWLIESMKVGKPVDTKGKYQLAESGEMSANPDPTEGRENELPPTTKTISQYACQRRTTLNNHNQRFTDALEILAENYEFKRNDDTCLTFMRAISVLKCLPFEVVSLKDTEGLPWIGDEVKGIMEEIIEVGESLEVQAVLNDERYQSFKRFKSVFGVGVKTADKWYRMGLRTLEDVRSSKTLKLTPMQKAGLCYYEDLADGVTKAEADAISLLVQDAVWTFDPDALVEITGGFRRGKPFGHDVDLLITSPGAEKEQEDQLLQKVTNLWKKQGLLLYGRLRESRFEAEFLPSRKIDALDHFAKCFLILKLYHHKVDKSKWEMPTGSNESEAKSWKAIRVDLVRCPYDGFAFALLGWTGSRMFRRDLRRYATHEKKMMLDNHALYDLTKKIFLKAKSEEEIFAHLGLEYLEPFERNA

SEQ ID NO: 1461 - DNA, 1587 bp, synthetic construct
  misc_feature 1..1587: note = Variant of terminal deoxynucleotidyltransferase
  source 1..1587: mol_type = other DNA
atgcaccatcatcatcatcatggcggtagcggcagccacggcattcgtaccatcgattcggacttcgggaagaaacgccagaagaagatggataaccacgatagttccgccatctatgaaatcaaatttcacgagtttgtgctgttcattctcgaagagaaaatgggtgcgacgcgtcgtacttttctgacagatttagcccgcaagaaagggttccgcgtcgagaatgaactgtcagacagcgttacccacatcgtggcagaaaataattcacgctctgaagtattggcttggctgaaagaacacaagatggagaagaccaagcaattcgaactgctggatattagctggcttatcgaaagcatgaaagttggtaaaccggtggacaccaaggggaaataccagttggcggaatcgggtgagatgagtgcgaacccagatccgacagagggtcgtgaaaacgagctgcctcctactacgaagaccatttctcagtatgcgtgtcaacgccgcaccaccctgaacaaccataatcaacgttttacggacgcactggaaattcttgcggaaaattacgagttcaaacgcaacgatgatacttgtctgacctttatgcgtgctatttccgtgctgaaatgccttccgtttgaggtagttagcctgaaagacacggaaggattgccctggatcggtgatgaagtcaaagggattatggaagaaatcatcgaggtcggtgaatcgctggaagtgcaggccgtgctcaatgatgagcgctatcaaagcttcaaacgctttaagagtgtctttggagtgggggtgaagacagcagacaaatggtaccgtatgggtctgcgcacgctcgaggatgttcgttccagcaagaccctgaagttgaccccgatgcagaaagcgggtctgtgctattatgaagatcttgctgatggcgttacgaaagccgaagctgacgcgatttctctgctggttcaggatgcagtctggactttcgacccggatgcgctggtggagattacgggtggatttcgtcgtgggaaaccttttggtcacgacgttgatctgcttatcacatctccgggagctgagaaagaacaagaagaccagctcctgcagaaagtgaccaatctgtggaagaaacaagggttgttgctgtacggtcgtctgcgtgaaagtcgctttgaagatgggaaactcccatcccgcaagatcgatgccctggaccattttgcgaaatgctttctgatcctcaaactttatcaccataaagtggacaaaagcaaatgggaaatgccgacgggttcgaacgaaagcgaggccaaaagttggaaagcaattcgcgtagatctggttcgttgtccccaggatggttttgcgtttgcgttgttgggttggaccggaagccgcatgttccgccgtgatctgcgccgctacgccacccacgagaagaagatgatgctggacaatcatgcgctgtatgacctgaccaagaaaatctttctcaaagctaaatcggaagaggaaattttcgcacatctggggcttgaatacctggaaccgttcgaacgtaacgca

SEQ ID NO: 1462 - protein, 529 aa, synthetic construct
  REGION 1..529: note = Variant of terminal deoxynucleotidyltransferase
MHHHHHHGGSGSHGIRTIDSDFGKKRQKKMDNHDSSAIYEIKFHEFVLFILEEKMGATRRTFLTDLARKKGFRVENELSDSVTHIVAENNSRSEVLAWLKEHKMEKTKQFELLDISWLIESMKVGKPVDTKGKYQLAESGEMSANPDPTEGRENELPPTTKTISQYACQRRTTLNNHNQRFTDALEILAENYEFKRNDDTCLTFMRAISVLKCLPFEVVSLKDTEGLPWIGDEVKGIMEEIIEVGESLEVQAVLNDERYQSFKRFKSVFGVGVKTADKWYRMGLRTLEDVRSSKTLKLTPMQKAGLCYYEDLADGVTKAEADAISLLVQDAVWTFDPDALVEITGGFRRGKPFGHDVDLLITSPGAEKEQEDQLLQKVTNLWKKQGLLLYGRLRESRFEDGKLPSRKIDALDHFAKCFLILKLYHHKVDKSKWEMPTGSNESEAKSWKAIRVDLVRCPQDGFAFALLGWTGSRMFRRDLRRYATHEKKMMLDNHALYDLTKKIFLKAKSEEEIFAHLGLEYLEPFERNA

SEQ ID NO: 1463 - DNA, 1587 bp, synthetic construct
  misc_feature 1..1587: note = Variant of terminal deoxynucleotidyltransferase
  source 1..1587: mol_type = other DNA
atgcaccatcatcatcatcatggcggtagcggcagccacggcattcgtaccatcgattcggacttcgggaagaaacgccagaagaagatggataaccacgatagttccgccatctatgaaatcaaatttcacgagtttgtgctgttcattctcgaagagaaaatgggtgcgacgcgtcgtacttttctgacagatttagcccgcaagaaagggttccgcgtcgagaatgaactgtcagacagcgttacccacatcgtggcagaaaataattcacgctctgaagtattggcttggctgaaagaacacaagatggagaagaccaagcaattcgaactgctggatattagctggcttatcgaaagcatgaaagttggtaaaccggtggacaccaaggggaaataccagttggcggaatcgggtgagatgagtgcgaacccagatccgacagagggtcgtgaaaacgagctgcctcctactacgaagaccatttctcagtatgcgtgtcaacgccgcaccaccctgaacaaccataatcaacgttttacggacgcactggaaattcttgcggaaaattacgagttcaaacgcaacgatgatacttgtctgacctttatgcgtgctatttccgtgctgaaatgccttccgtttgaggtagttagcctgaaagacacggaaggattgccctggatcggtgatgaagtcaaagggattatggaagaaatcatcgaggtcggtgaatcgctggaagtgcaggccgtgctcaatgatgagcgctatcaaagcttcaaacgctttaagagtgtctttggagtgggggtgaagacagcagacaaatggtaccgtatgggtctgcgcacgctcgaggatgttcgttccagcaagaccctgaagttgaccccgatgcagaaagcgggtctgtgctattatgaagatcttgctgatggcgttacgaaagccgaagctgacgcgatttctctgctggttcaggatgcagtctggactttcgacccggatgcgctggtggagattacgggtggatttcgtcgtgggaaaccttttggtcacgacgttgatctgcttatcacatctccgggagctgagaaagaacaagaagaccagctcctgcagaaagtgaccaatctgtggaagaaacaagggttgttgctgtacggtcgtctgcgtgaaagtcgctttgaagatgggaaactcccatcccgcaagatcgatgccctggaccattttgcgaaatgctttctgatcctcaaactttatcaccataaagtggacaaaagcaaatgggaaaagccgacgggttcgaacgaaagcgaggccaaaagttggaaagcaattcgcgtagatctggttcgttgtccctacgatggttttgcgtttgcgttgttgggttggaccggaagccgcatgttccgccgtgatctgcgccgctacgccacccacgagaagaagatgatgctggacaatcatgcgctgtatgacctgaccaagaaaatctttctcaaagctaaatcggaagaggaaattttcgcacatctggggcttgaatacctggaaccgttcgaacgtaacgca

SEQ ID NO: 1464 - protein, 529 aa, synthetic construct
  REGION 1..529: note = Variant of terminal deoxynucleotidyltransferase
MHHHHHHGGSGSHGIRTIDSDFGKKRQKKMDNHDSSAIYEIKFHEFVLFILEEKMGATRRTFLTDLARKKGFRVENELSDSVTHIVAENNSRSEVLAWLKEHKMEKTKQFELLDISWLIESMKVGKPVDTKGKYQLAESGEMSANPDPTEGRENELPPTTKTISQYACQRRTTLNNHNQRFTDALEILAENYEFKRNDDTCLTFMRAISVLKCLPFEVVSLKDTEGLPWIGDEVKGIMEEIIEVGESLEVQAVLNDERYQSFKRFKSVFGVGVKTADKWYRMGLRTLEDVRSSKTLKLTPMQKAGLCYYEDLADGVTKAEADAISLLVQDAVWTFDPDALVEITGGFRRGKPFGHDVDLLITSPGAEKEQEDQLLQKVTNLWKKQGLLLYGRLRESRFEDGKLPSRKIDALDHFAKCFLILKLYHHKVDKSKWEKPTGSNESEAKSWKAIRVDLVRCPYDGFAFALLGWTGSRMFRRDLRRYATHEKKMMLDNHALYDLTKKIFLKAKSEEEIFAHLGLEYLEPFERNA

SEQ ID NO: 1465 - DNA, 1587 bp, synthetic construct
  misc_feature 1..1587: note = Variant of terminal deoxynucleotidyltransferase
  source 1..1587: mol_type = other DNA
atgcaccatcatcatcatcatggcggtagcggcagccacggcattcgtaccatcgattcggacttcgggaagaaacgccagaagaagatggataaccacgatagttccgccatctatgaaatcaaatttcacgagtttgtgctgttcattctcgaagagaaaatgggtgcgacgcgtcgtacttttctgacagatttagcccgcaagaaagggttccgcgtcgagaatgaactgtcagacagcgttacccacatcgtggcagaaaataattcacgctctgaagtattggcttggctgaaagaacacaagatggagaagaccaagcaattcgaactgctggatattagctggcttatcgaaagcatgaaagttggtaaaccggtggacaccaaggggaaataccagttggcggaatcgggtgagatgagtgcgaacccagatccgacagagggtcgtgaaaacgagctgcctcctactacgaagaccatttctcagtatgcgtgtcaacgccgcaccaccctgaacaaccataatcaacgttttacggacgcactggaaattcttgcggaaaattacgagttcaaacgcaacgatgatacttgtctgacctttatgcgtgctatttccgtgctgaaatgccttccgtttgaggtagttagcctgaaagacacggaaggattgccctggatcggtgatgaagtcaaagggattatggaagaaatcatcgaggtcggtgaatcgctggaagtgcaggccgtgctcaatgatgagcgctatcaaagcttcaaacgctttaagagtgtctttggagtgggggtgaagacagcagacaaatggtaccgtatgggtctgcgcacgctcgaggatgttcgttccagcaagaccctgaagttgaccccgatgcagaaagcgggtctgtgctattatgaagatcttgctgatggcgttacgaaagccgaagctgacgcgatttctctgctggttcaggatgcagtctggactttcgacccggatgcgctggtggagattacgggtggatttcgtcgtgggaaaccttttggtcacgacgttgatctgcttatcacatctccgggagctgagaaagaacaagaagacaatctcctgcagaaagtgaccaatctgtggaagaaacaagggttgttgctgtacggtcgtctgcgtgaaagtcgctttgaagatgggaaactcccatcccgcaagatcgatgccctggaccattttgcgaaatgctttctgatcctcaaactttatcaccataaagtggacaaaagcaaatgggaaatgccgacgggttcgaacgaaagcgaggccaaaagttggaaagcaattcgcgtagatctggttcgttgtccctacgatggttttgcgtttgcgttgttgggttggaccggaagccgcatgttccgccgtgatctgcgccgctacgccacccacgagaagaagatgatgctggacaatcatgcgctgtatgacctgaccaagaaaatctttctcaaagctaaatcggaagaggaaattttcgcacatctggggcttgaatacctggaaccgttcgaacgtaacgca

SEQ ID NO: 1466 - protein, 529 aa, synthetic construct
  REGION 1..529: note = Variant of terminal deoxynucleotidyltransferase
MHHHHHHGGSGSHGIRTIDSDFGKKRQKKMDNHDSSAIYEIKFHEFVLFILEEKMGATRRTFLTDLARKKGFRVENELSDSVTHIVAENNSRSEVLAWLKEHKMEKTKQFELLDISWLIESMKVGKPVDTKGKYQLAESGEMSANPDPTEGRENELPPTTKTISQYACQRRTTLNNHNQRFTDALEILAENYEFKRNDDTCLTFMRAISVLKCLPFEVVSLKDTEGLPWIGDEVKGIMEEIIEVGESLEVQAVLNDERYQSFKRFKSVFGVGVKTADKWYRMGLRTLEDVRSSKTLKLTPMQKAGLCYYEDLADGVTKAEADAISLLVQDAVWTFDPDALVEITGGFRRGKPFGHDVDLLITSPGAEKEQEDNLLQKVTNLWKKQGLLLYGRLRESRFEDGKLPSRKIDALDHFAKCFLILKLYHHKVDKSKWEMPTGSNESEAKSWKAIRVDLVRCPYDGFAFALLGWTGSRMFRRDLRRYATHEKKMMLDNHALYDLTKKIFLKAKSEEEIFAHLGLEYLEPFERNA

SEQ ID NO: 1467 - DNA, 1587 bp, synthetic construct
  misc_feature 1..1587: note = Variant of terminal deoxynucleotidyltransferase
  source 1..1587: mol_type = other DNA
atgcaccatcatcatcatcatggcggtagcggcagccacggcattcgtaccatcgattcggacttcgggaagaaacgccagaagaagatggataaccacgatagttccgccatctatgaaatcaaatttcacgagtttgtgctgttcattctcgaagagaaaatgggtgcgacgcgtcgtacttttctgacagatttagcccgcaagaaagggttccgcgtcgagaatgaactgtcagacagcgttacccacatcgtggcagaaaataattcacgctctgaagtattggcttggctgaaagaacacaagatggagaagaccaagcaattcgaactgctggatattagctggcttatcgaaagcatgaaagttggtaaaccggtggacaccaaggggaaataccagttggcggaatcgggtgagatgagtgcgaacccagatccgacagagggtcgtgaaaacgagctgcctcctacttcgaagaccatttctcagtatgcgtgtcaacgccgcaccaccctgaacaaccataatcaacgttttacggacgcactggaaattcttgcggaaaattacgagttcaaacgcaacgatgatacttgtctgacctttatgcgtgctatttccgtgctgaaatgccttccgtttgaggtagttagcctgaaagacacggaaggattgccctggatcggtgatgaagtcaaagggattatggaagaaatcatcgaggtcggtgaatcgctggaagtgcaggccgtgctcaatgatgagcgctatcaaagcttcaaacgctttaagagtgtctttggagtgggggtgaagacagcagacaaatggtaccgtatgggtctgcgcacgctcgaggatgttcgttccagcaagaccctgaagttgaccccgatgcagaaagcgggtctgtgctattatgaagatcttgctgatggcgttacgaaagccgaagctgacgcgatttctctgctggttcaggatgcagtctggactttcgacccggatgcgctggtggagattacgggtggatttcgtcgtgggaaaccttttggtcacgacgttgatctgcttatcacatctccgggagctgagaaagaacaagaagaccagctcctgcagaaagtgaccaatctgtggaagaaacaagggttgttgctgtacggtcgtctgcgtgaaagtcgctttgaagatgggaaactcccatcccgcaagatcgatgccctggaccattttgcgaaatgctttctgatcctcaaactttatcaccataaagtggacaaaagcaaatgggaaatgccgacgggttcgaacgaaagcgaggccaaaagttggaaagcaattcgcgtagatctggttcgttgtccctacgatggttttgcgtttgcgttgttgggttggaccggaagccgcatgttccgccgtgatctgcgccgctacgccacccacgagaagaagatgatgctggacaatcatgcgctgtatgacctgaccaagaaaatctttctcaaagctaaatcggaagaggaaattttcgcacatctggggcttgaatacctggaaccgttcgaacgtaacgca

SEQ ID NO: 1468 - protein, 529 aa, synthetic construct
  REGION 1..529: note = Variant of terminal deoxynucleotidyltransferase
MHHHHHHGGSGSHGIRTIDSDFGKKRQKKMDNHDSSAIYEIKFHEFVLFILEEKMGATRRTFLTDLARKKGFRVENELSDSVTHIVAENNSRSEVLAWLKEHKMEKTKQFELLDISWLIESMKVGKPVDTKGKYQLAESGEMSANPDPTEGRENELPPTSKTISQYACQRRTTLNNHNQRFTDALEILAENYEFKRNDDTCLTFMRAISVLKCLPFEVVSLKDTEGLPWIGDEVKGIMEEIIEVGESLEVQAVLNDERYQSFKRFKSVFGVGVKTADKWYRMGLRTLEDVRSSKTLKLTPMQKAGLCYYEDLADGVTKAEADAISLLVQDAVWTFDPDALVEITGGFRRGKPFGHDVDLLITSPGAEKEQEDQLLQKVTNLWKKQGLLLYGRLRESRFEDGKLPSRKIDALDHFAKCFLILKLYHHKVDKSKWEMPTGSNESEAKSWKAIRVDLVRCPYDGFAFALLGWTGSRMFRRDLRRYATHEKKMMLDNHALYDLTKKIFLKAKSEEEIFAHLGLEYLEPFERNA

SEQ ID NO: 1469 - DNA, 1587 bp, synthetic construct
  misc_feature 1..1587: note = Variant of terminal deoxynucleotidyltransferase
  source 1..1587: mol_type = other DNA
atgcaccatcatcatcatcatggcggtagcggcagccacggcattcgtaccatcgattcggacttcgggaagaaacgccagaagaagatggataaccacgatagttccgccatctatgaaatcaaatttcacgagtttgtgctgttcattctcgaagagaaaatgggtgcgacgcgtcgtacttttctgacagatttagcccgcaagaaagggttccgcgtcgagaatgaactgtcagacagcgttacccacatcgtggcagaaaataattcacgctctgaagtattggcttggctgaaagaacacaagatggagaagaccaagcaattcgaactgctggatattagctggcttatcgaaagcatgaaagttggtaaaccggtggacaccaaggggaaataccagttggcggaatcgggtgagatgagtgcgaacccagatccgacagagggtcgtgaaaacgagctgcctcctactacgaagaccatttctcagtatgcgtgtcaacgccgcaccaccctgaacaaccataatcaacgttttacggacgcactggaaattcttgcggaaaattacgagttcaaacgcaacgatgatacttgtctgacctttatgcgtgctatttccgtgctgaaatgccttccgtttcaggtagttagcctgaaagacacggaaggattgccctggatcggtgatgaagtcaaagggattatggaagaaatcatcgaggtcggtgaatcgctggaagtgcaggccgtgctcaatgatgagcgctatcaaagcttcaaacgctttaagagtgtctttggagtgggggtgaagacagcagacaaatggtaccgtatgggtctgcgcacgctcgaggatgttcgttccagcaagaccctgaagttgaccccgatgcagaaagcgggtctgtgctattatgaagatcttgctgatggcgttacgaaagccgaagctgacgcgatttctctgctggttcaggatgcagtctggactttcgacccggatgcgctggtggagattacgggtggatttcgtcgtgggaaaccttttggtcacgacgttgatctgcttatcacatctccgggagctgagaaagaacaagaagaccagctcctgcagaaagtgaccaatctgtggaagaaacaagggttgttgctgtacggtcgtctgcgtgaaagtcgctttgaagatgggaaactcccatcccgcaagatcgatgccctggaccattttgcgaaatgctttctgatcctcaaactttatcaccataaagtggacaaaagcaaatgggaaatgccgacgggttcgaacgaaagcgaggccaaaagttggaaagcaattcgcgtagatctggttcgttgtccctacgatggttttgcgtttgcgttgttgggttggaccggaagccgcatgttccgccgtgatctgcgccgctacgccacccacgagaagaagatgatgctggacaatcatgcgctgtatgacctgaccaagaaaatctttctcaaagctaaatcggaagaggaaattttcgcacatctggggcttgaatacctggaaccgttcgaacgtaacgca

SEQ ID NO: 1470 - protein, 529 aa, synthetic construct
  REGION 1..529: note = Variant of terminal deoxynucleotidyltransferase
MHHHHHHGGSGSHGIRTIDSDFGKKRQKKMDNHDSSAIYEIKFHEFVLFILEEKMGATRRTFLTDLARKKGFRVENELSDSVTHIVAENNSRSEVLAWLKEHKMEKTKQFELLDISWLIESMKVGKPVDTKGKYQLAESGEMSANPDPTEGRENELPPTTKTISQYACQRRTTLNNHNQRFTDALEILAENYEFKRNDDTCLTFMRAISVLKCLPFQVVSLKDTEGLPWIGDEVKGIMEEIIEVGESLEVQAVLNDERYQSFKRFKSVFGVGVKTADKWYRMGLRTLEDVRSSKTLKLTPMQKAGLCYYEDLADGVTKAEADAISLLVQDAVWTFDPDALVEITGGFRRGKPFGHDVDLLITSPGAEKEQEDQLLQKVTNLWKKQGLLLYGRLRESRFEDGKLPSRKIDALDHFAKCFLILKLYHHKVDKSKWEMPTGSNESEAKSWKAIRVDLVRCPYDGFAFALLGWTGSRMFRRDLRRYATHEKKMMLDNHALYDLTKKIFLKAKSEEEIFAHLGLEYLEPFERNA

SEQ ID NO: 1471 - DNA, 1587 bp, synthetic construct
  misc_feature 1..1587: note = Variant of terminal deoxynucleotidyltransferase
  source 1..1587: mol_type = other DNA
atgcaccatcatcatcatcatggcggtagcggcagccacggcattcgtaccatcgattcggacttcgggaagaaacgccagaagaagatggataaccacgatagttccgccatctatgaaatcaaatttcacgagtttgtgctgttcattctcgaagagaaaatgggtgcgacgcgtcgtacttttctgacagatttagcccgcaagaaagggttccgcgtcgagaatgaactgtcagacagcgttacccacatcgtggcagaaaataattcacgctctgaagtattggcttggctgaaagaacacaagatggagaagaccaagcaattcgaactgctggatattagctggcttatcgaaagcatgaaagttggtaaaccggtggacaccaaggggaaataccagttggcggaatcgggtgagatgagtgcgaacccagatccgacagagggtcgtgaaaacgagctgcctcctactacgaagaccatttctcagtatgcgtgtcaacgccgcaccaccctgaacaaccataatcaacgttttacggacgcactggaaattcttgcggaaaattacgagttcaaacgcaacgatgatacttgtctgacctttatgcgtgctatttccgtgctgaaatgccttccgtttgaggtagttagcctgaaagacacggaaggattgccctggatcggtgatgaagtcaaagggattatggaagaaatcatcgaggtcggtgaatcgctggaagtgcaggccgtgctcaatgatgagcgctatcaaagcttcaaacgctttaagagtgtctttggagtgggggtgaagacagcagacaaatggtaccgtatgggtctgcgcacgctcgaggatgttcgttccagcaagaccctgaagttgaccccgatgcagaaagcgggtctgtgctattatgaagatcttgctgatggcgttacgaaagccgaagctgacgcgatttctctgctggttcaggatgcagtctggactttcgacccggatgcgctggtggagattacgggtggatttcgtcgtgggaaaccttttggtcacgacgttgatctgcttatcacatctccgggagctgagaaagaacaagaagaccagctcctgcagaaagtgaccaatctgtggaagaaacaagggttgttgctgtacggtcgtctgcgtgaaagtcgctttgaagatgggaaactcccatcccgcaagatcgatgccctggaccattttgcgaaatgctttctgatcctcaaactttatcaccataaagtggacaaaagcaaatgggaaatgccgacgggttcgaacgaaagcgaggccaaaagttggaaagcaattcgcgtagatctggttcgttgtccctacgatggttttgcgtttgcgttgttgggttggaccggaagccgcatgttccgccgtgatctgcgccgctacgccacccacgagaagaagatggtgctggacaatcatgcgctgtatgacctgaccaagaaaatctttctcaaagctaaatcggaagaggaaattttcgcacatctggggcttgaatacctggaaccgttcgaacgtaacgca

SEQ ID NO: 1472 - protein, 529 aa, synthetic construct
  REGION 1..529: note = Variant of terminal deoxynucleotidyltransferase
MHHHHHHGGSGSHGIRTIDSDFGKKRQKKMDNHDSSAIYEIKFHEFVLFILEEKMGATRRTFLTDLARKKGFRVENELSDSVTHIVAENNSRSEVLAWLKEHKMEKTKQFELLDISWLIESMKVGKPVDTKGKYQLAESGEMSANPDPTEGRENELPPTTKTISQYACQRRTTLNNHNQRFTDALEILAENYEFKRNDDTCLTFMRAISVLKCLPFEVVSLKDTEGLPWIGDEVKGIMEEIIEVGESLEVQAVLNDERYQSFKRFKSVFGVGVKTADKWYRMGLRTLEDVRSSKTLKLTPMQKAGLCYYEDLADGVTKAEADAISLLVQDAVWTFDPDALVEITGGFRRGKPFGHDVDLLITSPGAEKEQEDQLLQKVTNLWKKQGLLLYGRLRESRFEDGKLPSRKIDALDHFAKCFLILKLYHHKVDKSKWEMPTGSNESEAKSWKAIRVDLVRCPYDGFAFALLGWTGSRMFRRDLRRYATHEKKMVLDNHALYDLTKKIFLKAKSEEEIFAHLGLEYLEPFERNA

SEQ ID NO: 1473 - DNA, 1587 bp, synthetic construct
  misc_feature 1..1587: note = Variant of terminal deoxynucleotidyltransferase
  source 1..1587: mol_type = other DNA
atgcaccatcatcatcatcatggcggtagcggcagccacggcattcgtaccatcgattcggacttcgggaagaaacgccagaagaagatggataaccacgatagttccgccatctatgaaatcaaatttcacgagtttgtgctgttcattctcgaagagaaaatgggtgcgacgcgtcgtacttttctgacagatttagcccgcaagaaagggttccgcgtcgagaatgaactgtcagacagcgttacccacatcgtggcagaaaataattcacgctctgaagtattggcttggctgaaagaacacaagatggagaagaccaagcaattcgaactgctggatattagctggcttatcgaaagcatgaaagttggtaaaccggtggacaccaaggggaaataccagttggcggaatcgggtgagatgagtgcgaacccagatccgacagagggtcgtgaaaacgagctgcctcctactacgaagaccatttctcagtatgcgtgtcaacgccgcaccaccctgaacaaccataatcaacgttttacggacgcactggaaattcttgcggaaaattacgagttcaaacgcaacgatgatacttgtctgacctttatgcgtgctatttccgtgctgaaatgccttccgtttgaggtagttagcctgaaagacacggaaggattgccctggatcggtgatgaagtcaaagggattatggaagaaatcatcgaggtcggtgaatcgctggaagtgcaggccgtgctcaatgatgagcgctatcaaagcttcaaacgctttaagagtgtctttggagtgggggtgaagacagcagacaaatggtaccgtatgggtctgcgcacgctcgaggatgttcgttccagcaagaccctgaagttgaccccgatgcagaaagcgggtctgtgctattatgaagatcttgctgatggcgttacgaaagccgaagctgacgcgatttctctgctggttcaggatgcagtctggactttcgacccggatgcgctggtggagattacgggtggatttcgtcgtgggaaaccttttggtcacgacgttgatctgcttatcacatctccgggagctgagaaagaacaagaagaccagctcctgcagaaagtgaccaatctgtggaagaaacaagggttgttgctgtacggtcgtctgcgtgaaagtcgctttgaagatgggaaactcccatcccgcaagatcgatgccctggaccattttgcgaaatgctttctgatcctcaaactttatcaccatcaggtggacaaaagcaaatgggaaatgccgacgggttcgaacgaaagcgaggccaaaagttggaaagcaattcgcgtagatctggttcgttgtccctacgatggttttgcgtttgcgttgttgggttggaccggaagccgcatgttccgccgtgatctgcgccgctacgccacccacgagaagaagatgatgctggacaatcatgcgctgtatgacctgaccaagaaaatctttctcaaagctaaatcggaagaggaaattttcgcacatctggggcttgaatacctggaaccgttcgaacgtaacgca

SEQ ID NO: 1474 - protein, 529 aa, synthetic construct
  REGION 1..529: note = Variant of terminal deoxynucleotidyltransferase
MHHHHHHGGSGSHGIRTIDSDFGKKRQKKMDNHDSSAIYEIKFHEFVLFILEEKMGATRRTFLTDLARKKGFRVENELSDSVTHIVAENNSRSEVLAWLKEHKMEKTKQFELLDISWLIESMKVGKPVDTKGKYQLAESGEMSANPDPTEGRENELPPTTKTISQYACQRRTTLNNHNQRFTDALEILAENYEFKRNDDTCLTFMRAISVLKCLPFEVVSLKDTEGLPWIGDEVKGIMEEIIEVGESLEVQAVLNDERYQSFKRFKSVFGVGVKTADKWYRMGLRTLEDVRSSKTLKLTPMQKAGLCYYEDLADGVTKAEADAISLLVQDAVWTFDPDALVEITGGFRRGKPFGHDVDLLITSPGAEKEQEDQLLQKVTNLWKKQGLLLYGRLRESRFEDGKLPSRKIDALDHFAKCFLILKLYHHQVDKSKWEMPTGSNESEAKSWKAIRVDLVRCPYDGFAFALLGWTGSRMFRRDLRRYATHEKKMMLDNHALYDLTKKIFLKAKSEEEIFAHLGLEYLEPFERNA

SEQ ID NO: 1475 - DNA, 1587 bp, synthetic construct
  misc_feature 1..1587: note = Variant of terminal deoxynucleotidyltransferase
  source 1..1587: mol_type = other DNA
atgcaccatcatcatcatcatggcggtagcggcagccacggcattcgtaccatcgattcggacttcgggaagaaacgccagaagaagatggataaccacgatagttccgccatctatgaaatcaaatttcacgagtttgtgctgttcattctcgaagagaaaatgggtgcgacgcgtcgtacttttctgacagatttagcccgcaagaaagggttccgcgtcgagaatgaactgtcagacagcgttacccacatcgtggcagaaaataattcacgctctgaagtattggcttggctgaaagaacacaagatggagaagaccaagcaattcgaactgctggatattagctggcttatcgaaagcatgaaagttggtaaaccggtggacaccaaggggaaataccagttggcggaatcgggtgagatgagtgcgaacccagatccgacagagggtcgtgaaaacgagctgcctcctactacgaagaccatttctcagtatgcgtgtcaacgccgcaccaccctgaacaaccataatcaacgttttacggacgcactggaaattcttgcggaaaattacgagttcaaacgcaacgatgatacttgtctgacctttatgcgtgctatttccgtgctgaaatgccttccgtttgaggtagttagcctgaaagacacggaaggattgccctggatcggtgatgaagtcaaagggattatggaagaaatcatcgaggtcggtgaatcgctggaagtgcaggccgtgctcaatgatgagcgctatcaaagcttcaaacgctttaagagtgtctttggagtgggggtgaagacagcagacaaatggtaccgtatgggtctgcgcacgctcgaggatgttcgttccagcaagaccctgaagttgaccccgatgcagaaagcgggtctgtgctattatgaagatcttgctgatggcgttacgaaagccgaagctgacgcgatttctctgctggttcaggatgcagtctggactttcgacccggatgcgctggtggagattacgggtggatttcgtcgtgggaaaccttttggtcacgacgttgatctgcttatcacatctccgggagctgagaaaatgcaagaagaccagctcctgcagaaagtgaccaatctgtggaagaaacaagggttgttgctgtacggtcgtctgcgtgaaagtcgctttgaagatgggaaactcccatcccgcaagatcgatgccctggaccattttgcgaaatgctttctgatcctcaaactttatcaccataaagtggacaaaagcaaatgggaaatgccgacgggttcgaacgaaagcgaggccaaaagttggaaagcaattcgcgtagatctggttcgttgtccctacgatggttttgcgtttgcgttgttgggttggaccggaagccgcatgttccgccgtgatctgcgccgctacgccacccacgagaagaagatgatgctggacaatcatgcgctgtatgacctgaccaagaaaatctttctcaaagctaaatcggaagaggaaattttcgcacatctggggcttgaatacctggaaccgttcgaacgtaacgca

SEQ ID NO: 1476 - protein, 529 aa, synthetic construct
  REGION 1..529: note = Variant of terminal deoxynucleotidyltransferase
MHHHHHHGGSGSHGIRTIDSDFGKKRQKKMDNHDSSAIYEIKFHEFVLFILEEKMGATRRTFLTDLARKKGFRVENELSDSVTHIVAENNSRSEVLAWLKEHKMEKTKQFELLDISWLIESMKVGKPVDTKGKYQLAESGEMSANPDPTEGRENELPPTTKTISQYACQRRTTLNNHNQRFTDALEILAENYEFKRNDDTCLTFMRAISVLKCLPFEVVSLKDTEGLPWIGDEVKGIMEEIIEVGESLEVQAVLNDERYQSFKRFKSVFGVGVKTADKWYRMGLRTLEDVRSSKTLKLTPMQKAGLCYYEDLADGVTKAEADAISLLVQDAVWTFDPDALVEITGGFRRGKPFGHDVDLLITSPGAEKMQEDQLLQKVTNLWKKQGLLLYGRLRESRFEDGKLPSRKIDALDHFAKCFLILKLYHHKVDKSKWEMPTGSNESEAKSWKAIRVDLVRCPYDGFAFALLGWTGSRMFRRDLRRYATHEKKMMLDNHALYDLTKKIFLKAKSEEEIFAHLGLEYLEPFERNA

SEQ ID NO: 1477 - DNA, 1587 bp, synthetic construct
  misc_feature 1..1587: note = Variant of terminal deoxynucleotidyltransferase
  source 1..1587: mol_type = other DNA
atgcaccatcatcatcatcatggcggtagcggcagccacggcattcgtaccatcgattcggacttcgggaagaaacgccagaagaagatggataaccacgatagttccgccatctatgaaatcaaatttcacgagtttgtgctgttcattctcgaagagaaaatgggtgcgacgcgtcgtacttttctgacagatttagcccgcaagaaagggttccgcgtcgagaatgaactgtcagacagcgttacccacatcgtggcagaaaataattcacgctctgaagtattggcttggctgaaagaacacaagatggagaagaccaagcaattcgaactgctggatattagctggcttatcgaaagcatgaaagttggtaaaccggtggacaccaaggggaaataccagttggcggaatcgggtgagatgagtgcgaacccagatccgacagagggtcgtgaaaacgagctgcctcctactacgaagaccatttctcagtatgcgtgtcaacgccgcaccaccctgaacaaccataatcaacgttttacggacgcactggaaattcttgcggaaaattacgagttcaaacgcaacgatgatacttgtctgacctttatgcgtgctatttccgtgctgaaatgccttccgtttgaggtagttagcctgaaagacacggaaggattgccctggatcggtgatgaagtcaaagggattatggaagaaatcatcgaggtcggtgaatcgctggaagtgcaggccgtgctcaatgatgagcgctatcaaagcttcaaacgctttaagagtgtctttggagtgggggtgaagacagcagacaaatggtaccgtatgggtctgcgcacgctcgaggatgttcgttccagcaagaccctgaagttgaccccgatgcagaaagcgggtctgtgctattatgaagatcttgctgatggcgttacgaaagccgaagctgacgcgatttctctgctggttcaggatgcagtctggactttcgacccggatgcgctggtggagattacgggtggatttcgtcgtgggaaaccttttggtcacgacgttgatctgcttatcacatctccgggagctgagaaagaacaagaagaccagctcctgcagaaagtgaccaatctgtggaagaaacaagggttgttgctgtacggtcgtctgcgtgaaagtcgctttgaagatgggaaactcccatcccgcaagatcgatgccctggaccattttgcgaaatgctttctgatcctcaaactttatcaccataaagtggacaaaagcaaatgggaagagccgacgggttcgaacgaaagcgaggccaaaagttggaaagcaattcgcgtagatctggttcgttgtccctacgatggttttgcgtttgcgttgttgggttggaccggaagccgcatgttccgccgtgatctgcgccgctacgccacccacgagaagaagatgatgctggacaatcatgcgctgtatgacctgaccaagaaaatctttctcaaagctaaatcggaagaggaaattttcgcacatctggggcttgaatacctggaaccgttcgaacgtaacgca

SEQ ID NO: 1478 - protein, 529 aa, synthetic construct
  REGION 1..529: note = Variant of terminal deoxynucleotidyltransferase
MHHHHHHGGSGSHGIRTIDSDFGKKRQKKMDNHDSSAIYEIKFHEFVLFILEEKMGATRRTFLTDLARKKGFRVENELSDSVTHIVAENNSRSEVLAWLKEHKMEKTKQFELLDISWLIESMKVGKPVDTKGKYQLAESGEMSANPDPTEGRENELPPTTKTISQYACQRRTTLNNHNQRFTDALEILAENYEFKRNDDTCLTFMRAISVLKCLPFEVVSLKDTEGLPWIGDEVKGIMEEIIEVGESLEVQAVLNDERYQSFKRFKSVFGVGVKTADKWYRMGLRTLEDVRSSKTLKLTPMQKAGLCYYEDLADGVTKAEADAISLLVQDAVWTFDPDALVEITGGFRRGKPFGHDVDLLITSPGAEKEQEDQLLQKVTNLWKKQGLLLYGRLRESRFEDGKLPSRKIDALDHFAKCFLILKLYHHKVDKSKWEEPTGSNESEAKSWKAIRVDLVRCPYDGFAFALLGWTGSRMFRRDLRRYATHEKKMMLDNHALYDLTKKIFLKAKSEEEIFAHLGLEYLEPFERNA

SEQ ID NO: 1479 - DNA, 1587 bp, synthetic construct
  misc_feature 1..1587: note = Variant of terminal deoxynucleotidyltransferase
  source 1..1587: mol_type = other DNA
atgcaccatcatcatcatcatggcggtagcggcagccacggcattcgtaccatcgattcggacttcgggaagaaacgccagaagaagatggataaccacgatagttccgccatctatgaaatcaaatttcacgagtttgtgctgttcattctcgaagagaaaatgggtgcgacgcgtcgtacttttctgacagatttagcccgcaagaaagggttccgcgtcgagaatgaactgtcagacagcgttacccacatcgtggcagaaaataattcacgctctgaagtattggcttggctgaaagaacacaagatggagaagaccaagcaattcgaactgctggatattagctggcttatcgaaagcatgaaagttggtaaaccggtggacaccaaggggaaataccagttggcggaatcgggtgagatgagtgcgaacccagatccgacagagggtcgtgaaaacgagctgcctcctactacgaagaccatttctcagtatgcgtgtcaacgccgcaccaccctgaacaaccataatcaacgttttacggacgcactggaaattcttgcggaaaattacgagttcaaacgcaacgatgatacttgtctgacctttatgcgtgctatttccgtgctgaaatgccttccgtttgaggtagttagcctgaaagacacggaaggattgccctggatcggtgatgaagtcaaagggattatggaagaaatcatcgaggtcggtgaatcgctggaagtgcaggccgtgctcaatgatgagcgctatcaaagcttcaaacgctttaagagtgtctttggagtgggggtgaagacagcagacaaatggtaccgtatgggtctgcgcacgctcgaggatgttcgttccagcaagaccctgaagttgaccccgatgcagaaagcgggtctgtgctattatgaagatcttgctgatggcgttacgaaagccgaagctgacgcgatttctctgctggttcaggatgcagtctggactttcgacccggatgcgctggtggagattacgggtggatttcgtcgtgggaaaccttttggtcacgacgttgatctgcttatcacatctccgggagctgagaaagaacaagaagaccagctcctgcagaaagtgaccaatctgtggaagaaacaagggttgttgctgtacggtcgtctgcgtgaaagtcgctttgaagatgggaaactcccatcccgcaagatcgatgccctggaccattttgcgaaatgctttctgatcctcaaactttatcaccataaagtggacaaaagcaaatgggaatctccgacgggttcgaacgaaagcgaggccaaaagttggaaagcaattcgcgtagatctggttcgttgtccctacgatggttttgcgtttgcgttgttgggttggaccggaagccgcatgttccgccgtgatctgcgccgctacgccacccacgagaagaagatgatgctggacaatcatgcgctgtatgacctgaccaagaaaatctttctcaaagctaaatcggaagaggaaattttcgcacatctggggcttgaatacctggaaccgttcgaacgtaacgca

SEQ ID NO: 1480 - protein, 529 aa, synthetic construct
  REGION 1..529: note = Variant of terminal deoxynucleotidyltransferase
MHHHHHHGGSGSHGIRTIDSDFGKKRQKKMDNHDSSAIYEIKFHEFVLFILEEKMGATRRTFLTDLARKKGFRVENELSDSVTHIVAENNSRSEVLAWLKEHKMEKTKQFELLDISWLIESMKVGKPVDTKGKYQLAESGEMSANPDPTEGRENELPPTTKTISQYACQRRTTLNNHNQRFTDALEILAENYEFKRNDDTCLTFMRAISVLKCLPFEVVSLKDTEGLPWIGDEVKGIMEEIIEVGESLEVQAVLNDERYQSFKRFKSVFGVGVKTADKWYRMGLRTLEDVRSSKTLKLTPMQKAGLCYYEDLADGVTKAEADAISLLVQDAVWTFDPDALVEITGGFRRGKPFGHDVDLLITSPGAEKEQEDQLLQKVTNLWKKQGLLLYGRLRESRFEDGKLPSRKIDALDHFAKCFLILKLYHHKVDKSKWESPTGSNESEAKSWKAIRVDLVRCPYDGFAFALLGWTGSRMFRRDLRRYATHEKKMMLDNHALYDLTKKIFLKAKSEEEIFAHLGLEYLEPFERNA

SEQ ID NO: 1481 - DNA, 1587 bp, synthetic construct
  misc_feature 1..1587: note = Variant of terminal deoxynucleotidyltransferase
  source 1..1587: mol_type = other DNA
atgcaccatcatcatcatcatggcggtagcggcagccacggcattcgtaccatcgattcggacttcgggaagaaacgccagaagaagatggataaccacgatagttccgccatctatgaaatcaaatttcacgagtttgtgctgttcattctcgaagagaaaatgggtgcgacgcgtcgtgcttttctgacagatttagcccgcaagaaagggttccgcgtcgagaatgaactgtcagacagcgttacccacatcgtggcagaaaataattcacgctctgaagtattggcttggctgaaagaacacaagatggagaagaccaagcaattcgaactgctggatattagctggcttatcgaaagcatgaaagttggtaaaccggtggacaccaaggggaaataccagttggcggaatcgggtgagatgagtgcgaacccagatccgacagagggtcgtgaaaacgagctgcctcctactacgaagaccatttctcagtatgcgtgtcaacgccgcaccaccctgaacaaccataatcaacgttttacggacgcactggaaattcttgcggaaaattacgagttcaaacgcaacgatgatacttgtctgacctttatgcgtgctatttccgtgctgaaatgccttccgtttgaggtagttagcctgaaagacacggaaggattgccctggatcggtgatgaagtcaaagggattatggaagaaatcatcgaggtcggtgaatcgctggaagtgcaggccgtgctcaatgatgagcgctatcaaagcttcaaacgctttaagagtgtctttggagtgggggtgaagacagcagacaaatggtaccgtatgggtctgcgcacgctcgaggatgttcgttccagcaagaccctgaagttgaccccgatgcagaaagcgggtctgtgctattatgaagatcttgctgatggcgttacgaaagccgaagctgacgcgatttctttgctggttcaggatgcagtctggactttcgacccggatgcgctggtggagattacgggtggatttcgtcgtgggaaaccttttggtcacgacgttgatctgcttatcacatctccgggagctgagaaagaacaagaagaccagctcctgcagaaagtgaccaatctgtggaagaaacaagggttgttgctgtacggtcgtctgcgtgaaagtcgctttgaagatgggaaactcccatcccgcaagatcgatgccctggaccattttgcgaaatgctttctgatcctcaaactttatcaccataaagtggacaaaagcaaatgggaaatgccgacgggttcgaacgaaagcgaggccaaaagttggaaagcaattcgcgtagatctggttcgttgtccctacgatggttttgcgtttgcgttgttgggttggaccggaagccgcatgttccgccgtgatctgcgccgctacgccacccacgagaagaagatgatgctggacaatcatgcgctgtatgacctgaccaagaaaatctttctcaaagctaaatcggaagaggaaattttcgcacatctggggcttgaatacctggaaccgttcgaacgtaacgca

SEQ ID NO: 1482 - protein, 529 aa, synthetic construct
  REGION 1..529: note = Variant of terminal deoxynucleotidyltransferase
MHHHHHHGGSGSHGIRTIDSDFGKKRQKKMDNHDSSAIYEIKFHEFVLFILEEKMGATRRAFLTDLARKKGFRVENELSDSVTHIVAENNSRSEVLAWLKEHKMEKTKQFELLDISWLIESMKVGKPVDTKGKYQLAESGEMSANPDPTEGRENELPPTTKTISQYACQRRTTLNNHNQRFTDALEILAENYEFKRNDDTCLTFMRAISVLKCLPFEVVSLKDTEGLPWIGDEVKGIMEEIIEVGESLEVQAVLNDERYQSFKRFKSVFGVGVKTADKWYRMGLRTLEDVRSSKTLKLTPMQKAGLCYYEDLADGVTKAEADAISLLVQDAVWTFDPDALVEITGGFRRGKPFGHDVDLLITSPGAEKEQEDQLLQKVTNLWKKQGLLLYGRLRESRFEDGKLPSRKIDALDHFAKCFLILKLYHHKVDKSKWEMPTGSNESEAKSWKAIRVDLVRCPYDGFAFALLGWTGSRMFRRDLRRYATHEKKMMLDNHALYDLTKKIFLKAKSEEEIFAHLGLEYLEPFERNA

SEQ ID NO: 1483 - DNA, 1587 bp, synthetic construct
  misc_feature 1..1587: note = Variant of terminal deoxynucleotidyltransferase
  source 1..1587: mol_type = other DNA
atgcaccatcatcatcatcatggcggtagcggcagccacggcattcgtaccatcgattcggacttcgggaagaaacgccagaagaagatggataaccacgatagttccgccatctatgaaatcaaatttcacgagtttgtgctgttcattctcgaagagaaaatgggtgcgacgcgtcgtacttttctgacagatttagcccgcaagaaagggttccgcgtcgagaatgaactgtcagacagcgttacccacatcgtggcagaaaataattcacgctctgaagtattggcttggctgaaagaacacaagatggagaagaccaagcaattcgaactgctggatattagctggcttatcgaaagcatgaaagttggtaaaccggtggacaccaaggggaaataccagttggcggaatcgggtgagatgagtgcgaacccagatccgacagagggtcgtgaaaacgagctgcctcctactaataagaccatttctcagtatgcgtgtcaacgccgcaccaccctgaacaaccataatcaacgttttacggacgcactggaaattcttgcggaaaattacgagttcaaacgcaacgatgatacttgtctgacctttatgcgtgctatttccgtgctgaaatgccttccgtttgaggtagttagcctgaaagacacggaaggattgccctggatcggtgatgaagtcaaagggattatggaagaaatcatcgaggtcggtgaatcgctggaagtgcaggccgtgctcaatgatgagcgctatcaaagcttcaaacgctttaagagtgtctttggagtgggggtgaagacagcagacaaatggtaccgtatgggtctgcgcacgctcgaggatgttcgttccagcaagaccctgaagttgaccccgatgcagaaagcgggtctgtgctattatgaagatcttgctgatggcgttacgaaagccgaagctgacgcgatttctctgctggttcaggatgcagtctggactttcgacccggatgcgctggtggagattacgggtggatttcgtcgtgggaaaccttttggtcacgacgttgatctgcttatcacatctccgggagctgagaaagaacaagaagaccagctcctgcagaaagtgaccaatctgtggaagaaacaagggttgttgctgtacggtcgtctgcgtgaaagtcgctttgaagatgggaaactcccatcccgcaagatcgatgccctggaccattttgcgaaatgctttctgatcctcaaactttatcaccataaagtggacaaaagcaaatgggaaatgccgacgggttcgaacgaaagcgaggccaaaagttggaaagcaattcgcgtagatctggttcgttgtccctacgatggttttgcgtttgcgttgttgggttggaccggaagccgcatgttccgccgtgatctgcgccgctacgccacccacgagaagaagatgatgctggacaatcatgcgctgtatgacctgaccaagaaaatctttctcaaagctaaatcggaagaggaaattttcgcacatctggggcttgaatacctggaaccgttcgaacgtaacgca

SEQ ID NO: 1484 - protein, 529 aa, synthetic construct
  REGION 1..529: note = Variant of terminal deoxynucleotidyltransferase
MHHHHHHGGSGSHGIRTIDSDFGKKRQKKMDNHDSSAIYEIKFHEFVLFILEEKMGATRRTFLTDLARKKGFRVENELSDSVTHIVAENNSRSEVLAWLKEHKMEKTKQFELLDISWLIESMKVGKPVDTKGKYQLAESGEMSANPDPTEGRENELPPTNKTISQYACQRRTTLNNHNQRFTDALEILAENYEFKRNDDTCLTFMRAISVLKCLPFEVVSLKDTEGLPWIGDEVKGIMEEIIEVGESLEVQAVLNDERYQSFKRFKSVFGVGVKTADKWYRMGLRTLEDVRSSKTLKLTPMQKAGLCYYEDLADGVTKAEADAISLLVQDAVWTFDPDALVEITGGFRRGKPFGHDVDLLITSPGAEKEQEDQLLQKVTNLWKKQGLLLYGRLRESRFEDGKLPSRKIDALDHFAKCFLILKLYHHKVDKSKWEMPTGSNESEAKSWKAIRVDLVRCPYDGFAFALLGWTGSRMFRRDLRRYATHEKKMMLDNHALYDLTKKIFLKAKSEEEIFAHLGLEYLEPFERNA

SEQ ID NO: 1485 - DNA, 1587 bp, synthetic construct
  misc_feature 1..1587: note = Variant of terminal deoxynucleotidyltransferase
  source 1..1587: mol_type = other DNA
atgcaccatcatcatcatcatggcggtagcggcagccacggcattcgtaccatcgattcggacttcgggaagaaacgccagaagaagatggataaccacgatagttccgccatctatgaaatcaaatttcacgagtttgtgctgttcattctcgaagagaaaatgggtgcgacgcgtcgtacttttctgacagatttagcccgcaagaaagggttccgcgtcgagaatgaactgtcagacagcgttacccacatcgtggcagaaaataattcacgctctgaagtattggcttggctgaaagaacacaagatggagaagaccaagcaattcgaactgctggatattagctggcttatcgaaagcatgaaagttggtaaaccggtggacaccaaggggaaataccagttggcggaatcgggtgagatgagtgcgaacccagatccgacagagggtcgtgaaaacgagctgcctcctactacgaagaccatttctcagtatgcgtgtcaacgccgcaccaccctgaacaaccataatcaacgttttacggacgcactggaaattcttgcggaaaattacgagttcaaacgcaacgatgatacttgtctgacctttatgcgtgctatttccgtgctgaaatgccttccgtttgaggtagttagcctgaaagacacggaaggattgccctggatcggtgatgaagtcaaagggattatggaagaaatcatcgaggtcggtgaatcgctggaagtgcaggccgtgctcaatgatgagcgctatcaaagcttcaaacgctttaagagtgtctttggagtgggggtgaagacagcagacaaatggtaccgtatgggtctgcgcacgctcgaggatgttcgttccagcaagaccctgaagttgaccccgatgcagaaagcgggtctgtgctattatgaagatcttgctgatggcgttacgaaagccgaagctgacgcgatttctctgctggttcaggatgcagtctggactttcgacccggatgcgctggtggagattacgggtggatttcgtcgtgggaaaccttttggtcacgacgttgatctgcttatcacatctccgggagctgagaaagaacaagaagaccagctcctgcagaaagtgaccaatctgtggaagaaacaagggttgttgctgtacggtcgtctgcgtgaaagtcgctttgaagatgggaaactcccatcccgcaagatcgatgccctggaccattttgcgaaatgctttctgatcctcaaactttatcaccataaagtggacaaaagcaaatgggaaatgccgacgggttcgaacgaaagcgaggccaaaagttggaaagcaattcgcgtagatctggttcgttgtccctacgatggttttgcgtttgcgttgttgggttggaccggaagccgcatgttccgccgtgatctgcgccgctacgccacccacgagaagaagatgatgctggacaatcatgcgctgtatgacctgaccaagaaaatctggctcaaagctaaatcggaagaggaaattttcgcacatctggggcttgaatacctggaaccgttcgaacgtaacgca

SEQ ID NO: 1486 - protein, 529 aa, synthetic construct
  REGION 1..529: note = Variant of terminal deoxynucleotidyltransferase
MHHHHHHGGSGSHGIRTIDSDFGKKRQKKMDNHDSSAIYEIKFHEFVLFILEEKMGATRRTFLTDLARKKGFRVENELSDSVTHIVAENNSRSEVLAWLKEHKMEKTKQFELLDISWLIESMKVGKPVDTKGKYQLAESGEMSANPDPTEGRENELPPTTKTISQYACQRRTTLNNHNQRFTDALEILAENYEFKRNDDTCLTFMRAISVLKCLPFEVVSLKDTEGLPWIGDEVKGIMEEIIEVGESLEVQAVLNDERYQSFKRFKSVFGVGVKTADKWYRMGLRTLEDVRSSKTLKLTPMQKAGLCYYEDLADGVTKAEADAISLLVQDAVWTFDPDALVEITGGFRRGKPFGHDVDLLITSPGAEKEQEDQLLQKVTNLWKKQGLLLYGRLRESRFEDGKLPSRKIDALDHFAKCFLILKLYHHKVDKSKWEMPTGSNESEAKSWKAIRVDLVRCPYDGFAFALLGWTGSRMFRRDLRRYATHEKKMMLDNHALYDLTKKIWLKAKSEEEIFAHLGLEYLEPFERNA

SEQ ID NO: 1487 - DNA, 1587 bp, synthetic construct
  misc_feature 1..1587: note = Variant of terminal deoxynucleotidyltransferase
  source 1..1587: mol_type = other DNA
atgcaccatcatcatcatcatggcggtagcggcagccacggcattcgtaccatcgattcggacttcgggaagaaacgccagaagaagatggataaccacgatagttccgccatctatgaaatcaaatttcacgagtttgtgctgttcattctcgaagagaaaatgggtgcgacgcgtcgtacttttctgacagatttagcccgcaagaaagggttccgcgtcgagaatgaactgtcagacagcgttacccacatcgtggcagaaaataattcacgctctgaagtattggcttggctgaaagaacacaagatggagaagaccaagcaattcgaactgctggatattagctggcttatcgaaagcatgaaagttggtaaaccggtggacaccaaggggaaataccagttggcggaatcgggtgagatgagtgcgaacccagatccgacagagggtcgtgaaaacgagctgcctcctactacgaagaccatttctcagtatgcgtgtcaacgccgcaccaccctgaacaaccataatcaacgttttacggacgcactggaaattcttgcggaaaattacgagttcaaacgcaacgatgatacttgtctgacctttatgcgtgctatttccgtgctgaaatgccttccgtttgaggtagttagcctgaaagacacggaaggattgccctggatcggtgatgaagtcaaagggattatggaagaaatcatcgaggtcggtgaatcgctggaagtgcaggccgtgctcaatgatgagcgctatcaaagcttcaaacgctttaagagtgtctttggagtgggggtgaagacagcagacaaatggtaccgtatgggtctgcgcacgctcgaggatgttcgttccagcaagaccctgaagttgaccccgatgcagaaagcgggtctgtgctattatgaagatcttgctgatggcgttacgaaagccgaagctgacgcgatttctctgctggttcaggatgcagtctggactttcgacccggatgcgctggtggagattacgggtggatttcgtcgtgggaaaccttttggtcacgacgttgatctgcttatcacatctccgggagctgagaaagaacaagaagaccagctcctgcagaaagtgaccaatctgtggaagaaacaagggttgttgctgtacggtcgtctgcgtgaaagtcgctttgaagatgggaaactcccatcccgcaagatcgatgccctggaccattttgcgaaatgctttctgatcctcaaactttatcaccataaagtggacaaaagcaaatgggaaatgccgacgggttcgaacgaaagcgagcggaaaagttggaaagcaattcgcgtagatctggttcgttgtccctacgatggttttgcgtttgcgttgttgggttggaccggaagccgcatgttccgccgtgatctgcgccgctacgccacccacgagaagaagatgatgctggacaatcatgcgctgtatgacctgaccaagaaaatctttctcaaagctaaatcggaagaggaaattttcgcacatctggggcttgaatacctggaaccgttcgaacgtaacgca

SEQ ID NO: 1488 - protein, 529 aa, synthetic construct
  REGION 1..529: note = Variant of terminal deoxynucleotidyltransferase
MHHHHHHGGSGSHGIRTIDSDFGKKRQKKMDNHDSSAIYEIKFHEFVLFILEEKMGATRRTFLTDLARKKGFRVENELSDSVTHIVAENNSRSEVLAWLKEHKMEKTKQFELLDISWLIESMKVGKPVDTKGKYQLAESGEMSANPDPTEGRENELPPTTKTISQYACQRRTTLNNHNQRFTDALEILAENYEFKRNDDTCLTFMRAISVLKCLPFEVVSLKDTEGLPWIGDEVKGIMEEIIEVGESLEVQAVLNDERYQSFKRFKSVFGVGVKTADKWYRMGLRTLEDVRSSKTLKLTPMQKAGLCYYEDLADGVTKAEADAISLLVQDAVWTFDPDALVEITGGFRRGKPFGHDVDLLITSPGAEKEQEDQLLQKVTNLWKKQGLLLYGRLRESRFEDGKLPSRKIDALDHFAKCFLILKLYHHKVDKSKWEMPTGSNESERKSWKAIRVDLVRCPYDGFAFALLGWTGSRMFRRDLRRYATHEKKMMLDNHALYDLTKKIFLKAKSEEEIFAHLGLEYLEPFERNA

SEQ ID NO: 1489 - DNA, 1587 bp, synthetic construct
  misc_feature 1..1587: note = Variant of terminal deoxynucleotidyltransferase
  source 1..1587: mol_type = other DNA
atgcaccatcatcatcatcatggcggtagcggcagccacggcattcgtaccatcgattcggacttcgggaagaaacgccagaagaagatggataaccacgatagttccgccatctatgaaatcaaatttcacgagtttgtgctgttcattctcgaagagaaaatgggtgcgacgcgtcgtacttttctgacagatttagcccgcaagaaagggttccgcgtcgagaatgaactgtcagacagcgttacccacatcgtggcagaaaataattcacgctctgaagtattggcttggctgaaagaacacaagatggagaagaccaagcaattcgaactgctggatattagctggcttatcgaaagcatgaaagttggtaaaccggtggacaccaaggggaaataccagttggcggaatcgggtgagatgagtgcgaacccagatccgacagagggtcgtgaaaacgagctgcctcctactacgaaggcgatttctcagtatgcgtgtcaacgccgcaccaccctgaacaaccataatcaacgttttacggacgcactggaaattcttgcggaaaattacgagttcaaacgcaacgatgatacttgtctgacctttatgcgtgctatttccgtgctgaaatgccttccgtttgaggtagttagcctgaaagacacggaaggattgccctggatcggtgatgaagtcaaagggattatggaagaaatcatcgaggtcggtgaatcgctggaagtgcaggccgtgctcaatgatgagcgctatcaaagcttcaaacgctttaagagtgtctttggagtgggggtgaagacagcagacaaatggtaccgtatgggtctgcgcacgctcgaggatgttcgttccagcaagaccctgaagttgaccccgatgcagaaagcgggtctgtgctattatgaagatcttgctgatggcgttacgaaagccgaagctgacgcgatttctctgctggttcaggatgcagtctggactttcgacccggatgcgctggtggagattacgggtggatttcgtcgtgggaaaccttttggtcacgacgttgatctgcttatcacatctccgggagctgagaaagaacaagaagaccagctcctgcagaaagtgaccaatctgtggaagaaacaagggttgttgctgtacggtcgtctgcgtgaaagtcgctttgaagatgggaaactcccatcccgcaagatcgatgccctggaccattttgcgaaatgctttctgatcctcaaactttatcaccataaagtggacaaaagcaaatgggaaatgccgacgggttcgaacgaaagcgaggccaaaagttggaaagcaattcgcgtagatctggttcgttgtccctacgatggttttgcgtttgcgttgttgggttggaccggaagccgcatgttccgccgtgatctgcgccgctacgccacccacgagaagaagatgatgctggacaatcatgcgctgtatgacctgaccaagaaaatctttctcaaagctaaatcggaagaggaaattttcgcacatctggggcttgaatacctggaaccgttcgaacgtaacgca

SEQ ID NO: 1490 - protein, 529 aa, synthetic construct
  REGION 1..529: note = Variant of terminal deoxynucleotidyltransferase
MHHHHHHGGSGSHGIRTIDSDFGKKRQKKMDNHDSSAIYEIKFHEFVLFILEEKMGATRRTFLTDLARKKGFRVENELSDSVTHIVAENNSRSEVLAWLKEHKMEKTKQFELLDISWLIESMKVGKPVDTKGKYQLAESGEMSANPDPTEGRENELPPTTKAISQYACQRRTTLNNHNQRFTDALEILAENYEFKRNDDTCLTFMRAISVLKCLPFEVVSLKDTEGLPWIGDEVKGIMEEIIEVGESLEVQAVLNDERYQSFKRFKSVFGVGVKTADKWYRMGLRTLEDVRSSKTLKLTPMQKAGLCYYEDLADGVTKAEADAISLLVQDAVWTFDPDALVEITGGFRRGKPFGHDVDLLITSPGAEKEQEDQLLQKVTNLWKKQGLLLYGRLRESRFEDGKLPSRKIDALDHFAKCFLILKLYHHKVDKSKWEMPTGSNESEAKSWKAIRVDLVRCPYDGFAFALLGWTGSRMFRRDLRRYATHEKKMMLDNHALYDLTKKIFLKAKSEEEIFAHLGLEYLEPFERNA

SEQ ID NO: 1491 - DNA, 1587 bp, synthetic construct
  misc_feature 1..1587: note = Variant of terminal deoxynucleotidyltransferase
  source 1..1587: mol_type = other DNA
atgcaccatcatcatcatcatggcggtagcggcagccacggcattcgtaccatcgattcggacttcgggaagaaacgccagaagaagatggataaccacgatagttccgccatctatgaaatcaaatttcacgagtttgtgctgttcattctcgaagagaaaatgggtgcgacgcgtcgtacttttctgacagatttagcccgcaagaaagggttccgcgtcgagaatgaactgtcagacagcgttacccacatcgtggcagaaaataattcacgctctgaagtattggcttggctgaaagaacacaagatggagaagaccaagcaattcgaactgctggatattagctggcttatcgaaagcatgaaagttggtaaaccggtggacaccaaggggaaataccagttggcggaatcgggtgagatgagtgcgaacccagatccgacagagggtcgtgaaaacgagctgcctcctactacgaagaccatttctcagtatgcgtgtcaacgccgcaccaccctgaacaaccataatcaacgttttacggacgcactggaaattcttgcggaaaattacgagttcaaacgcaacgatgatacttgtctgacctttatgcgtgctatttccgtgctgaaatcgcttccgtttgaggtagttagcctgaaagacacggaaggattgccctggatcggtgatgaagtcaaagggattatggaagaaatcatcgaggtcggtgaatcgctggaagtgcaggccgtgctcaatgatgagcgctatcaaagcttcaaacgctttaagagtgtctttggagtgggggtgaagacagcagacaaatggtaccgtatgggtctgcgcacgctcgaggatgttcgttccagcaagaccctgaagttgaccccgatgcagaaagcgggtctgtgctattatgaagatcttgctgatggcgttacgaaagccgaagctgacgcgatttctctgctggttcaggatgcagtctggactttcgacccggatgcgctggtggagattacgggtggatttcgtcgtgggaaaccttttggtcacgacgttgatctgcttatcacatctccgggagctgagaaagaacaagaagaccagctcctgcagaaagtgaccaatctgtggaagaaacaagggttgttgctgtacggtcgtctgcgtgaaagtcgctttgaagatgggaaactcccatcccgcaagatcgatgccctggaccattttgcgaaatgctttctgatcctcaaactttatcaccataaagtggacaaaagcaaatgggaaatgccgacgggttcgaacgaaagcgaggccaaaagttggaaagcaattcgcgtagatctggttcgttgtccctacgatggttttgcgtttgcgttgttgggttggaccggaagccgcatgttccgccgtgatctgcgccgctacgccacccacgagaagaagatgatgctggacaatcatgcgctgtatgacctgaccaagaaaatctttctcaaagctaaatcggaagaggaaattttcgcacatctggggcttgaatacctggaaccgttcgaacgtaacgca

SEQ ID NO: 1492 - protein, 529 aa, synthetic construct
  REGION 1..529: note = Variant of terminal deoxynucleotidyltransferase
MHHHHHHGGSGSHGIRTIDSDFGKKRQKKMDNHDSSAIYEIKFHEFVLFILEEKMGATRRTFLTDLARKKGFRVENELSDSVTHIVAENNSRSEVLAWLKEHKMEKTKQFELLDISWLIESMKVGKPVDTKGKYQLAESGEMSANPDPTEGRENELPPTTKTISQYACQRRTTLNNHNQRFTDALEILAENYEFKRNDDTCLTFMRAISVLKSLPFEVVSLKDTEGLPWIGDEVKGIMEEIIEVGESLEVQAVLNDERYQSFKRFKSVFGVGVKTADKWYRMGLRTLEDVRSSKTLKLTPMQKAGLCYYEDLADGVTKAEADAISLLVQDAVWTFDPDALVEITGGFRRGKPFGHDVDLLITSPGAEKEQEDQLLQKVTNLWKKQGLLLYGRLRESRFEDGKLPSRKIDALDHFAKCFLILKLYHHKVDKSKWEMPTGSNESEAKSWKAIRVDLVRCPYDGFAFALLGWTGSRMFRRDLRRYATHEKKMMLDNHALYDLTKKIFLKAKSEEEIFAHLGLEYLEPFERNA

SEQ ID NO: 1493 - DNA, 1587 bp, synthetic construct
  misc_feature 1..1587: note = Variant of terminal deoxynucleotidyltransferase
  source 1..1587: mol_type = other DNA
atgcaccatcatcatcatcatggcggtagcggcagccacggcattcgtaccatcgattcggacttcgggaagaaacgccagaagaagatggataaccacgatagttccgccatctatgaaatcaaatttcacgagtttgtgctgttcattctcgaagagaaaatgggtgcgacgcgtcgtacttttctgacagatttagcccgcaagaaagggttccgcgtcgagaatgaactgtcagacagcgttacccacatcgtggcagaaaataattcacgctctgaagtattggcttggctgaaagaacacaagatggagaagaccaagcaattcgaactgctggatattagctggcttatcgaaagcatgaaagttggtaaaccggtggacaccaaggggaaataccagttggcggaatcgggtgagatgagtgcgaacccagatccgacagagggtcgtgaaaacgagctgcctcctactacgaagaccatttctcagtatgcgtgtcaacgccgcaccaccctgaacaaccataatcaacgttttacggacgcactggaaattcttgcggaaaattacgagttcaaacgcaacgatgatacttgtctgacctttatgcgtgctatttccgtgctgaaatgccttccgtttgaggtagttagcctgaaagacacggaaggattgccctggatcggtgatgaagtcaaagggattatggaagaaatcatcgaggtcggtgaatcgctggaagtgcaggccgtgctcaatgatgagcgctatcaaagcttcaaacgctttaagagtgtctttggagtgggggtgaagacagcagacaaatggtaccgtatgggtctgcgcacgctcgaggatgttcgttccagcaagaccctgaagttgaccccgatgcagaaagcgggtctgtgctattatgaagatcttgctgatggcgttacgaaagccgaagctgacgcgatttcttgtctggttcaggatgcagtctggactttcgacccggatgcgctggtggagattacgggtggatttcgtcgtgggaaaccttttggtcacgacgttgatctgcttatcacatctccgggagctgagaaagaacaagaagaccagctcctgcagaaagtgaccaatctgtggaagaaacaagggttgttgctgtacggtcgtctgcgtgaaagtcgctttgaagatgggaaactcccatcccgcaagatcgatgccctggaccattttgcgaaatgctttctgatcctcaaactttatcaccataaagtggacaaaagcaaatgggaaatgccgacgggttcgaacgaaagcgaggccaaaagttggaaagcaattcgcgtagatctggttcgttgtccctacgatggttttgcgtttgcgttgttgggttggaccggaagccgcatgttccgccgtgatctgcgccgctacgccacccacgagaagaagatgatgctggacaatcatgcgctgtatgacctgaccaagaaaatctttctcaaagctaaatcggaagaggaaattttcgcacatctggggcttgaatacctggaaccgttcgaacgtaacgca

SEQ ID NO: 1494 - protein, 529 aa, synthetic construct
  REGION 1..529: note = Variant of terminal deoxynucleotidyltransferase
MHHHHHHGGSGSHGIRTIDSDFGKKRQKKMDNHDSSAIYEIKFHEFVLFILEEKMGATRRTFLTDLARKKGFRVENELSDSVTHIVAENNSRSEVLAWLKEHKMEKTKQFELLDISWLIESMKVGKPVDTKGKYQLAESGEMSANPDPTEGRENELPPTTKTISQYACQRRTTLNNHNQRFTDALEILAENYEFKRNDDTCLTFMRAISVLKCLPFEVVSLKDTEGLPWIGDEVKGIMEEIIEVGESLEVQAVLNDERYQSFKRFKSVFGVGVKTADKWYRMGLRTLEDVRSSKTLKLTPMQKAGLCYYEDLADGVTKAEADAISCLVQDAVWTFDPDALVEITGGFRRGKPFGHDVDLLITSPGAEKEQEDQLLQKVTNLWKKQGLLLYGRLRESRFEDGKLPSRKIDALDHFAKCFLILKLYHHKVDKSKWEMPTGSNESEAKSWKAIRVDLVRCPYDGFAFALLGWTGSRMFRRDLRRYATHEKKMMLDNHALYDLTKKIFLKAKSEEEIFAHLGLEYLEPFERNA

SEQ ID NO: 1495 - DNA, 1587 bp, synthetic construct
  misc_feature 1..1587: note = Variant of terminal deoxynucleotidyltransferase
  source 1..1587: mol_type = other DNA
atgcaccatcatcatcatcatggcggtagcggcagccacggcattcgtaccatcgattcggacttcgggaagaaacgccagaagaagatggataaccacgatagttccgccatctatgaaatcaaatttcacgagtttgtgctgttcattctcgaagagaaaatgggtgcgacgcgtcgtacttttctgacagatttagcccgcaagaaagggttccgcgtcgagaatgaactgtcagacagcgttacccacatcgtggcagaaaataattcacgctctgaagtattggcttggctgaaagaacacaagatggagaagaccaagcaattcgaactgctggatattagctggcttatcgaaagcatgaaagttggtaaaccggtggacaccaaggggaaataccagttggcggaatcgggtgagatgagtgcgaacccagatccgacagagggtcgtgaaaacgagctgcctcctactacgaagaccatttctcagtatgcgtgtcaacgccgcaccaccctgaacaaccataatcaacgttttacggacgcactggaaattcttgcggaaaattacgagttcaaacgcaacgatgatacttgtctgacctttatgcgtgctatttccgtgctgaaatgccttccgtttgaggtagttagcctgaaagacacggaaggattgccctggatcggtgatgaagtcaaagggattatggaagaaatcatcgaggtcggtgaatcgctggaagtgcaggccgtgctcaatgatgagcgctatcaaagcttcaaacgctttaagagtgtctttggagtgggggtgaagacagcagacaaatggtaccgtatgggtctgcgcacgctcgaggatgttcgttccagcaagaccctgaagttgaccccgatgcagaaagcgggtctgtgctattatgaagatcttgctgatggcgttacgaaagccgaagctgacgcgatttctctgctggttcaggatgcagtctggactttcgacccggatgcgctggtggagattacgggtggatttcgtcgtgggaaaccttttggtcacgacgttgatctgcttatcacatctccgggagctgagaaagaacaagaagaccagctcctgcagaaagtgaccaatctgtggaagaaacaagggttgttgctgtacggtcgtctgcgtgaaagtcgctttgaagatgggaaactcccatcccgcaagatcgatgccctggaccattttgcgaaatgctttctgatcctcaaactttatcaccataaagtggacaaaagcaaatgggaagggccgacgggttcgaacgaaagcgaggccaaaagttggaaagcaattcgcgtagatctggttcgttgtccctacgatggttttgcgtttgcgttgttgggttggaccggaagccgcatgttccgccgtgatctgcgccgctacgccacccacgagaagaagatgatgctggacaatcatgcgctgtatgacctgaccaagaaaatctttctcaaagctaaatcggaagaggaaattttcgcacatctggggcttgaatacctggaaccgttcgaacgtaacgca

SEQ ID NO: 1496 - protein, 529 aa, synthetic construct
  REGION 1..529: note = Variant of terminal deoxynucleotidyltransferase
MHHHHHHGGSGSHGIRTIDSDFGKKRQKKMDNHDSSAIYEIKFHEFVLFILEEKMGATRRTFLTDLARKKGFRVENELSDSVTHIVAENNSRSEVLAWLKEHKMEKTKQFELLDISWLIESMKVGKPVDTKGKYQLAESGEMSANPDPTEGRENELPPTTKTISQYACQRRTTLNNHNQRFTDALEILAENYEFKRNDDTCLTFMRAISVLKCLPFEVVSLKDTEGLPWIGDEVKGIMEEIIEVGESLEVQAVLNDERYQSFKRFKSVFGVGVKTADKWYRMGLRTLEDVRSSKTLKLTPMQKAGLCYYEDLADGVTKAEADAISLLVQDAVWTFDPDALVEITGGFRRGKPFGHDVDLLITSPGAEKEQEDQLLQKVTNLWKKQGLLLYGRLRESRFEDGKLPSRKIDALDHFAKCFLILKLYHHKVDKSKWEGPTGSNESEAKSWKAIRVDLVRCPYDGFAFALLGWTGSRMFRRDLRRYATHEKKMMLDNHALYDLTKKIFLKAKSEEEIFAHLGLEYLEPFERNA

SEQ ID NO: 1497 - DNA, 1587 bp, synthetic construct
  misc_feature 1..1587: note = Variant of terminal deoxynucleotidyltransferase
  source 1..1587: mol_type = other DNA
atgcaccatcatcatcatcatggcggtagcggcagccacggcattcgtaccatcgattcggacttcgggaagaaacgccagaagaagatggataaccacgatagttccgccatctatgaaatcaaatttcacgagtttgtgctgttcattctcgaagagaaaatgggtgcgacgcgtcgtacttttctgacagatttagcccgcaagaaagggttccgcgtcgagaatgaactgtcagacagcgttacccacatcgtggcagaaaataattcacgctctgaagtattggcttggctgaaagaacacaagatggagaagaccaagcaattcgaactgctggatattagctggcttatcgaaagcatgaaagttggtaaaccggtggacaccaaggggaaataccagttggcggaatcgggtgagatgagtgcgaacccagatccgacagagggtcgtgaaaacgagctgcctcctactacgaagaccatttctcagtatgcgtgtcaacgccgcaccaccctgaacaaccataatcaacgttttacggacgcactggaaattcttgcggaaaattacgagttcaaacgcaacgatgatacttgtctgacctttatgcgtgctatttccgtgctgaaatgccttccgtttgaggtagttagcctgaaagacacggaaggattgccctggatcggtgatgaagtcaaagggattatggaagaaatcatcgaggtcggtgaatcgctggaagtgcaggccgtgctcaatgatgagcgctatcaaagcttcaaacgctttaagagtgtctttggagtgggggtgaagacagcagacaaatggtaccgtatgggtctgcgcacgctcgaggatgttcgttccagcaagaccctgaagttgaccccgatgcagaaagcgggtctgtgctattatgaagatcttgctgatggcgttacgaaagccgaagctgacgcgatttctctgctggttcaggatgcagtctggactttcgacccggatgcgctggtggagattacgggtggatttcgtcgtgggaaaccttttggtcacgacgttgatctgcttatcacatctccgggagctgagaaagaacaagaagaccagctcctgcagaaagtgaccaatctgtggaagaaacaagggttgttgctgtacggtcgtctgcgtgaaagtcgctttgaagatgggaaactcccatcccgcaagatcgatgccctggaccattttgcgaaatgctttctgatcctcaaactttatcaccataaagtggacaaaagcaaatgggaaatgccgacgggttcgaacgaaagcgaggccaaagagtggaaagcaattcgcgtagatctggttcgttgtccctacgatggttttgcgtttgcgttgttgggttggaccggaagccgcatgttccgccgtgatctgcgccgctacgccacccacgagaagaagatgatgctggacaatcatgcgctgtatgacctgaccaagaaaatctttctcaaagctaaatcggaagaggaaattttcgcacatctggggcttgaatacctggaaccgttcgaacgtaacgca

SEQ ID NO: 1498 - protein, 529 aa, synthetic construct
  REGION 1..529: note = Variant of terminal deoxynucleotidyltransferase
MHHHHHHGGSGSHGIRTIDSDFGKKRQKKMDNHDSSAIYEIKFHEFVLFILEEKMGATRRTFLTDLARKKGFRVENELSDSVTHIVAENNSRSEVLAWLKEHKMEKTKQFELLDISWLIESMKVGKPVDTKGKYQLAESGEMSANPDPTEGRENELPPTTKTISQYACQRRTTLNNHNQRFTDALEILAENYEFKRNDDTCLTFMRAISVLKCLPFEVVSLKDTEGLPWIGDEVKGIMEEIIEVGESLEVQAVLNDERYQSFKRFKSVFGVGVKTADKWYRMGLRTLEDVRSSKTLKLTPMQKAGLCYYEDLADGVTKAEADAISLLVQDAVWTFDPDALVEITGGFRRGKPFGHDVDLLITSPGAEKEQEDQLLQKVTNLWKKQGLLLYGRLRESRFEDGKLPSRKIDALDHFAKCFLILKLYHHKVDKSKWEMPTGSNESEAKEWKAIRVDLVRCPYDGFAFALLGWTGSRMFRRDLRRYATHEKKMMLDNHALYDLTKKIFLKAKSEEEIFAHLGLEYLEPFERNA

SEQ ID NO: 1499 - DNA, 1587 bp, synthetic construct
  misc_feature 1..1587: note = Variant of terminal deoxynucleotidyltransferase
  source 1..1587: mol_type = other DNA
atgcaccatcatcatcatcatggcggtagcggcagccacggcattcgtaccatcgattcggacttcgggaagaaacgccagaagaagatggataaccacgatagttccgccatctatgaaatcaaatttcacgagtttgtgctgttcattctcgaagagaaaatgggtgcgacgcgtcgtacttttctgacagatttagcccgcaagaaagggttccgcgtcgagaatgaactgtcagacagcgttacccacatcgtggcagaaaataattcacgctctgaagtattggcttggctgaaagaacacaagatggagaagaccaagcaattcgaactgctggatattagctggcttatcgaaagcatgaaagttggtaaaccggtggacaccaaggggaaataccagttggcggaatcgggtgagatgagtgcgaacccagatccgacagagggtcgtgaaaacgagctgcctcctactacgaagaccatttctcagtatgcgtgtcaacgccgcaccaccctgaacaaccataatcaacgttttacggacgcactggaaattcttgcggaaaattacgagttcaaacgcaacgatgatacttgtctgacctttatgcgtgctatttccgtgctgaaatgccttccgtttgaggtagttagcctgaaagacacggaaggattgccctggatcggtgatgaagtcaaagggattatggaagaaatcatcgaggtcggtgaatcgctggaagtgcaggccgtgctcaatgatgagcgctatcaaagcttcaaacgctttaagagtgtctttggagtgggggtgaagacagcagacaaatggtaccgtatgggtctgcgcacgctcgaggatgttcgttccagcaagaccctgaagttgaccccgatgcagaaagcgggtctgtgctattatgaagatcttgctgatggcgttacgaaagccgaagctgacgcgatttctctgctggttaaggatgcagtctggactttcgacccggatgcgctggtggagattacgggtggatttcgtcgtgggaaaccttttggtcacgacgttgatctgcttatcacatctccgggagctgagaaagaacaagaagaccagctcctgcagaaagtgaccaatctgtggaagaaacaagggttgttgctgtacggtcgtctgcgtgaaagtcgctttgaagatgggaaactcccatcccgcaagatcgatgccctggaccattttgcgaaatgctttctgatcctcaaactttatcaccataaagtggacaaaagcaaatgggaaatgccgacgggttcgaacgaaagcgaggccaaaagttggaaagcaattcgcgtagatctggttcgttgtccctacgatggttttgcgtttgcgttgttgggttggaccggaagccgcatgttccgccgtgatctgcgccgctacgccacccacgagaagaagatgatgctggacaatcatgcgctgtatgacctgaccaagaaaatctttctcaaagctaaatcggaagaggaaattttcgcacatctggggcttgaatacctggaaccgttcgaacgtaacgca

SEQ ID NO: 1500 - protein, 529 aa, synthetic construct
  REGION 1..529: note = Variant of terminal deoxynucleotidyltransferase
MHHHHHHGGSGSHGIRTIDSDFGKKRQKKMDNHDSSAIYEIKFHEFVLFILEEKMGATRRTFLTDLARKKGFRVENELSDSVTHIVAENNSRSEVLAWLKEHKMEKTKQFELLDISWLIESMKVGKPVDTKGKYQLAESGEMSANPDPTEGRENELPPTTKTISQYACQRRTTLNNHNQRFTDALEILAENYEFKRNDDTCLTFMRAISVLKCLPFEVVSLKDTEGLPWIGDEVKGIMEEIIEVGESLEVQAVLNDERYQSFKRFKSVFGVGVKTADKWYRMGLRTLEDVRSSKTLKLTPMQKAGLCYYEDLADGVTKAEADAISLLVKDAVWTFDPDALVEITGGFRRGKPFGHDVDLLITSPGAEKEQEDQLLQKVTNLWKKQGLLLYGRLRESRFEDGKLPSRKIDALDHFAKCFLILKLYHHKVDKSKWEMPTGSNESEAKSWKAIRVDLVRCPYDGFAFALLGWTGSRMFRRDLRRYATHEKKMMLDNHALYDLTKKIFLKAKSEEEIFAHLGLEYLEPFERNA

SEQ ID NO: 1501 - DNA, 1587 bp, synthetic construct
  misc_feature 1..1587: note = Variant of terminal deoxynucleotidyltransferase
  source 1..1587: mol_type = other DNA
atgcaccatcatcatcatcatggcggtagcggcagccacggcattcgtaccatcgattcggacttcgggaagaaacgccagaagaagatggataaccacgatagttccgccatctatgaaatcaaatttcacgagtttgtgctgttcattctcgaagagaaaatgggtgcgacgcgtcgtacttttctgacagatttagcccgcaagaaagggttccgcgtcgagaatgaactgtcagacagcgttacccacatcgtggcagaaaataattcacgctctgaagtattggcttggctgaaagaacacaagatggagaagaccaagcaattcgaactgctggatattagctggcttatcgaaagcatgaaagttggtaaaccggtggacaccaaggggaaataccagttggcggaatcgggtgagatgagtgcgaacccagatccgacagagggtcgtgaaaacgagctgcctcctactacgaagaccatttctcagtatgcgtgtcaacgccgcaccaccctgaacaaccataatcaacgttttacggacgcactggaaattcttgcggaaaattacgagttcaaacgcaacgatgatacttgtctgacctttatgcgtgctatttccgtgctgaaatgccttccgtttgaggtagttagcctgaaagacacggaaggattgccctggatcggtgatgaagtcaaagggattatggaagaaatcatcgaggtcggtgaatcgctggaagtgcaggccgtgctcaatgatgagcgctatcaaagcttcaaacgctttaagagtgtctttggagtgggggtgaagacagcagacaaatggtaccgtatgggtctgcgcacgctcgaggatgttcgttccagcaagaccctgaagttgaccccgatgcagaaagcgggtctgtgctattatgaagatcttgctgatggcgttacgaaagccgaagctgacgcgatttctctgctggttcaggatgcagtctggactttcgacccggatgcgctggtggagattacgggtggatttcgtcgtgggaaaccttttggtcacgacgttgatctgcttatcacatctccgggagctgagaaagaaggggaagaccagctcctgcagaaagtgaccaatctgtggaagaaacaagggttgttgctgtacggtcgtctgcgtgaaagtcgctttgaagatgggaaactcccatcccgcaagatcgatgccctggaccattttgcgaaatgctttctgatcctcaaactttatcaccataaagtggacaaaagcaaatgggaaatgccgacgggttcgaacgaaagcgaggccaaaagttggaaagcaattcgcgtagatctggttcgttgtccctacgatggttttgcgtttgcgttgttgggttggaccggaagccgcatgttccgccgtgatctgcgccgctacgccacccacgagaagaagatgatgctggacaatcatgcgctgtatgacctgaccaagaaaatctttctcaaagctaaatcggaagaggaaattttcgcacatctggggcttgaatacctggaaccgttcgaacgtaacgca

SEQ ID NO: 1502 - protein, 529 aa, synthetic construct
  REGION 1..529: note = Variant of terminal deoxynucleotidyltransferase
MHHHHHHGGSGSHGIRTIDSDFGKKRQKKMDNHDSSAIYEIKFHEFVLFILEEKMGATRRTFLTDLARKKGFRVENELSDSVTHIVAENNSRSEVLAWLKEHKMEKTKQFELLDISWLIESMKVGKPVDTKGKYQLAESGEMSANPDPTEGRENELPPTTKTISQYACQRRTTLNNHNQRFTDALEILAENYEFKRNDDTCLTFMRAISVLKCLPFEVVSLKDTEGLPWIGDEVKGIMEEIIEVGESLEVQAVLNDERYQSFKRFKSVFGVGVKTADKWYRMGLRTLEDVRSSKTLKLTPMQKAGLCYYEDLADGVTKAEADAISLLVQDAVWTFDPDALVEITGGFRRGKPFGHDVDLLITSPGAEKEGEDQLLQKVTNLWKKQGLLLYGRLRESRFEDGKLPSRKIDALDHFAKCFLILKLYHHKVDKSKWEMPTGSNESEAKSWKAIRVDLVRCPYDGFAFALLGWTGSRMFRRDLRRYATHEKKMMLDNHALYDLTKKIFLKAKSEEEIFAHLGLEYLEPFERNA

SEQ ID NO: 1503 - DNA, 1587 bp, synthetic construct
  misc_feature 1..1587: note = Variant of terminal deoxynucleotidyltransferase
  source 1..1587: mol_type = other DNA
atgcaccatcatcatcatcatggcggtagcggcagccacggcattcgtaccatcgattcggacttcgggaagaaacgccagaagaagatggataaccacgatagttccgccatctatgaaatcaaatttcacgagtttgtgctgttcattctcgaagagaaaatgggtgcgacgcgtcgtacttttctgacagatttagcccgcaagaaagggttccgcgtcgagaatgaactgtcagacagcgttacccacatcgtggcagaaaataattcacgctctgaagtattggcttggctgaaagaacacaagatggagaagaccaagcaattcgaactgctggatattagctggcttatcgaaagcatgaaagttggtaaaccggtggacaccaaggggaaataccagttggcggaatcgggtgagatgagtgcgaacccagatccgacagagggtcgtgaaaacgagctgcctcctactacgaagaccatttctcagtatgcgtgtcaacgccgcaccaccctgaacaaccataatcaacgttttacggacgcactggaaattcttgcggaaaattacgagttcaaacgcaacgatgatacttgtctgacctttatgcgtgctatttccgtgctgaaatgccttccgtttgaggtagttagcctgaaagacacggaaggattgccctggatcggtgatgaagtcaaagggattatggaagaaatcatcgaggtcggtgaatcgctggaagtgcaggccgtgctcaatgatgagcgctatcaaagcttcaaacgctttaagagtgtctttggagtgggggtgaagacagcagacaaatggtaccgtatgggtctgcgcacgctcgaggatgttcgttccagcaagaccctgaagttgaccccgatgcagaaagcgggtctgtgctattatgaagatcttgctgatggcgttacgaaagccgaagctgacgcgatttctctgctggttcaggatgcagtctggactttcgacccggatgcgctggtggagattacgggtggatttcgtcgtgggaaaccttttggtcacgacgttgatctgcttatcacatctccgggagctgagaaagaacaagaagaccagctcctgcagaaagtgaccaatctgtggaagaaacaagggttgttgctgtacggtcgtctgcgtgaaagtcgctttgaagatgggaaactcccatcccgcaagatcgatgccctggaccattttgcgaaatgctttctgatcctcaaactttatcaccataaagtggacaaaagcaaatgggaaatgccgacgggttcgaacgaaagcgaggccaaaagttggaaagcaattcgcgtagatctggttcgttgtccctacgatggttttgcgtttgcgttgttgggttggaccggaagccgcatgttccgccgtgatctgcgccgctacgccacccacgagaagaagatgatgctggacaatcatgcgctgtatgacctgaccaagaaaaggtttctcaaagctaaatcggaagaggaaattttcgcacatctggggcttgaatacctggaaccgttcgaacgtaacgca

SEQ ID NO: 1504 - protein, 529 aa, synthetic construct
  REGION 1..529: note = Variant of terminal deoxynucleotidyltransferase
MHHHHHHGGSGSHGIRTIDSDFGKKRQKKMDNHDSSAIYEIKFHEFVLFILEEKMGATRRTFLTDLARKKGFRVENELSDSVTHIVAENNSRSEVLAWLKEHKMEKTKQFELLDISWLIESMKVGKPVDTKGKYQLAESGEMSANPDPTEGRENELPPTTKTISQYACQRRTTLNNHNQRFTDALEILAENYEFKRNDDTCLTFMRAISVLKCLPFEVVSLKDTEGLPWIGDEVKGIMEEIIEVGESLEVQAVLNDERYQSFKRFKSVFGVGVKTADKWYRMGLRTLEDVRSSKTLKLTPMQKAGLCYYEDLADGVTKAEADAISLLVQDAVWTFDPDALVEITGGFRRGKPFGHDVDLLITSPGAEKEQEDQLLQKVTNLWKKQGLLLYGRLRESRFEDGKLPSRKIDALDHFAKCFLILKLYHHKVDKSKWEMPTGSNESEAKSWKAIRVDLVRCPYDGFAFALLGWTGSRMFRRDLRRYATHEKKMMLDNHALYDLTKKRFLKAKSEEEIFAHLGLEYLEPFERNA

SEQ ID NO: 1505 - DNA, 1587 bp, synthetic construct
  misc_feature 1..1587: note = Variant of terminal deoxynucleotidyltransferase
  source 1..1587: mol_type = other DNA
atgcaccatcatcatcatcatggcggtagcggcagccacggcattcgtaccatcgattcggacttcgggaagaaacgccagaagaagatggataaccacgatagttccgccatctatgaaatcaaatttcacgagtttgtgctgttcattctcgaagagaaaatgggtgcgacgcgtcgtacttttctgacagatttagcccgcaagaaagggttccgcgtcgagaatgaactgtcagacagcgttacccacatcgtggcagaaaataattcacgctctgaagtattggcttggctgaaagaacacaagatggagaagaccaagcaattcgaactgctggatattagctggcttatcgaaagcatgaaagttggtaaaccggtggacaccaaggggaaataccagttggcggaatcgggtgagatgagtgcgaacccagatccgacagagggtcgtgaaaacgagctgcctcctactacgaagaccatttctcagtatgcgtgtcaacgccgcaccaccctgaacaaccataatcaacgttttacggacgcactggaaattcttgcggaaaattacgagttcaaacgcaacgatgatacttgtctgacctttatgcgtgctatttccgtgctgaaatgccttccgtttgaggtagttagcctgaaagacacggaaggattgccctggatcggtgatgaagtcaaagggattatggaagaaatcatcgaggtcggtgaatcgctggaagtgcaggccgtgctcaatgatgagcgctatcaaagcttcaaacgctttaagagtgtctttggagtgggggtgaagacagcagacaaatggtaccgtatgggtctgcgcacgctcgaggatgttcgttccagcaagaccctgaagttgaccccgatgcagaaagcgggtctgtgctattatgaagatcttgctgatggcgttacgaaagccgaagctgacgcgatttctctgctggttcaggatgcagtctggactttcgacccggatgcgctggtggagattacgggtggatttcgtcgtgggaaaccttttggtcacgacgttgatctgcttatcacatctccgggagctgagaaagaacaagaagggcagctcctgcagaaagtgaccaatctgtggaagaaacaagggttgttgctgtacggtcgtctgcgtgaaagtcgctttgaagatgggaaactcccatcccgcaagatcgatgccctggaccattttgcgaaatgctttctgatcctcaaactttatcaccataaagtggacaaaagcaaatgggaaatgccgacgggttcgaacgaaagcgaggccaaaagttggaaagcaattcgcgtagatctggttcgttgtccctacgatggttttgcgtttgcgttgttgggttggaccggaagccgcatgttccgccgtgatctgcgccgctacgccacccacgagaagaagatgatgctggacaatcatgcgctgtatgacctgaccaagaaaatctttctcaaagctaaatcggaagaggaaattttcgcacatctggggcttgaatacctggaaccgttcgaacgtaacgca

SEQ ID NO: 1506 - protein, 529 aa, synthetic construct
  REGION 1..529: note = Variant of terminal deoxynucleotidyltransferase
MHHHHHHGGSGSHGIRTIDSDFGKKRQKKMDNHDSSAIYEIKFHEFVLFILEEKMGATRRTFLTDLARKKGFRVENELSDSVTHIVAENNSRSEVLAWLKEHKMEKTKQFELLDISWLIESMKVGKPVDTKGKYQLAESGEMSANPDPTEGRENELPPTTKTISQYACQRRTTLNNHNQRFTDALEILAENYEFKRNDDTCLTFMRAISVLKCLPFEVVSLKDTEGLPWIGDEVKGIMEEIIEVGESLEVQAVLNDERYQSFKRFKSVFGVGVKTADKWYRMGLRTLEDVRSSKTLKLTPMQKAGLCYYEDLADGVTKAEADAISLLVQDAVWTFDPDALVEITGGFRRGKPFGHDVDLLITSPGAEKEQEGQLLQKVTNLWKKQGLLLYGRLRESRFEDGKLPSRKIDALDHFAKCFLILKLYHHKVDKSKWEMPTGSNESEAKSWKAIRVDLVRCPYDGFAFALLGWTGSRMFRRDLRRYATHEKKMMLDNHALYDLTKKIFLKAKSEEEIFAHLGLEYLEPFERNA

SEQ ID NO: 1507 - DNA, 1587 bp, synthetic construct
  misc_feature 1..1587: note = Variant of terminal deoxynucleotidyltransferase
  source 1..1587: mol_type = other DNA
atgcaccatcatcatcatcatggcggtagcggcagccacggcattcgtaccatcgattcggacttcgggaagaaacgccagaagaagatggataaccacgatagttccgccatctatgaaatcaaatttcacgagtttgtgctgttcattctcgaagagaaaatgggtgcgacgcgtcgtacttttctgacagatttagcccgcaagaaagggttccgcgtcgagaatgaactgtcagacagcgttacccacatcgtggcagaaaataattcacgctctgaagtattggcttggctgaaagaacacaagatggagaagaccaagcaattcgaactgctggatattagctggcttatcgaaagcatgaaagttggtaaaccggtggacaccaaggggaaataccagttggcggaatcgggtgagatgagtgcgaacccagatccgacagagggtcgtgaaaacgagctgcctcctactacgaagaccatttctcagtatgcgtgtcaacgccgcaccaccctgaacaaccataatcaacgttttacggacgcactggaaattcttgcggaaaattacgagttcaaacgcaacgatgatacttgtctgacctttatgcgtgctatttccgtgctgaaatgccttccgtttgaggtagttagcctgaaacagacggaaggattgccctggatcggtgatgaagtcaaagggattatggaagaaatcatcgaggtcggtgaatcgctggaagtgcaggccgtgctcaatgatgagcgctatcaaagcttcaaacgctttaagagtgtctttggagtgggggtgaagacagcagacaaatggtaccgtatgggtctgcgcacgctcgaggatgttcgttccagcaagaccctgaagttgaccccgatgcagaaagcgggtctgtgctattatgaagatcttgctgatggcgttacgaaagccgaagctgacgcgatttctctgctggttcaggatgcagtctggactttcgacccggatgcgctggtggagattacgggtggatttcgtcgtgggaaaccttttggtcacgacgttgatctgcttatcacatctccgggagctgagaaagaacaagaagaccagctcctgcagaaagtgaccaatctgtggaagaaacaagggttgttgctgtacggtcgtctgcgtgaaagtcgctttgaagatgggaaactcccatcccgcaagatcgatgccctggaccattttgcgaaatgctttctgatcctcaaactttatcaccataaagtggacaaaagcaaatgggaaatgccgacgggttcgaacgaaagcgaggccaaaagttggaaagcaattcgcgtagatctggttcgttgtccctacgatggttttgcgtttgcgttgttgggttggaccggaagccgcatgttccgccgtgatctgcgccgctacgccacccacgagaagaagatgatgctggacaatcatgcgctgtatgacctgaccaagaaaatctttctcaaagctaaatcggaagaggaaattttcgcacatctggggcttgaatacctggaaccgttcgaacgtaacgca

SEQ ID NO: 1508 - protein, 529 aa, synthetic construct
  REGION 1..529: note = Variant of terminal deoxynucleotidyltransferase
MHHHHHHGGSGSHGIRTIDSDFGKKRQKKMDNHDSSAIYEIKFHEFVLFILEEKMGATRRTFLTDLARKKGFRVENELSDSVTHIVAENNSRSEVLAWLKEHKMEKTKQFELLDISWLIESMKVGKPVDTKGKYQLAESGEMSANPDPTEGRENELPPTTKTISQYACQRRTTLNNHNQRFTDALEILAENYEFKRNDDTCLTFMRAISVLKCLPFEVVSLKQTEGLPWIGDEVKGIMEEIIEVGESLEVQAVLNDERYQSFKRFKSVFGVGVKTADKWYRMGLRTLEDVRSSKTLKLTPMQKAGLCYYEDLADGVTKAEADAISLLVQDAVWTFDPDALVEITGGFRRGKPFGHDVDLLITSPGAEKEQEDQLLQKVTNLWKKQGLLLYGRLRESRFEDGKLPSRKIDALDHFAKCFLILKLYHHKVDKSKWEMPTGSNESEAKSWKAIRVDLVRCPYDGFAFALLGWTGSRMFRRDLRRYATHEKKMMLDNHALYDLTKKIFLKAKSEEEIFAHLGLEYLEPFERNA

SEQ ID NO: 1509 - DNA, 1587 bp, synthetic construct
  misc_feature 1..1587: note = Variant of terminal deoxynucleotidyltransferase
  source 1..1587: mol_type = other DNA
atgcaccatcatcatcatcatggcggtagcggcagccacggcattcgtaccatcgattcggacttcgggaagaaacgccagaagaagatggataaccacgatagttccgccatctatgaaatcaaatttcacgagtttgtgctgttcattctcgaagagaaaatgggtgcgacgcgtcgtacttttctgacagatttagcccgcaagaaagggttccgcgtcgagaatgaactgtcagacagcgttacccacatcgtggcagaaaataattcacgctctgaagtattggcttggctgaaagaacacaagatggagaagaccaagcaattcgaactgctggatattagctggcttatcgaaagcatgaaagttggtaaaccggtggacaccaaggggaaataccagttggcggaatcgggtgagatgagtgcgaacccagatccgacagagggtcgtgaaaacgagctgcctcctactacgaagaccatttctcagtatgcgtgtcaacgccgcaccaccctgaacaaccataatcaacgttttacggacgcactggaaattcttgcggaaaattacgagttcaaacgcaacgatgatgtgtgtctgacctttatgcgtgctatttccgtgctgaaatgccttccgtttgaggtagttagcctgaaagacacggaaggattgccctggatcggtgatgaagtcaaagggattatggaagaaatcatcgaggtcggtgaatcgctggaagtgcaggccgtgctcaatgatgagcgctatcaaagcttcaaacgctttaagagtgtctttggagtgggggtgaagacagcagacaaatggtaccgtatgggtctgcgcacgctcgaggatgttcgttccagcaagaccctgaagttgaccccgatgcagaaagcgggtctgtgctattatgaagatcttgctgatggcgttacgaaagccgaagctgacgcgatttctctgctggttcaggatgcagtctggactttcgacccggatgcgctggtggagattacgggtggatttcgtcgtgggaaaccttttggtcacgacgttgatctgcttatcacatctccgggagctgagaaagaacaagaagaccagctcctgcagaaagtgaccaatctgtggaagaaacaagggttgttgctgtacggtcgtctgcgtgaaagtcgctttgaagatgggaaactcccatcccgcaagatcgatgccctggaccattttgcgaaatgctttctgatcctcaaactttatcaccataaagtggacaaaagcaaatgggaaatgccgacgggttcgaacgaaagcgaggccaaaagttggaaagcaattcgcgtagatctggttcgttgtccctacgatggttttgcgtttgcgttgttgggttggaccggaagccgcatgttccgccgtgatctgcgccgctacgccacccacgagaagaagatgatgctggacaatcatgcgctgtatgacctgaccaagaaaatctttctcaaagctaaatcggaagaggaaattttcgcacatctggggcttgaatacctggaaccgttcgaacgtaacgca

SEQ ID NO: 1510 - protein, 529 aa, synthetic construct
  REGION 1..529: note = Variant of terminal deoxynucleotidyltransferase
MHHHHHHGGSGSHGIRTIDSDFGKKRQKKMDNHDSSAIYEIKFHEFVLFILEEKMGATRRTFLTDLARKKGFRVENELSDSVTHIVAENNSRSEVLAWLKEHKMEKTKQFELLDISWLIESMKVGKPVDTKGKYQLAESGEMSANPDPTEGRENELPPTTKTISQYACQRRTTLNNHNQRFTDALEILAENYEFKRNDDVCLTFMRAISVLKCLPFEVVSLKDTEGLPWIGDEVKGIMEEIIEVGESLEVQAVLNDERYQSFKRFKSVFGVGVKTADKWYRMGLRTLEDVRSSKTLKLTPMQKAGLCYYEDLADGVTKAEADAISLLVQDAVWTFDPDALVEITGGFRRGKPFGHDVDLLITSPGAEKEQEDQLLQKVTNLWKKQGLLLYGRLRESRFEDGKLPSRKIDALDHFAKCFLILKLYHHKVDKSKWEMPTGSNESEAKSWKAIRVDLVRCPYDGFAFALLGWTGSRMFRRDLRRYATHEKKMMLDNHALYDLTKKIFLKAKSEEEIFAHLGLEYLEPFERNA

SEQ ID NO: 1511 - DNA, 1587 bp, synthetic construct
  misc_feature 1..1587: note = Variant of terminal deoxynucleotidyltransferase
  source 1..1587: mol_type = other DNA
atgcaccatcatcatcatcatggcggtagcggcagccacggcattcgtaccatcgattcggacttcgggaagaaacgccagaagaagatggataaccacgatagttccgccatctatgaaatcaaatttcacgagtttgtgctgttcattctcgaagagaaaatgggtgcgacgcgtcgtacttttctgacagatttagcccgcaagaaagggttccgcgtcgagaatgaactgtcagacagcgttacccacatcgtggcagaaaataattcacgctctgaagtattggcttggctgaaagaacacaagatggagaagaccaagcaattcgaactgctggatattagctggcttatcgaaagcatgaaagttggtaaaccggtggacaccaaggggaaataccagttggcggaatcgggtgagatgagtgcgaacccagatccgacagagggtcgtgaaaacgagctgcctcctactacgaagaccatttctcagtatgcgtgtcaacgccgcaccaccctgaacaaccataatcaacgttttacggacgcactggaaattcttgcggaaaattacgagttcaaacgcaacgatgatacttgtctgacctttatgcgtgctatttccgtgctgaaatgccttccgtttgaggtagttagcctgaaagacacggaaggattgccctggatcggtgatgaagtcaaagggattatggaagaaatcatcgaggtcggtgaatcgctggaagtgcaggccgtgctcaatgatgagcgctatcaaagcttcaaacgctttaagagtgtctttggagtgggggtgaagacagcagacaaatggtaccgtatgggtctgcgcacgctcgaggatgttcgttccagcaagaccctgaagttgaccccgatgcagaaagcgggtctgtgctattatgaagatcttgctgatggcgttacgaaagccgaagctgacgcgatttctctgctggttcaggatgcagtctggactttcgacccggatgcgctggtggagattacgggtggatttcgtcgtgggaaaccttttggtcacgacgttgatctgcttatcacatctccgggagctgagaaagaacaagaagaccagctcctgcagaaagtgaccaatctgtggaagaaacaagggttgttgctgtacggtcgtctgcgtgaaagtcgctttgaagatgggaaactcccatcccgcaagatcgatgccctggaccattttgcgaaatgctttctgatcctcaaactttatcaccataaagtggacaaaagcaaatgggaaatgccgacgggttcgaacgaaagcgaggccaaaagttggaaagcaattcgcgtagatctggttcgttgtccctacgatggttttgcgtttgcgttgttgggttggaccggaagccgcatgttccgccgtgatctgcgccgctacgccacccacgagaagaagatgatgctggacaatcatgcgctgtatgacctgaccaaggggatctttctcaaagctaaatcggaagaggaaattttcgcacatctggggcttgaatacctggaaccgttcgaacgtaacgca

SEQ ID NO: 1512 - protein, 529 aa, synthetic construct
  REGION 1..529: note = Variant of terminal deoxynucleotidyltransferase
MHHHHHHGGSGSHGIRTIDSDFGKKRQKKMDNHDSSAIYEIKFHEFVLFILEEKMGATRRTFLTDLARKKGFRVENELSDSVTHIVAENNSRSEVLAWLKEHKMEKTKQFELLDISWLIESMKVGKPVDTKGKYQLAESGEMSANPDPTEGRENELPPTTKTISQYACQRRTTLNNHNQRFTDALEILAENYEFKRNDDTCLTFMRAISVLKCLPFEVVSLKDTEGLPWIGDEVKGIMEEIIEVGESLEVQAVLNDERYQSFKRFKSVFGVGVKTADKWYRMGLRTLEDVRSSKTLKLTPMQKAGLCYYEDLADGVTKAEADAISLLVQDAVWTFDPDALVEITGGFRRGKPFGHDVDLLITSPGAEKEQEDQLLQKVTNLWKKQGLLLYGRLRESRFEDGKLPSRKIDALDHFAKCFLILKLYHHKVDKSKWEMPTGSNESEAKSWKAIRVDLVRCPYDGFAFALLGWTGSRMFRRDLRRYATHEKKMMLDNHALYDLTKGIFLKAKSEEEIFAHLGLEYLEPFERNA

SEQ ID NO: 1513 - DNA, 1587 bp, synthetic construct
  misc_feature 1..1587: note = Variant of terminal deoxynucleotidyltransferase
  source 1..1587: mol_type = other DNA
atgcaccatcatcatcatcatggcggtagcggcagccacggcattcgtaccatcgattcggacttcgggaagaaacgccagaagaagatggataaccacgatagttccgccatctatgaaatcaaatttcacgagtttgtgctgttcattctcgaagagaaaatgggtgcgacgcgtcgtacttttctgacagatttagcccgcaagaaagggttccgcgtcgagaatgaactgtcagacagcgttacccacatcgtggcagaaaataattcacgctctgaagtattggcttggctgaaagaacacaagatggagaagaccaagcaattcgaactgctggatattagctggcttatcgaaagcatgaaagttggtaaaccggtggacaccaaggggaaataccagttggcggaatcgggtgagatgagtgcgaacccagatccgacagagggtcgtgaaaacgagctgcctcctactgtgaagaccatttctcagtatgcgtgtcaacgccgcaccaccctgaacaaccataatcaacgttttacggacgcactggaaattcttgcggaaaattacgagttcaaacgcaacgatgatacttgtctgacctttatgcgtgctatttccgtgctgaaatgccttccgtttgaggtagttagcctgaaagacacggaaggattgccctggatcggtgatgaagtcaaagggattatggaagaaatcatcgaggtcggtgaatcgctggaagtgcaggccgtgctcaatgatgagcgctatcaaagcttcaaacgctttaagagtgtctttggagtgggggtgaagacagcagacaaatggtaccgtatgggtctgcgcacgctcgaggatgttcgttccagcaagaccctgaagttgaccccgatgcagaaagcgggtctgtgctattatgaagatcttgctgatggcgttacgaaagccgaagctgacgcgatttctctgctggttcaggatgcagtctggactttcgacccggatgcgctggtggagattacgggtggatttcgtcgtgggaaaccttttggtcacgacgttgatctgcttatcacatctccgggagctgagaaagaacaagaagaccagctcctgcagaaagtgaccaatctgtggaagaaacaagggttgttgctgtacggtcgtctgcgtgaaagtcgctttgaagatgggaaactcccatcccgcaagatcgatgccctggaccattttgcgaaatgctttctgatcctcaaactttatcaccataaagtggacaaaagcaaatgggaaatgccgacgggttcgaacgaaagcgaggccaaaagttggaaagcaattcgcgtagatctggttcgttgtccctacgatggttttgcgtttgcgttgttgggttggaccggaagccgcatgttccgccgtgatctgcgccgctacgccacccacgagaagaagatgatgctggacaatcatgcgctgtatgacctgaccaagaaaatctttctcaaagctaaatcggaagaggaaattttcgcacatctggggcttgaatacctggaaccgttcgaacgtaacgca

SEQ ID NO: 1514 - protein, 529 aa, synthetic construct
  REGION 1..529: note = Variant of terminal deoxynucleotidyltransferase
MHHHHHHGGSGSHGIRTIDSDFGKKRQKKMDNHDSSAIYEIKFHEFVLFILEEKMGATRRTFLTDLARKKGFRVENELSDSVTHIVAENNSRSEVLAWLKEHKMEKTKQFELLDISWLIESMKVGKPVDTKGKYQLAESGEMSANPDPTEGRENELPPTVKTISQYACQRRTTLNNHNQRFTDALEILAENYEFKRNDDTCLTFMRAISVLKCLPFEVVSLKDTEGLPWIGDEVKGIMEEIIEVGESLEVQAVLNDERYQSFKRFKSVFGVGVKTADKWYRMGLRTLEDVRSSKTLKLTPMQKAGLCYYEDLADGVTKAEADAISLLVQDAVWTFDPDALVEITGGFRRGKPFGHDVDLLITSPGAEKEQEDQLLQKVTNLWKKQGLLLYGRLRESRFEDGKLPSRKIDALDHFAKCFLILKLYHHKVDKSKWEMPTGSNESEAKSWKAIRVDLVRCPYDGFAFALLGWTGSRMFRRDLRRYATHEKKMMLDNHALYDLTKKIFLKAKSEEEIFAHLGLEYLEPFERNA

SEQ ID NO: 1515 - DNA, 1587 bp, synthetic construct
  misc_feature 1..1587: note = Variant of terminal deoxynucleotidyltransferase
  source 1..1587: mol_type = other DNA
atgcaccatcatcatcatcatggcggtagcggcagccacggcattcgtaccatcgattcggacttcgggaagaaacgccagaagaagatggataaccacgatagttccgccatctatgaaatcaaatttcacgagtttgtgctgttcattctcgaagagaaaatgggtgcgacgcgtcgtacttttctgacagatttagcccgcaagaaagggttccgcgtcgagaatgaactgtcagacagcgttacccacatcgtggcagaaaataattcacgctctgaagtattggcttggctgaaagaacacaagatggagaagaccaagcaattcgaactgctggatattagctggcttatcgaaagcatgaaagttggtaaaccggtggacaccaaggggaaataccagttggcggaatcgggtgagatgagtgcgaacccagatccgacagagggtcgtgaaaacgagctgcctcctactacgaagaccatttctcagtatgcgtgtcaacgccgcaccaccctgaacaaccataatcaacgttttacggacgcactggaaattcttgcggaaaattacgagttcaaacgcaacgatgatacttgtctgacctttatgcgtgctatttccgtgctgaaatgccttccgtttgaggtagttagcctgaaagacacggaaggattgccctggatcggtgatgaagtcaaagggattatggaagaaatcatcgaggtcggtgaatcgctggaagtgcaggccgtgctcaatgatgagcgctatcaaagcttcaaacgctttaagagtgtctttggagtgggggtgaagacagcagacaaatggtaccgtatgggtctgcgcacgctcgaggatgttcgttccagcaagaccctgaagttgaccccgatgcagaaagcgggtctgtgctattatgaagatcttgctgatggcgttacgaaagccgaagctgacgcgatttctatgctggttcaggatgcagtctggactttcgacccggatgcgctggtggagattacgggtggatttcgtcgtgggaaaccttttggtcacgacgttgatctgcttatcacatctccgggagctgagaaagaacaagaagaccagctcctgcagaaagtgaccaatctgtggaagaaacaagggttgttgctgtacggtcgtctgcgtgaaagtcgctttgaagatgggaaactcccatcccgcaagatcgatgccctggaccattttgcgaaatgctttctgatcctcaaactttatcaccataaagtggacaaaagcaaatgggaaatgccgacgggttcgaacgaaagcgaggccaaaagttggaaagcaattcgcgtagatctggttcgttgtccctacgatggttttgcgtttgcgttgttgggttggaccggaagccgcatgttccgccgtgatctgcgccgctacgccacccacgagaagaagatgatgctggacaatcatgcgctgtatgacctgaccaagaaaatctttctcaaagctaaatcggaagaggaaattttcgcacatctggggcttgaatacctggaaccgttcgaacgtaacgca

SEQ ID NO: 1516 - protein, 529 aa, synthetic construct
  REGION 1..529: note = Variant of terminal deoxynucleotidyltransferase
MHHHHHHGGSGSHGIRTIDSDFGKKRQKKMDNHDSSAIYEIKFHEFVLFILEEKMGATRRTFLTDLARKKGFRVENELSDSVTHIVAENNSRSEVLAWLKEHKMEKTKQFELLDISWLIESMKVGKPVDTKGKYQLAESGEMSANPDPTEGRENELPPTTKTISQYACQRRTTLNNHNQRFTDALEILAENYEFKRNDDTCLTFMRAISVLKCLPFEVVSLKDTEGLPWIGDEVKGIMEEIIEVGESLEVQAVLNDERYQSFKRFKSVFGVGVKTADKWYRMGLRTLEDVRSSKTLKLTPMQKAGLCYYEDLADGVTKAEADAISMLVQDAVWTFDPDALVEITGGFRRGKPFGHDVDLLITSPGAEKEQEDQLLQKVTNLWKKQGLLLYGRLRESRFEDGKLPSRKIDALDHFAKCFLILKLYHHKVDKSKWEMPTGSNESEAKSWKAIRVDLVRCPYDGFAFALLGWTGSRMFRRDLRRYATHEKKMMLDNHALYDLTKKIFLKAKSEEEIFAHLGLEYLEPFERNA

SEQ ID NO: 1517 - DNA, 1587 bp, synthetic construct
  misc_feature 1..1587: note = Variant of terminal deoxynucleotidyltransferase
  source 1..1587: mol_type = other DNA
atgcaccatcatcatcatcatggcggtagcggcagccacggcattcgtaccatcgattcggacttcgggaagaaacgccagaagaagatggataaccacgatagttccgccatctatgaaatcaaatttcacgagtttgtgctgttcattctcgaagagaaaatgggtgcgacgcgtcgtacttttctgacagatttagcccgcaagaaagggttccgcgtcgagaatgaactgtcagacagcgttacccacatcgtggcagaaaataattcacgctctgaagtattggcttggctgaaagaacacaagatggagaagaccaagcaattcgaactgctggatattagctggcttatcgaaagcatgaaagttggtaaaccggtggacaccaaggggaaataccagttggcggaatcgggtgagatgagtgcgaacccagatccgacagagggtcgtgaaaacgagctgcctcctactacgaagaccatttctcagtatgcgtgtcaacgccgcaccaccctgaacaaccataatcaacgttttacggacgcactggaaattcttgcggaaaattacgagttcaaacgcaacgatgatacttgtctgacctttatgcgtgctatttccgtgctgaaatgccttccgtttgaggtagttagcctgaaagacacggaaggattgccctggatcggtgatgaagtcaaagggattatggaagaaatcatcgaggtcggtgaatcgctggaagtgcaggccgtgctcaatgatgagcgctatcaaagcttcaaacgctttaagagtgtctttggagtgggggtgaagacagcagacaaatggtaccgtatgggtctgcgcacgctcgaggatgttcgttccagcaagaccctgaagttgaccccgatgcagaaagcgggtctgtgctattatgaagatcttgctgatggcgttacgaaagccgaagctgacgcgatttctctgctggttcaggatgcagtctggactttcgacccggatgcgctggtggagattacgggtggatttcgtcgtgggaaaccttttggtcacgacgttgatctgcttatcacatctccgggagctgagaaagaacaagaagaccagctcctgcagaaagtgaccaatctgtggaagaaacaagggttgttgctgtacggtcgtctgcgtgaaagtcgctttgaagatgggaaactcccatcccgcaagatcgatgccctggaccattttgcgaaatgctttctgatcctcaaactttatacgcataaagtggacaaaagcaaatgggaaatgccgacgggttcgaacgaaagcgaggccaaaagttggaaagcaattcgcgtagatctggttcgttgtccctacgatggttttgcgtttgcgttgttgggttggaccggaagccgcatgttccgccgtgatctgcgccgctacgccacccacgagaagaagatgatgctggacaatcatgcgctgtatgacctgaccaagaaaatctttctcaaagctaaatcggaagaggaaattttcgcacatctggggcttgaatacctggaaccgttcgaacgtaacgca

SEQ ID NO: 1518 - protein, 529 aa, synthetic construct
  REGION 1..529: note = Variant of terminal deoxynucleotidyltransferase
MHHHHHHGGSGSHGIRTIDSDFGKKRQKKMDNHDSSAIYEIKFHEFVLFILEEKMGATRRTFLTDLARKKGFRVENELSDSVTHIVAENNSRSEVLAWLKEHKMEKTKQFELLDISWLIESMKVGKPVDTKGKYQLAESGEMSANPDPTEGRENELPPTTKTISQYACQRRTTLNNHNQRFTDALEILAENYEFKRNDDTCLTFMRAISVLKCLPFEVVSLKDTEGLPWIGDEVKGIMEEIIEVGESLEVQAVLNDERYQSFKRFKSVFGVGVKTADKWYRMGLRTLEDVRSSKTLKLTPMQKAGLCYYEDLADGVTKAEADAISLLVQDAVWTFDPDALVEITGGFRRGKPFGHDVDLLITSPGAEKEQEDQLLQKVTNLWKKQGLLLYGRLRESRFEDGKLPSRKIDALDHFAKCFLILKLYTHKVDKSKWEMPTGSNESEAKSWKAIRVDLVRCPYDGFAFALLGWTGSRMFRRDLRRYATHEKKMMLDNHALYDLTKKIFLKAKSEEEIFAHLGLEYLEPFERNA

SEQ ID NO: 1519 - DNA, 1587 bp, synthetic construct
  misc_feature 1..1587: note = Variant of terminal deoxynucleotidyltransferase
  source 1..1587: mol_type = other DNA
atgcaccatcatcatcatcatggcggtagcggcagccacggcattcgtaccatcgattcggacttcgggaagaaacgccagaagaagatggataaccacgatagttccgccatctatgaaatcaaatttcacgagtttgtgctgttcattctcgaagagaaaatgggtgcgacgcgtcgtacttttctgacagatttagcccgcaagaaagggttccgcgtcgagaatgaactgtcagacagcgttacccacatcgtggcagaaaataattcacgctctgaagtattggcttggctgaaagaacacaagatggagaagaccaagcaattcgaactgctggatattagctggcttatcgaaagcatgaaagttggtaaaccggtggacaccaaggggaaataccagttggcggaatcgggtgagatgagtgcgaacccagatccgacagagggtcgtgaaaacgagctgcctcctactacgaagaccatttctcagtatgcgtgtcaacgccgcaccaccctgaacaaccataatcaacgttttacggacgcactggaaattcttgcggaaaattacgagttcaaacgcaacgatgatacttgtctgacctttatgcgtgctatttccgtgctgaaatgccttccgtttgaggtagttagcctgaaagacacggaaggattgccctggatcggtgatgaagtcaaagggattatggaagaaatcatcgaggtcggtgaatcgctggaagtgcaggccgtgctcaatgatgagcgctatcaaagcttcaaacgctttaagagtgtctttggagtgggggtgaagacagcagacaaatggtaccgtatgggtctgcgcacgctcgaggatgttcgttccagcaagtcgctgaagttgaccccgatgcagaaagcgggtctgtgctattatgaagatcttgctgatggcgttacgaaagccgaagctgacgcgatttctctgctggttcaggatgcagtctggactttcgacccggatgcgctggtggagattacgggtggatttcgtcgtgggaaaccttttggtcacgacgttgatctgcttatcacatctccgggagctgagaaagaacaagaagaccagctcctgcagaaagtgaccaatctgtggaagaaacaagggttgttgctgtacggtcgtctgcgtgaaagtcgctttgaagatgggaaactcccatcccgcaagatcgatgccctggaccattttgcgaaatgctttctgatcctcaaactttatcaccataaagtggacaaaagcaaatgggaaatgccgacgggttcgaacgaaagcgaggccaaaagttggaaagcaattcgcgtagatctggttcgttgtccctacgatggttttgcgtttgcgttgttgggttggaccggaagccgcatgttccgccgtgatctgcgccgctacgccacccacgagaagaagatgatgctggacaatcatgcgctgtatgacctgaccaagaaaatctttctcaaagctaaatcggaagaggaaattttcgcacatctggggcttgaatacctggaaccgttcgaacgtaacgca

SEQ ID NO: 1520 - protein, 529 aa, synthetic construct
  REGION 1..529: note = Variant of terminal deoxynucleotidyltransferase
MHHHHHHGGSGSHGIRTIDSDFGKKRQKKMDNHDSSAIYEIKFHEFVLFILEEKMGATRRTFLTDLARKKGFRVENELSDSVTHIVAENNSRSEVLAWLKEHKMEKTKQFELLDISWLIESMKVGKPVDTKGKYQLAESGEMSANPDPTEGRENELPPTTKTISQYACQRRTTLNNHNQRFTDALEILAENYEFKRNDDTCLTFMRAISVLKCLPFEVVSLKDTEGLPWIGDEVKGIMEEIIEVGESLEVQAVLNDERYQSFKRFKSVFGVGVKTADKWYRMGLRTLEDVRSSKSLKLTPMQKAGLCYYEDLADGVTKAEADAISLLVQDAVWTFDPDALVEITGGFRRGKPFGHDVDLLITSPGAEKEQEDQLLQKVTNLWKKQGLLLYGRLRESRFEDGKLPSRKIDALDHFAKCFLILKLYHHKVDKSKWEMPTGSNESEAKSWKAIRVDLVRCPYDGFAFALLGWTGSRMFRRDLRRYATHEKKMMLDNHALYDLTKKIFLKAKSEEEIFAHLGLEYLEPFERNA

SEQ ID NO: 1521 - DNA, 1587 bp, synthetic construct
  misc_feature 1..1587: note = Variant of terminal deoxynucleotidyltransferase
  source 1..1587: mol_type = other DNA
atgcaccatcatcatcatcatggcggtagcggcagccacggcattcgtaccatcgattcggacttcgggaagaaacgccagaagaagatggataaccacgatagttccgccatctatgaaatcaaatttcacgagtttgtgctgttcattctcgaagagaaaatgggtgcgacgcgtcgtacttttctgacagatttagcccgcaagaaagggttccgcgtcgagaatgaactgtcagacagcgttacccacatcgtggcagaaaataattcacgctctgaagtattggcttggctgaaagaacacaagatggagaagaccaagcaattcgaactgctggatattagctggcttatcgaaagcatgaaagttggtaaaccggtggacaccaaggggaaataccagttggcggaatcgggtgagatgagtgcgaacccagatccgacagagggtcgtgaaaacgagctgcctcctactacgaagaccatttctcagtatgcgtgtcaacgccgcaccaccctgaacaaccataatcaacgttttacggacgcactggaaattcttgcggaaaattacgagttcaaacgcaacgatgatacttgtctgacctttatgcgtgctatttccgtgctgaaatgccttccgtttgaggtagttagcctgaaagacacggaaggattgccctggatcggtgatgaagtcaaagggattatggaagaaatcatcgaggtcggtgaatcgctggaagtgcaggccgtgctcaatgatgagcgctatcaaagcttcaaacgctttaagagtgtctttggagtgggggtgaagacagcagacaaatggtaccgtatgggtctgcgcacgctcgaggatgttcgttccagcaagaccctgaagttgaccccgatgcagaaagcgggtctgtgctattatgaagatcttgctgatggcgttacgaaagccgaagctgacgcgatttctctgctggttcaggatgcagtctggactttcgacccggatgcgctggtggagattacgggtggatttcgtcgtgggaaaccttttggtcacgacgttgatctgcttatcacatctccgggagctgagaaagaacaagaagaccagctcctgcagaaagtgaccaatctgtggaggaaacaagggttgttgctgtacggtcgtctgcgtgaaagtcgctttgaagatgggaaactcccatcccgcaagatcgatgccctggaccattttgcgaaatgctttctgatcctcaaactttatcaccataaagtggacaaaagcaaatgggaaatgccgacgggttcgaacgaaagcgaggccaaaagttggaaagcaattcgcgtagatctggttcgttgtccctacgatggttttgcgtttgcgttgttgggttggaccggaagccgcatgttccgccgtgatctgcgccgctacgccacccacgagaagaagatgatgctggacaatcatgcgctgtatgacctgaccaagaaaatctttctcaaagctaaatcggaagaggaaattttcgcacatctggggcttgaatacctggaaccgttcgaacgtaacgca

SEQ ID NO: 1522 - protein, 529 aa, synthetic construct
  REGION 1..529: note = Variant of terminal deoxynucleotidyltransferase
MHHHHHHGGSGSHGIRTIDSDFGKKRQKKMDNHDSSAIYEIKFHEFVLFILEEKMGATRRTFLTDLARKKGFRVENELSDSVTHIVAENNSRSEVLAWLKEHKMEKTKQFELLDISWLIESMKVGKPVDTKGKYQLAESGEMSANPDPTEGRENELPPTTKTISQYACQRRTTLNNHNQRFTDALEILAENYEFKRNDDTCLTFMRAISVLKCLPFEVVSLKDTEGLPWIGDEVKGIMEEIIEVGESLEVQAVLNDERYQSFKRFKSVFGVGVKTADKWYRMGLRTLEDVRSSKTLKLTPMQKAGLCYYEDLADGVTKAEADAISLLVQDAVWTFDPDALVEITGGFRRGKPFGHDVDLLITSPGAEKEQEDQLLQKVTNLWRKQGLLLYGRLRESRFEDGKLPSRKIDALDHFAKCFLILKLYHHKVDKSKWEMPTGSNESEAKSWKAIRVDLVRCPYDGFAFALLGWTGSRMFRRDLRRYATHEKKMMLDNHALYDLTKKIFLKAKSEEEIFAHLGLEYLEPFERNA

SEQ ID NO: 1523 - DNA, 1587 bp, synthetic construct
  misc_feature 1..1587: note = Variant of terminal deoxynucleotidyltransferase
  source 1..1587: mol_type = other DNA
atgcaccatcatcatcatcatggcggtagcggcagccacggcattcgtaccatcgattcggacttcgggaagaaacgccagaagaagatggataaccacgatagttccgccatctatgaaatcaaatttcacgagtttgtgctgttcattctcgaagagaaaatgggtgcgacgcgtcgtacttttctgacagatttagcccgcaagaaagggttccgcgtcgagaatgaactgtcagacagcgttacccacatcgtggcagaaaataattcacgctctgaagtattggcttggctgaaagaacacaagatggagaagaccaagcaattcgaactgctggatattagctggcttatcgaaagcatgaaagttggtaaaccggtggacaccaaggggaaataccagttggcggaatcgggtgagatgagtgcgaacccagatccgacagagggtcgtgaaaacgagctgcctcctactacgaagaccatttctcagtatgcgtgtcaacgccgcaccaccctgaacaaccataatcaacgttttacggacgcactggaaattcttgcggaaaattacgagttcaaacgcaacgatgatacttgtctgacctttatgcgtgctatttccgtgctgaaatgccttccgtttgaggtagttagcctgaaagacacggaaggattgccctggatcggtgatgaagtcaaagggattatggaagaaatcatcgaggtcggtgaatcgtcggaagtgcaggccgtgctcaatgatgagcgctatcaaagcttcaaacgctttaagagtgtctttggagtgggggtgaagacagcagacaaatggtaccgtatgggtctgcgcacgctcgaggatgttcgttccagcaagaccctgaagttgaccccgatgcagaaagcgggtctgtgctattatgaagatcttgctgatggcgttacgaaagccgaagctgacgcgatttctctgctggttcaggatgcagtctggactttcgacccggatgcgctggtggagattacgggtggatttcgtcgtgggaaaccttttggtcacgacgttgatctgcttatcacatctccgggagctgagaaagaacaagaagaccagctcctgcagaaagtgaccaatctgtggaagaaacaagggttgttgctgtacggtcgtctgcgtgaaagtcgctttgaagatgggaaactcccatcccgcaagatcgatgccctggaccattttgcgaaatgctttctgatcctcaaactttatcaccataaagtggacaaaagcaaatgggaaatgccgacgggttcgaacgaaagcgaggccaaaagttggaaagcaattcgcgtagatctggttcgttgtccctacgatggttttgcgtttgcgttgttgggttggaccggaagccgcatgttccgccgtgatctgcgccgctacgccacccacgagaagaagatgatgctggacaatcatgcgctgtatgacctgaccaagaaaatctttctcaaagctaaatcggaagaggaaattttcgcacatctggggcttgaatacctggaaccgttcgaacgtaacgca

SEQ ID NO: 1524 - protein, 529 aa, synthetic construct
  REGION 1..529: note = Variant of terminal deoxynucleotidyltransferase
MHHHHHHGGSGSHGIRTIDSDFGKKRQKKMDNHDSSAIYEIKFHEFVLFILEEKMGATRRTFLTDLARKKGFRVENELSDSVTHIVAENNSRSEVLAWLKEHKMEKTKQFELLDISWLIESMKVGKPVDTKGKYQLAESGEMSANPDPTEGRENELPPTTKTISQYACQRRTTLNNHNQRFTDALEILAENYEFKRNDDTCLTFMRAISVLKCLPFEVVSLKDTEGLPWIGDEVKGIMEEIIEVGESSEVQAVLNDERYQSFKRFKSVFGVGVKTADKWYRMGLRTLEDVRSSKTLKLTPMQKAGLCYYEDLADGVTKAEADAISLLVQDAVWTFDPDALVEITGGFRRGKPFGHDVDLLITSPGAEKEQEDQLLQKVTNLWKKQGLLLYGRLRESRFEDGKLPSRKIDALDHFAKCFLILKLYHHKVDKSKWEMPTGSNESEAKSWKAIRVDLVRCPYDGFAFALLGWTGSRMFRRDLRRYATHEKKMMLDNHALYDLTKKIFLKAKSEEEIFAHLGLEYLEPFERNA

SEQ ID NO: 1525 - DNA, 1587 bp, synthetic construct
  misc_feature 1..1587: note = Variant of terminal deoxynucleotidyltransferase
  source 1..1587: mol_type = other DNA
atgcaccatcatcatcatcatggcggtagcggcagccacggcattcgtaccatcgattcggacttcgggaagaaacgccagaagaagatggataaccacgatagttccgccatctatgaaatcaaatttcacgagtttgtgctgttcattctcgaagagaaaatgggtgcgacgcgtcgtacttttctgacagatttagcccgcaagaaagggttccgcgtcgagaatgaactgtcagacagcgttacccacatcgtggcagaaaataattcacgctctgaagtattggcttggctgaaagaacacaagatggagaagaccaagcaattcgaactgctggatattagctggcttatcgaaagcatgaaagttggtaaaccggtggacaccaaggggaaataccagttggcggaatcgggtgagatgagtgcgaacccagatccgacagagggtcgtgaaaacgagctgcctcctactacgaagaccatttctcagtatgcgtgtcaacgccgcaccaccctgaacaaccataatcaacgttttacggacgcactggaaattcttgcggaaaattacgagttcaaacgcaacgatgatacttgtctgacctttatgcgtgctatttccgtgctgaaatgccttccgtttgaggtagttagcctgaaagacacggaaggattgccctggatcggtgatgaagtcaaagggattatggaagaaatcatcgaggtcggtgaatcgctggaagtgcaggccgtgctcaatgatgagcgctatcaaagcttcaaacgctttaagagtgtctttggagtgggggtgaagacagcagacaaatggtaccgtatgggtctgcgcacgctcgaggatgttcgttccagcaagaccctgaagttgaccccgatgcagaaagcgggtctgtgctattatgaagatcttgctgatggcgttacgaaagccgaagctgacgcgatttctctgctggttcaggatgcagtctggactttcgacccggatgcgctggtggagattacgggtggatttcgtcgtgggaaaccttttggtcacgacgttgatctgcttatcacatctccgggagctgagaaagaacaagaagaccagctcctgcagaaagtgaccaatctgtggaagaaacaagggttgttgctgtacggtcgtctgcgtgaaagtcgctttgaagatgggaaactcccatcccgcaagatcgatgccctggaccattttgcgaaatgctttctgatcctcaaactttatcaccataaagtggacaaaagcaaatgggaaatgccgacgggttcgaacaatagcgaggccaaaagttggaaagcaattcgcgtagatctggttcgttgtccctacgatggttttgcgtttgcgttgttgggttggaccggaagccgcatgttccgccgtgatctgcgccgctacgccacccacgagaagaagatgatgctggacaatcatgcgctgtatgacctgaccaagaaaatctttctcaaagctaaatcggaagaggaaattttcgcacatctggggcttgaatacctggaaccgttcgaacgtaacgca

SEQ ID NO: 1526 - protein, 529 aa, synthetic construct
  REGION 1..529: note = Variant of terminal deoxynucleotidyltransferase
MHHHHHHGGSGSHGIRTIDSDFGKKRQKKMDNHDSSAIYEIKFHEFVLFILEEKMGATRRTFLTDLARKKGFRVENELSDSVTHIVAENNSRSEVLAWLKEHKMEKTKQFELLDISWLIESMKVGKPVDTKGKYQLAESGEMSANPDPTEGRENELPPTTKTISQYACQRRTTLNNHNQRFTDALEILAENYEFKRNDDTCLTFMRAISVLKCLPFEVVSLKDTEGLPWIGDEVKGIMEEIIEVGESLEVQAVLNDERYQSFKRFKSVFGVGVKTADKWYRMGLRTLEDVRSSKTLKLTPMQKAGLCYYEDLADGVTKAEADAISLLVQDAVWTFDPDALVEITGGFRRGKPFGHDVDLLITSPGAEKEQEDQLLQKVTNLWKKQGLLLYGRLRESRFEDGKLPSRKIDALDHFAKCFLILKLYHHKVDKSKWEMPTGSNNSEAKSWKAIRVDLVRCPYDGFAFALLGWTGSRMFRRDLRRYATHEKKMMLDNHALYDLTKKIFLKAKSEEEIFAHLGLEYLEPFERNA

SEQ ID NO: 1527 - DNA, 1587 bp, synthetic construct
  misc_feature 1..1587: note = Variant of terminal deoxynucleotidyltransferase
  source 1..1587: mol_type = other DNA
atgcaccatcatcatcatcatggcggtagcggcagccacggcattcgtaccatcgattcggacttcgggaagaaacgccagaagaagatggataaccacgatagttccgccatctatgaaatcaaatttcacgagtttgtgctgttcattctcgaagagaaaatgggtgcgacgcgtcgtacttttctgacagatttagcccgcaagaaagggttccgcgtcgagaatgaactgtcagacagcgttacccacatcgtggcagaaaataattcacgctctgaagtattggcttggctgaaagaacacaagatggagaagaccaagcaattcgaactgctggatattagctggcttatcgaaagcatgaaagttggtaaaccggtggacaccaaggggaaataccagttggcggaatcgggtgagatgagtgcgaacccagatccgacagagggtcgtgaaaacgagctgcctcctactacgaagaccatttctcagtatgcgtgtcaacgccgcaccaccctgaacaaccataatcaacgttttacggacgcactggaaattcttgcggaaaattacgagttcaaacgcaacgatgatacttgtctgacctttatgcgtgctatttccgtgctgaaatgccttccgtttgaggtagttagcctgaaagacacggaaggattgccctggatcggtgatgaagtcaaagggattatggaagaaatcatcgaggtcggtgaatcgctggaagtgcaggccgtgctcaatgatgagcgctatcaaagcttcaaacgctttaagagtgtctttggagtgggggtgaagacagcagacaaatggtaccgtatgggtctgcgcacgctcgaggatgttcgttccagcaagaccctgaagttgaccccgatgcagaaagcgggtctgtgctattatgaagatcttgctgatggcgttacgaaagccgaagctgacgcgatttctctgctggttcaggatgcagtctggactttcgacccggatgcgctggtggagattacgggtggatttcgtcgtgggaaaccttttggtcacgacgttgatctgcttatcacatctccgggagctgagaaagaacaagaagaccagctcctgcagaaagtgaccaatctgtggaagaaacaagggttgttgctgtacggtcgtctgcgtgaaagtcgctttgaagatgggaaactcccatcccgcaagatcgatgccctggaccattttgcgaaatgctttctgatcctcaaactttatcaccataaagtggacaaaagcaaatgggaaatgccgtcgggttcgaacgaaagcgaggccaaaagttggaaagcaattcgcgtagatctggttcgttgtccctacgatggttttgcgtttgcgttgttgggttggaccggaagccgcatgttccgccgtgatctgcgccgctacgccacccacgagaagaagatgatgctggacaatcatgcgctgtatgacctgaccaagaaaatctttctcaaagctaaatcggaagaggaaattttcgcacatctggggcttgaatacctggaaccgttcgaacgtaacgca

SEQ ID NO: 1528 - protein, 529 aa, synthetic construct
  REGION 1..529: note = Variant of terminal deoxynucleotidyltransferase
MHHHHHHGGSGSHGIRTIDSDFGKKRQKKMDNHDSSAIYEIKFHEFVLFILEEKMGATRRTFLTDLARKKGFRVENELSDSVTHIVAENNSRSEVLAWLKEHKMEKTKQFELLDISWLIESMKVGKPVDTKGKYQLAESGEMSANPDPTEGRENELPPTTKTISQYACQRRTTLNNHNQRFTDALEILAENYEFKRNDDTCLTFMRAISVLKCLPFEVVSLKDTEGLPWIGDEVKGIMEEIIEVGESLEVQAVLNDERYQSFKRFKSVFGVGVKTADKWYRMGLRTLEDVRSSKTLKLTPMQKAGLCYYEDLADGVTKAEADAISLLVQDAVWTFDPDALVEITGGFRRGKPFGHDVDLLITSPGAEKEQEDQLLQKVTNLWKKQGLLLYGRLRESRFEDGKLPSRKIDALDHFAKCFLILKLYHHKVDKSKWEMPSGSNESEAKSWKAIRVDLVRCPYDGFAFALLGWTGSRMFRRDLRRYATHEKKMMLDNHALYDLTKKIFLKAKSEEEIFAHLGLEYLEPFERNA

SEQ ID NO: 1529 - DNA, 1587 bp, synthetic construct
  misc_feature 1..1587: note = Variant of terminal deoxynucleotidyltransferase
  source 1..1587: mol_type = other DNA
atgcaccatcatcatcatcatggcggtagcggcagccacggcattcgtaccatcgattcggacttcgggaagaaacgccagaagaagatggataaccacgatagttccgccatctatgaaatcaaatttcacgagtttgtgctgttcattctcgaagagaaaatgggtgcgacgcgtcgtacttttctgacagatttagcccgcaagaaagggttccgcgtcgagaatgaactgtcagacagcgttacccacatcgtggcagaaaataattcacgctctgaagtattggcttggctgaaagaacacaagatggagaagaccaagcaattcgaactgctggatattagctggcttatcgaaagcatgaaagttggtaaaccggtggacaccaaggggaaataccagttggcggaatcgggtgagatgagtgcgaacccagatccgacagagggtcgtgaaaacgagctgcctcctactacgaagaccatttctcagtatgcgtgtcaacgccgcaccaccctgaacaaccataatcaacgttttacggacgcactggaaattcttgcggaaaattacgagttcaaacgcaacgatgatacttgtctgacctttatgcgtgctatttccgtgctgaaatgccttccgtttgaggtagttagcctgaaagacacggaaggattgccctggatcggtgatgaagtcaaagggattatggaagaaatcatcgaggtcggtgaatcgctggaagtgcaggccgtgctcaatgatgagcgctatcaaagcttcaaacgctttaagagtgtctttggagtgggggtgaagacagcagacaaatggtaccgtatgggtctgcgcacgctcgaggatgttcgttccagcaagaccctgaagttgaccccgatgcagaaagcgggtctgtgctattatgaagatcttgctgatggcgttacgaaagccgaagctgacgcgatttctctgctggttcaggatgcagtctggactttcgacccggatgcgctggtggagattacgggtggatttcgtcgtgggaaaccttttggtcacgacgttgatctgcttatcacatctccgggagctgagaaagaacaagaagaccagctcctgcagaaagtgaccaatctgtggaagaaacaagggttgttgctgtacggtcgtctgcgtgaaagtcgctttgaagatgggaaactcccatcccgcaagatcgatgccctggaccattttgcgaaatgctttctgatcctcaaactttatcaccataaagtggacaaaagcaaatgggaaatgccgacgggttcgaacgaaggtgaggccaaaagttggaaagcaattcgcgtagatctggttcgttgtccctacgatggttttgcgtttgcgttgttgggttggaccggaagccgcatgttccgccgtgatctgcgccgctacgccacccacgagaagaagatgatgctggacaatcatgcgctgtatgacctgaccaagaaaatctttctcaaagctaaatcggaagaggaaattttcgcacatctggggcttgaatacctggaaccgttcgaacgtaacgca

SEQ ID NO: 1530 - protein, 529 aa, synthetic construct
  REGION 1..529: note = Variant of terminal deoxynucleotidyltransferase
MHHHHHHGGSGSHGIRTIDSDFGKKRQKKMDNHDSSAIYEIKFHEFVLFILEEKMGATRRTFLTDLARKKGFRVENELSDSVTHIVAENNSRSEVLAWLKEHKMEKTKQFELLDISWLIESMKVGKPVDTKGKYQLAESGEMSANPDPTEGRENELPPTTKTISQYACQRRTTLNNHNQRFTDALEILAENYEFKRNDDTCLTFMRAISVLKCLPFEVVSLKDTEGLPWIGDEVKGIMEEIIEVGESLEVQAVLNDERYQSFKRFKSVFGVGVKTADKWYRMGLRTLEDVRSSKTLKLTPMQKAGLCYYEDLADGVTKAEADAISLLVQDAVWTFDPDALVEITGGFRRGKPFGHDVDLLITSPGAEKEQEDQLLQKVTNLWKKQGLLLYGRLRESRFEDGKLPSRKIDALDHFAKCFLILKLYHHKVDKSKWEMPTGSNEGEAKSWKAIRVDLVRCPYDGFAFALLGWTGSRMFRRDLRRYATHEKKMMLDNHALYDLTKKIFLKAKSEEEIFAHLGLEYLEPFERNA

SEQ ID NO: 1531 - DNA, 1587 bp, synthetic construct
  misc_feature 1..1587: note = Variant of terminal deoxynucleotidyltransferase
  source 1..1587: mol_type = other DNA
atgcaccatcatcatcatcatggcggtagcggcagccacggcattcgtaccatcgattcggacttcgggaagaaacgccagaagaagatggataaccacgatagttccgccatctatgaaatcaaatttcacgagtttgtgctgttcattctcgaagagaaaatgggtgcgacgcgtcgtacttttctgacagatttagcccgcaagaaagggttccgcgtcgagaatgaactgtcagacagcgttacccacatcgtggcagaaaataattcacgctctgaagtattggcttggctgaaagaacacaagatggagaagaccaagcaattcgaactgctggatattagctggcttatcgaaagcatgaaagttggtaaaccggtggacaccaaggggaaataccagttggcggaatcgggtgagatgagtgcgaacccagatccgacagagggtcgtgaaaacgagctgcctcctactacgaagaccatttctcagtatgcgtgtcaacgccgcaccaccctgaacaaccataatcaacgttttacggacgcactggaaattcttgcggaaaattacgagttcaaacgcaacgatgatacttgtctgacctttatgcgtgctatttccgtgctgaaatgccttccgtttgaggtagttagcctgaaagacacggaaggattgccctggatcggtgatgaagtcaaagggattatggaagaaatcatcgaggtcggtgaatcgctggaagtgcaggccgtgctcaatgatgagcgctatcaaagcttcaaacgctttaagagtgtctttggagtgggggtgaagacagcagacaaatggtaccgtatgggtctgcgcacgctcgaggatgttcgttccagcaagaccctgaagttgaccccgatgcagaaagcgggtctgtgctattatgaagatcttgctgatggcgttacgaaagccgaagctgacgcgatttctctgctggttcaggatgcagtctggactttcgacccggatgcgctggtggagattacgggtggatttcgtcgtgggaaaccttttggtcacgacgttgatctgcttatcacatctccgggagctgagaaagaacaagaagaccagctcctgcagaaagtgaccaatctgtggaagaaacaagggttgttgctgtacggtcgtctgcgtgaaagtcgctttgaagatgggaaactcccatcccgcaagatcgatgccctggaccattttgcgaaatgctttctgatcctcaaactttatcaccataaagtggacaaaagcaaatgggaaatgccgacgggttcgaacgaaagcgaggccaaaagttggaaagcaattcgcgtagatctggttcgttgtccctacgatggttttgcgtttgcgttgttgggttggaccggaagccgcatgttccgccgtgatctgcgccgctacgccacccacgagaagaagatgatgctggacaatcatgcgctgtatgacctgaccaagaaaatctttctcgaggctaaatcggaagaggaaattttcgcacatctggggcttgaatacctggaaccgttcgaacgtaacgca

SEQ ID NO: 1532 - protein, 529 aa, synthetic construct
  REGION 1..529: note = Variant of terminal deoxynucleotidyltransferase
MHHHHHHGGSGSHGIRTIDSDFGKKRQKKMDNHDSSAIYEIKFHEFVLFILEEKMGATRRTFLTDLARKKGFRVENELSDSVTHIVAENNSRSEVLAWLKEHKMEKTKQFELLDISWLIESMKVGKPVDTKGKYQLAESGEMSANPDPTEGRENELPPTTKTISQYACQRRTTLNNHNQRFTDALEILAENYEFKRNDDTCLTFMRAISVLKCLPFEVVSLKDTEGLPWIGDEVKGIMEEIIEVGESLEVQAVLNDERYQSFKRFKSVFGVGVKTADKWYRMGLRTLEDVRSSKTLKLTPMQKAGLCYYEDLADGVTKAEADAISLLVQDAVWTFDPDALVEITGGFRRGKPFGHDVDLLITSPGAEKEQEDQLLQKVTNLWKKQGLLLYGRLRESRFEDGKLPSRKIDALDHFAKCFLILKLYHHKVDKSKWEMPTGSNESEAKSWKAIRVDLVRCPYDGFAFALLGWTGSRMFRRDLRRYATHEKKMMLDNHALYDLTKKIFLEAKSEEEIFAHLGLEYLEPFERNA

SEQ ID NO: 1533 - DNA, 1587 bp, synthetic construct
  misc_feature 1..1587: note = Variant of terminal deoxynucleotidyltransferase
  source 1..1587: mol_type = other DNA
atgcaccatcatcatcatcatggcggtagcggcagccacggcattcgtaccatcgattcggacttcgggaagaaacgccagaagaagatggataaccacgatagttccgccatctatgaaatcaaatttcacgagtttgtgctgttcattctcgaagagaaaatgggtgcgacgcgtcgtacttttctgacagatttagcccgcaagaaagggttccgcgtcgagaatgaactgtcagacagcgttacccacatcgtggcagaaaataattcacgctctgaagtattggcttggctgaaagaacacaagatggagaagaccaagcaattcgaactgctggatattagctggcttatcgaaagcatgaaagttggtaaaccggtggacaccaaggggaaataccagttggcggaatcgggtgagatgagtgcgaacccagatccgacagagggtcgtgaaaacgagctgcctcctactacgaagaccatttctcagtatgcgtgtcaacgccgcaccaccctgaacaaccataatcaacgttttacggacgcactggaaattcttgcggaaaattacgagttcaaacgcaacgatgatacttgtctgacctttatgcgtgctatttccgtgctgaaatgccttccgtttgaggtagttagcctgaaagacacggaaggattgccctggatcggtgatgaagtcaaagggattatggaagaaatcatcgaggtcggtgaatcgctggaagtgcaggccgtgctcaatgatgagcgctatcaaagcttcaaacgctttaagagtgtctttggagtgggggtgaagacagcagacaaatggtaccgtatgggtctgcgcacgctcgaggatgttcgttccagcaagaccctgaagttgaccccgatgcagaaagcgggtctgtgctattatgaagatcttgctgatggcgttacgaaagccgaagctgacgcgatttctctgctggttcaggatgcagtctggactttcgacccggatgcgctggtggagattacgggtggatttcgtcgtgggaaaccttttggtcacgacgttgatctgcttatcacatctccgggagctgagaaagaacaagaagaccagctcctgcagaaagtgaccaatctgtggaagaaacaagggttgttgctgtacggtcgtctgcgtgaaagtcgctttgaagatgggaaactcccatcccgcaagatcgatgccctggaccattttgcgaaatgctttctgatcctcaaactttatcaccataaagtggacaaaagcaaatgggaaatgccgacgggttcgaacgaaagcgaggccaaaagttggaaagcaattcgcgtagatctggttcgttgtccctacgatggttttgcgtttgcgttgttgggttggaccggaagccgcatgttccgccgtgatctgcgccgctacgccacccacgagaagaagatgcatctggacaatcatgcgctgtatgacctgaccaagaaaatctttctcaaagctaaatcggaagaggaaattttcgcacatctggggcttgaatacctggaaccgttcgaacgtaacgca

SEQ ID NO: 1534 - protein, 529 aa, synthetic construct
  REGION 1..529: note = Variant of terminal deoxynucleotidyltransferase
MHHHHHHGGSGSHGIRTIDSDFGKKRQKKMDNHDSSAIYEIKFHEFVLFILEEKMGATRRTFLTDLARKKGFRVENELSDSVTHIVAENNSRSEVLAWLKEHKMEKTKQFELLDISWLIESMKVGKPVDTKGKYQLAESGEMSANPDPTEGRENELPPTTKTISQYACQRRTTLNNHNQRFTDALEILAENYEFKRNDDTCLTFMRAISVLKCLPFEVVSLKDTEGLPWIGDEVKGIMEEIIEVGESLEVQAVLNDERYQSFKRFKSVFGVGVKTADKWYRMGLRTLEDVRSSKTLKLTPMQKAGLCYYEDLADGVTKAEADAISLLVQDAVWTFDPDALVEITGGFRRGKPFGHDVDLLITSPGAEKEQEDQLLQKVTNLWKKQGLLLYGRLRESRFEDGKLPSRKIDALDHFAKCFLILKLYHHKVDKSKWEMPTGSNESEAKSWKAIRVDLVRCPYDGFAFALLGWTGSRMFRRDLRRYATHEKKMHLDNHALYDLTKKIFLKAKSEEEIFAHLGLEYLEPFERNA

SEQ ID NO: 1535 - DNA, 1587 bp, synthetic construct
  misc_feature 1..1587: note = Variant of terminal deoxynucleotidyltransferase
  source 1..1587: mol_type = other DNA
atgcaccatcatcatcatcatggcggtagcggcagccacggcattcgtaccatcgattcggacttcgggaagaaacgccagaagaagatggataaccacgatagttccgccatctatgaaatcaaatttcacgagtttgtgctgttcattctcgaagagaaaatgggtgcgacgcgtcgtacttttctgacagatttagcccgcaagaaagggttccgcgtcgagaatgaactgtcagacagcgttacccacatcgtggcagaaaataattcacgctctgaagtattggcttggctgaaagaacacaagatggagaagaccaagcaattcgaactgctggatattagctggcttatcgaaagcatgaaagttggtaaaccggtggacaccaaggggaaataccagttggcggaatcgggtgagatgagtgcgaacccagatccgacagagggtcgtgaaaacgagctgcctcctactacgaagaccatttctcagtatgcgtgtcaacgccgcaccaccctgaacaaccataatcaacgttttacggacgcactggaaattcttgcggaaaattacgagttcaaacgcaacgatgatacttgtctgacctttatgcgtgctatttccgtgctgaaatgccttccgtttgaggtagttagcctgaaagacacggaaggattgccctggatcggtgatgaagtcaaagggattatggaagaaatcatcgaggtcggtgaatcgctggaagtgcaggccgtgctcaatgatgagcgctatcaaagcttcaaacgctttaagagtgtctttggagtgggggtgaagacagcagacaaatggtaccgtatgggtctgcgcacgctcgaggatgttcgttccagcaagaccctgaagttgaccccgatgcagaaagcgggtctgtgctattatgaagatcttgctgatggcgttacgaaagccgaagctgacgcgatttctctgctggttcaggatgcagtctggactttcgacccggatgcgctggtggagattacgggtggatttcgtcgtgggaaaccttttggtcacgacgttgatctgcttatcacatctccgggagctgagaaagaacaagaagaccagctcctgcagaaagtgaccaatctgtggaagaaacaagggttgttgctgtacggtcgtctgcgtgaaagtcgctttgaagatgggaaactcccatcccgcaagatcgatgccctggaccattttgcgaaatgctttctgatcctcaaactttatcaccataaagtggacaaaagcaaatgggaaatgccgacgggttcgaacgaaagcgaggccaaaagttggaaagcaattcgcgtagatctggttcgttgtccctacgatggttttgcgtttgcgttgttgggttggaccggaagccgcatgttccgccgtgatctgcgccgctacgccacccacgagaagaagatggagctggacaatcatgcgctgtatgacctgaccaagaaaatctttctcaaagctaaatcggaagaggaaattttcgcacatctggggcttgaatacctggaaccgttcgaacgtaacgca

SEQ ID NO: 1536 - protein, 529 aa, synthetic construct
  REGION 1..529: note = Variant of terminal deoxynucleotidyltransferase
MHHHHHHGGSGSHGIRTIDSDFGKKRQKKMDNHDSSAIYEIKFHEFVLFILEEKMGATRRTFLTDLARKKGFRVENELSDSVTHIVAENNSRSEVLAWLKEHKMEKTKQFELLDISWLIESMKVGKPVDTKGKYQLAESGEMSANPDPTEGRENELPPTTKTISQYACQRRTTLNNHNQRFTDALEILAENYEFKRNDDTCLTFMRAISVLKCLPFEVVSLKDTEGLPWIGDEVKGIMEEIIEVGESLEVQAVLNDERYQSFKRFKSVFGVGVKTADKWYRMGLRTLEDVRSSKTLKLTPMQKAGLCYYEDLADGVTKAEADAISLLVQDAVWTFDPDALVEITGGFRRGKPFGHDVDLLITSPGAEKEQEDQLLQKVTNLWKKQGLLLYGRLRESRFEDGKLPSRKIDALDHFAKCFLILKLYHHKVDKSKWEMPTGSNESEAKSWKAIRVDLVRCPYDGFAFALLGWTGSRMFRRDLRRYATHEKKMELDNHALYDLTKKIFLKAKSEEEIFAHLGLEYLEPFERNA

SEQ ID NO: 1537 - DNA, 1587 bp, synthetic construct
  misc_feature 1..1587: note = Variant of terminal deoxynucleotidyltransferase
  source 1..1587: mol_type = other DNA
atgcaccatcatcatcatcatggcggtagcggcagccacggcattcgtaccatcgattcggacttcgggaagaaacgccagaagaagatggataaccacgatagttccgccatctatgaaatcaaatttcacgagtttgtgctgttcattctcgaagagaaaatgggtgcgacgcgtcgtacttttctgacagatttagcccgcaagaaagggttccgcgtcgagaatgaactgtcagacagcgttacccacatcgtggcagaaaataattcacgctctgaagtattggcttggctgaaagaacacaagatggagaagaccaagcaattcgaactgctggatattagctggcttatcgaaagcatgaaagttggtaaaccggtggacaccaaggggaaataccagttggcggaatcgggtgagatgagtgcgaacccagatccgacagagggtcgtgaaaacgagctgcctcctactacgaagaccatttctcagtatgcgtgtcaacgccgcaccaccctgaacaaccataatcaacgttttacggacgcactggaaattcttgcggaaaattacgagttcaaacgcaacgatgatacttgtctgacctttatgcgtgctatttccgtgctgaaatgccttccgtttgaggtagttagcctgaaagacacggaaggattgccctggatcggtgatgaagtcaaagggattatggaagaaatcatcgaggtcggtgaatcgctggaagtgcaggccgtgctcaatgatgagcgctatcaaagcttcaaacgctttaagagtgtctttggagtgggggtgaagacagcagacaaatggtaccgtatgggtctgcgcacgctcgaggatgttcgttccagcaagaccctgaagttgaccccgatgcagaaagcgggtctgtgctattatgaagatcttgctgatggcgttacgaaagccgaagctgacgcgatttctctgctggttcaggatgcagtctggactttcgacccggatgcgggggtggagattacgggtggatttcgtcgtgggaaaccttttggtcacgacgttgatctgcttatcacatctccgggagctgagaaagaacaagaagaccagctcctgcagaaagtgaccaatctgtggaagaaacaagggttgttgctgtacggtcgtctgcgtgaaagtcgctttgaagatgggaaactcccatcccgcaagatcgatgccctggaccattttgcgaaatgctttctgatcctcaaactttatcaccataaagtggacaaaagcaaatgggaaatgccgacgggttcgaacgaaagcgaggccaaaagttggaaagcaattcgcgtagatctggttcgttgtccctacgatggttttgcgtttgcgttgttgggttggaccggaagccgcatgttccgccgtgatctgcgccgctacgccacccacgagaagaagatgatgctggacaatcatgcgctgtatgacctgaccaagaaaatctttctcaaagctaaatcggaagaggaaattttcgcacatctggggcttgaatacctggaaccgttcgaacgtaacgca

SEQ ID NO: 1538 - protein, 529 aa, synthetic construct
  REGION 1..529: note = Variant of terminal deoxynucleotidyltransferase
MHHHHHHGGSGSHGIRTIDSDFGKKRQKKMDNHDSSAIYEIKFHEFVLFILEEKMGATRRTFLTDLARKKGFRVENELSDSVTHIVAENNSRSEVLAWLKEHKMEKTKQFELLDISWLIESMKVGKPVDTKGKYQLAESGEMSANPDPTEGRENELPPTTKTISQYACQRRTTLNNHNQRFTDALEILAENYEFKRNDDTCLTFMRAISVLKCLPFEVVSLKDTEGLPWIGDEVKGIMEEIIEVGESLEVQAVLNDERYQSFKRFKSVFGVGVKTADKWYRMGLRTLEDVRSSKTLKLTPMQKAGLCYYEDLADGVTKAEADAISLLVQDAVWTFDPDAGVEITGGFRRGKPFGHDVDLLITSPGAEKEQEDQLLQKVTNLWKKQGLLLYGRLRESRFEDGKLPSRKIDALDHFAKCFLILKLYHHKVDKSKWEMPTGSNESEAKSWKAIRVDLVRCPYDGFAFALLGWTGSRMFRRDLRRYATHEKKMMLDNHALYDLTKKIFLKAKSEEEIFAHLGLEYLEPFERNA

SEQ ID NO: 1539 - DNA, 1587 bp, synthetic construct
  misc_feature 1..1587: note = Variant of terminal deoxynucleotidyltransferase
  source 1..1587: mol_type = other DNA
atgcaccatcatcatcatcatggcggtagcggcagccacggcattcgtaccatcgattcggacttcgggaagaaacgccagaagaagatggataaccacgatagttccgccatctatgaaatcaaatttcacgagtttgtgctgttcattctcgaagagaaaatgggtgcgacgcgtcgtacttttctgacagatttagcccgcaagaaagggttccgcgtcgagaatgaactgtcagacagcgttacccacatcgtggcagaaaataattcacgctctgaagtattggcttggctgaaagaacacaagatggagaagaccaagcaattcgaactgctggatattagctggcttatcgaaagcatgaaagttggtaaaccggtggacaccaaggggaaataccagttggcggaatcgggtgagatgagtgcgaacccagatccgacagagggtcgtgaaaacgagctgcctcctactacgaagaccatttctcagtatgcgtgtcaacgccgcaccaccctgaacaaccataatcaacgttttacggacgcactggaaattcttgcggaaaattacgagttcaaacgcaacgatgatacttgtctgacctttatgcgtgctatttccgtgctgaaatgccttccgtttgaggtagttagcctgaaagacacggaaggattgccctggatcggtgatgaagtcaaaattattatggaagaaatcatcgaggtcggtgaatcgctggaagtgcaggccgtgctcaatgatgagcgctatcaaagcttcaaacgctttaagagtgtctttggagtgggggtgaagacagcagacaaatggtaccgtatgggtctgcgcacgctcgaggatgttcgttccagcaagaccctgaagttgaccccgatgcagaaagcgggtctgtgctattatgaagatcttgctgatggcgttacgaaagccgaagctgacgcgatttctctgctggttcaggatgcagtctggactttcgacccggatgcgctggtggagattacgggtggatttcgtcgtgggaaaccttttggtcacgacgttgatctgcttatcacatctccgggagctgagaaagaacaagaagaccagctcctgcagaaagtgaccaatctgtggaagaaacaagggttgttgctgtacggtcgtctgcgtgaaagtcgctttgaagatgggaaactcccatcccgcaagatcgatgccctggaccattttgcgaaatgctttctgatcctcaaactttatcaccataaagtggacaaaagcaaatgggaaatgccgacgggttcgaacgaaagcgaggccaaaagttggaaagcaattcgcgtagatctggttcgttgtccctacgatggttttgcgtttgcgttgttgggttggaccggaagccgcatgttccgccgtgatctgcgccgctacgccacccacgagaagaagatgatgctggacaatcatgcgctgtatgacctgaccaagaaaatctttctcaaagctaaatcggaagaggaaattttcgcacatctggggcttgaatacctggaaccgttcgaacgtaacgca

SEQ ID NO: 1540 - protein, 529 aa, synthetic construct
  REGION 1..529: note = Variant of terminal deoxynucleotidyltransferase
MHHHHHHGGSGSHGIRTIDSDFGKKRQKKMDNHDSSAIYEIKFHEFVLFILEEKMGATRRTFLTDLARKKGFRVENELSDSVTHIVAENNSRSEVLAWLKEHKMEKTKQFELLDISWLIESMKVGKPVDTKGKYQLAESGEMSANPDPTEGRENELPPTTKTISQYACQRRTTLNNHNQRFTDALEILAENYEFKRNDDTCLTFMRAISVLKCLPFEVVSLKDTEGLPWIGDEVKIIMEEIIEVGESLEVQAVLNDERYQSFKRFKSVFGVGVKTADKWYRMGLRTLEDVRSSKTLKLTPMQKAGLCYYEDLADGVTKAEADAISLLVQDAVWTFDPDALVEITGGFRRGKPFGHDVDLLITSPGAEKEQEDQLLQKVTNLWKKQGLLLYGRLRESRFEDGKLPSRKIDALDHFAKCFLILKLYHHKVDKSKWEMPTGSNESEAKSWKAIRVDLVRCPYDGFAFALLGWTGSRMFRRDLRRYATHEKKMMLDNHALYDLTKKIFLKAKSEEEIFAHLGLEYLEPFERNA

SEQ ID NO: 1541 - DNA, 1587 bp, synthetic construct
  misc_feature 1..1587: note = Variant of terminal deoxynucleotidyltransferase
  source 1..1587: mol_type = other DNA
atgcaccatcatcatcatcatggcggtagcggcagccacggcattcgtaccatcgattcggacttcgggaagaaacgccagaagaagatggataaccacgatagttccgccatctatgaaatcaaatttcacgagtttgtgctgttcattctcgaagagaaaatgggtgcgacgcgtcgtacttttctgacagatttagcccgcaagaaagggttccgcgtcgagaatgaactgtcagacagcgttacccacatcgtggcagaaaataattcacgctctgaagtattggcttggctgaaagaacacaagatggagaagaccaagcaattcgaactgctggatattagctggcttatcgaaagcatgaaagttggtaaaccggtggacaccaaggggaaataccagttggcggaatcgggtgagatgagtgcgaacccagatccgacagagggtcgtgaaaacgagctgcctcctactacgaagaccatttctcagtatgcgtgtcaacgccgcaccaccctgaacaaccataatcaacgttttacggacgcactggaaattcttgcggaaaattacgagttcaaacgcaacgatgatacttgtctgacctttatgcgtgctatttccgtgctgaaatgccttccgtttgaggtagttagcctgaaagacacggaaggattgccctggatcggtgatgaagtcaaagggattatggaagaaatcatcgaggtcggtgaatcgctggaagtgcaggccgtgctcaatgatgagcgctatcaaagcttcaaacgctttaagagtgtctttggagtgggggtgaagacagcagacaaatggtaccgtatgggtctgcgcacgctcgaggatgttcgttccagcaagaccctgaagttgaccccgatgcagaaagcgggtctgtgctattatgaagatcttgctgatggcgttacgaaagccgaagctgacgcgatttctctgctggttcaggatgcagtctgggagttcgacccggatgcgctggtggagattacgggtggatttcgtcgtgggaaaccttttggtcacgacgttgatctgcttatcacatctccgggagctgagaaagaacaagaagaccagctcctgcagaaagtgaccaatctgtggaagaaacaagggttgttgctgtacggtcgtctgcgtgaaagtcgctttgaagatgggaaactcccatcccgcaagatcgatgccctggaccattttgcgaaatgctttctgatcctcaaactttatcaccataaagtggacaaaagcaaatgggaaatgccgacgggttcgaacgaaagcgaggccaaaagttggaaagcaattcgcgtagatctggttcgttgtccctacgatggttttgcgtttgcgttgttgggttggaccggaagccgcatgttccgccgtgatctgcgccgctacgccacccacgagaagaagatgatgctggacaatcatgcgctgtatgacctgaccaagaaaatctttctcaaagctaaatcggaagaggaaattttcgcacatctggggcttgaatacctggaaccgttcgaacgtaacgca

SEQ ID NO: 1542 - protein, 529 aa, synthetic construct
  REGION 1..529: note = Variant of terminal deoxynucleotidyltransferase
MHHHHHHGGSGSHGIRTIDSDFGKKRQKKMDNHDSSAIYEIKFHEFVLFILEEKMGATRRTFLTDLARKKGFRVENELSDSVTHIVAENNSRSEVLAWLKEHKMEKTKQFELLDISWLIESMKVGKPVDTKGKYQLAESGEMSANPDPTEGRENELPPTTKTISQYACQRRTTLNNHNQRFTDALEILAENYEFKRNDDTCLTFMRAISVLKCLPFEVVSLKDTEGLPWIGDEVKGIMEEIIEVGESLEVQAVLNDERYQSFKRFKSVFGVGVKTADKWYRMGLRTLEDVRSSKTLKLTPMQKAGLCYYEDLADGVTKAEADAISLLVQDAVWEFDPDALVEITGGFRRGKPFGHDVDLLITSPGAEKEQEDQLLQKVTNLWKKQGLLLYGRLRESRFEDGKLPSRKIDALDHFAKCFLILKLYHHKVDKSKWEMPTGSNESEAKSWKAIRVDLVRCPYDGFAFALLGWTGSRMFRRDLRRYATHEKKMMLDNHALYDLTKKIFLKAKSEEEIFAHLGLEYLEPFERNA

SEQ ID NO: 1543 - DNA, 1587 bp, synthetic construct
  misc_feature 1..1587: note = Variant of terminal deoxynucleotidyltransferase
  source 1..1587: mol_type = other DNA
atgcaccatcatcatcatcatggcggtagcggcagccacggcattcgtaccatcgattcggacttcgggaagaaacgccagaagaagatggataaccacgatagttccgccatctatgaaatcaaatttcacgagtttgtgctgttcattctcgaagagaaaatgggtgcgacgcgtcgtacttttctgacagatttagcccgcaagaaagggttccgcgtcgagaatgaactgtcagacagcgttacccacatcgtggcagaaaataattcacgctctgaagtattggcttggctgaaagaacacaagatggagaagaccaagcaattcgaactgctggatattagctggcttatcgaaagcatgaaagttggtaaaccggtggacaccaaggggaaataccagttggcggaatcgggtgagatgagtgcgaacccagatccgacagagggtcgtgaaaacgagctgcctcctactacgaagaccatttctcagtatgcgtgtcaacgccgcaccaccctgaacaaccataatcaacgttttacggacgcactggaaattcttgcggaaaattacgagttcaaacgcaacgatgatacttgtctgacctttatgcgtgctatttccgtgctgaaatgccttccgtttgaggtagttagcctgaaagacacggaaggattgccctggatcggtgatgaagtcaaagggattatggaagaaatcatcgaggtcggtgaatcgctggaagtgcaggccgtgctcaatgatgagcgctatcaaagcttcaaacgctttaagagtgtctttggagtgggggtgaagacagcagacaaatggtaccgtatgggtctgcgcacgctcgaggatgttcgttccagcaagaccctgaagttgaccccgatgcagaaagcgggtctgtgctattatgaagatcttgctgatggcgttacgaaagccgaagctgacgcgatttctctgctggttcaggatgcagtctggactttcgacccggatgcgctggtggagattacgggtggatttcgtcgtgggaaaccttttggtcacgacgttgatctgcttatcacatctccgggagctgagaaagaacaagaagaccagctcctgcagaaagtgaccaatctgtggaagaaacaagggttgttgctgtacggtcgtctgcgtgaaagtcgctttgaagatgggaaactcccatcccgcaagatcgatgccctggaccattttgcgaaatgctttctgatcctcaaactttatcaccataaagtggacaaaagcaaatgggaaatgccgcagggttcgaacgaaagcgaggccaaaagttggaaagcaattcgcgtagatctggttcgttgtccctacgatggttttgcgtttgcgttgttgggttggaccggaagccgcatgttccgccgtgatctgcgccgctacgccacccacgagaagaagatgatgctggacaatcatgcgctgtatgacctgaccaagaaaatctttctcaaagctaaatcggaagaggaaattttcgcacatctggggcttgaatacctggaaccgttcgaacgtaacgca

SEQ ID NO: 1544 - protein, 529 aa, synthetic construct
  REGION 1..529: note = Variant of terminal deoxynucleotidyltransferase
MHHHHHHGGSGSHGIRTIDSDFGKKRQKKMDNHDSSAIYEIKFHEFVLFILEEKMGATRRTFLTDLARKKGFRVENELSDSVTHIVAENNSRSEVLAWLKEHKMEKTKQFELLDISWLIESMKVGKPVDTKGKYQLAESGEMSANPDPTEGRENELPPTTKTISQYACQRRTTLNNHNQRFTDALEILAENYEFKRNDDTCLTFMRAISVLKCLPFEVVSLKDTEGLPWIGDEVKGIMEEIIEVGESLEVQAVLNDERYQSFKRFKSVFGVGVKTADKWYRMGLRTLEDVRSSKTLKLTPMQKAGLCYYEDLADGVTKAEADAISLLVQDAVWTFDPDALVEITGGFRRGKPFGHDVDLLITSPGAEKEQEDQLLQKVTNLWKKQGLLLYGRLRESRFEDGKLPSRKIDALDHFAKCFLILKLYHHKVDKSKWEMPQGSNESEAKSWKAIRVDLVRCPYDGFAFALLGWTGSRMFRRDLRRYATHEKKMMLDNHALYDLTKKIFLKAKSEEEIFAHLGLEYLEPFERNA

SEQ ID NO: 1545 - DNA, 1587 bp, synthetic construct
  misc_feature 1..1587: note = Variant of terminal deoxynucleotidyltransferase
  source 1..1587: mol_type = other DNA
atgcaccatcatcatcatcatggcggtagcggcagccacggcattcgtaccatcgattcggacttcgggaagaaacgccagaagaagatggataaccacgatagttccgccatctatgaaatcaaatttcacgagtttgtgctgttcattctcgaagagaaaatgggtgcgacgcgtcgtacttttctgacagatttagcccgcaagaaagggttccgcgtcgagaatgaactgtcagacagcgttacccacatcgtggcagaaaataattcacgctctgaagtattggcttggctgaaagaacacaagatggagaagaccaagcaattcgaactgctggatattagctggcttatcgaaagcatgaaagttggtaaaccggtggacaccaaggggaaataccagttggcggaatcgggtgagatgagtgcgaacccagatccgacagagggtcgtgaaaacgagctgcctcctactacgaagaccatttctcagtatgcgtgtcaacgccgcaccaccctgaacaaccataatcaacgttttacggacgcactggaaattcttgcggaaaattacgagttcaaacgcaacgatgatacttgtctgacctttatgcgtgctatttccgtgctgaaatgccttccgtttgaggtagttagcctgaaagacacggaaggattgccctggatcggtgatgaagtcaaagggattatggaagaaatcatcgaggtcggtgaatcgctggaagtgcaggccgtgctcaatgatgagcgctatcaaagcttcaaacgctttaagagtgtctttggagtgggggtgaagacagcagacaaatggtaccgtatgggtctgcgcacgctcgaggatgttcgttccagcaagaccctgaagttgaccccgatgcagaaagcgggtctgtgctattatgaagatcttgctgatggcgttacgaaagccgaagctgacgcgatttctctgctggttcaggatgcagtctggactttcgacccggatgcgctggtggagattacgggtggatttcgtcgtgggaaaccttttggtcacgacgttgatctgcttatcacatctccgggagctgagaaagaacaagaagaccagctcctgcagaaagtgaccaatctgtggaagaaacaagggttgttgctgtacggtcgtctgcgtgaaagtcgctttgaagatgggaaactcccatcccgcaagatcgatgccctggaccattttgcgaaatgctttctgatcctcaaactttatcaccataaagtggacaaaagcaaatgggaacagccgacgggttcgaacgaaagcgaggccaaaagttggaaagcaattcgcgtagatctggttcgttgtccctacgatggttttgcgtttgcgttgttgggttggaccggaagccgcatgttccgccgtgatctgcgccgctacgccacccacgagaagaagatgatgctggacaatcatgcgctgtatgacctgaccaagaaaatctttctcaaagctaaatcggaagaggaaattttcgcacatctggggcttgaatacctggaaccgttcgaacgtaacgca

SEQ ID NO: 1546 - protein, 529 aa, synthetic construct
  REGION 1..529: note = Variant of terminal deoxynucleotidyltransferase
MHHHHHHGGSGSHGIRTIDSDFGKKRQKKMDNHDSSAIYEIKFHEFVLFILEEKMGATRRTFLTDLARKKGFRVENELSDSVTHIVAENNSRSEVLAWLKEHKMEKTKQFELLDISWLIESMKVGKPVDTKGKYQLAESGEMSANPDPTEGRENELPPTTKTISQYACQRRTTLNNHNQRFTDALEILAENYEFKRNDDTCLTFMRAISVLKCLPFEVVSLKDTEGLPWIGDEVKGIMEEIIEVGESLEVQAVLNDERYQSFKRFKSVFGVGVKTADKWYRMGLRTLEDVRSSKTLKLTPMQKAGLCYYEDLADGVTKAEADAISLLVQDAVWTFDPDALVEITGGFRRGKPFGHDVDLLITSPGAEKEQEDQLLQKVTNLWKKQGLLLYGRLRESRFEDGKLPSRKIDALDHFAKCFLILKLYHHKVDKSKWEQPTGSNESEAKSWKAIRVDLVRCPYDGFAFALLGWTGSRMFRRDLRRYATHEKKMMLDNHALYDLTKKIFLKAKSEEEIFAHLGLEYLEPFERNA

SEQ ID NO: 1547 - DNA, 1587 bp, synthetic construct
  misc_feature 1..1587: note = Variant of terminal deoxynucleotidyltransferase
  source 1..1587: mol_type = other DNA
atgcaccatcatcatcatcatggcggtagcggcagccacggcattcgtaccatcgattcggacttcgggaagaaacgccagaagaagatggataaccacgatagttccgccatctatgaaatcaaatttcacgagtttgtgctgttcattctcgaagagaaaatgggtgcgacgcgtcgtacttttctgacagatttagcccgcaagaaagggttccgcgtcgagaatgaactgtcagacagcgttacccacatcgtggcagaaaataattcacgctctgaagtattggcttggctgaaagaacacaagatggagaagaccaagcaattcgaactgctggatattagctggcttatcgaaagcatgaaagttggtaaaccggtggacaccaaggggaaataccagttggcggaatcgggtgagatgagtgcgaacccagatccgacagagggtcgtgaaaacgagctgcctcctactacgaagaccatttctcagtatgcgtgtcaacgccgcaccaccctgaacaaccataatcaacgttttacggacgcactggaaattcttgcggaaaattacgagttcaaacgcaacgatgatacttgtctgacctttatgcgtgctatttccgtgctgaaatgccttccgtttgaggtagttagcctgaaagacacggaaggattgccctggatcggtgatgaagtcaaagggattatggaagaaatcatcgaggtcggtgaatcgctggaagtgcaggccgtgctcaatgatgagcgctatcaaagcttcaaacgctttaagagtgtctttggagtgggggtgaagacagcagacaaatggtaccgtatgggtctgcgcacgctcgaggatgttcgttccagcaagaccctgaagttgaccccgatgcagaaagcgggtctgtgctattatgaagatcttgctgatggcgttacgaaagccgaagctgacgcgatttctctgctggttcaggatgcagtctggactttcgacccggatgcgctggtggagattacgggtggatttcgtcgtgggaaaccttttggtcacgacgttgatctgcttatcacatctccgggagctgagaaagaacaagaagaccagctcctgcagaaagtgaccaatctgtggaagaaacaagggttgttgctgtacggtcgtctgcgtgaaagtcgctttgaagatgggaaactcccatcccgcaagatcgatgccctggaccattttgcgaaatgctttctgatcctcaaactttatcaccataaagtggacaaaagcaaatgggaaagtccgacgggttcgaacgaaagcgaggccaaaagttggaaagcaattcgcgtagatctggttcgttgtccctacgatggttttgcgtttgcgttgttgggttggaccggaagccgcatgttccgccgtgatctgcgccgctacgccacccacgagaagaagatgatgctggacaatcatgcgctgtatgacctgaccaagaaaatgtttctcaaagctaaatcggaagaggaaattttcgcacatctggggcttgaatacctggaaccgttcgaacgtaacgca

SEQ ID NO: 1548 - protein, 529 aa, synthetic construct
  REGION 1..529: note = Variant of terminal deoxynucleotidyltransferase
MHHHHHHGGSGSHGIRTIDSDFGKKRQKKMDNHDSSAIYEIKFHEFVLFILEEKMGATRRTFLTDLARKKGFRVENELSDSVTHIVAENNSRSEVLAWLKEHKMEKTKQFELLDISWLIESMKVGKPVDTKGKYQLAESGEMSANPDPTEGRENELPPTTKTISQYACQRRTTLNNHNQRFTDALEILAENYEFKRNDDTCLTFMRAISVLKCLPFEVVSLKDTEGLPWIGDEVKGIMEEIIEVGESLEVQAVLNDERYQSFKRFKSVFGVGVKTADKWYRMGLRTLEDVRSSKTLKLTPMQKAGLCYYEDLADGVTKAEADAISLLVQDAVWTFDPDALVEITGGFRRGKPFGHDVDLLITSPGAEKEQEDQLLQKVTNLWKKQGLLLYGRLRESRFEDGKLPSRKIDALDHFAKCFLILKLYHHKVDKSKWESPTGSNESEAKSWKAIRVDLVRCPYDGFAFALLGWTGSRMFRRDLRRYATHEKKMMLDNHALYDLTKKMFLKAKSEEEIFAHLGLEYLEPFERNA

SEQ ID NO: 1549 - DNA, 1587 bp, synthetic construct
  misc_feature 1..1587: note = Variant of terminal deoxynucleotidyltransferase
  source 1..1587: mol_type = other DNA
atgcaccatcatcatcatcatggcggtagcggcagccacggcattcgtaccatcgattcggacttcgggaagaaacgccagaagaagatggataaccacgatagttccgccatctatgaaatcaaatttcacgagtttgtgctgttcattctcgaagagaaaatgggtgcgacgcgtcgtacttttctgacagatttagcccgcaagaaagggttccgcgtcgagaatgaactgtcagacagcgttacccacatcgtggcagaaaataattcacgctctgaagtattggcttggctgaaagaacacaagatggagaagaccaagcaattcgaactgctggatattagctggcttatcgaaagcatgaaagttggtaaaccggtggacaccaaggggaaataccagttggcggaatcgggtgagatgagtgcgaacccagatccgacagagggtcgtgaaaacgagctgcctcctactacgaagaccatttctcagtatgcgtgtcaacgccgcaccaccctgaacaaccataatcaacgttttacggacgcactggaaattcttgcggaaaattacgagttcaaacgcaacgatgatacttgtctgacctttatgcgtgctatttccgtgctgaaatgccttccgtttgaggtagttagcctgaaagacacggaaggattgccctggatcggtgatgaagtcaaagttattatggaagaaatcatcgaggtcggtgaatcgctggaagtgcaggccgtgctcaatgatgagcgctatcaaagcttcaaacgctttaagagtgtctttggagtgggggtgaagacagcagacaaatggtaccgtatgggtctgcgcacgctcgaggatgttcgttccagcaagaccctgaagttgaccccgatgcagaaagcgggtctgtgctattatgaagatcttgctgatggcgttacgaaagccgaagctgacgcgatttctctgctggttcaggatgcagtctggactttcgacccggatgcgctggtggagattacgggtggatttcgtcgtgggaaaccttttggtcacgacgttgatctgcttatcacatctccgggagctgagaaagaacaagaagaccagctcctgcagaaagtgaccaatctgtggaagaaacaagggttgttgctgtacggtcgtctgcgtgaaagtcgctttgaagatgggaaactcccatcccgcaagatcgatgccctggaccattttgcgaaatgctttctgatcctcaaactttatcaccataaagtggacaaaagcaaatgggaaatgccgacgggttcgaacgaaagcgaggccaaaagttggaaagcaattcgcgtagatctggttcgttgtccctacgatggttttgcgtttgcgttgttgggttggaccggaagccgcatgttccgccgtgatctgcgccgctacgccacccacgagaagaagatgatgctggacaatcatgcgctgtatgacctgaccaagaaaatctttctcaaagctaaatcggaagaggaaattttcgcacatctggggcttgaatacctggaaccgttcgaacgtaacgca

SEQ ID NO: 1550 - protein, 529 aa, synthetic construct
  REGION 1..529: note = Variant of terminal deoxynucleotidyltransferase
MHHHHHHGGSGSHGIRTIDSDFGKKRQKKMDNHDSSAIYEIKFHEFVLFILEEKMGATRRTFLTDLARKKGFRVENELSDSVTHIVAENNSRSEVLAWLKEHKMEKTKQFELLDISWLIESMKVGKPVDTKGKYQLAESGEMSANPDPTEGRENELPPTTKTISQYACQRRTTLNNHNQRFTDALEILAENYEFKRNDDTCLTFMRAISVLKCLPFEVVSLKDTEGLPWIGDEVKVIMEEIIEVGESLEVQAVLNDERYQSFKRFKSVFGVGVKTADKWYRMGLRTLEDVRSSKTLKLTPMQKAGLCYYEDLADGVTKAEADAISLLVQDAVWTFDPDALVEITGGFRRGKPFGHDVDLLITSPGAEKEQEDQLLQKVTNLWKKQGLLLYGRLRESRFEDGKLPSRKIDALDHFAKCFLILKLYHHKVDKSKWEMPTGSNESEAKSWKAIRVDLVRCPYDGFAFALLGWTGSRMFRRDLRRYATHEKKMMLDNHALYDLTKKIFLKAKSEEEIFAHLGLEYLEPFERNA

SEQ ID NO: 1551 - DNA, 1587 bp, synthetic construct
  misc_feature 1..1587: note = Variant of terminal deoxynucleotidyltransferase
  source 1..1587: mol_type = other DNA
atgcaccatcatcatcatcatggcggtagcggcagccacggcattcgtaccatcgattcggacttcgggaagaaacgccagaagaagatggataaccacgatagttccgccatctatgaaatcaaatttcacgagtttgtgctgttcattctcgaagagaaaatgggtgcgacgcgtcgtacttttctgacagatttagcccgcaagaaagggttccgcgtcgagaatgaactgtcagacagcgttacccacatcgtggcagaaaataattcacgctctgaagtattggcttggctgaaagaacacaagatggagaagaccaagcaattcgaactgctggatattagctggcttatcgaaagcatgaaagttggtaaaccggtggacaccaaggggaaataccagttggcggaatcgggtgagatgagtgcgaacccagatccgacagagggtcgtgaaaacgagctgcctcctactacgaagaccatttctcagtatgcgtgtcaacgccgcaccaccctgaacaaccataatcaacgttttacggacgcactggaaattcttgcggaaaattacgagttcaaacgcaacgatgatacttgtctgacctttatgcgtgctatttccgtgctgaaatgccttccgtttgaggtagttagcctgaaagacacggaaggattgccctggatcggtgatgaagtcaaagggattatggaagaaatcatcgaggtcggtgaatcgctggaagtgcaggccgtgctcaatgatgagcgctatcaaagcttcaaacgctttaagagtgtctttggagtgggggtgaagacagcagacaaatggtaccgtatgggtctgcgcacgctcgaggatgttcgttccagcaagaccctgaagttgaccccgatgcagaaagcgggtctgtgctattatgaagatcttgctgatggcgttacgaaagccgaagctgacgcgatttctctgctggttcaggatgcagtctggactttcgacccggatgcgctggtggagattacgggtggatttcgtcgtgggaaaccttttggtcacgacgttgatctgcttatcacatctccgggagctgagaaagaacaagaagaccagctcctgcagaaagtgaccaatctgtggaagaaacaagggttgttgctgtacggtcgtctgcgtgaaagtcgctttgaagatgggaaactcccatcccgcaagatcgatgccctggaccattttgcgaaatgctttctgatcctcaaactttatcaccatgaggtggacaaaagcaaatgggaaatgccgacgggttcgaacgaaagcgaggccaaaagttggaaagcaattcgcgtagatctggttcgttgtccctacgatggttttgcgtttgcgttgttgggttggaccggaagccgcatgttccgccgtgatctgcgccgctacgccacccacgagaagaagatgatgctggacaatcatgcgctgtatgacctgaccaagaaaatctttctcaaagctaaatcggaagaggaaattttcgcacatctggggcttgaatacctggaaccgttcgaacgtaacgca

SEQ ID NO: 1552 - protein, 529 aa, synthetic construct
  REGION 1..529: note = Variant of terminal deoxynucleotidyltransferase
MHHHHHHGGSGSHGIRTIDSDFGKKRQKKMDNHDSSAIYEIKFHEFVLFILEEKMGATRRTFLTDLARKKGFRVENELSDSVTHIVAENNSRSEVLAWLKEHKMEKTKQFELLDISWLIESMKVGKPVDTKGKYQLAESGEMSANPDPTEGRENELPPTTKTISQYACQRRTTLNNHNQRFTDALEILAENYEFKRNDDTCLTFMRAISVLKCLPFEVVSLKDTEGLPWIGDEVKGIMEEIIEVGESLEVQAVLNDERYQSFKRFKSVFGVGVKTADKWYRMGLRTLEDVRSSKTLKLTPMQKAGLCYYEDLADGVTKAEADAISLLVQDAVWTFDPDALVEITGGFRRGKPFGHDVDLLITSPGAEKEQEDQLLQKVTNLWKKQGLLLYGRLRESRFEDGKLPSRKIDALDHFAKCFLILKLYHHEVDKSKWEMPTGSNESEAKSWKAIRVDLVRCPYDGFAFALLGWTGSRMFRRDLRRYATHEKKMMLDNHALYDLTKKIFLKAKSEEEIFAHLGLEYLEPFERNA

SEQ ID NO: 1553 - DNA, 1587 bp, synthetic construct
  misc_feature 1..1587: note = Variant of terminal deoxynucleotidyltransferase
  source 1..1587: mol_type = other DNA
atgcaccatcatcatcatcatggcggtagcggcagccacggcattcgtaccatcgattcggacttcgggaagaaacgccagaagaagatggataaccacgatagttccgccatctatgaaatcaaatttcacgagtttgtgctgttcattctcgaagagaaaatgggtgcgacgcgtcgtacttttctgacagatttagcccgcaagaaagggttccgcgtcgagaatgaactgtcagacagcgttacccacatcgtggcagaaaataattcacgctctgaagtattggcttggctgaaagaacacaagatggagaagaccaagcaattcgaactgctggatattagctggcttatcgaaagcatgaaagttggtaaaccggtggacaccaaggggaaataccagttggcggaatcgggtgagatgagtgcgaacccagatccgacagagggtcgtgaaaacgagctgcctcctactacgaagaccatttctcagtatgcgtgtcaacgccgcaccaccctgaacaaccataatcaacgttttacggacgcactggaaattcttgcggaaaattacgagttcaaacgcaacgatgatacttgtctgacctttatgcgtgctatttccgtgctgaaatgccttccgtttgaggtagttagcctgaaagacacggaaggattgccctggatcggtgatgaagtcaaagggattatggaagaaatcatcgaggtcggtgaatcgctggaagtgcaggccgtgctcaatgatgagcgctatcaaagcttcaaacgctttaagagtgtctttggagtgggggtgaagacagcagacaaatggtaccgtatgggtctgcgcacgctcgaggatgttcgttccagcaagaccctgaagttgaccccgatgcagaaagcgggtctgtgctattatgaagatcttgctgatggcgttacgaaagccgaagctgacgcgatttctctgctggttcaggatgcagtctggactttcgacccggatgcgctggtggagattacgggtggatttcgtcgtgggaaaccttttggtcacgacgttgatctgcttatcacatctccgggagctgagaaagaacaagaagaccagctcctgcagaaagtgaccaatctgtggaagaaacaagggttgttgctgtacggtcgtctgcgtgaaagtcgctttgaagatgggaaactcccatcccgcaagatcgatgccctggaccattttgcgaaatgctttctgatcctcaaactttatgatcataaagtggacaaaagcaaatgggaaatgccgacgggttcgaacgaaagcgaggccaaaagttggaaagcaattcgcgtagatctggttcgttgtccctacgatggttttgcgtttgcgttgttgggttggaccggaagccgcatgttccgccgtgatctgcgccgctacgccacccacgagaagaagatgatgctggacaatcatgcgctgtatgacctgaccaagaaaatctttctcaaagctaaatcggaagaggaaattttcgcacatctggggcttgaatacctggaaccgttcgaacgtaacgca

SEQ ID NO: 1554 - protein, 529 aa, synthetic construct
  REGION 1..529: note = Variant of terminal deoxynucleotidyltransferase
MHHHHHHGGSGSHGIRTIDSDFGKKRQKKMDNHDSSAIYEIKFHEFVLFILEEKMGATRRTFLTDLARKKGFRVENELSDSVTHIVAENNSRSEVLAWLKEHKMEKTKQFELLDISWLIESMKVGKPVDTKGKYQLAESGEMSANPDPTEGRENELPPTTKTISQYACQRRTTLNNHNQRFTDALEILAENYEFKRNDDTCLTFMRAISVLKCLPFEVVSLKDTEGLPWIGDEVKGIMEEIIEVGESLEVQAVLNDERYQSFKRFKSVFGVGVKTADKWYRMGLRTLEDVRSSKTLKLTPMQKAGLCYYEDLADGVTKAEADAISLLVQDAVWTFDPDALVEITGGFRRGKPFGHDVDLLITSPGAEKEQEDQLLQKVTNLWKKQGLLLYGRLRESRFEDGKLPSRKIDALDHFAKCFLILKLYDHKVDKSKWEMPTGSNESEAKSWKAIRVDLVRCPYDGFAFALLGWTGSRMFRRDLRRYATHEKKMMLDNHALYDLTKKIFLKAKSEEEIFAHLGLEYLEPFERNA

SEQ ID NO: 1555 - DNA, 1587 bp, synthetic construct
  misc_feature 1..1587: note = Variant of terminal deoxynucleotidyltransferase
  source 1..1587: mol_type = other DNA
atgcaccatcatcatcatcatggcggtagcggcagccacggcattcgtaccatcgattcggacttcgggaagaaacgccagaagaagatggataaccacgatagttccgccatctatgaaatcaaatttcacgagtttgtgctgttcattctcgaagagaaaatgggtgcgacgcgtcgtacttttctgacagatttagcccgcaagaaagggttccgcgtcgagaatgaactgtcagacagcgttacccacatcgtggcagaaaataattcacgctctgaagtattggcttggctgaaagaacacaagatggagaagaccaagcaattcgaactgctggatattagctggcttatcgaaagcatgaaagttggtaaaccggtggacaccaaggggaaataccagttggcggaatcgggtgagatgagtgcgaacccagatccgacagagggtcgtgaaaacgagctgcctcctactacgaagaccatttctcagtatgcgtgtcaacgccgcaccaccctgaacaaccataatcaacgttttacggacgcactggaaattcttgcggaaaattacgagttcaaacgcaacgatgatacttgtctgacctttatgcgtgctatttccgtgctgaaatgccttccgtttgaggtagttagcctgaaagacacggaaggattgccctggatcggtgatgaagtcaaagggattatggaagaaatcatcgaggtcggtgaatcgctggaagtgcaggccgtgctcaatgatgagcgctatcaaagcttcaaacgctttaagagtgtctttggagtgggggtgaagacagcagacaaatggtaccgtatgggtctgcgcacgctcgaggatgttcgttccagcaagaccctgaagttgaccccgatgcagaaagcgggtctgtgctattatgaagatcttgctgatggcgttacgaaagccgaagctgacgcgatttctctgctggttcaggatgcagtctggactttcgacccggatgcgctggtggagattacgggtggatttcgtcgtgggaaaccttttggtcacgacgttgatctgcttatcacatctccgggagctgagaaagaacaagaagaccagctcctgcagaaagtgaccaatctgtggaagaaacaagggttgttgctgtacggtcgtctgcgtgaaagtcgctttgaagatgggaaactcccatcccgcaagatcgatgccctggaccattttgcgaaatgctttctgatcctcaaactttatcaccataaagtggacaaaagcaaatgggaaatgccgacgggttcgaacgaaagcgaggccaaaagttggaaagcaattcgcgtagatctggttcgttgtccctacgatggttttgcgtttgcgttgttgggttggaccggaagccgcatgttccgccgtgatctgcgccgctacgccacccacgagaagaagatgatgctggacaatcatgcgctgtatgacctgaccgcgaaaatctttctcaaagctaaatcggaagaggaaattttcgcacatctggggcttgaatacctggaaccgttcgaacgtaacgca

SEQ ID NO: 1556 - protein, 529 aa, synthetic construct
  REGION 1..529: note = Variant of terminal deoxynucleotidyltransferase
MHHHHHHGGSGSHGIRTIDSDFGKKRQKKMDNHDSSAIYEIKFHEFVLFILEEKMGATRRTFLTDLARKKGFRVENELSDSVTHIVAENNSRSEVLAWLKEHKMEKTKQFELLDISWLIESMKVGKPVDTKGKYQLAESGEMSANPDPTEGRENELPPTTKTISQYACQRRTTLNNHNQRFTDALEILAENYEFKRNDDTCLTFMRAISVLKCLPFEVVSLKDTEGLPWIGDEVKGIMEEIIEVGESLEVQAVLNDERYQSFKRFKSVFGVGVKTADKWYRMGLRTLEDVRSSKTLKLTPMQKAGLCYYEDLADGVTKAEADAISLLVQDAVWTFDPDALVEITGGFRRGKPFGHDVDLLITSPGAEKEQEDQLLQKVTNLWKKQGLLLYGRLRESRFEDGKLPSRKIDALDHFAKCFLILKLYHHKVDKSKWEMPTGSNESEAKSWKAIRVDLVRCPYDGFAFALLGWTGSRMFRRDLRRYATHEKKMMLDNHALYDLTAKIFLKAKSEEEIFAHLGLEYLEPFERNA

SEQ ID NO: 1557 - DNA, 1587 bp, synthetic construct
  misc_feature 1..1587: note = Variant of terminal deoxynucleotidyltransferase
  source 1..1587: mol_type = other DNA
atgcaccatcatcatcatcatggcggtagcggcagccacggcattcgtaccatcgattcggacttcgggaagaaacgccagaagaagatggataaccacgatagttccgccatctatgaaatcaaatttcacgagtttgtgctgttcattctcgaagagaaaatgggtgcgacgcgtcgtacttttctgacagatttagcccgcaagaaagggttccgcgtcgagaatgaactgtcagacagcgttacccacatcgtggcagaaaataattcacgctctgaagtattggcttggctgaaagaacacaagatggagaagaccaagcaattcgaactgctggatattagctggcttatcgaaagcatgaaagttggtaaaccggtggacaccaaggggaaataccagttggcggaatcgggtgagatgagtgcgaacccagatccgacagagggtcgtgaaaacgagctgcctcctactacgaagaccatttctcagtatgcgtgtcaacgccgcaccaccctgaacaaccataatcaacgttttacggacgcactggaaattcttgcggaaaattacgagttcaaacgcaacgatgatacttgtctgacctttatgcgtgctatttccgtgctgaaatgccttccgtttgaggtagttagcctgaaagacacggaaggattgccctggatcggtgatgaagtcaaagggattatggaagaaatcatcgaggtcggtgaatcgctggaagtgcaggccgtgctcaatgatgagcgctatcaaagcttcaaacgctttaagagtgtctttggagtgggggtgaagacagcagacaaatggtaccgtatgggtctgcgcacgctcgaggatgttcgttccagcaagaccctgaagttgaccccgatgcagaaagcgggtctgtgctattatgaagatcttgctgatggcgttacgaaagccgaagctgacgcgatttctctgctggttcaggatgcagtctggactttcgacccggatgcgctggtggagattacgggtggatttcgtcgtgggaaaccttttggtcacgacgttgatctgcttatcacatctccgggagctgagaaagaacaagaagaccagctcctgcagaaagtgaccaatctgtggaagaaacaagggttgttgctgtacggtcgtctgcgtgaaagtcgctttgaagatgggaaactcccatcccgcaagatcgatgccctggaccattttgcgaaatgctttctgatcctcaaactttatcaccataaagtggacaaaagcaaatgggaaatgccgacgggttcgaacgaaagcgaggccaaaagttggaaagcaattcgcgtagatctggttcgttgtccctacgatggttttgcgtttgcgttgttgggttggaccggaagccgcatgttccgccgtgatctgcgccgctacgccacccacgagaagaagatgatgctggacaatcatgcgctgtatgacctgaccaagaaaatccgtctcaaagctaaatcggaagaggaaattttcgcacatctggggcttgaatacctggaaccgttcgaacgtaacgca

SEQ ID NO: 1558 - protein, 529 aa, synthetic construct
  REGION 1..529: note = Variant of terminal deoxynucleotidyltransferase
MHHHHHHGGSGSHGIRTIDSDFGKKRQKKMDNHDSSAIYEIKFHEFVLFILEEKMGATRRTFLTDLARKKGFRVENELSDSVTHIVAENNSRSEVLAWLKEHKMEKTKQFELLDISWLIESMKVGKPVDTKGKYQLAESGEMSANPDPTEGRENELPPTTKTISQYACQRRTTLNNHNQRFTDALEILAENYEFKRNDDTCLTFMRAISVLKCLPFEVVSLKDTEGLPWIGDEVKGIMEEIIEVGESLEVQAVLNDERYQSFKRFKSVFGVGVKTADKWYRMGLRTLEDVRSSKTLKLTPMQKAGLCYYEDLADGVTKAEADAISLLVQDAVWTFDPDALVEITGGFRRGKPFGHDVDLLITSPGAEKEQEDQLLQKVTNLWKKQGLLLYGRLRESRFEDGKLPSRKIDALDHFAKCFLILKLYHHKVDKSKWEMPTGSNESEAKSWKAIRVDLVRCPYDGFAFALLGWTGSRMFRRDLRRYATHEKKMMLDNHALYDLTKKIRLKAKSEEEIFAHLGLEYLEPFERNA

SEQ ID NO: 1559 - DNA, 1587 bp, synthetic construct
  misc_feature 1..1587: note = Variant of terminal deoxynucleotidyltransferase
  source 1..1587: mol_type = other DNA
atgcaccatcatcatcatcatggcggtagcggcagccacggcattcgtaccatcgattcggacttcgggaagaaacgccagaagaagatggataaccacgatagttccgccatctatgaaatcaaatttcacgagtttgtgctgttcattctcgaagagaaaatgggtgcgacgcgtcgtacttttctgacagatttagcccgcaagaaagggttccgcgtcgagaatgaactgtcagacagcgttacccacatcgtggcagaaaataattcacgctctgaagtattggcttggctgaaagaacacaagatggagaagaccaagcaattcgaactgctggatattagctggcttatcgaaagcatgaaagttggtaaaccggtggacaccaaggggaaataccagttggcggaatcgggtgagatgagtgcgaacccagatccgacagagggtcgtgaaaacgagctgcctcctactacgaagaccatttctcagtatgcgtgtcaacgccgcaccaccctgaacaaccataatcaacgttttacggacgcactggaaattcttgcggaaaattacgagttcaaacgcaacgatgatacttgtctgacctttatgcgtgctatttccgtgctgaaatgccttccgtttgaggtactgagcctgaaagacacggaaggattgccctggatcggtgatgaagtcaaagggattatggaagaaatcatcgaggtcggtgaatcgctggaagtgcaggccgtgctcaatgatgagcgctatcaaagcttcaaacgctttaagagtgtctttggagtgggggtgaagacagcagacaaatggtaccgtatgggtctgcgcacgctcgaggatgttcgttccagcaagaccctgaagttgaccccgatgcagaaagcgggtctgtgctattatgaagatcttgctgatggcgttacgaaagccgaagctgacgcgatttctctgctggttcaggatgcagtctggactttcgacccggatgcgctggtggagattacgggtggatttcgtcgtgggaaaccttttggtcacgacgttgatctgcttatcacatctccgggagctgagaaagaacaagaagaccagctcctgcagaaagtgaccaatctgtggaagaaacaagggttgttgctgtacggtcgtctgcgtgaaagtcgctttgaagatgggaaactcccatcccgcaagatcgatgccctggaccattttgcgaaatgctttctgatcctcaaactttatcaccataaagtggacaaaagcaaatgggaaatgccgacgggttcgaacgaaagcgaggccaaaagttggaaagcaattcgcgtagatctggttcgttgtccctacgatggttttgcgtttgcgttgttgggttggaccggaagccgcatgttccgccgtgatctgcgccgctacgccacccacgagaagaagatgatgctggacaatcatgcgctgtatgacctgaccaagaaaatctttctcaaagctaaatcggaagaggaaattttcgcacatctggggcttgaatacctggaaccgttcgaacgtaacgca

SEQ ID NO: 1560 - protein, 529 aa, synthetic construct
  REGION 1..529: note = Variant of terminal deoxynucleotidyltransferase
MHHHHHHGGSGSHGIRTIDSDFGKKRQKKMDNHDSSAIYEIKFHEFVLFILEEKMGATRRTFLTDLARKKGFRVENELSDSVTHIVAENNSRSEVLAWLKEHKMEKTKQFELLDISWLIESMKVGKPVDTKGKYQLAESGEMSANPDPTEGRENELPPTTKTISQYACQRRTTLNNHNQRFTDALEILAENYEFKRNDDTCLTFMRAISVLKCLPFEVLSLKDTEGLPWIGDEVKGIMEEIIEVGESLEVQAVLNDERYQSFKRFKSVFGVGVKTADKWYRMGLRTLEDVRSSKTLKLTPMQKAGLCYYEDLADGVTKAEADAISLLVQDAVWTFDPDALVEITGGFRRGKPFGHDVDLLITSPGAEKEQEDQLLQKVTNLWKKQGLLLYGRLRESRFEDGKLPSRKIDALDHFAKCFLILKLYHHKVDKSKWEMPTGSNESEAKSWKAIRVDLVRCPYDGFAFALLGWTGSRMFRRDLRRYATHEKKMMLDNHALYDLTKKIFLKAKSEEEIFAHLGLEYLEPFERNA

SEQ ID NO: 1561 - DNA, 1587 bp, synthetic construct
  misc_feature 1..1587: note = Variant of terminal deoxynucleotidyltransferase
  source 1..1587: mol_type = other DNA
atgcaccatcatcatcatcatggcggtagcggcagccacggcattcgtaccatcgattcggacttcgggaagaaacgccagaagaagatggataaccacgatagttccgccatctatgaaatcaaatttcacgagtttgtgctgttcattctcgaagagaaaatgggtgcgacgcgtcgtacttttctgacagatttagcccgcaagaaagggttccgcgtcgagaatgaactgtcagacagcgttacccacatcgtggcagaaaataattcacgctctgaagtattggcttggctgaaagaacacaagatggagaagaccaagcaattcgaactgctggatattagctggcttatcgaaagcatgaaagttggtaaaccggtggacaccaaggggaaataccagttggcggaatcgggtgagatgagtgcgaacccagatccgacagagggtcgtgaaaacgagctgcctcctactacgaagaccatttctcagtatgcgtgtcaacgccgcaccaccctgaacaaccataatcaacgttttacggacgcactggaaattcttgcggaaaattacgagttcaaacgcaacgatgatacttgtctgacctttatgcgtgctatttccgtgctgaaatgccttccgtttgaggtagttagcctgaaagacacggaaggattgccctggatcggtgatgaagtcaaagggattatggaagaaatcatcgaggtcggtgaatcgctggaagtgcaggccgtgctcaatgatgagcgctatcaaagcttcaaacgctttaagagtgtctttggagtgggggtgaagacagcagacaaatggtaccgtatgggtctgcgcacgctcgaggatgttcgttccagcaagaccctgaagttgaccccgatgcagaaagcgggtctgtgctattatgaagatcttgctgatggcgttacgaaagccgaagctgacgcgatttctctgctggttcaggatgcagtctggactttcgacccggatgcgctggtggagattacgggtggatttcgtcgtgggaaaccttttggtcacgacgttgatctgcttatcacatctccgggagctgagaaagaacaagaagaccagctcctgcagaaagtgaccaatctgtggaagaaacaagggttgttgctgtacggtcgtctgcgtgaaagtcgctttgaagatgggaaactcccatcccgcaagatcgatgccctggaccattttgcgaaatgctttctgatcctcaaactttatcaccataaagtggacaaaagcaaatgggaaatgccgacgggttcgaacgaaagcgaggccaaaagttggaaagcaattcgcgtagatctggttcgttgtccctacgatggttttgcgtttgcgttgttgggttggaccggaagccgcatgttccgccgtgatctgcgccgctacgccacccacgagaagaagatgatgctggacaatcatgcgctgtatgacctgaccaagaggatctttctcaaagctaaatcggaagaggaaattttcgcacatctggggcttgaatacctggaaccgttcgaacgtaacgca

SEQ ID NO: 1562 - protein, 529 aa, synthetic construct
  REGION 1..529: note = Variant of terminal deoxynucleotidyltransferase
MHHHHHHGGSGSHGIRTIDSDFGKKRQKKMDNHDSSAIYEIKFHEFVLFILEEKMGATRRTFLTDLARKKGFRVENELSDSVTHIVAENNSRSEVLAWLKEHKMEKTKQFELLDISWLIESMKVGKPVDTKGKYQLAESGEMSANPDPTEGRENELPPTTKTISQYACQRRTTLNNHNQRFTDALEILAENYEFKRNDDTCLTFMRAISVLKCLPFEVVSLKDTEGLPWIGDEVKGIMEEIIEVGESLEVQAVLNDERYQSFKRFKSVFGVGVKTADKWYRMGLRTLEDVRSSKTLKLTPMQKAGLCYYEDLADGVTKAEADAISLLVQDAVWTFDPDALVEITGGFRRGKPFGHDVDLLITSPGAEKEQEDQLLQKVTNLWKKQGLLLYGRLRESRFEDGKLPSRKIDALDHFAKCFLILKLYHHKVDKSKWEMPTGSNESEAKSWKAIRVDLVRCPYDGFAFALLGWTGSRMFRRDLRRYATHEKKMMLDNHALYDLTKRIFLKAKSEEEIFAHLGLEYLEPFERNA

SEQ ID NO: 1563 - DNA, 1587 bp, synthetic construct
  misc_feature 1..1587: note = Variant of terminal deoxynucleotidyltransferase
  source 1..1587: mol_type = other DNA
atgcaccatcatcatcatcatggcggtagcggcagccacggcattcgtaccatcgattcggacttcgggaagaaacgccagaagaagatggataaccacgatagttccgccatctatgaaatcaaatttcacgagtttgtgctgttcattctcgaagagaaaatgggtgcgacgcgtcgtacttttctgacagatttagcccgcaagaaagggttccgcgtcgagaatgaactgtcagacagcgttacccacatcgtggcagaaaataattcacgctctgaagtattggcttggctgaaagaacacaagatggagaagaccaagcaattcgaactgctggatattagctggcttatcgaaagcatgaaagttggtaaaccggtggacaccaaggggaaataccagttggcggaatcgggtgagatgagtgcgaacccagatccgacagagggtcgtgaaaacgagctgcctcctactacgaagaccatttctcagtatgcgtgtcaacgccgcaccaccctgaacaaccataatcaacgttttacggacgcactggaaattcttgcggaaaattacgagttcaaacgcaacgatgatacttgtctgacctttatgcgtgctatttccgtgctgaaatgccttccgtttgaggtagttagcctgaaagacacggaaggattgccctggatcggtgatgaagtcaaagggattatggaagaaatcatcgaggtcggtaagtcgctggaagtgcaggccgtgctcaatgatgagcgctatcaaagcttcaaacgctttaagagtgtctttggagtgggggtgaagacagcagacaaatggtaccgtatgggtctgcgcacgctcgaggatgttcgttccagcaagaccctgaagttgaccccgatgcagaaagcgggtctgtgctattatgaagatcttgctgatggcgttacgaaagccgaagctgacgcgatttctctgctggttcaggatgcagtctggactttcgacccggatgcgctggtggagattacgggtggatttcgtcgtgggaaaccttttggtcacgacgttgatctgcttatcacatctccgggagctgagaaagaacaagaagaccagctcctgcagaaagtgaccaatctgtggaagaaacaagggttgttgctgtacggtcgtctgcgtgaaagtcgctttgaagatgggaaactcccatcccgcaagatcgatgccctggaccattttgcgaaatgctttctgatcctcaaactttatcaccataaagtggacaaaagcaaatgggaaatgccgacgggttcgaacgaaagcgaggccaaaagttggaaagcaattcgcgtagatctggttcgttgtccctacgatggttttgcgtttgcgttgttgggttggaccggaagccgcatgttccgccgtgatctgcgccgctacgccacccacgagaagaagatgatgctggacaatcatgcgctgtatgacctgaccaagaaaatctttctcaaagctaaatcggaagaggaaattttcgcacatctggggcttgaatacctggaaccgttcgaacgtaacgca

SEQ ID NO: 1564 - protein, 529 aa, synthetic construct
  REGION 1..529: note = Variant of terminal deoxynucleotidyltransferase
MHHHHHHGGSGSHGIRTIDSDFGKKRQKKMDNHDSSAIYEIKFHEFVLFILEEKMGATRRTFLTDLARKKGFRVENELSDSVTHIVAENNSRSEVLAWLKEHKMEKTKQFELLDISWLIESMKVGKPVDTKGKYQLAESGEMSANPDPTEGRENELPPTTKTISQYACQRRTTLNNHNQRFTDALEILAENYEFKRNDDTCLTFMRAISVLKCLPFEVVSLKDTEGLPWIGDEVKGIMEEIIEVGKSLEVQAVLNDERYQSFKRFKSVFGVGVKTADKWYRMGLRTLEDVRSSKTLKLTPMQKAGLCYYEDLADGVTKAEADAISLLVQDAVWTFDPDALVEITGGFRRGKPFGHDVDLLITSPGAEKEQEDQLLQKVTNLWKKQGLLLYGRLRESRFEDGKLPSRKIDALDHFAKCFLILKLYHHKVDKSKWEMPTGSNESEAKSWKAIRVDLVRCPYDGFAFALLGWTGSRMFRRDLRRYATHEKKMMLDNHALYDLTKKIFLKAKSEEEIFAHLGLEYLEPFERNA

SEQ ID NO: 1565 - DNA, 1587 bp, synthetic construct
  misc_feature 1..1587: note = Variant of terminal deoxynucleotidyltransferase
  source 1..1587: mol_type = other DNA
atgcaccatcatcatcatcatggcggtagcggcagccacggcattcgtaccatcgattcggacttcgggaagaaacgccagaagaagatggataaccacgatagttccgccatctatgaaatcaaatttcacgagtttgtgctgttcattctcgaagagaaaatgggtgcgacgcgtcgtacttttctgacagatttagcccgcaagaaagggttccgcgtcgagaatgaactgtcagacagcgttacccacatcgtggcagaaaataattcacgctctgaagtattggcttggctgaaagaacacaagatggagaagaccaagcaattcgaactgctggatattagctggcttatcgaaagcatgaaagttggtaaaccggtggacaccaaggggaaataccagttggcggaatcgggtgagatgagtgcgaacccagatccgacagagggtcgtgaaaacgagctgcctcctactacgaagaccatttctcagtatgcgtgtcaacgccgcaccaccctgaacaaccataatcaacgttttacggacgcactggaaattcttgcggaaaattacgagttcaaacgcaacgatgatacttgtctgacctttatgcgtgctatttccgtgctgaaatgccttccgtttgaggtagttagcctgaaagacacggaaggattgccctggatcggtgatgaagtcaaagggattatggaagaaatcatcgaggtcggtgaatcgctggaagtgcaggccgtgctcaatgatgagcgctatcaaagcttcaaacgctttaagagtgtctttggagtgggggtgaagacagcagacaaatggtaccgtatgggtctgcgcacgctcgaggatgttcgttccagcaagaccctgaagttgaccccgatgcagaaagcgggtctgtgctattatgaagatcttgctgatggcgttacgaaagccgaagctgacgcgatttctctgctggttcaggatgcagtctggactttcgacccggatgcgctggtggagattacgggtggatttcgtcgtgggaaaccttttggtcacgacgttgatctgcttatcacatctccgggagctgagaaagaacaagaagaccagctcctgcagaaagtgaccaatctgtggaagaaacaagggttgttgctgtacggtcgtctgcgtgaaagtcgctttgaagatgggaaactcccatcccgcaagatcgatgccctggaccattttgcgaaatgctttctgatcctcaaactttatcaccataaagtggacaaaagcaaatgggaaatgccgacgggttcgaacgaaagcacggccaaaagttggaaagcaattcgcgtagatctggttcgttgtccctacgatggttttgcgtttgcgttgttgggttggaccggaagccgcatgttccgccgtgatctgcgccgctacgccacccacgagaagaagatgatgctggacaatcatgcgctgtatgacctgaccaagaaaatctttctcaaagctaaatcggaagaggaaattttcgcacatctggggcttgaatacctggaaccgttcgaacgtaacgca

SEQ ID NO: 1566 - protein, 529 aa, synthetic construct
  REGION 1..529: note = Variant of terminal deoxynucleotidyltransferase
MHHHHHHGGSGSHGIRTIDSDFGKKRQKKMDNHDSSAIYEIKFHEFVLFILEEKMGATRRTFLTDLARKKGFRVENELSDSVTHIVAENNSRSEVLAWLKEHKMEKTKQFELLDISWLIESMKVGKPVDTKGKYQLAESGEMSANPDPTEGRENELPPTTKTISQYACQRRTTLNNHNQRFTDALEILAENYEFKRNDDTCLTFMRAISVLKCLPFEVVSLKDTEGLPWIGDEVKGIMEEIIEVGESLEVQAVLNDERYQSFKRFKSVFGVGVKTADKWYRMGLRTLEDVRSSKTLKLTPMQKAGLCYYEDLADGVTKAEADAISLLVQDAVWTFDPDALVEITGGFRRGKPFGHDVDLLITSPGAEKEQEDQLLQKVTNLWKKQGLLLYGRLRESRFEDGKLPSRKIDALDHFAKCFLILKLYHHKVDKSKWEMPTGSNESTAKSWKAIRVDLVRCPYDGFAFALLGWTGSRMFRRDLRRYATHEKKMMLDNHALYDLTKKIFLKAKSEEEIFAHLGLEYLEPFERNA

SEQ ID NO: 1567 - DNA, 1587 bp, synthetic construct
  misc_feature 1..1587: note = Variant of terminal deoxynucleotidyltransferase
  source 1..1587: mol_type = other DNA
atgcaccatcatcatcatcatggcggtagcggcagccacggcattcgtaccatcgattcggacttcgggaagaaacgccagaagaagatggataaccacgatagttccgccatctatgaaatcaaatttcacgagtttgtgctgttcattctcgaagagaaaatgggtgcgacgcgtcgtacttttctgacagatttagcccgcaagaaagggttccgcgtcgagaatgaactgtcagacagcgttacccacatcgtggcagaaaataattcacgctctgaagtattggcttggctgaaagaacacaagatggagaagaccaagcaattcgaactgctggatattagctggcttatcgaaagcatgaaagttggtaaaccggtggacaccaaggggaaataccagttggcggaatcgggtgagatgagtgcgaacccagatccgacagagggtcgtgaaaacgagctgcctcctactacgaagaccatttctcagtatgcgtgtcaacgccgcaccaccctgaacaaccataatcaacgttttacggacgcactggaaattcttgcggaaaattacgagttcaaacgcaacgatgatacttgtctgacctttatgcgtgctatttccgtgctgaaatgccttccgtttgaggtagttagcctgaaagacacggaaggattgccctggatcggtgatgaagtcaaagggattatggaagaaatcatcgaggtcggtgaatcgtgtgaagtgcaggccgtgctcaatgatgagcgctatcaaagcttcaaacgctttaagagtgtctttggagtgggggtgaagacagcagacaaatggtaccgtatgggtctgcgcacgctcgaggatgttcgttccagcaagaccctgaagttgaccccgatgcagaaagcgggtctgtgctattatgaagatcttgctgatggcgttacgaaagccgaagctgacgcgatttctctgctggttcaggatgcagtctggactttcgacccggatgcgctggtggagattacgggtggatttcgtcgtgggaaaccttttggtcacgacgttgatctgcttatcacatctccgggagctgagaaagaacaagaagaccagctcctgcagaaagtgaccaatctgtggaagaaacaagggttgttgctgtacggtcgtctgcgtgaaagtcgctttgaagatgggaaactcccatcccgcaagatcgatgccctggaccattttgcgaaatgctttctgatcctcaaactttatcaccataaagtggacaaaagcaaatgggaaatgccgacgggttcgaacgaaagcgaggccaaaagttggaaagcaattcgcgtagatctggttcgttgtccctacgatggttttgcgtttgcgttgttgggttggaccggaagccgcatgttccgccgtgatctgcgccgctacgccacccacgagaagaagatgatgctggacaatcatgcgctgtatgacctgaccaagaaaatctttctcaaagctaaatcggaagaggaaattttcgcacatctggggcttgaatacctggaaccgttcgaacgtaacgca

SEQ ID NO: 1568 - protein, 529 aa, synthetic construct
  REGION 1..529: note = Variant of terminal deoxynucleotidyltransferase
MHHHHHHGGSGSHGIRTIDSDFGKKRQKKMDNHDSSAIYEIKFHEFVLFILEEKMGATRRTFLTDLARKKGFRVENELSDSVTHIVAENNSRSEVLAWLKEHKMEKTKQFELLDISWLIESMKVGKPVDTKGKYQLAESGEMSANPDPTEGRENELPPTTKTISQYACQRRTTLNNHNQRFTDALEILAENYEFKRNDDTCLTFMRAISVLKCLPFEVVSLKDTEGLPWIGDEVKGIMEEIIEVGESCEVQAVLNDERYQSFKRFKSVFGVGVKTADKWYRMGLRTLEDVRSSKTLKLTPMQKAGLCYYEDLADGVTKAEADAISLLVQDAVWTFDPDALVEITGGFRRGKPFGHDVDLLITSPGAEKEQEDQLLQKVTNLWKKQGLLLYGRLRESRFEDGKLPSRKIDALDHFAKCFLILKLYHHKVDKSKWEMPTGSNESEAKSWKAIRVDLVRCPYDGFAFALLGWTGSRMFRRDLRRYATHEKKMMLDNHALYDLTKKIFLKAKSEEEIFAHLGLEYLEPFERNA

SEQ ID NO: 1569 - DNA, 1587 bp, synthetic construct
  misc_feature 1..1587: note = Variant of terminal deoxynucleotidyltransferase
  source 1..1587: mol_type = other DNA
atgcaccatcatcatcatcatggcggtagcggcagccacggcattcgtaccatcgattcggacttcgggaagaaacgccagaagaagatggataaccacgatagttccgccatctatgaaatcaaatttcacgagtttgtgctgttcattctcgaagagaaaatgggtgcgacgcgtcgtacttttctgacagatttagcccgcaagaaagggttccgcgtcgagaatgaactgtcagacagcgttacccacatcgtggcagaaaataattcacgctctgaagtattggcttggctgaaagaacacaagatggagaagaccaagcaattcgaactgctggatattagctggcttatcgaaagcatgaaagttggtaaaccggtggacaccaaggggaaataccagttggcggaatcgggtgagatgagtgcgaacccagatccgacagagggtcatgaaaacgagctgcctcctactacgaagaccatttctcagtatgcgtgtcaacgccgcaccaccctgaacaaccataatcaacgttttacggacgcactggaaattcttgcggaaaattacgagttcaaacgcaacgatgatacttgtctgacctttatgcgtgctatttccgtgctgaaatgccttccgtttgaggtagttagcctgaaagacacggaaggattgccctggatcggtgatgaagtcaaagggattatggaagaaatcatcgaggtcggtgaatcgctggaagtgcaggccgtgctcaatgatgagcgctatcaaagcttcaaacgctttaagagtgtctttggagtgggggtgaagacagcagacaaatggtaccgtatgggtctgcgcacgctcgaggatgttcgttccagcaagaccctgaagttgaccccgatgcagaaagcgggtctgtgctattatgaagatcttgctgatggcgttacgaaagccgaagctgacgcgatttctctgctggttcaggatgcagtctggactttcgacccggatgcgctggtggagattacgggtggatttcgtcgtgggaaaccttttggtcacgacgttgatctgcttatcacatctccgggagctgagaaagaacaagaagaccagctcctgcagaaagtgaccaatctgtggaagaaacaagggttgttgctgtacggtcgtctgcgtgaaagtcgctttgaagatgggaaactcccatcccgcaagatcgatgccctggaccattttgcgaaatgctttctgatcctcaaactttatcaccataaagtggacaaaagcaaatgggaaatgccgacgggttcgaacgaaagcgaggccaaaagttggaaagcaattcgcgtagatctggttcgttgtccctacgatggttttgcgtttgcgttgttgggttggaccggaagccgcatgttccgccgtgatctgcgccgctacgccacccacgagaagaagatgatgctggacaatcatgcgctgtatgacctgaccaagaaaagttttctcaaagctaaatcggaagaggaaattttcgcacatctggggcttgaatacctggaaccgttcgaacgtaacgca

SEQ ID NO: 1570 - protein, 529 aa, synthetic construct
  REGION 1..529: note = Variant of terminal deoxynucleotidyltransferase
MHHHHHHGGSGSHGIRTIDSDFGKKRQKKMDNHDSSAIYEIKFHEFVLFILEEKMGATRRTFLTDLARKKGFRVENELSDSVTHIVAENNSRSEVLAWLKEHKMEKTKQFELLDISWLIESMKVGKPVDTKGKYQLAESGEMSANPDPTEGHENELPPTTKTISQYACQRRTTLNNHNQRFTDALEILAENYEFKRNDDTCLTFMRAISVLKCLPFEVVSLKDTEGLPWIGDEVKGIMEEIIEVGESLEVQAVLNDERYQSFKRFKSVFGVGVKTADKWYRMGLRTLEDVRSSKTLKLTPMQKAGLCYYEDLADGVTKAEADAISLLVQDAVWTFDPDALVEITGGFRRGKPFGHDVDLLITSPGAEKEQEDQLLQKVTNLWKKQGLLLYGRLRESRFEDGKLPSRKIDALDHFAKCFLILKLYHHKVDKSKWEMPTGSNESEAKSWKAIRVDLVRCPYDGFAFALLGWTGSRMFRRDLRRYATHEKKMMLDNHALYDLTKKSFLKAKSEEEIFAHLGLEYLEPFERNA

SEQ ID NO: 1571 - DNA, 1587 bp, synthetic construct
  misc_feature 1..1587: note = Variant of terminal deoxynucleotidyltransferase
  source 1..1587: mol_type = other DNA
atgcaccatcatcatcatcatggcggtagcggcagccacggcattcgtaccatcgattcggacttcgggaagaaacgccagaagaagatggataaccacgatagttccgccatctatgaaatcaaatttcacgagtttgtgctgttcattctcgaagagaaaatgggtgcgacgcgtcgtacttttctgacagatttagcccgcaagaaagggttccgcgtcgagaatgaactgtcagacagcgttacccacatcgtggcagaaaataattcacgctctgaagtattggcttggctgaaagaacacaagatggagaagaccaagcaattcgaactgctggatattagctggcttatcgaaagcatgaaagttggtaaaccggtggacaccaaggggaaataccagttggcggaatcgggtgagatgagtgcgaacccagatccgacagagggtcgtgaaaacgagctgcctcctactacgaagaccatttctcagtatgcgtgtcaacgccgcaccaccctgaacaaccataatcaacgttttacggacgcactggaaattcttgcggaaaattacgagttcaaacgcaacgatgattgttgtctgacctttatgcgtgctatttccgtgctgaaatgccttccgtttgaggtagttagcctgaaagacacggaaggattgccctggatcggtgatgaagtcaaagggattatggaagaaatcatcgaggtcggtgaatcgctggaagtgcaggccgtgctcaatgatgagcgctatcaaagcttcaaacgctttaagagtgtctttggagtgggggtgaagacagcagacaaatggtaccgtatgggtctgcgcacgctcgaggatgttcgttccagcaagaccctgaagttgaccccgatgcagaaagcgggtctgtgctattatgaagatcttgctgatggcgttacgaaagccgaagctgacgcgatttctctgctggttcaggatgcagtctggactttcgacccggatgcgctggtggagattacgggtggatttcgtcgtgggaaaccttttggtcacgacgttgatctgcttatcacatctccgggagctgagaaagaacaagaagaccagctcctgcagaaagtgaccaatctgtggaagaaacaagggttgttgctgtacggtcgtctgcgtgaaagtcgctttgaagatgggaaactcccatcccgcaagatcgatgccctggaccattttgcgaaatgctttctgatcctcaaactttatcaccataaagtggacaaaagcaaatgggaaatgccgacgggttcgaacgaaagcgaggccaaaagttggaaagcaattcgcgtagatctggttcgttgtccctacgatggttttgcgtttgcgttgttgggttggaccggaagccgcatgttccgccgtgatctgcgccgctacgccacccacgagaagaagatgatgctggacaatcatgcgctgtatgacctgaccaagaaaatctttctcaaagctaaatcggaagaggaaattttcgcacatctggggcttgaatacctggaaccgttcgaacgtaacgca

SEQ ID NO: 1572 - protein, 529 aa, synthetic construct
  REGION 1..529: note = Variant of terminal deoxynucleotidyltransferase
MHHHHHHGGSGSHGIRTIDSDFGKKRQKKMDNHDSSAIYEIKFHEFVLFILEEKMGATRRTFLTDLARKKGFRVENELSDSVTHIVAENNSRSEVLAWLKEHKMEKTKQFELLDISWLIESMKVGKPVDTKGKYQLAESGEMSANPDPTEGRENELPPTTKTISQYACQRRTTLNNHNQRFTDALEILAENYEFKRNDDCCLTFMRAISVLKCLPFEVVSLKDTEGLPWIGDEVKGIMEEIIEVGESLEVQAVLNDERYQSFKRFKSVFGVGVKTADKWYRMGLRTLEDVRSSKTLKLTPMQKAGLCYYEDLADGVTKAEADAISLLVQDAVWTFDPDALVEITGGFRRGKPFGHDVDLLITSPGAEKEQEDQLLQKVTNLWKKQGLLLYGRLRESRFEDGKLPSRKIDALDHFAKCFLILKLYHHKVDKSKWEMPTGSNESEAKSWKAIRVDLVRCPYDGFAFALLGWTGSRMFRRDLRRYATHEKKMMLDNHALYDLTKKIFLKAKSEEEIFAHLGLEYLEPFERNA

SEQ ID NO: 1573 - DNA, 1587 bp, synthetic construct
  misc_feature 1..1587: note = Variant of terminal deoxynucleotidyltransferase
  source 1..1587: mol_type = other DNA
atgcaccatcatcatcatcatggcggtagcggcagccacggcattcgtaccatcgattcggacttcgggaagaaacgccagaagaagatggataaccacgatagttccgccatctatgaaatcaaatttcacgagtttgtgctgttcattctcgaagagaaaatgggtgcgacgcgtcgtacttttctgacagatttagcccgcaagaaagggttccgcgtcgagaatgaactgtcagacagcgttacccacatcgtggcagaaaataattcacgctctgaagtattggcttggctgaaagaacacaagatggagaagaccaagcaattcgaactgctggatattagctggcttatcgaaagcatgaaagttggtaaaccggtggacaccaaggggaaataccagttggcggaatcgggtgagatgagtgcgaacccagatccgacagagggtcgtgaaaacgagctgcctcctactacgaagaccatttctcagtatgcgtgtcaacgccgcaccaccctgaacaaccataatcaacgttttacggacgcactggaaattcttgcggaaaattacgagttcaaacgcaacgatgatacttgtctgacctttatgcgtgctatttccgtgctgaaatgccttccgtttgaggtagttagcctgaaagacacggaaggattgccctggatcggtgatgaagtcaaaccgattatggaagaaatcatcgaggtcggtgaatcgctggaagtgcaggccgtgctcaatgatgagcgctatcaaagcttcaaacgctttaagagtgtctttggagtgggggtgaagacagcagacaaatggtaccgtatgggtctgcgcacgctcgaggatgttcgttccagcaagaccctgaagttgaccccgatgcagaaagcgggtctgtgctattatgaagatcttgctgatggcgttacgaaagccgaagctgacgcgatttctctgctggttcaggatgcagtctggactttcgacccggatgcgctggtggagattacgggtggatttcgtcgtgggaaaccttttggtcacgacgttgatctgcttatcacatctccgggagctgagaaagaacaagaagaccagctcctgcagaaagtgaccaatctgtggaagaaacaagggttgttgctgtacggtcgtctgcgtgaaagtcgctttgaagatgggaaactcccatcccgcaagatcgatgccctggaccattttgcgaaatgctttctgatcctcaaactttatcaccataaagtggacaaaagcaaatgggaaatgccgacgggttcgaacgaaagcgaggccaaaagttggaaagcaattcgcgtagatctggttcgttgtccctacgatggttttgcgtttgcgttgttgggttggaccggaagccgcatgttccgccgtgatctgcgccgctacgccacccacgagaagaagatgatgctggacaatcatgcgctgtatgacctgaccaagaaaatctttctcaaagctaaatcggaagaggaaattttcgcacatctggggcttgaatacctggaaccgttcgaacgtaacgca

SEQ ID NO: 1574 - protein, 529 aa, synthetic construct
  REGION 1..529: note = Variant of terminal deoxynucleotidyltransferase
MHHHHHHGGSGSHGIRTIDSDFGKKRQKKMDNHDSSAIYEIKFHEFVLFILEEKMGATRRTFLTDLARKKGFRVENELSDSVTHIVAENNSRSEVLAWLKEHKMEKTKQFELLDISWLIESMKVGKPVDTKGKYQLAESGEMSANPDPTEGRENELPPTTKTISQYACQRRTTLNNHNQRFTDALEILAENYEFKRNDDTCLTFMRAISVLKCLPFEVVSLKDTEGLPWIGDEVKPIMEEIIEVGESLEVQAVLNDERYQSFKRFKSVFGVGVKTADKWYRMGLRTLEDVRSSKTLKLTPMQKAGLCYYEDLADGVTKAEADAISLLVQDAVWTFDPDALVEITGGFRRGKPFGHDVDLLITSPGAEKEQEDQLLQKVTNLWKKQGLLLYGRLRESRFEDGKLPSRKIDALDHFAKCFLILKLYHHKVDKSKWEMPTGSNESEAKSWKAIRVDLVRCPYDGFAFALLGWTGSRMFRRDLRRYATHEKKMMLDNHALYDLTKKIFLKAKSEEEIFAHLGLEYLEPFERNA

SEQ ID NO: 1575 - DNA, 1587 bp, synthetic construct
  misc_feature 1..1587: note = Variant of terminal deoxynucleotidyltransferase
  source 1..1587: mol_type = other DNA
atgcaccatcatcatcatcatggcggtagcggcagccacggcattcgtaccatcgattcggacttcgggaagaaacgccagaagaagatggataaccacgatagttccgccatctatgaaatcaaatttcacgagtttgtgctgttcattctcgaagagaaaatgggtgcgacgcgtcgtacttttctgacagatttagcccgcaagaaagggttccgcgtcgagaatgaactgtcagacagcgttacccacatcgtggcagaaaataattcacgctctgaagtattggcttggctgaaagaacacaagatggagaagaccaagcaattcgaactgctggatattagctggcttatcgaaagcatgaaagttggtaaaccggtggacaccaaggggaaataccagttggcggaatcgggtgagatgagtgcgaacccagatccgacagagggtcgtgaaaacgagctgcctcctactacgaagaccatttctcagtatgcgtgtcaacgccgcaccaccctgaacaaccataatcaacgttttacggacgcactggaaattcttgcggaaaattacgagttcaaacgcaacgatgatacttgtctgacctttatgcgtgctatttccgtgctgaaatgccttccgtttgaggtagttagcctgaaagacacggaaggattgccctggatcggtgatgaagtcaaagggattatggaagaaatcatcgaggtcggtgaatcgctggaagtgcaggccgtgctcaatgatgagcgctatcaaagcttcaaacgctttaagagtgtctttggagtgggggtgaagacagcagacaaatggtaccgtatgggtctgcgcacgctcgaggatgttcgttccagcaagaccctgaagttgaccccgatgcagaaagcgggtctgtgctattatgaagatcttgctgatggcgttacgaaagccgaagctgacgcgatttctctgctggttcaggatgcagtctggactttcgacccggatgcgctggtggagattacgggtggatttcgtcgtgggaaaccttttggtcacgacgttgatctgcttatcacatctccgggagctgagaaaggtcaagaagaccagctcctgcagaaagtgaccaatctgtggaagaaacaagggttgttgctgtacggtcgtctgcgtgaaagtcgctttgaagatgggaaactcccatcccgcaagatcgatgccctggaccattttgcgaaatgctttctgatcctcaaactttatcaccataaagtggacaaaagcaaatgggaaatgccgacgggttcgaacgaaagcgaggccaaaagttggaaagcaattcgcgtagatctggttcgttgtccctacgatggttttgcgtttgcgttgttgggttggaccggaagccgcatgttccgccgtgatctgcgccgctacgccacccacgagaagaagatgatgctggacaatcatgcgctgtatgacctgaccaagaaaatctttctcaaagctaaatcggaagaggaaattttcgcacatctggggcttgaatacctggaaccgttcgaacgtaacgca

SEQ ID NO: 1576 - protein, 529 aa, synthetic construct
  REGION 1..529: note = Variant of terminal deoxynucleotidyltransferase
MHHHHHHGGSGSHGIRTIDSDFGKKRQKKMDNHDSSAIYEIKFHEFVLFILEEKMGATRRTFLTDLARKKGFRVENELSDSVTHIVAENNSRSEVLAWLKEHKMEKTKQFELLDISWLIESMKVGKPVDTKGKYQLAESGEMSANPDPTEGRENELPPTTKTISQYACQRRTTLNNHNQRFTDALEILAENYEFKRNDDTCLTFMRAISVLKCLPFEVVSLKDTEGLPWIGDEVKGIMEEIIEVGESLEVQAVLNDERYQSFKRFKSVFGVGVKTADKWYRMGLRTLEDVRSSKTLKLTPMQKAGLCYYEDLADGVTKAEADAISLLVQDAVWTFDPDALVEITGGFRRGKPFGHDVDLLITSPGAEKGQEDQLLQKVTNLWKKQGLLLYGRLRESRFEDGKLPSRKIDALDHFAKCFLILKLYHHKVDKSKWEMPTGSNESEAKSWKAIRVDLVRCPYDGFAFALLGWTGSRMFRRDLRRYATHEKKMMLDNHALYDLTKKIFLKAKSEEEIFAHLGLEYLEPFERNA

SEQ ID NO: 1577 - DNA, 1587 bp, synthetic construct
  misc_feature 1..1587: note = Variant of terminal deoxynucleotidyltransferase
  source 1..1587: mol_type = other DNA
atgcaccatcatcatcatcatggcggtagcggcagccacggcattcgtaccatcgattcggacttcgggaagaaacgccagaagaagatggataaccacgatagttccgccatctatgaaatcaaatttcacgagtttgtgctgttcattctcgaagagaaaatgggtgcgacgcgtcgtacttttctgacagatttagcccgcaagaaagggttccgcgtcgagaatgaactgtcagacagcgttacccacatcgtggcagaaaataattcacgctctgaagtattggcttggctgaaagaacacaagatggagaagaccaagcaattcgaactgctggatattagctggcttatcgaaagcatgaaagttggtaaaccggtggacaccaaggggaaataccagttggcggaatcgggtgagatgagtgcgaacccagatccgacagagggtcgtgaaaacgagctgcctcctactacgaagaccatttctcagtatgcgtgtcaacgccgcaccaccctgaacaaccataatcaacgttttacggacgcactggaaattcttgcggaaaattacgagttcaaacgcaacgatgatacttgtctgacctttatgcgtgctatttccgtgctgaaatgccttccgtttgaggtagttagcctgaaagacacggaaggattgccctggatcggtgatgaagtcaaagggattatggaagaaatcatcgaggtcggtgaatcgctggaagtgcaggccgtgctcaatgatgagcgctatcaaagcttcaaacgctttaagagtgtctttggagtgggggtgaagacagcagacaaatggtaccgtatgggtctgcgcacgctcgaggatgttcgttccagcaagaccctgaagttgaccccgatgcagaaagcgggtctgtgctattatgaagatcttgctgatggcgttacgaaagccgaagctgacgcgatttcttcgctggttcaggatgcagtctggactttcgacccggatgcgctggtggagattacgggtggatttcgtcgtgggaaaccttttggtcacgacgttgatctgcttatcacatctccgggagctgagaaagaacaagaagaccagctcctgcagaaagtgaccaatctgtggaagaaacaagggttgttgctgtacggtcgtctgcgtgaaagtcgctttgaagatgggaaactcccatcccgcaagatcgatgccctggaccattttgcgaaatgctttctgatcctcaaactttatcaccataaagtggacaaaagcaaatgggaaatgccgacgggttcgaacgaaagcgaggccaaaagttggaaagcaattcgcgtagatctggttcgttgtccctacgatggttttgcgtttgcgttgttgggttggaccggaagccgcatgttccgccgtgatctgcgccgctacgccacccacgagaagaagatgatgctggacaatcatgcgctgtatgacctgaccaagaaaatctttctcaaagctaaatcggaagaggaaattttcgcacatctggggcttgaatacctggaaccgttcgaacgtaacgca

SEQ ID NO: 1578 - protein, 529 aa, synthetic construct
  REGION 1..529: note = Variant of terminal deoxynucleotidyltransferase
MHHHHHHGGSGSHGIRTIDSDFGKKRQKKMDNHDSSAIYEIKFHEFVLFILEEKMGATRRTFLTDLARKKGFRVENELSDSVTHIVAENNSRSEVLAWLKEHKMEKTKQFELLDISWLIESMKVGKPVDTKGKYQLAESGEMSANPDPTEGRENELPPTTKTISQYACQRRTTLNNHNQRFTDALEILAENYEFKRNDDTCLTFMRAISVLKCLPFEVVSLKDTEGLPWIGDEVKGIMEEIIEVGESLEVQAVLNDERYQSFKRFKSVFGVGVKTADKWYRMGLRTLEDVRSSKTLKLTPMQKAGLCYYEDLADGVTKAEADAISSLVQDAVWTFDPDALVEITGGFRRGKPFGHDVDLLITSPGAEKEQEDQLLQKVTNLWKKQGLLLYGRLRESRFEDGKLPSRKIDALDHFAKCFLILKLYHHKVDKSKWEMPTGSNESEAKSWKAIRVDLVRCPYDGFAFALLGWTGSRMFRRDLRRYATHEKKMMLDNHALYDLTKKIFLKAKSEEEIFAHLGLEYLEPFERNA

SEQ ID NO: 1579 - DNA, 1587 bp, synthetic construct
  misc_feature 1..1587: note = Variant of terminal deoxynucleotidyltransferase
  source 1..1587: mol_type = other DNA
atgcaccatcatcatcatcatggcggtagcggcagccacggcattcgtaccatcgattcggacttcgggaagaaacgccagaagaagatggataaccacgatagttccgccatctatgaaatcaaatttcacgagtttgtgctgttcattctcgaagagaaaatgggtgcgacgcgtcgtacttttctgacagatttagcccgcaagaaagggttccgcgtcgagaatgaactgtcagacagcgttacccacatcgtggcagaaaataattcacgctctgaagtattggcttggctgaaagaacacaagatggagaagaccaagcaattcgaactgctggatattagctggcttatcgaaagcatgaaagttggtaaaccggtggacaccaaggggaaataccagttggcggaatcgggtgagatgagtgcgaacccagatccgacagagggtcgtgaaaacgagctgcctcctactacgaagaccatttctcagtatgcgtgtcaacgccgcaccaccctgaacaaccataatcaacgttttacggacgcactggaaattcttgcggaaaattacgagttcaaacgcaacgatgatacttgtctgacctttatgcgtgctatttccgtgctgaaatgccttccgtttgaggtagttagcctgaaagacacggaaggattgccctggatcggtgatgaagtcaaagggattatggaagaaatcatcgaggtcggtgaatcgctggaagtgcaggccgtgctcaatgatgagcgctatcaaagcttcaaacgctttaagagtgtctttggagtgggggtgaagacagcagacaaatggtaccgtatgggtctgcgcacgctcgaggatgttcgttccagcaagaccctgaagttgaccccgatgcagaaagcgggtctgtgctattatgaagatcttgctgatggcgttacgaaagccgaagctgacgcgatttctctgctggttcaggatgcagtctggactttcgacccggatgcgctggtggagattacgggtggatttcgtcgtgggaaaccttttggtcacgacgttgatctgcttatcacatctccgggagctgagaaagaacaagaagaccagctcctgcagaaagtgaccaatctgtggaagaaacaagggttgttgctgtacggtcgtctgcgtgaaagtcgctttgaagatgggaaactcccatcccgcaagatcgatgccctggaccattttgcgaaatgctttctgatcctcaaactttatcaccataaagtggacaaaagcaaatgggaaatgccgacgggttcggtggaaagcgaggccaaaagttggaaagcaattcgcgtagatctggttcgttgtccctacgatggttttgcgtttgcgttgttgggttggaccggaagccgcatgttccgccgtgatctgcgccgctacgccacccacgagaagaagatgatgctggacaatcatgcgctgtatgacctgaccaagaaaatctttctcaaagctaaatcggaagaggaaattttcgcacatctggggcttgaatacctggaaccgttcgaacgtaacgca

SEQ ID NO: 1580 - protein, 529 aa, synthetic construct
  REGION 1..529: note = Variant of terminal deoxynucleotidyltransferase
MHHHHHHGGSGSHGIRTIDSDFGKKRQKKMDNHDSSAIYEIKFHEFVLFILEEKMGATRRTFLTDLARKKGFRVENELSDSVTHIVAENNSRSEVLAWLKEHKMEKTKQFELLDISWLIESMKVGKPVDTKGKYQLAESGEMSANPDPTEGRENELPPTTKTISQYACQRRTTLNNHNQRFTDALEILAENYEFKRNDDTCLTFMRAISVLKCLPFEVVSLKDTEGLPWIGDEVKGIMEEIIEVGESLEVQAVLNDERYQSFKRFKSVFGVGVKTADKWYRMGLRTLEDVRSSKTLKLTPMQKAGLCYYEDLADGVTKAEADAISLLVQDAVWTFDPDALVEITGGFRRGKPFGHDVDLLITSPGAEKEQEDQLLQKVTNLWKKQGLLLYGRLRESRFEDGKLPSRKIDALDHFAKCFLILKLYHHKVDKSKWEMPTGSVESEAKSWKAIRVDLVRCPYDGFAFALLGWTGSRMFRRDLRRYATHEKKMMLDNHALYDLTKKIFLKAKSEEEIFAHLGLEYLEPFERNA

SEQ ID NO: 1581 - DNA, 1587 bp, synthetic construct
  misc_feature 1..1587: note = Variant of terminal deoxynucleotidyltransferase
  source 1..1587: mol_type = other DNA
atgcaccatcatcatcatcatggcggtagcggcagccacggcattcgtaccatcgattcggacttcgggaagaaacgccagaagaagatggataaccacgatagttccgccatctatgaaatcaaatttcacgagtttgtgctgttcattctcgaagagaaaatgggtgcgacgcgtcgtacttttctgacagatttagcccgcaagaaagggttccgcgtcgagaatgaactgtcagacagcgttacccacatcgtggcagaaaataattcacgctctgaagtattggcttggctgaaagaacacaagatggagaagaccaagcaattcgaactgctggatattagctggcttatcgaaagcatgaaagttggtaaaccggtggacaccaaggggaaataccagttggcggaatcgggtgagatgagtgcgaacccagatccgacagagggtcgtgaaaacgagctgcctcctactacgaagaccatttctcagtatgcgtgtcaacgccgcaccaccctgaacaaccataatcaacgttttacggacgcactggaaattcttgcggaaaattacgagttcaaacgcaacgatgatacttgtctgacctttatgcgtgctatttccgtgctgaaatgccttccgtttgaggtagttagcctgaaagacacggaaggattgccctggatcggtgatgaagtcaaagggattatggaagaaatcatcgaggtcggtgaatcgctggaagtgcaggccgtgctcaatgatgagcgctatcaaagcttcaaacgctttaagagtgtctttggagtgggggtgaagacagcagacaaatggtaccgtatgggtctgcgcacgctcgaggatgttcgttccagcaagaccctgaagttgaccccgatgcagaaagcgggtctgtgctattatgaagatcttgctgatggcgttacgaaagccgaagctgacgcgatttctctgctggttcaggatgcagtctggactttcgacccggatgcgctggtggagattacgggtggatttcgtcgtgggaaaccttttggtcacgacgttgatctgcttatcacatctccgggagctgagaaagaacaagaagaccagctcctgcagaaagtgaccaatctgtggaagaaacaagggttgttgctgtacggtcgtctgcgtgaaagtcgctttgaagatgggaaactcccatcccgcaagatcgatgccctggaccattttgcgaaatgctttctgatcctcaaactttatcaccataaagtggacaaaagcaaatgggaaatgccgacgggttcgaacgaaagcgaggccaaaagttggaaagcaattcgcgtagatctggttcgttgtccctacgatggttttgcgtttgcgttgttgggttggaccggaagccgcatgttccgccgtgatctgcgccgctacgccacccacgagaagagtatgatgctggacaatcatgcgctgtatgacctgaccaagaaaatctttctcaaagctaaatcggaagaggaaattttcgcacatctggggcttgaatacctggaaccgttcgaacgtaacgca

SEQ ID NO: 1582 - protein, 529 aa, synthetic construct
  REGION 1..529: note = Variant of terminal deoxynucleotidyltransferase
MHHHHHHGGSGSHGIRTIDSDFGKKRQKKMDNHDSSAIYEIKFHEFVLFILEEKMGATRRTFLTDLARKKGFRVENELSDSVTHIVAENNSRSEVLAWLKEHKMEKTKQFELLDISWLIESMKVGKPVDTKGKYQLAESGEMSANPDPTEGRENELPPTTKTISQYACQRRTTLNNHNQRFTDALEILAENYEFKRNDDTCLTFMRAISVLKCLPFEVVSLKDTEGLPWIGDEVKGIMEEIIEVGESLEVQAVLNDERYQSFKRFKSVFGVGVKTADKWYRMGLRTLEDVRSSKTLKLTPMQKAGLCYYEDLADGVTKAEADAISLLVQDAVWTFDPDALVEITGGFRRGKPFGHDVDLLITSPGAEKEQEDQLLQKVTNLWKKQGLLLYGRLRESRFEDGKLPSRKIDALDHFAKCFLILKLYHHKVDKSKWEMPTGSNESEAKSWKAIRVDLVRCPYDGFAFALLGWTGSRMFRRDLRRYATHEKSMMLDNHALYDLTKKIFLKAKSEEEIFAHLGLEYLEPFERNA

SEQ ID NO: 1583 - DNA, 1587 bp, synthetic construct
  misc_feature 1..1587: note = Variant of terminal deoxynucleotidyltransferase
  source 1..1587: mol_type = other DNA
atgcaccatcatcatcatcatggcggtagcggcagccacggcattcgtaccatcgattcggacttcgggaagaaacgccagaagaagatggataaccacgatagttccgccatctatgaaatcaaatttcacgagtttgtgctgttcattctcgaagagaaaatgggtgcgacgcgtcgtacttttctgacagatttagcccgcaagaaagggttccgcgtcgagaatgaactgtcagacagcgttacccacatcgtggcagaaaataattcacgctctgaagtattggcttggctgaaagaacacaagatggagaagaccaagcaattcgaactgctggatattagctggcttatcgaaagcatgaaagttggtaaaccggtggacaccaaggggaaataccagttggcggaatcgggtgagatgagtgcgaacccagatccgacagagggtcgtgaaaacgagctgcctcctactacgaagaccatttctcagtatgcgtgtcaacgccgcaccaccctgaacaaccataatcaacgttttacggacgcactggaaattcttgcggaaaattacgagttcaaacgcaacgatgataagtgtctgacctttatgcgtgctatttccgtgctgaaatgccttccgtttgaggtagttagcctgaaagacacggaaggattgccctggatcggtgatgaagtcaaagggattatggaagaaatcatcgaggtcggtgaatcgctggaagtgcaggccgtgctcaatgatgagcgctatcaaagcttcaaacgctttaagagtgtctttggagtgggggtgaagacagcagacaaatggtaccgtatgggtctgcgcacgctcgaggatgttcgttccagcaagaccctgaagttgaccccgatgcagaaagcgggtctgtgctattatgaagatcttgctgatggcgttacgaaagccgaagctgacgcgatttctctgctggttcaggatgcagtctggactttcgacccggatgcgctggtggagattacgggtggatttcgtcgtgggaaaccttttggtcacgacgttgatctgcttatcacatctccgggagctgagaaagaacaagaagaccagctcctgcagaaagtgaccaatctgtggaagaaacaagggttgttgctgtacggtcgtctgcgtgaaagtcgctttgaagatgggaaactcccatcccgcaagatcgatgccctggaccattttgcgaaatgctttctgatcctcaaactttatcaccataaagtggacaaaagcaaatgggaaatgccgacgggttcgaacgaaagcgaggccaaaagttggaaagcaattcgcgtagatctggttcgttgtccctacgatggttttgcgtttgcgttgttgggttggaccggaagccgcatgttccgccgtgatctgcgccgctacgccacccacgagaagaagatgatgctggacaatcatgcgctgtatgacctgaccaagaaaatctttctcaaagctaaatcggaagaggaaattttcgcacatctggggcttgaatacctggaaccgttcgaacgtaacgca

SEQ ID NO: 1584 - protein, 529 aa, synthetic construct
  REGION 1..529: note = Variant of terminal deoxynucleotidyltransferase
MHHHHHHGGSGSHGIRTIDSDFGKKRQKKMDNHDSSAIYEIKFHEFVLFILEEKMGATRRTFLTDLARKKGFRVENELSDSVTHIVAENNSRSEVLAWLKEHKMEKTKQFELLDISWLIESMKVGKPVDTKGKYQLAESGEMSANPDPTEGRENELPPTTKTISQYACQRRTTLNNHNQRFTDALEILAENYEFKRNDDKCLTFMRAISVLKCLPFEVVSLKDTEGLPWIGDEVKGIMEEIIEVGESLEVQAVLNDERYQSFKRFKSVFGVGVKTADKWYRMGLRTLEDVRSSKTLKLTPMQKAGLCYYEDLADGVTKAEADAISLLVQDAVWTFDPDALVEITGGFRRGKPFGHDVDLLITSPGAEKEQEDQLLQKVTNLWKKQGLLLYGRLRESRFEDGKLPSRKIDALDHFAKCFLILKLYHHKVDKSKWEMPTGSNESEAKSWKAIRVDLVRCPYDGFAFALLGWTGSRMFRRDLRRYATHEKKMMLDNHALYDLTKKIFLKAKSEEEIFAHLGLEYLEPFERNA

SEQ ID NO: 1585 - DNA, 1587 bp, synthetic construct
  misc_feature 1..1587: note = Variant of terminal deoxynucleotidyltransferase
  source 1..1587: mol_type = other DNA
atgcaccatcatcatcatcatggcggtagcggcagccacggcattcgtaccatcgattcggacttcgggaagaaacgccagaagaagatggataaccacgatagttccgccatctatgaaatcaaatttcacgagtttgtgctgttcattctcgaagagaaaatgggtgcgacgcgtcgtacttttctgacagatttagcccgcaagaaagggttccgcgtcgagaatgaactgtcagacagcgttacccacatcgtggcagaaaataattcacgctctgaagtattggcttggctgaaagaacacaagatggagaagaccaagcaattcgaactgctggatattagctggcttatcgaaagcatgaaagttggtaaaccggtggacaccaaggggaaataccagttggcggaatcgggtgagatgagtgcgaacccagatccgacagagggtcgtgaaaacgagctgcctcctactacgaagaccatttctcagtatgcgtgtcaacgccgcaccaccctgaacaaccataatcaacgttttacggacgcactggaaattcttgcggaaaattacgagttcaaacgcaacgatgatacttgtctgacctttatgcgtgctatttccgtgctgaaatgccttccgtttgaggtagttagcctgaaagacacggaaggattgccctggatcggtgatgaagtcaaagggattatggaagaaatcatcgaggtcggtgaatcgctggaagtgcaggccgtgctcaatgatgagcgctatcaaagcttcaaacgctttaagagtgtctttggagtgggggtgaagacagcagacaaatggtaccgtatgggtctgcgcacgctcgaggatgttcgttccagcaagaccctgaagttgaccccgatgcagaaagcgggtctgtgctattatgaagatcttgctgatggcgttacgaaagccgaagctgacgcgatttctctgctggttcgggatgcagtctggactttcgacccggatgcgctggtggagattacgggtggatttcgtcgtgggaaaccttttggtcacgacgttgatctgcttatcacatctccgggagctgagaaagaacaagaagaccagctcctgcagaaagtgaccaatctgtggaagaaacaagggttgttgctgtacggtcgtctgcgtgaaagtcgctttgaagatgggaaactcccatcccgcaagatcgatgccctggaccattttgcgaaatgctttctgatcctcaaactttatcaccataaagtggacaaaagcaaatgggaaatgccgacgggttcgaacgaaagcgaggccaaaagttggaaagcaattcgcgtagatctggttcgttgtccctacgatggttttgcgtttgcgttgttgggttggaccggaagccgcatgttccgccgtgatctgcgccgctacgccacccacgagaagaagatgatgctggacaatcatgcgctgtatgacctgaccaagaaaatctttctcaaagctaaatcggaagaggaaattttcgcacatctggggcttgaatacctggaaccgttcgaacgtaacgca

SEQ ID NO: 1586 - protein, 529 aa, synthetic construct
  REGION 1..529: note = Variant of terminal deoxynucleotidyltransferase
MHHHHHHGGSGSHGIRTIDSDFGKKRQKKMDNHDSSAIYEIKFHEFVLFILEEKMGATRRTFLTDLARKKGFRVENELSDSVTHIVAENNSRSEVLAWLKEHKMEKTKQFELLDISWLIESMKVGKPVDTKGKYQLAESGEMSANPDPTEGRENELPPTTKTISQYACQRRTTLNNHNQRFTDALEILAENYEFKRNDDTCLTFMRAISVLKCLPFEVVSLKDTEGLPWIGDEVKGIMEEIIEVGESLEVQAVLNDERYQSFKRFKSVFGVGVKTADKWYRMGLRTLEDVRSSKTLKLTPMQKAGLCYYEDLADGVTKAEADAISLLVRDAVWTFDPDALVEITGGFRRGKPFGHDVDLLITSPGAEKEQEDQLLQKVTNLWKKQGLLLYGRLRESRFEDGKLPSRKIDALDHFAKCFLILKLYHHKVDKSKWEMPTGSNESEAKSWKAIRVDLVRCPYDGFAFALLGWTGSRMFRRDLRRYATHEKKMMLDNHALYDLTKKIFLKAKSEEEIFAHLGLEYLEPFERNA

SEQ ID NO: 1587 - DNA, 1587 bp, synthetic construct
  misc_feature 1..1587: note = Variant of terminal deoxynucleotidyltransferase
  source 1..1587: mol_type = other DNA
atgcaccatcatcatcatcatggcggtagcggcagccacggcattcgtaccatcgattcggacttcgggaagaaacgccagaagaagatggataaccacgatagttccgccatctatgaaatcaaatttcacgagtttgtgctgttcattctcgaagagaaaatgggtgcgacgcgtcgtacttttctgacagatttagcccgcaagaaagggttccgcgtcgagaatgaactgtcagacagcgttacccacatcgtggcagaaaataattcacgctctgaagtattggcttggctgaaagaacacaagatggagaagaccaagcaattcgaactgctggatattagctggcttatcgaaagcatgaaagttggtaaaccggtggacaccaaggggaaataccagttggcggaatcgggtgagatgagtgcgaacccagatccgacagagggtcgtgaaaacgagctgcctcctactacgaagaccatttctcagtatgcgtgtcaacgccgcaccaccctgaacaaccataatcaacgttttacggacgcactggaaattcttgcggaaaattacgagttcaaacgcaacgatgatacttgtctgacctttatgcgtgctatttccgtgctgaaatgccttccgtttgaggtagttagcctgaaagacacggaaggattgccctggatcggtgatgaagtcaaagggattatggaagaaatcatcgaggtcggtgaatcgctggaagtgcaggccgtgctcaatgatgagcgctatcaaagcttcaaacgctttaagagtgtctttggagtgggggtgaagacagcagacaaatggtaccgtatgggtctgcgcacgctcgaggatgttcgttccagcaagaccctgaagttgaccccgatgcagaaagcgggtctgtgctattatgaagatcttgctgatggcgttacgaaagccgaagctgacgcgatttctctgctggttcaggatgcagtctggactttcgacccggatgcgctggtggagattacgggtggatttcgtcgtgggaaaccttttggtcacgacgttgatctgcttatcacatctccgggagctgagaaagaacaagaagaccagctcctgcagaaagtgaccaatctgtggaagaaacaagggttgttgctgtacggtcgtctgcgtgaaagtcgctttgaagatgggaaactcccatcccgcaagatcgatgccctggaccattttgcgaaatgctttctgatcctcaaactttatcaccataaagtggacaaaagcaaatgggaaatgccgacgggttcggaggaaagcgaggccaaaagttggaaagcaattcgcgtagatctggttcgttgtccctacgatggttttgcgtttgcgttgttgggttggaccggaagccgcatgttccgccgtgatctgcgccgctacgccacccacgagaagaagatgatgctggacaatcatgcgctgtatgacctgaccaagaaaatctttctcaaagctaaatcggaagaggaaattttcgcacatctggggcttgaatacctggaaccgttcgaacgtaacgca

SEQ ID NO: 1588 - protein, 529 aa, synthetic construct
  REGION 1..529: note = Variant of terminal deoxynucleotidyltransferase
MHHHHHHGGSGSHGIRTIDSDFGKKRQKKMDNHDSSAIYEIKFHEFVLFILEEKMGATRRTFLTDLARKKGFRVENELSDSVTHIVAENNSRSEVLAWLKEHKMEKTKQFELLDISWLIESMKVGKPVDTKGKYQLAESGEMSANPDPTEGRENELPPTTKTISQYACQRRTTLNNHNQRFTDALEILAENYEFKRNDDTCLTFMRAISVLKCLPFEVVSLKDTEGLPWIGDEVKGIMEEIIEVGESLEVQAVLNDERYQSFKRFKSVFGVGVKTADKWYRMGLRTLEDVRSSKTLKLTPMQKAGLCYYEDLADGVTKAEADAISLLVQDAVWTFDPDALVEITGGFRRGKPFGHDVDLLITSPGAEKEQEDQLLQKVTNLWKKQGLLLYGRLRESRFEDGKLPSRKIDALDHFAKCFLILKLYHHKVDKSKWEMPTGSEESEAKSWKAIRVDLVRCPYDGFAFALLGWTGSRMFRRDLRRYATHEKKMMLDNHALYDLTKKIFLKAKSEEEIFAHLGLEYLEPFERNA

SEQ ID NO: 1589 - DNA, 1587 bp, synthetic construct
  misc_feature 1..1587: note = Variant of terminal deoxynucleotidyltransferase
  source 1..1587: mol_type = other DNA
atgcaccatcatcatcatcatggcggtagcggcagccacggcattcgtaccatcgattcggacttcgggaagaaacgccagaagaagatggataaccacgatagttccgccatctatgaaatcaaatttcacgagtttgtgctgttcattctcgaagagaaaatgggtgcgacgcgtcgtacttttctgacagatttagcccgcaagaaagggttccgcgtcgagaatgaactgtcagacagcgttacccacatcgtggcagaaaataattcacgctctgaagtattggcttggctgaaagaacacaagatggagaagaccaagcaattcgaactgctggatattagctggcttatcgaaagcatgaaagttggtaaaccggtggacaccaaggggaaataccagttggcggaatcgggtgagatgagtgcgaacccagatccgacagagggtcgtgaaaacgagctgcctcctactacgaagaccatttctaagtatgcgtgtcaacgccgcaccaccctgaacaaccataatcaacgttttacggacgcactggaaattcttgcggaaaattacgagttcaaacgcaacgatgatacttgtctgacctttatgcgtgctatttccgtgctgaaatgccttccgtttgaggtagttagcctgaaagacacggaaggattgccctggatcggtgatgaagtcaaagggattatggaagaaatcatcgaggtcggtgaatcgctggaagtgcaggccgtgctcaatgatgagcgctatcaaagcttcaaacgctttaagagtgtctttggagtgggggtgaagacagcagacaaatggtaccgtatgggtctgcgcacgctcgaggatgttcgttccagcaagaccctgaagttgaccccgatgcagaaagcgggtctgtgctattatgaagatcttgctgatggcgttacgaaagccgaagctgacgcgatttctctgctggttcaggatgcagtctggactttcgacccggatgcgctggtggagattacgggtggatttcgtcgtgggaaaccttttggtcacgacgttgatctgcttatcacatctccgggagctgagaaagaacaagaagaccagctcctgcagaaagtgaccaatctgtggaagaaacaagggttgttgctgtacggtcgtctgcgtgaaagtcgctttgaagatgggaaactcccatcccgcaagatcgatgccctggaccattttgcgaaatgctttctgatcctcaaactttatcaccataaagtggacaaaagcaaatgggaaatgccgacgggttcgaacgaaagcgaggccaaaagttggaaagcaattcgcgtagatctggttcgttgtccctacgatggttttgcgtttgcgttgttgggttggaccggaagccgcatgttccgccgtgatctgcgccgctacgccacccacgagaagaagatgatgctggacaatcatgcgctgtatgacctgaccaagaaaatctttctcaaagctaaatcggaagaggaaattttcgcacatctggggcttgaatacctggaaccgttcgaacgtaacgca

SEQ ID NO: 1590 - protein, 529 aa, synthetic construct
  REGION 1..529: note = Variant of terminal deoxynucleotidyltransferase
MHHHHHHGGSGSHGIRTIDSDFGKKRQKKMDNHDSSAIYEIKFHEFVLFILEEKMGATRRTFLTDLARKKGFRVENELSDSVTHIVAENNSRSEVLAWLKEHKMEKTKQFELLDISWLIESMKVGKPVDTKGKYQLAESGEMSANPDPTEGRENELPPTTKTISKYACQRRTTLNNHNQRFTDALEILAENYEFKRNDDTCLTFMRAISVLKCLPFEVVSLKDTEGLPWIGDEVKGIMEEIIEVGESLEVQAVLNDERYQSFKRFKSVFGVGVKTADKWYRMGLRTLEDVRSSKTLKLTPMQKAGLCYYEDLADGVTKAEADAISLLVQDAVWTFDPDALVEITGGFRRGKPFGHDVDLLITSPGAEKEQEDQLLQKVTNLWKKQGLLLYGRLRESRFEDGKLPSRKIDALDHFAKCFLILKLYHHKVDKSKWEMPTGSNESEAKSWKAIRVDLVRCPYDGFAFALLGWTGSRMFRRDLRRYATHEKKMMLDNHALYDLTKKIFLKAKSEEEIFAHLGLEYLEPFERNA

SEQ ID NO: 1591 - DNA, 1587 bp, synthetic construct
  misc_feature 1..1587: note = Variant of terminal deoxynucleotidyltransferase
  source 1..1587: mol_type = other DNA
atgcaccatcatcatcatcatggcggtagcggcagccacggcattcgtaccatcgattcggacttcgggaagaaacgccagaagaagatggataaccacgatagttccgccatctatgaaatcaaatttcacgagtttgtgctgttcattctcgaagagaaaatgggtgcgacgcgtcgtacttttctgacagatttagcccgcaagaaagggttccgcgtcgagaatgaactgtcagacagcgttacccacatcgtggcagaaaataattcacgctctgaagtattggcttggctgaaagaacacaagatggagaagaccaagcaattcgaactgctggatattagctggcttatcgaaagcatgaaagttggtaaaccggtggacaccaaggggaaataccagttggcggaatcgggtgagatgagtgcgaacccagatccgacagagggtcgtgaaaacgagctgcctcctactacgaagaccatttctcagtatgcgtgtcaacgccgcaccaccctgaacaaccataatcaacgttttacggacgcactggaaattcttgcggaaaattacgagttcaaacgcaacgatgatacttgtctgacctttatgcgtgctatttccgtgctgaaatgccttccgtttgaggtagttagcctgaaagacacggaaggattgccctggatcggtgatgaagtcaaagggattatggaagaaatcatcgaggtcggtgaatcgctggaagtgcaggccgtgctcaatgatgagcgctatcaaagcttcaaacgctttaagagtgtctttggagtgggggtgaagacagcagacaaatggtaccgtatgggtctgcgcacgctcgaggatgttcgttccagcaagaccctgaagttgaccccgatgcagaaagcgggtctgtgctattatgaagatcttgctgatggcgttacgaaagccgaagctgacgcgatttctctgctggttcaggatgcagtctggactttcgacccggatgcgctggtggagattacgggtggatttcgtcgtgggaaaccttttggtcacgacgttgatctgcttatcacatctccgggagctgagaaagaacaagaagaccagctcctgcagaaagtgaccaatctgtggaagaaacaagggttgttgctgtacggtcgtctgcgtgaaagtcgctttgaagatgggaaactcccatcccgcaagatcgatgccctggaccattttgcgaaatgctttctgatcctcaaactttatcaccataaagtggacaaaagcaaatgggaaatgccgacgggttcgaacgaaagcgaggccaaaagttggaaagcaattcgcgtagatctggttcgttgtccctacgatggttttgcgtttgcgttgttgggttggaccggaagccgcatgttccgccgtgatctgcgccgctacgccacccacgagaagaagatgtggctggacaatcatgcgctgtatgacctgaccaagaaaatctttctcaaagctaaatcggaagaggaaattttcgcacatctggggcttgaatacctggaaccgttcgaacgtaacgca

SEQ ID NO: 1592 - protein, 529 aa, synthetic construct
  REGION 1..529: note = Variant of terminal deoxynucleotidyltransferase
MHHHHHHGGSGSHGIRTIDSDFGKKRQKKMDNHDSSAIYEIKFHEFVLFILEEKMGATRRTFLTDLARKKGFRVENELSDSVTHIVAENNSRSEVLAWLKEHKMEKTKQFELLDISWLIESMKVGKPVDTKGKYQLAESGEMSANPDPTEGRENELPPTTKTISQYACQRRTTLNNHNQRFTDALEILAENYEFKRNDDTCLTFMRAISVLKCLPFEVVSLKDTEGLPWIGDEVKGIMEEIIEVGESLEVQAVLNDERYQSFKRFKSVFGVGVKTADKWYRMGLRTLEDVRSSKTLKLTPMQKAGLCYYEDLADGVTKAEADAISLLVQDAVWTFDPDALVEITGGFRRGKPFGHDVDLLITSPGAEKEQEDQLLQKVTNLWKKQGLLLYGRLRESRFEDGKLPSRKIDALDHFAKCFLILKLYHHKVDKSKWEMPTGSNESEAKSWKAIRVDLVRCPYDGFAFALLGWTGSRMFRRDLRRYATHEKKMWLDNHALYDLTKKIFLKAKSEEEIFAHLGLEYLEPFERNA

SEQ ID NO: 1593 - DNA, 1587 bp, synthetic construct
  misc_feature 1..1587: note = Variant of terminal deoxynucleotidyltransferase
  source 1..1587: mol_type = other DNA
atgcaccatcatcatcatcatggcggtagcggcagccacggcattcgtaccatcgattcggacttcgggaagaaacgccagaagaagatggataaccacgatagttccgccatctatgaaatcaaatttcacgagtttgtgctgttcattctcgaagagaaaatgggtgcgacgcgtcgtacttttctgacagatttagcccgcaagaaagggttccgcgtcgagaatgaactgtcagacagcgttacccacatcgtggcagaaaataattcacgctctgaagtattggcttggctgaaagaacacaagatggagaagaccaagcaattcgaactgctggatattagctggcttatcgaaagcatgaaagttggtaaaccggtggacaccaaggggaaataccagttggcggaatcgggtgagatgagtgcgaacccagatccgacagagggtcgtgaaaacgagctgcctcctactacgaagaccatttctcagtatgcgtgtcaacgccgcaccaccctgaacaaccataatcaacgttttacggacgcactggaaattcttgcggaaaattacgagttcaaacgcaacgatgatacttgtctgacctttatgcgtgctatttccgtgctgaaatgccttccgtttgaggtagttagcctgaaagacacggaaggattgccctggatcggtgatgaagtcaaagggattatggaagaaatcatcgaggtcggtgaatcgctggaagtgcaggccgtgctcaatgatgagcgctatcaaagcttcaaacgctttaagagtgtctttggagtgggggtgaagacagcagacaaatggtaccgtatgggtctgcgcacgctcgaggatgttcgttccagcaagaccctgaagttgaccccgatgcagaaagcgggtctgtgctattatgaagatcttgctgatggcgttacgaaagccgaagctgacgcgatttctctgctggttcaggatgcagtctggactttcgacccggatgcgctggtggagattacgggtggatttcgtcgtgggaaaccttttggtcacgacgttgatctgcttatcacatctccgggagctgagaaagaacaagaagaccagctcctgcagaaagtgaccaatctgtggaagaaacaagggttgttgctgtacggtcgtctgcgtgaaagtcgctttgaagatgggaaactcccatcccgcaagatcgatgccctggaccattttgcgaaatgctttctgatcctcaaactttatcaccataaagtggacaaaagcaaatgggaaatgccgacgggttcgaacgaaagcgaggccaaaagttggaaagcaattcgcgtagatctggttcgttgtccctacgatggttttgcgtttgcgttgttgggttggaccggaagccgcatgttccgccgtgatctgcgccgctacgccacccacgagaagaagatgatgctggacaatcatgcgctgtatgacctgaccaagaaaatcaatctcaaagctaaatcggaagaggaaattttcgcacatctggggcttgaatacctggaaccgttcgaacgtaacgca

SEQ ID NO: 1594 - protein, 529 aa, synthetic construct
  REGION 1..529: note = Variant of terminal deoxynucleotidyltransferase
MHHHHHHGGSGSHGIRTIDSDFGKKRQKKMDNHDSSAIYEIKFHEFVLFILEEKMGATRRTFLTDLARKKGFRVENELSDSVTHIVAENNSRSEVLAWLKEHKMEKTKQFELLDISWLIESMKVGKPVDTKGKYQLAESGEMSANPDPTEGRENELPPTTKTISQYACQRRTTLNNHNQRFTDALEILAENYEFKRNDDTCLTFMRAISVLKCLPFEVVSLKDTEGLPWIGDEVKGIMEEIIEVGESLEVQAVLNDERYQSFKRFKSVFGVGVKTADKWYRMGLRTLEDVRSSKTLKLTPMQKAGLCYYEDLADGVTKAEADAISLLVQDAVWTFDPDALVEITGGFRRGKPFGHDVDLLITSPGAEKEQEDQLLQKVTNLWKKQGLLLYGRLRESRFEDGKLPSRKIDALDHFAKCFLILKLYHHKVDKSKWEMPTGSNESEAKSWKAIRVDLVRCPYDGFAFALLGWTGSRMFRRDLRRYATHEKKMMLDNHALYDLTKKINLKAKSEEEIFAHLGLEYLEPFERNA

SEQ ID NO: 1595 - DNA, 1587 bp, synthetic construct
  misc_feature 1..1587: note = Variant of terminal deoxynucleotidyltransferase
  source 1..1587: mol_type = other DNA
atgcaccatcatcatcatcatggcggtagcggcagccacggcattcgtaccatcgattcggacttcgggaagaaacgccagaagaagatggataaccacgatagttccgccatctatgaaatcaaatttcacgagtttgtgctgttcattctcgaagagaaaatgggtgcgacgcgtcgtacttttctgacagatttagcccgcaagaaagggttccgcgtcgagaatgaactgtcagacagcgttacccacatcgtggcagaaaataattcacgctctgaagtattggcttggctgaaagaacacaagatggagaagaccaagcaattcgaactgctggatattagctggcttatcgaaagcatgaaagttggtaaaccggtggacaccaaggggaaataccagttggcggaatcgggtgagatgagtgcgaacccagatccgacagagggtcgtgaaaacgagctgcctcctactacgaagaccatttctcagtatgcgtgtcaacgccgcaccaccctgaacaaccataatcaacgttttacggacgcactggaaattcttgcggaaaattacgagttcaaacgcaacgatgatactgcgctgacttttatgcgtgctatttccgtgctgaaaagccttccgtttgaggtagttagcctgaaagacacggaaggattgccctggatcggtgatgaagtcaaagggattatggaagaaatcatcgaggtcggtgaatcgctggaagtgcaggccgtgctcaatgatgagcgctatcaaagcttcaaacgctttaagagtgtctttggagtgggggtgaagacagcagacaagtggtaccgtatgggtctgcgcacgctcgaggatgttcgttccagcaagaccctgaagttgaccccgatgcagaaagcgggtctgtgctattatgaagatcttgctcgcggcgttacgaaagccgaagctgacgcgatttctctgctggttcaggatgcagtcgcaactttcgacccggatgcgctggtggagattgtcggtggatttcgtcgtgggaaaccttttggtcacgacgttgatctgcttatcacatctccgggagctgagaaagagcaagaagaccagctcctgcagaaagtgaccaatctgtggaagaaacaagggttgttgctgtacggtcgtctggaatggagtcagtttgaagatgggaaactcccatcccgcaagatcgatgccctggaccattttgcgaaatgctttctgatcctcaaactttatgatcataaagtggacaaaagcaaatgggaaatgccgacgggttcgaacgaaagcgaggccaaaagttggaaagcaattcgcgtagatctggttcgttgcccctacgatggttttgcgtttgcgttgttgggttggaccggaagccgcatgttccgccgtgatctgcgctggtacgccaccgacgagaagaagatgatgctggacaatcatgcgctgtatgacctgaccaagaaaatctttctcaaagctaaatcggaagaggaaattttcgcacatctggggcttgaatacctggaaccgttcgaacgtaacgca

SEQ ID NO: 1596 - protein, 529 aa, synthetic construct
  REGION 1..529: note = Variant of terminal deoxynucleotidyltransferase
MHHHHHHGGSGSHGIRTIDSDFGKKRQKKMDNHDSSAIYEIKFHEFVLFILEEKMGATRRTFLTDLARKKGFRVENELSDSVTHIVAENNSRSEVLAWLKEHKMEKTKQFELLDISWLIESMKVGKPVDTKGKYQLAESGEMSANPDPTEGRENELPPTTKTISQYACQRRTTLNNHNQRFTDALEILAENYEFKRNDDTALTFMRAISVLKSLPFEVVSLKDTEGLPWIGDEVKGIMEEIIEVGESLEVQAVLNDERYQSFKRFKSVFGVGVKTADKWYRMGLRTLEDVRSSKTLKLTPMQKAGLCYYEDLARGVTKAEADAISLLVQDAVATFDPDALVEIVGGFRRGKPFGHDVDLLITSPGAEKEQEDQLLQKVTNLWKKQGLLLYGRLEWSQFEDGKLPSRKIDALDHFAKCFLILKLYDHKVDKSKWEMPTGSNESEAKSWKAIRVDLVRCPYDGFAFALLGWTGSRMFRRDLRWYATDEKKMMLDNHALYDLTKKIFLKAKSEEEIFAHLGLEYLEPFERNA

SEQ ID NO: 1597 - DNA, 1587 bp, synthetic construct
  misc_feature 1..1587: note = Variant of terminal deoxynucleotidyltransferase
  source 1..1587: mol_type = other DNA
atgcaccatcatcatcatcatggcggtagcggcagccacggcattcgtaccatcgattcggacttcgggaagaaacgccagaagaagatggataaccacgatagttccgccatctatgaaatcaaatttcacgagtttgtgctgttcattctcgaagagaaaatgggtgcgacgcgtcgtacttttctgacagatttagcccgcaagaaagggttccgcgtcgagaatgaactgtcagacagcgttacccacatcgtggcagaaaataattcacgctctgaagtattggcttggctgaaagaacacaagatggagaagaccaagcaattcgaactgctggatattagctggcttatcgaaagcatgaaagttggtaaaccggtggacaccaaggggaaataccagttggcggaatcgggtgagatgagtgcgaacccagatccgacagagggtcgtgaaaacgagctgcctcctactacgaagaccatttctcagtatgcgtgtcaacgccgcaccaccctggacaaccataatcaacgttttacggacgcactggaaattcttgcggaaaattacgagttcaaacgcaacgatgatactgcgctgacttttatgcgtgctatttccgtgctgaaatgccttccgtttgaggtagttagcctgaaagacacggaaggattgccctggatcggtgatgaagtcaaagggattatggaagaaatcatcgaggtcggtgaatcgctggaagtgcaggccgtgctcaatgatgagcgctatcaaagcttcaaacgctttaagagtgtctttggagtgggggtgaagacagcagacaagtggtaccgtatgggtctgcgcacgctcgaggatgttcgttccagcaagaccctgaagttgaccccgatgcagaaagcgggtctgtgctattatgaagatcttgctcgcggcgttacgaaagccgaagctgacgcgatttctctgctggttcaggatgcagtcgcaactttcgacccggatgcgctggtggagattacgggtggatttcgtcgtgggaaaccttttggtcacgacgttgatctgcttatcacatctccgggagctgagaaagagcaagaagaccagctcctgcagaaagtgaccaatctgtggaagaaacaagggttgttgctgtacggtcgtctggaatggagtcgctttgaagatgggaaactcccatcccgtaagatcgatgccctgaaccattttgcgaaatgctttctgatcctcaaactttatgatcataaagtggacaaaagcaaatgggaaatgccgacgggttcgaacgaaagcgaggccaaaagttggaaagcaattcgcgtagatctggttcgtgtcccctacgatggttttgcgtttgcgttgttgggttggaccggaagccgcatgttccgccgtgatctgcgccgctacgccaccgacgagaagaagatgatgctggacaatcatgcgctgtatgacctgaccaagaaaatctttctcaaagcgaaatcggaagaggaaattttcgcacatctggggcttgaatacctggaaccgttcgaacgtaacgca

SEQ ID NO: 1598 - protein, 529 aa, synthetic construct
  REGION 1..529: note = Variant of terminal deoxynucleotidyltransferase
MHHHHHHGGSGSHGIRTIDSDFGKKRQKKMDNHDSSAIYEIKFHEFVLFILEEKMGATRRTFLTDLARKKGFRVENELSDSVTHIVAENNSRSEVLAWLKEHKMEKTKQFELLDISWLIESMKVGKPVDTKGKYQLAESGEMSANPDPTEGRENELPPTTKTISQYACQRRTTLDNHNQRFTDALEILAENYEFKRNDDTALTFMRAISVLKCLPFEVVSLKDTEGLPWIGDEVKGIMEEIIEVGESLEVQAVLNDERYQSFKRFKSVFGVGVKTADKWYRMGLRTLEDVRSSKTLKLTPMQKAGLCYYEDLARGVTKAEADAISLLVQDAVATFDPDALVEITGGFRRGKPFGHDVDLLITSPGAEKEQEDQLLQKVTNLWKKQGLLLYGRLEWSRFEDGKLPSRKIDALNHFAKCFLILKLYDHKVDKSKWEMPTGSNESEAKSWKAIRVDLVRVPYDGFAFALLGWTGSRMFRRDLRRYATDEKKMMLDNHALYDLTKKIFLKAKSEEEIFAHLGLEYLEPFERNA

SEQ ID NO: 1599 - DNA, 1587 bp, synthetic construct
  misc_feature 1..1587: note = Variant of terminal deoxynucleotidyltransferase
  source 1..1587: mol_type = other DNA
atgcaccatcatcatcatcatggcggtagcggcagccacggcattcgtaccatcgattcggacttcgggaagaaacgccagaagaagatggataaccacgatagttccgccatctatgaaatcaaatttcacgagtttgtgctgttcattctcgaagagaaaatgggtgcgacgcgtcgtacttttctgacagatttagcccgcaagaaagggttccgcgtcgagaatgaactgtcagacagcgttacccacatcgtggcagaaaataattcacgctctgaagtattggcttggctgaaagaacacaagatggagaagaccaagcaattcgaactgctggatattagctggcttatcgaaagcatgaaagttggtaaaccggtggacaccaaggggaaataccagttggcggaatcgggtgagatgagtgcgaacccagatccgacagagggtcgtgaaaacgagctgcctcctactacgaagaccatttctcagtatgcgtgtcaacgccgcaccaccctgaacaaccataatcaacgttttacggacgcactggaaattcttgcggaaaattacgagttcaaacgcaacgatgatacttgtctgacttttatgcgtgctatttccgtgctgaaatgccttccgtttgaggtagttagcctgaaagacacggaaggattgccctggatcggtgatgaagtcaaagggattatggaagaaatcatcgaggtcggtgaatcgctggaagtgcaggccgtgctcaatgatgagcgctatcaaagcttcaaacgctttaagagtgtctttggagtgggggtgaagacagcagacaagtggtaccgtatgggtctgcgcacgctcgaggatgttcgttccagcaagaccctgaagttgaccccgatgcagaaagcgggtctgtgctattatgaagatcttgctcgcggcgttacgaaagccgaagctgacgcgatttctctgctggttcaggatgcagtcgcaactttcgacccggatgcgctggtggagattgtcggtggatttcgtcgtgggaaaccttttggtcacgacgttgatctgcttatcacatctccgggagctgagaaaaaccaagaagaccagctcctgcagaaagtgaccaatctgtggaagaaacaagggttgttgctgtacggtcgtctggaatggagtcgctttgaagatgggaaactcccatcccgtaagatcgatgccctggaccattttgcgaaatgctttctgatcctcaaactttatcaccataaagtggacaaaagcaaatgggaaatgccgacgggttcgaacgaaagcgaggccaaaagttggaaagcaattcgcgtagatctggttcgttgcccctacgatggttttgcgtttgcgttgttgggttggaccggaagccgcatgttccgccgtgatctgcgccgctacgccaccgacgagaagaagatgatgctggacaatcatgcgctgtatgacctgaccaagaaaatctttctcaaagcgaaatcggaagaggaaattttcgcacatctggggcttgaatacctggaaccgttcgaacgtaacgca

SEQ ID NO: 1600 - protein, 529 aa, synthetic construct
  REGION 1..529: note = Variant of terminal deoxynucleotidyltransferase
MHHHHHHGGSGSHGIRTIDSDFGKKRQKKMDNHDSSAIYEIKFHEFVLFILEEKMGATRRTFLTDLARKKGFRVENELSDSVTHIVAENNSRSEVLAWLKEHKMEKTKQFELLDISWLIESMKVGKPVDTKGKYQLAESGEMSANPDPTEGRENELPPTTKTISQYACQRRTTLNNHNQRFTDALEILAENYEFKRNDDTCLTFMRAISVLKCLPFEVVSLKDTEGLPWIGDEVKGIMEEIIEVGESLEVQAVLNDERYQSFKRFKSVFGVGVKTADKWYRMGLRTLEDVRSSKTLKLTPMQKAGLCYYEDLARGVTKAEADAISLLVQDAVATFDPDALVEIVGGFRRGKPFGHDVDLLITSPGAEKNQEDQLLQKVTNLWKKQGLLLYGRLEWSRFEDGKLPSRKIDALDHFAKCFLILKLYHHKVDKSKWEMPTGSNESEAKSWKAIRVDLVRCPYDGFAFALLGWTGSRMFRRDLRRYATDEKKMMLDNHALYDLTKKIFLKAKSEEEIFAHLGLEYLEPFERNA

SEQ ID NO: 1601 - DNA, 1587 bp, synthetic construct
  misc_feature 1..1587: note = Variant of terminal deoxynucleotidyltransferase
  source 1..1587: mol_type = other DNA
atgcaccatcatcatcatcatggcggtagcggcagccacggcattcgtaccatcgattcggacttcgggaagaaacgccagaagaagatggataaccacgatagttccgccatctatgaaatcaaatttcacgagtttgtgctgttcattctcgaagagaaaatgggtgcgacgcgtcgtacttttctgacagatttagcccgcaagaaagggttccgcgtcgagaatgaactgtcagacagcgttacccacatcgtggcagaaaataattcacgctctgaagtattggcttggctgaaagaacacaagatggagaagaccaagcaattcgaactgctggatattagctggcttatcgaaagcatgaaagttggtaaaccggtggacaccaaggggaaataccagttggcggaatcgggtgagatgagtgcgaacccagatccgacagagggtcgtgaaaacgagctgcctcctactacgaagaccatttctcagtatgcgtgtcaacgccgcaccaccctggacaaccataatcaacgttttacggacgcactggaaattcttgcggaaaattacgagttcaaacgcaacgatgatacttgtctgacttttatgcgtgctatttccgtgctgaaatgccttccgtttgaggtagttagcctgaaagacacggaaggattgccctggatcggtgatgaagtcaaagggattatggaagaaatcatcgaggtcggtgaatcgctggaagtgcaggccgtgctcaatgatgagcgctatcaaagcttcaaacgctttaagagtgtctttggagtgggggtgaagacagcagacaagtggtaccgtatgggtctgcgcacgctcgaggatgttcgttccagcaagaccctgaagttgaccccgatgcagaaagcgggtctgtgctattatgaagatcttgctcgcggcgttacgaaagccgaagctgacgcgatttctctgctggttcaggatgcagtcgcaactttcgacccggatgcgctggtggagattacgggtggatttcgtcgtgggaaaccttttggtcacgacgttgatctgcttatcacatctccgggagctgagaaagaacaagaagaccagctcctgcagaaagtgaccaatctgtggaagaaacaagggttgttgctgtacggtcgtctggaatggagtcgctttgaagatgggaaactcccatcccgcaagatcgatgccctggaccattttgcgaaatgctttctgatcctcaaactttatcaccataaagtggacaaaagcaaatgggaaatgccgacgggttcgaacgaaagcgaggccaaaagttggaaagcaattcgcgtagatctggttcgttgcccctacgatggttttgcgtttgcgttgttgggttggaccggaagccgcatgttccgccgtgatctgcgccgctacgccaccgacgagaagaagatgatgctggacaatcatgcgctgtatgacctgaccaagaaaatctttctcaaagctaaatcggaagaggaaattttcgcacatctggggcttgaatacctggaaccgttcgaacgtaacgca

SEQ ID NO: 1602 - protein, 529 aa, synthetic construct
  REGION 1..529: note = Variant of terminal deoxynucleotidyltransferase
MHHHHHHGGSGSHGIRTIDSDFGKKRQKKMDNHDSSAIYEIKFHEFVLFILEEKMGATRRTFLTDLARKKGFRVENELSDSVTHIVAENNSRSEVLAWLKEHKMEKTKQFELLDISWLIESMKVGKPVDTKGKYQLAESGEMSANPDPTEGRENELPPTTKTISQYACQRRTTLDNHNQRFTDALEILAENYEFKRNDDTCLTFMRAISVLKCLPFEVVSLKDTEGLPWIGDEVKGIMEEIIEVGESLEVQAVLNDERYQSFKRFKSVFGVGVKTADKWYRMGLRTLEDVRSSKTLKLTPMQKAGLCYYEDLARGVTKAEADAISLLVQDAVATFDPDALVEITGGFRRGKPFGHDVDLLITSPGAEKEQEDQLLQKVTNLWKKQGLLLYGRLEWSRFEDGKLPSRKIDALDHFAKCFLILKLYHHKVDKSKWEMPTGSNESEAKSWKAIRVDLVRCPYDGFAFALLGWTGSRMFRRDLRRYATDEKKMMLDNHALYDLTKKIFLKAKSEEEIFAHLGLEYLEPFERNA

SEQ ID NO: 1603 - DNA, 1587 bp, synthetic construct
  misc_feature 1..1587: note = Variant of terminal deoxynucleotidyltransferase
  source 1..1587: mol_type = other DNA
atgcaccatcatcatcatcatggcggtagcggcagccacggcattcgtaccatcgattcggacttcgggaagaaacgccagaagaagatggataaccacgatagttccgccatctatgaaatcaaatttcacgagtttgtgctgttcattctcgaagagaaaatgggtgcgacgcgtcgtacttttctgacagatttagcccgcaagaaagggttccgcgtcgagaatgaactgtcagacagcgttacccacatcgtggcagaaaataattcacgctctgaagtattggcttggctgaaagaacacaagatggagaagaccaagcaattcgaactgctggatattagctggcttatcgaaagcatgaaagttggtaaaccggtggacaccaaggggaaataccagttggcggaatcgggtgagatgagtgcgaacccagatccgacagagggtcgtgaaaacgagctgcctcctactacgaagaccatttctcagtatgcgtgtcaacgccgcaccaccctggacaaccataatcaacgttttacggacgcactggaaattcttgcggaaaattacgagttcaaacgcaacgatgatacttgtctgacttttatgcgtgctatttccgtgctgaaatgccttccgtttgaggtagttagcctgaaagacacggaaggattgccctggatcggtgatgaagtcaaagggattatggaagaaatcatcgaggtcggtgaatcgctggaagtgcaggccgtgctcaatgatgagcgctatcaaagcttcaaacgctttaagagtgtctttggagtgggggtgaagacagcagacaagtggtaccgtatgggtctgcgcacgctcgaggatgttcgttccagcaagaccctgaagttgaccccgatgcagaaagcgggtctgtgctattatgaagatcttgctcgcggcgttacgaaagccgaagctgacgcgatttctctgctggttcaggatgcagtctggactttcgacccggatgcgctggtggagattaccggtggatttcgtcgtgggaaaccttttggtcacgacgttgatctgcttatcacatctccgggagctgagaaagaacaagaagaccagctcctgcagaaagtgaccaatctgtggaagaaacaagggttgttgctgtacggtcgtctggaatggagtcgctttgaagatgggaaactcccatcccgcaagatcgatgccctggaccattttgcgaaatgctttctgatcctcaaactttatcaccataaagtggacaaaagcaaatgggaaatgccgacgggttcgaacgaaagcgaggccaaaagttggaaagcaattcgcgtagatctggttcgttgtccctacgatggttttgcgtttgcgttgttgggttggaccggaagccgcatgttccgccgtgatctgcgccgctacgccaccgacgagaagaagatgatgctggacaatcatgcgctgtatgacctgaccaagaaaatctttctcaaagctaaatcggaagaggaaattttcgcacatctggggcttgaatacctggaaccgttcgaacgtaacgca

SEQ ID NO: 1604 - protein, 529 aa, synthetic construct
  REGION 1..529: note = Variant of terminal deoxynucleotidyltransferase
MHHHHHHGGSGSHGIRTIDSDFGKKRQKKMDNHDSSAIYEIKFHEFVLFILEEKMGATRRTFLTDLARKKGFRVENELSDSVTHIVAENNSRSEVLAWLKEHKMEKTKQFELLDISWLIESMKVGKPVDTKGKYQLAESGEMSANPDPTEGRENELPPTTKTISQYACQRRTTLDNHNQRFTDALEILAENYEFKRNDDTCLTFMRAISVLKCLPFEVVSLKDTEGLPWIGDEVKGIMEEIIEVGESLEVQAVLNDERYQSFKRFKSVFGVGVKTADKWYRMGLRTLEDVRSSKTLKLTPMQKAGLCYYEDLARGVTKAEADAISLLVQDAVWTFDPDALVEITGGFRRGKPFGHDVDLLITSPGAEKEQEDQLLQKVTNLWKKQGLLLYGRLEWSRFEDGKLPSRKIDALDHFAKCFLILKLYHHKVDKSKWEMPTGSNESEAKSWKAIRVDLVRCPYDGFAFALLGWTGSRMFRRDLRRYATDEKKMMLDNHALYDLTKKIFLKAKSEEEIFAHLGLEYLEPFERNA

SEQ ID NO: 1605 - DNA, 1587 bp, synthetic construct
  misc_feature 1..1587: note = Variant of terminal deoxynucleotidyltransferase
  source 1..1587: mol_type = other DNA
atgcaccatcatcatcatcatggcggtagcggcagccacggcattcgtaccatcgattcggacttcgggaagaaacgccagaagaagatggataaccacgatagttccgccatctatgaaatcaaatttcacgagtttgtgctgttcattctcgaagagaaaatgggtgcgacgcgtcgtacttttctgacagatttagcccgcaagaaagggttccgcgtcgagaatgaactgtcagacagcgttacccacatcgtggcagaaaataattcacgctctgaagtattggcttggctgaaagaacacaagatggagaagaccaagcaattcgaactgctggatattagctggcttatcgaaagcatgaaagttggtaaaccggtggacaccaaggggaaataccagttggcggaatcgggtgagatgagtgcgaacccagatccgacagagggtcgtgaaaacgagctgcctcctactacgaagaccatttctcagtatgcgtgtcaacgccgcaccaccctgaacaaccataatcaacgttttacggacgcactggaaattcttgcggaaaattacgagttcaaacgcaacgatgatactgcgctgacttttatgcgtgctatttccgtgctgaaatgccttccgtttgaggtagttagcctgaaagacacggaaggattgccctggatcggtgatgaagtcaaagggattatggaagaaatcatcgaggtcggtgaatcgctggaagtgcaggccgtgctcaatgatgagcgctatcaaagcttcaaacgctttaagagtgtctttggagtgggggtgaagacagcagacaagtggtaccgtatgggtctgcgcacgctcgaggatgttcgttccagcaagaccctgaagttgaccccgatgcagaaagcgggtctgtgctattatgaagatcttgctcgcggcgttacgaaagccgaagctgacgcgatttctctgctggttcaggatgcagtcgcaactttcgacccggatgcgctggtggagattgtcggtggatttcgtcgtgggaaaccttttggtcacgacgttgatctgcttatcacatctccgggagctgagaaagagcaagaagaccagctcctgcagaaagtgaccaatctgtggaagaaacaagggttgttgctgtacggtcgtctggaatggagtcgctttgaagatgggaaactcccatcccgtaagatcgatgccctggaccattttgcgaaatgctttctgatcctcaaactttatcatcataaagtggacaaaagcaaatgggaaatgccgacgggttcgaacgaaagcgaggccaaaagttggaaagcaattcgcgtagatctggttcgtgtcccctacgatggttttgcgtttgcgttgttgggttggaccggaagccgcatgttccgccgtgatctgcgctggtacgccacccacgagaagaagatgatgctggacaatcatgcgctgtatgacctgaccaagaaaatctttctcaaagcgaaatcggaagaggaaattttcgcacatctggggcttgaatacctggaaccgttcgaacgtaacgca

SEQ ID NO: 1606 - protein, 529 aa, synthetic construct
  REGION 1..529: note = Variant of terminal deoxynucleotidyltransferase
MHHHHHHGGSGSHGIRTIDSDFGKKRQKKMDNHDSSAIYEIKFHEFVLFILEEKMGATRRTFLTDLARKKGFRVENELSDSVTHIVAENNSRSEVLAWLKEHKMEKTKQFELLDISWLIESMKVGKPVDTKGKYQLAESGEMSANPDPTEGRENELPPTTKTISQYACQRRTTLNNHNQRFTDALEILAENYEFKRNDDTALTFMRAISVLKCLPFEVVSLKDTEGLPWIGDEVKGIMEEIIEVGESLEVQAVLNDERYQSFKRFKSVFGVGVKTADKWYRMGLRTLEDVRSSKTLKLTPMQKAGLCYYEDLARGVTKAEADAISLLVQDAVATFDPDALVEIVGGFRRGKPFGHDVDLLITSPGAEKEQEDQLLQKVTNLWKKQGLLLYGRLEWSRFEDGKLPSRKIDALDHFAKCFLILKLYHHKVDKSKWEMPTGSNESEAKSWKAIRVDLVRVPYDGFAFALLGWTGSRMFRRDLRWYATHEKKMMLDNHALYDLTKKIFLKAKSEEEIFAHLGLEYLEPFERNA

SEQ ID NO: 1607 - DNA, 1587 bp, synthetic construct
  misc_feature 1..1587: note = Variant of terminal deoxynucleotidyltransferase
  source 1..1587: mol_type = other DNA
atgcaccatcatcatcatcatggcggtagcggcagccacggcattcgtaccatcgattcggacttcgggaagaaacgccagaagaagatggataaccacgatagttccgccatctatgaaatcaaatttcacgagtttgtgctgttcattctcgaagagaaaatgggtgcgacgcgtcgtacttttctgacagatttagcccgcaagaaagggttccgcgtcgagaatgaactgtcagacagcgttacccacatcgtggcagaaaataattcacgctctgaagtattggcttggctgaaagaacacaagatggagaagaccaagcaattcgaactgctggatattagctggcttatcgaaagcatgaaagttggtaaaccggtggacaccaaggggaaataccagttggcggaatcgggtgagatgagtgcgaacccagatccgacagagggtcgtgaaaacgagctgcctcctactacgaagaccatttctcagtatgcgtgtcaacgccgcaccaccctgaacaaccataatcaacgttttacggacgcactggaaattcttgcggaaaattacgagttcaaacgcaacgatgatactgcgctgacttttatgcgtgctatttccgtgctgaaatgccttccgtttgaggtagttagcctgaaagacacggaaggattgccctggatcggtgatgaagtcaaagggattatggaagaaatcatcgaggtcggtgaatcgctggaagtgcaggccgtgctcaatgatgagcgctatcaaagcttcaaacgctttaagagtgtctttggagtgggggtgaagacagcagacaagtggtaccgtatgggtctgcgcacgctcgaggatgttcgttccagcaagaccctgaagttgaccccgatgcagaaagcgggtctgtgctattatgaagatcttgctcgcggcgttacgaaagccgaagctgacgcgatttctctgctggttcaggatgcagtcgcaactttcgacccggatgcgctggtggagattaccggtggatttcgtcgtgggaaaccttttggtcacgacgttgatctgcttatcacatctccgggagctgagaaagaacaagaagaccagctcctgcagaaagtgaccaatctgtggaagaaacaagggttgttgctgtacggtcgtctggaatggagtcgctttgaagatgggaaactcccatcccgcaagatcgatgccctggaccattttgcgaaatgctttctgatcctcaaactttatcaccataaagtggacaaaagcaaatgggaaatgccgacgggttcgaacgaaagcgaggccaaaagttggaaagcaattcgcgtagatctggttcgttgtccctacgatggttttgcgtttgcgttgttgggttggaccggaagccgcatgttccgccgtgatctgcgctggtacgccacccacgagaagaagatgatgctggacaatcatgcgctgtatgacctgaccaagaaaatctttctcaaagctaaatcggaagaggaaattttcgcacatctggggcttgaatacctggaaccgttcgaacgtaacgca

SEQ ID NO: 1608 - protein, 529 aa, synthetic construct
  REGION 1..529: note = Variant of terminal deoxynucleotidyltransferase
MHHHHHHGGSGSHGIRTIDSDFGKKRQKKMDNHDSSAIYEIKFHEFVLFILEEKMGATRRTFLTDLARKKGFRVENELSDSVTHIVAENNSRSEVLAWLKEHKMEKTKQFELLDISWLIESMKVGKPVDTKGKYQLAESGEMSANPDPTEGRENELPPTTKTISQYACQRRTTLNNHNQRFTDALEILAENYEFKRNDDTALTFMRAISVLKCLPFEVVSLKDTEGLPWIGDEVKGIMEEIIEVGESLEVQAVLNDERYQSFKRFKSVFGVGVKTADKWYRMGLRTLEDVRSSKTLKLTPMQKAGLCYYEDLARGVTKAEADAISLLVQDAVATFDPDALVEITGGFRRGKPFGHDVDLLITSPGAEKEQEDQLLQKVTNLWKKQGLLLYGRLEWSRFEDGKLPSRKIDALDHFAKCFLILKLYHHKVDKSKWEMPTGSNESEAKSWKAIRVDLVRCPYDGFAFALLGWTGSRMFRRDLRWYATHEKKMMLDNHALYDLTKKIFLKAKSEEEIFAHLGLEYLEPFERNA

SEQ ID NO: 1609 - DNA, 1587 bp, synthetic construct
  misc_feature 1..1587: note = Variant of terminal deoxynucleotidyltransferase
  source 1..1587: mol_type = other DNA
atgcaccagcatcatcatcatggcggtagcggcagccacggcattcgtaccatcgattcggacttcgggaagaaacgccagaagaagatggataaccacgatagttccgccatctatgaaatcaaatttcacgagtttgtgctgttcattctcgaagagaaaatgggtgcgacgcgtcgtacttttctgacagatttagcccgcaagaaagggttccgcgtcgagaatgaactgtcagacagcgttacccacatcgtggcagaaaataattcacgctctgaagtattggcttggctgaaagaacacaagatggagaagaccaagcaattcgaactgctggatattagctggcttatcgaaagcatgaaagttggtaaaccggtggacaccaaggggaaataccagttggcggaatcgggtgagatgagtgcgaacccagatccgacagagggtcgtgaaaacgagctgcctcctactacgaagaccatttctcagtatgcgtgtcaacgccgcaccaccctggacaaccataatcaacgttttacggacgcactggaaattcttgcggaaaattacgagttcaaacgcaacgatgatacttgtctgacttttatgcgtgctatttccgtgctgaaaagccttccgtttgaggtagttagcctgaaagacacggaaggattgccctggatcggtgatgaagtcaaagggattatggaagaaatcatcgaggtcggtgaatcgctggaagtgcaggccgtgctcaatgatgagcgctatcaaagcttcaaacgctttaagagtgtctttggagtgggggtgaagacagcagacaagtggtaccgtatgggtctgcgcacgctcgaggatgttcgttccagcaagaccctgaagttgaccccgatgcagaaagcgggtctgtgctattatgaagatcttcgtcgcggcgttacgaaagccgaagctgacgcgattacgctgctggtccaggatgcagtctggactttcgacccggatgcgcgtgtggagattacgggtggatttcgtcgtgggaaaccttttggtcacgacgttgatctgcttatcacatctccgggagctgagaaagaacaagaagaccagctcctgcagaaagtgaccaatctgtggaagaaacaagggttgttgctgtacggtcgtctggaatggagtcgctttgaagatgggaaactcccatcccgcaagatcgatgccctggaccattttgcgaaatgctttctgatcctcaaactttatcaccataaagtggacaaaagcaaatgggaaatgccgacgggttcgaacgaaagcgaggccaaaagttggaaagcaattcgcgtagatctggttcgtgtcccctacgatggttttgcgtttgcgttgttgggttggaccggaagccgcatgttccgccgtgatctgcgctggtacgccaccgacgagaagaagatgatgctggacaatcatgcgctgtatgacctgaccaagaaaatctttctcaaagctaaatcggaagaggaaattttcgcacatctggggcttgaatacctggaaccgttcgaacgtaacgca

SEQ ID NO: 1610 - protein, 529 aa, synthetic construct
  REGION 1..529: note = Variant of terminal deoxynucleotidyltransferase
MHQHHHHGGSGSHGIRTIDSDFGKKRQKKMDNHDSSAIYEIKFHEFVLFILEEKMGATRRTFLTDLARKKGFRVENELSDSVTHIVAENNSRSEVLAWLKEHKMEKTKQFELLDISWLIESMKVGKPVDTKGKYQLAESGEMSANPDPTEGRENELPPTTKTISQYACQRRTTLDNHNQRFTDALEILAENYEFKRNDDTCLTFMRAISVLKSLPFEVVSLKDTEGLPWIGDEVKGIMEEIIEVGESLEVQAVLNDERYQSFKRFKSVFGVGVKTADKWYRMGLRTLEDVRSSKTLKLTPMQKAGLCYYEDLRRGVTKAEADAITLLVQDAVWTFDPDARVEITGGFRRGKPFGHDVDLLITSPGAEKEQEDQLLQKVTNLWKKQGLLLYGRLEWSRFEDGKLPSRKIDALDHFAKCFLILKLYHHKVDKSKWEMPTGSNESEAKSWKAIRVDLVRVPYDGFAFALLGWTGSRMFRRDLRWYATDEKKMMLDNHALYDLTKKIFLKAKSEEEIFAHLGLEYLEPFERNA

SEQ ID NO: 1611 - DNA, 1587 bp, synthetic construct
  misc_feature 1..1587: note = Variant of terminal deoxynucleotidyltransferase
  source 1..1587: mol_type = other DNA
atgcaccagcatcatcatcatggcggtagcggcagccacggcattcgtaccatcgattcggacttcgggaagaaacgccagaagaagatggataaccacgatagttccgccatctatgaaatcaaatttcacgagtttgtgctgttcattctcgaagagaaaatgggtgcgacgcgtcgtacttttctgacagatttagcccgcaagaaagggttccgcgtcgagaatgaactgtcagacagcgttacccacatcgtggcagaaaataattcacgctctgaagtattggcttggctgaaagaacacaagatggagaagaccaagcaattcgaactgctggatattagctggcttatcgaaagcatgaaagttggtaaaccggtggacaccaaggggaaataccagttggcggaatcgggtgagatgagtgcgaacccagatccgacagagggtcgtgaaaacgagctgcctcctactacgaagaccatttctcagtatgcgtgtcaacgccgcaccaccctgaacaaccataatcaacgttttacggacgcactggaaattcttgcggaaaattacgagttcaaacgcaacgatgatacttgcctgacttttatgcgtgctatttccgtgctgaaatgccttccgtttgaggtagttagcctgaaagacacggaaggattgccctggatcggtgatgaagtcaaagggattatggaagaaatcatcgaggtcggtgaatcgctggaagtgcaggccgtgctcaatgatgagcgctatcaaagcttcaaacgctttaagagtgtctttggagtgggggtgaagacagcagacaagtggtaccgtatgggtctgcgcacgctcgaggatgttcgttccagcaagaccctgaagttgaccccgatgcagaaagcgggtctgatgtattatgaagatcttgctcgcggcgttacgaaagccgaaaaagacgcgatttctctgctggttcaggatgcagtctggactttcgacccggatgcgcgtgtggagattaccggtggatttcgtcgtgggaaacctaagggtcacgacgttgatctgcttatcacatctccgggagctgagaaagaacaagaagaccagctcctgcagaaagtgaccaatctgtggaagaaacaagggttgttgctgtacggtcgtctggaatggagtcgctttgaagatgggaaactcccatccggcaaggcagatgccctggaccattttgcgaaatgctttctgatcctcaaactttatcaccataaagtggacaaaagcaaatgggaaatgccgacgggttcgaacgaaagcgaggccaatagttggaaagcaattcgcgtagatctggttcgttgtccctacgatggtttcgcgtttgcgttgttgggttggaccggaagccgcatgttccgccgtgatctgcgccgctacgccacccacgagaagaagatgatgctggacaatcatgcgctgtatgacctgaccaagaaaatctttctcaaagctaaatcggaagaggaaattttcgcacatctggggcttgaatacctggaaccgttcgaacgtaacgca

SEQ ID NO: 1612 - protein, 529 aa, synthetic construct
  REGION 1..529: note = Variant of terminal deoxynucleotidyltransferase
MHQHHHHGGSGSHGIRTIDSDFGKKRQKKMDNHDSSAIYEIKFHEFVLFILEEKMGATRRTFLTDLARKKGFRVENELSDSVTHIVAENNSRSEVLAWLKEHKMEKTKQFELLDISWLIESMKVGKPVDTKGKYQLAESGEMSANPDPTEGRENELPPTTKTISQYACQRRTTLNNHNQRFTDALEILAENYEFKRNDDTCLTFMRAISVLKCLPFEVVSLKDTEGLPWIGDEVKGIMEEIIEVGESLEVQAVLNDERYQSFKRFKSVFGVGVKTADKWYRMGLRTLEDVRSSKTLKLTPMQKAGLMYYEDLARGVTKAEKDAISLLVQDAVWTFDPDARVEITGGFRRGKPKGHDVDLLITSPGAEKEQEDQLLQKVTNLWKKQGLLLYGRLEWSRFEDGKLPSGKADALDHFAKCFLILKLYHHKVDKSKWEMPTGSNESEANSWKAIRVDLVRCPYDGFAFALLGWTGSRMFRRDLRRYATHEKKMMLDNHALYDLTKKIFLKAKSEEEIFAHLGLEYLEPFERNA

SEQ ID NO: 1613 - DNA, 1587 bp, synthetic construct
  misc_feature 1..1587: note = Variant of terminal deoxynucleotidyltransferase
  source 1..1587: mol_type = other DNA
atgcaccatcatcatcatcatggcggtagcggcagccacggcattcgtaccatcgattcggacttcgggaagaaacgccagaagaagatggataaccacgatagttccgccatctatgaaatcaaatttcacgagtttgtgctgttcattctcgaagagaaaatgggtgcgacgcgtcgtacttttctgacagatttagcccgcaagaaagggttccgcgtcgagaatgaactgtcagacagcgttacccacatcgtggcagaaaataattcacgctctgaagtattggcttggctgaaagaacacaagatggagaagaccaagcaattcgaactgctggatattagctggcttatcgaaagcatgaaagttggtaaaccggtggacaccaaggggaaataccagttggcggaatcgggtgagatgagtgcgaacccagatacgacagagggtcgtgaaaacgagctgcctcctactacgaagaccatttctcagtatgcgtgtcaacgccgcaccaccctggacaaccataatcaacgttttacggacgcactggaaattcttgcggaaaattacgagttcaaacgcaacgatgatactgcgctgacttttatgcgtgctatttccgtgctgaaatgccttccgtttgaggtagttagcctgaaagacacggaaggattgccctggatcggtgatgaagtcaaagggattatggaagaaatcatcgaggtcggtgaatcgctggaagtgcaggccgtgctcaatgatgagcgctatcaaagcttcaaacgctttaagagtgtctttggagtgggggtgaagacagcagacaagtggtaccgtatgggtctgcgcacgctcgaggatgttcgttccagcaagaccctgaagttgaccccgatgcagaaagcgggtctgtgctattatgaagatcttgctcgcggcgttacgaaagccgaagctgacgcgatttctctgctggttcaggatgcagtctggactttcgacccggatgcgctggtggagattacgggtggatttcgtcgtgggaaaccttttggtcacgacgttgatctgcttatcacatctccgggagctgagaaagagcaagaagaccagctcctgcagaaagtgaccaatctgtggaagaaacaagggttgttgctgtacggtcgtctggaatggagtcgctttgaagatgggaaactcccatcccgcaagatcgatgccctggaccattttgcgaaatgctttctgatcctcaaactttatcaccataaagtggacaaaagcaaatgggaaatgccgacgggttcgaacgaaagcgaggccaaaagttggaaagcaattcgcgtagatctggttcgtgtcccctacgatggttttgcgtttgcgttgttgggttggaccggaagccgcatgttccgccgtgatctgcgccgctacgccaccgacgagaagaagatgatgctggacaatcatgcgctgtatgacctgaccaagaaaatctttctcaaagctaaatcggaagaggaaattttcgcacatctggggcttgaatacctggaaccgttcgaacgtaacgca

SEQ ID NO: 1614 - protein, 529 aa, synthetic construct
  REGION 1..529: note = Variant of terminal deoxynucleotidyltransferase
MHHHHHHGGSGSHGIRTIDSDFGKKRQKKMDNHDSSAIYEIKFHEFVLFILEEKMGATRRTFLTDLARKKGFRVENELSDSVTHIVAENNSRSEVLAWLKEHKMEKTKQFELLDISWLIESMKVGKPVDTKGKYQLAESGEMSANPDTTEGRENELPPTTKTISQYACQRRTTLDNHNQRFTDALEILAENYEFKRNDDTALTFMRAISVLKCLPFEVVSLKDTEGLPWIGDEVKGIMEEIIEVGESLEVQAVLNDERYQSFKRFKSVFGVGVKTADKWYRMGLRTLEDVRSSKTLKLTPMQKAGLCYYEDLARGVTKAEADAISLLVQDAVWTFDPDALVEITGGFRRGKPFGHDVDLLITSPGAEKEQEDQLLQKVTNLWKKQGLLLYGRLEWSRFEDGKLPSRKIDALDHFAKCFLILKLYHHKVDKSKWEMPTGSNESEAKSWKAIRVDLVRVPYDGFAFALLGWTGSRMFRRDLRRYATDEKKMMLDNHALYDLTKKIFLKAKSEEEIFAHLGLEYLEPFERNA

SEQ ID NO: 1615 - DNA, 1587 bp, synthetic construct
  misc_feature 1..1587: note = Variant of terminal deoxynucleotidyltransferase
  source 1..1587: mol_type = other DNA
atgcaccatcatcatcatcatggcggtagcggcagccacggcattcgtaccatcgattcggacttcgggaagaaacgccagaagaagatggataaccacgatagttccgccatctatgaaatcaaatttcacgagtttgtgctgttcattctcgaagagaaaatgggtgcgacgcgtcgtacttttctgacagatttagcccgcaagaaagggttccgcgtcgagaatgaactgtcagacagcgttacccacatcgtggcagaaaataattcacgctctgaagtattggcttggctgaaagaacacaagatggagaagaccaagcaattcgaactgctggatattagctggcttatcgaaagcatgaaagttggtaaaccggtggacaccaaggggaaataccagttggcggaatcgggtgagatgagtgcgaacccagatccgacagagggtcgtgaaaacgagctgcctcctactacgaagaccatttctcagtatgcgtgtcaacgccgcaccaccctgaacaaccataatcaacgttttacggacgcactggaaattcttgcggaaaattacgagttcaaacgcaacgatgatacttgtctgacttttatgcgtgctatttccgtgctgaaatgccttccgtttgaggtagttagcctgaaagacacggaaggattgccctggatcggtgatgaagtcaaagggattatggaagaaatcatcgaggtcggtgaatcgctggaagtgcaggccgtgctcaatgatgagcgctatcaaagcttcaaacgctttaagagtgtctttggagtgggggtgaagacagcagacaagtggtaccgtatgggtctgcgcacgctcgaggatgttcgttccagcaagaccctgaagttgaccccgatgcagaaagcgggtctgtgctattatgaagatcttgctcgcggcgttacgaaagccgaagctgacgcgatttctctgctggttcaggatgcagtctggactttcgacccggatgcgctggtggagattgtcggtggatttcgtcgtgggaaaccttttggtcacgacgttgatctgcttatcacatctccgggagctgagaaagaacaagaagaccagctcctgcagaaagtgaccaatctgtggaagaaacaagggttgttgctgtacggtcgtctggaatggagtcgctttgaagatgggaaactcccatcccgcaagatcgatgccctggaccattttgcgaaatgctttctgatcctcaaactttatcaccataaagtggacaaaagcaaatgggaaatgccgacgggttcgaacgaaagcgaggccaaaagttggaaagcaattcgcgtagatctggttcgttgtccctacgatggttttgcgtttgcgttgttgggttggaccggaagccgcatgttccgccgtgatctgcgccgctacgccaccgacgagaagaagatgatgctggacaatcatgcgctgtatgacctgaccaagaaaatctttctcaaagcgaaatcggaagaggaaattttcgcacatctggggcttgaatacctggaaccgttcgaacgtaacgca

SEQ ID NO: 1616 - protein, 529 aa, synthetic construct
  REGION 1..529: note = Variant of terminal deoxynucleotidyltransferase
MHHHHHHGGSGSHGIRTIDSDFGKKRQKKMDNHDSSAIYEIKFHEFVLFILEEKMGATRRTFLTDLARKKGFRVENELSDSVTHIVAENNSRSEVLAWLKEHKMEKTKQFELLDISWLIESMKVGKPVDTKGKYQLAESGEMSANPDPTEGRENELPPTTKTISQYACQRRTTLNNHNQRFTDALEILAENYEFKRNDDTCLTFMRAISVLKCLPFEVVSLKDTEGLPWIGDEVKGIMEEIIEVGESLEVQAVLNDERYQSFKRFKSVFGVGVKTADKWYRMGLRTLEDVRSSKTLKLTPMQKAGLCYYEDLARGVTKAEADAISLLVQDAVWTFDPDALVEIVGGFRRGKPFGHDVDLLITSPGAEKEQEDQLLQKVTNLWKKQGLLLYGRLEWSRFEDGKLPSRKIDALDHFAKCFLILKLYHHKVDKSKWEMPTGSNESEAKSWKAIRVDLVRCPYDGFAFALLGWTGSRMFRRDLRRYATDEKKMMLDNHALYDLTKKIFLKAKSEEEIFAHLGLEYLEPFERNA

SEQ ID NO: 1617 - DNA, 1587 bp, synthetic construct
  misc_feature 1..1587: note = Variant of terminal deoxynucleotidyltransferase
  source 1..1587: mol_type = other DNA
atgcaccatcatcatcatcatggcggtagcggcagccacggcattcgtaccatcgattcggacttcgggaagaaacgccagaagaagatggataaccacgatagttccgccatctatgaaatcaaatttcacgagtttgtgctgttcattctcgaagagaaaatgggtgcgacgcgtcgtacttttctgacagatttagcccgcaagaaagggttccgcgtcgagaatgaactgtcagacagcgttacccacatcgtggcagaaaataattcacgctctgaagtattggcttggctgaaagaacacaagatggagaagaccaagcaattcgaactgctggatattagctggcttatcgaaagcatgaaagttggtaaaccggtggacaccaaggggaaataccagttggcggaatcgggtgagatgagtgcgaacccagatccgacagagggtcgtgaaaacgagctgcctcctactacgaagaccatttctcagtatgcgtgtcaacgccgcaccaccctgaacaaccataatcaacgttttacggacgcactggaaattcttgcggaaaattacgagttcaaacgcaacgatgatacttgtctgacttttatgcgtgctatttccgtgctgaaatgccttccgtttgaggtagttagcctgaaagacacggaaggattgccctggatcggtgatgaagtcaaagggattatggaagaaatcatcgaggtcggtgaatcgctggaagtgcaggccgtgctcaatgatgagcgctatcaaagcttcaaacgctttaagagtgtctttggagtgggggtgaagacagcagacaagtggtaccgtatgggtctgcgcacgctcgaggatgttcgttccagcaagaccctgaagttgaccccgatgcagaaagcgggtctgatgtattatgaagatcttgctcgcggcgttacgaaagccgaagctgacgcgatttctctgctggttcaggatgcagtctggactttcgacccggatgcgctggtggagattaccggtggatttcgtcgtgggaaacctttcggtcacgacgttgatctgcttatcacatctccgggagctgagaaagaacaagaagaccacctcctgcagaaagtgaccaatctgtggaagaaacaagggttgttgctgtacggtcgtctggaatggagtcgctttgaagatgggaaactcccatccggcaaggcagatgccctggaccattttgcgaaatgctttctgatcctcaaactttatcaccataaagtggacaaaagcaaatgggaaatgccgacgggttcgaacgaaagcgaggccaaaagttggaaagcaattcgcgtagatctggttcgttgtccctacgatggtttcgcgtttgcgttgttgggttggaccggaagccgcatgttccgccgtgatctgcgccgctacgccatgcacgagaagaagatgatgctggacaatcatgcgctgtatgacctgaccaagaaaatctttctcaaagctaaatcggaagaggaaattttcgcacatctggggcttgaatacctggaaccgttcgaacgtaacgca

SEQ ID NO: 1618 - protein, 529 aa, synthetic construct
  REGION 1..529: note = Variant of terminal deoxynucleotidyltransferase
MHHHHHHGGSGSHGIRTIDSDFGKKRQKKMDNHDSSAIYEIKFHEFVLFILEEKMGATRRTFLTDLARKKGFRVENELSDSVTHIVAENNSRSEVLAWLKEHKMEKTKQFELLDISWLIESMKVGKPVDTKGKYQLAESGEMSANPDPTEGRENELPPTTKTISQYACQRRTTLNNHNQRFTDALEILAENYEFKRNDDTCLTFMRAISVLKCLPFEVVSLKDTEGLPWIGDEVKGIMEEIIEVGESLEVQAVLNDERYQSFKRFKSVFGVGVKTADKWYRMGLRTLEDVRSSKTLKLTPMQKAGLMYYEDLARGVTKAEADAISLLVQDAVWTFDPDALVEITGGFRRGKPFGHDVDLLITSPGAEKEQEDHLLQKVTNLWKKQGLLLYGRLEWSRFEDGKLPSGKADALDHFAKCFLILKLYHHKVDKSKWEMPTGSNESEAKSWKAIRVDLVRCPYDGFAFALLGWTGSRMFRRDLRRYAMHEKKMMLDNHALYDLTKKIFLKAKSEEEIFAHLGLEYLEPFERNA

SEQ ID NO: 1619 - DNA, 1587 bp, synthetic construct
  misc_feature 1..1587: note = Variant of terminal deoxynucleotidyltransferase
  source 1..1587: mol_type = other DNA
atgcaccatcatcatcatcatggcggtagcggcagccacggcattcgtaccatcgattcggacttcgggaagaaacgccagaagaagatggataaccacgatagttccgccatctatgaaatcaaatttcacgagtttgtgctgttcattctcgaagagaaaatgggtgcgacgcgtcgtacttttctgacagatttagcccgcaagaaagggttccgcgtcgagaatgaactgtcagacagcgttacccacatcgtggcagaaaataattcacgctctgaagtattggcttggctgaaagaacacaagatggagaagaccaagcaattcgaactgctggatattagctggcttatcgaaagcatgaaagttggtaaaccggtggacaccaaggggaaataccagttggcggaatcgggtgagatgagtgcgaacccagatccgacagagggtcgtgaaaacgagctgcctcctactacgaagaccatttctcagtatgcgtgtcaacgccgcaccaccctgaacaaccataatcaacgttttacggacgcactggaaattcttgcggaaaattacgagttcaaacgcaacgatgatacttgcctgacttttatgcgtgctatttccgtgctgaaatgccttccgtttgaggtagttagcctgaaagacacggaaggattgccctggatcggtgatgaagtcaaagggattatggaagaaatcatcgaggtcggtgaatcgctggaagtgcaggccgtgctcaatgatgagcgctatcaaagcttcaaacgctttaagagtgtctttggagtgggggtgaagacagcagacaagtggtaccgtatgggtctgcgcacgctcgaggatgttcgttccagcaagaccctgaagttgaccccgatgcagaaagcgggtctgtgctattatgaagatcttgctcgcggcgttacgaaagccgaagctgacgcgatttctctgctggttcaggatgcagtcgggactttcgacccggatgcgctggtggagattaccggtggatttcgtcgtgggaaacctttcggtcacgacgttgatctgcttatcacatctccgggagctgagaaagaacaagaagaccagctcctgcagaaagtgaccaatctgtggaagaaacaagggttgttgctgtacggtcgtctggaatggagtcgctttgaagatgggaaactcccatcccgcaagatcgatgccctggaccattttgcgaaatgctttctgatcctcaaactttatcaccataaagtggacaaaagcaaatgggaaatgccgacgggttcgaacgaaagcgaggccaaaagttggaaagcaattcgcgtagatctggttcgttgtccctacgatggttttgcgtttgcgttgttgggttggaccggaagccgcatgttccgccgtgatctgcgccgctacgccacccacgagaagaagatgatgctggacaatcatgcgctgtatgacctgaccaagaaaatctttctcaaagctaaatcggaagaggaaattttcgcacatctggggcttgaatacctggaaccgttcgaacgtaacgca

SEQ ID NO: 1620 - protein, 529 aa, synthetic construct
  REGION 1..529: note = Variant of terminal deoxynucleotidyltransferase
MHHHHHHGGSGSHGIRTIDSDFGKKRQKKMDNHDSSAIYEIKFHEFVLFILEEKMGATRRTFLTDLARKKGFRVENELSDSVTHIVAENNSRSEVLAWLKEHKMEKTKQFELLDISWLIESMKVGKPVDTKGKYQLAESGEMSANPDPTEGRENELPPTTKTISQYACQRRTTLNNHNQRFTDALEILAENYEFKRNDDTCLTFMRAISVLKCLPFEVVSLKDTEGLPWIGDEVKGIMEEIIEVGESLEVQAVLNDERYQSFKRFKSVFGVGVKTADKWYRMGLRTLEDVRSSKTLKLTPMQKAGLCYYEDLARGVTKAEADAISLLVQDAVGTFDPDALVEITGGFRRGKPFGHDVDLLITSPGAEKEQEDQLLQKVTNLWKKQGLLLYGRLEWSRFEDGKLPSRKIDALDHFAKCFLILKLYHHKVDKSKWEMPTGSNESEAKSWKAIRVDLVRCPYDGFAFALLGWTGSRMFRRDLRRYATHEKKMMLDNHALYDLTKKIFLKAKSEEEIFAHLGLEYLEPFERNA

SEQ ID NO: 1621 - DNA, 1587 bp, synthetic construct
  misc_feature 1..1587: note = Variant of terminal deoxynucleotidyltransferase
  source 1..1587: mol_type = other DNA
atgcaccatcatcatcatcatggcggtagcggcagccacggcattcgtaccatcgattcggacttcgggaagaaacgccagaagaagatggataaccacgatagttccgccatctatgaaatcaaatttcacgagtttgtgctgttcattctcgaagagaaaatgggtgcgacgcgtcgtacttttctgacagatttagcccgcaagaaagggttccgcgtcgagaatgaactgtcagacagcgttacccacatcgtggcagaaaataattcacgctctgaagtattggcttggctgaaagaacacaagatggagaagaccaagcaattcgaactgctggatattagctggcttatcgaaagcatgaaagttggtaaaccggtggacaccaaggggaaataccagttggcggaatcgggtgagatgagtgcgaacccagatccgacagagggtcgtgaaaacgagctgcctcctactacgaagaccatttctcagtatgcgtgtcaacgccgcaccaccctgaacaaccataatcaacgttttacggacgcactggaaattcttgcggaaaattacgagttcaaacgcaacgatcatacttgcctgacttttatgcgtgctatttccgtgctgaaatgccttccgtttgaggtagttagcctgaaagacacggaaggattgccctggatcggtgatgaagtcaaagggattatggaagaaatcatcgaggtcggtgaatcgctggaagtgcaggccgtgctcaatgatgagcgctatcaaagcttcaaacgctttaagagtgtctttggagtgggggtgaagacagcagacaagtggtaccgtatgggtctgcgcacgctcgaggatgttcgttccagcaagaccctgaagttgaccccgatgcagaaagcgggtctgatgtattatgaagatcttgctcgcggcgttacgaaagccgaaaaagacgcgatttctctgctggttcaggatgcagtctggactttcgacccggatgcgcgtgtggagattaccggtggatttcgtcgtgggaaacctttcggtcacgacgttgatctgcttatcacatctccgggagctgagaaagaacaagaagaccagctcctgcagaaagtgaccaatctgtggaagaaacaagggttgttgctgtacggtcgtctggaatggagtcgctttgaagatgggaaactcccatccggcaaggcagatgccctggaccattttgcgaaatgctttctgatcctcaaactttatcaccataaagtggacaaaagcaaatgggaaatgccgacgggttcgaacgaaagcgaggccaatagttggaaagcaattcgcgtagatctggttcgttgtccctacgatggtttcgcgtttgcgttgttgggttggaccggaagccgcatgttccgccgtgatctgcgccgctacgccatgcacgagaagaagatgatgctggacaatcatgcgctgtatgacctgaccaagaaaatctttctcaaagctaaatcggaagaggaaattttcgcacatctggggcttgaatacctggaaccgttcgaacgtaacgca

SEQ ID NO: 1622 - protein, 529 aa, synthetic construct
  REGION 1..529: note = Variant of terminal deoxynucleotidyltransferase
MHHHHHHGGSGSHGIRTIDSDFGKKRQKKMDNHDSSAIYEIKFHEFVLFILEEKMGATRRTFLTDLARKKGFRVENELSDSVTHIVAENNSRSEVLAWLKEHKMEKTKQFELLDISWLIESMKVGKPVDTKGKYQLAESGEMSANPDPTEGRENELPPTTKTISQYACQRRTTLNNHNQRFTDALEILAENYEFKRNDHTCLTFMRAISVLKCLPFEVVSLKDTEGLPWIGDEVKGIMEEIIEVGESLEVQAVLNDERYQSFKRFKSVFGVGVKTADKWYRMGLRTLEDVRSSKTLKLTPMQKAGLMYYEDLARGVTKAEKDAISLLVQDAVWTFDPDARVEITGGFRRGKPFGHDVDLLITSPGAEKEQEDQLLQKVTNLWKKQGLLLYGRLEWSRFEDGKLPSGKADALDHFAKCFLILKLYHHKVDKSKWEMPTGSNESEANSWKAIRVDLVRCPYDGFAFALLGWTGSRMFRRDLRRYAMHEKKMMLDNHALYDLTKKIFLKAKSEEEIFAHLGLEYLEPFERNA

SEQ ID NO: 1623 - DNA, 1587 bp, synthetic construct
  misc_feature 1..1587: note = Variant of terminal deoxynucleotidyltransferase
  source 1..1587: mol_type = other DNA
atgcaccatcatcatcatcatggcggtagcggcagccacggcattcgtaccatcgattcggacttcgggaagaaacgccagaagaagatggataaccacgatagttccgccatctatgaaatcaaatttcacgagtttgtgctgttcattctcgaagagaaaatgggtgcgacgcgtcgtacttttctgacagatttagcccgcaagaaagggttccgcgtcgagaatgaactgtcagacagcgttacccacatcgtggcagaaaataattcacgctctgaagtattggcttggctgaaagaacacaagatggagaagaccaagcaattcgaactgctggatattagctggcttatcgaaagcatgaaagttggtaaaccggtggacaccaaggggaaataccagttggcggaatcgggtgagatgagtgcgaacccagatccgacagagggtcgtgaaaacgagctgcctcctactacgaagaccatttctcagtatgcgtgtcaacgccgcaccaccctgaacaaccataatcaacgttttacggacgcactggaaattcttgcggaaaattacgagttcaaacgcaacgatgatacttgtctgacttttatgcgtgctatttccgtgctgaaatgccttccgtttgaggtagttagcctgaaagacacggaaggattgccctggatcggtgatgaagtcaaagggattatggaagaaatcatcgaggtcggtgaatcgctggaagtgcaggccgtgctcaatgatgagcgctatcaaagcttcaaacgctttaagagtgtctttggagtgggggtgaagacagcagacaagtggtaccgtatgggtctgcgcacgctcgaggatgttcgttccagcaagaccctgaagttgaccccgatgcagaaagcgggtctgtgctattatgaagatcttgctcgcggcgttacgaaagccgaagccgacgcgatttctctgctggttcaggatgcagtctggactttcgacccggatgcgcgtgtggagattaccggtggatttcgtcgtgggaaaccttttggtcacgacgttgatctgcttatcacatctccgggagctgagaaagaacaagaagaccagctcctgcagaaagtgaccaatctgtggaagaaacaagggttgttgctgtacggtcgtctggaatggagtcgctttgaagatgggaaactcccatcccgcaagatcgatgccctggaccattttgcgaaatgctttctgatcctcaaactttatcaccataaagtggacaaaagcaaatgggaaatgccgacgggttcgaacgaaagcgaggccaaaagttggaaagcaattcgcgtagatctggttcgttgtccctacgatggtttcgcgtttgcgttgttgggttggaccggaagccgcatgttccgccgtgatctgcgccgctacgccatgcacgagaagaagatgatgctggacaatcatgcgctgtatgacctgaccaagaaaatctttctcaaagctaaatcggaagaggaaattttcgcacatctggggcttgaatacctggaaccgttcgaacgtaacgca

SEQ ID NO: 1624 - protein, 529 aa, synthetic construct
  REGION 1..529: note = Variant of terminal deoxynucleotidyltransferase
MHHHHHHGGSGSHGIRTIDSDFGKKRQKKMDNHDSSAIYEIKFHEFVLFILEEKMGATRRTFLTDLARKKGFRVENELSDSVTHIVAENNSRSEVLAWLKEHKMEKTKQFELLDISWLIESMKVGKPVDTKGKYQLAESGEMSANPDPTEGRENELPPTTKTISQYACQRRTTLNNHNQRFTDALEILAENYEFKRNDDTCLTFMRAISVLKCLPFEVVSLKDTEGLPWIGDEVKGIMEEIIEVGESLEVQAVLNDERYQSFKRFKSVFGVGVKTADKWYRMGLRTLEDVRSSKTLKLTPMQKAGLCYYEDLARGVTKAEADAISLLVQDAVWTFDPDARVEITGGFRRGKPFGHDVDLLITSPGAEKEQEDQLLQKVTNLWKKQGLLLYGRLEWSRFEDGKLPSRKIDALDHFAKCFLILKLYHHKVDKSKWEMPTGSNESEAKSWKAIRVDLVRCPYDGFAFALLGWTGSRMFRRDLRRYAMHEKKMMLDNHALYDLTKKIFLKAKSEEEIFAHLGLEYLEPFERNA

SEQ ID NO: 1625 - DNA, 1587 bp, synthetic construct
  misc_feature 1..1587: note = Variant of terminal deoxynucleotidyltransferase
  source 1..1587: mol_type = other DNA
atgcaccatcatcatcatcatggcggtagcggcagccacggcattcgtaccatcgattcggacttcgggaagaaacgccagaagaagatggataaccacgatagttccgccatctatgaaatcaaatttcacgagtttgtgctgttcattctcgaagagaaaatgggtgcgacgcgtcgtacttttctgacagatttagcccgcaagaaagggttccgcgtcgagaatgaactgtcagacagcgttacccacatcgtggcagaaaataattcacgctctgaagtattggcttggctgaaagaacacaagatggagaagaccaagcaattcgaactgctggatattagctggcttatcgaaagcatgaaagttggtaaaccggtggacaccaaggggaaataccagttggcggaatcgggtgagatgagtgcgaacccagatccgacagagggtcgtgaaaacgagctgcctcctactacgaagaccatttctcagtatgcgtgtcaacgccgcaccaccctggacaaccataatcaacgttttacggacgcactggaaattcttgcggaaaattacgagttcaaacgcaacgatgatacttgtctgacttttatgcgtgctatttccgtgctgaaatgccttccgtttgaggtagttagcctgaaagacacggaaggattgccctggatcggtgatgaagtcaaagggattatggaagaaatcatcgaggtcggtgaatcgctggaagtgcaggccgtgctcaatgatgagcgctatcaaagcttcaaacgctttaagagtgtctttggagtgggggtgaagacagcagacaagtggtaccgtatgggtctgcgcacgctcgaggatgttcgttccagcaagaccctgaagttgaccccgatgcagaaagcgggtctgtgctattatgaagatcttgctcgcggcgttacgaaagccgaagctgacgcgatttcgctgctggttcaggatgcagtcgcaactttcgacccggatgcgctggtggagattaccggtggatttcgtcgtgggaaaccttttggtcacgacgttgatctgcttatcacatctccgggagctgagaaagagcaagaagaccagctcctgcagaaagtgaccaatctgtggaagaaacaagggttgttgctgtacggtcgtctggaatggagtcgctttgaagatgggaaactcccatcccgcaagatcgatgccctggaccattttgcgaaatgctttctgatcctcaaactttatcaccataaagtggacaaaagcaaatgggaaatgccgacgggttcgaacgaaagcgaggccaaaagttggaaagcaattcgcgtagatctggttcgttgtccctacgatggttttgcgtttgcgttgttgggttggaccggaagccgcatgttccgccgtgatctgcgccgctacgccacccacgagaagaagatgatgctggacaatcatgcgctgtatgacctgaccaagaaaatctttctcaaagctaaatcggaagaggaaattttcgcacatctggggcttgaatacctggaaccgttcgaacgtaacgca

SEQ ID NO: 1626 - protein, 529 aa, synthetic construct
  REGION 1..529: note = Variant of terminal deoxynucleotidyltransferase
MHHHHHHGGSGSHGIRTIDSDFGKKRQKKMDNHDSSAIYEIKFHEFVLFILEEKMGATRRTFLTDLARKKGFRVENELSDSVTHIVAENNSRSEVLAWLKEHKMEKTKQFELLDISWLIESMKVGKPVDTKGKYQLAESGEMSANPDPTEGRENELPPTTKTISQYACQRRTTLDNHNQRFTDALEILAENYEFKRNDDTCLTFMRAISVLKCLPFEVVSLKDTEGLPWIGDEVKGIMEEIIEVGESLEVQAVLNDERYQSFKRFKSVFGVGVKTADKWYRMGLRTLEDVRSSKTLKLTPMQKAGLCYYEDLARGVTKAEADAISLLVQDAVATFDPDALVEITGGFRRGKPFGHDVDLLITSPGAEKEQEDQLLQKVTNLWKKQGLLLYGRLEWSRFEDGKLPSRKIDALDHFAKCFLILKLYHHKVDKSKWEMPTGSNESEAKSWKAIRVDLVRCPYDGFAFALLGWTGSRMFRRDLRRYATHEKKMMLDNHALYDLTKKIFLKAKSEEEIFAHLGLEYLEPFERNA

SEQ ID NO: 1627 - DNA, 1587 bp, synthetic construct
  misc_feature 1..1587: note = Variant of terminal deoxynucleotidyltransferase
  source 1..1587: mol_type = other DNA
atgcaccatcatcatcatcatggcggtagcggcagccacggcattcgtaccatcgattcggacttcgggaagaaacgccagaagaagatggataaccacgatagttccgccatctatgaaatcaaatttcacgagtttgtgctgttcattctcgaagagaaaatgggtgcgacgcgtcgtacttttctgacagatttagcccgcaagaaagggttccgcgtcgagaatgaactgtcagacagcgttacccacatcgtggcagaaaataattcacgctctgaagtattggcttggctgaaagaacacaagatggagaagaccaagcaattcgaactgctggatattagctggcttatcgaaagcatgaaagttggtaaaccggtggacaccaaggggaaataccagttggcggaatcgggtgagatgagtgcgaacccagatccgacagagggtcgtgaaaacgagctgcctcctactacgaagaccatttctcagtatgcgtgtcaacgccgcaccaccctgaacaaccataatcaacgttttacggacgcactggaaattcttgcggaaaattacgagttcaaacgcaacgatgatacttgtctgacttttatgcgtgctatttccgtgctgaaatgccttccgtttgaggtagttagcctgaaagacacggaaggattgccctggatcggtgatgaagtcaaagggattatggaagaaatcatcgaggtcggtgaatcgctggaagtgcaggccgtgctcaatgatgagcgctatcaaagcttcaaacgctttaagagtgtctttggagtgggggtgaagacagcagacaagtggtaccgtatgggtctgcgcacgctcgaggatgttcgttccagcaagaccctgaagttgaccccgatgcagaaagcgggtctgtgctattatgaagatcttgctcgcggcgttacgaaagccgaaaaagacgcgatttctctgctggttcaggatgcagtcgggactttcgacccggatgcgcgtgtggagattaccggtggatttcgtcgtgggaaaccttttggtcacgacgttgatctgcttatcacatctccgggagctgagaaagaacaagaagaccagctcctgcagaaagtgaccaatctgtggaagaaacaagggttgttgctgtacggtcgtctggaatggagtcgctttgaagatgggaaactcccatcccgcaagatcgatgccctggaccattttgcgaaatgctttctgatcctcaaactttatcaccataaagtggacaaaagcaaatgggaaatgccgacgggttcgaacgaaagcgaggccaaaagttggaaagcaattcgcgtagatctggttcgttgtccctacgatggtttcgcgtttgcgttgttgggttggaccggaagccgcatgttccgccgtgatctgcgccgctacgccacccacgagaagaagatgatgctggacaatcatgcgctgtatgacctgaccaagaaaatctttctcaaagctaaatcggaagaggaaattttcgcacatctggggcttgaatacctggaaccgttcgaacgtaacgca

SEQ ID NO: 1628 - protein, 529 aa, synthetic construct
  REGION 1..529: note = Variant of terminal deoxynucleotidyltransferase
MHHHHHHGGSGSHGIRTIDSDFGKKRQKKMDNHDSSAIYEIKFHEFVLFILEEKMGATRRTFLTDLARKKGFRVENELSDSVTHIVAENNSRSEVLAWLKEHKMEKTKQFELLDISWLIESMKVGKPVDTKGKYQLAESGEMSANPDPTEGRENELPPTTKTISQYACQRRTTLNNHNQRFTDALEILAENYEFKRNDDTCLTFMRAISVLKCLPFEVVSLKDTEGLPWIGDEVKGIMEEIIEVGESLEVQAVLNDERYQSFKRFKSVFGVGVKTADKWYRMGLRTLEDVRSSKTLKLTPMQKAGLCYYEDLARGVTKAEKDAISLLVQDAVGTFDPDARVEITGGFRRGKPFGHDVDLLITSPGAEKEQEDQLLQKVTNLWKKQGLLLYGRLEWSRFEDGKLPSRKIDALDHFAKCFLILKLYHHKVDKSKWEMPTGSNESEAKSWKAIRVDLVRCPYDGFAFALLGWTGSRMFRRDLRRYATHEKKMMLDNHALYDLTKKIFLKAKSEEEIFAHLGLEYLEPFERNA

SEQ ID NO: 1629 - DNA, 1587 bp, synthetic construct
  misc_feature 1..1587: note = Variant of terminal deoxynucleotidyltransferase
  source 1..1587: mol_type = other DNA
atgcaccatcatcatcatcatggcggtagcggcagccacggcattcgtaccatcgattcggacttcgggaagaaacgccagaagaagatggataaccacgatagttccgccatctatgaaatcaaatttcacgagtttgtgctgttcattctcgaagagaaaatgggtgcgacgcgtcgtacttttctgacagatttagcccgcaagaaagggttccgcgtcgagaatgaactgtcagacagcgttacccacatcgtggcagaaaataattcacgctctgaagtattggcttggctgaaagaacacaagatggagaagaccaagcaattcgaactgctggatattagctggcttatcgaaagcatgaaagttggtaaaccggtggacaccaaggggaaataccagttggcggaatcgggtgagatgagtgcgaacccagatccgacagagggtcgtgaaaacgagctgcctcctactacgaagaccatttctcagtatgcgtgtcaacgccgcaccaccctgaacaaccataatcaacgttttacggacgcactggaaattcttgcggaaaattacgagttcaaacgcaacgatgatacttgtctgacttttatgcgtgctatttccgtgctgaaaagccttccgtttgaggtagttagcctgaaagacacggaaggattgccctggatcggtgatgaagtcaaagggattatggaagaaatcatcgaggtcggtgaatcgctggaagtgcaggccgtgctcaatgatgagcgctatcaaagcttcaaacgctttaagagtgtctttggagtgggggtgaagacagcagacaagtggtaccgtatgggtctgcgcacgctcgaggatgttcgttccagcaagaccctgaagttgaccccgatgcagaaagcgggtctgtgctattatgaagatcttgctcgcggcgttacgaaagccgaagctgacgcgatttctctgctggttcaggatgcagtcgcaactttcgacccggatgcgctggtggagattaccggtggatttcgtcgtgggaaaccttttggtcacgacgttgatctgcttatcacatctccgggagctgagaaagaacaagaagaccagctcctgcagaaagtgaccaatctgtggaagaaacaagggttgttgctgtacggtcgtctggaatggagtcagtttgaagatgggaaactcccatcccgcaagatcgatgccctggaccattttgcgaaatgctttctgatcctcaaactttatcaccataaagtggacaaaagcaaatgggaaatgccgacgggttcgaacgaaagcgaggccaaaagttggaaagcaattcgcgtagatctggttcgttgtccctacgatggttttgcgtttgcgttgttgggttggaccggaagccgcatgttccgccgtgatctgcgccgctacgccacccacgagaagaagatgatgctggacaatcatgcgctgtatgacctgaccaagaaaatctttctcaaagcgaaatcggaagaggaaattttcgcacatctggggcttgaatacctggaaccgttcgaacgtaacgca

SEQ ID NO: 1630 - protein, 529 aa, synthetic construct
  REGION 1..529: note = Variant of terminal deoxynucleotidyltransferase
MHHHHHHGGSGSHGIRTIDSDFGKKRQKKMDNHDSSAIYEIKFHEFVLFILEEKMGATRRTFLTDLARKKGFRVENELSDSVTHIVAENNSRSEVLAWLKEHKMEKTKQFELLDISWLIESMKVGKPVDTKGKYQLAESGEMSANPDPTEGRENELPPTTKTISQYACQRRTTLNNHNQRFTDALEILAENYEFKRNDDTCLTFMRAISVLKSLPFEVVSLKDTEGLPWIGDEVKGIMEEIIEVGESLEVQAVLNDERYQSFKRFKSVFGVGVKTADKWYRMGLRTLEDVRSSKTLKLTPMQKAGLCYYEDLARGVTKAEADAISLLVQDAVATFDPDALVEITGGFRRGKPFGHDVDLLITSPGAEKEQEDQLLQKVTNLWKKQGLLLYGRLEWSQFEDGKLPSRKIDALDHFAKCFLILKLYHHKVDKSKWEMPTGSNESEAKSWKAIRVDLVRCPYDGFAFALLGWTGSRMFRRDLRRYATHEKKMMLDNHALYDLTKKIFLKAKSEEEIFAHLGLEYLEPFERNA

SEQ ID NO: 1631 - DNA, 1587 bp, synthetic construct
  misc_feature 1..1587: note = Variant of terminal deoxynucleotidyltransferase
  source 1..1587: mol_type = other DNA
atgcaccatcatcatcatcatggcggtagcggcagccacggcattcgtaccatcgattcggacttcgggaagaaacgccagaagaagatggataaccacgatagttccgccatctatgaaatcaaatttcacgagtttgtgctgttcattctcgaagagaaaatgggtgcgacgcgtcgtacttttctgacagatttagcccgcaagaaagggttccgcgtcgagaatgaactgtcagacagcgttacccacatcgtggcagaaaataattcacgctctgaagtattggcttggctgaaagaacacaagatggagaagaccaagcaattcgaactgctggatattagctggcttatcgaaagcatgaaagttggtaaaccggtggacaccaaggggaaataccagttggcggaatcgggtgagatgagtgcgaacccagatccgacagagggtcgtgaaaacgagctgcctcctactacgaagaccatttctcagtatgcgtgtcaacgccgcaccaccctgaacaaccataatcaacgttttacggacgcactggaaattcttgcggaaaattacgagttcaaacgcaacgatgatacttgcctgacttttatgcgtgctatttccgtgctgaaatgccttccgtttgaggtagttagcctgaaagacacggaaggattgccctggatcggtgatgaagtcaaagggattatggaagaaatcatcgaggtcggtgaatcgctggaagtgcaggccgtgctcaatgatgagcgctatcaaagcttcaaacgctttaagagtgtctttggagtgggggtgaagacagcagacaagtggtaccgtatgggtctgcgcacgctcgaggatgttcgttccagcaagaccctgaagttgaccccgatgcagaaagcgggtctgatgtattatgaagatcttgctcgcggcgttacgaaagccgaagccgacgcgatttctctgctggttcaggatgcagtcgggactttcgacccggatgcgcgtgtggagattaccggtggatttcgtcgtgggaaaccttttggtcacgacgttgatctgcttatcacatctccgggagctgagaaagaacaagaagaccagctcctgcagaaagtgaccaatctgtggaagaaacaagggttgttgctgtacggtcgtctggaatggagtcgctttgaagatgggaaactcccatcccgcaaggcagatgccctggaccattttgcgaaatgctttctgatcctcaaactttatcaccataaagtggacaaaagcaaatgggaaatgccgacgggttcgaacgaaagcgaggccaatagttggaaagcaattcgcgtagatctggttcgttgtccctacgatggtctggcgtttgcgttgttgggttggaccggaagccgcatgttccgccgtgatctgcgccgctacgccacgcacgagaagaagatgatgctggacaatcatgcgctgtatgacctgaccaagggcatctttctcaaagctaaatcggaagaggaaattttcgcacatctggggcttgaatacctggaaccgttcgaacgtaacgca

SEQ ID NO: 1632 - protein, 529 aa, synthetic construct
  REGION 1..529: note = Variant of terminal deoxynucleotidyltransferase
MHHHHHHGGSGSHGIRTIDSDFGKKRQKKMDNHDSSAIYEIKFHEFVLFILEEKMGATRRTFLTDLARKKGFRVENELSDSVTHIVAENNSRSEVLAWLKEHKMEKTKQFELLDISWLIESMKVGKPVDTKGKYQLAESGEMSANPDPTEGRENELPPTTKTISQYACQRRTTLNNHNQRFTDALEILAENYEFKRNDDTCLTFMRAISVLKCLPFEVVSLKDTEGLPWIGDEVKGIMEEIIEVGESLEVQAVLNDERYQSFKRFKSVFGVGVKTADKWYRMGLRTLEDVRSSKTLKLTPMQKAGLMYYEDLARGVTKAEADAISLLVQDAVGTFDPDARVEITGGFRRGKPFGHDVDLLITSPGAEKEQEDQLLQKVTNLWKKQGLLLYGRLEWSRFEDGKLPSRKADALDHFAKCFLILKLYHHKVDKSKWEMPTGSNESEANSWKAIRVDLVRCPYDGLAFALLGWTGSRMFRRDLRRYATHEKKMMLDNHALYDLTKGIFLKAKSEEEIFAHLGLEYLEPFERNA

SEQ ID NO: 1633 - DNA, 1587 bp, synthetic construct
  misc_feature 1..1587: note = Variant of terminal deoxynucleotidyltransferase
  source 1..1587: mol_type = other DNA
atgcaccatcatcatcatcatggcggtagcggcagccacggcattcgtaccatcgattcggacttcgggaagaaacgccagaagaagatggataaccacgatagttccgccatctatgaaatcaaatttcacgagtttgtgctgttcattctcgaagagaaaatgggtgcgacgcgtcgtacttttctgacagatttagcccgcaagaaagggttccgcgtcgagaatgaactgtcagacagcgttacccacatcgtggcagaaaataattcacgctctgaagtattggcttggctgaaagaacacaagatggagaagaccaagcaattcgaactgctggatattagctggcttatcgaaagcatgaaagttggtaaaccggtggacaccaaggggaaataccagttggcggaatcgggtgagatgagtgcgaacccagatccgacagagggtcgtgaaaacgagctgcctcctactacgaagaccatttctcagtatgcgtgtcaacgccgcaccaccctgaacaaccataatcaacgttttacggacgcactggaaattcttgcggaaaattacgagttcaaacgcaacgatgatacttgtctgacttttatgcgtgctatttccgtgctgaaatgccttccgtttgaggtagttagcctgaaagacacggaaggattgccctggatcggtgatgaagtcaaagggattatggaagaaatcatcgaggtcggtgaatcgctggaagtgcaggccgtgctcaatgatgagcgctatcaaagcttcaaacgctttaagagtgtctttggagtgggggtgaagacagcagacaagtggtaccgtatgggtctgcgcacgctcgaggatgttcgttccagcaagaccctgaagttgaccccgatgcagaaagcgggtctgtgctattatgaagatcttgctcgcggcgttacgaaagccgaagctgacgcgattacgctgctggttcaggatgcagtctggactttcgacccggatgcgctggtggagattacgggtggatttcgtcgtgggaaaccttttggtcacgacgttgatctgcttatcacatctccgggagctgagaaagagcaagaagaccagctcctgcagaaagtgaccaatctgtggaagaaacaagggttgttgctgtacggtcgtctggaatggagtcgctttgaagatgggaaactcccatcccgtaagatcgatgccctggaccattttgcgaaatgctttctgatcctcaaactttatgatcataaagtggacaaaagcaaatgggaaatgccgacgggttcgaacgaaagcgaggccaaaagttggaaagcaattcgcgtagatctggttcgtgtcccctacgatggttttgcgtttgcgttgttgggttggaccggaagccgcatgttccgccgtgatctgcgctggtacgccacccacgagaagaagatgatgctggacaatcatgcgctgtatgacctgaccaagaaaatctttctcaaagcgaaatcggaagaggaaattttcgcacatctggggcttgaatacctggaaccgttcgaacgtaacgca

SEQ ID NO: 1634 - protein, 529 aa, synthetic construct
  REGION 1..529: note = Variant of terminal deoxynucleotidyltransferase
MHHHHHHGGSGSHGIRTIDSDFGKKRQKKMDNHDSSAIYEIKFHEFVLFILEEKMGATRRTFLTDLARKKGFRVENELSDSVTHIVAENNSRSEVLAWLKEHKMEKTKQFELLDISWLIESMKVGKPVDTKGKYQLAESGEMSANPDPTEGRENELPPTTKTISQYACQRRTTLNNHNQRFTDALEILAENYEFKRNDDTCLTFMRAISVLKCLPFEVVSLKDTEGLPWIGDEVKGIMEEIIEVGESLEVQAVLNDERYQSFKRFKSVFGVGVKTADKWYRMGLRTLEDVRSSKTLKLTPMQKAGLCYYEDLARGVTKAEADAITLLVQDAVWTFDPDALVEITGGFRRGKPFGHDVDLLITSPGAEKEQEDQLLQKVTNLWKKQGLLLYGRLEWSRFEDGKLPSRKIDALDHFAKCFLILKLYDHKVDKSKWEMPTGSNESEAKSWKAIRVDLVRVPYDGFAFALLGWTGSRMFRRDLRWYATHEKKMMLDNHALYDLTKKIFLKAKSEEEIFAHLGLEYLEPFERNA

SEQ ID NO: 1635 - DNA, 1587 bp, synthetic construct
  misc_feature 1..1587: note = Variant of terminal deoxynucleotidyltransferase
  source 1..1587: mol_type = other DNA
atgcaccatcatcatcatcatggcggtagcggcagccacggcattcgtaccatcgattcggacttcgggaagaaacgccagaagaagatggataaccacgatagttccgccatctatgaaatcaaatttcacgagtttgtgctgttcattctcgaagagaaaatgggtgcgacgcgtcgtacttttctgacagatttagcccgcaagaaagggttccgcgtcgagaatgaactgtcagacagcgttacccacatcgtggcagaaaataattcacgctctgaagtattggcttggctgaaagaacacaagatggagaagaccaagcaattcgaactgctggatattagctggcttatcgaaagcatgaaagttggtaaaccggtggacaccaaggggaaataccagttggcggaatcgggtgagatgagtgcgaacccagatccgacagagggtcgtgaaaacgagctgcctcctactacgaagaccatttctcagtatgcgtgtcaacgccgcaccaccctgaacaaccataatcaacgttttacggacgcactggaaattcttgcggaaaattacgagttcaaacgcaacgatgatacttgtctgacttttatgcgtgctatttccgtgctgaaatgccttccgtttgaggtagttagcctgaaagacacggaaggattgccctggatcggtgatgaagtcaaagggattatggaagaaatcatcgaggtcggtgaatcgctggaagtgcaggccgtgctcaatgatgagcgctatcaaagcttcaaacgctttaagagtgtctttggagtgggggtgaagacagcagacaagtggtaccgtatgggtctgcgcacgctcgaggatgttcgttccagcaagaccctgaagttgaccccgatgcagaaagcgggtctgtgctattatgaagatcttgctcgcggcgttacgaaagccgaagctgacgcgattacgctgctggttcaggatgcagtcgcaactttcgacccggatgcgctggtggagattacgggtggatttcgtcgtgggaaaccttttggtcacgacgttgatctgcttatcacatctccgggagctgagaaaaaccaagaagaccagctcctgcagaaagtgaccaatctgtggaagaaacaagggttgttgctgtacggtcgtctggaatggagtcgctttgaagatgggaaactcccatcccgcaagatcgatgccctggaccattttgcgaaatgctttctgatcctcaaactttatgatcataaagtggacaaaagcaaatgggaaatgccgacgggttcgaacgaaagcgaggccaaaagttggaaagcaattcgcgtagatctggttcgttgtccctacgatggttttgcgtttgcgttgttgggttggaccggaagccgcatgttccgccgtgatctgcgccgctacgccacccacgagaagaagatgatgctggacaatcatgcgctgtatgacctgaccaagaaaatctttctcaaagctaaatcggaagaggaaattttcgcacatctggggcttgaatacctggaaccgttcgaacgtaacgca

SEQ ID NO: 1636 - protein, 529 aa, synthetic construct
  REGION 1..529: note = Variant of terminal deoxynucleotidyltransferase
MHHHHHHGGSGSHGIRTIDSDFGKKRQKKMDNHDSSAIYEIKFHEFVLFILEEKMGATRRTFLTDLARKKGFRVENELSDSVTHIVAENNSRSEVLAWLKEHKMEKTKQFELLDISWLIESMKVGKPVDTKGKYQLAESGEMSANPDPTEGRENELPPTTKTISQYACQRRTTLNNHNQRFTDALEILAENYEFKRNDDTCLTFMRAISVLKCLPFEVVSLKDTEGLPWIGDEVKGIMEEIIEVGESLEVQAVLNDERYQSFKRFKSVFGVGVKTADKWYRMGLRTLEDVRSSKTLKLTPMQKAGLCYYEDLARGVTKAEADAITLLVQDAVATFDPDALVEITGGFRRGKPFGHDVDLLITSPGAEKNQEDQLLQKVTNLWKKQGLLLYGRLEWSRFEDGKLPSRKIDALDHFAKCFLILKLYDHKVDKSKWEMPTGSNESEAKSWKAIRVDLVRCPYDGFAFALLGWTGSRMFRRDLRRYATHEKKMMLDNHALYDLTKKIFLKAKSEEEIFAHLGLEYLEPFERNA

SEQ ID NO: 1637 - DNA, 1587 bp, synthetic construct
  misc_feature 1..1587: note = Variant of terminal deoxynucleotidyltransferase
  source 1..1587: mol_type = other DNA
atgcaccatcatcatcatcatggcggtagcggcagccacggcattcgtaccatcgattcggacttcgggaagaaacgccagaagaagatggataaccacgatagttccgccatctatgaaatcaaatttcacgagtttgtgctgttcattctcgaagagaaaatgggtgcgacgcgtcgtacttttctgacagatttagcccgcaagaaagggttccgcgtcgagaatgaactgtcagacagcgttacccacatcgtggcagaaaataattcacgctctgaagtattggcttggctgaaagaacacaagatggagaagaccaagcaattcgaactgctggatattagctggcttatcgaaagcatgaaagttggtaaaccggtggacaccaaggggaaataccagttggcggaatcgggtgagatgagtgcgaacccagatccgacagagggtcgtgaaaacgagctgcctcctactacgaagaccatttctcagtatgcgtgtcaacgccgcaccaccctgaacaaccataatcaacgttttacggacgcactggaaattcttgcggaaaattacgagttcaaacgcaacgatgatactcgcctgacttttatgcgtgctatttccgtgctgaaatgccttccgtttgaggtagttagcctgaaagacacggaaggattgccctggatcggtgatgaagtcaaagggattatggaagaaatcatcgaggtcggtgaatcgctggaagtgcaggccgtgctcaatgatgagcgctatcaaagcttcaaacgctttaagagtgtctttggagtgggggtgaagacagcagacaagtggtaccgtatgggtctgcgcacgctcgaggatgttcgttccagcaagaccctgaagttgaccccgatgcagaaagcgggtctgtgctattatgaagatcttgctcgcggcgttacgaaagccgaagctgacgcgatttctctgctggttcaggatgcagtctggactttcgacccggatgcgctggtggagattaccggtggatttcgtcgtgggaaaccttttggtcacgacgttgatctgcttatcacatctccgggagctgagaaagaacaagaagaccagctcctgcagaaagtgaccaatctgtggaagaaacaagggttgttgctgtacggtcgtctggaatggagtcgctttgaagatgggaaactcccatccggcaaggcagatgccctggaccattttgcgaaatgctttctgatcctcaaactttatcaccataaagtggacaaaagcaaatgggaaatgccgacgggttcgaacgaaagcgaggccaaaagttggaaagcaattcgcgtagatctggttcgttgtccctacgatggtctggcgtttgcgttgttgggttggaccggaagccgcatgttccgccgtgatctgcgccgctacgccatgcacgagaagaagatgatgctggacaatcatgcgctgtatgacctgaccaagggcatctttctcaaagctaaatcggaagaggaaattttcgcacatctggggcttgaatacctggaaccgttcgaacgtaacgca

SEQ ID NO: 1638 - protein, 529 aa, synthetic construct
  REGION 1..529: note = Variant of terminal deoxynucleotidyltransferase
MHHHHHHGGSGSHGIRTIDSDFGKKRQKKMDNHDSSAIYEIKFHEFVLFILEEKMGATRRTFLTDLARKKGFRVENELSDSVTHIVAENNSRSEVLAWLKEHKMEKTKQFELLDISWLIESMKVGKPVDTKGKYQLAESGEMSANPDPTEGRENELPPTTKTISQYACQRRTTLNNHNQRFTDALEILAENYEFKRNDDTRLTFMRAISVLKCLPFEVVSLKDTEGLPWIGDEVKGIMEEIIEVGESLEVQAVLNDERYQSFKRFKSVFGVGVKTADKWYRMGLRTLEDVRSSKTLKLTPMQKAGLCYYEDLARGVTKAEADAISLLVQDAVWTFDPDALVEITGGFRRGKPFGHDVDLLITSPGAEKEQEDQLLQKVTNLWKKQGLLLYGRLEWSRFEDGKLPSGKADALDHFAKCFLILKLYHHKVDKSKWEMPTGSNESEAKSWKAIRVDLVRCPYDGLAFALLGWTGSRMFRRDLRRYAMHEKKMMLDNHALYDLTKGIFLKAKSEEEIFAHLGLEYLEPFERNA

SEQ ID NO: 1639 - DNA, 1587 bp, synthetic construct
  misc_feature 1..1587: note = Variant of terminal deoxynucleotidyltransferase
  source 1..1587: mol_type = other DNA
atgcaccatcatcatcatcatggcggtagcggcagccacggcattcgtaccatcgattcggacttcgggaagaaacgccagaagaagatggataaccacgatagttccgccatctatgaaatcaaatttcacgagtttgtgctgttcattctcgaagagaaaatgggtgcgacgcgtcgtacttttctgacagatttagcccgcaagaaagggttccgcgtcgagaatgaactgtcagacagcgttacccacatcgtggcagaaaataattcacgctctgaagtattggcttggctgaaagaacacaagatggagaagaccaagcaattcgaactgctggatattagctggcttatcgaaagcatgaaagttggtaaaccggtggacaccaaggggaaataccagttggcggaatcgggtgagatgagtgcgaacccagatccgacagagggtcgtgaaaacgagctgcctcctactacgaagaccatttctcagtatgcgtgtcaacgccgcaccaccctgaacaaccataatcaacgttttacggacgcactggaaattcttgcggaaaattacgagttcaaacgcaacgatgatacttgtctgacttttatgcgtgctatttccgtgctgaaatgccttccgtttgaggtagttagcctgaaagacacggaaggattgccctggatcggtgatgaagtcaaagggattatggaagaaatcatcgaggtcggtgaatcgctggaagtgcaggccgtgctcaatgatgagcgctatcaaagcttcaaacgctttaagagtgtctttggagtgggggtgaagacagcagacaagtggtaccgtatgggtctgcgcacgctcgaggatgttcgttccagcaagaccctgaagttgaccccgatgcagaaagcgggtctgtgctattatgaagatcttgctcgcggcgttacgaaagccgaagctgacgcgatttctctgctggttcaggatgcagtctggactttcgacccggatgcgctggtggagattaccggtggatttcgtcgtgggaaaccttttggtcacgacgttgatctgcttatcacatctccgggagctgagaaagaacaagaagaccagctcctgcagaaagtgaccaatctgtggaagaaacaagggttgttgctgtacggtcgtctggaatggagtcgctttgaagatgggaaactcccatccggcaaggcagatgccctggaccattttgcgaaatgctttctgatcctcaaactttatcaccataaagtggacaaaagcaaatgggaaatgccgacgggttcgaacgaaagcgaggccaaaagttggaaagcaattcgcgtagatctggttcgttgtccctacgatggttttgcgtttgcgttgttgggttggaccggaagccgcatgttccgccgtgatctgcgccgctacgccacccacgagaagaagatgatgctggacaatcatgcgctgtatgacctgaccaagaaaatctttctcaaagctaaatcggaagaggaaattttcgcacatctggggcttgaatacctggaaccgttcgaacgtaacgca

SEQ ID NO: 1640 - protein, 529 aa, synthetic construct
  REGION 1..529: note = Variant of terminal deoxynucleotidyltransferase
MHHHHHHGGSGSHGIRTIDSDFGKKRQKKMDNHDSSAIYEIKFHEFVLFILEEKMGATRRTFLTDLARKKGFRVENELSDSVTHIVAENNSRSEVLAWLKEHKMEKTKQFELLDISWLIESMKVGKPVDTKGKYQLAESGEMSANPDPTEGRENELPPTTKTISQYACQRRTTLNNHNQRFTDALEILAENYEFKRNDDTCLTFMRAISVLKCLPFEVVSLKDTEGLPWIGDEVKGIMEEIIEVGESLEVQAVLNDERYQSFKRFKSVFGVGVKTADKWYRMGLRTLEDVRSSKTLKLTPMQKAGLCYYEDLARGVTKAEADAISLLVQDAVWTFDPDALVEITGGFRRGKPFGHDVDLLITSPGAEKEQEDQLLQKVTNLWKKQGLLLYGRLEWSRFEDGKLPSGKADALDHFAKCFLILKLYHHKVDKSKWEMPTGSNESEAKSWKAIRVDLVRCPYDGFAFALLGWTGSRMFRRDLRRYATHEKKMMLDNHALYDLTKKIFLKAKSEEEIFAHLGLEYLEPFERNA

SEQ ID NO: 1641 - DNA, 1587 bp, synthetic construct
  misc_feature 1..1587: note = Variant of terminal deoxynucleotidyltransferase
  source 1..1587: mol_type = other DNA
atgcaccatcatcatcatcatggcggtagcggcagccacggcattcgtaccatcgattcggacttcgggaagaaacgccagaagaagatggataaccacgatagttccgccatctatgaaatcaaatttcacgagtttgtgctgttcattctcgaagagaaaatgggtgcgacgcgtcgtacttttctgacagatttagcccgcaagaaagggttccgcgtcgagaatgaactgtcagacagcgttacccacatcgtggcagaaaataattcacgctctgaagtattggcttggctgaaagaacacaagatggagaagaccaagcaattcgaactgctggatattagctggcttatcgaaagcatgaaagttggtaaaccggtggacaccaaggggaaataccagttggcggaatcgggtgagatgagtgcgaacccagatccgacagagggtcgtgaaaacgagctgcctcctactacgaagaccatttctcagtatgcgtgtcaacgccgcaccaccctgaacaaccataatcaacgttttacggacgcactggaaattcttgcggaaaattacgagttcaaacgcaacgatgatacttgcctgacttttatgcgtgctatttccgtgctgaaatgccttccgtttgaggtagttagcctgaaagacacggaaggattgccctggatcggtgatgaagtcaaagggattatggaagaaatcatcgaggtcggtgaatcgctggaagtgcaggccgtgctcaatgatgagcgctatcaaagcttcaaacgctttaagagtgtctttggagtgggggtgaagacagcagacaagtggtaccgtatgggtctgcgcacgctcgaggatgttcgttccagcaagaccctgaagttgaccccgatgcagaaagcgggtctgtgctattatgaagatcttgctcgcggcgttacgaaagccgaagccgacgcgatttctctgctggttcaggatgcagtctggactttcgacccggatgcgctggtggagattaccggtggatttcgtcgtgggaaacctaagggtcacgacgttgatctgcttatcacatctccgggagctgagaaagaacaagaagaccagctcctgcagaaagtgaccaatctgtggaagaaacaagggttgttgctgtacggtcgtctggaatggagtcgctttgaagatgggaaactcccatccggcaagatcgatgccctggaccattttgcgaaatgctttctgatcctcaaactttatcaccataaagtggacaaaagcaaatgggaaatgccgacgggttcgaacgaaagcgaggccaaaagttggaaagcaattcgcgtagatctggttcgttgtccctacgatggttttgcgtttgcgttgttgggttggaccggaagccgcatgttccgccgtgatctgcgccgctacgccacccacgagaagaagatgatgctggacaatcatgcgctgtatgacctgaccaagaaaatctttctcaaagctaaatcggaagaggaaattttcgcacatctggggcttgaatacctggaaccgttcgaacgtaacgca

SEQ ID NO: 1642 - protein, 529 aa, synthetic construct
  REGION 1..529: note = Variant of terminal deoxynucleotidyltransferase
MHHHHHHGGSGSHGIRTIDSDFGKKRQKKMDNHDSSAIYEIKFHEFVLFILEEKMGATRRTFLTDLARKKGFRVENELSDSVTHIVAENNSRSEVLAWLKEHKMEKTKQFELLDISWLIESMKVGKPVDTKGKYQLAESGEMSANPDPTEGRENELPPTTKTISQYACQRRTTLNNHNQRFTDALEILAENYEFKRNDDTCLTFMRAISVLKCLPFEVVSLKDTEGLPWIGDEVKGIMEEIIEVGESLEVQAVLNDERYQSFKRFKSVFGVGVKTADKWYRMGLRTLEDVRSSKTLKLTPMQKAGLCYYEDLARGVTKAEADAISLLVQDAVWTFDPDALVEITGGFRRGKPKGHDVDLLITSPGAEKEQEDQLLQKVTNLWKKQGLLLYGRLEWSRFEDGKLPSGKIDALDHFAKCFLILKLYHHKVDKSKWEMPTGSNESEAKSWKAIRVDLVRCPYDGFAFALLGWTGSRMFRRDLRRYATHEKKMMLDNHALYDLTKKIFLKAKSEEEIFAHLGLEYLEPFERNA

SEQ ID NO: 1643 - DNA, 1587 bp, synthetic construct
  misc_feature 1..1587: note = Variant of terminal deoxynucleotidyltransferase
  source 1..1587: mol_type = other DNA
atgcaccatcatcatcatcatggcggtagcggcagccacggcattcgtaccatcgattcggacttcgggaagaaacgccagaagaagatggataaccacgatagttccgccatctatgaaatcaaatttcacgagtttgtgctgttcattctcgaagagaaaatgggtgcgacgcgtcgtacttttctgacagatttagcccgcaagaaagggttccgcgtcgagaatgaactgtcagacagcgttacccacatcgtggcagaaaataattcacgctctgaagtattggcttggctgaaagaacacaagatggagaagaccaagcaattcgaactgctggatattagctggcttatcgaaagcatgaaagttggtaaaccggtggacaccaaggggaaataccagttggcggaatcgggtgagatgagtgcgaacccagatccgacagagggtcgtgaaaacgagctgcctcctactacgaagaccatttctcagtatgcgtgtcaacgccgcaccaccctggacaaccataatcaacgttttacggacgcactggaaattcttgcggaaaattacgagttcaaacgcaacgatgatacttgtctgacttttatgcgtgctatttccgtgctgaaatgccttccgtttgaggtagttagcctgaaagacacggaaggattgccctggatcggtgatgaagtcaaagggattatggaagaaatcatcgaggtcggtgaatcgctggaagtgcaggccgtgctcaatgatgagcgctatcaaagcttcaaacgctttaagagtgtctttggagtgggggtgaagacagcagacaagtggtaccgtatgggtctgcgcacgctcgaggatgttcgttccagcaagaccctgaagttgaccccgatgcagaaagcgggtctgtgctattatgaagatcttgctcgcggcgttacgaaagccgaagctgacgcgatttctctgctggttcaggatgcagtcgcaactttcgacccggatgcgctggtggagattacgggtggatttcgtcgtgggaaaccttttggtcacgacgttgatctgcttatcacatctccgggagctgagaaaaaccaagaagaccagctcctgcagaaagtgaccaatctgtggaagaaacaagggttgttgctgtacggtcgtctggaatggagtcgctttgaagatgggaaactcccatcccgcaagatcgatgccctggaccattttgcgaaatgctttctgatcctcaaactttatcaccataaagtggacaaaagcaaatgggaaatgccgacgggttcgaacgaaagcgaggccaaaagttggaaagcaattcgcgtagatctggttcgttgcccctacgatggttttgcgtttgcgttgttgggttggaccggaagccgcatgttccgccgtgatctgcgctggtacgccacccacgagaagaagatgatgctggacaatcatgcgctgtatgacctgaccaagaaaatctttctcaaagctaaatcggaagaggaaattttcgcacatctggggcttgaatacctggaaccgttcgaacgtaacgca

SEQ ID NO: 1644 - protein, 529 aa, synthetic construct
  REGION 1..529: note = Variant of terminal deoxynucleotidyltransferase
MHHHHHHGGSGSHGIRTIDSDFGKKRQKKMDNHDSSAIYEIKFHEFVLFILEEKMGATRRTFLTDLARKKGFRVENELSDSVTHIVAENNSRSEVLAWLKEHKMEKTKQFELLDISWLIESMKVGKPVDTKGKYQLAESGEMSANPDPTEGRENELPPTTKTISQYACQRRTTLDNHNQRFTDALEILAENYEFKRNDDTCLTFMRAISVLKCLPFEVVSLKDTEGLPWIGDEVKGIMEEIIEVGESLEVQAVLNDERYQSFKRFKSVFGVGVKTADKWYRMGLRTLEDVRSSKTLKLTPMQKAGLCYYEDLARGVTKAEADAISLLVQDAVATFDPDALVEITGGFRRGKPFGHDVDLLITSPGAEKNQEDQLLQKVTNLWKKQGLLLYGRLEWSRFEDGKLPSRKIDALDHFAKCFLILKLYHHKVDKSKWEMPTGSNESEAKSWKAIRVDLVRCPYDGFAFALLGWTGSRMFRRDLRWYATHEKKMMLDNHALYDLTKKIFLKAKSEEEIFAHLGLEYLEPFERNA

SEQ ID NO: 1645 - DNA, 1587 bp, synthetic construct
  misc_feature 1..1587: note = Variant of terminal deoxynucleotidyltransferase
  source 1..1587: mol_type = other DNA
atgcaccatcatcatcatcatggcggtagcggcagccacggcattcgtaccatcgattcggacttcgggaagaaacgccagaagaagatggataaccacgatagttccgccatctatgaaatcaaatttcacgagtttgtgctgttcattctcgaagagaaaatgggtgcgacgcgtcgtacttttctgacagatttagcccgcaagaaagggttccgcgtcgagaatgaactgtcagacagcgttacccacatcgtggcagaaaataattcacgctctgaagtattggcttggctgaaagaacacaagatggagaagaccaagcaattcgaactgctggatattagctggcttatcgaaagcatgaaagttggtaaaccggtggacaccaaggggaaataccagttggcggaatcgggtgagatgagtgcgaacccagatccgacagagggtcgtgaaaacgagctgcctcctactacgaagaccatttctcagtatgcgtgtcaacgccgcaccaccctgaacaaccataatcaacgttttacggacgcactggaaattcttgcggaaaattacgagttcaaacgcaacgatgatacttgtctgacttttatgcgtgctatttccgtgctgaaatgccttccgtttgaggtagttagcctgaaagacacggaaggattgccctggatcggtgatgaagtcaaagggattatggaagaaatcatcgaggtcggtgaatcgctggaagtgcaggccgtgctcaatgatgagcgctatcaaagcttcaaacgctttaagagtgtctttggagtgggggtgaagacagcagacaagtggtaccgtatgggtctgcgcacgctcgaggatgttcgttccagcaagaccctgaagttgaccccgatgcagaaagcgggtctgtgctattatgaagatcttgctcgcggcgttacgaaagccgaagctgacgcgatttctctgctggttcaggatgcagtctggactttcgacccggatgcgctggtggagattaccggtggatttcgtcgtgggaaaccttttggtcacgacgttgatctgcttatcacatctccgggagctgagaaagaacaagaagaccacctcctgcagaaagtgaccaatctgtggaagaaacaagggttgttgctgtacggtcgtctggaatggagtcgctttgaagatgggaaactcccatcccgcaagatcgatgccctggaccattttgcgaaatgctttctgatcctcaaactttatcaccataaagtggacaaaagcaaatgggaaatgccgacgggttcgaacgaaagcgaggccaaaagttggaaagcaattcgcgtagatctggttcgttgtccctacgatggttttgcgtttgcgttgttgggttggaccggaagccgcatgttccgccgtgatctgcgccgctacgccacccacgagaagaagatgatgctggacaatcatgcgctgtatgacctgaccaagaaaatctttctcaaagctaaatcggaagaggaaattttcgcacatctggggcttgaatacctggaaccgttcgaacgtaacgca

SEQ ID NO: 1646 - protein, 529 aa, synthetic construct
  REGION 1..529: note = Variant of terminal deoxynucleotidyltransferase
MHHHHHHGGSGSHGIRTIDSDFGKKRQKKMDNHDSSAIYEIKFHEFVLFILEEKMGATRRTFLTDLARKKGFRVENELSDSVTHIVAENNSRSEVLAWLKEHKMEKTKQFELLDISWLIESMKVGKPVDTKGKYQLAESGEMSANPDPTEGRENELPPTTKTISQYACQRRTTLNNHNQRFTDALEILAENYEFKRNDDTCLTFMRAISVLKCLPFEVVSLKDTEGLPWIGDEVKGIMEEIIEVGESLEVQAVLNDERYQSFKRFKSVFGVGVKTADKWYRMGLRTLEDVRSSKTLKLTPMQKAGLCYYEDLARGVTKAEADAISLLVQDAVWTFDPDALVEITGGFRRGKPFGHDVDLLITSPGAEKEQEDHLLQKVTNLWKKQGLLLYGRLEWSRFEDGKLPSRKIDALDHFAKCFLILKLYHHKVDKSKWEMPTGSNESEAKSWKAIRVDLVRCPYDGFAFALLGWTGSRMFRRDLRRYATHEKKMMLDNHALYDLTKKIFLKAKSEEEIFAHLGLEYLEPFERNA

SEQ ID NO: 1647 - DNA, 1587 bp, synthetic construct
  misc_feature 1..1587: note = Variant of terminal deoxynucleotidyltransferase
  source 1..1587: mol_type = other DNA
atgcaccatcatcatcatcatggcggtagcggcagccacggcattcgtaccatcgattcggacttcgggaagaaacgccagaagaagatggataaccacgatagttccgccatctatgaaatcaaatttcacgagtttgtgctgttcattctcgaagagaaaatgggtgcgacgcgtcgtacttttctgacagatttagcccgcaagaaagggttccgcgtcgagaatgaactgtcagacagcgttacccacatcgtggcagaaaataattcacgctctgaagtattggcttggctgaaagaacacaagatggagaagaccaagcaattcgaactgctggatattagctggcttatcgaaagcatgaaagttggtaaaccggtggacaccaaggggaaataccagttggcggaatcgggtgagatgagtgcgaacccagatccgacagagggtcgtgaaaacgagctgcctcctactacgaagaccatttctcagtatgcgtgtcaacgccgcaccaccctgaacaaccataatcaacgttttacggacgcactggaaattcttgcggaaaattacgagttcaaacgcaacgatgatacttgtctgacttttatgcgtgctatttccgtgctgaaatgccttccgtttgaggtagttagcctgaaagacacggaaggattgccctggatcggtgatgaagtcaaagggattatggaagaaatcatcgaggtcggtgaatcgctggaagtgcaggccgtgctcaatgatgagcgctatcaaagcttcaaacgctttaagagtgtctttggagtgggggtgaagacagcagacaagtggtaccgtatgggtctgcgcacgctcgaggatgttcgttccagcaagaccctgaagttgaccccgatgcagaaagcgggtctgtgctattatgaagatcttgctcgcggcgttacgaaagccgaagctgacgcgatttcgctgctggttcaggatgcagtcgcaactttcgacccggatgcgctggtggagattgtcggtggatttcgtcgtgggaaaccttttggtcacgacgttgatctgcttatcacatctccgggagctgagaaaaaccaagaagaccagctcctgcagaaagtgaccaatctgtggaagaaacaagggttgttgctgtacggtcgtctggaatggagtcagtttgaagatgggaaactcccatcccgcaagatcgatgccctggaccattttgcgaaatgctttctgatcctcaaactttatcaccataaagtggacaaaagcaaatgggaaatgccgacgggttcgaacgaaagcgaggccaaaagttggaaagcaattcgcgtagatctggttcgttgtccctacgatggttttgcgtttgcgttgttgggttggaccggaagccgcatgttccgccgtgatctgcgccgctacgccacccacgagaagaagatgatgctggacaatcatgcgctgtatgacctgaccaagaaaatctttctcaaagctaaatcggaagaggaaattttcgcacatctggggcttgaatacctggaaccgttcgaacgtaacgca

SEQ ID NO: 1648 - protein, 529 aa, synthetic construct
  REGION 1..529: note = Variant of terminal deoxynucleotidyltransferase
MHHHHHHGGSGSHGIRTIDSDFGKKRQKKMDNHDSSAIYEIKFHEFVLFILEEKMGATRRTFLTDLARKKGFRVENELSDSVTHIVAENNSRSEVLAWLKEHKMEKTKQFELLDISWLIESMKVGKPVDTKGKYQLAESGEMSANPDPTEGRENELPPTTKTISQYACQRRTTLNNHNQRFTDALEILAENYEFKRNDDTCLTFMRAISVLKCLPFEVVSLKDTEGLPWIGDEVKGIMEEIIEVGESLEVQAVLNDERYQSFKRFKSVFGVGVKTADKWYRMGLRTLEDVRSSKTLKLTPMQKAGLCYYEDLARGVTKAEADAISLLVQDAVATFDPDALVEIVGGFRRGKPFGHDVDLLITSPGAEKNQEDQLLQKVTNLWKKQGLLLYGRLEWSQFEDGKLPSRKIDALDHFAKCFLILKLYHHKVDKSKWEMPTGSNESEAKSWKAIRVDLVRCPYDGFAFALLGWTGSRMFRRDLRRYATHEKKMMLDNHALYDLTKKIFLKAKSEEEIFAHLGLEYLEPFERNA

SEQ ID NO: 1649 - DNA, 1587 bp, synthetic construct
  misc_feature 1..1587: note = Variant of terminal deoxynucleotidyltransferase
  source 1..1587: mol_type = other DNA
atgcaccatcatcatcatcatggcggtagcggcagccacggcattcgtaccatcgattcggacttcgggaagaaacgccagaagaagatggataaccacgatagttccgccatctatgaaatcaaatttcacgagtttgtgctgttcattctcgaagagaaaatgggtgcgacgcgtcgtacttttctgacagatttagcccgcaagaaagggttccgcgtcgagaatgaactgtcagacagcgttacccacatcgtggcagaaaataattcacgctctgaagtattggcttggctgaaagaacacaagatggagaagaccaagcaattcgaactgctggatattagctggcttatcgaaagcatgaaagttggtaaaccggtggacaccaaggggaaataccagttggcggaatcgggtgagatgagtgcgaacccagatccgacagagggtcgtgaaaacgagctgcctcctactacgaagaccatttctcagtatgcgtgtcaacgccgcaccaccctgaacaaccataatcaacgttttacggacgcactggaaattcttgcggaaaattacgagttcaaacgcaacgatgatacttgtctgacttttatgcgtgctatttccgtgctgaaaagccttccgtttgaggtagttagcctgaaagacacggaaggattgccctggatcggtgatgaagtcaaagggattatggaagaaatcatcgaggtcggtgaatcgctggaagtgcaggccgtgctcaatgatgagcgctatcaaagcttcaaacgctttaagagtgtctttggagtgggggtgaagacagcagacaagtggtaccgtatgggtctgcgcacgctcgaggatgttcgttccagcaagaccctgaagttgaccccgatgcagaaagcgggtctgtgctattatgaagatcttgctcgcggcgttacgaaagccgaagctgacgcgatttctctgctggttcaggatgcagtctggactttcgacccggatgcgctggtggagattaccggtggatttcgtcgtgggaaaccttttggtcacgacgttgatctgcttatcacatctccgggagctgagaaagaacaagaagaccagctcctgcagaaagtgaccaatctgtggaagaaacaagggttgttgctgtacggtcgtctggaatggagtcgctttgaagatgggaaactcccatcccgcaagatcgatgccctggaccattttgcgaaatgctttctgatcctcaaactttatcaccataaagtggacaaaagcaaatgggaaatgccgacgggttcgaacgaaagcgaggccaaaagttggaaagcaattcgcgtagatctggttcgttgtccctacgatggttttgcgtttgcgttgttgggttggaccggaagccgcatgttccgccgtgatctgcgccgctacgccacccacgagaagaagatgatgctggacaatcatgcgctgtatgacctgaccaagaaaatctttctcaaagctaaatcggaagaggaaattttcgcacatctggggcttgaatacctggaaccgttcgaacgtaacgca

SEQ ID NO: 1650 - protein, 529 aa, synthetic construct
  REGION 1..529: note = Variant of terminal deoxynucleotidyltransferase
MHHHHHHGGSGSHGIRTIDSDFGKKRQKKMDNHDSSAIYEIKFHEFVLFILEEKMGATRRTFLTDLARKKGFRVENELSDSVTHIVAENNSRSEVLAWLKEHKMEKTKQFELLDISWLIESMKVGKPVDTKGKYQLAESGEMSANPDPTEGRENELPPTTKTISQYACQRRTTLNNHNQRFTDALEILAENYEFKRNDDTCLTFMRAISVLKSLPFEVVSLKDTEGLPWIGDEVKGIMEEIIEVGESLEVQAVLNDERYQSFKRFKSVFGVGVKTADKWYRMGLRTLEDVRSSKTLKLTPMQKAGLCYYEDLARGVTKAEADAISLLVQDAVWTFDPDALVEITGGFRRGKPFGHDVDLLITSPGAEKEQEDQLLQKVTNLWKKQGLLLYGRLEWSRFEDGKLPSRKIDALDHFAKCFLILKLYHHKVDKSKWEMPTGSNESEAKSWKAIRVDLVRCPYDGFAFALLGWTGSRMFRRDLRRYATHEKKMMLDNHALYDLTKKIFLKAKSEEEIFAHLGLEYLEPFERNA

SEQ ID NO: 1651 - DNA, 1587 bp, synthetic construct
  misc_feature 1..1587: note = Variant of terminal deoxynucleotidyltransferase
  source 1..1587: mol_type = other DNA
atgcaccatcatcatcatcatggcggtagcggcagccacggcattcgtaccatcgattcggacttcgggaagaaacgccagaagaagatggataaccacgatagttccgccatctatgaaatcaaatttcacgagtttgtgctgttcattctcgaagagaaaatgggtgcgacgcgtcgtacttttctgacagatttagcccgcaagaaagggttccgcgtcgagaatgaactgtcagacagcgttacccacatcgtggcagaaaataattcacgctctgaagtattggcttggctgaaagaacacaagatggagaagaccaagcaattcgaactgctggatattagctggcttatcgaaagcatgaaagttggtaaaccggtggacaccaaggggaaataccagttggcggaatcgggtgagatgagtgcgaacccagatccgacagagggtcgtgaaaacgagctgcctcctactacgaagaccatttctcagtatgcgtgtcaacgccgcaccaccctggacaaccataatcaacgttttacggacgcactggaaattcttgcggaaaattacgagttcaaacgcaacgatgatacttgtctgacttttatgcgtgctatttccgtgctgaaatgccttccgtttgaggtagttagcctgaaagacacggaaggattgccctggatcggtgatgaagtcaaagggattatggaagaaatcatcgaggtcggtgaatcgctggaagtgcaggccgtgctcaatgatgagcgctatcaaagcttcaaacgctttaagagtgtctttggagtgggggtgaagacagcagacaagtggtaccgtatgggtctgcgcacgctcgaggatgttcgttccagcaagaccctgaagttgaccccgatgcagaaagcgggtctgtgctattatgaagatcttgctcgcggcgttacgaaagccgaagctgacgcgattacgctgctggttcaggatgcagtctggactttcgacccggatgcgctggtggagattacgggtggatttcgtcgtgggaaaccttttggtcacgacgttgatctgcttatcacatctccgggagctgagaaagagcaagaagaccagctcctgcagaaagtgaccaatctgtggaagaaacaagggttgttgctgtacggtcgtctggaatggagtcagtttgaagatgggaaactcccatcccgtaagatcgatgccctggaccattttgcgaaatgctttctgatcctcaaactttatcaccataaagtggacaaaagcaaatgggaaatgccgacgggttcgaacgaaagcgaggccaaaagttggaaagcaattcgcgtagatctggttcgttgtccctacgatggttttgcgtttgcgttgttgggttggaccggaagccgcatgttccgccgtgatctgcgccgctacgccacccacgagaagaagatgatgctggacaatcatgcgctgtatgacctgaccaagaaaatctttctcaaagctaaatcggaagaggaaattttcgcacatctggggcttgaatacctggaaccgttcgaacgtaacgca

SEQ ID NO: 1652 - protein, 529 aa, synthetic construct
  REGION 1..529: note = Variant of terminal deoxynucleotidyltransferase
MHHHHHHGGSGSHGIRTIDSDFGKKRQKKMDNHDSSAIYEIKFHEFVLFILEEKMGATRRTFLTDLARKKGFRVENELSDSVTHIVAENNSRSEVLAWLKEHKMEKTKQFELLDISWLIESMKVGKPVDTKGKYQLAESGEMSANPDPTEGRENELPPTTKTISQYACQRRTTLDNHNQRFTDALEILAENYEFKRNDDTCLTFMRAISVLKCLPFEVVSLKDTEGLPWIGDEVKGIMEEIIEVGESLEVQAVLNDERYQSFKRFKSVFGVGVKTADKWYRMGLRTLEDVRSSKTLKLTPMQKAGLCYYEDLARGVTKAEADAITLLVQDAVWTFDPDALVEITGGFRRGKPFGHDVDLLITSPGAEKEQEDQLLQKVTNLWKKQGLLLYGRLEWSQFEDGKLPSRKIDALDHFAKCFLILKLYHHKVDKSKWEMPTGSNESEAKSWKAIRVDLVRCPYDGFAFALLGWTGSRMFRRDLRRYATHEKKMMLDNHALYDLTKKIFLKAKSEEEIFAHLGLEYLEPFERNA

SEQ ID NO: 1653 - DNA, 1587 bp, synthetic construct
  misc_feature 1..1587: note = Variant of terminal deoxynucleotidyltransferase
  source 1..1587: mol_type = other DNA
atgcaccatcatcatcatcatggcggtagcggcagccacggcattcgtaccatcgattcggacttcgggaagaaacgccagaagaagatggataaccacgatagttccgccatctatgaaatcaaatttcacgagtttgtgctgttcattctcgaagagaaaatgggtgcgacgcgtcgtacttttctgacagatttagcccgcaagaaagggttccgcgtcgagaatgaactgtcagacagcgttacccacatcgtggcagaaaataattcacgctctgaagtattggcttggctgaaagaacacaagatggagaagaccaagcaattcgaactgctggatattagctggcttatcgaaagcatgaaagttggtaaaccggtggacaccaaggggaaataccagttggcggaatcgggtgagatgagtgcgaacccagatccgacagagggtcgtgaaaacgagctgcctcctactacgaagaccatttctcagtatgcgtgtcaacgccgcaccaccctgaacaaccataatcaacgttttacggacgcactggaaattcttgcggaaaattacgagttcaaacgcaacgatgatactgcgctgacttttatgcgtgctatttccgtgctgaaaagccttccgtttgaggtagttagcctgaaagacacggaaggattgccctggatcggtgatgaagtcaaagggattatggaagaaatcatcgaggtcggtgaatcgctggaagtgcaggccgtgctcaatgatgagcgctatcaaagcttcaaacgctttaagagtgtctttggagtgggggtgaagacagcagacaagtggtaccgtatgggtctgcgcacgctcgaggatgttcgttccagcaagaccctgaagttgaccccgatgcagaaagcgggtctgtgctattatgaagatcttgctcgcggcgttacgaaagccgaagctgacgcgatttctctgctggttcaggatgcagtcgcaactttcgacccggatgcgctggtggagattgtcggtggatttcgtcgtgggaaaccttttggtcacgacgttgatctgcttatcacatctccgggagctgagaaagagcaagaagaccagctcctgcagaaagtgaccaatctgtggaagaaacaagggttgttgctgtacggtcgtctggaatggagtcagtttgaagatgggaaactcccatccggtaaggctgatgccctggaccattttgcgaaatgctttctgatcctcaaactttatgatcataaagtggacaaaagcaaatgggaaatgccgacgggttcgaacgaaggcgaggccaaaccgtggaaagcaattcgcgtagatctggttcgttgcccctacgatggttttgcgtttgcgttgttgggttggaccggaagccgcatgttccgccgtgatctgcgctggtacgccaccgacgagaagaagatgatgctggacaatcatgcgctgtatgacctgaccaagaaaatctttctcaaagctaaatcggaagaggaaattttcgcacatctggggcttgaatacctggaaccgttcgaacgtaacgca

SEQ ID NO: 1654 - protein, 529 aa, synthetic construct
  REGION 1..529: note = Variant of terminal deoxynucleotidyltransferase
MHHHHHHGGSGSHGIRTIDSDFGKKRQKKMDNHDSSAIYEIKFHEFVLFILEEKMGATRRTFLTDLARKKGFRVENELSDSVTHIVAENNSRSEVLAWLKEHKMEKTKQFELLDISWLIESMKVGKPVDTKGKYQLAESGEMSANPDPTEGRENELPPTTKTISQYACQRRTTLNNHNQRFTDALEILAENYEFKRNDDTALTFMRAISVLKSLPFEVVSLKDTEGLPWIGDEVKGIMEEIIEVGESLEVQAVLNDERYQSFKRFKSVFGVGVKTADKWYRMGLRTLEDVRSSKTLKLTPMQKAGLCYYEDLARGVTKAEADAISLLVQDAVATFDPDALVEIVGGFRRGKPFGHDVDLLITSPGAEKEQEDQLLQKVTNLWKKQGLLLYGRLEWSQFEDGKLPSGKADALDHFAKCFLILKLYDHKVDKSKWEMPTGSNEGEAKPWKAIRVDLVRCPYDGFAFALLGWTGSRMFRRDLRWYATDEKKMMLDNHALYDLTKKIFLKAKSEEEIFAHLGLEYLEPFERNA

SEQ ID NO: 1655 - DNA, 1587 bp, synthetic construct
  misc_feature 1..1587: note = Variant of terminal deoxynucleotidyltransferase
  source 1..1587: mol_type = other DNA
atgcaccatcatcatcatcatggcggtagcggcagccacggcattcgtaccatcgattcggacttcgggaagaaacgccagaagaagatggataaccacgatagttccgccatctatgaaatcaaatttcacgagtttgtgctgttcattctcgaagagaaaatgggtgcgacgcgtcgtacttttctgacagatttagcccgcaagaaagggttccgcgtcgagaatgaactgtcagacagcgttacccacatcgtggcagaaaataattcacgctctgaagtattggcttggctgaaagaacacaagatggagaagaccaagcaattcgaactgctggatattagctggcttatcgaaagcatgaaagttggtaaaccggtggacaccaaggggaaataccagttggcggaatcgggtgagatgagtgcgaacccagatccgacagagggtcgtgaaaacgagctgcctcctactacgaagaccatttctcagtatgcgtgtcaacgccgcaccaccctgaacaaccataatcaacgttttacggacgcactggaaattcttgcggaaaattacgagttcaaacgcaacgatgatactgcgctgacttttatgcgtgctatttccgtgctgaaaagccttccgtttgaggtagttagcctgaaagacacggaaggattgccctggatcggtgatgaagtcaaagggattatggaagaaatcatcgaggtcggtgaatcgctggaagtgcaggccgtgctcaatgatgagcgctatcaaagcttcaaacgctttaagagtgtctttggagtgggggtgaagacagcagacaagtggtaccgtatgggtctgcgcacgctcgaggatgttcgttccagcaagaccctgaagttgaccccgatgcagaaagcgggtctgtgctattatgaagatcttgctcgcggcgttacgaaagccgaagccgacgcgatttctctgctggttcaggatgcagtcgcaactttcgacccggacgcgctggtggagattgtcggtggatttcgtcgtgggaaaccttttggtcacgacgttgatctgcttatcacatctccgggagctgagaaagagcaagaagaccagctcctgcagaaagtgaccaatctgtggaagaaacaagggttgttgctgtacggtcgtctggaatggagtcagtttgaagatgggaaactcccatccggtaaggctgatgccctggaccattttgcgaaatgctttctgatcctcaaactttatgatcataaagtggacaaaagcaaatgggaaatgccgacgggttcgaacgaaagcgaggccaaatcgtggaaagcaattcgcgtagatctggttcgttgcccctacgatggttttgcgtttgcgttgttgggttggaccggaagccgcatgttccgccgtgatctgcgctggtacgccaccgacgagaagaagatgatgctggacaatcatgcgctgtatgacctgaccaagaaaatctttctcaaagctaaatcggaagaggaaattttcgcacatctggggcttgaatacctggaaccgttcgaacgtaacgca

SEQ ID NO: 1656 - protein, 529 aa, synthetic construct
  REGION 1..529: note = Variant of terminal deoxynucleotidyltransferase
MHHHHHHGGSGSHGIRTIDSDFGKKRQKKMDNHDSSAIYEIKFHEFVLFILEEKMGATRRTFLTDLARKKGFRVENELSDSVTHIVAENNSRSEVLAWLKEHKMEKTKQFELLDISWLIESMKVGKPVDTKGKYQLAESGEMSANPDPTEGRENELPPTTKTISQYACQRRTTLNNHNQRFTDALEILAENYEFKRNDDTALTFMRAISVLKSLPFEVVSLKDTEGLPWIGDEVKGIMEEIIEVGESLEVQAVLNDERYQSFKRFKSVFGVGVKTADKWYRMGLRTLEDVRSSKTLKLTPMQKAGLCYYEDLARGVTKAEADAISLLVQDAVATFDPDALVEIVGGFRRGKPFGHDVDLLITSPGAEKEQEDQLLQKVTNLWKKQGLLLYGRLEWSQFEDGKLPSGKADALDHFAKCFLILKLYDHKVDKSKWEMPTGSNESEAKSWKAIRVDLVRCPYDGFAFALLGWTGSRMFRRDLRWYATDEKKMMLDNHALYDLTKKIFLKAKSEEEIFAHLGLEYLEPFERNA

SEQ ID NO: 1657 - DNA, 1587 bp, synthetic construct
  misc_feature 1..1587: note = Variant of terminal deoxynucleotidyltransferase
  source 1..1587: mol_type = other DNA
atgcaccatcatcatcatcatggcggtagcggcagccacggcattcgtaccatcgattcggacttcgggaagaaacgccagaagaagatggataaccacgatagttccgccatctatgaaatcaaatttcacgagtttgtgctgttcattctcgaagagaaaatgggtgcgacgcgtcgtacttttctgacagatttagcccgcaagaaagggttccgcgtcgagaatgaactgtcagacagcgttacccacatcgtggcagaaaataattcacgctctgaagtattggcttggctgaaagaacacaagatggagaagaccaagcaattcgaactgctggatattagctggcttatcgaaagcatgaaagttggtaaaccggtggacaccaaggggaaataccagttggcggaatcgggtgagatgagtgcgaacccagatccgacagagggtcgtgaaaacgagctgcctcctactatgaagaccatttctcagtatgcgtgtcaacgccgcaccaccctgaacaaccataatcaacgttttacggacgcactggaaattcttgcggaaaattacgagttcaaacgcaacgatgatactgcgctgacttttatgcgtgctatttccgtgctgaaaagccttccgtttgaggtacgtagcctgaaagacacggaaggattgccctggatcggtgatgaagtcaaagggattatggaagaaatcatcgaggtcggtgaatcgctggaagtgcaggccgtgctcaatgatgagcgctatcaaagcttcaaacgctttaagagtgtctttggagtgggggtgaagacagcagacaagtggtaccgtatgggtctgcgcacgctcgaggatgttcgttccagcaagaccctgaagttgaccccgatgcagaaagcgggtctgtgctattatgaagatcttgctcgcggcgttacgaaagccgaagctgacgcgatttctctgctggttcaggatgcagtcgcaactttcgacccggatgcgctggtggagattgtcggtggatttcgtcgtgggaaacctttcggtcacgacgttgatctgcttatcacatctccgggagctgagaaagagcaagaagaccagctcctgcagaaagtgaccaatctgtggaagaaacaagggttgttgctgtacggtcgtctggaatggagtcagtttgaagatgggaaactcccatcccgcaagatcgatgccctggaccattttgcgaaatgctttctgatcctcaaactttatgatcataaagtggacaaaagcaaatgggaaatgccgacgggttcgaacgaaagcgaggccaaaagttggaaagcaattcgcgtagatctggttcgttgcccctacggtggttttgcgtttgcgttgttgggttggaccggaagccgcatgttccgccgtgatctgcgctggtacgccaccgacgagaagaagatgatgctggacaatcatgcgctgtatgacctgaccaagaaagaattcctcgaggctaaatcggaagaggaaattttcgcacatctggggcttgaatacctggaaccgttcgaacgtaacgca

SEQ ID NO: 1658 - protein, 529 aa, synthetic construct
  REGION 1..529: note = Variant of terminal deoxynucleotidyltransferase
MHHHHHHGGSGSHGIRTIDSDFGKKRQKKMDNHDSSAIYEIKFHEFVLFILEEKMGATRRTFLTDLARKKGFRVENELSDSVTHIVAENNSRSEVLAWLKEHKMEKTKQFELLDISWLIESMKVGKPVDTKGKYQLAESGEMSANPDPTEGRENELPPTMKTISQYACQRRTTLNNHNQRFTDALEILAENYEFKRNDDTALTFMRAISVLKSLPFEVRSLKDTEGLPWIGDEVKGIMEEIIEVGESLEVQAVLNDERYQSFKRFKSVFGVGVKTADKWYRMGLRTLEDVRSSKTLKLTPMQKAGLCYYEDLARGVTKAEADAISLLVQDAVATFDPDALVEIVGGFRRGKPFGHDVDLLITSPGAEKEQEDQLLQKVTNLWKKQGLLLYGRLEWSQFEDGKLPSRKIDALDHFAKCFLILKLYDHKVDKSKWEMPTGSNESEAKSWKAIRVDLVRCPYGGFAFALLGWTGSRMFRRDLRWYATDEKKMMLDNHALYDLTKKEFLEAKSEEEIFAHLGLEYLEPFERNA

SEQ ID NO: 1659 - DNA, 1587 bp, synthetic construct
  misc_feature 1..1587: note = Variant of terminal deoxynucleotidyltransferase
  source 1..1587: mol_type = other DNA
atgcaccatcatcatcatcatggcggtagcggcagccacggcattcgtaccatcgattcggacttcgggaagaaacgccagaagaagatggataaccacgatagttccgccatctatgaaatcaaatttcacgagtttgtgctgttcattctcgaagagaaaatgggtgcgacgcgtcgtacttttctgacagatttagcccgcaagaaagggttccgcgtcgagaatgaactgtcagacagcgttacccacatcgtggcagaaaataattcacgctctgaagtattggcttggctgaaagaacacaagatggagaagaccaagcaattcgaactgctggatattagctggcttatcgaaagcatgaaagttggtaaaccggtggacaccaaggggaaataccagttggcggaatcgggtgagatgagtgcgaacccagatccgacagagggtcgtgaaaacgagctgcctcctactacgaagaccatttctcagtatgcgtgtcaacgccgcaccaccctgaacaaccataatcaacgttttacggacgcactggaaattcttgcggaaaattacgagttcaaacgcaacgatgacactgcgctgacttttatgcgtgctatttccgtgctgaaaagccttccgtttgaggtagttagcctgaaagacacggaaggattgccctggatcggtgatgaagtcaaagggattatggaagaaatcatcgaggtcggtgaatcgctggaagtgcaggccgtgctcaatgatgagcgctatcaaagcttcaaacgctttaagagtgtctttggagtgggggtgaagacagcagacaagtggtaccgtatgggtctgcgcacgctcgaggatgttcgttccagcaagaccctgaagttgaccccgatgcagaaagcgggtctgtgctattatgaagatcttgctcgcggcgttacgaaagccgaagccgacgcgatttctctgctggttcaggatgcagtcgcaactttcgacccggacgcgctggtggagattgtcggtggatttcgtcgtgggaaaccttttggtcacgacgttgatctgcttatcacatctccgggagctgagaaagagcaagaagaccagctcctgcagaaagtgaccaatctgtggaagaaacaagggttgttgctgtacggtcgtctggaatggagtcagtttgaagatgggaaactcccatcccgcaagatcgatgccctggaccattttgcgaaatgctttctgatcctcaaactttatgatcataaagtggacaaaagcaaatgggaaatgccgacgggttcgaacgaaagcgaggccaaaccgtggaaagcaattcgcgtagatctggttcgttgcccctacgatggttttgcgtttgcgttgttgggttggaccggaagccgcatgttccgccgtgatctgcgctggtacgccaccgacgagaagaagatgatgctggacaatcatgcgctgtatgacctgaccaagaaaatctttctcaaagctaaatcggaagaggaaattttcgcacatctggggcttgaatacctggaaccgttcgaacgtaacgca

SEQ ID NO: 1660 - protein, 529 aa, synthetic construct
  REGION 1..529: note = Variant of terminal deoxynucleotidyltransferase
MHHHHHHGGSGSHGIRTIDSDFGKKRQKKMDNHDSSAIYEIKFHEFVLFILEEKMGATRRTFLTDLARKKGFRVENELSDSVTHIVAENNSRSEVLAWLKEHKMEKTKQFELLDISWLIESMKVGKPVDTKGKYQLAESGEMSANPDPTEGRENELPPTTKTISQYACQRRTTLNNHNQRFTDALEILAENYEFKRNDDTALTFMRAISVLKSLPFEVVSLKDTEGLPWIGDEVKGIMEEIIEVGESLEVQAVLNDERYQSFKRFKSVFGVGVKTADKWYRMGLRTLEDVRSSKTLKLTPMQKAGLCYYEDLARGVTKAEADAISLLVQDAVATFDPDALVEIVGGFRRGKPFGHDVDLLITSPGAEKEQEDQLLQKVTNLWKKQGLLLYGRLEWSQFEDGKLPSRKIDALDHFAKCFLILKLYDHKVDKSKWEMPTGSNESEAKPWKAIRVDLVRCPYDGFAFALLGWTGSRMFRRDLRWYATDEKKMMLDNHALYDLTKKIFLKAKSEEEIFAHLGLEYLEPFERNA

SEQ ID NO: 1661 - DNA, 1587 bp, synthetic construct
  misc_feature 1..1587: note = Variant of terminal deoxynucleotidyltransferase
  source 1..1587: mol_type = other DNA
atgcaccatcatcatcatcatggcggtagcggcagccacggcattcgtaccatcgattcggacttcgggaagaaacgccagaagaagatggataaccacgatagttccgccatctatgaaatcaaatttcacgagtttgtgctgttcattctcgaagagaaaatgggtgcgacgcgtcgtacttttctgacagatttagcccgcaagaaagggttccgcgtcgagaatgaactgtcagacagcgttacccacatcgtggcagaaaataattcacgctctgaagtattggcttggctgaaagaacacaagatggagaagaccaagcaattcgaactgctggatattagctggcttatcgaaagcatgaaagttggtaaaccggtggacaccaaggggaaataccagttggcggaatcgggtgagatgagtgcgaacccagatccgacagagggtcgtgaaaacgagctgcctcctactacgaagaccatttctcagtatgcgtgtcaacgccgcaccaccctgaacaaccataatcaacgttttacggacgcactggaaattcttgcggaaaattacgagttcaaacgcaacgatgatactgcgctgacttttatgcgtgctatttccgtgctgaaaagccttccgtttgaggtagttagcctgaaagacacggaaggattgccctggatcggtgatgaagtcaaagggattatggaagaaatcatcgaggtcggtgaatcgctggaagtgcaggccgtgctcaatgatgagcgctatcaaagcttcaaacgctttaagagtgtctttggagtgggggtgaagacagcagacaagtggtaccgtatgggtctgcgcacgctcgaggatgttcgtagtagcaagaccctgaagttgaccccgatgcagaaagcgggtctgtgctattatgaagatcttgctcgcggcgttacgaaagccgaagctgacgcgatttctctgctggttcaggatgcagtcgcaactttcgacccggacgcgctggtggagattgtcggtggatttcgtcgtgggaaaccttttggtcacgacgttgatctgcttatcacatctccgggagctgagaaagagcaagaagaccagctcctgcagaaagtgaccaatctgtggaagaaacaagggttgttgctgtacggtcgtctggaatggagtcagtttgaagatgggaaactcccatcccgtaaggctgatgccctggaccattttgcgaaatgctttctgatcctcaaactttatgatcataaagtggacaaaagcaaatgggaaatgccgacgggttcgaacgaaagcgaggccaaaagttggaaagcaattcgcgtagatctggttcgttgcccctacgatggttttgcgtttgcgttgttgggttggaccggaagccgcatgttccgccgtgatctgcgctggtacgccaccgacgagaagaagatgatgctggacaatcatgcgctgtatgacctgaccaagaaaatctttctcaaagctaaatcggaagaggaaattttcgcacatctggggcttgaatacctggaaccgttcgaacgtaacgca

SEQ ID NO: 1662 - protein, 529 aa, synthetic construct
  REGION 1..529: note = Variant of terminal deoxynucleotidyltransferase
MHHHHHHGGSGSHGIRTIDSDFGKKRQKKMDNHDSSAIYEIKFHEFVLFILEEKMGATRRTFLTDLARKKGFRVENELSDSVTHIVAENNSRSEVLAWLKEHKMEKTKQFELLDISWLIESMKVGKPVDTKGKYQLAESGEMSANPDPTEGRENELPPTTKTISQYACQRRTTLNNHNQRFTDALEILAENYEFKRNDDTALTFMRAISVLKSLPFEVVSLKDTEGLPWIGDEVKGIMEEIIEVGESLEVQAVLNDERYQSFKRFKSVFGVGVKTADKWYRMGLRTLEDVRSSKTLKLTPMQKAGLCYYEDLARGVTKAEADAISLLVQDAVATFDPDALVEIVGGFRRGKPFGHDVDLLITSPGAEKEQEDQLLQKVTNLWKKQGLLLYGRLEWSQFEDGKLPSRKADALDHFAKCFLILKLYDHKVDKSKWEMPTGSNESEAKSWKAIRVDLVRCPYDGFAFALLGWTGSRMFRRDLRWYATDEKKMMLDNHALYDLTKKIFLKAKSEEEIFAHLGLEYLEPFERNA

SEQ ID NO: 1663 - DNA, 1587 bp, synthetic construct
  misc_feature 1..1587: note = Variant of terminal deoxynucleotidyltransferase
  source 1..1587: mol_type = other DNA
atgcaccatcatcatcatcatggcggtagcggcagccacggcattcgtaccatcgattcggacttcgggaagaaacgccagaagaagatggataaccacgatagttccgccatctatgaaatcaaatttcacgagtttgtgctgttcattctcgaagagaaaatgggtgcgacgcgtcgtacttttctgacagatttagcccgcaagaaagggttccgcgtcgagaatgaactgtcagacagcgttacccacatcgtggcagaaaataattcacgctctgaagtattggcttggctgaaagaacacaagatggagaagaccaagcaattcgaactgctggatattagctggcttatcgaaagcatgaaagttggtaaaccggtggacaccaaggggaaataccagttggcggaatcgggtgagatgagtgcgaacccagatccgacagagggtcgtgaaaacgagctgcctcctactacgaagaccatttctcagtatgcgtgtcaacgccgcaccaccctgaacaaccataatcaacgttttacggacgcactggaaattcttgcggaaaattacgagttcaaacgcaacgatgatactgcgctgacttttatgcgtgctatttccgtgctgaaaagccttccgtttgaggtacgtagcctgaaagacacggaaggattgccctggatcggtgatgaagtcaaagggattatggaagaaatcatcgaggtcggtgaatcgctggaagtgcaggccgtgctcaatgatgagcgctatcaaagcttcaaacgctttaagagtgtctttggagtgggggtgaagacagcagacaagtggtaccgtatgggtctgcgcacgctcgaggatgttcgttccagcaagaccctgaagttgaccccgatgcagaaagcgggtctgatgtattatgaagatcttgctcgcggcgttacgaaagccgaagctgacgcgattagcacgctggttcaggatgcagtcgcaactttcgacccggatgcgctggtggagattgtcggtggatttcgtcgtgggaaaccttttggtcacgacgttgatctgcttatcacatctccgggagctgagaaagagcaagaagaccagctcctgcagaaagtgaccaatctgtggaagaaacaagggttgttgctgtacggtcgtctggaatggagtcagtttgaagatgggaaactcccatcccgcaagatcgatgccctggaccattttgcgaaatgctttctgatcctcaaactttatgatcataaagtggacaaaagcaaatgggaaatgccgacgggttcgaacgaaagcgaggccaaaagttggaaagcaattcgcgtagatctggttcgttgcccctacgatggttttgcgtttgcgttgttgggttggaccggaagccgcatgttccgccgtgatctgcgctggtacgccaccgacgagaagaagatgatgctggacaatcatgcgctgtatgacctgaccaagaaaatctttctcaaagctaaatcggaagaggaaattttcgcacatctggggcttgaatacctggaaccgttcgaacgtaacgca

SEQ ID NO: 1664 - protein, 529 aa, synthetic construct
  REGION 1..529: note = Variant of terminal deoxynucleotidyltransferase
MHHHHHHGGSGSHGIRTIDSDFGKKRQKKMDNHDSSAIYEIKFHEFVLFILEEKMGATRRTFLTDLARKKGFRVENELSDSVTHIVAENNSRSEVLAWLKEHKMEKTKQFELLDISWLIESMKVGKPVDTKGKYQLAESGEMSANPDPTEGRENELPPTTKTISQYACQRRTTLNNHNQRFTDALEILAENYEFKRNDDTALTFMRAISVLKSLPFEVRSLKDTEGLPWIGDEVKGIMEEIIEVGESLEVQAVLNDERYQSFKRFKSVFGVGVKTADKWYRMGLRTLEDVRSSKTLKLTPMQKAGLMYYEDLARGVTKAEADAISTLVQDAVATFDPDALVEIVGGFRRGKPFGHDVDLLITSPGAEKEQEDQLLQKVTNLWKKQGLLLYGRLEWSQFEDGKLPSRKIDALDHFAKCFLILKLYDHKVDKSKWEMPTGSNESEAKSWKAIRVDLVRCPYDGFAFALLGWTGSRMFRRDLRWYATDEKKMMLDNHALYDLTKKIFLKAKSEEEIFAHLGLEYLEPFERNA

SEQ ID NO: 1665 - DNA, 1587 bp, synthetic construct
  misc_feature 1..1587: note = Variant of terminal deoxynucleotidyltransferase
  source 1..1587: mol_type = other DNA
atgcaccatcatcatcatcatggcggtagcggcagccacggcattcgtaccatcgattcggacttcgggaagaaacgccagaagaagatggataaccacgatagttccgccatctatgaaatcaaatttcacgagtttgtgctgttcattctcgaagagaaaatgggtgcgacgcgtcgtacttttctgacagatttagcccgcaagaaagggttccgcgtcgagaatgaactgtcagacagcgttacccacatcgtggcagaaaataattcacgctctgaagtattggcttggctgaaagaacacaagatggagaagaccaagcaattcgaactgctggatattagctggcttatcgaaagcatgaaagttggtaaaccggtggacaccaaggggaaataccagttggcggaatcgggtgagatgagtgcgaacccagatccgacagagggtcgtgaaaacgagctgcctcctactacgaagaccatttctcagtatgcgtgtcaacgccgcaccaccctgaacaaccataatcaacgttttacggacgcactggaaattcttgcggaaaattacgagttcaaacgcaacgatgacactgcgctgacttttatgcgtgctatttccgtgctgaaaagccttccgtttgaggtagttagcctgaaagacacggaaggattgccctggatcggtgatgaagtcaaagggattatggaagaaatcatcgaggtcggtgaatcgctggaagtgcaggccgtgctcaatgatgagcgctatcaaagcttcaaacgctttaagagtgtctttggagtgggggtgaagacagcagacaagtggtaccgtatgggtctgcgcacgctcgaggatgttcgtagtagcaagaccctgaagttgaccccgatgcagaaagcgggtctgtgctattatgaagatcttgctcgcggcgttacgaaagccgaagccgacgcgatttctctgctggttcaggatgcagtcgcaactttcgacccggacgcgctggtggagattgtcggtggatttcgtcgtgggaaaccttttggtcacgacgttgatctgcttatcacatctccgggagctgagaaagagcaagaagaccagctcctgcagaaagtgaccaatctgtggaagaaacaagggttgttgctgtacggtcgtctggaatggagtcagtttgaagatgggaaactcccatccggtaaggctgatgccctggaccattttgcgaaatgctttctgatcctcaaactttatgatcataaagtggacaaaagcaaatgggaaatgccgacgggttcgaacgaaagcgaggccaaatcgtggaaagcaattcgcgtagatctggttcgttgcccctacgatggttttgcgtttgcgttgttgggttggaccggaagccgcatgttccgccgtgatctgcgctggtacgccaccgacgagaagaagatgcgtctggacaatcatgcgctgtatgacctgaccaagaaaatctttctcaaagctaaatcggaagaggaaattttcgcacatctggggcttgaatacctggaaccgttcgaacgtaacgca

SEQ ID NO: 1666 - protein, 529 aa, synthetic construct
  REGION 1..529: note = Variant of terminal deoxynucleotidyltransferase
MHHHHHHGGSGSHGIRTIDSDFGKKRQKKMDNHDSSAIYEIKFHEFVLFILEEKMGATRRTFLTDLARKKGFRVENELSDSVTHIVAENNSRSEVLAWLKEHKMEKTKQFELLDISWLIESMKVGKPVDTKGKYQLAESGEMSANPDPTEGRENELPPTTKTISQYACQRRTTLNNHNQRFTDALEILAENYEFKRNDDTALTFMRAISVLKSLPFEVVSLKDTEGLPWIGDEVKGIMEEIIEVGESLEVQAVLNDERYQSFKRFKSVFGVGVKTADKWYRMGLRTLEDVRSSKTLKLTPMQKAGLCYYEDLARGVTKAEADAISLLVQDAVATFDPDALVEIVGGFRRGKPFGHDVDLLITSPGAEKEQEDQLLQKVTNLWKKQGLLLYGRLEWSQFEDGKLPSGKADALDHFAKCFLILKLYDHKVDKSKWEMPTGSNESEAKSWKAIRVDLVRCPYDGFAFALLGWTGSRMFRRDLRWYATDEKKMRLDNHALYDLTKKIFLKAKSEEEIFAHLGLEYLEPFERNA

SEQ ID NO: 1667 - DNA, 1587 bp, synthetic construct
  misc_feature 1..1587: note = Variant of terminal deoxynucleotidyltransferase
  source 1..1587: mol_type = other DNA
atgcaccatcatcatcatcatggcggtagcggcagccacggcattcgtaccatcgattcggacttcgggaagaaacgccagaagaagatggataaccacgatagttccgccatctatgaaatcaaatttcacgagtttgtgctgttcattctcgaagagaaaatgggtgcgacgcgtcgtacttttctgacagatttagcccgcaagaaagggttccgcgtcgagaatgaactgtcagacagcgttacccacatcgtggcagaaaataattcacgctctgaagtattggcttggctgaaagaacacaagatggagaagaccaagcaattcgaactgctggatattagctggcttatcgaaagcatgaaagttggtaaaccggtggacaccaaggggaaataccagttggcggaatcgggtgagatgagtgcgaacccagatccgacagagggtcgtgaaaacgagctgcctcctactacgaagaccatttctcagtatgcgtgtcaacgccgcaccaccctgaacaaccacaatcaacgttttacggacgcactggaaattcttgcggaaaattacgagttcaaacgcaacgatgatactgcgctgacttttatgcgtgctatttccgtgctgaaaagccttccgtttgaggtagttagcctgaaagacacggaaggattgccctggatcggtgatgaagtcaaagggattatggaagaaatcatcgaggtcggtgaatcgctggaagtgcagaaagtgctcaatgatgagcgctatcaaagcttcaaacgctttaagagtgtctttggagtgggggtgaagacagcagacaagtggtaccgtatgggtctgcgcacgctcgaggatgttcgttccagcaagaccctgaagttgaccccgatgcagaaagcgggtctgtgctattatgaagatcttgctcgcggcgttacgaaagccgaagctgacgcgatttctctgctggttcaggatgcagtccataccttcgacccggatgcgctggtggagattgtcggtggatttcgtcgtgggaaaccttttggtcacgacgttgatctgcttatcacatctccgggagctgagaaagagcaagaagaccaactcctgcagaaagtgaccaatctgtggaagaaacaagggttgttgctgtacggtcgtctggaatggagtcagtttgaagatgggaaactcccatcccgcaagatcgatgccctggaccattttgcgaaatgctttctgatcctcaaactttatgatcataaagtggacaaaagcaaatgggaaatgccgacgggttcgaacgaaagcgaggccaaaagttggaaagcaattcgcgtagatctggttcgttgcccctacgatggttttgcgtttgcgttgttgggttggaccggaagccgcatgttccgccgtgatctgcgctggtacgccacggacgagaagaagatgatgctggacaatcatgcgctgtatgacctgaccaagaaaatctttctcaaagctaaatcggaagaggaaattttcgcacatctggggcttgaatacctggaaccgttcgaacgtaacgca

SEQ ID NO: 1668 - protein, 529 aa, synthetic construct
  REGION 1..529: note = Variant of terminal deoxynucleotidyltransferase
MHHHHHHGGSGSHGIRTIDSDFGKKRQKKMDNHDSSAIYEIKFHEFVLFILEEKMGATRRTFLTDLARKKGFRVENELSDSVTHIVAENNSRSEVLAWLKEHKMEKTKQFELLDISWLIESMKVGKPVDTKGKYQLAESGEMSANPDPTEGRENELPPTTKTISQYACQRRTTLNNHNQRFTDALEILAENYEFKRNDDTALTFMRAISVLKSLPFEVVSLKDTEGLPWIGDEVKGIMEEIIEVGESLEVQKVLNDERYQSFKRFKSVFGVGVKTADKWYRMGLRTLEDVRSSKTLKLTPMQKAGLCYYEDLARGVTKAEADAISLLVQDAVHTFDPDALVEIVGGFRRGKPFGHDVDLLITSPGAEKEQEDQLLQKVTNLWKKQGLLLYGRLEWSQFEDGKLPSRKIDALDHFAKCFLILKLYDHKVDKSKWEMPTGSNESEAKSWKAIRVDLVRCPYDGFAFALLGWTGSRMFRRDLRWYATDEKKMMLDNHALYDLTKKIFLKAKSEEEIFAHLGLEYLEPFERNA

SEQ ID NO: 1669 - DNA, 1587 bp, synthetic construct
  misc_feature 1..1587: note = Variant of terminal deoxynucleotidyltransferase
  source 1..1587: mol_type = other DNA
atgcaccatcatcatcatcatggcggtagcggcagccacggcattcgtaccatcgattcggacttcgggaagaaacgccagaagaagatggataaccacgatagttccgccatctatgaaatcaaatttcacgagtttgtgctgttcattctcgaagagaaaatgggtgcgacgcgtcgtacttttctgacagatttagcccgcaagaaagggttccgcgtcgagaatgaactgtcagacagcgttacccacatcgtggcagaaaataattcacgctctgaagtattggcttggctgaaagaacacaagatggagaagaccaagcaattcgaactgctggatattagctggcttatcgaaagcatgaaagttggtaaaccggtggacaccaaggggaaataccagttggcggaatcgggtgagatgagtgcgaacccagatccgacagagggtcgtgaaaacgagctgcctcctactacgaagaccatttctcagtatgcgtgtcaacgccgcaccaccctgaacaaccacaatcaacgttttacggacgcactggaaattcttgcggaaaattacgagttcaaacgcaacgatgatactgcgctgacttttatgcgtgctatttccgtgctgaaaagccttccgtttgaggtagttagcctgaaagacacggaaggattgccctggatcggtgatgaagtcaaagggattatggaagaaatcatcgaggtcggtgaatcgctggaagtgcagaaagtgctcaatgatgagcgctatcaaagcttcaaacgctttaagagtgtctttggagtgggggtgaagacagcagacaagtggtaccgtatgggtctgcgcacgctcgaggatgttcgttccagcaagaccctgaagttgaccccgatgcagaaagcgggtctgtgctattatgaagatcttgctcgcggcgttacgaaagccgaagctgacgcgatttctctgctggttcaggatgcagtcgcaactttcgacccggatgcgctggtggagattgtcggtggatttcgtcgtgggaaaccttttggtcacgacgttgatctgcttatcacatctccgggagctgagaaagagcaagaagaccaactcctgcagaaagtgaccaatctgtggaagaaacaagggttgttgctgtacggtcgtctggaatggagtcagtttgaagatgggaaactcccatcccgcaagatcgatgccctggaccattttgcgaaatgctttctgatcctcaaactttatgatcataaagtggacaaaagcaaatgggaaatgccgacgggttcgaacgaaagcgaggccaaaagttggaaagcaattcgcgtagatctggttcgttgcccctacgatggttttgcgtttgcgttgttgggttggaccggaagccgcatgttccgccgtgatctgcgctggtacgccaccgacgagaagaagatgatgctggacaatcatgcgctgtatgacctgaccaagaaaatctttctcaaagctaaatcggaagaggaaattttcgcacatctggggcttgaatacctggaaccgttcgaacgtaacgca

SEQ ID NO: 1670 - protein, 529 aa, synthetic construct
  REGION 1..529: note = Variant of terminal deoxynucleotidyltransferase
MHHHHHHGGSGSHGIRTIDSDFGKKRQKKMDNHDSSAIYEIKFHEFVLFILEEKMGATRRTFLTDLARKKGFRVENELSDSVTHIVAENNSRSEVLAWLKEHKMEKTKQFELLDISWLIESMKVGKPVDTKGKYQLAESGEMSANPDPTEGRENELPPTTKTISQYACQRRTTLNNHNQRFTDALEILAENYEFKRNDDTALTFMRAISVLKSLPFEVVSLKDTEGLPWIGDEVKGIMEEIIEVGESLEVQKVLNDERYQSFKRFKSVFGVGVKTADKWYRMGLRTLEDVRSSKTLKLTPMQKAGLCYYEDLARGVTKAEADAISLLVQDAVATFDPDALVEIVGGFRRGKPFGHDVDLLITSPGAEKEQEDQLLQKVTNLWKKQGLLLYGRLEWSQFEDGKLPSRKIDALDHFAKCFLILKLYDHKVDKSKWEMPTGSNESEAKSWKAIRVDLVRCPYDGFAFALLGWTGSRMFRRDLRWYATDEKKMMLDNHALYDLTKKIFLKAKSEEEIFAHLGLEYLEPFERNA

SEQ ID NO: 1671 - DNA, 1587 bp, synthetic construct
  misc_feature 1..1587: note = Variant of terminal deoxynucleotidyltransferase
  source 1..1587: mol_type = other DNA
atgcaccatcatcatcatcatggcggtagcggcagccacggcattcgtaccatcgattcggacttcgggaagaaacgccagaagaagatggataaccacgatagttccgccatctatgaaatcaaatttcacgagtttgtgctgttcattctcgaagagaaaatgggtgcgacgcgtcgtacttttctgacagatttagcccgcaagaaagggttccgcgtcgagaatgaactgtcagacagcgttacccacatcgtggcagaaaataattcacgctctgaagtattggcttggctgaaagaacacaagatggagaagaccaagcaattcgaactgctggatattagctggcttatcgaaagcatgaaagttggtaaaccggtggacaccaaggggaaataccagttggcggaatcgggtgagatgagtgcgaacccagatccgacagagggtcgtgaaaacgagctgcctcctactacgaagaccatttctcagtatgcgtgtcaacgccgcaccaccctgaacaaccataatcaacgttttacggacgcactggaaattcttgcggaaaattacgagttcaaacgcaacgatgatactgcgctgacttttatgcgtgctatttccgtgctgaaaagccttccgtttgaggtagttagcctgaaagacacggaaggattgccctggatcggtgatgaagtcaaagggattatggaagaaatcatcgaggtcggtgaatcgctggaagtgcaggccgtgctcaatgatgagcgctatcaaagcttcaaacgctttaagagtgtctttggagtgggggtgaagacagcagacaagtggtaccgtatgggtctgcgcacgctcgaggatgttcgttccagcaagaccctgaagttgaccccgatgcagaaagcgggtctgtgctattatgaagatcttgctcgcggcgttacgaaagccgaagctgacgcgatttctctgctggttcaggatgcagtcgcaactttcgacccggatgcgctggtggagattgtcggtggatttcgtcgtgggaaaccttttggtcacgacgttgatctgcttatcacatctccgggagctgagaaagagcaagaagaccagctcctgcagaaagtgaccaatctgtggaagaaacaagggttgttgctgtacggtcgtctggaatggagtcagtttgaagatgggaaactcccatcccgcaagatcgatgccctggaccattttgcgaaatgctttctgatcctcaaactttatgatcataaagtggacaaaagcaaatgggaaatgccgacgggttcgaacgaaagcgaggccaaaagttggaaagcaattcgcgtagatctggttcgttgcccctacgatggttttgcgtttgcgttgttgggttggaccggaagccgcatgttccgccgtgatctgcgctggtacgccgaggacgagaagaagatgatgctggacaatcatgcgctgtatgacctgaccaagaaaatctttctcaaagctaaatcggaagaggaaattttcgcacatctggggcttgaatacctggaaccgttcgaacgtaacgca

SEQ ID NO: 1672 - protein, 529 aa, synthetic construct
  REGION 1..529: note = Variant of terminal deoxynucleotidyltransferase
MHHHHHHGGSGSHGIRTIDSDFGKKRQKKMDNHDSSAIYEIKFHEFVLFILEEKMGATRRTFLTDLARKKGFRVENELSDSVTHIVAENNSRSEVLAWLKEHKMEKTKQFELLDISWLIESMKVGKPVDTKGKYQLAESGEMSANPDPTEGRENELPPTTKTISQYACQRRTTLNNHNQRFTDALEILAENYEFKRNDDTALTFMRAISVLKSLPFEVVSLKDTEGLPWIGDEVKGIMEEIIEVGESLEVQAVLNDERYQSFKRFKSVFGVGVKTADKWYRMGLRTLEDVRSSKTLKLTPMQKAGLCYYEDLARGVTKAEADAISLLVQDAVATFDPDALVEIVGGFRRGKPFGHDVDLLITSPGAEKEQEDQLLQKVTNLWKKQGLLLYGRLEWSQFEDGKLPSRKIDALDHFAKCFLILKLYDHKVDKSKWEMPTGSNESEAKSWKAIRVDLVRCPYDGFAFALLGWTGSRMFRRDLRWYAEDEKKMMLDNHALYDLTKKIFLKAKSEEEIFAHLGLEYLEPFERNA

SEQ ID NO: 1673 - DNA, 1587 bp, synthetic construct
  misc_feature 1..1587: note = Variant of terminal deoxynucleotidyltransferase
  source 1..1587: mol_type = other DNA
atgcaccatcatcatcatcatggcggtagcggcagccacggcattcgtaccatcgattcggacttcgggaagaaacgccagaagaagatggataaccacgatagttccgccatctatgaaatcaaatttcacgagtttgtgctgttcattctcgaagagaaaatgggtgcgacgcgtcgtacttttctgacagatttagcccgcaagaaagggttccgcgtcgagaatgaactgtcagacagcgttacccacatcgtggcagaaaataattcacgctctgaagtattggcttggctgaaagaacacaagatggagaagaccaagcaattcgaactgctggatattagctggcttatcgaaagcatgaaagttggtaaaccggtggacaccaaggggaaataccagttggcggaatcgggtgagatgagtgcgaacccagatccgacagagggtcgtgaaaacgagctgcctcctactacgaagaccatttctcagtatgcgtgtcaacgccgcaccaccctgaacaaccataataaacgttttacggacgcactggaaattcttgcggaaaattacgagttcaaacgcaacgatgatactgcgctgacttttatgcgtgctatttccgtgctgaaaagccttccgtttgaggtagttagcctgaaagacacggaaggattgccctggatcggtgatgaagtcaaagggattatggaagaaatcatcgaggtcggtgaatcgctggaagtgcaggccgtgctcaatgatgagcgctatcaaagcttcaaacgctttaagagtgtctttggagtgggggtgaagacagcagacaagtggtaccgtatgggtctgcgcacgctcgaggatgttcgttccagcaagaccctgaagttgaccccgatgcagaaagcgggtctgtgctattatgaagatcttgctcgcggcgttacgaaagccgaagctgacgcgatttctctgctggttcaggatgcagtcgcaactttcgacccggatgcgctggtggagattgtcggtggatttcgtcgtgggaaaccttttggtcacgacgttgatctgcttatcacatctccgggagctgagaaagagcaagaagaccagctcctgcagaaagtgaccaatctgtggaagaaacaagggttgttgctgtacggtcgtctggaatggagtcagtttgaagatgggaaactcccatcccgcaagatcgatgccctggaccattttgcgaaatgctttctgatcctcaaactttatgatcataaagtggacaaaagcaaatgggaaatgccgacgggttcgaacgaaagcgaggccaaaagttggaaagcaattcgcgtagatctggttcgttgcccctacgatggttttgcgtttgcgttgttgggttggaccggaagccgcatgttccgccgtgatctgcgctggtacgccaccgacgagaagaagatgatgctggacaatcatgcgctgtatgacctgaccaagaaaatctttctcaaagctaaatcggaagaggaaattttcgcacatctggggcttgaatacctggaaccgttcgaacgtaacgca

SEQ ID NO: 1674 - protein, 529 aa, synthetic construct
  REGION 1..529: note = Variant of terminal deoxynucleotidyltransferase
MHHHHHHGGSGSHGIRTIDSDFGKKRQKKMDNHDSSAIYEIKFHEFVLFILEEKMGATRRTFLTDLARKKGFRVENELSDSVTHIVAENNSRSEVLAWLKEHKMEKTKQFELLDISWLIESMKVGKPVDTKGKYQLAESGEMSANPDPTEGRENELPPTTKTISQYACQRRTTLNNHNKRFTDALEILAENYEFKRNDDTALTFMRAISVLKSLPFEVVSLKDTEGLPWIGDEVKGIMEEIIEVGESLEVQAVLNDERYQSFKRFKSVFGVGVKTADKWYRMGLRTLEDVRSSKTLKLTPMQKAGLCYYEDLARGVTKAEADAISLLVQDAVATFDPDALVEIVGGFRRGKPFGHDVDLLITSPGAEKEQEDQLLQKVTNLWKKQGLLLYGRLEWSQFEDGKLPSRKIDALDHFAKCFLILKLYDHKVDKSKWEMPTGSNESEAKSWKAIRVDLVRCPYDGFAFALLGWTGSRMFRRDLRWYATDEKKMMLDNHALYDLTKKIFLKAKSEEEIFAHLGLEYLEPFERNA

SEQ ID NO: 1675 - DNA, 1587 bp, synthetic construct
  misc_feature 1..1587: note = Variant of terminal deoxynucleotidyltransferase
  source 1..1587: mol_type = other DNA
atgcaccatcatcatcatcatggcggtagcggcagccacggcattcgtaccatcgattcggacttcgggaagaaacgccagaagaagatggataaccacgatagttccgccatctatgaaatcaaatttcacgagtttgtgctgttcattctcgaagagaaaatgggtgcgacgcgtcgtacttttctgacagatttagcccgcaagaaagggttccgcgtcgagaatgaactgtcagacagcgttacccacatcgtggcagaaaataattcacgctctgaagtattggcttggctgaaagaacacaagatggagaagaccaagcaattcgaactgctggatattagctggcttatcgaaagcatgaaagttggtaaaccggtggacaccaaggggaaataccagttggcggaatcgggtgagatgagtgcgaacccagatccgacagagggtcgtgaaaacgagctgcctcctactacgaagaccatttctcagtatgcgtgtcaacgccgcaccaccctgaacaaccataatcaacgttttacggacgcactggaaattcttgcggaaaattacgagttcaaacgcaacgatgatactgcgctgacttttatgcgtgctatttccgtgctgaaaagccttccgtttgaggtagttagcctgaaagacacggaaggattgccctggatcggtgatgaagtcaaagggattatggaagaaatcatcgaggtcggtgaatcgctggaagtgcaggccgtgctcaatgatgagcgctatcaaagcttcaaacgctttaagagtgtctttggagtgggggtgaagacagcagacaagtggtaccgtatgggtctgcgcacgctcgaggatgttcgttccagcaagaccctgaagttgaccccgatgcagaaagcgggtctgtgctattatgaagatcttgctcgcggcgttacgaaagccgaagctgacgcgatttctctgctggttcaggatgcagtcgcaactttcgacccggatgcgctggtggagattgtcggtggatttcgtcgtgggaaacctcaaggtcacgacgttgatctgcttatcacatctccgggagctgagaaagagcaagaagaccagctcctgcagaaagtgaccaatctgtggaagaaacaagggttgttgctgtacggtcgtctggaatggagtcagtttgaagatgggaaactcccatcccgcaagatcgatgccctggaccattttgcgaaatgctttctgatcctcaaactttatgatcataaagtggacaaaagcaaatgggaaatgccgacgggttcgaacgaaagcgaggccaaaagttggaaagcaattcgcgtagatctggttcgttgcccctacgatggttttgcgtttgcgttgttgggttggaccggaagccgcatgttccgccgtgatctgcgctggtacgccaccgacgagaagaagatgatgctggacaatcatgcgctgtatgacctgaccaagaaaatctttctcaaagctaaatcggaagaggaaattttcgcacatctggggcttgaatacctggaaccgttcgaacgtaacgca

SEQ ID NO: 1676 - protein, 529 aa, synthetic construct
  REGION 1..529: note = Variant of terminal deoxynucleotidyltransferase
MHHHHHHGGSGSHGIRTIDSDFGKKRQKKMDNHDSSAIYEIKFHEFVLFILEEKMGATRRTFLTDLARKKGFRVENELSDSVTHIVAENNSRSEVLAWLKEHKMEKTKQFELLDISWLIESMKVGKPVDTKGKYQLAESGEMSANPDPTEGRENELPPTTKTISQYACQRRTTLNNHNQRFTDALEILAENYEFKRNDDTALTFMRAISVLKSLPFEVVSLKDTEGLPWIGDEVKGIMEEIIEVGESLEVQAVLNDERYQSFKRFKSVFGVGVKTADKWYRMGLRTLEDVRSSKTLKLTPMQKAGLCYYEDLARGVTKAEADAISLLVQDAVATFDPDALVEIVGGFRRGKPQGHDVDLLITSPGAEKEQEDQLLQKVTNLWKKQGLLLYGRLEWSQFEDGKLPSRKIDALDHFAKCFLILKLYDHKVDKSKWEMPTGSNESEAKSWKAIRVDLVRCPYDGFAFALLGWTGSRMFRRDLRWYATDEKKMMLDNHALYDLTKKIFLKAKSEEEIFAHLGLEYLEPFERNA

SEQ ID NO: 1677 - DNA, 1587 bp, synthetic construct
  misc_feature 1..1587: note = Variant of terminal deoxynucleotidyltransferase
  source 1..1587: mol_type = other DNA
atgcaccatcatcatcatcatggcggtagcggcagccacggcattcgtaccatcgattcggacttcgggaagaaacgccagaagaagatggataaccacgatagttccgccatctatgaaatcaaatttcacgagtttgtgctgttcattctcgaagagaaaatgggtgcgacgcgtcgtacttttctgacagatttagcccgcaagaaagggttccgcgtcgagaatgaactgtcagacagcgttacccacatcgtggcagaaaataattcacgctctgaagtattggcttggctgaaagaacacaagatggagaagaccaagcaattcgaactgctggatattagctggcttatcgaaagcatgaaagttggtaaaccggtggacaccaaggggaaataccagttggcggaatcgggtgagatgagtgcgaacccagatccgacagagggtcgtgaaaacgagctgcctcctactacgaagaccatttctcagtatgcgtgtcaacgccgcaccaccctgaacaaccataatcaacgttttacggacgcactggaaattcttgcggaaaattacgagttcaaacgcaacgatgatactgcgctgacttttatgcgtgctatttccgtgctgaaaagccttccgtttgaggtagttagcctgaaagacacggaaggattgccctggatcggtgatgaagtcaaagggattatggaagaaatcatcgaggtcggtgaatcgctggaagtgcaggccgtgctcaatgatgagcgctatcaaagcttcaaacgctttaagagtgtctttggagtgggggtgaagacagcagacaagtggtaccgtatgggtctgcgcacgctcgaggatgttcgttccagcaagaccctgaagttgaccccgatgcagaaagcgggtctgtgctattatgaagatcttgctcgcggcgttacgaaagccgaagctgacgcgatttctctgctggttcaggatgcagtcgcaactttcgacccggatgcgctggtggagattgtcggtggatttcgtcgtgggaaaccttttggtcacgacgttgatctgcttatcacatctccgggagctgagaaagagcaagaagaccagctcctgcagaaagtgaccaatctgctgaagaaacaagggttgttgctgtacggtcgtctggaatggagtcagtttgaagatgggaaactcccatcccgcaagatcgatgccctggaccattttgcgaaatgctttctgatcctcaaactttatgatcataaagtggacaaaagcaaatgggaaatgccgacgggttcgaacgaaagcgaggccaaaagttggaaagcaattcgcgtagatctggttcgttgcccctacgatggttttgcgtttgcgttgttgggttggaccggaagccgcatgttccgccgtgatctgcgctggtacgccaccgacgagaagaagatgatgctggacaatcatgcgctgtatgacctgaccaagaaaatctttctcaaagctaaatcggaagaggaaattttcgcacatctggggcttgaatacctggaaccgttcgaacgtaacgca

SEQ ID NO: 1678 - protein, 529 aa, synthetic construct
  REGION 1..529: note = Variant of terminal deoxynucleotidyltransferase
MHHHHHHGGSGSHGIRTIDSDFGKKRQKKMDNHDSSAIYEIKFHEFVLFILEEKMGATRRTFLTDLARKKGFRVENELSDSVTHIVAENNSRSEVLAWLKEHKMEKTKQFELLDISWLIESMKVGKPVDTKGKYQLAESGEMSANPDPTEGRENELPPTTKTISQYACQRRTTLNNHNQRFTDALEILAENYEFKRNDDTALTFMRAISVLKSLPFEVVSLKDTEGLPWIGDEVKGIMEEIIEVGESLEVQAVLNDERYQSFKRFKSVFGVGVKTADKWYRMGLRTLEDVRSSKTLKLTPMQKAGLCYYEDLARGVTKAEADAISLLVQDAVATFDPDALVEIVGGFRRGKPFGHDVDLLITSPGAEKEQEDQLLQKVTNLLKKQGLLLYGRLEWSQFEDGKLPSRKIDALDHFAKCFLILKLYDHKVDKSKWEMPTGSNESEAKSWKAIRVDLVRCPYDGFAFALLGWTGSRMFRRDLRWYATDEKKMMLDNHALYDLTKKIFLKAKSEEEIFAHLGLEYLEPFERNA

SEQ ID NO: 1679 - DNA, 1587 bp, synthetic construct
  misc_feature 1..1587: note = Variant of terminal deoxynucleotidyltransferase
  source 1..1587: mol_type = other DNA
atgcaccatcatcatcatcatggcggtagcggcagccacggcattcgtaccatcgattcggacttcgggaagaaacgccagaagaagatggataaccacgatagttccgccatctatgaaatcaaatttcacgagtttgtgctgttcattctcgaagagaaaatgggtgcgacgcgtcgtacttttctgacagatttagcccgcaagaaagggttccgcgtcgagaatgaactgtcagacagcgttacccacatcgtggcagaaaataattcacgctctgaagtattggcttggctgaaagaacacaagatggagaagaccaagcaattcgaactgctggatattagctggcttatcgaaagcatgaaagttggtaaaccggtggacaccaaggggaaataccagttggcggaatcgggtgagatgagtgcgaacccagatccgacagagggtcgtgaaaacgagctgcctcctactacgaagaccatttctcagtatgcgtgtcaacgccgcaccaccctgaacaaccataatcaacgttttacggacgcactggaaattcttgcggaaaattacgagttcaaacgcaacgatgatactgcgctgacttttatgcgtgctatttccgtgctgaaaagccttccgtttgaggtagttagcctgaaagacacggaaggattgccctggatcggtgatgaagtcaaagggattatggaagaaatcatcgaggtcggtgaatcgctggaagtgcaggccgtgctcaatgatgagcgctatcaaagcttcaaacgctttaagagtgtctttggagtgggggtgaagacagcagacaagtggtaccgtatgggtctgcgcacgctcgaggatgttcgttccagcaagaccctgaagttgaccccgatgcagaaagcgggtctgctgtattatgaagatcttgctcgcggcgttacgaaagccgaagctgacgcgatttctctgctggttcaggatgcagtcgcaactttcgacccggatgcgctggtggagattgtcggtggatttcgtcgtgggaaaccttttggtcacgacgttgatctgcttatcacatctccgggagctgagaaagagcaagaagaccagctcctgcagaaagtgaccaatctgtggaagaaacaagggttgttgctgtacggtcgtctggaatggagtcagtttgaagatgggaaactcccatcccgcaagatcgatgccctggaccattttgcgaaatgctttctgatcctcaaactttatgatcataaagtggacaaaagcaaatgggaaatgccgacgggttcgaacgaaagcgaggccaaaagttggaaagcaattcgcgtagatctggttcgttgcccctacgatggttttgcgtttgcgttgttgggttggaccggaagccgcatgttccgccgtgatctgcgctggtacgccaccgacgagaagaagatgatgctggacaatcatgcgctgtatgacctgaccaagaaaatctttctcaaagctaaatcggaagaggaaattttcgcacatctggggcttgaatacctggaaccgttcgaacgtaacgca

SEQ ID NO: 1680 - protein, 529 aa, synthetic construct
  REGION 1..529: note = Variant of terminal deoxynucleotidyltransferase
MHHHHHHGGSGSHGIRTIDSDFGKKRQKKMDNHDSSAIYEIKFHEFVLFILEEKMGATRRTFLTDLARKKGFRVENELSDSVTHIVAENNSRSEVLAWLKEHKMEKTKQFELLDISWLIESMKVGKPVDTKGKYQLAESGEMSANPDPTEGRENELPPTTKTISQYACQRRTTLNNHNQRFTDALEILAENYEFKRNDDTALTFMRAISVLKSLPFEVVSLKDTEGLPWIGDEVKGIMEEIIEVGESLEVQAVLNDERYQSFKRFKSVFGVGVKTADKWYRMGLRTLEDVRSSKTLKLTPMQKAGLLYYEDLARGVTKAEADAISLLVQDAVATFDPDALVEIVGGFRRGKPFGHDVDLLITSPGAEKEQEDQLLQKVTNLWKKQGLLLYGRLEWSQFEDGKLPSRKIDALDHFAKCFLILKLYDHKVDKSKWEMPTGSNESEAKSWKAIRVDLVRCPYDGFAFALLGWTGSRMFRRDLRWYATDEKKMMLDNHALYDLTKKIFLKAKSEEEIFAHLGLEYLEPFERNA

SEQ ID NO: 1681 - DNA, 1587 bp, synthetic construct
  misc_feature 1..1587: note = Variant of terminal deoxynucleotidyltransferase
  source 1..1587: mol_type = other DNA
atgcaccatcatcatcatcatggcggtagcggcagccacggcattcgtaccatcgattcggacttcgggaagaaacgccagaagaagatggataaccacgatagttccgccatctatgaaatcaaatttcacgagtttgtgctgttcattctcgaagagaaaatgggtgcgacgcgtcgtacttttctgacagatttagcccgcaagaaagggttccgcgtcgagaatgaactgtcagacagcgttacccacatcgtggcagaaaataattcacgctctgaagtattggcttggctgaaagaacacaagatggagaagaccaagcaattcgaactgctggatattagctggcttatcgaaagcatgaaagttggtaaaccggtggacaccaaggggaaataccagttggcggaatcgggtgagatgagtgcgaacccagatccgacagagggtcgtgaaaacgagctgcctcctactacgaagaccatttctcagtatgcgtgtcaacgccgcaccaccctgaacaaccataatcaacgttttacggacgcactggaaattcttgcggaaaattacgagttcaaacgcaacgatgatactgcgctgacttttcgccgtgctatttccgtgctgaaaagccttccgtttgaggtagttagcctgaaagacacggaaggattgccctggatcggtgatgaagtcaaagggattatggaagaaatcatcgaggtcggtgaatcgctggaagtgcaggccgtgctcaatgatgagcgctatcaaagcttcaaacgctttaagagtgtctttggagtgggggtgaagacagcagacaagtggtaccgtatgggtctgcgcacgctcgaggatgttcgttccagcaagaccctgaagttgaccccgatgcagaaagcgggtctgtgctattatgaagatcttgctcgcggcgttacgaaagccgaagctgacgcgatttctctgctggttcaggatgcagtcgcaactttcgacccggatgcgctggtggagattgtcggtggatttcgtcgtgggaaaccttttggtcacgacgttgatctgcttatcacatctccgggagctgagaaagagcaagaagaccagctcctgcagaaagtgaccaatctgtggaagaaacaagggttgttgctgtacggtcgtctggaatggagtcagtttgaagatgggaaactcccatcccgcaagatcgatgccctggaccattttgcgaaatgctttctgatcctcaaactttatgatcataaagtggacaaaagcaaatgggaaatgccgacgggttcgaacgaaagcgaggccaaaagttggaaagcaattcgcgtagatctggttcgttgcccctacgatggttttgcgtttgcgttgttgggttggaccggaagccgcatgttccgccgtgatctgcgctggtacgccaccgacgagaagaagatgatgctggacaatcatgcgctgtatgacctgaccaagaaaatctttctcaaagctaaatcggaagaggaaattttcgcacatctggggcttgaatacctggaaccgttcgaacgtaacgca

SEQ ID NO: 1682 - protein, 529 aa, synthetic construct
  REGION 1..529: note = Variant of terminal deoxynucleotidyltransferase
MHHHHHHGGSGSHGIRTIDSDFGKKRQKKMDNHDSSAIYEIKFHEFVLFILEEKMGATRRTFLTDLARKKGFRVENELSDSVTHIVAENNSRSEVLAWLKEHKMEKTKQFELLDISWLIESMKVGKPVDTKGKYQLAESGEMSANPDPTEGRENELPPTTKTISQYACQRRTTLNNHNQRFTDALEILAENYEFKRNDDTALTFRRAISVLKSLPFEVVSLKDTEGLPWIGDEVKGIMEEIIEVGESLEVQAVLNDERYQSFKRFKSVFGVGVKTADKWYRMGLRTLEDVRSSKTLKLTPMQKAGLCYYEDLARGVTKAEADAISLLVQDAVATFDPDALVEIVGGFRRGKPFGHDVDLLITSPGAEKEQEDQLLQKVTNLWKKQGLLLYGRLEWSQFEDGKLPSRKIDALDHFAKCFLILKLYDHKVDKSKWEMPTGSNESEAKSWKAIRVDLVRCPYDGFAFALLGWTGSRMFRRDLRWYATDEKKMMLDNHALYDLTKKIFLKAKSEEEIFAHLGLEYLEPFERNA

SEQ ID NO: 1683 - DNA, 1587 bp, synthetic construct
  misc_feature 1..1587: note = Variant of terminal deoxynucleotidyltransferase
  source 1..1587: mol_type = other DNA
atgcaccatcatcatcatcatggcggtagcggcagccacggcattcgtaccatcgattcggacttcgggaagaaacgccagaagaagatggataaccacgatagttccgccatctatgaaatcaaatttcacgagtttgtgctgttcattctcgaagagaaaatgggtgcgacgcgtcgtacttttctgacagatttagcccgcaagaaagggttccgcgtcgagaatgaactgtcagacagcgttacccacatcgtggcagaaaataattcacgctctgaagtattggcttggctgaaagaacacaagatggagaagaccaagcaattcgaactgctggatattagctggcttatcgaaagcatgaaagttggtaaaccggtggacaccaaggggaaataccagttggcggaatcgggtgagatgagtgcgaacccagatccgacagagggtcgtgaaaacgagctgcctcctactacgaagaccatttctcagtatgcgtgtcaacgccgcaccaccctgaacaaccataatcaacgttttacggacgcactggaaattcttgcggaaaattacgagttcaaacgcaacgatgatactgcgctgacttttatgcgtgctatttccgtgctgaaaagccttccgtttgaggtagttagcctgaaagacacggaaggattgccctggatcggtgatgaagtcaaagggattatggaagaaatcatcgaggtcggtgaatcgctggaagtgcaggccgtgctcaatgatgagcgctatcaaagcttcaaacgctttaagagtgtctttggagtgggggtgaagacagcagacaagtggtaccgtatgggtctgcgcacgctcgaggatgttcgttccagcaagaccctgaagttgaccccgatgcagaaagcgggtctgtgctattatgaagatcttgctcgcggcgttacgaaagccgaagctgacgcgatttctctgctggttcaggatgcagtcgcaactttcgacccggatgcgctggtggagattgtcggtggatttcgtcgtgggaaaccttttggtcacgacgttgatctgcttatcacatctccgggagctgagaaagagcaagaagaccagctcctgcagaaagtgaccaatctgtggaagaaacaagggttgttgctgtacggtcgtctggaatggagtcagtttgaagatgggcaactcccatcccgcaagatcgatgccctggaccattttgcgaaatgctttctgatcctcaaactttatgatcataaagtggacaaaagcaaatgggaaatgccgacgggttcgaacgaaagcgaggccaaaagttggaaagcaattcgcgtagatctggttcgttgcccctacgatggttttgcgtttgcgttgttgggttggaccggaagccgcatgttccgccgtgatctgcgctggtacgccaccgacgagaagaagatgatgctggacaatcatgcgctgtatgacctgaccaagaaaatctttctcaaagctaaatcggaagaggaaattttcgcacatctggggcttgaatacctggaaccgttcgaacgtaacgca

SEQ ID NO: 1684 - protein, 529 aa, synthetic construct
  REGION 1..529: note = Variant of terminal deoxynucleotidyltransferase
MHHHHHHGGSGSHGIRTIDSDFGKKRQKKMDNHDSSAIYEIKFHEFVLFILEEKMGATRRTFLTDLARKKGFRVENELSDSVTHIVAENNSRSEVLAWLKEHKMEKTKQFELLDISWLIESMKVGKPVDTKGKYQLAESGEMSANPDPTEGRENELPPTTKTISQYACQRRTTLNNHNQRFTDALEILAENYEFKRNDDTALTFMRAISVLKSLPFEVVSLKDTEGLPWIGDEVKGIMEEIIEVGESLEVQAVLNDERYQSFKRFKSVFGVGVKTADKWYRMGLRTLEDVRSSKTLKLTPMQKAGLCYYEDLARGVTKAEADAISLLVQDAVATFDPDALVEIVGGFRRGKPFGHDVDLLITSPGAEKEQEDQLLQKVTNLWKKQGLLLYGRLEWSQFEDGQLPSRKIDALDHFAKCFLILKLYDHKVDKSKWEMPTGSNESEAKSWKAIRVDLVRCPYDGFAFALLGWTGSRMFRRDLRWYATDEKKMMLDNHALYDLTKKIFLKAKSEEEIFAHLGLEYLEPFERNA

SEQ ID NO: 1685 - DNA, 1587 bp, synthetic construct
  misc_feature 1..1587: note = Variant of terminal deoxynucleotidyltransferase
  source 1..1587: mol_type = other DNA
atgcaccatcatcatcatcatggcggtagcggcagccacggcattcgtaccatcgattcggacttcgggaagaaacgccagaagaagatggataaccacgatagttccgccatctatgaaatcaaatttcacgagtttgtgctgttcattctcgaagagaaaatgggtgcgacgcgtcgtacttttctgacagatttagcccgcaagaaagggttccgcgtcgagaatgaactgtcagacagcgttacccacatcgtggcagaaaataattcacgctctgaagtattggcttggctgaaagaacacaagatggagaagaccaagcaattcgaactgctggatattagctggcttatcgaaagcatgaaagttggtaaaccggtggacaccaaggggaaataccagttggcggaatcgggtgagatgagtgcgaacccagatccgacagagggtcgtgaaaacgagctgcctcctactacgaagaccatttctcagtatgcgtgtcaacgccgcaccaccctgaacaaccataatcaacgttttacggacgcactggaaattcttgcggaaaattacgagttcaaacgcaacgatgatactgcgctgacttttatgcgtgctatttccgtgctgaaaagccttccgtttgaggtagttagcctgaaagacacggaaggattgccctggatcggtgatgaagtcaaagggattatggaagaaatcatcgaggtcggtgaatcgctggaagtgcaggccgtgctcaatgatgagcgctatcaaagcttcaaacgctttaagagtgtctttggagtgggggtgaagacagcagacaagtggtaccgtatgggtctgcgcacgctcgaggatgttcgttccagcaagaccctgaagttgaccccgatgcagaaagcgggtctgtgctattatgaagatcttgctcgcggcgttacgaaagccgaagctgacgcgatttctctgctggttcaggatgcagtcgcaactttcgacccggatgcgctggtggagattgtcggtggatttcgtcgtgggaaaccttttggtcacgacgttgatctgcttatcacatctccgggagctgagaaagagcaagaagaccagctcctgcagaaagtgaccaatctgtggaagaaacaagggttgttgctgtacggtcgtctggaatggagtcagtttgaagatgggaaactcccatcccgcaagatcgatgccctggaccattttgcgaaatgctttctgatcctcaaactttatgatcataaagtggacaaaagcaaatgggaaatgccgacgggttcgaacgaaagcgaggccaaaagttggaaagcaattcgcgtagatctggttcgttgcccctacgatggttttgcgtttgcgttgttgggttggaccggaagccgcatgttccgccgtgatctgcgctggtacgccaccgacgagaagaatatgatgctggacaatcatgcgctgtatgacctgaccaagaaaatctttctcaaagctaaatcggaagaggaaattttcgcacatctggggcttgaatacctggaaccgttcgaacgtaacgca

SEQ ID NO: 1686 - protein, 529 aa, synthetic construct
  REGION 1..529: note = Variant of terminal deoxynucleotidyltransferase
MHHHHHHGGSGSHGIRTIDSDFGKKRQKKMDNHDSSAIYEIKFHEFVLFILEEKMGATRRTFLTDLARKKGFRVENELSDSVTHIVAENNSRSEVLAWLKEHKMEKTKQFELLDISWLIESMKVGKPVDTKGKYQLAESGEMSANPDPTEGRENELPPTTKTISQYACQRRTTLNNHNQRFTDALEILAENYEFKRNDDTALTFMRAISVLKSLPFEVVSLKDTEGLPWIGDEVKGIMEEIIEVGESLEVQAVLNDERYQSFKRFKSVFGVGVKTADKWYRMGLRTLEDVRSSKTLKLTPMQKAGLCYYEDLARGVTKAEADAISLLVQDAVATFDPDALVEIVGGFRRGKPFGHDVDLLITSPGAEKEQEDQLLQKVTNLWKKQGLLLYGRLEWSQFEDGKLPSRKIDALDHFAKCFLILKLYDHKVDKSKWEMPTGSNESEAKSWKAIRVDLVRCPYDGFAFALLGWTGSRMFRRDLRWYATDEKNMMLDNHALYDLTKKIFLKAKSEEEIFAHLGLEYLEPFERNA

SEQ ID NO: 1687 - DNA, 1587 bp, synthetic construct
  misc_feature 1..1587: note = Variant of terminal deoxynucleotidyltransferase
  source 1..1587: mol_type = other DNA
atgcaccatcatcatcatcatggcggtagcggcagccacggcattcgtaccatcgattcggacttcgggaagaaacgccagaagaagatggataaccacgatagttccgccatctatgaaatcaaatttcacgagtttgtgctgttcattctcgaagagaaaatgggtgcgacgcgtcgtacttttctgacagatttagcccgcaagaaagggttccgcgtcgagaatgaactgtcagacagcgttacccacatcgtggcagaaaataattcacgctctgaagtattggcttggctgaaagaacacaagatggagaagaccaagcaattcgaactgctggatattagctggcttatcgaaagcatgaaagttggtaaaccggtggacaccaaggggaaataccagttggcggaatcgggtgagatgagtgcgaacccagatccgacagagggtcgtgaaaacgagctgcctcctactacgaagaccatttctcagtatgcgtgtcaacgccgcaccaccctgaacaaccataatcaacgttttacggacgcactggaaattcttgcggaaaattacgagttcaaacgcaacgatgatactgcgctgacttttatgcgtgctatttccgtgctgaaaagccttccgtttgaggtagttagcctgaaagacacggaaggattgccctggatcggtgatgaagtcaaagggattatggaagaaatcatcgaggtcggtgaatcgctggaagtgcaggccgtgctcaatgatgagcgctatcaaagcttcaaacgctttaagagtgtctttggagtgggggtgaagacagcagacaagtggtaccgtatgggtctgcgcacgctcgaggatgttcgttccagcaagaccctgaagttgaccccgatgcagaaagcgggtctgtgctattatgaagatcttgctcgcggcgttacgaaagccgaagctgacgcgatttctctgctggttcaggatgcagtcgcaactttcgacccggatgcgctggtggagattgtcggtggatttcgtcgtgggaaaccttttggtcacgacgttgatctgcttatcacatctccgggagctgagaaagagcaagaagaccagctcctgcagaaagtgaccaatctgtggaagaaacaagggttgttgctgtacggtcgtctggaatggagtcagtttgaagatgggaaactcccatcccgcaagatcgatgccctggacggctttgcgaaatgctttctgatcctcaaactttatgatcataaagtggacaaaagcaaatgggaaatgccgacgggttcgaacgaaagcgaggccaaaagttggaaagcaattcgcgtagatctggttcgttgcccctacgatggttttgcgtttgcgttgttgggttggaccggaagccgcatgttccgccgtgatctgcgctggtacgccaccgacgagaagaagatgatgctggacaatcatgcgctgtatgacctgaccaagaaaatctttctcaaagctaaatcggaagaggaaattttcgcacatctggggcttgaatacctggaaccgttcgaacgtaacgca

SEQ ID NO: 1688 - protein, 529 aa, synthetic construct
  REGION 1..529: note = Variant of terminal deoxynucleotidyltransferase
MHHHHHHGGSGSHGIRTIDSDFGKKRQKKMDNHDSSAIYEIKFHEFVLFILEEKMGATRRTFLTDLARKKGFRVENELSDSVTHIVAENNSRSEVLAWLKEHKMEKTKQFELLDISWLIESMKVGKPVDTKGKYQLAESGEMSANPDPTEGRENELPPTTKTISQYACQRRTTLNNHNQRFTDALEILAENYEFKRNDDTALTFMRAISVLKSLPFEVVSLKDTEGLPWIGDEVKGIMEEIIEVGESLEVQAVLNDERYQSFKRFKSVFGVGVKTADKWYRMGLRTLEDVRSSKTLKLTPMQKAGLCYYEDLARGVTKAEADAISLLVQDAVATFDPDALVEIVGGFRRGKPFGHDVDLLITSPGAEKEQEDQLLQKVTNLWKKQGLLLYGRLEWSQFEDGKLPSRKIDALDGFAKCFLILKLYDHKVDKSKWEMPTGSNESEAKSWKAIRVDLVRCPYDGFAFALLGWTGSRMFRRDLRWYATDEKKMMLDNHALYDLTKKIFLKAKSEEEIFAHLGLEYLEPFERNA

SEQ ID NO: 1689 - DNA, 1587 bp, synthetic construct
  misc_feature 1..1587: note = Variant of terminal deoxynucleotidyltransferase
  source 1..1587: mol_type = other DNA
atgcaccatcatcatcatcatggcggtagcggcagccacggcattcgtaccatcgattcggacttcgggaagaaacgccagaagaagatggataaccacgatagttccgccatctatgaaatcaaatttcacgagtttgtgctgttcattctcgaagagaaaatgggtgcgacgcgtcgtacttttctgacagatttagcccgcaagaaagggttccgcgtcgagaatgaactgtcagacagcgttacccacatcgtggcagaaaataattcacgctctgaagtattggcttggctgaaagaacacaagatggagaagaccaagcaattcgaactgctggatattagctggcttatcgaaagcatgaaagttggtaaaccggtggacaccaaggggaaataccagttggcggaatcgggtgagatgagtgcgaacccagatccgacagagggtcgtgaaaacgagctgcctcctactacgaagaccatttctccttatgcgtgtcaacgccgcaccaccctgaacaaccataatcaacgttttacggacgcactggaaattcttgcggaaaattacgagttcaaacgcaacgatgatactgcgctgacttttatgcgtgctatttccgtgctgaaaagccttccgtttgaggtagttagcctgaaagacacggaaggattgccctggatcggtgatgaagtcaaagggattatggaagaaatcatcgaggtcggtgaatcgctggaagtgcaggccgtgctcaatgatgagcgctatcaaagcttcaaacgctttaagagtgtctttggagtgggggtgaagacagcagacaagtggtaccgtatgggtctgcgcacgctcgaggatgttcgttccagcaagaccctgaagttgaccccgatgcagaaagcgggtctgtgctattatgaagatcttgctcgcggcgttacgaaagccgaagctgacgcgatttctctgctggttcaggatgcagtcgcaactttcgacccggatgcgctggtggagattgtcggtggatttcgtcgtgggaaaccttttggtcacgacgttgatctgcttatcacatctccgggagctgagaaagagcaagaagaccagctcctgcagaaagtgaccaatctgtggaagaaacaagggttgttgctgtacggtcgtctggaatggagtcagtttgaagatgggaaactcccatcccgcaagatcgatgccctggaccattttgcgaaatgctttctgatcctcaaactttatgatcataaagtggacaaaagcaaatgggaaatgccgacgggttcgaacgaaagcgaggccaaaagttggaaagcaattcgcgtagatctggttcgttgcccctacgatggttttgcgtttgcgttgttgggttggaccggaagccgcatgttccgccgtgatctgcgctggtacgccaccgacgagaagaagatgatgctggacaatcatgcgctgtatgacctgaccaagaaaatctttctcaaagctaaatcggaagaggaaattttcgcacatctggggcttgaatacctggaaccgttcgaacgtaacgca

SEQ ID NO: 1690 - protein, 529 aa, synthetic construct
  REGION 1..529: note = Variant of terminal deoxynucleotidyltransferase
MHHHHHHGGSGSHGIRTIDSDFGKKRQKKMDNHDSSAIYEIKFHEFVLFILEEKMGATRRTFLTDLARKKGFRVENELSDSVTHIVAENNSRSEVLAWLKEHKMEKTKQFELLDISWLIESMKVGKPVDTKGKYQLAESGEMSANPDPTEGRENELPPTTKTISPYACQRRTTLNNHNQRFTDALEILAENYEFKRNDDTALTFMRAISVLKSLPFEVVSLKDTEGLPWIGDEVKGIMEEIIEVGESLEVQAVLNDERYQSFKRFKSVFGVGVKTADKWYRMGLRTLEDVRSSKTLKLTPMQKAGLCYYEDLARGVTKAEADAISLLVQDAVATFDPDALVEIVGGFRRGKPFGHDVDLLITSPGAEKEQEDQLLQKVTNLWKKQGLLLYGRLEWSQFEDGKLPSRKIDALDHFAKCFLILKLYDHKVDKSKWEMPTGSNESEAKSWKAIRVDLVRCPYDGFAFALLGWTGSRMFRRDLRWYATDEKKMMLDNHALYDLTKKIFLKAKSEEEIFAHLGLEYLEPFERNA

SEQ ID NO: 1691 - DNA, 1587 bp, synthetic construct
  misc_feature 1..1587: note = Variant of terminal deoxynucleotidyltransferase
  source 1..1587: mol_type = other DNA
atgcaccatcatcatcatcatggcggtagcggcagccacggcattcgtaccatcgattcggacttcgggaagaaacgccagaagaagatggataaccacgatagttccgccatctatgaaatcaaatttcacgagtttgtgctgttcattctcgaagagaaaatgggtgcgacgcgtcgtacttttctgacagatttagcccgcaagaaagggttccgcgtcgagaatgaactgtcagacagcgttacccacatcgtggcagaaaataattcacgctctgaagtattggcttggctgaaagaacacaagatggagaagaccaagcaattcgaactgctggatattagctggcttatcgaaagcatgaaagttggtaaaccggtggacaccaaggggaaataccagttggcggaatcgggtgagatgagtgcgaacccagatccgacagagggtcgtgaaaacgagctgcctcctactacgaagaccatttctcagtatgcgtgtcaacgccgcaccaccctgaacaaccataatcaacgttttacggacgcactggaaattcttgcggaaaattacgagttcaaacgcaacgatgatactgcgctgacttttatgcgtgctatttccgtgctgaaaagccttccgtttgaggtagttagcctgaaagacacggaaggattgccctggatcggtgatgaagtcaaagggattatggaagaaatcatcgaggtcggtgaatcgctggaagtgcaggccgtgctcaatgatgagcgctatcaaagcttcaaacgctttaagagtgtctttggagtgggggtgaagacagcagacaagtggtaccgtatgggtctgcgcacgctcgaggatgttcgttccagcaagaccctgaagttgaccccgatgcagaaagcgggtctgtgctattatgaagatcttgctcgcggcgttacgaaagccgaagctgacgcgatttctctgctggttcaggatgcagtcgcaactttcgacccggatgcgctggtggagattgtcggtggatttcgtcgtgggaaaccttttggtcacgacgttgatctgcttatcacatctccgggagctgagaaagagcaagaagaccagctcctgcataaagtgaccaatctgtggaagaaacaagggttgttgctgtacggtcgtctggaatggagtcagtttgaagatgggaaactcccatcccgcaagatcgatgccctggaccattttgcgaaatgctttctgatcctcaaactttatgatcataaagtggacaaaagcaaatgggaaatgccgacgggttcgaacgaaagcgaggccaaaagttggaaagcaattcgcgtagatctggttcgttgcccctacgatggttttgcgtttgcgttgttgggttggaccggaagccgcatgttccgccgtgatctgcgctggtacgccaccgacgagaagaagatgatgctggacaatcatgcgctgtatgacctgaccaagaaaatctttctcaaagctaaatcggaagaggaaattttcgcacatctggggcttgaatacctggaaccgttcgaacgtaacgca

SEQ ID NO: 1692 - protein, 529 aa, synthetic construct
  REGION 1..529: note = Variant of terminal deoxynucleotidyltransferase
MHHHHHHGGSGSHGIRTIDSDFGKKRQKKMDNHDSSAIYEIKFHEFVLFILEEKMGATRRTFLTDLARKKGFRVENELSDSVTHIVAENNSRSEVLAWLKEHKMEKTKQFELLDISWLIESMKVGKPVDTKGKYQLAESGEMSANPDPTEGRENELPPTTKTISQYACQRRTTLNNHNQRFTDALEILAENYEFKRNDDTALTFMRAISVLKSLPFEVVSLKDTEGLPWIGDEVKGIMEEIIEVGESLEVQAVLNDERYQSFKRFKSVFGVGVKTADKWYRMGLRTLEDVRSSKTLKLTPMQKAGLCYYEDLARGVTKAEADAISLLVQDAVATFDPDALVEIVGGFRRGKPFGHDVDLLITSPGAEKEQEDQLLHKVTNLWKKQGLLLYGRLEWSQFEDGKLPSRKIDALDHFAKCFLILKLYDHKVDKSKWEMPTGSNESEAKSWKAIRVDLVRCPYDGFAFALLGWTGSRMFRRDLRWYATDEKKMMLDNHALYDLTKKIFLKAKSEEEIFAHLGLEYLEPFERNA

SEQ ID NO: 1693 - DNA, 1587 bp, synthetic construct
  misc_feature 1..1587: note = Variant of terminal deoxynucleotidyltransferase
  source 1..1587: mol_type = other DNA
atgcaccatcatcatcatcatggcggtagcggcagccacggcattcgtaccatcgattcggacttcgggaagaaacgccagaagaagatggataaccacgatagttccgccatctatgaaatcaaatttcacgagtttgtgctgttcattctcgaagagaaaatgggtgcgacgcgtcgtacttttctgacagatttagcccgcaagaaagggttccgcgtcgagaatgaactgtcagacagcgttacccacatcgtggcagaaaataattcacgctctgaagtattggcttggctgaaagaacacaagatggagaagaccaagcaattcgaactgctggatattagctggcttatcgaaagcatgaaagttggtaaaccggtggacaccaaggggaaataccagttggcggaatcgggtgagatgagtgcgaacccagatccgacagagggtcgtgaaaacgagctgcctcctactacgaagaccatttctcagtatgcgtgtcaacgccgcaccaccctgaacaaccataatcaacgttttacggacgcactggaaattcttgcggaaaattacgagttcaaacgcaacgatgatactgcgctgacttttatgcgtgctatttccgtgctgaaaagccttccgtttgaggtagttagcctgaaagacacggaaggattgccctggatcggtgatgaagtcaaagggattatggaagaaatcatcgaggtcggtgaatcgctggaagtgcaggccgtgctcaatgatgagcgctatcaaagcttcaaacgctttaagagtgtctttggagtgggggtgaagacagcagacaagtggtaccgtatgggtctgcgcacgctcgaggatgttcgttccagcaagaccctgaagttgaccccgatgcagaaagcgggtctgtgctattatgaagatcttgctcgcggcgttacgaaagccgaagctgacgcgatttctctgctggttcaggatgcagtcgcaactttcgacccggatgcgctggtggagattgtcggtggatttcgtcgtgggaaaccttttggtcacgacgttgatctgcttatcacatctccgggagctgagaaagagcaagaagaccagctcctgcagaaagtgaccaatctgtggaagaaacaagggttgttgctgtacggtcgtctggaatggagtcagtttgaagatgggaaactcccatcccgcaagatcgatgccctggaccattttgcgaaatgctttctgatcctcaaactttatgatcataaagtggacaaaagcaaatgggaaatgccgacgggttcgaacgaaagcgaggccaaaagttggaaagcaattcgcgtagatctggttcgttgcccctacgatggttttgcgtttgcgttgttgggttggaccggaagccgcatgttccgccgtgatctgcgctggtacgccaccgacgagaagaagatgctgctggacaatcatgcgctgtatgacctgaccaagaaaatctttctcaaagctaaatcggaagaggaaattttcgcacatctggggcttgaatacctggaaccgttcgaacgtaacgca

SEQ ID NO: 1694 - protein, 529 aa, synthetic construct
  REGION 1..529: note = Variant of terminal deoxynucleotidyltransferase
MHHHHHHGGSGSHGIRTIDSDFGKKRQKKMDNHDSSAIYEIKFHEFVLFILEEKMGATRRTFLTDLARKKGFRVENELSDSVTHIVAENNSRSEVLAWLKEHKMEKTKQFELLDISWLIESMKVGKPVDTKGKYQLAESGEMSANPDPTEGRENELPPTTKTISQYACQRRTTLNNHNQRFTDALEILAENYEFKRNDDTALTFMRAISVLKSLPFEVVSLKDTEGLPWIGDEVKGIMEEIIEVGESLEVQAVLNDERYQSFKRFKSVFGVGVKTADKWYRMGLRTLEDVRSSKTLKLTPMQKAGLCYYEDLARGVTKAEADAISLLVQDAVATFDPDALVEIVGGFRRGKPFGHDVDLLITSPGAEKEQEDQLLQKVTNLWKKQGLLLYGRLEWSQFEDGKLPSRKIDALDHFAKCFLILKLYDHKVDKSKWEMPTGSNESEAKSWKAIRVDLVRCPYDGFAFALLGWTGSRMFRRDLRWYATDEKKMLLDNHALYDLTKKIFLKAKSEEEIFAHLGLEYLEPFERNA

SEQ ID NO: 1695 - DNA, 1587 bp, synthetic construct
  misc_feature 1..1587: note = Variant of terminal deoxynucleotidyltransferase
  source 1..1587: mol_type = other DNA
atgcaccatcatcatcatcatggcggtagcggcagccacggcattcgtaccatcgattcggacttcgggaagaaacgccagaagaagatggataaccacgatagttccgccatctatgaaatcaaatttcacgagtttgtgctgttcattctcgaagagaaaatgggtgcgacgcgtcgtacttttctgacagatttagcccgcaagaaagggttccgcgtcgagaatgaactgtcagacagcgttacccacatcgtggcagaaaataattcacgctctgaagtattggcttggctgaaagaacacaagatggagaagaccaagcaattcgaactgctggatattagctggcttatcgaaagcatgaaagttggtaaaccggtggacaccaaggggaaataccagttggcggaatcgggtgagatgagtgcgaacccagatccgacagagggtcgtgaaaacgagctgcctcctactacgaagaccatttctcagtatgcgtgtcaacgccgcaccaccctgaacaaccataatcaacgttttacggacgcactggaaattcttgcggaaaattacgagttcaaacgcaacgatgatactgcgctgacttttatgcgtgctatttccgtgctgaaaagccttccgtttgaggtagttagcctgaaagacacggaaggattgccctggatcggtgatgaagtcaaagggattatggaagaaatcatcgaggtcggtgaatcgctggaagtgcaggccgtgctcaatgatgagcgctatcaaagcttcaaacgctttaagagtgtctttggagtgggggtgaagacagcagacaagtggtaccgtatgggtctgcgcacgctcgaggatgttcgttccagcaagaccctgaagttgaccccgatgcagaaagcgggtctgtgctattatgaagatcttgctcgcggcgttacgaaagccgaagctgacgcgatttctctgctggttaaggatgcagtcgcaactttcgacccggatgcgctggtggagattgtcggtggatttcgtcgtgggaaaccttttggtcacgacgttgatctgcttatcacatctccgggagctgagaaagagcaagaagaccagctcctgcagaaagtgaccaatctgtggaagaaacaagggttgttgctgtacggtcgtctggaatggagtcagtttgaagatgggaaactcccatcccgcaagatcgatgccctggaccattttgcgaaatgctttctgatcctcaaactttatgatcataaagtggacaaaagcaaatgggaaatgccgacgggttcgaacgaaagcgaggccaaaagttggaaagcaattcgcgtagatctggttcgttgcccctacgatggttttgcgtttgcgttgttgggttggaccggaagccgcatgttccgccgtgatctgcgctggtacgccaccgacgagaagaagatgatgctggacaatcatgcgctgtatgacctgaccaagaaaatctttctcaaagctaaatcggaagaggaaattttcgcacatctggggcttgaatacctggaaccgttcgaacgtaacgca

SEQ ID NO: 1696 - protein, 529 aa, synthetic construct
  REGION 1..529: note = Variant of terminal deoxynucleotidyltransferase
MHHHHHHGGSGSHGIRTIDSDFGKKRQKKMDNHDSSAIYEIKFHEFVLFILEEKMGATRRTFLTDLARKKGFRVENELSDSVTHIVAENNSRSEVLAWLKEHKMEKTKQFELLDISWLIESMKVGKPVDTKGKYQLAESGEMSANPDPTEGRENELPPTTKTISQYACQRRTTLNNHNQRFTDALEILAENYEFKRNDDTALTFMRAISVLKSLPFEVVSLKDTEGLPWIGDEVKGIMEEIIEVGESLEVQAVLNDERYQSFKRFKSVFGVGVKTADKWYRMGLRTLEDVRSSKTLKLTPMQKAGLCYYEDLARGVTKAEADAISLLVKDAVATFDPDALVEIVGGFRRGKPFGHDVDLLITSPGAEKEQEDQLLQKVTNLWKKQGLLLYGRLEWSQFEDGKLPSRKIDALDHFAKCFLILKLYDHKVDKSKWEMPTGSNESEAKSWKAIRVDLVRCPYDGFAFALLGWTGSRMFRRDLRWYATDEKKMMLDNHALYDLTKKIFLKAKSEEEIFAHLGLEYLEPFERNA

SEQ ID NO: 1697 - DNA, 1587 bp, synthetic construct
  misc_feature 1..1587: note = Variant of terminal deoxynucleotidyltransferase
  source 1..1587: mol_type = other DNA
atgcaccatcatcatcatcatggcggtagcggcagccacggcattcgtaccatcgattcggacttcgggaagaaacgccagaagaagatggataaccacgatagttccgccatctatgaaatcaaatttcacgagtttgtgctgttcattctcgaagagaaaatgggtgcgacgcgtcgtacttttctgacagatttagcccgcaagaaagggttccgcgtcgagaatgaactgtcagacagcgttacccacatcgtggcagaaaataattcacgctctgaagtattggcttggctgaaagaacacaagatggagaagaccaagcaattcgaactgctggatattagctggcttatcgaaagcatgaaagttggtaaaccggtggacaccaaggggaaataccagttggcggaatcgggtgagatgagtgcgaacccagatccgacagagggtcgtgaaaacgagctgcctcctactacgaagaccatttctcagtatgcgtgtcaacgccgcaccaccctgaacaaccataatcaacgttttacggacgcactggaaattcttgcggaaaattacgagttcaaacgcaacgatgatactgcgctgacttttatgcgtgctatttccgtgctgaaaagccttccgtttgaggtagttagcctgaaagacacggaaggattgccctggatcggtgatgaagtcaaagggattatggaagaaatcatcgaggtcggtgaatcgctggaagtgcaggccgtgctcaatgatgagcgctatcaaagcttcaaacgctttaagagtgtctttggagtgggggtgaagacagcagacaagtggtaccgtatgggtctgcgcacgctcgaggatgttcgttccagcaagaccctgaagttgaccccgatgcagaaagcgggtctgtgctattatgaagatcttgctcgcggcgttacgaaagccgaagctgacgcgatttctctgctggttcaggatgcagtcgcaactttcgacccggatgcgctggtggagattgtcggtggatttcgtcgtgggaaaccttttggtcacgacgttgatctgcttatcacatctccgggagctgagaaagagcaagaagaccagctcctgcagaaagtgaccaatctgtggaagaaacaagggttgttgctgtacggtcgtatcgaatggagtcagtttgaagatgggaaactcccatcccgcaagatcgatgccctggaccattttgcgaaatgctttctgatcctcaaactttatgatcataaagtggacaaaagcaaatgggaaatgccgacgggttcgaacgaaagcgaggccaaaagttggaaagcaattcgcgtagatctggttcgttgcccctacgatggttttgcgtttgcgttgttgggttggaccggaagccgcatgttccgccgtgatctgcgctggtacgccaccgacgagaagaagatgatgctggacaatcatgcgctgtatgacctgaccaagaaaatctttctcaaagctaaatcggaagaggaaattttcgcacatctggggcttgaatacctggaaccgttcgaacgtaacgca

SEQ ID NO: 1698 - protein, 529 aa, synthetic construct
  REGION 1..529: note = Variant of terminal deoxynucleotidyltransferase
MHHHHHHGGSGSHGIRTIDSDFGKKRQKKMDNHDSSAIYEIKFHEFVLFILEEKMGATRRTFLTDLARKKGFRVENELSDSVTHIVAENNSRSEVLAWLKEHKMEKTKQFELLDISWLIESMKVGKPVDTKGKYQLAESGEMSANPDPTEGRENELPPTTKTISQYACQRRTTLNNHNQRFTDALEILAENYEFKRNDDTALTFMRAISVLKSLPFEVVSLKDTEGLPWIGDEVKGIMEEIIEVGESLEVQAVLNDERYQSFKRFKSVFGVGVKTADKWYRMGLRTLEDVRSSKTLKLTPMQKAGLCYYEDLARGVTKAEADAISLLVQDAVATFDPDALVEIVGGFRRGKPFGHDVDLLITSPGAEKEQEDQLLQKVTNLWKKQGLLLYGRIEWSQFEDGKLPSRKIDALDHFAKCFLILKLYDHKVDKSKWEMPTGSNESEAKSWKAIRVDLVRCPYDGFAFALLGWTGSRMFRRDLRWYATDEKKMMLDNHALYDLTKKIFLKAKSEEEIFAHLGLEYLEPFERNA

SEQ ID NO: 1699 - DNA, 1587 bp, synthetic construct
  misc_feature 1..1587: note = Variant of terminal deoxynucleotidyltransferase
  source 1..1587: mol_type = other DNA
atgcaccatcatcatcatcatggcggtagcggcagccacggcattcgtaccatcgattcggacttcgggaagaaacgccagaagaagatggataaccacgatagttccgccatctatgaaatcaaatttcacgagtttgtgctgttcattctcgaagagaaaatgggtgcgacgcgtcgtacttttctgacagatttagcccgcaagaaagggttccgcgtcgagaatgaactgtcagacagcgttacccacatcgtggcagaaaataattcacgctctgaagtattggcttggctgaaagaacacaagatggagaagaccaagcaattcgaactgctggatattagctggcttatcgaaagcatgaaagttggtaaaccggtggacaccaaggggaaataccagttggcggaatcgggtgagatgagtgcgaacccagatccgacagagggtcgtgaaaacgagctgcctcctactacgaagaccatttctcagtatgcgtgtcaacgccgcaccaccctgaacaaccataatcaacgttttacggacgcactggaaattcttgcggaaaattacgagttcaaacgcaacgatgatactgcgctgacttttatgcgtgctatttccgtgctgaaaagccttccgtttgaggtagttagcctgaaagacacggaaggattgccctggatcggtgatgaagtcaaagggattatggaagaaatcatcgaggtcggtgaatcgctggaagtgcaggccgtgctcaatgatgagcgctatcaaagcttcaaacgctttaagagtgtctttggagtgggggtgaagacagcagacaagtggtaccgtatgggtctgcgcacgctcgaggatgttcgttccagcaagaccctgaagttgaccccgatgcagaaagcgggtctgtgctattatgaagatcttgctcgcggcgttacgaaagccgaagctgacgcgatttctctgctggttcaggatgcagtcgcaactttcgacccggatgcgctggtggagattgtcggtggatttcgtcgtgggaaaccttttggtcacgacgttgatctgcttatcacatctccgggagctgagaaagagcaagaagaccagctcctgcagaaagtgaccaatctgtggaagaaacaagggttgttgctgtacggtcgtctggaatggagtcagtttgaagatgggaaactcccatccccaaagatcgatgccctggaccattttgcgaaatgctttctgatcctcaaactttatgatcataaagtggacaaaagcaaatgggaaatgccgacgggttcgaacgaaagcgaggccaaaagttggaaagcaattcgcgtagatctggttcgttgcccctacgatggttttgcgtttgcgttgttgggttggaccggaagccgcatgttccgccgtgatctgcgctggtacgccaccgacgagaagaagatgatgctggacaatcatgcgctgtatgacctgaccaagaaaatctttctcaaagctaaatcggaagaggaaattttcgcacatctggggcttgaatacctggaaccgttcgaacgtaacgca

SEQ ID NO: 1700 - protein, 529 aa, synthetic construct
  REGION 1..529: note = Variant of terminal deoxynucleotidyltransferase
MHHHHHHGGSGSHGIRTIDSDFGKKRQKKMDNHDSSAIYEIKFHEFVLFILEEKMGATRRTFLTDLARKKGFRVENELSDSVTHIVAENNSRSEVLAWLKEHKMEKTKQFELLDISWLIESMKVGKPVDTKGKYQLAESGEMSANPDPTEGRENELPPTTKTISQYACQRRTTLNNHNQRFTDALEILAENYEFKRNDDTALTFMRAISVLKSLPFEVVSLKDTEGLPWIGDEVKGIMEEIIEVGESLEVQAVLNDERYQSFKRFKSVFGVGVKTADKWYRMGLRTLEDVRSSKTLKLTPMQKAGLCYYEDLARGVTKAEADAISLLVQDAVATFDPDALVEIVGGFRRGKPFGHDVDLLITSPGAEKEQEDQLLQKVTNLWKKQGLLLYGRLEWSQFEDGKLPSPKIDALDHFAKCFLILKLYDHKVDKSKWEMPTGSNESEAKSWKAIRVDLVRCPYDGFAFALLGWTGSRMFRRDLRWYATDEKKMMLDNHALYDLTKKIFLKAKSEEEIFAHLGLEYLEPFERNA

SEQ ID NO: 1701 - DNA, 1587 bp, synthetic construct
  misc_feature 1..1587: note = Variant of terminal deoxynucleotidyltransferase
  source 1..1587: mol_type = other DNA
atgcaccatcatcatcatcatggcggtagcggcagccacggcattcgtaccatcgattcggacttcgggaagaaacgccagaagaagatggataaccacgatagttccgccatctatgaaatcaaatttcacgagtttgtgctgttcattctcgaagagaaaatgggtgcgacgcgtcgtacttttctgacagatttagcccgcaagaaagggttccgcgtcgagaatgaactgtcagacagcgttacccacatcgtggcagaaaataattcacgctctgaagtattggcttggctgaaagaacacaagatggagaagaccaagcaattcgaactgctggatattagctggcttatcgaaagcatgaaagttggtaaaccggtggacaccaaggggaaataccagttggcggaatcgggtgagatgagtgcgaacccagatccgacagagggtcgtgaaaacgagctgcctcctactacgaagaccatttctcagtatgcgtgtcaacgccgcaccaccctgaacaaccataatcaacgttttacggacgcactggaaattcttgcggaaaattacgagttcaaacgcaacgatgatactgcgctgacttttatgcgtgctatttccgtgctgaaaagccttccgtttgaggtagttagcctgaaagacacggaaggattgccctggatcggtgatgaagtcaaagggattatggaagaaatcatcgaggtcggtgaatcgctggaagtgcaggccgtgctcaatgatgagcgctatcaaagcttcaaacgctttaagagtgtctttggagtgggggtgaagacagcagacaagtggtaccgtatgggtctgcgcacgctcgaggatgttcgttccagcaagaccctgaagttgaccccgatgcagaaagcgggtctgtgctattatgaagatcttgctcgcggcgttacgaaagccgaagctgacgcgatttctctgctggttcaggatgcagtcgcaactttcgacccggatgcgctggtggagattgtcggtggatttcgtcgtgggaaaccttttggtcacgacgttgatctgcttatcacatctccgggagctgagaaagagcaagaagaccagctcctgcagaaagtgaccaatctgtggaagaaacaagggttgttgctgtacggtcgtctggaatggagtcagtttgaagaagggaaactcccatcccgcaagatcgatgccctggaccattttgcgaaatgctttctgatcctcaaactttatgatcataaagtggacaaaagcaaatgggaaatgccgacgggttcgaacgaaagcgaggccaaaagttggaaagcaattcgcgtagatctggttcgttgcccctacgatggttttgcgtttgcgttgttgggttggaccggaagccgcatgttccgccgtgatctgcgctggtacgccaccgacgagaagaagatgatgctggacaatcatgcgctgtatgacctgaccaagaaaatctttctcaaagctaaatcggaagaggaaattttcgcacatctggggcttgaatacctggaaccgttcgaacgtaacgca

SEQ ID NO: 1702 - protein, 529 aa, synthetic construct
  REGION 1..529: note = Variant of terminal deoxynucleotidyltransferase
MHHHHHHGGSGSHGIRTIDSDFGKKRQKKMDNHDSSAIYEIKFHEFVLFILEEKMGATRRTFLTDLARKKGFRVENELSDSVTHIVAENNSRSEVLAWLKEHKMEKTKQFELLDISWLIESMKVGKPVDTKGKYQLAESGEMSANPDPTEGRENELPPTTKTISQYACQRRTTLNNHNQRFTDALEILAENYEFKRNDDTALTFMRAISVLKSLPFEVVSLKDTEGLPWIGDEVKGIMEEIIEVGESLEVQAVLNDERYQSFKRFKSVFGVGVKTADKWYRMGLRTLEDVRSSKTLKLTPMQKAGLCYYEDLARGVTKAEADAISLLVQDAVATFDPDALVEIVGGFRRGKPFGHDVDLLITSPGAEKEQEDQLLQKVTNLWKKQGLLLYGRLEWSQFEEGKLPSRKIDALDHFAKCFLILKLYDHKVDKSKWEMPTGSNESEAKSWKAIRVDLVRCPYDGFAFALLGWTGSRMFRRDLRWYATDEKKMMLDNHALYDLTKKIFLKAKSEEEIFAHLGLEYLEPFERNA

SEQ ID NO: 1703 - DNA, 1587 bp, synthetic construct
  misc_feature 1..1587: note = Variant of terminal deoxynucleotidyltransferase
  source 1..1587: mol_type = other DNA
atgcaccatcatcatcatcatggcggtagcggcagccacggcattcgtaccatcgattcggacttcgggaagaaacgccagaagaagatggataaccacgatagttccgccatctatgaaatcaaatttcacgagtttgtgctgttcattctcgaagagaaaatgggtgcgacgcgtcgtacttttctgacagatttagcccgcaagaaagggttccgcgtcgagaatgaactgtcagacagcgttacccacatcgtggcagaaaataattcacgctctgaagtattggcttggctgaaagaacacaagatggagaagaccaagcaattcgaactgctggatattagctggcttatcgaaagcatgaaagttggtaaaccggtggacaccaaggggaaataccagttggcggaatcgggtgagatgagtgcgaacccagatccgacagagggtcgtgaaaacgagctgcctcctactacgaagaccatttctcagtatgcgtgtcaacgcaaaaccaccctgaacaaccataatcaacgttttacggacgcactggaaattcttgcggaaaattacgagttcaaacgcaacgatgatactgcgctgacttttatgcgtgctatttccgtgctgaaaagccttccgtttgaggtagttagcctgaaagacacggaaggattgccctggatcggtgatgaagtcaaagggattatggaagaaatcatcgaggtcggtgaatcgctggaagtgcaggccgtgctcaatgatgagcgctatcaaagcttcaaacgctttaagagtgtctttggagtgggggtgaagacagcagacaagtggtaccgtatgggtctgcgcacgctcgaggatgttcgttccagcaagaccctgaagttgaccccgatgcagaaagcgggtctgtgctattatgaagatcttgctcgcggcgttacgaaagccgaagctgacgcgatttctctgctggttcaggatgcagtcgcaactttcgacccggatgcgctggtggagattgtcggtggatttcgtcgtgggaaaccttttggtcacgacgttgatctgcttatcacatctccgggagctgagaaagagcaagaagaccagctcctgcagaaagtgaccaatctgtggaagaaacaagggttgttgctgtacggtcgtctggaatggagtcagtttgaagatgggaaactcccatcccgcaagatcgatgccctggaccattttgcgaaatgctttctgatcctcaaactttatgatcataaagtggacaaaagcaaatgggaaatgccgacgggttcgaacgaaagcgaggccaaaagttggaaagcaattcgcgtagatctggttcgttgcccctacgatggttttgcgtttgcgttgttgggttggaccggaagccgcatgttccgccgtgatctgcgctggtacgccaccgacgagaagaagatgatgctggacaatcatgcgctgtatgacctgaccaagaaaatctttctcaaagctaaatcggaagaggaaattttcgcacatctggggcttgaatacctggaaccgttcgaacgtaacgca

SEQ ID NO: 1704 - protein, 529 aa, synthetic construct
  REGION 1..529: note = Variant of terminal deoxynucleotidyltransferase
MHHHHHHGGSGSHGIRTIDSDFGKKRQKKMDNHDSSAIYEIKFHEFVLFILEEKMGATRRTFLTDLARKKGFRVENELSDSVTHIVAENNSRSEVLAWLKEHKMEKTKQFELLDISWLIESMKVGKPVDTKGKYQLAESGEMSANPDPTEGRENELPPTTKTISQYACQRKTTLNNHNQRFTDALEILAENYEFKRNDDTALTFMRAISVLKSLPFEVVSLKDTEGLPWIGDEVKGIMEEIIEVGESLEVQAVLNDERYQSFKRFKSVFGVGVKTADKWYRMGLRTLEDVRSSKTLKLTPMQKAGLCYYEDLARGVTKAEADAISLLVQDAVATFDPDALVEIVGGFRRGKPFGHDVDLLITSPGAEKEQEDQLLQKVTNLWKKQGLLLYGRLEWSQFEDGKLPSRKIDALDHFAKCFLILKLYDHKVDKSKWEMPTGSNESEAKSWKAIRVDLVRCPYDGFAFALLGWTGSRMFRRDLRWYATDEKKMMLDNHALYDLTKKIFLKAKSEEEIFAHLGLEYLEPFERNA

SEQ ID NO: 1705 - DNA, 1587 bp, synthetic construct
  misc_feature 1..1587: note = Variant of terminal deoxynucleotidyltransferase
  source 1..1587: mol_type = other DNA
atgcaccatcatcatcatcatggcggtagcggcagccacggcattcgtaccatcgattcggacttcgggaagaaacgccagaagaagatggataaccacgatagttccgccatctatgaaatcaaatttcacgagtttgtgctgttcattctcgaagagaaaatgggtgcgacgcgtcgtacttttctgacagatttagcccgcaagaaagggttccgcgtcgagaatgaactgtcagacagcgttacccacatcgtggcagaaaataattcacgctctgaagtattggcttggctgaaagaacacaagatggagaagaccaagcaattcgaactgctggatattagctggcttatcgaaagcatgaaagttggtaaaccggtggacaccaaggggaaataccagttggcggaatcgggtgagatgagtgcgaacccagatccgacagagggtcgtgaaaacgagctgcctcctactacgaagaccgtctctcagtatgcgtgtcaacgccgcaccaccctgaacaaccataatcaacgttttacggacgcactggaaattcttgcggaaaattacgagttcaaacgcaacgatgatactgcgctgacttttatgcgtgctatttccgtgctgaaaagccttccgtttgaggtagttagcctgaaagacacggaaggattgccctggatcggtgatgaagtcaaagggattatggaagaaatcatcgaggtcggtgaatcgctggaagtgcaggccgtgctcaatgatgagcgctatcaaagcttcaaacgctttaagagtgtctttggagtgggggtgaagacagcagacaagtggtaccgtatgggtctgcgcacgctcgaggatgttcgttccagcaagaccctgaagttgaccccgatgcagaaagcgggtctgtgctattatgaagatcttgctcgcggcgttacgaaagccgaagctgacgcgatttctctgctggttcaggatgcagtcgcaactttcgacccggatgcgctggtggagattgtcggtggatttcgtcgtgggaaaccttttggtcacgacgttgatctgcttatcacatctccgggagctgagaaagagcaagaagaccagctcctgcagaaagtgaccaatctgtggaagaaacaagggttgttgctgtacggtcgtctggaatggagtcagtttgaagatgggaaactcccatcccgcaagatcgatgccctggaccattttgcgaaatgctttctgatcctcaaactttatgatcataaagtggacaaaagcaaatgggaaatgccgacgggttcgaacgaaagcgaggccaaaagttggaaagcaattcgcgtagatctggttcgttgcccctacgatggttttgcgtttgcgttgttgggttggaccggaagccgcatgttccgccgtgatctgcgctggtacgccaccgacgagaagaagatgatgctggacaatcatgcgctgtatgacctgaccaagaaaatctttctcaaagctaaatcggaagaggaaattttcgcacatctggggcttgaatacctggaaccgttcgaacgtaacgca

SEQ ID NO: 1706 - protein, 529 aa, synthetic construct
  REGION 1..529: note = Variant of terminal deoxynucleotidyltransferase
MHHHHHHGGSGSHGIRTIDSDFGKKRQKKMDNHDSSAIYEIKFHEFVLFILEEKMGATRRTFLTDLARKKGFRVENELSDSVTHIVAENNSRSEVLAWLKEHKMEKTKQFELLDISWLIESMKVGKPVDTKGKYQLAESGEMSANPDPTEGRENELPPTTKTVSQYACQRRTTLNNHNQRFTDALEILAENYEFKRNDDTALTFMRAISVLKSLPFEVVSLKDTEGLPWIGDEVKGIMEEIIEVGESLEVQAVLNDERYQSFKRFKSVFGVGVKTADKWYRMGLRTLEDVRSSKTLKLTPMQKAGLCYYEDLARGVTKAEADAISLLVQDAVATFDPDALVEIVGGFRRGKPFGHDVDLLITSPGAEKEQEDQLLQKVTNLWKKQGLLLYGRLEWSQFEDGKLPSRKIDALDHFAKCFLILKLYDHKVDKSKWEMPTGSNESEAKSWKAIRVDLVRCPYDGFAFALLGWTGSRMFRRDLRWYATDEKKMMLDNHALYDLTKKIFLKAKSEEEIFAHLGLEYLEPFERNA

SEQ ID NO: 1707 - DNA, 1587 bp, synthetic construct
  misc_feature 1..1587: note = Variant of terminal deoxynucleotidyltransferase
  source 1..1587: mol_type = other DNA
atgcaccatcatcatcatcatggcggtagcggcagccacggcattcgtaccatcgattcggacttcgggaagaaacgccagaagaagatggataaccacgatagttccgccatctatgaaatcaaatttcacgagtttgtgctgttcattctcgaagagaaaatgggtgcgacgcgtcgtacttttctgacagatttagcccgcaagaaagggttccgcgtcgagaatgaactgtcagacagcgttacccacatcgtggcagaaaataattcacgctctgaagtattggcttggctgaaagaacacaagatggagaagaccaagcaattcgaactgctggatattagctggcttatcgaaagcatgaaagttggtaaaccggtggacaccaaggggaaataccagttggcggaatcgggtgagatgagtgcgaacccagatccgacagagggtcgtgaaaacgagctgcctcctactacgaagaccatttctcagtatgcgtgtcaacgccgcaccaccctgaacaaccataatcaacgttttacggacgcactggaaattcttgcggaaaattacgagttcaaacgcaacgatgatactgcgctgacttttatgcgtgctatttccgtgctgaaaagccttccgtttgaggtagttagcctgaaagacacggaaggattgccctggatcggtgatgaagtcaaagggattatggaagaaatcatcgaggtcggtgaatcgctggaagtgcaggccgtgctcaatgatgagcgctatcaaagcttcaaacgctttaagagtgtctttggagtgggggtgaagacagcagacaagtggtaccgtatgggtctgcgcacgctcgaggatgttcgttccagcaagaccctgaagttgaccccgatgcagaaagcgggtctgtgctattatgaagatcttgctcgcggcgttacgaaagccgaagctgacgcgattctgctgctggttcaggatgcagtcgcaactttcgacccggatgcgctggtggagattgtcggtggatttcgtcgtgggaaaccttttggtcacgacgttgatctgcttatcacatctccgggagctgagaaagagcaagaagaccagctcctgcagaaagtgaccaatctgtggaagaaacaagggttgttgctgtacggtcgtctggaatggagtcagtttgaagatgggaaactcccatcccgcaagatcgatgccctggaccattttgcgaaatgctttctgatcctcaaactttatgatcataaagtggacaaaagcaaatgggaaatgccgacgggttcgaacgaaagcgaggccaaaagttggaaagcaattcgcgtagatctggttcgttgcccctacgatggttttgcgtttgcgttgttgggttggaccggaagccgcatgttccgccgtgatctgcgctggtacgccaccgacgagaagaagatgatgctggacaatcatgcgctgtatgacctgaccaagaaaatctttctcaaagctaaatcggaagaggaaattttcgcacatctggggcttgaatacctggaaccgttcgaacgtaacgca

SEQ ID NO: 1708 - protein, 529 aa, synthetic construct
  REGION 1..529: note = Variant of terminal deoxynucleotidyltransferase
MHHHHHHGGSGSHGIRTIDSDFGKKRQKKMDNHDSSAIYEIKFHEFVLFILEEKMGATRRTFLTDLARKKGFRVENELSDSVTHIVAENNSRSEVLAWLKEHKMEKTKQFELLDISWLIESMKVGKPVDTKGKYQLAESGEMSANPDPTEGRENELPPTTKTISQYACQRRTTLNNHNQRFTDALEILAENYEFKRNDDTALTFMRAISVLKSLPFEVVSLKDTEGLPWIGDEVKGIMEEIIEVGESLEVQAVLNDERYQSFKRFKSVFGVGVKTADKWYRMGLRTLEDVRSSKTLKLTPMQKAGLCYYEDLARGVTKAEADAILLLVQDAVATFDPDALVEIVGGFRRGKPFGHDVDLLITSPGAEKEQEDQLLQKVTNLWKKQGLLLYGRLEWSQFEDGKLPSRKIDALDHFAKCFLILKLYDHKVDKSKWEMPTGSNESEAKSWKAIRVDLVRCPYDGFAFALLGWTGSRMFRRDLRWYATDEKKMMLDNHALYDLTKKIFLKAKSEEEIFAHLGLEYLEPFERNA

SEQ ID NO: 1709 - DNA, 1587 bp, synthetic construct
  misc_feature 1..1587: note = Variant of terminal deoxynucleotidyltransferase
  source 1..1587: mol_type = other DNA
atgcaccatcatcatcatcatggcggtagcggcagccacggcattcgtaccatcgattcggacttcgggaagaaacgccagaagaagatggataaccacgatagttccgccatctatgaaatcaaatttcacgagtttgtgctgttcattctcgaagagaaaatgggtgcgacgcgtcgtacttttctgacagatttagcccgcaagaaagggttccgcgtcgagaatgaactgtcagacagcgttacccacatcgtggcagaaaataattcacgctctgaagtattggcttggctgaaagaacacaagatggagaagaccaagcaattcgaactgctggatattagctggcttatcgaaagcatgaaagttggtaaaccggtggacaccaaggggaaataccagttggcggaatcgggtgagatgagtgcgaacccagatccgacagagggtcgtgaaaacgagctgcctcctactacgaagaccatttctcagtatgcgtgtcaacgccgcaccaccctgaacaaccataatcaacgttttacggacgcactggaaattcttgcggaaaattacgagttcaaacgcaacgatgatactgcgctgacttttatgcgtgctatttccgtgctgaaaagccttccgtttgaggtagttagcctgaaagacacggaaggattgccctggatcggtgatgaagtcaaagggattatggaagaaatcatcgaggtcggtgaatcgctggaagtgcaggccgtgctcaatgatgagcgctatcaagctttcaaacgctttaagagtgtctttggagtgggggtgaagacagcagacaagtggtaccgtatgggtctgcgcacgctcgaggatgttcgttccagcaagaccctgaagttgaccccgatgcagaaagcgggtctgtgctattatgaagatcttgctcgcggcgttacgaaagccgaagctgacgcgatttctctgctggttcaggatgcagtcgcaactttcgacccggatgcgctggtggagattgtcggtggatttcgtcgtgggaaaccttttggtcacgacgttgatctgcttatcacatctccgggagctgagaaagagcaagaagaccagctcctgcagaaagtgaccaatctgtggaagaaacaagggttgttgctgtacggtcgtctggaatggagtcagtttgaagatgggaaactcccatcccgcaagatcgatgccctggaccattttgcgaaatgctttctgatcctcaaactttatgatcataaagtggacaaaagcaaatgggaaatgccgacgggttcgaacgaaagcgaggccaaaagttggaaagcaattcgcgtagatctggttcgttgcccctacgatggttttgcgtttgcgttgttgggttggaccggaagccgcatgttccgccgtgatctgcgctggtacgccaccgacgagaagaagatgatgctggacaatcatgcgctgtatgacctgaccaagaaaatctttctcaaagctaaatcggaagaggaaattttcgcacatctggggcttgaatacctggaaccgttcgaacgtaacgca

SEQ ID NO: 1710 - protein, 529 aa, synthetic construct
  REGION 1..529: note = Variant of terminal deoxynucleotidyltransferase
MHHHHHHGGSGSHGIRTIDSDFGKKRQKKMDNHDSSAIYEIKFHEFVLFILEEKMGATRRTFLTDLARKKGFRVENELSDSVTHIVAENNSRSEVLAWLKEHKMEKTKQFELLDISWLIESMKVGKPVDTKGKYQLAESGEMSANPDPTEGRENELPPTTKTISQYACQRRTTLNNHNQRFTDALEILAENYEFKRNDDTALTFMRAISVLKSLPFEVVSLKDTEGLPWIGDEVKGIMEEIIEVGESLEVQAVLNDERYQAFKRFKSVFGVGVKTADKWYRMGLRTLEDVRSSKTLKLTPMQKAGLCYYEDLARGVTKAEADAISLLVQDAVATFDPDALVEIVGGFRRGKPFGHDVDLLITSPGAEKEQEDQLLQKVTNLWKKQGLLLYGRLEWSQFEDGKLPSRKIDALDHFAKCFLILKLYDHKVDKSKWEMPTGSNESEAKSWKAIRVDLVRCPYDGFAFALLGWTGSRMFRRDLRWYATDEKKMMLDNHALYDLTKKIFLKAKSEEEIFAHLGLEYLEPFERNA

SEQ ID NO: 1711 - DNA, 1587 bp, synthetic construct
  misc_feature 1..1587: note = Variant of terminal deoxynucleotidyltransferase
  source 1..1587: mol_type = other DNA
atgcaccatcatcatcatcatggcggtagcggcagccacggcattcgtaccatcgattcggacttcgggaagaaacgccagaagaagatggataaccacgatagttccgccatctatgaaatcaaatttcacgagtttgtgctgttcattctcgaagagaaaatgggtgcgacgcgtcgtacttttctgacagatttagcccgcaagaaagggttccgcgtcgagaatgaactgtcagacagcgttacccacatcgtggcagaaaataattcacgctctgaagtattggcttggctgaaagaacacaagatggagaagaccaagcaattcgaactgctggatattagctggcttatcgaaagcatgaaagttggtaaaccggtggacaccaaggggaaataccagttggcggaatcgggtgagatgagtgcgaacccagatccgacagagggtcgtgaaaacgagctgcctcctactacgaagaccatttctcagtatgcgtgtcaacgccgcaccaccctgaacaaccataatcaacgttttacggacgcactggaaattcttgcggaaaattacgagttcaaacgcaacgatgatactgcgctgacttttatgcgtgctatttccgtgctgaaaagccttccgtttgaggtagttagcctgaaagacacggaaggattgccctggatcggtgatgaagtcaaagggattatggaagaaatcatcgaggtcggtgaatcgctggaagtgcaggccgtgctcaatgatgagcgctatcaaagcttcaaacgctttaagagtgtctttggagtgggggtgaagacagcagacaagtggtaccgtatgggtctgcgcacgctcgaggatgttcgttccagcaagaccctgaagttgaccccgatgcagaaagcgggtctgtgctattatgaagatcttgctcgcggcgttacgaaagccgaagctgacgcgatttctctgctggttcaggatgcagtcgcaactttcgacccggatgcgctggtggagattgtcggtggatttcgtcgtgggaaaccttttggtcacgacgttgatctgcttatcacatctccgggagctgagaaagagcaagaagaccagctcctgcagaaagtgaccaatctgtggaagaaacaagggttgttgctgtacggtcgtctggaatggagtcagtttgaagatgggaaactcccatcccgcaagatcgatgccctggaccattttgcgaaatgctttctgatcctcaaactttatgatcataaagtggacaaaagcaaatgggaaatgccgacgggttcgaacgaagccgaggccaaaagttggaaagcaattcgcgtagatctggttcgttgcccctacgatggttttgcgtttgcgttgttgggttggaccggaagccgcatgttccgccgtgatctgcgctggtacgccaccgacgagaagaagatgatgctggacaatcatgcgctgtatgacctgaccaagaaaatctttctcaaagctaaatcggaagaggaaattttcgcacatctggggcttgaatacctggaaccgttcgaacgtaacgca

SEQ ID NO: 1712 - protein, 529 aa, synthetic construct
  REGION 1..529: note = Variant of terminal deoxynucleotidyltransferase
MHHHHHHGGSGSHGIRTIDSDFGKKRQKKMDNHDSSAIYEIKFHEFVLFILEEKMGATRRTFLTDLARKKGFRVENELSDSVTHIVAENNSRSEVLAWLKEHKMEKTKQFELLDISWLIESMKVGKPVDTKGKYQLAESGEMSANPDPTEGRENELPPTTKTISQYACQRRTTLNNHNQRFTDALEILAENYEFKRNDDTALTFMRAISVLKSLPFEVVSLKDTEGLPWIGDEVKGIMEEIIEVGESLEVQAVLNDERYQSFKRFKSVFGVGVKTADKWYRMGLRTLEDVRSSKTLKLTPMQKAGLCYYEDLARGVTKAEADAISLLVQDAVATFDPDALVEIVGGFRRGKPFGHDVDLLITSPGAEKEQEDQLLQKVTNLWKKQGLLLYGRLEWSQFEDGKLPSRKIDALDHFAKCFLILKLYDHKVDKSKWEMPTGSNEAEAKSWKAIRVDLVRCPYDGFAFALLGWTGSRMFRRDLRWYATDEKKMMLDNHALYDLTKKIFLKAKSEEEIFAHLGLEYLEPFERNA

SEQ ID NO: 1713 - DNA, 1587 bp, synthetic construct
  misc_feature 1..1587: note = Variant of terminal deoxynucleotidyltransferase
  source 1..1587: mol_type = other DNA
atgcaccatcatcatcatcatggcggtagcggcagccacggcattcgtaccatcgattcggacttcgggaagaaacgccagaagaagatggataaccacgatagttccgccatctatgaaatcaaatttcacgagtttgtgctgttcattctcgaagagaaaatgggtgcgacgcgtcgtacttttctgacagatttagcccgcaagaaagggttccgcgtcgagaatgaactgtcagacagcgttacccacatcgtggcagaaaataattcacgctctgaagtattggcttggctgaaagaacacaagatggagaagaccaagcaattcgaactgctggatattagctggcttatcgaaagcatgaaagttggtaaaccggtggacaccaaggggaaataccagttggcggaatcgggtgagatgagtgcgaacccagatccgacagagggtcgtgaaaacgagctgcctcctactacgaagaccatttctcagtatgcgtgtcaacgccgcaccaccctgaacaaccataatcaacgttttacggacgcactggaaattcttgcggaaaattacgagttcaaacgcaacgatgatactgcgctgacttttatgcgtgctatttccgtgctgaaaagccttccgtttgaggtagttagcctgaaagacacggaaggattgccctggatcggtgatgaagtcaaagggattatggaagaaatcatcgaggtcggtgaatcgctggaagtgcaggccgtgctcaatgatgagcgctatcaaagcttcaaacgctttaagagtgtctttggagtgggggtgaagacagcagacaagtggtaccgtatgggtctgcgcacgctcgaggatgttcgttccagcaagaccctgaagttgaccccgatgcagaaagcgggtctgtgctattatgaagatcttgctcgcggcgttacgaaagccgaagctgacgcgatttctctgctggttcaggaggcagtcgcaactttcgacccggatgcgctggtggagattgtcggtggatttcgtcgtgggaaaccttttggtcacgacgttgatctgcttatcacatctccgggagctgagaaagagcaagaagaccagctcctgcagaaagtgaccaatctgtggaagaaacaagggttgttgctgtacggtcgtctggaatggagtcagtttgaagatgggaaactcccatcccgcaagatcgatgccctggaccattttgcgaaatgctttctgatcctcaaactttatgatcataaagtggacaaaagcaaatgggaaatgccgacgggttcgaacgaaagcgaggccaaaagttggaaagcaattcgcgtagatctggttcgttgcccctacgatggttttgcgtttgcgttgttgggttggaccggaagccgcatgttccgccgtgatctgcgctggtacgccaccgacgagaagaagatgatgctggacaatcatgcgctgtatgacctgaccaagaaaatctttctcaaagctaaatcggaagaggaaattttcgcacatctggggcttgaatacctggaaccgttcgaacgtaacgca

SEQ ID NO: 1714 - protein, 529 aa, synthetic construct
  REGION 1..529: note = Variant of terminal deoxynucleotidyltransferase
MHHHHHHGGSGSHGIRTIDSDFGKKRQKKMDNHDSSAIYEIKFHEFVLFILEEKMGATRRTFLTDLARKKGFRVENELSDSVTHIVAENNSRSEVLAWLKEHKMEKTKQFELLDISWLIESMKVGKPVDTKGKYQLAESGEMSANPDPTEGRENELPPTTKTISQYACQRRTTLNNHNQRFTDALEILAENYEFKRNDDTALTFMRAISVLKSLPFEVVSLKDTEGLPWIGDEVKGIMEEIIEVGESLEVQAVLNDERYQSFKRFKSVFGVGVKTADKWYRMGLRTLEDVRSSKTLKLTPMQKAGLCYYEDLARGVTKAEADAISLLVQEAVATFDPDALVEIVGGFRRGKPFGHDVDLLITSPGAEKEQEDQLLQKVTNLWKKQGLLLYGRLEWSQFEDGKLPSRKIDALDHFAKCFLILKLYDHKVDKSKWEMPTGSNESEAKSWKAIRVDLVRCPYDGFAFALLGWTGSRMFRRDLRWYATDEKKMMLDNHALYDLTKKIFLKAKSEEEIFAHLGLEYLEPFERNA

SEQ ID NO: 1715 - DNA, 1587 bp, synthetic construct
  misc_feature 1..1587: note = Variant of terminal deoxynucleotidyltransferase
  source 1..1587: mol_type = other DNA
atgcaccatcatcatcatcatggcggtagcggcagccacggcattcgtaccatcgattcggacttcgggaagaaacgccagaagaagatggataaccacgatagttccgccatctatgaaatcaaatttcacgagtttgtgctgttcattctcgaagagaaaatgggtgcgacgcgtcgtacttttctgacagatttagcccgcaagaaagggttccgcgtcgagaatgaactgtcagacagcgttacccacatcgtggcagaaaataattcacgctctgaagtattggcttggctgaaagaacacaagatggagaagaccaagcaattcgaactgctggatattagctggcttatcgaaagcatgaaagttggtaaaccggtggacaccaaggggaaataccagttggcggaatcgggtgagatgagtgcgaacccagatccgacagagggtcgtgaaaacgagctgcctcctactacgaagaccatttctcagtatgcgtgtcaacgccgcaccaccctgaacaaccataatcaacgttttacggacgcactggaaattcttgcggaaaattacgagttcaaacgcaacgatgatactgcgctgacttttatgcgtgctatttccgtgctgaaaagccttccgtttgaggtagttagcctgaaagacacggaaggattgccctggatcggtgatgaagtcaaagggattatggaagaaatcatcgaggtcggtgaatcgctggaagtgcaggccgtgctcaatgatgagcgctatcaaagcttcaaacgctttaagagtgtctttggagtgggggtgaagacagcagacaagtggtaccgtatgggtctgcgcacgctcgaggatgttcgttccagcaagaccctgaagttgaccccgatgcagaaagcgggtctgtgctattatgaagatcttgctcgcggcgttacgaaagccgaagctgacgcgatttctctgctggttcaggatgcagtcgcaactttcgacccggatgcgctggtggagattgtcggtggatttcgtcgtgggaaaccttttggtcacgacgttgatctgcttatcacatctccgggagctgagaaagagcaagaagaccagctcctgcagaaagtgaccaatctgtggaagaaacaagggttgttgctgtacggtcgtctggaatggagtcagtttgaagatgggaaactcccaaaccgcaagatcgatgccctggaccattttgcgaaatgctttctgatcctcaaactttatgatcataaagtggacaaaagcaaatgggaaatgccgacgggttcgaacgaaagcgaggccaaaagttggaaagcaattcgcgtagatctggttcgttgcccctacgatggttttgcgtttgcgttgttgggttggaccggaagccgcatgttccgccgtgatctgcgctggtacgccaccgacgagaagaagatgatgctggacaatcatgcgctgtatgacctgaccaagaaaatctttctcaaagctaaatcggaagaggaaattttcgcacatctggggcttgaatacctggaaccgttcgaacgtaacgca

SEQ ID NO: 1716 - protein, 529 aa, synthetic construct
  REGION 1..529: note = Variant of terminal deoxynucleotidyltransferase
MHHHHHHGGSGSHGIRTIDSDFGKKRQKKMDNHDSSAIYEIKFHEFVLFILEEKMGATRRTFLTDLARKKGFRVENELSDSVTHIVAENNSRSEVLAWLKEHKMEKTKQFELLDISWLIESMKVGKPVDTKGKYQLAESGEMSANPDPTEGRENELPPTTKTISQYACQRRTTLNNHNQRFTDALEILAENYEFKRNDDTALTFMRAISVLKSLPFEVVSLKDTEGLPWIGDEVKGIMEEIIEVGESLEVQAVLNDERYQSFKRFKSVFGVGVKTADKWYRMGLRTLEDVRSSKTLKLTPMQKAGLCYYEDLARGVTKAEADAISLLVQDAVATFDPDALVEIVGGFRRGKPFGHDVDLLITSPGAEKEQEDQLLQKVTNLWKKQGLLLYGRLEWSQFEDGKLPNRKIDALDHFAKCFLILKLYDHKVDKSKWEMPTGSNESEAKSWKAIRVDLVRCPYDGFAFALLGWTGSRMFRRDLRWYATDEKKMMLDNHALYDLTKKIFLKAKSEEEIFAHLGLEYLEPFERNA

SEQ ID NO: 1717 - DNA, 1587 bp, synthetic construct
  misc_feature 1..1587: note = Variant of terminal deoxynucleotidyltransferase
  source 1..1587: mol_type = other DNA
atgcaccatcatcatcatcatggcggtagcggcagccacggcattcgtaccatcgattcggacttcgggaagaaacgccagaagaagatggataaccacgatagttccgccatctatgaaatcaaatttcacgagtttgtgctgttcattctcgaagagaaaatgggtgcgacgcgtcgtacttttctgacagatttagcccgcaagaaagggttccgcgtcgagaatgaactgtcagacagcgttacccacatcgtggcagaaaataattcacgctctgaagtattggcttggctgaaagaacacaagatggagaagaccaagcaattcgaactgctggatattagctggcttatcgaaagcatgaaagttggtaaaccggtggacaccaaggggaaataccagttggcggaatcgggtgagatgagtgcgaacccagatccgacagagggtcgtgaaaacgagctgcctcctactacgaagaccatttctcagtatgcgtgtcaacgccgcaccaccctgaacaaccataatcaacgttttacggacgcactggaaattcttgcggaaaattacgagttcaaacgcaacgatgatactgcgctgacttttatgcgtgctatttccgtgctgaaaagccttccgtttgaggtagttagcctgaaagacacggaaggattgccctggatcggtgatgaagtcaaagggattatggaagaaatcatcgaggtcggtgaatcgctggaagtgcaggccgtgctcaatgatgagcgctatcaaagcttcaaacgctttaagagtgtctttggagtgggggtgaagacagcagacaagtggtaccgtatgggtctgcgcacgctcgaggatgttcgttccagcaagaccctgaagttgaccccgatgcagaaagcgggtctgtgctattatgaagatcttgctcgcggcgttacgaaagccgaagctgacgcgatttctctgctggttcaggatgcagtcgcaactttcgacccggatgcgctggtggagattgtcggtggatttcgtcgtgggaaaccttttggtcacgacgttgatctgcttatcacatctccgggagctgagaaagagcaagacgaccagctcctgcagaaagtgaccaatctgtggaagaaacaagggttgttgctgtacggtcgtctggaatggagtcagtttgaagatgggaaactcccatcccgcaagatcgatgccctggaccattttgcgaaatgctttctgatcctcaaactttatgatcataaagtggacaaaagcaaatgggaaatgccgacgggttcgaacgaaagcgaggccaaaagttggaaagcaattcgcgtagatctggttcgttgcccctacgatggttttgcgtttgcgttgttgggttggaccggaagccgcatgttccgccgtgatctgcgctggtacgccaccgacgagaagaagatgatgctggacaatcatgcgctgtatgacctgaccaagaaaatctttctcaaagctaaatcggaagaggaaattttcgcacatctggggcttgaatacctggaaccgttcgaacgtaacgca

SEQ ID NO: 1718 - protein, 529 aa, synthetic construct
  REGION 1..529: note = Variant of terminal deoxynucleotidyltransferase
MHHHHHHGGSGSHGIRTIDSDFGKKRQKKMDNHDSSAIYEIKFHEFVLFILEEKMGATRRTFLTDLARKKGFRVENELSDSVTHIVAENNSRSEVLAWLKEHKMEKTKQFELLDISWLIESMKVGKPVDTKGKYQLAESGEMSANPDPTEGRENELPPTTKTISQYACQRRTTLNNHNQRFTDALEILAENYEFKRNDDTALTFMRAISVLKSLPFEVVSLKDTEGLPWIGDEVKGIMEEIIEVGESLEVQAVLNDERYQSFKRFKSVFGVGVKTADKWYRMGLRTLEDVRSSKTLKLTPMQKAGLCYYEDLARGVTKAEADAISLLVQDAVATFDPDALVEIVGGFRRGKPFGHDVDLLITSPGAEKEQDDQLLQKVTNLWKKQGLLLYGRLEWSQFEDGKLPSRKIDALDHFAKCFLILKLYDHKVDKSKWEMPTGSNESEAKSWKAIRVDLVRCPYDGFAFALLGWTGSRMFRRDLRWYATDEKKMMLDNHALYDLTKKIFLKAKSEEEIFAHLGLEYLEPFERNA

SEQ ID NO: 1719 - DNA, 1587 bp, synthetic construct
  misc_feature 1..1587: note = Variant of terminal deoxynucleotidyltransferase
  source 1..1587: mol_type = other DNA
atgcaccatcatcatcatcatggcggtagcggcagccacggcattcgtaccatcgattcggacttcgggaagaaacgccagaagaagatggataaccacgatagttccgccatctatgaaatcaaatttcacgagtttgtgctgttcattctcgaagagaaaatgggtgcgacgcgtcgtacttttctgacagatttagcccgcaagaaagggttccgcgtcgagaatgaactgtcagacagcgttacccacatcgtggcagaaaataattcacgctctgaagtattggcttggctgaaagaacacaagatggagaagaccaagcaattcgaactgctggatattagctggcttatcgaaagcatgaaagttggtaaaccggtggacaccaaggggaaataccagttggcggaatcgggtgagatgagtgcgaacccagatccgacagagggtcgtgaaaacgagctgcctcctactacgaagaccatttctcagtatgcgtgtcaacgccgcaccaccctgaacaaccataatcaacgttttacggacgcactggaaattcttgcggaaaattacgagttcaaacgcaacgatgatactgcgctgacttttatgcgtgctatttccgtgctgaaaagccttccgtttgaggtagttagcctgaaagacacggaaggattgccctggatcggtgatgaagtcaaagggattatggaagaaatcatcgaggtcggtgaatcgctggaagtgcaggccgtgctcaatgatgagcgctatcaaagcttcaaacgctttaagagtgtctttggagtgggggtgaagacagcagacaagtggtaccgtatgggtctgcgcacgctcgaggatgttcgttccagcaagaccctgaagttgaccccgatgcagaaagcgggtctgtgctattatgaagatcttgctcgcggcgttacgaaagccgaagctgacgcgatttctctgctggttcaggatgcagtcgcaactttcgacccggatgcgctggtggagattgtcggtggatttcgtcgtgggaaaccttttggtcacgacgttgatctgcttatcacatctccgggagctgagaaagagcaagaagaccagctcctgcagaaagtgaccaatctgtggaagaaacaagggttgttgctgtacggtcgtctggaatggagtcagtttgaagatgggaaactcccatcccgcaagatcgatgccctggaccattttgcgaaatgctttctgatcctcaaactttatgatcataaagtggacaaaagcaaatgggaaatgccgacgggttcgaacgaaagcgaggccaaaagttggaaagcaattcgcgtagatctggttcgttgcccctacgatggttttgcgtttgcgttgttgggttggaccggaagccgcatgttccgccgtgatctgcgctggtacgccaccgacgagaagaagatgatgctggacaatcatgcgctgtatgacctgaccaagaaaatctttctcaaagctgactcggaagaggaaattttcgcacatctggggcttgaatacctggaaccgttcgaacgtaacgca

SEQ ID NO: 1720 - protein, 529 aa, synthetic construct
  REGION 1..529: note = Variant of terminal deoxynucleotidyltransferase
MHHHHHHGGSGSHGIRTIDSDFGKKRQKKMDNHDSSAIYEIKFHEFVLFILEEKMGATRRTFLTDLARKKGFRVENELSDSVTHIVAENNSRSEVLAWLKEHKMEKTKQFELLDISWLIESMKVGKPVDTKGKYQLAESGEMSANPDPTEGRENELPPTTKTISQYACQRRTTLNNHNQRFTDALEILAENYEFKRNDDTALTFMRAISVLKSLPFEVVSLKDTEGLPWIGDEVKGIMEEIIEVGESLEVQAVLNDERYQSFKRFKSVFGVGVKTADKWYRMGLRTLEDVRSSKTLKLTPMQKAGLCYYEDLARGVTKAEADAISLLVQDAVATFDPDALVEIVGGFRRGKPFGHDVDLLITSPGAEKEQEDQLLQKVTNLWKKQGLLLYGRLEWSQFEDGKLPSRKIDALDHFAKCFLILKLYDHKVDKSKWEMPTGSNESEAKSWKAIRVDLVRCPYDGFAFALLGWTGSRMFRRDLRWYATDEKKMMLDNHALYDLTKKIFLKADSEEEIFAHLGLEYLEPFERNA

SEQ ID NO: 1721 - DNA, 1587 bp, synthetic construct
  misc_feature 1..1587: note = Variant of terminal deoxynucleotidyltransferase
  source 1..1587: mol_type = other DNA
atgcaccatcatcatcatcatggcggtagcggcagccacggcattcgtaccatcgattcggacttcgggaagaaacgccagaagaagatggataaccacgatagttccgccatctatgaaatcaaatttcacgagtttgtgctgttcattctcgaagagaaaatgggtgcgacgcgtcgtacttttctgacagatttagcccgcaagaaagggttccgcgtcgagaatgaactgtcagacagcgttacccacatcgtggcagaaaataattcacgctctgaagtattggcttggctgaaagaacacaagatggagaagaccaagcaattcgaactgctggatattagctggcttatcgaaagcatgaaagttggtaaaccggtggacaccaaggggaaataccagttggcggaatcgggtgagatgagtgcgaacccagatccgacagagggtcgtgaaaacgagctgcctcctactacgaagaccatttctcagtatgcgtgtcaacgccgcaccaccctgaacaaccataatcaacgttttacggacgcactggaaattcttgcggaaaattacgagttcaaacgcaacgatgatactgcgctgacttttatgcgtgctatttccgtgctgaaaagccttccgtttgaggtagttagcctgaaagacacggaaggattgccctggatcggtgatgaagtcaaagggattatggaagaaatcatcgaggtcggtgaatcgctggaagtgcaggccgtgctcaatgatgagcgctatcaaagcttcaaacgctttaagagtgtctttggagtgggggtgaagacagcagacaagtggtaccgtatgggtctgcgcacgctcgaggatgttcgttccagcaagaccctgaagttgaccccgatgcagaaagcgggtctgtgctattatgaagatcttgctcgcggcgttacgaaagccgaagctgacgcgatttctctgctggttcaggatgcagtcgcaactttcgacccggatgcgctggtggagattgtcggtggatttcgtcgtgggaaaccttttggtcacgacgttgatctgcttatcacatctccgggagctgagaaagagcaagaagaccagctcctgcagaaagtgaccaatctgtggaagaaacaagggttgttgctgtacggtcgtctggaatggagtcagtttgaagatgggaaactcccatcccgcaagatcgatcagctggaccattttgcgaaatgctttctgatcctcaaactttatgatcataaagtggacaaaagcaaatgggaaatgccgacgggttcgaacgaaagcgaggccaaaagttggaaagcaattcgcgtagatctggttcgttgcccctacgatggttttgcgtttgcgttgttgggttggaccggaagccgcatgttccgccgtgatctgcgctggtacgccaccgacgagaagaagatgatgctggacaatcatgcgctgtatgacctgaccaagaaaatctttctcaaagctaaatcggaagaggaaattttcgcacatctggggcttgaatacctggaaccgttcgaacgtaacgca

SEQ ID NO: 1722 - protein, 529 aa, synthetic construct
  REGION 1..529: note = Variant of terminal deoxynucleotidyltransferase
MHHHHHHGGSGSHGIRTIDSDFGKKRQKKMDNHDSSAIYEIKFHEFVLFILEEKMGATRRTFLTDLARKKGFRVENELSDSVTHIVAENNSRSEVLAWLKEHKMEKTKQFELLDISWLIESMKVGKPVDTKGKYQLAESGEMSANPDPTEGRENELPPTTKTISQYACQRRTTLNNHNQRFTDALEILAENYEFKRNDDTALTFMRAISVLKSLPFEVVSLKDTEGLPWIGDEVKGIMEEIIEVGESLEVQAVLNDERYQSFKRFKSVFGVGVKTADKWYRMGLRTLEDVRSSKTLKLTPMQKAGLCYYEDLARGVTKAEADAISLLVQDAVATFDPDALVEIVGGFRRGKPFGHDVDLLITSPGAEKEQEDQLLQKVTNLWKKQGLLLYGRLEWSQFEDGKLPSRKIDQLDHFAKCFLILKLYDHKVDKSKWEMPTGSNESEAKSWKAIRVDLVRCPYDGFAFALLGWTGSRMFRRDLRWYATDEKKMMLDNHALYDLTKKIFLKAKSEEEIFAHLGLEYLEPFERNA

SEQ ID NO: 1723 - DNA, 1587 bp, synthetic construct
  misc_feature 1..1587: note = Variant of terminal deoxynucleotidyltransferase
  source 1..1587: mol_type = other DNA
atgcaccatcatcatcatcatggcggtagcggcagccacggcattcgtaccatcgattcggacttcgggaagaaacgccagaagaagatggataaccacgatagttccgccatctatgaaatcaaatttcacgagtttgtgctgttcattctcgaagagaaaatgggtgcgacgcgtcgtacttttctgacagatttagcccgcaagaaagggttccgcgtcgagaatgaactgtcagacagcgttacccacatcgtggcagaaaataattcacgctctgaagtattggcttggctgaaagaacacaagatggagaagaccaagcaattcgaactgctggatattagctggcttatcgaaagcatgaaagttggtaaaccggtggacaccaaggggaaataccagttggcggaatcgggtgagatgagtgcgaacccagatccgacagagggtcgtgaaaacgagctgcctcctactacgaagaccatttctcagtatgcgtgtcaacgccgcaccaccctgaacaaccataatcaacgttttacggacgcactggaaattcttgcggaaaattacgagttcaaacgcaacgatgatactgcgctgacttttatgcgtgctatttccgtgctgaaaagccttccgtttgaggtagttagcctgaaagacacggaaggattgccctggatcggtgatgaagtcaaagggattatggaagaaatcatcgaggtcggtgaatcgctggaagtgcaggccgtgctcaatgatgagcgctatcaaagcttcaaacgctttaagagtgtctttggagtgggggtgaagacagcagacaagtggtaccgtatgggtctgcgcacgctcgaggatgttcgttccagcaagaccctgaagttgaccccgatgcagaaagcgggtctgtgctattatgaagatcttgctcgcggcgttacgaaagccgaagctgacgcgatttctctgctggttcaggatgcagtcgcaactttcgacccggatgcgctggtggagattgtcggtggatttcgtcgtgggaaaccttttggtcacgacgttgatctgcttatcacatctccgggagctgagaaagagcaagaagaccagctcctgcagaaagtgaccaatctgtggaagaaacaagggttgttgctgtacggtcgtctggaatggagtcagtttgaagatgggaaactcccatcccgcaagatcgatgccctggaccattttgcgaaatgctttctgatcctcaaactttatgatcataaagtggacaaaagcaaatgggaaatgccgacgggttcgaacgaaagcgaggccaaaagttggaaagcaattcgcgtagatctggttcgttgcccctacgatggttttgcgtttgcgttgttgggttggaccggaagccgcatgttccgccgtgatctgcgctggtacgccaccgacgagaagaagatgatgctggacaatcatggtctgtatgacctgaccaagaaaatctttctcaaagctaaatcggaagaggaaattttcgcacatctggggcttgaatacctggaaccgttcgaacgtaacgca

SEQ ID NO: 1724 - protein, 529 aa, synthetic construct
  REGION 1..529: note = Variant of terminal deoxynucleotidyltransferase
MHHHHHHGGSGSHGIRTIDSDFGKKRQKKMDNHDSSAIYEIKFHEFVLFILEEKMGATRRTFLTDLARKKGFRVENELSDSVTHIVAENNSRSEVLAWLKEHKMEKTKQFELLDISWLIESMKVGKPVDTKGKYQLAESGEMSANPDPTEGRENELPPTTKTISQYACQRRTTLNNHNQRFTDALEILAENYEFKRNDDTALTFMRAISVLKSLPFEVVSLKDTEGLPWIGDEVKGIMEEIIEVGESLEVQAVLNDERYQSFKRFKSVFGVGVKTADKWYRMGLRTLEDVRSSKTLKLTPMQKAGLCYYEDLARGVTKAEADAISLLVQDAVATFDPDALVEIVGGFRRGKPFGHDVDLLITSPGAEKEQEDQLLQKVTNLWKKQGLLLYGRLEWSQFEDGKLPSRKIDALDHFAKCFLILKLYDHKVDKSKWEMPTGSNESEAKSWKAIRVDLVRCPYDGFAFALLGWTGSRMFRRDLRWYATDEKKMMLDNHGLYDLTKKIFLKAKSEEEIFAHLGLEYLEPFERNA

SEQ ID NO: 1725 - DNA, 1587 bp, synthetic construct
  misc_feature 1..1587: note = Variant of terminal deoxynucleotidyltransferase
  source 1..1587: mol_type = other DNA
atgcaccatcatcatcatcatggcggtagcggcagccacggcattcgtaccatcgattcggacttcgggaagaaacgccagaagaagatggataaccacgatagttccgccatctatgaaatcaaatttcacgagtttgtgctgttcattctcgaagagaaaatgggtgcgacgcgtcgtacttttctgacagatttagcccgcaagaaagggttccgcgtcgagaatgaactgtcagacagcgttacccacatcgtggcagaaaataattcacgctctgaagtattggcttggctgaaagaacacaagatggagaagaccaagcaattcgaactgctggatattagctggcttatcgaaagcatgaaagttggtaaaccggtggacaccaaggggaaataccagttggcggaatcgggtgagatgagtgcgaacccagatccgacagagggtcgtgaaaacgagctgcctcctactacgaagaccatttctcagtatgcgtgtcaacgccgcaccaccctgaacaaccataatcaacgttttacggacgcactggaaattcttgcggaaaattacgagttcaaacgcaacgatgatactgcgctgacttttatgcgtgctatttccgtgctgaaaagccttccgtttgaggtagttagcctgaaagacacggaaggattgccctggatcggtgatgaagtcaaagggattatggaagaaatcatcgaggtcggtgaatcgctggaagtgcaggaggtgctcaatgatgagcgctatcaaagcttcaaacgctttaagagtgtctttggagtgggggtgaagacagcagacaagtggtaccgtatgggtctgcgcacgctcgaggatgttcgttccagcaagaccctgaagttgaccccgatgcagaaagcgggtctgtgctattatgaagatcttgctcgcggcgttacgaaagccgaagctgacgcgatttctctgctggttcaggatgcagtcgcaactttcgacccggatgcgctggtggagattgtcggtggatttcgtcgtgggaaaccttttggtcacgacgttgatctgcttatcacatctccgggagctgagaaagagcaagaagaccagctcctgcagaaagtgaccaatctgtggaagaaacaagggttgttgctgtacggtcgtctggaatggagtcagtttgaagatgggaaactcccatcccgcaagatcgatgccctggaccattttgcgaaatgctttctgatcctcaaactttatgatcataaagtggacaaaagcaaatgggaaatgccgacgggttcgaacgaaagcgaggccaaaagttggaaagcaattcgcgtagatctggttcgttgcccctacgatggttttgcgtttgcgttgttgggttggaccggaagccgcatgttccgccgtgatctgcgctggtacgccaccgacgagaagaagatgatgctggacaatcatgcgctgtatgacctgaccaagaaaatctttctcaaagctaaatcggaagaggaaattttcgcacatctggggcttgaatacctggaaccgttcgaacgtaacgca

SEQ ID NO: 1726 - protein, 529 aa, synthetic construct
  REGION 1..529: note = Variant of terminal deoxynucleotidyltransferase
MHHHHHHGGSGSHGIRTIDSDFGKKRQKKMDNHDSSAIYEIKFHEFVLFILEEKMGATRRTFLTDLARKKGFRVENELSDSVTHIVAENNSRSEVLAWLKEHKMEKTKQFELLDISWLIESMKVGKPVDTKGKYQLAESGEMSANPDPTEGRENELPPTTKTISQYACQRRTTLNNHNQRFTDALEILAENYEFKRNDDTALTFMRAISVLKSLPFEVVSLKDTEGLPWIGDEVKGIMEEIIEVGESLEVQEVLNDERYQSFKRFKSVFGVGVKTADKWYRMGLRTLEDVRSSKTLKLTPMQKAGLCYYEDLARGVTKAEADAISLLVQDAVATFDPDALVEIVGGFRRGKPFGHDVDLLITSPGAEKEQEDQLLQKVTNLWKKQGLLLYGRLEWSQFEDGKLPSRKIDALDHFAKCFLILKLYDHKVDKSKWEMPTGSNESEAKSWKAIRVDLVRCPYDGFAFALLGWTGSRMFRRDLRWYATDEKKMMLDNHALYDLTKKIFLKAKSEEEIFAHLGLEYLEPFERNA

SEQ ID NO: 1727 - DNA, 1587 bp, synthetic construct
  misc_feature 1..1587: note = Variant of terminal deoxynucleotidyltransferase
  source 1..1587: mol_type = other DNA
atgcaccatcatcatcatcatggcggtagcggcagccacggcattcgtaccatcgattcggacttcgggaagaaacgccagaagaagatggataaccacgatagttccgccatctatgaaatcaaatttcacgagtttgtgctgttcattctcgaagagaaaatgggtgcgacgcgtcgtacttttctgacagatttagcccgcaagaaagggttccgcgtcgagaatgaactgtcagacagcgttacccacatcgtggcagaaaataattcacgctctgaagtattggcttggctgaaagaacacaagatggagaagaccaagcaattcgaactgctggatattagctggcttatcgaaagcatgaaagttggtaaaccggtggacaccaaggggaaataccagttggcggaatcgggtgagatgagtgcgaacccagatccgacagagggtcgtgaaaacgagctgcctcctactacgaagaccatttctcagtatgcgtgtcaacgccgcaccaccctgaacaaccataatcaacgttttacggacgcactggaaattatggcggaaaattacgagttcaaacgcaacgatgatactgcgctgacttttatgcgtgctatttccgtgctgaaaagccttccgtttgaggtagttagcctgaaagacacggaaggattgccctggatcggtgatgaagtcaaagggattatggaagaaatcatcgaggtcggtgaatcgctggaagtgcaggccgtgctcaatgatgagcgctatcaaagcttcaaacgctttaagagtgtctttggagtgggggtgaagacagcagacaagtggtaccgtatgggtctgcgcacgctcgaggatgttcgttccagcaagaccctgaagttgaccccgatgcagaaagcgggtctgtgctattatgaagatcttgctcgcggcgttacgaaagccgaagctgacgcgatttctctgctggttcaggatgcagtcgcaactttcgacccggatgcgctggtggagattgtcggtggatttcgtcgtgggaaaccttttggtcacgacgttgatctgcttatcacatctccgggagctgagaaagagcaagaagaccagctcctgcagaaagtgaccaatctgtggaagaaacaagggttgttgctgtacggtcgtctggaatggagtcagtttgaagatgggaaactcccatcccgcaagatcgatgccctggaccattttgcgaaatgctttctgatcctcaaactttatgatcataaagtggacaaaagcaaatgggaaatgccgacgggttcgaacgaaagcgaggccaaaagttggaaagcaattcgcgtagatctggttcgttgcccctacgatggttttgcgtttgcgttgttgggttggaccggaagccgcatgttccgccgtgatctgcgctggtacgccaccgacgagaagaagatgatgctggacaatcatgcgctgtatgacctgaccaagaaaatctttctcaaagctaaatcggaagaggaaattttcgcacatctggggcttgaatacctggaaccgttcgaacgtaacgca

SEQ ID NO: 1728 - protein, 529 aa, synthetic construct
  REGION 1..529: note = Variant of terminal deoxynucleotidyltransferase
MHHHHHHGGSGSHGIRTIDSDFGKKRQKKMDNHDSSAIYEIKFHEFVLFILEEKMGATRRTFLTDLARKKGFRVENELSDSVTHIVAENNSRSEVLAWLKEHKMEKTKQFELLDISWLIESMKVGKPVDTKGKYQLAESGEMSANPDPTEGRENELPPTTKTISQYACQRRTTLNNHNQRFTDALEIMAENYEFKRNDDTALTFMRAISVLKSLPFEVVSLKDTEGLPWIGDEVKGIMEEIIEVGESLEVQAVLNDERYQSFKRFKSVFGVGVKTADKWYRMGLRTLEDVRSSKTLKLTPMQKAGLCYYEDLARGVTKAEADAISLLVQDAVATFDPDALVEIVGGFRRGKPFGHDVDLLITSPGAEKEQEDQLLQKVTNLWKKQGLLLYGRLEWSQFEDGKLPSRKIDALDHFAKCFLILKLYDHKVDKSKWEMPTGSNESEAKSWKAIRVDLVRCPYDGFAFALLGWTGSRMFRRDLRWYATDEKKMMLDNHALYDLTKKIFLKAKSEEEIFAHLGLEYLEPFERNA

SEQ ID NO: 1729 - DNA, 1587 bp, synthetic construct
  misc_feature 1..1587: note = Variant of terminal deoxynucleotidyltransferase
  source 1..1587: mol_type = other DNA
atgcaccatcatcatcatcatggcggtagcggcagccacggcattcgtaccatcgattcggacttcgggaagaaacgccagaagaagatggataaccacgatagttccgccatctatgaaatcaaatttcacgagtttgtgctgttcattctcgaagagaaaatgggtgcgacgcgtcgtacttttctgacagatttagcccgcaagaaagggttccgcgtcgagaatgaactgtcagacagcgttacccacatcgtggcagaaaataattcacgctctgaagtattggcttggctgaaagaacacaagatggagaagaccaagcaattcgaactgctggatattagctggcttatcgaaagcatgaaagttggtaaaccggtggacaccaaggggaaataccagttggcggaatcgggtgagatgagtgcgaacccagatccgacagagggtcgtgaaaacgagctgcctcctactacgaagaccatttctcagtatgcgtgtcaacgccgcaccaccctgaacaaccataatcaacgttttacggacgcactggaaattcttgcggaaaattacgagttcaaacgcaacgatgatactgcgctgacttttatgcgtgctgcttccgtgctgaaaagccttccgtttgaggtagttagcctgaaagacacggaaggattgccctggatcggtgatgaagtcaaagggattatggaagaaatcatcgaggtcggtgaatcgctggaagtgcaggccgtgctcaatgatgagcgctatcaaagcttcaaacgctttaagagtgtctttggagtgggggtgaagacagcagacaagtggtaccgtatgggtctgcgcacgctcgaggatgttcgttccagcaagaccctgaagttgaccccgatgcagaaagcgggtctgtgctattatgaagatcttgctcgcggcgttacgaaagccgaagctgacgcgatttctctgctggttcaggatgcagtcgcaactttcgacccggatgcgctggtggagattgtcggtggatttcgtcgtgggaaaccttttggtcacgacgttgatctgcttatcacatctccgggagctgagaaagagcaagaagaccagctcctgcagaaagtgaccaatctgtggaagaaacaagggttgttgctgtacggtcgtctggaatggagtcagtttgaagatgggaaactcccatcccgcaagatcgatgccctggaccattttgcgaaatgctttctgatcctcaaactttatgatcataaagtggacaaaagcaaatgggaaatgccgacgggttcgaacgaaagcgaggccaaaagttggaaagcaattcgcgtagatctggttcgttgcccctacgatggttttgcgtttgcgttgttgggttggaccggaagccgcatgttccgccgtgatctgcgctggtacgccaccgacgagaagaagatgatgctggacaatcatgcgctgtatgacctgaccaagaaaatctttctcaaagctaaatcggaagaggaaattttcgcacatctggggcttgaatacctggaaccgttcgaacgtaacgca

SEQ ID NO: 1730 - protein, 529 aa, synthetic construct
  REGION 1..529: note = Variant of terminal deoxynucleotidyltransferase
MHHHHHHGGSGSHGIRTIDSDFGKKRQKKMDNHDSSAIYEIKFHEFVLFILEEKMGATRRTFLTDLARKKGFRVENELSDSVTHIVAENNSRSEVLAWLKEHKMEKTKQFELLDISWLIESMKVGKPVDTKGKYQLAESGEMSANPDPTEGRENELPPTTKTISQYACQRRTTLNNHNQRFTDALEILAENYEFKRNDDTALTFMRAASVLKSLPFEVVSLKDTEGLPWIGDEVKGIMEEIIEVGESLEVQAVLNDERYQSFKRFKSVFGVGVKTADKWYRMGLRTLEDVRSSKTLKLTPMQKAGLCYYEDLARGVTKAEADAISLLVQDAVATFDPDALVEIVGGFRRGKPFGHDVDLLITSPGAEKEQEDQLLQKVTNLWKKQGLLLYGRLEWSQFEDGKLPSRKIDALDHFAKCFLILKLYDHKVDKSKWEMPTGSNESEAKSWKAIRVDLVRCPYDGFAFALLGWTGSRMFRRDLRWYATDEKKMMLDNHALYDLTKKIFLKAKSEEEIFAHLGLEYLEPFERNA

SEQ ID NO: 1731 - DNA, 1587 bp, synthetic construct
  misc_feature 1..1587: note = Variant of terminal deoxynucleotidyltransferase
  source 1..1587: mol_type = other DNA
atgcaccatcatcatcatcatggcggtagcggcagccacggcattcgtaccatcgattcggacttcgggaagaaacgccagaagaagatggataaccacgatagttccgccatctatgaaatcaaatttcacgagtttgtgctgttcattctcgaagagaaaatgggtgcgacgcgtcgtacttttctgacagatttagcccgcaagaaagggttccgcgtcgagaatgaactgtcagacagcgttacccacatcgtggcagaaaataattcacgctctgaagtattggcttggctgaaagaacacaagatggagaagaccaagcaattcgaactgctggatattagctggcttatcgaaagcatgaaagttggtaaaccggtggacaccaaggggaaataccagttggcggaatcgggtgagatgagtgcgaacccagatccgacagagggtcgtgaaaacgagctgcctcctactacgaagaccatttctcagtatgcgtgtcaacgccgcaccaccctgaacaaccataatcaacgttttacggacgcactggaaattcttgcggaaaattacgagttcaaacgcaacgatgatactgcgctgacttttatgcgtgctatttccgtgctgaaaagccttccgtttgaggtagttagcctgaaagacacggaaggattgccctggatcggtgatgaagtcaaagggattatggaagaaatcatcgaggtcggtgaatcgctggaagtgcaggccgtgctcaatgatgagcgctatcaaagcttcaaacgctttaagagtgtctttggagtgggggtgaagacagcagacaagtggtaccgtatgggtctgcgcacgctcgaggatgttcgttccagcaagaccctgaagttgaccccgatgcagaaagcgggtctgtgctattatgaagatcttgctcgcggcgttacgaaagccgaagctgacgcgatttctctgctggttcaggatgcagtcgcaactttcgacccggatgcgctggtggagattgtcggtggatttcgtcgtgggaaaccttttggtcacgacgttgatctgcttatcacatctccgggagctgagaaagagcaagaagaccagctcctgcagaaagtgaccaatctgtggaagaaacaagggttgttgctgtacggtcgtctggaatggagtcagtttgaagatgggaaactcccatcccgcaagatcgatgccctggaccattttgcgaaatgctttctgatcctcaaactttatgatcataaagtggacaaaagcaaatgggaaatgccgacgggttcgaacgaaagcgaggccaaaagttggaaagcaattcgcgtagatctggttcgttgcccctacgatggttttgcgtttgcgttgttgggttggaccggaagccgcatgttccgccgtgatctgcgctggtacgccaccgacgagaagaagatgatgctggacaatcatgcgctgtatgacctgaccaagaaaatctttctcaaagctaaatcggaagaggaaattttcgcacatctggggcttgactacctggaaccgttcgaacgtaacgca

SEQ ID NO: 1732 - protein, 529 aa, synthetic construct
  REGION 1..529: note = Variant of terminal deoxynucleotidyltransferase
MHHHHHHGGSGSHGIRTIDSDFGKKRQKKMDNHDSSAIYEIKFHEFVLFILEEKMGATRRTFLTDLARKKGFRVENELSDSVTHIVAENNSRSEVLAWLKEHKMEKTKQFELLDISWLIESMKVGKPVDTKGKYQLAESGEMSANPDPTEGRENELPPTTKTISQYACQRRTTLNNHNQRFTDALEILAENYEFKRNDDTALTFMRAISVLKSLPFEVVSLKDTEGLPWIGDEVKGIMEEIIEVGESLEVQAVLNDERYQSFKRFKSVFGVGVKTADKWYRMGLRTLEDVRSSKTLKLTPMQKAGLCYYEDLARGVTKAEADAISLLVQDAVATFDPDALVEIVGGFRRGKPFGHDVDLLITSPGAEKEQEDQLLQKVTNLWKKQGLLLYGRLEWSQFEDGKLPSRKIDALDHFAKCFLILKLYDHKVDKSKWEMPTGSNESEAKSWKAIRVDLVRCPYDGFAFALLGWTGSRMFRRDLRWYATDEKKMMLDNHALYDLTKKIFLKAKSEEEIFAHLGLDYLEPFERNA

SEQ ID NO: 1733 - DNA, 1587 bp, synthetic construct
  misc_feature 1..1587: note = Variant of terminal deoxynucleotidyltransferase
  source 1..1587: mol_type = other DNA
atgcaccatcatcatcatcatggcggtagcggcagccacggcattcgtaccatcgattcggacttcgggaagaaacgccagaagaagatggataaccacgatagttccgccatctatgaaatcaaatttcacgagtttgtgctgttcattctcgaagagaaaatgggtgcgacgcgtcgtacttttctgacagatttagcccgcaagaaagggttccgcgtcgagaatgaactgtcagacagcgttacccacatcgtggcagaaaataattcacgctctgaagtattggcttggctgaaagaacacaagatggagaagaccaagcaattcgaactgctggatattagctggcttatcgaaagcatgaaagttggtaaaccggtggacaccaaggggaaataccagttggcggaatcgggtgagatgagtgcgaacccagatccgacagagggtcgtgaaaacgagctgcctcctactacgaagaccatttctcagtatgcgtgtcaacgccgcaccaccctgaacaaccataatcaacgttttacggacgcactggaaattcttgcggaaaattacgagttcaaacgcaacgatgatactgcgctgacttttatgcgtgctatttccgtgctgaaaagccttccgtttgaggtagttagcctgaaagacacggaaggattgccctggatcggtgatgaagtcaaagggattatggaagaaatcatcgaggtcggtgaatcgctggaagtgcaggccgtgctcaatgatgagcgctatcaaagcttcaaacgctttaagagtgtctttggagtgggggtgaagacagcagacaagtggtaccgtatgggtctgcgcacgctcgaggatgttcgttccagcaagaccctgaagttgaccccgatgcagaaagcgggtctgtgctattatgaagatcttgctcgcggcgttacgaaagccgaagctgacgcgatttctctgctggttcaggatgcagtcgcaactttcgacccggatgcgctggtggagattgtcggtggatttcgtcgtgggaaaccttttggtcacgacgttgatctgcttatcacatctccgggagctgagaaagagcaagaagaccagctcctgcagaaagtgaccaatctgtggaagaaacaagggttgttgctgtacggtcgtctggaatggagtcagtttgaagatgggaaactcccatcccgcaagatcgatgccctggaccattttgcgaaatgctttctgatcctcaaactttatgatcataaagtggacaaaagcaaatgggaaatgccgacgggttcgaacgaaagcgaggccaaaagttggaaagcaattcgcgtagatctggttcgttgcccctacgatggttttgcgtttgcgttgttgggttggaccggaagccgcatgttccgccgtgatctgcgctggtacgccaccgacgagaagaagatgatgctggacaatcatgcgctgtatgacctgaccaagaaaatctttctcagtgctaaatcggaagaggaaattttcgcacatctggggcttgaatacctggaaccgttcgaacgtaacgca

SEQ ID NO: 1734 - protein, 529 aa, synthetic construct
  REGION 1..529: note = Variant of terminal deoxynucleotidyltransferase
MHHHHHHGGSGSHGIRTIDSDFGKKRQKKMDNHDSSAIYEIKFHEFVLFILEEKMGATRRTFLTDLARKKGFRVENELSDSVTHIVAENNSRSEVLAWLKEHKMEKTKQFELLDISWLIESMKVGKPVDTKGKYQLAESGEMSANPDPTEGRENELPPTTKTISQYACQRRTTLNNHNQRFTDALEILAENYEFKRNDDTALTFMRAISVLKSLPFEVVSLKDTEGLPWIGDEVKGIMEEIIEVGESLEVQAVLNDERYQSFKRFKSVFGVGVKTADKWYRMGLRTLEDVRSSKTLKLTPMQKAGLCYYEDLARGVTKAEADAISLLVQDAVATFDPDALVEIVGGFRRGKPFGHDVDLLITSPGAEKEQEDQLLQKVTNLWKKQGLLLYGRLEWSQFEDGKLPSRKIDALDHFAKCFLILKLYDHKVDKSKWEMPTGSNESEAKSWKAIRVDLVRCPYDGFAFALLGWTGSRMFRRDLRWYATDEKKMMLDNHALYDLTKKIFLSAKSEEEIFAHLGLEYLEPFERNA

SEQ ID NO: 1735 - DNA, 1587 bp, synthetic construct
  misc_feature 1..1587: note = Variant of terminal deoxynucleotidyltransferase
  source 1..1587: mol_type = other DNA
atgcaccatcatcatcatcatggcggtagcggcagccacggcattcgtaccatcgattcggacttcgggaagaaacgccagaagaagatggataaccacgatagttccgccatctatgaaatcaaatttcacgagtttgtgctgttcattctcgaagagaaaatgggtgcgacgcgtcgtacttttctgacagatttagcccgcaagaaagggttccgcgtcgagaatgaactgtcagacagcgttacccacatcgtggcagaaaataattcacgctctgaagtattggcttggctgaaagaacacaagatggagaagaccaagcaattcgaactgctggatattagctggcttatcgaaagcatgaaagttggtaaaccggtggacaccaaggggaaataccagttggcggaatcgggtgagatgagtgcgaacccagatccgacagagggtcgtgaaaacgagctgcctcctactacgaagaccatttctcagtatgcgtgtcaacgccgcaccaccctgaacaaccataatcaacgttttacggacgcactggaaattcttgcggaaaattacgagttcaaacgcaacgatgatactgcgctgacttttatgcgtgctatttccgtgctgaaaagccttccgtttgaggtagttagcctgaaagacacggaaggattgccctggatcggtgatgaagtcaaagggattatggaagaaatcatcgaggtcggtgaatcgctggaagtgcaggccatcctcaatgatgagcgctatcaaagcttcaaacgctttaagagtgtctttggagtgggggtgaagacagcagacaagtggtaccgtatgggtctgcgcacgctcgaggatgttcgttccagcaagaccctgaagttgaccccgatgcagaaagcgggtctgtgctattatgaagatcttgctcgcggcgttacgaaagccgaagctgacgcgatttctctgctggttcaggatgcagtcgcaactttcgacccggatgcgctggtggagattgtcggtggatttcgtcgtgggaaaccttttggtcacgacgttgatctgcttatcacatctccgggagctgagaaagagcaagaagaccagctcctgcagaaagtgaccaatctgtggaagaaacaagggttgttgctgtacggtcgtctggaatggagtcagtttgaagatgggaaactcccatcccgcaagatcgatgccctggaccattttgcgaaatgctttctgatcctcaaactttatgatcataaagtggacaaaagcaaatgggaaatgccgacgggttcgaacgaaagcgaggccaaaagttggaaagcaattcgcgtagatctggttcgttgcccctacgatggttttgcgtttgcgttgttgggttggaccggaagccgcatgttccgccgtgatctgcgctggtacgccaccgacgagaagaagatgatgctggacaatcatgcgctgtatgacctgaccaagaaaatctttctcaaagctaaatcggaagaggaaattttcgcacatctggggcttgaatacctggaaccgttcgaacgtaacgca

SEQ ID NO: 1736 - protein, 529 aa, synthetic construct
  REGION 1..529: note = Variant of terminal deoxynucleotidyltransferase
MHHHHHHGGSGSHGIRTIDSDFGKKRQKKMDNHDSSAIYEIKFHEFVLFILEEKMGATRRTFLTDLARKKGFRVENELSDSVTHIVAENNSRSEVLAWLKEHKMEKTKQFELLDISWLIESMKVGKPVDTKGKYQLAESGEMSANPDPTEGRENELPPTTKTISQYACQRRTTLNNHNQRFTDALEILAENYEFKRNDDTALTFMRAISVLKSLPFEVVSLKDTEGLPWIGDEVKGIMEEIIEVGESLEVQAILNDERYQSFKRFKSVFGVGVKTADKWYRMGLRTLEDVRSSKTLKLTPMQKAGLCYYEDLARGVTKAEADAISLLVQDAVATFDPDALVEIVGGFRRGKPFGHDVDLLITSPGAEKEQEDQLLQKVTNLWKKQGLLLYGRLEWSQFEDGKLPSRKIDALDHFAKCFLILKLYDHKVDKSKWEMPTGSNESEAKSWKAIRVDLVRCPYDGFAFALLGWTGSRMFRRDLRWYATDEKKMMLDNHALYDLTKKIFLKAKSEEEIFAHLGLEYLEPFERNA

SEQ ID NO: 1737 - DNA, 1587 bp, synthetic construct
  misc_feature 1..1587: note = Variant of terminal deoxynucleotidyltransferase
  source 1..1587: mol_type = other DNA
atgcaccatcatcatcatcatggcggtagcggcagccacggcattcgtaccatcgattcggacttcgggaagaaacgccagaagaagatggataaccacgatagttccgccatctatgaaatcaaatttcacgagtttgtgctgttcattctcgaagagaaaatgggtgcgacgcgtcgtacttttctgacagatttagcccgcaagaaagggttccgcgtcgagaatgaactgtcagacagcgttacccacatcgtggcagaaaataattcacgctctgaagtattggcttggctgaaagaacacaagatggagaagaccaagcaattcgaactgctggatattagctggcttatcgaaagcatgaaagttggtaaaccggtggacaccaaggggaaataccagttggcggaatcgggtgagatgagtgcgaacccagatccgacagagggtcgtgaaaacgagctgcctcctactacgaagcatatttctcagtatgcgtgtcaacgccgcaccaccctgaacaaccataatcaacgttttacggacgcactggaaattcttgcggaaaattacgagttcaaacgcaacgatgatactgcgctgacttttatgcgtgctatttccgtgctgaaaagccttccgtttgaggtagttagcctgaaagacacggaaggattgccctggatcggtgatgaagtcaaagggattatggaagaaatcatcgaggtcggtgaatcgctggaagtgcaggccgtgctcaatgatgagcgctatcaaagcttcaaacgctttaagagtgtctttggagtgggggtgaagacagcagacaagtggtaccgtatgggtctgcgcacgctcgaggatgttcgttccagcaagaccctgaagttgaccccgatgcagaaagcgggtctgtgctattatgaagatcttgctcgcggcgttacgaaagccgaagctgacgcgatttctctgctggttcaggatgcagtcgcaactttcgacccggatgcgctggtggagattgtcggtggatttcgtcgtgggaaaccttttggtcacgacgttgatctgcttatcacatctccgggagctgagaaagagcaagaagaccagctcctgcagaaagtgaccaatctgtggaagaaacaagggttgttgctgtacggtcgtctggaatggagtcagtttgaagatgggaaactcccatcccgcaagatcgatgccctggaccattttgcgaaatgctttctgatcctcaaactttatgatcataaagtggacaaaagcaaatgggaaatgccgacgggttcgaacgaaagcgaggccaaaagttggaaagcaattcgcgtagatctggttcgttgcccctacgatggttttgcgtttgcgttgttgggttggaccggaagccgcatgttccgccgtgatctgcgctggtacgccaccgacgagaagaagatgatgctggacaatcatgcgctgtatgacctgaccaagaaaatctttctcaaagctaaatcggaagaggaaattttcgcacatctggggcttgaatacctggaaccgttcgaacgtaacgca

SEQ ID NO: 1738 - protein, 529 aa, synthetic construct
  REGION 1..529: note = Variant of terminal deoxynucleotidyltransferase
MHHHHHHGGSGSHGIRTIDSDFGKKRQKKMDNHDSSAIYEIKFHEFVLFILEEKMGATRRTFLTDLARKKGFRVENELSDSVTHIVAENNSRSEVLAWLKEHKMEKTKQFELLDISWLIESMKVGKPVDTKGKYQLAESGEMSANPDPTEGRENELPPTTKHISQYACQRRTTLNNHNQRFTDALEILAENYEFKRNDDTALTFMRAISVLKSLPFEVVSLKDTEGLPWIGDEVKGIMEEIIEVGESLEVQAVLNDERYQSFKRFKSVFGVGVKTADKWYRMGLRTLEDVRSSKTLKLTPMQKAGLCYYEDLARGVTKAEADAISLLVQDAVATFDPDALVEIVGGFRRGKPFGHDVDLLITSPGAEKEQEDQLLQKVTNLWKKQGLLLYGRLEWSQFEDGKLPSRKIDALDHFAKCFLILKLYDHKVDKSKWEMPTGSNESEAKSWKAIRVDLVRCPYDGFAFALLGWTGSRMFRRDLRWYATDEKKMMLDNHALYDLTKKIFLKAKSEEEIFAHLGLEYLEPFERNA

SEQ ID NO: 1739 - DNA, 1587 bp, synthetic construct
  misc_feature 1..1587: note = Variant of terminal deoxynucleotidyltransferase
  source 1..1587: mol_type = other DNA
atgcaccatcatcatcatcatggcggtagcggcagccacggcattcgtaccatcgattcggacttcgggaagaaacgccagaagaagatggataaccacgatagttccgccatctatgaaatcaaatttcacgagtttgtgctgttcattctcgaagagaaaatgggtgcgacgcgtcgtacttttctgacagatttagcccgcaagaaagggttccgcgtcgagaatgaactgtcagacagcgttacccacatcgtggcagaaaataattcacgctctgaagtattggcttggctgaaagaacacaagatggagaagaccaagcaattcgaactgctggatattagctggcttatcgaaagcatgaaagttggtaaaccggtggacaccaaggggaaataccagttggcggaatcgggtgagatgagtgcgaacccagatccgacagagggtcgtgaaaacgagctgcctcctactacgaagaccatttctcagtatgcgtgtcaacgccgcaccaccctgaacaaccataatcaacgttttacggacgcactggaaattcttgcggaaaattacgagttcaaacgcaacgatgatactgcgctgacttttatgcgtgctatttccgtgctgaaaagccttccgtttgaggtagttagcctgaaagacacggaaggattgccctggatcggtgatgaagtcaaagggattatggaagaaatcatcgaggtcggtgaatcgctggaagtgcaggccgtgctcaatgatgagcgctatcaaagcttcaaacgctttaagagtgtctttggagtgggggtgaagacagcagacaagtggtaccgtatgggtctgcgcacgctcgaggatgttcgttccagcaagaccctgaagttgaccccgatgcagaaagcgggtctgtgctattatgaagatcttgctcgcggcgttacgaaagccgaagctgacgcgatttctctgctggttcaggatgcagtcgcaactttcgacccggatgcgctggtggagattgtcggtggatttcgtcgtgggaaaccttttggtcacgacgttgatctgcttatcacatctccgggagctgagaaagagcaagaagaccagctcctgcagaaagtgaccaatctgtggaagaaacaagggttgttgctgtacggtcgtctggaatggagtcagtttgaagatgggaaactcccatcccgcaagatcgatgccctggaccattttgcgaaatgctttgcaatcctcaaactttatgatcataaagtggacaaaagcaaatgggaaatgccgacgggttcgaacgaaagcgaggccaaaagttggaaagcaattcgcgtagatctggttcgttgcccctacgatggttttgcgtttgcgttgttgggttggaccggaagccgcatgttccgccgtgatctgcgctggtacgccaccgacgagaagaagatgatgctggacaatcatgcgctgtatgacctgaccaagaaaatctttctcaaagctaaatcggaagaggaaattttcgcacatctggggcttgaatacctggaaccgttcgaacgtaacgca

SEQ ID NO: 1740 - protein, 529 aa, synthetic construct
  REGION 1..529: note = Variant of terminal deoxynucleotidyltransferase
MHHHHHHGGSGSHGIRTIDSDFGKKRQKKMDNHDSSAIYEIKFHEFVLFILEEKMGATRRTFLTDLARKKGFRVENELSDSVTHIVAENNSRSEVLAWLKEHKMEKTKQFELLDISWLIESMKVGKPVDTKGKYQLAESGEMSANPDPTEGRENELPPTTKTISQYACQRRTTLNNHNQRFTDALEILAENYEFKRNDDTALTFMRAISVLKSLPFEVVSLKDTEGLPWIGDEVKGIMEEIIEVGESLEVQAVLNDERYQSFKRFKSVFGVGVKTADKWYRMGLRTLEDVRSSKTLKLTPMQKAGLCYYEDLARGVTKAEADAISLLVQDAVATFDPDALVEIVGGFRRGKPFGHDVDLLITSPGAEKEQEDQLLQKVTNLWKKQGLLLYGRLEWSQFEDGKLPSRKIDALDHFAKCFAILKLYDHKVDKSKWEMPTGSNESEAKSWKAIRVDLVRCPYDGFAFALLGWTGSRMFRRDLRWYATDEKKMMLDNHALYDLTKKIFLKAKSEEEIFAHLGLEYLEPFERNA

SEQ ID NO: 1741 - DNA, 1587 bp, synthetic construct
  misc_feature 1..1587: note = Variant of terminal deoxynucleotidyltransferase
  source 1..1587: mol_type = other DNA
atgcaccatcatcatcatcatggcggtagcggcagccacggcattcgtaccatcgattcggacttcgggaagaaacgccagaagaagatggataaccacgatagttccgccatctatgaaatcaaatttcacgagtttgtgctgttcattctcgaagagaaaatgggtgcgacgcgtcgtacttttctgacagatttagcccgcaagaaagggttccgcgtcgagaatgaactgtcagacagcgttacccacatcgtggcagaaaataattcacgctctgaagtattggcttggctgaaagaacacaagatggagaagaccaagcaattcgaactgctggatattagctggcttatcgaaagcatgaaagttggtaaaccggtggacaccaaggggaaataccagttggcggaatcgggtgagatgagtgcgaacccagatccgacagagggtcgtgaaaacgagctgcctcctactacgaagaccatttctcagtatgcgtgtcaacgccgcaccaccctgaacaaccataatcaacgttttacggacgcactggaaattcttgcggaaaattacgagttcaaacgcaacgatgatactgcgctgacttttatgcgtgctatttccgtgctgaaaagccttccgtttgaggtagttagcctgaaagacacggaaggattgccctggatcggtgatgaagtcaaagggattatggaagaaatcatcgaggtcggtgaatcgctggaagtgcaggccgtgctcaatgatgagcgctatcaaagcttcaaacgctttaagagtgtctttggagtgggggtgaagacagcagacaagtggtaccgtatgggtctgcgcacgctcgaggatgttcgttccagcaagaccctgaagttgaccccgatgcagaaagcgggtctgtgctattatgaagatcttgctcgcggcgttacgaaagccgaagctgacgcgatttctctgctggttcaggatgcagtcgcaactttcgacccggatgcgctggtggagattgtcggtggatttcgtcgtgggaaaccttttggtcacgacgttgatctgcttatcacatctccgggagctgagaaagagcaagaagaccagctcctgcagaaagtgaccaatctgtggaagaaacaagggttgttgctgtacggtcgtctggaatggagtcagtttgaagatgggaaactcccatcccgcaagatcgatgccctggaccattttgcgaaatgctttctgatcctcaaactttatgatcataaagtggacaaaagcaaatgggaaatgccgacgggttcgaacgaaagcgaggccaaaagttggaaagcaattcgcgtagatctggttcgttgcccctacgagggttttgcgtttgcgttgttgggttggaccggaagccgcatgttccgccgtgatctgcgctggtacgccaccgacgagaagaagatgatgctggacaatcatgcgctgtatgacctgaccaagaaaatctttctcaaagctaaatcggaagaggaaattttcgcacatctggggcttgaatacctggaaccgttcgaacgtaacgca

SEQ ID NO: 1742 - protein, 529 aa, synthetic construct
  REGION 1..529: note = Variant of terminal deoxynucleotidyltransferase
MHHHHHHGGSGSHGIRTIDSDFGKKRQKKMDNHDSSAIYEIKFHEFVLFILEEKMGATRRTFLTDLARKKGFRVENELSDSVTHIVAENNSRSEVLAWLKEHKMEKTKQFELLDISWLIESMKVGKPVDTKGKYQLAESGEMSANPDPTEGRENELPPTTKTISQYACQRRTTLNNHNQRFTDALEILAENYEFKRNDDTALTFMRAISVLKSLPFEVVSLKDTEGLPWIGDEVKGIMEEIIEVGESLEVQAVLNDERYQSFKRFKSVFGVGVKTADKWYRMGLRTLEDVRSSKTLKLTPMQKAGLCYYEDLARGVTKAEADAISLLVQDAVATFDPDALVEIVGGFRRGKPFGHDVDLLITSPGAEKEQEDQLLQKVTNLWKKQGLLLYGRLEWSQFEDGKLPSRKIDALDHFAKCFLILKLYDHKVDKSKWEMPTGSNESEAKSWKAIRVDLVRCPYEGFAFALLGWTGSRMFRRDLRWYATDEKKMMLDNHALYDLTKKIFLKAKSEEEIFAHLGLEYLEPFERNA

SEQ ID NO: 1743 - DNA, 1587 bp, synthetic construct
  misc_feature 1..1587: note = Variant of terminal deoxynucleotidyltransferase
  source 1..1587: mol_type = other DNA
atgcaccatcatcatcatcatggcggtagcggcagccacggcattcgtaccatcgattcggacttcgggaagaaacgccagaagaagatggataaccacgatagttccgccatctatgaaatcaaatttcacgagtttgtgctgttcattctcgaagagaaaatgggtgcgacgcgtcgtacttttctgacagatttagcccgcaagaaagggttccgcgtcgagaatgaactgtcagacagcgttacccacatcgtggcagaaaataattcacgctctgaagtattggcttggctgaaagaacacaagatggagaagaccaagcaattcgaactgctggatattagctggcttatcgaaagcatgaaagttggtaaaccggtggacaccaaggggaaataccagttggcggaatcgggtgagatgagtgcgaacccagatccgacagagggtcgtgaaaacgagctgcctcctactacgaagaccatttctcagtatgcgtgtcaacgccgcaccaccctgaacaaccataatcaacgttttacggacgcactggaaattcttgcggaaaattacgagttcaaacgcaacgatgatactgcgctgacttttatgcgtgctatttccgtgctgaaaagccttccgtttgaggtagttagcctgaaagacacggaaggattgccctggatcggtgatgaagtcaaagggattatggaagaaatcatcgaggtcggtgaatcgctggaagtgcaggccgtgctcaatgatgagcgctatcaaagcttcaaacgctttaagagtgtctttggagtgggggtgaagacagcagacaagtggtaccgtatgggtctgcgcacgctcgaggatgttcgttccagcaagaccctgaagttgaccccgatgcagaaagcgggtctgtgctattatgaagatcttgctcgcggcgttacgaaagccgaagctgacgcgatttctctgctggttcaggatgcagtcgcaactttcgacccggatgcgctggtggagattgtcggtggatttcgtcgtgggaaaccttttggtcacgacgttgatctgcttatcacatctccgggagctgagaaagagcaagaagaccagctcctgcagaaagtgaccaatctgtggaagaaacaagggttgttgctgtacggtcgtctggaatggagtcagtttgaagatgggaaactcccatcccgcgcaatcgatgccctggaccattttgcgaaatgctttctgatcctcaaactttatgatcataaagtggacaaaagcaaatgggaaatgccgacgggttcgaacgaaagcgaggccaaaagttggaaagcaattcgcgtagatctggttcgttgcccctacgatggttttgcgtttgcgttgttgggttggaccggaagccgcatgttccgccgtgatctgcgctggtacgccaccgacgagaagaagatgatgctggacaatcatgcgctgtatgacctgaccaagaaaatctttctcaaagctaaatcggaagaggaaattttcgcacatctggggcttgaatacctggaaccgttcgaacgtaacgca

SEQ ID NO: 1744 - protein, 529 aa, synthetic construct
  REGION 1..529: note = Variant of terminal deoxynucleotidyltransferase
MHHHHHHGGSGSHGIRTIDSDFGKKRQKKMDNHDSSAIYEIKFHEFVLFILEEKMGATRRTFLTDLARKKGFRVENELSDSVTHIVAENNSRSEVLAWLKEHKMEKTKQFELLDISWLIESMKVGKPVDTKGKYQLAESGEMSANPDPTEGRENELPPTTKTISQYACQRRTTLNNHNQRFTDALEILAENYEFKRNDDTALTFMRAISVLKSLPFEVVSLKDTEGLPWIGDEVKGIMEEIIEVGESLEVQAVLNDERYQSFKRFKSVFGVGVKTADKWYRMGLRTLEDVRSSKTLKLTPMQKAGLCYYEDLARGVTKAEADAISLLVQDAVATFDPDALVEIVGGFRRGKPFGHDVDLLITSPGAEKEQEDQLLQKVTNLWKKQGLLLYGRLEWSQFEDGKLPSRAIDALDHFAKCFLILKLYDHKVDKSKWEMPTGSNESEAKSWKAIRVDLVRCPYDGFAFALLGWTGSRMFRRDLRWYATDEKKMMLDNHALYDLTKKIFLKAKSEEEIFAHLGLEYLEPFERNA

SEQ ID NO: 1745 - DNA, 1587 bp, synthetic construct
  misc_feature 1..1587: note = Variant of terminal deoxynucleotidyltransferase
  source 1..1587: mol_type = other DNA
atgcaccatcatcatcatcatggcggtagcggcagccacggcattcgtaccatcgattcggacttcgggaagaaacgccagaagaagatggataaccacgatagttccgccatctatgaaatcaaatttcacgagtttgtgctgttcattctcgaagagaaaatgggtgcgacgcgtcgtacttttctgacagatttagcccgcaagaaagggttccgcgtcgagaatgaactgtcagacagcgttacccacatcgtggcagaaaataattcacgctctgaagtattggcttggctgaaagaacacaagatggagaagaccaagcaattcgaactgctggatattagctggcttatcgaaagcatgaaagttggtaaaccggtggacaccaaggggaaataccagttggcggaatcgggtgagatgagtgcgaacccagatccgacagagggtcgtgaaaacgagctgcctcctactacgaagaccatttctcagtatgcgtgtcaacgccgcaccaccctgaacaaccataatcaacgttttacggacgcactggaaattcttgcggaaaattacgagttcaaacgcaacgatgatactgcgctgacttttatgcgtgctatttccgtgctgaaaagccttccgtttgaggtagttagcctgaaagacacggaaggattgccctggatcggtgatgaagtcaaagggattatggaagaaatcatcgaggtcggtgaatcgctggaagtgcaggccgtgctcaatgatgagcgctatcaaagcttcaaacgctttaagagtgtctttggagtgggggtgaagacagcagacaagtggtaccgtatgggtctgcgcacgctcgaggatgttcgttccagcaagaccctgaagttgaccccgatgcagaaagcgggtctgtgctattatgaagatcttgctcgcggcgttacgaaagccgaagctgacgcgatttctctgctggttcaggatgcagtcgcaactttcgacccggatgcgctggtggagattgtcggtggatttcgtcgtgggaaaccttttggtcacgacgttgatctgcttatcacatctccgggagctgagaaagagcaagaagaccagctcctgcagaaagtgaccaatctgtggaagaaacaagggttgttgctgtacggtcgtctggaatggagtcagtttgaagatgggaaactcccatcccgcaagatcgatgccctggaccattttgcgaaatgctttctgatcctcaaactttatgatcataaagtggacaaaagcaaatgggaaatgccgacgggttcgaacatgagcgaggccaaaagttggaaagcaattcgcgtagatctggttcgttgcccctacgatggttttgcgtttgcgttgttgggttggaccggaagccgcatgttccgccgtgatctgcgctggtacgccaccgacgagaagaagatgatgctggacaatcatgcgctgtatgacctgaccaagaaaatctttctcaaagctaaatcggaagaggaaattttcgcacatctggggcttgaatacctggaaccgttcgaacgtaacgca

SEQ ID NO: 1746 - protein, 529 aa, synthetic construct
  REGION 1..529: note = Variant of terminal deoxynucleotidyltransferase
MHHHHHHGGSGSHGIRTIDSDFGKKRQKKMDNHDSSAIYEIKFHEFVLFILEEKMGATRRTFLTDLARKKGFRVENELSDSVTHIVAENNSRSEVLAWLKEHKMEKTKQFELLDISWLIESMKVGKPVDTKGKYQLAESGEMSANPDPTEGRENELPPTTKTISQYACQRRTTLNNHNQRFTDALEILAENYEFKRNDDTALTFMRAISVLKSLPFEVVSLKDTEGLPWIGDEVKGIMEEIIEVGESLEVQAVLNDERYQSFKRFKSVFGVGVKTADKWYRMGLRTLEDVRSSKTLKLTPMQKAGLCYYEDLARGVTKAEADAISLLVQDAVATFDPDALVEIVGGFRRGKPFGHDVDLLITSPGAEKEQEDQLLQKVTNLWKKQGLLLYGRLEWSQFEDGKLPSRKIDALDHFAKCFLILKLYDHKVDKSKWEMPTGSNMSEAKSWKAIRVDLVRCPYDGFAFALLGWTGSRMFRRDLRWYATDEKKMMLDNHALYDLTKKIFLKAKSEEEIFAHLGLEYLEPFERNA

SEQ ID NO: 1747 - DNA, 1587 bp, synthetic construct
  misc_feature 1..1587: note = Variant of terminal deoxynucleotidyltransferase
  source 1..1587: mol_type = other DNA
atgcaccatcatcatcatcatggcggtagcggcagccacggcattcgtaccatcgattcggacttcgggaagaaacgccagaagaagatggataaccacgatagttccgccatctatgaaatcaaatttcacgagtttgtgctgttcattctcgaagagaaaatgggtgcgacgcgtcgtacttttctgacagatttagcccgcaagaaagggttccgcgtcgagaatgaactgtcagacagcgttacccacatcgtggcagaaaataattcacgctctgaagtattggcttggctgaaagaacacaagatggagaagaccaagcaattcgaactgctggatattagctggcttatcgaaagcatgaaagttggtaaaccggtggacaccaaggggaaataccagttggcggaatcgggtgagatgagtgcgaacccagatccgacagagggtcgtgaaaacgagctgcctcctactacgaagaccatttctcagtatgcgtgtcaacgccgcaccaccctgaacaaccataatcaacgttttacggacgcactggaaattcttgcggaaaattacgagttcaaacgcaacgatgatactgcgctgacttttatgcgtgctatttccgtgctgaaaagccttccgtttgaggtagttagcctgaaagacacggaaggattgccctggatcggtgatgacgtcaaagggattatggaagaaatcatcgaggtcggtgaatcgctggaagtgcaggccgtgctcaatgatgagcgctatcaaagcttcaaacgctttaagagtgtctttggagtgggggtgaagacagcagacaagtggtaccgtatgggtctgcgcacgctcgaggatgttcgttccagcaagaccctgaagttgaccccgatgcagaaagcgggtctgtgctattatgaagatcttgctcgcggcgttacgaaagccgaagctgacgcgatttctctgctggttcaggatgcagtcgcaactttcgacccggatgcgctggtggagattgtcggtggatttcgtcgtgggaaaccttttggtcacgacgttgatctgcttatcacatctccgggagctgagaaagagcaagaagaccagctcctgcagaaagtgaccaatctgtggaagaaacaagggttgttgctgtacggtcgtctggaatggagtcagtttgaagatgggaaactcccatcccgcaagatcgatgccctggaccattttgcgaaatgctttctgatcctcaaactttatgatcataaagtggacaaaagcaaatgggaaatgccgacgggttcgaacgaaagcgaggccaaaagttggaaagcaattcgcgtagatctggttcgttgcccctacgatggttttgcgtttgcgttgttgggttggaccggaagccgcatgttccgccgtgatctgcgctggtacgccaccgacgagaagaagatgatgctggacaatcatgcgctgtatgacctgaccaagaaaatctttctcaaagctaaatcggaagaggaaattttcgcacatctggggcttgaatacctggaaccgttcgaacgtaacgca

SEQ ID NO: 1748 - protein, 529 aa, synthetic construct
  REGION 1..529: note = Variant of terminal deoxynucleotidyltransferase
MHHHHHHGGSGSHGIRTIDSDFGKKRQKKMDNHDSSAIYEIKFHEFVLFILEEKMGATRRTFLTDLARKKGFRVENELSDSVTHIVAENNSRSEVLAWLKEHKMEKTKQFELLDISWLIESMKVGKPVDTKGKYQLAESGEMSANPDPTEGRENELPPTTKTISQYACQRRTTLNNHNQRFTDALEILAENYEFKRNDDTALTFMRAISVLKSLPFEVVSLKDTEGLPWIGDDVKGIMEEIIEVGESLEVQAVLNDERYQSFKRFKSVFGVGVKTADKWYRMGLRTLEDVRSSKTLKLTPMQKAGLCYYEDLARGVTKAEADAISLLVQDAVATFDPDALVEIVGGFRRGKPFGHDVDLLITSPGAEKEQEDQLLQKVTNLWKKQGLLLYGRLEWSQFEDGKLPSRKIDALDHFAKCFLILKLYDHKVDKSKWEMPTGSNESEAKSWKAIRVDLVRCPYDGFAFALLGWTGSRMFRRDLRWYATDEKKMMLDNHALYDLTKKIFLKAKSEEEIFAHLGLEYLEPFERNA

SEQ ID NO: 1749 - DNA, 1587 bp, synthetic construct
  misc_feature 1..1587: note = Variant of terminal deoxynucleotidyltransferase
  source 1..1587: mol_type = other DNA
atgcaccatcatcatcatcatggcggtagcggcagccacggcattcgtaccatcgattcggacttcgggaagaaacgccagaagaagatggataaccacgatagttccgccatctatgaaatcaaatttcacgagtttgtgctgttcattctcgaagagaaaatgggtgcgacgcgtcgtacttttctgacagatttagcccgcaagaaagggttccgcgtcgagaatgaactgtcagacagcgttacccacatcgtggcagaaaataattcacgctctgaagtattggcttggctgaaagaacacaagatggagaagaccaagcaattcgaactgctggatattagctggcttatcgaaagcatgaaagttggtaaaccggtggacaccaaggggaaataccagttggcggaatcgggtgagatgagtgcgaacccagatccgacagagggtcgtgaaaacgagctgcctcctactacgaagaccatttctcagtatgcgtgtcaacgccgcaccaccctgaacaactataatcaacgttttacggacgcactggaaattcttgcggaaaattacgagttcaaacgcaacgatgatactgcgctgacttttatgcgtgctatttccgtgctgaaaagccttccgtttgaggtagttagcctgaaagacacggaaggattgccctggatcggtgatgaagtcaaagggattatggaagaaatcatcgaggtcggtgaatcgctggaagtgcaggccgtgctcaatgatgagcgctatcaaagcttcaaacgctttaagagtgtctttggagtgggggtgaagacagcagacaagtggtaccgtatgggtctgcgcacgctcgaggatgttcgttccagcaagaccctgaagttgaccccgatgcagaaagcgggtctgtgctattatgaagatcttgctcgcggcgttacgaaagccgaagctgacgcgatttctctgctggttcaggatgcagtcgcaactttcgacccggatgcgctggtggagattgtcggtggatttcgtcgtgggaaaccttttggtcacgacgttgatctgcttatcacatctccgggagctgagaaagagcaagaagaccagctcctgcagaaagtgaccaatctgtggaagaaacaagggttgttgctgtacggtcgtctggaatggagtcagtttgaagatgggaaactcccatcccgcaagatcgatgccctggaccattttgcgaaatgctttctgatcctcaaactttatgatcataaagtggacaaaagcaaatgggaaatgccgacgggttcgaacgaaagcgaggccaaaagttggaaagcaattcgcgtagatctggttcgttgcccctacgatggttttgcgtttgcgttgttgggttggaccggaagccgcatgttccgccgtgatctgcgctggtacgccaccgacgagaagaagatgatgctggacaatcatgcgctgtatgacctgaccaagaaaatctttctcaaagctaaatcggaagaggaaattttcgcacatctggggcttgaatacctggaaccgttcgaacgtaacgca

SEQ ID NO: 1750 - protein, 529 aa, synthetic construct
  REGION 1..529: note = Variant of terminal deoxynucleotidyltransferase
MHHHHHHGGSGSHGIRTIDSDFGKKRQKKMDNHDSSAIYEIKFHEFVLFILEEKMGATRRTFLTDLARKKGFRVENELSDSVTHIVAENNSRSEVLAWLKEHKMEKTKQFELLDISWLIESMKVGKPVDTKGKYQLAESGEMSANPDPTEGRENELPPTTKTISQYACQRRTTLNNYNQRFTDALEILAENYEFKRNDDTALTFMRAISVLKSLPFEVVSLKDTEGLPWIGDEVKGIMEEIIEVGESLEVQAVLNDERYQSFKRFKSVFGVGVKTADKWYRMGLRTLEDVRSSKTLKLTPMQKAGLCYYEDLARGVTKAEADAISLLVQDAVATFDPDALVEIVGGFRRGKPFGHDVDLLITSPGAEKEQEDQLLQKVTNLWKKQGLLLYGRLEWSQFEDGKLPSRKIDALDHFAKCFLILKLYDHKVDKSKWEMPTGSNESEAKSWKAIRVDLVRCPYDGFAFALLGWTGSRMFRRDLRWYATDEKKMMLDNHALYDLTKKIFLKAKSEEEIFAHLGLEYLEPFERNA

SEQ ID NO: 1751 - DNA, 1587 bp, synthetic construct
  misc_feature 1..1587: note = Variant of terminal deoxynucleotidyltransferase
  source 1..1587: mol_type = other DNA
atgcaccatcatcatcatcatggcggtagcggcagccacggcattcgtaccatcgattcggacttcgggaagaaacgccagaagaagatggataaccacgatagttccgccatctatgaaatcaaatttcacgagtttgtgctgttcattctcgaagagaaaatgggtgcgacgcgtcgtacttttctgacagatttagcccgcaagaaagggttccgcgtcgagaatgaactgtcagacagcgttacccacatcgtggcagaaaataattcacgctctgaagtattggcttggctgaaagaacacaagatggagaagaccaagcaattcgaactgctggatattagctggcttatcgaaagcatgaaagttggtaaaccggtggacaccaaggggaaataccagttggcggaatcgggtgagatgagtgcgaacccagatccgacagagggtcgtgaaaacgagctgcctcctactacgaagaccatttctcagtatgcgtgtcaacgccgcaccaccctgaacaaccataatcaacgttttacggacgcactggaaattcttgcggaaaattacgagttcaaacgcaacgatgatgcagcgctgacttttatgcgtgctatttccgtgctgaaaagccttccgtttgaggtagttagcctgaaagacacggaaggattgccctggatcggtgatgaagtcaaagggattatggaagaaatcatcgaggtcggtgaatcgctggaagtgcaggccgtgctcaatgatgagcgctatcaaagcttcaaacgctttaagagtgtctttggagtgggggtgaagacagcagacaagtggtaccgtatgggtctgcgcacgctcgaggatgttcgttccagcaagaccctgaagttgaccccgatgcagaaagcgggtctgtgctattatgaagatcttgctcgcggcgttacgaaagccgaagctgacgcgatttctctgctggttcaggatgcagtcgcaactttcgacccggatgcgctggtggagattgtcggtggatttcgtcgtgggaaaccttttggtcacgacgttgatctgcttatcacatctccgggagctgagaaagagcaagaagaccagctcctgcagaaagtgaccaatctgtggaagaaacaagggttgttgctgtacggtcgtctggaatggagtcagtttgaagatgggaaactcccatcccgcaagatcgatgccctggaccattttgcgaaatgctttctgatcctcaaactttatgatcataaagtggacaaaagcaaatgggaaatgccgacgggttcgaacgaaagcgaggccaaaagttggaaagcaattcgcgtagatctggttcgttgcccctacgatggttttgcgtttgcgttgttgggttggaccggaagccgcatgttccgccgtgatctgcgctggtacgccaccgacgagaagaagatgatgctggacaatcatgcgctgtatgacctgaccaagaaaatctttctcaaagctaaatcggaagaggaaattttcgcacatctggggcttgaatacctggaaccgttcgaacgtaacgca

SEQ ID NO: 1752 - protein, 529 aa, synthetic construct
  REGION 1..529: note = Variant of terminal deoxynucleotidyltransferase
MHHHHHHGGSGSHGIRTIDSDFGKKRQKKMDNHDSSAIYEIKFHEFVLFILEEKMGATRRTFLTDLARKKGFRVENELSDSVTHIVAENNSRSEVLAWLKEHKMEKTKQFELLDISWLIESMKVGKPVDTKGKYQLAESGEMSANPDPTEGRENELPPTTKTISQYACQRRTTLNNHNQRFTDALEILAENYEFKRNDDAALTFMRAISVLKSLPFEVVSLKDTEGLPWIGDEVKGIMEEIIEVGESLEVQAVLNDERYQSFKRFKSVFGVGVKTADKWYRMGLRTLEDVRSSKTLKLTPMQKAGLCYYEDLARGVTKAEADAISLLVQDAVATFDPDALVEIVGGFRRGKPFGHDVDLLITSPGAEKEQEDQLLQKVTNLWKKQGLLLYGRLEWSQFEDGKLPSRKIDALDHFAKCFLILKLYDHKVDKSKWEMPTGSNESEAKSWKAIRVDLVRCPYDGFAFALLGWTGSRMFRRDLRWYATDEKKMMLDNHALYDLTKKIFLKAKSEEEIFAHLGLEYLEPFERNA

SEQ ID NO: 1753 - DNA, 1587 bp, synthetic construct
  misc_feature 1..1587: note = Variant of terminal deoxynucleotidyltransferase
  source 1..1587: mol_type = other DNA
atgcaccatcatcatcatcatggcggtagcggcagccacggcattcgtaccatcgattcggacttcgggaagaaacgccagaagaagatggataaccacgatagttccgccatctatgaaatcaaatttcacgagtttgtgctgttcattctcgaagagaaaatgggtgcgacgcgtcgtacttttctgacagatttagcccgcaagaaagggttccgcgtcgagaatgaactgtcagacagcgttacccacatcgtggcagaaaataattcacgctctgaagtattggcttggctgaaagaacacaagatggagaagaccaagcaattcgaactgctggatattagctggcttatcgaaagcatgaaagttggtaaaccggtggacaccaaggggaaataccagttggcggaatcgggtgagatgagtgcgaacccagatccgacagagggtcgtgaaaacgagctgcctcctactacgaagaccatttctcagtatgcgtgtcaacgccgcaccaccctgaacaaccataatcaacgttttacggacgcactggaaattcttgcggaaaattacgagttcaaacgcaacgatgatactgcgctgacttttatgcgtgctatttccgtgctgaaaagccttccgtttgaggtagttagcctgaaagacacggaaggattgccctggatcggtgatgaagtcaaagggattatggaagaaatcatcgaggtcggtgaatcgctggaagtgcaggccgtgctcaatgatgagcgctatcaaagcttcaaacgctttaagagtgtctttggagtgggggtgaagacagcagacaagtggtaccgtatgggtctgcgcacgctcgaggatgttcgttccagcaagaccctgaagttgaccccgatgcagaaagcgggtctgtgctattatgaagatcttgctcgcggcgttacgaaagccgaagctgacgcgatttctctgctggttcaggatgcagtcgcaactttcgacccggatgcgctggtggagattgtcggtggatttcgtcgtgggaaaccttttggtcacgacgttgatctgcttatcacatctccgggagctgagaaagagcaagaagaccagctcctgcagaaagtgaccaatctgtggaagaaacaagggttgttgctgtacggtcgtctggaatggagtcagtttgaagatgggaaactcccatcccgcaagatcgatgccctggaccattttgcgaaatgctttctgatcctcaaactttatgatcataaagtggacaaaagcaaatgggaaatgccgacgggttcgaacgaaagcgaggccaaaagttggaaagcaattcgcgtagatctggttcgttgcccctacgatggttttgcgtatgcgttgttgggttggaccggaagccgcatgttccgccgtgatctgcgctggtacgccaccgacgagaagaagatgatgctggacaatcatgcgctgtatgacctgaccaagaaaatctttctcaaagctaaatcggaagaggaaattttcgcacatctggggcttgaatacctggaaccgttcgaacgtaacgca

SEQ ID NO: 1754 - protein, 529 aa, synthetic construct
  REGION 1..529: note = Variant of terminal deoxynucleotidyltransferase
MHHHHHHGGSGSHGIRTIDSDFGKKRQKKMDNHDSSAIYEIKFHEFVLFILEEKMGATRRTFLTDLARKKGFRVENELSDSVTHIVAENNSRSEVLAWLKEHKMEKTKQFELLDISWLIESMKVGKPVDTKGKYQLAESGEMSANPDPTEGRENELPPTTKTISQYACQRRTTLNNHNQRFTDALEILAENYEFKRNDDTALTFMRAISVLKSLPFEVVSLKDTEGLPWIGDEVKGIMEEIIEVGESLEVQAVLNDERYQSFKRFKSVFGVGVKTADKWYRMGLRTLEDVRSSKTLKLTPMQKAGLCYYEDLARGVTKAEADAISLLVQDAVATFDPDALVEIVGGFRRGKPFGHDVDLLITSPGAEKEQEDQLLQKVTNLWKKQGLLLYGRLEWSQFEDGKLPSRKIDALDHFAKCFLILKLYDHKVDKSKWEMPTGSNESEAKSWKAIRVDLVRCPYDGFAYALLGWTGSRMFRRDLRWYATDEKKMMLDNHALYDLTKKIFLKAKSEEEIFAHLGLEYLEPFERNA

SEQ ID NO: 1755 - DNA, 1587 bp, synthetic construct
  misc_feature 1..1587: note = Variant of terminal deoxynucleotidyltransferase
  source 1..1587: mol_type = other DNA
atgcaccatcatcatcatcatggcggtagcggcagccacggcattcgtaccatcgattcggacttcgggaagaaacgccagaagaagatggataaccacgatagttccgccatctatgaaatcaaatttcacgagtttgtgctgttcattctcgaagagaaaatgggtgcgacgcgtcgtacttttctgacagatttagcccgcaagaaagggttccgcgtcgagaatgaactgtcagacagcgttacccacatcgtggcagaaaataattcacgctctgaagtattggcttggctgaaagaacacaagatggagaagaccaagcaattcgaactgctggatattagctggcttatcgaaagcatgaaagttggtaaaccggtggacaccaaggggaaataccagttggcggaatcgggtgagatgagtgcgaacccagatccgacagagggtcgtgaaaacgagctgcctcctactacgaagaccatttctcagtatgcgtgtcaacgccgcaccaccctgaacaaccataatcaacgttttacggacgcactggaaattcttgcggaaaattacgagttcaaacgcaacgatgatactgcgctgacttttatgcgtgctatttccgtgctgaaaagccttccgtttgaggtagttagcctgaaagacacggaaggattgccctggatcggtgatgaagtcaaagggattatggaagaaatcatcgaggtcggtgaatcgctggaagtgcaggccgtgctcaatgatgagcgctatcaaagcttcaaacgctttaagagtgtctttggagtgggggtgaagacagcagaaaagtggtaccgtatgggtctgcgcacgctcgaggatgttcgttccagcaagaccctgaagttgaccccgatgcagaaagcgggtctgtgctattatgaagatcttgctcgcggcgttacgaaagccgaagctgacgcgatttctctgctggttcaggatgcagtcgcaactttcgacccggatgcgctggtggagattgtcggtggatttcgtcgtgggaaaccttttggtcacgacgttgatctgcttatcacatctccgggagctgagaaagagcaagaagaccagctcctgcagaaagtgaccaatctgtggaagaaacaagggttgttgctgtacggtcgtctggaatggagtcagtttgaagatgggaaactcccatcccgcaagatcgatgccctggaccattttgcgaaatgctttctgatcctcaaactttatgatcataaagtggacaaaagcaaatgggaaatgccgacgggttcgaacgaaagcgaggccaaaagttggaaagcaattcgcgtagatctggttcgttgcccctacgatggttttgcgtttgcgttgttgggttggaccggaagccgcatgttccgccgtgatctgcgctggtacgccaccgacgagaagaagatgatgctggacaatcatgcgctgtatgacctgaccaagaaaatctttctcaaagctaaatcggaagaggaaattttcgcacatctggggcttgaatacctggaaccgttcgaacgtaacgca

SEQ ID NO: 1756 - protein, 529 aa, synthetic construct
  REGION 1..529: note = Variant of terminal deoxynucleotidyltransferase
MHHHHHHGGSGSHGIRTIDSDFGKKRQKKMDNHDSSAIYEIKFHEFVLFILEEKMGATRRTFLTDLARKKGFRVENELSDSVTHIVAENNSRSEVLAWLKEHKMEKTKQFELLDISWLIESMKVGKPVDTKGKYQLAESGEMSANPDPTEGRENELPPTTKTISQYACQRRTTLNNHNQRFTDALEILAENYEFKRNDDTALTFMRAISVLKSLPFEVVSLKDTEGLPWIGDEVKGIMEEIIEVGESLEVQAVLNDERYQSFKRFKSVFGVGVKTAEKWYRMGLRTLEDVRSSKTLKLTPMQKAGLCYYEDLARGVTKAEADAISLLVQDAVATFDPDALVEIVGGFRRGKPFGHDVDLLITSPGAEKEQEDQLLQKVTNLWKKQGLLLYGRLEWSQFEDGKLPSRKIDALDHFAKCFLILKLYDHKVDKSKWEMPTGSNESEAKSWKAIRVDLVRCPYDGFAFALLGWTGSRMFRRDLRWYATDEKKMMLDNHALYDLTKKIFLKAKSEEEIFAHLGLEYLEPFERNA

SEQ ID NO: 1757 - DNA, 1587 bp, synthetic construct
  misc_feature 1..1587: note = Variant of terminal deoxynucleotidyltransferase
  source 1..1587: mol_type = other DNA
atgcaccatcatcatcatcatggcggtagcggcagccacggcattcgtaccatcgattcggacttcgggaagaaacgccagaagaagatggataaccacgatagttccgccatctatgaaatcaaatttcacgagtttgtgctgttcattctcgaagagaaaatgggtgcgacgcgtcgtacttttctgacagatttagcccgcaagaaagggttccgcgtcgagaatgaactgtcagacagcgttacccacatcgtggcagaaaataattcacgctctgaagtattggcttggctgaaagaacacaagatggagaagaccaagcaattcgaactgctggatattagctggcttatcgaaagcatgaaagttggtaaaccggtggacaccaaggggaaataccagttggcggaatcgggtgagatgagtgcgaacccagatccgacagagggtcgtgaaaacgagctgcctcctactacgaagaccatttctcagtatgcgtgtcaacgccgcaccaccctgaacaaccataatcaacgttttacggacgcactggaaattcttgcggaaaattacgagttcaaacgcaacgatgatactgcgctgacttttatgcgtgctatttccgtgctgaaaagccttccgtttgaggtagttagcctgaaagacacggaaggattgccctggatcggtgatgaagtcaaagggattatggaagaaatcatcgaggtcggtgaatcgctggaagtgcaggccgtgctcaatgatgagcgctataagagcttcaaacgctttaagagtgtctttggagtgggggtgaagacagcagacaagtggtaccgtatgggtctgcgcacgctcgaggatgttcgttccagcaagaccctgaagttgaccccgatgcagaaagcgggtctgtgctattatgaagatcttgctcgcggcgttacgaaagccgaagctgacgcgatttctctgctggttcaggatgcagtcgcaactttcgacccggatgcgctggtggagattgtcggtggatttcgtcgtgggaaaccttttggtcacgacgttgatctgcttatcacatctccgggagctgagaaagagcaagaagaccagctcctgcagaaagtgaccaatctgtggaagaaacaagggttgttgctgtacggtcgtctggaatggagtcagtttgaagatgggaaactcccatcccgcaagatcgatgccctggaccattttgcgaaatgctttctgatcctcaaactttatgatcataaagtggacaaaagcaaatgggaaatgccgacgggttcgaacgaaagcgaggccaaaagttggaaagcaattcgcgtagatctggttcgttgcccctacgatggttttgcgtttgcgttgttgggttggaccggaagccgcatgttccgccgtgatctgcgctggtacgccaccgacgagaagaagatgatgctggacaatcatgcgctgtatgacctgaccaagaaaatctttctcaaagctaaatcggaagaggaaattttcgcacatctggggcttgaatacctggaaccgttcgaacgtaacgca

SEQ ID NO: 1758 - protein, 529 aa, synthetic construct
  REGION 1..529: note = Variant of terminal deoxynucleotidyltransferase
MHHHHHHGGSGSHGIRTIDSDFGKKRQKKMDNHDSSAIYEIKFHEFVLFILEEKMGATRRTFLTDLARKKGFRVENELSDSVTHIVAENNSRSEVLAWLKEHKMEKTKQFELLDISWLIESMKVGKPVDTKGKYQLAESGEMSANPDPTEGRENELPPTTKTISQYACQRRTTLNNHNQRFTDALEILAENYEFKRNDDTALTFMRAISVLKSLPFEVVSLKDTEGLPWIGDEVKGIMEEIIEVGESLEVQAVLNDERYKSFKRFKSVFGVGVKTADKWYRMGLRTLEDVRSSKTLKLTPMQKAGLCYYEDLARGVTKAEADAISLLVQDAVATFDPDALVEIVGGFRRGKPFGHDVDLLITSPGAEKEQEDQLLQKVTNLWKKQGLLLYGRLEWSQFEDGKLPSRKIDALDHFAKCFLILKLYDHKVDKSKWEMPTGSNESEAKSWKAIRVDLVRCPYDGFAFALLGWTGSRMFRRDLRWYATDEKKMMLDNHALYDLTKKIFLKAKSEEEIFAHLGLEYLEPFERNA

SEQ ID NO: 1759 - DNA, 1587 bp, synthetic construct; identical to SEQ ID NO: 1707
  misc_feature 1..1587: note = Variant of terminal deoxynucleotidyltransferase
  source 1..1587: mol_type = other DNA

SEQ ID NO: 1760 - protein, 529 aa, synthetic construct; identical to SEQ ID NO: 1708
  REGION 1..529: note = Variant of terminal deoxynucleotidyltransferase

SEQ ID NO: 1761 - DNA, 1587 bp, synthetic construct; identical to SEQ ID NO: 1681
  misc_feature 1..1587: note = Variant of terminal deoxynucleotidyltransferase
  source 1..1587: mol_type = other DNA

SEQ ID NO: 1762 - protein, 529 aa, synthetic construct; identical to SEQ ID NO: 1682
  REGION 1..529: note = Variant of terminal deoxynucleotidyltransferase

SEQ ID NO: 1763 - DNA, 1587 bp, synthetic construct; identical to SEQ ID NO: 1689
  misc_feature 1..1587: note = Variant of terminal deoxynucleotidyltransferase
  source 1..1587: mol_type = other DNA

SEQ ID NO: 1764 - protein, 529 aa, synthetic construct; identical to SEQ ID NO: 1690
  REGION 1..529: note = Variant of terminal deoxynucleotidyltransferase

SEQ ID NO: 1765 - DNA, 1587 bp, synthetic construct; identical to SEQ ID NO: 1693
  misc_feature 1..1587: note = Variant of terminal deoxynucleotidyltransferase
  source 1..1587: mol_type = other DNA

SEQ ID NO: 1766 - protein, 529 aa, synthetic construct; identical to SEQ ID NO: 1694
  REGION 1..529: note = Variant of terminal deoxynucleotidyltransferase

SEQ ID NO: 1767 - DNA, 1587 bp, synthetic construct; identical to SEQ ID NO: 1685
  misc_feature 1..1587: note = Variant of terminal deoxynucleotidyltransferase
  source 1..1587: mol_type = other DNA

SEQ ID NO: 1768 - protein, 529 aa, synthetic construct; identical to SEQ ID NO: 1686
  REGION 1..529: note = Variant of terminal deoxynucleotidyltransferase

SEQ ID NO: 1769 - DNA, 1587 bp, synthetic construct; identical to SEQ ID NO: 1741
  misc_feature 1..1587: note = Variant of terminal deoxynucleotidyltransferase
  source 1..1587: mol_type = other DNA

SEQ ID NO: 1770 - protein, 529 aa, synthetic construct; identical to SEQ ID NO: 1742
  REGION 1..529: note = Variant of terminal deoxynucleotidyltransferase

SEQ ID NO: 1771 - DNA, 1587 bp, synthetic construct; identical to SEQ ID NO: 1725
  misc_feature 1..1587: note = Variant of terminal deoxynucleotidyltransferase
  source 1..1587: mol_type = other DNA

SEQ ID NO: 1772 - protein, 529 aa, synthetic construct; identical to SEQ ID NO: 1726
  REGION 1..529: note = Variant of terminal deoxynucleotidyltransferase

SEQ ID NO: 1773 - DNA, 1587 bp, synthetic construct; identical to SEQ ID NO: 1679
  misc_feature 1..1587: note = Variant of terminal deoxynucleotidyltransferase
  source 1..1587: mol_type = other DNA

SEQ ID NO: 1774 - protein, 529 aa, synthetic construct; identical to SEQ ID NO: 1680
  REGION 1..529: note = Variant of terminal deoxynucleotidyltransferase

SEQ ID NO: 1775 - DNA, 1587 bp, synthetic construct
  misc_feature 1..1587: note = Variant of terminal deoxynucleotidyltransferase
  source 1..1587: mol_type = other DNA
atgcaccatcatcatcatcatggcggtagcggcagccacggcattcgtaccatcgattcggacttcgggaagaaacgccagaagaagatggataaccacgatagttccgccatctatgaaatcaaatttcacgagtttgtgctgttcattctcgaagagaaaatgggtgcgacgcgtcgtacttttctgacagatttagcccgcaagaaagggttccgcgtcgagaatgaactgtcagacagcgttacccacatcgtggcagaaaataattcacgctctgaagtattggcttggctgaaagaacacaagatggagaagaccaagcaattcgaactgctggatattagctggcttatcgaaagcatgaaagttggtaaaccggtggacaccaaggggaaataccagttggcggaatcgggtgagatgagtgcgaacccagatccgacagagggtcgtgaaaacgagctgcctcctactacgaagaccatttctcagtatgcgtgtcaacgccgcaccaccctgaacaaccataatcaacgttttacggacgcactggaaattcttgcggaaaattacgagttcaaacgcaacgatgatactgcgctgacttttatgcgtgctatttccgtgctgaaaagccttccgtttgaggtagttagcctgaaagacacggaaggattgccctggatcggtgatgaagtcaaagggattatggaagaaatcatcgaggtcggtgaatcgctggaagtgcaggccgtgctcaatgatgagcgctatcaaagcttcaaacgctttaagagtgtctttggagtgggggtgaagacagcagacaagtggtaccgtatgggtctgcgcacgctcgaggatgttcgttccagcaagaccctgaagttgaccccgatgcagaaagcgggtctgtgctattatgaagatcttgctcgcggcgttacgaaagccgaagctgacgcgatttctctgctggttcaggatgcagtcgcaactttcgacccggatgcgctggtggagattgtcggtggatttcgtcgtgggaaaccttttggtcacgacgttgatctgcttatcacatctccgggagctgagaaagagcaagaagaccagctcctgcagaaagtgaccaatctgtggaagaaacaagggttgttgctgtacggtcgtctggaatggagtcagtttgaagatgggaaactcccatcccgcaagatcgatgccctggaccatcacgcgaaatgctttctgatcctcaaactttatgatcataaagtggacaaaagcaaatgggaaatgccgacgggttcgaacgaaagcgaggccaaaagttggaaagcaattcgcgtagatctggttcgttgcccctacgatggttttgcgtttgcgttgttgggttggaccggaagccgcatgttccgccgtgatctgcgctggtacgccaccgacgagaagaagatgatgctggacaatcatgcgctgtatgacctgaccaagaaaatctttctcaaagctaaatcggaagaggaaattttcgcacatctggggcttgaatacctggaaccgttcgaacgtaacgca

SEQ ID NO: 1776 - protein, 529 aa, synthetic construct
  REGION 1..529: note = Variant of terminal deoxynucleotidyltransferase
MHHHHHHGGSGSHGIRTIDSDFGKKRQKKMDNHDSSAIYEIKFHEFVLFILEEKMGATRRTFLTDLARKKGFRVENELSDSVTHIVAENNSRSEVLAWLKEHKMEKTKQFELLDISWLIESMKVGKPVDTKGKYQLAESGEMSANPDPTEGRENELPPTTKTISQYACQRRTTLNNHNQRFTDALEILAENYEFKRNDDTALTFMRAISVLKSLPFEVVSLKDTEGLPWIGDEVKGIMEEIIEVGESLEVQAVLNDERYQSFKRFKSVFGVGVKTADKWYRMGLRTLEDVRSSKTLKLTPMQKAGLCYYEDLARGVTKAEADAISLLVQDAVATFDPDALVEIVGGFRRGKPFGHDVDLLITSPGAEKEQEDQLLQKVTNLWKKQGLLLYGRLEWSQFEDGKLPSRKIDALDHHAKCFLILKLYDHKVDKSKWEMPTGSNESEAKSWKAIRVDLVRCPYDGFAFALLGWTGSRMFRRDLRWYATDEKKMMLDNHALYDLTKKIFLKAKSEEEIFAHLGLEYLEPFERNA

SEQ ID NO: 1777 - DNA, 1587 bp, synthetic construct; identical to SEQ ID NO: 1699
  misc_feature 1..1587: note = Variant of terminal deoxynucleotidyltransferase
  source 1..1587: mol_type = other DNA

SEQ ID NO: 1778 - protein, 529 aa, synthetic construct; identical to SEQ ID NO: 1700
  REGION 1..529: note = Variant of terminal deoxynucleotidyltransferase

SEQ ID NO: 1779 - DNA, 1587 bp, synthetic construct
  misc_feature 1..1587: note = Variant of terminal deoxynucleotidyltransferase
  source 1..1587: mol_type = other DNA
atgcaccatcatcatcatcatggcggtagcggcagccacggcattcgtaccatcgattcggacttcgggaagaaacgccagaagaagatggataaccacgatagttccgccatctatgaaatcaaatttcacgagtttgtgctgttcattctcgaagagaaaatgggtgcgacgcgtcgtacttttctgacagatttagcccgcaagaaagggttccgcgtcgagaatgaactgtcagacagcgttacccacatcgtggcagaaaataattcacgctctgaagtattggcttggctgaaagaacacaagatggagaagaccaagcaattcgaactgctggatattagctggcttatcgaaagcatgaaagttggtaaaccggtggacaccaaggggaaataccagttggcggaatcgggtgagatgagtgcgaacccagatccgacagagggtcgtgaaaacgagctgcctcctactacgaagaccatttctcagtatgcgtgtcaacgccgcaccaccctgaacaaccataatcaacgttttacggacgcactggaaattcttgcggaaaattacgagttcaaacgcaacgatgatactgcgctgacttttatgcgtgctatttccgtgctgaaaagccttccgtttgaggtagttagcctgaaagacacggaaggattgccctggatcggtgatgaagtcaaagggattatggaagaaatcatcgaggtcggtgaatcgctggaagtgcaggccgtgctcaatgatgagcgctatcaaagcttcaaacgctttaagagtgtctttggagtgggggtgaagacagcagacaagtggtaccgtatgggtctgcgcacgctcgaggatgttcgttccagcaagaccctgaagttgaccccgatgcagaaagcgggtctgtgctattatgaagatcttgctcgcggcgttacgaaagccgaagctgacgcgatttctctgctggttcaggatgcagtcgcaactttcgacccggatgcgctggtggagattgtcggtggatttcgtcgtgggaaaccttttggtcacgacgttgatctgcttatcacatctccgggagctgagaaagagcaagaagaccagctcctgcagaaagtgaccaatctgtggaagaaacaagggttgttgctgtacggtcgtctggaatggagtcagtttgaagatgggaaactcccatcccgcaagatcgatgccctggaccattttgcgaaatgctttctgatcctcaaactttatgatcataaagtggacaaaagcaaatgggaaatgccgacgggttcgaacgaaagcgaggccaaaagttggaaagcaattcgcgtagatctggttcgttgcccctacgatggttttgcgtttgcgttgttgggttggaccggaagccgcatgttccgccgtgatctgcgctggtacgccaccgacgagaagaagatgatgctggacaatcatgcgctgtatgacctgaccaagaaaatctttctcaaagctaaatcggaagaggaaattttcgcacatctggatcttgaatacctggaaccgttcgaacgtaacgca

SEQ ID NO: 1780 - protein, 529 aa, synthetic construct
  REGION 1..529: note = Variant of terminal deoxynucleotidyltransferase
MHHHHHHGGSGSHGIRTIDSDFGKKRQKKMDNHDSSAIYEIKFHEFVLFILEEKMGATRRTFLTDLARKKGFRVENELSDSVTHIVAENNSRSEVLAWLKEHKMEKTKQFELLDISWLIESMKVGKPVDTKGKYQLAESGEMSANPDPTEGRENELPPTTKTISQYACQRRTTLNNHNQRFTDALEILAENYEFKRNDDTALTFMRAISVLKSLPFEVVSLKDTEGLPWIGDEVKGIMEEIIEVGESLEVQAVLNDERYQSFKRFKSVFGVGVKTADKWYRMGLRTLEDVRSSKTLKLTPMQKAGLCYYEDLARGVTKAEADAISLLVQDAVATFDPDALVEIVGGFRRGKPFGHDVDLLITSPGAEKEQEDQLLQKVTNLWKKQGLLLYGRLEWSQFEDGKLPSRKIDALDHFAKCFLILKLYDHKVDKSKWEMPTGSNESEAKSWKAIRVDLVRCPYDGFAFALLGWTGSRMFRRDLRWYATDEKKMMLDNHALYDLTKKIFLKAKSEEEIFAHLDLEYLEPFERNA

SEQ ID NO: 1781 - DNA, 1587 bp, synthetic construct
  misc_feature 1..1587: note = Variant of terminal deoxynucleotidyltransferase
  source 1..1587: mol_type = other DNA
atgcaccatcatcatcatcatggcggtagcggcagccacggcattcgtaccatcgattcggacttcgggaagaaacgccagaagaagatggataaccacgatagttccgccatctatgaaatcaaatttcacgagtttgtgctgttcattctcgaagagaaaatgggtgcgacgcgtcgtacttttctgacagatttagcccgcaagaaagggttccgcgtcgagaatgaactgtcagacagcgttacccacatcgtggcagaaaataattcacgctctgaagtattggcttggctgaaagaacacaagatggagaagaccaagcaattcgaactgctggatattagctggcttatcgaaagcatgaaagttggtaaaccggtggacaccaaggggaaataccagttggcggaatcgggtgagatgagtgcgaacccagatccgacagagggtcgtgaaaacgagctgcctcctactacgaagaccatttctcagtatgcgtgtcaacgccgcaccaccctgaacaaccataatcaacgttttacggacgcactggaaattcttgcggaaaattacgagttcaaacgcaacgatgatactgcgctgacttttatgcgtgctatttccgtgctgaaaagccttccgtttgaggtagttagcctgaaagacacggaaggattgccctggatcggtgatgaagtcaaagggattatggaagaaatcatcgaggtcggtgaatcgctggaagtgcaggccgtgctcaatgatgagcgctatcaaagcttcaaacgctttaagagtgtctttggagtgggggtgaagacagcagacaagtggtaccgtatgggtctgcgcacgctcgaggatgttcgttccagcaagaccctgaagttgaccccgatgcagaaagcgggtctgtgctattatgaagatcttgctcgcggcgttacgaaagccgaagctgacgcgatttctctgctggttcaggatgcagtcgcaactttcgacccggatgcgctggtggagattgtcggtggatttcgtcgtgggaaaccttttggtcacgacgttgatctgcttatcacatctccgggagctgagaaagagactgaagaccagctcctgcagaaagtgaccaatctgtggaagaaacaagggttgttgctgtacggtcgtctggaatggagtcagtttgaagatgggaaactcccatcccgcaagatcgatgccctggaccattttgcgaaatgctttctgatcctcaaactttatgatcataaagtggacaaaagcaaatgggaaatgccgacgggttcgaacgaaagcgaggccaaaagttggaaagcaattcgcgtagatctggttcgttgcccctacgatggttttgcgtttgcgttgttgggttggaccggaagccgcatgttccgccgtgatctgcgctggtacgccaccgacgagaagaagatgatgctggacaatcatgcgctgtatgacctgaccaagaaaatctttctcaaagctaaatcggaagaggaaattttcgcacatctggggcttgaatacctggaaccgttcgaacgtaacgca

SEQ ID NO: 1782 - protein, 529 aa, synthetic construct
  REGION 1..529: note = Variant of terminal deoxynucleotidyltransferase
MHHHHHHGGSGSHGIRTIDSDFGKKRQKKMDNHDSSAIYEIKFHEFVLFILEEKMGATRRTFLTDLARKKGFRVENELSDSVTHIVAENNSRSEVLAWLKEHKMEKTKQFELLDISWLIESMKVGKPVDTKGKYQLAESGEMSANPDPTEGRENELPPTTKTISQYACQRRTTLNNHNQRFTDALEILAENYEFKRNDDTALTFMRAISVLKSLPFEVVSLKDTEGLPWIGDEVKGIMEEIIEVGESLEVQAVLNDERYQSFKRFKSVFGVGVKTADKWYRMGLRTLEDVRSSKTLKLTPMQKAGLCYYEDLARGVTKAEADAISLLVQDAVATFDPDALVEIVGGFRRGKPFGHDVDLLITSPGAEKETEDQLLQKVTNLWKKQGLLLYGRLEWSQFEDGKLPSRKIDALDHFAKCFLILKLYDHKVDKSKWEMPTGSNESEAKSWKAIRVDLVRCPYDGFAFALLGWTGSRMFRRDLRWYATDEKKMMLDNHALYDLTKKIFLKAKSEEEIFAHLGLEYLEPFERNA

SEQ ID NO: 1783 - DNA, 1587 bp, synthetic construct; identical to SEQ ID NO: 1717
  misc_feature 1..1587: note = Variant of terminal deoxynucleotidyltransferase
  source 1..1587: mol_type = other DNA

SEQ ID NO: 1784 - protein, 529 aa, synthetic construct; identical to SEQ ID NO: 1718
  REGION 1..529: note = Variant of terminal deoxynucleotidyltransferase

SEQ ID NO: 1785 - DNA, 1587 bp, synthetic construct
  misc_feature 1..1587: note = Variant of terminal deoxynucleotidyltransferase
  source 1..1587: mol_type = other DNA
atgcaccatcatcatcatcatggcggtagcggcagccacggcattcgtaccatcgattcggacttcgggaagaaacgccagaagaagatggataaccacgatagttccgccatctatgaaatcaaatttcacgagtttgtgctgttcattctcgaagagaaaatgggtgcgacgcgtcgtacttttctgacagatttagcccgcaagaaagggttccgcgtcgagaatgaactgtcagacagcgttacccacatcgtggcagaaaataattcacgctctgaagtattggcttggctgaaagaacacaagatggagaagaccaagcaattcgaactgctggatattagctggcttatcgaaagcatgaaagttggtaaaccggtggacaccaaggggaaataccagttggcggaatcgggtgagatgagtgcgaacccagatccgacagagggtcgtgaaaacgagctgcctcctactacgaagaccatttctcagtatgcgtgtcaacgccgcaccaccctgaacaaccataatcaacgttttacggacgcactggaaattcttgcggaaaattacgagttcaaacgcaacgatgatactgcgctgacttttatgcgtgctatttccgtgctgaaaagccttccgtttgaggtagttagcctgaaagacacggaaggattgccctggatcggtgatgaagtcaaagggattatggaagaaatcatcgaggtcggtgaatcgctggaagtgcaggccgtgctcaatgatgagcgctatcaaagcttcaaacgctttaagagtgtctttggagtgggggtgaagacagcagacaagtggtaccgtatgggtctgcgcacgctcgaggatgttcgttccagcaagaccctgaagttgaccccgatgcagaaagcgggtctgtgctattatgaagatcttgctcgcggcgttacgaaagccgaagctgacgcgatttctctgctggttcaggatgcagtcgcaactttcgacccggatgcgctggtggagattgtcggtggatttcgtcgtgggaaaccttttggtcacgacgttgatctgcttatcacatctccgggagctgagaaagagcaagaagaccagctcctgcagaaagtgaccgatctgtggaagaaacaagggttgttgctgtacggtcgtctggaatggagtcagtttgaagatgggaaactcccatcccgcaagatcgatgccctggaccattttgcgaaatgctttctgatcctcaaactttatgatcataaagtggacaaaagcaaatgggaaatgccgacgggttcgaacgaaagcgaggccaaaagttggaaagcaattcgcgtagatctggttcgttgcccctacgatggttttgcgtttgcgttgttgggttggaccggaagccgcatgttccgccgtgatctgcgctggtacgccaccgacgagaagaagatgatgctggacaatcatgcgctgtatgacctgaccaagaaaatctttctcaaagctaaatcggaagaggaaattttcgcacatctggggcttgaatacctggaaccgttcgaacgtaacgca

SEQ ID NO: 1786 - protein, 529 aa, synthetic construct
  REGION 1..529: note = Variant of terminal deoxynucleotidyltransferase
MHHHHHHGGSGSHGIRTIDSDFGKKRQKKMDNHDSSAIYEIKFHEFVLFILEEKMGATRRTFLTDLARKKGFRVENELSDSVTHIVAENNSRSEVLAWLKEHKMEKTKQFELLDISWLIESMKVGKPVDTKGKYQLAESGEMSANPDPTEGRENELPPTTKTISQYACQRRTTLNNHNQRFTDALEILAENYEFKRNDDTALTFMRAISVLKSLPFEVVSLKDTEGLPWIGDEVKGIMEEIIEVGESLEVQAVLNDERYQSFKRFKSVFGVGVKTADKWYRMGLRTLEDVRSSKTLKLTPMQKAGLCYYEDLARGVTKAEADAISLLVQDAVATFDPDALVEIVGGFRRGKPFGHDVDLLITSPGAEKEQEDQLLQKVTDLWKKQGLLLYGRLEWSQFEDGKLPSRKIDALDHFAKCFLILKLYDHKVDKSKWEMPTGSNESEAKSWKAIRVDLVRCPYDGFAFALLGWTGSRMFRRDLRWYATDEKKMMLDNHALYDLTKKIFLKAKSEEEIFAHLGLEYLEPFERNA

SEQ ID NO: 1787 - DNA, 1587 bp, synthetic construct; identical to SEQ ID NO: 1683
  misc_feature 1..1587: note = Variant of terminal deoxynucleotidyltransferase
  source 1..1587: mol_type = other DNA

SEQ ID NO: 1788 - protein, 529 aa, synthetic construct; identical to SEQ ID NO: 1684
  REGION 1..529: note = Variant of terminal deoxynucleotidyltransferase

SEQ ID NO: 1789 - DNA, 1587 bp, synthetic construct
  misc_feature 1..1587: note = Variant of terminal deoxynucleotidyltransferase
  source 1..1587: mol_type = other DNA
atgcaccatcatcatcatcatggcggtagcggcagccacggcattcgtaccatcgattcggacttcgggaagaaacgccagaagaagatggataaccacgatagttccgccatctatgaaatcaaatttcacgagtttgtgctgttcattctcgaagagaaaatgggtgcgacgcgtcgtacttttctgacagatttagcccgcaagaaagggttccgcgtcgagaatgaactgtcagacagcgttacccacatcgtggcagaaaataattcacgctctgaagtattggcttggctgaaagaacacaagatggagaagaccaagcaattcgaactgctggatattagctggcttatcgaaagcatgaaagttggtaaaccggtggacaccaaggggaaataccagttggcggaatcgggtgagatgagtgcgaacccagatccgacagagggtcgtgaaaacgagctgcctcctactacgaagaccatttctcagtatgcgtgtcaacgccgcaccaccctgaacaaccataatcaacgttttacggacgcactggaaattcttgcggaaaattacgagttcaaacgcaacgatgatactgcgctgacttttatgcgtgctatttccgtgctgaaaagccttccgtttgaggtagttagcctgaaagacacggaaggattgccctggatcggtgatgaagtcaaagggattatggaagaaatcatcgaggtcggtgaatcgctggaagtgcaggccgtgctcaatgatgagcgctatcaaagcttcaaacgctttaagagtgtctttggagtgggggtgaagacagcagacaagtggtaccgtatgggtctgcgcacgctcgaggatgttcgttccagcaagaccctgaagttgaccccgatgcagaaagcgggtttctgctattatgaagatcttgctcgcggcgttacgaaagccgaagctgacgcgatttctctgctggttcaggatgcagtcgcaactttcgacccggatgcgctggtggagattgtcggtggatttcgtcgtgggaaaccttttggtcacgacgttgatctgcttatcacatctccgggagctgagaaagagcaagaagaccagctcctgcagaaagtgaccaatctgtggaagaaacaagggttgttgctgtacggtcgtctggaatggagtcagtttgaagatgggaaactcccatcccgcaagatcgatgccctggaccattttgcgaaatgctttctgatcctcaaactttatgatcataaagtggacaaaagcaaatgggaaatgccgacgggttcgaacgaaagcgaggccaaaagttggaaagcaattcgcgtagatctggttcgttgcccctacgatggttttgcgtttgcgttgttgggttggaccggaagccgcatgttccgccgtgatctgcgctggtacgccaccgacgagaagaagatgatgctggacaatcatgcgctgtatgacctgaccaagaaaatctttctcaaagctaaatcggaagaggaaattttcgcacatctggggcttgaatacctggaaccgttcgaacgtaacgca

SEQ ID NO: 1790 - protein, 529 aa, synthetic construct
  REGION 1..529: note = Variant of terminal deoxynucleotidyltransferase
MHHHHHHGGSGSHGIRTIDSDFGKKRQKKMDNHDSSAIYEIKFHEFVLFILEEKMGATRRTFLTDLARKKGFRVENELSDSVTHIVAENNSRSEVLAWLKEHKMEKTKQFELLDISWLIESMKVGKPVDTKGKYQLAESGEMSANPDPTEGRENELPPTTKTISQYACQRRTTLNNHNQRFTDALEILAENYEFKRNDDTALTFMRAISVLKSLPFEVVSLKDTEGLPWIGDEVKGIMEEIIEVGESLEVQAVLNDERYQSFKRFKSVFGVGVKTADKWYRMGLRTLEDVRSSKTLKLTPMQKAGFCYYEDLARGVTKAEADAISLLVQDAVATFDPDALVEIVGGFRRGKPFGHDVDLLITSPGAEKEQEDQLLQKVTNLWKKQGLLLYGRLEWSQFEDGKLPSRKIDALDHFAKCFLILKLYDHKVDKSKWEMPTGSNESEAKSWKAIRVDLVRCPYDGFAFALLGWTGSRMFRRDLRWYATDEKKMMLDNHALYDLTKKIFLKAKSEEEIFAHLGLEYLEPFERNA

SEQ ID NO: 1791 - DNA, 1587 bp, synthetic construct; identical to SEQ ID NO: 1691
  misc_feature 1..1587: note = Variant of terminal deoxynucleotidyltransferase
  source 1..1587: mol_type = other DNA

SEQ ID NO: 1792 - protein, 529 aa, synthetic construct; identical to SEQ ID NO: 1692
  REGION 1..529: note = Variant of terminal deoxynucleotidyltransferase

SEQ ID NO: 1793 - DNA, 1587 bp, synthetic construct; identical to SEQ ID NO: 1733
  misc_feature 1..1587: note = Variant of terminal deoxynucleotidyltransferase
  source 1..1587: mol_type = other DNA

SEQ ID NO: 1794 - protein, 529 aa, synthetic construct; identical to SEQ ID NO: 1734
  REGION 1..529: note = Variant of terminal deoxynucleotidyltransferase

SEQ ID NO: 1795 - DNA, 1587 bp, synthetic construct
  misc_feature 1..1587: note = Variant of terminal deoxynucleotidyltransferase
  source 1..1587: mol_type = other DNA
atgcaccatcatcatcatcatggcggtagcggcagccacggcattcgtaccatcgattcggacttcgggaagaaacgccagaagaagatggataaccacgatagttccgccatctatgaaatcaaatttcacgagtttgtgctgttcattctcgaagagaaaatgggtgcgacgcgtcgtacttttctgacagatttagcccgcaagaaagggttccgcgtcgagaatgaactgtcagacagcgttacccacatcgtggcagaaaataattcacgctctgaagtattggcttggctgaaagaacacaagatggagaagaccaagcaattcgaactgctggatattagctggcttatcgaaagcatgaaagttggtaaaccggtggacaccaaggggaaataccagttggcggaatcgggtgagatgagtgcgaacccagatccgacagagggtcgtgaaaacgagctgcctcctactacgaagaccatttctcagtatgcgtgtcaacgccgcaccaccctgaacaaccataatcaacgttttacggacgcactggaaattcttgcggaaaattacgagttcaaacgcaacgatgatactgcgctgacttttatgcgtgctatttccgtgctgaaaagccttccgtttgaggtagttagcctgaaagacacggaaggattgccctggatcggtgatgaagtcaaagggattatggaagaaatcatcgaggtcggtgaatcgctggaagtgcaggccgtgctcaatgatgagcgctatcaaagcttcaaacgctttaagagtgtctttggagtgggggtgaagacagcagacaagtggtaccgtatgggtctgcgcacgctcgaggatgttcgttccagcaagaccctgaagttgaccccgatgcagaaagcgggtctgtgctattatgaagatcttgctcgcggcgttacgaaagccgaagctgacgcgatttctctgctggttcaggatgcagtcgcaactttcgacccggatgcgctggtggagattgtcggtggatttcgtcgtgggaaaccttttggtcacgacgttgatctgcttatcacatctccgggagctgagcgtgagcaagaagaccagctcctgcagaaagtgaccaatctgtggaagaaacaagggttgttgctgtacggtcgtctggaatggagtcagtttgaagatgggaaactcccatcccgcaagatcgatgccctggaccattttgcgaaatgctttctgatcctcaaactttatgatcataaagtggacaaaagcaaatgggaaatgccgacgggttcgaacgaaagcgaggccaaaagttggaaagcaattcgcgtagatctggttcgttgcccctacgatggttttgcgtttgcgttgttgggttggaccggaagccgcatgttccgccgtgatctgcgctggtacgccaccgacgagaagaagatgatgctggacaatcatgcgctgtatgacctgaccaagaaaatctttctcaaagctaaatcggaagaggaaattttcgcacatctggggcttgaatacctggaaccgttcgaacgtaacgca

SEQ ID NO: 1796 - protein, 529 aa, synthetic construct
  REGION 1..529: note = Variant of terminal deoxynucleotidyltransferase
MHHHHHHGGSGSHGIRTIDSDFGKKRQKKMDNHDSSAIYEIKFHEFVLFILEEKMGATRRTFLTDLARKKGFRVENELSDSVTHIVAENNSRSEVLAWLKEHKMEKTKQFELLDISWLIESMKVGKPVDTKGKYQLAESGEMSANPDPTEGRENELPPTTKTISQYACQRRTTLNNHNQRFTDALEILAENYEFKRNDDTALTFMRAISVLKSLPFEVVSLKDTEGLPWIGDEVKGIMEEIIEVGESLEVQAVLNDERYQSFKRFKSVFGVGVKTADKWYRMGLRTLEDVRSSKTLKLTPMQKAGLCYYEDLARGVTKAEADAISLLVQDAVATFDPDALVEIVGGFRRGKPFGHDVDLLITSPGAEREQEDQLLQKVTNLWKKQGLLLYGRLEWSQFEDGKLPSRKIDALDHFAKCFLILKLYDHKVDKSKWEMPTGSNESEAKSWKAIRVDLVRCPYDGFAFALLGWTGSRMFRRDLRWYATDEKKMMLDNHALYDLTKKIFLKAKSEEEIFAHLGLEYLEPFERNA

SEQ ID NO: 1797 - DNA, 1587 bp, synthetic construct; identical to SEQ ID NO: 1687
  misc_feature 1..1587: note = Variant of terminal deoxynucleotidyltransferase
  source 1..1587: mol_type = other DNA

SEQ ID NO: 1798 - protein, 529 aa, synthetic construct; identical to SEQ ID NO: 1688
  REGION 1..529: note = Variant of terminal deoxynucleotidyltransferase

SEQ ID NO: 1799 - DNA, 1587 bp, synthetic construct; identical to SEQ ID NO: 1711
  misc_feature 1..1587: note = Variant of terminal deoxynucleotidyltransferase
  source 1..1587: mol_type = other DNA

SEQ ID NO: 1800 - protein, 529 aa, synthetic construct; identical to SEQ ID NO: 1712
  REGION 1..529: note = Variant of terminal deoxynucleotidyltransferase

SEQ ID NO: 1801 - DNA, 1587 bp, synthetic construct
  misc_feature 1..1587: note = Variant of terminal deoxynucleotidyltransferase
  source 1..1587: mol_type = other DNA
atgcaccatcatcatcatcatggcggtagcggcagccacggcattcgtaccatcgattcggacttcgggaagaaacgccagaagaagatggataaccacgatagttccgccatctatgaaatcaaatttcacgagtttgtgctgttcattctcgaagagaaaatgggtgcgacgcgtcgtacttttctgacagatttagcccgcaagaaagggttccgcgtcgagaatgaactgtcagacagcgttacccacatcgtggcagaaaataattcacgctctgaagtattggcttggctgaaagaacacaagatggagaagaccaagcaattcgaactgctggatattagctggcttatcgaaagcatgaaagttggtaaaccggtggacaccaaggggaaataccagttggcggaatcgggtgagatgagtgcgaacccagatccgacagagggtcgtgaaaacgagctgcctcctactacgcgcaccatttctcagtatgcgtgtcaacgccgcaccaccctgaacaaccataatcaacgttttacggacgcactggaaattcttgcggaaaattacgagttcaaacgcaacgatgatactgcgctgacttttatgcgtgctatttccgtgctgaaaagccttccgtttgaggtagttagcctgaaagacacggaaggattgccctggatcggtgatgaagtcaaagggattatggaagaaatcatcgaggtcggtgaatcgctggaagtgcaggccgtgctcaatgatgagcgctatcaaagcttcaaacgctttaagagtgtctttggagtgggggtgaagacagcagacaagtggtaccgtatgggtctgcgcacgctcgaggatgttcgttccagcaagaccctgaagttgaccccgatgcagaaagcgggtctgtgctattatgaagatcttgctcgcggcgttacgaaagccgaagctgacgcgatttctctgctggttcaggatgcagtcgcaactttcgacccggatgcgctggtggagattgtcggtggatttcgtcgtgggaaaccttttggtcacgacgttgatctgcttatcacatctccgggagctgagaaagagcaagaagaccagctcctgcagaaagtgaccaatctgtggaagaaacaagggttgttgctgtacggtcgtctggaatggagtcagtttgaagatgggaaactcccatcccgcaagatcgatgccctggaccattttgcgaaatgctttctgatcctcaaactttatgatcataaagtggacaaaagcaaatgggaaatgccgacgggttcgaacgaaagcgaggccaaaagttggaaagcaattcgcgtagatctggttcgttgcccctacgatggttttgcgtttgcgttgttgggttggaccggaagccgcatgttccgccgtgatctgcgctggtacgccaccgacgagaagaagatgatgctggacaatcatgcgctgtatgacctgaccaagaaaatctttctcaaagctaaatcggaagaggaaattttcgcacatctggggcttgaatacctggaaccgttcgaacgtaacgca

SEQ ID NO: 1802 - protein, 529 aa, synthetic construct
  REGION 1..529: note = Variant of terminal deoxynucleotidyltransferase
MHHHHHHGGSGSHGIRTIDSDFGKKRQKKMDNHDSSAIYEIKFHEFVLFILEEKMGATRRTFLTDLARKKGFRVENELSDSVTHIVAENNSRSEVLAWLKEHKMEKTKQFELLDISWLIESMKVGKPVDTKGKYQLAESGEMSANPDPTEGRENELPPTTRTISQYACQRRTTLNNHNQRFTDALEILAENYEFKRNDDTALTFMRAISVLKSLPFEVVSLKDTEGLPWIGDEVKGIMEEIIEVGESLEVQAVLNDERYQSFKRFKSVFGVGVKTADKWYRMGLRTLEDVRSSKTLKLTPMQKAGLCYYEDLARGVTKAEADAISLLVQDAVATFDPDALVEIVGGFRRGKPFGHDVDLLITSPGAEKEQEDQLLQKVTNLWKKQGLLLYGRLEWSQFEDGKLPSRKIDALDHFAKCFLILKLYDHKVDKSKWEMPTGSNESEAKSWKAIRVDLVRCPYDGFAFALLGWTGSRMFRRDLRWYATDEKKMMLDNHALYDLTKKIFLKAKSEEEIFAHLGLEYLEPFERNA

SEQ ID NO: 1803 - DNA, 1587 bp, synthetic construct; identical to SEQ ID NO: 1735
  misc_feature 1..1587: note = Variant of terminal deoxynucleotidyltransferase
  source 1..1587: mol_type = other DNA

SEQ ID NO: 1804 - protein, 529 aa, synthetic construct; identical to SEQ ID NO: 1736
  REGION 1..529: note = Variant of terminal deoxynucleotidyltransferase

SEQ ID NO: 1805 - DNA, 1587 bp, synthetic construct; identical to SEQ ID NO: 1739
  misc_feature 1..1587: note = Variant of terminal deoxynucleotidyltransferase
  source 1..1587: mol_type = other DNA

SEQ ID NO: 1806 - protein, 529 aa, synthetic construct; identical to SEQ ID NO: 1740
  REGION 1..529: note = Variant of terminal deoxynucleotidyltransferase

SEQ ID NO: 1807 - DNA, 1587 bp, synthetic construct
  misc_feature 1..1587: note = Variant of terminal deoxynucleotidyltransferase
  source 1..1587: mol_type = other DNA
atgcaccatcatcatcatcatggcggtagcggcagccacggcattcgtaccatcgattcggacttcgggaagaaacgccagaagaagatggataaccacgatagttccgccatctatgaaatcaaatttcacgagtttgtgctgttcattctcgaagagaaaatgggtgcgacgcgtcgtacttttctgacagatttagcccgcaagaaagggttccgcgtcgagaatgaactgtcagacagcgttacccacatcgtggcagaaaataattcacgctctgaagtattggcttggctgaaagaacacaagatggagaagaccaagcaattcgaactgctggatattagctggcttatcgaaagcatgaaagttggtaaaccggtggacaccaaggggaaataccagttggcggaatcgggtgagatgagtgcgaacccagatccgacagagggtcgtgaaaacgagctgcctcctactacgaagaccatttctcagtatgcgtgtcaacgccgcaccaccctgaacaaccataatcaacgttttacggacgcactggaaattcttgcggaaaattacgagttcaaacgcaacgatgatactgcgctgacttttatgcgtgctatttccgtgctgaaaagccttccgtttgaggtagttagcctgaaagacacggaaggattgccctggatcggtgatgaagtcaaagggattatggaagaaatcatcgaggtcggtgaatcgctggaagtgcaggccgtgctcaatgatgagcgctatcaaagcttcaaacgctttaagagtgtctttggagtgggggtgaagacagcagacaagtggtaccgtatgggtctgcgcacgctcgaggatgttcgttccagcaagaccctgaagttgaccccgatgcagaaagcgggtctgtgctattatgaagatcttgctcgcggcgttacgaaagccgaaaaagacgcgatttctctgctggttcaggatgcagtcgcaactttcgacccggatgcgctggtggagattgtcggtggatttcgtcgtgggaaaccttttggtcacgacgttgatctgcttatcacatctccgggagctgagaaagagcaagaagaccagctcctgcagaaagtgaccaatctgtggaagaaacaagggttgttgctgtacggtcgtctggaatggagtcagtttgaagatgggaaactcccatcccgcaagatcgatgccctggaccattttgcgaaatgctttctgatcctcaaactttatgatcataaagtggacaaaagcaaatgggaaatgccgacgggttcgaacgaaagcgaggccaaaagttggaaagcaattcgcgtagatctggttcgttgcccctacgatggttttgcgtttgcgttgttgggttggaccggaagccgcatgttccgccgtgatctgcgctggtacgccaccgacgagaagaagatgatgctggacaatcatgcgctgtatgacctgaccaagaaaatctttctcaaagctaaatcggaagaggaaattttcgcacatctggggcttgaatacctggaaccgttcgaacgtaacgca

SEQ ID NO: 1808 - protein, 529 aa, synthetic construct
  REGION 1..529: note = Variant of terminal deoxynucleotidyltransferase
MHHHHHHGGSGSHGIRTIDSDFGKKRQKKMDNHDSSAIYEIKFHEFVLFILEEKMGATRRTFLTDLARKKGFRVENELSDSVTHIVAENNSRSEVLAWLKEHKMEKTKQFELLDISWLIESMKVGKPVDTKGKYQLAESGEMSANPDPTEGRENELPPTTKTISQYACQRRTTLNNHNQRFTDALEILAENYEFKRNDDTALTFMRAISVLKSLPFEVVSLKDTEGLPWIGDEVKGIMEEIIEVGESLEVQAVLNDERYQSFKRFKSVFGVGVKTADKWYRMGLRTLEDVRSSKTLKLTPMQKAGLCYYEDLARGVTKAEKDAISLLVQDAVATFDPDALVEIVGGFRRGKPFGHDVDLLITSPGAEKEQEDQLLQKVTNLWKKQGLLLYGRLEWSQFEDGKLPSRKIDALDHFAKCFLILKLYDHKVDKSKWEMPTGSNESEAKSWKAIRVDLVRCPYDGFAFALLGWTGSRMFRRDLRWYATDEKKMMLDNHALYDLTKKIFLKAKSEEEIFAHLGLEYLEPFERNA

SEQ ID NO: 1809 - DNA, 1587 bp, synthetic construct
  misc_feature 1..1587: note = Variant of terminal deoxynucleotidyltransferase
  source 1..1587: mol_type = other DNA
atgcaccatcatcatcatcatggcggtagcggcagccacggcattcgtaccatcgattcggacttcgggaagaaacgccagaagaagatggataaccacgatagttccgccatctatgaaatcaaatttcacgagtttgtgctgttcattctcgaagagaaaatgggtgcgacgcgtcgtacttttctgacagatttagcccgcaagaaagggttccgcgtcgagaatgaactgtcagacagcgttacccacatcgtggcagaaaataattcacgctctgaagtattggcttggctgaaagaacacaagatggagaagaccaagcaattcgaactgctggatattagctggcttatcgaaagcatgaaagttggtaaaccggtggacaccaaggggaaataccagttggcggaatcgggtgagatgagtgcgaacccagatccgacagagggtcgtgaaaacgagctgcctcctactacgaagaccatttctcagtatgcgtgtcaacgccgcaccaccctgaacaaccataatcaacgttttacggacgcactggaaattcttgcggaaaattacgagttcaaacgcaacgatgatactgcgctgacttttatgcgtgctatttccgtgctgaaaagccttccgtttgaggtagttagcctgaaagacacggaaggattgccctggatcggtgatgaagtcaaagggattatggaagaaatcatcgaggtcggtgaatcgctggaagtgaaggccgtgctcaatgatgagcgctatcaaagcttcaaacgctttaagagtgtctttggagtgggggtgaagacagcagacaagtggtaccgtatgggtctgcgcacgctcgaggatgttcgttccagcaagaccctgaagttgaccccgatgcagaaagcgggtctgtgctattatgaagatcttgctcgcggcgttacgaaagccgaagctgacgcgatttctctgctggttcaggatgcagtcgcaactttcgacccggatgcgctggtggagattgtcggtggatttcgtcgtgggaaaccttttggtcacgacgttgatctgcttatcacatctccgggagctgagaaagagcaagaagaccagctcctgcagaaagtgaccaatctgtggaagaaacaagggttgttgctgtacggtcgtctggaatggagtcagtttgaagatgggaaactcccatcccgcaagatcgatgccctggaccattttgcgaaatgctttctgatcctcaaactttatgatcataaagtggacaaaagcaaatgggaaatgccgacgggttcgaacgaaagcgaggccaaaagttggaaagcaattcgcgtagatctggttcgttgcccctacgatggttttgcgtttgcgttgttgggttggaccggaagccgcatgttccgccgtgatctgcgctggtacgccaccgacgagaagaagatgatgctggacaatcatgcgctgtatgacctgaccaagaaaatctttctcaaagctaaatcggaagaggaaattttcgcacatctggggcttgaatacctggaaccgttcgaacgtaacgca

SEQ ID NO: 1810 - protein, 529 aa, synthetic construct
  REGION 1..529: note = Variant of terminal deoxynucleotidyltransferase
MHHHHHHGGSGSHGIRTIDSDFGKKRQKKMDNHDSSAIYEIKFHEFVLFILEEKMGATRRTFLTDLARKKGFRVENELSDSVTHIVAENNSRSEVLAWLKEHKMEKTKQFELLDISWLIESMKVGKPVDTKGKYQLAESGEMSANPDPTEGRENELPPTTKTISQYACQRRTTLNNHNQRFTDALEILAENYEFKRNDDTALTFMRAISVLKSLPFEVVSLKDTEGLPWIGDEVKGIMEEIIEVGESLEVKAVLNDERYQSFKRFKSVFGVGVKTADKWYRMGLRTLEDVRSSKTLKLTPMQKAGLCYYEDLARGVTKAEADAISLLVQDAVATFDPDALVEIVGGFRRGKPFGHDVDLLITSPGAEKEQEDQLLQKVTNLWKKQGLLLYGRLEWSQFEDGKLPSRKIDALDHFAKCFLILKLYDHKVDKSKWEMPTGSNESEAKSWKAIRVDLVRCPYDGFAFALLGWTGSRMFRRDLRWYATDEKKMMLDNHALYDLTKKIFLKAKSEEEIFAHLGLEYLEPFERNA

SEQ ID NO: 1811 - DNA, 1587 bp, synthetic construct
  misc_feature 1..1587: note = Variant of terminal deoxynucleotidyltransferase
  source 1..1587: mol_type = other DNA
atgcaccatcatcatcatcatggcggtagcggcagccacggcattcgtaccatcgattcggacttcgggaagaaacgccagaagaagatggataaccacgatagttccgccatctatgaaatcaaatttcacgagtttgtgctgttcattctcgaagagaaaatgggtgcgacgcgtcgtacttttctgacagatttagcccgcaagaaagggttccgcgtcgagaatgaactgtcagacagcgttacccacatcgtggcagaaaataattcacgctctgaagtattggcttggctgaaagaacacaagatggagaagaccaagcaattcgaactgctggatattagctggcttatcgaaagcatgaaagttggtaaaccggtggacaccaaggggaaataccagttggcggaatcgggtgagatgagtgcgaacccagatccgacagagggtcgtgaaaacgagctgcctcctactacgaagaccatttctcagtatgcgtgtcaacgccgcaccaccctgaacaaccataatcaacgttttacggacgcactggaaattcttgcggaaaattacgagttcaaacgcaacgatgatactgcgctgacttttatgcgtgctatttccgtgctgaaaagccttccgtttgaggtagttagcctgaaagacacggaaggattgccctggatcggtgatgaagtcaaagggattatggaagaaatcatcgaggtcggtgaatcgctggaagtgcaggccgtgctcaatgatgagcgctatcaaagcttcaaacgctttaagagtgtctttggagtgggggtgaagacagcagacaagtggtaccgtatgggtctgcgcacgctcgaggatgttcgttccagcaagaccctgaagttgaccccgatgcagaaagcgggtctgtgctattatgaagatcttgctcgcggcgttacgaaagccgaagctgacgcgatttctctgctggttcaggatgcagtcgcaactttcgacccggatgcgctggtggagattgtcggtggatttcgtcgtgggaaaccttttggtcacgacgttgatctgcttatcacatctccgggagctgagaaagagcaagaagaccagctcctgcagaaagtgaccaatctgtggaagaaacaagggttgttgctgtacggtcgtctggaatggagtcagtttgaagatgggaaactcccatcccgcaagatcgatgccctggaccattttgcgaaatgctttctgatcctcaaactttatgatcctaaagtggacaaaagcaaatgggaaatgccgacgggttcgaacgaaagcgaggccaaaagttggaaagcaattcgcgtagatctggttcgttgcccctacgatggttttgcgtttgcgttgttgggttggaccggaagccgcatgttccgccgtgatctgcgctggtacgccaccgacgagaagaagatgatgctggacaatcatgcgctgtatgacctgaccaagaaaatctttctcaaagctaaatcggaagaggaaattttcgcacatctggggcttgaatacctggaaccgttcgaacgtaacgca

SEQ ID NO: 1812 - protein, 529 aa, synthetic construct
  REGION 1..529: note = Variant of terminal deoxynucleotidyltransferase
MHHHHHHGGSGSHGIRTIDSDFGKKRQKKMDNHDSSAIYEIKFHEFVLFILEEKMGATRRTFLTDLARKKGFRVENELSDSVTHIVAENNSRSEVLAWLKEHKMEKTKQFELLDISWLIESMKVGKPVDTKGKYQLAESGEMSANPDPTEGRENELPPTTKTISQYACQRRTTLNNHNQRFTDALEILAENYEFKRNDDTALTFMRAISVLKSLPFEVVSLKDTEGLPWIGDEVKGIMEEIIEVGESLEVQAVLNDERYQSFKRFKSVFGVGVKTADKWYRMGLRTLEDVRSSKTLKLTPMQKAGLCYYEDLARGVTKAEADAISLLVQDAVATFDPDALVEIVGGFRRGKPFGHDVDLLITSPGAEKEQEDQLLQKVTNLWKKQGLLLYGRLEWSQFEDGKLPSRKIDALDHFAKCFLILKLYDPKVDKSKWEMPTGSNESEAKSWKAIRVDLVRCPYDGFAFALLGWTGSRMFRRDLRWYATDEKKMMLDNHALYDLTKKIFLKAKSEEEIFAHLGLEYLEPFERNA

SEQ ID NO: 1813 - DNA, 1587 bp, synthetic construct; identical to SEQ ID NO: 1697
  misc_feature 1..1587: note = Variant of terminal deoxynucleotidyltransferase
  source 1..1587: mol_type = other DNA

SEQ ID NO: 1814 - protein, 529 aa, synthetic construct; identical to SEQ ID NO: 1698
  REGION 1..529: note = Variant of terminal deoxynucleotidyltransferase

SEQ ID NO: 1815 - DNA, 1587 bp, synthetic construct
  misc_feature 1..1587: note = Variant of terminal deoxynucleotidyltransferase
  source 1..1587: mol_type = other DNA
atgcaccatcatcatcatcatggcggtagcggcagccacggcattcgtaccatcgattcggacttcgggaagaaacgccagaagaagatggataaccacgatagttccgccatctatgaaatcaaatttcacgagtttgtgctgttcattctcgaagagaaaatgggtgcgacgcgtcgtacttttctgacagatttagcccgcaagaaagggttccgcgtcgagaatgaactgtcagacagcgttacccacatcgtggcagaaaataattcacgctctgaagtattggcttggctgaaagaacacaagatggagaagaccaagcaattcgaactgctggatattagctggcttatcgaaagcatgaaagttggtaaaccggtggacaccaaggggaaataccagttggcggaatcgggtgagatgagtgcgaacccagatccgacagagggtcgtgaaaacgagctgcctcctactacgaagaccatttctcagtatgcgtgtcaacgccgcaccaccctgaacaaccataatcaacgttttacggacgcactggaaattcttgcggaaaattacgagttcaaacgcaacgatgatactgcgctgacttttatgcgtgctatttccgtgctgaaaagccttccgtttgaggtagttagcctgaaagacacggaaggattgccctggatcactgatgaagtcaaagggattatggaagaaatcatcgaggtcggtgaatcgctggaagtgcaggccgtgctcaatgatgagcgctatcaaagcttcaaacgctttaagagtgtctttggagtgggggtgaagacagcagacaagtggtaccgtatgggtctgcgcacgctcgaggatgttcgttccagcaagaccctgaagttgaccccgatgcagaaagcgggtctgtgctattatgaagatcttgctcgcggcgttacgaaagccgaagctgacgcgatttctctgctggttcaggatgcagtcgcaactttcgacccggatgcgctggtggagattgtcggtggatttcgtcgtgggaaaccttttggtcacgacgttgatctgcttatcacatctccgggagctgagaaagagcaagaagaccagctcctgcagaaagtgaccaatctgtggaagaaacaagggttgttgctgtacggtcgtctggaatggagtcagtttgaagatgggaaactcccatcccgcaagatcgatgccctggaccattttgcgaaatgctttctgatcctcaaactttatgatcataaagtggacaaaagcaaatgggaaatgccgacgggttcgaacgaaagcgaggccaaaagttggaaagcaattcgcgtagatctggttcgttgcccctacgatggttttgcgtttgcgttgttgggttggaccggaagccgcatgttccgccgtgatctgcgctggtacgccaccgacgagaagaagatgatgctggacaatcatgcgctgtatgacctgaccaagaaaatctttctcaaagctaaatcggaagaggaaattttcgcacatctggggcttgaatacctggaaccgttcgaacgtaacgca

SEQ ID NO: 1816 - protein, 529 aa, synthetic construct
  REGION 1..529: note = Variant of terminal deoxynucleotidyltransferase
MHHHHHHGGSGSHGIRTIDSDFGKKRQKKMDNHDSSAIYEIKFHEFVLFILEEKMGATRRTFLTDLARKKGFRVENELSDSVTHIVAENNSRSEVLAWLKEHKMEKTKQFELLDISWLIESMKVGKPVDTKGKYQLAESGEMSANPDPTEGRENELPPTTKTISQYACQRRTTLNNHNQRFTDALEILAENYEFKRNDDTALTFMRAISVLKSLPFEVVSLKDTEGLPWITDEVKGIMEEIIEVGESLEVQAVLNDERYQSFKRFKSVFGVGVKTADKWYRMGLRTLEDVRSSKTLKLTPMQKAGLCYYEDLARGVTKAEADAISLLVQDAVATFDPDALVEIVGGFRRGKPFGHDVDLLITSPGAEKEQEDQLLQKVTNLWKKQGLLLYGRLEWSQFEDGKLPSRKIDALDHFAKCFLILKLYDHKVDKSKWEMPTGSNESEAKSWKAIRVDLVRCPYDGFAFALLGWTGSRMFRRDLRWYATDEKKMMLDNHALYDLTKKIFLKAKSEEEIFAHLGLEYLEPFERNA

SEQ ID NO: 1817 - DNA, 1587 bp, synthetic construct
  misc_feature 1..1587: note = Variant of terminal deoxynucleotidyltransferase
  source 1..1587: mol_type = other DNA
atgcaccatcatcatcatcatggcggtagcggcagccacggcattcgtaccatcgattcggacttcgggaagaaacgccagaagaagatggataaccacgatagttccgccatctatgaaatcaaatttcacgagtttgtgctgttcattctcgaagagaaaatgggtgcgacgcgtcgtacttttctgacagatttagcccgcaagaaagggttccgcgtcgagaatgaactgtcagacagcgttacccacatcgtggcagaaaataattcacgctctgaagtattggcttggctgaaagaacacaagatggagaagaccaagcaattcgaactgctggatattagctggcttatcgaaagcatgaaagttggtaaaccggtggacaccaaggggaaataccagttggcggaatcgggtgagatgagtgcgaacccagatccgacagagggtcgtgaaaacgagctgcctcctactacgaagaccatttctcagtatgcgtgtcaacgccgcaccaccctgaacaaccataatcaacgttttacggacgcactggaaattcttgcggaaaattacgagttcaaacgcaacgatgatactgcgctgacttttatgcgtgctatttccgtgctgaaaagccttccgtttgaggtagttagcctgaaagacacggaaggattgccctggatcggtgatgaagtcaaagggattatggaagaaatcatcgaggtcggtgaatcgctggaagtgcaggccgtgctcaatgatgagcgctatcaaagcttcaaacgctttaagagtgtctttggagtgggggtgaagacagcagacaagtggtaccgtatgggtctgcgcacgctcgaggatgttcgttccagcaagaccctgaagttgaccccgatgcagaaagcgggtctgtgctattatgaagatcttgctcgcggcgttacgaaagccgaagctgacgcgatttctctgattgttcaggatgcagtcgcaactttcgacccggatgcgctggtggagattgtcggtggatttcgtcgtgggaaaccttttggtcacgacgttgatctgcttatcacatctccgggagctgagaaagagcaagaagaccagctcctgcagaaagtgaccaatctgtggaagaaacaagggttgttgctgtacggtcgtctggaatggagtcagtttgaagatgggaaactcccatcccgcaagatcgatgccctggaccattttgcgaaatgctttctgatcctcaaactttatgatcataaagtggacaaaagcaaatgggaaatgccgacgggttcgaacgaaagcgaggccaaaagttggaaagcaattcgcgtagatctggttcgttgcccctacgatggttttgcgtttgcgttgttgggttggaccggaagccgcatgttccgccgtgatctgcgctggtacgccaccgacgagaagaagatgatgctggacaatcatgcgctgtatgacctgaccaagaaaatctttctcaaagctaaatcggaagaggaaattttcgcacatctggggcttgaatacctggaaccgttcgaacgtaacgca

SEQ ID NO: 1818 - protein, 529 aa, synthetic construct
  REGION 1..529: note = Variant of terminal deoxynucleotidyltransferase
MHHHHHHGGSGSHGIRTIDSDFGKKRQKKMDNHDSSAIYEIKFHEFVLFILEEKMGATRRTFLTDLARKKGFRVENELSDSVTHIVAENNSRSEVLAWLKEHKMEKTKQFELLDISWLIESMKVGKPVDTKGKYQLAESGEMSANPDPTEGRENELPPTTKTISQYACQRRTTLNNHNQRFTDALEILAENYEFKRNDDTALTFMRAISVLKSLPFEVVSLKDTEGLPWIGDEVKGIMEEIIEVGESLEVQAVLNDERYQSFKRFKSVFGVGVKTADKWYRMGLRTLEDVRSSKTLKLTPMQKAGLCYYEDLARGVTKAEADAISLIVQDAVATFDPDALVEIVGGFRRGKPFGHDVDLLITSPGAEKEQEDQLLQKVTNLWKKQGLLLYGRLEWSQFEDGKLPSRKIDALDHFAKCFLILKLYDHKVDKSKWEMPTGSNESEAKSWKAIRVDLVRCPYDGFAFALLGWTGSRMFRRDLRWYATDEKKMMLDNHALYDLTKKIFLKAKSEEEIFAHLGLEYLEPFERNA

SEQ ID NO: 1819 - DNA, 1587 bp, synthetic construct; identical to SEQ ID NO: 1737
  misc_feature 1..1587: note = Variant of terminal deoxynucleotidyltransferase
  source 1..1587: mol_type = other DNA

SEQ ID NO: 1820 - protein, 529 aa, synthetic construct; identical to SEQ ID NO: 1738
  REGION 1..529: note = Variant of terminal deoxynucleotidyltransferase

SEQ ID NO: 1821 - DNA, 1587 bp, synthetic construct
  misc_feature 1..1587: note = Variant of terminal deoxynucleotidyltransferase
  source 1..1587: mol_type = other DNA
atgcaccatcatcatcatcatggcggtagcggcagccacggcattcgtaccatcgattcggacttcgggaagaaacgccagaaaaaaatggataaccacgatagttccgccatctatgaaatcaaatttcacgagtttgtgctgttcattctcgaagaaaaaatgggtgcgacgcgtcgtacttttctgacagatttagcccgcaagaaagggttccgcgtcgagaatgaactgtcagacagcgttacccacatcgtggcagaaaataattcacgctctgaagtattggcttggctgaaagaacacaagatggagaagaccaagcaattcgaactgctggatattagctggcttatcgaaagcatgaaagttggtaaaccggtggacaccaaggggaaataccagttggcggaatcgggtgagatgagtgcgaacccagatccgacagagggtcgtgaaaacgagctgcctcctactatgaagaccatttctccgtatgcgtgtcaacgccgcaccaccctgaacaaccataatcaacgttttacggacgcactggaaattcttgcggaaaattacgagttcaaacgcaacgatgatactgcgctgacctttcgtcgtgctatctccgtgctgaaaagccttccgtttgaggtacgtagcctgaaagacacggaaggattgccctggatcggtgatgaagtcaaagggattatggaagaaatcatcgaggtcggtgaatcgctggaagtgcaggccgtgctcaatgatgagcgctatcaaagcttcaaacgctttaagagtgtctttggagtgggggtgaagacagcagacaagtggtaccgtatgggtctgcgcacgctcgaggatgttcgttccagcaagaccctgaagttgaccccgatgcagaaagcgggtctgtgctattatgaagatcttgctcgcggcgttacgaaagccgaagctgacgcgatttctctgctggttcaggatgcagtcgcaactttcgacccggatgcgctggtggagattgtcggtggatttcgtcgtgggaaaccttttggtcacgacgttgatctgcttatcacatctccgggagctgagaaagagcaagaagaccagctcctgcagaaagtgaccaatctgtggaagaaacaagggttgttgctgtacggtcgtctggaatggagtcagtttgaagatgggaaactcccatccggtaaggctgatgccctggaccattttgcgaaatgctttctgatcctcaaactttatgatcataaagtggacaaaagcaaatgggaaatgccgacgggttcgaacatgggcgaggccaaaccgtggaaagcaattcgcgtagatctggttcgttgcccctacgacggttttgcgtttgcgttgttgggttggaccggaagccgcatgttccgccgtgatctgcgctggtacgccaccgacgagaagaagatgatgctggacaatcatgccctgtatgacctgaccaagaaaatctttctcaaagctaaatcggaagaggaaattttcgcacatctggggcttgaatacctggaaccgttcgaacgtaacgca

SEQ ID NO: 1822 - protein, 529 aa, synthetic construct
  REGION 1..529: note = Variant of terminal deoxynucleotidyltransferase
MHHHHHHGGSGSHGIRTIDSDFGKKRQKKMDNHDSSAIYEIKFHEFVLFILEEKMGATRRTFLTDLARKKGFRVENELSDSVTHIVAENNSRSEVLAWLKEHKMEKTKQFELLDISWLIESMKVGKPVDTKGKYQLAESGEMSANPDPTEGRENELPPTMKTISPYACQRRTTLNNHNQRFTDALEILAENYEFKRNDDTALTFRRAISVLKSLPFEVRSLKDTEGLPWIGDEVKGIMEEIIEVGESLEVQAVLNDERYQSFKRFKSVFGVGVKTADKWYRMGLRTLEDVRSSKTLKLTPMQKAGLCYYEDLARGVTKAEADAISLLVQDAVATFDPDALVEIVGGFRRGKPFGHDVDLLITSPGAEKEQEDQLLQKVTNLWKKQGLLLYGRLEWSQFEDGKLPSGKADALDHFAKCFLILKLYDHKVDKSKWEMPTGSNMGEAKPWKAIRVDLVRCPYDGFAFALLGWTGSRMFRRDLRWYATDEKKMMLDNHALYDLTKKIFLKAKSEEEIFAHLGLEYLEPFERNA

SEQ ID NO: 1823 - DNA, 1587 bp, synthetic construct
  misc_feature 1..1587: note = Variant of terminal deoxynucleotidyltransferase
  source 1..1587: mol_type = other DNA
atgcaccatcatcatcatcatggcggtagcggcagccacggcattcgtaccatcgattcggacttcgggaagaaacgccagaaaaaaatggataaccacgatagttccgccatctatgaaatcaaatttcacgagtttgtgctgttcattctcgaagagaaaatgggtgcgacgcgtcgtacttttctgacagatttagcccgcaagaaagggttccgcgtcgagaatgaactgtcagacagcgttacccacatcgtggcagaaaataattcacgctctgaagtattggcttggctgaaagaacacaagatggagaagaccaagcaattcgaactgctggatattagctggcttatcgaaagcatgaaagttggtaaaccggtggacaccaaggggaaataccagttggcggaatcgggtgagatgagtgcgaacccagatccgacagagggtcgtgaaaacgagctgcctcctactacgaagaccatttctcagtatgcgtgtcaacgccgcaccaccctgaacaaccataatcaacgttttacggacgcactggaaattcttgcggaaaattacgagttcaaacgcaacgatgatactgcgctgacctttcgtcgtgctatctccgtgctgaaaagccttccgtttgaggtagttagcctgaaagacacggaaggattgccctggatcggtgatgaagtcaaagggattatggaagaaatcatcgaggtcggtgaatcgctggaagtgcaggccgtgctcaatgatgagcgctatcaaagcttcaaacgctttaagagtgtctttggagtgggggtgaagacagcagacaagtggtaccgtatgggtctgcgcacgctcgaggatgttcgttccagcaagaccctgaagttgaccccgatgcagaaagcgggtctgctgtattatgaagatcttgctcgcggcgttacgaaagccgaagctgacgcgatttctctgctggttcaggatgcagtcgcaactttcgacccggatgcgctggtggagattgtcggtggatttcgtcgtgggaaacctttcggtcacgacgttgatctgcttatcacatctccgggagctgagaaagagcaagaagaccagctcctgcagaaagtgaccaatctgtggaagaaacaagggttgttgctgtacggtcgtctggaatggagtcagtttgaagatgggaaactcccatccggtaaggctgatgccctggaccattttgcgaaatgctttctgatcctcaaactttatgatcataaagtggacaaaagcaaatgggaaatgccgacgggttcgaacatgggcgaggccaaaccgtggaaagcaattcgcgtagatctggttcgttgcccctacggcggttttgcgtttgcgttgttgggttggaccggaagccgcatgttccgccgtgatctgcgctggtacgccactgacgagaagaacatgatgctggacaatcatgcgctgtatgacctgaccaagaaaatctttctcaaagctaaatcggaagaggaaattttcgcacatctggggcttgaatacctggaaccgttcgaacgtaacgca

SEQ ID NO: 1824 - protein, 529 aa, synthetic construct
  REGION 1..529: note = Variant of terminal deoxynucleotidyltransferase
MHHHHHHGGSGSHGIRTIDSDFGKKRQKKMDNHDSSAIYEIKFHEFVLFILEEKMGATRRTFLTDLARKKGFRVENELSDSVTHIVAENNSRSEVLAWLKEHKMEKTKQFELLDISWLIESMKVGKPVDTKGKYQLAESGEMSANPDPTEGRENELPPTTKTISQYACQRRTTLNNHNQRFTDALEILAENYEFKRNDDTALTFRRAISVLKSLPFEVVSLKDTEGLPWIGDEVKGIMEEIIEVGESLEVQAVLNDERYQSFKRFKSVFGVGVKTADKWYRMGLRTLEDVRSSKTLKLTPMQKAGLLYYEDLARGVTKAEADAISLLVQDAVATFDPDALVEIVGGFRRGKPFGHDVDLLITSPGAEKEQEDQLLQKVTNLWKKQGLLLYGRLEWSQFEDGKLPSGKADALDHFAKCFLILKLYDHKVDKSKWEMPTGSNMGEAKPWKAIRVDLVRCPYGGFAFALLGWTGSRMFRRDLRWYATDEKNMMLDNHALYDLTKKIFLKAKSEEEIFAHLGLEYLEPFERNA

SEQ ID NO: 1825 - DNA, 1587 bp, synthetic construct
  misc_feature 1..1587: note = Variant of terminal deoxynucleotidyltransferase
  source 1..1587: mol_type = other DNA
atgcaccatcatcatcatcatggcggtagcggcagccacggcattcgtaccatcgattcggacttcgggaagaaacgccagaagaagatggataaccacgatagttccgccatctatgaaatcaaatttcacgagtttgtgctgttcattctcgaagagaaaatgggtgcgacgcgtcgtacttttctgacagatttagcccgcaagaaagggttccgcgtcgagaatgaactgtcagacagcgttacccacatcgtggcagaaaataattcacgctctgaagtattggcttggctgaaagaacacaagatggagaagaccaagcaattcgaactgctggatattagctggcttatcgaaagcatgaaagttggtaaaccggtggacaccaaggggaaataccagttggcggaatcgggtgagatgagtgcgaacccagatccgacagagggtcgtgaaaacgagctgcctcctactacgaagaccatttctcagtatgcgtgtcaacgccgcaccaccctgaacaaccataatcaacgttttacggacgcactggaaattcttgcggaaaattacgagttcaaacgcaacgatgatactgcgctgacctttatgcgtgctatctccgtgctgaaaagccttccgtttgaggtagttagcctgaaagacacggaaggattgccctggatcggtgatgaagtcaaagggattatggaagaaatcatcgaggtcggtgaatcgctggaagtgcaggccgtgctcaatgatgagcgctatcaaagcttcaaacgctttaagagtgtctttggagtgggggtgaagacagcagacaagtggtaccgtatgggtctgcgcacgctcgaggatgttcgttccagcaagaccctgaagttgaccccgatgcagaaagcgggtctgtgctattatgaagatcttgctcgcggcgttacgaaagccgaagctgacgcgatttctctgctggttcaggatgcagtcgcaactttcgacccggatgcgctggtggagattgtcggtggatttcgtcgtgggaaaccttttggtcacgacgttgatctgcttatcacatctccgggagctgagaaagagcaagaagaccagctcctgcagaaagtgaccaatctgtggaagaaacaagggttgttgctgtacggtcgtctggaatggagtcagtttgaagatgggaaactcccatccggtaaggctgatgccctggaccattttgcgaaatgctttctgatcctcaaactttatgatcataaagtggacaaaagcaaatgggaaatgccgacgggttcgaacatgggcgaggccaaaccgtggaaagcaattcgcgtagatctggttcgttgcccctacgatggttttgcgtttgcgttgttgggttggaccggaagccgcatgttccgccgtgatctgcgctggtacgccaccgacgagaagaagatgatgctggacaatcatgcgctgtatgacctgaccaagaaaatctttctcaaagctaaatcggaagaggaaattttcgcacatctggggcttgaatacctggaaccgttcgaacgtaacgca

SEQ ID NO: 1826 - protein, 529 aa, synthetic construct
  REGION 1..529: note = Variant of terminal deoxynucleotidyltransferase
MHHHHHHGGSGSHGIRTIDSDFGKKRQKKMDNHDSSAIYEIKFHEFVLFILEEKMGATRRTFLTDLARKKGFRVENELSDSVTHIVAENNSRSEVLAWLKEHKMEKTKQFELLDISWLIESMKVGKPVDTKGKYQLAESGEMSANPDPTEGRENELPPTTKTISQYACQRRTTLNNHNQRFTDALEILAENYEFKRNDDTALTFMRAISVLKSLPFEVVSLKDTEGLPWIGDEVKGIMEEIIEVGESLEVQAVLNDERYQSFKRFKSVFGVGVKTADKWYRMGLRTLEDVRSSKTLKLTPMQKAGLCYYEDLARGVTKAEADAISLLVQDAVATFDPDALVEIVGGFRRGKPFGHDVDLLITSPGAEKEQEDQLLQKVTNLWKKQGLLLYGRLEWSQFEDGKLPSGKADALDHFAKCFLILKLYDHKVDKSKWEMPTGSNMGEAKPWKAIRVDLVRCPYDGFAFALLGWTGSRMFRRDLRWYATDEKKMMLDNHALYDLTKKIFLKAKSEEEIFAHLGLEYLEPFERNA

SEQ ID NO: 1827 - DNA, 1587 bp, synthetic construct
  misc_feature 1..1587: note = Variant of terminal deoxynucleotidyltransferase
  source 1..1587: mol_type = other DNA
atgcaccatcatcatcatcatggcggtagcggcagccacggcattcgtaccatcgattcggacttcgggaagaaacgccagaaaaaaatggataaccacgatagttccgccatctatgaaatcaaatttcacgagtttgtgctgttcattctcgaagagaaaatgggtgcgacgcgtcgtacttttctgacagatttagcccgcaagaaagggttccgcgtcgagaatgaactgtcagacagcgttacccacatcgtggcagaaaataattcacgctctgaagtattggcttggctgaaagaacacaagatggagaagaccaagcaattcgaactgctggatattagctggcttatcgaaagcatgaaagttggtaaaccggtggacaccaaggggaaataccagttggcggaatcgggtgagatgagtgcgaacccagatccgacagagggtcgtgaaaacgagctgcctcctactatgaagaccatttctcagtatgcgtgtcaacgccgcaccaccctgaacaaccataatcaacgttttacggacgcactggaaattcttgcggaaaattacgagttcaaacgcaacgatgatactgcgctggaatttcgtcgtgctatttccgtgctgaaaagccttccgtttgaggtagttagcctgaaagacacggaaggattgccctggatcggtgatgaagtcaaagggattatggaagaaatcatcgaggtcggtgaatcgctggaagtgcaggccgtgctcaatgatgagcgctatcaaagcttcaaacgctttaagagtgtctttggagtgggggtgaagacagcagacaagtggtaccgtatgggtctgcgcacgctcgaggatgttcgttccagcaagaccctgaagttgaccccgatgcagaaagcgggtctgtgctattatgaagatcttgctcgcggcgttacgaaagccgaagctgacgcgatttctctgctggttcaggatgcagtcgcaactttcgacccggatgcgctggtggagattgtcggtggatttcgtcgtgggaaaccttttggtcacgacgttgatctgcttatcacatctccgggagctgagaaagagcaagaagaccagctcctgcagaaagtgaccaatctgtggaagaaacaagggttgttgctgtacggtcgtctggaatggagtcagtttgaagatgggaaactcccatccggtaaggctgatgccctggaccatttcgcgaaatgctttctgatcctcaaactttatgatcataaagtggacaaaagcaaatgggaaatgccgacgggttcgaacatgggcgaggccaaaccgtggaaagcaattcgcgtagatctggttcgttgcccctacgatggttttgcgtttgcgttgttgggttggaccggaagccgcatgttccgccgtgatctgcgctggtacgccaccgacgagaagaagatgatgctggacaatcatgcgctgtatgacctgaccaagaaaatctttctcaaagctaaatcggaagaggaaattttcgcacatctggggcttgaatacctggaaccgttcgaacgtaacgca

SEQ ID NO: 1828 - protein, 529 aa, synthetic construct
  REGION 1..529: note = Variant of terminal deoxynucleotidyltransferase
MHHHHHHGGSGSHGIRTIDSDFGKKRQKKMDNHDSSAIYEIKFHEFVLFILEEKMGATRRTFLTDLARKKGFRVENELSDSVTHIVAENNSRSEVLAWLKEHKMEKTKQFELLDISWLIESMKVGKPVDTKGKYQLAESGEMSANPDPTEGRENELPPTMKTISQYACQRRTTLNNHNQRFTDALEILAENYEFKRNDDTALEFRRAISVLKSLPFEVVSLKDTEGLPWIGDEVKGIMEEIIEVGESLEVQAVLNDERYQSFKRFKSVFGVGVKTADKWYRMGLRTLEDVRSSKTLKLTPMQKAGLCYYEDLARGVTKAEADAISLLVQDAVATFDPDALVEIVGGFRRGKPFGHDVDLLITSPGAEKEQEDQLLQKVTNLWKKQGLLLYGRLEWSQFEDGKLPSGKADALDHFAKCFLILKLYDHKVDKSKWEMPTGSNMGEAKPWKAIRVDLVRCPYDGFAFALLGWTGSRMFRRDLRWYATDEKKMMLDNHALYDLTKKIFLKAKSEEEIFAHLGLEYLEPFERNA

SEQ ID NO: 1829 - DNA, 1587 bp, synthetic construct
  misc_feature 1..1587: note = Variant of terminal deoxynucleotidyltransferase
  source 1..1587: mol_type = other DNA
atgcaccatcatcatcatcatggcggtagcggcagccacggcattcgtaccatcgattcggacttcgggaagaaacgccagaaaaaaatggataaccacgatagttccgccatctatgaaatcaaatttcacgagtttgtgctgttcattctcgaagaaaaaatgggtgcgacgcgtcgtacttttctgacagatttagcccgcaagaaagggttccgcgtcgagaatgaactgtcagacagcgttacccacatcgtggcagaaaataattcacgctctgaagtattggcttggctgaaagaacacaagatggagaagaccaagcaattcgaactgctggatattagctggcttatcgaaagcatgaaagttggtaaaccggtggacaccaaggggaaataccagttggcggaatcgggtgagatgagtgcgaacccagatccgacagagggtcgtgaaaacgagctgcctcctactatgaagaccatttctccgtatgcgtgtcaacgccgcaccaccctgaacaaccataatcaacgttttacggacgcactggaaattcttgcggaaaattacgagttcaaacgcaacgatgatactgcgctggaatttcgtcgtgctatctccgtgctgaaaagccttccgtttgaggtacgtagcctgaaagacacggaaggattgccctggatcggtgatgaagtcaaagggattatggaagaaatcatcgaggtcggtgaatcgctggaagtgcaggccgtgctcaatgatgagcgctatcaaagcttcaaacgctttaagagtgtctttggagtgggggtgaagacagcagacaagtggtaccgtatgggtctgcgcacgctcgaggatgttcgttccagcaagaccctgaagttgaccccgatgcagaaagcgggtctgtgctattatgaagatcttgctcgcggcgttacgaaagccgaagctgacgcgatttctctgctggttcaggatgcagtcgcaactttcgacccggatgcgctggtggagattgtcggtggatttcgtcgtgggaaacctcagggtcacgacgttgatctgcttatcacatctccgggagctgagaaagagcaagaagaccagctcctgcagaaagtgaccaatctgtggaagaaacaagggttgttgctgtacggtcgtctggaatggagtcagtttgaagatgggaaactcccatccggtaaggctgatgccctggaccatttcgcgaaatgctttctgatcctcaaactttatgatcataaagtggacaaaagcaaatgggaaatgccgacgggttcgaacgaaggcgaggccaaaccgtggaaagcaattcgcgtagatctggttcgttgcccctacggcggttttgcgtttgcgttgttgggttggaccggaagccgcatgttccgccgtgatctgcgctggtacgccactgacgagaagaacatgatgctggacaatcatgcgctgtatgacctgaccaagaaaatctttctcaaagctaaatcggaagaggaaattttcgcacatctggggcttgaatacctggaaccgttcgaacgtaacgca

SEQ ID NO: 1830 - protein, 529 aa, synthetic construct
  REGION 1..529: note = Variant of terminal deoxynucleotidyltransferase
MHHHHHHGGSGSHGIRTIDSDFGKKRQKKMDNHDSSAIYEIKFHEFVLFILEEKMGATRRTFLTDLARKKGFRVENELSDSVTHIVAENNSRSEVLAWLKEHKMEKTKQFELLDISWLIESMKVGKPVDTKGKYQLAESGEMSANPDPTEGRENELPPTMKTISPYACQRRTTLNNHNQRFTDALEILAENYEFKRNDDTALEFRRAISVLKSLPFEVRSLKDTEGLPWIGDEVKGIMEEIIEVGESLEVQAVLNDERYQSFKRFKSVFGVGVKTADKWYRMGLRTLEDVRSSKTLKLTPMQKAGLCYYEDLARGVTKAEADAISLLVQDAVATFDPDALVEIVGGFRRGKPQGHDVDLLITSPGAEKEQEDQLLQKVTNLWKKQGLLLYGRLEWSQFEDGKLPSGKADALDHFAKCFLILKLYDHKVDKSKWEMPTGSNEGEAKPWKAIRVDLVRCPYGGFAFALLGWTGSRMFRRDLRWYATDEKNMMLDNHALYDLTKKIFLKAKSEEEIFAHLGLEYLEPFERNA

SEQ ID NO: 1831 - DNA, 1587 bp, synthetic construct
  misc_feature 1..1587: note = Variant of terminal deoxynucleotidyltransferase
  source 1..1587: mol_type = other DNA
atgcaccatcatcatcatcatggcggtagcggcagccacggcattcgtaccatcgattcggacttcgggaagaaacgccagaagaagatggataaccacgatagttccgccatctatgaaatcaaatttcacgagtttgtgctgttcattctcgaagagaaaatgggtgcgacgcgtcgtacttttctgacagatttagcccgcaagaaagggttccgcgtcgagaatgaactgtcagacagcgttacccacatcgtggcagaaaataattcacgctctgaagtattggcttggctgaaagaacacaagatggagaagaccaagcaattcgaactgctggatattagctggcttatcgaaagcatgaaagttggtaaaccggtggacaccaaggggaaataccagttggcggaatcgggtgagatgagtgcgaacccagatccgacagagggtcgtgaaaacgagctgcctcctactacgaagaccatttctcagtatgcgtgtcaacgccgcaccaccctgaacaaccataataaacgttttacggacgcactggaaattcttgcggaaaattacgagttcaaacgcaacgatgatactgcgctgacctttatgcgtgctatctccgtgctgaaaagccttccgtttgaggtagttagcctgaaagacacggaaggattgccctggatcggtgatgaagtcaaagggattatggaagaaatcatcgaggtcggtgaatcgctggaagtgcaggccgtgctcaatgatgagcgctatcaaagcttcaaacgctttaagagtgtctttggagtgggggtgaagacagcagacaagtggtaccgtatgggtctgcgcacgctcgaggatgttcgttccagcaagaccctgaagttgaccccgatgcagaaagcgggtctgtgctattatgaagatcttgctcgcggcgttacgaaagccgaagctgacgcgatttctctgctggttcaggatgcagtcgcaactttcgacccggatgcgctggtggagattgtcggtggatttcgtcgtgggaaacctcagggtcacgacgttgatctgcttatcacatctccgggagctgagaaagagcaagaagaccagctcctgcagaaagtgaccaatctgtggaagaaacaagggttgttgctgtacggtcgtctggaatggagtcagtttgaagatgggaaactcccatccggtaaggctgatgccctggaccattttgcgaaatgctttctgatcctcaaactttatgatcataaagtggacaaaagcaaatgggaaatgccgacgggttcgaacgaaggcgaggccaaaccgtggaaagcaattcgcgtagatctggttcgttgcccctacgatggttttgcgtttgcgttgttgggttggaccggaagccgcatgttccgccgtgatctgcgctggtacgccaccgacgagaagaagatgatgctggacaatcatgcgctgtatgacctgaccaagaaaatctttctcaaagctaaatcggaagaggaaattttcgcacatctggggcttgaatacctggaaccgttcgaacgtaacgca

SEQ ID NO: 1832 - protein, 529 aa, synthetic construct
  REGION 1..529: note = Variant of terminal deoxynucleotidyltransferase
MHHHHHHGGSGSHGIRTIDSDFGKKRQKKMDNHDSSAIYEIKFHEFVLFILEEKMGATRRTFLTDLARKKGFRVENELSDSVTHIVAENNSRSEVLAWLKEHKMEKTKQFELLDISWLIESMKVGKPVDTKGKYQLAESGEMSANPDPTEGRENELPPTTKTISQYACQRRTTLNNHNKRFTDALEILAENYEFKRNDDTALTFMRAISVLKSLPFEVVSLKDTEGLPWIGDEVKGIMEEIIEVGESLEVQAVLNDERYQSFKRFKSVFGVGVKTADKWYRMGLRTLEDVRSSKTLKLTPMQKAGLCYYEDLARGVTKAEADAISLLVQDAVATFDPDALVEIVGGFRRGKPQGHDVDLLITSPGAEKEQEDQLLQKVTNLWKKQGLLLYGRLEWSQFEDGKLPSGKADALDHFAKCFLILKLYDHKVDKSKWEMPTGSNEGEAKPWKAIRVDLVRCPYDGFAFALLGWTGSRMFRRDLRWYATDEKKMMLDNHALYDLTKKIFLKAKSEEEIFAHLGLEYLEPFERNA

SEQ ID NO: 1833 - DNA, 1587 bp, synthetic construct
  misc_feature 1..1587: note = Variant of terminal deoxynucleotidyltransferase
  source 1..1587: mol_type = other DNA
atgcaccatcatcatcatcatggcggtagcggcagccacggcattcgtaccatcgattcggacttcgggaagaaacgccagaagaagatggataaccacgatagttccgccatctatgaaatcaaatttcacgagtttgtgctgttcattctcgaagagaaaatgggtgcgacgcgtcgtacttttctgacagatttagcccgcaagaaagggttccgcgtcgagaatgaactgtcagacagcgttacccacatcgtggcagaaaataattcacgctctgaagtattggcttggctgaaagaacacaagatggagaagaccaagcaattcgaactgctggatattagctggcttatcgaaagcatgaaagttggtaaaccggtggacaccaaggggaaataccagttggcggaatcgggtgagatgagtgcgaacccagatccgacagagggtcgtgaaaacgagctgcctcctactatgaagaccatttctcagtatgcgtgtcaacgccgcaccaccctgaacaaccataatcaacgttttacggacgcactggaaattcttgcggaaaattacgagttcaaacgcaacgatgatactgcgctgacttttatgcgtgctatctccgtgctgaaaagccttccgtttgaggtacgtagcctgaaagacacggaaggattgccctggatcggtgatgaagtcaaagggattatggaagaaatcatcgaggtcggtgaatcgctggaagtgcaggccgtgctcaatgatgagcgctatcaaagcttcaaacgctttaagagtgtctttggagtgggggtgaagacagcagacaagtggtaccgtatgggtctgcgcacgctcgaggatgttcgttccagcaagaccctgaagttgaccccgatgcagaaagcgggtctgtgctattatgaagatcttgctcgcggcgttacgaaagccgaagctgacgcgatttctctgctggttcagaaagcagtcgcaactttcgacccggatgcgctggtggagattgtcggtggatttcgtcgtgggaaaccttttggtcacgacgttgatctgcttatcacatctccgggagctgagaaagagcaagaagaccagctcctgcagaaagtgaccaatctgtggaagaaacaagggttgttgctgtacggtcgtctggaatggagtcagtttgaagatgggaaactcccatccggtaaggctgatgccctggaccattttgcgaaatgctttctgatcctcaaactttatgatcataaagtggacaaaagcaaatgggaaatgccgacgggttcgaacgagggcgaggccaaaccgtggaaagcaattcgcgtagatctggttcgttgcccctacgatggttttgcgtttgcgttgttgggttggaccggaagccgcatgttccgccgtgatctgcgctggtacgccgaagacgagaagaagatgatgctggacaatcatgcgctgtatgacctgaccaagaaaatctttctcaaagctaaatcggaagaggaaattttcgcacatctggggcttgaatacctggaaccgttcgaacgtaacgca

SEQ ID NO: 1834 - protein, 529 aa, synthetic construct
  REGION 1..529: note = Variant of terminal deoxynucleotidyltransferase
MHHHHHHGGSGSHGIRTIDSDFGKKRQKKMDNHDSSAIYEIKFHEFVLFILEEKMGATRRTFLTDLARKKGFRVENELSDSVTHIVAENNSRSEVLAWLKEHKMEKTKQFELLDISWLIESMKVGKPVDTKGKYQLAESGEMSANPDPTEGRENELPPTMKTISQYACQRRTTLNNHNQRFTDALEILAENYEFKRNDDTALTFMRAISVLKSLPFEVRSLKDTEGLPWIGDEVKGIMEEIIEVGESLEVQAVLNDERYQSFKRFKSVFGVGVKTADKWYRMGLRTLEDVRSSKTLKLTPMQKAGLCYYEDLARGVTKAEADAISLLVQKAVATFDPDALVEIVGGFRRGKPFGHDVDLLITSPGAEKEQEDQLLQKVTNLWKKQGLLLYGRLEWSQFEDGKLPSGKADALDHFAKCFLILKLYDHKVDKSKWEMPTGSNEGEAKPWKAIRVDLVRCPYDGFAFALLGWTGSRMFRRDLRWYAEDEKKMMLDNHALYDLTKKIFLKAKSEEEIFAHLGLEYLEPFERNA

SEQ ID NO: 1835 - DNA, 1587 bp, synthetic construct
  misc_feature 1..1587: note = Variant of terminal deoxynucleotidyltransferase
  source 1..1587: mol_type = other DNA
atgcaccatcatcatcatcatggcggtagcggcagccacggcattcgtaccatcgattcggacttcgggaagaaacgccagaagaagatggataaccacgatagttccgccatctatgaaatcaaatttcacgagtttgtgctgttcattctcgaagaaaaaatgggtgcgacgcgtcgtacttttctgacagatttagcccgcaagaaagggttccgcgtcgagaatgaactgtcagacagcgttacccacatcgtggcagaaaataattcacgctctgaagtattggcttggctgaaagaacacaagatggagaagaccaagcaattcgaactgctggatattagctggcttatcgaaagcatgaaagttggtaaaccggtggacaccaaggggaaataccagttggcggaatcgggtgagatgagtgcgaacccagatccgacagagggtcgtgaaaacgagctgcctcctactacgaagaccatttctccgtatgcgtgtcaacgccgcaccaccctgaacaaccataatcaacgttttacggacgcactggaaattcttgcggaaaattacgagttcaaacgcaacgatgatactgcgctggaatttcgtcgtgctatctccgtgctgaaaagccttccgtttgaggtagttagcctgaaagacacggaaggattgccctggatcggtgatgaagtcaaagggattatggaagaaatcatcgaggtcggtgaatcgctggaagtgcaggccgtgctcaatgatgagcgctatcaaagcttcaaacgctttaagagtgtctttggagtgggggtgaagacagcagacaagtggtaccgtatgggtctgcgcacgctcgaggatgttcgttccagcaagaccctgaagttgaccccgatgcagaaagcgggtctgctgtattatgaagatcttgctcgcggcgttacgaaagccgaagctgacgcgatttctctgctggttcaggatgcagtcgcaactttcgacccggatgcgctggtggagattgtcggtggatttcgtcgtgggaaaccttttggtcacgacgttgatctgcttatcacatctccgggagctgagaaagagcaagaagaccagctcctgcagaaagtgaccaatctgtggaagaaacaagggttgttgctgtacggtcgtctggaatggagtcagtttgaagatgggaaactcccatccggtaaggctgatgccctggaccattatgcgaaatgctttctgatcctcaaactttatgatcataaagtggacaaaagcaaatgggaaatgccgacgggttcgaacatgggcgaggccaaaccgtggaaagcaattcgcgtagatctggttcgttgcccctacgatggttttgcgtttgcgttgttgggttggaccggaagccgcatgttccgccgtgatctgcgctggtacgccgaagacgagaagaagatgatgctggacaatcatggcctgtatgacctgaccaagaaagagtttctcgaagctaaatcggaagaggaaattttcgcacatctggggcttgaatacctggaaccgttcgaacgtaacgca

SEQ ID NO: 1836 - protein, 529 aa, synthetic construct
  REGION 1..529: note = Variant of terminal deoxynucleotidyltransferase
MHHHHHHGGSGSHGIRTIDSDFGKKRQKKMDNHDSSAIYEIKFHEFVLFILEEKMGATRRTFLTDLARKKGFRVENELSDSVTHIVAENNSRSEVLAWLKEHKMEKTKQFELLDISWLIESMKVGKPVDTKGKYQLAESGEMSANPDPTEGRENELPPTTKTISPYACQRRTTLNNHNQRFTDALEILAENYEFKRNDDTALEFRRAISVLKSLPFEVVSLKDTEGLPWIGDEVKGIMEEIIEVGESLEVQAVLNDERYQSFKRFKSVFGVGVKTADKWYRMGLRTLEDVRSSKTLKLTPMQKAGLLYYEDLARGVTKAEADAISLLVQDAVATFDPDALVEIVGGFRRGKPFGHDVDLLITSPGAEKEQEDQLLQKVTNLWKKQGLLLYGRLEWSQFEDGKLPSGKADALDHYAKCFLILKLYDHKVDKSKWEMPTGSNMGEAKPWKAIRVDLVRCPYDGFAFALLGWTGSRMFRRDLRWYAEDEKKMMLDNHGLYDLTKKEFLEAKSEEEIFAHLGLEYLEPFERNA

SEQ ID NO: 1837 - DNA, 1587 bp, synthetic construct
  misc_feature 1..1587: note = Variant of terminal deoxynucleotidyltransferase
  source 1..1587: mol_type = other DNA
atgcaccatcatcatcatcatggcggtagcggcagccacggcattcgtaccatcgattcggacttcgggaagaaacgccagaaaaaaatggataaccacgatagttccgccatctatgaaatcaaatttcacgagtttgtgctgttcattctcgaagaaaaaatgggtgcgacgcgtcgtacttttctgacagatttagcccgcaagaaagggttccgcgtcgagaatgaactgtcagacagcgttacccacatcgtggcagaaaataattcacgctctgaagtattggcttggctgaaagaacacaagatggagaagaccaagcaattcgaactgctggatattagctggcttatcgaaagcatgaaagttggtaaaccggtggacaccaaggggaaataccagttggcggaatcgggtgagatgagtgcgaacccagatccgacagagggtcgtgaaaacgagctgcctcctactacgaagaccatttctccgtatgcgtgtcaacgccgcaccaccctgaacaaccataataaacgttttacggacgcactggaaattcttgcggaaaattacgagttcaaacgcaacgatgatactgcgctggaatttcgtcgtgctatctccgtgctgaaaagccttccgtttgaggtagttagcctgaaagacacggaaggattgccctggatcggtgatgaagtcaaagggattatggaagaaatcatcgaggtcggtgaatcgctggaagtgcaggccgtgctcaatgatgagcgctatcaaagcttcaaacgctttaagagtgtctttggagtgggggtgaagacagcagacaagtggtaccgtatgggtctgcgcacgctcgaggatgttcgttccagcaagaccctgaagttgaccccgatgcagaaagcgggtctgtgctattatgaagatcttgctcgcggcgttacgaaagccgaagctgacgcgatttctctgctggttcaggatgcagtcgcaactttcgacccggatgcgctggtggagattgtcggtggatttcgtcgtgggaaacctttcggtcacgacgttgatctgcttatcacatctccgggagctgagaaagagcaagaagaccagctcctgcagaaagtgaccaatctgtggaagaaacaagggttgttgctgtacggtcgtctggaatggagtcagtttgaagatgggaaactcccatccggtaaggctgatgccctggaccattttgcgaaatgctttctgatcctcaaactttatgatcataaagtggacaaaagcaaatgggaaatgccgacgggttcgaacgagggcgaggccaaaccgtggaaagcaattcgcgtagatctggttcgttgcccctacgatggttttgcgtttgcgttgttgggttggaccggaagccgcatgttccgccgtgatctgcgctggtacgccgaagacgagaagaagatgatgctggacaatcatgcgctgtatgacctgaccaagaaagagtttctcaaagctaaatcggaagaggaaattttcgcacatctggggcttgaatacctggaaccgttcgaacgtaacgca

SEQ ID NO: 1838 - protein, 529 aa, synthetic construct
  REGION 1..529: note = Variant of terminal deoxynucleotidyltransferase
MHHHHHHGGSGSHGIRTIDSDFGKKRQKKMDNHDSSAIYEIKFHEFVLFILEEKMGATRRTFLTDLARKKGFRVENELSDSVTHIVAENNSRSEVLAWLKEHKMEKTKQFELLDISWLIESMKVGKPVDTKGKYQLAESGEMSANPDPTEGRENELPPTTKTISPYACQRRTTLNNHNKRFTDALEILAENYEFKRNDDTALEFRRAISVLKSLPFEVVSLKDTEGLPWIGDEVKGIMEEIIEVGESLEVQAVLNDERYQSFKRFKSVFGVGVKTADKWYRMGLRTLEDVRSSKTLKLTPMQKAGLCYYEDLARGVTKAEADAISLLVQDAVATFDPDALVEIVGGFRRGKPFGHDVDLLITSPGAEKEQEDQLLQKVTNLWKKQGLLLYGRLEWSQFEDGKLPSGKADALDHFAKCFLILKLYDHKVDKSKWEMPTGSNEGEAKPWKAIRVDLVRCPYDGFAFALLGWTGSRMFRRDLRWYAEDEKKMMLDNHALYDLTKKEFLKAKSEEEIFAHLGLEYLEPFERNA

SEQ ID NO: 1839 - DNA, 1587 bp, synthetic construct
  misc_feature 1..1587: note = Variant of terminal deoxynucleotidyltransferase
  source 1..1587: mol_type = other DNA
atgcaccatcatcatcatcatggcggtagcggcagccacggcattcgtaccatcgattcggacttcgggaagaaacgccagaaaaaaatggataaccacgatagttccgccatctatgaaatcaaatttcacgagtttgtgctgttcattctcgaagagaaaatgggtgcgacgcgtcgtacttttctgacagatttagcccgcaagaaagggttccgcgtcgagaatgaactgtcagacagcgttacccacatcgtggcagaaaataattcacgctctgaagtattggcttggctgaaagaacacaagatggagaagaccaagcaattcgaactgctggatattagctggcttatcgaaagcatgaaagttggtaaaccggtggacaccaaggggaaataccagttggcggaatcgggtgagatgagtgcgaacccagatccgacagagggtcgtgaaaacgagctgcctcctactatgaagaccatttctcagtatgcgtgtcaacgccgcaccaccctgaacaaccataataaacgttttacggacgcactggaaattcttgcggaaaattacgagttcaaacgcaacgatgatactgcgctggaatttcgtcgtgctgcatccgtgctgaaaagccttccgtttgaggtacgtagcctgaaagacacggaaggattgccctggatcggtgatgaagtcaaagggattatggaagaaatcatcgaggtcggtgaatcgctggaagtgcaggccgtgctcaatgatgagcgctatcaaagcttcaaacgctttaagagtgtctttggagtgggggtgaagacagcagacaagtggtaccgtatgggtctgcgcacgctcgaggatgttcgttccagcaagaccctgaagttgaccccgatgcagaaagcgggtctgtgctattatgaagatcttgctcgcggcgttacgaaagccgaagctgacgcgatttctctgctggttcaggatgcagtcgcaactttcgacccggatgcgctggtggagattgtcggtggatttcgtcgtgggaaacctttcggtcacgacgttgatctgcttatcacatctccgggagctgagaaagagcaagacgaccagctcctgcagaaagtgaccaatctgtggaagaaacaagggttgttgctgtacggtcgtctggaatggagtcagtttgaagatgggaaactcccatccggtaaggctgatgccctggaccatcatgcgaaatgctttctgatcctcaaactttatgatcataaagtggacaaaagcaaatgggaaatgccgacgggttcgaacgagggcgaggccaaaccgtggaaagcaattcgcgtagatctggttcgttgcccctacgatggttttgcgtttgcgttgttgggttggaccggaagccgcatgttccgccgtgatctgcgctggtacgccgaagacgagaagaagatgatgctggacaatcatgccctgtatgacctgaccaagaaaatctttctcgaagctaaatcggaagaggaaattttcgcacatctggggcttgaatacctggaaccgttcgaacgtaacgca

SEQ ID NO: 1840 - protein, 529 aa, synthetic construct
  REGION 1..529: note = Variant of terminal deoxynucleotidyltransferase
MHHHHHHGGSGSHGIRTIDSDFGKKRQKKMDNHDSSAIYEIKFHEFVLFILEEKMGATRRTFLTDLARKKGFRVENELSDSVTHIVAENNSRSEVLAWLKEHKMEKTKQFELLDISWLIESMKVGKPVDTKGKYQLAESGEMSANPDPTEGRENELPPTMKTISQYACQRRTTLNNHNKRFTDALEILAENYEFKRNDDTALEFRRAASVLKSLPFEVRSLKDTEGLPWIGDEVKGIMEEIIEVGESLEVQAVLNDERYQSFKRFKSVFGVGVKTADKWYRMGLRTLEDVRSSKTLKLTPMQKAGLCYYEDLARGVTKAEADAISLLVQDAVATFDPDALVEIVGGFRRGKPFGHDVDLLITSPGAEKEQDDQLLQKVTNLWKKQGLLLYGRLEWSQFEDGKLPSGKADALDHHAKCFLILKLYDHKVDKSKWEMPTGSNEGEAKPWKAIRVDLVRCPYDGFAFALLGWTGSRMFRRDLRWYAEDEKKMMLDNHALYDLTKKIFLEAKSEEEIFAHLGLEYLEPFERNA

SEQ ID NO: 1841 - DNA, 1587 bp, synthetic construct
  misc_feature 1..1587: note = Variant of terminal deoxynucleotidyltransferase
  source 1..1587: mol_type = other DNA
atgcaccatcatcatcatcatggcggtagcggcagccacggcattcgtaccatcgattcggacttcgggaagaaacgccagaaaaaaatggataaccacgatagttccgccatctatgaaatcaaatttcacgagtttgtgctgttcattctcgaagaaaaaatgggtgcgacgcgtcgtacttttctgacagatttagcccgcaagaaagggttccgcgtcgagaatgaactgtcagacagcgttacccacatcgtggcagaaaataattcacgctctgaagtattggcttggctgaaagaacacaagatggagaagaccaagcaattcgaactgctggatattagctggcttatcgaaagcatgaaagttggtaaaccggtggacaccaaggggaaataccagttggcggaatcgggtgagatgagtgcgaacccagatccgacagagggtcgtgaaaacgagctgcctcctactatgaagaccatttctcagtatgcgtgtcaacgccgcaccaccctgaacaaccataatcaacgttttacggacgcactggaaattcttgcggaaaattacgagttcaaacgcaacgatgatactgcgctgacctttcgtcgtgctgcatccgtgctgaaaagccttccgtttgaggtacgtagcctgaaagacacggaaggattgccctggatcggtgatgaagtcaaagggattatggaagaaatcatcgaggtcggtgaatcgctggaagtgcaggccgtgctcaatgatgagcgctatcaaagcttcaaacgctttaagagtgtctttggagtgggggtgaagacagcagacaagtggtaccgtatgggtctgcgcacgctcgaggatgttcgttccagcaagaccctgaagttgaccccgatgcagaaagcgggtctgtgctattatgaagatcttgctcgcggcgttacgaaagccgaagctgacgcgatttctaccctggttcaggatgcagtcgcaactttcgacccggatgcgctggtggagattgtcggtggatttcgtcgtgggaaaccttttggtcacgacgttgatctgcttatcacatctccgggagctgagaaagagcaagaagaccagctcctgcagaaagtgaccaatctgtggaagaaacaagggttgttgctgtacggtcgtctggaatggagtcagtttgaagatgggaaactcccatccggtaaggctgatgccctggaccatttcgcgaaatgctttctgatcctcaaactttatgatcataaagtggacaaaagcaaatgggaaatgccgacgggttcgaacatgggcgaggccaaaccgtggaaagcaattcgcgtagatctggttcgttgcccctacgatggttttgcgtttgcgttgttgggttggaccggaagccgcatgttccgccgtgatctgcgctggtacgccgaagacgagaagaacatgatgctggacaatcatgcgctgtatgacctgaccaagaaagagtttctcaaagctaaatcggaagaggaaattttcgcacatctggggcttgaatacctggaaccgttcgaacgtaacgca

SEQ ID NO: 1842 - protein, 529 aa, synthetic construct
  REGION 1..529: note = Variant of terminal deoxynucleotidyltransferase
MHHHHHHGGSGSHGIRTIDSDFGKKRQKKMDNHDSSAIYEIKFHEFVLFILEEKMGATRRTFLTDLARKKGFRVENELSDSVTHIVAENNSRSEVLAWLKEHKMEKTKQFELLDISWLIESMKVGKPVDTKGKYQLAESGEMSANPDPTEGRENELPPTMKTISQYACQRRTTLNNHNQRFTDALEILAENYEFKRNDDTALTFRRAASVLKSLPFEVRSLKDTEGLPWIGDEVKGIMEEIIEVGESLEVQAVLNDERYQSFKRFKSVFGVGVKTADKWYRMGLRTLEDVRSSKTLKLTPMQKAGLCYYEDLARGVTKAEADAISTLVQDAVATFDPDALVEIVGGFRRGKPFGHDVDLLITSPGAEKEQEDQLLQKVTNLWKKQGLLLYGRLEWSQFEDGKLPSGKADALDHFAKCFLILKLYDHKVDKSKWEMPTGSNMGEAKPWKAIRVDLVRCPYDGFAFALLGWTGSRMFRRDLRWYAEDEKNMMLDNHALYDLTKKEFLKAKSEEEIFAHLGLEYLEPFERNA

SEQ ID NO: 1843 - DNA, 1587 bp, synthetic construct
  misc_feature 1..1587: note = Variant of terminal deoxynucleotidyltransferase
  source 1..1587: mol_type = other DNA
atgcaccatcatcatcatcatggcggtagcggcagccacggcattcgtaccatcgattcggacttcgggaagaaacgccagaaaaaaatggataaccacgatagttccgccatctatgaaatcaaatttcacgagtttgtgctgttcattctcgaagaaaaaatgggtgcgacgcgtcgtacttttctgacagatttagcccgcaagaaagggttccgcgtcgagaatgaactgtcagacagcgttacccacatcgtggcagaaaataattcacgctctgaagtattggcttggctgaaagaacacaagatggagaagaccaagcaattcgaactgctggatattagctggcttatcgaaagcatgaaagttggtaaaccggtggacaccaaggggaaataccagttggcggaatcgggtgagatgagtgcgaacccagatccgacagagggtcgtgaaaacgagctgcctcctactatgaagaccatttctcagtatgcgtgtcaacgccgcaccaccctgaacaaccataatcaacgttttacggacgcactggaaattcttgcggaaaattacgagttcaaacgcaacgatgatactgcgctgacctttatgcgtgctgcatccgtgctgaaaagccttccgtttgaggtagttagcctgaaagacacggaaggattgccctggatcggtgatgaagtcaaagggattatggaagaaatcatcgaggtcggtgaatcgctggaagtgcaggccgtgctcaatgatgagcgctatcaaagcttcaaacgctttaagagtgtctttggagtgggggtgaagacagcagacaagtggtaccgtatgggtctgcgcacgctcgaggatgttcgttccagcaagaccctgaagttgaccccgatgcagaaagcgggtctgtgctattatgaagatcttgctcgcggcgttacgaaagccgaagctgacgcgatttctctgctggttcaggatgcagtcgcaactttcgacccggatgcgctggtggagattgtcggtggatttcgtcgtgggaaacctttcggtcacgacgttgatctgcttatcacatctccgggagctgagaaagagcaagacgaccagctcctgcagaaagtgaccaatctgtggaagaaacaagggttgttgctgtacggtcgtctggaatggagtcagtttgaagatgggaaactcccatccggtaaggctgatgccctggaccattttgcgaaatgctttctgatcctcaaactttatgatcataaagtggacaaaagcaaatgggaaatgccgacgggttcgaacatgggcgaggccaaaccgtggaaagcaattcgcgtagatctggttcgttgcccctacgatggttttgcgtttgcgttgttgggttggaccggaagccgcatgttccgccgtgatctgcgctggtacgccgaagacgagaagaagatgatgctggacaatcatgcgctgtatgacctgaccaagaaaatctttctcgaagctaaatcggaagaggaaattttcgcacatctggggcttgaatacctggaaccgttcgaacgtaacgca

SEQ ID NO: 1844 - protein, 529 aa, synthetic construct
  REGION 1..529: note = Variant of terminal deoxynucleotidyltransferase
MHHHHHHGGSGSHGIRTIDSDFGKKRQKKMDNHDSSAIYEIKFHEFVLFILEEKMGATRRTFLTDLARKKGFRVENELSDSVTHIVAENNSRSEVLAWLKEHKMEKTKQFELLDISWLIESMKVGKPVDTKGKYQLAESGEMSANPDPTEGRENELPPTMKTISQYACQRRTTLNNHNQRFTDALEILAENYEFKRNDDTALTFMRAASVLKSLPFEVVSLKDTEGLPWIGDEVKGIMEEIIEVGESLEVQAVLNDERYQSFKRFKSVFGVGVKTADKWYRMGLRTLEDVRSSKTLKLTPMQKAGLCYYEDLARGVTKAEADAISLLVQDAVATFDPDALVEIVGGFRRGKPFGHDVDLLITSPGAEKEQDDQLLQKVTNLWKKQGLLLYGRLEWSQFEDGKLPSGKADALDHFAKCFLILKLYDHKVDKSKWEMPTGSNMGEAKPWKAIRVDLVRCPYDGFAFALLGWTGSRMFRRDLRWYAEDEKKMMLDNHALYDLTKKIFLEAKSEEEIFAHLGLEYLEPFERNA

SEQ ID NO: 1845 - DNA, 1587 bp, synthetic construct
  misc_feature 1..1587: note = Variant of terminal deoxynucleotidyltransferase
  source 1..1587: mol_type = other DNA
atgcaccatcatcatcatcatggcggtagcggcagccacggcattcgtaccatcgattcggacttcgggaagaaacgccagaaaaaaatggataaccacgatagttccgccatctatgaaatcaaatttcacgagtttgtgctgttcattctcgaagaaaaaatgggtgcgacgcgtcgtacttttctgacagatttagcccgcaagaaagggttccgcgtcgagaatgaactgtcagacagcgttacccacatcgtggcagaaaataattcacgctctgaagtattggcttggctgaaagaacacaagatggagaagaccaagcaattcgaactgctggatattagctggcttatcgaaagcatgaaagttggtaaaccggtggacaccaaggggaaataccagttggcggaatcgggtgagatgagtgcgaacccagatccgacagagggtcgtgaaaacgagctgcctcctactatgaagaccatttctcagtatgcgtgtcaacgccgcaccaccctgaacaaccataataaacgttttacggacgcactggaaattcttgcggaaaattacgagttcaaacgcaacgatgatactgcgctgacctttatgcgtgctgcatccgtgctgaaaagccttccgtttgaggtacgtagcctgaaagacacggaaggattgccctggatcggtgatgaagtcaaagggattatggaagaaatcatcgaggtcggtgaatcgctggaagtgcaggccgtgctcaatgatgagcgctatcaaagcttcaaacgctttaagagtgtctttggagtgggggtgaagacagcagacaagtggtaccgtatgggtctgcgcacgctcgaggatgttcgttccagcaagaccctgaagttgaccccgatgcagaaagcgggtctgctgtattatgaagatcttgctcgcggcgttacgaaagccgaagctgacgcgatttctctgctggttcaggatgcagtcgcaactttcgacccggatgcgctggtggagattgtcggtggatttcgtcgtgggaaacctttcggtcacgacgttgatctgcttatcacatctccgggagctgagaaagagcaagaagaccagctcctgcagaaagtgaccaatctgtggaagaaacaagggttgttgctgtacggtcgtctggaatggagtcagtttgaagatgggaaactcccatccggtaaggctgatgccctggacggccatgcgaaatgctttctgatcctcaaactttatgatcataaagtggacaaaagcaaatgggaaatgccgacgggttcgaacgaaggcgaggccaaaccgtggaaagcaattcgcgtagatctggttcgttgcccctacgacggttttgcgtttgcgttgttgggttggaccggaagccgcatgttccgccgtgatctgcgctggtacgccaccgacgagaagaagatgatgctggacaatcatgcgctgtatgacctgaccaagaaagagtttctcgaagctaaatcggaagaggaaattttcgcacatctggggcttgaatacctggaaccgttcgaacgtaacgca

SEQ ID NO: 1846 - protein, 529 aa, synthetic construct
  REGION 1..529: note = Variant of terminal deoxynucleotidyltransferase
MHHHHHHGGSGSHGIRTIDSDFGKKRQKKMDNHDSSAIYEIKFHEFVLFILEEKMGATRRTFLTDLARKKGFRVENELSDSVTHIVAENNSRSEVLAWLKEHKMEKTKQFELLDISWLIESMKVGKPVDTKGKYQLAESGEMSANPDPTEGRENELPPTMKTISQYACQRRTTLNNHNKRFTDALEILAENYEFKRNDDTALTFMRAASVLKSLPFEVRSLKDTEGLPWIGDEVKGIMEEIIEVGESLEVQAVLNDERYQSFKRFKSVFGVGVKTADKWYRMGLRTLEDVRSSKTLKLTPMQKAGLLYYEDLARGVTKAEADAISLLVQDAVATFDPDALVEIVGGFRRGKPFGHDVDLLITSPGAEKEQEDQLLQKVTNLWKKQGLLLYGRLEWSQFEDGKLPSGKADALDGHAKCFLILKLYDHKVDKSKWEMPTGSNEGEAKPWKAIRVDLVRCPYDGFAFALLGWTGSRMFRRDLRWYATDEKKMMLDNHALYDLTKKEFLEAKSEEEIFAHLGLEYLEPFERNA

SEQ ID NO: 1847 - DNA, 1587 bp, synthetic construct
  misc_feature 1..1587: note = Variant of terminal deoxynucleotidyltransferase
  source 1..1587: mol_type = other DNA
atgcaccatcatcatcatcatggcggtagcggcagccacggcattcgtaccatcgattcggacttcgggaagaaacgccagaaaaaaatggataaccacgatagttccgccatctatgaaatcaaatttcacgagtttgtgctgttcattctcgaagaaaaaatgggtgcgacgcgtcgtacttttctgacagatttagcccgcaagaaagggttccgcgtcgagaatgaactgtcagacagcgttacccacatcgtggcagaaaataattcacgctctgaagtattggcttggctgaaagaacacaagatggagaagaccaagcaattcgaactgctggatattagctggcttatcgaaagcatgaaagttggtaaaccggtggacaccaaggggaaataccagttggcggaatcgggtgagatgagtgcgaacccagatccgacagagggtcgtgaaaacgagctgcctcctactatgaagaccatttctcagtatgcgtgtcaacgccgcaccaccctgaacaaccataataaacgttttacggacgcactggaaattcttgcggaaaattacgagttcaaacgcaacgatgatactgcgctgacctttatgcgtgctatctccgtgctgaaaagccttccgtttgaggtagttagcctgaaagacacggaaggattgccctggatcggtgatgaagtcaaagggattatggaagaaatcatcgaggtcggtgaatcgctggaagtgcaggccgtgctcaatgatgagcgctatcaaagcttcaaacgctttaagagtgtctttggagtgggggtgaagacagcagacaagtggtaccgtatgggtctgcgcacgctcgaggatgttcgttccagcaagaccctgaagttgaccccgatgcagaaagcgggtctgctgtattatgaagatcttgctcgcggcgttacgaaagccgaagctgacgcgatttctctgctggttcaggatgcagtcgcaactttcgacccggatgcgctggtggagattgtcggtggatttcgtcgtgggaaacctttcggtcacgacgttgatctgcttatcacatctccgggagctgagaaagagcaagaagaccagctcctgcataaagtgaccaatctgtggaagaaacaagggttgttgctgtacggtcgtctggaatggagtcagtttgaagatgggaaactcccatccggtaaggctgatgccctggaccattttgcgaaatgctttctgatcctcaaactttatgatcataaagtggacaaaagcaaatgggaaatgccgacgggttcgaacatgggcgaggccaaaccgtggaaagcaattcgcgtagatctggttcgttgcccctacgatggttttgcgtttgcgttgttgggttggaccggaagccgcatgttccgccgtgatctgcgctggtacgccactgacgagaagaacatgatgctggacaatcatgcgctgtatgacctgaccaagaaagagtttctcaaagctaaatcggaagaggaaattttcgcacatctggggcttgaatacctggaaccgttcgaacgtaacgca

SEQ ID NO: 1848 - protein, 529 aa, synthetic construct
  REGION 1..529: note = Variant of terminal deoxynucleotidyltransferase
MHHHHHHGGSGSHGIRTIDSDFGKKRQKKMDNHDSSAIYEIKFHEFVLFILEEKMGATRRTFLTDLARKKGFRVENELSDSVTHIVAENNSRSEVLAWLKEHKMEKTKQFELLDISWLIESMKVGKPVDTKGKYQLAESGEMSANPDPTEGRENELPPTMKTISQYACQRRTTLNNHNKRFTDALEILAENYEFKRNDDTALTFMRAISVLKSLPFEVVSLKDTEGLPWIGDEVKGIMEEIIEVGESLEVQAVLNDERYQSFKRFKSVFGVGVKTADKWYRMGLRTLEDVRSSKTLKLTPMQKAGLLYYEDLARGVTKAEADAISLLVQDAVATFDPDALVEIVGGFRRGKPFGHDVDLLITSPGAEKEQEDQLLHKVTNLWKKQGLLLYGRLEWSQFEDGKLPSGKADALDHFAKCFLILKLYDHKVDKSKWEMPTGSNMGEAKPWKAIRVDLVRCPYDGFAFALLGWTGSRMFRRDLRWYATDEKNMMLDNHALYDLTKKEFLKAKSEEEIFAHLGLEYLEPFERNA

SEQ ID NO: 1849 - DNA, 1587 bp, synthetic construct
  misc_feature 1..1587: note = Variant of terminal deoxynucleotidyltransferase
  source 1..1587: mol_type = other DNA
atgcaccatcatcatcatcatggcggtagcggcagccacggcattcgtaccatcgattcggacttcgggaagaaacgccagaagaagatggataaccacgatagttccgccatctatgaaatcaaatttcacgagtttgtgctgttcattctcgaagagaaaatgggtgcgacgcgtcgtacttttctgacagatttagcccgcaagaaagggttccgcgtcgagaatgaactgtcagacagcgttacccacatcgtggcagaaaataattcacgctctgaagtattggcttggctgaaagaacacaagatggagaagaccaagcaattcgaactgctggatattagctggcttatcgaaagcatgaaagttggtaaaccggtggacaccaaggggaaataccagttggcggaatcgggtgagatgagtgcgaacccagatccgacagagggtcgtgaaaacgagctgcctcctactacgaagaccatttctcagtatgcgtgtcaacgccgcaccaccctgaacaaccataataaacgttttacggacgcactggaaattcttgcggaaaattacgagttcaaacgcaacgatgatactgcgctgacctttcgtcgtgctgcatccgtgctgaaaagccttccgtttgaggtagttagcctgaaagacacggaaggattgccctggatcggtgatgaagtcaaagggattatggaagaaatcatcgaggtcggtgaatcgctggaagtgcaggccgtgctcaatgatgagcgctatcaaagcttcaaacgctttaagagtgtctttggagtgggggtgaagacagcagacaagtggtaccgtatgggtctgcgcacgctcgaggatgttcgttccagcaagaccctgaagttgaccccgatgcagaaagcgggtctgtgctattatgaagatcttgctcgcggcgttacgaaagccgaagctgacgcgatttctctgctggttcaggatgcagtcgcaactttcgacccggatgcgctggtggagattgtcggtggatttcgtcgtgggaaacctcagggtcacgacgttgatctgcttatcacatctccgggagctgagaaagagcaagaagaccagctcctgcagaaagtgaccaatctgtggaagaaacaagggttgttgctgtacggtcgtctggaatggagtcagtttgaagatgggaaactcccatccggtaaggctgatgccctggaccatcatgcgaaatgctttctgatcctcaaactttatgatcataaagtggacaaaagcaaatgggaaatgccgacgggttcgaacatgggcgaggccaaaccgtggaaagcaattcgcgtagatctggttcgttgcccctacggcggttttgcgtttgcgttgttgggttggaccggaagccgcatgttccgccgtgatctgcgctggtacgccgaagacgagaagaacatgatgctggacaatcatgcgctgtatgacctgaccaagaaaatctttctcaaagctaaatcggaagaggaaattttcgcacatctggggcttgaatacctggaaccgttcgaacgtaacgca

SEQ ID NO: 1850 - protein, 529 aa, synthetic construct
  REGION 1..529: note = Variant of terminal deoxynucleotidyltransferase
MHHHHHHGGSGSHGIRTIDSDFGKKRQKKMDNHDSSAIYEIKFHEFVLFILEEKMGATRRTFLTDLARKKGFRVENELSDSVTHIVAENNSRSEVLAWLKEHKMEKTKQFELLDISWLIESMKVGKPVDTKGKYQLAESGEMSANPDPTEGRENELPPTTKTISQYACQRRTTLNNHNKRFTDALEILAENYEFKRNDDTALTFRRAASVLKSLPFEVVSLKDTEGLPWIGDEVKGIMEEIIEVGESLEVQAVLNDERYQSFKRFKSVFGVGVKTADKWYRMGLRTLEDVRSSKTLKLTPMQKAGLCYYEDLARGVTKAEADAISLLVQDAVATFDPDALVEIVGGFRRGKPQGHDVDLLITSPGAEKEQEDQLLQKVTNLWKKQGLLLYGRLEWSQFEDGKLPSGKADALDHHAKCFLILKLYDHKVDKSKWEMPTGSNMGEAKPWKAIRVDLVRCPYGGFAFALLGWTGSRMFRRDLRWYAEDEKNMMLDNHALYDLTKKIFLKAKSEEEIFAHLGLEYLEPFERNA

SEQ ID NO: 1851 - DNA, 1587 bp, synthetic construct
  misc_feature 1..1587: note = Variant of terminal deoxynucleotidyltransferase
  source 1..1587: mol_type = other DNA
atgcaccatcatcatcatcatggcggtagcggcagccacggcattcgtaccatcgattcggacttcgggaagaaacgccagaaaaaaatggataaccacgatagttccgccatctatgaaatcaaatttcacgagtttgtgctgttcattctcgaagagaaaatgggtgcgacgcgtcgtacttttctgacagatttagcccgcaagaaagggttccgcgtcgagaatgaactgtcagacagcgttacccacatcgtggcagaaaataattcacgctctgaagtattggcttggctgaaagaacacaagatggagaagaccaagcaattcgaactgctggatattagctggcttatcgaaagcatgaaagttggtaaaccggtggacaccaaggggaaataccagttggcggaatcgggtgagatgagtgcgaacccagatccgacagagggtcgtgaaaacgagctgcctcctactatgaagaccatttctccgtatgcgtgtcaacgccgcaccaccctgaacaaccataatcaacgttttacggacgcactggaaattcttgcggaaaattacgagttcaaacgcaacgatgatactgcgctgacctttatgcgtgctatctccgtgctgaaaagccttccgtttgaggtagttagcctgaaagacacggaaggattgccctggatcggtgatgaagtcaaagggattatggaagaaatcatcgaggtcggtgaatcgctggaagtgcaggccgtgctcaatgatgagcgctatcaaagcttcaaacgctttaagagtgtctttggagtgggggtgaagacagcagacaagtggtaccgtatgggtctgcgcacgctcgaggatgttcgttccagcaagaccctgaagttgaccccgatgcagaaagcgggtctgctgtattatgaagatcttgctcgcggcgttacgaaagccgaagctgacgcgatttctctgctggttcaggatgcagtcgcaactttcgacccggatgcgctggtggagattgtcggtggatttcgtcgtgggaaacctcagggtcacgacgttgatctgcttatcacatctccgggagctgagaaagagcaagaagaccagctcctgcagaaagtgaccaatctgtggaagaaacaagggttgttgctgtacggtcgtctggaatggagtcagtttgaagatgggaaactcccatccggtaaggctgatgccctggacggccatgcgaaatgctttctgatcctcaaactttatgatcataaagtggacaaaagcaaatgggaaatgccgacgggttcgaacatgggcgaggccaaaccgtggaaagcaattcgcgtagatctggttcgttgcccctacgacggttttgcgtttgcgttgttgggttggaccggaagccgcatgttccgccgtgatctgcgctggtacgccactgacgagaagaacatgatgctggacaatcatggcctgtatgacctgaccaagaaaatctttctcaaagctaaatcggaagaggaaattttcgcacatctggggcttgaatacctggaaccgttcgaacgtaacgca

SEQ ID NO: 1852 - protein, 529 aa, synthetic construct
  REGION 1..529: note = Variant of terminal deoxynucleotidyltransferase
MHHHHHHGGSGSHGIRTIDSDFGKKRQKKMDNHDSSAIYEIKFHEFVLFILEEKMGATRRTFLTDLARKKGFRVENELSDSVTHIVAENNSRSEVLAWLKEHKMEKTKQFELLDISWLIESMKVGKPVDTKGKYQLAESGEMSANPDPTEGRENELPPTMKTISPYACQRRTTLNNHNQRFTDALEILAENYEFKRNDDTALTFMRAISVLKSLPFEVVSLKDTEGLPWIGDEVKGIMEEIIEVGESLEVQAVLNDERYQSFKRFKSVFGVGVKTADKWYRMGLRTLEDVRSSKTLKLTPMQKAGLLYYEDLARGVTKAEADAISLLVQDAVATFDPDALVEIVGGFRRGKPQGHDVDLLITSPGAEKEQEDQLLQKVTNLWKKQGLLLYGRLEWSQFEDGKLPSGKADALDGHAKCFLILKLYDHKVDKSKWEMPTGSNMGEAKPWKAIRVDLVRCPYDGFAFALLGWTGSRMFRRDLRWYATDEKNMMLDNHGLYDLTKKIFLKAKSEEEIFAHLGLEYLEPFERNA

SEQ ID NO: 1853 - DNA, 1587 bp, synthetic construct
  misc_feature 1..1587: note = Variant of terminal deoxynucleotidyltransferase
  source 1..1587: mol_type = other DNA
atgcaccatcatcatcatcatggcggtagcggcagccacggcattcgtaccatcgattcggacttcgggaagaaacgccagaaaaaaatggataaccacgatagttccgccatctatgaaatcaaatttcacgagtttgtgctgttcattctcgaagaaaaaatgggtgcgacgcgtcgtacttttctgacagatttagcccgcaagaaagggttccgcgtcgagaatgaactgtcagacagcgttacccacatcgtggcagaaaataattcacgctctgaagtattggcttggctgaaagaacacaagatggagaagaccaagcaattcgaactgctggatattagctggcttatcgaaagcatgaaagttggtaaaccggtggacaccaaggggaaataccagttggcggaatcgggtgagatgagtgcgaacccagatccgacagagggtcgtgaaaacgagctgcctcctactacgaagaccatttctccgtatgcgtgtcaacgccgcaccaccctgaacaaccataataaacgttttacggacgcactggaaattcttgcggaaaattacgagttcaaacgcaacgatgatactgcgctgacctttatgcgtgctgcatccgtgctgaaaagccttccgtttgaggtagttagcctgaaagacacggaaggattgccctggatcggtgatgaagtcaaagggattatggaagaaatcatcgaggtcggtgaatcgctggaagtgcaggccgtgctcaatgatgagcgctatcaaagcttcaaacgctttaagagtgtctttggagtgggggtgaagacagcagacaagtggtaccgtatgggtctgcgcacgctcgaggatgttcgttccagcaagaccctgaagttgaccccgatgcagaaagcgggtctgtgctattatgaagatcttgctcgcggcgttacgaaagccgaagctgacgcgatttctctgctggttcaggatgcagtcgcaactttcgacccggatgcgctggtggagattgtcggtggatttcgtcgtgggaaacctcagggtcacgacgttgatctgcttatcacatctccgggagctgagaaagagcaagaagaccagctcctgcagaaagtgaccaatctgtggaagaaacaagggttgttgctgtacggtcgtctggaatggagtcagtttgaagatgggaaactcccatccggtaaggctgatgccctggacggccatgcgaaatgctttctgatcctcaaactttatgatcataaagtggacaaaagcaaatgggaaatgccgacgggttcgaacgagggcgaggccaaaccgtggaaagcaattcgcgtagatctggttcgttgcccctacgacggttttgcgtttgcgttgttgggttggaccggaagccgcatgttccgccgtgatctgcgctggtacgccaccgacgagaagaagatgatgctggacaatcatgccctgtatgacctgaccaagaaagagtttctcaaagctaaatcggaagaggaaattttcgcacatctggggcttgaatacctggaaccgttcgaacgtaacgca

SEQ ID NO: 1854 - protein, 529 aa, synthetic construct
  REGION 1..529: note = Variant of terminal deoxynucleotidyltransferase
MHHHHHHGGSGSHGIRTIDSDFGKKRQKKMDNHDSSAIYEIKFHEFVLFILEEKMGATRRTFLTDLARKKGFRVENELSDSVTHIVAENNSRSEVLAWLKEHKMEKTKQFELLDISWLIESMKVGKPVDTKGKYQLAESGEMSANPDPTEGRENELPPTTKTISPYACQRRTTLNNHNKRFTDALEILAENYEFKRNDDTALTFMRAASVLKSLPFEVVSLKDTEGLPWIGDEVKGIMEEIIEVGESLEVQAVLNDERYQSFKRFKSVFGVGVKTADKWYRMGLRTLEDVRSSKTLKLTPMQKAGLCYYEDLARGVTKAEADAISLLVQDAVATFDPDALVEIVGGFRRGKPQGHDVDLLITSPGAEKEQEDQLLQKVTNLWKKQGLLLYGRLEWSQFEDGKLPSGKADALDGHAKCFLILKLYDHKVDKSKWEMPTGSNEGEAKPWKAIRVDLVRCPYDGFAFALLGWTGSRMFRRDLRWYATDEKKMMLDNHALYDLTKKEFLKAKSEEEIFAHLGLEYLEPFERNA

SEQ ID NO: 1855 - DNA, 1587 bp, synthetic construct
  misc_feature 1..1587: note = Variant of terminal deoxynucleotidyltransferase
  source 1..1587: mol_type = other DNA
atgcaccatcatcatcatcatggcggtagcggcagccacggcattcgtaccatcgattcggacttcgggaagaaacgccagaagaagatggataaccacgatagttccgccatctatgaaatcaaatttcacgagtttgtgctgttcattctcgaagagaaaatgggtgcgacgcgtcgtacttttctgacagatttagcccgcaagaaagggttccgcgtcgagaatgaactgtcagacagcgttacccacatcgtggcagaaaataattcacgctctgaagtattggcttggctgaaagaacacaagatggagaagaccaagcaattcgaactgctggatattagctggcttatcgaaagcatgaaagttggtaaaccggtggacaccaaggggaaataccagttggcggaatcgggtgagatgagtgcgaacccagatccgacagagggtcgtgaaaacgagctgcctcctactacgaagaccatttctccgtatgcgtgtcaacgccgcaccaccctgaacaaccataatcaacgttttacggacgcactggaaattcttgcggaaaattacgagttcaaacgcaacgatgatactgcgctggaatttcgtcgtgctatctccgtgctgaaaagccttccgtttgaggtagttagcctgaaagacacggaaggattgccctggatcggtgatgaagtcaaagggattatggaagaaatcatcgaggtcggtgaatcgctggaagtgcaggccgtgctcaatgatgagcgctatcaaagcttcaaacgctttaagagtgtctttggagtgggggtgaagacagcagacaagtggtaccgtatgggtctgcgcacgctcgaggatgttcgttccagcaagaccctgaagttgaccccgatgcagaaagcgggtctgtgctattatgaagatcttgctcgcggcgttacgaaagccgaagctgacgcgatttctctgctggttcaggatgcagtcgcaactttcgacccggatgcgctggtggagattgtcggtggatttcgtcgtgggaaaccttttggtcacgacgttgatctgcttatcacatctccgggagctgagaaagagcaagaagaccagctcctgcagaaagtgaccaatctgtggaagaaacaagggttgttgctgtacggtcgtctggaatggagtcagtttgaagatgggaaactcccatccggtaaggctgatgccctggaccatttcgcgaaatgctttctgatcctcaaactttatgatcataaagtggacaaaagcaaatgggaaatgccgacgggttcgaacgaaggcgaggccaaaccgtggaaagcaattcgcgtagatctggttcgttgcccctacgatggttttgcgtttgcgttgttgggttggaccggaagccgcatgttccgccgtgatctgcgctggtacgccgaagacgagaagaacatgatgctggacaatcatgcgctgtatgacctgaccaagaaaatctttctcaaagctaaatcggaagaggaaattttcgcacatctggggcttgaatacctggaaccgttcgaacgtaacgca

SEQ ID NO: 1856 - protein, 529 aa, synthetic construct
  REGION 1..529: note = Variant of terminal deoxynucleotidyltransferase
MHHHHHHGGSGSHGIRTIDSDFGKKRQKKMDNHDSSAIYEIKFHEFVLFILEEKMGATRRTFLTDLARKKGFRVENELSDSVTHIVAENNSRSEVLAWLKEHKMEKTKQFELLDISWLIESMKVGKPVDTKGKYQLAESGEMSANPDPTEGRENELPPTTKTISPYACQRRTTLNNHNQRFTDALEILAENYEFKRNDDTALEFRRAISVLKSLPFEVVSLKDTEGLPWIGDEVKGIMEEIIEVGESLEVQAVLNDERYQSFKRFKSVFGVGVKTADKWYRMGLRTLEDVRSSKTLKLTPMQKAGLCYYEDLARGVTKAEADAISLLVQDAVATFDPDALVEIVGGFRRGKPFGHDVDLLITSPGAEKEQEDQLLQKVTNLWKKQGLLLYGRLEWSQFEDGKLPSGKADALDHFAKCFLILKLYDHKVDKSKWEMPTGSNEGEAKPWKAIRVDLVRCPYDGFAFALLGWTGSRMFRRDLRWYAEDEKNMMLDNHALYDLTKKIFLKAKSEEEIFAHLGLEYLEPFERNA

SEQ ID NO: 1857 - DNA, 1587 bp, synthetic construct
  misc_feature 1..1587: note = Variant of terminal deoxynucleotidyltransferase
  source 1..1587: mol_type = other DNA
atgcaccatcatcatcatcatggcggtagcggcagccacggcattcgtaccatcgattcggacttcgggaagaaacgccagaaaaaaatggataaccacgatagttccgccatctatgaaatcaaatttcacgagtttgtgctgttcattctcgaagagaaaatgggtgcgacgcgtcgtacttttctgacagatttagcccgcaagaaagggttccgcgtcgagaatgaactgtcagacagcgttacccacatcgtggcagaaaataattcacgctctgaagtattggcttggctgaaagaacacaagatggagaagaccaagcaattcgaactgctggatattagctggcttatcgaaagcatgaaagttggtaaaccggtggacaccaaggggaaataccagttggcggaatcgggtgagatgagtgcgaacccagatccgacagagggtcgtgaaaacgagctgcctcctactatgaagaccatttctcagtatgcgtgtcaacgccgcaccaccctgaacaaccataatcaacgttttacggacgcactggaaattcttgcggaaaattacgagttcaaacgcaacgatgatactgcgctggaatttcgtcgtgctgcatccgtgctgaaaagccttccgtttgaggtagttagcctgaaagacacggaaggattgccctggatcggtgatgaagtcaaagggattatggaagaaatcatcgaggtcggtgaatcgctggaagtgcaggccgtgctcaatgatgagcgctatcaaagcttcaaacgctttaagagtgtctttggagtgggggtgaagacagcagacaagtggtaccgtatgggtctgcgcacgctcgaggatgttcgttccagcaagaccctgaagttgaccccgatgcagaaagcgggtctgtgctattatgaagatcttgctcgcggcgttacgaaagccgaagctgacgcgatttctctgctggttcaggatgcagtcgcaactttcgacccggatgcgctggtggagattgtcggtggatttcgtcgtgggaaacctttcggtcacgacgttgatctgcttatcacatctccgggagctgagaaagagcaagaagaccagctcctgcagaaagtgaccaatctgtggaagaaacaagggttgttgctgtacggtcgtctggaatggagtcagtttgaagatgggaaactcccatccggtaaggctgatgccctggacggctttgcgaaatgctttctgatcctcaaactttatgatcataaagtggacaaaagcaaatgggaaatgccgacgggttcgaacgagggcgaggccaaaccgtggaaagcaattcgcgtagatctggttcgttgcccctacggcggttttgcgtttgcgttgttgggttggaccggaagccgcatgttccgccgtgatctgcgctggtacgccgaagacgagaagaacatgatgctggacaatcatgcgctgtatgacctgaccaagaaaatctttctcaaagctaaatcggaagaggaaattttcgcacatctggggcttgaatacctggaaccgttcgaacgtaacgca

SEQ ID NO: 1858 - protein, 529 aa, synthetic construct
  REGION 1..529: note = Variant of terminal deoxynucleotidyltransferase
MHHHHHHGGSGSHGIRTIDSDFGKKRQKKMDNHDSSAIYEIKFHEFVLFILEEKMGATRRTFLTDLARKKGFRVENELSDSVTHIVAENNSRSEVLAWLKEHKMEKTKQFELLDISWLIESMKVGKPVDTKGKYQLAESGEMSANPDPTEGRENELPPTMKTISQYACQRRTTLNNHNQRFTDALEILAENYEFKRNDDTALEFRRAASVLKSLPFEVVSLKDTEGLPWIGDEVKGIMEEIIEVGESLEVQAVLNDERYQSFKRFKSVFGVGVKTADKWYRMGLRTLEDVRSSKTLKLTPMQKAGLCYYEDLARGVTKAEADAISLLVQDAVATFDPDALVEIVGGFRRGKPFGHDVDLLITSPGAEKEQEDQLLQKVTNLWKKQGLLLYGRLEWSQFEDGKLPSGKADALDGFAKCFLILKLYDHKVDKSKWEMPTGSNEGEAKPWKAIRVDLVRCPYGGFAFALLGWTGSRMFRRDLRWYAEDEKNMMLDNHALYDLTKKIFLKAKSEEEIFAHLGLEYLEPFERNA

SEQ ID NO: 1859 - DNA, 1587 bp, synthetic construct
  misc_feature 1..1587: note = Variant of terminal deoxynucleotidyltransferase
  source 1..1587: mol_type = other DNA
atgcaccatcatcatcatcatggcggtagcggcagccacggcattcgtaccatcgattcggacttcgggaagaaacgccagaaaaaaatggataaccacgatagttccgccatctatgaaatcaaatttcacgagtttgtgctgttcattctcgaagaaaaaatgggtgcgacgcgtcgtacttttctgacagatttagcccgcaagaaagggttccgcgtcgagaatgaactgtcagacagcgttacccacatcgtggcagaaaataattcacgctctgaagtattggcttggctgaaagaacacaagatggagaagaccaagcaattcgaactgctggatattagctggcttatcgaaagcatgaaagttggtaaaccggtggacaccaaggggaaataccagttggcggaatcgggtgagatgagtgcgaacccagatccgacagagggtcgtgaaaacgagctgcctcctactacgaagaccatttctcagtatgcgtgtcaacgccgcaccaccctgaacaaccataatcaacgttttacggacgcactggaaattcttgcggaaaattacgagttcaaacgcaacgatgatactgcgctgacctttcgtcgtgctatctccgtgctgaaaagccttccgtttgaggtagttagcctgaaagacacggaaggattgccctggatcggtgatgaagtcaaagggattatggaagaaatcatcgaggtcggtgaatcgctggaagtgcaggccgtgctcaatgatgagcgctatcaaagcttcaaacgctttaagagtgtctttggagtgggggtgaagacagcagacaagtggtaccgtatgggtctgcgcacgctcgaggatgttcgttccagcaagaccctgaagttgaccccgatgcagaaagcgggtctgtgctattatgaagatcttgctcgcggcgttacgaaagccgaagctgacgcgatttctaccctggttcaggatgcagtcgcaactttcgacccggatgcgctggtggagattgtcggtggatttcgtcgtgggaaacctttcggtcacgacgttgatctgcttatcacatctccgggagctgagaaagagcaagaagaccagctcctgcagaaagtgaccaatctgtggaagaaacaagggttgttgctgtacggtcgtctggaatggagtcagtttgaagatgggaaactcccatccggtaaggctgatgccctggaccattttgcgaaatgctttctgatcctcaaactttatgatcataaagtggacaaaagcaaatgggaaatgccgacgggttcgaacgaaggcgaggccaaaccgtggaaagcaattcgcgtagatctggttcgttgcccctacgatggttttgcgtttgcgttgttgggttggaccggaagccgcatgttccgccgtgatctgcgctggtacgccactgacgagaagaacatgatgctggacaatcatgcgctgtatgacctgaccaagaaagagtttctcgaagctaaatcggaagaggaaattttcgcacatctggggcttgaatacctggaaccgttcgaacgtaacgca

SEQ ID NO: 1860 - protein, 529 aa, synthetic construct
  REGION 1..529: note = Variant of terminal deoxynucleotidyltransferase
MHHHHHHGGSGSHGIRTIDSDFGKKRQKKMDNHDSSAIYEIKFHEFVLFILEEKMGATRRTFLTDLARKKGFRVENELSDSVTHIVAENNSRSEVLAWLKEHKMEKTKQFELLDISWLIESMKVGKPVDTKGKYQLAESGEMSANPDPTEGRENELPPTTKTISQYACQRRTTLNNHNQRFTDALEILAENYEFKRNDDTALTFRRAISVLKSLPFEVVSLKDTEGLPWIGDEVKGIMEEIIEVGESLEVQAVLNDERYQSFKRFKSVFGVGVKTADKWYRMGLRTLEDVRSSKTLKLTPMQKAGLCYYEDLARGVTKAEADAISTLVQDAVATFDPDALVEIVGGFRRGKPFGHDVDLLITSPGAEKEQEDQLLQKVTNLWKKQGLLLYGRLEWSQFEDGKLPSGKADALDHFAKCFLILKLYDHKVDKSKWEMPTGSNEGEAKPWKAIRVDLVRCPYDGFAFALLGWTGSRMFRRDLRWYATDEKNMMLDNHALYDLTKKEFLEAKSEEEIFAHLGLEYLEPFERNA

SEQ ID NO: 1861 - DNA, 1587 bp, synthetic construct
  misc_feature 1..1587: note = Variant of terminal deoxynucleotidyltransferase
  source 1..1587: mol_type = other DNA
atgcaccatcatcatcatcatggcggtagcggcagccacggcattcgtaccatcgattcggacttcgggaagaaacgccagaaaaaaatggataaccacgatagttccgccatctatgaaatcaaatttcacgagtttgtgctgttcattctcgaagagaaaatgggtgcgacgcgtcgtacttttctgacagatttagcccgcaagaaagggttccgcgtcgagaatgaactgtcagacagcgttacccacatcgtggcagaaaataattcacgctctgaagtattggcttggctgaaagaacacaagatggagaagaccaagcaattcgaactgctggatattagctggcttatcgaaagcatgaaagttggtaaaccggtggacaccaaggggaaataccagttggcggaatcgggtgagatgagtgcgaacccagatccgacagagggtcgtgaaaacgagctgcctcctactatgaagaccatttctcagtatgcgtgtcaacgccgcaccaccctgaacaaccataatcaacgttttacggacgcactggaaattcttgcggaaaattacgagttcaaacgcaacgatgatactgcgctgacctttatgcgtgctgcatccgtgctgaaaagccttccgtttgaggtagtgagcctgaaagacacggaaggattgccctggatcggtgatgaagtcaaagggattatggaagaaatcatcgaggtcggtgaatcgctggaagtgcaggccgtgctcaatgatgagcgctatcaaagcttcaaacgctttaagagtgtctttggagtgggggtgaagacagcagacaagtggtaccgtatgggtctgcgcacgctcgaggatgttcgttccagcaagaccctgaagttgaccccgatgcagaaagcgggtctgtgctattatgaagatcttgctcgcggcgttacgaaagccgaagctgacgcgatttctaccctggttcaggatgcagtcgcaactttcgacccggatgcgctggtggagattgtcggtggatttcgtcgtgggaaacctttcggtcacgacgttgatctgcttatcacatctccgggagctgagaaagagcaagaagaccagctcctgcataaagtgaccaatctgtggaagaaacaagggttgttgctgtacggtcgtctggaatggagtcagtttgaagatgggaaactcccatccggtaaggctgatgccctggaccatcatgcgaaatgctttctgatcctcaaactttatgatcataaagtggacaaaagcaaatgggaaatgccgacgggttcgaacatgggcgaggccaaaccgtggaaagcaattcgcgtagatctggttcgttgcccctacgatggttttgcgtttgcgttgttgggttggaccggaagccgcatgttccgccgtgatctgcgctggtacgccgaagacgagaagaacatgatgctggacaatcatgcgctgtatgacctgaccaagaaaatctttctcaaagctaaatcggaagaggaaattttcgcacatctggggcttgaatacctggaaccgttcgaacgtaacgca

SEQ ID NO: 1862 - protein, 529 aa, synthetic construct
  REGION 1..529: note = Variant of terminal deoxynucleotidyltransferase
MHHHHHHGGSGSHGIRTIDSDFGKKRQKKMDNHDSSAIYEIKFHEFVLFILEEKMGATRRTFLTDLARKKGFRVENELSDSVTHIVAENNSRSEVLAWLKEHKMEKTKQFELLDISWLIESMKVGKPVDTKGKYQLAESGEMSANPDPTEGRENELPPTMKTISQYACQRRTTLNNHNQRFTDALEILAENYEFKRNDDTALTFMRAASVLKSLPFEVVSLKDTEGLPWIGDEVKGIMEEIIEVGESLEVQAVLNDERYQSFKRFKSVFGVGVKTADKWYRMGLRTLEDVRSSKTLKLTPMQKAGLCYYEDLARGVTKAEADAISTLVQDAVATFDPDALVEIVGGFRRGKPFGHDVDLLITSPGAEKEQEDQLLHKVTNLWKKQGLLLYGRLEWSQFEDGKLPSGKADALDHHAKCFLILKLYDHKVDKSKWEMPTGSNMGEAKPWKAIRVDLVRCPYDGFAFALLGWTGSRMFRRDLRWYAEDEKNMMLDNHALYDLTKKIFLKAKSEEEIFAHLGLEYLEPFERNA

SEQ ID NO: 1863 - DNA, 1587 bp, synthetic construct
  misc_feature 1..1587: note = Variant of terminal deoxynucleotidyltransferase
  source 1..1587: mol_type = other DNA
atgcaccatcatcatcatcatggcggtagcggcagccacggcattcgtaccatcgattcggacttcgggaagaaacgccagaagaagatggataaccacgatagttccgccatctatgaaatcaaatttcacgagtttgtgctgttcattctcgaagaaaaaatgggtgcgacgcgtcgtacttttctgacagatttagcccgcaagaaagggttccgcgtcgagaatgaactgtcagacagcgttacccacatcgtggcagaaaataattcacgctctgaagtattggcttggctgaaagaacacaagatggagaagaccaagcaattcgaactgctggatattagctggcttatcgaaagcatgaaagttggtaaaccggtggacaccaaggggaaataccagttggcggaatcgggtgagatgagtgcgaacccagatccgacagagggtcgtgaaaacgagctgcctcctactatgaagaccatttctcagtatgcgtgtcaacgccgcaccaccctgaacaaccataatcaacgttttacggacgcactggaaattcttgcggaaaattacgagttcaaacgcaacgatgatactgcgctgacctttatgcgtgctatctccgtgctgaaaagccttccgtttgaggtacgtagcctgaaagacacggaaggattgccctggatcggtgatgaagtcaaagggattatggaagaaatcatcgaggtcggtgaatcgctggaagtgcaggccgtgctcaatgatgagcgctatcaaagcttcaaacgctttaagagtgtctttggagtgggggtgaagacagcagacaagtggtaccgtatgggtctgcgcacgctcgaggatgttcgttccagcaagaccctgaagttgaccccgatgcagaaagcgggtctgctgtattatgaagatcttgctcgcggcgttacgaaagccgaagctgacgcgatttctctgctggttcaggatgcagtcgcaactttcgacccggatgcgctggtggagattgtcggtggatttcgtcgtgggaaaccttttggtcacgacgttgatctgcttatcacatctccgggagctgagaaagagcaagacgaccagctcctgcagaaagtgaccaatctgtggaagaaacaagggttgttgctgtacggtcgtctggaatggagtcagtttgaagatgggaaactcccatccggtaaggctgatgccctggaccatttcgcgaaatgctttctgatcctcaaactttatgatcataaagtggacaaaagcaaatgggaaatgccgacgggttcgaacgaaggcgaggccaaaccgtggaaagcaattcgcgtagatctggttcgttgcccctacgatggttttgcgtttgcgttgttgggttggaccggaagccgcatgttccgccgtgatctgcgctggtacgccactgacgagaagaagatgatgctggacaatcatgcgctgtatgacctgaccaagaaaatctttctcgaagctaaatcggaagaggaaattttcgcacatctggggcttgaatacctggaaccgttcgaacgtaacgca

SEQ ID NO: 1864 - protein, 529 aa, synthetic construct
  REGION 1..529: note = Variant of terminal deoxynucleotidyltransferase
MHHHHHHGGSGSHGIRTIDSDFGKKRQKKMDNHDSSAIYEIKFHEFVLFILEEKMGATRRTFLTDLARKKGFRVENELSDSVTHIVAENNSRSEVLAWLKEHKMEKTKQFELLDISWLIESMKVGKPVDTKGKYQLAESGEMSANPDPTEGRENELPPTMKTISQYACQRRTTLNNHNQRFTDALEILAENYEFKRNDDTALTFMRAISVLKSLPFEVRSLKDTEGLPWIGDEVKGIMEEIIEVGESLEVQAVLNDERYQSFKRFKSVFGVGVKTADKWYRMGLRTLEDVRSSKTLKLTPMQKAGLLYYEDLARGVTKAEADAISLLVQDAVATFDPDALVEIVGGFRRGKPFGHDVDLLITSPGAEKEQDDQLLQKVTNLWKKQGLLLYGRLEWSQFEDGKLPSGKADALDHFAKCFLILKLYDHKVDKSKWEMPTGSNEGEAKPWKAIRVDLVRCPYDGFAFALLGWTGSRMFRRDLRWYATDEKKMMLDNHALYDLTKKIFLEAKSEEEIFAHLGLEYLEPFERNA

SEQ ID NO: 1865 - DNA, 1587 bp, synthetic construct
  misc_feature 1..1587: note = Variant of terminal deoxynucleotidyltransferase
  source 1..1587: mol_type = other DNA
atgcaccagcatcatcatcatggcggtagcggcagccacggcattcgtaccatcgattcggacttcgggaagaaacgccagaagaagatggataaccacgatagttccgccatctatgaaatcaaatttcacgagtttgtgctgttcattctcgaagaaaaaatgggtgcgacgcgtcgtacttttctgacagatttagcccgcaagaaagggttccgcgtcgagaatgaactgtcagacagcgttacccacatcgtggcagaaaataattcacgctctgaagtattggcttggctgaaagaacacaagatggagaagaccaagcaattcgaactgctggatattagctggcttatcgaaagcatgaaagttggtaaaccggtggacaccaaggggaaataccagttggcggaatcgggtgagatgagtgcgaacccagatccgacagagggtcgtgaaaacgagctgcctcctactatgaagaccatttctcagtatgcgtgtcaacgccgcaccaccctgaacaaccataatcaacgttttacggacgcactggaaattcttgcggaaaattacgagttcaaacgcaacgatgatactgcgctgacctttcgtcgtgctgcatccgtgctgaaaagccttccgtttgaggtacgtagcctgaaagacacggaaggattgccctggatcggtgatgaagtcaaagggattatggaagaaatcatcgaggtcggtgaatcgctggaagtgcaggccgtgctcaatgatgagcgctatcaaagcttcaaacgctttaagagtgtctttggagtgggggtgaagacagcagacaagtggtaccgtatgggtctgcgcacgctcgaggatgttcgttccagcaagaccctgaagttgaccccgatgcagaaagcgggtctgctgtattatgaagatcttgctcgcggcgttacgaaagccgaagctgacgcgatttctctgctggttcaggatgcagtcgcaactttcgacccggatgcgctggtggagattgtcggtggatttcgtcgtgggaaacctcagggtcacgacgttgatctgcttatcacatctccgggagctgagaaagagcaagacgaccagctcctgcataaagtgaccaatctgtggaagaaacaagggttgttgctgtacggtcgtctggaatggagtcagtttgaagatgggaaactcccatccggtaaggctgatgccctggacggccatgcgaaatgctttctgatcctcaaactttatgatcataaagtggacaaaagcaaatgggaaatgccgacgggttcgaacatgggcgaggccaaaccgtggaaagcaattcgcgtagatctggttcgttgcccctacgacggttttgcgtttgcgttgttgggttggaccggaagccgcatgttccgccgtgatctgcgctggtacgccactgacgagaagaacatgatgctggacaatcatgcgctgtatgacctgaccaagaaaatctttctcaaagctaaatcggaagaggaaattttcgcacatctggggcttgaatacctggaaccgttcgaacgtaacgca

(The sequence listing continues in the following parts.)

What is claimed is:

1. An engineered terminal deoxynucleotidyl transferase comprising a polypeptide sequence having at least 85%, 90%, 91%, 92%, 93%, 94%, 95%, 96%, 97%, 98%, 99%, or more sequence identity to a reference sequence selected from SEQ ID NO: 2, 8, 12, 16, 24, 36, 54, 268, 648, 660, 882, 1100, 1336, 1348, 1596, 1654, 1830, 1950, 2008, 2254, 2514, 2524, 2638, 2804, 2812, 2956, 3174, 3222, 3670, 3674, 3796, 3870, 3918, 4266, 4442, 4654, 4850, 4856, 4904, 5002, 5028, 5192, 5246, or a functional fragment thereof, and at least one amino acid residue difference relative to the reference sequence.

2. The engineered terminal deoxynucleotidyl transferase of claim 1, wherein the polypeptide sequence comprises residue differences relative to the reference sequence of SEQ ID NO: 2 at a set of amino acid positions selected from:
80/121/185/315;
80/121/185/190/289/290/293/313/342/499;
80/121/185/190/289/290/293/313/315/336/342/359/391/414/470/474/499/522/523;
80/121/185/190/244/289/290/293/313/315/317/336/342/359/391/470/474/499/522/523;
80/121/174/185/190/196/244/266/273/284/288/289/290/293/313/315/317/324/336/342/352/359/391/394/3 97/401/419/428/431/462/470/474/499/522/523;
80/106/121/185/190/205/289/290/293/313/315/336/342/359/391/470/474/499/522/523;
80/106/121/185/190/205/289/290/293/313/342/470/474/499/523;
80/106/121/185/190/244/289/290/293/307/342/359/470/474/499;
80/121/131/185/190/205/244/289/290/293/313/315/336/342/359/391/414/470/474/499/522/523;
80/121/131/185/190/205/244/289/290/293/313/336/342/359/391/414/470/474/499/522/523;
80/121/131/185/190/289/290/293/313/342/470/474/499/522/523;
80/121/174/179/185/190/236/244/288/289/290/293/313/315/317/336/342/359/363/391/394/408/426/462/4 70/474/499/522/523;
80/121/174/185/186/190/236/244/273/284/288/289/290/293/313/315/317/336/342/352/359/391/394/395/4 19/428/431/462/470/474/499/522/523;
80/121/174/185/190/193/196/244/273/284/288/289/290/293/297/313/315/317/324/336/342/352/359/376/3 80/391/394/401/415/419/428/431/435/441/462/470/474/499/522/523;
80/121/174/185/190/193/244/273/284/288/289/290/293/297/313/315/317/336/342/352/359/391/394/415/4 19/428/431/462/470/474/499/522/523;
80/121/174/185/190/236/244/273/282/284/288/289/290/293/313/315/317/336/342/352/359/391/394/395/4 19/428/431/462/470/474/499/522/523;
80/121/174/185/190/244/273/284/288/289/290/293/313/315/317/336/342/352/359/391/394/419/428/431/4 62/470/474/499/522/523;
80/121/174/185/190/244/273/284/288/289/290/293/313/315/317/336/342/359/391/394/428/431/462/470/4 74/499/522/523;
80/121/174/185/190/244/284/288/289/290/293/313/315/317/336/342/352/359/391/394/419/428/431/462/4 70/474/499/522/523;
80/121/174/185/190/244/284/288/289/290/293/313/315/317/336/342/352/359/391/394/428/431/462/470/4 74/499/522/523;
80/121/174/185/190/244/284/288/289/290/293/313/315/317/336/342/359/391/394/428/431/462/470/474/4 99/522/523;
80/121/185/190/196/244/289/290/293/313/315/317/336/342/359/391/470/474/499/522/523;
80/121/185/190/201/289/290/293/313/342/470/474/499/522;
80/121/185/190/244/273/289/290/293/313/315/317/336/342/352/359/391/419/435/470/474/499/522/523;
80/121/185/190/244/289/290/293/300/313/315/317/336/342/359/391/470/474/499/522/523;
80/121/185/190/244/289/290/293/313/315/317/336/342/359/380/391/401/419/470/474/499/522/523;
80/121/185/190/244/289/290/293/313/315/317/336/342/359/391/392/470/474/499/522/523;
80/121/185/190/244/289/290/293/313/315/317/336/342/359/391/395/470/474/499/522/523;
80/121/185/190/244/289/290/293/313/336/342/359/391/414/470/474/499/522/523;
80/121/185/190/289/290/293/313/336/342/359/391/470/474/499/522/523;
80/121/190/289/290;
80/185/236/289/293;
121/185/190/213/289/290/293; and
185/289/290/293.

3. The engineered terminal deoxynucleotidyl transferase of claim 1, wherein the polypeptide sequence comprises at least one substitution set comprising substitutions as compared to the reference sequence of SEQ ID NO: 36 at amino acid positions selected from:
174/244/273/284/288/315/317/336/352/359/391/394/419/428/431/462/470/474/522/523;
174/244/284/288/315/317/336/359/391/394/428/431/462/470/474/522/523;
244/315/317/336/359/391/470/474/522/523; and
336/359/391/470/474/522/523; and/or any combination thereof.

4. The engineered terminal deoxynucleotidyl transferase of claim 1, wherein the polypeptide sequence comprises at least one substitution or substitution set comprising substitutions as compared to the reference sequence of SEQ ID NO: 8 at amino acid positions selected from:
129/196, 173, 183, 186, 193, 195, 196, 263, 266, 268, 281, 282, 297, 300, 303, 316, 318, 320, 324, 343, 360, 392, 395, 397, 411, 415, 417, 421, 454, 456, 477, 481, and 492, and/or any combinations thereof.

5. The engineered terminal deoxynucleotidyl transferase of claim 1, wherein the polypeptide sequence comprises at least one substitution or substitution set comprising substitutions as compared to the reference sequence of SEQ ID NO: 16 at amino acid positions selected from:
186, 186/236/318, 186/236/395, 186/282/318, 193/196, 193/196/266/324/376/380, 193/196/297, 193/196/297/324/376/380/401/415/435/441, 193/196/324, 193/196/324/397/401/441, 193/196/376/380, 193/297/324/376/435, 193/297/324/380, 193/297/415, 193/435, 196, 196/266, 196/266/324/397/401, 196/297/324/435, 236/282, 236/282/395, 236/318/481, 266/297/380/397/401, 282, 282/318, 282/481, 297/380/401/441, 297/435, 318/395, 376/401/441, 415, and 435/441, and/or any combinations thereof.

6. The engineered terminal deoxynucleotidyl transferase of claim 1, wherein the polypeptide sequence comprises at least one substitution or substitution set comprising substitutions as compared to the reference sequence of SEQ ID NO: 24 at amino acid positions selected from: 12, 13, 14, 17, 18, 20, 21, 22, 23, 24, 26, 27, 29, 30, 31, 33, 34, 35, 37, 41, 53, 57, 58, 61, 92, 94, 97, 101, 102, 103, 104, 105, 106, 107, 108, 124, 126, 133, 135, 137, 138, 139, 140, 141, 142, 144, 145, 147, 149, 150, 152, 153, 154, 155, 156, 156/294, 159, 160, 161, 162, 163, 7/135, 12, 13, 14, 15, 16, 17/131, 18, 20, 23, 24, 25, 26, 27, 28, 29, 31, 32, 33, 34, 35, 44, 45, 46, 57, 65, 77, 85, 89, 93, 94, 97, 101, 102, 103, 105, 106, 108, 109, 110, 119, 123, 124, 126, 130, 131, 132, 133, 134, 135, 137, 138, 139, 149, 150, 153, and 156, and/or any combinations thereof.

7. The engineered terminal deoxynucleotidyl transferase of claim 1, wherein the polypeptide sequence comprises at least one substitution or substitution set comprising substitutions as compared to the reference sequence of SEQ ID NO: 268 at amino acid positions selected from: 14/53/300, 14/53/419, 106/300/415/419/456, 140, and 300/395/419, and/or any combinations thereof.

8. The engineered terminal deoxynucleotidyl transferase of claim 1, wherein the polypeptide sequence comprises at least one substitution or substitution set comprising substitutions as compared to the reference sequence of SEQ ID NO: 648 at amino acid positions selected from: 12/14/34, 12/14/34/37/94/140/141/145, 12/14/34/37/106/140/142/150/152/153, 12/14/34/37/141/142, 12/14/34/37/142/145, 12/14/34/37/142/161, 12/14/34/37/150, 12/14/34/37/150/153, 12/14/34/140/142, 12/14/34/140/150, 12/14/34/142/150/153, 12/14/92/94, 12/14/94/150/152, 12/14/106/107/141/142, 12/14/106/108/140/141/145/150, 12/14/106/108/152, 12/14/141/142, 12/14/150/152/153, 12/14/153, 12/34/92/140, 12/34/150/152, 12/37/94/141/150/152/153, 12/37/140/141/150/162, 12/161, 14, 14/31/34/37/140/141/145/161/162, 14/34/37, 14/34/37/145, 14/34/37/152, 14/34/94/106/108/141, 14/34/150/153, 14/106, 14/140, 14/141/161, 14/142, 14/142/161/162, 14/153, 14/161, 20/21/24/33/58/104/106/124/155/156, 20/21/33/58/101/104/106/124/155, 20/21/58/104/106/155/156, 20/33/104/106/124/156, 20/58/101/104/106/156, 20/58/101/106, 20/101/106/156, 21/33/58/101/106, 21/33/58/106/155/156, 21/33/101/104/106, 21/33/106, 21/58/101/104/106/155, 21/58/106/155/156, 21/101/104/106/156, 21/104/106, 21/104/106/124, 21/104/106/156, 30/33/58/104/106/155/156, 30/33/101/106/156, 30/33/104/106/155/156, 30/101/104/106/155/156, 30/104/106/155, 30/104/106/155/156, 30/106/155, 33/58/104/106, 33/101/104/106/155, 34/37, 34/37/92, 34/37/140/141/142/145, 34/37/141/142, 34/37/150/153, 34/92/94/141/142, 34/141/142/145, 34/150/152/153, 37/92/142, 37/141/142, 37/153, 58/101/104/106/156, 58/101/106/155, 58/104/106/155/156, 92/94/106/142/145, 101/104/106, 101/104/106/155/156, 101/104/106/156, 101/106, 101/106/124/155, 101/106/155/156, 104/106, 104/106/124, 104/106/155, 104/106/155/156, 104/106/156, 106/107/108/142/220, 106/108/140/141/152/153, 106/108/140/142/150/153, 106/156, 140/141/142, 140/145, 140/145/150/152, 141, 141/152, and 161, and/or any combinations thereof.

9. The engineered terminal deoxynucleotidyl transferase of claim 1, wherein the polypeptide sequence comprises at least one substitution or substitution set comprising substitutions as compared to the reference sequence of SEQ ID NO: 660 at amino acid positions selected from: 16/29/30, 16/29/30/33/153, 16/29/30/101/104, 16/30/104, 16/33, 29/30, 58, 92/94/108/141/155/392, 92/101/137/155/476, 94/101/156/476, 101, 101/104, 101/137/155, 101/141/155/156, 108, 195, 197, 204/342, 205, 236/297, 258, 261, 262, 264, 268, 269, 276, 278, 280, 281, 282, 290, 291, 297, 300, 303, 306, 308, 309, 310, 312, 315, 316, 342, 344, 353, 360, 385, 391, 410, 413, 419, 421, 448, 454, 456, 473, 476, 515, 525, and/or any combinations thereof.

10. The engineered terminal deoxynucleotidyl transferase of claim 1, wherein the polypeptide sequence comprises at least one substitution or substitution set comprising substitutions as compared to the reference sequence of SEQ ID NO: 882 at amino acid positions selected from 175, 179, 196, 199, 201, 203, 208, 272, 273, 275, 313, 314, 317, 319, 321, 322, 324, 325, 329/462, 350, 376, 379, 394, 397, 403/462, 404, 406, 408, 457, 461, 462, 469, 477, 481, 484, 491, 492, and 495, and/or any combinations thereof, wherein the amino acid positions are numbered with reference to SEQ ID NO: 882.

11. The engineered terminal deoxynucleotidyl transferase of claim 1, wherein the polypeptide sequence comprises at least one substitution or substitution set comprising substitutions as compared to the reference sequence of SEQ ID NO: 1100 at amino acid positions selected from 101/137/264/476/525 and 264, and/or any combinations thereof.

12. The engineered terminal deoxynucleotidyl transferase of claim 1, wherein the polypeptide sequence comprises at least one substitution or substitution set comprising substitutions as compared to the reference sequence of SEQ ID NO: 1336 at amino acid positions selected from 61, 152/503, 160, 162, 165, 177, 200, 200/425, 213, 217, 219, 223, 236, 246, 248, 292, 292/411, 295, 326, 329, 330, 333, 334, 338, 340, 340/438, 363, 369, 370, 372, 373, 383, 400/401/402, 425, 427, 435, 435/503, 437, 440, 441, 442, 443, 444, 446, 459, 460, 488, 490, 501, 502, 503, 504, and 506, 15/199/203/394, 15/199/394, 28/344/353/395, 195/199/203/278/297/394, 195/199/203/278/314/353/394, 195/203/278/394/395, 195/203/297/314/394, 195/203/297/394/419, 195/203/394, 195/278/297/394, 195/278/297/394/395, 195/314/344, 195/394/395, 199/203/297/394/395, 203/278/297/394, 203/297/314/394/395, 203/310/314/394/395/419, 203/344/394, 203/353, 203/394, 203/394/395, 297/394, 314/394/395, 344/394/395, 353, and 394, and/or any combinations thereof.

13. The engineered terminal deoxynucleotidyl transferase of claim 1, wherein the polypeptide sequence comprises at least one substitution or substitution set comprising substitutions as compared to the reference sequence of SEQ ID NO: 1348 at amino acid positions selected from 3/175/213/313/325/340/457/481/485, 3/307/321/340/353/406/408/445, 148/175/201/457/485, 175/201/333/412/425/457/485, 175/325/397, 175/333, 175/333/369/481, 175/333/485, 175/485, 199/307/321/340/406/408/445/484, 201/213/333/344/397/425/481/485, 201/333/344/457/481, 201/333/481, 201/406/408/462/484/502, 213, 213/333/397, 307/333/340/408/445/462/502, 307/373/406/408/484, 321/333/340, 325/333/369/425, 325/425/457/481, 333, 333/344/369/397, 333/344/369/485, 340/484, 344/485, 353/406, 373, and 406/408, and/or any combinations thereof.

14. The engineered terminal deoxynucleotidyl transferase of claim 1, wherein the polypeptide sequence comprises at least one substitution or substitution set comprising substitutions as compared to the reference sequence of SEQ ID NO: 1596 at amino acid positions selected from 161, 162, 163, 165, 171, 177, 179, 188, 200, 205, 208, 231, 233, 251, 252, 253, 260, 261, 277, 306, 307, 321, 325, 327, 329, 330, 353, 368, 370, 371, 376, 380, 382, 393, 400, 402, 405, 406, 407, 408, 410, 413, 414, 419, 426, 441, 442, 446, 460, 464, 484, 488, 490, 495, 506, 508, 518, 520, 160/219/460/503/506, 160/165/203/205/219/353/406/408/442/446/460/488, 160/165/205/219/406/408/441/442/446, 160/203/205/406/408/441/442/446, 160/219/330/406/408/442/446/484, 205/307/406/408/441/442/446/460/488, 252/333, 406/408/441/442/446, 406/408/442/446219/307/326, 406/408, 406/408/442/446, and 406/408/490, and/or any combinations thereof.

15. The engineered terminal deoxynucleotidyl transferase of claim 1, wherein the polypeptide sequence comprises at least one substitution or substitution set comprising substitutions as compared to the reference sequence of SEQ ID NO: 1654 at amino acid positions selected from 14/53/300, 14/53/419, 106/300/415/419/456, 140, 160, 160/163/165/203/205/219/353/414/441/460/488, 160/165/203/205/219/353/460/488, 160/165/179/203/205/208/219/353/376/413/414/441/488, 160/165/179/203/307/376/413/495, 160/165/203/205/219/353/460/488, 160/165/203/205/307/371/376/413/414, 160/165/203/208/371/376/413/414, 160/165/205, 160/165/205/208, 160/165/205/219/441, 160/165/205/414/441/495, 160/165/307/353/413/414/441/488/495, 160/179/203/205/208/219/371/414/484/506, 160/179/208/219/307/413/414/503/506, 160/179/208/307/371/376/414, 160/179/307/376/441/488/503, 160/203/205/208/219/414/460/506, 160/203/205/208/413/460/484/488, 160/203/205/441, 160/203/208/307/353/495, 160/203/208/371/413/414, 160/203/208/413/414/441/484, 160/203/326/353/413/414/484/495, 160/205/208/219/326/441/484/488/503, 160/208/326/376/414/441/484/488, 160/208/371/441/484/506, 160/208/414/441/452/480/488/495, 160/219/307/371/506, 160/219/330/484, 165/179/203/205/219/414/418/441/488/503, 165/179/203/205/484/503, 165/179/205/413/441, 165/179/208/353/413/414/503, 165/203/205, 165/203/205/307/414/441/484/495/503/506, 165/203/205/484/488, 165/203/208/326/376/503, 165/205, 165/208/326/413/414/484/495/506, 179, 179/203/205, 179/203/208/326/353/376/484, 179/205/208/353/414/441/460/484/488, 179/205/353, 179/208/353/460, 179/353, 203/205/208/307/330/353/441/460/503/506, 203/205/208/307/441, 203/205/208/353, 203/208/219/376/441, 203/208/219/441, 203/208/326/353, 203/413/503/506, 205/208/307/353/376/413, 205/208/414, 205/219/307/353, 205/307, 205/307/376/414/441/495, 205/307/441/460/488, 205/326/488/503/506, 208/488/506, 300/395/4193/160/205/208/219/307/353/371/376/413/414/441/488, 326/353/371/376/414, and 441, and/or any combinations thereof.

16. The engineered terminal deoxynucleotidyl transferase of claim 1, wherein the polypeptide sequence comprises at least one substitution or substitution set comprising substitutions as compared to the reference sequence of SEQ ID NO: 1830 at amino acid positions selected from 163/179/277/338/340, 163/414/441, 171/200/334/406/490, 177, 194, 196, 266, 267, 268, 269, 273, 273/501, 274, 277, 278, 292/406, 297, 298, 299, 301, 302, 309, 312, 347, 359, 390, 392, 394, 407, 408, 413, 416, 454, 468, 473, 477, 479, and 493, and/or any combinations thereof.

17. The engineered terminal deoxynucleotidyl transferase of claim 1, wherein the polypeptide sequence comprises at least one substitution or substitution set comprising substitutions as compared to the reference sequence of SEQ ID NO: 1950 at amino acid positions selected from 163/169, 185, 186, 192, 193, 194, 197, 198, 245, 251, 258, 259, 261, 263, 271, 274, 278, 280, 284, 286, 290, 291, 297, 304, 306, 308, 316, 347, 352, 359, 362, 378, 393, 396, 398, 399, 405, 407, 409/414, 410/414, 411/414, 413/414, 414, 414/415, 414/417, 415, 455, 465, 466, 468, 494, and 509, and/or any combinations thereof.

18. The engineered terminal deoxynucleotidyl transferase of claim 1, wherein the polypeptide sequence comprises at least one substitution or substitution set comprising substitutions as compared to the reference sequence of SEQ ID NO: 2008 at amino acid positions selected from 3, 8, 9, 11, 12, 15, 16, 26, 26/27, 36, 38, 39, 50, 58, 62, 70, 76, 79, 81, 90, 116, 147, 151, 157, 158, 158/274/411/413/414, 185/274/413/414, 185/411/413/414, 189, 196, 205, 206, 246, 248, 249, 253, 255, 262, 263/411/413/414/468, 263/413/414, 274/286/411/413/417/468, 274/411/417/468, 274/411/468, 274/413/414/417/468, 274/468, 278/411/413/468, 307, 314, 318, 324, 353, 397, 408, 410, 411/413/417, 411/413/417/468, 411/413/468, 411/414, 413, 413/414, 413/414/468, 413/417/468, 413/468, 414, and 468, 469, 473, 480, 481, 491, and 493, and/or any combinations thereof.

19. The engineered terminal deoxynucleotidyl transferase of claim 1, wherein the polypeptide sequence comprises at least one substitution or substitution set comprising substitutions as compared to the reference sequence of SEQ ID NO: 2254 at amino acid positions selected from 197/407/455, 197/455, 284/398/466, 362/407/455, 396/398/410/466, 398/466, 399/411/416, and 466, and/or any combinations thereof.

20. The engineered terminal deoxynucleotidyl transferase of claim 1, wherein the polypeptide sequence comprises at least one substitution or substitution set comprising substitutions as compared to the reference sequence of SEQ ID NO: 2514 at amino acid positions selected from 26/90/94/248/261/266/362/455, 26/90/246, 26/90/246/248, 26/90/246/248/261, 26/90/246/248/362/455, 26/90/246/248/455, 26/90/246/266/362, 26/90/246/362, 26/90/246/455, 26/90/248, 26/90/248/266/455, 26/90/248/455, 26/90/248/455/459, 26/90/266, 26/90/362/455, 26/173/248, 26/246, 26/246/248/362, 26/246/248/362/455, 26/246/248/455, 26/248, 26/248/261/266, 26/248/261/266/362/455, 26/248/266/362, 26/248/362/455, 26/248/455, 26/362, 26/362/455, 58/197/249/407/410, 62/249, 90/246/248, 90/246/248/261/266/362/455, 90/246/248/266/362/455, 246/248, 246/248/362, 246/266/455, 248, 248/266/362, 248/362/455, 248/455, and 362, and/or any combinations thereof.

21. The engineered terminal deoxynucleotidyl transferase of claim 1, wherein the polypeptide sequence comprises at least one substitution or substitution set comprising substitutions as compared to the reference sequence of SEQ ID NO: 2524 at amino acid positions selected from 9/16/62/157/246/249/362, 11/58/227/246, 12/16/158/246/248/249, 30/189/261/266/353/465/468, 47/326, 30/189/266, 30/261/266/353/468, 30/266, 30/266/303, 30/266/353, 38, 38/81/318, 38/197, 39, 39/79, 58/157/158/362, 70/353, 79/81, 81, 189, 189/261, 189/353, 246/249, 261/353, 266/307/353/468, 266/353/468, 266/468, 169, 175, 179, 191/413, 200, 203, 292, 293, 304/329, 325, 327/406, 329, 340, 353/459, 373, 379, 382, 402, 403, 404, 406, 427, 429, 459, 461, 484, 490, 495, 504, 506, and 508, and/or any combinations thereof.

22. The engineered terminal deoxynucleotidyl transferase of claim 1, wherein the polypeptide sequence comprises at least one substitution or substitution set comprising substitutions as compared to the reference sequence of SEQ ID NO: 2638 at amino acid positions selected from 11/30/79/189/480, 30/58/79/189/307/480, 79/189/307/410, and 79/307, and/or any combinations thereof.

23. The engineered terminal deoxynucleotidyl transferase of claim 1, wherein the polypeptide sequence comprises at least one substitution or substitution set comprising substitutions as compared to the reference sequence of SEQ ID NO: 2804 at amino acid positions selected from 169/304/340/402/427, 169/304/340/427/429/504, 169/304/340/429/506, 169/304/340/504, 169/304/402/403/427/506, 169/304/403/427/504, 169/304/427/504/506, 169/304/504, 169/340/402/403/427/429/504, 169/340/402/403/427/504/506, 169/340/402/504, 169/340/427, 169/340/506, 169/402/403/504/506, 169/402/427/429/504, 169/402/504, 169/402/504/506, 169/403/427/506, 266/327/329/404/410, 292/327/329/468, 304, 304/340/402, 304/340/402/403/427/429/504/506, 304/340/402/403/504/506, 304/340/402/403/506, 304/340/402/427/504/506, 304/340/402/506, 304/340/403/427/429/504/506, 304/340/427, 304/402/403, 304/402/403/427/504, 304/402/403/429, 304/402/403/504/506, 304/402/403/506, 304/403/504, 304/504, 304/504/506, 327, 327/329, 327/329/379/404/406/410, 327/329/404/410, 327/329/465/484, 327/382/406/410/484, 327/410/484, 340, 340/402/403, 340/402/427/429/506, 340/402/429/504/506, 340/402/504, 340/403/504, 340/504, 340/506, 379/382/468, 379/404/410, 379/410, 379/465/468/484, 379/468, 402/403/427/504/506, 402/403/429/504, 402/427/504, 402/504, 403/427, 427, 484, 504, 504/506, and 506, and/or any combinations thereof.

24. The engineered terminal deoxynucleotidyl transferase of claim 1, wherein the polypeptide sequence comprises at least one substitution or substitution set comprising substitutions as compared to the reference sequence of SEQ ID NO: 2812 at amino acid positions selected from 30, 186, 188, 198, 231, 233, 235, 243, 248, 253, 264, 266, 278, 287, 297/440, 326, 366, 367, 368, 370, 396, 414, 433, 435, 437, 439, 442, 444, 446, 485, 499, 503, 515, 520, 525, 30/179/200/373/403, 30/179/373/379, 30/184/246/325/379/429/495, 30/184/246/327/329/459, 30/184/246/379/404, 30/184/246/459/461/495/500/504, 30/200/373, 30/200/373/379, 30/246/325/327/329/404/461, 30/246/325/379/404/427/429/461, 30/246/427/459/461, 30/325/327, 30/325/327/379/404/429/495, 30/327/404/504, 30/329/379, 30/373, 30/373/403, 30/379/429/459/461, 30/379/459/461/504, 30/403/441/460, 200/373/379, 246/325/329/379/461, 246/327/404/461/495, 327/329/379/504, 327/459/461/495, 353/403, 373/379, 373/379/403, 379/403/406/468, and 403/441, and/or any combinations thereof.

25. The engineered terminal deoxynucleotidyl transferase of claim 1, wherein the polypeptide sequence comprises at least one substitution or substitution set comprising substitutions as compared to the reference sequence of SEQ ID NO: 2956 at amino acid positions selected from 140/142/153/177/427/434/441/444/461/502, 140/142/153/427/484, 140/142/177, 140/142/177/441, 140/142/365/373/404/427/484, 140/142/373/427/484, 140/148/161/177/404, 140/150/153/365/373/427/484, 140/150/177/404/436/441/484/502, 140/161/177/404/427/484, 140/177/404, 140/177/404/484, 142/150/158/177/427/445, 142/150/177/404, 142/153/177/441/444, 142/177/373, 142/177/373/441, 142/461/484/502, 150/177, 153, 153/161/325/404/427/441/484, 153/484, 177, 177/365/427/434, 325/427, 427, and 484, and/or any combinations thereof.

26. The engineered terminal deoxynucleotidyl transferase of claim 1, wherein the polypeptide sequence comprises at least one substitution or substitution set comprising substitutions as compared to the reference sequence of SEQ ID NO: 3174 at amino acid positions selected from 122/473, 189, 190, 193, 194, 196, 263, 264, 266, 267, 268, 269, 273, 273/501, 274, 278, 279, 281, 297, 298, 299, 300, 301, 302, 304, 309, 312, 315, 347, 350, 352, 353, 359, 390, 392, 394, 407, 408, 410, 411, 413, 414, 416, 436, 454, 468, 472, 473, 477, 479, 480, 493, 186/188/248/253/365/366/444/445, 186/231/248/253/484, 186/231/248/365/366/368/484, 186/231/248/366/368/444, 186/231/248/484, 186/231/368/416/441/442/444/484/485, 186/231/441/444/445, 186/484/485, 188/231/248/253/365/441/442/444/445/484, 198/243/264/431/441, 198/243/396/414/431/433/441/499, 198/243/396/414/433/437/441/515, 198/264/266/414, 198/264/396/414/433/441/515, 198/266/396/414/433/441/499/501, 198/266/414/433/441/515, 198/266/437/441/499, 198/414/431/441/499/520, 198/414/433/441/515/520, 231/248/441/484, 243/264/515/520, 243/396/414/433/441/515/520, 243/414/433/437/441, 243/414/437/441/515, 248/442/444/445/484, 264/266/396/414/433/441/515, 264/266/414/441/499/501/515/520, 264/414, 264/414/441, 264/433/441, 266/437/441/499/515/520, 365/366/441/484/485, 396/414/441, 396/414/441/515, and 414/441/520, and/or any combinations thereof.

27. The engineered terminal deoxynucleotidyl transferase of claim 1, wherein the polypeptide sequence comprises at least one substitution or substitution set comprising substitutions as compared to the reference sequence of SEQ ID NO: 3222 at amino acid positions selected from 186/194/248/396, 186/198/243/248/366/368/394/501, 186/231/243/368/394/485/499, 186/231/248/485, 186/231/366/368/394/485, 186/243, 186/243/248/366/368/394, 186/243/248/394/484/485, 186/243/484/520, 186/248, 186/365, 186/365/366/368/394/499, 186/365/366/394/485, 186/366/368/394/396/484, 186/366/368/394/396/484/485, 186/394/396/485, 194/198/243/366/368/499, 194/515/520, 198/231/243/248/485, 198/243/248/365/394/501, 198/248/394/396/484/485/499, 198/394/396/484/485/499, 198/394/396/499/515/520, 198/394/499/501, 231/365/368/394/499/520, 231/368/394, 231/484/485/499/501, 243/248/394/396/484/485, 243/484, 243/484/485/499, 248/365/366/368/394/484/520, 248/394/484, 365/366/368/394, 365/368/394/396/520, 394/396, and 394/499, and/or any combinations thereof.

28. The engineered terminal deoxynucleotidyl transferase of claim 1, wherein the polypeptide sequence comprises at least one substitution or substitution set comprising substitutions as compared to the reference sequence of SEQ ID NO: 3670 at amino acid positions selected from 168, 198, 267, 273, 273/493, 273/493/499, 273/309/493/499, 273/309/413/499, 273/499, 274/299/408/416, 274/408/416, 274/416, 288/299/416, 298/299/416, 301, 303/396, 307, 308, 308/361, 309, 309/413, 309/499, 313, 372, 392, 397, 413, 413/493/499, 413/499, 415, 416, 419, 451, 452, 456, 472, 473, 475, 493/499, and 528, and/or any combinations thereof.

29. The engineered terminal deoxynucleotidyl transferase of claim 1, wherein the polypeptide sequence comprises at least one substitution or substitution set comprising substitutions as compared to the reference sequence of SEQ ID NO: 3674 at amino acid positions selected from 194/196/390, 194/196/390/394/460/480, 194/196/390/394/480, 194/196/390/454/480, 194/196/390/480, 194/196/394/454/480, 194/196/454, 194/390, 194/394, 194/394/454, 194/394/454/480, 196, 196/390, 196/390/394, 196/390/394/454, 196/390/394/454/480, 196/390/394/480, 196/390/454, 196/394, 196/394/454, 196/394/454/480, 196/394/480, 196/454, 297/470/473, 297/473/493, 390, 390/394, 390/394/454, 390/394/454/480, 390/394/480, 390/454, 390/480, 394, 394/480, and 454, and/or any combinations thereof.

30. The engineered terminal deoxynucleotidyl transferase of claim 1, wherein the polypeptide sequence comprises at least one substitution or substitution set comprising substitutions as compared to the reference sequence of SEQ ID NO: 3796 at amino acid positions selected from 198, 198/267/313/451/475/494/499, 198/267/314/451, 198/267/314/475, 198/267/409/451, 198/267/475, 198/451/493, 208/308, 208/308/461, 267, 267/314/328/451/494/499, 267/451, 267/451/494/499, 308, 314/328/451/499, 314/451, 328/409/451, 328/451, 409, 409/475/494, 451, 451/493/494, 451/493/499, 451/494, and 475, and/or any combinations thereof.

31. The engineered terminal deoxynucleotidyl transferase of claim 1, wherein the polypeptide sequence comprises at least one substitution or substitution set comprising substitutions as compared to the reference sequence of SEQ ID NO: 2 or 660 at amino acid positions selected from 26, 30, 38, 79, 81, 90, 92, 94, 101, 108, 137, 140 141, 142, 153, 155, 160, 163, 165, 177, 184, 189, 194, 196, 201, 203, 205, 213, 219, 231, 246, 248, 258, 263, 264, 266, 267, 301, 304, 307, 314, 318, 325, 333, 340, 344, 353, 362, 379, 390, 392, 394, 395, 396, 397, 398, 402, 403, 406, 408, 410, 411, 413, 414, 416, 425, 427, 429, 433, 434, 441, 442, 444, 446, 451, 455, 460, 461, 466, 468, 476, 481, 484, 485, 488, 495, 499, 501, 502, 506, 515, 525, 26/30/38/79/81/90/92/94/101/108/137/140/141/142/153/155/160/163/165/177/184/189/194/196/201/203/205/213/219/231/248/258/263/264/266/267/301/304/307/314/318/325/333/340/344/353/362/379/390/392/394/395/397/398/402/403/406/408/410/4 11/413/414/416/425/427/429/433/434/441/442/444/446/451/455/460/461/466/468/476/481/484/485/488/495/499/501/502/506/515/525, 26/30/38/79/81/90/92/94/101/108/137/140/141/142/153/155/160/163/165/177/184/189/201/203/205/213/219/231/248/258/263/264/266/304/307/314/318/325/333/340/344/353/362/379/392/394/395/397/398/402/403/406/408/410/411/413/414/416/425/4 27/429/433/434/441/442/444/446/455/460/461/466/468/476/481/484/485/488/495/499/501/502/506/515/525, 26/38/79/81/90/92/94/101/108/137/141/155/160/163/165/189/201/203/205/213/219/246/248/258/263/264/304/307/314/318/333/340/344/353/362/392/394/395/396/397/398/402/403/406/408/410/411/413/414/425/441/442/446/455/460/461/466/468/476/ 481/485/488/506/525, 92/94/101/108/137/141/155/160/163/165/201/203/205/213/219/258/263/264/314/333/344/353/392/394/39 5/397/406/408/411/413/414/425/441/442/446/460/461/468/476/481/485/488/525, and 92/94/101/108/137/141/155/201/213/264/314/333/344/392/394/395/397/406/408/425/442/446/461/476/48 1/485/525, and/or any combinations thereof.

32. The engineered terminal deoxynucleotidyl transferase of claim 1, wherein the polypeptide sequence comprises at least one substitution or substitution set comprising substitutions as compared to the reference sequence of SEQ ID NO: 3870 at amino acid positions selected from 165, 169, 171, 173, 175, 176, 179, 183, 187, 191, 192, 195, 197, 199, 200, 203, 204, 210, 257, 259, 267, 291, 293, 295, 301, 319, 325, 340, 341, 342, 374, 387, 398, 399, 403, 404, 406, 429, 480, 481, 483, 484, 490, 491,493, 494, 495, 521, 507, 508, 509, and 522, and/or any combinations thereof.

33. The engineered terminal deoxynucleotidyl transferase of claim 1, wherein the polypeptide sequence comprises at least one substitution or substitution set comprising substitutions as compared to the reference sequence of SEQ ID NO: 3918 at amino acid positions selected from 3, 7/400/459/504, 164, 173/367/459/500, 184, 203, 203/367/459, 203/367/459/500/501, 203/400/459/501, 203/459, 203/459/499/504, 203/459/500, 215, 218, 294, 335, 335/402/481/484, 335/402/512, 335/481/484, 335/481/493, 335/481/512, 336, 338, 339, 367, 367/459/500, 370, 373, 376, 380, 384, 390, 395, 395/402, 395/402/481/484, 395/481, 395/481/512, 395/484, 400, 400/459, 400/459/499/500/504, 400/459/500/501, 400/459/501/504, 400/501, 400/504, 402, 402/481, 402/481/484, 402/481/484/512, 402/481/493, 402/484/493, 402/512, 458, 459, 459/501, 460, 481, 481/512, 484, 485, 493, 499, 500, 501, 504, 512, 515, and 516, and/or any combinations thereof.

33. The engineered terminal deoxynucleotidyl transferase of claim 1, wherein the polypeptide sequence comprises at least one substitution or substitution set comprising substitutions as compared to the reference sequence of SEQ ID NO: 4266 at amino acid positions selected from 95/428/480, 163/190, 163/203/366, 163/328/363/480, 163/363/480/485, 172/174/178/340, 178, 188, 190/202/203/363/366/480/483/485, 190/202/203/480, 190/480/485, 192, 192/498/499/503, 202, 202/203/328/362/363/366/428/480/485/498/499/503, 202/203/485, 203/328/363/428/483, 203/328/428, 203/328/480/485, 203/362/366, 203/498/499/503, 272, 280, 280/498/499/503, 296, 297, 299, 299/498/499/503, 301, 301/503, 308, 308/503, 311, 328/428, 328/480/483, 328/485, 343, 346, 349, 358, 359/498/499/503, 362/363, 362/363/366/428/480/483/498/499/503, 392/498/499/503, 406, 407, 410, 411, 418/498/499/503, 418/503, 419/503, 465, 471, 472/498/499/503, 473, 480/483, 491, and 498/499/503, and/or any combinations thereof.

34. The engineered terminal deoxynucleotidyl transferase of claim 1, wherein the polypeptide sequence comprises at least one substitution or substitution set comprising substitutions as compared to the reference sequence of SEQ ID NO: 4558 at amino acid positions selected from 94/365/367, 172/174/178/401/403, 172/174/178/401/403/507, 172/174/178/402/508, 172/174/401/403/507, 172/178, 172/178/401, 174/178, 178/401/403, 178/402/403, 318/375/380, 324/379/405/483, 340, 340/394, 365, 365/367/428, 365/389/394, 367, 375/376, 375/379/483, 375/380, 375/380/400/483, 375/380/483, 376/483, 379/483, 389/394, 394, 401, 401/402/403/507, 402/403, 405/483, and 483, and/or any combinations thereof.

35. The engineered terminal deoxynucleotidyl transferase of claim 1, wherein the polypeptide sequence comprises at least one substitution or substitution set comprising substitutions as compared to the reference sequence of SEQ ID NO: 4442 at amino acid positions selected from 174/296/299, 182, 185/190, 189/190, 190, 190/193, 192/280, 192/402/507, 257, 259, 260, 281, 289, 296/299, 305, 306, 307, 308, 312, 313, 316, 318, 327, 374, 381, 394, 395, 402, 402/507, 404, 405, 414, 432, 451, 455, 460, 461, 476/480, 480, 480/481, 493, 494, and 522, and/or any combinations thereof.

36. The engineered terminal deoxynucleotidyl transferase of claim 1, wherein the polypeptide sequence comprises at least one substitution or substitution set comprising substitutions as compared to the reference sequence of SEQ ID NO: 4654 at amino acid positions selected from 190, 190/197/308, 190/308/380/405, 190/375, 190/375/380, 190/380/405, 190/405/406, 272/301/393/394/480, 272/318/480/483, 301/394/480, 318, 375, 375/380, 375/405, 375/405/406, 380, 394, 394/480, and 480/483, and/or any combinations thereof.

37. The engineered terminal deoxynucleotidyl transferase of claim 1, wherein the polypeptide sequence comprises at least one substitution or substitution set comprising substitutions as compared to the reference sequence of SEQ ID NO: 4850 at amino acid positions selected from 189, 189/193/207/307/353, 190/322, 193, 193/307, 261/322/421, 297/298/300/392, 297/300, 297/300/328, 298/300/328, 298/300/328/395, 298/300/360, 298/300/392/395, 298/300/392/395/492, 298/300/395, 298/300/481, 300, 300/392/395, 319, 322, 392, 421, and 492, and/or any combinations thereof.

38. The engineered terminal deoxynucleotidyl transferase of claim 1, wherein the polypeptide sequence comprises at least one substitution or substitution set comprising substitutions as compared to the reference sequence of SEQ ID NO: 4856 at amino acid positions selected from 10/413, 260, 268, 302/307, 317, 353, 354, 362, 364, 392, 393, 394, 395, 397, 402, 404, 412, 413, 419, 436/512, 460, 477, 486, 490, 495, and 518, and/or any combinations thereof.

39. The engineered terminal deoxynucleotidyl transferase of claim 1, wherein the polypeptide sequence comprises at least one substitution or substitution set comprising substitutions as compared to the reference sequence of SEQ ID NO: 4904 at amino acid positions selected from 190, 190/287/300/302, 190/300/477/490, 194/300/302/413, 194/300/302/481, 297/298/308/392/395, 298/392/525, 300, 300/317, 300/490, and 395, and/or any combinations thereof.

40. The engineered terminal deoxynucleotidyl transferase of claim 1, wherein the polypeptide sequence comprises at least one substitution or substitution set comprising substitutions as compared to the reference sequence of SEQ ID NO: 5002 at amino acid positions selected from 11/523, 190/194, 194, 194/198, 202, 208, 264, 273, 273/347/354, 274, 281, 290, 298/300/302, 298/302/392/393/394/433, 298/302/392/394, 298/392/393/394, 298/392/393/394/477, 298/392/394/490, 298/393/394/395/433/477, 298/393/394/477/495, 298/394/433, 300/302/303, 308/402/460, 309, 313, 314, 324, 352, 359, 360, 361, 392/393/394/433, 392/393/394/477, 392/393/394/477/495, 392/393/394/490, 392/394, 392/394/395, 392/394/433/477, 392/394/433/495, 392/394/477/495, 392/394/495, 393/394, 393/394/433/477/490, 394/477, 394/490, 405, 408/413, 411/413, 413, 460/525, 463, 466, 467, 472, 473, 477, 492, 523, and 526, and/or any combinations thereof.

41. The engineered terminal deoxynucleotidyl transferase of claim 1, wherein the polypeptide sequence comprises at least one substitution or substitution set comprising substitutions as compared to the reference sequence of SEQ ID NO: 5028 at amino acid positions selected from 82/194/198/313, 194, 194/198, 194/198/208/313, 194/198/309, 194/198/313, 194/198/411, 194/208/411, 194/309, 194/313, 194/411, 198, 198/208, 198/208/309/411, 198/208/313/411, 273/274, 274, 274/281/526, 274/359/526, 274/523, 309, 309/313/411, 324/526, 411, 466, 466/526, 523, and 526, and/or any combinations thereof.

42. The engineered terminal deoxynucleotidyl transferase of claim 1, wherein the polypeptide sequence comprises at least one substitution or substitution set comprising substitutions as compared to the reference sequence of SEQ ID NO: 5192 at amino acid positions selected from 96/295, 169, 176, 177, 179, 184, 187, 193, 195, 197, 197/307, 198, 199, 200, 203, 292, 295, 300/394, 304, 325, 326, 326/380, 329, 373, 376, 377, 383, 394, 403, 409, 430, 485, 508, and 520/526, and/or any combinations thereof.

43. The engineered terminal deoxynucleotidyl transferase of claim 1, wherein the polypeptide sequence comprises at least one substitution or substitution set comprising substitutions as compared to the reference sequence of SEQ ID NO: 5246 at amino acid positions selected from 177/198/200, 177/200/203, 177/200/203/295, 177/200/295/326, 180, 184/198/200/203/295, 184/200/295/326, 190/198/200/203, 190/200/203/295/380, 190/200/295, 197, 198, 198/200, 198/200/203, 198/200/203/295, 200/326, 200/380, 203, 203/380, 233, 252, 295, 336, 364, 365, 367, 381, 384, 441, 459, and 485, and/or any combinations thereof.

44. The engineered terminal deoxynucleotidyl transferase of any of claims 1-43, wherein the polypeptide sequence further comprises an N-terminal truncation of 1-156 amino acids.

45. The engineered terminal deoxynucleotidyl transferase of any of claims 1-44, wherein the engineered terminal deoxynucleotidyl transferase polypeptide is fused with a second polypeptide; optionally, wherein the second polypeptide has inorganic pyrophosphatase (IPP) activity

46. The engineered terminal deoxynucleotidyl transferase claim 45, wherein the second polypeptide with IPP activity comprises an amino acid sequence selected from SEQ ID NO: 3942 and 3944.

47. The engineered terminal deoxynucleotidyl transferase claim 45, wherein the engineered terminal deoxynucleotidyl transferase polypeptide fused with the second polypeptide comprises a sequence selected from SEQ ID NO: 5468, 5470, 5472, and 5474.

48. The engineered terminal deoxynucleotidyl transferase of any of claims 1-47, wherein said engineered terminal deoxynucleotidyl transferase is capable of template-independent synthesis.

49. The engineered terminal deoxynucleotidyl transferase of any of claims 1-47, having at least one improved property, as compared to a wild-type or reference terminal deoxynucleotidyl transferase or template-independent polymerase.

50. The engineered terminal deoxynucleotidyl transferase of claim 49, wherein said improved property is selected from increased thermostability, increased activity at elevated temperatures, increased soluble expression or isolated protein yield, decreased by-product formation, increased specific activity on one or more NTP-3′-O-RBG or natural or modified NTP substrates, increased incorporation efficiency in extension of oligo acceptor substrates, and increased activity on one or more oligo acceptor substrates.

51. The engineered terminal deoxynucleotidyl transferase of any of claims 1-50, wherein said engineered terminal deoxynucleotidyl transferase comprises increased soluble expression or isolated protein yield as compared to a wild-type or reference terminal deoxynucleotidyl transferase or template-independent polymerase.

52. The engineered terminal deoxynucleotidyl transferase of any of claims 1-51, wherein said engineered terminal deoxynucleotidyl transferase comprises increased thermal stability as compared to a wild-type or reference terminal deoxynucleotidyl transferase or template-independent polymerase.

53. The engineered terminal deoxynucleotidyl transferase of any of claims 1-52, wherein said engineered terminal deoxynucleotidyl transferase comprises increased activity on one or more NTP-3′-O-RBG or natural or modified NTP substrates as compared to a wild-type or reference terminal deoxynucleotidyl transferase or template-independent polymerase.

54. The engineered terminal deoxynucleotidyl transferase of any of claims 1-53, wherein said terminal deoxynucleotidyl transferase is purified.

55. A polynucleotide sequence encoding at least one engineered terminal deoxynucleotidyl transferase of any of claims 1-54.

56. A polynucleotide sequence comprising at least 85%, 90%, 91%, 92%, 93%, 94%, 95%, 96%, 97%, 98%, 99%, or more sequence identity to the reference sequence of SEQ ID NOs: 1, 7, 11, 15, 23, 35, 53, 267, 647, 659, 881, 1099, 1335, 1347, 1595, 1653, 1829, 1949, 2007, 2253, 2513, 2523, 2637, 2803, 2811, 2955, 3173, 3221, 3669, 3673, 3795, 3869, 3917, 4265, 4441, 4653, 4849, 4855, 4903, 5001, 5027, 5191, and 5245, and/or or a functional fragment thereof, wherein said polynucleotide sequence encodes an engineered polypeptide comprising at least one substitution at one or more amino acid positions.

57. The polynucleotide sequence of claim 56, wherein said polynucleotide sequence encodes at least one engineered terminal deoxynucleotidyl transferase comprising a sequence having at least 85%, 90%, 91%, 92%, 93%, 94%, 95%, 96%, 97%, 98%, 99%, or more sequence identity to the reference sequence of SEQ ID NOs: 2, 8, 12, 16, 24, 36, 54, 268, 648, 660, 882, 1100, 1336, 1348, 1596, 1654, 1830, 1950, 2008, 2254, 2514, 2524, 2638, 2804, 2812, 2956, 3174, 3222, 3670, 3674, 3796, 3870, 3918, 4266, 4442, 4654, 4850, 4856, 4904, 5002, 5028, 5192, and 5246.

58. The polynucleotide sequence of claim 56, wherein said sequence comprises SEQ ID NOs: 7, 11, 15, 23, 35, 53, 267, 647, 659, 881, 1099, 1335, 1347, 1595, 1653, 1829, 1949, 2007, 2253, 2513, 2523, 2637, 2803, 2811, 2955, 3173, 3221, 3669, 3673, 3795, 3869, 3917, 4265, 4441, 4653, 4849, 4855, 4903, 5001, 5027, 5191, and 5245.

59. The polynucleotide sequence of claim 56, wherein said polynucleotide sequence is operably linked to a control sequence.

60. The polynucleotide sequence of claim 56, wherein said polynucleotide sequence is codon-optimized.

61. An expression vector comprising at least one polynucleotide sequence of any of claims 55-60.

62. A host cell comprising at least one expression vector of claim 61.

63. A method of producing an engineered terminal deoxynucleotidyl transferase polypeptide in a host cell comprising culturing a host cell of claim 62, under suitable culture conditions, such that at least one engineered terminal deoxynucleotidyl transferase is produced.

64. The method of claim 63, further comprising recovering at least one engineered terminal deoxynucleotidyl transferase from the culture and/or host cells.

65. The method of claim 63 or 64, further comprising the step of purifying said at least one engineered terminal deoxynucleotidyl transferase.

66. A composition comprising at least one engineered terminal deoxynucleotidyl transferase of any of claims 1-54.

67. A method for template-independent synthesis of an oligonucleotide, the method comprising:
a) providing at least one terminal deoxynucleotidyl transferase or template-independent polymerase;
b) providing at least one oligo acceptor substrate, wherein the oligo acceptor substrate comprises a 3′-OH, or an equivalent thereof;
c) contacting the oligo acceptor substrate, the terminal deoxynucleotidyl transferase or template-independent polymerase, and one or more nucleotide triphosphates, modified nucleotide triphosphates, or NTP-3′-O-RBG under conditions sufficient for the addition of the nucleotide, modified nucleotide, or nucleotide-3′-O-RBG to the 3′ end of the oligo acceptor substrate.

68. The method of claim 67, wherein the method further comprises (d) deblocking the oligonucleotide formed in step (c) at the protected 3-O-position of the oligonucleotide product.

69. The method of claim 67 or 68, wherein the method further comprises e) deactivating unreacted nucleotide triphosphates, modified nucleotide triphosphates, or NTP-3′-O-RBGs.

70. The method of any of claims 67-69, wherein the method further comprises an optional step (f) of removing excess nucleoside and/or excess inorganic phosphate or pyrophosphate from the reaction.

71. The method of any of claims 67-70, wherein the method further comprises repeating steps (a)-(c) or (a)-(d) or (a)-(e) or (a)-(f) until a desired oligonucleotide sequence is obtained.

72. The method of any of claims 67-71, wherein the method further comprises (g) cleaving or releasing the growing or completed oligonucleotide chain.

73. The method of any of claims 68-72, wherein step (d) deblocking the oligonucleotide formed in step (c) at the protected 3-O-position and step (e) deactivating the unreacted nucleotide triphosphates, modified nucleotide triphosphates, or NTP-3′-O-RBGs occur simultaneously.

74. The method of any of claims 67-73, wherein a phosphatase is used to deblock the NTP-3′-O-RBG and to deactivate unreacted NTP-3′-O-RBGs by removing at least one of the 5′ phosphates.

75. The method of claim 74, wherein the phosphatase comprises an alkaline phosphatase set forth in SEQ ID NO: 3922, 3924, 3926, 3928, 3930, 3932, or 3934.

76. The method of any of claims 67-75, wherein step (c) optionally includes contacting the oligo acceptor substrate, the terminal deoxynucleotidyl transferase or template-independent polymerase, and either a nucleotide triphosphate, or a modified nucleotide triphosphate, or an NTP-3′-O-RBG with a phosphatase, such as an inorganic pyrophosphatase, to convert pyrophosphate to inorganic phosphate.

77. The method of claim 76, wherein the phosphatase comprises an inorganic pyrophosphatase set forth in SEQ ID NO: 3936, 3938, 3940, 3942, 3944, 3946, or 3948.

78. The method of any of claims 67-77, further comprising an NTP-3′-O-RBG comprising a carbonitrile, phosphate, carbonate, carbamate, ester, ether, borate, nitrate, sugar, phosphoramidate, phenylsulfenate, or sulfate.

79. The method of any of claims 67-78, wherein the nucleotide triphosphate, the modified nucleotide triphosphate, or the NTP-3′-O-RBG comprise a 2′ modification.

80. The method of claim 79, wherein the 2′ modification comprises a 2′-F, 2′-O-alkyl, 2′-O-methoxyethyl, or a locked or constrained ethyl.

81. The method of claim 80, wherein the modification is 2′-F and the 2′ modified nucleotide triphosphate, the modified nucleotide triphosphate, or the NTP-3′-O-RBG is selected from: 2′-fluoro-2′-deoxyadenosine-5′-triphosphate, 2′-fluoro-2′-deoxycytidine-5′-triphosphate, 2′-fluoro-2′-deoxyguanosine-5′-triphosphate, and 2′-fluoro-2′-deoxyuridine-5′-triphosphate.

82. The method of claim 80, wherein the modification is 2′-O-alkyl and the 2′ modified nucleotide triphosphate, the modified nucleotide triphosphate, or the NTP-3′-O-RBG is selected from: 2′-O-methyladenosine-5′-triphosphate, 2′-O-methylcytidine-5′-triphosphate, 2′-O-methylguanosine-5′-triphosphate, 2′-O-methyluridine-5′-triphosphate, and 2′-O-methylinosine-5′-triphosphate.

83. The method of any of claims 67-82, wherein the oligonucleotide chain comprises one or more phosphorothioate linkages.

84. The method of any of claims 67-83, wherein the oligonucleotide, oligonucleotide sequence, or oligonucleotide chain comprises RNA.

85. The method of any of claims 67-84, wherein the oligonucleotide, oligonucleotide sequence, or oligonucleotide chain comprises DNA.

86. The method of any of claims 67-85, wherein the terminal deoxynucleotidyl transferase or template-independent polymerase comprises one or more engineered terminal deoxynucleotidyl transferases.

87. The method of claim 86, wherein the engineered terminal deoxynucleotidyl transferase of any one of claims 1-54.

88. The method of claim 86, wherein the engineered terminal deoxynucleotidyl transferase comprises a polypeptide sequence having at least 85%, 90%, 91%, 92%, 93%, 94%, 95%, 96%, 97%, 98%, 99%, or more sequence identity to a reference sequence of SEQ ID NO: 2, 8, 12, 16, 24, 36, 54, 268, 648, 660, 882, 1100, 1336, 1348, 1596, 1654, 1830, 1950, 2008, 2254, 2514, 2524, 2638, 2804, 2812, 2956, 3174, 3222, 3670, 3674, 3796, 3870, 3918, 4266, 4442, 4654, 4850, 4856, 4904, 5002, 5028, 5192, and/or 5246, or a functional fragment thereof, and comprises an amino acid residue difference or set of amino acid residue differences in its polypeptide sequence relative to the reference sequence, wherein the amino acid residue difference or set of differences is selected from the amino acid differences listed in: Tables 5.1, 6.2, 7.2, 8.2, 9.2, 10.2, 11.2, 12.2, 13.2, 14.2, 15.2, 16.2, 17.2, 18.2, 19.2, 20.2, 21.2, 22.2, 23.2, 24.2, 25.2, 26.2, 26.3, 26.4, 27.2, 27.3, 27.4, 27.5, 28.1, 28.2, 28.3, 29.2, 30.2, 31.2, 32.2, 33.2, 34.2, 35.2, 36.2, 37.2, 38.2, 39.2, 40.2, 41.2, 42.2, 43.2, 44.2, 45.2 46.2, 47.2, 48.2, 49.2, 50.2, 51.2, 52.2, 53.2, 54.2, 55.2, 56.2, 56.3, 56.4, 61.2, 63.2, 64.2, 65.2, 66.2, 67.2, 68.2, 69.2, 70.2, 71.2, 72.2, 73.2, 74.2, 75.2, 76.2, 77.2, 78.2, 79.2, and 80.1.

89. The method of claim 86, wherein the engineered terminal deoxynucleotidyl transferase comprises a polypeptide sequence having at least 85%, 90%, 91%, 92%, 93%, 94%, 95%, 96%, 97%, 98%, 99%, or more, sequence identity to an amino acid sequence selected from the even-numbered sequences SEQ ID NO: 4-1960, 2004-3920, 4048-5466, and 5476.

90. The method of any of claims 67-89, wherein the terminal deoxynucleotidyl transferase or template-independent polymerase is immobilized.

91. The method of claim 90, wherein the method further comprises a column solid support for immobilization of the terminal deoxynucleotidyl transferase or template-independent polymerase.

92. The method of claim 90, wherein the method further comprises a batch method with a solid support for immobilization of the terminal deoxynucleotidyl transferase or template-independent polymerase.

93. The method of any of claims 67-89, wherein the oligoacceptor substrate and subsequent oligonucleotide products are immobilized.

94. The method of any of claims 67-89, wherein neither the oligoacceptor substrate nor the terminal deoxynucleotidyl transferase of template-independent polymerase are immobilized.

95. The method of any claims 67-94, further comprising an aqueous liquid phase.

96. The engineered terminal deoxynucleotidyl transferase of any of claims 1-54, wherein the engineered terminal deoxynucleotidyl transferase is immobilized.
